United States Patent Application Publication US 2011/0177960 A1 - sequence listing, part 24

SEQ ID NO: 430442 - DNA, 25 bp, Artificial
  probe
  misc_feature (1)..(25): SEQ ID NO: 6134; WAN0249BC; Start 17; Stop 41
gtcagtgttttggcattcctagtct

SEQ ID NO: 430443 - DNA, 25 bp, Artificial
  probe
  misc_feature (1)..(25): SEQ ID NO: 6134; WAN0249BC; Start 6; Stop 30
aaacgaaatatgtcagtgttttggc

SEQ ID NO: 430444 - DNA, 25 bp, Artificial
  probe
  misc_feature (1)..(25): SEQ ID NO: 6134; WAN0249BC; Start 16; Stop 40
tgtcagtgttttggcattcctagtc

SEQ ID NO: 430445 - DNA, 25 bp, Artificial
  probe
  misc_feature (1)..(25): SEQ ID NO: 6134; WAN0249BC; Start 5; Stop 29
taaacgaaatatgtcagtgttttgg

SEQ ID NO: 430446 - DNA, 25 bp, Artificial
  probe
  misc_feature (1)..(25): SEQ ID NO: 6134; WAN0249BC; Start 2; Stop 26
ctttaaacgaaatatgtcagtgttt

SEQ ID NO: 430447 - DNA, 25 bp, Artificial
  probe
  misc_feature (1)..(25): SEQ ID NO: 6134; WAN0249BC; Start 4; Stop 28
ttaaacgaaatatgtcagtgttttg

SEQ ID NO: 430448 - DNA, 25 bp, Artificial
  probe
  misc_feature (1)..(25): SEQ ID NO: 6134; WAN0249BC; Start 3; Stop 27
tttaaacgaaatatgtcagtgtttt

SEQ ID NO: 430449 - DNA, 25 bp, Artificial
  probe
  misc_feature (1)..(25): SEQ ID NO: 6135; WAN0249BV; Start 39; Stop 63
accaatatagaccttagaatagcgt

SEQ ID NO: 430450 - DNA, 25 bp, Artificial
  probe
  misc_feature (1)..(25): SEQ ID NO: 6135; WAN0249BV; Start 40; Stop 64
ccaatatagaccttagaatagcgtg

SEQ ID NO: 430451 - DNA, 25 bp, Artificial
  probe
  misc_feature (1)..(25): SEQ ID NO: 6135; WAN0249BV; Start 41; Stop 65
caatatagaccttagaatagcgtgt

SEQ ID NO: 430452 - DNA, 25 bp, Artificial
  probe
  misc_feature (1)..(25): SEQ ID NO: 6135; WAN0249BV; Start 38; Stop 62
aaccaatatagaccttagaatagcg

SEQ ID NO: 430453 - DNA, 25 bp, Artificial
  probe
  misc_feature (1)..(25): SEQ ID NO: 6135; WAN0249BV; Start 46; Stop 70
tagaccttagaatagcgtgtaataa

SEQ ID NO: 430454 - DNA, 25 bp, Artificial
  probe
  misc_feature (1)..(25): SEQ ID NO: 6135; WAN0249BV; Start 45; Stop 69
atagaccttagaatagcgtgtaata

SEQ ID NO: 430455 - DNA, 25 bp, Artificial
  probe
  misc_feature (1)..(25): SEQ ID NO: 6135; WAN0249BV; Start 44; Stop 68
tatagaccttagaatagcgtgtaat

SEQ ID NO: 430456 - DNA, 25 bp, Artificial
  probe
  misc_feature (1)..(25): SEQ ID NO: 6135; WAN0249BV; Start 43; Stop 67
atatagaccttagaatagcgtgtaa

SEQ ID NO: 430457 - DNA, 25 bp, Artificial
  probe
  misc_feature (1)..(25): SEQ ID NO: 6135; WAN0249BV; Start 42; Stop 66
aatatagaccttagaatagcgtgta

SEQ ID NO: 430458 - DNA, 25 bp, Artificial
  probe
  misc_feature (1)..(25): SEQ ID NO: 6135; WAN0249BV; Start 47; Stop 71
agaccttagaatagcgtgtaataaa

SEQ ID NO: 430459 - DNA, 25 bp, Artificial
  probe
  misc_feature (1)..(25): SEQ ID NO: 6135; WAN0249BV; Start 49; Stop 73
accttagaatagcgtgtaataaatg

SEQ ID NO: 430460 - DNA, 25 bp, Artificial
  probe
  misc_feature (1)..(25): SEQ ID NO: 6135; WAN0249BV; Start 50; Stop 74
ccttagaatagcgtgtaataaatga

SEQ ID NO: 430461 - DNA, 25 bp, Artificial
  probe
  misc_feature (1)..(25): SEQ ID NO: 6135; WAN0249BV; Start 48; Stop 72
gaccttagaatagcgtgtaataaat

SEQ ID NO: 430462 - DNA, 25 bp, Artificial
  probe
  misc_feature (1)..(25): SEQ ID NO: 6135; WAN0249BV; Start 70; Stop 94
aatgattttagatgtgccataagcc

SEQ ID NO: 430463 - DNA, 25 bp, Artificial
  probe
  misc_feature (1)..(25): SEQ ID NO: 6135; WAN0249BV; Start 72; Stop 96
tgattttagatgtgccataagccat

SEQ ID NO: 430464 - DNA, 25 bp, Artificial
  probe
  misc_feature (1)..(25): SEQ ID NO: 6135; WAN0249BV; Start 71; Stop 95
atgattttagatgtgccataagcca

SEQ ID NO: 430465 - DNA, 25 bp, Artificial
  probe
  misc_feature (1)..(25): SEQ ID NO: 6135; WAN0249BV; Start 37; Stop 61
aaaccaatatagaccttagaatagc

SEQ ID NO: 430466 - DNA, 25 bp, Artificial
  probe
  misc_feature (1)..(25): SEQ ID NO: 6135; WAN0249BV; Start 69; Stop 93
aaatgattttagatgtgccataagc

SEQ ID NO: 430467 - DNA, 25 bp, Artificial
  probe
  misc_feature (1)..(25): SEQ ID NO: 6135; WAN0249BV; Start 51; Stop 75
cttagaatagcgtgtaataaatgat

SEQ ID NO: 430468 - DNA, 25 bp, Artificial
  probe
  misc_feature (1)..(25): SEQ ID NO: 6135; WAN0249BV; Start 32; Stop 56
gaactaaaccaatatagaccttaga

SEQ ID NO: 430469 - DNA, 25 bp, Artificial
  probe
  misc_feature (1)..(25): SEQ ID NO: 6135; WAN0249BV; Start 73; Stop 97
gattttagatgtgccataagccatc

SEQ ID NO: 430470 - DNA, 25 bp, Artificial
  probe
  misc_feature (1)..(25): SEQ ID NO: 6135; WAN0249BV; Start 60; Stop 84
gcgtgtaataaatgattttagatgt

SEQ ID NO: 430471 - DNA, 25 bp, Artificial
  probe
  misc_feature (1)..(25): SEQ ID NO: 6135; WAN0249BV; Start 59; Stop 83
agcgtgtaataaatgattttagatg

SEQ ID NO: 430472 - DNA, 25 bp, Artificial
  probe
  misc_feature (1)..(25): SEQ ID NO: 6135; WAN0249BV; Start 33; Stop 57
aactaaaccaatatagaccttagaa

SEQ ID NO: 430473 - DNA, 25 bp, Artificial
  probe
  misc_feature (1)..(25): SEQ ID NO: 6135; WAN0249BV; Start 64; Stop 88
gtaataaatgattttagatgtgcca

SEQ ID NO: 430474 - DNA, 25 bp, Artificial
  probe
  misc_feature (1)..(25): SEQ ID NO: 6135; WAN0249BV; Start 63; Stop 87
tgtaataaatgattttagatgtgcc

SEQ ID NO: 430475 - DNA, 25 bp, Artificial
  probe
  misc_feature (1)..(25): SEQ ID NO: 6135; WAN0249BV; Start 68; Stop 92
taaatgattttagatgtgccataag

SEQ ID NO: 430476 - DNA, 25 bp, Artificial
  probe
  misc_feature (1)..(25): SEQ ID NO: 6135; WAN0249BV; Start 54; Stop 78
agaatagcgtgtaataaatgatttt

SEQ ID NO: 430477 - DNA, 25 bp, Artificial
  probe
  misc_feature (1)..(25): SEQ ID NO: 6135; WAN0249BV; Start 62; Stop 86
gtgtaataaatgattttagatgtgc

SEQ ID NO: 430478 - DNA, 25 bp, Artificial
  probe
  misc_feature (1)..(25): SEQ ID NO: 6135; WAN0249BV; Start 67; Stop 91
ataaatgattttagatgtgccataa

SEQ ID NO: 430479 - DNA, 25 bp, Artificial
  probe
  misc_feature (1)..(25): SEQ ID NO: 6135; WAN0249BV; Start 66; Stop 90
aataaatgattttagatgtgccata

SEQ ID NO: 430480 - DNA, 25 bp, Artificial
  probe
  misc_feature (1)..(25): SEQ ID NO: 6135; WAN0249BV; Start 65; Stop 89
taataaatgattttagatgtgccat

SEQ ID NO: 430481 - DNA, 25 bp, Artificial
  probe
  misc_feature (1)..(25): SEQ ID NO: 6135; WAN0249BV; Start 61; Stop 85
cgtgtaataaatgattttagatgtg

SEQ ID NO: 430482 - DNA, 25 bp, Artificial
  probe
  misc_feature (1)..(25): SEQ ID NO: 6136; WAN02496C; Start 10; Stop 34
tggttaatccttcttagaaatttgg

SEQ ID NO: 430483 - DNA, 25 bp, Artificial
  probe
  misc_feature (1)..(25): SEQ ID NO: 6136; WAN02496C; Start 4; Stop 28
tgaaattggttaatccttcttagaa

SEQ ID NO: 430484 - DNA, 25 bp, Artificial
  probe
  misc_feature (1)..(25): SEQ ID NO: 6136; WAN02496C; Start 3; Stop 27
atgaaattggttaatccttcttaga

SEQ ID NO: 430485 - DNA, 25 bp, Artificial
  probe
  misc_feature (1)..(25): SEQ ID NO: 6136; WAN02496C; Start 2; Stop 26
gatgaaattggttaatccttcttag

SEQ ID NO: 430486 - DNA, 25 bp, Artificial
  probe
  misc_feature (1)..(25): SEQ ID NO: 6136; WAN02496C; Start 18; Stop 42
ccttcttagaaatttggagtattcc

SEQ ID NO: 430487 - DNA, 25 bp, Artificial
  probe
  misc_feature (1)..(25): SEQ ID NO: 6136; WAN02496C; Start 11; Stop 35
ggttaatccttcttagaaatttgga

SEQ ID NO: 430488 - DNA, 25 bp, Artificial
  probe
  misc_feature (1)..(25): SEQ ID NO: 6136; WAN02496C; Start 5; Stop 29
gaaattggttaatccttcttagaaa

SEQ ID NO: 430489 - DNA, 25 bp, Artificial
  probe
  misc_feature (1)..(25): SEQ ID NO: 6136; WAN02496C; Start 17; Stop 41
tccttcttagaaatttggagtattc

SEQ ID NO: 430490 - DNA, 25 bp, Artificial
  probe
  misc_feature (1)..(25): SEQ ID NO: 6136; WAN02496C; Start 1; Stop 25
ggatgaaattggttaatccttctta

SEQ ID NO: 430491 - DNA, 25 bp, Artificial
  probe
  misc_feature (1)..(25): SEQ ID NO: 6136; WAN02496C; Start 9; Stop 33
ttggttaatccttcttagaaatttg

SEQ ID NO: 430492 - DNA, 25 bp, Artificial
  probe
  misc_feature (1)..(25): SEQ ID NO: 6136; WAN02496C; Start 13; Stop 37
ttaatccttcttagaaatttggagt

SEQ ID NO: 430493 - DNA, 25 bp, Artificial
  probe
  misc_feature (1)..(25): SEQ ID NO: 6136; WAN02496C; Start 16; Stop 40
atccttcttagaaatttggagtatt

SEQ ID NO: 430494 - DNA, 25 bp, Artificial
  probe
  misc_feature (1)..(25): SEQ ID NO: 6136; WAN02496C; Start 15; Stop 39
aatccttcttagaaatttggagtat

SEQ ID NO: 430495 - DNA, 25 bp, Artificial
  probe
  misc_feature (1)..(25): SEQ ID NO: 6136; WAN02496C; Start 12; Stop 36
gttaatccttcttagaaatttggag

SEQ ID NO: 430496 - DNA, 25 bp, Artificial
  probe
  misc_feature (1)..(25): SEQ ID NO: 6136; WAN02496C; Start 14; Stop 38
taatccttcttagaaatttggagta

SEQ ID NO: 430497 - DNA, 25 bp, Artificial
  probe
  misc_feature (1)..(25): SEQ ID NO: 6136; WAN02496C; Start 19; Stop 43
cttcttagaaatttggagtattcca

SEQ ID NO: 430498 - DNA, 25 bp, Artificial
  probe
  misc_feature (1)..(25): SEQ ID NO: 6137; WAN02497U; Start 19; Stop 43
tttcttcgtttctttcttactcctt

SEQ ID NO: 430499 - DNA, 25 bp, Artificial
  probe
  misc_feature (1)..(25): SEQ ID NO: 6137; WAN02497U; Start 106; Stop 130
actatttgtctctgcgtacctattc

SEQ ID NO: 430500 - DNA, 25 bp, Artificial
  probe
  misc_feature (1)..(25): SEQ ID NO: 6137; WAN02497U; Start 100; Stop 124
tttcctactatttgtctctgcgtac

SEQ ID NO: 430501 - DNA, 25 bp, Artificial
  probe
  misc_feature (1)..(25): SEQ ID NO: 6137; WAN02497U; Start 104; Stop 128
ctactatttgtctctgcgtacctat

SEQ ID NO: 430502 - DNA, 25 bp, Artificial
  probe
  misc_feature (1)..(25): SEQ ID NO: 6137; WAN02497U; Start 107; Stop 131
ctatttgtctctgcgtacctattcc

SEQ ID NO: 430503 - DNA, 25 bp, Artificial
  probe
  misc_feature (1)..(25): SEQ ID NO: 6137; WAN02497U; Start 24; Stop 48
tcgtttctttcttactccttattgt

SEQ ID NO: 430504 - DNA, 25 bp, Artificial
  probe
  misc_feature (1)..(25): SEQ ID NO: 6137; WAN02497U; Start 105; Stop 129
tactatttgtctctgcgtacctatt

SEQ ID NO: 430505 - DNA, 25 bp, Artificial
  probe
  misc_feature (1)..(25): SEQ ID NO: 6137; WAN02497U; Start 109; Stop 133
atttgtctctgcgtacctattccta

SEQ ID NO: 430506 - DNA, 25 bp, Artificial
  probe
  misc_feature (1)..(25): SEQ ID NO: 6137; WAN02497U; Start 108; Stop 132
tatttgtctctgcgtacctattcct

SEQ ID NO: 430507 - DNA, 25 bp, Artificial
  probe
  misc_feature (1)..(25): SEQ ID NO: 6137; WAN02497U; Start 103; Stop 127
cctactatttgtctctgcgtaccta

SEQ ID NO: 430508 - DNA, 25 bp, Artificial
  probe
  misc_feature (1)..(25): SEQ ID NO: 6137; WAN02497U; Start 20; Stop 44
ttcttcgtttctttcttactcctta

SEQ ID NO: 430509 - DNA, 25 bp, Artificial
  probe
  misc_feature (1)..(25): SEQ ID NO: 6137; WAN02497U; Start 110; Stop 134
tttgtctctgcgtacctattcctag

SEQ ID NO: 430510 - DNA, 25 bp, Artificial
  probe
  misc_feature (1)..(25): SEQ ID NO: 6137; WAN02497U; Start 21; Stop 45
tcttcgtttctttcttactccttat

SEQ ID NO: 430511 - DNA, 25 bp, Artificial
  probe
  misc_feature (1)..(25): SEQ ID NO: 6137; WAN02497U; Start 101; Stop 125
ttcctactatttgtctctgcgtacc

SEQ ID NO: 430512 - DNA, 25 bp, Artificial
  probe
  misc_feature (1)..(25): SEQ ID NO: 6137; WAN02497U; Start 23; Stop 47
ttcgtttctttcttactccttattg

SEQ ID NO: 430513 - DNA, 25 bp, Artificial
  probe
  misc_feature (1)..(25): SEQ ID NO: 6137; WAN02497U; Start 111; Stop 135
ttgtctctgcgtacctattcctagc

SEQ ID NO: 430514 - DNA, 25 bp, Artificial
  probe
  misc_feature (1)..(25): SEQ ID NO: 6137; WAN02497U; Start 74; Stop 98
gctttcaacgcttagttatatcata

SEQ ID NO: 430515 - DNA, 25 bp, Artificial
  probe
  misc_feature (1)..(25): SEQ ID NO: 6137; WAN02497U; Start 22; Stop 46
cttcgtttctttcttactccttatt

SEQ ID NO: 430516 - DNA, 25 bp, Artificial
  probe
  misc_feature (1)..(25): SEQ ID NO: 6137; WAN02497U; Start 102; Stop 126
tcctactatttgtctctgcgtacct

SEQ ID NO: 430517 - DNA, 25 bp, Artificial
  probe
  misc_feature (1)..(25): SEQ ID NO: 6137; WAN02497U; Start 25; Stop 49
cgtttctttcttactccttattgta

SEQ ID NO: 430518 - DNA, 25 bp, Artificial
  probe
  misc_feature (1)..(25): SEQ ID NO: 6137; WAN02497U; Start 98; Stop 122
attttcctactatttgtctctgcgt

SEQ ID NO: 430519 - DNA, 25 bp, Artificial
  probe
  misc_feature (1)..(25): SEQ ID NO: 6137; WAN02497U; Start 99; Stop 123
ttttcctactatttgtctctgcgta

SEQ ID NO: 430520 - DNA, 25 bp, Artificial
  probe
  misc_feature (1)..(25): SEQ ID NO: 6137; WAN02497U; Start 113; Stop 137
gtctctgcgtacctattcctagctc

SEQ ID NO: 430521 - DNA, 25 bp, Artificial
  probe
  misc_feature (1)..(25): SEQ ID NO: 6137; WAN02497U; Start 97; Stop 121
tattttcctactatttgtctctgcg

SEQ ID NO: 430522 - DNA, 25 bp, Artificial
  probe
  misc_feature (1)..(25): SEQ ID NO: 6137; WAN02497U; Start 60; Stop 84
tatattaacagatagctttcaacgc

SEQ ID NO: 430523 - DNA, 25 bp, Artificial
  probe
  misc_feature (1)..(25): SEQ ID NO: 6137; WAN02497U; Start 18; Stop 42
ttttcttcgtttctttcttactcct

SEQ ID NO: 430524 - DNA, 25 bp, Artificial
  probe
  misc_feature (1)..(25): SEQ ID NO: 6137; WAN02497U; Start 67; Stop 91
acagatagctttcaacgcttagtta

SEQ ID NO: 430525 - DNA, 25 bp, Artificial
  probe
  misc_feature (1)..(25): SEQ ID NO: 6137; WAN02497U; Start 65; Stop 89
taacagatagctttcaacgcttagt

SEQ ID NO: 430526 - DNA, 25 bp, Artificial
  probe
  misc_feature (1)..(25): SEQ ID NO: 6137; WAN02497U; Start 64; Stop 88
ttaacagatagctttcaacgcttag

SEQ ID NO: 430527 - DNA, 25 bp, Artificial
  probe
  misc_feature (1)..(25): SEQ ID NO: 6137; WAN02497U; Start 68; Stop 92
cagatagctttcaacgcttagttat

SEQ ID NO: 430528 - DNA, 25 bp, Artificial
  probe
  misc_feature (1)..(25): SEQ ID NO: 6137; WAN02497U; Start 66; Stop 90
aacagatagctttcaacgcttagtt

SEQ ID NO: 430529 - DNA, 25 bp, Artificial
  probe
  misc_feature (1)..(25): SEQ ID NO: 6137; WAN02497U; Start 63; Stop 87
attaacagatagctttcaacgctta

SEQ ID NO: 430530 - DNA, 25 bp, Artificial
  probe
  misc_feature (1)..(25): SEQ ID NO: 6137; WAN02497U; Start 62; Stop 86
tattaacagatagctttcaacgctt

SEQ ID NO: 430531 - DNA, 25 bp, Artificial
  probe
  misc_feature (1)..(25): SEQ ID NO: 6138; WAN02499Z; Start 5; Stop 29
tataaactctccgtctacttgtcct

SEQ ID NO: 430532 - DNA, 25 bp, Artificial
  probe
  misc_feature (1)..(25): SEQ ID NO: 6138; WAN02499Z; Start 4; Stop 28
ctataaactctccgtctacttgtcc

SEQ ID NO: 430533 - DNA, 25 bp, Artificial
  probe
  misc_feature (1)..(25): SEQ ID NO: 6138; WAN02499Z; Start 3; Stop 27
gctataaactctccgtctacttgtc

SEQ ID NO: 430534 - DNA, 25 bp, Artificial
  probe
  misc_feature (1)..(25): SEQ ID NO: 6138; WAN02499Z; Start 6; Stop 30
ataaactctccgtctacttgtcctg

SEQ ID NO: 430535 - DNA, 25 bp, Artificial
  probe
  misc_feature (1)..(25): SEQ ID NO: 6138; WAN02499Z; Start 2; Stop 26
ggctataaactctccgtctacttgt

SEQ ID NO: 430536 - DNA, 25 bp, Artificial
  probe
  misc_feature (1)..(25): SEQ ID NO: 6138; WAN02499Z; Start 1; Stop 25
gggctataaactctccgtctacttg

SEQ ID NO: 430537 - DNA, 25 bp, Artificial
  probe
  misc_feature (1)..(25): SEQ ID NO: 6138; WAN02499Z; Start 59; Stop 83
tccgctaatcttttcatagactttc

SEQ ID NO: 430538 - DNA, 25 bp, Artificial
  probe
  misc_feature (1)..(25): SEQ ID NO: 6138; WAN02499Z; Start 60; Stop 84
ccgctaatcttttcatagactttct

SEQ ID NO: 430539 - DNA, 25 bp, Artificial
  probe
  misc_feature (1)..(25): SEQ ID NO: 6138; WAN02499Z; Start 7; Stop 31
taaactctccgtctacttgtcctgc

SEQ ID NO: 430540 - DNA, 25 bp, Artificial
  probe
  misc_feature (1)..(25): SEQ ID NO: 6138; WAN02499Z; Start 89; Stop 113
tttaggagcctagctttctagtttg

SEQ ID NO: 430541 - DNA, 25 bp, Artificial
  probe
  misc_feature (1)..(25): SEQ ID NO: 6138; WAN02499Z; Start 91; Stop 115
taggagcctagctttctagtttgtt

SEQ ID NO: 430542 - DNA, 25 bp, Artificial
  probe
  misc_feature (1)..(25): SEQ ID NO: 6138; WAN02499Z; Start 90; Stop 114
ttaggagcctagctttctagtttgt

SEQ ID NO: 430543 - DNA, 25 bp, Artificial
  probe
  misc_feature (1)..(25): SEQ ID NO: 6138; WAN02499Z; Start 58; Stop 82
gtccgctaatcttttcatagacttt

SEQ ID NO: 430544 - DNA, 25 bp, Artificial
  probe
  misc_feature (1)..(25): SEQ ID NO: 6138; WAN02499Z; Start 67; Stop 91
tcttttcatagactttctccctttt

SEQ ID NO: 430545 - DNA, 25 bp, Artificial
  probe
  misc_feature (1)..(25): SEQ ID NO: 6138; WAN02499Z; Start 57; Stop 81
cgtccgctaatcttttcatagactt

SEQ ID NO: 430546 - DNA, 25 bp, Artificial
  probe
  misc_feature (1)..(25): SEQ ID NO: 6138; WAN02499Z; Start 61; Stop 85
cgctaatcttttcatagactttctc

SEQ ID NO: 430547 - DNA, 25 bp, Artificial
  probe
  misc_feature (1)..(25): SEQ ID NO: 6138; WAN02499Z; Start 66; Stop 90
atcttttcatagactttctcccttt

SEQ ID NO: 430548 - DNA, 25 bp, Artificial
  probe
  misc_feature (1)..(25): SEQ ID NO: 6138; WAN02499Z; Start 65; Stop 89
aatcttttcatagactttctccctt

SEQ ID NO: 430549 - DNA, 25 bp, Artificial
  probe
  misc_feature (1)..(25): SEQ ID NO: 6138; WAN02499Z; Start 71; Stop 95
ttcatagactttctcccttttagga

SEQ ID NO: 430550 - DNA, 25 bp, Artificial
  probe
  misc_feature (1)..(25): SEQ ID NO: 6138; WAN02499Z; Start 62; Stop 86
gctaatcttttcatagactttctcc

SEQ ID NO: 430551 - DNA, 25 bp, Artificial
  probe
  misc_feature (1)..(25): SEQ ID NO: 6138; WAN02499Z; Start 93; Stop 117
ggagcctagctttctagtttgttct

SEQ ID NO: 430552 - DNA, 25 bp, Artificial
  probe
  misc_feature (1)..(25): SEQ ID NO: 6138; WAN02499Z; Start 92; Stop 116
aggagcctagctttctagtttgttc

SEQ ID NO: 430553 - DNA, 25 bp, Artificial
  probe
  misc_feature (1)..(25): SEQ ID NO: 6138; WAN02499Z; Start 70; Stop 94
tttcatagactttctcccttttagg

SEQ ID NO: 430554 - DNA, 25 bp, Artificial
  probe
  misc_feature (1)..(25): SEQ ID NO: 6138; WAN02499Z; Start 18; Stop 42
tctacttgtcctgcaacaattgaag

SEQ ID NO: 430555 - DNA, 25 bp, Artificial
  probe
  misc_feature (1)..(25): SEQ ID NO: 6138; WAN02499Z; Start 64; Stop 88
taatcttttcatagactttctccct

SEQ ID NO: 430556 - DNA, 25 bp, Artificial
  probe
  misc_feature (1)..(25): SEQ ID NO: 6138; WAN02499Z; Start 20; Stop 44
tacttgtcctgcaacaattgaagtc

SEQ ID NO: 430557 - DNA, 25 bp, Artificial
  probe
  misc_feature (1)..(25): SEQ ID NO: 6138; WAN02499Z; Start 19; Stop 43
ctacttgtcctgcaacaattgaagt

SEQ ID NO: 430558 - DNA, 25 bp, Artificial
  probe
  misc_feature (1)..(25): SEQ ID NO: 6138; WAN02499Z; Start 17; Stop 41
gtctacttgtcctgcaacaattgaa

SEQ ID NO: 430559 - DNA, 25 bp, Artificial
  probe
  misc_feature (1)..(25): SEQ ID NO: 6138; WAN02499Z; Start 56; Stop 80
ccgtccgctaatcttttcatagact

SEQ ID NO: 430560 - DNA, 25 bp, Artificial
  probe
  misc_feature (1)..(25): SEQ ID NO: 6138; WAN02499Z; Start 63; Stop 87
ctaatcttttcatagactttctccc

SEQ ID NO: 430561 - DNA, 25 bp, Artificial
  probe
  misc_feature (1)..(25): SEQ ID NO: 6138; WAN02499Z; Start 69; Stop 93
ttttcatagactttctcccttttag

SEQ ID NO: 430562 - DNA, 25 bp, Artificial
  probe
  misc_feature (1)..(25): SEQ ID NO: 6138; WAN02499Z; Start 68; Stop 92
cttttcatagactttctccctttta

SEQ ID NO: 430563 - DNA, 25 bp, Artificial
  probe
  misc_feature (1)..(25): SEQ ID NO: 6138; WAN02499Z; Start 87; Stop 111
cttttaggagcctagctttctagtt

SEQ ID NO: 430564 - DNA, 25 bp, Artificial
  probe
  misc_feature (1)..(25): SEQ ID NO: 6139; WAN02497M; Start 32; Stop 56
taataaggatatacaggaagtgatc

SEQ ID NO: 430565 - DNA, 25 bp, Artificial
  probe
  misc_feature (1)..(25): SEQ ID NO: 6139; WAN02497M; Start 33; Stop 57
aataaggatatacaggaagtgatca

SEQ ID NO: 430566 - DNA, 25 bp, Artificial
  probe
  misc_feature (1)..(25): SEQ ID NO: 6139; WAN02497M; Start 64; Stop 88
tgtataactgaaaaggagagaaaac

SEQ ID NO: 430567 - DNA, 25 bp, Artificial
  probe
  misc_feature (1)..(25): SEQ ID NO: 6139; WAN02497M; Start 52; Stop 76
tgatcacaaccttgtataactgaaa

SEQ ID NO: 430568 - DNA, 25 bp, Artificial
  probe
  misc_feature (1)..(25): SEQ ID NO: 6139; WAN02497M; Start 65; Stop 89
gtataactgaaaaggagagaaaact

SEQ ID NO: 430569 - DNA, 25 bp, Artificial
  probe
  misc_feature (1)..(25): SEQ ID NO: 6139; WAN02497M; Start 62; Stop 86
cttgtataactgaaaaggagagaaa

SEQ ID NO: 430570 - DNA, 25 bp, Artificial
  probe
  misc_feature (1)..(25): SEQ ID NO: 6139; WAN02497M; Start 54; Stop 78
atcacaaccttgtataactgaaaag

SEQ ID NO: 430571 - DNA, 25 bp, Artificial
  probe
  misc_feature (1)..(25): SEQ ID NO: 6139; WAN02497M; Start 53; Stop 77
gatcacaaccttgtataactgaaaa

SEQ ID NO: 430572 - DNA, 25 bp, Artificial
  probe
  misc_feature (1)..(25): SEQ ID NO: 6139; WAN02497M; Start 29; Stop 53
gtttaataaggatatacaggaagtg

SEQ ID NO: 430573 - DNA, 25 bp, Artificial
  probe
  misc_feature (1)..(25): SEQ ID NO: 6139; WAN02497M; Start 63; Stop 87
ttgtataactgaaaaggagagaaaa

SEQ ID NO: 430574 - DNA, 25 bp, Artificial
  probe
  misc_feature (1)..(25): SEQ ID NO: 6139; WAN02497M; Start 28; Stop 52
tgtttaataaggatatacaggaagt

SEQ ID NO: 430575 - DNA, 25 bp, Artificial
  probe
  misc_feature (1)..(25): SEQ ID NO: 6139; WAN02497M; Start 26; Stop 50
agtgtttaataaggatatacaggaa

SEQ ID NO: 430576 - DNA, 25 bp, Artificial
  probe
  misc_feature (1)..(25): SEQ ID NO: 6139; WAN02497M; Start 27; Stop 51
gtgtttaataaggatatacaggaag

SEQ ID NO: 430577 - DNA, 25 bp, Artificial
  probe
  misc_feature (1)..(25): SEQ ID NO: 6139; WAN02497M; Start 56; Stop 80
cacaaccttgtataactgaaaagga

SEQ ID NO: 430578 - DNA, 25 bp, Artificial
  probe
  misc_feature (1)..(25): SEQ ID NO: 6139; WAN02497M; Start 55; Stop 79
tcacaaccttgtataactgaaaagg

SEQ ID NO: 430579 - DNA, 25 bp, Artificial
  probe
  misc_feature (1)..(25): SEQ ID NO: 6139; WAN02497M; Start 60; Stop 84
accttgtataactgaaaaggagaga

SEQ ID NO: 430580 - DNA, 25 bp, Artificial
  probe
  misc_feature (1)..(25): SEQ ID NO: 6139; WAN02497M; Start 57; Stop 81
acaaccttgtataactgaaaaggag

SEQ ID NO: 430581 - DNA, 25 bp, Artificial
  probe
  misc_feature (1)..(25): SEQ ID NO: 6139; WAN02497M; Start 58; Stop 82
caaccttgtataactgaaaaggaga

SEQ ID NO: 430582 - DNA, 25 bp, Artificial
  probe
  misc_feature (1)..(25): SEQ ID NO: 6139; WAN02497M; Start 59; Stop 83
aaccttgtataactgaaaaggagag

SEQ ID NO: 430583 - DNA, 25 bp, Artificial
  probe
  misc_feature (1)..(25): SEQ ID NO: 6139; WAN02497M; Start 61; Stop 85
ccttgtataactgaaaaggagagaa

SEQ ID NO: 430584 - DNA, 25 bp, Artificial
  probe
  misc_feature (1)..(25): SEQ ID NO: 6139; WAN02497M; Start 11; Stop 35
catgggctataaaatagtgtttaat

SEQ ID NO: 430585 - DNA, 25 bp, Artificial
  probe
  misc_feature (1)..(25): SEQ ID NO: 6139; WAN02497M; Start 10; Stop 34
ccatgggctataaaatagtgtttaa

SEQ ID NO: 430586 - DNA, 25 bp, Artificial
  probe
  misc_feature (1)..(25): SEQ ID NO: 6139; WAN02497M; Start 8; Stop 32
tgccatgggctataaaatagtgttt

SEQ ID NO: 430587 - DNA, 25 bp, Artificial
  probe
  misc_feature (1)..(25): SEQ ID NO: 6139; WAN02497M; Start 7; Stop 31
ttgccatgggctataaaatagtgtt

SEQ ID NO: 430588 - DNA, 25 bp, Artificial
  probe
  misc_feature (1)..(25): SEQ ID NO: 6139; WAN02497M; Start 9; Stop 33
gccatgggctataaaatagtgttta

SEQ ID NO: 430589 - DNA, 25 bp, Artificial
  probe
  misc_feature (1)..(25): SEQ ID NO: 6139; WAN02497M; Start 3; Stop 27
ttccttgccatgggctataaaatag

SEQ ID NO: 430590 - DNA, 25 bp, Artificial
  probe
  misc_feature (1)..(25): SEQ ID NO: 6139; WAN02497M; Start 6; Stop 30
cttgccatgggctataaaatagtgt

SEQ ID NO: 430591 - DNA, 25 bp, Artificial
  probe
  misc_feature (1)..(25): SEQ ID NO: 6139; WAN02497M; Start 2; Stop 26
gttccttgccatgggctataaaata

SEQ ID NO: 430592 - DNA, 25 bp, Artificial
  probe
  misc_feature (1)..(25): SEQ ID NO: 6139; WAN02497M; Start 5; Stop 29
ccttgccatgggctataaaatagtg

SEQ ID NO: 430593 - DNA, 25 bp, Artificial
  probe
  misc_feature (1)..(25): SEQ ID NO: 6139; WAN02497M; Start 4; Stop 28
tccttgccatgggctataaaatagt

SEQ ID NO: 430594 - DNA, 25 bp, Artificial
  probe
  misc_feature (1)..(25): SEQ ID NO: 6139; WAN02497M; Start 1; Stop 25
ggttccttgccatgggctataaaat

SEQ ID NO: 430595 - DNA, 25 bp, Artificial
  probe
  misc_feature (1)..(25): SEQ ID NO: 6140; WAN0249AY; Start 30; Stop 54
agcggttttagtctattctttcctt

SEQ ID NO: 430596 - DNA, 25 bp, Artificial
  probe
  misc_feature (1)..(25): SEQ ID NO: 6140; WAN0249AY; Start 27; Stop 51
ctgagcggttttagtctattctttc

SEQ ID NO: 430597 - DNA, 25 bp, Artificial
  probe
  misc_feature (1)..(25): SEQ ID NO: 6140; WAN0249AY; Start 29; Stop 53
gagcggttttagtctattctttcct

SEQ ID NO: 430598 - DNA, 25 bp, Artificial
  probe
  misc_feature (1)..(25): SEQ ID NO: 6140; WAN0249AY; Start 28; Stop 52
tgagcggttttagtctattctttcc

SEQ ID NO: 430599 - DNA, 25 bp, Artificial
  probe
  misc_feature (1)..(25): SEQ ID NO: 6140; WAN0249AY; Start 26; Stop 50
gctgagcggttttagtctattcttt

SEQ ID NO: 430600 - DNA, 25 bp, Artificial
  probe
  misc_feature (1)..(25): SEQ ID NO: 6140; WAN0249AY; Start 25; Stop 49
agctgagcggttttagtctattctt

SEQ ID NO: 430601 - DNA, 25 bp, Artificial
  probe
  misc_feature (1)..(25): SEQ ID NO: 6141; WAN0249CH; Start 6; Stop 30
agaagatgtaaataaatcacagtca

SEQ ID NO: 430602 - DNA, 25 bp, Artificial
  probe
  misc_feature (1)..(25): SEQ ID NO: 6141; WAN0249CH; Start 7; Stop 31
gaagatgtaaataaatcacagtcaa

SEQ ID NO: 430603 - DNA, 25 bp, Artificial
  probe
  misc_feature (1)..(25): SEQ ID NO: 6141; WAN0249CH; Start 5; Stop 29
aagaagatgtaaataaatcacagtc

SEQ ID NO: 430604 - DNA, 25 bp, Artificial
  probe
  misc_feature (1)..(25): SEQ ID NO: 6141; WAN0249CH; Start 4; Stop 28
gaagaagatgtaaataaatcacagt

SEQ ID NO: 430605 - DNA, 25 bp, Artificial
  probe
  misc_feature (1)..(25): SEQ ID NO: 6141; WAN0249CH; Start 53; Stop 77
ttttgttataatgaaggggagaatt

SEQ ID NO: 430606 - DNA, 25 bp, Artificial
  probe
  misc_feature (1)..(25): SEQ ID NO: 6141; WAN0249CH; Start 8; Stop 32
aagatgtaaataaatcacagtcaaa

SEQ ID NO: 430607 - DNA, 25 bp, Artificial
  probe
  misc_feature (1)..(25): SEQ ID NO: 6141; WAN0249CH; Start 3; Stop 27
agaagaagatgtaaataaatcacag

SEQ ID NO: 430608 - DNA, 25 bp, Artificial
  probe
  misc_feature (1)..(25): SEQ ID NO: 6141; WAN0249CH; Start 54; Stop 78
tttgttataatgaaggggagaatta

SEQ ID NO: 430609 - DNA, 25 bp, Artificial
  probe
  misc_feature (1)..(25): SEQ ID NO: 6141; WAN0249CH; Start 9; Stop 33
agatgtaaataaatcacagtcaaaa

SEQ ID NO: 430610 - DNA, 25 bp, Artificial
  probe
  misc_feature (1)..(25): SEQ ID NO: 6142; WAN02499A; Start 3; Stop 27
agtagcaggtttgaataactcacat

SEQ ID NO: 430611 - DNA, 25 bp, Artificial
  probe
  misc_feature (1)..(25): SEQ ID NO: 6142; WAN02499A; Start 2; Stop 26
tagtagcaggtttgaataactcaca

SEQ ID NO: 430612 - DNA, 25 bp, Artificial
  probe
  misc_feature (1)..(25): SEQ ID NO: 6142; WAN02499A; Start 4; Stop 28
gtagcaggtttgaataactcacatt

SEQ ID NO: 430613 - DNA, 25 bp, Artificial
  probe
  misc_feature (1)..(25): SEQ ID NO: 6142; WAN02499A; Start 1; Stop 25
gtagtagcaggtttgaataactcac

SEQ ID NO: 430614 - DNA, 25 bp, Artificial
  probe
  misc_feature (1)..(25): SEQ ID NO: 6142; WAN02499A; Start 5; Stop 29
tagcaggtttgaataactcacattc

SEQ ID NO: 430615 - DNA, 25 bp, Artificial
  probe
  misc_feature (1)..(25): SEQ ID NO: 6142; WAN02499A; Start 6; Stop 30
agcaggtttgaataactcacattca

SEQ ID NO: 430616 - DNA, 25 bp, Artificial
  probe
  misc_feature (1)..(25): SEQ ID NO: 6143; WAN02498W; Start 85; Stop 109
aaagaggctagaggaggcaattaaa

SEQ ID NO: 430617 - DNA, 25 bp, Artificial
  probe
  misc_feature (1)..(25): SEQ ID NO: 6143; WAN02498W; Start 114; Stop 138
aagctaaccagatttatacaggagg

SEQ ID NO: 430618 - DNA, 25 bp, Artificial
  probe
  misc_feature (1)..(25): SEQ ID NO: 6143; WAN02498W; Start 121; Stop 145
ccagatttatacaggaggtagaacc

SEQ ID NO: 430619 - DNA, 25 bp, Artificial
  probe
  misc_feature (1)..(25): SEQ ID NO: 6143; WAN02498W; Start 122; Stop 146
cagatttatacaggaggtagaaccg

SEQ ID NO: 430620 - DNA, 25 bp, Artificial
  probe
  misc_feature (1)..(25): SEQ ID NO: 6143; WAN02498W; Start 123; Stop 147
agatttatacaggaggtagaaccgt

SEQ ID NO: 430621 - DNA, 25 bp, Artificial
  probe
  misc_feature (1)..(25): SEQ ID NO: 6143; WAN02498W; Start 116; Stop 140
gctaaccagatttatacaggaggta

SEQ ID NO: 430622 - DNA, 25 bp, Artificial
  probe
  misc_feature (1)..(25): SEQ ID NO: 6143; WAN02498W; Start 120; Stop 144
accagatttatacaggaggtagaac

SEQ ID NO: 430623 - DNA, 25 bp, Artificial
  probe
  misc_feature (1)..(25): SEQ ID NO: 6143; WAN02498W; Start 124; Stop 148
gatttatacaggaggtagaaccgta

SEQ ID NO: 430624 - DNA, 25 bp, Artificial
  probe
  misc_feature (1)..(25): SEQ ID NO: 6143; WAN02498W; Start 119; Stop 143
aaccagatttatacaggaggtagaa

SEQ ID NO: 430625 - DNA, 25 bp, Artificial
  probe
  misc_feature (1)..(25): SEQ ID NO: 6143; WAN02498W; Start 48; Stop 72
atattaaccactagccaaagccgtt

SEQ ID NO: 430626 - DNA, 25 bp, Artificial
  probe
  misc_feature (1)..(25): SEQ ID NO: 6143; WAN02498W; Start 49; Stop 73
tattaaccactagccaaagccgttt

SEQ ID NO: 430627 - DNA, 25 bp, Artificial
  probe
  misc_feature (1)..(25): SEQ ID NO: 6143; WAN02498W; Start 112; Stop 136
gtaagctaaccagatttatacagga

SEQ ID NO: 430628 - DNA, 25 bp, Artificial
  probe
  misc_feature (1)..(25): SEQ ID NO: 6143; WAN02498W; Start 111; Stop 135
agtaagctaaccagatttatacagg

SEQ ID NO: 430629 - DNA, 25 bp, Artificial
  probe
  misc_feature (1)..(25): SEQ ID NO: 6143; WAN02498W; Start 47; Stop 71
aatattaaccactagccaaagccgt

SEQ ID NO: 430630 - DNA, 25 bp, Artificial
  probe
  misc_feature (1)..(25): SEQ ID NO: 6143; WAN02498W; Start 118; Stop 142
taaccagatttatacaggaggtaga

SEQ ID NO: 430631 - DNA, 25 bp, Artificial
  probe
  misc_feature (1)..(25): SEQ ID NO: 6143; WAN02498W; Start 113; Stop 137
taagctaaccagatttatacaggag

SEQ ID NO: 430632 - DNA, 25 bp, Artificial
  probe
  misc_feature (1)..(25): SEQ ID NO: 6143; WAN02498W; Start 20; Stop 44
acacgtttatagagacaagtggtaa

SEQ ID NO: 430633 - DNA, 25 bp, Artificial
  probe
  misc_feature (1)..(25): SEQ ID NO: 6143; WAN02498W; Start 19; Stop 43
aacacgtttatagagacaagtggta

SEQ ID NO: 430634 - DNA, 25 bp, Artificial
  probe
  misc_feature (1)..(25): SEQ ID NO: 6143; WAN02498W; Start 18; Stop 42
taacacgtttatagagacaagtggt

SEQ ID NO: 430635 - DNA, 25 bp, Artificial
  probe
  misc_feature (1)..(25): SEQ ID NO: 6143; WAN02498W; Start 115; Stop 139
agctaaccagatttatacaggaggt

SEQ ID NO: 430636 - DNA, 25 bp, Artificial
  probe
  misc_feature (1)..(25): SEQ ID NO: 6143; WAN02498W; Start 46; Stop 70
taatattaaccactagccaaagccg

SEQ ID NO: 430637 - DNA, 25 bp, Artificial
  probe
  misc_feature (1)..(25): SEQ ID NO: 6143; WAN02498W; Start 117; Stop 141
ctaaccagatttatacaggaggtag

SEQ ID NO: 430638 - DNA, 25 bp, Artificial
  probe
  misc_feature (1)..(25): SEQ ID NO: 6143; WAN02498W; Start 17; Stop 41
ctaacacgtttatagagacaagtgg

SEQ ID NO: 430639 - DNA, 25 bp, Artificial
  probe
  misc_feature (1)..(25): SEQ ID NO: 6143; WAN02498W; Start 45; Stop 69
ataatattaaccactagccaaagcc

SEQ ID NO: 430640 - DNA, 25 bp, Artificial
  probe
  misc_feature (1)..(25): SEQ ID NO: 6143; WAN02498W; Start 21; Stop 45
cacgtttatagagacaagtggtaaa

SEQ ID NO: 430641 - DNA, 25 bp, Artificial
  probe
  misc_feature (1)..(25): SEQ ID NO: 6143; WAN02498W; Start 22; Stop 46
acgtttatagagacaagtggtaaat

SEQ ID NO: 430642 - DNA, 25 bp, Artificial
  probe
  misc_feature (1)..(25): SEQ ID NO: 6143; WAN02498W; Start 23; Stop 47
cgtttatagagacaagtggtaaata

SEQ ID NO: 430643 - DNA, 25 bp, Artificial
  probe
  misc_feature (1)..(25): SEQ ID NO: 6143; WAN02498W; Start 16; Stop 40
tctaacacgtttatagagacaagtg

SEQ ID NO: 430644 - DNA, 25 bp, Artificial
  probe
  misc_feature (1)..(25): SEQ ID NO: 6143; WAN02498W; Start 86; Stop 110
aagaggctagaggaggcaattaaaa

SEQ ID NO: 430645 - DNA, 25 bp, Artificial
  probe
  misc_feature (1)..(25): SEQ ID NO: 6143; WAN02498W; Start 84; Stop 108
aaaagaggctagaggaggcaattaa

SEQ ID NO: 430646 - DNA, 25 bp, Artificial
  probe
  misc_feature (1)..(25): SEQ ID NO: 6143; WAN02498W; Start 44; Stop 68
aataatattaaccactagccaaagc

SEQ ID NO: 430647 - DNA, 25 bp, Artificial
  probe
  misc_feature (1)..(25): SEQ ID NO: 6143; WAN02498W; Start 110; Stop 134
aagtaagctaaccagatttatacag

SEQ ID NO: 430648 - DNA, 25 bp, Artificial
  probe
  misc_feature (1)..(25): SEQ ID NO: 6143; WAN02498W; Start 51; Stop 75
ttaaccactagccaaagccgtttta

SEQ ID NO: 430649 - DNA, 25 bp, Artificial
  probe
  misc_feature (1)..(25): SEQ ID NO: 6144; WAN0249CL; Start 53; Stop 77
tagacaactcttagaccaatgactg

SEQ ID NO: 430650 - DNA, 25 bp, Artificial
  probe
  misc_feature (1)..(25): SEQ ID NO: 6144; WAN0249CL; Start 52; Stop 76
atagacaactcttagaccaatgact

SEQ ID NO: 430651 - DNA, 25 bp, Artificial
  probe
  misc_feature (1)..(25): SEQ ID NO: 6144; WAN0249CL; Start 51; Stop 75
aatagacaactcttagaccaatgac

SEQ ID NO: 430652 - DNA, 25 bp, Artificial
  probe
  misc_feature (1)..(25): SEQ ID NO: 6144; WAN0249CL; Start 184; Stop 208
agaaatgactgagtaaactggttga

SEQ ID NO: 430653 - DNA, 25 bp, Artificial
  probe
  misc_feature (1)..(25): SEQ ID NO: 6144; WAN0249CL; Start 180; Stop 204
gctaagaaatgactgagtaaactgg

SEQ ID NO: 430654 - DNA, 25 bp, Artificial
  probe
  misc_feature (1)..(25): SEQ ID NO: 6144; WAN0249CL; Start 179; Stop 203
ggctaagaaatgactgagtaaactg

SEQ ID NO: 430655 - DNA, 25 bp, Artificial
  probe
  misc_feature (1)..(25): SEQ ID NO: 6144; WAN0249CL; Start 187; Stop 211
aatgactgagtaaactggttgatgt

SEQ ID NO: 430656 - DNA, 25 bp, Artificial
  probe
  misc_feature (1)..(25): SEQ ID NO: 6144; WAN0249CL; Start 186; Stop 210
aaatgactgagtaaactggttgatg

SEQ ID NO: 430657 - DNA, 25 bp, Artificial
  probe
  misc_feature (1)..(25): SEQ ID NO: 6144; WAN0249CL; Start 178; Stop 202
gggctaagaaatgactgagtaaact

SEQ ID NO: 430658 - DNA, 25 bp, Artificial
  probe
  misc_feature (1)..(25): SEQ ID NO: 6144; WAN0249CL; Start 183; Stop 207
aagaaatgactgagtaaactggttg

SEQ ID NO: 430659 - DNA, 25 bp, Artificial
  probe
  misc_feature (1)..(25): SEQ ID NO: 6144; WAN0249CL; Start 185; Stop 209
gaaatgactgagtaaactggttgat

SEQ ID NO: 430660 - DNA, 25 bp, Artificial
  probe
  misc_feature (1)..(25): SEQ ID NO: 6144; WAN0249CL; Start 57; Stop 81
caactcttagaccaatgactggatc

SEQ ID NO: 430661 - DNA, 25 bp, Artificial
  probe
  misc_feature (1)..(25): SEQ ID NO: 6144; WAN0249CL; Start 56; Stop 80
acaactcttagaccaatgactggat

SEQ ID NO: 430662 - DNA, 25 bp, Artificial
  probe
  misc_feature (1)..(25): SEQ ID NO: 6144; WAN0249CL; Start 188; Stop 212
atgactgagtaaactggttgatgtt

SEQ ID NO: 430663 - DNA, 25 bp, Artificial
  probe
  misc_feature (1)..(25): SEQ ID NO: 6144; WAN0249CL; Start 191; Stop 215
actgagtaaactggttgatgttgtt

SEQ ID NO: 430664 - DNA, 25 bp, Artificial
  probe
  misc_feature (1)..(25): SEQ ID NO: 6144; WAN0249CL; Start 55; Stop 79
gacaactcttagaccaatgactgga

SEQ ID NO: 430665 - DNA, 25 bp, Artificial
  probe
  misc_feature (1)..(25): SEQ ID NO: 6144; WAN0249CL; Start 54; Stop 78
agacaactcttagaccaatgactgg

SEQ ID NO: 430666 - DNA, 25 bp, Artificial
  probe
  misc_feature (1)..(25): SEQ ID NO: 6144; WAN0249CL; Start 181; Stop 205
ctaagaaatgactgagtaaactggt

SEQ ID NO: 430667 - DNA, 25 bp, Artificial
  probe
  misc_feature (1)..(25): SEQ ID NO: 6144; WAN0249CL; Start 190; Stop 214
gactgagtaaactggttgatgttgt

SEQ ID NO: 430668 - DNA, 25 bp, Artificial
  probe
  misc_feature (1)..(25): SEQ ID NO: 6144; WAN0249CL; Start 189; Stop 213
tgactgagtaaactggttgatgttg

SEQ ID NO: 430669 - DNA, 25 bp, Artificial
  probe
  misc_feature (1)..(25): SEQ ID NO: 6144; WAN0249CL; Start 50; Stop 74
taatagacaactcttagaccaatga

SEQ ID NO: 430670 - DNA, 25 bp, Artificial
  probe
  misc_feature (1)..(25): SEQ ID NO: 6144; WAN0249CL; Start 47; Stop 71
tcataatagacaactcttagaccaa

SEQ ID NO: 430671 - DNA, 25 bp, Artificial
  probe
  misc_feature (1)..(25): SEQ ID NO: 6144; WAN0249CL; Start 46; Stop 70
ttcataatagacaactcttagacca

SEQ ID NO: 430672 - DNA, 25 bp, Artificial
  probe
  misc_feature (1)..(25): SEQ ID NO: 6144; WAN0249CL; Start 45; Stop 69
gttcataatagacaactcttagacc

SEQ ID NO: 430673 - DNA, 25 bp, Artificial
  probe
  misc_feature (1)..(25): SEQ ID NO: 6144; WAN0249CL; Start 182; Stop 206
taagaaatgactgagtaaactggtt

SEQ ID NO: 430674 - DNA, 25 bp, Artificial
  probe
  misc_feature (1)..(25): SEQ ID NO: 6144; WAN0249CL; Start 60; Stop 84
ctcttagaccaatgactggatcgtt

SEQ ID NO: 430675 - DNA, 25 bp, Artificial
  probe
  misc_feature (1)..(25): SEQ ID NO: 6144; WAN0249CL; Start 58; Stop 82
aactcttagaccaatgactggatcg

SEQ ID NO: 430676 - DNA, 25 bp, Artificial
  probe
  misc_feature (1)..(25): SEQ ID NO: 6144; WAN0249CL; Start 1; Stop 25
gtgctgctcttatctctgaacgtaa

SEQ ID NO: 430677 - DNA, 25 bp, Artificial
  probe
  misc_feature (1)..(25): SEQ ID NO: 6144; WAN0249CL; Start 69; Stop 93
caatgactggatcgtttaaagtgtt

SEQ ID NO: 430678 - DNA, 25 bp, Artificial
  probe
  misc_feature (1)..(25): SEQ ID NO: 6144; WAN0249CL; Start 70; Stop 94
aatgactggatcgtttaaagtgttt

SEQ ID NO: 430679 - DNA, 25 bp, Artificial
  probe
  misc_feature (1)..(25): SEQ ID NO: 6144; WAN0249CL; Start 63; Stop 87
ttagaccaatgactggatcgtttaa

SEQ ID NO: 430680 - DNA, 25 bp, Artificial
  probe
  misc_feature (1)..(25): SEQ ID NO: 6144; WAN0249CL; Start 62; Stop 86
cttagaccaatgactggatcgttta

SEQ ID NO: 430681 - DNA, 25 bp, Artificial
  probe
  misc_feature (1)..(25): SEQ ID NO: 6144; WAN0249CL; Start 49; Stop 73
ataatagacaactcttagaccaatg

SEQ ID NO: 430682 - DNA, 25 bp, Artificial
  probe
  misc_feature (1)..(25): SEQ ID NO: 6145; WAN024BJ8; Start 4; Stop 28
gctaacttcattatagaactttcaa

SEQ ID NO: 430683 - DNA, 25 bp, Artificial
  probe
  misc_feature (1)..(25): SEQ ID NO: 6145; WAN024BJ8; Start 56; Stop 80
aaaagaaatgccgcgctatggaaaa

SEQ ID NO: 430684 - DNA, 25 bp, Artificial
  probe
  misc_feature (1)..(25): SEQ ID NO: 6145; WAN024BJ8; Start 33; Stop 57
agaattagcaaattattctggtaaa

SEQ ID NO: 430685 - DNA, 25 bp, Artificial
  probe
  misc_feature (1)..(25): SEQ ID NO: 6145; WAN024BJ8; Start 32; Stop 56
aagaattagcaaattattctggtaa

SEQ ID NO: 430686 - DNA, 25 bp, Artificial
  probe
  misc_feature (1)..(25): SEQ ID NO: 6145; WAN024BJ8; Start 31; Stop 55
aaagaattagcaaattattctggta

SEQ ID NO: 430687 - DNA, 25 bp, Artificial
  probe
  misc_feature (1)..(25): SEQ ID NO: 6145; WAN024BJ8; Start 30; Stop 54
aaaagaattagcaaattattctggt

SEQ ID NO: 430688 - DNA, 25 bp, Artificial
  probe
  misc_feature (1)..(25): SEQ ID NO: 6146; WAN024BJE; Start 10; Stop 34
cccactacagaaattatagagccaa

SEQ ID NO: 430689 - DNA, 25 bp, Artificial
  probe
  misc_feature (1)..(25): SEQ ID NO: 6146; WAN024BJE; Start 11; Stop 35
ccactacagaaattatagagccaaa

SEQ ID NO: 430690 - DNA, 25 bp, Artificial
  probe
  misc_feature (1)..(25): SEQ ID NO: 6146; WAN024BJE; Start 24; Stop 48
tatagagccaaaacattccaaagtc

SEQ ID NO: 430691 - DNA, 25 bp, Artificial
  probe
  misc_feature (1)..(25): SEQ ID NO: 6146; WAN024BJE; Start 23; Stop 47
ttatagagccaaaacattccaaagt

SEQ ID NO: 430692 - DNA, 25 bp, Artificial
  probe
  misc_feature (1)..(25): SEQ ID NO: 6146; WAN024BJE; Start 25; Stop 49
atagagccaaaacattccaaagtct

SEQ ID NO: 430693 - DNA, 25 bp, Artificial
  probe
  misc_feature (1)..(25): SEQ ID NO: 6146; WAN024BJE; Start 52; Stop 76
tctgactctggaatgttttctgttc

SEQ ID NO: 430694 - DNA, 25 bp, Artificial
  probe
  misc_feature (1)..(25): SEQ ID NO: 6146; WAN024BJE; Start 26; Stop 50
tagagccaaaacattccaaagtctt

SEQ ID NO: 430695 - DNA, 25 bp, Artificial
  probe
  misc_feature (1)..(25): SEQ ID NO: 6146; WAN024BJE; Start 4; Stop 28
ggattacccactacagaaattatag

SEQ ID NO: 430696 - DNA, 25 bp, Artificial
  probe
  misc_feature (1)..(25): SEQ ID NO: 6146; WAN024BJE; Start 48; Stop 72
cttgtctgactctggaatgttttct

SEQ ID NO: 430697 - DNA, 25 bp, Artificial
  probe
  misc_feature (1)..(25): SEQ ID NO: 6146; WAN024BJE; Start 47; Stop 71
tcttgtctgactctggaatgttttc

SEQ ID NO: 430698 - DNA, 25 bp, Artificial
  probe
  misc_feature (1)..(25): SEQ ID NO: 6146; WAN024BJE; Start 44; Stop 68
aagtcttgtctgactctggaatgtt

SEQ ID NO: 430699 - DNA, 25 bp, Artificial
  probe
  misc_feature (1)..(25): SEQ ID NO: 6146; WAN024BJE; Start 51; Stop 75
gtctgactctggaatgttttctgtt

SEQ ID NO: 430700 - DNA, 25 bp, Artificial
  probe
  misc_feature (1)..(25): SEQ ID NO: 6146; WAN024BJE; Start 49; Stop 73
ttgtctgactctggaatgttttctg

SEQ ID NO: 430701 - DNA, 25 bp, Artificial
  probe
  misc_feature (1)..(25): SEQ ID NO: 6146; WAN024BJE; Start 32; Stop 56
caaaacattccaaagtcttgtctga

SEQ ID NO: 430702 - DNA, 25 bp, Artificial
  probe
  misc_feature (1)..(25): SEQ ID NO: 6146; WAN024BJE; Start 53; Stop 77
ctgactctggaatgttttctgttca

SEQ ID NO: 430703 - DNA, 25 bp, Artificial
  probe
  misc_feature (1)..(25): SEQ ID NO: 6146; WAN024BJE; Start 54; Stop 78
tgactctggaatgttttctgttcac

SEQ ID NO: 430704 - DNA, 25 bp, Artificial
  probe
  misc_feature (1)..(25): SEQ ID NO: 6146; WAN024BJE; Start 33; Stop 57
aaaacattccaaagtcttgtctgac

SEQ ID NO: 430705 - DNA, 25 bp, Artificial
  probe
  misc_feature (1)..(25): SEQ ID NO: 6146; WAN024BJE; Start 31; Stop 55
ccaaaacattccaaagtcttgtctg

SEQ ID NO: 430706 - DNA, 25 bp, Artificial
  probe
  misc_feature (1)..(25): SEQ ID NO: 6146; WAN024BJE; Start 22; Stop 46
attatagagccaaaacattccaaag

SEQ ID NO: 430707 - DNA, 25 bp, Artificial
  probe
  misc_feature (1)..(25): SEQ ID NO: 6146; WAN024BJE; Start 55; Stop 79
gactctggaatgttttctgttcaca

SEQ ID NO: 430708 - DNA, 25 bp, Artificial
  probe
  misc_feature (1)..(25): SEQ ID NO: 6146; WAN024BJE; Start 50; Stop 74
tgtctgactctggaatgttttctgt

SEQ ID NO: 430709 - DNA, 25 bp, Artificial
  probe
  misc_feature (1)..(25): SEQ ID NO: 6146; WAN024BJE; Start 46; Stop 70
gtcttgtctgactctggaatgtttt

SEQ ID NO: 430710 - DNA, 25 bp, Artificial
  probe
  misc_feature (1)..(25): SEQ ID NO: 6146; WAN024BJE; Start 19; Stop 43
gaaattatagagccaaaacattcca

SEQ ID NO: 430711 - DNA, 25 bp, Artificial
  probe
  misc_feature (1)..(25): SEQ ID NO: 6146; WAN024BJE; Start 27; Stop 51
agagccaaaacattccaaagtcttg

SEQ ID NO: 430712 - DNA, 25 bp, Artificial
  probe
  misc_feature (1)..(25): SEQ ID NO: 6146; WAN024BJE; Start 18; Stop 42
agaaattatagagccaaaacattcc

SEQ ID NO: 430713 - DNA, 25 bp, Artificial
  probe
  misc_feature (1)..(25): SEQ ID NO: 6146; WAN024BJE; Start 3; Stop 27
gggattacccactacagaaattata

SEQ ID NO: 430714 - DNA, 25 bp, Artificial
  probe
  misc_feature (1)..(25): SEQ ID NO: 6146; WAN024BJE; Start 21; Stop 45
aattatagagccaaaacattccaaa

SEQ ID NO: 430715 - DNA, 25 bp, Artificial
  probe
  misc_feature (1)..(25): SEQ ID NO: 6146; WAN024BJE; Start 20; Stop 44
aaattatagagccaaaacattccaa

SEQ ID NO: 430716 - DNA, 25 bp, Artificial
  probe
  misc_feature (1)..(25): SEQ ID NO: 6146; WAN024BJE; Start 65; Stop 89
tgttttctgttcacagttgttttgt

SEQ ID NO: 430717 - DNA, 25 bp, Artificial
  probe
  misc_feature (1)..(25): SEQ ID NO: 6146; WAN024BJE; Start 64; Stop 88
atgttttctgttcacagttgttttg

SEQ ID NO: 430718 - DNA, 25 bp, Artificial
  probe
  misc_feature (1)..(25): SEQ ID NO: 6146; WAN024BJE; Start 61; Stop 85
ggaatgttttctgttcacagttgtt

SEQ ID NO: 430719 - DNA, 25 bp, Artificial
  probe
  misc_feature (1)..(25): SEQ ID NO: 6146; WAN024BJE; Start 34; Stop 58
aaacattccaaagtcttgtctgact

SEQ ID NO: 430720 - DNA, 25 bp, Artificial
  probe
  misc_feature (1)..(25): SEQ ID NO: 6146; WAN024BJE; Start 62; Stop 86
gaatgttttctgttcacagttgttt

SEQ ID NO: 430721 - DNA, 25 bp, Artificial
  probe
  misc_feature (1)..(25): SEQ ID NO: 6147; WAN024BJ7; Start 43; Stop 67
agcatagattatcttggtgttcaca

SEQ ID NO: 430722 - DNA, 25 bp, Artificial
  probe
  misc_feature (1)..(25): SEQ ID NO: 6147; WAN024BJ7; Start 44; Stop 68
gcatagattatcttggtgttcacaa

SEQ ID NO: 430723 - DNA, 25 bp, Artificial
  probe
  misc_feature (1)..(25): SEQ ID NO: 6147; WAN024BJ7; Start 42; Stop 66
tagcatagattatcttggtgttcac

SEQ ID NO: 430724 - DNA, 25 bp, Artificial
  probe
  misc_feature (1)..(25): SEQ ID NO: 6147; WAN024BJ7; Start 41; Stop 65
ttagcatagattatcttggtgttca

SEQ ID NO: 430725 - DNA, 25 bp, Artificial
  probe
  misc_feature (1)..(25): SEQ ID NO: 6147; WAN024BJ7; Start 24; Stop 48
gggtaaagagatgggaattagcata

SEQ ID NO: 430726 - DNA, 25 bp, Artificial
  probe
  misc_feature (1)..(25): SEQ ID NO: 6147; WAN024BJ7; Start 265; Stop 289
tttagtagacttcctgcgaaacaaa

SEQ ID NO: 430727 - DNA, 25 bp, Artificial
  probe
  misc_feature (1)..(25): SEQ ID NO: 6147; WAN024BJ7; Start 37; Stop 61
ggaattagcatagattatcttggtg

SEQ ID NO: 430728 - DNA, 25 bp, Artificial
  probe
  misc_feature (1)..(25): SEQ ID NO: 6147; WAN024BJ7; Start 215; Stop 239
ttgttcctagagatatggtgattaa

SEQ ID NO: 430729 - DNA, 25 bp, Artificial
  probe
  misc_feature (1)..(25): SEQ ID NO: 6147; WAN024BJ7; Start 25; Stop 49
ggtaaagagatgggaattagcatag

SEQ ID NO: 430730 - DNA, 25 bp, Artificial
  probe
  misc_feature (1)..(25): SEQ ID NO: 6147; WAN024BJ7; Start 23; Stop 47
agggtaaagagatgggaattagcat

SEQ ID NO: 430731 - DNA, 25 bp, Artificial
  probe
  misc_feature (1)..(25): SEQ ID NO: 6147; WAN024BJ7; Start 20; Stop 44
ctcagggtaaagagatgggaattag

SEQ ID NO: 430732 - DNA, 25 bp, Artificial
  probe
  misc_feature (1)..(25): SEQ ID NO: 6147; WAN024BJ7; Start 158; Stop 182
gtgttagagttcatgctttagagga

SEQ ID NO: 430733 - DNA, 25 bp, Artificial
  probe
  misc_feature (1)..(25): SEQ ID NO: 6147; WAN024BJ7; Start 156; Stop 180
aggtgttagagttcatgctttagag

SEQ ID NO: 430734 - DNA, 25 bp, Artificial
  probe
  misc_feature (1)..(25): SEQ ID NO: 6147; WAN024BJ7; Start 159; Stop 183
tgttagagttcatgctttagaggat

SEQ ID NO: 430735 - DNA, 25 bp, Artificial
  probe
  misc_feature (1)..(25): SEQ ID NO: 6147; WAN024BJ7; Start 21; Stop 45
tcagggtaaagagatgggaattagc

SEQ ID NO: 430736 - DNA, 25 bp, Artificial
  probe
  misc_feature (1)..(25): SEQ ID NO: 6147; WAN024BJ7; Start 155; Stop 179
aaggtgttagagttcatgctttaga

SEQ ID NO: 430737 - DNA, 25 bp, Artificial
  probe
  misc_feature (1)..(25): SEQ ID NO: 6147; WAN024BJ7; Start 161; Stop 185
ttagagttcatgctttagaggatgc

SEQ ID NO: 430738 - DNA, 25 bp, Artificial
  probe
  misc_feature (1)..(25): SEQ ID NO: 6147; WAN024BJ7; Start 160; Stop 184
gttagagttcatgctttagaggatg

SEQ ID NO: 430739 - DNA, 25 bp, Artificial
  probe
  misc_feature (1)..(25): SEQ ID NO: 6147; WAN024BJ7; Start 157; Stop 181
ggtgttagagttcatgctttagagg

SEQ ID NO: 430740 - DNA, 25 bp, Artificial
  probe
  misc_feature (1)..(25): SEQ ID NO: 6147; WAN024BJ7; Start 214; Stop 238
attgttcctagagatatggtgatta

SEQ ID NO: 430741 - DNA, 25 bp, Artificial
  probe
  misc_feature (1)..(25): SEQ ID NO: 6147; WAN024BJ7; Start 213; Stop 237
tattgttcctagagatatggtgatt

SEQ ID NO: 430742 - DNA, 25 bp, Artificial
  probe
  misc_feature (1)..(25): SEQ ID NO: 6147; WAN024BJ7; Start 212; Stop 236
ttattgttcctagagatatggtgat

SEQ ID NO: 430743 - DNA, 25 bp, Artificial
  probe
  misc_feature (1)..(25): SEQ ID NO: 6147; WAN024BJ7; Start 22; Stop 46
cagggtaaagagatgggaattagca

SEQ ID NO: 430744 - DNA, 25 bp, Artificial
  probe
  misc_feature (1)..(25): SEQ ID NO: 6147; WAN024BJ7; Start 162; Stop 186
tagagttcatgctttagaggatgct

SEQ ID NO: 430745 - DNA, 25 bp, Artificial
  probe
  misc_feature (1)..(25): SEQ ID NO: 6147; WAN024BJ7; Start 26; Stop 50
gtaaagagatgggaattagcataga

SEQ ID NO: 430746 - DNA, 25 bp, Artificial
  probe
  misc_feature (1)..(25): SEQ ID NO: 6147; WAN024BJ7; Start 40; Stop 64
attagcatagattatcttggtgttc

SEQ ID NO: 430747 - DNA, 25 bp, Artificial
  probe
  misc_feature (1)..(25): SEQ ID NO: 6147; WAN024BJ7; Start 38; Stop 62
gaattagcatagattatcttggtgt

SEQ ID NO: 430748 - DNA, 25 bp, Artificial
  probe
  misc_feature (1)..(25): SEQ ID NO: 6147; WAN024BJ7; Start 28; Stop 52
aaagagatgggaattagcatagatt

SEQ ID NO: 430749 - DNA, 25 bp, Artificial
  probe
  misc_feature (1)..(25): SEQ ID NO: 6147; WAN024BJ7; Start 19; Stop 43
gctcagggtaaagagatgggaatta

SEQ ID NO: 430750 - DNA, 25 bp, Artificial
  probe
  misc_feature (1)..(25): SEQ ID NO: 6147; WAN024BJ7; Start 170; Stop 194
atgctttagaggatgctgtggaatt

SEQ ID NO: 430751 - DNA, 25 bp, Artificial
  probe
  misc_feature (1)..(25): SEQ ID NO: 6147; WAN024BJ7; Start 177; Stop 201
agaggatgctgtggaattctatgaa

SEQ ID NO: 430752 - DNA, 25 bp, Artificial
  probe
  misc_feature (1)..(25): SEQ ID NO: 6147; WAN024BJ7; Start 216; Stop 240
tgttcctagagatatggtgattaat

SEQ ID NO: 430753 - DNA, 25 bp, Artificial
  probe
  misc_feature (1)..(25): SEQ ID NO: 6147; WAN024BJ7; Start 105; Stop 129
gacctttgcacttcgattatcttta

SEQ ID NO: 430754 - DNA, 25 bp, Artificial
  probe
  misc_feature (1)..(25): SEQ ID NO: 6148; WAN024BJM; Start 219; Stop 243
gaaaagattaaataagaggaggggc

SEQ ID NO: 430755 - DNA, 25 bp, Artificial
  probe
  misc_feature (1)..(25): SEQ ID NO: 6148; WAN024BJM; Start 205; Stop 229
gcgactacgaggaagaaaagattaa

SEQ ID NO: 430756 - DNA, 25 bp, Artificial
  probe
  misc_feature (1)..(25): SEQ ID NO: 6148; WAN024BJM; Start 206; Stop 230
cgactacgaggaagaaaagattaaa

SEQ ID NO: 430757 - DNA, 25 bp, Artificial
  probe
  misc_feature (1)..(25): SEQ ID NO: 6148; WAN024BJM; Start 218; Stop 242
agaaaagattaaataagaggagggg

SEQ ID NO: 430758 - DNA, 25 bp, Artificial
  probe
  misc_feature (1)..(25): SEQ ID NO: 6148; WAN024BJM; Start 204; Stop 228
ggcgactacgaggaagaaaagatta

SEQ ID NO: 430759 - DNA, 25 bp, Artificial
  probe
  misc_feature (1)..(25): SEQ ID NO: 6148; WAN024BJM; Start 207; Stop 231
gactacgaggaagaaaagattaaat

SEQ ID NO: 430760 - DNA, 25 bp, Artificial
  probe
  misc_feature (1)..(25): SEQ ID NO: 6148; WAN024BJM; Start 217; Stop 241
aagaaaagattaaataagaggaggg

SEQ ID NO: 430761 - DNA, 25 bp, Artificial
  probe
  misc_feature (1)..(25): SEQ ID NO: 6148; WAN024BJM; Start 220; Stop 244
aaaagattaaataagaggaggggcc

SEQ ID NO: 430762 - DNA, 25 bp, Artificial
  probe
  misc_feature (1)..(25): SEQ ID NO: 6148; WAN024BJM; Start 203; Stop 227
aggcgactacgaggaagaaaagatt

SEQ ID NO: 430763 - DNA, 25 bp, Artificial
  probe
  misc_feature (1)..(25): SEQ ID NO: 6148; WAN024BJM; Start 211; Stop 235
acgaggaagaaaagattaaataaga

SEQ ID NO: 430764 - DNA, 25 bp, Artificial
  probe
  misc_feature (1)..(25): SEQ ID NO: 6148; WAN024BJM; Start 212; Stop 236
cgaggaagaaaagattaaataagag

SEQ ID NO: 430765 - DNA, 25 bp, Artificial
  probe
  misc_feature (1)..(25): SEQ ID NO: 6148; WAN024BJM; Start 208; Stop 232
actacgaggaagaaaagattaaata

SEQ ID NO: 430766 - DNA, 25 bp, Artificial
  probe
  misc_feature (1)..(25): SEQ ID NO: 6148; WAN024BJM; Start 214; Stop 238
aggaagaaaagattaaataagagga

SEQ ID NO: 430767 - DNA, 25 bp, Artificial
  probe
  misc_feature (1)..(25): SEQ ID NO: 6148; WAN024BJM; Start 216; Stop 240
gaagaaaagattaaataagaggagg

SEQ ID NO: 430768 - DNA, 25 bp, Artificial
  probe
  misc_feature (1)..(25): SEQ ID NO: 6148; WAN024BJM; Start 215; Stop 239
ggaagaaaagattaaataagaggag

SEQ ID NO: 430769 - DNA, 25 bp, Artificial
  probe
  misc_feature (1)..(25): SEQ ID NO: 6148; WAN024BJM; Start 213; Stop 237
gaggaagaaaagattaaataagagg

SEQ ID NO: 430770 - DNA, 25 bp, Artificial
  probe
  misc_feature (1)..(25): SEQ ID NO: 6148; WAN024BJM; Start 210; Stop 234
tacgaggaagaaaagattaaataag

SEQ ID NO: 430771 - DNA, 25 bp, Artificial
  probe
  misc_feature (1)..(25): SEQ ID NO: 6148; WAN024BJM; Start 209; Stop 233
ctacgaggaagaaaagattaaataa

SEQ ID NO: 430772 - DNA, 25 bp, Artificial
  probe
  misc_feature (1)..(25): SEQ ID NO: 6149; WAN0249BZ; Start 21; Stop 45
aatcgtgctgacttttctcttatct

SEQ ID NO: 430773 - DNA, 25 bp, Artificial
  probe
  misc_feature (1)..(25): SEQ ID NO: 6149; WAN0249BZ; Start 18; Stop 42
cataatcgtgctgacttttctctta

SEQ ID NO: 430774 - DNA, 25 bp, Artificial
  probe
  misc_feature (1)..(25): SEQ ID NO: 6149; WAN0249BZ; Start 25; Stop 49
gtgctgacttttctcttatctgatt

SEQ ID NO: 430775 - DNA, 25 bp, Artificial
  probe
  misc_feature (1)..(25): SEQ ID NO: 6149; WAN0249BZ; Start 24; Stop 48
cgtgctgacttttctcttatctgat

SEQ ID NO: 430776 - DNA, 25 bp, Artificial
  probe
  misc_feature (1)..(25): SEQ ID NO: 6149; WAN0249BZ; Start 22; Stop 46
atcgtgctgacttttctcttatctg

SEQ ID NO: 430777 - DNA, 25 bp, Artificial
  probe
  misc_feature (1)..(25): SEQ ID NO: 6149; WAN0249BZ; Start 20; Stop 44
taatcgtgctgacttttctcttatc

SEQ ID NO: 430778 - DNA, 25 bp, Artificial
  probe
  misc_feature (1)..(25): SEQ ID NO: 6149; WAN0249BZ; Start 26; Stop 50
tgctgacttttctcttatctgattt

SEQ ID NO: 430779 - DNA, 25 bp, Artificial
  probe
  misc_feature (1)..(25): SEQ ID NO: 6149; WAN0249BZ; Start 23; Stop 47
tcgtgctgacttttctcttatctga

SEQ ID NO: 430780 - DNA, 25 bp, Artificial
  probe
  misc_feature (1)..(25): SEQ ID NO: 6149; WAN0249BZ; Start 19; Stop 43
ataatcgtgctgacttttctcttat

SEQ ID NO: 430781 - DNA, 25 bp, Artificial
  probe
  misc_feature (1)..(25): SEQ ID NO: 6149; WAN0249BZ; Start 17; Stop 41
gcataatcgtgctgacttttctctt

SEQ ID NO: 430782 - DNA, 25 bp, Artificial
  probe
  misc_feature (1)..(25): SEQ ID NO: 6150; WAN02497E; Start 34; Stop 58
tcctaagccatctctattcttatcc

SEQ ID NO: 430783 - DNA, 25 bp, Artificial
  probe
  misc_feature (1)..(25): SEQ ID NO: 6150; WAN02497E; Start 140; Stop 164
tctggctctataatttctgtagtgg

SEQ ID NO: 430784 - DNA, 25 bp, Artificial
  probe
  misc_feature (1)..(25): SEQ ID NO: 6150; WAN02497E; Start 141; Stop 165
ctggctctataatttctgtagtggg

SEQ ID NO: 430785 - DNA, 25 bp, Artificial
  probe
  misc_feature (1)..(25): SEQ ID NO: 6150; WAN02497E; Start 33; Stop 57
ttcctaagccatctctattcttatc

SEQ ID NO: 430786 - DNA, 25 bp, Artificial
  probe
  misc_feature (1)..(25): SEQ ID NO: 6150; WAN02497E; Start 32; Stop 56
cttcctaagccatctctattcttat

SEQ ID NO: 430787 - DNA, 25 bp, Artificial
  probe
  misc_feature (1)..(25): SEQ ID NO: 6150; WAN02497E; Start 35; Stop 59
cctaagccatctctattcttatccc

SEQ ID NO: 430788 - DNA, 25 bp, Artificial
  probe
  misc_feature (1)..(25): SEQ ID NO: 6150; WAN02497E; Start 139; Stop 163
ttctggctctataatttctgtagtg

SEQ ID NO: 430789 - DNA, 25 bp, Artificial
  probe
  misc_feature (1)..(25): SEQ ID NO: 6150; WAN02497E; Start 236; Stop 260
cgcctaaacaactcattagaaagta

SEQ ID NO: 430790 - DNA, 25 bp, Artificial
  probe
  misc_feature (1)..(25): SEQ ID NO: 6150; WAN02497E; Start 1; Stop 25
gttcatcgtactgtctacacacaaa

SEQ ID NO: 430791 - DNA, 25 bp, Artificial
  probe
  misc_feature (1)..(25): SEQ ID NO: 6150; WAN02497E; Start 97; Stop 121
cacttctgctctctagtttctgcta

SEQ ID NO: 430792 - DNA, 25 bp, Artificial
  probe
  misc_feature (1)..(25): SEQ ID NO: 6150; WAN02497E; Start 138; Stop 162
tttctggctctataatttctgtagt

SEQ ID NO: 430793 - DNA, 25 bp, Artificial
  probe
  misc_feature (1)..(25): SEQ ID NO: 6150; WAN02497E; Start 105; Stop 129
ctctctagtttctgctagtgaacaa

SEQ ID NO: 430794 - DNA, 25 bp, Artificial
  probe
  misc_feature (1)..(25): SEQ ID NO: 6150; WAN02497E; Start 106; Stop 130
tctctagtttctgctagtgaacaaa

SEQ ID NO: 430795 - DNA, 25 bp, Artificial
  probe
  misc_feature (1)..(25): SEQ ID NO: 6150; WAN02497E; Start 99; Stop 123
cttctgctctctagtttctgctagt

SEQ ID NO: 430796 - DNA, 25 bp, Artificial
  probe
  misc_feature (1)..(25): SEQ ID NO: 6150; WAN02497E; Start 98; Stop 122
acttctgctctctagtttctgctag

SEQ ID NO: 430797 - DNA, 25 bp, Artificial
  probe
  misc_feature (1)..(25): SEQ ID NO: 6150; WAN02497E; Start 94; Stop 118
aaacacttctgctctctagtttctg

SEQ ID NO: 430798 - DNA, 25 bp, Artificial
  probe
  misc_feature (1)..(25): SEQ ID NO: 6150; WAN02497E; Start 95; Stop 119
aacacttctgctctctagtttctgc

SEQ ID NO: 430799 - DNA, 25 bp, Artificial
  probe
  misc_feature (1)..(25): SEQ ID NO: 6150; WAN02497E; Start 39; Stop 63
agccatctctattcttatccccata

SEQ ID NO: 430800 - DNA, 25 bp, Artificial
  probe
  misc_feature (1)..(25): SEQ ID NO: 6150; WAN02497E; Start 102; Stop 126
ctgctctctagtttctgctagtgaa

SEQ ID NO: 430801 - DNA, 25 bp, Artificial
  probe
  misc_feature (1)..(25): SEQ ID NO: 6150; WAN02497E; Start 100; Stop 124
ttctgctctctagtttctgctagtg

SEQ ID NO: 430802 - DNA, 25 bp, Artificial
  probe
  misc_feature (1)..(25): SEQ ID NO: 6150; WAN02497E; Start 52; Stop 76
cttatccccatatttcccagttttg

SEQ ID NO: 430803 - DNA, 25 bp, Artificial
  probe
  misc_feature (1)..(25): SEQ ID NO: 6150; WAN02497E; Start 51; Stop 75
tcttatccccatatttcccagtttt

SEQ ID NO: 430804 - DNA, 25 bp, Artificial
  probe
  misc_feature (1)..(25): SEQ ID NO: 6150; WAN02497E; Start 50; Stop 74
ttcttatccccatatttcccagttt

SEQ ID NO: 430805 - DNA, 25 bp, Artificial
  probe
  misc_feature (1)..(25): SEQ ID NO: 6150; WAN02497E; Start 49; Stop 73
attcttatccccatatttcccagtt

SEQ ID NO: 430806 - DNA, 25 bp, Artificial
  probe
  misc_feature (1)..(25): SEQ ID NO: 6150; WAN02497E; Start 40; Stop 64
gccatctctattcttatccccatat

SEQ ID NO: 430807 - DNA, 25 bp, Artificial
  probe
  misc_feature (1)..(25): SEQ ID NO: 6150; WAN02497E; Start 104; Stop 128
gctctctagtttctgctagtgaaca

SEQ ID NO: 430808 - DNA, 25 bp, Artificial
  probe
  misc_feature (1)..(25): SEQ ID NO: 6150; WAN02497E; Start 103; Stop 127
tgctctctagtttctgctagtgaac

SEQ ID NO: 430809 - DNA, 25 bp, Artificial
  probe
  misc_feature (1)..(25): SEQ ID NO: 6150; WAN02497E; Start 164; Stop 188
ggtaaatcccactgtggagattata

SEQ ID NO: 430810 - DNA, 25 bp, Artificial
  probe
  misc_feature (1)..(25): SEQ ID NO: 6150; WAN02497E; Start 38; Stop 62
aagccatctctattcttatccccat

SEQ ID NO: 430811 - DNA, 25 bp, Artificial
  probe
  misc_feature (1)..(25): SEQ ID NO: 6150; WAN02497E; Start 237; Stop 261
gcctaaacaactcattagaaagtat

SEQ ID NO: 430812 - DNA, 25 bp, Artificial
  probe
  misc_feature (1)..(25): SEQ ID NO: 6150; WAN02497E; Start 166; Stop 190
taaatcccactgtggagattatagg

SEQ ID NO: 430813 - DNA, 25 bp, Artificial
  probe
  misc_feature (1)..(25): SEQ ID NO: 6150; WAN02497E; Start 48; Stop 72
tattcttatccccatatttcccagt

SEQ ID NO: 430814 - DNA, 25 bp, Artificial
  probe
  misc_feature (1)..(25): SEQ ID NO: 6150; WAN02497E; Start 46; Stop 70
tctattcttatccccatatttccca

SEQ ID NO: 430815 - DNA, 25 bp, Artificial
  probe
  misc_feature (1)..(25): SEQ ID NO: 6151; WAN0249CP; Start 43; Stop 67
ttctctaagtgatttgttccgattt

SEQ ID NO: 430816 - DNA, 25 bp, Artificial
  probe
  misc_feature (1)..(25): SEQ ID NO: 6151; WAN0249CP; Start 42; Stop 66
attctctaagtgatttgttccgatt

SEQ ID NO: 430817 - DNA, 25 bp, Artificial
  probe
  misc_feature (1)..(25): SEQ ID NO: 6151; WAN0249CP; Start 41; Stop 65
aattctctaagtgatttgttccgat

SEQ ID NO: 430818 - DNA, 25 bp, Artificial
  probe
  misc_feature (1)..(25): SEQ ID NO: 6151; WAN0249CP; Start 87; Stop 111
aataagacgacgggctaattgacaa

SEQ ID NO: 430819 - DNA, 25 bp, Artificial
  probe
  misc_feature (1)..(25): SEQ ID NO: 6151; WAN0249CP; Start 86; Stop 110
aaataagacgacgggctaattgaca

SEQ ID NO: 430820 - DNA, 25 bp, Artificial
  probe
  misc_feature (1)..(25): SEQ ID NO: 6151; WAN0249CP; Start 88; Stop 112
ataagacgacgggctaattgacaat

SEQ ID NO: 430821 - DNA, 25 bp, Artificial
  probe
  misc_feature (1)..(25): SEQ ID NO: 6151; WAN0249CP; Start 95; Stop 119
gacgggctaattgacaatcatcttg

SEQ ID NO: 430822 - DNA, 25 bp, Artificial
  probe
  misc_feature (1)..(25): SEQ ID NO: 6151; WAN0249CP; Start 10; Stop 34
aacgtctcaaacagtgctagaaatt

SEQ ID NO: 430823 - DNA, 25 bp, Artificial
  probe
  misc_feature (1)..(25): SEQ ID NO: 6151; WAN0249CP; Start 9; Stop 33
aaacgtctcaaacagtgctagaaat

SEQ ID NO: 430824 - DNA, 25 bp, Artificial
  probe
  misc_feature (1)..(25): SEQ ID NO: 6151; WAN0249CP; Start 32; Stop 56
attgactggaattctctaagtgatt

SEQ ID NO: 430825 - DNA, 25 bp, Artificial
  probe
  misc_feature (1)..(25): SEQ ID NO: 6151; WAN0249CP; Start 89; Stop 113
taagacgacgggctaattgacaatc

SEQ ID NO: 430826 - DNA, 25 bp, Artificial
  probe
  misc_feature (1)..(25): SEQ ID NO: 6151; WAN0249CP; Start 31; Stop 55
aattgactggaattctctaagtgat

SEQ ID NO: 430827 - DNA, 25 bp, Artificial
  probe
  misc_feature (1)..(25): SEQ ID NO: 6151; WAN0249CP; Start 8; Stop 32
gaaacgtctcaaacagtgctagaaa

SEQ ID NO: 430828 - DNA, 25 bp, Artificial
  probe
  misc_feature (1)..(25): SEQ ID NO: 6151; WAN0249CP; Start 11; Stop 35
acgtctcaaacagtgctagaaattg

SEQ ID NO: 430829 - DNA, 25 bp, Artificial
  probe
  misc_feature (1)..(25): SEQ ID NO: 6151; WAN0249CP; Start 44; Stop 68
tctctaagtgatttgttccgatttt

SEQ ID NO: 430830 - DNA, 25 bp, Artificial
  probe
  misc_feature (1)..(25): SEQ ID NO: 6151; WAN0249CP; Start 14; Stop 38
tctcaaacagtgctagaaattgact

SEQ ID NO: 430831 - DNA, 25 bp, Artificial
  probe
  misc_feature (1)..(25): SEQ ID NO: 6151; WAN0249CP; Start 13; Stop 37
gtctcaaacagtgctagaaattgac

SEQ ID NO: 430832 - DNA, 25 bp, Artificial
  probe
  misc_feature (1)..(25): SEQ ID NO: 6151; WAN0249CP; Start 40; Stop 64
gaattctctaagtgatttgttccga

SEQ ID NO: 430833 - DNA, 25 bp, Artificial
  probe
  misc_feature (1)..(25): SEQ ID NO: 6151; WAN0249CP; Start 85; Stop 109
aaaataagacgacgggctaattgac

SEQ ID NO: 430834 - DNA, 25 bp, Artificial
  probe
  misc_feature (1)..(25): SEQ ID NO: 6151; WAN0249CP; Start 58; Stop 82
gttccgattttatttcattccatca

SEQ ID NO: 430835 - DNA, 25 bp, Artificial
  probe
  misc_feature (1)..(25): SEQ ID NO: 6151; WAN0249CP; Start 57; Stop 81
tgttccgattttatttcattccatc

SEQ ID NO: 430836 - DNA, 25 bp, Artificial
  probe
  misc_feature (1)..(25): SEQ ID NO: 6151; WAN0249CP; Start 55; Stop 79
tttgttccgattttatttcattcca

SEQ ID NO: 430837 - DNA, 25 bp, Artificial
  probe
  misc_feature (1)..(25): SEQ ID NO: 6151; WAN0249CP; Start 35; Stop 59
gactggaattctctaagtgatttgt

SEQ ID NO: 430838 - DNA, 25 bp, Artificial
  probe
  misc_feature (1)..(25): SEQ ID NO: 6151; WAN0249CP; Start 34; Stop 58
tgactggaattctctaagtgatttg

SEQ ID NO: 430839 - DNA, 25 bp, Artificial
  probe
  misc_feature (1)..(25): SEQ ID NO: 6151; WAN0249CP; Start 12; Stop 36
cgtctcaaacagtgctagaaattga

SEQ ID NO: 430840 - DNA, 25 bp, Artificial
  probe
  misc_feature (1)..(25): SEQ ID NO: 6151; WAN0249CP; Start 94; Stop 118
cgacgggctaattgacaatcatctt

SEQ ID NO: 430841 - DNA, 25 bp, Artificial
  probe
  misc_feature (1)..(25): SEQ ID NO: 6151; WAN0249CP; Start 98; Stop 122
gggctaattgacaatcatcttgttt

SEQ ID NO: 430842 - DNA, 25 bp, Artificial
  probe
  misc_feature (1)..(25): SEQ ID NO: 6151; WAN0249CP; Start 56; Stop 80
ttgttccgattttatttcattccat

SEQ ID NO: 430843 - DNA, 25 bp, Artificial
  probe
  misc_feature (1)..(25): SEQ ID NO: 6151; WAN0249CP; Start 99; Stop 123
ggctaattgacaatcatcttgtttg

SEQ ID NO: 430844 - DNA, 25 bp, Artificial
  probe
  misc_feature (1)..(25): SEQ ID NO: 6151; WAN0249CP; Start 36; Stop 60
actggaattctctaagtgatttgtt

SEQ ID NO: 430845 - DNA, 25 bp, Artificial
  probe
  misc_feature (1)..(25): SEQ ID NO: 6151; WAN0249CP; Start 7; Stop 31
tgaaacgtctcaaacagtgctagaa

SEQ ID NO: 430846 - DNA, 25 bp, Artificial
  probe
  misc_feature (1)..(25): SEQ ID NO: 6151; WAN0249CP; Start 37; Stop 61
ctggaattctctaagtgatttgttc

SEQ ID NO: 430847 - DNA, 25 bp, Artificial
  probe
  misc_feature (1)..(25): SEQ ID NO: 6151; WAN0249CP; Start 33; Stop 57
ttgactggaattctctaagtgattt

SEQ ID NO: 430848 - DNA, 25 bp, Artificial
  probe
  misc_feature (1)..(25): SEQ ID NO: 6152; WAN0249A6; Start 13; Stop 37
tcatttgaccgactgaatactcata

SEQ ID NO: 430849 - DNA, 25 bp, Artificial
  probe
  misc_feature (1)..(25): SEQ ID NO: 6152; WAN0249A6; Start 42; Stop 66
tcagagagaaatagcataaataggc

SEQ ID NO: 430850 - DNA, 25 bp, Artificial
  probe
  misc_feature (1)..(25): SEQ ID NO: 6152; WAN0249A6; Start 14; Stop 38
catttgaccgactgaatactcatat

SEQ ID NO: 430851 - DNA, 25 bp, Artificial
  probe
  misc_feature (1)..(25): SEQ ID NO: 6152; WAN0249A6; Start 16; Stop 40
tttgaccgactgaatactcatattt

SEQ ID NO: 430852 - DNA, 25 bp, Artificial
  probe
  misc_feature (1)..(25): SEQ ID NO: 6152; WAN0249A6; Start 15; Stop 39
atttgaccgactgaatactcatatt

SEQ ID NO: 430853 - DNA, 25 bp, Artificial
  probe
  misc_feature (1)..(25): SEQ ID NO: 6152; WAN0249A6; Start 12; Stop 36
ttcatttgaccgactgaatactcat

SEQ ID NO: 430854 - DNA, 25 bp, Artificial
  probe
  misc_feature (1)..(25): SEQ ID NO: 6152; WAN0249A6; Start 11; Stop 35
cttcatttgaccgactgaatactca

SEQ ID NO: 430855 - DNA, 25 bp, Artificial
  probe
  misc_feature (1)..(25): SEQ ID NO: 6152; WAN0249A6; Start 43; Stop 67
cagagagaaatagcataaataggcc

SEQ ID NO: 430856 - DNA, 25 bp, Artificial
  probe
  misc_feature (1)..(25): SEQ ID NO: 6152; WAN0249A6; Start 41; Stop 65
ttcagagagaaatagcataaatagg

SEQ ID NO: 430857 - DNA, 25 bp, Artificial
  probe
  misc_feature (1)..(25): SEQ ID NO: 6152; WAN0249A6; Start 17; Stop 41
ttgaccgactgaatactcatatttt

SEQ ID NO: 430858 - DNA, 25 bp, Artificial
  probe
  misc_feature (1)..(25): SEQ ID NO: 6152; WAN0249A6; Start 10; Stop 34
gcttcatttgaccgactgaatactc

SEQ ID NO: 430859 - DNA, 25 bp, Artificial
  probe
  misc_feature (1)..(25): SEQ ID NO: 6152; WAN0249A6; Start 9; Stop 33
agcttcatttgaccgactgaatact

SEQ ID NO: 430860 - DNA, 25 bp, Artificial
  probe
  misc_feature (1)..(25): SEQ ID NO: 6152; WAN0249A6; Start 8; Stop 32
cagcttcatttgaccgactgaatac

SEQ ID NO: 430861 - DNA, 25 bp, Artificial
  probe
  misc_feature (1)..(25): SEQ ID NO: 6152; WAN0249A6; Start 7; Stop 31
tcagcttcatttgaccgactgaata

SEQ ID NO: 430862 - DNA, 25 bp, Artificial
  probe
  misc_feature (1)..(25): SEQ ID NO: 6152; WAN0249A6; Start 1; Stop 25
gttcgttcagcttcatttgaccgac

SEQ ID NO: 430863 - DNA, 25 bp, Artificial
  probe
  misc_feature (1)..(25): SEQ ID NO: 6152; WAN0249A6; Start 2; Stop 26
ttcgttcagcttcatttgaccgact

SEQ ID NO: 430864 - DNA, 25 bp, Artificial
  probe
  misc_feature (1)..(25): SEQ ID NO: 6153; WAN02498J; Start 57; Stop 81
tctcaaatctgtctttctcctcttt

SEQ ID NO: 430865 - DNA, 25 bp, Artificial
  probe
  misc_feature (1)..(25): SEQ ID NO: 6153; WAN02498J; Start 56; Stop 80
atctcaaatctgtctttctcctctt

SEQ ID NO: 430866 - DNA, 25 bp, Artificial
  probe
  misc_feature (1)..(25): SEQ ID NO: 6153; WAN02498J; Start 55; Stop 79
aatctcaaatctgtctttctcctct

SEQ ID NO: 430867 - DNA, 25 bp, Artificial
  probe
  misc_feature (1)..(25): SEQ ID NO: 6153; WAN02498J; Start 42; Stop 66
tttacttctgcggaatctcaaatct

SEQ ID NO: 430868 - DNA, 25 bp, Artificial
  probe
  misc_feature (1)..(25): SEQ ID NO: 6153; WAN02498J; Start 54; Stop 78
gaatctcaaatctgtctttctcctc

SEQ ID NO: 430869 - DNA, 25 bp, Artificial
  probe
  misc_feature (1)..(25): SEQ ID NO: 6153; WAN02498J; Start 43; Stop 67
ttacttctgcggaatctcaaatctg

SEQ ID NO: 430870 - DNA, 25 bp, Artificial
  probe
  misc_feature (1)..(25): SEQ ID NO: 6153; WAN02498J; Start 51; Stop 75
gcggaatctcaaatctgtctttctc

SEQ ID NO: 430871 - DNA, 25 bp, Artificial
  probe
  misc_feature (1)..(25): SEQ ID NO: 6153; WAN02498J; Start 44; Stop 68
tacttctgcggaatctcaaatctgt

SEQ ID NO: 430872 - DNA, 25 bp, Artificial
  probe
  misc_feature (1)..(25): SEQ ID NO: 6153; WAN02498J; Start 49; Stop 73
ctgcggaatctcaaatctgtctttc

SEQ ID NO: 430873 - DNA, 25 bp, Artificial
  probe
  misc_feature (1)..(25): SEQ ID NO: 6153; WAN02498J; Start 53; Stop 77
ggaatctcaaatctgtctttctcct

SEQ ID NO: 430874 - DNA, 25 bp, Artificial
  probe
  misc_feature (1)..(25): SEQ ID NO: 6153; WAN02498J; Start 48; Stop 72
tctgcggaatctcaaatctgtcttt

SEQ ID NO: 430875 - DNA, 25 bp, Artificial
  probe
  misc_feature (1)..(25): SEQ ID NO: 6153; WAN02498J; Start 50; Stop 74
tgcggaatctcaaatctgtctttct

SEQ ID NO: 430876 - DNA, 25 bp, Artificial
  probe
  misc_feature (1)..(25): SEQ ID NO: 6153; WAN02498J; Start 47; Stop 71
ttctgcggaatctcaaatctgtctt

SEQ ID NO: 430877 - DNA, 25 bp, Artificial
  probe
  misc_feature (1)..(25): SEQ ID NO: 6153; WAN02498J; Start 52; Stop 76
cggaatctcaaatctgtctttctcc

SEQ ID NO: 430878 - DNA, 25 bp, Artificial
  probe
  misc_feature (1)..(25): SEQ ID NO: 6153; WAN02498J; Start 46; Stop 70
cttctgcggaatctcaaatctgtct

SEQ ID NO: 430879 - DNA, 25 bp, Artificial
  probe
  misc_feature (1)..(25): SEQ ID NO: 6153; WAN02498J; Start 45; Stop 69
acttctgcggaatctcaaatctgtc

SEQ ID NO: 430880 - DNA, 25 bp, Artificial
  probe
  misc_feature (1)..(25): SEQ ID NO: 6153; WAN02498J; Start 41; Stop 65
ttttacttctgcggaatctcaaatc

SEQ ID NO: 430881 - DNA, 25 bp, Artificial
  probe
  misc_feature (1)..(25): SEQ ID NO: 6153; WAN02498J; Start 58; Stop 82
ctcaaatctgtctttctcctctttt

SEQ ID NO: 430882 - DNA, 25 bp, Artificial
  probe
  misc_feature (1)..(25): SEQ ID NO: 6153; WAN02498J; Start 2; Stop 26
ttgagatttaatcgtatcgaacagc

SEQ ID NO: 430883 - DNA, 25 bp, Artificial
  probe
  misc_feature (1)..(25): SEQ ID NO: 6153; WAN02498J; Start 3; Stop 27
tgagatttaatcgtatcgaacagcc

SEQ ID NO: 430884 - DNA, 25 bp, Artificial
  probe
  misc_feature (1)..(25): SEQ ID NO: 6153; WAN02498J; Start 59; Stop 83
tcaaatctgtctttctcctctttta

SEQ ID NO: 430885 - DNA, 25 bp, Artificial
  probe
  misc_feature (1)..(25): SEQ ID NO: 6153; WAN02498J; Start 62; Stop 86
aatctgtctttctcctcttttatga

SEQ ID NO: 430886 - DNA, 25 bp, Artificial
  probe
  misc_feature (1)..(25): SEQ ID NO: 6153; WAN02498J; Start 6; Stop 30
gatttaatcgtatcgaacagccctc

SEQ ID NO: 430887 - DNA, 25 bp, Artificial
  probe
  misc_feature (1)..(25): SEQ ID NO: 6153; WAN02498J; Start 4; Stop 28
gagatttaatcgtatcgaacagccc

SEQ ID NO: 430888 - DNA, 25 bp, Artificial
  probe
  misc_feature (1)..(25): SEQ ID NO: 6153; WAN02498J; Start 1; Stop 25
gttgagatttaatcgtatcgaacag

SEQ ID NO: 430889 - DNA, 25 bp, Artificial
  probe
  misc_feature (1)..(25): SEQ ID NO: 6153; WAN02498J; Start 7; Stop 31
atttaatcgtatcgaacagccctct

SEQ ID NO: 430890 - DNA, 25 bp, Artificial
  probe
  misc_feature (1)..(25): SEQ ID NO: 6153; WAN02498J; Start 5; Stop 29
agatttaatcgtatcgaacagccct

SEQ ID NO: 430891 - DNA, 25 bp, Artificial
  probe
  misc_feature (1)..(25): SEQ ID NO: 6153; WAN02498J; Start 63; Stop 87
atctgtctttctcctcttttatgat

SEQ ID NO: 430892 - DNA, 25 bp, Artificial
  probe
  misc_feature (1)..(25): SEQ ID NO: 6153; WAN02498J; Start 9; Stop 33
ttaatcgtatcgaacagccctcttt

SEQ ID NO: 430893 - DNA, 25 bp, Artificial
  probe
  misc_feature (1)..(25): SEQ ID NO: 6153; WAN02498J; Start 8; Stop 32
tttaatcgtatcgaacagccctctt

SEQ ID NO: 430894 - DNA, 25 bp, Artificial
  probe
  misc_feature (1)..(25): SEQ ID NO: 6153; WAN02498J; Start 61; Stop 85
aaatctgtctttctcctcttttatg

SEQ ID NO: 430895 - DNA, 25 bp, Artificial
  probe
  misc_feature (1)..(25): SEQ ID NO: 6153; WAN02498J; Start 60; Stop 84
caaatctgtctttctcctcttttat

SEQ ID NO: 430896 - DNA, 25 bp, Artificial
  probe
  misc_feature (1)..(25): SEQ ID NO: 6153; WAN02498J; Start 64; Stop 88
tctgtctttctcctcttttatgata

SEQ ID NO: 430897 - DNA, 25 bp, Artificial
  probe
  misc_feature (1)..(25): SEQ ID NO: 6154; WAN024967; Start 18; Stop 42
aaagaggagaaagacagatttgaga

SEQ ID NO: 430898 - DNA, 25 bp, Artificial
  probe
  misc_feature (1)..(25): SEQ ID NO: 6154; WAN024967; Start 20; Stop 44
agaggagaaagacagatttgagatt

SEQ ID NO: 430899 - DNA, 25 bp, Artificial
  probe
  misc_feature (1)..(25): SEQ ID NO: 6154; WAN024967; Start 19; Stop 43
aagaggagaaagacagatttgagat

SEQ ID NO: 430900 - DNA, 25 bp, Artificial
  probe
  misc_feature (1)..(25): SEQ ID NO: 6154; WAN024967; Start 33; Stop 57
agatttgagattccgcagaagtaaa

SEQ ID NO: 430901 - DNA, 25 bp, Artificial
  probe
  misc_feature (1)..(25): SEQ ID NO: 6154; WAN024967; Start 21; Stop 45
gaggagaaagacagatttgagattc

SEQ ID NO: 430902 - DNA, 25 bp, Artificial
  probe
  misc_feature (1)..(25): SEQ ID NO: 6154; WAN024967; Start 32; Stop 56
cagatttgagattccgcagaagtaa

SEQ ID NO: 430903 - DNA, 25 bp, Artificial
  probe
  misc_feature (1)..(25): SEQ ID NO: 6154; WAN024967; Start 31; Stop 55
acagatttgagattccgcagaagta

SEQ ID NO: 430904 - DNA, 25 bp, Artificial
  probe
  misc_feature (1)..(25): SEQ ID NO: 6154; WAN024967; Start 24; Stop 48
gagaaagacagatttgagattccgc

SEQ ID NO: 430905 - DNA, 25 bp, Artificial
  probe
  misc_feature (1)..(25): SEQ ID NO: 6154; WAN024967; Start 26; Stop 50
gaaagacagatttgagattccgcag

SEQ ID NO: 430906 - DNA, 25 bp, Artificial
  probe
  misc_feature (1)..(25): SEQ ID NO: 6154; WAN024967; Start 22; Stop 46
aggagaaagacagatttgagattcc

SEQ ID NO: 430907 - DNA, 25 bp, Artificial
  probe
  misc_feature (1)..(25): SEQ ID NO: 6154; WAN024967; Start 27; Stop 51
aaagacagatttgagattccgcaga

SEQ ID NO: 430908 - DNA, 25 bp, Artificial
  probe
  misc_feature (1)..(25): SEQ ID NO: 6154; WAN024967; Start 28; Stop 52
aagacagatttgagattccgcagaa

SEQ ID NO: 430909 - DNA, 25 bp, Artificial
  probe
  misc_feature (1)..(25): SEQ ID NO: 6154; WAN024967; Start 25; Stop 49
agaaagacagatttgagattccgca

SEQ ID NO: 430910 - DNA, 25 bp, Artificial
  probe
  misc_feature (1)..(25): SEQ ID NO: 6154; WAN024967; Start 23; Stop 47
ggagaaagacagatttgagattccg

SEQ ID NO: 430911 - DNA, 25 bp, Artificial
  probe
  misc_feature (1)..(25): SEQ ID NO: 6154; WAN024967; Start 29; Stop 53
agacagatttgagattccgcagaag

SEQ ID NO: 430912 - DNA, 25 bp, Artificial
  probe
  misc_feature (1)..(25): SEQ ID NO: 6154; WAN024967; Start 30; Stop 54
gacagatttgagattccgcagaagt

SEQ ID NO: 430913 - DNA, 25 bp, Artificial
  probe
  misc_feature (1)..(25): SEQ ID NO: 6154; WAN024967; Start 34; Stop 58
gatttgagattccgcagaagtaaaa

SEQ ID NO: 430914 - DNA, 25 bp, Artificial
  probe
  misc_feature (1)..(25): SEQ ID NO: 6154; WAN024967; Start 17; Stop 41
aaaagaggagaaagacagatttgag

SEQ ID NO: 430915 - DNA, 25 bp, Artificial
  probe
  misc_feature (1)..(25): SEQ ID NO: 6154; WAN024967; Start 73; Stop 97
gctgttcgatacgattaaatctcaa

SEQ ID NO: 430916 - DNA, 25 bp, Artificial
  probe
  misc_feature (1)..(25): SEQ ID NO: 6154; WAN024967; Start 72; Stop 96
ggctgttcgatacgattaaatctca

SEQ ID NO: 430917 - DNA, 25 bp, Artificial
  probe
  misc_feature (1)..(25): SEQ ID NO: 6154; WAN024967; Start 16; Stop 40
taaaagaggagaaagacagatttga

SEQ ID NO: 430918 - DNA, 25 bp, Artificial
  probe
  misc_feature (1)..(25): SEQ ID NO: 6154; WAN024967; Start 13; Stop 37
tcataaaagaggagaaagacagatt

SEQ ID NO: 430919 - DNA, 25 bp, Artificial
  probe
  misc_feature (1)..(25): SEQ ID NO: 6154; WAN024967; Start 71; Stop 95
gggctgttcgatacgattaaatctc

SEQ ID NO: 430920 - DNA, 25 bp, Artificial
  probe
  misc_feature (1)..(25): SEQ ID NO: 6154; WAN024967; Start 69; Stop 93
gagggctgttcgatacgattaaatc

SEQ ID NO: 430921 - DNA, 25 bp, Artificial
  probe
  misc_feature (1)..(25): SEQ ID NO: 6154; WAN024967; Start 74; Stop 98
ctgttcgatacgattaaatctcaac

SEQ ID NO: 430922 - DNA, 25 bp, Artificial
  probe
  misc_feature (1)..(25): SEQ ID NO: 6154; WAN024967; Start 70; Stop 94
agggctgttcgatacgattaaatct

SEQ ID NO: 430923 - DNA, 25 bp, Artificial
  probe
  misc_feature (1)..(25): SEQ ID NO: 6154; WAN024967; Start 68; Stop 92
agagggctgttcgatacgattaaat

SEQ ID NO: 430924 - DNA, 25 bp, Artificial
  probe
  misc_feature (1)..(25): SEQ ID NO: 6154; WAN024967; Start 12; Stop 36
atcataaaagaggagaaagacagat

SEQ ID NO: 430925 - DNA, 25 bp, Artificial
  probe
  misc_feature (1)..(25): SEQ ID NO: 6154; WAN024967; Start 67; Stop 91
aagagggctgttcgatacgattaaa

SEQ ID NO: 430926 - DNA, 25 bp, Artificial
  probe
  misc_feature (1)..(25): SEQ ID NO: 6154; WAN024967; Start 66; Stop 90
aaagagggctgttcgatacgattaa

SEQ ID NO: 430927 - DNA, 25 bp, Artificial
  probe
  misc_feature (1)..(25): SEQ ID NO: 6154; WAN024967; Start 15; Stop 39
ataaaagaggagaaagacagatttg

SEQ ID NO: 430928 - DNA, 25 bp, Artificial
  probe
  misc_feature (1)..(25): SEQ ID NO: 6154; WAN024967; Start 14; Stop 38
cataaaagaggagaaagacagattt

SEQ ID NO: 430929 - DNA, 25 bp, Artificial
  probe
  misc_feature (1)..(25): SEQ ID NO: 6154; WAN024967; Start 11; Stop 35
tatcataaaagaggagaaagacaga

SEQ ID NO: 430930 - DNA, 25 bp, Artificial
  probe
  misc_feature (1)..(25): SEQ ID NO: 6155; WAN02498Y; Start 6; Stop 30
acacctccttaaagaacataataaa

SEQ ID NO: 430931 - DNA, 25 bp, Artificial
  probe
  misc_feature (1)..(25): SEQ ID NO: 6155; WAN02498Y; Start 7; Stop 31
cacctccttaaagaacataataaac

SEQ ID NO: 430932 - DNA, 25 bp, Artificial
  probe
  misc_feature (1)..(25): SEQ ID NO: 6155; WAN02498Y; Start 3; Stop 27
tttacacctccttaaagaacataat

SEQ ID NO: 430933 - DNA, 25 bp, Artificial
  probe
  misc_feature (1)..(25): SEQ ID NO: 6155; WAN02498Y; Start 8; Stop 32
acctccttaaagaacataataaact

SEQ ID NO: 430934 - DNA, 25 bp, Artificial
  probe
  misc_feature (1)..(25): SEQ ID NO: 6155; WAN02498Y; Start 89; Stop 113
ctaggtatgcaaaagtaaaggaggt

SEQ ID NO: 430935 - DNA, 25 bp, Artificial
  probe
  misc_feature (1)..(25): SEQ ID NO: 6155; WAN02498Y; Start 88; Stop 112
tctaggtatgcaaaagtaaaggagg

SEQ ID NO: 430936 - DNA, 25 bp, Artificial
  probe
  misc_feature (1)..(25): SEQ ID NO: 6155; WAN02498Y; Start 91; Stop 115
aggtatgcaaaagtaaaggaggtat

SEQ ID NO: 430937 - DNA, 25 bp, Artificial
  probe
  misc_feature (1)..(25): SEQ ID NO: 6155; WAN02498Y; Start 90; Stop 114
taggtatgcaaaagtaaaggaggta

SEQ ID NO: 430938 - DNA, 25 bp, Artificial
  probe
  misc_feature (1)..(25): SEQ ID NO: 6155; WAN02498Y; Start 92; Stop 116
ggtatgcaaaagtaaaggaggtata

SEQ ID NO: 430939 - DNA, 25 bp, Artificial
  probe
  misc_feature (1)..(25): SEQ ID NO: 6155; WAN02498Y; Start 87; Stop 111
atctaggtatgcaaaagtaaaggag

SEQ ID NO: 430940 - DNA, 25 bp, Artificial
  probe
  misc_feature (1)..(25): SEQ ID NO: 6155; WAN02498Y; Start 5; Stop 29
tacacctccttaaagaacataataa

SEQ ID NO: 430941 - DNA, 25 bp, Artificial
  probe
  misc_feature (1)..(25): SEQ ID NO: 6155; WAN02498Y; Start 4; Stop 28
ttacacctccttaaagaacataata

SEQ ID NO: 430942 - DNA, 25 bp, Artificial
  probe
  misc_feature (1)..(25): SEQ ID NO: 6155; WAN02498Y; Start 1; Stop 25
gttttacacctccttaaagaacata

SEQ ID NO: 430943 - DNA, 25 bp, Artificial
  probe
  misc_feature (1)..(25): SEQ ID NO: 6155; WAN02498Y; Start 95; Stop 119
atgcaaaagtaaaggaggtatagaa

SEQ ID NO: 430944 - DNA, 25 bp, Artificial
  probe
  misc_feature (1)..(25): SEQ ID NO: 6155; WAN02498Y; Start 86; Stop 110
aatctaggtatgcaaaagtaaagga

SEQ ID NO: 430945 - DNA, 25 bp, Artificial
  probe
  misc_feature (1)..(25): SEQ ID NO: 6155; WAN02498Y; Start 93; Stop 117
gtatgcaaaagtaaaggaggtatag

SEQ ID NO: 430946 - DNA, 25 bp, Artificial
  probe
  misc_feature (1)..(25): SEQ ID NO: 6155; WAN02498Y; Start 9; Stop 33
cctccttaaagaacataataaactt

SEQ ID NO: 430947 - DNA, 25 bp, Artificial
  probe
  misc_feature (1)..(25): SEQ ID NO: 6155; WAN02498Y; Start 94; Stop 118
tatgcaaaagtaaaggaggtataga

SEQ ID NO: 430948 - DNA, 25 bp, Artificial
  probe
  misc_feature (1)..(25): SEQ ID NO: 6155; WAN02498Y; Start 2; Stop 26
ttttacacctccttaaagaacataa

SEQ ID NO: 430949 - DNA, 25 bp, Artificial
  probe
  misc_feature (1)..(25): SEQ ID NO: 6155; WAN02498Y; Start 85; Stop 109
taatctaggtatgcaaaagtaaagg

SEQ ID NO: 430950 - DNA, 25 bp, Artificial
  probe
  misc_feature (1)..(25): SEQ ID NO: 6156; WAN0249CI; Start 48; Stop 72
ggttatactatcattgtaaggagga

SEQ ID NO: 430951 - DNA, 25 bp, Artificial
  probe
  misc_feature (1)..(25): SEQ ID NO: 6156; WAN0249CI; Start 60; Stop 84
attgtaaggaggaaatcatgtacca

SEQ ID NO: 430952 - DNA, 25 bp, Artificial
  probe
  misc_feature (1)..(25): SEQ ID NO: 6156; WAN0249CI; Start 61; Stop 85
ttgtaaggaggaaatcatgtaccat

SEQ ID NO: 430953 - DNA, 25 bp, Artificial
  probe
  misc_feature (1)..(25): SEQ ID NO: 6156; WAN0249CI; Start 47; Stop 71
gggttatactatcattgtaaggagg

SEQ ID NO: 430954 - DNA, 25 bp, Artificial
  probe
  misc_feature (1)..(25): SEQ ID NO: 6156; WAN0249CI; Start 59; Stop 83
cattgtaaggaggaaatcatgtacc

SEQ ID NO: 430955 - DNA, 25 bp, Artificial
  probe
  misc_feature (1)..(25): SEQ ID NO: 6156; WAN0249CI; Start 62; Stop 86
tgtaaggaggaaatcatgtaccata

SEQ ID NO: 430956 - DNA, 25 bp, Artificial
  probe
  misc_feature (1)..(25): SEQ ID NO: 6156; WAN0249CI; Start 58; Stop 82
tcattgtaaggaggaaatcatgtac

SEQ ID NO: 430957 - DNA, 25 bp, Artificial
  probe
  misc_feature (1)..(25): SEQ ID NO: 6156; WAN0249CI; Start 54; Stop 78
actatcattgtaaggaggaaatcat

SEQ ID NO: 430958 - DNA, 25 bp, Artificial
  probe
  misc_feature (1)..(25): SEQ ID NO: 6156; WAN0249CI; Start 63; Stop 87
gtaaggaggaaatcatgtaccatat

SEQ ID NO: 430959 - DNA, 25 bp, Artificial
  probe
  misc_feature (1)..(25): SEQ ID NO: 6156; WAN0249CI; Start 53; Stop 77
tactatcattgtaaggaggaaatca

SEQ ID NO: 430960 - DNA, 25 bp, Artificial
  probe
  misc_feature (1)..(25): SEQ ID NO: 6156; WAN0249CI; Start 57; Stop 81
atcattgtaaggaggaaatcatgta

SEQ ID NO: 430961 - DNA, 25 bp, Artificial
  probe
  misc_feature (1)..(25): SEQ ID NO: 6156; WAN0249CI; Start 56; Stop 80
tatcattgtaaggaggaaatcatgt

SEQ ID NO: 430962 - DNA, 25 bp, Artificial
  probe
  misc_feature (1)..(25): SEQ ID NO: 6156; WAN0249CI; Start 38; Stop 62
taaggggaggggttatactatcatt

SEQ ID NO: 430963 - DNA, 25 bp, Artificial
  probe
  misc_feature (1)..(25): SEQ ID NO: 6156; WAN0249CI; Start 37; Stop 61
ctaaggggaggggttatactatcat

SEQ ID NO: 430964 - DNA, 25 bp, Artificial
  probe
  misc_feature (1)..(25): SEQ ID NO: 6156; WAN0249CI; Start 55; Stop 79
ctatcattgtaaggaggaaatcatg

SEQ ID NO: 430965 - DNA, 25 bp, Artificial
  probe
  misc_feature (1)..(25): SEQ ID NO: 6156; WAN0249CI; Start 41; Stop 65
ggggaggggttatactatcattgta

SEQ ID NO: 430966 - DNA, 25 bp, Artificial
  probe
  misc_feature (1)..(25): SEQ ID NO: 6156; WAN0249CI; Start 49; Stop 73
gttatactatcattgtaaggaggaa

SEQ ID NO: 430967 - DNA, 25 bp, Artificial
  probe
  misc_feature (1)..(25): SEQ ID NO: 6156; WAN0249CI; Start 66; Stop 90
aggaggaaatcatgtaccatataaa

SEQ ID NO: 430968 - DNA, 25 bp, Artificial
  probe
  misc_feature (1)..(25): SEQ ID NO: 6156; WAN0249CI; Start 65; Stop 89
aaggaggaaatcatgtaccatataa

SEQ ID NO: 430969 - DNA, 25 bp, Artificial
  probe
  misc_feature (1)..(25): SEQ ID NO: 6156; WAN0249CI; Start 42; Stop 66
gggaggggttatactatcattgtaa

SEQ ID NO: 430970 - DNA, 25 bp, Artificial
  probe
  misc_feature (1)..(25): SEQ ID NO: 6156; WAN0249CI; Start 39; Stop 63
aaggggaggggttatactatcattg

SEQ ID NO: 430971 - DNA, 25 bp, Artificial
  probe
  misc_feature (1)..(25): SEQ ID NO: 6156; WAN0249CI; Start 45; Stop 69
aggggttatactatcattgtaagga

SEQ ID NO: 430972 - DNA, 25 bp, Artificial
  probe
  misc_feature (1)..(25): SEQ ID NO: 6156; WAN0249CI; Start 40; Stop 64
aggggaggggttatactatcattgt

SEQ ID NO: 430973 - DNA, 25 bp, Artificial
  probe
  misc_feature (1)..(25): SEQ ID NO: 6156; WAN0249CI; Start 46; Stop 70
ggggttatactatcattgtaaggag

SEQ ID NO: 430974 - DNA, 25 bp, Artificial
  probe
  misc_feature (1)..(25): SEQ ID NO: 6156; WAN0249CI; Start 44; Stop 68
gaggggttatactatcattgtaagg

SEQ ID NO: 430975 - DNA, 25 bp, Artificial
  probe
  misc_feature (1)..(25): SEQ ID NO: 6156; WAN0249CI; Start 43; Stop 67
ggaggggttatactatcattgtaag

SEQ ID NO: 430976 - DNA, 25 bp, Artificial
  probe
  misc_feature (1)..(25): SEQ ID NO: 6156; WAN0249CI; Start 64; Stop 88
taaggaggaaatcatgtaccatata

SEQ ID NO: 430977 - DNA, 25 bp, Artificial
  probe
  misc_feature (1)..(25): SEQ ID NO: 6156; WAN0249CI; Start 52; Stop 76
atactatcattgtaaggaggaaatc

SEQ ID NO: 430978 - DNA, 25 bp, Artificial
  probe
  misc_feature (1)..(25): SEQ ID NO: 6156; WAN0249CI; Start 76; Stop 100
catgtaccatataaaagaagctgcg

SEQ ID NO: 430979 - DNA, 25 bp, Artificial
  probe
  misc_feature (1)..(25): SEQ ID NO: 6156; WAN0249CI; Start 75; Stop 99
tcatgtaccatataaaagaagctgc

SEQ ID NO: 430980 - DNA, 25 bp, Artificial
  probe
  misc_feature (1)..(25): SEQ ID NO: 6156; WAN0249CI; Start 36; Stop 60
cctaaggggaggggttatactatca

SEQ ID NO: 430981 - DNA, 25 bp, Artificial
  probe
  misc_feature (1)..(25): SEQ ID NO: 6156; WAN0249CI; Start 130; Stop 154
gccctgcatcactatgacaagatag

SEQ ID NO: 430982 - DNA, 25 bp, Artificial
  probe
  misc_feature (1)..(25): SEQ ID NO: 6156; WAN0249CI; Start 35; Stop 59
acctaaggggaggggttatactatc

SEQ ID NO: 430983 - DNA, 25 bp, Artificial
  probe
  misc_feature (1)..(25): SEQ ID NO: 6157; WAN0249CG; Start 15; Stop 39
gtacacctaagtctttagagtatct

SEQ ID NO: 430984 - DNA, 25 bp, Artificial
  probe
  misc_feature (1)..(25): SEQ ID NO: 6157; WAN0249CG; Start 16; Stop 40
tacacctaagtctttagagtatcta

SEQ ID NO: 430985 - DNA, 25 bp, Artificial
  probe
  misc_feature (1)..(25): SEQ ID NO: 6157; WAN0249CG; Start 14; Stop 38
tgtacacctaagtctttagagtatc

SEQ ID NO: 430986 - DNA, 25 bp, Artificial
  probe
  misc_feature (1)..(25): SEQ ID NO: 6157; WAN0249CG; Start 17; Stop 41
acacctaagtctttagagtatctaa

SEQ ID NO: 430987 - DNA, 25 bp, Artificial
  probe
  misc_feature (1)..(25): SEQ ID NO: 6157; WAN0249CG; Start 78; Stop 102
aataacgtagaaagtttaacatacg

SEQ ID NO: 430988 - DNA, 25 bp, Artificial
  probe
  misc_feature (1)..(25): SEQ ID NO: 6158; WAN02498E; Start 183; Stop 207
gaatctattacctcaatccaagcag

SEQ ID NO: 430989 - DNA, 25 bp, Artificial
  probe
  misc_feature (1)..(25): SEQ ID NO: 6158; WAN02498E; Start 182; Stop 206
tgaatctattacctcaatccaagca

SEQ ID NO: 430990 - DNA, 25 bp, Artificial
  probe
  misc_feature (1)..(25): SEQ ID NO: 6158; WAN02498E; Start 184; Stop 208
aatctattacctcaatccaagcagg

SEQ ID NO: 430991 - DNA, 25 bp, Artificial
  probe
  misc_feature (1)..(25): SEQ ID NO: 6158; WAN02498E; Start 132; Stop 156
tcgctttctctttcttacatcaaac

SEQ ID NO: 430992 - DNA, 25 bp, Artificial
  probe
  misc_feature (1)..(25): SEQ ID NO: 6158; WAN02498E; Start 131; Stop 155
gtcgctttctctttcttacatcaaa

SEQ ID NO: 430993 - DNA, 25 bp, Artificial
  probe
  misc_feature (1)..(25): SEQ ID NO: 6158; WAN02498E; Start 125; Stop 149
caatctgtcgctttctctttcttac

SEQ ID NO: 430994 - DNA, 25 bp, Artificial
  probe
  misc_feature (1)..(25): SEQ ID NO: 6158; WAN02498E; Start 124; Stop 148
tcaatctgtcgctttctctttctta

SEQ ID NO: 430995 - DNA, 25 bp, Artificial
  probe
  misc_feature (1)..(25): SEQ ID NO: 6158; WAN02498E; Start 133; Stop 157
cgctttctctttcttacatcaaact

SEQ ID NO: 430996 - DNA, 25 bp, Artificial
  probe
  misc_feature (1)..(25): SEQ ID NO: 6158; WAN02498E; Start 118; Stop 142
attacttcaatctgtcgctttctct

SEQ ID NO: 430997 - DNA, 25 bp, Artificial
  probe
  misc_feature (1)..(25): SEQ ID NO: 6158; WAN02498E; Start 120; Stop 144
tacttcaatctgtcgctttctcttt

SEQ ID NO: 430998 - DNA, 25 bp, Artificial
  probe
  misc_feature (1)..(25): SEQ ID NO: 6158; WAN02498E; Start 119; Stop 143
ttacttcaatctgtcgctttctctt

SEQ ID NO: 430999 - DNA, 25 bp, Artificial
  probe
  misc_feature (1)..(25): SEQ ID NO: 6158; WAN02498E; Start 123; Stop 147
ttcaatctgtcgctttctctttctt

SEQ ID NO: 431000 - DNA, 25 bp, Artificial
  probe
  misc_feature (1)..(25): SEQ ID NO: 6158; WAN02498E; Start 117; Stop 141
aattacttcaatctgtcgctttctc

SEQ ID NO: 431001 - DNA, 25 bp, Artificial
  probe
  misc_feature (1)..(25): SEQ ID NO: 6158; WAN02498E; Start 116; Stop 140
aaattacttcaatctgtcgctttct

SEQ ID NO: 431002 - DNA, 25 bp, Artificial
  probe
  misc_feature (1)..(25): SEQ ID NO: 6158; WAN02498E; Start 122; Stop 146
cttcaatctgtcgctttctctttct

SEQ ID NO: 431003 - DNA, 25 bp, Artificial
  probe
  misc_feature (1)..(25): SEQ ID NO: 6158; WAN02498E; Start 121; Stop 145
acttcaatctgtcgctttctctttc

SEQ ID NO: 431004 - DNA, 25 bp, Artificial
  probe
  misc_feature (1)..(25): SEQ ID NO: 6158; WAN02498E; Start 185; Stop 209
atctattacctcaatccaagcaggc

SEQ ID NO: 431005 - DNA, 25 bp, Artificial
  probe
  misc_feature (1)..(25): SEQ ID NO: 6158; WAN02498E; Start 80; Stop 104
tatccgaccatttgttctagcaata

SEQ ID NO: 431006 - DNA, 25 bp, Artificial
  probe
  misc_feature (1)..(25): SEQ ID NO: 6158; WAN02498E; Start 127; Stop 151
atctgtcgctttctctttcttacat

SEQ ID NO: 431007 - DNA, 25 bp, Artificial
  probe
  misc_feature (1)..(25): SEQ ID NO: 6158; WAN02498E; Start 68; Stop 92
aaactaccaacctatccgaccattt

SEQ ID NO: 431008 - DNA, 25 bp, Artificial
  probe
  misc_feature (1)..(25): SEQ ID NO: 6158; WAN02498E; Start 126; Stop 150
aatctgtcgctttctctttcttaca

SEQ ID NO: 431009 - DNA, 25 bp, Artificial
  probe
  misc_feature (1)..(25): SEQ ID NO: 6158; WAN02498E; Start 81; Stop 105
atccgaccatttgttctagcaatag

SEQ ID NO: 431010 - DNA, 25 bp, Artificial
  probe
  misc_feature (1)..(25): SEQ ID NO: 6158; WAN02498E; Start 79; Stop 103
ctatccgaccatttgttctagcaat

SEQ ID NO: 431011 - DNA, 25 bp, Artificial
  probe
  misc_feature (1)..(25): SEQ ID NO: 6158; WAN02498E; Start 130; Stop 154
tgtcgctttctctttcttacatcaa

SEQ ID NO: 431012 - DNA, 25 bp, Artificial
  probe
  misc_feature (1)..(25): SEQ ID NO: 6158; WAN02498E; Start 134; Stop 158
gctttctctttcttacatcaaactt

SEQ ID NO: 431013 - DNA, 25 bp, Artificial
  probe
  misc_feature (1)..(25): SEQ ID NO: 6158; WAN02498E; Start 128; Stop 152
tctgtcgctttctctttcttacatc

SEQ ID NO: 431014 - DNA, 25 bp, Artificial
  probe
  misc_feature (1)..(25): SEQ ID NO: 6158; WAN02498E; Start 75; Stop 99
caacctatccgaccatttgttctag

SEQ ID NO: 431015 - DNA, 25 bp, Artificial
  probe
  misc_feature (1)..(25): SEQ ID NO: 6158; WAN02498E; Start 129; Stop 153
ctgtcgctttctctttcttacatca

SEQ ID NO: 431016 - DNA, 25 bp, Artificial
  probe
  misc_feature (1)..(25): SEQ ID NO: 6158; WAN02498E; Start 181; Stop 205
ttgaatctattacctcaatccaagc

SEQ ID NO: 431017 - DNA, 25 bp, Artificial
  probe
  misc_feature (1)..(25): SEQ ID NO: 6158; WAN02498E; Start 67; Stop 91
caaactaccaacctatccgaccatt

SEQ ID NO: 431018 - DNA, 25 bp, Artificial
  probe
  misc_feature (1)..(25): SEQ ID NO: 6158; WAN02498E; Start 64; Stop 88
tttcaaactaccaacctatccgacc

SEQ ID NO: 431019 - DNA, 25 bp, Artificial
  probe
  misc_feature (1)..(25): SEQ ID NO: 6158; WAN02498E; Start 74; Stop 98
ccaacctatccgaccatttgttcta

SEQ ID NO: 431020 - DNA, 25 bp, Artificial
  probe
  misc_feature (1)..(25): SEQ ID NO: 6158; WAN02498E; Start 72; Stop 96
taccaacctatccgaccatttgttc

SEQ ID NO: 431021 - DNA, 25 bp, Artificial
  probe
  misc_feature (1)..(25): SEQ ID NO: 6159; WAN0249C9; Start 1; Stop 25
taaaccagcatctctacactcctaa

SEQ ID NO: 431022 - DNA, 25 bp, Artificial
  probe
  misc_feature (1)..(25): SEQ ID NO: 6159; WAN0249C9; Start 2; Stop 26
aaaccagcatctctacactcctaaa

SEQ ID NO: 431023 - DNA, 25 bp, Artificial
  probe
  misc_feature (1)..(25): SEQ ID NO: 6159; WAN0249C9; Start 3; Stop 27
aaccagcatctctacactcctaaaa

SEQ ID NO: 431024 - DNA, 25 bp, Artificial
  probe
  misc_feature (1)..(25): SEQ ID NO: 6159; WAN0249C9; Start 4; Stop 28
accagcatctctacactcctaaaag

SEQ ID NO: 431025 - DNA, 25 bp, Artificial
  probe
  misc_feature (1)..(25): SEQ ID NO: 6159; WAN0249C9; Start 5; Stop 29
ccagcatctctacactcctaaaaga

SEQ ID NO: 431026 - DNA, 25 bp, Artificial
  probe
  misc_feature (1)..(25): SEQ ID NO: 6159; WAN0249C9; Start 6; Stop 30
cagcatctctacactcctaaaagat

SEQ ID NO: 431027 - DNA, 25 bp, Artificial
  probe
  misc_feature (1)..(25): SEQ ID NO: 6159; WAN0249C9; Start 7; Stop 31
agcatctctacactcctaaaagatt

SEQ ID NO: 431028 - DNA, 25 bp, Artificial
  probe
  misc_feature (1)..(25): SEQ ID NO: 6159; WAN0249C9; Start 8; Stop 32
gcatctctacactcctaaaagatta

SEQ ID NO: 431029 - DNA, 25 bp, Artificial
  probe
  misc_feature (1)..(25): SEQ ID NO: 6159; WAN0249C9; Start 16; Stop 40
acactcctaaaagattatcaaactt

SEQ ID NO: 431030 - DNA, 25 bp, Artificial
  probe
  misc_feature (1)..(25): SEQ ID NO: 6159; WAN0249C9; Start 11; Stop 35
tctctacactcctaaaagattatca

SEQ ID NO: 431031 - DNA, 25 bp, Artificial
  probe
  misc_feature (1)..(25): SEQ ID NO: 6159; WAN0249C9; Start 12; Stop 36
ctctacactcctaaaagattatcaa

SEQ ID NO: 431032 - DNA, 25 bp, Artificial
  probe
  misc_feature (1)..(25): SEQ ID NO: 6159; WAN0249C9; Start 15; Stop 39
tacactcctaaaagattatcaaact

SEQ ID NO: 431033 - DNA, 25 bp, Artificial
  probe
  misc_feature (1)..(25): SEQ ID NO: 6159; WAN0249C9; Start 14; Stop 38
ctacactcctaaaagattatcaaac

SEQ ID NO: 431034 - DNA, 25 bp, Artificial
  probe
  misc_feature (1)..(25): SEQ ID NO: 6159; WAN0249C9; Start 13; Stop 37
tctacactcctaaaagattatcaaa

SEQ ID NO: 431035 - DNA, 25 bp, Artificial
  probe
  misc_feature (1)..(25): SEQ ID NO: 6159; WAN0249C9; Start 9; Stop 33
catctctacactcctaaaagattat

SEQ ID NO: 431036 - DNA, 25 bp, Artificial
  probe
  misc_feature (1)..(25): SEQ ID NO: 6159; WAN0249C9; Start 10; Stop 34
atctctacactcctaaaagattatc

SEQ ID NO: 431037 - DNA, 25 bp, Artificial
  probe
  misc_feature (1)..(25): SEQ ID NO: 6161; WAN02498D; Start 77; Stop 101
atcacaccctaatattgtactgacc

SEQ ID NO: 431038 - DNA, 25 bp, Artificial
  probe
  misc_feature (1)..(25): SEQ ID NO: 6161; WAN02498D; Start 78; Stop 102
tcacaccctaatattgtactgaccc

SEQ ID NO: 431039 - DNA, 25 bp, Artificial
  probe
  misc_feature (1)..(25): SEQ ID NO: 6161; WAN02498D; Start 76; Stop 100
aatcacaccctaatattgtactgac

SEQ ID NO: 431040 - DNA, 25 bp, Artificial
  probe
  misc_feature (1)..(25): SEQ ID NO: 6161; WAN02498D; Start 75; Stop 99
taatcacaccctaatattgtactga

SEQ ID NO: 431041 - DNA, 25 bp, Artificial
  probe
  misc_feature (1)..(25): SEQ ID NO: 6161; WAN02498D; Start 81; Stop 105
caccctaatattgtactgaccccaa

SEQ ID NO: 431042 - DNA, 25 bp, Artificial
  probe
  misc_feature (1)..(25): SEQ ID NO: 6161; WAN02498D; Start 74; Stop 98
ttaatcacaccctaatattgtactg

SEQ ID NO: 431043 - DNA, 25 bp, Artificial
  probe
  misc_feature (1)..(25): SEQ ID NO: 6161; WAN02498D; Start 79; Stop 103
cacaccctaatattgtactgacccc

SEQ ID NO: 431044 - DNA, 25 bp, Artificial
  probe
  misc_feature (1)..(25): SEQ ID NO: 6161; WAN02498D; Start 80; Stop 104
acaccctaatattgtactgacccca

SEQ ID NO: 431045 - DNA, 25 bp, Artificial
  probe
  misc_feature (1)..(25): SEQ ID NO: 6161; WAN02498D; Start 73; Stop 97
attaatcacaccctaatattgtact

SEQ ID NO: 431046 - DNA, 25 bp, Artificial
  probe
  misc_feature (1)..(25): SEQ ID NO: 6161; WAN02498D; Start 21; Stop 45
aaatttcgtatcaaacagctataat

SEQ ID NO: 431047 - DNA, 25 bp, Artificial
  probe
  misc_feature (1)..(25): SEQ ID NO: 6161; WAN02498D; Start 18; Stop 42
aataaatttcgtatcaaacagctat

SEQ ID NO: 431048 - DNA, 25 bp, Artificial
  probe
  misc_feature (1)..(25): SEQ ID NO: 6161; WAN02498D; Start 16; Stop 40
ataataaatttcgtatcaaacagct

SEQ ID NO: 431049 - DNA, 25 bp, Artificial
  probe
  misc_feature (1)..(25): SEQ ID NO: 6161; WAN02498D; Start 26; Stop 50
tcgtatcaaacagctataatataga

SEQ ID NO: 431050 - DNA, 25 bp, Artificial
  probe
  misc_feature (1)..(25): SEQ ID NO: 6162; WAN0249C3; Start 42; Stop 66
ctttcgagaaattagtgactgcttt

SEQ ID NO: 431051 - DNA, 25 bp, Artificial
  probe
  misc_feature (1)..(25): SEQ ID NO: 6162; WAN0249C3; Start 41; Stop 65
tctttcgagaaattagtgactgctt

SEQ ID NO: 431052 - DNA, 25 bp, Artificial
  probe
  misc_feature (1)..(25): SEQ ID NO: 6162; WAN0249C3; Start 13; Stop 37
ttcattcgagatctatcacttatca

SEQ ID NO: 431053 - DNA, 25 bp, Artificial
  probe
  misc_feature (1)..(25): SEQ ID NO: 6162; WAN0249C3; Start 23; Stop 47
atctatcacttatcatcttctttcg

SEQ ID NO: 431054 - DNA, 25 bp, Artificial
  probe
  misc_feature (1)..(25): SEQ ID NO: 6162; WAN0249C3; Start 39; Stop 63
cttctttcgagaaattagtgactgc

SEQ ID NO: 431055 - DNA, 25 bp, Artificial
  probe
  misc_feature (1)..(25): SEQ ID NO: 6162; WAN0249C3; Start 14; Stop 38
tcattcgagatctatcacttatcat

SEQ ID NO: 431056 - DNA, 25 bp, Artificial
  probe
  misc_feature (1)..(25): SEQ ID NO: 6162; WAN0249C3; Start 47; Stop 71
gagaaattagtgactgcttttggct

SEQ ID NO: 431057 - DNA, 25 bp, Artificial
  probe
  misc_feature (1)..(25): SEQ ID NO: 6162; WAN0249C3; Start 40; Stop 64
ttctttcgagaaattagtgactgct

SEQ ID NO: 431058 - DNA, 25 bp, Artificial
  probe
  misc_feature (1)..(25): SEQ ID NO: 6162; WAN0249C3; Start 24; Stop 48
tctatcacttatcatcttctttcga

SEQ ID NO: 431059 - DNA, 25 bp, Artificial
  probe
  misc_feature (1)..(25): SEQ ID NO: 6162; WAN0249C3; Start 25; Stop 49
ctatcacttatcatcttctttcgag

SEQ ID NO: 431060 - DNA, 25 bp, Artificial
  probe
  misc_feature (1)..(25): SEQ ID NO: 6162; WAN0249C3; Start 38; Stop 62
tcttctttcgagaaattagtgactg

SEQ ID NO: 431061 - DNA, 25 bp, Artificial
  probe
  misc_feature (1)..(25): SEQ ID NO: 6162; WAN0249C3; Start 15; Stop 39
cattcgagatctatcacttatcatc

SEQ ID NO: 431062 - DNA, 25 bp, Artificial
  probe
  misc_feature (1)..(25): SEQ ID NO: 6162; WAN0249C3; Start 49; Stop 73
gaaattagtgactgcttttggctga

SEQ ID NO: 431063 - DNA, 25 bp, Artificial
  probe
  misc_feature (1)..(25): SEQ ID NO: 6162; WAN0249C3; Start 48; Stop 72
agaaattagtgactgcttttggctg

SEQ ID NO: 431064 - DNA, 25 bp, Artificial
  probe
  misc_feature (1)..(25): SEQ ID NO: 6162; WAN0249C3; Start 26; Stop 50
tatcacttatcatcttctttcgaga

SEQ ID NO: 431065 - DNA, 25 bp, Artificial
  probe
  misc_feature (1)..(25): SEQ ID NO: 6162; WAN0249C3; Start 44; Stop 68
ttcgagaaattagtgactgcttttg

SEQ ID NO: 431066 - DNA, 25 bp, Artificial
  probe
  misc_feature (1)..(25): SEQ ID NO: 6162; WAN0249C3; Start 43; Stop 67
tttcgagaaattagtgactgctttt

SEQ ID NO: 431067 - DNA, 25 bp, Artificial
  probe
  misc_feature (1)..(25): SEQ ID NO: 6162; WAN0249C3; Start 36; Stop 60
catcttctttcgagaaattagtgac

SEQ ID NO: 431068 - DNA, 25 bp, Artificial
  probe
  misc_feature (1)..(25): SEQ ID NO: 6162; WAN0249C3; Start 37; Stop 61
atcttctttcgagaaattagtgact

SEQ ID NO: 431069 - DNA, 25 bp, Artificial
  probe
  misc_feature (1)..(25): SEQ ID NO: 6162; WAN0249C3; Start 35; Stop 59
tcatcttctttcgagaaattagtga

SEQ ID NO: 431070 - DNA, 25 bp, Artificial
  probe
  misc_feature (1)..(25): SEQ ID NO: 6162; WAN0249C3; Start 28; Stop 52
tcacttatcatcttctttcgagaaa

SEQ ID NO: 431071 - DNA, 25 bp, Artificial
  probe
  misc_feature (1)..(25): SEQ ID NO: 6162; WAN0249C3; Start 9; Stop 33
ttctttcattcgagatctatcactt

SEQ ID NO: 431072 - DNA, 25 bp, Artificial
  probe
  misc_feature (1)..(25): SEQ ID NO: 6162; WAN0249C3; Start 19; Stop 43
cgagatctatcacttatcatcttct

SEQ ID NO: 431073 - DNA, 25 bp, Artificial
  probe
  misc_feature (1)..(25): SEQ ID NO: 6162; WAN0249C3; Start 18; Stop 42
tcgagatctatcacttatcatcttc

SEQ ID NO: 431074 - DNA, 25 bp, Artificial
  probe
  misc_feature (1)..(25): SEQ ID NO: 6162; WAN0249C3; Start 27; Stop 51
atcacttatcatcttctttcgagaa

SEQ ID NO: 431075 - DNA, 25 bp, Artificial
  probe
  misc_feature (1)..(25): SEQ ID NO: 6162; WAN0249C3; Start 45; Stop 69
tcgagaaattagtgactgcttttgg

SEQ ID NO: 431076 - DNA, 25 bp, Artificial
  probe
  misc_feature (1)..(25): SEQ ID NO: 6162; WAN0249C3; Start 8; Stop 32
attctttcattcgagatctatcact

SEQ ID NO: 431077 - DNA, 25 bp, Artificial
  probe
  misc_feature (1)..(25): SEQ ID NO: 6162; WAN0249C3; Start 46; Stop 70
cgagaaattagtgactgcttttggc

SEQ ID NO: 431078 - DNA, 25 bp, Artificial
  probe
  misc_feature (1)..(25): SEQ ID NO: 6162; WAN0249C3; Start 17; Stop 41
ttcgagatctatcacttatcatctt

SEQ ID NO: 431079 - DNA, 25 bp, Artificial
  probe
  misc_feature (1)..(25): SEQ ID NO: 6162; WAN0249C3; Start 34; Stop 58
atcatcttctttcgagaaattagtg

SEQ ID NO: 431080 - DNA, 25 bp, Artificial
  probe
  misc_feature (1)..(25): SEQ ID NO: 6162; WAN0249C3; Start 29; Stop 53
cacttatcatcttctttcgagaaat

SEQ ID NO: 431081 - DNA, 25 bp, Artificial
  probe
  misc_feature (1)..(25): SEQ ID NO: 6162; WAN0249C3; Start 10; Stop 34
tctttcattcgagatctatcactta

SEQ ID NO: 431082 - DNA, 25 bp, Artificial
  probe
  misc_feature (1)..(25): SEQ ID NO: 6162; WAN0249C3; Start 16; Stop 40
attcgagatctatcacttatcatct

SEQ ID NO: 431083 - DNA, 25 bp, Artificial
  probe
  misc_feature (1)..(25): SEQ ID NO: 6163; WAN0249CM; Start 87; Stop 111
atcatagaacctattgtgaggactt

SEQ ID NO: 431084 - DNA, 25 bp, Artificial
  probe
  misc_feature (1)..(25): SEQ ID NO: 6163; WAN0249CM; Start 86; Stop 110
tatcatagaacctattgtgaggact

SEQ ID NO: 431085 - DNA, 25 bp, Artificial
  probe
  misc_feature (1)..(25): SEQ ID NO: 6163; WAN0249CM; Start 130; Stop 154
ttccaaccaatttcgtgatttactg

SEQ ID NO: 431086 - DNA, 25 bp, Artificial
  probe
  misc_feature (1)..(25): SEQ ID NO: 6163; WAN0249CM; Start 129; Stop 153
tttccaaccaatttcgtgatttact

SEQ ID NO: 431087 - DNA, 25 bp, Artificial
  probe
  misc_feature (1)..(25): SEQ ID NO: 6163; WAN0249CM; Start 114; Stop 138
tatagtttaagccagtttccaacca

SEQ ID NO: 431088 - DNA, 25 bp, Artificial
  probe
  misc_feature (1)..(25): SEQ ID NO: 6163; WAN0249CM; Start 128; Stop 152
gtttccaaccaatttcgtgatttac

SEQ ID NO: 431089 - DNA, 25 bp, Artificial
  probe
  misc_feature (1)..(25): SEQ ID NO: 6163; WAN0249CM; Start 127; Stop 151
agtttccaaccaatttcgtgattta

SEQ ID NO: 431090 - DNA, 25 bp, Artificial
  probe
  misc_feature (1)..(25): SEQ ID NO: 6163; WAN0249CM; Start 116; Stop 140
tagtttaagccagtttccaaccaat

SEQ ID NO: 431091 - DNA, 25 bp, Artificial
  probe
  misc_feature (1)..(25): SEQ ID NO: 6163; WAN0249CM; Start 115; Stop 139
atagtttaagccagtttccaaccaa

SEQ ID NO: 431092 - DNA, 25 bp, Artificial
  probe
  misc_feature (1)..(25): SEQ ID NO: 6163; WAN0249CM; Start 113; Stop 137
ttatagtttaagccagtttccaacc

SEQ ID NO: 431093 - DNA, 25 bp, Artificial
  probe
  misc_feature (1)..(25): SEQ ID NO: 6163; WAN0249CM; Start 119; Stop 143
tttaagccagtttccaaccaatttc

SEQ ID NO: 431094 - DNA, 25 bp, Artificial
  probe
  misc_feature (1)..(25): SEQ ID NO: 6163; WAN0249CM; Start 118; Stop 142
gtttaagccagtttccaaccaattt

SEQ ID NO: 431095 - DNA, 25 bp, Artificial
  probe
  misc_feature (1)..(25): SEQ ID NO: 6163; WAN0249CM; Start 126; Stop 150
cagtttccaaccaatttcgtgattt

SEQ ID NO: 431096 - DNA, 25 bp, Artificial
  probe
  misc_feature (1)..(25): SEQ ID NO: 6163; WAN0249CM; Start 1; Stop 25
taagatggcgaaatcggtattgaat

SEQ ID NO: 431097 - DNA, 25 bp, Artificial
  probe
  misc_feature (1)..(25): SEQ ID NO: 6163; WAN0249CM; Start 142; Stop 166
tcgtgatttactggtaatgaagaaa

SEQ ID NO: 431098 - DNA, 25 bp, Artificial
  probe
  misc_feature (1)..(25): SEQ ID NO: 6163; WAN0249CM; Start 15; Stop 39
cggtattgaatttatcagtagtgct

SEQ ID NO: 431099 - DNA, 25 bp, Artificial
  probe
  misc_feature (1)..(25): SEQ ID NO: 6163; WAN0249CM; Start 14; Stop 38
tcggtattgaatttatcagtagtgc

SEQ ID NO: 431100 - DNA, 25 bp, Artificial
  probe
  misc_feature (1)..(25): SEQ ID NO: 6163; WAN0249CM; Start 117; Stop 141
agtttaagccagtttccaaccaatt

SEQ ID NO: 431101 - DNA, 25 bp, Artificial
  probe
  misc_feature (1)..(25): SEQ ID NO: 6163; WAN0249CM; Start 85; Stop 109
atatcatagaacctattgtgaggac

SEQ ID NO: 431102 - DNA, 25 bp, Artificial
  probe
  misc_feature (1)..(25): SEQ ID NO: 6163; WAN0249CM; Start 141; Stop 165
ttcgtgatttactggtaatgaagaa

SEQ ID NO: 431103 - DNA, 25 bp, Artificial
  probe
  misc_feature (1)..(25): SEQ ID NO: 6163; WAN0249CM; Start 140; Stop 164
tttcgtgatttactggtaatgaaga

SEQ ID NO: 431104 - DNA, 25 bp, Artificial
  probe
  misc_feature (1)..(25): SEQ ID NO: 6163; WAN0249CM; Start 2; Stop 26
aagatggcgaaatcggtattgaatt

SEQ ID NO: 431105 - DNA, 25 bp, Artificial
  probe
  misc_feature (1)..(25): SEQ ID NO: 6163; WAN0249CM; Start 7; Stop 31
ggcgaaatcggtattgaatttatca

SEQ ID NO: 431106 - DNA, 25 bp, Artificial
  probe
  misc_feature (1)..(25): SEQ ID NO: 6163; WAN0249CM; Start 6; Stop 30
tggcgaaatcggtattgaatttatc

SEQ ID NO: 431107 - DNA, 25 bp, Artificial
  probe
  misc_feature (1)..(25): SEQ ID NO: 6163; WAN0249CM; Start 4; Stop 28
gatggcgaaatcggtattgaattta

SEQ ID NO: 431108 - DNA, 25 bp, Artificial
  probe
  misc_feature (1)..(25): SEQ ID NO: 6163; WAN0249CM; Start 5; Stop 29
atggcgaaatcggtattgaatttat

SEQ ID NO: 431109 - DNA, 25 bp, Artificial
  probe
  misc_feature (1)..(25): SEQ ID NO: 6163; WAN0249CM; Start 137; Stop 161
caatttcgtgatttactggtaatga

SEQ ID NO: 431110 - DNA, 25 bp, Artificial
  probe
  misc_feature (1)..(25): SEQ ID NO: 6163; WAN0249CM; Start 88; Stop 112
tcatagaacctattgtgaggacttt

SEQ ID NO: 431111 - DNA, 25 bp, Artificial
  probe
  misc_feature (1)..(25): SEQ ID NO: 6163; WAN0249CM; Start 8; Stop 32
gcgaaatcggtattgaatttatcag

SEQ ID NO: 431112 - DNA, 25 bp, Artificial
  probe
  misc_feature (1)..(25): SEQ ID NO: 6163; WAN0249CM; Start 112; Stop 136
tttatagtttaagccagtttccaac

SEQ ID NO: 431113 - DNA, 25 bp, Artificial
  probe
  misc_feature (1)..(25): SEQ ID NO: 6163; WAN0249CM; Start 3; Stop 27
agatggcgaaatcggtattgaattt

SEQ ID NO: 431114 - DNA, 25 bp, Artificial
  probe
  misc_feature (1)..(25): SEQ ID NO: 6163; WAN0249CM; Start 139; Stop 163
atttcgtgatttactggtaatgaag

SEQ ID NO: 431115 - DNA, 25 bp, Artificial
  probe
  misc_feature (1)..(25): SEQ ID NO: 6163; WAN0249CM; Start 125; Stop 149
ccagtttccaaccaatttcgtgatt

SEQ ID NO: 431116 - DNA, 25 bp, Artificial
  probe
  misc_feature (1)..(25): SEQ ID NO: 6164; WAN0249B6; Start 49; Stop 73
tgactgtgatttatttacatcttct

SEQ ID NO: 431117 - DNA, 25 bp, Artificial
  probe
  misc_feature (1)..(25): SEQ ID NO: 6164; WAN0249B6; Start 48; Stop 72
ttgactgtgatttatttacatcttc

SEQ ID NO: 431118 - DNA, 25 bp, Artificial
  probe
  misc_feature (1)..(25): SEQ ID NO: 6164; WAN0249B6; Start 51; Stop 75
actgtgatttatttacatcttcttc

SEQ ID NO: 431119 - DNA, 25 bp, Artificial
  probe
  misc_feature (1)..(25): SEQ ID NO: 6164; WAN0249B6; Start 50; Stop 74
gactgtgatttatttacatcttctt

SEQ ID NO: 431120 - DNA, 25 bp, Artificial
  probe
  misc_feature (1)..(25): SEQ ID NO: 6164; WAN0249B6; Start 52; Stop 76
ctgtgatttatttacatcttcttct

SEQ ID NO: 431121 - DNA, 25 bp, Artificial
  probe
  misc_feature (1)..(25): SEQ ID NO: 6164; WAN0249B6; Start 47; Stop 71
tttgactgtgatttatttacatctt

SEQ ID NO: 431122 - DNA, 25 bp, Artificial
  probe
  misc_feature (1)..(25): SEQ ID NO: 6164; WAN0249B6; Start 2; Stop 26
aattctccccttcattataacaaaa

SEQ ID NO: 431123 - DNA, 25 bp, Artificial
  probe
  misc_feature (1)..(25): SEQ ID NO: 6164; WAN0249B6; Start 1; Stop 25
taattctccccttcattataacaaa

SEQ ID NO: 431124 - DNA, 25 bp, Artificial
  probe
  misc_feature (1)..(25): SEQ ID NO: 6164; WAN0249B6; Start 46; Stop 70
ttttgactgtgatttatttacatct

SEQ ID NO: 431125 - DNA, 25 bp, Artificial
  probe
  misc_feature (1)..(25): SEQ ID NO: 6165; WAN0249A2; Start 14; Stop 38
tggcaatatatgaaaggttactgga

SEQ ID NO: 431126 - DNA, 25 bp, Artificial
  probe
  misc_feature (1)..(25): SEQ ID NO: 6165; WAN0249A2; Start 13; Stop 37
atggcaatatatgaaaggttactgg

SEQ ID NO: 431127 - DNA, 25 bp, Artificial
  probe
  misc_feature (1)..(25): SEQ ID NO: 6165; WAN0249A2; Start 15; Stop 39
ggcaatatatgaaaggttactggat

SEQ ID NO: 431128 - DNA, 25 bp, Artificial
  probe
  misc_feature (1)..(25): SEQ ID NO: 6165; WAN0249A2; Start 16; Stop 40
gcaatatatgaaaggttactggatg

SEQ ID NO: 431129 - DNA, 25 bp, Artificial
  probe
  misc_feature (1)..(25): SEQ ID NO: 6165; WAN0249A2; Start 12; Stop 36
tatggcaatatatgaaaggttactg

SEQ ID NO: 431130 - DNA, 25 bp, Artificial
  probe
  misc_feature (1)..(25): SEQ ID NO: 6165; WAN0249A2; Start 17; Stop 41
caatatatgaaaggttactggatgt

SEQ ID NO: 431131 - DNA, 25 bp, Artificial
  probe
  misc_feature (1)..(25): SEQ ID NO: 6165; WAN0249A2; Start 7; Stop 31
aaacttatggcaatatatgaaaggt

SEQ ID NO: 431132 - DNA, 25 bp, Artificial
  probe
  misc_feature (1)..(25): SEQ ID NO: 6165; WAN0249A2; Start 8; Stop 32
aacttatggcaatatatgaaaggtt

SEQ ID NO: 431133 - DNA, 25 bp, Artificial
  probe
  misc_feature (1)..(25): SEQ ID NO: 6165; WAN0249A2; Start 39; Stop 63
tgttttaaattatgcaggcagtagc

SEQ ID NO: 431134 - DNA, 25 bp, Artificial
  probe
  misc_feature (1)..(25): SEQ ID NO: 6165; WAN0249A2; Start 36; Stop 60
ggatgttttaaattatgcaggcagt

SEQ ID NO: 431135 - DNA, 25 bp, Artificial
  probe
  misc_feature (1)..(25): SEQ ID NO: 6165; WAN0249A2; Start 35; Stop 59
tggatgttttaaattatgcaggcag

SEQ ID NO: 431136 - DNA, 25 bp, Artificial
  probe
  misc_feature (1)..(25): SEQ ID NO: 6165; WAN0249A2; Start 11; Stop 35
ttatggcaatatatgaaaggttact

SEQ ID NO: 431137 - DNA, 25 bp, Artificial
  probe
  misc_feature (1)..(25): SEQ ID NO: 6165; WAN0249A2; Start 9; Stop 33
acttatggcaatatatgaaaggtta

SEQ ID NO: 431138 - DNA, 25 bp, Artificial
  probe
  misc_feature (1)..(25): SEQ ID NO: 6165; WAN0249A2; Start 19; Stop 43
atatatgaaaggttactggatgttt

SEQ ID NO: 431139 - DNA, 25 bp, Artificial
  probe
  misc_feature (1)..(25): SEQ ID NO: 6165; WAN0249A2; Start 18; Stop 42
aatatatgaaaggttactggatgtt

SEQ ID NO: 431140 - DNA, 25 bp, Artificial
  probe
  misc_feature (1)..(25): SEQ ID NO: 6165; WAN0249A2; Start 10; Stop 34
cttatggcaatatatgaaaggttac

SEQ ID NO: 431141 - DNA, 25 bp, Artificial
  probe
  misc_feature (1)..(25): SEQ ID NO: 6165; WAN0249A2; Start 38; Stop 62
atgttttaaattatgcaggcagtag

SEQ ID NO: 431142 - DNA, 25 bp, Artificial
  probe
  misc_feature (1)..(25): SEQ ID NO: 6165; WAN0249A2; Start 37; Stop 61
gatgttttaaattatgcaggcagta

SEQ ID NO: 431143 - DNA, 25 bp, Artificial
  probe
  misc_feature (1)..(25): SEQ ID NO: 6165; WAN0249A2; Start 34; Stop 58
ctggatgttttaaattatgcaggca

SEQ ID NO: 431144 - DNA, 25 bp, Artificial
  probe
  misc_feature (1)..(25): SEQ ID NO: 6165; WAN0249A2; Start 33; Stop 57
actggatgttttaaattatgcaggc

SEQ ID NO: 431145 - DNA, 25 bp, Artificial
  probe
  misc_feature (1)..(25): SEQ ID NO: 6165; WAN0249A2; Start 22; Stop 46
tatgaaaggttactggatgttttaa

SEQ ID NO: 431146 - DNA, 25 bp, Artificial
  probe
  misc_feature (1)..(25): SEQ ID NO: 6165; WAN0249A2; Start 24; Stop 48
tgaaaggttactggatgttttaaat

SEQ ID NO: 431147 - DNA, 25 bp, Artificial
  probe
  misc_feature (1)..(25): SEQ ID NO: 6165; WAN0249A2; Start 23; Stop 47
atgaaaggttactggatgttttaaa

SEQ ID NO: 431148 - DNA, 25 bp, Artificial
  probe
  misc_feature (1)..(25): SEQ ID NO: 6165; WAN0249A2; Start 21; Stop 45
atatgaaaggttactggatgtttta

SEQ ID NO: 431149 - DNA, 25 bp, Artificial
  probe
  misc_feature (1)..(25): SEQ ID NO: 6165; WAN0249A2; Start 20; Stop 44
tatatgaaaggttactggatgtttt

SEQ ID NO: 431150 - DNA, 25 bp, Artificial
  probe
  misc_feature (1)..(25): SEQ ID NO: 6165; WAN0249A2; Start 29; Stop 53
ggttactggatgttttaaattatgc

SEQ ID NO: 431151 - DNA, 25 bp, Artificial
  probe
  misc_feature (1)..(25): SEQ ID NO: 6165; WAN0249A2; Start 6; Stop 30
taaacttatggcaatatatgaaagg

SEQ ID NO: 431152 - DNA, 25 bp, Artificial
  probe
  misc_feature (1)..(25): SEQ ID NO: 6165; WAN0249A2; Start 32; Stop 56
tactggatgttttaaattatgcagg

SEQ ID NO: 431153 - DNA, 25 bp, Artificial
  probe
  misc_feature (1)..(25): SEQ ID NO: 6165; WAN0249A2; Start 25; Stop 49
gaaaggttactggatgttttaaatt

SEQ ID NO: 431154 - DNA, 25 bp, Artificial
  probe
  misc_feature (1)..(25): SEQ ID NO: 6165; WAN0249A2; Start 30; Stop 54
gttactggatgttttaaattatgca

SEQ ID NO: 431155 - DNA, 25 bp, Artificial
  probe
  misc_feature (1)..(25): SEQ ID NO: 6165; WAN0249A2; Start 56; Stop 80
gcagtagccttttattatatacaaa

SEQ ID NO: 431156 - DNA, 25 bp, Artificial
  probe
  misc_feature (1)..(25): SEQ ID NO: 6165; WAN0249A2; Start 40; Stop 64
gttttaaattatgcaggcagtagcc

SEQ ID NO: 431157 - DNA, 25 bp, Artificial
  probe
  misc_feature (1)..(25): SEQ ID NO: 6165; WAN0249A2; Start 28; Stop 52
aggttactggatgttttaaattatg

SEQ ID NO: 431158 - DNA, 25 bp, Artificial
  probe
  misc_feature (1)..(25): SEQ ID NO: 6166; WAN02498G; Start 234; Stop 258
ctatcactacatctgctagtctgac

SEQ ID NO: 431159 - DNA, 25 bp, Artificial
  probe
  misc_feature (1)..(25): SEQ ID NO: 6166; WAN02498G; Start 233; Stop 257
tctatcactacatctgctagtctga

SEQ ID NO: 431160 - DNA, 25 bp, Artificial
  probe
  misc_feature (1)..(25): SEQ ID NO: 6166; WAN02498G; Start 232; Stop 256
gtctatcactacatctgctagtctg

SEQ ID NO: 431161 - DNA, 25 bp, Artificial
  probe
  misc_feature (1)..(25): SEQ ID NO: 6166; WAN02498G; Start 231; Stop 255
tgtctatcactacatctgctagtct

SEQ ID NO: 431162 - DNA, 25 bp, Artificial
  probe
  misc_feature (1)..(25): SEQ ID NO: 6166; WAN02498G; Start 230; Stop 254
gtgtctatcactacatctgctagtc

SEQ ID NO: 431163 - DNA, 25 bp, Artificial
  probe
  misc_feature (1)..(25): SEQ ID NO: 6166; WAN02498G; Start 235; Stop 259
tatcactacatctgctagtctgaca

SEQ ID NO: 431164 - DNA, 25 bp, Artificial
  probe
  misc_feature (1)..(25): SEQ ID NO: 6166; WAN02498G; Start 48; Stop 72
taagtcaatctgtggatgctgtgtt

SEQ ID NO: 431165 - DNA, 25 bp, Artificial
  probe
  misc_feature (1)..(25): SEQ ID NO: 6166; WAN02498G; Start 39; Stop 63
acaatatcctaagtcaatctgtgga

SEQ ID NO: 431166 - DNA, 25 bp, Artificial
  probe
  misc_feature (1)..(25): SEQ ID NO: 6166; WAN02498G; Start 262; Stop 286
agctgtatcttcattgtaattggtt

SEQ ID NO: 431167 - DNA, 25 bp, Artificial
  probe
  misc_feature (1)..(25): SEQ ID NO: 6166; WAN02498G; Start 38; Stop 62
tacaatatcctaagtcaatctgtgg

SEQ ID NO: 431168 - DNA, 25 bp, Artificial
  probe
  misc_feature (1)..(25): SEQ ID NO: 6166; WAN02498G; Start 236; Stop 260
atcactacatctgctagtctgacaa

SEQ ID NO: 431169 - DNA, 25 bp, Artificial
  probe
  misc_feature (1)..(25): SEQ ID NO: 6166; WAN02498G; Start 57; Stop 81
ctgtggatgctgtgtttattgatta

SEQ ID NO: 431170 - DNA, 25 bp, Artificial
  probe
  misc_feature (1)..(25): SEQ ID NO: 6166; WAN02498G; Start 47; Stop 71
ctaagtcaatctgtggatgctgtgt

SEQ ID NO: 431171 - DNA, 25 bp, Artificial
  probe
  misc_feature (1)..(25): SEQ ID NO: 6166; WAN02498G; Start 58; Stop 82
tgtggatgctgtgtttattgattaa

SEQ ID NO: 431172 - DNA, 25 bp, Artificial
  probe
  misc_feature (1)..(25): SEQ ID NO: 6166; WAN02498G; Start 55; Stop 79
atctgtggatgctgtgtttattgat

SEQ ID NO: 431173 - DNA, 25 bp, Artificial
  probe
  misc_feature (1)..(25): SEQ ID NO: 6166; WAN02498G; Start 56; Stop 80
tctgtggatgctgtgtttattgatt

SEQ ID NO: 431174 - DNA, 25 bp, Artificial
  probe
  misc_feature (1)..(25): SEQ ID NO: 6166; WAN02498G; Start 54; Stop 78
aatctgtggatgctgtgtttattga

SEQ ID NO: 431175 - DNA, 25 bp, Artificial
  probe
  misc_feature (1)..(25): SEQ ID NO: 6166; WAN02498G; Start 52; Stop 76
tcaatctgtggatgctgtgtttatt

SEQ ID NO: 431176 - DNA, 25 bp, Artificial
  probe
  misc_feature (1)..(25): SEQ ID NO: 6166; WAN02498G; Start 239; Stop 263
actacatctgctagtctgacaacag

SEQ ID NO: 431177 - DNA, 25 bp, Artificial
  probe
  misc_feature (1)..(25): SEQ ID NO: 6166; WAN02498G; Start 237; Stop 261
tcactacatctgctagtctgacaac

SEQ ID NO: 431178 - DNA, 25 bp, Artificial
  probe
  misc_feature (1)..(25): SEQ ID NO: 6166; WAN02498G; Start 51; Stop 75
gtcaatctgtggatgctgtgtttat

SEQ ID NO: 431179 - DNA, 25 bp, Artificial
  probe
  misc_feature (1)..(25): SEQ ID NO: 6166; WAN02498G; Start 238; Stop 262
cactacatctgctagtctgacaaca

SEQ ID NO: 431180 - DNA, 25 bp, Artificial
  probe
  misc_feature (1)..(25): SEQ ID NO: 6166; WAN02498G; Start 46; Stop 70
cctaagtcaatctgtggatgctgtg

SEQ ID NO: 431181 - DNA, 25 bp, Artificial
  probe
  misc_feature (1)..(25): SEQ ID NO: 6166; WAN02498G; Start 263; Stop 287
gctgtatcttcattgtaattggttt

SEQ ID NO: 431182 - DNA, 25 bp, Artificial
  probe
  misc_feature (1)..(25): SEQ ID NO: 6166; WAN02498G; Start 59; Stop 83
gtggatgctgtgtttattgattaaa

SEQ ID NO: 431183 - DNA, 25 bp, Artificial
  probe
  misc_feature (1)..(25): SEQ ID NO: 6166; WAN02498G; Start 60; Stop 84
tggatgctgtgtttattgattaaag

SEQ ID NO: 431184 - DNA, 25 bp, Artificial
  probe
  misc_feature (1)..(25): SEQ ID NO: 6166; WAN02498G; Start 50; Stop 74
agtcaatctgtggatgctgtgttta

SEQ ID NO: 431185 - DNA, 25 bp, Artificial
  probe
  misc_feature (1)..(25): SEQ ID NO: 6166; WAN02498G; Start 61; Stop 85
ggatgctgtgtttattgattaaaga

SEQ ID NO: 431186 - DNA, 25 bp, Artificial
  probe
  misc_feature (1)..(25): SEQ ID NO: 6166; WAN02498G; Start 214; Stop 238
accaatcatctgattagtgtctatc

SEQ ID NO: 431187 - DNA, 25 bp, Artificial
  probe
  misc_feature (1)..(25): SEQ ID NO: 6166; WAN02498G; Start 129; Stop 153
cgtttcagggtatactctattgtgt

SEQ ID NO: 431188 - DNA, 25 bp, Artificial
  probe
  misc_feature (1)..(25): SEQ ID NO: 6166; WAN02498G; Start 37; Stop 61
ttacaatatcctaagtcaatctgtg

SEQ ID NO: 431189 - DNA, 25 bp, Artificial
  probe
  misc_feature (1)..(25): SEQ ID NO: 6166; WAN02498G; Start 128; Stop 152
ccgtttcagggtatactctattgtg

SEQ ID NO: 431190 - DNA, 25 bp, Artificial
  probe
  misc_feature (1)..(25): SEQ ID NO: 6166; WAN02498G; Start 42; Stop 66
atatcctaagtcaatctgtggatgc

SEQ ID NO: 431191 - DNA, 25 bp, Artificial
  probe
  misc_feature (1)..(25): SEQ ID NO: 6167; WAN02496I; Start 40; Stop 64
tttaattgcctcctctagcctcttt

SEQ ID NO: 431192 - DNA, 25 bp, Artificial
  probe
  misc_feature (1)..(25): SEQ ID NO: 6167; WAN02496I; Start 11; Stop 35
cctcctgtataaatctggttagctt

SEQ ID NO: 431193 - DNA, 25 bp, Artificial
  probe
  misc_feature (1)..(25): SEQ ID NO: 6167; WAN02496I; Start 4; Stop 28
ggttctacctcctgtataaatctgg

SEQ ID NO: 431194 - DNA, 25 bp, Artificial
  probe
  misc_feature (1)..(25): SEQ ID NO: 6167; WAN02496I; Start 3; Stop 27
cggttctacctcctgtataaatctg

SEQ ID NO: 431195 - DNA, 25 bp, Artificial
  probe
  misc_feature (1)..(25): SEQ ID NO: 6167; WAN02496I; Start 2; Stop 26
acggttctacctcctgtataaatct

SEQ ID NO: 431196 - DNA, 25 bp, Artificial
  probe
  misc_feature (1)..(25): SEQ ID NO: 6167; WAN02496I; Start 9; Stop 33
tacctcctgtataaatctggttagc

SEQ ID NO: 431197 - DNA, 25 bp, Artificial
  probe
  misc_feature (1)..(25): SEQ ID NO: 6167; WAN02496I; Start 5; Stop 29
gttctacctcctgtataaatctggt

SEQ ID NO: 431198 - DNA, 25 bp, Artificial
  probe
  misc_feature (1)..(25): SEQ ID NO: 6167; WAN02496I; Start 1; Stop 25
tacggttctacctcctgtataaatc

SEQ ID NO: 431199 - DNA, 25 bp, Artificial
  probe
  misc_feature (1)..(25): SEQ ID NO: 6167; WAN02496I; Start 6; Stop 30
ttctacctcctgtataaatctggtt

SEQ ID NO: 431200 - DNA, 25 bp, Artificial
  probe
  misc_feature (1)..(25): SEQ ID NO: 6167; WAN02496I; Start 77; Stop 101
aacggctttggctagtggttaatat

SEQ ID NO: 431201 - DNA, 25 bp, Artificial
  probe
  misc_feature (1)..(25): SEQ ID NO: 6167; WAN02496I; Start 76; Stop 100
aaacggctttggctagtggttaata

SEQ ID NO: 431202 - DNA, 25 bp, Artificial
  probe
  misc_feature (1)..(25): SEQ ID NO: 6167; WAN02496I; Start 14; Stop 38
cctgtataaatctggttagcttact

SEQ ID NO: 431203 - DNA, 25 bp, Artificial
  probe
  misc_feature (1)..(25): SEQ ID NO: 6167; WAN02496I; Start 13; Stop 37
tcctgtataaatctggttagcttac

SEQ ID NO: 431204 - DNA, 25 bp, Artificial
  probe
  misc_feature (1)..(25): SEQ ID NO: 6167; WAN02496I; Start 78; Stop 102
acggctttggctagtggttaatatt

SEQ ID NO: 431205 - DNA, 25 bp, Artificial
  probe
  misc_feature (1)..(25): SEQ ID NO: 6167; WAN02496I; Start 7; Stop 31
tctacctcctgtataaatctggtta

SEQ ID NO: 431206 - DNA, 25 bp, Artificial
  probe
  misc_feature (1)..(25): SEQ ID NO: 6167; WAN02496I; Start 12; Stop 36
ctcctgtataaatctggttagctta

SEQ ID NO: 431207 - DNA, 25 bp, Artificial
  probe
  misc_feature (1)..(25): SEQ ID NO: 6167; WAN02496I; Start 107; Stop 131
accacttgtctctataaacgtgtta

SEQ ID NO: 431208 - DNA, 25 bp, Artificial
  probe
  misc_feature (1)..(25): SEQ ID NO: 6167; WAN02496I; Start 106; Stop 130
taccacttgtctctataaacgtgtt

SEQ ID NO: 431209 - DNA, 25 bp, Artificial
  probe
  misc_feature (1)..(25): SEQ ID NO: 6167; WAN02496I; Start 105; Stop 129
ttaccacttgtctctataaacgtgt

SEQ ID NO: 431210 - DNA, 25 bp, Artificial
  probe
  misc_feature (1)..(25): SEQ ID NO: 6167; WAN02496I; Start 10; Stop 34
acctcctgtataaatctggttagct

SEQ ID NO: 431211 - DNA, 25 bp, Artificial
  probe
  misc_feature (1)..(25): SEQ ID NO: 6167; WAN02496I; Start 79; Stop 103
cggctttggctagtggttaatatta

SEQ ID NO: 431212 - DNA, 25 bp, Artificial
  probe
  misc_feature (1)..(25): SEQ ID NO: 6167; WAN02496I; Start 108; Stop 132
ccacttgtctctataaacgtgttag

SEQ ID NO: 431213 - DNA, 25 bp, Artificial
  probe
  misc_feature (1)..(25): SEQ ID NO: 6167; WAN02496I; Start 8; Stop 32
ctacctcctgtataaatctggttag

SEQ ID NO: 431214 - DNA, 25 bp, Artificial
  probe
  misc_feature (1)..(25): SEQ ID NO: 6167; WAN02496I; Start 80; Stop 104
ggctttggctagtggttaatattat

SEQ ID NO: 431215 - DNA, 25 bp, Artificial
  probe
  misc_feature (1)..(25): SEQ ID NO: 6167; WAN02496I; Start 104; Stop 128
tttaccacttgtctctataaacgtg

SEQ ID NO: 431216 - DNA, 25 bp, Artificial
  probe
  misc_feature (1)..(25): SEQ ID NO: 6167; WAN02496I; Start 103; Stop 127
atttaccacttgtctctataaacgt

SEQ ID NO: 431217 - DNA, 25 bp, Artificial
  probe
  misc_feature (1)..(25): SEQ ID NO: 6167; WAN02496I; Start 102; Stop 126
tatttaccacttgtctctataaacg

SEQ ID NO: 431218 - DNA, 25 bp, Artificial
  probe
  misc_feature (1)..(25): SEQ ID NO: 6167; WAN02496I; Start 109; Stop 133
cacttgtctctataaacgtgttaga

SEQ ID NO: 431219 - DNA, 25 bp, Artificial
  probe
  misc_feature (1)..(25): SEQ ID NO: 6167; WAN02496I; Start 41; Stop 65
ttaattgcctcctctagcctctttt

SEQ ID NO: 431220 - DNA, 25 bp, Artificial
  probe
  misc_feature (1)..(25): SEQ ID NO: 6167; WAN02496I; Start 39; Stop 63
ttttaattgcctcctctagcctctt

SEQ ID NO: 431221 - DNA, 25 bp, Artificial
  probe
  misc_feature (1)..(25): SEQ ID NO: 6167; WAN02496I; Start 81; Stop 105
gctttggctagtggttaatattatt

SEQ ID NO: 431222 - DNA, 25 bp, Artificial
  probe
  misc_feature (1)..(25): SEQ ID NO: 6167; WAN02496I; Start 15; Stop 39
ctgtataaatctggttagcttactt

SEQ ID NO: 431223 - DNA, 25 bp, Artificial
  probe
  misc_feature (1)..(25): SEQ ID NO: 6167; WAN02496I; Start 74; Stop 98
taaaacggctttggctagtggttaa

SEQ ID NO: 431224 - DNA, 25 bp, Artificial
  probe
  misc_feature (1)..(25): SEQ ID NO: 6168; WAN0249AC; Start 24; Stop 48
tagtcagtagacgctttgtcctata

SEQ ID NO: 431225 - DNA, 25 bp, Artificial
  probe
  misc_feature (1)..(25): SEQ ID NO: 6168; WAN0249AC; Start 23; Stop 47
ttagtcagtagacgctttgtcctat

SEQ ID NO: 431226 - DNA, 25 bp, Artificial
  probe
  misc_feature (1)..(25): SEQ ID NO: 6168; WAN0249AC; Start 22; Stop 46
tttagtcagtagacgctttgtccta

SEQ ID NO: 431227 - DNA, 25 bp, Artificial
  probe
  misc_feature (1)..(25): SEQ ID NO: 6168; WAN0249AC; Start 21; Stop 45
atttagtcagtagacgctttgtcct

SEQ ID NO: 431228 - DNA, 25 bp, Artificial
  probe
  misc_feature (1)..(25): SEQ ID NO: 6168; WAN0249AC; Start 20; Stop 44
catttagtcagtagacgctttgtcc

SEQ ID NO: 431229 - DNA, 25 bp, Artificial
  probe
  misc_feature (1)..(25): SEQ ID NO: 6168; WAN0249AC; Start 19; Stop 43
gcatttagtcagtagacgctttgtc

SEQ ID NO: 431230 - DNA, 25 bp, Artificial
  probe
  misc_feature (1)..(25): SEQ ID NO: 6168; WAN0249AC; Start 25; Stop 49
agtcagtagacgctttgtcctatag

SEQ ID NO: 431231 - DNA, 25 bp, Artificial
  probe
  misc_feature (1)..(25): SEQ ID NO: 6168; WAN0249AC; Start 45; Stop 69
tataggatcaaagctagagccctga

SEQ ID NO: 431232 - DNA, 25 bp, Artificial
  probe
  misc_feature (1)..(25): SEQ ID NO: 6168; WAN0249AC; Start 44; Stop 68
ctataggatcaaagctagagccctg

SEQ ID NO: 431233 - DNA, 25 bp, Artificial
  probe
  misc_feature (1)..(25): SEQ ID NO: 6168; WAN0249AC; Start 18; Stop 42
agcatttagtcagtagacgctttgt

SEQ ID NO: 431234 - DNA, 25 bp, Artificial
  probe
  misc_feature (1)..(25): SEQ ID NO: 6168; WAN0249AC; Start 14; Stop 38
cttaagcatttagtcagtagacgct

SEQ ID NO: 431235 - DNA, 25 bp, Artificial
  probe
  misc_feature (1)..(25): SEQ ID NO: 6168; WAN0249AC; Start 54; Stop 78
aaagctagagccctgactagtattt

SEQ ID NO: 431236 - DNA, 25 bp, Artificial
  probe
  misc_feature (1)..(25): SEQ ID NO: 6168; WAN0249AC; Start 46; Stop 70
ataggatcaaagctagagccctgac

SEQ ID NO: 431237 - DNA, 25 bp, Artificial
  probe
  misc_feature (1)..(25): SEQ ID NO: 6168; WAN0249AC; Start 53; Stop 77
caaagctagagccctgactagtatt

SEQ ID NO: 431238 - DNA, 25 bp, Artificial
  probe
  misc_feature (1)..(25): SEQ ID NO: 6168; WAN0249AC; Start 52; Stop 76
tcaaagctagagccctgactagtat

SEQ ID NO: 431239 - DNA, 25 bp, Artificial
  probe
  misc_feature (1)..(25): SEQ ID NO: 6168; WAN0249AC; Start 51; Stop 75
atcaaagctagagccctgactagta

SEQ ID NO: 431240 - DNA, 25 bp, Artificial
  probe
  misc_feature (1)..(25): SEQ ID NO: 6168; WAN0249AC; Start 49; Stop 73
ggatcaaagctagagccctgactag

SEQ ID NO: 431241 - DNA, 25 bp, Artificial
  probe
  misc_feature (1)..(25): SEQ ID NO: 6168; WAN0249AC; Start 16; Stop 40
taagcatttagtcagtagacgcttt

SEQ ID NO: 431242 - DNA, 25 bp, Artificial
  probe
  misc_feature (1)..(25): SEQ ID NO: 6168; WAN0249AC; Start 15; Stop 39
ttaagcatttagtcagtagacgctt

SEQ ID NO: 431243 - DNA, 25 bp, Artificial
  probe
  misc_feature (1)..(25): SEQ ID NO: 6168; WAN0249AC; Start 48; Stop 72
aggatcaaagctagagccctgacta

SEQ ID NO: 431244 - DNA, 25 bp, Artificial
  probe
  misc_feature (1)..(25): SEQ ID NO: 6168; WAN0249AC; Start 47; Stop 71
taggatcaaagctagagccctgact

SEQ ID NO: 431245 - DNA, 25 bp, Artificial
  probe
  misc_feature (1)..(25): SEQ ID NO: 6168; WAN0249AC; Start 17; Stop 41
aagcatttagtcagtagacgctttg

SEQ ID NO: 431246 - DNA, 25 bp, Artificial
  probe
  misc_feature (1)..(25): SEQ ID NO: 6168; WAN0249AC; Start 50; Stop 74
gatcaaagctagagccctgactagt

SEQ ID NO: 431247 - DNA, 25 bp, Artificial
  probe
  misc_feature (1)..(25): SEQ ID NO: 6168; WAN0249AC; Start 55; Stop 79
aagctagagccctgactagtatttt

SEQ ID NO: 431248 - DNA, 25 bp, Artificial
  probe
  misc_feature (1)..(25): SEQ ID NO: 6169; WAN02499E; Start 27; Stop 51
ctagtaagtggtaaaggagcagagc

SEQ ID NO: 431249 - DNA, 25 bp, Artificial
  probe
  misc_feature (1)..(25): SEQ ID NO: 6169; WAN02499E; Start 26; Stop 50
actagtaagtggtaaaggagcagag

SEQ ID NO: 431250 - DNA, 25 bp, Artificial
  probe
  misc_feature (1)..(25): SEQ ID NO: 6169; WAN02499E; Start 4; Stop 28
aggagaattttgctatactgatact

SEQ ID NO: 431251 - DNA, 25 bp, Artificial
  probe
  misc_feature (1)..(25): SEQ ID NO: 6169; WAN02499E; Start 3; Stop 27
gaggagaattttgctatactgatac

SEQ ID NO: 431252 - DNA, 25 bp, Artificial
  probe
  misc_feature (1)..(25): SEQ ID NO: 6169; WAN02499E; Start 2; Stop 26
agaggagaattttgctatactgata

SEQ ID NO: 431253 - DNA, 25 bp, Artificial
  probe
  misc_feature (1)..(25): SEQ ID NO: 6169; WAN02499E; Start 1; Stop 25
tagaggagaattttgctatactgat

SEQ ID NO: 431254 - DNA, 25 bp, Artificial
  probe
  misc_feature (1)..(25): SEQ ID NO: 6169; WAN02499E; Start 14; Stop 38
tgctatactgatactagtaagtggt

SEQ ID NO: 431255 - DNA, 25 bp, Artificial
  probe
  misc_feature (1)..(25): SEQ ID NO: 6169; WAN02499E; Start 25; Stop 49
tactagtaagtggtaaaggagcaga

SEQ ID NO: 431256 - DNA, 25 bp, Artificial
  probe
  misc_feature (1)..(25): SEQ ID NO: 6169; WAN02499E; Start 24; Stop 48
atactagtaagtggtaaaggagcag

SEQ ID NO: 431257 - DNA, 25 bp, Artificial
  probe
  misc_feature (1)..(25): SEQ ID NO: 6169; WAN02499E; Start 23; Stop 47
gatactagtaagtggtaaaggagca

SEQ ID NO: 431258 - DNA, 25 bp, Artificial
  probe
  misc_feature (1)..(25): SEQ ID NO: 6169; WAN02499E; Start 22; Stop 46
tgatactagtaagtggtaaaggagc

SEQ ID NO: 431259 - DNA, 25 bp, Artificial
  probe
  misc_feature (1)..(25): SEQ ID NO: 6169; WAN02499E; Start 5; Stop 29
ggagaattttgctatactgatacta

SEQ ID NO: 431260 - DNA, 25 bp, Artificial
  probe
  misc_feature (1)..(25): SEQ ID NO: 6169; WAN02499E; Start 20; Stop 44
actgatactagtaagtggtaaagga

SEQ ID NO: 431261 - DNA, 25 bp, Artificial
  probe
  misc_feature (1)..(25): SEQ ID NO: 6169; WAN02499E; Start 13; Stop 37
ttgctatactgatactagtaagtgg

SEQ ID NO: 431262 - DNA, 25 bp, Artificial
  probe
  misc_feature (1)..(25): SEQ ID NO: 6169; WAN02499E; Start 21; Stop 45
ctgatactagtaagtggtaaaggag

SEQ ID NO: 431263 - DNA, 25 bp, Artificial
  probe
  misc_feature (1)..(25): SEQ ID NO: 6169; WAN02499E; Start 15; Stop 39
gctatactgatactagtaagtggta

SEQ ID NO: 431264 - DNA, 25 bp, Artificial
  probe
  misc_feature (1)..(25): SEQ ID NO: 6169; WAN02499E; Start 6; Stop 30
gagaattttgctatactgatactag

SEQ ID NO: 431265 - DNA, 25 bp, Artificial
  probe
  misc_feature (1)..(25): SEQ ID NO: 6169; WAN02499E; Start 19; Stop 43
tactgatactagtaagtggtaaagg

SEQ ID NO: 431266 - DNA, 25 bp, Artificial
  probe
  misc_feature (1)..(25): SEQ ID NO: 6169; WAN02499E; Start 12; Stop 36
tttgctatactgatactagtaagtg

SEQ ID NO: 431267 - DNA, 25 bp, Artificial
  probe
  misc_feature (1)..(25): SEQ ID NO: 6169; WAN02499E; Start 7; Stop 31
agaattttgctatactgatactagt

SEQ ID NO: 431268 - DNA, 25 bp, Artificial
  probe
  misc_feature (1)..(25): SEQ ID NO: 6169; WAN02499E; Start 18; Stop 42
atactgatactagtaagtggtaaag

SEQ ID NO: 431269 - DNA, 25 bp, Artificial
  probe
  misc_feature (1)..(25): SEQ ID NO: 6169; WAN02499E; Start 11; Stop 35
ttttgctatactgatactagtaagt

SEQ ID NO: 431270 - DNA, 25 bp, Artificial
  probe
  misc_feature (1)..(25): SEQ ID NO: 6170; WAN024989; Start 95; Stop 119
agacacgcaaatgagtataaatcag

SEQ ID NO: 431271 - DNA, 25 bp, Artificial
  probe
  misc_feature (1)..(25): SEQ ID NO: 6170; WAN024989; Start 93; Stop 117
aaagacacgcaaatgagtataaatc

SEQ ID NO: 431272 - DNA, 25 bp, Artificial
  probe
  misc_feature (1)..(25): SEQ ID NO: 6170; WAN024989; Start 96; Stop 120
gacacgcaaatgagtataaatcagc

SEQ ID NO: 431273 - DNA, 25 bp, Artificial
  probe
  misc_feature (1)..(25): SEQ ID NO: 6170; WAN024989; Start 94; Stop 118
aagacacgcaaatgagtataaatca

SEQ ID NO: 431274 - DNA, 25 bp, Artificial
  probe
  misc_feature (1)..(25): SEQ ID NO: 6170; WAN024989; Start 98; Stop 122
cacgcaaatgagtataaatcagcta

SEQ ID NO: 431275 - DNA, 25 bp, Artificial
  probe
  misc_feature (1)..(25): SEQ ID NO: 6170; WAN024989; Start 92; Stop 116
taaagacacgcaaatgagtataaat

SEQ ID NO: 431276 - DNA, 25 bp, Artificial
  probe
  misc_feature (1)..(25): SEQ ID NO: 6170; WAN024989; Start 91; Stop 115
ataaagacacgcaaatgagtataaa

SEQ ID NO: 431277 - DNA, 25 bp, Artificial
  probe
  misc_feature (1)..(25): SEQ ID NO: 6170; WAN024989; Start 99; Stop 123
acgcaaatgagtataaatcagctaa

SEQ ID NO: 431278 - DNA, 25 bp, Artificial
  probe
  misc_feature (1)..(25): SEQ ID NO: 6170; WAN024989; Start 97; Stop 121
acacgcaaatgagtataaatcagct

SEQ ID NO: 431279 - DNA, 25 bp, Artificial
  probe
  misc_feature (1)..(25): SEQ ID NO: 6170; WAN024989; Start 100; Stop 124
cgcaaatgagtataaatcagctaat

SEQ ID NO: 431280 - DNA, 25 bp, Artificial
  probe
  misc_feature (1)..(25): SEQ ID NO: 6170; WAN024989; Start 90; Stop 114
tataaagacacgcaaatgagtataa

SEQ ID NO: 431281 - DNA, 25 bp, Artificial
  probe
  misc_feature (1)..(25): SEQ ID NO: 6170; WAN024989; Start 89; Stop 113
ttataaagacacgcaaatgagtata

SEQ ID NO: 431282 - DNA, 25 bp, Artificial
  probe
  misc_feature (1)..(25): SEQ ID NO: 6170; WAN024989; Start 101; Stop 125
gcaaatgagtataaatcagctaatt

SEQ ID NO: 431283 - DNA, 25 bp, Artificial
  probe
  misc_feature (1)..(25): SEQ ID NO: 6170; WAN024989; Start 88; Stop 112
tttataaagacacgcaaatgagtat

SEQ ID NO: 431284 - DNA, 25 bp, Artificial
  probe
  misc_feature (1)..(25): SEQ ID NO: 6170; WAN024989; Start 87; Stop 111
ttttataaagacacgcaaatgagta

SEQ ID NO: 431285 - DNA, 25 bp, Artificial
  probe
  misc_feature (1)..(25): SEQ ID NO: 6171; WAN024974; Start 37; Stop 61
attatcaaatgtaaaacccaacccg

SEQ ID NO: 431286 - DNA, 25 bp, Artificial
  probe
  misc_feature (1)..(25): SEQ ID NO: 6171; WAN024974; Start 40; Stop 64
atcaaatgtaaaacccaacccgata

SEQ ID NO: 431287 - DNA, 25 bp, Artificial
  probe
  misc_feature (1)..(25): SEQ ID NO: 6171; WAN024974; Start 39; Stop 63
tatcaaatgtaaaacccaacccgat

SEQ ID NO: 431288 - DNA, 25 bp, Artificial
  probe
  misc_feature (1)..(25): SEQ ID NO: 6171; WAN024974; Start 38; Stop 62
ttatcaaatgtaaaacccaacccga

SEQ ID NO: 431289 - DNA, 25 bp, Artificial
  probe
  misc_feature (1)..(25): SEQ ID NO: 6171; WAN024974; Start 1; Stop 25
tagtattctcctaaagtttctcctt

SEQ ID NO: 431290 - DNA, 25 bp, Artificial
  probe
  misc_feature (1)..(25): SEQ ID NO: 6171; WAN024974; Start 41; Stop 65
tcaaatgtaaaacccaacccgatag

SEQ ID NO: 431291 - DNA, 25 bp, Artificial
  probe
  misc_feature (1)..(25): SEQ ID NO: 6171; WAN024974; Start 42; Stop 66
caaatgtaaaacccaacccgatagg

SEQ ID NO: 431292 - DNA, 25 bp, Artificial
  probe
  misc_feature (1)..(25): SEQ ID NO: 6171; WAN024974; Start 2; Stop 26
agtattctcctaaagtttctccttt

SEQ ID NO: 431293 - DNA, 25 bp, Artificial
  probe
  misc_feature (1)..(25): SEQ ID NO: 6171; WAN024974; Start 36; Stop 60
cattatcaaatgtaaaacccaaccc

SEQ ID NO: 431294 - DNA, 25 bp, Artificial
  probe
  misc_feature (1)..(25): SEQ ID NO: 6171; WAN024974; Start 3; Stop 27
gtattctcctaaagtttctcctttt

SEQ ID NO: 431295 - DNA, 25 bp, Artificial
  probe
  misc_feature (1)..(25): SEQ ID NO: 6171; WAN024974; Start 43; Stop 67
aaatgtaaaacccaacccgataggg

SEQ ID NO: 431296 - DNA, 25 bp, Artificial
  probe
  misc_feature (1)..(25): SEQ ID NO: 6171; WAN024974; Start 35; Stop 59
acattatcaaatgtaaaacccaacc

SEQ ID NO: 431297 - DNA, 25 bp, Artificial
  probe
  misc_feature (1)..(25): SEQ ID NO: 6171; WAN024974; Start 34; Stop 58
aacattatcaaatgtaaaacccaac

SEQ ID NO: 431298 - DNA, 25 bp, Artificial
  probe
  misc_feature (1)..(25): SEQ ID NO: 6171; WAN024974; Start 33; Stop 57
taacattatcaaatgtaaaacccaa

SEQ ID NO: 431299 - DNA, 25 bp, Artificial
  probe
  misc_feature (1)..(25): SEQ ID NO: 6171; WAN024974; Start 32; Stop 56
ataacattatcaaatgtaaaaccca

SEQ ID NO: 431300 - DNA, 25 bp, Artificial
  probe
  misc_feature (1)..(25): SEQ ID NO: 6172; WAN02497Y; Start 187; Stop 211
caccttgtcatcgttttatcgtaaa

SEQ ID NO: 431301 - DNA, 25 bp, Artificial
  probe
  misc_feature (1)..(25): SEQ ID NO: 6172; WAN02497Y; Start 188; Stop 212
accttgtcatcgttttatcgtaaat

SEQ ID NO: 431302 - DNA, 25 bp, Artificial
  probe
  misc_feature (1)..(25): SEQ ID NO: 6172; WAN02497Y; Start 192; Stop 216
tgtcatcgttttatcgtaaatctgt

SEQ ID NO: 431303 - DNA, 25 bp, Artificial
  probe
  misc_feature (1)..(25): SEQ ID NO: 6172; WAN02497Y; Start 189; Stop 213
ccttgtcatcgttttatcgtaaatc

SEQ ID NO: 431304 - DNA, 25 bp, Artificial
  probe
  misc_feature (1)..(25): SEQ ID NO: 6172; WAN02497Y; Start 186; Stop 210
acaccttgtcatcgttttatcgtaa

SEQ ID NO: 431305 - DNA, 25 bp, Artificial
  probe
  misc_feature (1)..(25): SEQ ID NO: 6172; WAN02497Y; Start 182; Stop 206
caacacaccttgtcatcgttttatc

SEQ ID NO: 431306 - DNA, 25 bp, Artificial
  probe
  misc_feature (1)..(25): SEQ ID NO: 6172; WAN02497Y; Start 193; Stop 217
gtcatcgttttatcgtaaatctgtt

SEQ ID NO: 431307 - DNA, 25 bp, Artificial
  probe
  misc_feature (1)..(25): SEQ ID NO: 6172; WAN02497Y; Start 191; Stop 215
ttgtcatcgttttatcgtaaatctg

SEQ ID NO: 431308 - DNA, 25 bp, Artificial
  probe
  misc_feature (1)..(25): SEQ ID NO: 6172; WAN02497Y; Start 185; Stop 209
cacaccttgtcatcgttttatcgta

SEQ ID NO: 431309 - DNA, 25 bp, Artificial
  probe
  misc_feature (1)..(25): SEQ ID NO: 6172; WAN02497Y; Start 190; Stop 214
cttgtcatcgttttatcgtaaatct

SEQ ID NO: 431310 - DNA, 25 bp, Artificial
  probe
  misc_feature (1)..(25): SEQ ID NO: 6172; WAN02497Y; Start 110; Stop 134
gactataaaagctcatttccttcgc

SEQ ID NO: 431311 - DNA, 25 bp, Artificial
  probe
  misc_feature (1)..(25): SEQ ID NO: 6172; WAN02497Y; Start 112; Stop 136
ctataaaagctcatttccttcgcac

SEQ ID NO: 431312 - DNA, 25 bp, Artificial
  probe
  misc_feature (1)..(25): SEQ ID NO: 6172; WAN02497Y; Start 100; Stop 124
aaaacgaaaggactataaaagctca

SEQ ID NO: 431313 - DNA, 25 bp, Artificial
  probe
  misc_feature (1)..(25): SEQ ID NO: 6172; WAN02497Y; Start 111; Stop 135
actataaaagctcatttccttcgca

SEQ ID NO: 431314 - DNA, 25 bp, Artificial
  probe
  misc_feature (1)..(25): SEQ ID NO: 6172; WAN02497Y; Start 103; Stop 127
acgaaaggactataaaagctcattt

SEQ ID NO: 431315 - DNA, 25 bp, Artificial
  probe
  misc_feature (1)..(25): SEQ ID NO: 6172; WAN02497Y; Start 102; Stop 126
aacgaaaggactataaaagctcatt

SEQ ID NO: 431316 - DNA, 25 bp, Artificial
  probe
  misc_feature (1)..(25): SEQ ID NO: 6172; WAN02497Y; Start 101; Stop 125
aaacgaaaggactataaaagctcat

SEQ ID NO: 431317 - DNA, 25 bp, Artificial
  probe
  misc_feature (1)..(25): SEQ ID NO: 6172; WAN02497Y; Start 183; Stop 207
aacacaccttgtcatcgttttatcg

SEQ ID NO: 431318 - DNA, 25 bp, Artificial
  probe
  misc_feature (1)..(25): SEQ ID NO: 6172; WAN02497Y; Start 181; Stop 205
gcaacacaccttgtcatcgttttat

SEQ ID NO: 431319 - DNA, 25 bp, Artificial
  probe
  misc_feature (1)..(25): SEQ ID NO: 6172; WAN02497Y; Start 109; Stop 133
ggactataaaagctcatttccttcg

SEQ ID NO: 431320 - DNA, 25 bp, Artificial
  probe
  misc_feature (1)..(25): SEQ ID NO: 6172; WAN02497Y; Start 184; Stop 208
acacaccttgtcatcgttttatcgt

SEQ ID NO: 431321 - DNA, 25 bp, Artificial
  probe
  misc_feature (1)..(25): SEQ ID NO: 6172; WAN02497Y; Start 194; Stop 218
tcatcgttttatcgtaaatctgtta

SEQ ID NO: 431322 - DNA, 25 bp, Artificial
  probe
  misc_feature (1)..(25): SEQ ID NO: 6172; WAN02497Y; Start 99; Stop 123
taaaacgaaaggactataaaagctc

SEQ ID NO: 431323 - DNA, 25 bp, Artificial
  probe
  misc_feature (1)..(25): SEQ ID NO: 6172; WAN02497Y; Start 180; Stop 204
agcaacacaccttgtcatcgtttta

SEQ ID NO: 431324 - DNA, 25 bp, Artificial
  probe
  misc_feature (1)..(25): SEQ ID NO: 6172; WAN02497Y; Start 98; Stop 122
ttaaaacgaaaggactataaaagct

SEQ ID NO: 431325 - DNA, 25 bp, Artificial
  probe
  misc_feature (1)..(25): SEQ ID NO: 6172; WAN02497Y; Start 104; Stop 128
cgaaaggactataaaagctcatttc

SEQ ID NO: 431326 - DNA, 25 bp, Artificial
  probe
  misc_feature (1)..(25): SEQ ID NO: 6172; WAN02497Y; Start 105; Stop 129
gaaaggactataaaagctcatttcc

SEQ ID NO: 431327 - DNA, 25 bp, Artificial
  probe
  misc_feature (1)..(25): SEQ ID NO: 6172; WAN02497Y; Start 97; Stop 121
tttaaaacgaaaggactataaaagc

SEQ ID NO: 431328 - DNA, 25 bp, Artificial
  probe
  misc_feature (1)..(25): SEQ ID NO: 6172; WAN02497Y; Start 108; Stop 132
aggactataaaagctcatttccttc

SEQ ID NO: 431329 - DNA, 25 bp, Artificial
  probe
  misc_feature (1)..(25): SEQ ID NO: 6172; WAN02497Y; Start 106; Stop 130
aaaggactataaaagctcatttcct

SEQ ID NO: 431330 - DNA, 25 bp, Artificial
  probe
  misc_feature (1)..(25): SEQ ID NO: 6172; WAN02497Y; Start 88; Stop 112
agatagtattttaaaacgaaaggac

SEQ ID NO: 431331 - DNA, 25 bp, Artificial
  probe
  misc_feature (1)..(25): SEQ ID NO: 6172; WAN02497Y; Start 89; Stop 113
gatagtattttaaaacgaaaggact

SEQ ID NO: 431332 - DNA, 25 bp, Artificial
  probe
  misc_feature (1)..(25): SEQ ID NO: 6173; WAN02499G; Start 85; Stop 109
gcttgctcactattaagatgaagta

SEQ ID NO: 431333 - DNA, 25 bp, Artificial
  probe
  misc_feature (1)..(25): SEQ ID NO: 6173; WAN02499G; Start 84; Stop 108
agcttgctcactattaagatgaagt

SEQ ID NO: 431334 - DNA, 25 bp, Artificial
  probe
  misc_feature (1)..(25): SEQ ID NO: 6173; WAN02499G; Start 154; Stop 178
gccaattccatacctatttcacaat

SEQ ID NO: 431335 - DNA, 25 bp, Artificial
  probe
  misc_feature (1)..(25): SEQ ID NO: 6173; WAN02499G; Start 150; Stop 174
tttcgccaattccatacctatttca

SEQ ID NO: 431336 - DNA, 25 bp, Artificial
  probe
  misc_feature (1)..(25): SEQ ID NO: 6173; WAN02499G; Start 161; Stop 185
ccatacctatttcacaatttaccga

SEQ ID NO: 431337 - DNA, 25 bp, Artificial
  probe
  misc_feature (1)..(25): SEQ ID NO: 6173; WAN02499G; Start 160; Stop 184
tccatacctatttcacaatttaccg

SEQ ID NO: 431338 - DNA, 25 bp, Artificial
  probe
  misc_feature (1)..(25): SEQ ID NO: 6173; WAN02499G; Start 83; Stop 107
tagcttgctcactattaagatgaag

SEQ ID NO: 431339 - DNA, 25 bp, Artificial
  probe
  misc_feature (1)..(25): SEQ ID NO: 6173; WAN02499G; Start 169; Stop 193
atttcacaatttaccgatgacacag

SEQ ID NO: 431340 - DNA, 25 bp, Artificial
  probe
  misc_feature (1)..(25): SEQ ID NO: 6173; WAN02499G; Start 151; Stop 175
ttcgccaattccatacctatttcac

SEQ ID NO: 431341 - DNA, 25 bp, Artificial
  probe
  misc_feature (1)..(25): SEQ ID NO: 6173; WAN02499G; Start 166; Stop 190
cctatttcacaatttaccgatgaca

SEQ ID NO: 431342 - DNA, 25 bp, Artificial
  probe
  misc_feature (1)..(25): SEQ ID NO: 6173; WAN02499G; Start 165; Stop 189
acctatttcacaatttaccgatgac

SEQ ID NO: 431343 - DNA, 25 bp, Artificial
  probe
  misc_feature (1)..(25): SEQ ID NO: 6173; WAN02499G; Start 172; Stop 196
tcacaatttaccgatgacacagaaa

SEQ ID NO: 431344 - DNA, 25 bp, Artificial
  probe
  misc_feature (1)..(25): SEQ ID NO: 6173; WAN02499G; Start 171; Stop 195
ttcacaatttaccgatgacacagaa

SEQ ID NO: 431345 - DNA, 25 bp, Artificial
  probe
  misc_feature (1)..(25): SEQ ID NO: 6173; WAN02499G; Start 170; Stop 194
tttcacaatttaccgatgacacaga

SEQ ID NO: 431346 - DNA, 25 bp, Artificial
  probe
  misc_feature (1)..(25): SEQ ID NO: 6173; WAN02499G; Start 153; Stop 177
cgccaattccatacctatttcacaa

SEQ ID NO: 431347 - DNA, 25 bp, Artificial
  probe
  misc_feature (1)..(25): SEQ ID NO: 6173; WAN02499G; Start 168; Stop 192
tatttcacaatttaccgatgacaca

SEQ ID NO: 431348 - DNA, 25 bp, Artificial
  probe
  misc_feature (1)..(25): SEQ ID NO: 6173; WAN02499G; Start 82; Stop 106
ttagcttgctcactattaagatgaa

SEQ ID NO: 431349 - DNA, 25 bp, Artificial
  probe
  misc_feature (1)..(25): SEQ ID NO: 6173; WAN02499G; Start 167; Stop 191
ctatttcacaatttaccgatgacac

SEQ ID NO: 431350 - DNA, 25 bp, Artificial
  probe
  misc_feature (1)..(25): SEQ ID NO: 6173; WAN02499G; Start 152; Stop 176
tcgccaattccatacctatttcaca

SEQ ID NO: 431351 - DNA, 25 bp, Artificial
  probe
  misc_feature (1)..(25): SEQ ID NO: 6173; WAN02499G; Start 164; Stop 188
tacctatttcacaatttaccgatga

SEQ ID NO: 431352 - DNA, 25 bp, Artificial
  probe
  misc_feature (1)..(25): SEQ ID NO: 6173; WAN02499G; Start 86; Stop 110
cttgctcactattaagatgaagtat

SEQ ID NO: 431353 - DNA, 25 bp, Artificial
  probe
  misc_feature (1)..(25): SEQ ID NO: 6173; WAN02499G; Start 163; Stop 187
atacctatttcacaatttaccgatg

SEQ ID NO: 431354 - DNA, 25 bp, Artificial
  probe
  misc_feature (1)..(25): SEQ ID NO: 6173; WAN02499G; Start 162; Stop 186
catacctatttcacaatttaccgat

SEQ ID NO: 431355 - DNA, 25 bp, Artificial
  probe
  misc_feature (1)..(25): SEQ ID NO: 6173; WAN02499G; Start 159; Stop 183
ttccatacctatttcacaatttacc

SEQ ID NO: 431356 - DNA, 25 bp, Artificial
  probe
  misc_feature (1)..(25): SEQ ID NO: 6173; WAN02499G; Start 155; Stop 179
ccaattccatacctatttcacaatt

SEQ ID NO: 431357 - DNA, 25 bp, Artificial
  probe
  misc_feature (1)..(25): SEQ ID NO: 6173; WAN02499G; Start 117; Stop 141
ttcatagaacctattgtgaaggatt

SEQ ID NO: 431358 - DNA, 25 bp, Artificial
  probe
  misc_feature (1)..(25): SEQ ID NO: 6173; WAN02499G; Start 80; Stop 104
gtttagcttgctcactattaagatg

SEQ ID NO: 431359 - DNA, 25 bp, Artificial
  probe
  misc_feature (1)..(25): SEQ ID NO: 6173; WAN02499G; Start 118; Stop 142
tcatagaacctattgtgaaggattt

SEQ ID NO: 431360 - DNA, 25 bp, Artificial
  probe
  misc_feature (1)..(25): SEQ ID NO: 6173; WAN02499G; Start 78; Stop 102
aagtttagcttgctcactattaaga

SEQ ID NO: 431361 - DNA, 25 bp, Artificial
  probe
  misc_feature (1)..(25): SEQ ID NO: 6173; WAN02499G; Start 81; Stop 105
tttagcttgctcactattaagatga

SEQ ID NO: 431362 - DNA, 25 bp, Artificial
  probe
  misc_feature (1)..(25): SEQ ID NO: 6173; WAN02499G; Start 149; Stop 173
ttttcgccaattccatacctatttc

SEQ ID NO: 431363 - DNA, 25 bp, Artificial
  probe
  misc_feature (1)..(25): SEQ ID NO: 6173; WAN02499G; Start 79; Stop 103
agtttagcttgctcactattaagat

SEQ ID NO: 431364 - DNA, 25 bp, Artificial
  probe
  misc_feature (1)..(25): SEQ ID NO: 6173; WAN02499G; Start 173; Stop 197
cacaatttaccgatgacacagaaaa

SEQ ID NO: 431365 - DNA, 25 bp, Artificial
  probe
  misc_feature (1)..(25): SEQ ID NO: 6174; WAN0249AO; Start 66; Stop 90
taatgaatatttctggagaacgagc

SEQ ID NO: 431366 - DNA, 25 bp, Artificial
  probe
  misc_feature (1)..(25): SEQ ID NO: 6174; WAN0249AO; Start 67; Stop 91
aatgaatatttctggagaacgagct

SEQ ID NO: 431367 - DNA, 25 bp, Artificial
  probe
  misc_feature (1)..(25): SEQ ID NO: 6174; WAN0249AO; Start 68; Stop 92
atgaatatttctggagaacgagctg

SEQ ID NO: 431368 - DNA, 25 bp, Artificial
  probe
  misc_feature (1)..(25): SEQ ID NO: 6174; WAN0249AO; Start 70; Stop 94
gaatatttctggagaacgagctgtc

SEQ ID NO: 431369 - DNA, 25 bp, Artificial
  probe
  misc_feature (1)..(25): SEQ ID NO: 6174; WAN0249AO; Start 69; Stop 93
tgaatatttctggagaacgagctgt

SEQ ID NO: 431370 - DNA, 25 bp, Artificial
  probe
  misc_feature (1)..(25): SEQ ID NO: 6174; WAN0249AO; Start 64; Stop 88
gttaatgaatatttctggagaacga

SEQ ID NO: 431371 - DNA, 25 bp, Artificial
  probe
  misc_feature (1)..(25): SEQ ID NO: 6174; WAN0249AO; Start 63; Stop 87
agttaatgaatatttctggagaacg

SEQ ID NO: 431372 - DNA, 25 bp, Artificial
  probe
  misc_feature (1)..(25): SEQ ID NO: 6174; WAN0249AO; Start 65; Stop 89
ttaatgaatatttctggagaacgag

SEQ ID NO: 431373 - DNA, 25 bp, Artificial
  probe
  misc_feature (1)..(25): SEQ ID NO: 6174; WAN0249AO; Start 62; Stop 86
aagttaatgaatatttctggagaac

SEQ ID NO: 431374 - DNA, 25 bp, Artificial
  probe
  misc_feature (1)..(25): SEQ ID NO: 6174; WAN0249AO; Start 59; Stop 83
tgaaagttaatgaatatttctggag

SEQ ID NO: 431375 - DNA, 25 bp, Artificial
  probe
  misc_feature (1)..(25): SEQ ID NO: 6174; WAN0249AO; Start 29; Stop 53
ttttgaaaatcgaaaggaaaagtat

SEQ ID NO: 431376 - DNA, 25 bp, Artificial
  probe
  misc_feature (1)..(25): SEQ ID NO: 6174; WAN0249AO; Start 60; Stop 84
gaaagttaatgaatatttctggaga

SEQ ID NO: 431377 - DNA, 25 bp, Artificial
  probe
  misc_feature (1)..(25): SEQ ID NO: 6174; WAN0249AO; Start 32; Stop 56
tgaaaatcgaaaggaaaagtataaa

SEQ ID NO: 431378 - DNA, 25 bp, Artificial
  probe
  misc_feature (1)..(25): SEQ ID NO: 6174; WAN0249AO; Start 31; Stop 55
ttgaaaatcgaaaggaaaagtataa

SEQ ID NO: 431379 - DNA, 25 bp, Artificial
  probe
  misc_feature (1)..(25): SEQ ID NO: 6174; WAN0249AO; Start 30; Stop 54
tttgaaaatcgaaaggaaaagtata

SEQ ID NO: 431380 - DNA, 25 bp, Artificial
  probe
  misc_feature (1)..(25): SEQ ID NO: 6175; WAN024962; Start 84; Stop 108
ctgcttggattgaggtaatagattc

SEQ ID NO: 431381 - DNA, 25 bp, Artificial
  probe
  misc_feature (1)..(25): SEQ ID NO: 6175; WAN024962; Start 85; Stop 109
tgcttggattgaggtaatagattca

SEQ ID NO: 431382 - DNA, 25 bp, Artificial
  probe
  misc_feature (1)..(25): SEQ ID NO: 6175; WAN024962; Start 83; Stop 107
cctgcttggattgaggtaatagatt

SEQ ID NO: 431383 - DNA, 25 bp, Artificial
  probe
  misc_feature (1)..(25): SEQ ID NO: 6175; WAN024962; Start 143; Stop 167
taagaaagagaaagcgacagattga

SEQ ID NO: 431384 - DNA, 25 bp, Artificial
  probe
  misc_feature (1)..(25): SEQ ID NO: 6175; WAN024962; Start 142; Stop 166
gtaagaaagagaaagcgacagattg

SEQ ID NO: 431385 - DNA, 25 bp, Artificial
  probe
  misc_feature (1)..(25): SEQ ID NO: 6175; WAN024962; Start 136; Stop 160
tttgatgtaagaaagagaaagcgac

SEQ ID NO: 431386 - DNA, 25 bp, Artificial
  probe
  misc_feature (1)..(25): SEQ ID NO: 6175; WAN024962; Start 135; Stop 159
gtttgatgtaagaaagagaaagcga

SEQ ID NO: 431387 - DNA, 25 bp, Artificial
  probe
  misc_feature (1)..(25): SEQ ID NO: 6175; WAN024962; Start 149; Stop 173
agagaaagcgacagattgaagtaat

SEQ ID NO: 431388 - DNA, 25 bp, Artificial
  probe
  misc_feature (1)..(25): SEQ ID NO: 6175; WAN024962; Start 134; Stop 158
agtttgatgtaagaaagagaaagcg

SEQ ID NO: 431389 - DNA, 25 bp, Artificial
  probe
  misc_feature (1)..(25): SEQ ID NO: 6175; WAN024962; Start 148; Stop 172
aagagaaagcgacagattgaagtaa

SEQ ID NO: 431390 - DNA, 25 bp, Artificial
  probe
  misc_feature (1)..(25): SEQ ID NO: 6175; WAN024962; Start 147; Stop 171
aaagagaaagcgacagattgaagta

SEQ ID NO: 431391 - DNA, 25 bp, Artificial
  probe
  misc_feature (1)..(25): SEQ ID NO: 6175; WAN024962; Start 150; Stop 174
gagaaagcgacagattgaagtaatt

SEQ ID NO: 431392 - DNA, 25 bp, Artificial
  probe
  misc_feature (1)..(25): SEQ ID NO: 6175; WAN024962; Start 144; Stop 168
aagaaagagaaagcgacagattgaa

SEQ ID NO: 431393 - DNA, 25 bp, Artificial
  probe
  misc_feature (1)..(25): SEQ ID NO: 6175; WAN024962; Start 151; Stop 175
agaaagcgacagattgaagtaattt

SEQ ID NO: 431394 - DNA, 25 bp, Artificial
  probe
  misc_feature (1)..(25): SEQ ID NO: 6175; WAN024962; Start 145; Stop 169
agaaagagaaagcgacagattgaag

SEQ ID NO: 431395 - DNA, 25 bp, Artificial
  probe
  misc_feature (1)..(25): SEQ ID NO: 6175; WAN024962; Start 146; Stop 170
gaaagagaaagcgacagattgaagt

SEQ ID NO: 431396 - DNA, 25 bp, Artificial
  probe
  misc_feature (1)..(25): SEQ ID NO: 6175; WAN024962; Start 187; Stop 211
tattgctagaacaaatggtcggata

SEQ ID NO: 431397 - DNA, 25 bp, Artificial
  probe
  misc_feature (1)..(25): SEQ ID NO: 6175; WAN024962; Start 82; Stop 106
gcctgcttggattgaggtaatagat

SEQ ID NO: 431398 - DNA, 25 bp, Artificial
  probe
  misc_feature (1)..(25): SEQ ID NO: 6175; WAN024962; Start 140; Stop 164
atgtaagaaagagaaagcgacagat

SEQ ID NO: 431399 - DNA, 25 bp, Artificial
  probe
  misc_feature (1)..(25): SEQ ID NO: 6175; WAN024962; Start 199; Stop 223
aaatggtcggataggttggtagttt

SEQ ID NO: 431400 - DNA, 25 bp, Artificial
  probe
  misc_feature (1)..(25): SEQ ID NO: 6175; WAN024962; Start 188; Stop 212
attgctagaacaaatggtcggatag

SEQ ID NO: 431401 - DNA, 25 bp, Artificial
  probe
  misc_feature (1)..(25): SEQ ID NO: 6175; WAN024962; Start 186; Stop 210
ctattgctagaacaaatggtcggat

SEQ ID NO: 431402 - DNA, 25 bp, Artificial
  probe
  misc_feature (1)..(25): SEQ ID NO: 6175; WAN024962; Start 141; Stop 165
tgtaagaaagagaaagcgacagatt

SEQ ID NO: 431403 - DNA, 25 bp, Artificial
  probe
  misc_feature (1)..(25): SEQ ID NO: 6175; WAN024962; Start 137; Stop 161
ttgatgtaagaaagagaaagcgaca

SEQ ID NO: 431404 - DNA, 25 bp, Artificial
  probe
  misc_feature (1)..(25): SEQ ID NO: 6175; WAN024962; Start 133; Stop 157
aagtttgatgtaagaaagagaaagc

SEQ ID NO: 431405 - DNA, 25 bp, Artificial
  probe
  misc_feature (1)..(25): SEQ ID NO: 6175; WAN024962; Start 139; Stop 163
gatgtaagaaagagaaagcgacaga

SEQ ID NO: 431406 - DNA, 25 bp, Artificial
  probe
  misc_feature (1)..(25): SEQ ID NO: 6175; WAN024962; Start 192; Stop 216
ctagaacaaatggtcggataggttg

SEQ ID NO: 431407 - DNA, 25 bp, Artificial
  probe
  misc_feature (1)..(25): SEQ ID NO: 6175; WAN024962; Start 138; Stop 162
tgatgtaagaaagagaaagcgacag

SEQ ID NO: 431408 - DNA, 25 bp, Artificial
  probe
  misc_feature (1)..(25): SEQ ID NO: 6175; WAN024962; Start 86; Stop 110
gcttggattgaggtaatagattcaa

SEQ ID NO: 431409 - DNA, 25 bp, Artificial
  probe
  misc_feature (1)..(25): SEQ ID NO: 6175; WAN024962; Start 203; Stop 227
ggtcggataggttggtagtttgaaa

SEQ ID NO: 431410 - DNA, 25 bp, Artificial
  probe
  misc_feature (1)..(25): SEQ ID NO: 6175; WAN024962; Start 200; Stop 224
aatggtcggataggttggtagtttg

SEQ ID NO: 431411 - DNA, 25 bp, Artificial
  probe
  misc_feature (1)..(25): SEQ ID NO: 6175; WAN024962; Start 193; Stop 217
tagaacaaatggtcggataggttgg

SEQ ID NO: 431412 - DNA, 25 bp, Artificial
  probe
  misc_feature (1)..(25): SEQ ID NO: 6175; WAN024962; Start 198; Stop 222
caaatggtcggataggttggtagtt

SEQ ID NO: 431413 - DNA, 25 bp, Artificial
  probe
  misc_feature (1)..(25): SEQ ID NO: 6176; WAN0249CE; Start 390; Stop 414
gctggttagtagtaatctggacatc

SEQ ID NO: 431414 - DNA, 25 bp, Artificial
  probe
  misc_feature (1)..(25): SEQ ID NO: 6176; WAN0249CE; Start 391; Stop 415
ctggttagtagtaatctggacatca

SEQ ID NO: 431415 - DNA, 25 bp, Artificial
  probe
  misc_feature (1)..(25): SEQ ID NO: 6176; WAN0249CE; Start 389; Stop 413
tgctggttagtagtaatctggacat

SEQ ID NO: 431416 - DNA, 25 bp, Artificial
  probe
  misc_feature (1)..(25): SEQ ID NO: 6176; WAN0249CE; Start 388; Stop 412
ttgctggttagtagtaatctggaca

SEQ ID NO: 431417 - DNA, 25 bp, Artificial
  probe
  misc_feature (1)..(25): SEQ ID NO: 6176; WAN0249CE; Start 392; Stop 416
tggttagtagtaatctggacatcat

SEQ ID NO: 431418 - DNA, 25 bp, Artificial
  probe
  misc_feature (1)..(25): SEQ ID NO: 6176; WAN0249CE; Start 393; Stop 417
ggttagtagtaatctggacatcatt

SEQ ID NO: 431419 - DNA, 25 bp, Artificial
  probe
  misc_feature (1)..(25): SEQ ID NO: 6176; WAN0249CE; Start 304; Stop 328
aagtagggagtggctattattcaac

SEQ ID NO: 431420 - DNA, 25 bp, Artificial
  probe
  misc_feature (1)..(25): SEQ ID NO: 6176; WAN0249CE; Start 387; Stop 411
tttgctggttagtagtaatctggac

SEQ ID NO: 431421 - DNA, 25 bp, Artificial
  probe
  misc_feature (1)..(25): SEQ ID NO: 6176; WAN0249CE; Start 386; Stop 410
atttgctggttagtagtaatctgga

SEQ ID NO: 431422 - DNA, 25 bp, Artificial
  probe
  misc_feature (1)..(25): SEQ ID NO: 6176; WAN0249CE; Start 271; Stop 295
acatctgttaatgcaacggataatt

SEQ ID NO: 431423 - DNA, 25 bp, Artificial
  probe
  misc_feature (1)..(25): SEQ ID NO: 6176; WAN0249CE; Start 447; Stop 471
tttgttactggattactgctgattt

SEQ ID NO: 431424 - DNA, 25 bp, Artificial
  probe
  misc_feature (1)..(25): SEQ ID NO: 6176; WAN0249CE; Start 303; Stop 327
taagtagggagtggctattattcaa

SEQ ID NO: 431425 - DNA, 25 bp, Artificial
  probe
  misc_feature (1)..(25): SEQ ID NO: 6176; WAN0249CE; Start 295; Stop 319
tttattgataagtagggagtggcta

SEQ ID NO: 431426 - DNA, 25 bp, Artificial
  probe
  misc_feature (1)..(25): SEQ ID NO: 6176; WAN0249CE; Start 385; Stop 409
aatttgctggttagtagtaatctgg

SEQ ID NO: 431427 - DNA, 25 bp, Artificial
  probe
  misc_feature (1)..(25): SEQ ID NO: 6176; WAN0249CE; Start 306; Stop 330
gtagggagtggctattattcaactt

SEQ ID NO: 431428 - DNA, 25 bp, Artificial
  probe
  misc_feature (1)..(25): SEQ ID NO: 6176; WAN0249CE; Start 298; Stop 322
attgataagtagggagtggctatta

SEQ ID NO: 431429 - DNA, 25 bp, Artificial
  probe
  misc_feature (1)..(25): SEQ ID NO: 6176; WAN0249CE; Start 297; Stop 321
tattgataagtagggagtggctatt

SEQ ID NO: 431430 - DNA, 25 bp, Artificial
  probe
  misc_feature (1)..(25): SEQ ID NO: 6176; WAN0249CE; Start 594; Stop 618
ccagttaggacactttgaatgattt

SEQ ID NO: 431431 - DNA, 25 bp, Artificial
  probe
  misc_feature (1)..(25): SEQ ID NO: 6176; WAN0249CE; Start 270; Stop 294
tacatctgttaatgcaacggataat

SEQ ID NO: 431432 - DNA, 25 bp, Artificial
  probe
  misc_feature (1)..(25): SEQ ID NO: 6176; WAN0249CE; Start 269; Stop 293
atacatctgttaatgcaacggataa

SEQ ID NO: 431433 - DNA, 25 bp, Artificial
  probe
  misc_feature (1)..(25): SEQ ID NO: 6176; WAN0249CE; Start 296; Stop 320
ttattgataagtagggagtggctat

SEQ ID NO: 431434 - DNA, 25 bp, Artificial
  probe
  misc_feature (1)..(25): SEQ ID NO: 6176; WAN0249CE; Start 307; Stop 331
tagggagtggctattattcaacttt

SEQ ID NO: 431435 - DNA, 25 bp, Artificial
  probe
  misc_feature (1)..(25): SEQ ID NO: 6176; WAN0249CE; Start 305; Stop 329
agtagggagtggctattattcaact

SEQ ID NO: 431436 - DNA, 25 bp, Artificial
  probe
  misc_feature (1)..(25): SEQ ID NO: 6176; WAN0249CE; Start 267; Stop 291
atatacatctgttaatgcaacggat

SEQ ID NO: 431437 - DNA, 25 bp, Artificial
  probe
  misc_feature (1)..(25): SEQ ID NO: 6176; WAN0249CE; Start 159; Stop 183
aagcatcataaaggactccaattaa

SEQ ID NO: 431438 - DNA, 25 bp, Artificial
  probe
  misc_feature (1)..(25): SEQ ID NO: 6176; WAN0249CE; Start 158; Stop 182
aaagcatcataaaggactccaatta

SEQ ID NO: 431439 - DNA, 25 bp, Artificial
  probe
  misc_feature (1)..(25): SEQ ID NO: 6176; WAN0249CE; Start 302; Stop 326
ataagtagggagtggctattattca

SEQ ID NO: 431440 - DNA, 25 bp, Artificial
  probe
  misc_feature (1)..(25): SEQ ID NO: 6176; WAN0249CE; Start 300; Stop 324
tgataagtagggagtggctattatt

SEQ ID NO: 431441 - DNA, 25 bp, Artificial
  probe
  misc_feature (1)..(25): SEQ ID NO: 6176; WAN0249CE; Start 299; Stop 323
ttgataagtagggagtggctattat

SEQ ID NO: 431442 - DNA, 25 bp, Artificial
  probe
  misc_feature (1)..(25): SEQ ID NO: 6176; WAN0249CE; Start 384; Stop 408
caatttgctggttagtagtaatctg

SEQ ID NO: 431443 - DNA, 25 bp, Artificial
  probe
  misc_feature (1)..(25): SEQ ID NO: 6176; WAN0249CE; Start 383; Stop 407
tcaatttgctggttagtagtaatct

SEQ ID NO: 431444 - DNA, 25 bp, Artificial
  probe
  misc_feature (1)..(25): SEQ ID NO: 6176; WAN0249CE; Start 268; Stop 292
tatacatctgttaatgcaacggata

SEQ ID NO: 431445 - DNA, 25 bp, Artificial
  probe
  misc_feature (1)..(25): SEQ ID NO: 6176; WAN0249CE; Start 266; Stop 290
tatatacatctgttaatgcaacgga

SEQ ID NO: 431446 - DNA, 25 bp, Artificial
  probe
  misc_feature (1)..(25): SEQ ID NO: 6177; WAN02496O; Start 56; Stop 80
aaacacctctattctacgctttcat

SEQ ID NO: 431447 - DNA, 25 bp, Artificial
  probe
  misc_feature (1)..(25): SEQ ID NO: 6177; WAN02496O; Start 61; Stop 85
cctctattctacgctttcatattgc

SEQ ID NO: 431448 - DNA, 25 bp, Artificial
  probe
  misc_feature (1)..(25): SEQ ID NO: 6177; WAN02496O; Start 57; Stop 81
aacacctctattctacgctttcata

SEQ ID NO: 431449 - DNA, 25 bp, Artificial
  probe
  misc_feature (1)..(25): SEQ ID NO: 6177; WAN02496O; Start 64; Stop 88
ctattctacgctttcatattgctgc

SEQ ID NO: 431450 - DNA, 25 bp, Artificial
  probe
  misc_feature (1)..(25): SEQ ID NO: 6177; WAN02496O; Start 58; Stop 82
acacctctattctacgctttcatat

SEQ ID NO: 431451 - DNA, 25 bp, Artificial
  probe
  misc_feature (1)..(25): SEQ ID NO: 6177; WAN02496O; Start 63; Stop 87
tctattctacgctttcatattgctg

SEQ ID NO: 431452 - DNA, 25 bp, Artificial
  probe
  misc_feature (1)..(25): SEQ ID NO: 6177; WAN02496O; Start 49; Stop 73
acattggaaacacctctattctacg

SEQ ID NO: 431453 - DNA, 25 bp, Artificial
  probe
  misc_feature (1)..(25): SEQ ID NO: 6177; WAN02496O; Start 62; Stop 86
ctctattctacgctttcatattgct

SEQ ID NO: 431454 - DNA, 25 bp, Artificial
  probe
  misc_feature (1)..(25): SEQ ID NO: 6177; WAN02496O; Start 60; Stop 84
acctctattctacgctttcatattg

SEQ ID NO: 431455 - DNA, 25 bp, Artificial
  probe
  misc_feature (1)..(25): SEQ ID NO: 6177; WAN02496O; Start 59; Stop 83
cacctctattctacgctttcatatt

SEQ ID NO: 431456 - DNA, 25 bp, Artificial
  probe
  misc_feature (1)..(25): SEQ ID NO: 6177; WAN02496O; Start 50; Stop 74
cattggaaacacctctattctacgc

SEQ ID NO: 431457 - DNA, 25 bp, Artificial
  probe
  misc_feature (1)..(25): SEQ ID NO: 6177; WAN02496O; Start 51; Stop 75
attggaaacacctctattctacgct

SEQ ID NO: 431458 - DNA, 25 bp, Artificial
  probe
  misc_feature (1)..(25): SEQ ID NO: 6177; WAN02496O; Start 53; Stop 77
tggaaacacctctattctacgcttt

SEQ ID NO: 431459 - DNA, 25 bp, Artificial
  probe
  misc_feature (1)..(25): SEQ ID NO: 6177; WAN02496O; Start 52; Stop 76
ttggaaacacctctattctacgctt

SEQ ID NO: 431460 - DNA, 25 bp, Artificial
  probe
  misc_feature (1)..(25): SEQ ID NO: 6177; WAN02496O; Start 48; Stop 72
tacattggaaacacctctattctac

SEQ ID NO: 431461 - DNA, 25 bp, Artificial
  probe
  misc_feature (1)..(25): SEQ ID NO: 6177; WAN02496O; Start 47; Stop 71
gtacattggaaacacctctattcta

SEQ ID NO: 431462 - DNA, 25 bp, Artificial
  probe
  misc_feature (1)..(25): SEQ ID NO: 6177; WAN02496O; Start 65; Stop 89
tattctacgctttcatattgctgca

SEQ ID NO: 431463 - DNA, 25 bp, Artificial
  probe
  misc_feature (1)..(25): SEQ ID NO: 6177; WAN02496O; Start 55; Stop 79
gaaacacctctattctacgctttca

SEQ ID NO: 431464 - DNA, 25 bp, Artificial
  probe
  misc_feature (1)..(25): SEQ ID NO: 6177; WAN02496O; Start 66; Stop 90
attctacgctttcatattgctgcat

SEQ ID NO: 431465 - DNA, 25 bp, Artificial
  probe
  misc_feature (1)..(25): SEQ ID NO: 6177; WAN02496O; Start 78; Stop 102
catattgctgcatgacactttcaaa

SEQ ID NO: 431466 - DNA, 25 bp, Artificial
  probe
  misc_feature (1)..(25): SEQ ID NO: 6177; WAN02496O; Start 54; Stop 78
ggaaacacctctattctacgctttc

SEQ ID NO: 431467 - DNA, 25 bp, Artificial
  probe
  misc_feature (1)..(25): SEQ ID NO: 6177; WAN02496O; Start 224; Stop 248
aaacttcgcccatcataaaatatct

SEQ ID NO: 431468 - DNA, 25 bp, Artificial
  probe
  misc_feature (1)..(25): SEQ ID NO: 6177; WAN02496O; Start 193; Stop 217
aggtttctgtacttataggaactag

SEQ ID NO: 431469 - DNA, 25 bp, Artificial
  probe
  misc_feature (1)..(25): SEQ ID NO: 6177; WAN02496O; Start 67; Stop 91
ttctacgctttcatattgctgcatg

SEQ ID NO: 431470 - DNA, 25 bp, Artificial
  probe
  misc_feature (1)..(25): SEQ ID NO: 6177; WAN02496O; Start 223; Stop 247
aaaacttcgcccatcataaaatatc

SEQ ID NO: 431471 - DNA, 25 bp, Artificial
  probe
  misc_feature (1)..(25): SEQ ID NO: 6177; WAN02496O; Start 225; Stop 249
aacttcgcccatcataaaatatcta

SEQ ID NO: 431472 - DNA, 25 bp, Artificial
  probe
  misc_feature (1)..(25): SEQ ID NO: 6177; WAN02496O; Start 89; Stop 113
atgacactttcaaaatcaaattgct

SEQ ID NO: 431473 - DNA, 25 bp, Artificial
  probe
  misc_feature (1)..(25): SEQ ID NO: 6177; WAN02496O; Start 226; Stop 250
acttcgcccatcataaaatatctat

SEQ ID NO: 431474 - DNA, 25 bp, Artificial
  probe
  misc_feature (1)..(25): SEQ ID NO: 6177; WAN02496O; Start 191; Stop 215
ataggtttctgtacttataggaact

SEQ ID NO: 431475 - DNA, 25 bp, Artificial
  probe
  misc_feature (1)..(25): SEQ ID NO: 6177; WAN02496O; Start 90; Stop 114
tgacactttcaaaatcaaattgcta

SEQ ID NO: 431476 - DNA, 25 bp, Artificial
  probe
  misc_feature (1)..(25): SEQ ID NO: 6177; WAN02496O; Start 75; Stop 99
tttcatattgctgcatgacactttc

SEQ ID NO: 431477 - DNA, 25 bp, Artificial
  probe
  misc_feature (1)..(25): SEQ ID NO: 6177; WAN02496O; Start 74; Stop 98
ctttcatattgctgcatgacacttt

SEQ ID NO: 431478 - DNA, 25 bp, Artificial
  probe
  misc_feature (1)..(25): SEQ ID NO: 6177; WAN02496O; Start 88; Stop 112
catgacactttcaaaatcaaattgc

SEQ ID NO: 431479 - DNA, 25 bp, Artificial
  probe
  misc_feature (1)..(25): SEQ ID NO: 6178; WAN0249AQ; Start 42; Stop 66
agaaaattgtcgttagtaatcggaa

SEQ ID NO: 431480 - DNA, 25 bp, Artificial
  probe
  misc_feature (1)..(25): SEQ ID NO: 6178; WAN0249AQ; Start 41; Stop 65
aagaaaattgtcgttagtaatcgga

SEQ ID NO: 431481 - DNA, 25 bp, Artificial
  probe
  misc_feature (1)..(25): SEQ ID NO: 6178; WAN0249AQ; Start 132; Stop 156
tgattaatgcctcaaatagttgtac

SEQ ID NO: 431482 - DNA, 25 bp, Artificial
  probe
  misc_feature (1)..(25): SEQ ID NO: 6178; WAN0249AQ; Start 39; Stop 63
gcaagaaaattgtcgttagtaatcg

SEQ ID NO: 431483 - DNA, 25 bp, Artificial
  probe
  misc_feature (1)..(25): SEQ ID NO: 6178; WAN0249AQ; Start 36; Stop 60
agagcaagaaaattgtcgttagtaa

SEQ ID NO: 431484 - DNA, 25 bp, Artificial
  probe
  misc_feature (1)..(25): SEQ ID NO: 6178; WAN0249AQ; Start 34; Stop 58
ttagagcaagaaaattgtcgttagt

SEQ ID NO: 431485 - DNA, 25 bp, Artificial
  probe
  misc_feature (1)..(25): SEQ ID NO: 6178; WAN0249AQ; Start 40; Stop 64
caagaaaattgtcgttagtaatcgg

SEQ ID NO: 431486 - DNA, 25 bp, Artificial
  probe
  misc_feature (1)..(25): SEQ ID NO: 6178; WAN0249AQ; Start 43; Stop 67
gaaaattgtcgttagtaatcggaaa

SEQ ID NO: 431487 - DNA, 25 bp, Artificial
  probe
  misc_feature (1)..(25): SEQ ID NO: 6178; WAN0249AQ; Start 35; Stop 59
tagagcaagaaaattgtcgttagta

SEQ ID NO: 431488 - DNA, 25 bp, Artificial
  probe
  misc_feature (1)..(25): SEQ ID NO: 6178; WAN0249AQ; Start 38; Stop 62
agcaagaaaattgtcgttagtaatc

SEQ ID NO: 431489 - DNA, 25 bp, Artificial
  probe
  misc_feature (1)..(25): SEQ ID NO: 6178; WAN0249AQ; Start 37; Stop 61
gagcaagaaaattgtcgttagtaat

SEQ ID NO: 431490 - DNA, 25 bp, Artificial
  probe
  misc_feature (1)..(25): SEQ ID NO: 6178; WAN0249AQ; Start 44; Stop 68
aaaattgtcgttagtaatcggaaaa

SEQ ID NO: 431491 - DNA, 25 bp, Artificial
  probe
  misc_feature (1)..(25): SEQ ID NO: 6178; WAN0249AQ; Start 33; Stop 57
attagagcaagaaaattgtcgttag

SEQ ID NO: 431492 - DNA, 25 bp, Artificial
  probe
  misc_feature (1)..(25): SEQ ID NO: 6178; WAN0249AQ; Start 31; Stop 55
aaattagagcaagaaaattgtcgtt

SEQ ID NO: 431493 - DNA, 25 bp, Artificial
  probe
  misc_feature (1)..(25): SEQ ID NO: 6178; WAN0249AQ; Start 30; Stop 54
aaaattagagcaagaaaattgtcgt

SEQ ID NO: 431494 - DNA, 25 bp, Artificial
  probe
  misc_feature (1)..(25): SEQ ID NO: 6178; WAN0249AQ; Start 139; Stop 163
tgcctcaaatagttgtacattgtaa

SEQ ID NO: 431495 - DNA, 25 bp, Artificial
  probe
  misc_feature (1)..(25): SEQ ID NO: 6178; WAN0249AQ; Start 138; Stop 162
atgcctcaaatagttgtacattgta

SEQ ID NO: 431496 - DNA, 25 bp, Artificial
  probe
  misc_feature (1)..(25): SEQ ID NO: 6178; WAN0249AQ; Start 32; Stop 56
aattagagcaagaaaattgtcgtta

SEQ ID NO: 431497 - DNA, 25 bp, Artificial
  probe
  misc_feature (1)..(25): SEQ ID NO: 6178; WAN0249AQ; Start 140; Stop 164
gcctcaaatagttgtacattgtaaa

SEQ ID NO: 431498 - DNA, 25 bp, Artificial
  probe
  misc_feature (1)..(25): SEQ ID NO: 6178; WAN0249AQ; Start 130; Stop 154
attgattaatgcctcaaatagttgt

SEQ ID NO: 431499 - DNA, 25 bp, Artificial
  probe
  misc_feature (1)..(25): SEQ ID NO: 6178; WAN0249AQ; Start 137; Stop 161
aatgcctcaaatagttgtacattgt

SEQ ID NO: 431500 - DNA, 25 bp, Artificial
  probe
  misc_feature (1)..(25): SEQ ID NO: 6178; WAN0249AQ; Start 133; Stop 157
gattaatgcctcaaatagttgtaca

SEQ ID NO: 431501 - DNA, 25 bp, Artificial
  probe
  misc_feature (1)..(25): SEQ ID NO: 6178; WAN0249AQ; Start 77; Stop 101
aatataagtggcttttaagtgcaaa

SEQ ID NO: 431502 - DNA, 25 bp, Artificial
  probe
  misc_feature (1)..(25): SEQ ID NO: 6178; WAN0249AQ; Start 131; Stop 155
ttgattaatgcctcaaatagttgta

SEQ ID NO: 431503 - DNA, 25 bp, Artificial
  probe
  misc_feature (1)..(25): SEQ ID NO: 6178; WAN0249AQ; Start 134; Stop 158
attaatgcctcaaatagttgtacat

SEQ ID NO: 431504 - DNA, 25 bp, Artificial
  probe
  misc_feature (1)..(25): SEQ ID NO: 6178; WAN0249AQ; Start 121; Stop 145
tcagaaaatattgattaatgcctca

SEQ ID NO: 431505 - DNA, 25 bp, Artificial
  probe
  misc_feature (1)..(25): SEQ ID NO: 6178; WAN0249AQ; Start 136; Stop 160
taatgcctcaaatagttgtacattg

SEQ ID NO: 431506 - DNA, 25 bp, Artificial
  probe
  misc_feature (1)..(25): SEQ ID NO: 6178; WAN0249AQ; Start 78; Stop 102
atataagtggcttttaagtgcaaaa

SEQ ID NO: 431507 - DNA, 25 bp, Artificial
  probe
  misc_feature (1)..(25): SEQ ID NO: 6178; WAN0249AQ; Start 74; Stop 98
aataatataagtggcttttaagtgc

SEQ ID NO: 431508 - DNA, 25 bp, Artificial
  probe
  misc_feature (1)..(25): SEQ ID NO: 6178; WAN0249AQ; Start 76; Stop 100
taatataagtggcttttaagtgcaa

SEQ ID NO: 431509 - DNA, 25 bp, Artificial
  probe
  misc_feature (1)..(25): SEQ ID NO: 6178; WAN0249AQ; Start 141; Stop 165
cctcaaatagttgtacattgtaaac

SEQ ID NO: 431510 - DNA, 25 bp, Artificial
  probe
  misc_feature (1)..(25): SEQ ID NO: 6178; WAN0249AQ; Start 75; Stop 99
ataatataagtggcttttaagtgca

SEQ ID NO: 431511 - DNA, 25 bp, Artificial
  probe
  misc_feature (1)..(25): SEQ ID NO: 6178; WAN0249AQ; Start 118; Stop 142
tgttcagaaaatattgattaatgcc

SEQ ID NO: 431512 - DNA, 25 bp, Artificial
  probe
  misc_feature (1)..(25): SEQ ID NO: 6179; WAN024992; Start 176; Stop 200
ggctgatgtattggttaaactctca

SEQ ID NO: 431513 - DNA, 25 bp, Artificial
  probe
  misc_feature (1)..(25): SEQ ID NO: 6179; WAN024992; Start 175; Stop 199
cggctgatgtattggttaaactctc

SEQ ID NO: 431514 - DNA, 25 bp, Artificial
  probe
  misc_feature (1)..(25): SEQ ID NO: 6179; WAN024992; Start 171; Stop 195
ttgacggctgatgtattggttaaac

SEQ ID NO: 431515 - DNA, 25 bp, Artificial
  probe
  misc_feature (1)..(25): SEQ ID NO: 6179; WAN024992; Start 170; Stop 194
gttgacggctgatgtattggttaaa

SEQ ID NO: 431516 - DNA, 25 bp, Artificial
  probe
  misc_feature (1)..(25): SEQ ID NO: 6179; WAN024992; Start 173; Stop 197
gacggctgatgtattggttaaactc

SEQ ID NO: 431517 - DNA, 25 bp, Artificial
  probe
  misc_feature (1)..(25): SEQ ID NO: 6179; WAN024992; Start 174; Stop 198
acggctgatgtattggttaaactct

SEQ ID NO: 431518 - DNA, 25 bp, Artificial
  probe
  misc_feature (1)..(25): SEQ ID NO: 6179; WAN024992; Start 115; Stop 139
caatactttcgtttacaaattcagc

SEQ ID NO: 431519 - DNA, 25 bp, Artificial
  probe
  misc_feature (1)..(25): SEQ ID NO: 6179; WAN024992; Start 65; Stop 89
tttgagagatttgagggaggatcat

SEQ ID NO: 431520 - DNA, 25 bp, Artificial
  probe
  misc_feature (1)..(25): SEQ ID NO: 6179; WAN024992; Start 212; Stop 236
cgtcagtacagactatttattggga

SEQ ID NO: 431521 - DNA, 25 bp, Artificial
  probe
  misc_feature (1)..(25): SEQ ID NO: 6179; WAN024992; Start 122; Stop 146
ttcgtttacaaattcagcttatgcc

SEQ ID NO: 431522 - DNA, 25 bp, Artificial
  probe
  misc_feature (1)..(25): SEQ ID NO: 6179; WAN024992; Start 121; Stop 145
tttcgtttacaaattcagcttatgc

SEQ ID NO: 431523 - DNA, 25 bp, Artificial
  probe
  misc_feature (1)..(25): SEQ ID NO: 6179; WAN024992; Start 172; Stop 196
tgacggctgatgtattggttaaact

SEQ ID NO: 431524 - DNA, 25 bp, Artificial
  probe
  misc_feature (1)..(25): SEQ ID NO: 6179; WAN024992; Start 125; Stop 149
gtttacaaattcagcttatgccaaa

SEQ ID NO: 431525 - DNA, 25 bp, Artificial
  probe
  misc_feature (1)..(25): SEQ ID NO: 6179; WAN024992; Start 124; Stop 148
cgtttacaaattcagcttatgccaa

SEQ ID NO: 431526 - DNA, 25 bp, Artificial
  probe
  misc_feature (1)..(25): SEQ ID NO: 6179; WAN024992; Start 179; Stop 203
tgatgtattggttaaactctcagat

SEQ ID NO: 431527 - DNA, 25 bp, Artificial
  probe
  misc_feature (1)..(25): SEQ ID NO: 6179; WAN024992; Start 169; Stop 193
cgttgacggctgatgtattggttaa

SEQ ID NO: 431528 - DNA, 25 bp, Artificial
  probe
  misc_feature (1)..(25): SEQ ID NO: 6179; WAN024992; Start 189; Stop 213
gttaaactctcagatttctatgacg

SEQ ID NO: 431529 - DNA, 25 bp, Artificial
  probe
  misc_feature (1)..(25): SEQ ID NO: 6179; WAN024992; Start 123; Stop 147
tcgtttacaaattcagcttatgcca

SEQ ID NO: 431530 - DNA, 25 bp, Artificial
  probe
  misc_feature (1)..(25): SEQ ID NO: 6179; WAN024992; Start 64; Stop 88
gtttgagagatttgagggaggatca

SEQ ID NO: 431531 - DNA, 25 bp, Artificial
  probe
  misc_feature (1)..(25): SEQ ID NO: 6179; WAN024992; Start 66; Stop 90
ttgagagatttgagggaggatcatg

SEQ ID NO: 431532 - DNA, 25 bp, Artificial
  probe
  misc_feature (1)..(25): SEQ ID NO: 6179; WAN024992; Start 182; Stop 206
tgtattggttaaactctcagatttc

SEQ ID NO: 431533 - DNA, 25 bp, Artificial
  probe
  misc_feature (1)..(25): SEQ ID NO: 6179; WAN024992; Start 187; Stop 211
tggttaaactctcagatttctatga

SEQ ID NO: 431534 - DNA, 25 bp, Artificial
  probe
  misc_feature (1)..(25): SEQ ID NO: 6179; WAN024992; Start 188; Stop 212
ggttaaactctcagatttctatgac

SEQ ID NO: 431535 - DNA, 25 bp, Artificial
  probe
  misc_feature (1)..(25): SEQ ID NO: 6179; WAN024992; Start 180; Stop 204
gatgtattggttaaactctcagatt

SEQ ID NO: 431536 - DNA, 25 bp, Artificial
  probe
  misc_feature (1)..(25): SEQ ID NO: 6179; WAN024992; Start 213; Stop 237
gtcagtacagactatttattgggat

SEQ ID NO: 431537 - DNA, 25 bp, Artificial
  probe
  misc_feature (1)..(25): SEQ ID NO: 6179; WAN024992; Start 186; Stop 210
ttggttaaactctcagatttctatg

SEQ ID NO: 431538 - DNA, 25 bp, Artificial
  probe
  misc_feature (1)..(25): SEQ ID NO: 6179; WAN024992; Start 183; Stop 207
gtattggttaaactctcagatttct

SEQ ID NO: 431539 - DNA, 25 bp, Artificial
  probe
  misc_feature (1)..(25): SEQ ID NO: 6179; WAN024992; Start 119; Stop 143
actttcgtttacaaattcagcttat

SEQ ID NO: 431540 - DNA, 25 bp, Artificial
  probe
  misc_feature (1)..(25): SEQ ID NO: 6179; WAN024992; Start 117; Stop 141
atactttcgtttacaaattcagctt

SEQ ID NO: 431541 - DNA, 25 bp, Artificial
  probe
  misc_feature (1)..(25): SEQ ID NO: 6179; WAN024992; Start 116; Stop 140
aatactttcgtttacaaattcagct

SEQ ID NO: 431542 - DNA, 25 bp, Artificial
  probe
  misc_feature (1)..(25): SEQ ID NO: 6179; WAN024992; Start 211; Stop 235
acgtcagtacagactatttattggg

SEQ ID NO: 431543 - DNA, 25 bp, Artificial
  probe
  misc_feature (1)..(25): SEQ ID NO: 6179; WAN024992; Start 63; Stop 87
cgtttgagagatttgagggaggatc

SEQ ID NO: 431544 - DNA, 25 bp, Artificial
  probe
  misc_feature (1)..(25): SEQ ID NO: 6179; WAN024992; Start 120; Stop 144
ctttcgtttacaaattcagcttatg

SEQ ID NO: 431545 - DNA, 25 bp, Artificial
  probe
  misc_feature (1)..(25): SEQ ID NO: 6180; WAN02499O; Start 20; Stop 44
aaagcactgacatatttcgtttgaa

SEQ ID NO: 431546 - DNA, 25 bp, Artificial
  probe
  misc_feature (1)..(25): SEQ ID NO: 6180; WAN02499O; Start 23; Stop 47
gcactgacatatttcgtttgaatct

SEQ ID NO: 431547 - DNA, 25 bp, Artificial
  probe
  misc_feature (1)..(25): SEQ ID NO: 6180; WAN02499O; Start 22; Stop 46
agcactgacatatttcgtttgaatc

SEQ ID NO: 431548 - DNA, 25 bp, Artificial
  probe
  misc_feature (1)..(25): SEQ ID NO: 6180; WAN02499O; Start 21; Stop 45
aagcactgacatatttcgtttgaat

SEQ ID NO: 431549 - DNA, 25 bp, Artificial
  probe
  misc_feature (1)..(25): SEQ ID NO: 6180; WAN02499O; Start 24; Stop 48
cactgacatatttcgtttgaatctc

SEQ ID NO: 431550 - DNA, 25 bp, Artificial
  probe
  misc_feature (1)..(25): SEQ ID NO: 6180; WAN02499O; Start 25; Stop 49
actgacatatttcgtttgaatctca

SEQ ID NO: 431551 - DNA, 25 bp, Artificial
  probe
  misc_feature (1)..(25): SEQ ID NO: 6180; WAN02499O; Start 26; Stop 50
ctgacatatttcgtttgaatctcat

SEQ ID NO: 431552 - DNA, 25 bp, Artificial
  probe
  misc_feature (1)..(25): SEQ ID NO: 6180; WAN02499O; Start 17; Stop 41
gccaaagcactgacatatttcgttt

SEQ ID NO: 431553 - DNA, 25 bp, Artificial
  probe
  misc_feature (1)..(25): SEQ ID NO: 6180; WAN02499O; Start 19; Stop 43
caaagcactgacatatttcgtttga

SEQ ID NO: 431554 - DNA, 25 bp, Artificial
  probe
  misc_feature (1)..(25): SEQ ID NO: 6180; WAN02499O; Start 18; Stop 42
ccaaagcactgacatatttcgtttg

SEQ ID NO: 431555 - DNA, 25 bp, Artificial
  probe
  misc_feature (1)..(25): SEQ ID NO: 6180; WAN02499O; Start 13; Stop 37
gaatgccaaagcactgacatatttc

SEQ ID NO: 431556 - DNA, 25 bp, Artificial
  probe
  misc_feature (1)..(25): SEQ ID NO: 6180; WAN02499O; Start 12; Stop 36
ggaatgccaaagcactgacatattt

SEQ ID NO: 431557 - DNA, 25 bp, Artificial
  probe
  misc_feature (1)..(25): SEQ ID NO: 6180; WAN02499O; Start 10; Stop 34
taggaatgccaaagcactgacatat

SEQ ID NO: 431558 - DNA, 25 bp, Artificial
  probe
  misc_feature (1)..(25): SEQ ID NO: 6180; WAN02499O; Start 14; Stop 38
aatgccaaagcactgacatatttcg

SEQ ID NO: 431559 - DNA, 25 bp, Artificial
  probe
  misc_feature (1)..(25): SEQ ID NO: 6180; WAN02499O; Start 9; Stop 33
ctaggaatgccaaagcactgacata

SEQ ID NO: 431560 - DNA, 25 bp, Artificial
  probe
  misc_feature (1)..(25): SEQ ID NO: 6180; WAN02499O; Start 11; Stop 35
aggaatgccaaagcactgacatatt

SEQ ID NO: 431561 - DNA, 25 bp, Artificial
  probe
  misc_feature (1)..(25): SEQ ID NO: 6180; WAN02499O; Start 15; Stop 39
atgccaaagcactgacatatttcgt

SEQ ID NO: 431562 - DNA, 25 bp, Artificial
  probe
  misc_feature (1)..(25): SEQ ID NO: 6180; WAN02499O; Start 16; Stop 40
tgccaaagcactgacatatttcgtt

SEQ ID NO: 431563 - DNA, 25 bp, Artificial
  probe
  misc_feature (1)..(25): SEQ ID NO: 6180; WAN02499O; Start 1; Stop 25
tatgaaggctaggaatgccaaagca

SEQ ID NO: 431564 - DNA, 25 bp, Artificial
  probe
  misc_feature (1)..(25): SEQ ID NO: 6181; WAN02499P; Start 97; Stop 121
gaatcacaataacggatatgaggct

SEQ ID NO: 431565 - DNA, 25 bp, Artificial
  probe
  misc_feature (1)..(25): SEQ ID NO: 6181; WAN02499P; Start 98; Stop 122
aatcacaataacggatatgaggctg

SEQ ID NO: 431566 - DNA, 25 bp, Artificial
  probe
  misc_feature (1)..(25): SEQ ID NO: 6181; WAN02499P; Start 96; Stop 120
tgaatcacaataacggatatgaggc

SEQ ID NO: 431567 - DNA, 25 bp, Artificial
  probe
  misc_feature (1)..(25): SEQ ID NO: 6181; WAN02499P; Start 95; Stop 119
atgaatcacaataacggatatgagg

SEQ ID NO: 431568 - DNA, 25 bp, Artificial
  probe
  misc_feature (1)..(25): SEQ ID NO: 6181; WAN02499P; Start 165; Stop 189
cgataggactggtctggtaatcatt

SEQ ID NO: 431569 - DNA, 25 bp, Artificial
  probe
  misc_feature (1)..(25): SEQ ID NO: 6181; WAN02499P; Start 91; Stop 115
tggcatgaatcacaataacggatat

SEQ ID NO: 431570 - DNA, 25 bp, Artificial
  probe
  misc_feature (1)..(25): SEQ ID NO: 6181; WAN02499P; Start 92; Stop 116
ggcatgaatcacaataacggatatg

SEQ ID NO: 431571 - DNA, 25 bp, Artificial
  probe
  misc_feature (1)..(25): SEQ ID NO: 6181; WAN02499P; Start 93; Stop 117
gcatgaatcacaataacggatatga

SEQ ID NO: 431572 - DNA, 25 bp, Artificial
  probe
  misc_feature (1)..(25): SEQ ID NO: 6181; WAN02499P; Start 164; Stop 188
acgataggactggtctggtaatcat

SEQ ID NO: 431573 - DNA, 25 bp, Artificial
  probe
  misc_feature (1)..(25): SEQ ID NO: 6181; WAN02499P; Start 138; Stop 162
cctcattgtgggttattgtttgtaa

SEQ ID NO: 431574 - DNA, 25 bp, Artificial
  probe
  misc_feature (1)..(25): SEQ ID NO: 6181; WAN02499P; Start 163; Stop 187
aacgataggactggtctggtaatca

SEQ ID NO: 431575 - DNA, 25 bp, Artificial
  probe
  misc_feature (1)..(25): SEQ ID NO: 6181; WAN02499P; Start 99; Stop 123
atcacaataacggatatgaggctgg

SEQ ID NO: 431576 - DNA, 25 bp, Artificial
  probe
  misc_feature (1)..(25): SEQ ID NO: 6181; WAN02499P; Start 166; Stop 190
gataggactggtctggtaatcattt

SEQ ID NO: 431577 - DNA, 25 bp, Artificial
  probe
  misc_feature (1)..(25): SEQ ID NO: 6181; WAN02499P; Start 94; Stop 118
catgaatcacaataacggatatgag

SEQ ID NO: 431578 - DNA, 25 bp, Artificial
  probe
  misc_feature (1)..(25): SEQ ID NO: 6181; WAN02499P; Start 90; Stop 114
gtggcatgaatcacaataacggata

SEQ ID NO: 431579 - DNA, 25 bp, Artificial
  probe
  misc_feature (1)..(25): SEQ ID NO: 6181; WAN02499P; Start 137; Stop 161
gcctcattgtgggttattgtttgta

SEQ ID NO: 431580 - DNA, 25 bp, Artificial
  probe
  misc_feature (1)..(25): SEQ ID NO: 6181; WAN02499P; Start 139; Stop 163
ctcattgtgggttattgtttgtaaa

SEQ ID NO: 431581 - DNA, 25 bp, Artificial
  probe
  misc_feature (1)..(25): SEQ ID NO: 6181; WAN02499P; Start 59; Stop 83
tgaggtgatgttaatcaggaatcat

SEQ ID NO: 431582 - DNA, 25 bp, Artificial
  probe
  misc_feature (1)..(25): SEQ ID NO: 6181; WAN02499P; Start 162; Stop 186
aaacgataggactggtctggtaatc

SEQ ID NO: 431583 - DNA, 25 bp, Artificial
  probe
  misc_feature (1)..(25): SEQ ID NO: 6181; WAN02499P; Start 68; Stop 92
gttaatcaggaatcatggtgatgtg

SEQ ID NO: 431584 - DNA, 25 bp, Artificial
  probe
  misc_feature (1)..(25): SEQ ID NO: 6181; WAN02499P; Start 67; Stop 91
tgttaatcaggaatcatggtgatgt

SEQ ID NO: 431585 - DNA, 25 bp, Artificial
  probe
  misc_feature (1)..(25): SEQ ID NO: 6181; WAN02499P; Start 64; Stop 88
tgatgttaatcaggaatcatggtga

SEQ ID NO: 431586 - DNA, 25 bp, Artificial
  probe
  misc_feature (1)..(25): SEQ ID NO: 6181; WAN02499P; Start 63; Stop 87
gtgatgttaatcaggaatcatggtg

SEQ ID NO: 431587 - DNA, 25 bp, Artificial
  probe
  misc_feature (1)..(25): SEQ ID NO: 6181; WAN02499P; Start 60; Stop 84
gaggtgatgttaatcaggaatcatg

SEQ ID NO: 431588 - DNA, 25 bp, Artificial
  probe
  misc_feature (1)..(25): SEQ ID NO: 6181; WAN02499P; Start 61; Stop 85
aggtgatgttaatcaggaatcatgg

SEQ ID NO: 431589 - DNA, 25 bp, Artificial
  probe
  misc_feature (1)..(25): SEQ ID NO: 6181; WAN02499P; Start 69; Stop 93
ttaatcaggaatcatggtgatgtgg

SEQ ID NO: 431590 - DNA, 25 bp, Artificial
  probe
  misc_feature (1)..(25): SEQ ID NO: 6181; WAN02499P; Start 66; Stop 90
atgttaatcaggaatcatggtgatg

SEQ ID NO: 431591 - DNA, 25 bp, Artificial
  probe
  misc_feature (1)..(25): SEQ ID NO: 6181; WAN02499P; Start 62; Stop 86
ggtgatgttaatcaggaatcatggt

SEQ ID NO: 431592 - DNA, 25 bp, Artificial
  probe
  misc_feature (1)..(25): SEQ ID NO: 6181; WAN02499P; Start 65; Stop 89
gatgttaatcaggaatcatggtgat

SEQ ID NO: 431593 - DNA, 25 bp, Artificial
  probe
  misc_feature (1)..(25): SEQ ID NO: 6181; WAN02499P; Start 135; Stop 159
cagcctcattgtgggttattgtttg

SEQ ID NO: 431594 - DNA, 25 bp, Artificial
  probe
  misc_feature (1)..(25): SEQ ID NO: 6181; WAN02499P; Start 136; Stop 160
agcctcattgtgggttattgtttgt

SEQ ID NO: 431595 - DNA, 25 bp, Artificial
  probe
  misc_feature (1)..(25): SEQ ID NO: 6181; WAN02499P; Start 189; Stop 213
tttaggaatggacaggactgggatt

SEQ ID NO: 431596 - DNA, 25 bp, Artificial
  probe
  misc_feature (1)..(25): SEQ ID NO: 6181; WAN02499P; Start 57; Stop 81
tctgaggtgatgttaatcaggaatc

SEQ ID NO: 431597 - DNA, 25 bp, Artificial
  probe
  misc_feature (1)..(25): SEQ ID NO: 6182; WAN02497D; Start 98; Stop 122
actgagttaatccgttcactaacaa

SEQ ID NO: 431598 - DNA, 25 bp, Artificial
  probe
  misc_feature (1)..(25): SEQ ID NO: 6182; WAN02497D; Start 92; Stop 116
tatctcactgagttaatccgttcac

SEQ ID NO: 431599 - DNA, 25 bp, Artificial
  probe
  misc_feature (1)..(25): SEQ ID NO: 6182; WAN02497D; Start 95; Stop 119
ctcactgagttaatccgttcactaa

SEQ ID NO: 431600 - DNA, 25 bp, Artificial
  probe
  misc_feature (1)..(25): SEQ ID NO: 6182; WAN02497D; Start 91; Stop 115
ttatctcactgagttaatccgttca

SEQ ID NO: 431601 - DNA, 25 bp, Artificial
  probe
  misc_feature (1)..(25): SEQ ID NO: 6182; WAN02497D; Start 96; Stop 120
tcactgagttaatccgttcactaac

SEQ ID NO: 431602 - DNA, 25 bp, Artificial
  probe
  misc_feature (1)..(25): SEQ ID NO: 6182; WAN02497D; Start 97; Stop 121
cactgagttaatccgttcactaaca

SEQ ID NO: 431603 - DNA, 25 bp, Artificial
  probe
  misc_feature (1)..(25): SEQ ID NO: 6182; WAN02497D; Start 94; Stop 118
tctcactgagttaatccgttcacta

SEQ ID NO: 431604 - DNA, 25 bp, Artificial
  probe
  misc_feature (1)..(25): SEQ ID NO: 6182; WAN02497D; Start 93; Stop 117
atctcactgagttaatccgttcact

SEQ ID NO: 431605 - DNA, 25 bp, Artificial
  probe
  misc_feature (1)..(25): SEQ ID NO: 6182; WAN02497D; Start 56; Stop 80
cacgaagaaacggattacttatgtt

SEQ ID NO: 431606 - DNA, 25 bp, Artificial
  probe
  misc_feature (1)..(25): SEQ ID NO: 6182; WAN02497D; Start 57; Stop 81
acgaagaaacggattacttatgttc

SEQ ID NO: 431607 - DNA, 25 bp, Artificial
  probe
  misc_feature (1)..(25): SEQ ID NO: 6182; WAN02497D; Start 54; Stop 78
tacacgaagaaacggattacttatg

SEQ ID NO: 431608 - DNA, 25 bp, Artificial
  probe
  misc_feature (1)..(25): SEQ ID NO: 6182; WAN02497D; Start 55; Stop 79
acacgaagaaacggattacttatgt

SEQ ID NO: 431609 - DNA, 25 bp, Artificial
  probe
  misc_feature (1)..(25): SEQ ID NO: 6182; WAN02497D; Start 53; Stop 77
atacacgaagaaacggattacttat

SEQ ID NO: 431610 - DNA, 25 bp, Artificial
  probe
  misc_feature (1)..(25): SEQ ID NO: 6182; WAN02497D; Start 100; Stop 124
tgagttaatccgttcactaacaaac

SEQ ID NO: 431611 - DNA, 25 bp, Artificial
  probe
  misc_feature (1)..(25): SEQ ID NO: 6182; WAN02497D; Start 52; Stop 76
tatacacgaagaaacggattactta

SEQ ID NO: 431612 - DNA, 25 bp, Artificial
  probe
  misc_feature (1)..(25): SEQ ID NO: 6182; WAN02497D; Start 99; Stop 123
ctgagttaatccgttcactaacaaa

SEQ ID NO: 431613 - DNA, 25 bp, Artificial
  probe
  misc_feature (1)..(25): SEQ ID NO: 6182; WAN02497D; Start 90; Stop 114
tttatctcactgagttaatccgttc

SEQ ID NO: 431614 - DNA, 25 bp, Artificial
  probe
  misc_feature (1)..(25): SEQ ID NO: 6182; WAN02497D; Start 89; Stop 113
atttatctcactgagttaatccgtt

SEQ ID NO: 431615 - DNA, 25 bp, Artificial
  probe
  misc_feature (1)..(25): SEQ ID NO: 6182; WAN02497D; Start 88; Stop 112
aatttatctcactgagttaatccgt

SEQ ID NO: 431616 - DNA, 25 bp, Artificial
  probe
  misc_feature (1)..(25): SEQ ID NO: 6182; WAN02497D; Start 51; Stop 75
gtatacacgaagaaacggattactt

SEQ ID NO: 431617 - DNA, 25 bp, Artificial
  probe
  misc_feature (1)..(25): SEQ ID NO: 6182; WAN02497D; Start 58; Stop 82
cgaagaaacggattacttatgttct

SEQ ID NO: 431618 - DNA, 25 bp, Artificial
  probe
  misc_feature (1)..(25): SEQ ID NO: 6182; WAN02497D; Start 62; Stop 86
gaaacggattacttatgttctgata

SEQ ID NO: 431619 - DNA, 25 bp, Artificial
  probe
  misc_feature (1)..(25): SEQ ID NO: 6182; WAN02497D; Start 60; Stop 84
aagaaacggattacttatgttctga

SEQ ID NO: 431620 - DNA, 25 bp, Artificial
  probe
  misc_feature (1)..(25): SEQ ID NO: 6182; WAN02497D; Start 28; Stop 52
tgattcataggtactttcaatctgt

SEQ ID NO: 431621 - DNA, 25 bp, Artificial
  probe
  misc_feature (1)..(25): SEQ ID NO: 6182; WAN02497D; Start 10; Stop 34
aacaagttaatccttctatgattca

SEQ ID NO: 431622 - DNA, 25 bp, Artificial
  probe
  misc_feature (1)..(25): SEQ ID NO: 6182; WAN02497D; Start 59; Stop 83
gaagaaacggattacttatgttctg

SEQ ID NO: 431623 - DNA, 25 bp, Artificial
  probe
  misc_feature (1)..(25): SEQ ID NO: 6182; WAN02497D; Start 61; Stop 85
agaaacggattacttatgttctgat

SEQ ID NO: 431624 - DNA, 25 bp, Artificial
  probe
  misc_feature (1)..(25): SEQ ID NO: 6182; WAN02497D; Start 64; Stop 88
aacggattacttatgttctgataaa

SEQ ID NO: 431625 - DNA, 25 bp, Artificial
  probe
  misc_feature (1)..(25): SEQ ID NO: 6182; WAN02497D; Start 63; Stop 87
aaacggattacttatgttctgataa

SEQ ID NO: 431626 - DNA, 25 bp, Artificial
  probe
  misc_feature (1)..(25): SEQ ID NO: 6182; WAN02497D; Start 11; Stop 35
acaagttaatccttctatgattcat

SEQ ID NO: 431627 - DNA, 25 bp, Artificial
  probe
  misc_feature (1)..(25): SEQ ID NO: 6182; WAN02497D; Start 9; Stop 33
gaacaagttaatccttctatgattc

SEQ ID NO: 431628 - DNA, 25 bp, Artificial
  probe
  misc_feature (1)..(25): SEQ ID NO: 6182; WAN02497D; Start 87; Stop 111
aaatttatctcactgagttaatccg

SEQ ID NO: 431629 - DNA, 25 bp, Artificial
  probe
  misc_feature (1)..(25): SEQ ID NO: 6182; WAN02497D; Start 129; Stop 153
caaaagcgtataaaagtgcgttata

SEQ ID NO: 431630 - DNA, 25 bp, Artificial
  probe
  misc_feature (1)..(25): SEQ ID NO: 6183; WAN024998; Start 35; Stop 59
ataatacttcaaaggaggaaatcag

SEQ ID NO: 431631 - DNA, 25 bp, Artificial
  probe
  misc_feature (1)..(25): SEQ ID NO: 6183; WAN024998; Start 2; Stop 26
attctgccattgtaattacggtaat

SEQ ID NO: 431632 - DNA, 25 bp, Artificial
  probe
  misc_feature (1)..(25): SEQ ID NO: 6183; WAN024998; Start 1; Stop 25
tattctgccattgtaattacggtaa

SEQ ID NO: 431633 - DNA, 25 bp, Artificial
  probe
  misc_feature (1)..(25): SEQ ID NO: 6183; WAN024998; Start 31; Stop 55
tgttataatacttcaaaggaggaaa

SEQ ID NO: 431634 - DNA, 25 bp, Artificial
  probe
  misc_feature (1)..(25): SEQ ID NO: 6183; WAN024998; Start 34; Stop 58
tataatacttcaaaggaggaaatca

SEQ ID NO: 431635 - DNA, 25 bp, Artificial
  probe
  misc_feature (1)..(25): SEQ ID NO: 6183; WAN024998; Start 4; Stop 28
tctgccattgtaattacggtaatga

SEQ ID NO: 431636 - DNA, 25 bp, Artificial
  probe
  misc_feature (1)..(25): SEQ ID NO: 6183; WAN024998; Start 3; Stop 27
ttctgccattgtaattacggtaatg

SEQ ID NO: 431637 - DNA, 25 bp, Artificial
  probe
  misc_feature (1)..(25): SEQ ID NO: 6183; WAN024998; Start 30; Stop 54
ttgttataatacttcaaaggaggaa

SEQ ID NO: 431638 - DNA, 25 bp, Artificial
  probe
  misc_feature (1)..(25): SEQ ID NO: 6183; WAN024998; Start 5; Stop 29
ctgccattgtaattacggtaatgat

SEQ ID NO: 431639 - DNA, 25 bp, Artificial
  probe
  misc_feature (1)..(25): SEQ ID NO: 6183; WAN024998; Start 6; Stop 30
tgccattgtaattacggtaatgatt

SEQ ID NO: 431640 - DNA, 25 bp, Artificial
  probe
  misc_feature (1)..(25): SEQ ID NO: 6183; WAN024998; Start 29; Stop 53
tttgttataatacttcaaaggagga

SEQ ID NO: 431641 - DNA, 25 bp, Artificial
  probe
  misc_feature (1)..(25): SEQ ID NO: 6183; WAN024998; Start 7; Stop 31
gccattgtaattacggtaatgattt

SEQ ID NO: 431642 - DNA, 25 bp, Artificial
  probe
  misc_feature (1)..(25): SEQ ID NO: 6183; WAN024998; Start 28; Stop 52
atttgttataatacttcaaaggagg

SEQ ID NO: 431643 - DNA, 25 bp, Artificial
  probe
  misc_feature (1)..(25): SEQ ID NO: 6183; WAN024998; Start 8; Stop 32
ccattgtaattacggtaatgatttg

SEQ ID NO: 431644 - DNA, 25 bp, Artificial
  probe
  misc_feature (1)..(25): SEQ ID NO: 6183; WAN024998; Start 10; Stop 34
attgtaattacggtaatgatttgtt

SEQ ID NO: 431645 - DNA, 25 bp, Artificial
  probe
  misc_feature (1)..(25): SEQ ID NO: 6183; WAN024998; Start 9; Stop 33
cattgtaattacggtaatgatttgt

SEQ ID NO: 431646 - DNA, 25 bp, Artificial
  probe
  misc_feature (1)..(25): SEQ ID NO: 6183; WAN024998; Start 11; Stop 35
ttgtaattacggtaatgatttgtta

SEQ ID NO: 431647 - DNA, 25 bp, Artificial
  probe
  misc_feature (1)..(25): SEQ ID NO: 6184; WAN0249AA; Start 67; Stop 91
tccacacttacttgttgagatgtta

SEQ ID NO: 431648 - DNA, 25 bp, Artificial
  probe
  misc_feature (1)..(25): SEQ ID NO: 6184; WAN0249AA; Start 46; Stop 70
aatgctgtaattagtctgaagtcca

SEQ ID NO: 431649 - DNA, 25 bp, Artificial
  probe
  misc_feature (1)..(25): SEQ ID NO: 6184; WAN0249AA; Start 47; Stop 71
atgctgtaattagtctgaagtccac

SEQ ID NO: 431650 - DNA, 25 bp, Artificial
  probe
  misc_feature (1)..(25): SEQ ID NO: 6184; WAN0249AA; Start 68; Stop 92
ccacacttacttgttgagatgttat

SEQ ID NO: 431651 - DNA, 25 bp, Artificial
  probe
  misc_feature (1)..(25): SEQ ID NO: 6184; WAN0249AA; Start 66; Stop 90
gtccacacttacttgttgagatgtt

SEQ ID NO: 431652 - DNA, 25 bp, Artificial
  probe
  misc_feature (1)..(25): SEQ ID NO: 6184; WAN0249AA; Start 65; Stop 89
agtccacacttacttgttgagatgt

SEQ ID NO: 431653 - DNA, 25 bp, Artificial
  probe
  misc_feature (1)..(25): SEQ ID NO: 6184; WAN0249AA; Start 50; Stop 74
ctgtaattagtctgaagtccacact

SEQ ID NO: 431654 - DNA, 25 bp, Artificial
  probe
  misc_feature (1)..(25): SEQ ID NO: 6184; WAN0249AA; Start 69; Stop 93
cacacttacttgttgagatgttatc

SEQ ID NO: 431655 - DNA, 25 bp, Artificial
  probe
  misc_feature (1)..(25): SEQ ID NO: 6184; WAN0249AA; Start 49; Stop 73
gctgtaattagtctgaagtccacac

SEQ ID NO: 431656 - DNA, 25 bp, Artificial
  probe
  misc_feature (1)..(25): SEQ ID NO: 6184; WAN0249AA; Start 48; Stop 72
tgctgtaattagtctgaagtccaca

SEQ ID NO: 431657 - DNA, 25 bp, Artificial
  probe
  misc_feature (1)..(25): SEQ ID NO: 6184; WAN0249AA; Start 56; Stop 80
ttagtctgaagtccacacttacttg

SEQ ID NO: 431658 - DNA, 25 bp, Artificial
  probe
  misc_feature (1)..(25): SEQ ID NO: 6184; WAN0249AA; Start 45; Stop 69
aaatgctgtaattagtctgaagtcc

SEQ ID NO: 431659 - DNA, 25 bp, Artificial
  probe
  misc_feature (1)..(25): SEQ ID NO: 6184; WAN0249AA; Start 63; Stop 87
gaagtccacacttacttgttgagat

SEQ ID NO: 431660 - DNA, 25 bp, Artificial
  probe
  misc_feature (1)..(25): SEQ ID NO: 6184; WAN0249AA; Start 55; Stop 79
attagtctgaagtccacacttactt

SEQ ID NO: 431661 - DNA, 25 bp, Artificial
  probe
  misc_feature (1)..(25): SEQ ID NO: 6184; WAN0249AA; Start 54; Stop 78
aattagtctgaagtccacacttact

SEQ ID NO: 431662 - DNA, 25 bp, Artificial
  probe
  misc_feature (1)..(25): SEQ ID NO: 6184; WAN0249AA; Start 70; Stop 94
acacttacttgttgagatgttatct

SEQ ID NO: 431663 - DNA, 25 bp, Artificial
  probe
  misc_feature (1)..(25): SEQ ID NO: 6184; WAN0249AA; Start 64; Stop 88
aagtccacacttacttgttgagatg

SEQ ID NO: 431664 - DNA, 25 bp, Artificial
  probe
  misc_feature (1)..(25): SEQ ID NO: 6184; WAN0249AA; Start 57; Stop 81
tagtctgaagtccacacttacttgt

SEQ ID NO: 431665 - DNA, 25 bp, Artificial
  probe
  misc_feature (1)..(25): SEQ ID NO: 6184; WAN0249AA; Start 51; Stop 75
tgtaattagtctgaagtccacactt

SEQ ID NO: 431666 - DNA, 25 bp, Artificial
  probe
  misc_feature (1)..(25): SEQ ID NO: 6184; WAN0249AA; Start 61; Stop 85
ctgaagtccacacttacttgttgag

SEQ ID NO: 431667 - DNA, 25 bp, Artificial
  probe
  misc_feature (1)..(25): SEQ ID NO: 6184; WAN0249AA; Start 59; Stop 83
gtctgaagtccacacttacttgttg

SEQ ID NO: 431668 - DNA, 25 bp, Artificial
  probe
  misc_feature (1)..(25): SEQ ID NO: 6184; WAN0249AA; Start 62; Stop 86
tgaagtccacacttacttgttgaga

SEQ ID NO: 431669 - DNA, 25 bp, Artificial
  probe
  misc_feature (1)..(25): SEQ ID NO: 6184; WAN0249AA; Start 60; Stop 84
tctgaagtccacacttacttgttga

SEQ ID NO: 431670 - DNA, 25 bp, Artificial
  probe
  misc_feature (1)..(25): SEQ ID NO: 6184; WAN0249AA; Start 58; Stop 82
agtctgaagtccacacttacttgtt

SEQ ID NO: 431671 - DNA, 25 bp, Artificial
  probe
  misc_feature (1)..(25): SEQ ID NO: 6184; WAN0249AA; Start 53; Stop 77
taattagtctgaagtccacacttac

SEQ ID NO: 431672 - DNA, 25 bp, Artificial
  probe
  misc_feature (1)..(25): SEQ ID NO: 6184; WAN0249AA; Start 52; Stop 76
gtaattagtctgaagtccacactta

SEQ ID NO: 431673 - DNA, 25 bp, Artificial
  probe
  misc_feature (1)..(25): SEQ ID NO: 6184; WAN0249AA; Start 19; Stop 43
aagcataagcggtaatctaatttaa

SEQ ID NO: 431674 - DNA, 25 bp, Artificial
  probe
  misc_feature (1)..(25): SEQ ID NO: 6184; WAN0249AA; Start 18; Stop 42
aaagcataagcggtaatctaattta

SEQ ID NO: 431675 - DNA, 25 bp, Artificial
  probe
  misc_feature (1)..(25): SEQ ID NO: 6184; WAN0249AA; Start 5; Stop 29
ttatagcccattaaaagcataagcg

SEQ ID NO: 431676 - DNA, 25 bp, Artificial
  probe
  misc_feature (1)..(25): SEQ ID NO: 6184; WAN0249AA; Start 12; Stop 36
ccattaaaagcataagcggtaatct

SEQ ID NO: 431677 - DNA, 25 bp, Artificial
  probe
  misc_feature (1)..(25): SEQ ID NO: 6184; WAN0249AA; Start 11; Stop 35
cccattaaaagcataagcggtaatc

SEQ ID NO: 431678 - DNA, 25 bp, Artificial
  probe
  misc_feature (1)..(25): SEQ ID NO: 6184; WAN0249AA; Start 6; Stop 30
tatagcccattaaaagcataagcgg

SEQ ID NO: 431679 - DNA, 25 bp, Artificial
  probe
  misc_feature (1)..(25): SEQ ID NO: 6184; WAN0249AA; Start 20; Stop 44
agcataagcggtaatctaatttaaa

SEQ ID NO: 431680 - DNA, 25 bp, Artificial
  probe
  misc_feature (1)..(25): SEQ ID NO: 6185; WAN0249A4; Start 51; Stop 75
ataatatgcaaaagctaggaggtgg

SEQ ID NO: 431681 - DNA, 25 bp, Artificial
  probe
  misc_feature (1)..(25): SEQ ID NO: 6185; WAN0249A4; Start 50; Stop 74
tataatatgcaaaagctaggaggtg

SEQ ID NO: 431682 - DNA, 25 bp, Artificial
  probe
  misc_feature (1)..(25): SEQ ID NO: 6185; WAN0249A4; Start 52; Stop 76
taatatgcaaaagctaggaggtggt

SEQ ID NO: 431683 - DNA, 25 bp, Artificial
  probe
  misc_feature (1)..(25): SEQ ID NO: 6185; WAN0249A4; Start 49; Stop 73
atataatatgcaaaagctaggaggt

SEQ ID NO: 431684 - DNA, 25 bp, Artificial
  probe
  misc_feature (1)..(25): SEQ ID NO: 6185; WAN0249A4; Start 53; Stop 77
aatatgcaaaagctaggaggtggtc

SEQ ID NO: 431685 - DNA, 25 bp, Artificial
  probe
  misc_feature (1)..(25): SEQ ID NO: 6185; WAN0249A4; Start 48; Stop 72
gatataatatgcaaaagctaggagg

SEQ ID NO: 431686 - DNA, 25 bp, Artificial
  probe
  misc_feature (1)..(25): SEQ ID NO: 6185; WAN0249A4; Start 47; Stop 71
tgatataatatgcaaaagctaggag

SEQ ID NO: 431687 - DNA, 25 bp, Artificial
  probe
  misc_feature (1)..(25): SEQ ID NO: 6185; WAN0249A4; Start 54; Stop 78
atatgcaaaagctaggaggtggtca

SEQ ID NO: 431688 - DNA, 25 bp, Artificial
  probe
  misc_feature (1)..(25): SEQ ID NO: 6185; WAN0249A4; Start 46; Stop 70
atgatataatatgcaaaagctagga

SEQ ID NO: 431689 - DNA, 25 bp, Artificial
  probe
  misc_feature (1)..(25): SEQ ID NO: 6185; WAN0249A4; Start 55; Stop 79
tatgcaaaagctaggaggtggtcag

SEQ ID NO: 431690 - DNA, 25 bp, Artificial
  probe
  misc_feature (1)..(25): SEQ ID NO: 6185; WAN0249A4; Start 45; Stop 69
aatgatataatatgcaaaagctagg

SEQ ID NO: 431691 - DNA, 25 bp, Artificial
  probe
  misc_feature (1)..(25): SEQ ID NO: 6185; WAN0249A4; Start 16; Stop 40
tcagaatattttgacaaatgattgt

SEQ ID NO: 431692 - DNA, 25 bp, Artificial
  probe
  misc_feature (1)..(25): SEQ ID NO: 6186; WAN02496T; Start 145; Stop 169
acggatgtaaaccaaatcaactcta

SEQ ID NO: 431693 - DNA, 25 bp, Artificial
  probe
  misc_feature (1)..(25): SEQ ID NO: 6186; WAN02496T; Start 144; Stop 168
tacggatgtaaaccaaatcaactct

SEQ ID NO: 431694 - DNA, 25 bp, Artificial
  probe
  misc_feature (1)..(25): SEQ ID NO: 6186; WAN02496T; Start 146; Stop 170
cggatgtaaaccaaatcaactctaa

SEQ ID NO: 431695 - DNA, 25 bp, Artificial
  probe
  misc_feature (1)..(25): SEQ ID NO: 6186; WAN02496T; Start 143; Stop 167
gtacggatgtaaaccaaatcaactc

SEQ ID NO: 431696 - DNA, 25 bp, Artificial
  probe
  misc_feature (1)..(25): SEQ ID NO: 6186; WAN02496T; Start 141; Stop 165
aagtacggatgtaaaccaaatcaac

SEQ ID NO: 431697 - DNA, 25 bp, Artificial
  probe
  misc_feature (1)..(25): SEQ ID NO: 6186; WAN02496T; Start 147; Stop 171
ggatgtaaaccaaatcaactctaac

SEQ ID NO: 431698 - DNA, 25 bp, Artificial
  probe
  misc_feature (1)..(25): SEQ ID NO: 6186; WAN02496T; Start 142; Stop 166
agtacggatgtaaaccaaatcaact

SEQ ID NO: 431699 - DNA, 25 bp, Artificial
  probe
  misc_feature (1)..(25): SEQ ID NO: 6186; WAN02496T; Start 140; Stop 164
taagtacggatgtaaaccaaatcaa

SEQ ID NO: 431700 - DNA, 25 bp, Artificial
  probe
  misc_feature (1)..(25): SEQ ID NO: 6186; WAN02496T; Start 139; Stop 163
ttaagtacggatgtaaaccaaatca

SEQ ID NO: 431701 - DNA, 25 bp, Artificial
  probe
  misc_feature (1)..(25): SEQ ID NO: 6186; WAN02496T; Start 134; Stop 158
tcaatttaagtacggatgtaaacca

SEQ ID NO: 431702 - DNA, 25 bp, Artificial
  probe
  misc_feature (1)..(25): SEQ ID NO: 6186; WAN02496T; Start 135; Stop 159
caatttaagtacggatgtaaaccaa

SEQ ID NO: 431703 - DNA, 25 bp, Artificial
  probe
  misc_feature (1)..(25): SEQ ID NO: 6186; WAN02496T; Start 1; Stop 25
tcaaacacctccattaaagagctac

SEQ ID NO: 431704 - DNA, 25 bp, Artificial
  probe
  misc_feature (1)..(25): SEQ ID NO: 6186; WAN02496T; Start 24; Stop 48
acctctattataccatgtaaaggct

SEQ ID NO: 431705 - DNA, 25 bp, Artificial
  probe
  misc_feature (1)..(25): SEQ ID NO: 6186; WAN02496T; Start 19; Stop 43
gagctacctctattataccatgtaa

SEQ ID NO: 431706 - DNA, 25 bp, Artificial
  probe
  misc_feature (1)..(25): SEQ ID NO: 6186; WAN02496T; Start 138; Stop 162
tttaagtacggatgtaaaccaaatc

SEQ ID NO: 431707 - DNA, 25 bp, Artificial
  probe
  misc_feature (1)..(25): SEQ ID NO: 6186; WAN02496T; Start 148; Stop 172
gatgtaaaccaaatcaactctaaca

SEQ ID NO: 431708 - DNA, 25 bp, Artificial
  probe
  misc_feature (1)..(25): SEQ ID NO: 6186; WAN02496T; Start 133; Stop 157
atcaatttaagtacggatgtaaacc

SEQ ID NO: 431709 - DNA, 25 bp, Artificial
  probe
  misc_feature (1)..(25): SEQ ID NO: 6186; WAN02496T; Start 3; Stop 27
aaacacctccattaaagagctacct

SEQ ID NO: 431710 - DNA, 25 bp, Artificial
  probe
  misc_feature (1)..(25): SEQ ID NO: 6186; WAN02496T; Start 2; Stop 26
caaacacctccattaaagagctacc

SEQ ID NO: 431711 - DNA, 25 bp, Artificial
  probe
  misc_feature (1)..(25): SEQ ID NO: 6186; WAN02496T; Start 150; Stop 174
tgtaaaccaaatcaactctaacaaa

SEQ ID NO: 431712 - DNA, 25 bp, Artificial
  probe
  misc_feature (1)..(25): SEQ ID NO: 6186; WAN02496T; Start 128; Stop 152
aacaaatcaatttaagtacggatgt

SEQ ID NO: 431713 - DNA, 25 bp, Artificial
  probe
  misc_feature (1)..(25): SEQ ID NO: 6186; WAN02496T; Start 136; Stop 160
aatttaagtacggatgtaaaccaaa

SEQ ID NO: 431714 - DNA, 25 bp, Artificial
  probe
  misc_feature (1)..(25): SEQ ID NO: 6186; WAN02496T; Start 25; Stop 49
cctctattataccatgtaaaggctt

SEQ ID NO: 431715 - DNA, 25 bp, Artificial
  probe
  misc_feature (1)..(25): SEQ ID NO: 6186; WAN02496T; Start 149; Stop 173
atgtaaaccaaatcaactctaacaa

SEQ ID NO: 431716 - DNA, 25 bp, Artificial
  probe
  misc_feature (1)..(25): SEQ ID NO: 6186; WAN02496T; Start 198; Stop 222
acgaacaaatttagtttcttagcaa

SEQ ID NO: 431717 - DNA, 25 bp, Artificial
  probe
  misc_feature (1)..(25): SEQ ID NO: 6186; WAN02496T; Start 197; Stop 221
aacgaacaaatttagtttcttagca

SEQ ID NO: 431718 - DNA, 25 bp, Artificial
  probe
  misc_feature (1)..(25): SEQ ID NO: 6186; WAN02496T; Start 123; Stop 147
gctctaacaaatcaatttaagtacg

SEQ ID NO: 431719 - DNA, 25 bp, Artificial
  probe
  misc_feature (1)..(25): SEQ ID NO: 6186; WAN02496T; Start 4; Stop 28
aacacctccattaaagagctacctc

SEQ ID NO: 431720 - DNA, 25 bp, Artificial
  probe
  misc_feature (1)..(25): SEQ ID NO: 6186; WAN02496T; Start 78; Stop 102
actgcttatttatccttgaaattga

SEQ ID NO: 431721 - DNA, 25 bp, Artificial
  probe
  misc_feature (1)..(25): SEQ ID NO: 6186; WAN02496T; Start 17; Stop 41
aagagctacctctattataccatgt

SEQ ID NO: 431722 - DNA, 25 bp, Artificial
  probe
  misc_feature (1)..(25): SEQ ID NO: 6186; WAN02496T; Start 199; Stop 223
cgaacaaatttagtttcttagcaag

SEQ ID NO: 431723 - DNA, 25 bp, Artificial
  probe
  misc_feature (1)..(25): SEQ ID NO: 6186; WAN02496T; Start 23; Stop 47
tacctctattataccatgtaaaggc

SEQ ID NO: 431724 - DNA, 25 bp, Artificial
  probe
  misc_feature (1)..(25): SEQ ID NO: 6186; WAN02496T; Start 137; Stop 161
atttaagtacggatgtaaaccaaat

SEQ ID NO: 431725 - DNA, 25 bp, Artificial
  probe
  misc_feature (1)..(25): SEQ ID NO: 6187; WAN02495U; Start 169; Stop 193
ttgagagcaccaccagttataatag

SEQ ID NO: 431726 - DNA, 25 bp, Artificial
  probe
  misc_feature (1)..(25): SEQ ID NO: 6187; WAN02495U; Start 167; Stop 191
aattgagagcaccaccagttataat

SEQ ID NO: 431727 - DNA, 25 bp, Artificial
  probe
  misc_feature (1)..(25): SEQ ID NO: 6187; WAN02495U; Start 168; Stop 192
attgagagcaccaccagttataata

SEQ ID NO: 431728 - DNA, 25 bp, Artificial
  probe
  misc_feature (1)..(25): SEQ ID NO: 6187; WAN02495U; Start 171; Stop 195
gagagcaccaccagttataatagta

SEQ ID NO: 431729 - DNA, 25 bp, Artificial
  probe
  misc_feature (1)..(25): SEQ ID NO: 6187; WAN02495U; Start 166; Stop 190
gaattgagagcaccaccagttataa

SEQ ID NO: 431730 - DNA, 25 bp, Artificial
  probe
  misc_feature (1)..(25): SEQ ID NO: 6187; WAN02495U; Start 170; Stop 194
tgagagcaccaccagttataatagt

SEQ ID NO: 431731 - DNA, 25 bp, Artificial
  probe
  misc_feature (1)..(25): SEQ ID NO: 6187; WAN02495U; Start 172; Stop 196
agagcaccaccagttataatagtat

SEQ ID NO: 431732 - DNA, 25 bp, Artificial
  probe
  misc_feature (1)..(25): SEQ ID NO: 6187; WAN02495U; Start 165; Stop 189
ggaattgagagcaccaccagttata

SEQ ID NO: 431733 - DNA, 25 bp, Artificial
  probe
  misc_feature (1)..(25): SEQ ID NO: 6187; WAN02495U; Start 8; Stop 32
ttgacactttatctggatttcggta

SEQ ID NO: 431734 - DNA, 25 bp, Artificial
  probe
  misc_feature (1)..(25): SEQ ID NO: 6187; WAN02495U; Start 9; Stop 33
tgacactttatctggatttcggtat

SEQ ID NO: 431735 - DNA, 25 bp, Artificial
  probe
  misc_feature (1)..(25): SEQ ID NO: 6187; WAN02495U; Start 7; Stop 31
attgacactttatctggatttcggt

SEQ ID NO: 431736 - DNA, 25 bp, Artificial
  probe
  misc_feature (1)..(25): SEQ ID NO: 6187; WAN02495U; Start 155; Stop 179
gtagataaatggaattgagagcacc

SEQ ID NO: 431737 - DNA, 25 bp, Artificial
  probe
  misc_feature (1)..(25): SEQ ID NO: 6187; WAN02495U; Start 154; Stop 178
ggtagataaatggaattgagagcac

SEQ ID NO: 431738 - DNA, 25 bp, Artificial
  probe
  misc_feature (1)..(25): SEQ ID NO: 6187; WAN02495U; Start 153; Stop 177
aggtagataaatggaattgagagca

SEQ ID NO: 431739 - DNA, 25 bp, Artificial
  probe
  misc_feature (1)..(25): SEQ ID NO: 6187; WAN02495U; Start 6; Stop 30
tattgacactttatctggatttcgg

SEQ ID NO: 431740 - DNA, 25 bp, Artificial
  probe
  misc_feature (1)..(25): SEQ ID NO: 6187; WAN02495U; Start 152; Stop 176
gaggtagataaatggaattgagagc

SEQ ID NO: 431741 - DNA, 25 bp, Artificial
  probe
  misc_feature (1)..(25): SEQ ID NO: 6187; WAN02495U; Start 173; Stop 197
gagcaccaccagttataatagtata

SEQ ID NO: 431742 - DNA, 25 bp, Artificial
  probe
  misc_feature (1)..(25): SEQ ID NO: 6187; WAN02495U; Start 71; Stop 95
tccttatgtgttaatcaaagacgaa

SEQ ID NO: 431743 - DNA, 25 bp, Artificial
  probe
  misc_feature (1)..(25): SEQ ID NO: 6187; WAN02495U; Start 67; Stop 91
ttcgtccttatgtgttaatcaaaga

SEQ ID NO: 431744 - DNA, 25 bp, Artificial
  probe
  misc_feature (1)..(25): SEQ ID NO: 6187; WAN02495U; Start 10; Stop 34
gacactttatctggatttcggtata

SEQ ID NO: 431745 - DNA, 25 bp, Artificial
  probe
  misc_feature (1)..(25): SEQ ID NO: 6187; WAN02495U; Start 5; Stop 29
gtattgacactttatctggatttcg

SEQ ID NO: 431746 - DNA, 25 bp, Artificial
  probe
  misc_feature (1)..(25): SEQ ID NO: 6187; WAN02495U; Start 18; Stop 42
atctggatttcggtataatatgctt

SEQ ID NO: 431747 - DNA, 25 bp, Artificial
  probe
  misc_feature (1)..(25): SEQ ID NO: 6187; WAN02495U; Start 70; Stop 94
gtccttatgtgttaatcaaagacga

SEQ ID NO: 431748 - DNA, 25 bp, Artificial
  probe
  misc_feature (1)..(25): SEQ ID NO: 6187; WAN02495U; Start 68; Stop 92
tcgtccttatgtgttaatcaaagac

SEQ ID NO: 431749 - DNA, 25 bp, Artificial
  probe
  misc_feature (1)..(25): SEQ ID NO: 6187; WAN02495U; Start 66; Stop 90
tttcgtccttatgtgttaatcaaag

SEQ ID NO: 431750 - DNA, 25 bp, Artificial
  probe
  misc_feature (1)..(25): SEQ ID NO: 6187; WAN02495U; Start 11; Stop 35
acactttatctggatttcggtataa

SEQ ID NO: 431751 - DNA, 25 bp, Artificial
  probe
  misc_feature (1)..(25): SEQ ID NO: 6187; WAN02495U; Start 72; Stop 96
ccttatgtgttaatcaaagacgaat

SEQ ID NO: 431752 - DNA, 25 bp, Artificial
  probe
  misc_feature (1)..(25): SEQ ID NO: 6187; WAN02495U; Start 151; Stop 175
agaggtagataaatggaattgagag

SEQ ID NO: 431753 - DNA, 25 bp, Artificial
  probe
  misc_feature (1)..(25): SEQ ID NO: 6187; WAN02495U; Start 150; Stop 174
gagaggtagataaatggaattgaga

SEQ ID NO: 431754 - DNA, 25 bp, Artificial
  probe
  misc_feature (1)..(25): SEQ ID NO: 6187; WAN02495U; Start 149; Stop 173
agagaggtagataaatggaattgag

SEQ ID NO: 431755 - DNA, 25 bp, Artificial
  probe
  misc_feature (1)..(25): SEQ ID NO: 6187; WAN02495U; Start 156; Stop 180
tagataaatggaattgagagcacca

SEQ ID NO: 431756 - DNA, 25 bp, Artificial
  probe
  misc_feature (1)..(25): SEQ ID NO: 6187; WAN02495U; Start 21; Stop 45
tggatttcggtataatatgcttaga

SEQ ID NO: 431757 - DNA, 25 bp, Artificial
  probe
  misc_feature (1)..(25): SEQ ID NO: 6187; WAN02495U; Start 19; Stop 43
tctggatttcggtataatatgctta

SEQ ID NO: 431758 - DNA, 25 bp, Artificial
  probe
  misc_feature (1)..(25): SEQ ID NO: 6188; WAN02499T; Start 29; Stop 53
agattggtgattctctgcctcttag

SEQ ID NO: 431759 - DNA, 25 bp, Artificial
  probe
  misc_feature (1)..(25): SEQ ID NO: 6188; WAN02499T; Start 30; Stop 54
gattggtgattctctgcctcttagg

SEQ ID NO: 431760 - DNA, 25 bp, Artificial
  probe
  misc_feature (1)..(25): SEQ ID NO: 6188; WAN02499T; Start 31; Stop 55
attggtgattctctgcctcttaggt

SEQ ID NO: 431761 - DNA, 25 bp, Artificial
  probe
  misc_feature (1)..(25): SEQ ID NO: 6188; WAN02499T; Start 32; Stop 56
ttggtgattctctgcctcttaggtt

SEQ ID NO: 431762 - DNA, 25 bp, Artificial
  probe
  misc_feature (1)..(25): SEQ ID NO: 6188; WAN02499T; Start 28; Stop 52
gagattggtgattctctgcctctta

SEQ ID NO: 431763 - DNA, 25 bp, Artificial
  probe
  misc_feature (1)..(25): SEQ ID NO: 6188; WAN02499T; Start 34; Stop 58
ggtgattctctgcctcttaggtttc

SEQ ID NO: 431764 - DNA, 25 bp, Artificial
  probe
  misc_feature (1)..(25): SEQ ID NO: 6188; WAN02499T; Start 33; Stop 57
tggtgattctctgcctcttaggttt

SEQ ID NO: 431765 - DNA, 25 bp, Artificial
  probe
  misc_feature (1)..(25): SEQ ID NO: 6188; WAN02499T; Start 20; Stop 44
aagaggctgagattggtgattctct

SEQ ID NO: 431766 - DNA, 25 bp, Artificial
  probe
  misc_feature (1)..(25): SEQ ID NO: 6188; WAN02499T; Start 27; Stop 51
tgagattggtgattctctgcctctt

SEQ ID NO: 431767 - DNA, 25 bp, Artificial
  probe
  misc_feature (1)..(25): SEQ ID NO: 6188; WAN02499T; Start 26; Stop 50
ctgagattggtgattctctgcctct

SEQ ID NO: 431768 - DNA, 25 bp, Artificial
  probe
  misc_feature (1)..(25): SEQ ID NO: 6188; WAN02499T; Start 21; Stop 45
agaggctgagattggtgattctctg

SEQ ID NO: 431769 - DNA, 25 bp, Artificial
  probe
  misc_feature (1)..(25): SEQ ID NO: 6189; WAN0249AR; Start 8; Stop 32
aaagcagtcactaatttctcgaaag

SEQ ID NO: 431770 - DNA, 25 bp, Artificial
  probe
  misc_feature (1)..(25): SEQ ID NO: 6189; WAN0249AR; Start 9; Stop 33
aagcagtcactaatttctcgaaaga

SEQ ID NO: 431771 - DNA, 25 bp, Artificial
  probe
  misc_feature (1)..(25): SEQ ID NO: 6189; WAN0249AR; Start 37; Stop 61
tgataagtgatagatctcgaatgaa

SEQ ID NO: 431772 - DNA, 25 bp, Artificial
  probe
  misc_feature (1)..(25): SEQ ID NO: 6189; WAN0249AR; Start 27; Stop 51
cgaaagaagatgataagtgatagat

SEQ ID NO: 431773 - DNA, 25 bp, Artificial
  probe
  misc_feature (1)..(25): SEQ ID NO: 6189; WAN0249AR; Start 36; Stop 60
atgataagtgatagatctcgaatga

SEQ ID NO: 431774 - DNA, 25 bp, Artificial
  probe
  misc_feature (1)..(25): SEQ ID NO: 6189; WAN0249AR; Start 11; Stop 35
gcagtcactaatttctcgaaagaag

SEQ ID NO: 431775 - DNA, 25 bp, Artificial
  probe
  misc_feature (1)..(25): SEQ ID NO: 6189; WAN0249AR; Start 10; Stop 34
agcagtcactaatttctcgaaagaa

SEQ ID NO: 431776 - DNA, 25 bp, Artificial
  probe
  misc_feature (1)..(25): SEQ ID NO: 6189; WAN0249AR; Start 3; Stop 27
agccaaaagcagtcactaatttctc

SEQ ID NO: 431777 - DNA, 25 bp, Artificial
  probe
  misc_feature (1)..(25): SEQ ID NO: 6189; WAN0249AR; Start 26; Stop 50
tcgaaagaagatgataagtgataga

SEQ ID NO: 431778 - DNA, 25 bp, Artificial
  probe
  misc_feature (1)..(25): SEQ ID NO: 6189; WAN0249AR; Start 25; Stop 49
ctcgaaagaagatgataagtgatag

SEQ ID NO: 431779 - DNA, 25 bp, Artificial
  probe
  misc_feature (1)..(25): SEQ ID NO: 6189; WAN0249AR; Start 35; Stop 59
gatgataagtgatagatctcgaatg

SEQ ID NO: 431780 - DNA, 25 bp, Artificial
  probe
  misc_feature (1)..(25): SEQ ID NO: 6189; WAN0249AR; Start 12; Stop 36
cagtcactaatttctcgaaagaaga

SEQ ID NO: 431781 - DNA, 25 bp, Artificial
  probe
  misc_feature (1)..(25): SEQ ID NO: 6189; WAN0249AR; Start 24; Stop 48
tctcgaaagaagatgataagtgata

SEQ ID NO: 431782 - DNA, 25 bp, Artificial
  probe
  misc_feature (1)..(25): SEQ ID NO: 6189; WAN0249AR; Start 2; Stop 26
cagccaaaagcagtcactaatttct

SEQ ID NO: 431783 - DNA, 25 bp, Artificial
  probe
  misc_feature (1)..(25): SEQ ID NO: 6189; WAN0249AR; Start 1; Stop 25
tcagccaaaagcagtcactaatttc

SEQ ID NO: 431784 - DNA, 25 bp, Artificial
  probe
  misc_feature (1)..(25): SEQ ID NO: 6189; WAN0249AR; Start 6; Stop 30
caaaagcagtcactaatttctcgaa

SEQ ID NO: 431785 - DNA, 25 bp, Artificial
  probe
  misc_feature (1)..(25): SEQ ID NO: 6189; WAN0249AR; Start 7; Stop 31
aaaagcagtcactaatttctcgaaa

SEQ ID NO: 431786 - DNA, 25 bp, Artificial
  probe
  misc_feature (1)..(25): SEQ ID NO: 6189; WAN0249AR; Start 14; Stop 38
gtcactaatttctcgaaagaagatg

SEQ ID NO: 431787 - DNA, 25 bp, Artificial
  probe
  misc_feature (1)..(25): SEQ ID NO: 6189; WAN0249AR; Start 22; Stop 46
tttctcgaaagaagatgataagtga

SEQ ID NO: 431788 - DNA, 25 bp, Artificial
  probe
  misc_feature (1)..(25): SEQ ID NO: 6189; WAN0249AR; Start 15; Stop 39
tcactaatttctcgaaagaagatga

SEQ ID NO: 431789 - DNA, 25 bp, Artificial
  probe
  misc_feature (1)..(25): SEQ ID NO: 6189; WAN0249AR; Start 13; Stop 37
agtcactaatttctcgaaagaagat

SEQ ID NO: 431790 - DNA, 25 bp, Artificial
  probe
  misc_feature (1)..(25): SEQ ID NO: 6189; WAN0249AR; Start 41; Stop 65
aagtgatagatctcgaatgaaagaa

SEQ ID NO: 431791 - DNA, 25 bp, Artificial
  probe
  misc_feature (1)..(25): SEQ ID NO: 6189; WAN0249AR; Start 32; Stop 56
gaagatgataagtgatagatctcga

SEQ ID NO: 431792 - DNA, 25 bp, Artificial
  probe
  misc_feature (1)..(25): SEQ ID NO: 6189; WAN0249AR; Start 31; Stop 55
agaagatgataagtgatagatctcg

SEQ ID NO: 431793 - DNA, 25 bp, Artificial
  probe
  misc_feature (1)..(25): SEQ ID NO: 6189; WAN0249AR; Start 23; Stop 47
ttctcgaaagaagatgataagtgat

SEQ ID NO: 431794 - DNA, 25 bp, Artificial
  probe
  misc_feature (1)..(25): SEQ ID NO: 6189; WAN0249AR; Start 5; Stop 29
ccaaaagcagtcactaatttctcga

SEQ ID NO: 431795 - DNA, 25 bp, Artificial
  probe
  misc_feature (1)..(25): SEQ ID NO: 6189; WAN0249AR; Start 42; Stop 66
agtgatagatctcgaatgaaagaat

SEQ ID NO: 431796 - DNA, 25 bp, Artificial
  probe
  misc_feature (1)..(25): SEQ ID NO: 6189; WAN0249AR; Start 4; Stop 28
gccaaaagcagtcactaatttctcg

SEQ ID NO: 431797 - DNA, 25 bp, Artificial
  probe
  misc_feature (1)..(25): SEQ ID NO: 6189; WAN0249AR; Start 33; Stop 57
aagatgataagtgatagatctcgaa

SEQ ID NO: 431798 - DNA, 25 bp, Artificial
  probe
  misc_feature (1)..(25): SEQ ID NO: 6189; WAN0249AR; Start 21; Stop 45
atttctcgaaagaagatgataagtg

SEQ ID NO: 431799 - DNA, 25 bp, Artificial
  probe
  misc_feature (1)..(25): SEQ ID NO: 6189; WAN0249AR; Start 16; Stop 40
cactaatttctcgaaagaagatgat

SEQ ID NO: 431800 - DNA, 25 bp, Artificial
  probe
  misc_feature (1)..(25): SEQ ID NO: 6189; WAN0249AR; Start 40; Stop 64
taagtgatagatctcgaatgaaaga

SEQ ID NO: 431801 - DNA, 25 bp, Artificial
  probe
  misc_feature (1)..(25): SEQ ID NO: 6189; WAN0249AR; Start 34; Stop 58
agatgataagtgatagatctcgaat

SEQ ID NO: 431802 - DNA, 25 bp, Artificial
  probe
  misc_feature (1)..(25): SEQ ID NO: 6190; WAN0249BN; Start 46; Stop 70
caccccaaaagttagacagaataaa

SEQ ID NO: 431803 - DNA, 25 bp, Artificial
  probe
  misc_feature (1)..(25): SEQ ID NO: 6190; WAN0249BN; Start 45; Stop 69
gcaccccaaaagttagacagaataa

SEQ ID NO: 431804 - DNA, 25 bp, Artificial
  probe
  misc_feature (1)..(25): SEQ ID NO: 6190; WAN0249BN; Start 47; Stop 71
accccaaaagttagacagaataaat

SEQ ID NO: 431805 - DNA, 25 bp, Artificial
  probe
  misc_feature (1)..(25): SEQ ID NO: 6190; WAN0249BN; Start 63; Stop 87
agaataaatctaacttttggggtgt

SEQ ID NO: 431806 - DNA, 25 bp, Artificial
  probe
  misc_feature (1)..(25): SEQ ID NO: 6190; WAN0249BN; Start 61; Stop 85
acagaataaatctaacttttggggt

SEQ ID NO: 431807 - DNA, 25 bp, Artificial
  probe
  misc_feature (1)..(25): SEQ ID NO: 6190; WAN0249BN; Start 48; Stop 72
ccccaaaagttagacagaataaatc

SEQ ID NO: 431808 - DNA, 25 bp, Artificial
  probe
  misc_feature (1)..(25): SEQ ID NO: 6190; WAN0249BN; Start 62; Stop 86
cagaataaatctaacttttggggtg

SEQ ID NO: 431809 - DNA, 25 bp, Artificial
  probe
  misc_feature (1)..(25): SEQ ID NO: 6190; WAN0249BN; Start 60; Stop 84
gacagaataaatctaacttttgggg

SEQ ID NO: 431810 - DNA, 25 bp, Artificial
  probe
  misc_feature (1)..(25): SEQ ID NO: 6190; WAN0249BN; Start 75; Stop 99
acttttggggtgttttattatgaaa

SEQ ID NO: 431811 - DNA, 25 bp, Artificial
  probe
  misc_feature (1)..(25): SEQ ID NO: 6190; WAN0249BN; Start 64; Stop 88
gaataaatctaacttttggggtgtt

SEQ ID NO: 431812 - DNA, 25 bp, Artificial
  probe
  misc_feature (1)..(25): SEQ ID NO: 6190; WAN0249BN; Start 74; Stop 98
aacttttggggtgttttattatgaa

SEQ ID NO: 431813 - DNA, 25 bp, Artificial
  probe
  misc_feature (1)..(25): SEQ ID NO: 6190; WAN0249BN; Start 69; Stop 93
aatctaacttttggggtgttttatt

SEQ ID NO: 431814 - DNA, 25 bp, Artificial
  probe
  misc_feature (1)..(25): SEQ ID NO: 6190; WAN0249BN; Start 68; Stop 92
aaatctaacttttggggtgttttat

SEQ ID NO: 431815 - DNA, 25 bp, Artificial
  probe
  misc_feature (1)..(25): SEQ ID NO: 6190; WAN0249BN; Start 66; Stop 90
ataaatctaacttttggggtgtttt

SEQ ID NO: 431816 - DNA, 25 bp, Artificial
  probe
  misc_feature (1)..(25): SEQ ID NO: 6190; WAN0249BN; Start 65; Stop 89
aataaatctaacttttggggtgttt

SEQ ID NO: 431817 - DNA, 25 bp, Artificial
  probe
  misc_feature (1)..(25): SEQ ID NO: 6190; WAN0249BN; Start 24; Stop 48
aaatcgaccgattaatgaactgcac

SEQ ID NO: 431818 - DNA, 25 bp, Artificial
  probe
  misc_feature (1)..(25): SEQ ID NO: 6190; WAN0249BN; Start 25; Stop 49
aatcgaccgattaatgaactgcacc

SEQ ID NO: 431819 - DNA, 25 bp, Artificial
  probe
  misc_feature (1)..(25): SEQ ID NO: 6190; WAN0249BN; Start 59; Stop 83
agacagaataaatctaacttttggg

SEQ ID NO: 431820 - DNA, 25 bp, Artificial
  probe
  misc_feature (1)..(25): SEQ ID NO: 6190; WAN0249BN; Start 49; Stop 73
cccaaaagttagacagaataaatct

SEQ ID NO: 431821 - DNA, 25 bp, Artificial
  probe
  misc_feature (1)..(25): SEQ ID NO: 6190; WAN0249BN; Start 73; Stop 97
taacttttggggtgttttattatga

SEQ ID NO: 431822 - DNA, 25 bp, Artificial
  probe
  misc_feature (1)..(25): SEQ ID NO: 6190; WAN0249BN; Start 78; Stop 102
tttggggtgttttattatgaaattg

SEQ ID NO: 431823 - DNA, 25 bp, Artificial
  probe
  misc_feature (1)..(25): SEQ ID NO: 6190; WAN0249BN; Start 44; Stop 68
tgcaccccaaaagttagacagaata

SEQ ID NO: 431824 - DNA, 25 bp, Artificial
  probe
  misc_feature (1)..(25): SEQ ID NO: 6190; WAN0249BN; Start 76; Stop 100
cttttggggtgttttattatgaaat

SEQ ID NO: 431825 - DNA, 25 bp, Artificial
  probe
  misc_feature (1)..(25): SEQ ID NO: 6190; WAN0249BN; Start 67; Stop 91
taaatctaacttttggggtgtttta

SEQ ID NO: 431826 - DNA, 25 bp, Artificial
  probe
  misc_feature (1)..(25): SEQ ID NO: 6190; WAN0249BN; Start 72; Stop 96
ctaacttttggggtgttttattatg

SEQ ID NO: 431827 - DNA, 25 bp, Artificial
  probe
  misc_feature (1)..(25): SEQ ID NO: 6190; WAN0249BN; Start 33; Stop 57
gattaatgaactgcaccccaaaagt

SEQ ID NO: 431828 - DNA, 25 bp, Artificial
  probe
  misc_feature (1)..(25): SEQ ID NO: 6190; WAN0249BN; Start 71; Stop 95
tctaacttttggggtgttttattat

SEQ ID NO: 431829 - DNA, 25 bp, Artificial
  probe
  misc_feature (1)..(25): SEQ ID NO: 6190; WAN0249BN; Start 70; Stop 94
atctaacttttggggtgttttatta

SEQ ID NO: 431830 - DNA, 25 bp, Artificial
  probe
  misc_feature (1)..(25): SEQ ID NO: 6190; WAN0249BN; Start 32; Stop 56
cgattaatgaactgcaccccaaaag

SEQ ID NO: 431831 - DNA, 25 bp, Artificial
  probe
  misc_feature (1)..(25): SEQ ID NO: 6190; WAN0249BN; Start 77; Stop 101
ttttggggtgttttattatgaaatt

SEQ ID NO: 431832 - DNA, 25 bp, Artificial
  probe
  misc_feature (1)..(25): SEQ ID NO: 6190; WAN0249BN; Start 23; Stop 47
aaaatcgaccgattaatgaactgca

SEQ ID NO: 431833 - DNA, 25 bp, Artificial
  probe
  misc_feature (1)..(25): SEQ ID NO: 6190; WAN0249BN; Start 35; Stop 59
ttaatgaactgcaccccaaaagtta

SEQ ID NO: 431834 - DNA, 25 bp, Artificial
  probe
  misc_feature (1)..(25): SEQ ID NO: 6190; WAN0249BN; Start 36; Stop 60
taatgaactgcaccccaaaagttag

SEQ ID NO: 431835 - DNA, 25 bp, Artificial
  probe
  misc_feature (1)..(25): SEQ ID NO: 6191; WAN024976; Start 28; Stop 52
agccttctactcaaatatcctgtca

SEQ ID NO: 431836 - DNA, 25 bp, Artificial
  probe
  misc_feature (1)..(25): SEQ ID NO: 6191; WAN024976; Start 29; Stop 53
gccttctactcaaatatcctgtcag

SEQ ID NO: 431837 - DNA, 25 bp, Artificial
  probe
  misc_feature (1)..(25): SEQ ID NO: 6191; WAN024976; Start 30; Stop 54
ccttctactcaaatatcctgtcaga

SEQ ID NO: 431838 - DNA, 25 bp, Artificial
  probe
  misc_feature (1)..(25): SEQ ID NO: 6191; WAN024976; Start 27; Stop 51
gagccttctactcaaatatcctgtc

SEQ ID NO: 431839 - DNA, 25 bp, Artificial
  probe
  misc_feature (1)..(25): SEQ ID NO: 6191; WAN024976; Start 26; Stop 50
agagccttctactcaaatatcctgt

SEQ ID NO: 431840 - DNA, 25 bp, Artificial
  probe
  misc_feature (1)..(25): SEQ ID NO: 6191; WAN024976; Start 25; Stop 49
tagagccttctactcaaatatcctg

SEQ ID NO: 431841 - DNA, 25 bp, Artificial
  probe
  misc_feature (1)..(25): SEQ ID NO: 6191; WAN024976; Start 24; Stop 48
atagagccttctactcaaatatcct

SEQ ID NO: 431842 - DNA, 25 bp, Artificial
  probe
  misc_feature (1)..(25): SEQ ID NO: 6191; WAN024976; Start 10; Stop 34
tcactaacaatttaatagagccttc

SEQ ID NO: 431843 - DNA, 25 bp, Artificial
  probe
  misc_feature (1)..(25): SEQ ID NO: 6191; WAN024976; Start 23; Stop 47
aatagagccttctactcaaatatcc

SEQ ID NO: 431844 - DNA, 25 bp, Artificial
  probe
  misc_feature (1)..(25): SEQ ID NO: 6191; WAN024976; Start 11; Stop 35
cactaacaatttaatagagccttct

SEQ ID NO: 431845 - DNA, 25 bp, Artificial
  probe
  misc_feature (1)..(25): SEQ ID NO: 6191; WAN024976; Start 16; Stop 40
acaatttaatagagccttctactca

SEQ ID NO: 431846 - DNA, 25 bp, Artificial
  probe
  misc_feature (1)..(25): SEQ ID NO: 6191; WAN024976; Start 9; Stop 33
ttcactaacaatttaatagagcctt

SEQ ID NO: 431847 - DNA, 25 bp, Artificial
  probe
  misc_feature (1)..(25): SEQ ID NO: 6191; WAN024976; Start 8; Stop 32
tttcactaacaatttaatagagcct

SEQ ID NO: 431848 - DNA, 25 bp, Artificial
  probe
  misc_feature (1)..(25): SEQ ID NO: 6191; WAN024976; Start 31; Stop 55
cttctactcaaatatcctgtcagaa

SEQ ID NO: 431849 - DNA, 25 bp, Artificial
  probe
  misc_feature (1)..(25): SEQ ID NO: 6191; WAN024976; Start 32; Stop 56
ttctactcaaatatcctgtcagaaa

SEQ ID NO: 431850 - DNA, 25 bp, Artificial
  probe
  misc_feature (1)..(25): SEQ ID NO: 6191; WAN024976; Start 48; Stop 72
tgtcagaaaaggatagaaagctact

SEQ ID NO: 431851 - DNA, 25 bp, Artificial
  probe
  misc_feature (1)..(25): SEQ ID NO: 6191; WAN024976; Start 47; Stop 71
ctgtcagaaaaggatagaaagctac

SEQ ID NO: 431852 - DNA, 25 bp, Artificial
  probe
  misc_feature (1)..(25): SEQ ID NO: 6191; WAN024976; Start 17; Stop 41
caatttaatagagccttctactcaa

SEQ ID NO: 431853 - DNA, 25 bp, Artificial
  probe
  misc_feature (1)..(25): SEQ ID NO: 6191; WAN024976; Start 15; Stop 39
aacaatttaatagagccttctactc

SEQ ID NO: 431854 - DNA, 25 bp, Artificial
  probe
  misc_feature (1)..(25): SEQ ID NO: 6191; WAN024976; Start 35; Stop 59
tactcaaatatcctgtcagaaaagg

SEQ ID NO: 431855 - DNA, 25 bp, Artificial
  probe
  misc_feature (1)..(25): SEQ ID NO: 6191; WAN024976; Start 7; Stop 31
atttcactaacaatttaatagagcc

SEQ ID NO: 431856 - DNA, 25 bp, Artificial
  probe
  misc_feature (1)..(25): SEQ ID NO: 6191; WAN024976; Start 33; Stop 57
tctactcaaatatcctgtcagaaaa

SEQ ID NO: 431857 - DNA, 25 bp, Artificial
  probe
  misc_feature (1)..(25): SEQ ID NO: 6191; WAN024976; Start 34; Stop 58
ctactcaaatatcctgtcagaaaag

SEQ ID NO: 431858 - DNA, 25 bp, Artificial
  probe
  misc_feature (1)..(25): SEQ ID NO: 6191; WAN024976; Start 49; Stop 73
gtcagaaaaggatagaaagctactt

SEQ ID NO: 431859 - DNA, 25 bp, Artificial
  probe
  misc_feature (1)..(25): SEQ ID NO: 6191; WAN024976; Start 46; Stop 70
cctgtcagaaaaggatagaaagcta

SEQ ID NO: 431860 - DNA, 25 bp, Artificial
  probe
  misc_feature (1)..(25): SEQ ID NO: 6191; WAN024976; Start 18; Stop 42
aatttaatagagccttctactcaaa

SEQ ID NO: 431861 - DNA, 25 bp, Artificial
  probe
  misc_feature (1)..(25): SEQ ID NO: 6191; WAN024976; Start 19; Stop 43
atttaatagagccttctactcaaat

SEQ ID NO: 431862 - DNA, 25 bp, Artificial
  probe
  misc_feature (1)..(25): SEQ ID NO: 6191; WAN024976; Start 22; Stop 46
taatagagccttctactcaaatatc

SEQ ID NO: 431863 - DNA, 25 bp, Artificial
  probe
  misc_feature (1)..(25): SEQ ID NO: 6191; WAN024976; Start 14; Stop 38
taacaatttaatagagccttctact

SEQ ID NO: 431864 - DNA, 25 bp, Artificial
  probe
  misc_feature (1)..(25): SEQ ID NO: 6191; WAN024976; Start 12; Stop 36
actaacaatttaatagagccttcta

SEQ ID NO: 431865 - DNA, 25 bp, Artificial
  probe
  misc_feature (1)..(25): SEQ ID NO: 6191; WAN024976; Start 13; Stop 37
ctaacaatttaatagagccttctac

SEQ ID NO: 431866 - DNA, 25 bp, Artificial
  probe
  misc_feature (1)..(25): SEQ ID NO: 6191; WAN024976; Start 50; Stop 74
tcagaaaaggatagaaagctacttt

SEQ ID NO: 431867 - DNA, 25 bp, Artificial
  probe
  misc_feature (1)..(25): SEQ ID NO: 6191; WAN024976; Start 20; Stop 44
tttaatagagccttctactcaaata

SEQ ID NO: 431868 - DNA, 25 bp, Artificial
  probe
  misc_feature (1)..(25): SEQ ID NO: 6192; WAN02497W; Start 1; Stop 25
tcctttctcctcctttactatttaa

SEQ ID NO: 431869 - DNA, 25 bp, Artificial
  probe
  misc_feature (1)..(25): SEQ ID NO: 6192; WAN02497W; Start 53; Stop 77
tagatagcaagaattttccacaagc

SEQ ID NO: 431870 - DNA, 25 bp, Artificial
  probe
  misc_feature (1)..(25): SEQ ID NO: 6192; WAN02497W; Start 50; Stop 74
ccatagatagcaagaattttccaca

SEQ ID NO: 431871 - DNA, 25 bp, Artificial
  probe
  misc_feature (1)..(25): SEQ ID NO: 6192; WAN02497W; Start 49; Stop 73
accatagatagcaagaattttccac

SEQ ID NO: 431872 - DNA, 25 bp, Artificial
  probe
  misc_feature (1)..(25): SEQ ID NO: 6192; WAN02497W; Start 48; Stop 72
taccatagatagcaagaattttcca

SEQ ID NO: 431873 - DNA, 25 bp, Artificial
  probe
  misc_feature (1)..(25): SEQ ID NO: 6192; WAN02497W; Start 51; Stop 75
catagatagcaagaattttccacaa

SEQ ID NO: 431874 - DNA, 25 bp, Artificial
  probe
  misc_feature (1)..(25): SEQ ID NO: 6192; WAN02497W; Start 52; Stop 76
atagatagcaagaattttccacaag

SEQ ID NO: 431875 - DNA, 25 bp, Artificial
  probe
  misc_feature (1)..(25): SEQ ID NO: 6192; WAN02497W; Start 47; Stop 71
ttaccatagatagcaagaattttcc

SEQ ID NO: 431876 - DNA, 25 bp, Artificial
  probe
  misc_feature (1)..(25): SEQ ID NO: 6192; WAN02497W; Start 2; Stop 26
cctttctcctcctttactatttaaa

SEQ ID NO: 431877 - DNA, 25 bp, Artificial
  probe
  misc_feature (1)..(25): SEQ ID NO: 6192; WAN02497W; Start 55; Stop 79
gatagcaagaattttccacaagctg

SEQ ID NO: 431878 - DNA, 25 bp, Artificial
  probe
  misc_feature (1)..(25): SEQ ID NO: 6192; WAN02497W; Start 54; Stop 78
agatagcaagaattttccacaagct

SEQ ID NO: 431879 - DNA, 25 bp, Artificial
  probe
  misc_feature (1)..(25): SEQ ID NO: 6192; WAN02497W; Start 56; Stop 80
atagcaagaattttccacaagctgt

SEQ ID NO: 431880 - DNA, 25 bp, Artificial
  probe
  misc_feature (1)..(25): SEQ ID NO: 6192; WAN02497W; Start 46; Stop 70
tttaccatagatagcaagaattttc

SEQ ID NO: 431881 - DNA, 25 bp, Artificial
  probe
  misc_feature (1)..(25): SEQ ID NO: 6192; WAN02497W; Start 40; Stop 64
agatattttaccatagatagcaaga

SEQ ID NO: 431882 - DNA, 25 bp, Artificial
  probe
  misc_feature (1)..(25): SEQ ID NO: 6192; WAN02497W; Start 38; Stop 62
agagatattttaccatagatagcaa

SEQ ID NO: 431883 - DNA, 25 bp, Artificial
  probe
  misc_feature (1)..(25): SEQ ID NO: 6192; WAN02497W; Start 39; Stop 63
gagatattttaccatagatagcaag

SEQ ID NO: 431884 - DNA, 25 bp, Artificial
  probe
  misc_feature (1)..(25): SEQ ID NO: 6192; WAN02497W; Start 45; Stop 69
ttttaccatagatagcaagaatttt

SEQ ID NO: 431885 - DNA, 25 bp, Artificial
  probe
  misc_feature (1)..(25): SEQ ID NO: 6192; WAN02497W; Start 61; Stop 85
aagaattttccacaagctgtgaaaa

SEQ ID NO: 431886 - DNA, 25 bp, Artificial
  probe
  misc_feature (1)..(25): SEQ ID NO: 6192; WAN02497W; Start 60; Stop 84
caagaattttccacaagctgtgaaa

SEQ ID NO: 431887 - DNA, 25 bp, Artificial
  probe
  misc_feature (1)..(25): SEQ ID NO: 6192; WAN02497W; Start 57; Stop 81
tagcaagaattttccacaagctgtg

SEQ ID NO: 431888 - DNA, 25 bp, Artificial
  probe
  misc_feature (1)..(25): SEQ ID NO: 6192; WAN02497W; Start 6; Stop 30
tctcctcctttactatttaaaagtt

SEQ ID NO: 431889 - DNA, 25 bp, Artificial
  probe
  misc_feature (1)..(25): SEQ ID NO: 6192; WAN02497W; Start 5; Stop 29
ttctcctcctttactatttaaaagt

SEQ ID NO: 431890 - DNA, 25 bp, Artificial
  probe
  misc_feature (1)..(25): SEQ ID NO: 6192; WAN02497W; Start 59; Stop 83
gcaagaattttccacaagctgtgaa

SEQ ID NO: 431891 - DNA, 25 bp, Artificial
  probe
  misc_feature (1)..(25): SEQ ID NO: 6192; WAN02497W; Start 7; Stop 31
ctcctcctttactatttaaaagttt

SEQ ID NO: 431892 - DNA, 25 bp, Artificial
  probe
  misc_feature (1)..(25): SEQ ID NO: 6192; WAN02497W; Start 58; Stop 82
agcaagaattttccacaagctgtga

SEQ ID NO: 431893 - DNA, 25 bp, Artificial
  probe
  misc_feature (1)..(25): SEQ ID NO: 6193; WAN02497I; Start 185; Stop 209
aggtccagttcaattattcttccaa

SEQ ID NO: 431894 - DNA, 25 bp, Artificial
  probe
  misc_feature (1)..(25): SEQ ID NO: 6193; WAN02497I; Start 296; Stop 320
gaatgccagagttatattgtagtcc

SEQ ID NO: 431895 - DNA, 25 bp, Artificial
  probe
  misc_feature (1)..(25): SEQ ID NO: 6193; WAN02497I; Start 279; Stop 303
ataagtatgctctgtaagaatgcca

SEQ ID NO: 431896 - DNA, 25 bp, Artificial
  probe
  misc_feature (1)..(25): SEQ ID NO: 6193; WAN02497I; Start 184; Stop 208
aaggtccagttcaattattcttcca

SEQ ID NO: 431897 - DNA, 25 bp, Artificial
  probe
  misc_feature (1)..(25): SEQ ID NO: 6193; WAN02497I; Start 278; Stop 302
gataagtatgctctgtaagaatgcc

SEQ ID NO: 431898 - DNA, 25 bp, Artificial
  probe
  misc_feature (1)..(25): SEQ ID NO: 6193; WAN02497I; Start 277; Stop 301
tgataagtatgctctgtaagaatgc

SEQ ID NO: 431899 - DNA, 25 bp, Artificial
  probe
  misc_feature (1)..(25): SEQ ID NO: 6193; WAN02497I; Start 295; Stop 319
agaatgccagagttatattgtagtc

SEQ ID NO: 431900 - DNA, 25 bp, Artificial
  probe
  misc_feature (1)..(25): SEQ ID NO: 6193; WAN02497I; Start 291; Stop 315
tgtaagaatgccagagttatattgt

SEQ ID NO: 431901 - DNA, 25 bp, Artificial
  probe
  misc_feature (1)..(25): SEQ ID NO: 6193; WAN02497I; Start 280; Stop 304
taagtatgctctgtaagaatgccag

SEQ ID NO: 431902 - DNA, 25 bp, Artificial
  probe
  misc_feature (1)..(25): SEQ ID NO: 6193; WAN02497I; Start 294; Stop 318
aagaatgccagagttatattgtagt

SEQ ID NO: 431903 - DNA, 25 bp, Artificial
  probe
  misc_feature (1)..(25): SEQ ID NO: 6193; WAN02497I; Start 169; Stop 193
tcaataatgaattagaaggtccagt

SEQ ID NO: 431904 - DNA, 25 bp, Artificial
  probe
  misc_feature (1)..(25): SEQ ID NO: 6193; WAN02497I; Start 297; Stop 321
aatgccagagttatattgtagtccc

SEQ ID NO: 431905 - DNA, 25 bp, Artificial
  probe
  misc_feature (1)..(25): SEQ ID NO: 6193; WAN02497I; Start 274; Stop 298
aactgataagtatgctctgtaagaa

SEQ ID NO: 431906 - DNA, 25 bp, Artificial
  probe
  misc_feature (1)..(25): SEQ ID NO: 6193; WAN02497I; Start 186; Stop 210
ggtccagttcaattattcttccaaa

SEQ ID NO: 431907 - DNA, 25 bp, Artificial
  probe
  misc_feature (1)..(25): SEQ ID NO: 6193; WAN02497I; Start 276; Stop 300
ctgataagtatgctctgtaagaatg

SEQ ID NO: 431908 - DNA, 25 bp, Artificial
  probe
  misc_feature (1)..(25): SEQ ID NO: 6193; WAN02497I; Start 170; Stop 194
caataatgaattagaaggtccagtt

SEQ ID NO: 431909 - DNA, 25 bp, Artificial
  probe
  misc_feature (1)..(25): SEQ ID NO: 6193; WAN02497I; Start 167; Stop 191
tctcaataatgaattagaaggtcca

SEQ ID NO: 431910 - DNA, 25 bp, Artificial
  probe
  misc_feature (1)..(25): SEQ ID NO: 6193; WAN02497I; Start 275; Stop 299
actgataagtatgctctgtaagaat

SEQ ID NO: 431911 - DNA, 25 bp, Artificial
  probe
  misc_feature (1)..(25): SEQ ID NO: 6193; WAN02497I; Start 168; Stop 192
ctcaataatgaattagaaggtccag

SEQ ID NO: 431912 - DNA, 25 bp, Artificial
  probe
  misc_feature (1)..(25): SEQ ID NO: 6193; WAN02497I; Start 290; Stop 314
ctgtaagaatgccagagttatattg

SEQ ID NO: 431913 - DNA, 25 bp, Artificial
  probe
  misc_feature (1)..(25): SEQ ID NO: 6193; WAN02497I; Start 224; Stop 248
atttgaagacatatcggtttctgaa

SEQ ID NO: 431914 - DNA, 25 bp, Artificial
  probe
  misc_feature (1)..(25): SEQ ID NO: 6193; WAN02497I; Start 229; Stop 253
aagacatatcggtttctgaaattgc

SEQ ID NO: 431915 - DNA, 25 bp, Artificial
  probe
  misc_feature (1)..(25): SEQ ID NO: 6193; WAN02497I; Start 225; Stop 249
tttgaagacatatcggtttctgaaa

SEQ ID NO: 431916 - DNA, 25 bp, Artificial
  probe
  misc_feature (1)..(25): SEQ ID NO: 6193; WAN02497I; Start 179; Stop 203
attagaaggtccagttcaattattc

SEQ ID NO: 431917 - DNA, 25 bp, Artificial
  probe
  misc_feature (1)..(25): SEQ ID NO: 6193; WAN02497I; Start 171; Stop 195
aataatgaattagaaggtccagttc

SEQ ID NO: 431918 - DNA, 25 bp, Artificial
  probe
  misc_feature (1)..(25): SEQ ID NO: 6193; WAN02497I; Start 227; Stop 251
tgaagacatatcggtttctgaaatt

SEQ ID NO: 431919 - DNA, 25 bp, Artificial
  probe
  misc_feature (1)..(25): SEQ ID NO: 6193; WAN02497I; Start 226; Stop 250
ttgaagacatatcggtttctgaaat

SEQ ID NO: 431920 - DNA, 25 bp, Artificial
  probe
  misc_feature (1)..(25): SEQ ID NO: 6193; WAN02497I; Start 292; Stop 316
gtaagaatgccagagttatattgta

SEQ ID NO: 431921 - DNA, 25 bp, Artificial
  probe
  misc_feature (1)..(25): SEQ ID NO: 6193; WAN02497I; Start 228; Stop 252
gaagacatatcggtttctgaaattg

SEQ ID NO: 431922 - DNA, 25 bp, Artificial
  probe
  misc_feature (1)..(25): SEQ ID NO: 6193; WAN02497I; Start 14; Stop 38
gacaaattaaatcaggcagtacatg

SEQ ID NO: 431923 - DNA, 25 bp, Artificial
  probe
  misc_feature (1)..(25): SEQ ID NO: 6193; WAN02497I; Start 223; Stop 247
tatttgaagacatatcggtttctga

SEQ ID NO: 431924 - DNA, 25 bp, Artificial
  probe
  misc_feature (1)..(25): SEQ ID NO: 6193; WAN02497I; Start 12; Stop 36
ttgacaaattaaatcaggcagtaca

SEQ ID NO: 431925 - DNA, 25 bp, Artificial
  probe
  misc_feature (1)..(25): SEQ ID NO: 6193; WAN02497I; Start 13; Stop 37
tgacaaattaaatcaggcagtacat

SEQ ID NO: 431926 - DNA, 25 bp, Artificial
  probe
  misc_feature (1)..(25): SEQ ID NO: 6194; WAN02498Z; Start 26; Stop 50
aagcctttgaaataagcactttggg

SEQ ID NO: 431927 - DNA, 25 bp, Artificial
  probe
  misc_feature (1)..(25): SEQ ID NO: 6194; WAN02498Z; Start 21; Stop 45
ctataaagcctttgaaataagcact

SEQ ID NO: 431928 - DNA, 25 bp, Artificial
  probe
  misc_feature (1)..(25): SEQ ID NO: 6194; WAN02498Z; Start 25; Stop 49
aaagcctttgaaataagcactttgg

SEQ ID NO: 431929 - DNA, 25 bp, Artificial
  probe
  misc_feature (1)..(25): SEQ ID NO: 6194; WAN02498Z; Start 24; Stop 48
taaagcctttgaaataagcactttg

SEQ ID NO: 431930 - DNA, 25 bp, Artificial
  probe
  misc_feature (1)..(25): SEQ ID NO: 6194; WAN02498Z; Start 22; Stop 46
tataaagcctttgaaataagcactt

SEQ ID NO: 431931 - DNA, 25 bp, Artificial
  probe
  misc_feature (1)..(25): SEQ ID NO: 6194; WAN02498Z; Start 20; Stop 44
gctataaagcctttgaaataagcac

SEQ ID NO: 431932 - DNA, 25 bp, Artificial
  probe
  misc_feature (1)..(25): SEQ ID NO: 6194; WAN02498Z; Start 23; Stop 47
ataaagcctttgaaataagcacttt

SEQ ID NO: 431933 - DNA, 25 bp, Artificial
  probe
  misc_feature (1)..(25): SEQ ID NO: 6194; WAN02498Z; Start 108; Stop 132
tttggtatagtaagagggtagcccg

SEQ ID NO: 431934 - DNA, 25 bp, Artificial
  probe
  misc_feature (1)..(25): SEQ ID NO: 6194; WAN02498Z; Start 107; Stop 131
ttttggtatagtaagagggtagccc

SEQ ID NO: 431935 - DNA, 25 bp, Artificial
  probe
  misc_feature (1)..(25): SEQ ID NO: 6194; WAN02498Z; Start 113; Stop 137
tatagtaagagggtagcccggaaat

SEQ ID NO: 431936 - DNA, 25 bp, Artificial
  probe
  misc_feature (1)..(25): SEQ ID NO: 6194; WAN02498Z; Start 27; Stop 51
agcctttgaaataagcactttgggg

SEQ ID NO: 431937 - DNA, 25 bp, Artificial
  probe
  misc_feature (1)..(25): SEQ ID NO: 6194; WAN02498Z; Start 112; Stop 136
gtatagtaagagggtagcccggaaa

SEQ ID NO: 431938 - DNA, 25 bp, Artificial
  probe
  misc_feature (1)..(25): SEQ ID NO: 6194; WAN02498Z; Start 114; Stop 138
atagtaagagggtagcccggaaatg

SEQ ID NO: 431939 - DNA, 25 bp, Artificial
  probe
  misc_feature (1)..(25): SEQ ID NO: 6194; WAN02498Z; Start 29; Stop 53
cctttgaaataagcactttggggcg

SEQ ID NO: 431940 - DNA, 25 bp, Artificial
  probe
  misc_feature (1)..(25): SEQ ID NO: 6194; WAN02498Z; Start 111; Stop 135
ggtatagtaagagggtagcccggaa

SEQ ID NO: 431941 - DNA, 25 bp, Artificial
  probe
  misc_feature (1)..(25): SEQ ID NO: 6194; WAN02498Z; Start 109; Stop 133
ttggtatagtaagagggtagcccgg

SEQ ID NO: 431942 - DNA, 25 bp, Artificial
  probe
  misc_feature (1)..(25): SEQ ID NO: 6194; WAN02498Z; Start 115; Stop 139
tagtaagagggtagcccggaaatgg

SEQ ID NO: 431943 - DNA, 25 bp, Artificial
  probe
  misc_feature (1)..(25): SEQ ID NO: 6194; WAN02498Z; Start 129; Stop 153
cccggaaatgggtcacccttatttt

SEQ ID NO: 431944 - DNA, 25 bp, Artificial
  probe
  misc_feature (1)..(25): SEQ ID NO: 6195; WAN0249AH; Start 45; Stop 69
ccctttcttgttaatagcctagttt

SEQ ID NO: 431945 - DNA, 25 bp, Artificial
  probe
  misc_feature (1)..(25): SEQ ID NO: 6195; WAN0249AH; Start 46; Stop 70
cctttcttgttaatagcctagtttg

SEQ ID NO: 431946 - DNA, 25 bp, Artificial
  probe
  misc_feature (1)..(25): SEQ ID NO: 6195; WAN0249AH; Start 47; Stop 71
ctttcttgttaatagcctagtttga

SEQ ID NO: 431947 - DNA, 25 bp, Artificial
  probe
  misc_feature (1)..(25): SEQ ID NO: 6195; WAN0249AH; Start 9; Stop 33
aaagaaggtggaaggaaaatgtttg

SEQ ID NO: 431948 - DNA, 25 bp, Artificial
  probe
  misc_feature (1)..(25): SEQ ID NO: 6195; WAN0249AH; Start 8; Stop 32
aaaagaaggtggaaggaaaatgttt

SEQ ID NO: 431949 - DNA, 25 bp, Artificial
  probe
  misc_feature (1)..(25): SEQ ID NO: 6195; WAN0249AH; Start 41; Stop 65
cttcccctttcttgttaatagccta

SEQ ID NO: 431950 - DNA, 25 bp, Artificial
  probe
  misc_feature (1)..(25): SEQ ID NO: 6195; WAN0249AH; Start 38; Stop 62
taccttcccctttcttgttaatagc

SEQ ID NO: 431951 - DNA, 25 bp, Artificial
  probe
  misc_feature (1)..(25): SEQ ID NO: 6195; WAN0249AH; Start 36; Stop 60
actaccttcccctttcttgttaata

SEQ ID NO: 431952 - DNA, 25 bp, Artificial
  probe
  misc_feature (1)..(25): SEQ ID NO: 6195; WAN0249AH; Start 35; Stop 59
aactaccttcccctttcttgttaat

SEQ ID NO: 431953 - DNA, 25 bp, Artificial
  probe
  misc_feature (1)..(25): SEQ ID NO: 6195; WAN0249AH; Start 34; Stop 58
gaactaccttcccctttcttgttaa

SEQ ID NO: 431954 - DNA, 25 bp, Artificial
  probe
  misc_feature (1)..(25): SEQ ID NO: 6195; WAN0249AH; Start 16; Stop 40
gtggaaggaaaatgtttggaactac

SEQ ID NO: 431955 - DNA, 25 bp, Artificial
  probe
  misc_feature (1)..(25): SEQ ID NO: 6195; WAN0249AH; Start 44; Stop 68
cccctttcttgttaatagcctagtt

SEQ ID NO: 431956 - DNA, 25 bp, Artificial
  probe
  misc_feature (1)..(25): SEQ ID NO: 6195; WAN0249AH; Start 42; Stop 66
ttcccctttcttgttaatagcctag

SEQ ID NO: 431957 - DNA, 25 bp, Artificial
  probe
  misc_feature (1)..(25): SEQ ID NO: 6195; WAN0249AH; Start 37; Stop 61
ctaccttcccctttcttgttaatag

SEQ ID NO: 431958 - DNA, 25 bp, Artificial
  probe
  misc_feature (1)..(25): SEQ ID NO: 6195; WAN0249AH; Start 43; Stop 67
tcccctttcttgttaatagcctagt

SEQ ID NO: 431959 - DNA, 25 bp, Artificial
  probe
  misc_feature (1)..(25): SEQ ID NO: 6195; WAN0249AH; Start 17; Stop 41
tggaaggaaaatgtttggaactacc

SEQ ID NO: 431960 - DNA, 25 bp, Artificial
  probe
  misc_feature (1)..(25): SEQ ID NO: 6195; WAN0249AH; Start 15; Stop 39
ggtggaaggaaaatgtttggaacta

SEQ ID NO: 431961 - DNA, 25 bp, Artificial
  probe
  misc_feature (1)..(25): SEQ ID NO: 6195; WAN0249AH; Start 12; Stop 36
gaaggtggaaggaaaatgtttggaa

SEQ ID NO: 431962 - DNA, 25 bp, Artificial
  probe
  misc_feature (1)..(25): SEQ ID NO: 6195; WAN0249AH; Start 10; Stop 34
aagaaggtggaaggaaaatgtttgg

SEQ ID NO: 431963 - DNA, 25 bp, Artificial
  probe
  misc_feature (1)..(25): SEQ ID NO: 6195; WAN0249AH; Start 48; Stop 72
tttcttgttaatagcctagtttgat

SEQ ID NO: 431964 - DNA, 25 bp, Artificial
  probe
  misc_feature (1)..(25): SEQ ID NO: 6195; WAN0249AH; Start 40; Stop 64
ccttcccctttcttgttaatagcct

SEQ ID NO: 431965 - DNA, 25 bp, Artificial
  probe
  misc_feature (1)..(25): SEQ ID NO: 6195; WAN0249AH; Start 13; Stop 37
aaggtggaaggaaaatgtttggaac

SEQ ID NO: 431966 - DNA, 25 bp, Artificial
  probe
  misc_feature (1)..(25): SEQ ID NO: 6195; WAN0249AH; Start 39; Stop 63
accttcccctttcttgttaatagcc

SEQ ID NO: 431967 - DNA, 25 bp, Artificial
  probe
  misc_feature (1)..(25): SEQ ID NO: 6195; WAN0249AH; Start 18; Stop 42
ggaaggaaaatgtttggaactacct

SEQ ID NO: 431968 - DNA, 25 bp, Artificial
  probe
  misc_feature (1)..(25): SEQ ID NO: 6195; WAN0249AH; Start 11; Stop 35
agaaggtggaaggaaaatgtttgga

SEQ ID NO: 431969 - DNA, 25 bp, Artificial
  probe
  misc_feature (1)..(25): SEQ ID NO: 6195; WAN0249AH; Start 14; Stop 38
aggtggaaggaaaatgtttggaact

SEQ ID NO: 431970 - DNA, 25 bp, Artificial
  probe
  misc_feature (1)..(25): SEQ ID NO: 6195; WAN0249AH; Start 49; Stop 73
ttcttgttaatagcctagtttgata

SEQ ID NO: 431971 - DNA, 25 bp, Artificial
  probe
  misc_feature (1)..(25): SEQ ID NO: 6195; WAN0249AH; Start 50; Stop 74
tcttgttaatagcctagtttgatat

SEQ ID NO: 431972 - DNA, 25 bp, Artificial
  probe
  misc_feature (1)..(25): SEQ ID NO: 6195; WAN0249AH; Start 20; Stop 44
aaggaaaatgtttggaactaccttc

SEQ ID NO: 431973 - DNA, 25 bp, Artificial
  probe
  misc_feature (1)..(25): SEQ ID NO: 6195; WAN0249AH; Start 19; Stop 43
gaaggaaaatgtttggaactacctt

SEQ ID NO: 431974 - DNA, 25 bp, Artificial
  probe
  misc_feature (1)..(25): SEQ ID NO: 6195; WAN0249AH; Start 21; Stop 45
aggaaaatgtttggaactaccttcc

SEQ ID NO: 431975 - DNA, 25 bp, Artificial
  probe
  misc_feature (1)..(25): SEQ ID NO: 6195; WAN0249AH; Start 33; Stop 57
ggaactaccttcccctttcttgtta

SEQ ID NO: 431976 - DNA, 25 bp, Artificial
  probe
  misc_feature (1)..(25): SEQ ID NO: 6195; WAN0249AH; Start 23; Stop 47
gaaaatgtttggaactaccttcccc

SEQ ID NO: 431977 - DNA, 25 bp, Artificial
  probe
  misc_feature (1)..(25): SEQ ID NO: 6196; WAN02499J; Start 27; Stop 51
tgaggtcatagtagggaggatttct

SEQ ID NO: 431978 - DNA, 25 bp, Artificial
  probe
  misc_feature (1)..(25): SEQ ID NO: 6196; WAN02499J; Start 26; Stop 50
gtgaggtcatagtagggaggatttc

SEQ ID NO: 431979 - DNA, 25 bp, Artificial
  probe
  misc_feature (1)..(25): SEQ ID NO: 6196; WAN02499J; Start 25; Stop 49
ggtgaggtcatagtagggaggattt

SEQ ID NO: 431980 - DNA, 25 bp, Artificial
  probe
  misc_feature (1)..(25): SEQ ID NO: 6196; WAN02499J; Start 1; Stop 25
tcttacagcagtagagcctgacaag

SEQ ID NO: 431981 - DNA, 25 bp, Artificial
  probe
  misc_feature (1)..(25): SEQ ID NO: 6196; WAN02499J; Start 24; Stop 48
aggtgaggtcatagtagggaggatt

SEQ ID NO: 431982 - DNA, 25 bp, Artificial
  probe
  misc_feature (1)..(25): SEQ ID NO: 6196; WAN02499J; Start 23; Stop 47
aaggtgaggtcatagtagggaggat

SEQ ID NO: 431983 - DNA, 25 bp, Artificial
  probe
  misc_feature (1)..(25): SEQ ID NO: 6196; WAN02499J; Start 20; Stop 44
gacaaggtgaggtcatagtagggag

SEQ ID NO: 431984 - DNA, 25 bp, Artificial
  probe
  misc_feature (1)..(25): SEQ ID NO: 6196; WAN02499J; Start 2; Stop 26
cttacagcagtagagcctgacaagg

SEQ ID NO: 431985 - DNA, 25 bp, Artificial
  probe
  misc_feature (1)..(25): SEQ ID NO: 6196; WAN02499J; Start 22; Stop 46
caaggtgaggtcatagtagggagga

SEQ ID NO: 431986 - DNA, 25 bp, Artificial
  probe
  misc_feature (1)..(25): SEQ ID NO: 6196; WAN02499J; Start 21; Stop 45
acaaggtgaggtcatagtagggagg

SEQ ID NO: 431987 - DNA, 25 bp, Artificial
  probe
  misc_feature (1)..(25): SEQ ID NO: 6196; WAN02499J; Start 17; Stop 41
cctgacaaggtgaggtcatagtagg

SEQ ID NO: 431988 - DNA, 25 bp, Artificial
  probe
  misc_feature (1)..(25): SEQ ID NO: 6196; WAN02499J; Start 16; Stop 40
gcctgacaaggtgaggtcatagtag

SEQ ID NO: 431989 - DNA, 25 bp, Artificial
  probe
  misc_feature (1)..(25): SEQ ID NO: 6196; WAN02499J; Start 12; Stop 36
tagagcctgacaaggtgaggtcata

SEQ ID NO: 431990 - DNA, 25 bp, Artificial
  probe
  misc_feature (1)..(25): SEQ ID NO: 6196; WAN02499J; Start 15; Stop 39
agcctgacaaggtgaggtcatagta

SEQ ID NO: 431991 - DNA, 25 bp, Artificial
  probe
  misc_feature (1)..(25): SEQ ID NO: 6196; WAN02499J; Start 18; Stop 42
ctgacaaggtgaggtcatagtaggg

SEQ ID NO: 431992 - DNA, 25 bp, Artificial
  probe
  misc_feature (1)..(25): SEQ ID NO: 6196; WAN02499J; Start 19; Stop 43
tgacaaggtgaggtcatagtaggga

SEQ ID NO: 431993 - DNA, 25 bp, Artificial
  probe
  misc_feature (1)..(25): SEQ ID NO: 6197; WAN02496W; Start 10; Stop 34
ctaacactaataagtccgatatggt

SEQ ID NO: 431994 - DNA, 25 bp, Artificial
  probe
  misc_feature (1)..(25): SEQ ID NO: 6197; WAN02496W; Start 9; Stop 33
actaacactaataagtccgatatgg

SEQ ID NO: 431995 - DNA, 25 bp, Artificial
  probe
  misc_feature (1)..(25): SEQ ID NO: 6197; WAN02496W; Start 12; Stop 36
aacactaataagtccgatatggtaa

SEQ ID NO: 431996 - DNA, 25 bp, Artificial
  probe
  misc_feature (1)..(25): SEQ ID NO: 6197; WAN02496W; Start 4; Stop 28
tccctactaacactaataagtccga

SEQ ID NO: 431997 - DNA, 25 bp, Artificial
  probe
  misc_feature (1)..(25): SEQ ID NO: 6197; WAN02496W; Start 3; Stop 27
ttccctactaacactaataagtccg

SEQ ID NO: 431998 - DNA, 25 bp, Artificial
  probe
  misc_feature (1)..(25): SEQ ID NO: 6197; WAN02496W; Start 5; Stop 29
ccctactaacactaataagtccgat

SEQ ID NO: 431999 - DNA, 25 bp, Artificial
  probe
  misc_feature (1)..(25): SEQ ID NO: 6197; WAN02496W; Start 6; Stop 30
cctactaacactaataagtccgata

SEQ ID NO: 432000 - DNA, 25 bp, Artificial
  probe
  misc_feature (1)..(25): SEQ ID NO: 6197; WAN02496W; Start 21; Stop 45
aagtccgatatggtaaattcttgac

SEQ ID NO: 432001 - DNA, 25 bp, Artificial
  probe
  misc_feature (1)..(25): SEQ ID NO: 6197; WAN02496W; Start 11; Stop 35
taacactaataagtccgatatggta

SEQ ID NO: 432002 - DNA, 25 bp, Artificial
  probe
  misc_feature (1)..(25): SEQ ID NO: 6197; WAN02496W; Start 2; Stop 26
cttccctactaacactaataagtcc

SEQ ID NO: 432003 - DNA, 25 bp, Artificial
  probe
  misc_feature (1)..(25): SEQ ID NO: 6197; WAN02496W; Start 23; Stop 47
gtccgatatggtaaattcttgacct

SEQ ID NO: 432004 - DNA, 25 bp, Artificial
  probe
  misc_feature (1)..(25): SEQ ID NO: 6197; WAN02496W; Start 22; Stop 46
agtccgatatggtaaattcttgacc

SEQ ID NO: 432005 - DNA, 25 bp, Artificial
  probe
  misc_feature (1)..(25): SEQ ID NO: 6197; WAN02496W; Start 20; Stop 44
taagtccgatatggtaaattcttga

SEQ ID NO: 432006 - DNA, 25 bp, Artificial
  probe
  misc_feature (1)..(25): SEQ ID NO: 6197; WAN02496W; Start 24; Stop 48
tccgatatggtaaattcttgaccta

SEQ ID NO: 432007 - DNA, 25 bp, Artificial
  probe
  misc_feature (1)..(25): SEQ ID NO: 6197; WAN02496W; Start 33; Stop 57
gtaaattcttgacctattagttgct

SEQ ID NO: 432008 - DNA, 25 bp, Artificial
  probe
  misc_feature (1)..(25): SEQ ID NO: 6197; WAN02496W; Start 13; Stop 37
acactaataagtccgatatggtaaa

SEQ ID NO: 432009 - DNA, 25 bp, Artificial
  probe
  misc_feature (1)..(25): SEQ ID NO: 6197; WAN02496W; Start 25; Stop 49
ccgatatggtaaattcttgacctat

SEQ ID NO: 432010 - DNA, 25 bp, Artificial
  probe
  misc_feature (1)..(25): SEQ ID NO: 6197; WAN02496W; Start 32; Stop 56
ggtaaattcttgacctattagttgc

SEQ ID NO: 432011 - DNA, 25 bp, Artificial
  probe
  misc_feature (1)..(25): SEQ ID NO: 6197; WAN02496W; Start 1; Stop 25
tcttccctactaacactaataagtc

SEQ ID NO: 432012 - DNA, 25 bp, Artificial
  probe
  misc_feature (1)..(25): SEQ ID NO: 6197; WAN02496W; Start 19; Stop 43
ataagtccgatatggtaaattcttg

SEQ ID NO: 432013 - DNA, 25 bp, Artificial
  probe
  misc_feature (1)..(25): SEQ ID NO: 6197; WAN02496W; Start 8; Stop 32
tactaacactaataagtccgatatg

SEQ ID NO: 432014 - DNA, 25 bp, Artificial
  probe
  misc_feature (1)..(25): SEQ ID NO: 6197; WAN02496W; Start 14; Stop 38
cactaataagtccgatatggtaaat

SEQ ID NO: 432015 - DNA, 25 bp, Artificial
  probe
  misc_feature (1)..(25): SEQ ID NO: 6197; WAN02496W; Start 7; Stop 31
ctactaacactaataagtccgatat

SEQ ID NO: 432016 - DNA, 25 bp, Artificial
  probe
  misc_feature (1)..(25): SEQ ID NO: 6197; WAN02496W; Start 18; Stop 42
aataagtccgatatggtaaattctt

SEQ ID NO: 432017 - DNA, 25 bp, Artificial
  probe
  misc_feature (1)..(25): SEQ ID NO: 6197; WAN02496W; Start 31; Stop 55
tggtaaattcttgacctattagttg

SEQ ID NO: 432018 - DNA, 25 bp, Artificial
  probe
  misc_feature (1)..(25): SEQ ID NO: 6197; WAN02496W; Start 26; Stop 50
cgatatggtaaattcttgacctatt

SEQ ID NO: 432019 - DNA, 25 bp, Artificial
  probe
  misc_feature (1)..(25): SEQ ID NO: 6197; WAN02496W; Start 17; Stop 41
taataagtccgatatggtaaattct

SEQ ID NO: 432020 - DNA, 25 bp, Artificial
  probe
  misc_feature (1)..(25): SEQ ID NO: 6197; WAN02496W; Start 15; Stop 39
actaataagtccgatatggtaaatt

SEQ ID NO: 432021 - DNA, 25 bp, Artificial
  probe
  misc_feature (1)..(25): SEQ ID NO: 6197; WAN02496W; Start 30; Stop 54
atggtaaattcttgacctattagtt

SEQ ID NO: 432022 - DNA, 25 bp, Artificial
  probe
  misc_feature (1)..(25): SEQ ID NO: 6197; WAN02496W; Start 16; Stop 40
ctaataagtccgatatggtaaattc

SEQ ID NO: 432023 - DNA, 25 bp, Artificial
  probe
  misc_feature (1)..(25): SEQ ID NO: 6197; WAN02496W; Start 29; Stop 53
tatggtaaattcttgacctattagt

SEQ ID NO: 432024 - DNA, 25 bp, Artificial
  probe
  misc_feature (1)..(25): SEQ ID NO: 6198; WAN02496N; Start 37; Stop 61
ctatacaacaatccgagagtagtct

SEQ ID NO: 432025 - DNA, 25 bp, Artificial
  probe
  misc_feature (1)..(25): SEQ ID NO: 6198; WAN02496N; Start 36; Stop 60
tctatacaacaatccgagagtagtc

SEQ ID NO: 432026 - DNA, 25 bp, Artificial
  probe
  misc_feature (1)..(25): SEQ ID NO: 6198; WAN02496N; Start 35; Stop 59
ttctatacaacaatccgagagtagt

SEQ ID NO: 432027 - DNA, 25 bp, Artificial
  probe
  misc_feature (1)..(25): SEQ ID NO: 6198; WAN02496N; Start 34; Stop 58
tttctatacaacaatccgagagtag

SEQ ID NO: 432028 - DNA, 25 bp, Artificial
  probe
  misc_feature (1)..(25): SEQ ID NO: 6198; WAN02496N; Start 52; Stop 76
agagtagtctcacaatttgaacatt

SEQ ID NO: 432029 - DNA, 25 bp, Artificial
  probe
  misc_feature (1)..(25): SEQ ID NO: 6198; WAN02496N; Start 32; Stop 56
aatttctatacaacaatccgagagt

SEQ ID NO: 432030 - DNA, 25 bp, Artificial
  probe
  misc_feature (1)..(25): SEQ ID NO: 6198; WAN02496N; Start 54; Stop 78
agtagtctcacaatttgaacatttc

SEQ ID NO: 432031 - DNA, 25 bp, Artificial
  probe
  misc_feature (1)..(25): SEQ ID NO: 6198; WAN02496N; Start 53; Stop 77
gagtagtctcacaatttgaacattt

SEQ ID NO: 432032 - DNA, 25 bp, Artificial
  probe
  misc_feature (1)..(25): SEQ ID NO: 6198; WAN02496N; Start 115; Stop 139
aaacctctgactaagatttcctaat

SEQ ID NO: 432033 - DNA, 25 bp, Artificial
  probe
  misc_feature (1)..(25): SEQ ID NO: 6198; WAN02496N; Start 116; Stop 140
aacctctgactaagatttcctaatt

SEQ ID NO: 432034 - DNA, 25 bp, Artificial
  probe
  misc_feature (1)..(25): SEQ ID NO: 6198; WAN02496N; Start 33; Stop 57
atttctatacaacaatccgagagta

SEQ ID NO: 432035 - DNA, 25 bp, Artificial
  probe
  misc_feature (1)..(25): SEQ ID NO: 6198; WAN02496N; Start 39; Stop 63
atacaacaatccgagagtagtctca

SEQ ID NO: 432036 - DNA, 25 bp, Artificial
  probe
  misc_feature (1)..(25): SEQ ID NO: 6198; WAN02496N; Start 38; Stop 62
tatacaacaatccgagagtagtctc

SEQ ID NO: 432037 - DNA, 25 bp, Artificial
  probe
  misc_feature (1)..(25): SEQ ID NO: 6198; WAN02496N; Start 113; Stop 137
agaaacctctgactaagatttccta

SEQ ID NO: 432038 - DNA, 25 bp, Artificial
  probe
  misc_feature (1)..(25): SEQ ID NO: 6198; WAN02496N; Start 44; Stop 68
acaatccgagagtagtctcacaatt

SEQ ID NO: 432039 - DNA, 25 bp, Artificial
  probe
  misc_feature (1)..(25): SEQ ID NO: 6198; WAN02496N; Start 43; Stop 67
aacaatccgagagtagtctcacaat

SEQ ID NO: 432040 - DNA, 25 bp, Artificial
  probe
  misc_feature (1)..(25): SEQ ID NO: 6198; WAN02496N; Start 40; Stop 64
tacaacaatccgagagtagtctcac

SEQ ID NO: 432041 - DNA, 25 bp, Artificial
  probe
  misc_feature (1)..(25): SEQ ID NO: 6198; WAN02496N; Start 57; Stop 81
agtctcacaatttgaacatttcaca

SEQ ID NO: 432042 - DNA, 25 bp, Artificial
  probe
  misc_feature (1)..(25): SEQ ID NO: 6198; WAN02496N; Start 114; Stop 138
gaaacctctgactaagatttcctaa

SEQ ID NO: 432043 - DNA, 25 bp, Artificial
  probe
  misc_feature (1)..(25): SEQ ID NO: 6198; WAN02496N; Start 62; Stop 86
cacaatttgaacatttcacatcact

SEQ ID NO: 432044 - DNA, 25 bp, Artificial
  probe
  misc_feature (1)..(25): SEQ ID NO: 6198; WAN02496N; Start 61; Stop 85
tcacaatttgaacatttcacatcac

SEQ ID NO: 432045 - DNA, 25 bp, Artificial
  probe
  misc_feature (1)..(25): SEQ ID NO: 6198; WAN02496N; Start 63; Stop 87
acaatttgaacatttcacatcactc

SEQ ID NO: 432046 - DNA, 25 bp, Artificial
  probe
  misc_feature (1)..(25): SEQ ID NO: 6198; WAN02496N; Start 60; Stop 84
ctcacaatttgaacatttcacatca

SEQ ID NO: 432047 - DNA, 25 bp, Artificial
  probe
  misc_feature (1)..(25): SEQ ID NO: 6198; WAN02496N; Start 58; Stop 82
gtctcacaatttgaacatttcacat

SEQ ID NO: 432048 - DNA, 25 bp, Artificial
  probe
  misc_feature (1)..(25): SEQ ID NO: 6198; WAN02496N; Start 42; Stop 66
caacaatccgagagtagtctcacaa

SEQ ID NO: 432049 - DNA, 25 bp, Artificial
  probe
  misc_feature (1)..(25): SEQ ID NO: 6198; WAN02496N; Start 64; Stop 88
caatttgaacatttcacatcactct

SEQ ID NO: 432050 - DNA, 25 bp, Artificial
  probe
  misc_feature (1)..(25): SEQ ID NO: 6198; WAN02496N; Start 59; Stop 83
tctcacaatttgaacatttcacatc

SEQ ID NO: 432051 - DNA, 25 bp, Artificial
  probe
  misc_feature (1)..(25): SEQ ID NO: 6198; WAN02496N; Start 31; Stop 55
aaatttctatacaacaatccgagag

SEQ ID NO: 432052 - DNA, 25 bp, Artificial
  probe
  misc_feature (1)..(25): SEQ ID NO: 6198; WAN02496N; Start 56; Stop 80
tagtctcacaatttgaacatttcac

SEQ ID NO: 432053 - DNA, 25 bp, Artificial
  probe
  misc_feature (1)..(25): SEQ ID NO: 6198; WAN02496N; Start 55; Stop 79
gtagtctcacaatttgaacatttca

SEQ ID NO: 432054 - DNA, 25 bp, Artificial
  probe
  misc_feature (1)..(25): SEQ ID NO: 6198; WAN02496N; Start 117; Stop 141
acctctgactaagatttcctaatta

SEQ ID NO: 432055 - DNA, 25 bp, Artificial
  probe
  misc_feature (1)..(25): SEQ ID NO: 6198; WAN02496N; Start 65; Stop 89
aatttgaacatttcacatcactctt

SEQ ID NO: 432056 - DNA, 25 bp, Artificial
  probe
  misc_feature (1)..(25): SEQ ID NO: 6198; WAN02496N; Start 46; Stop 70
aatccgagagtagtctcacaatttg

SEQ ID NO: 432057 - DNA, 25 bp, Artificial
  probe
  misc_feature (1)..(25): SEQ ID NO: 6199; WAN02498L; Start 14; Stop 38
gcttcctctccttatttcctaactt

SEQ ID NO: 432058 - DNA, 25 bp, Artificial
  probe
  misc_feature (1)..(25): SEQ ID NO: 6199; WAN02498L; Start 13; Stop 37
ggcttcctctccttatttcctaact

SEQ ID NO: 432059 - DNA, 25 bp, Artificial
  probe
  misc_feature (1)..(25): SEQ ID NO: 6199; WAN02498L; Start 15; Stop 39
cttcctctccttatttcctaacttt

SEQ ID NO: 432060 - DNA, 25 bp, Artificial
  probe
  misc_feature (1)..(25): SEQ ID NO: 6199; WAN02498L; Start 12; Stop 36
gggcttcctctccttatttcctaac

SEQ ID NO: 432061 - DNA, 25 bp, Artificial
  probe
  misc_feature (1)..(25): SEQ ID NO: 6199; WAN02498L; Start 10; Stop 34
atgggcttcctctccttatttccta

SEQ ID NO: 432062 - DNA, 25 bp, Artificial
  probe
  misc_feature (1)..(25): SEQ ID NO: 6199; WAN02498L; Start 11; Stop 35
tgggcttcctctccttatttcctaa

SEQ ID NO: 432063 - DNA, 25 bp, Artificial
  probe
  misc_feature (1)..(25): SEQ ID NO: 6199; WAN02498L; Start 16; Stop 40
ttcctctccttatttcctaacttta

SEQ ID NO: 432064 - DNA, 25 bp, Artificial
  probe
  misc_feature (1)..(25): SEQ ID NO: 6199; WAN02498L; Start 17; Stop 41
tcctctccttatttcctaactttat

SEQ ID NO: 432065 - DNA, 25 bp, Artificial
  probe
  misc_feature (1)..(25): SEQ ID NO: 6199; WAN02498L; Start 18; Stop 42
cctctccttatttcctaactttatt

SEQ ID NO: 432066 - DNA, 25 bp, Artificial
  probe
  misc_feature (1)..(25): SEQ ID NO: 6199; WAN02498L; Start 9; Stop 33
catgggcttcctctccttatttcct

SEQ ID NO: 432067 - DNA, 25 bp, Artificial
  probe
  misc_feature (1)..(25): SEQ ID NO: 6199; WAN02498L; Start 6; Stop 30
ttccatgggcttcctctccttattt

SEQ ID NO: 432068 - DNA, 25 bp, Artificial
  probe
  misc_feature (1)..(25): SEQ ID NO: 6199; WAN02498L; Start 7; Stop 31
tccatgggcttcctctccttatttc

SEQ ID NO: 432069 - DNA, 25 bp, Artificial
  probe
  misc_feature (1)..(25): SEQ ID NO: 6199; WAN02498L; Start 5; Stop 29
cttccatgggcttcctctccttatt

SEQ ID NO: 432070 - DNA, 25 bp, Artificial
  probe
  misc_feature (1)..(25): SEQ ID NO: 6199; WAN02498L; Start 4; Stop 28
tcttccatgggcttcctctccttat

SEQ ID NO: 432071 - DNA, 25 bp, Artificial
  probe
  misc_feature (1)..(25): SEQ ID NO: 6199; WAN02498L; Start 8; Stop 32
ccatgggcttcctctccttatttcc

SEQ ID NO: 432072 - DNA, 25 bp, Artificial
  probe
  misc_feature (1)..(25): SEQ ID NO: 6199; WAN02498L; Start 3; Stop 27
ttcttccatgggcttcctctcctta

SEQ ID NO: 432073 - DNA, 25 bp, Artificial
  probe
  misc_feature (1)..(25): SEQ ID NO: 6200; WAN02497V; Start 44; Stop 68
tataggacaaagcgtctactgacta

SEQ ID NO: 432074 - DNA, 25 bp, Artificial
  probe
  misc_feature (1)..(25): SEQ ID NO: 6200; WAN02497V; Start 45; Stop 69
ataggacaaagcgtctactgactaa

SEQ ID NO: 432075 - DNA, 25 bp, Artificial
  probe
  misc_feature (1)..(25): SEQ ID NO: 6200; WAN02497V; Start 46; Stop 70
taggacaaagcgtctactgactaaa

SEQ ID NO: 432076 - DNA, 25 bp, Artificial
  probe
  misc_feature (1)..(25): SEQ ID NO: 6200; WAN02497V; Start 48; Stop 72
ggacaaagcgtctactgactaaatg

SEQ ID NO: 432077 - DNA, 25 bp, Artificial
  probe
  misc_feature (1)..(25): SEQ ID NO: 6200; WAN02497V; Start 47; Stop 71
aggacaaagcgtctactgactaaat

SEQ ID NO: 432078 - DNA, 25 bp, Artificial
  probe
  misc_feature (1)..(25): SEQ ID NO: 6200; WAN02497V; Start 49; Stop 73
gacaaagcgtctactgactaaatgc

SEQ ID NO: 432079 - DNA, 25 bp, Artificial
  probe
  misc_feature (1)..(25): SEQ ID NO: 6200; WAN02497V; Start 43; Stop 67
ctataggacaaagcgtctactgact

SEQ ID NO: 432080 - DNA, 25 bp, Artificial
  probe
  misc_feature (1)..(25): SEQ ID NO: 6200; WAN02497V; Start 23; Stop 47
tcagggctctagctttgatcctata

SEQ ID NO: 432081 - DNA, 25 bp, Artificial
  probe
  misc_feature (1)..(25): SEQ ID NO: 6200; WAN02497V; Start 24; Stop 48
cagggctctagctttgatcctatag

SEQ ID NO: 432082 - DNA, 25 bp, Artificial
  probe
  misc_feature (1)..(25): SEQ ID NO: 6200; WAN02497V; Start 50; Stop 74
acaaagcgtctactgactaaatgct

SEQ ID NO: 432083 - DNA, 25 bp, Artificial
  probe
  misc_feature (1)..(25): SEQ ID NO: 6200; WAN02497V; Start 54; Stop 78
agcgtctactgactaaatgcttaag

SEQ ID NO: 432084 - DNA, 25 bp, Artificial
  probe
  misc_feature (1)..(25): SEQ ID NO: 6200; WAN02497V; Start 14; Stop 38
aaatactagtcagggctctagcttt

SEQ ID NO: 432085 - DNA, 25 bp, Artificial
  probe
  misc_feature (1)..(25): SEQ ID NO: 6200; WAN02497V; Start 22; Stop 46
gtcagggctctagctttgatcctat

SEQ ID NO: 432086 - DNA, 25 bp, Artificial
  probe
  misc_feature (1)..(25): SEQ ID NO: 6200; WAN02497V; Start 15; Stop 39
aatactagtcagggctctagctttg

SEQ ID NO: 432087 - DNA, 25 bp, Artificial
  probe
  misc_feature (1)..(25): SEQ ID NO: 6200; WAN02497V; Start 17; Stop 41
tactagtcagggctctagctttgat

SEQ ID NO: 432088 - DNA, 25 bp, Artificial
  probe
  misc_feature (1)..(25): SEQ ID NO: 6200; WAN02497V; Start 16; Stop 40
atactagtcagggctctagctttga

SEQ ID NO: 432089 - DNA, 25 bp, Artificial
  probe
  misc_feature (1)..(25): SEQ ID NO: 6200; WAN02497V; Start 19; Stop 43
ctagtcagggctctagctttgatcc

SEQ ID NO: 432090 - DNA, 25 bp, Artificial
  probe
  misc_feature (1)..(25): SEQ ID NO: 6200; WAN02497V; Start 53; Stop 77
aagcgtctactgactaaatgcttaa

SEQ ID NO: 432091 - DNA, 25 bp, Artificial
  probe
  misc_feature (1)..(25): SEQ ID NO: 6200; WAN02497V; Start 52; Stop 76
aaagcgtctactgactaaatgctta

SEQ ID NO: 432092 - DNA, 25 bp, Artificial
  probe
  misc_feature (1)..(25): SEQ ID NO: 6200; WAN02497V; Start 21; Stop 45
agtcagggctctagctttgatccta

SEQ ID NO: 432093 - DNA, 25 bp, Artificial
  probe
  misc_feature (1)..(25): SEQ ID NO: 6200; WAN02497V; Start 20; Stop 44
tagtcagggctctagctttgatcct

SEQ ID NO: 432094 - DNA, 25 bp, Artificial
  probe
  misc_feature (1)..(25): SEQ ID NO: 6200; WAN02497V; Start 51; Stop 75
caaagcgtctactgactaaatgctt

SEQ ID NO: 432095 - DNA, 25 bp, Artificial
  probe
  misc_feature (1)..(25): SEQ ID NO: 6200; WAN02497V; Start 18; Stop 42
actagtcagggctctagctttgatc

SEQ ID NO: 432096 - DNA, 25 bp, Artificial
  probe
  misc_feature (1)..(25): SEQ ID NO: 6200; WAN02497V; Start 13; Stop 37
aaaatactagtcagggctctagctt

SEQ ID NO: 432097 - DNA, 25 bp, Artificial
  probe
  misc_feature (1)..(25): SEQ ID NO: 6201; WAN024995; Start 28; Stop 52
tagtctaacctagcagaaagaggaa

SEQ ID NO: 432098 - DNA, 25 bp, Artificial
  probe
  misc_feature (1)..(25): SEQ ID NO: 6201; WAN024995; Start 29; Stop 53
agtctaacctagcagaaagaggaaa

SEQ ID NO: 432099 - DNA, 25 bp, Artificial
  probe
  misc_feature (1)..(25): SEQ ID NO: 6201; WAN024995; Start 9; Stop 33
gagcctatccgtgatatactagtct

SEQ ID NO: 432100 - DNA, 25 bp, Artificial
  probe
  misc_feature (1)..(25): SEQ ID NO: 6201; WAN024995; Start 27; Stop 51
ctagtctaacctagcagaaagagga

SEQ ID NO: 432101 - DNA, 25 bp, Artificial
  probe
  misc_feature (1)..(25): SEQ ID NO: 6201; WAN024995; Start 10; Stop 34
agcctatccgtgatatactagtcta

SEQ ID NO: 432102 - DNA, 25 bp, Artificial
  probe
  misc_feature (1)..(25): SEQ ID NO: 6201; WAN024995; Start 11; Stop 35
gcctatccgtgatatactagtctaa

SEQ ID NO: 432103 - DNA, 25 bp, Artificial
  probe
  misc_feature (1)..(25): SEQ ID NO: 6201; WAN024995; Start 8; Stop 32
cgagcctatccgtgatatactagtc

SEQ ID NO: 432104 - DNA, 25 bp, Artificial
  probe
  misc_feature (1)..(25): SEQ ID NO: 6201; WAN024995; Start 6; Stop 30
gccgagcctatccgtgatatactag

SEQ ID NO: 432105 - DNA, 25 bp, Artificial
  probe
  misc_feature (1)..(25): SEQ ID NO: 6201; WAN024995; Start 17; Stop 41
ccgtgatatactagtctaacctagc

SEQ ID NO: 432106 - DNA, 25 bp, Artificial
  probe
  misc_feature (1)..(25): SEQ ID NO: 6201; WAN024995; Start 5; Stop 29
agccgagcctatccgtgatatacta

SEQ ID NO: 432107 - DNA, 25 bp, Artificial
  probe
  misc_feature (1)..(25): SEQ ID NO: 6201; WAN024995; Start 15; Stop 39
atccgtgatatactagtctaaccta

SEQ ID NO: 432108 - DNA, 25 bp, Artificial
  probe
  misc_feature (1)..(25): SEQ ID NO: 6201; WAN024995; Start 18; Stop 42
cgtgatatactagtctaacctagca

SEQ ID NO: 432109 - DNA, 25 bp, Artificial
  probe
  misc_feature (1)..(25): SEQ ID NO: 6201; WAN024995; Start 14; Stop 38
tatccgtgatatactagtctaacct

SEQ ID NO: 432110 - DNA, 25 bp, Artificial
  probe
  misc_feature (1)..(25): SEQ ID NO: 6201; WAN024995; Start 7; Stop 31
ccgagcctatccgtgatatactagt

SEQ ID NO: 432111 - DNA, 25 bp, Artificial
  probe
  misc_feature (1)..(25): SEQ ID NO: 6201; WAN024995; Start 16; Stop 40
tccgtgatatactagtctaacctag

SEQ ID NO: 432112 - DNA, 25 bp, Artificial
  probe
  misc_feature (1)..(25): SEQ ID NO: 6201; WAN024995; Start 13; Stop 37
ctatccgtgatatactagtctaacc

SEQ ID NO: 432113 - DNA, 25 bp, Artificial
  probe
  misc_feature (1)..(25): SEQ ID NO: 6201; WAN024995; Start 12; Stop 36
cctatccgtgatatactagtctaac

SEQ ID NO: 432114 - DNA, 25 bp, Artificial
  probe
  misc_feature (1)..(25): SEQ ID NO: 6201; WAN024995; Start 4; Stop 28
aagccgagcctatccgtgatatact

SEQ ID NO: 432115 - DNA, 25 bp, Artificial
  probe
  misc_feature (1)..(25): SEQ ID NO: 6201; WAN024995; Start 2; Stop 26
gaaagccgagcctatccgtgatata

SEQ ID NO: 432116 - DNA, 25 bp, Artificial
  probe
  misc_feature (1)..(25): SEQ ID NO: 6201; WAN024995; Start 19; Stop 43
gtgatatactagtctaacctagcag

SEQ ID NO: 432117 - DNA, 25 bp, Artificial
  probe
  misc_feature (1)..(25): SEQ ID NO: 6201; WAN024995; Start 20; Stop 44
tgatatactagtctaacctagcaga

SEQ ID NO: 432118 - DNA, 25 bp, Artificial
  probe
  misc_feature (1)..(25): SEQ ID NO: 6201; WAN024995; Start 3; Stop 27
aaagccgagcctatccgtgatatac

SEQ ID NO: 432119 - DNA, 25 bp, Artificial
  probe
  misc_feature (1)..(25): SEQ ID NO: 6201; WAN024995; Start 26; Stop 50
actagtctaacctagcagaaagagg

SEQ ID NO: 432120 - DNA, 25 bp, Artificial
  probe
  misc_feature (1)..(25): SEQ ID NO: 6201; WAN024995; Start 25; Stop 49
tactagtctaacctagcagaaagag

SEQ ID NO: 432121 - DNA, 25 bp, Artificial
  probe
  misc_feature (1)..(25): SEQ ID NO: 6201; WAN024995; Start 24; Stop 48
atactagtctaacctagcagaaaga

SEQ ID NO: 432122 - DNA, 25 bp, Artificial
  probe
  misc_feature (1)..(25): SEQ ID NO: 6201; WAN024995; Start 21; Stop 45
gatatactagtctaacctagcagaa

SEQ ID NO: 432123 - DNA, 25 bp, Artificial
  probe
  misc_feature (1)..(25): SEQ ID NO: 6201; WAN024995; Start 23; Stop 47
tatactagtctaacctagcagaaag

SEQ ID NO: 432124 - DNA, 25 bp, Artificial
  probe
  misc_feature (1)..(25): SEQ ID NO: 6201; WAN024995; Start 22; Stop 46
atatactagtctaacctagcagaaa

SEQ ID NO: 432125 - DNA, 25 bp, Artificial
  probe
  misc_feature (1)..(25): SEQ ID NO: 6202; WAN02499U; Start 24; Stop 48
tagaacactcgcttaatcaaagaag

SEQ ID NO: 432126 - DNA, 25 bp, Artificial
  probe
  misc_feature (1)..(25): SEQ ID NO: 6202; WAN02499U; Start 23; Stop 47
ttagaacactcgcttaatcaaagaa

SEQ ID NO: 432127 - DNA, 25 bp, Artificial
  probe
  misc_feature (1)..(25): SEQ ID NO: 6202; WAN02499U; Start 25; Stop 49
agaacactcgcttaatcaaagaagt

SEQ ID NO: 432128 - DNA, 25 bp, Artificial
  probe
  misc_feature (1)..(25): SEQ ID NO: 6202; WAN02499U; Start 22; Stop 46
attagaacactcgcttaatcaaaga

SEQ ID NO: 432129 - DNA, 25 bp, Artificial
  probe
  misc_feature (1)..(25): SEQ ID NO: 6202; WAN02499U; Start 52; Stop 76
ctttgttgtacttgacctgacgatt

SEQ ID NO: 432130 - DNA, 25 bp, Artificial
  probe
  misc_feature (1)..(25): SEQ ID NO: 6202; WAN02499U; Start 30; Stop 54
actcgcttaatcaaagaagtgactt

SEQ ID NO: 432131 - DNA, 25 bp, Artificial
  probe
  misc_feature (1)..(25): SEQ ID NO: 6202; WAN02499U; Start 54; Stop 78
ttgttgtacttgacctgacgattgg

SEQ ID NO: 432132 - DNA, 25 bp, Artificial
  probe
  misc_feature (1)..(25): SEQ ID NO: 6202; WAN02499U; Start 53; Stop 77
tttgttgtacttgacctgacgattg

SEQ ID NO: 432133 - DNA, 25 bp, Artificial
  probe
  misc_feature (1)..(25): SEQ ID NO: 6202; WAN02499U; Start 48; Stop 72
gtgactttgttgtacttgacctgac

SEQ ID NO: 432134 - DNA, 25 bp, Artificial
  probe
  misc_feature (1)..(25): SEQ ID NO: 6202; WAN02499U; Start 51; Stop 75
actttgttgtacttgacctgacgat

SEQ ID NO: 432135 - DNA, 25 bp, Artificial
  probe
  misc_feature (1)..(25): SEQ ID NO: 6202; WAN02499U; Start 47; Stop 71
agtgactttgttgtacttgacctga

SEQ ID NO: 432136 - DNA, 25 bp, Artificial
  probe
  misc_feature (1)..(25): SEQ ID NO: 6202; WAN02499U; Start 21; Stop 45
tattagaacactcgcttaatcaaag

SEQ ID NO: 432137 - DNA, 25 bp, Artificial
  probe
  misc_feature (1)..(25): SEQ ID NO: 6202; WAN02499U; Start 31; Stop 55
ctcgcttaatcaaagaagtgacttt

SEQ ID NO: 432138 - DNA, 25 bp, Artificial
  probe
  misc_feature (1)..(25): SEQ ID NO: 6202; WAN02499U; Start 19; Stop 43
tatattagaacactcgcttaatcaa

SEQ ID NO: 432139 - DNA, 25 bp, Artificial
  probe
  misc_feature (1)..(25): SEQ ID NO: 6202; WAN02499U; Start 18; Stop 42
ttatattagaacactcgcttaatca

SEQ ID NO: 432140 - DNA, 25 bp, Artificial
  probe
  misc_feature (1)..(25): SEQ ID NO: 6202; WAN02499U; Start 50; Stop 74
gactttgttgtacttgacctgacga

SEQ ID NO: 432141 - DNA, 25 bp, Artificial
  probe
  misc_feature (1)..(25): SEQ ID NO: 6202; WAN02499U; Start 49; Stop 73
tgactttgttgtacttgacctgacg

SEQ ID NO: 432142 - DNA, 25 bp, Artificial
  probe
  misc_feature (1)..(25): SEQ ID NO: 6202; WAN02499U; Start 20; Stop 44
atattagaacactcgcttaatcaaa

SEQ ID NO: 432143 - DNA, 25 bp, Artificial
  probe
  misc_feature (1)..(25): SEQ ID NO: 6202; WAN02499U; Start 43; Stop 67
aagaagtgactttgttgtacttgac

SEQ ID NO: 432144 - DNA, 25 bp, Artificial
  probe
  misc_feature (1)..(25): SEQ ID NO: 6202; WAN02499U; Start 42; Stop 66
aaagaagtgactttgttgtacttga

SEQ ID NO: 432145 - DNA, 25 bp, Artificial
  probe
  misc_feature (1)..(25): SEQ ID NO: 6202; WAN02499U; Start 45; Stop 69
gaagtgactttgttgtacttgacct

SEQ ID NO: 432146 - DNA, 25 bp, Artificial
  probe
  misc_feature (1)..(25): SEQ ID NO: 6202; WAN02499U; Start 44; Stop 68
agaagtgactttgttgtacttgacc

SEQ ID NO: 432147 - DNA, 25 bp, Artificial
  probe
  misc_feature (1)..(25): SEQ ID NO: 6202; WAN02499U; Start 46; Stop 70
aagtgactttgttgtacttgacctg

SEQ ID NO: 432148 - DNA, 25 bp, Artificial
  probe
  misc_feature (1)..(25): SEQ ID NO: 6202; WAN02499U; Start 76; Stop 100
tggggagattaaaagcatgtgaaat

SEQ ID NO: 432149 - DNA, 25 bp, Artificial
  probe
  misc_feature (1)..(25): SEQ ID NO: 6202; WAN02499U; Start 74; Stop 98
attggggagattaaaagcatgtgaa

SEQ ID NO: 432150 - DNA, 25 bp, Artificial
  probe
  misc_feature (1)..(25): SEQ ID NO: 6202; WAN02499U; Start 75; Stop 99
ttggggagattaaaagcatgtgaaa

SEQ ID NO: 432151 - DNA, 25 bp, Artificial
  probe
  misc_feature (1)..(25): SEQ ID NO: 6202; WAN02499U; Start 73; Stop 97
gattggggagattaaaagcatgtga

SEQ ID NO: 432152 - DNA, 25 bp, Artificial
  probe
  misc_feature (1)..(25): SEQ ID NO: 6202; WAN02499U; Start 69; Stop 93
tgacgattggggagattaaaagcat

SEQ ID NO: 432153 - DNA, 25 bp, Artificial
  probe
  misc_feature (1)..(25): SEQ ID NO: 6202; WAN02499U; Start 66; Stop 90
acctgacgattggggagattaaaag

SEQ ID NO: 432154 - DNA, 25 bp, Artificial
  probe
  misc_feature (1)..(25): SEQ ID NO: 6202; WAN02499U; Start 65; Stop 89
gacctgacgattggggagattaaaa

SEQ ID NO: 432155 - DNA, 25 bp, Artificial
  probe
  misc_feature (1)..(25): SEQ ID NO: 6202; WAN02499U; Start 70; Stop 94
gacgattggggagattaaaagcatg

SEQ ID NO: 432156 - DNA, 25 bp, Artificial
  probe
  misc_feature (1)..(25): SEQ ID NO: 6202; WAN02499U; Start 77; Stop 101
ggggagattaaaagcatgtgaaatc

SEQ ID NO: 432157 - DNA, 25 bp, Artificial
  probe
  misc_feature (1)..(25): SEQ ID NO: 6202; WAN02499U; Start 72; Stop 96
cgattggggagattaaaagcatgtg

SEQ ID NO: 432158 - DNA, 25 bp, Artificial
  probe
  misc_feature (1)..(25): SEQ ID NO: 6203; WAN0249CV; Start 1; Stop 25
tgagtattacttcatcttctcatga

SEQ ID NO: 432159 - DNA, 25 bp, Artificial
  probe
  misc_feature (1)..(25): SEQ ID NO: 6203; WAN0249CV; Start 9; Stop 33
acttcatcttctcatgaaattgagt

SEQ ID NO: 432160 - DNA, 25 bp, Artificial
  probe
  misc_feature (1)..(25): SEQ ID NO: 6203; WAN0249CV; Start 10; Stop 34
cttcatcttctcatgaaattgagtt

SEQ ID NO: 432161 - DNA, 25 bp, Artificial
  probe
  misc_feature (1)..(25): SEQ ID NO: 6203; WAN0249CV; Start 2; Stop 26
gagtattacttcatcttctcatgaa

SEQ ID NO: 432162 - DNA, 25 bp, Artificial
  probe
  misc_feature (1)..(25): SEQ ID NO: 6203; WAN0249CV; Start 11; Stop 35
ttcatcttctcatgaaattgagttt

SEQ ID NO: 432163 - DNA, 25 bp, Artificial
  probe
  misc_feature (1)..(25): SEQ ID NO: 6203; WAN0249CV; Start 8; Stop 32
tacttcatcttctcatgaaattgag

SEQ ID NO: 432164 - DNA, 25 bp, Artificial
  probe
  misc_feature (1)..(25): SEQ ID NO: 6203; WAN0249CV; Start 12; Stop 36
tcatcttctcatgaaattgagtttt

SEQ ID NO: 432165 - DNA, 25 bp, Artificial
  probe
  misc_feature (1)..(25): SEQ ID NO: 6203; WAN0249CV; Start 7; Stop 31
ttacttcatcttctcatgaaattga

SEQ ID NO: 432166 - DNA, 25 bp, Artificial
  probe
  misc_feature (1)..(25): SEQ ID NO: 6203; WAN0249CV; Start 6; Stop 30
attacttcatcttctcatgaaattg

SEQ ID NO: 432167 - DNA, 25 bp, Artificial
  probe
  misc_feature (1)..(25): SEQ ID NO: 6203; WAN0249CV; Start 3; Stop 27
agtattacttcatcttctcatgaaa

SEQ ID NO: 432168 - DNA, 25 bp, Artificial
  probe
  misc_feature (1)..(25): SEQ ID NO: 6203; WAN0249CV; Start 4; Stop 28
gtattacttcatcttctcatgaaat

SEQ ID NO: 432169 - DNA, 25 bp, Artificial
  probe
  misc_feature (1)..(25): SEQ ID NO: 6204; WAN0249CQ; Start 2; Stop 26
ggtgattgaacggatacttagtgta

SEQ ID NO: 432170 - DNA, 25 bp, Artificial
  probe
  misc_feature (1)..(25): SEQ ID NO: 6204; WAN0249CQ; Start 3; Stop 27
gtgattgaacggatacttagtgtag

SEQ ID NO: 432171 - DNA, 25 bp, Artificial
  probe
  misc_feature (1)..(25): SEQ ID NO: 6204; WAN0249CQ; Start 4; Stop 28
tgattgaacggatacttagtgtagt

SEQ ID NO: 432172 - DNA, 25 bp, Artificial
  probe
  misc_feature (1)..(25): SEQ ID NO: 6204; WAN0249CQ; Start 1; Stop 25
tggtgattgaacggatacttagtgt

SEQ ID NO: 432173 - DNA, 25 bp, Artificial
  probe
  misc_feature (1)..(25): SEQ ID NO: 6204; WAN0249CQ; Start 11; Stop 35
acggatacttagtgtagtagaggaa

SEQ ID NO: 432174 - DNA, 25 bp, Artificial
  probe
  misc_feature (1)..(25): SEQ ID NO: 6204; WAN0249CQ; Start 10; Stop 34
aacggatacttagtgtagtagagga

SEQ ID NO: 432175 - DNA, 25 bp, Artificial
  probe
  misc_feature (1)..(25): SEQ ID NO: 6204; WAN0249CQ; Start 9; Stop 33
gaacggatacttagtgtagtagagg

SEQ ID NO: 432176 - DNA, 25 bp, Artificial
  probe
  misc_feature (1)..(25): SEQ ID NO: 6204; WAN0249CQ; Start 12; Stop 36
cggatacttagtgtagtagaggaag

SEQ ID NO: 432177 - DNA, 25 bp, Artificial
  probe
  misc_feature (1)..(25): SEQ ID NO: 6204; WAN0249CQ; Start 8; Stop 32
tgaacggatacttagtgtagtagag

SEQ ID NO: 432178 - DNA, 25 bp, Artificial
  probe
  misc_feature (1)..(25): SEQ ID NO: 6204; WAN0249CQ; Start 7; Stop 31
ttgaacggatacttagtgtagtaga

SEQ ID NO: 432179 - DNA, 25 bp, Artificial
  probe
  misc_feature (1)..(25): SEQ ID NO: 6204; WAN0249CQ; Start 13; Stop 37
ggatacttagtgtagtagaggaaga

SEQ ID NO: 432180 - DNA, 25 bp, Artificial
  probe
  misc_feature (1)..(25): SEQ ID NO: 6204; WAN0249CQ; Start 6; Stop 30
attgaacggatacttagtgtagtag

SEQ ID NO: 432181 - DNA, 25 bp, Artificial
  probe
  misc_feature (1)..(25): SEQ ID NO: 6204; WAN0249CQ; Start 5; Stop 29
gattgaacggatacttagtgtagta

SEQ ID NO: 432182 - DNA, 25 bp, Artificial
  probe
  misc_feature (1)..(25): SEQ ID NO: 6204; WAN0249CQ; Start 14; Stop 38
gatacttagtgtagtagaggaagaa

SEQ ID NO: 432183 - DNA, 25 bp, Artificial
  probe
  misc_feature (1)..(25): SEQ ID NO: 6204; WAN0249CQ; Start 17; Stop 41
acttagtgtagtagaggaagaattt

SEQ ID NO: 432184 - DNA, 25 bp, Artificial
  probe
  misc_feature (1)..(25): SEQ ID NO: 6204; WAN0249CQ; Start 53; Stop 77
aacaacgaagaaaggttatttcatt

SEQ ID NO: 432185 - DNA, 25 bp, Artificial
  probe
  misc_feature (1)..(25): SEQ ID NO: 6204; WAN0249CQ; Start 52; Stop 76
aaacaacgaagaaaggttatttcat

SEQ ID NO: 432186 - DNA, 25 bp, Artificial
  probe
  misc_feature (1)..(25): SEQ ID NO: 6204; WAN0249CQ; Start 16; Stop 40
tacttagtgtagtagaggaagaatt

SEQ ID NO: 432187 - DNA, 25 bp, Artificial
  probe
  misc_feature (1)..(25): SEQ ID NO: 6204; WAN0249CQ; Start 15; Stop 39
atacttagtgtagtagaggaagaat

SEQ ID NO: 432188 - DNA, 25 bp, Artificial
  probe
  misc_feature (1)..(25): SEQ ID NO: 6204; WAN0249CQ; Start 21; Stop 45
agtgtagtagaggaagaatttagta

SEQ ID NO: 432189 - DNA, 25 bp, Artificial
  probe
  misc_feature (1)..(25): SEQ ID NO: 6204; WAN0249CQ; Start 20; Stop 44
tagtgtagtagaggaagaatttagt

SEQ ID NO: 432190 - DNA, 25 bp, Artificial
  probe
  misc_feature (1)..(25): SEQ ID NO: 6204; WAN0249CQ; Start 22; Stop 46
gtgtagtagaggaagaatttagtaa

SEQ ID NO: 432191 - DNA, 25 bp, Artificial
  probe
  misc_feature (1)..(25): SEQ ID NO: 6204; WAN0249CQ; Start 19; Stop 43
ttagtgtagtagaggaagaatttag

SEQ ID NO: 432192 - DNA, 25 bp, Artificial
  probe
  misc_feature (1)..(25): SEQ ID NO: 6204; WAN0249CQ; Start 51; Stop 75
aaaacaacgaagaaaggttatttca

SEQ ID NO: 432193 - DNA, 25 bp, Artificial
  probe
  misc_feature (1)..(25): SEQ ID NO: 6204; WAN0249CQ; Start 18; Stop 42
cttagtgtagtagaggaagaattta

SEQ ID NO: 432194 - DNA, 25 bp, Artificial
  probe
  misc_feature (1)..(25): SEQ ID NO: 6205; WAN02496D; Start 47; Stop 71
aagaacgcataatataggggattgt

SEQ ID NO: 432195 - DNA, 25 bp, Artificial
  probe
  misc_feature (1)..(25): SEQ ID NO: 6205; WAN02496D; Start 50; Stop 74
aacgcataatataggggattgtctc

SEQ ID NO: 432196 - DNA, 25 bp, Artificial
  probe
  misc_feature (1)..(25): SEQ ID NO: 6205; WAN02496D; Start 49; Stop 73
gaacgcataatataggggattgtct

SEQ ID NO: 432197 - DNA, 25 bp, Artificial
  probe
  misc_feature (1)..(25): SEQ ID NO: 6205; WAN02496D; Start 48; Stop 72
agaacgcataatataggggattgtc

SEQ ID NO: 432198 - DNA, 25 bp, Artificial
  probe
  misc_feature (1)..(25): SEQ ID NO: 6205; WAN02496D; Start 46; Stop 70
aaagaacgcataatataggggattg

SEQ ID NO: 432199 - DNA, 25 bp, Artificial
  probe
  misc_feature (1)..(25): SEQ ID NO: 6205; WAN02496D; Start 45; Stop 69
aaaagaacgcataatataggggatt

SEQ ID NO: 432200 - DNA, 25 bp, Artificial
  probe
  misc_feature (1)..(25): SEQ ID NO: 6205; WAN02496D; Start 43; Stop 67
ttaaaagaacgcataatatagggga

SEQ ID NO: 432201 - DNA, 25 bp, Artificial
  probe
  misc_feature (1)..(25): SEQ ID NO: 6205; WAN02496D; Start 44; Stop 68
taaaagaacgcataatataggggat

SEQ ID NO: 432202 - DNA, 25 bp, Artificial
  probe
  misc_feature (1)..(25): SEQ ID NO: 6205; WAN02496D; Start 53; Stop 77
gcataatataggggattgtctccat

SEQ ID NO: 432203 - DNA, 25 bp, Artificial
  probe
  misc_feature (1)..(25): SEQ ID NO: 6205; WAN02496D; Start 104; Stop 128
atttgggcaatcatcagataaaatt

SEQ ID NO: 432204 - DNA, 25 bp, Artificial
  probe
  misc_feature (1)..(25): SEQ ID NO: 6205; WAN02496D; Start 103; Stop 127
aatttgggcaatcatcagataaaat

SEQ ID NO: 432205 - DNA, 25 bp, Artificial
  probe
  misc_feature (1)..(25): SEQ ID NO: 6205; WAN02496D; Start 107; Stop 131
tgggcaatcatcagataaaattgag

SEQ ID NO: 432206 - DNA, 25 bp, Artificial
  probe
  misc_feature (1)..(25): SEQ ID NO: 6205; WAN02496D; Start 52; Stop 76
cgcataatataggggattgtctcca

SEQ ID NO: 432207 - DNA, 25 bp, Artificial
  probe
  misc_feature (1)..(25): SEQ ID NO: 6205; WAN02496D; Start 51; Stop 75
acgcataatataggggattgtctcc

SEQ ID NO: 432208 - DNA, 25 bp, Artificial
  probe
  misc_feature (1)..(25): SEQ ID NO: 6205; WAN02496D; Start 108; Stop 132
gggcaatcatcagataaaattgaga

SEQ ID NO: 432209 - DNA, 25 bp, Artificial
  probe
  misc_feature (1)..(25): SEQ ID NO: 6205; WAN02496D; Start 106; Stop 130
ttgggcaatcatcagataaaattga

SEQ ID NO: 432210 - DNA, 25 bp, Artificial
  probe
  misc_feature (1)..(25): SEQ ID NO: 6205; WAN02496D; Start 42; Stop 66
attaaaagaacgcataatatagggg

SEQ ID NO: 432211 - DNA, 25 bp, Artificial
  probe
  misc_feature (1)..(25): SEQ ID NO: 6205; WAN02496D; Start 109; Stop 133
ggcaatcatcagataaaattgagac

SEQ ID NO: 432212 - DNA, 25 bp, Artificial
  probe
  misc_feature (1)..(25): SEQ ID NO: 6205; WAN02496D; Start 105; Stop 129
tttgggcaatcatcagataaaattg

SEQ ID NO: 432213 - DNA, 25 bp, Artificial
  probe
  misc_feature (1)..(25): SEQ ID NO: 6205; WAN02496D; Start 102; Stop 126
aaatttgggcaatcatcagataaaa

SEQ ID NO: 432214 - DNA, 25 bp, Artificial
  probe
  misc_feature (1)..(25): SEQ ID NO: 6205; WAN02496D; Start 101; Stop 125
aaaatttgggcaatcatcagataaa

SEQ ID NO: 432215 - DNA, 25 bp, Artificial
  probe
  misc_feature (1)..(25): SEQ ID NO: 6205; WAN02496D; Start 110; Stop 134
gcaatcatcagataaaattgagact

SEQ ID NO: 432216 - DNA, 25 bp, Artificial
  probe
  misc_feature (1)..(25): SEQ ID NO: 6205; WAN02496D; Start 54; Stop 78
cataatataggggattgtctccata

SEQ ID NO: 432217 - DNA, 25 bp, Artificial
  probe
  misc_feature (1)..(25): SEQ ID NO: 6205; WAN02496D; Start 57; Stop 81
aatataggggattgtctccataata

SEQ ID NO: 432218 - DNA, 25 bp, Artificial
  probe
  misc_feature (1)..(25): SEQ ID NO: 6205; WAN02496D; Start 56; Stop 80
taatataggggattgtctccataat

SEQ ID NO: 432219 - DNA, 25 bp, Artificial
  probe
  misc_feature (1)..(25): SEQ ID NO: 6205; WAN02496D; Start 55; Stop 79
ataatataggggattgtctccataa

SEQ ID NO: 432220 - DNA, 25 bp, Artificial
  probe
  misc_feature (1)..(25): SEQ ID NO: 6205; WAN02496D; Start 58; Stop 82
atataggggattgtctccataatat

SEQ ID NO: 432221 - DNA, 25 bp, Artificial
  probe
  misc_feature (1)..(25): SEQ ID NO: 6205; WAN02496D; Start 59; Stop 83
tataggggattgtctccataatatt

SEQ ID NO: 432222 - DNA, 25 bp, Artificial
  probe
  misc_feature (1)..(25): SEQ ID NO: 6205; WAN02496D; Start 60; Stop 84
ataggggattgtctccataatatta

SEQ ID NO: 432223 - DNA, 25 bp, Artificial
  probe
  misc_feature (1)..(25): SEQ ID NO: 6205; WAN02496D; Start 119; Stop 143
agataaaattgagactatatcgagt

SEQ ID NO: 432224 - DNA, 25 bp, Artificial
  probe
  misc_feature (1)..(25): SEQ ID NO: 6205; WAN02496D; Start 117; Stop 141
tcagataaaattgagactatatcga

SEQ ID NO: 432225 - DNA, 25 bp, Artificial
  probe
  misc_feature (1)..(25): SEQ ID NO: 6205; WAN02496D; Start 118; Stop 142
cagataaaattgagactatatcgag

SEQ ID NO: 432226 - DNA, 25 bp, Artificial
  probe
  misc_feature (1)..(25): SEQ ID NO: 6205; WAN02496D; Start 31; Stop 55
aagtctttgatattaaaagaacgca

SEQ ID NO: 432227 - DNA, 25 bp, Artificial
  probe
  misc_feature (1)..(25): SEQ ID NO: 6206; WAN02497L; Start 65; Stop 89
tccagtaacctttcatatattgcca

SEQ ID NO: 432228 - DNA, 25 bp, Artificial
  probe
  misc_feature (1)..(25): SEQ ID NO: 6206; WAN02497L; Start 66; Stop 90
ccagtaacctttcatatattgccat

SEQ ID NO: 432229 - DNA, 25 bp, Artificial
  probe
  misc_feature (1)..(25): SEQ ID NO: 6206; WAN02497L; Start 64; Stop 88
atccagtaacctttcatatattgcc

SEQ ID NO: 432230 - DNA, 25 bp, Artificial
  probe
  misc_feature (1)..(25): SEQ ID NO: 6206; WAN02497L; Start 63; Stop 87
catccagtaacctttcatatattgc

SEQ ID NO: 432231 - DNA, 25 bp, Artificial
  probe
  misc_feature (1)..(25): SEQ ID NO: 6206; WAN02497L; Start 67; Stop 91
cagtaacctttcatatattgccata

SEQ ID NO: 432232 - DNA, 25 bp, Artificial
  probe
  misc_feature (1)..(25): SEQ ID NO: 6206; WAN02497L; Start 62; Stop 86
acatccagtaacctttcatatattg

SEQ ID NO: 432233 - DNA, 25 bp, Artificial
  probe
  misc_feature (1)..(25): SEQ ID NO: 6206; WAN02497L; Start 72; Stop 96
acctttcatatattgccataagttt

SEQ ID NO: 432234 - DNA, 25 bp, Artificial
  probe
  misc_feature (1)..(25): SEQ ID NO: 6206; WAN02497L; Start 71; Stop 95
aacctttcatatattgccataagtt

SEQ ID NO: 432235 - DNA, 25 bp, Artificial
  probe
  misc_feature (1)..(25): SEQ ID NO: 6206; WAN02497L; Start 44; Stop 68
ctgcctgcataatttaaaacatcca

SEQ ID NO: 432236 - DNA, 25 bp, Artificial
  probe
  misc_feature (1)..(25): SEQ ID NO: 6206; WAN02497L; Start 43; Stop 67
actgcctgcataatttaaaacatcc

SEQ ID NO: 432237 - DNA, 25 bp, Artificial
  probe
  misc_feature (1)..(25): SEQ ID NO: 6206; WAN02497L; Start 40; Stop 64
gctactgcctgcataatttaaaaca

SEQ ID NO: 432238 - DNA, 25 bp, Artificial
  probe
  misc_feature (1)..(25): SEQ ID NO: 6206; WAN02497L; Start 68; Stop 92
agtaacctttcatatattgccataa

SEQ ID NO: 432239 - DNA, 25 bp, Artificial
  probe
  misc_feature (1)..(25): SEQ ID NO: 6206; WAN02497L; Start 70; Stop 94
taacctttcatatattgccataagt

SEQ ID NO: 432240 - DNA, 25 bp, Artificial
  probe
  misc_feature (1)..(25): SEQ ID NO: 6206; WAN02497L; Start 61; Stop 85
aacatccagtaacctttcatatatt

SEQ ID NO: 432241 - DNA, 25 bp, Artificial
  probe
  misc_feature (1)..(25): SEQ ID NO: 6206; WAN02497L; Start 60; Stop 84
aaacatccagtaacctttcatatat

SEQ ID NO: 432242 - DNA, 25 bp, Artificial
  probe
  misc_feature (1)..(25): SEQ ID NO: 6206; WAN02497L; Start 69; Stop 93
gtaacctttcatatattgccataag

SEQ ID NO: 432243 - DNA, 25 bp, Artificial
  probe
  misc_feature (1)..(25): SEQ ID NO: 6206; WAN02497L; Start 42; Stop 66
tactgcctgcataatttaaaacatc

SEQ ID NO: 432244 - DNA, 25 bp, Artificial
  probe
  misc_feature (1)..(25): SEQ ID NO: 6206; WAN02497L; Start 41; Stop 65
ctactgcctgcataatttaaaacat

SEQ ID NO: 432245 - DNA, 25 bp, Artificial
  probe
  misc_feature (1)..(25): SEQ ID NO: 6206; WAN02497L; Start 46; Stop 70
gcctgcataatttaaaacatccagt

SEQ ID NO: 432246 - DNA, 25 bp, Artificial
  probe
  misc_feature (1)..(25): SEQ ID NO: 6206; WAN02497L; Start 45; Stop 69
tgcctgcataatttaaaacatccag

SEQ ID NO: 432247 - DNA, 25 bp, Artificial
  probe
  misc_feature (1)..(25): SEQ ID NO: 6206; WAN02497L; Start 57; Stop 81
ttaaaacatccagtaacctttcata

SEQ ID NO: 432248 - DNA, 25 bp, Artificial
  probe
  misc_feature (1)..(25): SEQ ID NO: 6206; WAN02497L; Start 56; Stop 80
tttaaaacatccagtaacctttcat

SEQ ID NO: 432249 - DNA, 25 bp, Artificial
  probe
  misc_feature (1)..(25): SEQ ID NO: 6206; WAN02497L; Start 55; Stop 79
atttaaaacatccagtaacctttca

SEQ ID NO: 432250 - DNA, 25 bp, Artificial
  probe
  misc_feature (1)..(25): SEQ ID NO: 6206; WAN02497L; Start 59; Stop 83
aaaacatccagtaacctttcatata

SEQ ID NO: 432251 - DNA, 25 bp, Artificial
  probe
  misc_feature (1)..(25): SEQ ID NO: 6206; WAN02497L; Start 58; Stop 82
taaaacatccagtaacctttcatat

SEQ ID NO: 432252 - DNA, 25 bp, Artificial
  probe
  misc_feature (1)..(25): SEQ ID NO: 6206; WAN02497L; Start 50; Stop 74
gcataatttaaaacatccagtaacc

SEQ ID NO: 432253 - DNA, 25 bp, Artificial
  probe
  misc_feature (1)..(25): SEQ ID NO: 6206; WAN02497L; Start 73; Stop 97
cctttcatatattgccataagttta

SEQ ID NO: 432254 - DNA, 25 bp, Artificial
  probe
  misc_feature (1)..(25): SEQ ID NO: 6206; WAN02497L; Start 47; Stop 71
cctgcataatttaaaacatccagta

SEQ ID NO: 432255 - DNA, 25 bp, Artificial
  probe
  misc_feature (1)..(25): SEQ ID NO: 6206; WAN02497L; Start 54; Stop 78
aatttaaaacatccagtaacctttc

SEQ ID NO: 432256 - DNA, 25 bp, Artificial
  probe
  misc_feature (1)..(25): SEQ ID NO: 6206; WAN02497L; Start 49; Stop 73
tgcataatttaaaacatccagtaac

SEQ ID NO: 432257 - DNA, 25 bp, Artificial
  probe
  misc_feature (1)..(25): SEQ ID NO: 6206; WAN02497L; Start 39; Stop 63
ggctactgcctgcataatttaaaac

SEQ ID NO: 432258 - DNA, 25 bp, Artificial
  probe
  misc_feature (1)..(25): SEQ ID NO: 6206; WAN02497L; Start 23; Stop 47
tttgtatataataaaaggctactgc

SEQ ID NO: 432259 - DNA, 25 bp, Artificial
  probe
  misc_feature (1)..(25): SEQ ID NO: 6206; WAN02497L; Start 51; Stop 75
cataatttaaaacatccagtaacct

SEQ ID NO: 432260 - DNA, 25 bp, Artificial
  probe
  misc_feature (1)..(25): SEQ ID NO: 6207; WAN0249AD; Start 71; Stop 95
ttaaatagtaaaggaggagaaagga

SEQ ID NO: 432261 - DNA, 25 bp, Artificial
  probe
  misc_feature (1)..(25): SEQ ID NO: 6207; WAN0249AD; Start 19; Stop 43
gcttgtggaaaattcttgctatcta

SEQ ID NO: 432262 - DNA, 25 bp, Artificial
  probe
  misc_feature (1)..(25): SEQ ID NO: 6207; WAN0249AD; Start 23; Stop 47
gtggaaaattcttgctatctatggt

SEQ ID NO: 432263 - DNA, 25 bp, Artificial
  probe
  misc_feature (1)..(25): SEQ ID NO: 6207; WAN0249AD; Start 22; Stop 46
tgtggaaaattcttgctatctatgg

SEQ ID NO: 432264 - DNA, 25 bp, Artificial
  probe
  misc_feature (1)..(25): SEQ ID NO: 6207; WAN0249AD; Start 24; Stop 48
tggaaaattcttgctatctatggta

SEQ ID NO: 432265 - DNA, 25 bp, Artificial
  probe
  misc_feature (1)..(25): SEQ ID NO: 6207; WAN0249AD; Start 21; Stop 45
ttgtggaaaattcttgctatctatg

SEQ ID NO: 432266 - DNA, 25 bp, Artificial
  probe
  misc_feature (1)..(25): SEQ ID NO: 6207; WAN0249AD; Start 20; Stop 44
cttgtggaaaattcttgctatctat

SEQ ID NO: 432267 - DNA, 25 bp, Artificial
  probe
  misc_feature (1)..(25): SEQ ID NO: 6207; WAN0249AD; Start 25; Stop 49
ggaaaattcttgctatctatggtaa

SEQ ID NO: 432268 - DNA, 25 bp, Artificial
  probe
  misc_feature (1)..(25): SEQ ID NO: 6207; WAN0249AD; Start 70; Stop 94
tttaaatagtaaaggaggagaaagg

SEQ ID NO: 432269 - DNA, 25 bp, Artificial
  probe
  misc_feature (1)..(25): SEQ ID NO: 6207; WAN0249AD; Start 18; Stop 42
agcttgtggaaaattcttgctatct

SEQ ID NO: 432270 - DNA, 25 bp, Artificial
  probe
  misc_feature (1)..(25): SEQ ID NO: 6207; WAN0249AD; Start 17; Stop 41
cagcttgtggaaaattcttgctatc

SEQ ID NO: 432271 - DNA, 25 bp, Artificial
  probe
  misc_feature (1)..(25): SEQ ID NO: 6207; WAN0249AD; Start 16; Stop 40
acagcttgtggaaaattcttgctat

SEQ ID NO: 432272 - DNA, 25 bp, Artificial
  probe
  misc_feature (1)..(25): SEQ ID NO: 6207; WAN0249AD; Start 26; Stop 50
gaaaattcttgctatctatggtaaa

SEQ ID NO: 432273 - DNA, 25 bp, Artificial
  probe
  misc_feature (1)..(25): SEQ ID NO: 6207; WAN0249AD; Start 34; Stop 58
ttgctatctatggtaaaatatctct

SEQ ID NO: 432274 - DNA, 25 bp, Artificial
  probe
  misc_feature (1)..(25): SEQ ID NO: 6207; WAN0249AD; Start 32; Stop 56
tcttgctatctatggtaaaatatct

SEQ ID NO: 432275 - DNA, 25 bp, Artificial
  probe
  misc_feature (1)..(25): SEQ ID NO: 6207; WAN0249AD; Start 33; Stop 57
cttgctatctatggtaaaatatctc

SEQ ID NO: 432276 - DNA, 25 bp, Artificial
  probe
  misc_feature (1)..(25): SEQ ID NO: 6207; WAN0249AD; Start 27; Stop 51
aaaattcttgctatctatggtaaaa

SEQ ID NO: 432277 - DNA, 25 bp, Artificial
  probe
  misc_feature (1)..(25): SEQ ID NO: 6207; WAN0249AD; Start 11; Stop 35
ttttcacagcttgtggaaaattctt

SEQ ID NO: 432278 - DNA, 25 bp, Artificial
  probe
  misc_feature (1)..(25): SEQ ID NO: 6207; WAN0249AD; Start 12; Stop 36
tttcacagcttgtggaaaattcttg

SEQ ID NO: 432279 - DNA, 25 bp, Artificial
  probe
  misc_feature (1)..(25): SEQ ID NO: 6207; WAN0249AD; Start 15; Stop 39
cacagcttgtggaaaattcttgcta

SEQ ID NO: 432280 - DNA, 25 bp, Artificial
  probe
  misc_feature (1)..(25): SEQ ID NO: 6207; WAN0249AD; Start 67; Stop 91
acttttaaatagtaaaggaggagaa

SEQ ID NO: 432281 - DNA, 25 bp, Artificial
  probe
  misc_feature (1)..(25): SEQ ID NO: 6207; WAN0249AD; Start 66; Stop 90
aacttttaaatagtaaaggaggaga

SEQ ID NO: 432282 - DNA, 25 bp, Artificial
  probe
  misc_feature (1)..(25): SEQ ID NO: 6207; WAN0249AD; Start 13; Stop 37
ttcacagcttgtggaaaattcttgc

SEQ ID NO: 432283 - DNA, 25 bp, Artificial
  probe
  misc_feature (1)..(25): SEQ ID NO: 6207; WAN0249AD; Start 65; Stop 89
aaacttttaaatagtaaaggaggag

SEQ ID NO: 432284 - DNA, 25 bp, Artificial
  probe
  misc_feature (1)..(25): SEQ ID NO: 6207; WAN0249AD; Start 14; Stop 38
tcacagcttgtggaaaattcttgct

SEQ ID NO: 432285 - DNA, 25 bp, Artificial
  probe
  misc_feature (1)..(25): SEQ ID NO: 6208; WAN02499I; Start 21; Stop 45
cgggttgggttttacatttgataat

SEQ ID NO: 432286 - DNA, 25 bp, Artificial
  probe
  misc_feature (1)..(25): SEQ ID NO: 6208; WAN02499I; Start 19; Stop 43
atcgggttgggttttacatttgata

SEQ ID NO: 432287 - DNA, 25 bp, Artificial
  probe
  misc_feature (1)..(25): SEQ ID NO: 6208; WAN02499I; Start 18; Stop 42
tatcgggttgggttttacatttgat

SEQ ID NO: 432288 - DNA, 25 bp, Artificial
  probe
  misc_feature (1)..(25): SEQ ID NO: 6208; WAN02499I; Start 20; Stop 44
tcgggttgggttttacatttgataa

SEQ ID NO: 432289 - DNA, 25 bp, Artificial
  probe
  misc_feature (1)..(25): SEQ ID NO: 6208; WAN02499I; Start 57; Stop 81
aaggagaaactttaggagaatacta

SEQ ID NO: 432290 - DNA, 25 bp, Artificial
  probe
  misc_feature (1)..(25): SEQ ID NO: 6208; WAN02499I; Start 17; Stop 41
ctatcgggttgggttttacatttga

SEQ ID NO: 432291 - DNA, 25 bp, Artificial
  probe
  misc_feature (1)..(25): SEQ ID NO: 6208; WAN02499I; Start 16; Stop 40
cctatcgggttgggttttacatttg

SEQ ID NO: 432292 - DNA, 25 bp, Artificial
  probe
  misc_feature (1)..(25): SEQ ID NO: 6208; WAN02499I; Start 56; Stop 80
aaaggagaaactttaggagaatact

SEQ ID NO: 432293 - DNA, 25 bp, Artificial
  probe
  misc_feature (1)..(25): SEQ ID NO: 6208; WAN02499I; Start 22; Stop 46
gggttgggttttacatttgataatg

SEQ ID NO: 432294 - DNA, 25 bp, Artificial
  probe
  misc_feature (1)..(25): SEQ ID NO: 6208; WAN02499I; Start 55; Stop 79
aaaaggagaaactttaggagaatac

SEQ ID NO: 432295 - DNA, 25 bp, Artificial
  probe
  misc_feature (1)..(25): SEQ ID NO: 6208; WAN02499I; Start 15; Stop 39
ccctatcgggttgggttttacattt

SEQ ID NO: 432296 - DNA, 25 bp, Artificial
  probe
  misc_feature (1)..(25): SEQ ID NO: 6208; WAN02499I; Start 23; Stop 47
ggttgggttttacatttgataatgt

SEQ ID NO: 432297 - DNA, 25 bp, Artificial
  probe
  misc_feature (1)..(25): SEQ ID NO: 6208; WAN02499I; Start 24; Stop 48
gttgggttttacatttgataatgtt

SEQ ID NO: 432298 - DNA, 25 bp, Artificial
  probe
  misc_feature (1)..(25): SEQ ID NO: 6208; WAN02499I; Start 25; Stop 49
ttgggttttacatttgataatgtta

SEQ ID NO: 432299 - DNA, 25 bp, Artificial
  probe
  misc_feature (1)..(25): SEQ ID NO: 6208; WAN02499I; Start 26; Stop 50
tgggttttacatttgataatgttat

SEQ ID NO: 432300 - DNA, 25 bp, Artificial
  probe
  misc_feature (1)..(25): SEQ ID NO: 6209; WAN0249BH; Start 61; Stop 85
cgctacttgtccataatcctttaat

SEQ ID NO: 432301 - DNA, 25 bp, Artificial
  probe
  misc_feature (1)..(25): SEQ ID NO: 6209; WAN0249BH; Start 129; Stop 153
atttatcctagacaatgcctactgc

SEQ ID NO: 432302 - DNA, 25 bp, Artificial
  probe
  misc_feature (1)..(25): SEQ ID NO: 6209; WAN0249BH; Start 7; Stop 31
ataatactactgctaacaccaagcc

SEQ ID NO: 432303 - DNA, 25 bp, Artificial
  probe
  misc_feature (1)..(25): SEQ ID NO: 6209; WAN0249BH; Start 20; Stop 44
taacaccaagccaacttagcacatt

SEQ ID NO: 432304 - DNA, 25 bp, Artificial
  probe
  misc_feature (1)..(25): SEQ ID NO: 6209; WAN0249BH; Start 6; Stop 30
aataatactactgctaacaccaagc

SEQ ID NO: 432305 - DNA, 25 bp, Artificial
  probe
  misc_feature (1)..(25): SEQ ID NO: 6209; WAN0249BH; Start 199; Stop 223
tgggtagcctaatgatatttctagt

SEQ ID NO: 432306 - DNA, 25 bp, Artificial
  probe
  misc_feature (1)..(25): SEQ ID NO: 6209; WAN0249BH; Start 8; Stop 32
taatactactgctaacaccaagcca

SEQ ID NO: 432307 - DNA, 25 bp, Artificial
  probe
  misc_feature (1)..(25): SEQ ID NO: 6209; WAN0249BH; Start 125; Stop 149
gcttatttatcctagacaatgccta

SEQ ID NO: 432308 - DNA, 25 bp, Artificial
  probe
  misc_feature (1)..(25): SEQ ID NO: 6209; WAN0249BH; Start 62; Stop 86
gctacttgtccataatcctttaatg

SEQ ID NO: 432309 - DNA, 25 bp, Artificial
  probe
  misc_feature (1)..(25): SEQ ID NO: 6209; WAN0249BH; Start 124; Stop 148
agcttatttatcctagacaatgcct

SEQ ID NO: 432310 - DNA, 25 bp, Artificial
  probe
  misc_feature (1)..(25): SEQ ID NO: 6209; WAN0249BH; Start 128; Stop 152
tatttatcctagacaatgcctactg

SEQ ID NO: 432311 - DNA, 25 bp, Artificial
  probe
  misc_feature (1)..(25): SEQ ID NO: 6209; WAN0249BH; Start 9; Stop 33
aatactactgctaacaccaagccaa

SEQ ID NO: 432312 - DNA, 25 bp, Artificial
  probe
  misc_feature (1)..(25): SEQ ID NO: 6209; WAN0249BH; Start 265; Stop 289
ctaggacacttgttaatccaaatgt

SEQ ID NO: 432313 - DNA, 25 bp, Artificial
  probe
  misc_feature (1)..(25): SEQ ID NO: 6209; WAN0249BH; Start 200; Stop 224
gggtagcctaatgatatttctagtt

SEQ ID NO: 432314 - DNA, 25 bp, Artificial
  probe
  misc_feature (1)..(25): SEQ ID NO: 6209; WAN0249BH; Start 268; Stop 292
ggacacttgttaatccaaatgtaac

SEQ ID NO: 432315 - DNA, 25 bp, Artificial
  probe
  misc_feature (1)..(25): SEQ ID NO: 6209; WAN0249BH; Start 267; Stop 291
aggacacttgttaatccaaatgtaa

SEQ ID NO: 432316 - DNA, 25 bp, Artificial
  probe
  misc_feature (1)..(25): SEQ ID NO: 6209; WAN0249BH; Start 198; Stop 222
atgggtagcctaatgatatttctag

SEQ ID NO: 432317 - DNA, 25 bp, Artificial
  probe
  misc_feature (1)..(25): SEQ ID NO: 6209; WAN0249BH; Start 19; Stop 43
ctaacaccaagccaacttagcacat

SEQ ID NO: 432318 - DNA, 25 bp, Artificial
  probe
  misc_feature (1)..(25): SEQ ID NO: 6209; WAN0249BH; Start 123; Stop 147
tagcttatttatcctagacaatgcc

SEQ ID NO: 432319 - DNA, 25 bp, Artificial
  probe
  misc_feature (1)..(25): SEQ ID NO: 6209; WAN0249BH; Start 14; Stop 38
tactgctaacaccaagccaacttag

SEQ ID NO: 432320 - DNA, 25 bp, Artificial
  probe
  misc_feature (1)..(25): SEQ ID NO: 6209; WAN0249BH; Start 13; Stop 37
ctactgctaacaccaagccaactta

SEQ ID NO: 432321 - DNA, 25 bp, Artificial
  probe
  misc_feature (1)..(25): SEQ ID NO: 6209; WAN0249BH; Start 5; Stop 29
aaataatactactgctaacaccaag

SEQ ID NO: 432322 - DNA, 25 bp, Artificial
  probe
  misc_feature (1)..(25): SEQ ID NO: 6209; WAN0249BH; Start 10; Stop 34
atactactgctaacaccaagccaac

SEQ ID NO: 432323 - DNA, 25 bp, Artificial
  probe
  misc_feature (1)..(25): SEQ ID NO: 6209; WAN0249BH; Start 266; Stop 290
taggacacttgttaatccaaatgta

SEQ ID NO: 432324 - DNA, 25 bp, Artificial
  probe
  misc_feature (1)..(25): SEQ ID NO: 6209; WAN0249BH; Start 127; Stop 151
ttatttatcctagacaatgcctact

SEQ ID NO: 432325 - DNA, 25 bp, Artificial
  probe
  misc_feature (1)..(25): SEQ ID NO: 6209; WAN0249BH; Start 65; Stop 89
acttgtccataatcctttaatgttt

SEQ ID NO: 432326 - DNA, 25 bp, Artificial
  probe
  misc_feature (1)..(25): SEQ ID NO: 6209; WAN0249BH; Start 196; Stop 220
atatgggtagcctaatgatatttct

SEQ ID NO: 432327 - DNA, 25 bp, Artificial
  probe
  misc_feature (1)..(25): SEQ ID NO: 6209; WAN0249BH; Start 32; Stop 56
aacttagcacattgcatcacctaat

SEQ ID NO: 432328 - DNA, 25 bp, Artificial
  probe
  misc_feature (1)..(25): SEQ ID NO: 6209; WAN0249BH; Start 156; Stop 180
cagtataaataagattcatcagcca

SEQ ID NO: 432329 - DNA, 25 bp, Artificial
  probe
  misc_feature (1)..(25): SEQ ID NO: 6209; WAN0249BH; Start 155; Stop 179
acagtataaataagattcatcagcc

SEQ ID NO: 432330 - DNA, 25 bp, Artificial
  probe
  misc_feature (1)..(25): SEQ ID NO: 6209; WAN0249BH; Start 126; Stop 150
cttatttatcctagacaatgcctac

SEQ ID NO: 432331 - DNA, 25 bp, Artificial
  probe
  misc_feature (1)..(25): SEQ ID NO: 6209; WAN0249BH; Start 33; Stop 57
acttagcacattgcatcacctaatc

SEQ ID NO: 432332 - DNA, 25 bp, Artificial
  probe
  misc_feature (1)..(25): SEQ ID NO: 6209; WAN0249BH; Start 131; Stop 155
ttatcctagacaatgcctactgcaa

SEQ ID NO: 432333 - DNA, 25 bp, Artificial
  probe
  misc_feature (1)..(25): SEQ ID NO: 6210; WAN0249CU; Start 30; Stop 54
gagtttcttcacgggaggtatctct

SEQ ID NO: 432334 - DNA, 25 bp, Artificial
  probe
  misc_feature (1)..(25): SEQ ID NO: 6210; WAN0249CU; Start 29; Stop 53
ggagtttcttcacgggaggtatctc

SEQ ID NO: 432335 - DNA, 25 bp, Artificial
  probe
  misc_feature (1)..(25): SEQ ID NO: 6210; WAN0249CU; Start 1; Stop 25
ttaaaattctccctccccttttgga

SEQ ID NO: 432336 - DNA, 25 bp, Artificial
  probe
  misc_feature (1)..(25): SEQ ID NO: 6210; WAN0249CU; Start 18; Stop 42
cttttggagagggagtttcttcacg

SEQ ID NO: 432337 - DNA, 25 bp, Artificial
  probe
  misc_feature (1)..(25): SEQ ID NO: 6210; WAN0249CU; Start 17; Stop 41
ccttttggagagggagtttcttcac

SEQ ID NO: 432338 - DNA, 25 bp, Artificial
  probe
  misc_feature (1)..(25): SEQ ID NO: 6210; WAN0249CU; Start 19; Stop 43
ttttggagagggagtttcttcacgg

SEQ ID NO: 432339 - DNA, 25 bp, Artificial
  probe
  misc_feature (1)..(25): SEQ ID NO: 6210; WAN0249CU; Start 2; Stop 26
taaaattctccctccccttttggag

SEQ ID NO: 432340 - DNA, 25 bp, Artificial
  probe
  misc_feature (1)..(25): SEQ ID NO: 6211; WAN02496U; Start 40; Stop 64
tgtgagttattcaaacctgctacta

SEQ ID NO: 432341 - DNA, 25 bp, Artificial
  probe
  misc_feature (1)..(25): SEQ ID NO: 6211; WAN02496U; Start 39; Stop 63
atgtgagttattcaaacctgctact

SEQ ID NO: 432342 - DNA, 25 bp, Artificial
  probe
  misc_feature (1)..(25): SEQ ID NO: 6211; WAN02496U; Start 38; Stop 62
aatgtgagttattcaaacctgctac

SEQ ID NO: 432343 - DNA, 25 bp, Artificial
  probe
  misc_feature (1)..(25): SEQ ID NO: 6211; WAN02496U; Start 41; Stop 65
gtgagttattcaaacctgctactac

SEQ ID NO: 432344 - DNA, 25 bp, Artificial
  probe
  misc_feature (1)..(25): SEQ ID NO: 6211; WAN02496U; Start 37; Stop 61
gaatgtgagttattcaaacctgcta

SEQ ID NO: 432345 - DNA, 25 bp, Artificial
  probe
  misc_feature (1)..(25): SEQ ID NO: 6211; WAN02496U; Start 36; Stop 60
tgaatgtgagttattcaaacctgct

SEQ ID NO: 432346 - DNA, 25 bp, Artificial
  probe
  misc_feature (1)..(25): SEQ ID NO: 6212; WAN02496H; Start 31; Stop 55
tttgtgtaccttatggctgactttt

SEQ ID NO: 432347 - DNA, 25 bp, Artificial
  probe
  misc_feature (1)..(25): SEQ ID NO: 6212; WAN02496H; Start 30; Stop 54
ttttgtgtaccttatggctgacttt

SEQ ID NO: 432348 - DNA, 25 bp, Artificial
  probe
  misc_feature (1)..(25): SEQ ID NO: 6212; WAN02496H; Start 32; Stop 56
ttgtgtaccttatggctgacttttc

SEQ ID NO: 432349 - DNA, 25 bp, Artificial
  probe
  misc_feature (1)..(25): SEQ ID NO: 6212; WAN02496H; Start 35; Stop 59
tgtaccttatggctgacttttcaaa

SEQ ID NO: 432350 - DNA, 25 bp, Artificial
  probe
  misc_feature (1)..(25): SEQ ID NO: 6212; WAN02496H; Start 34; Stop 58
gtgtaccttatggctgacttttcaa

SEQ ID NO: 432351 - DNA, 25 bp, Artificial
  probe
  misc_feature (1)..(25): SEQ ID NO: 6212; WAN02496H; Start 6; Stop 30
gttcgtatgctaaaatactaccctt

SEQ ID NO: 432352 - DNA, 25 bp, Artificial
  probe
  misc_feature (1)..(25): SEQ ID NO: 6212; WAN02496H; Start 5; Stop 29
ggttcgtatgctaaaatactaccct

SEQ ID NO: 432353 - DNA, 25 bp, Artificial
  probe
  misc_feature (1)..(25): SEQ ID NO: 6212; WAN02496H; Start 3; Stop 27
agggttcgtatgctaaaatactacc

SEQ ID NO: 432354 - DNA, 25 bp, Artificial
  probe
  misc_feature (1)..(25): SEQ ID NO: 6212; WAN02496H; Start 33; Stop 57
tgtgtaccttatggctgacttttca

SEQ ID NO: 432355 - DNA, 25 bp, Artificial
  probe
  misc_feature (1)..(25): SEQ ID NO: 6212; WAN02496H; Start 8; Stop 32
tcgtatgctaaaatactaccctttt

SEQ ID NO: 432356 - DNA, 25 bp, Artificial
  probe
  misc_feature (1)..(25): SEQ ID NO: 6212; WAN02496H; Start 7; Stop 31
ttcgtatgctaaaatactacccttt

SEQ ID NO: 432357 - DNA, 25 bp, Artificial
  probe
  misc_feature (1)..(25): SEQ ID NO: 6212; WAN02496H; Start 2; Stop 26
tagggttcgtatgctaaaatactac

SEQ ID NO: 432358 - DNA, 25 bp, Artificial
  probe
  misc_feature (1)..(25): SEQ ID NO: 6212; WAN02496H; Start 1; Stop 25
ttagggttcgtatgctaaaatacta

SEQ ID NO: 432359 - DNA, 25 bp, Artificial
  probe
  misc_feature (1)..(25): SEQ ID NO: 6213; WAN02496J; Start 65; Stop 89
agaggagattatttacaaaggggtt

SEQ ID NO: 432360 - DNA, 25 bp, Artificial
  probe
  misc_feature (1)..(25): SEQ ID NO: 6213; WAN02496J; Start 64; Stop 88
aagaggagattatttacaaaggggt

SEQ ID NO: 432361 - DNA, 25 bp, Artificial
  probe
  misc_feature (1)..(25): SEQ ID NO: 6213; WAN02496J; Start 66; Stop 90
gaggagattatttacaaaggggttt

SEQ ID NO: 432362 - DNA, 25 bp, Artificial
  probe
  misc_feature (1)..(25): SEQ ID NO: 6213; WAN02496J; Start 63; Stop 87
taagaggagattatttacaaagggg

SEQ ID NO: 432363 - DNA, 25 bp, Artificial
  probe
  misc_feature (1)..(25): SEQ ID NO: 6213; WAN02496J; Start 62; Stop 86
ataagaggagattatttacaaaggg

SEQ ID NO: 432364 - DNA, 25 bp, Artificial
  probe
  misc_feature (1)..(25): SEQ ID NO: 6213; WAN02496J; Start 33; Stop 57
agttgtcattttcctctaattttga

SEQ ID NO: 432365 - DNA, 25 bp, Artificial
  probe
  misc_feature (1)..(25): SEQ ID NO: 6213; WAN02496J; Start 67; Stop 91
aggagattatttacaaaggggtttg

SEQ ID NO: 432366 - DNA, 25 bp, Artificial
  probe
  misc_feature (1)..(25): SEQ ID NO: 6213; WAN02496J; Start 32; Stop 56
aagttgtcattttcctctaattttg

SEQ ID NO: 432367 - DNA, 25 bp, Artificial
  probe
  misc_feature (1)..(25): SEQ ID NO: 6213; WAN02496J; Start 34; Stop 58
gttgtcattttcctctaattttgat

SEQ ID NO: 432368 - DNA, 25 bp, Artificial
  probe
  misc_feature (1)..(25): SEQ ID NO: 6213; WAN02496J; Start 31; Stop 55
taagttgtcattttcctctaatttt

SEQ ID NO: 432369 - DNA, 25 bp, Artificial
  probe
  misc_feature (1)..(25): SEQ ID NO: 6213; WAN02496J; Start 30; Stop 54
ttaagttgtcattttcctctaattt

SEQ ID NO: 432370 - DNA, 25 bp, Artificial
  probe
  misc_feature (1)..(25): SEQ ID NO: 6213; WAN02496J; Start 27; Stop 51
aaattaagttgtcattttcctctaa

SEQ ID NO: 432371 - DNA, 25 bp, Artificial
  probe
  misc_feature (1)..(25): SEQ ID NO: 6214; WAN02498H; Start 27; Stop 51
ttacttacggaataggctagtgctg

SEQ ID NO: 432372 - DNA, 25 bp, Artificial
  probe
  misc_feature (1)..(25): SEQ ID NO: 6214; WAN02498H; Start 35; Stop 59
ggaataggctagtgctgtgtctcta

SEQ ID NO: 432373 - DNA, 25 bp, Artificial
  probe
  misc_feature (1)..(25): SEQ ID NO: 6214; WAN02498H; Start 28; Stop 52
tacttacggaataggctagtgctgt

SEQ ID NO: 432374 - DNA, 25 bp, Artificial
  probe
  misc_feature (1)..(25): SEQ ID NO: 6214; WAN02498H; Start 36; Stop 60
gaataggctagtgctgtgtctctag

SEQ ID NO: 432375 - DNA, 25 bp, Artificial
  probe
  misc_feature (1)..(25): SEQ ID NO: 6214; WAN02498H; Start 25; Stop 49
ctttacttacggaataggctagtgc

SEQ ID NO: 432376 - DNA, 25 bp, Artificial
  probe
  misc_feature (1)..(25): SEQ ID NO: 6214; WAN02498H; Start 24; Stop 48
gctttacttacggaataggctagtg

SEQ ID NO: 432377 - DNA, 25 bp, Artificial
  probe
  misc_feature (1)..(25): SEQ ID NO: 6214; WAN02498H; Start 26; Stop 50
tttacttacggaataggctagtgct

SEQ ID NO: 432378 - DNA, 25 bp, Artificial
  probe
  misc_feature (1)..(25): SEQ ID NO: 6214; WAN02498H; Start 31; Stop 55
ttacggaataggctagtgctgtgtc

SEQ ID NO: 432379 - DNA, 25 bp, Artificial
  probe
  misc_feature (1)..(25): SEQ ID NO: 6214; WAN02498H; Start 30; Stop 54
cttacggaataggctagtgctgtgt

SEQ ID NO: 432380 - DNA, 25 bp, Artificial
  probe
  misc_feature (1)..(25): SEQ ID NO: 6214; WAN02498H; Start 29; Stop 53
acttacggaataggctagtgctgtg

SEQ ID NO: 432381 - DNA, 25 bp, Artificial
  probe
  misc_feature (1)..(25): SEQ ID NO: 6214; WAN02498H; Start 43; Stop 67
ctagtgctgtgtctctagcctattt

SEQ ID NO: 432382 - DNA, 25 bp, Artificial
  probe
  misc_feature (1)..(25): SEQ ID NO: 6214; WAN02498H; Start 23; Stop 47
agctttacttacggaataggctagt

SEQ ID NO: 432383 - DNA, 25 bp, Artificial
  probe
  misc_feature (1)..(25): SEQ ID NO: 6214; WAN02498H; Start 20; Stop 44
agtagctttacttacggaataggct

SEQ ID NO: 432384 - DNA, 25 bp, Artificial
  probe
  misc_feature (1)..(25): SEQ ID NO: 6214; WAN02498H; Start 32; Stop 56
tacggaataggctagtgctgtgtct

SEQ ID NO: 432385 - DNA, 25 bp, Artificial
  probe
  misc_feature (1)..(25): SEQ ID NO: 6214; WAN02498H; Start 47; Stop 71
tgctgtgtctctagcctattttaat

SEQ ID NO: 432386 - DNA, 25 bp, Artificial
  probe
  misc_feature (1)..(25): SEQ ID NO: 6214; WAN02498H; Start 46; Stop 70
gtgctgtgtctctagcctattttaa

SEQ ID NO: 432387 - DNA, 25 bp, Artificial
  probe
  misc_feature (1)..(25): SEQ ID NO: 6214; WAN02498H; Start 21; Stop 45
gtagctttacttacggaataggcta

SEQ ID NO: 432388 - DNA, 25 bp, Artificial
  probe
  misc_feature (1)..(25): SEQ ID NO: 6214; WAN02498H; Start 22; Stop 46
tagctttacttacggaataggctag

SEQ ID NO: 432389 - DNA, 25 bp, Artificial
  probe
  misc_feature (1)..(25): SEQ ID NO: 6214; WAN02498H; Start 45; Stop 69
agtgctgtgtctctagcctatttta

SEQ ID NO: 432390 - DNA, 25 bp, Artificial
  probe
  misc_feature (1)..(25): SEQ ID NO: 6214; WAN02498H; Start 44; Stop 68
tagtgctgtgtctctagcctatttt

SEQ ID NO: 432391 - DNA, 25 bp, Artificial
  probe
  misc_feature (1)..(25): SEQ ID NO: 6214; WAN02498H; Start 19; Stop 43
aagtagctttacttacggaataggc

SEQ ID NO: 432392 - DNA, 25 bp, Artificial
  probe
  misc_feature (1)..(25): SEQ ID NO: 6214; WAN02498H; Start 48; Stop 72
gctgtgtctctagcctattttaata

SEQ ID NO: 432393 - DNA, 25 bp, Artificial
  probe
  misc_feature (1)..(25): SEQ ID NO: 6214; WAN02498H; Start 49; Stop 73
ctgtgtctctagcctattttaataa

SEQ ID NO: 432394 - DNA, 25 bp, Artificial
  probe
  misc_feature (1)..(25): SEQ ID NO: 6214; WAN02498H; Start 50; Stop 74
tgtgtctctagcctattttaataat

SEQ ID NO: 432395 - DNA, 25 bp, Artificial
  probe
  misc_feature (1)..(25): SEQ ID NO: 6215; WAN02498O; Start 59; Stop 83
tatcccagtcccatctctatttctt

SEQ ID NO: 432396 - DNA, 25 bp, Artificial
  probe
  misc_feature (1)..(25): SEQ ID NO: 6215; WAN02498O; Start 58; Stop 82
ttatcccagtcccatctctatttct

SEQ ID NO: 432397 - DNA, 25 bp, Artificial
  probe
  misc_feature (1)..(25): SEQ ID NO: 6215; WAN02498O; Start 61; Stop 85
tcccagtcccatctctatttcttta

SEQ ID NO: 432398 - DNA, 25 bp, Artificial
  probe
  misc_feature (1)..(25): SEQ ID NO: 6215; WAN02498O; Start 56; Stop 80
cattatcccagtcccatctctattt

SEQ ID NO: 432399 - DNA, 25 bp, Artificial
  probe
  misc_feature (1)..(25): SEQ ID NO: 6215; WAN02498O; Start 62; Stop 86
cccagtcccatctctatttctttat

SEQ ID NO: 432400 - DNA, 25 bp, Artificial
  probe
  misc_feature (1)..(25): SEQ ID NO: 6215; WAN02498O; Start 57; Stop 81
attatcccagtcccatctctatttc

SEQ ID NO: 432401 - DNA, 25 bp, Artificial
  probe
  misc_feature (1)..(25): SEQ ID NO: 6215; WAN02498O; Start 60; Stop 84
atcccagtcccatctctatttcttt

SEQ ID NO: 432402 - DNA, 25 bp, Artificial
  probe
  misc_feature (1)..(25): SEQ ID NO: 6215; WAN02498O; Start 55; Stop 79
gcattatcccagtcccatctctatt

SEQ ID NO: 432403 - DNA, 25 bp, Artificial
  probe
  misc_feature (1)..(25): SEQ ID NO: 6215; WAN02498O; Start 84; Stop 108
tattcaatgagttgtatcacagaac

SEQ ID NO: 432404 - DNA, 25 bp, Artificial
  probe
  misc_feature (1)..(25): SEQ ID NO: 6215; WAN02498O; Start 63; Stop 87
ccagtcccatctctatttctttatt

SEQ ID NO: 432405 - DNA, 25 bp, Artificial
  probe
  misc_feature (1)..(25): SEQ ID NO: 6215; WAN02498O; Start 86; Stop 110
ttcaatgagttgtatcacagaactt

SEQ ID NO: 432406 - DNA, 25 bp, Artificial
  probe
  misc_feature (1)..(25): SEQ ID NO: 6215; WAN02498O; Start 85; Stop 109
attcaatgagttgtatcacagaact

SEQ ID NO: 432407 - DNA, 25 bp, Artificial
  probe
  misc_feature (1)..(25): SEQ ID NO: 6215; WAN02498O; Start 83; Stop 107
ttattcaatgagttgtatcacagaa

SEQ ID NO: 432408 - DNA, 25 bp, Artificial
  probe
  misc_feature (1)..(25): SEQ ID NO: 6215; WAN02498O; Start 65; Stop 89
agtcccatctctatttctttattca

SEQ ID NO: 432409 - DNA, 25 bp, Artificial
  probe
  misc_feature (1)..(25): SEQ ID NO: 6215; WAN02498O; Start 64; Stop 88
cagtcccatctctatttctttattc

SEQ ID NO: 432410 - DNA, 25 bp, Artificial
  probe
  misc_feature (1)..(25): SEQ ID NO: 6215; WAN02498O; Start 54; Stop 78
ggcattatcccagtcccatctctat

SEQ ID NO: 432411 - DNA, 25 bp, Artificial
  probe
  misc_feature (1)..(25): SEQ ID NO: 6215; WAN02498O; Start 66; Stop 90
gtcccatctctatttctttattcaa

SEQ ID NO: 432412 - DNA, 25 bp, Artificial
  probe
  misc_feature (1)..(25): SEQ ID NO: 6215; WAN02498O; Start 87; Stop 111
tcaatgagttgtatcacagaacttt

SEQ ID NO: 432413 - DNA, 25 bp, Artificial
  probe
  misc_feature (1)..(25): SEQ ID NO: 6215; WAN02498O; Start 82; Stop 106
tttattcaatgagttgtatcacaga

SEQ ID NO: 432414 - DNA, 25 bp, Artificial
  probe
  misc_feature (1)..(25): SEQ ID NO: 6215; WAN02498O; Start 80; Stop 104
tctttattcaatgagttgtatcaca

SEQ ID NO: 432415 - DNA, 25 bp, Artificial
  probe
  misc_feature (1)..(25): SEQ ID NO: 6215; WAN02498O; Start 91; Stop 115
tgagttgtatcacagaactttagaa

SEQ ID NO: 432416 - DNA, 25 bp, Artificial
  probe
  misc_feature (1)..(25): SEQ ID NO: 6215; WAN02498O; Start 81; Stop 105
ctttattcaatgagttgtatcacag

SEQ ID NO: 432417 - DNA, 25 bp, Artificial
  probe
  misc_feature (1)..(25): SEQ ID NO: 6215; WAN02498O; Start 90; Stop 114
atgagttgtatcacagaactttaga

SEQ ID NO: 432418 - DNA, 25 bp, Artificial
  probe
  misc_feature (1)..(25): SEQ ID NO: 6215; WAN02498O; Start 68; Stop 92
cccatctctatttctttattcaatg

SEQ ID NO: 432419 - DNA, 25 bp, Artificial
  probe
  misc_feature (1)..(25): SEQ ID NO: 6215; WAN02498O; Start 67; Stop 91
tcccatctctatttctttattcaat

SEQ ID NO: 432420 - DNA, 25 bp, Artificial
  probe
  misc_feature (1)..(25): SEQ ID NO: 6215; WAN02498O; Start 88; Stop 112
caatgagttgtatcacagaacttta

SEQ ID NO: 432421 - DNA, 25 bp, Artificial
  probe
  misc_feature (1)..(25): SEQ ID NO: 6215; WAN02498O; Start 79; Stop 103
ttctttattcaatgagttgtatcac

SEQ ID NO: 432422 - DNA, 25 bp, Artificial
  probe
  misc_feature (1)..(25): SEQ ID NO: 6215; WAN02498O; Start 92; Stop 116
gagttgtatcacagaactttagaaa

SEQ ID NO: 432423 - DNA, 25 bp, Artificial
  probe
  misc_feature (1)..(25): SEQ ID NO: 6215; WAN02498O; Start 89; Stop 113
aatgagttgtatcacagaactttag

SEQ ID NO: 432424 - DNA, 25 bp, Artificial
  probe
  misc_feature (1)..(25): SEQ ID NO: 6215; WAN02498O; Start 94; Stop 118
gttgtatcacagaactttagaaatt

SEQ ID NO: 432425 - DNA, 25 bp, Artificial
  probe
  misc_feature (1)..(25): SEQ ID NO: 6215; WAN02498O; Start 93; Stop 117
agttgtatcacagaactttagaaat

SEQ ID NO: 432426 - DNA, 25 bp, Artificial
  probe
  misc_feature (1)..(25): SEQ ID NO: 6215; WAN02498O; Start 78; Stop 102
tttctttattcaatgagttgtatca

SEQ ID NO: 432427 - DNA, 25 bp, Artificial
  probe
  misc_feature (1)..(25): SEQ ID NO: 6215; WAN02498O; Start 53; Stop 77
gggcattatcccagtcccatctcta

SEQ ID NO: 432428 - DNA, 25 bp, Artificial
  probe
  misc_feature (1)..(25): SEQ ID NO: 6215; WAN02498O; Start 125; Stop 149
tgacaagaatttactattctgtttt

SEQ ID NO: 432429 - DNA, 25 bp, Artificial
  probe
  misc_feature (1)..(25): SEQ ID NO: 6216; WAN02499H; Start 2; Stop 26
tccttagattaggtactacataaca

SEQ ID NO: 432430 - DNA, 25 bp, Artificial
  probe
  misc_feature (1)..(25): SEQ ID NO: 6216; WAN02499H; Start 3; Stop 27
ccttagattaggtactacataacaa

SEQ ID NO: 432431 - DNA, 25 bp, Artificial
  probe
  misc_feature (1)..(25): SEQ ID NO: 6216; WAN02499H; Start 61; Stop 85
attgcaactttcttctcaggtaatg

SEQ ID NO: 432432 - DNA, 25 bp, Artificial
  probe
  misc_feature (1)..(25): SEQ ID NO: 6216; WAN02499H; Start 60; Stop 84
cattgcaactttcttctcaggtaat

SEQ ID NO: 432433 - DNA, 25 bp, Artificial
  probe
  misc_feature (1)..(25): SEQ ID NO: 6216; WAN02499H; Start 54; Stop 78
aaacaacattgcaactttcttctca

SEQ ID NO: 432434 - DNA, 25 bp, Artificial
  probe
  misc_feature (1)..(25): SEQ ID NO: 6216; WAN02499H; Start 55; Stop 79
aacaacattgcaactttcttctcag

SEQ ID NO: 432435 - DNA, 25 bp, Artificial
  probe
  misc_feature (1)..(25): SEQ ID NO: 6216; WAN02499H; Start 59; Stop 83
acattgcaactttcttctcaggtaa

SEQ ID NO: 432436 - DNA, 25 bp, Artificial
  probe
  misc_feature (1)..(25): SEQ ID NO: 6216; WAN02499H; Start 58; Stop 82
aacattgcaactttcttctcaggta

SEQ ID NO: 432437 - DNA, 25 bp, Artificial
  probe
  misc_feature (1)..(25): SEQ ID NO: 6216; WAN02499H; Start 31; Stop 55
ttttaaattcaaacccgcaccaaaa

SEQ ID NO: 432438 - DNA, 25 bp, Artificial
  probe
  misc_feature (1)..(25): SEQ ID NO: 6216; WAN02499H; Start 1; Stop 25
ttccttagattaggtactacataac

SEQ ID NO: 432439 - DNA, 25 bp, Artificial
  probe
  misc_feature (1)..(25): SEQ ID NO: 6216; WAN02499H; Start 57; Stop 81
caacattgcaactttcttctcaggt

SEQ ID NO: 432440 - DNA, 25 bp, Artificial
  probe
  misc_feature (1)..(25): SEQ ID NO: 6216; WAN02499H; Start 56; Stop 80
acaacattgcaactttcttctcagg

SEQ ID NO: 432441 - DNA, 25 bp, Artificial
  probe
  misc_feature (1)..(25): SEQ ID NO: 6216; WAN02499H; Start 53; Stop 77
aaaacaacattgcaactttcttctc

SEQ ID NO: 432442 - DNA, 25 bp, Artificial
  probe
  misc_feature (1)..(25): SEQ ID NO: 6217; WAN0249CJ; Start 8; Stop 32
tctagtggaatgaatctggaatagt

SEQ ID NO: 432443 - DNA, 25 bp, Artificial
  probe
  misc_feature (1)..(25): SEQ ID NO: 6217; WAN0249CJ; Start 9; Stop 33
ctagtggaatgaatctggaatagtc

SEQ ID NO: 432444 - DNA, 25 bp, Artificial
  probe
  misc_feature (1)..(25): SEQ ID NO: 6217; WAN0249CJ; Start 10; Stop 34
tagtggaatgaatctggaatagtcc

SEQ ID NO: 432445 - DNA, 25 bp, Artificial
  probe
  misc_feature (1)..(25): SEQ ID NO: 6217; WAN0249CJ; Start 7; Stop 31
atctagtggaatgaatctggaatag

SEQ ID NO: 432446 - DNA, 25 bp, Artificial
  probe
  misc_feature (1)..(25): SEQ ID NO: 6217; WAN0249CJ; Start 6; Stop 30
aatctagtggaatgaatctggaata

SEQ ID NO: 432447 - DNA, 25 bp, Artificial
  probe
  misc_feature (1)..(25): SEQ ID NO: 6217; WAN0249CJ; Start 3; Stop 27
cgaaatctagtggaatgaatctgga

SEQ ID NO: 432448 - DNA, 25 bp, Artificial
  probe
  misc_feature (1)..(25): SEQ ID NO: 6217; WAN0249CJ; Start 4; Stop 28
gaaatctagtggaatgaatctggaa

SEQ ID NO: 432449 - DNA, 25 bp, Artificial
  probe
  misc_feature (1)..(25): SEQ ID NO: 6217; WAN0249CJ; Start 5; Stop 29
aaatctagtggaatgaatctggaat

SEQ ID NO: 432450 - DNA, 25 bp, Artificial
  probe
  misc_feature (1)..(25): SEQ ID NO: 6217; WAN0249CJ; Start 2; Stop 26
tcgaaatctagtggaatgaatctgg

SEQ ID NO: 432451 - DNA, 25 bp, Artificial
  probe
  misc_feature (1)..(25): SEQ ID NO: 6217; WAN0249CJ; Start 31; Stop 55
gtccatcgagctttctaatactctt

SEQ ID NO: 432452 - DNA, 25 bp, Artificial
  probe
  misc_feature (1)..(25): SEQ ID NO: 6217; WAN0249CJ; Start 29; Stop 53
tagtccatcgagctttctaatactc

SEQ ID NO: 432453 - DNA, 25 bp, Artificial
  probe
  misc_feature (1)..(25): SEQ ID NO: 6217; WAN0249CJ; Start 30; Stop 54
agtccatcgagctttctaatactct

SEQ ID NO: 432454 - DNA, 25 bp, Artificial
  probe
  misc_feature (1)..(25): SEQ ID NO: 6217; WAN0249CJ; Start 27; Stop 51
aatagtccatcgagctttctaatac

SEQ ID NO: 432455 - DNA, 25 bp, Artificial
  probe
  misc_feature (1)..(25): SEQ ID NO: 6217; WAN0249CJ; Start 28; Stop 52
atagtccatcgagctttctaatact

SEQ ID NO: 432456 - DNA, 25 bp, Artificial
  probe
  misc_feature (1)..(25): SEQ ID NO: 6217; WAN0249CJ; Start 26; Stop 50
gaatagtccatcgagctttctaata

SEQ ID NO: 432457 - DNA, 25 bp, Artificial
  probe
  misc_feature (1)..(25): SEQ ID NO: 6217; WAN0249CJ; Start 25; Stop 49
ggaatagtccatcgagctttctaat

SEQ ID NO: 432458 - DNA, 25 bp, Artificial
  probe
  misc_feature (1)..(25): SEQ ID NO: 6217; WAN0249CJ; Start 13; Stop 37
tggaatgaatctggaatagtccatc

SEQ ID NO: 432459 - DNA, 25 bp, Artificial
  probe
  misc_feature (1)..(25): SEQ ID NO: 6217; WAN0249CJ; Start 12; Stop 36
gtggaatgaatctggaatagtccat

SEQ ID NO: 432460 - DNA, 25 bp, Artificial
  probe
  misc_feature (1)..(25): SEQ ID NO: 6217; WAN0249CJ; Start 16; Stop 40
aatgaatctggaatagtccatcgag

SEQ ID NO: 432461 - DNA, 25 bp, Artificial
  probe
  misc_feature (1)..(25): SEQ ID NO: 6217; WAN0249CJ; Start 15; Stop 39
gaatgaatctggaatagtccatcga

SEQ ID NO: 432462 - DNA, 25 bp, Artificial
  probe
  misc_feature (1)..(25): SEQ ID NO: 6217; WAN0249CJ; Start 14; Stop 38
ggaatgaatctggaatagtccatcg

SEQ ID NO: 432463 - DNA, 25 bp, Artificial
  probe
  misc_feature (1)..(25): SEQ ID NO: 6217; WAN0249CJ; Start 11; Stop 35
agtggaatgaatctggaatagtcca

SEQ ID NO: 432464 - DNA, 25 bp, Artificial
  probe
  misc_feature (1)..(25): SEQ ID NO: 6217; WAN0249CJ; Start 1; Stop 25
ttcgaaatctagtggaatgaatctg

SEQ ID NO: 432465 - DNA, 25 bp, Artificial
  probe
  misc_feature (1)..(25): SEQ ID NO: 6217; WAN0249CJ; Start 19; Stop 43
gaatctggaatagtccatcgagctt

SEQ ID NO: 432466 - DNA, 25 bp, Artificial
  probe
  misc_feature (1)..(25): SEQ ID NO: 6217; WAN0249CJ; Start 17; Stop 41
atgaatctggaatagtccatcgagc

SEQ ID NO: 432467 - DNA, 25 bp, Artificial
  probe
  misc_feature (1)..(25): SEQ ID NO: 6217; WAN0249CJ; Start 24; Stop 48
tggaatagtccatcgagctttctaa

SEQ ID NO: 432468 - DNA, 25 bp, Artificial
  probe
  misc_feature (1)..(25): SEQ ID NO: 6217; WAN0249CJ; Start 18; Stop 42
tgaatctggaatagtccatcgagct

SEQ ID NO: 432469 - DNA, 25 bp, Artificial
  probe
  misc_feature (1)..(25): SEQ ID NO: 6217; WAN0249CJ; Start 23; Stop 47
ctggaatagtccatcgagctttcta

SEQ ID NO: 432470 - DNA, 25 bp, Artificial
  probe
  misc_feature (1)..(25): SEQ ID NO: 6217; WAN0249CJ; Start 20; Stop 44
aatctggaatagtccatcgagcttt

SEQ ID NO: 432471 - DNA, 25 bp, Artificial
  probe
  misc_feature (1)..(25): SEQ ID NO: 6217; WAN0249CJ; Start 21; Stop 45
atctggaatagtccatcgagctttc

SEQ ID NO: 432472 - DNA, 25 bp, Artificial
  probe
  misc_feature (1)..(25): SEQ ID NO: 6217; WAN0249CJ; Start 22; Stop 46
tctggaatagtccatcgagctttct

SEQ ID NO: 432473 - DNA, 25 bp, Artificial
  probe
  misc_feature (1)..(25): SEQ ID NO: 6218; WAN02496K; Start 90; Stop 114
tttattatgttctttaaggaggtgt

SEQ ID NO: 432474 - DNA, 25 bp, Artificial
  probe
  misc_feature (1)..(25): SEQ ID NO: 6218; WAN02496K; Start 89; Stop 113
gtttattatgttctttaaggaggtg

SEQ ID NO: 432475 - DNA, 25 bp, Artificial
  probe
  misc_feature (1)..(25): SEQ ID NO: 6218; WAN02496K; Start 93; Stop 117
attatgttctttaaggaggtgtaaa

SEQ ID NO: 432476 - DNA, 25 bp, Artificial
  probe
  misc_feature (1)..(25): SEQ ID NO: 6218; WAN02496K; Start 88; Stop 112
agtttattatgttctttaaggaggt

SEQ ID NO: 432477 - DNA, 25 bp, Artificial
  probe
  misc_feature (1)..(25): SEQ ID NO: 6218; WAN02496K; Start 8; Stop 32
cctcctttacttttgcatacctaga

SEQ ID NO: 432478 - DNA, 25 bp, Artificial
  probe
  misc_feature (1)..(25): SEQ ID NO: 6218; WAN02496K; Start 7; Stop 31
acctcctttacttttgcatacctag

SEQ ID NO: 432479 - DNA, 25 bp, Artificial
  probe
  misc_feature (1)..(25): SEQ ID NO: 6218; WAN02496K; Start 5; Stop 29
atacctcctttacttttgcatacct

SEQ ID NO: 432480 - DNA, 25 bp, Artificial
  probe
  misc_feature (1)..(25): SEQ ID NO: 6218; WAN02496K; Start 6; Stop 30
tacctcctttacttttgcataccta

SEQ ID NO: 432481 - DNA, 25 bp, Artificial
  probe
  misc_feature (1)..(25): SEQ ID NO: 6218; WAN02496K; Start 9; Stop 33
ctcctttacttttgcatacctagat

SEQ ID NO: 432482 - DNA, 25 bp, Artificial
  probe
  misc_feature (1)..(25): SEQ ID NO: 6218; WAN02496K; Start 4; Stop 28
tatacctcctttacttttgcatacc

SEQ ID NO: 432483 - DNA, 25 bp, Artificial
  probe
  misc_feature (1)..(25): SEQ ID NO: 6218; WAN02496K; Start 92; Stop 116
tattatgttctttaaggaggtgtaa

SEQ ID NO: 432484 - DNA, 25 bp, Artificial
  probe
  misc_feature (1)..(25): SEQ ID NO: 6218; WAN02496K; Start 91; Stop 115
ttattatgttctttaaggaggtgta

SEQ ID NO: 432485 - DNA, 25 bp, Artificial
  probe
  misc_feature (1)..(25): SEQ ID NO: 6218; WAN02496K; Start 95; Stop 119
tatgttctttaaggaggtgtaaaac

SEQ ID NO: 432486 - DNA, 25 bp, Artificial
  probe
  misc_feature (1)..(25): SEQ ID NO: 6218; WAN02496K; Start 10; Stop 34
tcctttacttttgcatacctagatt

SEQ ID NO: 432487 - DNA, 25 bp, Artificial
  probe
  misc_feature (1)..(25): SEQ ID NO: 6218; WAN02496K; Start 1; Stop 25
ttctatacctcctttacttttgcat

SEQ ID NO: 432488 - DNA, 25 bp, Artificial
  probe
  misc_feature (1)..(25): SEQ ID NO: 6218; WAN02496K; Start 3; Stop 27
ctatacctcctttacttttgcatac

SEQ ID NO: 432489 - DNA, 25 bp, Artificial
  probe
  misc_feature (1)..(25): SEQ ID NO: 6218; WAN02496K; Start 87; Stop 111
aagtttattatgttctttaaggagg

SEQ ID NO: 432490 - DNA, 25 bp, Artificial
  probe
  misc_feature (1)..(25): SEQ ID NO: 6218; WAN02496K; Start 94; Stop 118
ttatgttctttaaggaggtgtaaaa

SEQ ID NO: 432491 - DNA, 25 bp, Artificial
  probe
  misc_feature (1)..(25): SEQ ID NO: 6218; WAN02496K; Start 2; Stop 26
tctatacctcctttacttttgcata

SEQ ID NO: 432492 - DNA, 25 bp, Artificial
  probe
  misc_feature (1)..(25): SEQ ID NO: 6218; WAN02496K; Start 11; Stop 35
cctttacttttgcatacctagatta

SEQ ID NO: 432493 - DNA, 25 bp, Artificial
  probe
  misc_feature (1)..(25): SEQ ID NO: 6219; WAN02499Y; Start 102; Stop 126
aattgttctggattactgaggatgc

SEQ ID NO: 432494 - DNA, 25 bp, Artificial
  probe
  misc_feature (1)..(25): SEQ ID NO: 6219; WAN02499Y; Start 34; Stop 58
tattgttcagatagtcggcatgtaa

SEQ ID NO: 432495 - DNA, 25 bp, Artificial
  probe
  misc_feature (1)..(25): SEQ ID NO: 6219; WAN02499Y; Start 33; Stop 57
ttattgttcagatagtcggcatgta

SEQ ID NO: 432496 - DNA, 25 bp, Artificial
  probe
  misc_feature (1)..(25): SEQ ID NO: 6219; WAN02499Y; Start 103; Stop 127
attgttctggattactgaggatgcc

SEQ ID NO: 432497 - DNA, 25 bp, Artificial
  probe
  misc_feature (1)..(25): SEQ ID NO: 6219; WAN02499Y; Start 3; Stop 27
ctttatgtcggctttctaatgcttt

SEQ ID NO: 432498 - DNA, 25 bp, Artificial
  probe
  misc_feature (1)..(25): SEQ ID NO: 6219; WAN02499Y; Start 2; Stop 26
tctttatgtcggctttctaatgctt

SEQ ID NO: 432499 - DNA, 25 bp, Artificial
  probe
  misc_feature (1)..(25): SEQ ID NO: 6219; WAN02499Y; Start 1; Stop 25
ttctttatgtcggctttctaatgct

SEQ ID NO: 432500 - DNA, 25 bp, Artificial
  probe
  misc_feature (1)..(25): SEQ ID NO: 6219; WAN02499Y; Start 101; Stop 125
aaattgttctggattactgaggatg

SEQ ID NO: 432501 - DNA, 25 bp, Artificial
  probe
  misc_feature (1)..(25): SEQ ID NO: 6219; WAN02499Y; Start 100; Stop 124
caaattgttctggattactgaggat

SEQ ID NO: 432502 - DNA, 25 bp, Artificial
  probe
  misc_feature (1)..(25): SEQ ID NO: 6219; WAN02499Y; Start 35; Stop 59
attgttcagatagtcggcatgtaaa

SEQ ID NO: 432503 - DNA, 25 bp, Artificial
  probe
  misc_feature (1)..(25): SEQ ID NO: 6219; WAN02499Y; Start 32; Stop 56
tttattgttcagatagtcggcatgt

SEQ ID NO: 432504 - DNA, 25 bp, Artificial
  probe
  misc_feature (1)..(25): SEQ ID NO: 6219; WAN02499Y; Start 36; Stop 60
ttgttcagatagtcggcatgtaaag

SEQ ID NO: 432505 - DNA, 25 bp, Artificial
  probe
  misc_feature (1)..(25): SEQ ID NO: 6219; WAN02499Y; Start 52; Stop 76
catgtaaaggcttgttgatgtttcc

SEQ ID NO: 432506 - DNA, 25 bp, Artificial
  probe
  misc_feature (1)..(25): SEQ ID NO: 6219; WAN02499Y; Start 99; Stop 123
acaaattgttctggattactgagga

SEQ ID NO: 432507 - DNA, 25 bp, Artificial
  probe
  misc_feature (1)..(25): SEQ ID NO: 6219; WAN02499Y; Start 53; Stop 77
atgtaaaggcttgttgatgtttcct

SEQ ID NO: 432508 - DNA, 25 bp, Artificial
  probe
  misc_feature (1)..(25): SEQ ID NO: 6219; WAN02499Y; Start 51; Stop 75
gcatgtaaaggcttgttgatgtttc

SEQ ID NO: 432509 - DNA, 25 bp, Artificial
  probe
  misc_feature (1)..(25): SEQ ID NO: 6219; WAN02499Y; Start 111; Stop 135
ggattactgaggatgccaaactttg

SEQ ID NO: 432510 - DNA, 25 bp, Artificial
  probe
  misc_feature (1)..(25): SEQ ID NO: 6219; WAN02499Y; Start 37; Stop 61
tgttcagatagtcggcatgtaaagg

SEQ ID NO: 432511 - DNA, 25 bp, Artificial
  probe
  misc_feature (1)..(25): SEQ ID NO: 6219; WAN02499Y; Start 29; Stop 53
cattttattgttcagatagtcggca

SEQ ID NO: 432512 - DNA, 25 bp, Artificial
  probe
  misc_feature (1)..(25): SEQ ID NO: 6219; WAN02499Y; Start 5; Stop 29
ttatgtcggctttctaatgcttttc

SEQ ID NO: 432513 - DNA, 25 bp, Artificial
  probe
  misc_feature (1)..(25): SEQ ID NO: 6219; WAN02499Y; Start 4; Stop 28
tttatgtcggctttctaatgctttt

SEQ ID NO: 432514 - DNA, 25 bp, Artificial
  probe
  misc_feature (1)..(25): SEQ ID NO: 6219; WAN02499Y; Start 28; Stop 52
tcattttattgttcagatagtcggc

SEQ ID NO: 432515 - DNA, 25 bp, Artificial
  probe
  misc_feature (1)..(25): SEQ ID NO: 6219; WAN02499Y; Start 50; Stop 74
ggcatgtaaaggcttgttgatgttt

SEQ ID NO: 432516 - DNA, 25 bp, Artificial
  probe
  misc_feature (1)..(25): SEQ ID NO: 6219; WAN02499Y; Start 6; Stop 30
tatgtcggctttctaatgcttttca

SEQ ID NO: 432517 - DNA, 25 bp, Artificial
  probe
  misc_feature (1)..(25): SEQ ID NO: 6219; WAN02499Y; Start 30; Stop 54
attttattgttcagatagtcggcat

SEQ ID NO: 432518 - DNA, 25 bp, Artificial
  probe
  misc_feature (1)..(25): SEQ ID NO: 6219; WAN02499Y; Start 110; Stop 134
tggattactgaggatgccaaacttt

SEQ ID NO: 432519 - DNA, 25 bp, Artificial
  probe
  misc_feature (1)..(25): SEQ ID NO: 6219; WAN02499Y; Start 105; Stop 129
tgttctggattactgaggatgccaa

SEQ ID NO: 432520 - DNA, 25 bp, Artificial
  probe
  misc_feature (1)..(25): SEQ ID NO: 6219; WAN02499Y; Start 104; Stop 128
ttgttctggattactgaggatgcca

SEQ ID NO: 432521 - DNA, 25 bp, Artificial
  probe
  misc_feature (1)..(25): SEQ ID NO: 6219; WAN02499Y; Start 62; Stop 86
cttgttgatgtttccttttgtgtcg

SEQ ID NO: 432522 - DNA, 25 bp, Artificial
  probe
  misc_feature (1)..(25): SEQ ID NO: 6219; WAN02499Y; Start 109; Stop 133
ctggattactgaggatgccaaactt

SEQ ID NO: 432523 - DNA, 25 bp, Artificial
  probe
  misc_feature (1)..(25): SEQ ID NO: 6219; WAN02499Y; Start 107; Stop 131
ttctggattactgaggatgccaaac

SEQ ID NO: 432524 - DNA, 25 bp, Artificial
  probe
  misc_feature (1)..(25): SEQ ID NO: 6219; WAN02499Y; Start 106; Stop 130
gttctggattactgaggatgccaaa

SEQ ID NO: 432525 - DNA, 25 bp, Artificial
  probe
  misc_feature (1)..(25): SEQ ID NO: 6219; WAN02499Y; Start 61; Stop 85
gcttgttgatgtttccttttgtgtc

SEQ ID NO: 432526 - DNA, 25 bp, Artificial
  probe
  misc_feature (1)..(25): SEQ ID NO: 6220; WAN0249BM; Start 82; Stop 106
gttctgttaccaaagaccgttcaaa

SEQ ID NO: 432527 - DNA, 25 bp, Artificial
  probe
  misc_feature (1)..(25): SEQ ID NO: 6220; WAN0249BM; Start 81; Stop 105
agttctgttaccaaagaccgttcaa

SEQ ID NO: 432528 - DNA, 25 bp, Artificial
  probe
  misc_feature (1)..(25): SEQ ID NO: 6220; WAN0249BM; Start 33; Stop 57
atctctaatcagcttctttgtcaaa

SEQ ID NO: 432529 - DNA, 25 bp, Artificial
  probe
  misc_feature (1)..(25): SEQ ID NO: 6220; WAN0249BM; Start 32; Stop 56
tatctctaatcagcttctttgtcaa

SEQ ID NO: 432530 - DNA, 25 bp, Artificial
  probe
  misc_feature (1)..(25): SEQ ID NO: 6220; WAN0249BM; Start 80; Stop 104
cagttctgttaccaaagaccgttca

SEQ ID NO: 432531 - DNA, 25 bp, Artificial
  probe
  misc_feature (1)..(25): SEQ ID NO: 6220; WAN0249BM; Start 31; Stop 55
atatctctaatcagcttctttgtca

SEQ ID NO: 432532 - DNA, 25 bp, Artificial
  probe
  misc_feature (1)..(25): SEQ ID NO: 6220; WAN0249BM; Start 46; Stop 70
ttctttgtcaaaattctcacccatc

SEQ ID NO: 432533 - DNA, 25 bp, Artificial
  probe
  misc_feature (1)..(25): SEQ ID NO: 6220; WAN0249BM; Start 45; Stop 69
cttctttgtcaaaattctcacccat

SEQ ID NO: 432534 - DNA, 25 bp, Artificial
  probe
  misc_feature (1)..(25): SEQ ID NO: 6220; WAN0249BM; Start 83; Stop 107
ttctgttaccaaagaccgttcaaaa

SEQ ID NO: 432535 - DNA, 25 bp, Artificial
  probe
  misc_feature (1)..(25): SEQ ID NO: 6220; WAN0249BM; Start 47; Stop 71
tctttgtcaaaattctcacccatcc

SEQ ID NO: 432536 - DNA, 25 bp, Artificial
  probe
  misc_feature (1)..(25): SEQ ID NO: 6220; WAN0249BM; Start 49; Stop 73
tttgtcaaaattctcacccatccag

SEQ ID NO: 432537 - DNA, 25 bp, Artificial
  probe
  misc_feature (1)..(25): SEQ ID NO: 6220; WAN0249BM; Start 48; Stop 72
ctttgtcaaaattctcacccatcca

SEQ ID NO: 432538 - DNA, 25 bp, Artificial
  probe
  misc_feature (1)..(25): SEQ ID NO: 6220; WAN0249BM; Start 108; Stop 132
agcaaactagcaatacttataactt

SEQ ID NO: 432539 - DNA, 25 bp, Artificial
  probe
  misc_feature (1)..(25): SEQ ID NO: 6220; WAN0249BM; Start 41; Stop 65
tcagcttctttgtcaaaattctcac

SEQ ID NO: 432540 - DNA, 25 bp, Artificial
  probe
  misc_feature (1)..(25): SEQ ID NO: 6220; WAN0249BM; Start 107; Stop 131
aagcaaactagcaatacttataact

SEQ ID NO: 432541 - DNA, 25 bp, Artificial
  probe
  misc_feature (1)..(25): SEQ ID NO: 6220; WAN0249BM; Start 40; Stop 64
atcagcttctttgtcaaaattctca

SEQ ID NO: 432542 - DNA, 25 bp, Artificial
  probe
  misc_feature (1)..(25): SEQ ID NO: 6220; WAN0249BM; Start 44; Stop 68
gcttctttgtcaaaattctcaccca

SEQ ID NO: 432543 - DNA, 25 bp, Artificial
  probe
  misc_feature (1)..(25): SEQ ID NO: 6220; WAN0249BM; Start 74; Stop 98
ctcacgcagttctgttaccaaagac

SEQ ID NO: 432544 - DNA, 25 bp, Artificial
  probe
  misc_feature (1)..(25): SEQ ID NO: 6220; WAN0249BM; Start 42; Stop 66
cagcttctttgtcaaaattctcacc

SEQ ID NO: 432545 - DNA, 25 bp, Artificial
  probe
  misc_feature (1)..(25): SEQ ID NO: 6220; WAN0249BM; Start 39; Stop 63
aatcagcttctttgtcaaaattctc

SEQ ID NO: 432546 - DNA, 25 bp, Artificial
  probe
  misc_feature (1)..(25): SEQ ID NO: 6220; WAN0249BM; Start 34; Stop 58
tctctaatcagcttctttgtcaaaa

SEQ ID NO: 432547 - DNA, 25 bp, Artificial
  probe
  misc_feature (1)..(25): SEQ ID NO: 6220; WAN0249BM; Start 79; Stop 103
gcagttctgttaccaaagaccgttc

SEQ ID NO: 432548 - DNA, 25 bp, Artificial
  probe
  misc_feature (1)..(25): SEQ ID NO: 6220; WAN0249BM; Start 43; Stop 67
agcttctttgtcaaaattctcaccc

SEQ ID NO: 432549 - DNA, 25 bp, Artificial
  probe
  misc_feature (1)..(25): SEQ ID NO: 6220; WAN0249BM; Start 106; Stop 130
aaagcaaactagcaatacttataac

SEQ ID NO: 432550 - DNA, 25 bp, Artificial
  probe
  misc_feature (1)..(25): SEQ ID NO: 6220; WAN0249BM; Start 35; Stop 59
ctctaatcagcttctttgtcaaaat

SEQ ID NO: 432551 - DNA, 25 bp, Artificial
  probe
  misc_feature (1)..(25): SEQ ID NO: 6220; WAN0249BM; Start 30; Stop 54
tatatctctaatcagcttctttgtc

SEQ ID NO: 432552 - DNA, 25 bp, Artificial
  probe
  misc_feature (1)..(25): SEQ ID NO: 6220; WAN0249BM; Start 26; Stop 50
tcattatatctctaatcagcttctt

SEQ ID NO: 432553 - DNA, 25 bp, Artificial
  probe
  misc_feature (1)..(25): SEQ ID NO: 6220; WAN0249BM; Start 25; Stop 49
ttcattatatctctaatcagcttct

SEQ ID NO: 432554 - DNA, 25 bp, Artificial
  probe
  misc_feature (1)..(25): SEQ ID NO: 6220; WAN0249BM; Start 23; Stop 47
tcttcattatatctctaatcagctt

SEQ ID NO: 432555 - DNA, 25 bp, Artificial
  probe
  misc_feature (1)..(25): SEQ ID NO: 6220; WAN0249BM; Start 22; Stop 46
ttcttcattatatctctaatcagct

SEQ ID NO: 432556 - DNA, 25 bp, Artificial
  probe
  misc_feature (1)..(25): SEQ ID NO: 6220; WAN0249BM; Start 38; Stop 62
taatcagcttctttgtcaaaattct

SEQ ID NO: 432557 - DNA, 25 bp, Artificial
  probe
  misc_feature (1)..(25): SEQ ID NO: 6220; WAN0249BM; Start 36; Stop 60
tctaatcagcttctttgtcaaaatt

SEQ ID NO: 432558 - DNA, 25 bp, Artificial
  probe
  misc_feature (1)..(25): SEQ ID NO: 6220; WAN0249BM; Start 37; Stop 61
ctaatcagcttctttgtcaaaattc

SEQ ID NO: 432559 - DNA, 25 bp, Artificial
  probe
  misc_feature (1)..(25): SEQ ID NO: 6221; WAN024F8A; Start 70; Stop 94
atgtctgagaatcctcctattcctc

SEQ ID NO: 432560 - DNA, 25 bp, Artificial
  probe
  misc_feature (1)..(25): SEQ ID NO: 6221; WAN024F8A; Start 69; Stop 93
gatgtctgagaatcctcctattcct

SEQ ID NO: 432561 - DNA, 25 bp, Artificial
  probe
  misc_feature (1)..(25): SEQ ID NO: 6221; WAN024F8A; Start 74; Stop 98
ctgagaatcctcctattcctccttc

SEQ ID NO: 432562 - DNA, 25 bp, Artificial
  probe
  misc_feature (1)..(25): SEQ ID NO: 6221; WAN024F8A; Start 35; Stop 59
ttagcaatcaaatcattagttgggc

SEQ ID NO: 432563 - DNA, 25 bp, Artificial
  probe
  misc_feature (1)..(25): SEQ ID NO: 6221; WAN024F8A; Start 73; Stop 97
tctgagaatcctcctattcctcctt

SEQ ID NO: 432564 - DNA, 25 bp, Artificial
  probe
  misc_feature (1)..(25): SEQ ID NO: 6221; WAN024F8A; Start 5; Stop 29
caagtgatttctggattgctgaata

SEQ ID NO: 432565 - DNA, 25 bp, Artificial
  probe
  misc_feature (1)..(25): SEQ ID NO: 6221; WAN024F8A; Start 82; Stop 106
cctcctattcctccttctatagtga

SEQ ID NO: 432566 - DNA, 25 bp, Artificial
  probe
  misc_feature (1)..(25): SEQ ID NO: 6221; WAN024F8A; Start 81; Stop 105
tcctcctattcctccttctatagtg

SEQ ID NO: 432567 - DNA, 25 bp, Artificial
  probe
  misc_feature (1)..(25): SEQ ID NO: 6221; WAN024F8A; Start 6; Stop 30
aagtgatttctggattgctgaatat

SEQ ID NO: 432568 - DNA, 25 bp, Artificial
  probe
  misc_feature (1)..(25): SEQ ID NO: 6221; WAN024F8A; Start 78; Stop 102
gaatcctcctattcctccttctata

SEQ ID NO: 432569 - DNA, 25 bp, Artificial
  probe
  misc_feature (1)..(25): SEQ ID NO: 6221; WAN024F8A; Start 77; Stop 101
agaatcctcctattcctccttctat

SEQ ID NO: 432570 - DNA, 25 bp, Artificial
  probe
  misc_feature (1)..(25): SEQ ID NO: 6221; WAN024F8A; Start 84; Stop 108
tcctattcctccttctatagtgagt

SEQ ID NO: 432571 - DNA, 25 bp, Artificial
  probe
  misc_feature (1)..(25): SEQ ID NO: 6221; WAN024F8A; Start 80; Stop 104
atcctcctattcctccttctatagt

SEQ ID NO: 432572 - DNA, 25 bp, Artificial
  probe
  misc_feature (1)..(25): SEQ ID NO: 6221; WAN024F8A; Start 4; Stop 28
acaagtgatttctggattgctgaat

SEQ ID NO: 432573 - DNA, 25 bp, Artificial
  probe
  misc_feature (1)..(25): SEQ ID NO: 6221; WAN024F8A; Start 83; Stop 107
ctcctattcctccttctatagtgag

SEQ ID NO: 432574 - DNA, 25 bp, Artificial
  probe
  misc_feature (1)..(25): SEQ ID NO: 6221; WAN024F8A; Start 34; Stop 58
cttagcaatcaaatcattagttggg

SEQ ID NO: 432575 - DNA, 25 bp, Artificial
  probe
  misc_feature (1)..(25): SEQ ID NO: 6221; WAN024F8A; Start 72; Stop 96
gtctgagaatcctcctattcctcct

SEQ ID NO: 432576 - DNA, 25 bp, Artificial
  probe
  misc_feature (1)..(25): SEQ ID NO: 6221; WAN024F8A; Start 3; Stop 27
gacaagtgatttctggattgctgaa

SEQ ID NO: 432577 - DNA, 25 bp, Artificial
  probe
  misc_feature (1)..(25): SEQ ID NO: 6221; WAN024F8A; Start 75; Stop 99
tgagaatcctcctattcctccttct

SEQ ID NO: 432578 - DNA, 25 bp, Artificial
  probe
  misc_feature (1)..(25): SEQ ID NO: 6221; WAN024F8A; Start 71; Stop 95
tgtctgagaatcctcctattcctcc

SEQ ID NO: 432579 - DNA, 25 bp, Artificial
  probe
  misc_feature (1)..(25): SEQ ID NO: 6221; WAN024F8A; Start 79; Stop 103
aatcctcctattcctccttctatag

SEQ ID NO: 432580 - DNA, 25 bp, Artificial
  probe
  misc_feature (1)..(25): SEQ ID NO: 6221; WAN024F8A; Start 1; Stop 25
ttgacaagtgatttctggattgctg

SEQ ID NO: 432581 - DNA, 25 bp, Artificial
  probe
  misc_feature (1)..(25): SEQ ID NO: 6221; WAN024F8A; Start 38; Stop 62
gcaatcaaatcattagttgggctga

SEQ ID NO: 432582 - DNA, 25 bp, Artificial
  probe
  misc_feature (1)..(25): SEQ ID NO: 6221; WAN024F8A; Start 7; Stop 31
agtgatttctggattgctgaatatt

SEQ ID NO: 432583 - DNA, 25 bp, Artificial
  probe
  misc_feature (1)..(25): SEQ ID NO: 6221; WAN024F8A; Start 33; Stop 57
tcttagcaatcaaatcattagttgg

SEQ ID NO: 432584 - DNA, 25 bp, Artificial
  probe
  misc_feature (1)..(25): SEQ ID NO: 6221; WAN024F8A; Start 2; Stop 26
tgacaagtgatttctggattgctga

SEQ ID NO: 432585 - DNA, 25 bp, Artificial
  probe
  misc_feature (1)..(25): SEQ ID NO: 6221; WAN024F8A; Start 8; Stop 32
gtgatttctggattgctgaatattt

SEQ ID NO: 432586 - DNA, 25 bp, Artificial
  probe
  misc_feature (1)..(25): SEQ ID NO: 6221; WAN024F8A; Start 36; Stop 60
tagcaatcaaatcattagttgggct

SEQ ID NO: 432587 - DNA, 25 bp, Artificial
  probe
  misc_feature (1)..(25): SEQ ID NO: 6221; WAN024F8A; Start 40; Stop 64
aatcaaatcattagttgggctgatg

SEQ ID NO: 432588 - DNA, 25 bp, Artificial
  probe
  misc_feature (1)..(25): SEQ ID NO: 6221; WAN024F8A; Start 39; Stop 63
caatcaaatcattagttgggctgat

SEQ ID NO: 432589 - DNA, 25 bp, Artificial
  probe
  misc_feature (1)..(25): SEQ ID NO: 6221; WAN024F8A; Start 68; Stop 92
ggatgtctgagaatcctcctattcc

SEQ ID NO: 432590 - DNA, 25 bp, Artificial
  probe
  misc_feature (1)..(25): SEQ ID NO: 6221; WAN024F8A; Start 67; Stop 91
cggatgtctgagaatcctcctattc

SEQ ID NO: 432591 - DNA, 25 bp, Artificial
  probe
  misc_feature (1)..(25): SEQ ID NO: 6221; WAN024F8A; Start 37; Stop 61
agcaatcaaatcattagttgggctg

SEQ ID NO: 432592 - DNA, 25 bp, Artificial
  probe
  misc_feature (1)..(25): SEQ ID NO: 6222; WAN02495S; Start 32; Stop 56
tgatactatatattgaaaggaggtg

SEQ ID NO: 432593 - DNA, 25 bp, Artificial
  probe
  misc_feature (1)..(25): SEQ ID NO: 6222; WAN02495S; Start 33; Stop 57
gatactatatattgaaaggaggtga

SEQ ID NO: 432594 - DNA, 25 bp, Artificial
  probe
  misc_feature (1)..(25): SEQ ID NO: 6222; WAN02495S; Start 29; Stop 53
gcatgatactatatattgaaaggag

SEQ ID NO: 432595 - DNA, 25 bp, Artificial
  probe
  misc_feature (1)..(25): SEQ ID NO: 6222; WAN02495S; Start 23; Stop 47
gcatttgcatgatactatatattga

SEQ ID NO: 432596 - DNA, 25 bp, Artificial
  probe
  misc_feature (1)..(25): SEQ ID NO: 6222; WAN02495S; Start 28; Stop 52
tgcatgatactatatattgaaagga

SEQ ID NO: 432597 - DNA, 25 bp, Artificial
  probe
  misc_feature (1)..(25): SEQ ID NO: 6222; WAN02495S; Start 22; Stop 46
agcatttgcatgatactatatattg

SEQ ID NO: 432598 - DNA, 25 bp, Artificial
  probe
  misc_feature (1)..(25): SEQ ID NO: 6223; WAN02498U; Start 24; Stop 48
aaagcacaagggatagtatagaagg

SEQ ID NO: 432599 - DNA, 25 bp, Artificial
  probe
  misc_feature (1)..(25): SEQ ID NO: 6223; WAN02498U; Start 25; Stop 49
aagcacaagggatagtatagaagga

SEQ ID NO: 432600 - DNA, 25 bp, Artificial
  probe
  misc_feature (1)..(25): SEQ ID NO: 6223; WAN02498U; Start 26; Stop 50
agcacaagggatagtatagaaggag

SEQ ID NO: 432601 - DNA, 25 bp, Artificial
  probe
  misc_feature (1)..(25): SEQ ID NO: 6223; WAN02498U; Start 27; Stop 51
gcacaagggatagtatagaaggagt

SEQ ID NO: 432602 - DNA, 25 bp, Artificial
  probe
  misc_feature (1)..(25): SEQ ID NO: 6223; WAN02498U; Start 32; Stop 56
agggatagtatagaaggagtacacc

SEQ ID NO: 432603 - DNA, 25 bp, Artificial
  probe
  misc_feature (1)..(25): SEQ ID NO: 6223; WAN02498U; Start 28; Stop 52
cacaagggatagtatagaaggagta

SEQ ID NO: 432604 - DNA, 25 bp, Artificial
  probe
  misc_feature (1)..(25): SEQ ID NO: 6223; WAN02498U; Start 31; Stop 55
aagggatagtatagaaggagtacac

SEQ ID NO: 432605 - DNA, 25 bp, Artificial
  probe
  misc_feature (1)..(25): SEQ ID NO: 6223; WAN02498U; Start 30; Stop 54
caagggatagtatagaaggagtaca

SEQ ID NO: 432606 - DNA, 25 bp, Artificial
  probe
  misc_feature (1)..(25): SEQ ID NO: 6223; WAN02498U; Start 29; Stop 53
acaagggatagtatagaaggagtac

SEQ ID NO: 432607 - DNA, 25 bp, Artificial
  probe
  misc_feature (1)..(25): SEQ ID NO: 6223; WAN02498U; Start 23; Stop 47
taaagcacaagggatagtatagaag

SEQ ID NO: 432608 - DNA, 25 bp, Artificial
  probe
  misc_feature (1)..(25): SEQ ID NO: 6223; WAN02498U; Start 22; Stop 46
ctaaagcacaagggatagtatagaa

SEQ ID NO: 432609 - DNA, 25 bp, Artificial
  probe
  misc_feature (1)..(25): SEQ ID NO: 6223; WAN02498U; Start 20; Stop 44
ttctaaagcacaagggatagtatag

SEQ ID NO: 432610 - DNA, 25 bp, Artificial
  probe
  misc_feature (1)..(25): SEQ ID NO: 6223; WAN02498U; Start 33; Stop 57
gggatagtatagaaggagtacacct

SEQ ID NO: 432611 - DNA, 25 bp, Artificial
  probe
  misc_feature (1)..(25): SEQ ID NO: 6223; WAN02498U; Start 19; Stop 43
attctaaagcacaagggatagtata

SEQ ID NO: 432612 - DNA, 25 bp, Artificial
  probe
  misc_feature (1)..(25): SEQ ID NO: 6223; WAN02498U; Start 18; Stop 42
tattctaaagcacaagggatagtat

SEQ ID NO: 432613 - DNA, 25 bp, Artificial
  probe
  misc_feature (1)..(25): SEQ ID NO: 6223; WAN02498U; Start 21; Stop 45
tctaaagcacaagggatagtataga

SEQ ID NO: 432614 - DNA, 25 bp, Artificial
  probe
  misc_feature (1)..(25): SEQ ID NO: 6223; WAN02498U; Start 17; Stop 41
atattctaaagcacaagggatagta

SEQ ID NO: 432615 - DNA, 25 bp, Artificial
  probe
  misc_feature (1)..(25): SEQ ID NO: 6223; WAN02498U; Start 16; Stop 40
aatattctaaagcacaagggatagt

SEQ ID NO: 432616 - DNA, 25 bp, Artificial
  probe
  misc_feature (1)..(25): SEQ ID NO: 6223; WAN02498U; Start 11; Stop 35
ggtataatattctaaagcacaaggg

SEQ ID NO: 432617 - DNA, 25 bp, Artificial
  probe
  misc_feature (1)..(25): SEQ ID NO: 6223; WAN02498U; Start 10; Stop 34
tggtataatattctaaagcacaagg

SEQ ID NO: 432618 - DNA, 25 bp, Artificial
  probe
  misc_feature (1)..(25): SEQ ID NO: 6223; WAN02498U; Start 12; Stop 36
gtataatattctaaagcacaaggga

SEQ ID NO: 432619 - DNA, 25 bp, Artificial
  probe
  misc_feature (1)..(25): SEQ ID NO: 6223; WAN02498U; Start 6; Stop 30
tgtgtggtataatattctaaagcac

SEQ ID NO: 432620 - DNA, 25 bp, Artificial
  probe
  misc_feature (1)..(25): SEQ ID NO: 6223; WAN02498U; Start 5; Stop 29
ttgtgtggtataatattctaaagca

SEQ ID NO: 432621 - DNA, 25 bp, Artificial
  probe
  misc_feature (1)..(25): SEQ ID NO: 6223; WAN02498U; Start 15; Stop 39
taatattctaaagcacaagggatag

SEQ ID NO: 432622 - DNA, 25 bp, Artificial
  probe
  misc_feature (1)..(25): SEQ ID NO: 6223; WAN02498U; Start 14; Stop 38
ataatattctaaagcacaagggata

SEQ ID NO: 432623 - DNA, 25 bp, Artificial
  probe
  misc_feature (1)..(25): SEQ ID NO: 6223; WAN02498U; Start 13; Stop 37
tataatattctaaagcacaagggat

SEQ ID NO: 432624 - DNA, 25 bp, Artificial
  probe
  misc_feature (1)..(25): SEQ ID NO: 6223; WAN02498U; Start 9; Stop 33
gtggtataatattctaaagcacaag

SEQ ID NO: 432625 - DNA, 25 bp, Artificial
  probe
  misc_feature (1)..(25): SEQ ID NO: 6223; WAN02498U; Start 4; Stop 28
attgtgtggtataatattctaaagc

SEQ ID NO: 432626 - DNA, 25 bp, Artificial
  probe
  misc_feature (1)..(25): SEQ ID NO: 6223; WAN02498U; Start 7; Stop 31
gtgtggtataatattctaaagcaca

SEQ ID NO: 432627 - DNA, 25 bp, Artificial
  probe
  misc_feature (1)..(25): SEQ ID NO: 6223; WAN02498U; Start 8; Stop 32
tgtggtataatattctaaagcacaa

SEQ ID NO: 432628 - DNA, 25 bp, Artificial
  probe
  misc_feature (1)..(25): SEQ ID NO: 6224; WAN024BJ6; Start 12; Stop 36
aggtgtcagaaataaaggttgtgta

SEQ ID NO: 432629 - DNA, 25 bp, Artificial
  probe
  misc_feature (1)..(25): SEQ ID NO: 6224; WAN024BJ6; Start 23; Stop 47
ataaaggttgtgtatttggagaggg

SEQ ID NO: 432630 - DNA, 25 bp, Artificial
  probe
  misc_feature (1)..(25): SEQ ID NO: 6224; WAN024BJ6; Start 13; Stop 37
ggtgtcagaaataaaggttgtgtat

SEQ ID NO: 432631 - DNA, 25 bp, Artificial
  probe
  misc_feature (1)..(25): SEQ ID NO: 6224; WAN024BJ6; Start 11; Stop 35
aaggtgtcagaaataaaggttgtgt

SEQ ID NO: 432632 - DNA, 25 bp, Artificial
  probe
  misc_feature (1)..(25): SEQ ID NO: 6224; WAN024BJ6; Start 10; Stop 34
caaggtgtcagaaataaaggttgtg

SEQ ID NO: 432633 - DNA, 25 bp, Artificial
  probe
  misc_feature (1)..(25): SEQ ID NO: 6224; WAN024BJ6; Start 22; Stop 46
aataaaggttgtgtatttggagagg

SEQ ID NO: 432634 - DNA, 25 bp, Artificial
  probe
  misc_feature (1)..(25): SEQ ID NO: 6224; WAN024BJ6; Start 4; Stop 28
atttggcaaggtgtcagaaataaag

SEQ ID NO: 432635 - DNA, 25 bp, Artificial
  probe
  misc_feature (1)..(25): SEQ ID NO: 6224; WAN024BJ6; Start 3; Stop 27
gatttggcaaggtgtcagaaataaa

SEQ ID NO: 432636 - DNA, 25 bp, Artificial
  probe
  misc_feature (1)..(25): SEQ ID NO: 6224; WAN024BJ6; Start 5; Stop 29
tttggcaaggtgtcagaaataaagg

SEQ ID NO: 432637 - DNA, 25 bp, Artificial
  probe
  misc_feature (1)..(25): SEQ ID NO: 6224; WAN024BJ6; Start 2; Stop 26
tgatttggcaaggtgtcagaaataa

SEQ ID NO: 432638 - DNA, 25 bp, Artificial
  probe
  misc_feature (1)..(25): SEQ ID NO: 6224; WAN024BJ6; Start 1; Stop 25
ttgatttggcaaggtgtcagaaata

SEQ ID NO: 432639 - DNA, 25 bp, Artificial
  probe
  misc_feature (1)..(25): SEQ ID NO: 6224; WAN024BJ6; Start 9; Stop 33
gcaaggtgtcagaaataaaggttgt

SEQ ID NO: 432640 - DNA, 25 bp, Artificial
  probe
  misc_feature (1)..(25): SEQ ID NO: 6224; WAN024BJ6; Start 14; Stop 38
gtgtcagaaataaaggttgtgtatt

SEQ ID NO: 432641 - DNA, 25 bp, Artificial
  probe
  misc_feature (1)..(25): SEQ ID NO: 6224; WAN024BJ6; Start 7; Stop 31
tggcaaggtgtcagaaataaaggtt

SEQ ID NO: 432642 - DNA, 25 bp, Artificial
  probe
  misc_feature (1)..(25): SEQ ID NO: 6224; WAN024BJ6; Start 8; Stop 32
ggcaaggtgtcagaaataaaggttg

SEQ ID NO: 432643 - DNA, 25 bp, Artificial
  probe
  misc_feature (1)..(25): SEQ ID NO: 6224; WAN024BJ6; Start 6; Stop 30
ttggcaaggtgtcagaaataaaggt

SEQ ID NO: 432644 - DNA, 25 bp, Artificial
  probe
  misc_feature (1)..(25): SEQ ID NO: 6224; WAN024BJ6; Start 29; Stop 53
gttgtgtatttggagaggggattaa

SEQ ID NO: 432645 - DNA, 25 bp, Artificial
  probe
  misc_feature (1)..(25): SEQ ID NO: 6224; WAN024BJ6; Start 28; Stop 52
ggttgtgtatttggagaggggatta

SEQ ID NO: 432646 - DNA, 25 bp, Artificial
  probe
  misc_feature (1)..(25): SEQ ID NO: 6224; WAN024BJ6; Start 24; Stop 48
taaaggttgtgtatttggagagggg

SEQ ID NO: 432647 - DNA, 25 bp, Artificial
  probe
  misc_feature (1)..(25): SEQ ID NO: 6224; WAN024BJ6; Start 18; Stop 42
cagaaataaaggttgtgtatttgga

SEQ ID NO: 432648 - DNA, 25 bp, Artificial
  probe
  misc_feature (1)..(25): SEQ ID NO: 6224; WAN024BJ6; Start 17; Stop 41
tcagaaataaaggttgtgtatttgg

SEQ ID NO: 432649 - DNA, 25 bp, Artificial
  probe
  misc_feature (1)..(25): SEQ ID NO: 6224; WAN024BJ6; Start 31; Stop 55
tgtgtatttggagaggggattaatt

SEQ ID NO: 432650 - DNA, 25 bp, Artificial
  probe
  misc_feature (1)..(25): SEQ ID NO: 6224; WAN024BJ6; Start 30; Stop 54
ttgtgtatttggagaggggattaat

SEQ ID NO: 432651 - DNA, 25 bp, Artificial
  probe
  misc_feature (1)..(25): SEQ ID NO: 6224; WAN024BJ6; Start 21; Stop 45
aaataaaggttgtgtatttggagag

SEQ ID NO: 432652 - DNA, 25 bp, Artificial
  probe
  misc_feature (1)..(25): SEQ ID NO: 6224; WAN024BJ6; Start 20; Stop 44
gaaataaaggttgtgtatttggaga

SEQ ID NO: 432653 - DNA, 25 bp, Artificial
  probe
  misc_feature (1)..(25): SEQ ID NO: 6224; WAN024BJ6; Start 19; Stop 43
agaaataaaggttgtgtatttggag

SEQ ID NO: 432654 - DNA, 25 bp, Artificial
  probe
  misc_feature (1)..(25): SEQ ID NO: 6224; WAN024BJ6; Start 32; Stop 56
gtgtatttggagaggggattaattt

SEQ ID NO: 432655 - DNA, 25 bp, Artificial
  probe
  misc_feature (1)..(25): SEQ ID NO: 6224; WAN024BJ6; Start 15; Stop 39
tgtcagaaataaaggttgtgtattt

SEQ ID NO: 432656 - DNA, 25 bp, Artificial
  probe
  misc_feature (1)..(25): SEQ ID NO: 6224; WAN024BJ6; Start 16; Stop 40
gtcagaaataaaggttgtgtatttg

SEQ ID NO: 432657 - DNA, 25 bp, Artificial
  probe
  misc_feature (1)..(25): SEQ ID NO: 6224; WAN024BJ6; Start 33; Stop 57
tgtatttggagaggggattaatttt

SEQ ID NO: 432658 - DNA, 25 bp, Artificial
  probe
  misc_feature (1)..(25): SEQ ID NO: 6224; WAN024BJ6; Start 27; Stop 51
aggttgtgtatttggagaggggatt

SEQ ID NO: 432659 - DNA, 25 bp, Artificial
  probe
  misc_feature (1)..(25): SEQ ID NO: 6224; WAN024BJ6; Start 26; Stop 50
aaggttgtgtatttggagaggggat

SEQ ID NO: 432660 - DNA, 25 bp, Artificial
  probe
  misc_feature (1)..(25): SEQ ID NO: 6224; WAN024BJ6; Start 25; Stop 49
aaaggttgtgtatttggagagggga

SEQ ID NO: 432661 - DNA, 25 bp, Artificial
  probe
  misc_feature (1)..(25): SEQ ID NO: 6225; WAN024BJD; Start 113; Stop 137
ataaagataacacggtgagagacat

SEQ ID NO: 432662 - DNA, 25 bp, Artificial
  probe
  misc_feature (1)..(25): SEQ ID NO: 6225; WAN024BJD; Start 112; Stop 136
cataaagataacacggtgagagaca

SEQ ID NO: 432663 - DNA, 25 bp, Artificial
  probe
  misc_feature (1)..(25): SEQ ID NO: 6225; WAN024BJD; Start 114; Stop 138
taaagataacacggtgagagacatc

SEQ ID NO: 432664 - DNA, 25 bp, Artificial
  probe
  misc_feature (1)..(25): SEQ ID NO: 6225; WAN024BJD; Start 109; Stop 133
atccataaagataacacggtgagag

SEQ ID NO: 432665 - DNA, 25 bp, Artificial
  probe
  misc_feature (1)..(25): SEQ ID NO: 6225; WAN024BJD; Start 93; Stop 117
cagcaatcacacccttatccataaa

SEQ ID NO: 432666 - DNA, 25 bp, Artificial
  probe
  misc_feature (1)..(25): SEQ ID NO: 6225; WAN024BJD; Start 95; Stop 119
gcaatcacacccttatccataaaga

SEQ ID NO: 432667 - DNA, 25 bp, Artificial
  probe
  misc_feature (1)..(25): SEQ ID NO: 6225; WAN024BJD; Start 94; Stop 118
agcaatcacacccttatccataaag

SEQ ID NO: 432668 - DNA, 25 bp, Artificial
  probe
  misc_feature (1)..(25): SEQ ID NO: 6225; WAN024BJD; Start 45; Stop 69
tacggtcttctttaggattagtgaa

SEQ ID NO: 432669 - DNA, 25 bp, Artificial
  probe
  misc_feature (1)..(25): SEQ ID NO: 6225; WAN024BJD; Start 111; Stop 135
ccataaagataacacggtgagagac

SEQ ID NO: 432670 - DNA, 25 bp, Artificial
  probe
  misc_feature (1)..(25): SEQ ID NO: 6225; WAN024BJD; Start 110; Stop 134
tccataaagataacacggtgagaga

SEQ ID NO: 432671 - DNA, 25 bp, Artificial
  probe
  misc_feature (1)..(25): SEQ ID NO: 6225; WAN024BJD; Start 87; Stop 111
cttcttcagcaatcacacccttatc

SEQ ID NO: 432672 - DNA, 25 bp, Artificial
  probe
  misc_feature (1)..(25): SEQ ID NO: 6225; WAN024BJD; Start 43; Stop 67
tgtacggtcttctttaggattagtg

SEQ ID NO: 432673 - DNA, 25 bp, Artificial
  probe
  misc_feature (1)..(25): SEQ ID NO: 6225; WAN024BJD; Start 44; Stop 68
gtacggtcttctttaggattagtga

SEQ ID NO: 432674 - DNA, 25 bp, Artificial
  probe
  misc_feature (1)..(25): SEQ ID NO: 6225; WAN024BJD; Start 96; Stop 120
caatcacacccttatccataaagat

SEQ ID NO: 432675 - DNA, 25 bp, Artificial
  probe
  misc_feature (1)..(25): SEQ ID NO: 6225; WAN024BJD; Start 91; Stop 115
ttcagcaatcacacccttatccata

SEQ ID NO: 432676 - DNA, 25 bp, Artificial
  probe
  misc_feature (1)..(25): SEQ ID NO: 6225; WAN024BJD; Start 92; Stop 116
tcagcaatcacacccttatccataa

SEQ ID NO: 432677 - DNA, 25 bp, Artificial
  probe
  misc_feature (1)..(25): SEQ ID NO: 6225; WAN024BJD; Start 42; Stop 66
ttgtacggtcttctttaggattagt

SEQ ID NO: 432678 - DNA, 25 bp, Artificial
  probe
  misc_feature (1)..(25): SEQ ID NO: 6225; WAN024BJD; Start 108; Stop 132
tatccataaagataacacggtgaga

SEQ ID NO: 432679 - DNA, 25 bp, Artificial
  probe
  misc_feature (1)..(25): SEQ ID NO: 6225; WAN024BJD; Start 81; Stop 105
gtttaccttcttcagcaatcacacc

SEQ ID NO: 432680 - DNA, 25 bp, Artificial
  probe
  misc_feature (1)..(25): SEQ ID NO: 6225; WAN024BJD; Start 41; Stop 65
tttgtacggtcttctttaggattag

SEQ ID NO: 432681 - DNA, 25 bp, Artificial
  probe
  misc_feature (1)..(25): SEQ ID NO: 6225; WAN024BJD; Start 115; Stop 139
aaagataacacggtgagagacatca

SEQ ID NO: 432682 - DNA, 25 bp, Artificial
  probe
  misc_feature (1)..(25): SEQ ID NO: 6225; WAN024BJD; Start 76; Stop 100
ttctggtttaccttcttcagcaatc

SEQ ID NO: 432683 - DNA, 25 bp, Artificial
  probe
  misc_feature (1)..(25): SEQ ID NO: 6225; WAN024BJD; Start 75; Stop 99
cttctggtttaccttcttcagcaat

SEQ ID NO: 432684 - DNA, 25 bp, Artificial
  probe
  misc_feature (1)..(25): SEQ ID NO: 6225; WAN024BJD; Start 80; Stop 104
ggtttaccttcttcagcaatcacac

SEQ ID NO: 432685 - DNA, 25 bp, Artificial
  probe
  misc_feature (1)..(25): SEQ ID NO: 6225; WAN024BJD; Start 88; Stop 112
ttcttcagcaatcacacccttatcc

SEQ ID NO: 432686 - DNA, 25 bp, Artificial
  probe
  misc_feature (1)..(25): SEQ ID NO: 6225; WAN024BJD; Start 86; Stop 110
ccttcttcagcaatcacacccttat

SEQ ID NO: 432687 - DNA, 25 bp, Artificial
  probe
  misc_feature (1)..(25): SEQ ID NO: 6225; WAN024BJD; Start 90; Stop 114
cttcagcaatcacacccttatccat

SEQ ID NO: 432688 - DNA, 25 bp, Artificial
  probe
  misc_feature (1)..(25): SEQ ID NO: 6225; WAN024BJD; Start 79; Stop 103
tggtttaccttcttcagcaatcaca

SEQ ID NO: 432689 - DNA, 25 bp, Artificial
  probe
  misc_feature (1)..(25): SEQ ID NO: 6225; WAN024BJD; Start 74; Stop 98
tcttctggtttaccttcttcagcaa

SEQ ID NO: 432690 - DNA, 25 bp, Artificial
  probe
  misc_feature (1)..(25): SEQ ID NO: 6225; WAN024BJD; Start 78; Stop 102
ctggtttaccttcttcagcaatcac

SEQ ID NO: 432691 - DNA, 25 bp, Artificial
  probe
  misc_feature (1)..(25): SEQ ID NO: 6225; WAN024BJD; Start 77; Stop 101
tctggtttaccttcttcagcaatca

SEQ ID NO: 432692 - DNA, 25 bp, Artificial
  probe
  misc_feature (1)..(25): SEQ ID NO: 6225; WAN024BJD; Start 162; Stop 186
ttacgacaatcatggtcaagccttc

SEQ ID NO: 432693 - DNA, 25 bp, Artificial
  probe
  misc_feature (1)..(25): SEQ ID NO: 6225; WAN024BJD; Start 82; Stop 106
tttaccttcttcagcaatcacaccc

SEQ ID NO: 432694 - DNA, 25 bp, Artificial
  probe
  misc_feature (1)..(25): SEQ ID NO: 6226; WAN024BJF; Start 191; Stop 215
acaatcatcatctcatactcatcca

SEQ ID NO: 432695 - DNA, 25 bp, Artificial
  probe
  misc_feature (1)..(25): SEQ ID NO: 6226; WAN024BJF; Start 188; Stop 212
tccacaatcatcatctcatactcat

SEQ ID NO: 432696 - DNA, 25 bp, Artificial
  probe
  misc_feature (1)..(25): SEQ ID NO: 6226; WAN024BJF; Start 187; Stop 211
atccacaatcatcatctcatactca

SEQ ID NO: 432697 - DNA, 25 bp, Artificial
  probe
  misc_feature (1)..(25): SEQ ID NO: 6226; WAN024BJF; Start 185; Stop 209
tcatccacaatcatcatctcatact

SEQ ID NO: 432698 - DNA, 25 bp, Artificial
  probe
  misc_feature (1)..(25): SEQ ID NO: 6226; WAN024BJF; Start 183; Stop 207
actcatccacaatcatcatctcata

SEQ ID NO: 432699 - DNA, 25 bp, Artificial
  probe
  misc_feature (1)..(25): SEQ ID NO: 6226; WAN024BJF; Start 182; Stop 206
cactcatccacaatcatcatctcat

SEQ ID NO: 432700 - DNA, 25 bp, Artificial
  probe
  misc_feature (1)..(25): SEQ ID NO: 6226; WAN024BJF; Start 190; Stop 214
cacaatcatcatctcatactcatcc

SEQ ID NO: 432701 - DNA, 25 bp, Artificial
  probe
  misc_feature (1)..(25): SEQ ID NO: 6226; WAN024BJF; Start 189; Stop 213
ccacaatcatcatctcatactcatc

SEQ ID NO: 432702 - DNA, 25 bp, Artificial
  probe
  misc_feature (1)..(25): SEQ ID NO: 6226; WAN024BJF; Start 186; Stop 210
catccacaatcatcatctcatactc

SEQ ID NO: 432703 - DNA, 25 bp, Artificial
  probe
  misc_feature (1)..(25): SEQ ID NO: 6226; WAN024BJF; Start 184; Stop 208
ctcatccacaatcatcatctcatac

SEQ ID NO: 432704 - DNA, 25 bp, Artificial
  probe
  misc_feature (1)..(25): SEQ ID NO: 6226; WAN024BJF; Start 180; Stop 204
gacactcatccacaatcatcatctc

SEQ ID NO: 432705 - DNA, 25 bp, Artificial
  probe
  misc_feature (1)..(25): SEQ ID NO: 6226; WAN024BJF; Start 192; Stop 216
caatcatcatctcatactcatccaa

SEQ ID NO: 432706 - DNA, 25 bp, Artificial
  probe
  misc_feature (1)..(25): SEQ ID NO: 6226; WAN024BJF; Start 28; Stop 52
cctcttatcagcagtatggagtatc

SEQ ID NO: 432707 - DNA, 25 bp, Artificial
  probe
  misc_feature (1)..(25): SEQ ID NO: 6226; WAN024BJF; Start 181; Stop 205
acactcatccacaatcatcatctca

SEQ ID NO: 432708 - DNA, 25 bp, Artificial
  probe
  misc_feature (1)..(25): SEQ ID NO: 6226; WAN024BJF; Start 32; Stop 56
ttatcagcagtatggagtatctcac

SEQ ID NO: 432709 - DNA, 25 bp, Artificial
  probe
  misc_feature (1)..(25): SEQ ID NO: 6226; WAN024BJF; Start 31; Stop 55
cttatcagcagtatggagtatctca

SEQ ID NO: 432710 - DNA, 25 bp, Artificial
  probe
  misc_feature (1)..(25): SEQ ID NO: 6226; WAN024BJF; Start 33; Stop 57
tatcagcagtatggagtatctcacc

SEQ ID NO: 432711 - DNA, 25 bp, Artificial
  probe
  misc_feature (1)..(25): SEQ ID NO: 6226; WAN024BJF; Start 30; Stop 54
tcttatcagcagtatggagtatctc

SEQ ID NO: 432712 - DNA, 25 bp, Artificial
  probe
  misc_feature (1)..(25): SEQ ID NO: 6226; WAN024BJF; Start 29; Stop 53
ctcttatcagcagtatggagtatct

SEQ ID NO: 432713 - DNA, 25 bp, Artificial
  probe
  misc_feature (1)..(25): SEQ ID NO: 6226; WAN024BJF; Start 179; Stop 203
tgacactcatccacaatcatcatct

SEQ ID NO: 432714 - DNA, 25 bp, Artificial
  probe
  misc_feature (1)..(25): SEQ ID NO: 6226; WAN024BJF; Start 39; Stop 63
cagtatggagtatctcaccaattct

SEQ ID NO: 432715 - DNA, 25 bp, Artificial
  probe
  misc_feature (1)..(25): SEQ ID NO: 6226; WAN024BJF; Start 42; Stop 66
tatggagtatctcaccaattctctg

SEQ ID NO: 432716 - DNA, 25 bp, Artificial
  probe
  misc_feature (1)..(25): SEQ ID NO: 6226; WAN024BJF; Start 41; Stop 65
gtatggagtatctcaccaattctct

SEQ ID NO: 432717 - DNA, 25 bp, Artificial
  probe
  misc_feature (1)..(25): SEQ ID NO: 6226; WAN024BJF; Start 40; Stop 64
agtatggagtatctcaccaattctc

SEQ ID NO: 432718 - DNA, 25 bp, Artificial
  probe
  misc_feature (1)..(25): SEQ ID NO: 6226; WAN024BJF; Start 43; Stop 67
atggagtatctcaccaattctctga

SEQ ID NO: 432719 - DNA, 25 bp, Artificial
  probe
  misc_feature (1)..(25): SEQ ID NO: 6226; WAN024BJF; Start 44; Stop 68
tggagtatctcaccaattctctgaa

SEQ ID NO: 432720 - DNA, 25 bp, Artificial
  probe
  misc_feature (1)..(25): SEQ ID NO: 6226; WAN024BJF; Start 38; Stop 62
gcagtatggagtatctcaccaattc

SEQ ID NO: 432721 - DNA, 25 bp, Artificial
  probe
  misc_feature (1)..(25): SEQ ID NO: 6226; WAN024BJF; Start 37; Stop 61
agcagtatggagtatctcaccaatt

SEQ ID NO: 432722 - DNA, 25 bp, Artificial
  probe
  misc_feature (1)..(25): SEQ ID NO: 6226; WAN024BJF; Start 115; Stop 139
accgtaaagatacttccctctaaac

SEQ ID NO: 432723 - DNA, 25 bp, Artificial
  probe
  misc_feature (1)..(25): SEQ ID NO: 6226; WAN024BJF; Start 112; Stop 136
caaaccgtaaagatacttccctcta

SEQ ID NO: 432724 - DNA, 25 bp, Artificial
  probe
  misc_feature (1)..(25): SEQ ID NO: 6226; WAN024BJF; Start 116; Stop 140
ccgtaaagatacttccctctaaact

SEQ ID NO: 432725 - DNA, 25 bp, Artificial
  probe
  misc_feature (1)..(25): SEQ ID NO: 6226; WAN024BJF; Start 114; Stop 138
aaccgtaaagatacttccctctaaa

SEQ ID NO: 432726 - DNA, 25 bp, Artificial
  probe
  misc_feature (1)..(25): SEQ ID NO: 6226; WAN024BJF; Start 113; Stop 137
aaaccgtaaagatacttccctctaa

SEQ ID NO: 432727 - DNA, 25 bp, Artificial
  probe
  misc_feature (1)..(25): SEQ ID NO: 6227; WAN02496V; Start 8; Stop 32
cttgacaagaggtgaccatcatctc

SEQ ID NO: 432728 - DNA, 25 bp, Artificial
  probe
  misc_feature (1)..(25): SEQ ID NO: 6227; WAN02496V; Start 5; Stop 29
attcttgacaagaggtgaccatcat

SEQ ID NO: 432729 - DNA, 25 bp, Artificial
  probe
  misc_feature (1)..(25): SEQ ID NO: 6227; WAN02496V; Start 6; Stop 30
ttcttgacaagaggtgaccatcatc

SEQ ID NO: 432730 - DNA, 25 bp, Artificial
  probe
  misc_feature (1)..(25): SEQ ID NO: 6227; WAN02496V; Start 4; Stop 28
cattcttgacaagaggtgaccatca

SEQ ID NO: 432731 - DNA, 25 bp, Artificial
  probe
  misc_feature (1)..(25): SEQ ID NO: 6227; WAN02496V; Start 9; Stop 33
ttgacaagaggtgaccatcatctct

SEQ ID NO: 432732 - DNA, 25 bp, Artificial
  probe
  misc_feature (1)..(25): SEQ ID NO: 6227; WAN02496V; Start 7; Stop 31
tcttgacaagaggtgaccatcatct

SEQ ID NO: 432733 - DNA, 25 bp, Artificial
  probe
  misc_feature (1)..(25): SEQ ID NO: 6227; WAN02496V; Start 3; Stop 27
gcattcttgacaagaggtgaccatc

SEQ ID NO: 432734 - DNA, 25 bp, Artificial
  probe
  misc_feature (1)..(25): SEQ ID NO: 6227; WAN02496V; Start 2; Stop 26
tgcattcttgacaagaggtgaccat

SEQ ID NO: 432735 - DNA, 25 bp, Artificial
  probe
  misc_feature (1)..(25): SEQ ID NO: 6227; WAN02496V; Start 1; Stop 25
ttgcattcttgacaagaggtgacca

SEQ ID NO: 432736 - DNA, 25 bp, Artificial
  probe
  misc_feature (1)..(25): SEQ ID NO: 6227; WAN02496V; Start 15; Stop 39
agaggtgaccatcatctcttgtttt

SEQ ID NO: 432737 - DNA, 25 bp, Artificial
  probe
  misc_feature (1)..(25): SEQ ID NO: 6228; WAN024F73; Start 38; Stop 62
atactcttcgcaaatctcttcaaac

SEQ ID NO: 432738 - DNA, 25 bp, Artificial
  probe
  misc_feature (1)..(25): SEQ ID NO: 6228; WAN024F73; Start 39; Stop 63
tactcttcgcaaatctcttcaaacc

SEQ ID NO: 432739 - DNA, 25 bp, Artificial
  probe
  misc_feature (1)..(25): SEQ ID NO: 6228; WAN024F73; Start 37; Stop 61
tatactcttcgcaaatctcttcaaa

SEQ ID NO: 432740 - DNA, 25 bp, Artificial
  probe
  misc_feature (1)..(25): SEQ ID NO: 6228; WAN024F73; Start 35; Stop 59
tttatactcttcgcaaatctcttca

SEQ ID NO: 432741 - DNA, 25 bp, Artificial
  probe
  misc_feature (1)..(25): SEQ ID NO: 6228; WAN024F73; Start 148; Stop 172
ctgaaattggagtattgggctgttt

SEQ ID NO: 432742 - DNA, 25 bp, Artificial
  probe
  misc_feature (1)..(25): SEQ ID NO: 6228; WAN024F73; Start 145; Stop 169
tttctgaaattggagtattgggctg

SEQ ID NO: 432743 - DNA, 25 bp, Artificial
  probe
  misc_feature (1)..(25): SEQ ID NO: 6228; WAN024F73; Start 147; Stop 171
tctgaaattggagtattgggctgtt

SEQ ID NO: 432744 - DNA, 25 bp, Artificial
  probe
  misc_feature (1)..(25): SEQ ID NO: 6228; WAN024F73; Start 146; Stop 170
ttctgaaattggagtattgggctgt

SEQ ID NO: 432745 - DNA, 25 bp, Artificial
  probe
  misc_feature (1)..(25): SEQ ID NO: 6228; WAN024F73; Start 41; Stop 65
ctcttcgcaaatctcttcaaaccac

SEQ ID NO: 432746 - DNA, 25 bp, Artificial
  probe
  misc_feature (1)..(25): SEQ ID NO: 6228; WAN024F73; Start 40; Stop 64
actcttcgcaaatctcttcaaacca

SEQ ID NO: 432747 - DNA, 25 bp, Artificial
  probe
  misc_feature (1)..(25): SEQ ID NO: 6228; WAN024F73; Start 149; Stop 173
tgaaattggagtattgggctgtttt

SEQ ID NO: 432748 - DNA, 25 bp, Artificial
  probe
  misc_feature (1)..(25): SEQ ID NO: 6228; WAN024F73; Start 144; Stop 168
ttttctgaaattggagtattgggct

SEQ ID NO: 432749 - DNA, 25 bp, Artificial
  probe
  misc_feature (1)..(25): SEQ ID NO: 6228; WAN024F73; Start 32; Stop 56
acttttatactcttcgcaaatctct

SEQ ID NO: 432750 - DNA, 25 bp, Artificial
  probe
  misc_feature (1)..(25): SEQ ID NO: 6228; WAN024F73; Start 143; Stop 167
attttctgaaattggagtattgggc

SEQ ID NO: 432751 - DNA, 25 bp, Artificial
  probe
  misc_feature (1)..(25): SEQ ID NO: 6228; WAN024F73; Start 42; Stop 66
tcttcgcaaatctcttcaaaccacg

SEQ ID NO: 432752 - DNA, 25 bp, Artificial
  probe
  misc_feature (1)..(25): SEQ ID NO: 6228; WAN024F73; Start 34; Stop 58
ttttatactcttcgcaaatctcttc

SEQ ID NO: 432753 - DNA, 25 bp, Artificial
  probe
  misc_feature (1)..(25): SEQ ID NO: 6228; WAN024F73; Start 33; Stop 57
cttttatactcttcgcaaatctctt

SEQ ID NO: 432754 - DNA, 25 bp, Artificial
  probe
  misc_feature (1)..(25): SEQ ID NO: 6228; WAN024F73; Start 31; Stop 55
tacttttatactcttcgcaaatctc

SEQ ID NO: 432755 - DNA, 25 bp, Artificial
  probe
  misc_feature (1)..(25): SEQ ID NO: 6228; WAN024F73; Start 10; Stop 34
gctattttactggctattgattact

SEQ ID NO: 432756 - DNA, 25 bp, Artificial
  probe
  misc_feature (1)..(25): SEQ ID NO: 6228; WAN024F73; Start 27; Stop 51
tgattacttttatactcttcgcaaa

SEQ ID NO: 432757 - DNA, 25 bp, Artificial
  probe
  misc_feature (1)..(25): SEQ ID NO: 6228; WAN024F73; Start 48; Stop 72
caaatctcttcaaaccacgtcagct

SEQ ID NO: 432758 - DNA, 25 bp, Artificial
  probe
  misc_feature (1)..(25): SEQ ID NO: 6228; WAN024F73; Start 25; Stop 49
attgattacttttatactcttcgca

SEQ ID NO: 432759 - DNA, 25 bp, Artificial
  probe
  misc_feature (1)..(25): SEQ ID NO: 6228; WAN024F73; Start 30; Stop 54
ttacttttatactcttcgcaaatct

SEQ ID NO: 432760 - DNA, 25 bp, Artificial
  probe
  misc_feature (1)..(25): SEQ ID NO: 6228; WAN024F73; Start 142; Stop 166
tattttctgaaattggagtattggg

SEQ ID NO: 432761 - DNA, 25 bp, Artificial
  probe
  misc_feature (1)..(25): SEQ ID NO: 6228; WAN024F73; Start 26; Stop 50
ttgattacttttatactcttcgcaa

SEQ ID NO: 432762 - DNA, 25 bp, Artificial
  probe
  misc_feature (1)..(25): SEQ ID NO: 6228; WAN024F73; Start 5; Stop 29
aaggagctattttactggctattga

SEQ ID NO: 432763 - DNA, 25 bp, Artificial
  probe
  misc_feature (1)..(25): SEQ ID NO: 6228; WAN024F73; Start 3; Stop 27
ggaaggagctattttactggctatt

SEQ ID NO: 432764 - DNA, 25 bp, Artificial
  probe
  misc_feature (1)..(25): SEQ ID NO: 6228; WAN024F73; Start 6; Stop 30
aggagctattttactggctattgat

SEQ ID NO: 432765 - DNA, 25 bp, Artificial
  probe
  misc_feature (1)..(25): SEQ ID NO: 6228; WAN024F73; Start 4; Stop 28
gaaggagctattttactggctattg

SEQ ID NO: 432766 - DNA, 25 bp, Artificial
  probe
  misc_feature (1)..(25): SEQ ID NO: 6228; WAN024F73; Start 44; Stop 68
ttcgcaaatctcttcaaaccacgtc

SEQ ID NO: 432767 - DNA, 25 bp, Artificial
  probe
  misc_feature (1)..(25): SEQ ID NO: 6228; WAN024F73; Start 43; Stop 67
cttcgcaaatctcttcaaaccacgt

SEQ ID NO: 432768 - DNA, 25 bp, Artificial
  probe
  misc_feature (1)..(25): SEQ ID NO: 6228; WAN024F73; Start 7; Stop 31
ggagctattttactggctattgatt

SEQ ID NO: 432769 - DNA, 25 bp, Artificial
  probe
  misc_feature (1)..(25): SEQ ID NO: 6228; WAN024F73; Start 2; Stop 26
tggaaggagctattttactggctat

SEQ ID NO: 432770 - DNA, 25 bp, Artificial
  probe
  misc_feature (1)..(25): SEQ ID NO: 6229; WAN024BJ5; Start 34; Stop 58
gctatactcatcccaactcataact

SEQ ID NO: 432771 - DNA, 25 bp, Artificial
  probe
  misc_feature (1)..(25): SEQ ID NO: 6229; WAN024BJ5; Start 76; Stop 100
atcggtttcaaacttaaattccctc

SEQ ID NO: 432772 - DNA, 25 bp, Artificial
  probe
  misc_feature (1)..(25): SEQ ID NO: 6229; WAN024BJ5; Start 70; Stop 94
ggtccaatcggtttcaaacttaaat

SEQ ID NO: 432773 - DNA, 25 bp, Artificial
  probe
  misc_feature (1)..(25): SEQ ID NO: 6229; WAN024BJ5; Start 78; Stop 102
cggtttcaaacttaaattccctcag

SEQ ID NO: 432774 - DNA, 25 bp, Artificial
  probe
  misc_feature (1)..(25): SEQ ID NO: 6229; WAN024BJ5; Start 75; Stop 99
aatcggtttcaaacttaaattccct

SEQ ID NO: 432775 - DNA, 25 bp, Artificial
  probe
  misc_feature (1)..(25): SEQ ID NO: 6229; WAN024BJ5; Start 74; Stop 98
caatcggtttcaaacttaaattccc

SEQ ID NO: 432776 - DNA, 25 bp, Artificial
  probe
  misc_feature (1)..(25): SEQ ID NO: 6229; WAN024BJ5; Start 73; Stop 97
ccaatcggtttcaaacttaaattcc

SEQ ID NO: 432777 - DNA, 25 bp, Artificial
  probe
  misc_feature (1)..(25): SEQ ID NO: 6229; WAN024BJ5; Start 77; Stop 101
tcggtttcaaacttaaattccctca

SEQ ID NO: 432778 - DNA, 25 bp, Artificial
  probe
  misc_feature (1)..(25): SEQ ID NO: 6229; WAN024BJ5; Start 79; Stop 103
ggtttcaaacttaaattccctcagt

SEQ ID NO: 432779 - DNA, 25 bp, Artificial
  probe
  misc_feature (1)..(25): SEQ ID NO: 6229; WAN024BJ5; Start 71; Stop 95
gtccaatcggtttcaaacttaaatt

SEQ ID NO: 432780 - DNA, 25 bp, Artificial
  probe
  misc_feature (1)..(25): SEQ ID NO: 6229; WAN024BJ5; Start 69; Stop 93
tggtccaatcggtttcaaacttaaa

SEQ ID NO: 432781 - DNA, 25 bp, Artificial
  probe
  misc_feature (1)..(25): SEQ ID NO: 6229; WAN024BJ5; Start 72; Stop 96
tccaatcggtttcaaacttaaattc

SEQ ID NO: 432782 - DNA, 25 bp, Artificial
  probe
  misc_feature (1)..(25): SEQ ID NO: 6229; WAN024BJ5; Start 35; Stop 59
ctatactcatcccaactcataactt

SEQ ID NO: 432783 - DNA, 25 bp, Artificial
  probe
  misc_feature (1)..(25): SEQ ID NO: 6229; WAN024BJ5; Start 33; Stop 57
agctatactcatcccaactcataac

SEQ ID NO: 432784 - DNA, 25 bp, Artificial
  probe
  misc_feature (1)..(25): SEQ ID NO: 6229; WAN024BJ5; Start 31; Stop 55
gaagctatactcatcccaactcata

SEQ ID NO: 432785 - DNA, 25 bp, Artificial
  probe
  misc_feature (1)..(25): SEQ ID NO: 6229; WAN024BJ5; Start 32; Stop 56
aagctatactcatcccaactcataa

SEQ ID NO: 432786 - DNA, 25 bp, Artificial
  probe
  misc_feature (1)..(25): SEQ ID NO: 6229; WAN024BJ5; Start 68; Stop 92
ttggtccaatcggtttcaaacttaa

SEQ ID NO: 432787 - DNA, 25 bp, Artificial
  probe
  misc_feature (1)..(25): SEQ ID NO: 6229; WAN024BJ5; Start 28; Stop 52
tttgaagctatactcatcccaactc

SEQ ID NO: 432788 - DNA, 25 bp, Artificial
  probe
  misc_feature (1)..(25): SEQ ID NO: 6229; WAN024BJ5; Start 36; Stop 60
tatactcatcccaactcataacttt

SEQ ID NO: 432789 - DNA, 25 bp, Artificial
  probe
  misc_feature (1)..(25): SEQ ID NO: 6229; WAN024BJ5; Start 67; Stop 91
cttggtccaatcggtttcaaactta

SEQ ID NO: 432790 - DNA, 25 bp, Artificial
  probe
  misc_feature (1)..(25): SEQ ID NO: 6229; WAN024BJ5; Start 30; Stop 54
tgaagctatactcatcccaactcat

SEQ ID NO: 432791 - DNA, 25 bp, Artificial
  probe
  misc_feature (1)..(25): SEQ ID NO: 6229; WAN024BJ5; Start 29; Stop 53
ttgaagctatactcatcccaactca

SEQ ID NO: 432792 - DNA, 25 bp, Artificial
  probe
  misc_feature (1)..(25): SEQ ID NO: 6229; WAN024BJ5; Start 48; Stop 72
aactcataacttttggcaacttggt

SEQ ID NO: 432793 - DNA, 25 bp, Artificial
  probe
  misc_feature (1)..(25): SEQ ID NO: 6229; WAN024BJ5; Start 38; Stop 62
tactcatcccaactcataacttttg

SEQ ID NO: 432794 - DNA, 25 bp, Artificial
  probe
  misc_feature (1)..(25): SEQ ID NO: 6229; WAN024BJ5; Start 47; Stop 71
caactcataacttttggcaacttgg

SEQ ID NO: 432795 - DNA, 25 bp, Artificial
  probe
  misc_feature (1)..(25): SEQ ID NO: 6229; WAN024BJ5; Start 49; Stop 73
actcataacttttggcaacttggtc

SEQ ID NO: 432796 - DNA, 25 bp, Artificial
  probe
  misc_feature (1)..(25): SEQ ID NO: 6229; WAN024BJ5; Start 37; Stop 61
atactcatcccaactcataactttt

SEQ ID NO: 432797 - DNA, 25 bp, Artificial
  probe
  misc_feature (1)..(25): SEQ ID NO: 6229; WAN024BJ5; Start 80; Stop 104
gtttcaaacttaaattccctcagtt

SEQ ID NO: 432798 - DNA, 25 bp, Artificial
  probe
  misc_feature (1)..(25): SEQ ID NO: 6229; WAN024BJ5; Start 64; Stop 88
caacttggtccaatcggtttcaaac

SEQ ID NO: 432799 - DNA, 25 bp, Artificial
  probe
  misc_feature (1)..(25): SEQ ID NO: 6229; WAN024BJ5; Start 66; Stop 90
acttggtccaatcggtttcaaactt

SEQ ID NO: 432800 - DNA, 25 bp, Artificial
  probe
  misc_feature (1)..(25): SEQ ID NO: 6229; WAN024BJ5; Start 65; Stop 89
aacttggtccaatcggtttcaaact

SEQ ID NO: 432801 - DNA, 25 bp, Artificial
  probe
  misc_feature (1)..(25): SEQ ID NO: 6229; WAN024BJ5; Start 88; Stop 112
cttaaattccctcagttttcggatg

SEQ ID NO: 432802 - DNA, 25 bp, Artificial
  probe
  misc_feature (1)..(25): SEQ ID NO: 6229; WAN024BJ5; Start 89; Stop 113
ttaaattccctcagttttcggatga

SEQ ID NO: 432803 - DNA, 25 bp, Artificial
  probe
  misc_feature (1)..(25): SEQ ID NO: 6230; WAN024BJG; Start 220; Stop 244
gtgataatcaagtgtagcgaagact

SEQ ID NO: 432804 - DNA, 25 bp, Artificial
  probe
  misc_feature (1)..(25): SEQ ID NO: 6230; WAN024BJG; Start 219; Stop 243
ggtgataatcaagtgtagcgaagac

SEQ ID NO: 432805 - DNA, 25 bp, Artificial
  probe
  misc_feature (1)..(25): SEQ ID NO: 6230; WAN024BJG; Start 254; Stop 278
gtatcgtgctgaatggctttattta

SEQ ID NO: 432806 - DNA, 25 bp, Artificial
  probe
  misc_feature (1)..(25): SEQ ID NO: 6230; WAN024BJG; Start 197; Stop 221
ttacagtgtttacatttaggtgggt

SEQ ID NO: 432807 - DNA, 25 bp, Artificial
  probe
  misc_feature (1)..(25): SEQ ID NO: 6230; WAN024BJG; Start 201; Stop 225
agtgtttacatttaggtgggtgata

SEQ ID NO: 432808 - DNA, 25 bp, Artificial
  probe
  misc_feature (1)..(25): SEQ ID NO: 6230; WAN024BJG; Start 255; Stop 279
tatcgtgctgaatggctttatttaa

SEQ ID NO: 432809 - DNA, 25 bp, Artificial
  probe
  misc_feature (1)..(25): SEQ ID NO: 6230; WAN024BJG; Start 198; Stop 222
tacagtgtttacatttaggtgggtg

SEQ ID NO: 432810 - DNA, 25 bp, Artificial
  probe
  misc_feature (1)..(25): SEQ ID NO: 6230; WAN024BJG; Start 196; Stop 220
tttacagtgtttacatttaggtggg

SEQ ID NO: 432811 - DNA, 25 bp, Artificial
  probe
  misc_feature (1)..(25): SEQ ID NO: 6230; WAN024BJG; Start 202; Stop 226
gtgtttacatttaggtgggtgataa

SEQ ID NO: 432812 - DNA, 25 bp, Artificial
  probe
  misc_feature (1)..(25): SEQ ID NO: 6230; WAN024BJG; Start 200; Stop 224
cagtgtttacatttaggtgggtgat

SEQ ID NO: 432813 - DNA, 25 bp, Artificial
  probe
  misc_feature (1)..(25): SEQ ID NO: 6230; WAN024BJG; Start 168; Stop 192
tttggaagtcgtatttgatttgttt

SEQ ID NO: 432814 - DNA, 25 bp, Artificial
  probe
  misc_feature (1)..(25): SEQ ID NO: 6230; WAN024BJG; Start 253; Stop 277
ggtatcgtgctgaatggctttattt

SEQ ID NO: 432815 - DNA, 25 bp, Artificial
  probe
  misc_feature (1)..(25): SEQ ID NO: 6230; WAN024BJG; Start 212; Stop 236
ttaggtgggtgataatcaagtgtag

SEQ ID NO: 432816 - DNA, 25 bp, Artificial
  probe
  misc_feature (1)..(25): SEQ ID NO: 6230; WAN024BJG; Start 210; Stop 234
atttaggtgggtgataatcaagtgt

SEQ ID NO: 432817 - DNA, 25 bp, Artificial
  probe
  misc_feature (1)..(25): SEQ ID NO: 6230; WAN024BJG; Start 208; Stop 232
acatttaggtgggtgataatcaagt

SEQ ID NO: 432818 - DNA, 25 bp, Artificial
  probe
  misc_feature (1)..(25): SEQ ID NO: 6230; WAN024BJG; Start 209; Stop 233
catttaggtgggtgataatcaagtg

SEQ ID NO: 432819 - DNA, 25 bp, Artificial
  probe
  misc_feature (1)..(25): SEQ ID NO: 6230; WAN024BJG; Start 203; Stop 227
tgtttacatttaggtgggtgataat

SEQ ID NO: 432820 - DNA, 25 bp, Artificial
  probe
  misc_feature (1)..(25): SEQ ID NO: 6230; WAN024BJG; Start 195; Stop 219
ctttacagtgtttacatttaggtgg

SEQ ID NO: 432821 - DNA, 25 bp, Artificial
  probe
  misc_feature (1)..(25): SEQ ID NO: 6230; WAN024BJG; Start 211; Stop 235
tttaggtgggtgataatcaagtgta

SEQ ID NO: 432822 - DNA, 25 bp, Artificial
  probe
  misc_feature (1)..(25): SEQ ID NO: 6230; WAN024BJG; Start 221; Stop 245
tgataatcaagtgtagcgaagactt

SEQ ID NO: 432823 - DNA, 25 bp, Artificial
  probe
  misc_feature (1)..(25): SEQ ID NO: 6230; WAN024BJG; Start 199; Stop 223
acagtgtttacatttaggtgggtga

SEQ ID NO: 432824 - DNA, 25 bp, Artificial
  probe
  misc_feature (1)..(25): SEQ ID NO: 6230; WAN024BJG; Start 222; Stop 246
gataatcaagtgtagcgaagacttc

SEQ ID NO: 432825 - DNA, 25 bp, Artificial
  probe
  misc_feature (1)..(25): SEQ ID NO: 6230; WAN024BJG; Start 204; Stop 228
gtttacatttaggtgggtgataatc

SEQ ID NO: 432826 - DNA, 25 bp, Artificial
  probe
  misc_feature (1)..(25): SEQ ID NO: 6230; WAN024BJG; Start 110; Stop 134
ttcaaatgaatgaggctagggaaac

SEQ ID NO: 432827 - DNA, 25 bp, Artificial
  probe
  misc_feature (1)..(25): SEQ ID NO: 6230; WAN024BJG; Start 207; Stop 231
tacatttaggtgggtgataatcaag

SEQ ID NO: 432828 - DNA, 25 bp, Artificial
  probe
  misc_feature (1)..(25): SEQ ID NO: 6230; WAN024BJG; Start 213; Stop 237
taggtgggtgataatcaagtgtagc

SEQ ID NO: 432829 - DNA, 25 bp, Artificial
  probe
  misc_feature (1)..(25): SEQ ID NO: 6230; WAN024BJG; Start 126; Stop 150
tagggaaaccaccaatctcgataaa

SEQ ID NO: 432830 - DNA, 25 bp, Artificial
  probe
  misc_feature (1)..(25): SEQ ID NO: 6230; WAN024BJG; Start 206; Stop 230
ttacatttaggtgggtgataatcaa

SEQ ID NO: 432831 - DNA, 25 bp, Artificial
  probe
  misc_feature (1)..(25): SEQ ID NO: 6230; WAN024BJG; Start 205; Stop 229
tttacatttaggtgggtgataatca

SEQ ID NO: 432832 - DNA, 25 bp, Artificial
  probe
  misc_feature (1)..(25): SEQ ID NO: 6230; WAN024BJG; Start 194; Stop 218
cctttacagtgtttacatttaggtg

SEQ ID NO: 432833 - DNA, 25 bp, Artificial
  probe
  misc_feature (1)..(25): SEQ ID NO: 6230; WAN024BJG; Start 193; Stop 217
tcctttacagtgtttacatttaggt

SEQ ID NO: 432834 - DNA, 25 bp, Artificial
  probe
  misc_feature (1)..(25): SEQ ID NO: 6230; WAN024BJG; Start 125; Stop 149
ctagggaaaccaccaatctcgataa

SEQ ID NO: 432835 - DNA, 25 bp, Artificial
  probe
  misc_feature (1)..(25): SEQ ID NO: 6230; WAN024BJG; Start 218; Stop 242
gggtgataatcaagtgtagcgaaga

SEQ ID NO: 432836 - DNA, 25 bp, Artificial
  probe
  misc_feature (1)..(25): SEQ ID NO: 6231; WAN024F78; Start 45; Stop 69
tgttattagagtcctgaagttgctg

SEQ ID NO: 432837 - DNA, 25 bp, Artificial
  probe
  misc_feature (1)..(25): SEQ ID NO: 6231; WAN024F78; Start 44; Stop 68
gtgttattagagtcctgaagttgct

SEQ ID NO: 432838 - DNA, 25 bp, Artificial
  probe
  misc_feature (1)..(25): SEQ ID NO: 6231; WAN024F78; Start 34; Stop 58
cttgtagcaggtgttattagagtcc

SEQ ID NO: 432839 - DNA, 25 bp, Artificial
  probe
  misc_feature (1)..(25): SEQ ID NO: 6231; WAN024F78; Start 46; Stop 70
gttattagagtcctgaagttgctgg

SEQ ID NO: 432840 - DNA, 25 bp, Artificial
  probe
  misc_feature (1)..(25): SEQ ID NO: 6231; WAN024F78; Start 48; Stop 72
tattagagtcctgaagttgctggtt

SEQ ID NO: 432841 - DNA, 25 bp, Artificial
  probe
  misc_feature (1)..(25): SEQ ID NO: 6231; WAN024F78; Start 47; Stop 71
ttattagagtcctgaagttgctggt

SEQ ID NO: 432842 - DNA, 25 bp, Artificial
  probe
  misc_feature (1)..(25): SEQ ID NO: 6231; WAN024F78; Start 43; Stop 67
ggtgttattagagtcctgaagttgc

SEQ ID NO: 432843 - DNA, 25 bp, Artificial
  probe
  misc_feature (1)..(25): SEQ ID NO: 6231; WAN024F78; Start 33; Stop 57
acttgtagcaggtgttattagagtc

SEQ ID NO: 432844 - DNA, 25 bp, Artificial
  probe
  misc_feature (1)..(25): SEQ ID NO: 6231; WAN024F78; Start 32; Stop 56
tacttgtagcaggtgttattagagt

SEQ ID NO: 432845 - DNA, 25 bp, Artificial
  probe
  misc_feature (1)..(25): SEQ ID NO: 6231; WAN024F78; Start 31; Stop 55
ttacttgtagcaggtgttattagag

SEQ ID NO: 432846 - DNA, 25 bp, Artificial
  probe
  misc_feature (1)..(25): SEQ ID NO: 6231; WAN024F78; Start 42; Stop 66
aggtgttattagagtcctgaagttg

SEQ ID NO: 432847 - DNA, 25 bp, Artificial
  probe
  misc_feature (1)..(25): SEQ ID NO: 6231; WAN024F78; Start 35; Stop 59
ttgtagcaggtgttattagagtcct

SEQ ID NO: 432848 - DNA, 25 bp, Artificial
  probe
  misc_feature (1)..(25): SEQ ID NO: 6231; WAN024F78; Start 27; Stop 51
aggtttacttgtagcaggtgttatt

SEQ ID NO: 432849 - DNA, 25 bp, Artificial
  probe
  misc_feature (1)..(25): SEQ ID NO: 6231; WAN024F78; Start 26; Stop 50
caggtttacttgtagcaggtgttat

SEQ ID NO: 432850 - DNA, 25 bp, Artificial
  probe
  misc_feature (1)..(25): SEQ ID NO: 6231; WAN024F78; Start 28; Stop 52
ggtttacttgtagcaggtgttatta

SEQ ID NO: 432851 - DNA, 25 bp, Artificial
  probe
  misc_feature (1)..(25): SEQ ID NO: 6231; WAN024F78; Start 49; Stop 73
attagagtcctgaagttgctggttt

SEQ ID NO: 432852 - DNA, 25 bp, Artificial
  probe
  misc_feature (1)..(25): SEQ ID NO: 6231; WAN024F78; Start 30; Stop 54
tttacttgtagcaggtgttattaga

SEQ ID NO: 432853 - DNA, 25 bp, Artificial
  probe
  misc_feature (1)..(25): SEQ ID NO: 6231; WAN024F78; Start 29; Stop 53
gtttacttgtagcaggtgttattag

SEQ ID NO: 432854 - DNA, 25 bp, Artificial
  probe
  misc_feature (1)..(25): SEQ ID NO: 6231; WAN024F78; Start 25; Stop 49
gcaggtttacttgtagcaggtgtta

SEQ ID NO: 432855 - DNA, 25 bp, Artificial
  probe
  misc_feature (1)..(25): SEQ ID NO: 6231; WAN024F78; Start 17; Stop 41
tttcagtggcaggtttacttgtagc

SEQ ID NO: 432856 - DNA, 25 bp, Artificial
  probe
  misc_feature (1)..(25): SEQ ID NO: 6231; WAN024F78; Start 15; Stop 39
attttcagtggcaggtttacttgta

SEQ ID NO: 432857 - DNA, 25 bp, Artificial
  probe
  misc_feature (1)..(25): SEQ ID NO: 6231; WAN024F78; Start 16; Stop 40
ttttcagtggcaggtttacttgtag

SEQ ID NO: 432858 - DNA, 25 bp, Artificial
  probe
  misc_feature (1)..(25): SEQ ID NO: 6231; WAN024F78; Start 50; Stop 74
ttagagtcctgaagttgctggtttt

SEQ ID NO: 432859 - DNA, 25 bp, Artificial
  probe
  misc_feature (1)..(25): SEQ ID NO: 6231; WAN024F78; Start 14; Stop 38
cattttcagtggcaggtttacttgt

SEQ ID NO: 432860 - DNA, 25 bp, Artificial
  probe
  misc_feature (1)..(25): SEQ ID NO: 6231; WAN024F78; Start 51; Stop 75
tagagtcctgaagttgctggttttc

SEQ ID NO: 432861 - DNA, 25 bp, Artificial
  probe
  misc_feature (1)..(25): SEQ ID NO: 6231; WAN024F78; Start 18; Stop 42
ttcagtggcaggtttacttgtagca

SEQ ID NO: 432862 - DNA, 25 bp, Artificial
  probe
  misc_feature (1)..(25): SEQ ID NO: 6231; WAN024F78; Start 41; Stop 65
caggtgttattagagtcctgaagtt

SEQ ID NO: 432863 - DNA, 25 bp, Artificial
  probe
  misc_feature (1)..(25): SEQ ID NO: 6231; WAN024F78; Start 38; Stop 62
tagcaggtgttattagagtcctgaa

SEQ ID NO: 432864 - DNA, 25 bp, Artificial
  probe
  misc_feature (1)..(25): SEQ ID NO: 6231; WAN024F78; Start 37; Stop 61
gtagcaggtgttattagagtcctga

SEQ ID NO: 432865 - DNA, 25 bp, Artificial
  probe
  misc_feature (1)..(25): SEQ ID NO: 6231; WAN024F78; Start 36; Stop 60
tgtagcaggtgttattagagtcctg

SEQ ID NO: 432866 - DNA, 25 bp, Artificial
  probe
  misc_feature (1)..(25): SEQ ID NO: 6231; WAN024F78; Start 19; Stop 43
tcagtggcaggtttacttgtagcag

SEQ ID NO: 432867 - DNA, 25 bp, Artificial
  probe
  misc_feature (1)..(25): SEQ ID NO: 6231; WAN024F78; Start 39; Stop 63
agcaggtgttattagagtcctgaag

SEQ ID NO: 432868 - DNA, 25 bp, Artificial
  probe
  misc_feature (1)..(25): SEQ ID NO: 6231; WAN024F78; Start 40; Stop 64
gcaggtgttattagagtcctgaagt

SEQ ID NO: 432869 - DNA, 25 bp, Artificial
  probe
  misc_feature (1)..(25): SEQ ID NO: 6232; WAN02495Z; Start 5; Stop 29
ggtcagtacaatattagggtgtgat

SEQ ID NO: 432870 - DNA, 25 bp, Artificial
  probe
  misc_feature (1)..(25): SEQ ID NO: 6232; WAN02495Z; Start 4; Stop 28
gggtcagtacaatattagggtgtga

SEQ ID NO: 432871 - DNA, 25 bp, Artificial
  probe
  misc_feature (1)..(25): SEQ ID NO: 6232; WAN02495Z; Start 6; Stop 30
gtcagtacaatattagggtgtgatt

SEQ ID NO: 432872 - DNA, 25 bp, Artificial
  probe
  misc_feature (1)..(25): SEQ ID NO: 6232; WAN02495Z; Start 7; Stop 31
tcagtacaatattagggtgtgatta

SEQ ID NO: 432873 - DNA, 25 bp, Artificial
  probe
  misc_feature (1)..(25): SEQ ID NO: 6232; WAN02495Z; Start 1; Stop 25
ttggggtcagtacaatattagggtg

SEQ ID NO: 432874 - DNA, 25 bp, Artificial
  probe
  misc_feature (1)..(25): SEQ ID NO: 6232; WAN02495Z; Start 8; Stop 32
cagtacaatattagggtgtgattaa

SEQ ID NO: 432875 - DNA, 25 bp, Artificial
  probe
  misc_feature (1)..(25): SEQ ID NO: 6232; WAN02495Z; Start 3; Stop 27
ggggtcagtacaatattagggtgtg

SEQ ID NO: 432876 - DNA, 25 bp, Artificial
  probe
  misc_feature (1)..(25): SEQ ID NO: 6232; WAN02495Z; Start 2; Stop 26
tggggtcagtacaatattagggtgt

SEQ ID NO: 432877 - DNA, 25 bp, Artificial
  probe
  misc_feature (1)..(25): SEQ ID NO: 6232; WAN02495Z; Start 9; Stop 33
agtacaatattagggtgtgattaat

SEQ ID NO: 432878 - DNA, 25 bp, Artificial
  probe
  misc_feature (1)..(25): SEQ ID NO: 6232; WAN02495Z; Start 66; Stop 90
agctgtttgatacgaaatttattat

SEQ ID NO: 432879 - DNA, 25 bp, Artificial
  probe
  misc_feature (1)..(25): SEQ ID NO: 6232; WAN02495Z; Start 64; Stop 88
atagctgtttgatacgaaatttatt

SEQ ID NO: 432880 - DNA, 25 bp, Artificial
  probe
  misc_feature (1)..(25): SEQ ID NO: 6232; WAN02495Z; Start 61; Stop 85
attatagctgtttgatacgaaattt

SEQ ID NO: 432881 - DNA, 25 bp, Artificial
  probe
  misc_feature (1)..(25): SEQ ID NO: 6232; WAN02495Z; Start 56; Stop 80
tctatattatagctgtttgatacga

SEQ ID NO: 432882 - DNA, 25 bp, Artificial
  probe
  misc_feature (1)..(25): SEQ ID NO: 6233; WAN024BJN; Start 152; Stop 176
aggtattctccttctggaacagtaa

SEQ ID NO: 432883 - DNA, 25 bp, Artificial
  probe
  misc_feature (1)..(25): SEQ ID NO: 6233; WAN024BJN; Start 182; Stop 206
aagttggtgttgtagttgacatcaa

SEQ ID NO: 432884 - DNA, 25 bp, Artificial
  probe
  misc_feature (1)..(25): SEQ ID NO: 6233; WAN024BJN; Start 180; Stop 204
taaagttggtgttgtagttgacatc

SEQ ID NO: 432885 - DNA, 25 bp, Artificial
  probe
  misc_feature (1)..(25): SEQ ID NO: 6233; WAN024BJN; Start 179; Stop 203
ctaaagttggtgttgtagttgacat

SEQ ID NO: 432886 - DNA, 25 bp, Artificial
  probe
  misc_feature (1)..(25): SEQ ID NO: 6233; WAN024BJN; Start 181; Stop 205
aaagttggtgttgtagttgacatca

SEQ ID NO: 432887 - DNA, 25 bp, Artificial
  probe
  misc_feature (1)..(25): SEQ ID NO: 6233; WAN024BJN; Start 175; Stop 199
aaagctaaagttggtgttgtagttg

SEQ ID NO: 432888 - DNA, 25 bp, Artificial
  probe
  misc_feature (1)..(25): SEQ ID NO: 6233; WAN024BJN; Start 153; Stop 177
ggtattctccttctggaacagtaaa

SEQ ID NO: 432889 - DNA, 25 bp, Artificial
  probe
  misc_feature (1)..(25): SEQ ID NO: 6233; WAN024BJN; Start 155; Stop 179
tattctccttctggaacagtaaagc

SEQ ID NO: 432890 - DNA, 25 bp, Artificial
  probe
  misc_feature (1)..(25): SEQ ID NO: 6233; WAN024BJN; Start 178; Stop 202
gctaaagttggtgttgtagttgaca

SEQ ID NO: 432891 - DNA, 25 bp, Artificial
  probe
  misc_feature (1)..(25): SEQ ID NO: 6233; WAN024BJN; Start 173; Stop 197
gtaaagctaaagttggtgttgtagt

SEQ ID NO: 432892 - DNA, 25 bp, Artificial
  probe
  misc_feature (1)..(25): SEQ ID NO: 6233; WAN024BJN; Start 171; Stop 195
cagtaaagctaaagttggtgttgta

SEQ ID NO: 432893 - DNA, 25 bp, Artificial
  probe
  misc_feature (1)..(25): SEQ ID NO: 6233; WAN024BJN; Start 176; Stop 200
aagctaaagttggtgttgtagttga

SEQ ID NO: 432894 - DNA, 25 bp, Artificial
  probe
  misc_feature (1)..(25): SEQ ID NO: 6233; WAN024BJN; Start 172; Stop 196
agtaaagctaaagttggtgttgtag

SEQ ID NO: 432895 - DNA, 25 bp, Artificial
  probe
  misc_feature (1)..(25): SEQ ID NO: 6233; WAN024BJN; Start 154; Stop 178
gtattctccttctggaacagtaaag

SEQ ID NO: 432896 - DNA, 25 bp, Artificial
  probe
  misc_feature (1)..(25): SEQ ID NO: 6233; WAN024BJN; Start 174; Stop 198
taaagctaaagttggtgttgtagtt

SEQ ID NO: 432897 - DNA, 25 bp, Artificial
  probe
  misc_feature (1)..(25): SEQ ID NO: 6233; WAN024BJN; Start 177; Stop 201
agctaaagttggtgttgtagttgac

SEQ ID NO: 432898 - DNA, 25 bp, Artificial
  probe
  misc_feature (1)..(25): SEQ ID NO: 6233; WAN024BJN; Start 166; Stop 190
tggaacagtaaagctaaagttggtg

SEQ ID NO: 432899 - DNA, 25 bp, Artificial
  probe
  misc_feature (1)..(25): SEQ ID NO: 6233; WAN024BJN; Start 246; Stop 270
aagttcctttatttccttcaaagcc

SEQ ID NO: 432900 - DNA, 25 bp, Artificial
  probe
  misc_feature (1)..(25): SEQ ID NO: 6233; WAN024BJN; Start 163; Stop 187
ttctggaacagtaaagctaaagttg

SEQ ID NO: 432901 - DNA, 25 bp, Artificial
  probe
  misc_feature (1)..(25): SEQ ID NO: 6233; WAN024BJN; Start 249; Stop 273
ttcctttatttccttcaaagccctt

SEQ ID NO: 432902 - DNA, 25 bp, Artificial
  probe
  misc_feature (1)..(25): SEQ ID NO: 6233; WAN024BJN; Start 170; Stop 194
acagtaaagctaaagttggtgttgt

SEQ ID NO: 432903 - DNA, 25 bp, Artificial
  probe
  misc_feature (1)..(25): SEQ ID NO: 6233; WAN024BJN; Start 161; Stop 185
ccttctggaacagtaaagctaaagt

SEQ ID NO: 432904 - DNA, 25 bp, Artificial
  probe
  misc_feature (1)..(25): SEQ ID NO: 6233; WAN024BJN; Start 162; Stop 186
cttctggaacagtaaagctaaagtt

SEQ ID NO: 432905 - DNA, 25 bp, Artificial
  probe
  misc_feature (1)..(25): SEQ ID NO: 6233; WAN024BJN; Start 164; Stop 188
tctggaacagtaaagctaaagttgg

SEQ ID NO: 432906 - DNA, 25 bp, Artificial
  probe
  misc_feature (1)..(25): SEQ ID NO: 6233; WAN024BJN; Start 167; Stop 191
ggaacagtaaagctaaagttggtgt

SEQ ID NO: 432907 - DNA, 25 bp, Artificial
  probe
  misc_feature (1)..(25): SEQ ID NO: 6233; WAN024BJN; Start 165; Stop 189
ctggaacagtaaagctaaagttggt

SEQ ID NO: 432908 - DNA, 25 bp, Artificial
  probe
  misc_feature (1)..(25): SEQ ID NO: 6233; WAN024BJN; Start 160; Stop 184
tccttctggaacagtaaagctaaag

SEQ ID NO: 432909 - DNA, 25 bp, Artificial
  probe
  misc_feature (1)..(25): SEQ ID NO: 6233; WAN024BJN; Start 159; Stop 183
ctccttctggaacagtaaagctaaa

SEQ ID NO: 432910 - DNA, 25 bp, Artificial
  probe
  misc_feature (1)..(25): SEQ ID NO: 6233; WAN024BJN; Start 250; Stop 274
tcctttatttccttcaaagcccttg

SEQ ID NO: 432911 - DNA, 25 bp, Artificial
  probe
  misc_feature (1)..(25): SEQ ID NO: 6233; WAN024BJN; Start 248; Stop 272
gttcctttatttccttcaaagccct

SEQ ID NO: 432912 - DNA, 25 bp, Artificial
  probe
  misc_feature (1)..(25): SEQ ID NO: 6233; WAN024BJN; Start 247; Stop 271
agttcctttatttccttcaaagccc

SEQ ID NO: 432913 - DNA, 25 bp, Artificial
  probe
  misc_feature (1)..(25): SEQ ID NO: 6233; WAN024BJN; Start 253; Stop 277
tttatttccttcaaagcccttgcct

SEQ ID NO: 432914 - DNA, 25 bp, Artificial
  probe
  misc_feature (1)..(25): SEQ ID NO: 6233; WAN024BJN; Start 21; Stop 45
aggtttcttaaaatgttccgatacg

SEQ ID NO: 432915 - DNA, 25 bp, Artificial
  probe
  misc_feature (1)..(25): SEQ ID NO: 6234; WAN024BJL; Start 258; Stop 282
caatcaccgtattctcagcactaag

SEQ ID NO: 432916 - DNA, 25 bp, Artificial
  probe
  misc_feature (1)..(25): SEQ ID NO: 6234; WAN024BJL; Start 260; Stop 284
atcaccgtattctcagcactaagat

SEQ ID NO: 432917 - DNA, 25 bp, Artificial
  probe
  misc_feature (1)..(25): SEQ ID NO: 6234; WAN024BJL; Start 259; Stop 283
aatcaccgtattctcagcactaaga

SEQ ID NO: 432918 - DNA, 25 bp, Artificial
  probe
  misc_feature (1)..(25): SEQ ID NO: 6234; WAN024BJL; Start 164; Stop 188
gcttgaggttccatagaatgacatt

SEQ ID NO: 432919 - DNA, 25 bp, Artificial
  probe
  misc_feature (1)..(25): SEQ ID NO: 6234; WAN024BJL; Start 257; Stop 281
acaatcaccgtattctcagcactaa

SEQ ID NO: 432920 - DNA, 25 bp, Artificial
  probe
  misc_feature (1)..(25): SEQ ID NO: 6234; WAN024BJL; Start 160; Stop 184
aatcgcttgaggttccatagaatga

SEQ ID NO: 432921 - DNA, 25 bp, Artificial
  probe
  misc_feature (1)..(25): SEQ ID NO: 6234; WAN024BJL; Start 159; Stop 183
caatcgcttgaggttccatagaatg

SEQ ID NO: 432922 - DNA, 25 bp, Artificial
  probe
  misc_feature (1)..(25): SEQ ID NO: 6234; WAN024BJL; Start 261; Stop 285
tcaccgtattctcagcactaagatg

SEQ ID NO: 432923 - DNA, 25 bp, Artificial
  probe
  misc_feature (1)..(25): SEQ ID NO: 6234; WAN024BJL; Start 256; Stop 280
cacaatcaccgtattctcagcacta

SEQ ID NO: 432924 - DNA, 25 bp, Artificial
  probe
  misc_feature (1)..(25): SEQ ID NO: 6234; WAN024BJL; Start 262; Stop 286
caccgtattctcagcactaagatga

SEQ ID NO: 432925 - DNA, 25 bp, Artificial
  probe
  misc_feature (1)..(25): SEQ ID NO: 6234; WAN024BJL; Start 158; Stop 182
acaatcgcttgaggttccatagaat

SEQ ID NO: 432926 - DNA, 25 bp, Artificial
  probe
  misc_feature (1)..(25): SEQ ID NO: 6234; WAN024BJL; Start 161; Stop 185
atcgcttgaggttccatagaatgac

SEQ ID NO: 432927 - DNA, 25 bp, Artificial
  probe
  misc_feature (1)..(25): SEQ ID NO: 6234; WAN024BJL; Start 163; Stop 187
cgcttgaggttccatagaatgacat

SEQ ID NO: 432928 - DNA, 25 bp, Artificial
  probe
  misc_feature (1)..(25): SEQ ID NO: 6234; WAN024BJL; Start 157; Stop 181
gacaatcgcttgaggttccatagaa

SEQ ID NO: 432929 - DNA, 25 bp, Artificial
  probe
  misc_feature (1)..(25): SEQ ID NO: 6234; WAN024BJL; Start 108; Stop 132
gacaatagttcacagcgatatccaa

SEQ ID NO: 432930 - DNA, 25 bp, Artificial
  probe
  misc_feature (1)..(25): SEQ ID NO: 6234; WAN024BJL; Start 105; Stop 129
catgacaatagttcacagcgatatc

SEQ ID NO: 432931 - DNA, 25 bp, Artificial
  probe
  misc_feature (1)..(25): SEQ ID NO: 6234; WAN024BJL; Start 32; Stop 56
tgataaccactgtcaaccaagattt

SEQ ID NO: 432932 - DNA, 25 bp, Artificial
  probe
  misc_feature (1)..(25): SEQ ID NO: 6234; WAN024BJL; Start 106; Stop 130
atgacaatagttcacagcgatatcc

SEQ ID NO: 432933 - DNA, 25 bp, Artificial
  probe
  misc_feature (1)..(25): SEQ ID NO: 6234; WAN024BJL; Start 196; Stop 220
taccagaataattggctagttgatt

SEQ ID NO: 432934 - DNA, 25 bp, Artificial
  probe
  misc_feature (1)..(25): SEQ ID NO: 6234; WAN024BJL; Start 195; Stop 219
ttaccagaataattggctagttgat

SEQ ID NO: 432935 - DNA, 25 bp, Artificial
  probe
  misc_feature (1)..(25): SEQ ID NO: 6234; WAN024BJL; Start 166; Stop 190
ttgaggttccatagaatgacatttc

SEQ ID NO: 432936 - DNA, 25 bp, Artificial
  probe
  misc_feature (1)..(25): SEQ ID NO: 6234; WAN024BJL; Start 165; Stop 189
cttgaggttccatagaatgacattt

SEQ ID NO: 432937 - DNA, 25 bp, Artificial
  probe
  misc_feature (1)..(25): SEQ ID NO: 6234; WAN024BJL; Start 31; Stop 55
ttgataaccactgtcaaccaagatt

SEQ ID NO: 432938 - DNA, 25 bp, Artificial
  probe
  misc_feature (1)..(25): SEQ ID NO: 6234; WAN024BJL; Start 107; Stop 131
tgacaatagttcacagcgatatcca

SEQ ID NO: 432939 - DNA, 25 bp, Artificial
  probe
  misc_feature (1)..(25): SEQ ID NO: 6234; WAN024BJL; Start 252; Stop 276
catccacaatcaccgtattctcagc

SEQ ID NO: 432940 - DNA, 25 bp, Artificial
  probe
  misc_feature (1)..(25): SEQ ID NO: 6234; WAN024BJL; Start 251; Stop 275
gcatccacaatcaccgtattctcag

SEQ ID NO: 432941 - DNA, 25 bp, Artificial
  probe
  misc_feature (1)..(25): SEQ ID NO: 6234; WAN024BJL; Start 162; Stop 186
tcgcttgaggttccatagaatgaca

SEQ ID NO: 432942 - DNA, 25 bp, Artificial
  probe
  misc_feature (1)..(25): SEQ ID NO: 6234; WAN024BJL; Start 155; Stop 179
gtgacaatcgcttgaggttccatag

SEQ ID NO: 432943 - DNA, 25 bp, Artificial
  probe
  misc_feature (1)..(25): SEQ ID NO: 6234; WAN024BJL; Start 156; Stop 180
tgacaatcgcttgaggttccataga

SEQ ID NO: 432944 - DNA, 25 bp, Artificial
  probe
  misc_feature (1)..(25): SEQ ID NO: 6234; WAN024BJL; Start 253; Stop 277
atccacaatcaccgtattctcagca

SEQ ID NO: 432945 - DNA, 25 bp, Artificial
  probe
  misc_feature (1)..(25): SEQ ID NO: 6234; WAN024BJL; Start 111; Stop 135
aatagttcacagcgatatccaaaga

SEQ ID NO: 432946 - DNA, 25 bp, Artificial
  probe
  misc_feature (1)..(25): SEQ ID NO: 6234; WAN024BJL; Start 110; Stop 134
caatagttcacagcgatatccaaag

SEQ ID NO: 432947 - DNA, 25 bp, Artificial
  probe
  misc_feature (1)..(25): SEQ ID NO: 6234; WAN024BJL; Start 118; Stop 142
cacagcgatatccaaagaaacaatt

SEQ ID NO: 432948 - DNA, 25 bp, Artificial
  probe
  misc_feature (1)..(25): SEQ ID NO: 6235; WAN024993; Start 160; Stop 184
gactactctcggattgttgtataga

SEQ ID NO: 432949 - DNA, 25 bp, Artificial
  probe
  misc_feature (1)..(25): SEQ ID NO: 6235; WAN024993; Start 159; Stop 183
agactactctcggattgttgtatag

SEQ ID NO: 432950 - DNA, 25 bp, Artificial
  probe
  misc_feature (1)..(25): SEQ ID NO: 6235; WAN024993; Start 161; Stop 185
actactctcggattgttgtatagaa

SEQ ID NO: 432951 - DNA, 25 bp, Artificial
  probe
  misc_feature (1)..(25): SEQ ID NO: 6235; WAN024993; Start 162; Stop 186
ctactctcggattgttgtatagaaa

SEQ ID NO: 432952 - DNA, 25 bp, Artificial
  probe
  misc_feature (1)..(25): SEQ ID NO: 6235; WAN024993; Start 144; Stop 168
aatgttcaaattgtgagactactct

SEQ ID NO: 432953 - DNA, 25 bp, Artificial
  probe
  misc_feature (1)..(25): SEQ ID NO: 6235; WAN024993; Start 164; Stop 188
actctcggattgttgtatagaaatt

SEQ ID NO: 432954 - DNA, 25 bp, Artificial
  probe
  misc_feature (1)..(25): SEQ ID NO: 6235; WAN024993; Start 142; Stop 166
gaaatgttcaaattgtgagactact

SEQ ID NO: 432955 - DNA, 25 bp, Artificial
  probe
  misc_feature (1)..(25): SEQ ID NO: 6235; WAN024993; Start 143; Stop 167
aaatgttcaaattgtgagactactc

SEQ ID NO: 432956 - DNA, 25 bp, Artificial
  probe
  misc_feature (1)..(25): SEQ ID NO: 6235; WAN024993; Start 81; Stop 105
attaggaaatcttagtcagaggttt

SEQ ID NO: 432957 - DNA, 25 bp, Artificial
  probe
  misc_feature (1)..(25): SEQ ID NO: 6235; WAN024993; Start 80; Stop 104
aattaggaaatcttagtcagaggtt

SEQ ID NO: 432958 - DNA, 25 bp, Artificial
  probe
  misc_feature (1)..(25): SEQ ID NO: 6235; WAN024993; Start 163; Stop 187
tactctcggattgttgtatagaaat

SEQ ID NO: 432959 - DNA, 25 bp, Artificial
  probe
  misc_feature (1)..(25): SEQ ID NO: 6235; WAN024993; Start 158; Stop 182
gagactactctcggattgttgtata

SEQ ID NO: 432960 - DNA, 25 bp, Artificial
  probe
  misc_feature (1)..(25): SEQ ID NO: 6235; WAN024993; Start 157; Stop 181
tgagactactctcggattgttgtat

SEQ ID NO: 432961 - DNA, 25 bp, Artificial
  probe
  misc_feature (1)..(25): SEQ ID NO: 6235; WAN024993; Start 83; Stop 107
taggaaatcttagtcagaggtttct

SEQ ID NO: 432962 - DNA, 25 bp, Artificial
  probe
  misc_feature (1)..(25): SEQ ID NO: 6235; WAN024993; Start 153; Stop 177
attgtgagactactctcggattgtt

SEQ ID NO: 432963 - DNA, 25 bp, Artificial
  probe
  misc_feature (1)..(25): SEQ ID NO: 6235; WAN024993; Start 152; Stop 176
aattgtgagactactctcggattgt

SEQ ID NO: 432964 - DNA, 25 bp, Artificial
  probe
  misc_feature (1)..(25): SEQ ID NO: 6235; WAN024993; Start 156; Stop 180
gtgagactactctcggattgttgta

SEQ ID NO: 432965 - DNA, 25 bp, Artificial
  probe
  misc_feature (1)..(25): SEQ ID NO: 6235; WAN024993; Start 139; Stop 163
tgtgaaatgttcaaattgtgagact

SEQ ID NO: 432966 - DNA, 25 bp, Artificial
  probe
  misc_feature (1)..(25): SEQ ID NO: 6235; WAN024993; Start 82; Stop 106
ttaggaaatcttagtcagaggtttc

SEQ ID NO: 432967 - DNA, 25 bp, Artificial
  probe
  misc_feature (1)..(25): SEQ ID NO: 6235; WAN024993; Start 135; Stop 159
gtgatgtgaaatgttcaaattgtga

SEQ ID NO: 432968 - DNA, 25 bp, Artificial
  probe
  misc_feature (1)..(25): SEQ ID NO: 6235; WAN024993; Start 134; Stop 158
agtgatgtgaaatgttcaaattgtg

SEQ ID NO: 432969 - DNA, 25 bp, Artificial
  probe
  misc_feature (1)..(25): SEQ ID NO: 6235; WAN024993; Start 138; Stop 162
atgtgaaatgttcaaattgtgagac

SEQ ID NO: 432970 - DNA, 25 bp, Artificial
  probe
  misc_feature (1)..(25): SEQ ID NO: 6235; WAN024993; Start 136; Stop 160
tgatgtgaaatgttcaaattgtgag

SEQ ID NO: 432971 - DNA, 25 bp, Artificial
  probe
  misc_feature (1)..(25): SEQ ID NO: 6235; WAN024993; Start 133; Stop 157
gagtgatgtgaaatgttcaaattgt

SEQ ID NO: 432972 - DNA, 25 bp, Artificial
  probe
  misc_feature (1)..(25): SEQ ID NO: 6235; WAN024993; Start 154; Stop 178
ttgtgagactactctcggattgttg

SEQ ID NO: 432973 - DNA, 25 bp, Artificial
  probe
  misc_feature (1)..(25): SEQ ID NO: 6235; WAN024993; Start 137; Stop 161
gatgtgaaatgttcaaattgtgaga

SEQ ID NO: 432974 - DNA, 25 bp, Artificial
  probe
  misc_feature (1)..(25): SEQ ID NO: 6235; WAN024993; Start 132; Stop 156
agagtgatgtgaaatgttcaaattg

SEQ ID NO: 432975 - DNA, 25 bp, Artificial
  probe
  misc_feature (1)..(25): SEQ ID NO: 6235; WAN024993; Start 165; Stop 189
ctctcggattgttgtatagaaattt

SEQ ID NO: 432976 - DNA, 25 bp, Artificial
  probe
  misc_feature (1)..(25): SEQ ID NO: 6235; WAN024993; Start 141; Stop 165
tgaaatgttcaaattgtgagactac

SEQ ID NO: 432977 - DNA, 25 bp, Artificial
  probe
  misc_feature (1)..(25): SEQ ID NO: 6235; WAN024993; Start 140; Stop 164
gtgaaatgttcaaattgtgagacta

SEQ ID NO: 432978 - DNA, 25 bp, Artificial
  probe
  misc_feature (1)..(25): SEQ ID NO: 6235; WAN024993; Start 79; Stop 103
taattaggaaatcttagtcagaggt

SEQ ID NO: 432979 - DNA, 25 bp, Artificial
  probe
  misc_feature (1)..(25): SEQ ID NO: 6235; WAN024993; Start 131; Stop 155
aagagtgatgtgaaatgttcaaatt

SEQ ID NO: 432980 - DNA, 25 bp, Artificial
  probe
  misc_feature (1)..(25): SEQ ID NO: 6235; WAN024993; Start 151; Stop 175
aaattgtgagactactctcggattg

SEQ ID NO: 432981 - DNA, 25 bp, Artificial
  probe
  misc_feature (1)..(25): SEQ ID NO: 6236; WAN0249C2; Start 127; Stop 151
tccgattactaacgacaattttctt

SEQ ID NO: 432982 - DNA, 25 bp, Artificial
  probe
  misc_feature (1)..(25): SEQ ID NO: 6236; WAN0249C2; Start 126; Stop 150
ttccgattactaacgacaattttct

SEQ ID NO: 432983 - DNA, 25 bp, Artificial
  probe
  misc_feature (1)..(25): SEQ ID NO: 6236; WAN0249C2; Start 36; Stop 60
gtacaactatttgaggcattaatca

SEQ ID NO: 432984 - DNA, 25 bp, Artificial
  probe
  misc_feature (1)..(25): SEQ ID NO: 6236; WAN0249C2; Start 129; Stop 153
cgattactaacgacaattttcttgc

SEQ ID NO: 432985 - DNA, 25 bp, Artificial
  probe
  misc_feature (1)..(25): SEQ ID NO: 6236; WAN0249C2; Start 134; Stop 158
actaacgacaattttcttgctctaa

SEQ ID NO: 432986 - DNA, 25 bp, Artificial
  probe
  misc_feature (1)..(25): SEQ ID NO: 6236; WAN0249C2; Start 132; Stop 156
ttactaacgacaattttcttgctct

SEQ ID NO: 432987 - DNA, 25 bp, Artificial
  probe
  misc_feature (1)..(25): SEQ ID NO: 6236; WAN0249C2; Start 128; Stop 152
ccgattactaacgacaattttcttg

SEQ ID NO: 432988 - DNA, 25 bp, Artificial
  probe
  misc_feature (1)..(25): SEQ ID NO: 6236; WAN0249C2; Start 125; Stop 149
tttccgattactaacgacaattttc

SEQ ID NO: 432989 - DNA, 25 bp, Artificial
  probe
  misc_feature (1)..(25): SEQ ID NO: 6236; WAN0249C2; Start 133; Stop 157
tactaacgacaattttcttgctcta

SEQ ID NO: 432990 - DNA, 25 bp, Artificial
  probe
  misc_feature (1)..(25): SEQ ID NO: 6236; WAN0249C2; Start 131; Stop 155
attactaacgacaattttcttgctc

SEQ ID NO: 432991 - DNA, 25 bp, Artificial
  probe
  misc_feature (1)..(25): SEQ ID NO: 6236; WAN0249C2; Start 130; Stop 154
gattactaacgacaattttcttgct

SEQ ID NO: 432992 - DNA, 25 bp, Artificial
  probe
  misc_feature (1)..(25): SEQ ID NO: 6236; WAN0249C2; Start 124; Stop 148
ttttccgattactaacgacaatttt

SEQ ID NO: 432993 - DNA, 25 bp, Artificial
  probe
  misc_feature (1)..(25): SEQ ID NO: 6236; WAN0249C2; Start 135; Stop 159
ctaacgacaattttcttgctctaat

SEQ ID NO: 432994 - DNA, 25 bp, Artificial
  probe
  misc_feature (1)..(25): SEQ ID NO: 6236; WAN0249C2; Start 138; Stop 162
acgacaattttcttgctctaatttt

SEQ ID NO: 432995 - DNA, 25 bp, Artificial
  probe
  misc_feature (1)..(25): SEQ ID NO: 6236; WAN0249C2; Start 137; Stop 161
aacgacaattttcttgctctaattt

SEQ ID NO: 432996 - DNA, 25 bp, Artificial
  probe
  misc_feature (1)..(25): SEQ ID NO: 6236; WAN0249C2; Start 29; Stop 53
ttacaatgtacaactatttgaggca

SEQ ID NO: 432997 - DNA, 25 bp, Artificial
  probe
  misc_feature (1)..(25): SEQ ID NO: 6236; WAN0249C2; Start 30; Stop 54
tacaatgtacaactatttgaggcat

SEQ ID NO: 432998 - DNA, 25 bp, Artificial
  probe
  misc_feature (1)..(25): SEQ ID NO: 6236; WAN0249C2; Start 136; Stop 160
taacgacaattttcttgctctaatt

SEQ ID NO: 432999 - DNA, 25 bp, Artificial
  probe
  misc_feature (1)..(25): SEQ ID NO: 6236; WAN0249C2; Start 28; Stop 52
tttacaatgtacaactatttgaggc

SEQ ID NO: 433000 - DNA, 25 bp, Artificial
  probe
  misc_feature (1)..(25): SEQ ID NO: 6236; WAN0249C2; Start 38; Stop 62
acaactatttgaggcattaatcaat

SEQ ID NO: 433001 - DNA, 25 bp, Artificial
  probe
  misc_feature (1)..(25): SEQ ID NO: 6236; WAN0249C2; Start 31; Stop 55
acaatgtacaactatttgaggcatt

SEQ ID NO: 433002 - DNA, 25 bp, Artificial
  probe
  misc_feature (1)..(25): SEQ ID NO: 6236; WAN0249C2; Start 35; Stop 59
tgtacaactatttgaggcattaatc

SEQ ID NO: 433003 - DNA, 25 bp, Artificial
  probe
  misc_feature (1)..(25): SEQ ID NO: 6236; WAN0249C2; Start 91; Stop 115
tttgcacttaaaagccacttatatt

SEQ ID NO: 433004 - DNA, 25 bp, Artificial
  probe
  misc_feature (1)..(25): SEQ ID NO: 6236; WAN0249C2; Start 37; Stop 61
tacaactatttgaggcattaatcaa

SEQ ID NO: 433005 - DNA, 25 bp, Artificial
  probe
  misc_feature (1)..(25): SEQ ID NO: 6236; WAN0249C2; Start 34; Stop 58
atgtacaactatttgaggcattaat

SEQ ID NO: 433006 - DNA, 25 bp, Artificial
  probe
  misc_feature (1)..(25): SEQ ID NO: 6236; WAN0249C2; Start 47; Stop 71
tgaggcattaatcaatattttctga

SEQ ID NO: 433007 - DNA, 25 bp, Artificial
  probe
  misc_feature (1)..(25): SEQ ID NO: 6236; WAN0249C2; Start 90; Stop 114
ttttgcacttaaaagccacttatat

SEQ ID NO: 433008 - DNA, 25 bp, Artificial
  probe
  misc_feature (1)..(25): SEQ ID NO: 6236; WAN0249C2; Start 32; Stop 56
caatgtacaactatttgaggcatta

SEQ ID NO: 433009 - DNA, 25 bp, Artificial
  probe
  misc_feature (1)..(25): SEQ ID NO: 6236; WAN0249C2; Start 94; Stop 118
gcacttaaaagccacttatattatt

SEQ ID NO: 433010 - DNA, 25 bp, Artificial
  probe
  misc_feature (1)..(25): SEQ ID NO: 6236; WAN0249C2; Start 92; Stop 116
ttgcacttaaaagccacttatatta

SEQ ID NO: 433011 - DNA, 25 bp, Artificial
  probe
  misc_feature (1)..(25): SEQ ID NO: 6236; WAN0249C2; Start 27; Stop 51
gtttacaatgtacaactatttgagg

SEQ ID NO: 433012 - DNA, 25 bp, Artificial
  probe
  misc_feature (1)..(25): SEQ ID NO: 6236; WAN0249C2; Start 93; Stop 117
tgcacttaaaagccacttatattat

SEQ ID NO: 433013 - DNA, 25 bp, Artificial
  probe
  misc_feature (1)..(25): SEQ ID NO: 6236; WAN0249C2; Start 50; Stop 74
ggcattaatcaatattttctgaaca

SEQ ID NO: 433014 - DNA, 25 bp, Artificial
  probe
  misc_feature (1)..(25): SEQ ID NO: 6237; WAN02498R; Start 54; Stop 78
tagtaggttgaagttgaaatagccc

SEQ ID NO: 433015 - DNA, 25 bp, Artificial
  probe
  misc_feature (1)..(25): SEQ ID NO: 6237; WAN02498R; Start 8; Stop 32
atagacaactccttgaattatcagg

SEQ ID NO: 433016 - DNA, 25 bp, Artificial
  probe
  misc_feature (1)..(25): SEQ ID NO: 6237; WAN02498R; Start 53; Stop 77
atagtaggttgaagttgaaatagcc

SEQ ID NO: 433017 - DNA, 25 bp, Artificial
  probe
  misc_feature (1)..(25): SEQ ID NO: 6237; WAN02498R; Start 9; Stop 33
tagacaactccttgaattatcaggg

SEQ ID NO: 433018 - DNA, 25 bp, Artificial
  probe
  misc_feature (1)..(25): SEQ ID NO: 6237; WAN02498R; Start 17; Stop 41
tccttgaattatcagggagttgttt

SEQ ID NO: 433019 - DNA, 25 bp, Artificial
  probe
  misc_feature (1)..(25): SEQ ID NO: 6237; WAN02498R; Start 10; Stop 34
agacaactccttgaattatcaggga

SEQ ID NO: 433020 - DNA, 25 bp, Artificial
  probe
  misc_feature (1)..(25): SEQ ID NO: 6237; WAN02498R; Start 46; Stop 70
ctgtattatagtaggttgaagttga

SEQ ID NO: 433021 - DNA, 25 bp, Artificial
  probe
  misc_feature (1)..(25): SEQ ID NO: 6237; WAN02498R; Start 45; Stop 69
tctgtattatagtaggttgaagttg

SEQ ID NO: 433022 - DNA, 25 bp, Artificial
  probe
  misc_feature (1)..(25): SEQ ID NO: 6237; WAN02498R; Start 7; Stop 31
tatagacaactccttgaattatcag

SEQ ID NO: 433023 - DNA, 25 bp, Artificial
  probe
  misc_feature (1)..(25): SEQ ID NO: 6237; WAN02498R; Start 52; Stop 76
tatagtaggttgaagttgaaatagc

SEQ ID NO: 433024 - DNA, 25 bp, Artificial
  probe
  misc_feature (1)..(25): SEQ ID NO: 6237; WAN02498R; Start 47; Stop 71
tgtattatagtaggttgaagttgaa

SEQ ID NO: 433025 - DNA, 25 bp, Artificial
  probe
  misc_feature (1)..(25): SEQ ID NO: 6237; WAN02498R; Start 44; Stop 68
ttctgtattatagtaggttgaagtt

SEQ ID NO: 433026 - DNA, 25 bp, Artificial
  probe
  misc_feature (1)..(25): SEQ ID NO: 6237; WAN02498R; Start 18; Stop 42
ccttgaattatcagggagttgtttt

SEQ ID NO: 433027 - DNA, 25 bp, Artificial
  probe
  misc_feature (1)..(25): SEQ ID NO: 6237; WAN02498R; Start 55; Stop 79
agtaggttgaagttgaaatagcccc

SEQ ID NO: 433028 - DNA, 25 bp, Artificial
  probe
  misc_feature (1)..(25): SEQ ID NO: 6237; WAN02498R; Start 5; Stop 29
actatagacaactccttgaattatc

SEQ ID NO: 433029 - DNA, 25 bp, Artificial
  probe
  misc_feature (1)..(25): SEQ ID NO: 6237; WAN02498R; Start 6; Stop 30
ctatagacaactccttgaattatca

SEQ ID NO: 433030 - DNA, 25 bp, Artificial
  probe
  misc_feature (1)..(25): SEQ ID NO: 6237; WAN02498R; Start 2; Stop 26
ttaactatagacaactccttgaatt

SEQ ID NO: 433031 - DNA, 25 bp, Artificial
  probe
  misc_feature (1)..(25): SEQ ID NO: 6237; WAN02498R; Start 4; Stop 28
aactatagacaactccttgaattat

SEQ ID NO: 433032 - DNA, 25 bp, Artificial
  probe
  misc_feature (1)..(25): SEQ ID NO: 6237; WAN02498R; Start 43; Stop 67
tttctgtattatagtaggttgaagt

SEQ ID NO: 433033 - DNA, 25 bp, Artificial
  probe
  misc_feature (1)..(25): SEQ ID NO: 6237; WAN02498R; Start 16; Stop 40
ctccttgaattatcagggagttgtt

SEQ ID NO: 433034 - DNA, 25 bp, Artificial
  probe
  misc_feature (1)..(25): SEQ ID NO: 6237; WAN02498R; Start 11; Stop 35
gacaactccttgaattatcagggag

SEQ ID NO: 433035 - DNA, 25 bp, Artificial
  probe
  misc_feature (1)..(25): SEQ ID NO: 6237; WAN02498R; Start 78; Stop 102
ccccattactctaaaacgttgttat

SEQ ID NO: 433036 - DNA, 25 bp, Artificial
  probe
  misc_feature (1)..(25): SEQ ID NO: 6237; WAN02498R; Start 79; Stop 103
cccattactctaaaacgttgttata

SEQ ID NO: 433037 - DNA, 25 bp, Artificial
  probe
  misc_feature (1)..(25): SEQ ID NO: 6237; WAN02498R; Start 85; Stop 109
actctaaaacgttgttataaaatgc

SEQ ID NO: 433038 - DNA, 25 bp, Artificial
  probe
  misc_feature (1)..(25): SEQ ID NO: 6237; WAN02498R; Start 86; Stop 110
ctctaaaacgttgttataaaatgct

SEQ ID NO: 433039 - DNA, 25 bp, Artificial
  probe
  misc_feature (1)..(25): SEQ ID NO: 6237; WAN02498R; Start 87; Stop 111
tctaaaacgttgttataaaatgctt

SEQ ID NO: 433040 - DNA, 25 bp, Artificial
  probe
  misc_feature (1)..(25): SEQ ID NO: 6237; WAN02498R; Start 88; Stop 112
ctaaaacgttgttataaaatgcttt

SEQ ID NO: 433041 - DNA, 25 bp, Artificial
  probe
  misc_feature (1)..(25): SEQ ID NO: 6237; WAN02498R; Start 80; Stop 104
ccattactctaaaacgttgttataa

SEQ ID NO: 433042 - DNA, 25 bp, Artificial
  probe
  misc_feature (1)..(25): SEQ ID NO: 6237; WAN02498R; Start 91; Stop 115
aaacgttgttataaaatgctttaaa

SEQ ID NO: 433043 - DNA, 25 bp, Artificial
  probe
  misc_feature (1)..(25): SEQ ID NO: 6237; WAN02498R; Start 90; Stop 114
aaaacgttgttataaaatgctttaa

SEQ ID NO: 433044 - DNA, 25 bp, Artificial
  probe
  misc_feature (1)..(25): SEQ ID NO: 6238; WAN0249C8; Start 37; Stop 61
tgtgattaagtaagtattgcagtaa

SEQ ID NO: 433045 - DNA, 25 bp, Artificial
  probe
  misc_feature (1)..(25): SEQ ID NO: 6238; WAN0249C8; Start 36; Stop 60
atgtgattaagtaagtattgcagta

SEQ ID NO: 433046 - DNA, 25 bp, Artificial
  probe
  misc_feature (1)..(25): SEQ ID NO: 6238; WAN0249C8; Start 35; Stop 59
tatgtgattaagtaagtattgcagt

SEQ ID NO: 433047 - DNA, 25 bp, Artificial
  probe
  misc_feature (1)..(25): SEQ ID NO: 6238; WAN0249C8; Start 34; Stop 58
ttatgtgattaagtaagtattgcag

SEQ ID NO: 433048 - DNA, 25 bp, Artificial
  probe
  misc_feature (1)..(25): SEQ ID NO: 6238; WAN0249C8; Start 38; Stop 62
gtgattaagtaagtattgcagtaat

SEQ ID NO: 433049 - DNA, 25 bp, Artificial
  probe
  misc_feature (1)..(25): SEQ ID NO: 6239; WAN0249CD; Start 25; Stop 49
cgtcgtctaccttttattctctttt

SEQ ID NO: 433050 - DNA, 25 bp, Artificial
  probe
  misc_feature (1)..(25): SEQ ID NO: 6239; WAN0249CD; Start 24; Stop 48
gcgtcgtctaccttttattctcttt

SEQ ID NO: 433051 - DNA, 25 bp, Artificial
  probe
  misc_feature (1)..(25): SEQ ID NO: 6239; WAN0249CD; Start 23; Stop 47
ggcgtcgtctaccttttattctctt

SEQ ID NO: 433052 - DNA, 25 bp, Artificial
  probe
  misc_feature (1)..(25): SEQ ID NO: 6239; WAN0249CD; Start 21; Stop 45
gaggcgtcgtctaccttttattctc

SEQ ID NO: 433053 - DNA, 25 bp, Artificial
  probe
  misc_feature (1)..(25): SEQ ID NO: 6239; WAN0249CD; Start 17; Stop 41
tactgaggcgtcgtctaccttttat

SEQ ID NO: 433054 - DNA, 25 bp, Artificial
  probe
  misc_feature (1)..(25): SEQ ID NO: 6239; WAN0249CD; Start 19; Stop 43
ctgaggcgtcgtctaccttttattc

SEQ ID NO: 433055 - DNA, 25 bp, Artificial
  probe
  misc_feature (1)..(25): SEQ ID NO: 6239; WAN0249CD; Start 16; Stop 40
ttactgaggcgtcgtctacctttta

SEQ ID NO: 433056 - DNA, 25 bp, Artificial
  probe
  misc_feature (1)..(25): SEQ ID NO: 6239; WAN0249CD; Start 22; Stop 46
aggcgtcgtctaccttttattctct

SEQ ID NO: 433057 - DNA, 25 bp, Artificial
  probe
  misc_feature (1)..(25): SEQ ID NO: 6239; WAN0249CD; Start 20; Stop 44
tgaggcgtcgtctaccttttattct

SEQ ID NO: 433058 - DNA, 25 bp, Artificial
  probe
  misc_feature (1)..(25): SEQ ID NO: 6239; WAN0249CD; Start 18; Stop 42
actgaggcgtcgtctaccttttatt

SEQ ID NO: 433059 - DNA, 25 bp, Artificial
  probe
  misc_feature (1)..(25): SEQ ID NO: 6239; WAN0249CD; Start 15; Stop 39
tttactgaggcgtcgtctacctttt

SEQ ID NO: 433060 - DNA, 25 bp, Artificial
  probe
  misc_feature (1)..(25): SEQ ID NO: 6239; WAN0249CD; Start 14; Stop 38
ttttactgaggcgtcgtctaccttt

SEQ ID NO: 433061 - DNA, 25 bp, Artificial
  probe
  misc_feature (1)..(25): SEQ ID NO: 6240; WAN02498V; Start 6; Stop 30
aaagtcagccataaggtacacaaaa

SEQ ID NO: 433062 - DNA, 25 bp, Artificial
  probe
  misc_feature (1)..(25): SEQ ID NO: 6240; WAN02498V; Start 5; Stop 29
aaaagtcagccataaggtacacaaa

SEQ ID NO: 433063 - DNA, 25 bp, Artificial
  probe
  misc_feature (1)..(25): SEQ ID NO: 6240; WAN02498V; Start 4; Stop 28
gaaaagtcagccataaggtacacaa

SEQ ID NO: 433064 - DNA, 25 bp, Artificial
  probe
  misc_feature (1)..(25): SEQ ID NO: 6240; WAN02498V; Start 1; Stop 25
tttgaaaagtcagccataaggtaca

SEQ ID NO: 433065 - DNA, 25 bp, Artificial
  probe
  misc_feature (1)..(25): SEQ ID NO: 6240; WAN02498V; Start 2; Stop 26
ttgaaaagtcagccataaggtacac

SEQ ID NO: 433066 - DNA, 25 bp, Artificial
  probe
  misc_feature (1)..(25): SEQ ID NO: 6240; WAN02498V; Start 30; Stop 54
aagggtagtattttagcatacgaac

SEQ ID NO: 433067 - DNA, 25 bp, Artificial
  probe
  misc_feature (1)..(25): SEQ ID NO: 6240; WAN02498V; Start 33; Stop 57
ggtagtattttagcatacgaaccct

SEQ ID NO: 433068 - DNA, 25 bp, Artificial
  probe
  misc_feature (1)..(25): SEQ ID NO: 6240; WAN02498V; Start 31; Stop 55
agggtagtattttagcatacgaacc

SEQ ID NO: 433069 - DNA, 25 bp, Artificial
  probe
  misc_feature (1)..(25): SEQ ID NO: 6240; WAN02498V; Start 3; Stop 27
tgaaaagtcagccataaggtacaca

SEQ ID NO: 433070 - DNA, 25 bp, Artificial
  probe
  misc_feature (1)..(25): SEQ ID NO: 6240; WAN02498V; Start 34; Stop 58
gtagtattttagcatacgaacccta

SEQ ID NO: 433071 - DNA, 25 bp, Artificial
  probe
  misc_feature (1)..(25): SEQ ID NO: 6240; WAN02498V; Start 29; Stop 53
aaagggtagtattttagcatacgaa

SEQ ID NO: 433072 - DNA, 25 bp, Artificial
  probe
  misc_feature (1)..(25): SEQ ID NO: 6240; WAN02498V; Start 28; Stop 52
aaaagggtagtattttagcatacga

SEQ ID NO: 433073 - DNA, 25 bp, Artificial
  probe
  misc_feature (1)..(25): SEQ ID NO: 6240; WAN02498V; Start 35; Stop 59
tagtattttagcatacgaaccctaa

SEQ ID NO: 433074 - DNA, 25 bp, Artificial
  probe
  misc_feature (1)..(25): SEQ ID NO: 6241; WAN0249BS; Start 113; Stop 137
tccatattcaatccactatacaaga

SEQ ID NO: 433075 - DNA, 25 bp, Artificial
  probe
  misc_feature (1)..(25): SEQ ID NO: 6241; WAN0249BS; Start 40; Stop 64
atagaatgtgaacgaatcaattagg

SEQ ID NO: 433076 - DNA, 25 bp, Artificial
  probe
  misc_feature (1)..(25): SEQ ID NO: 6241; WAN0249BS; Start 30; Stop 54
gtagattgtaatagaatgtgaacga

SEQ ID NO: 433077 - DNA, 25 bp, Artificial
  probe
  misc_feature (1)..(25): SEQ ID NO: 6241; WAN0249BS; Start 29; Stop 53
agtagattgtaatagaatgtgaacg

SEQ ID NO: 433078 - DNA, 25 bp, Artificial
  probe
  misc_feature (1)..(25): SEQ ID NO: 6241; WAN0249BS; Start 35; Stop 59
ttgtaatagaatgtgaacgaatcaa

SEQ ID NO: 433079 - DNA, 25 bp, Artificial
  probe
  misc_feature (1)..(25): SEQ ID NO: 6241; WAN0249BS; Start 41; Stop 65
tagaatgtgaacgaatcaattaggg

SEQ ID NO: 433080 - DNA, 25 bp, Artificial
  probe
  misc_feature (1)..(25): SEQ ID NO: 6241; WAN0249BS; Start 32; Stop 56
agattgtaatagaatgtgaacgaat

SEQ ID NO: 433081 - DNA, 25 bp, Artificial
  probe
  misc_feature (1)..(25): SEQ ID NO: 6241; WAN0249BS; Start 36; Stop 60
tgtaatagaatgtgaacgaatcaat

SEQ ID NO: 433082 - DNA, 25 bp, Artificial
  probe
  misc_feature (1)..(25): SEQ ID NO: 6241; WAN0249BS; Start 34; Stop 58
attgtaatagaatgtgaacgaatca

SEQ ID NO: 433083 - DNA, 25 bp, Artificial
  probe
  misc_feature (1)..(25): SEQ ID NO: 6241; WAN0249BS; Start 112; Stop 136
ttccatattcaatccactatacaag

SEQ ID NO: 433084 - DNA, 25 bp, Artificial
  probe
  misc_feature (1)..(25): SEQ ID NO: 6241; WAN0249BS; Start 114; Stop 138
ccatattcaatccactatacaagat

SEQ ID NO: 433085 - DNA, 25 bp, Artificial
  probe
  misc_feature (1)..(25): SEQ ID NO: 6241; WAN0249BS; Start 31; Stop 55
tagattgtaatagaatgtgaacgaa

SEQ ID NO: 433086 - DNA, 25 bp, Artificial
  probe
  misc_feature (1)..(25): SEQ ID NO: 6241; WAN0249BS; Start 189; Stop 213
gctccataaacaaatcatagataca

SEQ ID NO: 433087 - DNA, 25 bp, Artificial
  probe
  misc_feature (1)..(25): SEQ ID NO: 6241; WAN0249BS; Start 111; Stop 135
attccatattcaatccactatacaa

SEQ ID NO: 433088 - DNA, 25 bp, Artificial
  probe
  misc_feature (1)..(25): SEQ ID NO: 6241; WAN0249BS; Start 105; Stop 129
tgtattattccatattcaatccact

SEQ ID NO: 433089 - DNA, 25 bp, Artificial
  probe
  misc_feature (1)..(25): SEQ ID NO: 6241; WAN0249BS; Start 37; Stop 61
gtaatagaatgtgaacgaatcaatt

SEQ ID NO: 433090 - DNA, 25 bp, Artificial
  probe
  misc_feature (1)..(25): SEQ ID NO: 6241; WAN0249BS; Start 33; Stop 57
gattgtaatagaatgtgaacgaatc

SEQ ID NO: 433091 - DNA, 25 bp, Artificial
  probe
  misc_feature (1)..(25): SEQ ID NO: 6241; WAN0249BS; Start 173; Stop 197
aatgactgtatctatagctccataa

SEQ ID NO: 433092 - DNA, 25 bp, Artificial
  probe
  misc_feature (1)..(25): SEQ ID NO: 6241; WAN0249BS; Start 39; Stop 63
aatagaatgtgaacgaatcaattag

SEQ ID NO: 433093 - DNA, 25 bp, Artificial
  probe
  misc_feature (1)..(25): SEQ ID NO: 6241; WAN0249BS; Start 175; Stop 199
tgactgtatctatagctccataaac

SEQ ID NO: 433094 - DNA, 25 bp, Artificial
  probe
  misc_feature (1)..(25): SEQ ID NO: 6241; WAN0249BS; Start 44; Stop 68
aatgtgaacgaatcaattaggggat

SEQ ID NO: 433095 - DNA, 25 bp, Artificial
  probe
  misc_feature (1)..(25): SEQ ID NO: 6241; WAN0249BS; Start 115; Stop 139
catattcaatccactatacaagatg

SEQ ID NO: 433096 - DNA, 25 bp, Artificial
  probe
  misc_feature (1)..(25): SEQ ID NO: 6241; WAN0249BS; Start 43; Stop 67
gaatgtgaacgaatcaattagggga

SEQ ID NO: 433097 - DNA, 25 bp, Artificial
  probe
  misc_feature (1)..(25): SEQ ID NO: 6241; WAN0249BS; Start 42; Stop 66
agaatgtgaacgaatcaattagggg

SEQ ID NO: 433098 - DNA, 25 bp, Artificial
  probe
  misc_feature (1)..(25): SEQ ID NO: 6241; WAN0249BS; Start 62; Stop 86
aggggatctaaagcattttatacca

SEQ ID NO: 433099 - DNA, 25 bp, Artificial
  probe
  misc_feature (1)..(25): SEQ ID NO: 6241; WAN0249BS; Start 47; Stop 71
gtgaacgaatcaattaggggatcta

SEQ ID NO: 433100 - DNA, 25 bp, Artificial
  probe
  misc_feature (1)..(25): SEQ ID NO: 6241; WAN0249BS; Start 45; Stop 69
atgtgaacgaatcaattaggggatc

SEQ ID NO: 433101 - DNA, 25 bp, Artificial
  probe
  misc_feature (1)..(25): SEQ ID NO: 6241; WAN0249BS; Start 176; Stop 200
gactgtatctatagctccataaaca

SEQ ID NO: 433102 - DNA, 25 bp, Artificial
  probe
  misc_feature (1)..(25): SEQ ID NO: 6241; WAN0249BS; Start 63; Stop 87
ggggatctaaagcattttataccaa

SEQ ID NO: 433103 - DNA, 25 bp, Artificial
  probe
  misc_feature (1)..(25): SEQ ID NO: 6241; WAN0249BS; Start 120; Stop 144
tcaatccactatacaagatgaatat

SEQ ID NO: 433104 - DNA, 25 bp, Artificial
  probe
  misc_feature (1)..(25): SEQ ID NO: 6241; WAN0249BS; Start 116; Stop 140
atattcaatccactatacaagatga

SEQ ID NO: 433105 - DNA, 25 bp, Artificial
  probe
  misc_feature (1)..(25): SEQ ID NO: 6241; WAN0249BS; Start 104; Stop 128
ttgtattattccatattcaatccac

SEQ ID NO: 433106 - DNA, 25 bp, Artificial
  probe
  misc_feature (1)..(25): SEQ ID NO: 6241; WAN0249BS; Start 188; Stop 212
agctccataaacaaatcatagatac

SEQ ID NO: 433107 - DNA, 25 bp, Artificial
  probe
  misc_feature (1)..(25): SEQ ID NO: 6242; WAN02499N; Start 30; Stop 54
ctaagtaatgacggacggtagtgac

SEQ ID NO: 433108 - DNA, 25 bp, Artificial
  probe
  misc_feature (1)..(25): SEQ ID NO: 6242; WAN02499N; Start 29; Stop 53
cctaagtaatgacggacggtagtga

SEQ ID NO: 433109 - DNA, 25 bp, Artificial
  probe
  misc_feature (1)..(25): SEQ ID NO: 6242; WAN02499N; Start 67; Stop 91
tccatacctaaactttgaacctaag

SEQ ID NO: 433110 - DNA, 25 bp, Artificial
  probe
  misc_feature (1)..(25): SEQ ID NO: 6242; WAN02499N; Start 27; Stop 51
ttcctaagtaatgacggacggtagt

SEQ ID NO: 433111 - DNA, 25 bp, Artificial
  probe
  misc_feature (1)..(25): SEQ ID NO: 6242; WAN02499N; Start 66; Stop 90
ttccatacctaaactttgaacctaa

SEQ ID NO: 433112 - DNA, 25 bp, Artificial
  probe
  misc_feature (1)..(25): SEQ ID NO: 6242; WAN02499N; Start 139; Stop 163
attacggcagaaagtcttcgattta

SEQ ID NO: 433113 - DNA, 25 bp, Artificial
  probe
  misc_feature (1)..(25): SEQ ID NO: 6242; WAN02499N; Start 140; Stop 164
ttacggcagaaagtcttcgatttag

SEQ ID NO: 433114 - DNA, 25 bp, Artificial
  probe
  misc_feature (1)..(25): SEQ ID NO: 6242; WAN02499N; Start 28; Stop 52
tcctaagtaatgacggacggtagtg

SEQ ID NO: 433115 - DNA, 25 bp, Artificial
  probe
  misc_feature (1)..(25): SEQ ID NO: 6242; WAN02499N; Start 26; Stop 50
tttcctaagtaatgacggacggtag

SEQ ID NO: 433116 - DNA, 25 bp, Artificial
  probe
  misc_feature (1)..(25): SEQ ID NO: 6242; WAN02499N; Start 25; Stop 49
ctttcctaagtaatgacggacggta

SEQ ID NO: 433117 - DNA, 25 bp, Artificial
  probe
  misc_feature (1)..(25): SEQ ID NO: 6242; WAN02499N; Start 138; Stop 162
cattacggcagaaagtcttcgattt

SEQ ID NO: 433118 - DNA, 25 bp, Artificial
  probe
  misc_feature (1)..(25): SEQ ID NO: 6242; WAN02499N; Start 31; Stop 55
taagtaatgacggacggtagtgacc

SEQ ID NO: 433119 - DNA, 25 bp, Artificial
  probe
  misc_feature (1)..(25): SEQ ID NO: 6242; WAN02499N; Start 21; Stop 45
aagactttcctaagtaatgacggac

SEQ ID NO: 433120 - DNA, 25 bp, Artificial
  probe
  misc_feature (1)..(25): SEQ ID NO: 6242; WAN02499N; Start 137; Stop 161
tcattacggcagaaagtcttcgatt

SEQ ID NO: 433121 - DNA, 25 bp, Artificial
  probe
  misc_feature (1)..(25): SEQ ID NO: 6242; WAN02499N; Start 136; Stop 160
ttcattacggcagaaagtcttcgat

SEQ ID NO: 433122 - DNA, 25 bp, Artificial
  probe
  misc_feature (1)..(25): SEQ ID NO: 6242; WAN02499N; Start 20; Stop 44
taagactttcctaagtaatgacgga

SEQ ID NO: 433123 - DNA, 25 bp, Artificial
  probe
  misc_feature (1)..(25): SEQ ID NO: 6242; WAN02499N; Start 68; Stop 92
ccatacctaaactttgaacctaagt

SEQ ID NO: 433124 - DNA, 25 bp, Artificial
  probe
  misc_feature (1)..(25): SEQ ID NO: 6242; WAN02499N; Start 19; Stop 43
ttaagactttcctaagtaatgacgg

SEQ ID NO: 433125 - DNA, 25 bp, Artificial
  probe
  misc_feature (1)..(25): SEQ ID NO: 6242; WAN02499N; Start 64; Stop 88
agttccatacctaaactttgaacct

SEQ ID NO: 433126 - DNA, 25 bp, Artificial
  probe
  misc_feature (1)..(25): SEQ ID NO: 6242; WAN02499N; Start 22; Stop 46
agactttcctaagtaatgacggacg

SEQ ID NO: 433127 - DNA, 25 bp, Artificial
  probe
  misc_feature (1)..(25): SEQ ID NO: 6242; WAN02499N; Start 65; Stop 89
gttccatacctaaactttgaaccta

SEQ ID NO: 433128 - DNA, 25 bp, Artificial
  probe
  misc_feature (1)..(25): SEQ ID NO: 6242; WAN02499N; Start 124; Stop 148
gtttcaggtgttttcattacggcag

SEQ ID NO: 433129 - DNA, 25 bp, Artificial
  probe
  misc_feature (1)..(25): SEQ ID NO: 6242; WAN02499N; Start 119; Stop 143
aagctgtttcaggtgttttcattac

SEQ ID NO: 433130 - DNA, 25 bp, Artificial
  probe
  misc_feature (1)..(25): SEQ ID NO: 6242; WAN02499N; Start 118; Stop 142
caagctgtttcaggtgttttcatta

SEQ ID NO: 433131 - DNA, 25 bp, Artificial
  probe
  misc_feature (1)..(25): SEQ ID NO: 6242; WAN02499N; Start 133; Stop 157
gttttcattacggcagaaagtcttc

SEQ ID NO: 433132 - DNA, 25 bp, Artificial
  probe
  misc_feature (1)..(25): SEQ ID NO: 6242; WAN02499N; Start 125; Stop 149
tttcaggtgttttcattacggcaga

SEQ ID NO: 433133 - DNA, 25 bp, Artificial
  probe
  misc_feature (1)..(25): SEQ ID NO: 6242; WAN02499N; Start 135; Stop 159
tttcattacggcagaaagtcttcga

SEQ ID NO: 433134 - DNA, 25 bp, Artificial
  probe
  misc_feature (1)..(25): SEQ ID NO: 6242; WAN02499N; Start 23; Stop 47
gactttcctaagtaatgacggacgg

SEQ ID NO: 433135 - DNA, 25 bp, Artificial
  probe
  misc_feature (1)..(25): SEQ ID NO: 6242; WAN02499N; Start 81; Stop 105
ttgaacctaagttttaaagtttccg

SEQ ID NO: 433136 - DNA, 25 bp, Artificial
  probe
  misc_feature (1)..(25): SEQ ID NO: 6242; WAN02499N; Start 126; Stop 150
ttcaggtgttttcattacggcagaa

SEQ ID NO: 433137 - DNA, 25 bp, Artificial
  probe
  misc_feature (1)..(25): SEQ ID NO: 6242; WAN02499N; Start 132; Stop 156
tgttttcattacggcagaaagtctt

SEQ ID NO: 433138 - DNA, 25 bp, Artificial
  probe
  misc_feature (1)..(25): SEQ ID NO: 6242; WAN02499N; Start 18; Stop 42
tttaagactttcctaagtaatgacg

SEQ ID NO: 433139 - DNA, 25 bp, Artificial
  probe
  misc_feature (1)..(25): SEQ ID NO: 6242; WAN02499N; Start 32; Stop 56
aagtaatgacggacggtagtgacct

SEQ ID NO: 433140 - DNA, 25 bp, Artificial
  probe
  misc_feature (1)..(25): SEQ ID NO: 6243; WAN02498B; Start 30; Stop 54
gtttagcctaactttacaggttgtc

SEQ ID NO: 433141 - DNA, 25 bp, Artificial
  probe
  misc_feature (1)..(25): SEQ ID NO: 6243; WAN02498B; Start 29; Stop 53
agtttagcctaactttacaggttgt

SEQ ID NO: 433142 - DNA, 25 bp, Artificial
  probe
  misc_feature (1)..(25): SEQ ID NO: 6243; WAN02498B; Start 28; Stop 52
tagtttagcctaactttacaggttg

SEQ ID NO: 433143 - DNA, 25 bp, Artificial
  probe
  misc_feature (1)..(25): SEQ ID NO: 6243; WAN02498B; Start 27; Stop 51
ttagtttagcctaactttacaggtt

SEQ ID NO: 433144 - DNA, 25 bp, Artificial
  probe
  misc_feature (1)..(25): SEQ ID NO: 6243; WAN02498B; Start 11; Stop 35
gatttatgtgcgcgagttagtttag

SEQ ID NO: 433145 - DNA, 25 bp, Artificial
  probe
  misc_feature (1)..(25): SEQ ID NO: 6243; WAN02498B; Start 10; Stop 34
tgatttatgtgcgcgagttagttta

SEQ ID NO: 433146 - DNA, 25 bp, Artificial
  probe
  misc_feature (1)..(25): SEQ ID NO: 6243; WAN02498B; Start 9; Stop 33
ttgatttatgtgcgcgagttagttt

SEQ ID NO: 433147 - DNA, 25 bp, Artificial
  probe
  misc_feature (1)..(25): SEQ ID NO: 6243; WAN02498B; Start 8; Stop 32
cttgatttatgtgcgcgagttagtt

SEQ ID NO: 433148 - DNA, 25 bp, Artificial
  probe
  misc_feature (1)..(25): SEQ ID NO: 6243; WAN02498B; Start 12; Stop 36
atttatgtgcgcgagttagtttagc

SEQ ID NO: 433149 - DNA, 25 bp, Artificial
  probe
  misc_feature (1)..(25): SEQ ID NO: 6243; WAN02498B; Start 26; Stop 50
gttagtttagcctaactttacaggt

SEQ ID NO: 433150 - DNA, 25 bp, Artificial
  probe
  misc_feature (1)..(25): SEQ ID NO: 6243; WAN02498B; Start 6; Stop 30
tccttgatttatgtgcgcgagttag

SEQ ID NO: 433151 - DNA, 25 bp, Artificial
  probe
  misc_feature (1)..(25): SEQ ID NO: 6243; WAN02498B; Start 7; Stop 31
ccttgatttatgtgcgcgagttagt

SEQ ID NO: 433152 - DNA, 25 bp, Artificial
  probe
  misc_feature (1)..(25): SEQ ID NO: 6243; WAN02498B; Start 5; Stop 29
ctccttgatttatgtgcgcgagtta

SEQ ID NO: 433153 - DNA, 25 bp, Artificial
  probe
  misc_feature (1)..(25): SEQ ID NO: 6243; WAN02498B; Start 15; Stop 39
tatgtgcgcgagttagtttagccta

SEQ ID NO: 433154 - DNA, 25 bp, Artificial
  probe
  misc_feature (1)..(25): SEQ ID NO: 6243; WAN02498B; Start 13; Stop 37
tttatgtgcgcgagttagtttagcc

SEQ ID NO: 433155 - DNA, 25 bp, Artificial
  probe
  misc_feature (1)..(25): SEQ ID NO: 6243; WAN02498B; Start 2; Stop 26
tttctccttgatttatgtgcgcgag

SEQ ID NO: 433156 - DNA, 25 bp, Artificial
  probe
  misc_feature (1)..(25): SEQ ID NO: 6243; WAN02498B; Start 14; Stop 38
ttatgtgcgcgagttagtttagcct

SEQ ID NO: 433157 - DNA, 25 bp, Artificial
  probe
  misc_feature (1)..(25): SEQ ID NO: 6243; WAN02498B; Start 1; Stop 25
ttttctccttgatttatgtgcgcga

SEQ ID NO: 433158 - DNA, 25 bp, Artificial
  probe
  misc_feature (1)..(25): SEQ ID NO: 6243; WAN02498B; Start 16; Stop 40
atgtgcgcgagttagtttagcctaa

SEQ ID NO: 433159 - DNA, 25 bp, Artificial
  probe
  misc_feature (1)..(25): SEQ ID NO: 6243; WAN02498B; Start 4; Stop 28
tctccttgatttatgtgcgcgagtt

SEQ ID NO: 433160 - DNA, 25 bp, Artificial
  probe
  misc_feature (1)..(25): SEQ ID NO: 6243; WAN02498B; Start 3; Stop 27
ttctccttgatttatgtgcgcgagt

SEQ ID NO: 433161 - DNA, 25 bp, Artificial
  probe
  misc_feature (1)..(25): SEQ ID NO: 6244; WAN0249BU; Start 75; Stop 99
acgatggtatatcatacaaattcct

SEQ ID NO: 433162 - DNA, 25 bp, Artificial
  probe
  misc_feature (1)..(25): SEQ ID NO: 6244; WAN0249BU; Start 76; Stop 100
cgatggtatatcatacaaattcctc

SEQ ID NO: 433163 - DNA, 25 bp, Artificial
  probe
  misc_feature (1)..(25): SEQ ID NO: 6244; WAN0249BU; Start 79; Stop 103
tggtatatcatacaaattcctcctt

SEQ ID NO: 433164 - DNA, 25 bp, Artificial
  probe
  misc_feature (1)..(25): SEQ ID NO: 6244; WAN0249BU; Start 74; Stop 98
aacgatggtatatcatacaaattcc

SEQ ID NO: 433165 - DNA, 25 bp, Artificial
  probe
  misc_feature (1)..(25): SEQ ID NO: 6244; WAN0249BU; Start 78; Stop 102
atggtatatcatacaaattcctcct

SEQ ID NO: 433166 - DNA, 25 bp, Artificial
  probe
  misc_feature (1)..(25): SEQ ID NO: 6244; WAN0249BU; Start 77; Stop 101
gatggtatatcatacaaattcctcc

SEQ ID NO: 433167 - DNA, 25 bp, Artificial
  probe
  misc_feature (1)..(25): SEQ ID NO: 6244; WAN0249BU; Start 80; Stop 104
ggtatatcatacaaattcctccttt

SEQ ID NO: 433168 - DNA, 25 bp, Artificial
  probe
  misc_feature (1)..(25): SEQ ID NO: 6244; WAN0249BU; Start 86; Stop 110
tcatacaaattcctcctttacttat

SEQ ID NO: 433169 - DNA, 25 bp, Artificial
  probe
  misc_feature (1)..(25): SEQ ID NO: 6244; WAN0249BU; Start 85; Stop 109
atcatacaaattcctcctttactta

SEQ ID NO: 433170 - DNA, 25 bp, Artificial
  probe
  misc_feature (1)..(25): SEQ ID NO: 6244; WAN0249BU; Start 84; Stop 108
tatcatacaaattcctcctttactt

SEQ ID NO: 433171 - DNA, 25 bp, Artificial
  probe
  misc_feature (1)..(25): SEQ ID NO: 6244; WAN0249BU; Start 64; Stop 88
acttattctaaacgatggtatatca

SEQ ID NO: 433172 - DNA, 25 bp, Artificial
  probe
  misc_feature (1)..(25): SEQ ID NO: 6244; WAN0249BU; Start 83; Stop 107
atatcatacaaattcctcctttact

SEQ ID NO: 433173 - DNA, 25 bp, Artificial
  probe
  misc_feature (1)..(25): SEQ ID NO: 6244; WAN0249BU; Start 70; Stop 94
tctaaacgatggtatatcatacaaa

SEQ ID NO: 433174 - DNA, 25 bp, Artificial
  probe
  misc_feature (1)..(25): SEQ ID NO: 6244; WAN0249BU; Start 69; Stop 93
ttctaaacgatggtatatcatacaa

SEQ ID NO: 433175 - DNA, 25 bp, Artificial
  probe
  misc_feature (1)..(25): SEQ ID NO: 6244; WAN0249BU; Start 73; Stop 97
aaacgatggtatatcatacaaattc

SEQ ID NO: 433176 - DNA, 25 bp, Artificial
  probe
  misc_feature (1)..(25): SEQ ID NO: 6244; WAN0249BU; Start 63; Stop 87
gacttattctaaacgatggtatatc

SEQ ID NO: 433177 - DNA, 25 bp, Artificial
  probe
  misc_feature (1)..(25): SEQ ID NO: 6244; WAN0249BU; Start 91; Stop 115
caaattcctcctttacttattatgt

SEQ ID NO: 433178 - DNA, 25 bp, Artificial
  probe
  misc_feature (1)..(25): SEQ ID NO: 6244; WAN0249BU; Start 90; Stop 114
acaaattcctcctttacttattatg

SEQ ID NO: 433179 - DNA, 25 bp, Artificial
  probe
  misc_feature (1)..(25): SEQ ID NO: 6244; WAN0249BU; Start 87; Stop 111
catacaaattcctcctttacttatt

SEQ ID NO: 433180 - DNA, 25 bp, Artificial
  probe
  misc_feature (1)..(25): SEQ ID NO: 6244; WAN0249BU; Start 68; Stop 92
attctaaacgatggtatatcataca

SEQ ID NO: 433181 - DNA, 25 bp, Artificial
  probe
  misc_feature (1)..(25): SEQ ID NO: 6244; WAN0249BU; Start 62; Stop 86
agacttattctaaacgatggtatat

SEQ ID NO: 433182 - DNA, 25 bp, Artificial
  probe
  misc_feature (1)..(25): SEQ ID NO: 6244; WAN0249BU; Start 60; Stop 84
atagacttattctaaacgatggtat

SEQ ID NO: 433183 - DNA, 25 bp, Artificial
  probe
  misc_feature (1)..(25): SEQ ID NO: 6244; WAN0249BU; Start 58; Stop 82
atatagacttattctaaacgatggt

SEQ ID NO: 433184 - DNA, 25 bp, Artificial
  probe
  misc_feature (1)..(25): SEQ ID NO: 6245; WAN0249BX; Start 151; Stop 175
gcattacactccgcattaatattga

SEQ ID NO: 433185 - DNA, 25 bp, Artificial
  probe
  misc_feature (1)..(25): SEQ ID NO: 6245; WAN0249BX; Start 150; Stop 174
agcattacactccgcattaatattg

SEQ ID NO: 433186 - DNA, 25 bp, Artificial
  probe
  misc_feature (1)..(25): SEQ ID NO: 6245; WAN0249BX; Start 149; Stop 173
gagcattacactccgcattaatatt

SEQ ID NO: 433187 - DNA, 25 bp, Artificial
  probe
  misc_feature (1)..(25): SEQ ID NO: 6245; WAN0249BX; Start 74; Stop 98
tttcatcttcattcgttcctctttc

SEQ ID NO: 433188 - DNA, 25 bp, Artificial
  probe
  misc_feature (1)..(25): SEQ ID NO: 6245; WAN0249BX; Start 73; Stop 97
ctttcatcttcattcgttcctcttt

SEQ ID NO: 433189 - DNA, 25 bp, Artificial
  probe
  misc_feature (1)..(25): SEQ ID NO: 6245; WAN0249BX; Start 83; Stop 107
cattcgttcctctttccatcctaaa

SEQ ID NO: 433190 - DNA, 25 bp, Artificial
  probe
  misc_feature (1)..(25): SEQ ID NO: 6245; WAN0249BX; Start 78; Stop 102
atcttcattcgttcctctttccatc

SEQ ID NO: 433191 - DNA, 25 bp, Artificial
  probe
  misc_feature (1)..(25): SEQ ID NO: 6245; WAN0249BX; Start 77; Stop 101
catcttcattcgttcctctttccat

SEQ ID NO: 433192 - DNA, 25 bp, Artificial
  probe
  misc_feature (1)..(25): SEQ ID NO: 6245; WAN0249BX; Start 75; Stop 99
ttcatcttcattcgttcctctttcc

SEQ ID NO: 433193 - DNA, 25 bp, Artificial
  probe
  misc_feature (1)..(25): SEQ ID NO: 6245; WAN0249BX; Start 84; Stop 108
attcgttcctctttccatcctaaac

SEQ ID NO: 433194 - DNA, 25 bp, Artificial
  probe
  misc_feature (1)..(25): SEQ ID NO: 6245; WAN0249BX; Start 82; Stop 106
tcattcgttcctctttccatcctaa

SEQ ID NO: 433195 - DNA, 25 bp, Artificial
  probe
  misc_feature (1)..(25): SEQ ID NO: 6245; WAN0249BX; Start 81; Stop 105
ttcattcgttcctctttccatccta

SEQ ID NO: 433196 - DNA, 25 bp, Artificial
  probe
  misc_feature (1)..(25): SEQ ID NO: 6245; WAN0249BX; Start 72; Stop 96
gctttcatcttcattcgttcctctt

SEQ ID NO: 433197 - DNA, 25 bp, Artificial
  probe
  misc_feature (1)..(25): SEQ ID NO: 6245; WAN0249BX; Start 87; Stop 111
cgttcctctttccatcctaaacaaa

SEQ ID NO: 433198 - DNA, 25 bp, Artificial
  probe
  misc_feature (1)..(25): SEQ ID NO: 6245; WAN0249BX; Start 152; Stop 176
cattacactccgcattaatattgat

SEQ ID NO: 433199 - DNA, 25 bp, Artificial
  probe
  misc_feature (1)..(25): SEQ ID NO: 6245; WAN0249BX; Start 76; Stop 100
tcatcttcattcgttcctctttcca

SEQ ID NO: 433200 - DNA, 25 bp, Artificial
  probe
  misc_feature (1)..(25): SEQ ID NO: 6245; WAN0249BX; Start 156; Stop 180
acactccgcattaatattgatagta

SEQ ID NO: 433201 - DNA, 25 bp, Artificial
  probe
  misc_feature (1)..(25): SEQ ID NO: 6245; WAN0249BX; Start 155; Stop 179
tacactccgcattaatattgatagt

SEQ ID NO: 433202 - DNA, 25 bp, Artificial
  probe
  misc_feature (1)..(25): SEQ ID NO: 6245; WAN0249BX; Start 86; Stop 110
tcgttcctctttccatcctaaacaa

SEQ ID NO: 433203 - DNA, 25 bp, Artificial
  probe
  misc_feature (1)..(25): SEQ ID NO: 6245; WAN0249BX; Start 85; Stop 109
ttcgttcctctttccatcctaaaca

SEQ ID NO: 433204 - DNA, 25 bp, Artificial
  probe
  misc_feature (1)..(25): SEQ ID NO: 6245; WAN0249BX; Start 67; Stop 91
ctctagctttcatcttcattcgttc

SEQ ID NO: 433205 - DNA, 25 bp, Artificial
  probe
  misc_feature (1)..(25): SEQ ID NO: 6245; WAN0249BX; Start 66; Stop 90
tctctagctttcatcttcattcgtt

SEQ ID NO: 433206 - DNA, 25 bp, Artificial
  probe
  misc_feature (1)..(25): SEQ ID NO: 6245; WAN0249BX; Start 65; Stop 89
atctctagctttcatcttcattcgt

SEQ ID NO: 433207 - DNA, 25 bp, Artificial
  probe
  misc_feature (1)..(25): SEQ ID NO: 6245; WAN0249BX; Start 80; Stop 104
cttcattcgttcctctttccatcct

SEQ ID NO: 433208 - DNA, 25 bp, Artificial
  probe
  misc_feature (1)..(25): SEQ ID NO: 6245; WAN0249BX; Start 79; Stop 103
tcttcattcgttcctctttccatcc

SEQ ID NO: 433209 - DNA, 25 bp, Artificial
  probe
  misc_feature (1)..(25): SEQ ID NO: 6245; WAN0249BX; Start 154; Stop 178
ttacactccgcattaatattgatag

SEQ ID NO: 433210 - DNA, 25 bp, Artificial
  probe
  misc_feature (1)..(25): SEQ ID NO: 6245; WAN0249BX; Start 70; Stop 94
tagctttcatcttcattcgttcctc

SEQ ID NO: 433211 - DNA, 25 bp, Artificial
  probe
  misc_feature (1)..(25): SEQ ID NO: 6245; WAN0249BX; Start 69; Stop 93
ctagctttcatcttcattcgttcct

SEQ ID NO: 433212 - DNA, 25 bp, Artificial
  probe
  misc_feature (1)..(25): SEQ ID NO: 6245; WAN0249BX; Start 68; Stop 92
tctagctttcatcttcattcgttcc

SEQ ID NO: 433213 - DNA, 25 bp, Artificial
  probe
  misc_feature (1)..(25): SEQ ID NO: 6245; WAN0249BX; Start 64; Stop 88
aatctctagctttcatcttcattcg

SEQ ID NO: 433214 - DNA, 25 bp, Artificial
  probe
  misc_feature (1)..(25): SEQ ID NO: 6245; WAN0249BX; Start 89; Stop 113
ttcctctttccatcctaaacaaagt

SEQ ID NO: 433215 - DNA, 25 bp, Artificial
  probe
  misc_feature (1)..(25): SEQ ID NO: 6245; WAN0249BX; Start 88; Stop 112
gttcctctttccatcctaaacaaag

SEQ ID NO: 433216 - DNA, 25 bp, Artificial
  probe
  misc_feature (1)..(25): SEQ ID NO: 6245; WAN0249BX; Start 90; Stop 114
tcctctttccatcctaaacaaagta

SEQ ID NO: 433217 - DNA, 25 bp, Artificial
  probe
  misc_feature (1)..(25): SEQ ID NO: 6246; WAN0249AZ; Start 21; Stop 45
taagagagcgaggttgattttgtaa

SEQ ID NO: 433218 - DNA, 25 bp, Artificial
  probe
  misc_feature (1)..(25): SEQ ID NO: 6246; WAN0249AZ; Start 20; Stop 44
ataagagagcgaggttgattttgta

SEQ ID NO: 433219 - DNA, 25 bp, Artificial
  probe
  misc_feature (1)..(25): SEQ ID NO: 6246; WAN0249AZ; Start 19; Stop 43
aataagagagcgaggttgattttgt

SEQ ID NO: 433220 - DNA, 25 bp, Artificial
  probe
  misc_feature (1)..(25): SEQ ID NO: 6246; WAN0249AZ; Start 22; Stop 46
aagagagcgaggttgattttgtaaa

SEQ ID NO: 433221 - DNA, 25 bp, Artificial
  probe
  misc_feature (1)..(25): SEQ ID NO: 6246; WAN0249AZ; Start 18; Stop 42
aaataagagagcgaggttgattttg

SEQ ID NO: 433222 - DNA, 25 bp, Artificial
  probe
  misc_feature (1)..(25): SEQ ID NO: 6246; WAN0249AZ; Start 24; Stop 48
gagagcgaggttgattttgtaaata

SEQ ID NO: 433223 - DNA, 25 bp, Artificial
  probe
  misc_feature (1)..(25): SEQ ID NO: 6246; WAN0249AZ; Start 23; Stop 47
agagagcgaggttgattttgtaaat

SEQ ID NO: 433224 - DNA, 25 bp, Artificial
  probe
  misc_feature (1)..(25): SEQ ID NO: 6246; WAN0249AZ; Start 25; Stop 49
agagcgaggttgattttgtaaatat

SEQ ID NO: 433225 - DNA, 25 bp, Artificial
  probe
  misc_feature (1)..(25): SEQ ID NO: 6246; WAN0249AZ; Start 26; Stop 50
gagcgaggttgattttgtaaatatt

SEQ ID NO: 433226 - DNA, 25 bp, Artificial
  probe
  misc_feature (1)..(25): SEQ ID NO: 6246; WAN0249AZ; Start 17; Stop 41
aaaataagagagcgaggttgatttt

SEQ ID NO: 433227 - DNA, 25 bp, Artificial
  probe
  misc_feature (1)..(25): SEQ ID NO: 6246; WAN0249AZ; Start 27; Stop 51
agcgaggttgattttgtaaatattt

SEQ ID NO: 433228 - DNA, 25 bp, Artificial
  probe
  misc_feature (1)..(25): SEQ ID NO: 6246; WAN0249AZ; Start 28; Stop 52
gcgaggttgattttgtaaatatttt

SEQ ID NO: 433229 - DNA, 25 bp, Artificial
  probe
  misc_feature (1)..(25): SEQ ID NO: 6247; WAN024C32; Start 86; Stop 110
tagttcacttcgagcctttggatta

SEQ ID NO: 433230 - DNA, 25 bp, Artificial
  probe
  misc_feature (1)..(25): SEQ ID NO: 6247; WAN024C32; Start 87; Stop 111
agttcacttcgagcctttggattag

SEQ ID NO: 433231 - DNA, 25 bp, Artificial
  probe
  misc_feature (1)..(25): SEQ ID NO: 6247; WAN024C32; Start 85; Stop 109
ctagttcacttcgagcctttggatt

SEQ ID NO: 433232 - DNA, 25 bp, Artificial
  probe
  misc_feature (1)..(25): SEQ ID NO: 6247; WAN024C32; Start 84; Stop 108
gctagttcacttcgagcctttggat

SEQ ID NO: 433233 - DNA, 25 bp, Artificial
  probe
  misc_feature (1)..(25): SEQ ID NO: 6248; WAN024BRW; Start 209; Stop 233
ctcctgacctaacaatcttatacgg

SEQ ID NO: 433234 - DNA, 25 bp, Artificial
  probe
  misc_feature (1)..(25): SEQ ID NO: 6248; WAN024BRW; Start 216; Stop 240
cctaacaatcttatacggtgctgaa

SEQ ID NO: 433235 - DNA, 25 bp, Artificial
  probe
  misc_feature (1)..(25): SEQ ID NO: 6248; WAN024BRW; Start 208; Stop 232
gctcctgacctaacaatcttatacg

SEQ ID NO: 433236 - DNA, 25 bp, Artificial
  probe
  misc_feature (1)..(25): SEQ ID NO: 6248; WAN024BRW; Start 2; Stop 26
tgattgacatccattcacacatagt

SEQ ID NO: 433237 - DNA, 25 bp, Artificial
  probe
  misc_feature (1)..(25): SEQ ID NO: 6248; WAN024BRW; Start 3; Stop 27
gattgacatccattcacacatagtt

SEQ ID NO: 433238 - DNA, 25 bp, Artificial
  probe
  misc_feature (1)..(25): SEQ ID NO: 6248; WAN024BRW; Start 1; Stop 25
atgattgacatccattcacacatag

SEQ ID NO: 433239 - DNA, 25 bp, Artificial
  probe
  misc_feature (1)..(25): SEQ ID NO: 6248; WAN024BRW; Start 151; Stop 175
ccagaagataagattgctgctaatt

SEQ ID NO: 433240 - DNA, 25 bp, Artificial
  probe
  misc_feature (1)..(25): SEQ ID NO: 6248; WAN024BRW; Start 150; Stop 174
gccagaagataagattgctgctaat

SEQ ID NO: 433241 - DNA, 25 bp, Artificial
  probe
  misc_feature (1)..(25): SEQ ID NO: 6248; WAN024BRW; Start 185; Stop 209
ttcaggaactgtctaaggagatagc

SEQ ID NO: 433242 - DNA, 25 bp, Artificial
  probe
  misc_feature (1)..(25): SEQ ID NO: 6248; WAN024BRW; Start 207; Stop 231
agctcctgacctaacaatcttatac

SEQ ID NO: 433243 - DNA, 25 bp, Artificial
  probe
  misc_feature (1)..(25): SEQ ID NO: 6248; WAN024BRW; Start 204; Stop 228
gatagctcctgacctaacaatctta

SEQ ID NO: 433244 - DNA, 25 bp, Artificial
  probe
  misc_feature (1)..(25): SEQ ID NO: 6248; WAN024BRW; Start 184; Stop 208
gttcaggaactgtctaaggagatag

SEQ ID NO: 433245 - DNA, 25 bp, Artificial
  probe
  misc_feature (1)..(25): SEQ ID NO: 6248; WAN024BRW; Start 205; Stop 229
atagctcctgacctaacaatcttat

SEQ ID NO: 433246 - DNA, 25 bp, Artificial
  probe
  misc_feature (1)..(25): SEQ ID NO: 6248; WAN024BRW; Start 211; Stop 235
cctgacctaacaatcttatacggtg

SEQ ID NO: 433247 - DNA, 25 bp, Artificial
  probe
  misc_feature (1)..(25): SEQ ID NO: 6248; WAN024BRW; Start 210; Stop 234
tcctgacctaacaatcttatacggt

SEQ ID NO: 433248 - DNA, 25 bp, Artificial
  probe
  misc_feature (1)..(25): SEQ ID NO: 6248; WAN024BRW; Start 220; Stop 244
acaatcttatacggtgctgaaatct

SEQ ID NO: 433249 - DNA, 25 bp, Artificial
  probe
  misc_feature (1)..(25): SEQ ID NO: 6248; WAN024BRW; Start 219; Stop 243
aacaatcttatacggtgctgaaatc

SEQ ID NO: 433250 - DNA, 25 bp, Artificial
  probe
  misc_feature (1)..(25): SEQ ID NO: 6248; WAN024BRW; Start 217; Stop 241
ctaacaatcttatacggtgctgaaa

SEQ ID NO: 433251 - DNA, 25 bp, Artificial
  probe
  misc_feature (1)..(25): SEQ ID NO: 6248; WAN024BRW; Start 183; Stop 207
cgttcaggaactgtctaaggagata

SEQ ID NO: 433252 - DNA, 25 bp, Artificial
  probe
  misc_feature (1)..(25): SEQ ID NO: 6248; WAN024BRW; Start 214; Stop 238
gacctaacaatcttatacggtgctg

SEQ ID NO: 433253 - DNA, 25 bp, Artificial
  probe
  misc_feature (1)..(25): SEQ ID NO: 6248; WAN024BRW; Start 212; Stop 236
ctgacctaacaatcttatacggtgc

SEQ ID NO: 433254 - DNA, 25 bp, Artificial
  probe
  misc_feature (1)..(25): SEQ ID NO: 6248; WAN024BRW; Start 142; Stop 166
tttgagacgccagaagataagattg

SEQ ID NO: 433255 - DNA, 25 bp, Artificial
  probe
  misc_feature (1)..(25): SEQ ID NO: 6248; WAN024BRW; Start 141; Stop 165
gtttgagacgccagaagataagatt

SEQ ID NO: 433256 - DNA, 25 bp, Artificial
  probe
  misc_feature (1)..(25): SEQ ID NO: 6248; WAN024BRW; Start 215; Stop 239
acctaacaatcttatacggtgctga

SEQ ID NO: 433257 - DNA, 25 bp, Artificial
  probe
  misc_feature (1)..(25): SEQ ID NO: 6248; WAN024BRW; Start 213; Stop 237
tgacctaacaatcttatacggtgct

SEQ ID NO: 433258 - DNA, 25 bp, Artificial
  probe
  misc_feature (1)..(25): SEQ ID NO: 6248; WAN024BRW; Start 206; Stop 230
tagctcctgacctaacaatcttata

SEQ ID NO: 433259 - DNA, 25 bp, Artificial
  probe
  misc_feature (1)..(25): SEQ ID NO: 6248; WAN024BRW; Start 221; Stop 245
caatcttatacggtgctgaaatcta

SEQ ID NO: 433260 - DNA, 25 bp, Artificial
  probe
  misc_feature (1)..(25): SEQ ID NO: 6248; WAN024BRW; Start 104; Stop 128
ggactattgtttcaacttctcatcg

SEQ ID NO: 433261 - DNA, 25 bp, Artificial
  probe
  misc_feature (1)..(25): SEQ ID NO: 6248; WAN024BRW; Start 103; Stop 127
cggactattgtttcaacttctcatc

SEQ ID NO: 433262 - DNA, 25 bp, Artificial
  probe
  misc_feature (1)..(25): SEQ ID NO: 6248; WAN024BRW; Start 102; Stop 126
tcggactattgtttcaacttctcat

SEQ ID NO: 433263 - DNA, 25 bp, Artificial
  probe
  misc_feature (1)..(25): SEQ ID NO: 6248; WAN024BRW; Start 100; Stop 124
gttcggactattgtttcaacttctc

SEQ ID NO: 433264 - DNA, 25 bp, Artificial
  probe
  misc_feature (1)..(25): SEQ ID NO: 6248; WAN024BRW; Start 143; Stop 167
ttgagacgccagaagataagattgc

SEQ ID NO: 433265 - DNA, 25 bp, Artificial
  probe
  misc_feature (1)..(25): SEQ ID NO: 6248; WAN024BRW; Start 101; Stop 125
ttcggactattgtttcaacttctca

SEQ ID NO: 433266 - DNA, 25 bp, Artificial
  probe
  misc_feature (1)..(25): SEQ ID NO: 6249; WAN024BQV; Start 405; Stop 429
gccagatagtgccttgtatatgtta

SEQ ID NO: 433267 - DNA, 25 bp, Artificial
  probe
  misc_feature (1)..(25): SEQ ID NO: 6249; WAN024BQV; Start 402; Stop 426
aatgccagatagtgccttgtatatg

SEQ ID NO: 433268 - DNA, 25 bp, Artificial
  probe
  misc_feature (1)..(25): SEQ ID NO: 6249; WAN024BQV; Start 241; Stop 265
tatgatgccattatccaaggtctac

SEQ ID NO: 433269 - DNA, 25 bp, Artificial
  probe
  misc_feature (1)..(25): SEQ ID NO: 6249; WAN024BQV; Start 239; Stop 263
attatgatgccattatccaaggtct

SEQ ID NO: 433270 - DNA, 25 bp, Artificial
  probe
  misc_feature (1)..(25): SEQ ID NO: 6249; WAN024BQV; Start 413; Stop 437
gtgccttgtatatgttagaagtgga

SEQ ID NO: 433271 - DNA, 25 bp, Artificial
  probe
  misc_feature (1)..(25): SEQ ID NO: 6249; WAN024BQV; Start 412; Stop 436
agtgccttgtatatgttagaagtgg

SEQ ID NO: 433272 - DNA, 25 bp, Artificial
  probe
  misc_feature (1)..(25): SEQ ID NO: 6249; WAN024BQV; Start 248; Stop 272
ccattatccaaggtctacagtcttc

SEQ ID NO: 433273 - DNA, 25 bp, Artificial
  probe
  misc_feature (1)..(25): SEQ ID NO: 6249; WAN024BQV; Start 414; Stop 438
tgccttgtatatgttagaagtggat

SEQ ID NO: 433274 - DNA, 25 bp, Artificial
  probe
  misc_feature (1)..(25): SEQ ID NO: 6249; WAN024BQV; Start 249; Stop 273
cattatccaaggtctacagtcttcg

SEQ ID NO: 433275 - DNA, 25 bp, Artificial
  probe
  misc_feature (1)..(25): SEQ ID NO: 6249; WAN024BQV; Start 240; Stop 264
ttatgatgccattatccaaggtcta

SEQ ID NO: 433276 - DNA, 25 bp, Artificial
  probe
  misc_feature (1)..(25): SEQ ID NO: 6249; WAN024BQV; Start 238; Stop 262
aattatgatgccattatccaaggtc

SEQ ID NO: 433277 - DNA, 25 bp, Artificial
  probe
  misc_feature (1)..(25): SEQ ID NO: 6249; WAN024BQV; Start 406; Stop 430
ccagatagtgccttgtatatgttag

SEQ ID NO: 433278 - DNA, 25 bp, Artificial
  probe
  misc_feature (1)..(25): SEQ ID NO: 6249; WAN024BQV; Start 401; Stop 425
caatgccagatagtgccttgtatat

SEQ ID NO: 433279 - DNA, 25 bp, Artificial
  probe
  misc_feature (1)..(25): SEQ ID NO: 6249; WAN024BQV; Start 403; Stop 427
atgccagatagtgccttgtatatgt

SEQ ID NO: 433280 - DNA, 25 bp, Artificial
  probe
  misc_feature (1)..(25): SEQ ID NO: 6249; WAN024BQV; Start 242; Stop 266
atgatgccattatccaaggtctaca

SEQ ID NO: 433281 - DNA, 25 bp, Artificial
  probe
  misc_feature (1)..(25): SEQ ID NO: 6249; WAN024BQV; Start 404; Stop 428
tgccagatagtgccttgtatatgtt

SEQ ID NO: 433282 - DNA, 25 bp, Artificial
  probe
  misc_feature (1)..(25): SEQ ID NO: 6249; WAN024BQV; Start 250; Stop 274
attatccaaggtctacagtcttcgg

SEQ ID NO: 433283 - DNA, 25 bp, Artificial
  probe
  misc_feature (1)..(25): SEQ ID NO: 6249; WAN024BQV; Start 415; Stop 439
gccttgtatatgttagaagtggatc

SEQ ID NO: 433284 - DNA, 25 bp, Artificial
  probe
  misc_feature (1)..(25): SEQ ID NO: 6249; WAN024BQV; Start 411; Stop 435
tagtgccttgtatatgttagaagtg

SEQ ID NO: 433285 - DNA, 25 bp, Artificial
  probe
  misc_feature (1)..(25): SEQ ID NO: 6249; WAN024BQV; Start 245; Stop 269
atgccattatccaaggtctacagtc

SEQ ID NO: 433286 - DNA, 25 bp, Artificial
  probe
  misc_feature (1)..(25): SEQ ID NO: 6249; WAN024BQV; Start 247; Stop 271
gccattatccaaggtctacagtctt

SEQ ID NO: 433287 - DNA, 25 bp, Artificial
  probe
  misc_feature (1)..(25): SEQ ID NO: 6249; WAN024BQV; Start 244; Stop 268
gatgccattatccaaggtctacagt

SEQ ID NO: 433288 - DNA, 25 bp, Artificial
  probe
  misc_feature (1)..(25): SEQ ID NO: 6249; WAN024BQV; Start 243; Stop 267
tgatgccattatccaaggtctacag

SEQ ID NO: 433289 - DNA, 25 bp, Artificial
  probe
  misc_feature (1)..(25): SEQ ID NO: 6249; WAN024BQV; Start 407; Stop 431
cagatagtgccttgtatatgttaga

SEQ ID NO: 433290 - DNA, 25 bp, Artificial
  probe
  misc_feature (1)..(25): SEQ ID NO: 6249; WAN024BQV; Start 416; Stop 440
ccttgtatatgttagaagtggatca

SEQ ID NO: 433291 - DNA, 25 bp, Artificial
  probe
  misc_feature (1)..(25): SEQ ID NO: 6249; WAN024BQV; Start 375; Stop 399
tggtcgtatggatcttccttcatat

SEQ ID NO: 433292 - DNA, 25 bp, Artificial
  probe
  misc_feature (1)..(25): SEQ ID NO: 6249; WAN024BQV; Start 410; Stop 434
atagtgccttgtatatgttagaagt

SEQ ID NO: 433293 - DNA, 25 bp, Artificial
  probe
  misc_feature (1)..(25): SEQ ID NO: 6249; WAN024BQV; Start 252; Stop 276
tatccaaggtctacagtcttcggtt

SEQ ID NO: 433294 - DNA, 25 bp, Artificial
  probe
  misc_feature (1)..(25): SEQ ID NO: 6249; WAN024BQV; Start 251; Stop 275
ttatccaaggtctacagtcttcggt

SEQ ID NO: 433295 - DNA, 25 bp, Artificial
  probe
  misc_feature (1)..(25): SEQ ID NO: 6249; WAN024BQV; Start 278; Stop 302
aaaccaatatgccaccagaaactat

SEQ ID NO: 433296 - DNA, 25 bp, Artificial
  probe
  misc_feature (1)..(25): SEQ ID NO: 6249; WAN024BQV; Start 246; Stop 270
tgccattatccaaggtctacagtct

SEQ ID NO: 433297 - DNA, 25 bp, Artificial
  probe
  misc_feature (1)..(25): SEQ ID NO: 6249; WAN024BQV; Start 336; Stop 360
cggcaaatatactgttacaactcaa

SEQ ID NO: 433298 - DNA, 25 bp, Artificial
  probe
  misc_feature (1)..(25): SEQ ID NO: 6249; WAN024BQV; Start 424; Stop 448
atgttagaagtggatcagaatagtt

SEQ ID NO: 433299 - DNA, 25 bp, Artificial
  probe
  misc_feature (1)..(25): SEQ ID NO: 6250; WAN024DRY; Start 324; Stop 348
tgaagagttgagtggtaagattgaa

SEQ ID NO: 433300 - DNA, 25 bp, Artificial
  probe
  misc_feature (1)..(25): SEQ ID NO: 6250; WAN024DRY; Start 323; Stop 347
ttgaagagttgagtggtaagattga

SEQ ID NO: 433301 - DNA, 25 bp, Artificial
  probe
  misc_feature (1)..(25): SEQ ID NO: 6250; WAN024DRY; Start 322; Stop 346
cttgaagagttgagtggtaagattg

SEQ ID NO: 433302 - DNA, 25 bp, Artificial
  probe
  misc_feature (1)..(25): SEQ ID NO: 6250; WAN024DRY; Start 321; Stop 345
acttgaagagttgagtggtaagatt

SEQ ID NO: 433303 - DNA, 25 bp, Artificial
  probe
  misc_feature (1)..(25): SEQ ID NO: 6250; WAN024DRY; Start 251; Stop 275
attatatcaaagaaggtttccgtgc

SEQ ID NO: 433304 - DNA, 25 bp, Artificial
  probe
  misc_feature (1)..(25): SEQ ID NO: 6250; WAN024DRY; Start 252; Stop 276
ttatatcaaagaaggtttccgtgct

SEQ ID NO: 433305 - DNA, 25 bp, Artificial
  probe
  misc_feature (1)..(25): SEQ ID NO: 6250; WAN024DRY; Start 253; Stop 277
tatatcaaagaaggtttccgtgctc

SEQ ID NO: 433306 - DNA, 25 bp, Artificial
  probe
  misc_feature (1)..(25): SEQ ID NO: 6250; WAN024DRY; Start 250; Stop 274
gattatatcaaagaaggtttccgtg

SEQ ID NO: 433307 - DNA, 25 bp, Artificial
  probe
  misc_feature (1)..(25): SEQ ID NO: 6250; WAN024DRY; Start 320; Stop 344
aacttgaagagttgagtggtaagat

SEQ ID NO: 433308 - DNA, 25 bp, Artificial
  probe
  misc_feature (1)..(25): SEQ ID NO: 6250; WAN024DRY; Start 276; Stop 300
tcctcttcaatctgaattggatacc

SEQ ID NO: 433309 - DNA, 25 bp, Artificial
  probe
  misc_feature (1)..(25): SEQ ID NO: 6250; WAN024DRY; Start 277; Stop 301
cctcttcaatctgaattggatacca

SEQ ID NO: 433310 - DNA, 25 bp, Artificial
  probe
  misc_feature (1)..(25): SEQ ID NO: 6250; WAN024DRY; Start 274; Stop 298
gctcctcttcaatctgaattggata

SEQ ID NO: 433311 - DNA, 25 bp, Artificial
  probe
  misc_feature (1)..(25): SEQ ID NO: 6250; WAN024DRY; Start 249; Stop 273
agattatatcaaagaaggtttccgt

SEQ ID NO: 433312 - DNA, 25 bp, Artificial
  probe
  misc_feature (1)..(25): SEQ ID NO: 6250; WAN024DRY; Start 275; Stop 299
ctcctcttcaatctgaattggatac

SEQ ID NO: 433313 - DNA, 25 bp, Artificial
  probe
  misc_feature (1)..(25): SEQ ID NO: 6250; WAN024DRY; Start 77; Stop 101
aacaagaagaagaagctaaagcaaa

SEQ ID NO: 433314 - DNA, 25 bp, Artificial
  probe
  misc_feature (1)..(25): SEQ ID NO: 6250; WAN024DRY; Start 76; Stop 100
aaacaagaagaagaagctaaagcaa

SEQ ID NO: 433315 - DNA, 25 bp, Artificial
  probe
  misc_feature (1)..(25): SEQ ID NO: 6250; WAN024DRY; Start 307; Stop 331
gctaaactattgaaacttgaagagt

SEQ ID NO: 433316 - DNA, 25 bp, Artificial
  probe
  misc_feature (1)..(25): SEQ ID NO: 6250; WAN024DRY; Start 248; Stop 272
aagattatatcaaagaaggtttccg

SEQ ID NO: 433317 - DNA, 25 bp, Artificial
  probe
  misc_feature (1)..(25): SEQ ID NO: 6250; WAN024DRY; Start 254; Stop 278
atatcaaagaaggtttccgtgctcc

SEQ ID NO: 433318 - DNA, 25 bp, Artificial
  probe
  misc_feature (1)..(25): SEQ ID NO: 6250; WAN024DRY; Start 97; Stop 121
gcaaaattagaagaggctgagaaaa

SEQ ID NO: 433319 - DNA, 25 bp, Artificial
  probe
  misc_feature (1)..(25): SEQ ID NO: 6250; WAN024DRY; Start 319; Stop 343
aaacttgaagagttgagtggtaaga

SEQ ID NO: 433320 - DNA, 25 bp, Artificial
  probe
  misc_feature (1)..(25): SEQ ID NO: 6250; WAN024DRY; Start 318; Stop 342
gaaacttgaagagttgagtggtaag

SEQ ID NO: 433321 - DNA, 25 bp, Artificial
  probe
  misc_feature (1)..(25): SEQ ID NO: 6250; WAN024DRY; Start 317; Stop 341
tgaaacttgaagagttgagtggtaa

SEQ ID NO: 433322 - DNA, 25 bp, Artificial
  probe
  misc_feature (1)..(25): SEQ ID NO: 6250; WAN024DRY; Start 316; Stop 340
ttgaaacttgaagagttgagtggta

SEQ ID NO: 433323 - DNA, 25 bp, Artificial
  probe
  misc_feature (1)..(25): SEQ ID NO: 6250; WAN024DRY; Start 315; Stop 339
attgaaacttgaagagttgagtggt

SEQ ID NO: 433324 - DNA, 25 bp, Artificial
  probe
  misc_feature (1)..(25): SEQ ID NO: 6250; WAN024DRY; Start 314; Stop 338
tattgaaacttgaagagttgagtgg

SEQ ID NO: 433325 - DNA, 25 bp, Artificial
  probe
  misc_feature (1)..(25): SEQ ID NO: 6250; WAN024DRY; Start 306; Stop 330
agctaaactattgaaacttgaagag

SEQ ID NO: 433326 - DNA, 25 bp, Artificial
  probe
  misc_feature (1)..(25): SEQ ID NO: 6250; WAN024DRY; Start 312; Stop 336
actattgaaacttgaagagttgagt

SEQ ID NO: 433327 - DNA, 25 bp, Artificial
  probe
  misc_feature (1)..(25): SEQ ID NO: 6250; WAN024DRY; Start 278; Stop 302
ctcttcaatctgaattggataccaa

SEQ ID NO: 433328 - DNA, 25 bp, Artificial
  probe
  misc_feature (1)..(25): SEQ ID NO: 6250; WAN024DRY; Start 313; Stop 337
ctattgaaacttgaagagttgagtg

SEQ ID NO: 433329 - DNA, 25 bp, Artificial
  probe
  misc_feature (1)..(25): SEQ ID NO: 6250; WAN024DRY; Start 305; Stop 329
aagctaaactattgaaacttgaaga

SEQ ID NO: 433330 - DNA, 25 bp, Artificial
  probe
  misc_feature (1)..(25): SEQ ID NO: 6250; WAN024DRY; Start 78; Stop 102
acaagaagaagaagctaaagcaaaa

SEQ ID NO: 433331 - DNA, 25 bp, Artificial
  probe
  misc_feature (1)..(25): SEQ ID NO: 6250; WAN024DRY; Start 75; Stop 99
aaaacaagaagaagaagctaaagca

SEQ ID NO: 433332 - DNA, 25 bp, Artificial
  probe
  misc_feature (1)..(25): SEQ ID NO: 6251; WAN024AF7; Start 87; Stop 111
tagcaaactggaagactaactacaa

SEQ ID NO: 433333 - DNA, 25 bp, Artificial
  probe
  misc_feature (1)..(25): SEQ ID NO: 6251; WAN024AF7; Start 157; Stop 181
tccaattaacacatacctaagatga

SEQ ID NO: 433334 - DNA, 25 bp, Artificial
  probe
  misc_feature (1)..(25): SEQ ID NO: 6251; WAN024AF7; Start 89; Stop 113
gcaaactggaagactaactacaact

SEQ ID NO: 433335 - DNA, 25 bp, Artificial
  probe
  misc_feature (1)..(25): SEQ ID NO: 6251; WAN024AF7; Start 88; Stop 112
agcaaactggaagactaactacaac

SEQ ID NO: 433336 - DNA, 25 bp, Artificial
  probe
  misc_feature (1)..(25): SEQ ID NO: 6251; WAN024AF7; Start 160; Stop 184
aattaacacatacctaagatgaagc

SEQ ID NO: 433337 - DNA, 25 bp, Artificial
  probe
  misc_feature (1)..(25): SEQ ID NO: 6251; WAN024AF7; Start 164; Stop 188
aacacatacctaagatgaagctatc

SEQ ID NO: 433338 - DNA, 25 bp, Artificial
  probe
  misc_feature (1)..(25): SEQ ID NO: 6251; WAN024AF7; Start 90; Stop 114
caaactggaagactaactacaactt

SEQ ID NO: 433339 - DNA, 25 bp, Artificial
  probe
  misc_feature (1)..(25): SEQ ID NO: 6251; WAN024AF7; Start 161; Stop 185
attaacacatacctaagatgaagct

SEQ ID NO: 433340 - DNA, 25 bp, Artificial
  probe
  misc_feature (1)..(25): SEQ ID NO: 6251; WAN024AF7; Start 151; Stop 175
acgaaatccaattaacacataccta

SEQ ID NO: 433341 - DNA, 25 bp, Artificial
  probe
  misc_feature (1)..(25): SEQ ID NO: 6251; WAN024AF7; Start 150; Stop 174
tacgaaatccaattaacacatacct

SEQ ID NO: 433342 - DNA, 25 bp, Artificial
  probe
  misc_feature (1)..(25): SEQ ID NO: 6251; WAN024AF7; Start 158; Stop 182
ccaattaacacatacctaagatgaa

SEQ ID NO: 433343 - DNA, 25 bp, Artificial
  probe
  misc_feature (1)..(25): SEQ ID NO: 6251; WAN024AF7; Start 91; Stop 115
aaactggaagactaactacaacttt

SEQ ID NO: 433344 - DNA, 25 bp, Artificial
  probe
  misc_feature (1)..(25): SEQ ID NO: 6251; WAN024AF7; Start 86; Stop 110
ttagcaaactggaagactaactaca

SEQ ID NO: 433345 - DNA, 25 bp, Artificial
  probe
  misc_feature (1)..(25): SEQ ID NO: 6251; WAN024AF7; Start 147; Stop 171
gcttacgaaatccaattaacacata

SEQ ID NO: 433346 - DNA, 25 bp, Artificial
  probe
  misc_feature (1)..(25): SEQ ID NO: 6251; WAN024AF7; Start 156; Stop 180
atccaattaacacatacctaagatg

SEQ ID NO: 433347 - DNA, 25 bp, Artificial
  probe
  misc_feature (1)..(25): SEQ ID NO: 6251; WAN024AF7; Start 85; Stop 109
tttagcaaactggaagactaactac

SEQ ID NO: 433348 - DNA, 25 bp, Artificial
  probe
  misc_feature (1)..(25): SEQ ID NO: 6251; WAN024AF7; Start 145; Stop 169
gagcttacgaaatccaattaacaca

SEQ ID NO: 433349 - DNA, 25 bp, Artificial
  probe
  misc_feature (1)..(25): SEQ ID NO: 6251; WAN024AF7; Start 149; Stop 173
ttacgaaatccaattaacacatacc

SEQ ID NO: 433350 - DNA, 25 bp, Artificial
  probe
  misc_feature (1)..(25): SEQ ID NO: 6251; WAN024AF7; Start 144; Stop 168
agagcttacgaaatccaattaacac

SEQ ID NO: 433351 - DNA, 25 bp, Artificial
  probe
  misc_feature (1)..(25): SEQ ID NO: 6251; WAN024AF7; Start 83; Stop 107
aatttagcaaactggaagactaact

SEQ ID NO: 433352 - DNA, 25 bp, Artificial
  probe
  misc_feature (1)..(25): SEQ ID NO: 6251; WAN024AF7; Start 146; Stop 170
agcttacgaaatccaattaacacat

SEQ ID NO: 433353 - DNA, 25 bp, Artificial
  probe
  misc_feature (1)..(25): SEQ ID NO: 6251; WAN024AF7; Start 165; Stop 189
acacatacctaagatgaagctatct

SEQ ID NO: 433354 - DNA, 25 bp, Artificial
  probe
  misc_feature (1)..(25): SEQ ID NO: 6251; WAN024AF7; Start 162; Stop 186
ttaacacatacctaagatgaagcta

SEQ ID NO: 433355 - DNA, 25 bp, Artificial
  probe
  misc_feature (1)..(25): SEQ ID NO: 6251; WAN024AF7; Start 152; Stop 176
cgaaatccaattaacacatacctaa

SEQ ID NO: 433356 - DNA, 25 bp, Artificial
  probe
  misc_feature (1)..(25): SEQ ID NO: 6251; WAN024AF7; Start 79; Stop 103
gagaaatttagcaaactggaagact

SEQ ID NO: 433357 - DNA, 25 bp, Artificial
  probe
  misc_feature (1)..(25): SEQ ID NO: 6251; WAN024AF7; Start 78; Stop 102
cgagaaatttagcaaactggaagac

SEQ ID NO: 433358 - DNA, 25 bp, Artificial
  probe
  misc_feature (1)..(25): SEQ ID NO: 6251; WAN024AF7; Start 77; Stop 101
tcgagaaatttagcaaactggaaga

SEQ ID NO: 433359 - DNA, 25 bp, Artificial
  probe
  misc_feature (1)..(25): SEQ ID NO: 6251; WAN024AF7; Start 163; Stop 187
taacacatacctaagatgaagctat

SEQ ID NO: 433360 - DNA, 25 bp, Artificial
  probe
  misc_feature (1)..(25): SEQ ID NO: 6251; WAN024AF7; Start 76; Stop 100
ttcgagaaatttagcaaactggaag

SEQ ID NO: 433361 - DNA, 25 bp, Artificial
  probe
  misc_feature (1)..(25): SEQ ID NO: 6251; WAN024AF7; Start 75; Stop 99
attcgagaaatttagcaaactggaa

SEQ ID NO: 433362 - DNA, 25 bp, Artificial
  probe
  misc_feature (1)..(25): SEQ ID NO: 6251; WAN024AF7; Start 74; Stop 98
tattcgagaaatttagcaaactgga

SEQ ID NO: 433363 - DNA, 25 bp, Artificial
  probe
  misc_feature (1)..(25): SEQ ID NO: 6251; WAN024AF7; Start 84; Stop 108
atttagcaaactggaagactaacta

SEQ ID NO: 433364 - DNA, 25 bp, Artificial
  probe
  misc_feature (1)..(25): SEQ ID NO: 6251; WAN024AF7; Start 143; Stop 167
tagagcttacgaaatccaattaaca

SEQ ID NO: 433365 - DNA, 25 bp, Artificial
  probe
  misc_feature (1)..(25): SEQ ID NO: 6252; WAN0249OX; Start 85; Stop 109
tcttgtatagtggattgaatatgga

SEQ ID NO: 433366 - DNA, 25 bp, Artificial
  probe
  misc_feature (1)..(25): SEQ ID NO: 6252; WAN0249OX; Start 158; Stop 182
cctaattgattcgttcacattctat

SEQ ID NO: 433367 - DNA, 25 bp, Artificial
  probe
  misc_feature (1)..(25): SEQ ID NO: 6252; WAN0249OX; Start 169; Stop 193
cgttcacattctattacaatctact

SEQ ID NO: 433368 - DNA, 25 bp, Artificial
  probe
  misc_feature (1)..(25): SEQ ID NO: 6252; WAN0249OX; Start 168; Stop 192
tcgttcacattctattacaatctac

SEQ ID NO: 433369 - DNA, 25 bp, Artificial
  probe
  misc_feature (1)..(25): SEQ ID NO: 6252; WAN0249OX; Start 163; Stop 187
ttgattcgttcacattctattacaa

SEQ ID NO: 433370 - DNA, 25 bp, Artificial
  probe
  misc_feature (1)..(25): SEQ ID NO: 6252; WAN0249OX; Start 157; Stop 181
ccctaattgattcgttcacattcta

SEQ ID NO: 433371 - DNA, 25 bp, Artificial
  probe
  misc_feature (1)..(25): SEQ ID NO: 6252; WAN0249OX; Start 166; Stop 190
attcgttcacattctattacaatct

SEQ ID NO: 433372 - DNA, 25 bp, Artificial
  probe
  misc_feature (1)..(25): SEQ ID NO: 6252; WAN0249OX; Start 164; Stop 188
tgattcgttcacattctattacaat

SEQ ID NO: 433373 - DNA, 25 bp, Artificial
  probe
  misc_feature (1)..(25): SEQ ID NO: 6252; WAN0249OX; Start 162; Stop 186
attgattcgttcacattctattaca

SEQ ID NO: 433374 - DNA, 25 bp, Artificial
  probe
  misc_feature (1)..(25): SEQ ID NO: 6252; WAN0249OX; Start 86; Stop 110
cttgtatagtggattgaatatggaa

SEQ ID NO: 433375 - DNA, 25 bp, Artificial
  probe
  misc_feature (1)..(25): SEQ ID NO: 6252; WAN0249OX; Start 84; Stop 108
atcttgtatagtggattgaatatgg

SEQ ID NO: 433376 - DNA, 25 bp, Artificial
  probe
  misc_feature (1)..(25): SEQ ID NO: 6252; WAN0249OX; Start 167; Stop 191
ttcgttcacattctattacaatcta

SEQ ID NO: 433377 - DNA, 25 bp, Artificial
  probe
  misc_feature (1)..(25): SEQ ID NO: 6252; WAN0249OX; Start 9; Stop 33
tgtatctatgatttgtttatggagc

SEQ ID NO: 433378 - DNA, 25 bp, Artificial
  probe
  misc_feature (1)..(25): SEQ ID NO: 6252; WAN0249OX; Start 161; Stop 185
aattgattcgttcacattctattac

SEQ ID NO: 433379 - DNA, 25 bp, Artificial
  probe
  misc_feature (1)..(25): SEQ ID NO: 6252; WAN0249OX; Start 93; Stop 117
agtggattgaatatggaataataca

SEQ ID NO: 433380 - DNA, 25 bp, Artificial
  probe
  misc_feature (1)..(25): SEQ ID NO: 6252; WAN0249OX; Start 87; Stop 111
ttgtatagtggattgaatatggaat

SEQ ID NO: 433381 - DNA, 25 bp, Artificial
  probe
  misc_feature (1)..(25): SEQ ID NO: 6252; WAN0249OX; Start 165; Stop 189
gattcgttcacattctattacaatc

SEQ ID NO: 433382 - DNA, 25 bp, Artificial
  probe
  misc_feature (1)..(25): SEQ ID NO: 6252; WAN0249OX; Start 25; Stop 49
ttatggagctatagatacagtcatt

SEQ ID NO: 433383 - DNA, 25 bp, Artificial
  probe
  misc_feature (1)..(25): SEQ ID NO: 6252; WAN0249OX; Start 159; Stop 183
ctaattgattcgttcacattctatt

SEQ ID NO: 433384 - DNA, 25 bp, Artificial
  probe
  misc_feature (1)..(25): SEQ ID NO: 6252; WAN0249OX; Start 23; Stop 47
gtttatggagctatagatacagtca

SEQ ID NO: 433385 - DNA, 25 bp, Artificial
  probe
  misc_feature (1)..(25): SEQ ID NO: 6252; WAN0249OX; Start 154; Stop 178
atcccctaattgattcgttcacatt

SEQ ID NO: 433386 - DNA, 25 bp, Artificial
  probe
  misc_feature (1)..(25): SEQ ID NO: 6252; WAN0249OX; Start 83; Stop 107
catcttgtatagtggattgaatatg

SEQ ID NO: 433387 - DNA, 25 bp, Artificial
  probe
  misc_feature (1)..(25): SEQ ID NO: 6252; WAN0249OX; Start 156; Stop 180
cccctaattgattcgttcacattct

SEQ ID NO: 433388 - DNA, 25 bp, Artificial
  probe
  misc_feature (1)..(25): SEQ ID NO: 6252; WAN0249OX; Start 155; Stop 179
tcccctaattgattcgttcacattc

SEQ ID NO: 433389 - DNA, 25 bp, Artificial
  probe
  misc_feature (1)..(25): SEQ ID NO: 6252; WAN0249OX; Start 136; Stop 160
tggtataaaatgctttagatcccct

SEQ ID NO: 433390 - DNA, 25 bp, Artificial
  probe
  misc_feature (1)..(25): SEQ ID NO: 6252; WAN0249OX; Start 151; Stop 175
tagatcccctaattgattcgttcac

SEQ ID NO: 433391 - DNA, 25 bp, Artificial
  probe
  misc_feature (1)..(25): SEQ ID NO: 6252; WAN0249OX; Start 153; Stop 177
gatcccctaattgattcgttcacat

SEQ ID NO: 433392 - DNA, 25 bp, Artificial
  probe
  misc_feature (1)..(25): SEQ ID NO: 6252; WAN0249OX; Start 22; Stop 46
tgtttatggagctatagatacagtc

SEQ ID NO: 433393 - DNA, 25 bp, Artificial
  probe
  misc_feature (1)..(25): SEQ ID NO: 6252; WAN0249OX; Start 135; Stop 159
ttggtataaaatgctttagatcccc

SEQ ID NO: 433394 - DNA, 25 bp, Artificial
  probe
  misc_feature (1)..(25): SEQ ID NO: 6252; WAN0249OX; Start 82; Stop 106
tcatcttgtatagtggattgaatat

SEQ ID NO: 433395 - DNA, 25 bp, Artificial
  probe
  misc_feature (1)..(25): SEQ ID NO: 6252; WAN0249OX; Start 78; Stop 102
atattcatcttgtatagtggattga

SEQ ID NO: 433396 - DNA, 25 bp, Artificial
  probe
  misc_feature (1)..(25): SEQ ID NO: 6252; WAN0249OX; Start 94; Stop 118
gtggattgaatatggaataatacaa

SEQ ID NO: 433397 - DNA, 25 bp, Artificial
  probe
  misc_feature (1)..(25): SEQ ID NO: 6252; WAN0249OX; Start 150; Stop 174
ttagatcccctaattgattcgttca

SEQ ID NO: 433398 - DNA, 25 bp, Artificial
  probe
  misc_feature (1)..(25): SEQ ID NO: 6253; WAN024BGH; Start 158; Stop 182
ctaaggatagaagcaaggttgagaa

SEQ ID NO: 433399 - DNA, 25 bp, Artificial
  probe
  misc_feature (1)..(25): SEQ ID NO: 6253; WAN024BGH; Start 159; Stop 183
taaggatagaagcaaggttgagaac

SEQ ID NO: 433400 - DNA, 25 bp, Artificial
  probe
  misc_feature (1)..(25): SEQ ID NO: 6253; WAN024BGH; Start 163; Stop 187
gatagaagcaaggttgagaacatcc

SEQ ID NO: 433401 - DNA, 25 bp, Artificial
  probe
  misc_feature (1)..(25): SEQ ID NO: 6253; WAN024BGH; Start 162; Stop 186
ggatagaagcaaggttgagaacatc

SEQ ID NO: 433402 - DNA, 25 bp, Artificial
  probe
  misc_feature (1)..(25): SEQ ID NO: 6253; WAN024BGH; Start 161; Stop 185
aggatagaagcaaggttgagaacat

SEQ ID NO: 433403 - DNA, 25 bp, Artificial
  probe
  misc_feature (1)..(25): SEQ ID NO: 6253; WAN024BGH; Start 160; Stop 184
aaggatagaagcaaggttgagaaca

SEQ ID NO: 433404 - DNA, 25 bp, Artificial
  probe
  misc_feature (1)..(25): SEQ ID NO: 6253; WAN024BGH; Start 157; Stop 181
tctaaggatagaagcaaggttgaga

SEQ ID NO: 433405 - DNA, 25 bp, Artificial
  probe
  misc_feature (1)..(25): SEQ ID NO: 6253; WAN024BGH; Start 156; Stop 180
gtctaaggatagaagcaaggttgag

SEQ ID NO: 433406 - DNA, 25 bp, Artificial
  probe
  misc_feature (1)..(25): SEQ ID NO: 6253; WAN024BGH; Start 154; Stop 178
ctgtctaaggatagaagcaaggttg

SEQ ID NO: 433407 - DNA, 25 bp, Artificial
  probe
  misc_feature (1)..(25): SEQ ID NO: 6253; WAN024BGH; Start 155; Stop 179
tgtctaaggatagaagcaaggttga

SEQ ID NO: 433408 - DNA, 25 bp, Artificial
  probe
  misc_feature (1)..(25): SEQ ID NO: 6253; WAN024BGH; Start 153; Stop 177
actgtctaaggatagaagcaaggtt

SEQ ID NO: 433409 - DNA, 25 bp, Artificial
  probe
  misc_feature (1)..(25): SEQ ID NO: 6253; WAN024BGH; Start 143; Stop 167
ataaccatgcactgtctaaggatag

SEQ ID NO: 433410 - DNA, 25 bp, Artificial
  probe
  misc_feature (1)..(25): SEQ ID NO: 6253; WAN024BGH; Start 141; Stop 165
ctataaccatgcactgtctaaggat

SEQ ID NO: 433411 - DNA, 25 bp, Artificial
  probe
  misc_feature (1)..(25): SEQ ID NO: 6253; WAN024BGH; Start 164; Stop 188
atagaagcaaggttgagaacatcct

SEQ ID NO: 433412 - DNA, 25 bp, Artificial
  probe
  misc_feature (1)..(25): SEQ ID NO: 6253; WAN024BGH; Start 36; Stop 60
aatcttggctgacagtggttatcaa

SEQ ID NO: 433413 - DNA, 25 bp, Artificial
  probe
  misc_feature (1)..(25): SEQ ID NO: 6253; WAN024BGH; Start 142; Stop 166
tataaccatgcactgtctaaggata

SEQ ID NO: 433414 - DNA, 25 bp, Artificial
  probe
  misc_feature (1)..(25): SEQ ID NO: 6253; WAN024BGH; Start 152; Stop 176
cactgtctaaggatagaagcaaggt

SEQ ID NO: 433415 - DNA, 25 bp, Artificial
  probe
  misc_feature (1)..(25): SEQ ID NO: 6253; WAN024BGH; Start 74; Stop 98
tatatcctcaagcacaaattccacg

SEQ ID NO: 433416 - DNA, 25 bp, Artificial
  probe
  misc_feature (1)..(25): SEQ ID NO: 6253; WAN024BGH; Start 137; Stop 161
aagcctataaccatgcactgtctaa

SEQ ID NO: 433417 - DNA, 25 bp, Artificial
  probe
  misc_feature (1)..(25): SEQ ID NO: 6253; WAN024BGH; Start 176; Stop 200
ttgagaacatccttgccaaagtaaa

SEQ ID NO: 433418 - DNA, 25 bp, Artificial
  probe
  misc_feature (1)..(25): SEQ ID NO: 6253; WAN024BGH; Start 73; Stop 97
atatatcctcaagcacaaattccac

SEQ ID NO: 433419 - DNA, 25 bp, Artificial
  probe
  misc_feature (1)..(25): SEQ ID NO: 6253; WAN024BGH; Start 128; Stop 152
ctgaagataaagcctataaccatgc

SEQ ID NO: 433420 - DNA, 25 bp, Artificial
  probe
  misc_feature (1)..(25): SEQ ID NO: 6253; WAN024BGH; Start 138; Stop 162
agcctataaccatgcactgtctaag

SEQ ID NO: 433421 - DNA, 25 bp, Artificial
  probe
  misc_feature (1)..(25): SEQ ID NO: 6253; WAN024BGH; Start 175; Stop 199
gttgagaacatccttgccaaagtaa

SEQ ID NO: 433422 - DNA, 25 bp, Artificial
  probe
  misc_feature (1)..(25): SEQ ID NO: 6253; WAN024BGH; Start 144; Stop 168
taaccatgcactgtctaaggataga

SEQ ID NO: 433423 - DNA, 25 bp, Artificial
  probe
  misc_feature (1)..(25): SEQ ID NO: 6253; WAN024BGH; Start 321; Stop 345
ctgtccgagtacccactatgatatt

SEQ ID NO: 433424 - DNA, 25 bp, Artificial
  probe
  misc_feature (1)..(25): SEQ ID NO: 6253; WAN024BGH; Start 140; Stop 164
cctataaccatgcactgtctaagga

SEQ ID NO: 433425 - DNA, 25 bp, Artificial
  probe
  misc_feature (1)..(25): SEQ ID NO: 6253; WAN024BGH; Start 145; Stop 169
aaccatgcactgtctaaggatagaa

SEQ ID NO: 433426 - DNA, 25 bp, Artificial
  probe
  misc_feature (1)..(25): SEQ ID NO: 6253; WAN024BGH; Start 151; Stop 175
gcactgtctaaggatagaagcaagg

SEQ ID NO: 433427 - DNA, 25 bp, Artificial
  probe
  misc_feature (1)..(25): SEQ ID NO: 6253; WAN024BGH; Start 320; Stop 344
tctgtccgagtacccactatgatat

SEQ ID NO: 433428 - DNA, 25 bp, Artificial
  probe
  misc_feature (1)..(25): SEQ ID NO: 6253; WAN024BGH; Start 131; Stop 155
aagataaagcctataaccatgcact

SEQ ID NO: 433429 - DNA, 25 bp, Artificial
  probe
  misc_feature (1)..(25): SEQ ID NO: 6253; WAN024BGH; Start 130; Stop 154
gaagataaagcctataaccatgcac

SEQ ID NO: 433430 - DNA, 25 bp, Artificial
  probe
  misc_feature (1)..(25): SEQ ID NO: 6253; WAN024BGH; Start 129; Stop 153
tgaagataaagcctataaccatgca

SEQ ID NO: 433431 - DNA, 25 bp, Artificial
  probe
  misc_feature (1)..(25): SEQ ID NO: 6254; WAN0249PE; Start 13; Stop 37
tatgaataggtgagagttgggattg

SEQ ID NO: 433432 - DNA, 25 bp, Artificial
  probe
  misc_feature (1)..(25): SEQ ID NO: 6254; WAN0249PE; Start 12; Stop 36
gtatgaataggtgagagttgggatt

SEQ ID NO: 433433 - DNA, 25 bp, Artificial
  probe
  misc_feature (1)..(25): SEQ ID NO: 6254; WAN0249PE; Start 9; Stop 33
tttgtatgaataggtgagagttggg

SEQ ID NO: 433434 - DNA, 25 bp, Artificial
  probe
  misc_feature (1)..(25): SEQ ID NO: 6254; WAN0249PE; Start 164; Stop 188
gtcaataaacaatcacttctcacga

SEQ ID NO: 433435 - DNA, 25 bp, Artificial
  probe
  misc_feature (1)..(25): SEQ ID NO: 6254; WAN0249PE; Start 16; Stop 40
gaataggtgagagttgggattgttt

SEQ ID NO: 433436 - DNA, 25 bp, Artificial
  probe
  misc_feature (1)..(25): SEQ ID NO: 6254; WAN0249PE; Start 11; Stop 35
tgtatgaataggtgagagttgggat

SEQ ID NO: 433437 - DNA, 25 bp, Artificial
  probe
  misc_feature (1)..(25): SEQ ID NO: 6254; WAN0249PE; Start 8; Stop 32
ctttgtatgaataggtgagagttgg

SEQ ID NO: 433438 - DNA, 25 bp, Artificial
  probe
  misc_feature (1)..(25): SEQ ID NO: 6254; WAN0249PE; Start 10; Stop 34
ttgtatgaataggtgagagttggga

SEQ ID NO: 433439 - DNA, 25 bp, Artificial
  probe
  misc_feature (1)..(25): SEQ ID NO: 6254; WAN0249PE; Start 165; Stop 189
tcaataaacaatcacttctcacgat

SEQ ID NO: 433440 - DNA, 25 bp, Artificial
  probe
  misc_feature (1)..(25): SEQ ID NO: 6254; WAN0249PE; Start 14; Stop 38
atgaataggtgagagttgggattgt

SEQ ID NO: 433441 - DNA, 25 bp, Artificial
  probe
  misc_feature (1)..(25): SEQ ID NO: 6254; WAN0249PE; Start 15; Stop 39
tgaataggtgagagttgggattgtt

SEQ ID NO: 433442 - DNA, 25 bp, Artificial
  probe
  misc_feature (1)..(25): SEQ ID NO: 6254; WAN0249PE; Start 163; Stop 187
tgtcaataaacaatcacttctcacg

SEQ ID NO: 433443 - DNA, 25 bp, Artificial
  probe
  misc_feature (1)..(25): SEQ ID NO: 6254; WAN0249PE; Start 7; Stop 31
cctttgtatgaataggtgagagttg

SEQ ID NO: 433444 - DNA, 25 bp, Artificial
  probe
  misc_feature (1)..(25): SEQ ID NO: 6254; WAN0249PE; Start 168; Stop 192
ataaacaatcacttctcacgataga

SEQ ID NO: 433445 - DNA, 25 bp, Artificial
  probe
  misc_feature (1)..(25): SEQ ID NO: 6254; WAN0249PE; Start 6; Stop 30
tcctttgtatgaataggtgagagtt

SEQ ID NO: 433446 - DNA, 25 bp, Artificial
  probe
  misc_feature (1)..(25): SEQ ID NO: 6254; WAN0249PE; Start 5; Stop 29
ttcctttgtatgaataggtgagagt

SEQ ID NO: 433447 - DNA, 25 bp, Artificial
  probe
  misc_feature (1)..(25): SEQ ID NO: 6254; WAN0249PE; Start 166; Stop 190
caataaacaatcacttctcacgata

SEQ ID NO: 433448 - DNA, 25 bp, Artificial
  probe
  misc_feature (1)..(25): SEQ ID NO: 6254; WAN0249PE; Start 167; Stop 191
aataaacaatcacttctcacgatag

SEQ ID NO: 433449 - DNA, 25 bp, Artificial
  probe
  misc_feature (1)..(25): SEQ ID NO: 6254; WAN0249PE; Start 59; Stop 83
aaatatcttcaaaccacgtcagctt

SEQ ID NO: 433450 - DNA, 25 bp, Artificial
  probe
  misc_feature (1)..(25): SEQ ID NO: 6254; WAN0249PE; Start 60; Stop 84
aatatcttcaaaccacgtcagcttc

SEQ ID NO: 433451 - DNA, 25 bp, Artificial
  probe
  misc_feature (1)..(25): SEQ ID NO: 6254; WAN0249PE; Start 4; Stop 28
attcctttgtatgaataggtgagag

SEQ ID NO: 433452 - DNA, 25 bp, Artificial
  probe
  misc_feature (1)..(25): SEQ ID NO: 6254; WAN0249PE; Start 17; Stop 41
aataggtgagagttgggattgtttt

SEQ ID NO: 433453 - DNA, 25 bp, Artificial
  probe
  misc_feature (1)..(25): SEQ ID NO: 6254; WAN0249PE; Start 3; Stop 27
aattcctttgtatgaataggtgaga

SEQ ID NO: 433454 - DNA, 25 bp, Artificial
  probe
  misc_feature (1)..(25): SEQ ID NO: 6254; WAN0249PE; Start 169; Stop 193
taaacaatcacttctcacgatagaa

SEQ ID NO: 433455 - DNA, 25 bp, Artificial
  probe
  misc_feature (1)..(25): SEQ ID NO: 6254; WAN0249PE; Start 2; Stop 26
aaattcctttgtatgaataggtgag

SEQ ID NO: 433456 - DNA, 25 bp, Artificial
  probe
  misc_feature (1)..(25): SEQ ID NO: 6254; WAN0249PE; Start 61; Stop 85
atatcttcaaaccacgtcagcttcc

SEQ ID NO: 433457 - DNA, 25 bp, Artificial
  probe
  misc_feature (1)..(25): SEQ ID NO: 6254; WAN0249PE; Start 162; Stop 186
ttgtcaataaacaatcacttctcac

SEQ ID NO: 433458 - DNA, 25 bp, Artificial
  probe
  misc_feature (1)..(25): SEQ ID NO: 6254; WAN0249PE; Start 56; Stop 80
cgaaaatatcttcaaaccacgtcag

SEQ ID NO: 433459 - DNA, 25 bp, Artificial
  probe
  misc_feature (1)..(25): SEQ ID NO: 6254; WAN0249PE; Start 58; Stop 82
aaaatatcttcaaaccacgtcagct

SEQ ID NO: 433460 - DNA, 25 bp, Artificial
  probe
  misc_feature (1)..(25): SEQ ID NO: 6254; WAN0249PE; Start 57; Stop 81
gaaaatatcttcaaaccacgtcagc

SEQ ID NO: 433461 - DNA, 25 bp, Artificial
  probe
  misc_feature (1)..(25): SEQ ID NO: 6254; WAN0249PE; Start 55; Stop 79
tcgaaaatatcttcaaaccacgtca

SEQ ID NO: 433462 - DNA, 25 bp, Artificial
  probe
  misc_feature (1)..(25): SEQ ID NO: 6254; WAN0249PE; Start 204; Stop 228
agattggtgattctcggcctcttag

SEQ ID NO: 433463 - DNA, 25 bp, Artificial
  probe
  misc_feature (1)..(25): SEQ ID NO: 6254; WAN0249PE; Start 161; Stop 185
tttgtcaataaacaatcacttctca

SEQ ID NO: 433464 - DNA, 25 bp, Artificial
  probe
  misc_feature (1)..(25): SEQ ID NO: 6255; WAN0249O2; Start 48; Stop 72
ccctatattataaggcttttcctgt

SEQ ID NO: 433465 - DNA, 25 bp, Artificial
  probe
  misc_feature (1)..(25): SEQ ID NO: 6255; WAN0249O2; Start 57; Stop 81
ataaggcttttcctgttgtatttat

SEQ ID NO: 433466 - DNA, 25 bp, Artificial
  probe
  misc_feature (1)..(25): SEQ ID NO: 6255; WAN0249O2; Start 55; Stop 79
ttataaggcttttcctgttgtattt

SEQ ID NO: 433467 - DNA, 25 bp, Artificial
  probe
  misc_feature (1)..(25): SEQ ID NO: 6255; WAN0249O2; Start 54; Stop 78
attataaggcttttcctgttgtatt

SEQ ID NO: 433468 - DNA, 25 bp, Artificial
  probe
  misc_feature (1)..(25): SEQ ID NO: 6255; WAN0249O2; Start 58; Stop 82
taaggcttttcctgttgtatttata

SEQ ID NO: 433469 - DNA, 25 bp, Artificial
  probe
  misc_feature (1)..(25): SEQ ID NO: 6255; WAN0249O2; Start 56; Stop 80
tataaggcttttcctgttgtattta

SEQ ID NO: 433470 - DNA, 25 bp, Artificial
  probe
  misc_feature (1)..(25): SEQ ID NO: 6255; WAN0249O2; Start 47; Stop 71
gccctatattataaggcttttcctg

SEQ ID NO: 433471 - DNA, 25 bp, Artificial
  probe
  misc_feature (1)..(25): SEQ ID NO: 6255; WAN0249O2; Start 49; Stop 73
cctatattataaggcttttcctgtt

SEQ ID NO: 433472 - DNA, 25 bp, Artificial
  probe
  misc_feature (1)..(25): SEQ ID NO: 6255; WAN0249O2; Start 53; Stop 77
tattataaggcttttcctgttgtat

SEQ ID NO: 433473 - DNA, 25 bp, Artificial
  probe
  misc_feature (1)..(25): SEQ ID NO: 6255; WAN0249O2; Start 52; Stop 76
atattataaggcttttcctgttgta

SEQ ID NO: 433474 - DNA, 25 bp, Artificial
  probe
  misc_feature (1)..(25): SEQ ID NO: 6255; WAN0249O2; Start 51; Stop 75
tatattataaggcttttcctgttgt

SEQ ID NO: 433475 - DNA, 25 bp, Artificial
  probe
  misc_feature (1)..(25): SEQ ID NO: 6255; WAN0249O2; Start 50; Stop 74
ctatattataaggcttttcctgttg

SEQ ID NO: 433476 - DNA, 25 bp, Artificial
  probe
  misc_feature (1)..(25): SEQ ID NO: 6256; WAN024ARQ; Start 46; Stop 70
ctgatttatactcatttgcgtgtct

SEQ ID NO: 433477 - DNA, 25 bp, Artificial
  probe
  misc_feature (1)..(25): SEQ ID NO: 6256; WAN024ARQ; Start 48; Stop 72
gatttatactcatttgcgtgtcttt

SEQ ID NO: 433478 - DNA, 25 bp, Artificial
  probe
  misc_feature (1)..(25): SEQ ID NO: 6256; WAN024ARQ; Start 47; Stop 71
tgatttatactcatttgcgtgtctt

SEQ ID NO: 433479 - DNA, 25 bp, Artificial
  probe
  misc_feature (1)..(25): SEQ ID NO: 6256; WAN024ARQ; Start 45; Stop 69
gctgatttatactcatttgcgtgtc

SEQ ID NO: 433480 - DNA, 25 bp, Artificial
  probe
  misc_feature (1)..(25): SEQ ID NO: 6256; WAN024ARQ; Start 43; Stop 67
tagctgatttatactcatttgcgtg

SEQ ID NO: 433481 - DNA, 25 bp, Artificial
  probe
  misc_feature (1)..(25): SEQ ID NO: 6256; WAN024ARQ; Start 50; Stop 74
tttatactcatttgcgtgtctttat

SEQ ID NO: 433482 - DNA, 25 bp, Artificial
  probe
  misc_feature (1)..(25): SEQ ID NO: 6256; WAN024ARQ; Start 49; Stop 73
atttatactcatttgcgtgtcttta

SEQ ID NO: 433483 - DNA, 25 bp, Artificial
  probe
  misc_feature (1)..(25): SEQ ID NO: 6256; WAN024ARQ; Start 44; Stop 68
agctgatttatactcatttgcgtgt

SEQ ID NO: 433484 - DNA, 25 bp, Artificial
  probe
  misc_feature (1)..(25): SEQ ID NO: 6256; WAN024ARQ; Start 42; Stop 66
ttagctgatttatactcatttgcgt

SEQ ID NO: 433485 - DNA, 25 bp, Artificial
  probe
  misc_feature (1)..(25): SEQ ID NO: 6256; WAN024ARQ; Start 41; Stop 65
attagctgatttatactcatttgcg

SEQ ID NO: 433486 - DNA, 25 bp, Artificial
  probe
  misc_feature (1)..(25): SEQ ID NO: 6256; WAN024ARQ; Start 51; Stop 75
ttatactcatttgcgtgtctttata

SEQ ID NO: 433487 - DNA, 25 bp, Artificial
  probe
  misc_feature (1)..(25): SEQ ID NO: 6256; WAN024ARQ; Start 52; Stop 76
tatactcatttgcgtgtctttataa

SEQ ID NO: 433488 - DNA, 25 bp, Artificial
  probe
  misc_feature (1)..(25): SEQ ID NO: 6256; WAN024ARQ; Start 40; Stop 64
aattagctgatttatactcatttgc

SEQ ID NO: 433489 - DNA, 25 bp, Artificial
  probe
  misc_feature (1)..(25): SEQ ID NO: 6256; WAN024ARQ; Start 53; Stop 77
atactcatttgcgtgtctttataaa

SEQ ID NO: 433490 - DNA, 25 bp, Artificial
  probe
  misc_feature (1)..(25): SEQ ID NO: 6256; WAN024ARQ; Start 54; Stop 78
tactcatttgcgtgtctttataaaa

SEQ ID NO: 433491 - DNA, 25 bp, Artificial
  probe
  misc_feature (1)..(25): SEQ ID NO: 6259; WAN024FEB-5; Start 395; Stop 419
catctgaggaaatatcggacaatct

SEQ ID NO: 433492 - DNA, 25 bp, Artificial
  probe
  misc_feature (1)..(25): SEQ ID NO: 6259; WAN024FEB-5; Start 394; Stop 418
tcatctgaggaaatatcggacaatc

SEQ ID NO: 433493 - DNA, 25 bp, Artificial
  probe
  misc_feature (1)..(25): SEQ ID NO: 6259; WAN024FEB-5; Start 352; Stop 376
gtcattgcttctatcgagagtgatt

SEQ ID NO: 433494 - DNA, 25 bp, Artificial
  probe
  misc_feature (1)..(25): SEQ ID NO: 6259; WAN024FEB-5; Start 191; Stop 215
tctttattctaggctttatcggtgg

SEQ ID NO: 433495 - DNA, 25 bp, Artificial
  probe
  misc_feature (1)..(25): SEQ ID NO: 6259; WAN024FEB-5; Start 238; Stop 262
cttggttatggagttgctttgtttg

SEQ ID NO: 433496 - DNA, 25 bp, Artificial
  probe
  misc_feature (1)..(25): SEQ ID NO: 6259; WAN024FEB-5; Start 237; Stop 261
tcttggttatggagttgctttgttt

SEQ ID NO: 433497 - DNA, 25 bp, Artificial
  probe
  misc_feature (1)..(25): SEQ ID NO: 6259; WAN024FEB-5; Start 239; Stop 263
ttggttatggagttgctttgtttga

SEQ ID NO: 433498 - DNA, 25 bp, Artificial
  probe
  misc_feature (1)..(25): SEQ ID NO: 6259; WAN024FEB-5; Start 136; Stop 160
attctgtctattctagggagcattt

SEQ ID NO: 433499 - DNA, 25 bp, Artificial
  probe
  misc_feature (1)..(25): SEQ ID NO: 6259; WAN024FEB-5; Start 135; Stop 159
aattctgtctattctagggagcatt

SEQ ID NO: 433500 - DNA, 25 bp, Artificial
  probe
  misc_feature (1)..(25): SEQ ID NO: 6259; WAN024FEB-5; Start 190; Stop 214
ctctttattctaggctttatcggtg

SEQ ID NO: 433501 - DNA, 25 bp, Artificial
  probe
  misc_feature (1)..(25): SEQ ID NO: 6259; WAN024FEB-5; Start 189; Stop 213
tctctttattctaggctttatcggt

SEQ ID NO: 433502 - DNA, 25 bp, Artificial
  probe
  misc_feature (1)..(25): SEQ ID NO: 6259; WAN024FEB-5; Start 192; Stop 216
ctttattctaggctttatcggtggg

SEQ ID NO: 433503 - DNA, 25 bp, Artificial
  probe
  misc_feature (1)..(25): SEQ ID NO: 6259; WAN024FEB-5; Start 396; Stop 420
atctgaggaaatatcggacaatctc

SEQ ID NO: 433504 - DNA, 25 bp, Artificial
  probe
  misc_feature (1)..(25): SEQ ID NO: 6259; WAN024FEB-5; Start 351; Stop 375
tgtcattgcttctatcgagagtgat

SEQ ID NO: 433505 - DNA, 25 bp, Artificial
  probe
  misc_feature (1)..(25): SEQ ID NO: 6259; WAN024FEB-5; Start 188; Stop 212
ctctctttattctaggctttatcgg

SEQ ID NO: 433506 - DNA, 25 bp, Artificial
  probe
  misc_feature (1)..(25): SEQ ID NO: 6259; WAN024FEB-5; Start 348; Stop 372
gagtgtcattgcttctatcgagagt

SEQ ID NO: 433507 - DNA, 25 bp, Artificial
  probe
  misc_feature (1)..(25): SEQ ID NO: 6259; WAN024FEB-5; Start 240; Stop 264
tggttatggagttgctttgtttgac

SEQ ID NO: 433508 - DNA, 25 bp, Artificial
  probe
  misc_feature (1)..(25): SEQ ID NO: 6259; WAN024FEB-5; Start 349; Stop 373
agtgtcattgcttctatcgagagtg

SEQ ID NO: 433509 - DNA, 25 bp, Artificial
  probe
  misc_feature (1)..(25): SEQ ID NO: 6259; WAN024FEB-5; Start 187; Stop 211
actctctttattctaggctttatcg

SEQ ID NO: 433510 - DNA, 25 bp, Artificial
  probe
  misc_feature (1)..(25): SEQ ID NO: 6259; WAN024FEB-5; Start 342; Stop 366
agatgggagtgtcattgcttctatc

SEQ ID NO: 433511 - DNA, 25 bp, Artificial
  probe
  misc_feature (1)..(25): SEQ ID NO: 6259; WAN024FEB-5; Start 236; Stop 260
ctcttggttatggagttgctttgtt

SEQ ID NO: 433512 - DNA, 25 bp, Artificial
  probe
  misc_feature (1)..(25): SEQ ID NO: 6259; WAN024FEB-5; Start 393; Stop 417
ctcatctgaggaaatatcggacaat

SEQ ID NO: 433513 - DNA, 25 bp, Artificial
  probe
  misc_feature (1)..(25): SEQ ID NO: 6259; WAN024FEB-5; Start 350; Stop 374
gtgtcattgcttctatcgagagtga

SEQ ID NO: 433514 - DNA, 25 bp, Artificial
  probe
  misc_feature (1)..(25): SEQ ID NO: 6259; WAN024FEB-5; Start 390; Stop 414
gatctcatctgaggaaatatcggac

SEQ ID NO: 433515 - DNA, 25 bp, Artificial
  probe
  misc_feature (1)..(25): SEQ ID NO: 6259; WAN024FEB-5; Start 341; Stop 365
cagatgggagtgtcattgcttctat

SEQ ID NO: 433516 - DNA, 25 bp, Artificial
  probe
  misc_feature (1)..(25): SEQ ID NO: 6259; WAN024FEB-5; Start 391; Stop 415
atctcatctgaggaaatatcggaca

SEQ ID NO: 433517 - DNA, 25 bp, Artificial
  probe
  misc_feature (1)..(25): SEQ ID NO: 6259; WAN024FEB-5; Start 347; Stop 371
ggagtgtcattgcttctatcgagag

SEQ ID NO: 433518 - DNA, 25 bp, Artificial
  probe
  misc_feature (1)..(25): SEQ ID NO: 6259; WAN024FEB-5; Start 392; Stop 416
tctcatctgaggaaatatcggacaa

SEQ ID NO: 433519 - DNA, 25 bp, Artificial
  probe
  misc_feature (1)..(25): SEQ ID NO: 6259; WAN024FEB-5; Start 229; Stop 253
ggtctagctcttggttatggagttg

SEQ ID NO: 433520 - DNA, 25 bp, Artificial
  probe
  misc_feature (1)..(25): SEQ ID NO: 6259; WAN024FEB-5; Start 326; Stop 350
cagaaattgtttatgcagatgggag

SEQ ID NO: 433521 - DNA, 25 bp, Artificial
  probe
  misc_feature (1)..(25): SEQ ID NO: 6259; WAN024FEB-5; Start 324; Stop 348
ctcagaaattgtttatgcagatggg

SEQ ID NO: 433522 - DNA, 25 bp, Artificial
  probe
  misc_feature (1)..(25): SEQ ID NO: 6259; WAN024FEB-5; Start 241; Stop 265
ggttatggagttgctttgtttgaca

SEQ ID NO: 433523 - DNA, 25 bp, Artificial
  probe
  misc_feature (1)..(25): SEQ ID NO: 6259; WAN024FEB-5; Start 367; Stop 391
gagagtgatttactgagaacttcga

SEQ ID NO: 433524 - DNA, 25 bp, Artificial
  probe
  misc_feature (1)..(25): SEQ ID NO: 6260; WAN0249PC; Start 223; Stop 247
catcttgtaatgagttaagcaacat

SEQ ID NO: 433525 - DNA, 25 bp, Artificial
  probe
  misc_feature (1)..(25): SEQ ID NO: 6260; WAN0249PC; Start 228; Stop 252
tgtaatgagttaagcaacattcttg

SEQ ID NO: 433526 - DNA, 25 bp, Artificial
  probe
  misc_feature (1)..(25): SEQ ID NO: 6260; WAN0249PC; Start 222; Stop 246
tcatcttgtaatgagttaagcaaca

SEQ ID NO: 433527 - DNA, 25 bp, Artificial
  probe
  misc_feature (1)..(25): SEQ ID NO: 6260; WAN0249PC; Start 226; Stop 250
cttgtaatgagttaagcaacattct

SEQ ID NO: 433528 - DNA, 25 bp, Artificial
  probe
  misc_feature (1)..(25): SEQ ID NO: 6260; WAN0249PC; Start 225; Stop 249
tcttgtaatgagttaagcaacattc

SEQ ID NO: 433529 - DNA, 25 bp, Artificial
  probe
  misc_feature (1)..(25): SEQ ID NO: 6260; WAN0249PC; Start 227; Stop 251
ttgtaatgagttaagcaacattctt

SEQ ID NO: 433530 - DNA, 25 bp, Artificial
  probe
  misc_feature (1)..(25): SEQ ID NO: 6260; WAN0249PC; Start 117; Stop 141
tttatctgaaacttcaaagctgtgc

SEQ ID NO: 433531 - DNA, 25 bp, Artificial
  probe
  misc_feature (1)..(25): SEQ ID NO: 6260; WAN0249PC; Start 221; Stop 245
atcatcttgtaatgagttaagcaac

SEQ ID NO: 433532 - DNA, 25 bp, Artificial
  probe
  misc_feature (1)..(25): SEQ ID NO: 6260; WAN0249PC; Start 224; Stop 248
atcttgtaatgagttaagcaacatt

SEQ ID NO: 433533 - DNA, 25 bp, Artificial
  probe
  misc_feature (1)..(25): SEQ ID NO: 6260; WAN0249PC; Start 118; Stop 142
ttatctgaaacttcaaagctgtgct

SEQ ID NO: 433534 - DNA, 25 bp, Artificial
  probe
  misc_feature (1)..(25): SEQ ID NO: 6260; WAN0249PC; Start 28; Stop 52
gaatgagatctagctttcgtgatgg

SEQ ID NO: 433535 - DNA, 25 bp, Artificial
  probe
  misc_feature (1)..(25): SEQ ID NO: 6260; WAN0249PC; Start 29; Stop 53
aatgagatctagctttcgtgatgga

SEQ ID NO: 433536 - DNA, 25 bp, Artificial
  probe
  misc_feature (1)..(25): SEQ ID NO: 6260; WAN0249PC; Start 30; Stop 54
atgagatctagctttcgtgatggaa

SEQ ID NO: 433537 - DNA, 25 bp, Artificial
  probe
  misc_feature (1)..(25): SEQ ID NO: 6260; WAN0249PC; Start 206; Stop 230
ggaaaatggaaagttatcatcttgt

SEQ ID NO: 433538 - DNA, 25 bp, Artificial
  probe
  misc_feature (1)..(25): SEQ ID NO: 6260; WAN0249PC; Start 205; Stop 229
tggaaaatggaaagttatcatcttg

SEQ ID NO: 433539 - DNA, 25 bp, Artificial
  probe
  misc_feature (1)..(25): SEQ ID NO: 6260; WAN0249PC; Start 220; Stop 244
tatcatcttgtaatgagttaagcaa

SEQ ID NO: 433540 - DNA, 25 bp, Artificial
  probe
  misc_feature (1)..(25): SEQ ID NO: 6260; WAN0249PC; Start 219; Stop 243
ttatcatcttgtaatgagttaagca

SEQ ID NO: 433541 - DNA, 25 bp, Artificial
  probe
  misc_feature (1)..(25): SEQ ID NO: 6260; WAN0249PC; Start 218; Stop 242
gttatcatcttgtaatgagttaagc

SEQ ID NO: 433542 - DNA, 25 bp, Artificial
  probe
  misc_feature (1)..(25): SEQ ID NO: 6260; WAN0249PC; Start 210; Stop 234
aatggaaagttatcatcttgtaatg

SEQ ID NO: 433543 - DNA, 25 bp, Artificial
  probe
  misc_feature (1)..(25): SEQ ID NO: 6260; WAN0249PC; Start 200; Stop 224
ttgaatggaaaatggaaagttatca

SEQ ID NO: 433544 - DNA, 25 bp, Artificial
  probe
  misc_feature (1)..(25): SEQ ID NO: 6260; WAN0249PC; Start 213; Stop 237
ggaaagttatcatcttgtaatgagt

SEQ ID NO: 433545 - DNA, 25 bp, Artificial
  probe
  misc_feature (1)..(25): SEQ ID NO: 6260; WAN0249PC; Start 212; Stop 236
tggaaagttatcatcttgtaatgag

SEQ ID NO: 433546 - DNA, 25 bp, Artificial
  probe
  misc_feature (1)..(25): SEQ ID NO: 6260; WAN0249PC; Start 116; Stop 140
ttttatctgaaacttcaaagctgtg

SEQ ID NO: 433547 - DNA, 25 bp, Artificial
  probe
  misc_feature (1)..(25): SEQ ID NO: 6260; WAN0249PC; Start 201; Stop 225
tgaatggaaaatggaaagttatcat

SEQ ID NO: 433548 - DNA, 25 bp, Artificial
  probe
  misc_feature (1)..(25): SEQ ID NO: 6260; WAN0249PC; Start 204; Stop 228
atggaaaatggaaagttatcatctt

SEQ ID NO: 433549 - DNA, 25 bp, Artificial
  probe
  misc_feature (1)..(25): SEQ ID NO: 6260; WAN0249PC; Start 203; Stop 227
aatggaaaatggaaagttatcatct

SEQ ID NO: 433550 - DNA, 25 bp, Artificial
  probe
  misc_feature (1)..(25): SEQ ID NO: 6260; WAN0249PC; Start 202; Stop 226
gaatggaaaatggaaagttatcatc

SEQ ID NO: 433551 - DNA, 25 bp, Artificial
  probe
  misc_feature (1)..(25): SEQ ID NO: 6260; WAN0249PC; Start 5; Stop 29
cgacttgataacatcattttgacga

SEQ ID NO: 433552 - DNA, 25 bp, Artificial
  probe
  misc_feature (1)..(25): SEQ ID NO: 6260; WAN0249PC; Start 1; Stop 25
aacccgacttgataacatcattttg

SEQ ID NO: 433553 - DNA, 25 bp, Artificial
  probe
  misc_feature (1)..(25): SEQ ID NO: 6260; WAN0249PC; Start 3; Stop 27
cccgacttgataacatcattttgac

SEQ ID NO: 433554 - DNA, 25 bp, Artificial
  probe
  misc_feature (1)..(25): SEQ ID NO: 6260; WAN0249PC; Start 2; Stop 26
acccgacttgataacatcattttga

SEQ ID NO: 433555 - DNA, 25 bp, Artificial
  probe
  misc_feature (1)..(25): SEQ ID NO: 6260; WAN0249PC; Start 4; Stop 28
ccgacttgataacatcattttgacg

SEQ ID NO: 433556 - DNA, 25 bp, Artificial
  probe
  misc_feature (1)..(25): SEQ ID NO: 6260; WAN0249PC; Start 199; Stop 223
tttgaatggaaaatggaaagttatc

SEQ ID NO: 433557 - DNA, 25 bp, Artificial
  probe
  misc_feature (1)..(25): SEQ ID NO: 6261; WAN024ALQ; Start 349; Stop 373
aacaactggtatgcctactagaatt

SEQ ID NO: 433558 - DNA, 25 bp, Artificial
  probe
  misc_feature (1)..(25): SEQ ID NO: 6261; WAN024ALQ; Start 61; Stop 85
ccctatggatattatggagcctatt

SEQ ID NO: 433559 - DNA, 25 bp, Artificial
  probe
  misc_feature (1)..(25): SEQ ID NO: 6261; WAN024ALQ; Start 348; Stop 372
aaacaactggtatgcctactagaat

SEQ ID NO: 433560 - DNA, 25 bp, Artificial
  probe
  misc_feature (1)..(25): SEQ ID NO: 6261; WAN024ALQ; Start 347; Stop 371
gaaacaactggtatgcctactagaa

SEQ ID NO: 433561 - DNA, 25 bp, Artificial
  probe
  misc_feature (1)..(25): SEQ ID NO: 6261; WAN024ALQ; Start 389; Stop 413
cgtttcaagtgctatcattgttcta

SEQ ID NO: 433562 - DNA, 25 bp, Artificial
  probe
  misc_feature (1)..(25): SEQ ID NO: 6261; WAN024ALQ; Start 388; Stop 412
tcgtttcaagtgctatcattgttct

SEQ ID NO: 433563 - DNA, 25 bp, Artificial
  probe
  misc_feature (1)..(25): SEQ ID NO: 6261; WAN024ALQ; Start 387; Stop 411
gtcgtttcaagtgctatcattgttc

SEQ ID NO: 433564 - DNA, 25 bp, Artificial
  probe
  misc_feature (1)..(25): SEQ ID NO: 6261; WAN024ALQ; Start 806; Stop 830
ctatgtttagcccttactatgactt

SEQ ID NO: 433565 - DNA, 25 bp, Artificial
  probe
  misc_feature (1)..(25): SEQ ID NO: 6261; WAN024ALQ; Start 31; Stop 55
cggctctataatatttgtagtgggt

SEQ ID NO: 433566 - DNA, 25 bp, Artificial
  probe
  misc_feature (1)..(25): SEQ ID NO: 6261; WAN024ALQ; Start 30; Stop 54
tcggctctataatatttgtagtggg

SEQ ID NO: 433567 - DNA, 25 bp, Artificial
  probe
  misc_feature (1)..(25): SEQ ID NO: 6261; WAN024ALQ; Start 215; Stop 239
ctagacatcatcaatatggataccc

SEQ ID NO: 433568 - DNA, 25 bp, Artificial
  probe
  misc_feature (1)..(25): SEQ ID NO: 6261; WAN024ALQ; Start 346; Stop 370
cgaaacaactggtatgcctactaga

SEQ ID NO: 433569 - DNA, 25 bp, Artificial
  probe
  misc_feature (1)..(25): SEQ ID NO: 6261; WAN024ALQ; Start 719; Stop 743
ttgaaggtagaacacaagctgtcat

SEQ ID NO: 433570 - DNA, 25 bp, Artificial
  probe
  misc_feature (1)..(25): SEQ ID NO: 6261; WAN024ALQ; Start 390; Stop 414
gtttcaagtgctatcattgttctaa

SEQ ID NO: 433571 - DNA, 25 bp, Artificial
  probe
  misc_feature (1)..(25): SEQ ID NO: 6261; WAN024ALQ; Start 62; Stop 86
cctatggatattatggagcctattt

SEQ ID NO: 433572 - DNA, 25 bp, Artificial
  probe
  misc_feature (1)..(25): SEQ ID NO: 6261; WAN024ALQ; Start 217; Stop 241
agacatcatcaatatggatacccac

SEQ ID NO: 433573 - DNA, 25 bp, Artificial
  probe
  misc_feature (1)..(25): SEQ ID NO: 6261; WAN024ALQ; Start 219; Stop 243
acatcatcaatatggatacccacaa

SEQ ID NO: 433574 - DNA, 25 bp, Artificial
  probe
  misc_feature (1)..(25): SEQ ID NO: 6261; WAN024ALQ; Start 218; Stop 242
gacatcatcaatatggatacccaca

SEQ ID NO: 433575 - DNA, 25 bp, Artificial
  probe
  misc_feature (1)..(25): SEQ ID NO: 6261; WAN024ALQ; Start 386; Stop 410
cgtcgtttcaagtgctatcattgtt

SEQ ID NO: 433576 - DNA, 25 bp, Artificial
  probe
  misc_feature (1)..(25): SEQ ID NO: 6261; WAN024ALQ; Start 29; Stop 53
ttcggctctataatatttgtagtgg

SEQ ID NO: 433577 - DNA, 25 bp, Artificial
  probe
  misc_feature (1)..(25): SEQ ID NO: 6261; WAN024ALQ; Start 220; Stop 244
catcatcaatatggatacccacaaa

SEQ ID NO: 433578 - DNA, 25 bp, Artificial
  probe
  misc_feature (1)..(25): SEQ ID NO: 6261; WAN024ALQ; Start 720; Stop 744
tgaaggtagaacacaagctgtcatc

SEQ ID NO: 433579 - DNA, 25 bp, Artificial
  probe
  misc_feature (1)..(25): SEQ ID NO: 6261; WAN024ALQ; Start 216; Stop 240
tagacatcatcaatatggataccca

SEQ ID NO: 433580 - DNA, 25 bp, Artificial
  probe
  misc_feature (1)..(25): SEQ ID NO: 6261; WAN024ALQ; Start 204; Stop 228
acatcaagattctagacatcatcaa

SEQ ID NO: 433581 - DNA, 25 bp, Artificial
  probe
  misc_feature (1)..(25): SEQ ID NO: 6261; WAN024ALQ; Start 203; Stop 227
aacatcaagattctagacatcatca

SEQ ID NO: 433582 - DNA, 25 bp, Artificial
  probe
  misc_feature (1)..(25): SEQ ID NO: 6261; WAN024ALQ; Start 391; Stop 415
tttcaagtgctatcattgttctaaa

SEQ ID NO: 433583 - DNA, 25 bp, Artificial
  probe
  misc_feature (1)..(25): SEQ ID NO: 6261; WAN024ALQ; Start 345; Stop 369
tcgaaacaactggtatgcctactag

SEQ ID NO: 433584 - DNA, 25 bp, Artificial
  probe
  misc_feature (1)..(25): SEQ ID NO: 6261; WAN024ALQ; Start 344; Stop 368
ctcgaaacaactggtatgcctacta

SEQ ID NO: 433585 - DNA, 25 bp, Artificial
  probe
  misc_feature (1)..(25): SEQ ID NO: 6261; WAN024ALQ; Start 125; Stop 149
gcgacaaaacaactcattagaaaga

SEQ ID NO: 433586 - DNA, 25 bp, Artificial
  probe
  misc_feature (1)..(25): SEQ ID NO: 6261; WAN024ALQ; Start 124; Stop 148
agcgacaaaacaactcattagaaag

SEQ ID NO: 433587 - DNA, 25 bp, Artificial
  probe
  misc_feature (1)..(25): SEQ ID NO: 6261; WAN024ALQ; Start 123; Stop 147
aagcgacaaaacaactcattagaaa

SEQ ID NO: 433588 - DNA, 25 bp, Artificial
  probe
  misc_feature (1)..(25): SEQ ID NO: 6261; WAN024ALQ; Start 122; Stop 146
aaagcgacaaaacaactcattagaa

SEQ ID NO: 433589 - DNA, 25 bp, Artificial
  probe
  misc_feature (1)..(25): SEQ ID NO: 6261; WAN024ALQ; Start 121; Stop 145
aaaagcgacaaaacaactcattaga

SEQ ID NO: 433590 - DNA, 25 bp, Artificial
  probe
  misc_feature (1)..(25): SEQ ID NO: 6262; WAN024A3O; Start 38; Stop 62
cttgagaggacagataagagtaaca

SEQ ID NO: 433591 - DNA, 25 bp, Artificial
  probe
  misc_feature (1)..(25): SEQ ID NO: 6262; WAN024A3O; Start 156; Stop 180
gagtcaacgcaatctatggcaatat

SEQ ID NO: 433592 - DNA, 25 bp, Artificial
  probe
  misc_feature (1)..(25): SEQ ID NO: 6262; WAN024A3O; Start 39; Stop 63
ttgagaggacagataagagtaacaa

SEQ ID NO: 433593 - DNA, 25 bp, Artificial
  probe
  misc_feature (1)..(25): SEQ ID NO: 6262; WAN024A3O; Start 157; Stop 181
agtcaacgcaatctatggcaatatt

SEQ ID NO: 433594 - DNA, 25 bp, Artificial
  probe
  misc_feature (1)..(25): SEQ ID NO: 6262; WAN024A3O; Start 155; Stop 179
agagtcaacgcaatctatggcaata

SEQ ID NO: 433595 - DNA, 25 bp, Artificial
  probe
  misc_feature (1)..(25): SEQ ID NO: 6262; WAN024A3O; Start 100; Stop 124
caaacagcgaagaaagtataggaag

SEQ ID NO: 433596 - DNA, 25 bp, Artificial
  probe
  misc_feature (1)..(25): SEQ ID NO: 6262; WAN024A3O; Start 27; Stop 51
cataatagtctcttgagaggacaga

SEQ ID NO: 433597 - DNA, 25 bp, Artificial
  probe
  misc_feature (1)..(25): SEQ ID NO: 6262; WAN024A3O; Start 26; Stop 50
tcataatagtctcttgagaggacag

SEQ ID NO: 433598 - DNA, 25 bp, Artificial
  probe
  misc_feature (1)..(25): SEQ ID NO: 6262; WAN024A3O; Start 98; Stop 122
tacaaacagcgaagaaagtatagga

SEQ ID NO: 433599 - DNA, 25 bp, Artificial
  probe
  misc_feature (1)..(25): SEQ ID NO: 6262; WAN024A3O; Start 99; Stop 123
acaaacagcgaagaaagtataggaa

SEQ ID NO: 433600 - DNA, 25 bp, Artificial
  probe
  misc_feature (1)..(25): SEQ ID NO: 6262; WAN024A3O; Start 93; Stop 117
tgatttacaaacagcgaagaaagta

SEQ ID NO: 433601 - DNA, 25 bp, Artificial
  probe
  misc_feature (1)..(25): SEQ ID NO: 6262; WAN024A3O; Start 31; Stop 55
atagtctcttgagaggacagataag

SEQ ID NO: 433602 - DNA, 25 bp, Artificial
  probe
  misc_feature (1)..(25): SEQ ID NO: 6262; WAN024A3O; Start 97; Stop 121
ttacaaacagcgaagaaagtatagg

SEQ ID NO: 433603 - DNA, 25 bp, Artificial
  probe
  misc_feature (1)..(25): SEQ ID NO: 6262; WAN024A3O; Start 40; Stop 64
tgagaggacagataagagtaacaaa

SEQ ID NO: 433604 - DNA, 25 bp, Artificial
  probe
  misc_feature (1)..(25): SEQ ID NO: 6262; WAN024A3O; Start 92; Stop 116
ttgatttacaaacagcgaagaaagt

SEQ ID NO: 433605 - DNA, 25 bp, Artificial
  probe
  misc_feature (1)..(25): SEQ ID NO: 6262; WAN024A3O; Start 101; Stop 125
aaacagcgaagaaagtataggaagc

SEQ ID NO: 433606 - DNA, 25 bp, Artificial
  probe
  misc_feature (1)..(25): SEQ ID NO: 6262; WAN024A3O; Start 30; Stop 54
aatagtctcttgagaggacagataa

SEQ ID NO: 433607 - DNA, 25 bp, Artificial
  probe
  misc_feature (1)..(25): SEQ ID NO: 6262; WAN024A3O; Start 148; Stop 172
aatttggagagtcaacgcaatctat

SEQ ID NO: 433608 - DNA, 25 bp, Artificial
  probe
  misc_feature (1)..(25): SEQ ID NO: 6262; WAN024A3O; Start 140; Stop 164
gatgaatcaatttggagagtcaacg

SEQ ID NO: 433609 - DNA, 25 bp, Artificial
  probe
  misc_feature (1)..(25): SEQ ID NO: 6262; WAN024A3O; Start 139; Stop 163
agatgaatcaatttggagagtcaac

SEQ ID NO: 433610 - DNA, 25 bp, Artificial
  probe
  misc_feature (1)..(25): SEQ ID NO: 6262; WAN024A3O; Start 28; Stop 52
ataatagtctcttgagaggacagat

SEQ ID NO: 433611 - DNA, 25 bp, Artificial
  probe
  misc_feature (1)..(25): SEQ ID NO: 6262; WAN024A3O; Start 37; Stop 61
tcttgagaggacagataagagtaac

SEQ ID NO: 433612 - DNA, 25 bp, Artificial
  probe
  misc_feature (1)..(25): SEQ ID NO: 6262; WAN024A3O; Start 94; Stop 118
gatttacaaacagcgaagaaagtat

SEQ ID NO: 433613 - DNA, 25 bp, Artificial
  probe
  misc_feature (1)..(25): SEQ ID NO: 6262; WAN024A3O; Start 149; Stop 173
atttggagagtcaacgcaatctatg

SEQ ID NO: 433614 - DNA, 25 bp, Artificial
  probe
  misc_feature (1)..(25): SEQ ID NO: 6262; WAN024A3O; Start 32; Stop 56
tagtctcttgagaggacagataaga

SEQ ID NO: 433615 - DNA, 25 bp, Artificial
  probe
  misc_feature (1)..(25): SEQ ID NO: 6262; WAN024A3O; Start 147; Stop 171
caatttggagagtcaacgcaatcta

SEQ ID NO: 433616 - DNA, 25 bp, Artificial
  probe
  misc_feature (1)..(25): SEQ ID NO: 6262; WAN024A3O; Start 41; Stop 65
gagaggacagataagagtaacaaat

SEQ ID NO: 433617 - DNA, 25 bp, Artificial
  probe
  misc_feature (1)..(25): SEQ ID NO: 6262; WAN024A3O; Start 158; Stop 182
gtcaacgcaatctatggcaatattt

SEQ ID NO: 433618 - DNA, 25 bp, Artificial
  probe
  misc_feature (1)..(25): SEQ ID NO: 6262; WAN024A3O; Start 154; Stop 178
gagagtcaacgcaatctatggcaat

SEQ ID NO: 433619 - DNA, 25 bp, Artificial
  probe
  misc_feature (1)..(25): SEQ ID NO: 6262; WAN024A3O; Start 144; Stop 168
aatcaatttggagagtcaacgcaat

SEQ ID NO: 433620 - DNA, 25 bp, Artificial
  probe
  misc_feature (1)..(25): SEQ ID NO: 6262; WAN024A3O; Start 49; Stop 73
agataagagtaacaaatatggtgct

SEQ ID NO: 433621 - DNA, 25 bp, Artificial
  probe
  misc_feature (1)..(25): SEQ ID NO: 6262; WAN024A3O; Start 48; Stop 72
cagataagagtaacaaatatggtgc

SEQ ID NO: 433622 - DNA, 25 bp, Artificial
  probe
  misc_feature (1)..(25): SEQ ID NO: 6262; WAN024A3O; Start 29; Stop 53
taatagtctcttgagaggacagata

SEQ ID NO: 433623 - DNA, 25 bp, Artificial
  probe
  misc_feature (1)..(25): SEQ ID NO: 6263; WAN024A3P; Start 22; Stop 46
taactcataatagtctcttgcgagg

SEQ ID NO: 433624 - DNA, 25 bp, Artificial
  probe
  misc_feature (1)..(25): SEQ ID NO: 6263; WAN024A3P; Start 23; Stop 47
aactcataatagtctcttgcgagga

SEQ ID NO: 433625 - DNA, 25 bp, Artificial
  probe
  misc_feature (1)..(25): SEQ ID NO: 6263; WAN024A3P; Start 29; Stop 53
taatagtctcttgcgaggacagata

SEQ ID NO: 433626 - DNA, 25 bp, Artificial
  probe
  misc_feature (1)..(25): SEQ ID NO: 6263; WAN024A3P; Start 28; Stop 52
ataatagtctcttgcgaggacagat

SEQ ID NO: 433627 - DNA, 25 bp, Artificial
  probe
  misc_feature (1)..(25): SEQ ID NO: 6263; WAN024A3P; Start 30; Stop 54
aatagtctcttgcgaggacagataa

SEQ ID NO: 433628 - DNA, 25 bp, Artificial
  probe
  misc_feature (1)..(25): SEQ ID NO: 6263; WAN024A3P; Start 31; Stop 55
atagtctcttgcgaggacagataag

SEQ ID NO: 433629 - DNA, 25 bp, Artificial
  probe
  misc_feature (1)..(25): SEQ ID NO: 6263; WAN024A3P; Start 21; Stop 45
ataactcataatagtctcttgcgag

SEQ ID NO: 433630 - DNA, 25 bp, Artificial
  probe
  misc_feature (1)..(25): SEQ ID NO: 6263; WAN024A3P; Start 27; Stop 51
cataatagtctcttgcgaggacaga

SEQ ID NO: 433631 - DNA, 25 bp, Artificial
  probe
  misc_feature (1)..(25): SEQ ID NO: 6263; WAN024A3P; Start 26; Stop 50
tcataatagtctcttgcgaggacag

SEQ ID NO: 433632 - DNA, 25 bp, Artificial
  probe
  misc_feature (1)..(25): SEQ ID NO: 6263; WAN024A3P; Start 25; Stop 49
ctcataatagtctcttgcgaggaca

SEQ ID NO: 433633 - DNA, 25 bp, Artificial
  probe
  misc_feature (1)..(25): SEQ ID NO: 6263; WAN024A3P; Start 24; Stop 48
actcataatagtctcttgcgaggac

SEQ ID NO: 433634 - DNA, 25 bp, Artificial
  probe
  misc_feature (1)..(25): SEQ ID NO: 6263; WAN024A3P; Start 20; Stop 44
aataactcataatagtctcttgcga

SEQ ID NO: 433635 - DNA, 25 bp, Artificial
  probe
  misc_feature (1)..(25): SEQ ID NO: 6263; WAN024A3P; Start 45; Stop 69
ggacagataagagcaacaaatatgg

SEQ ID NO: 433636 - DNA, 25 bp, Artificial
  probe
  misc_feature (1)..(25): SEQ ID NO: 6263; WAN024A3P; Start 47; Stop 71
acagataagagcaacaaatatggtg

SEQ ID NO: 433637 - DNA, 25 bp, Artificial
  probe
  misc_feature (1)..(25): SEQ ID NO: 6263; WAN024A3P; Start 42; Stop 66
cgaggacagataagagcaacaaata

SEQ ID NO: 433638 - DNA, 25 bp, Artificial
  probe
  misc_feature (1)..(25): SEQ ID NO: 6263; WAN024A3P; Start 46; Stop 70
gacagataagagcaacaaatatggt

SEQ ID NO: 433639 - DNA, 25 bp, Artificial
  probe
  misc_feature (1)..(25): SEQ ID NO: 6263; WAN024A3P; Start 44; Stop 68
aggacagataagagcaacaaatatg

SEQ ID NO: 433640 - DNA, 25 bp, Artificial
  probe
  misc_feature (1)..(25): SEQ ID NO: 6263; WAN024A3P; Start 43; Stop 67
gaggacagataagagcaacaaatat

SEQ ID NO: 433641 - DNA, 25 bp, Artificial
  probe
  misc_feature (1)..(25): SEQ ID NO: 6263; WAN024A3P; Start 94; Stop 118
aatttcaatgtactaggcgtcttct

SEQ ID NO: 433642 - DNA, 25 bp, Artificial
  probe
  misc_feature (1)..(25): SEQ ID NO: 6263; WAN024A3P; Start 95; Stop 119
atttcaatgtactaggcgtcttcta

SEQ ID NO: 433643 - DNA, 25 bp, Artificial
  probe
  misc_feature (1)..(25): SEQ ID NO: 6263; WAN024A3P; Start 96; Stop 120
tttcaatgtactaggcgtcttctac

SEQ ID NO: 433644 - DNA, 25 bp, Artificial
  probe
  misc_feature (1)..(25): SEQ ID NO: 6263; WAN024A3P; Start 97; Stop 121
ttcaatgtactaggcgtcttctaca

SEQ ID NO: 433645 - DNA, 25 bp, Artificial
  probe
  misc_feature (1)..(25): SEQ ID NO: 6263; WAN024A3P; Start 93; Stop 117
taatttcaatgtactaggcgtcttc

SEQ ID NO: 433646 - DNA, 25 bp, Artificial
  probe
  misc_feature (1)..(25): SEQ ID NO: 6263; WAN024A3P; Start 98; Stop 122
tcaatgtactaggcgtcttctacag

SEQ ID NO: 433647 - DNA, 25 bp, Artificial
  probe
  misc_feature (1)..(25): SEQ ID NO: 6263; WAN024A3P; Start 92; Stop 116
ttaatttcaatgtactaggcgtctt

SEQ ID NO: 433648 - DNA, 25 bp, Artificial
  probe
  misc_feature (1)..(25): SEQ ID NO: 6263; WAN024A3P; Start 91; Stop 115
tttaatttcaatgtactaggcgtct

SEQ ID NO: 433649 - DNA, 25 bp, Artificial
  probe
  misc_feature (1)..(25): SEQ ID NO: 6263; WAN024A3P; Start 58; Stop 82
caacaaatatggtgctactcatgtg

SEQ ID NO: 433650 - DNA, 25 bp, Artificial
  probe
  misc_feature (1)..(25): SEQ ID NO: 6263; WAN024A3P; Start 32; Stop 56
tagtctcttgcgaggacagataaga

SEQ ID NO: 433651 - DNA, 25 bp, Artificial
  probe
  misc_feature (1)..(25): SEQ ID NO: 6263; WAN024A3P; Start 101; Stop 125
atgtactaggcgtcttctacagcta

SEQ ID NO: 433652 - DNA, 25 bp, Artificial
  probe
  misc_feature (1)..(25): SEQ ID NO: 6263; WAN024A3P; Start 19; Stop 43
aaataactcataatagtctcttgcg

SEQ ID NO: 433653 - DNA, 25 bp, Artificial
  probe
  misc_feature (1)..(25): SEQ ID NO: 6263; WAN024A3P; Start 99; Stop 123
caatgtactaggcgtcttctacagc

SEQ ID NO: 433654 - DNA, 25 bp, Artificial
  probe
  misc_feature (1)..(25): SEQ ID NO: 6263; WAN024A3P; Start 41; Stop 65
gcgaggacagataagagcaacaaat

SEQ ID NO: 433655 - DNA, 25 bp, Artificial
  probe
  misc_feature (1)..(25): SEQ ID NO: 6263; WAN024A3P; Start 48; Stop 72
cagataagagcaacaaatatggtgc

SEQ ID NO: 433656 - DNA, 25 bp, Artificial
  probe
  misc_feature (1)..(25): SEQ ID NO: 6264; WAN024DD8; Start 2232; Stop 2256
tggtagtcagaagcgatataaggta

SEQ ID NO: 433657 - DNA, 25 bp, Artificial
  probe
  misc_feature (1)..(25): SEQ ID NO: 6264; WAN024DD8; Start 2230; Stop 2254
gatggtagtcagaagcgatataagg

SEQ ID NO: 433658 - DNA, 25 bp, Artificial
  probe
  misc_feature (1)..(25): SEQ ID NO: 6264; WAN024DD8; Start 2229; Stop 2253
ggatggtagtcagaagcgatataag

SEQ ID NO: 433659 - DNA, 25 bp, Artificial
  probe
  misc_feature (1)..(25): SEQ ID NO: 6264; WAN024DD8; Start 2233; Stop 2257
ggtagtcagaagcgatataaggtaa

SEQ ID NO: 433660 - DNA, 25 bp, Artificial
  probe
  misc_feature (1)..(25): SEQ ID NO: 6264; WAN024DD8; Start 2228; Stop 2252
aggatggtagtcagaagcgatataa

SEQ ID NO: 433661 - DNA, 25 bp, Artificial
  probe
  misc_feature (1)..(25): SEQ ID NO: 6264; WAN024DD8; Start 2231; Stop 2255
atggtagtcagaagcgatataaggt

SEQ ID NO: 433662 - DNA, 25 bp, Artificial
  probe
  misc_feature (1)..(25): SEQ ID NO: 6264; WAN024DD8; Start 2227; Stop 2251
gaggatggtagtcagaagcgatata

SEQ ID NO: 433663 - DNA, 25 bp, Artificial
  probe
  misc_feature (1)..(25): SEQ ID NO: 6264; WAN024DD8; Start 2184; Stop 2208
cgttgtagatggcagtgatattgat

SEQ ID NO: 433664 - DNA, 25 bp, Artificial
  probe
  misc_feature (1)..(25): SEQ ID NO: 6264; WAN024DD8; Start 2613; Stop 2637
taataagacggctatattgcttgct

SEQ ID NO: 433665 - DNA, 25 bp, Artificial
  probe
  misc_feature (1)..(25): SEQ ID NO: 6264; WAN024DD8; Start 4276; Stop 4300
ggtattcgtcctgttactatcaatc

SEQ ID NO: 433666 - DNA, 25 bp, Artificial
  probe
  misc_feature (1)..(25): SEQ ID NO: 6264; WAN024DD8; Start 2609; Stop 2633
tggataataagacggctatattgct

SEQ ID NO: 433667 - DNA, 25 bp, Artificial
  probe
  misc_feature (1)..(25): SEQ ID NO: 6264; WAN024DD8; Start 2182; Stop 2206
ttcgttgtagatggcagtgatattg

SEQ ID NO: 433668 - DNA, 25 bp, Artificial
  probe
  misc_feature (1)..(25): SEQ ID NO: 6264; WAN024DD8; Start 2181; Stop 2205
gttcgttgtagatggcagtgatatt

SEQ ID NO: 433669 - DNA, 25 bp, Artificial
  probe
  misc_feature (1)..(25): SEQ ID NO: 6264; WAN024DD8; Start 1276; Stop 1300
ccagatagcaatcaaggagataacg

SEQ ID NO: 433670 - DNA, 25 bp, Artificial
  probe
  misc_feature (1)..(25): SEQ ID NO: 6264; WAN024DD8; Start 2612; Stop 2636
ataataagacggctatattgcttgc

SEQ ID NO: 433671 - DNA, 25 bp, Artificial
  probe
  misc_feature (1)..(25): SEQ ID NO: 6264; WAN024DD8; Start 2235; Stop 2259
tagtcagaagcgatataaggtaacc

SEQ ID NO: 433672 - DNA, 25 bp, Artificial
  probe
  misc_feature (1)..(25): SEQ ID NO: 6264; WAN024DD8; Start 2234; Stop 2258
gtagtcagaagcgatataaggtaac

SEQ ID NO: 433673 - DNA, 25 bp, Artificial
  probe
  misc_feature (1)..(25): SEQ ID NO: 6264; WAN024DD8; Start 2344; Stop 2368
catccactagattcgtcactgataa

SEQ ID NO: 433674 - DNA, 25 bp, Artificial
  probe
  misc_feature (1)..(25): SEQ ID NO: 6264; WAN024DD8; Start 1042; Stop 1066
gctatgacatctaatcctacaggta

SEQ ID NO: 433675 - DNA, 25 bp, Artificial
  probe
  misc_feature (1)..(25): SEQ ID NO: 6264; WAN024DD8; Start 922; Stop 946
acaccagaattagtagttcgtaaga

SEQ ID NO: 433676 - DNA, 25 bp, Artificial
  probe
  misc_feature (1)..(25): SEQ ID NO: 6264; WAN024DD8; Start 2614; Stop 2638
aataagacggctatattgcttgctt

SEQ ID NO: 433677 - DNA, 25 bp, Artificial
  probe
  misc_feature (1)..(25): SEQ ID NO: 6264; WAN024DD8; Start 2185; Stop 2209
gttgtagatggcagtgatattgata

SEQ ID NO: 433678 - DNA, 25 bp, Artificial
  probe
  misc_feature (1)..(25): SEQ ID NO: 6264; WAN024DD8; Start 918; Stop 942
agatacaccagaattagtagttcgt

SEQ ID NO: 433679 - DNA, 25 bp, Artificial
  probe
  misc_feature (1)..(25): SEQ ID NO: 6264; WAN024DD8; Start 916; Stop 940
gcagatacaccagaattagtagttc

SEQ ID NO: 433680 - DNA, 25 bp, Artificial
  probe
  misc_feature (1)..(25): SEQ ID NO: 6264; WAN024DD8; Start 2343; Stop 2367
acatccactagattcgtcactgata

SEQ ID NO: 433681 - DNA, 25 bp, Artificial
  probe
  misc_feature (1)..(25): SEQ ID NO: 6264; WAN024DD8; Start 2342; Stop 2366
tacatccactagattcgtcactgat

SEQ ID NO: 433682 - DNA, 25 bp, Artificial
  probe
  misc_feature (1)..(25): SEQ ID NO: 6264; WAN024DD8; Start 2186; Stop 2210
ttgtagatggcagtgatattgatac

SEQ ID NO: 433683 - DNA, 25 bp, Artificial
  probe
  misc_feature (1)..(25): SEQ ID NO: 6264; WAN024DD8; Start 917; Stop 941
cagatacaccagaattagtagttcg

SEQ ID NO: 433684 - DNA, 25 bp, Artificial
  probe
  misc_feature (1)..(25): SEQ ID NO: 6264; WAN024DD8; Start 2608; Stop 2632
atggataataagacggctatattgc

SEQ ID NO: 433685 - DNA, 25 bp, Artificial
  probe
  misc_feature (1)..(25): SEQ ID NO: 6264; WAN024DD8; Start 4277; Stop 4301
gtattcgtcctgttactatcaatca

SEQ ID NO: 433686 - DNA, 25 bp, Artificial
  probe
  misc_feature (1)..(25): SEQ ID NO: 6264; WAN024DD8; Start 4104; Stop 4128
aggtgttctaggatatgcttctaat

SEQ ID NO: 433687 - DNA, 25 bp, Artificial
  probe
  misc_feature (1)..(25): SEQ ID NO: 6264; WAN024DD8; Start 2187; Stop 2211
tgtagatggcagtgatattgatact

SEQ ID NO: 433688 - DNA, 25 bp, Artificial
  probe
  misc_feature (1)..(25): SEQ ID NO: 6264; WAN024DD8; Start 2610; Stop 2634
ggataataagacggctatattgctt

SEQ ID NO: 433689 - DNA, 25 bp, Artificial
  probe
  misc_feature (1)..(25): SEQ ID NO: 6265; WAN024B2W; Start 76; Stop 100
ttaatcgagctactggttgaccttg

SEQ ID NO: 433690 - DNA, 25 bp, Artificial
  probe
  misc_feature (1)..(25): SEQ ID NO: 6265; WAN024B2W; Start 60; Stop 84
gatcacctacccagatttaatcgag

SEQ ID NO: 433691 - DNA, 25 bp, Artificial
  probe
  misc_feature (1)..(25): SEQ ID NO: 6265; WAN024B2W; Start 72; Stop 96
agatttaatcgagctactggttgac

SEQ ID NO: 433692 - DNA, 25 bp, Artificial
  probe
  misc_feature (1)..(25): SEQ ID NO: 6265; WAN024B2W; Start 65; Stop 89
cctacccagatttaatcgagctact

SEQ ID NO: 433693 - DNA, 25 bp, Artificial
  probe
  misc_feature (1)..(25): SEQ ID NO: 6265; WAN024B2W; Start 73; Stop 97
gatttaatcgagctactggttgacc

SEQ ID NO: 433694 - DNA, 25 bp, Artificial
  probe
  misc_feature (1)..(25): SEQ ID NO: 6265; WAN024B2W; Start 59; Stop 83
ggatcacctacccagatttaatcga

SEQ ID NO: 433695 - DNA, 25 bp, Artificial
  probe
  misc_feature (1)..(25): SEQ ID NO: 6265; WAN024B2W; Start 64; Stop 88
acctacccagatttaatcgagctac

SEQ ID NO: 433696 - DNA, 25 bp, Artificial
  probe
  misc_feature (1)..(25): SEQ ID NO: 6265; WAN024B2W; Start 63; Stop 87
cacctacccagatttaatcgagcta

SEQ ID NO: 433697 - DNA, 25 bp, Artificial
  probe
  misc_feature (1)..(25): SEQ ID NO: 6265; WAN024B2W; Start 74; Stop 98
atttaatcgagctactggttgacct

SEQ ID NO: 433698 - DNA, 25 bp, Artificial
  probe
  misc_feature (1)..(25): SEQ ID NO: 6265; WAN024B2W; Start 75; Stop 99
tttaatcgagctactggttgacctt

SEQ ID NO: 433699 - DNA, 25 bp, Artificial
  probe
  misc_feature (1)..(25): SEQ ID NO: 6265; WAN024B2W; Start 66; Stop 90
ctacccagatttaatcgagctactg

SEQ ID NO: 433700 - DNA, 25 bp, Artificial
  probe
  misc_feature (1)..(25): SEQ ID NO: 6265; WAN024B2W; Start 71; Stop 95
cagatttaatcgagctactggttga

SEQ ID NO: 433701 - DNA, 25 bp, Artificial
  probe
  misc_feature (1)..(25): SEQ ID NO: 6265; WAN024B2W; Start 61; Stop 85
atcacctacccagatttaatcgagc

SEQ ID NO: 433702 - DNA, 25 bp, Artificial
  probe
  misc_feature (1)..(25): SEQ ID NO: 6265; WAN024B2W; Start 62; Stop 86
tcacctacccagatttaatcgagct

SEQ ID NO: 433703 - DNA, 25 bp, Artificial
  probe
  misc_feature (1)..(25): SEQ ID NO: 6265; WAN024B2W; Start 38; Stop 62
cactactttgggacaatatggggat

SEQ ID NO: 433704 - DNA, 25 bp, Artificial
  probe
  misc_feature (1)..(25): SEQ ID NO: 6265; WAN024B2W; Start 40; Stop 64
ctactttgggacaatatggggatca

SEQ ID NO: 433705 - DNA, 25 bp, Artificial
  probe
  misc_feature (1)..(25): SEQ ID NO: 6265; WAN024B2W; Start 39; Stop 63
actactttgggacaatatggggatc

SEQ ID NO: 433706 - DNA, 25 bp, Artificial
  probe
  misc_feature (1)..(25): SEQ ID NO: 6265; WAN024B2W; Start 77; Stop 101
taatcgagctactggttgaccttgc

SEQ ID NO: 433707 - DNA, 25 bp, Artificial
  probe
  misc_feature (1)..(25): SEQ ID NO: 6265; WAN024B2W; Start 58; Stop 82
gggatcacctacccagatttaatcg

SEQ ID NO: 433708 - DNA, 25 bp, Artificial
  probe
  misc_feature (1)..(25): SEQ ID NO: 6265; WAN024B2W; Start 41; Stop 65
tactttgggacaatatggggatcac

SEQ ID NO: 433709 - DNA, 25 bp, Artificial
  probe
  misc_feature (1)..(25): SEQ ID NO: 6265; WAN024B2W; Start 11; Stop 35
caggtttcacccagtggtctatgta

SEQ ID NO: 433710 - DNA, 25 bp, Artificial
  probe
  misc_feature (1)..(25): SEQ ID NO: 6265; WAN024B2W; Start 12; Stop 36
aggtttcacccagtggtctatgtac

SEQ ID NO: 433711 - DNA, 25 bp, Artificial
  probe
  misc_feature (1)..(25): SEQ ID NO: 6265; WAN024B2W; Start 44; Stop 68
tttgggacaatatggggatcaccta

SEQ ID NO: 433712 - DNA, 25 bp, Artificial
  probe
  misc_feature (1)..(25): SEQ ID NO: 6265; WAN024B2W; Start 45; Stop 69
ttgggacaatatggggatcacctac

SEQ ID NO: 433713 - DNA, 25 bp, Artificial
  probe
  misc_feature (1)..(25): SEQ ID NO: 6265; WAN024B2W; Start 57; Stop 81
ggggatcacctacccagatttaatc

SEQ ID NO: 433714 - DNA, 25 bp, Artificial
  probe
  misc_feature (1)..(25): SEQ ID NO: 6265; WAN024B2W; Start 14; Stop 38
gtttcacccagtggtctatgtaccc

SEQ ID NO: 433715 - DNA, 25 bp, Artificial
  probe
  misc_feature (1)..(25): SEQ ID NO: 6265; WAN024B2W; Start 13; Stop 37
ggtttcacccagtggtctatgtacc

SEQ ID NO: 433716 - DNA, 25 bp, Artificial
  probe
  misc_feature (1)..(25): SEQ ID NO: 6265; WAN024B2W; Start 43; Stop 67
ctttgggacaatatggggatcacct

SEQ ID NO: 433717 - DNA, 25 bp, Artificial
  probe
  misc_feature (1)..(25): SEQ ID NO: 6265; WAN024B2W; Start 15; Stop 39
tttcacccagtggtctatgtaccca

SEQ ID NO: 433718 - DNA, 25 bp, Artificial
  probe
  misc_feature (1)..(25): SEQ ID NO: 6265; WAN024B2W; Start 37; Stop 61
ccactactttgggacaatatgggga

SEQ ID NO: 433719 - DNA, 25 bp, Artificial
  probe
  misc_feature (1)..(25): SEQ ID NO: 6265; WAN024B2W; Start 70; Stop 94
ccagatttaatcgagctactggttg

SEQ ID NO: 433720 - DNA, 25 bp, Artificial
  probe
  misc_feature (1)..(25): SEQ ID NO: 6265; WAN024B2W; Start 42; Stop 66
actttgggacaatatggggatcacc

SEQ ID NO: 433721 - DNA, 25 bp, Artificial
  probe
  misc_feature (1)..(25): SEQ ID NO: 6265; WAN024B2W; Start 67; Stop 91
tacccagatttaatcgagctactgg

SEQ ID NO: 433722 - DNA, 25 bp, Artificial
  probe
  misc_feature (1)..(25): SEQ ID NO: 6266; WAN024B2Y; Start 60; Stop 84
aatcagctatccagacttaatcgag

SEQ ID NO: 433723 - DNA, 25 bp, Artificial
  probe
  misc_feature (1)..(25): SEQ ID NO: 6266; WAN024B2Y; Start 59; Stop 83
gaatcagctatccagacttaatcga

SEQ ID NO: 433724 - DNA, 25 bp, Artificial
  probe
  misc_feature (1)..(25): SEQ ID NO: 6266; WAN024B2Y; Start 41; Stop 65
ttctttgggacaatatgggaatcag

SEQ ID NO: 433725 - DNA, 25 bp, Artificial
  probe
  misc_feature (1)..(25): SEQ ID NO: 6266; WAN024B2Y; Start 40; Stop 64
cttctttgggacaatatgggaatca

SEQ ID NO: 433726 - DNA, 25 bp, Artificial
  probe
  misc_feature (1)..(25): SEQ ID NO: 6266; WAN024B2Y; Start 39; Stop 63
acttctttgggacaatatgggaatc

SEQ ID NO: 433727 - DNA, 25 bp, Artificial
  probe
  misc_feature (1)..(25): SEQ ID NO: 6266; WAN024B2Y; Start 38; Stop 62
cacttctttgggacaatatgggaat

SEQ ID NO: 433728 - DNA, 25 bp, Artificial
  probe
  misc_feature (1)..(25): SEQ ID NO: 6266; WAN024B2Y; Start 58; Stop 82
ggaatcagctatccagacttaatcg

SEQ ID NO: 433729 - DNA, 25 bp, Artificial
  probe
  misc_feature (1)..(25): SEQ ID NO: 6266; WAN024B2Y; Start 34; Stop 58
tatccacttctttgggacaatatgg

SEQ ID NO: 433730 - DNA, 25 bp, Artificial
  probe
  misc_feature (1)..(25): SEQ ID NO: 6266; WAN024B2Y; Start 32; Stop 56
tgtatccacttctttgggacaatat

SEQ ID NO: 433731 - DNA, 25 bp, Artificial
  probe
  misc_feature (1)..(25): SEQ ID NO: 6266; WAN024B2Y; Start 31; Stop 55
atgtatccacttctttgggacaata

SEQ ID NO: 433732 - DNA, 25 bp, Artificial
  probe
  misc_feature (1)..(25): SEQ ID NO: 6266; WAN024B2Y; Start 30; Stop 54
aatgtatccacttctttgggacaat

SEQ ID NO: 433733 - DNA, 25 bp, Artificial
  probe
  misc_feature (1)..(25): SEQ ID NO: 6266; WAN024B2Y; Start 33; Stop 57
gtatccacttctttgggacaatatg

SEQ ID NO: 433734 - DNA, 25 bp, Artificial
  probe
  misc_feature (1)..(25): SEQ ID NO: 6266; WAN024B2Y; Start 29; Stop 53
caatgtatccacttctttgggacaa

SEQ ID NO: 433735 - DNA, 25 bp, Artificial
  probe
  misc_feature (1)..(25): SEQ ID NO: 6266; WAN024B2Y; Start 66; Stop 90
ctatccagacttaatcgagcgattg

SEQ ID NO: 433736 - DNA, 25 bp, Artificial
  probe
  misc_feature (1)..(25): SEQ ID NO: 6266; WAN024B2Y; Start 46; Stop 70
tgggacaatatgggaatcagctatc

SEQ ID NO: 433737 - DNA, 25 bp, Artificial
  probe
  misc_feature (1)..(25): SEQ ID NO: 6266; WAN024B2Y; Start 45; Stop 69
ttgggacaatatgggaatcagctat

SEQ ID NO: 433738 - DNA, 25 bp, Artificial
  probe
  misc_feature (1)..(25): SEQ ID NO: 6266; WAN024B2Y; Start 27; Stop 51
gtcaatgtatccacttctttgggac

SEQ ID NO: 433739 - DNA, 25 bp, Artificial
  probe
  misc_feature (1)..(25): SEQ ID NO: 6266; WAN024B2Y; Start 42; Stop 66
tctttgggacaatatgggaatcagc

SEQ ID NO: 433740 - DNA, 25 bp, Artificial
  probe
  misc_feature (1)..(25): SEQ ID NO: 6266; WAN024B2Y; Start 75; Stop 99
cttaatcgagcgattggttgatctt

SEQ ID NO: 433741 - DNA, 25 bp, Artificial
  probe
  misc_feature (1)..(25): SEQ ID NO: 6266; WAN024B2Y; Start 44; Stop 68
tttgggacaatatgggaatcagcta

SEQ ID NO: 433742 - DNA, 25 bp, Artificial
  probe
  misc_feature (1)..(25): SEQ ID NO: 6266; WAN024B2Y; Start 28; Stop 52
tcaatgtatccacttctttgggaca

SEQ ID NO: 433743 - DNA, 25 bp, Artificial
  probe
  misc_feature (1)..(25): SEQ ID NO: 6266; WAN024B2Y; Start 61; Stop 85
atcagctatccagacttaatcgagc

SEQ ID NO: 433744 - DNA, 25 bp, Artificial
  probe
  misc_feature (1)..(25): SEQ ID NO: 6266; WAN024B2Y; Start 76; Stop 100
ttaatcgagcgattggttgatcttg

SEQ ID NO: 433745 - DNA, 25 bp, Artificial
  probe
  misc_feature (1)..(25): SEQ ID NO: 6266; WAN024B2Y; Start 57; Stop 81
gggaatcagctatccagacttaatc

SEQ ID NO: 433746 - DNA, 25 bp, Artificial
  probe
  misc_feature (1)..(25): SEQ ID NO: 6266; WAN024B2Y; Start 54; Stop 78
tatgggaatcagctatccagactta

SEQ ID NO: 433747 - DNA, 25 bp, Artificial
  probe
  misc_feature (1)..(25): SEQ ID NO: 6266; WAN024B2Y; Start 53; Stop 77
atatgggaatcagctatccagactt

SEQ ID NO: 433748 - DNA, 25 bp, Artificial
  probe
  misc_feature (1)..(25): SEQ ID NO: 6266; WAN024B2Y; Start 52; Stop 76
aatatgggaatcagctatccagact

SEQ ID NO: 433749 - DNA, 25 bp, Artificial
  probe
  misc_feature (1)..(25): SEQ ID NO: 6266; WAN024B2Y; Start 51; Stop 75
caatatgggaatcagctatccagac

SEQ ID NO: 433750 - DNA, 25 bp, Artificial
  probe
  misc_feature (1)..(25): SEQ ID NO: 6266; WAN024B2Y; Start 49; Stop 73
gacaatatgggaatcagctatccag

SEQ ID NO: 433751 - DNA, 25 bp, Artificial
  probe
  misc_feature (1)..(25): SEQ ID NO: 6266; WAN024B2Y; Start 73; Stop 97
gacttaatcgagcgattggttgatc

SEQ ID NO: 433752 - DNA, 25 bp, Artificial
  probe
  misc_feature (1)..(25): SEQ ID NO: 6266; WAN024B2Y; Start 56; Stop 80
tgggaatcagctatccagacttaat

SEQ ID NO: 433753 - DNA, 25 bp, Artificial
  probe
  misc_feature (1)..(25): SEQ ID NO: 6266; WAN024B2Y; Start 55; Stop 79
atgggaatcagctatccagacttaa

SEQ ID NO: 433754 - DNA, 25 bp, Artificial
  probe
  misc_feature (1)..(25): SEQ ID NO: 6266; WAN024B2Y; Start 50; Stop 74
acaatatgggaatcagctatccaga

SEQ ID NO: 433755 - DNA, 25 bp, Artificial
  probe
  misc_feature (1)..(25): SEQ ID NO: 6267; WAN0249OY; Start 216; Stop 240
gctgccttaaccgtgataatatcta

SEQ ID NO: 433756 - DNA, 25 bp, Artificial
  probe
  misc_feature (1)..(25): SEQ ID NO: 6267; WAN0249OY; Start 213; Stop 237
gatgctgccttaaccgtgataatat

SEQ ID NO: 433757 - DNA, 25 bp, Artificial
  probe
  misc_feature (1)..(25): SEQ ID NO: 6267; WAN0249OY; Start 214; Stop 238
atgctgccttaaccgtgataatatc

SEQ ID NO: 433758 - DNA, 25 bp, Artificial
  probe
  misc_feature (1)..(25): SEQ ID NO: 6267; WAN0249OY; Start 217; Stop 241
ctgccttaaccgtgataatatctaa

SEQ ID NO: 433759 - DNA, 25 bp, Artificial
  probe
  misc_feature (1)..(25): SEQ ID NO: 6267; WAN0249OY; Start 212; Stop 236
agatgctgccttaaccgtgataata

SEQ ID NO: 433760 - DNA, 25 bp, Artificial
  probe
  misc_feature (1)..(25): SEQ ID NO: 6267; WAN0249OY; Start 215; Stop 239
tgctgccttaaccgtgataatatct

SEQ ID NO: 433761 - DNA, 25 bp, Artificial
  probe
  misc_feature (1)..(25): SEQ ID NO: 6267; WAN0249OY; Start 218; Stop 242
tgccttaaccgtgataatatctaat

SEQ ID NO: 433762 - DNA, 25 bp, Artificial
  probe
  misc_feature (1)..(25): SEQ ID NO: 6267; WAN0249OY; Start 219; Stop 243
gccttaaccgtgataatatctaatc

SEQ ID NO: 433763 - DNA, 25 bp, Artificial
  probe
  misc_feature (1)..(25): SEQ ID NO: 6267; WAN0249OY; Start 211; Stop 235
gagatgctgccttaaccgtgataat

SEQ ID NO: 433764 - DNA, 25 bp, Artificial
  probe
  misc_feature (1)..(25): SEQ ID NO: 6267; WAN0249OY; Start 179; Stop 203
tgtcttccaaacctctttatttcat

SEQ ID NO: 433765 - DNA, 25 bp, Artificial
  probe
  misc_feature (1)..(25): SEQ ID NO: 6267; WAN0249OY; Start 178; Stop 202
atgtcttccaaacctctttatttca

SEQ ID NO: 433766 - DNA, 25 bp, Artificial
  probe
  misc_feature (1)..(25): SEQ ID NO: 6267; WAN0249OY; Start 176; Stop 200
tgatgtcttccaaacctctttattt

SEQ ID NO: 433767 - DNA, 25 bp, Artificial
  probe
  misc_feature (1)..(25): SEQ ID NO: 6267; WAN0249OY; Start 203; Stop 227
tatttaatgagatgctgccttaacc

SEQ ID NO: 433768 - DNA, 25 bp, Artificial
  probe
  misc_feature (1)..(25): SEQ ID NO: 6267; WAN0249OY; Start 163; Stop 187
gaggtttagaatttgatgtcttcca

SEQ ID NO: 433769 - DNA, 25 bp, Artificial
  probe
  misc_feature (1)..(25): SEQ ID NO: 6267; WAN0249OY; Start 162; Stop 186
agaggtttagaatttgatgtcttcc

SEQ ID NO: 433770 - DNA, 25 bp, Artificial
  probe
  misc_feature (1)..(25): SEQ ID NO: 6267; WAN0249OY; Start 177; Stop 201
gatgtcttccaaacctctttatttc

SEQ ID NO: 433771 - DNA, 25 bp, Artificial
  probe
  misc_feature (1)..(25): SEQ ID NO: 6267; WAN0249OY; Start 175; Stop 199
ttgatgtcttccaaacctctttatt

SEQ ID NO: 433772 - DNA, 25 bp, Artificial
  probe
  misc_feature (1)..(25): SEQ ID NO: 6267; WAN0249OY; Start 164; Stop 188
aggtttagaatttgatgtcttccaa

SEQ ID NO: 433773 - DNA, 25 bp, Artificial
  probe
  misc_feature (1)..(25): SEQ ID NO: 6267; WAN0249OY; Start 204; Stop 228
atttaatgagatgctgccttaaccg

SEQ ID NO: 433774 - DNA, 25 bp, Artificial
  probe
  misc_feature (1)..(25): SEQ ID NO: 6267; WAN0249OY; Start 206; Stop 230
ttaatgagatgctgccttaaccgtg

SEQ ID NO: 433775 - DNA, 25 bp, Artificial
  probe
  misc_feature (1)..(25): SEQ ID NO: 6267; WAN0249OY; Start 209; Stop 233
atgagatgctgccttaaccgtgata

SEQ ID NO: 433776 - DNA, 25 bp, Artificial
  probe
  misc_feature (1)..(25): SEQ ID NO: 6267; WAN0249OY; Start 107; Stop 131
tttataatcggctctctgtaacaaa

SEQ ID NO: 433777 - DNA, 25 bp, Artificial
  probe
  misc_feature (1)..(25): SEQ ID NO: 6267; WAN0249OY; Start 106; Stop 130
atttataatcggctctctgtaacaa

SEQ ID NO: 433778 - DNA, 25 bp, Artificial
  probe
  misc_feature (1)..(25): SEQ ID NO: 6267; WAN0249OY; Start 202; Stop 226
atatttaatgagatgctgccttaac

SEQ ID NO: 433779 - DNA, 25 bp, Artificial
  probe
  misc_feature (1)..(25): SEQ ID NO: 6267; WAN0249OY; Start 201; Stop 225
catatttaatgagatgctgccttaa

SEQ ID NO: 433780 - DNA, 25 bp, Artificial
  probe
  misc_feature (1)..(25): SEQ ID NO: 6267; WAN0249OY; Start 210; Stop 234
tgagatgctgccttaaccgtgataa

SEQ ID NO: 433781 - DNA, 25 bp, Artificial
  probe
  misc_feature (1)..(25): SEQ ID NO: 6267; WAN0249OY; Start 207; Stop 231
taatgagatgctgccttaaccgtga

SEQ ID NO: 433782 - DNA, 25 bp, Artificial
  probe
  misc_feature (1)..(25): SEQ ID NO: 6267; WAN0249OY; Start 180; Stop 204
gtcttccaaacctctttatttcata

SEQ ID NO: 433783 - DNA, 25 bp, Artificial
  probe
  misc_feature (1)..(25): SEQ ID NO: 6267; WAN0249OY; Start 205; Stop 229
tttaatgagatgctgccttaaccgt

SEQ ID NO: 433784 - DNA, 25 bp, Artificial
  probe
  misc_feature (1)..(25): SEQ ID NO: 6267; WAN0249OY; Start 105; Stop 129
tatttataatcggctctctgtaaca

SEQ ID NO: 433785 - DNA, 25 bp, Artificial
  probe
  misc_feature (1)..(25): SEQ ID NO: 6267; WAN0249OY; Start 171; Stop 195
gaatttgatgtcttccaaacctctt

SEQ ID NO: 433786 - DNA, 25 bp, Artificial
  probe
  misc_feature (1)..(25): SEQ ID NO: 6267; WAN0249OY; Start 170; Stop 194
agaatttgatgtcttccaaacctct

SEQ ID NO: 433787 - DNA, 25 bp, Artificial
  probe
  misc_feature (1)..(25): SEQ ID NO: 6267; WAN0249OY; Start 172; Stop 196
aatttgatgtcttccaaacctcttt

SEQ ID NO: 433788 - DNA, 25 bp, Artificial
  probe
  misc_feature (1)..(25): SEQ ID NO: 6268; WAN024BAX; Start 44; Stop 68
catctgcgacctcaaaacactattt

SEQ ID NO: 433789 - DNA, 25 bp, Artificial
  probe
  misc_feature (1)..(25): SEQ ID NO: 6268; WAN024BAX; Start 45; Stop 69
atctgcgacctcaaaacactatttt

SEQ ID NO: 433790 - DNA, 25 bp, Artificial
  probe
  misc_feature (1)..(25): SEQ ID NO: 6268; WAN024BAX; Start 43; Stop 67
ccatctgcgacctcaaaacactatt

SEQ ID NO: 433791 - DNA, 25 bp, Artificial
  probe
  misc_feature (1)..(25): SEQ ID NO: 6268; WAN024BAX; Start 42; Stop 66
tccatctgcgacctcaaaacactat

SEQ ID NO: 433792 - DNA, 25 bp, Artificial
  probe
  misc_feature (1)..(25): SEQ ID NO: 6268; WAN024BAX; Start 41; Stop 65
ttccatctgcgacctcaaaacacta

SEQ ID NO: 433793 - DNA, 25 bp, Artificial
  probe
  misc_feature (1)..(25): SEQ ID NO: 6268; WAN024BAX; Start 57; Stop 81
aaaacactattttgagcaacctgcg

SEQ ID NO: 433794 - DNA, 25 bp, Artificial
  probe
  misc_feature (1)..(25): SEQ ID NO: 6268; WAN024BAX; Start 40; Stop 64
tttccatctgcgacctcaaaacact

SEQ ID NO: 433795 - DNA, 25 bp, Artificial
  probe
  misc_feature (1)..(25): SEQ ID NO: 6268; WAN024BAX; Start 36; Stop 60
tcagtttccatctgcgacctcaaaa

SEQ ID NO: 433796 - DNA, 25 bp, Artificial
  probe
  misc_feature (1)..(25): SEQ ID NO: 6268; WAN024BAX; Start 37; Stop 61
cagtttccatctgcgacctcaaaac

SEQ ID NO: 433797 - DNA, 25 bp, Artificial
  probe
  misc_feature (1)..(25): SEQ ID NO: 6268; WAN024BAX; Start 58; Stop 82
aaacactattttgagcaacctgcgg

SEQ ID NO: 433798 - DNA, 25 bp, Artificial
  probe
  misc_feature (1)..(25): SEQ ID NO: 6268; WAN024BAX; Start 39; Stop 63
gtttccatctgcgacctcaaaacac

SEQ ID NO: 433799 - DNA, 25 bp, Artificial
  probe
  misc_feature (1)..(25): SEQ ID NO: 6268; WAN024BAX; Start 56; Stop 80
caaaacactattttgagcaacctgc

SEQ ID NO: 433800 - DNA, 25 bp, Artificial
  probe
  misc_feature (1)..(25): SEQ ID NO: 6268; WAN024BAX; Start 38; Stop 62
agtttccatctgcgacctcaaaaca

SEQ ID NO: 433801 - DNA, 25 bp, Artificial
  probe
  misc_feature (1)..(25): SEQ ID NO: 6268; WAN024BAX; Start 46; Stop 70
tctgcgacctcaaaacactattttg

SEQ ID NO: 433802 - DNA, 25 bp, Artificial
  probe
  misc_feature (1)..(25): SEQ ID NO: 6269; WAN0249OW; Start 29; Stop 53
aagttaggaaataaggagaggaagc

SEQ ID NO: 433803 - DNA, 25 bp, Artificial
  probe
  misc_feature (1)..(25): SEQ ID NO: 6269; WAN0249OW; Start 30; Stop 54
agttaggaaataaggagaggaagcc

SEQ ID NO: 433804 - DNA, 25 bp, Artificial
  probe
  misc_feature (1)..(25): SEQ ID NO: 6269; WAN0249OW; Start 28; Stop 52
aaagttaggaaataaggagaggaag

SEQ ID NO: 433805 - DNA, 25 bp, Artificial
  probe
  misc_feature (1)..(25): SEQ ID NO: 6269; WAN0249OW; Start 31; Stop 55
gttaggaaataaggagaggaagccc

SEQ ID NO: 433806 - DNA, 25 bp, Artificial
  probe
  misc_feature (1)..(25): SEQ ID NO: 6269; WAN0249OW; Start 33; Stop 57
taggaaataaggagaggaagcccat

SEQ ID NO: 433807 - DNA, 25 bp, Artificial
  probe
  misc_feature (1)..(25): SEQ ID NO: 6269; WAN0249OW; Start 32; Stop 56
ttaggaaataaggagaggaagccca

SEQ ID NO: 433808 - DNA, 25 bp, Artificial
  probe
  misc_feature (1)..(25): SEQ ID NO: 6269; WAN0249OW; Start 27; Stop 51
taaagttaggaaataaggagaggaa

SEQ ID NO: 433809 - DNA, 25 bp, Artificial
  probe
  misc_feature (1)..(25): SEQ ID NO: 6269; WAN0249OW; Start 26; Stop 50
ataaagttaggaaataaggagagga

SEQ ID NO: 433810 - DNA, 25 bp, Artificial
  probe
  misc_feature (1)..(25): SEQ ID NO: 6269; WAN0249OW; Start 25; Stop 49
aataaagttaggaaataaggagagg

SEQ ID NO: 433811 - DNA, 25 bp, Artificial
  probe
  misc_feature (1)..(25): SEQ ID NO: 6269; WAN0249OW; Start 34; Stop 58
aggaaataaggagaggaagcccatg

SEQ ID NO: 433812 - DNA, 25 bp, Artificial
  probe
  misc_feature (1)..(25): SEQ ID NO: 6269; WAN0249OW; Start 37; Stop 61
aaataaggagaggaagcccatggaa

SEQ ID NO: 433813 - DNA, 25 bp, Artificial
  probe
  misc_feature (1)..(25): SEQ ID NO: 6269; WAN0249OW; Start 38; Stop 62
aataaggagaggaagcccatggaag

SEQ ID NO: 433814 - DNA, 25 bp, Artificial
  probe
  misc_feature (1)..(25): SEQ ID NO: 6269; WAN0249OW; Start 36; Stop 60
gaaataaggagaggaagcccatgga

SEQ ID NO: 433815 - DNA, 25 bp, Artificial
  probe
  misc_feature (1)..(25): SEQ ID NO: 6269; WAN0249OW; Start 39; Stop 63
ataaggagaggaagcccatggaaga

SEQ ID NO: 433816 - DNA, 25 bp, Artificial
  probe
  misc_feature (1)..(25): SEQ ID NO: 6269; WAN0249OW; Start 40; Stop 64
taaggagaggaagcccatggaagaa

SEQ ID NO: 433817 - DNA, 25 bp, Artificial
  probe
  misc_feature (1)..(25): SEQ ID NO: 6269; WAN0249OW; Start 35; Stop 59
ggaaataaggagaggaagcccatgg

SEQ ID NO: 433818 - DNA, 25 bp, Artificial
  probe
  misc_feature (1)..(25): SEQ ID NO: 6270; WAN024CP2; Start 241; Stop 265
ctcatggcgatcattatcactacta

SEQ ID NO: 433819 - DNA, 25 bp, Artificial
  probe
  misc_feature (1)..(25): SEQ ID NO: 6270; WAN024CP2; Start 235; Stop 259
taacttctcatggcgatcattatca

SEQ ID NO: 433820 - DNA, 25 bp, Artificial
  probe
  misc_feature (1)..(25): SEQ ID NO: 6270; WAN024CP2; Start 233; Stop 257
tgtaacttctcatggcgatcattat

SEQ ID NO: 433821 - DNA, 25 bp, Artificial
  probe
  misc_feature (1)..(25): SEQ ID NO: 6270; WAN024CP2; Start 232; Stop 256
atgtaacttctcatggcgatcatta

SEQ ID NO: 433822 - DNA, 25 bp, Artificial
  probe
  misc_feature (1)..(25): SEQ ID NO: 6270; WAN024CP2; Start 231; Stop 255
tatgtaacttctcatggcgatcatt

SEQ ID NO: 433823 - DNA, 25 bp, Artificial
  probe
  misc_feature (1)..(25): SEQ ID NO: 6270; WAN024CP2; Start 230; Stop 254
ttatgtaacttctcatggcgatcat

SEQ ID NO: 433824 - DNA, 25 bp, Artificial
  probe
  misc_feature (1)..(25): SEQ ID NO: 6270; WAN024CP2; Start 238; Stop 262
cttctcatggcgatcattatcacta

SEQ ID NO: 433825 - DNA, 25 bp, Artificial
  probe
  misc_feature (1)..(25): SEQ ID NO: 6270; WAN024CP2; Start 234; Stop 258
gtaacttctcatggcgatcattatc

SEQ ID NO: 433826 - DNA, 25 bp, Artificial
  probe
  misc_feature (1)..(25): SEQ ID NO: 6270; WAN024CP2; Start 239; Stop 263
ttctcatggcgatcattatcactac

SEQ ID NO: 433827 - DNA, 25 bp, Artificial
  probe
  misc_feature (1)..(25): SEQ ID NO: 6270; WAN024CP2; Start 242; Stop 266
tcatggcgatcattatcactactat

SEQ ID NO: 433828 - DNA, 25 bp, Artificial
  probe
  misc_feature (1)..(25): SEQ ID NO: 6270; WAN024CP2; Start 224; Stop 248
tcaaggttatgtaacttctcatggc

SEQ ID NO: 433829 - DNA, 25 bp, Artificial
  probe
  misc_feature (1)..(25): SEQ ID NO: 6270; WAN024CP2; Start 229; Stop 253
gttatgtaacttctcatggcgatca

SEQ ID NO: 433830 - DNA, 25 bp, Artificial
  probe
  misc_feature (1)..(25): SEQ ID NO: 6270; WAN024CP2; Start 240; Stop 264
tctcatggcgatcattatcactact

SEQ ID NO: 433831 - DNA, 25 bp, Artificial
  probe
  misc_feature (1)..(25): SEQ ID NO: 6270; WAN024CP2; Start 236; Stop 260
aacttctcatggcgatcattatcac

SEQ ID NO: 433832 - DNA, 25 bp, Artificial
  probe
  misc_feature (1)..(25): SEQ ID NO: 6270; WAN024CP2; Start 223; Stop 247
atcaaggttatgtaacttctcatgg

SEQ ID NO: 433833 - DNA, 25 bp, Artificial
  probe
  misc_feature (1)..(25): SEQ ID NO: 6270; WAN024CP2; Start 220; Stop 244
cagatcaaggttatgtaacttctca

SEQ ID NO: 433834 - DNA, 25 bp, Artificial
  probe
  misc_feature (1)..(25): SEQ ID NO: 6270; WAN024CP2; Start 228; Stop 252
ggttatgtaacttctcatggcgatc

SEQ ID NO: 433835 - DNA, 25 bp, Artificial
  probe
  misc_feature (1)..(25): SEQ ID NO: 6270; WAN024CP2; Start 227; Stop 251
aggttatgtaacttctcatggcgat

SEQ ID NO: 433836 - DNA, 25 bp, Artificial
  probe
  misc_feature (1)..(25): SEQ ID NO: 6270; WAN024CP2; Start 237; Stop 261
acttctcatggcgatcattatcact

SEQ ID NO: 433837 - DNA, 25 bp, Artificial
  probe
  misc_feature (1)..(25): SEQ ID NO: 6270; WAN024CP2; Start 49; Stop 73
taagtctgtgtgtttatgctctgaa

SEQ ID NO: 433838 - DNA, 25 bp, Artificial
  probe
  misc_feature (1)..(25): SEQ ID NO: 6270; WAN024CP2; Start 219; Stop 243
acagatcaaggttatgtaacttctc

SEQ ID NO: 433839 - DNA, 25 bp, Artificial
  probe
  misc_feature (1)..(25): SEQ ID NO: 6270; WAN024CP2; Start 48; Stop 72
ttaagtctgtgtgtttatgctctga

SEQ ID NO: 433840 - DNA, 25 bp, Artificial
  probe
  misc_feature (1)..(25): SEQ ID NO: 6270; WAN024CP2; Start 226; Stop 250
aaggttatgtaacttctcatggcga

SEQ ID NO: 433841 - DNA, 25 bp, Artificial
  probe
  misc_feature (1)..(25): SEQ ID NO: 6270; WAN024CP2; Start 225; Stop 249
caaggttatgtaacttctcatggcg

SEQ ID NO: 433842 - DNA, 25 bp, Artificial
  probe
  misc_feature (1)..(25): SEQ ID NO: 6270; WAN024CP2; Start 243; Stop 267
catggcgatcattatcactactata

SEQ ID NO: 433843 - DNA, 25 bp, Artificial
  probe
  misc_feature (1)..(25): SEQ ID NO: 6270; WAN024CP2; Start 350; Stop 374
cgtcagttaggttaagggaggatat

SEQ ID NO: 433844 - DNA, 25 bp, Artificial
  probe
  misc_feature (1)..(25): SEQ ID NO: 6270; WAN024CP2; Start 346; Stop 370
atatcgtcagttaggttaagggagg

SEQ ID NO: 433845 - DNA, 25 bp, Artificial
  probe
  misc_feature (1)..(25): SEQ ID NO: 6270; WAN024CP2; Start 338; Stop 362
agatcaagatatcgtcagttaggtt

SEQ ID NO: 433846 - DNA, 25 bp, Artificial
  probe
  misc_feature (1)..(25): SEQ ID NO: 6270; WAN024CP2; Start 337; Stop 361
aagatcaagatatcgtcagttaggt

SEQ ID NO: 433847 - DNA, 25 bp, Artificial
  probe
  misc_feature (1)..(25): SEQ ID NO: 6270; WAN024CP2; Start 221; Stop 245
agatcaaggttatgtaacttctcat

SEQ ID NO: 433848 - DNA, 25 bp, Artificial
  probe
  misc_feature (1)..(25): SEQ ID NO: 6270; WAN024CP2; Start 342; Stop 366
caagatatcgtcagttaggttaagg

SEQ ID NO: 433849 - DNA, 25 bp, Artificial
  probe
  misc_feature (1)..(25): SEQ ID NO: 6270; WAN024CP2; Start 351; Stop 375
gtcagttaggttaagggaggatata

SEQ ID NO: 433850 - DNA, 25 bp, Artificial
  probe
  misc_feature (1)..(25): SEQ ID NO: 6270; WAN024CP2; Start 222; Stop 246
gatcaaggttatgtaacttctcatg

SEQ ID NO: 433851 - DNA, 25 bp, Artificial
  probe
  misc_feature (1)..(25): SEQ ID NO: 6271; WAN0249P8; Start 40; Stop 64
gggctatttcaacttcaacctacta

SEQ ID NO: 433852 - DNA, 25 bp, Artificial
  probe
  misc_feature (1)..(25): SEQ ID NO: 6271; WAN0249P8; Start 86; Stop 110
cctgataattcaaggagttgtctat

SEQ ID NO: 433853 - DNA, 25 bp, Artificial
  probe
  misc_feature (1)..(25): SEQ ID NO: 6271; WAN0249P8; Start 41; Stop 65
ggctatttcaacttcaacctactat

SEQ ID NO: 433854 - DNA, 25 bp, Artificial
  probe
  misc_feature (1)..(25): SEQ ID NO: 6271; WAN0249P8; Start 85; Stop 109
ccctgataattcaaggagttgtcta

SEQ ID NO: 433855 - DNA, 25 bp, Artificial
  probe
  misc_feature (1)..(25): SEQ ID NO: 6271; WAN0249P8; Start 77; Stop 101
aaacaactccctgataattcaagga

SEQ ID NO: 433856 - DNA, 25 bp, Artificial
  probe
  misc_feature (1)..(25): SEQ ID NO: 6271; WAN0249P8; Start 84; Stop 108
tccctgataattcaaggagttgtct

SEQ ID NO: 433857 - DNA, 25 bp, Artificial
  probe
  misc_feature (1)..(25): SEQ ID NO: 6271; WAN0249P8; Start 49; Stop 73
caacttcaacctactataatacaga

SEQ ID NO: 433858 - DNA, 25 bp, Artificial
  probe
  misc_feature (1)..(25): SEQ ID NO: 6271; WAN0249P8; Start 48; Stop 72
tcaacttcaacctactataatacag

SEQ ID NO: 433859 - DNA, 25 bp, Artificial
  probe
  misc_feature (1)..(25): SEQ ID NO: 6271; WAN0249P8; Start 87; Stop 111
ctgataattcaaggagttgtctata

SEQ ID NO: 433860 - DNA, 25 bp, Artificial
  probe
  misc_feature (1)..(25): SEQ ID NO: 6271; WAN0249P8; Start 42; Stop 66
gctatttcaacttcaacctactata

SEQ ID NO: 433861 - DNA, 25 bp, Artificial
  probe
  misc_feature (1)..(25): SEQ ID NO: 6271; WAN0249P8; Start 47; Stop 71
ttcaacttcaacctactataataca

SEQ ID NO: 433862 - DNA, 25 bp, Artificial
  probe
  misc_feature (1)..(25): SEQ ID NO: 6271; WAN0249P8; Start 50; Stop 74
aacttcaacctactataatacagaa

SEQ ID NO: 433863 - DNA, 25 bp, Artificial
  probe
  misc_feature (1)..(25): SEQ ID NO: 6271; WAN0249P8; Start 76; Stop 100
aaaacaactccctgataattcaagg

SEQ ID NO: 433864 - DNA, 25 bp, Artificial
  probe
  misc_feature (1)..(25): SEQ ID NO: 6271; WAN0249P8; Start 39; Stop 63
ggggctatttcaacttcaacctact

SEQ ID NO: 433865 - DNA, 25 bp, Artificial
  probe
  misc_feature (1)..(25): SEQ ID NO: 6271; WAN0249P8; Start 89; Stop 113
gataattcaaggagttgtctatagt

SEQ ID NO: 433866 - DNA, 25 bp, Artificial
  probe
  misc_feature (1)..(25): SEQ ID NO: 6271; WAN0249P8; Start 88; Stop 112
tgataattcaaggagttgtctatag

SEQ ID NO: 433867 - DNA, 25 bp, Artificial
  probe
  misc_feature (1)..(25): SEQ ID NO: 6271; WAN0249P8; Start 92; Stop 116
aattcaaggagttgtctatagttaa

SEQ ID NO: 433868 - DNA, 25 bp, Artificial
  probe
  misc_feature (1)..(25): SEQ ID NO: 6271; WAN0249P8; Start 90; Stop 114
ataattcaaggagttgtctatagtt

SEQ ID NO: 433869 - DNA, 25 bp, Artificial
  probe
  misc_feature (1)..(25): SEQ ID NO: 6271; WAN0249P8; Start 51; Stop 75
acttcaacctactataatacagaaa

SEQ ID NO: 433870 - DNA, 25 bp, Artificial
  probe
  misc_feature (1)..(25): SEQ ID NO: 6271; WAN0249P8; Start 78; Stop 102
aacaactccctgataattcaaggag

SEQ ID NO: 433871 - DNA, 25 bp, Artificial
  probe
  misc_feature (1)..(25): SEQ ID NO: 6271; WAN0249P8; Start 83; Stop 107
ctccctgataattcaaggagttgtc

SEQ ID NO: 433872 - DNA, 25 bp, Artificial
  probe
  misc_feature (1)..(25): SEQ ID NO: 6271; WAN0249P8; Start 16; Stop 40
ataacaacgttttagagtaatgggg

SEQ ID NO: 433873 - DNA, 25 bp, Artificial
  probe
  misc_feature (1)..(25): SEQ ID NO: 6271; WAN0249P8; Start 15; Stop 39
tataacaacgttttagagtaatggg

SEQ ID NO: 433874 - DNA, 25 bp, Artificial
  probe
  misc_feature (1)..(25): SEQ ID NO: 6271; WAN0249P8; Start 9; Stop 33
gcattttataacaacgttttagagt

SEQ ID NO: 433875 - DNA, 25 bp, Artificial
  probe
  misc_feature (1)..(25): SEQ ID NO: 6271; WAN0249P8; Start 8; Stop 32
agcattttataacaacgttttagag

SEQ ID NO: 433876 - DNA, 25 bp, Artificial
  probe
  misc_feature (1)..(25): SEQ ID NO: 6271; WAN0249P8; Start 7; Stop 31
aagcattttataacaacgttttaga

SEQ ID NO: 433877 - DNA, 25 bp, Artificial
  probe
  misc_feature (1)..(25): SEQ ID NO: 6271; WAN0249P8; Start 14; Stop 38
ttataacaacgttttagagtaatgg

SEQ ID NO: 433878 - DNA, 25 bp, Artificial
  probe
  misc_feature (1)..(25): SEQ ID NO: 6271; WAN0249P8; Start 6; Stop 30
aaagcattttataacaacgttttag

SEQ ID NO: 433879 - DNA, 25 bp, Artificial
  probe
  misc_feature (1)..(25): SEQ ID NO: 6271; WAN0249P8; Start 4; Stop 28
ttaaagcattttataacaacgtttt

SEQ ID NO: 433880 - DNA, 25 bp, Artificial
  probe
  misc_feature (1)..(25): SEQ ID NO: 6271; WAN0249P8; Start 3; Stop 27
tttaaagcattttataacaacgttt

SEQ ID NO: 433881 - DNA, 25 bp, Artificial
  probe
  misc_feature (1)..(25): SEQ ID NO: 6272; WAN0249EH; Start 135; Stop 159
ttactagaattagctgaacgcaatc

SEQ ID NO: 433882 - DNA, 25 bp, Artificial
  probe
  misc_feature (1)..(25): SEQ ID NO: 6272; WAN0249EH; Start 136; Stop 160
tactagaattagctgaacgcaatca

SEQ ID NO: 433883 - DNA, 25 bp, Artificial
  probe
  misc_feature (1)..(25): SEQ ID NO: 6272; WAN0249EH; Start 139; Stop 163
tagaattagctgaacgcaatcactt

SEQ ID NO: 433884 - DNA, 25 bp, Artificial
  probe
  misc_feature (1)..(25): SEQ ID NO: 6272; WAN0249EH; Start 138; Stop 162
ctagaattagctgaacgcaatcact

SEQ ID NO: 433885 - DNA, 25 bp, Artificial
  probe
  misc_feature (1)..(25): SEQ ID NO: 6272; WAN0249EH; Start 137; Stop 161
actagaattagctgaacgcaatcac

SEQ ID NO: 433886 - DNA, 25 bp, Artificial
  probe
  misc_feature (1)..(25): SEQ ID NO: 6272; WAN0249EH; Start 142; Stop 166
aattagctgaacgcaatcacttgaa

SEQ ID NO: 433887 - DNA, 25 bp, Artificial
  probe
  misc_feature (1)..(25): SEQ ID NO: 6272; WAN0249EH; Start 141; Stop 165
gaattagctgaacgcaatcacttga

SEQ ID NO: 433888 - DNA, 25 bp, Artificial
  probe
  misc_feature (1)..(25): SEQ ID NO: 6272; WAN0249EH; Start 140; Stop 164
agaattagctgaacgcaatcacttg

SEQ ID NO: 433889 - DNA, 25 bp, Artificial
  probe
  misc_feature (1)..(25): SEQ ID NO: 6272; WAN0249EH; Start 192; Stop 216
atagaaatggtatggatagcgttat

SEQ ID NO: 433890 - DNA, 25 bp, Artificial
  probe
  misc_feature (1)..(25): SEQ ID NO: 6272; WAN0249EH; Start 190; Stop 214
atatagaaatggtatggatagcgtt

SEQ ID NO: 433891 - DNA, 25 bp, Artificial
  probe
  misc_feature (1)..(25): SEQ ID NO: 6272; WAN0249EH; Start 134; Stop 158
tttactagaattagctgaacgcaat

SEQ ID NO: 433892 - DNA, 25 bp, Artificial
  probe
  misc_feature (1)..(25): SEQ ID NO: 6272; WAN0249EH; Start 133; Stop 157
atttactagaattagctgaacgcaa

SEQ ID NO: 433893 - DNA, 25 bp, Artificial
  probe
  misc_feature (1)..(25): SEQ ID NO: 6272; WAN0249EH; Start 195; Stop 219
gaaatggtatggatagcgttatact

SEQ ID NO: 433894 - DNA, 25 bp, Artificial
  probe
  misc_feature (1)..(25): SEQ ID NO: 6272; WAN0249EH; Start 194; Stop 218
agaaatggtatggatagcgttatac

SEQ ID NO: 433895 - DNA, 25 bp, Artificial
  probe
  misc_feature (1)..(25): SEQ ID NO: 6272; WAN0249EH; Start 193; Stop 217
tagaaatggtatggatagcgttata

SEQ ID NO: 433896 - DNA, 25 bp, Artificial
  probe
  misc_feature (1)..(25): SEQ ID NO: 6272; WAN0249EH; Start 191; Stop 215
tatagaaatggtatggatagcgtta

SEQ ID NO: 433897 - DNA, 25 bp, Artificial
  probe
  misc_feature (1)..(25): SEQ ID NO: 6272; WAN0249EH; Start 132; Stop 156
tatttactagaattagctgaacgca

SEQ ID NO: 433898 - DNA, 25 bp, Artificial
  probe
  misc_feature (1)..(25): SEQ ID NO: 6272; WAN0249EH; Start 131; Stop 155
ctatttactagaattagctgaacgc

SEQ ID NO: 433899 - DNA, 25 bp, Artificial
  probe
  misc_feature (1)..(25): SEQ ID NO: 6272; WAN0249EH; Start 143; Stop 167
attagctgaacgcaatcacttgaaa

SEQ ID NO: 433900 - DNA, 25 bp, Artificial
  probe
  misc_feature (1)..(25): SEQ ID NO: 6272; WAN0249EH; Start 189; Stop 213
tatatagaaatggtatggatagcgt

SEQ ID NO: 433901 - DNA, 25 bp, Artificial
  probe
  misc_feature (1)..(25): SEQ ID NO: 6272; WAN0249EH; Start 130; Stop 154
cctatttactagaattagctgaacg

SEQ ID NO: 433902 - DNA, 25 bp, Artificial
  probe
  misc_feature (1)..(25): SEQ ID NO: 6272; WAN0249EH; Start 126; Stop 150
cacacctatttactagaattagctg

SEQ ID NO: 433903 - DNA, 25 bp, Artificial
  probe
  misc_feature (1)..(25): SEQ ID NO: 6272; WAN0249EH; Start 62; Stop 86
agaggcgtaccaaaatatactagaa

SEQ ID NO: 433904 - DNA, 25 bp, Artificial
  probe
  misc_feature (1)..(25): SEQ ID NO: 6272; WAN0249EH; Start 61; Stop 85
aagaggcgtaccaaaatatactaga

SEQ ID NO: 433905 - DNA, 25 bp, Artificial
  probe
  misc_feature (1)..(25): SEQ ID NO: 6272; WAN0249EH; Start 147; Stop 171
gctgaacgcaatcacttgaaaatta

SEQ ID NO: 433906 - DNA, 25 bp, Artificial
  probe
  misc_feature (1)..(25): SEQ ID NO: 6272; WAN0249EH; Start 127; Stop 151
acacctatttactagaattagctga

SEQ ID NO: 433907 - DNA, 25 bp, Artificial
  probe
  misc_feature (1)..(25): SEQ ID NO: 6272; WAN0249EH; Start 125; Stop 149
tcacacctatttactagaattagct

SEQ ID NO: 433908 - DNA, 25 bp, Artificial
  probe
  misc_feature (1)..(25): SEQ ID NO: 6272; WAN0249EH; Start 124; Stop 148
ttcacacctatttactagaattagc

SEQ ID NO: 433909 - DNA, 25 bp, Artificial
  probe
  misc_feature (1)..(25): SEQ ID NO: 6272; WAN0249EH; Start 63; Stop 87
gaggcgtaccaaaatatactagaaa

SEQ ID NO: 433910 - DNA, 25 bp, Artificial
  probe
  misc_feature (1)..(25): SEQ ID NO: 6272; WAN0249EH; Start 60; Stop 84
aaagaggcgtaccaaaatatactag

SEQ ID NO: 433911 - DNA, 25 bp, Artificial
  probe
  misc_feature (1)..(25): SEQ ID NO: 6272; WAN0249EH; Start 64; Stop 88
aggcgtaccaaaatatactagaaaa

SEQ ID NO: 433912 - DNA, 25 bp, Artificial
  probe
  misc_feature (1)..(25): SEQ ID NO: 6272; WAN0249EH; Start 59; Stop 83
aaaagaggcgtaccaaaatatacta

SEQ ID NO: 433913 - DNA, 25 bp, Artificial
  probe
  misc_feature (1)..(25): SEQ ID NO: 6272; WAN0249EH; Start 129; Stop 153
acctatttactagaattagctgaac

SEQ ID NO: 433914 - DNA, 25 bp, Artificial
  probe
  misc_feature (1)..(25): SEQ ID NO: 6273; WAN0249EG; Start 142; Stop 166
aattaactgaacgcaatcacttgaa

SEQ ID NO: 433915 - DNA, 25 bp, Artificial
  probe
  misc_feature (1)..(25): SEQ ID NO: 6273; WAN0249EG; Start 141; Stop 165
gaattaactgaacgcaatcacttga

SEQ ID NO: 433916 - DNA, 25 bp, Artificial
  probe
  misc_feature (1)..(25): SEQ ID NO: 6273; WAN0249EG; Start 140; Stop 164
agaattaactgaacgcaatcacttg

SEQ ID NO: 433917 - DNA, 25 bp, Artificial
  probe
  misc_feature (1)..(25): SEQ ID NO: 6273; WAN0249EG; Start 139; Stop 163
tagaattaactgaacgcaatcactt

SEQ ID NO: 433918 - DNA, 25 bp, Artificial
  probe
  misc_feature (1)..(25): SEQ ID NO: 6273; WAN0249EG; Start 137; Stop 161
actagaattaactgaacgcaatcac

SEQ ID NO: 433919 - DNA, 25 bp, Artificial
  probe
  misc_feature (1)..(25): SEQ ID NO: 6273; WAN0249EG; Start 138; Stop 162
ctagaattaactgaacgcaatcact

SEQ ID NO: 433920 - DNA, 25 bp, Artificial
  probe
  misc_feature (1)..(25): SEQ ID NO: 6273; WAN0249EG; Start 136; Stop 160
tactagaattaactgaacgcaatca

SEQ ID NO: 433921 - DNA, 25 bp, Artificial
  probe
  misc_feature (1)..(25): SEQ ID NO: 6273; WAN0249EG; Start 135; Stop 159
ttactagaattaactgaacgcaatc

SEQ ID NO: 433922 - DNA, 25 bp, Artificial
  probe
  misc_feature (1)..(25): SEQ ID NO: 6273; WAN0249EG; Start 143; Stop 167
attaactgaacgcaatcacttgaaa

SEQ ID NO: 433923 - DNA, 25 bp, Artificial
  probe
  misc_feature (1)..(25): SEQ ID NO: 6273; WAN0249EG; Start 227; Stop 251
tttacaaatggtatggatagcgtta

SEQ ID NO: 433924 - DNA, 25 bp, Artificial
  probe
  misc_feature (1)..(25): SEQ ID NO: 6273; WAN0249EG; Start 228; Stop 252
ttacaaatggtatggatagcgttat

SEQ ID NO: 433925 - DNA, 25 bp, Artificial
  probe
  misc_feature (1)..(25): SEQ ID NO: 6273; WAN0249EG; Start 230; Stop 254
acaaatggtatggatagcgttatac

SEQ ID NO: 433926 - DNA, 25 bp, Artificial
  probe
  misc_feature (1)..(25): SEQ ID NO: 6273; WAN0249EG; Start 229; Stop 253
tacaaatggtatggatagcgttata

SEQ ID NO: 433927 - DNA, 25 bp, Artificial
  probe
  misc_feature (1)..(25): SEQ ID NO: 6273; WAN0249EG; Start 231; Stop 255
caaatggtatggatagcgttatact

SEQ ID NO: 433928 - DNA, 25 bp, Artificial
  probe
  misc_feature (1)..(25): SEQ ID NO: 6273; WAN0249EG; Start 134; Stop 158
tttactagaattaactgaacgcaat

SEQ ID NO: 433929 - DNA, 25 bp, Artificial
  probe
  misc_feature (1)..(25): SEQ ID NO: 6273; WAN0249EG; Start 133; Stop 157
atttactagaattaactgaacgcaa

SEQ ID NO: 433930 - DNA, 25 bp, Artificial
  probe
  misc_feature (1)..(25): SEQ ID NO: 6273; WAN0249EG; Start 226; Stop 250
ttttacaaatggtatggatagcgtt

SEQ ID NO: 433931 - DNA, 25 bp, Artificial
  probe
  misc_feature (1)..(25): SEQ ID NO: 6273; WAN0249EG; Start 145; Stop 169
taactgaacgcaatcacttgaaaat

SEQ ID NO: 433932 - DNA, 25 bp, Artificial
  probe
  misc_feature (1)..(25): SEQ ID NO: 6273; WAN0249EG; Start 144; Stop 168
ttaactgaacgcaatcacttgaaaa

SEQ ID NO: 433933 - DNA, 25 bp, Artificial
  probe
  misc_feature (1)..(25): SEQ ID NO: 6273; WAN0249EG; Start 147; Stop 171
actgaacgcaatcacttgaaaatta

SEQ ID NO: 433934 - DNA, 25 bp, Artificial
  probe
  misc_feature (1)..(25): SEQ ID NO: 6273; WAN0249EG; Start 146; Stop 170
aactgaacgcaatcacttgaaaatt

SEQ ID NO: 433935 - DNA, 25 bp, Artificial
  probe
  misc_feature (1)..(25): SEQ ID NO: 6273; WAN0249EG; Start 132; Stop 156
tatttactagaattaactgaacgca

SEQ ID NO: 433936 - DNA, 25 bp, Artificial
  probe
  misc_feature (1)..(25): SEQ ID NO: 6273; WAN0249EG; Start 225; Stop 249
attttacaaatggtatggatagcgt

SEQ ID NO: 433937 - DNA, 25 bp, Artificial
  probe
  misc_feature (1)..(25): SEQ ID NO: 6273; WAN0249EG; Start 187; Stop 211
gatatatagaaatcctatcgcttcg

SEQ ID NO: 433938 - DNA, 25 bp, Artificial
  probe
  misc_feature (1)..(25): SEQ ID NO: 6273; WAN0249EG; Start 131; Stop 155
ctatttactagaattaactgaacgc

SEQ ID NO: 433939 - DNA, 25 bp, Artificial
  probe
  misc_feature (1)..(25): SEQ ID NO: 6273; WAN0249EG; Start 204; Stop 228
tcgcttcgataggatttctatattt

SEQ ID NO: 433940 - DNA, 25 bp, Artificial
  probe
  misc_feature (1)..(25): SEQ ID NO: 6273; WAN0249EG; Start 62; Stop 86
agatgcgtaccaaaatatactagaa

SEQ ID NO: 433941 - DNA, 25 bp, Artificial
  probe
  misc_feature (1)..(25): SEQ ID NO: 6273; WAN0249EG; Start 61; Stop 85
aagatgcgtaccaaaatatactaga

SEQ ID NO: 433942 - DNA, 25 bp, Artificial
  probe
  misc_feature (1)..(25): SEQ ID NO: 6273; WAN0249EG; Start 224; Stop 248
tattttacaaatggtatggatagcg

SEQ ID NO: 433943 - DNA, 25 bp, Artificial
  probe
  misc_feature (1)..(25): SEQ ID NO: 6273; WAN0249EG; Start 63; Stop 87
gatgcgtaccaaaatatactagaaa

SEQ ID NO: 433944 - DNA, 25 bp, Artificial
  probe
  misc_feature (1)..(25): SEQ ID NO: 6273; WAN0249EG; Start 60; Stop 84
aaagatgcgtaccaaaatatactag

SEQ ID NO: 433945 - DNA, 25 bp, Artificial
  probe
  misc_feature (1)..(25): SEQ ID NO: 6273; WAN0249EG; Start 130; Stop 154
cctatttactagaattaactgaacg

SEQ ID NO: 433946 - DNA, 25 bp, Artificial
  probe
  misc_feature (1)..(25): SEQ ID NO: 6273; WAN0249EG; Start 126; Stop 150
cacacctatttactagaattaactg

SEQ ID NO: 433947 - DNA, 25 bp, Artificial
  probe
  misc_feature (1)..(25): SEQ ID NO: 6274; WAN024BOF-3; Start 171; Stop 195
gaagaatccaatgttagcgatagtg

SEQ ID NO: 433948 - DNA, 25 bp, Artificial
  probe
  misc_feature (1)..(25): SEQ ID NO: 6274; WAN024BOF-3; Start 170; Stop 194
tgaagaatccaatgttagcgatagt

SEQ ID NO: 433949 - DNA, 25 bp, Artificial
  probe
  misc_feature (1)..(25): SEQ ID NO: 6274; WAN024BOF-3; Start 167; Stop 191
gaatgaagaatccaatgttagcgat

SEQ ID NO: 433950 - DNA, 25 bp, Artificial
  probe
  misc_feature (1)..(25): SEQ ID NO: 6274; WAN024BOF-3; Start 172; Stop 196
aagaatccaatgttagcgatagtgt

SEQ ID NO: 433951 - DNA, 25 bp, Artificial
  probe
  misc_feature (1)..(25): SEQ ID NO: 6274; WAN024BOF-3; Start 1588; Stop 1612
aatatcaatcggaacaactaagacg

SEQ ID NO: 433952 - DNA, 25 bp, Artificial
  probe
  misc_feature (1)..(25): SEQ ID NO: 6274; WAN024BOF-3; Start 173; Stop 197
agaatccaatgttagcgatagtgtc

SEQ ID NO: 433953 - DNA, 25 bp, Artificial
  probe
  misc_feature (1)..(25): SEQ ID NO: 6274; WAN024BOF-3; Start 700; Stop 724
ctatgaatggcttaactgctggtat

SEQ ID NO: 433954 - DNA, 25 bp, Artificial
  probe
  misc_feature (1)..(25): SEQ ID NO: 6274; WAN024BOF-3; Start 169; Stop 193
atgaagaatccaatgttagcgatag

SEQ ID NO: 433955 - DNA, 25 bp, Artificial
  probe
  misc_feature (1)..(25): SEQ ID NO: 6274; WAN024BOF-3; Start 701; Stop 725
tatgaatggcttaactgctggtatg

SEQ ID NO: 433956 - DNA, 25 bp, Artificial
  probe
  misc_feature (1)..(25): SEQ ID NO: 6274; WAN024BOF-3; Start 1597; Stop 1621
cggaacaactaagacgagataatag

SEQ ID NO: 433957 - DNA, 25 bp, Artificial
  probe
  misc_feature (1)..(25): SEQ ID NO: 6274; WAN024BOF-3; Start 1023; Stop 1047
accaatcaacctgtatcatctgtta

SEQ ID NO: 433958 - DNA, 25 bp, Artificial
  probe
  misc_feature (1)..(25): SEQ ID NO: 6274; WAN024BOF-3; Start 1022; Stop 1046
taccaatcaacctgtatcatctgtt

SEQ ID NO: 433959 - DNA, 25 bp, Artificial
  probe
  misc_feature (1)..(25): SEQ ID NO: 6274; WAN024BOF-3; Start 1024; Stop 1048
ccaatcaacctgtatcatctgttac

SEQ ID NO: 433960 - DNA, 25 bp, Artificial
  probe
  misc_feature (1)..(25): SEQ ID NO: 6274; WAN024BOF-3; Start 1598; Stop 1622
ggaacaactaagacgagataatagg

SEQ ID NO: 433961 - DNA, 25 bp, Artificial
  probe
  misc_feature (1)..(25): SEQ ID NO: 6274; WAN024BOF-3; Start 168; Stop 192
aatgaagaatccaatgttagcgata

SEQ ID NO: 433962 - DNA, 25 bp, Artificial
  probe
  misc_feature (1)..(25): SEQ ID NO: 6274; WAN024BOF-3; Start 1021; Stop 1045
gtaccaatcaacctgtatcatctgt

SEQ ID NO: 433963 - DNA, 25 bp, Artificial
  probe
  misc_feature (1)..(25): SEQ ID NO: 6274; WAN024BOF-3; Start 174; Stop 198
gaatccaatgttagcgatagtgtcc

SEQ ID NO: 433964 - DNA, 25 bp, Artificial
  probe
  misc_feature (1)..(25): SEQ ID NO: 6274; WAN024BOF-3; Start 1025; Stop 1049
caatcaacctgtatcatctgttact

SEQ ID NO: 433965 - DNA, 25 bp, Artificial
  probe
  misc_feature (1)..(25): SEQ ID NO: 6274; WAN024BOF-3; Start 1348; Stop 1372
gcatgatgattgatactagaccaga

SEQ ID NO: 433966 - DNA, 25 bp, Artificial
  probe
  misc_feature (1)..(25): SEQ ID NO: 6274; WAN024BOF-3; Start 1347; Stop 1371
agcatgatgattgatactagaccag

SEQ ID NO: 433967 - DNA, 25 bp, Artificial
  probe
  misc_feature (1)..(25): SEQ ID NO: 6274; WAN024BOF-3; Start 1460; Stop 1484
tactatggacaagtctagcgaacta

SEQ ID NO: 433968 - DNA, 25 bp, Artificial
  probe
  misc_feature (1)..(25): SEQ ID NO: 6274; WAN024BOF-3; Start 1346; Stop 1370
aagcatgatgattgatactagacca

SEQ ID NO: 433969 - DNA, 25 bp, Artificial
  probe
  misc_feature (1)..(25): SEQ ID NO: 6274; WAN024BOF-3; Start 705; Stop 729
aatggcttaactgctggtatggata

SEQ ID NO: 433970 - DNA, 25 bp, Artificial
  probe
  misc_feature (1)..(25): SEQ ID NO: 6274; WAN024BOF-3; Start 345; Stop 369
cgacaagttatatcatacgaaggta

SEQ ID NO: 433971 - DNA, 25 bp, Artificial
  probe
  misc_feature (1)..(25): SEQ ID NO: 6274; WAN024BOF-3; Start 1459; Stop 1483
ttactatggacaagtctagcgaact

SEQ ID NO: 433972 - DNA, 25 bp, Artificial
  probe
  misc_feature (1)..(25): SEQ ID NO: 6274; WAN024BOF-3; Start 1458; Stop 1482
gttactatggacaagtctagcgaac

SEQ ID NO: 433973 - DNA, 25 bp, Artificial
  probe
  misc_feature (1)..(25): SEQ ID NO: 6274; WAN024BOF-3; Start 1457; Stop 1481
agttactatggacaagtctagcgaa

SEQ ID NO: 433974 - DNA, 25 bp, Artificial
  probe
  misc_feature (1)..(25): SEQ ID NO: 6274; WAN024BOF-3; Start 1456; Stop 1480
aagttactatggacaagtctagcga

SEQ ID NO: 433975 - DNA, 25 bp, Artificial
  probe
  misc_feature (1)..(25): SEQ ID NO: 6274; WAN024BOF-3; Start 1601; Stop 1625
acaactaagacgagataataggatg

SEQ ID NO: 433976 - DNA, 25 bp, Artificial
  probe
  misc_feature (1)..(25): SEQ ID NO: 6274; WAN024BOF-3; Start 655; Stop 679
aattggcaacattgaacgaagtctt

SEQ ID NO: 433977 - DNA, 25 bp, Artificial
  probe
  misc_feature (1)..(25): SEQ ID NO: 6274; WAN024BOF-3; Start 1599; Stop 1623
gaacaactaagacgagataatagga

SEQ ID NO: 433978 - DNA, 25 bp, Artificial
  probe
  misc_feature (1)..(25): SEQ ID NO: 6274; WAN024BOF-3; Start 1463; Stop 1487
tatggacaagtctagcgaactactc

SEQ ID NO: 433979 - DNA, 25 bp, Artificial
  probe
  misc_feature (1)..(25): SEQ ID NO: 6274; WAN024BOF-3; Start 1462; Stop 1486
ctatggacaagtctagcgaactact

SEQ ID NO: 433980 - DNA, 25 bp, Artificial
  probe
  misc_feature (1)..(25): SEQ ID NO: 6275; WAN024DEE; Start 1244; Stop 1268
ataataatgctgtcggtagagatgg

SEQ ID NO: 433981 - DNA, 25 bp, Artificial
  probe
  misc_feature (1)..(25): SEQ ID NO: 6275; WAN024DEE; Start 606; Stop 630
agaagatgatacactaagcgaagag

SEQ ID NO: 433982 - DNA, 25 bp, Artificial
  probe
  misc_feature (1)..(25): SEQ ID NO: 6275; WAN024DEE; Start 605; Stop 629
gagaagatgatacactaagcgaaga

SEQ ID NO: 433983 - DNA, 25 bp, Artificial
  probe
  misc_feature (1)..(25): SEQ ID NO: 6275; WAN024DEE; Start 604; Stop 628
agagaagatgatacactaagcgaag

SEQ ID NO: 433984 - DNA, 25 bp, Artificial
  probe
  misc_feature (1)..(25): SEQ ID NO: 6275; WAN024DEE; Start 1689; Stop 1713
ccgtgaacttgcttatcgtaatatc

SEQ ID NO: 433985 - DNA, 25 bp, Artificial
  probe
  misc_feature (1)..(25): SEQ ID NO: 6275; WAN024DEE; Start 970; Stop 994
ggtggtagccttattgagaatgtta

SEQ ID NO: 433986 - DNA, 25 bp, Artificial
  probe
  misc_feature (1)..(25): SEQ ID NO: 6275; WAN024DEE; Start 831; Stop 855
acattatacgattcacaatactgcg

SEQ ID NO: 433987 - DNA, 25 bp, Artificial
  probe
  misc_feature (1)..(25): SEQ ID NO: 6275; WAN024DEE; Start 1241; Stop 1265
gagataataatgctgtcggtagaga

SEQ ID NO: 433988 - DNA, 25 bp, Artificial
  probe
  misc_feature (1)..(25): SEQ ID NO: 6275; WAN024DEE; Start 1240; Stop 1264
ggagataataatgctgtcggtagag

SEQ ID NO: 433989 - DNA, 25 bp, Artificial
  probe
  misc_feature (1)..(25): SEQ ID NO: 6275; WAN024DEE; Start 1690; Stop 1714
cgtgaacttgcttatcgtaatatcg

SEQ ID NO: 433990 - DNA, 25 bp, Artificial
  probe
  misc_feature (1)..(25): SEQ ID NO: 6275; WAN024DEE; Start 1688; Stop 1712
accgtgaacttgcttatcgtaatat

SEQ ID NO: 433991 - DNA, 25 bp, Artificial
  probe
  misc_feature (1)..(25): SEQ ID NO: 6275; WAN024DEE; Start 1055; Stop 1079
gtggtggtagattagttaatgttgc

SEQ ID NO: 433992 - DNA, 25 bp, Artificial
  probe
  misc_feature (1)..(25): SEQ ID NO: 6275; WAN024DEE; Start 602; Stop 626
gtagagaagatgatacactaagcga

SEQ ID NO: 433993 - DNA, 25 bp, Artificial
  probe
  misc_feature (1)..(25): SEQ ID NO: 6275; WAN024DEE; Start 2253; Stop 2277
ggcacttacttacctcaatcgttat

SEQ ID NO: 433994 - DNA, 25 bp, Artificial
  probe
  misc_feature (1)..(25): SEQ ID NO: 6275; WAN024DEE; Start 1864; Stop 1888
attatgattcactatgcggatggta

SEQ ID NO: 433995 - DNA, 25 bp, Artificial
  probe
  misc_feature (1)..(25): SEQ ID NO: 6275; WAN024DEE; Start 2254; Stop 2278
gcacttacttacctcaatcgttatt

SEQ ID NO: 433996 - DNA, 25 bp, Artificial
  probe
  misc_feature (1)..(25): SEQ ID NO: 6275; WAN024DEE; Start 1048; Stop 1072
attgacagtggtggtagattagtta

SEQ ID NO: 433997 - DNA, 25 bp, Artificial
  probe
  misc_feature (1)..(25): SEQ ID NO: 6275; WAN024DEE; Start 601; Stop 625
cgtagagaagatgatacactaagcg

SEQ ID NO: 433998 - DNA, 25 bp, Artificial
  probe
  misc_feature (1)..(25): SEQ ID NO: 6275; WAN024DEE; Start 3454; Stop 3478
atggatagacaataccgtagtggaa

SEQ ID NO: 433999 - DNA, 25 bp, Artificial
  probe
  misc_feature (1)..(25): SEQ ID NO: 6275; WAN024DEE; Start 3453; Stop 3477
aatggatagacaataccgtagtgga

SEQ ID NO: 434000 - DNA, 25 bp, Artificial
  probe
  misc_feature (1)..(25): SEQ ID NO: 6275; WAN024DEE; Start 1047; Stop 1071
aattgacagtggtggtagattagtt

SEQ ID NO: 434001 - DNA, 25 bp, Artificial
  probe
  misc_feature (1)..(25): SEQ ID NO: 6275; WAN024DEE; Start 1364; Stop 1388
tagaagacactgttgctatgatgaa

SEQ ID NO: 434002 - DNA, 25 bp, Artificial
  probe
  misc_feature (1)..(25): SEQ ID NO: 6275; WAN024DEE; Start 1245; Stop 1269
taataatgctgtcggtagagatgga

SEQ ID NO: 434003 - DNA, 25 bp, Artificial
  probe
  misc_feature (1)..(25): SEQ ID NO: 6275; WAN024DEE; Start 1863; Stop 1887
aattatgattcactatgcggatggt

SEQ ID NO: 434004 - DNA, 25 bp, Artificial
  probe
  misc_feature (1)..(25): SEQ ID NO: 6275; WAN024DEE; Start 1049; Stop 1073
ttgacagtggtggtagattagttaa

SEQ ID NO: 434005 - DNA, 25 bp, Artificial
  probe
  misc_feature (1)..(25): SEQ ID NO: 6275; WAN024DEE; Start 1687; Stop 1711
gaccgtgaacttgcttatcgtaata

SEQ ID NO: 434006 - DNA, 25 bp, Artificial
  probe
  misc_feature (1)..(25): SEQ ID NO: 6275; WAN024DEE; Start 1243; Stop 1267
gataataatgctgtcggtagagatg

SEQ ID NO: 434007 - DNA, 25 bp, Artificial
  probe
  misc_feature (1)..(25): SEQ ID NO: 6275; WAN024DEE; Start 1242; Stop 1266
agataataatgctgtcggtagagat

SEQ ID NO: 434008 - DNA, 25 bp, Artificial
  probe
  misc_feature (1)..(25): SEQ ID NO: 6275; WAN024DEE; Start 1050; Stop 1074
tgacagtggtggtagattagttaat

SEQ ID NO: 434009 - DNA, 25 bp, Artificial
  probe
  misc_feature (1)..(25): SEQ ID NO: 6275; WAN024DEE; Start 3241; Stop 3265
ggtgagtatggagcattaggtatta

SEQ ID NO: 434010 - DNA, 25 bp, Artificial
  probe
  misc_feature (1)..(25): SEQ ID NO: 6275; WAN024DEE; Start 603; Stop 627
tagagaagatgatacactaagcgaa

SEQ ID NO: 434011 - DNA, 25 bp, Artificial
  probe
  misc_feature (1)..(25): SEQ ID NO: 6275; WAN024DEE; Start 1085; Stop 1109
ttggtaatgtaacttctgttggaga

SEQ ID NO: 434012 - DNA, 25 bp, Artificial
  probe
  misc_feature (1)..(25): SEQ ID NO: 6275; WAN024DEE; Start 1051; Stop 1075
gacagtggtggtagattagttaatg

SEQ ID NO: 434013 - DNA, 25 bp, Artificial
  probe
  misc_feature (1)..(25): SEQ ID NO: 6276; WAN024GF5; Start 290; Stop 314
cttcagcaacaggtattgtcaactt

SEQ ID NO: 434014 - DNA, 25 bp, Artificial
  probe
  misc_feature (1)..(25): SEQ ID NO: 6276; WAN024GF5; Start 291; Stop 315
ttcagcaacaggtattgtcaacttg

SEQ ID NO: 434015 - DNA, 25 bp, Artificial
  probe
  misc_feature (1)..(25): SEQ ID NO: 6276; WAN024GF5; Start 430; Stop 454
cttgccttgatcgtctaccgtaatt

SEQ ID NO: 434016 - DNA, 25 bp, Artificial
  probe
  misc_feature (1)..(25): SEQ ID NO: 6276; WAN024GF5; Start 434; Stop 458
ccttgatcgtctaccgtaatttctc

SEQ ID NO: 434017 - DNA, 25 bp, Artificial
  probe
  misc_feature (1)..(25): SEQ ID NO: 6276; WAN024GF5; Start 292; Stop 316
tcagcaacaggtattgtcaacttga

SEQ ID NO: 434018 - DNA, 25 bp, Artificial
  probe
  misc_feature (1)..(25): SEQ ID NO: 6276; WAN024GF5; Start 435; Stop 459
cttgatcgtctaccgtaatttctca

SEQ ID NO: 434019 - DNA, 25 bp, Artificial
  probe
  misc_feature (1)..(25): SEQ ID NO: 6276; WAN024GF5; Start 436; Stop 460
ttgatcgtctaccgtaatttctcac

SEQ ID NO: 434020 - DNA, 25 bp, Artificial
  probe
  misc_feature (1)..(25): SEQ ID NO: 6276; WAN024GF5; Start 451; Stop 475
aatttctcacgttacttgggtattg

SEQ ID NO: 434021 - DNA, 25 bp, Artificial
  probe
  misc_feature (1)..(25): SEQ ID NO: 6276; WAN024GF5; Start 431; Stop 455
ttgccttgatcgtctaccgtaattt

SEQ ID NO: 434022 - DNA, 25 bp, Artificial
  probe
  misc_feature (1)..(25): SEQ ID NO: 6276; WAN024GF5; Start 433; Stop 457
gccttgatcgtctaccgtaatttct

SEQ ID NO: 434023 - DNA, 25 bp, Artificial
  probe
  misc_feature (1)..(25): SEQ ID NO: 6276; WAN024GF5; Start 332; Stop 356
atgaatacgaaggcgatgcagaatt

SEQ ID NO: 434024 - DNA, 25 bp, Artificial
  probe
  misc_feature (1)..(25): SEQ ID NO: 6276; WAN024GF5; Start 220; Stop 244
catatcactgtggactttgaccaac

SEQ ID NO: 434025 - DNA, 25 bp, Artificial
  probe
  misc_feature (1)..(25): SEQ ID NO: 6276; WAN024GF5; Start 452; Stop 476
atttctcacgttacttgggtattgc

SEQ ID NO: 434026 - DNA, 25 bp, Artificial
  probe
  misc_feature (1)..(25): SEQ ID NO: 6276; WAN024GF5; Start 289; Stop 313
gcttcagcaacaggtattgtcaact

SEQ ID NO: 434027 - DNA, 25 bp, Artificial
  probe
  misc_feature (1)..(25): SEQ ID NO: 6276; WAN024GF5; Start 450; Stop 474
taatttctcacgttacttgggtatt

SEQ ID NO: 434028 - DNA, 25 bp, Artificial
  probe
  misc_feature (1)..(25): SEQ ID NO: 6276; WAN024GF5; Start 432; Stop 456
tgccttgatcgtctaccgtaatttc

SEQ ID NO: 434029 - DNA, 25 bp, Artificial
  probe
  misc_feature (1)..(25): SEQ ID NO: 6276; WAN024GF5; Start 335; Stop 359
aatacgaaggcgatgcagaattgaa

SEQ ID NO: 434030 - DNA, 25 bp, Artificial
  probe
  misc_feature (1)..(25): SEQ ID NO: 6276; WAN024GF5; Start 2; Stop 26
cccttcaaccaatcaaagaaaagat

SEQ ID NO: 434031 - DNA, 25 bp, Artificial
  probe
  misc_feature (1)..(25): SEQ ID NO: 6276; WAN024GF5; Start 331; Stop 355
gatgaatacgaaggcgatgcagaat

SEQ ID NO: 434032 - DNA, 25 bp, Artificial
  probe
  misc_feature (1)..(25): SEQ ID NO: 6276; WAN024GF5; Start 107; Stop 131
gtgataaccaaccagatgttgtctt

SEQ ID NO: 434033 - DNA, 25 bp, Artificial
  probe
  misc_feature (1)..(25): SEQ ID NO: 6276; WAN024GF5; Start 1; Stop 25
acccttcaaccaatcaaagaaaaga

SEQ ID NO: 434034 - DNA, 25 bp, Artificial
  probe
  misc_feature (1)..(25): SEQ ID NO: 6276; WAN024GF5; Start 236; Stop 260
ttgaccaaccaatcgcatgtacttg

SEQ ID NO: 434035 - DNA, 25 bp, Artificial
  probe
  misc_feature (1)..(25): SEQ ID NO: 6276; WAN024GF5; Start 371; Stop 395
acgacggtgaagaagtaacagctaa

SEQ ID NO: 434036 - DNA, 25 bp, Artificial
  probe
  misc_feature (1)..(25): SEQ ID NO: 6276; WAN024GF5; Start 449; Stop 473
gtaatttctcacgttacttgggtat

SEQ ID NO: 434037 - DNA, 25 bp, Artificial
  probe
  misc_feature (1)..(25): SEQ ID NO: 6276; WAN024GF5; Start 334; Stop 358
gaatacgaaggcgatgcagaattga

SEQ ID NO: 434038 - DNA, 25 bp, Artificial
  probe
  misc_feature (1)..(25): SEQ ID NO: 6276; WAN024GF5; Start 454; Stop 478
ttctcacgttacttgggtattgcat

SEQ ID NO: 434039 - DNA, 25 bp, Artificial
  probe
  misc_feature (1)..(25): SEQ ID NO: 6276; WAN024GF5; Start 429; Stop 453
ccttgccttgatcgtctaccgtaat

SEQ ID NO: 434040 - DNA, 25 bp, Artificial
  probe
  misc_feature (1)..(25): SEQ ID NO: 6276; WAN024GF5; Start 221; Stop 245
atatcactgtggactttgaccaacc

SEQ ID NO: 434041 - DNA, 25 bp, Artificial
  probe
  misc_feature (1)..(25): SEQ ID NO: 6276; WAN024GF5; Start 219; Stop 243
ccatatcactgtggactttgaccaa

SEQ ID NO: 434042 - DNA, 25 bp, Artificial
  probe
  misc_feature (1)..(25): SEQ ID NO: 6276; WAN024GF5; Start 453; Stop 477
tttctcacgttacttgggtattgca

SEQ ID NO: 434043 - DNA, 25 bp, Artificial
  probe
  misc_feature (1)..(25): SEQ ID NO: 6276; WAN024GF5; Start 364; Stop 388
ttgatcgacgacggtgaagaagtaa

SEQ ID NO: 434044 - DNA, 25 bp, Artificial
  probe
  misc_feature (1)..(25): SEQ ID NO: 6276; WAN024GF5; Start 372; Stop 396
cgacggtgaagaagtaacagctaaa

SEQ ID NO: 434045 - DNA, 25 bp, Artificial
  probe
  misc_feature (1)..(25): SEQ ID NO: 6276; WAN024GF5; Start 333; Stop 357
tgaatacgaaggcgatgcagaattg

SEQ ID NO: 434046 - DNA, 25 bp, Artificial
  probe
  misc_feature (1)..(25): SEQ ID NO: 6277; WAN0249PD; Start 51; Stop 75
cgtcgccttaccgtatatatatgtt

SEQ ID NO: 434047 - DNA, 25 bp, Artificial
  probe
  misc_feature (1)..(25): SEQ ID NO: 6277; WAN0249PD; Start 49; Stop 73
agcgtcgccttaccgtatatatatg

SEQ ID NO: 434048 - DNA, 25 bp, Artificial
  probe
  misc_feature (1)..(25): SEQ ID NO: 6277; WAN0249PD; Start 48; Stop 72
cagcgtcgccttaccgtatatatat

SEQ ID NO: 434049 - DNA, 25 bp, Artificial
  probe
  misc_feature (1)..(25): SEQ ID NO: 6277; WAN0249PD; Start 52; Stop 76
gtcgccttaccgtatatatatgtta

SEQ ID NO: 434050 - DNA, 25 bp, Artificial
  probe
  misc_feature (1)..(25): SEQ ID NO: 6277; WAN0249PD; Start 50; Stop 74
gcgtcgccttaccgtatatatatgt

SEQ ID NO: 434051 - DNA, 25 bp, Artificial
  probe
  misc_feature (1)..(25): SEQ ID NO: 6277; WAN0249PD; Start 53; Stop 77
tcgccttaccgtatatatatgttac

SEQ ID NO: 434052 - DNA, 25 bp, Artificial
  probe
  misc_feature (1)..(25): SEQ ID NO: 6277; WAN0249PD; Start 54; Stop 78
cgccttaccgtatatatatgttact

SEQ ID NO: 434053 - DNA, 25 bp, Artificial
  probe
  misc_feature (1)..(25): SEQ ID NO: 6277; WAN0249PD; Start 47; Stop 71
tcagcgtcgccttaccgtatatata

SEQ ID NO: 434054 - DNA, 25 bp, Artificial
  probe
  misc_feature (1)..(25): SEQ ID NO: 6277; WAN0249PD; Start 61; Stop 85
ccgtatatatatgttactgacttcg

SEQ ID NO: 434055 - DNA, 25 bp, Artificial
  probe
  misc_feature (1)..(25): SEQ ID NO: 6277; WAN0249PD; Start 55; Stop 79
gccttaccgtatatatatgttactg

SEQ ID NO: 434056 - DNA, 25 bp, Artificial
  probe
  misc_feature (1)..(25): SEQ ID NO: 6277; WAN0249PD; Start 129; Stop 153
cgtcagtttcatccacaacctcaaa

SEQ ID NO: 434057 - DNA, 25 bp, Artificial
  probe
  misc_feature (1)..(25): SEQ ID NO: 6277; WAN0249PD; Start 126; Stop 150
cttcgtcagtttcatccacaacctc

SEQ ID NO: 434058 - DNA, 25 bp, Artificial
  probe
  misc_feature (1)..(25): SEQ ID NO: 6277; WAN0249PD; Start 130; Stop 154
gtcagtttcatccacaacctcaaaa

SEQ ID NO: 434059 - DNA, 25 bp, Artificial
  probe
  misc_feature (1)..(25): SEQ ID NO: 6277; WAN0249PD; Start 62; Stop 86
cgtatatatatgttactgacttcgt

SEQ ID NO: 434060 - DNA, 25 bp, Artificial
  probe
  misc_feature (1)..(25): SEQ ID NO: 6277; WAN0249PD; Start 81; Stop 105
cttcgtcagttctatctgccacctc

SEQ ID NO: 434061 - DNA, 25 bp, Artificial
  probe
  misc_feature (1)..(25): SEQ ID NO: 6277; WAN0249PD; Start 79; Stop 103
gacttcgtcagttctatctgccacc

SEQ ID NO: 434062 - DNA, 25 bp, Artificial
  probe
  misc_feature (1)..(25): SEQ ID NO: 6277; WAN0249PD; Start 128; Stop 152
tcgtcagtttcatccacaacctcaa

SEQ ID NO: 434063 - DNA, 25 bp, Artificial
  probe
  misc_feature (1)..(25): SEQ ID NO: 6277; WAN0249PD; Start 127; Stop 151
ttcgtcagtttcatccacaacctca

SEQ ID NO: 434064 - DNA, 25 bp, Artificial
  probe
  misc_feature (1)..(25): SEQ ID NO: 6277; WAN0249PD; Start 124; Stop 148
gacttcgtcagtttcatccacaacc

SEQ ID NO: 434065 - DNA, 25 bp, Artificial
  probe
  misc_feature (1)..(25): SEQ ID NO: 6277; WAN0249PD; Start 135; Stop 159
tttcatccacaacctcaaaacagtg

SEQ ID NO: 434066 - DNA, 25 bp, Artificial
  probe
  misc_feature (1)..(25): SEQ ID NO: 6277; WAN0249PD; Start 125; Stop 149
acttcgtcagtttcatccacaacct

SEQ ID NO: 434067 - DNA, 25 bp, Artificial
  probe
  misc_feature (1)..(25): SEQ ID NO: 6277; WAN0249PD; Start 60; Stop 84
accgtatatatatgttactgacttc

SEQ ID NO: 434068 - DNA, 25 bp, Artificial
  probe
  misc_feature (1)..(25): SEQ ID NO: 6277; WAN0249PD; Start 86; Stop 110
tcagttctatctgccacctcaaaac

SEQ ID NO: 434069 - DNA, 25 bp, Artificial
  probe
  misc_feature (1)..(25): SEQ ID NO: 6277; WAN0249PD; Start 85; Stop 109
gtcagttctatctgccacctcaaaa

SEQ ID NO: 434070 - DNA, 25 bp, Artificial
  probe
  misc_feature (1)..(25): SEQ ID NO: 6277; WAN0249PD; Start 133; Stop 157
agtttcatccacaacctcaaaacag

SEQ ID NO: 434071 - DNA, 25 bp, Artificial
  probe
  misc_feature (1)..(25): SEQ ID NO: 6277; WAN0249PD; Start 84; Stop 108
cgtcagttctatctgccacctcaaa

SEQ ID NO: 434072 - DNA, 25 bp, Artificial
  probe
  misc_feature (1)..(25): SEQ ID NO: 6277; WAN0249PD; Start 131; Stop 155
tcagtttcatccacaacctcaaaac

SEQ ID NO: 434073 - DNA, 25 bp, Artificial
  probe
  misc_feature (1)..(25): SEQ ID NO: 6277; WAN0249PD; Start 134; Stop 158
gtttcatccacaacctcaaaacagt

SEQ ID NO: 434074 - DNA, 25 bp, Artificial
  probe
  misc_feature (1)..(25): SEQ ID NO: 6277; WAN0249PD; Start 132; Stop 156
cagtttcatccacaacctcaaaaca

SEQ ID NO: 434075 - DNA, 25 bp, Artificial
  probe
  misc_feature (1)..(25): SEQ ID NO: 6277; WAN0249PD; Start 56; Stop 80
ccttaccgtatatatatgttactga

SEQ ID NO: 434076 - DNA, 25 bp, Artificial
  probe
  misc_feature (1)..(25): SEQ ID NO: 6277; WAN0249PD; Start 87; Stop 111
cagttctatctgccacctcaaaacg

SEQ ID NO: 434077 - DNA, 25 bp, Artificial
  probe
  misc_feature (1)..(25): SEQ ID NO: 6277; WAN0249PD; Start 210; Stop 234
agtataagttttccttagagaaagc

SEQ ID NO: 434078 - DNA, 25 bp, Artificial
  probe
  misc_feature (1)..(25): SEQ ID NO: 6277; WAN0249PD; Start 78; Stop 102
tgacttcgtcagttctatctgccac

SEQ ID NO: 434079 - DNA, 25 bp, Artificial
  probe
  misc_feature (1)..(25): SEQ ID NO: 6278; WAN024AJT; Start 15; Stop 39
ataaaataagaaaaccctcatccgc

SEQ ID NO: 434080 - DNA, 25 bp, Artificial
  probe
  misc_feature (1)..(25): SEQ ID NO: 6278; WAN024AJT; Start 16; Stop 40
taaaataagaaaaccctcatccgca

SEQ ID NO: 434081 - DNA, 25 bp, Artificial
  probe
  misc_feature (1)..(25): SEQ ID NO: 6278; WAN024AJT; Start 34; Stop 58
atccgcaaagcagatgagagatttc

SEQ ID NO: 434082 - DNA, 25 bp, Artificial
  probe
  misc_feature (1)..(25): SEQ ID NO: 6278; WAN024AJT; Start 18; Stop 42
aaataagaaaaccctcatccgcaaa

SEQ ID NO: 434083 - DNA, 25 bp, Artificial
  probe
  misc_feature (1)..(25): SEQ ID NO: 6278; WAN024AJT; Start 17; Stop 41
aaaataagaaaaccctcatccgcaa

SEQ ID NO: 434084 - DNA, 25 bp, Artificial
  probe
  misc_feature (1)..(25): SEQ ID NO: 6278; WAN024AJT; Start 13; Stop 37
gcataaaataagaaaaccctcatcc

SEQ ID NO: 434085 - DNA, 25 bp, Artificial
  probe
  misc_feature (1)..(25): SEQ ID NO: 6278; WAN024AJT; Start 14; Stop 38
cataaaataagaaaaccctcatccg

SEQ ID NO: 434086 - DNA, 25 bp, Artificial
  probe
  misc_feature (1)..(25): SEQ ID NO: 6278; WAN024AJT; Start 19; Stop 43
aataagaaaaccctcatccgcaaag

SEQ ID NO: 434087 - DNA, 25 bp, Artificial
  probe
  misc_feature (1)..(25): SEQ ID NO: 6278; WAN024AJT; Start 36; Stop 60
ccgcaaagcagatgagagatttcaa

SEQ ID NO: 434088 - DNA, 25 bp, Artificial
  probe
  misc_feature (1)..(25): SEQ ID NO: 6278; WAN024AJT; Start 12; Stop 36
agcataaaataagaaaaccctcatc

SEQ ID NO: 434089 - DNA, 25 bp, Artificial
  probe
  misc_feature (1)..(25): SEQ ID NO: 6278; WAN024AJT; Start 35; Stop 59
tccgcaaagcagatgagagatttca

SEQ ID NO: 434090 - DNA, 25 bp, Artificial
  probe
  misc_feature (1)..(25): SEQ ID NO: 6278; WAN024AJT; Start 11; Stop 35
tagcataaaataagaaaaccctcat

SEQ ID NO: 434091 - DNA, 25 bp, Artificial
  probe
  misc_feature (1)..(25): SEQ ID NO: 6278; WAN024AJT; Start 10; Stop 34
atagcataaaataagaaaaccctca

SEQ ID NO: 434092 - DNA, 25 bp, Artificial
  probe
  misc_feature (1)..(25): SEQ ID NO: 6278; WAN024AJT; Start 20; Stop 44
ataagaaaaccctcatccgcaaagc

SEQ ID NO: 434093 - DNA, 25 bp, Artificial
  probe
  misc_feature (1)..(25): SEQ ID NO: 6278; WAN024AJT; Start 33; Stop 57
catccgcaaagcagatgagagattt

SEQ ID NO: 434094 - DNA, 25 bp, Artificial
  probe
  misc_feature (1)..(25): SEQ ID NO: 6278; WAN024AJT; Start 21; Stop 45
taagaaaaccctcatccgcaaagca

SEQ ID NO: 434095 - DNA, 25 bp, Artificial
  probe
  misc_feature (1)..(25): SEQ ID NO: 6278; WAN024AJT; Start 8; Stop 32
gtatagcataaaataagaaaaccct

SEQ ID NO: 434096 - DNA, 25 bp, Artificial
  probe
  misc_feature (1)..(25): SEQ ID NO: 6278; WAN024AJT; Start 7; Stop 31
agtatagcataaaataagaaaaccc

SEQ ID NO: 434097 - DNA, 25 bp, Artificial
  probe
  misc_feature (1)..(25): SEQ ID NO: 6279; WAN024BJT; Start 148; Stop 172
aaatcgacactgaatttgctcaaat

SEQ ID NO: 434098 - DNA, 25 bp, Artificial
  probe
  misc_feature (1)..(25): SEQ ID NO: 6279; WAN024BJT; Start 195; Stop 219
tatttatttggctcatatttgcttt

SEQ ID NO: 434099 - DNA, 25 bp, Artificial
  probe
  misc_feature (1)..(25): SEQ ID NO: 6279; WAN024BJT; Start 123; Stop 147
gcatgtaactgggcagtgtcttaaa

SEQ ID NO: 434100 - DNA, 25 bp, Artificial
  probe
  misc_feature (1)..(25): SEQ ID NO: 6279; WAN024BJT; Start 112; Stop 136
aattttaatttgcatgtaactgggc

SEQ ID NO: 434101 - DNA, 25 bp, Artificial
  probe
  misc_feature (1)..(25): SEQ ID NO: 6279; WAN024BJT; Start 124; Stop 148
catgtaactgggcagtgtcttaaaa

SEQ ID NO: 434102 - DNA, 25 bp, Artificial
  probe
  misc_feature (1)..(25): SEQ ID NO: 6279; WAN024BJT; Start 194; Stop 218
atatttatttggctcatatttgctt

SEQ ID NO: 434103 - DNA, 25 bp, Artificial
  probe
  misc_feature (1)..(25): SEQ ID NO: 6279; WAN024BJT; Start 147; Stop 171
aaaatcgacactgaatttgctcaaa

SEQ ID NO: 434104 - DNA, 25 bp, Artificial
  probe
  misc_feature (1)..(25): SEQ ID NO: 6279; WAN024BJT; Start 115; Stop 139
tttaatttgcatgtaactgggcagt

SEQ ID NO: 434105 - DNA, 25 bp, Artificial
  probe
  misc_feature (1)..(25): SEQ ID NO: 6279; WAN024BJT; Start 150; Stop 174
atcgacactgaatttgctcaaattt

SEQ ID NO: 434106 - DNA, 25 bp, Artificial
  probe
  misc_feature (1)..(25): SEQ ID NO: 6279; WAN024BJT; Start 149; Stop 173
aatcgacactgaatttgctcaaatt

SEQ ID NO: 434107 - DNA, 25 bp, Artificial
  probe
  misc_feature (1)..(25): SEQ ID NO: 6279; WAN024BJT; Start 116; Stop 140
ttaatttgcatgtaactgggcagtg

SEQ ID NO: 434108 - DNA, 25 bp, Artificial
  probe
  misc_feature (1)..(25): SEQ ID NO: 6279; WAN024BJT; Start 196; Stop 220
atttatttggctcatatttgctttt

SEQ ID NO: 434109 - DNA, 25 bp, Artificial
  probe
  misc_feature (1)..(25): SEQ ID NO: 6279; WAN024BJT; Start 72; Stop 96
acaaattttaaccctgttaggaact

SEQ ID NO: 434110 - DNA, 25 bp, Artificial
  probe
  misc_feature (1)..(25): SEQ ID NO: 6279; WAN024BJT; Start 117; Stop 141
taatttgcatgtaactgggcagtgt

SEQ ID NO: 434111 - DNA, 25 bp, Artificial
  probe
  misc_feature (1)..(25): SEQ ID NO: 6279; WAN024BJT; Start 113; Stop 137
attttaatttgcatgtaactgggca

SEQ ID NO: 434112 - DNA, 25 bp, Artificial
  probe
  misc_feature (1)..(25): SEQ ID NO: 6279; WAN024BJT; Start 111; Stop 135
aaattttaatttgcatgtaactggg

SEQ ID NO: 434113 - DNA, 25 bp, Artificial
  probe
  misc_feature (1)..(25): SEQ ID NO: 6279; WAN024BJT; Start 114; Stop 138
ttttaatttgcatgtaactgggcag

SEQ ID NO: 434114 - DNA, 25 bp, Artificial
  probe
  misc_feature (1)..(25): SEQ ID NO: 6279; WAN024BJT; Start 71; Stop 95
tacaaattttaaccctgttaggaac

SEQ ID NO: 434115 - DNA, 25 bp, Artificial
  probe
  misc_feature (1)..(25): SEQ ID NO: 6279; WAN024BJT; Start 73; Stop 97
caaattttaaccctgttaggaacta

SEQ ID NO: 434116 - DNA, 25 bp, Artificial
  probe
  misc_feature (1)..(25): SEQ ID NO: 6279; WAN024BJT; Start 65; Stop 89
tcgttatacaaattttaaccctgtt

SEQ ID NO: 434117 - DNA, 25 bp, Artificial
  probe
  misc_feature (1)..(25): SEQ ID NO: 6279; WAN024BJT; Start 64; Stop 88
ttcgttatacaaattttaaccctgt

SEQ ID NO: 434118 - DNA, 25 bp, Artificial
  probe
  misc_feature (1)..(25): SEQ ID NO: 6279; WAN024BJT; Start 151; Stop 175
tcgacactgaatttgctcaaatttt

SEQ ID NO: 434119 - DNA, 25 bp, Artificial
  probe
  misc_feature (1)..(25): SEQ ID NO: 6279; WAN024BJT; Start 78; Stop 102
tttaaccctgttaggaactataaaa

SEQ ID NO: 434120 - DNA, 25 bp, Artificial
  probe
  misc_feature (1)..(25): SEQ ID NO: 6279; WAN024BJT; Start 77; Stop 101
ttttaaccctgttaggaactataaa

SEQ ID NO: 434121 - DNA, 25 bp, Artificial
  probe
  misc_feature (1)..(25): SEQ ID NO: 6279; WAN024BJT; Start 70; Stop 94
atacaaattttaaccctgttaggaa

SEQ ID NO: 434122 - DNA, 25 bp, Artificial
  probe
  misc_feature (1)..(25): SEQ ID NO: 6279; WAN024BJT; Start 118; Stop 142
aatttgcatgtaactgggcagtgtc

SEQ ID NO: 434123 - DNA, 25 bp, Artificial
  probe
  misc_feature (1)..(25): SEQ ID NO: 6279; WAN024BJT; Start 63; Stop 87
tttcgttatacaaattttaaccctg

SEQ ID NO: 434124 - DNA, 25 bp, Artificial
  probe
  misc_feature (1)..(25): SEQ ID NO: 6279; WAN024BJT; Start 61; Stop 85
actttcgttatacaaattttaaccc

SEQ ID NO: 434125 - DNA, 25 bp, Artificial
  probe
  misc_feature (1)..(25): SEQ ID NO: 6279; WAN024BJT; Start 76; Stop 100
attttaaccctgttaggaactataa

SEQ ID NO: 434126 - DNA, 25 bp, Artificial
  probe
  misc_feature (1)..(25): SEQ ID NO: 6279; WAN024BJT; Start 75; Stop 99
aattttaaccctgttaggaactata

SEQ ID NO: 434127 - DNA, 25 bp, Artificial
  probe
  misc_feature (1)..(25): SEQ ID NO: 6279; WAN024BJT; Start 74; Stop 98
aaattttaaccctgttaggaactat

SEQ ID NO: 434128 - DNA, 25 bp, Artificial
  probe
  misc_feature (1)..(25): SEQ ID NO: 6279; WAN024BJT; Start 122; Stop 146
tgcatgtaactgggcagtgtcttaa

SEQ ID NO: 434129 - DNA, 25 bp, Artificial
  probe
  misc_feature (1)..(25): SEQ ID NO: 6279; WAN024BJT; Start 121; Stop 145
ttgcatgtaactgggcagtgtctta

SEQ ID NO: 434130 - DNA, 25 bp, Artificial
  probe
  misc_feature (1)..(25): SEQ ID NO: 6280; WAN024B6O; Start 26; Stop 50
taatgcccatcaattctttagtcgt

SEQ ID NO: 434131 - DNA, 25 bp, Artificial
  probe
  misc_feature (1)..(25): SEQ ID NO: 6280; WAN024B6O; Start 25; Stop 49
ataatgcccatcaattctttagtcg

SEQ ID NO: 434132 - DNA, 25 bp, Artificial
  probe
  misc_feature (1)..(25): SEQ ID NO: 6280; WAN024B6O; Start 27; Stop 51
aatgcccatcaattctttagtcgtc

SEQ ID NO: 434133 - DNA, 25 bp, Artificial
  probe
  misc_feature (1)..(25): SEQ ID NO: 6280; WAN024B6O; Start 31; Stop 55
cccatcaattctttagtcgtccaag

SEQ ID NO: 434134 - DNA, 25 bp, Artificial
  probe
  misc_feature (1)..(25): SEQ ID NO: 6280; WAN024B6O; Start 24; Stop 48
aataatgcccatcaattctttagtc

SEQ ID NO: 434135 - DNA, 25 bp, Artificial
  probe
  misc_feature (1)..(25): SEQ ID NO: 6280; WAN024B6O; Start 37; Stop 61
aattctttagtcgtccaagagaaga

SEQ ID NO: 434136 - DNA, 25 bp, Artificial
  probe
  misc_feature (1)..(25): SEQ ID NO: 6280; WAN024B6O; Start 36; Stop 60
caattctttagtcgtccaagagaag

SEQ ID NO: 434137 - DNA, 25 bp, Artificial
  probe
  misc_feature (1)..(25): SEQ ID NO: 6280; WAN024B6O; Start 35; Stop 59
tcaattctttagtcgtccaagagaa

SEQ ID NO: 434138 - DNA, 25 bp, Artificial
  probe
  misc_feature (1)..(25): SEQ ID NO: 6280; WAN024B6O; Start 34; Stop 58
atcaattctttagtcgtccaagaga

SEQ ID NO: 434139 - DNA, 25 bp, Artificial
  probe
  misc_feature (1)..(25): SEQ ID NO: 6280; WAN024B6O; Start 33; Stop 57
catcaattctttagtcgtccaagag

SEQ ID NO: 434140 - DNA, 25 bp, Artificial
  probe
  misc_feature (1)..(25): SEQ ID NO: 6280; WAN024B6O; Start 28; Stop 52
atgcccatcaattctttagtcgtcc

SEQ ID NO: 434141 - DNA, 25 bp, Artificial
  probe
  misc_feature (1)..(25): SEQ ID NO: 6280; WAN024B6O; Start 32; Stop 56
ccatcaattctttagtcgtccaaga

SEQ ID NO: 434142 - DNA, 25 bp, Artificial
  probe
  misc_feature (1)..(25): SEQ ID NO: 6280; WAN024B6O; Start 30; Stop 54
gcccatcaattctttagtcgtccaa

SEQ ID NO: 434143 - DNA, 25 bp, Artificial
  probe
  misc_feature (1)..(25): SEQ ID NO: 6280; WAN024B6O; Start 40; Stop 64
tctttagtcgtccaagagaagaacg

SEQ ID NO: 434144 - DNA, 25 bp, Artificial
  probe
  misc_feature (1)..(25): SEQ ID NO: 6280; WAN024B6O; Start 29; Stop 53
tgcccatcaattctttagtcgtcca

SEQ ID NO: 434145 - DNA, 25 bp, Artificial
  probe
  misc_feature (1)..(25): SEQ ID NO: 6280; WAN024B6O; Start 38; Stop 62
attctttagtcgtccaagagaagaa

SEQ ID NO: 434146 - DNA, 25 bp, Artificial
  probe
  misc_feature (1)..(25): SEQ ID NO: 6280; WAN024B6O; Start 39; Stop 63
ttctttagtcgtccaagagaagaac

SEQ ID NO: 434147 - DNA, 25 bp, Artificial
  probe
  misc_feature (1)..(25): SEQ ID NO: 6281; WAN0249P6; Start 13; Stop 37
tttgtttcgcagggaatctattata

SEQ ID NO: 434148 - DNA, 25 bp, Artificial
  probe
  misc_feature (1)..(25): SEQ ID NO: 6281; WAN0249P6; Start 15; Stop 39
tgtttcgcagggaatctattataaa

SEQ ID NO: 434149 - DNA, 25 bp, Artificial
  probe
  misc_feature (1)..(25): SEQ ID NO: 6281; WAN0249P6; Start 14; Stop 38
ttgtttcgcagggaatctattataa

SEQ ID NO: 434150 - DNA, 25 bp, Artificial
  probe
  misc_feature (1)..(25): SEQ ID NO: 6281; WAN0249P6; Start 2; Stop 26
ctataccatattttgtttcgcaggg

SEQ ID NO: 434151 - DNA, 25 bp, Artificial
  probe
  misc_feature (1)..(25): SEQ ID NO: 6281; WAN0249P6; Start 3; Stop 27
tataccatattttgtttcgcaggga

SEQ ID NO: 434152 - DNA, 25 bp, Artificial
  probe
  misc_feature (1)..(25): SEQ ID NO: 6281; WAN0249P6; Start 8; Stop 32
catattttgtttcgcagggaatcta

SEQ ID NO: 434153 - DNA, 25 bp, Artificial
  probe
  misc_feature (1)..(25): SEQ ID NO: 6281; WAN0249P6; Start 12; Stop 36
ttttgtttcgcagggaatctattat

SEQ ID NO: 434154 - DNA, 25 bp, Artificial
  probe
  misc_feature (1)..(25): SEQ ID NO: 6281; WAN0249P6; Start 11; Stop 35
attttgtttcgcagggaatctatta

SEQ ID NO: 434155 - DNA, 25 bp, Artificial
  probe
  misc_feature (1)..(25): SEQ ID NO: 6281; WAN0249P6; Start 10; Stop 34
tattttgtttcgcagggaatctatt

SEQ ID NO: 434156 - DNA, 25 bp, Artificial
  probe
  misc_feature (1)..(25): SEQ ID NO: 6281; WAN0249P6; Start 5; Stop 29
taccatattttgtttcgcagggaat

SEQ ID NO: 434157 - DNA, 25 bp, Artificial
  probe
  misc_feature (1)..(25): SEQ ID NO: 6281; WAN0249P6; Start 4; Stop 28
ataccatattttgtttcgcagggaa

SEQ ID NO: 434158 - DNA, 25 bp, Artificial
  probe
  misc_feature (1)..(25): SEQ ID NO: 6281; WAN0249P6; Start 9; Stop 33
atattttgtttcgcagggaatctat

SEQ ID NO: 434159 - DNA, 25 bp, Artificial
  probe
  misc_feature (1)..(25): SEQ ID NO: 6281; WAN0249P6; Start 19; Stop 43
tcgcagggaatctattataaaaggg

SEQ ID NO: 434160 - DNA, 25 bp, Artificial
  probe
  misc_feature (1)..(25): SEQ ID NO: 6281; WAN0249P6; Start 20; Stop 44
cgcagggaatctattataaaagggt

SEQ ID NO: 434161 - DNA, 25 bp, Artificial
  probe
  misc_feature (1)..(25): SEQ ID NO: 6281; WAN0249P6; Start 7; Stop 31
ccatattttgtttcgcagggaatct

SEQ ID NO: 434162 - DNA, 25 bp, Artificial
  probe
  misc_feature (1)..(25): SEQ ID NO: 6281; WAN0249P6; Start 6; Stop 30
accatattttgtttcgcagggaatc

SEQ ID NO: 434163 - DNA, 25 bp, Artificial
  probe
  misc_feature (1)..(25): SEQ ID NO: 6281; WAN0249P6; Start 18; Stop 42
ttcgcagggaatctattataaaagg

SEQ ID NO: 434164 - DNA, 25 bp, Artificial
  probe
  misc_feature (1)..(25): SEQ ID NO: 6281; WAN0249P6; Start 21; Stop 45
gcagggaatctattataaaagggta

SEQ ID NO: 434165 - DNA, 25 bp, Artificial
  probe
  misc_feature (1)..(25): SEQ ID NO: 6281; WAN0249P6; Start 16; Stop 40
gtttcgcagggaatctattataaaa

SEQ ID NO: 434166 - DNA, 25 bp, Artificial
  probe
  misc_feature (1)..(25): SEQ ID NO: 6281; WAN0249P6; Start 17; Stop 41
tttcgcagggaatctattataaaag

SEQ ID NO: 434167 - DNA, 25 bp, Artificial
  probe
  misc_feature (1)..(25): SEQ ID NO: 6281; WAN0249P6; Start 58; Stop 82
acacttacccttttcttttatactt

SEQ ID NO: 434168 - DNA, 25 bp, Artificial
  probe
  misc_feature (1)..(25): SEQ ID NO: 6281; WAN0249P6; Start 57; Stop 81
aacacttacccttttcttttatact

SEQ ID NO: 434169 - DNA, 25 bp, Artificial
  probe
  misc_feature (1)..(25): SEQ ID NO: 6281; WAN0249P6; Start 60; Stop 84
acttacccttttcttttatacttca

SEQ ID NO: 434170 - DNA, 25 bp, Artificial
  probe
  misc_feature (1)..(25): SEQ ID NO: 6281; WAN0249P6; Start 59; Stop 83
cacttacccttttcttttatacttc

SEQ ID NO: 434171 - DNA, 25 bp, Artificial
  probe
  misc_feature (1)..(25): SEQ ID NO: 6281; WAN0249P6; Start 56; Stop 80
aaacacttacccttttcttttatac

SEQ ID NO: 434172 - DNA, 25 bp, Artificial
  probe
  misc_feature (1)..(25): SEQ ID NO: 6281; WAN0249P6; Start 24; Stop 48
gggaatctattataaaagggtaagt

SEQ ID NO: 434173 - DNA, 25 bp, Artificial
  probe
  misc_feature (1)..(25): SEQ ID NO: 6281; WAN0249P6; Start 22; Stop 46
cagggaatctattataaaagggtaa

SEQ ID NO: 434174 - DNA, 25 bp, Artificial
  probe
  misc_feature (1)..(25): SEQ ID NO: 6281; WAN0249P6; Start 23; Stop 47
agggaatctattataaaagggtaag

SEQ ID NO: 434175 - DNA, 25 bp, Artificial
  probe
  misc_feature (1)..(25): SEQ ID NO: 6281; WAN0249P6; Start 61; Stop 85
cttacccttttcttttatacttcat

SEQ ID NO: 434176 - DNA, 25 bp, Artificial
  probe
  misc_feature (1)..(25): SEQ ID NO: 6281; WAN0249P6; Start 55; Stop 79
aaaacacttacccttttcttttata

SEQ ID NO: 434177 - DNA, 25 bp, Artificial
  probe
  misc_feature (1)..(25): SEQ ID NO: 6281; WAN0249P6; Start 33; Stop 57
ttataaaagggtaagtattgcaaaa

SEQ ID NO: 434178 - DNA, 25 bp, Artificial
  probe
  misc_feature (1)..(25): SEQ ID NO: 6282; WAN024DEC; Start 2614; Stop 2638
cgtgatatgattggtggaactattg

SEQ ID NO: 434179 - DNA, 25 bp, Artificial
  probe
  misc_feature (1)..(25): SEQ ID NO: 6282; WAN024DEC; Start 2613; Stop 2637
tcgtgatatgattggtggaactatt

SEQ ID NO: 434180 - DNA, 25 bp, Artificial
  probe
  misc_feature (1)..(25): SEQ ID NO: 6282; WAN024DEC; Start 2616; Stop 2640
tgatatgattggtggaactattggt

SEQ ID NO: 434181 - DNA, 25 bp, Artificial
  probe
  misc_feature (1)..(25): SEQ ID NO: 6282; WAN024DEC; Start 3608; Stop 3632
tgaatggtgataatagcaagtggtt

SEQ ID NO: 434182 - DNA, 25 bp, Artificial
  probe
  misc_feature (1)..(25): SEQ ID NO: 6282; WAN024DEC; Start 234; Stop 258
agtaacagaagatgctatgaatcgt

SEQ ID NO: 434183 - DNA, 25 bp, Artificial
  probe
  misc_feature (1)..(25): SEQ ID NO: 6282; WAN024DEC; Start 2615; Stop 2639
gtgatatgattggtggaactattgg

SEQ ID NO: 434184 - DNA, 25 bp, Artificial
  probe
  misc_feature (1)..(25): SEQ ID NO: 6282; WAN024DEC; Start 2612; Stop 2636
atcgtgatatgattggtggaactat

SEQ ID NO: 434185 - DNA, 25 bp, Artificial
  probe
  misc_feature (1)..(25): SEQ ID NO: 6282; WAN024DEC; Start 1614; Stop 1638
ttatgtcgttaatggtgtgagtgaa

SEQ ID NO: 434186 - DNA, 25 bp, Artificial
  probe
  misc_feature (1)..(25): SEQ ID NO: 6282; WAN024DEC; Start 675; Stop 699
tattgaagaagtgactgaagaaggt

SEQ ID NO: 434187 - DNA, 25 bp, Artificial
  probe
  misc_feature (1)..(25): SEQ ID NO: 6282; WAN024DEC; Start 3609; Stop 3633
gaatggtgataatagcaagtggttc

SEQ ID NO: 434188 - DNA, 25 bp, Artificial
  probe
  misc_feature (1)..(25): SEQ ID NO: 6282; WAN024DEC; Start 2605; Stop 2629
gatgcttatcgtgatatgattggtg

SEQ ID NO: 434189 - DNA, 25 bp, Artificial
  probe
  misc_feature (1)..(25): SEQ ID NO: 6282; WAN024DEC; Start 2610; Stop 2634
ttatcgtgatatgattggtggaact

SEQ ID NO: 434190 - DNA, 25 bp, Artificial
  probe
  misc_feature (1)..(25): SEQ ID NO: 6282; WAN024DEC; Start 2667; Stop 2691
ttacaatatgcgtctcttcactaac

SEQ ID NO: 434191 - DNA, 25 bp, Artificial
  probe
  misc_feature (1)..(25): SEQ ID NO: 6282; WAN024DEC; Start 2609; Stop 2633
cttatcgtgatatgattggtggaac

SEQ ID NO: 434192 - DNA, 25 bp, Artificial
  probe
  misc_feature (1)..(25): SEQ ID NO: 6282; WAN024DEC; Start 1615; Stop 1639
tatgtcgttaatggtgtgagtgaag

SEQ ID NO: 434193 - DNA, 25 bp, Artificial
  probe
  misc_feature (1)..(25): SEQ ID NO: 6282; WAN024DEC; Start 2664; Stop 2688
agattacaatatgcgtctcttcact

SEQ ID NO: 434194 - DNA, 25 bp, Artificial
  probe
  misc_feature (1)..(25): SEQ ID NO: 6282; WAN024DEC; Start 674; Stop 698
ctattgaagaagtgactgaagaagg

SEQ ID NO: 434195 - DNA, 25 bp, Artificial
  probe
  misc_feature (1)..(25): SEQ ID NO: 6282; WAN024DEC; Start 2602; Stop 2626
ttggatgcttatcgtgatatgattg

SEQ ID NO: 434196 - DNA, 25 bp, Artificial
  probe
  misc_feature (1)..(25): SEQ ID NO: 6282; WAN024DEC; Start 233; Stop 257
aagtaacagaagatgctatgaatcg

SEQ ID NO: 434197 - DNA, 25 bp, Artificial
  probe
  misc_feature (1)..(25): SEQ ID NO: 6282; WAN024DEC; Start 1613; Stop 1637
attatgtcgttaatggtgtgagtga

SEQ ID NO: 434198 - DNA, 25 bp, Artificial
  probe
  misc_feature (1)..(25): SEQ ID NO: 6282; WAN024DEC; Start 2604; Stop 2628
ggatgcttatcgtgatatgattggt

SEQ ID NO: 434199 - DNA, 25 bp, Artificial
  probe
  misc_feature (1)..(25): SEQ ID NO: 6282; WAN024DEC; Start 2603; Stop 2627
tggatgcttatcgtgatatgattgg

SEQ ID NO: 434200 - DNA, 25 bp, Artificial
  probe
  misc_feature (1)..(25): SEQ ID NO: 6282; WAN024DEC; Start 235; Stop 259
gtaacagaagatgctatgaatcgtt

SEQ ID NO: 434201 - DNA, 25 bp, Artificial
  probe
  misc_feature (1)..(25): SEQ ID NO: 6282; WAN024DEC; Start 2611; Stop 2635
tatcgtgatatgattggtggaacta

SEQ ID NO: 434202 - DNA, 25 bp, Artificial
  probe
  misc_feature (1)..(25): SEQ ID NO: 6282; WAN024DEC; Start 1612; Stop 1636
aattatgtcgttaatggtgtgagtg

SEQ ID NO: 434203 - DNA, 25 bp, Artificial
  probe
  misc_feature (1)..(25): SEQ ID NO: 6282; WAN024DEC; Start 3607; Stop 3631
ttgaatggtgataatagcaagtggt

SEQ ID NO: 434204 - DNA, 25 bp, Artificial
  probe
  misc_feature (1)..(25): SEQ ID NO: 6282; WAN024DEC; Start 2608; Stop 2632
gcttatcgtgatatgattggtggaa

SEQ ID NO: 434205 - DNA, 25 bp, Artificial
  probe
  misc_feature (1)..(25): SEQ ID NO: 6282; WAN024DEC; Start 2606; Stop 2630
atgcttatcgtgatatgattggtgg

SEQ ID NO: 434206 - DNA, 25 bp, Artificial
  probe
  misc_feature (1)..(25): SEQ ID NO: 6282; WAN024DEC; Start 3606; Stop 3630
attgaatggtgataatagcaagtgg

SEQ ID NO: 434207 - DNA, 25 bp, Artificial
  probe
  misc_feature (1)..(25): SEQ ID NO: 6282; WAN024DEC; Start 2665; Stop 2689
gattacaatatgcgtctcttcacta

SEQ ID NO: 434208 - DNA, 25 bp, Artificial
  probe
  misc_feature (1)..(25): SEQ ID NO: 6282; WAN024DEC; Start 2626; Stop 2650
ggtggaactattggtaagtctgaat

SEQ ID NO: 434209 - DNA, 25 bp, Artificial
  probe
  misc_feature (1)..(25): SEQ ID NO: 6282; WAN024DEC; Start 2622; Stop 2646
gattggtggaactattggtaagtct

SEQ ID NO: 434210 - DNA, 25 bp, Artificial
  probe
  misc_feature (1)..(25): SEQ ID NO: 6282; WAN024DEC; Start 2620; Stop 2644
atgattggtggaactattggtaagt

SEQ ID NO: 434211 - DNA, 25 bp, Artificial
  probe
  misc_feature (1)..(25): SEQ ID NO: 6284; WAN024ARR; Start 77; Stop 101
aagtcctcacaataggttctatgat

SEQ ID NO: 434212 - DNA, 25 bp, Artificial
  probe
  misc_feature (1)..(25): SEQ ID NO: 6284; WAN024ARR; Start 78; Stop 102
agtcctcacaataggttctatgata

SEQ ID NO: 434213 - DNA, 25 bp, Artificial
  probe
  misc_feature (1)..(25): SEQ ID NO: 6284; WAN024ARR; Start 34; Stop 58
cagtaaatcacgaaattggttggaa

SEQ ID NO: 434214 - DNA, 25 bp, Artificial
  probe
  misc_feature (1)..(25): SEQ ID NO: 6284; WAN024ARR; Start 35; Stop 59
agtaaatcacgaaattggttggaaa

SEQ ID NO: 434215 - DNA, 25 bp, Artificial
  probe
  misc_feature (1)..(25): SEQ ID NO: 6284; WAN024ARR; Start 50; Stop 74
tggttggaaactggcttaaactata

SEQ ID NO: 434216 - DNA, 25 bp, Artificial
  probe
  misc_feature (1)..(25): SEQ ID NO: 6284; WAN024ARR; Start 36; Stop 60
gtaaatcacgaaattggttggaaac

SEQ ID NO: 434217 - DNA, 25 bp, Artificial
  probe
  misc_feature (1)..(25): SEQ ID NO: 6284; WAN024ARR; Start 37; Stop 61
taaatcacgaaattggttggaaact

SEQ ID NO: 434218 - DNA, 25 bp, Artificial
  probe
  misc_feature (1)..(25): SEQ ID NO: 6284; WAN024ARR; Start 51; Stop 75
ggttggaaactggcttaaactataa

SEQ ID NO: 434219 - DNA, 25 bp, Artificial
  probe
  misc_feature (1)..(25): SEQ ID NO: 6284; WAN024ARR; Start 49; Stop 73
ttggttggaaactggcttaaactat

SEQ ID NO: 434220 - DNA, 25 bp, Artificial
  probe
  misc_feature (1)..(25): SEQ ID NO: 6284; WAN024ARR; Start 48; Stop 72
attggttggaaactggcttaaacta

SEQ ID NO: 434221 - DNA, 25 bp, Artificial
  probe
  misc_feature (1)..(25): SEQ ID NO: 6284; WAN024ARR; Start 45; Stop 69
gaaattggttggaaactggcttaaa

SEQ ID NO: 434222 - DNA, 25 bp, Artificial
  probe
  misc_feature (1)..(25): SEQ ID NO: 6284; WAN024ARR; Start 46; Stop 70
aaattggttggaaactggcttaaac

SEQ ID NO: 434223 - DNA, 25 bp, Artificial
  probe
  misc_feature (1)..(25): SEQ ID NO: 6284; WAN024ARR; Start 38; Stop 62
aaatcacgaaattggttggaaactg

SEQ ID NO: 434224 - DNA, 25 bp, Artificial
  probe
  misc_feature (1)..(25): SEQ ID NO: 6284; WAN024ARR; Start 163; Stop 187
attcaataccgatttcgccatctta

SEQ ID NO: 434225 - DNA, 25 bp, Artificial
  probe
  misc_feature (1)..(25): SEQ ID NO: 6284; WAN024ARR; Start 150; Stop 174
gcactactgataaattcaataccga

SEQ ID NO: 434226 - DNA, 25 bp, Artificial
  probe
  misc_feature (1)..(25): SEQ ID NO: 6284; WAN024ARR; Start 149; Stop 173
agcactactgataaattcaataccg

SEQ ID NO: 434227 - DNA, 25 bp, Artificial
  probe
  misc_feature (1)..(25): SEQ ID NO: 6284; WAN024ARR; Start 22; Stop 46
tttcttcattaccagtaaatcacga

SEQ ID NO: 434228 - DNA, 25 bp, Artificial
  probe
  misc_feature (1)..(25): SEQ ID NO: 6284; WAN024ARR; Start 79; Stop 103
gtcctcacaataggttctatgatat

SEQ ID NO: 434229 - DNA, 25 bp, Artificial
  probe
  misc_feature (1)..(25): SEQ ID NO: 6284; WAN024ARR; Start 47; Stop 71
aattggttggaaactggcttaaact

SEQ ID NO: 434230 - DNA, 25 bp, Artificial
  probe
  misc_feature (1)..(25): SEQ ID NO: 6284; WAN024ARR; Start 24; Stop 48
tcttcattaccagtaaatcacgaaa

SEQ ID NO: 434231 - DNA, 25 bp, Artificial
  probe
  misc_feature (1)..(25): SEQ ID NO: 6284; WAN024ARR; Start 23; Stop 47
ttcttcattaccagtaaatcacgaa

SEQ ID NO: 434232 - DNA, 25 bp, Artificial
  probe
  misc_feature (1)..(25): SEQ ID NO: 6284; WAN024ARR; Start 162; Stop 186
aattcaataccgatttcgccatctt

SEQ ID NO: 434233 - DNA, 25 bp, Artificial
  probe
  misc_feature (1)..(25): SEQ ID NO: 6284; WAN024ARR; Start 160; Stop 184
taaattcaataccgatttcgccatc

SEQ ID NO: 434234 - DNA, 25 bp, Artificial
  probe
  misc_feature (1)..(25): SEQ ID NO: 6284; WAN024ARR; Start 158; Stop 182
gataaattcaataccgatttcgcca

SEQ ID NO: 434235 - DNA, 25 bp, Artificial
  probe
  misc_feature (1)..(25): SEQ ID NO: 6284; WAN024ARR; Start 157; Stop 181
tgataaattcaataccgatttcgcc

SEQ ID NO: 434236 - DNA, 25 bp, Artificial
  probe
  misc_feature (1)..(25): SEQ ID NO: 6284; WAN024ARR; Start 159; Stop 183
ataaattcaataccgatttcgccat

SEQ ID NO: 434237 - DNA, 25 bp, Artificial
  probe
  misc_feature (1)..(25): SEQ ID NO: 6284; WAN024ARR; Start 27; Stop 51
tcattaccagtaaatcacgaaattg

SEQ ID NO: 434238 - DNA, 25 bp, Artificial
  probe
  misc_feature (1)..(25): SEQ ID NO: 6284; WAN024ARR; Start 156; Stop 180
ctgataaattcaataccgatttcgc

SEQ ID NO: 434239 - DNA, 25 bp, Artificial
  probe
  misc_feature (1)..(25): SEQ ID NO: 6284; WAN024ARR; Start 76; Stop 100
aaagtcctcacaataggttctatga

SEQ ID NO: 434240 - DNA, 25 bp, Artificial
  probe
  misc_feature (1)..(25): SEQ ID NO: 6284; WAN024ARR; Start 52; Stop 76
gttggaaactggcttaaactataaa

SEQ ID NO: 434241 - DNA, 25 bp, Artificial
  probe
  misc_feature (1)..(25): SEQ ID NO: 6284; WAN024ARR; Start 161; Stop 185
aaattcaataccgatttcgccatct

SEQ ID NO: 434242 - DNA, 25 bp, Artificial
  probe
  misc_feature (1)..(25): SEQ ID NO: 6284; WAN024ARR; Start 25; Stop 49
cttcattaccagtaaatcacgaaat

SEQ ID NO: 434243 - DNA, 25 bp, Artificial
  probe
  misc_feature (1)..(25): SEQ ID NO: 6284; WAN024ARR; Start 44; Stop 68
cgaaattggttggaaactggcttaa

SEQ ID NO: 434244 - DNA, 25 bp, Artificial
  probe
  misc_feature (1)..(25): SEQ ID NO: 6285; WAN024ALR; Start 388; Stop 412
gacaactggtatgcctactagaatt

SEQ ID NO: 434245 - DNA, 25 bp, Artificial
  probe
  misc_feature (1)..(25): SEQ ID NO: 6285; WAN024ALR; Start 371; Stop 395
aagattccttaccttgagacaactg

SEQ ID NO: 434246 - DNA, 25 bp, Artificial
  probe
  misc_feature (1)..(25): SEQ ID NO: 6285; WAN024ALR; Start 387; Stop 411
agacaactggtatgcctactagaat

SEQ ID NO: 434247 - DNA, 25 bp, Artificial
  probe
  misc_feature (1)..(25): SEQ ID NO: 6285; WAN024ALR; Start 386; Stop 410
gagacaactggtatgcctactagaa

SEQ ID NO: 434248 - DNA, 25 bp, Artificial
  probe
  misc_feature (1)..(25): SEQ ID NO: 6285; WAN024ALR; Start 383; Stop 407
cttgagacaactggtatgcctacta

SEQ ID NO: 434249 - DNA, 25 bp, Artificial
  probe
  misc_feature (1)..(25): SEQ ID NO: 6285; WAN024ALR; Start 370; Stop 394
taagattccttaccttgagacaact

SEQ ID NO: 434250 - DNA, 25 bp, Artificial
  probe
  misc_feature (1)..(25): SEQ ID NO: 6285; WAN024ALR; Start 384; Stop 408
ttgagacaactggtatgcctactag

SEQ ID NO: 434251 - DNA, 25 bp, Artificial
  probe
  misc_feature (1)..(25): SEQ ID NO: 6285; WAN024ALR; Start 372; Stop 396
agattccttaccttgagacaactgg

SEQ ID NO: 434252 - DNA, 25 bp, Artificial
  probe
  misc_feature (1)..(25): SEQ ID NO: 6285; WAN024ALR; Start 369; Stop 393
ctaagattccttaccttgagacaac

SEQ ID NO: 434253 - DNA, 25 bp, Artificial
  probe
  misc_feature (1)..(25): SEQ ID NO: 6285; WAN024ALR; Start 368; Stop 392
tctaagattccttaccttgagacaa

SEQ ID NO: 434254 - DNA, 25 bp, Artificial
  probe
  misc_feature (1)..(25): SEQ ID NO: 6285; WAN024ALR; Start 363; Stop 387
aaccgtctaagattccttaccttga

SEQ ID NO: 434255 - DNA, 25 bp, Artificial
  probe
  misc_feature (1)..(25): SEQ ID NO: 6285; WAN024ALR; Start 365; Stop 389
ccgtctaagattccttaccttgaga

SEQ ID NO: 434256 - DNA, 25 bp, Artificial
  probe
  misc_feature (1)..(25): SEQ ID NO: 6285; WAN024ALR; Start 364; Stop 388
accgtctaagattccttaccttgag

SEQ ID NO: 434257 - DNA, 25 bp, Artificial
  probe
  misc_feature (1)..(25): SEQ ID NO: 6285; WAN024ALR; Start 385; Stop 409
tgagacaactggtatgcctactaga

SEQ ID NO: 434258 - DNA, 25 bp, Artificial
  probe
  misc_feature (1)..(25): SEQ ID NO: 6285; WAN024ALR; Start 848; Stop 872
tgtttagcccttactatgacttagc

SEQ ID NO: 434259 - DNA, 25 bp, Artificial
  probe
  misc_feature (1)..(25): SEQ ID NO: 6285; WAN024ALR; Start 165; Stop 189
cgaccaaacaactcattagaaagat

SEQ ID NO: 434260 - DNA, 25 bp, Artificial
  probe
  misc_feature (1)..(25): SEQ ID NO: 6285; WAN024ALR; Start 269; Stop 293
aaagatacacacaaggaaatcatcg

SEQ ID NO: 434261 - DNA, 25 bp, Artificial
  probe
  misc_feature (1)..(25): SEQ ID NO: 6285; WAN024ALR; Start 162; Stop 186
aagcgaccaaacaactcattagaaa

SEQ ID NO: 434262 - DNA, 25 bp, Artificial
  probe
  misc_feature (1)..(25): SEQ ID NO: 6285; WAN024ALR; Start 161; Stop 185
aaagcgaccaaacaactcattagaa

SEQ ID NO: 434263 - DNA, 25 bp, Artificial
  probe
  misc_feature (1)..(25): SEQ ID NO: 6285; WAN024ALR; Start 735; Stop 759
caagctcgatatcatcactgttctt

SEQ ID NO: 434264 - DNA, 25 bp, Artificial
  probe
  misc_feature (1)..(25): SEQ ID NO: 6285; WAN024ALR; Start 740; Stop 764
tcgatatcatcactgttcttgaagg

SEQ ID NO: 434265 - DNA, 25 bp, Artificial
  probe
  misc_feature (1)..(25): SEQ ID NO: 6285; WAN024ALR; Start 739; Stop 763
ctcgatatcatcactgttcttgaag

SEQ ID NO: 434266 - DNA, 25 bp, Artificial
  probe
  misc_feature (1)..(25): SEQ ID NO: 6285; WAN024ALR; Start 741; Stop 765
cgatatcatcactgttcttgaaggt

SEQ ID NO: 434267 - DNA, 25 bp, Artificial
  probe
  misc_feature (1)..(25): SEQ ID NO: 6285; WAN024ALR; Start 270; Stop 294
aagatacacacaaggaaatcatcgc

SEQ ID NO: 434268 - DNA, 25 bp, Artificial
  probe
  misc_feature (1)..(25): SEQ ID NO: 6285; WAN024ALR; Start 164; Stop 188
gcgaccaaacaactcattagaaaga

SEQ ID NO: 434269 - DNA, 25 bp, Artificial
  probe
  misc_feature (1)..(25): SEQ ID NO: 6285; WAN024ALR; Start 163; Stop 187
agcgaccaaacaactcattagaaag

SEQ ID NO: 434270 - DNA, 25 bp, Artificial
  probe
  misc_feature (1)..(25): SEQ ID NO: 6285; WAN024ALR; Start 738; Stop 762
gctcgatatcatcactgttcttgaa

SEQ ID NO: 434271 - DNA, 25 bp, Artificial
  probe
  misc_feature (1)..(25): SEQ ID NO: 6285; WAN024ALR; Start 373; Stop 397
gattccttaccttgagacaactggt

SEQ ID NO: 434272 - DNA, 25 bp, Artificial
  probe
  misc_feature (1)..(25): SEQ ID NO: 6285; WAN024ALR; Start 261; Stop 285
tcatcaataaagatacacacaagga

SEQ ID NO: 434273 - DNA, 25 bp, Artificial
  probe
  misc_feature (1)..(25): SEQ ID NO: 6285; WAN024ALR; Start 847; Stop 871
atgtttagcccttactatgacttag

SEQ ID NO: 434274 - DNA, 25 bp, Artificial
  probe
  misc_feature (1)..(25): SEQ ID NO: 6285; WAN024ALR; Start 362; Stop 386
aaaccgtctaagattccttaccttg

SEQ ID NO: 434275 - DNA, 25 bp, Artificial
  probe
  misc_feature (1)..(25): SEQ ID NO: 6285; WAN024ALR; Start 166; Stop 190
gaccaaacaactcattagaaagatt

SEQ ID NO: 434276 - DNA, 25 bp, Artificial
  probe
  misc_feature (1)..(25): SEQ ID NO: 6285; WAN024ALR; Start 168; Stop 192
ccaaacaactcattagaaagattca

SEQ ID NO: 434277 - DNA, 25 bp, Artificial
  probe
  misc_feature (1)..(25): SEQ ID NO: 6286; WAN024ALS; Start 581; Stop 605
aattctagtaggcataccagttgtc

SEQ ID NO: 434278 - DNA, 25 bp, Artificial
  probe
  misc_feature (1)..(25): SEQ ID NO: 6286; WAN024ALS; Start 598; Stop 622
cagttgtctcaaggtaaggaatctt

SEQ ID NO: 434279 - DNA, 25 bp, Artificial
  probe
  misc_feature (1)..(25): SEQ ID NO: 6286; WAN024ALS; Start 582; Stop 606
attctagtaggcataccagttgtct

SEQ ID NO: 434280 - DNA, 25 bp, Artificial
  probe
  misc_feature (1)..(25): SEQ ID NO: 6286; WAN024ALS; Start 583; Stop 607
ttctagtaggcataccagttgtctc

SEQ ID NO: 434281 - DNA, 25 bp, Artificial
  probe
  misc_feature (1)..(25): SEQ ID NO: 6286; WAN024ALS; Start 586; Stop 610
tagtaggcataccagttgtctcaag

SEQ ID NO: 434282 - DNA, 25 bp, Artificial
  probe
  misc_feature (1)..(25): SEQ ID NO: 6286; WAN024ALS; Start 599; Stop 623
agttgtctcaaggtaaggaatctta

SEQ ID NO: 434283 - DNA, 25 bp, Artificial
  probe
  misc_feature (1)..(25): SEQ ID NO: 6286; WAN024ALS; Start 585; Stop 609
ctagtaggcataccagttgtctcaa

SEQ ID NO: 434284 - DNA, 25 bp, Artificial
  probe
  misc_feature (1)..(25): SEQ ID NO: 6286; WAN024ALS; Start 597; Stop 621
ccagttgtctcaaggtaaggaatct

SEQ ID NO: 434285 - DNA, 25 bp, Artificial
  probe
  misc_feature (1)..(25): SEQ ID NO: 6286; WAN024ALS; Start 600; Stop 624
gttgtctcaaggtaaggaatcttag

SEQ ID NO: 434286 - DNA, 25 bp, Artificial
  probe
  misc_feature (1)..(25): SEQ ID NO: 6286; WAN024ALS; Start 606; Stop 630
tcaaggtaaggaatcttagacggtt

SEQ ID NO: 434287 - DNA, 25 bp, Artificial
  probe
  misc_feature (1)..(25): SEQ ID NO: 6286; WAN024ALS; Start 601; Stop 625
ttgtctcaaggtaaggaatcttaga

SEQ ID NO: 434288 - DNA, 25 bp, Artificial
  probe
  misc_feature (1)..(25): SEQ ID NO: 6286; WAN024ALS; Start 604; Stop 628
tctcaaggtaaggaatcttagacgg

SEQ ID NO: 434289 - DNA, 25 bp, Artificial
  probe
  misc_feature (1)..(25): SEQ ID NO: 6286; WAN024ALS; Start 605; Stop 629
ctcaaggtaaggaatcttagacggt

SEQ ID NO: 434290 - DNA, 25 bp, Artificial
  probe
  misc_feature (1)..(25): SEQ ID NO: 6286; WAN024ALS; Start 584; Stop 608
tctagtaggcataccagttgtctca

SEQ ID NO: 434291 - DNA, 25 bp, Artificial
  probe
  misc_feature (1)..(25): SEQ ID NO: 6286; WAN024ALS; Start 209; Stop 233
ggatgatagcttgtgttctaccttc

SEQ ID NO: 434292 - DNA, 25 bp, Artificial
  probe
  misc_feature (1)..(25): SEQ ID NO: 6286; WAN024ALS; Start 204; Stop 228
atctcggatgatagcttgtgttcta

SEQ ID NO: 434293 - DNA, 25 bp, Artificial
  probe
  misc_feature (1)..(25): SEQ ID NO: 6286; WAN024ALS; Start 211; Stop 235
atgatagcttgtgttctaccttcaa

SEQ ID NO: 434294 - DNA, 25 bp, Artificial
  probe
  misc_feature (1)..(25): SEQ ID NO: 6286; WAN024ALS; Start 210; Stop 234
gatgatagcttgtgttctaccttca

SEQ ID NO: 434295 - DNA, 25 bp, Artificial
  probe
  misc_feature (1)..(25): SEQ ID NO: 6286; WAN024ALS; Start 121; Stop 145
gctaagtcatagtaagggctaaaca

SEQ ID NO: 434296 - DNA, 25 bp, Artificial
  probe
  misc_feature (1)..(25): SEQ ID NO: 6286; WAN024ALS; Start 804; Stop 828
atctttctaatgagttgtttggtcg

SEQ ID NO: 434297 - DNA, 25 bp, Artificial
  probe
  misc_feature (1)..(25): SEQ ID NO: 6286; WAN024ALS; Start 700; Stop 724
cgatgatttccttgtgtgtatcttt

SEQ ID NO: 434298 - DNA, 25 bp, Artificial
  probe
  misc_feature (1)..(25): SEQ ID NO: 6286; WAN024ALS; Start 478; Stop 502
ggttgataatacgaggaatttggtg

SEQ ID NO: 434299 - DNA, 25 bp, Artificial
  probe
  misc_feature (1)..(25): SEQ ID NO: 6286; WAN024ALS; Start 477; Stop 501
tggttgataatacgaggaatttggt

SEQ ID NO: 434300 - DNA, 25 bp, Artificial
  probe
  misc_feature (1)..(25): SEQ ID NO: 6286; WAN024ALS; Start 476; Stop 500
ttggttgataatacgaggaatttgg

SEQ ID NO: 434301 - DNA, 25 bp, Artificial
  probe
  misc_feature (1)..(25): SEQ ID NO: 6286; WAN024ALS; Start 479; Stop 503
gttgataatacgaggaatttggtga

SEQ ID NO: 434302 - DNA, 25 bp, Artificial
  probe
  misc_feature (1)..(25): SEQ ID NO: 6286; WAN024ALS; Start 205; Stop 229
tctcggatgatagcttgtgttctac

SEQ ID NO: 434303 - DNA, 25 bp, Artificial
  probe
  misc_feature (1)..(25): SEQ ID NO: 6286; WAN024ALS; Start 808; Stop 832
ttctaatgagttgtttggtcgcttt

SEQ ID NO: 434304 - DNA, 25 bp, Artificial
  probe
  misc_feature (1)..(25): SEQ ID NO: 6286; WAN024ALS; Start 807; Stop 831
tttctaatgagttgtttggtcgctt

SEQ ID NO: 434305 - DNA, 25 bp, Artificial
  probe
  misc_feature (1)..(25): SEQ ID NO: 6286; WAN024ALS; Start 234; Stop 258
aagaacagtgatgatatcgagcttg

SEQ ID NO: 434306 - DNA, 25 bp, Artificial
  probe
  misc_feature (1)..(25): SEQ ID NO: 6286; WAN024ALS; Start 233; Stop 257
caagaacagtgatgatatcgagctt

SEQ ID NO: 434307 - DNA, 25 bp, Artificial
  probe
  misc_feature (1)..(25): SEQ ID NO: 6286; WAN024ALS; Start 229; Stop 253
ccttcaagaacagtgatgatatcga

SEQ ID NO: 434308 - DNA, 25 bp, Artificial
  probe
  misc_feature (1)..(25): SEQ ID NO: 6286; WAN024ALS; Start 230; Stop 254
cttcaagaacagtgatgatatcgag

SEQ ID NO: 434309 - DNA, 25 bp, Artificial
  probe
  misc_feature (1)..(25): SEQ ID NO: 6286; WAN024ALS; Start 228; Stop 252
accttcaagaacagtgatgatatcg

SEQ ID NO: 434310 - DNA, 25 bp, Artificial
  probe
  misc_feature (1)..(25): SEQ ID NO: 6287; WAN024BJW; Start 9; Stop 33
ttatgaccggatgaggcaggagaat

SEQ ID NO: 434311 - DNA, 25 bp, Artificial
  probe
  misc_feature (1)..(25): SEQ ID NO: 6287; WAN024BJW; Start 99; Stop 123
gacagagcgagactccgtcttaaaa

SEQ ID NO: 434312 - DNA, 25 bp, Artificial
  probe
  misc_feature (1)..(25): SEQ ID NO: 6288; WAN0249P3; Start 55; Stop 79
tataatagattccctgcgaaacaaa

SEQ ID NO: 434313 - DNA, 25 bp, Artificial
  probe
  misc_feature (1)..(25): SEQ ID NO: 6288; WAN0249P3; Start 54; Stop 78
ttataatagattccctgcgaaacaa

SEQ ID NO: 434314 - DNA, 25 bp, Artificial
  probe
  misc_feature (1)..(25): SEQ ID NO: 6288; WAN0249P3; Start 53; Stop 77
tttataatagattccctgcgaaaca

SEQ ID NO: 434315 - DNA, 25 bp, Artificial
  probe
  misc_feature (1)..(25): SEQ ID NO: 6288; WAN0249P3; Start 66; Stop 90
ccctgcgaaacaaaatatggtatag

SEQ ID NO: 434316 - DNA, 25 bp, Artificial
  probe
  misc_feature (1)..(25): SEQ ID NO: 6288; WAN0249P3; Start 65; Stop 89
tccctgcgaaacaaaatatggtata

SEQ ID NO: 434317 - DNA, 25 bp, Artificial
  probe
  misc_feature (1)..(25): SEQ ID NO: 6288; WAN0249P3; Start 60; Stop 84
tagattccctgcgaaacaaaatatg

SEQ ID NO: 434318 - DNA, 25 bp, Artificial
  probe
  misc_feature (1)..(25): SEQ ID NO: 6288; WAN0249P3; Start 64; Stop 88
ttccctgcgaaacaaaatatggtat

SEQ ID NO: 434319 - DNA, 25 bp, Artificial
  probe
  misc_feature (1)..(25): SEQ ID NO: 6288; WAN0249P3; Start 63; Stop 87
attccctgcgaaacaaaatatggta

SEQ ID NO: 434320 - DNA, 25 bp, Artificial
  probe
  misc_feature (1)..(25): SEQ ID NO: 6288; WAN0249P3; Start 58; Stop 82
aatagattccctgcgaaacaaaata

SEQ ID NO: 434321 - DNA, 25 bp, Artificial
  probe
  misc_feature (1)..(25): SEQ ID NO: 6288; WAN0249P3; Start 57; Stop 81
taatagattccctgcgaaacaaaat

SEQ ID NO: 434322 - DNA, 25 bp, Artificial
  probe
  misc_feature (1)..(25): SEQ ID NO: 6288; WAN0249P3; Start 56; Stop 80
ataatagattccctgcgaaacaaaa

SEQ ID NO: 434323 - DNA, 25 bp, Artificial
  probe
  misc_feature (1)..(25): SEQ ID NO: 6288; WAN0249P3; Start 59; Stop 83
atagattccctgcgaaacaaaatat

SEQ ID NO: 434324 - DNA, 25 bp, Artificial
  probe
  misc_feature (1)..(25): SEQ ID NO: 6288; WAN0249P3; Start 49; Stop 73
cccttttataatagattccctgcga

SEQ ID NO: 434325 - DNA, 25 bp, Artificial
  probe
  misc_feature (1)..(25): SEQ ID NO: 6288; WAN0249P3; Start 61; Stop 85
agattccctgcgaaacaaaatatgg

SEQ ID NO: 434326 - DNA, 25 bp, Artificial
  probe
  misc_feature (1)..(25): SEQ ID NO: 6288; WAN0249P3; Start 48; Stop 72
acccttttataatagattccctgcg

SEQ ID NO: 434327 - DNA, 25 bp, Artificial
  probe
  misc_feature (1)..(25): SEQ ID NO: 6288; WAN0249P3; Start 62; Stop 86
gattccctgcgaaacaaaatatggt

SEQ ID NO: 434328 - DNA, 25 bp, Artificial
  probe
  misc_feature (1)..(25): SEQ ID NO: 6288; WAN0249P3; Start 50; Stop 74
ccttttataatagattccctgcgaa

SEQ ID NO: 434329 - DNA, 25 bp, Artificial
  probe
  misc_feature (1)..(25): SEQ ID NO: 6288; WAN0249P3; Start 47; Stop 71
tacccttttataatagattccctgc

SEQ ID NO: 434330 - DNA, 25 bp, Artificial
  probe
  misc_feature (1)..(25): SEQ ID NO: 6288; WAN0249P3; Start 52; Stop 76
ttttataatagattccctgcgaaac

SEQ ID NO: 434331 - DNA, 25 bp, Artificial
  probe
  misc_feature (1)..(25): SEQ ID NO: 6288; WAN0249P3; Start 51; Stop 75
cttttataatagattccctgcgaaa

SEQ ID NO: 434332 - DNA, 25 bp, Artificial
  probe
  misc_feature (1)..(25): SEQ ID NO: 6288; WAN0249P3; Start 11; Stop 35
agtataaaagaaaagggtaagtgtt

SEQ ID NO: 434333 - DNA, 25 bp, Artificial
  probe
  misc_feature (1)..(25): SEQ ID NO: 6288; WAN0249P3; Start 10; Stop 34
aagtataaaagaaaagggtaagtgt

SEQ ID NO: 434334 - DNA, 25 bp, Artificial
  probe
  misc_feature (1)..(25): SEQ ID NO: 6288; WAN0249P3; Start 8; Stop 32
tgaagtataaaagaaaagggtaagt

SEQ ID NO: 434335 - DNA, 25 bp, Artificial
  probe
  misc_feature (1)..(25): SEQ ID NO: 6288; WAN0249P3; Start 9; Stop 33
gaagtataaaagaaaagggtaagtg

SEQ ID NO: 434336 - DNA, 25 bp, Artificial
  probe
  misc_feature (1)..(25): SEQ ID NO: 6288; WAN0249P3; Start 12; Stop 36
gtataaaagaaaagggtaagtgttt

SEQ ID NO: 434337 - DNA, 25 bp, Artificial
  probe
  misc_feature (1)..(25): SEQ ID NO: 6288; WAN0249P3; Start 46; Stop 70
ttacccttttataatagattccctg

SEQ ID NO: 434338 - DNA, 25 bp, Artificial
  probe
  misc_feature (1)..(25): SEQ ID NO: 6288; WAN0249P3; Start 44; Stop 68
acttacccttttataatagattccc

SEQ ID NO: 434339 - DNA, 25 bp, Artificial
  probe
  misc_feature (1)..(25): SEQ ID NO: 6288; WAN0249P3; Start 45; Stop 69
cttacccttttataatagattccct

SEQ ID NO: 434340 - DNA, 25 bp, Artificial
  probe
  misc_feature (1)..(25): SEQ ID NO: 6288; WAN0249P3; Start 7; Stop 31
atgaagtataaaagaaaagggtaag

SEQ ID NO: 434341 - DNA, 25 bp, Artificial
  probe
  misc_feature (1)..(25): SEQ ID NO: 6288; WAN0249P3; Start 13; Stop 37
tataaaagaaaagggtaagtgtttt

SEQ ID NO: 434342 - DNA, 25 bp, Artificial
  probe
  misc_feature (1)..(25): SEQ ID NO: 6288; WAN0249P3; Start 35; Stop 59
ttttgcaatacttacccttttataa

SEQ ID NO: 434343 - DNA, 25 bp, Artificial
  probe
  misc_feature (1)..(25): SEQ ID NO: 6289; WAN024ASF; Start 86; Stop 110
attctactctgaaggattcctacct

SEQ ID NO: 434344 - DNA, 25 bp, Artificial
  probe
  misc_feature (1)..(25): SEQ ID NO: 6289; WAN024ASF; Start 85; Stop 109
gattctactctgaaggattcctacc

SEQ ID NO: 434345 - DNA, 25 bp, Artificial
  probe
  misc_feature (1)..(25): SEQ ID NO: 6289; WAN024ASF; Start 100; Stop 124
gattcctaccttatttcacaacgat

SEQ ID NO: 434346 - DNA, 25 bp, Artificial
  probe
  misc_feature (1)..(25): SEQ ID NO: 6289; WAN024ASF; Start 119; Stop 143
aacgatattaacgagtttagttggc

SEQ ID NO: 434347 - DNA, 25 bp, Artificial
  probe
  misc_feature (1)..(25): SEQ ID NO: 6289; WAN024ASF; Start 120; Stop 144
acgatattaacgagtttagttggct

SEQ ID NO: 434348 - DNA, 25 bp, Artificial
  probe
  misc_feature (1)..(25): SEQ ID NO: 6289; WAN024ASF; Start 99; Stop 123
ggattcctaccttatttcacaacga

SEQ ID NO: 434349 - DNA, 25 bp, Artificial
  probe
  misc_feature (1)..(25): SEQ ID NO: 6289; WAN024ASF; Start 84; Stop 108
agattctactctgaaggattcctac

SEQ ID NO: 434350 - DNA, 25 bp, Artificial
  probe
  misc_feature (1)..(25): SEQ ID NO: 6289; WAN024ASF; Start 169; Stop 193
ggttggaaatcagcaaataaattgg

SEQ ID NO: 434351 - DNA, 25 bp, Artificial
  probe
  misc_feature (1)..(25): SEQ ID NO: 6289; WAN024ASF; Start 165; Stop 189
ttgaggttggaaatcagcaaataaa

SEQ ID NO: 434352 - DNA, 25 bp, Artificial
  probe
  misc_feature (1)..(25): SEQ ID NO: 6289; WAN024ASF; Start 166; Stop 190
tgaggttggaaatcagcaaataaat

SEQ ID NO: 434353 - DNA, 25 bp, Artificial
  probe
  misc_feature (1)..(25): SEQ ID NO: 6289; WAN024ASF; Start 121; Stop 145
cgatattaacgagtttagttggctc

SEQ ID NO: 434354 - DNA, 25 bp, Artificial
  probe
  misc_feature (1)..(25): SEQ ID NO: 6289; WAN024ASF; Start 168; Stop 192
aggttggaaatcagcaaataaattg

SEQ ID NO: 434355 - DNA, 25 bp, Artificial
  probe
  misc_feature (1)..(25): SEQ ID NO: 6289; WAN024ASF; Start 122; Stop 146
gatattaacgagtttagttggctca

SEQ ID NO: 434356 - DNA, 25 bp, Artificial
  probe
  misc_feature (1)..(25): SEQ ID NO: 6289; WAN024ASF; Start 115; Stop 139
tcacaacgatattaacgagtttagt

SEQ ID NO: 434357 - DNA, 25 bp, Artificial
  probe
  misc_feature (1)..(25): SEQ ID NO: 6289; WAN024ASF; Start 167; Stop 191
gaggttggaaatcagcaaataaatt

SEQ ID NO: 434358 - DNA, 25 bp, Artificial
  probe
  misc_feature (1)..(25): SEQ ID NO: 6289; WAN024ASF; Start 124; Stop 148
tattaacgagtttagttggctcaaa

SEQ ID NO: 434359 - DNA, 25 bp, Artificial
  probe
  misc_feature (1)..(25): SEQ ID NO: 6289; WAN024ASF; Start 101; Stop 125
attcctaccttatttcacaacgata

SEQ ID NO: 434360 - DNA, 25 bp, Artificial
  probe
  misc_feature (1)..(25): SEQ ID NO: 6289; WAN024ASF; Start 103; Stop 127
tcctaccttatttcacaacgatatt

SEQ ID NO: 434361 - DNA, 25 bp, Artificial
  probe
  misc_feature (1)..(25): SEQ ID NO: 6289; WAN024ASF; Start 102; Stop 126
ttcctaccttatttcacaacgatat

SEQ ID NO: 434362 - DNA, 25 bp, Artificial
  probe
  misc_feature (1)..(25): SEQ ID NO: 6289; WAN024ASF; Start 123; Stop 147
atattaacgagtttagttggctcaa

SEQ ID NO: 434363 - DNA, 25 bp, Artificial
  probe
  misc_feature (1)..(25): SEQ ID NO: 6289; WAN024ASF; Start 107; Stop 131
accttatttcacaacgatattaacg

SEQ ID NO: 434364 - DNA, 25 bp, Artificial
  probe
  misc_feature (1)..(25): SEQ ID NO: 6289; WAN024ASF; Start 157; Stop 181
gaaactgtttgaggttggaaatcag

SEQ ID NO: 434365 - DNA, 25 bp, Artificial
  probe
  misc_feature (1)..(25): SEQ ID NO: 6289; WAN024ASF; Start 116; Stop 140
cacaacgatattaacgagtttagtt

SEQ ID NO: 434366 - DNA, 25 bp, Artificial
  probe
  misc_feature (1)..(25): SEQ ID NO: 6289; WAN024ASF; Start 108; Stop 132
ccttatttcacaacgatattaacga

SEQ ID NO: 434367 - DNA, 25 bp, Artificial
  probe
  misc_feature (1)..(25): SEQ ID NO: 6289; WAN024ASF; Start 112; Stop 136
atttcacaacgatattaacgagttt

SEQ ID NO: 434368 - DNA, 25 bp, Artificial
  probe
  misc_feature (1)..(25): SEQ ID NO: 6289; WAN024ASF; Start 156; Stop 180
ggaaactgtttgaggttggaaatca

SEQ ID NO: 434369 - DNA, 25 bp, Artificial
  probe
  misc_feature (1)..(25): SEQ ID NO: 6289; WAN024ASF; Start 114; Stop 138
ttcacaacgatattaacgagtttag

SEQ ID NO: 434370 - DNA, 25 bp, Artificial
  probe
  misc_feature (1)..(25): SEQ ID NO: 6289; WAN024ASF; Start 155; Stop 179
gggaaactgtttgaggttggaaatc

SEQ ID NO: 434371 - DNA, 25 bp, Artificial
  probe
  misc_feature (1)..(25): SEQ ID NO: 6289; WAN024ASF; Start 98; Stop 122
aggattcctaccttatttcacaacg

SEQ ID NO: 434372 - DNA, 25 bp, Artificial
  probe
  misc_feature (1)..(25): SEQ ID NO: 6289; WAN024ASF; Start 113; Stop 137
tttcacaacgatattaacgagttta

SEQ ID NO: 434373 - DNA, 25 bp, Artificial
  probe
  misc_feature (1)..(25): SEQ ID NO: 6289; WAN024ASF; Start 110; Stop 134
ttatttcacaacgatattaacgagt

SEQ ID NO: 434374 - DNA, 25 bp, Artificial
  probe
  misc_feature (1)..(25): SEQ ID NO: 6289; WAN024ASF; Start 125; Stop 149
attaacgagtttagttggctcaaac

SEQ ID NO: 434375 - DNA, 25 bp, Artificial
  probe
  misc_feature (1)..(25): SEQ ID NO: 6289; WAN024ASF; Start 111; Stop 135
tatttcacaacgatattaacgagtt

SEQ ID NO: 434376 - DNA, 25 bp, Artificial
  probe
  misc_feature (1)..(25): SEQ ID NO: 6290; WAN024A7J; Start 26; Stop 50
acaatacctagtcctacaactaacg

SEQ ID NO: 434377 - DNA, 25 bp, Artificial
  probe
  misc_feature (1)..(25): SEQ ID NO: 6290; WAN024A7J; Start 29; Stop 53
atacctagtcctacaactaacgctt

SEQ ID NO: 434378 - DNA, 25 bp, Artificial
  probe
  misc_feature (1)..(25): SEQ ID NO: 6290; WAN024A7J; Start 28; Stop 52
aatacctagtcctacaactaacgct

SEQ ID NO: 434379 - DNA, 25 bp, Artificial
  probe
  misc_feature (1)..(25): SEQ ID NO: 6290; WAN024A7J; Start 27; Stop 51
caatacctagtcctacaactaacgc

SEQ ID NO: 434380 - DNA, 25 bp, Artificial
  probe
  misc_feature (1)..(25): SEQ ID NO: 6290; WAN024A7J; Start 65; Stop 89
ttagtagccgtttatcttctccttt

SEQ ID NO: 434381 - DNA, 25 bp, Artificial
  probe
  misc_feature (1)..(25): SEQ ID NO: 6290; WAN024A7J; Start 64; Stop 88
tttagtagccgtttatcttctcctt

SEQ ID NO: 434382 - DNA, 25 bp, Artificial
  probe
  misc_feature (1)..(25): SEQ ID NO: 6290; WAN024A7J; Start 1; Stop 25
aggtaaggctgataagaatattgaa

SEQ ID NO: 434383 - DNA, 25 bp, Artificial
  probe
  misc_feature (1)..(25): SEQ ID NO: 6290; WAN024A7J; Start 25; Stop 49
aacaatacctagtcctacaactaac

SEQ ID NO: 434384 - DNA, 25 bp, Artificial
  probe
  misc_feature (1)..(25): SEQ ID NO: 6290; WAN024A7J; Start 22; Stop 46
tgaaacaatacctagtcctacaact

SEQ ID NO: 434385 - DNA, 25 bp, Artificial
  probe
  misc_feature (1)..(25): SEQ ID NO: 6290; WAN024A7J; Start 21; Stop 45
ttgaaacaatacctagtcctacaac

SEQ ID NO: 434386 - DNA, 25 bp, Artificial
  probe
  misc_feature (1)..(25): SEQ ID NO: 6290; WAN024A7J; Start 32; Stop 56
cctagtcctacaactaacgctttaa

SEQ ID NO: 434387 - DNA, 25 bp, Artificial
  probe
  misc_feature (1)..(25): SEQ ID NO: 6290; WAN024A7J; Start 31; Stop 55
acctagtcctacaactaacgcttta

SEQ ID NO: 434388 - DNA, 25 bp, Artificial
  probe
  misc_feature (1)..(25): SEQ ID NO: 6290; WAN024A7J; Start 30; Stop 54
tacctagtcctacaactaacgcttt

SEQ ID NO: 434389 - DNA, 25 bp, Artificial
  probe
  misc_feature (1)..(25): SEQ ID NO: 6290; WAN024A7J; Start 67; Stop 91
agtagccgtttatcttctcctttta

SEQ ID NO: 434390 - DNA, 25 bp, Artificial
  probe
  misc_feature (1)..(25): SEQ ID NO: 6290; WAN024A7J; Start 66; Stop 90
tagtagccgtttatcttctcctttt

SEQ ID NO: 434391 - DNA, 25 bp, Artificial
  probe
  misc_feature (1)..(25): SEQ ID NO: 6290; WAN024A7J; Start 63; Stop 87
ttttagtagccgtttatcttctcct

SEQ ID NO: 434392 - DNA, 25 bp, Artificial
  probe
  misc_feature (1)..(25): SEQ ID NO: 6290; WAN024A7J; Start 68; Stop 92
gtagccgtttatcttctccttttat

SEQ ID NO: 434393 - DNA, 25 bp, Artificial
  probe
  misc_feature (1)..(25): SEQ ID NO: 6290; WAN024A7J; Start 33; Stop 57
ctagtcctacaactaacgctttaaa

SEQ ID NO: 434394 - DNA, 25 bp, Artificial
  probe
  misc_feature (1)..(25): SEQ ID NO: 6290; WAN024A7J; Start 23; Stop 47
gaaacaatacctagtcctacaacta

SEQ ID NO: 434395 - DNA, 25 bp, Artificial
  probe
  misc_feature (1)..(25): SEQ ID NO: 6290; WAN024A7J; Start 96; Stop 120
acaatgaatgaaatgtgcatctaaa

SEQ ID NO: 434396 - DNA, 25 bp, Artificial
  probe
  misc_feature (1)..(25): SEQ ID NO: 6290; WAN024A7J; Start 95; Stop 119
aacaatgaatgaaatgtgcatctaa

SEQ ID NO: 434397 - DNA, 25 bp, Artificial
  probe
  misc_feature (1)..(25): SEQ ID NO: 6290; WAN024A7J; Start 94; Stop 118
aaacaatgaatgaaatgtgcatcta

SEQ ID NO: 434398 - DNA, 25 bp, Artificial
  probe
  misc_feature (1)..(25): SEQ ID NO: 6290; WAN024A7J; Start 2; Stop 26
ggtaaggctgataagaatattgaaa

SEQ ID NO: 434399 - DNA, 25 bp, Artificial
  probe
  misc_feature (1)..(25): SEQ ID NO: 6290; WAN024A7J; Start 20; Stop 44
attgaaacaatacctagtcctacaa

SEQ ID NO: 434400 - DNA, 25 bp, Artificial
  probe
  misc_feature (1)..(25): SEQ ID NO: 6290; WAN024A7J; Start 5; Stop 29
aaggctgataagaatattgaaacaa

SEQ ID NO: 434401 - DNA, 25 bp, Artificial
  probe
  misc_feature (1)..(25): SEQ ID NO: 6290; WAN024A7J; Start 24; Stop 48
aaacaatacctagtcctacaactaa

SEQ ID NO: 434402 - DNA, 25 bp, Artificial
  probe
  misc_feature (1)..(25): SEQ ID NO: 6290; WAN024A7J; Start 235; Stop 259
tgatttaagtatagcacaagtaagt

SEQ ID NO: 434403 - DNA, 25 bp, Artificial
  probe
  misc_feature (1)..(25): SEQ ID NO: 6290; WAN024A7J; Start 36; Stop 60
gtcctacaactaacgctttaaaact

SEQ ID NO: 434404 - DNA, 25 bp, Artificial
  probe
  misc_feature (1)..(25): SEQ ID NO: 6290; WAN024A7J; Start 156; Stop 180
tccttcctagctcgtaaaataaact

SEQ ID NO: 434405 - DNA, 25 bp, Artificial
  probe
  misc_feature (1)..(25): SEQ ID NO: 6290; WAN024A7J; Start 97; Stop 121
caatgaatgaaatgtgcatctaaat

SEQ ID NO: 434406 - DNA, 25 bp, Artificial
  probe
  misc_feature (1)..(25): SEQ ID NO: 6290; WAN024A7J; Start 38; Stop 62
cctacaactaacgctttaaaactct

SEQ ID NO: 434407 - DNA, 25 bp, Artificial
  probe
  misc_feature (1)..(25): SEQ ID NO: 6290; WAN024A7J; Start 37; Stop 61
tcctacaactaacgctttaaaactc

SEQ ID NO: 434408 - DNA, 25 bp, Artificial
  probe
  misc_feature (1)..(25): SEQ ID NO: 6290; WAN024A7J; Start 112; Stop 136
gcatctaaatatagtttattctggc

SEQ ID NO: 434409 - DNA, 25 bp, Artificial
  probe
  misc_feature (1)..(25): SEQ ID NO: 6291; WAN024GNG; Start 33; Stop 57
caagagtcgtaaggcaaaggatatg

SEQ ID NO: 434410 - DNA, 25 bp, Artificial
  probe
  misc_feature (1)..(25): SEQ ID NO: 6291; WAN024GNG; Start 41; Stop 65
gtaaggcaaaggatatggcagaatc

SEQ ID NO: 434411 - DNA, 25 bp, Artificial
  probe
  misc_feature (1)..(25): SEQ ID NO: 6291; WAN024GNG; Start 12; Stop 36
attgattgtcagtttgaagaccaag

SEQ ID NO: 434412 - DNA, 25 bp, Artificial
  probe
  misc_feature (1)..(25): SEQ ID NO: 6291; WAN024GNG; Start 11; Stop 35
aattgattgtcagtttgaagaccaa

SEQ ID NO: 434413 - DNA, 25 bp, Artificial
  probe
  misc_feature (1)..(25): SEQ ID NO: 6291; WAN024GNG; Start 13; Stop 37
ttgattgtcagtttgaagaccaaga

SEQ ID NO: 434414 - DNA, 25 bp, Artificial
  probe
  misc_feature (1)..(25): SEQ ID NO: 6291; WAN024GNG; Start 16; Stop 40
attgtcagtttgaagaccaagagtc

SEQ ID NO: 434415 - DNA, 25 bp, Artificial
  probe
  misc_feature (1)..(25): SEQ ID NO: 6291; WAN024GNG; Start 15; Stop 39
gattgtcagtttgaagaccaagagt

SEQ ID NO: 434416 - DNA, 25 bp, Artificial
  probe
  misc_feature (1)..(25): SEQ ID NO: 6291; WAN024GNG; Start 14; Stop 38
tgattgtcagtttgaagaccaagag

SEQ ID NO: 434417 - DNA, 25 bp, Artificial
  probe
  misc_feature (1)..(25): SEQ ID NO: 6291; WAN024GNG; Start 150; Stop 174
agatatttccaatcatcacgatagt

SEQ ID NO: 434418 - DNA, 25 bp, Artificial
  probe
  misc_feature (1)..(25): SEQ ID NO: 6291; WAN024GNG; Start 34; Stop 58
aagagtcgtaaggcaaaggatatgg

SEQ ID NO: 434419 - DNA, 25 bp, Artificial
  probe
  misc_feature (1)..(25): SEQ ID NO: 6291; WAN024GNG; Start 32; Stop 56
ccaagagtcgtaaggcaaaggatat

SEQ ID NO: 434420 - DNA, 25 bp, Artificial
  probe
  misc_feature (1)..(25): SEQ ID NO: 6291; WAN024GNG; Start 82; Stop 106
gcacaatttctagtgaacctcttta

SEQ ID NO: 434421 - DNA, 25 bp, Artificial
  probe
  misc_feature (1)..(25): SEQ ID NO: 6291; WAN024GNG; Start 21; Stop 45
cagtttgaagaccaagagtcgtaag

SEQ ID NO: 434422 - DNA, 25 bp, Artificial
  probe
  misc_feature (1)..(25): SEQ ID NO: 6291; WAN024GNG; Start 20; Stop 44
tcagtttgaagaccaagagtcgtaa

SEQ ID NO: 434423 - DNA, 25 bp, Artificial
  probe
  misc_feature (1)..(25): SEQ ID NO: 6291; WAN024GNG; Start 81; Stop 105
ggcacaatttctagtgaacctcttt

SEQ ID NO: 434424 - DNA, 25 bp, Artificial
  probe
  misc_feature (1)..(25): SEQ ID NO: 6291; WAN024GNG; Start 107; Stop 131
aatctattacgtttgactgtggaaa

SEQ ID NO: 434425 - DNA, 25 bp, Artificial
  probe
  misc_feature (1)..(25): SEQ ID NO: 6291; WAN024GNG; Start 106; Stop 130
aaatctattacgtttgactgtggaa

SEQ ID NO: 434426 - DNA, 25 bp, Artificial
  probe
  misc_feature (1)..(25): SEQ ID NO: 6291; WAN024GNG; Start 151; Stop 175
gatatttccaatcatcacgatagtg

SEQ ID NO: 434427 - DNA, 25 bp, Artificial
  probe
  misc_feature (1)..(25): SEQ ID NO: 6291; WAN024GNG; Start 22; Stop 46
agtttgaagaccaagagtcgtaagg

SEQ ID NO: 434428 - DNA, 25 bp, Artificial
  probe
  misc_feature (1)..(25): SEQ ID NO: 6291; WAN024GNG; Start 19; Stop 43
gtcagtttgaagaccaagagtcgta

SEQ ID NO: 434429 - DNA, 25 bp, Artificial
  probe
  misc_feature (1)..(25): SEQ ID NO: 6291; WAN024GNG; Start 40; Stop 64
cgtaaggcaaaggatatggcagaat

SEQ ID NO: 434430 - DNA, 25 bp, Artificial
  probe
  misc_feature (1)..(25): SEQ ID NO: 6291; WAN024GNG; Start 149; Stop 173
aagatatttccaatcatcacgatag

SEQ ID NO: 434431 - DNA, 25 bp, Artificial
  probe
  misc_feature (1)..(25): SEQ ID NO: 6291; WAN024GNG; Start 80; Stop 104
tggcacaatttctagtgaacctctt

SEQ ID NO: 434432 - DNA, 25 bp, Artificial
  probe
  misc_feature (1)..(25): SEQ ID NO: 6291; WAN024GNG; Start 105; Stop 129
taaatctattacgtttgactgtgga

SEQ ID NO: 434433 - DNA, 25 bp, Artificial
  probe
  misc_feature (1)..(25): SEQ ID NO: 6291; WAN024GNG; Start 31; Stop 55
accaagagtcgtaaggcaaaggata

SEQ ID NO: 434434 - DNA, 25 bp, Artificial
  probe
  misc_feature (1)..(25): SEQ ID NO: 6291; WAN024GNG; Start 184; Stop 208
tttgcgaatctaggatgtccaagac

SEQ ID NO: 434435 - DNA, 25 bp, Artificial
  probe
  misc_feature (1)..(25): SEQ ID NO: 6291; WAN024GNG; Start 79; Stop 103
ctggcacaatttctagtgaacctct

SEQ ID NO: 434436 - DNA, 25 bp, Artificial
  probe
  misc_feature (1)..(25): SEQ ID NO: 6291; WAN024GNG; Start 25; Stop 49
ttgaagaccaagagtcgtaaggcaa

SEQ ID NO: 434437 - DNA, 25 bp, Artificial
  probe
  misc_feature (1)..(25): SEQ ID NO: 6291; WAN024GNG; Start 148; Stop 172
aaagatatttccaatcatcacgata

SEQ ID NO: 434438 - DNA, 25 bp, Artificial
  probe
  misc_feature (1)..(25): SEQ ID NO: 6291; WAN024GNG; Start 83; Stop 107
cacaatttctagtgaacctctttaa

SEQ ID NO: 434439 - DNA, 25 bp, Artificial
  probe
  misc_feature (1)..(25): SEQ ID NO: 6291; WAN024GNG; Start 17; Stop 41
ttgtcagtttgaagaccaagagtcg

SEQ ID NO: 434440 - DNA, 25 bp, Artificial
  probe
  misc_feature (1)..(25): SEQ ID NO: 6291; WAN024GNG; Start 104; Stop 128
ttaaatctattacgtttgactgtgg

SEQ ID NO: 434441 - DNA, 25 bp, Artificial
  probe
  misc_feature (1)..(25): SEQ ID NO: 6291; WAN024GNG; Start 147; Stop 171
gaaagatatttccaatcatcacgat

SEQ ID NO: 434442 - DNA, 25 bp, Artificial
  probe
  misc_feature (1)..(25): SEQ ID NO: 6292; WAN024BAF; Start 84; Stop 108
cgtggctagtttcctagtttgcttt

SEQ ID NO: 434443 - DNA, 25 bp, Artificial
  probe
  misc_feature (1)..(25): SEQ ID NO: 6292; WAN024BAF; Start 85; Stop 109
gtggctagtttcctagtttgctttt

SEQ ID NO: 434444 - DNA, 25 bp, Artificial
  probe
  misc_feature (1)..(25): SEQ ID NO: 6292; WAN024BAF; Start 83; Stop 107
ccgtggctagtttcctagtttgctt

SEQ ID NO: 434445 - DNA, 25 bp, Artificial
  probe
  misc_feature (1)..(25): SEQ ID NO: 6293; WAN024BRE; Start 89; Stop 113
tcgggttacaagaagggattgattg

SEQ ID NO: 434446 - DNA, 25 bp, Artificial
  probe
  misc_feature (1)..(25): SEQ ID NO: 6293; WAN024BRE; Start 88; Stop 112
gtcgggttacaagaagggattgatt

SEQ ID NO: 434447 - DNA, 25 bp, Artificial
  probe
  misc_feature (1)..(25): SEQ ID NO: 6293; WAN024BRE; Start 5; Stop 29
atgatacgcattttaaggttttggg

SEQ ID NO: 434448 - DNA, 25 bp, Artificial
  probe
  misc_feature (1)..(25): SEQ ID NO: 6293; WAN024BRE; Start 4; Stop 28
gatgatacgcattttaaggttttgg

SEQ ID NO: 434449 - DNA, 25 bp, Artificial
  probe
  misc_feature (1)..(25): SEQ ID NO: 6293; WAN024BRE; Start 158; Stop 182
cattaagatggtggaccaggtgttc

SEQ ID NO: 434450 - DNA, 25 bp, Artificial
  probe
  misc_feature (1)..(25): SEQ ID NO: 6293; WAN024BRE; Start 3; Stop 27
agatgatacgcattttaaggttttg

SEQ ID NO: 434451 - DNA, 25 bp, Artificial
  probe
  misc_feature (1)..(25): SEQ ID NO: 6293; WAN024BRE; Start 6; Stop 30
tgatacgcattttaaggttttgggg

SEQ ID NO: 434452 - DNA, 25 bp, Artificial
  probe
  misc_feature (1)..(25): SEQ ID NO: 6293; WAN024BRE; Start 155; Stop 179
caacattaagatggtggaccaggtg

SEQ ID NO: 434453 - DNA, 25 bp, Artificial
  probe
  misc_feature (1)..(25): SEQ ID NO: 6293; WAN024BRE; Start 79; Stop 103
cttattgttgtcgggttacaagaag

SEQ ID NO: 434454 - DNA, 25 bp, Artificial
  probe
  misc_feature (1)..(25): SEQ ID NO: 6293; WAN024BRE; Start 143; Stop 167
caaccttgcaaccaacattaagatg

SEQ ID NO: 434455 - DNA, 25 bp, Artificial
  probe
  misc_feature (1)..(25): SEQ ID NO: 6293; WAN024BRE; Start 80; Stop 104
ttattgttgtcgggttacaagaagg

SEQ ID NO: 434456 - DNA, 25 bp, Artificial
  probe
  misc_feature (1)..(25): SEQ ID NO: 6293; WAN024BRE; Start 87; Stop 111
tgtcgggttacaagaagggattgat

SEQ ID NO: 434457 - DNA, 25 bp, Artificial
  probe
  misc_feature (1)..(25): SEQ ID NO: 6293; WAN024BRE; Start 157; Stop 181
acattaagatggtggaccaggtgtt

SEQ ID NO: 434458 - DNA, 25 bp, Artificial
  probe
  misc_feature (1)..(25): SEQ ID NO: 6293; WAN024BRE; Start 156; Stop 180
aacattaagatggtggaccaggtgt

SEQ ID NO: 434459 - DNA, 25 bp, Artificial
  probe
  misc_feature (1)..(25): SEQ ID NO: 6293; WAN024BRE; Start 92; Stop 116
ggttacaagaagggattgattgcgg

SEQ ID NO: 434460 - DNA, 25 bp, Artificial
  probe
  misc_feature (1)..(25): SEQ ID NO: 6293; WAN024BRE; Start 91; Stop 115
gggttacaagaagggattgattgcg

SEQ ID NO: 434461 - DNA, 25 bp, Artificial
  probe
  misc_feature (1)..(25): SEQ ID NO: 6293; WAN024BRE; Start 90; Stop 114
cgggttacaagaagggattgattgc

SEQ ID NO: 434462 - DNA, 25 bp, Artificial
  probe
  misc_feature (1)..(25): SEQ ID NO: 6293; WAN024BRE; Start 78; Stop 102
gcttattgttgtcgggttacaagaa

SEQ ID NO: 434463 - DNA, 25 bp, Artificial
  probe
  misc_feature (1)..(25): SEQ ID NO: 6293; WAN024BRE; Start 2; Stop 26
tagatgatacgcattttaaggtttt

SEQ ID NO: 434464 - DNA, 25 bp, Artificial
  probe
  misc_feature (1)..(25): SEQ ID NO: 6293; WAN024BRE; Start 1; Stop 25
atagatgatacgcattttaaggttt

SEQ ID NO: 434465 - DNA, 25 bp, Artificial
  probe
  misc_feature (1)..(25): SEQ ID NO: 6293; WAN024BRE; Start 154; Stop 178
ccaacattaagatggtggaccaggt

SEQ ID NO: 434466 - DNA, 25 bp, Artificial
  probe
  misc_feature (1)..(25): SEQ ID NO: 6293; WAN024BRE; Start 81; Stop 105
tattgttgtcgggttacaagaaggg

SEQ ID NO: 434467 - DNA, 25 bp, Artificial
  probe
  misc_feature (1)..(25): SEQ ID NO: 6293; WAN024BRE; Start 93; Stop 117
gttacaagaagggattgattgcggc

SEQ ID NO: 434468 - DNA, 25 bp, Artificial
  probe
  misc_feature (1)..(25): SEQ ID NO: 6293; WAN024BRE; Start 159; Stop 183
attaagatggtggaccaggtgttcg

SEQ ID NO: 434469 - DNA, 25 bp, Artificial
  probe
  misc_feature (1)..(25): SEQ ID NO: 6293; WAN024BRE; Start 144; Stop 168
aaccttgcaaccaacattaagatgg

SEQ ID NO: 434470 - DNA, 25 bp, Artificial
  probe
  misc_feature (1)..(25): SEQ ID NO: 6293; WAN024BRE; Start 94; Stop 118
ttacaagaagggattgattgcggct

SEQ ID NO: 434471 - DNA, 25 bp, Artificial
  probe
  misc_feature (1)..(25): SEQ ID NO: 6293; WAN024BRE; Start 77; Stop 101
agcttattgttgtcgggttacaaga

SEQ ID NO: 434472 - DNA, 25 bp, Artificial
  probe
  misc_feature (1)..(25): SEQ ID NO: 6293; WAN024BRE; Start 74; Stop 98
caaagcttattgttgtcgggttaca

SEQ ID NO: 434473 - DNA, 25 bp, Artificial
  probe
  misc_feature (1)..(25): SEQ ID NO: 6293; WAN024BRE; Start 152; Stop 176
aaccaacattaagatggtggaccag

SEQ ID NO: 434474 - DNA, 25 bp, Artificial
  probe
  misc_feature (1)..(25): SEQ ID NO: 6293; WAN024BRE; Start 151; Stop 175
caaccaacattaagatggtggacca

SEQ ID NO: 434475 - DNA, 25 bp, Artificial
  probe
  misc_feature (1)..(25): SEQ ID NO: 6293; WAN024BRE; Start 86; Stop 110
ttgtcgggttacaagaagggattga

SEQ ID NO: 434476 - DNA, 25 bp, Artificial
  probe
  misc_feature (1)..(25): SEQ ID NO: 6293; WAN024BRE; Start 85; Stop 109
gttgtcgggttacaagaagggattg

SEQ ID NO: 434477 - DNA, 25 bp, Artificial
  probe
  misc_feature (1)..(25): SEQ ID NO: 6293; WAN024BRE; Start 142; Stop 166
gcaaccttgcaaccaacattaagat

SEQ ID NO: 434478 - DNA, 25 bp, Artificial
  probe
  misc_feature (1)..(25): SEQ ID NO: 6295; WAN024BMR-3; Start 509; Stop 533
cggatgcgatctgtataatggtata

SEQ ID NO: 434479 - DNA, 25 bp, Artificial
  probe
  misc_feature (1)..(25): SEQ ID NO: 6295; WAN024BMR-3; Start 890; Stop 914
agacgaagaactcttgatattagcg

SEQ ID NO: 434480 - DNA, 25 bp, Artificial
  probe
  misc_feature (1)..(25): SEQ ID NO: 6295; WAN024BMR-3; Start 1557; Stop 1581
gctggaataggattaggcttactaa

SEQ ID NO: 434481 - DNA, 25 bp, Artificial
  probe
  misc_feature (1)..(25): SEQ ID NO: 6295; WAN024BMR-3; Start 429; Stop 453
agtggtacttcaggagatatatgct

SEQ ID NO: 434482 - DNA, 25 bp, Artificial
  probe
  misc_feature (1)..(25): SEQ ID NO: 6295; WAN024BMR-3; Start 889; Stop 913
gagacgaagaactcttgatattagc

SEQ ID NO: 434483 - DNA, 25 bp, Artificial
  probe
  misc_feature (1)..(25): SEQ ID NO: 6295; WAN024BMR-3; Start 428; Stop 452
tagtggtacttcaggagatatatgc

SEQ ID NO: 434484 - DNA, 25 bp, Artificial
  probe
  misc_feature (1)..(25): SEQ ID NO: 6295; WAN024BMR-3; Start 430; Stop 454
gtggtacttcaggagatatatgctg

SEQ ID NO: 434485 - DNA, 25 bp, Artificial
  probe
  misc_feature (1)..(25): SEQ ID NO: 6295; WAN024BMR-3; Start 1559; Stop 1583
tggaataggattaggcttactaact

SEQ ID NO: 434486 - DNA, 25 bp, Artificial
  probe
  misc_feature (1)..(25): SEQ ID NO: 6295; WAN024BMR-3; Start 510; Stop 534
ggatgcgatctgtataatggtatat

SEQ ID NO: 434487 - DNA, 25 bp, Artificial
  probe
  misc_feature (1)..(25): SEQ ID NO: 6295; WAN024BMR-3; Start 1558; Stop 1582
ctggaataggattaggcttactaac

SEQ ID NO: 434488 - DNA, 25 bp, Artificial
  probe
  misc_feature (1)..(25): SEQ ID NO: 6295; WAN024BMR-3; Start 422; Stop 446
ttcatatagtggtacttcaggagat

SEQ ID NO: 434489 - DNA, 25 bp, Artificial
  probe
  misc_feature (1)..(25): SEQ ID NO: 6295; WAN024BMR-3; Start 431; Stop 455
tggtacttcaggagatatatgctgg

SEQ ID NO: 434490 - DNA, 25 bp, Artificial
  probe
  misc_feature (1)..(25): SEQ ID NO: 6295; WAN024BMR-3; Start 847; Stop 871
ctggtgcgattatacatttgctaaa

SEQ ID NO: 434491 - DNA, 25 bp, Artificial
  probe
  misc_feature (1)..(25): SEQ ID NO: 6295; WAN024BMR-3; Start 514; Stop 538
gcgatctgtataatggtatatcagg

SEQ ID NO: 434492 - DNA, 25 bp, Artificial
  probe
  misc_feature (1)..(25): SEQ ID NO: 6295; WAN024BMR-3; Start 826; Stop 850
ttgatgttcttgtaggttctgctgg

SEQ ID NO: 434493 - DNA, 25 bp, Artificial
  probe
  misc_feature (1)..(25): SEQ ID NO: 6295; WAN024BMR-3; Start 737; Stop 761
gcctgaacactttaattctgatgaa

SEQ ID NO: 434494 - DNA, 25 bp, Artificial
  probe
  misc_feature (1)..(25): SEQ ID NO: 6295; WAN024BMR-3; Start 735; Stop 759
atgcctgaacactttaattctgatg

SEQ ID NO: 434495 - DNA, 25 bp, Artificial
  probe
  misc_feature (1)..(25): SEQ ID NO: 6295; WAN024BMR-3; Start 132; Stop 156
agattcttatgttctgaactaacga

SEQ ID NO: 434496 - DNA, 25 bp, Artificial
  probe
  misc_feature (1)..(25): SEQ ID NO: 6295; WAN024BMR-3; Start 734; Stop 758
gatgcctgaacactttaattctgat

SEQ ID NO: 434497 - DNA, 25 bp, Artificial
  probe
  misc_feature (1)..(25): SEQ ID NO: 6295; WAN024BMR-3; Start 736; Stop 760
tgcctgaacactttaattctgatga

SEQ ID NO: 434498 - DNA, 25 bp, Artificial
  probe
  misc_feature (1)..(25): SEQ ID NO: 6295; WAN024BMR-3; Start 1560; Stop 1584
ggaataggattaggcttactaactt

SEQ ID NO: 434499 - DNA, 25 bp, Artificial
  probe
  misc_feature (1)..(25): SEQ ID NO: 6295; WAN024BMR-3; Start 609; Stop 633
tgttaccgatctctcaagtattatt

SEQ ID NO: 434500 - DNA, 25 bp, Artificial
  probe
  misc_feature (1)..(25): SEQ ID NO: 6295; WAN024BMR-3; Start 607; Stop 631
aatgttaccgatctctcaagtatta

SEQ ID NO: 434501 - DNA, 25 bp, Artificial
  probe
  misc_feature (1)..(25): SEQ ID NO: 6295; WAN024BMR-3; Start 825; Stop 849
tttgatgttcttgtaggttctgctg

SEQ ID NO: 434502 - DNA, 25 bp, Artificial
  probe
  misc_feature (1)..(25): SEQ ID NO: 6295; WAN024BMR-3; Start 512; Stop 536
atgcgatctgtataatggtatatca

SEQ ID NO: 434503 - DNA, 25 bp, Artificial
  probe
  misc_feature (1)..(25): SEQ ID NO: 6295; WAN024BMR-3; Start 513; Stop 537
tgcgatctgtataatggtatatcag

SEQ ID NO: 434504 - DNA, 25 bp, Artificial
  probe
  misc_feature (1)..(25): SEQ ID NO: 6295; WAN024BMR-3; Start 1177; Stop 1201
ccgaaagtggtatcaaatataagga

SEQ ID NO: 434505 - DNA, 25 bp, Artificial
  probe
  misc_feature (1)..(25): SEQ ID NO: 6295; WAN024BMR-3; Start 423; Stop 447
tcatatagtggtacttcaggagata

SEQ ID NO: 434506 - DNA, 25 bp, Artificial
  probe
  misc_feature (1)..(25): SEQ ID NO: 6295; WAN024BMR-3; Start 1462; Stop 1486
actcctatcttaatacgattcttga

SEQ ID NO: 434507 - DNA, 25 bp, Artificial
  probe
  misc_feature (1)..(25): SEQ ID NO: 6295; WAN024BMR-3; Start 733; Stop 757
ggatgcctgaacactttaattctga

SEQ ID NO: 434508 - DNA, 25 bp, Artificial
  probe
  misc_feature (1)..(25): SEQ ID NO: 6295; WAN024BMR-3; Start 837; Stop 861
gtaggttctgctggtgcgattatac

SEQ ID NO: 434509 - DNA, 25 bp, Artificial
  probe
  misc_feature (1)..(25): SEQ ID NO: 6295; WAN024BMR-3; Start 608; Stop 632
atgttaccgatctctcaagtattat

SEQ ID NO: 434510 - DNA, 25 bp, Artificial
  probe
  misc_feature (1)..(25): SEQ ID NO: 6295; WAN024BMR-3; Start 254; Stop 278
tgaaacaactttgaattacgatcct

SEQ ID NO: 434511 - DNA, 25 bp, Artificial
  probe
  misc_feature (1)..(25): SEQ ID NO: 6296; WAN024DS4; Start 121; Stop 145
gctaagaaggaatatgaggacggaa

SEQ ID NO: 434512 - DNA, 25 bp, Artificial
  probe
  misc_feature (1)..(25): SEQ ID NO: 6296; WAN024DS4; Start 113; Stop 137
atgaagctgctaagaaggaatatga

SEQ ID NO: 434513 - DNA, 25 bp, Artificial
  probe
  misc_feature (1)..(25): SEQ ID NO: 6296; WAN024DS4; Start 114; Stop 138
tgaagctgctaagaaggaatatgag

SEQ ID NO: 434514 - DNA, 25 bp, Artificial
  probe
  misc_feature (1)..(25): SEQ ID NO: 6296; WAN024DS4; Start 119; Stop 143
ctgctaagaaggaatatgaggacgg

SEQ ID NO: 434515 - DNA, 25 bp, Artificial
  probe
  misc_feature (1)..(25): SEQ ID NO: 6296; WAN024DS4; Start 115; Stop 139
gaagctgctaagaaggaatatgagg

SEQ ID NO: 434516 - DNA, 25 bp, Artificial
  probe
  misc_feature (1)..(25): SEQ ID NO: 6296; WAN024DS4; Start 546; Stop 570
aatcgctgaattggaacatgaagtt

SEQ ID NO: 434517 - DNA, 25 bp, Artificial
  probe
  misc_feature (1)..(25): SEQ ID NO: 6296; WAN024DS4; Start 656; Stop 680
ttgaattggatgttaagcaagctaa

SEQ ID NO: 434518 - DNA, 25 bp, Artificial
  probe
  misc_feature (1)..(25): SEQ ID NO: 6296; WAN024DS4; Start 116; Stop 140
aagctgctaagaaggaatatgagga

SEQ ID NO: 434519 - DNA, 25 bp, Artificial
  probe
  misc_feature (1)..(25): SEQ ID NO: 6296; WAN024DS4; Start 318; Stop 342
ggatgaggctgagaaagagtataag

SEQ ID NO: 434520 - DNA, 25 bp, Artificial
  probe
  misc_feature (1)..(25): SEQ ID NO: 6296; WAN024DS4; Start 122; Stop 146
ctaagaaggaatatgaggacggaaa

SEQ ID NO: 434521 - DNA, 25 bp, Artificial
  probe
  misc_feature (1)..(25): SEQ ID NO: 6296; WAN024DS4; Start 120; Stop 144
tgctaagaaggaatatgaggacgga

SEQ ID NO: 434522 - DNA, 25 bp, Artificial
  probe
  misc_feature (1)..(25): SEQ ID NO: 6296; WAN024DS4; Start 316; Stop 340
atggatgaggctgagaaagagtata

SEQ ID NO: 434523 - DNA, 25 bp, Artificial
  probe
  misc_feature (1)..(25): SEQ ID NO: 6296; WAN024DS4; Start 112; Stop 136
tatgaagctgctaagaaggaatatg

SEQ ID NO: 434524 - DNA, 25 bp, Artificial
  probe
  misc_feature (1)..(25): SEQ ID NO: 6296; WAN024DS4; Start 319; Stop 343
gatgaggctgagaaagagtataaga

SEQ ID NO: 434525 - DNA, 25 bp, Artificial
  probe
  misc_feature (1)..(25): SEQ ID NO: 6296; WAN024DS4; Start 317; Stop 341
tggatgaggctgagaaagagtataa

SEQ ID NO: 434526 - DNA, 25 bp, Artificial
  probe
  misc_feature (1)..(25): SEQ ID NO: 6296; WAN024DS4; Start 321; Stop 345
tgaggctgagaaagagtataagaaa

SEQ ID NO: 434527 - DNA, 25 bp, Artificial
  probe
  misc_feature (1)..(25): SEQ ID NO: 6296; WAN024DS4; Start 320; Stop 344
atgaggctgagaaagagtataagaa

SEQ ID NO: 434528 - DNA, 25 bp, Artificial
  probe
  misc_feature (1)..(25): SEQ ID NO: 6296; WAN024DS4; Start 118; Stop 142
gctgctaagaaggaatatgaggacg

SEQ ID NO: 434529 - DNA, 25 bp, Artificial
  probe
  misc_feature (1)..(25): SEQ ID NO: 6296; WAN024DS4; Start 315; Stop 339
aatggatgaggctgagaaagagtat

SEQ ID NO: 434530 - DNA, 25 bp, Artificial
  probe
  misc_feature (1)..(25): SEQ ID NO: 6296; WAN024DS4; Start 117; Stop 141
agctgctaagaaggaatatgaggac

SEQ ID NO: 434531 - DNA, 25 bp, Artificial
  probe
  misc_feature (1)..(25): SEQ ID NO: 6296; WAN024DS4; Start 653; Stop 677
aatttgaattggatgttaagcaagc

SEQ ID NO: 434532 - DNA, 25 bp, Artificial
  probe
  misc_feature (1)..(25): SEQ ID NO: 6296; WAN024DS4; Start 110; Stop 134
aatatgaagctgctaagaaggaata

SEQ ID NO: 434533 - DNA, 25 bp, Artificial
  probe
  misc_feature (1)..(25): SEQ ID NO: 6296; WAN024DS4; Start 111; Stop 135
atatgaagctgctaagaaggaatat

SEQ ID NO: 434534 - DNA, 25 bp, Artificial
  probe
  misc_feature (1)..(25): SEQ ID NO: 6296; WAN024DS4; Start 314; Stop 338
caatggatgaggctgagaaagagta

SEQ ID NO: 434535 - DNA, 25 bp, Artificial
  probe
  misc_feature (1)..(25): SEQ ID NO: 6296; WAN024DS4; Start 188; Stop 212
aggagaaagcggaagaagaaagaaa

SEQ ID NO: 434536 - DNA, 25 bp, Artificial
  probe
  misc_feature (1)..(25): SEQ ID NO: 6296; WAN024DS4; Start 545; Stop 569
aaatcgctgaattggaacatgaagt

SEQ ID NO: 434537 - DNA, 25 bp, Artificial
  probe
  misc_feature (1)..(25): SEQ ID NO: 6296; WAN024DS4; Start 654; Stop 678
atttgaattggatgttaagcaagct

SEQ ID NO: 434538 - DNA, 25 bp, Artificial
  probe
  misc_feature (1)..(25): SEQ ID NO: 6296; WAN024DS4; Start 187; Stop 211
gaggagaaagcggaagaagaaagaa

SEQ ID NO: 434539 - DNA, 25 bp, Artificial
  probe
  misc_feature (1)..(25): SEQ ID NO: 6296; WAN024DS4; Start 657; Stop 681
tgaattggatgttaagcaagctaaa

SEQ ID NO: 434540 - DNA, 25 bp, Artificial
  probe
  misc_feature (1)..(25): SEQ ID NO: 6296; WAN024DS4; Start 655; Stop 679
tttgaattggatgttaagcaagcta

SEQ ID NO: 434541 - DNA, 25 bp, Artificial
  probe
  misc_feature (1)..(25): SEQ ID NO: 6296; WAN024DS4; Start 663; Stop 687
ggatgttaagcaagctaaactatca

SEQ ID NO: 434542 - DNA, 25 bp, Artificial
  probe
  misc_feature (1)..(25): SEQ ID NO: 6296; WAN024DS4; Start 662; Stop 686
tggatgttaagcaagctaaactatc

SEQ ID NO: 434543 - DNA, 25 bp, Artificial
  probe
  misc_feature (1)..(25): SEQ ID NO: 6296; WAN024DS4; Start 659; Stop 683
aattggatgttaagcaagctaaact

SEQ ID NO: 434544 - DNA, 25 bp, Artificial
  probe
  misc_feature (1)..(25): SEQ ID NO: 6297; WAN024DS2; Start 120; Stop 144
aatcgctgagttggaatatgaagtt

SEQ ID NO: 434545 - DNA, 25 bp, Artificial
  probe
  misc_feature (1)..(25): SEQ ID NO: 6297; WAN024DS2; Start 121; Stop 145
atcgctgagttggaatatgaagttc

SEQ ID NO: 434546 - DNA, 25 bp, Artificial
  probe
  misc_feature (1)..(25): SEQ ID NO: 6297; WAN024DS2; Start 119; Stop 143
aaatcgctgagttggaatatgaagt

SEQ ID NO: 434547 - DNA, 25 bp, Artificial
  probe
  misc_feature (1)..(25): SEQ ID NO: 6297; WAN024DS2; Start 122; Stop 146
tcgctgagttggaatatgaagttca

SEQ ID NO: 434548 - DNA, 25 bp, Artificial
  probe
  misc_feature (1)..(25): SEQ ID NO: 6297; WAN024DS2; Start 131; Stop 155
tggaatatgaagttcagggactaga

SEQ ID NO: 434549 - DNA, 25 bp, Artificial
  probe
  misc_feature (1)..(25): SEQ ID NO: 6297; WAN024DS2; Start 132; Stop 156
ggaatatgaagttcagggactagaa

SEQ ID NO: 434550 - DNA, 25 bp, Artificial
  probe
  misc_feature (1)..(25): SEQ ID NO: 6297; WAN024DS2; Start 133; Stop 157
gaatatgaagttcagggactagaaa

SEQ ID NO: 434551 - DNA, 25 bp, Artificial
  probe
  misc_feature (1)..(25): SEQ ID NO: 6297; WAN024DS2; Start 118; Stop 142
aaaatcgctgagttggaatatgaag

SEQ ID NO: 434552 - DNA, 25 bp, Artificial
  probe
  misc_feature (1)..(25): SEQ ID NO: 6297; WAN024DS2; Start 115; Stop 139
gctaaaatcgctgagttggaatatg

SEQ ID NO: 434553 - DNA, 25 bp, Artificial
  probe
  misc_feature (1)..(25): SEQ ID NO: 6297; WAN024DS2; Start 351; Stop 375
cggtgagcaagctgaacaatatctt

SEQ ID NO: 434554 - DNA, 25 bp, Artificial
  probe
  misc_feature (1)..(25): SEQ ID NO: 6297; WAN024DS2; Start 116; Stop 140
ctaaaatcgctgagttggaatatga

SEQ ID NO: 434555 - DNA, 25 bp, Artificial
  probe
  misc_feature (1)..(25): SEQ ID NO: 6297; WAN024DS2; Start 117; Stop 141
taaaatcgctgagttggaatatgaa

SEQ ID NO: 434556 - DNA, 25 bp, Artificial
  probe
  misc_feature (1)..(25): SEQ ID NO: 6297; WAN024DS2; Start 124; Stop 148
gctgagttggaatatgaagttcagg

SEQ ID NO: 434557 - DNA, 25 bp, Artificial
  probe
  misc_feature (1)..(25): SEQ ID NO: 6297; WAN024DS2; Start 123; Stop 147
cgctgagttggaatatgaagttcag

SEQ ID NO: 434558 - DNA, 25 bp, Artificial
  probe
  misc_feature (1)..(25): SEQ ID NO: 6297; WAN024DS2; Start 349; Stop 373
gacggtgagcaagctgaacaatatc

SEQ ID NO: 434559 - DNA, 25 bp, Artificial
  probe
  misc_feature (1)..(25): SEQ ID NO: 6297; WAN024DS2; Start 352; Stop 376
ggtgagcaagctgaacaatatcttg

SEQ ID NO: 434560 - DNA, 25 bp, Artificial
  probe
  misc_feature (1)..(25): SEQ ID NO: 6297; WAN024DS2; Start 350; Stop 374
acggtgagcaagctgaacaatatct

SEQ ID NO: 434561 - DNA, 25 bp, Artificial
  probe
  misc_feature (1)..(25): SEQ ID NO: 6297; WAN024DS2; Start 348; Stop 372
agacggtgagcaagctgaacaatat

SEQ ID NO: 434562 - DNA, 25 bp, Artificial
  probe
  misc_feature (1)..(25): SEQ ID NO: 6297; WAN024DS2; Start 134; Stop 158
aatatgaagttcagggactagaaaa

SEQ ID NO: 434563 - DNA, 25 bp, Artificial
  probe
  misc_feature (1)..(25): SEQ ID NO: 6297; WAN024DS2; Start 101; Stop 125
aatatgctcttgaagctaaaatcgc

SEQ ID NO: 434564 - DNA, 25 bp, Artificial
  probe
  misc_feature (1)..(25): SEQ ID NO: 6297; WAN024DS2; Start 114; Stop 138
agctaaaatcgctgagttggaatat

SEQ ID NO: 434565 - DNA, 25 bp, Artificial
  probe
  misc_feature (1)..(25): SEQ ID NO: 6297; WAN024DS2; Start 113; Stop 137
aagctaaaatcgctgagttggaata

SEQ ID NO: 434566 - DNA, 25 bp, Artificial
  probe
  misc_feature (1)..(25): SEQ ID NO: 6297; WAN024DS2; Start 102; Stop 126
atatgctcttgaagctaaaatcgct

SEQ ID NO: 434567 - DNA, 25 bp, Artificial
  probe
  misc_feature (1)..(25): SEQ ID NO: 6297; WAN024DS2; Start 107; Stop 131
ctcttgaagctaaaatcgctgagtt

SEQ ID NO: 434568 - DNA, 25 bp, Artificial
  probe
  misc_feature (1)..(25): SEQ ID NO: 6297; WAN024DS2; Start 103; Stop 127
tatgctcttgaagctaaaatcgctg

SEQ ID NO: 434569 - DNA, 25 bp, Artificial
  probe
  misc_feature (1)..(25): SEQ ID NO: 6297; WAN024DS2; Start 100; Stop 124
aaatatgctcttgaagctaaaatcg

SEQ ID NO: 434570 - DNA, 25 bp, Artificial
  probe
  misc_feature (1)..(25): SEQ ID NO: 6297; WAN024DS2; Start 108; Stop 132
tcttgaagctaaaatcgctgagttg

SEQ ID NO: 434571 - DNA, 25 bp, Artificial
  probe
  misc_feature (1)..(25): SEQ ID NO: 6297; WAN024DS2; Start 112; Stop 136
gaagctaaaatcgctgagttggaat

SEQ ID NO: 434572 - DNA, 25 bp, Artificial
  probe
  misc_feature (1)..(25): SEQ ID NO: 6297; WAN024DS2; Start 109; Stop 133
cttgaagctaaaatcgctgagttgg

SEQ ID NO: 434573 - DNA, 25 bp, Artificial
  probe
  misc_feature (1)..(25): SEQ ID NO: 6297; WAN024DS2; Start 111; Stop 135
tgaagctaaaatcgctgagttggaa

SEQ ID NO: 434574 - DNA, 25 bp, Artificial
  probe
  misc_feature (1)..(25): SEQ ID NO: 6297; WAN024DS2; Start 110; Stop 134
ttgaagctaaaatcgctgagttgga

SEQ ID NO: 434575 - DNA, 25 bp, Artificial
  probe
  misc_feature (1)..(25): SEQ ID NO: 6297; WAN024DS2; Start 104; Stop 128
atgctcttgaagctaaaatcgctga

SEQ ID NO: 434576 - DNA, 25 bp, Artificial
  probe
  misc_feature (1)..(25): SEQ ID NO: 6297; WAN024DS2; Start 106; Stop 130
gctcttgaagctaaaatcgctgagt

SEQ ID NO: 434577 - DNA, 25 bp, Artificial
  probe
  misc_feature (1)..(25): SEQ ID NO: 6297; WAN024DS2; Start 105; Stop 129
tgctcttgaagctaaaatcgctgag

SEQ ID NO: 434578 - DNA, 25 bp, Artificial
  probe
  misc_feature (1)..(25): SEQ ID NO: 6298; WAN024B2F; Start 122; Stop 146
atgaggaagatggcaataaggacat

SEQ ID NO: 434579 - DNA, 25 bp, Artificial
  probe
  misc_feature (1)..(25): SEQ ID NO: 6298; WAN024B2F; Start 74; Stop 98
ttgtcgttaagcaccttcctattga

SEQ ID NO: 434580 - DNA, 25 bp, Artificial
  probe
  misc_feature (1)..(25): SEQ ID NO: 6298; WAN024B2F; Start 392; Stop 416
ttacagttccagaaggagaatacct

SEQ ID NO: 434581 - DNA, 25 bp, Artificial
  probe
  misc_feature (1)..(25): SEQ ID NO: 6298; WAN024B2F; Start 227; Stop 251
atgagccttacctagcagactacat

SEQ ID NO: 434582 - DNA, 25 bp, Artificial
  probe
  misc_feature (1)..(25): SEQ ID NO: 6298; WAN024B2F; Start 230; Stop 254
agccttacctagcagactacatcaa

SEQ ID NO: 434583 - DNA, 25 bp, Artificial
  probe
  misc_feature (1)..(25): SEQ ID NO: 6298; WAN024B2F; Start 355; Stop 379
ttcacagtcgatgtcaactacaata

SEQ ID NO: 434584 - DNA, 25 bp, Artificial
  probe
  misc_feature (1)..(25): SEQ ID NO: 6298; WAN024B2F; Start 362; Stop 386
tcgatgtcaactacaataccaactt

SEQ ID NO: 434585 - DNA, 25 bp, Artificial
  probe
  misc_feature (1)..(25): SEQ ID NO: 6298; WAN024B2F; Start 356; Stop 380
tcacagtcgatgtcaactacaatac

SEQ ID NO: 434586 - DNA, 25 bp, Artificial
  probe
  misc_feature (1)..(25): SEQ ID NO: 6298; WAN024B2F; Start 361; Stop 385
gtcgatgtcaactacaataccaact

SEQ ID NO: 434587 - DNA, 25 bp, Artificial
  probe
  misc_feature (1)..(25): SEQ ID NO: 6298; WAN024B2F; Start 360; Stop 384
agtcgatgtcaactacaataccaac

SEQ ID NO: 434588 - DNA, 25 bp, Artificial
  probe
  misc_feature (1)..(25): SEQ ID NO: 6298; WAN024B2F; Start 359; Stop 383
cagtcgatgtcaactacaataccaa

SEQ ID NO: 434589 - DNA, 25 bp, Artificial
  probe
  misc_feature (1)..(25): SEQ ID NO: 6298; WAN024B2F; Start 232; Stop 256
ccttacctagcagactacatcaaac

SEQ ID NO: 434590 - DNA, 25 bp, Artificial
  probe
  misc_feature (1)..(25): SEQ ID NO: 6298; WAN024B2F; Start 225; Stop 249
agatgagccttacctagcagactac

SEQ ID NO: 434591 - DNA, 25 bp, Artificial
  probe
  misc_feature (1)..(25): SEQ ID NO: 6298; WAN024B2F; Start 224; Stop 248
cagatgagccttacctagcagacta

SEQ ID NO: 434592 - DNA, 25 bp, Artificial
  probe
  misc_feature (1)..(25): SEQ ID NO: 6298; WAN024B2F; Start 79; Stop 103
gttaagcaccttcctattgaccgtt

SEQ ID NO: 434593 - DNA, 25 bp, Artificial
  probe
  misc_feature (1)..(25): SEQ ID NO: 6298; WAN024B2F; Start 354; Stop 378
cttcacagtcgatgtcaactacaat

SEQ ID NO: 434594 - DNA, 25 bp, Artificial
  probe
  misc_feature (1)..(25): SEQ ID NO: 6298; WAN024B2F; Start 233; Stop 257
cttacctagcagactacatcaaacg

SEQ ID NO: 434595 - DNA, 25 bp, Artificial
  probe
  misc_feature (1)..(25): SEQ ID NO: 6298; WAN024B2F; Start 72; Stop 96
ctttgtcgttaagcaccttcctatt

SEQ ID NO: 434596 - DNA, 25 bp, Artificial
  probe
  misc_feature (1)..(25): SEQ ID NO: 6298; WAN024B2F; Start 203; Stop 227
tttacatcaatgacaaagagacaga

SEQ ID NO: 434597 - DNA, 25 bp, Artificial
  probe
  misc_feature (1)..(25): SEQ ID NO: 6298; WAN024B2F; Start 121; Stop 145
catgaggaagatggcaataaggaca

SEQ ID NO: 434598 - DNA, 25 bp, Artificial
  probe
  misc_feature (1)..(25): SEQ ID NO: 6298; WAN024B2F; Start 216; Stop 240
caaagagacagatgagccttaccta

SEQ ID NO: 434599 - DNA, 25 bp, Artificial
  probe
  misc_feature (1)..(25): SEQ ID NO: 6298; WAN024B2F; Start 212; Stop 236
atgacaaagagacagatgagcctta

SEQ ID NO: 434600 - DNA, 25 bp, Artificial
  probe
  misc_feature (1)..(25): SEQ ID NO: 6298; WAN024B2F; Start 73; Stop 97
tttgtcgttaagcaccttcctattg

SEQ ID NO: 434601 - DNA, 25 bp, Artificial
  probe
  misc_feature (1)..(25): SEQ ID NO: 6298; WAN024B2F; Start 229; Stop 253
gagccttacctagcagactacatca

SEQ ID NO: 434602 - DNA, 25 bp, Artificial
  probe
  misc_feature (1)..(25): SEQ ID NO: 6298; WAN024B2F; Start 228; Stop 252
tgagccttacctagcagactacatc

SEQ ID NO: 434603 - DNA, 25 bp, Artificial
  probe
  misc_feature (1)..(25): SEQ ID NO: 6298; WAN024B2F; Start 226; Stop 250
gatgagccttacctagcagactaca

SEQ ID NO: 434604 - DNA, 25 bp, Artificial
  probe
  misc_feature (1)..(25): SEQ ID NO: 6298; WAN024B2F; Start 357; Stop 381
cacagtcgatgtcaactacaatacc

SEQ ID NO: 434605 - DNA, 25 bp, Artificial
  probe
  misc_feature (1)..(25): SEQ ID NO: 6298; WAN024B2F; Start 208; Stop 232
atcaatgacaaagagacagatgagc

SEQ ID NO: 434606 - DNA, 25 bp, Artificial
  probe
  misc_feature (1)..(25): SEQ ID NO: 6298; WAN024B2F; Start 363; Stop 387
cgatgtcaactacaataccaacttt

SEQ ID NO: 434607 - DNA, 25 bp, Artificial
  probe
  misc_feature (1)..(25): SEQ ID NO: 6298; WAN024B2F; Start 366; Stop 390
tgtcaactacaataccaactttagc

SEQ ID NO: 434608 - DNA, 25 bp, Artificial
  probe
  misc_feature (1)..(25): SEQ ID NO: 6298; WAN024B2F; Start 217; Stop 241
aaagagacagatgagccttacctag

SEQ ID NO: 434609 - DNA, 25 bp, Artificial
  probe
  misc_feature (1)..(25): SEQ ID NO: 6298; WAN024B2F; Start 204; Stop 228
ttacatcaatgacaaagagacagat

SEQ ID NO: 434610 - DNA, 25 bp, Artificial
  probe
  misc_feature (1)..(25): SEQ ID NO: 6298; WAN024B2F; Start 358; Stop 382
acagtcgatgtcaactacaatacca

SEQ ID NO: 434611 - DNA, 25 bp, Artificial
  probe
  misc_feature (1)..(25): SEQ ID NO: 6299; WAN024F33; Start 327; Stop 351
ctatccaatcagtgaccaatacagt

SEQ ID NO: 434612 - DNA, 25 bp, Artificial
  probe
  misc_feature (1)..(25): SEQ ID NO: 6299; WAN024F33; Start 328; Stop 352
tatccaatcagtgaccaatacagtg

SEQ ID NO: 434613 - DNA, 25 bp, Artificial
  probe
  misc_feature (1)..(25): SEQ ID NO: 6299; WAN024F33; Start 392; Stop 416
actatgtcaatcaagatggtaagga

SEQ ID NO: 434614 - DNA, 25 bp, Artificial
  probe
  misc_feature (1)..(25): SEQ ID NO: 6299; WAN024F33; Start 395; Stop 419
atgtcaatcaagatggtaaggaagc

SEQ ID NO: 434615 - DNA, 25 bp, Artificial
  probe
  misc_feature (1)..(25): SEQ ID NO: 6299; WAN024F33; Start 326; Stop 350
gctatccaatcagtgaccaatacag

SEQ ID NO: 434616 - DNA, 25 bp, Artificial
  probe
  misc_feature (1)..(25): SEQ ID NO: 6299; WAN024F33; Start 397; Stop 421
gtcaatcaagatggtaaggaagcag

SEQ ID NO: 434617 - DNA, 25 bp, Artificial
  probe
  misc_feature (1)..(25): SEQ ID NO: 6299; WAN024F33; Start 394; Stop 418
tatgtcaatcaagatggtaaggaag

SEQ ID NO: 434618 - DNA, 25 bp, Artificial
  probe
  misc_feature (1)..(25): SEQ ID NO: 6299; WAN024F33; Start 393; Stop 417
ctatgtcaatcaagatggtaaggaa

SEQ ID NO: 434619 - DNA, 25 bp, Artificial
  probe
  misc_feature (1)..(25): SEQ ID NO: 6299; WAN024F33; Start 381; Stop 405
gctctaccaagactatgtcaatcaa

SEQ ID NO: 434620 - DNA, 25 bp, Artificial
  probe
  misc_feature (1)..(25): SEQ ID NO: 6299; WAN024F33; Start 396; Stop 420
tgtcaatcaagatggtaaggaagca

SEQ ID NO: 434621 - DNA, 25 bp, Artificial
  probe
  misc_feature (1)..(25): SEQ ID NO: 6299; WAN024F33; Start 391; Stop 415
gactatgtcaatcaagatggtaagg

SEQ ID NO: 434622 - DNA, 25 bp, Artificial
  probe
  misc_feature (1)..(25): SEQ ID NO: 6299; WAN024F33; Start 383; Stop 407
tctaccaagactatgtcaatcaaga

SEQ ID NO: 434623 - DNA, 25 bp, Artificial
  probe
  misc_feature (1)..(25): SEQ ID NO: 6299; WAN024F33; Start 325; Stop 349
ggctatccaatcagtgaccaataca

SEQ ID NO: 434624 - DNA, 25 bp, Artificial
  probe
  misc_feature (1)..(25): SEQ ID NO: 6299; WAN024F33; Start 382; Stop 406
ctctaccaagactatgtcaatcaag

SEQ ID NO: 434625 - DNA, 25 bp, Artificial
  probe
  misc_feature (1)..(25): SEQ ID NO: 6299; WAN024F33; Start 388; Stop 412
caagactatgtcaatcaagatggta

SEQ ID NO: 434626 - DNA, 25 bp, Artificial
  probe
  misc_feature (1)..(25): SEQ ID NO: 6299; WAN024F33; Start 385; Stop 409
taccaagactatgtcaatcaagatg

SEQ ID NO: 434627 - DNA, 25 bp, Artificial
  probe
  misc_feature (1)..(25): SEQ ID NO: 6299; WAN024F33; Start 387; Stop 411
ccaagactatgtcaatcaagatggt

SEQ ID NO: 434628 - DNA, 25 bp, Artificial
  probe
  misc_feature (1)..(25): SEQ ID NO: 6299; WAN024F33; Start 386; Stop 410
accaagactatgtcaatcaagatgg

SEQ ID NO: 434629 - DNA, 25 bp, Artificial
  probe
  misc_feature (1)..(25): SEQ ID NO: 6299; WAN024F33; Start 390; Stop 414
agactatgtcaatcaagatggtaag

SEQ ID NO: 434630 - DNA, 25 bp, Artificial
  probe
  misc_feature (1)..(25): SEQ ID NO: 6299; WAN024F33; Start 384; Stop 408
ctaccaagactatgtcaatcaagat

SEQ ID NO: 434631 - DNA, 25 bp, Artificial
  probe
  misc_feature (1)..(25): SEQ ID NO: 6299; WAN024F33; Start 553; Stop 577
tatggctttgttgttcgctatctta

SEQ ID NO: 434632 - DNA, 25 bp, Artificial
  probe
  misc_feature (1)..(25): SEQ ID NO: 6299; WAN024F33; Start 346; Stop 370
tacagtgggtttaggagttatgaaa

SEQ ID NO: 434633 - DNA, 25 bp, Artificial
  probe
  misc_feature (1)..(25): SEQ ID NO: 6299; WAN024F33; Start 343; Stop 367
caatacagtgggtttaggagttatg

SEQ ID NO: 434634 - DNA, 25 bp, Artificial
  probe
  misc_feature (1)..(25): SEQ ID NO: 6299; WAN024F33; Start 345; Stop 369
atacagtgggtttaggagttatgaa

SEQ ID NO: 434635 - DNA, 25 bp, Artificial
  probe
  misc_feature (1)..(25): SEQ ID NO: 6299; WAN024F33; Start 344; Stop 368
aatacagtgggtttaggagttatga

SEQ ID NO: 434636 - DNA, 25 bp, Artificial
  probe
  misc_feature (1)..(25): SEQ ID NO: 6299; WAN024F33; Start 118; Stop 142
gaaggaactgtaggtagcaaatctc

SEQ ID NO: 434637 - DNA, 25 bp, Artificial
  probe
  misc_feature (1)..(25): SEQ ID NO: 6299; WAN024F33; Start 198; Stop 222
ccaagggaaatacgatgagattatc

SEQ ID NO: 434638 - DNA, 25 bp, Artificial
  probe
  misc_feature (1)..(25): SEQ ID NO: 6299; WAN024F33; Start 121; Stop 145
ggaactgtaggtagcaaatctcaag

SEQ ID NO: 434639 - DNA, 25 bp, Artificial
  probe
  misc_feature (1)..(25): SEQ ID NO: 6299; WAN024F33; Start 400; Stop 424
aatcaagatggtaaggaagcagcag

SEQ ID NO: 434640 - DNA, 25 bp, Artificial
  probe
  misc_feature (1)..(25): SEQ ID NO: 6299; WAN024F33; Start 398; Stop 422
tcaatcaagatggtaaggaagcagc

SEQ ID NO: 434641 - DNA, 25 bp, Artificial
  probe
  misc_feature (1)..(25): SEQ ID NO: 6299; WAN024F33; Start 379; Stop 403
aagctctaccaagactatgtcaatc

SEQ ID NO: 434642 - DNA, 25 bp, Artificial
  probe
  misc_feature (1)..(25): SEQ ID NO: 6299; WAN024F33; Start 377; Stop 401
ctaagctctaccaagactatgtcaa

SEQ ID NO: 434643 - DNA, 25 bp, Artificial
  probe
  misc_feature (1)..(25): SEQ ID NO: 6299; WAN024F33; Start 389; Stop 413
aagactatgtcaatcaagatggtaa

SEQ ID NO: 434644 - DNA, 25 bp, Artificial
  probe
  misc_feature (1)..(25): SEQ ID NO: 6300; WAN024FM6; Start 427; Stop 451
acacttactacatcggatagagaga

SEQ ID NO: 434645 - DNA, 25 bp, Artificial
  probe
  misc_feature (1)..(25): SEQ ID NO: 6300; WAN024FM6; Start 428; Stop 452
cacttactacatcggatagagagaa

SEQ ID NO: 434646 - DNA, 25 bp, Artificial
  probe
  misc_feature (1)..(25): SEQ ID NO: 6300; WAN024FM6; Start 426; Stop 450
tacacttactacatcggatagagag

SEQ ID NO: 434647 - DNA, 25 bp, Artificial
  probe
  misc_feature (1)..(25): SEQ ID NO: 6300; WAN024FM6; Start 268; Stop 292
ggcattggagtaagtatgaattgta

SEQ ID NO: 434648 - DNA, 25 bp, Artificial
  probe
  misc_feature (1)..(25): SEQ ID NO: 6300; WAN024FM6; Start 93; Stop 117
atatgaggtccatctagtgtcaatg

SEQ ID NO: 434649 - DNA, 25 bp, Artificial
  probe
  misc_feature (1)..(25): SEQ ID NO: 6300; WAN024FM6; Start 429; Stop 453
acttactacatcggatagagagaat

SEQ ID NO: 434650 - DNA, 25 bp, Artificial
  probe
  misc_feature (1)..(25): SEQ ID NO: 6300; WAN024FM6; Start 425; Stop 449
ttacacttactacatcggatagaga

SEQ ID NO: 434651 - DNA, 25 bp, Artificial
  probe
  misc_feature (1)..(25): SEQ ID NO: 6300; WAN024FM6; Start 94; Stop 118
tatgaggtccatctagtgtcaatgt

SEQ ID NO: 434652 - DNA, 25 bp, Artificial
  probe
  misc_feature (1)..(25): SEQ ID NO: 6300; WAN024FM6; Start 92; Stop 116
aatatgaggtccatctagtgtcaat

SEQ ID NO: 434653 - DNA, 25 bp, Artificial
  probe
  misc_feature (1)..(25): SEQ ID NO: 6300; WAN024FM6; Start 599; Stop 623
tgttatctaaggtagcaattcaagt

SEQ ID NO: 434654 - DNA, 25 bp, Artificial
  probe
  misc_feature (1)..(25): SEQ ID NO: 6300; WAN024FM6; Start 874; Stop 898
ccaacaggtccatctgagataatat

SEQ ID NO: 434655 - DNA, 25 bp, Artificial
  probe
  misc_feature (1)..(25): SEQ ID NO: 6300; WAN024FM6; Start 95; Stop 119
atgaggtccatctagtgtcaatgtt

SEQ ID NO: 434656 - DNA, 25 bp, Artificial
  probe
  misc_feature (1)..(25): SEQ ID NO: 6300; WAN024FM6; Start 873; Stop 897
tccaacaggtccatctgagataata

SEQ ID NO: 434657 - DNA, 25 bp, Artificial
  probe
  misc_feature (1)..(25): SEQ ID NO: 6300; WAN024FM6; Start 424; Stop 448
attacacttactacatcggatagag

SEQ ID NO: 434658 - DNA, 25 bp, Artificial
  probe
  misc_feature (1)..(25): SEQ ID NO: 6300; WAN024FM6; Start 273; Stop 297
tggagtaagtatgaattgtattgga

SEQ ID NO: 434659 - DNA, 25 bp, Artificial
  probe
  misc_feature (1)..(25): SEQ ID NO: 6300; WAN024FM6; Start 1065; Stop 1089
attgatagaagaaatgacgggagaa

SEQ ID NO: 434660 - DNA, 25 bp, Artificial
  probe
  misc_feature (1)..(25): SEQ ID NO: 6300; WAN024FM6; Start 430; Stop 454
cttactacatcggatagagagaatt

SEQ ID NO: 434661 - DNA, 25 bp, Artificial
  probe
  misc_feature (1)..(25): SEQ ID NO: 6300; WAN024FM6; Start 1002; Stop 1026
acgaaatgcgatgttagatactgat

SEQ ID NO: 434662 - DNA, 25 bp, Artificial
  probe
  misc_feature (1)..(25): SEQ ID NO: 6300; WAN024FM6; Start 555; Stop 579
acttattactgttggacgctttgat

SEQ ID NO: 434663 - DNA, 25 bp, Artificial
  probe
  misc_feature (1)..(25): SEQ ID NO: 6300; WAN024FM6; Start 872; Stop 896
gtccaacaggtccatctgagataat

SEQ ID NO: 434664 - DNA, 25 bp, Artificial
  probe
  misc_feature (1)..(25): SEQ ID NO: 6300; WAN024FM6; Start 999; Stop 1023
ttcacgaaatgcgatgttagatact

SEQ ID NO: 434665 - DNA, 25 bp, Artificial
  probe
  misc_feature (1)..(25): SEQ ID NO: 6300; WAN024FM6; Start 556; Stop 580
cttattactgttggacgctttgata

SEQ ID NO: 434666 - DNA, 25 bp, Artificial
  probe
  misc_feature (1)..(25): SEQ ID NO: 6300; WAN024FM6; Start 1064; Stop 1088
aattgatagaagaaatgacgggaga

SEQ ID NO: 434667 - DNA, 25 bp, Artificial
  probe
  misc_feature (1)..(25): SEQ ID NO: 6300; WAN024FM6; Start 1062; Stop 1086
tgaattgatagaagaaatgacggga

SEQ ID NO: 434668 - DNA, 25 bp, Artificial
  probe
  misc_feature (1)..(25): SEQ ID NO: 6300; WAN024FM6; Start 1063; Stop 1087
gaattgatagaagaaatgacgggag

SEQ ID NO: 434669 - DNA, 25 bp, Artificial
  probe
  misc_feature (1)..(25): SEQ ID NO: 6300; WAN024FM6; Start 1061; Stop 1085
ttgaattgatagaagaaatgacggg

SEQ ID NO: 434670 - DNA, 25 bp, Artificial
  probe
  misc_feature (1)..(25): SEQ ID NO: 6300; WAN024FM6; Start 1003; Stop 1027
cgaaatgcgatgttagatactgata

SEQ ID NO: 434671 - DNA, 25 bp, Artificial
  probe
  misc_feature (1)..(25): SEQ ID NO: 6300; WAN024FM6; Start 264; Stop 288
tttgggcattggagtaagtatgaat

SEQ ID NO: 434672 - DNA, 25 bp, Artificial
  probe
  misc_feature (1)..(25): SEQ ID NO: 6300; WAN024FM6; Start 559; Stop 583
attactgttggacgctttgataaac

SEQ ID NO: 434673 - DNA, 25 bp, Artificial
  probe
  misc_feature (1)..(25): SEQ ID NO: 6300; WAN024FM6; Start 552; Stop 576
gaaacttattactgttggacgcttt

SEQ ID NO: 434674 - DNA, 25 bp, Artificial
  probe
  misc_feature (1)..(25): SEQ ID NO: 6300; WAN024FM6; Start 553; Stop 577
aaacttattactgttggacgctttg

SEQ ID NO: 434675 - DNA, 25 bp, Artificial
  probe
  misc_feature (1)..(25): SEQ ID NO: 6300; WAN024FM6; Start 278; Stop 302
taagtatgaattgtattggaactgc

SEQ ID NO: 434676 - DNA, 25 bp, Artificial
  probe
  misc_feature (1)..(25): SEQ ID NO: 6300; WAN024FM6; Start 269; Stop 293
gcattggagtaagtatgaattgtat

SEQ ID NO: 434677 - DNA, 25 bp, Artificial
  probe
  misc_feature (1)..(25): SEQ ID NO: 6301; WAN024BNL; Start 353; Stop 377
tagatagagatagtgaagtggtgtt

SEQ ID NO: 434678 - DNA, 25 bp, Artificial
  probe
  misc_feature (1)..(25): SEQ ID NO: 6301; WAN024BNL; Start 352; Stop 376
atagatagagatagtgaagtggtgt

SEQ ID NO: 434679 - DNA, 25 bp, Artificial
  probe
  misc_feature (1)..(25): SEQ ID NO: 6301; WAN024BNL; Start 497; Stop 521
aaactaatgtctttggaggaggaaa

SEQ ID NO: 434680 - DNA, 25 bp, Artificial
  probe
  misc_feature (1)..(25): SEQ ID NO: 6301; WAN024BNL; Start 351; Stop 375
aatagatagagatagtgaagtggtg

SEQ ID NO: 434681 - DNA, 25 bp, Artificial
  probe
  misc_feature (1)..(25): SEQ ID NO: 6301; WAN024BNL; Start 350; Stop 374
caatagatagagatagtgaagtggt

SEQ ID NO: 434682 - DNA, 25 bp, Artificial
  probe
  misc_feature (1)..(25): SEQ ID NO: 6301; WAN024BNL; Start 349; Stop 373
acaatagatagagatagtgaagtgg

SEQ ID NO: 434683 - DNA, 25 bp, Artificial
  probe
  misc_feature (1)..(25): SEQ ID NO: 6301; WAN024BNL; Start 496; Stop 520
gaaactaatgtctttggaggaggaa

SEQ ID NO: 434684 - DNA, 25 bp, Artificial
  probe
  misc_feature (1)..(25): SEQ ID NO: 6301; WAN024BNL; Start 358; Stop 382
agagatagtgaagtggtgtttagat

SEQ ID NO: 434685 - DNA, 25 bp, Artificial
  probe
  misc_feature (1)..(25): SEQ ID NO: 6301; WAN024BNL; Start 354; Stop 378
agatagagatagtgaagtggtgttt

SEQ ID NO: 434686 - DNA, 25 bp, Artificial
  probe
  misc_feature (1)..(25): SEQ ID NO: 6301; WAN024BNL; Start 493; Stop 517
agagaaactaatgtctttggaggag

SEQ ID NO: 434687 - DNA, 25 bp, Artificial
  probe
  misc_feature (1)..(25): SEQ ID NO: 6301; WAN024BNL; Start 494; Stop 518
gagaaactaatgtctttggaggagg

SEQ ID NO: 434688 - DNA, 25 bp, Artificial
  probe
  misc_feature (1)..(25): SEQ ID NO: 6301; WAN024BNL; Start 366; Stop 390
tgaagtggtgtttagatttaatggt

SEQ ID NO: 434689 - DNA, 25 bp, Artificial
  probe
  misc_feature (1)..(25): SEQ ID NO: 6301; WAN024BNL; Start 125; Stop 149
atgtaaatcaatatcaacgcctgac

SEQ ID NO: 434690 - DNA, 25 bp, Artificial
  probe
  misc_feature (1)..(25): SEQ ID NO: 6301; WAN024BNL; Start 495; Stop 519
agaaactaatgtctttggaggagga

SEQ ID NO: 434691 - DNA, 25 bp, Artificial
  probe
  misc_feature (1)..(25): SEQ ID NO: 6301; WAN024BNL; Start 357; Stop 381
tagagatagtgaagtggtgtttaga

SEQ ID NO: 434692 - DNA, 25 bp, Artificial
  probe
  misc_feature (1)..(25): SEQ ID NO: 6301; WAN024BNL; Start 492; Stop 516
tagagaaactaatgtctttggagga

SEQ ID NO: 434693 - DNA, 25 bp, Artificial
  probe
  misc_feature (1)..(25): SEQ ID NO: 6301; WAN024BNL; Start 127; Stop 151
gtaaatcaatatcaacgcctgacag

SEQ ID NO: 434694 - DNA, 25 bp, Artificial
  probe
  misc_feature (1)..(25): SEQ ID NO: 6301; WAN024BNL; Start 365; Stop 389
gtgaagtggtgtttagatttaatgg

SEQ ID NO: 434695 - DNA, 25 bp, Artificial
  probe
  misc_feature (1)..(25): SEQ ID NO: 6301; WAN024BNL; Start 359; Stop 383
gagatagtgaagtggtgtttagatt

SEQ ID NO: 434696 - DNA, 25 bp, Artificial
  probe
  misc_feature (1)..(25): SEQ ID NO: 6301; WAN024BNL; Start 124; Stop 148
aatgtaaatcaatatcaacgcctga

SEQ ID NO: 434697 - DNA, 25 bp, Artificial
  probe
  misc_feature (1)..(25): SEQ ID NO: 6301; WAN024BNL; Start 20; Stop 44
caatgaatgtgagtgtttctgatct

SEQ ID NO: 434698 - DNA, 25 bp, Artificial
  probe
  misc_feature (1)..(25): SEQ ID NO: 6301; WAN024BNL; Start 367; Stop 391
gaagtggtgtttagatttaatggtc

SEQ ID NO: 434699 - DNA, 25 bp, Artificial
  probe
  misc_feature (1)..(25): SEQ ID NO: 6301; WAN024BNL; Start 126; Stop 150
tgtaaatcaatatcaacgcctgaca

SEQ ID NO: 434700 - DNA, 25 bp, Artificial
  probe
  misc_feature (1)..(25): SEQ ID NO: 6301; WAN024BNL; Start 368; Stop 392
aagtggtgtttagatttaatggtct

SEQ ID NO: 434701 - DNA, 25 bp, Artificial
  probe
  misc_feature (1)..(25): SEQ ID NO: 6301; WAN024BNL; Start 19; Stop 43
gcaatgaatgtgagtgtttctgatc

SEQ ID NO: 434702 - DNA, 25 bp, Artificial
  probe
  misc_feature (1)..(25): SEQ ID NO: 6301; WAN024BNL; Start 360; Stop 384
agatagtgaagtggtgtttagattt

SEQ ID NO: 434703 - DNA, 25 bp, Artificial
  probe
  misc_feature (1)..(25): SEQ ID NO: 6301; WAN024BNL; Start 23; Stop 47
tgaatgtgagtgtttctgatctctt

SEQ ID NO: 434704 - DNA, 25 bp, Artificial
  probe
  misc_feature (1)..(25): SEQ ID NO: 6301; WAN024BNL; Start 22; Stop 46
atgaatgtgagtgtttctgatctct

SEQ ID NO: 434705 - DNA, 25 bp, Artificial
  probe
  misc_feature (1)..(25): SEQ ID NO: 6301; WAN024BNL; Start 123; Stop 147
taatgtaaatcaatatcaacgcctg

SEQ ID NO: 434706 - DNA, 25 bp, Artificial
  probe
  misc_feature (1)..(25): SEQ ID NO: 6301; WAN024BNL; Start 216; Stop 240
cgataaacagagaaagagtacactt

SEQ ID NO: 434707 - DNA, 25 bp, Artificial
  probe
  misc_feature (1)..(25): SEQ ID NO: 6301; WAN024BNL; Start 24; Stop 48
gaatgtgagtgtttctgatctcttt

SEQ ID NO: 434708 - DNA, 25 bp, Artificial
  probe
  misc_feature (1)..(25): SEQ ID NO: 6301; WAN024BNL; Start 21; Stop 45
aatgaatgtgagtgtttctgatctc

SEQ ID NO: 434709 - DNA, 25 bp, Artificial
  probe
  misc_feature (1)..(25): SEQ ID NO: 6301; WAN024BNL; Start 27; Stop 51
tgtgagtgtttctgatctctttaca

SEQ ID NO: 434710 - DNA, 25 bp, Artificial
  probe
  misc_feature (1)..(25): SEQ ID NO: 6302; WAN024FHD; Start 590; Stop 614
cagagaagaagatgatcgtaaccag

SEQ ID NO: 434711 - DNA, 25 bp, Artificial
  probe
  misc_feature (1)..(25): SEQ ID NO: 6302; WAN024FHD; Start 74; Stop 98
cttcttccaagtcctcatccgataa

SEQ ID NO: 434712 - DNA, 25 bp, Artificial
  probe
  misc_feature (1)..(25): SEQ ID NO: 6302; WAN024FHD; Start 587; Stop 611
cagcagagaagaagatgatcgtaac

SEQ ID NO: 434713 - DNA, 25 bp, Artificial
  probe
  misc_feature (1)..(25): SEQ ID NO: 6302; WAN024FHD; Start 557; Stop 581
aagaagccaagcaagcattcaataa

SEQ ID NO: 434714 - DNA, 25 bp, Artificial
  probe
  misc_feature (1)..(25): SEQ ID NO: 6302; WAN024FHD; Start 560; Stop 584
aagccaagcaagcattcaataacat

SEQ ID NO: 434715 - DNA, 25 bp, Artificial
  probe
  misc_feature (1)..(25): SEQ ID NO: 6302; WAN024FHD; Start 244; Stop 268
caagcagacctgatcttctacaatg

SEQ ID NO: 434716 - DNA, 25 bp, Artificial
  probe
  misc_feature (1)..(25): SEQ ID NO: 6302; WAN024FHD; Start 243; Stop 267
acaagcagacctgatcttctacaat

SEQ ID NO: 434717 - DNA, 25 bp, Artificial
  probe
  misc_feature (1)..(25): SEQ ID NO: 6302; WAN024FHD; Start 792; Stop 816
aactgtgtctaaggatagcaatatc

SEQ ID NO: 434718 - DNA, 25 bp, Artificial
  probe
  misc_feature (1)..(25): SEQ ID NO: 6302; WAN024FHD; Start 561; Stop 585
agccaagcaagcattcaataacatc

SEQ ID NO: 434719 - DNA, 25 bp, Artificial
  probe
  misc_feature (1)..(25): SEQ ID NO: 6302; WAN024FHD; Start 591; Stop 615
agagaagaagatgatcgtaaccagc

SEQ ID NO: 434720 - DNA, 25 bp, Artificial
  probe
  misc_feature (1)..(25): SEQ ID NO: 6302; WAN024FHD; Start 588; Stop 612
agcagagaagaagatgatcgtaacc

SEQ ID NO: 434721 - DNA, 25 bp, Artificial
  probe
  misc_feature (1)..(25): SEQ ID NO: 6302; WAN024FHD; Start 586; Stop 610
ccagcagagaagaagatgatcgtaa

SEQ ID NO: 434722 - DNA, 25 bp, Artificial
  probe
  misc_feature (1)..(25): SEQ ID NO: 6302; WAN024FHD; Start 558; Stop 582
agaagccaagcaagcattcaataac

SEQ ID NO: 434723 - DNA, 25 bp, Artificial
  probe
  misc_feature (1)..(25): SEQ ID NO: 6302; WAN024FHD; Start 556; Stop 580
caagaagccaagcaagcattcaata

SEQ ID NO: 434724 - DNA, 25 bp, Artificial
  probe
  misc_feature (1)..(25): SEQ ID NO: 6302; WAN024FHD; Start 657; Stop 681
atctgcctatatctgggaaatcaac

SEQ ID NO: 434725 - DNA, 25 bp, Artificial
  probe
  misc_feature (1)..(25): SEQ ID NO: 6302; WAN024FHD; Start 656; Stop 680
catctgcctatatctgggaaatcaa

SEQ ID NO: 434726 - DNA, 25 bp, Artificial
  probe
  misc_feature (1)..(25): SEQ ID NO: 6302; WAN024FHD; Start 589; Stop 613
gcagagaagaagatgatcgtaacca

SEQ ID NO: 434727 - DNA, 25 bp, Artificial
  probe
  misc_feature (1)..(25): SEQ ID NO: 6302; WAN024FHD; Start 239; Stop 263
cttcacaagcagacctgatcttcta

SEQ ID NO: 434728 - DNA, 25 bp, Artificial
  probe
  misc_feature (1)..(25): SEQ ID NO: 6302; WAN024FHD; Start 89; Stop 113
catccgataaattgaaggtggttac

SEQ ID NO: 434729 - DNA, 25 bp, Artificial
  probe
  misc_feature (1)..(25): SEQ ID NO: 6302; WAN024FHD; Start 559; Stop 583
gaagccaagcaagcattcaataaca

SEQ ID NO: 434730 - DNA, 25 bp, Artificial
  probe
  misc_feature (1)..(25): SEQ ID NO: 6302; WAN024FHD; Start 245; Stop 269
aagcagacctgatcttctacaatgg

SEQ ID NO: 434731 - DNA, 25 bp, Artificial
  probe
  misc_feature (1)..(25): SEQ ID NO: 6302; WAN024FHD; Start 77; Stop 101
cttccaagtcctcatccgataaatt

SEQ ID NO: 434732 - DNA, 25 bp, Artificial
  probe
  misc_feature (1)..(25): SEQ ID NO: 6302; WAN024FHD; Start 573; Stop 597
attcaataacatcccagcagagaag

SEQ ID NO: 434733 - DNA, 25 bp, Artificial
  probe
  misc_feature (1)..(25): SEQ ID NO: 6302; WAN024FHD; Start 661; Stop 685
gcctatatctgggaaatcaacactg

SEQ ID NO: 434734 - DNA, 25 bp, Artificial
  probe
  misc_feature (1)..(25): SEQ ID NO: 6302; WAN024FHD; Start 659; Stop 683
ctgcctatatctgggaaatcaacac

SEQ ID NO: 434735 - DNA, 25 bp, Artificial
  probe
  misc_feature (1)..(25): SEQ ID NO: 6302; WAN024FHD; Start 658; Stop 682
tctgcctatatctgggaaatcaaca

SEQ ID NO: 434736 - DNA, 25 bp, Artificial
  probe
  misc_feature (1)..(25): SEQ ID NO: 6302; WAN024FHD; Start 578; Stop 602
ataacatcccagcagagaagaagat

SEQ ID NO: 434737 - DNA, 25 bp, Artificial
  probe
  misc_feature (1)..(25): SEQ ID NO: 6302; WAN024FHD; Start 240; Stop 264
ttcacaagcagacctgatcttctac

SEQ ID NO: 434738 - DNA, 25 bp, Artificial
  probe
  misc_feature (1)..(25): SEQ ID NO: 6302; WAN024FHD; Start 76; Stop 100
tcttccaagtcctcatccgataaat

SEQ ID NO: 434739 - DNA, 25 bp, Artificial
  probe
  misc_feature (1)..(25): SEQ ID NO: 6302; WAN024FHD; Start 577; Stop 601
aataacatcccagcagagaagaaga

SEQ ID NO: 434740 - DNA, 25 bp, Artificial
  probe
  misc_feature (1)..(25): SEQ ID NO: 6302; WAN024FHD; Start 576; Stop 600
caataacatcccagcagagaagaag

SEQ ID NO: 434741 - DNA, 25 bp, Artificial
  probe
  misc_feature (1)..(25): SEQ ID NO: 6302; WAN024FHD; Start 242; Stop 266
cacaagcagacctgatcttctacaa

SEQ ID NO: 434742 - DNA, 25 bp, Artificial
  probe
  misc_feature (1)..(25): SEQ ID NO: 6302; WAN024FHD; Start 572; Stop 596
cattcaataacatcccagcagagaa

SEQ ID NO: 434743 - DNA, 25 bp, Artificial
  probe
  misc_feature (1)..(25): SEQ ID NO: 6303; WAN024FQH; Start 891; Stop 915
tagtgagattgttgaagatggagtc

SEQ ID NO: 434744 - DNA, 25 bp, Artificial
  probe
  misc_feature (1)..(25): SEQ ID NO: 6303; WAN024FQH; Start 890; Stop 914
ctagtgagattgttgaagatggagt

SEQ ID NO: 434745 - DNA, 25 bp, Artificial
  probe
  misc_feature (1)..(25): SEQ ID NO: 6303; WAN024FQH; Start 889; Stop 913
cctagtgagattgttgaagatggag

SEQ ID NO: 434746 - DNA, 25 bp, Artificial
  probe
  misc_feature (1)..(25): SEQ ID NO: 6303; WAN024FQH; Start 829; Stop 853
gtcctattagaagcacaacaataca

SEQ ID NO: 434747 - DNA, 25 bp, Artificial
  probe
  misc_feature (1)..(25): SEQ ID NO: 6303; WAN024FQH; Start 839; Stop 863
aagcacaacaatacaatcttcctat

SEQ ID NO: 434748 - DNA, 25 bp, Artificial
  probe
  misc_feature (1)..(25): SEQ ID NO: 6303; WAN024FQH; Start 888; Stop 912
acctagtgagattgttgaagatgga

SEQ ID NO: 434749 - DNA, 25 bp, Artificial
  probe
  misc_feature (1)..(25): SEQ ID NO: 6303; WAN024FQH; Start 840; Stop 864
agcacaacaatacaatcttcctatt

SEQ ID NO: 434750 - DNA, 25 bp, Artificial
  probe
  misc_feature (1)..(25): SEQ ID NO: 6303; WAN024FQH; Start 828; Stop 852
agtcctattagaagcacaacaatac

SEQ ID NO: 434751 - DNA, 25 bp, Artificial
  probe
  misc_feature (1)..(25): SEQ ID NO: 6303; WAN024FQH; Start 188; Stop 212
gagtacgcttgtctaagaatcttct

SEQ ID NO: 434752 - DNA, 25 bp, Artificial
  probe
  misc_feature (1)..(25): SEQ ID NO: 6303; WAN024FQH; Start 469; Stop 493
tatggaattgctgaaggaattatcg

SEQ ID NO: 434753 - DNA, 25 bp, Artificial
  probe
  misc_feature (1)..(25): SEQ ID NO: 6303; WAN024FQH; Start 826; Stop 850
ttagtcctattagaagcacaacaat

SEQ ID NO: 434754 - DNA, 25 bp, Artificial
  probe
  misc_feature (1)..(25): SEQ ID NO: 6303; WAN024FQH; Start 243; Stop 267
tgtagataatgagatagatgttgcc

SEQ ID NO: 434755 - DNA, 25 bp, Artificial
  probe
  misc_feature (1)..(25): SEQ ID NO: 6303; WAN024FQH; Start 189; Stop 213
agtacgcttgtctaagaatcttcta

SEQ ID NO: 434756 - DNA, 25 bp, Artificial
  probe
  misc_feature (1)..(25): SEQ ID NO: 6303; WAN024FQH; Start 830; Stop 854
tcctattagaagcacaacaatacaa

SEQ ID NO: 434757 - DNA, 25 bp, Artificial
  probe
  misc_feature (1)..(25): SEQ ID NO: 6303; WAN024FQH; Start 936; Stop 960
ctatgacgtgtatcagatgagtgag

SEQ ID NO: 434758 - DNA, 25 bp, Artificial
  probe
  misc_feature (1)..(25): SEQ ID NO: 6303; WAN024FQH; Start 892; Stop 916
agtgagattgttgaagatggagtca

SEQ ID NO: 434759 - DNA, 25 bp, Artificial
  probe
  misc_feature (1)..(25): SEQ ID NO: 6303; WAN024FQH; Start 244; Stop 268
gtagataatgagatagatgttgcct

SEQ ID NO: 434760 - DNA, 25 bp, Artificial
  probe
  misc_feature (1)..(25): SEQ ID NO: 6303; WAN024FQH; Start 187; Stop 211
cgagtacgcttgtctaagaatcttc

SEQ ID NO: 434761 - DNA, 25 bp, Artificial
  probe
  misc_feature (1)..(25): SEQ ID NO: 6303; WAN024FQH; Start 937; Stop 961
tatgacgtgtatcagatgagtgaga

SEQ ID NO: 434762 - DNA, 25 bp, Artificial
  probe
  misc_feature (1)..(25): SEQ ID NO: 6303; WAN024FQH; Start 599; Stop 623
atgattatcttgttcaagttgcgaa

SEQ ID NO: 434763 - DNA, 25 bp, Artificial
  probe
  misc_feature (1)..(25): SEQ ID NO: 6303; WAN024FQH; Start 190; Stop 214
gtacgcttgtctaagaatcttctaa

SEQ ID NO: 434764 - DNA, 25 bp, Artificial
  probe
  misc_feature (1)..(25): SEQ ID NO: 6303; WAN024FQH; Start 300; Stop 324
atcattggcaggaataggtatatcc

SEQ ID NO: 434765 - DNA, 25 bp, Artificial
  probe
  misc_feature (1)..(25): SEQ ID NO: 6303; WAN024FQH; Start 598; Stop 622
tatgattatcttgttcaagttgcga

SEQ ID NO: 434766 - DNA, 25 bp, Artificial
  probe
  misc_feature (1)..(25): SEQ ID NO: 6303; WAN024FQH; Start 299; Stop 323
tatcattggcaggaataggtatatc

SEQ ID NO: 434767 - DNA, 25 bp, Artificial
  probe
  misc_feature (1)..(25): SEQ ID NO: 6303; WAN024FQH; Start 597; Stop 621
ctatgattatcttgttcaagttgcg

SEQ ID NO: 434768 - DNA, 25 bp, Artificial
  probe
  misc_feature (1)..(25): SEQ ID NO: 6303; WAN024FQH; Start 302; Stop 326
cattggcaggaataggtatatccac

SEQ ID NO: 434769 - DNA, 25 bp, Artificial
  probe
  misc_feature (1)..(25): SEQ ID NO: 6303; WAN024FQH; Start 301; Stop 325
tcattggcaggaataggtatatcca

SEQ ID NO: 434770 - DNA, 25 bp, Artificial
  probe
  misc_feature (1)..(25): SEQ ID NO: 6303; WAN024FQH; Start 1076; Stop 1100
tagaagaaataggagcggataatcg

SEQ ID NO: 434771 - DNA, 25 bp, Artificial
  probe
  misc_feature (1)..(25): SEQ ID NO: 6303; WAN024FQH; Start 252; Stop 276
tgagatagatgttgcctttggaata

SEQ ID NO: 434772 - DNA, 25 bp, Artificial
  probe
  misc_feature (1)..(25): SEQ ID NO: 6303; WAN024FQH; Start 251; Stop 275
atgagatagatgttgcctttggaat

SEQ ID NO: 434773 - DNA, 25 bp, Artificial
  probe
  misc_feature (1)..(25): SEQ ID NO: 6303; WAN024FQH; Start 249; Stop 273
taatgagatagatgttgcctttgga

SEQ ID NO: 434774 - DNA, 25 bp, Artificial
  probe
  misc_feature (1)..(25): SEQ ID NO: 6303; WAN024FQH; Start 925; Stop 949
ttgattgattgctatgacgtgtatc

SEQ ID NO: 434775 - DNA, 25 bp, Artificial
  probe
  misc_feature (1)..(25): SEQ ID NO: 6303; WAN024FQH; Start 831; Stop 855
cctattagaagcacaacaatacaat

SEQ ID NO: 434776 - DNA, 25 bp, Artificial
  probe
  misc_feature (1)..(25): SEQ ID NO: 6304; WAN024CUX; Start 16; Stop 40
agatactgttatactaaacttgtca

SEQ ID NO: 434777 - DNA, 25 bp, Artificial
  probe
  misc_feature (1)..(25): SEQ ID NO: 6304; WAN024CUX; Start 19; Stop 43
tactgttatactaaacttgtcaagt

SEQ ID NO: 434778 - DNA, 25 bp, Artificial
  probe
  misc_feature (1)..(25): SEQ ID NO: 6304; WAN024CUX; Start 20; Stop 44
actgttatactaaacttgtcaagtt

SEQ ID NO: 434779 - DNA, 25 bp, Artificial
  probe
  misc_feature (1)..(25): SEQ ID NO: 6305; WAN024AT8; Start 489; Stop 513
cttacttcagatgccaatacaaaca

SEQ ID NO: 434780 - DNA, 25 bp, Artificial
  probe
  misc_feature (1)..(25): SEQ ID NO: 6305; WAN024AT8; Start 186; Stop 210
aggcaagagggaaataacttatcat

SEQ ID NO: 434781 - DNA, 25 bp, Artificial
  probe
  misc_feature (1)..(25): SEQ ID NO: 6305; WAN024AT8; Start 185; Stop 209
taggcaagagggaaataacttatca

SEQ ID NO: 434782 - DNA, 25 bp, Artificial
  probe
  misc_feature (1)..(25): SEQ ID NO: 6305; WAN024AT8; Start 488; Stop 512
tcttacttcagatgccaatacaaac

SEQ ID NO: 434783 - DNA, 25 bp, Artificial
  probe
  misc_feature (1)..(25): SEQ ID NO: 6305; WAN024AT8; Start 187; Stop 211
ggcaagagggaaataacttatcatt

SEQ ID NO: 434784 - DNA, 25 bp, Artificial
  probe
  misc_feature (1)..(25): SEQ ID NO: 6305; WAN024AT8; Start 490; Stop 514
ttacttcagatgccaatacaaacat

SEQ ID NO: 434785 - DNA, 25 bp, Artificial
  probe
  misc_feature (1)..(25): SEQ ID NO: 6305; WAN024AT8; Start 441; Stop 465
tctgtctttattgctgattattggt

SEQ ID NO: 434786 - DNA, 25 bp, Artificial
  probe
  misc_feature (1)..(25): SEQ ID NO: 6305; WAN024AT8; Start 440; Stop 464
gtctgtctttattgctgattattgg

SEQ ID NO: 434787 - DNA, 25 bp, Artificial
  probe
  misc_feature (1)..(25): SEQ ID NO: 6305; WAN024AT8; Start 250; Stop 274
tcatcatggacatttatcgtatgga

SEQ ID NO: 434788 - DNA, 25 bp, Artificial
  probe
  misc_feature (1)..(25): SEQ ID NO: 6305; WAN024AT8; Start 525; Stop 549
aactttcagattatggactgggttt

SEQ ID NO: 434789 - DNA, 25 bp, Artificial
  probe
  misc_feature (1)..(25): SEQ ID NO: 6305; WAN024AT8; Start 524; Stop 548
aaactttcagattatggactgggtt

SEQ ID NO: 434790 - DNA, 25 bp, Artificial
  probe
  misc_feature (1)..(25): SEQ ID NO: 6305; WAN024AT8; Start 442; Stop 466
ctgtctttattgctgattattggtt

SEQ ID NO: 434791 - DNA, 25 bp, Artificial
  probe
  misc_feature (1)..(25): SEQ ID NO: 6305; WAN024AT8; Start 523; Stop 547
caaactttcagattatggactgggt

SEQ ID NO: 434792 - DNA, 25 bp, Artificial
  probe
  misc_feature (1)..(25): SEQ ID NO: 6305; WAN024AT8; Start 522; Stop 546
acaaactttcagattatggactggg

SEQ ID NO: 434793 - DNA, 25 bp, Artificial
  probe
  misc_feature (1)..(25): SEQ ID NO: 6305; WAN024AT8; Start 251; Stop 275
catcatggacatttatcgtatggat

SEQ ID NO: 434794 - DNA, 25 bp, Artificial
  probe
  misc_feature (1)..(25): SEQ ID NO: 6305; WAN024AT8; Start 521; Stop 545
tacaaactttcagattatggactgg

SEQ ID NO: 434795 - DNA, 25 bp, Artificial
  probe
  misc_feature (1)..(25): SEQ ID NO: 6305; WAN024AT8; Start 330; Stop 354
acaaagagattatttccctcagttt

SEQ ID NO: 434796 - DNA, 25 bp, Artificial
  probe
  misc_feature (1)..(25): SEQ ID NO: 6305; WAN024AT8; Start 486; Stop 510
tatcttacttcagatgccaatacaa

SEQ ID NO: 434797 - DNA, 25 bp, Artificial
  probe
  misc_feature (1)..(25): SEQ ID NO: 6305; WAN024AT8; Start 443; Stop 467
tgtctttattgctgattattggttt

SEQ ID NO: 434798 - DNA, 25 bp, Artificial
  probe
  misc_feature (1)..(25): SEQ ID NO: 6305; WAN024AT8; Start 968; Stop 992
ttccttacttcaatcgaattgtcaa

SEQ ID NO: 434799 - DNA, 25 bp, Artificial
  probe
  misc_feature (1)..(25): SEQ ID NO: 6305; WAN024AT8; Start 253; Stop 277
tcatggacatttatcgtatggattt

SEQ ID NO: 434800 - DNA, 25 bp, Artificial
  probe
  misc_feature (1)..(25): SEQ ID NO: 6305; WAN024AT8; Start 439; Stop 463
agtctgtctttattgctgattattg

SEQ ID NO: 434801 - DNA, 25 bp, Artificial
  probe
  misc_feature (1)..(25): SEQ ID NO: 6305; WAN024AT8; Start 485; Stop 509
atatcttacttcagatgccaataca

SEQ ID NO: 434802 - DNA, 25 bp, Artificial
  probe
  misc_feature (1)..(25): SEQ ID NO: 6305; WAN024AT8; Start 967; Stop 991
attccttacttcaatcgaattgtca

SEQ ID NO: 434803 - DNA, 25 bp, Artificial
  probe
  misc_feature (1)..(25): SEQ ID NO: 6305; WAN024AT8; Start 89; Stop 113
ttaaagagaccgactcatggaatct

SEQ ID NO: 434804 - DNA, 25 bp, Artificial
  probe
  misc_feature (1)..(25): SEQ ID NO: 6305; WAN024AT8; Start 444; Stop 468
gtctttattgctgattattggtttg

SEQ ID NO: 434805 - DNA, 25 bp, Artificial
  probe
  misc_feature (1)..(25): SEQ ID NO: 6305; WAN024AT8; Start 252; Stop 276
atcatggacatttatcgtatggatt

SEQ ID NO: 434806 - DNA, 25 bp, Artificial
  probe
  misc_feature (1)..(25): SEQ ID NO: 6305; WAN024AT8; Start 965; Stop 989
agattccttacttcaatcgaattgt

SEQ ID NO: 434807 - DNA, 25 bp, Artificial
  probe
  misc_feature (1)..(25): SEQ ID NO: 6305; WAN024AT8; Start 445; Stop 469
tctttattgctgattattggtttga

SEQ ID NO: 434808 - DNA, 25 bp, Artificial
  probe
  misc_feature (1)..(25): SEQ ID NO: 6305; WAN024AT8; Start 87; Stop 111
atttaaagagaccgactcatggaat

SEQ ID NO: 434809 - DNA, 25 bp, Artificial
  probe
  misc_feature (1)..(25): SEQ ID NO: 6305; WAN024AT8; Start 966; Stop 990
gattccttacttcaatcgaattgtc

SEQ ID NO: 434810 - DNA, 25 bp, Artificial
  probe
  misc_feature (1)..(25): SEQ ID NO: 6305; WAN024AT8; Start 88; Stop 112
tttaaagagaccgactcatggaatc

SEQ ID NO: 434811 - DNA, 25 bp, Artificial
  probe
  misc_feature (1)..(25): SEQ ID NO: 6305; WAN024AT8; Start 86; Stop 110
gatttaaagagaccgactcatggaa

SEQ ID NO: 434812 - DNA, 25 bp, Artificial
  probe
  misc_feature (1)..(25): SEQ ID NO: 6306; WAN024BZR; Start 53; Stop 77
tagtaggattggttgcttgtagttc

SEQ ID NO: 434813 - DNA, 25 bp, Artificial
  probe
  misc_feature (1)..(25): SEQ ID NO: 6306; WAN024BZR; Start 52; Stop 76
gtagtaggattggttgcttgtagtt

SEQ ID NO: 434814 - DNA, 25 bp, Artificial
  probe
  misc_feature (1)..(25): SEQ ID NO: 6306; WAN024BZR; Start 50; Stop 74
ctgtagtaggattggttgcttgtag

SEQ ID NO: 434815 - DNA, 25 bp, Artificial
  probe
  misc_feature (1)..(25): SEQ ID NO: 6306; WAN024BZR; Start 1026; Stop 1050
taataatactggtgttccttcaagc

SEQ ID NO: 434816 - DNA, 25 bp, Artificial
  probe
  misc_feature (1)..(25): SEQ ID NO: 6306; WAN024BZR; Start 51; Stop 75
tgtagtaggattggttgcttgtagt

SEQ ID NO: 434817 - DNA, 25 bp, Artificial
  probe
  misc_feature (1)..(25): SEQ ID NO: 6306; WAN024BZR; Start 207; Stop 231
gttataccgtacactgttaatggca

SEQ ID NO: 434818 - DNA, 25 bp, Artificial
  probe
  misc_feature (1)..(25): SEQ ID NO: 6306; WAN024BZR; Start 827; Stop 851
ttagtcagttggatgctgtatctac

SEQ ID NO: 434819 - DNA, 25 bp, Artificial
  probe
  misc_feature (1)..(25): SEQ ID NO: 6306; WAN024BZR; Start 825; Stop 849
aattagtcagttggatgctgtatct

SEQ ID NO: 434820 - DNA, 25 bp, Artificial
  probe
  misc_feature (1)..(25): SEQ ID NO: 6306; WAN024BZR; Start 1216; Stop 1240
aatgaggttggaatcaagaacgaag

SEQ ID NO: 434821 - DNA, 25 bp, Artificial
  probe
  misc_feature (1)..(25): SEQ ID NO: 6306; WAN024BZR; Start 1215; Stop 1239
gaatgaggttggaatcaagaacgaa

SEQ ID NO: 434822 - DNA, 25 bp, Artificial
  probe
  misc_feature (1)..(25): SEQ ID NO: 6306; WAN024BZR; Start 828; Stop 852
tagtcagttggatgctgtatctact

SEQ ID NO: 434823 - DNA, 25 bp, Artificial
  probe
  misc_feature (1)..(25): SEQ ID NO: 6306; WAN024BZR; Start 1023; Stop 1047
tgttaataatactggtgttccttca

SEQ ID NO: 434824 - DNA, 25 bp, Artificial
  probe
  misc_feature (1)..(25): SEQ ID NO: 6306; WAN024BZR; Start 140; Stop 164
ttcttcaaggaactggagatcgtat

SEQ ID NO: 434825 - DNA, 25 bp, Artificial
  probe
  misc_feature (1)..(25): SEQ ID NO: 6306; WAN024BZR; Start 826; Stop 850
attagtcagttggatgctgtatcta

SEQ ID NO: 434826 - DNA, 25 bp, Artificial
  probe
  misc_feature (1)..(25): SEQ ID NO: 6306; WAN024BZR; Start 829; Stop 853
agtcagttggatgctgtatctactt

SEQ ID NO: 434827 - DNA, 25 bp, Artificial
  probe
  misc_feature (1)..(25): SEQ ID NO: 6306; WAN024BZR; Start 1027; Stop 1051
aataatactggtgttccttcaagct

SEQ ID NO: 434828 - DNA, 25 bp, Artificial
  probe
  misc_feature (1)..(25): SEQ ID NO: 6306; WAN024BZR; Start 44; Stop 68
taatagctgtagtaggattggttgc

SEQ ID NO: 434829 - DNA, 25 bp, Artificial
  probe
  misc_feature (1)..(25): SEQ ID NO: 6306; WAN024BZR; Start 919; Stop 943
ggtaatggagattccttgattgcta

SEQ ID NO: 434830 - DNA, 25 bp, Artificial
  probe
  misc_feature (1)..(25): SEQ ID NO: 6306; WAN024BZR; Start 206; Stop 230
tgttataccgtacactgttaatggc

SEQ ID NO: 434831 - DNA, 25 bp, Artificial
  probe
  misc_feature (1)..(25): SEQ ID NO: 6306; WAN024BZR; Start 141; Stop 165
tcttcaaggaactggagatcgtatc

SEQ ID NO: 434832 - DNA, 25 bp, Artificial
  probe
  misc_feature (1)..(25): SEQ ID NO: 6306; WAN024BZR; Start 49; Stop 73
gctgtagtaggattggttgcttgta

SEQ ID NO: 434833 - DNA, 25 bp, Artificial
  probe
  misc_feature (1)..(25): SEQ ID NO: 6306; WAN024BZR; Start 208; Stop 232
ttataccgtacactgttaatggcag

SEQ ID NO: 434834 - DNA, 25 bp, Artificial
  probe
  misc_feature (1)..(25): SEQ ID NO: 6306; WAN024BZR; Start 205; Stop 229
ttgttataccgtacactgttaatgg

SEQ ID NO: 434835 - DNA, 25 bp, Artificial
  probe
  misc_feature (1)..(25): SEQ ID NO: 6306; WAN024BZR; Start 925; Stop 949
ggagattccttgattgctaatccta

SEQ ID NO: 434836 - DNA, 25 bp, Artificial
  probe
  misc_feature (1)..(25): SEQ ID NO: 6306; WAN024BZR; Start 1219; Stop 1243
gaggttggaatcaagaacgaagttg

SEQ ID NO: 434837 - DNA, 25 bp, Artificial
  probe
  misc_feature (1)..(25): SEQ ID NO: 6306; WAN024BZR; Start 1020; Stop 1044
agatgttaataatactggtgttcct

SEQ ID NO: 434838 - DNA, 25 bp, Artificial
  probe
  misc_feature (1)..(25): SEQ ID NO: 6306; WAN024BZR; Start 920; Stop 944
gtaatggagattccttgattgctaa

SEQ ID NO: 434839 - DNA, 25 bp, Artificial
  probe
  misc_feature (1)..(25): SEQ ID NO: 6306; WAN024BZR; Start 923; Stop 947
atggagattccttgattgctaatcc

SEQ ID NO: 434840 - DNA, 25 bp, Artificial
  probe
  misc_feature (1)..(25): SEQ ID NO: 6306; WAN024BZR; Start 922; Stop 946
aatggagattccttgattgctaatc

SEQ ID NO: 434841 - DNA, 25 bp, Artificial
  probe
  misc_feature (1)..(25): SEQ ID NO: 6306; WAN024BZR; Start 209; Stop 233
tataccgtacactgttaatggcaga

SEQ ID NO: 434842 - DNA, 25 bp, Artificial
  probe
  misc_feature (1)..(25): SEQ ID NO: 6306; WAN024BZR; Start 1018; Stop 1042
gcagatgttaataatactggtgttc

SEQ ID NO: 434843 - DNA, 25 bp, Artificial
  probe
  misc_feature (1)..(25): SEQ ID NO: 6306; WAN024BZR; Start 876; Stop 900
cctattctatcgctactttatcgct

SEQ ID NO: 434844 - DNA, 25 bp, Artificial
  probe
  misc_feature (1)..(25): SEQ ID NO: 6306; WAN024BZR; Start 875; Stop 899
tcctattctatcgctactttatcgc

SEQ ID NO: 434845 - DNA, 25 bp, Artificial
  probe
  misc_feature (1)..(25): SEQ ID NO: 6307; WAN024BP7; Start 377; Stop 401
ttaatgcgattattggtcaactgtt

SEQ ID NO: 434846 - DNA, 25 bp, Artificial
  probe
  misc_feature (1)..(25): SEQ ID NO: 6307; WAN024BP7; Start 815; Stop 839
ggatgaataccagaatataccagtt

SEQ ID NO: 434847 - DNA, 25 bp, Artificial
  probe
  misc_feature (1)..(25): SEQ ID NO: 6307; WAN024BP7; Start 801; Stop 825
aagaaacacgaaatggatgaatacc

SEQ ID NO: 434848 - DNA, 25 bp, Artificial
  probe
  misc_feature (1)..(25): SEQ ID NO: 6307; WAN024BP7; Start 907; Stop 931
ggctttattgttgctgaggatttaa

SEQ ID NO: 434849 - DNA, 25 bp, Artificial
  probe
  misc_feature (1)..(25): SEQ ID NO: 6307; WAN024BP7; Start 917; Stop 941
ttgctgaggatttaatgattacacc

SEQ ID NO: 434850 - DNA, 25 bp, Artificial
  probe
  misc_feature (1)..(25): SEQ ID NO: 6307; WAN024BP7; Start 814; Stop 838
tggatgaataccagaatataccagt

SEQ ID NO: 434851 - DNA, 25 bp, Artificial
  probe
  misc_feature (1)..(25): SEQ ID NO: 6307; WAN024BP7; Start 800; Stop 824
caagaaacacgaaatggatgaatac

SEQ ID NO: 434852 - DNA, 25 bp, Artificial
  probe
  misc_feature (1)..(25): SEQ ID NO: 6307; WAN024BP7; Start 363; Stop 387
acaaacgagtatctttaatgcgatt

SEQ ID NO: 434853 - DNA, 25 bp, Artificial
  probe
  misc_feature (1)..(25): SEQ ID NO: 6307; WAN024BP7; Start 378; Stop 402
taatgcgattattggtcaactgttt

SEQ ID NO: 434854 - DNA, 25 bp, Artificial
  probe
  misc_feature (1)..(25): SEQ ID NO: 6307; WAN024BP7; Start 376; Stop 400
tttaatgcgattattggtcaactgt

SEQ ID NO: 434855 - DNA, 25 bp, Artificial
  probe
  misc_feature (1)..(25): SEQ ID NO: 6307; WAN024BP7; Start 198; Stop 222
atttatggcaatatctggagcattt

SEQ ID NO: 434856 - DNA, 25 bp, Artificial
  probe
  misc_feature (1)..(25): SEQ ID NO: 6307; WAN024BP7; Start 752; Stop 776
tagcattgtatggaagtttggtaac

SEQ ID NO: 434857 - DNA, 25 bp, Artificial
  probe
  misc_feature (1)..(25): SEQ ID NO: 6307; WAN024BP7; Start 249; Stop 273
gtggcaaagtcctttagagttattc

SEQ ID NO: 434858 - DNA, 25 bp, Artificial
  probe
  misc_feature (1)..(25): SEQ ID NO: 6307; WAN024BP7; Start 248; Stop 272
agtggcaaagtcctttagagttatt

SEQ ID NO: 434859 - DNA, 25 bp, Artificial
  probe
  misc_feature (1)..(25): SEQ ID NO: 6307; WAN024BP7; Start 252; Stop 276
gcaaagtcctttagagttattccag

SEQ ID NO: 434860 - DNA, 25 bp, Artificial
  probe
  misc_feature (1)..(25): SEQ ID NO: 6307; WAN024BP7; Start 256; Stop 280
agtcctttagagttattccagaaca

SEQ ID NO: 434861 - DNA, 25 bp, Artificial
  probe
  misc_feature (1)..(25): SEQ ID NO: 6307; WAN024BP7; Start 375; Stop 399
ctttaatgcgattattggtcaactg

SEQ ID NO: 434862 - DNA, 25 bp, Artificial
  probe
  misc_feature (1)..(25): SEQ ID NO: 6307; WAN024BP7; Start 374; Stop 398
tctttaatgcgattattggtcaact

SEQ ID NO: 434863 - DNA, 25 bp, Artificial
  probe
  misc_feature (1)..(25): SEQ ID NO: 6307; WAN024BP7; Start 906; Stop 930
gggctttattgttgctgaggattta

SEQ ID NO: 434864 - DNA, 25 bp, Artificial
  probe
  misc_feature (1)..(25): SEQ ID NO: 6307; WAN024BP7; Start 362; Stop 386
tacaaacgagtatctttaatgcgat

SEQ ID NO: 434865 - DNA, 25 bp, Artificial
  probe
  misc_feature (1)..(25): SEQ ID NO: 6307; WAN024BP7; Start 251; Stop 275
ggcaaagtcctttagagttattcca

SEQ ID NO: 434866 - DNA, 25 bp, Artificial
  probe
  misc_feature (1)..(25): SEQ ID NO: 6307; WAN024BP7; Start 250; Stop 274
tggcaaagtcctttagagttattcc

SEQ ID NO: 434867 - DNA, 25 bp, Artificial
  probe
  misc_feature (1)..(25): SEQ ID NO: 6307; WAN024BP7; Start 798; Stop 822
atcaagaaacacgaaatggatgaat

SEQ ID NO: 434868 - DNA, 25 bp, Artificial
  probe
  misc_feature (1)..(25): SEQ ID NO: 6307; WAN024BP7; Start 247; Stop 271
aagtggcaaagtcctttagagttat

SEQ ID NO: 434869 - DNA, 25 bp, Artificial
  probe
  misc_feature (1)..(25): SEQ ID NO: 6307; WAN024BP7; Start 245; Stop 269
ataagtggcaaagtcctttagagtt

SEQ ID NO: 434870 - DNA, 25 bp, Artificial
  probe
  misc_feature (1)..(25): SEQ ID NO: 6307; WAN024BP7; Start 244; Stop 268
aataagtggcaaagtcctttagagt

SEQ ID NO: 434871 - DNA, 25 bp, Artificial
  probe
  misc_feature (1)..(25): SEQ ID NO: 6307; WAN024BP7; Start 751; Stop 775
ttagcattgtatggaagtttggtaa

SEQ ID NO: 434872 - DNA, 25 bp, Artificial
  probe
  misc_feature (1)..(25): SEQ ID NO: 6307; WAN024BP7; Start 750; Stop 774
tttagcattgtatggaagtttggta

SEQ ID NO: 434873 - DNA, 25 bp, Artificial
  probe
  misc_feature (1)..(25): SEQ ID NO: 6307; WAN024BP7; Start 916; Stop 940
gttgctgaggatttaatgattacac

SEQ ID NO: 434874 - DNA, 25 bp, Artificial
  probe
  misc_feature (1)..(25): SEQ ID NO: 6307; WAN024BP7; Start 246; Stop 270
taagtggcaaagtcctttagagtta

SEQ ID NO: 434875 - DNA, 25 bp, Artificial
  probe
  misc_feature (1)..(25): SEQ ID NO: 6307; WAN024BP7; Start 908; Stop 932
gctttattgttgctgaggatttaat

SEQ ID NO: 434876 - DNA, 25 bp, Artificial
  probe
  misc_feature (1)..(25): SEQ ID NO: 6307; WAN024BP7; Start 795; Stop 819
tttatcaagaaacacgaaatggatg

SEQ ID NO: 434877 - DNA, 25 bp, Artificial
  probe
  misc_feature (1)..(25): SEQ ID NO: 6307; WAN024BP7; Start 243; Stop 267
aaataagtggcaaagtcctttagag

SEQ ID NO: 434878 - DNA, 25 bp, Artificial
  probe
  misc_feature (1)..(25): SEQ ID NO: 6308; WAN024FSY; Start 350; Stop 374
atcctgctcattattatagtgaccg

SEQ ID NO: 434879 - DNA, 25 bp, Artificial
  probe
  misc_feature (1)..(25): SEQ ID NO: 6308; WAN024FSY; Start 345; Stop 369
ttgcgatcctgctcattattatagt

SEQ ID NO: 434880 - DNA, 25 bp, Artificial
  probe
  misc_feature (1)..(25): SEQ ID NO: 6308; WAN024FSY; Start 19; Stop 43
attctacctgtctacaatgttgaac

SEQ ID NO: 434881 - DNA, 25 bp, Artificial
  probe
  misc_feature (1)..(25): SEQ ID NO: 6308; WAN024FSY; Start 346; Stop 370
tgcgatcctgctcattattatagtg

SEQ ID NO: 434882 - DNA, 25 bp, Artificial
  probe
  misc_feature (1)..(25): SEQ ID NO: 6308; WAN024FSY; Start 308; Stop 332
tatctagtatggagaacaatgaggc

SEQ ID NO: 434883 - DNA, 25 bp, Artificial
  probe
  misc_feature (1)..(25): SEQ ID NO: 6308; WAN024FSY; Start 312; Stop 336
tagtatggagaacaatgaggcagac

SEQ ID NO: 434884 - DNA, 25 bp, Artificial
  probe
  misc_feature (1)..(25): SEQ ID NO: 6308; WAN024FSY; Start 352; Stop 376
cctgctcattattatagtgaccgtc

SEQ ID NO: 434885 - DNA, 25 bp, Artificial
  probe
  misc_feature (1)..(25): SEQ ID NO: 6308; WAN024FSY; Start 351; Stop 375
tcctgctcattattatagtgaccgt

SEQ ID NO: 434886 - DNA, 25 bp, Artificial
  probe
  misc_feature (1)..(25): SEQ ID NO: 6308; WAN024FSY; Start 309; Stop 333
atctagtatggagaacaatgaggca

SEQ ID NO: 434887 - DNA, 25 bp, Artificial
  probe
  misc_feature (1)..(25): SEQ ID NO: 6308; WAN024FSY; Start 311; Stop 335
ctagtatggagaacaatgaggcaga

SEQ ID NO: 434888 - DNA, 25 bp, Artificial
  probe
  misc_feature (1)..(25): SEQ ID NO: 6308; WAN024FSY; Start 347; Stop 371
gcgatcctgctcattattatagtga

SEQ ID NO: 434889 - DNA, 25 bp, Artificial
  probe
  misc_feature (1)..(25): SEQ ID NO: 6308; WAN024FSY; Start 310; Stop 334
tctagtatggagaacaatgaggcag

SEQ ID NO: 434890 - DNA, 25 bp, Artificial
  probe
  misc_feature (1)..(25): SEQ ID NO: 6308; WAN024FSY; Start 348; Stop 372
cgatcctgctcattattatagtgac

SEQ ID NO: 434891 - DNA, 25 bp, Artificial
  probe
  misc_feature (1)..(25): SEQ ID NO: 6308; WAN024FSY; Start 20; Stop 44
ttctacctgtctacaatgttgaaca

SEQ ID NO: 434892 - DNA, 25 bp, Artificial
  probe
  misc_feature (1)..(25): SEQ ID NO: 6308; WAN024FSY; Start 57; Stop 81
atgcttagaatcaattcaacaacaa

SEQ ID NO: 434893 - DNA, 25 bp, Artificial
  probe
  misc_feature (1)..(25): SEQ ID NO: 6308; WAN024FSY; Start 56; Stop 80
aatgcttagaatcaattcaacaaca

SEQ ID NO: 434894 - DNA, 25 bp, Artificial
  probe
  misc_feature (1)..(25): SEQ ID NO: 6308; WAN024FSY; Start 354; Stop 378
tgctcattattatagtgaccgtcaa

SEQ ID NO: 434895 - DNA, 25 bp, Artificial
  probe
  misc_feature (1)..(25): SEQ ID NO: 6308; WAN024FSY; Start 307; Stop 331
gtatctagtatggagaacaatgagg

SEQ ID NO: 434896 - DNA, 25 bp, Artificial
  probe
  misc_feature (1)..(25): SEQ ID NO: 6308; WAN024FSY; Start 353; Stop 377
ctgctcattattatagtgaccgtca

SEQ ID NO: 434897 - DNA, 25 bp, Artificial
  probe
  misc_feature (1)..(25): SEQ ID NO: 6308; WAN024FSY; Start 349; Stop 373
gatcctgctcattattatagtgacc

SEQ ID NO: 434898 - DNA, 25 bp, Artificial
  probe
  misc_feature (1)..(25): SEQ ID NO: 6308; WAN024FSY; Start 17; Stop 41
ttattctacctgtctacaatgttga

SEQ ID NO: 434899 - DNA, 25 bp, Artificial
  probe
  misc_feature (1)..(25): SEQ ID NO: 6308; WAN024FSY; Start 534; Stop 558
tgggaagttatttgaagatagtgct

SEQ ID NO: 434900 - DNA, 25 bp, Artificial
  probe
  misc_feature (1)..(25): SEQ ID NO: 6308; WAN024FSY; Start 535; Stop 559
gggaagttatttgaagatagtgctg

SEQ ID NO: 434901 - DNA, 25 bp, Artificial
  probe
  misc_feature (1)..(25): SEQ ID NO: 6308; WAN024FSY; Start 229; Stop 253
atagataaagccaagggagattacc

SEQ ID NO: 434902 - DNA, 25 bp, Artificial
  probe
  misc_feature (1)..(25): SEQ ID NO: 6308; WAN024FSY; Start 226; Stop 250
ggtatagataaagccaagggagatt

SEQ ID NO: 434903 - DNA, 25 bp, Artificial
  probe
  misc_feature (1)..(25): SEQ ID NO: 6308; WAN024FSY; Start 220; Stop 244
aatgtcggtatagataaagccaagg

SEQ ID NO: 434904 - DNA, 25 bp, Artificial
  probe
  misc_feature (1)..(25): SEQ ID NO: 6308; WAN024FSY; Start 217; Stop 241
agaaatgtcggtatagataaagcca

SEQ ID NO: 434905 - DNA, 25 bp, Artificial
  probe
  misc_feature (1)..(25): SEQ ID NO: 6308; WAN024FSY; Start 734; Stop 758
ataaagcggcagtttcctataaagt

SEQ ID NO: 434906 - DNA, 25 bp, Artificial
  probe
  misc_feature (1)..(25): SEQ ID NO: 6308; WAN024FSY; Start 894; Stop 918
gcttgccttgatttctataactctt

SEQ ID NO: 434907 - DNA, 25 bp, Artificial
  probe
  misc_feature (1)..(25): SEQ ID NO: 6308; WAN024FSY; Start 18; Stop 42
tattctacctgtctacaatgttgaa

SEQ ID NO: 434908 - DNA, 25 bp, Artificial
  probe
  misc_feature (1)..(25): SEQ ID NO: 6308; WAN024FSY; Start 533; Stop 557
ttgggaagttatttgaagatagtgc

SEQ ID NO: 434909 - DNA, 25 bp, Artificial
  probe
  misc_feature (1)..(25): SEQ ID NO: 6308; WAN024FSY; Start 735; Stop 759
taaagcggcagtttcctataaagtt

SEQ ID NO: 434910 - DNA, 25 bp, Artificial
  probe
  misc_feature (1)..(25): SEQ ID NO: 6308; WAN024FSY; Start 536; Stop 560
ggaagttatttgaagatagtgctgt

SEQ ID NO: 434911 - DNA, 25 bp, Artificial
  probe
  misc_feature (1)..(25): SEQ ID NO: 6309; WAN024CK9; Start 996; Stop 1020
tgaagaggaatacaacaagatgagt

SEQ ID NO: 434912 - DNA, 25 bp, Artificial
  probe
  misc_feature (1)..(25): SEQ ID NO: 6309; WAN024CK9; Start 510; Stop 534
tacagttattgatgccttgaagaca

SEQ ID NO: 434913 - DNA, 25 bp, Artificial
  probe
  misc_feature (1)..(25): SEQ ID NO: 6309; WAN024CK9; Start 1001; Stop 1025
aggaatacaacaagatgagtaaggc

SEQ ID NO: 434914 - DNA, 25 bp, Artificial
  probe
  misc_feature (1)..(25): SEQ ID NO: 6309; WAN024CK9; Start 1004; Stop 1028
aatacaacaagatgagtaaggcaag

SEQ ID NO: 434915 - DNA, 25 bp, Artificial
  probe
  misc_feature (1)..(25): SEQ ID NO: 6309; WAN024CK9; Start 1003; Stop 1027
gaatacaacaagatgagtaaggcaa

SEQ ID NO: 434916 - DNA, 25 bp, Artificial
  probe
  misc_feature (1)..(25): SEQ ID NO: 6309; WAN024CK9; Start 1002; Stop 1026
ggaatacaacaagatgagtaaggca

SEQ ID NO: 434917 - DNA, 25 bp, Artificial
  probe
  misc_feature (1)..(25): SEQ ID NO: 6309; WAN024CK9; Start 509; Stop 533
atacagttattgatgccttgaagac

SEQ ID NO: 434918 - DNA, 25 bp, Artificial
  probe
  misc_feature (1)..(25): SEQ ID NO: 6309; WAN024CK9; Start 348; Stop 372
tgtagaagcaggattgagaacttat

SEQ ID NO: 434919 - DNA, 25 bp, Artificial
  probe
  misc_feature (1)..(25): SEQ ID NO: 6309; WAN024CK9; Start 347; Stop 371
atgtagaagcaggattgagaactta

SEQ ID NO: 434920 - DNA, 25 bp, Artificial
  probe
  misc_feature (1)..(25): SEQ ID NO: 6309; WAN024CK9; Start 1000; Stop 1024
gaggaatacaacaagatgagtaagg

SEQ ID NO: 434921 - DNA, 25 bp, Artificial
  probe
  misc_feature (1)..(25): SEQ ID NO: 6309; WAN024CK9; Start 506; Stop 530
ggaatacagttattgatgccttgaa

SEQ ID NO: 434922 - DNA, 25 bp, Artificial
  probe
  misc_feature (1)..(25): SEQ ID NO: 6309; WAN024CK9; Start 1005; Stop 1029
atacaacaagatgagtaaggcaagc

SEQ ID NO: 434923 - DNA, 25 bp, Artificial
  probe
  misc_feature (1)..(25): SEQ ID NO: 6309; WAN024CK9; Start 995; Stop 1019
atgaagaggaatacaacaagatgag

SEQ ID NO: 434924 - DNA, 25 bp, Artificial
  probe
  misc_feature (1)..(25): SEQ ID NO: 6309; WAN024CK9; Start 93; Stop 117
aatacttgtgtgtgtaactggtcaa

SEQ ID NO: 434925 - DNA, 25 bp, Artificial
  probe
  misc_feature (1)..(25): SEQ ID NO: 6309; WAN024CK9; Start 512; Stop 536
cagttattgatgccttgaagacaac

SEQ ID NO: 434926 - DNA, 25 bp, Artificial
  probe
  misc_feature (1)..(25): SEQ ID NO: 6309; WAN024CK9; Start 883; Stop 907
ttagtaatgcgtgatacaactgaac

SEQ ID NO: 434927 - DNA, 25 bp, Artificial
  probe
  misc_feature (1)..(25): SEQ ID NO: 6309; WAN024CK9; Start 511; Stop 535
acagttattgatgccttgaagacaa

SEQ ID NO: 434928 - DNA, 25 bp, Artificial
  probe
  misc_feature (1)..(25): SEQ ID NO: 6309; WAN024CK9; Start 399; Stop 423
attcaatcgtcagactacttcaatt

SEQ ID NO: 434929 - DNA, 25 bp, Artificial
  probe
  misc_feature (1)..(25): SEQ ID NO: 6309; WAN024CK9; Start 398; Stop 422
aattcaatcgtcagactacttcaat

SEQ ID NO: 434930 - DNA, 25 bp, Artificial
  probe
  misc_feature (1)..(25): SEQ ID NO: 6309; WAN024CK9; Start 408; Stop 432
tcagactacttcaattattgcggat

SEQ ID NO: 434931 - DNA, 25 bp, Artificial
  probe
  misc_feature (1)..(25): SEQ ID NO: 6309; WAN024CK9; Start 94; Stop 118
atacttgtgtgtgtaactggtcaac

SEQ ID NO: 434932 - DNA, 25 bp, Artificial
  probe
  misc_feature (1)..(25): SEQ ID NO: 6309; WAN024CK9; Start 994; Stop 1018
aatgaagaggaatacaacaagatga

SEQ ID NO: 434933 - DNA, 25 bp, Artificial
  probe
  misc_feature (1)..(25): SEQ ID NO: 6309; WAN024CK9; Start 770; Stop 794
tcattgaaccactagaagtcattga

SEQ ID NO: 434934 - DNA, 25 bp, Artificial
  probe
  misc_feature (1)..(25): SEQ ID NO: 6309; WAN024CK9; Start 409; Stop 433
cagactacttcaattattgcggatt

SEQ ID NO: 434935 - DNA, 25 bp, Artificial
  probe
  misc_feature (1)..(25): SEQ ID NO: 6309; WAN024CK9; Start 508; Stop 532
aatacagttattgatgccttgaaga

SEQ ID NO: 434936 - DNA, 25 bp, Artificial
  probe
  misc_feature (1)..(25): SEQ ID NO: 6309; WAN024CK9; Start 1009; Stop 1033
aacaagatgagtaaggcaagcaatc

SEQ ID NO: 434937 - DNA, 25 bp, Artificial
  probe
  misc_feature (1)..(25): SEQ ID NO: 6309; WAN024CK9; Start 404; Stop 428
atcgtcagactacttcaattattgc

SEQ ID NO: 434938 - DNA, 25 bp, Artificial
  probe
  misc_feature (1)..(25): SEQ ID NO: 6309; WAN024CK9; Start 999; Stop 1023
agaggaatacaacaagatgagtaag

SEQ ID NO: 434939 - DNA, 25 bp, Artificial
  probe
  misc_feature (1)..(25): SEQ ID NO: 6309; WAN024CK9; Start 997; Stop 1021
gaagaggaatacaacaagatgagta

SEQ ID NO: 434940 - DNA, 25 bp, Artificial
  probe
  misc_feature (1)..(25): SEQ ID NO: 6309; WAN024CK9; Start 1051; Stop 1075
gcttgtcaacagattgtagaagtta

SEQ ID NO: 434941 - DNA, 25 bp, Artificial
  probe
  misc_feature (1)..(25): SEQ ID NO: 6309; WAN024CK9; Start 513; Stop 537
agttattgatgccttgaagacaacc

SEQ ID NO: 434942 - DNA, 25 bp, Artificial
  probe
  misc_feature (1)..(25): SEQ ID NO: 6309; WAN024CK9; Start 407; Stop 431
gtcagactacttcaattattgcgga

SEQ ID NO: 434943 - DNA, 25 bp, Artificial
  probe
  misc_feature (1)..(25): SEQ ID NO: 6309; WAN024CK9; Start 1008; Stop 1032
caacaagatgagtaaggcaagcaat

SEQ ID NO: 434944 - DNA, 25 bp, Artificial
  probe
  misc_feature (1)..(25): SEQ ID NO: 6310; WAN024BP3; Start 628; Stop 652
gatgttctaatcaaggctgttcaga

SEQ ID NO: 434945 - DNA, 25 bp, Artificial
  probe
  misc_feature (1)..(25): SEQ ID NO: 6310; WAN024BP3; Start 627; Stop 651
ggatgttctaatcaaggctgttcag

SEQ ID NO: 434946 - DNA, 25 bp, Artificial
  probe
  misc_feature (1)..(25): SEQ ID NO: 6310; WAN024BP3; Start 625; Stop 649
gtggatgttctaatcaaggctgttc

SEQ ID NO: 434947 - DNA, 25 bp, Artificial
  probe
  misc_feature (1)..(25): SEQ ID NO: 6310; WAN024BP3; Start 992; Stop 1016
aagtattacaggatgactcgttacg

SEQ ID NO: 434948 - DNA, 25 bp, Artificial
  probe
  misc_feature (1)..(25): SEQ ID NO: 6310; WAN024BP3; Start 626; Stop 650
tggatgttctaatcaaggctgttca

SEQ ID NO: 434949 - DNA, 25 bp, Artificial
  probe
  misc_feature (1)..(25): SEQ ID NO: 6310; WAN024BP3; Start 713; Stop 737
aatacttgcttgatcttattggaca

SEQ ID NO: 434950 - DNA, 25 bp, Artificial
  probe
  misc_feature (1)..(25): SEQ ID NO: 6310; WAN024BP3; Start 714; Stop 738
atacttgcttgatcttattggacaa

SEQ ID NO: 434951 - DNA, 25 bp, Artificial
  probe
  misc_feature (1)..(25): SEQ ID NO: 6310; WAN024BP3; Start 624; Stop 648
tgtggatgttctaatcaaggctgtt

SEQ ID NO: 434952 - DNA, 25 bp, Artificial
  probe
  misc_feature (1)..(25): SEQ ID NO: 6310; WAN024BP3; Start 691; Stop 715
agtcccgatagtgaatacaaacaat

SEQ ID NO: 434953 - DNA, 25 bp, Artificial
  probe
  misc_feature (1)..(25): SEQ ID NO: 6310; WAN024BP3; Start 690; Stop 714
aagtcccgatagtgaatacaaacaa

SEQ ID NO: 434954 - DNA, 25 bp, Artificial
  probe
  misc_feature (1)..(25): SEQ ID NO: 6310; WAN024BP3; Start 593; Stop 617
tatttgttggtagaatcatccctgg

SEQ ID NO: 434955 - DNA, 25 bp, Artificial
  probe
  misc_feature (1)..(25): SEQ ID NO: 6310; WAN024BP3; Start 946; Stop 970
attgatagggttgatgactggaaag

SEQ ID NO: 434956 - DNA, 25 bp, Artificial
  probe
  misc_feature (1)..(25): SEQ ID NO: 6310; WAN024BP3; Start 614; Stop 638
ctggtaaaggtgtggatgttctaat

SEQ ID NO: 434957 - DNA, 25 bp, Artificial
  probe
  misc_feature (1)..(25): SEQ ID NO: 6310; WAN024BP3; Start 945; Stop 969
tattgatagggttgatgactggaaa

SEQ ID NO: 434958 - DNA, 25 bp, Artificial
  probe
  misc_feature (1)..(25): SEQ ID NO: 6310; WAN024BP3; Start 944; Stop 968
ttattgatagggttgatgactggaa

SEQ ID NO: 434959 - DNA, 25 bp, Artificial
  probe
  misc_feature (1)..(25): SEQ ID NO: 6310; WAN024BP3; Start 775; Stop 799
tctgaactgaaacaatactacaagc

SEQ ID NO: 434960 - DNA, 25 bp, Artificial
  probe
  misc_feature (1)..(25): SEQ ID NO: 6310; WAN024BP3; Start 616; Stop 640
ggtaaaggtgtggatgttctaatca

SEQ ID NO: 434961 - DNA, 25 bp, Artificial
  probe
  misc_feature (1)..(25): SEQ ID NO: 6310; WAN024BP3; Start 615; Stop 639
tggtaaaggtgtggatgttctaatc

SEQ ID NO: 434962 - DNA, 25 bp, Artificial
  probe
  misc_feature (1)..(25): SEQ ID NO: 6310; WAN024BP3; Start 943; Stop 967
attattgatagggttgatgactgga

SEQ ID NO: 434963 - DNA, 25 bp, Artificial
  probe
  misc_feature (1)..(25): SEQ ID NO: 6310; WAN024BP3; Start 689; Stop 713
caagtcccgatagtgaatacaaaca

SEQ ID NO: 434964 - DNA, 25 bp, Artificial
  probe
  misc_feature (1)..(25): SEQ ID NO: 6310; WAN024BP3; Start 598; Stop 622
gttggtagaatcatccctggtaaag

SEQ ID NO: 434965 - DNA, 25 bp, Artificial
  probe
  misc_feature (1)..(25): SEQ ID NO: 6310; WAN024BP3; Start 619; Stop 643
aaaggtgtggatgttctaatcaagg

SEQ ID NO: 434966 - DNA, 25 bp, Artificial
  probe
  misc_feature (1)..(25): SEQ ID NO: 6310; WAN024BP3; Start 617; Stop 641
gtaaaggtgtggatgttctaatcaa

SEQ ID NO: 434967 - DNA, 25 bp, Artificial
  probe
  misc_feature (1)..(25): SEQ ID NO: 6310; WAN024BP3; Start 592; Stop 616
ttatttgttggtagaatcatccctg

SEQ ID NO: 434968 - DNA, 25 bp, Artificial
  probe
  misc_feature (1)..(25): SEQ ID NO: 6310; WAN024BP3; Start 338; Stop 362
gtaagataccagaaagcgagaattt

SEQ ID NO: 434969 - DNA, 25 bp, Artificial
  probe
  misc_feature (1)..(25): SEQ ID NO: 6310; WAN024BP3; Start 623; Stop 647
gtgtggatgttctaatcaaggctgt

SEQ ID NO: 434970 - DNA, 25 bp, Artificial
  probe
  misc_feature (1)..(25): SEQ ID NO: 6310; WAN024BP3; Start 620; Stop 644
aaggtgtggatgttctaatcaaggc

SEQ ID NO: 434971 - DNA, 25 bp, Artificial
  probe
  misc_feature (1)..(25): SEQ ID NO: 6310; WAN024BP3; Start 693; Stop 717
tcccgatagtgaatacaaacaatac

SEQ ID NO: 434972 - DNA, 25 bp, Artificial
  probe
  misc_feature (1)..(25): SEQ ID NO: 6310; WAN024BP3; Start 692; Stop 716
gtcccgatagtgaatacaaacaata

SEQ ID NO: 434973 - DNA, 25 bp, Artificial
  probe
  misc_feature (1)..(25): SEQ ID NO: 6310; WAN024BP3; Start 618; Stop 642
taaaggtgtggatgttctaatcaag

SEQ ID NO: 434974 - DNA, 25 bp, Artificial
  probe
  misc_feature (1)..(25): SEQ ID NO: 6310; WAN024BP3; Start 636; Stop 660
aatcaaggctgttcagaatttatca

SEQ ID NO: 434975 - DNA, 25 bp, Artificial
  probe
  misc_feature (1)..(25): SEQ ID NO: 6310; WAN024BP3; Start 492; Stop 516
ttccttatcagagaaagacatacga

SEQ ID NO: 434976 - DNA, 25 bp, Artificial
  probe
  misc_feature (1)..(25): SEQ ID NO: 6310; WAN024BP3; Start 688; Stop 712
ccaagtcccgatagtgaatacaaac

SEQ ID NO: 434977 - DNA, 25 bp, Artificial
  probe
  misc_feature (1)..(25): SEQ ID NO: 6311; WAN024DDZ; Start 327; Stop 351
gcagtatttacgagaacattcaaca

SEQ ID NO: 434978 - DNA, 25 bp, Artificial
  probe
  misc_feature (1)..(25): SEQ ID NO: 6311; WAN024DDZ; Start 331; Stop 355
tatttacgagaacattcaacaggtg

SEQ ID NO: 434979 - DNA, 25 bp, Artificial
  probe
  misc_feature (1)..(25): SEQ ID NO: 6311; WAN024DDZ; Start 329; Stop 353
agtatttacgagaacattcaacagg

SEQ ID NO: 434980 - DNA, 25 bp, Artificial
  probe
  misc_feature (1)..(25): SEQ ID NO: 6311; WAN024DDZ; Start 326; Stop 350
cgcagtatttacgagaacattcaac

SEQ ID NO: 434981 - DNA, 25 bp, Artificial
  probe
  misc_feature (1)..(25): SEQ ID NO: 6311; WAN024DDZ; Start 328; Stop 352
cagtatttacgagaacattcaacag

SEQ ID NO: 434982 - DNA, 25 bp, Artificial
  probe
  misc_feature (1)..(25): SEQ ID NO: 6311; WAN024DDZ; Start 340; Stop 364
gaacattcaacaggtgcaacaattc

SEQ ID NO: 434983 - DNA, 25 bp, Artificial
  probe
  misc_feature (1)..(25): SEQ ID NO: 6311; WAN024DDZ; Start 339; Stop 363
agaacattcaacaggtgcaacaatt

SEQ ID NO: 434984 - DNA, 25 bp, Artificial
  probe
  misc_feature (1)..(25): SEQ ID NO: 6311; WAN024DDZ; Start 332; Stop 356
atttacgagaacattcaacaggtgc

SEQ ID NO: 434985 - DNA, 25 bp, Artificial
  probe
  misc_feature (1)..(25): SEQ ID NO: 6311; WAN024DDZ; Start 338; Stop 362
gagaacattcaacaggtgcaacaat

SEQ ID NO: 434986 - DNA, 25 bp, Artificial
  probe
  misc_feature (1)..(25): SEQ ID NO: 6311; WAN024DDZ; Start 341; Stop 365
aacattcaacaggtgcaacaattcc

SEQ ID NO: 434987 - DNA, 25 bp, Artificial
  probe
  misc_feature (1)..(25): SEQ ID NO: 6311; WAN024DDZ; Start 334; Stop 358
ttacgagaacattcaacaggtgcaa

SEQ ID NO: 434988 - DNA, 25 bp, Artificial
  probe
  misc_feature (1)..(25): SEQ ID NO: 6311; WAN024DDZ; Start 323; Stop 347
aatcgcagtatttacgagaacattc

SEQ ID NO: 434989 - DNA, 25 bp, Artificial
  probe
  misc_feature (1)..(25): SEQ ID NO: 6311; WAN024DDZ; Start 322; Stop 346
aaatcgcagtatttacgagaacatt

SEQ ID NO: 434990 - DNA, 25 bp, Artificial
  probe
  misc_feature (1)..(25): SEQ ID NO: 6311; WAN024DDZ; Start 324; Stop 348
atcgcagtatttacgagaacattca

SEQ ID NO: 434991 - DNA, 25 bp, Artificial
  probe
  misc_feature (1)..(25): SEQ ID NO: 6311; WAN024DDZ; Start 325; Stop 349
tcgcagtatttacgagaacattcaa

SEQ ID NO: 434992 - DNA, 25 bp, Artificial
  probe
  misc_feature (1)..(25): SEQ ID NO: 6311; WAN024DDZ; Start 321; Stop 345
taaatcgcagtatttacgagaacat

SEQ ID NO: 434993 - DNA, 25 bp, Artificial
  probe
  misc_feature (1)..(25): SEQ ID NO: 6311; WAN024DDZ; Start 483; Stop 507
gcagttagatgaactaaacttgctc

SEQ ID NO: 434994 - DNA, 25 bp, Artificial
  probe
  misc_feature (1)..(25): SEQ ID NO: 6311; WAN024DDZ; Start 335; Stop 359
tacgagaacattcaacaggtgcaac

SEQ ID NO: 434995 - DNA, 25 bp, Artificial
  probe
  misc_feature (1)..(25): SEQ ID NO: 6311; WAN024DDZ; Start 342; Stop 366
acattcaacaggtgcaacaattcct

SEQ ID NO: 434996 - DNA, 25 bp, Artificial
  probe
  misc_feature (1)..(25): SEQ ID NO: 6311; WAN024DDZ; Start 333; Stop 357
tttacgagaacattcaacaggtgca

SEQ ID NO: 434997 - DNA, 25 bp, Artificial
  probe
  misc_feature (1)..(25): SEQ ID NO: 6311; WAN024DDZ; Start 481; Stop 505
ttgcagttagatgaactaaacttgc

SEQ ID NO: 434998 - DNA, 25 bp, Artificial
  probe
  misc_feature (1)..(25): SEQ ID NO: 6311; WAN024DDZ; Start 482; Stop 506
tgcagttagatgaactaaacttgct

SEQ ID NO: 434999 - DNA, 25 bp, Artificial
  probe
  misc_feature (1)..(25): SEQ ID NO: 6311; WAN024DDZ; Start 337; Stop 361
cgagaacattcaacaggtgcaacaa

SEQ ID NO: 435000 - DNA, 25 bp, Artificial
  probe
  misc_feature (1)..(25): SEQ ID NO: 6311; WAN024DDZ; Start 480; Stop 504
attgcagttagatgaactaaacttg

SEQ ID NO: 435001 - DNA, 25 bp, Artificial
  probe
  misc_feature (1)..(25): SEQ ID NO: 6311; WAN024DDZ; Start 460; Stop 484
aggcttattactaaaagaaaattgc

SEQ ID NO: 435002 - DNA, 25 bp, Artificial
  probe
  misc_feature (1)..(25): SEQ ID NO: 6311; WAN024DDZ; Start 479; Stop 503
aattgcagttagatgaactaaactt

SEQ ID NO: 435003 - DNA, 25 bp, Artificial
  probe
  misc_feature (1)..(25): SEQ ID NO: 6311; WAN024DDZ; Start 478; Stop 502
aaattgcagttagatgaactaaact

SEQ ID NO: 435004 - DNA, 25 bp, Artificial
  probe
  misc_feature (1)..(25): SEQ ID NO: 6311; WAN024DDZ; Start 472; Stop 496
aaaagaaaattgcagttagatgaac

SEQ ID NO: 435005 - DNA, 25 bp, Artificial
  probe
  misc_feature (1)..(25): SEQ ID NO: 6311; WAN024DDZ; Start 461; Stop 485
ggcttattactaaaagaaaattgca

SEQ ID NO: 435006 - DNA, 25 bp, Artificial
  probe
  misc_feature (1)..(25): SEQ ID NO: 6311; WAN024DDZ; Start 473; Stop 497
aaagaaaattgcagttagatgaact

SEQ ID NO: 435007 - DNA, 25 bp, Artificial
  probe
  misc_feature (1)..(25): SEQ ID NO: 6311; WAN024DDZ; Start 469; Stop 493
actaaaagaaaattgcagttagatg

SEQ ID NO: 435008 - DNA, 25 bp, Artificial
  probe
  misc_feature (1)..(25): SEQ ID NO: 6311; WAN024DDZ; Start 471; Stop 495
taaaagaaaattgcagttagatgaa

SEQ ID NO: 435009 - DNA, 25 bp, Artificial
  probe
  misc_feature (1)..(25): SEQ ID NO: 6311; WAN024DDZ; Start 470; Stop 494
ctaaaagaaaattgcagttagatga

SEQ ID NO: 435010 - DNA, 25 bp, Artificial
  probe
  misc_feature (1)..(25): SEQ ID NO: 6312; WAN024DE2; Start 156; Stop 180
tgaagcacttccagatgatattcta

SEQ ID NO: 435011 - DNA, 25 bp, Artificial
  probe
  misc_feature (1)..(25): SEQ ID NO: 6312; WAN024DE2; Start 576; Stop 600
atggaacgagattctaacaataaga

SEQ ID NO: 435012 - DNA, 25 bp, Artificial
  probe
  misc_feature (1)..(25): SEQ ID NO: 6312; WAN024DE2; Start 158; Stop 182
aagcacttccagatgatattctaat

SEQ ID NO: 435013 - DNA, 25 bp, Artificial
  probe
  misc_feature (1)..(25): SEQ ID NO: 6312; WAN024DE2; Start 157; Stop 181
gaagcacttccagatgatattctaa

SEQ ID NO: 435014 - DNA, 25 bp, Artificial
  probe
  misc_feature (1)..(25): SEQ ID NO: 6312; WAN024DE2; Start 155; Stop 179
ctgaagcacttccagatgatattct

SEQ ID NO: 435015 - DNA, 25 bp, Artificial
  probe
  misc_feature (1)..(25): SEQ ID NO: 6312; WAN024DE2; Start 154; Stop 178
actgaagcacttccagatgatattc

SEQ ID NO: 435016 - DNA, 25 bp, Artificial
  probe
  misc_feature (1)..(25): SEQ ID NO: 6312; WAN024DE2; Start 153; Stop 177
gactgaagcacttccagatgatatt

SEQ ID NO: 435017 - DNA, 25 bp, Artificial
  probe
  misc_feature (1)..(25): SEQ ID NO: 6312; WAN024DE2; Start 148; Stop 172
aatatgactgaagcacttccagatg

SEQ ID NO: 435018 - DNA, 25 bp, Artificial
  probe
  misc_feature (1)..(25): SEQ ID NO: 6312; WAN024DE2; Start 773; Stop 797
tagatacagcatttggattagagcc

SEQ ID NO: 435019 - DNA, 25 bp, Artificial
  probe
  misc_feature (1)..(25): SEQ ID NO: 6312; WAN024DE2; Start 340; Stop 364
gatcattcaacaggtgcaactattc

SEQ ID NO: 435020 - DNA, 25 bp, Artificial
  probe
  misc_feature (1)..(25): SEQ ID NO: 6312; WAN024DE2; Start 339; Stop 363
agatcattcaacaggtgcaactatt

SEQ ID NO: 435021 - DNA, 25 bp, Artificial
  probe
  misc_feature (1)..(25): SEQ ID NO: 6312; WAN024DE2; Start 557; Stop 581
aagaatggaaagttagcaaatggaa

SEQ ID NO: 435022 - DNA, 25 bp, Artificial
  probe
  misc_feature (1)..(25): SEQ ID NO: 6312; WAN024DE2; Start 556; Stop 580
aaagaatggaaagttagcaaatgga

SEQ ID NO: 435023 - DNA, 25 bp, Artificial
  probe
  misc_feature (1)..(25): SEQ ID NO: 6312; WAN024DE2; Start 772; Stop 796
gtagatacagcatttggattagagc

SEQ ID NO: 435024 - DNA, 25 bp, Artificial
  probe
  misc_feature (1)..(25): SEQ ID NO: 6312; WAN024DE2; Start 152; Stop 176
tgactgaagcacttccagatgatat

SEQ ID NO: 435025 - DNA, 25 bp, Artificial
  probe
  misc_feature (1)..(25): SEQ ID NO: 6312; WAN024DE2; Start 151; Stop 175
atgactgaagcacttccagatgata

SEQ ID NO: 435026 - DNA, 25 bp, Artificial
  probe
  misc_feature (1)..(25): SEQ ID NO: 6312; WAN024DE2; Start 150; Stop 174
tatgactgaagcacttccagatgat

SEQ ID NO: 435027 - DNA, 25 bp, Artificial
  probe
  misc_feature (1)..(25): SEQ ID NO: 6312; WAN024DE2; Start 149; Stop 173
atatgactgaagcacttccagatga

SEQ ID NO: 435028 - DNA, 25 bp, Artificial
  probe
  misc_feature (1)..(25): SEQ ID NO: 6312; WAN024DE2; Start 575; Stop 599
aatggaacgagattctaacaataag

SEQ ID NO: 435029 - DNA, 25 bp, Artificial
  probe
  misc_feature (1)..(25): SEQ ID NO: 6312; WAN024DE2; Start 338; Stop 362
gagatcattcaacaggtgcaactat

SEQ ID NO: 435030 - DNA, 25 bp, Artificial
  probe
  misc_feature (1)..(25): SEQ ID NO: 6312; WAN024DE2; Start 572; Stop 596
gcaaatggaacgagattctaacaat

SEQ ID NO: 435031 - DNA, 25 bp, Artificial
  probe
  misc_feature (1)..(25): SEQ ID NO: 6312; WAN024DE2; Start 570; Stop 594
tagcaaatggaacgagattctaaca

SEQ ID NO: 435032 - DNA, 25 bp, Artificial
  probe
  misc_feature (1)..(25): SEQ ID NO: 6312; WAN024DE2; Start 671; Stop 695
tgggatatgctaaagattggatagt

SEQ ID NO: 435033 - DNA, 25 bp, Artificial
  probe
  misc_feature (1)..(25): SEQ ID NO: 6312; WAN024DE2; Start 567; Stop 591
agttagcaaatggaacgagattcta

SEQ ID NO: 435034 - DNA, 25 bp, Artificial
  probe
  misc_feature (1)..(25): SEQ ID NO: 6312; WAN024DE2; Start 565; Stop 589
aaagttagcaaatggaacgagattc

SEQ ID NO: 435035 - DNA, 25 bp, Artificial
  probe
  misc_feature (1)..(25): SEQ ID NO: 6312; WAN024DE2; Start 564; Stop 588
gaaagttagcaaatggaacgagatt

SEQ ID NO: 435036 - DNA, 25 bp, Artificial
  probe
  misc_feature (1)..(25): SEQ ID NO: 6312; WAN024DE2; Start 558; Stop 582
agaatggaaagttagcaaatggaac

SEQ ID NO: 435037 - DNA, 25 bp, Artificial
  probe
  misc_feature (1)..(25): SEQ ID NO: 6312; WAN024DE2; Start 672; Stop 696
gggatatgctaaagattggatagtg

SEQ ID NO: 435038 - DNA, 25 bp, Artificial
  probe
  misc_feature (1)..(25): SEQ ID NO: 6312; WAN024DE2; Start 566; Stop 590
aagttagcaaatggaacgagattct

SEQ ID NO: 435039 - DNA, 25 bp, Artificial
  probe
  misc_feature (1)..(25): SEQ ID NO: 6312; WAN024DE2; Start 162; Stop 186
acttccagatgatattctaatagca

SEQ ID NO: 435040 - DNA, 25 bp, Artificial
  probe
  misc_feature (1)..(25): SEQ ID NO: 6312; WAN024DE2; Start 159; Stop 183
agcacttccagatgatattctaata

SEQ ID NO: 435041 - DNA, 25 bp, Artificial
  probe
  misc_feature (1)..(25): SEQ ID NO: 6312; WAN024DE2; Start 571; Stop 595
agcaaatggaacgagattctaacaa

SEQ ID NO: 435042 - DNA, 25 bp, Artificial
  probe
  misc_feature (1)..(25): SEQ ID NO: 6312; WAN024DE2; Start 774; Stop 798
agatacagcatttggattagagcct

SEQ ID NO: 435043 - DNA, 25 bp, Artificial
  probe
  misc_feature (1)..(25): SEQ ID NO: 6313; WAN024BM4; Start 796; Stop 820
atcaatagtgccaatgtaataccga

SEQ ID NO: 435044 - DNA, 25 bp, Artificial
  probe
  misc_feature (1)..(25): SEQ ID NO: 6313; WAN024BM4; Start 797; Stop 821
tcaatagtgccaatgtaataccgaa

SEQ ID NO: 435045 - DNA, 25 bp, Artificial
  probe
  misc_feature (1)..(25): SEQ ID NO: 6313; WAN024BM4; Start 798; Stop 822
caatagtgccaatgtaataccgaat

SEQ ID NO: 435046 - DNA, 25 bp, Artificial
  probe
  misc_feature (1)..(25): SEQ ID NO: 6313; WAN024BM4; Start 800; Stop 824
atagtgccaatgtaataccgaatcc

SEQ ID NO: 435047 - DNA, 25 bp, Artificial
  probe
  misc_feature (1)..(25): SEQ ID NO: 6313; WAN024BM4; Start 799; Stop 823
aatagtgccaatgtaataccgaatc

SEQ ID NO: 435048 - DNA, 25 bp, Artificial
  probe
  misc_feature (1)..(25): SEQ ID NO: 6313; WAN024BM4; Start 795; Stop 819
tatcaatagtgccaatgtaataccg

SEQ ID NO: 435049 - DNA, 25 bp, Artificial
  probe
  misc_feature (1)..(25): SEQ ID NO: 6313; WAN024BM4; Start 355; Stop 379
gctagacttattggcaaggaattac

SEQ ID NO: 435050 - DNA, 25 bp, Artificial
  probe
  misc_feature (1)..(25): SEQ ID NO: 6313; WAN024BM4; Start 801; Stop 825
tagtgccaatgtaataccgaatcct

SEQ ID NO: 435051 - DNA, 25 bp, Artificial
  probe
  misc_feature (1)..(25): SEQ ID NO: 6313; WAN024BM4; Start 354; Stop 378
ggctagacttattggcaaggaatta

SEQ ID NO: 435052 - DNA, 25 bp, Artificial
  probe
  misc_feature (1)..(25): SEQ ID NO: 6313; WAN024BM4; Start 997; Stop 1021
tctaagagtagtgtatcacgagagt

SEQ ID NO: 435053 - DNA, 25 bp, Artificial
  probe
  misc_feature (1)..(25): SEQ ID NO: 6313; WAN024BM4; Start 356; Stop 380
ctagacttattggcaaggaattact

SEQ ID NO: 435054 - DNA, 25 bp, Artificial
  probe
  misc_feature (1)..(25): SEQ ID NO: 6313; WAN024BM4; Start 1002; Stop 1026
gagtagtgtatcacgagagttaagc

SEQ ID NO: 435055 - DNA, 25 bp, Artificial
  probe
  misc_feature (1)..(25): SEQ ID NO: 6313; WAN024BM4; Start 1001; Stop 1025
agagtagtgtatcacgagagttaag

SEQ ID NO: 435056 - DNA, 25 bp, Artificial
  probe
  misc_feature (1)..(25): SEQ ID NO: 6313; WAN024BM4; Start 998; Stop 1022
ctaagagtagtgtatcacgagagtt

SEQ ID NO: 435057 - DNA, 25 bp, Artificial
  probe
  misc_feature (1)..(25): SEQ ID NO: 6313; WAN024BM4; Start 357; Stop 381
tagacttattggcaaggaattactt

SEQ ID NO: 435058 - DNA, 25 bp, Artificial
  probe
  misc_feature (1)..(25): SEQ ID NO: 6313; WAN024BM4; Start 996; Stop 1020
ttctaagagtagtgtatcacgagag

SEQ ID NO: 435059 - DNA, 25 bp, Artificial
  probe
  misc_feature (1)..(25): SEQ ID NO: 6313; WAN024BM4; Start 660; Stop 684
gagaagattcgatgccataattgac

SEQ ID NO: 435060 - DNA, 25 bp, Artificial
  probe
  misc_feature (1)..(25): SEQ ID NO: 6313; WAN024BM4; Start 661; Stop 685
agaagattcgatgccataattgact

SEQ ID NO: 435061 - DNA, 25 bp, Artificial
  probe
  misc_feature (1)..(25): SEQ ID NO: 6313; WAN024BM4; Start 1000; Stop 1024
aagagtagtgtatcacgagagttaa

SEQ ID NO: 435062 - DNA, 25 bp, Artificial
  probe
  misc_feature (1)..(25): SEQ ID NO: 6313; WAN024BM4; Start 808; Stop 832
aatgtaataccgaatcctggtgatt

SEQ ID NO: 435063 - DNA, 25 bp, Artificial
  probe
  misc_feature (1)..(25): SEQ ID NO: 6313; WAN024BM4; Start 662; Stop 686
gaagattcgatgccataattgactt

SEQ ID NO: 435064 - DNA, 25 bp, Artificial
  probe
  misc_feature (1)..(25): SEQ ID NO: 6313; WAN024BM4; Start 686; Stop 710
ttgaccgttatactgatgaagataa

SEQ ID NO: 435065 - DNA, 25 bp, Artificial
  probe
  misc_feature (1)..(25): SEQ ID NO: 6313; WAN024BM4; Start 353; Stop 377
tggctagacttattggcaaggaatt

SEQ ID NO: 435066 - DNA, 25 bp, Artificial
  probe
  misc_feature (1)..(25): SEQ ID NO: 6313; WAN024BM4; Start 807; Stop 831
caatgtaataccgaatcctggtgat

SEQ ID NO: 435067 - DNA, 25 bp, Artificial
  probe
  misc_feature (1)..(25): SEQ ID NO: 6313; WAN024BM4; Start 681; Stop 705
tgactttgaccgttatactgatgaa

SEQ ID NO: 435068 - DNA, 25 bp, Artificial
  probe
  misc_feature (1)..(25): SEQ ID NO: 6313; WAN024BM4; Start 680; Stop 704
ttgactttgaccgttatactgatga

SEQ ID NO: 435069 - DNA, 25 bp, Artificial
  probe
  misc_feature (1)..(25): SEQ ID NO: 6313; WAN024BM4; Start 1005; Stop 1029
tagtgtatcacgagagttaagcgag

SEQ ID NO: 435070 - DNA, 25 bp, Artificial
  probe
  misc_feature (1)..(25): SEQ ID NO: 6313; WAN024BM4; Start 802; Stop 826
agtgccaatgtaataccgaatcctg

SEQ ID NO: 435071 - DNA, 25 bp, Artificial
  probe
  misc_feature (1)..(25): SEQ ID NO: 6313; WAN024BM4; Start 679; Stop 703
attgactttgaccgttatactgatg

SEQ ID NO: 435072 - DNA, 25 bp, Artificial
  probe
  misc_feature (1)..(25): SEQ ID NO: 6313; WAN024BM4; Start 999; Stop 1023
taagagtagtgtatcacgagagtta

SEQ ID NO: 435073 - DNA, 25 bp, Artificial
  probe
  misc_feature (1)..(25): SEQ ID NO: 6313; WAN024BM4; Start 257; Stop 281
aaggaataataaacgctgtcaatca

SEQ ID NO: 435074 - DNA, 25 bp, Artificial
  probe
  misc_feature (1)..(25): SEQ ID NO: 6313; WAN024BM4; Start 683; Stop 707
actttgaccgttatactgatgaaga

SEQ ID NO: 435075 - DNA, 25 bp, Artificial
  probe
  misc_feature (1)..(25): SEQ ID NO: 6313; WAN024BM4; Start 517; Stop 541
gtgttggatagggttaatcagaatg

SEQ ID NO: 435076 - DNA, 25 bp, Artificial
  probe
  misc_feature (1)..(25): SEQ ID NO: 6314; WAN024ERM; Start 40; Stop 64
cttttgaggaaatctagcgaggaaa

SEQ ID NO: 435077 - DNA, 25 bp, Artificial
  probe
  misc_feature (1)..(25): SEQ ID NO: 6314; WAN024ERM; Start 41; Stop 65
ttttgaggaaatctagcgaggaaaa

SEQ ID NO: 435078 - DNA, 25 bp, Artificial
  probe
  misc_feature (1)..(25): SEQ ID NO: 6314; WAN024ERM; Start 63; Stop 87
aaaacgatactggaacagcagaaag

SEQ ID NO: 435079 - DNA, 25 bp, Artificial
  probe
  misc_feature (1)..(25): SEQ ID NO: 6314; WAN024ERM; Start 31; Stop 55
gagtctgcccttttgaggaaatcta

SEQ ID NO: 435080 - DNA, 25 bp, Artificial
  probe
  misc_feature (1)..(25): SEQ ID NO: 6314; WAN024ERM; Start 32; Stop 56
agtctgcccttttgaggaaatctag

SEQ ID NO: 435081 - DNA, 25 bp, Artificial
  probe
  misc_feature (1)..(25): SEQ ID NO: 6314; WAN024ERM; Start 39; Stop 63
ccttttgaggaaatctagcgaggaa

SEQ ID NO: 435082 - DNA, 25 bp, Artificial
  probe
  misc_feature (1)..(25): SEQ ID NO: 6314; WAN024ERM; Start 33; Stop 57
gtctgcccttttgaggaaatctagc

SEQ ID NO: 435083 - DNA, 25 bp, Artificial
  probe
  misc_feature (1)..(25): SEQ ID NO: 6314; WAN024ERM; Start 38; Stop 62
cccttttgaggaaatctagcgagga

SEQ ID NO: 435084 - DNA, 25 bp, Artificial
  probe
  misc_feature (1)..(25): SEQ ID NO: 6314; WAN024ERM; Start 30; Stop 54
ggagtctgcccttttgaggaaatct

SEQ ID NO: 435085 - DNA, 25 bp, Artificial
  probe
  misc_feature (1)..(25): SEQ ID NO: 6314; WAN024ERM; Start 29; Stop 53
aggagtctgcccttttgaggaaatc

SEQ ID NO: 435086 - DNA, 25 bp, Artificial
  probe
  misc_feature (1)..(25): SEQ ID NO: 6314; WAN024ERM; Start 28; Stop 52
gaggagtctgcccttttgaggaaat

SEQ ID NO: 435087 - DNA, 25 bp, Artificial
  probe
  misc_feature (1)..(25): SEQ ID NO: 6314; WAN024ERM; Start 36; Stop 60
tgcccttttgaggaaatctagcgag

SEQ ID NO: 435088 - DNA, 25 bp, Artificial
  probe
  misc_feature (1)..(25): SEQ ID NO: 6314; WAN024ERM; Start 35; Stop 59
ctgcccttttgaggaaatctagcga

SEQ ID NO: 435089 - DNA, 25 bp, Artificial
  probe
  misc_feature (1)..(25): SEQ ID NO: 6314; WAN024ERM; Start 34; Stop 58
tctgcccttttgaggaaatctagcg

SEQ ID NO: 435090 - DNA, 25 bp, Artificial
  probe
  misc_feature (1)..(25): SEQ ID NO: 6315; WAN024C23; Start 221; Stop 245
ccaagtgtcagaagattgtagagtt

SEQ ID NO: 435091 - DNA, 25 bp, Artificial
  probe
  misc_feature (1)..(25): SEQ ID NO: 6315; WAN024C23; Start 178; Stop 202
actgtagatagcgagtcaatcatta

SEQ ID NO: 435092 - DNA, 25 bp, Artificial
  probe
  misc_feature (1)..(25): SEQ ID NO: 6315; WAN024C23; Start 220; Stop 244
accaagtgtcagaagattgtagagt

SEQ ID NO: 435093 - DNA, 25 bp, Artificial
  probe
  misc_feature (1)..(25): SEQ ID NO: 6315; WAN024C23; Start 1851; Stop 1875
cgatggtcagttactacataggagt

SEQ ID NO: 435094 - DNA, 25 bp, Artificial
  probe
  misc_feature (1)..(25): SEQ ID NO: 6315; WAN024C23; Start 179; Stop 203
ctgtagatagcgagtcaatcattat

SEQ ID NO: 435095 - DNA, 25 bp, Artificial
  probe
  misc_feature (1)..(25): SEQ ID NO: 6315; WAN024C23; Start 222; Stop 246
caagtgtcagaagattgtagagtta

SEQ ID NO: 435096 - DNA, 25 bp, Artificial
  probe
  misc_feature (1)..(25): SEQ ID NO: 6315; WAN024C23; Start 146; Stop 170
aggacagattatcaataacagacaa

SEQ ID NO: 435097 - DNA, 25 bp, Artificial
  probe
  misc_feature (1)..(25): SEQ ID NO: 6315; WAN024C23; Start 145; Stop 169
aaggacagattatcaataacagaca

SEQ ID NO: 435098 - DNA, 25 bp, Artificial
  probe
  misc_feature (1)..(25): SEQ ID NO: 6315; WAN024C23; Start 180; Stop 204
tgtagatagcgagtcaatcattatt

SEQ ID NO: 435099 - DNA, 25 bp, Artificial
  probe
  misc_feature (1)..(25): SEQ ID NO: 6315; WAN024C23; Start 219; Stop 243
caccaagtgtcagaagattgtagag

SEQ ID NO: 435100 - DNA, 25 bp, Artificial
  probe
  misc_feature (1)..(25): SEQ ID NO: 6315; WAN024C23; Start 223; Stop 247
aagtgtcagaagattgtagagttat

SEQ ID NO: 435101 - DNA, 25 bp, Artificial
  probe
  misc_feature (1)..(25): SEQ ID NO: 6315; WAN024C23; Start 1850; Stop 1874
tcgatggtcagttactacataggag

SEQ ID NO: 435102 - DNA, 25 bp, Artificial
  probe
  misc_feature (1)..(25): SEQ ID NO: 6315; WAN024C23; Start 227; Stop 251
gtcagaagattgtagagttatatgc

SEQ ID NO: 435103 - DNA, 25 bp, Artificial
  probe
  misc_feature (1)..(25): SEQ ID NO: 6315; WAN024C23; Start 1852; Stop 1876
gatggtcagttactacataggagta

SEQ ID NO: 435104 - DNA, 25 bp, Artificial
  probe
  misc_feature (1)..(25): SEQ ID NO: 6315; WAN024C23; Start 168; Stop 192
caaaggaaagactgtagatagcgag

SEQ ID NO: 435105 - DNA, 25 bp, Artificial
  probe
  misc_feature (1)..(25): SEQ ID NO: 6315; WAN024C23; Start 858; Stop 882
atattggatttctgaaggctttcgt

SEQ ID NO: 435106 - DNA, 25 bp, Artificial
  probe
  misc_feature (1)..(25): SEQ ID NO: 6315; WAN024C23; Start 1508; Stop 1532
tacagaaattcacagtagtcccaga

SEQ ID NO: 435107 - DNA, 25 bp, Artificial
  probe
  misc_feature (1)..(25): SEQ ID NO: 6315; WAN024C23; Start 1548; Stop 1572
tgtgtataaatgttcaagatgtggt

SEQ ID NO: 435108 - DNA, 25 bp, Artificial
  probe
  misc_feature (1)..(25): SEQ ID NO: 6315; WAN024C23; Start 1510; Stop 1534
cagaaattcacagtagtcccagaaa

SEQ ID NO: 435109 - DNA, 25 bp, Artificial
  probe
  misc_feature (1)..(25): SEQ ID NO: 6315; WAN024C23; Start 1854; Stop 1878
tggtcagttactacataggagtatt

SEQ ID NO: 435110 - DNA, 25 bp, Artificial
  probe
  misc_feature (1)..(25): SEQ ID NO: 6315; WAN024C23; Start 1070; Stop 1094
ttaggctgacaactccaaatagtag

SEQ ID NO: 435111 - DNA, 25 bp, Artificial
  probe
  misc_feature (1)..(25): SEQ ID NO: 6315; WAN024C23; Start 1807; Stop 1831
aagacaccgatgcaagtatattatt

SEQ ID NO: 435112 - DNA, 25 bp, Artificial
  probe
  misc_feature (1)..(25): SEQ ID NO: 6315; WAN024C23; Start 1069; Stop 1093
tttaggctgacaactccaaatagta

SEQ ID NO: 435113 - DNA, 25 bp, Artificial
  probe
  misc_feature (1)..(25): SEQ ID NO: 6315; WAN024C23; Start 156; Stop 180
atcaataacagacaaaggaaagact

SEQ ID NO: 435114 - DNA, 25 bp, Artificial
  probe
  misc_feature (1)..(25): SEQ ID NO: 6315; WAN024C23; Start 1064; Stop 1088
ctgaatttaggctgacaactccaaa

SEQ ID NO: 435115 - DNA, 25 bp, Artificial
  probe
  misc_feature (1)..(25): SEQ ID NO: 6315; WAN024C23; Start 1853; Stop 1877
atggtcagttactacataggagtat

SEQ ID NO: 435116 - DNA, 25 bp, Artificial
  probe
  misc_feature (1)..(25): SEQ ID NO: 6315; WAN024C23; Start 1753; Stop 1777
gctaataatcaagataatgtgcagg

SEQ ID NO: 435117 - DNA, 25 bp, Artificial
  probe
  misc_feature (1)..(25): SEQ ID NO: 6315; WAN024C23; Start 224; Stop 248
agtgtcagaagattgtagagttata

SEQ ID NO: 435118 - DNA, 25 bp, Artificial
  probe
  misc_feature (1)..(25): SEQ ID NO: 6315; WAN024C23; Start 1074; Stop 1098
gctgacaactccaaatagtaggttt

SEQ ID NO: 435119 - DNA, 25 bp, Artificial
  probe
  misc_feature (1)..(25): SEQ ID NO: 6315; WAN024C23; Start 859; Stop 883
tattggatttctgaaggctttcgtg

SEQ ID NO: 435120 - DNA, 25 bp, Artificial
  probe
  misc_feature (1)..(25): SEQ ID NO: 6315; WAN024C23; Start 165; Stop 189
agacaaaggaaagactgtagatagc

SEQ ID NO: 435121 - DNA, 25 bp, Artificial
  probe
  misc_feature (1)..(25): SEQ ID NO: 6315; WAN024C23; Start 1068; Stop 1092
atttaggctgacaactccaaatagt

SEQ ID NO: 435122 - DNA, 25 bp, Artificial
  probe
  misc_feature (1)..(25): SEQ ID NO: 6315; WAN024C23; Start 684; Stop 708
tgataataatgtgatggaaacgaga

SEQ ID NO: 435123 - DNA, 25 bp, Artificial
  probe
  misc_feature (1)..(25): SEQ ID NO: 6316; WAN024AUD; Start 143; Stop 167
atattgctggtgacaagattgatct

SEQ ID NO: 435124 - DNA, 25 bp, Artificial
  probe
  misc_feature (1)..(25): SEQ ID NO: 6316; WAN024AUD; Start 159; Stop 183
gattgatcttcacagtatcgttcct

SEQ ID NO: 435125 - DNA, 25 bp, Artificial
  probe
  misc_feature (1)..(25): SEQ ID NO: 6316; WAN024AUD; Start 158; Stop 182
agattgatcttcacagtatcgttcc

SEQ ID NO: 435126 - DNA, 25 bp, Artificial
  probe
  misc_feature (1)..(25): SEQ ID NO: 6316; WAN024AUD; Start 755; Stop 779
ttgtagaatctagtgtggatgaccg

SEQ ID NO: 435127 - DNA, 25 bp, Artificial
  probe
  misc_feature (1)..(25): SEQ ID NO: 6316; WAN024AUD; Start 891; Stop 915
atacaaccttgacaagattgctgaa

SEQ ID NO: 435128 - DNA, 25 bp, Artificial
  probe
  misc_feature (1)..(25): SEQ ID NO: 6316; WAN024AUD; Start 890; Stop 914
aatacaaccttgacaagattgctga

SEQ ID NO: 435129 - DNA, 25 bp, Artificial
  probe
  misc_feature (1)..(25): SEQ ID NO: 6316; WAN024AUD; Start 142; Stop 166
aatattgctggtgacaagattgatc

SEQ ID NO: 435130 - DNA, 25 bp, Artificial
  probe
  misc_feature (1)..(25): SEQ ID NO: 6316; WAN024AUD; Start 160; Stop 184
attgatcttcacagtatcgttcctg

SEQ ID NO: 435131 - DNA, 25 bp, Artificial
  probe
  misc_feature (1)..(25): SEQ ID NO: 6316; WAN024AUD; Start 757; Stop 781
gtagaatctagtgtggatgaccgtc

SEQ ID NO: 435132 - DNA, 25 bp, Artificial
  probe
  misc_feature (1)..(25): SEQ ID NO: 6316; WAN024AUD; Start 892; Stop 916
tacaaccttgacaagattgctgaag

SEQ ID NO: 435133 - DNA, 25 bp, Artificial
  probe
  misc_feature (1)..(25): SEQ ID NO: 6316; WAN024AUD; Start 825; Stop 849
acaaatctttactgactctatcgca

SEQ ID NO: 435134 - DNA, 25 bp, Artificial
  probe
  misc_feature (1)..(25): SEQ ID NO: 6316; WAN024AUD; Start 824; Stop 848
cacaaatctttactgactctatcgc

SEQ ID NO: 435135 - DNA, 25 bp, Artificial
  probe
  misc_feature (1)..(25): SEQ ID NO: 6316; WAN024AUD; Start 823; Stop 847
gcacaaatctttactgactctatcg

SEQ ID NO: 435136 - DNA, 25 bp, Artificial
  probe
  misc_feature (1)..(25): SEQ ID NO: 6316; WAN024AUD; Start 822; Stop 846
cgcacaaatctttactgactctatc

SEQ ID NO: 435137 - DNA, 25 bp, Artificial
  probe
  misc_feature (1)..(25): SEQ ID NO: 6316; WAN024AUD; Start 820; Stop 844
tacgcacaaatctttactgactcta

SEQ ID NO: 435138 - DNA, 25 bp, Artificial
  probe
  misc_feature (1)..(25): SEQ ID NO: 6316; WAN024AUD; Start 821; Stop 845
acgcacaaatctttactgactctat

SEQ ID NO: 435139 - DNA, 25 bp, Artificial
  probe
  misc_feature (1)..(25): SEQ ID NO: 6316; WAN024AUD; Start 817; Stop 841
atctacgcacaaatctttactgact

SEQ ID NO: 435140 - DNA, 25 bp, Artificial
  probe
  misc_feature (1)..(25): SEQ ID NO: 6316; WAN024AUD; Start 816; Stop 840
aatctacgcacaaatctttactgac

SEQ ID NO: 435141 - DNA, 25 bp, Artificial
  probe
  misc_feature (1)..(25): SEQ ID NO: 6316; WAN024AUD; Start 815; Stop 839
caatctacgcacaaatctttactga

SEQ ID NO: 435142 - DNA, 25 bp, Artificial
  probe
  misc_feature (1)..(25): SEQ ID NO: 6316; WAN024AUD; Start 814; Stop 838
ccaatctacgcacaaatctttactg

SEQ ID NO: 435143 - DNA, 25 bp, Artificial
  probe
  misc_feature (1)..(25): SEQ ID NO: 6316; WAN024AUD; Start 819; Stop 843
ctacgcacaaatctttactgactct

SEQ ID NO: 435144 - DNA, 25 bp, Artificial
  probe
  misc_feature (1)..(25): SEQ ID NO: 6316; WAN024AUD; Start 818; Stop 842
tctacgcacaaatctttactgactc

SEQ ID NO: 435145 - DNA, 25 bp, Artificial
  probe
  misc_feature (1)..(25): SEQ ID NO: 6316; WAN024AUD; Start 18; Stop 42
attactcgttctctttctttccgtc

SEQ ID NO: 435146 - DNA, 25 bp, Artificial
  probe
  misc_feature (1)..(25): SEQ ID NO: 6316; WAN024AUD; Start 623; Stop 647
tcaaatacttctctaaagcctacgg

SEQ ID NO: 435147 - DNA, 25 bp, Artificial
  probe
  misc_feature (1)..(25): SEQ ID NO: 6316; WAN024AUD; Start 625; Stop 649
aaatacttctctaaagcctacggtg

SEQ ID NO: 435148 - DNA, 25 bp, Artificial
  probe
  misc_feature (1)..(25): SEQ ID NO: 6316; WAN024AUD; Start 624; Stop 648
caaatacttctctaaagcctacggt

SEQ ID NO: 435149 - DNA, 25 bp, Artificial
  probe
  misc_feature (1)..(25): SEQ ID NO: 6316; WAN024AUD; Start 570; Stop 594
atttaacaacatccctgctgagaaa

SEQ ID NO: 435150 - DNA, 25 bp, Artificial
  probe
  misc_feature (1)..(25): SEQ ID NO: 6316; WAN024AUD; Start 360; Stop 384
aggcgttgatgttatctaccttgaa

SEQ ID NO: 435151 - DNA, 25 bp, Artificial
  probe
  misc_feature (1)..(25): SEQ ID NO: 6316; WAN024AUD; Start 17; Stop 41
cattactcgttctctttctttccgt

SEQ ID NO: 435152 - DNA, 25 bp, Artificial
  probe
  misc_feature (1)..(25): SEQ ID NO: 6316; WAN024AUD; Start 16; Stop 40
acattactcgttctctttctttccg

SEQ ID NO: 435153 - DNA, 25 bp, Artificial
  probe
  misc_feature (1)..(25): SEQ ID NO: 6316; WAN024AUD; Start 756; Stop 780
tgtagaatctagtgtggatgaccgt

SEQ ID NO: 435154 - DNA, 25 bp, Artificial
  probe
  misc_feature (1)..(25): SEQ ID NO: 6316; WAN024AUD; Start 658; Stop 682
gcctacatctgggaaatcaatactg

SEQ ID NO: 435155 - DNA, 25 bp, Artificial
  probe
  misc_feature (1)..(25): SEQ ID NO: 6316; WAN024AUD; Start 569; Stop 593
aatttaacaacatccctgctgagaa

SEQ ID NO: 435156 - DNA, 25 bp, Artificial
  probe
  misc_feature (1)..(25): SEQ ID NO: 6317; WAN024ATR; Start 22; Stop 46
gaacagtttgtagacttgaaggaaa

SEQ ID NO: 435157 - DNA, 25 bp, Artificial
  probe
  misc_feature (1)..(25): SEQ ID NO: 6317; WAN024ATR; Start 18; Stop 42
attggaacagtttgtagacttgaag

SEQ ID NO: 435158 - DNA, 25 bp, Artificial
  probe
  misc_feature (1)..(25): SEQ ID NO: 6317; WAN024ATR; Start 21; Stop 45
ggaacagtttgtagacttgaaggaa

SEQ ID NO: 435159 - DNA, 25 bp, Artificial
  probe
  misc_feature (1)..(25): SEQ ID NO: 6317; WAN024ATR; Start 17; Stop 41
aattggaacagtttgtagacttgaa

SEQ ID NO: 435160 - DNA, 25 bp, Artificial
  probe
  misc_feature (1)..(25): SEQ ID NO: 6317; WAN024ATR; Start 16; Stop 40
aaattggaacagtttgtagacttga

SEQ ID NO: 435161 - DNA, 25 bp, Artificial
  probe
  misc_feature (1)..(25): SEQ ID NO: 6317; WAN024ATR; Start 19; Stop 43
ttggaacagtttgtagacttgaagg

SEQ ID NO: 435162 - DNA, 25 bp, Artificial
  probe
  misc_feature (1)..(25): SEQ ID NO: 6317; WAN024ATR; Start 20; Stop 44
tggaacagtttgtagacttgaagga

SEQ ID NO: 435163 - DNA, 25 bp, Artificial
  probe
  misc_feature (1)..(25): SEQ ID NO: 6317; WAN024ATR; Start 15; Stop 39
taaattggaacagtttgtagacttg

SEQ ID NO: 435164 - DNA, 25 bp, Artificial
  probe
  misc_feature (1)..(25): SEQ ID NO: 6317; WAN024ATR; Start 13; Stop 37
gttaaattggaacagtttgtagact

SEQ ID NO: 435165 - DNA, 25 bp, Artificial
  probe
  misc_feature (1)..(25): SEQ ID NO: 6317; WAN024ATR; Start 12; Stop 36
agttaaattggaacagtttgtagac

SEQ ID NO: 435166 - DNA, 25 bp, Artificial
  probe
  misc_feature (1)..(25): SEQ ID NO: 6317; WAN024ATR; Start 11; Stop 35
cagttaaattggaacagtttgtaga

SEQ ID NO: 435167 - DNA, 25 bp, Artificial
  probe
  misc_feature (1)..(25): SEQ ID NO: 6317; WAN024ATR; Start 93; Stop 117
cctccttgattttcttttcctacga

SEQ ID NO: 435168 - DNA, 25 bp, Artificial
  probe
  misc_feature (1)..(25): SEQ ID NO: 6317; WAN024ATR; Start 92; Stop 116
tcctccttgattttcttttcctacg

SEQ ID NO: 435169 - DNA, 25 bp, Artificial
  probe
  misc_feature (1)..(25): SEQ ID NO: 6317; WAN024ATR; Start 14; Stop 38
ttaaattggaacagtttgtagactt

SEQ ID NO: 435170 - DNA, 25 bp, Artificial
  probe
  misc_feature (1)..(25): SEQ ID NO: 6317; WAN024ATR; Start 94; Stop 118
ctccttgattttcttttcctacgaa

SEQ ID NO: 435171 - DNA, 25 bp, Artificial
  probe
  misc_feature (1)..(25): SEQ ID NO: 6317; WAN024ATR; Start 91; Stop 115
atcctccttgattttcttttcctac

SEQ ID NO: 435172 - DNA, 25 bp, Artificial
  probe
  misc_feature (1)..(25): SEQ ID NO: 6317; WAN024ATR; Start 23; Stop 47
aacagtttgtagacttgaaggaaaa

SEQ ID NO: 435173 - DNA, 25 bp, Artificial
  probe
  misc_feature (1)..(25): SEQ ID NO: 6317; WAN024ATR; Start 90; Stop 114
aatcctccttgattttcttttccta

SEQ ID NO: 435174 - DNA, 25 bp, Artificial
  probe
  misc_feature (1)..(25): SEQ ID NO: 6317; WAN024ATR; Start 56; Stop 80
aggagattcaaggtggggaaagtag

SEQ ID NO: 435175 - DNA, 25 bp, Artificial
  probe
  misc_feature (1)..(25): SEQ ID NO: 6317; WAN024ATR; Start 60; Stop 84
gattcaaggtggggaaagtaggcta

SEQ ID NO: 435176 - DNA, 25 bp, Artificial
  probe
  misc_feature (1)..(25): SEQ ID NO: 6317; WAN024ATR; Start 55; Stop 79
caggagattcaaggtggggaaagta

SEQ ID NO: 435177 - DNA, 25 bp, Artificial
  probe
  misc_feature (1)..(25): SEQ ID NO: 6317; WAN024ATR; Start 61; Stop 85
attcaaggtggggaaagtaggctac

SEQ ID NO: 435178 - DNA, 25 bp, Artificial
  probe
  misc_feature (1)..(25): SEQ ID NO: 6317; WAN024ATR; Start 57; Stop 81
ggagattcaaggtggggaaagtagg

SEQ ID NO: 435179 - DNA, 25 bp, Artificial
  probe
  misc_feature (1)..(25): SEQ ID NO: 6317; WAN024ATR; Start 46; Stop 70
aaagacttgcaggagattcaaggtg

SEQ ID NO: 435180 - DNA, 25 bp, Artificial
  probe
  misc_feature (1)..(25): SEQ ID NO: 6317; WAN024ATR; Start 47; Stop 71
aagacttgcaggagattcaaggtgg

SEQ ID NO: 435181 - DNA, 25 bp, Artificial
  probe
  misc_feature (1)..(25): SEQ ID NO: 6317; WAN024ATR; Start 58; Stop 82
gagattcaaggtggggaaagtaggc

SEQ ID NO: 435182 - DNA, 25 bp, Artificial
  probe
  misc_feature (1)..(25): SEQ ID NO: 6317; WAN024ATR; Start 89; Stop 113
aaatcctccttgattttcttttcct

SEQ ID NO: 435183 - DNA, 25 bp, Artificial
  probe
  misc_feature (1)..(25): SEQ ID NO: 6317; WAN024ATR; Start 45; Stop 69
aaaagacttgcaggagattcaaggt

SEQ ID NO: 435184 - DNA, 25 bp, Artificial
  probe
  misc_feature (1)..(25): SEQ ID NO: 6318; WAN024ATS; Start 15; Stop 39
taaattggaacagtttgtagccttg

SEQ ID NO: 435185 - DNA, 25 bp, Artificial
  probe
  misc_feature (1)..(25): SEQ ID NO: 6318; WAN024ATS; Start 13; Stop 37
gttaaattggaacagtttgtagcct

SEQ ID NO: 435186 - DNA, 25 bp, Artificial
  probe
  misc_feature (1)..(25): SEQ ID NO: 6318; WAN024ATS; Start 12; Stop 36
agttaaattggaacagtttgtagcc

SEQ ID NO: 435187 - DNA, 25 bp, Artificial
  probe
  misc_feature (1)..(25): SEQ ID NO: 6318; WAN024ATS; Start 14; Stop 38
ttaaattggaacagtttgtagcctt

SEQ ID NO: 435188 - DNA, 25 bp, Artificial
  probe
  misc_feature (1)..(25): SEQ ID NO: 6318; WAN024ATS; Start 17; Stop 41
aattggaacagtttgtagccttgaa

SEQ ID NO: 435189 - DNA, 25 bp, Artificial
  probe
  misc_feature (1)..(25): SEQ ID NO: 6318; WAN024ATS; Start 16; Stop 40
aaattggaacagtttgtagccttga

SEQ ID NO: 435190 - DNA, 25 bp, Artificial
  probe
  misc_feature (1)..(25): SEQ ID NO: 6318; WAN024ATS; Start 18; Stop 42
attggaacagtttgtagccttgaag

SEQ ID NO: 435191 - DNA, 25 bp, Artificial
  probe
  misc_feature (1)..(25): SEQ ID NO: 6318; WAN024ATS; Start 22; Stop 46
gaacagtttgtagccttgaaggaaa

SEQ ID NO: 435192 - DNA, 25 bp, Artificial
  probe
  misc_feature (1)..(25): SEQ ID NO: 6318; WAN024ATS; Start 57; Stop 81
aaagattaaaggtggggaaatgaga

SEQ ID NO: 435193 - DNA, 25 bp, Artificial
  probe
  misc_feature (1)..(25): SEQ ID NO: 6318; WAN024ATS; Start 55; Stop 79
caaaagattaaaggtggggaaatga

SEQ ID NO: 435194 - DNA, 25 bp, Artificial
  probe
  misc_feature (1)..(25): SEQ ID NO: 6318; WAN024ATS; Start 56; Stop 80
aaaagattaaaggtggggaaatgag

SEQ ID NO: 435195 - DNA, 25 bp, Artificial
  probe
  misc_feature (1)..(25): SEQ ID NO: 6318; WAN024ATS; Start 91; Stop 115
atcctccgtgattttattttcccaa

SEQ ID NO: 435196 - DNA, 25 bp, Artificial
  probe
  misc_feature (1)..(25): SEQ ID NO: 6318; WAN024ATS; Start 94; Stop 118
ctccgtgattttattttcccaagaa

SEQ ID NO: 435197 - DNA, 25 bp, Artificial
  probe
  misc_feature (1)..(25): SEQ ID NO: 6318; WAN024ATS; Start 58; Stop 82
aagattaaaggtggggaaatgagac

SEQ ID NO: 435198 - DNA, 25 bp, Artificial
  probe
  misc_feature (1)..(25): SEQ ID NO: 6318; WAN024ATS; Start 61; Stop 85
attaaaggtggggaaatgagacttc

SEQ ID NO: 435199 - DNA, 25 bp, Artificial
  probe
  misc_feature (1)..(25): SEQ ID NO: 6318; WAN024ATS; Start 60; Stop 84
gattaaaggtggggaaatgagactt

SEQ ID NO: 435200 - DNA, 25 bp, Artificial
  probe
  misc_feature (1)..(25): SEQ ID NO: 6318; WAN024ATS; Start 54; Stop 78
gcaaaagattaaaggtggggaaatg

SEQ ID NO: 435201 - DNA, 25 bp, Artificial
  probe
  misc_feature (1)..(25): SEQ ID NO: 6318; WAN024ATS; Start 93; Stop 117
cctccgtgattttattttcccaaga

SEQ ID NO: 435202 - DNA, 25 bp, Artificial
  probe
  misc_feature (1)..(25): SEQ ID NO: 6318; WAN024ATS; Start 92; Stop 116
tcctccgtgattttattttcccaag

SEQ ID NO: 435203 - DNA, 25 bp, Artificial
  probe
  misc_feature (1)..(25): SEQ ID NO: 6318; WAN024ATS; Start 59; Stop 83
agattaaaggtggggaaatgagact

SEQ ID NO: 435204 - DNA, 25 bp, Artificial
  probe
  misc_feature (1)..(25): SEQ ID NO: 6318; WAN024ATS; Start 21; Stop 45
ggaacagtttgtagccttgaaggaa

SEQ ID NO: 435205 - DNA, 25 bp, Artificial
  probe
  misc_feature (1)..(25): SEQ ID NO: 6318; WAN024ATS; Start 90; Stop 114
aatcctccgtgattttattttccca

SEQ ID NO: 435206 - DNA, 25 bp, Artificial
  probe
  misc_feature (1)..(25): SEQ ID NO: 6318; WAN024ATS; Start 19; Stop 43
ttggaacagtttgtagccttgaagg

SEQ ID NO: 435207 - DNA, 25 bp, Artificial
  probe
  misc_feature (1)..(25): SEQ ID NO: 6318; WAN024ATS; Start 95; Stop 119
tccgtgattttattttcccaagaaa

SEQ ID NO: 435208 - DNA, 25 bp, Artificial
  probe
  misc_feature (1)..(25): SEQ ID NO: 6318; WAN024ATS; Start 53; Stop 77
tgcaaaagattaaaggtggggaaat

SEQ ID NO: 435209 - DNA, 25 bp, Artificial
  probe
  misc_feature (1)..(25): SEQ ID NO: 6318; WAN024ATS; Start 23; Stop 47
aacagtttgtagccttgaaggaaaa

SEQ ID NO: 435210 - DNA, 25 bp, Artificial
  probe
  misc_feature (1)..(25): SEQ ID NO: 6318; WAN024ATS; Start 20; Stop 44
tggaacagtttgtagccttgaagga

SEQ ID NO: 435211 - DNA, 25 bp, Artificial
  probe
  misc_feature (1)..(25): SEQ ID NO: 6318; WAN024ATS; Start 47; Stop 71
aagacttgcaaaagattaaaggtgg

SEQ ID NO: 435212 - DNA, 25 bp, Artificial
  probe
  misc_feature (1)..(25): SEQ ID NO: 6318; WAN024ATS; Start 52; Stop 76
ttgcaaaagattaaaggtggggaaa

SEQ ID NO: 435213 - DNA, 25 bp, Artificial
  probe
  misc_feature (1)..(25): SEQ ID NO: 6318; WAN024ATS; Start 46; Stop 70
aaagacttgcaaaagattaaaggtg

SEQ ID NO: 435214 - DNA, 25 bp, Artificial
  probe
  misc_feature (1)..(25): SEQ ID NO: 6318; WAN024ATS; Start 89; Stop 113
aaatcctccgtgattttattttccc

SEQ ID NO: 435215 - DNA, 25 bp, Artificial
  probe
  misc_feature (1)..(25): SEQ ID NO: 6318; WAN024ATS; Start 48; Stop 72
agacttgcaaaagattaaaggtggg

SEQ ID NO: 435216 - DNA, 25 bp, Artificial
  probe
  misc_feature (1)..(25): SEQ ID NO: 6318; WAN024ATS; Start 51; Stop 75
cttgcaaaagattaaaggtggggaa

SEQ ID NO: 435217 - DNA, 25 bp, Artificial
  probe
  misc_feature (1)..(25): SEQ ID NO: 6319; WAN024FM8; Start 88; Stop 112
aatatcaataagccaacggtagagt

SEQ ID NO: 435218 - DNA, 25 bp, Artificial
  probe
  misc_feature (1)..(25): SEQ ID NO: 6319; WAN024FM8; Start 89; Stop 113
atatcaataagccaacggtagagtt

SEQ ID NO: 435219 - DNA, 25 bp, Artificial
  probe
  misc_feature (1)..(25): SEQ ID NO: 6319; WAN024FM8; Start 91; Stop 115
atcaataagccaacggtagagttaa

SEQ ID NO: 435220 - DNA, 25 bp, Artificial
  probe
  misc_feature (1)..(25): SEQ ID NO: 6319; WAN024FM8; Start 90; Stop 114
tatcaataagccaacggtagagtta

SEQ ID NO: 435221 - DNA, 25 bp, Artificial
  probe
  misc_feature (1)..(25): SEQ ID NO: 6319; WAN024FM8; Start 272; Stop 296
gagttcgtgaagaagaagtgaagaa

SEQ ID NO: 435222 - DNA, 25 bp, Artificial
  probe
  misc_feature (1)..(25): SEQ ID NO: 6319; WAN024FM8; Start 271; Stop 295
ggagttcgtgaagaagaagtgaaga

SEQ ID NO: 435223 - DNA, 25 bp, Artificial
  probe
  misc_feature (1)..(25): SEQ ID NO: 6319; WAN024FM8; Start 156; Stop 180
taaagtgagacaagtagaaacggaa

SEQ ID NO: 435224 - DNA, 25 bp, Artificial
  probe
  misc_feature (1)..(25): SEQ ID NO: 6319; WAN024FM8; Start 155; Stop 179
ataaagtgagacaagtagaaacgga

SEQ ID NO: 435225 - DNA, 25 bp, Artificial
  probe
  misc_feature (1)..(25): SEQ ID NO: 6319; WAN024FM8; Start 154; Stop 178
aataaagtgagacaagtagaaacgg

SEQ ID NO: 435226 - DNA, 25 bp, Artificial
  probe
  misc_feature (1)..(25): SEQ ID NO: 6319; WAN024FM8; Start 274; Stop 298
gttcgtgaagaagaagtgaagaaat

SEQ ID NO: 435227 - DNA, 25 bp, Artificial
  probe
  misc_feature (1)..(25): SEQ ID NO: 6319; WAN024FM8; Start 157; Stop 181
aaagtgagacaagtagaaacggaag

SEQ ID NO: 435228 - DNA, 25 bp, Artificial
  probe
  misc_feature (1)..(25): SEQ ID NO: 6319; WAN024FM8; Start 87; Stop 111
aaatatcaataagccaacggtagag

SEQ ID NO: 435229 - DNA, 25 bp, Artificial
  probe
  misc_feature (1)..(25): SEQ ID NO: 6319; WAN024FM8; Start 273; Stop 297
agttcgtgaagaagaagtgaagaaa

SEQ ID NO: 435230 - DNA, 25 bp, Artificial
  probe
  misc_feature (1)..(25): SEQ ID NO: 6319; WAN024FM8; Start 276; Stop 300
tcgtgaagaagaagtgaagaaattc

SEQ ID NO: 435231 - DNA, 25 bp, Artificial
  probe
  misc_feature (1)..(25): SEQ ID NO: 6319; WAN024FM8; Start 160; Stop 184
gtgagacaagtagaaacggaagaag

SEQ ID NO: 435232 - DNA, 25 bp, Artificial
  probe
  misc_feature (1)..(25): SEQ ID NO: 6319; WAN024FM8; Start 275; Stop 299
ttcgtgaagaagaagtgaagaaatt

SEQ ID NO: 435233 - DNA, 25 bp, Artificial
  probe
  misc_feature (1)..(25): SEQ ID NO: 6319; WAN024FM8; Start 407; Stop 431
ttgactacggtaaagaagagttgaa

SEQ ID NO: 435234 - DNA, 25 bp, Artificial
  probe
  misc_feature (1)..(25): SEQ ID NO: 6319; WAN024FM8; Start 406; Stop 430
tttgactacggtaaagaagagttga

SEQ ID NO: 435235 - DNA, 25 bp, Artificial
  probe
  misc_feature (1)..(25): SEQ ID NO: 6319; WAN024FM8; Start 408; Stop 432
tgactacggtaaagaagagttgaat

SEQ ID NO: 435236 - DNA, 25 bp, Artificial
  probe
  misc_feature (1)..(25): SEQ ID NO: 6319; WAN024FM8; Start 159; Stop 183
agtgagacaagtagaaacggaagaa

SEQ ID NO: 435237 - DNA, 25 bp, Artificial
  probe
  misc_feature (1)..(25): SEQ ID NO: 6319; WAN024FM8; Start 158; Stop 182
aagtgagacaagtagaaacggaaga

SEQ ID NO: 435238 - DNA, 25 bp, Artificial
  probe
  misc_feature (1)..(25): SEQ ID NO: 6319; WAN024FM8; Start 317; Stop 341
acaccatagaggactctaagcataa

SEQ ID NO: 435239 - DNA, 25 bp, Artificial
  probe
  misc_feature (1)..(25): SEQ ID NO: 6319; WAN024FM8; Start 318; Stop 342
caccatagaggactctaagcataat

SEQ ID NO: 435240 - DNA, 25 bp, Artificial
  probe
  misc_feature (1)..(25): SEQ ID NO: 6319; WAN024FM8; Start 18; Stop 42
tattgctttgatctttgtaactggg

SEQ ID NO: 435241 - DNA, 25 bp, Artificial
  probe
  misc_feature (1)..(25): SEQ ID NO: 6319; WAN024FM8; Start 316; Stop 340
gacaccatagaggactctaagcata

SEQ ID NO: 435242 - DNA, 25 bp, Artificial
  probe
  misc_feature (1)..(25): SEQ ID NO: 6319; WAN024FM8; Start 311; Stop 335
taggagacaccatagaggactctaa

SEQ ID NO: 435243 - DNA, 25 bp, Artificial
  probe
  misc_feature (1)..(25): SEQ ID NO: 6319; WAN024FM8; Start 310; Stop 334
ttaggagacaccatagaggactcta

SEQ ID NO: 435244 - DNA, 25 bp, Artificial
  probe
  misc_feature (1)..(25): SEQ ID NO: 6319; WAN024FM8; Start 122; Stop 146
atacgctttcttctagtgatacaga

SEQ ID NO: 435245 - DNA, 25 bp, Artificial
  probe
  misc_feature (1)..(25): SEQ ID NO: 6319; WAN024FM8; Start 115; Stop 139
acaatctatacgctttcttctagtg

SEQ ID NO: 435246 - DNA, 25 bp, Artificial
  probe
  misc_feature (1)..(25): SEQ ID NO: 6319; WAN024FM8; Start 409; Stop 433
gactacggtaaagaagagttgaatt

SEQ ID NO: 435247 - DNA, 25 bp, Artificial
  probe
  misc_feature (1)..(25): SEQ ID NO: 6319; WAN024FM8; Start 153; Stop 177
gaataaagtgagacaagtagaaacg

SEQ ID NO: 435248 - DNA, 25 bp, Artificial
  probe
  misc_feature (1)..(25): SEQ ID NO: 6319; WAN024FM8; Start 116; Stop 140
caatctatacgctttcttctagtga

SEQ ID NO: 435249 - DNA, 25 bp, Artificial
  probe
  misc_feature (1)..(25): SEQ ID NO: 6319; WAN024FM8; Start 151; Stop 175
tggaataaagtgagacaagtagaaa

SEQ ID NO: 435250 - DNA, 25 bp, Artificial
  probe
  misc_feature (1)..(25): SEQ ID NO: 6321; WAN024AW3; Start 187; Stop 211
gttaagacaggtcatggttatctct

SEQ ID NO: 435251 - DNA, 25 bp, Artificial
  probe
  misc_feature (1)..(25): SEQ ID NO: 6321; WAN024AW3; Start 186; Stop 210
ggttaagacaggtcatggttatctc

SEQ ID NO: 435252 - DNA, 25 bp, Artificial
  probe
  misc_feature (1)..(25): SEQ ID NO: 6321; WAN024AW3; Start 69; Stop 93
ttctcagatgacgcttattattcaa

SEQ ID NO: 435253 - DNA, 25 bp, Artificial
  probe
  misc_feature (1)..(25): SEQ ID NO: 6321; WAN024AW3; Start 185; Stop 209
tggttaagacaggtcatggttatct

SEQ ID NO: 435254 - DNA, 25 bp, Artificial
  probe
  misc_feature (1)..(25): SEQ ID NO: 6321; WAN024AW3; Start 177; Stop 201
ttggattctggttaagacaggtcat

SEQ ID NO: 435255 - DNA, 25 bp, Artificial
  probe
  misc_feature (1)..(25): SEQ ID NO: 6321; WAN024AW3; Start 184; Stop 208
ctggttaagacaggtcatggttatc

SEQ ID NO: 435256 - DNA, 25 bp, Artificial
  probe
  misc_feature (1)..(25): SEQ ID NO: 6321; WAN024AW3; Start 385; Stop 409
actttgttctttctgactccactta

SEQ ID NO: 435257 - DNA, 25 bp, Artificial
  probe
  misc_feature (1)..(25): SEQ ID NO: 6321; WAN024AW3; Start 183; Stop 207
tctggttaagacaggtcatggttat

SEQ ID NO: 435258 - DNA, 25 bp, Artificial
  probe
  misc_feature (1)..(25): SEQ ID NO: 6321; WAN024AW3; Start 387; Stop 411
tttgttctttctgactccacttatg

SEQ ID NO: 435259 - DNA, 25 bp, Artificial
  probe
  misc_feature (1)..(25): SEQ ID NO: 6321; WAN024AW3; Start 182; Stop 206
ttctggttaagacaggtcatggtta

SEQ ID NO: 435260 - DNA, 25 bp, Artificial
  probe
  misc_feature (1)..(25): SEQ ID NO: 6321; WAN024AW3; Start 592; Stop 616
accaagagcatttatccttcctatg

SEQ ID NO: 435261 - DNA, 25 bp, Artificial
  probe
  misc_feature (1)..(25): SEQ ID NO: 6321; WAN024AW3; Start 254; Stop 278
cagtattagtggtagtgctccagat

SEQ ID NO: 435262 - DNA, 25 bp, Artificial
  probe
  misc_feature (1)..(25): SEQ ID NO: 6321; WAN024AW3; Start 386; Stop 410
ctttgttctttctgactccacttat

SEQ ID NO: 435263 - DNA, 25 bp, Artificial
  probe
  misc_feature (1)..(25): SEQ ID NO: 6321; WAN024AW3; Start 383; Stop 407
taactttgttctttctgactccact

SEQ ID NO: 435264 - DNA, 25 bp, Artificial
  probe
  misc_feature (1)..(25): SEQ ID NO: 6321; WAN024AW3; Start 255; Stop 279
agtattagtggtagtgctccagatc

SEQ ID NO: 435265 - DNA, 25 bp, Artificial
  probe
  misc_feature (1)..(25): SEQ ID NO: 6321; WAN024AW3; Start 55; Stop 79
ttcgtatttggtctttctcagatga

SEQ ID NO: 435266 - DNA, 25 bp, Artificial
  probe
  misc_feature (1)..(25): SEQ ID NO: 6321; WAN024AW3; Start 54; Stop 78
tttcgtatttggtctttctcagatg

SEQ ID NO: 435267 - DNA, 25 bp, Artificial
  probe
  misc_feature (1)..(25): SEQ ID NO: 6321; WAN024AW3; Start 384; Stop 408
aactttgttctttctgactccactt

SEQ ID NO: 435268 - DNA, 25 bp, Artificial
  probe
  misc_feature (1)..(25): SEQ ID NO: 6321; WAN024AW3; Start 591; Stop 615
taccaagagcatttatccttcctat

SEQ ID NO: 435269 - DNA, 25 bp, Artificial
  probe
  misc_feature (1)..(25): SEQ ID NO: 6321; WAN024AW3; Start 590; Stop 614
ataccaagagcatttatccttccta

SEQ ID NO: 435270 - DNA, 25 bp, Artificial
  probe
  misc_feature (1)..(25): SEQ ID NO: 6321; WAN024AW3; Start 589; Stop 613
tataccaagagcatttatccttcct

SEQ ID NO: 435271 - DNA, 25 bp, Artificial
  probe
  misc_feature (1)..(25): SEQ ID NO: 6321; WAN024AW3; Start 382; Stop 406
ataactttgttctttctgactccac

SEQ ID NO: 435272 - DNA, 25 bp, Artificial
  probe
  misc_feature (1)..(25): SEQ ID NO: 6321; WAN024AW3; Start 181; Stop 205
attctggttaagacaggtcatggtt

SEQ ID NO: 435273 - DNA, 25 bp, Artificial
  probe
  misc_feature (1)..(25): SEQ ID NO: 6321; WAN024AW3; Start 588; Stop 612
ctataccaagagcatttatccttcc

SEQ ID NO: 435274 - DNA, 25 bp, Artificial
  probe
  misc_feature (1)..(25): SEQ ID NO: 6321; WAN024AW3; Start 363; Stop 387
tgctgagctaggtatctatataact

SEQ ID NO: 435275 - DNA, 25 bp, Artificial
  probe
  misc_feature (1)..(25): SEQ ID NO: 6321; WAN024AW3; Start 332; Stop 356
ctgtattgatcggttatagtgggac

SEQ ID NO: 435276 - DNA, 25 bp, Artificial
  probe
  misc_feature (1)..(25): SEQ ID NO: 6321; WAN024AW3; Start 518; Stop 542
caagcctgcctagtttgttagatat

SEQ ID NO: 435277 - DNA, 25 bp, Artificial
  probe
  misc_feature (1)..(25): SEQ ID NO: 6321; WAN024AW3; Start 180; Stop 204
gattctggttaagacaggtcatggt

SEQ ID NO: 435278 - DNA, 25 bp, Artificial
  probe
  misc_feature (1)..(25): SEQ ID NO: 6321; WAN024AW3; Start 178; Stop 202
tggattctggttaagacaggtcatg

SEQ ID NO: 435279 - DNA, 25 bp, Artificial
  probe
  misc_feature (1)..(25): SEQ ID NO: 6321; WAN024AW3; Start 252; Stop 276
gacagtattagtggtagtgctccag

SEQ ID NO: 435280 - DNA, 25 bp, Artificial
  probe
  misc_feature (1)..(25): SEQ ID NO: 6321; WAN024AW3; Start 195; Stop 219
aggtcatggttatctctttcacatt

SEQ ID NO: 435281 - DNA, 25 bp, Artificial
  probe
  misc_feature (1)..(25): SEQ ID NO: 6321; WAN024AW3; Start 197; Stop 221
gtcatggttatctctttcacattcc

SEQ ID NO: 435282 - DNA, 25 bp, Artificial
  probe
  misc_feature (1)..(25): SEQ ID NO: 6321; WAN024AW3; Start 196; Stop 220
ggtcatggttatctctttcacattc

SEQ ID NO: 435283 - DNA, 25 bp, Artificial
  probe
  misc_feature (1)..(25): SEQ ID NO: 6322; WAN024AUI; Start 574; Stop 598
actgatacaacacgctccatattaa

SEQ ID NO: 435284 - DNA, 25 bp, Artificial
  probe
  misc_feature (1)..(25): SEQ ID NO: 6322; WAN024AUI; Start 573; Stop 597
gactgatacaacacgctccatatta

SEQ ID NO: 435285 - DNA, 25 bp, Artificial
  probe
  misc_feature (1)..(25): SEQ ID NO: 6322; WAN024AUI; Start 839; Stop 863
gaacagtctacgatcaagaacttct

SEQ ID NO: 435286 - DNA, 25 bp, Artificial
  probe
  misc_feature (1)..(25): SEQ ID NO: 6322; WAN024AUI; Start 843; Stop 867
agtctacgatcaagaacttctgaag

SEQ ID NO: 435287 - DNA, 25 bp, Artificial
  probe
  misc_feature (1)..(25): SEQ ID NO: 6322; WAN024AUI; Start 838; Stop 862
ggaacagtctacgatcaagaacttc

SEQ ID NO: 435288 - DNA, 25 bp, Artificial
  probe
  misc_feature (1)..(25): SEQ ID NO: 6322; WAN024AUI; Start 842; Stop 866
cagtctacgatcaagaacttctgaa

SEQ ID NO: 435289 - DNA, 25 bp, Artificial
  probe
  misc_feature (1)..(25): SEQ ID NO: 6322; WAN024AUI; Start 840; Stop 864
aacagtctacgatcaagaacttctg

SEQ ID NO: 435290 - DNA, 25 bp, Artificial
  probe
  misc_feature (1)..(25): SEQ ID NO: 6322; WAN024AUI; Start 835; Stop 859
gttggaacagtctacgatcaagaac

SEQ ID NO: 435291 - DNA, 25 bp, Artificial
  probe
  misc_feature (1)..(25): SEQ ID NO: 6322; WAN024AUI; Start 837; Stop 861
tggaacagtctacgatcaagaactt

SEQ ID NO: 435292 - DNA, 25 bp, Artificial
  probe
  misc_feature (1)..(25): SEQ ID NO: 6322; WAN024AUI; Start 836; Stop 860
ttggaacagtctacgatcaagaact

SEQ ID NO: 435293 - DNA, 25 bp, Artificial
  probe
  misc_feature (1)..(25): SEQ ID NO: 6322; WAN024AUI; Start 841; Stop 865
acagtctacgatcaagaacttctga

SEQ ID NO: 435294 - DNA, 25 bp, Artificial
  probe
  misc_feature (1)..(25): SEQ ID NO: 6322; WAN024AUI; Start 692; Stop 716
ataactatgaggctatgatacgtgg

SEQ ID NO: 435295 - DNA, 25 bp, Artificial
  probe
  misc_feature (1)..(25): SEQ ID NO: 6322; WAN024AUI; Start 576; Stop 600
tgatacaacacgctccatattaaag

SEQ ID NO: 435296 - DNA, 25 bp, Artificial
  probe
  misc_feature (1)..(25): SEQ ID NO: 6322; WAN024AUI; Start 575; Stop 599
ctgatacaacacgctccatattaaa

SEQ ID NO: 435297 - DNA, 25 bp, Artificial
  probe
  misc_feature (1)..(25): SEQ ID NO: 6322; WAN024AUI; Start 834; Stop 858
tgttggaacagtctacgatcaagaa

SEQ ID NO: 435298 - DNA, 25 bp, Artificial
  probe
  misc_feature (1)..(25): SEQ ID NO: 6322; WAN024AUI; Start 833; Stop 857
ttgttggaacagtctacgatcaaga

SEQ ID NO: 435299 - DNA, 25 bp, Artificial
  probe
  misc_feature (1)..(25): SEQ ID NO: 6322; WAN024AUI; Start 587; Stop 611
gctccatattaaagagtagtgacga

SEQ ID NO: 435300 - DNA, 25 bp, Artificial
  probe
  misc_feature (1)..(25): SEQ ID NO: 6322; WAN024AUI; Start 585; Stop 609
acgctccatattaaagagtagtgac

SEQ ID NO: 435301 - DNA, 25 bp, Artificial
  probe
  misc_feature (1)..(25): SEQ ID NO: 6322; WAN024AUI; Start 691; Stop 715
aataactatgaggctatgatacgtg

SEQ ID NO: 435302 - DNA, 25 bp, Artificial
  probe
  misc_feature (1)..(25): SEQ ID NO: 6322; WAN024AUI; Start 307; Stop 331
tatattctagcttgtcgaatcggtc

SEQ ID NO: 435303 - DNA, 25 bp, Artificial
  probe
  misc_feature (1)..(25): SEQ ID NO: 6322; WAN024AUI; Start 306; Stop 330
ctatattctagcttgtcgaatcggt

SEQ ID NO: 435304 - DNA, 25 bp, Artificial
  probe
  misc_feature (1)..(25): SEQ ID NO: 6322; WAN024AUI; Start 305; Stop 329
tctatattctagcttgtcgaatcgg

SEQ ID NO: 435305 - DNA, 25 bp, Artificial
  probe
  misc_feature (1)..(25): SEQ ID NO: 6322; WAN024AUI; Start 586; Stop 610
cgctccatattaaagagtagtgacg

SEQ ID NO: 435306 - DNA, 25 bp, Artificial
  probe
  misc_feature (1)..(25): SEQ ID NO: 6322; WAN024AUI; Start 722; Stop 746
tagcatctaattctaagaaggactt

SEQ ID NO: 435307 - DNA, 25 bp, Artificial
  probe
  misc_feature (1)..(25): SEQ ID NO: 6322; WAN024AUI; Start 572; Stop 596
ggactgatacaacacgctccatatt

SEQ ID NO: 435308 - DNA, 25 bp, Artificial
  probe
  misc_feature (1)..(25): SEQ ID NO: 6322; WAN024AUI; Start 831; Stop 855
atttgttggaacagtctacgatcaa

SEQ ID NO: 435309 - DNA, 25 bp, Artificial
  probe
  misc_feature (1)..(25): SEQ ID NO: 6322; WAN024AUI; Start 830; Stop 854
aatttgttggaacagtctacgatca

SEQ ID NO: 435310 - DNA, 25 bp, Artificial
  probe
  misc_feature (1)..(25): SEQ ID NO: 6322; WAN024AUI; Start 300; Stop 324
aatcttctatattctagcttgtcga

SEQ ID NO: 435311 - DNA, 25 bp, Artificial
  probe
  misc_feature (1)..(25): SEQ ID NO: 6322; WAN024AUI; Start 304; Stop 328
ttctatattctagcttgtcgaatcg

SEQ ID NO: 435312 - DNA, 25 bp, Artificial
  probe
  misc_feature (1)..(25): SEQ ID NO: 6322; WAN024AUI; Start 721; Stop 745
ttagcatctaattctaagaaggact

SEQ ID NO: 435313 - DNA, 25 bp, Artificial
  probe
  misc_feature (1)..(25): SEQ ID NO: 6322; WAN024AUI; Start 589; Stop 613
tccatattaaagagtagtgacgaaa

SEQ ID NO: 435314 - DNA, 25 bp, Artificial
  probe
  misc_feature (1)..(25): SEQ ID NO: 6322; WAN024AUI; Start 299; Stop 323
caatcttctatattctagcttgtcg

SEQ ID NO: 435315 - DNA, 25 bp, Artificial
  probe
  misc_feature (1)..(25): SEQ ID NO: 6322; WAN024AUI; Start 588; Stop 612
ctccatattaaagagtagtgacgaa

SEQ ID NO: 435316 - DNA, 25 bp, Artificial
  probe
  misc_feature (1)..(25): SEQ ID NO: 6323; WAN024DY3; Start 540; Stop 564
gttccaacctaagaccacctatatc

SEQ ID NO: 435317 - DNA, 25 bp, Artificial
  probe
  misc_feature (1)..(25): SEQ ID NO: 6323; WAN024DY3; Start 539; Stop 563
agttccaacctaagaccacctatat

SEQ ID NO: 435318 - DNA, 25 bp, Artificial
  probe
  misc_feature (1)..(25): SEQ ID NO: 6323; WAN024DY3; Start 1036; Stop 1060
cataaggttattgaagcgagtgaac

SEQ ID NO: 435319 - DNA, 25 bp, Artificial
  probe
  misc_feature (1)..(25): SEQ ID NO: 6323; WAN024DY3; Start 1037; Stop 1061
ataaggttattgaagcgagtgaaca

SEQ ID NO: 435320 - DNA, 25 bp, Artificial
  probe
  misc_feature (1)..(25): SEQ ID NO: 6323; WAN024DY3; Start 538; Stop 562
cagttccaacctaagaccacctata

SEQ ID NO: 435321 - DNA, 25 bp, Artificial
  probe
  misc_feature (1)..(25): SEQ ID NO: 6323; WAN024DY3; Start 541; Stop 565
ttccaacctaagaccacctatatcg

SEQ ID NO: 435322 - DNA, 25 bp, Artificial
  probe
  misc_feature (1)..(25): SEQ ID NO: 6323; WAN024DY3; Start 1038; Stop 1062
taaggttattgaagcgagtgaacaa

SEQ ID NO: 435323 - DNA, 25 bp, Artificial
  probe
  misc_feature (1)..(25): SEQ ID NO: 6323; WAN024DY3; Start 1035; Stop 1059
tcataaggttattgaagcgagtgaa

SEQ ID NO: 435324 - DNA, 25 bp, Artificial
  probe
  misc_feature (1)..(25): SEQ ID NO: 6323; WAN024DY3; Start 654; Stop 678
cgagtattatctagttgtaggacga

SEQ ID NO: 435325 - DNA, 25 bp, Artificial
  probe
  misc_feature (1)..(25): SEQ ID NO: 6323; WAN024DY3; Start 713; Stop 737
ttggcttcttggcttctaactctaa

SEQ ID NO: 435326 - DNA, 25 bp, Artificial
  probe
  misc_feature (1)..(25): SEQ ID NO: 6323; WAN024DY3; Start 704; Stop 728
ctatgattcttggcttcttggcttc

SEQ ID NO: 435327 - DNA, 25 bp, Artificial
  probe
  misc_feature (1)..(25): SEQ ID NO: 6323; WAN024DY3; Start 547; Stop 571
cctaagaccacctatatcgcttatg

SEQ ID NO: 435328 - DNA, 25 bp, Artificial
  probe
  misc_feature (1)..(25): SEQ ID NO: 6323; WAN024DY3; Start 702; Stop 726
atctatgattcttggcttcttggct

SEQ ID NO: 435329 - DNA, 25 bp, Artificial
  probe
  misc_feature (1)..(25): SEQ ID NO: 6323; WAN024DY3; Start 546; Stop 570
acctaagaccacctatatcgcttat

SEQ ID NO: 435330 - DNA, 25 bp, Artificial
  probe
  misc_feature (1)..(25): SEQ ID NO: 6323; WAN024DY3; Start 708; Stop 732
gattcttggcttcttggcttctaac

SEQ ID NO: 435331 - DNA, 25 bp, Artificial
  probe
  misc_feature (1)..(25): SEQ ID NO: 6323; WAN024DY3; Start 544; Stop 568
caacctaagaccacctatatcgctt

SEQ ID NO: 435332 - DNA, 25 bp, Artificial
  probe
  misc_feature (1)..(25): SEQ ID NO: 6323; WAN024DY3; Start 545; Stop 569
aacctaagaccacctatatcgctta

SEQ ID NO: 435333 - DNA, 25 bp, Artificial
  probe
  misc_feature (1)..(25): SEQ ID NO: 6323; WAN024DY3; Start 574; Stop 598
accgatacaacacgctccatattaa

SEQ ID NO: 435334 - DNA, 25 bp, Artificial
  probe
  misc_feature (1)..(25): SEQ ID NO: 6323; WAN024DY3; Start 712; Stop 736
cttggcttcttggcttctaactcta

SEQ ID NO: 435335 - DNA, 25 bp, Artificial
  probe
  misc_feature (1)..(25): SEQ ID NO: 6323; WAN024DY3; Start 706; Stop 730
atgattcttggcttcttggcttcta

SEQ ID NO: 435336 - DNA, 25 bp, Artificial
  probe
  misc_feature (1)..(25): SEQ ID NO: 6323; WAN024DY3; Start 705; Stop 729
tatgattcttggcttcttggcttct

SEQ ID NO: 435337 - DNA, 25 bp, Artificial
  probe
  misc_feature (1)..(25): SEQ ID NO: 6323; WAN024DY3; Start 703; Stop 727
tctatgattcttggcttcttggctt

SEQ ID NO: 435338 - DNA, 25 bp, Artificial
  probe
  misc_feature (1)..(25): SEQ ID NO: 6323; WAN024DY3; Start 714; Stop 738
tggcttcttggcttctaactctaag

SEQ ID NO: 435339 - DNA, 25 bp, Artificial
  probe
  misc_feature (1)..(25): SEQ ID NO: 6323; WAN024DY3; Start 709; Stop 733
attcttggcttcttggcttctaact

SEQ ID NO: 435340 - DNA, 25 bp, Artificial
  probe
  misc_feature (1)..(25): SEQ ID NO: 6323; WAN024DY3; Start 707; Stop 731
tgattcttggcttcttggcttctaa

SEQ ID NO: 435341 - DNA, 25 bp, Artificial
  probe
  misc_feature (1)..(25): SEQ ID NO: 6323; WAN024DY3; Start 573; Stop 597
gaccgatacaacacgctccatatta

SEQ ID NO: 435342 - DNA, 25 bp, Artificial
  probe
  misc_feature (1)..(25): SEQ ID NO: 6323; WAN024DY3; Start 548; Stop 572
ctaagaccacctatatcgcttatgg

SEQ ID NO: 435343 - DNA, 25 bp, Artificial
  probe
  misc_feature (1)..(25): SEQ ID NO: 6323; WAN024DY3; Start 537; Stop 561
acagttccaacctaagaccacctat

SEQ ID NO: 435344 - DNA, 25 bp, Artificial
  probe
  misc_feature (1)..(25): SEQ ID NO: 6323; WAN024DY3; Start 1120; Stop 1144
cgcttctcttgggatttgatagtta

SEQ ID NO: 435345 - DNA, 25 bp, Artificial
  probe
  misc_feature (1)..(25): SEQ ID NO: 6323; WAN024DY3; Start 576; Stop 600
cgatacaacacgctccatattaaag

SEQ ID NO: 435346 - DNA, 25 bp, Artificial
  probe
  misc_feature (1)..(25): SEQ ID NO: 6323; WAN024DY3; Start 710; Stop 734
ttcttggcttcttggcttctaactc

SEQ ID NO: 435347 - DNA, 25 bp, Artificial
  probe
  misc_feature (1)..(25): SEQ ID NO: 6323; WAN024DY3; Start 841; Stop 865
acagtctacaaccaagagcttctaa

SEQ ID NO: 435348 - DNA, 25 bp, Artificial
  probe
  misc_feature (1)..(25): SEQ ID NO: 6323; WAN024DY3; Start 533; Stop 557
ataaacagttccaacctaagaccac

SEQ ID NO: 435349 - DNA, 25 bp, Artificial
  probe
  misc_feature (1)..(25): SEQ ID NO: 6324; WAN024DBF; Start 1145; Stop 1169
gctatgatggagaattggagagaat

SEQ ID NO: 435350 - DNA, 25 bp, Artificial
  probe
  misc_feature (1)..(25): SEQ ID NO: 6324; WAN024DBF; Start 924; Stop 948
agtattaggtctaagttatgctccg

SEQ ID NO: 435351 - DNA, 25 bp, Artificial
  probe
  misc_feature (1)..(25): SEQ ID NO: 6324; WAN024DBF; Start 577; Stop 601
gatgttgtgattgaggtaactgatg

SEQ ID NO: 435352 - DNA, 25 bp, Artificial
  probe
  misc_feature (1)..(25): SEQ ID NO: 6324; WAN024DBF; Start 576; Stop 600
tgatgttgtgattgaggtaactgat

SEQ ID NO: 435353 - DNA, 25 bp, Artificial
  probe
  misc_feature (1)..(25): SEQ ID NO: 6324; WAN024DBF; Start 573; Stop 597
ttctgatgttgtgattgaggtaact

SEQ ID NO: 435354 - DNA, 25 bp, Artificial
  probe
  misc_feature (1)..(25): SEQ ID NO: 6324; WAN024DBF; Start 1149; Stop 1173
tgatggagaattggagagaatactt

SEQ ID NO: 435355 - DNA, 25 bp, Artificial
  probe
  misc_feature (1)..(25): SEQ ID NO: 6324; WAN024DBF; Start 716; Stop 740
atgctgcttcaactaagtggaatat

SEQ ID NO: 435356 - DNA, 25 bp, Artificial
  probe
  misc_feature (1)..(25): SEQ ID NO: 6324; WAN024DBF; Start 1148; Stop 1172
atgatggagaattggagagaatact

SEQ ID NO: 435357 - DNA, 25 bp, Artificial
  probe
  misc_feature (1)..(25): SEQ ID NO: 6324; WAN024DBF; Start 575; Stop 599
ctgatgttgtgattgaggtaactga

SEQ ID NO: 435358 - DNA, 25 bp, Artificial
  probe
  misc_feature (1)..(25): SEQ ID NO: 6324; WAN024DBF; Start 574; Stop 598
tctgatgttgtgattgaggtaactg

SEQ ID NO: 435359 - DNA, 25 bp, Artificial
  probe
  misc_feature (1)..(25): SEQ ID NO: 6324; WAN024DBF; Start 715; Stop 739
gatgctgcttcaactaagtggaata

SEQ ID NO: 435360 - DNA, 25 bp, Artificial
  probe
  misc_feature (1)..(25): SEQ ID NO: 6324; WAN024DBF; Start 812; Stop 836
cagtcaatgatagtgaggagttacc

SEQ ID NO: 435361 - DNA, 25 bp, Artificial
  probe
  misc_feature (1)..(25): SEQ ID NO: 6324; WAN024DBF; Start 811; Stop 835
gcagtcaatgatagtgaggagttac

SEQ ID NO: 435362 - DNA, 25 bp, Artificial
  probe
  misc_feature (1)..(25): SEQ ID NO: 6324; WAN024DBF; Start 578; Stop 602
atgttgtgattgaggtaactgatgc

SEQ ID NO: 435363 - DNA, 25 bp, Artificial
  probe
  misc_feature (1)..(25): SEQ ID NO: 6324; WAN024DBF; Start 921; Stop 945
aggagtattaggtctaagttatgct

SEQ ID NO: 435364 - DNA, 25 bp, Artificial
  probe
  misc_feature (1)..(25): SEQ ID NO: 6324; WAN024DBF; Start 818; Stop 842
atgatagtgaggagttacctatgct

SEQ ID NO: 435365 - DNA, 25 bp, Artificial
  probe
  misc_feature (1)..(25): SEQ ID NO: 6324; WAN024DBF; Start 817; Stop 841
aatgatagtgaggagttacctatgc

SEQ ID NO: 435366 - DNA, 25 bp, Artificial
  probe
  misc_feature (1)..(25): SEQ ID NO: 6324; WAN024DBF; Start 813; Stop 837
agtcaatgatagtgaggagttacct

SEQ ID NO: 435367 - DNA, 25 bp, Artificial
  probe
  misc_feature (1)..(25): SEQ ID NO: 6324; WAN024DBF; Start 821; Stop 845
atagtgaggagttacctatgctgag

SEQ ID NO: 435368 - DNA, 25 bp, Artificial
  probe
  misc_feature (1)..(25): SEQ ID NO: 6324; WAN024DBF; Start 820; Stop 844
gatagtgaggagttacctatgctga

SEQ ID NO: 435369 - DNA, 25 bp, Artificial
  probe
  misc_feature (1)..(25): SEQ ID NO: 6324; WAN024DBF; Start 814; Stop 838
gtcaatgatagtgaggagttaccta

SEQ ID NO: 435370 - DNA, 25 bp, Artificial
  probe
  misc_feature (1)..(25): SEQ ID NO: 6324; WAN024DBF; Start 717; Stop 741
tgctgcttcaactaagtggaatatt

SEQ ID NO: 435371 - DNA, 25 bp, Artificial
  probe
  misc_feature (1)..(25): SEQ ID NO: 6324; WAN024DBF; Start 1147; Stop 1171
tatgatggagaattggagagaatac

SEQ ID NO: 435372 - DNA, 25 bp, Artificial
  probe
  misc_feature (1)..(25): SEQ ID NO: 6324; WAN024DBF; Start 249; Stop 273
acatgctgatacatattctgatgag

SEQ ID NO: 435373 - DNA, 25 bp, Artificial
  probe
  misc_feature (1)..(25): SEQ ID NO: 6324; WAN024DBF; Start 819; Stop 843
tgatagtgaggagttacctatgctg

SEQ ID NO: 435374 - DNA, 25 bp, Artificial
  probe
  misc_feature (1)..(25): SEQ ID NO: 6324; WAN024DBF; Start 923; Stop 947
gagtattaggtctaagttatgctcc

SEQ ID NO: 435375 - DNA, 25 bp, Artificial
  probe
  misc_feature (1)..(25): SEQ ID NO: 6324; WAN024DBF; Start 922; Stop 946
ggagtattaggtctaagttatgctc

SEQ ID NO: 435376 - DNA, 25 bp, Artificial
  probe
  misc_feature (1)..(25): SEQ ID NO: 6324; WAN024DBF; Start 236; Stop 260
cagaagttgtagaacatgctgatac

SEQ ID NO: 435377 - DNA, 25 bp, Artificial
  probe
  misc_feature (1)..(25): SEQ ID NO: 6324; WAN024DBF; Start 1144; Stop 1168
agctatgatggagaattggagagaa

SEQ ID NO: 435378 - DNA, 25 bp, Artificial
  probe
  misc_feature (1)..(25): SEQ ID NO: 6324; WAN024DBF; Start 1143; Stop 1167
aagctatgatggagaattggagaga

SEQ ID NO: 435379 - DNA, 25 bp, Artificial
  probe
  misc_feature (1)..(25): SEQ ID NO: 6324; WAN024DBF; Start 235; Stop 259
ccagaagttgtagaacatgctgata

SEQ ID NO: 435380 - DNA, 25 bp, Artificial
  probe
  misc_feature (1)..(25): SEQ ID NO: 6324; WAN024DBF; Start 250; Stop 274
catgctgatacatattctgatgaga

SEQ ID NO: 435381 - DNA, 25 bp, Artificial
  probe
  misc_feature (1)..(25): SEQ ID NO: 6324; WAN024DBF; Start 1146; Stop 1170
ctatgatggagaattggagagaata

SEQ ID NO: 435382 - DNA, 25 bp, Artificial
  probe
  misc_feature (1)..(25): SEQ ID NO: 6325; WAN024BXZ; Start 197; Stop 221
tatctggtatggtagcatcatctca

SEQ ID NO: 435383 - DNA, 25 bp, Artificial
  probe
  misc_feature (1)..(25): SEQ ID NO: 6325; WAN024BXZ; Start 196; Stop 220
atatctggtatggtagcatcatctc

SEQ ID NO: 435384 - DNA, 25 bp, Artificial
  probe
  misc_feature (1)..(25): SEQ ID NO: 6325; WAN024BXZ; Start 198; Stop 222
atctggtatggtagcatcatctcat

SEQ ID NO: 435385 - DNA, 25 bp, Artificial
  probe
  misc_feature (1)..(25): SEQ ID NO: 6325; WAN024BXZ; Start 195; Stop 219
tatatctggtatggtagcatcatct

SEQ ID NO: 435386 - DNA, 25 bp, Artificial
  probe
  misc_feature (1)..(25): SEQ ID NO: 6325; WAN024BXZ; Start 199; Stop 223
tctggtatggtagcatcatctcatg

SEQ ID NO: 435387 - DNA, 25 bp, Artificial
  probe
  misc_feature (1)..(25): SEQ ID NO: 6325; WAN024BXZ; Start 570; Stop 594
aagttgggatagtattgctgaagag

SEQ ID NO: 435388 - DNA, 25 bp, Artificial
  probe
  misc_feature (1)..(25): SEQ ID NO: 6325; WAN024BXZ; Start 569; Stop 593
caagttgggatagtattgctgaaga

SEQ ID NO: 435389 - DNA, 25 bp, Artificial
  probe
  misc_feature (1)..(25): SEQ ID NO: 6325; WAN024BXZ; Start 194; Stop 218
atatatctggtatggtagcatcatc

SEQ ID NO: 435390 - DNA, 25 bp, Artificial
  probe
  misc_feature (1)..(25): SEQ ID NO: 6325; WAN024BXZ; Start 131; Stop 155
tttcaactggtttaacggaattaga

SEQ ID NO: 435391 - DNA, 25 bp, Artificial
  probe
  misc_feature (1)..(25): SEQ ID NO: 6325; WAN024BXZ; Start 86; Stop 110
tgttacctttaagtggatcatctgt

SEQ ID NO: 435392 - DNA, 25 bp, Artificial
  probe
  misc_feature (1)..(25): SEQ ID NO: 6325; WAN024BXZ; Start 132; Stop 156
ttcaactggtttaacggaattagat

SEQ ID NO: 435393 - DNA, 25 bp, Artificial
  probe
  misc_feature (1)..(25): SEQ ID NO: 6325; WAN024BXZ; Start 90; Stop 114
acctttaagtggatcatctgtagaa

SEQ ID NO: 435394 - DNA, 25 bp, Artificial
  probe
  misc_feature (1)..(25): SEQ ID NO: 6325; WAN024BXZ; Start 133; Stop 157
tcaactggtttaacggaattagata

SEQ ID NO: 435395 - DNA, 25 bp, Artificial
  probe
  misc_feature (1)..(25): SEQ ID NO: 6325; WAN024BXZ; Start 102; Stop 126
atcatctgtagaaattaactctccg

SEQ ID NO: 435396 - DNA, 25 bp, Artificial
  probe
  misc_feature (1)..(25): SEQ ID NO: 6325; WAN024BXZ; Start 279; Stop 303
attaggccataagttaaggacacaa

SEQ ID NO: 435397 - DNA, 25 bp, Artificial
  probe
  misc_feature (1)..(25): SEQ ID NO: 6325; WAN024BXZ; Start 145; Stop 169
acggaattagataaacaacaagaac

SEQ ID NO: 435398 - DNA, 25 bp, Artificial
  probe
  misc_feature (1)..(25): SEQ ID NO: 6325; WAN024BXZ; Start 89; Stop 113
tacctttaagtggatcatctgtaga

SEQ ID NO: 435399 - DNA, 25 bp, Artificial
  probe
  misc_feature (1)..(25): SEQ ID NO: 6325; WAN024BXZ; Start 85; Stop 109
atgttacctttaagtggatcatctg

SEQ ID NO: 435400 - DNA, 25 bp, Artificial
  probe
  misc_feature (1)..(25): SEQ ID NO: 6325; WAN024BXZ; Start 434; Stop 458
atgaatccgatttatctgatgaact

SEQ ID NO: 435401 - DNA, 25 bp, Artificial
  probe
  misc_feature (1)..(25): SEQ ID NO: 6325; WAN024BXZ; Start 91; Stop 115
cctttaagtggatcatctgtagaaa

SEQ ID NO: 435402 - DNA, 25 bp, Artificial
  probe
  misc_feature (1)..(25): SEQ ID NO: 6325; WAN024BXZ; Start 278; Stop 302
tattaggccataagttaaggacaca

SEQ ID NO: 435403 - DNA, 25 bp, Artificial
  probe
  misc_feature (1)..(25): SEQ ID NO: 6325; WAN024BXZ; Start 594; Stop 618
gctggaattgatttctttagatgaa

SEQ ID NO: 435404 - DNA, 25 bp, Artificial
  probe
  misc_feature (1)..(25): SEQ ID NO: 6325; WAN024BXZ; Start 578; Stop 602
atagtattgctgaagagctggaatt

SEQ ID NO: 435405 - DNA, 25 bp, Artificial
  probe
  misc_feature (1)..(25): SEQ ID NO: 6325; WAN024BXZ; Start 87; Stop 111
gttacctttaagtggatcatctgta

SEQ ID NO: 435406 - DNA, 25 bp, Artificial
  probe
  misc_feature (1)..(25): SEQ ID NO: 6325; WAN024BXZ; Start 577; Stop 601
gatagtattgctgaagagctggaat

SEQ ID NO: 435407 - DNA, 25 bp, Artificial
  probe
  misc_feature (1)..(25): SEQ ID NO: 6325; WAN024BXZ; Start 146; Stop 170
cggaattagataaacaacaagaact

SEQ ID NO: 435408 - DNA, 25 bp, Artificial
  probe
  misc_feature (1)..(25): SEQ ID NO: 6325; WAN024BXZ; Start 582; Stop 606
tattgctgaagagctggaattgatt

SEQ ID NO: 435409 - DNA, 25 bp, Artificial
  probe
  misc_feature (1)..(25): SEQ ID NO: 6325; WAN024BXZ; Start 579; Stop 603
tagtattgctgaagagctggaattg

SEQ ID NO: 435410 - DNA, 25 bp, Artificial
  probe
  misc_feature (1)..(25): SEQ ID NO: 6325; WAN024BXZ; Start 435; Stop 459
tgaatccgatttatctgatgaacta

SEQ ID NO: 435411 - DNA, 25 bp, Artificial
  probe
  misc_feature (1)..(25): SEQ ID NO: 6325; WAN024BXZ; Start 433; Stop 457
aatgaatccgatttatctgatgaac

SEQ ID NO: 435412 - DNA, 25 bp, Artificial
  probe
  misc_feature (1)..(25): SEQ ID NO: 6325; WAN024BXZ; Start 134; Stop 158
caactggtttaacggaattagataa

SEQ ID NO: 435413 - DNA, 25 bp, Artificial
  probe
  misc_feature (1)..(25): SEQ ID NO: 6325; WAN024BXZ; Start 88; Stop 112
ttacctttaagtggatcatctgtag

SEQ ID NO: 435414 - DNA, 25 bp, Artificial
  probe
  misc_feature (1)..(25): SEQ ID NO: 6325; WAN024BXZ; Start 581; Stop 605
gtattgctgaagagctggaattgat

SEQ ID NO: 435415 - DNA, 25 bp, Artificial
  probe
  misc_feature (1)..(25): SEQ ID NO: 6326; WAN024BXY; Start 151; Stop 175
agtatggtcgttgatgaagtcttac

SEQ ID NO: 435416 - DNA, 25 bp, Artificial
  probe
  misc_feature (1)..(25): SEQ ID NO: 6326; WAN024BXY; Start 66; Stop 90
agcgattaaccagattctacatcat

SEQ ID NO: 435417 - DNA, 25 bp, Artificial
  probe
  misc_feature (1)..(25): SEQ ID NO: 6326; WAN024BXY; Start 65; Stop 89
aagcgattaaccagattctacatca

SEQ ID NO: 435418 - DNA, 25 bp, Artificial
  probe
  misc_feature (1)..(25): SEQ ID NO: 6326; WAN024BXY; Start 150; Stop 174
aagtatggtcgttgatgaagtctta

SEQ ID NO: 435419 - DNA, 25 bp, Artificial
  probe
  misc_feature (1)..(25): SEQ ID NO: 6326; WAN024BXY; Start 67; Stop 91
gcgattaaccagattctacatcatt

SEQ ID NO: 435420 - DNA, 25 bp, Artificial
  probe
  misc_feature (1)..(25): SEQ ID NO: 6326; WAN024BXY; Start 64; Stop 88
gaagcgattaaccagattctacatc

SEQ ID NO: 435421 - DNA, 25 bp, Artificial
  probe
  misc_feature (1)..(25): SEQ ID NO: 6326; WAN024BXY; Start 74; Stop 98
accagattctacatcattacagagg

SEQ ID NO: 435422 - DNA, 25 bp, Artificial
  probe
  misc_feature (1)..(25): SEQ ID NO: 6326; WAN024BXY; Start 63; Stop 87
cgaagcgattaaccagattctacat

SEQ ID NO: 435423 - DNA, 25 bp, Artificial
  probe
  misc_feature (1)..(25): SEQ ID NO: 6326; WAN024BXY; Start 60; Stop 84
taccgaagcgattaaccagattcta

SEQ ID NO: 435424 - DNA, 25 bp, Artificial
  probe
  misc_feature (1)..(25): SEQ ID NO: 6326; WAN024BXY; Start 58; Stop 82
gataccgaagcgattaaccagattc

SEQ ID NO: 435425 - DNA, 25 bp, Artificial
  probe
  misc_feature (1)..(25): SEQ ID NO: 6326; WAN024BXY; Start 59; Stop 83
ataccgaagcgattaaccagattct

SEQ ID NO: 435426 - DNA, 25 bp, Artificial
  probe
  misc_feature (1)..(25): SEQ ID NO: 6326; WAN024BXY; Start 73; Stop 97
aaccagattctacatcattacagag

SEQ ID NO: 435427 - DNA, 25 bp, Artificial
  probe
  misc_feature (1)..(25): SEQ ID NO: 6326; WAN024BXY; Start 136; Stop 160
gaatatggcaatcaaagtatggtcg

SEQ ID NO: 435428 - DNA, 25 bp, Artificial
  probe
  misc_feature (1)..(25): SEQ ID NO: 6326; WAN024BXY; Start 62; Stop 86
ccgaagcgattaaccagattctaca

SEQ ID NO: 435429 - DNA, 25 bp, Artificial
  probe
  misc_feature (1)..(25): SEQ ID NO: 6326; WAN024BXY; Start 61; Stop 85
accgaagcgattaaccagattctac

SEQ ID NO: 435430 - DNA, 25 bp, Artificial
  probe
  misc_feature (1)..(25): SEQ ID NO: 6326; WAN024BXY; Start 138; Stop 162
atatggcaatcaaagtatggtcgtt

SEQ ID NO: 435431 - DNA, 25 bp, Artificial
  probe
  misc_feature (1)..(25): SEQ ID NO: 6326; WAN024BXY; Start 137; Stop 161
aatatggcaatcaaagtatggtcgt

SEQ ID NO: 435432 - DNA, 25 bp, Artificial
  probe
  misc_feature (1)..(25): SEQ ID NO: 6326; WAN024BXY; Start 113; Stop 137
gttccctacgacttatgaaagatga

SEQ ID NO: 435433 - DNA, 25 bp, Artificial
  probe
  misc_feature (1)..(25): SEQ ID NO: 6326; WAN024BXY; Start 149; Stop 173
aaagtatggtcgttgatgaagtctt

SEQ ID NO: 435434 - DNA, 25 bp, Artificial
  probe
  misc_feature (1)..(25): SEQ ID NO: 6326; WAN024BXY; Start 114; Stop 138
ttccctacgacttatgaaagatgaa

SEQ ID NO: 435435 - DNA, 25 bp, Artificial
  probe
  misc_feature (1)..(25): SEQ ID NO: 6326; WAN024BXY; Start 75; Stop 99
ccagattctacatcattacagaggg

SEQ ID NO: 435436 - DNA, 25 bp, Artificial
  probe
  misc_feature (1)..(25): SEQ ID NO: 6326; WAN024BXY; Start 121; Stop 145
cgacttatgaaagatgaatatggca

SEQ ID NO: 435437 - DNA, 25 bp, Artificial
  probe
  misc_feature (1)..(25): SEQ ID NO: 6326; WAN024BXY; Start 120; Stop 144
acgacttatgaaagatgaatatggc

SEQ ID NO: 435438 - DNA, 25 bp, Artificial
  probe
  misc_feature (1)..(25): SEQ ID NO: 6326; WAN024BXY; Start 115; Stop 139
tccctacgacttatgaaagatgaat

SEQ ID NO: 435439 - DNA, 25 bp, Artificial
  probe
  misc_feature (1)..(25): SEQ ID NO: 6326; WAN024BXY; Start 8; Stop 32
cacaatatcctatgattccctttcc

SEQ ID NO: 435440 - DNA, 25 bp, Artificial
  probe
  misc_feature (1)..(25): SEQ ID NO: 6326; WAN024BXY; Start 76; Stop 100
cagattctacatcattacagagggt

SEQ ID NO: 435441 - DNA, 25 bp, Artificial
  probe
  misc_feature (1)..(25): SEQ ID NO: 6326; WAN024BXY; Start 186; Stop 210
ggaaaccagactgattacaaagatt

SEQ ID NO: 435442 - DNA, 25 bp, Artificial
  probe
  misc_feature (1)..(25): SEQ ID NO: 6326; WAN024BXY; Start 57; Stop 81
cgataccgaagcgattaaccagatt

SEQ ID NO: 435443 - DNA, 25 bp, Artificial
  probe
  misc_feature (1)..(25): SEQ ID NO: 6326; WAN024BXY; Start 12; Stop 36
atatcctatgattccctttcctctc

SEQ ID NO: 435444 - DNA, 25 bp, Artificial
  probe
  misc_feature (1)..(25): SEQ ID NO: 6326; WAN024BXY; Start 9; Stop 33
acaatatcctatgattccctttcct

SEQ ID NO: 435445 - DNA, 25 bp, Artificial
  probe
  misc_feature (1)..(25): SEQ ID NO: 6326; WAN024BXY; Start 13; Stop 37
tatcctatgattccctttcctctca

SEQ ID NO: 435446 - DNA, 25 bp, Artificial
  probe
  misc_feature (1)..(25): SEQ ID NO: 6326; WAN024BXY; Start 20; Stop 44
tgattccctttcctctcattgtaaa

SEQ ID NO: 435447 - DNA, 25 bp, Artificial
  probe
  misc_feature (1)..(25): SEQ ID NO: 6326; WAN024BXY; Start 72; Stop 96
taaccagattctacatcattacaga

SEQ ID NO: 435448 - DNA, 25 bp, Artificial
  probe
  misc_feature (1)..(25): SEQ ID NO: 6327; WAN024BXA; Start 49; Stop 73
gcagatggttctcaagttgatgatt

SEQ ID NO: 435449 - DNA, 25 bp, Artificial
  probe
  misc_feature (1)..(25): SEQ ID NO: 6327; WAN024BXA; Start 126; Stop 150
catgaacaagcaatctaacgaggag

SEQ ID NO: 435450 - DNA, 25 bp, Artificial
  probe
  misc_feature (1)..(25): SEQ ID NO: 6327; WAN024BXA; Start 127; Stop 151
atgaacaagcaatctaacgaggagg

SEQ ID NO: 435451 - DNA, 25 bp, Artificial
  probe
  misc_feature (1)..(25): SEQ ID NO: 6327; WAN024BXA; Start 122; Stop 146
taggcatgaacaagcaatctaacga

SEQ ID NO: 435452 - DNA, 25 bp, Artificial
  probe
  misc_feature (1)..(25): SEQ ID NO: 6327; WAN024BXA; Start 61; Stop 85
caagttgatgatttgacaggctatg

SEQ ID NO: 435453 - DNA, 25 bp, Artificial
  probe
  misc_feature (1)..(25): SEQ ID NO: 6327; WAN024BXA; Start 121; Stop 145
ttaggcatgaacaagcaatctaacg

SEQ ID NO: 435454 - DNA, 25 bp, Artificial
  probe
  misc_feature (1)..(25): SEQ ID NO: 6327; WAN024BXA; Start 62; Stop 86
aagttgatgatttgacaggctatgt

SEQ ID NO: 435455 - DNA, 25 bp, Artificial
  probe
  misc_feature (1)..(25): SEQ ID NO: 6327; WAN024BXA; Start 51; Stop 75
agatggttctcaagttgatgatttg

SEQ ID NO: 435456 - DNA, 25 bp, Artificial
  probe
  misc_feature (1)..(25): SEQ ID NO: 6327; WAN024BXA; Start 50; Stop 74
cagatggttctcaagttgatgattt

SEQ ID NO: 435457 - DNA, 25 bp, Artificial
  probe
  misc_feature (1)..(25): SEQ ID NO: 6327; WAN024BXA; Start 48; Stop 72
ggcagatggttctcaagttgatgat

SEQ ID NO: 435458 - DNA, 25 bp, Artificial
  probe
  misc_feature (1)..(25): SEQ ID NO: 6327; WAN024BXA; Start 120; Stop 144
tttaggcatgaacaagcaatctaac

SEQ ID NO: 435459 - DNA, 25 bp, Artificial
  probe
  misc_feature (1)..(25): SEQ ID NO: 6327; WAN024BXA; Start 46; Stop 70
atggcagatggttctcaagttgatg

SEQ ID NO: 435460 - DNA, 25 bp, Artificial
  probe
  misc_feature (1)..(25): SEQ ID NO: 6327; WAN024BXA; Start 43; Stop 67
atcatggcagatggttctcaagttg

SEQ ID NO: 435461 - DNA, 25 bp, Artificial
  probe
  misc_feature (1)..(25): SEQ ID NO: 6327; WAN024BXA; Start 45; Stop 69
catggcagatggttctcaagttgat

SEQ ID NO: 435462 - DNA, 25 bp, Artificial
  probe
  misc_feature (1)..(25): SEQ ID NO: 6327; WAN024BXA; Start 125; Stop 149
gcatgaacaagcaatctaacgagga

SEQ ID NO: 435463 - DNA, 25 bp, Artificial
  probe
  misc_feature (1)..(25): SEQ ID NO: 6327; WAN024BXA; Start 123; Stop 147
aggcatgaacaagcaatctaacgag

SEQ ID NO: 435464 - DNA, 25 bp, Artificial
  probe
  misc_feature (1)..(25): SEQ ID NO: 6327; WAN024BXA; Start 30; Stop 54
acggattgtaaacatcatggcagat

SEQ ID NO: 435465 - DNA, 25 bp, Artificial
  probe
  misc_feature (1)..(25): SEQ ID NO: 6327; WAN024BXA; Start 53; Stop 77
atggttctcaagttgatgatttgac

SEQ ID NO: 435466 - DNA, 25 bp, Artificial
  probe
  misc_feature (1)..(25): SEQ ID NO: 6327; WAN024BXA; Start 56; Stop 80
gttctcaagttgatgatttgacagg

SEQ ID NO: 435467 - DNA, 25 bp, Artificial
  probe
  misc_feature (1)..(25): SEQ ID NO: 6327; WAN024BXA; Start 55; Stop 79
ggttctcaagttgatgatttgacag

SEQ ID NO: 435468 - DNA, 25 bp, Artificial
  probe
  misc_feature (1)..(25): SEQ ID NO: 6327; WAN024BXA; Start 52; Stop 76
gatggttctcaagttgatgatttga

SEQ ID NO: 435469 - DNA, 25 bp, Artificial
  probe
  misc_feature (1)..(25): SEQ ID NO: 6327; WAN024BXA; Start 60; Stop 84
tcaagttgatgatttgacaggctat

SEQ ID NO: 435470 - DNA, 25 bp, Artificial
  probe
  misc_feature (1)..(25): SEQ ID NO: 6327; WAN024BXA; Start 54; Stop 78
tggttctcaagttgatgatttgaca

SEQ ID NO: 435471 - DNA, 25 bp, Artificial
  probe
  misc_feature (1)..(25): SEQ ID NO: 6327; WAN024BXA; Start 47; Stop 71
tggcagatggttctcaagttgatga

SEQ ID NO: 435472 - DNA, 25 bp, Artificial
  probe
  misc_feature (1)..(25): SEQ ID NO: 6327; WAN024BXA; Start 59; Stop 83
ctcaagttgatgatttgacaggcta

SEQ ID NO: 435473 - DNA, 25 bp, Artificial
  probe
  misc_feature (1)..(25): SEQ ID NO: 6327; WAN024BXA; Start 44; Stop 68
tcatggcagatggttctcaagttga

SEQ ID NO: 435474 - DNA, 25 bp, Artificial
  probe
  misc_feature (1)..(25): SEQ ID NO: 6327; WAN024BXA; Start 118; Stop 142
attttaggcatgaacaagcaatcta

SEQ ID NO: 435475 - DNA, 25 bp, Artificial
  probe
  misc_feature (1)..(25): SEQ ID NO: 6327; WAN024BXA; Start 117; Stop 141
tattttaggcatgaacaagcaatct

SEQ ID NO: 435476 - DNA, 25 bp, Artificial
  probe
  misc_feature (1)..(25): SEQ ID NO: 6327; WAN024BXA; Start 124; Stop 148
ggcatgaacaagcaatctaacgagg

SEQ ID NO: 435477 - DNA, 25 bp, Artificial
  probe
  misc_feature (1)..(25): SEQ ID NO: 6327; WAN024BXA; Start 113; Stop 137
acattattttaggcatgaacaagca

SEQ ID NO: 435478 - DNA, 25 bp, Artificial
  probe
  misc_feature (1)..(25): SEQ ID NO: 6327; WAN024BXA; Start 57; Stop 81
ttctcaagttgatgatttgacaggc

SEQ ID NO: 435479 - DNA, 25 bp, Artificial
  probe
  misc_feature (1)..(25): SEQ ID NO: 6327; WAN024BXA; Start 112; Stop 136
gacattattttaggcatgaacaagc

SEQ ID NO: 435480 - DNA, 25 bp, Artificial
  probe
  misc_feature (1)..(25): SEQ ID NO: 6327; WAN024BXA; Start 34; Stop 58
attgtaaacatcatggcagatggtt

SEQ ID NO: 435481 - DNA, 25 bp, Artificial
  probe
  misc_feature (1)..(25): SEQ ID NO: 6328; WAN024BHP; Start 97; Stop 121
atactacagattctctatggagcgt

SEQ ID NO: 435482 - DNA, 25 bp, Artificial
  probe
  misc_feature (1)..(25): SEQ ID NO: 6328; WAN024BHP; Start 98; Stop 122
tactacagattctctatggagcgtc

SEQ ID NO: 435483 - DNA, 25 bp, Artificial
  probe
  misc_feature (1)..(25): SEQ ID NO: 6328; WAN024BHP; Start 96; Stop 120
tatactacagattctctatggagcg

SEQ ID NO: 435484 - DNA, 25 bp, Artificial
  probe
  misc_feature (1)..(25): SEQ ID NO: 6328; WAN024BHP; Start 242; Stop 266
ttagtctgattcatgctcaaggaag

SEQ ID NO: 435485 - DNA, 25 bp, Artificial
  probe
  misc_feature (1)..(25): SEQ ID NO: 6328; WAN024BHP; Start 472; Stop 496
ttgtatgtttcacttgggatggttt

SEQ ID NO: 435486 - DNA, 25 bp, Artificial
  probe
  misc_feature (1)..(25): SEQ ID NO: 6328; WAN024BHP; Start 471; Stop 495
tttgtatgtttcacttgggatggtt

SEQ ID NO: 435487 - DNA, 25 bp, Artificial
  probe
  misc_feature (1)..(25): SEQ ID NO: 6328; WAN024BHP; Start 559; Stop 583
ctgctagtttatagtttgctgcttt

SEQ ID NO: 435488 - DNA, 25 bp, Artificial
  probe
  misc_feature (1)..(25): SEQ ID NO: 6328; WAN024BHP; Start 264; Stop 288
aagcacgaatcaagcaaacttaatt

SEQ ID NO: 435489 - DNA, 25 bp, Artificial
  probe
  misc_feature (1)..(25): SEQ ID NO: 6328; WAN024BHP; Start 95; Stop 119
ctatactacagattctctatggagc

SEQ ID NO: 435490 - DNA, 25 bp, Artificial
  probe
  misc_feature (1)..(25): SEQ ID NO: 6328; WAN024BHP; Start 34; Stop 58
caagcaaatgtcctattggtatctc

SEQ ID NO: 435491 - DNA, 25 bp, Artificial
  probe
  misc_feature (1)..(25): SEQ ID NO: 6328; WAN024BHP; Start 263; Stop 287
gaagcacgaatcaagcaaacttaat

SEQ ID NO: 435492 - DNA, 25 bp, Artificial
  probe
  misc_feature (1)..(25): SEQ ID NO: 6328; WAN024BHP; Start 35; Stop 59
aagcaaatgtcctattggtatctct

SEQ ID NO: 435493 - DNA, 25 bp, Artificial
  probe
  misc_feature (1)..(25): SEQ ID NO: 6328; WAN024BHP; Start 555; Stop 579
gaacctgctagtttatagtttgctg

SEQ ID NO: 435494 - DNA, 25 bp, Artificial
  probe
  misc_feature (1)..(25): SEQ ID NO: 6328; WAN024BHP; Start 551; Stop 575
tgtggaacctgctagtttatagttt

SEQ ID NO: 435495 - DNA, 25 bp, Artificial
  probe
  misc_feature (1)..(25): SEQ ID NO: 6328; WAN024BHP; Start 552; Stop 576
gtggaacctgctagtttatagtttg

SEQ ID NO: 435496 - DNA, 25 bp, Artificial
  probe
  misc_feature (1)..(25): SEQ ID NO: 6328; WAN024BHP; Start 199; Stop 223
cttggtattggatttgtcagcctac

SEQ ID NO: 435497 - DNA, 25 bp, Artificial
  probe
  misc_feature (1)..(25): SEQ ID NO: 6328; WAN024BHP; Start 36; Stop 60
agcaaatgtcctattggtatctcta

SEQ ID NO: 435498 - DNA, 25 bp, Artificial
  probe
  misc_feature (1)..(25): SEQ ID NO: 6328; WAN024BHP; Start 550; Stop 574
gtgtggaacctgctagtttatagtt

SEQ ID NO: 435499 - DNA, 25 bp, Artificial
  probe
  misc_feature (1)..(25): SEQ ID NO: 6328; WAN024BHP; Start 470; Stop 494
gtttgtatgtttcacttgggatggt

SEQ ID NO: 435500 - DNA, 25 bp, Artificial
  probe
  misc_feature (1)..(25): SEQ ID NO: 6328; WAN024BHP; Start 469; Stop 493
tgtttgtatgtttcacttgggatgg

SEQ ID NO: 435501 - DNA, 25 bp, Artificial
  probe
  misc_feature (1)..(25): SEQ ID NO: 6328; WAN024BHP; Start 554; Stop 578
ggaacctgctagtttatagtttgct

SEQ ID NO: 435502 - DNA, 25 bp, Artificial
  probe
  misc_feature (1)..(25): SEQ ID NO: 6328; WAN024BHP; Start 558; Stop 582
cctgctagtttatagtttgctgctt

SEQ ID NO: 435503 - DNA, 25 bp, Artificial
  probe
  misc_feature (1)..(25): SEQ ID NO: 6328; WAN024BHP; Start 265; Stop 289
agcacgaatcaagcaaacttaattg

SEQ ID NO: 435504 - DNA, 25 bp, Artificial
  probe
  misc_feature (1)..(25): SEQ ID NO: 6328; WAN024BHP; Start 194; Stop 218
aatggcttggtattggatttgtcag

SEQ ID NO: 435505 - DNA, 25 bp, Artificial
  probe
  misc_feature (1)..(25): SEQ ID NO: 6328; WAN024BHP; Start 553; Stop 577
tggaacctgctagtttatagtttgc

SEQ ID NO: 435506 - DNA, 25 bp, Artificial
  probe
  misc_feature (1)..(25): SEQ ID NO: 6328; WAN024BHP; Start 33; Stop 57
acaagcaaatgtcctattggtatct

SEQ ID NO: 435507 - DNA, 25 bp, Artificial
  probe
  misc_feature (1)..(25): SEQ ID NO: 6328; WAN024BHP; Start 31; Stop 55
caacaagcaaatgtcctattggtat

SEQ ID NO: 435508 - DNA, 25 bp, Artificial
  probe
  misc_feature (1)..(25): SEQ ID NO: 6328; WAN024BHP; Start 27; Stop 51
attccaacaagcaaatgtcctattg

SEQ ID NO: 435509 - DNA, 25 bp, Artificial
  probe
  misc_feature (1)..(25): SEQ ID NO: 6328; WAN024BHP; Start 32; Stop 56
aacaagcaaatgtcctattggtatc

SEQ ID NO: 435510 - DNA, 25 bp, Artificial
  probe
  misc_feature (1)..(25): SEQ ID NO: 6328; WAN024BHP; Start 200; Stop 224
ttggtattggatttgtcagcctact

SEQ ID NO: 435511 - DNA, 25 bp, Artificial
  probe
  misc_feature (1)..(25): SEQ ID NO: 6328; WAN024BHP; Start 436; Stop 460
ttagctcatcatccaggaaccattc

SEQ ID NO: 435512 - DNA, 25 bp, Artificial
  probe
  misc_feature (1)..(25): SEQ ID NO: 6328; WAN024BHP; Start 26; Stop 50
tattccaacaagcaaatgtcctatt

SEQ ID NO: 435513 - DNA, 25 bp, Artificial
  probe
  misc_feature (1)..(25): SEQ ID NO: 6328; WAN024BHP; Start 37; Stop 61
gcaaatgtcctattggtatctctat

SEQ ID NO: 435514 - DNA, 25 bp, Artificial
  probe
  misc_feature (1)..(25): SEQ ID NO: 6329; WAN024BQ3; Start 883; Stop 907
ctaccgacactactctcagaagaag

SEQ ID NO: 435515 - DNA, 25 bp, Artificial
  probe
  misc_feature (1)..(25): SEQ ID NO: 6329; WAN024BQ3; Start 882; Stop 906
tctaccgacactactctcagaagaa

SEQ ID NO: 435516 - DNA, 25 bp, Artificial
  probe
  misc_feature (1)..(25): SEQ ID NO: 6329; WAN024BQ3; Start 892; Stop 916
ctactctcagaagaaggtgtaccaa

SEQ ID NO: 435517 - DNA, 25 bp, Artificial
  probe
  misc_feature (1)..(25): SEQ ID NO: 6329; WAN024BQ3; Start 1061; Stop 1085
acgatattaagatagctgctcagaa

SEQ ID NO: 435518 - DNA, 25 bp, Artificial
  probe
  misc_feature (1)..(25): SEQ ID NO: 6329; WAN024BQ3; Start 1060; Stop 1084
tacgatattaagatagctgctcaga

SEQ ID NO: 435519 - DNA, 25 bp, Artificial
  probe
  misc_feature (1)..(25): SEQ ID NO: 6329; WAN024BQ3; Start 1059; Stop 1083
ctacgatattaagatagctgctcag

SEQ ID NO: 435520 - DNA, 25 bp, Artificial
  probe
  misc_feature (1)..(25): SEQ ID NO: 6329; WAN024BQ3; Start 891; Stop 915
actactctcagaagaaggtgtacca

SEQ ID NO: 435521 - DNA, 25 bp, Artificial
  probe
  misc_feature (1)..(25): SEQ ID NO: 6329; WAN024BQ3; Start 1062; Stop 1086
cgatattaagatagctgctcagaat

SEQ ID NO: 435522 - DNA, 25 bp, Artificial
  probe
  misc_feature (1)..(25): SEQ ID NO: 6329; WAN024BQ3; Start 780; Stop 804
tcagtcgaatatatcagaatggttg

SEQ ID NO: 435523 - DNA, 25 bp, Artificial
  probe
  misc_feature (1)..(25): SEQ ID NO: 6329; WAN024BQ3; Start 719; Stop 743
acaaattaaagatactggctgagga

SEQ ID NO: 435524 - DNA, 25 bp, Artificial
  probe
  misc_feature (1)..(25): SEQ ID NO: 6329; WAN024BQ3; Start 751; Stop 775
attcaggataaggtctactttgtgg

SEQ ID NO: 435525 - DNA, 25 bp, Artificial
  probe
  misc_feature (1)..(25): SEQ ID NO: 6329; WAN024BQ3; Start 740; Stop 764
aggagctatctattcaggataaggt

SEQ ID NO: 435526 - DNA, 25 bp, Artificial
  probe
  misc_feature (1)..(25): SEQ ID NO: 6329; WAN024BQ3; Start 741; Stop 765
ggagctatctattcaggataaggtc

SEQ ID NO: 435527 - DNA, 25 bp, Artificial
  probe
  misc_feature (1)..(25): SEQ ID NO: 6329; WAN024BQ3; Start 720; Stop 744
caaattaaagatactggctgaggag

SEQ ID NO: 435528 - DNA, 25 bp, Artificial
  probe
  misc_feature (1)..(25): SEQ ID NO: 6329; WAN024BQ3; Start 718; Stop 742
aacaaattaaagatactggctgagg

SEQ ID NO: 435529 - DNA, 25 bp, Artificial
  probe
  misc_feature (1)..(25): SEQ ID NO: 6329; WAN024BQ3; Start 884; Stop 908
taccgacactactctcagaagaagg

SEQ ID NO: 435530 - DNA, 25 bp, Artificial
  probe
  misc_feature (1)..(25): SEQ ID NO: 6329; WAN024BQ3; Start 739; Stop 763
gaggagctatctattcaggataagg

SEQ ID NO: 435531 - DNA, 25 bp, Artificial
  probe
  misc_feature (1)..(25): SEQ ID NO: 6329; WAN024BQ3; Start 778; Stop 802
gttcagtcgaatatatcagaatggt

SEQ ID NO: 435532 - DNA, 25 bp, Artificial
  probe
  misc_feature (1)..(25): SEQ ID NO: 6329; WAN024BQ3; Start 744; Stop 768
gctatctattcaggataaggtctac

SEQ ID NO: 435533 - DNA, 25 bp, Artificial
  probe
  misc_feature (1)..(25): SEQ ID NO: 6329; WAN024BQ3; Start 979; Stop 1003
gcaaacttccttgatgaaatgattc

SEQ ID NO: 435534 - DNA, 25 bp, Artificial
  probe
  misc_feature (1)..(25): SEQ ID NO: 6329; WAN024BQ3; Start 978; Stop 1002
ggcaaacttccttgatgaaatgatt

SEQ ID NO: 435535 - DNA, 25 bp, Artificial
  probe
  misc_feature (1)..(25): SEQ ID NO: 6329; WAN024BQ3; Start 890; Stop 914
cactactctcagaagaaggtgtacc

SEQ ID NO: 435536 - DNA, 25 bp, Artificial
  probe
  misc_feature (1)..(25): SEQ ID NO: 6329; WAN024BQ3; Start 777; Stop 801
agttcagtcgaatatatcagaatgg

SEQ ID NO: 435537 - DNA, 25 bp, Artificial
  probe
  misc_feature (1)..(25): SEQ ID NO: 6329; WAN024BQ3; Start 141; Stop 165
ggatgaacttatttctaaaggagca

SEQ ID NO: 435538 - DNA, 25 bp, Artificial
  probe
  misc_feature (1)..(25): SEQ ID NO: 6329; WAN024BQ3; Start 783; Stop 807
gtcgaatatatcagaatggttgagt

SEQ ID NO: 435539 - DNA, 25 bp, Artificial
  probe
  misc_feature (1)..(25): SEQ ID NO: 6329; WAN024BQ3; Start 781; Stop 805
cagtcgaatatatcagaatggttga

SEQ ID NO: 435540 - DNA, 25 bp, Artificial
  probe
  misc_feature (1)..(25): SEQ ID NO: 6329; WAN024BQ3; Start 742; Stop 766
gagctatctattcaggataaggtct

SEQ ID NO: 435541 - DNA, 25 bp, Artificial
  probe
  misc_feature (1)..(25): SEQ ID NO: 6329; WAN024BQ3; Start 738; Stop 762
tgaggagctatctattcaggataag

SEQ ID NO: 435542 - DNA, 25 bp, Artificial
  probe
  misc_feature (1)..(25): SEQ ID NO: 6329; WAN024BQ3; Start 902; Stop 926
aagaaggtgtaccaaaggaagtaaa

SEQ ID NO: 435543 - DNA, 25 bp, Artificial
  probe
  misc_feature (1)..(25): SEQ ID NO: 6329; WAN024BQ3; Start 881; Stop 905
gtctaccgacactactctcagaaga

SEQ ID NO: 435544 - DNA, 25 bp, Artificial
  probe
  misc_feature (1)..(25): SEQ ID NO: 6329; WAN024BQ3; Start 757; Stop 781
gataaggtctactttgtgggagttc

SEQ ID NO: 435545 - DNA, 25 bp, Artificial
  probe
  misc_feature (1)..(25): SEQ ID NO: 6329; WAN024BQ3; Start 901; Stop 925
gaagaaggtgtaccaaaggaagtaa

SEQ ID NO: 435546 - DNA, 25 bp, Artificial
  probe
  misc_feature (1)..(25): SEQ ID NO: 6329; WAN024BQ3; Start 775; Stop 799
ggagttcagtcgaatatatcagaat

SEQ ID NO: 435547 - DNA, 25 bp, Artificial
  probe
  misc_feature (1)..(25): SEQ ID NO: 6330; WAN024BQL; Start 191; Stop 215
gatatgttgaccttgttattcctga

SEQ ID NO: 435548 - DNA, 25 bp, Artificial
  probe
  misc_feature (1)..(25): SEQ ID NO: 6330; WAN024BQL; Start 190; Stop 214
agatatgttgaccttgttattcctg

SEQ ID NO: 435549 - DNA, 25 bp, Artificial
  probe
  misc_feature (1)..(25): SEQ ID NO: 6330; WAN024BQL; Start 192; Stop 216
atatgttgaccttgttattcctgaa

SEQ ID NO: 435550 - DNA, 25 bp, Artificial
  probe
  misc_feature (1)..(25): SEQ ID NO: 6330; WAN024BQL; Start 74; Stop 98
aagaattaggtgactatctagtggt

SEQ ID NO: 435551 - DNA, 25 bp, Artificial
  probe
  misc_feature (1)..(25): SEQ ID NO: 6330; WAN024BQL; Start 80; Stop 104
taggtgactatctagtggtagttgt

SEQ ID NO: 435552 - DNA, 25 bp, Artificial
  probe
  misc_feature (1)..(25): SEQ ID NO: 6330; WAN024BQL; Start 81; Stop 105
aggtgactatctagtggtagttgtt

SEQ ID NO: 435553 - DNA, 25 bp, Artificial
  probe
  misc_feature (1)..(25): SEQ ID NO: 6330; WAN024BQL; Start 311; Stop 335
aagaagaaggagttgaagtcgttta

SEQ ID NO: 435554 - DNA, 25 bp, Artificial
  probe
  misc_feature (1)..(25): SEQ ID NO: 6330; WAN024BQL; Start 189; Stop 213
tagatatgttgaccttgttattcct

SEQ ID NO: 435555 - DNA, 25 bp, Artificial
  probe
  misc_feature (1)..(25): SEQ ID NO: 6330; WAN024BQL; Start 312; Stop 336
agaagaaggagttgaagtcgtttac

SEQ ID NO: 435556 - DNA, 25 bp, Artificial
  probe
  misc_feature (1)..(25): SEQ ID NO: 6330; WAN024BQL; Start 79; Stop 103
ttaggtgactatctagtggtagttg

SEQ ID NO: 435557 - DNA, 25 bp, Artificial
  probe
  misc_feature (1)..(25): SEQ ID NO: 6330; WAN024BQL; Start 310; Stop 334
aaagaagaaggagttgaagtcgttt

SEQ ID NO: 435558 - DNA, 25 bp, Artificial
  probe
  misc_feature (1)..(25): SEQ ID NO: 6330; WAN024BQL; Start 75; Stop 99
agaattaggtgactatctagtggta

SEQ ID NO: 435559 - DNA, 25 bp, Artificial
  probe
  misc_feature (1)..(25): SEQ ID NO: 6330; WAN024BQL; Start 279; Stop 303
ggatgattggattggagaatttgat

SEQ ID NO: 435560 - DNA, 25 bp, Artificial
  probe
  misc_feature (1)..(25): SEQ ID NO: 6330; WAN024BQL; Start 194; Stop 218
atgttgaccttgttattcctgaaac

SEQ ID NO: 435561 - DNA, 25 bp, Artificial
  probe
  misc_feature (1)..(25): SEQ ID NO: 6330; WAN024BQL; Start 278; Stop 302
gggatgattggattggagaatttga

SEQ ID NO: 435562 - DNA, 25 bp, Artificial
  probe
  misc_feature (1)..(25): SEQ ID NO: 6330; WAN024BQL; Start 76; Stop 100
gaattaggtgactatctagtggtag

SEQ ID NO: 435563 - DNA, 25 bp, Artificial
  probe
  misc_feature (1)..(25): SEQ ID NO: 6330; WAN024BQL; Start 92; Stop 116
tagtggtagttgtttcaagtgatga

SEQ ID NO: 435564 - DNA, 25 bp, Artificial
  probe
  misc_feature (1)..(25): SEQ ID NO: 6330; WAN024BQL; Start 313; Stop 337
gaagaaggagttgaagtcgtttact

SEQ ID NO: 435565 - DNA, 25 bp, Artificial
  probe
  misc_feature (1)..(25): SEQ ID NO: 6330; WAN024BQL; Start 199; Stop 223
gaccttgttattcctgaaacgagtt

SEQ ID NO: 435566 - DNA, 25 bp, Artificial
  probe
  misc_feature (1)..(25): SEQ ID NO: 6330; WAN024BQL; Start 197; Stop 221
ttgaccttgttattcctgaaacgag

SEQ ID NO: 435567 - DNA, 25 bp, Artificial
  probe
  misc_feature (1)..(25): SEQ ID NO: 6330; WAN024BQL; Start 193; Stop 217
tatgttgaccttgttattcctgaaa

SEQ ID NO: 435568 - DNA, 25 bp, Artificial
  probe
  misc_feature (1)..(25): SEQ ID NO: 6330; WAN024BQL; Start 333; Stop 357
ttacttacctcggacgaaagaaatt

SEQ ID NO: 435569 - DNA, 25 bp, Artificial
  probe
  misc_feature (1)..(25): SEQ ID NO: 6330; WAN024BQL; Start 332; Stop 356
tttacttacctcggacgaaagaaat

SEQ ID NO: 435570 - DNA, 25 bp, Artificial
  probe
  misc_feature (1)..(25): SEQ ID NO: 6330; WAN024BQL; Start 183; Stop 207
agctattagatatgttgaccttgtt

SEQ ID NO: 435571 - DNA, 25 bp, Artificial
  probe
  misc_feature (1)..(25): SEQ ID NO: 6330; WAN024BQL; Start 91; Stop 115
ctagtggtagttgtttcaagtgatg

SEQ ID NO: 435572 - DNA, 25 bp, Artificial
  probe
  misc_feature (1)..(25): SEQ ID NO: 6330; WAN024BQL; Start 90; Stop 114
tctagtggtagttgtttcaagtgat

SEQ ID NO: 435573 - DNA, 25 bp, Artificial
  probe
  misc_feature (1)..(25): SEQ ID NO: 6330; WAN024BQL; Start 89; Stop 113
atctagtggtagttgtttcaagtga

SEQ ID NO: 435574 - DNA, 25 bp, Artificial
  probe
  misc_feature (1)..(25): SEQ ID NO: 6330; WAN024BQL; Start 44; Stop 68
atggacatatcaatttattgcgacg

SEQ ID NO: 435575 - DNA, 25 bp, Artificial
  probe
  misc_feature (1)..(25): SEQ ID NO: 6330; WAN024BQL; Start 232; Stop 256
aaacgcagtgatgtcaaagagtatc

SEQ ID NO: 435576 - DNA, 25 bp, Artificial
  probe
  misc_feature (1)..(25): SEQ ID NO: 6330; WAN024BQL; Start 200; Stop 224
accttgttattcctgaaacgagttg

SEQ ID NO: 435577 - DNA, 25 bp, Artificial
  probe
  misc_feature (1)..(25): SEQ ID NO: 6330; WAN024BQL; Start 196; Stop 220
gttgaccttgttattcctgaaacga

SEQ ID NO: 435578 - DNA, 25 bp, Artificial
  probe
  misc_feature (1)..(25): SEQ ID NO: 6330; WAN024BQL; Start 182; Stop 206
aagctattagatatgttgaccttgt

SEQ ID NO: 435579 - DNA, 25 bp, Artificial
  probe
  misc_feature (1)..(25): SEQ ID NO: 6330; WAN024BQL; Start 78; Stop 102
attaggtgactatctagtggtagtt

SEQ ID NO: 435580 - DNA, 25 bp, Artificial
  probe
  misc_feature (1)..(25): SEQ ID NO: 6331; WAN024BVH; Start 1111; Stop 1135
gtgttattattattcaacgctgtgt

SEQ ID NO: 435581 - DNA, 25 bp, Artificial
  probe
  misc_feature (1)..(25): SEQ ID NO: 6331; WAN024BVH; Start 1110; Stop 1134
tgtgttattattattcaacgctgtg

SEQ ID NO: 435582 - DNA, 25 bp, Artificial
  probe
  misc_feature (1)..(25): SEQ ID NO: 6331; WAN024BVH; Start 495; Stop 519
tcatagtatggcgtatcctattgtt

SEQ ID NO: 435583 - DNA, 25 bp, Artificial
  probe
  misc_feature (1)..(25): SEQ ID NO: 6331; WAN024BVH; Start 494; Stop 518
ttcatagtatggcgtatcctattgt

SEQ ID NO: 435584 - DNA, 25 bp, Artificial
  probe
  misc_feature (1)..(25): SEQ ID NO: 6331; WAN024BVH; Start 310; Stop 334
tctggtcttatctcaggtattggag

SEQ ID NO: 435585 - DNA, 25 bp, Artificial
  probe
  misc_feature (1)..(25): SEQ ID NO: 6331; WAN024BVH; Start 309; Stop 333
ctctggtcttatctcaggtattgga

SEQ ID NO: 435586 - DNA, 25 bp, Artificial
  probe
  misc_feature (1)..(25): SEQ ID NO: 6331; WAN024BVH; Start 308; Stop 332
tctctggtcttatctcaggtattgg

SEQ ID NO: 435587 - DNA, 25 bp, Artificial
  probe
  misc_feature (1)..(25): SEQ ID NO: 6331; WAN024BVH; Start 307; Stop 331
atctctggtcttatctcaggtattg

SEQ ID NO: 435588 - DNA, 25 bp, Artificial
  probe
  misc_feature (1)..(25): SEQ ID NO: 6331; WAN024BVH; Start 938; Stop 962
acctatcatcaattacacaagagtt

SEQ ID NO: 435589 - DNA, 25 bp, Artificial
  probe
  misc_feature (1)..(25): SEQ ID NO: 6331; WAN024BVH; Start 937; Stop 961
aacctatcatcaattacacaagagt

SEQ ID NO: 435590 - DNA, 25 bp, Artificial
  probe
  misc_feature (1)..(25): SEQ ID NO: 6331; WAN024BVH; Start 1109; Stop 1133
ctgtgttattattattcaacgctgt

SEQ ID NO: 435591 - DNA, 25 bp, Artificial
  probe
  misc_feature (1)..(25): SEQ ID NO: 6331; WAN024BVH; Start 1108; Stop 1132
tctgtgttattattattcaacgctg

SEQ ID NO: 435592 - DNA, 25 bp, Artificial
  probe
  misc_feature (1)..(25): SEQ ID NO: 6331; WAN024BVH; Start 306; Stop 330
aatctctggtcttatctcaggtatt

SEQ ID NO: 435593 - DNA, 25 bp, Artificial
  probe
  misc_feature (1)..(25): SEQ ID NO: 6331; WAN024BVH; Start 1112; Stop 1136
tgttattattattcaacgctgtgtt

SEQ ID NO: 435594 - DNA, 25 bp, Artificial
  probe
  misc_feature (1)..(25): SEQ ID NO: 6331; WAN024BVH; Start 1050; Stop 1074
aggatttattggaggttggctattt

SEQ ID NO: 435595 - DNA, 25 bp, Artificial
  probe
  misc_feature (1)..(25): SEQ ID NO: 6331; WAN024BVH; Start 582; Stop 606
tgttgataagagtgaaagagcagaa

SEQ ID NO: 435596 - DNA, 25 bp, Artificial
  probe
  misc_feature (1)..(25): SEQ ID NO: 6331; WAN024BVH; Start 581; Stop 605
ttgttgataagagtgaaagagcaga

SEQ ID NO: 435597 - DNA, 25 bp, Artificial
  probe
  misc_feature (1)..(25): SEQ ID NO: 6331; WAN024BVH; Start 585; Stop 609
tgataagagtgaaagagcagaaaga

SEQ ID NO: 435598 - DNA, 25 bp, Artificial
  probe
  misc_feature (1)..(25): SEQ ID NO: 6331; WAN024BVH; Start 440; Stop 464
cttctattggagggatattgtcagg

SEQ ID NO: 435599 - DNA, 25 bp, Artificial
  probe
  misc_feature (1)..(25): SEQ ID NO: 6331; WAN024BVH; Start 436; Stop 460
ggaacttctattggagggatattgt

SEQ ID NO: 435600 - DNA, 25 bp, Artificial
  probe
  misc_feature (1)..(25): SEQ ID NO: 6331; WAN024BVH; Start 1004; Stop 1028
tctatggcatttctcaaacttccta

SEQ ID NO: 435601 - DNA, 25 bp, Artificial
  probe
  misc_feature (1)..(25): SEQ ID NO: 6331; WAN024BVH; Start 1002; Stop 1026
tttctatggcatttctcaaacttcc

SEQ ID NO: 435602 - DNA, 25 bp, Artificial
  probe
  misc_feature (1)..(25): SEQ ID NO: 6331; WAN024BVH; Start 580; Stop 604
tttgttgataagagtgaaagagcag

SEQ ID NO: 435603 - DNA, 25 bp, Artificial
  probe
  misc_feature (1)..(25): SEQ ID NO: 6331; WAN024BVH; Start 439; Stop 463
acttctattggagggatattgtcag

SEQ ID NO: 435604 - DNA, 25 bp, Artificial
  probe
  misc_feature (1)..(25): SEQ ID NO: 6331; WAN024BVH; Start 1049; Stop 1073
gaggatttattggaggttggctatt

SEQ ID NO: 435605 - DNA, 25 bp, Artificial
  probe
  misc_feature (1)..(25): SEQ ID NO: 6331; WAN024BVH; Start 1003; Stop 1027
ttctatggcatttctcaaacttcct

SEQ ID NO: 435606 - DNA, 25 bp, Artificial
  probe
  misc_feature (1)..(25): SEQ ID NO: 6331; WAN024BVH; Start 435; Stop 459
aggaacttctattggagggatattg

SEQ ID NO: 435607 - DNA, 25 bp, Artificial
  probe
  misc_feature (1)..(25): SEQ ID NO: 6331; WAN024BVH; Start 388; Stop 412
aaagacagagtagttacgatttcct

SEQ ID NO: 435608 - DNA, 25 bp, Artificial
  probe
  misc_feature (1)..(25): SEQ ID NO: 6331; WAN024BVH; Start 583; Stop 607
gttgataagagtgaaagagcagaaa

SEQ ID NO: 435609 - DNA, 25 bp, Artificial
  probe
  misc_feature (1)..(25): SEQ ID NO: 6331; WAN024BVH; Start 944; Stop 968
catcaattacacaagagttaatgga

SEQ ID NO: 435610 - DNA, 25 bp, Artificial
  probe
  misc_feature (1)..(25): SEQ ID NO: 6331; WAN024BVH; Start 943; Stop 967
tcatcaattacacaagagttaatgg

SEQ ID NO: 435611 - DNA, 25 bp, Artificial
  probe
  misc_feature (1)..(25): SEQ ID NO: 6331; WAN024BVH; Start 654; Stop 678
tggtatcttctcaggtttaattgct

SEQ ID NO: 435612 - DNA, 25 bp, Artificial
  probe
  misc_feature (1)..(25): SEQ ID NO: 6331; WAN024BVH; Start 438; Stop 462
aacttctattggagggatattgtca

SEQ ID NO: 435613 - DNA, 25 bp, Artificial
  probe
  misc_feature (1)..(25): SEQ ID NO: 6332; WAN024D5S; Start 76; Stop 100
aattcatcatctgtcatcgcttcaa

SEQ ID NO: 435614 - DNA, 25 bp, Artificial
  probe
  misc_feature (1)..(25): SEQ ID NO: 6332; WAN024D5S; Start 77; Stop 101
attcatcatctgtcatcgcttcaag

SEQ ID NO: 435615 - DNA, 25 bp, Artificial
  probe
  misc_feature (1)..(25): SEQ ID NO: 6332; WAN024D5S; Start 111; Stop 135
gaatgcttcaagaactgttggaact

SEQ ID NO: 435616 - DNA, 25 bp, Artificial
  probe
  misc_feature (1)..(25): SEQ ID NO: 6332; WAN024D5S; Start 112; Stop 136
aatgcttcaagaactgttggaactg

SEQ ID NO: 435617 - DNA, 25 bp, Artificial
  probe
  misc_feature (1)..(25): SEQ ID NO: 6332; WAN024D5S; Start 79; Stop 103
tcatcatctgtcatcgcttcaagtt

SEQ ID NO: 435618 - DNA, 25 bp, Artificial
  probe
  misc_feature (1)..(25): SEQ ID NO: 6332; WAN024D5S; Start 78; Stop 102
ttcatcatctgtcatcgcttcaagt

SEQ ID NO: 435619 - DNA, 25 bp, Artificial
  probe
  misc_feature (1)..(25): SEQ ID NO: 6332; WAN024D5S; Start 74; Stop 98
caaattcatcatctgtcatcgcttc

SEQ ID NO: 435620 - DNA, 25 bp, Artificial
  probe
  misc_feature (1)..(25): SEQ ID NO: 6332; WAN024D5S; Start 198; Stop 222
atctgtcaatgggataatctcatct

SEQ ID NO: 435621 - DNA, 25 bp, Artificial
  probe
  misc_feature (1)..(25): SEQ ID NO: 6332; WAN024D5S; Start 75; Stop 99
aaattcatcatctgtcatcgcttca

SEQ ID NO: 435622 - DNA, 25 bp, Artificial
  probe
  misc_feature (1)..(25): SEQ ID NO: 6332; WAN024D5S; Start 39; Stop 63
gactgctttaatttgtgggaagata

SEQ ID NO: 435623 - DNA, 25 bp, Artificial
  probe
  misc_feature (1)..(25): SEQ ID NO: 6332; WAN024D5S; Start 116; Stop 140
cttcaagaactgttggaactgtttc

SEQ ID NO: 435624 - DNA, 25 bp, Artificial
  probe
  misc_feature (1)..(25): SEQ ID NO: 6332; WAN024D5S; Start 201; Stop 225
tgtcaatgggataatctcatctact

SEQ ID NO: 435625 - DNA, 25 bp, Artificial
  probe
  misc_feature (1)..(25): SEQ ID NO: 6332; WAN024D5S; Start 202; Stop 226
gtcaatgggataatctcatctactg

SEQ ID NO: 435626 - DNA, 25 bp, Artificial
  probe
  misc_feature (1)..(25): SEQ ID NO: 6332; WAN024D5S; Start 200; Stop 224
ctgtcaatgggataatctcatctac

SEQ ID NO: 435627 - DNA, 25 bp, Artificial
  probe
  misc_feature (1)..(25): SEQ ID NO: 6332; WAN024D5S; Start 113; Stop 137
atgcttcaagaactgttggaactgt

SEQ ID NO: 435628 - DNA, 25 bp, Artificial
  probe
  misc_feature (1)..(25): SEQ ID NO: 6332; WAN024D5S; Start 165; Stop 189
ttctgtcaattctgggaaatctgag

SEQ ID NO: 435629 - DNA, 25 bp, Artificial
  probe
  misc_feature (1)..(25): SEQ ID NO: 6332; WAN024D5S; Start 164; Stop 188
cttctgtcaattctgggaaatctga

SEQ ID NO: 435630 - DNA, 25 bp, Artificial
  probe
  misc_feature (1)..(25): SEQ ID NO: 6332; WAN024D5S; Start 35; Stop 59
tttggactgctttaatttgtgggaa

SEQ ID NO: 435631 - DNA, 25 bp, Artificial
  probe
  misc_feature (1)..(25): SEQ ID NO: 6332; WAN024D5S; Start 216; Stop 240
ctcatctactgatttcatttgtggt

SEQ ID NO: 435632 - DNA, 25 bp, Artificial
  probe
  misc_feature (1)..(25): SEQ ID NO: 6332; WAN024D5S; Start 199; Stop 223
tctgtcaatgggataatctcatcta

SEQ ID NO: 435633 - DNA, 25 bp, Artificial
  probe
  misc_feature (1)..(25): SEQ ID NO: 6332; WAN024D5S; Start 117; Stop 141
ttcaagaactgttggaactgtttca

SEQ ID NO: 435634 - DNA, 25 bp, Artificial
  probe
  misc_feature (1)..(25): SEQ ID NO: 6332; WAN024D5S; Start 40; Stop 64
actgctttaatttgtgggaagatat

SEQ ID NO: 435635 - DNA, 25 bp, Artificial
  probe
  misc_feature (1)..(25): SEQ ID NO: 6332; WAN024D5S; Start 69; Stop 93
tgtcacaaattcatcatctgtcatc

SEQ ID NO: 435636 - DNA, 25 bp, Artificial
  probe
  misc_feature (1)..(25): SEQ ID NO: 6332; WAN024D5S; Start 68; Stop 92
ctgtcacaaattcatcatctgtcat

SEQ ID NO: 435637 - DNA, 25 bp, Artificial
  probe
  misc_feature (1)..(25): SEQ ID NO: 6332; WAN024D5S; Start 67; Stop 91
tctgtcacaaattcatcatctgtca

SEQ ID NO: 435638 - DNA, 25 bp, Artificial
  probe
  misc_feature (1)..(25): SEQ ID NO: 6332; WAN024D5S; Start 66; Stop 90
ttctgtcacaaattcatcatctgtc

SEQ ID NO: 435639 - DNA, 25 bp, Artificial
  probe
  misc_feature (1)..(25): SEQ ID NO: 6332; WAN024D5S; Start 38; Stop 62
ggactgctttaatttgtgggaagat

SEQ ID NO: 435640 - DNA, 25 bp, Artificial
  probe
  misc_feature (1)..(25): SEQ ID NO: 6332; WAN024D5S; Start 215; Stop 239
tctcatctactgatttcatttgtgg

SEQ ID NO: 435641 - DNA, 25 bp, Artificial
  probe
  misc_feature (1)..(25): SEQ ID NO: 6332; WAN024D5S; Start 80; Stop 104
catcatctgtcatcgcttcaagttt

SEQ ID NO: 435642 - DNA, 25 bp, Artificial
  probe
  misc_feature (1)..(25): SEQ ID NO: 6332; WAN024D5S; Start 70; Stop 94
gtcacaaattcatcatctgtcatcg

SEQ ID NO: 435643 - DNA, 25 bp, Artificial
  probe
  misc_feature (1)..(25): SEQ ID NO: 6332; WAN024D5S; Start 217; Stop 241
tcatctactgatttcatttgtggtt

SEQ ID NO: 435644 - DNA, 25 bp, Artificial
  probe
  misc_feature (1)..(25): SEQ ID NO: 6332; WAN024D5S; Start 114; Stop 138
tgcttcaagaactgttggaactgtt

SEQ ID NO: 435645 - DNA, 25 bp, Artificial
  probe
  misc_feature (1)..(25): SEQ ID NO: 6332; WAN024D5S; Start 65; Stop 89
tttctgtcacaaattcatcatctgt

SEQ ID NO: 435646 - DNA, 25 bp, Artificial
  probe
  misc_feature (1)..(25): SEQ ID NO: 6333; WAN024BUX; Start 8; Stop 32
gtgattacgaagaagtgaattggtc

SEQ ID NO: 435647 - DNA, 25 bp, Artificial
  probe
  misc_feature (1)..(25): SEQ ID NO: 6333; WAN024BUX; Start 7; Stop 31
agtgattacgaagaagtgaattggt

SEQ ID NO: 435648 - DNA, 25 bp, Artificial
  probe
  misc_feature (1)..(25): SEQ ID NO: 6333; WAN024BUX; Start 6; Stop 30
aagtgattacgaagaagtgaattgg

SEQ ID NO: 435649 - DNA, 25 bp, Artificial
  probe
  misc_feature (1)..(25): SEQ ID NO: 6333; WAN024BUX; Start 18; Stop 42
agaagtgaattggtcagagtattgt

SEQ ID NO: 435650 - DNA, 25 bp, Artificial
  probe
  misc_feature (1)..(25): SEQ ID NO: 6333; WAN024BUX; Start 10; Stop 34
gattacgaagaagtgaattggtcag

SEQ ID NO: 435651 - DNA, 25 bp, Artificial
  probe
  misc_feature (1)..(25): SEQ ID NO: 6333; WAN024BUX; Start 11; Stop 35
attacgaagaagtgaattggtcaga

SEQ ID NO: 435652 - DNA, 25 bp, Artificial
  probe
  misc_feature (1)..(25): SEQ ID NO: 6333; WAN024BUX; Start 9; Stop 33
tgattacgaagaagtgaattggtca

SEQ ID NO: 435653 - DNA, 25 bp, Artificial
  probe
  misc_feature (1)..(25): SEQ ID NO: 6333; WAN024BUX; Start 15; Stop 39
cgaagaagtgaattggtcagagtat

SEQ ID NO: 435654 - DNA, 25 bp, Artificial
  probe
  misc_feature (1)..(25): SEQ ID NO: 6333; WAN024BUX; Start 19; Stop 43
gaagtgaattggtcagagtattgtt

SEQ ID NO: 435655 - DNA, 25 bp, Artificial
  probe
  misc_feature (1)..(25): SEQ ID NO: 6333; WAN024BUX; Start 12; Stop 36
ttacgaagaagtgaattggtcagag

SEQ ID NO: 435656 - DNA, 25 bp, Artificial
  probe
  misc_feature (1)..(25): SEQ ID NO: 6333; WAN024BUX; Start 22; Stop 46
gtgaattggtcagagtattgttaca

SEQ ID NO: 435657 - DNA, 25 bp, Artificial
  probe
  misc_feature (1)..(25): SEQ ID NO: 6333; WAN024BUX; Start 17; Stop 41
aagaagtgaattggtcagagtattg

SEQ ID NO: 435658 - DNA, 25 bp, Artificial
  probe
  misc_feature (1)..(25): SEQ ID NO: 6333; WAN024BUX; Start 21; Stop 45
agtgaattggtcagagtattgttac

SEQ ID NO: 435659 - DNA, 25 bp, Artificial
  probe
  misc_feature (1)..(25): SEQ ID NO: 6333; WAN024BUX; Start 16; Stop 40
gaagaagtgaattggtcagagtatt

SEQ ID NO: 435660 - DNA, 25 bp, Artificial
  probe
  misc_feature (1)..(25): SEQ ID NO: 6333; WAN024BUX; Start 27; Stop 51
ttggtcagagtattgttacaaggaa

SEQ ID NO: 435661 - DNA, 25 bp, Artificial
  probe
  misc_feature (1)..(25): SEQ ID NO: 6333; WAN024BUX; Start 26; Stop 50
attggtcagagtattgttacaagga

SEQ ID NO: 435662 - DNA, 25 bp, Artificial
  probe
  misc_feature (1)..(25): SEQ ID NO: 6333; WAN024BUX; Start 14; Stop 38
acgaagaagtgaattggtcagagta

SEQ ID NO: 435663 - DNA, 25 bp, Artificial
  probe
  misc_feature (1)..(25): SEQ ID NO: 6333; WAN024BUX; Start 13; Stop 37
tacgaagaagtgaattggtcagagt

SEQ ID NO: 435664 - DNA, 25 bp, Artificial
  probe
  misc_feature (1)..(25): SEQ ID NO: 6333; WAN024BUX; Start 25; Stop 49
aattggtcagagtattgttacaagg

SEQ ID NO: 435665 - DNA, 25 bp, Artificial
  probe
  misc_feature (1)..(25): SEQ ID NO: 6333; WAN024BUX; Start 20; Stop 44
aagtgaattggtcagagtattgtta

SEQ ID NO: 435666 - DNA, 25 bp, Artificial
  probe
  misc_feature (1)..(25): SEQ ID NO: 6333; WAN024BUX; Start 23; Stop 47
tgaattggtcagagtattgttacaa

SEQ ID NO: 435667 - DNA, 25 bp, Artificial
  probe
  misc_feature (1)..(25): SEQ ID NO: 6333; WAN024BUX; Start 24; Stop 48
gaattggtcagagtattgttacaag

SEQ ID NO: 435668 - DNA, 25 bp, Artificial
  probe
  misc_feature (1)..(25): SEQ ID NO: 6333; WAN024BUX; Start 90; Stop 114
gtatgccaaaggattgatgcttatc

SEQ ID NO: 435669 - DNA, 25 bp, Artificial
  probe
  misc_feature (1)..(25): SEQ ID NO: 6333; WAN024BUX; Start 89; Stop 113
ggtatgccaaaggattgatgcttat

SEQ ID NO: 435670 - DNA, 25 bp, Artificial
  probe
  misc_feature (1)..(25): SEQ ID NO: 6333; WAN024BUX; Start 5; Stop 29
aaagtgattacgaagaagtgaattg

SEQ ID NO: 435671 - DNA, 25 bp, Artificial
  probe
  misc_feature (1)..(25): SEQ ID NO: 6333; WAN024BUX; Start 164; Stop 188
acatgacttctgaggagattgaaat

SEQ ID NO: 435672 - DNA, 25 bp, Artificial
  probe
  misc_feature (1)..(25): SEQ ID NO: 6333; WAN024BUX; Start 163; Stop 187
aacatgacttctgaggagattgaaa

SEQ ID NO: 435673 - DNA, 25 bp, Artificial
  probe
  misc_feature (1)..(25): SEQ ID NO: 6333; WAN024BUX; Start 162; Stop 186
aaacatgacttctgaggagattgaa

SEQ ID NO: 435674 - DNA, 25 bp, Artificial
  probe
  misc_feature (1)..(25): SEQ ID NO: 6333; WAN024BUX; Start 28; Stop 52
tggtcagagtattgttacaaggaaa

SEQ ID NO: 435675 - DNA, 25 bp, Artificial
  probe
  misc_feature (1)..(25): SEQ ID NO: 6333; WAN024BUX; Start 165; Stop 189
catgacttctgaggagattgaaatc

SEQ ID NO: 435676 - DNA, 25 bp, Artificial
  probe
  misc_feature (1)..(25): SEQ ID NO: 6333; WAN024BUX; Start 65; Stop 89
aaacttggtgggttgatacttcatg

SEQ ID NO: 435677 - DNA, 25 bp, Artificial
  probe
  misc_feature (1)..(25): SEQ ID NO: 6333; WAN024BUX; Start 80; Stop 104
atacttcatggtatgccaaaggatt

SEQ ID NO: 435678 - DNA, 25 bp, Artificial
  probe
  misc_feature (1)..(25): SEQ ID NO: 6333; WAN024BUX; Start 76; Stop 100
gttgatacttcatggtatgccaaag

SEQ ID NO: 435679 - DNA, 25 bp, Artificial
  probe
  misc_feature (1)..(25): SEQ ID NO: 6334; WAN024BUA; Start 786; Stop 810
aattgacttggataataagacggtg

SEQ ID NO: 435680 - DNA, 25 bp, Artificial
  probe
  misc_feature (1)..(25): SEQ ID NO: 6334; WAN024BUA; Start 787; Stop 811
attgacttggataataagacggtgc

SEQ ID NO: 435681 - DNA, 25 bp, Artificial
  probe
  misc_feature (1)..(25): SEQ ID NO: 6334; WAN024BUA; Start 615; Stop 639
ctacgatacggtgctatataagacg

SEQ ID NO: 435682 - DNA, 25 bp, Artificial
  probe
  misc_feature (1)..(25): SEQ ID NO: 6334; WAN024BUA; Start 614; Stop 638
tctacgatacggtgctatataagac

SEQ ID NO: 435683 - DNA, 25 bp, Artificial
  probe
  misc_feature (1)..(25): SEQ ID NO: 6334; WAN024BUA; Start 791; Stop 815
acttggataataagacggtgctcat

SEQ ID NO: 435684 - DNA, 25 bp, Artificial
  probe
  misc_feature (1)..(25): SEQ ID NO: 6334; WAN024BUA; Start 904; Stop 928
catatagacgctagaatgcttagtt

SEQ ID NO: 435685 - DNA, 25 bp, Artificial
  probe
  misc_feature (1)..(25): SEQ ID NO: 6334; WAN024BUA; Start 788; Stop 812
ttgacttggataataagacggtgct

SEQ ID NO: 435686 - DNA, 25 bp, Artificial
  probe
  misc_feature (1)..(25): SEQ ID NO: 6334; WAN024BUA; Start 613; Stop 637
ttctacgatacggtgctatataaga

SEQ ID NO: 435687 - DNA, 25 bp, Artificial
  probe
  misc_feature (1)..(25): SEQ ID NO: 6334; WAN024BUA; Start 796; Stop 820
gataataagacggtgctcatgctac

SEQ ID NO: 435688 - DNA, 25 bp, Artificial
  probe
  misc_feature (1)..(25): SEQ ID NO: 6334; WAN024BUA; Start 994; Stop 1018
actcatgctagtatcttgctcaatg

SEQ ID NO: 435689 - DNA, 25 bp, Artificial
  probe
  misc_feature (1)..(25): SEQ ID NO: 6334; WAN024BUA; Start 993; Stop 1017
cactcatgctagtatcttgctcaat

SEQ ID NO: 435690 - DNA, 25 bp, Artificial
  probe
  misc_feature (1)..(25): SEQ ID NO: 6334; WAN024BUA; Start 785; Stop 809
taattgacttggataataagacggt

SEQ ID NO: 435691 - DNA, 25 bp, Artificial
  probe
  misc_feature (1)..(25): SEQ ID NO: 6334; WAN024BUA; Start 616; Stop 640
tacgatacggtgctatataagacgc

SEQ ID NO: 435692 - DNA, 25 bp, Artificial
  probe
  misc_feature (1)..(25): SEQ ID NO: 6334; WAN024BUA; Start 792; Stop 816
cttggataataagacggtgctcatg

SEQ ID NO: 435693 - DNA, 25 bp, Artificial
  probe
  misc_feature (1)..(25): SEQ ID NO: 6334; WAN024BUA; Start 790; Stop 814
gacttggataataagacggtgctca

SEQ ID NO: 435694 - DNA, 25 bp, Artificial
  probe
  misc_feature (1)..(25): SEQ ID NO: 6334; WAN024BUA; Start 789; Stop 813
tgacttggataataagacggtgctc

SEQ ID NO: 435695 - DNA, 25 bp, Artificial
  probe
  misc_feature (1)..(25): SEQ ID NO: 6334; WAN024BUA; Start 784; Stop 808
gtaattgacttggataataagacgg

SEQ ID NO: 435696 - DNA, 25 bp, Artificial
  probe
  misc_feature (1)..(25): SEQ ID NO: 6334; WAN024BUA; Start 783; Stop 807
ggtaattgacttggataataagacg

SEQ ID NO: 435697 - DNA, 25 bp, Artificial
  probe
  misc_feature (1)..(25): SEQ ID NO: 6334; WAN024BUA; Start 995; Stop 1019
ctcatgctagtatcttgctcaatgc

SEQ ID NO: 435698 - DNA, 25 bp, Artificial
  probe
  misc_feature (1)..(25): SEQ ID NO: 6334; WAN024BUA; Start 1001; Stop 1025
ctagtatcttgctcaatgctggact

SEQ ID NO: 435699 - DNA, 25 bp, Artificial
  probe
  misc_feature (1)..(25): SEQ ID NO: 6334; WAN024BUA; Start 1002; Stop 1026
tagtatcttgctcaatgctggacta

SEQ ID NO: 435700 - DNA, 25 bp, Artificial
  probe
  misc_feature (1)..(25): SEQ ID NO: 6334; WAN024BUA; Start 1003; Stop 1027
agtatcttgctcaatgctggactac

SEQ ID NO: 435701 - DNA, 25 bp, Artificial
  probe
  misc_feature (1)..(25): SEQ ID NO: 6334; WAN024BUA; Start 430; Stop 454
tcgctaaacaaacgcatacttaaat

SEQ ID NO: 435702 - DNA, 25 bp, Artificial
  probe
  misc_feature (1)..(25): SEQ ID NO: 6334; WAN024BUA; Start 1092; Stop 1116
ccacctatccaaagacaatcagaaa

SEQ ID NO: 435703 - DNA, 25 bp, Artificial
  probe
  misc_feature (1)..(25): SEQ ID NO: 6334; WAN024BUA; Start 827; Stop 851
ataaagcaagacaatcccaaatagg

SEQ ID NO: 435704 - DNA, 25 bp, Artificial
  probe
  misc_feature (1)..(25): SEQ ID NO: 6334; WAN024BUA; Start 992; Stop 1016
acactcatgctagtatcttgctcaa

SEQ ID NO: 435705 - DNA, 25 bp, Artificial
  probe
  misc_feature (1)..(25): SEQ ID NO: 6334; WAN024BUA; Start 429; Stop 453
ctcgctaaacaaacgcatacttaaa

SEQ ID NO: 435706 - DNA, 25 bp, Artificial
  probe
  misc_feature (1)..(25): SEQ ID NO: 6334; WAN024BUA; Start 997; Stop 1021
catgctagtatcttgctcaatgctg

SEQ ID NO: 435707 - DNA, 25 bp, Artificial
  probe
  misc_feature (1)..(25): SEQ ID NO: 6334; WAN024BUA; Start 996; Stop 1020
tcatgctagtatcttgctcaatgct

SEQ ID NO: 435708 - DNA, 25 bp, Artificial
  probe
  misc_feature (1)..(25): SEQ ID NO: 6334; WAN024BUA; Start 795; Stop 819
ggataataagacggtgctcatgcta

SEQ ID NO: 435709 - DNA, 25 bp, Artificial
  probe
  misc_feature (1)..(25): SEQ ID NO: 6334; WAN024BUA; Start 618; Stop 642
cgatacggtgctatataagacgctt

SEQ ID NO: 435710 - DNA, 25 bp, Artificial
  probe
  misc_feature (1)..(25): SEQ ID NO: 6334; WAN024BUA; Start 1018; Stop 1042
gctggactaccttacaaagagatac

SEQ ID NO: 435711 - DNA, 25 bp, Artificial
  probe
  misc_feature (1)..(25): SEQ ID NO: 6334; WAN024BUA; Start 76; Stop 100
gtaacaggtaagaaagtcaagacga

SEQ ID NO: 435712 - DNA, 25 bp, Artificial
  probe
  misc_feature (1)..(25): SEQ ID NO: 6335; WAN024BR3; Start 117; Stop 141
cacaacaaggacagatacaatgaat

SEQ ID NO: 435713 - DNA, 25 bp, Artificial
  probe
  misc_feature (1)..(25): SEQ ID NO: 6335; WAN024BR3; Start 347; Stop 371
tacagacaatgaagattccgacaat

SEQ ID NO: 435714 - DNA, 25 bp, Artificial
  probe
  misc_feature (1)..(25): SEQ ID NO: 6335; WAN024BR3; Start 206; Stop 230
aagtcaacattatagatacgccagg

SEQ ID NO: 435715 - DNA, 25 bp, Artificial
  probe
  misc_feature (1)..(25): SEQ ID NO: 6335; WAN024BR3; Start 346; Stop 370
ctacagacaatgaagattccgacaa

SEQ ID NO: 435716 - DNA, 25 bp, Artificial
  probe
  misc_feature (1)..(25): SEQ ID NO: 6335; WAN024BR3; Start 1281; Stop 1305
agcagaatataccatccacatagaa

SEQ ID NO: 435717 - DNA, 25 bp, Artificial
  probe
  misc_feature (1)..(25): SEQ ID NO: 6335; WAN024BR3; Start 1280; Stop 1304
aagcagaatataccatccacataga

SEQ ID NO: 435718 - DNA, 25 bp, Artificial
  probe
  misc_feature (1)..(25): SEQ ID NO: 6335; WAN024BR3; Start 1870; Stop 1894
ccgaatagccgtatagataaggttc

SEQ ID NO: 435719 - DNA, 25 bp, Artificial
  probe
  misc_feature (1)..(25): SEQ ID NO: 6335; WAN024BR3; Start 903; Stop 927
attatattcatccgatacagcctgc

SEQ ID NO: 435720 - DNA, 25 bp, Artificial
  probe
  misc_feature (1)..(25): SEQ ID NO: 6335; WAN024BR3; Start 1282; Stop 1306
gcagaatataccatccacatagaag

SEQ ID NO: 435721 - DNA, 25 bp, Artificial
  probe
  misc_feature (1)..(25): SEQ ID NO: 6335; WAN024BR3; Start 348; Stop 372
acagacaatgaagattccgacaatt

SEQ ID NO: 435722 - DNA, 25 bp, Artificial
  probe
  misc_feature (1)..(25): SEQ ID NO: 6335; WAN024BR3; Start 1595; Stop 1619
ggacagaactattagagccatatct

SEQ ID NO: 435723 - DNA, 25 bp, Artificial
  probe
  misc_feature (1)..(25): SEQ ID NO: 6335; WAN024BR3; Start 118; Stop 142
acaacaaggacagatacaatgaatt

SEQ ID NO: 435724 - DNA, 25 bp, Artificial
  probe
  misc_feature (1)..(25): SEQ ID NO: 6335; WAN024BR3; Start 344; Stop 368
cactacagacaatgaagattccgac

SEQ ID NO: 435725 - DNA, 25 bp, Artificial
  probe
  misc_feature (1)..(25): SEQ ID NO: 6335; WAN024BR3; Start 9; Stop 33
aattaacttaggcattctggctcac

SEQ ID NO: 435726 - DNA, 25 bp, Artificial
  probe
  misc_feature (1)..(25): SEQ ID NO: 6335; WAN024BR3; Start 902; Stop 926
aattatattcatccgatacagcctg

SEQ ID NO: 435727 - DNA, 25 bp, Artificial
  probe
  misc_feature (1)..(25): SEQ ID NO: 6335; WAN024BR3; Start 1285; Stop 1309
gaatataccatccacatagaagtcc

SEQ ID NO: 435728 - DNA, 25 bp, Artificial
  probe
  misc_feature (1)..(25): SEQ ID NO: 6335; WAN024BR3; Start 345; Stop 369
actacagacaatgaagattccgaca

SEQ ID NO: 435729 - DNA, 25 bp, Artificial
  probe
  misc_feature (1)..(25): SEQ ID NO: 6335; WAN024BR3; Start 116; Stop 140
gcacaacaaggacagatacaatgaa

SEQ ID NO: 435730 - DNA, 25 bp, Artificial
  probe
  misc_feature (1)..(25): SEQ ID NO: 6335; WAN024BR3; Start 496; Stop 520
gtaacggacaatgacgatatggaac

SEQ ID NO: 435731 - DNA, 25 bp, Artificial
  probe
  misc_feature (1)..(25): SEQ ID NO: 6335; WAN024BR3; Start 1600; Stop 1624
gaactattagagccatatctccact

SEQ ID NO: 435732 - DNA, 25 bp, Artificial
  probe
  misc_feature (1)..(25): SEQ ID NO: 6335; WAN024BR3; Start 1599; Stop 1623
agaactattagagccatatctccac

SEQ ID NO: 435733 - DNA, 25 bp, Artificial
  probe
  misc_feature (1)..(25): SEQ ID NO: 6335; WAN024BR3; Start 1598; Stop 1622
cagaactattagagccatatctcca

SEQ ID NO: 435734 - DNA, 25 bp, Artificial
  probe
  misc_feature (1)..(25): SEQ ID NO: 6335; WAN024BR3; Start 1597; Stop 1621
acagaactattagagccatatctcc

SEQ ID NO: 435735 - DNA, 25 bp, Artificial
  probe
  misc_feature (1)..(25): SEQ ID NO: 6335; WAN024BR3; Start 1136; Stop 1160
tggatactacaacgcatgagattat

SEQ ID NO: 435736 - DNA, 25 bp, Artificial
  probe
  misc_feature (1)..(25): SEQ ID NO: 6335; WAN024BR3; Start 1135; Stop 1159
gtggatactacaacgcatgagatta

SEQ ID NO: 435737 - DNA, 25 bp, Artificial
  probe
  misc_feature (1)..(25): SEQ ID NO: 6335; WAN024BR3; Start 689; Stop 713
ttatagaagtgattgccagtaagtt

SEQ ID NO: 435738 - DNA, 25 bp, Artificial
  probe
  misc_feature (1)..(25): SEQ ID NO: 6335; WAN024BR3; Start 8; Stop 32
taattaacttaggcattctggctca

SEQ ID NO: 435739 - DNA, 25 bp, Artificial
  probe
  misc_feature (1)..(25): SEQ ID NO: 6335; WAN024BR3; Start 1601; Stop 1625
aactattagagccatatctccactt

SEQ ID NO: 435740 - DNA, 25 bp, Artificial
  probe
  misc_feature (1)..(25): SEQ ID NO: 6335; WAN024BR3; Start 904; Stop 928
ttatattcatccgatacagcctgct

SEQ ID NO: 435741 - DNA, 25 bp, Artificial
  probe
  misc_feature (1)..(25): SEQ ID NO: 6335; WAN024BR3; Start 687; Stop 711
gcttatagaagtgattgccagtaag

SEQ ID NO: 435742 - DNA, 25 bp, Artificial
  probe
  misc_feature (1)..(25): SEQ ID NO: 6335; WAN024BR3; Start 497; Stop 521
taacggacaatgacgatatggaaca

SEQ ID NO: 435743 - DNA, 25 bp, Artificial
  probe
  misc_feature (1)..(25): SEQ ID NO: 6335; WAN024BR3; Start 493; Stop 517
aatgtaacggacaatgacgatatgg

SEQ ID NO: 435744 - DNA, 25 bp, Artificial
  probe
  misc_feature (1)..(25): SEQ ID NO: 6335; WAN024BR3; Start 7; Stop 31
ataattaacttaggcattctggctc

SEQ ID NO: 435745 - DNA, 25 bp, Artificial
  probe
  misc_feature (1)..(25): SEQ ID NO: 6336; WAN024DJE; Start 290; Stop 314
tggaagcagttattgagcagattat

SEQ ID NO: 435746 - DNA, 25 bp, Artificial
  probe
  misc_feature (1)..(25): SEQ ID NO: 6336; WAN024DJE; Start 72; Stop 96
ggttatagcggtagatgttattcct

SEQ ID NO: 435747 - DNA, 25 bp, Artificial
  probe
  misc_feature (1)..(25): SEQ ID NO: 6336; WAN024DJE; Start 71; Stop 95
aggttatagcggtagatgttattcc

SEQ ID NO: 435748 - DNA, 25 bp, Artificial
  probe
  misc_feature (1)..(25): SEQ ID NO: 6336; WAN024DJE; Start 291; Stop 315
ggaagcagttattgagcagattatt

SEQ ID NO: 435749 - DNA, 25 bp, Artificial
  probe
  misc_feature (1)..(25): SEQ ID NO: 6336; WAN024DJE; Start 983; Stop 1007
gtcaatcatcaatccaaggtgttat

SEQ ID NO: 435750 - DNA, 25 bp, Artificial
  probe
  misc_feature (1)..(25): SEQ ID NO: 6336; WAN024DJE; Start 655; Stop 679
gaattggatacctatgcggagataa

SEQ ID NO: 435751 - DNA, 25 bp, Artificial
  probe
  misc_feature (1)..(25): SEQ ID NO: 6336; WAN024DJE; Start 289; Stop 313
gtggaagcagttattgagcagatta

SEQ ID NO: 435752 - DNA, 25 bp, Artificial
  probe
  misc_feature (1)..(25): SEQ ID NO: 6336; WAN024DJE; Start 74; Stop 98
ttatagcggtagatgttattcctga

SEQ ID NO: 435753 - DNA, 25 bp, Artificial
  probe
  misc_feature (1)..(25): SEQ ID NO: 6336; WAN024DJE; Start 73; Stop 97
gttatagcggtagatgttattcctg

SEQ ID NO: 435754 - DNA, 25 bp, Artificial
  probe
  misc_feature (1)..(25): SEQ ID NO: 6336; WAN024DJE; Start 75; Stop 99
tatagcggtagatgttattcctgaa

SEQ ID NO: 435755 - DNA, 25 bp, Artificial
  probe
  misc_feature (1)..(25): SEQ ID NO: 6336; WAN024DJE; Start 66; Stop 90
tcataaggttatagcggtagatgtt

SEQ ID NO: 435756 - DNA, 25 bp, Artificial
  probe
  misc_feature (1)..(25): SEQ ID NO: 6336; WAN024DJE; Start 982; Stop 1006
cgtcaatcatcaatccaaggtgtta

SEQ ID NO: 435757 - DNA, 25 bp, Artificial
  probe
  misc_feature (1)..(25): SEQ ID NO: 6336; WAN024DJE; Start 292; Stop 316
gaagcagttattgagcagattattg

SEQ ID NO: 435758 - DNA, 25 bp, Artificial
  probe
  misc_feature (1)..(25): SEQ ID NO: 6336; WAN024DJE; Start 65; Stop 89
atcataaggttatagcggtagatgt

SEQ ID NO: 435759 - DNA, 25 bp, Artificial
  probe
  misc_feature (1)..(25): SEQ ID NO: 6336; WAN024DJE; Start 951; Stop 975
cttaactatgaagagtggttcggat

SEQ ID NO: 435760 - DNA, 25 bp, Artificial
  probe
  misc_feature (1)..(25): SEQ ID NO: 6336; WAN024DJE; Start 954; Stop 978
aactatgaagagtggttcggataat

SEQ ID NO: 435761 - DNA, 25 bp, Artificial
  probe
  misc_feature (1)..(25): SEQ ID NO: 6336; WAN024DJE; Start 955; Stop 979
actatgaagagtggttcggataatt

SEQ ID NO: 435762 - DNA, 25 bp, Artificial
  probe
  misc_feature (1)..(25): SEQ ID NO: 6336; WAN024DJE; Start 60; Stop 84
gcaatatcataaggttatagcggta

SEQ ID NO: 435763 - DNA, 25 bp, Artificial
  probe
  misc_feature (1)..(25): SEQ ID NO: 6336; WAN024DJE; Start 70; Stop 94
aaggttatagcggtagatgttattc

SEQ ID NO: 435764 - DNA, 25 bp, Artificial
  probe
  misc_feature (1)..(25): SEQ ID NO: 6336; WAN024DJE; Start 1113; Stop 1137
taagtctagcagtcaagtgattgtt

SEQ ID NO: 435765 - DNA, 25 bp, Artificial
  probe
  misc_feature (1)..(25): SEQ ID NO: 6336; WAN024DJE; Start 1112; Stop 1136
ttaagtctagcagtcaagtgattgt

SEQ ID NO: 435766 - DNA, 25 bp, Artificial
  probe
  misc_feature (1)..(25): SEQ ID NO: 6336; WAN024DJE; Start 953; Stop 977
taactatgaagagtggttcggataa

SEQ ID NO: 435767 - DNA, 25 bp, Artificial
  probe
  misc_feature (1)..(25): SEQ ID NO: 6336; WAN024DJE; Start 952; Stop 976
ttaactatgaagagtggttcggata

SEQ ID NO: 435768 - DNA, 25 bp, Artificial
  probe
  misc_feature (1)..(25): SEQ ID NO: 6336; WAN024DJE; Start 984; Stop 1008
tcaatcatcaatccaaggtgttata

SEQ ID NO: 435769 - DNA, 25 bp, Artificial
  probe
  misc_feature (1)..(25): SEQ ID NO: 6336; WAN024DJE; Start 278; Stop 302
atacatctgttgtggaagcagttat

SEQ ID NO: 435770 - DNA, 25 bp, Artificial
  probe
  misc_feature (1)..(25): SEQ ID NO: 6336; WAN024DJE; Start 1114; Stop 1138
aagtctagcagtcaagtgattgttg

SEQ ID NO: 435771 - DNA, 25 bp, Artificial
  probe
  misc_feature (1)..(25): SEQ ID NO: 6336; WAN024DJE; Start 654; Stop 678
cgaattggatacctatgcggagata

SEQ ID NO: 435772 - DNA, 25 bp, Artificial
  probe
  misc_feature (1)..(25): SEQ ID NO: 6336; WAN024DJE; Start 650; Stop 674
ttaacgaattggatacctatgcgga

SEQ ID NO: 435773 - DNA, 25 bp, Artificial
  probe
  misc_feature (1)..(25): SEQ ID NO: 6336; WAN024DJE; Start 279; Stop 303
tacatctgttgtggaagcagttatt

SEQ ID NO: 435774 - DNA, 25 bp, Artificial
  probe
  misc_feature (1)..(25): SEQ ID NO: 6336; WAN024DJE; Start 734; Stop 758
gtagccattataacaatccgtcatt

SEQ ID NO: 435775 - DNA, 25 bp, Artificial
  probe
  misc_feature (1)..(25): SEQ ID NO: 6336; WAN024DJE; Start 733; Stop 757
ggtagccattataacaatccgtcat

SEQ ID NO: 435776 - DNA, 25 bp, Artificial
  probe
  misc_feature (1)..(25): SEQ ID NO: 6336; WAN024DJE; Start 559; Stop 583
cctgatgttgagaccttaattatgg

SEQ ID NO: 435777 - DNA, 25 bp, Artificial
  probe
  misc_feature (1)..(25): SEQ ID NO: 6336; WAN024DJE; Start 277; Stop 301
gatacatctgttgtggaagcagtta

SEQ ID NO: 435778 - DNA, 25 bp, Artificial
  probe
  misc_feature (1)..(25): SEQ ID NO: 6337; WAN024DJC; Start 48; Stop 72
aatcttactggctcaacatcatcaa

SEQ ID NO: 435779 - DNA, 25 bp, Artificial
  probe
  misc_feature (1)..(25): SEQ ID NO: 6337; WAN024DJC; Start 47; Stop 71
caatcttactggctcaacatcatca

SEQ ID NO: 435780 - DNA, 25 bp, Artificial
  probe
  misc_feature (1)..(25): SEQ ID NO: 6337; WAN024DJC; Start 49; Stop 73
atcttactggctcaacatcatcaag

SEQ ID NO: 435781 - DNA, 25 bp, Artificial
  probe
  misc_feature (1)..(25): SEQ ID NO: 6337; WAN024DJC; Start 65; Stop 89
atcatcaagttgttgccgtagatat

SEQ ID NO: 435782 - DNA, 25 bp, Artificial
  probe
  misc_feature (1)..(25): SEQ ID NO: 6337; WAN024DJC; Start 681; Stop 705
aggactagatactcaagcgattatt

SEQ ID NO: 435783 - DNA, 25 bp, Artificial
  probe
  misc_feature (1)..(25): SEQ ID NO: 6337; WAN024DJC; Start 680; Stop 704
aaggactagatactcaagcgattat

SEQ ID NO: 435784 - DNA, 25 bp, Artificial
  probe
  misc_feature (1)..(25): SEQ ID NO: 6337; WAN024DJC; Start 733; Stop 757
ggttctcactacaataatccttctt

SEQ ID NO: 435785 - DNA, 25 bp, Artificial
  probe
  misc_feature (1)..(25): SEQ ID NO: 6337; WAN024DJC; Start 6; Stop 30
aatagcagtagcaggtacaggatat

SEQ ID NO: 435786 - DNA, 25 bp, Artificial
  probe
  misc_feature (1)..(25): SEQ ID NO: 6337; WAN024DJC; Start 64; Stop 88
catcatcaagttgttgccgtagata

SEQ ID NO: 435787 - DNA, 25 bp, Artificial
  probe
  misc_feature (1)..(25): SEQ ID NO: 6337; WAN024DJC; Start 901; Stop 925
gctggatcttatgtaggcaatgatt

SEQ ID NO: 435788 - DNA, 25 bp, Artificial
  probe
  misc_feature (1)..(25): SEQ ID NO: 6337; WAN024DJC; Start 51; Stop 75
cttactggctcaacatcatcaagtt

SEQ ID NO: 435789 - DNA, 25 bp, Artificial
  probe
  misc_feature (1)..(25): SEQ ID NO: 6337; WAN024DJC; Start 7; Stop 31
atagcagtagcaggtacaggatatg

SEQ ID NO: 435790 - DNA, 25 bp, Artificial
  probe
  misc_feature (1)..(25): SEQ ID NO: 6337; WAN024DJC; Start 682; Stop 706
ggactagatactcaagcgattattg

SEQ ID NO: 435791 - DNA, 25 bp, Artificial
  probe
  misc_feature (1)..(25): SEQ ID NO: 6337; WAN024DJC; Start 46; Stop 70
gcaatcttactggctcaacatcatc

SEQ ID NO: 435792 - DNA, 25 bp, Artificial
  probe
  misc_feature (1)..(25): SEQ ID NO: 6337; WAN024DJC; Start 16; Stop 40
gcaggtacaggatatgttggattat

SEQ ID NO: 435793 - DNA, 25 bp, Artificial
  probe
  misc_feature (1)..(25): SEQ ID NO: 6337; WAN024DJC; Start 234; Stop 258
tattgcggctccaactaattatgat

SEQ ID NO: 435794 - DNA, 25 bp, Artificial
  probe
  misc_feature (1)..(25): SEQ ID NO: 6337; WAN024DJC; Start 233; Stop 257
ttattgcggctccaactaattatga

SEQ ID NO: 435795 - DNA, 25 bp, Artificial
  probe
  misc_feature (1)..(25): SEQ ID NO: 6337; WAN024DJC; Start 232; Stop 256
gttattgcggctccaactaattatg

SEQ ID NO: 435796 - DNA, 25 bp, Artificial
  probe
  misc_feature (1)..(25): SEQ ID NO: 6337; WAN024DJC; Start 50; Stop 74
tcttactggctcaacatcatcaagt

SEQ ID NO: 435797 - DNA, 25 bp, Artificial
  probe
  misc_feature (1)..(25): SEQ ID NO: 6337; WAN024DJC; Start 732; Stop 756
aggttctcactacaataatccttct

SEQ ID NO: 435798 - DNA, 25 bp, Artificial
  probe
  misc_feature (1)..(25): SEQ ID NO: 6337; WAN024DJC; Start 15; Stop 39
agcaggtacaggatatgttggatta

SEQ ID NO: 435799 - DNA, 25 bp, Artificial
  probe
  misc_feature (1)..(25): SEQ ID NO: 6337; WAN024DJC; Start 14; Stop 38
tagcaggtacaggatatgttggatt

SEQ ID NO: 435800 - DNA, 25 bp, Artificial
  probe
  misc_feature (1)..(25): SEQ ID NO: 6337; WAN024DJC; Start 235; Stop 259
attgcggctccaactaattatgatc

SEQ ID NO: 435801 - DNA, 25 bp, Artificial
  probe
  misc_feature (1)..(25): SEQ ID NO: 6337; WAN024DJC; Start 695; Stop 719
aagcgattattgatggagtttgttt

SEQ ID NO: 435802 - DNA, 25 bp, Artificial
  probe
  misc_feature (1)..(25): SEQ ID NO: 6337; WAN024DJC; Start 13; Stop 37
gtagcaggtacaggatatgttggat

SEQ ID NO: 435803 - DNA, 25 bp, Artificial
  probe
  misc_feature (1)..(25): SEQ ID NO: 6337; WAN024DJC; Start 462; Stop 486
tccgagtcgaattattataggtaca

SEQ ID NO: 435804 - DNA, 25 bp, Artificial
  probe
  misc_feature (1)..(25): SEQ ID NO: 6337; WAN024DJC; Start 1019; Stop 1043
aaggtattatgaagcgtttgaaagc

SEQ ID NO: 435805 - DNA, 25 bp, Artificial
  probe
  misc_feature (1)..(25): SEQ ID NO: 6337; WAN024DJC; Start 463; Stop 487
ccgagtcgaattattataggtacag

SEQ ID NO: 435806 - DNA, 25 bp, Artificial
  probe
  misc_feature (1)..(25): SEQ ID NO: 6337; WAN024DJC; Start 696; Stop 720
agcgattattgatggagtttgttta

SEQ ID NO: 435807 - DNA, 25 bp, Artificial
  probe
  misc_feature (1)..(25): SEQ ID NO: 6337; WAN024DJC; Start 1170; Stop 1194
tgatgagactttagaagatgtgagg

SEQ ID NO: 435808 - DNA, 25 bp, Artificial
  probe
  misc_feature (1)..(25): SEQ ID NO: 6337; WAN024DJC; Start 1171; Stop 1195
gatgagactttagaagatgtgaggg

SEQ ID NO: 435809 - DNA, 25 bp, Artificial
  probe
  misc_feature (1)..(25): SEQ ID NO: 6337; WAN024DJC; Start 778; Stop 802
cttcctaaagataccaagcaacttc

SEQ ID NO: 435810 - DNA, 25 bp, Artificial
  probe
  misc_feature (1)..(25): SEQ ID NO: 6337; WAN024DJC; Start 17; Stop 41
caggtacaggatatgttggattatt

SEQ ID NO: 435811 - DNA, 25 bp, Artificial
  probe
  misc_feature (1)..(25): SEQ ID NO: 6338; WAN024BU6; Start 439; Stop 463
aattacagtccacagattgatacaa

SEQ ID NO: 435812 - DNA, 25 bp, Artificial
  probe
  misc_feature (1)..(25): SEQ ID NO: 6338; WAN024BU6; Start 796; Stop 820
cttacaggtagaggaggaccatata

SEQ ID NO: 435813 - DNA, 25 bp, Artificial
  probe
  misc_feature (1)..(25): SEQ ID NO: 6338; WAN024BU6; Start 797; Stop 821
ttacaggtagaggaggaccatataa

SEQ ID NO: 435814 - DNA, 25 bp, Artificial
  probe
  misc_feature (1)..(25): SEQ ID NO: 6338; WAN024BU6; Start 352; Stop 376
ctcggcttcttcttgtttattactg

SEQ ID NO: 435815 - DNA, 25 bp, Artificial
  probe
  misc_feature (1)..(25): SEQ ID NO: 6338; WAN024BU6; Start 351; Stop 375
tctcggcttcttcttgtttattact

SEQ ID NO: 435816 - DNA, 25 bp, Artificial
  probe
  misc_feature (1)..(25): SEQ ID NO: 6338; WAN024BU6; Start 350; Stop 374
ctctcggcttcttcttgtttattac

SEQ ID NO: 435817 - DNA, 25 bp, Artificial
  probe
  misc_feature (1)..(25): SEQ ID NO: 6338; WAN024BU6; Start 223; Stop 247
gtagtcaacaacaaacagcaatcta

SEQ ID NO: 435818 - DNA, 25 bp, Artificial
  probe
  misc_feature (1)..(25): SEQ ID NO: 6338; WAN024BU6; Start 220; Stop 244
aaagtagtcaacaacaaacagcaat

SEQ ID NO: 435819 - DNA, 25 bp, Artificial
  probe
  misc_feature (1)..(25): SEQ ID NO: 6338; WAN024BU6; Start 225; Stop 249
agtcaacaacaaacagcaatctatt

SEQ ID NO: 435820 - DNA, 25 bp, Artificial
  probe
  misc_feature (1)..(25): SEQ ID NO: 6338; WAN024BU6; Start 217; Stop 241
aagaaagtagtcaacaacaaacagc

SEQ ID NO: 435821 - DNA, 25 bp, Artificial
  probe
  misc_feature (1)..(25): SEQ ID NO: 6338; WAN024BU6; Start 355; Stop 379
ggcttcttcttgtttattactggtt

SEQ ID NO: 435822 - DNA, 25 bp, Artificial
  probe
  misc_feature (1)..(25): SEQ ID NO: 6338; WAN024BU6; Start 226; Stop 250
gtcaacaacaaacagcaatctattc

SEQ ID NO: 435823 - DNA, 25 bp, Artificial
  probe
  misc_feature (1)..(25): SEQ ID NO: 6338; WAN024BU6; Start 221; Stop 245
aagtagtcaacaacaaacagcaatc

SEQ ID NO: 435824 - DNA, 25 bp, Artificial
  probe
  misc_feature (1)..(25): SEQ ID NO: 6338; WAN024BU6; Start 349; Stop 373
cctctcggcttcttcttgtttatta

SEQ ID NO: 435825 - DNA, 25 bp, Artificial
  probe
  misc_feature (1)..(25): SEQ ID NO: 6338; WAN024BU6; Start 227; Stop 251
tcaacaacaaacagcaatctattct

SEQ ID NO: 435826 - DNA, 25 bp, Artificial
  probe
  misc_feature (1)..(25): SEQ ID NO: 6338; WAN024BU6; Start 173; Stop 197
cctttggactttcggatttgtttaa

SEQ ID NO: 435827 - DNA, 25 bp, Artificial
  probe
  misc_feature (1)..(25): SEQ ID NO: 6338; WAN024BU6; Start 219; Stop 243
gaaagtagtcaacaacaaacagcaa

SEQ ID NO: 435828 - DNA, 25 bp, Artificial
  probe
  misc_feature (1)..(25): SEQ ID NO: 6338; WAN024BU6; Start 651; Stop 675
actattaccagaaccttcaaatccg

SEQ ID NO: 435829 - DNA, 25 bp, Artificial
  probe
  misc_feature (1)..(25): SEQ ID NO: 6338; WAN024BU6; Start 884; Stop 908
atttaacagtatggcgtcttgctaa

SEQ ID NO: 435830 - DNA, 25 bp, Artificial
  probe
  misc_feature (1)..(25): SEQ ID NO: 6338; WAN024BU6; Start 536; Stop 560
ttctttccaagggtgtccattattt

SEQ ID NO: 435831 - DNA, 25 bp, Artificial
  probe
  misc_feature (1)..(25): SEQ ID NO: 6338; WAN024BU6; Start 535; Stop 559
tttctttccaagggtgtccattatt

SEQ ID NO: 435832 - DNA, 25 bp, Artificial
  probe
  misc_feature (1)..(25): SEQ ID NO: 6338; WAN024BU6; Start 353; Stop 377
tcggcttcttcttgtttattactgg

SEQ ID NO: 435833 - DNA, 25 bp, Artificial
  probe
  misc_feature (1)..(25): SEQ ID NO: 6338; WAN024BU6; Start 224; Stop 248
tagtcaacaacaaacagcaatctat

SEQ ID NO: 435834 - DNA, 25 bp, Artificial
  probe
  misc_feature (1)..(25): SEQ ID NO: 6338; WAN024BU6; Start 222; Stop 246
agtagtcaacaacaaacagcaatct

SEQ ID NO: 435835 - DNA, 25 bp, Artificial
  probe
  misc_feature (1)..(25): SEQ ID NO: 6338; WAN024BU6; Start 172; Stop 196
acctttggactttcggatttgttta

SEQ ID NO: 435836 - DNA, 25 bp, Artificial
  probe
  misc_feature (1)..(25): SEQ ID NO: 6338; WAN024BU6; Start 228; Stop 252
caacaacaaacagcaatctattctt

SEQ ID NO: 435837 - DNA, 25 bp, Artificial
  probe
  misc_feature (1)..(25): SEQ ID NO: 6338; WAN024BU6; Start 502; Stop 526
tatcatcaagaagaagctgagattg

SEQ ID NO: 435838 - DNA, 25 bp, Artificial
  probe
  misc_feature (1)..(25): SEQ ID NO: 6338; WAN024BU6; Start 638; Stop 662
cagtagacgttcaactattaccaga

SEQ ID NO: 435839 - DNA, 25 bp, Artificial
  probe
  misc_feature (1)..(25): SEQ ID NO: 6338; WAN024BU6; Start 637; Stop 661
acagtagacgttcaactattaccag

SEQ ID NO: 435840 - DNA, 25 bp, Artificial
  probe
  misc_feature (1)..(25): SEQ ID NO: 6338; WAN024BU6; Start 636; Stop 660
aacagtagacgttcaactattacca

SEQ ID NO: 435841 - DNA, 25 bp, Artificial
  probe
  misc_feature (1)..(25): SEQ ID NO: 6338; WAN024BU6; Start 354; Stop 378
cggcttcttcttgtttattactggt

SEQ ID NO: 435842 - DNA, 25 bp, Artificial
  probe
  misc_feature (1)..(25): SEQ ID NO: 6338; WAN024BU6; Start 218; Stop 242
agaaagtagtcaacaacaaacagca

SEQ ID NO: 435843 - DNA, 25 bp, Artificial
  probe
  misc_feature (1)..(25): SEQ ID NO: 6338; WAN024BU6; Start 503; Stop 527
atcatcaagaagaagctgagattgc

SEQ ID NO: 435844 - DNA, 25 bp, Artificial
  probe
  misc_feature (1)..(25): SEQ ID NO: 6339; WAN024B8S; Start 33; Stop 57
cacaggttgctcaaaacactatttt

SEQ ID NO: 435845 - DNA, 25 bp, Artificial
  probe
  misc_feature (1)..(25): SEQ ID NO: 6339; WAN024B8S; Start 32; Stop 56
ccacaggttgctcaaaacactattt

SEQ ID NO: 435846 - DNA, 25 bp, Artificial
  probe
  misc_feature (1)..(25): SEQ ID NO: 6339; WAN024B8S; Start 46; Stop 70
aaacactattttgaggttgcagata

SEQ ID NO: 435847 - DNA, 25 bp, Artificial
  probe
  misc_feature (1)..(25): SEQ ID NO: 6339; WAN024B8S; Start 48; Stop 72
acactattttgaggttgcagataga

SEQ ID NO: 435848 - DNA, 25 bp, Artificial
  probe
  misc_feature (1)..(25): SEQ ID NO: 6339; WAN024B8S; Start 49; Stop 73
cactattttgaggttgcagatagag

SEQ ID NO: 435849 - DNA, 25 bp, Artificial
  probe
  misc_feature (1)..(25): SEQ ID NO: 6339; WAN024B8S; Start 47; Stop 71
aacactattttgaggttgcagatag

SEQ ID NO: 435850 - DNA, 25 bp, Artificial
  probe
  misc_feature (1)..(25): SEQ ID NO: 6339; WAN024B8S; Start 45; Stop 69
aaaacactattttgaggttgcagat

SEQ ID NO: 435851 - DNA, 25 bp, Artificial
  probe
  misc_feature (1)..(25): SEQ ID NO: 6339; WAN024B8S; Start 31; Stop 55
gccacaggttgctcaaaacactatt

SEQ ID NO: 435852 - DNA, 25 bp, Artificial
  probe
  misc_feature (1)..(25): SEQ ID NO: 6339; WAN024B8S; Start 29; Stop 53
tagccacaggttgctcaaaacacta

SEQ ID NO: 435853 - DNA, 25 bp, Artificial
  probe
  misc_feature (1)..(25): SEQ ID NO: 6339; WAN024B8S; Start 34; Stop 58
acaggttgctcaaaacactattttg

SEQ ID NO: 435854 - DNA, 25 bp, Artificial
  probe
  misc_feature (1)..(25): SEQ ID NO: 6339; WAN024B8S; Start 44; Stop 68
caaaacactattttgaggttgcaga

SEQ ID NO: 435855 - DNA, 25 bp, Artificial
  probe
  misc_feature (1)..(25): SEQ ID NO: 6339; WAN024B8S; Start 30; Stop 54
agccacaggttgctcaaaacactat

SEQ ID NO: 435856 - DNA, 25 bp, Artificial
  probe
  misc_feature (1)..(25): SEQ ID NO: 6340; WAN024BB6; Start 7; Stop 31
atcaaagagaaaactaggaagcaag

SEQ ID NO: 435857 - DNA, 25 bp, Artificial
  probe
  misc_feature (1)..(25): SEQ ID NO: 6340; WAN024BB6; Start 6; Stop 30
aatcaaagagaaaactaggaagcaa

SEQ ID NO: 435858 - DNA, 25 bp, Artificial
  probe
  misc_feature (1)..(25): SEQ ID NO: 6340; WAN024BB6; Start 5; Stop 29
aaatcaaagagaaaactaggaagca

SEQ ID NO: 435859 - DNA, 25 bp, Artificial
  probe
  misc_feature (1)..(25): SEQ ID NO: 6340; WAN024BB6; Start 9; Stop 33
caaagagaaaactaggaagcaagtc

SEQ ID NO: 435860 - DNA, 25 bp, Artificial
  probe
  misc_feature (1)..(25): SEQ ID NO: 6340; WAN024BB6; Start 8; Stop 32
tcaaagagaaaactaggaagcaagt

SEQ ID NO: 435861 - DNA, 25 bp, Artificial
  probe
  misc_feature (1)..(25): SEQ ID NO: 6340; WAN024BB6; Start 10; Stop 34
aaagagaaaactaggaagcaagtcg

SEQ ID NO: 435862 - DNA, 25 bp, Artificial
  probe
  misc_feature (1)..(25): SEQ ID NO: 6340; WAN024BB6; Start 4; Stop 28
aaaatcaaagagaaaactaggaagc

SEQ ID NO: 435863 - DNA, 25 bp, Artificial
  probe
  misc_feature (1)..(25): SEQ ID NO: 6340; WAN024BB6; Start 11; Stop 35
aagagaaaactaggaagcaagtcgc

SEQ ID NO: 435864 - DNA, 25 bp, Artificial
  probe
  misc_feature (1)..(25): SEQ ID NO: 6340; WAN024BB6; Start 2; Stop 26
tgaaaatcaaagagaaaactaggaa

SEQ ID NO: 435865 - DNA, 25 bp, Artificial
  probe
  misc_feature (1)..(25): SEQ ID NO: 6340; WAN024BB6; Start 3; Stop 27
gaaaatcaaagagaaaactaggaag

SEQ ID NO: 435866 - DNA, 25 bp, Artificial
  probe
  misc_feature (1)..(25): SEQ ID NO: 6340; WAN024BB6; Start 1; Stop 25
atgaaaatcaaagagaaaactagga

SEQ ID NO: 435867 - DNA, 25 bp, Artificial
  probe
  misc_feature (1)..(25): SEQ ID NO: 6340; WAN024BB6; Start 13; Stop 37
gagaaaactaggaagcaagtcgcag

SEQ ID NO: 435868 - DNA, 25 bp, Artificial
  probe
  misc_feature (1)..(25): SEQ ID NO: 6340; WAN024BB6; Start 12; Stop 36
agagaaaactaggaagcaagtcgca

SEQ ID NO: 435869 - DNA, 25 bp, Artificial
  probe
  misc_feature (1)..(25): SEQ ID NO: 6340; WAN024BB6; Start 16; Stop 40
aaaactaggaagcaagtcgcaggtt

SEQ ID NO: 435870 - DNA, 25 bp, Artificial
  probe
  misc_feature (1)..(25): SEQ ID NO: 6340; WAN024BB6; Start 14; Stop 38
agaaaactaggaagcaagtcgcagg

SEQ ID NO: 435871 - DNA, 25 bp, Artificial
  probe
  misc_feature (1)..(25): SEQ ID NO: 6341; WAN024BB5; Start 84; Stop 108
cagtcacatatataatccaaggcga

SEQ ID NO: 435872 - DNA, 25 bp, Artificial
  probe
  misc_feature (1)..(25): SEQ ID NO: 6341; WAN024BB5; Start 83; Stop 107
tcagtcacatatataatccaaggcg

SEQ ID NO: 435873 - DNA, 25 bp, Artificial
  probe
  misc_feature (1)..(25): SEQ ID NO: 6341; WAN024BB5; Start 85; Stop 109
agtcacatatataatccaaggcgac

SEQ ID NO: 435874 - DNA, 25 bp, Artificial
  probe
  misc_feature (1)..(25): SEQ ID NO: 6341; WAN024BB5; Start 86; Stop 110
gtcacatatataatccaaggcgacg

SEQ ID NO: 435875 - DNA, 25 bp, Artificial
  probe
  misc_feature (1)..(25): SEQ ID NO: 6341; WAN024BB5; Start 9; Stop 33
caaagagcaaactaagaaactagcc

SEQ ID NO: 435876 - DNA, 25 bp, Artificial
  probe
  misc_feature (1)..(25): SEQ ID NO: 6341; WAN024BB5; Start 8; Stop 32
tcaaagagcaaactaagaaactagc

SEQ ID NO: 435877 - DNA, 25 bp, Artificial
  probe
  misc_feature (1)..(25): SEQ ID NO: 6341; WAN024BB5; Start 87; Stop 111
tcacatatataatccaaggcgacgt

SEQ ID NO: 435878 - DNA, 25 bp, Artificial
  probe
  misc_feature (1)..(25): SEQ ID NO: 6341; WAN024BB5; Start 10; Stop 34
aaagagcaaactaagaaactagccg

SEQ ID NO: 435879 - DNA, 25 bp, Artificial
  probe
  misc_feature (1)..(25): SEQ ID NO: 6341; WAN024BB5; Start 5; Stop 29
aaatcaaagagcaaactaagaaact

SEQ ID NO: 435880 - DNA, 25 bp, Artificial
  probe
  misc_feature (1)..(25): SEQ ID NO: 6341; WAN024BB5; Start 7; Stop 31
atcaaagagcaaactaagaaactag

SEQ ID NO: 435881 - DNA, 25 bp, Artificial
  probe
  misc_feature (1)..(25): SEQ ID NO: 6341; WAN024BB5; Start 6; Stop 30
aatcaaagagcaaactaagaaacta

SEQ ID NO: 435882 - DNA, 25 bp, Artificial
  probe
  misc_feature (1)..(25): SEQ ID NO: 6341; WAN024BB5; Start 11; Stop 35
aagagcaaactaagaaactagccgc

SEQ ID NO: 435883 - DNA, 25 bp, Artificial
  probe
  misc_feature (1)..(25): SEQ ID NO: 6341; WAN024BB5; Start 17; Stop 41
aaactaagaaactagccgcaggttg

SEQ ID NO: 435884 - DNA, 25 bp, Artificial
  probe
  misc_feature (1)..(25): SEQ ID NO: 6341; WAN024BB5; Start 16; Stop 40
caaactaagaaactagccgcaggtt

SEQ ID NO: 435885 - DNA, 25 bp, Artificial
  probe
  misc_feature (1)..(25): SEQ ID NO: 6341; WAN024BB5; Start 13; Stop 37
gagcaaactaagaaactagccgcag

SEQ ID NO: 435886 - DNA, 25 bp, Artificial
  probe
  misc_feature (1)..(25): SEQ ID NO: 6341; WAN024BB5; Start 2; Stop 26
tgaaaatcaaagagcaaactaagaa

SEQ ID NO: 435887 - DNA, 25 bp, Artificial
  probe
  misc_feature (1)..(25): SEQ ID NO: 6341; WAN024BB5; Start 1; Stop 25
atgaaaatcaaagagcaaactaaga

SEQ ID NO: 435888 - DNA, 25 bp, Artificial
  probe
  misc_feature (1)..(25): SEQ ID NO: 6341; WAN024BB5; Start 4; Stop 28
aaaatcaaagagcaaactaagaaac

SEQ ID NO: 435889 - DNA, 25 bp, Artificial
  probe
  misc_feature (1)..(25): SEQ ID NO: 6341; WAN024BB5; Start 12; Stop 36
agagcaaactaagaaactagccgca

SEQ ID NO: 435890 - DNA, 25 bp, Artificial
  probe
  misc_feature (1)..(25): SEQ ID NO: 6341; WAN024BB5; Start 3; Stop 27
gaaaatcaaagagcaaactaagaaa

SEQ ID NO: 435891 - DNA, 25 bp, Artificial
  probe
  misc_feature (1)..(25): SEQ ID NO: 6342; WAN024BAV; Start 55; Stop 79
tttgaggttgcagataaagttgacg

SEQ ID NO: 435892 - DNA, 25 bp, Artificial
  probe
  misc_feature (1)..(25): SEQ ID NO: 6342; WAN024BAV; Start 54; Stop 78
ctttgaggttgcagataaagttgac

SEQ ID NO: 435893 - DNA, 25 bp, Artificial
  probe
  misc_feature (1)..(25): SEQ ID NO: 6342; WAN024BAV; Start 53; Stop 77
gctttgaggttgcagataaagttga

SEQ ID NO: 435894 - DNA, 25 bp, Artificial
  probe
  misc_feature (1)..(25): SEQ ID NO: 6342; WAN024BAV; Start 52; Stop 76
tgctttgaggttgcagataaagttg

SEQ ID NO: 435895 - DNA, 25 bp, Artificial
  probe
  misc_feature (1)..(25): SEQ ID NO: 6342; WAN024BAV; Start 56; Stop 80
ttgaggttgcagataaagttgacgc

SEQ ID NO: 435896 - DNA, 25 bp, Artificial
  probe
  misc_feature (1)..(25): SEQ ID NO: 6342; WAN024BAV; Start 60; Stop 84
ggttgcagataaagttgacgcagtt

SEQ ID NO: 435897 - DNA, 25 bp, Artificial
  probe
  misc_feature (1)..(25): SEQ ID NO: 6342; WAN024BAV; Start 58; Stop 82
gaggttgcagataaagttgacgcag

SEQ ID NO: 435898 - DNA, 25 bp, Artificial
  probe
  misc_feature (1)..(25): SEQ ID NO: 6342; WAN024BAV; Start 59; Stop 83
aggttgcagataaagttgacgcagt

SEQ ID NO: 435899 - DNA, 25 bp, Artificial
  probe
  misc_feature (1)..(25): SEQ ID NO: 6342; WAN024BAV; Start 57; Stop 81
tgaggttgcagataaagttgacgca

SEQ ID NO: 435900 - DNA, 25 bp, Artificial
  probe
  misc_feature (1)..(25): SEQ ID NO: 6343; WAN024B9K; Start 32; Stop 56
ccgcaggttgttcaaaacagtgttt

SEQ ID NO: 435901 - DNA, 25 bp, Artificial
  probe
  misc_feature (1)..(25): SEQ ID NO: 6343; WAN024B9K; Start 33; Stop 57
cgcaggttgttcaaaacagtgtttt

SEQ ID NO: 435902 - DNA, 25 bp, Artificial
  probe
  misc_feature (1)..(25): SEQ ID NO: 6344; WAN024BB9; Start 63; Stop 87
tgtagatagaactaacgaagtcagc

SEQ ID NO: 435903 - DNA, 25 bp, Artificial
  probe
  misc_feature (1)..(25): SEQ ID NO: 6344; WAN024BB9; Start 57; Stop 81
tgaggttgtagatagaactaacgaa

SEQ ID NO: 435904 - DNA, 25 bp, Artificial
  probe
  misc_feature (1)..(25): SEQ ID NO: 6344; WAN024BB9; Start 56; Stop 80
ttgaggttgtagatagaactaacga

SEQ ID NO: 435905 - DNA, 25 bp, Artificial
  probe
  misc_feature (1)..(25): SEQ ID NO: 6344; WAN024BB9; Start 59; Stop 83
aggttgtagatagaactaacgaagt

SEQ ID NO: 435906 - DNA, 25 bp, Artificial
  probe
  misc_feature (1)..(25): SEQ ID NO: 6344; WAN024BB9; Start 58; Stop 82
gaggttgtagatagaactaacgaag

SEQ ID NO: 435907 - DNA, 25 bp, Artificial
  probe
  misc_feature (1)..(25): SEQ ID NO: 6344; WAN024BB9; Start 60; Stop 84
ggttgtagatagaactaacgaagtc

SEQ ID NO: 435908 - DNA, 25 bp, Artificial
  probe
  misc_feature (1)..(25): SEQ ID NO: 6344; WAN024BB9; Start 61; Stop 85
gttgtagatagaactaacgaagtca

SEQ ID NO: 435909 - DNA, 25 bp, Artificial
  probe
  misc_feature (1)..(25): SEQ ID NO: 6344; WAN024BB9; Start 62; Stop 86
ttgtagatagaactaacgaagtcag

SEQ ID NO: 435910 - DNA, 25 bp, Artificial
  probe
  misc_feature (1)..(25): SEQ ID NO: 6344; WAN024BB9; Start 64; Stop 88
gtagatagaactaacgaagtcagct

SEQ ID NO: 435911 - DNA, 25 bp, Artificial
  probe
  misc_feature (1)..(25): SEQ ID NO: 6344; WAN024BB9; Start 67; Stop 91
gatagaactaacgaagtcagctcaa

SEQ ID NO: 435912 - DNA, 25 bp, Artificial
  probe
  misc_feature (1)..(25): SEQ ID NO: 6344; WAN024BB9; Start 65; Stop 89
tagatagaactaacgaagtcagctc

SEQ ID NO: 435913 - DNA, 25 bp, Artificial
  probe
  misc_feature (1)..(25): SEQ ID NO: 6344; WAN024BB9; Start 66; Stop 90
agatagaactaacgaagtcagctca

SEQ ID NO: 435914 - DNA, 25 bp, Artificial
  probe
  misc_feature (1)..(25): SEQ ID NO: 6344; WAN024BB9; Start 52; Stop 76
tgctttgaggttgtagatagaacta

SEQ ID NO: 435915 - DNA, 25 bp, Artificial
  probe
  misc_feature (1)..(25): SEQ ID NO: 6344; WAN024BB9; Start 46; Stop 70
aatcactgctttgaggttgtagata

SEQ ID NO: 435916 - DNA, 25 bp, Artificial
  probe
  misc_feature (1)..(25): SEQ ID NO: 6344; WAN024BB9; Start 47; Stop 71
atcactgctttgaggttgtagatag

SEQ ID NO: 435917 - DNA, 25 bp, Artificial
  probe
  misc_feature (1)..(25): SEQ ID NO: 6344; WAN024BB9; Start 45; Stop 69
aaatcactgctttgaggttgtagat

SEQ ID NO: 435918 - DNA, 25 bp, Artificial
  probe
  misc_feature (1)..(25): SEQ ID NO: 6344; WAN024BB9; Start 48; Stop 72
tcactgctttgaggttgtagataga

SEQ ID NO: 435919 - DNA, 25 bp, Artificial
  probe
  misc_feature (1)..(25): SEQ ID NO: 6344; WAN024BB9; Start 55; Stop 79
tttgaggttgtagatagaactaacg

SEQ ID NO: 435920 - DNA, 25 bp, Artificial
  probe
  misc_feature (1)..(25): SEQ ID NO: 6344; WAN024BB9; Start 53; Stop 77
gctttgaggttgtagatagaactaa

SEQ ID NO: 435921 - DNA, 25 bp, Artificial
  probe
  misc_feature (1)..(25): SEQ ID NO: 6344; WAN024BB9; Start 68; Stop 92
atagaactaacgaagtcagctcaaa

SEQ ID NO: 435922 - DNA, 25 bp, Artificial
  probe
  misc_feature (1)..(25): SEQ ID NO: 6344; WAN024BB9; Start 54; Stop 78
ctttgaggttgtagatagaactaac

SEQ ID NO: 435923 - DNA, 25 bp, Artificial
  probe
  misc_feature (1)..(25): SEQ ID NO: 6344; WAN024BB9; Start 44; Stop 68
caaatcactgctttgaggttgtaga

SEQ ID NO: 435924 - DNA, 25 bp, Artificial
  probe
  misc_feature (1)..(25): SEQ ID NO: 6344; WAN024BB9; Start 69; Stop 93
tagaactaacgaagtcagctcaaaa

SEQ ID NO: 435925 - DNA, 25 bp, Artificial
  probe
  misc_feature (1)..(25): SEQ ID NO: 6344; WAN024BB9; Start 70; Stop 94
agaactaacgaagtcagctcaaaac

SEQ ID NO: 435926 - DNA, 25 bp, Artificial
  probe
  misc_feature (1)..(25): SEQ ID NO: 6344; WAN024BB9; Start 71; Stop 95
gaactaacgaagtcagctcaaaaca

SEQ ID NO: 435927 - DNA, 25 bp, Artificial
  probe
  misc_feature (1)..(25): SEQ ID NO: 6344; WAN024BB9; Start 72; Stop 96
aactaacgaagtcagctcaaaacac

SEQ ID NO: 435928 - DNA, 25 bp, Artificial
  probe
  misc_feature (1)..(25): SEQ ID NO: 6344; WAN024BB9; Start 73; Stop 97
actaacgaagtcagctcaaaacact

SEQ ID NO: 435929 - DNA, 25 bp, Artificial
  probe
  misc_feature (1)..(25): SEQ ID NO: 6344; WAN024BB9; Start 74; Stop 98
ctaacgaagtcagctcaaaacactg

SEQ ID NO: 435930 - DNA, 25 bp, Artificial
  probe
  misc_feature (1)..(25): SEQ ID NO: 6344; WAN024BB9; Start 75; Stop 99
taacgaagtcagctcaaaacactgt

SEQ ID NO: 435931 - DNA, 25 bp, Artificial
  probe
  misc_feature (1)..(25): SEQ ID NO: 6344; WAN024BB9; Start 76; Stop 100
aacgaagtcagctcaaaacactgtt

SEQ ID NO: 435932 - DNA, 25 bp, Artificial
  probe
  misc_feature (1)..(25): SEQ ID NO: 6344; WAN024BB9; Start 43; Stop 67
tcaaatcactgctttgaggttgtag

SEQ ID NO: 435933 - DNA, 25 bp, Artificial
  probe
  misc_feature (1)..(25): SEQ ID NO: 6344; WAN024BB9; Start 35; Stop 59
caggttgctcaaatcactgctttga

SEQ ID NO: 435934 - DNA, 25 bp, Artificial
  probe
  misc_feature (1)..(25): SEQ ID NO: 6345; WAN024BB8; Start 59; Stop 83
aggtagtagataagactgacgaagt

SEQ ID NO: 435935 - DNA, 25 bp, Artificial
  probe
  misc_feature (1)..(25): SEQ ID NO: 6345; WAN024BB8; Start 57; Stop 81
tgaggtagtagataagactgacgaa

SEQ ID NO: 435936 - DNA, 25 bp, Artificial
  probe
  misc_feature (1)..(25): SEQ ID NO: 6345; WAN024BB8; Start 56; Stop 80
ttgaggtagtagataagactgacga

SEQ ID NO: 435937 - DNA, 25 bp, Artificial
  probe
  misc_feature (1)..(25): SEQ ID NO: 6345; WAN024BB8; Start 58; Stop 82
gaggtagtagataagactgacgaag

SEQ ID NO: 435938 - DNA, 25 bp, Artificial
  probe
  misc_feature (1)..(25): SEQ ID NO: 6345; WAN024BB8; Start 126; Stop 150
agtcagtaacatctatacggcaaga

SEQ ID NO: 435939 - DNA, 25 bp, Artificial
  probe
  misc_feature (1)..(25): SEQ ID NO: 6345; WAN024BB8; Start 127; Stop 151
gtcagtaacatctatacggcaagac

SEQ ID NO: 435940 - DNA, 25 bp, Artificial
  probe
  misc_feature (1)..(25): SEQ ID NO: 6345; WAN024BB8; Start 130; Stop 154
agtaacatctatacggcaagacgac

SEQ ID NO: 435941 - DNA, 25 bp, Artificial
  probe
  misc_feature (1)..(25): SEQ ID NO: 6345; WAN024BB8; Start 129; Stop 153
cagtaacatctatacggcaagacga

SEQ ID NO: 435942 - DNA, 25 bp, Artificial
  probe
  misc_feature (1)..(25): SEQ ID NO: 6345; WAN024BB8; Start 128; Stop 152
tcagtaacatctatacggcaagacg

SEQ ID NO: 435943 - DNA, 25 bp, Artificial
  probe
  misc_feature (1)..(25): SEQ ID NO: 6345; WAN024BB8; Start 55; Stop 79
tttgaggtagtagataagactgacg

SEQ ID NO: 435944 - DNA, 25 bp, Artificial
  probe
  misc_feature (1)..(25): SEQ ID NO: 6345; WAN024BB8; Start 131; Stop 155
gtaacatctatacggcaagacgacg

SEQ ID NO: 435945 - DNA, 25 bp, Artificial
  probe
  misc_feature (1)..(25): SEQ ID NO: 6345; WAN024BB8; Start 60; Stop 84
ggtagtagataagactgacgaagtc

SEQ ID NO: 435946 - DNA, 25 bp, Artificial
  probe
  misc_feature (1)..(25): SEQ ID NO: 6345; WAN024BB8; Start 51; Stop 75
ccgttttgaggtagtagataagact

SEQ ID NO: 435947 - DNA, 25 bp, Artificial
  probe
  misc_feature (1)..(25): SEQ ID NO: 6345; WAN024BB8; Start 61; Stop 85
gtagtagataagactgacgaagtca

SEQ ID NO: 435948 - DNA, 25 bp, Artificial
  probe
  misc_feature (1)..(25): SEQ ID NO: 6345; WAN024BB8; Start 52; Stop 76
cgttttgaggtagtagataagactg

SEQ ID NO: 435949 - DNA, 25 bp, Artificial
  probe
  misc_feature (1)..(25): SEQ ID NO: 6345; WAN024BB8; Start 132; Stop 156
taacatctatacggcaagacgacgc

SEQ ID NO: 435950 - DNA, 25 bp, Artificial
  probe
  misc_feature (1)..(25): SEQ ID NO: 6345; WAN024BB8; Start 48; Stop 72
acaccgttttgaggtagtagataag

SEQ ID NO: 435951 - DNA, 25 bp, Artificial
  probe
  misc_feature (1)..(25): SEQ ID NO: 6345; WAN024BB8; Start 50; Stop 74
accgttttgaggtagtagataagac

SEQ ID NO: 435952 - DNA, 25 bp, Artificial
  probe
  misc_feature (1)..(25): SEQ ID NO: 6345; WAN024BB8; Start 49; Stop 73
caccgttttgaggtagtagataaga

SEQ ID NO: 435953 - DNA, 25 bp, Artificial
  probe
  misc_feature (1)..(25): SEQ ID NO: 6345; WAN024BB8; Start 47; Stop 71
aacaccgttttgaggtagtagataa

SEQ ID NO: 435954 - DNA, 25 bp, Artificial
  probe
  misc_feature (1)..(25): SEQ ID NO: 6345; WAN024BB8; Start 54; Stop 78
ttttgaggtagtagataagactgac

SEQ ID NO: 435955 - DNA, 25 bp, Artificial
  probe
  misc_feature (1)..(25): SEQ ID NO: 6345; WAN024BB8; Start 53; Stop 77
gttttgaggtagtagataagactga

SEQ ID NO: 435956 - DNA, 25 bp, Artificial
  probe
  misc_feature (1)..(25): SEQ ID NO: 6345; WAN024BB8; Start 17; Stop 41
aaactaggaaactagctacaggttg

SEQ ID NO: 435957 - DNA, 25 bp, Artificial
  probe
  misc_feature (1)..(25): SEQ ID NO: 6345; WAN024BB8; Start 16; Stop 40
caaactaggaaactagctacaggtt

SEQ ID NO: 435958 - DNA, 25 bp, Artificial
  probe
  misc_feature (1)..(25): SEQ ID NO: 6345; WAN024BB8; Start 11; Stop 35
aagagcaaactaggaaactagctac

SEQ ID NO: 435959 - DNA, 25 bp, Artificial
  probe
  misc_feature (1)..(25): SEQ ID NO: 6345; WAN024BB8; Start 10; Stop 34
aaagagcaaactaggaaactagcta

SEQ ID NO: 435960 - DNA, 25 bp, Artificial
  probe
  misc_feature (1)..(25): SEQ ID NO: 6345; WAN024BB8; Start 46; Stop 70
aaacaccgttttgaggtagtagata

SEQ ID NO: 435961 - DNA, 25 bp, Artificial
  probe
  misc_feature (1)..(25): SEQ ID NO: 6345; WAN024BB8; Start 13; Stop 37
gagcaaactaggaaactagctacag

SEQ ID NO: 435962 - DNA, 25 bp, Artificial
  probe
  misc_feature (1)..(25): SEQ ID NO: 6345; WAN024BB8; Start 12; Stop 36
agagcaaactaggaaactagctaca

SEQ ID NO: 435963 - DNA, 25 bp, Artificial
  probe
  misc_feature (1)..(25): SEQ ID NO: 6345; WAN024BB8; Start 18; Stop 42
aactaggaaactagctacaggttgc

SEQ ID NO: 435964 - DNA, 25 bp, Artificial
  probe
  misc_feature (1)..(25): SEQ ID NO: 6345; WAN024BB8; Start 15; Stop 39
gcaaactaggaaactagctacaggt

SEQ ID NO: 435965 - DNA, 25 bp, Artificial
  probe
  misc_feature (1)..(25): SEQ ID NO: 6345; WAN024BB8; Start 14; Stop 38
agcaaactaggaaactagctacagg

SEQ ID NO: 435966 - DNA, 25 bp, Artificial
  probe
  misc_feature (1)..(25): SEQ ID NO: 6345; WAN024BB8; Start 20; Stop 44
ctaggaaactagctacaggttgctc

SEQ ID NO: 435967 - DNA, 25 bp, Artificial
  probe
  misc_feature (1)..(25): SEQ ID NO: 6347; WAN024BBE; Start 80; Stop 104
aagtcagtaacaatacctacggcaa

SEQ ID NO: 435968 - DNA, 25 bp, Artificial
  probe
  misc_feature (1)..(25): SEQ ID NO: 6347; WAN024BBE; Start 77; Stop 101
acgaagtcagtaacaatacctacgg

SEQ ID NO: 435969 - DNA, 25 bp, Artificial
  probe
  misc_feature (1)..(25): SEQ ID NO: 6347; WAN024BBE; Start 76; Stop 100
gacgaagtcagtaacaatacctacg

SEQ ID NO: 435970 - DNA, 25 bp, Artificial
  probe
  misc_feature (1)..(25): SEQ ID NO: 6347; WAN024BBE; Start 81; Stop 105
agtcagtaacaatacctacggcaag

SEQ ID NO: 435971 - DNA, 25 bp, Artificial
  probe
  misc_feature (1)..(25): SEQ ID NO: 6347; WAN024BBE; Start 79; Stop 103
gaagtcagtaacaatacctacggca

SEQ ID NO: 435972 - DNA, 25 bp, Artificial
  probe
  misc_feature (1)..(25): SEQ ID NO: 6347; WAN024BBE; Start 78; Stop 102
cgaagtcagtaacaatacctacggc

SEQ ID NO: 435973 - DNA, 25 bp, Artificial
  probe
  misc_feature (1)..(25): SEQ ID NO: 6347; WAN024BBE; Start 82; Stop 106
gtcagtaacaatacctacggcaagg

SEQ ID NO: 435974 - DNA, 25 bp, Artificial
  probe
  misc_feature (1)..(25): SEQ ID NO: 6347; WAN024BBE; Start 113; Stop 137
tgacgtggtttgaagagagtataaa

SEQ ID NO: 435975 - DNA, 25 bp, Artificial
  probe
  misc_feature (1)..(25): SEQ ID NO: 6347; WAN024BBE; Start 112; Stop 136
ttgacgtggtttgaagagagtataa

SEQ ID NO: 435976 - DNA, 25 bp, Artificial
  probe
  misc_feature (1)..(25): SEQ ID NO: 6347; WAN024BBE; Start 111; Stop 135
gttgacgtggtttgaagagagtata

SEQ ID NO: 435977 - DNA, 25 bp, Artificial
  probe
  misc_feature (1)..(25): SEQ ID NO: 6347; WAN024BBE; Start 75; Stop 99
tgacgaagtcagtaacaatacctac

SEQ ID NO: 435978 - DNA, 25 bp, Artificial
  probe
  misc_feature (1)..(25): SEQ ID NO: 6347; WAN024BBE; Start 110; Stop 134
cgttgacgtggtttgaagagagtat

SEQ ID NO: 435979 - DNA, 25 bp, Artificial
  probe
  misc_feature (1)..(25): SEQ ID NO: 6347; WAN024BBE; Start 83; Stop 107
tcagtaacaatacctacggcaaggc

SEQ ID NO: 435980 - DNA, 25 bp, Artificial
  probe
  misc_feature (1)..(25): SEQ ID NO: 6347; WAN024BBE; Start 114; Stop 138
gacgtggtttgaagagagtataaaa

SEQ ID NO: 435981 - DNA, 25 bp, Artificial
  probe
  misc_feature (1)..(25): SEQ ID NO: 6347; WAN024BBE; Start 109; Stop 133
acgttgacgtggtttgaagagagta

SEQ ID NO: 435982 - DNA, 25 bp, Artificial
  probe
  misc_feature (1)..(25): SEQ ID NO: 6347; WAN024BBE; Start 33; Stop 57
tgcaggttgctcaaaacagtgtttt

SEQ ID NO: 435983 - DNA, 25 bp, Artificial
  probe
  misc_feature (1)..(25): SEQ ID NO: 6349; WAN024BBB; Start 57; Stop 81
tgaggttgtggatagaactgacgac

SEQ ID NO: 435984 - DNA, 25 bp, Artificial
  probe
  misc_feature (1)..(25): SEQ ID NO: 6349; WAN024BBB; Start 58; Stop 82
gaggttgtggatagaactgacgacg

SEQ ID NO: 435985 - DNA, 25 bp, Artificial
  probe
  misc_feature (1)..(25): SEQ ID NO: 6349; WAN024BBB; Start 129; Stop 153
cagtaaccatacctacggtaaggtg

SEQ ID NO: 435986 - DNA, 25 bp, Artificial
  probe
  misc_feature (1)..(25): SEQ ID NO: 6349; WAN024BBB; Start 131; Stop 155
gtaaccatacctacggtaaggtgac

SEQ ID NO: 435987 - DNA, 25 bp, Artificial
  probe
  misc_feature (1)..(25): SEQ ID NO: 6349; WAN024BBB; Start 130; Stop 154
agtaaccatacctacggtaaggtga

SEQ ID NO: 435988 - DNA, 25 bp, Artificial
  probe
  misc_feature (1)..(25): SEQ ID NO: 6349; WAN024BBB; Start 128; Stop 152
tcagtaaccatacctacggtaaggt

SEQ ID NO: 435989 - DNA, 25 bp, Artificial
  probe
  misc_feature (1)..(25): SEQ ID NO: 6349; WAN024BBB; Start 92; Stop 116
gacactgttttgaggttgcagatag

SEQ ID NO: 435990 - DNA, 25 bp, Artificial
  probe
  misc_feature (1)..(25): SEQ ID NO: 6349; WAN024BBB; Start 91; Stop 115
agacactgttttgaggttgcagata

SEQ ID NO: 435991 - DNA, 25 bp, Artificial
  probe
  misc_feature (1)..(25): SEQ ID NO: 6349; WAN024BBB; Start 132; Stop 156
taaccatacctacggtaaggtgacg

SEQ ID NO: 435992 - DNA, 25 bp, Artificial
  probe
  misc_feature (1)..(25): SEQ ID NO: 6349; WAN024BBB; Start 90; Stop 114
aagacactgttttgaggttgcagat

SEQ ID NO: 435993 - DNA, 25 bp, Artificial
  probe
  misc_feature (1)..(25): SEQ ID NO: 6349; WAN024BBB; Start 89; Stop 113
caagacactgttttgaggttgcaga

SEQ ID NO: 435994 - DNA, 25 bp, Artificial
  probe
  misc_feature (1)..(25): SEQ ID NO: 6349; WAN024BBB; Start 88; Stop 112
tcaagacactgttttgaggttgcag

SEQ ID NO: 435995 - DNA, 25 bp, Artificial
  probe
  misc_feature (1)..(25): SEQ ID NO: 6349; WAN024BBB; Start 80; Stop 104
acgtcagctcaagacactgttttga

SEQ ID NO: 435996 - DNA, 25 bp, Artificial
  probe
  misc_feature (1)..(25): SEQ ID NO: 6350; WAN024B9N; Start 50; Stop 74
actgttttgaggttgtagatggaag

SEQ ID NO: 435997 - DNA, 25 bp, Artificial
  probe
  misc_feature (1)..(25): SEQ ID NO: 6350; WAN024B9N; Start 51; Stop 75
ctgttttgaggttgtagatggaagc

SEQ ID NO: 435998 - DNA, 25 bp, Artificial
  probe
  misc_feature (1)..(25): SEQ ID NO: 6351; WAN024BAO; Start 3; Stop 27
gaaaatcaaagagcaaactaggcag

SEQ ID NO: 435999 - DNA, 25 bp, Artificial
  probe
  misc_feature (1)..(25): SEQ ID NO: 6351; WAN024BAO; Start 1; Stop 25
atgaaaatcaaagagcaaactaggc

SEQ ID NO: 436000 - DNA, 25 bp, Artificial
  probe
  misc_feature (1)..(25): SEQ ID NO: 6351; WAN024BAO; Start 2; Stop 26
tgaaaatcaaagagcaaactaggca

SEQ ID NO: 436001 - DNA, 25 bp, Artificial
  probe
  misc_feature (1)..(25): SEQ ID NO: 6351; WAN024BAO; Start 4; Stop 28
aaaatcaaagagcaaactaggcagc

SEQ ID NO: 436002 - DNA, 25 bp, Artificial
  probe
  misc_feature (1)..(25): SEQ ID NO: 6351; WAN024BAO; Start 6; Stop 30
aatcaaagagcaaactaggcagcta

SEQ ID NO: 436003 - DNA, 25 bp, Artificial
  probe
  misc_feature (1)..(25): SEQ ID NO: 6351; WAN024BAO; Start 47; Stop 71
aacactggtttgaggttgcagatag

SEQ ID NO: 436004 - DNA, 25 bp, Artificial
  probe
  misc_feature (1)..(25): SEQ ID NO: 6351; WAN024BAO; Start 7; Stop 31
atcaaagagcaaactaggcagctag

SEQ ID NO: 436005 - DNA, 25 bp, Artificial
  probe
  misc_feature (1)..(25): SEQ ID NO: 6351; WAN024BAO; Start 49; Stop 73
cactggtttgaggttgcagatagag

SEQ ID NO: 436006 - DNA, 25 bp, Artificial
  probe
  misc_feature (1)..(25): SEQ ID NO: 6351; WAN024BAO; Start 46; Stop 70
aaacactggtttgaggttgcagata

SEQ ID NO: 436007 - DNA, 25 bp, Artificial
  probe
  misc_feature (1)..(25): SEQ ID NO: 6351; WAN024BAO; Start 5; Stop 29
aaatcaaagagcaaactaggcagct

SEQ ID NO: 436008 - DNA, 25 bp, Artificial
  probe
  misc_feature (1)..(25): SEQ ID NO: 6351; WAN024BAO; Start 54; Stop 78
gtttgaggttgcagatagagctgac

SEQ ID NO: 436009 - DNA, 25 bp, Artificial
  probe
  misc_feature (1)..(25): SEQ ID NO: 6351; WAN024BAO; Start 48; Stop 72
acactggtttgaggttgcagataga

SEQ ID NO: 436010 - DNA, 25 bp, Artificial
  probe
  misc_feature (1)..(25): SEQ ID NO: 6351; WAN024BAO; Start 53; Stop 77
ggtttgaggttgcagatagagctga

SEQ ID NO: 436011 - DNA, 25 bp, Artificial
  probe
  misc_feature (1)..(25): SEQ ID NO: 6351; WAN024BAO; Start 51; Stop 75
ctggtttgaggttgcagatagagct

SEQ ID NO: 436012 - DNA, 25 bp, Artificial
  probe
  misc_feature (1)..(25): SEQ ID NO: 6351; WAN024BAO; Start 52; Stop 76
tggtttgaggttgcagatagagctg

SEQ ID NO: 436013 - DNA, 25 bp, Artificial
  probe
  misc_feature (1)..(25): SEQ ID NO: 6351; WAN024BAO; Start 50; Stop 74
actggtttgaggttgcagatagagc

SEQ ID NO: 436014 - DNA, 25 bp, Artificial
  probe
  misc_feature (1)..(25): SEQ ID NO: 6351; WAN024BAO; Start 55; Stop 79
tttgaggttgcagatagagctgacg

SEQ ID NO: 436015 - DNA, 25 bp, Artificial
  probe
  misc_feature (1)..(25): SEQ ID NO: 6351; WAN024BAO; Start 45; Stop 69
aaaacactggtttgaggttgcagat

SEQ ID NO: 436016 - DNA, 25 bp, Artificial
  probe
  misc_feature (1)..(25): SEQ ID NO: 6351; WAN024BAO; Start 44; Stop 68
caaaacactggtttgaggttgcaga

SEQ ID NO: 436017 - DNA, 25 bp, Artificial
  probe
  misc_feature (1)..(25): SEQ ID NO: 6351; WAN024BAO; Start 35; Stop 59
caggttgctcaaaacactggtttga

SEQ ID NO: 436018 - DNA, 25 bp, Artificial
  probe
  misc_feature (1)..(25): SEQ ID NO: 6351; WAN024BAO; Start 43; Stop 67
tcaaaacactggtttgaggttgcag

SEQ ID NO: 436019 - DNA, 25 bp, Artificial
  probe
  misc_feature (1)..(25): SEQ ID NO: 6352; WAN024F79; Start 79; Stop 103
gaagtcagtgatcatatcgtaaccg

SEQ ID NO: 436020 - DNA, 25 bp, Artificial
  probe
  misc_feature (1)..(25): SEQ ID NO: 6352; WAN024F79; Start 80; Stop 104
aagtcagtgatcatatcgtaaccgt

SEQ ID NO: 436021 - DNA, 25 bp, Artificial
  probe
  misc_feature (1)..(25): SEQ ID NO: 6352; WAN024F79; Start 81; Stop 105
agtcagtgatcatatcgtaaccgtc

SEQ ID NO: 436022 - DNA, 25 bp, Artificial
  probe
  misc_feature (1)..(25): SEQ ID NO: 6352; WAN024F79; Start 54; Stop 78
ttttgaggttgtagataagactgac

SEQ ID NO: 436023 - DNA, 25 bp, Artificial
  probe
  misc_feature (1)..(25): SEQ ID NO: 6352; WAN024F79; Start 53; Stop 77
gttttgaggttgtagataagactga

SEQ ID NO: 436024 - DNA, 25 bp, Artificial
  probe
  misc_feature (1)..(25): SEQ ID NO: 6352; WAN024F79; Start 84; Stop 108
cagtgatcatatcgtaaccgtccaa

SEQ ID NO: 436025 - DNA, 25 bp, Artificial
  probe
  misc_feature (1)..(25): SEQ ID NO: 6352; WAN024F79; Start 52; Stop 76
agttttgaggttgtagataagactg

SEQ ID NO: 436026 - DNA, 25 bp, Artificial
  probe
  misc_feature (1)..(25): SEQ ID NO: 6352; WAN024F79; Start 51; Stop 75
cagttttgaggttgtagataagact

SEQ ID NO: 436027 - DNA, 25 bp, Artificial
  probe
  misc_feature (1)..(25): SEQ ID NO: 6352; WAN024F79; Start 48; Stop 72
acacagttttgaggttgtagataag

SEQ ID NO: 436028 - DNA, 25 bp, Artificial
  probe
  misc_feature (1)..(25): SEQ ID NO: 6352; WAN024F79; Start 82; Stop 106
gtcagtgatcatatcgtaaccgtcc

SEQ ID NO: 436029 - DNA, 25 bp, Artificial
  probe
  misc_feature (1)..(25): SEQ ID NO: 6352; WAN024F79; Start 50; Stop 74
acagttttgaggttgtagataagac

SEQ ID NO: 436030 - DNA, 25 bp, Artificial
  probe
  misc_feature (1)..(25): SEQ ID NO: 6352; WAN024F79; Start 49; Stop 73
cacagttttgaggttgtagataaga

SEQ ID NO: 436031 - DNA, 25 bp, Artificial
  probe
  misc_feature (1)..(25): SEQ ID NO: 6352; WAN024F79; Start 47; Stop 71
aacacagttttgaggttgtagataa

SEQ ID NO: 436032 - DNA, 25 bp, Artificial
  probe
  misc_feature (1)..(25): SEQ ID NO: 6352; WAN024F79; Start 78; Stop 102
cgaagtcagtgatcatatcgtaacc

SEQ ID NO: 436033 - DNA, 25 bp, Artificial
  probe
  misc_feature (1)..(25): SEQ ID NO: 6352; WAN024F79; Start 83; Stop 107
tcagtgatcatatcgtaaccgtcca

SEQ ID NO: 436034 - DNA, 25 bp, Artificial
  probe
  misc_feature (1)..(25): SEQ ID NO: 6352; WAN024F79; Start 46; Stop 70
aaacacagttttgaggttgtagata

SEQ ID NO: 436035 - DNA, 25 bp, Artificial
  probe
  misc_feature (1)..(25): SEQ ID NO: 6352; WAN024F79; Start 45; Stop 69
aaaacacagttttgaggttgtagat

SEQ ID NO: 436036 - DNA, 25 bp, Artificial
  probe
  misc_feature (1)..(25): SEQ ID NO: 6353; WAN024F77; Start 12; Stop 36
agatcaaactaggaaactagctacg

SEQ ID NO: 436037 - DNA, 25 bp, Artificial
  probe
  misc_feature (1)..(25): SEQ ID NO: 6353; WAN024F77; Start 13; Stop 37
gatcaaactaggaaactagctacgg

SEQ ID NO: 436038 - DNA, 25 bp, Artificial
  probe
  misc_feature (1)..(25): SEQ ID NO: 6353; WAN024F77; Start 14; Stop 38
atcaaactaggaaactagctacggg

SEQ ID NO: 436039 - DNA, 25 bp, Artificial
  probe
  misc_feature (1)..(25): SEQ ID NO: 6353; WAN024F77; Start 11; Stop 35
aagatcaaactaggaaactagctac

SEQ ID NO: 436040 - DNA, 25 bp, Artificial
  probe
  misc_feature (1)..(25): SEQ ID NO: 6353; WAN024F77; Start 10; Stop 34
aaagatcaaactaggaaactagcta

SEQ ID NO: 436041 - DNA, 25 bp, Artificial
  probe
  misc_feature (1)..(25): SEQ ID NO: 6353; WAN024F77; Start 15; Stop 39
tcaaactaggaaactagctacgggc

SEQ ID NO: 436042 - DNA, 25 bp, Artificial
  probe
  misc_feature (1)..(25): SEQ ID NO: 6353; WAN024F77; Start 17; Stop 41
aaactaggaaactagctacgggctg

SEQ ID NO: 436043 - DNA, 25 bp, Artificial
  probe
  misc_feature (1)..(25): SEQ ID NO: 6353; WAN024F77; Start 16; Stop 40
caaactaggaaactagctacgggct

SEQ ID NO: 436044 - DNA, 25 bp, Artificial
  probe
  misc_feature (1)..(25): SEQ ID NO: 6354; WAN024BBD; Start 11; Stop 35
aagatcaaactaggaaactagctgc

SEQ ID NO: 436045 - DNA, 25 bp, Artificial
  probe
  misc_feature (1)..(25): SEQ ID NO: 6354; WAN024BBD; Start 10; Stop 34
aaagatcaaactaggaaactagctg

SEQ ID NO: 436046 - DNA, 25 bp, Artificial
  probe
  misc_feature (1)..(25): SEQ ID NO: 6354; WAN024BBD; Start 12; Stop 36
agatcaaactaggaaactagctgcg

SEQ ID NO: 436047 - DNA, 25 bp, Artificial
  probe
  misc_feature (1)..(25): SEQ ID NO: 6354; WAN024BBD; Start 13; Stop 37
gatcaaactaggaaactagctgcgg

SEQ ID NO: 436048 - DNA, 25 bp, Artificial
  probe
  misc_feature (1)..(25): SEQ ID NO: 6354; WAN024BBD; Start 14; Stop 38
atcaaactaggaaactagctgcggg

SEQ ID NO: 436049 - DNA, 25 bp, Artificial
  probe
  misc_feature (1)..(25): SEQ ID NO: 6355; WAN024BBK; Start 60; Stop 84
agttatggatagaactgacgaagtc

SEQ ID NO: 436050 - DNA, 25 bp, Artificial
  probe
  misc_feature (1)..(25): SEQ ID NO: 6355; WAN024BBK; Start 59; Stop 83
aagttatggatagaactgacgaagt

SEQ ID NO: 436051 - DNA, 25 bp, Artificial
  probe
  misc_feature (1)..(25): SEQ ID NO: 6355; WAN024BBK; Start 57; Stop 81
tgaagttatggatagaactgacgaa

SEQ ID NO: 436052 - DNA, 25 bp, Artificial
  probe
  misc_feature (1)..(25): SEQ ID NO: 6355; WAN024BBK; Start 56; Stop 80
ttgaagttatggatagaactgacga

SEQ ID NO: 436053 - DNA, 25 bp, Artificial
  probe
  misc_feature (1)..(25): SEQ ID NO: 6355; WAN024BBK; Start 58; Stop 82
gaagttatggatagaactgacgaag

SEQ ID NO: 436054 - DNA, 25 bp, Artificial
  probe
  misc_feature (1)..(25): SEQ ID NO: 6355; WAN024BBK; Start 5; Stop 29
aaatcaaagggcaaactagaaaact

SEQ ID NO: 436055 - DNA, 25 bp, Artificial
  probe
  misc_feature (1)..(25): SEQ ID NO: 6355; WAN024BBK; Start 4; Stop 28
aaaatcaaagggcaaactagaaaac

SEQ ID NO: 436056 - DNA, 25 bp, Artificial
  probe
  misc_feature (1)..(25): SEQ ID NO: 6355; WAN024BBK; Start 55; Stop 79
tttgaagttatggatagaactgacg

SEQ ID NO: 436057 - DNA, 25 bp, Artificial
  probe
  misc_feature (1)..(25): SEQ ID NO: 6355; WAN024BBK; Start 61; Stop 85
gttatggatagaactgacgaagtca

SEQ ID NO: 436058 - DNA, 25 bp, Artificial
  probe
  misc_feature (1)..(25): SEQ ID NO: 6355; WAN024BBK; Start 6; Stop 30
aatcaaagggcaaactagaaaacta

SEQ ID NO: 436059 - DNA, 25 bp, Artificial
  probe
  misc_feature (1)..(25): SEQ ID NO: 6355; WAN024BBK; Start 3; Stop 27
gaaaatcaaagggcaaactagaaaa

SEQ ID NO: 436060 - DNA, 25 bp, Artificial
  probe
  misc_feature (1)..(25): SEQ ID NO: 6355; WAN024BBK; Start 2; Stop 26
tgaaaatcaaagggcaaactagaaa

SEQ ID NO: 436061 - DNA, 25 bp, Artificial
  probe
  misc_feature (1)..(25): SEQ ID NO: 6355; WAN024BBK; Start 1; Stop 25
atgaaaatcaaagggcaaactagaa

SEQ ID NO: 436062 - DNA, 25 bp, Artificial
  probe
  misc_feature (1)..(25): SEQ ID NO: 6355; WAN024BBK; Start 48; Stop 72
acagtgttttgaagttatggataga

SEQ ID NO: 436063 - DNA, 25 bp, Artificial
  probe
  misc_feature (1)..(25): SEQ ID NO: 6355; WAN024BBK; Start 49; Stop 73
cagtgttttgaagttatggatagaa

SEQ ID NO: 436064 - DNA, 25 bp, Artificial
  probe
  misc_feature (1)..(25): SEQ ID NO: 6355; WAN024BBK; Start 7; Stop 31
atcaaagggcaaactagaaaactag

SEQ ID NO: 436065 - DNA, 25 bp, Artificial
  probe
  misc_feature (1)..(25): SEQ ID NO: 6355; WAN024BBK; Start 50; Stop 74
agtgttttgaagttatggatagaac

SEQ ID NO: 436066 - DNA, 25 bp, Artificial
  probe
  misc_feature (1)..(25): SEQ ID NO: 6355; WAN024BBK; Start 8; Stop 32
tcaaagggcaaactagaaaactagc

SEQ ID NO: 436067 - DNA, 25 bp, Artificial
  probe
  misc_feature (1)..(25): SEQ ID NO: 6355; WAN024BBK; Start 47; Stop 71
aacagtgttttgaagttatggatag

SEQ ID NO: 436068 - DNA, 25 bp, Artificial
  probe
  misc_feature (1)..(25): SEQ ID NO: 6355; WAN024BBK; Start 52; Stop 76
tgttttgaagttatggatagaactg

SEQ ID NO: 436069 - DNA, 25 bp, Artificial
  probe
  misc_feature (1)..(25): SEQ ID NO: 6355; WAN024BBK; Start 51; Stop 75
gtgttttgaagttatggatagaact

SEQ ID NO: 436070 - DNA, 25 bp, Artificial
  probe
  misc_feature (1)..(25): SEQ ID NO: 6355; WAN024BBK; Start 17; Stop 41
aaactagaaaactagccgcaggttg

SEQ ID NO: 436071 - DNA, 25 bp, Artificial
  probe
  misc_feature (1)..(25): SEQ ID NO: 6355; WAN024BBK; Start 16; Stop 40
caaactagaaaactagccgcaggtt

SEQ ID NO: 436072 - DNA, 25 bp, Artificial
  probe
  misc_feature (1)..(25): SEQ ID NO: 6355; WAN024BBK; Start 54; Stop 78
ttttgaagttatggatagaactgac

SEQ ID NO: 436073 - DNA, 25 bp, Artificial
  probe
  misc_feature (1)..(25): SEQ ID NO: 6355; WAN024BBK; Start 53; Stop 77
gttttgaagttatggatagaactga

SEQ ID NO: 436074 - DNA, 25 bp, Artificial
  probe
  misc_feature (1)..(25): SEQ ID NO: 6355; WAN024BBK; Start 46; Stop 70
aaacagtgttttgaagttatggata

SEQ ID NO: 436075 - DNA, 25 bp, Artificial
  probe
  misc_feature (1)..(25): SEQ ID NO: 6355; WAN024BBK; Start 9; Stop 33
caaagggcaaactagaaaactagcc

SEQ ID NO: 436076 - DNA, 25 bp, Artificial
  probe
  misc_feature (1)..(25): SEQ ID NO: 6355; WAN024BBK; Start 10; Stop 34
aaagggcaaactagaaaactagccg

SEQ ID NO: 436077 - DNA, 25 bp, Artificial
  probe
  misc_feature (1)..(25): SEQ ID NO: 6355; WAN024BBK; Start 45; Stop 69
aaaacagtgttttgaagttatggat

SEQ ID NO: 436078 - DNA, 25 bp, Artificial
  probe
  misc_feature (1)..(25): SEQ ID NO: 6356; WAN024FLC; Start 346; Stop 370
attagtgttgctatgttgttccttg

SEQ ID NO: 436079 - DNA, 25 bp, Artificial
  probe
  misc_feature (1)..(25): SEQ ID NO: 6356; WAN024FLC; Start 354; Stop 378
tgctatgttgttccttgtgatattg

SEQ ID NO: 436080 - DNA, 25 bp, Artificial
  probe
  misc_feature (1)..(25): SEQ ID NO: 6356; WAN024FLC; Start 352; Stop 376
gttgctatgttgttccttgtgatat

SEQ ID NO: 436081 - DNA, 25 bp, Artificial
  probe
  misc_feature (1)..(25): SEQ ID NO: 6356; WAN024FLC; Start 1174; Stop 1198
aggtatggagaagttgagaatgatt

SEQ ID NO: 436082 - DNA, 25 bp, Artificial
  probe
  misc_feature (1)..(25): SEQ ID NO: 6356; WAN024FLC; Start 1173; Stop 1197
aaggtatggagaagttgagaatgat

SEQ ID NO: 436083 - DNA, 25 bp, Artificial
  probe
  misc_feature (1)..(25): SEQ ID NO: 6356; WAN024FLC; Start 355; Stop 379
gctatgttgttccttgtgatattga

SEQ ID NO: 436084 - DNA, 25 bp, Artificial
  probe
  misc_feature (1)..(25): SEQ ID NO: 6356; WAN024FLC; Start 351; Stop 375
tgttgctatgttgttccttgtgata

SEQ ID NO: 436085 - DNA, 25 bp, Artificial
  probe
  misc_feature (1)..(25): SEQ ID NO: 6356; WAN024FLC; Start 347; Stop 371
ttagtgttgctatgttgttccttgt

SEQ ID NO: 436086 - DNA, 25 bp, Artificial
  probe
  misc_feature (1)..(25): SEQ ID NO: 6356; WAN024FLC; Start 345; Stop 369
cattagtgttgctatgttgttcctt

SEQ ID NO: 436087 - DNA, 25 bp, Artificial
  probe
  misc_feature (1)..(25): SEQ ID NO: 6356; WAN024FLC; Start 344; Stop 368
tcattagtgttgctatgttgttcct

SEQ ID NO: 436088 - DNA, 25 bp, Artificial
  probe
  misc_feature (1)..(25): SEQ ID NO: 6356; WAN024FLC; Start 343; Stop 367
atcattagtgttgctatgttgttcc

SEQ ID NO: 436089 - DNA, 25 bp, Artificial
  probe
  misc_feature (1)..(25): SEQ ID NO: 6356; WAN024FLC; Start 353; Stop 377
ttgctatgttgttccttgtgatatt

SEQ ID NO: 436090 - DNA, 25 bp, Artificial
  probe
  misc_feature (1)..(25): SEQ ID NO: 6356; WAN024FLC; Start 360; Stop 384
gttgttccttgtgatattgagtagt

SEQ ID NO: 436091 - DNA, 25 bp, Artificial
  probe
  misc_feature (1)..(25): SEQ ID NO: 6356; WAN024FLC; Start 359; Stop 383
tgttgttccttgtgatattgagtag

SEQ ID NO: 436092 - DNA, 25 bp, Artificial
  probe
  misc_feature (1)..(25): SEQ ID NO: 6356; WAN024FLC; Start 348; Stop 372
tagtgttgctatgttgttccttgtg

SEQ ID NO: 436093 - DNA, 25 bp, Artificial
  probe
  misc_feature (1)..(25): SEQ ID NO: 6356; WAN024FLC; Start 1181; Stop 1205
gagaagttgagaatgattccttacg

SEQ ID NO: 436094 - DNA, 25 bp, Artificial
  probe
  misc_feature (1)..(25): SEQ ID NO: 6356; WAN024FLC; Start 1175; Stop 1199
ggtatggagaagttgagaatgattc

SEQ ID NO: 436095 - DNA, 25 bp, Artificial
  probe
  misc_feature (1)..(25): SEQ ID NO: 6356; WAN024FLC; Start 358; Stop 382
atgttgttccttgtgatattgagta

SEQ ID NO: 436096 - DNA, 25 bp, Artificial
  probe
  misc_feature (1)..(25): SEQ ID NO: 6356; WAN024FLC; Start 357; Stop 381
tatgttgttccttgtgatattgagt

SEQ ID NO: 436097 - DNA, 25 bp, Artificial
  probe
  misc_feature (1)..(25): SEQ ID NO: 6356; WAN024FLC; Start 433; Stop 457
cgacactatcttggattccgatatt

SEQ ID NO: 436098 - DNA, 25 bp, Artificial
  probe
  misc_feature (1)..(25): SEQ ID NO: 6356; WAN024FLC; Start 350; Stop 374
gtgttgctatgttgttccttgtgat

SEQ ID NO: 436099 - DNA, 25 bp, Artificial
  probe
  misc_feature (1)..(25): SEQ ID NO: 6356; WAN024FLC; Start 779; Stop 803
ttcatcaagcagatcaattcttagg

SEQ ID NO: 436100 - DNA, 25 bp, Artificial
  probe
  misc_feature (1)..(25): SEQ ID NO: 6356; WAN024FLC; Start 356; Stop 380
ctatgttgttccttgtgatattgag

SEQ ID NO: 436101 - DNA, 25 bp, Artificial
  probe
  misc_feature (1)..(25): SEQ ID NO: 6356; WAN024FLC; Start 434; Stop 458
gacactatcttggattccgatattc

SEQ ID NO: 436102 - DNA, 25 bp, Artificial
  probe
  misc_feature (1)..(25): SEQ ID NO: 6356; WAN024FLC; Start 1178; Stop 1202
atggagaagttgagaatgattcctt

SEQ ID NO: 436103 - DNA, 25 bp, Artificial
  probe
  misc_feature (1)..(25): SEQ ID NO: 6356; WAN024FLC; Start 1179; Stop 1203
tggagaagttgagaatgattcctta

SEQ ID NO: 436104 - DNA, 25 bp, Artificial
  probe
  misc_feature (1)..(25): SEQ ID NO: 6356; WAN024FLC; Start 1180; Stop 1204
ggagaagttgagaatgattccttac

SEQ ID NO: 436105 - DNA, 25 bp, Artificial
  probe
  misc_feature (1)..(25): SEQ ID NO: 6356; WAN024FLC; Start 1177; Stop 1201
tatggagaagttgagaatgattcct

SEQ ID NO: 436106 - DNA, 25 bp, Artificial
  probe
  misc_feature (1)..(25): SEQ ID NO: 6356; WAN024FLC; Start 1176; Stop 1200
gtatggagaagttgagaatgattcc

SEQ ID NO: 436107 - DNA, 25 bp, Artificial
  probe
  misc_feature (1)..(25): SEQ ID NO: 6356; WAN024FLC; Start 436; Stop 460
cactatcttggattccgatattcat

SEQ ID NO: 436108 - DNA, 25 bp, Artificial
  probe
  misc_feature (1)..(25): SEQ ID NO: 6356; WAN024FLC; Start 362; Stop 386
tgttccttgtgatattgagtagtaa

SEQ ID NO: 436109 - DNA, 25 bp, Artificial
  probe
  misc_feature (1)..(25): SEQ ID NO: 6356; WAN024FLC; Start 361; Stop 385
ttgttccttgtgatattgagtagta

SEQ ID NO: 436110 - DNA, 25 bp, Artificial
  probe
  misc_feature (1)..(25): SEQ ID NO: 6356; WAN024FLC; Start 342; Stop 366
tatcattagtgttgctatgttgttc

SEQ ID NO: 436111 - DNA, 25 bp, Artificial
  probe
  misc_feature (1)..(25): SEQ ID NO: 6357; WAN024FYC; Start 330; Stop 354
ctatattctaggattgagtgtggtt

SEQ ID NO: 436112 - DNA, 25 bp, Artificial
  probe
  misc_feature (1)..(25): SEQ ID NO: 6357; WAN024FYC; Start 1204; Stop 1228
ggagttcctataatcggatcaatgg

SEQ ID NO: 436113 - DNA, 25 bp, Artificial
  probe
  misc_feature (1)..(25): SEQ ID NO: 6357; WAN024FYC; Start 270; Stop 294
gtctctgtccttatacgttgttctt

SEQ ID NO: 436114 - DNA, 25 bp, Artificial
  probe
  misc_feature (1)..(25): SEQ ID NO: 6357; WAN024FYC; Start 338; Stop 362
taggattgagtgtggtttctaaagg

SEQ ID NO: 436115 - DNA, 25 bp, Artificial
  probe
  misc_feature (1)..(25): SEQ ID NO: 6357; WAN024FYC; Start 101; Stop 125
cgtatgctttagggacttatggtta

SEQ ID NO: 436116 - DNA, 25 bp, Artificial
  probe
  misc_feature (1)..(25): SEQ ID NO: 6357; WAN024FYC; Start 97; Stop 121
tcttcgtatgctttagggacttatg

SEQ ID NO: 436117 - DNA, 25 bp, Artificial
  probe
  misc_feature (1)..(25): SEQ ID NO: 6357; WAN024FYC; Start 95; Stop 119
tttcttcgtatgctttagggactta

SEQ ID NO: 436118 - DNA, 25 bp, Artificial
  probe
  misc_feature (1)..(25): SEQ ID NO: 6357; WAN024FYC; Start 56; Stop 80
tactcccaatcattacaactcccta

SEQ ID NO: 436119 - DNA, 25 bp, Artificial
  probe
  misc_feature (1)..(25): SEQ ID NO: 6357; WAN024FYC; Start 54; Stop 78
tatactcccaatcattacaactccc

SEQ ID NO: 436120 - DNA, 25 bp, Artificial
  probe
  misc_feature (1)..(25): SEQ ID NO: 6357; WAN024FYC; Start 17; Stop 41
actacgcctacaatctttcttatca

SEQ ID NO: 436121 - DNA, 25 bp, Artificial
  probe
  misc_feature (1)..(25): SEQ ID NO: 6357; WAN024FYC; Start 342; Stop 366
attgagtgtggtttctaaaggctta

SEQ ID NO: 436122 - DNA, 25 bp, Artificial
  probe
  misc_feature (1)..(25): SEQ ID NO: 6357; WAN024FYC; Start 96; Stop 120
ttcttcgtatgctttagggacttat

SEQ ID NO: 436123 - DNA, 25 bp, Artificial
  probe
  misc_feature (1)..(25): SEQ ID NO: 6357; WAN024FYC; Start 1207; Stop 1231
gttcctataatcggatcaatggcaa

SEQ ID NO: 436124 - DNA, 25 bp, Artificial
  probe
  misc_feature (1)..(25): SEQ ID NO: 6357; WAN024FYC; Start 1205; Stop 1229
gagttcctataatcggatcaatggc

SEQ ID NO: 436125 - DNA, 25 bp, Artificial
  probe
  misc_feature (1)..(25): SEQ ID NO: 6357; WAN024FYC; Start 977; Stop 1001
ggatgttctttatcggttggactaa

SEQ ID NO: 436126 - DNA, 25 bp, Artificial
  probe
  misc_feature (1)..(25): SEQ ID NO: 6357; WAN024FYC; Start 268; Stop 292
ctgtctctgtccttatacgttgttc

SEQ ID NO: 436127 - DNA, 25 bp, Artificial
  probe
  misc_feature (1)..(25): SEQ ID NO: 6357; WAN024FYC; Start 265; Stop 289
gttctgtctctgtccttatacgttg

SEQ ID NO: 436128 - DNA, 25 bp, Artificial
  probe
  misc_feature (1)..(25): SEQ ID NO: 6357; WAN024FYC; Start 264; Stop 288
agttctgtctctgtccttatacgtt

SEQ ID NO: 436129 - DNA, 25 bp, Artificial
  probe
  misc_feature (1)..(25): SEQ ID NO: 6357; WAN024FYC; Start 57; Stop 81
actcccaatcattacaactccctat

SEQ ID NO: 436130 - DNA, 25 bp, Artificial
  probe
  misc_feature (1)..(25): SEQ ID NO: 6357; WAN024FYC; Start 55; Stop 79
atactcccaatcattacaactccct

SEQ ID NO: 436131 - DNA, 25 bp, Artificial
  probe
  misc_feature (1)..(25): SEQ ID NO: 6357; WAN024FYC; Start 427; Stop 451
acggttaaactgataggtgtaatct

SEQ ID NO: 436132 - DNA, 25 bp, Artificial
  probe
  misc_feature (1)..(25): SEQ ID NO: 6357; WAN024FYC; Start 98; Stop 122
cttcgtatgctttagggacttatgg

SEQ ID NO: 436133 - DNA, 25 bp, Artificial
  probe
  misc_feature (1)..(25): SEQ ID NO: 6357; WAN024FYC; Start 269; Stop 293
tgtctctgtccttatacgttgttct

SEQ ID NO: 436134 - DNA, 25 bp, Artificial
  probe
  misc_feature (1)..(25): SEQ ID NO: 6357; WAN024FYC; Start 267; Stop 291
tctgtctctgtccttatacgttgtt

SEQ ID NO: 436135 - DNA, 25 bp, Artificial
  probe
  misc_feature (1)..(25): SEQ ID NO: 6357; WAN024FYC; Start 266; Stop 290
ttctgtctctgtccttatacgttgt

SEQ ID NO: 436136 - DNA, 25 bp, Artificial
  probe
  misc_feature (1)..(25): SEQ ID NO: 6357; WAN024FYC; Start 983; Stop 1007
tctttatcggttggactaacatcat

SEQ ID NO: 436137 - DNA, 25 bp, Artificial
  probe
  misc_feature (1)..(25): SEQ ID NO: 6357; WAN024FYC; Start 982; Stop 1006
ttctttatcggttggactaacatca

SEQ ID NO: 436138 - DNA, 25 bp, Artificial
  probe
  misc_feature (1)..(25): SEQ ID NO: 6357; WAN024FYC; Start 720; Stop 744
ggctctaaagttggtcaatatcctt

SEQ ID NO: 436139 - DNA, 25 bp, Artificial
  probe
  misc_feature (1)..(25): SEQ ID NO: 6357; WAN024FYC; Start 361; Stop 385
ggcttagatatttcttggctctttc

SEQ ID NO: 436140 - DNA, 25 bp, Artificial
  probe
  misc_feature (1)..(25): SEQ ID NO: 6357; WAN024FYC; Start 360; Stop 384
aggcttagatatttcttggctcttt

SEQ ID NO: 436141 - DNA, 25 bp, Artificial
  probe
  misc_feature (1)..(25): SEQ ID NO: 6357; WAN024FYC; Start 359; Stop 383
aaggcttagatatttcttggctctt

SEQ ID NO: 436142 - DNA, 25 bp, Artificial
  probe
  misc_feature (1)..(25): SEQ ID NO: 6357; WAN024FYC; Start 358; Stop 382
aaaggcttagatatttcttggctct

SEQ ID NO: 436143 - DNA, 25 bp, Artificial
  probe
  misc_feature (1)..(25): SEQ ID NO: 6357; WAN024FYC; Start 1203; Stop 1227
aggagttcctataatcggatcaatg

SEQ ID NO: 436144 - DNA, 25 bp, Artificial
  probe
  misc_feature (1)..(25): SEQ ID NO: 6358; WAN024BL5; Start 65; Stop 89
tgattcttgatatcttgattgccat

SEQ ID NO: 436145 - DNA, 25 bp, Artificial
  probe
  misc_feature (1)..(25): SEQ ID NO: 6358; WAN024BL5; Start 64; Stop 88
atgattcttgatatcttgattgcca

SEQ ID NO: 436146 - DNA, 25 bp, Artificial
  probe
  misc_feature (1)..(25): SEQ ID NO: 6358; WAN024BL5; Start 69; Stop 93
tcttgatatcttgattgccattaca

SEQ ID NO: 436147 - DNA, 25 bp, Artificial
  probe
  misc_feature (1)..(25): SEQ ID NO: 6358; WAN024BL5; Start 63; Stop 87
gatgattcttgatatcttgattgcc

SEQ ID NO: 436148 - DNA, 25 bp, Artificial
  probe
  misc_feature (1)..(25): SEQ ID NO: 6358; WAN024BL5; Start 62; Stop 86
ggatgattcttgatatcttgattgc

SEQ ID NO: 436149 - DNA, 25 bp, Artificial
  probe
  misc_feature (1)..(25): SEQ ID NO: 6358; WAN024BL5; Start 71; Stop 95
ttgatatcttgattgccattacatg

SEQ ID NO: 436150 - DNA, 25 bp, Artificial
  probe
  misc_feature (1)..(25): SEQ ID NO: 6358; WAN024BL5; Start 66; Stop 90
gattcttgatatcttgattgccatt

SEQ ID NO: 436151 - DNA, 25 bp, Artificial
  probe
  misc_feature (1)..(25): SEQ ID NO: 6358; WAN024BL5; Start 70; Stop 94
cttgatatcttgattgccattacat

SEQ ID NO: 436152 - DNA, 25 bp, Artificial
  probe
  misc_feature (1)..(25): SEQ ID NO: 6358; WAN024BL5; Start 68; Stop 92
ttcttgatatcttgattgccattac

SEQ ID NO: 436153 - DNA, 25 bp, Artificial
  probe
  misc_feature (1)..(25): SEQ ID NO: 6358; WAN024BL5; Start 58; Stop 82
agtaggatgattcttgatatcttga

SEQ ID NO: 436154 - DNA, 25 bp, Artificial
  probe
  misc_feature (1)..(25): SEQ ID NO: 6358; WAN024BL5; Start 61; Stop 85
aggatgattcttgatatcttgattg

SEQ ID NO: 436155 - DNA, 25 bp, Artificial
  probe
  misc_feature (1)..(25): SEQ ID NO: 6358; WAN024BL5; Start 72; Stop 96
tgatatcttgattgccattacatgt

SEQ ID NO: 436156 - DNA, 25 bp, Artificial
  probe
  misc_feature (1)..(25): SEQ ID NO: 6358; WAN024BL5; Start 67; Stop 91
attcttgatatcttgattgccatta

SEQ ID NO: 436157 - DNA, 25 bp, Artificial
  probe
  misc_feature (1)..(25): SEQ ID NO: 6358; WAN024BL5; Start 59; Stop 83
gtaggatgattcttgatatcttgat

SEQ ID NO: 436158 - DNA, 25 bp, Artificial
  probe
  misc_feature (1)..(25): SEQ ID NO: 6358; WAN024BL5; Start 57; Stop 81
tagtaggatgattcttgatatcttg

SEQ ID NO: 436159 - DNA, 25 bp, Artificial
  probe
  misc_feature (1)..(25): SEQ ID NO: 6358; WAN024BL5; Start 60; Stop 84
taggatgattcttgatatcttgatt

SEQ ID NO: 436160 - DNA, 25 bp, Artificial
  probe
  misc_feature (1)..(25): SEQ ID NO: 6358; WAN024BL5; Start 26; Stop 50
ttctatgttatagtgaaagtatgga

SEQ ID NO: 436161 - DNA, 25 bp, Artificial
  probe
  misc_feature (1)..(25): SEQ ID NO: 6360; WAN024BH4; Start 159; Stop 183
tttaacttctactggtttgggtgat

SEQ ID NO: 436162 - DNA, 25 bp, Artificial
  probe
  misc_feature (1)..(25): SEQ ID NO: 6360; WAN024BH4; Start 158; Stop 182
ctttaacttctactggtttgggtga

SEQ ID NO: 436163 - DNA, 25 bp, Artificial
  probe
  misc_feature (1)..(25): SEQ ID NO: 6360; WAN024BH4; Start 160; Stop 184
ttaacttctactggtttgggtgatg

SEQ ID NO: 436164 - DNA, 25 bp, Artificial
  probe
  misc_feature (1)..(25): SEQ ID NO: 6360; WAN024BH4; Start 64; Stop 88
actgctgtcattgaagagatgatta

SEQ ID NO: 436165 - DNA, 25 bp, Artificial
  probe
  misc_feature (1)..(25): SEQ ID NO: 6360; WAN024BH4; Start 65; Stop 89
ctgctgtcattgaagagatgattaa

SEQ ID NO: 436166 - DNA, 25 bp, Artificial
  probe
  misc_feature (1)..(25): SEQ ID NO: 6360; WAN024BH4; Start 63; Stop 87
gactgctgtcattgaagagatgatt

SEQ ID NO: 436167 - DNA, 25 bp, Artificial
  probe
  misc_feature (1)..(25): SEQ ID NO: 6360; WAN024BH4; Start 329; Stop 353
atgatactcacttggcagcattgac

SEQ ID NO: 436168 - DNA, 25 bp, Artificial
  probe
  misc_feature (1)..(25): SEQ ID NO: 6360; WAN024BH4; Start 157; Stop 181
gctttaacttctactggtttgggtg

SEQ ID NO: 436169 - DNA, 25 bp, Artificial
  probe
  misc_feature (1)..(25): SEQ ID NO: 6360; WAN024BH4; Start 60; Stop 84
aaagactgctgtcattgaagagatg

SEQ ID NO: 436170 - DNA, 25 bp, Artificial
  probe
  misc_feature (1)..(25): SEQ ID NO: 6360; WAN024BH4; Start 161; Stop 185
taacttctactggtttgggtgatgg

SEQ ID NO: 436171 - DNA, 25 bp, Artificial
  probe
  misc_feature (1)..(25): SEQ ID NO: 6360; WAN024BH4; Start 257; Stop 281
gtgttgactatgacagtttggatgg

SEQ ID NO: 436172 - DNA, 25 bp, Artificial
  probe
  misc_feature (1)..(25): SEQ ID NO: 6360; WAN024BH4; Start 256; Stop 280
ggtgttgactatgacagtttggatg

SEQ ID NO: 436173 - DNA, 25 bp, Artificial
  probe
  misc_feature (1)..(25): SEQ ID NO: 6360; WAN024BH4; Start 62; Stop 86
agactgctgtcattgaagagatgat

SEQ ID NO: 436174 - DNA, 25 bp, Artificial
  probe
  misc_feature (1)..(25): SEQ ID NO: 6360; WAN024BH4; Start 61; Stop 85
aagactgctgtcattgaagagatga

SEQ ID NO: 436175 - DNA, 25 bp, Artificial
  probe
  misc_feature (1)..(25): SEQ ID NO: 6360; WAN024BH4; Start 252; Stop 276
caagggtgttgactatgacagtttg

SEQ ID NO: 436176 - DNA, 25 bp, Artificial
  probe
  misc_feature (1)..(25): SEQ ID NO: 6360; WAN024BH4; Start 352; Stop 376
acagaattgtctcaatacttgatga

SEQ ID NO: 436177 - DNA, 25 bp, Artificial
  probe
  misc_feature (1)..(25): SEQ ID NO: 6360; WAN024BH4; Start 328; Stop 352
aatgatactcacttggcagcattga

SEQ ID NO: 436178 - DNA, 25 bp, Artificial
  probe
  misc_feature (1)..(25): SEQ ID NO: 6360; WAN024BH4; Start 251; Stop 275
acaagggtgttgactatgacagttt

SEQ ID NO: 436179 - DNA, 25 bp, Artificial
  probe
  misc_feature (1)..(25): SEQ ID NO: 6360; WAN024BH4; Start 331; Stop 355
gatactcacttggcagcattgacag

SEQ ID NO: 436180 - DNA, 25 bp, Artificial
  probe
  misc_feature (1)..(25): SEQ ID NO: 6360; WAN024BH4; Start 335; Stop 359
ctcacttggcagcattgacagaatt

SEQ ID NO: 436181 - DNA, 25 bp, Artificial
  probe
  misc_feature (1)..(25): SEQ ID NO: 6360; WAN024BH4; Start 258; Stop 282
tgttgactatgacagtttggatggg

SEQ ID NO: 436182 - DNA, 25 bp, Artificial
  probe
  misc_feature (1)..(25): SEQ ID NO: 6360; WAN024BH4; Start 255; Stop 279
gggtgttgactatgacagtttggat

SEQ ID NO: 436183 - DNA, 25 bp, Artificial
  probe
  misc_feature (1)..(25): SEQ ID NO: 6360; WAN024BH4; Start 156; Stop 180
agctttaacttctactggtttgggt

SEQ ID NO: 436184 - DNA, 25 bp, Artificial
  probe
  misc_feature (1)..(25): SEQ ID NO: 6360; WAN024BH4; Start 25; Stop 49
aaagatgtcatgttgctggatttgc

SEQ ID NO: 436185 - DNA, 25 bp, Artificial
  probe
  misc_feature (1)..(25): SEQ ID NO: 6360; WAN024BH4; Start 230; Stop 254
cagttctctttgctaagtcaaacaa

SEQ ID NO: 436186 - DNA, 25 bp, Artificial
  probe
  misc_feature (1)..(25): SEQ ID NO: 6360; WAN024BH4; Start 231; Stop 255
agttctctttgctaagtcaaacaag

SEQ ID NO: 436187 - DNA, 25 bp, Artificial
  probe
  misc_feature (1)..(25): SEQ ID NO: 6360; WAN024BH4; Start 228; Stop 252
gacagttctctttgctaagtcaaac

SEQ ID NO: 436188 - DNA, 25 bp, Artificial
  probe
  misc_feature (1)..(25): SEQ ID NO: 6360; WAN024BH4; Start 232; Stop 256
gttctctttgctaagtcaaacaagg

SEQ ID NO: 436189 - DNA, 25 bp, Artificial
  probe
  misc_feature (1)..(25): SEQ ID NO: 6360; WAN024BH4; Start 253; Stop 277
aagggtgttgactatgacagtttgg

SEQ ID NO: 436190 - DNA, 25 bp, Artificial
  probe
  misc_feature (1)..(25): SEQ ID NO: 6360; WAN024BH4; Start 229; Stop 253
acagttctctttgctaagtcaaaca

SEQ ID NO: 436191 - DNA, 25 bp, Artificial
  probe
  misc_feature (1)..(25): SEQ ID NO: 6360; WAN024BH4; Start 332; Stop 356
atactcacttggcagcattgacaga

SEQ ID NO: 436192 - DNA, 25 bp, Artificial
  probe
  misc_feature (1)..(25): SEQ ID NO: 6360; WAN024BH4; Start 336; Stop 360
tcacttggcagcattgacagaattg

SEQ ID NO: 436193 - DNA, 25 bp, Artificial
  probe
  misc_feature (1)..(25): SEQ ID NO: 6360; WAN024BH4; Start 104; Stop 128
acggttatgtgacagattttgaaac

SEQ ID NO: 436194 - DNA, 25 bp, Artificial
  probe
  misc_feature (1)..(25): SEQ ID NO: 6361; WAN024BZQ; Start 326; Stop 350
aactagagagtggttatggttgtta

SEQ ID NO: 436195 - DNA, 25 bp, Artificial
  probe
  misc_feature (1)..(25): SEQ ID NO: 6361; WAN024BZQ; Start 585; Stop 609
ctcagttctaggagcatcaagtata

SEQ ID NO: 436196 - DNA, 25 bp, Artificial
  probe
  misc_feature (1)..(25): SEQ ID NO: 6361; WAN024BZQ; Start 770; Stop 794
agacaggtaaggtcaagattattgc

SEQ ID NO: 436197 - DNA, 25 bp, Artificial
  probe
  misc_feature (1)..(25): SEQ ID NO: 6361; WAN024BZQ; Start 327; Stop 351
actagagagtggttatggttgttat

SEQ ID NO: 436198 - DNA, 25 bp, Artificial
  probe
  misc_feature (1)..(25): SEQ ID NO: 6361; WAN024BZQ; Start 769; Stop 793
gagacaggtaaggtcaagattattg

SEQ ID NO: 436199 - DNA, 25 bp, Artificial
  probe
  misc_feature (1)..(25): SEQ ID NO: 6361; WAN024BZQ; Start 768; Stop 792
agagacaggtaaggtcaagattatt

SEQ ID NO: 436200 - DNA, 25 bp, Artificial
  probe
  misc_feature (1)..(25): SEQ ID NO: 6361; WAN024BZQ; Start 328; Stop 352
ctagagagtggttatggttgttatt

SEQ ID NO: 436201 - DNA, 25 bp, Artificial
  probe
  misc_feature (1)..(25): SEQ ID NO: 6361; WAN024BZQ; Start 766; Stop 790
ttagagacaggtaaggtcaagatta

SEQ ID NO: 436202 - DNA, 25 bp, Artificial
  probe
  misc_feature (1)..(25): SEQ ID NO: 6361; WAN024BZQ; Start 767; Stop 791
tagagacaggtaaggtcaagattat

SEQ ID NO: 436203 - DNA, 25 bp, Artificial
  probe
  misc_feature (1)..(25): SEQ ID NO: 6361; WAN024BZQ; Start 278; Stop 302
cgattggtgaaagtgtagaagaaac

SEQ ID NO: 436204 - DNA, 25 bp, Artificial
  probe
  misc_feature (1)..(25): SEQ ID NO: 6361; WAN024BZQ; Start 276; Stop 300
tacgattggtgaaagtgtagaagaa

SEQ ID NO: 436205 - DNA, 25 bp, Artificial
  probe
  misc_feature (1)..(25): SEQ ID NO: 6361; WAN024BZQ; Start 275; Stop 299
ttacgattggtgaaagtgtagaaga

SEQ ID NO: 436206 - DNA, 25 bp, Artificial
  probe
  misc_feature (1)..(25): SEQ ID NO: 6361; WAN024BZQ; Start 488; Stop 512
attatttaggtggagcgaacaatga

SEQ ID NO: 436207 - DNA, 25 bp, Artificial
  probe
  misc_feature (1)..(25): SEQ ID NO: 6361; WAN024BZQ; Start 287; Stop 311
aaagtgtagaagaaacctgtatcgg

SEQ ID NO: 436208 - DNA, 25 bp, Artificial
  probe
  misc_feature (1)..(25): SEQ ID NO: 6361; WAN024BZQ; Start 286; Stop 310
gaaagtgtagaagaaacctgtatcg

SEQ ID NO: 436209 - DNA, 25 bp, Artificial
  probe
  misc_feature (1)..(25): SEQ ID NO: 6361; WAN024BZQ; Start 277; Stop 301
acgattggtgaaagtgtagaagaaa

SEQ ID NO: 436210 - DNA, 25 bp, Artificial
  probe
  misc_feature (1)..(25): SEQ ID NO: 6361; WAN024BZQ; Start 20; Stop 44
atcatttagactcaccaggattagc

SEQ ID NO: 436211 - DNA, 25 bp, Artificial
  probe
  misc_feature (1)..(25): SEQ ID NO: 6361; WAN024BZQ; Start 322; Stop 346
ttccaactagagagtggttatggtt

SEQ ID NO: 436212 - DNA, 25 bp, Artificial
  probe
  misc_feature (1)..(25): SEQ ID NO: 6361; WAN024BZQ; Start 489; Stop 513
ttatttaggtggagcgaacaatgaa

SEQ ID NO: 436213 - DNA, 25 bp, Artificial
  probe
  misc_feature (1)..(25): SEQ ID NO: 6361; WAN024BZQ; Start 44; Stop 68
ctgggatgatttgtagacggattaa

SEQ ID NO: 436214 - DNA, 25 bp, Artificial
  probe
  misc_feature (1)..(25): SEQ ID NO: 6361; WAN024BZQ; Start 487; Stop 511
tattatttaggtggagcgaacaatg

SEQ ID NO: 436215 - DNA, 25 bp, Artificial
  probe
  misc_feature (1)..(25): SEQ ID NO: 6361; WAN024BZQ; Start 486; Stop 510
gtattatttaggtggagcgaacaat

SEQ ID NO: 436216 - DNA, 25 bp, Artificial
  probe
  misc_feature (1)..(25): SEQ ID NO: 6361; WAN024BZQ; Start 483; Stop 507
attgtattatttaggtggagcgaac

SEQ ID NO: 436217 - DNA, 25 bp, Artificial
  probe
  misc_feature (1)..(25): SEQ ID NO: 6361; WAN024BZQ; Start 636; Stop 660
acttggtggctttaatgaaattgtt

SEQ ID NO: 436218 - DNA, 25 bp, Artificial
  probe
  misc_feature (1)..(25): SEQ ID NO: 6361; WAN024BZQ; Start 574; Stop 598
gaattaccaagctcagttctaggag

SEQ ID NO: 436219 - DNA, 25 bp, Artificial
  probe
  misc_feature (1)..(25): SEQ ID NO: 6361; WAN024BZQ; Start 293; Stop 317
tagaagaaacctgtatcgggaattt

SEQ ID NO: 436220 - DNA, 25 bp, Artificial
  probe
  misc_feature (1)..(25): SEQ ID NO: 6361; WAN024BZQ; Start 292; Stop 316
gtagaagaaacctgtatcgggaatt

SEQ ID NO: 436221 - DNA, 25 bp, Artificial
  probe
  misc_feature (1)..(25): SEQ ID NO: 6361; WAN024BZQ; Start 587; Stop 611
cagttctaggagcatcaagtataca

SEQ ID NO: 436222 - DNA, 25 bp, Artificial
  probe
  misc_feature (1)..(25): SEQ ID NO: 6361; WAN024BZQ; Start 274; Stop 298
attacgattggtgaaagtgtagaag

SEQ ID NO: 436223 - DNA, 25 bp, Artificial
  probe
  misc_feature (1)..(25): SEQ ID NO: 6361; WAN024BZQ; Start 586; Stop 610
tcagttctaggagcatcaagtatac

SEQ ID NO: 436224 - DNA, 25 bp, Artificial
  probe
  misc_feature (1)..(25): SEQ ID NO: 6361; WAN024BZQ; Start 635; Stop 659
tacttggtggctttaatgaaattgt

SEQ ID NO: 436225 - DNA, 25 bp, Artificial
  probe
  misc_feature (1)..(25): SEQ ID NO: 6361; WAN024BZQ; Start 490; Stop 514
tatttaggtggagcgaacaatgaag

SEQ ID NO: 436226 - DNA, 25 bp, Artificial
  probe
  misc_feature (1)..(25): SEQ ID NO: 6361; WAN024BZQ; Start 637; Stop 661
cttggtggctttaatgaaattgttt

SEQ ID NO: 436227 - DNA, 25 bp, Artificial
  probe
  misc_feature (1)..(25): SEQ ID NO: 6362; WAN024FPB; Start 81; Stop 105
caataagccactcatcattcatacg

SEQ ID NO: 436228 - DNA, 25 bp, Artificial
  probe
  misc_feature (1)..(25): SEQ ID NO: 6362; WAN024FPB; Start 80; Stop 104
acaataagccactcatcattcatac

SEQ ID NO: 436229 - DNA, 25 bp, Artificial
  probe
  misc_feature (1)..(25): SEQ ID NO: 6362; WAN024FPB; Start 79; Stop 103
gacaataagccactcatcattcata

SEQ ID NO: 436230 - DNA, 25 bp, Artificial
  probe
  misc_feature (1)..(25): SEQ ID NO: 6362; WAN024FPB; Start 82; Stop 106
aataagccactcatcattcatacgc

SEQ ID NO: 436231 - DNA, 25 bp, Artificial
  probe
  misc_feature (1)..(25): SEQ ID NO: 6362; WAN024FPB; Start 78; Stop 102
tgacaataagccactcatcattcat

SEQ ID NO: 436232 - DNA, 25 bp, Artificial
  probe
  misc_feature (1)..(25): SEQ ID NO: 6362; WAN024FPB; Start 76; Stop 100
gttgacaataagccactcatcattc

SEQ ID NO: 436233 - DNA, 25 bp, Artificial
  probe
  misc_feature (1)..(25): SEQ ID NO: 6362; WAN024FPB; Start 288; Stop 312
taatatagatcggcaagtgactgtt

SEQ ID NO: 436234 - DNA, 25 bp, Artificial
  probe
  misc_feature (1)..(25): SEQ ID NO: 6362; WAN024FPB; Start 77; Stop 101
ttgacaataagccactcatcattca

SEQ ID NO: 436235 - DNA, 25 bp, Artificial
  probe
  misc_feature (1)..(25): SEQ ID NO: 6362; WAN024FPB; Start 287; Stop 311
ataatatagatcggcaagtgactgt

SEQ ID NO: 436236 - DNA, 25 bp, Artificial
  probe
  misc_feature (1)..(25): SEQ ID NO: 6362; WAN024FPB; Start 74; Stop 98
atgttgacaataagccactcatcat

SEQ ID NO: 436237 - DNA, 25 bp, Artificial
  probe
  misc_feature (1)..(25): SEQ ID NO: 6362; WAN024FPB; Start 75; Stop 99
tgttgacaataagccactcatcatt

SEQ ID NO: 436238 - DNA, 25 bp, Artificial
  probe
  misc_feature (1)..(25): SEQ ID NO: 6362; WAN024FPB; Start 286; Stop 310
aataatatagatcggcaagtgactg

SEQ ID NO: 436239 - DNA, 25 bp, Artificial
  probe
  misc_feature (1)..(25): SEQ ID NO: 6362; WAN024FPB; Start 581; Stop 605
cctgtgaattaatgaagatgttcgg

SEQ ID NO: 436240 - DNA, 25 bp, Artificial
  probe
  misc_feature (1)..(25): SEQ ID NO: 6362; WAN024FPB; Start 582; Stop 606
ctgtgaattaatgaagatgttcgga

SEQ ID NO: 436241 - DNA, 25 bp, Artificial
  probe
  misc_feature (1)..(25): SEQ ID NO: 6362; WAN024FPB; Start 580; Stop 604
tcctgtgaattaatgaagatgttcg

SEQ ID NO: 436242 - DNA, 25 bp, Artificial
  probe
  misc_feature (1)..(25): SEQ ID NO: 6362; WAN024FPB; Start 583; Stop 607
tgtgaattaatgaagatgttcggaa

SEQ ID NO: 436243 - DNA, 25 bp, Artificial
  probe
  misc_feature (1)..(25): SEQ ID NO: 6362; WAN024FPB; Start 474; Stop 498
aagagagttattgaggagaacgcag

SEQ ID NO: 436244 - DNA, 25 bp, Artificial
  probe
  misc_feature (1)..(25): SEQ ID NO: 6362; WAN024FPB; Start 73; Stop 97
catgttgacaataagccactcatca

SEQ ID NO: 436245 - DNA, 25 bp, Artificial
  probe
  misc_feature (1)..(25): SEQ ID NO: 6362; WAN024FPB; Start 403; Stop 427
gcaattccttgtgttgaggttactt

SEQ ID NO: 436246 - DNA, 25 bp, Artificial
  probe
  misc_feature (1)..(25): SEQ ID NO: 6362; WAN024FPB; Start 87; Stop 111
gccactcatcattcatacgctagaa

SEQ ID NO: 436247 - DNA, 25 bp, Artificial
  probe
  misc_feature (1)..(25): SEQ ID NO: 6362; WAN024FPB; Start 476; Stop 500
gagagttattgaggagaacgcagac

SEQ ID NO: 436248 - DNA, 25 bp, Artificial
  probe
  misc_feature (1)..(25): SEQ ID NO: 6362; WAN024FPB; Start 221; Stop 245
atatagtaaatggcggagaaactgg

SEQ ID NO: 436249 - DNA, 25 bp, Artificial
  probe
  misc_feature (1)..(25): SEQ ID NO: 6362; WAN024FPB; Start 475; Stop 499
agagagttattgaggagaacgcaga

SEQ ID NO: 436250 - DNA, 25 bp, Artificial
  probe
  misc_feature (1)..(25): SEQ ID NO: 6362; WAN024FPB; Start 289; Stop 313
aatatagatcggcaagtgactgttt

SEQ ID NO: 436251 - DNA, 25 bp, Artificial
  probe
  misc_feature (1)..(25): SEQ ID NO: 6362; WAN024FPB; Start 88; Stop 112
ccactcatcattcatacgctagaaa

SEQ ID NO: 436252 - DNA, 25 bp, Artificial
  probe
  misc_feature (1)..(25): SEQ ID NO: 6362; WAN024FPB; Start 579; Stop 603
ttcctgtgaattaatgaagatgttc

SEQ ID NO: 436253 - DNA, 25 bp, Artificial
  probe
  misc_feature (1)..(25): SEQ ID NO: 6362; WAN024FPB; Start 336; Stop 360
gatggtaagcaacgaaatcattgat

SEQ ID NO: 436254 - DNA, 25 bp, Artificial
  probe
  misc_feature (1)..(25): SEQ ID NO: 6362; WAN024FPB; Start 337; Stop 361
atggtaagcaacgaaatcattgatg

SEQ ID NO: 436255 - DNA, 25 bp, Artificial
  probe
  misc_feature (1)..(25): SEQ ID NO: 6362; WAN024FPB; Start 222; Stop 246
tatagtaaatggcggagaaactggt

SEQ ID NO: 436256 - DNA, 25 bp, Artificial
  probe
  misc_feature (1)..(25): SEQ ID NO: 6362; WAN024FPB; Start 473; Stop 497
aaagagagttattgaggagaacgca

SEQ ID NO: 436257 - DNA, 25 bp, Artificial
  probe
  misc_feature (1)..(25): SEQ ID NO: 6362; WAN024FPB; Start 478; Stop 502
gagttattgaggagaacgcagacac

SEQ ID NO: 436258 - DNA, 25 bp, Artificial
  probe
  misc_feature (1)..(25): SEQ ID NO: 6362; WAN024FPB; Start 477; Stop 501
agagttattgaggagaacgcagaca

SEQ ID NO: 436259 - DNA, 25 bp, Artificial
  probe
  misc_feature (1)..(25): SEQ ID NO: 6362; WAN024FPB; Start 404; Stop 428
caattccttgtgttgaggttacttt

SEQ ID NO: 436260 - DNA, 25 bp, Artificial
  probe
  misc_feature (1)..(25): SEQ ID NO: 6363; WAN024DJA; Start 19; Stop 43
ggaagtggttatgtaggactgtctt

SEQ ID NO: 436261 - DNA, 25 bp, Artificial
  probe
  misc_feature (1)..(25): SEQ ID NO: 6363; WAN024DJA; Start 390; Stop 414
ccaagctctattactgtattcctca

SEQ ID NO: 436262 - DNA, 25 bp, Artificial
  probe
  misc_feature (1)..(25): SEQ ID NO: 6363; WAN024DJA; Start 18; Stop 42
aggaagtggttatgtaggactgtct

SEQ ID NO: 436263 - DNA, 25 bp, Artificial
  probe
  misc_feature (1)..(25): SEQ ID NO: 6363; WAN024DJA; Start 23; Stop 47
gtggttatgtaggactgtctttagc

SEQ ID NO: 436264 - DNA, 25 bp, Artificial
  probe
  misc_feature (1)..(25): SEQ ID NO: 6363; WAN024DJA; Start 17; Stop 41
caggaagtggttatgtaggactgtc

SEQ ID NO: 436265 - DNA, 25 bp, Artificial
  probe
  misc_feature (1)..(25): SEQ ID NO: 6363; WAN024DJA; Start 391; Stop 415
caagctctattactgtattcctcat

SEQ ID NO: 436266 - DNA, 25 bp, Artificial
  probe
  misc_feature (1)..(25): SEQ ID NO: 6363; WAN024DJA; Start 20; Stop 44
gaagtggttatgtaggactgtcttt

SEQ ID NO: 436267 - DNA, 25 bp, Artificial
  probe
  misc_feature (1)..(25): SEQ ID NO: 6363; WAN024DJA; Start 22; Stop 46
agtggttatgtaggactgtctttag

SEQ ID NO: 436268 - DNA, 25 bp, Artificial
  probe
  misc_feature (1)..(25): SEQ ID NO: 6363; WAN024DJA; Start 21; Stop 45
aagtggttatgtaggactgtcttta

SEQ ID NO: 436269 - DNA, 25 bp, Artificial
  probe
  misc_feature (1)..(25): SEQ ID NO: 6363; WAN024DJA; Start 27; Stop 51
ttatgtaggactgtctttagcggtg

SEQ ID NO: 436270 - DNA, 25 bp, Artificial
  probe
  misc_feature (1)..(25): SEQ ID NO: 6363; WAN024DJA; Start 26; Stop 50
gttatgtaggactgtctttagcggt

SEQ ID NO: 436271 - DNA, 25 bp, Artificial
  probe
  misc_feature (1)..(25): SEQ ID NO: 6363; WAN024DJA; Start 24; Stop 48
tggttatgtaggactgtctttagcg

SEQ ID NO: 436272 - DNA, 25 bp, Artificial
  probe
  misc_feature (1)..(25): SEQ ID NO: 6363; WAN024DJA; Start 389; Stop 413
cccaagctctattactgtattcctc

SEQ ID NO: 436273 - DNA, 25 bp, Artificial
  probe
  misc_feature (1)..(25): SEQ ID NO: 6363; WAN024DJA; Start 387; Stop 411
ttcccaagctctattactgtattcc

SEQ ID NO: 436274 - DNA, 25 bp, Artificial
  probe
  misc_feature (1)..(25): SEQ ID NO: 6363; WAN024DJA; Start 13; Stop 37
attgcaggaagtggttatgtaggac

SEQ ID NO: 436275 - DNA, 25 bp, Artificial
  probe
  misc_feature (1)..(25): SEQ ID NO: 6363; WAN024DJA; Start 388; Stop 412
tcccaagctctattactgtattcct

SEQ ID NO: 436276 - DNA, 25 bp, Artificial
  probe
  misc_feature (1)..(25): SEQ ID NO: 6363; WAN024DJA; Start 12; Stop 36
cattgcaggaagtggttatgtagga

SEQ ID NO: 436277 - DNA, 25 bp, Artificial
  probe
  misc_feature (1)..(25): SEQ ID NO: 6363; WAN024DJA; Start 25; Stop 49
ggttatgtaggactgtctttagcgg

SEQ ID NO: 436278 - DNA, 25 bp, Artificial
  probe
  misc_feature (1)..(25): SEQ ID NO: 6363; WAN024DJA; Start 386; Stop 410
tttcccaagctctattactgtattc

SEQ ID NO: 436279 - DNA, 25 bp, Artificial
  probe
  misc_feature (1)..(25): SEQ ID NO: 6363; WAN024DJA; Start 393; Stop 417
agctctattactgtattcctcataa

SEQ ID NO: 436280 - DNA, 25 bp, Artificial
  probe
  misc_feature (1)..(25): SEQ ID NO: 6363; WAN024DJA; Start 392; Stop 416
aagctctattactgtattcctcata

SEQ ID NO: 436281 - DNA, 25 bp, Artificial
  probe
  misc_feature (1)..(25): SEQ ID NO: 6363; WAN024DJA; Start 335; Stop 359
caatcgtaatcaaaagtcttcctcc

SEQ ID NO: 436282 - DNA, 25 bp, Artificial
  probe
  misc_feature (1)..(25): SEQ ID NO: 6363; WAN024DJA; Start 339; Stop 363
cgtaatcaaaagtcttcctccaaaa

SEQ ID NO: 436283 - DNA, 25 bp, Artificial
  probe
  misc_feature (1)..(25): SEQ ID NO: 6363; WAN024DJA; Start 337; Stop 361
atcgtaatcaaaagtcttcctccaa

SEQ ID NO: 436284 - DNA, 25 bp, Artificial
  probe
  misc_feature (1)..(25): SEQ ID NO: 6363; WAN024DJA; Start 336; Stop 360
aatcgtaatcaaaagtcttcctcca

SEQ ID NO: 436285 - DNA, 25 bp, Artificial
  probe
  misc_feature (1)..(25): SEQ ID NO: 6363; WAN024DJA; Start 338; Stop 362
tcgtaatcaaaagtcttcctccaaa

SEQ ID NO: 436286 - DNA, 25 bp, Artificial
  probe
  misc_feature (1)..(25): SEQ ID NO: 6363; WAN024DJA; Start 334; Stop 358
acaatcgtaatcaaaagtcttcctc

SEQ ID NO: 436287 - DNA, 25 bp, Artificial
  probe
  misc_feature (1)..(25): SEQ ID NO: 6363; WAN024DJA; Start 369; Stop 393
aaacctctctaaaaccttttcccaa

SEQ ID NO: 436288 - DNA, 25 bp, Artificial
  probe
  misc_feature (1)..(25): SEQ ID NO: 6363; WAN024DJA; Start 16; Stop 40
gcaggaagtggttatgtaggactgt

SEQ ID NO: 436289 - DNA, 25 bp, Artificial
  probe
  misc_feature (1)..(25): SEQ ID NO: 6363; WAN024DJA; Start 14; Stop 38
ttgcaggaagtggttatgtaggact

SEQ ID NO: 436290 - DNA, 25 bp, Artificial
  probe
  misc_feature (1)..(25): SEQ ID NO: 6363; WAN024DJA; Start 370; Stop 394
aacctctctaaaaccttttcccaag

SEQ ID NO: 436291 - DNA, 25 bp, Artificial
  probe
  misc_feature (1)..(25): SEQ ID NO: 6363; WAN024DJA; Start 333; Stop 357
tacaatcgtaatcaaaagtcttcct

SEQ ID NO: 436292 - DNA, 25 bp, Artificial
  probe
  misc_feature (1)..(25): SEQ ID NO: 6363; WAN024DJA; Start 340; Stop 364
gtaatcaaaagtcttcctccaaaat

SEQ ID NO: 436293 - DNA, 25 bp, Artificial
  probe
  misc_feature (1)..(25): SEQ ID NO: 6364; WAN024BON; Start 1103; Stop 1127
ctggtgtgttaggtgtaagtatgat

SEQ ID NO: 436294 - DNA, 25 bp, Artificial
  probe
  misc_feature (1)..(25): SEQ ID NO: 6364; WAN024BON; Start 829; Stop 853
aacgctgcttatgtgtattactctc

SEQ ID NO: 436295 - DNA, 25 bp, Artificial
  probe
  misc_feature (1)..(25): SEQ ID NO: 6364; WAN024BON; Start 1104; Stop 1128
tggtgtgttaggtgtaagtatgata

SEQ ID NO: 436296 - DNA, 25 bp, Artificial
  probe
  misc_feature (1)..(25): SEQ ID NO: 6364; WAN024BON; Start 828; Stop 852
caacgctgcttatgtgtattactct

SEQ ID NO: 436297 - DNA, 25 bp, Artificial
  probe
  misc_feature (1)..(25): SEQ ID NO: 6364; WAN024BON; Start 1109; Stop 1133
tgttaggtgtaagtatgatatgtgc

SEQ ID NO: 436298 - DNA, 25 bp, Artificial
  probe
  misc_feature (1)..(25): SEQ ID NO: 6364; WAN024BON; Start 1102; Stop 1126
actggtgtgttaggtgtaagtatga

SEQ ID NO: 436299 - DNA, 25 bp, Artificial
  probe
  misc_feature (1)..(25): SEQ ID NO: 6364; WAN024BON; Start 1105; Stop 1129
ggtgtgttaggtgtaagtatgatat

SEQ ID NO: 436300 - DNA, 25 bp, Artificial
  probe
  misc_feature (1)..(25): SEQ ID NO: 6364; WAN024BON; Start 107; Stop 131
cgttgatgatacttccgtatgtgat

SEQ ID NO: 436301 - DNA, 25 bp, Artificial
  probe
  misc_feature (1)..(25): SEQ ID NO: 6364; WAN024BON; Start 830; Stop 854
acgctgcttatgtgtattactctcc

SEQ ID NO: 436302 - DNA, 25 bp, Artificial
  probe
  misc_feature (1)..(25): SEQ ID NO: 6364; WAN024BON; Start 1098; Stop 1122
aattactggtgtgttaggtgtaagt

SEQ ID NO: 436303 - DNA, 25 bp, Artificial
  probe
  misc_feature (1)..(25): SEQ ID NO: 6364; WAN024BON; Start 108; Stop 132
gttgatgatacttccgtatgtgatt

SEQ ID NO: 436304 - DNA, 25 bp, Artificial
  probe
  misc_feature (1)..(25): SEQ ID NO: 6364; WAN024BON; Start 1101; Stop 1125
tactggtgtgttaggtgtaagtatg

SEQ ID NO: 436305 - DNA, 25 bp, Artificial
  probe
  misc_feature (1)..(25): SEQ ID NO: 6364; WAN024BON; Start 698; Stop 722
ttgtaggtaatggtgctataagtac

SEQ ID NO: 436306 - DNA, 25 bp, Artificial
  probe
  misc_feature (1)..(25): SEQ ID NO: 6364; WAN024BON; Start 1100; Stop 1124
ttactggtgtgttaggtgtaagtat

SEQ ID NO: 436307 - DNA, 25 bp, Artificial
  probe
  misc_feature (1)..(25): SEQ ID NO: 6364; WAN024BON; Start 1099; Stop 1123
attactggtgtgttaggtgtaagta

SEQ ID NO: 436308 - DNA, 25 bp, Artificial
  probe
  misc_feature (1)..(25): SEQ ID NO: 6364; WAN024BON; Start 491; Stop 515
tagccttgatggttgtttgttattc

SEQ ID NO: 436309 - DNA, 25 bp, Artificial
  probe
  misc_feature (1)..(25): SEQ ID NO: 6364; WAN024BON; Start 1107; Stop 1131
tgtgttaggtgtaagtatgatatgt

SEQ ID NO: 436310 - DNA, 25 bp, Artificial
  probe
  misc_feature (1)..(25): SEQ ID NO: 6364; WAN024BON; Start 1108; Stop 1132
gtgttaggtgtaagtatgatatgtg

SEQ ID NO: 436311 - DNA, 25 bp, Artificial
  probe
  misc_feature (1)..(25): SEQ ID NO: 6364; WAN024BON; Start 1106; Stop 1130
gtgtgttaggtgtaagtatgatatg

SEQ ID NO: 436312 - DNA, 25 bp, Artificial
  probe
  misc_feature (1)..(25): SEQ ID NO: 6364; WAN024BON; Start 700; Stop 724
gtaggtaatggtgctataagtacat

SEQ ID NO: 436313 - DNA, 25 bp, Artificial
  probe
  misc_feature (1)..(25): SEQ ID NO: 6364; WAN024BON; Start 1067; Stop 1091
atttgttaatttcctcagttggtgc

SEQ ID NO: 436314 - DNA, 25 bp, Artificial
  probe
  misc_feature (1)..(25): SEQ ID NO: 6364; WAN024BON; Start 361; Stop 385
agtaagtttgttgtggttattgctt

SEQ ID NO: 436315 - DNA, 25 bp, Artificial
  probe
  misc_feature (1)..(25): SEQ ID NO: 6364; WAN024BON; Start 756; Stop 780
tctattccagggaggtataaaggtt

SEQ ID NO: 436316 - DNA, 25 bp, Artificial
  probe
  misc_feature (1)..(25): SEQ ID NO: 6364; WAN024BON; Start 755; Stop 779
ttctattccagggaggtataaaggt

SEQ ID NO: 436317 - DNA, 25 bp, Artificial
  probe
  misc_feature (1)..(25): SEQ ID NO: 6364; WAN024BON; Start 360; Stop 384
tagtaagtttgttgtggttattgct

SEQ ID NO: 436318 - DNA, 25 bp, Artificial
  probe
  misc_feature (1)..(25): SEQ ID NO: 6364; WAN024BON; Start 757; Stop 781
ctattccagggaggtataaaggttt

SEQ ID NO: 436319 - DNA, 25 bp, Artificial
  probe
  misc_feature (1)..(25): SEQ ID NO: 6364; WAN024BON; Start 1066; Stop 1090
catttgttaatttcctcagttggtg

SEQ ID NO: 436320 - DNA, 25 bp, Artificial
  probe
  misc_feature (1)..(25): SEQ ID NO: 6364; WAN024BON; Start 1065; Stop 1089
tcatttgttaatttcctcagttggt

SEQ ID NO: 436321 - DNA, 25 bp, Artificial
  probe
  misc_feature (1)..(25): SEQ ID NO: 6364; WAN024BON; Start 490; Stop 514
ctagccttgatggttgtttgttatt

SEQ ID NO: 436322 - DNA, 25 bp, Artificial
  probe
  misc_feature (1)..(25): SEQ ID NO: 6364; WAN024BON; Start 489; Stop 513
tctagccttgatggttgtttgttat

SEQ ID NO: 436323 - DNA, 25 bp, Artificial
  probe
  misc_feature (1)..(25): SEQ ID NO: 6364; WAN024BON; Start 1064; Stop 1088
gtcatttgttaatttcctcagttgg

SEQ ID NO: 436324 - DNA, 25 bp, Artificial
  probe
  misc_feature (1)..(25): SEQ ID NO: 6364; WAN024BON; Start 1063; Stop 1087
ggtcatttgttaatttcctcagttg

SEQ ID NO: 436325 - DNA, 25 bp, Artificial
  probe
  misc_feature (1)..(25): SEQ ID NO: 6364; WAN024BON; Start 488; Stop 512
ttctagccttgatggttgtttgtta

SEQ ID NO: 436326 - DNA, 25 bp, Artificial
  probe
  misc_feature (1)..(25): SEQ ID NO: 6365; WAN024CKI; Start 785; Stop 809
atggtacggaattgctaagtatgaa

SEQ ID NO: 436327 - DNA, 25 bp, Artificial
  probe
  misc_feature (1)..(25): SEQ ID NO: 6365; WAN024CKI; Start 782; Stop 806
gagatggtacggaattgctaagtat

SEQ ID NO: 436328 - DNA, 25 bp, Artificial
  probe
  misc_feature (1)..(25): SEQ ID NO: 6365; WAN024CKI; Start 784; Stop 808
gatggtacggaattgctaagtatga

SEQ ID NO: 436329 - DNA, 25 bp, Artificial
  probe
  misc_feature (1)..(25): SEQ ID NO: 6365; WAN024CKI; Start 783; Stop 807
agatggtacggaattgctaagtatg

SEQ ID NO: 436330 - DNA, 25 bp, Artificial
  probe
  misc_feature (1)..(25): SEQ ID NO: 6365; WAN024CKI; Start 19; Stop 43
agtcaacattatagaccagaacctt

SEQ ID NO: 436331 - DNA, 25 bp, Artificial
  probe
  misc_feature (1)..(25): SEQ ID NO: 6365; WAN024CKI; Start 18; Stop 42
tagtcaacattatagaccagaacct

SEQ ID NO: 436332 - DNA, 25 bp, Artificial
  probe
  misc_feature (1)..(25): SEQ ID NO: 6365; WAN024CKI; Start 781; Stop 805
ggagatggtacggaattgctaagta

SEQ ID NO: 436333 - DNA, 25 bp, Artificial
  probe
  misc_feature (1)..(25): SEQ ID NO: 6365; WAN024CKI; Start 1173; Stop 1197
agagcagtttatgacacagttagaa

SEQ ID NO: 436334 - DNA, 25 bp, Artificial
  probe
  misc_feature (1)..(25): SEQ ID NO: 6365; WAN024CKI; Start 1172; Stop 1196
aagagcagtttatgacacagttaga

SEQ ID NO: 436335 - DNA, 25 bp, Artificial
  probe
  misc_feature (1)..(25): SEQ ID NO: 6365; WAN024CKI; Start 725; Stop 749
ccagtttgatagagaagaataccga

SEQ ID NO: 436336 - DNA, 25 bp, Artificial
  probe
  misc_feature (1)..(25): SEQ ID NO: 6365; WAN024CKI; Start 406; Stop 430
tttctgtattgtatggatgtttggc

SEQ ID NO: 436337 - DNA, 25 bp, Artificial
  probe
  misc_feature (1)..(25): SEQ ID NO: 6365; WAN024CKI; Start 17; Stop 41
ttagtcaacattatagaccagaacc

SEQ ID NO: 436338 - DNA, 25 bp, Artificial
  probe
  misc_feature (1)..(25): SEQ ID NO: 6365; WAN024CKI; Start 1174; Stop 1198
gagcagtttatgacacagttagaaa

SEQ ID NO: 436339 - DNA, 25 bp, Artificial
  probe
  misc_feature (1)..(25): SEQ ID NO: 6365; WAN024CKI; Start 1171; Stop 1195
aaagagcagtttatgacacagttag

SEQ ID NO: 436340 - DNA, 25 bp, Artificial
  probe
  misc_feature (1)..(25): SEQ ID NO: 6365; WAN024CKI; Start 731; Stop 755
tgatagagaagaataccgatctacc

SEQ ID NO: 436341 - DNA, 25 bp, Artificial
  probe
  misc_feature (1)..(25): SEQ ID NO: 6365; WAN024CKI; Start 1052; Stop 1076
gtcctgaacaagatgtggaacaatt

SEQ ID NO: 436342 - DNA, 25 bp, Artificial
  probe
  misc_feature (1)..(25): SEQ ID NO: 6365; WAN024CKI; Start 333; Stop 357
tgtaaatcaatcgtctccagttatg

SEQ ID NO: 436343 - DNA, 25 bp, Artificial
  probe
  misc_feature (1)..(25): SEQ ID NO: 6365; WAN024CKI; Start 563; Stop 587
tgaaccaatttgacataacagaaca

SEQ ID NO: 436344 - DNA, 25 bp, Artificial
  probe
  misc_feature (1)..(25): SEQ ID NO: 6365; WAN024CKI; Start 1117; Stop 1141
gaacaaagagagttaggaaagcaag

SEQ ID NO: 436345 - DNA, 25 bp, Artificial
  probe
  misc_feature (1)..(25): SEQ ID NO: 6365; WAN024CKI; Start 1114; Stop 1138
gaagaacaaagagagttaggaaagc

SEQ ID NO: 436346 - DNA, 25 bp, Artificial
  probe
  misc_feature (1)..(25): SEQ ID NO: 6365; WAN024CKI; Start 1108; Stop 1132
tctacggaagaacaaagagagttag

SEQ ID NO: 436347 - DNA, 25 bp, Artificial
  probe
  misc_feature (1)..(25): SEQ ID NO: 6365; WAN024CKI; Start 1107; Stop 1131
gtctacggaagaacaaagagagtta

SEQ ID NO: 436348 - DNA, 25 bp, Artificial
  probe
  misc_feature (1)..(25): SEQ ID NO: 6365; WAN024CKI; Start 1116; Stop 1140
agaacaaagagagttaggaaagcaa

SEQ ID NO: 436349 - DNA, 25 bp, Artificial
  probe
  misc_feature (1)..(25): SEQ ID NO: 6365; WAN024CKI; Start 1115; Stop 1139
aagaacaaagagagttaggaaagca

SEQ ID NO: 436350 - DNA, 25 bp, Artificial
  probe
  misc_feature (1)..(25): SEQ ID NO: 6365; WAN024CKI; Start 165; Stop 189
acgagagactatagaaggagttact

SEQ ID NO: 436351 - DNA, 25 bp, Artificial
  probe
  misc_feature (1)..(25): SEQ ID NO: 6365; WAN024CKI; Start 779; Stop 803
ttggagatggtacggaattgctaag

SEQ ID NO: 436352 - DNA, 25 bp, Artificial
  probe
  misc_feature (1)..(25): SEQ ID NO: 6365; WAN024CKI; Start 562; Stop 586
gtgaaccaatttgacataacagaac

SEQ ID NO: 436353 - DNA, 25 bp, Artificial
  probe
  misc_feature (1)..(25): SEQ ID NO: 6365; WAN024CKI; Start 1109; Stop 1133
ctacggaagaacaaagagagttagg

SEQ ID NO: 436354 - DNA, 25 bp, Artificial
  probe
  misc_feature (1)..(25): SEQ ID NO: 6365; WAN024CKI; Start 166; Stop 190
cgagagactatagaaggagttactg

SEQ ID NO: 436355 - DNA, 25 bp, Artificial
  probe
  misc_feature (1)..(25): SEQ ID NO: 6365; WAN024CKI; Start 164; Stop 188
gacgagagactatagaaggagttac

SEQ ID NO: 436356 - DNA, 25 bp, Artificial
  probe
  misc_feature (1)..(25): SEQ ID NO: 6365; WAN024CKI; Start 163; Stop 187
agacgagagactatagaaggagtta

SEQ ID NO: 436357 - DNA, 25 bp, Artificial
  probe
  misc_feature (1)..(25): SEQ ID NO: 6365; WAN024CKI; Start 162; Stop 186
tagacgagagactatagaaggagtt

SEQ ID NO: 436358 - DNA, 25 bp, Artificial
  probe
  misc_feature (1)..(25): SEQ ID NO: 6365; WAN024CKI; Start 724; Stop 748
gccagtttgatagagaagaataccg

SEQ ID NO: 436359 - DNA, 25 bp, Artificial
  probe
  misc_feature (1)..(25): SEQ ID NO: 6366; WAN024FPJ; Start 547; Stop 571
ttgacacttattacaccatcagagt

SEQ ID NO: 436360 - DNA, 25 bp, Artificial
  probe
  misc_feature (1)..(25): SEQ ID NO: 6366; WAN024FPJ; Start 545; Stop 569
acttgacacttattacaccatcaga

SEQ ID NO: 436361 - DNA, 25 bp, Artificial
  probe
  misc_feature (1)..(25): SEQ ID NO: 6366; WAN024FPJ; Start 546; Stop 570
cttgacacttattacaccatcagag

SEQ ID NO: 436362 - DNA, 25 bp, Artificial
  probe
  misc_feature (1)..(25): SEQ ID NO: 6366; WAN024FPJ; Start 29; Stop 53
gtggtattaggagtacaggaagaat

SEQ ID NO: 436363 - DNA, 25 bp, Artificial
  probe
  misc_feature (1)..(25): SEQ ID NO: 6366; WAN024FPJ; Start 544; Stop 568
aacttgacacttattacaccatcag

SEQ ID NO: 436364 - DNA, 25 bp, Artificial
  probe
  misc_feature (1)..(25): SEQ ID NO: 6366; WAN024FPJ; Start 1043; Stop 1067
tagtgtgtagtgatagaacagttgt

SEQ ID NO: 436365 - DNA, 25 bp, Artificial
  probe
  misc_feature (1)..(25): SEQ ID NO: 6366; WAN024FPJ; Start 30; Stop 54
tggtattaggagtacaggaagaatt

SEQ ID NO: 436366 - DNA, 25 bp, Artificial
  probe
  misc_feature (1)..(25): SEQ ID NO: 6366; WAN024FPJ; Start 869; Stop 893
ccacaacagatagtgtagaagaact

SEQ ID NO: 436367 - DNA, 25 bp, Artificial
  probe
  misc_feature (1)..(25): SEQ ID NO: 6366; WAN024FPJ; Start 867; Stop 891
gaccacaacagatagtgtagaagaa

SEQ ID NO: 436368 - DNA, 25 bp, Artificial
  probe
  misc_feature (1)..(25): SEQ ID NO: 6366; WAN024FPJ; Start 868; Stop 892
accacaacagatagtgtagaagaac

SEQ ID NO: 436369 - DNA, 25 bp, Artificial
  probe
  misc_feature (1)..(25): SEQ ID NO: 6366; WAN024FPJ; Start 865; Stop 889
ctgaccacaacagatagtgtagaag

SEQ ID NO: 436370 - DNA, 25 bp, Artificial
  probe
  misc_feature (1)..(25): SEQ ID NO: 6366; WAN024FPJ; Start 116; Stop 140
gtgagtatgttcctacacagtatcg

SEQ ID NO: 436371 - DNA, 25 bp, Artificial
  probe
  misc_feature (1)..(25): SEQ ID NO: 6366; WAN024FPJ; Start 115; Stop 139
cgtgagtatgttcctacacagtatc

SEQ ID NO: 436372 - DNA, 25 bp, Artificial
  probe
  misc_feature (1)..(25): SEQ ID NO: 6366; WAN024FPJ; Start 28; Stop 52
tgtggtattaggagtacaggaagaa

SEQ ID NO: 436373 - DNA, 25 bp, Artificial
  probe
  misc_feature (1)..(25): SEQ ID NO: 6366; WAN024FPJ; Start 27; Stop 51
ttgtggtattaggagtacaggaaga

SEQ ID NO: 436374 - DNA, 25 bp, Artificial
  probe
  misc_feature (1)..(25): SEQ ID NO: 6366; WAN024FPJ; Start 1038; Stop 1062
tggtatagtgtgtagtgatagaaca

SEQ ID NO: 436375 - DNA, 25 bp, Artificial
  probe
  misc_feature (1)..(25): SEQ ID NO: 6366; WAN024FPJ; Start 866; Stop 890
tgaccacaacagatagtgtagaaga

SEQ ID NO: 436376 - DNA, 25 bp, Artificial
  probe
  misc_feature (1)..(25): SEQ ID NO: 6366; WAN024FPJ; Start 1044; Stop 1068
agtgtgtagtgatagaacagttgtt

SEQ ID NO: 436377 - DNA, 25 bp, Artificial
  probe
  misc_feature (1)..(25): SEQ ID NO: 6366; WAN024FPJ; Start 957; Stop 981
aactaacttagaagctattgcctgt

SEQ ID NO: 436378 - DNA, 25 bp, Artificial
  probe
  misc_feature (1)..(25): SEQ ID NO: 6366; WAN024FPJ; Start 958; Stop 982
actaacttagaagctattgcctgtg

SEQ ID NO: 436379 - DNA, 25 bp, Artificial
  probe
  misc_feature (1)..(25): SEQ ID NO: 6366; WAN024FPJ; Start 1037; Stop 1061
atggtatagtgtgtagtgatagaac

SEQ ID NO: 436380 - DNA, 25 bp, Artificial
  probe
  misc_feature (1)..(25): SEQ ID NO: 6366; WAN024FPJ; Start 1042; Stop 1066
atagtgtgtagtgatagaacagttg

SEQ ID NO: 436381 - DNA, 25 bp, Artificial
  probe
  misc_feature (1)..(25): SEQ ID NO: 6366; WAN024FPJ; Start 959; Stop 983
ctaacttagaagctattgcctgtgg

SEQ ID NO: 436382 - DNA, 25 bp, Artificial
  probe
  misc_feature (1)..(25): SEQ ID NO: 6366; WAN024FPJ; Start 955; Stop 979
acaactaacttagaagctattgcct

SEQ ID NO: 436383 - DNA, 25 bp, Artificial
  probe
  misc_feature (1)..(25): SEQ ID NO: 6366; WAN024FPJ; Start 870; Stop 894
cacaacagatagtgtagaagaactt

SEQ ID NO: 436384 - DNA, 25 bp, Artificial
  probe
  misc_feature (1)..(25): SEQ ID NO: 6366; WAN024FPJ; Start 956; Stop 980
caactaacttagaagctattgcctg

SEQ ID NO: 436385 - DNA, 25 bp, Artificial
  probe
  misc_feature (1)..(25): SEQ ID NO: 6366; WAN024FPJ; Start 1039; Stop 1063
ggtatagtgtgtagtgatagaacag

SEQ ID NO: 436386 - DNA, 25 bp, Artificial
  probe
  misc_feature (1)..(25): SEQ ID NO: 6366; WAN024FPJ; Start 960; Stop 984
taacttagaagctattgcctgtgga

SEQ ID NO: 436387 - DNA, 25 bp, Artificial
  probe
  misc_feature (1)..(25): SEQ ID NO: 6366; WAN024FPJ; Start 716; Stop 740
tattgcttggtgtggcttctatctg

SEQ ID NO: 436388 - DNA, 25 bp, Artificial
  probe
  misc_feature (1)..(25): SEQ ID NO: 6366; WAN024FPJ; Start 715; Stop 739
gtattgcttggtgtggcttctatct

SEQ ID NO: 436389 - DNA, 25 bp, Artificial
  probe
  misc_feature (1)..(25): SEQ ID NO: 6366; WAN024FPJ; Start 920; Stop 944
tatttatcaacccaacaacacagga

SEQ ID NO: 436390 - DNA, 25 bp, Artificial
  probe
  misc_feature (1)..(25): SEQ ID NO: 6366; WAN024FPJ; Start 919; Stop 943
gtatttatcaacccaacaacacagg

SEQ ID NO: 436391 - DNA, 25 bp, Artificial
  probe
  misc_feature (1)..(25): SEQ ID NO: 6366; WAN024FPJ; Start 540; Stop 564
tccaaacttgacacttattacacca

SEQ ID NO: 436392 - DNA, 25 bp, Artificial
  probe
  misc_feature (1)..(25): SEQ ID NO: 6367; WAN024B2V; Start 292; Stop 316
gaagatggttctgttcaaggattct

SEQ ID NO: 436393 - DNA, 25 bp, Artificial
  probe
  misc_feature (1)..(25): SEQ ID NO: 6367; WAN024B2V; Start 350; Stop 374
atatcttgtcatccagtcttgccat

SEQ ID NO: 436394 - DNA, 25 bp, Artificial
  probe
  misc_feature (1)..(25): SEQ ID NO: 6367; WAN024B2V; Start 349; Stop 373
aatatcttgtcatccagtcttgcca

SEQ ID NO: 436395 - DNA, 25 bp, Artificial
  probe
  misc_feature (1)..(25): SEQ ID NO: 6367; WAN024B2V; Start 348; Stop 372
caatatcttgtcatccagtcttgcc

SEQ ID NO: 436396 - DNA, 25 bp, Artificial
  probe
  misc_feature (1)..(25): SEQ ID NO: 6367; WAN024B2V; Start 346; Stop 370
tgcaatatcttgtcatccagtcttg

SEQ ID NO: 436397 - DNA, 25 bp, Artificial
  probe
  misc_feature (1)..(25): SEQ ID NO: 6367; WAN024B2V; Start 293; Stop 317
aagatggttctgttcaaggattctt

SEQ ID NO: 436398 - DNA, 25 bp, Artificial
  probe
  misc_feature (1)..(25): SEQ ID NO: 6367; WAN024B2V; Start 291; Stop 315
agaagatggttctgttcaaggattc

SEQ ID NO: 436399 - DNA, 25 bp, Artificial
  probe
  misc_feature (1)..(25): SEQ ID NO: 6367; WAN024B2V; Start 290; Stop 314
gagaagatggttctgttcaaggatt

SEQ ID NO: 436400 - DNA, 25 bp, Artificial
  probe
  misc_feature (1)..(25): SEQ ID NO: 6367; WAN024B2V; Start 351; Stop 375
tatcttgtcatccagtcttgccatg

SEQ ID NO: 436401 - DNA, 25 bp, Artificial
  probe
  misc_feature (1)..(25): SEQ ID NO: 6367; WAN024B2V; Start 91; Stop 115
aattacgaccgtttcacagttaaga

SEQ ID NO: 436402 - DNA, 25 bp, Artificial
  probe
  misc_feature (1)..(25): SEQ ID NO: 6367; WAN024B2V; Start 90; Stop 114
caattacgaccgtttcacagttaag

SEQ ID NO: 436403 - DNA, 25 bp, Artificial
  probe
  misc_feature (1)..(25): SEQ ID NO: 6367; WAN024B2V; Start 89; Stop 113
tcaattacgaccgtttcacagttaa

SEQ ID NO: 436404 - DNA, 25 bp, Artificial
  probe
  misc_feature (1)..(25): SEQ ID NO: 6367; WAN024B2V; Start 97; Stop 121
gaccgtttcacagttaagactttct

SEQ ID NO: 436405 - DNA, 25 bp, Artificial
  probe
  misc_feature (1)..(25): SEQ ID NO: 6367; WAN024B2V; Start 345; Stop 369
ctgcaatatcttgtcatccagtctt

SEQ ID NO: 436406 - DNA, 25 bp, Artificial
  probe
  misc_feature (1)..(25): SEQ ID NO: 6367; WAN024B2V; Start 92; Stop 116
attacgaccgtttcacagttaagac

SEQ ID NO: 436407 - DNA, 25 bp, Artificial
  probe
  misc_feature (1)..(25): SEQ ID NO: 6367; WAN024B2V; Start 337; Stop 361
tatgtcggctgcaatatcttgtcat

SEQ ID NO: 436408 - DNA, 25 bp, Artificial
  probe
  misc_feature (1)..(25): SEQ ID NO: 6367; WAN024B2V; Start 289; Stop 313
ggagaagatggttctgttcaaggat

SEQ ID NO: 436409 - DNA, 25 bp, Artificial
  probe
  misc_feature (1)..(25): SEQ ID NO: 6367; WAN024B2V; Start 204; Stop 228
gaccattgattgggataagaaggtt

SEQ ID NO: 436410 - DNA, 25 bp, Artificial
  probe
  misc_feature (1)..(25): SEQ ID NO: 6367; WAN024B2V; Start 96; Stop 120
cgaccgtttcacagttaagactttc

SEQ ID NO: 436411 - DNA, 25 bp, Artificial
  probe
  misc_feature (1)..(25): SEQ ID NO: 6367; WAN024B2V; Start 205; Stop 229
accattgattgggataagaaggttg

SEQ ID NO: 436412 - DNA, 25 bp, Artificial
  probe
  misc_feature (1)..(25): SEQ ID NO: 6367; WAN024B2V; Start 88; Stop 112
gtcaattacgaccgtttcacagtta

SEQ ID NO: 436413 - DNA, 25 bp, Artificial
  probe
  misc_feature (1)..(25): SEQ ID NO: 6367; WAN024B2V; Start 408; Stop 432
tactggtattgcccaagttccttat

SEQ ID NO: 436414 - DNA, 25 bp, Artificial
  probe
  misc_feature (1)..(25): SEQ ID NO: 6367; WAN024B2V; Start 403; Stop 427
gaatctactggtattgcccaagttc

SEQ ID NO: 436415 - DNA, 25 bp, Artificial
  probe
  misc_feature (1)..(25): SEQ ID NO: 6367; WAN024B2V; Start 94; Stop 118
tacgaccgtttcacagttaagactt

SEQ ID NO: 436416 - DNA, 25 bp, Artificial
  probe
  misc_feature (1)..(25): SEQ ID NO: 6367; WAN024B2V; Start 93; Stop 117
ttacgaccgtttcacagttaagact

SEQ ID NO: 436417 - DNA, 25 bp, Artificial
  probe
  misc_feature (1)..(25): SEQ ID NO: 6367; WAN024B2V; Start 300; Stop 324
ttctgttcaaggattcttggaagtt

SEQ ID NO: 436418 - DNA, 25 bp, Artificial
  probe
  misc_feature (1)..(25): SEQ ID NO: 6367; WAN024B2V; Start 208; Stop 232
attgattgggataagaaggttgcac

SEQ ID NO: 436419 - DNA, 25 bp, Artificial
  probe
  misc_feature (1)..(25): SEQ ID NO: 6367; WAN024B2V; Start 207; Stop 231
cattgattgggataagaaggttgca

SEQ ID NO: 436420 - DNA, 25 bp, Artificial
  probe
  misc_feature (1)..(25): SEQ ID NO: 6367; WAN024B2V; Start 294; Stop 318
agatggttctgttcaaggattcttg

SEQ ID NO: 436421 - DNA, 25 bp, Artificial
  probe
  misc_feature (1)..(25): SEQ ID NO: 6367; WAN024B2V; Start 299; Stop 323
gttctgttcaaggattcttggaagt

SEQ ID NO: 436422 - DNA, 25 bp, Artificial
  probe
  misc_feature (1)..(25): SEQ ID NO: 6367; WAN024B2V; Start 407; Stop 431
ctactggtattgcccaagttcctta

SEQ ID NO: 436423 - DNA, 25 bp, Artificial
  probe
  misc_feature (1)..(25): SEQ ID NO: 6367; WAN024B2V; Start 394; Stop 418
cgtgttttggaatctactggtattg

SEQ ID NO: 436424 - DNA, 25 bp, Artificial
  probe
  misc_feature (1)..(25): SEQ ID NO: 6367; WAN024B2V; Start 395; Stop 419
gtgttttggaatctactggtattgc

SEQ ID NO: 436425 - DNA, 25 bp, Artificial
  probe
  misc_feature (1)..(25): SEQ ID NO: 6368; WAN024C24; Start 117; Stop 141
tagattggaattgactgcttctgaa

SEQ ID NO: 436426 - DNA, 25 bp, Artificial
  probe
  misc_feature (1)..(25): SEQ ID NO: 6368; WAN024C24; Start 451; Stop 475
tgtcctaagcgaattattctcttga

SEQ ID NO: 436427 - DNA, 25 bp, Artificial
  probe
  misc_feature (1)..(25): SEQ ID NO: 6368; WAN024C24; Start 450; Stop 474
ttgtcctaagcgaattattctcttg

SEQ ID NO: 436428 - DNA, 25 bp, Artificial
  probe
  misc_feature (1)..(25): SEQ ID NO: 6368; WAN024C24; Start 116; Stop 140
ctagattggaattgactgcttctga

SEQ ID NO: 436429 - DNA, 25 bp, Artificial
  probe
  misc_feature (1)..(25): SEQ ID NO: 6368; WAN024C24; Start 452; Stop 476
gtcctaagcgaattattctcttgaa

SEQ ID NO: 436430 - DNA, 25 bp, Artificial
  probe
  misc_feature (1)..(25): SEQ ID NO: 6368; WAN024C24; Start 449; Stop 473
attgtcctaagcgaattattctctt

SEQ ID NO: 436431 - DNA, 25 bp, Artificial
  probe
  misc_feature (1)..(25): SEQ ID NO: 6368; WAN024C24; Start 448; Stop 472
tattgtcctaagcgaattattctct

SEQ ID NO: 436432 - DNA, 25 bp, Artificial
  probe
  misc_feature (1)..(25): SEQ ID NO: 6368; WAN024C24; Start 446; Stop 470
tctattgtcctaagcgaattattct

SEQ ID NO: 436433 - DNA, 25 bp, Artificial
  probe
  misc_feature (1)..(25): SEQ ID NO: 6368; WAN024C24; Start 447; Stop 471
ctattgtcctaagcgaattattctc

SEQ ID NO: 436434 - DNA, 25 bp, Artificial
  probe
  misc_feature (1)..(25): SEQ ID NO: 6368; WAN024C24; Start 119; Stop 143
gattggaattgactgcttctgaaat

SEQ ID NO: 436435 - DNA, 25 bp, Artificial
  probe
  misc_feature (1)..(25): SEQ ID NO: 6368; WAN024C24; Start 122; Stop 146
tggaattgactgcttctgaaataaa

SEQ ID NO: 436436 - DNA, 25 bp, Artificial
  probe
  misc_feature (1)..(25): SEQ ID NO: 6368; WAN024C24; Start 121; Stop 145
ttggaattgactgcttctgaaataa

SEQ ID NO: 436437 - DNA, 25 bp, Artificial
  probe
  misc_feature (1)..(25): SEQ ID NO: 6368; WAN024C24; Start 120; Stop 144
attggaattgactgcttctgaaata

SEQ ID NO: 436438 - DNA, 25 bp, Artificial
  probe
  misc_feature (1)..(25): SEQ ID NO: 6368; WAN024C24; Start 118; Stop 142
agattggaattgactgcttctgaaa

SEQ ID NO: 436439 - DNA, 25 bp, Artificial
  probe
  misc_feature (1)..(25): SEQ ID NO: 6368; WAN024C24; Start 445; Stop 469
ttctattgtcctaagcgaattattc

SEQ ID NO: 436440 - DNA, 25 bp, Artificial
  probe
  misc_feature (1)..(25): SEQ ID NO: 6368; WAN024C24; Start 587; Stop 611
tttctcatgtttcgtttagggattt

SEQ ID NO: 436441 - DNA, 25 bp, Artificial
  probe
  misc_feature (1)..(25): SEQ ID NO: 6368; WAN024C24; Start 590; Stop 614
ctcatgtttcgtttagggatttaga

SEQ ID NO: 436442 - DNA, 25 bp, Artificial
  probe
  misc_feature (1)..(25): SEQ ID NO: 6368; WAN024C24; Start 589; Stop 613
tctcatgtttcgtttagggatttag

SEQ ID NO: 436443 - DNA, 25 bp, Artificial
  probe
  misc_feature (1)..(25): SEQ ID NO: 6368; WAN024C24; Start 453; Stop 477
tcctaagcgaattattctcttgaaa

SEQ ID NO: 436444 - DNA, 25 bp, Artificial
  probe
  misc_feature (1)..(25): SEQ ID NO: 6368; WAN024C24; Start 115; Stop 139
tctagattggaattgactgcttctg

SEQ ID NO: 436445 - DNA, 25 bp, Artificial
  probe
  misc_feature (1)..(25): SEQ ID NO: 6368; WAN024C24; Start 259; Stop 283
gaagccaaagatatattctaccgtt

SEQ ID NO: 436446 - DNA, 25 bp, Artificial
  probe
  misc_feature (1)..(25): SEQ ID NO: 6368; WAN024C24; Start 588; Stop 612
ttctcatgtttcgtttagggattta

SEQ ID NO: 436447 - DNA, 25 bp, Artificial
  probe
  misc_feature (1)..(25): SEQ ID NO: 6368; WAN024C24; Start 454; Stop 478
cctaagcgaattattctcttgaaag

SEQ ID NO: 436448 - DNA, 25 bp, Artificial
  probe
  misc_feature (1)..(25): SEQ ID NO: 6368; WAN024C24; Start 478; Stop 502
gaacagctagaaagtgataattggg

SEQ ID NO: 436449 - DNA, 25 bp, Artificial
  probe
  misc_feature (1)..(25): SEQ ID NO: 6368; WAN024C24; Start 208; Stop 232
gagggatatgaggttccaaatctat

SEQ ID NO: 436450 - DNA, 25 bp, Artificial
  probe
  misc_feature (1)..(25): SEQ ID NO: 6368; WAN024C24; Start 591; Stop 615
tcatgtttcgtttagggatttagaa

SEQ ID NO: 436451 - DNA, 25 bp, Artificial
  probe
  misc_feature (1)..(25): SEQ ID NO: 6368; WAN024C24; Start 748; Stop 772
attcggacaatttctcatgtagagg

SEQ ID NO: 436452 - DNA, 25 bp, Artificial
  probe
  misc_feature (1)..(25): SEQ ID NO: 6368; WAN024C24; Start 260; Stop 284
aagccaaagatatattctaccgttt

SEQ ID NO: 436453 - DNA, 25 bp, Artificial
  probe
  misc_feature (1)..(25): SEQ ID NO: 6368; WAN024C24; Start 714; Stop 738
tgaagttgatttagtagagagtgaa

SEQ ID NO: 436454 - DNA, 25 bp, Artificial
  probe
  misc_feature (1)..(25): SEQ ID NO: 6368; WAN024C24; Start 713; Stop 737
ttgaagttgatttagtagagagtga

SEQ ID NO: 436455 - DNA, 25 bp, Artificial
  probe
  misc_feature (1)..(25): SEQ ID NO: 6368; WAN024C24; Start 470; Stop 494
tcttgaaagaacagctagaaagtga

SEQ ID NO: 436456 - DNA, 25 bp, Artificial
  probe
  misc_feature (1)..(25): SEQ ID NO: 6368; WAN024C24; Start 469; Stop 493
ctcttgaaagaacagctagaaagtg

SEQ ID NO: 436457 - DNA, 25 bp, Artificial
  probe
  misc_feature (1)..(25): SEQ ID NO: 6368; WAN024C24; Start 468; Stop 492
tctcttgaaagaacagctagaaagt

SEQ ID NO: 436458 - DNA, 25 bp, Artificial
  probe
  misc_feature (1)..(25): SEQ ID NO: 6369; WAN024BRQ; Start 177; Stop 201
atatttggctgaacacggtattact

SEQ ID NO: 436459 - DNA, 25 bp, Artificial
  probe
  misc_feature (1)..(25): SEQ ID NO: 6369; WAN024BRQ; Start 176; Stop 200
catatttggctgaacacggtattac

SEQ ID NO: 436460 - DNA, 25 bp, Artificial
  probe
  misc_feature (1)..(25): SEQ ID NO: 6369; WAN024BRQ; Start 1510; Stop 1534
gggtcggtttcaatttatgttcaaa

SEQ ID NO: 436461 - DNA, 25 bp, Artificial
  probe
  misc_feature (1)..(25): SEQ ID NO: 6369; WAN024BRQ; Start 1511; Stop 1535
ggtcggtttcaatttatgttcaaag

SEQ ID NO: 436462 - DNA, 25 bp, Artificial
  probe
  misc_feature (1)..(25): SEQ ID NO: 6369; WAN024BRQ; Start 991; Stop 1015
tatgatatgaggaaattgctgaacg

SEQ ID NO: 436463 - DNA, 25 bp, Artificial
  probe
  misc_feature (1)..(25): SEQ ID NO: 6369; WAN024BRQ; Start 989; Stop 1013
gctatgatatgaggaaattgctgaa

SEQ ID NO: 436464 - DNA, 25 bp, Artificial
  probe
  misc_feature (1)..(25): SEQ ID NO: 6369; WAN024BRQ; Start 988; Stop 1012
ggctatgatatgaggaaattgctga

SEQ ID NO: 436465 - DNA, 25 bp, Artificial
  probe
  misc_feature (1)..(25): SEQ ID NO: 6369; WAN024BRQ; Start 178; Stop 202
tatttggctgaacacggtattactg

SEQ ID NO: 436466 - DNA, 25 bp, Artificial
  probe
  misc_feature (1)..(25): SEQ ID NO: 6369; WAN024BRQ; Start 994; Stop 1018
gatatgaggaaattgctgaacggta

SEQ ID NO: 436467 - DNA, 25 bp, Artificial
  probe
  misc_feature (1)..(25): SEQ ID NO: 6369; WAN024BRQ; Start 863; Stop 887
tagctgaatattggcagaatgactt

SEQ ID NO: 436468 - DNA, 25 bp, Artificial
  probe
  misc_feature (1)..(25): SEQ ID NO: 6369; WAN024BRQ; Start 601; Stop 625
aaccgcatctataagtttcaaggaa

SEQ ID NO: 436469 - DNA, 25 bp, Artificial
  probe
  misc_feature (1)..(25): SEQ ID NO: 6369; WAN024BRQ; Start 655; Stop 679
aacggcaactatgattatttgatgt

SEQ ID NO: 436470 - DNA, 25 bp, Artificial
  probe
  misc_feature (1)..(25): SEQ ID NO: 6369; WAN024BRQ; Start 600; Stop 624
gaaccgcatctataagtttcaagga

SEQ ID NO: 436471 - DNA, 25 bp, Artificial
  probe
  misc_feature (1)..(25): SEQ ID NO: 6369; WAN024BRQ; Start 862; Stop 886
gtagctgaatattggcagaatgact

SEQ ID NO: 436472 - DNA, 25 bp, Artificial
  probe
  misc_feature (1)..(25): SEQ ID NO: 6369; WAN024BRQ; Start 1512; Stop 1536
gtcggtttcaatttatgttcaaaga

SEQ ID NO: 436473 - DNA, 25 bp, Artificial
  probe
  misc_feature (1)..(25): SEQ ID NO: 6369; WAN024BRQ; Start 992; Stop 1016
atgatatgaggaaattgctgaacgg

SEQ ID NO: 436474 - DNA, 25 bp, Artificial
  probe
  misc_feature (1)..(25): SEQ ID NO: 6369; WAN024BRQ; Start 706; Stop 730
gatgtcgcagcagaaattaagagat

SEQ ID NO: 436475 - DNA, 25 bp, Artificial
  probe
  misc_feature (1)..(25): SEQ ID NO: 6369; WAN024BRQ; Start 175; Stop 199
gcatatttggctgaacacggtatta

SEQ ID NO: 436476 - DNA, 25 bp, Artificial
  probe
  misc_feature (1)..(25): SEQ ID NO: 6369; WAN024BRQ; Start 662; Stop 686
actatgattatttgatgtatgccga

SEQ ID NO: 436477 - DNA, 25 bp, Artificial
  probe
  misc_feature (1)..(25): SEQ ID NO: 6369; WAN024BRQ; Start 656; Stop 680
acggcaactatgattatttgatgta

SEQ ID NO: 436478 - DNA, 25 bp, Artificial
  probe
  misc_feature (1)..(25): SEQ ID NO: 6369; WAN024BRQ; Start 707; Stop 731
atgtcgcagcagaaattaagagatg

SEQ ID NO: 436479 - DNA, 25 bp, Artificial
  probe
  misc_feature (1)..(25): SEQ ID NO: 6369; WAN024BRQ; Start 663; Stop 687
ctatgattatttgatgtatgccgac

SEQ ID NO: 436480 - DNA, 25 bp, Artificial
  probe
  misc_feature (1)..(25): SEQ ID NO: 6369; WAN024BRQ; Start 995; Stop 1019
atatgaggaaattgctgaacggtac

SEQ ID NO: 436481 - DNA, 25 bp, Artificial
  probe
  misc_feature (1)..(25): SEQ ID NO: 6369; WAN024BRQ; Start 864; Stop 888
agctgaatattggcagaatgacttg

SEQ ID NO: 436482 - DNA, 25 bp, Artificial
  probe
  misc_feature (1)..(25): SEQ ID NO: 6369; WAN024BRQ; Start 654; Stop 678
aaacggcaactatgattatttgatg

SEQ ID NO: 436483 - DNA, 25 bp, Artificial
  probe
  misc_feature (1)..(25): SEQ ID NO: 6369; WAN024BRQ; Start 987; Stop 1011
cggctatgatatgaggaaattgctg

SEQ ID NO: 436484 - DNA, 25 bp, Artificial
  probe
  misc_feature (1)..(25): SEQ ID NO: 6369; WAN024BRQ; Start 485; Stop 509
acctaattaaagcctggacacattt

SEQ ID NO: 436485 - DNA, 25 bp, Artificial
  probe
  misc_feature (1)..(25): SEQ ID NO: 6369; WAN024BRQ; Start 861; Stop 885
ggtagctgaatattggcagaatgac

SEQ ID NO: 436486 - DNA, 25 bp, Artificial
  probe
  misc_feature (1)..(25): SEQ ID NO: 6369; WAN024BRQ; Start 858; Stop 882
tacggtagctgaatattggcagaat

SEQ ID NO: 436487 - DNA, 25 bp, Artificial
  probe
  misc_feature (1)..(25): SEQ ID NO: 6369; WAN024BRQ; Start 990; Stop 1014
ctatgatatgaggaaattgctgaac

SEQ ID NO: 436488 - DNA, 25 bp, Artificial
  probe
  misc_feature (1)..(25): SEQ ID NO: 6369; WAN024BRQ; Start 257; Stop 281
gtgcttacgacctttatgatttagg

SEQ ID NO: 436489 - DNA, 25 bp, Artificial
  probe
  misc_feature (1)..(25): SEQ ID NO: 6369; WAN024BRQ; Start 52; Stop 76
ctcatcttcttgctgcctcattctg

SEQ ID NO: 436490 - DNA, 25 bp, Artificial
  probe
  misc_feature (1)..(25): SEQ ID NO: 6369; WAN024BRQ; Start 258; Stop 282
tgcttacgacctttatgatttaggg

SEQ ID NO: 436491 - DNA, 25 bp, Artificial
  probe
  misc_feature (1)..(25): SEQ ID NO: 6370; WAN024BRX; Start 236; Stop 260
tctatactgaggtaatcaatcgctt

SEQ ID NO: 436492 - DNA, 25 bp, Artificial
  probe
  misc_feature (1)..(25): SEQ ID NO: 6370; WAN024BRX; Start 235; Stop 259
atctatactgaggtaatcaatcgct

SEQ ID NO: 436493 - DNA, 25 bp, Artificial
  probe
  misc_feature (1)..(25): SEQ ID NO: 6370; WAN024BRX; Start 234; Stop 258
aatctatactgaggtaatcaatcgc

SEQ ID NO: 436494 - DNA, 25 bp, Artificial
  probe
  misc_feature (1)..(25): SEQ ID NO: 6370; WAN024BRX; Start 221; Stop 245
gctcatctgtgataatctatactga

SEQ ID NO: 436495 - DNA, 25 bp, Artificial
  probe
  misc_feature (1)..(25): SEQ ID NO: 6370; WAN024BRX; Start 224; Stop 248
catctgtgataatctatactgaggt

SEQ ID NO: 436496 - DNA, 25 bp, Artificial
  probe
  misc_feature (1)..(25): SEQ ID NO: 6370; WAN024BRX; Start 198; Stop 222
tacatttagcattaagccaacaagc

SEQ ID NO: 436497 - DNA, 25 bp, Artificial
  probe
  misc_feature (1)..(25): SEQ ID NO: 6370; WAN024BRX; Start 39; Stop 63
ccgtagcaaaggatgtaatgatatt

SEQ ID NO: 436498 - DNA, 25 bp, Artificial
  probe
  misc_feature (1)..(25): SEQ ID NO: 6370; WAN024BRX; Start 214; Stop 238
ccaacaagctcatctgtgataatct

SEQ ID NO: 436499 - DNA, 25 bp, Artificial
  probe
  misc_feature (1)..(25): SEQ ID NO: 6370; WAN024BRX; Start 177; Stop 201
aaaccgattaccattggaatttaca

SEQ ID NO: 436500 - DNA, 25 bp, Artificial
  probe
  misc_feature (1)..(25): SEQ ID NO: 6370; WAN024BRX; Start 179; Stop 203
accgattaccattggaatttacatt

SEQ ID NO: 436501 - DNA, 25 bp, Artificial
  probe
  misc_feature (1)..(25): SEQ ID NO: 6370; WAN024BRX; Start 178; Stop 202
aaccgattaccattggaatttacat

SEQ ID NO: 436502 - DNA, 25 bp, Artificial
  probe
  misc_feature (1)..(25): SEQ ID NO: 6370; WAN024BRX; Start 215; Stop 239
caacaagctcatctgtgataatcta

SEQ ID NO: 436503 - DNA, 25 bp, Artificial
  probe
  misc_feature (1)..(25): SEQ ID NO: 6370; WAN024BRX; Start 197; Stop 221
ttacatttagcattaagccaacaag

SEQ ID NO: 436504 - DNA, 25 bp, Artificial
  probe
  misc_feature (1)..(25): SEQ ID NO: 6370; WAN024BRX; Start 223; Stop 247
tcatctgtgataatctatactgagg

SEQ ID NO: 436505 - DNA, 25 bp, Artificial
  probe
  misc_feature (1)..(25): SEQ ID NO: 6370; WAN024BRX; Start 192; Stop 216
ggaatttacatttagcattaagcca

SEQ ID NO: 436506 - DNA, 25 bp, Artificial
  probe
  misc_feature (1)..(25): SEQ ID NO: 6370; WAN024BRX; Start 191; Stop 215
tggaatttacatttagcattaagcc

SEQ ID NO: 436507 - DNA, 25 bp, Artificial
  probe
  misc_feature (1)..(25): SEQ ID NO: 6370; WAN024BRX; Start 196; Stop 220
tttacatttagcattaagccaacaa

SEQ ID NO: 436508 - DNA, 25 bp, Artificial
  probe
  misc_feature (1)..(25): SEQ ID NO: 6370; WAN024BRX; Start 237; Stop 261
ctatactgaggtaatcaatcgcttt

SEQ ID NO: 436509 - DNA, 25 bp, Artificial
  probe
  misc_feature (1)..(25): SEQ ID NO: 6370; WAN024BRX; Start 180; Stop 204
ccgattaccattggaatttacattt

SEQ ID NO: 436510 - DNA, 25 bp, Artificial
  probe
  misc_feature (1)..(25): SEQ ID NO: 6370; WAN024BRX; Start 40; Stop 64
cgtagcaaaggatgtaatgatattg

SEQ ID NO: 436511 - DNA, 25 bp, Artificial
  probe
  misc_feature (1)..(25): SEQ ID NO: 6370; WAN024BRX; Start 195; Stop 219
atttacatttagcattaagccaaca

SEQ ID NO: 436512 - DNA, 25 bp, Artificial
  probe
  misc_feature (1)..(25): SEQ ID NO: 6370; WAN024BRX; Start 220; Stop 244
agctcatctgtgataatctatactg

SEQ ID NO: 436513 - DNA, 25 bp, Artificial
  probe
  misc_feature (1)..(25): SEQ ID NO: 6370; WAN024BRX; Start 216; Stop 240
aacaagctcatctgtgataatctat

SEQ ID NO: 436514 - DNA, 25 bp, Artificial
  probe
  misc_feature (1)..(25): SEQ ID NO: 6370; WAN024BRX; Start 213; Stop 237
gccaacaagctcatctgtgataatc

SEQ ID NO: 436515 - DNA, 25 bp, Artificial
  probe
  misc_feature (1)..(25): SEQ ID NO: 6370; WAN024BRX; Start 239; Stop 263
atactgaggtaatcaatcgctttaa

SEQ ID NO: 436516 - DNA, 25 bp, Artificial
  probe
  misc_feature (1)..(25): SEQ ID NO: 6370; WAN024BRX; Start 38; Stop 62
tccgtagcaaaggatgtaatgatat

SEQ ID NO: 436517 - DNA, 25 bp, Artificial
  probe
  misc_feature (1)..(25): SEQ ID NO: 6370; WAN024BRX; Start 81; Stop 105
tttacatggaatcgttgaaacagca

SEQ ID NO: 436518 - DNA, 25 bp, Artificial
  probe
  misc_feature (1)..(25): SEQ ID NO: 6370; WAN024BRX; Start 186; Stop 210
accattggaatttacatttagcatt

SEQ ID NO: 436519 - DNA, 25 bp, Artificial
  probe
  misc_feature (1)..(25): SEQ ID NO: 6370; WAN024BRX; Start 82; Stop 106
ttacatggaatcgttgaaacagcaa

SEQ ID NO: 436520 - DNA, 25 bp, Artificial
  probe
  misc_feature (1)..(25): SEQ ID NO: 6370; WAN024BRX; Start 226; Stop 250
tctgtgataatctatactgaggtaa

SEQ ID NO: 436521 - DNA, 25 bp, Artificial
  probe
  misc_feature (1)..(25): SEQ ID NO: 6370; WAN024BRX; Start 218; Stop 242
caagctcatctgtgataatctatac

SEQ ID NO: 436522 - DNA, 25 bp, Artificial
  probe
  misc_feature (1)..(25): SEQ ID NO: 6370; WAN024BRX; Start 238; Stop 262
tatactgaggtaatcaatcgcttta

SEQ ID NO: 436523 - DNA, 25 bp, Artificial
  probe
  misc_feature (1)..(25): SEQ ID NO: 6370; WAN024BRX; Start 217; Stop 241
acaagctcatctgtgataatctata

SEQ ID NO: 436524 - DNA, 25 bp, Artificial
  probe
  misc_feature (1)..(25): SEQ ID NO: 6371; WAN024B6Q; Start 61; Stop 85
gaagtagaggcgtactattctagtt

SEQ ID NO: 436525 - DNA, 25 bp, Artificial
  probe
  misc_feature (1)..(25): SEQ ID NO: 6371; WAN024B6Q; Start 60; Stop 84
agaagtagaggcgtactattctagt

SEQ ID NO: 436526 - DNA, 25 bp, Artificial
  probe
  misc_feature (1)..(25): SEQ ID NO: 6371; WAN024B6Q; Start 64; Stop 88
gtagaggcgtactattctagtttca

SEQ ID NO: 436527 - DNA, 25 bp, Artificial
  probe
  misc_feature (1)..(25): SEQ ID NO: 6371; WAN024B6Q; Start 68; Stop 92
aggcgtactattctagtttcaatct

SEQ ID NO: 436528 - DNA, 25 bp, Artificial
  probe
  misc_feature (1)..(25): SEQ ID NO: 6371; WAN024B6Q; Start 66; Stop 90
agaggcgtactattctagtttcaat

SEQ ID NO: 436529 - DNA, 25 bp, Artificial
  probe
  misc_feature (1)..(25): SEQ ID NO: 6371; WAN024B6Q; Start 63; Stop 87
agtagaggcgtactattctagtttc

SEQ ID NO: 436530 - DNA, 25 bp, Artificial
  probe
  misc_feature (1)..(25): SEQ ID NO: 6371; WAN024B6Q; Start 67; Stop 91
gaggcgtactattctagtttcaatc

SEQ ID NO: 436531 - DNA, 25 bp, Artificial
  probe
  misc_feature (1)..(25): SEQ ID NO: 6371; WAN024B6Q; Start 65; Stop 89
tagaggcgtactattctagtttcaa

SEQ ID NO: 436532 - DNA, 25 bp, Artificial
  probe
  misc_feature (1)..(25): SEQ ID NO: 6371; WAN024B6Q; Start 62; Stop 86
aagtagaggcgtactattctagttt

SEQ ID NO: 436533 - DNA, 25 bp, Artificial
  probe
  misc_feature (1)..(25): SEQ ID NO: 6371; WAN024B6Q; Start 69; Stop 93
ggcgtactattctagtttcaatcta

SEQ ID NO: 436534 - DNA, 25 bp, Artificial
  probe
  misc_feature (1)..(25): SEQ ID NO: 6371; WAN024B6Q; Start 57; Stop 81
tttagaagtagaggcgtactattct

SEQ ID NO: 436535 - DNA, 25 bp, Artificial
  probe
  misc_feature (1)..(25): SEQ ID NO: 6371; WAN024B6Q; Start 59; Stop 83
tagaagtagaggcgtactattctag

SEQ ID NO: 436536 - DNA, 25 bp, Artificial
  probe
  misc_feature (1)..(25): SEQ ID NO: 6371; WAN024B6Q; Start 58; Stop 82
ttagaagtagaggcgtactattcta

SEQ ID NO: 436537 - DNA, 25 bp, Artificial
  probe
  misc_feature (1)..(25): SEQ ID NO: 6371; WAN024B6Q; Start 49; Stop 73
aacaatattttagaagtagaggcgt

SEQ ID NO: 436538 - DNA, 25 bp, Artificial
  probe
  misc_feature (1)..(25): SEQ ID NO: 6371; WAN024B6Q; Start 70; Stop 94
gcgtactattctagtttcaatctat

SEQ ID NO: 436539 - DNA, 25 bp, Artificial
  probe
  misc_feature (1)..(25): SEQ ID NO: 6371; WAN024B6Q; Start 50; Stop 74
acaatattttagaagtagaggcgta

SEQ ID NO: 436540 - DNA, 25 bp, Artificial
  probe
  misc_feature (1)..(25): SEQ ID NO: 6371; WAN024B6Q; Start 51; Stop 75
caatattttagaagtagaggcgtac

SEQ ID NO: 436541 - DNA, 25 bp, Artificial
  probe
  misc_feature (1)..(25): SEQ ID NO: 6371; WAN024B6Q; Start 56; Stop 80
ttttagaagtagaggcgtactattc

SEQ ID NO: 436542 - DNA, 25 bp, Artificial
  probe
  misc_feature (1)..(25): SEQ ID NO: 6371; WAN024B6Q; Start 48; Stop 72
taacaatattttagaagtagaggcg

SEQ ID NO: 436543 - DNA, 25 bp, Artificial
  probe
  misc_feature (1)..(25): SEQ ID NO: 6371; WAN024B6Q; Start 55; Stop 79
attttagaagtagaggcgtactatt

SEQ ID NO: 436544 - DNA, 25 bp, Artificial
  probe
  misc_feature (1)..(25): SEQ ID NO: 6371; WAN024B6Q; Start 52; Stop 76
aatattttagaagtagaggcgtact

SEQ ID NO: 436545 - DNA, 25 bp, Artificial
  probe
  misc_feature (1)..(25): SEQ ID NO: 6371; WAN024B6Q; Start 54; Stop 78
tattttagaagtagaggcgtactat

SEQ ID NO: 436546 - DNA, 25 bp, Artificial
  probe
  misc_feature (1)..(25): SEQ ID NO: 6371; WAN024B6Q; Start 53; Stop 77
atattttagaagtagaggcgtacta

SEQ ID NO: 436547 - DNA, 25 bp, Artificial
  probe
  misc_feature (1)..(25): SEQ ID NO: 6371; WAN024B6Q; Start 47; Stop 71
ctaacaatattttagaagtagaggc

SEQ ID NO: 436548 - DNA, 25 bp, Artificial
  probe
  misc_feature (1)..(25): SEQ ID NO: 6373; WAN024B6R; Start 29; Stop 53
ggacagtcaaattgattgctaacaa

SEQ ID NO: 436549 - DNA, 25 bp, Artificial
  probe
  misc_feature (1)..(25): SEQ ID NO: 6373; WAN024B6R; Start 27; Stop 51
caggacagtcaaattgattgctaac

SEQ ID NO: 436550 - DNA, 25 bp, Artificial
  probe
  misc_feature (1)..(25): SEQ ID NO: 6373; WAN024B6R; Start 26; Stop 50
tcaggacagtcaaattgattgctaa

SEQ ID NO: 436551 - DNA, 25 bp, Artificial
  probe
  misc_feature (1)..(25): SEQ ID NO: 6373; WAN024B6R; Start 61; Stop 85
gaagttgaggtgtactattctagtt

SEQ ID NO: 436552 - DNA, 25 bp, Artificial
  probe
  misc_feature (1)..(25): SEQ ID NO: 6373; WAN024B6R; Start 28; Stop 52
aggacagtcaaattgattgctaaca

SEQ ID NO: 436553 - DNA, 25 bp, Artificial
  probe
  misc_feature (1)..(25): SEQ ID NO: 6373; WAN024B6R; Start 60; Stop 84
agaagttgaggtgtactattctagt

SEQ ID NO: 436554 - DNA, 25 bp, Artificial
  probe
  misc_feature (1)..(25): SEQ ID NO: 6373; WAN024B6R; Start 1; Stop 25
atgaaacaagaacaggagaaatcga

SEQ ID NO: 436555 - DNA, 25 bp, Artificial
  probe
  misc_feature (1)..(25): SEQ ID NO: 6373; WAN024B6R; Start 32; Stop 56
cagtcaaattgattgctaacaatgt

SEQ ID NO: 436556 - DNA, 25 bp, Artificial
  probe
  misc_feature (1)..(25): SEQ ID NO: 6373; WAN024B6R; Start 31; Stop 55
acagtcaaattgattgctaacaatg

SEQ ID NO: 436557 - DNA, 25 bp, Artificial
  probe
  misc_feature (1)..(25): SEQ ID NO: 6373; WAN024B6R; Start 30; Stop 54
gacagtcaaattgattgctaacaat

SEQ ID NO: 436558 - DNA, 25 bp, Artificial
  probe
  misc_feature (1)..(25): SEQ ID NO: 6373; WAN024B6R; Start 25; Stop 49
atcaggacagtcaaattgattgcta

SEQ ID NO: 436559 - DNA, 25 bp, Artificial
  probe
  misc_feature (1)..(25): SEQ ID NO: 6373; WAN024B6R; Start 64; Stop 88
gttgaggtgtactattctagtttca

SEQ ID NO: 436560 - DNA, 25 bp, Artificial
  probe
  misc_feature (1)..(25): SEQ ID NO: 6373; WAN024B6R; Start 63; Stop 87
agttgaggtgtactattctagtttc

SEQ ID NO: 436561 - DNA, 25 bp, Artificial
  probe
  misc_feature (1)..(25): SEQ ID NO: 6373; WAN024B6R; Start 33; Stop 57
agtcaaattgattgctaacaatgtt

SEQ ID NO: 436562 - DNA, 25 bp, Artificial
  probe
  misc_feature (1)..(25): SEQ ID NO: 6373; WAN024B6R; Start 24; Stop 48
gatcaggacagtcaaattgattgct

SEQ ID NO: 436563 - DNA, 25 bp, Artificial
  probe
  misc_feature (1)..(25): SEQ ID NO: 6373; WAN024B6R; Start 62; Stop 86
aagttgaggtgtactattctagttt

SEQ ID NO: 436564 - DNA, 25 bp, Artificial
  probe
  misc_feature (1)..(25): SEQ ID NO: 6373; WAN024B6R; Start 66; Stop 90
tgaggtgtactattctagtttcaat

SEQ ID NO: 436565 - DNA, 25 bp, Artificial
  probe
  misc_feature (1)..(25): SEQ ID NO: 6373; WAN024B6R; Start 34; Stop 58
gtcaaattgattgctaacaatgttt

SEQ ID NO: 436566 - DNA, 25 bp, Artificial
  probe
  misc_feature (1)..(25): SEQ ID NO: 6373; WAN024B6R; Start 50; Stop 74
acaatgttttagaagttgaggtgta

SEQ ID NO: 436567 - DNA, 25 bp, Artificial
  probe
  misc_feature (1)..(25): SEQ ID NO: 6373; WAN024B6R; Start 3; Stop 27
gaaacaagaacaggagaaatcgatc

SEQ ID NO: 436568 - DNA, 25 bp, Artificial
  probe
  misc_feature (1)..(25): SEQ ID NO: 6373; WAN024B6R; Start 18; Stop 42
gaaatcgatcaggacagtcaaattg

SEQ ID NO: 436569 - DNA, 25 bp, Artificial
  probe
  misc_feature (1)..(25): SEQ ID NO: 6373; WAN024B6R; Start 17; Stop 41
agaaatcgatcaggacagtcaaatt

SEQ ID NO: 436570 - DNA, 25 bp, Artificial
  probe
  misc_feature (1)..(25): SEQ ID NO: 6373; WAN024B6R; Start 4; Stop 28
aaacaagaacaggagaaatcgatca

SEQ ID NO: 436571 - DNA, 25 bp, Artificial
  probe
  misc_feature (1)..(25): SEQ ID NO: 6373; WAN024B6R; Start 2; Stop 26
tgaaacaagaacaggagaaatcgat

SEQ ID NO: 436572 - DNA, 25 bp, Artificial
  probe
  misc_feature (1)..(25): SEQ ID NO: 6373; WAN024B6R; Start 49; Stop 73
aacaatgttttagaagttgaggtgt

SEQ ID NO: 436573 - DNA, 25 bp, Artificial
  probe
  misc_feature (1)..(25): SEQ ID NO: 6373; WAN024B6R; Start 22; Stop 46
tcgatcaggacagtcaaattgattg

SEQ ID NO: 436574 - DNA, 25 bp, Artificial
  probe
  misc_feature (1)..(25): SEQ ID NO: 6373; WAN024B6R; Start 51; Stop 75
caatgttttagaagttgaggtgtac

SEQ ID NO: 436575 - DNA, 25 bp, Artificial
  probe
  misc_feature (1)..(25): SEQ ID NO: 6373; WAN024B6R; Start 16; Stop 40
gagaaatcgatcaggacagtcaaat

SEQ ID NO: 436576 - DNA, 25 bp, Artificial
  probe
  misc_feature (1)..(25): SEQ ID NO: 6373; WAN024B6R; Start 5; Stop 29
aacaagaacaggagaaatcgatcag

SEQ ID NO: 436577 - DNA, 25 bp, Artificial
  probe
  misc_feature (1)..(25): SEQ ID NO: 6373; WAN024B6R; Start 52; Stop 76
aatgttttagaagttgaggtgtact

SEQ ID NO: 436578 - DNA, 25 bp, Artificial
  probe
  misc_feature (1)..(25): SEQ ID NO: 6373; WAN024B6R; Start 23; Stop 47
cgatcaggacagtcaaattgattgc

SEQ ID NO: 436579 - DNA, 25 bp, Artificial
  probe
  misc_feature (1)..(25): SEQ ID NO: 6373; WAN024B6R; Start 57; Stop 81
tttagaagttgaggtgtactattct

SEQ ID NO: 436580 - DNA, 25 bp, Artificial
  probe
  misc_feature (1)..(25): SEQ ID NO: 6373; WAN024B6R; Start 19; Stop 43
aaatcgatcaggacagtcaaattga

SEQ ID NO: 436581 - DNA, 25 bp, Artificial
  probe
  misc_feature (1)..(25): SEQ ID NO: 6374; WAN024FQ8; Start 562; Stop 586
ggatatgcttctaattggtgttctc

SEQ ID NO: 436582 - DNA, 25 bp, Artificial
  probe
  misc_feature (1)..(25): SEQ ID NO: 6374; WAN024FQ8; Start 588; Stop 612
taataaggaggcggtagatatactg

SEQ ID NO: 436583 - DNA, 25 bp, Artificial
  probe
  misc_feature (1)..(25): SEQ ID NO: 6374; WAN024FQ8; Start 563; Stop 587
gatatgcttctaattggtgttctct

SEQ ID NO: 436584 - DNA, 25 bp, Artificial
  probe
  misc_feature (1)..(25): SEQ ID NO: 6374; WAN024FQ8; Start 589; Stop 613
aataaggaggcggtagatatactgc

SEQ ID NO: 436585 - DNA, 25 bp, Artificial
  probe
  misc_feature (1)..(25): SEQ ID NO: 6374; WAN024FQ8; Start 805; Stop 829
tggactgattcttctgatgatattg

SEQ ID NO: 436586 - DNA, 25 bp, Artificial
  probe
  misc_feature (1)..(25): SEQ ID NO: 6374; WAN024FQ8; Start 591; Stop 615
taaggaggcggtagatatactgcta

SEQ ID NO: 436587 - DNA, 25 bp, Artificial
  probe
  misc_feature (1)..(25): SEQ ID NO: 6374; WAN024FQ8; Start 583; Stop 607
tctcttaataaggaggcggtagata

SEQ ID NO: 436588 - DNA, 25 bp, Artificial
  probe
  misc_feature (1)..(25): SEQ ID NO: 6374; WAN024FQ8; Start 567; Stop 591
tgcttctaattggtgttctcttaat

SEQ ID NO: 436589 - DNA, 25 bp, Artificial
  probe
  misc_feature (1)..(25): SEQ ID NO: 6374; WAN024FQ8; Start 566; Stop 590
atgcttctaattggtgttctcttaa

SEQ ID NO: 436590 - DNA, 25 bp, Artificial
  probe
  misc_feature (1)..(25): SEQ ID NO: 6374; WAN024FQ8; Start 575; Stop 599
attggtgttctcttaataaggaggc

SEQ ID NO: 436591 - DNA, 25 bp, Artificial
  probe
  misc_feature (1)..(25): SEQ ID NO: 6374; WAN024FQ8; Start 806; Stop 830
ggactgattcttctgatgatattga

SEQ ID NO: 436592 - DNA, 25 bp, Artificial
  probe
  misc_feature (1)..(25): SEQ ID NO: 6374; WAN024FQ8; Start 597; Stop 621
ggcggtagatatactgctagaagaa

SEQ ID NO: 436593 - DNA, 25 bp, Artificial
  probe
  misc_feature (1)..(25): SEQ ID NO: 6374; WAN024FQ8; Start 582; Stop 606
ttctcttaataaggaggcggtagat

SEQ ID NO: 436594 - DNA, 25 bp, Artificial
  probe
  misc_feature (1)..(25): SEQ ID NO: 6374; WAN024FQ8; Start 564; Stop 588
atatgcttctaattggtgttctctt

SEQ ID NO: 436595 - DNA, 25 bp, Artificial
  probe
  misc_feature (1)..(25): SEQ ID NO: 6374; WAN024FQ8; Start 587; Stop 611
ttaataaggaggcggtagatatact

SEQ ID NO: 436596 - DNA, 25 bp, Artificial
  probe
  misc_feature (1)..(25): SEQ ID NO: 6374; WAN024FQ8; Start 584; Stop 608
ctcttaataaggaggcggtagatat

SEQ ID NO: 436597 - DNA, 25 bp, Artificial
  probe
  misc_feature (1)..(25): SEQ ID NO: 6374; WAN024FQ8; Start 595; Stop 619
gaggcggtagatatactgctagaag

SEQ ID NO: 436598 - DNA, 25 bp, Artificial
  probe
  misc_feature (1)..(25): SEQ ID NO: 6374; WAN024FQ8; Start 802; Stop 826
acatggactgattcttctgatgata

SEQ ID NO: 436599 - DNA, 25 bp, Artificial
  probe
  misc_feature (1)..(25): SEQ ID NO: 6374; WAN024FQ8; Start 801; Stop 825
tacatggactgattcttctgatgat

SEQ ID NO: 436600 - DNA, 25 bp, Artificial
  probe
  misc_feature (1)..(25): SEQ ID NO: 6374; WAN024FQ8; Start 800; Stop 824
atacatggactgattcttctgatga

SEQ ID NO: 436601 - DNA, 25 bp, Artificial
  probe
  misc_feature (1)..(25): SEQ ID NO: 6374; WAN024FQ8; Start 590; Stop 614
ataaggaggcggtagatatactgct

SEQ ID NO: 436602 - DNA, 25 bp, Artificial
  probe
  misc_feature (1)..(25): SEQ ID NO: 6374; WAN024FQ8; Start 581; Stop 605
gttctcttaataaggaggcggtaga

SEQ ID NO: 436603 - DNA, 25 bp, Artificial
  probe
  misc_feature (1)..(25): SEQ ID NO: 6374; WAN024FQ8; Start 596; Stop 620
aggcggtagatatactgctagaaga

SEQ ID NO: 436604 - DNA, 25 bp, Artificial
  probe
  misc_feature (1)..(25): SEQ ID NO: 6374; WAN024FQ8; Start 574; Stop 598
aattggtgttctcttaataaggagg

SEQ ID NO: 436605 - DNA, 25 bp, Artificial
  probe
  misc_feature (1)..(25): SEQ ID NO: 6374; WAN024FQ8; Start 586; Stop 610
cttaataaggaggcggtagatatac

SEQ ID NO: 436606 - DNA, 25 bp, Artificial
  probe
  misc_feature (1)..(25): SEQ ID NO: 6374; WAN024FQ8; Start 580; Stop 604
tgttctcttaataaggaggcggtag

SEQ ID NO: 436607 - DNA, 25 bp, Artificial
  probe
  misc_feature (1)..(25): SEQ ID NO: 6374; WAN024FQ8; Start 565; Stop 589
tatgcttctaattggtgttctctta

SEQ ID NO: 436608 - DNA, 25 bp, Artificial
  probe
  misc_feature (1)..(25): SEQ ID NO: 6374; WAN024FQ8; Start 585; Stop 609
tcttaataaggaggcggtagatata

SEQ ID NO: 436609 - DNA, 25 bp, Artificial
  probe
  misc_feature (1)..(25): SEQ ID NO: 6374; WAN024FQ8; Start 579; Stop 603
gtgttctcttaataaggaggcggta

SEQ ID NO: 436610 - DNA, 25 bp, Artificial
  probe
  misc_feature (1)..(25): SEQ ID NO: 6374; WAN024FQ8; Start 804; Stop 828
atggactgattcttctgatgatatt

SEQ ID NO: 436611 - DNA, 25 bp, Artificial
  probe
  misc_feature (1)..(25): SEQ ID NO: 6374; WAN024FQ8; Start 803; Stop 827
catggactgattcttctgatgatat

SEQ ID NO: 436612 - DNA, 25 bp, Artificial
  probe
  misc_feature (1)..(25): SEQ ID NO: 6374; WAN024FQ8; Start 662; Stop 686
gtgacgaattattcattcctacagt

SEQ ID NO: 436613 - DNA, 25 bp, Artificial
  probe
  misc_feature (1)..(25): SEQ ID NO: 6374; WAN024FQ8; Start 392; Stop 416
gaaataaagtctatgagcgtgtagc

SEQ ID NO: 436614 - DNA, 25 bp, Artificial
  probe
  misc_feature (1)..(25): SEQ ID NO: 6375; WAN024FJV; Start 626; Stop 650
atatagttgaagcgaaggaagagac

SEQ ID NO: 436615 - DNA, 25 bp, Artificial
  probe
  misc_feature (1)..(25): SEQ ID NO: 6375; WAN024FJV; Start 625; Stop 649
aatatagttgaagcgaaggaagaga

SEQ ID NO: 436616 - DNA, 25 bp, Artificial
  probe
  misc_feature (1)..(25): SEQ ID NO: 6375; WAN024FJV; Start 527; Stop 551
cagcagagtcatctattcaatcatc

SEQ ID NO: 436617 - DNA, 25 bp, Artificial
  probe
  misc_feature (1)..(25): SEQ ID NO: 6375; WAN024FJV; Start 528; Stop 552
agcagagtcatctattcaatcatct

SEQ ID NO: 436618 - DNA, 25 bp, Artificial
  probe
  misc_feature (1)..(25): SEQ ID NO: 6375; WAN024FJV; Start 627; Stop 651
tatagttgaagcgaaggaagagact

SEQ ID NO: 436619 - DNA, 25 bp, Artificial
  probe
  misc_feature (1)..(25): SEQ ID NO: 6375; WAN024FJV; Start 624; Stop 648
taatatagttgaagcgaaggaagag

SEQ ID NO: 436620 - DNA, 25 bp, Artificial
  probe
  misc_feature (1)..(25): SEQ ID NO: 6375; WAN024FJV; Start 623; Stop 647
ctaatatagttgaagcgaaggaaga

SEQ ID NO: 436621 - DNA, 25 bp, Artificial
  probe
  misc_feature (1)..(25): SEQ ID NO: 6375; WAN024FJV; Start 529; Stop 553
gcagagtcatctattcaatcatcta

SEQ ID NO: 436622 - DNA, 25 bp, Artificial
  probe
  misc_feature (1)..(25): SEQ ID NO: 6375; WAN024FJV; Start 1010; Stop 1034
tccattatgatgtaacgacagtacg

SEQ ID NO: 436623 - DNA, 25 bp, Artificial
  probe
  misc_feature (1)..(25): SEQ ID NO: 6375; WAN024FJV; Start 805; Stop 829
gctatccgtaaggaagatgttgata

SEQ ID NO: 436624 - DNA, 25 bp, Artificial
  probe
  misc_feature (1)..(25): SEQ ID NO: 6375; WAN024FJV; Start 808; Stop 832
atccgtaaggaagatgttgatagag

SEQ ID NO: 436625 - DNA, 25 bp, Artificial
  probe
  misc_feature (1)..(25): SEQ ID NO: 6375; WAN024FJV; Start 1223; Stop 1247
gatacagtatgacctctgctacttc

SEQ ID NO: 436626 - DNA, 25 bp, Artificial
  probe
  misc_feature (1)..(25): SEQ ID NO: 6375; WAN024FJV; Start 1224; Stop 1248
atacagtatgacctctgctacttca

SEQ ID NO: 436627 - DNA, 25 bp, Artificial
  probe
  misc_feature (1)..(25): SEQ ID NO: 6375; WAN024FJV; Start 1605; Stop 1629
aggattgccaattagtaatagagtt

SEQ ID NO: 436628 - DNA, 25 bp, Artificial
  probe
  misc_feature (1)..(25): SEQ ID NO: 6375; WAN024FJV; Start 1225; Stop 1249
tacagtatgacctctgctacttcaa

SEQ ID NO: 436629 - DNA, 25 bp, Artificial
  probe
  misc_feature (1)..(25): SEQ ID NO: 6375; WAN024FJV; Start 1009; Stop 1033
atccattatgatgtaacgacagtac

SEQ ID NO: 436630 - DNA, 25 bp, Artificial
  probe
  misc_feature (1)..(25): SEQ ID NO: 6375; WAN024FJV; Start 969; Stop 993
ttcatttcgtggtataggacattca

SEQ ID NO: 436631 - DNA, 25 bp, Artificial
  probe
  misc_feature (1)..(25): SEQ ID NO: 6375; WAN024FJV; Start 966; Stop 990
acattcatttcgtggtataggacat

SEQ ID NO: 436632 - DNA, 25 bp, Artificial
  probe
  misc_feature (1)..(25): SEQ ID NO: 6375; WAN024FJV; Start 819; Stop 843
agatgttgatagagggtatagtggt

SEQ ID NO: 436633 - DNA, 25 bp, Artificial
  probe
  misc_feature (1)..(25): SEQ ID NO: 6375; WAN024FJV; Start 809; Stop 833
tccgtaaggaagatgttgatagagg

SEQ ID NO: 436634 - DNA, 25 bp, Artificial
  probe
  misc_feature (1)..(25): SEQ ID NO: 6375; WAN024FJV; Start 807; Stop 831
tatccgtaaggaagatgttgataga

SEQ ID NO: 436635 - DNA, 25 bp, Artificial
  probe
  misc_feature (1)..(25): SEQ ID NO: 6375; WAN024FJV; Start 628; Stop 652
atagttgaagcgaaggaagagacta

SEQ ID NO: 436636 - DNA, 25 bp, Artificial
  probe
  misc_feature (1)..(25): SEQ ID NO: 6375; WAN024FJV; Start 1220; Stop 1244
caggatacagtatgacctctgctac

SEQ ID NO: 436637 - DNA, 25 bp, Artificial
  probe
  misc_feature (1)..(25): SEQ ID NO: 6375; WAN024FJV; Start 1008; Stop 1032
aatccattatgatgtaacgacagta

SEQ ID NO: 436638 - DNA, 25 bp, Artificial
  probe
  misc_feature (1)..(25): SEQ ID NO: 6375; WAN024FJV; Start 1222; Stop 1246
ggatacagtatgacctctgctactt

SEQ ID NO: 436639 - DNA, 25 bp, Artificial
  probe
  misc_feature (1)..(25): SEQ ID NO: 6375; WAN024FJV; Start 962; Stop 986
gcttacattcatttcgtggtatagg

SEQ ID NO: 436640 - DNA, 25 bp, Artificial
  probe
  misc_feature (1)..(25): SEQ ID NO: 6375; WAN024FJV; Start 961; Stop 985
ggcttacattcatttcgtggtatag

SEQ ID NO: 436641 - DNA, 25 bp, Artificial
  probe
  misc_feature (1)..(25): SEQ ID NO: 6375; WAN024FJV; Start 732; Stop 756
aacttcagctccagcatctactaat

SEQ ID NO: 436642 - DNA, 25 bp, Artificial
  probe
  misc_feature (1)..(25): SEQ ID NO: 6375; WAN024FJV; Start 965; Stop 989
tacattcatttcgtggtataggaca

SEQ ID NO: 436643 - DNA, 25 bp, Artificial
  probe
  misc_feature (1)..(25): SEQ ID NO: 6375; WAN024FJV; Start 629; Stop 653
tagttgaagcgaaggaagagactaa

SEQ ID NO: 436644 - DNA, 25 bp, Artificial
  probe
  misc_feature (1)..(25): SEQ ID NO: 6375; WAN024FJV; Start 820; Stop 844
gatgttgatagagggtatagtggtt

SEQ ID NO: 436645 - DNA, 25 bp, Artificial
  probe
  misc_feature (1)..(25): SEQ ID NO: 6375; WAN024FJV; Start 967; Stop 991
cattcatttcgtggtataggacatt

SEQ ID NO: 436646 - DNA, 25 bp, Artificial
  probe
  misc_feature (1)..(25): SEQ ID NO: 6375; WAN024FJV; Start 1657; Stop 1681
caaattggtgtggctaaagagttaa

SEQ ID NO: 436647 - DNA, 25 bp, Artificial
  probe
  misc_feature (1)..(25): SEQ ID NO: 6377; WAN024BN4; Start 595; Stop 619
gataggatggagagtctgagtgaat

SEQ ID NO: 436648 - DNA, 25 bp, Artificial
  probe
  misc_feature (1)..(25): SEQ ID NO: 6377; WAN024BN4; Start 596; Stop 620
ataggatggagagtctgagtgaatc

SEQ ID NO: 436649 - DNA, 25 bp, Artificial
  probe
  misc_feature (1)..(25): SEQ ID NO: 6377; WAN024BN4; Start 394; Stop 418
aatgacaaggacaggattgatacaa

SEQ ID NO: 436650 - DNA, 25 bp, Artificial
  probe
  misc_feature (1)..(25): SEQ ID NO: 6377; WAN024BN4; Start 390; Stop 414
gactaatgacaaggacaggattgat

SEQ ID NO: 436651 - DNA, 25 bp, Artificial
  probe
  misc_feature (1)..(25): SEQ ID NO: 6377; WAN024BN4; Start 393; Stop 417
taatgacaaggacaggattgataca

SEQ ID NO: 436652 - DNA, 25 bp, Artificial
  probe
  misc_feature (1)..(25): SEQ ID NO: 6377; WAN024BN4; Start 391; Stop 415
actaatgacaaggacaggattgata

SEQ ID NO: 436653 - DNA, 25 bp, Artificial
  probe
  misc_feature (1)..(25): SEQ ID NO: 6377; WAN024BN4; Start 392; Stop 416
ctaatgacaaggacaggattgatac

SEQ ID NO: 436654 - DNA, 25 bp, Artificial
  probe
  misc_feature (1)..(25): SEQ ID NO: 6377; WAN024BN4; Start 389; Stop 413
tgactaatgacaaggacaggattga

SEQ ID NO: 436655 - DNA, 25 bp, Artificial
  probe
  misc_feature (1)..(25): SEQ ID NO: 6377; WAN024BN4; Start 594; Stop 618
tgataggatggagagtctgagtgaa

SEQ ID NO: 436656 - DNA, 25 bp, Artificial
  probe
  misc_feature (1)..(25): SEQ ID NO: 6377; WAN024BN4; Start 593; Stop 617
ttgataggatggagagtctgagtga

SEQ ID NO: 436657 - DNA, 25 bp, Artificial
  probe
  misc_feature (1)..(25): SEQ ID NO: 6377; WAN024BN4; Start 592; Stop 616
gttgataggatggagagtctgagtg

SEQ ID NO: 436658 - DNA, 25 bp, Artificial
  probe
  misc_feature (1)..(25): SEQ ID NO: 6377; WAN024BN4; Start 590; Stop 614
gtgttgataggatggagagtctgag

SEQ ID NO: 436659 - DNA, 25 bp, Artificial
  probe
  misc_feature (1)..(25): SEQ ID NO: 6377; WAN024BN4; Start 597; Stop 621
taggatggagagtctgagtgaatct

SEQ ID NO: 436660 - DNA, 25 bp, Artificial
  probe
  misc_feature (1)..(25): SEQ ID NO: 6377; WAN024BN4; Start 383; Stop 407
aatcactgactaatgacaaggacag

SEQ ID NO: 436661 - DNA, 25 bp, Artificial
  probe
  misc_feature (1)..(25): SEQ ID NO: 6377; WAN024BN4; Start 586; Stop 610
tatcgtgttgataggatggagagtc

SEQ ID NO: 436662 - DNA, 25 bp, Artificial
  probe
  misc_feature (1)..(25): SEQ ID NO: 6377; WAN024BN4; Start 591; Stop 615
tgttgataggatggagagtctgagt

SEQ ID NO: 436663 - DNA, 25 bp, Artificial
  probe
  misc_feature (1)..(25): SEQ ID NO: 6377; WAN024BN4; Start 585; Stop 609
gtatcgtgttgataggatggagagt

SEQ ID NO: 436664 - DNA, 25 bp, Artificial
  probe
  misc_feature (1)..(25): SEQ ID NO: 6377; WAN024BN4; Start 388; Stop 412
ctgactaatgacaaggacaggattg

SEQ ID NO: 436665 - DNA, 25 bp, Artificial
  probe
  misc_feature (1)..(25): SEQ ID NO: 6377; WAN024BN4; Start 387; Stop 411
actgactaatgacaaggacaggatt

SEQ ID NO: 436666 - DNA, 25 bp, Artificial
  probe
  misc_feature (1)..(25): SEQ ID NO: 6377; WAN024BN4; Start 587; Stop 611
atcgtgttgataggatggagagtct

SEQ ID NO: 436667 - DNA, 25 bp, Artificial
  probe
  misc_feature (1)..(25): SEQ ID NO: 6377; WAN024BN4; Start 518; Stop 542
ccctctattatgatgcccactattt

SEQ ID NO: 436668 - DNA, 25 bp, Artificial
  probe
  misc_feature (1)..(25): SEQ ID NO: 6377; WAN024BN4; Start 509; Stop 533
ttcctgtttccctctattatgatgc

SEQ ID NO: 436669 - DNA, 25 bp, Artificial
  probe
  misc_feature (1)..(25): SEQ ID NO: 6377; WAN024BN4; Start 517; Stop 541
tccctctattatgatgcccactatt

SEQ ID NO: 436670 - DNA, 25 bp, Artificial
  probe
  misc_feature (1)..(25): SEQ ID NO: 6377; WAN024BN4; Start 516; Stop 540
ttccctctattatgatgcccactat

SEQ ID NO: 436671 - DNA, 25 bp, Artificial
  probe
  misc_feature (1)..(25): SEQ ID NO: 6377; WAN024BN4; Start 386; Stop 410
cactgactaatgacaaggacaggat

SEQ ID NO: 436672 - DNA, 25 bp, Artificial
  probe
  misc_feature (1)..(25): SEQ ID NO: 6377; WAN024BN4; Start 384; Stop 408
atcactgactaatgacaaggacagg

SEQ ID NO: 436673 - DNA, 25 bp, Artificial
  probe
  misc_feature (1)..(25): SEQ ID NO: 6377; WAN024BN4; Start 515; Stop 539
tttccctctattatgatgcccacta

SEQ ID NO: 436674 - DNA, 25 bp, Artificial
  probe
  misc_feature (1)..(25): SEQ ID NO: 6377; WAN024BN4; Start 844; Stop 868
cgatggattctaggacaaggtgatg

SEQ ID NO: 436675 - DNA, 25 bp, Artificial
  probe
  misc_feature (1)..(25): SEQ ID NO: 6377; WAN024BN4; Start 396; Stop 420
tgacaaggacaggattgatacaatt

SEQ ID NO: 436676 - DNA, 25 bp, Artificial
  probe
  misc_feature (1)..(25): SEQ ID NO: 6377; WAN024BN4; Start 395; Stop 419
atgacaaggacaggattgatacaat

SEQ ID NO: 436677 - DNA, 25 bp, Artificial
  probe
  misc_feature (1)..(25): SEQ ID NO: 6377; WAN024BN4; Start 309; Stop 333
tcttctatctttactctcaagcgaa

SEQ ID NO: 436678 - DNA, 25 bp, Artificial
  probe
  misc_feature (1)..(25): SEQ ID NO: 6377; WAN024BN4; Start 584; Stop 608
cgtatcgtgttgataggatggagag

SEQ ID NO: 436679 - DNA, 25 bp, Artificial
  probe
  misc_feature (1)..(25): SEQ ID NO: 6377; WAN024BN4; Start 308; Stop 332
atcttctatctttactctcaagcga

SEQ ID NO: 436680 - DNA, 25 bp, Artificial
  probe
  misc_feature (1)..(25): SEQ ID NO: 6378; WAN024FWO; Start 675; Stop 699
tgttccttctgatattcctacttgg

SEQ ID NO: 436681 - DNA, 25 bp, Artificial
  probe
  misc_feature (1)..(25): SEQ ID NO: 6378; WAN024FWO; Start 673; Stop 697
ggtgttccttctgatattcctactt

SEQ ID NO: 436682 - DNA, 25 bp, Artificial
  probe
  misc_feature (1)..(25): SEQ ID NO: 6378; WAN024FWO; Start 124; Stop 148
acctattctccagatgttgttgatt

SEQ ID NO: 436683 - DNA, 25 bp, Artificial
  probe
  misc_feature (1)..(25): SEQ ID NO: 6378; WAN024FWO; Start 592; Stop 616
atctcaccagtaattgtatcgttgt

SEQ ID NO: 436684 - DNA, 25 bp, Artificial
  probe
  misc_feature (1)..(25): SEQ ID NO: 6378; WAN024FWO; Start 595; Stop 619
tcaccagtaattgtatcgttgtctt

SEQ ID NO: 436685 - DNA, 25 bp, Artificial
  probe
  misc_feature (1)..(25): SEQ ID NO: 6378; WAN024FWO; Start 589; Stop 613
gctatctcaccagtaattgtatcgt

SEQ ID NO: 436686 - DNA, 25 bp, Artificial
  probe
  misc_feature (1)..(25): SEQ ID NO: 6378; WAN024FWO; Start 588; Stop 612
tgctatctcaccagtaattgtatcg

SEQ ID NO: 436687 - DNA, 25 bp, Artificial
  probe
  misc_feature (1)..(25): SEQ ID NO: 6378; WAN024FWO; Start 594; Stop 618
ctcaccagtaattgtatcgttgtct

SEQ ID NO: 436688 - DNA, 25 bp, Artificial
  probe
  misc_feature (1)..(25): SEQ ID NO: 6378; WAN024FWO; Start 593; Stop 617
tctcaccagtaattgtatcgttgtc

SEQ ID NO: 436689 - DNA, 25 bp, Artificial
  probe
  misc_feature (1)..(25): SEQ ID NO: 6378; WAN024FWO; Start 123; Stop 147
aacctattctccagatgttgttgat

SEQ ID NO: 436690 - DNA, 25 bp, Artificial
  probe
  misc_feature (1)..(25): SEQ ID NO: 6378; WAN024FWO; Start 674; Stop 698
gtgttccttctgatattcctacttg

SEQ ID NO: 436691 - DNA, 25 bp, Artificial
  probe
  misc_feature (1)..(25): SEQ ID NO: 6378; WAN024FWO; Start 333; Stop 357
aattgatgctcttctagttcgtcta

SEQ ID NO: 436692 - DNA, 25 bp, Artificial
  probe
  misc_feature (1)..(25): SEQ ID NO: 6378; WAN024FWO; Start 286; Stop 310
gttattggtactgtacttggtggta

SEQ ID NO: 436693 - DNA, 25 bp, Artificial
  probe
  misc_feature (1)..(25): SEQ ID NO: 6378; WAN024FWO; Start 289; Stop 313
attggtactgtacttggtggtattg

SEQ ID NO: 436694 - DNA, 25 bp, Artificial
  probe
  misc_feature (1)..(25): SEQ ID NO: 6378; WAN024FWO; Start 811; Stop 835
ggtgatggattacgagatataatgg

SEQ ID NO: 436695 - DNA, 25 bp, Artificial
  probe
  misc_feature (1)..(25): SEQ ID NO: 6378; WAN024FWO; Start 591; Stop 615
tatctcaccagtaattgtatcgttg

SEQ ID NO: 436696 - DNA, 25 bp, Artificial
  probe
  misc_feature (1)..(25): SEQ ID NO: 6378; WAN024FWO; Start 298; Stop 322
gtacttggtggtattgctggatatt

SEQ ID NO: 436697 - DNA, 25 bp, Artificial
  probe
  misc_feature (1)..(25): SEQ ID NO: 6378; WAN024FWO; Start 115; Stop 139
ttattgacaacctattctccagatg

SEQ ID NO: 436698 - DNA, 25 bp, Artificial
  probe
  misc_feature (1)..(25): SEQ ID NO: 6378; WAN024FWO; Start 288; Stop 312
tattggtactgtacttggtggtatt

SEQ ID NO: 436699 - DNA, 25 bp, Artificial
  probe
  misc_feature (1)..(25): SEQ ID NO: 6378; WAN024FWO; Start 287; Stop 311
ttattggtactgtacttggtggtat

SEQ ID NO: 436700 - DNA, 25 bp, Artificial
  probe
  misc_feature (1)..(25): SEQ ID NO: 6378; WAN024FWO; Start 117; Stop 141
attgacaacctattctccagatgtt

SEQ ID NO: 436701 - DNA, 25 bp, Artificial
  probe
  misc_feature (1)..(25): SEQ ID NO: 6378; WAN024FWO; Start 590; Stop 614
ctatctcaccagtaattgtatcgtt

SEQ ID NO: 436702 - DNA, 25 bp, Artificial
  probe
  misc_feature (1)..(25): SEQ ID NO: 6378; WAN024FWO; Start 587; Stop 611
atgctatctcaccagtaattgtatc

SEQ ID NO: 436703 - DNA, 25 bp, Artificial
  probe
  misc_feature (1)..(25): SEQ ID NO: 6378; WAN024FWO; Start 479; Stop 503
gaatggttcgtaatgagttcatgtc

SEQ ID NO: 436704 - DNA, 25 bp, Artificial
  probe
  misc_feature (1)..(25): SEQ ID NO: 6378; WAN024FWO; Start 116; Stop 140
tattgacaacctattctccagatgt

SEQ ID NO: 436705 - DNA, 25 bp, Artificial
  probe
  misc_feature (1)..(25): SEQ ID NO: 6378; WAN024FWO; Start 481; Stop 505
atggttcgtaatgagttcatgtctt

SEQ ID NO: 436706 - DNA, 25 bp, Artificial
  probe
  misc_feature (1)..(25): SEQ ID NO: 6378; WAN024FWO; Start 480; Stop 504
aatggttcgtaatgagttcatgtct

SEQ ID NO: 436707 - DNA, 25 bp, Artificial
  probe
  misc_feature (1)..(25): SEQ ID NO: 6378; WAN024FWO; Start 90; Stop 114
tctattagcatgtattctagcacct

SEQ ID NO: 436708 - DNA, 25 bp, Artificial
  probe
  misc_feature (1)..(25): SEQ ID NO: 6378; WAN024FWO; Start 810; Stop 834
tggtgatggattacgagatataatg

SEQ ID NO: 436709 - DNA, 25 bp, Artificial
  probe
  misc_feature (1)..(25): SEQ ID NO: 6378; WAN024FWO; Start 422; Stop 446
aaggtgtattcaatcttatcttcgt

SEQ ID NO: 436710 - DNA, 25 bp, Artificial
  probe
  misc_feature (1)..(25): SEQ ID NO: 6378; WAN024FWO; Start 297; Stop 321
tgtacttggtggtattgctggatat

SEQ ID NO: 436711 - DNA, 25 bp, Artificial
  probe
  misc_feature (1)..(25): SEQ ID NO: 6378; WAN024FWO; Start 668; Stop 692
gagtaggtgttccttctgatattcc

SEQ ID NO: 436712 - DNA, 25 bp, Artificial
  probe
  misc_feature (1)..(25): SEQ ID NO: 6378; WAN024FWO; Start 672; Stop 696
aggtgttccttctgatattcctact

SEQ ID NO: 436713 - DNA, 25 bp, Artificial
  probe
  misc_feature (1)..(25): SEQ ID NO: 6380; WAN024AZH; Start 225; Stop 249
acataccgataagatgaacaactgg

SEQ ID NO: 436714 - DNA, 25 bp, Artificial
  probe
  misc_feature (1)..(25): SEQ ID NO: 6380; WAN024AZH; Start 5; Stop 29
aacgatggatagcacttagtaagat

SEQ ID NO: 436715 - DNA, 25 bp, Artificial
  probe
  misc_feature (1)..(25): SEQ ID NO: 6380; WAN024AZH; Start 224; Stop 248
tacataccgataagatgaacaactg

SEQ ID NO: 436716 - DNA, 25 bp, Artificial
  probe
  misc_feature (1)..(25): SEQ ID NO: 6380; WAN024AZH; Start 6; Stop 30
acgatggatagcacttagtaagata

SEQ ID NO: 436717 - DNA, 25 bp, Artificial
  probe
  misc_feature (1)..(25): SEQ ID NO: 6380; WAN024AZH; Start 226; Stop 250
cataccgataagatgaacaactggc

SEQ ID NO: 436718 - DNA, 25 bp, Artificial
  probe
  misc_feature (1)..(25): SEQ ID NO: 6380; WAN024AZH; Start 227; Stop 251
ataccgataagatgaacaactggca

SEQ ID NO: 436719 - DNA, 25 bp, Artificial
  probe
  misc_feature (1)..(25): SEQ ID NO: 6380; WAN024AZH; Start 7; Stop 31
cgatggatagcacttagtaagatag

SEQ ID NO: 436720 - DNA, 25 bp, Artificial
  probe
  misc_feature (1)..(25): SEQ ID NO: 6380; WAN024AZH; Start 453; Stop 477
cttgaccttgactctcttaccaact

SEQ ID NO: 436721 - DNA, 25 bp, Artificial
  probe
  misc_feature (1)..(25): SEQ ID NO: 6380; WAN024AZH; Start 223; Stop 247
ttacataccgataagatgaacaact

SEQ ID NO: 436722 - DNA, 25 bp, Artificial
  probe
  misc_feature (1)..(25): SEQ ID NO: 6380; WAN024AZH; Start 228; Stop 252
taccgataagatgaacaactggcag

SEQ ID NO: 436723 - DNA, 25 bp, Artificial
  probe
  misc_feature (1)..(25): SEQ ID NO: 6380; WAN024AZH; Start 61; Stop 85
tattatctattgtcggtagggatgc

SEQ ID NO: 436724 - DNA, 25 bp, Artificial
  probe
  misc_feature (1)..(25): SEQ ID NO: 6380; WAN024AZH; Start 2; Stop 26
tgaaacgatggatagcacttagtaa

SEQ ID NO: 436725 - DNA, 25 bp, Artificial
  probe
  misc_feature (1)..(25): SEQ ID NO: 6380; WAN024AZH; Start 1; Stop 25
atgaaacgatggatagcacttagta

SEQ ID NO: 436726 - DNA, 25 bp, Artificial
  probe
  misc_feature (1)..(25): SEQ ID NO: 6380; WAN024AZH; Start 448; Stop 472
cttggcttgaccttgactctcttac

SEQ ID NO: 436727 - DNA, 25 bp, Artificial
  probe
  misc_feature (1)..(25): SEQ ID NO: 6380; WAN024AZH; Start 543; Stop 567
gatgcccatttctttatttccagac

SEQ ID NO: 436728 - DNA, 25 bp, Artificial
  probe
  misc_feature (1)..(25): SEQ ID NO: 6380; WAN024AZH; Start 544; Stop 568
atgcccatttctttatttccagact

SEQ ID NO: 436729 - DNA, 25 bp, Artificial
  probe
  misc_feature (1)..(25): SEQ ID NO: 6380; WAN024AZH; Start 492; Stop 516
tgttgtgggcaatcttctttatcta

SEQ ID NO: 436730 - DNA, 25 bp, Artificial
  probe
  misc_feature (1)..(25): SEQ ID NO: 6380; WAN024AZH; Start 4; Stop 28
aaacgatggatagcacttagtaaga

SEQ ID NO: 436731 - DNA, 25 bp, Artificial
  probe
  misc_feature (1)..(25): SEQ ID NO: 6380; WAN024AZH; Start 3; Stop 27
gaaacgatggatagcacttagtaag

SEQ ID NO: 436732 - DNA, 25 bp, Artificial
  probe
  misc_feature (1)..(25): SEQ ID NO: 6380; WAN024AZH; Start 230; Stop 254
ccgataagatgaacaactggcagaa

SEQ ID NO: 436733 - DNA, 25 bp, Artificial
  probe
  misc_feature (1)..(25): SEQ ID NO: 6380; WAN024AZH; Start 8; Stop 32
gatggatagcacttagtaagataga

SEQ ID NO: 436734 - DNA, 25 bp, Artificial
  probe
  misc_feature (1)..(25): SEQ ID NO: 6380; WAN024AZH; Start 495; Stop 519
tgtgggcaatcttctttatctagga

SEQ ID NO: 436735 - DNA, 25 bp, Artificial
  probe
  misc_feature (1)..(25): SEQ ID NO: 6380; WAN024AZH; Start 493; Stop 517
gttgtgggcaatcttctttatctag

SEQ ID NO: 436736 - DNA, 25 bp, Artificial
  probe
  misc_feature (1)..(25): SEQ ID NO: 6380; WAN024AZH; Start 447; Stop 471
acttggcttgaccttgactctctta

SEQ ID NO: 436737 - DNA, 25 bp, Artificial
  probe
  misc_feature (1)..(25): SEQ ID NO: 6380; WAN024AZH; Start 494; Stop 518
ttgtgggcaatcttctttatctagg

SEQ ID NO: 436738 - DNA, 25 bp, Artificial
  probe
  misc_feature (1)..(25): SEQ ID NO: 6380; WAN024AZH; Start 491; Stop 515
ctgttgtgggcaatcttctttatct

SEQ ID NO: 436739 - DNA, 25 bp, Artificial
  probe
  misc_feature (1)..(25): SEQ ID NO: 6380; WAN024AZH; Start 490; Stop 514
tctgttgtgggcaatcttctttatc

SEQ ID NO: 436740 - DNA, 25 bp, Artificial
  probe
  misc_feature (1)..(25): SEQ ID NO: 6380; WAN024AZH; Start 231; Stop 255
cgataagatgaacaactggcagaaa

SEQ ID NO: 436741 - DNA, 25 bp, Artificial
  probe
  misc_feature (1)..(25): SEQ ID NO: 6380; WAN024AZH; Start 62; Stop 86
attatctattgtcggtagggatgcc

SEQ ID NO: 436742 - DNA, 25 bp, Artificial
  probe
  misc_feature (1)..(25): SEQ ID NO: 6380; WAN024AZH; Start 489; Stop 513
gtctgttgtgggcaatcttctttat

SEQ ID NO: 436743 - DNA, 25 bp, Artificial
  probe
  misc_feature (1)..(25): SEQ ID NO: 6380; WAN024AZH; Start 545; Stop 569
tgcccatttctttatttccagactg

SEQ ID NO: 436744 - DNA, 25 bp, Artificial
  probe
  misc_feature (1)..(25): SEQ ID NO: 6380; WAN024AZH; Start 452; Stop 476
gcttgaccttgactctcttaccaac

SEQ ID NO: 436745 - DNA, 25 bp, Artificial
  probe
  misc_feature (1)..(25): SEQ ID NO: 6380; WAN024AZH; Start 631; Stop 655
ttaaacgagggtggcatcaatctat

SEQ ID NO: 436746 - DNA, 25 bp, Artificial
  probe
  misc_feature (1)..(25): SEQ ID NO: 6381; WAN024AZJ; Start 223; Stop 247
ttacataccgacaagatgaacaact

SEQ ID NO: 436747 - DNA, 25 bp, Artificial
  probe
  misc_feature (1)..(25): SEQ ID NO: 6381; WAN024AZJ; Start 222; Stop 246
cttacataccgacaagatgaacaac

SEQ ID NO: 436748 - DNA, 25 bp, Artificial
  probe
  misc_feature (1)..(25): SEQ ID NO: 6381; WAN024AZJ; Start 224; Stop 248
tacataccgacaagatgaacaactg

SEQ ID NO: 436749 - DNA, 25 bp, Artificial
  probe
  misc_feature (1)..(25): SEQ ID NO: 6381; WAN024AZJ; Start 62; Stop 86
attatctattgtcagtagggatgcc

SEQ ID NO: 436750 - DNA, 25 bp, Artificial
  probe
  misc_feature (1)..(25): SEQ ID NO: 6381; WAN024AZJ; Start 81; Stop 105
gatgccgacagccttctatctattc

SEQ ID NO: 436751 - DNA, 25 bp, Artificial
  probe
  misc_feature (1)..(25): SEQ ID NO: 6381; WAN024AZJ; Start 644; Stop 668
gaatcaatctatcagccacagttta

SEQ ID NO: 436752 - DNA, 25 bp, Artificial
  probe
  misc_feature (1)..(25): SEQ ID NO: 6381; WAN024AZJ; Start 643; Stop 667
ggaatcaatctatcagccacagttt

SEQ ID NO: 436753 - DNA, 25 bp, Artificial
  probe
  misc_feature (1)..(25): SEQ ID NO: 6381; WAN024AZJ; Start 82; Stop 106
atgccgacagccttctatctattct

SEQ ID NO: 436754 - DNA, 25 bp, Artificial
  probe
  misc_feature (1)..(25): SEQ ID NO: 6381; WAN024AZJ; Start 225; Stop 249
acataccgacaagatgaacaactgg

SEQ ID NO: 436755 - DNA, 25 bp, Artificial
  probe
  misc_feature (1)..(25): SEQ ID NO: 6381; WAN024AZJ; Start 634; Stop 658
aatgagggtggaatcaatctatcag

SEQ ID NO: 436756 - DNA, 25 bp, Artificial
  probe
  misc_feature (1)..(25): SEQ ID NO: 6381; WAN024AZJ; Start 221; Stop 245
tcttacataccgacaagatgaacaa

SEQ ID NO: 436757 - DNA, 25 bp, Artificial
  probe
  misc_feature (1)..(25): SEQ ID NO: 6381; WAN024AZJ; Start 633; Stop 657
aaatgagggtggaatcaatctatca

SEQ ID NO: 436758 - DNA, 25 bp, Artificial
  probe
  misc_feature (1)..(25): SEQ ID NO: 6381; WAN024AZJ; Start 629; Stop 653
tcttaaatgagggtggaatcaatct

SEQ ID NO: 436759 - DNA, 25 bp, Artificial
  probe
  misc_feature (1)..(25): SEQ ID NO: 6381; WAN024AZJ; Start 454; Stop 478
ttaaccttgacgctgttaccaacta

SEQ ID NO: 436760 - DNA, 25 bp, Artificial
  probe
  misc_feature (1)..(25): SEQ ID NO: 6381; WAN024AZJ; Start 220; Stop 244
gtcttacataccgacaagatgaaca

SEQ ID NO: 436761 - DNA, 25 bp, Artificial
  probe
  misc_feature (1)..(25): SEQ ID NO: 6381; WAN024AZJ; Start 645; Stop 669
aatcaatctatcagccacagtttat

SEQ ID NO: 436762 - DNA, 25 bp, Artificial
  probe
  misc_feature (1)..(25): SEQ ID NO: 6381; WAN024AZJ; Start 642; Stop 666
tggaatcaatctatcagccacagtt

SEQ ID NO: 436763 - DNA, 25 bp, Artificial
  probe
  misc_feature (1)..(25): SEQ ID NO: 6381; WAN024AZJ; Start 83; Stop 107
tgccgacagccttctatctattctt

SEQ ID NO: 436764 - DNA, 25 bp, Artificial
  probe
  misc_feature (1)..(25): SEQ ID NO: 6381; WAN024AZJ; Start 628; Stop 652
ttcttaaatgagggtggaatcaatc

SEQ ID NO: 436765 - DNA, 25 bp, Artificial
  probe
  misc_feature (1)..(25): SEQ ID NO: 6381; WAN024AZJ; Start 627; Stop 651
cttcttaaatgagggtggaatcaat

SEQ ID NO: 436766 - DNA, 25 bp, Artificial
  probe
  misc_feature (1)..(25): SEQ ID NO: 6381; WAN024AZJ; Start 63; Stop 87
ttatctattgtcagtagggatgccg

SEQ ID NO: 436767 - DNA, 25 bp, Artificial
  probe
  misc_feature (1)..(25): SEQ ID NO: 6381; WAN024AZJ; Start 455; Stop 479
taaccttgacgctgttaccaactag

SEQ ID NO: 436768 - DNA, 25 bp, Artificial
  probe
  misc_feature (1)..(25): SEQ ID NO: 6381; WAN024AZJ; Start 630; Stop 654
cttaaatgagggtggaatcaatcta

SEQ ID NO: 436769 - DNA, 25 bp, Artificial
  probe
  misc_feature (1)..(25): SEQ ID NO: 6381; WAN024AZJ; Start 626; Stop 650
ccttcttaaatgagggtggaatcaa

SEQ ID NO: 436770 - DNA, 25 bp, Artificial
  probe
  misc_feature (1)..(25): SEQ ID NO: 6381; WAN024AZJ; Start 84; Stop 108
gccgacagccttctatctattcttt

SEQ ID NO: 436771 - DNA, 25 bp, Artificial
  probe
  misc_feature (1)..(25): SEQ ID NO: 6381; WAN024AZJ; Start 632; Stop 656
taaatgagggtggaatcaatctatc

SEQ ID NO: 436772 - DNA, 25 bp, Artificial
  probe
  misc_feature (1)..(25): SEQ ID NO: 6381; WAN024AZJ; Start 495; Stop 519
cgtgggcaatcttctttatctagga

SEQ ID NO: 436773 - DNA, 25 bp, Artificial
  probe
  misc_feature (1)..(25): SEQ ID NO: 6381; WAN024AZJ; Start 64; Stop 88
tatctattgtcagtagggatgccga

SEQ ID NO: 436774 - DNA, 25 bp, Artificial
  probe
  misc_feature (1)..(25): SEQ ID NO: 6381; WAN024AZJ; Start 61; Stop 85
tattatctattgtcagtagggatgc

SEQ ID NO: 436775 - DNA, 25 bp, Artificial
  probe
  misc_feature (1)..(25): SEQ ID NO: 6381; WAN024AZJ; Start 635; Stop 659
atgagggtggaatcaatctatcagc

SEQ ID NO: 436776 - DNA, 25 bp, Artificial
  probe
  misc_feature (1)..(25): SEQ ID NO: 6381; WAN024AZJ; Start 263; Stop 287
gtcatagcccagtaaatatggtaga

SEQ ID NO: 436777 - DNA, 25 bp, Artificial
  probe
  misc_feature (1)..(25): SEQ ID NO: 6381; WAN024AZJ; Start 262; Stop 286
cgtcatagcccagtaaatatggtag

SEQ ID NO: 436778 - DNA, 25 bp, Artificial
  probe
  misc_feature (1)..(25): SEQ ID NO: 6381; WAN024AZJ; Start 631; Stop 655
ttaaatgagggtggaatcaatctat

SEQ ID NO: 436779 - DNA, 25 bp, Artificial
  probe
  misc_feature (1)..(25): SEQ ID NO: 6382; WAN024BTH; Start 885; Stop 909
ctcaattcatcgtgtcagcatctat

SEQ ID NO: 436780 - DNA, 25 bp, Artificial
  probe
  misc_feature (1)..(25): SEQ ID NO: 6382; WAN024BTH; Start 1456; Stop 1480
atctatcagcaattcttgacagacc

SEQ ID NO: 436781 - DNA, 25 bp, Artificial
  probe
  misc_feature (1)..(25): SEQ ID NO: 6382; WAN024BTH; Start 1334; Stop 1358
aacgctatgaagattatctgactcc

SEQ ID NO: 436782 - DNA, 25 bp, Artificial
  probe
  misc_feature (1)..(25): SEQ ID NO: 6382; WAN024BTH; Start 886; Stop 910
tcaattcatcgtgtcagcatctatg

SEQ ID NO: 436783 - DNA, 25 bp, Artificial
  probe
  misc_feature (1)..(25): SEQ ID NO: 6382; WAN024BTH; Start 1336; Stop 1360
cgctatgaagattatctgactccta

SEQ ID NO: 436784 - DNA, 25 bp, Artificial
  probe
  misc_feature (1)..(25): SEQ ID NO: 6382; WAN024BTH; Start 1335; Stop 1359
acgctatgaagattatctgactcct

SEQ ID NO: 436785 - DNA, 25 bp, Artificial
  probe
  misc_feature (1)..(25): SEQ ID NO: 6382; WAN024BTH; Start 1348; Stop 1372
tatctgactcctagtgatgaacaag

SEQ ID NO: 436786 - DNA, 25 bp, Artificial
  probe
  misc_feature (1)..(25): SEQ ID NO: 6382; WAN024BTH; Start 884; Stop 908
tctcaattcatcgtgtcagcatcta

SEQ ID NO: 436787 - DNA, 25 bp, Artificial
  probe
  misc_feature (1)..(25): SEQ ID NO: 6382; WAN024BTH; Start 1903; Stop 1927
attgctcttgtcactctcttgctat

SEQ ID NO: 436788 - DNA, 25 bp, Artificial
  probe
  misc_feature (1)..(25): SEQ ID NO: 6382; WAN024BTH; Start 1451; Stop 1475
cgatgatctatcagcaattcttgac

SEQ ID NO: 436789 - DNA, 25 bp, Artificial
  probe
  misc_feature (1)..(25): SEQ ID NO: 6382; WAN024BTH; Start 1445; Stop 1469
atacaccgatgatctatcagcaatt

SEQ ID NO: 436790 - DNA, 25 bp, Artificial
  probe
  misc_feature (1)..(25): SEQ ID NO: 6382; WAN024BTH; Start 1444; Stop 1468
aatacaccgatgatctatcagcaat

SEQ ID NO: 436791 - DNA, 25 bp, Artificial
  probe
  misc_feature (1)..(25): SEQ ID NO: 6382; WAN024BTH; Start 1454; Stop 1478
tgatctatcagcaattcttgacaga

SEQ ID NO: 436792 - DNA, 25 bp, Artificial
  probe
  misc_feature (1)..(25): SEQ ID NO: 6382; WAN024BTH; Start 1646; Stop 1670
tataccagcagatgatccaatccat

SEQ ID NO: 436793 - DNA, 25 bp, Artificial
  probe
  misc_feature (1)..(25): SEQ ID NO: 6382; WAN024BTH; Start 1455; Stop 1479
gatctatcagcaattcttgacagac

SEQ ID NO: 436794 - DNA, 25 bp, Artificial
  probe
  misc_feature (1)..(25): SEQ ID NO: 6382; WAN024BTH; Start 1653; Stop 1677
gcagatgatccaatccattcaatta

SEQ ID NO: 436795 - DNA, 25 bp, Artificial
  probe
  misc_feature (1)..(25): SEQ ID NO: 6382; WAN024BTH; Start 1443; Stop 1467
taatacaccgatgatctatcagcaa

SEQ ID NO: 436796 - DNA, 25 bp, Artificial
  probe
  misc_feature (1)..(25): SEQ ID NO: 6382; WAN024BTH; Start 1347; Stop 1371
ttatctgactcctagtgatgaacaa

SEQ ID NO: 436797 - DNA, 25 bp, Artificial
  probe
  misc_feature (1)..(25): SEQ ID NO: 6382; WAN024BTH; Start 1446; Stop 1470
tacaccgatgatctatcagcaattc

SEQ ID NO: 436798 - DNA, 25 bp, Artificial
  probe
  misc_feature (1)..(25): SEQ ID NO: 6382; WAN024BTH; Start 1442; Stop 1466
ataatacaccgatgatctatcagca

SEQ ID NO: 436799 - DNA, 25 bp, Artificial
  probe
  misc_feature (1)..(25): SEQ ID NO: 6382; WAN024BTH; Start 1904; Stop 1928
ttgctcttgtcactctcttgctatt

SEQ ID NO: 436800 - DNA, 25 bp, Artificial
  probe
  misc_feature (1)..(25): SEQ ID NO: 6382; WAN024BTH; Start 1652; Stop 1676
agcagatgatccaatccattcaatt

SEQ ID NO: 436801 - DNA, 25 bp, Artificial
  probe
  misc_feature (1)..(25): SEQ ID NO: 6382; WAN024BTH; Start 1450; Stop 1474
ccgatgatctatcagcaattcttga

SEQ ID NO: 436802 - DNA, 25 bp, Artificial
  probe
  misc_feature (1)..(25): SEQ ID NO: 6382; WAN024BTH; Start 1346; Stop 1370
attatctgactcctagtgatgaaca

SEQ ID NO: 436803 - DNA, 25 bp, Artificial
  probe
  misc_feature (1)..(25): SEQ ID NO: 6382; WAN024BTH; Start 1453; Stop 1477
atgatctatcagcaattcttgacag

SEQ ID NO: 436804 - DNA, 25 bp, Artificial
  probe
  misc_feature (1)..(25): SEQ ID NO: 6382; WAN024BTH; Start 1452; Stop 1476
gatgatctatcagcaattcttgaca

SEQ ID NO: 436805 - DNA, 25 bp, Artificial
  probe
  misc_feature (1)..(25): SEQ ID NO: 6382; WAN024BTH; Start 1449; Stop 1473
accgatgatctatcagcaattcttg

SEQ ID NO: 436806 - DNA, 25 bp, Artificial
  probe
  misc_feature (1)..(25): SEQ ID NO: 6382; WAN024BTH; Start 1448; Stop 1472
caccgatgatctatcagcaattctt

SEQ ID NO: 436807 - DNA, 25 bp, Artificial
  probe
  misc_feature (1)..(25): SEQ ID NO: 6382; WAN024BTH; Start 887; Stop 911
caattcatcgtgtcagcatctatgg

SEQ ID NO: 436808 - DNA, 25 bp, Artificial
  probe
  misc_feature (1)..(25): SEQ ID NO: 6382; WAN024BTH; Start 913; Stop 937
tctatctggcagacttatcaagagg

SEQ ID NO: 436809 - DNA, 25 bp, Artificial
  probe
  misc_feature (1)..(25): SEQ ID NO: 6382; WAN024BTH; Start 907; Stop 931
tatggctctatctggcagacttatc

SEQ ID NO: 436810 - DNA, 25 bp, Artificial
  probe
  misc_feature (1)..(25): SEQ ID NO: 6382; WAN024BTH; Start 906; Stop 930
ctatggctctatctggcagacttat

SEQ ID NO: 436811 - DNA, 25 bp, Artificial
  probe
  misc_feature (1)..(25): SEQ ID NO: 6382; WAN024BTH; Start 1651; Stop 1675
cagcagatgatccaatccattcaat

SEQ ID NO: 436812 - DNA, 25 bp, Artificial
  probe
  misc_feature (1)..(25): SEQ ID NO: 6383; WAN024AYT; Start 76; Stop 100
acaattcttctatcaacagcactct

SEQ ID NO: 436813 - DNA, 25 bp, Artificial
  probe
  misc_feature (1)..(25): SEQ ID NO: 6383; WAN024AYT; Start 75; Stop 99
aacaattcttctatcaacagcactc

SEQ ID NO: 436814 - DNA, 25 bp, Artificial
  probe
  misc_feature (1)..(25): SEQ ID NO: 6383; WAN024AYT; Start 77; Stop 101
caattcttctatcaacagcactctt

SEQ ID NO: 436815 - DNA, 25 bp, Artificial
  probe
  misc_feature (1)..(25): SEQ ID NO: 6383; WAN024AYT; Start 78; Stop 102
aattcttctatcaacagcactcttg

SEQ ID NO: 436816 - DNA, 25 bp, Artificial
  probe
  misc_feature (1)..(25): SEQ ID NO: 6383; WAN024AYT; Start 79; Stop 103
attcttctatcaacagcactcttgt

SEQ ID NO: 436817 - DNA, 25 bp, Artificial
  probe
  misc_feature (1)..(25): SEQ ID NO: 6383; WAN024AYT; Start 80; Stop 104
ttcttctatcaacagcactcttgtc

SEQ ID NO: 436818 - DNA, 25 bp, Artificial
  probe
  misc_feature (1)..(25): SEQ ID NO: 6383; WAN024AYT; Start 82; Stop 106
cttctatcaacagcactcttgtcag

SEQ ID NO: 436819 - DNA, 25 bp, Artificial
  probe
  misc_feature (1)..(25): SEQ ID NO: 6383; WAN024AYT; Start 81; Stop 105
tcttctatcaacagcactcttgtca

SEQ ID NO: 436820 - DNA, 25 bp, Artificial
  probe
  misc_feature (1)..(25): SEQ ID NO: 6383; WAN024AYT; Start 74; Stop 98
aaacaattcttctatcaacagcact

SEQ ID NO: 436821 - DNA, 25 bp, Artificial
  probe
  misc_feature (1)..(25): SEQ ID NO: 6383; WAN024AYT; Start 73; Stop 97
caaacaattcttctatcaacagcac

SEQ ID NO: 436822 - DNA, 25 bp, Artificial
  probe
  misc_feature (1)..(25): SEQ ID NO: 6383; WAN024AYT; Start 72; Stop 96
tcaaacaattcttctatcaacagca

SEQ ID NO: 436823 - DNA, 25 bp, Artificial
  probe
  misc_feature (1)..(25): SEQ ID NO: 6383; WAN024AYT; Start 83; Stop 107
ttctatcaacagcactcttgtcagg

SEQ ID NO: 436824 - DNA, 25 bp, Artificial
  probe
  misc_feature (1)..(25): SEQ ID NO: 6383; WAN024AYT; Start 32; Stop 56
cggctgagaaggtatttgaatatca

SEQ ID NO: 436825 - DNA, 25 bp, Artificial
  probe
  misc_feature (1)..(25): SEQ ID NO: 6383; WAN024AYT; Start 71; Stop 95
atcaaacaattcttctatcaacagc

SEQ ID NO: 436826 - DNA, 25 bp, Artificial
  probe
  misc_feature (1)..(25): SEQ ID NO: 6383; WAN024AYT; Start 122; Stop 146
caggattattctctgctttgaaaga

SEQ ID NO: 436827 - DNA, 25 bp, Artificial
  probe
  misc_feature (1)..(25): SEQ ID NO: 6383; WAN024AYT; Start 84; Stop 108
tctatcaacagcactcttgtcaggt

SEQ ID NO: 436828 - DNA, 25 bp, Artificial
  probe
  misc_feature (1)..(25): SEQ ID NO: 6383; WAN024AYT; Start 85; Stop 109
ctatcaacagcactcttgtcaggtg

SEQ ID NO: 436829 - DNA, 25 bp, Artificial
  probe
  misc_feature (1)..(25): SEQ ID NO: 6383; WAN024AYT; Start 123; Stop 147
aggattattctctgctttgaaagaa

SEQ ID NO: 436830 - DNA, 25 bp, Artificial
  probe
  misc_feature (1)..(25): SEQ ID NO: 6383; WAN024AYT; Start 33; Stop 57
ggctgagaaggtatttgaatatcaa

SEQ ID NO: 436831 - DNA, 25 bp, Artificial
  probe
  misc_feature (1)..(25): SEQ ID NO: 6383; WAN024AYT; Start 31; Stop 55
ccggctgagaaggtatttgaatatc

SEQ ID NO: 436832 - DNA, 25 bp, Artificial
  probe
  misc_feature (1)..(25): SEQ ID NO: 6383; WAN024AYT; Start 70; Stop 94
gatcaaacaattcttctatcaacag

SEQ ID NO: 436833 - DNA, 25 bp, Artificial
  probe
  misc_feature (1)..(25): SEQ ID NO: 6383; WAN024AYT; Start 124; Stop 148
ggattattctctgctttgaaagaaa

SEQ ID NO: 436834 - DNA, 25 bp, Artificial
  probe
  misc_feature (1)..(25): SEQ ID NO: 6383; WAN024AYT; Start 48; Stop 72
tgaatatcaattggaacttgctgat

SEQ ID NO: 436835 - DNA, 25 bp, Artificial
  probe
  misc_feature (1)..(25): SEQ ID NO: 6383; WAN024AYT; Start 47; Stop 71
ttgaatatcaattggaacttgctga

SEQ ID NO: 436836 - DNA, 25 bp, Artificial
  probe
  misc_feature (1)..(25): SEQ ID NO: 6383; WAN024AYT; Start 49; Stop 73
gaatatcaattggaacttgctgatc

SEQ ID NO: 436837 - DNA, 25 bp, Artificial
  probe
  misc_feature (1)..(25): SEQ ID NO: 6383; WAN024AYT; Start 62; Stop 86
aacttgctgatcaaacaattcttct

SEQ ID NO: 436838 - DNA, 25 bp, Artificial
  probe
  misc_feature (1)..(25): SEQ ID NO: 6383; WAN024AYT; Start 60; Stop 84
ggaacttgctgatcaaacaattctt

SEQ ID NO: 436839 - DNA, 25 bp, Artificial
  probe
  misc_feature (1)..(25): SEQ ID NO: 6383; WAN024AYT; Start 61; Stop 85
gaacttgctgatcaaacaattcttc

SEQ ID NO: 436840 - DNA, 25 bp, Artificial
  probe
  misc_feature (1)..(25): SEQ ID NO: 6383; WAN024AYT; Start 58; Stop 82
ttggaacttgctgatcaaacaattc

SEQ ID NO: 436841 - DNA, 25 bp, Artificial
  probe
  misc_feature (1)..(25): SEQ ID NO: 6383; WAN024AYT; Start 112; Stop 136
attgctttagcaggattattctctg

SEQ ID NO: 436842 - DNA, 25 bp, Artificial
  probe
  misc_feature (1)..(25): SEQ ID NO: 6383; WAN024AYT; Start 51; Stop 75
atatcaattggaacttgctgatcaa

SEQ ID NO: 436843 - DNA, 25 bp, Artificial
  probe
  misc_feature (1)..(25): SEQ ID NO: 6383; WAN024AYT; Start 50; Stop 74
aatatcaattggaacttgctgatca

SEQ ID NO: 436844 - DNA, 25 bp, Artificial
  probe
  misc_feature (1)..(25): SEQ ID NO: 6383; WAN024AYT; Start 55; Stop 79
caattggaacttgctgatcaaacaa

SEQ ID NO: 436845 - DNA, 25 bp, Artificial
  probe
  misc_feature (1)..(25): SEQ ID NO: 6384; WAN024DQI; Start 44; Stop 68
cttggaaagaagttcggaatcaatt

SEQ ID NO: 436846 - DNA, 25 bp, Artificial
  probe
  misc_feature (1)..(25): SEQ ID NO: 6384; WAN024DQI; Start 74; Stop 98
ataagcccacagagactcttgaatt

SEQ ID NO: 436847 - DNA, 25 bp, Artificial
  probe
  misc_feature (1)..(25): SEQ ID NO: 6384; WAN024DQI; Start 65; Stop 89
aattgaaggataagcccacagagac

SEQ ID NO: 436848 - DNA, 25 bp, Artificial
  probe
  misc_feature (1)..(25): SEQ ID NO: 6384; WAN024DQI; Start 80; Stop 104
ccacagagactcttgaattgctgaa

SEQ ID NO: 436849 - DNA, 25 bp, Artificial
  probe
  misc_feature (1)..(25): SEQ ID NO: 6384; WAN024DQI; Start 73; Stop 97
gataagcccacagagactcttgaat

SEQ ID NO: 436850 - DNA, 25 bp, Artificial
  probe
  misc_feature (1)..(25): SEQ ID NO: 6384; WAN024DQI; Start 81; Stop 105
cacagagactcttgaattgctgaaa

SEQ ID NO: 436851 - DNA, 25 bp, Artificial
  probe
  misc_feature (1)..(25): SEQ ID NO: 6384; WAN024DQI; Start 66; Stop 90
attgaaggataagcccacagagact

SEQ ID NO: 436852 - DNA, 25 bp, Artificial
  probe
  misc_feature (1)..(25): SEQ ID NO: 6384; WAN024DQI; Start 75; Stop 99
taagcccacagagactcttgaattg

SEQ ID NO: 436853 - DNA, 25 bp, Artificial
  probe
  misc_feature (1)..(25): SEQ ID NO: 6384; WAN024DQI; Start 43; Stop 67
tcttggaaagaagttcggaatcaat

SEQ ID NO: 436854 - DNA, 25 bp, Artificial
  probe
  misc_feature (1)..(25): SEQ ID NO: 6384; WAN024DQI; Start 42; Stop 66
gtcttggaaagaagttcggaatcaa

SEQ ID NO: 436855 - DNA, 25 bp, Artificial
  probe
  misc_feature (1)..(25): SEQ ID NO: 6384; WAN024DQI; Start 67; Stop 91
ttgaaggataagcccacagagactc

SEQ ID NO: 436856 - DNA, 25 bp, Artificial
  probe
  misc_feature (1)..(25): SEQ ID NO: 6384; WAN024DQI; Start 41; Stop 65
agtcttggaaagaagttcggaatca

SEQ ID NO: 436857 - DNA, 25 bp, Artificial
  probe
  misc_feature (1)..(25): SEQ ID NO: 6384; WAN024DQI; Start 45; Stop 69
ttggaaagaagttcggaatcaattg

SEQ ID NO: 436858 - DNA, 25 bp, Artificial
  probe
  misc_feature (1)..(25): SEQ ID NO: 6384; WAN024DQI; Start 69; Stop 93
gaaggataagcccacagagactctt

SEQ ID NO: 436859 - DNA, 25 bp, Artificial
  probe
  misc_feature (1)..(25): SEQ ID NO: 6384; WAN024DQI; Start 72; Stop 96
ggataagcccacagagactcttgaa

SEQ ID NO: 436860 - DNA, 25 bp, Artificial
  probe
  misc_feature (1)..(25): SEQ ID NO: 6384; WAN024DQI; Start 70; Stop 94
aaggataagcccacagagactcttg

SEQ ID NO: 436861 - DNA, 25 bp, Artificial
  probe
  misc_feature (1)..(25): SEQ ID NO: 6384; WAN024DQI; Start 31; Stop 55
gagtcagcagagtcttggaaagaag

SEQ ID NO: 436862 - DNA, 25 bp, Artificial
  probe
  misc_feature (1)..(25): SEQ ID NO: 6384; WAN024DQI; Start 64; Stop 88
caattgaaggataagcccacagaga

SEQ ID NO: 436863 - DNA, 25 bp, Artificial
  probe
  misc_feature (1)..(25): SEQ ID NO: 6384; WAN024DQI; Start 71; Stop 95
aggataagcccacagagactcttga

SEQ ID NO: 436864 - DNA, 25 bp, Artificial
  probe
  misc_feature (1)..(25): SEQ ID NO: 6384; WAN024DQI; Start 68; Stop 92
tgaaggataagcccacagagactct

SEQ ID NO: 436865 - DNA, 25 bp, Artificial
  probe
  misc_feature (1)..(25): SEQ ID NO: 6384; WAN024DQI; Start 79; Stop 103
cccacagagactcttgaattgctga

SEQ ID NO: 436866 - DNA, 25 bp, Artificial
  probe
  misc_feature (1)..(25): SEQ ID NO: 6384; WAN024DQI; Start 30; Stop 54
ggagtcagcagagtcttggaaagaa

SEQ ID NO: 436867 - DNA, 25 bp, Artificial
  probe
  misc_feature (1)..(25): SEQ ID NO: 6384; WAN024DQI; Start 23; Stop 47
gtttaggggagtcagcagagtcttg

SEQ ID NO: 436868 - DNA, 25 bp, Artificial
  probe
  misc_feature (1)..(25): SEQ ID NO: 6384; WAN024DQI; Start 14; Stop 38
ttttacacggtttaggggagtcagc

SEQ ID NO: 436869 - DNA, 25 bp, Artificial
  probe
  misc_feature (1)..(25): SEQ ID NO: 6385; WAN024BXI; Start 113; Stop 137
tgaaactggacgacttagatttaga

SEQ ID NO: 436870 - DNA, 25 bp, Artificial
  probe
  misc_feature (1)..(25): SEQ ID NO: 6385; WAN024BXI; Start 111; Stop 135
gttgaaactggacgacttagattta

SEQ ID NO: 436871 - DNA, 25 bp, Artificial
  probe
  misc_feature (1)..(25): SEQ ID NO: 6385; WAN024BXI; Start 112; Stop 136
ttgaaactggacgacttagatttag

SEQ ID NO: 436872 - DNA, 25 bp, Artificial
  probe
  misc_feature (1)..(25): SEQ ID NO: 6385; WAN024BXI; Start 114; Stop 138
gaaactggacgacttagatttagaa

SEQ ID NO: 436873 - DNA, 25 bp, Artificial
  probe
  misc_feature (1)..(25): SEQ ID NO: 6385; WAN024BXI; Start 115; Stop 139
aaactggacgacttagatttagaaa

SEQ ID NO: 436874 - DNA, 25 bp, Artificial
  probe
  misc_feature (1)..(25): SEQ ID NO: 6385; WAN024BXI; Start 110; Stop 134
agttgaaactggacgacttagattt

SEQ ID NO: 436875 - DNA, 25 bp, Artificial
  probe
  misc_feature (1)..(25): SEQ ID NO: 6385; WAN024BXI; Start 116; Stop 140
aactggacgacttagatttagaaat

SEQ ID NO: 436876 - DNA, 25 bp, Artificial
  probe
  misc_feature (1)..(25): SEQ ID NO: 6385; WAN024BXI; Start 60; Stop 84
gtttgaaattaaccaagctatcgaa

SEQ ID NO: 436877 - DNA, 25 bp, Artificial
  probe
  misc_feature (1)..(25): SEQ ID NO: 6385; WAN024BXI; Start 61; Stop 85
tttgaaattaaccaagctatcgaag

SEQ ID NO: 436878 - DNA, 25 bp, Artificial
  probe
  misc_feature (1)..(25): SEQ ID NO: 6385; WAN024BXI; Start 2; Stop 26
tgaaagaagcagtaaaggaatttct

SEQ ID NO: 436879 - DNA, 25 bp, Artificial
  probe
  misc_feature (1)..(25): SEQ ID NO: 6385; WAN024BXI; Start 1; Stop 25
atgaaagaagcagtaaaggaatttc

SEQ ID NO: 436880 - DNA, 25 bp, Artificial
  probe
  misc_feature (1)..(25): SEQ ID NO: 6385; WAN024BXI; Start 118; Stop 142
ctggacgacttagatttagaaatca

SEQ ID NO: 436881 - DNA, 25 bp, Artificial
  probe
  misc_feature (1)..(25): SEQ ID NO: 6385; WAN024BXI; Start 117; Stop 141
actggacgacttagatttagaaatc

SEQ ID NO: 436882 - DNA, 25 bp, Artificial
  probe
  misc_feature (1)..(25): SEQ ID NO: 6385; WAN024BXI; Start 62; Stop 86
ttgaaattaaccaagctatcgaagc

SEQ ID NO: 436883 - DNA, 25 bp, Artificial
  probe
  misc_feature (1)..(25): SEQ ID NO: 6385; WAN024BXI; Start 76; Stop 100
gctatcgaagctcgtttaaatcaaa

SEQ ID NO: 436884 - DNA, 25 bp, Artificial
  probe
  misc_feature (1)..(25): SEQ ID NO: 6385; WAN024BXI; Start 27; Stop 51
aaaattcaggagccgatttacaaaa

SEQ ID NO: 436885 - DNA, 25 bp, Artificial
  probe
  misc_feature (1)..(25): SEQ ID NO: 6385; WAN024BXI; Start 24; Stop 48
tctaaaattcaggagccgatttaca

SEQ ID NO: 436886 - DNA, 25 bp, Artificial
  probe
  misc_feature (1)..(25): SEQ ID NO: 6385; WAN024BXI; Start 25; Stop 49
ctaaaattcaggagccgatttacaa

SEQ ID NO: 436887 - DNA, 25 bp, Artificial
  probe
  misc_feature (1)..(25): SEQ ID NO: 6385; WAN024BXI; Start 23; Stop 47
ttctaaaattcaggagccgatttac

SEQ ID NO: 436888 - DNA, 25 bp, Artificial
  probe
  misc_feature (1)..(25): SEQ ID NO: 6385; WAN024BXI; Start 119; Stop 143
tggacgacttagatttagaaatcat

SEQ ID NO: 436889 - DNA, 25 bp, Artificial
  probe
  misc_feature (1)..(25): SEQ ID NO: 6385; WAN024BXI; Start 21; Stop 45
atttctaaaattcaggagccgattt

SEQ ID NO: 436890 - DNA, 25 bp, Artificial
  probe
  misc_feature (1)..(25): SEQ ID NO: 6385; WAN024BXI; Start 26; Stop 50
taaaattcaggagccgatttacaaa

SEQ ID NO: 436891 - DNA, 25 bp, Artificial
  probe
  misc_feature (1)..(25): SEQ ID NO: 6385; WAN024BXI; Start 22; Stop 46
tttctaaaattcaggagccgattta

SEQ ID NO: 436892 - DNA, 25 bp, Artificial
  probe
  misc_feature (1)..(25): SEQ ID NO: 6385; WAN024BXI; Start 3; Stop 27
gaaagaagcagtaaaggaatttcta

SEQ ID NO: 436893 - DNA, 25 bp, Artificial
  probe
  misc_feature (1)..(25): SEQ ID NO: 6385; WAN024BXI; Start 120; Stop 144
ggacgacttagatttagaaatcatt

SEQ ID NO: 436894 - DNA, 25 bp, Artificial
  probe
  misc_feature (1)..(25): SEQ ID NO: 6385; WAN024BXI; Start 5; Stop 29
aagaagcagtaaaggaatttctaaa

SEQ ID NO: 436895 - DNA, 25 bp, Artificial
  probe
  misc_feature (1)..(25): SEQ ID NO: 6385; WAN024BXI; Start 4; Stop 28
aaagaagcagtaaaggaatttctaa

SEQ ID NO: 436896 - DNA, 25 bp, Artificial
  probe
  misc_feature (1)..(25): SEQ ID NO: 6385; WAN024BXI; Start 59; Stop 83
ggtttgaaattaaccaagctatcga

SEQ ID NO: 436897 - DNA, 25 bp, Artificial
  probe
  misc_feature (1)..(25): SEQ ID NO: 6385; WAN024BXI; Start 20; Stop 44
aatttctaaaattcaggagccgatt

SEQ ID NO: 436898 - DNA, 25 bp, Artificial
  probe
  misc_feature (1)..(25): SEQ ID NO: 6385; WAN024BXI; Start 109; Stop 133
cagttgaaactggacgacttagatt

SEQ ID NO: 436899 - DNA, 25 bp, Artificial
  probe
  misc_feature (1)..(25): SEQ ID NO: 6385; WAN024BXI; Start 77; Stop 101
ctatcgaagctcgtttaaatcaaaa

SEQ ID NO: 436900 - DNA, 25 bp, Artificial
  probe
  misc_feature (1)..(25): SEQ ID NO: 6385; WAN024BXI; Start 67; Stop 91
attaaccaagctatcgaagctcgtt

SEQ ID NO: 436901 - DNA, 25 bp, Artificial
  probe
  misc_feature (1)..(25): SEQ ID NO: 6385; WAN024BXI; Start 66; Stop 90
aattaaccaagctatcgaagctcgt

SEQ ID NO: 436902 - DNA, 25 bp, Artificial
  probe
  misc_feature (1)..(25): SEQ ID NO: 6386; WAN024C3K; Start 64; Stop 88
gctattatccatcaggtgagagaat

SEQ ID NO: 436903 - DNA, 25 bp, Artificial
  probe
  misc_feature (1)..(25): SEQ ID NO: 6386; WAN024C3K; Start 83; Stop 107
gagaattacttgtatcacgaggcta

SEQ ID NO: 436904 - DNA, 25 bp, Artificial
  probe
  misc_feature (1)..(25): SEQ ID NO: 6386; WAN024C3K; Start 70; Stop 94
atccatcaggtgagagaattacttg

SEQ ID NO: 436905 - DNA, 25 bp, Artificial
  probe
  misc_feature (1)..(25): SEQ ID NO: 6386; WAN024C3K; Start 72; Stop 96
ccatcaggtgagagaattacttgta

SEQ ID NO: 436906 - DNA, 25 bp, Artificial
  probe
  misc_feature (1)..(25): SEQ ID NO: 6386; WAN024C3K; Start 84; Stop 108
agaattacttgtatcacgaggctat

SEQ ID NO: 436907 - DNA, 25 bp, Artificial
  probe
  misc_feature (1)..(25): SEQ ID NO: 6386; WAN024C3K; Start 63; Stop 87
tgctattatccatcaggtgagagaa

SEQ ID NO: 436908 - DNA, 25 bp, Artificial
  probe
  misc_feature (1)..(25): SEQ ID NO: 6386; WAN024C3K; Start 61; Stop 85
aatgctattatccatcaggtgagag

SEQ ID NO: 436909 - DNA, 25 bp, Artificial
  probe
  misc_feature (1)..(25): SEQ ID NO: 6386; WAN024C3K; Start 62; Stop 86
atgctattatccatcaggtgagaga

SEQ ID NO: 436910 - DNA, 25 bp, Artificial
  probe
  misc_feature (1)..(25): SEQ ID NO: 6386; WAN024C3K; Start 81; Stop 105
gagagaattacttgtatcacgaggc

SEQ ID NO: 436911 - DNA, 25 bp, Artificial
  probe
  misc_feature (1)..(25): SEQ ID NO: 6386; WAN024C3K; Start 71; Stop 95
tccatcaggtgagagaattacttgt

SEQ ID NO: 436912 - DNA, 25 bp, Artificial
  probe
  misc_feature (1)..(25): SEQ ID NO: 6386; WAN024C3K; Start 82; Stop 106
agagaattacttgtatcacgaggct

SEQ ID NO: 436913 - DNA, 25 bp, Artificial
  probe
  misc_feature (1)..(25): SEQ ID NO: 6386; WAN024C3K; Start 69; Stop 93
tatccatcaggtgagagaattactt

SEQ ID NO: 436914 - DNA, 25 bp, Artificial
  probe
  misc_feature (1)..(25): SEQ ID NO: 6386; WAN024C3K; Start 68; Stop 92
ttatccatcaggtgagagaattact

SEQ ID NO: 436915 - DNA, 25 bp, Artificial
  probe
  misc_feature (1)..(25): SEQ ID NO: 6386; WAN024C3K; Start 80; Stop 104
tgagagaattacttgtatcacgagg

SEQ ID NO: 436916 - DNA, 25 bp, Artificial
  probe
  misc_feature (1)..(25): SEQ ID NO: 6386; WAN024C3K; Start 75; Stop 99
tcaggtgagagaattacttgtatca

SEQ ID NO: 436917 - DNA, 25 bp, Artificial
  probe
  misc_feature (1)..(25): SEQ ID NO: 6386; WAN024C3K; Start 85; Stop 109
gaattacttgtatcacgaggctata

SEQ ID NO: 436918 - DNA, 25 bp, Artificial
  probe
  misc_feature (1)..(25): SEQ ID NO: 6386; WAN024C3K; Start 73; Stop 97
catcaggtgagagaattacttgtat

SEQ ID NO: 436919 - DNA, 25 bp, Artificial
  probe
  misc_feature (1)..(25): SEQ ID NO: 6386; WAN024C3K; Start 74; Stop 98
atcaggtgagagaattacttgtatc

SEQ ID NO: 436920 - DNA, 25 bp, Artificial
  probe
  misc_feature (1)..(25): SEQ ID NO: 6386; WAN024C3K; Start 67; Stop 91
attatccatcaggtgagagaattac

SEQ ID NO: 436921 - DNA, 25 bp, Artificial
  probe
  misc_feature (1)..(25): SEQ ID NO: 6386; WAN024C3K; Start 65; Stop 89
ctattatccatcaggtgagagaatt

SEQ ID NO: 436922 - DNA, 25 bp, Artificial
  probe
  misc_feature (1)..(25): SEQ ID NO: 6386; WAN024C3K; Start 86; Stop 110
aattacttgtatcacgaggctatac

SEQ ID NO: 436923 - DNA, 25 bp, Artificial
  probe
  misc_feature (1)..(25): SEQ ID NO: 6386; WAN024C3K; Start 156; Stop 180
gaaagagttgttgggaatggaattg

SEQ ID NO: 436924 - DNA, 25 bp, Artificial
  probe
  misc_feature (1)..(25): SEQ ID NO: 6386; WAN024C3K; Start 59; Stop 83
caaatgctattatccatcaggtgag

SEQ ID NO: 436925 - DNA, 25 bp, Artificial
  probe
  misc_feature (1)..(25): SEQ ID NO: 6386; WAN024C3K; Start 60; Stop 84
aaatgctattatccatcaggtgaga

SEQ ID NO: 436926 - DNA, 25 bp, Artificial
  probe
  misc_feature (1)..(25): SEQ ID NO: 6386; WAN024C3K; Start 155; Stop 179
tgaaagagttgttgggaatggaatt

SEQ ID NO: 436927 - DNA, 25 bp, Artificial
  probe
  misc_feature (1)..(25): SEQ ID NO: 6386; WAN024C3K; Start 154; Stop 178
gtgaaagagttgttgggaatggaat

SEQ ID NO: 436928 - DNA, 25 bp, Artificial
  probe
  misc_feature (1)..(25): SEQ ID NO: 6386; WAN024C3K; Start 150; Stop 174
tgttgtgaaagagttgttgggaatg

SEQ ID NO: 436929 - DNA, 25 bp, Artificial
  probe
  misc_feature (1)..(25): SEQ ID NO: 6386; WAN024C3K; Start 149; Stop 173
gtgttgtgaaagagttgttgggaat

SEQ ID NO: 436930 - DNA, 25 bp, Artificial
  probe
  misc_feature (1)..(25): SEQ ID NO: 6386; WAN024C3K; Start 58; Stop 82
gcaaatgctattatccatcaggtga

SEQ ID NO: 436931 - DNA, 25 bp, Artificial
  probe
  misc_feature (1)..(25): SEQ ID NO: 6386; WAN024C3K; Start 66; Stop 90
tattatccatcaggtgagagaatta

SEQ ID NO: 436932 - DNA, 25 bp, Artificial
  probe
  misc_feature (1)..(25): SEQ ID NO: 6386; WAN024C3K; Start 146; Stop 170
aaagtgttgtgaaagagttgttggg

SEQ ID NO: 436933 - DNA, 25 bp, Artificial
  probe
  misc_feature (1)..(25): SEQ ID NO: 6386; WAN024C3K; Start 153; Stop 177
tgtgaaagagttgttgggaatggaa

SEQ ID NO: 436934 - DNA, 25 bp, Artificial
  probe
  misc_feature (1)..(25): SEQ ID NO: 6386; WAN024C3K; Start 152; Stop 176
ttgtgaaagagttgttgggaatgga

SEQ ID NO: 436935 - DNA, 25 bp, Artificial
  probe
  misc_feature (1)..(25): SEQ ID NO: 6387; WAN024BYL; Start 180; Stop 204
tacttatattgacaggatggtagcg

SEQ ID NO: 436936 - DNA, 25 bp, Artificial
  probe
  misc_feature (1)..(25): SEQ ID NO: 6387; WAN024BYL; Start 181; Stop 205
acttatattgacaggatggtagcgg

SEQ ID NO: 436937 - DNA, 25 bp, Artificial
  probe
  misc_feature (1)..(25): SEQ ID NO: 6387; WAN024BYL; Start 179; Stop 203
ttacttatattgacaggatggtagc

SEQ ID NO: 436938 - DNA, 25 bp, Artificial
  probe
  misc_feature (1)..(25): SEQ ID NO: 6387; WAN024BYL; Start 8; Stop 32
atattaaatactaccgcacaacgac

SEQ ID NO: 436939 - DNA, 25 bp, Artificial
  probe
  misc_feature (1)..(25): SEQ ID NO: 6387; WAN024BYL; Start 7; Stop 31
gatattaaatactaccgcacaacga

SEQ ID NO: 436940 - DNA, 25 bp, Artificial
  probe
  misc_feature (1)..(25): SEQ ID NO: 6387; WAN024BYL; Start 6; Stop 30
agatattaaatactaccgcacaacg

SEQ ID NO: 436941 - DNA, 25 bp, Artificial
  probe
  misc_feature (1)..(25): SEQ ID NO: 6387; WAN024BYL; Start 182; Stop 206
cttatattgacaggatggtagcggc

SEQ ID NO: 436942 - DNA, 25 bp, Artificial
  probe
  misc_feature (1)..(25): SEQ ID NO: 6387; WAN024BYL; Start 9; Stop 33
tattaaatactaccgcacaacgacg

SEQ ID NO: 436943 - DNA, 25 bp, Artificial
  probe
  misc_feature (1)..(25): SEQ ID NO: 6387; WAN024BYL; Start 47; Stop 71
tacttcgtttgattgatggtgtcat

SEQ ID NO: 436944 - DNA, 25 bp, Artificial
  probe
  misc_feature (1)..(25): SEQ ID NO: 6387; WAN024BYL; Start 97; Stop 121
tgggttaatagcatggattggttta

SEQ ID NO: 436945 - DNA, 25 bp, Artificial
  probe
  misc_feature (1)..(25): SEQ ID NO: 6387; WAN024BYL; Start 93; Stop 117
aaagtgggttaatagcatggattgg

SEQ ID NO: 436946 - DNA, 25 bp, Artificial
  probe
  misc_feature (1)..(25): SEQ ID NO: 6387; WAN024BYL; Start 183; Stop 207
ttatattgacaggatggtagcggca

SEQ ID NO: 436947 - DNA, 25 bp, Artificial
  probe
  misc_feature (1)..(25): SEQ ID NO: 6387; WAN024BYL; Start 175; Stop 199
gcatttacttatattgacaggatgg

SEQ ID NO: 436948 - DNA, 25 bp, Artificial
  probe
  misc_feature (1)..(25): SEQ ID NO: 6387; WAN024BYL; Start 98; Stop 122
gggttaatagcatggattggtttaa

SEQ ID NO: 436949 - DNA, 25 bp, Artificial
  probe
  misc_feature (1)..(25): SEQ ID NO: 6387; WAN024BYL; Start 96; Stop 120
gtgggttaatagcatggattggttt

SEQ ID NO: 436950 - DNA, 25 bp, Artificial
  probe
  misc_feature (1)..(25): SEQ ID NO: 6387; WAN024BYL; Start 46; Stop 70
gtacttcgtttgattgatggtgtca

SEQ ID NO: 436951 - DNA, 25 bp, Artificial
  probe
  misc_feature (1)..(25): SEQ ID NO: 6387; WAN024BYL; Start 10; Stop 34
attaaatactaccgcacaacgacga

SEQ ID NO: 436952 - DNA, 25 bp, Artificial
  probe
  misc_feature (1)..(25): SEQ ID NO: 6387; WAN024BYL; Start 5; Stop 29
aagatattaaatactaccgcacaac

SEQ ID NO: 436953 - DNA, 25 bp, Artificial
  probe
  misc_feature (1)..(25): SEQ ID NO: 6387; WAN024BYL; Start 95; Stop 119
agtgggttaatagcatggattggtt

SEQ ID NO: 436954 - DNA, 25 bp, Artificial
  probe
  misc_feature (1)..(25): SEQ ID NO: 6387; WAN024BYL; Start 94; Stop 118
aagtgggttaatagcatggattggt

SEQ ID NO: 436955 - DNA, 25 bp, Artificial
  probe
  misc_feature (1)..(25): SEQ ID NO: 6387; WAN024BYL; Start 24; Stop 48
cacaacgacgaacaatgctcaagta

SEQ ID NO: 436956 - DNA, 25 bp, Artificial
  probe
  misc_feature (1)..(25): SEQ ID NO: 6387; WAN024BYL; Start 11; Stop 35
ttaaatactaccgcacaacgacgaa

SEQ ID NO: 436957 - DNA, 25 bp, Artificial
  probe
  misc_feature (1)..(25): SEQ ID NO: 6387; WAN024BYL; Start 3; Stop 27
gaaagatattaaatactaccgcaca

SEQ ID NO: 436958 - DNA, 25 bp, Artificial
  probe
  misc_feature (1)..(25): SEQ ID NO: 6387; WAN024BYL; Start 2; Stop 26
tgaaagatattaaatactaccgcac

SEQ ID NO: 436959 - DNA, 25 bp, Artificial
  probe
  misc_feature (1)..(25): SEQ ID NO: 6387; WAN024BYL; Start 48; Stop 72
acttcgtttgattgatggtgtcatg

SEQ ID NO: 436960 - DNA, 25 bp, Artificial
  probe
  misc_feature (1)..(25): SEQ ID NO: 6387; WAN024BYL; Start 99; Stop 123
ggttaatagcatggattggtttaat

SEQ ID NO: 436961 - DNA, 25 bp, Artificial
  probe
  misc_feature (1)..(25): SEQ ID NO: 6387; WAN024BYL; Start 25; Stop 49
acaacgacgaacaatgctcaagtac

SEQ ID NO: 436962 - DNA, 25 bp, Artificial
  probe
  misc_feature (1)..(25): SEQ ID NO: 6387; WAN024BYL; Start 12; Stop 36
taaatactaccgcacaacgacgaac

SEQ ID NO: 436963 - DNA, 25 bp, Artificial
  probe
  misc_feature (1)..(25): SEQ ID NO: 6387; WAN024BYL; Start 4; Stop 28
aaagatattaaatactaccgcacaa

SEQ ID NO: 436964 - DNA, 25 bp, Artificial
  probe
  misc_feature (1)..(25): SEQ ID NO: 6387; WAN024BYL; Start 176; Stop 200
catttacttatattgacaggatggt

SEQ ID NO: 436965 - DNA, 25 bp, Artificial
  probe
  misc_feature (1)..(25): SEQ ID NO: 6387; WAN024BYL; Start 55; Stop 79
ttgattgatggtgtcatgcaagttt

SEQ ID NO: 436966 - DNA, 25 bp, Artificial
  probe
  misc_feature (1)..(25): SEQ ID NO: 6387; WAN024BYL; Start 54; Stop 78
tttgattgatggtgtcatgcaagtt

SEQ ID NO: 436967 - DNA, 25 bp, Artificial
  probe
  misc_feature (1)..(25): SEQ ID NO: 6387; WAN024BYL; Start 92; Stop 116
aaaagtgggttaatagcatggattg

SEQ ID NO: 436968 - DNA, 25 bp, Artificial
  probe
  misc_feature (1)..(25): SEQ ID NO: 6388; WAN024BKH; Start 359; Stop 383
caacctataatgagtcagatggctt

SEQ ID NO: 436969 - DNA, 25 bp, Artificial
  probe
  misc_feature (1)..(25): SEQ ID NO: 6388; WAN024BKH; Start 128; Stop 152
cagataattcaggagcaatatgtcg

SEQ ID NO: 436970 - DNA, 25 bp, Artificial
  probe
  misc_feature (1)..(25): SEQ ID NO: 6388; WAN024BKH; Start 360; Stop 384
aacctataatgagtcagatggctta

SEQ ID NO: 436971 - DNA, 25 bp, Artificial
  probe
  misc_feature (1)..(25): SEQ ID NO: 6388; WAN024BKH; Start 676; Stop 700
aagatgatgcgtgatgattgtgatt

SEQ ID NO: 436972 - DNA, 25 bp, Artificial
  probe
  misc_feature (1)..(25): SEQ ID NO: 6388; WAN024BKH; Start 357; Stop 381
ttcaacctataatgagtcagatggc

SEQ ID NO: 436973 - DNA, 25 bp, Artificial
  probe
  misc_feature (1)..(25): SEQ ID NO: 6388; WAN024BKH; Start 116; Stop 140
atgatggctctacagataattcagg

SEQ ID NO: 436974 - DNA, 25 bp, Artificial
  probe
  misc_feature (1)..(25): SEQ ID NO: 6388; WAN024BKH; Start 361; Stop 385
acctataatgagtcagatggcttat

SEQ ID NO: 436975 - DNA, 25 bp, Artificial
  probe
  misc_feature (1)..(25): SEQ ID NO: 6388; WAN024BKH; Start 118; Stop 142
gatggctctacagataattcaggag

SEQ ID NO: 436976 - DNA, 25 bp, Artificial
  probe
  misc_feature (1)..(25): SEQ ID NO: 6388; WAN024BKH; Start 117; Stop 141
tgatggctctacagataattcagga

SEQ ID NO: 436977 - DNA, 25 bp, Artificial
  probe
  misc_feature (1)..(25): SEQ ID NO: 6388; WAN024BKH; Start 358; Stop 382
tcaacctataatgagtcagatggct

SEQ ID NO: 436978 - DNA, 25 bp, Artificial
  probe
  misc_feature (1)..(25): SEQ ID NO: 6388; WAN024BKH; Start 675; Stop 699
gaagatgatgcgtgatgattgtgat

SEQ ID NO: 436979 - DNA, 25 bp, Artificial
  probe
  misc_feature (1)..(25): SEQ ID NO: 6388; WAN024BKH; Start 152; Stop 176
gagagtatgctgatcgtgatagtcg

SEQ ID NO: 436980 - DNA, 25 bp, Artificial
  probe
  misc_feature (1)..(25): SEQ ID NO: 6388; WAN024BKH; Start 373; Stop 397
tcagatggcttattctatattcacg

SEQ ID NO: 436981 - DNA, 25 bp, Artificial
  probe
  misc_feature (1)..(25): SEQ ID NO: 6388; WAN024BKH; Start 115; Stop 139
aatgatggctctacagataattcag

SEQ ID NO: 436982 - DNA, 25 bp, Artificial
  probe
  misc_feature (1)..(25): SEQ ID NO: 6388; WAN024BKH; Start 553; Stop 577
gtgtgtgagtatataggaaccaatt

SEQ ID NO: 436983 - DNA, 25 bp, Artificial
  probe
  misc_feature (1)..(25): SEQ ID NO: 6388; WAN024BKH; Start 127; Stop 151
acagataattcaggagcaatatgtc

SEQ ID NO: 436984 - DNA, 25 bp, Artificial
  probe
  misc_feature (1)..(25): SEQ ID NO: 6388; WAN024BKH; Start 362; Stop 386
cctataatgagtcagatggcttatt

SEQ ID NO: 436985 - DNA, 25 bp, Artificial
  probe
  misc_feature (1)..(25): SEQ ID NO: 6388; WAN024BKH; Start 356; Stop 380
attcaacctataatgagtcagatgg

SEQ ID NO: 436986 - DNA, 25 bp, Artificial
  probe
  misc_feature (1)..(25): SEQ ID NO: 6388; WAN024BKH; Start 153; Stop 177
agagtatgctgatcgtgatagtcgt

SEQ ID NO: 436987 - DNA, 25 bp, Artificial
  probe
  misc_feature (1)..(25): SEQ ID NO: 6388; WAN024BKH; Start 132; Stop 156
taattcaggagcaatatgtcgagag

SEQ ID NO: 436988 - DNA, 25 bp, Artificial
  probe
  misc_feature (1)..(25): SEQ ID NO: 6388; WAN024BKH; Start 131; Stop 155
ataattcaggagcaatatgtcgaga

SEQ ID NO: 436989 - DNA, 25 bp, Artificial
  probe
  misc_feature (1)..(25): SEQ ID NO: 6388; WAN024BKH; Start 129; Stop 153
agataattcaggagcaatatgtcga

SEQ ID NO: 436990 - DNA, 25 bp, Artificial
  probe
  misc_feature (1)..(25): SEQ ID NO: 6388; WAN024BKH; Start 130; Stop 154
gataattcaggagcaatatgtcgag

SEQ ID NO: 436991 - DNA, 25 bp, Artificial
  probe
  misc_feature (1)..(25): SEQ ID NO: 6388; WAN024BKH; Start 135; Stop 159
ttcaggagcaatatgtcgagagtat

SEQ ID NO: 436992 - DNA, 25 bp, Artificial
  probe
  misc_feature (1)..(25): SEQ ID NO: 6388; WAN024BKH; Start 134; Stop 158
attcaggagcaatatgtcgagagta

SEQ ID NO: 436993 - DNA, 25 bp, Artificial
  probe
  misc_feature (1)..(25): SEQ ID NO: 6388; WAN024BKH; Start 552; Stop 576
ggtgtgtgagtatataggaaccaat

SEQ ID NO: 436994 - DNA, 25 bp, Artificial
  probe
  misc_feature (1)..(25): SEQ ID NO: 6388; WAN024BKH; Start 154; Stop 178
gagtatgctgatcgtgatagtcgtt

SEQ ID NO: 436995 - DNA, 25 bp, Artificial
  probe
  misc_feature (1)..(25): SEQ ID NO: 6388; WAN024BKH; Start 627; Stop 651
gtattggtatagggttgggaaagaa

SEQ ID NO: 436996 - DNA, 25 bp, Artificial
  probe
  misc_feature (1)..(25): SEQ ID NO: 6388; WAN024BKH; Start 625; Stop 649
ttgtattggtatagggttgggaaag

SEQ ID NO: 436997 - DNA, 25 bp, Artificial
  probe
  misc_feature (1)..(25): SEQ ID NO: 6388; WAN024BKH; Start 628; Stop 652
tattggtatagggttgggaaagaag

SEQ ID NO: 436998 - DNA, 25 bp, Artificial
  probe
  misc_feature (1)..(25): SEQ ID NO: 6388; WAN024BKH; Start 624; Stop 648
tttgtattggtatagggttgggaaa

SEQ ID NO: 436999 - DNA, 25 bp, Artificial
  probe
  misc_feature (1)..(25): SEQ ID NO: 6388; WAN024BKH; Start 309; Stop 333
tatagaaactttgaaggagcagcat

SEQ ID NO: 437000 - DNA, 25 bp, Artificial
  probe
  misc_feature (1)..(25): SEQ ID NO: 6388; WAN024BKH; Start 308; Stop 332
ttatagaaactttgaaggagcagca

SEQ ID NO: 437001 - DNA, 25 bp, Artificial
  probe
  misc_feature (1)..(25): SEQ ID NO: 6389; WAN024BT4; Start 49; Stop 73
gttacaagctctcatcagaatacct

SEQ ID NO: 437002 - DNA, 25 bp, Artificial
  probe
  misc_feature (1)..(25): SEQ ID NO: 6389; WAN024BT4; Start 48; Stop 72
tgttacaagctctcatcagaatacc

SEQ ID NO: 437003 - DNA, 25 bp, Artificial
  probe
  misc_feature (1)..(25): SEQ ID NO: 6389; WAN024BT4; Start 50; Stop 74
ttacaagctctcatcagaatacctt

SEQ ID NO: 437004 - DNA, 25 bp, Artificial
  probe
  misc_feature (1)..(25): SEQ ID NO: 6389; WAN024BT4; Start 39; Stop 63
atctggtattgttacaagctctcat

SEQ ID NO: 437005 - DNA, 25 bp, Artificial
  probe
  misc_feature (1)..(25): SEQ ID NO: 6389; WAN024BT4; Start 43; Stop 67
ggtattgttacaagctctcatcaga

SEQ ID NO: 437006 - DNA, 25 bp, Artificial
  probe
  misc_feature (1)..(25): SEQ ID NO: 6389; WAN024BT4; Start 40; Stop 64
tctggtattgttacaagctctcatc

SEQ ID NO: 437007 - DNA, 25 bp, Artificial
  probe
  misc_feature (1)..(25): SEQ ID NO: 6389; WAN024BT4; Start 42; Stop 66
tggtattgttacaagctctcatcag

SEQ ID NO: 437008 - DNA, 25 bp, Artificial
  probe
  misc_feature (1)..(25): SEQ ID NO: 6389; WAN024BT4; Start 41; Stop 65
ctggtattgttacaagctctcatca

SEQ ID NO: 437009 - DNA, 25 bp, Artificial
  probe
  misc_feature (1)..(25): SEQ ID NO: 6389; WAN024BT4; Start 38; Stop 62
tatctggtattgttacaagctctca

SEQ ID NO: 437010 - DNA, 25 bp, Artificial
  probe
  misc_feature (1)..(25): SEQ ID NO: 6389; WAN024BT4; Start 36; Stop 60
tctatctggtattgttacaagctct

SEQ ID NO: 437011 - DNA, 25 bp, Artificial
  probe
  misc_feature (1)..(25): SEQ ID NO: 6389; WAN024BT4; Start 47; Stop 71
ttgttacaagctctcatcagaatac

SEQ ID NO: 437012 - DNA, 25 bp, Artificial
  probe
  misc_feature (1)..(25): SEQ ID NO: 6389; WAN024BT4; Start 44; Stop 68
gtattgttacaagctctcatcagaa

SEQ ID NO: 437013 - DNA, 25 bp, Artificial
  probe
  misc_feature (1)..(25): SEQ ID NO: 6389; WAN024BT4; Start 37; Stop 61
ctatctggtattgttacaagctctc

SEQ ID NO: 437014 - DNA, 25 bp, Artificial
  probe
  misc_feature (1)..(25): SEQ ID NO: 6389; WAN024BT4; Start 35; Stop 59
atctatctggtattgttacaagctc

SEQ ID NO: 437015 - DNA, 25 bp, Artificial
  probe
  misc_feature (1)..(25): SEQ ID NO: 6389; WAN024BT4; Start 46; Stop 70
attgttacaagctctcatcagaata

SEQ ID NO: 437016 - DNA, 25 bp, Artificial
  probe
  misc_feature (1)..(25): SEQ ID NO: 6389; WAN024BT4; Start 45; Stop 69
tattgttacaagctctcatcagaat

SEQ ID NO: 437017 - DNA, 25 bp, Artificial
  probe
  misc_feature (1)..(25): SEQ ID NO: 6389; WAN024BT4; Start 51; Stop 75
tacaagctctcatcagaataccttt

SEQ ID NO: 437018 - DNA, 25 bp, Artificial
  probe
  misc_feature (1)..(25): SEQ ID NO: 6389; WAN024BT4; Start 52; Stop 76
acaagctctcatcagaatacctttc

SEQ ID NO: 437019 - DNA, 25 bp, Artificial
  probe
  misc_feature (1)..(25): SEQ ID NO: 6389; WAN024BT4; Start 34; Stop 58
tatctatctggtattgttacaagct

SEQ ID NO: 437020 - DNA, 25 bp, Artificial
  probe
  misc_feature (1)..(25): SEQ ID NO: 6389; WAN024BT4; Start 33; Stop 57
atatctatctggtattgttacaagc

SEQ ID NO: 437021 - DNA, 25 bp, Artificial
  probe
  misc_feature (1)..(25): SEQ ID NO: 6389; WAN024BT4; Start 3; Stop 27
gaaagcattttatcaaacatctcca

SEQ ID NO: 437022 - DNA, 25 bp, Artificial
  probe
  misc_feature (1)..(25): SEQ ID NO: 6389; WAN024BT4; Start 54; Stop 78
aagctctcatcagaatacctttctc

SEQ ID NO: 437023 - DNA, 25 bp, Artificial
  probe
  misc_feature (1)..(25): SEQ ID NO: 6389; WAN024BT4; Start 53; Stop 77
caagctctcatcagaatacctttct

SEQ ID NO: 437024 - DNA, 25 bp, Artificial
  probe
  misc_feature (1)..(25): SEQ ID NO: 6389; WAN024BT4; Start 7; Stop 31
gcattttatcaaacatctccattct

SEQ ID NO: 437025 - DNA, 25 bp, Artificial
  probe
  misc_feature (1)..(25): SEQ ID NO: 6389; WAN024BT4; Start 6; Stop 30
agcattttatcaaacatctccattc

SEQ ID NO: 437026 - DNA, 25 bp, Artificial
  probe
  misc_feature (1)..(25): SEQ ID NO: 6389; WAN024BT4; Start 19; Stop 43
acatctccattcttatatctatctg

SEQ ID NO: 437027 - DNA, 25 bp, Artificial
  probe
  misc_feature (1)..(25): SEQ ID NO: 6389; WAN024BT4; Start 21; Stop 45
atctccattcttatatctatctggt

SEQ ID NO: 437028 - DNA, 25 bp, Artificial
  probe
  misc_feature (1)..(25): SEQ ID NO: 6389; WAN024BT4; Start 2; Stop 26
tgaaagcattttatcaaacatctcc

SEQ ID NO: 437029 - DNA, 25 bp, Artificial
  probe
  misc_feature (1)..(25): SEQ ID NO: 6389; WAN024BT4; Start 20; Stop 44
catctccattcttatatctatctgg

SEQ ID NO: 437030 - DNA, 25 bp, Artificial
  probe
  misc_feature (1)..(25): SEQ ID NO: 6389; WAN024BT4; Start 5; Stop 29
aagcattttatcaaacatctccatt

SEQ ID NO: 437031 - DNA, 25 bp, Artificial
  probe
  misc_feature (1)..(25): SEQ ID NO: 6389; WAN024BT4; Start 4; Stop 28
aaagcattttatcaaacatctccat

SEQ ID NO: 437032 - DNA, 25 bp, Artificial
  probe
  misc_feature (1)..(25): SEQ ID NO: 6389; WAN024BT4; Start 22; Stop 46
tctccattcttatatctatctggta

SEQ ID NO: 437033 - DNA, 25 bp, Artificial
  probe
  misc_feature (1)..(25): SEQ ID NO: 6389; WAN024BT4; Start 14; Stop 38
atcaaacatctccattcttatatct

SEQ ID NO: 437034 - DNA, 25 bp, Artificial
  probe
  misc_feature (1)..(25): SEQ ID NO: 6390; WAN024C3I; Start 388; Stop 412
ggattcatcggatatgcctctaata

SEQ ID NO: 437035 - DNA, 25 bp, Artificial
  probe
  misc_feature (1)..(25): SEQ ID NO: 6390; WAN024C3I; Start 387; Stop 411
tggattcatcggatatgcctctaat

SEQ ID NO: 437036 - DNA, 25 bp, Artificial
  probe
  misc_feature (1)..(25): SEQ ID NO: 6390; WAN024C3I; Start 386; Stop 410
atggattcatcggatatgcctctaa

SEQ ID NO: 437037 - DNA, 25 bp, Artificial
  probe
  misc_feature (1)..(25): SEQ ID NO: 6390; WAN024C3I; Start 385; Stop 409
aatggattcatcggatatgcctcta

SEQ ID NO: 437038 - DNA, 25 bp, Artificial
  probe
  misc_feature (1)..(25): SEQ ID NO: 6390; WAN024C3I; Start 61; Stop 85
ggtaacaatgatagatggttcaaga

SEQ ID NO: 437039 - DNA, 25 bp, Artificial
  probe
  misc_feature (1)..(25): SEQ ID NO: 6390; WAN024C3I; Start 60; Stop 84
aggtaacaatgatagatggttcaag

SEQ ID NO: 437040 - DNA, 25 bp, Artificial
  probe
  misc_feature (1)..(25): SEQ ID NO: 6390; WAN024C3I; Start 389; Stop 413
gattcatcggatatgcctctaataa

SEQ ID NO: 437041 - DNA, 25 bp, Artificial
  probe
  misc_feature (1)..(25): SEQ ID NO: 6390; WAN024C3I; Start 296; Stop 320
tatacggaggtaactcaagtgatgg

SEQ ID NO: 437042 - DNA, 25 bp, Artificial
  probe
  misc_feature (1)..(25): SEQ ID NO: 6390; WAN024C3I; Start 59; Stop 83
aaggtaacaatgatagatggttcaa

SEQ ID NO: 437043 - DNA, 25 bp, Artificial
  probe
  misc_feature (1)..(25): SEQ ID NO: 6390; WAN024C3I; Start 13; Stop 37
atgatgttagattatctggaagcag

SEQ ID NO: 437044 - DNA, 25 bp, Artificial
  probe
  misc_feature (1)..(25): SEQ ID NO: 6390; WAN024C3I; Start 428; Stop 452
ccaataaagcaggtcaaactctaag

SEQ ID NO: 437045 - DNA, 25 bp, Artificial
  probe
  misc_feature (1)..(25): SEQ ID NO: 6390; WAN024C3I; Start 87; Stop 111
aatggataaacaaatgcgtaaggac

SEQ ID NO: 437046 - DNA, 25 bp, Artificial
  probe
  misc_feature (1)..(25): SEQ ID NO: 6390; WAN024C3I; Start 413; Stop 437
aatataaagccgaagccaataaagc

SEQ ID NO: 437047 - DNA, 25 bp, Artificial
  probe
  misc_feature (1)..(25): SEQ ID NO: 6390; WAN024C3I; Start 86; Stop 110
aaatggataaacaaatgcgtaagga

SEQ ID NO: 437048 - DNA, 25 bp, Artificial
  probe
  misc_feature (1)..(25): SEQ ID NO: 6390; WAN024C3I; Start 280; Stop 304
aatatgatgactggtgtatacggag

SEQ ID NO: 437049 - DNA, 25 bp, Artificial
  probe
  misc_feature (1)..(25): SEQ ID NO: 6390; WAN024C3I; Start 279; Stop 303
gaatatgatgactggtgtatacgga

SEQ ID NO: 437050 - DNA, 25 bp, Artificial
  probe
  misc_feature (1)..(25): SEQ ID NO: 6390; WAN024C3I; Start 278; Stop 302
tgaatatgatgactggtgtatacgg

SEQ ID NO: 437051 - DNA, 25 bp, Artificial
  probe
  misc_feature (1)..(25): SEQ ID NO: 6390; WAN024C3I; Start 414; Stop 438
atataaagccgaagccaataaagca

SEQ ID NO: 437052 - DNA, 25 bp, Artificial
  probe
  misc_feature (1)..(25): SEQ ID NO: 6390; WAN024C3I; Start 281; Stop 305
atatgatgactggtgtatacggagg

SEQ ID NO: 437053 - DNA, 25 bp, Artificial
  probe
  misc_feature (1)..(25): SEQ ID NO: 6390; WAN024C3I; Start 435; Stop 459
agcaggtcaaactctaagtgataaa

SEQ ID NO: 437054 - DNA, 25 bp, Artificial
  probe
  misc_feature (1)..(25): SEQ ID NO: 6390; WAN024C3I; Start 434; Stop 458
aagcaggtcaaactctaagtgataa

SEQ ID NO: 437055 - DNA, 25 bp, Artificial
  probe
  misc_feature (1)..(25): SEQ ID NO: 6390; WAN024C3I; Start 433; Stop 457
aaagcaggtcaaactctaagtgata

SEQ ID NO: 437056 - DNA, 25 bp, Artificial
  probe
  misc_feature (1)..(25): SEQ ID NO: 6390; WAN024C3I; Start 432; Stop 456
taaagcaggtcaaactctaagtgat

SEQ ID NO: 437057 - DNA, 25 bp, Artificial
  probe
  misc_feature (1)..(25): SEQ ID NO: 6390; WAN024C3I; Start 431; Stop 455
ataaagcaggtcaaactctaagtga

SEQ ID NO: 437058 - DNA, 25 bp, Artificial
  probe
  misc_feature (1)..(25): SEQ ID NO: 6390; WAN024C3I; Start 427; Stop 451
gccaataaagcaggtcaaactctaa

SEQ ID NO: 437059 - DNA, 25 bp, Artificial
  probe
  misc_feature (1)..(25): SEQ ID NO: 6390; WAN024C3I; Start 12; Stop 36
tatgatgttagattatctggaagca

SEQ ID NO: 437060 - DNA, 25 bp, Artificial
  probe
  misc_feature (1)..(25): SEQ ID NO: 6390; WAN024C3I; Start 200; Stop 224
ataactttatgactaaacacggtgc

SEQ ID NO: 437061 - DNA, 25 bp, Artificial
  probe
  misc_feature (1)..(25): SEQ ID NO: 6390; WAN024C3I; Start 201; Stop 225
taactttatgactaaacacggtgct

SEQ ID NO: 437062 - DNA, 25 bp, Artificial
  probe
  misc_feature (1)..(25): SEQ ID NO: 6390; WAN024C3I; Start 484; Stop 508
ggtacatttaatacacttgaagcgt

SEQ ID NO: 437063 - DNA, 25 bp, Artificial
  probe
  misc_feature (1)..(25): SEQ ID NO: 6390; WAN024C3I; Start 483; Stop 507
tggtacatttaatacacttgaagcg

SEQ ID NO: 437064 - DNA, 25 bp, Artificial
  probe
  misc_feature (1)..(25): SEQ ID NO: 6390; WAN024C3I; Start 430; Stop 454
aataaagcaggtcaaactctaagtg

SEQ ID NO: 437065 - DNA, 25 bp, Artificial
  probe
  misc_feature (1)..(25): SEQ ID NO: 6390; WAN024C3I; Start 429; Stop 453
caataaagcaggtcaaactctaagt

SEQ ID NO: 437066 - DNA, 25 bp, Artificial
  probe
  misc_feature (1)..(25): SEQ ID NO: 6390; WAN024C3I; Start 62; Stop 86
gtaacaatgatagatggttcaagaa

SEQ ID NO: 437067 - DNA, 25 bp, Artificial
  probe
  misc_feature (1)..(25): SEQ ID NO: 6391; WAN024C2F; Start 2; Stop 26
tgaaaggaagtcagagtatgaagaa

SEQ ID NO: 437068 - DNA, 25 bp, Artificial
  probe
  misc_feature (1)..(25): SEQ ID NO: 6391; WAN024C2F; Start 62; Stop 86
tggatattatcattattgttggtgg

SEQ ID NO: 437069 - DNA, 25 bp, Artificial
  probe
  misc_feature (1)..(25): SEQ ID NO: 6391; WAN024C2F; Start 1; Stop 25
atgaaaggaagtcagagtatgaaga

SEQ ID NO: 437070 - DNA, 25 bp, Artificial
  probe
  misc_feature (1)..(25): SEQ ID NO: 6391; WAN024C2F; Start 63; Stop 87
ggatattatcattattgttggtgga

SEQ ID NO: 437071 - DNA, 25 bp, Artificial
  probe
  misc_feature (1)..(25): SEQ ID NO: 6391; WAN024C2F; Start 3; Stop 27
gaaaggaagtcagagtatgaagaaa

SEQ ID NO: 437072 - DNA, 25 bp, Artificial
  probe
  misc_feature (1)..(25): SEQ ID NO: 6391; WAN024C2F; Start 61; Stop 85
atggatattatcattattgttggtg

SEQ ID NO: 437073 - DNA, 25 bp, Artificial
  probe
  misc_feature (1)..(25): SEQ ID NO: 6391; WAN024C2F; Start 4; Stop 28
aaaggaagtcagagtatgaagaaaa

SEQ ID NO: 437074 - DNA, 25 bp, Artificial
  probe
  misc_feature (1)..(25): SEQ ID NO: 6391; WAN024C2F; Start 5; Stop 29
aaggaagtcagagtatgaagaaaat

SEQ ID NO: 437075 - DNA, 25 bp, Artificial
  probe
  misc_feature (1)..(25): SEQ ID NO: 6391; WAN024C2F; Start 6; Stop 30
aggaagtcagagtatgaagaaaatt

SEQ ID NO: 437076 - DNA, 25 bp, Artificial
  probe
  misc_feature (1)..(25): SEQ ID NO: 6391; WAN024C2F; Start 7; Stop 31
ggaagtcagagtatgaagaaaattt

SEQ ID NO: 437077 - DNA, 25 bp, Artificial
  probe
  misc_feature (1)..(25): SEQ ID NO: 6391; WAN024C2F; Start 8; Stop 32
gaagtcagagtatgaagaaaatttc

SEQ ID NO: 437078 - DNA, 25 bp, Artificial
  probe
  misc_feature (1)..(25): SEQ ID NO: 6391; WAN024C2F; Start 10; Stop 34
agtcagagtatgaagaaaatttcaa

SEQ ID NO: 437079 - DNA, 25 bp, Artificial
  probe
  misc_feature (1)..(25): SEQ ID NO: 6391; WAN024C2F; Start 9; Stop 33
aagtcagagtatgaagaaaatttca

SEQ ID NO: 437080 - DNA, 25 bp, Artificial
  probe
  misc_feature (1)..(25): SEQ ID NO: 6391; WAN024C2F; Start 11; Stop 35
gtcagagtatgaagaaaatttcaaa

SEQ ID NO: 437081 - DNA, 25 bp, Artificial
  probe
  misc_feature (1)..(25): SEQ ID NO: 6391; WAN024C2F; Start 12; Stop 36
tcagagtatgaagaaaatttcaaaa

SEQ ID NO: 437082 - DNA, 25 bp, Artificial
  probe
  misc_feature (1)..(25): SEQ ID NO: 6392; WAN024BWI; Start 209; Stop 233
taccaggagatgtcattcagaagat

SEQ ID NO: 437083 - DNA, 25 bp, Artificial
  probe
  misc_feature (1)..(25): SEQ ID NO: 6392; WAN024BWI; Start 216; Stop 240
agatgtcattcagaagatggtcaag

SEQ ID NO: 437084 - DNA, 25 bp, Artificial
  probe
  misc_feature (1)..(25): SEQ ID NO: 6392; WAN024BWI; Start 215; Stop 239
gagatgtcattcagaagatggtcaa

SEQ ID NO: 437085 - DNA, 25 bp, Artificial
  probe
  misc_feature (1)..(25): SEQ ID NO: 6392; WAN024BWI; Start 1008; Stop 1032
aatgaacttcgttgattctaccagt

SEQ ID NO: 437086 - DNA, 25 bp, Artificial
  probe
  misc_feature (1)..(25): SEQ ID NO: 6392; WAN024BWI; Start 217; Stop 241
gatgtcattcagaagatggtcaagg

SEQ ID NO: 437087 - DNA, 25 bp, Artificial
  probe
  misc_feature (1)..(25): SEQ ID NO: 6392; WAN024BWI; Start 1009; Stop 1033
atgaacttcgttgattctaccagtc

SEQ ID NO: 437088 - DNA, 25 bp, Artificial
  probe
  misc_feature (1)..(25): SEQ ID NO: 6392; WAN024BWI; Start 220; Stop 244
gtcattcagaagatggtcaaggttc

SEQ ID NO: 437089 - DNA, 25 bp, Artificial
  probe
  misc_feature (1)..(25): SEQ ID NO: 6392; WAN024BWI; Start 213; Stop 237
aggagatgtcattcagaagatggtc

SEQ ID NO: 437090 - DNA, 25 bp, Artificial
  probe
  misc_feature (1)..(25): SEQ ID NO: 6392; WAN024BWI; Start 218; Stop 242
atgtcattcagaagatggtcaaggt

SEQ ID NO: 437091 - DNA, 25 bp, Artificial
  probe
  misc_feature (1)..(25): SEQ ID NO: 6392; WAN024BWI; Start 208; Stop 232
gtaccaggagatgtcattcagaaga

SEQ ID NO: 437092 - DNA, 25 bp, Artificial
  probe
  misc_feature (1)..(25): SEQ ID NO: 6392; WAN024BWI; Start 284; Stop 308
ctcttgttataagttctggaagcac

SEQ ID NO: 437093 - DNA, 25 bp, Artificial
  probe
  misc_feature (1)..(25): SEQ ID NO: 6392; WAN024BWI; Start 279; Stop 303
ggatgctcttgttataagttctgga

SEQ ID NO: 437094 - DNA, 25 bp, Artificial
  probe
  misc_feature (1)..(25): SEQ ID NO: 6392; WAN024BWI; Start 212; Stop 236
caggagatgtcattcagaagatggt

SEQ ID NO: 437095 - DNA, 25 bp, Artificial
  probe
  misc_feature (1)..(25): SEQ ID NO: 6392; WAN024BWI; Start 210; Stop 234
accaggagatgtcattcagaagatg

SEQ ID NO: 437096 - DNA, 25 bp, Artificial
  probe
  misc_feature (1)..(25): SEQ ID NO: 6392; WAN024BWI; Start 285; Stop 309
tcttgttataagttctggaagcacc

SEQ ID NO: 437097 - DNA, 25 bp, Artificial
  probe
  misc_feature (1)..(25): SEQ ID NO: 6392; WAN024BWI; Start 219; Stop 243
tgtcattcagaagatggtcaaggtt

SEQ ID NO: 437098 - DNA, 25 bp, Artificial
  probe
  misc_feature (1)..(25): SEQ ID NO: 6392; WAN024BWI; Start 214; Stop 238
ggagatgtcattcagaagatggtca

SEQ ID NO: 437099 - DNA, 25 bp, Artificial
  probe
  misc_feature (1)..(25): SEQ ID NO: 6392; WAN024BWI; Start 280; Stop 304
gatgctcttgttataagttctggaa

SEQ ID NO: 437100 - DNA, 25 bp, Artificial
  probe
  misc_feature (1)..(25): SEQ ID NO: 6392; WAN024BWI; Start 281; Stop 305
atgctcttgttataagttctggaag

SEQ ID NO: 437101 - DNA, 25 bp, Artificial
  probe
  misc_feature (1)..(25): SEQ ID NO: 6392; WAN024BWI; Start 889; Stop 913
gattatggagaagtggtcgatgaag

SEQ ID NO: 437102 - DNA, 25 bp, Artificial
  probe
  misc_feature (1)..(25): SEQ ID NO: 6392; WAN024BWI; Start 635; Stop 659
ctataacggtgaggtacgatggaag

SEQ ID NO: 437103 - DNA, 25 bp, Artificial
  probe
  misc_feature (1)..(25): SEQ ID NO: 6392; WAN024BWI; Start 678; Stop 702
aaatgatgtagaaacggtgatgaga

SEQ ID NO: 437104 - DNA, 25 bp, Artificial
  probe
  misc_feature (1)..(25): SEQ ID NO: 6392; WAN024BWI; Start 677; Stop 701
caaatgatgtagaaacggtgatgag

SEQ ID NO: 437105 - DNA, 25 bp, Artificial
  probe
  misc_feature (1)..(25): SEQ ID NO: 6392; WAN024BWI; Start 981; Stop 1005
gaagcacattgagactgaagaaatc

SEQ ID NO: 437106 - DNA, 25 bp, Artificial
  probe
  misc_feature (1)..(25): SEQ ID NO: 6392; WAN024BWI; Start 679; Stop 703
aatgatgtagaaacggtgatgagag

SEQ ID NO: 437107 - DNA, 25 bp, Artificial
  probe
  misc_feature (1)..(25): SEQ ID NO: 6392; WAN024BWI; Start 286; Stop 310
cttgttataagttctggaagcaccg

SEQ ID NO: 437108 - DNA, 25 bp, Artificial
  probe
  misc_feature (1)..(25): SEQ ID NO: 6392; WAN024BWI; Start 1010; Stop 1034
tgaacttcgttgattctaccagtcc

SEQ ID NO: 437109 - DNA, 25 bp, Artificial
  probe
  misc_feature (1)..(25): SEQ ID NO: 6392; WAN024BWI; Start 890; Stop 914
attatggagaagtggtcgatgaagt

SEQ ID NO: 437110 - DNA, 25 bp, Artificial
  probe
  misc_feature (1)..(25): SEQ ID NO: 6392; WAN024BWI; Start 980; Stop 1004
tgaagcacattgagactgaagaaat

SEQ ID NO: 437111 - DNA, 25 bp, Artificial
  probe
  misc_feature (1)..(25): SEQ ID NO: 6392; WAN024BWI; Start 979; Stop 1003
ttgaagcacattgagactgaagaaa

SEQ ID NO: 437112 - DNA, 25 bp, Artificial
  probe
  misc_feature (1)..(25): SEQ ID NO: 6392; WAN024BWI; Start 978; Stop 1002
tttgaagcacattgagactgaagaa

SEQ ID NO: 437113 - DNA, 25 bp, Artificial
  probe
  misc_feature (1)..(25): SEQ ID NO: 6392; WAN024BWI; Start 254; Stop 278
agataacggaactttctttagaggg

SEQ ID NO: 437114 - DNA, 25 bp, Artificial
  probe
  misc_feature (1)..(25): SEQ ID NO: 6392; WAN024BWI; Start 891; Stop 915
ttatggagaagtggtcgatgaagtt

SEQ ID NO: 437115 - DNA, 25 bp, Artificial
  probe
  misc_feature (1)..(25): SEQ ID NO: 6393; WAN024FP6; Start 320; Stop 344
agagtgacgcagatattgtagttac

SEQ ID NO: 437116 - DNA, 25 bp, Artificial
  probe
  misc_feature (1)..(25): SEQ ID NO: 6393; WAN024FP6; Start 319; Stop 343
aagagtgacgcagatattgtagtta

SEQ ID NO: 437117 - DNA, 25 bp, Artificial
  probe
  misc_feature (1)..(25): SEQ ID NO: 6393; WAN024FP6; Start 266; Stop 290
ctgatgattggttagagttagatgc

SEQ ID NO: 437118 - DNA, 25 bp, Artificial
  probe
  misc_feature (1)..(25): SEQ ID NO: 6393; WAN024FP6; Start 742; Stop 766
gccaaggtgaatagatatagaatcg

SEQ ID NO: 437119 - DNA, 25 bp, Artificial
  probe
  misc_feature (1)..(25): SEQ ID NO: 6393; WAN024FP6; Start 497; Stop 521
agagagagattgctagagaggttaa

SEQ ID NO: 437120 - DNA, 25 bp, Artificial
  probe
  misc_feature (1)..(25): SEQ ID NO: 6393; WAN024FP6; Start 496; Stop 520
aagagagagattgctagagaggtta

SEQ ID NO: 437121 - DNA, 25 bp, Artificial
  probe
  misc_feature (1)..(25): SEQ ID NO: 6393; WAN024FP6; Start 495; Stop 519
taagagagagattgctagagaggtt

SEQ ID NO: 437122 - DNA, 25 bp, Artificial
  probe
  misc_feature (1)..(25): SEQ ID NO: 6393; WAN024FP6; Start 494; Stop 518
ataagagagagattgctagagaggt

SEQ ID NO: 437123 - DNA, 25 bp, Artificial
  probe
  misc_feature (1)..(25): SEQ ID NO: 6393; WAN024FP6; Start 324; Stop 348
tgacgcagatattgtagttactcaa

SEQ ID NO: 437124 - DNA, 25 bp, Artificial
  probe
  misc_feature (1)..(25): SEQ ID NO: 6393; WAN024FP6; Start 322; Stop 346
agtgacgcagatattgtagttactc

SEQ ID NO: 437125 - DNA, 25 bp, Artificial
  probe
  misc_feature (1)..(25): SEQ ID NO: 6393; WAN024FP6; Start 321; Stop 345
gagtgacgcagatattgtagttact

SEQ ID NO: 437126 - DNA, 25 bp, Artificial
  probe
  misc_feature (1)..(25): SEQ ID NO: 6393; WAN024FP6; Start 323; Stop 347
gtgacgcagatattgtagttactca

SEQ ID NO: 437127 - DNA, 25 bp, Artificial
  probe
  misc_feature (1)..(25): SEQ ID NO: 6393; WAN024FP6; Start 261; Stop 285
cgattctgatgattggttagagtta

SEQ ID NO: 437128 - DNA, 25 bp, Artificial
  probe
  misc_feature (1)..(25): SEQ ID NO: 6393; WAN024FP6; Start 741; Stop 765
tgccaaggtgaatagatatagaatc

SEQ ID NO: 437129 - DNA, 25 bp, Artificial
  probe
  misc_feature (1)..(25): SEQ ID NO: 6393; WAN024FP6; Start 493; Stop 517
tataagagagagattgctagagagg

SEQ ID NO: 437130 - DNA, 25 bp, Artificial
  probe
  misc_feature (1)..(25): SEQ ID NO: 6393; WAN024FP6; Start 265; Stop 289
tctgatgattggttagagttagatg

SEQ ID NO: 437131 - DNA, 25 bp, Artificial
  probe
  misc_feature (1)..(25): SEQ ID NO: 6393; WAN024FP6; Start 257; Stop 281
ttgtcgattctgatgattggttaga

SEQ ID NO: 437132 - DNA, 25 bp, Artificial
  probe
  misc_feature (1)..(25): SEQ ID NO: 6393; WAN024FP6; Start 260; Stop 284
tcgattctgatgattggttagagtt

SEQ ID NO: 437133 - DNA, 25 bp, Artificial
  probe
  misc_feature (1)..(25): SEQ ID NO: 6393; WAN024FP6; Start 740; Stop 764
atgccaaggtgaatagatatagaat

SEQ ID NO: 437134 - DNA, 25 bp, Artificial
  probe
  misc_feature (1)..(25): SEQ ID NO: 6393; WAN024FP6; Start 259; Stop 283
gtcgattctgatgattggttagagt

SEQ ID NO: 437135 - DNA, 25 bp, Artificial
  probe
  misc_feature (1)..(25): SEQ ID NO: 6393; WAN024FP6; Start 258; Stop 282
tgtcgattctgatgattggttagag

SEQ ID NO: 437136 - DNA, 25 bp, Artificial
  probe
  misc_feature (1)..(25): SEQ ID NO: 6393; WAN024FP6; Start 267; Stop 291
tgatgattggttagagttagatgca

SEQ ID NO: 437137 - DNA, 25 bp, Artificial
  probe
  misc_feature (1)..(25): SEQ ID NO: 6393; WAN024FP6; Start 698; Stop 722
tagaagaagcaaaggtttatgggaa

SEQ ID NO: 437138 - DNA, 25 bp, Artificial
  probe
  misc_feature (1)..(25): SEQ ID NO: 6393; WAN024FP6; Start 694; Stop 718
gtcgtagaagaagcaaaggtttatg

SEQ ID NO: 437139 - DNA, 25 bp, Artificial
  probe
  misc_feature (1)..(25): SEQ ID NO: 6393; WAN024FP6; Start 693; Stop 717
agtcgtagaagaagcaaaggtttat

SEQ ID NO: 437140 - DNA, 25 bp, Artificial
  probe
  misc_feature (1)..(25): SEQ ID NO: 6393; WAN024FP6; Start 692; Stop 716
tagtcgtagaagaagcaaaggttta

SEQ ID NO: 437141 - DNA, 25 bp, Artificial
  probe
  misc_feature (1)..(25): SEQ ID NO: 6393; WAN024FP6; Start 379; Stop 403
gaaggaactaatgggacgactataa

SEQ ID NO: 437142 - DNA, 25 bp, Artificial
  probe
  misc_feature (1)..(25): SEQ ID NO: 6393; WAN024FP6; Start 318; Stop 342
aaagagtgacgcagatattgtagtt

SEQ ID NO: 437143 - DNA, 25 bp, Artificial
  probe
  misc_feature (1)..(25): SEQ ID NO: 6393; WAN024FP6; Start 378; Stop 402
tgaaggaactaatgggacgactata

SEQ ID NO: 437144 - DNA, 25 bp, Artificial
  probe
  misc_feature (1)..(25): SEQ ID NO: 6393; WAN024FP6; Start 697; Stop 721
gtagaagaagcaaaggtttatggga

SEQ ID NO: 437145 - DNA, 25 bp, Artificial
  probe
  misc_feature (1)..(25): SEQ ID NO: 6393; WAN024FP6; Start 380; Stop 404
aaggaactaatgggacgactataaa

SEQ ID NO: 437146 - DNA, 25 bp, Artificial
  probe
  misc_feature (1)..(25): SEQ ID NO: 6393; WAN024FP6; Start 372; Stop 396
ttctaatgaaggaactaatgggacg

SEQ ID NO: 437147 - DNA, 25 bp, Artificial
  probe
  misc_feature (1)..(25): SEQ ID NO: 6393; WAN024FP6; Start 377; Stop 401
atgaaggaactaatgggacgactat

SEQ ID NO: 437148 - DNA, 25 bp, Artificial
  probe
  misc_feature (1)..(25): SEQ ID NO: 6394; WAN024FYD; Start 962; Stop 986
cgattatggttctcaggatgttctt

SEQ ID NO: 437149 - DNA, 25 bp, Artificial
  probe
  misc_feature (1)..(25): SEQ ID NO: 6394; WAN024FYD; Start 580; Stop 604
gatatagaatacgccagacagcatt

SEQ ID NO: 437150 - DNA, 25 bp, Artificial
  probe
  misc_feature (1)..(25): SEQ ID NO: 6394; WAN024FYD; Start 577; Stop 601
gttgatatagaatacgccagacagc

SEQ ID NO: 437151 - DNA, 25 bp, Artificial
  probe
  misc_feature (1)..(25): SEQ ID NO: 6394; WAN024FYD; Start 1114; Stop 1138
ttaggttatataggagcagccattg

SEQ ID NO: 437152 - DNA, 25 bp, Artificial
  probe
  misc_feature (1)..(25): SEQ ID NO: 6394; WAN024FYD; Start 1113; Stop 1137
gttaggttatataggagcagccatt

SEQ ID NO: 437153 - DNA, 25 bp, Artificial
  probe
  misc_feature (1)..(25): SEQ ID NO: 6394; WAN024FYD; Start 323; Stop 347
tagtagcctacattcttggattgag

SEQ ID NO: 437154 - DNA, 25 bp, Artificial
  probe
  misc_feature (1)..(25): SEQ ID NO: 6394; WAN024FYD; Start 322; Stop 346
ctagtagcctacattcttggattga

SEQ ID NO: 437155 - DNA, 25 bp, Artificial
  probe
  misc_feature (1)..(25): SEQ ID NO: 6394; WAN024FYD; Start 321; Stop 345
tctagtagcctacattcttggattg

SEQ ID NO: 437156 - DNA, 25 bp, Artificial
  probe
  misc_feature (1)..(25): SEQ ID NO: 6394; WAN024FYD; Start 579; Stop 603
tgatatagaatacgccagacagcat

SEQ ID NO: 437157 - DNA, 25 bp, Artificial
  probe
  misc_feature (1)..(25): SEQ ID NO: 6394; WAN024FYD; Start 325; Stop 349
gtagcctacattcttggattgagtt

SEQ ID NO: 437158 - DNA, 25 bp, Artificial
  probe
  misc_feature (1)..(25): SEQ ID NO: 6394; WAN024FYD; Start 1110; Stop 1134
caagttaggttatataggagcagcc

SEQ ID NO: 437159 - DNA, 25 bp, Artificial
  probe
  misc_feature (1)..(25): SEQ ID NO: 6394; WAN024FYD; Start 1109; Stop 1133
ccaagttaggttatataggagcagc

SEQ ID NO: 437160 - DNA, 25 bp, Artificial
  probe
  misc_feature (1)..(25): SEQ ID NO: 6394; WAN024FYD; Start 1112; Stop 1136
agttaggttatataggagcagccat

SEQ ID NO: 437161 - DNA, 25 bp, Artificial
  probe
  misc_feature (1)..(25): SEQ ID NO: 6394; WAN024FYD; Start 1115; Stop 1139
taggttatataggagcagccattgt

SEQ ID NO: 437162 - DNA, 25 bp, Artificial
  probe
  misc_feature (1)..(25): SEQ ID NO: 6394; WAN024FYD; Start 1111; Stop 1135
aagttaggttatataggagcagcca

SEQ ID NO: 437163 - DNA, 25 bp, Artificial
  probe
  misc_feature (1)..(25): SEQ ID NO: 6394; WAN024FYD; Start 957; Stop 981
aattgcgattatggttctcaggatg

SEQ ID NO: 437164 - DNA, 25 bp, Artificial
  probe
  misc_feature (1)..(25): SEQ ID NO: 6394; WAN024FYD; Start 578; Stop 602
ttgatatagaatacgccagacagca

SEQ ID NO: 437165 - DNA, 25 bp, Artificial
  probe
  misc_feature (1)..(25): SEQ ID NO: 6394; WAN024FYD; Start 576; Stop 600
tgttgatatagaatacgccagacag

SEQ ID NO: 437166 - DNA, 25 bp, Artificial
  probe
  misc_feature (1)..(25): SEQ ID NO: 6394; WAN024FYD; Start 575; Stop 599
atgttgatatagaatacgccagaca

SEQ ID NO: 437167 - DNA, 25 bp, Artificial
  probe
  misc_feature (1)..(25): SEQ ID NO: 6394; WAN024FYD; Start 324; Stop 348
agtagcctacattcttggattgagt

SEQ ID NO: 437168 - DNA, 25 bp, Artificial
  probe
  misc_feature (1)..(25): SEQ ID NO: 6394; WAN024FYD; Start 171; Stop 195
cgttgctaactatggtactaaggta

SEQ ID NO: 437169 - DNA, 25 bp, Artificial
  probe
  misc_feature (1)..(25): SEQ ID NO: 6394; WAN024FYD; Start 649; Stop 673
ttgtatgttaccttagatcgtacca

SEQ ID NO: 437170 - DNA, 25 bp, Artificial
  probe
  misc_feature (1)..(25): SEQ ID NO: 6394; WAN024FYD; Start 574; Stop 598
catgttgatatagaatacgccagac

SEQ ID NO: 437171 - DNA, 25 bp, Artificial
  probe
  misc_feature (1)..(25): SEQ ID NO: 6394; WAN024FYD; Start 320; Stop 344
atctagtagcctacattcttggatt

SEQ ID NO: 437172 - DNA, 25 bp, Artificial
  probe
  misc_feature (1)..(25): SEQ ID NO: 6394; WAN024FYD; Start 319; Stop 343
aatctagtagcctacattcttggat

SEQ ID NO: 437173 - DNA, 25 bp, Artificial
  probe
  misc_feature (1)..(25): SEQ ID NO: 6394; WAN024FYD; Start 652; Stop 676
tatgttaccttagatcgtaccatgc

SEQ ID NO: 437174 - DNA, 25 bp, Artificial
  probe
  misc_feature (1)..(25): SEQ ID NO: 6394; WAN024FYD; Start 650; Stop 674
tgtatgttaccttagatcgtaccat

SEQ ID NO: 437175 - DNA, 25 bp, Artificial
  probe
  misc_feature (1)..(25): SEQ ID NO: 6394; WAN024FYD; Start 1119; Stop 1143
ttatataggagcagccattgtctct

SEQ ID NO: 437176 - DNA, 25 bp, Artificial
  probe
  misc_feature (1)..(25): SEQ ID NO: 6394; WAN024FYD; Start 1118; Stop 1142
gttatataggagcagccattgtctc

SEQ ID NO: 437177 - DNA, 25 bp, Artificial
  probe
  misc_feature (1)..(25): SEQ ID NO: 6394; WAN024FYD; Start 655; Stop 679
gttaccttagatcgtaccatgcttg

SEQ ID NO: 437178 - DNA, 25 bp, Artificial
  probe
  misc_feature (1)..(25): SEQ ID NO: 6394; WAN024FYD; Start 958; Stop 982
attgcgattatggttctcaggatgt

SEQ ID NO: 437179 - DNA, 25 bp, Artificial
  probe
  misc_feature (1)..(25): SEQ ID NO: 6394; WAN024FYD; Start 573; Stop 597
tcatgttgatatagaatacgccaga

SEQ ID NO: 437180 - DNA, 25 bp, Artificial
  probe
  misc_feature (1)..(25): SEQ ID NO: 6394; WAN024FYD; Start 654; Stop 678
tgttaccttagatcgtaccatgctt

SEQ ID NO: 437181 - DNA, 25 bp, Artificial
  probe
  misc_feature (1)..(25): SEQ ID NO: 6395; WAN024FYB; Start 529; Stop 553
caattaagtatgtggttacctgctc

SEQ ID NO: 437182 - DNA, 25 bp, Artificial
  probe
  misc_feature (1)..(25): SEQ ID NO: 6395; WAN024FYB; Start 530; Stop 554
aattaagtatgtggttacctgctcg

SEQ ID NO: 437183 - DNA, 25 bp, Artificial
  probe
  misc_feature (1)..(25): SEQ ID NO: 6395; WAN024FYB; Start 1047; Stop 1071
atatatgatctcaacaactgtgcct

SEQ ID NO: 437184 - DNA, 25 bp, Artificial
  probe
  misc_feature (1)..(25): SEQ ID NO: 6395; WAN024FYB; Start 1048; Stop 1072
tatatgatctcaacaactgtgcctg

SEQ ID NO: 437185 - DNA, 25 bp, Artificial
  probe
  misc_feature (1)..(25): SEQ ID NO: 6395; WAN024FYB; Start 1046; Stop 1070
aatatatgatctcaacaactgtgcc

SEQ ID NO: 437186 - DNA, 25 bp, Artificial
  probe
  misc_feature (1)..(25): SEQ ID NO: 6395; WAN024FYB; Start 527; Stop 551
gacaattaagtatgtggttacctgc

SEQ ID NO: 437187 - DNA, 25 bp, Artificial
  probe
  misc_feature (1)..(25): SEQ ID NO: 6395; WAN024FYB; Start 528; Stop 552
acaattaagtatgtggttacctgct

SEQ ID NO: 437188 - DNA, 25 bp, Artificial
  probe
  misc_feature (1)..(25): SEQ ID NO: 6395; WAN024FYB; Start 526; Stop 550
ggacaattaagtatgtggttacctg

SEQ ID NO: 437189 - DNA, 25 bp, Artificial
  probe
  misc_feature (1)..(25): SEQ ID NO: 6395; WAN024FYB; Start 773; Stop 797
tcatgttgccgagagtatctaatct

SEQ ID NO: 437190 - DNA, 25 bp, Artificial
  probe
  misc_feature (1)..(25): SEQ ID NO: 6395; WAN024FYB; Start 772; Stop 796
gtcatgttgccgagagtatctaatc

SEQ ID NO: 437191 - DNA, 25 bp, Artificial
  probe
  misc_feature (1)..(25): SEQ ID NO: 6395; WAN024FYB; Start 424; Stop 448
atattagtgaagctcgttggtgtaa

SEQ ID NO: 437192 - DNA, 25 bp, Artificial
  probe
  misc_feature (1)..(25): SEQ ID NO: 6395; WAN024FYB; Start 1045; Stop 1069
gaatatatgatctcaacaactgtgc

SEQ ID NO: 437193 - DNA, 25 bp, Artificial
  probe
  misc_feature (1)..(25): SEQ ID NO: 6395; WAN024FYB; Start 423; Stop 447
catattagtgaagctcgttggtgta

SEQ ID NO: 437194 - DNA, 25 bp, Artificial
  probe
  misc_feature (1)..(25): SEQ ID NO: 6395; WAN024FYB; Start 425; Stop 449
tattagtgaagctcgttggtgtaat

SEQ ID NO: 437195 - DNA, 25 bp, Artificial
  probe
  misc_feature (1)..(25): SEQ ID NO: 6395; WAN024FYB; Start 771; Stop 795
tgtcatgttgccgagagtatctaat

SEQ ID NO: 437196 - DNA, 25 bp, Artificial
  probe
  misc_feature (1)..(25): SEQ ID NO: 6395; WAN024FYB; Start 426; Stop 450
attagtgaagctcgttggtgtaatt

SEQ ID NO: 437197 - DNA, 25 bp, Artificial
  probe
  misc_feature (1)..(25): SEQ ID NO: 6395; WAN024FYB; Start 255; Stop 279
tggtgcaacatcattatcaattctc

SEQ ID NO: 437198 - DNA, 25 bp, Artificial
  probe
  misc_feature (1)..(25): SEQ ID NO: 6395; WAN024FYB; Start 256; Stop 280
ggtgcaacatcattatcaattctct

SEQ ID NO: 437199 - DNA, 25 bp, Artificial
  probe
  misc_feature (1)..(25): SEQ ID NO: 6395; WAN024FYB; Start 56; Stop 80
tacttcccatcattacaactcccta

SEQ ID NO: 437200 - DNA, 25 bp, Artificial
  probe
  misc_feature (1)..(25): SEQ ID NO: 6395; WAN024FYB; Start 54; Stop 78
tatacttcccatcattacaactccc

SEQ ID NO: 437201 - DNA, 25 bp, Artificial
  probe
  misc_feature (1)..(25): SEQ ID NO: 6395; WAN024FYB; Start 785; Stop 809
gagtatctaatctcttggcgacagg

SEQ ID NO: 437202 - DNA, 25 bp, Artificial
  probe
  misc_feature (1)..(25): SEQ ID NO: 6395; WAN024FYB; Start 324; Stop 348
tgttgcgtatatattaggaatgagt

SEQ ID NO: 437203 - DNA, 25 bp, Artificial
  probe
  misc_feature (1)..(25): SEQ ID NO: 6395; WAN024FYB; Start 309; Stop 333
cataatgagaaatcctgttgcgtat

SEQ ID NO: 437204 - DNA, 25 bp, Artificial
  probe
  misc_feature (1)..(25): SEQ ID NO: 6395; WAN024FYB; Start 805; Stop 829
acagggaatcataaggcagttaata

SEQ ID NO: 437205 - DNA, 25 bp, Artificial
  probe
  misc_feature (1)..(25): SEQ ID NO: 6395; WAN024FYB; Start 1309; Stop 1333
aatgtagggatttatgctgttctgg

SEQ ID NO: 437206 - DNA, 25 bp, Artificial
  probe
  misc_feature (1)..(25): SEQ ID NO: 6395; WAN024FYB; Start 1325; Stop 1349
ctgttctgggagcaatgatttatct

SEQ ID NO: 437207 - DNA, 25 bp, Artificial
  probe
  misc_feature (1)..(25): SEQ ID NO: 6395; WAN024FYB; Start 804; Stop 828
gacagggaatcataaggcagttaat

SEQ ID NO: 437208 - DNA, 25 bp, Artificial
  probe
  misc_feature (1)..(25): SEQ ID NO: 6395; WAN024FYB; Start 531; Stop 555
attaagtatgtggttacctgctcga

SEQ ID NO: 437209 - DNA, 25 bp, Artificial
  probe
  misc_feature (1)..(25): SEQ ID NO: 6395; WAN024FYB; Start 57; Stop 81
acttcccatcattacaactccctat

SEQ ID NO: 437210 - DNA, 25 bp, Artificial
  probe
  misc_feature (1)..(25): SEQ ID NO: 6395; WAN024FYB; Start 55; Stop 79
atacttcccatcattacaactccct

SEQ ID NO: 437211 - DNA, 25 bp, Artificial
  probe
  misc_feature (1)..(25): SEQ ID NO: 6395; WAN024FYB; Start 421; Stop 445
aacatattagtgaagctcgttggtg

SEQ ID NO: 437212 - DNA, 25 bp, Artificial
  probe
  misc_feature (1)..(25): SEQ ID NO: 6395; WAN024FYB; Start 627; Stop 651
tctccctcagattgctatatcacta

SEQ ID NO: 437213 - DNA, 25 bp, Artificial
  probe
  misc_feature (1)..(25): SEQ ID NO: 6395; WAN024FYB; Start 625; Stop 649
tttctccctcagattgctatatcac

SEQ ID NO: 437214 - DNA, 25 bp, Artificial
  probe
  misc_feature (1)..(25): SEQ ID NO: 6396; WAN024FYA; Start 436; Stop 460
ttcgttggtgtaatctctatcttcc

SEQ ID NO: 437215 - DNA, 25 bp, Artificial
  probe
  misc_feature (1)..(25): SEQ ID NO: 6396; WAN024FYA; Start 438; Stop 462
cgttggtgtaatctctatcttcctc

SEQ ID NO: 437216 - DNA, 25 bp, Artificial
  probe
  misc_feature (1)..(25): SEQ ID NO: 6396; WAN024FYA; Start 434; Stop 458
agttcgttggtgtaatctctatctt

SEQ ID NO: 437217 - DNA, 25 bp, Artificial
  probe
  misc_feature (1)..(25): SEQ ID NO: 6396; WAN024FYA; Start 433; Stop 457
aagttcgttggtgtaatctctatct

SEQ ID NO: 437218 - DNA, 25 bp, Artificial
  probe
  misc_feature (1)..(25): SEQ ID NO: 6396; WAN024FYA; Start 609; Stop 633
accagtcatattattgttccttccg

SEQ ID NO: 437219 - DNA, 25 bp, Artificial
  probe
  misc_feature (1)..(25): SEQ ID NO: 6396; WAN024FYA; Start 439; Stop 463
gttggtgtaatctctatcttcctct

SEQ ID NO: 437220 - DNA, 25 bp, Artificial
  probe
  misc_feature (1)..(25): SEQ ID NO: 6396; WAN024FYA; Start 435; Stop 459
gttcgttggtgtaatctctatcttc

SEQ ID NO: 437221 - DNA, 25 bp, Artificial
  probe
  misc_feature (1)..(25): SEQ ID NO: 6396; WAN024FYA; Start 437; Stop 461
tcgttggtgtaatctctatcttcct

SEQ ID NO: 437222 - DNA, 25 bp, Artificial
  probe
  misc_feature (1)..(25): SEQ ID NO: 6396; WAN024FYA; Start 1069; Stop 1093
cctgctattgttagtgttggattaa

SEQ ID NO: 437223 - DNA, 25 bp, Artificial
  probe
  misc_feature (1)..(25): SEQ ID NO: 6396; WAN024FYA; Start 737; Stop 761
atatccttctgaccttggtaacttc

SEQ ID NO: 437224 - DNA, 25 bp, Artificial
  probe
  misc_feature (1)..(25): SEQ ID NO: 6396; WAN024FYA; Start 611; Stop 635
cagtcatattattgttccttccgca

SEQ ID NO: 437225 - DNA, 25 bp, Artificial
  probe
  misc_feature (1)..(25): SEQ ID NO: 6396; WAN024FYA; Start 613; Stop 637
gtcatattattgttccttccgcaag

SEQ ID NO: 437226 - DNA, 25 bp, Artificial
  probe
  misc_feature (1)..(25): SEQ ID NO: 6396; WAN024FYA; Start 431; Stop 455
tcaagttcgttggtgtaatctctat

SEQ ID NO: 437227 - DNA, 25 bp, Artificial
  probe
  misc_feature (1)..(25): SEQ ID NO: 6396; WAN024FYA; Start 736; Stop 760
aatatccttctgaccttggtaactt

SEQ ID NO: 437228 - DNA, 25 bp, Artificial
  probe
  misc_feature (1)..(25): SEQ ID NO: 6396; WAN024FYA; Start 615; Stop 639
catattattgttccttccgcaagtg

SEQ ID NO: 437229 - DNA, 25 bp, Artificial
  probe
  misc_feature (1)..(25): SEQ ID NO: 6396; WAN024FYA; Start 614; Stop 638
tcatattattgttccttccgcaagt

SEQ ID NO: 437230 - DNA, 25 bp, Artificial
  probe
  misc_feature (1)..(25): SEQ ID NO: 6396; WAN024FYA; Start 612; Stop 636
agtcatattattgttccttccgcaa

SEQ ID NO: 437231 - DNA, 25 bp, Artificial
  probe
  misc_feature (1)..(25): SEQ ID NO: 6396; WAN024FYA; Start 440; Stop 464
ttggtgtaatctctatcttcctctt

SEQ ID NO: 437232 - DNA, 25 bp, Artificial
  probe
  misc_feature (1)..(25): SEQ ID NO: 6396; WAN024FYA; Start 432; Stop 456
caagttcgttggtgtaatctctatc

SEQ ID NO: 437233 - DNA, 25 bp, Artificial
  probe
  misc_feature (1)..(25): SEQ ID NO: 6396; WAN024FYA; Start 430; Stop 454
gtcaagttcgttggtgtaatctcta

SEQ ID NO: 437234 - DNA, 25 bp, Artificial
  probe
  misc_feature (1)..(25): SEQ ID NO: 6396; WAN024FYA; Start 608; Stop 632
aaccagtcatattattgttccttcc

SEQ ID NO: 437235 - DNA, 25 bp, Artificial
  probe
  misc_feature (1)..(25): SEQ ID NO: 6396; WAN024FYA; Start 738; Stop 762
tatccttctgaccttggtaacttcc

SEQ ID NO: 437236 - DNA, 25 bp, Artificial
  probe
  misc_feature (1)..(25): SEQ ID NO: 6396; WAN024FYA; Start 610; Stop 634
ccagtcatattattgttccttccgc

SEQ ID NO: 437237 - DNA, 25 bp, Artificial
  probe
  misc_feature (1)..(25): SEQ ID NO: 6396; WAN024FYA; Start 616; Stop 640
atattattgttccttccgcaagtgg

SEQ ID NO: 437238 - DNA, 25 bp, Artificial
  probe
  misc_feature (1)..(25): SEQ ID NO: 6396; WAN024FYA; Start 475; Stop 499
gcagatgatctatacctctatgtct

SEQ ID NO: 437239 - DNA, 25 bp, Artificial
  probe
  misc_feature (1)..(25): SEQ ID NO: 6396; WAN024FYA; Start 429; Stop 453
agtcaagttcgttggtgtaatctct

SEQ ID NO: 437240 - DNA, 25 bp, Artificial
  probe
  misc_feature (1)..(25): SEQ ID NO: 6396; WAN024FYA; Start 428; Stop 452
cagtcaagttcgttggtgtaatctc

SEQ ID NO: 437241 - DNA, 25 bp, Artificial
  probe
  misc_feature (1)..(25): SEQ ID NO: 6396; WAN024FYA; Start 270; Stop 294
ttctctaaccttgtattgtcttctt

SEQ ID NO: 437242 - DNA, 25 bp, Artificial
  probe
  misc_feature (1)..(25): SEQ ID NO: 6396; WAN024FYA; Start 1066; Stop 1090
attcctgctattgttagtgttggat

SEQ ID NO: 437243 - DNA, 25 bp, Artificial
  probe
  misc_feature (1)..(25): SEQ ID NO: 6396; WAN024FYA; Start 1068; Stop 1092
tcctgctattgttagtgttggatta

SEQ ID NO: 437244 - DNA, 25 bp, Artificial
  probe
  misc_feature (1)..(25): SEQ ID NO: 6396; WAN024FYA; Start 1067; Stop 1091
ttcctgctattgttagtgttggatt

SEQ ID NO: 437245 - DNA, 25 bp, Artificial
  probe
  misc_feature (1)..(25): SEQ ID NO: 6396; WAN024FYA; Start 1065; Stop 1089
aattcctgctattgttagtgttgga

SEQ ID NO: 437246 - DNA, 25 bp, Artificial
  probe
  misc_feature (1)..(25): SEQ ID NO: 6396; WAN024FYA; Start 421; Stop 445
aatatcacagtcaagttcgttggtg

SEQ ID NO: 437247 - DNA, 25 bp, Artificial
  probe
  misc_feature (1)..(25): SEQ ID NO: 6397; WAN024BSM; Start 339; Stop 363
tattgtagtagaggctaagagtgga

SEQ ID NO: 437248 - DNA, 25 bp, Artificial
  probe
  misc_feature (1)..(25): SEQ ID NO: 6397; WAN024BSM; Start 213; Stop 237
atggacagttagattgaatggagaa

SEQ ID NO: 437249 - DNA, 25 bp, Artificial
  probe
  misc_feature (1)..(25): SEQ ID NO: 6397; WAN024BSM; Start 212; Stop 236
aatggacagttagattgaatggaga

SEQ ID NO: 437250 - DNA, 25 bp, Artificial
  probe
  misc_feature (1)..(25): SEQ ID NO: 6397; WAN024BSM; Start 340; Stop 364
attgtagtagaggctaagagtggaa

SEQ ID NO: 437251 - DNA, 25 bp, Artificial
  probe
  misc_feature (1)..(25): SEQ ID NO: 6397; WAN024BSM; Start 211; Stop 235
gaatggacagttagattgaatggag

SEQ ID NO: 437252 - DNA, 25 bp, Artificial
  probe
  misc_feature (1)..(25): SEQ ID NO: 6397; WAN024BSM; Start 210; Stop 234
cgaatggacagttagattgaatgga

SEQ ID NO: 437253 - DNA, 25 bp, Artificial
  probe
  misc_feature (1)..(25): SEQ ID NO: 6397; WAN024BSM; Start 338; Stop 362
atattgtagtagaggctaagagtgg

SEQ ID NO: 437254 - DNA, 25 bp, Artificial
  probe
  misc_feature (1)..(25): SEQ ID NO: 6397; WAN024BSM; Start 336; Stop 360
ggatattgtagtagaggctaagagt

SEQ ID NO: 437255 - DNA, 25 bp, Artificial
  probe
  misc_feature (1)..(25): SEQ ID NO: 6397; WAN024BSM; Start 337; Stop 361
gatattgtagtagaggctaagagtg

SEQ ID NO: 437256 - DNA, 25 bp, Artificial
  probe
  misc_feature (1)..(25): SEQ ID NO: 6397; WAN024BSM; Start 209; Stop 233
tcgaatggacagttagattgaatgg

SEQ ID NO: 437257 - DNA, 25 bp, Artificial
  probe
  misc_feature (1)..(25): SEQ ID NO: 6397; WAN024BSM; Start 208; Stop 232
atcgaatggacagttagattgaatg

SEQ ID NO: 437258 - DNA, 25 bp, Artificial
  probe
  misc_feature (1)..(25): SEQ ID NO: 6397; WAN024BSM; Start 405; Stop 429
ttattcagattctgctaagagtggc

SEQ ID NO: 437259 - DNA, 25 bp, Artificial
  probe
  misc_feature (1)..(25): SEQ ID NO: 6397; WAN024BSM; Start 214; Stop 238
tggacagttagattgaatggagaaa

SEQ ID NO: 437260 - DNA, 25 bp, Artificial
  probe
  misc_feature (1)..(25): SEQ ID NO: 6397; WAN024BSM; Start 341; Stop 365
ttgtagtagaggctaagagtggaaa

SEQ ID NO: 437261 - DNA, 25 bp, Artificial
  probe
  misc_feature (1)..(25): SEQ ID NO: 6397; WAN024BSM; Start 335; Stop 359
gggatattgtagtagaggctaagag

SEQ ID NO: 437262 - DNA, 25 bp, Artificial
  probe
  misc_feature (1)..(25): SEQ ID NO: 6397; WAN024BSM; Start 407; Stop 431
attcagattctgctaagagtggcta

SEQ ID NO: 437263 - DNA, 25 bp, Artificial
  probe
  misc_feature (1)..(25): SEQ ID NO: 6397; WAN024BSM; Start 406; Stop 430
tattcagattctgctaagagtggct

SEQ ID NO: 437264 - DNA, 25 bp, Artificial
  probe
  misc_feature (1)..(25): SEQ ID NO: 6397; WAN024BSM; Start 468; Stop 492
atgggattccgtaaatgagtcttat

SEQ ID NO: 437265 - DNA, 25 bp, Artificial
  probe
  misc_feature (1)..(25): SEQ ID NO: 6397; WAN024BSM; Start 342; Stop 366
tgtagtagaggctaagagtggaaac

SEQ ID NO: 437266 - DNA, 25 bp, Artificial
  probe
  misc_feature (1)..(25): SEQ ID NO: 6397; WAN024BSM; Start 353; Stop 377
ctaagagtggaaacgaagtgaagac

SEQ ID NO: 437267 - DNA, 25 bp, Artificial
  probe
  misc_feature (1)..(25): SEQ ID NO: 6397; WAN024BSM; Start 87; Stop 111
tgaacttaaagaagactgggcattt

SEQ ID NO: 437268 - DNA, 25 bp, Artificial
  probe
  misc_feature (1)..(25): SEQ ID NO: 6397; WAN024BSM; Start 86; Stop 110
ttgaacttaaagaagactgggcatt

SEQ ID NO: 437269 - DNA, 25 bp, Artificial
  probe
  misc_feature (1)..(25): SEQ ID NO: 6397; WAN024BSM; Start 85; Stop 109
tttgaacttaaagaagactgggcat

SEQ ID NO: 437270 - DNA, 25 bp, Artificial
  probe
  misc_feature (1)..(25): SEQ ID NO: 6397; WAN024BSM; Start 257; Stop 281
tagcggaggaaagaactgtatctaa

SEQ ID NO: 437271 - DNA, 25 bp, Artificial
  probe
  misc_feature (1)..(25): SEQ ID NO: 6397; WAN024BSM; Start 256; Stop 280
ttagcggaggaaagaactgtatcta

SEQ ID NO: 437272 - DNA, 25 bp, Artificial
  probe
  misc_feature (1)..(25): SEQ ID NO: 6397; WAN024BSM; Start 469; Stop 493
tgggattccgtaaatgagtcttata

SEQ ID NO: 437273 - DNA, 25 bp, Artificial
  probe
  misc_feature (1)..(25): SEQ ID NO: 6397; WAN024BSM; Start 416; Stop 440
ctgctaagagtggctactttattct

SEQ ID NO: 437274 - DNA, 25 bp, Artificial
  probe
  misc_feature (1)..(25): SEQ ID NO: 6397; WAN024BSM; Start 415; Stop 439
tctgctaagagtggctactttattc

SEQ ID NO: 437275 - DNA, 25 bp, Artificial
  probe
  misc_feature (1)..(25): SEQ ID NO: 6397; WAN024BSM; Start 412; Stop 436
gattctgctaagagtggctacttta

SEQ ID NO: 437276 - DNA, 25 bp, Artificial
  probe
  misc_feature (1)..(25): SEQ ID NO: 6397; WAN024BSM; Start 381; Stop 405
gtctactaaggtagttgacgatgtt

SEQ ID NO: 437277 - DNA, 25 bp, Artificial
  probe
  misc_feature (1)..(25): SEQ ID NO: 6397; WAN024BSM; Start 375; Stop 399
gacttggtctactaaggtagttgac

SEQ ID NO: 437278 - DNA, 25 bp, Artificial
  probe
  misc_feature (1)..(25): SEQ ID NO: 6397; WAN024BSM; Start 414; Stop 438
ttctgctaagagtggctactttatt

SEQ ID NO: 437279 - DNA, 25 bp, Artificial
  probe
  misc_feature (1)..(25): SEQ ID NO: 6397; WAN024BSM; Start 389; Stop 413
aggtagttgacgatgtttattcaga

SEQ ID NO: 437280 - DNA, 25 bp, Artificial
  probe
  misc_feature (1)..(25): SEQ ID NO: 6398; WAN024BRI; Start 118; Stop 142
ctatgtagtcgttatgagaaggtgg

SEQ ID NO: 437281 - DNA, 25 bp, Artificial
  probe
  misc_feature (1)..(25): SEQ ID NO: 6398; WAN024BRI; Start 312; Stop 336
agactacgcattgaagataggtaag

SEQ ID NO: 437282 - DNA, 25 bp, Artificial
  probe
  misc_feature (1)..(25): SEQ ID NO: 6398; WAN024BRI; Start 311; Stop 335
cagactacgcattgaagataggtaa

SEQ ID NO: 437283 - DNA, 25 bp, Artificial
  probe
  misc_feature (1)..(25): SEQ ID NO: 6398; WAN024BRI; Start 244; Stop 268
attgaaggaatgattgatagcgact

SEQ ID NO: 437284 - DNA, 25 bp, Artificial
  probe
  misc_feature (1)..(25): SEQ ID NO: 6398; WAN024BRI; Start 119; Stop 143
tatgtagtcgttatgagaaggtgga

SEQ ID NO: 437285 - DNA, 25 bp, Artificial
  probe
  misc_feature (1)..(25): SEQ ID NO: 6398; WAN024BRI; Start 122; Stop 146
gtagtcgttatgagaaggtggaatc

SEQ ID NO: 437286 - DNA, 25 bp, Artificial
  probe
  misc_feature (1)..(25): SEQ ID NO: 6398; WAN024BRI; Start 243; Stop 267
tattgaaggaatgattgatagcgac

SEQ ID NO: 437287 - DNA, 25 bp, Artificial
  probe
  misc_feature (1)..(25): SEQ ID NO: 6398; WAN024BRI; Start 246; Stop 270
tgaaggaatgattgatagcgactta

SEQ ID NO: 437288 - DNA, 25 bp, Artificial
  probe
  misc_feature (1)..(25): SEQ ID NO: 6398; WAN024BRI; Start 245; Stop 269
ttgaaggaatgattgatagcgactt

SEQ ID NO: 437289 - DNA, 25 bp, Artificial
  probe
  misc_feature (1)..(25): SEQ ID NO: 6398; WAN024BRI; Start 121; Stop 145
tgtagtcgttatgagaaggtggaat

SEQ ID NO: 437290 - DNA, 25 bp, Artificial
  probe
  misc_feature (1)..(25): SEQ ID NO: 6398; WAN024BRI; Start 120; Stop 144
atgtagtcgttatgagaaggtggaa

SEQ ID NO: 437291 - DNA, 25 bp, Artificial
  probe
  misc_feature (1)..(25): SEQ ID NO: 6398; WAN024BRI; Start 275; Stop 299
ttgttcgtattccgtctataattgg

SEQ ID NO: 437292 - DNA, 25 bp, Artificial
  probe
  misc_feature (1)..(25): SEQ ID NO: 6398; WAN024BRI; Start 313; Stop 337
gactacgcattgaagataggtaagc

SEQ ID NO: 437293 - DNA, 25 bp, Artificial
  probe
  misc_feature (1)..(25): SEQ ID NO: 6398; WAN024BRI; Start 247; Stop 271
gaaggaatgattgatagcgacttaa

SEQ ID NO: 437294 - DNA, 25 bp, Artificial
  probe
  misc_feature (1)..(25): SEQ ID NO: 6398; WAN024BRI; Start 242; Stop 266
ttattgaaggaatgattgatagcga

SEQ ID NO: 437295 - DNA, 25 bp, Artificial
  probe
  misc_feature (1)..(25): SEQ ID NO: 6398; WAN024BRI; Start 267; Stop 291
cttaatagttgttcgtattccgtct

SEQ ID NO: 437296 - DNA, 25 bp, Artificial
  probe
  misc_feature (1)..(25): SEQ ID NO: 6398; WAN024BRI; Start 266; Stop 290
acttaatagttgttcgtattccgtc

SEQ ID NO: 437297 - DNA, 25 bp, Artificial
  probe
  misc_feature (1)..(25): SEQ ID NO: 6398; WAN024BRI; Start 265; Stop 289
gacttaatagttgttcgtattccgt

SEQ ID NO: 437298 - DNA, 25 bp, Artificial
  probe
  misc_feature (1)..(25): SEQ ID NO: 6398; WAN024BRI; Start 123; Stop 147
tagtcgttatgagaaggtggaatca

SEQ ID NO: 437299 - DNA, 25 bp, Artificial
  probe
  misc_feature (1)..(25): SEQ ID NO: 6398; WAN024BRI; Start 117; Stop 141
actatgtagtcgttatgagaaggtg

SEQ ID NO: 437300 - DNA, 25 bp, Artificial
  probe
  misc_feature (1)..(25): SEQ ID NO: 6398; WAN024BRI; Start 248; Stop 272
aaggaatgattgatagcgacttaat

SEQ ID NO: 437301 - DNA, 25 bp, Artificial
  probe
  misc_feature (1)..(25): SEQ ID NO: 6398; WAN024BRI; Start 274; Stop 298
gttgttcgtattccgtctataattg

SEQ ID NO: 437302 - DNA, 25 bp, Artificial
  probe
  misc_feature (1)..(25): SEQ ID NO: 6398; WAN024BRI; Start 273; Stop 297
agttgttcgtattccgtctataatt

SEQ ID NO: 437303 - DNA, 25 bp, Artificial
  probe
  misc_feature (1)..(25): SEQ ID NO: 6398; WAN024BRI; Start 105; Stop 129
tggagagattgtactatgtagtcgt

SEQ ID NO: 437304 - DNA, 25 bp, Artificial
  probe
  misc_feature (1)..(25): SEQ ID NO: 6398; WAN024BRI; Start 104; Stop 128
ttggagagattgtactatgtagtcg

SEQ ID NO: 437305 - DNA, 25 bp, Artificial
  probe
  misc_feature (1)..(25): SEQ ID NO: 6398; WAN024BRI; Start 106; Stop 130
ggagagattgtactatgtagtcgtt

SEQ ID NO: 437306 - DNA, 25 bp, Artificial
  probe
  misc_feature (1)..(25): SEQ ID NO: 6398; WAN024BRI; Start 310; Stop 334
gcagactacgcattgaagataggta

SEQ ID NO: 437307 - DNA, 25 bp, Artificial
  probe
  misc_feature (1)..(25): SEQ ID NO: 6398; WAN024BRI; Start 319; Stop 343
gcattgaagataggtaagccgtatc

SEQ ID NO: 437308 - DNA, 25 bp, Artificial
  probe
  misc_feature (1)..(25): SEQ ID NO: 6398; WAN024BRI; Start 254; Stop 278
tgattgatagcgacttaatagttgt

SEQ ID NO: 437309 - DNA, 25 bp, Artificial
  probe
  misc_feature (1)..(25): SEQ ID NO: 6398; WAN024BRI; Start 249; Stop 273
aggaatgattgatagcgacttaata

SEQ ID NO: 437310 - DNA, 25 bp, Artificial
  probe
  misc_feature (1)..(25): SEQ ID NO: 6398; WAN024BRI; Start 241; Stop 265
attattgaaggaatgattgatagcg

SEQ ID NO: 437311 - DNA, 25 bp, Artificial
  probe
  misc_feature (1)..(25): SEQ ID NO: 6398; WAN024BRI; Start 314; Stop 338
actacgcattgaagataggtaagcc

SEQ ID NO: 437312 - DNA, 25 bp, Artificial
  probe
  misc_feature (1)..(25): SEQ ID NO: 6398; WAN024BRI; Start 276; Stop 300
tgttcgtattccgtctataattgga

SEQ ID NO: 437313 - DNA, 25 bp, Artificial
  probe
  misc_feature (1)..(25): SEQ ID NO: 6399; WAN024BXM; Start 118; Stop 142
gactggctgaaaggaataacttatc

SEQ ID NO: 437314 - DNA, 25 bp, Artificial
  probe
  misc_feature (1)..(25): SEQ ID NO: 6399; WAN024BXM; Start 117; Stop 141
cgactggctgaaaggaataacttat

SEQ ID NO: 437315 - DNA, 25 bp, Artificial
  probe
  misc_feature (1)..(25): SEQ ID NO: 6399; WAN024BXM; Start 130; Stop 154
ggaataacttatcctcgtattggta

SEQ ID NO: 437316 - DNA, 25 bp, Artificial
  probe
  misc_feature (1)..(25): SEQ ID NO: 6399; WAN024BXM; Start 73; Stop 97
aatacattatgtgcagacttggatt

SEQ ID NO: 437317 - DNA, 25 bp, Artificial
  probe
  misc_feature (1)..(25): SEQ ID NO: 6399; WAN024BXM; Start 62; Stop 86
gggtagacagaaatacattatgtgc

SEQ ID NO: 437318 - DNA, 25 bp, Artificial
  probe
  misc_feature (1)..(25): SEQ ID NO: 6399; WAN024BXM; Start 119; Stop 143
actggctgaaaggaataacttatcc

SEQ ID NO: 437319 - DNA, 25 bp, Artificial
  probe
  misc_feature (1)..(25): SEQ ID NO: 6399; WAN024BXM; Start 131; Stop 155
gaataacttatcctcgtattggtaa

SEQ ID NO: 437320 - DNA, 25 bp, Artificial
  probe
  misc_feature (1)..(25): SEQ ID NO: 6399; WAN024BXM; Start 116; Stop 140
gcgactggctgaaaggaataactta

SEQ ID NO: 437321 - DNA, 25 bp, Artificial
  probe
  misc_feature (1)..(25): SEQ ID NO: 6399; WAN024BXM; Start 71; Stop 95
gaaatacattatgtgcagacttgga

SEQ ID NO: 437322 - DNA, 25 bp, Artificial
  probe
  misc_feature (1)..(25): SEQ ID NO: 6399; WAN024BXM; Start 70; Stop 94
agaaatacattatgtgcagacttgg

SEQ ID NO: 437323 - DNA, 25 bp, Artificial
  probe
  misc_feature (1)..(25): SEQ ID NO: 6399; WAN024BXM; Start 67; Stop 91
gacagaaatacattatgtgcagact

SEQ ID NO: 437324 - DNA, 25 bp, Artificial
  probe
  misc_feature (1)..(25): SEQ ID NO: 6399; WAN024BXM; Start 66; Stop 90
agacagaaatacattatgtgcagac

SEQ ID NO: 437325 - DNA, 25 bp, Artificial
  probe
  misc_feature (1)..(25): SEQ ID NO: 6399; WAN024BXM; Start 77; Stop 101
cattatgtgcagacttggatttaaa

SEQ ID NO: 437326 - DNA, 25 bp, Artificial
  probe
  misc_feature (1)..(25): SEQ ID NO: 6399; WAN024BXM; Start 76; Stop 100
acattatgtgcagacttggatttaa

SEQ ID NO: 437327 - DNA, 25 bp, Artificial
  probe
  misc_feature (1)..(25): SEQ ID NO: 6399; WAN024BXM; Start 63; Stop 87
ggtagacagaaatacattatgtgca

SEQ ID NO: 437328 - DNA, 25 bp, Artificial
  probe
  misc_feature (1)..(25): SEQ ID NO: 6399; WAN024BXM; Start 74; Stop 98
atacattatgtgcagacttggattt

SEQ ID NO: 437329 - DNA, 25 bp, Artificial
  probe
  misc_feature (1)..(25): SEQ ID NO: 6399; WAN024BXM; Start 72; Stop 96
aaatacattatgtgcagacttggat

SEQ ID NO: 437330 - DNA, 25 bp, Artificial
  probe
  misc_feature (1)..(25): SEQ ID NO: 6399; WAN024BXM; Start 68; Stop 92
acagaaatacattatgtgcagactt

SEQ ID NO: 437331 - DNA, 25 bp, Artificial
  probe
  misc_feature (1)..(25): SEQ ID NO: 6399; WAN024BXM; Start 69; Stop 93
cagaaatacattatgtgcagacttg

SEQ ID NO: 437332 - DNA, 25 bp, Artificial
  probe
  misc_feature (1)..(25): SEQ ID NO: 6399; WAN024BXM; Start 75; Stop 99
tacattatgtgcagacttggattta

SEQ ID NO: 437333 - DNA, 25 bp, Artificial
  probe
  misc_feature (1)..(25): SEQ ID NO: 6399; WAN024BXM; Start 141; Stop 165
tcctcgtattggtaaaattgaactt

SEQ ID NO: 437334 - DNA, 25 bp, Artificial
  probe
  misc_feature (1)..(25): SEQ ID NO: 6399; WAN024BXM; Start 140; Stop 164
atcctcgtattggtaaaattgaact

SEQ ID NO: 437335 - DNA, 25 bp, Artificial
  probe
  misc_feature (1)..(25): SEQ ID NO: 6399; WAN024BXM; Start 64; Stop 88
gtagacagaaatacattatgtgcag

SEQ ID NO: 437336 - DNA, 25 bp, Artificial
  probe
  misc_feature (1)..(25): SEQ ID NO: 6399; WAN024BXM; Start 59; Stop 83
aaggggtagacagaaatacattatg

SEQ ID NO: 437337 - DNA, 25 bp, Artificial
  probe
  misc_feature (1)..(25): SEQ ID NO: 6399; WAN024BXM; Start 129; Stop 153
aggaataacttatcctcgtattggt

SEQ ID NO: 437338 - DNA, 25 bp, Artificial
  probe
  misc_feature (1)..(25): SEQ ID NO: 6399; WAN024BXM; Start 65; Stop 89
tagacagaaatacattatgtgcaga

SEQ ID NO: 437339 - DNA, 25 bp, Artificial
  probe
  misc_feature (1)..(25): SEQ ID NO: 6399; WAN024BXM; Start 142; Stop 166
cctcgtattggtaaaattgaacttt

SEQ ID NO: 437340 - DNA, 25 bp, Artificial
  probe
  misc_feature (1)..(25): SEQ ID NO: 6399; WAN024BXM; Start 57; Stop 81
aaaaggggtagacagaaatacatta

SEQ ID NO: 437341 - DNA, 25 bp, Artificial
  probe
  misc_feature (1)..(25): SEQ ID NO: 6399; WAN024BXM; Start 128; Stop 152
aaggaataacttatcctcgtattgg

SEQ ID NO: 437342 - DNA, 25 bp, Artificial
  probe
  misc_feature (1)..(25): SEQ ID NO: 6399; WAN024BXM; Start 61; Stop 85
ggggtagacagaaatacattatgtg

SEQ ID NO: 437343 - DNA, 25 bp, Artificial
  probe
  misc_feature (1)..(25): SEQ ID NO: 6399; WAN024BXM; Start 150; Stop 174
tggtaaaattgaacttttggcaaac

SEQ ID NO: 437344 - DNA, 25 bp, Artificial
  probe
  misc_feature (1)..(25): SEQ ID NO: 6399; WAN024BXM; Start 148; Stop 172
attggtaaaattgaacttttggcaa

SEQ ID NO: 437345 - DNA, 25 bp, Artificial
  probe
  misc_feature (1)..(25): SEQ ID NO: 6399; WAN024BXM; Start 60; Stop 84
aggggtagacagaaatacattatgt

SEQ ID NO: 437346 - DNA, 25 bp, Artificial
  probe
  misc_feature (1)..(25): SEQ ID NO: 6400; WAN024BL4; Start 476; Stop 500
ttaatgctgctgagtatggaagaag

SEQ ID NO: 437347 - DNA, 25 bp, Artificial
  probe
  misc_feature (1)..(25): SEQ ID NO: 6400; WAN024BL4; Start 451; Stop 475
ggatattctgttgagtggagagtta

SEQ ID NO: 437348 - DNA, 25 bp, Artificial
  probe
  misc_feature (1)..(25): SEQ ID NO: 6400; WAN024BL4; Start 947; Stop 971
acggacatcaatacatctattcaga

SEQ ID NO: 437349 - DNA, 25 bp, Artificial
  probe
  misc_feature (1)..(25): SEQ ID NO: 6400; WAN024BL4; Start 946; Stop 970
gacggacatcaatacatctattcag

SEQ ID NO: 437350 - DNA, 25 bp, Artificial
  probe
  misc_feature (1)..(25): SEQ ID NO: 6400; WAN024BL4; Start 942; Stop 966
ctctgacggacatcaatacatctat

SEQ ID NO: 437351 - DNA, 25 bp, Artificial
  probe
  misc_feature (1)..(25): SEQ ID NO: 6400; WAN024BL4; Start 945; Stop 969
tgacggacatcaatacatctattca

SEQ ID NO: 437352 - DNA, 25 bp, Artificial
  probe
  misc_feature (1)..(25): SEQ ID NO: 6400; WAN024BL4; Start 943; Stop 967
tctgacggacatcaatacatctatt

SEQ ID NO: 437353 - DNA, 25 bp, Artificial
  probe
  misc_feature (1)..(25): SEQ ID NO: 6400; WAN024BL4; Start 444; Stop 468
taatctcggatattctgttgagtgg

SEQ ID NO: 437354 - DNA, 25 bp, Artificial
  probe
  misc_feature (1)..(25): SEQ ID NO: 6400; WAN024BL4; Start 944; Stop 968
ctgacggacatcaatacatctattc

SEQ ID NO: 437355 - DNA, 25 bp, Artificial
  probe
  misc_feature (1)..(25): SEQ ID NO: 6400; WAN024BL4; Start 948; Stop 972
cggacatcaatacatctattcagaa

SEQ ID NO: 437356 - DNA, 25 bp, Artificial
  probe
  misc_feature (1)..(25): SEQ ID NO: 6400; WAN024BL4; Start 941; Stop 965
cctctgacggacatcaatacatcta

SEQ ID NO: 437357 - DNA, 25 bp, Artificial
  probe
  misc_feature (1)..(25): SEQ ID NO: 6400; WAN024BL4; Start 445; Stop 469
aatctcggatattctgttgagtgga

SEQ ID NO: 437358 - DNA, 25 bp, Artificial
  probe
  misc_feature (1)..(25): SEQ ID NO: 6400; WAN024BL4; Start 751; Stop 775
aatacaggaattatgaggcgtggaa

SEQ ID NO: 437359 - DNA, 25 bp, Artificial
  probe
  misc_feature (1)..(25): SEQ ID NO: 6400; WAN024BL4; Start 747; Stop 771
ttggaatacaggaattatgaggcgt

SEQ ID NO: 437360 - DNA, 25 bp, Artificial
  probe
  misc_feature (1)..(25): SEQ ID NO: 6400; WAN024BL4; Start 471; Stop 495
agttattaatgctgctgagtatgga

SEQ ID NO: 437361 - DNA, 25 bp, Artificial
  probe
  misc_feature (1)..(25): SEQ ID NO: 6400; WAN024BL4; Start 467; Stop 491
ggagagttattaatgctgctgagta

SEQ ID NO: 437362 - DNA, 25 bp, Artificial
  probe
  misc_feature (1)..(25): SEQ ID NO: 6400; WAN024BL4; Start 459; Stop 483
tgttgagtggagagttattaatgct

SEQ ID NO: 437363 - DNA, 25 bp, Artificial
  probe
  misc_feature (1)..(25): SEQ ID NO: 6400; WAN024BL4; Start 475; Stop 499
attaatgctgctgagtatggaagaa

SEQ ID NO: 437364 - DNA, 25 bp, Artificial
  probe
  misc_feature (1)..(25): SEQ ID NO: 6400; WAN024BL4; Start 460; Stop 484
gttgagtggagagttattaatgctg

SEQ ID NO: 437365 - DNA, 25 bp, Artificial
  probe
  misc_feature (1)..(25): SEQ ID NO: 6400; WAN024BL4; Start 458; Stop 482
ctgttgagtggagagttattaatgc

SEQ ID NO: 437366 - DNA, 25 bp, Artificial
  probe
  misc_feature (1)..(25): SEQ ID NO: 6400; WAN024BL4; Start 474; Stop 498
tattaatgctgctgagtatggaaga

SEQ ID NO: 437367 - DNA, 25 bp, Artificial
  probe
  misc_feature (1)..(25): SEQ ID NO: 6400; WAN024BL4; Start 470; Stop 494
gagttattaatgctgctgagtatgg

SEQ ID NO: 437368 - DNA, 25 bp, Artificial
  probe
  misc_feature (1)..(25): SEQ ID NO: 6400; WAN024BL4; Start 840; Stop 864
tcaagatgagtctgaagtacctgaa

SEQ ID NO: 437369 - DNA, 25 bp, Artificial
  probe
  misc_feature (1)..(25): SEQ ID NO: 6400; WAN024BL4; Start 472; Stop 496
gttattaatgctgctgagtatggaa

SEQ ID NO: 437370 - DNA, 25 bp, Artificial
  probe
  misc_feature (1)..(25): SEQ ID NO: 6400; WAN024BL4; Start 473; Stop 497
ttattaatgctgctgagtatggaag

SEQ ID NO: 437371 - DNA, 25 bp, Artificial
  probe
  misc_feature (1)..(25): SEQ ID NO: 6400; WAN024BL4; Start 452; Stop 476
gatattctgttgagtggagagttat

SEQ ID NO: 437372 - DNA, 25 bp, Artificial
  probe
  misc_feature (1)..(25): SEQ ID NO: 6400; WAN024BL4; Start 450; Stop 474
cggatattctgttgagtggagagtt

SEQ ID NO: 437373 - DNA, 25 bp, Artificial
  probe
  misc_feature (1)..(25): SEQ ID NO: 6400; WAN024BL4; Start 446; Stop 470
atctcggatattctgttgagtggag

SEQ ID NO: 437374 - DNA, 25 bp, Artificial
  probe
  misc_feature (1)..(25): SEQ ID NO: 6400; WAN024BL4; Start 443; Stop 467
ataatctcggatattctgttgagtg

SEQ ID NO: 437375 - DNA, 25 bp, Artificial
  probe
  misc_feature (1)..(25): SEQ ID NO: 6400; WAN024BL4; Start 461; Stop 485
ttgagtggagagttattaatgctgc

SEQ ID NO: 437376 - DNA, 25 bp, Artificial
  probe
  misc_feature (1)..(25): SEQ ID NO: 6400; WAN024BL4; Start 469; Stop 493
agagttattaatgctgctgagtatg

SEQ ID NO: 437377 - DNA, 25 bp, Artificial
  probe
  misc_feature (1)..(25): SEQ ID NO: 6400; WAN024BL4; Start 750; Stop 774
gaatacaggaattatgaggcgtgga

SEQ ID NO: 437378 - DNA, 25 bp, Artificial
  probe
  misc_feature (1)..(25): SEQ ID NO: 6400; WAN024BL4; Start 247; Stop 271
caagattactctgttgctcgtagta

SEQ ID NO: 437379 - DNA, 25 bp, Artificial
  probe
  misc_feature (1)..(25): SEQ ID NO: 6401; WAN024BWH; Start 149; Stop 173
tcctcacagataaacctcagatact

SEQ ID NO: 437380 - DNA, 25 bp, Artificial
  probe
  misc_feature (1)..(25): SEQ ID NO: 6401; WAN024BWH; Start 148; Stop 172
ctcctcacagataaacctcagatac

SEQ ID NO: 437381 - DNA, 25 bp, Artificial
  probe
  misc_feature (1)..(25): SEQ ID NO: 6401; WAN024BWH; Start 142; Stop 166
ctattcctcctcacagataaacctc

SEQ ID NO: 437382 - DNA, 25 bp, Artificial
  probe
  misc_feature (1)..(25): SEQ ID NO: 6401; WAN024BWH; Start 143; Stop 167
tattcctcctcacagataaacctca

SEQ ID NO: 437383 - DNA, 25 bp, Artificial
  probe
  misc_feature (1)..(25): SEQ ID NO: 6401; WAN024BWH; Start 138; Stop 162
atccctattcctcctcacagataaa

SEQ ID NO: 437384 - DNA, 25 bp, Artificial
  probe
  misc_feature (1)..(25): SEQ ID NO: 6401; WAN024BWH; Start 137; Stop 161
aatccctattcctcctcacagataa

SEQ ID NO: 437385 - DNA, 25 bp, Artificial
  probe
  misc_feature (1)..(25): SEQ ID NO: 6401; WAN024BWH; Start 147; Stop 171
cctcctcacagataaacctcagata

SEQ ID NO: 437386 - DNA, 25 bp, Artificial
  probe
  misc_feature (1)..(25): SEQ ID NO: 6401; WAN024BWH; Start 479; Stop 503
attcagacatacagaaagggttcat

SEQ ID NO: 437387 - DNA, 25 bp, Artificial
  probe
  misc_feature (1)..(25): SEQ ID NO: 6401; WAN024BWH; Start 476; Stop 500
ttcattcagacatacagaaagggtt

SEQ ID NO: 437388 - DNA, 25 bp, Artificial
  probe
  misc_feature (1)..(25): SEQ ID NO: 6401; WAN024BWH; Start 475; Stop 499
attcattcagacatacagaaagggt

SEQ ID NO: 437389 - DNA, 25 bp, Artificial
  probe
  misc_feature (1)..(25): SEQ ID NO: 6401; WAN024BWH; Start 485; Stop 509
acatacagaaagggttcataaaggt

SEQ ID NO: 437390 - DNA, 25 bp, Artificial
  probe
  misc_feature (1)..(25): SEQ ID NO: 6401; WAN024BWH; Start 141; Stop 165
cctattcctcctcacagataaacct

SEQ ID NO: 437391 - DNA, 25 bp, Artificial
  probe
  misc_feature (1)..(25): SEQ ID NO: 6401; WAN024BWH; Start 139; Stop 163
tccctattcctcctcacagataaac

SEQ ID NO: 437392 - DNA, 25 bp, Artificial
  probe
  misc_feature (1)..(25): SEQ ID NO: 6401; WAN024BWH; Start 477; Stop 501
tcattcagacatacagaaagggttc

SEQ ID NO: 437393 - DNA, 25 bp, Artificial
  probe
  misc_feature (1)..(25): SEQ ID NO: 6401; WAN024BWH; Start 474; Stop 498
gattcattcagacatacagaaaggg

SEQ ID NO: 437394 - DNA, 25 bp, Artificial
  probe
  misc_feature (1)..(25): SEQ ID NO: 6401; WAN024BWH; Start 484; Stop 508
gacatacagaaagggttcataaagg

SEQ ID NO: 437395 - DNA, 25 bp, Artificial
  probe
  misc_feature (1)..(25): SEQ ID NO: 6401; WAN024BWH; Start 481; Stop 505
tcagacatacagaaagggttcataa

SEQ ID NO: 437396 - DNA, 25 bp, Artificial
  probe
  misc_feature (1)..(25): SEQ ID NO: 6401; WAN024BWH; Start 480; Stop 504
ttcagacatacagaaagggttcata

SEQ ID NO: 437397 - DNA, 25 bp, Artificial
  probe
  misc_feature (1)..(25): SEQ ID NO: 6401; WAN024BWH; Start 478; Stop 502
cattcagacatacagaaagggttca

SEQ ID NO: 437398 - DNA, 25 bp, Artificial
  probe
  misc_feature (1)..(25): SEQ ID NO: 6401; WAN024BWH; Start 487; Stop 511
atacagaaagggttcataaaggttg

SEQ ID NO: 437399 - DNA, 25 bp, Artificial
  probe
  misc_feature (1)..(25): SEQ ID NO: 6401; WAN024BWH; Start 486; Stop 510
catacagaaagggttcataaaggtt

SEQ ID NO: 437400 - DNA, 25 bp, Artificial
  probe
  misc_feature (1)..(25): SEQ ID NO: 6401; WAN024BWH; Start 144; Stop 168
attcctcctcacagataaacctcag

SEQ ID NO: 437401 - DNA, 25 bp, Artificial
  probe
  misc_feature (1)..(25): SEQ ID NO: 6401; WAN024BWH; Start 488; Stop 512
tacagaaagggttcataaaggttga

SEQ ID NO: 437402 - DNA, 25 bp, Artificial
  probe
  misc_feature (1)..(25): SEQ ID NO: 6401; WAN024BWH; Start 482; Stop 506
cagacatacagaaagggttcataaa

SEQ ID NO: 437403 - DNA, 25 bp, Artificial
  probe
  misc_feature (1)..(25): SEQ ID NO: 6401; WAN024BWH; Start 483; Stop 507
agacatacagaaagggttcataaag

SEQ ID NO: 437404 - DNA, 25 bp, Artificial
  probe
  misc_feature (1)..(25): SEQ ID NO: 6401; WAN024BWH; Start 140; Stop 164
ccctattcctcctcacagataaacc

SEQ ID NO: 437405 - DNA, 25 bp, Artificial
  probe
  misc_feature (1)..(25): SEQ ID NO: 6401; WAN024BWH; Start 25; Stop 49
aaggaagcaaagagagaggtagaac

SEQ ID NO: 437406 - DNA, 25 bp, Artificial
  probe
  misc_feature (1)..(25): SEQ ID NO: 6401; WAN024BWH; Start 24; Stop 48
caaggaagcaaagagagaggtagaa

SEQ ID NO: 437407 - DNA, 25 bp, Artificial
  probe
  misc_feature (1)..(25): SEQ ID NO: 6401; WAN024BWH; Start 473; Stop 497
tgattcattcagacatacagaaagg

SEQ ID NO: 437408 - DNA, 25 bp, Artificial
  probe
  misc_feature (1)..(25): SEQ ID NO: 6401; WAN024BWH; Start 151; Stop 175
ctcacagataaacctcagatactgg

SEQ ID NO: 437409 - DNA, 25 bp, Artificial
  probe
  misc_feature (1)..(25): SEQ ID NO: 6401; WAN024BWH; Start 150; Stop 174
cctcacagataaacctcagatactg

SEQ ID NO: 437410 - DNA, 25 bp, Artificial
  probe
  misc_feature (1)..(25): SEQ ID NO: 6401; WAN024BWH; Start 146; Stop 170
tcctcctcacagataaacctcagat

SEQ ID NO: 437411 - DNA, 25 bp, Artificial
  probe
  misc_feature (1)..(25): SEQ ID NO: 6401; WAN024BWH; Start 213; Stop 237
actgatagaagaaatcgtcaaagaa

SEQ ID NO: 437412 - DNA, 25 bp, Artificial
  probe
  misc_feature (1)..(25): SEQ ID NO: 6402; WAN024BOQ; Start 270; Stop 294
ttcaacaactctaacgatactggta

SEQ ID NO: 437413 - DNA, 25 bp, Artificial
  probe
  misc_feature (1)..(25): SEQ ID NO: 6402; WAN024BOQ; Start 541; Stop 565
caaggcattatgtggttaagtgtaa

SEQ ID NO: 437414 - DNA, 25 bp, Artificial
  probe
  misc_feature (1)..(25): SEQ ID NO: 6402; WAN024BOQ; Start 271; Stop 295
tcaacaactctaacgatactggtat

SEQ ID NO: 437415 - DNA, 25 bp, Artificial
  probe
  misc_feature (1)..(25): SEQ ID NO: 6402; WAN024BOQ; Start 1251; Stop 1275
ggttacgagtgtagtgactgttatt

SEQ ID NO: 437416 - DNA, 25 bp, Artificial
  probe
  misc_feature (1)..(25): SEQ ID NO: 6402; WAN024BOQ; Start 540; Stop 564
gcaaggcattatgtggttaagtgta

SEQ ID NO: 437417 - DNA, 25 bp, Artificial
  probe
  misc_feature (1)..(25): SEQ ID NO: 6402; WAN024BOQ; Start 1250; Stop 1274
tggttacgagtgtagtgactgttat

SEQ ID NO: 437418 - DNA, 25 bp, Artificial
  probe
  misc_feature (1)..(25): SEQ ID NO: 6402; WAN024BOQ; Start 782; Stop 806
ctgtacttcaacctagaatgaccaa

SEQ ID NO: 437419 - DNA, 25 bp, Artificial
  probe
  misc_feature (1)..(25): SEQ ID NO: 6402; WAN024BOQ; Start 783; Stop 807
tgtacttcaacctagaatgaccaat

SEQ ID NO: 437420 - DNA, 25 bp, Artificial
  probe
  misc_feature (1)..(25): SEQ ID NO: 6402; WAN024BOQ; Start 1156; Stop 1180
gtactcgttgagattattgtatgcg

SEQ ID NO: 437421 - DNA, 25 bp, Artificial
  probe
  misc_feature (1)..(25): SEQ ID NO: 6402; WAN024BOQ; Start 1070; Stop 1094
cagtaatgtcaggtgctgtagttag

SEQ ID NO: 437422 - DNA, 25 bp, Artificial
  probe
  misc_feature (1)..(25): SEQ ID NO: 6402; WAN024BOQ; Start 272; Stop 296
caacaactctaacgatactggtata

SEQ ID NO: 437423 - DNA, 25 bp, Artificial
  probe
  misc_feature (1)..(25): SEQ ID NO: 6402; WAN024BOQ; Start 1258; Stop 1282
agtgtagtgactgttattatagtgc

SEQ ID NO: 437424 - DNA, 25 bp, Artificial
  probe
  misc_feature (1)..(25): SEQ ID NO: 6402; WAN024BOQ; Start 1252; Stop 1276
gttacgagtgtagtgactgttatta

SEQ ID NO: 437425 - DNA, 25 bp, Artificial
  probe
  misc_feature (1)..(25): SEQ ID NO: 6402; WAN024BOQ; Start 1249; Stop 1273
ctggttacgagtgtagtgactgtta

SEQ ID NO: 437426 - DNA, 25 bp, Artificial
  probe
  misc_feature (1)..(25): SEQ ID NO: 6402; WAN024BOQ; Start 1155; Stop 1179
tgtactcgttgagattattgtatgc

SEQ ID NO: 437427 - DNA, 25 bp, Artificial
  probe
  misc_feature (1)..(25): SEQ ID NO: 6402; WAN024BOQ; Start 1069; Stop 1093
tcagtaatgtcaggtgctgtagtta

SEQ ID NO: 437428 - DNA, 25 bp, Artificial
  probe
  misc_feature (1)..(25): SEQ ID NO: 6402; WAN024BOQ; Start 784; Stop 808
gtacttcaacctagaatgaccaatt

SEQ ID NO: 437429 - DNA, 25 bp, Artificial
  probe
  misc_feature (1)..(25): SEQ ID NO: 6402; WAN024BOQ; Start 763; Stop 787
ttagtagtgactctcagtgctgtac

SEQ ID NO: 437430 - DNA, 25 bp, Artificial
  probe
  misc_feature (1)..(25): SEQ ID NO: 6402; WAN024BOQ; Start 779; Stop 803
gtgctgtacttcaacctagaatgac

SEQ ID NO: 437431 - DNA, 25 bp, Artificial
  probe
  misc_feature (1)..(25): SEQ ID NO: 6402; WAN024BOQ; Start 778; Stop 802
agtgctgtacttcaacctagaatga

SEQ ID NO: 437432 - DNA, 25 bp, Artificial
  probe
  misc_feature (1)..(25): SEQ ID NO: 6402; WAN024BOQ; Start 777; Stop 801
cagtgctgtacttcaacctagaatg

SEQ ID NO: 437433 - DNA, 25 bp, Artificial
  probe
  misc_feature (1)..(25): SEQ ID NO: 6402; WAN024BOQ; Start 776; Stop 800
tcagtgctgtacttcaacctagaat

SEQ ID NO: 437434 - DNA, 25 bp, Artificial
  probe
  misc_feature (1)..(25): SEQ ID NO: 6402; WAN024BOQ; Start 280; Stop 304
ctaacgatactggtatatctagcct

SEQ ID NO: 437435 - DNA, 25 bp, Artificial
  probe
  misc_feature (1)..(25): SEQ ID NO: 6402; WAN024BOQ; Start 279; Stop 303
tctaacgatactggtatatctagcc

SEQ ID NO: 437436 - DNA, 25 bp, Artificial
  probe
  misc_feature (1)..(25): SEQ ID NO: 6402; WAN024BOQ; Start 764; Stop 788
tagtagtgactctcagtgctgtact

SEQ ID NO: 437437 - DNA, 25 bp, Artificial
  probe
  misc_feature (1)..(25): SEQ ID NO: 6402; WAN024BOQ; Start 1256; Stop 1280
cgagtgtagtgactgttattatagt

SEQ ID NO: 437438 - DNA, 25 bp, Artificial
  probe
  misc_feature (1)..(25): SEQ ID NO: 6402; WAN024BOQ; Start 1255; Stop 1279
acgagtgtagtgactgttattatag

SEQ ID NO: 437439 - DNA, 25 bp, Artificial
  probe
  misc_feature (1)..(25): SEQ ID NO: 6402; WAN024BOQ; Start 1068; Stop 1092
ttcagtaatgtcaggtgctgtagtt

SEQ ID NO: 437440 - DNA, 25 bp, Artificial
  probe
  misc_feature (1)..(25): SEQ ID NO: 6402; WAN024BOQ; Start 690; Stop 714
gggctctttaggtagtgtatttgat

SEQ ID NO: 437441 - DNA, 25 bp, Artificial
  probe
  misc_feature (1)..(25): SEQ ID NO: 6402; WAN024BOQ; Start 687; Stop 711
tttgggctctttaggtagtgtattt

SEQ ID NO: 437442 - DNA, 25 bp, Artificial
  probe
  misc_feature (1)..(25): SEQ ID NO: 6402; WAN024BOQ; Start 269; Stop 293
tttcaacaactctaacgatactggt

SEQ ID NO: 437443 - DNA, 25 bp, Artificial
  probe
  misc_feature (1)..(25): SEQ ID NO: 6402; WAN024BOQ; Start 424; Stop 448
gttatgcgaaatacagtagtcaagc

SEQ ID NO: 437444 - DNA, 25 bp, Artificial
  probe
  misc_feature (1)..(25): SEQ ID NO: 6402; WAN024BOQ; Start 688; Stop 712
ttgggctctttaggtagtgtatttg

SEQ ID NO: 437445 - DNA, 25 bp, Artificial
  probe
  misc_feature (1)..(25): SEQ ID NO: 6403; WAN024BYJ; Start 166; Stop 190
gcaacagaaggtgactacattatca

SEQ ID NO: 437446 - DNA, 25 bp, Artificial
  probe
  misc_feature (1)..(25): SEQ ID NO: 6403; WAN024BYJ; Start 97; Stop 121
gtacggattgattacgcagacttaa

SEQ ID NO: 437447 - DNA, 25 bp, Artificial
  probe
  misc_feature (1)..(25): SEQ ID NO: 6403; WAN024BYJ; Start 167; Stop 191
caacagaaggtgactacattatcaa

SEQ ID NO: 437448 - DNA, 25 bp, Artificial
  probe
  misc_feature (1)..(25): SEQ ID NO: 6403; WAN024BYJ; Start 96; Stop 120
agtacggattgattacgcagactta

SEQ ID NO: 437449 - DNA, 25 bp, Artificial
  probe
  misc_feature (1)..(25): SEQ ID NO: 6403; WAN024BYJ; Start 165; Stop 189
tgcaacagaaggtgactacattatc

SEQ ID NO: 437450 - DNA, 25 bp, Artificial
  probe
  misc_feature (1)..(25): SEQ ID NO: 6403; WAN024BYJ; Start 98; Stop 122
tacggattgattacgcagacttaaa

SEQ ID NO: 437451 - DNA, 25 bp, Artificial
  probe
  misc_feature (1)..(25): SEQ ID NO: 6403; WAN024BYJ; Start 171; Stop 195
agaaggtgactacattatcaaaggc

SEQ ID NO: 437452 - DNA, 25 bp, Artificial
  probe
  misc_feature (1)..(25): SEQ ID NO: 6403; WAN024BYJ; Start 170; Stop 194
cagaaggtgactacattatcaaagg

SEQ ID NO: 437453 - DNA, 25 bp, Artificial
  probe
  misc_feature (1)..(25): SEQ ID NO: 6403; WAN024BYJ; Start 169; Stop 193
acagaaggtgactacattatcaaag

SEQ ID NO: 437454 - DNA, 25 bp, Artificial
  probe
  misc_feature (1)..(25): SEQ ID NO: 6403; WAN024BYJ; Start 199; Stop 223
caaggagaatattatccatgcaagc

SEQ ID NO: 437455 - DNA, 25 bp, Artificial
  probe
  misc_feature (1)..(25): SEQ ID NO: 6403; WAN024BYJ; Start 95; Stop 119
cagtacggattgattacgcagactt

SEQ ID NO: 437456 - DNA, 25 bp, Artificial
  probe
  misc_feature (1)..(25): SEQ ID NO: 6403; WAN024BYJ; Start 172; Stop 196
gaaggtgactacattatcaaaggcg

SEQ ID NO: 437457 - DNA, 25 bp, Artificial
  probe
  misc_feature (1)..(25): SEQ ID NO: 6403; WAN024BYJ; Start 200; Stop 224
aaggagaatattatccatgcaagcc

SEQ ID NO: 437458 - DNA, 25 bp, Artificial
  probe
  misc_feature (1)..(25): SEQ ID NO: 6403; WAN024BYJ; Start 168; Stop 192
aacagaaggtgactacattatcaaa

SEQ ID NO: 437459 - DNA, 25 bp, Artificial
  probe
  misc_feature (1)..(25): SEQ ID NO: 6403; WAN024BYJ; Start 173; Stop 197
aaggtgactacattatcaaaggcgt

SEQ ID NO: 437460 - DNA, 25 bp, Artificial
  probe
  misc_feature (1)..(25): SEQ ID NO: 6403; WAN024BYJ; Start 194; Stop 218
gcgtgcaaggagaatattatccatg

SEQ ID NO: 437461 - DNA, 25 bp, Artificial
  probe
  misc_feature (1)..(25): SEQ ID NO: 6403; WAN024BYJ; Start 88; Stop 112
ttagatccagtacggattgattacg

SEQ ID NO: 437462 - DNA, 25 bp, Artificial
  probe
  misc_feature (1)..(25): SEQ ID NO: 6403; WAN024BYJ; Start 85; Stop 109
ggattagatccagtacggattgatt

SEQ ID NO: 437463 - DNA, 25 bp, Artificial
  probe
  misc_feature (1)..(25): SEQ ID NO: 6403; WAN024BYJ; Start 198; Stop 222
gcaaggagaatattatccatgcaag

SEQ ID NO: 437464 - DNA, 25 bp, Artificial
  probe
  misc_feature (1)..(25): SEQ ID NO: 6403; WAN024BYJ; Start 190; Stop 214
aaaggcgtgcaaggagaatattatc

SEQ ID NO: 437465 - DNA, 25 bp, Artificial
  probe
  misc_feature (1)..(25): SEQ ID NO: 6403; WAN024BYJ; Start 174; Stop 198
aggtgactacattatcaaaggcgtg

SEQ ID NO: 437466 - DNA, 25 bp, Artificial
  probe
  misc_feature (1)..(25): SEQ ID NO: 6403; WAN024BYJ; Start 189; Stop 213
caaaggcgtgcaaggagaatattat

SEQ ID NO: 437467 - DNA, 25 bp, Artificial
  probe
  misc_feature (1)..(25): SEQ ID NO: 6403; WAN024BYJ; Start 142; Stop 166
gaaacgcttgaaggattgatggttg

SEQ ID NO: 437468 - DNA, 25 bp, Artificial
  probe
  misc_feature (1)..(25): SEQ ID NO: 6403; WAN024BYJ; Start 201; Stop 225
aggagaatattatccatgcaagccg

SEQ ID NO: 437469 - DNA, 25 bp, Artificial
  probe
  misc_feature (1)..(25): SEQ ID NO: 6403; WAN024BYJ; Start 99; Stop 123
acggattgattacgcagacttaaaa

SEQ ID NO: 437470 - DNA, 25 bp, Artificial
  probe
  misc_feature (1)..(25): SEQ ID NO: 6403; WAN024BYJ; Start 191; Stop 215
aaggcgtgcaaggagaatattatcc

SEQ ID NO: 437471 - DNA, 25 bp, Artificial
  probe
  misc_feature (1)..(25): SEQ ID NO: 6403; WAN024BYJ; Start 186; Stop 210
tatcaaaggcgtgcaaggagaatat

SEQ ID NO: 437472 - DNA, 25 bp, Artificial
  probe
  misc_feature (1)..(25): SEQ ID NO: 6403; WAN024BYJ; Start 89; Stop 113
tagatccagtacggattgattacgc

SEQ ID NO: 437473 - DNA, 25 bp, Artificial
  probe
  misc_feature (1)..(25): SEQ ID NO: 6403; WAN024BYJ; Start 87; Stop 111
attagatccagtacggattgattac

SEQ ID NO: 437474 - DNA, 25 bp, Artificial
  probe
  misc_feature (1)..(25): SEQ ID NO: 6403; WAN024BYJ; Start 164; Stop 188
ttgcaacagaaggtgactacattat

SEQ ID NO: 437475 - DNA, 25 bp, Artificial
  probe
  misc_feature (1)..(25): SEQ ID NO: 6403; WAN024BYJ; Start 193; Stop 217
ggcgtgcaaggagaatattatccat

SEQ ID NO: 437476 - DNA, 25 bp, Artificial
  probe
  misc_feature (1)..(25): SEQ ID NO: 6403; WAN024BYJ; Start 188; Stop 212
tcaaaggcgtgcaaggagaatatta

SEQ ID NO: 437477 - DNA, 25 bp, Artificial
  probe
  misc_feature (1)..(25): SEQ ID NO: 6403; WAN024BYJ; Start 185; Stop 209
ttatcaaaggcgtgcaaggagaata

SEQ ID NO: 437478 - DNA, 25 bp, Artificial
  probe
  misc_feature (1)..(25): SEQ ID NO: 6404; WAN024BZT; Start 60; Stop 84
tgaagatatggcagcgttagtaata

SEQ ID NO: 437479 - DNA, 25 bp, Artificial
  probe
  misc_feature (1)..(25): SEQ ID NO: 6404; WAN024BZT; Start 59; Stop 83
ttgaagatatggcagcgttagtaat

SEQ ID NO: 437480 - DNA, 25 bp, Artificial
  probe
  misc_feature (1)..(25): SEQ ID NO: 6404; WAN024BZT; Start 58; Stop 82
attgaagatatggcagcgttagtaa

SEQ ID NO: 437481 - DNA, 25 bp, Artificial
  probe
  misc_feature (1)..(25): SEQ ID NO: 6404; WAN024BZT; Start 57; Stop 81
aattgaagatatggcagcgttagta

SEQ ID NO: 437482 - DNA, 25 bp, Artificial
  probe
  misc_feature (1)..(25): SEQ ID NO: 6404; WAN024BZT; Start 61; Stop 85
gaagatatggcagcgttagtaatat

SEQ ID NO: 437483 - DNA, 25 bp, Artificial
  probe
  misc_feature (1)..(25): SEQ ID NO: 6404; WAN024BZT; Start 111; Stop 135
attaactcttgacgacgcttcatat

SEQ ID NO: 437484 - DNA, 25 bp, Artificial
  probe
  misc_feature (1)..(25): SEQ ID NO: 6404; WAN024BZT; Start 110; Stop 134
aattaactcttgacgacgcttcata

SEQ ID NO: 437485 - DNA, 25 bp, Artificial
  probe
  misc_feature (1)..(25): SEQ ID NO: 6404; WAN024BZT; Start 109; Stop 133
gaattaactcttgacgacgcttcat

SEQ ID NO: 437486 - DNA, 25 bp, Artificial
  probe
  misc_feature (1)..(25): SEQ ID NO: 6404; WAN024BZT; Start 194; Stop 218
agttagataagttagctgaagcaca

SEQ ID NO: 437487 - DNA, 25 bp, Artificial
  probe
  misc_feature (1)..(25): SEQ ID NO: 6404; WAN024BZT; Start 375; Stop 399
attgaatgagaatcacgaaggtgtt

SEQ ID NO: 437488 - DNA, 25 bp, Artificial
  probe
  misc_feature (1)..(25): SEQ ID NO: 6404; WAN024BZT; Start 192; Stop 216
tgagttagataagttagctgaagca

SEQ ID NO: 437489 - DNA, 25 bp, Artificial
  probe
  misc_feature (1)..(25): SEQ ID NO: 6404; WAN024BZT; Start 107; Stop 131
ctgaattaactcttgacgacgcttc

SEQ ID NO: 437490 - DNA, 25 bp, Artificial
  probe
  misc_feature (1)..(25): SEQ ID NO: 6404; WAN024BZT; Start 193; Stop 217
gagttagataagttagctgaagcac

SEQ ID NO: 437491 - DNA, 25 bp, Artificial
  probe
  misc_feature (1)..(25): SEQ ID NO: 6404; WAN024BZT; Start 182; Stop 206
tgacaggaattgagttagataagtt

SEQ ID NO: 437492 - DNA, 25 bp, Artificial
  probe
  misc_feature (1)..(25): SEQ ID NO: 6404; WAN024BZT; Start 195; Stop 219
gttagataagttagctgaagcacaa

SEQ ID NO: 437493 - DNA, 25 bp, Artificial
  probe
  misc_feature (1)..(25): SEQ ID NO: 6404; WAN024BZT; Start 181; Stop 205
atgacaggaattgagttagataagt

SEQ ID NO: 437494 - DNA, 25 bp, Artificial
  probe
  misc_feature (1)..(25): SEQ ID NO: 6404; WAN024BZT; Start 372; Stop 396
aagattgaatgagaatcacgaaggt

SEQ ID NO: 437495 - DNA, 25 bp, Artificial
  probe
  misc_feature (1)..(25): SEQ ID NO: 6404; WAN024BZT; Start 191; Stop 215
ttgagttagataagttagctgaagc

SEQ ID NO: 437496 - DNA, 25 bp, Artificial
  probe
  misc_feature (1)..(25): SEQ ID NO: 6404; WAN024BZT; Start 373; Stop 397
agattgaatgagaatcacgaaggtg

SEQ ID NO: 437497 - DNA, 25 bp, Artificial
  probe
  misc_feature (1)..(25): SEQ ID NO: 6404; WAN024BZT; Start 185; Stop 209
caggaattgagttagataagttagc

SEQ ID NO: 437498 - DNA, 25 bp, Artificial
  probe
  misc_feature (1)..(25): SEQ ID NO: 6404; WAN024BZT; Start 62; Stop 86
aagatatggcagcgttagtaatatt

SEQ ID NO: 437499 - DNA, 25 bp, Artificial
  probe
  misc_feature (1)..(25): SEQ ID NO: 6404; WAN024BZT; Start 101; Stop 125
attaccctgaattaactcttgacga

SEQ ID NO: 437500 - DNA, 25 bp, Artificial
  probe
  misc_feature (1)..(25): SEQ ID NO: 6404; WAN024BZT; Start 374; Stop 398
gattgaatgagaatcacgaaggtgt

SEQ ID NO: 437501 - DNA, 25 bp, Artificial
  probe
  misc_feature (1)..(25): SEQ ID NO: 6404; WAN024BZT; Start 102; Stop 126
ttaccctgaattaactcttgacgac

SEQ ID NO: 437502 - DNA, 25 bp, Artificial
  probe
  misc_feature (1)..(25): SEQ ID NO: 6404; WAN024BZT; Start 389; Stop 413
acgaaggtgtttgtaatgtatttct

SEQ ID NO: 437503 - DNA, 25 bp, Artificial
  probe
  misc_feature (1)..(25): SEQ ID NO: 6404; WAN024BZT; Start 128; Stop 152
cttcatatgcaattcaacgtgtact

SEQ ID NO: 437504 - DNA, 25 bp, Artificial
  probe
  misc_feature (1)..(25): SEQ ID NO: 6404; WAN024BZT; Start 100; Stop 124
tattaccctgaattaactcttgacg

SEQ ID NO: 437505 - DNA, 25 bp, Artificial
  probe
  misc_feature (1)..(25): SEQ ID NO: 6404; WAN024BZT; Start 130; Stop 154
tcatatgcaattcaacgtgtactaa

SEQ ID NO: 437506 - DNA, 25 bp, Artificial
  probe
  misc_feature (1)..(25): SEQ ID NO: 6404; WAN024BZT; Start 129; Stop 153
ttcatatgcaattcaacgtgtacta

SEQ ID NO: 437507 - DNA, 25 bp, Artificial
  probe
  misc_feature (1)..(25): SEQ ID NO: 6404; WAN024BZT; Start 106; Stop 130
cctgaattaactcttgacgacgctt

SEQ ID NO: 437508 - DNA, 25 bp, Artificial
  probe
  misc_feature (1)..(25): SEQ ID NO: 6404; WAN024BZT; Start 273; Stop 297
gattgatgaagtaatcgtcttatcg

SEQ ID NO: 437509 - DNA, 25 bp, Artificial
  probe
  misc_feature (1)..(25): SEQ ID NO: 6404; WAN024BZT; Start 127; Stop 151
gcttcatatgcaattcaacgtgtac

SEQ ID NO: 437510 - DNA, 25 bp, Artificial
  probe
  misc_feature (1)..(25): SEQ ID NO: 6404; WAN024BZT; Start 160; Stop 184
cgtgaagttcagaatgtaattatga

SEQ ID NO: 437511 - DNA, 25 bp, Artificial
  probe
  misc_feature (1)..(25): SEQ ID NO: 6405; WAN024BPG; Start 708; Stop 732
attaccatcagcattagaaggaagc

SEQ ID NO: 437512 - DNA, 25 bp, Artificial
  probe
  misc_feature (1)..(25): SEQ ID NO: 6405; WAN024BPG; Start 893; Stop 917
aagagtgtggaattagtgttgagag

SEQ ID NO: 437513 - DNA, 25 bp, Artificial
  probe
  misc_feature (1)..(25): SEQ ID NO: 6405; WAN024BPG; Start 895; Stop 919
gagtgtggaattagtgttgagagtt

SEQ ID NO: 437514 - DNA, 25 bp, Artificial
  probe
  misc_feature (1)..(25): SEQ ID NO: 6405; WAN024BPG; Start 192; Stop 216
tatctctaagttgaaggaaggcgat

SEQ ID NO: 437515 - DNA, 25 bp, Artificial
  probe
  misc_feature (1)..(25): SEQ ID NO: 6405; WAN024BPG; Start 707; Stop 731
aattaccatcagcattagaaggaag

SEQ ID NO: 437516 - DNA, 25 bp, Artificial
  probe
  misc_feature (1)..(25): SEQ ID NO: 6405; WAN024BPG; Start 706; Stop 730
gaattaccatcagcattagaaggaa

SEQ ID NO: 437517 - DNA, 25 bp, Artificial
  probe
  misc_feature (1)..(25): SEQ ID NO: 6405; WAN024BPG; Start 412; Stop 436
gctgatggtcttattgctcataatc

SEQ ID NO: 437518 - DNA, 25 bp, Artificial
  probe
  misc_feature (1)..(25): SEQ ID NO: 6405; WAN024BPG; Start 894; Stop 918
agagtgtggaattagtgttgagagt

SEQ ID NO: 437519 - DNA, 25 bp, Artificial
  probe
  misc_feature (1)..(25): SEQ ID NO: 6405; WAN024BPG; Start 705; Stop 729
tgaattaccatcagcattagaagga

SEQ ID NO: 437520 - DNA, 25 bp, Artificial
  probe
  misc_feature (1)..(25): SEQ ID NO: 6405; WAN024BPG; Start 191; Stop 215
ctatctctaagttgaaggaaggcga

SEQ ID NO: 437521 - DNA, 25 bp, Artificial
  probe
  misc_feature (1)..(25): SEQ ID NO: 6405; WAN024BPG; Start 413; Stop 437
ctgatggtcttattgctcataatcc

SEQ ID NO: 437522 - DNA, 25 bp, Artificial
  probe
  misc_feature (1)..(25): SEQ ID NO: 6405; WAN024BPG; Start 112; Stop 136
ttgttattgatggtagatgattggt

SEQ ID NO: 437523 - DNA, 25 bp, Artificial
  probe
  misc_feature (1)..(25): SEQ ID NO: 6405; WAN024BPG; Start 949; Stop 973
ttgtctcaagaagagtatcaggatt

SEQ ID NO: 437524 - DNA, 25 bp, Artificial
  probe
  misc_feature (1)..(25): SEQ ID NO: 6405; WAN024BPG; Start 377; Stop 401
gtgttcatcttcaagagtcaagtct

SEQ ID NO: 437525 - DNA, 25 bp, Artificial
  probe
  misc_feature (1)..(25): SEQ ID NO: 6405; WAN024BPG; Start 373; Stop 397
attcgtgttcatcttcaagagtcaa

SEQ ID NO: 437526 - DNA, 25 bp, Artificial
  probe
  misc_feature (1)..(25): SEQ ID NO: 6405; WAN024BPG; Start 372; Stop 396
aattcgtgttcatcttcaagagtca

SEQ ID NO: 437527 - DNA, 25 bp, Artificial
  probe
  misc_feature (1)..(25): SEQ ID NO: 6405; WAN024BPG; Start 704; Stop 728
atgaattaccatcagcattagaagg

SEQ ID NO: 437528 - DNA, 25 bp, Artificial
  probe
  misc_feature (1)..(25): SEQ ID NO: 6405; WAN024BPG; Start 418; Stop 442
ggtcttattgctcataatccagtta

SEQ ID NO: 437529 - DNA, 25 bp, Artificial
  probe
  misc_feature (1)..(25): SEQ ID NO: 6405; WAN024BPG; Start 374; Stop 398
ttcgtgttcatcttcaagagtcaag

SEQ ID NO: 437530 - DNA, 25 bp, Artificial
  probe
  misc_feature (1)..(25): SEQ ID NO: 6405; WAN024BPG; Start 188; Stop 212
aagctatctctaagttgaaggaagg

SEQ ID NO: 437531 - DNA, 25 bp, Artificial
  probe
  misc_feature (1)..(25): SEQ ID NO: 6405; WAN024BPG; Start 113; Stop 137
tgttattgatggtagatgattggta

SEQ ID NO: 437532 - DNA, 25 bp, Artificial
  probe
  misc_feature (1)..(25): SEQ ID NO: 6405; WAN024BPG; Start 376; Stop 400
cgtgttcatcttcaagagtcaagtc

SEQ ID NO: 437533 - DNA, 25 bp, Artificial
  probe
  misc_feature (1)..(25): SEQ ID NO: 6405; WAN024BPG; Start 417; Stop 441
tggtcttattgctcataatccagtt

SEQ ID NO: 437534 - DNA, 25 bp, Artificial
  probe
  misc_feature (1)..(25): SEQ ID NO: 6405; WAN024BPG; Start 416; Stop 440
atggtcttattgctcataatccagt

SEQ ID NO: 437535 - DNA, 25 bp, Artificial
  probe
  misc_feature (1)..(25): SEQ ID NO: 6405; WAN024BPG; Start 414; Stop 438
tgatggtcttattgctcataatcca

SEQ ID NO: 437536 - DNA, 25 bp, Artificial
  probe
  misc_feature (1)..(25): SEQ ID NO: 6405; WAN024BPG; Start 209; Stop 233
aaggcgatcagctacttattcaatt

SEQ ID NO: 437537 - DNA, 25 bp, Artificial
  probe
  misc_feature (1)..(25): SEQ ID NO: 6405; WAN024BPG; Start 193; Stop 217
atctctaagttgaaggaaggcgatc

SEQ ID NO: 437538 - DNA, 25 bp, Artificial
  probe
  misc_feature (1)..(25): SEQ ID NO: 6405; WAN024BPG; Start 415; Stop 439
gatggtcttattgctcataatccag

SEQ ID NO: 437539 - DNA, 25 bp, Artificial
  probe
  misc_feature (1)..(25): SEQ ID NO: 6405; WAN024BPG; Start 375; Stop 399
tcgtgttcatcttcaagagtcaagt

SEQ ID NO: 437540 - DNA, 25 bp, Artificial
  probe
  misc_feature (1)..(25): SEQ ID NO: 6405; WAN024BPG; Start 208; Stop 232
gaaggcgatcagctacttattcaat

SEQ ID NO: 437541 - DNA, 25 bp, Artificial
  probe
  misc_feature (1)..(25): SEQ ID NO: 6405; WAN024BPG; Start 239; Stop 263
tgcttcatcatagtttctttacgac

SEQ ID NO: 437542 - DNA, 25 bp, Artificial
  probe
  misc_feature (1)..(25): SEQ ID NO: 6405; WAN024BPG; Start 956; Stop 980
aagaagagtatcaggatttggtcaa

SEQ ID NO: 437543 - DNA, 25 bp, Artificial
  probe
  misc_feature (1)..(25): SEQ ID NO: 6405; WAN024BPG; Start 433; Stop 457
aatccagttatgaaatcagtgcttg

SEQ ID NO: 437544 - DNA, 25 bp, Artificial
  probe
  misc_feature (1)..(25): SEQ ID NO: 6406; WAN024B3X; Start 68; Stop 92
atcataaacaccttcaaatcgttct

SEQ ID NO: 437545 - DNA, 25 bp, Artificial
  probe
  misc_feature (1)..(25): SEQ ID NO: 6406; WAN024B3X; Start 69; Stop 93
tcataaacaccttcaaatcgttcta

SEQ ID NO: 437546 - DNA, 25 bp, Artificial
  probe
  misc_feature (1)..(25): SEQ ID NO: 6406; WAN024B3X; Start 67; Stop 91
tatcataaacaccttcaaatcgttc

SEQ ID NO: 437547 - DNA, 25 bp, Artificial
  probe
  misc_feature (1)..(25): SEQ ID NO: 6406; WAN024B3X; Start 65; Stop 89
aatatcataaacaccttcaaatcgt

SEQ ID NO: 437548 - DNA, 25 bp, Artificial
  probe
  misc_feature (1)..(25): SEQ ID NO: 6406; WAN024B3X; Start 66; Stop 90
atatcataaacaccttcaaatcgtt

SEQ ID NO: 437549 - DNA, 25 bp, Artificial
  probe
  misc_feature (1)..(25): SEQ ID NO: 6406; WAN024B3X; Start 55; Stop 79
cgtacagctaaatatcataaacacc

SEQ ID NO: 437550 - DNA, 25 bp, Artificial
  probe
  misc_feature (1)..(25): SEQ ID NO: 6406; WAN024B3X; Start 59; Stop 83
cagctaaatatcataaacaccttca

SEQ ID NO: 437551 - DNA, 25 bp, Artificial
  probe
  misc_feature (1)..(25): SEQ ID NO: 6406; WAN024B3X; Start 58; Stop 82
acagctaaatatcataaacaccttc

SEQ ID NO: 437552 - DNA, 25 bp, Artificial
  probe
  misc_feature (1)..(25): SEQ ID NO: 6406; WAN024B3X; Start 64; Stop 88
aaatatcataaacaccttcaaatcg

SEQ ID NO: 437553 - DNA, 25 bp, Artificial
  probe
  misc_feature (1)..(25): SEQ ID NO: 6406; WAN024B3X; Start 54; Stop 78
tcgtacagctaaatatcataaacac

SEQ ID NO: 437554 - DNA, 25 bp, Artificial
  probe
  misc_feature (1)..(25): SEQ ID NO: 6406; WAN024B3X; Start 53; Stop 77
ctcgtacagctaaatatcataaaca

SEQ ID NO: 437555 - DNA, 25 bp, Artificial
  probe
  misc_feature (1)..(25): SEQ ID NO: 6406; WAN024B3X; Start 56; Stop 80
gtacagctaaatatcataaacacct

SEQ ID NO: 437556 - DNA, 25 bp, Artificial
  probe
  misc_feature (1)..(25): SEQ ID NO: 6406; WAN024B3X; Start 61; Stop 85
gctaaatatcataaacaccttcaaa

SEQ ID NO: 437557 - DNA, 25 bp, Artificial
  probe
  misc_feature (1)..(25): SEQ ID NO: 6406; WAN024B3X; Start 60; Stop 84
agctaaatatcataaacaccttcaa

SEQ ID NO: 437558 - DNA, 25 bp, Artificial
  probe
  misc_feature (1)..(25): SEQ ID NO: 6406; WAN024B3X; Start 57; Stop 81
tacagctaaatatcataaacacctt

SEQ ID NO: 437559 - DNA, 25 bp, Artificial
  probe
  misc_feature (1)..(25): SEQ ID NO: 6407; WAN024DM7; Start 480; Stop 504
ctggcttaacaatggctggtattaa

SEQ ID NO: 437560 - DNA, 25 bp, Artificial
  probe
  misc_feature (1)..(25): SEQ ID NO: 6407; WAN024DM7; Start 479; Stop 503
tctggcttaacaatggctggtatta

SEQ ID NO: 437561 - DNA, 25 bp, Artificial
  probe
  misc_feature (1)..(25): SEQ ID NO: 6407; WAN024DM7; Start 478; Stop 502
ttctggcttaacaatggctggtatt

SEQ ID NO: 437562 - DNA, 25 bp, Artificial
  probe
  misc_feature (1)..(25): SEQ ID NO: 6407; WAN024DM7; Start 314; Stop 338
cagtagcagaaactccagtagtaag

SEQ ID NO: 437563 - DNA, 25 bp, Artificial
  probe
  misc_feature (1)..(25): SEQ ID NO: 6407; WAN024DM7; Start 437; Stop 461
gttatatcggacgttacggttcatg

SEQ ID NO: 437564 - DNA, 25 bp, Artificial
  probe
  misc_feature (1)..(25): SEQ ID NO: 6407; WAN024DM7; Start 317; Stop 341
tagcagaaactccagtagtaagtga

SEQ ID NO: 437565 - DNA, 25 bp, Artificial
  probe
  misc_feature (1)..(25): SEQ ID NO: 6407; WAN024DM7; Start 316; Stop 340
gtagcagaaactccagtagtaagtg

SEQ ID NO: 437566 - DNA, 25 bp, Artificial
  probe
  misc_feature (1)..(25): SEQ ID NO: 6407; WAN024DM7; Start 315; Stop 339
agtagcagaaactccagtagtaagt

SEQ ID NO: 437567 - DNA, 25 bp, Artificial
  probe
  misc_feature (1)..(25): SEQ ID NO: 6407; WAN024DM7; Start 318; Stop 342
agcagaaactccagtagtaagtgaa

SEQ ID NO: 437568 - DNA, 25 bp, Artificial
  probe
  misc_feature (1)..(25): SEQ ID NO: 6407; WAN024DM7; Start 313; Stop 337
ccagtagcagaaactccagtagtaa

SEQ ID NO: 437569 - DNA, 25 bp, Artificial
  probe
  misc_feature (1)..(25): SEQ ID NO: 6407; WAN024DM7; Start 438; Stop 462
ttatatcggacgttacggttcatgg

SEQ ID NO: 437570 - DNA, 25 bp, Artificial
  probe
  misc_feature (1)..(25): SEQ ID NO: 6407; WAN024DM7; Start 312; Stop 336
tccagtagcagaaactccagtagta

SEQ ID NO: 437571 - DNA, 25 bp, Artificial
  probe
  misc_feature (1)..(25): SEQ ID NO: 6407; WAN024DM7; Start 439; Stop 463
tatatcggacgttacggttcatgga

SEQ ID NO: 437572 - DNA, 25 bp, Artificial
  probe
  misc_feature (1)..(25): SEQ ID NO: 6407; WAN024DM7; Start 311; Stop 335
ctccagtagcagaaactccagtagt

SEQ ID NO: 437573 - DNA, 25 bp, Artificial
  probe
  misc_feature (1)..(25): SEQ ID NO: 6407; WAN024DM7; Start 436; Stop 460
cgttatatcggacgttacggttcat

SEQ ID NO: 437574 - DNA, 25 bp, Artificial
  probe
  misc_feature (1)..(25): SEQ ID NO: 6407; WAN024DM7; Start 142; Stop 166
gaaactcacaacacaacagttgaaa

SEQ ID NO: 437575 - DNA, 25 bp, Artificial
  probe
  misc_feature (1)..(25): SEQ ID NO: 6407; WAN024DM7; Start 440; Stop 464
atatcggacgttacggttcatggac

SEQ ID NO: 437576 - DNA, 25 bp, Artificial
  probe
  misc_feature (1)..(25): SEQ ID NO: 6407; WAN024DM7; Start 449; Stop 473
gttacggttcatggactgctgctaa

SEQ ID NO: 437577 - DNA, 25 bp, Artificial
  probe
  misc_feature (1)..(25): SEQ ID NO: 6407; WAN024DM7; Start 141; Stop 165
tgaaactcacaacacaacagttgaa

SEQ ID NO: 437578 - DNA, 25 bp, Artificial
  probe
  misc_feature (1)..(25): SEQ ID NO: 6407; WAN024DM7; Start 450; Stop 474
ttacggttcatggactgctgctaaa

SEQ ID NO: 437579 - DNA, 25 bp, Artificial
  probe
  misc_feature (1)..(25): SEQ ID NO: 6407; WAN024DM7; Start 140; Stop 164
ctgaaactcacaacacaacagttga

SEQ ID NO: 437580 - DNA, 25 bp, Artificial
  probe
  misc_feature (1)..(25): SEQ ID NO: 6407; WAN024DM7; Start 310; Stop 334
gctccagtagcagaaactccagtag

SEQ ID NO: 437581 - DNA, 25 bp, Artificial
  probe
  misc_feature (1)..(25): SEQ ID NO: 6407; WAN024DM7; Start 143; Stop 167
aaactcacaacacaacagttgaaaa

SEQ ID NO: 437582 - DNA, 25 bp, Artificial
  probe
  misc_feature (1)..(25): SEQ ID NO: 6407; WAN024DM7; Start 139; Stop 163
gctgaaactcacaacacaacagttg

SEQ ID NO: 437583 - DNA, 25 bp, Artificial
  probe
  misc_feature (1)..(25): SEQ ID NO: 6407; WAN024DM7; Start 305; Stop 329
tttcagctccagtagcagaaactcc

SEQ ID NO: 437584 - DNA, 25 bp, Artificial
  probe
  misc_feature (1)..(25): SEQ ID NO: 6407; WAN024DM7; Start 451; Stop 475
tacggttcatggactgctgctaaaa

SEQ ID NO: 437585 - DNA, 25 bp, Artificial
  probe
  misc_feature (1)..(25): SEQ ID NO: 6407; WAN024DM7; Start 138; Stop 162
cgctgaaactcacaacacaacagtt

SEQ ID NO: 437586 - DNA, 25 bp, Artificial
  probe
  misc_feature (1)..(25): SEQ ID NO: 6407; WAN024DM7; Start 309; Stop 333
agctccagtagcagaaactccagta

SEQ ID NO: 437587 - DNA, 25 bp, Artificial
  probe
  misc_feature (1)..(25): SEQ ID NO: 6407; WAN024DM7; Start 298; Stop 322
gaaactgtttcagctccagtagcag

SEQ ID NO: 437588 - DNA, 25 bp, Artificial
  probe
  misc_feature (1)..(25): SEQ ID NO: 6407; WAN024DM7; Start 301; Stop 325
actgtttcagctccagtagcagaaa

SEQ ID NO: 437589 - DNA, 25 bp, Artificial
  probe
  misc_feature (1)..(25): SEQ ID NO: 6407; WAN024DM7; Start 300; Stop 324
aactgtttcagctccagtagcagaa

SEQ ID NO: 437590 - DNA, 25 bp, Artificial
  probe
  misc_feature (1)..(25): SEQ ID NO: 6407; WAN024DM7; Start 299; Stop 323
aaactgtttcagctccagtagcaga

SEQ ID NO: 437591 - DNA, 25 bp, Artificial
  probe
  misc_feature (1)..(25): SEQ ID NO: 6407; WAN024DM7; Start 295; Stop 319
gatgaaactgtttcagctccagtag

SEQ ID NO: 437592 - DNA, 25 bp, Artificial
  probe
  misc_feature (1)..(25): SEQ ID NO: 6408; WAN024CVE; Start 1605; Stop 1629
ggttcttacttctaatacggatggt

SEQ ID NO: 437593 - DNA, 25 bp, Artificial
  probe
  misc_feature (1)..(25): SEQ ID NO: 6408; WAN024CVE; Start 1604; Stop 1628
tggttcttacttctaatacggatgg

SEQ ID NO: 437594 - DNA, 25 bp, Artificial
  probe
  misc_feature (1)..(25): SEQ ID NO: 6408; WAN024CVE; Start 1600; Stop 1624
gcaatggttcttacttctaatacgg

SEQ ID NO: 437595 - DNA, 25 bp, Artificial
  probe
  misc_feature (1)..(25): SEQ ID NO: 6408; WAN024CVE; Start 1608; Stop 1632
tcttacttctaatacggatggtcaa

SEQ ID NO: 437596 - DNA, 25 bp, Artificial
  probe
  misc_feature (1)..(25): SEQ ID NO: 6408; WAN024CVE; Start 1607; Stop 1631
ttcttacttctaatacggatggtca

SEQ ID NO: 437597 - DNA, 25 bp, Artificial
  probe
  misc_feature (1)..(25): SEQ ID NO: 6408; WAN024CVE; Start 1599; Stop 1623
agcaatggttcttacttctaatacg

SEQ ID NO: 437598 - DNA, 25 bp, Artificial
  probe
  misc_feature (1)..(25): SEQ ID NO: 6408; WAN024CVE; Start 1606; Stop 1630
gttcttacttctaatacggatggtc

SEQ ID NO: 437599 - DNA, 25 bp, Artificial
  probe
  misc_feature (1)..(25): SEQ ID NO: 6408; WAN024CVE; Start 132; Stop 156
aacaatccataagttactgctctca

SEQ ID NO: 437600 - DNA, 25 bp, Artificial
  probe
  misc_feature (1)..(25): SEQ ID NO: 6408; WAN024CVE; Start 1601; Stop 1625
caatggttcttacttctaatacgga

SEQ ID NO: 437601 - DNA, 25 bp, Artificial
  probe
  misc_feature (1)..(25): SEQ ID NO: 6408; WAN024CVE; Start 1517; Stop 1541
tagtagatcaagcacagcaagaata

SEQ ID NO: 437602 - DNA, 25 bp, Artificial
  probe
  misc_feature (1)..(25): SEQ ID NO: 6408; WAN024CVE; Start 1520; Stop 1544
tagatcaagcacagcaagaatacaa

SEQ ID NO: 437603 - DNA, 25 bp, Artificial
  probe
  misc_feature (1)..(25): SEQ ID NO: 6408; WAN024CVE; Start 1516; Stop 1540
ctagtagatcaagcacagcaagaat

SEQ ID NO: 437604 - DNA, 25 bp, Artificial
  probe
  misc_feature (1)..(25): SEQ ID NO: 6408; WAN024CVE; Start 1128; Stop 1152
taattggacatatacttggagtggt

SEQ ID NO: 437605 - DNA, 25 bp, Artificial
  probe
  misc_feature (1)..(25): SEQ ID NO: 6408; WAN024CVE; Start 1609; Stop 1633
cttacttctaatacggatggtcaat

SEQ ID NO: 437606 - DNA, 25 bp, Artificial
  probe
  misc_feature (1)..(25): SEQ ID NO: 6408; WAN024CVE; Start 1603; Stop 1627
atggttcttacttctaatacggatg

SEQ ID NO: 437607 - DNA, 25 bp, Artificial
  probe
  misc_feature (1)..(25): SEQ ID NO: 6408; WAN024CVE; Start 1518; Stop 1542
agtagatcaagcacagcaagaatac

SEQ ID NO: 437608 - DNA, 25 bp, Artificial
  probe
  misc_feature (1)..(25): SEQ ID NO: 6408; WAN024CVE; Start 1522; Stop 1546
gatcaagcacagcaagaatacaatg

SEQ ID NO: 437609 - DNA, 25 bp, Artificial
  probe
  misc_feature (1)..(25): SEQ ID NO: 6408; WAN024CVE; Start 1521; Stop 1545
agatcaagcacagcaagaatacaat

SEQ ID NO: 437610 - DNA, 25 bp, Artificial
  probe
  misc_feature (1)..(25): SEQ ID NO: 6408; WAN024CVE; Start 405; Stop 429
gtatcgtattcgtgaggatagaaca

SEQ ID NO: 437611 - DNA, 25 bp, Artificial
  probe
  misc_feature (1)..(25): SEQ ID NO: 6408; WAN024CVE; Start 404; Stop 428
tgtatcgtattcgtgaggatagaac

SEQ ID NO: 437612 - DNA, 25 bp, Artificial
  probe
  misc_feature (1)..(25): SEQ ID NO: 6408; WAN024CVE; Start 403; Stop 427
gtgtatcgtattcgtgaggatagaa

SEQ ID NO: 437613 - DNA, 25 bp, Artificial
  probe
  misc_feature (1)..(25): SEQ ID NO: 6408; WAN024CVE; Start 1519; Stop 1543
gtagatcaagcacagcaagaataca

SEQ ID NO: 437614 - DNA, 25 bp, Artificial
  probe
  misc_feature (1)..(25): SEQ ID NO: 6408; WAN024CVE; Start 1611; Stop 1635
tacttctaatacggatggtcaattc

SEQ ID NO: 437615 - DNA, 25 bp, Artificial
  probe
  misc_feature (1)..(25): SEQ ID NO: 6408; WAN024CVE; Start 402; Stop 426
tgtgtatcgtattcgtgaggataga

SEQ ID NO: 437616 - DNA, 25 bp, Artificial
  probe
  misc_feature (1)..(25): SEQ ID NO: 6408; WAN024CVE; Start 401; Stop 425
gtgtgtatcgtattcgtgaggatag

SEQ ID NO: 437617 - DNA, 25 bp, Artificial
  probe
  misc_feature (1)..(25): SEQ ID NO: 6408; WAN024CVE; Start 406; Stop 430
tatcgtattcgtgaggatagaacaa

SEQ ID NO: 437618 - DNA, 25 bp, Artificial
  probe
  misc_feature (1)..(25): SEQ ID NO: 6408; WAN024CVE; Start 138; Stop 162
ccataagttactgctctcagaagat

SEQ ID NO: 437619 - DNA, 25 bp, Artificial
  probe
  misc_feature (1)..(25): SEQ ID NO: 6408; WAN024CVE; Start 136; Stop 160
atccataagttactgctctcagaag

SEQ ID NO: 437620 - DNA, 25 bp, Artificial
  probe
  misc_feature (1)..(25): SEQ ID NO: 6408; WAN024CVE; Start 134; Stop 158
caatccataagttactgctctcaga

SEQ ID NO: 437621 - DNA, 25 bp, Artificial
  probe
  misc_feature (1)..(25): SEQ ID NO: 6408; WAN024CVE; Start 1129; Stop 1153
aattggacatatacttggagtggtc

SEQ ID NO: 437622 - DNA, 25 bp, Artificial
  probe
  misc_feature (1)..(25): SEQ ID NO: 6408; WAN024CVE; Start 142; Stop 166
aagttactgctctcagaagatgatt

SEQ ID NO: 437623 - DNA, 25 bp, Artificial
  probe
  misc_feature (1)..(25): SEQ ID NO: 6408; WAN024CVE; Start 133; Stop 157
acaatccataagttactgctctcag

SEQ ID NO: 437624 - DNA, 25 bp, Artificial
  probe
  misc_feature (1)..(25): SEQ ID NO: 6408; WAN024CVE; Start 1131; Stop 1155
ttggacatatacttggagtggtcta

SEQ ID NO: 437625 - DNA, 25 bp, Artificial
  probe
  misc_feature (1)..(25): SEQ ID NO: 6409; WAN024FKL; Start 640; Stop 664
tgtgagttagtgccaagttgttatt

SEQ ID NO: 437626 - DNA, 25 bp, Artificial
  probe
  misc_feature (1)..(25): SEQ ID NO: 6409; WAN024FKL; Start 166; Stop 190
ggtatgccaagagaggattatgaac

SEQ ID NO: 437627 - DNA, 25 bp, Artificial
  probe
  misc_feature (1)..(25): SEQ ID NO: 6409; WAN024FKL; Start 168; Stop 192
tatgccaagagaggattatgaacga

SEQ ID NO: 437628 - DNA, 25 bp, Artificial
  probe
  misc_feature (1)..(25): SEQ ID NO: 6409; WAN024FKL; Start 167; Stop 191
gtatgccaagagaggattatgaacg

SEQ ID NO: 437629 - DNA, 25 bp, Artificial
  probe
  misc_feature (1)..(25): SEQ ID NO: 6409; WAN024FKL; Start 639; Stop 663
ttgtgagttagtgccaagttgttat

SEQ ID NO: 437630 - DNA, 25 bp, Artificial
  probe
  misc_feature (1)..(25): SEQ ID NO: 6409; WAN024FKL; Start 76; Stop 100
aatgacctgacatattatgccttgg

SEQ ID NO: 437631 - DNA, 25 bp, Artificial
  probe
  misc_feature (1)..(25): SEQ ID NO: 6409; WAN024FKL; Start 424; Stop 448
cgaatgatggttcaattatctcagt

SEQ ID NO: 437632 - DNA, 25 bp, Artificial
  probe
  misc_feature (1)..(25): SEQ ID NO: 6409; WAN024FKL; Start 423; Stop 447
acgaatgatggttcaattatctcag

SEQ ID NO: 437633 - DNA, 25 bp, Artificial
  probe
  misc_feature (1)..(25): SEQ ID NO: 6409; WAN024FKL; Start 422; Stop 446
gacgaatgatggttcaattatctca

SEQ ID NO: 437634 - DNA, 25 bp, Artificial
  probe
  misc_feature (1)..(25): SEQ ID NO: 6409; WAN024FKL; Start 421; Stop 445
agacgaatgatggttcaattatctc

SEQ ID NO: 437635 - DNA, 25 bp, Artificial
  probe
  misc_feature (1)..(25): SEQ ID NO: 6409; WAN024FKL; Start 169; Stop 193
atgccaagagaggattatgaacgat

SEQ ID NO: 437636 - DNA, 25 bp, Artificial
  probe
  misc_feature (1)..(25): SEQ ID NO: 6409; WAN024FKL; Start 75; Stop 99
taatgacctgacatattatgccttg

SEQ ID NO: 437637 - DNA, 25 bp, Artificial
  probe
  misc_feature (1)..(25): SEQ ID NO: 6409; WAN024FKL; Start 170; Stop 194
tgccaagagaggattatgaacgatt

SEQ ID NO: 437638 - DNA, 25 bp, Artificial
  probe
  misc_feature (1)..(25): SEQ ID NO: 6409; WAN024FKL; Start 283; Stop 307
cgagatacttcaacaagaatagtga

SEQ ID NO: 437639 - DNA, 25 bp, Artificial
  probe
  misc_feature (1)..(25): SEQ ID NO: 6409; WAN024FKL; Start 780; Stop 804
acacagagttcctcatcaatataga

SEQ ID NO: 437640 - DNA, 25 bp, Artificial
  probe
  misc_feature (1)..(25): SEQ ID NO: 6409; WAN024FKL; Start 238; Stop 262
ttgagtgaggatacaccaggatata

SEQ ID NO: 437641 - DNA, 25 bp, Artificial
  probe
  misc_feature (1)..(25): SEQ ID NO: 6409; WAN024FKL; Start 782; Stop 806
acagagttcctcatcaatatagagt

SEQ ID NO: 437642 - DNA, 25 bp, Artificial
  probe
  misc_feature (1)..(25): SEQ ID NO: 6409; WAN024FKL; Start 241; Stop 265
agtgaggatacaccaggatatagaa

SEQ ID NO: 437643 - DNA, 25 bp, Artificial
  probe
  misc_feature (1)..(25): SEQ ID NO: 6409; WAN024FKL; Start 240; Stop 264
gagtgaggatacaccaggatataga

SEQ ID NO: 437644 - DNA, 25 bp, Artificial
  probe
  misc_feature (1)..(25): SEQ ID NO: 6409; WAN024FKL; Start 239; Stop 263
tgagtgaggatacaccaggatatag

SEQ ID NO: 437645 - DNA, 25 bp, Artificial
  probe
  misc_feature (1)..(25): SEQ ID NO: 6409; WAN024FKL; Start 784; Stop 808
agagttcctcatcaatatagagtca

SEQ ID NO: 437646 - DNA, 25 bp, Artificial
  probe
  misc_feature (1)..(25): SEQ ID NO: 6409; WAN024FKL; Start 781; Stop 805
cacagagttcctcatcaatatagag

SEQ ID NO: 437647 - DNA, 25 bp, Artificial
  probe
  misc_feature (1)..(25): SEQ ID NO: 6409; WAN024FKL; Start 783; Stop 807
cagagttcctcatcaatatagagtc

SEQ ID NO: 437648 - DNA, 25 bp, Artificial
  probe
  misc_feature (1)..(25): SEQ ID NO: 6409; WAN024FKL; Start 779; Stop 803
aacacagagttcctcatcaatatag

SEQ ID NO: 437649 - DNA, 25 bp, Artificial
  probe
  misc_feature (1)..(25): SEQ ID NO: 6409; WAN024FKL; Start 420; Stop 444
tagacgaatgatggttcaattatct

SEQ ID NO: 437650 - DNA, 25 bp, Artificial
  probe
  misc_feature (1)..(25): SEQ ID NO: 6409; WAN024FKL; Start 133; Stop 157
ggctttataccttgggatgatgata

SEQ ID NO: 437651 - DNA, 25 bp, Artificial
  probe
  misc_feature (1)..(25): SEQ ID NO: 6409; WAN024FKL; Start 277; Stop 301
gtgattcgagatacttcaacaagaa

SEQ ID NO: 437652 - DNA, 25 bp, Artificial
  probe
  misc_feature (1)..(25): SEQ ID NO: 6409; WAN024FKL; Start 276; Stop 300
tgtgattcgagatacttcaacaaga

SEQ ID NO: 437653 - DNA, 25 bp, Artificial
  probe
  misc_feature (1)..(25): SEQ ID NO: 6409; WAN024FKL; Start 274; Stop 298
tctgtgattcgagatacttcaacaa

SEQ ID NO: 437654 - DNA, 25 bp, Artificial
  probe
  misc_feature (1)..(25): SEQ ID NO: 6409; WAN024FKL; Start 273; Stop 297
ttctgtgattcgagatacttcaaca

SEQ ID NO: 437655 - DNA, 25 bp, Artificial
  probe
  misc_feature (1)..(25): SEQ ID NO: 6409; WAN024FKL; Start 785; Stop 809
gagttcctcatcaatatagagtcat

SEQ ID NO: 437656 - DNA, 25 bp, Artificial
  probe
  misc_feature (1)..(25): SEQ ID NO: 6409; WAN024FKL; Start 275; Stop 299
ctgtgattcgagatacttcaacaag

SEQ ID NO: 437657 - DNA, 25 bp, Artificial
  probe
  misc_feature (1)..(25): SEQ ID NO: 6409; WAN024FKL; Start 425; Stop 449
gaatgatggttcaattatctcagtt

SEQ ID NO: 437658 - DNA, 25 bp, Artificial
  probe
  misc_feature (1)..(25): SEQ ID NO: 6410; WAN024BTF; Start 845; Stop 869
gtgtcataggctcgtatattccata

SEQ ID NO: 437659 - DNA, 25 bp, Artificial
  probe
  misc_feature (1)..(25): SEQ ID NO: 6410; WAN024BTF; Start 875; Stop 899
taacttcaaggagagcaggagatat

SEQ ID NO: 437660 - DNA, 25 bp, Artificial
  probe
  misc_feature (1)..(25): SEQ ID NO: 6410; WAN024BTF; Start 874; Stop 898
ataacttcaaggagagcaggagata

SEQ ID NO: 437661 - DNA, 25 bp, Artificial
  probe
  misc_feature (1)..(25): SEQ ID NO: 6410; WAN024BTF; Start 869; Stop 893
ataagataacttcaaggagagcagg

SEQ ID NO: 437662 - DNA, 25 bp, Artificial
  probe
  misc_feature (1)..(25): SEQ ID NO: 6410; WAN024BTF; Start 844; Stop 868
agtgtcataggctcgtatattccat

SEQ ID NO: 437663 - DNA, 25 bp, Artificial
  probe
  misc_feature (1)..(25): SEQ ID NO: 6410; WAN024BTF; Start 15; Stop 39
aataacaggtggagcaggatacata

SEQ ID NO: 437664 - DNA, 25 bp, Artificial
  probe
  misc_feature (1)..(25): SEQ ID NO: 6410; WAN024BTF; Start 14; Stop 38
taataacaggtggagcaggatacat

SEQ ID NO: 437665 - DNA, 25 bp, Artificial
  probe
  misc_feature (1)..(25): SEQ ID NO: 6410; WAN024BTF; Start 870; Stop 894
taagataacttcaaggagagcagga

SEQ ID NO: 437666 - DNA, 25 bp, Artificial
  probe
  misc_feature (1)..(25): SEQ ID NO: 6410; WAN024BTF; Start 410; Stop 434
tgccattctatgagactaatccatt

SEQ ID NO: 437667 - DNA, 25 bp, Artificial
  probe
  misc_feature (1)..(25): SEQ ID NO: 6410; WAN024BTF; Start 409; Stop 433
atgccattctatgagactaatccat

SEQ ID NO: 437668 - DNA, 25 bp, Artificial
  probe
  misc_feature (1)..(25): SEQ ID NO: 6410; WAN024BTF; Start 13; Stop 37
ttaataacaggtggagcaggataca

SEQ ID NO: 437669 - DNA, 25 bp, Artificial
  probe
  misc_feature (1)..(25): SEQ ID NO: 6410; WAN024BTF; Start 16; Stop 40
ataacaggtggagcaggatacatag

SEQ ID NO: 437670 - DNA, 25 bp, Artificial
  probe
  misc_feature (1)..(25): SEQ ID NO: 6410; WAN024BTF; Start 846; Stop 870
tgtcataggctcgtatattccatat

SEQ ID NO: 437671 - DNA, 25 bp, Artificial
  probe
  misc_feature (1)..(25): SEQ ID NO: 6410; WAN024BTF; Start 947; Stop 971
ggaagccaaggtatgatattatgaa

SEQ ID NO: 437672 - DNA, 25 bp, Artificial
  probe
  misc_feature (1)..(25): SEQ ID NO: 6410; WAN024BTF; Start 873; Stop 897
gataacttcaaggagagcaggagat

SEQ ID NO: 437673 - DNA, 25 bp, Artificial
  probe
  misc_feature (1)..(25): SEQ ID NO: 6410; WAN024BTF; Start 26; Stop 50
gagcaggatacataggatcacatac

SEQ ID NO: 437674 - DNA, 25 bp, Artificial
  probe
  misc_feature (1)..(25): SEQ ID NO: 6410; WAN024BTF; Start 841; Stop 865
gagagtgtcataggctcgtatattc

SEQ ID NO: 437675 - DNA, 25 bp, Artificial
  probe
  misc_feature (1)..(25): SEQ ID NO: 6410; WAN024BTF; Start 838; Stop 862
ttagagagtgtcataggctcgtata

SEQ ID NO: 437676 - DNA, 25 bp, Artificial
  probe
  misc_feature (1)..(25): SEQ ID NO: 6410; WAN024BTF; Start 839; Stop 863
tagagagtgtcataggctcgtatat

SEQ ID NO: 437677 - DNA, 25 bp, Artificial
  probe
  misc_feature (1)..(25): SEQ ID NO: 6410; WAN024BTF; Start 28; Stop 52
gcaggatacataggatcacatacag

SEQ ID NO: 437678 - DNA, 25 bp, Artificial
  probe
  misc_feature (1)..(25): SEQ ID NO: 6410; WAN024BTF; Start 840; Stop 864
agagagtgtcataggctcgtatatt

SEQ ID NO: 437679 - DNA, 25 bp, Artificial
  probe
  misc_feature (1)..(25): SEQ ID NO: 6410; WAN024BTF; Start 27; Stop 51
agcaggatacataggatcacataca

SEQ ID NO: 437680 - DNA, 25 bp, Artificial
  probe
  misc_feature (1)..(25): SEQ ID NO: 6410; WAN024BTF; Start 29; Stop 53
caggatacataggatcacatacagt

SEQ ID NO: 437681 - DNA, 25 bp, Artificial
  probe
  misc_feature (1)..(25): SEQ ID NO: 6410; WAN024BTF; Start 876; Stop 900
aacttcaaggagagcaggagatatg

SEQ ID NO: 437682 - DNA, 25 bp, Artificial
  probe
  misc_feature (1)..(25): SEQ ID NO: 6410; WAN024BTF; Start 25; Stop 49
ggagcaggatacataggatcacata

SEQ ID NO: 437683 - DNA, 25 bp, Artificial
  probe
  misc_feature (1)..(25): SEQ ID NO: 6410; WAN024BTF; Start 837; Stop 861
cttagagagtgtcataggctcgtat

SEQ ID NO: 437684 - DNA, 25 bp, Artificial
  probe
  misc_feature (1)..(25): SEQ ID NO: 6410; WAN024BTF; Start 871; Stop 895
aagataacttcaaggagagcaggag

SEQ ID NO: 437685 - DNA, 25 bp, Artificial
  probe
  misc_feature (1)..(25): SEQ ID NO: 6410; WAN024BTF; Start 408; Stop 432
catgccattctatgagactaatcca

SEQ ID NO: 437686 - DNA, 25 bp, Artificial
  probe
  misc_feature (1)..(25): SEQ ID NO: 6410; WAN024BTF; Start 842; Stop 866
agagtgtcataggctcgtatattcc

SEQ ID NO: 437687 - DNA, 25 bp, Artificial
  probe
  misc_feature (1)..(25): SEQ ID NO: 6410; WAN024BTF; Start 12; Stop 36
attaataacaggtggagcaggatac

SEQ ID NO: 437688 - DNA, 25 bp, Artificial
  probe
  misc_feature (1)..(25): SEQ ID NO: 6410; WAN024BTF; Start 30; Stop 54
aggatacataggatcacatacagtt

SEQ ID NO: 437689 - DNA, 25 bp, Artificial
  probe
  misc_feature (1)..(25): SEQ ID NO: 6410; WAN024BTF; Start 843; Stop 867
gagtgtcataggctcgtatattcca

SEQ ID NO: 437690 - DNA, 25 bp, Artificial
  probe
  misc_feature (1)..(25): SEQ ID NO: 6410; WAN024BTF; Start 411; Stop 435
gccattctatgagactaatccatta

SEQ ID NO: 437691 - DNA, 25 bp, Artificial
  probe
  misc_feature (1)..(25): SEQ ID NO: 6411; WAN024BOE; Start 532; Stop 556
agtttaggaaaggagggagaagata

SEQ ID NO: 437692 - DNA, 25 bp, Artificial
  probe
  misc_feature (1)..(25): SEQ ID NO: 6411; WAN024BOE; Start 531; Stop 555
tagtttaggaaaggagggagaagat

SEQ ID NO: 437693 - DNA, 25 bp, Artificial
  probe
  misc_feature (1)..(25): SEQ ID NO: 6411; WAN024BOE; Start 530; Stop 554
atagtttaggaaaggagggagaaga

SEQ ID NO: 437694 - DNA, 25 bp, Artificial
  probe
  misc_feature (1)..(25): SEQ ID NO: 6411; WAN024BOE; Start 434; Stop 458
cagataacacaatcatgcaacagat

SEQ ID NO: 437695 - DNA, 25 bp, Artificial
  probe
  misc_feature (1)..(25): SEQ ID NO: 6411; WAN024BOE; Start 533; Stop 557
gtttaggaaaggagggagaagataa

SEQ ID NO: 437696 - DNA, 25 bp, Artificial
  probe
  misc_feature (1)..(25): SEQ ID NO: 6411; WAN024BOE; Start 535; Stop 559
ttaggaaaggagggagaagataatg

SEQ ID NO: 437697 - DNA, 25 bp, Artificial
  probe
  misc_feature (1)..(25): SEQ ID NO: 6411; WAN024BOE; Start 536; Stop 560
taggaaaggagggagaagataatgg

SEQ ID NO: 437698 - DNA, 25 bp, Artificial
  probe
  misc_feature (1)..(25): SEQ ID NO: 6411; WAN024BOE; Start 161; Stop 185
gccaagaattatacgacatcaaaga

SEQ ID NO: 437699 - DNA, 25 bp, Artificial
  probe
  misc_feature (1)..(25): SEQ ID NO: 6411; WAN024BOE; Start 181; Stop 205
aaagaggttgtagattgttggattt

SEQ ID NO: 437700 - DNA, 25 bp, Artificial
  probe
  misc_feature (1)..(25): SEQ ID NO: 6411; WAN024BOE; Start 183; Stop 207
agaggttgtagattgttggatttac

SEQ ID NO: 437701 - DNA, 25 bp, Artificial
  probe
  misc_feature (1)..(25): SEQ ID NO: 6411; WAN024BOE; Start 529; Stop 553
tatagtttaggaaaggagggagaag

SEQ ID NO: 437702 - DNA, 25 bp, Artificial
  probe
  misc_feature (1)..(25): SEQ ID NO: 6411; WAN024BOE; Start 179; Stop 203
tcaaagaggttgtagattgttggat

SEQ ID NO: 437703 - DNA, 25 bp, Artificial
  probe
  misc_feature (1)..(25): SEQ ID NO: 6411; WAN024BOE; Start 178; Stop 202
atcaaagaggttgtagattgttgga

SEQ ID NO: 437704 - DNA, 25 bp, Artificial
  probe
  misc_feature (1)..(25): SEQ ID NO: 6411; WAN024BOE; Start 177; Stop 201
catcaaagaggttgtagattgttgg

SEQ ID NO: 437705 - DNA, 25 bp, Artificial
  probe
  misc_feature (1)..(25): SEQ ID NO: 6411; WAN024BOE; Start 534; Stop 558
tttaggaaaggagggagaagataat

SEQ ID NO: 437706 - DNA, 25 bp, Artificial
  probe
  misc_feature (1)..(25): SEQ ID NO: 6411; WAN024BOE; Start 180; Stop 204
caaagaggttgtagattgttggatt

SEQ ID NO: 437707 - DNA, 25 bp, Artificial
  probe
  misc_feature (1)..(25): SEQ ID NO: 6411; WAN024BOE; Start 134; Stop 158
ctcagttgattgtccatttgctaac

SEQ ID NO: 437708 - DNA, 25 bp, Artificial
  probe
  misc_feature (1)..(25): SEQ ID NO: 6411; WAN024BOE; Start 433; Stop 457
ccagataacacaatcatgcaacaga

SEQ ID NO: 437709 - DNA, 25 bp, Artificial
  probe
  misc_feature (1)..(25): SEQ ID NO: 6411; WAN024BOE; Start 39; Stop 63
tgctgataaagagtacgacatagac

SEQ ID NO: 437710 - DNA, 25 bp, Artificial
  probe
  misc_feature (1)..(25): SEQ ID NO: 6411; WAN024BOE; Start 42; Stop 66
tgataaagagtacgacatagacctg

SEQ ID NO: 437711 - DNA, 25 bp, Artificial
  probe
  misc_feature (1)..(25): SEQ ID NO: 6411; WAN024BOE; Start 40; Stop 64
gctgataaagagtacgacatagacc

SEQ ID NO: 437712 - DNA, 25 bp, Artificial
  probe
  misc_feature (1)..(25): SEQ ID NO: 6411; WAN024BOE; Start 38; Stop 62
ttgctgataaagagtacgacataga

SEQ ID NO: 437713 - DNA, 25 bp, Artificial
  probe
  misc_feature (1)..(25): SEQ ID NO: 6411; WAN024BOE; Start 41; Stop 65
ctgataaagagtacgacatagacct

SEQ ID NO: 437714 - DNA, 25 bp, Artificial
  probe
  misc_feature (1)..(25): SEQ ID NO: 6411; WAN024BOE; Start 172; Stop 196
tacgacatcaaagaggttgtagatt

SEQ ID NO: 437715 - DNA, 25 bp, Artificial
  probe
  misc_feature (1)..(25): SEQ ID NO: 6411; WAN024BOE; Start 182; Stop 206
aagaggttgtagattgttggattta

SEQ ID NO: 437716 - DNA, 25 bp, Artificial
  probe
  misc_feature (1)..(25): SEQ ID NO: 6411; WAN024BOE; Start 171; Stop 195
atacgacatcaaagaggttgtagat

SEQ ID NO: 437717 - DNA, 25 bp, Artificial
  probe
  misc_feature (1)..(25): SEQ ID NO: 6411; WAN024BOE; Start 176; Stop 200
acatcaaagaggttgtagattgttg

SEQ ID NO: 437718 - DNA, 25 bp, Artificial
  probe
  misc_feature (1)..(25): SEQ ID NO: 6411; WAN024BOE; Start 528; Stop 552
atatagtttaggaaaggagggagaa

SEQ ID NO: 437719 - DNA, 25 bp, Artificial
  probe
  misc_feature (1)..(25): SEQ ID NO: 6411; WAN024BOE; Start 527; Stop 551
aatatagtttaggaaaggagggaga

SEQ ID NO: 437720 - DNA, 25 bp, Artificial
  probe
  misc_feature (1)..(25): SEQ ID NO: 6411; WAN024BOE; Start 34; Stop 58
tctattgctgataaagagtacgaca

SEQ ID NO: 437721 - DNA, 25 bp, Artificial
  probe
  misc_feature (1)..(25): SEQ ID NO: 6411; WAN024BOE; Start 175; Stop 199
gacatcaaagaggttgtagattgtt

SEQ ID NO: 437722 - DNA, 25 bp, Artificial
  probe
  misc_feature (1)..(25): SEQ ID NO: 6411; WAN024BOE; Start 170; Stop 194
tatacgacatcaaagaggttgtaga

SEQ ID NO: 437723 - DNA, 25 bp, Artificial
  probe
  misc_feature (1)..(25): SEQ ID NO: 6411; WAN024BOE; Start 133; Stop 157
gctcagttgattgtccatttgctaa

SEQ ID NO: 437724 - DNA, 25 bp, Artificial
  probe
  misc_feature (1)..(25): SEQ ID NO: 6412; WAN024ATV; Start 116; Stop 140
gagatttatttgtgccactcaaggg

SEQ ID NO: 437725 - DNA, 25 bp, Artificial
  probe
  misc_feature (1)..(25): SEQ ID NO: 6412; WAN024ATV; Start 115; Stop 139
ggagatttatttgtgccactcaagg

SEQ ID NO: 437726 - DNA, 25 bp, Artificial
  probe
  misc_feature (1)..(25): SEQ ID NO: 6412; WAN024ATV; Start 114; Stop 138
tggagatttatttgtgccactcaag

SEQ ID NO: 437727 - DNA, 25 bp, Artificial
  probe
  misc_feature (1)..(25): SEQ ID NO: 6412; WAN024ATV; Start 117; Stop 141
agatttatttgtgccactcaagggt

SEQ ID NO: 437728 - DNA, 25 bp, Artificial
  probe
  misc_feature (1)..(25): SEQ ID NO: 6412; WAN024ATV; Start 118; Stop 142
gatttatttgtgccactcaagggtg

SEQ ID NO: 437729 - DNA, 25 bp, Artificial
  probe
  misc_feature (1)..(25): SEQ ID NO: 6412; WAN024ATV; Start 3; Stop 27
gaaattaacaatccatgaagtggcc

SEQ ID NO: 437730 - DNA, 25 bp, Artificial
  probe
  misc_feature (1)..(25): SEQ ID NO: 6412; WAN024ATV; Start 61; Stop 85
tttgcagatgctcagttagaaaagg

SEQ ID NO: 437731 - DNA, 25 bp, Artificial
  probe
  misc_feature (1)..(25): SEQ ID NO: 6412; WAN024ATV; Start 4; Stop 28
aaattaacaatccatgaagtggccc

SEQ ID NO: 437732 - DNA, 25 bp, Artificial
  probe
  misc_feature (1)..(25): SEQ ID NO: 6412; WAN024ATV; Start 119; Stop 143
atttatttgtgccactcaagggtgc

SEQ ID NO: 437733 - DNA, 25 bp, Artificial
  probe
  misc_feature (1)..(25): SEQ ID NO: 6412; WAN024ATV; Start 60; Stop 84
ttttgcagatgctcagttagaaaag

SEQ ID NO: 437734 - DNA, 25 bp, Artificial
  probe
  misc_feature (1)..(25): SEQ ID NO: 6412; WAN024ATV; Start 6; Stop 30
attaacaatccatgaagtggcccaa

SEQ ID NO: 437735 - DNA, 25 bp, Artificial
  probe
  misc_feature (1)..(25): SEQ ID NO: 6412; WAN024ATV; Start 5; Stop 29
aattaacaatccatgaagtggccca

SEQ ID NO: 437736 - DNA, 25 bp, Artificial
  probe
  misc_feature (1)..(25): SEQ ID NO: 6412; WAN024ATV; Start 7; Stop 31
ttaacaatccatgaagtggcccaag

SEQ ID NO: 437737 - DNA, 25 bp, Artificial
  probe
  misc_feature (1)..(25): SEQ ID NO: 6412; WAN024ATV; Start 166; Stop 190
gaaagagcttttgaaaatggtgcgg

SEQ ID NO: 437738 - DNA, 25 bp, Artificial
  probe
  misc_feature (1)..(25): SEQ ID NO: 6412; WAN024ATV; Start 62; Stop 86
ttgcagatgctcagttagaaaaggc

SEQ ID NO: 437739 - DNA, 25 bp, Artificial
  probe
  misc_feature (1)..(25): SEQ ID NO: 6412; WAN024ATV; Start 165; Stop 189
cgaaagagcttttgaaaatggtgcg

SEQ ID NO: 437740 - DNA, 25 bp, Artificial
  probe
  misc_feature (1)..(25): SEQ ID NO: 6412; WAN024ATV; Start 64; Stop 88
gcagatgctcagttagaaaaggctg

SEQ ID NO: 437741 - DNA, 25 bp, Artificial
  probe
  misc_feature (1)..(25): SEQ ID NO: 6412; WAN024ATV; Start 12; Stop 36
aatccatgaagtggcccaagttgta

SEQ ID NO: 437742 - DNA, 25 bp, Artificial
  probe
  misc_feature (1)..(25): SEQ ID NO: 6412; WAN024ATV; Start 8; Stop 32
taacaatccatgaagtggcccaagt

SEQ ID NO: 437743 - DNA, 25 bp, Artificial
  probe
  misc_feature (1)..(25): SEQ ID NO: 6412; WAN024ATV; Start 65; Stop 89
cagatgctcagttagaaaaggctga

SEQ ID NO: 437744 - DNA, 25 bp, Artificial
  probe
  misc_feature (1)..(25): SEQ ID NO: 6412; WAN024ATV; Start 63; Stop 87
tgcagatgctcagttagaaaaggct

SEQ ID NO: 437745 - DNA, 25 bp, Artificial
  probe
  misc_feature (1)..(25): SEQ ID NO: 6412; WAN024ATV; Start 13; Stop 37
atccatgaagtggcccaagttgtag

SEQ ID NO: 437746 - DNA, 25 bp, Artificial
  probe
  misc_feature (1)..(25): SEQ ID NO: 6412; WAN024ATV; Start 9; Stop 33
aacaatccatgaagtggcccaagtt

SEQ ID NO: 437747 - DNA, 25 bp, Artificial
  probe
  misc_feature (1)..(25): SEQ ID NO: 6412; WAN024ATV; Start 22; Stop 46
gtggcccaagttgtaggagctaaaa

SEQ ID NO: 437748 - DNA, 25 bp, Artificial
  probe
  misc_feature (1)..(25): SEQ ID NO: 6413; WAN024ATW; Start 58; Stop 82
atctttgaggacacccagttagaaa

SEQ ID NO: 437749 - DNA, 25 bp, Artificial
  probe
  misc_feature (1)..(25): SEQ ID NO: 6413; WAN024ATW; Start 57; Stop 81
catctttgaggacacccagttagaa

SEQ ID NO: 437750 - DNA, 25 bp, Artificial
  probe
  misc_feature (1)..(25): SEQ ID NO: 6413; WAN024ATW; Start 116; Stop 140
gagatttatttgtgccactcaaagg

SEQ ID NO: 437751 - DNA, 25 bp, Artificial
  probe
  misc_feature (1)..(25): SEQ ID NO: 6413; WAN024ATW; Start 115; Stop 139
ggagatttatttgtgccactcaaag

SEQ ID NO: 437752 - DNA, 25 bp, Artificial
  probe
  misc_feature (1)..(25): SEQ ID NO: 6413; WAN024ATW; Start 118; Stop 142
gatttatttgtgccactcaaaggtg

SEQ ID NO: 437753 - DNA, 25 bp, Artificial
  probe
  misc_feature (1)..(25): SEQ ID NO: 6413; WAN024ATW; Start 117; Stop 141
agatttatttgtgccactcaaaggt

SEQ ID NO: 437754 - DNA, 25 bp, Artificial
  probe
  misc_feature (1)..(25): SEQ ID NO: 6413; WAN024ATW; Start 114; Stop 138
tggagatttatttgtgccactcaaa

SEQ ID NO: 437755 - DNA, 25 bp, Artificial
  probe
  misc_feature (1)..(25): SEQ ID NO: 6413; WAN024ATW; Start 50; Stop 74
atatcagcatctttgaggacaccca

SEQ ID NO: 437756 - DNA, 25 bp, Artificial
  probe
  misc_feature (1)..(25): SEQ ID NO: 6413; WAN024ATW; Start 59; Stop 83
tctttgaggacacccagttagaaaa

SEQ ID NO: 437757 - DNA, 25 bp, Artificial
  probe
  misc_feature (1)..(25): SEQ ID NO: 6413; WAN024ATW; Start 156; Stop 180
cgactttatcgaaagagcctttgaa

SEQ ID NO: 437758 - DNA, 25 bp, Artificial
  probe
  misc_feature (1)..(25): SEQ ID NO: 6413; WAN024ATW; Start 55; Stop 79
agcatctttgaggacacccagttag

SEQ ID NO: 437759 - DNA, 25 bp, Artificial
  probe
  misc_feature (1)..(25): SEQ ID NO: 6413; WAN024ATW; Start 61; Stop 85
tttgaggacacccagttagaaaagg

SEQ ID NO: 437760 - DNA, 25 bp, Artificial
  probe
  misc_feature (1)..(25): SEQ ID NO: 6413; WAN024ATW; Start 51; Stop 75
tatcagcatctttgaggacacccag

SEQ ID NO: 437761 - DNA, 25 bp, Artificial
  probe
  misc_feature (1)..(25): SEQ ID NO: 6413; WAN024ATW; Start 119; Stop 143
atttatttgtgccactcaaaggtgc

SEQ ID NO: 437762 - DNA, 25 bp, Artificial
  probe
  misc_feature (1)..(25): SEQ ID NO: 6413; WAN024ATW; Start 49; Stop 73
gatatcagcatctttgaggacaccc

SEQ ID NO: 437763 - DNA, 25 bp, Artificial
  probe
  misc_feature (1)..(25): SEQ ID NO: 6413; WAN024ATW; Start 56; Stop 80
gcatctttgaggacacccagttaga

SEQ ID NO: 437764 - DNA, 25 bp, Artificial
  probe
  misc_feature (1)..(25): SEQ ID NO: 6413; WAN024ATW; Start 54; Stop 78
cagcatctttgaggacacccagtta

SEQ ID NO: 437765 - DNA, 25 bp, Artificial
  probe
  misc_feature (1)..(25): SEQ ID NO: 6413; WAN024ATW; Start 154; Stop 178
cacgactttatcgaaagagcctttg

SEQ ID NO: 437766 - DNA, 25 bp, Artificial
  probe
  misc_feature (1)..(25): SEQ ID NO: 6413; WAN024ATW; Start 155; Stop 179
acgactttatcgaaagagcctttga

SEQ ID NO: 437767 - DNA, 25 bp, Artificial
  probe
  misc_feature (1)..(25): SEQ ID NO: 6413; WAN024ATW; Start 153; Stop 177
tcacgactttatcgaaagagccttt

SEQ ID NO: 437768 - DNA, 25 bp, Artificial
  probe
  misc_feature (1)..(25): SEQ ID NO: 6413; WAN024ATW; Start 60; Stop 84
ctttgaggacacccagttagaaaag

SEQ ID NO: 437769 - DNA, 25 bp, Artificial
  probe
  misc_feature (1)..(25): SEQ ID NO: 6413; WAN024ATW; Start 152; Stop 176
gtcacgactttatcgaaagagcctt

SEQ ID NO: 437770 - DNA, 25 bp, Artificial
  probe
  misc_feature (1)..(25): SEQ ID NO: 6413; WAN024ATW; Start 70; Stop 94
acccagttagaaaaggctgagtttg

SEQ ID NO: 437771 - DNA, 25 bp, Artificial
  probe
  misc_feature (1)..(25): SEQ ID NO: 6413; WAN024ATW; Start 69; Stop 93
cacccagttagaaaaggctgagttt

SEQ ID NO: 437772 - DNA, 25 bp, Artificial
  probe
  misc_feature (1)..(25): SEQ ID NO: 6413; WAN024ATW; Start 148; Stop 172
gacggtcacgactttatcgaaagag

SEQ ID NO: 437773 - DNA, 25 bp, Artificial
  probe
  misc_feature (1)..(25): SEQ ID NO: 6413; WAN024ATW; Start 147; Stop 171
tgacggtcacgactttatcgaaaga

SEQ ID NO: 437774 - DNA, 25 bp, Artificial
  probe
  misc_feature (1)..(25): SEQ ID NO: 6413; WAN024ATW; Start 68; Stop 92
acacccagttagaaaaggctgagtt

SEQ ID NO: 437775 - DNA, 25 bp, Artificial
  probe
  misc_feature (1)..(25): SEQ ID NO: 6413; WAN024ATW; Start 62; Stop 86
ttgaggacacccagttagaaaaggc

SEQ ID NO: 437776 - DNA, 25 bp, Artificial
  probe
  misc_feature (1)..(25): SEQ ID NO: 6413; WAN024ATW; Start 120; Stop 144
tttatttgtgccactcaaaggtgcg

SEQ ID NO: 437777 - DNA, 25 bp, Artificial
  probe
  misc_feature (1)..(25): SEQ ID NO: 6413; WAN024ATW; Start 151; Stop 175
ggtcacgactttatcgaaagagcct

SEQ ID NO: 437778 - DNA, 25 bp, Artificial
  probe
  misc_feature (1)..(25): SEQ ID NO: 6413; WAN024ATW; Start 67; Stop 91
gacacccagttagaaaaggctgagt

SEQ ID NO: 437779 - DNA, 25 bp, Artificial
  probe
  misc_feature (1)..(25): SEQ ID NO: 6413; WAN024ATW; Start 180; Stop 204
aaatggtgcagcagtaaccttgtct

SEQ ID NO: 437780 - DNA, 25 bp, Artificial
  probe
  misc_feature (1)..(25): SEQ ID NO: 6413; WAN024ATW; Start 176; Stop 200
ttgaaaatggtgcagcagtaacctt

SEQ ID NO: 437781 - DNA, 25 bp, Artificial
  probe
  misc_feature (1)..(25): SEQ ID NO: 6414; WAN024CQG; Start 106; Stop 130
attgggactggagatttatttgttc

SEQ ID NO: 437782 - DNA, 25 bp, Artificial
  probe
  misc_feature (1)..(25): SEQ ID NO: 6414; WAN024CQG; Start 105; Stop 129
gattgggactggagatttatttgtt

SEQ ID NO: 437783 - DNA, 25 bp, Artificial
  probe
  misc_feature (1)..(25): SEQ ID NO: 6414; WAN024CQG; Start 107; Stop 131
ttgggactggagatttatttgttcc

SEQ ID NO: 437784 - DNA, 25 bp, Artificial
  probe
  misc_feature (1)..(25): SEQ ID NO: 6414; WAN024CQG; Start 50; Stop 74
atatcagcatctttgaggatacccg

SEQ ID NO: 437785 - DNA, 25 bp, Artificial
  probe
  misc_feature (1)..(25): SEQ ID NO: 6414; WAN024CQG; Start 76; Stop 100
ttagagaaagctgagtttgacagtc

SEQ ID NO: 437786 - DNA, 25 bp, Artificial
  probe
  misc_feature (1)..(25): SEQ ID NO: 6414; WAN024CQG; Start 75; Stop 99
gttagagaaagctgagtttgacagt

SEQ ID NO: 437787 - DNA, 25 bp, Artificial
  probe
  misc_feature (1)..(25): SEQ ID NO: 6414; WAN024CQG; Start 49; Stop 73
gatatcagcatctttgaggataccc

SEQ ID NO: 437788 - DNA, 25 bp, Artificial
  probe
  misc_feature (1)..(25): SEQ ID NO: 6414; WAN024CQG; Start 74; Stop 98
ggttagagaaagctgagtttgacag

SEQ ID NO: 437789 - DNA, 25 bp, Artificial
  probe
  misc_feature (1)..(25): SEQ ID NO: 6414; WAN024CQG; Start 73; Stop 97
cggttagagaaagctgagtttgaca

SEQ ID NO: 437790 - DNA, 25 bp, Artificial
  probe
  misc_feature (1)..(25): SEQ ID NO: 6414; WAN024CQG; Start 77; Stop 101
tagagaaagctgagtttgacagtcg

SEQ ID NO: 437791 - DNA, 25 bp, Artificial
  probe
  misc_feature (1)..(25): SEQ ID NO: 6414; WAN024CQG; Start 61; Stop 85
tttgaggatacccggttagagaaag

SEQ ID NO: 437792 - DNA, 25 bp, Artificial
  probe
  misc_feature (1)..(25): SEQ ID NO: 6414; WAN024CQG; Start 60; Stop 84
ctttgaggatacccggttagagaaa

SEQ ID NO: 437793 - DNA, 25 bp, Artificial
  probe
  misc_feature (1)..(25): SEQ ID NO: 6414; WAN024CQG; Start 81; Stop 105
gaaagctgagtttgacagtcgattg

SEQ ID NO: 437794 - DNA, 25 bp, Artificial
  probe
  misc_feature (1)..(25): SEQ ID NO: 6414; WAN024CQG; Start 84; Stop 108
agctgagtttgacagtcgattgatt

SEQ ID NO: 437795 - DNA, 25 bp, Artificial
  probe
  misc_feature (1)..(25): SEQ ID NO: 6414; WAN024CQG; Start 83; Stop 107
aagctgagtttgacagtcgattgat

SEQ ID NO: 437796 - DNA, 25 bp, Artificial
  probe
  misc_feature (1)..(25): SEQ ID NO: 6414; WAN024CQG; Start 80; Stop 104
agaaagctgagtttgacagtcgatt

SEQ ID NO: 437797 - DNA, 25 bp, Artificial
  probe
  misc_feature (1)..(25): SEQ ID NO: 6414; WAN024CQG; Start 113; Stop 137
ctggagatttatttgttcccctcaa

SEQ ID NO: 437798 - DNA, 25 bp, Artificial
  probe
  misc_feature (1)..(25): SEQ ID NO: 6414; WAN024CQG; Start 162; Stop 186
tatcgaaagagcttttgaaaatggc

SEQ ID NO: 437799 - DNA, 25 bp, Artificial
  probe
  misc_feature (1)..(25): SEQ ID NO: 6414; WAN024CQG; Start 111; Stop 135
gactggagatttatttgttcccctc

SEQ ID NO: 437800 - DNA, 25 bp, Artificial
  probe
  misc_feature (1)..(25): SEQ ID NO: 6414; WAN024CQG; Start 82; Stop 106
aaagctgagtttgacagtcgattga

SEQ ID NO: 437801 - DNA, 25 bp, Artificial
  probe
  misc_feature (1)..(25): SEQ ID NO: 6414; WAN024CQG; Start 58; Stop 82
atctttgaggatacccggttagaga

SEQ ID NO: 437802 - DNA, 25 bp, Artificial
  probe
  misc_feature (1)..(25): SEQ ID NO: 6414; WAN024CQG; Start 57; Stop 81
catctttgaggatacccggttagag

SEQ ID NO: 437803 - DNA, 25 bp, Artificial
  probe
  misc_feature (1)..(25): SEQ ID NO: 6414; WAN024CQG; Start 79; Stop 103
gagaaagctgagtttgacagtcgat

SEQ ID NO: 437804 - DNA, 25 bp, Artificial
  probe
  misc_feature (1)..(25): SEQ ID NO: 6414; WAN024CQG; Start 59; Stop 83
tctttgaggatacccggttagagaa

SEQ ID NO: 437805 - DNA, 25 bp, Artificial
  probe
  misc_feature (1)..(25): SEQ ID NO: 6414; WAN024CQG; Start 112; Stop 136
actggagatttatttgttcccctca

SEQ ID NO: 437806 - DNA, 25 bp, Artificial
  probe
  misc_feature (1)..(25): SEQ ID NO: 6414; WAN024CQG; Start 110; Stop 134
ggactggagatttatttgttcccct

SEQ ID NO: 437807 - DNA, 25 bp, Artificial
  probe
  misc_feature (1)..(25): SEQ ID NO: 6414; WAN024CQG; Start 118; Stop 142
gatttatttgttcccctcaaaggtg

SEQ ID NO: 437808 - DNA, 25 bp, Artificial
  probe
  misc_feature (1)..(25): SEQ ID NO: 6414; WAN024CQG; Start 117; Stop 141
agatttatttgttcccctcaaaggt

SEQ ID NO: 437809 - DNA, 25 bp, Artificial
  probe
  misc_feature (1)..(25): SEQ ID NO: 6414; WAN024CQG; Start 116; Stop 140
gagatttatttgttcccctcaaagg

SEQ ID NO: 437810 - DNA, 25 bp, Artificial
  probe
  misc_feature (1)..(25): SEQ ID NO: 6414; WAN024CQG; Start 115; Stop 139
ggagatttatttgttcccctcaaag

SEQ ID NO: 437811 - DNA, 25 bp, Artificial
  probe
  misc_feature (1)..(25): SEQ ID NO: 6414; WAN024CQG; Start 114; Stop 138
tggagatttatttgttcccctcaaa

SEQ ID NO: 437812 - DNA, 25 bp, Artificial
  probe
  misc_feature (1)..(25): SEQ ID NO: 6414; WAN024CQG; Start 68; Stop 92
atacccggttagagaaagctgagtt

SEQ ID NO: 437813 - DNA, 25 bp, Artificial
  probe
  misc_feature (1)..(25): SEQ ID NO: 6414; WAN024CQG; Start 69; Stop 93
tacccggttagagaaagctgagttt

SEQ ID NO: 437814 - DNA, 25 bp, Artificial
  probe
  misc_feature (1)..(25): SEQ ID NO: 6415; WAN024BX9; Start 37; Stop 61
gtagttcttaaagcagtcaaccttg

SEQ ID NO: 437815 - DNA, 25 bp, Artificial
  probe
  misc_feature (1)..(25): SEQ ID NO: 6415; WAN024BX9; Start 36; Stop 60
agtagttcttaaagcagtcaacctt

SEQ ID NO: 437816 - DNA, 25 bp, Artificial
  probe
  misc_feature (1)..(25): SEQ ID NO: 6415; WAN024BX9; Start 35; Stop 59
aagtagttcttaaagcagtcaacct

SEQ ID NO: 437817 - DNA, 25 bp, Artificial
  probe
  misc_feature (1)..(25): SEQ ID NO: 6415; WAN024BX9; Start 34; Stop 58
gaagtagttcttaaagcagtcaacc

SEQ ID NO: 437818 - DNA, 25 bp, Artificial
  probe
  misc_feature (1)..(25): SEQ ID NO: 6415; WAN024BX9; Start 33; Stop 57
tgaagtagttcttaaagcagtcaac

SEQ ID NO: 437819 - DNA, 25 bp, Artificial
  probe
  misc_feature (1)..(25): SEQ ID NO: 6415; WAN024BX9; Start 31; Stop 55
cttgaagtagttcttaaagcagtca

SEQ ID NO: 437820 - DNA, 25 bp, Artificial
  probe
  misc_feature (1)..(25): SEQ ID NO: 6415; WAN024BX9; Start 38; Stop 62
tagttcttaaagcagtcaaccttga

SEQ ID NO: 437821 - DNA, 25 bp, Artificial
  probe
  misc_feature (1)..(25): SEQ ID NO: 6415; WAN024BX9; Start 30; Stop 54
acttgaagtagttcttaaagcagtc

SEQ ID NO: 437822 - DNA, 25 bp, Artificial
  probe
  misc_feature (1)..(25): SEQ ID NO: 6415; WAN024BX9; Start 29; Stop 53
gacttgaagtagttcttaaagcagt

SEQ ID NO: 437823 - DNA, 25 bp, Artificial
  probe
  misc_feature (1)..(25): SEQ ID NO: 6415; WAN024BX9; Start 27; Stop 51
cagacttgaagtagttcttaaagca

SEQ ID NO: 437824 - DNA, 25 bp, Artificial
  probe
  misc_feature (1)..(25): SEQ ID NO: 6415; WAN024BX9; Start 28; Stop 52
agacttgaagtagttcttaaagcag

SEQ ID NO: 437825 - DNA, 25 bp, Artificial
  probe
  misc_feature (1)..(25): SEQ ID NO: 6415; WAN024BX9; Start 26; Stop 50
tcagacttgaagtagttcttaaagc

SEQ ID NO: 437826 - DNA, 25 bp, Artificial
  probe
  misc_feature (1)..(25): SEQ ID NO: 6415; WAN024BX9; Start 140; Stop 164
attatgacttgaagcaacaattggc

SEQ ID NO: 437827 - DNA, 25 bp, Artificial
  probe
  misc_feature (1)..(25): SEQ ID NO: 6415; WAN024BX9; Start 147; Stop 171
cttgaagcaacaattggcaatctac

SEQ ID NO: 437828 - DNA, 25 bp, Artificial
  probe
  misc_feature (1)..(25): SEQ ID NO: 6415; WAN024BX9; Start 146; Stop 170
acttgaagcaacaattggcaatcta

SEQ ID NO: 437829 - DNA, 25 bp, Artificial
  probe
  misc_feature (1)..(25): SEQ ID NO: 6415; WAN024BX9; Start 139; Stop 163
aattatgacttgaagcaacaattgg

SEQ ID NO: 437830 - DNA, 25 bp, Artificial
  probe
  misc_feature (1)..(25): SEQ ID NO: 6415; WAN024BX9; Start 24; Stop 48
actcagacttgaagtagttcttaaa

SEQ ID NO: 437831 - DNA, 25 bp, Artificial
  probe
  misc_feature (1)..(25): SEQ ID NO: 6415; WAN024BX9; Start 23; Stop 47
aactcagacttgaagtagttcttaa

SEQ ID NO: 437832 - DNA, 25 bp, Artificial
  probe
  misc_feature (1)..(25): SEQ ID NO: 6415; WAN024BX9; Start 149; Stop 173
tgaagcaacaattggcaatctacaa

SEQ ID NO: 437833 - DNA, 25 bp, Artificial
  probe
  misc_feature (1)..(25): SEQ ID NO: 6415; WAN024BX9; Start 148; Stop 172
ttgaagcaacaattggcaatctaca

SEQ ID NO: 437834 - DNA, 25 bp, Artificial
  probe
  misc_feature (1)..(25): SEQ ID NO: 6415; WAN024BX9; Start 142; Stop 166
tatgacttgaagcaacaattggcaa

SEQ ID NO: 437835 - DNA, 25 bp, Artificial
  probe
  misc_feature (1)..(25): SEQ ID NO: 6415; WAN024BX9; Start 141; Stop 165
ttatgacttgaagcaacaattggca

SEQ ID NO: 437836 - DNA, 25 bp, Artificial
  probe
  misc_feature (1)..(25): SEQ ID NO: 6415; WAN024BX9; Start 25; Stop 49
ctcagacttgaagtagttcttaaag

SEQ ID NO: 437837 - DNA, 25 bp, Artificial
  probe
  misc_feature (1)..(25): SEQ ID NO: 6415; WAN024BX9; Start 143; Stop 167
atgacttgaagcaacaattggcaat

SEQ ID NO: 437838 - DNA, 25 bp, Artificial
  probe
  misc_feature (1)..(25): SEQ ID NO: 6415; WAN024BX9; Start 145; Stop 169
gacttgaagcaacaattggcaatct

SEQ ID NO: 437839 - DNA, 25 bp, Artificial
  probe
  misc_feature (1)..(25): SEQ ID NO: 6415; WAN024BX9; Start 32; Stop 56
ttgaagtagttcttaaagcagtcaa

SEQ ID NO: 437840 - DNA, 25 bp, Artificial
  probe
  misc_feature (1)..(25): SEQ ID NO: 6415; WAN024BX9; Start 154; Stop 178
caacaattggcaatctacaaagaaa

SEQ ID NO: 437841 - DNA, 25 bp, Artificial
  probe
  misc_feature (1)..(25): SEQ ID NO: 6415; WAN024BX9; Start 153; Stop 177
gcaacaattggcaatctacaaagaa

SEQ ID NO: 437842 - DNA, 25 bp, Artificial
  probe
  misc_feature (1)..(25): SEQ ID NO: 6415; WAN024BX9; Start 151; Stop 175
aagcaacaattggcaatctacaaag

SEQ ID NO: 437843 - DNA, 25 bp, Artificial
  probe
  misc_feature (1)..(25): SEQ ID NO: 6415; WAN024BX9; Start 150; Stop 174
gaagcaacaattggcaatctacaaa

SEQ ID NO: 437844 - DNA, 25 bp, Artificial
  probe
  misc_feature (1)..(25): SEQ ID NO: 6415; WAN024BX9; Start 144; Stop 168
tgacttgaagcaacaattggcaatc

SEQ ID NO: 437845 - DNA, 25 bp, Artificial
  probe
  misc_feature (1)..(25): SEQ ID NO: 6415; WAN024BX9; Start 135; Stop 159
agaaaattatgacttgaagcaacaa

SEQ ID NO: 437846 - DNA, 25 bp, Artificial
  probe
  misc_feature (1)..(25): SEQ ID NO: 6415; WAN024BX9; Start 134; Stop 158
aagaaaattatgacttgaagcaaca

SEQ ID NO: 437847 - DNA, 25 bp, Artificial
  probe
  misc_feature (1)..(25): SEQ ID NO: 6416; WAN024BY7; Start 74; Stop 98
cagcttacgaagacaaggatatgaa

SEQ ID NO: 437848 - DNA, 25 bp, Artificial
  probe
  misc_feature (1)..(25): SEQ ID NO: 6416; WAN024BY7; Start 73; Stop 97
acagcttacgaagacaaggatatga

SEQ ID NO: 437849 - DNA, 25 bp, Artificial
  probe
  misc_feature (1)..(25): SEQ ID NO: 6416; WAN024BY7; Start 72; Stop 96
cacagcttacgaagacaaggatatg

SEQ ID NO: 437850 - DNA, 25 bp, Artificial
  probe
  misc_feature (1)..(25): SEQ ID NO: 6416; WAN024BY7; Start 121; Stop 145
ctgctcattgctaatcagtacatgg

SEQ ID NO: 437851 - DNA, 25 bp, Artificial
  probe
  misc_feature (1)..(25): SEQ ID NO: 6416; WAN024BY7; Start 192; Stop 216
tatcaaacctcctcagtacatttcc

SEQ ID NO: 437852 - DNA, 25 bp, Artificial
  probe
  misc_feature (1)..(25): SEQ ID NO: 6416; WAN024BY7; Start 325; Stop 349
gtattccaagacgacggtcagatag

SEQ ID NO: 437853 - DNA, 25 bp, Artificial
  probe
  misc_feature (1)..(25): SEQ ID NO: 6416; WAN024BY7; Start 207; Stop 231
gtacatttccaaggtcaagaagaac

SEQ ID NO: 437854 - DNA, 25 bp, Artificial
  probe
  misc_feature (1)..(25): SEQ ID NO: 6416; WAN024BY7; Start 206; Stop 230
agtacatttccaaggtcaagaagaa

SEQ ID NO: 437855 - DNA, 25 bp, Artificial
  probe
  misc_feature (1)..(25): SEQ ID NO: 6416; WAN024BY7; Start 205; Stop 229
cagtacatttccaaggtcaagaaga

SEQ ID NO: 437856 - DNA, 25 bp, Artificial
  probe
  misc_feature (1)..(25): SEQ ID NO: 6416; WAN024BY7; Start 204; Stop 228
tcagtacatttccaaggtcaagaag

SEQ ID NO: 437857 - DNA, 25 bp, Artificial
  probe
  misc_feature (1)..(25): SEQ ID NO: 6416; WAN024BY7; Start 203; Stop 227
ctcagtacatttccaaggtcaagaa

SEQ ID NO: 437858 - DNA, 25 bp, Artificial
  probe
  misc_feature (1)..(25): SEQ ID NO: 6416; WAN024BY7; Start 120; Stop 144
gctgctcattgctaatcagtacatg

SEQ ID NO: 437859 - DNA, 25 bp, Artificial
  probe
  misc_feature (1)..(25): SEQ ID NO: 6416; WAN024BY7; Start 71; Stop 95
ccacagcttacgaagacaaggatat

SEQ ID NO: 437860 - DNA, 25 bp, Artificial
  probe
  misc_feature (1)..(25): SEQ ID NO: 6416; WAN024BY7; Start 195; Stop 219
caaacctcctcagtacatttccaag

SEQ ID NO: 437861 - DNA, 25 bp, Artificial
  probe
  misc_feature (1)..(25): SEQ ID NO: 6416; WAN024BY7; Start 193; Stop 217
atcaaacctcctcagtacatttcca

SEQ ID NO: 437862 - DNA, 25 bp, Artificial
  probe
  misc_feature (1)..(25): SEQ ID NO: 6416; WAN024BY7; Start 132; Stop 156
taatcagtacatgggtcagcctatc

SEQ ID NO: 437863 - DNA, 25 bp, Artificial
  probe
  misc_feature (1)..(25): SEQ ID NO: 6416; WAN024BY7; Start 131; Stop 155
ctaatcagtacatgggtcagcctat

SEQ ID NO: 437864 - DNA, 25 bp, Artificial
  probe
  misc_feature (1)..(25): SEQ ID NO: 6416; WAN024BY7; Start 191; Stop 215
atatcaaacctcctcagtacatttc

SEQ ID NO: 437865 - DNA, 25 bp, Artificial
  probe
  misc_feature (1)..(25): SEQ ID NO: 6416; WAN024BY7; Start 1; Stop 25
atgaaattgaccctgaacattgagc

SEQ ID NO: 437866 - DNA, 25 bp, Artificial
  probe
  misc_feature (1)..(25): SEQ ID NO: 6416; WAN024BY7; Start 124; Stop 148
ctcattgctaatcagtacatgggtc

SEQ ID NO: 437867 - DNA, 25 bp, Artificial
  probe
  misc_feature (1)..(25): SEQ ID NO: 6416; WAN024BY7; Start 194; Stop 218
tcaaacctcctcagtacatttccaa

SEQ ID NO: 437868 - DNA, 25 bp, Artificial
  probe
  misc_feature (1)..(25): SEQ ID NO: 6416; WAN024BY7; Start 6; Stop 30
attgaccctgaacattgagcctaaa

SEQ ID NO: 437869 - DNA, 25 bp, Artificial
  probe
  misc_feature (1)..(25): SEQ ID NO: 6416; WAN024BY7; Start 390; Stop 414
catagaggtagaggtggaggtcatg

SEQ ID NO: 437870 - DNA, 25 bp, Artificial
  probe
  misc_feature (1)..(25): SEQ ID NO: 6416; WAN024BY7; Start 126; Stop 150
cattgctaatcagtacatgggtcag

SEQ ID NO: 437871 - DNA, 25 bp, Artificial
  probe
  misc_feature (1)..(25): SEQ ID NO: 6416; WAN024BY7; Start 75; Stop 99
agcttacgaagacaaggatatgaaa

SEQ ID NO: 437872 - DNA, 25 bp, Artificial
  probe
  misc_feature (1)..(25): SEQ ID NO: 6416; WAN024BY7; Start 5; Stop 29
aattgaccctgaacattgagcctaa

SEQ ID NO: 437873 - DNA, 25 bp, Artificial
  probe
  misc_feature (1)..(25): SEQ ID NO: 6416; WAN024BY7; Start 4; Stop 28
aaattgaccctgaacattgagccta

SEQ ID NO: 437874 - DNA, 25 bp, Artificial
  probe
  misc_feature (1)..(25): SEQ ID NO: 6416; WAN024BY7; Start 125; Stop 149
tcattgctaatcagtacatgggtca

SEQ ID NO: 437875 - DNA, 25 bp, Artificial
  probe
  misc_feature (1)..(25): SEQ ID NO: 6416; WAN024BY7; Start 208; Stop 232
tacatttccaaggtcaagaagaacc

SEQ ID NO: 437876 - DNA, 25 bp, Artificial
  probe
  misc_feature (1)..(25): SEQ ID NO: 6416; WAN024BY7; Start 271; Stop 295
aagcctgacattgacaactacgaaa

SEQ ID NO: 437877 - DNA, 25 bp, Artificial
  probe
  misc_feature (1)..(25): SEQ ID NO: 6416; WAN024BY7; Start 270; Stop 294
aaagcctgacattgacaactacgaa

SEQ ID NO: 437878 - DNA, 25 bp, Artificial
  probe
  misc_feature (1)..(25): SEQ ID NO: 6416; WAN024BY7; Start 312; Stop 336
tatgtcagggatcgtattccaagac

SEQ ID NO: 437879 - DNA, 25 bp, Artificial
  probe
  misc_feature (1)..(25): SEQ ID NO: 6416; WAN024BY7; Start 311; Stop 335
gtatgtcagggatcgtattccaaga

SEQ ID NO: 437880 - DNA, 25 bp, Artificial
  probe
  misc_feature (1)..(25): SEQ ID NO: 6417; WAN024BPW; Start 49; Stop 73
aacacgatgagtataggattcacta

SEQ ID NO: 437881 - DNA, 25 bp, Artificial
  probe
  misc_feature (1)..(25): SEQ ID NO: 6417; WAN024BPW; Start 50; Stop 74
acacgatgagtataggattcactat

SEQ ID NO: 437882 - DNA, 25 bp, Artificial
  probe
  misc_feature (1)..(25): SEQ ID NO: 6417; WAN024BPW; Start 51; Stop 75
cacgatgagtataggattcactatt

SEQ ID NO: 437883 - DNA, 25 bp, Artificial
  probe
  misc_feature (1)..(25): SEQ ID NO: 6417; WAN024BPW; Start 48; Stop 72
aaacacgatgagtataggattcact

SEQ ID NO: 437884 - DNA, 25 bp, Artificial
  probe
  misc_feature (1)..(25): SEQ ID NO: 6417; WAN024BPW; Start 52; Stop 76
acgatgagtataggattcactatta

SEQ ID NO: 437885 - DNA, 25 bp, Artificial
  probe
  misc_feature (1)..(25): SEQ ID NO: 6417; WAN024BPW; Start 45; Stop 69
ccaaaacacgatgagtataggattc

SEQ ID NO: 437886 - DNA, 25 bp, Artificial
  probe
  misc_feature (1)..(25): SEQ ID NO: 6417; WAN024BPW; Start 44; Stop 68
cccaaaacacgatgagtataggatt

SEQ ID NO: 437887 - DNA, 25 bp, Artificial
  probe
  misc_feature (1)..(25): SEQ ID NO: 6417; WAN024BPW; Start 35; Stop 59
ttaacaatacccaaaacacgatgag

SEQ ID NO: 437888 - DNA, 25 bp, Artificial
  probe
  misc_feature (1)..(25): SEQ ID NO: 6417; WAN024BPW; Start 36; Stop 60
taacaatacccaaaacacgatgagt

SEQ ID NO: 437889 - DNA, 25 bp, Artificial
  probe
  misc_feature (1)..(25): SEQ ID NO: 6417; WAN024BPW; Start 37; Stop 61
aacaatacccaaaacacgatgagta

SEQ ID NO: 437890 - DNA, 25 bp, Artificial
  probe
  misc_feature (1)..(25): SEQ ID NO: 6417; WAN024BPW; Start 34; Stop 58
attaacaatacccaaaacacgatga

SEQ ID NO: 437891 - DNA, 25 bp, Artificial
  probe
  misc_feature (1)..(25): SEQ ID NO: 6417; WAN024BPW; Start 42; Stop 66
tacccaaaacacgatgagtatagga

SEQ ID NO: 437892 - DNA, 25 bp, Artificial
  probe
  misc_feature (1)..(25): SEQ ID NO: 6417; WAN024BPW; Start 43; Stop 67
acccaaaacacgatgagtataggat

SEQ ID NO: 437893 - DNA, 25 bp, Artificial
  probe
  misc_feature (1)..(25): SEQ ID NO: 6417; WAN024BPW; Start 33; Stop 57
aattaacaatacccaaaacacgatg

SEQ ID NO: 437894 - DNA, 25 bp, Artificial
  probe
  misc_feature (1)..(25): SEQ ID NO: 6417; WAN024BPW; Start 47; Stop 71
aaaacacgatgagtataggattcac

SEQ ID NO: 437895 - DNA, 25 bp, Artificial
  probe
  misc_feature (1)..(25): SEQ ID NO: 6417; WAN024BPW; Start 46; Stop 70
caaaacacgatgagtataggattca

SEQ ID NO: 437896 - DNA, 25 bp, Artificial
  probe
  misc_feature (1)..(25): SEQ ID NO: 6417; WAN024BPW; Start 31; Stop 55
aaaattaacaatacccaaaacacga

SEQ ID NO: 437897 - DNA, 25 bp, Artificial
  probe
  misc_feature (1)..(25): SEQ ID NO: 6417; WAN024BPW; Start 32; Stop 56
aaattaacaatacccaaaacacgat

SEQ ID NO: 437898 - DNA, 25 bp, Artificial
  probe
  misc_feature (1)..(25): SEQ ID NO: 6417; WAN024BPW; Start 41; Stop 65
atacccaaaacacgatgagtatagg

SEQ ID NO: 437899 - DNA, 25 bp, Artificial
  probe
  misc_feature (1)..(25): SEQ ID NO: 6417; WAN024BPW; Start 38; Stop 62
acaatacccaaaacacgatgagtat

SEQ ID NO: 437900 - DNA, 25 bp, Artificial
  probe
  misc_feature (1)..(25): SEQ ID NO: 6417; WAN024BPW; Start 53; Stop 77
cgatgagtataggattcactattat

SEQ ID NO: 437901 - DNA, 25 bp, Artificial
  probe
  misc_feature (1)..(25): SEQ ID NO: 6417; WAN024BPW; Start 39; Stop 63
caatacccaaaacacgatgagtata

SEQ ID NO: 437902 - DNA, 25 bp, Artificial
  probe
  misc_feature (1)..(25): SEQ ID NO: 6417; WAN024BPW; Start 40; Stop 64
aatacccaaaacacgatgagtatag

SEQ ID NO: 437903 - DNA, 25 bp, Artificial
  probe
  misc_feature (1)..(25): SEQ ID NO: 6417; WAN024BPW; Start 2; Stop 26
tgaaatttgctagattcgtagtatt

SEQ ID NO: 437904 - DNA, 25 bp, Artificial
  probe
  misc_feature (1)..(25): SEQ ID NO: 6417; WAN024BPW; Start 1; Stop 25
atgaaatttgctagattcgtagtat

SEQ ID NO: 437905 - DNA, 25 bp, Artificial
  probe
  misc_feature (1)..(25): SEQ ID NO: 6417; WAN024BPW; Start 3; Stop 27
gaaatttgctagattcgtagtattt

SEQ ID NO: 437906 - DNA, 25 bp, Artificial
  probe
  misc_feature (1)..(25): SEQ ID NO: 6418; WAN024BL7; Start 283; Stop 307
actattcacatcaagcatacatacg

SEQ ID NO: 437907 - DNA, 25 bp, Artificial
  probe
  misc_feature (1)..(25): SEQ ID NO: 6418; WAN024BL7; Start 284; Stop 308
ctattcacatcaagcatacatacga

SEQ ID NO: 437908 - DNA, 25 bp, Artificial
  probe
  misc_feature (1)..(25): SEQ ID NO: 6418; WAN024BL7; Start 286; Stop 310
attcacatcaagcatacatacgatt

SEQ ID NO: 437909 - DNA, 25 bp, Artificial
  probe
  misc_feature (1)..(25): SEQ ID NO: 6418; WAN024BL7; Start 280; Stop 304
aagactattcacatcaagcatacat

SEQ ID NO: 437910 - DNA, 25 bp, Artificial
  probe
  misc_feature (1)..(25): SEQ ID NO: 6418; WAN024BL7; Start 285; Stop 309
tattcacatcaagcatacatacgat

SEQ ID NO: 437911 - DNA, 25 bp, Artificial
  probe
  misc_feature (1)..(25): SEQ ID NO: 6418; WAN024BL7; Start 674; Stop 698
tggtatcagacatatctagcaagtt

SEQ ID NO: 437912 - DNA, 25 bp, Artificial
  probe
  misc_feature (1)..(25): SEQ ID NO: 6418; WAN024BL7; Start 673; Stop 697
atggtatcagacatatctagcaagt

SEQ ID NO: 437913 - DNA, 25 bp, Artificial
  probe
  misc_feature (1)..(25): SEQ ID NO: 6418; WAN024BL7; Start 445; Stop 469
ttcatcaatactctaggagaaccaa

SEQ ID NO: 437914 - DNA, 25 bp, Artificial
  probe
  misc_feature (1)..(25): SEQ ID NO: 6418; WAN024BL7; Start 282; Stop 306
gactattcacatcaagcatacatac

SEQ ID NO: 437915 - DNA, 25 bp, Artificial
  probe
  misc_feature (1)..(25): SEQ ID NO: 6418; WAN024BL7; Start 446; Stop 470
tcatcaatactctaggagaaccaat

SEQ ID NO: 437916 - DNA, 25 bp, Artificial
  probe
  misc_feature (1)..(25): SEQ ID NO: 6418; WAN024BL7; Start 281; Stop 305
agactattcacatcaagcatacata

SEQ ID NO: 437917 - DNA, 25 bp, Artificial
  probe
  misc_feature (1)..(25): SEQ ID NO: 6418; WAN024BL7; Start 672; Stop 696
aatggtatcagacatatctagcaag

SEQ ID NO: 437918 - DNA, 25 bp, Artificial
  probe
  misc_feature (1)..(25): SEQ ID NO: 6418; WAN024BL7; Start 679; Stop 703
tcagacatatctagcaagttagaca

SEQ ID NO: 437919 - DNA, 25 bp, Artificial
  probe
  misc_feature (1)..(25): SEQ ID NO: 6418; WAN024BL7; Start 324; Stop 348
gagaactacaccaaagacaatcaag

SEQ ID NO: 437920 - DNA, 25 bp, Artificial
  probe
  misc_feature (1)..(25): SEQ ID NO: 6418; WAN024BL7; Start 323; Stop 347
agagaactacaccaaagacaatcaa

SEQ ID NO: 437921 - DNA, 25 bp, Artificial
  probe
  misc_feature (1)..(25): SEQ ID NO: 6418; WAN024BL7; Start 321; Stop 345
agagagaactacaccaaagacaatc

SEQ ID NO: 437922 - DNA, 25 bp, Artificial
  probe
  misc_feature (1)..(25): SEQ ID NO: 6418; WAN024BL7; Start 320; Stop 344
aagagagaactacaccaaagacaat

SEQ ID NO: 437923 - DNA, 25 bp, Artificial
  probe
  misc_feature (1)..(25): SEQ ID NO: 6418; WAN024BL7; Start 319; Stop 343
aaagagagaactacaccaaagacaa

SEQ ID NO: 437924 - DNA, 25 bp, Artificial
  probe
  misc_feature (1)..(25): SEQ ID NO: 6418; WAN024BL7; Start 294; Stop 318
caagcatacatacgatttcagacaa

SEQ ID NO: 437925 - DNA, 25 bp, Artificial
  probe
  misc_feature (1)..(25): SEQ ID NO: 6418; WAN024BL7; Start 293; Stop 317
tcaagcatacatacgatttcagaca

SEQ ID NO: 437926 - DNA, 25 bp, Artificial
  probe
  misc_feature (1)..(25): SEQ ID NO: 6418; WAN024BL7; Start 322; Stop 346
gagagaactacaccaaagacaatca

SEQ ID NO: 437927 - DNA, 25 bp, Artificial
  probe
  misc_feature (1)..(25): SEQ ID NO: 6418; WAN024BL7; Start 289; Stop 313
cacatcaagcatacatacgatttca

SEQ ID NO: 437928 - DNA, 25 bp, Artificial
  probe
  misc_feature (1)..(25): SEQ ID NO: 6418; WAN024BL7; Start 290; Stop 314
acatcaagcatacatacgatttcag

SEQ ID NO: 437929 - DNA, 25 bp, Artificial
  probe
  misc_feature (1)..(25): SEQ ID NO: 6418; WAN024BL7; Start 288; Stop 312
tcacatcaagcatacatacgatttc

SEQ ID NO: 437930 - DNA, 25 bp, Artificial
  probe
  misc_feature (1)..(25): SEQ ID NO: 6418; WAN024BL7; Start 292; Stop 316
atcaagcatacatacgatttcagac

SEQ ID NO: 437931 - DNA, 25 bp, Artificial
  probe
  misc_feature (1)..(25): SEQ ID NO: 6418; WAN024BL7; Start 291; Stop 315
catcaagcatacatacgatttcaga

SEQ ID NO: 437932 - DNA, 25 bp, Artificial
  probe
  misc_feature (1)..(25): SEQ ID NO: 6418; WAN024BL7; Start 450; Stop 474
caatactctaggagaaccaataaca

SEQ ID NO: 437933 - DNA, 25 bp, Artificial
  probe
  misc_feature (1)..(25): SEQ ID NO: 6418; WAN024BL7; Start 295; Stop 319
aagcatacatacgatttcagacaaa

SEQ ID NO: 437934 - DNA, 25 bp, Artificial
  probe
  misc_feature (1)..(25): SEQ ID NO: 6418; WAN024BL7; Start 287; Stop 311
ttcacatcaagcatacatacgattt

SEQ ID NO: 437935 - DNA, 25 bp, Artificial
  probe
  misc_feature (1)..(25): SEQ ID NO: 6418; WAN024BL7; Start 675; Stop 699
ggtatcagacatatctagcaagtta

SEQ ID NO: 437936 - DNA, 25 bp, Artificial
  probe
  misc_feature (1)..(25): SEQ ID NO: 6418; WAN024BL7; Start 458; Stop 482
taggagaaccaataacaaatgccag

SEQ ID NO: 437937 - DNA, 25 bp, Artificial
  probe
  misc_feature (1)..(25): SEQ ID NO: 6418; WAN024BL7; Start 556; Stop 580
cattctcacatatccctacttgctg

SEQ ID NO: 437938 - DNA, 25 bp, Artificial
  probe
  misc_feature (1)..(25): SEQ ID NO: 6418; WAN024BL7; Start 554; Stop 578
gacattctcacatatccctacttgc

SEQ ID NO: 437939 - DNA, 25 bp, Artificial
  probe
  misc_feature (1)..(25): SEQ ID NO: 6419; WAN024BPI; Start 17; Stop 41
aaataacacctatgagtttgacagt

SEQ ID NO: 437940 - DNA, 25 bp, Artificial
  probe
  misc_feature (1)..(25): SEQ ID NO: 6419; WAN024BPI; Start 15; Stop 39
tgaaataacacctatgagtttgaca

SEQ ID NO: 437941 - DNA, 25 bp, Artificial
  probe
  misc_feature (1)..(25): SEQ ID NO: 6419; WAN024BPI; Start 24; Stop 48
acctatgagtttgacagtgatattt

SEQ ID NO: 437942 - DNA, 25 bp, Artificial
  probe
  misc_feature (1)..(25): SEQ ID NO: 6419; WAN024BPI; Start 21; Stop 45
aacacctatgagtttgacagtgata

SEQ ID NO: 437943 - DNA, 25 bp, Artificial
  probe
  misc_feature (1)..(25): SEQ ID NO: 6419; WAN024BPI; Start 20; Stop 44
taacacctatgagtttgacagtgat

SEQ ID NO: 437944 - DNA, 25 bp, Artificial
  probe
  misc_feature (1)..(25): SEQ ID NO: 6419; WAN024BPI; Start 19; Stop 43
ataacacctatgagtttgacagtga

SEQ ID NO: 437945 - DNA, 25 bp, Artificial
  probe
  misc_feature (1)..(25): SEQ ID NO: 6419; WAN024BPI; Start 22; Stop 46
acacctatgagtttgacagtgatat

SEQ ID NO: 437946 - DNA, 25 bp, Artificial
  probe
  misc_feature (1)..(25): SEQ ID NO: 6419; WAN024BPI; Start 16; Stop 40
gaaataacacctatgagtttgacag

SEQ ID NO: 437947 - DNA, 25 bp, Artificial
  probe
  misc_feature (1)..(25): SEQ ID NO: 6419; WAN024BPI; Start 18; Stop 42
aataacacctatgagtttgacagtg

SEQ ID NO: 437948 - DNA, 25 bp, Artificial
  probe
  misc_feature (1)..(25): SEQ ID NO: 6419; WAN024BPI; Start 25; Stop 49
cctatgagtttgacagtgatatttc

SEQ ID NO: 437949 - DNA, 25 bp, Artificial
  probe
  misc_feature (1)..(25): SEQ ID NO: 6419; WAN024BPI; Start 23; Stop 47
cacctatgagtttgacagtgatatt

SEQ ID NO: 437950 - DNA, 25 bp, Artificial
  probe
  misc_feature (1)..(25): SEQ ID NO: 6419; WAN024BPI; Start 14; Stop 38
ttgaaataacacctatgagtttgac

SEQ ID NO: 437951 - DNA, 25 bp, Artificial
  probe
  misc_feature (1)..(25): SEQ ID NO: 6419; WAN024BPI; Start 32; Stop 56
gtttgacagtgatatttctaacagt

SEQ ID NO: 437952 - DNA, 25 bp, Artificial
  probe
  misc_feature (1)..(25): SEQ ID NO: 6419; WAN024BPI; Start 31; Stop 55
agtttgacagtgatatttctaacag

SEQ ID NO: 437953 - DNA, 25 bp, Artificial
  probe
  misc_feature (1)..(25): SEQ ID NO: 6419; WAN024BPI; Start 30; Stop 54
gagtttgacagtgatatttctaaca

SEQ ID NO: 437954 - DNA, 25 bp, Artificial
  probe
  misc_feature (1)..(25): SEQ ID NO: 6419; WAN024BPI; Start 29; Stop 53
tgagtttgacagtgatatttctaac

SEQ ID NO: 437955 - DNA, 25 bp, Artificial
  probe
  misc_feature (1)..(25): SEQ ID NO: 6419; WAN024BPI; Start 26; Stop 50
ctatgagtttgacagtgatatttct

SEQ ID NO: 437956 - DNA, 25 bp, Artificial
  probe
  misc_feature (1)..(25): SEQ ID NO: 6419; WAN024BPI; Start 33; Stop 57
tttgacagtgatatttctaacagtt

SEQ ID NO: 437957 - DNA, 25 bp, Artificial
  probe
  misc_feature (1)..(25): SEQ ID NO: 6419; WAN024BPI; Start 13; Stop 37
attgaaataacacctatgagtttga

SEQ ID NO: 437958 - DNA, 25 bp, Artificial
  probe
  misc_feature (1)..(25): SEQ ID NO: 6419; WAN024BPI; Start 28; Stop 52
atgagtttgacagtgatatttctaa

SEQ ID NO: 437959 - DNA, 25 bp, Artificial
  probe
  misc_feature (1)..(25): SEQ ID NO: 6419; WAN024BPI; Start 34; Stop 58
ttgacagtgatatttctaacagtta

SEQ ID NO: 437960 - DNA, 25 bp, Artificial
  probe
  misc_feature (1)..(25): SEQ ID NO: 6419; WAN024BPI; Start 35; Stop 59
tgacagtgatatttctaacagttat

SEQ ID NO: 437961 - DNA, 25 bp, Artificial
  probe
  misc_feature (1)..(25): SEQ ID NO: 6419; WAN024BPI; Start 27; Stop 51
tatgagtttgacagtgatatttcta

SEQ ID NO: 437962 - DNA, 25 bp, Artificial
  probe
  misc_feature (1)..(25): SEQ ID NO: 6419; WAN024BPI; Start 12; Stop 36
tattgaaataacacctatgagtttg

SEQ ID NO: 437963 - DNA, 25 bp, Artificial
  probe
  misc_feature (1)..(25): SEQ ID NO: 6419; WAN024BPI; Start 37; Stop 61
acagtgatatttctaacagttatct

SEQ ID NO: 437964 - DNA, 25 bp, Artificial
  probe
  misc_feature (1)..(25): SEQ ID NO: 6419; WAN024BPI; Start 36; Stop 60
gacagtgatatttctaacagttatc

SEQ ID NO: 437965 - DNA, 25 bp, Artificial
  probe
  misc_feature (1)..(25): SEQ ID NO: 6419; WAN024BPI; Start 40; Stop 64
gtgatatttctaacagttatcttcc

SEQ ID NO: 437966 - DNA, 25 bp, Artificial
  probe
  misc_feature (1)..(25): SEQ ID NO: 6419; WAN024BPI; Start 41; Stop 65
tgatatttctaacagttatcttcct

SEQ ID NO: 437967 - DNA, 25 bp, Artificial
  probe
  misc_feature (1)..(25): SEQ ID NO: 6419; WAN024BPI; Start 57; Stop 81
tatcttcctaaaatcttctagtcct

SEQ ID NO: 437968 - DNA, 25 bp, Artificial
  probe
  misc_feature (1)..(25): SEQ ID NO: 6419; WAN024BPI; Start 51; Stop 75
aacagttatcttcctaaaatcttct

SEQ ID NO: 437969 - DNA, 25 bp, Artificial
  probe
  misc_feature (1)..(25): SEQ ID NO: 6419; WAN024BPI; Start 56; Stop 80
ttatcttcctaaaatcttctagtcc

SEQ ID NO: 437970 - DNA, 25 bp, Artificial
  probe
  misc_feature (1)..(25): SEQ ID NO: 6419; WAN024BPI; Start 52; Stop 76
acagttatcttcctaaaatcttcta

SEQ ID NO: 437971 - DNA, 25 bp, Artificial
  probe
  misc_feature (1)..(25): SEQ ID NO: 6419; WAN024BPI; Start 48; Stop 72
tctaacagttatcttcctaaaatct

SEQ ID NO: 437972 - DNA, 25 bp, Artificial
  probe
  misc_feature (1)..(25): SEQ ID NO: 6420; WAN024CTP-5; Start 802; Stop 826
aatgaagcagacaagaataaggatg

SEQ ID NO: 437973 - DNA, 25 bp, Artificial
  probe
  misc_feature (1)..(25): SEQ ID NO: 6420; WAN024CTP-5; Start 2303; Stop 2327
accaagataatacacctgtcaagag

SEQ ID NO: 437974 - DNA, 25 bp, Artificial
  probe
  misc_feature (1)..(25): SEQ ID NO: 6420; WAN024CTP-5; Start 2260; Stop 2284
tggacaggaattgactatattggag

SEQ ID NO: 437975 - DNA, 25 bp, Artificial
  probe
  misc_feature (1)..(25): SEQ ID NO: 6420; WAN024CTP-5; Start 2302; Stop 2326
aaccaagataatacacctgtcaaga

SEQ ID NO: 437976 - DNA, 25 bp, Artificial
  probe
  misc_feature (1)..(25): SEQ ID NO: 6420; WAN024CTP-5; Start 2261; Stop 2285
ggacaggaattgactatattggaga

SEQ ID NO: 437977 - DNA, 25 bp, Artificial
  probe
  misc_feature (1)..(25): SEQ ID NO: 6420; WAN024CTP-5; Start 2259; Stop 2283
ctggacaggaattgactatattgga

SEQ ID NO: 437978 - DNA, 25 bp, Artificial
  probe
  misc_feature (1)..(25): SEQ ID NO: 6420; WAN024CTP-5; Start 2258; Stop 2282
tctggacaggaattgactatattgg

SEQ ID NO: 437979 - DNA, 25 bp, Artificial
  probe
  misc_feature (1)..(25): SEQ ID NO: 6420; WAN024CTP-5; Start 2298; Stop 2322
gcataaccaagataatacacctgtc

SEQ ID NO: 437980 - DNA, 25 bp, Artificial
  probe
  misc_feature (1)..(25): SEQ ID NO: 6420; WAN024CTP-5; Start 2297; Stop 2321
ggcataaccaagataatacacctgt

SEQ ID NO: 437981 - DNA, 25 bp, Artificial
  probe
  misc_feature (1)..(25): SEQ ID NO: 6420; WAN024CTP-5; Start 1329; Stop 1353
ttatcatcctcaactgtatgtgctg

SEQ ID NO: 437982 - DNA, 25 bp, Artificial
  probe
  misc_feature (1)..(25): SEQ ID NO: 6420; WAN024CTP-5; Start 977; Stop 1001
aagtgaccaataagcaaccaagtag

SEQ ID NO: 437983 - DNA, 25 bp, Artificial
  probe
  misc_feature (1)..(25): SEQ ID NO: 6420; WAN024CTP-5; Start 1328; Stop 1352
gttatcatcctcaactgtatgtgct

SEQ ID NO: 437984 - DNA, 25 bp, Artificial
  probe
  misc_feature (1)..(25): SEQ ID NO: 6420; WAN024CTP-5; Start 2264; Stop 2288
caggaattgactatattggagaacc

SEQ ID NO: 437985 - DNA, 25 bp, Artificial
  probe
  misc_feature (1)..(25): SEQ ID NO: 6420; WAN024CTP-5; Start 2157; Stop 2181
tgaacaatctgactatggtaatgac

SEQ ID NO: 437986 - DNA, 25 bp, Artificial
  probe
  misc_feature (1)..(25): SEQ ID NO: 6420; WAN024CTP-5; Start 976; Stop 1000
caagtgaccaataagcaaccaagta

SEQ ID NO: 437987 - DNA, 25 bp, Artificial
  probe
  misc_feature (1)..(25): SEQ ID NO: 6420; WAN024CTP-5; Start 2304; Stop 2328
ccaagataatacacctgtcaagagc

SEQ ID NO: 437988 - DNA, 25 bp, Artificial
  probe
  misc_feature (1)..(25): SEQ ID NO: 6420; WAN024CTP-5; Start 996; Stop 1020
aagtagtcgttggtattcaggaagt

SEQ ID NO: 437989 - DNA, 25 bp, Artificial
  probe
  misc_feature (1)..(25): SEQ ID NO: 6420; WAN024CTP-5; Start 967; Stop 991
attactgttcaagtgaccaataagc

SEQ ID NO: 437990 - DNA, 25 bp, Artificial
  probe
  misc_feature (1)..(25): SEQ ID NO: 6420; WAN024CTP-5; Start 969; Stop 993
tactgttcaagtgaccaataagcaa

SEQ ID NO: 437991 - DNA, 25 bp, Artificial
  probe
  misc_feature (1)..(25): SEQ ID NO: 6420; WAN024CTP-5; Start 968; Stop 992
ttactgttcaagtgaccaataagca

SEQ ID NO: 437992 - DNA, 25 bp, Artificial
  probe
  misc_feature (1)..(25): SEQ ID NO: 6420; WAN024CTP-5; Start 995; Stop 1019
caagtagtcgttggtattcaggaag

SEQ ID NO: 437993 - DNA, 25 bp, Artificial
  probe
  misc_feature (1)..(25): SEQ ID NO: 6420; WAN024CTP-5; Start 2299; Stop 2323
cataaccaagataatacacctgtca

SEQ ID NO: 437994 - DNA, 25 bp, Artificial
  probe
  misc_feature (1)..(25): SEQ ID NO: 6420; WAN024CTP-5; Start 963; Stop 987
ttcaattactgttcaagtgaccaat

SEQ ID NO: 437995 - DNA, 25 bp, Artificial
  probe
  misc_feature (1)..(25): SEQ ID NO: 6420; WAN024CTP-5; Start 962; Stop 986
attcaattactgttcaagtgaccaa

SEQ ID NO: 437996 - DNA, 25 bp, Artificial
  probe
  misc_feature (1)..(25): SEQ ID NO: 6420; WAN024CTP-5; Start 961; Stop 985
aattcaattactgttcaagtgacca

SEQ ID NO: 437997 - DNA, 25 bp, Artificial
  probe
  misc_feature (1)..(25): SEQ ID NO: 6420; WAN024CTP-5; Start 1470; Stop 1494
attccacggagtaagtattcaccat

SEQ ID NO: 437998 - DNA, 25 bp, Artificial
  probe
  misc_feature (1)..(25): SEQ ID NO: 6420; WAN024CTP-5; Start 805; Stop 829
gaagcagacaagaataaggatgttc

SEQ ID NO: 437999 - DNA, 25 bp, Artificial
  probe
  misc_feature (1)..(25): SEQ ID NO: 6420; WAN024CTP-5; Start 803; Stop 827
atgaagcagacaagaataaggatgt

SEQ ID NO: 438000 - DNA, 25 bp, Artificial
  probe
  misc_feature (1)..(25): SEQ ID NO: 6420; WAN024CTP-5; Start 2301; Stop 2325
taaccaagataatacacctgtcaag

SEQ ID NO: 438001 - DNA, 25 bp, Artificial
  probe
  misc_feature (1)..(25): SEQ ID NO: 6420; WAN024CTP-5; Start 2263; Stop 2287
acaggaattgactatattggagaac

SEQ ID NO: 438002 - DNA, 25 bp, Artificial
  probe
  misc_feature (1)..(25): SEQ ID NO: 6420; WAN024CTP-5; Start 804; Stop 828
tgaagcagacaagaataaggatgtt

SEQ ID NO: 438003 - DNA, 25 bp, Artificial
  probe
  misc_feature (1)..(25): SEQ ID NO: 6420; WAN024CTP-5; Start 1330; Stop 1354
tatcatcctcaactgtatgtgctga

SEQ ID NO: 438004 - DNA, 25 bp, Artificial
  probe
  misc_feature (1)..(25): SEQ ID NO: 6420; WAN024CTP-5; Start 1469; Stop 1493
aattccacggagtaagtattcacca

SEQ ID NO: 438005 - DNA, 25 bp, Artificial
  probe
  misc_feature (1)..(25): SEQ ID NO: 6421; WAN024FSW; Start 702; Stop 726
agagttcggtgagaatggtattgaa

SEQ ID NO: 438006 - DNA, 25 bp, Artificial
  probe
  misc_feature (1)..(25): SEQ ID NO: 6421; WAN024FSW; Start 701; Stop 725
aagagttcggtgagaatggtattga

SEQ ID NO: 438007 - DNA, 25 bp, Artificial
  probe
  misc_feature (1)..(25): SEQ ID NO: 6421; WAN024FSW; Start 1056; Stop 1080
cttcacctatgattcaggaaccatt

SEQ ID NO: 438008 - DNA, 25 bp, Artificial
  probe
  misc_feature (1)..(25): SEQ ID NO: 6421; WAN024FSW; Start 814; Stop 838
acaatagtattaactagcggttcgt

SEQ ID NO: 438009 - DNA, 25 bp, Artificial
  probe
  misc_feature (1)..(25): SEQ ID NO: 6421; WAN024FSW; Start 817; Stop 841
atagtattaactagcggttcgttgg

SEQ ID NO: 438010 - DNA, 25 bp, Artificial
  probe
  misc_feature (1)..(25): SEQ ID NO: 6421; WAN024FSW; Start 816; Stop 840
aatagtattaactagcggttcgttg

SEQ ID NO: 438011 - DNA, 25 bp, Artificial
  probe
  misc_feature (1)..(25): SEQ ID NO: 6421; WAN024FSW; Start 815; Stop 839
caatagtattaactagcggttcgtt

SEQ ID NO: 438012 - DNA, 25 bp, Artificial
  probe
  misc_feature (1)..(25): SEQ ID NO: 6421; WAN024FSW; Start 813; Stop 837
aacaatagtattaactagcggttcg

SEQ ID NO: 438013 - DNA, 25 bp, Artificial
  probe
  misc_feature (1)..(25): SEQ ID NO: 6421; WAN024FSW; Start 486; Stop 510
cctcggtatagataaatcacgctta

SEQ ID NO: 438014 - DNA, 25 bp, Artificial
  probe
  misc_feature (1)..(25): SEQ ID NO: 6421; WAN024FSW; Start 482; Stop 506
aactcctcggtatagataaatcacg

SEQ ID NO: 438015 - DNA, 25 bp, Artificial
  probe
  misc_feature (1)..(25): SEQ ID NO: 6421; WAN024FSW; Start 441; Stop 465
tacagaaacgaaacttgaaggaaac

SEQ ID NO: 438016 - DNA, 25 bp, Artificial
  probe
  misc_feature (1)..(25): SEQ ID NO: 6421; WAN024FSW; Start 443; Stop 467
cagaaacgaaacttgaaggaaacta

SEQ ID NO: 438017 - DNA, 25 bp, Artificial
  probe
  misc_feature (1)..(25): SEQ ID NO: 6421; WAN024FSW; Start 832; Stop 856
ggttcgttggctcataatttattgt

SEQ ID NO: 438018 - DNA, 25 bp, Artificial
  probe
  misc_feature (1)..(25): SEQ ID NO: 6421; WAN024FSW; Start 1167; Stop 1191
aggaaacagtgaatttgagaagagt

SEQ ID NO: 438019 - DNA, 25 bp, Artificial
  probe
  misc_feature (1)..(25): SEQ ID NO: 6421; WAN024FSW; Start 699; Stop 723
taaagagttcggtgagaatggtatt

SEQ ID NO: 438020 - DNA, 25 bp, Artificial
  probe
  misc_feature (1)..(25): SEQ ID NO: 6421; WAN024FSW; Start 698; Stop 722
gtaaagagttcggtgagaatggtat

SEQ ID NO: 438021 - DNA, 25 bp, Artificial
  probe
  misc_feature (1)..(25): SEQ ID NO: 6421; WAN024FSW; Start 1166; Stop 1190
aaggaaacagtgaatttgagaagag

SEQ ID NO: 438022 - DNA, 25 bp, Artificial
  probe
  misc_feature (1)..(25): SEQ ID NO: 6421; WAN024FSW; Start 1165; Stop 1189
gaaggaaacagtgaatttgagaaga

SEQ ID NO: 438023 - DNA, 25 bp, Artificial
  probe
  misc_feature (1)..(25): SEQ ID NO: 6421; WAN024FSW; Start 1164; Stop 1188
agaaggaaacagtgaatttgagaag

SEQ ID NO: 438024 - DNA, 25 bp, Artificial
  probe
  misc_feature (1)..(25): SEQ ID NO: 6421; WAN024FSW; Start 444; Stop 468
agaaacgaaacttgaaggaaactat

SEQ ID NO: 438025 - DNA, 25 bp, Artificial
  probe
  misc_feature (1)..(25): SEQ ID NO: 6421; WAN024FSW; Start 485; Stop 509
tcctcggtatagataaatcacgctt

SEQ ID NO: 438026 - DNA, 25 bp, Artificial
  probe
  misc_feature (1)..(25): SEQ ID NO: 6421; WAN024FSW; Start 1163; Stop 1187
aagaaggaaacagtgaatttgagaa

SEQ ID NO: 438027 - DNA, 25 bp, Artificial
  probe
  misc_feature (1)..(25): SEQ ID NO: 6421; WAN024FSW; Start 1162; Stop 1186
aaagaaggaaacagtgaatttgaga

SEQ ID NO: 438028 - DNA, 25 bp, Artificial
  probe
  misc_feature (1)..(25): SEQ ID NO: 6421; WAN024FSW; Start 1168; Stop 1192
ggaaacagtgaatttgagaagagtt

SEQ ID NO: 438029 - DNA, 25 bp, Artificial
  probe
  misc_feature (1)..(25): SEQ ID NO: 6421; WAN024FSW; Start 189; Stop 213
gaaaggtggtgttgtagattcaaag

SEQ ID NO: 438030 - DNA, 25 bp, Artificial
  probe
  misc_feature (1)..(25): SEQ ID NO: 6421; WAN024FSW; Start 129; Stop 153
tcccaaggtctttgaaatgaaacta

SEQ ID NO: 438031 - DNA, 25 bp, Artificial
  probe
  misc_feature (1)..(25): SEQ ID NO: 6421; WAN024FSW; Start 831; Stop 855
cggttcgttggctcataatttattg

SEQ ID NO: 438032 - DNA, 25 bp, Artificial
  probe
  misc_feature (1)..(25): SEQ ID NO: 6421; WAN024FSW; Start 694; Stop 718
aaaggtaaagagttcggtgagaatg

SEQ ID NO: 438033 - DNA, 25 bp, Artificial
  probe
  misc_feature (1)..(25): SEQ ID NO: 6421; WAN024FSW; Start 442; Stop 466
acagaaacgaaacttgaaggaaact

SEQ ID NO: 438034 - DNA, 25 bp, Artificial
  probe
  misc_feature (1)..(25): SEQ ID NO: 6421; WAN024FSW; Start 811; Stop 835
acaacaatagtattaactagcggtt

SEQ ID NO: 438035 - DNA, 25 bp, Artificial
  probe
  misc_feature (1)..(25): SEQ ID NO: 6421; WAN024FSW; Start 703; Stop 727
gagttcggtgagaatggtattgaaa

SEQ ID NO: 438036 - DNA, 25 bp, Artificial
  probe
  misc_feature (1)..(25): SEQ ID NO: 6421; WAN024FSW; Start 700; Stop 724
aaagagttcggtgagaatggtattg

SEQ ID NO: 438037 - DNA, 25 bp, Artificial
  probe
  misc_feature (1)..(25): SEQ ID NO: 6421; WAN024FSW; Start 130; Stop 154
cccaaggtctttgaaatgaaactat

SEQ ID NO: 438038 - DNA, 25 bp, Artificial
  probe
  misc_feature (1)..(25): SEQ ID NO: 6422; WAN024GNC; Start 45; Stop 69
aattattgatgtcaacaagccactg

SEQ ID NO: 438039 - DNA, 25 bp, Artificial
  probe
  misc_feature (1)..(25): SEQ ID NO: 6422; WAN024GNC; Start 46; Stop 70
attattgatgtcaacaagccactga

SEQ ID NO: 438040 - DNA, 25 bp, Artificial
  probe
  misc_feature (1)..(25): SEQ ID NO: 6422; WAN024GNC; Start 47; Stop 71
ttattgatgtcaacaagccactgaa

SEQ ID NO: 438041 - DNA, 25 bp, Artificial
  probe
  misc_feature (1)..(25): SEQ ID NO: 6422; WAN024GNC; Start 44; Stop 68
aaattattgatgtcaacaagccact

SEQ ID NO: 438042 - DNA, 25 bp, Artificial
  probe
  misc_feature (1)..(25): SEQ ID NO: 6422; WAN024GNC; Start 43; Stop 67
caaattattgatgtcaacaagccac

SEQ ID NO: 438043 - DNA, 25 bp, Artificial
  probe
  misc_feature (1)..(25): SEQ ID NO: 6422; WAN024GNC; Start 42; Stop 66
ccaaattattgatgtcaacaagcca

SEQ ID NO: 438044 - DNA, 25 bp, Artificial
  probe
  misc_feature (1)..(25): SEQ ID NO: 6422; WAN024GNC; Start 41; Stop 65
accaaattattgatgtcaacaagcc

SEQ ID NO: 438045 - DNA, 25 bp, Artificial
  probe
  misc_feature (1)..(25): SEQ ID NO: 6422; WAN024GNC; Start 48; Stop 72
tattgatgtcaacaagccactgaaa

SEQ ID NO: 438046 - DNA, 25 bp, Artificial
  probe
  misc_feature (1)..(25): SEQ ID NO: 6422; WAN024GNC; Start 40; Stop 64
taccaaattattgatgtcaacaagc

SEQ ID NO: 438047 - DNA, 25 bp, Artificial
  probe
  misc_feature (1)..(25): SEQ ID NO: 6422; WAN024GNC; Start 32; Stop 56
cccttgaataccaaattattgatgt

SEQ ID NO: 438048 - DNA, 25 bp, Artificial
  probe
  misc_feature (1)..(25): SEQ ID NO: 6422; WAN024GNC; Start 28; Stop 52
acttcccttgaataccaaattattg

SEQ ID NO: 438049 - DNA, 25 bp, Artificial
  probe
  misc_feature (1)..(25): SEQ ID NO: 6422; WAN024GNC; Start 49; Stop 73
attgatgtcaacaagccactgaaag

SEQ ID NO: 438050 - DNA, 25 bp, Artificial
  probe
  misc_feature (1)..(25): SEQ ID NO: 6422; WAN024GNC; Start 31; Stop 55
tcccttgaataccaaattattgatg

SEQ ID NO: 438051 - DNA, 25 bp, Artificial
  probe
  misc_feature (1)..(25): SEQ ID NO: 6422; WAN024GNC; Start 29; Stop 53
cttcccttgaataccaaattattga

SEQ ID NO: 438052 - DNA, 25 bp, Artificial
  probe
  misc_feature (1)..(25): SEQ ID NO: 6422; WAN024GNC; Start 30; Stop 54
ttcccttgaataccaaattattgat

SEQ ID NO: 438053 - DNA, 25 bp, Artificial
  probe
  misc_feature (1)..(25): SEQ ID NO: 6422; WAN024GNC; Start 33; Stop 57
ccttgaataccaaattattgatgtc

SEQ ID NO: 438054 - DNA, 25 bp, Artificial
  probe
  misc_feature (1)..(25): SEQ ID NO: 6422; WAN024GNC; Start 53; Stop 77
atgtcaacaagccactgaaaggttt

SEQ ID NO: 438055 - DNA, 25 bp, Artificial
  probe
  misc_feature (1)..(25): SEQ ID NO: 6422; WAN024GNC; Start 8; Stop 32
acaaggcaaacaattggtatacttc

SEQ ID NO: 438056 - DNA, 25 bp, Artificial
  probe
  misc_feature (1)..(25): SEQ ID NO: 6422; WAN024GNC; Start 6; Stop 30
caacaaggcaaacaattggtatact

SEQ ID NO: 438057 - DNA, 25 bp, Artificial
  probe
  misc_feature (1)..(25): SEQ ID NO: 6422; WAN024GNC; Start 4; Stop 28
aacaacaaggcaaacaattggtata

SEQ ID NO: 438058 - DNA, 25 bp, Artificial
  probe
  misc_feature (1)..(25): SEQ ID NO: 6422; WAN024GNC; Start 7; Stop 31
aacaaggcaaacaattggtatactt

SEQ ID NO: 438059 - DNA, 25 bp, Artificial
  probe
  misc_feature (1)..(25): SEQ ID NO: 6422; WAN024GNC; Start 5; Stop 29
acaacaaggcaaacaattggtatac

SEQ ID NO: 438060 - DNA, 25 bp, Artificial
  probe
  misc_feature (1)..(25): SEQ ID NO: 6422; WAN024GNC; Start 13; Stop 37
gcaaacaattggtatacttcccttg

SEQ ID NO: 438061 - DNA, 25 bp, Artificial
  probe
  misc_feature (1)..(25): SEQ ID NO: 6422; WAN024GNC; Start 9; Stop 33
caaggcaaacaattggtatacttcc

SEQ ID NO: 438062 - DNA, 25 bp, Artificial
  probe
  misc_feature (1)..(25): SEQ ID NO: 6422; WAN024GNC; Start 14; Stop 38
caaacaattggtatacttcccttga

SEQ ID NO: 438063 - DNA, 25 bp, Artificial
  probe
  misc_feature (1)..(25): SEQ ID NO: 6422; WAN024GNC; Start 3; Stop 27
gaacaacaaggcaaacaattggtat

SEQ ID NO: 438064 - DNA, 25 bp, Artificial
  probe
  misc_feature (1)..(25): SEQ ID NO: 6422; WAN024GNC; Start 15; Stop 39
aaacaattggtatacttcccttgaa

SEQ ID NO: 438065 - DNA, 25 bp, Artificial
  probe
  misc_feature (1)..(25): SEQ ID NO: 6422; WAN024GNC; Start 12; Stop 36
ggcaaacaattggtatacttccctt

SEQ ID NO: 438066 - DNA, 25 bp, Artificial
  probe
  misc_feature (1)..(25): SEQ ID NO: 6422; WAN024GNC; Start 10; Stop 34
aaggcaaacaattggtatacttccc

SEQ ID NO: 438067 - DNA, 25 bp, Artificial
  probe
  misc_feature (1)..(25): SEQ ID NO: 6422; WAN024GNC; Start 27; Stop 51
tacttcccttgaataccaaattatt

SEQ ID NO: 438068 - DNA, 25 bp, Artificial
  probe
  misc_feature (1)..(25): SEQ ID NO: 6422; WAN024GNC; Start 16; Stop 40
aacaattggtatacttcccttgaat

SEQ ID NO: 438069 - DNA, 25 bp, Artificial
  probe
  misc_feature (1)..(25): SEQ ID NO: 6422; WAN024GNC; Start 52; Stop 76
gatgtcaacaagccactgaaaggtt

SEQ ID NO: 438070 - DNA, 25 bp, Artificial
  probe
  misc_feature (1)..(25): SEQ ID NO: 6422; WAN024GNC; Start 37; Stop 61
gaataccaaattattgatgtcaaca

SEQ ID NO: 438071 - DNA, 25 bp, Artificial
  probe
  misc_feature (1)..(25): SEQ ID NO: 6423; WAN024BV8; Start 295; Stop 319
gaagaggattattcgtatgcggtaa

SEQ ID NO: 438072 - DNA, 25 bp, Artificial
  probe
  misc_feature (1)..(25): SEQ ID NO: 6423; WAN024BV8; Start 291; Stop 315
atctgaagaggattattcgtatgcg

SEQ ID NO: 438073 - DNA, 25 bp, Artificial
  probe
  misc_feature (1)..(25): SEQ ID NO: 6423; WAN024BV8; Start 174; Stop 198
tggatggaatgagattatcacaaca

SEQ ID NO: 438074 - DNA, 25 bp, Artificial
  probe
  misc_feature (1)..(25): SEQ ID NO: 6423; WAN024BV8; Start 162; Stop 186
tgtagttcagtatggatggaatgag

SEQ ID NO: 438075 - DNA, 25 bp, Artificial
  probe
  misc_feature (1)..(25): SEQ ID NO: 6423; WAN024BV8; Start 163; Stop 187
gtagttcagtatggatggaatgaga

SEQ ID NO: 438076 - DNA, 25 bp, Artificial
  probe
  misc_feature (1)..(25): SEQ ID NO: 6423; WAN024BV8; Start 165; Stop 189
agttcagtatggatggaatgagatt

SEQ ID NO: 438077 - DNA, 25 bp, Artificial
  probe
  misc_feature (1)..(25): SEQ ID NO: 6423; WAN024BV8; Start 161; Stop 185
ttgtagttcagtatggatggaatga

SEQ ID NO: 438078 - DNA, 25 bp, Artificial
  probe
  misc_feature (1)..(25): SEQ ID NO: 6423; WAN024BV8; Start 294; Stop 318
tgaagaggattattcgtatgcggta

SEQ ID NO: 438079 - DNA, 25 bp, Artificial
  probe
  misc_feature (1)..(25): SEQ ID NO: 6423; WAN024BV8; Start 175; Stop 199
ggatggaatgagattatcacaacaa

SEQ ID NO: 438080 - DNA, 25 bp, Artificial
  probe
  misc_feature (1)..(25): SEQ ID NO: 6423; WAN024BV8; Start 173; Stop 197
atggatggaatgagattatcacaac

SEQ ID NO: 438081 - DNA, 25 bp, Artificial
  probe
  misc_feature (1)..(25): SEQ ID NO: 6423; WAN024BV8; Start 164; Stop 188
tagttcagtatggatggaatgagat

SEQ ID NO: 438082 - DNA, 25 bp, Artificial
  probe
  misc_feature (1)..(25): SEQ ID NO: 6423; WAN024BV8; Start 171; Stop 195
gtatggatggaatgagattatcaca

SEQ ID NO: 438083 - DNA, 25 bp, Artificial
  probe
  misc_feature (1)..(25): SEQ ID NO: 6423; WAN024BV8; Start 166; Stop 190
gttcagtatggatggaatgagatta

SEQ ID NO: 438084 - DNA, 25 bp, Artificial
  probe
  misc_feature (1)..(25): SEQ ID NO: 6423; WAN024BV8; Start 292; Stop 316
tctgaagaggattattcgtatgcgg

SEQ ID NO: 438085 - DNA, 25 bp, Artificial
  probe
  misc_feature (1)..(25): SEQ ID NO: 6423; WAN024BV8; Start 170; Stop 194
agtatggatggaatgagattatcac

SEQ ID NO: 438086 - DNA, 25 bp, Artificial
  probe
  misc_feature (1)..(25): SEQ ID NO: 6423; WAN024BV8; Start 169; Stop 193
cagtatggatggaatgagattatca

SEQ ID NO: 438087 - DNA, 25 bp, Artificial
  probe
  misc_feature (1)..(25): SEQ ID NO: 6423; WAN024BV8; Start 293; Stop 317
ctgaagaggattattcgtatgcggt

SEQ ID NO: 438088 - DNA, 25 bp, Artificial
  probe
  misc_feature (1)..(25): SEQ ID NO: 6423; WAN024BV8; Start 168; Stop 192
tcagtatggatggaatgagattatc

SEQ ID NO: 438089 - DNA, 25 bp, Artificial
  probe
  misc_feature (1)..(25): SEQ ID NO: 6423; WAN024BV8; Start 296; Stop 320
aagaggattattcgtatgcggtaaa

SEQ ID NO: 438090 - DNA, 25 bp, Artificial
  probe
  misc_feature (1)..(25): SEQ ID NO: 6423; WAN024BV8; Start 150; Stop 174
tgtatcgccatttgtagttcagtat

SEQ ID NO: 438091 - DNA, 25 bp, Artificial
  probe
  misc_feature (1)..(25): SEQ ID NO: 6423; WAN024BV8; Start 138; Stop 162
atttgtaatcgttgtatcgccattt

SEQ ID NO: 438092 - DNA, 25 bp, Artificial
  probe
  misc_feature (1)..(25): SEQ ID NO: 6423; WAN024BV8; Start 136; Stop 160
gtatttgtaatcgttgtatcgccat

SEQ ID NO: 438093 - DNA, 25 bp, Artificial
  probe
  misc_feature (1)..(25): SEQ ID NO: 6423; WAN024BV8; Start 149; Stop 173
ttgtatcgccatttgtagttcagta

SEQ ID NO: 438094 - DNA, 25 bp, Artificial
  probe
  misc_feature (1)..(25): SEQ ID NO: 6423; WAN024BV8; Start 142; Stop 166
gtaatcgttgtatcgccatttgtag

SEQ ID NO: 438095 - DNA, 25 bp, Artificial
  probe
  misc_feature (1)..(25): SEQ ID NO: 6423; WAN024BV8; Start 299; Stop 323
aggattattcgtatgcggtaaagag

SEQ ID NO: 438096 - DNA, 25 bp, Artificial
  probe
  misc_feature (1)..(25): SEQ ID NO: 6423; WAN024BV8; Start 298; Stop 322
gaggattattcgtatgcggtaaaga

SEQ ID NO: 438097 - DNA, 25 bp, Artificial
  probe
  misc_feature (1)..(25): SEQ ID NO: 6423; WAN024BV8; Start 297; Stop 321
agaggattattcgtatgcggtaaag

SEQ ID NO: 438098 - DNA, 25 bp, Artificial
  probe
  misc_feature (1)..(25): SEQ ID NO: 6423; WAN024BV8; Start 290; Stop 314
aatctgaagaggattattcgtatgc

SEQ ID NO: 438099 - DNA, 25 bp, Artificial
  probe
  misc_feature (1)..(25): SEQ ID NO: 6423; WAN024BV8; Start 143; Stop 167
taatcgttgtatcgccatttgtagt

SEQ ID NO: 438100 - DNA, 25 bp, Artificial
  probe
  misc_feature (1)..(25): SEQ ID NO: 6423; WAN024BV8; Start 139; Stop 163
tttgtaatcgttgtatcgccatttg

SEQ ID NO: 438101 - DNA, 25 bp, Artificial
  probe
  misc_feature (1)..(25): SEQ ID NO: 6423; WAN024BV8; Start 172; Stop 196
tatggatggaatgagattatcacaa

SEQ ID NO: 438102 - DNA, 25 bp, Artificial
  probe
  misc_feature (1)..(25): SEQ ID NO: 6423; WAN024BV8; Start 137; Stop 161
tatttgtaatcgttgtatcgccatt

SEQ ID NO: 438103 - DNA, 25 bp, Artificial
  probe
  misc_feature (1)..(25): SEQ ID NO: 6423; WAN024BV8; Start 141; Stop 165
tgtaatcgttgtatcgccatttgta

SEQ ID NO: 438104 - DNA, 25 bp, Artificial
  probe
  misc_feature (1)..(25): SEQ ID NO: 6424; WAN024BXL; Start 144; Stop 168
gacagagttagcagaggagattgaa

SEQ ID NO: 438105 - DNA, 25 bp, Artificial
  probe
  misc_feature (1)..(25): SEQ ID NO: 6424; WAN024BXL; Start 108; Stop 132
attctgtactaactgccgtcaattc

SEQ ID NO: 438106 - DNA, 25 bp, Artificial
  probe
  misc_feature (1)..(25): SEQ ID NO: 6424; WAN024BXL; Start 107; Stop 131
cattctgtactaactgccgtcaatt

SEQ ID NO: 438107 - DNA, 25 bp, Artificial
  probe
  misc_feature (1)..(25): SEQ ID NO: 6424; WAN024BXL; Start 145; Stop 169
acagagttagcagaggagattgaac

SEQ ID NO: 438108 - DNA, 25 bp, Artificial
  probe
  misc_feature (1)..(25): SEQ ID NO: 6424; WAN024BXL; Start 141; Stop 165
atggacagagttagcagaggagatt

SEQ ID NO: 438109 - DNA, 25 bp, Artificial
  probe
  misc_feature (1)..(25): SEQ ID NO: 6424; WAN024BXL; Start 7; Stop 31
acattaaacgagaaagcaatcaaca

SEQ ID NO: 438110 - DNA, 25 bp, Artificial
  probe
  misc_feature (1)..(25): SEQ ID NO: 6424; WAN024BXL; Start 5; Stop 29
acacattaaacgagaaagcaatcaa

SEQ ID NO: 438111 - DNA, 25 bp, Artificial
  probe
  misc_feature (1)..(25): SEQ ID NO: 6424; WAN024BXL; Start 4; Stop 28
aacacattaaacgagaaagcaatca

SEQ ID NO: 438112 - DNA, 25 bp, Artificial
  probe
  misc_feature (1)..(25): SEQ ID NO: 6424; WAN024BXL; Start 2; Stop 26
tgaacacattaaacgagaaagcaat

SEQ ID NO: 438113 - DNA, 25 bp, Artificial
  probe
  misc_feature (1)..(25): SEQ ID NO: 6424; WAN024BXL; Start 6; Stop 30
cacattaaacgagaaagcaatcaac

SEQ ID NO: 438114 - DNA, 25 bp, Artificial
  probe
  misc_feature (1)..(25): SEQ ID NO: 6424; WAN024BXL; Start 3; Stop 27
gaacacattaaacgagaaagcaatc

SEQ ID NO: 438115 - DNA, 25 bp, Artificial
  probe
  misc_feature (1)..(25): SEQ ID NO: 6424; WAN024BXL; Start 1; Stop 25
atgaacacattaaacgagaaagcaa

SEQ ID NO: 438116 - DNA, 25 bp, Artificial
  probe
  misc_feature (1)..(25): SEQ ID NO: 6424; WAN024BXL; Start 23; Stop 47
caatcaacatcttcaaagcagtagc

SEQ ID NO: 438117 - DNA, 25 bp, Artificial
  probe
  misc_feature (1)..(25): SEQ ID NO: 6424; WAN024BXL; Start 22; Stop 46
gcaatcaacatcttcaaagcagtag

SEQ ID NO: 438118 - DNA, 25 bp, Artificial
  probe
  misc_feature (1)..(25): SEQ ID NO: 6424; WAN024BXL; Start 8; Stop 32
cattaaacgagaaagcaatcaacat

SEQ ID NO: 438119 - DNA, 25 bp, Artificial
  probe
  misc_feature (1)..(25): SEQ ID NO: 6424; WAN024BXL; Start 11; Stop 35
taaacgagaaagcaatcaacatctt

SEQ ID NO: 438120 - DNA, 25 bp, Artificial
  probe
  misc_feature (1)..(25): SEQ ID NO: 6424; WAN024BXL; Start 15; Stop 39
cgagaaagcaatcaacatcttcaaa

SEQ ID NO: 438121 - DNA, 25 bp, Artificial
  probe
  misc_feature (1)..(25): SEQ ID NO: 6424; WAN024BXL; Start 12; Stop 36
aaacgagaaagcaatcaacatcttc

SEQ ID NO: 438122 - DNA, 25 bp, Artificial
  probe
  misc_feature (1)..(25): SEQ ID NO: 6424; WAN024BXL; Start 10; Stop 34
ttaaacgagaaagcaatcaacatct

SEQ ID NO: 438123 - DNA, 25 bp, Artificial
  probe
  misc_feature (1)..(25): SEQ ID NO: 6424; WAN024BXL; Start 21; Stop 45
agcaatcaacatcttcaaagcagta

SEQ ID NO: 438124 - DNA, 25 bp, Artificial
  probe
  misc_feature (1)..(25): SEQ ID NO: 6424; WAN024BXL; Start 146; Stop 170
cagagttagcagaggagattgaacg

SEQ ID NO: 438125 - DNA, 25 bp, Artificial
  probe
  misc_feature (1)..(25): SEQ ID NO: 6424; WAN024BXL; Start 140; Stop 164
gatggacagagttagcagaggagat

SEQ ID NO: 438126 - DNA, 25 bp, Artificial
  probe
  misc_feature (1)..(25): SEQ ID NO: 6424; WAN024BXL; Start 19; Stop 43
aaagcaatcaacatcttcaaagcag

SEQ ID NO: 438127 - DNA, 25 bp, Artificial
  probe
  misc_feature (1)..(25): SEQ ID NO: 6424; WAN024BXL; Start 18; Stop 42
gaaagcaatcaacatcttcaaagca

SEQ ID NO: 438128 - DNA, 25 bp, Artificial
  probe
  misc_feature (1)..(25): SEQ ID NO: 6424; WAN024BXL; Start 17; Stop 41
agaaagcaatcaacatcttcaaagc

SEQ ID NO: 438129 - DNA, 25 bp, Artificial
  probe
  misc_feature (1)..(25): SEQ ID NO: 6424; WAN024BXL; Start 16; Stop 40
gagaaagcaatcaacatcttcaaag

SEQ ID NO: 438130 - DNA, 25 bp, Artificial
  probe
  misc_feature (1)..(25): SEQ ID NO: 6424; WAN024BXL; Start 9; Stop 33
attaaacgagaaagcaatcaacatc

SEQ ID NO: 438131 - DNA, 25 bp, Artificial
  probe
  misc_feature (1)..(25): SEQ ID NO: 6424; WAN024BXL; Start 143; Stop 167
ggacagagttagcagaggagattga

SEQ ID NO: 438132 - DNA, 25 bp, Artificial
  probe
  misc_feature (1)..(25): SEQ ID NO: 6424; WAN024BXL; Start 55; Stop 79
actttaatccaaggtacttacgagg

SEQ ID NO: 438133 - DNA, 25 bp, Artificial
  probe
  misc_feature (1)..(25): SEQ ID NO: 6424; WAN024BXL; Start 14; Stop 38
acgagaaagcaatcaacatcttcaa

SEQ ID NO: 438134 - DNA, 25 bp, Artificial
  probe
  misc_feature (1)..(25): SEQ ID NO: 6424; WAN024BXL; Start 13; Stop 37
aacgagaaagcaatcaacatcttca

SEQ ID NO: 438135 - DNA, 25 bp, Artificial
  probe
  misc_feature (1)..(25): SEQ ID NO: 6424; WAN024BXL; Start 109; Stop 133
ttctgtactaactgccgtcaattcg

SEQ ID NO: 438136 - DNA, 25 bp, Artificial
  probe
  misc_feature (1)..(25): SEQ ID NO: 6424; WAN024BXL; Start 142; Stop 166
tggacagagttagcagaggagattg

SEQ ID NO: 438137 - DNA, 25 bp, Artificial
  probe
  misc_feature (1)..(25): SEQ ID NO: 6425; WAN024DHS; Start 761; Stop 785
atgactacactaacctcttaaccag

SEQ ID NO: 438138 - DNA, 25 bp, Artificial
  probe
  misc_feature (1)..(25): SEQ ID NO: 6425; WAN024DHS; Start 553; Stop 577
gaacaaggtattcaatcaacgactg

SEQ ID NO: 438139 - DNA, 25 bp, Artificial
  probe
  misc_feature (1)..(25): SEQ ID NO: 6425; WAN024DHS; Start 556; Stop 580
caaggtattcaatcaacgactgttc

SEQ ID NO: 438140 - DNA, 25 bp, Artificial
  probe
  misc_feature (1)..(25): SEQ ID NO: 6425; WAN024DHS; Start 691; Stop 715
cgctacagagatatggaacgctata

SEQ ID NO: 438141 - DNA, 25 bp, Artificial
  probe
  misc_feature (1)..(25): SEQ ID NO: 6425; WAN024DHS; Start 762; Stop 786
tgactacactaacctcttaaccagc

SEQ ID NO: 438142 - DNA, 25 bp, Artificial
  probe
  misc_feature (1)..(25): SEQ ID NO: 6425; WAN024DHS; Start 760; Stop 784
catgactacactaacctcttaacca

SEQ ID NO: 438143 - DNA, 25 bp, Artificial
  probe
  misc_feature (1)..(25): SEQ ID NO: 6425; WAN024DHS; Start 759; Stop 783
ccatgactacactaacctcttaacc

SEQ ID NO: 438144 - DNA, 25 bp, Artificial
  probe
  misc_feature (1)..(25): SEQ ID NO: 6425; WAN024DHS; Start 5; Stop 29
acattgcttggatattgttgtatgc

SEQ ID NO: 438145 - DNA, 25 bp, Artificial
  probe
  misc_feature (1)..(25): SEQ ID NO: 6425; WAN024DHS; Start 758; Stop 782
gccatgactacactaacctcttaac

SEQ ID NO: 438146 - DNA, 25 bp, Artificial
  probe
  misc_feature (1)..(25): SEQ ID NO: 6425; WAN024DHS; Start 555; Stop 579
acaaggtattcaatcaacgactgtt

SEQ ID NO: 438147 - DNA, 25 bp, Artificial
  probe
  misc_feature (1)..(25): SEQ ID NO: 6425; WAN024DHS; Start 554; Stop 578
aacaaggtattcaatcaacgactgt

SEQ ID NO: 438148 - DNA, 25 bp, Artificial
  probe
  misc_feature (1)..(25): SEQ ID NO: 6425; WAN024DHS; Start 766; Stop 790
tacactaacctcttaaccagcttac

SEQ ID NO: 438149 - DNA, 25 bp, Artificial
  probe
  misc_feature (1)..(25): SEQ ID NO: 6425; WAN024DHS; Start 765; Stop 789
ctacactaacctcttaaccagctta

SEQ ID NO: 438150 - DNA, 25 bp, Artificial
  probe
  misc_feature (1)..(25): SEQ ID NO: 6425; WAN024DHS; Start 1308; Stop 1332
tcgtcaggtacttactgtgatacat

SEQ ID NO: 438151 - DNA, 25 bp, Artificial
  probe
  misc_feature (1)..(25): SEQ ID NO: 6425; WAN024DHS; Start 1307; Stop 1331
ttcgtcaggtacttactgtgataca

SEQ ID NO: 438152 - DNA, 25 bp, Artificial
  probe
  misc_feature (1)..(25): SEQ ID NO: 6425; WAN024DHS; Start 1226; Stop 1250
gagttggtctctataccgttatgaa

SEQ ID NO: 438153 - DNA, 25 bp, Artificial
  probe
  misc_feature (1)..(25): SEQ ID NO: 6425; WAN024DHS; Start 764; Stop 788
actacactaacctcttaaccagctt

SEQ ID NO: 438154 - DNA, 25 bp, Artificial
  probe
  misc_feature (1)..(25): SEQ ID NO: 6425; WAN024DHS; Start 692; Stop 716
gctacagagatatggaacgctatag

SEQ ID NO: 438155 - DNA, 25 bp, Artificial
  probe
  misc_feature (1)..(25): SEQ ID NO: 6425; WAN024DHS; Start 1309; Stop 1333
cgtcaggtacttactgtgatacatg

SEQ ID NO: 438156 - DNA, 25 bp, Artificial
  probe
  misc_feature (1)..(25): SEQ ID NO: 6425; WAN024DHS; Start 11; Stop 35
cttggatattgttgtatgcacttgt

SEQ ID NO: 438157 - DNA, 25 bp, Artificial
  probe
  misc_feature (1)..(25): SEQ ID NO: 6425; WAN024DHS; Start 1223; Stop 1247
gaggagttggtctctataccgttat

SEQ ID NO: 438158 - DNA, 25 bp, Artificial
  probe
  misc_feature (1)..(25): SEQ ID NO: 6425; WAN024DHS; Start 1310; Stop 1334
gtcaggtacttactgtgatacatgc

SEQ ID NO: 438159 - DNA, 25 bp, Artificial
  probe
  misc_feature (1)..(25): SEQ ID NO: 6425; WAN024DHS; Start 757; Stop 781
cgccatgactacactaacctcttaa

SEQ ID NO: 438160 - DNA, 25 bp, Artificial
  probe
  misc_feature (1)..(25): SEQ ID NO: 6425; WAN024DHS; Start 1273; Stop 1297
accaatctaaatactacctgccaaa

SEQ ID NO: 438161 - DNA, 25 bp, Artificial
  probe
  misc_feature (1)..(25): SEQ ID NO: 6425; WAN024DHS; Start 1034; Stop 1058
taaccattgtgtctatcctttgtga

SEQ ID NO: 438162 - DNA, 25 bp, Artificial
  probe
  misc_feature (1)..(25): SEQ ID NO: 6425; WAN024DHS; Start 12; Stop 36
ttggatattgttgtatgcacttgtt

SEQ ID NO: 438163 - DNA, 25 bp, Artificial
  probe
  misc_feature (1)..(25): SEQ ID NO: 6425; WAN024DHS; Start 694; Stop 718
tacagagatatggaacgctatagtc

SEQ ID NO: 438164 - DNA, 25 bp, Artificial
  probe
  misc_feature (1)..(25): SEQ ID NO: 6425; WAN024DHS; Start 693; Stop 717
ctacagagatatggaacgctatagt

SEQ ID NO: 438165 - DNA, 25 bp, Artificial
  probe
  misc_feature (1)..(25): SEQ ID NO: 6425; WAN024DHS; Start 1225; Stop 1249
ggagttggtctctataccgttatga

SEQ ID NO: 438166 - DNA, 25 bp, Artificial
  probe
  misc_feature (1)..(25): SEQ ID NO: 6425; WAN024DHS; Start 1224; Stop 1248
aggagttggtctctataccgttatg

SEQ ID NO: 438167 - DNA, 25 bp, Artificial
  probe
  misc_feature (1)..(25): SEQ ID NO: 6425; WAN024DHS; Start 1033; Stop 1057
ctaaccattgtgtctatcctttgtg

SEQ ID NO: 438168 - DNA, 25 bp, Artificial
  probe
  misc_feature (1)..(25): SEQ ID NO: 6425; WAN024DHS; Start 1032; Stop 1056
tctaaccattgtgtctatcctttgt

SEQ ID NO: 438169 - DNA, 25 bp, Artificial
  probe
  misc_feature (1)..(25): SEQ ID NO: 6425; WAN024DHS; Start 763; Stop 787
gactacactaacctcttaaccagct

SEQ ID NO: 438170 - DNA, 25 bp, Artificial
  probe
  misc_feature (1)..(25): SEQ ID NO: 6426; WAN024BLH; Start 235; Stop 259
aatggtgagattggaacagatagag

SEQ ID NO: 438171 - DNA, 25 bp, Artificial
  probe
  misc_feature (1)..(25): SEQ ID NO: 6426; WAN024BLH; Start 237; Stop 261
tggtgagattggaacagatagagta

SEQ ID NO: 438172 - DNA, 25 bp, Artificial
  probe
  misc_feature (1)..(25): SEQ ID NO: 6426; WAN024BLH; Start 417; Stop 441
tgaggaactggatagattaagaacg

SEQ ID NO: 438173 - DNA, 25 bp, Artificial
  probe
  misc_feature (1)..(25): SEQ ID NO: 6426; WAN024BLH; Start 238; Stop 262
ggtgagattggaacagatagagtat

SEQ ID NO: 438174 - DNA, 25 bp, Artificial
  probe
  misc_feature (1)..(25): SEQ ID NO: 6426; WAN024BLH; Start 720; Stop 744
ttcaataagagattccgcagttact

SEQ ID NO: 438175 - DNA, 25 bp, Artificial
  probe
  misc_feature (1)..(25): SEQ ID NO: 6426; WAN024BLH; Start 414; Stop 438
cgatgaggaactggatagattaaga

SEQ ID NO: 438176 - DNA, 25 bp, Artificial
  probe
  misc_feature (1)..(25): SEQ ID NO: 6426; WAN024BLH; Start 721; Stop 745
tcaataagagattccgcagttacta

SEQ ID NO: 438177 - DNA, 25 bp, Artificial
  probe
  misc_feature (1)..(25): SEQ ID NO: 6426; WAN024BLH; Start 236; Stop 260
atggtgagattggaacagatagagt

SEQ ID NO: 438178 - DNA, 25 bp, Artificial
  probe
  misc_feature (1)..(25): SEQ ID NO: 6426; WAN024BLH; Start 980; Stop 1004
ttgaactcacgaatggcataactaa

SEQ ID NO: 438179 - DNA, 25 bp, Artificial
  probe
  misc_feature (1)..(25): SEQ ID NO: 6426; WAN024BLH; Start 1233; Stop 1257
tcaagaattaagtcaagcagagcat

SEQ ID NO: 438180 - DNA, 25 bp, Artificial
  probe
  misc_feature (1)..(25): SEQ ID NO: 6426; WAN024BLH; Start 1599; Stop 1623
tctgttatcaagaggtaagtctgtg

SEQ ID NO: 438181 - DNA, 25 bp, Artificial
  probe
  misc_feature (1)..(25): SEQ ID NO: 6426; WAN024BLH; Start 434; Stop 458
taagaacgcagttatcagaatcaca

SEQ ID NO: 438182 - DNA, 25 bp, Artificial
  probe
  misc_feature (1)..(25): SEQ ID NO: 6426; WAN024BLH; Start 418; Stop 442
gaggaactggatagattaagaacgc

SEQ ID NO: 438183 - DNA, 25 bp, Artificial
  probe
  misc_feature (1)..(25): SEQ ID NO: 6426; WAN024BLH; Start 1690; Stop 1714
attcaacagagagagttagcagatg

SEQ ID NO: 438184 - DNA, 25 bp, Artificial
  probe
  misc_feature (1)..(25): SEQ ID NO: 6426; WAN024BLH; Start 1602; Stop 1626
gttatcaagaggtaagtctgtggtc

SEQ ID NO: 438185 - DNA, 25 bp, Artificial
  probe
  misc_feature (1)..(25): SEQ ID NO: 6426; WAN024BLH; Start 1600; Stop 1624
ctgttatcaagaggtaagtctgtgg

SEQ ID NO: 438186 - DNA, 25 bp, Artificial
  probe
  misc_feature (1)..(25): SEQ ID NO: 6426; WAN024BLH; Start 433; Stop 457
ttaagaacgcagttatcagaatcac

SEQ ID NO: 438187 - DNA, 25 bp, Artificial
  probe
  misc_feature (1)..(25): SEQ ID NO: 6426; WAN024BLH; Start 1689; Stop 1713
aattcaacagagagagttagcagat

SEQ ID NO: 438188 - DNA, 25 bp, Artificial
  probe
  misc_feature (1)..(25): SEQ ID NO: 6426; WAN024BLH; Start 435; Stop 459
aagaacgcagttatcagaatcacaa

SEQ ID NO: 438189 - DNA, 25 bp, Artificial
  probe
  misc_feature (1)..(25): SEQ ID NO: 6426; WAN024BLH; Start 1688; Stop 1712
taattcaacagagagagttagcaga

SEQ ID NO: 438190 - DNA, 25 bp, Artificial
  probe
  misc_feature (1)..(25): SEQ ID NO: 6426; WAN024BLH; Start 1601; Stop 1625
tgttatcaagaggtaagtctgtggt

SEQ ID NO: 438191 - DNA, 25 bp, Artificial
  probe
  misc_feature (1)..(25): SEQ ID NO: 6426; WAN024BLH; Start 1598; Stop 1622
atctgttatcaagaggtaagtctgt

SEQ ID NO: 438192 - DNA, 25 bp, Artificial
  probe
  misc_feature (1)..(25): SEQ ID NO: 6426; WAN024BLH; Start 419; Stop 443
aggaactggatagattaagaacgca

SEQ ID NO: 438193 - DNA, 25 bp, Artificial
  probe
  misc_feature (1)..(25): SEQ ID NO: 6426; WAN024BLH; Start 722; Stop 746
caataagagattccgcagttactat

SEQ ID NO: 438194 - DNA, 25 bp, Artificial
  probe
  misc_feature (1)..(25): SEQ ID NO: 6426; WAN024BLH; Start 2002; Stop 2026
actcacgattatacagaactacttg

SEQ ID NO: 438195 - DNA, 25 bp, Artificial
  probe
  misc_feature (1)..(25): SEQ ID NO: 6426; WAN024BLH; Start 432; Stop 456
attaagaacgcagttatcagaatca

SEQ ID NO: 438196 - DNA, 25 bp, Artificial
  probe
  misc_feature (1)..(25): SEQ ID NO: 6426; WAN024BLH; Start 979; Stop 1003
gttgaactcacgaatggcataacta

SEQ ID NO: 438197 - DNA, 25 bp, Artificial
  probe
  misc_feature (1)..(25): SEQ ID NO: 6426; WAN024BLH; Start 1603; Stop 1627
ttatcaagaggtaagtctgtggtcc

SEQ ID NO: 438198 - DNA, 25 bp, Artificial
  probe
  misc_feature (1)..(25): SEQ ID NO: 6426; WAN024BLH; Start 1234; Stop 1258
caagaattaagtcaagcagagcatg

SEQ ID NO: 438199 - DNA, 25 bp, Artificial
  probe
  misc_feature (1)..(25): SEQ ID NO: 6426; WAN024BLH; Start 430; Stop 454
agattaagaacgcagttatcagaat

SEQ ID NO: 438200 - DNA, 25 bp, Artificial
  probe
  misc_feature (1)..(25): SEQ ID NO: 6426; WAN024BLH; Start 1231; Stop 1255
tctcaagaattaagtcaagcagagc

SEQ ID NO: 438201 - DNA, 25 bp, Artificial
  probe
  misc_feature (1)..(25): SEQ ID NO: 6426; WAN024BLH; Start 1687; Stop 1711
ataattcaacagagagagttagcag

SEQ ID NO: 438202 - DNA, 25 bp, Artificial
  probe
  misc_feature (1)..(25): SEQ ID NO: 6426; WAN024BLH; Start 1686; Stop 1710
gataattcaacagagagagttagca

SEQ ID NO: 438203 - DNA, 25 bp, Artificial
  probe
  misc_feature (1)..(25): SEQ ID NO: 6427; WAN024CTE; Start 40; Stop 64
ggtcatatctgtaatctgaacacga

SEQ ID NO: 438204 - DNA, 25 bp, Artificial
  probe
  misc_feature (1)..(25): SEQ ID NO: 6427; WAN024CTE; Start 44; Stop 68
atatctgtaatctgaacacgacgag

SEQ ID NO: 438205 - DNA, 25 bp, Artificial
  probe
  misc_feature (1)..(25): SEQ ID NO: 6427; WAN024CTE; Start 39; Stop 63
tggtcatatctgtaatctgaacacg

SEQ ID NO: 438206 - DNA, 25 bp, Artificial
  probe
  misc_feature (1)..(25): SEQ ID NO: 6427; WAN024CTE; Start 43; Stop 67
catatctgtaatctgaacacgacga

SEQ ID NO: 438207 - DNA, 25 bp, Artificial
  probe
  misc_feature (1)..(25): SEQ ID NO: 6427; WAN024CTE; Start 42; Stop 66
tcatatctgtaatctgaacacgacg

SEQ ID NO: 438208 - DNA, 25 bp, Artificial
  probe
  misc_feature (1)..(25): SEQ ID NO: 6427; WAN024CTE; Start 224; Stop 248
atatccgttgcgatggtatcaattc

SEQ ID NO: 438209 - DNA, 25 bp, Artificial
  probe
  misc_feature (1)..(25): SEQ ID NO: 6427; WAN024CTE; Start 41; Stop 65
gtcatatctgtaatctgaacacgac

SEQ ID NO: 438210 - DNA, 25 bp, Artificial
  probe
  misc_feature (1)..(25): SEQ ID NO: 6427; WAN024CTE; Start 38; Stop 62
atggtcatatctgtaatctgaacac

SEQ ID NO: 438211 - DNA, 25 bp, Artificial
  probe
  misc_feature (1)..(25): SEQ ID NO: 6427; WAN024CTE; Start 45; Stop 69
tatctgtaatctgaacacgacgagg

SEQ ID NO: 438212 - DNA, 25 bp, Artificial
  probe
  misc_feature (1)..(25): SEQ ID NO: 6427; WAN024CTE; Start 86; Stop 110
actactgtatctgcaatatcctgag

SEQ ID NO: 438213 - DNA, 25 bp, Artificial
  probe
  misc_feature (1)..(25): SEQ ID NO: 6427; WAN024CTE; Start 85; Stop 109
gactactgtatctgcaatatcctga

SEQ ID NO: 438214 - DNA, 25 bp, Artificial
  probe
  misc_feature (1)..(25): SEQ ID NO: 6427; WAN024CTE; Start 87; Stop 111
ctactgtatctgcaatatcctgagc

SEQ ID NO: 438215 - DNA, 25 bp, Artificial
  probe
  misc_feature (1)..(25): SEQ ID NO: 6427; WAN024CTE; Start 37; Stop 61
aatggtcatatctgtaatctgaaca

SEQ ID NO: 438216 - DNA, 25 bp, Artificial
  probe
  misc_feature (1)..(25): SEQ ID NO: 6427; WAN024CTE; Start 88; Stop 112
tactgtatctgcaatatcctgagct

SEQ ID NO: 438217 - DNA, 25 bp, Artificial
  probe
  misc_feature (1)..(25): SEQ ID NO: 6427; WAN024CTE; Start 84; Stop 108
agactactgtatctgcaatatcctg

SEQ ID NO: 438218 - DNA, 25 bp, Artificial
  probe
  misc_feature (1)..(25): SEQ ID NO: 6427; WAN024CTE; Start 89; Stop 113
actgtatctgcaatatcctgagctt

SEQ ID NO: 438219 - DNA, 25 bp, Artificial
  probe
  misc_feature (1)..(25): SEQ ID NO: 6427; WAN024CTE; Start 90; Stop 114
ctgtatctgcaatatcctgagcttg

SEQ ID NO: 438220 - DNA, 25 bp, Artificial
  probe
  misc_feature (1)..(25): SEQ ID NO: 6427; WAN024CTE; Start 77; Stop 101
gtcacatagactactgtatctgcaa

SEQ ID NO: 438221 - DNA, 25 bp, Artificial
  probe
  misc_feature (1)..(25): SEQ ID NO: 6427; WAN024CTE; Start 78; Stop 102
tcacatagactactgtatctgcaat

SEQ ID NO: 438222 - DNA, 25 bp, Artificial
  probe
  misc_feature (1)..(25): SEQ ID NO: 6427; WAN024CTE; Start 83; Stop 107
tagactactgtatctgcaatatcct

SEQ ID NO: 438223 - DNA, 25 bp, Artificial
  probe
  misc_feature (1)..(25): SEQ ID NO: 6427; WAN024CTE; Start 32; Stop 56
gccataatggtcatatctgtaatct

SEQ ID NO: 438224 - DNA, 25 bp, Artificial
  probe
  misc_feature (1)..(25): SEQ ID NO: 6427; WAN024CTE; Start 223; Stop 247
gatatccgttgcgatggtatcaatt

SEQ ID NO: 438225 - DNA, 25 bp, Artificial
  probe
  misc_feature (1)..(25): SEQ ID NO: 6427; WAN024CTE; Start 50; Stop 74
gtaatctgaacacgacgaggttgac

SEQ ID NO: 438226 - DNA, 25 bp, Artificial
  probe
  misc_feature (1)..(25): SEQ ID NO: 6427; WAN024CTE; Start 52; Stop 76
aatctgaacacgacgaggttgacta

SEQ ID NO: 438227 - DNA, 25 bp, Artificial
  probe
  misc_feature (1)..(25): SEQ ID NO: 6427; WAN024CTE; Start 51; Stop 75
taatctgaacacgacgaggttgact

SEQ ID NO: 438228 - DNA, 25 bp, Artificial
  probe
  misc_feature (1)..(25): SEQ ID NO: 6427; WAN024CTE; Start 79; Stop 103
cacatagactactgtatctgcaata

SEQ ID NO: 438229 - DNA, 25 bp, Artificial
  probe
  misc_feature (1)..(25): SEQ ID NO: 6427; WAN024CTE; Start 46; Stop 70
atctgtaatctgaacacgacgaggt

SEQ ID NO: 438230 - DNA, 25 bp, Artificial
  probe
  misc_feature (1)..(25): SEQ ID NO: 6427; WAN024CTE; Start 82; Stop 106
atagactactgtatctgcaatatcc

SEQ ID NO: 438231 - DNA, 25 bp, Artificial
  probe
  misc_feature (1)..(25): SEQ ID NO: 6427; WAN024CTE; Start 48; Stop 72
ctgtaatctgaacacgacgaggttg

SEQ ID NO: 438232 - DNA, 25 bp, Artificial
  probe
  misc_feature (1)..(25): SEQ ID NO: 6427; WAN024CTE; Start 36; Stop 60
taatggtcatatctgtaatctgaac

SEQ ID NO: 438233 - DNA, 25 bp, Artificial
  probe
  misc_feature (1)..(25): SEQ ID NO: 6427; WAN024CTE; Start 47; Stop 71
tctgtaatctgaacacgacgaggtt

SEQ ID NO: 438234 - DNA, 25 bp, Artificial
  probe
  misc_feature (1)..(25): SEQ ID NO: 6427; WAN024CTE; Start 76; Stop 100
agtcacatagactactgtatctgca

SEQ ID NO: 438235 - DNA, 25 bp, Artificial
  probe
  misc_feature (1)..(25): SEQ ID NO: 6427; WAN024CTE; Start 144; Stop 168
cagctcgttctttatcaccatgaaa

SEQ ID NO: 438236 - DNA, 25 bp, Artificial
  probe
  misc_feature (1)..(25): SEQ ID NO: 6428; WAN024BXK; Start 31; Stop 55
gagatattgaggaccgtgacatata

SEQ ID NO: 438237 - DNA, 25 bp, Artificial
  probe
  misc_feature (1)..(25): SEQ ID NO: 6428; WAN024BXK; Start 30; Stop 54
tgagatattgaggaccgtgacatat

SEQ ID NO: 438238 - DNA, 25 bp, Artificial
  probe
  misc_feature (1)..(25): SEQ ID NO: 6428; WAN024BXK; Start 29; Stop 53
atgagatattgaggaccgtgacata

SEQ ID NO: 438239 - DNA, 25 bp, Artificial
  probe
  misc_feature (1)..(25): SEQ ID NO: 6428; WAN024BXK; Start 35; Stop 59
tattgaggaccgtgacatatattgc

SEQ ID NO: 438240 - DNA, 25 bp, Artificial
  probe
  misc_feature (1)..(25): SEQ ID NO: 6428; WAN024BXK; Start 28; Stop 52
aatgagatattgaggaccgtgacat

SEQ ID NO: 438241 - DNA, 25 bp, Artificial
  probe
  misc_feature (1)..(25): SEQ ID NO: 6428; WAN024BXK; Start 66; Stop 90
agtggacgaactagattctaagatt

SEQ ID NO: 438242 - DNA, 25 bp, Artificial
  probe
  misc_feature (1)..(25): SEQ ID NO: 6428; WAN024BXK; Start 65; Stop 89
aagtggacgaactagattctaagat

SEQ ID NO: 438243 - DNA, 25 bp, Artificial
  probe
  misc_feature (1)..(25): SEQ ID NO: 6428; WAN024BXK; Start 32; Stop 56
agatattgaggaccgtgacatatat

SEQ ID NO: 438244 - DNA, 25 bp, Artificial
  probe
  misc_feature (1)..(25): SEQ ID NO: 6428; WAN024BXK; Start 34; Stop 58
atattgaggaccgtgacatatattg

SEQ ID NO: 438245 - DNA, 25 bp, Artificial
  probe
  misc_feature (1)..(25): SEQ ID NO: 6428; WAN024BXK; Start 36; Stop 60
attgaggaccgtgacatatattgct

SEQ ID NO: 438246 - DNA, 25 bp, Artificial
  probe
  misc_feature (1)..(25): SEQ ID NO: 6428; WAN024BXK; Start 33; Stop 57
gatattgaggaccgtgacatatatt

SEQ ID NO: 438247 - DNA, 25 bp, Artificial
  probe
  misc_feature (1)..(25): SEQ ID NO: 6428; WAN024BXK; Start 41; Stop 65
ggaccgtgacatatattgctgagaa

SEQ ID NO: 438248 - DNA, 25 bp, Artificial
  probe
  misc_feature (1)..(25): SEQ ID NO: 6428; WAN024BXK; Start 52; Stop 76
tatattgctgagaaagtggacgaac

SEQ ID NO: 438249 - DNA, 25 bp, Artificial
  probe
  misc_feature (1)..(25): SEQ ID NO: 6428; WAN024BXK; Start 37; Stop 61
ttgaggaccgtgacatatattgctg

SEQ ID NO: 438250 - DNA, 25 bp, Artificial
  probe
  misc_feature (1)..(25): SEQ ID NO: 6428; WAN024BXK; Start 51; Stop 75
atatattgctgagaaagtggacgaa

SEQ ID NO: 438251 - DNA, 25 bp, Artificial
  probe
  misc_feature (1)..(25): SEQ ID NO: 6428; WAN024BXK; Start 47; Stop 71
tgacatatattgctgagaaagtgga

SEQ ID NO: 438252 - DNA, 25 bp, Artificial
  probe
  misc_feature (1)..(25): SEQ ID NO: 6428; WAN024BXK; Start 46; Stop 70
gtgacatatattgctgagaaagtgg

SEQ ID NO: 438253 - DNA, 25 bp, Artificial
  probe
  misc_feature (1)..(25): SEQ ID NO: 6428; WAN024BXK; Start 45; Stop 69
cgtgacatatattgctgagaaagtg

SEQ ID NO: 438254 - DNA, 25 bp, Artificial
  probe
  misc_feature (1)..(25): SEQ ID NO: 6428; WAN024BXK; Start 39; Stop 63
gaggaccgtgacatatattgctgag

SEQ ID NO: 438255 - DNA, 25 bp, Artificial
  probe
  misc_feature (1)..(25): SEQ ID NO: 6428; WAN024BXK; Start 48; Stop 72
gacatatattgctgagaaagtggac

SEQ ID NO: 438256 - DNA, 25 bp, Artificial
  probe
  misc_feature (1)..(25): SEQ ID NO: 6428; WAN024BXK; Start 50; Stop 74
catatattgctgagaaagtggacga

SEQ ID NO: 438257 - DNA, 25 bp, Artificial
  probe
  misc_feature (1)..(25): SEQ ID NO: 6428; WAN024BXK; Start 49; Stop 73
acatatattgctgagaaagtggacg

SEQ ID NO: 438258 - DNA, 25 bp, Artificial
  probe
  misc_feature (1)..(25): SEQ ID NO: 6428; WAN024BXK; Start 44; Stop 68
ccgtgacatatattgctgagaaagt

SEQ ID NO: 438259 - DNA, 25 bp, Artificial
  probe
  misc_feature (1)..(25): SEQ ID NO: 6428; WAN024BXK; Start 43; Stop 67
accgtgacatatattgctgagaaag

SEQ ID NO: 438260 - DNA, 25 bp, Artificial
  probe
  misc_feature (1)..(25): SEQ ID NO: 6428; WAN024BXK; Start 42; Stop 66
gaccgtgacatatattgctgagaaa

SEQ ID NO: 438261 - DNA, 25 bp, Artificial
  probe
  misc_feature (1)..(25): SEQ ID NO: 6428; WAN024BXK; Start 64; Stop 88
aaagtggacgaactagattctaaga

SEQ ID NO: 438262 - DNA, 25 bp, Artificial
  probe
  misc_feature (1)..(25): SEQ ID NO: 6428; WAN024BXK; Start 59; Stop 83
ctgagaaagtggacgaactagattc

SEQ ID NO: 438263 - DNA, 25 bp, Artificial
  probe
  misc_feature (1)..(25): SEQ ID NO: 6428; WAN024BXK; Start 7; Stop 31
gaactagaaagaacagccctcaatg

SEQ ID NO: 438264 - DNA, 25 bp, Artificial
  probe
  misc_feature (1)..(25): SEQ ID NO: 6428; WAN024BXK; Start 63; Stop 87
gaaagtggacgaactagattctaag

SEQ ID NO: 438265 - DNA, 25 bp, Artificial
  probe
  misc_feature (1)..(25): SEQ ID NO: 6428; WAN024BXK; Start 40; Stop 64
aggaccgtgacatatattgctgaga

SEQ ID NO: 438266 - DNA, 25 bp, Artificial
  probe
  misc_feature (1)..(25): SEQ ID NO: 6428; WAN024BXK; Start 67; Stop 91
gtggacgaactagattctaagattt

SEQ ID NO: 438267 - DNA, 25 bp, Artificial
  probe
  misc_feature (1)..(25): SEQ ID NO: 6428; WAN024BXK; Start 54; Stop 78
tattgctgagaaagtggacgaacta

SEQ ID NO: 438268 - DNA, 25 bp, Artificial
  probe
  misc_feature (1)..(25): SEQ ID NO: 6428; WAN024BXK; Start 8; Stop 32
aactagaaagaacagccctcaatga

SEQ ID NO: 438269 - DNA, 25 bp, Artificial
  probe
  misc_feature (1)..(25): SEQ ID NO: 6429; WAN024BXB; Start 422; Stop 446
atacatctatcttggttggcgaact

SEQ ID NO: 438270 - DNA, 25 bp, Artificial
  probe
  misc_feature (1)..(25): SEQ ID NO: 6429; WAN024BXB; Start 421; Stop 445
catacatctatcttggttggcgaac

SEQ ID NO: 438271 - DNA, 25 bp, Artificial
  probe
  misc_feature (1)..(25): SEQ ID NO: 6429; WAN024BXB; Start 690; Stop 714
ccttaatcaggaatacttgacagga

SEQ ID NO: 438272 - DNA, 25 bp, Artificial
  probe
  misc_feature (1)..(25): SEQ ID NO: 6429; WAN024BXB; Start 423; Stop 447
tacatctatcttggttggcgaactt

SEQ ID NO: 438273 - DNA, 25 bp, Artificial
  probe
  misc_feature (1)..(25): SEQ ID NO: 6429; WAN024BXB; Start 619; Stop 643
gatggacatatcactgtgaacaaga

SEQ ID NO: 438274 - DNA, 25 bp, Artificial
  probe
  misc_feature (1)..(25): SEQ ID NO: 6429; WAN024BXB; Start 618; Stop 642
agatggacatatcactgtgaacaag

SEQ ID NO: 438275 - DNA, 25 bp, Artificial
  probe
  misc_feature (1)..(25): SEQ ID NO: 6429; WAN024BXB; Start 620; Stop 644
atggacatatcactgtgaacaagac

SEQ ID NO: 438276 - DNA, 25 bp, Artificial
  probe
  misc_feature (1)..(25): SEQ ID NO: 6429; WAN024BXB; Start 409; Stop 433
gtaagtgcaagccatacatctatct

SEQ ID NO: 438277 - DNA, 25 bp, Artificial
  probe
  misc_feature (1)..(25): SEQ ID NO: 6429; WAN024BXB; Start 408; Stop 432
agtaagtgcaagccatacatctatc

SEQ ID NO: 438278 - DNA, 25 bp, Artificial
  probe
  misc_feature (1)..(25): SEQ ID NO: 6429; WAN024BXB; Start 118; Stop 142
aaggaatacggatttacagaaggtc

SEQ ID NO: 438279 - DNA, 25 bp, Artificial
  probe
  misc_feature (1)..(25): SEQ ID NO: 6429; WAN024BXB; Start 117; Stop 141
gaaggaatacggatttacagaaggt

SEQ ID NO: 438280 - DNA, 25 bp, Artificial
  probe
  misc_feature (1)..(25): SEQ ID NO: 6429; WAN024BXB; Start 116; Stop 140
tgaaggaatacggatttacagaagg

SEQ ID NO: 438281 - DNA, 25 bp, Artificial
  probe
  misc_feature (1)..(25): SEQ ID NO: 6429; WAN024BXB; Start 407; Stop 431
cagtaagtgcaagccatacatctat

SEQ ID NO: 438282 - DNA, 25 bp, Artificial
  probe
  misc_feature (1)..(25): SEQ ID NO: 6429; WAN024BXB; Start 410; Stop 434
taagtgcaagccatacatctatctt

SEQ ID NO: 438283 - DNA, 25 bp, Artificial
  probe
  misc_feature (1)..(25): SEQ ID NO: 6429; WAN024BXB; Start 617; Stop 641
cagatggacatatcactgtgaacaa

SEQ ID NO: 438284 - DNA, 25 bp, Artificial
  probe
  misc_feature (1)..(25): SEQ ID NO: 6429; WAN024BXB; Start 74; Stop 98
cgctgggtgttaattcaagatatac

SEQ ID NO: 438285 - DNA, 25 bp, Artificial
  probe
  misc_feature (1)..(25): SEQ ID NO: 6429; WAN024BXB; Start 121; Stop 145
gaatacggatttacagaaggtcagg

SEQ ID NO: 438286 - DNA, 25 bp, Artificial
  probe
  misc_feature (1)..(25): SEQ ID NO: 6429; WAN024BXB; Start 120; Stop 144
ggaatacggatttacagaaggtcag

SEQ ID NO: 438287 - DNA, 25 bp, Artificial
  probe
  misc_feature (1)..(25): SEQ ID NO: 6429; WAN024BXB; Start 122; Stop 146
aatacggatttacagaaggtcagga

SEQ ID NO: 438288 - DNA, 25 bp, Artificial
  probe
  misc_feature (1)..(25): SEQ ID NO: 6429; WAN024BXB; Start 119; Stop 143
aggaatacggatttacagaaggtca

SEQ ID NO: 438289 - DNA, 25 bp, Artificial
  probe
  misc_feature (1)..(25): SEQ ID NO: 6429; WAN024BXB; Start 115; Stop 139
atgaaggaatacggatttacagaag

SEQ ID NO: 438290 - DNA, 25 bp, Artificial
  probe
  misc_feature (1)..(25): SEQ ID NO: 6429; WAN024BXB; Start 625; Stop 649
catatcactgtgaacaagacaccaa

SEQ ID NO: 438291 - DNA, 25 bp, Artificial
  probe
  misc_feature (1)..(25): SEQ ID NO: 6429; WAN024BXB; Start 188; Stop 212
ctactgaccacatcatcaagctaga

SEQ ID NO: 438292 - DNA, 25 bp, Artificial
  probe
  misc_feature (1)..(25): SEQ ID NO: 6429; WAN024BXB; Start 127; Stop 151
ggatttacagaaggtcaggactttc

SEQ ID NO: 438293 - DNA, 25 bp, Artificial
  probe
  misc_feature (1)..(25): SEQ ID NO: 6429; WAN024BXB; Start 621; Stop 645
tggacatatcactgtgaacaagaca

SEQ ID NO: 438294 - DNA, 25 bp, Artificial
  probe
  misc_feature (1)..(25): SEQ ID NO: 6429; WAN024BXB; Start 572; Stop 596
tggacttgaaactctttgaaatcat

SEQ ID NO: 438295 - DNA, 25 bp, Artificial
  probe
  misc_feature (1)..(25): SEQ ID NO: 6429; WAN024BXB; Start 571; Stop 595
atggacttgaaactctttgaaatca

SEQ ID NO: 438296 - DNA, 25 bp, Artificial
  probe
  misc_feature (1)..(25): SEQ ID NO: 6429; WAN024BXB; Start 189; Stop 213
tactgaccacatcatcaagctagac

SEQ ID NO: 438297 - DNA, 25 bp, Artificial
  probe
  misc_feature (1)..(25): SEQ ID NO: 6429; WAN024BXB; Start 623; Stop 647
gacatatcactgtgaacaagacacc

SEQ ID NO: 438298 - DNA, 25 bp, Artificial
  probe
  misc_feature (1)..(25): SEQ ID NO: 6429; WAN024BXB; Start 622; Stop 646
ggacatatcactgtgaacaagacac

SEQ ID NO: 438299 - DNA, 25 bp, Artificial
  probe
  misc_feature (1)..(25): SEQ ID NO: 6429; WAN024BXB; Start 569; Stop 593
gcatggacttgaaactctttgaaat

SEQ ID NO: 438300 - DNA, 25 bp, Artificial
  probe
  misc_feature (1)..(25): SEQ ID NO: 6429; WAN024BXB; Start 567; Stop 591
tagcatggacttgaaactctttgaa

SEQ ID NO: 438301 - DNA, 25 bp, Artificial
  probe
  misc_feature (1)..(25): SEQ ID NO: 6429; WAN024BXB; Start 27; Stop 51
gaatgacaatcaggagccagtagtg

SEQ ID NO: 438302 - DNA, 25 bp, Artificial
  probe
  misc_feature (1)..(25): SEQ ID NO: 6430; WAN024BRG; Start 289; Stop 313
gtaagcgtagtatattccgttatgc

SEQ ID NO: 438303 - DNA, 25 bp, Artificial
  probe
  misc_feature (1)..(25): SEQ ID NO: 6430; WAN024BRG; Start 974; Stop 998
cgatagcatcagcaatctcttatac

SEQ ID NO: 438304 - DNA, 25 bp, Artificial
  probe
  misc_feature (1)..(25): SEQ ID NO: 6430; WAN024BRG; Start 973; Stop 997
gcgatagcatcagcaatctcttata

SEQ ID NO: 438305 - DNA, 25 bp, Artificial
  probe
  misc_feature (1)..(25): SEQ ID NO: 6430; WAN024BRG; Start 275; Stop 299
agattgtattaggagtaagcgtagt

SEQ ID NO: 438306 - DNA, 25 bp, Artificial
  probe
  misc_feature (1)..(25): SEQ ID NO: 6430; WAN024BRG; Start 984; Stop 1008
agcaatctcttatactgtatgtggt

SEQ ID NO: 438307 - DNA, 25 bp, Artificial
  probe
  misc_feature (1)..(25): SEQ ID NO: 6430; WAN024BRG; Start 293; Stop 317
gcgtagtatattccgttatgctagt

SEQ ID NO: 438308 - DNA, 25 bp, Artificial
  probe
  misc_feature (1)..(25): SEQ ID NO: 6430; WAN024BRG; Start 304; Stop 328
tccgttatgctagtattgttgttac

SEQ ID NO: 438309 - DNA, 25 bp, Artificial
  probe
  misc_feature (1)..(25): SEQ ID NO: 6430; WAN024BRG; Start 985; Stop 1009
gcaatctcttatactgtatgtggtt

SEQ ID NO: 438310 - DNA, 25 bp, Artificial
  probe
  misc_feature (1)..(25): SEQ ID NO: 6430; WAN024BRG; Start 302; Stop 326
attccgttatgctagtattgttgtt

SEQ ID NO: 438311 - DNA, 25 bp, Artificial
  probe
  misc_feature (1)..(25): SEQ ID NO: 6430; WAN024BRG; Start 288; Stop 312
agtaagcgtagtatattccgttatg

SEQ ID NO: 438312 - DNA, 25 bp, Artificial
  probe
  misc_feature (1)..(25): SEQ ID NO: 6430; WAN024BRG; Start 975; Stop 999
gatagcatcagcaatctcttatact

SEQ ID NO: 438313 - DNA, 25 bp, Artificial
  probe
  misc_feature (1)..(25): SEQ ID NO: 6430; WAN024BRG; Start 274; Stop 298
aagattgtattaggagtaagcgtag

SEQ ID NO: 438314 - DNA, 25 bp, Artificial
  probe
  misc_feature (1)..(25): SEQ ID NO: 6430; WAN024BRG; Start 303; Stop 327
ttccgttatgctagtattgttgtta

SEQ ID NO: 438315 - DNA, 25 bp, Artificial
  probe
  misc_feature (1)..(25): SEQ ID NO: 6430; WAN024BRG; Start 978; Stop 1002
agcatcagcaatctcttatactgta

SEQ ID NO: 438316 - DNA, 25 bp, Artificial
  probe
  misc_feature (1)..(25): SEQ ID NO: 6430; WAN024BRG; Start 977; Stop 1001
tagcatcagcaatctcttatactgt

SEQ ID NO: 438317 - DNA, 25 bp, Artificial
  probe
  misc_feature (1)..(25): SEQ ID NO: 6430; WAN024BRG; Start 287; Stop 311
gagtaagcgtagtatattccgttat

SEQ ID NO: 438318 - DNA, 25 bp, Artificial
  probe
  misc_feature (1)..(25): SEQ ID NO: 6430; WAN024BRG; Start 983; Stop 1007
cagcaatctcttatactgtatgtgg

SEQ ID NO: 438319 - DNA, 25 bp, Artificial
  probe
  misc_feature (1)..(25): SEQ ID NO: 6430; WAN024BRG; Start 301; Stop 325
tattccgttatgctagtattgttgt

SEQ ID NO: 438320 - DNA, 25 bp, Artificial
  probe
  misc_feature (1)..(25): SEQ ID NO: 6430; WAN024BRG; Start 276; Stop 300
gattgtattaggagtaagcgtagta

SEQ ID NO: 438321 - DNA, 25 bp, Artificial
  probe
  misc_feature (1)..(25): SEQ ID NO: 6430; WAN024BRG; Start 284; Stop 308
taggagtaagcgtagtatattccgt

SEQ ID NO: 438322 - DNA, 25 bp, Artificial
  probe
  misc_feature (1)..(25): SEQ ID NO: 6430; WAN024BRG; Start 286; Stop 310
ggagtaagcgtagtatattccgtta

SEQ ID NO: 438323 - DNA, 25 bp, Artificial
  probe
  misc_feature (1)..(25): SEQ ID NO: 6430; WAN024BRG; Start 283; Stop 307
ttaggagtaagcgtagtatattccg

SEQ ID NO: 438324 - DNA, 25 bp, Artificial
  probe
  misc_feature (1)..(25): SEQ ID NO: 6430; WAN024BRG; Start 979; Stop 1003
gcatcagcaatctcttatactgtat

SEQ ID NO: 438325 - DNA, 25 bp, Artificial
  probe
  misc_feature (1)..(25): SEQ ID NO: 6430; WAN024BRG; Start 285; Stop 309
aggagtaagcgtagtatattccgtt

SEQ ID NO: 438326 - DNA, 25 bp, Artificial
  probe
  misc_feature (1)..(25): SEQ ID NO: 6430; WAN024BRG; Start 272; Stop 296
ataagattgtattaggagtaagcgt

SEQ ID NO: 438327 - DNA, 25 bp, Artificial
  probe
  misc_feature (1)..(25): SEQ ID NO: 6430; WAN024BRG; Start 976; Stop 1000
atagcatcagcaatctcttatactg

SEQ ID NO: 438328 - DNA, 25 bp, Artificial
  probe
  misc_feature (1)..(25): SEQ ID NO: 6430; WAN024BRG; Start 982; Stop 1006
tcagcaatctcttatactgtatgtg

SEQ ID NO: 438329 - DNA, 25 bp, Artificial
  probe
  misc_feature (1)..(25): SEQ ID NO: 6430; WAN024BRG; Start 294; Stop 318
cgtagtatattccgttatgctagta

SEQ ID NO: 438330 - DNA, 25 bp, Artificial
  probe
  misc_feature (1)..(25): SEQ ID NO: 6430; WAN024BRG; Start 305; Stop 329
ccgttatgctagtattgttgttact

SEQ ID NO: 438331 - DNA, 25 bp, Artificial
  probe
  misc_feature (1)..(25): SEQ ID NO: 6430; WAN024BRG; Start 164; Stop 188
ctgatgttccgataaattatggtgg

SEQ ID NO: 438332 - DNA, 25 bp, Artificial
  probe
  misc_feature (1)..(25): SEQ ID NO: 6430; WAN024BRG; Start 163; Stop 187
gctgatgttccgataaattatggtg

SEQ ID NO: 438333 - DNA, 25 bp, Artificial
  probe
  misc_feature (1)..(25): SEQ ID NO: 6430; WAN024BRG; Start 761; Stop 785
cgctcctttatggttccagttatat

SEQ ID NO: 438334 - DNA, 25 bp, Artificial
  probe
  misc_feature (1)..(25): SEQ ID NO: 6430; WAN024BRG; Start 165; Stop 189
tgatgttccgataaattatggtggg

SEQ ID NO: 438335 - DNA, 25 bp, Artificial
  probe
  misc_feature (1)..(25): SEQ ID NO: 6431; WAN024CYU; Start 78; Stop 102
caagacaatttccgttatgctaact

SEQ ID NO: 438336 - DNA, 25 bp, Artificial
  probe
  misc_feature (1)..(25): SEQ ID NO: 6431; WAN024CYU; Start 80; Stop 104
agacaatttccgttatgctaactaa

SEQ ID NO: 438337 - DNA, 25 bp, Artificial
  probe
  misc_feature (1)..(25): SEQ ID NO: 6431; WAN024CYU; Start 79; Stop 103
aagacaatttccgttatgctaacta

SEQ ID NO: 438338 - DNA, 25 bp, Artificial
  probe
  misc_feature (1)..(25): SEQ ID NO: 6431; WAN024CYU; Start 81; Stop 105
gacaatttccgttatgctaactaat

SEQ ID NO: 438339 - DNA, 25 bp, Artificial
  probe
  misc_feature (1)..(25): SEQ ID NO: 6431; WAN024CYU; Start 77; Stop 101
gcaagacaatttccgttatgctaac

SEQ ID NO: 438340 - DNA, 25 bp, Artificial
  probe
  misc_feature (1)..(25): SEQ ID NO: 6431; WAN024CYU; Start 71; Stop 95
ttcgaggcaagacaatttccgttat

SEQ ID NO: 438341 - DNA, 25 bp, Artificial
  probe
  misc_feature (1)..(25): SEQ ID NO: 6431; WAN024CYU; Start 70; Stop 94
tttcgaggcaagacaatttccgtta

SEQ ID NO: 438342 - DNA, 25 bp, Artificial
  probe
  misc_feature (1)..(25): SEQ ID NO: 6431; WAN024CYU; Start 76; Stop 100
ggcaagacaatttccgttatgctaa

SEQ ID NO: 438343 - DNA, 25 bp, Artificial
  probe
  misc_feature (1)..(25): SEQ ID NO: 6431; WAN024CYU; Start 72; Stop 96
tcgaggcaagacaatttccgttatg

SEQ ID NO: 438344 - DNA, 25 bp, Artificial
  probe
  misc_feature (1)..(25): SEQ ID NO: 6431; WAN024CYU; Start 75; Stop 99
aggcaagacaatttccgttatgcta

SEQ ID NO: 438345 - DNA, 25 bp, Artificial
  probe
  misc_feature (1)..(25): SEQ ID NO: 6431; WAN024CYU; Start 4; Stop 28
aacttcaccggactcttttattttg

SEQ ID NO: 438346 - DNA, 25 bp, Artificial
  probe
  misc_feature (1)..(25): SEQ ID NO: 6431; WAN024CYU; Start 3; Stop 27
gaacttcaccggactcttttatttt

SEQ ID NO: 438347 - DNA, 25 bp, Artificial
  probe
  misc_feature (1)..(25): SEQ ID NO: 6431; WAN024CYU; Start 69; Stop 93
ctttcgaggcaagacaatttccgtt

SEQ ID NO: 438348 - DNA, 25 bp, Artificial
  probe
  misc_feature (1)..(25): SEQ ID NO: 6431; WAN024CYU; Start 1; Stop 25
atgaacttcaccggactcttttatt

SEQ ID NO: 438349 - DNA, 25 bp, Artificial
  probe
  misc_feature (1)..(25): SEQ ID NO: 6431; WAN024CYU; Start 5; Stop 29
acttcaccggactcttttattttga

SEQ ID NO: 438350 - DNA, 25 bp, Artificial
  probe
  misc_feature (1)..(25): SEQ ID NO: 6431; WAN024CYU; Start 2; Stop 26
tgaacttcaccggactcttttattt

SEQ ID NO: 438351 - DNA, 25 bp, Artificial
  probe
  misc_feature (1)..(25): SEQ ID NO: 6431; WAN024CYU; Start 9; Stop 33
caccggactcttttattttgaattt

SEQ ID NO: 438352 - DNA, 25 bp, Artificial
  probe
  misc_feature (1)..(25): SEQ ID NO: 6431; WAN024CYU; Start 8; Stop 32
tcaccggactcttttattttgaatt

SEQ ID NO: 438353 - DNA, 25 bp, Artificial
  probe
  misc_feature (1)..(25): SEQ ID NO: 6431; WAN024CYU; Start 74; Stop 98
gaggcaagacaatttccgttatgct

SEQ ID NO: 438354 - DNA, 25 bp, Artificial
  probe
  misc_feature (1)..(25): SEQ ID NO: 6431; WAN024CYU; Start 10; Stop 34
accggactcttttattttgaatttt

SEQ ID NO: 438355 - DNA, 25 bp, Artificial
  probe
  misc_feature (1)..(25): SEQ ID NO: 6431; WAN024CYU; Start 6; Stop 30
cttcaccggactcttttattttgaa

SEQ ID NO: 438356 - DNA, 25 bp, Artificial
  probe
  misc_feature (1)..(25): SEQ ID NO: 6431; WAN024CYU; Start 7; Stop 31
ttcaccggactcttttattttgaat

SEQ ID NO: 438357 - DNA, 25 bp, Artificial
  probe
  misc_feature (1)..(25): SEQ ID NO: 6431; WAN024CYU; Start 73; Stop 97
cgaggcaagacaatttccgttatgc

SEQ ID NO: 438358 - DNA, 25 bp, Artificial
  probe
  misc_feature (1)..(25): SEQ ID NO: 6432; WAN024AX9; Start 22; Stop 46
atgttgtctgaaactattcgccttt

SEQ ID NO: 438359 - DNA, 25 bp, Artificial
  probe
  misc_feature (1)..(25): SEQ ID NO: 6432; WAN024AX9; Start 21; Stop 45
aatgttgtctgaaactattcgcctt

SEQ ID NO: 438360 - DNA, 25 bp, Artificial
  probe
  misc_feature (1)..(25): SEQ ID NO: 6432; WAN024AX9; Start 20; Stop 44
aaatgttgtctgaaactattcgcct

SEQ ID NO: 438361 - DNA, 25 bp, Artificial
  probe
  misc_feature (1)..(25): SEQ ID NO: 6432; WAN024AX9; Start 19; Stop 43
aaaatgttgtctgaaactattcgcc

SEQ ID NO: 438362 - DNA, 25 bp, Artificial
  probe
  misc_feature (1)..(25): SEQ ID NO: 6432; WAN024AX9; Start 23; Stop 47
tgttgtctgaaactattcgcctttt

SEQ ID NO: 438363 - DNA, 25 bp, Artificial
  probe
  misc_feature (1)..(25): SEQ ID NO: 6433; WAN024AX8; Start 21; Stop 45
aatgttgtctgaaactattcgcttt

SEQ ID NO: 438364 - DNA, 25 bp, Artificial
  probe
  misc_feature (1)..(25): SEQ ID NO: 6433; WAN024AX8; Start 20; Stop 44
aaatgttgtctgaaactattcgctt

SEQ ID NO: 438365 - DNA, 25 bp, Artificial
  probe
  misc_feature (1)..(25): SEQ ID NO: 6433; WAN024AX8; Start 22; Stop 46
atgttgtctgaaactattcgctttt

SEQ ID NO: 438366 - DNA, 25 bp, Artificial
  probe
  misc_feature (1)..(25): SEQ ID NO: 6433; WAN024AX8; Start 19; Stop 43
aaaatgttgtctgaaactattcgct

SEQ ID NO: 438367 - DNA, 25 bp, Artificial
  probe
  misc_feature (1)..(25): SEQ ID NO: 6434; WAN024ASX; Start 101; Stop 125
tagcctatatgattgcggttatgat

SEQ ID NO: 438368 - DNA, 25 bp, Artificial
  probe
  misc_feature (1)..(25): SEQ ID NO: 6434; WAN024ASX; Start 100; Stop 124
atagcctatatgattgcggttatga

SEQ ID NO: 438369 - DNA, 25 bp, Artificial
  probe
  misc_feature (1)..(25): SEQ ID NO: 6434; WAN024ASX; Start 103; Stop 127
gcctatatgattgcggttatgatct

SEQ ID NO: 438370 - DNA, 25 bp, Artificial
  probe
  misc_feature (1)..(25): SEQ ID NO: 6434; WAN024ASX; Start 102; Stop 126
agcctatatgattgcggttatgatc

SEQ ID NO: 438371 - DNA, 25 bp, Artificial
  probe
  misc_feature (1)..(25): SEQ ID NO: 6434; WAN024ASX; Start 94; Stop 118
tataccatagcctatatgattgcgg

SEQ ID NO: 438372 - DNA, 25 bp, Artificial
  probe
  misc_feature (1)..(25): SEQ ID NO: 6434; WAN024ASX; Start 99; Stop 123
catagcctatatgattgcggttatg

SEQ ID NO: 438373 - DNA, 25 bp, Artificial
  probe
  misc_feature (1)..(25): SEQ ID NO: 6434; WAN024ASX; Start 98; Stop 122
ccatagcctatatgattgcggttat

SEQ ID NO: 438374 - DNA, 25 bp, Artificial
  probe
  misc_feature (1)..(25): SEQ ID NO: 6434; WAN024ASX; Start 104; Stop 128
cctatatgattgcggttatgatcta

SEQ ID NO: 438375 - DNA, 25 bp, Artificial
  probe
  misc_feature (1)..(25): SEQ ID NO: 6434; WAN024ASX; Start 62; Stop 86
cgcttagggagagtatttggtataa

SEQ ID NO: 438376 - DNA, 25 bp, Artificial
  probe
  misc_feature (1)..(25): SEQ ID NO: 6434; WAN024ASX; Start 93; Stop 117
ttataccatagcctatatgattgcg

SEQ ID NO: 438377 - DNA, 25 bp, Artificial
  probe
  misc_feature (1)..(25): SEQ ID NO: 6434; WAN024ASX; Start 95; Stop 119
ataccatagcctatatgattgcggt

SEQ ID NO: 438378 - DNA, 25 bp, Artificial
  probe
  misc_feature (1)..(25): SEQ ID NO: 6434; WAN024ASX; Start 97; Stop 121
accatagcctatatgattgcggtta

SEQ ID NO: 438379 - DNA, 25 bp, Artificial
  probe
  misc_feature (1)..(25): SEQ ID NO: 6434; WAN024ASX; Start 96; Stop 120
taccatagcctatatgattgcggtt

SEQ ID NO: 438380 - DNA, 25 bp, Artificial
  probe
  misc_feature (1)..(25): SEQ ID NO: 6434; WAN024ASX; Start 61; Stop 85
ccgcttagggagagtatttggtata

SEQ ID NO: 438381 - DNA, 25 bp, Artificial
  probe
  misc_feature (1)..(25): SEQ ID NO: 6434; WAN024ASX; Start 39; Stop 63
gatcatgtccatctttctttatccg

SEQ ID NO: 438382 - DNA, 25 bp, Artificial
  probe
  misc_feature (1)..(25): SEQ ID NO: 6434; WAN024ASX; Start 63; Stop 87
gcttagggagagtatttggtataat

SEQ ID NO: 438383 - DNA, 25 bp, Artificial
  probe
  misc_feature (1)..(25): SEQ ID NO: 6434; WAN024ASX; Start 56; Stop 80
tttatccgcttagggagagtatttg

SEQ ID NO: 438384 - DNA, 25 bp, Artificial
  probe
  misc_feature (1)..(25): SEQ ID NO: 6434; WAN024ASX; Start 55; Stop 79
ctttatccgcttagggagagtattt

SEQ ID NO: 438385 - DNA, 25 bp, Artificial
  probe
  misc_feature (1)..(25): SEQ ID NO: 6434; WAN024ASX; Start 54; Stop 78
tctttatccgcttagggagagtatt

SEQ ID NO: 438386 - DNA, 25 bp, Artificial
  probe
  misc_feature (1)..(25): SEQ ID NO: 6434; WAN024ASX; Start 53; Stop 77
ttctttatccgcttagggagagtat

SEQ ID NO: 438387 - DNA, 25 bp, Artificial
  probe
  misc_feature (1)..(25): SEQ ID NO: 6434; WAN024ASX; Start 52; Stop 76
tttctttatccgcttagggagagta

SEQ ID NO: 438388 - DNA, 25 bp, Artificial
  probe
  misc_feature (1)..(25): SEQ ID NO: 6434; WAN024ASX; Start 49; Stop 73
atctttctttatccgcttagggaga

SEQ ID NO: 438389 - DNA, 25 bp, Artificial
  probe
  misc_feature (1)..(25): SEQ ID NO: 6434; WAN024ASX; Start 48; Stop 72
catctttctttatccgcttagggag

SEQ ID NO: 438390 - DNA, 25 bp, Artificial
  probe
  misc_feature (1)..(25): SEQ ID NO: 6434; WAN024ASX; Start 28; Stop 52
gttctgtatctgatcatgtccatct

SEQ ID NO: 438391 - DNA, 25 bp, Artificial
  probe
  misc_feature (1)..(25): SEQ ID NO: 6434; WAN024ASX; Start 29; Stop 53
ttctgtatctgatcatgtccatctt

SEQ ID NO: 438392 - DNA, 25 bp, Artificial
  probe
  misc_feature (1)..(25): SEQ ID NO: 6434; WAN024ASX; Start 57; Stop 81
ttatccgcttagggagagtatttgg

SEQ ID NO: 438393 - DNA, 25 bp, Artificial
  probe
  misc_feature (1)..(25): SEQ ID NO: 6434; WAN024ASX; Start 50; Stop 74
tctttctttatccgcttagggagag

SEQ ID NO: 438394 - DNA, 25 bp, Artificial
  probe
  misc_feature (1)..(25): SEQ ID NO: 6434; WAN024ASX; Start 27; Stop 51
cgttctgtatctgatcatgtccatc

SEQ ID NO: 438395 - DNA, 25 bp, Artificial
  probe
  misc_feature (1)..(25): SEQ ID NO: 6434; WAN024ASX; Start 51; Stop 75
ctttctttatccgcttagggagagt

SEQ ID NO: 438396 - DNA, 25 bp, Artificial
  probe
  misc_feature (1)..(25): SEQ ID NO: 6434; WAN024ASX; Start 105; Stop 129
ctatatgattgcggttatgatctat

SEQ ID NO: 438397 - DNA, 25 bp, Artificial
  probe
  misc_feature (1)..(25): SEQ ID NO: 6434; WAN024ASX; Start 26; Stop 50
tcgttctgtatctgatcatgtccat

SEQ ID NO: 438398 - DNA, 25 bp, Artificial
  probe
  misc_feature (1)..(25): SEQ ID NO: 6434; WAN024ASX; Start 25; Stop 49
ttcgttctgtatctgatcatgtcca

SEQ ID NO: 438399 - DNA, 25 bp, Artificial
  probe
  misc_feature (1)..(25): SEQ ID NO: 6434; WAN024ASX; Start 60; Stop 84
tccgcttagggagagtatttggtat

SEQ ID NO: 438400 - DNA, 25 bp, Artificial
  probe
  misc_feature (1)..(25): SEQ ID NO: 6435; WAN024CD5; Start 128; Stop 152
cagtaaggcataaaggtttcattcc

SEQ ID NO: 438401 - DNA, 25 bp, Artificial
  probe
  misc_feature (1)..(25): SEQ ID NO: 6435; WAN024CD5; Start 153; Stop 177
gtgggatgatgatatggatttagga

SEQ ID NO: 438402 - DNA, 25 bp, Artificial
  probe
  misc_feature (1)..(25): SEQ ID NO: 6435; WAN024CD5; Start 127; Stop 151
gcagtaaggcataaaggtttcattc

SEQ ID NO: 438403 - DNA, 25 bp, Artificial
  probe
  misc_feature (1)..(25): SEQ ID NO: 6435; WAN024CD5; Start 126; Stop 150
agcagtaaggcataaaggtttcatt

SEQ ID NO: 438404 - DNA, 25 bp, Artificial
  probe
  misc_feature (1)..(25): SEQ ID NO: 6435; WAN024CD5; Start 152; Stop 176
cgtgggatgatgatatggatttagg

SEQ ID NO: 438405 - DNA, 25 bp, Artificial
  probe
  misc_feature (1)..(25): SEQ ID NO: 6435; WAN024CD5; Start 151; Stop 175
ccgtgggatgatgatatggatttag

SEQ ID NO: 438406 - DNA, 25 bp, Artificial
  probe
  misc_feature (1)..(25): SEQ ID NO: 6435; WAN024CD5; Start 129; Stop 153
agtaaggcataaaggtttcattccg

SEQ ID NO: 438407 - DNA, 25 bp, Artificial
  probe
  misc_feature (1)..(25): SEQ ID NO: 6435; WAN024CD5; Start 125; Stop 149
gagcagtaaggcataaaggtttcat

SEQ ID NO: 438408 - DNA, 25 bp, Artificial
  probe
  misc_feature (1)..(25): SEQ ID NO: 6435; WAN024CD5; Start 131; Stop 155
taaggcataaaggtttcattccgtg

SEQ ID NO: 438409 - DNA, 25 bp, Artificial
  probe
  misc_feature (1)..(25): SEQ ID NO: 6435; WAN024CD5; Start 130; Stop 154
gtaaggcataaaggtttcattccgt

SEQ ID NO: 438410 - DNA, 25 bp, Artificial
  probe
  misc_feature (1)..(25): SEQ ID NO: 6435; WAN024CD5; Start 122; Stop 146
taggagcagtaaggcataaaggttt

SEQ ID NO: 438411 - DNA, 25 bp, Artificial
  probe
  misc_feature (1)..(25): SEQ ID NO: 6435; WAN024CD5; Start 121; Stop 145
ttaggagcagtaaggcataaaggtt

SEQ ID NO: 438412 - DNA, 25 bp, Artificial
  probe
  misc_feature (1)..(25): SEQ ID NO: 6435; WAN024CD5; Start 726; Stop 750
ttattgtgattacatgcagttacca

SEQ ID NO: 438413 - DNA, 25 bp, Artificial
  probe
  misc_feature (1)..(25): SEQ ID NO: 6435; WAN024CD5; Start 727; Stop 751
tattgtgattacatgcagttaccac

SEQ ID NO: 438414 - DNA, 25 bp, Artificial
  probe
  misc_feature (1)..(25): SEQ ID NO: 6435; WAN024CD5; Start 120; Stop 144
gttaggagcagtaaggcataaaggt

SEQ ID NO: 438415 - DNA, 25 bp, Artificial
  probe
  misc_feature (1)..(25): SEQ ID NO: 6435; WAN024CD5; Start 119; Stop 143
tgttaggagcagtaaggcataaagg

SEQ ID NO: 438416 - DNA, 25 bp, Artificial
  probe
  misc_feature (1)..(25): SEQ ID NO: 6435; WAN024CD5; Start 118; Stop 142
ctgttaggagcagtaaggcataaag

SEQ ID NO: 438417 - DNA, 25 bp, Artificial
  probe
  misc_feature (1)..(25): SEQ ID NO: 6435; WAN024CD5; Start 608; Stop 632
gtcgttaccgtagtaaagaaattgt

SEQ ID NO: 438418 - DNA, 25 bp, Artificial
  probe
  misc_feature (1)..(25): SEQ ID NO: 6435; WAN024CD5; Start 728; Stop 752
attgtgattacatgcagttaccacc

SEQ ID NO: 438419 - DNA, 25 bp, Artificial
  probe
  misc_feature (1)..(25): SEQ ID NO: 6435; WAN024CD5; Start 577; Stop 601
agtagttcaagatatgtaggtaaca

SEQ ID NO: 438420 - DNA, 25 bp, Artificial
  probe
  misc_feature (1)..(25): SEQ ID NO: 6435; WAN024CD5; Start 607; Stop 631
ggtcgttaccgtagtaaagaaattg

SEQ ID NO: 438421 - DNA, 25 bp, Artificial
  probe
  misc_feature (1)..(25): SEQ ID NO: 6435; WAN024CD5; Start 606; Stop 630
aggtcgttaccgtagtaaagaaatt

SEQ ID NO: 438422 - DNA, 25 bp, Artificial
  probe
  misc_feature (1)..(25): SEQ ID NO: 6435; WAN024CD5; Start 604; Stop 628
ttaggtcgttaccgtagtaaagaaa

SEQ ID NO: 438423 - DNA, 25 bp, Artificial
  probe
  misc_feature (1)..(25): SEQ ID NO: 6435; WAN024CD5; Start 603; Stop 627
tttaggtcgttaccgtagtaaagaa

SEQ ID NO: 438424 - DNA, 25 bp, Artificial
  probe
  misc_feature (1)..(25): SEQ ID NO: 6435; WAN024CD5; Start 150; Stop 174
tccgtgggatgatgatatggattta

SEQ ID NO: 438425 - DNA, 25 bp, Artificial
  probe
  misc_feature (1)..(25): SEQ ID NO: 6435; WAN024CD5; Start 605; Stop 629
taggtcgttaccgtagtaaagaaat

SEQ ID NO: 438426 - DNA, 25 bp, Artificial
  probe
  misc_feature (1)..(25): SEQ ID NO: 6435; WAN024CD5; Start 123; Stop 147
aggagcagtaaggcataaaggtttc

SEQ ID NO: 438427 - DNA, 25 bp, Artificial
  probe
  misc_feature (1)..(25): SEQ ID NO: 6435; WAN024CD5; Start 340; Stop 364
atatttccgttagatggagtaccag

SEQ ID NO: 438428 - DNA, 25 bp, Artificial
  probe
  misc_feature (1)..(25): SEQ ID NO: 6435; WAN024CD5; Start 346; Stop 370
ccgttagatggagtaccagtaaata

SEQ ID NO: 438429 - DNA, 25 bp, Artificial
  probe
  misc_feature (1)..(25): SEQ ID NO: 6435; WAN024CD5; Start 345; Stop 369
tccgttagatggagtaccagtaaat

SEQ ID NO: 438430 - DNA, 25 bp, Artificial
  probe
  misc_feature (1)..(25): SEQ ID NO: 6435; WAN024CD5; Start 342; Stop 366
atttccgttagatggagtaccagta

SEQ ID NO: 438431 - DNA, 25 bp, Artificial
  probe
  misc_feature (1)..(25): SEQ ID NO: 6435; WAN024CD5; Start 341; Stop 365
tatttccgttagatggagtaccagt

SEQ ID NO: 438432 - DNA, 25 bp, Artificial
  probe
  misc_feature (1)..(25): SEQ ID NO: 6435; WAN024CD5; Start 148; Stop 172
attccgtgggatgatgatatggatt

SEQ ID NO: 438433 - DNA, 25 bp, Artificial
  probe
  misc_feature (1)..(25): SEQ ID NO: 6436; WAN024D2T; Start 65; Stop 89
gtaacacaattccttaccaacagtt

SEQ ID NO: 438434 - DNA, 25 bp, Artificial
  probe
  misc_feature (1)..(25): SEQ ID NO: 6436; WAN024D2T; Start 64; Stop 88
agtaacacaattccttaccaacagt

SEQ ID NO: 438435 - DNA, 25 bp, Artificial
  probe
  misc_feature (1)..(25): SEQ ID NO: 6436; WAN024D2T; Start 63; Stop 87
tagtaacacaattccttaccaacag

SEQ ID NO: 438436 - DNA, 25 bp, Artificial
  probe
  misc_feature (1)..(25): SEQ ID NO: 6436; WAN024D2T; Start 62; Stop 86
ttagtaacacaattccttaccaaca

SEQ ID NO: 438437 - DNA, 25 bp, Artificial
  probe
  misc_feature (1)..(25): SEQ ID NO: 6436; WAN024D2T; Start 68; Stop 92
acacaattccttaccaacagtttat

SEQ ID NO: 438438 - DNA, 25 bp, Artificial
  probe
  misc_feature (1)..(25): SEQ ID NO: 6436; WAN024D2T; Start 67; Stop 91
aacacaattccttaccaacagttta

SEQ ID NO: 438439 - DNA, 25 bp, Artificial
  probe
  misc_feature (1)..(25): SEQ ID NO: 6436; WAN024D2T; Start 66; Stop 90
taacacaattccttaccaacagttt

SEQ ID NO: 438440 - DNA, 25 bp, Artificial
  probe
  misc_feature (1)..(25): SEQ ID NO: 6436; WAN024D2T; Start 69; Stop 93
cacaattccttaccaacagtttatt

SEQ ID NO: 438441 - DNA, 25 bp, Artificial
  probe
  misc_feature (1)..(25): SEQ ID NO: 6436; WAN024D2T; Start 100; Stop 124
aatagacaattggagattcgagtgc

SEQ ID NO: 438442 - DNA, 25 bp, Artificial
  probe
  misc_feature (1)..(25): SEQ ID NO: 6436; WAN024D2T; Start 101; Stop 125
atagacaattggagattcgagtgca

SEQ ID NO: 438443 - DNA, 25 bp, Artificial
  probe
  misc_feature (1)..(25): SEQ ID NO: 6436; WAN024D2T; Start 93; Stop 117
tcagaagaatagacaattggagatt

SEQ ID NO: 438444 - DNA, 25 bp, Artificial
  probe
  misc_feature (1)..(25): SEQ ID NO: 6436; WAN024D2T; Start 99; Stop 123
gaatagacaattggagattcgagtg

SEQ ID NO: 438445 - DNA, 25 bp, Artificial
  probe
  misc_feature (1)..(25): SEQ ID NO: 6436; WAN024D2T; Start 98; Stop 122
agaatagacaattggagattcgagt

SEQ ID NO: 438446 - DNA, 25 bp, Artificial
  probe
  misc_feature (1)..(25): SEQ ID NO: 6436; WAN024D2T; Start 92; Stop 116
ttcagaagaatagacaattggagat

SEQ ID NO: 438447 - DNA, 25 bp, Artificial
  probe
  misc_feature (1)..(25): SEQ ID NO: 6436; WAN024D2T; Start 102; Stop 126
tagacaattggagattcgagtgcaa

SEQ ID NO: 438448 - DNA, 25 bp, Artificial
  probe
  misc_feature (1)..(25): SEQ ID NO: 6436; WAN024D2T; Start 61; Stop 85
tttagtaacacaattccttaccaac

SEQ ID NO: 438449 - DNA, 25 bp, Artificial
  probe
  misc_feature (1)..(25): SEQ ID NO: 6436; WAN024D2T; Start 60; Stop 84
gtttagtaacacaattccttaccaa

SEQ ID NO: 438450 - DNA, 25 bp, Artificial
  probe
  misc_feature (1)..(25): SEQ ID NO: 6436; WAN024D2T; Start 97; Stop 121
aagaatagacaattggagattcgag

SEQ ID NO: 438451 - DNA, 25 bp, Artificial
  probe
  misc_feature (1)..(25): SEQ ID NO: 6436; WAN024D2T; Start 96; Stop 120
gaagaatagacaattggagattcga

SEQ ID NO: 438452 - DNA, 25 bp, Artificial
  probe
  misc_feature (1)..(25): SEQ ID NO: 6436; WAN024D2T; Start 95; Stop 119
agaagaatagacaattggagattcg

SEQ ID NO: 438453 - DNA, 25 bp, Artificial
  probe
  misc_feature (1)..(25): SEQ ID NO: 6436; WAN024D2T; Start 91; Stop 115
attcagaagaatagacaattggaga

SEQ ID NO: 438454 - DNA, 25 bp, Artificial
  probe
  misc_feature (1)..(25): SEQ ID NO: 6436; WAN024D2T; Start 94; Stop 118
cagaagaatagacaattggagattc

SEQ ID NO: 438455 - DNA, 25 bp, Artificial
  probe
  misc_feature (1)..(25): SEQ ID NO: 6436; WAN024D2T; Start 59; Stop 83
tgtttagtaacacaattccttacca

SEQ ID NO: 438456 - DNA, 25 bp, Artificial
  probe
  misc_feature (1)..(25): SEQ ID NO: 6436; WAN024D2T; Start 104; Stop 128
gacaattggagattcgagtgcaatc

SEQ ID NO: 438457 - DNA, 25 bp, Artificial
  probe
  misc_feature (1)..(25): SEQ ID NO: 6436; WAN024D2T; Start 107; Stop 131
aattggagattcgagtgcaatctaa

SEQ ID NO: 438458 - DNA, 25 bp, Artificial
  probe
  misc_feature (1)..(25): SEQ ID NO: 6436; WAN024D2T; Start 103; Stop 127
agacaattggagattcgagtgcaat

SEQ ID NO: 438459 - DNA, 25 bp, Artificial
  probe
  misc_feature (1)..(25): SEQ ID NO: 6436; WAN024D2T; Start 108; Stop 132
attggagattcgagtgcaatctaac

SEQ ID NO: 438460 - DNA, 25 bp, Artificial
  probe
  misc_feature (1)..(25): SEQ ID NO: 6436; WAN024D2T; Start 58; Stop 82
atgtttagtaacacaattccttacc

SEQ ID NO: 438461 - DNA, 25 bp, Artificial
  probe
  misc_feature (1)..(25): SEQ ID NO: 6436; WAN024D2T; Start 80; Stop 104
accaacagtttattcagaagaatag

SEQ ID NO: 438462 - DNA, 25 bp, Artificial
  probe
  misc_feature (1)..(25): SEQ ID NO: 6436; WAN024D2T; Start 81; Stop 105
ccaacagtttattcagaagaataga

SEQ ID NO: 438463 - DNA, 25 bp, Artificial
  probe
  misc_feature (1)..(25): SEQ ID NO: 6436; WAN024D2T; Start 106; Stop 130
caattggagattcgagtgcaatcta

SEQ ID NO: 438464 - DNA, 25 bp, Artificial
  probe
  misc_feature (1)..(25): SEQ ID NO: 6436; WAN024D2T; Start 84; Stop 108
acagtttattcagaagaatagacaa

SEQ ID NO: 438465 - DNA, 25 bp, Artificial
  probe
  misc_feature (1)..(25): SEQ ID NO: 6436; WAN024D2T; Start 83; Stop 107
aacagtttattcagaagaatagaca

SEQ ID NO: 438466 - DNA, 25 bp, Artificial
  probe
  misc_feature (1)..(25): SEQ ID NO: 6437; WAN024FQI; Start 937; Stop 961
gataccgataagatgagtgagagac

SEQ ID NO: 438467 - DNA, 25 bp, Artificial
  probe
  misc_feature (1)..(25): SEQ ID NO: 6437; WAN024FQI; Start 936; Stop 960
tgataccgataagatgagtgagaga

SEQ ID NO: 438468 - DNA, 25 bp, Artificial
  probe
  misc_feature (1)..(25): SEQ ID NO: 6437; WAN024FQI; Start 884; Stop 908
gacctaatgagattgttgaagatgg

SEQ ID NO: 438469 - DNA, 25 bp, Artificial
  probe
  misc_feature (1)..(25): SEQ ID NO: 6437; WAN024FQI; Start 883; Stop 907
ggacctaatgagattgttgaagatg

SEQ ID NO: 438470 - DNA, 25 bp, Artificial
  probe
  misc_feature (1)..(25): SEQ ID NO: 6437; WAN024FQI; Start 935; Stop 959
atgataccgataagatgagtgagag

SEQ ID NO: 438471 - DNA, 25 bp, Artificial
  probe
  misc_feature (1)..(25): SEQ ID NO: 6437; WAN024FQI; Start 953; Stop 977
gtgagagactacttgaattgatgga

SEQ ID NO: 438472 - DNA, 25 bp, Artificial
  probe
  misc_feature (1)..(25): SEQ ID NO: 6437; WAN024FQI; Start 954; Stop 978
tgagagactacttgaattgatggaa

SEQ ID NO: 438473 - DNA, 25 bp, Artificial
  probe
  misc_feature (1)..(25): SEQ ID NO: 6437; WAN024FQI; Start 419; Stop 443
acaagattatcactctcacacaaga

SEQ ID NO: 438474 - DNA, 25 bp, Artificial
  probe
  misc_feature (1)..(25): SEQ ID NO: 6437; WAN024FQI; Start 417; Stop 441
agacaagattatcactctcacacaa

SEQ ID NO: 438475 - DNA, 25 bp, Artificial
  probe
  misc_feature (1)..(25): SEQ ID NO: 6437; WAN024FQI; Start 416; Stop 440
cagacaagattatcactctcacaca

SEQ ID NO: 438476 - DNA, 25 bp, Artificial
  probe
  misc_feature (1)..(25): SEQ ID NO: 6437; WAN024FQI; Start 418; Stop 442
gacaagattatcactctcacacaag

SEQ ID NO: 438477 - DNA, 25 bp, Artificial
  probe
  misc_feature (1)..(25): SEQ ID NO: 6437; WAN024FQI; Start 422; Stop 446
agattatcactctcacacaagaaga

SEQ ID NO: 438478 - DNA, 25 bp, Artificial
  probe
  misc_feature (1)..(25): SEQ ID NO: 6437; WAN024FQI; Start 956; Stop 980
agagactacttgaattgatggaaga

SEQ ID NO: 438479 - DNA, 25 bp, Artificial
  probe
  misc_feature (1)..(25): SEQ ID NO: 6437; WAN024FQI; Start 938; Stop 962
ataccgataagatgagtgagagact

SEQ ID NO: 438480 - DNA, 25 bp, Artificial
  probe
  misc_feature (1)..(25): SEQ ID NO: 6437; WAN024FQI; Start 661; Stop 685
tatggttctggtaatcaagatgagg

SEQ ID NO: 438481 - DNA, 25 bp, Artificial
  probe
  misc_feature (1)..(25): SEQ ID NO: 6437; WAN024FQI; Start 955; Stop 979
gagagactacttgaattgatggaag

SEQ ID NO: 438482 - DNA, 25 bp, Artificial
  probe
  misc_feature (1)..(25): SEQ ID NO: 6437; WAN024FQI; Start 939; Stop 963
taccgataagatgagtgagagacta

SEQ ID NO: 438483 - DNA, 25 bp, Artificial
  probe
  misc_feature (1)..(25): SEQ ID NO: 6437; WAN024FQI; Start 665; Stop 689
gttctggtaatcaagatgaggtaga

SEQ ID NO: 438484 - DNA, 25 bp, Artificial
  probe
  misc_feature (1)..(25): SEQ ID NO: 6437; WAN024FQI; Start 664; Stop 688
ggttctggtaatcaagatgaggtag

SEQ ID NO: 438485 - DNA, 25 bp, Artificial
  probe
  misc_feature (1)..(25): SEQ ID NO: 6437; WAN024FQI; Start 952; Stop 976
agtgagagactacttgaattgatgg

SEQ ID NO: 438486 - DNA, 25 bp, Artificial
  probe
  misc_feature (1)..(25): SEQ ID NO: 6437; WAN024FQI; Start 941; Stop 965
ccgataagatgagtgagagactact

SEQ ID NO: 438487 - DNA, 25 bp, Artificial
  probe
  misc_feature (1)..(25): SEQ ID NO: 6437; WAN024FQI; Start 420; Stop 444
caagattatcactctcacacaagaa

SEQ ID NO: 438488 - DNA, 25 bp, Artificial
  probe
  misc_feature (1)..(25): SEQ ID NO: 6437; WAN024FQI; Start 434; Stop 458
tcacacaagaagatcgtagaagtta

SEQ ID NO: 438489 - DNA, 25 bp, Artificial
  probe
  misc_feature (1)..(25): SEQ ID NO: 6437; WAN024FQI; Start 942; Stop 966
cgataagatgagtgagagactactt

SEQ ID NO: 438490 - DNA, 25 bp, Artificial
  probe
  misc_feature (1)..(25): SEQ ID NO: 6437; WAN024FQI; Start 433; Stop 457
ctcacacaagaagatcgtagaagtt

SEQ ID NO: 438491 - DNA, 25 bp, Artificial
  probe
  misc_feature (1)..(25): SEQ ID NO: 6437; WAN024FQI; Start 940; Stop 964
accgataagatgagtgagagactac

SEQ ID NO: 438492 - DNA, 25 bp, Artificial
  probe
  misc_feature (1)..(25): SEQ ID NO: 6437; WAN024FQI; Start 663; Stop 687
tggttctggtaatcaagatgaggta

SEQ ID NO: 438493 - DNA, 25 bp, Artificial
  probe
  misc_feature (1)..(25): SEQ ID NO: 6437; WAN024FQI; Start 950; Stop 974
tgagtgagagactacttgaattgat

SEQ ID NO: 438494 - DNA, 25 bp, Artificial
  probe
  misc_feature (1)..(25): SEQ ID NO: 6437; WAN024FQI; Start 949; Stop 973
atgagtgagagactacttgaattga

SEQ ID NO: 438495 - DNA, 25 bp, Artificial
  probe
  misc_feature (1)..(25): SEQ ID NO: 6437; WAN024FQI; Start 421; Stop 445
aagattatcactctcacacaagaag

SEQ ID NO: 438496 - DNA, 25 bp, Artificial
  probe
  misc_feature (1)..(25): SEQ ID NO: 6437; WAN024FQI; Start 951; Stop 975
gagtgagagactacttgaattgatg

SEQ ID NO: 438497 - DNA, 25 bp, Artificial
  probe
  misc_feature (1)..(25): SEQ ID NO: 6437; WAN024FQI; Start 948; Stop 972
gatgagtgagagactacttgaattg

SEQ ID NO: 438498 - DNA, 25 bp, Artificial
  probe
  misc_feature (1)..(25): SEQ ID NO: 6437; WAN024FQI; Start 946; Stop 970
aagatgagtgagagactacttgaat

SEQ ID NO: 438499 - DNA, 25 bp, Artificial
  probe
  misc_feature (1)..(25): SEQ ID NO: 6438; WAN024FM7; Start 191; Stop 215
caatgagtaagaacttcgttaaggc

SEQ ID NO: 438500 - DNA, 25 bp, Artificial
  probe
  misc_feature (1)..(25): SEQ ID NO: 6438; WAN024FM7; Start 22; Stop 46
aagtggattatagacggtacagatg

SEQ ID NO: 438501 - DNA, 25 bp, Artificial
  probe
  misc_feature (1)..(25): SEQ ID NO: 6438; WAN024FM7; Start 190; Stop 214
tcaatgagtaagaacttcgttaagg

SEQ ID NO: 438502 - DNA, 25 bp, Artificial
  probe
  misc_feature (1)..(25): SEQ ID NO: 6438; WAN024FM7; Start 23; Stop 47
agtggattatagacggtacagatgg

SEQ ID NO: 438503 - DNA, 25 bp, Artificial
  probe
  misc_feature (1)..(25): SEQ ID NO: 6438; WAN024FM7; Start 18; Stop 42
agttaagtggattatagacggtaca

SEQ ID NO: 438504 - DNA, 25 bp, Artificial
  probe
  misc_feature (1)..(25): SEQ ID NO: 6438; WAN024FM7; Start 192; Stop 216
aatgagtaagaacttcgttaaggcg

SEQ ID NO: 438505 - DNA, 25 bp, Artificial
  probe
  misc_feature (1)..(25): SEQ ID NO: 6438; WAN024FM7; Start 25; Stop 49
tggattatagacggtacagatggtg

SEQ ID NO: 438506 - DNA, 25 bp, Artificial
  probe
  misc_feature (1)..(25): SEQ ID NO: 6438; WAN024FM7; Start 24; Stop 48
gtggattatagacggtacagatggt

SEQ ID NO: 438507 - DNA, 25 bp, Artificial
  probe
  misc_feature (1)..(25): SEQ ID NO: 6438; WAN024FM7; Start 19; Stop 43
gttaagtggattatagacggtacag

SEQ ID NO: 438508 - DNA, 25 bp, Artificial
  probe
  misc_feature (1)..(25): SEQ ID NO: 6438; WAN024FM7; Start 20; Stop 44
ttaagtggattatagacggtacaga

SEQ ID NO: 438509 - DNA, 25 bp, Artificial
  probe
  misc_feature (1)..(25): SEQ ID NO: 6438; WAN024FM7; Start 21; Stop 45
taagtggattatagacggtacagat

SEQ ID NO: 438510 - DNA, 25 bp, Artificial
  probe
  misc_feature (1)..(25): SEQ ID NO: 6438; WAN024FM7; Start 627; Stop 651
atcaatatatcctgaatggcaatgg

SEQ ID NO: 438511 - DNA, 25 bp, Artificial
  probe
  misc_feature (1)..(25): SEQ ID NO: 6438; WAN024FM7; Start 26; Stop 50
ggattatagacggtacagatggtgg

SEQ ID NO: 438512 - DNA, 25 bp, Artificial
  probe
  misc_feature (1)..(25): SEQ ID NO: 6438; WAN024FM7; Start 275; Stop 299
ggatgactatgaatattgtaggcat

SEQ ID NO: 438513 - DNA, 25 bp, Artificial
  probe
  misc_feature (1)..(25): SEQ ID NO: 6438; WAN024FM7; Start 886; Stop 910
gcagaaattgtattggatggagaaa

SEQ ID NO: 438514 - DNA, 25 bp, Artificial
  probe
  misc_feature (1)..(25): SEQ ID NO: 6438; WAN024FM7; Start 212; Stop 236
aggcggtgaaattactaagaacata

SEQ ID NO: 438515 - DNA, 25 bp, Artificial
  probe
  misc_feature (1)..(25): SEQ ID NO: 6438; WAN024FM7; Start 210; Stop 234
taaggcggtgaaattactaagaaca

SEQ ID NO: 438516 - DNA, 25 bp, Artificial
  probe
  misc_feature (1)..(25): SEQ ID NO: 6438; WAN024FM7; Start 885; Stop 909
agcagaaattgtattggatggagaa

SEQ ID NO: 438517 - DNA, 25 bp, Artificial
  probe
  misc_feature (1)..(25): SEQ ID NO: 6438; WAN024FM7; Start 209; Stop 233
ttaaggcggtgaaattactaagaac

SEQ ID NO: 438518 - DNA, 25 bp, Artificial
  probe
  misc_feature (1)..(25): SEQ ID NO: 6438; WAN024FM7; Start 208; Stop 232
gttaaggcggtgaaattactaagaa

SEQ ID NO: 438519 - DNA, 25 bp, Artificial
  probe
  misc_feature (1)..(25): SEQ ID NO: 6438; WAN024FM7; Start 424; Stop 448
attacactaactactgctgatagaa

SEQ ID NO: 438520 - DNA, 25 bp, Artificial
  probe
  misc_feature (1)..(25): SEQ ID NO: 6438; WAN024FM7; Start 211; Stop 235
aaggcggtgaaattactaagaacat

SEQ ID NO: 438521 - DNA, 25 bp, Artificial
  probe
  misc_feature (1)..(25): SEQ ID NO: 6438; WAN024FM7; Start 213; Stop 237
ggcggtgaaattactaagaacatat

SEQ ID NO: 438522 - DNA, 25 bp, Artificial
  probe
  misc_feature (1)..(25): SEQ ID NO: 6438; WAN024FM7; Start 27; Stop 51
gattatagacggtacagatggtggc

SEQ ID NO: 438523 - DNA, 25 bp, Artificial
  probe
  misc_feature (1)..(25): SEQ ID NO: 6438; WAN024FM7; Start 884; Stop 908
cagcagaaattgtattggatggaga

SEQ ID NO: 438524 - DNA, 25 bp, Artificial
  probe
  misc_feature (1)..(25): SEQ ID NO: 6438; WAN024FM7; Start 423; Stop 447
aattacactaactactgctgataga

SEQ ID NO: 438525 - DNA, 25 bp, Artificial
  probe
  misc_feature (1)..(25): SEQ ID NO: 6438; WAN024FM7; Start 205; Stop 229
ttcgttaaggcggtgaaattactaa

SEQ ID NO: 438526 - DNA, 25 bp, Artificial
  probe
  misc_feature (1)..(25): SEQ ID NO: 6438; WAN024FM7; Start 692; Stop 716
tgataactgaattggataaaggtgg

SEQ ID NO: 438527 - DNA, 25 bp, Artificial
  probe
  misc_feature (1)..(25): SEQ ID NO: 6438; WAN024FM7; Start 207; Stop 231
cgttaaggcggtgaaattactaaga

SEQ ID NO: 438528 - DNA, 25 bp, Artificial
  probe
  misc_feature (1)..(25): SEQ ID NO: 6438; WAN024FM7; Start 206; Stop 230
tcgttaaggcggtgaaattactaag

SEQ ID NO: 438529 - DNA, 25 bp, Artificial
  probe
  misc_feature (1)..(25): SEQ ID NO: 6438; WAN024FM7; Start 193; Stop 217
atgagtaagaacttcgttaaggcgg

SEQ ID NO: 438530 - DNA, 25 bp, Artificial
  probe
  misc_feature (1)..(25): SEQ ID NO: 6438; WAN024FM7; Start 189; Stop 213
atcaatgagtaagaacttcgttaag

SEQ ID NO: 438531 - DNA, 25 bp, Artificial
  probe
  misc_feature (1)..(25): SEQ ID NO: 6438; WAN024FM7; Start 697; Stop 721
actgaattggataaaggtggagttt

SEQ ID NO: 438532 - DNA, 25 bp, Artificial
  probe
  misc_feature (1)..(25): SEQ ID NO: 6439; WAN024BV4; Start 476; Stop 500
tattcaatcattccacaccagacat

SEQ ID NO: 438533 - DNA, 25 bp, Artificial
  probe
  misc_feature (1)..(25): SEQ ID NO: 6439; WAN024BV4; Start 475; Stop 499
atattcaatcattccacaccagaca

SEQ ID NO: 438534 - DNA, 25 bp, Artificial
  probe
  misc_feature (1)..(25): SEQ ID NO: 6439; WAN024BV4; Start 474; Stop 498
gatattcaatcattccacaccagac

SEQ ID NO: 438535 - DNA, 25 bp, Artificial
  probe
  misc_feature (1)..(25): SEQ ID NO: 6439; WAN024BV4; Start 473; Stop 497
agatattcaatcattccacaccaga

SEQ ID NO: 438536 - DNA, 25 bp, Artificial
  probe
  misc_feature (1)..(25): SEQ ID NO: 6439; WAN024BV4; Start 181; Stop 205
gagaagaagactggtaagataaggt

SEQ ID NO: 438537 - DNA, 25 bp, Artificial
  probe
  misc_feature (1)..(25): SEQ ID NO: 6439; WAN024BV4; Start 134; Stop 158
tacctcttcaagtcaagcaagtaat

SEQ ID NO: 438538 - DNA, 25 bp, Artificial
  probe
  misc_feature (1)..(25): SEQ ID NO: 6439; WAN024BV4; Start 180; Stop 204
agagaagaagactggtaagataagg

SEQ ID NO: 438539 - DNA, 25 bp, Artificial
  probe
  misc_feature (1)..(25): SEQ ID NO: 6439; WAN024BV4; Start 472; Stop 496
aagatattcaatcattccacaccag

SEQ ID NO: 438540 - DNA, 25 bp, Artificial
  probe
  misc_feature (1)..(25): SEQ ID NO: 6439; WAN024BV4; Start 322; Stop 346
cgtatcacacacattggaagagtag

SEQ ID NO: 438541 - DNA, 25 bp, Artificial
  probe
  misc_feature (1)..(25): SEQ ID NO: 6439; WAN024BV4; Start 477; Stop 501
attcaatcattccacaccagacatc

SEQ ID NO: 438542 - DNA, 25 bp, Artificial
  probe
  misc_feature (1)..(25): SEQ ID NO: 6439; WAN024BV4; Start 333; Stop 357
cattggaagagtagcagtctatcaa

SEQ ID NO: 438543 - DNA, 25 bp, Artificial
  probe
  misc_feature (1)..(25): SEQ ID NO: 6439; WAN024BV4; Start 331; Stop 355
cacattggaagagtagcagtctatc

SEQ ID NO: 438544 - DNA, 25 bp, Artificial
  probe
  misc_feature (1)..(25): SEQ ID NO: 6439; WAN024BV4; Start 135; Stop 159
acctcttcaagtcaagcaagtaatt

SEQ ID NO: 438545 - DNA, 25 bp, Artificial
  probe
  misc_feature (1)..(25): SEQ ID NO: 6439; WAN024BV4; Start 490; Stop 514
acaccagacatcacactaggatata

SEQ ID NO: 438546 - DNA, 25 bp, Artificial
  probe
  misc_feature (1)..(25): SEQ ID NO: 6439; WAN024BV4; Start 323; Stop 347
gtatcacacacattggaagagtagc

SEQ ID NO: 438547 - DNA, 25 bp, Artificial
  probe
  misc_feature (1)..(25): SEQ ID NO: 6439; WAN024BV4; Start 332; Stop 356
acattggaagagtagcagtctatca

SEQ ID NO: 438548 - DNA, 25 bp, Artificial
  probe
  misc_feature (1)..(25): SEQ ID NO: 6439; WAN024BV4; Start 321; Stop 345
tcgtatcacacacattggaagagta

SEQ ID NO: 438549 - DNA, 25 bp, Artificial
  probe
  misc_feature (1)..(25): SEQ ID NO: 6439; WAN024BV4; Start 136; Stop 160
cctcttcaagtcaagcaagtaattg

SEQ ID NO: 438550 - DNA, 25 bp, Artificial
  probe
  misc_feature (1)..(25): SEQ ID NO: 6439; WAN024BV4; Start 330; Stop 354
acacattggaagagtagcagtctat

SEQ ID NO: 438551 - DNA, 25 bp, Artificial
  probe
  misc_feature (1)..(25): SEQ ID NO: 6439; WAN024BV4; Start 324; Stop 348
tatcacacacattggaagagtagca

SEQ ID NO: 438552 - DNA, 25 bp, Artificial
  probe
  misc_feature (1)..(25): SEQ ID NO: 6439; WAN024BV4; Start 254; Stop 278
aagataatcagttagcagagtacga

SEQ ID NO: 438553 - DNA, 25 bp, Artificial
  probe
  misc_feature (1)..(25): SEQ ID NO: 6439; WAN024BV4; Start 130; Stop 154
atagtacctcttcaagtcaagcaag

SEQ ID NO: 438554 - DNA, 25 bp, Artificial
  probe
  misc_feature (1)..(25): SEQ ID NO: 6439; WAN024BV4; Start 129; Stop 153
catagtacctcttcaagtcaagcaa

SEQ ID NO: 438555 - DNA, 25 bp, Artificial
  probe
  misc_feature (1)..(25): SEQ ID NO: 6439; WAN024BV4; Start 182; Stop 206
agaagaagactggtaagataaggta

SEQ ID NO: 438556 - DNA, 25 bp, Artificial
  probe
  misc_feature (1)..(25): SEQ ID NO: 6439; WAN024BV4; Start 491; Stop 515
caccagacatcacactaggatatat

SEQ ID NO: 438557 - DNA, 25 bp, Artificial
  probe
  misc_feature (1)..(25): SEQ ID NO: 6439; WAN024BV4; Start 133; Stop 157
gtacctcttcaagtcaagcaagtaa

SEQ ID NO: 438558 - DNA, 25 bp, Artificial
  probe
  misc_feature (1)..(25): SEQ ID NO: 6439; WAN024BV4; Start 255; Stop 279
agataatcagttagcagagtacgat

SEQ ID NO: 438559 - DNA, 25 bp, Artificial
  probe
  misc_feature (1)..(25): SEQ ID NO: 6439; WAN024BV4; Start 489; Stop 513
cacaccagacatcacactaggatat

SEQ ID NO: 438560 - DNA, 25 bp, Artificial
  probe
  misc_feature (1)..(25): SEQ ID NO: 6439; WAN024BV4; Start 319; Stop 343
gttcgtatcacacacattggaagag

SEQ ID NO: 438561 - DNA, 25 bp, Artificial
  probe
  misc_feature (1)..(25): SEQ ID NO: 6439; WAN024BV4; Start 260; Stop 284
atcagttagcagagtacgattatct

SEQ ID NO: 438562 - DNA, 25 bp, Artificial
  probe
  misc_feature (1)..(25): SEQ ID NO: 6439; WAN024BV4; Start 132; Stop 156
agtacctcttcaagtcaagcaagta

SEQ ID NO: 438563 - DNA, 25 bp, Artificial
  probe
  misc_feature (1)..(25): SEQ ID NO: 6439; WAN024BV4; Start 131; Stop 155
tagtacctcttcaagtcaagcaagt

SEQ ID NO: 438564 - DNA, 25 bp, Artificial
  probe
  misc_feature (1)..(25): SEQ ID NO: 6439; WAN024BV4; Start 151; Stop 175
caagtaattgctgataggattgaac

SEQ ID NO: 438565 - DNA, 25 bp, Artificial
  probe
  misc_feature (1)..(25): SEQ ID NO: 6440; WAN024DE5; Start 1; Stop 25
atgaagaaagtgaaattagggcaag

SEQ ID NO: 438566 - DNA, 25 bp, Artificial
  probe
  misc_feature (1)..(25): SEQ ID NO: 6440; WAN024DE5; Start 3; Stop 27
gaagaaagtgaaattagggcaagtg

SEQ ID NO: 438567 - DNA, 25 bp, Artificial
  probe
  misc_feature (1)..(25): SEQ ID NO: 6440; WAN024DE5; Start 2; Stop 26
tgaagaaagtgaaattagggcaagt

SEQ ID NO: 438568 - DNA, 25 bp, Artificial
  probe
  misc_feature (1)..(25): SEQ ID NO: 6440; WAN024DE5; Start 4; Stop 28
aagaaagtgaaattagggcaagtgg

SEQ ID NO: 438569 - DNA, 25 bp, Artificial
  probe
  misc_feature (1)..(25): SEQ ID NO: 6440; WAN024DE5; Start 123; Stop 147
agggataaattattattcgggtacg

SEQ ID NO: 438570 - DNA, 25 bp, Artificial
  probe
  misc_feature (1)..(25): SEQ ID NO: 6440; WAN024DE5; Start 539; Stop 563
aagtgtggagaaatagcttgaaatt

SEQ ID NO: 438571 - DNA, 25 bp, Artificial
  probe
  misc_feature (1)..(25): SEQ ID NO: 6440; WAN024DE5; Start 538; Stop 562
aaagtgtggagaaatagcttgaaat

SEQ ID NO: 438572 - DNA, 25 bp, Artificial
  probe
  misc_feature (1)..(25): SEQ ID NO: 6440; WAN024DE5; Start 7; Stop 31
aaagtgaaattagggcaagtggcta

SEQ ID NO: 438573 - DNA, 25 bp, Artificial
  probe
  misc_feature (1)..(25): SEQ ID NO: 6440; WAN024DE5; Start 540; Stop 564
agtgtggagaaatagcttgaaattt

SEQ ID NO: 438574 - DNA, 25 bp, Artificial
  probe
  misc_feature (1)..(25): SEQ ID NO: 6440; WAN024DE5; Start 8; Stop 32
aagtgaaattagggcaagtggctac

SEQ ID NO: 438575 - DNA, 25 bp, Artificial
  probe
  misc_feature (1)..(25): SEQ ID NO: 6440; WAN024DE5; Start 124; Stop 148
gggataaattattattcgggtacga

SEQ ID NO: 438576 - DNA, 25 bp, Artificial
  probe
  misc_feature (1)..(25): SEQ ID NO: 6440; WAN024DE5; Start 6; Stop 30
gaaagtgaaattagggcaagtggct

SEQ ID NO: 438577 - DNA, 25 bp, Artificial
  probe
  misc_feature (1)..(25): SEQ ID NO: 6440; WAN024DE5; Start 5; Stop 29
agaaagtgaaattagggcaagtggc

SEQ ID NO: 438578 - DNA, 25 bp, Artificial
  probe
  misc_feature (1)..(25): SEQ ID NO: 6440; WAN024DE5; Start 541; Stop 565
gtgtggagaaatagcttgaaattta

SEQ ID NO: 438579 - DNA, 25 bp, Artificial
  probe
  misc_feature (1)..(25): SEQ ID NO: 6440; WAN024DE5; Start 103; Stop 127
aatctgactaaaacttcaaaaggga

SEQ ID NO: 438580 - DNA, 25 bp, Artificial
  probe
  misc_feature (1)..(25): SEQ ID NO: 6440; WAN024DE5; Start 543; Stop 567
gtggagaaatagcttgaaatttagt

SEQ ID NO: 438581 - DNA, 25 bp, Artificial
  probe
  misc_feature (1)..(25): SEQ ID NO: 6440; WAN024DE5; Start 542; Stop 566
tgtggagaaatagcttgaaatttag

SEQ ID NO: 438582 - DNA, 25 bp, Artificial
  probe
  misc_feature (1)..(25): SEQ ID NO: 6440; WAN024DE5; Start 104; Stop 128
atctgactaaaacttcaaaagggat

SEQ ID NO: 438583 - DNA, 25 bp, Artificial
  probe
  misc_feature (1)..(25): SEQ ID NO: 6440; WAN024DE5; Start 102; Stop 126
gaatctgactaaaacttcaaaaggg

SEQ ID NO: 438584 - DNA, 25 bp, Artificial
  probe
  misc_feature (1)..(25): SEQ ID NO: 6440; WAN024DE5; Start 122; Stop 146
aagggataaattattattcgggtac

SEQ ID NO: 438585 - DNA, 25 bp, Artificial
  probe
  misc_feature (1)..(25): SEQ ID NO: 6440; WAN024DE5; Start 9; Stop 33
agtgaaattagggcaagtggctact

SEQ ID NO: 438586 - DNA, 25 bp, Artificial
  probe
  misc_feature (1)..(25): SEQ ID NO: 6440; WAN024DE5; Start 537; Stop 561
aaaagtgtggagaaatagcttgaaa

SEQ ID NO: 438587 - DNA, 25 bp, Artificial
  probe
  misc_feature (1)..(25): SEQ ID NO: 6440; WAN024DE5; Start 223; Stop 247
tgtggaagatccgcagtgttaaatc

SEQ ID NO: 438588 - DNA, 25 bp, Artificial
  probe
  misc_feature (1)..(25): SEQ ID NO: 6440; WAN024DE5; Start 105; Stop 129
tctgactaaaacttcaaaagggata

SEQ ID NO: 438589 - DNA, 25 bp, Artificial
  probe
  misc_feature (1)..(25): SEQ ID NO: 6440; WAN024DE5; Start 121; Stop 145
aaagggataaattattattcgggta

SEQ ID NO: 438590 - DNA, 25 bp, Artificial
  probe
  misc_feature (1)..(25): SEQ ID NO: 6440; WAN024DE5; Start 11; Stop 35
tgaaattagggcaagtggctacttt

SEQ ID NO: 438591 - DNA, 25 bp, Artificial
  probe
  misc_feature (1)..(25): SEQ ID NO: 6440; WAN024DE5; Start 536; Stop 560
taaaagtgtggagaaatagcttgaa

SEQ ID NO: 438592 - DNA, 25 bp, Artificial
  probe
  misc_feature (1)..(25): SEQ ID NO: 6440; WAN024DE5; Start 222; Stop 246
gtgtggaagatccgcagtgttaaat

SEQ ID NO: 438593 - DNA, 25 bp, Artificial
  probe
  misc_feature (1)..(25): SEQ ID NO: 6440; WAN024DE5; Start 101; Stop 125
agaatctgactaaaacttcaaaagg

SEQ ID NO: 438594 - DNA, 25 bp, Artificial
  probe
  misc_feature (1)..(25): SEQ ID NO: 6440; WAN024DE5; Start 535; Stop 559
ataaaagtgtggagaaatagcttga

SEQ ID NO: 438595 - DNA, 25 bp, Artificial
  probe
  misc_feature (1)..(25): SEQ ID NO: 6440; WAN024DE5; Start 106; Stop 130
ctgactaaaacttcaaaagggataa

SEQ ID NO: 438596 - DNA, 25 bp, Artificial
  probe
  misc_feature (1)..(25): SEQ ID NO: 6440; WAN024DE5; Start 129; Stop 153
aaattattattcgggtacgattgat

SEQ ID NO: 438597 - DNA, 25 bp, Artificial
  probe
  misc_feature (1)..(25): SEQ ID NO: 6440; WAN024DE5; Start 125; Stop 149
ggataaattattattcgggtacgat

SEQ ID NO: 438598 - DNA, 25 bp, Artificial
  probe
  misc_feature (1)..(25): SEQ ID NO: 6441; WAN024FMW; Start 222; Stop 246
atatgttattccgactcttggtgtt

SEQ ID NO: 438599 - DNA, 25 bp, Artificial
  probe
  misc_feature (1)..(25): SEQ ID NO: 6441; WAN024FMW; Start 221; Stop 245
aatatgttattccgactcttggtgt

SEQ ID NO: 438600 - DNA, 25 bp, Artificial
  probe
  misc_feature (1)..(25): SEQ ID NO: 6441; WAN024FMW; Start 189; Stop 213
gaaggactatattgccaagacactt

SEQ ID NO: 438601 - DNA, 25 bp, Artificial
  probe
  misc_feature (1)..(25): SEQ ID NO: 6441; WAN024FMW; Start 188; Stop 212
tgaaggactatattgccaagacact

SEQ ID NO: 438602 - DNA, 25 bp, Artificial
  probe
  misc_feature (1)..(25): SEQ ID NO: 6441; WAN024FMW; Start 186; Stop 210
agtgaaggactatattgccaagaca

SEQ ID NO: 438603 - DNA, 25 bp, Artificial
  probe
  misc_feature (1)..(25): SEQ ID NO: 6441; WAN024FMW; Start 800; Stop 824
atccagaacagtatgatgtagagtt

SEQ ID NO: 438604 - DNA, 25 bp, Artificial
  probe
  misc_feature (1)..(25): SEQ ID NO: 6441; WAN024FMW; Start 799; Stop 823
tatccagaacagtatgatgtagagt

SEQ ID NO: 438605 - DNA, 25 bp, Artificial
  probe
  misc_feature (1)..(25): SEQ ID NO: 6441; WAN024FMW; Start 185; Stop 209
tagtgaaggactatattgccaagac

SEQ ID NO: 438606 - DNA, 25 bp, Artificial
  probe
  misc_feature (1)..(25): SEQ ID NO: 6441; WAN024FMW; Start 637; Stop 661
aataagacgatagagaagcctgctg

SEQ ID NO: 438607 - DNA, 25 bp, Artificial
  probe
  misc_feature (1)..(25): SEQ ID NO: 6441; WAN024FMW; Start 187; Stop 211
gtgaaggactatattgccaagacac

SEQ ID NO: 438608 - DNA, 25 bp, Artificial
  probe
  misc_feature (1)..(25): SEQ ID NO: 6441; WAN024FMW; Start 184; Stop 208
ttagtgaaggactatattgccaaga

SEQ ID NO: 438609 - DNA, 25 bp, Artificial
  probe
  misc_feature (1)..(25): SEQ ID NO: 6441; WAN024FMW; Start 665; Stop 689
tgtctgaaatgattgaacttgtgag

SEQ ID NO: 438610 - DNA, 25 bp, Artificial
  probe
  misc_feature (1)..(25): SEQ ID NO: 6441; WAN024FMW; Start 664; Stop 688
ctgtctgaaatgattgaacttgtga

SEQ ID NO: 438611 - DNA, 25 bp, Artificial
  probe
  misc_feature (1)..(25): SEQ ID NO: 6441; WAN024FMW; Start 663; Stop 687
actgtctgaaatgattgaacttgtg

SEQ ID NO: 438612 - DNA, 25 bp, Artificial
  probe
  misc_feature (1)..(25): SEQ ID NO: 6441; WAN024FMW; Start 228; Stop 252
tattccgactcttggtgtttatcat

SEQ ID NO: 438613 - DNA, 25 bp, Artificial
  probe
  misc_feature (1)..(25): SEQ ID NO: 6441; WAN024FMW; Start 227; Stop 251
ttattccgactcttggtgtttatca

SEQ ID NO: 438614 - DNA, 25 bp, Artificial
  probe
  misc_feature (1)..(25): SEQ ID NO: 6441; WAN024FMW; Start 225; Stop 249
tgttattccgactcttggtgtttat

SEQ ID NO: 438615 - DNA, 25 bp, Artificial
  probe
  misc_feature (1)..(25): SEQ ID NO: 6441; WAN024FMW; Start 224; Stop 248
atgttattccgactcttggtgttta

SEQ ID NO: 438616 - DNA, 25 bp, Artificial
  probe
  misc_feature (1)..(25): SEQ ID NO: 6441; WAN024FMW; Start 223; Stop 247
tatgttattccgactcttggtgttt

SEQ ID NO: 438617 - DNA, 25 bp, Artificial
  probe
  misc_feature (1)..(25): SEQ ID NO: 6441; WAN024FMW; Start 226; Stop 250
gttattccgactcttggtgtttatc

SEQ ID NO: 438618 - DNA, 25 bp, Artificial
  probe
  misc_feature (1)..(25): SEQ ID NO: 6441; WAN024FMW; Start 233; Stop 257
cgactcttggtgtttatcatcattt

SEQ ID NO: 438619 - DNA, 25 bp, Artificial
  probe
  misc_feature (1)..(25): SEQ ID NO: 6441; WAN024FMW; Start 659; Stop 683
ctgaactgtctgaaatgattgaact

SEQ ID NO: 438620 - DNA, 25 bp, Artificial
  probe
  misc_feature (1)..(25): SEQ ID NO: 6441; WAN024FMW; Start 468; Stop 492
tatgacggatgaatcgaatcaagaa

SEQ ID NO: 438621 - DNA, 25 bp, Artificial
  probe
  misc_feature (1)..(25): SEQ ID NO: 6441; WAN024FMW; Start 467; Stop 491
ttatgacggatgaatcgaatcaaga

SEQ ID NO: 438622 - DNA, 25 bp, Artificial
  probe
  misc_feature (1)..(25): SEQ ID NO: 6441; WAN024FMW; Start 662; Stop 686
aactgtctgaaatgattgaacttgt

SEQ ID NO: 438623 - DNA, 25 bp, Artificial
  probe
  misc_feature (1)..(25): SEQ ID NO: 6441; WAN024FMW; Start 808; Stop 832
cagtatgatgtagagtttggaaagg

SEQ ID NO: 438624 - DNA, 25 bp, Artificial
  probe
  misc_feature (1)..(25): SEQ ID NO: 6441; WAN024FMW; Start 595; Stop 619
tggaagcagcaagaatttatgtatg

SEQ ID NO: 438625 - DNA, 25 bp, Artificial
  probe
  misc_feature (1)..(25): SEQ ID NO: 6441; WAN024FMW; Start 471; Stop 495
gacggatgaatcgaatcaagaatta

SEQ ID NO: 438626 - DNA, 25 bp, Artificial
  probe
  misc_feature (1)..(25): SEQ ID NO: 6441; WAN024FMW; Start 469; Stop 493
atgacggatgaatcgaatcaagaat

SEQ ID NO: 438627 - DNA, 25 bp, Artificial
  probe
  misc_feature (1)..(25): SEQ ID NO: 6441; WAN024FMW; Start 458; Stop 482
ttgaagagtttatgacggatgaatc

SEQ ID NO: 438628 - DNA, 25 bp, Artificial
  probe
  misc_feature (1)..(25): SEQ ID NO: 6441; WAN024FMW; Start 809; Stop 833
agtatgatgtagagtttggaaagga

SEQ ID NO: 438629 - DNA, 25 bp, Artificial
  probe
  misc_feature (1)..(25): SEQ ID NO: 6441; WAN024FMW; Start 660; Stop 684
tgaactgtctgaaatgattgaactt

SEQ ID NO: 438630 - DNA, 25 bp, Artificial
  probe
  misc_feature (1)..(25): SEQ ID NO: 6441; WAN024FMW; Start 658; Stop 682
gctgaactgtctgaaatgattgaac

SEQ ID NO: 438631 - DNA, 25 bp, Artificial
  probe
  misc_feature (1)..(25): SEQ ID NO: 6442; WAN024DE3; Start 3; Stop 27
gaagaaggtgaaattaggtgaagtg

SEQ ID NO: 438632 - DNA, 25 bp, Artificial
  probe
  misc_feature (1)..(25): SEQ ID NO: 6442; WAN024DE3; Start 2; Stop 26
tgaagaaggtgaaattaggtgaagt

SEQ ID NO: 438633 - DNA, 25 bp, Artificial
  probe
  misc_feature (1)..(25): SEQ ID NO: 6442; WAN024DE3; Start 4; Stop 28
aagaaggtgaaattaggtgaagtgg

SEQ ID NO: 438634 - DNA, 25 bp, Artificial
  probe
  misc_feature (1)..(25): SEQ ID NO: 6442; WAN024DE3; Start 1; Stop 25
atgaagaaggtgaaattaggtgaag

SEQ ID NO: 438635 - DNA, 25 bp, Artificial
  probe
  misc_feature (1)..(25): SEQ ID NO: 6442; WAN024DE3; Start 7; Stop 31
aaggtgaaattaggtgaagtggcta

SEQ ID NO: 438636 - DNA, 25 bp, Artificial
  probe
  misc_feature (1)..(25): SEQ ID NO: 6442; WAN024DE3; Start 8; Stop 32
aggtgaaattaggtgaagtggctac

SEQ ID NO: 438637 - DNA, 25 bp, Artificial
  probe
  misc_feature (1)..(25): SEQ ID NO: 6442; WAN024DE3; Start 9; Stop 33
ggtgaaattaggtgaagtggctact

SEQ ID NO: 438638 - DNA, 25 bp, Artificial
  probe
  misc_feature (1)..(25): SEQ ID NO: 6442; WAN024DE3; Start 6; Stop 30
gaaggtgaaattaggtgaagtggct

SEQ ID NO: 438639 - DNA, 25 bp, Artificial
  probe
  misc_feature (1)..(25): SEQ ID NO: 6442; WAN024DE3; Start 5; Stop 29
agaaggtgaaattaggtgaagtggc

SEQ ID NO: 438640 - DNA, 25 bp, Artificial
  probe
  misc_feature (1)..(25): SEQ ID NO: 6442; WAN024DE3; Start 492; Stop 516
gcttaatctacttgtaaaatcccga

SEQ ID NO: 438641 - DNA, 25 bp, Artificial
  probe
  misc_feature (1)..(25): SEQ ID NO: 6442; WAN024DE3; Start 11; Stop 35
tgaaattaggtgaagtggctacttt

SEQ ID NO: 438642 - DNA, 25 bp, Artificial
  probe
  misc_feature (1)..(25): SEQ ID NO: 6442; WAN024DE3; Start 10; Stop 34
gtgaaattaggtgaagtggctactt

SEQ ID NO: 438643 - DNA, 25 bp, Artificial
  probe
  misc_feature (1)..(25): SEQ ID NO: 6442; WAN024DE3; Start 120; Stop 144
aacagagataaattattattcgggt

SEQ ID NO: 438644 - DNA, 25 bp, Artificial
  probe
  misc_feature (1)..(25): SEQ ID NO: 6442; WAN024DE3; Start 491; Stop 515
agcttaatctacttgtaaaatcccg

SEQ ID NO: 438645 - DNA, 25 bp, Artificial
  probe
  misc_feature (1)..(25): SEQ ID NO: 6442; WAN024DE3; Start 501; Stop 525
acttgtaaaatcccgatttaacgag

SEQ ID NO: 438646 - DNA, 25 bp, Artificial
  probe
  misc_feature (1)..(25): SEQ ID NO: 6442; WAN024DE3; Start 119; Stop 143
caacagagataaattattattcggg

SEQ ID NO: 438647 - DNA, 25 bp, Artificial
  probe
  misc_feature (1)..(25): SEQ ID NO: 6442; WAN024DE3; Start 507; Stop 531
aaaatcccgatttaacgagatgttt

SEQ ID NO: 438648 - DNA, 25 bp, Artificial
  probe
  misc_feature (1)..(25): SEQ ID NO: 6442; WAN024DE3; Start 505; Stop 529
gtaaaatcccgatttaacgagatgt

SEQ ID NO: 438649 - DNA, 25 bp, Artificial
  probe
  misc_feature (1)..(25): SEQ ID NO: 6442; WAN024DE3; Start 504; Stop 528
tgtaaaatcccgatttaacgagatg

SEQ ID NO: 438650 - DNA, 25 bp, Artificial
  probe
  misc_feature (1)..(25): SEQ ID NO: 6442; WAN024DE3; Start 502; Stop 526
cttgtaaaatcccgatttaacgaga

SEQ ID NO: 438651 - DNA, 25 bp, Artificial
  probe
  misc_feature (1)..(25): SEQ ID NO: 6442; WAN024DE3; Start 506; Stop 530
taaaatcccgatttaacgagatgtt

SEQ ID NO: 438652 - DNA, 25 bp, Artificial
  probe
  misc_feature (1)..(25): SEQ ID NO: 6442; WAN024DE3; Start 503; Stop 527
ttgtaaaatcccgatttaacgagat

SEQ ID NO: 438653 - DNA, 25 bp, Artificial
  probe
  misc_feature (1)..(25): SEQ ID NO: 6442; WAN024DE3; Start 99; Stop 123
acagaatctgactaaaacttcaaca

SEQ ID NO: 438654 - DNA, 25 bp, Artificial
  probe
  misc_feature (1)..(25): SEQ ID NO: 6442; WAN024DE3; Start 500; Stop 524
tacttgtaaaatcccgatttaacga

SEQ ID NO: 438655 - DNA, 25 bp, Artificial
  probe
  misc_feature (1)..(25): SEQ ID NO: 6442; WAN024DE3; Start 499; Stop 523
ctacttgtaaaatcccgatttaacg

SEQ ID NO: 438656 - DNA, 25 bp, Artificial
  probe
  misc_feature (1)..(25): SEQ ID NO: 6442; WAN024DE3; Start 100; Stop 124
cagaatctgactaaaacttcaacag

SEQ ID NO: 438657 - DNA, 25 bp, Artificial
  probe
  misc_feature (1)..(25): SEQ ID NO: 6442; WAN024DE3; Start 493; Stop 517
cttaatctacttgtaaaatcccgat

SEQ ID NO: 438658 - DNA, 25 bp, Artificial
  probe
  misc_feature (1)..(25): SEQ ID NO: 6442; WAN024DE3; Start 121; Stop 145
acagagataaattattattcgggta

SEQ ID NO: 438659 - DNA, 25 bp, Artificial
  probe
  misc_feature (1)..(25): SEQ ID NO: 6442; WAN024DE3; Start 490; Stop 514
gagcttaatctacttgtaaaatccc

SEQ ID NO: 438660 - DNA, 25 bp, Artificial
  probe
  misc_feature (1)..(25): SEQ ID NO: 6442; WAN024DE3; Start 20; Stop 44
gtgaagtggctacttttatcaatgg

SEQ ID NO: 438661 - DNA, 25 bp, Artificial
  probe
  misc_feature (1)..(25): SEQ ID NO: 6442; WAN024DE3; Start 19; Stop 43
ggtgaagtggctacttttatcaatg

SEQ ID NO: 438662 - DNA, 25 bp, Artificial
  probe
  misc_feature (1)..(25): SEQ ID NO: 6442; WAN024DE3; Start 18; Stop 42
aggtgaagtggctacttttatcaat

SEQ ID NO: 438663 - DNA, 25 bp, Artificial
  probe
  misc_feature (1)..(25): SEQ ID NO: 6442; WAN024DE3; Start 17; Stop 41
taggtgaagtggctacttttatcaa

SEQ ID NO: 438664 - DNA, 25 bp, Artificial
  probe
  misc_feature (1)..(25): SEQ ID NO: 6443; WAN024DXZ; Start 234; Stop 258
tgcttatgatattgctgctgtgaat

SEQ ID NO: 438665 - DNA, 25 bp, Artificial
  probe
  misc_feature (1)..(25): SEQ ID NO: 6443; WAN024DXZ; Start 232; Stop 256
attgcttatgatattgctgctgtga

SEQ ID NO: 438666 - DNA, 25 bp, Artificial
  probe
  misc_feature (1)..(25): SEQ ID NO: 6443; WAN024DXZ; Start 235; Stop 259
gcttatgatattgctgctgtgaata

SEQ ID NO: 438667 - DNA, 25 bp, Artificial
  probe
  misc_feature (1)..(25): SEQ ID NO: 6443; WAN024DXZ; Start 233; Stop 257
ttgcttatgatattgctgctgtgaa

SEQ ID NO: 438668 - DNA, 25 bp, Artificial
  probe
  misc_feature (1)..(25): SEQ ID NO: 6443; WAN024DXZ; Start 231; Stop 255
cattgcttatgatattgctgctgtg

SEQ ID NO: 438669 - DNA, 25 bp, Artificial
  probe
  misc_feature (1)..(25): SEQ ID NO: 6443; WAN024DXZ; Start 841; Stop 865
actgtctatgaccaagaattgctta

SEQ ID NO: 438670 - DNA, 25 bp, Artificial
  probe
  misc_feature (1)..(25): SEQ ID NO: 6443; WAN024DXZ; Start 840; Stop 864
tactgtctatgaccaagaattgctt

SEQ ID NO: 438671 - DNA, 25 bp, Artificial
  probe
  misc_feature (1)..(25): SEQ ID NO: 6443; WAN024DXZ; Start 230; Stop 254
ccattgcttatgatattgctgctgt

SEQ ID NO: 438672 - DNA, 25 bp, Artificial
  probe
  misc_feature (1)..(25): SEQ ID NO: 6443; WAN024DXZ; Start 842; Stop 866
ctgtctatgaccaagaattgcttaa

SEQ ID NO: 438673 - DNA, 25 bp, Artificial
  probe
  misc_feature (1)..(25): SEQ ID NO: 6443; WAN024DXZ; Start 839; Stop 863
gtactgtctatgaccaagaattgct

SEQ ID NO: 438674 - DNA, 25 bp, Artificial
  probe
  misc_feature (1)..(25): SEQ ID NO: 6443; WAN024DXZ; Start 1038; Stop 1062
taaggttattgaagagagtgaacaa

SEQ ID NO: 438675 - DNA, 25 bp, Artificial
  probe
  misc_feature (1)..(25): SEQ ID NO: 6443; WAN024DXZ; Start 1037; Stop 1061
ataaggttattgaagagagtgaaca

SEQ ID NO: 438676 - DNA, 25 bp, Artificial
  probe
  misc_feature (1)..(25): SEQ ID NO: 6443; WAN024DXZ; Start 236; Stop 260
cttatgatattgctgctgtgaataa

SEQ ID NO: 438677 - DNA, 25 bp, Artificial
  probe
  misc_feature (1)..(25): SEQ ID NO: 6443; WAN024DXZ; Start 1036; Stop 1060
cataaggttattgaagagagtgaac

SEQ ID NO: 438678 - DNA, 25 bp, Artificial
  probe
  misc_feature (1)..(25): SEQ ID NO: 6443; WAN024DXZ; Start 578; Stop 602
atacaagtccgtctatcctgaaatc

SEQ ID NO: 438679 - DNA, 25 bp, Artificial
  probe
  misc_feature (1)..(25): SEQ ID NO: 6443; WAN024DXZ; Start 837; Stop 861
aggtactgtctatgaccaagaattg

SEQ ID NO: 438680 - DNA, 25 bp, Artificial
  probe
  misc_feature (1)..(25): SEQ ID NO: 6443; WAN024DXZ; Start 533; Stop 557
ataagcaatatcaaccaaagacgac

SEQ ID NO: 438681 - DNA, 25 bp, Artificial
  probe
  misc_feature (1)..(25): SEQ ID NO: 6443; WAN024DXZ; Start 834; Stop 858
tgtaggtactgtctatgaccaagaa

SEQ ID NO: 438682 - DNA, 25 bp, Artificial
  probe
  misc_feature (1)..(25): SEQ ID NO: 6443; WAN024DXZ; Start 833; Stop 857
ttgtaggtactgtctatgaccaaga

SEQ ID NO: 438683 - DNA, 25 bp, Artificial
  probe
  misc_feature (1)..(25): SEQ ID NO: 6443; WAN024DXZ; Start 534; Stop 558
taagcaatatcaaccaaagacgact

SEQ ID NO: 438684 - DNA, 25 bp, Artificial
  probe
  misc_feature (1)..(25): SEQ ID NO: 6443; WAN024DXZ; Start 835; Stop 859
gtaggtactgtctatgaccaagaat

SEQ ID NO: 438685 - DNA, 25 bp, Artificial
  probe
  misc_feature (1)..(25): SEQ ID NO: 6443; WAN024DXZ; Start 251; Stop 275
ctgtgaataaagcgattgaaatagc

SEQ ID NO: 438686 - DNA, 25 bp, Artificial
  probe
  misc_feature (1)..(25): SEQ ID NO: 6443; WAN024DXZ; Start 557; Stop 581
cttatattgcttacgggacggatac

SEQ ID NO: 438687 - DNA, 25 bp, Artificial
  probe
  misc_feature (1)..(25): SEQ ID NO: 6443; WAN024DXZ; Start 537; Stop 561
gcaatatcaaccaaagacgacttat

SEQ ID NO: 438688 - DNA, 25 bp, Artificial
  probe
  misc_feature (1)..(25): SEQ ID NO: 6443; WAN024DXZ; Start 536; Stop 560
agcaatatcaaccaaagacgactta

SEQ ID NO: 438689 - DNA, 25 bp, Artificial
  probe
  misc_feature (1)..(25): SEQ ID NO: 6443; WAN024DXZ; Start 1035; Stop 1059
tcataaggttattgaagagagtgaa

SEQ ID NO: 438690 - DNA, 25 bp, Artificial
  probe
  misc_feature (1)..(25): SEQ ID NO: 6443; WAN024DXZ; Start 959; Stop 983
tgaatttgttgctagatgttggttt

SEQ ID NO: 438691 - DNA, 25 bp, Artificial
  probe
  misc_feature (1)..(25): SEQ ID NO: 6443; WAN024DXZ; Start 556; Stop 580
acttatattgcttacgggacggata

SEQ ID NO: 438692 - DNA, 25 bp, Artificial
  probe
  misc_feature (1)..(25): SEQ ID NO: 6443; WAN024DXZ; Start 958; Stop 982
ctgaatttgttgctagatgttggtt

SEQ ID NO: 438693 - DNA, 25 bp, Artificial
  probe
  misc_feature (1)..(25): SEQ ID NO: 6443; WAN024DXZ; Start 548; Stop 572
caaagacgacttatattgcttacgg

SEQ ID NO: 438694 - DNA, 25 bp, Artificial
  probe
  misc_feature (1)..(25): SEQ ID NO: 6443; WAN024DXZ; Start 547; Stop 571
ccaaagacgacttatattgcttacg

SEQ ID NO: 438695 - DNA, 25 bp, Artificial
  probe
  misc_feature (1)..(25): SEQ ID NO: 6443; WAN024DXZ; Start 544; Stop 568
caaccaaagacgacttatattgctt

SEQ ID NO: 438696 - DNA, 25 bp, Artificial
  probe
  misc_feature (1)..(25): SEQ ID NO: 6443; WAN024DXZ; Start 521; Stop 545
tccagaatgactataagcaatatca

SEQ ID NO: 438697 - DNA, 25 bp, Artificial
  probe
  misc_feature (1)..(25): SEQ ID NO: 6444; WAN024BOX; Start 34; Stop 58
ttgcttcattacggtcatatcaatt

SEQ ID NO: 438698 - DNA, 25 bp, Artificial
  probe
  misc_feature (1)..(25): SEQ ID NO: 6444; WAN024BOX; Start 276; Stop 300
tgatgattgggaaggtaagtttgat

SEQ ID NO: 438699 - DNA, 25 bp, Artificial
  probe
  misc_feature (1)..(25): SEQ ID NO: 6444; WAN024BOX; Start 269; Stop 293
ttattggtgatgattgggaaggtaa

SEQ ID NO: 438700 - DNA, 25 bp, Artificial
  probe
  misc_feature (1)..(25): SEQ ID NO: 6444; WAN024BOX; Start 270; Stop 294
tattggtgatgattgggaaggtaag

SEQ ID NO: 438701 - DNA, 25 bp, Artificial
  probe
  misc_feature (1)..(25): SEQ ID NO: 6444; WAN024BOX; Start 265; Stop 289
tttgttattggtgatgattgggaag

SEQ ID NO: 438702 - DNA, 25 bp, Artificial
  probe
  misc_feature (1)..(25): SEQ ID NO: 6444; WAN024BOX; Start 264; Stop 288
ctttgttattggtgatgattgggaa

SEQ ID NO: 438703 - DNA, 25 bp, Artificial
  probe
  misc_feature (1)..(25): SEQ ID NO: 6444; WAN024BOX; Start 263; Stop 287
tctttgttattggtgatgattggga

SEQ ID NO: 438704 - DNA, 25 bp, Artificial
  probe
  misc_feature (1)..(25): SEQ ID NO: 6444; WAN024BOX; Start 268; Stop 292
gttattggtgatgattgggaaggta

SEQ ID NO: 438705 - DNA, 25 bp, Artificial
  probe
  misc_feature (1)..(25): SEQ ID NO: 6444; WAN024BOX; Start 67; Stop 91
cgtgctaaagatttgggagattatt

SEQ ID NO: 438706 - DNA, 25 bp, Artificial
  probe
  misc_feature (1)..(25): SEQ ID NO: 6444; WAN024BOX; Start 277; Stop 301
gatgattgggaaggtaagtttgatt

SEQ ID NO: 438707 - DNA, 25 bp, Artificial
  probe
  misc_feature (1)..(25): SEQ ID NO: 6444; WAN024BOX; Start 262; Stop 286
atctttgttattggtgatgattggg

SEQ ID NO: 438708 - DNA, 25 bp, Artificial
  probe
  misc_feature (1)..(25): SEQ ID NO: 6444; WAN024BOX; Start 31; Stop 55
gatttgcttcattacggtcatatca

SEQ ID NO: 438709 - DNA, 25 bp, Artificial
  probe
  misc_feature (1)..(25): SEQ ID NO: 6444; WAN024BOX; Start 275; Stop 299
gtgatgattgggaaggtaagtttga

SEQ ID NO: 438710 - DNA, 25 bp, Artificial
  probe
  misc_feature (1)..(25): SEQ ID NO: 6444; WAN024BOX; Start 371; Stop 395
aagaagacttaaacaagaccaaagg

SEQ ID NO: 438711 - DNA, 25 bp, Artificial
  probe
  misc_feature (1)..(25): SEQ ID NO: 6444; WAN024BOX; Start 278; Stop 302
atgattgggaaggtaagtttgattt

SEQ ID NO: 438712 - DNA, 25 bp, Artificial
  probe
  misc_feature (1)..(25): SEQ ID NO: 6444; WAN024BOX; Start 266; Stop 290
ttgttattggtgatgattgggaagg

SEQ ID NO: 438713 - DNA, 25 bp, Artificial
  probe
  misc_feature (1)..(25): SEQ ID NO: 6444; WAN024BOX; Start 35; Stop 59
tgcttcattacggtcatatcaattt

SEQ ID NO: 438714 - DNA, 25 bp, Artificial
  probe
  misc_feature (1)..(25): SEQ ID NO: 6444; WAN024BOX; Start 172; Stop 196
ttgcttgaatctattcgttatgtag

SEQ ID NO: 438715 - DNA, 25 bp, Artificial
  probe
  misc_feature (1)..(25): SEQ ID NO: 6444; WAN024BOX; Start 58; Stop 82
ttattgaagcgtgctaaagatttgg

SEQ ID NO: 438716 - DNA, 25 bp, Artificial
  probe
  misc_feature (1)..(25): SEQ ID NO: 6444; WAN024BOX; Start 66; Stop 90
gcgtgctaaagatttgggagattat

SEQ ID NO: 438717 - DNA, 25 bp, Artificial
  probe
  misc_feature (1)..(25): SEQ ID NO: 6444; WAN024BOX; Start 30; Stop 54
tgatttgcttcattacggtcatatc

SEQ ID NO: 438718 - DNA, 25 bp, Artificial
  probe
  misc_feature (1)..(25): SEQ ID NO: 6444; WAN024BOX; Start 33; Stop 57
tttgcttcattacggtcatatcaat

SEQ ID NO: 438719 - DNA, 25 bp, Artificial
  probe
  misc_feature (1)..(25): SEQ ID NO: 6444; WAN024BOX; Start 32; Stop 56
atttgcttcattacggtcatatcaa

SEQ ID NO: 438720 - DNA, 25 bp, Artificial
  probe
  misc_feature (1)..(25): SEQ ID NO: 6444; WAN024BOX; Start 173; Stop 197
tgcttgaatctattcgttatgtaga

SEQ ID NO: 438721 - DNA, 25 bp, Artificial
  probe
  misc_feature (1)..(25): SEQ ID NO: 6444; WAN024BOX; Start 28; Stop 52
tttgatttgcttcattacggtcata

SEQ ID NO: 438722 - DNA, 25 bp, Artificial
  probe
  misc_feature (1)..(25): SEQ ID NO: 6444; WAN024BOX; Start 1; Stop 25
atgaagagagtgattacttacggga

SEQ ID NO: 438723 - DNA, 25 bp, Artificial
  probe
  misc_feature (1)..(25): SEQ ID NO: 6444; WAN024BOX; Start 29; Stop 53
ttgatttgcttcattacggtcatat

SEQ ID NO: 438724 - DNA, 25 bp, Artificial
  probe
  misc_feature (1)..(25): SEQ ID NO: 6444; WAN024BOX; Start 5; Stop 29
agagagtgattacttacgggacttt

SEQ ID NO: 438725 - DNA, 25 bp, Artificial
  probe
  misc_feature (1)..(25): SEQ ID NO: 6444; WAN024BOX; Start 4; Stop 28
aagagagtgattacttacgggactt

SEQ ID NO: 438726 - DNA, 25 bp, Artificial
  probe
  misc_feature (1)..(25): SEQ ID NO: 6444; WAN024BOX; Start 274; Stop 298
ggtgatgattgggaaggtaagtttg

SEQ ID NO: 438727 - DNA, 25 bp, Artificial
  probe
  misc_feature (1)..(25): SEQ ID NO: 6444; WAN024BOX; Start 271; Stop 295
attggtgatgattgggaaggtaagt

SEQ ID NO: 438728 - DNA, 25 bp, Artificial
  probe
  misc_feature (1)..(25): SEQ ID NO: 6444; WAN024BOX; Start 3; Stop 27
gaagagagtgattacttacgggact

SEQ ID NO: 438729 - DNA, 25 bp, Artificial
  probe
  misc_feature (1)..(25): SEQ ID NO: 6444; WAN024BOX; Start 273; Stop 297
tggtgatgattgggaaggtaagttt

SEQ ID NO: 438730 - DNA, 25 bp, Artificial
  probe
  misc_feature (1)..(25): SEQ ID NO: 6445; WAN024AY7; Start 939; Stop 963
ggttggaactgatgaggagactatt

SEQ ID NO: 438731 - DNA, 25 bp, Artificial
  probe
  misc_feature (1)..(25): SEQ ID NO: 6445; WAN024AY7; Start 577; Stop 601
aacactcgtcttattctactgactg

SEQ ID NO: 438732 - DNA, 25 bp, Artificial
  probe
  misc_feature (1)..(25): SEQ ID NO: 6445; WAN024AY7; Start 583; Stop 607
cgtcttattctactgactgctcata

SEQ ID NO: 438733 - DNA, 25 bp, Artificial
  probe
  misc_feature (1)..(25): SEQ ID NO: 6445; WAN024AY7; Start 582; Stop 606
tcgtcttattctactgactgctcat

SEQ ID NO: 438734 - DNA, 25 bp, Artificial
  probe
  misc_feature (1)..(25): SEQ ID NO: 6445; WAN024AY7; Start 275; Stop 299
ttcatggtgacactactacaacata

SEQ ID NO: 438735 - DNA, 25 bp, Artificial
  probe
  misc_feature (1)..(25): SEQ ID NO: 6445; WAN024AY7; Start 576; Stop 600
taacactcgtcttattctactgact

SEQ ID NO: 438736 - DNA, 25 bp, Artificial
  probe
  misc_feature (1)..(25): SEQ ID NO: 6445; WAN024AY7; Start 276; Stop 300
tcatggtgacactactacaacatat

SEQ ID NO: 438737 - DNA, 25 bp, Artificial
  probe
  misc_feature (1)..(25): SEQ ID NO: 6445; WAN024AY7; Start 274; Stop 298
gttcatggtgacactactacaacat

SEQ ID NO: 438738 - DNA, 25 bp, Artificial
  probe
  misc_feature (1)..(25): SEQ ID NO: 6445; WAN024AY7; Start 587; Stop 611
ttattctactgactgctcatagacg

SEQ ID NO: 438739 - DNA, 25 bp, Artificial
  probe
  misc_feature (1)..(25): SEQ ID NO: 6445; WAN024AY7; Start 264; Stop 288
tattgttctagttcatggtgacact

SEQ ID NO: 438740 - DNA, 25 bp, Artificial
  probe
  misc_feature (1)..(25): SEQ ID NO: 6445; WAN024AY7; Start 584; Stop 608
gtcttattctactgactgctcatag

SEQ ID NO: 438741 - DNA, 25 bp, Artificial
  probe
  misc_feature (1)..(25): SEQ ID NO: 6445; WAN024AY7; Start 580; Stop 604
actcgtcttattctactgactgctc

SEQ ID NO: 438742 - DNA, 25 bp, Artificial
  probe
  misc_feature (1)..(25): SEQ ID NO: 6445; WAN024AY7; Start 938; Stop 962
tggttggaactgatgaggagactat

SEQ ID NO: 438743 - DNA, 25 bp, Artificial
  probe
  misc_feature (1)..(25): SEQ ID NO: 6445; WAN024AY7; Start 581; Stop 605
ctcgtcttattctactgactgctca

SEQ ID NO: 438744 - DNA, 25 bp, Artificial
  probe
  misc_feature (1)..(25): SEQ ID NO: 6445; WAN024AY7; Start 263; Stop 287
atattgttctagttcatggtgacac

SEQ ID NO: 438745 - DNA, 25 bp, Artificial
  probe
  misc_feature (1)..(25): SEQ ID NO: 6445; WAN024AY7; Start 575; Stop 599
ttaacactcgtcttattctactgac

SEQ ID NO: 438746 - DNA, 25 bp, Artificial
  probe
  misc_feature (1)..(25): SEQ ID NO: 6445; WAN024AY7; Start 273; Stop 297
agttcatggtgacactactacaaca

SEQ ID NO: 438747 - DNA, 25 bp, Artificial
  probe
  misc_feature (1)..(25): SEQ ID NO: 6445; WAN024AY7; Start 261; Stop 285
agatattgttctagttcatggtgac

SEQ ID NO: 438748 - DNA, 25 bp, Artificial
  probe
  misc_feature (1)..(25): SEQ ID NO: 6445; WAN024AY7; Start 260; Stop 284
cagatattgttctagttcatggtga

SEQ ID NO: 438749 - DNA, 25 bp, Artificial
  probe
  misc_feature (1)..(25): SEQ ID NO: 6445; WAN024AY7; Start 579; Stop 603
cactcgtcttattctactgactgct

SEQ ID NO: 438750 - DNA, 25 bp, Artificial
  probe
  misc_feature (1)..(25): SEQ ID NO: 6445; WAN024AY7; Start 935; Stop 959
aattggttggaactgatgaggagac

SEQ ID NO: 438751 - DNA, 25 bp, Artificial
  probe
  misc_feature (1)..(25): SEQ ID NO: 6445; WAN024AY7; Start 937; Stop 961
ttggttggaactgatgaggagacta

SEQ ID NO: 438752 - DNA, 25 bp, Artificial
  probe
  misc_feature (1)..(25): SEQ ID NO: 6445; WAN024AY7; Start 262; Stop 286
gatattgttctagttcatggtgaca

SEQ ID NO: 438753 - DNA, 25 bp, Artificial
  probe
  misc_feature (1)..(25): SEQ ID NO: 6445; WAN024AY7; Start 940; Stop 964
gttggaactgatgaggagactattt

SEQ ID NO: 438754 - DNA, 25 bp, Artificial
  probe
  misc_feature (1)..(25): SEQ ID NO: 6445; WAN024AY7; Start 745; Stop 769
ggagacacagaacgtattcagatta

SEQ ID NO: 438755 - DNA, 25 bp, Artificial
  probe
  misc_feature (1)..(25): SEQ ID NO: 6445; WAN024AY7; Start 586; Stop 610
cttattctactgactgctcatagac

SEQ ID NO: 438756 - DNA, 25 bp, Artificial
  probe
  misc_feature (1)..(25): SEQ ID NO: 6445; WAN024AY7; Start 578; Stop 602
acactcgtcttattctactgactgc

SEQ ID NO: 438757 - DNA, 25 bp, Artificial
  probe
  misc_feature (1)..(25): SEQ ID NO: 6445; WAN024AY7; Start 585; Stop 609
tcttattctactgactgctcataga

SEQ ID NO: 438758 - DNA, 25 bp, Artificial
  probe
  misc_feature (1)..(25): SEQ ID NO: 6445; WAN024AY7; Start 272; Stop 296
tagttcatggtgacactactacaac

SEQ ID NO: 438759 - DNA, 25 bp, Artificial
  probe
  misc_feature (1)..(25): SEQ ID NO: 6445; WAN024AY7; Start 271; Stop 295
ctagttcatggtgacactactacaa

SEQ ID NO: 438760 - DNA, 25 bp, Artificial
  probe
  misc_feature (1)..(25): SEQ ID NO: 6445; WAN024AY7; Start 265; Stop 289
attgttctagttcatggtgacacta

SEQ ID NO: 438761 - DNA, 25 bp, Artificial
  probe
  misc_feature (1)..(25): SEQ ID NO: 6445; WAN024AY7; Start 941; Stop 965
ttggaactgatgaggagactattta

SEQ ID NO: 438762 - DNA, 25 bp, Artificial
  probe
  misc_feature (1)..(25): SEQ ID NO: 6445; WAN024AY7; Start 473; Stop 497
aagagggtagagagaatgtttatgt

SEQ ID NO: 438763 - DNA, 25 bp, Artificial
  probe
  misc_feature (1)..(25): SEQ ID NO: 6446; WAN024AST; Start 27; Stop 51
caatgactttatcggttcctttgac

SEQ ID NO: 438764 - DNA, 25 bp, Artificial
  probe
  misc_feature (1)..(25): SEQ ID NO: 6446; WAN024AST; Start 28; Stop 52
aatgactttatcggttcctttgacg

SEQ ID NO: 438765 - DNA, 25 bp, Artificial
  probe
  misc_feature (1)..(25): SEQ ID NO: 6446; WAN024AST; Start 26; Stop 50
ccaatgactttatcggttcctttga

SEQ ID NO: 438766 - DNA, 25 bp, Artificial
  probe
  misc_feature (1)..(25): SEQ ID NO: 6446; WAN024AST; Start 17; Stop 41
tcaacagaaccaatgactttatcgg

SEQ ID NO: 438767 - DNA, 25 bp, Artificial
  probe
  misc_feature (1)..(25): SEQ ID NO: 6446; WAN024AST; Start 176; Stop 200
ggcaaactagcgtaggtatggatat

SEQ ID NO: 438768 - DNA, 25 bp, Artificial
  probe
  misc_feature (1)..(25): SEQ ID NO: 6446; WAN024AST; Start 25; Stop 49
accaatgactttatcggttcctttg

SEQ ID NO: 438769 - DNA, 25 bp, Artificial
  probe
  misc_feature (1)..(25): SEQ ID NO: 6446; WAN024AST; Start 18; Stop 42
caacagaaccaatgactttatcggt

SEQ ID NO: 438770 - DNA, 25 bp, Artificial
  probe
  misc_feature (1)..(25): SEQ ID NO: 6446; WAN024AST; Start 177; Stop 201
gcaaactagcgtaggtatggatatc

SEQ ID NO: 438771 - DNA, 25 bp, Artificial
  probe
  misc_feature (1)..(25): SEQ ID NO: 6446; WAN024AST; Start 175; Stop 199
tggcaaactagcgtaggtatggata

SEQ ID NO: 438772 - DNA, 25 bp, Artificial
  probe
  misc_feature (1)..(25): SEQ ID NO: 6446; WAN024AST; Start 40; Stop 64
ggttcctttgacgacaatcccatag

SEQ ID NO: 438773 - DNA, 25 bp, Artificial
  probe
  misc_feature (1)..(25): SEQ ID NO: 6446; WAN024AST; Start 34; Stop 58
tttatcggttcctttgacgacaatc

SEQ ID NO: 438774 - DNA, 25 bp, Artificial
  probe
  misc_feature (1)..(25): SEQ ID NO: 6446; WAN024AST; Start 33; Stop 57
ctttatcggttcctttgacgacaat

SEQ ID NO: 438775 - DNA, 25 bp, Artificial
  probe
  misc_feature (1)..(25): SEQ ID NO: 6446; WAN024AST; Start 29; Stop 53
atgactttatcggttcctttgacga

SEQ ID NO: 438776 - DNA, 25 bp, Artificial
  probe
  misc_feature (1)..(25): SEQ ID NO: 6446; WAN024AST; Start 1; Stop 25
atgaagatggttgaagtcaacagaa

SEQ ID NO: 438777 - DNA, 25 bp, Artificial
  probe
  misc_feature (1)..(25): SEQ ID NO: 6446; WAN024AST; Start 41; Stop 65
gttcctttgacgacaatcccatagc

SEQ ID NO: 438778 - DNA, 25 bp, Artificial
  probe
  misc_feature (1)..(25): SEQ ID NO: 6446; WAN024AST; Start 32; Stop 56
actttatcggttcctttgacgacaa

SEQ ID NO: 438779 - DNA, 25 bp, Artificial
  probe
  misc_feature (1)..(25): SEQ ID NO: 6446; WAN024AST; Start 2; Stop 26
tgaagatggttgaagtcaacagaac

SEQ ID NO: 438780 - DNA, 25 bp, Artificial
  probe
  misc_feature (1)..(25): SEQ ID NO: 6446; WAN024AST; Start 174; Stop 198
ctggcaaactagcgtaggtatggat

SEQ ID NO: 438781 - DNA, 25 bp, Artificial
  probe
  misc_feature (1)..(25): SEQ ID NO: 6446; WAN024AST; Start 31; Stop 55
gactttatcggttcctttgacgaca

SEQ ID NO: 438782 - DNA, 25 bp, Artificial
  probe
  misc_feature (1)..(25): SEQ ID NO: 6446; WAN024AST; Start 30; Stop 54
tgactttatcggttcctttgacgac

SEQ ID NO: 438783 - DNA, 25 bp, Artificial
  probe
  misc_feature (1)..(25): SEQ ID NO: 6446; WAN024AST; Start 73; Stop 97
gagattttccttttgagtacgctcc

SEQ ID NO: 438784 - DNA, 25 bp, Artificial
  probe
  misc_feature (1)..(25): SEQ ID NO: 6446; WAN024AST; Start 35; Stop 59
ttatcggttcctttgacgacaatcc

SEQ ID NO: 438785 - DNA, 25 bp, Artificial
  probe
  misc_feature (1)..(25): SEQ ID NO: 6446; WAN024AST; Start 69; Stop 93
ctgggagattttccttttgagtacg

SEQ ID NO: 438786 - DNA, 25 bp, Artificial
  probe
  misc_feature (1)..(25): SEQ ID NO: 6446; WAN024AST; Start 68; Stop 92
gctgggagattttccttttgagtac

SEQ ID NO: 438787 - DNA, 25 bp, Artificial
  probe
  misc_feature (1)..(25): SEQ ID NO: 6446; WAN024AST; Start 72; Stop 96
ggagattttccttttgagtacgctc

SEQ ID NO: 438788 - DNA, 25 bp, Artificial
  probe
  misc_feature (1)..(25): SEQ ID NO: 6446; WAN024AST; Start 16; Stop 40
gtcaacagaaccaatgactttatcg

SEQ ID NO: 438789 - DNA, 25 bp, Artificial
  probe
  misc_feature (1)..(25): SEQ ID NO: 6446; WAN024AST; Start 24; Stop 48
aaccaatgactttatcggttccttt

SEQ ID NO: 438790 - DNA, 25 bp, Artificial
  probe
  misc_feature (1)..(25): SEQ ID NO: 6446; WAN024AST; Start 19; Stop 43
aacagaaccaatgactttatcggtt

SEQ ID NO: 438791 - DNA, 25 bp, Artificial
  probe
  misc_feature (1)..(25): SEQ ID NO: 6446; WAN024AST; Start 3; Stop 27
gaagatggttgaagtcaacagaacc

SEQ ID NO: 438792 - DNA, 25 bp, Artificial
  probe
  misc_feature (1)..(25): SEQ ID NO: 6446; WAN024AST; Start 172; Stop 196
ctctggcaaactagcgtaggtatgg

SEQ ID NO: 438793 - DNA, 25 bp, Artificial
  probe
  misc_feature (1)..(25): SEQ ID NO: 6446; WAN024AST; Start 67; Stop 91
agctgggagattttccttttgagta

SEQ ID NO: 438794 - DNA, 25 bp, Artificial
  probe
  misc_feature (1)..(25): SEQ ID NO: 6446; WAN024AST; Start 42; Stop 66
ttcctttgacgacaatcccatagcc

SEQ ID NO: 438795 - DNA, 25 bp, Artificial
  probe
  misc_feature (1)..(25): SEQ ID NO: 6446; WAN024AST; Start 39; Stop 63
cggttcctttgacgacaatcccata

SEQ ID NO: 438796 - DNA, 25 bp, Artificial
  probe
  misc_feature (1)..(25): SEQ ID NO: 6447; WAN024BUT; Start 383; Stop 407
cactaagagatactgagcctgctat

SEQ ID NO: 438797 - DNA, 25 bp, Artificial
  probe
  misc_feature (1)..(25): SEQ ID NO: 6447; WAN024BUT; Start 89; Stop 113
tcggtgattatgatgatctcaagaa

SEQ ID NO: 438798 - DNA, 25 bp, Artificial
  probe
  misc_feature (1)..(25): SEQ ID NO: 6447; WAN024BUT; Start 88; Stop 112
ttcggtgattatgatgatctcaaga

SEQ ID NO: 438799 - DNA, 25 bp, Artificial
  probe
  misc_feature (1)..(25): SEQ ID NO: 6447; WAN024BUT; Start 375; Stop 399
tcaagcaccactaagagatactgag

SEQ ID NO: 438800 - DNA, 25 bp, Artificial
  probe
  misc_feature (1)..(25): SEQ ID NO: 6447; WAN024BUT; Start 374; Stop 398
ctcaagcaccactaagagatactga

SEQ ID NO: 438801 - DNA, 25 bp, Artificial
  probe
  misc_feature (1)..(25): SEQ ID NO: 6447; WAN024BUT; Start 87; Stop 111
attcggtgattatgatgatctcaag

SEQ ID NO: 438802 - DNA, 25 bp, Artificial
  probe
  misc_feature (1)..(25): SEQ ID NO: 6447; WAN024BUT; Start 384; Stop 408
actaagagatactgagcctgctatc

SEQ ID NO: 438803 - DNA, 25 bp, Artificial
  probe
  misc_feature (1)..(25): SEQ ID NO: 6447; WAN024BUT; Start 36; Stop 60
agaagagctagataacatcgtgaag

SEQ ID NO: 438804 - DNA, 25 bp, Artificial
  probe
  misc_feature (1)..(25): SEQ ID NO: 6447; WAN024BUT; Start 34; Stop 58
caagaagagctagataacatcgtga

SEQ ID NO: 438805 - DNA, 25 bp, Artificial
  probe
  misc_feature (1)..(25): SEQ ID NO: 6447; WAN024BUT; Start 35; Stop 59
aagaagagctagataacatcgtgaa

SEQ ID NO: 438806 - DNA, 25 bp, Artificial
  probe
  misc_feature (1)..(25): SEQ ID NO: 6447; WAN024BUT; Start 33; Stop 57
acaagaagagctagataacatcgtg

SEQ ID NO: 438807 - DNA, 25 bp, Artificial
  probe
  misc_feature (1)..(25): SEQ ID NO: 6447; WAN024BUT; Start 32; Stop 56
cacaagaagagctagataacatcgt

SEQ ID NO: 438808 - DNA, 25 bp, Artificial
  probe
  misc_feature (1)..(25): SEQ ID NO: 6447; WAN024BUT; Start 31; Stop 55
acacaagaagagctagataacatcg

SEQ ID NO: 438809 - DNA, 25 bp, Artificial
  probe
  misc_feature (1)..(25): SEQ ID NO: 6447; WAN024BUT; Start 37; Stop 61
gaagagctagataacatcgtgaagg

SEQ ID NO: 438810 - DNA, 25 bp, Artificial
  probe
  misc_feature (1)..(25): SEQ ID NO: 6447; WAN024BUT; Start 86; Stop 110
aattcggtgattatgatgatctcaa

SEQ ID NO: 438811 - DNA, 25 bp, Artificial
  probe
  misc_feature (1)..(25): SEQ ID NO: 6447; WAN024BUT; Start 40; Stop 64
gagctagataacatcgtgaaggaac

SEQ ID NO: 438812 - DNA, 25 bp, Artificial
  probe
  misc_feature (1)..(25): SEQ ID NO: 6447; WAN024BUT; Start 39; Stop 63
agagctagataacatcgtgaaggaa

SEQ ID NO: 438813 - DNA, 25 bp, Artificial
  probe
  misc_feature (1)..(25): SEQ ID NO: 6447; WAN024BUT; Start 38; Stop 62
aagagctagataacatcgtgaagga

SEQ ID NO: 438814 - DNA, 25 bp, Artificial
  probe
  misc_feature (1)..(25): SEQ ID NO: 6447; WAN024BUT; Start 30; Stop 54
aacacaagaagagctagataacatc

SEQ ID NO: 438815 - DNA, 25 bp, Artificial
  probe
  misc_feature (1)..(25): SEQ ID NO: 6447; WAN024BUT; Start 385; Stop 409
ctaagagatactgagcctgctatcg

SEQ ID NO: 438816 - DNA, 25 bp, Artificial
  probe
  misc_feature (1)..(25): SEQ ID NO: 6447; WAN024BUT; Start 376; Stop 400
caagcaccactaagagatactgagc

SEQ ID NO: 438817 - DNA, 25 bp, Artificial
  probe
  misc_feature (1)..(25): SEQ ID NO: 6447; WAN024BUT; Start 373; Stop 397
cctcaagcaccactaagagatactg

SEQ ID NO: 438818 - DNA, 25 bp, Artificial
  probe
  misc_feature (1)..(25): SEQ ID NO: 6447; WAN024BUT; Start 382; Stop 406
ccactaagagatactgagcctgcta

SEQ ID NO: 438819 - DNA, 25 bp, Artificial
  probe
  misc_feature (1)..(25): SEQ ID NO: 6447; WAN024BUT; Start 90; Stop 114
cggtgattatgatgatctcaagaaa

SEQ ID NO: 438820 - DNA, 25 bp, Artificial
  probe
  misc_feature (1)..(25): SEQ ID NO: 6447; WAN024BUT; Start 386; Stop 410
taagagatactgagcctgctatcgg

SEQ ID NO: 438821 - DNA, 25 bp, Artificial
  probe
  misc_feature (1)..(25): SEQ ID NO: 6447; WAN024BUT; Start 377; Stop 401
aagcaccactaagagatactgagcc

SEQ ID NO: 438822 - DNA, 25 bp, Artificial
  probe
  misc_feature (1)..(25): SEQ ID NO: 6447; WAN024BUT; Start 85; Stop 109
aaattcggtgattatgatgatctca

SEQ ID NO: 438823 - DNA, 25 bp, Artificial
  probe
  misc_feature (1)..(25): SEQ ID NO: 6447; WAN024BUT; Start 28; Stop 52
gaaacacaagaagagctagataaca

SEQ ID NO: 438824 - DNA, 25 bp, Artificial
  probe
  misc_feature (1)..(25): SEQ ID NO: 6447; WAN024BUT; Start 27; Stop 51
tgaaacacaagaagagctagataac

SEQ ID NO: 438825 - DNA, 25 bp, Artificial
  probe
  misc_feature (1)..(25): SEQ ID NO: 6447; WAN024BUT; Start 92; Stop 116
gtgattatgatgatctcaagaaacg

SEQ ID NO: 438826 - DNA, 25 bp, Artificial
  probe
  misc_feature (1)..(25): SEQ ID NO: 6447; WAN024BUT; Start 24; Stop 48
gattgaaacacaagaagagctagat

SEQ ID NO: 438827 - DNA, 25 bp, Artificial
  probe
  misc_feature (1)..(25): SEQ ID NO: 6447; WAN024BUT; Start 21; Stop 45
aacgattgaaacacaagaagagcta

SEQ ID NO: 438828 - DNA, 25 bp, Artificial
  probe
  misc_feature (1)..(25): SEQ ID NO: 6447; WAN024BUT; Start 23; Stop 47
cgattgaaacacaagaagagctaga

SEQ ID NO: 438829 - DNA, 25 bp, Artificial
  probe
  misc_feature (1)..(25): SEQ ID NO: 6448; WAN024CS2; Start 8; Stop 32
ttaagaagagttccaatccagaagc

SEQ ID NO: 438830 - DNA, 25 bp, Artificial
  probe
  misc_feature (1)..(25): SEQ ID NO: 6448; WAN024CS2; Start 7; Stop 31
attaagaagagttccaatccagaag

SEQ ID NO: 438831 - DNA, 25 bp, Artificial
  probe
  misc_feature (1)..(25): SEQ ID NO: 6448; WAN024CS2; Start 9; Stop 33
taagaagagttccaatccagaagcc

SEQ ID NO: 438832 - DNA, 25 bp, Artificial
  probe
  misc_feature (1)..(25): SEQ ID NO: 6448; WAN024CS2; Start 5; Stop 29
agattaagaagagttccaatccaga

SEQ ID NO: 438833 - DNA, 25 bp, Artificial
  probe
  misc_feature (1)..(25): SEQ ID NO: 6448; WAN024CS2; Start 6; Stop 30
gattaagaagagttccaatccagaa

SEQ ID NO: 438834 - DNA, 25 bp, Artificial
  probe
  misc_feature (1)..(25): SEQ ID NO: 6448; WAN024CS2; Start 4; Stop 28
aagattaagaagagttccaatccag

SEQ ID NO: 438835 - DNA, 25 bp, Artificial
  probe
  misc_feature (1)..(25): SEQ ID NO: 6448; WAN024CS2; Start 3; Stop 27
gaagattaagaagagttccaatcca

SEQ ID NO: 438836 - DNA, 25 bp, Artificial
  probe
  misc_feature (1)..(25): SEQ ID NO: 6448; WAN024CS2; Start 2; Stop 26
tgaagattaagaagagttccaatcc

SEQ ID NO: 438837 - DNA, 25 bp, Artificial
  probe
  misc_feature (1)..(25): SEQ ID NO: 6448; WAN024CS2; Start 12; Stop 36
gaagagttccaatccagaagccatt

SEQ ID NO: 438838 - DNA, 25 bp, Artificial
  probe
  misc_feature (1)..(25): SEQ ID NO: 6448; WAN024CS2; Start 11; Stop 35
agaagagttccaatccagaagccat

SEQ ID NO: 438839 - DNA, 25 bp, Artificial
  probe
  misc_feature (1)..(25): SEQ ID NO: 6448; WAN024CS2; Start 62; Stop 86
ttatttcctacttgggagcgtctaa

SEQ ID NO: 438840 - DNA, 25 bp, Artificial
  probe
  misc_feature (1)..(25): SEQ ID NO: 6448; WAN024CS2; Start 10; Stop 34
aagaagagttccaatccagaagcca

SEQ ID NO: 438841 - DNA, 25 bp, Artificial
  probe
  misc_feature (1)..(25): SEQ ID NO: 6448; WAN024CS2; Start 63; Stop 87
tatttcctacttgggagcgtctaac

SEQ ID NO: 438842 - DNA, 25 bp, Artificial
  probe
  misc_feature (1)..(25): SEQ ID NO: 6448; WAN024CS2; Start 61; Stop 85
gttatttcctacttgggagcgtcta

SEQ ID NO: 438843 - DNA, 25 bp, Artificial
  probe
  misc_feature (1)..(25): SEQ ID NO: 6448; WAN024CS2; Start 1; Stop 25
atgaagattaagaagagttccaatc

SEQ ID NO: 438844 - DNA, 25 bp, Artificial
  probe
  misc_feature (1)..(25): SEQ ID NO: 6448; WAN024CS2; Start 13; Stop 37
aagagttccaatccagaagccattg

SEQ ID NO: 438845 - DNA, 25 bp, Artificial
  probe
  misc_feature (1)..(25): SEQ ID NO: 6448; WAN024CS2; Start 60; Stop 84
agttatttcctacttgggagcgtct

SEQ ID NO: 438846 - DNA, 25 bp, Artificial
  probe
  misc_feature (1)..(25): SEQ ID NO: 6448; WAN024CS2; Start 15; Stop 39
gagttccaatccagaagccattgtg

SEQ ID NO: 438847 - DNA, 25 bp, Artificial
  probe
  misc_feature (1)..(25): SEQ ID NO: 6448; WAN024CS2; Start 14; Stop 38
agagttccaatccagaagccattgt

SEQ ID NO: 438848 - DNA, 25 bp, Artificial
  probe
  misc_feature (1)..(25): SEQ ID NO: 6448; WAN024CS2; Start 59; Stop 83
aagttatttcctacttgggagcgtc

SEQ ID NO: 438849 - DNA, 25 bp, Artificial
  probe
  misc_feature (1)..(25): SEQ ID NO: 6448; WAN024CS2; Start 33; Stop 57
cattgtgacgggtcgtgattatttc

SEQ ID NO: 438850 - DNA, 25 bp, Artificial
  probe
  misc_feature (1)..(25): SEQ ID NO: 6448; WAN024CS2; Start 17; Stop 41
gttccaatccagaagccattgtgac

SEQ ID NO: 438851 - DNA, 25 bp, Artificial
  probe
  misc_feature (1)..(25): SEQ ID NO: 6448; WAN024CS2; Start 16; Stop 40
agttccaatccagaagccattgtga

SEQ ID NO: 438852 - DNA, 25 bp, Artificial
  probe
  misc_feature (1)..(25): SEQ ID NO: 6448; WAN024CS2; Start 39; Stop 63
gacgggtcgtgattatttccaagtt

SEQ ID NO: 438853 - DNA, 25 bp, Artificial
  probe
  misc_feature (1)..(25): SEQ ID NO: 6448; WAN024CS2; Start 34; Stop 58
attgtgacgggtcgtgattatttcc

SEQ ID NO: 438854 - DNA, 25 bp, Artificial
  probe
  misc_feature (1)..(25): SEQ ID NO: 6448; WAN024CS2; Start 32; Stop 56
ccattgtgacgggtcgtgattattt

SEQ ID NO: 438855 - DNA, 25 bp, Artificial
  probe
  misc_feature (1)..(25): SEQ ID NO: 6448; WAN024CS2; Start 37; Stop 61
gtgacgggtcgtgattatttccaag

SEQ ID NO: 438856 - DNA, 25 bp, Artificial
  probe
  misc_feature (1)..(25): SEQ ID NO: 6448; WAN024CS2; Start 38; Stop 62
tgacgggtcgtgattatttccaagt

SEQ ID NO: 438857 - DNA, 25 bp, Artificial
  probe
  misc_feature (1)..(25): SEQ ID NO: 6448; WAN024CS2; Start 36; Stop 60
tgtgacgggtcgtgattatttccaa

SEQ ID NO: 438858 - DNA, 25 bp, Artificial
  probe
  misc_feature (1)..(25): SEQ ID NO: 6448; WAN024CS2; Start 35; Stop 59
ttgtgacgggtcgtgattatttcca

SEQ ID NO: 438859 - DNA, 25 bp, Artificial
  probe
  misc_feature (1)..(25): SEQ ID NO: 6449; WAN024C6A; Start 7; Stop 31
cgcaactgttatgaatcttatgact

SEQ ID NO: 438860 - DNA, 25 bp, Artificial
  probe
  misc_feature (1)..(25): SEQ ID NO: 6449; WAN024C6A; Start 18; Stop 42
tgaatcttatgactatgttgatccg

SEQ ID NO: 438861 - DNA, 25 bp, Artificial
  probe
  misc_feature (1)..(25): SEQ ID NO: 6449; WAN024C6A; Start 8; Stop 32
gcaactgttatgaatcttatgacta

SEQ ID NO: 438862 - DNA, 25 bp, Artificial
  probe
  misc_feature (1)..(25): SEQ ID NO: 6449; WAN024C6A; Start 72; Stop 96
agttctaagaaataagcaggaagga

SEQ ID NO: 438863 - DNA, 25 bp, Artificial
  probe
  misc_feature (1)..(25): SEQ ID NO: 6449; WAN024C6A; Start 71; Stop 95
cagttctaagaaataagcaggaagg

SEQ ID NO: 438864 - DNA, 25 bp, Artificial
  probe
  misc_feature (1)..(25): SEQ ID NO: 6449; WAN024C6A; Start 73; Stop 97
gttctaagaaataagcaggaaggaa

SEQ ID NO: 438865 - DNA, 25 bp, Artificial
  probe
  misc_feature (1)..(25): SEQ ID NO: 6449; WAN024C6A; Start 70; Stop 94
tcagttctaagaaataagcaggaag

SEQ ID NO: 438866 - DNA, 25 bp, Artificial
  probe
  misc_feature (1)..(25): SEQ ID NO: 6449; WAN024C6A; Start 68; Stop 92
cttcagttctaagaaataagcagga

SEQ ID NO: 438867 - DNA, 25 bp, Artificial
  probe
  misc_feature (1)..(25): SEQ ID NO: 6449; WAN024C6A; Start 19; Stop 43
gaatcttatgactatgttgatccgg

SEQ ID NO: 438868 - DNA, 25 bp, Artificial
  probe
  misc_feature (1)..(25): SEQ ID NO: 6449; WAN024C6A; Start 74; Stop 98
ttctaagaaataagcaggaaggaaa

SEQ ID NO: 438869 - DNA, 25 bp, Artificial
  probe
  misc_feature (1)..(25): SEQ ID NO: 6449; WAN024C6A; Start 69; Stop 93
ttcagttctaagaaataagcaggaa

SEQ ID NO: 438870 - DNA, 25 bp, Artificial
  probe
  misc_feature (1)..(25): SEQ ID NO: 6449; WAN024C6A; Start 17; Stop 41
atgaatcttatgactatgttgatcc

SEQ ID NO: 438871 - DNA, 25 bp, Artificial
  probe
  misc_feature (1)..(25): SEQ ID NO: 6449; WAN024C6A; Start 4; Stop 28
aagcgcaactgttatgaatcttatg

SEQ ID NO: 438872 - DNA, 25 bp, Artificial
  probe
  misc_feature (1)..(25): SEQ ID NO: 6449; WAN024C6A; Start 3; Stop 27
gaagcgcaactgttatgaatcttat

SEQ ID NO: 438873 - DNA, 25 bp, Artificial
  probe
  misc_feature (1)..(25): SEQ ID NO: 6449; WAN024C6A; Start 6; Stop 30
gcgcaactgttatgaatcttatgac

SEQ ID NO: 438874 - DNA, 25 bp, Artificial
  probe
  misc_feature (1)..(25): SEQ ID NO: 6449; WAN024C6A; Start 5; Stop 29
agcgcaactgttatgaatcttatga

SEQ ID NO: 438875 - DNA, 25 bp, Artificial
  probe
  misc_feature (1)..(25): SEQ ID NO: 6449; WAN024C6A; Start 67; Stop 91
tcttcagttctaagaaataagcagg

SEQ ID NO: 438876 - DNA, 25 bp, Artificial
  probe
  misc_feature (1)..(25): SEQ ID NO: 6449; WAN024C6A; Start 2; Stop 26
tgaagcgcaactgttatgaatctta

SEQ ID NO: 438877 - DNA, 25 bp, Artificial
  probe
  misc_feature (1)..(25): SEQ ID NO: 6449; WAN024C6A; Start 11; Stop 35
actgttatgaatcttatgactatgt

SEQ ID NO: 438878 - DNA, 25 bp, Artificial
  probe
  misc_feature (1)..(25): SEQ ID NO: 6449; WAN024C6A; Start 1; Stop 25
atgaagcgcaactgttatgaatctt

SEQ ID NO: 438879 - DNA, 25 bp, Artificial
  probe
  misc_feature (1)..(25): SEQ ID NO: 6449; WAN024C6A; Start 75; Stop 99
tctaagaaataagcaggaaggaaaa

SEQ ID NO: 438880 - DNA, 25 bp, Artificial
  probe
  misc_feature (1)..(25): SEQ ID NO: 6449; WAN024C6A; Start 13; Stop 37
tgttatgaatcttatgactatgttg

SEQ ID NO: 438881 - DNA, 25 bp, Artificial
  probe
  misc_feature (1)..(25): SEQ ID NO: 6449; WAN024C6A; Start 47; Stop 71
atttatataccgatccgggttcttc

SEQ ID NO: 438882 - DNA, 25 bp, Artificial
  probe
  misc_feature (1)..(25): SEQ ID NO: 6449; WAN024C6A; Start 46; Stop 70
aatttatataccgatccgggttctt

SEQ ID NO: 438883 - DNA, 25 bp, Artificial
  probe
  misc_feature (1)..(25): SEQ ID NO: 6449; WAN024C6A; Start 42; Stop 66
ggataatttatataccgatccgggt

SEQ ID NO: 438884 - DNA, 25 bp, Artificial
  probe
  misc_feature (1)..(25): SEQ ID NO: 6449; WAN024C6A; Start 48; Stop 72
tttatataccgatccgggttcttca

SEQ ID NO: 438885 - DNA, 25 bp, Artificial
  probe
  misc_feature (1)..(25): SEQ ID NO: 6449; WAN024C6A; Start 45; Stop 69
taatttatataccgatccgggttct

SEQ ID NO: 438886 - DNA, 25 bp, Artificial
  probe
  misc_feature (1)..(25): SEQ ID NO: 6449; WAN024C6A; Start 62; Stop 86
cgggttcttcagttctaagaaataa

SEQ ID NO: 438887 - DNA, 25 bp, Artificial
  probe
  misc_feature (1)..(25): SEQ ID NO: 6449; WAN024C6A; Start 49; Stop 73
ttatataccgatccgggttcttcag

SEQ ID NO: 438888 - DNA, 25 bp, Artificial
  probe
  misc_feature (1)..(25): SEQ ID NO: 6449; WAN024C6A; Start 44; Stop 68
ataatttatataccgatccgggttc

SEQ ID NO: 438889 - DNA, 25 bp, Artificial
  probe
  misc_feature (1)..(25): SEQ ID NO: 6449; WAN024C6A; Start 43; Stop 67
gataatttatataccgatccgggtt

SEQ ID NO: 438890 - DNA, 25 bp, Artificial
  probe
  misc_feature (1)..(25): SEQ ID NO: 6449; WAN024C6A; Start 64; Stop 88
ggttcttcagttctaagaaataagc

SEQ ID NO: 438891 - DNA, 25 bp, Artificial
  probe
  misc_feature (1)..(25): SEQ ID NO: 6449; WAN024C6A; Start 50; Stop 74
tatataccgatccgggttcttcagt

SEQ ID NO: 438892 - DNA, 25 bp, Artificial
  probe
  misc_feature (1)..(25): SEQ ID NO: 6450; WAN024AYV; Start 34; Stop 58
attgaaaggggcaaaagtagtatct

SEQ ID NO: 438893 - DNA, 25 bp, Artificial
  probe
  misc_feature (1)..(25): SEQ ID NO: 6450; WAN024AYV; Start 35; Stop 59
ttgaaaggggcaaaagtagtatctt

SEQ ID NO: 438894 - DNA, 25 bp, Artificial
  probe
  misc_feature (1)..(25): SEQ ID NO: 6450; WAN024AYV; Start 31; Stop 55
agaattgaaaggggcaaaagtagta

SEQ ID NO: 438895 - DNA, 25 bp, Artificial
  probe
  misc_feature (1)..(25): SEQ ID NO: 6450; WAN024AYV; Start 33; Stop 57
aattgaaaggggcaaaagtagtatc

SEQ ID NO: 438896 - DNA, 25 bp, Artificial
  probe
  misc_feature (1)..(25): SEQ ID NO: 6450; WAN024AYV; Start 32; Stop 56
gaattgaaaggggcaaaagtagtat

SEQ ID NO: 438897 - DNA, 25 bp, Artificial
  probe
  misc_feature (1)..(25): SEQ ID NO: 6450; WAN024AYV; Start 26; Stop 50
aaaagagaattgaaaggggcaaaag

SEQ ID NO: 438898 - DNA, 25 bp, Artificial
  probe
  misc_feature (1)..(25): SEQ ID NO: 6450; WAN024AYV; Start 28; Stop 52
aagagaattgaaaggggcaaaagta

SEQ ID NO: 438899 - DNA, 25 bp, Artificial
  probe
  misc_feature (1)..(25): SEQ ID NO: 6450; WAN024AYV; Start 29; Stop 53
agagaattgaaaggggcaaaagtag

SEQ ID NO: 438900 - DNA, 25 bp, Artificial
  probe
  misc_feature (1)..(25): SEQ ID NO: 6450; WAN024AYV; Start 30; Stop 54
gagaattgaaaggggcaaaagtagt

SEQ ID NO: 438901 - DNA, 25 bp, Artificial
  probe
  misc_feature (1)..(25): SEQ ID NO: 6450; WAN024AYV; Start 27; Stop 51
aaagagaattgaaaggggcaaaagt

SEQ ID NO: 438902 - DNA, 25 bp, Artificial
  probe
  misc_feature (1)..(25): SEQ ID NO: 6450; WAN024AYV; Start 36; Stop 60
tgaaaggggcaaaagtagtatcttt

SEQ ID NO: 438903 - DNA, 25 bp, Artificial
  probe
  misc_feature (1)..(25): SEQ ID NO: 6450; WAN024AYV; Start 71; Stop 95
tgggagtagaagcttatgatataga

SEQ ID NO: 438904 - DNA, 25 bp, Artificial
  probe
  misc_feature (1)..(25): SEQ ID NO: 6450; WAN024AYV; Start 70; Stop 94
ttgggagtagaagcttatgatatag

SEQ ID NO: 438905 - DNA, 25 bp, Artificial
  probe
  misc_feature (1)..(25): SEQ ID NO: 6450; WAN024AYV; Start 72; Stop 96
gggagtagaagcttatgatatagaa

SEQ ID NO: 438906 - DNA, 25 bp, Artificial
  probe
  misc_feature (1)..(25): SEQ ID NO: 6450; WAN024AYV; Start 69; Stop 93
tttgggagtagaagcttatgatata

SEQ ID NO: 438907 - DNA, 25 bp, Artificial
  probe
  misc_feature (1)..(25): SEQ ID NO: 6450; WAN024AYV; Start 68; Stop 92
ttttgggagtagaagcttatgatat

SEQ ID NO: 438908 - DNA, 25 bp, Artificial
  probe
  misc_feature (1)..(25): SEQ ID NO: 6450; WAN024AYV; Start 37; Stop 61
gaaaggggcaaaagtagtatctttt

SEQ ID NO: 438909 - DNA, 25 bp, Artificial
  probe
  misc_feature (1)..(25): SEQ ID NO: 6450; WAN024AYV; Start 41; Stop 65
ggggcaaaagtagtatcttttatct

SEQ ID NO: 438910 - DNA, 25 bp, Artificial
  probe
  misc_feature (1)..(25): SEQ ID NO: 6450; WAN024AYV; Start 40; Stop 64
aggggcaaaagtagtatcttttatc

SEQ ID NO: 438911 - DNA, 25 bp, Artificial
  probe
  misc_feature (1)..(25): SEQ ID NO: 6450; WAN024AYV; Start 73; Stop 97
ggagtagaagcttatgatatagaaa

SEQ ID NO: 438912 - DNA, 25 bp, Artificial
  probe
  misc_feature (1)..(25): SEQ ID NO: 6450; WAN024AYV; Start 38; Stop 62
aaaggggcaaaagtagtatctttta

SEQ ID NO: 438913 - DNA, 25 bp, Artificial
  probe
  misc_feature (1)..(25): SEQ ID NO: 6450; WAN024AYV; Start 39; Stop 63
aaggggcaaaagtagtatcttttat

SEQ ID NO: 438914 - DNA, 25 bp, Artificial
  probe
  misc_feature (1)..(25): SEQ ID NO: 6450; WAN024AYV; Start 42; Stop 66
gggcaaaagtagtatcttttatcta

SEQ ID NO: 438915 - DNA, 25 bp, Artificial
  probe
  misc_feature (1)..(25): SEQ ID NO: 6451; WAN024BPQ; Start 27; Stop 51
acaacaattaccggataaactattt

SEQ ID NO: 438916 - DNA, 25 bp, Artificial
  probe
  misc_feature (1)..(25): SEQ ID NO: 6451; WAN024BPQ; Start 20; Stop 44
agttgatacaacaattaccggataa

SEQ ID NO: 438917 - DNA, 25 bp, Artificial
  probe
  misc_feature (1)..(25): SEQ ID NO: 6451; WAN024BPQ; Start 19; Stop 43
aagttgatacaacaattaccggata

SEQ ID NO: 438918 - DNA, 25 bp, Artificial
  probe
  misc_feature (1)..(25): SEQ ID NO: 6451; WAN024BPQ; Start 24; Stop 48
gatacaacaattaccggataaacta

SEQ ID NO: 438919 - DNA, 25 bp, Artificial
  probe
  misc_feature (1)..(25): SEQ ID NO: 6451; WAN024BPQ; Start 28; Stop 52
caacaattaccggataaactatttc

SEQ ID NO: 438920 - DNA, 25 bp, Artificial
  probe
  misc_feature (1)..(25): SEQ ID NO: 6451; WAN024BPQ; Start 29; Stop 53
aacaattaccggataaactatttct

SEQ ID NO: 438921 - DNA, 25 bp, Artificial
  probe
  misc_feature (1)..(25): SEQ ID NO: 6451; WAN024BPQ; Start 26; Stop 50
tacaacaattaccggataaactatt

SEQ ID NO: 438922 - DNA, 25 bp, Artificial
  probe
  misc_feature (1)..(25): SEQ ID NO: 6451; WAN024BPQ; Start 36; Stop 60
accggataaactatttctacaaatt

SEQ ID NO: 438923 - DNA, 25 bp, Artificial
  probe
  misc_feature (1)..(25): SEQ ID NO: 6451; WAN024BPQ; Start 25; Stop 49
atacaacaattaccggataaactat

SEQ ID NO: 438924 - DNA, 25 bp, Artificial
  probe
  misc_feature (1)..(25): SEQ ID NO: 6451; WAN024BPQ; Start 18; Stop 42
aaagttgatacaacaattaccggat

SEQ ID NO: 438925 - DNA, 25 bp, Artificial
  probe
  misc_feature (1)..(25): SEQ ID NO: 6451; WAN024BPQ; Start 34; Stop 58
ttaccggataaactatttctacaaa

SEQ ID NO: 438926 - DNA, 25 bp, Artificial
  probe
  misc_feature (1)..(25): SEQ ID NO: 6451; WAN024BPQ; Start 33; Stop 57
attaccggataaactatttctacaa

SEQ ID NO: 438927 - DNA, 25 bp, Artificial
  probe
  misc_feature (1)..(25): SEQ ID NO: 6451; WAN024BPQ; Start 32; Stop 56
aattaccggataaactatttctaca

SEQ ID NO: 438928 - DNA, 25 bp, Artificial
  probe
  misc_feature (1)..(25): SEQ ID NO: 6451; WAN024BPQ; Start 30; Stop 54
acaattaccggataaactatttcta

SEQ ID NO: 438929 - DNA, 25 bp, Artificial
  probe
  misc_feature (1)..(25): SEQ ID NO: 6451; WAN024BPQ; Start 31; Stop 55
caattaccggataaactatttctac

SEQ ID NO: 438930 - DNA, 25 bp, Artificial
  probe
  misc_feature (1)..(25): SEQ ID NO: 6451; WAN024BPQ; Start 21; Stop 45
gttgatacaacaattaccggataaa

SEQ ID NO: 438931 - DNA, 25 bp, Artificial
  probe
  misc_feature (1)..(25): SEQ ID NO: 6451; WAN024BPQ; Start 35; Stop 59
taccggataaactatttctacaaat

SEQ ID NO: 438932 - DNA, 25 bp, Artificial
  probe
  misc_feature (1)..(25): SEQ ID NO: 6451; WAN024BPQ; Start 17; Stop 41
aaaagttgatacaacaattaccgga

SEQ ID NO: 438933 - DNA, 25 bp, Artificial
  probe
  misc_feature (1)..(25): SEQ ID NO: 6451; WAN024BPQ; Start 37; Stop 61
ccggataaactatttctacaaatta

SEQ ID NO: 438934 - DNA, 25 bp, Artificial
  probe
  misc_feature (1)..(25): SEQ ID NO: 6452; WAN024BWZ; Start 862; Stop 886
atcatcgcttatcgtcatatcttcc

SEQ ID NO: 438935 - DNA, 25 bp, Artificial
  probe
  misc_feature (1)..(25): SEQ ID NO: 6452; WAN024BWZ; Start 859; Stop 883
ggaatcatcgcttatcgtcatatct

SEQ ID NO: 438936 - DNA, 25 bp, Artificial
  probe
  misc_feature (1)..(25): SEQ ID NO: 6452; WAN024BWZ; Start 858; Stop 882
aggaatcatcgcttatcgtcatatc

SEQ ID NO: 438937 - DNA, 25 bp, Artificial
  probe
  misc_feature (1)..(25): SEQ ID NO: 6452; WAN024BWZ; Start 857; Stop 881
aaggaatcatcgcttatcgtcatat

SEQ ID NO: 438938 - DNA, 25 bp, Artificial
  probe
  misc_feature (1)..(25): SEQ ID NO: 6452; WAN024BWZ; Start 861; Stop 885
aatcatcgcttatcgtcatatcttc

SEQ ID NO: 438939 - DNA, 25 bp, Artificial
  probe
  misc_feature (1)..(25): SEQ ID NO: 6452; WAN024BWZ; Start 860; Stop 884
gaatcatcgcttatcgtcatatctt

SEQ ID NO: 438940 - DNA, 25 bp, Artificial
  probe
  misc_feature (1)..(25): SEQ ID NO: 6452; WAN024BWZ; Start 466; Stop 490
gtctatgctgttcgtcaatcttctt

SEQ ID NO: 438941 - DNA, 25 bp, Artificial
  probe
  misc_feature (1)..(25): SEQ ID NO: 6452; WAN024BWZ; Start 896; Stop 920
tagaattgatggaacaaggctactt

SEQ ID NO: 438942 - DNA, 25 bp, Artificial
  probe
  misc_feature (1)..(25): SEQ ID NO: 6452; WAN024BWZ; Start 895; Stop 919
ttagaattgatggaacaaggctact

SEQ ID NO: 438943 - DNA, 25 bp, Artificial
  probe
  misc_feature (1)..(25): SEQ ID NO: 6452; WAN024BWZ; Start 582; Stop 606
ttatgctgttgaactatcacctgaa

SEQ ID NO: 438944 - DNA, 25 bp, Artificial
  probe
  misc_feature (1)..(25): SEQ ID NO: 6452; WAN024BWZ; Start 894; Stop 918
attagaattgatggaacaaggctac

SEQ ID NO: 438945 - DNA, 25 bp, Artificial
  probe
  misc_feature (1)..(25): SEQ ID NO: 6452; WAN024BWZ; Start 892; Stop 916
gtattagaattgatggaacaaggct

SEQ ID NO: 438946 - DNA, 25 bp, Artificial
  probe
  misc_feature (1)..(25): SEQ ID NO: 6452; WAN024BWZ; Start 891; Stop 915
agtattagaattgatggaacaaggc

SEQ ID NO: 438947 - DNA, 25 bp, Artificial
  probe
  misc_feature (1)..(25): SEQ ID NO: 6452; WAN024BWZ; Start 583; Stop 607
tatgctgttgaactatcacctgaac

SEQ ID NO: 438948 - DNA, 25 bp, Artificial
  probe
  misc_feature (1)..(25): SEQ ID NO: 6452; WAN024BWZ; Start 899; Stop 923
aattgatggaacaaggctacttctc

SEQ ID NO: 438949 - DNA, 25 bp, Artificial
  probe
  misc_feature (1)..(25): SEQ ID NO: 6452; WAN024BWZ; Start 898; Stop 922
gaattgatggaacaaggctacttct

SEQ ID NO: 438950 - DNA, 25 bp, Artificial
  probe
  misc_feature (1)..(25): SEQ ID NO: 6452; WAN024BWZ; Start 897; Stop 921
agaattgatggaacaaggctacttc

SEQ ID NO: 438951 - DNA, 25 bp, Artificial
  probe
  misc_feature (1)..(25): SEQ ID NO: 6452; WAN024BWZ; Start 465; Stop 489
agtctatgctgttcgtcaatcttct

SEQ ID NO: 438952 - DNA, 25 bp, Artificial
  probe
  misc_feature (1)..(25): SEQ ID NO: 6452; WAN024BWZ; Start 900; Stop 924
attgatggaacaaggctacttctct

SEQ ID NO: 438953 - DNA, 25 bp, Artificial
  probe
  misc_feature (1)..(25): SEQ ID NO: 6452; WAN024BWZ; Start 893; Stop 917
tattagaattgatggaacaaggcta

SEQ ID NO: 438954 - DNA, 25 bp, Artificial
  probe
  misc_feature (1)..(25): SEQ ID NO: 6452; WAN024BWZ; Start 539; Stop 563
tattaattgtagaagctcttcgtgc

SEQ ID NO: 438955 - DNA, 25 bp, Artificial
  probe
  misc_feature (1)..(25): SEQ ID NO: 6452; WAN024BWZ; Start 464; Stop 488
cagtctatgctgttcgtcaatcttc

SEQ ID NO: 438956 - DNA, 25 bp, Artificial
  probe
  misc_feature (1)..(25): SEQ ID NO: 6452; WAN024BWZ; Start 901; Stop 925
ttgatggaacaaggctacttctctg

SEQ ID NO: 438957 - DNA, 25 bp, Artificial
  probe
  misc_feature (1)..(25): SEQ ID NO: 6452; WAN024BWZ; Start 867; Stop 891
cgcttatcgtcatatcttccctaaa

SEQ ID NO: 438958 - DNA, 25 bp, Artificial
  probe
  misc_feature (1)..(25): SEQ ID NO: 6452; WAN024BWZ; Start 467; Stop 491
tctatgctgttcgtcaatcttcttt

SEQ ID NO: 438959 - DNA, 25 bp, Artificial
  probe
  misc_feature (1)..(25): SEQ ID NO: 6452; WAN024BWZ; Start 569; Stop 593
gtgcttctaagatttatgctgttga

SEQ ID NO: 438960 - DNA, 25 bp, Artificial
  probe
  misc_feature (1)..(25): SEQ ID NO: 6452; WAN024BWZ; Start 568; Stop 592
ggtgcttctaagatttatgctgttg

SEQ ID NO: 438961 - DNA, 25 bp, Artificial
  probe
  misc_feature (1)..(25): SEQ ID NO: 6452; WAN024BWZ; Start 865; Stop 889
atcgcttatcgtcatatcttcccta

SEQ ID NO: 438962 - DNA, 25 bp, Artificial
  probe
  misc_feature (1)..(25): SEQ ID NO: 6452; WAN024BWZ; Start 567; Stop 591
tggtgcttctaagatttatgctgtt

SEQ ID NO: 438963 - DNA, 25 bp, Artificial
  probe
  misc_feature (1)..(25): SEQ ID NO: 6452; WAN024BWZ; Start 856; Stop 880
aaaggaatcatcgcttatcgtcata

SEQ ID NO: 438964 - DNA, 25 bp, Artificial
  probe
  misc_feature (1)..(25): SEQ ID NO: 6452; WAN024BWZ; Start 866; Stop 890
tcgcttatcgtcatatcttccctaa

SEQ ID NO: 438965 - DNA, 25 bp, Artificial
  probe
  misc_feature (1)..(25): SEQ ID NO: 6452; WAN024BWZ; Start 706; Stop 730
gatgtttcttatgaagtaacgggtg

SEQ ID NO: 438966 - DNA, 25 bp, Artificial
  probe
  misc_feature (1)..(25): SEQ ID NO: 6452; WAN024BWZ; Start 705; Stop 729
agatgtttcttatgaagtaacgggt

SEQ ID NO: 438967 - DNA, 25 bp, Artificial
  probe
  misc_feature (1)..(25): SEQ ID NO: 6453; WAN024BRN; Start 51; Stop 75
ttatctatccataagtatctccgat

SEQ ID NO: 438968 - DNA, 25 bp, Artificial
  probe
  misc_feature (1)..(25): SEQ ID NO: 6453; WAN024BRN; Start 24; Stop 48
tctcttcgcttttcaaacctatctt

SEQ ID NO: 438969 - DNA, 25 bp, Artificial
  probe
  misc_feature (1)..(25): SEQ ID NO: 6453; WAN024BRN; Start 23; Stop 47
ttctcttcgcttttcaaacctatct

SEQ ID NO: 438970 - DNA, 25 bp, Artificial
  probe
  misc_feature (1)..(25): SEQ ID NO: 6453; WAN024BRN; Start 22; Stop 46
attctcttcgcttttcaaacctatc

SEQ ID NO: 438971 - DNA, 25 bp, Artificial
  probe
  misc_feature (1)..(25): SEQ ID NO: 6453; WAN024BRN; Start 19; Stop 43
attattctcttcgcttttcaaacct

SEQ ID NO: 438972 - DNA, 25 bp, Artificial
  probe
  misc_feature (1)..(25): SEQ ID NO: 6453; WAN024BRN; Start 25; Stop 49
ctcttcgcttttcaaacctatctta

SEQ ID NO: 438973 - DNA, 25 bp, Artificial
  probe
  misc_feature (1)..(25): SEQ ID NO: 6453; WAN024BRN; Start 53; Stop 77
atctatccataagtatctccgataa

SEQ ID NO: 438974 - DNA, 25 bp, Artificial
  probe
  misc_feature (1)..(25): SEQ ID NO: 6453; WAN024BRN; Start 20; Stop 44
ttattctcttcgcttttcaaaccta

SEQ ID NO: 438975 - DNA, 25 bp, Artificial
  probe
  misc_feature (1)..(25): SEQ ID NO: 6453; WAN024BRN; Start 26; Stop 50
tcttcgcttttcaaacctatcttat

SEQ ID NO: 438976 - DNA, 25 bp, Artificial
  probe
  misc_feature (1)..(25): SEQ ID NO: 6453; WAN024BRN; Start 21; Stop 45
tattctcttcgcttttcaaacctat

SEQ ID NO: 438977 - DNA, 25 bp, Artificial
  probe
  misc_feature (1)..(25): SEQ ID NO: 6453; WAN024BRN; Start 27; Stop 51
cttcgcttttcaaacctatcttatt

SEQ ID NO: 438978 - DNA, 25 bp, Artificial
  probe
  misc_feature (1)..(25): SEQ ID NO: 6453; WAN024BRN; Start 18; Stop 42
tattattctcttcgcttttcaaacc

SEQ ID NO: 438979 - DNA, 25 bp, Artificial
  probe
  misc_feature (1)..(25): SEQ ID NO: 6453; WAN024BRN; Start 50; Stop 74
tttatctatccataagtatctccga

SEQ ID NO: 438980 - DNA, 25 bp, Artificial
  probe
  misc_feature (1)..(25): SEQ ID NO: 6453; WAN024BRN; Start 28; Stop 52
ttcgcttttcaaacctatcttattt

SEQ ID NO: 438981 - DNA, 25 bp, Artificial
  probe
  misc_feature (1)..(25): SEQ ID NO: 6453; WAN024BRN; Start 186; Stop 210
tatattaaacttgttccgtaactga

SEQ ID NO: 438982 - DNA, 25 bp, Artificial
  probe
  misc_feature (1)..(25): SEQ ID NO: 6453; WAN024BRN; Start 54; Stop 78
tctatccataagtatctccgataaa

SEQ ID NO: 438983 - DNA, 25 bp, Artificial
  probe
  misc_feature (1)..(25): SEQ ID NO: 6453; WAN024BRN; Start 52; Stop 76
tatctatccataagtatctccgata

SEQ ID NO: 438984 - DNA, 25 bp, Artificial
  probe
  misc_feature (1)..(25): SEQ ID NO: 6453; WAN024BRN; Start 29; Stop 53
tcgcttttcaaacctatcttattta

SEQ ID NO: 438985 - DNA, 25 bp, Artificial
  probe
  misc_feature (1)..(25): SEQ ID NO: 6453; WAN024BRN; Start 14; Stop 38
tctttattattctcttcgcttttca

SEQ ID NO: 438986 - DNA, 25 bp, Artificial
  probe
  misc_feature (1)..(25): SEQ ID NO: 6453; WAN024BRN; Start 185; Stop 209
ttatattaaacttgttccgtaactg

SEQ ID NO: 438987 - DNA, 25 bp, Artificial
  probe
  misc_feature (1)..(25): SEQ ID NO: 6453; WAN024BRN; Start 49; Stop 73
atttatctatccataagtatctccg

SEQ ID NO: 438988 - DNA, 25 bp, Artificial
  probe
  misc_feature (1)..(25): SEQ ID NO: 6453; WAN024BRN; Start 17; Stop 41
ttattattctcttcgcttttcaaac

SEQ ID NO: 438989 - DNA, 25 bp, Artificial
  probe
  misc_feature (1)..(25): SEQ ID NO: 6453; WAN024BRN; Start 15; Stop 39
ctttattattctcttcgcttttcaa

SEQ ID NO: 438990 - DNA, 25 bp, Artificial
  probe
  misc_feature (1)..(25): SEQ ID NO: 6453; WAN024BRN; Start 30; Stop 54
cgcttttcaaacctatcttatttat

SEQ ID NO: 438991 - DNA, 25 bp, Artificial
  probe
  misc_feature (1)..(25): SEQ ID NO: 6453; WAN024BRN; Start 13; Stop 37
ttctttattattctcttcgcttttc

SEQ ID NO: 438992 - DNA, 25 bp, Artificial
  probe
  misc_feature (1)..(25): SEQ ID NO: 6453; WAN024BRN; Start 16; Stop 40
tttattattctcttcgcttttcaaa

SEQ ID NO: 438993 - DNA, 25 bp, Artificial
  probe
  misc_feature (1)..(25): SEQ ID NO: 6453; WAN024BRN; Start 100; Stop 124
acatcattgaattgttttgtcatat

SEQ ID NO: 438994 - DNA, 25 bp, Artificial
  probe
  misc_feature (1)..(25): SEQ ID NO: 6453; WAN024BRN; Start 12; Stop 36
attctttattattctcttcgctttt

SEQ ID NO: 438995 - DNA, 25 bp, Artificial
  probe
  misc_feature (1)..(25): SEQ ID NO: 6453; WAN024BRN; Start 55; Stop 79
ctatccataagtatctccgataaaa

SEQ ID NO: 438996 - DNA, 25 bp, Artificial
  probe
  misc_feature (1)..(25): SEQ ID NO: 6453; WAN024BRN; Start 101; Stop 125
catcattgaattgttttgtcatatt

SEQ ID NO: 438997 - DNA, 25 bp, Artificial
  probe
  misc_feature (1)..(25): SEQ ID NO: 6453; WAN024BRN; Start 81; Stop 105
acaaaagactattgaattaacatca

SEQ ID NO: 438998 - DNA, 25 bp, Artificial
  probe
  misc_feature (1)..(25): SEQ ID NO: 6453; WAN024BRN; Start 97; Stop 121
ttaacatcattgaattgttttgtca

SEQ ID NO: 438999 - DNA, 25 bp, Artificial
  probe
  misc_feature (1)..(25): SEQ ID NO: 6453; WAN024BRN; Start 99; Stop 123
aacatcattgaattgttttgtcata

SEQ ID NO: 439000 - DNA, 25 bp, Artificial
  probe
  misc_feature (1)..(25): SEQ ID NO: 6454; WAN024FY9; Start 1309; Stop 1333
aatgttgttgtatgtgctattgtgg

SEQ ID NO: 439001 - DNA, 25 bp, Artificial
  probe
  misc_feature (1)..(25): SEQ ID NO: 6454; WAN024FY9; Start 1058; Stop 1082
caacaacggttccagcaattattag

SEQ ID NO: 439002 - DNA, 25 bp, Artificial
  probe
  misc_feature (1)..(25): SEQ ID NO: 6454; WAN024FY9; Start 1062; Stop 1086
aacggttccagcaattattagtgtt

SEQ ID NO: 439003 - DNA, 25 bp, Artificial
  probe
  misc_feature (1)..(25): SEQ ID NO: 6454; WAN024FY9; Start 1059; Stop 1083
aacaacggttccagcaattattagt

SEQ ID NO: 439004 - DNA, 25 bp, Artificial
  probe
  misc_feature (1)..(25): SEQ ID NO: 6454; WAN024FY9; Start 1057; Stop 1081
tcaacaacggttccagcaattatta

SEQ ID NO: 439005 - DNA, 25 bp, Artificial
  probe
  misc_feature (1)..(25): SEQ ID NO: 6454; WAN024FY9; Start 1308; Stop 1332
taatgttgttgtatgtgctattgtg

SEQ ID NO: 439006 - DNA, 25 bp, Artificial
  probe
  misc_feature (1)..(25): SEQ ID NO: 6454; WAN024FY9; Start 813; Stop 837
taagaagtctgtgaatcgcatgaat

SEQ ID NO: 439007 - DNA, 25 bp, Artificial
  probe
  misc_feature (1)..(25): SEQ ID NO: 6454; WAN024FY9; Start 812; Stop 836
ataagaagtctgtgaatcgcatgaa

SEQ ID NO: 439008 - DNA, 25 bp, Artificial
  probe
  misc_feature (1)..(25): SEQ ID NO: 6454; WAN024FY9; Start 1061; Stop 1085
caacggttccagcaattattagtgt

SEQ ID NO: 439009 - DNA, 25 bp, Artificial
  probe
  misc_feature (1)..(25): SEQ ID NO: 6454; WAN024FY9; Start 1060; Stop 1084
acaacggttccagcaattattagtg

SEQ ID NO: 439010 - DNA, 25 bp, Artificial
  probe
  misc_feature (1)..(25): SEQ ID NO: 6454; WAN024FY9; Start 811; Stop 835
gataagaagtctgtgaatcgcatga

SEQ ID NO: 439011 - DNA, 25 bp, Artificial
  probe
  misc_feature (1)..(25): SEQ ID NO: 6454; WAN024FY9; Start 523; Stop 547
ttaggacaattaagtatgtggctgc

SEQ ID NO: 439012 - DNA, 25 bp, Artificial
  probe
  misc_feature (1)..(25): SEQ ID NO: 6454; WAN024FY9; Start 819; Stop 843
gtctgtgaatcgcatgaatcaatta

SEQ ID NO: 439013 - DNA, 25 bp, Artificial
  probe
  misc_feature (1)..(25): SEQ ID NO: 6454; WAN024FY9; Start 1063; Stop 1087
acggttccagcaattattagtgttg

SEQ ID NO: 439014 - DNA, 25 bp, Artificial
  probe
  misc_feature (1)..(25): SEQ ID NO: 6454; WAN024FY9; Start 1056; Stop 1080
ttcaacaacggttccagcaattatt

SEQ ID NO: 439015 - DNA, 25 bp, Artificial
  probe
  misc_feature (1)..(25): SEQ ID NO: 6454; WAN024FY9; Start 822; Stop 846
tgtgaatcgcatgaatcaattatct

SEQ ID NO: 439016 - DNA, 25 bp, Artificial
  probe
  misc_feature (1)..(25): SEQ ID NO: 6454; WAN024FY9; Start 820; Stop 844
tctgtgaatcgcatgaatcaattat

SEQ ID NO: 439017 - DNA, 25 bp, Artificial
  probe
  misc_feature (1)..(25): SEQ ID NO: 6454; WAN024FY9; Start 821; Stop 845
ctgtgaatcgcatgaatcaattatc

SEQ ID NO: 439018 - DNA, 25 bp, Artificial
  probe
  misc_feature (1)..(25): SEQ ID NO: 6454; WAN024FY9; Start 814; Stop 838
aagaagtctgtgaatcgcatgaatc

SEQ ID NO: 439019 - DNA, 25 bp, Artificial
  probe
  misc_feature (1)..(25): SEQ ID NO: 6454; WAN024FY9; Start 1307; Stop 1331
ttaatgttgttgtatgtgctattgt

SEQ ID NO: 439020 - DNA, 25 bp, Artificial
  probe
  misc_feature (1)..(25): SEQ ID NO: 6454; WAN024FY9; Start 1305; Stop 1329
tgttaatgttgttgtatgtgctatt

SEQ ID NO: 439021 - DNA, 25 bp, Artificial
  probe
  misc_feature (1)..(25): SEQ ID NO: 6454; WAN024FY9; Start 1304; Stop 1328
ttgttaatgttgttgtatgtgctat

SEQ ID NO: 439022 - DNA, 25 bp, Artificial
  probe
  misc_feature (1)..(25): SEQ ID NO: 6454; WAN024FY9; Start 1303; Stop 1327
attgttaatgttgttgtatgtgcta

SEQ ID NO: 439023 - DNA, 25 bp, Artificial
  probe
  misc_feature (1)..(25): SEQ ID NO: 6454; WAN024FY9; Start 1302; Stop 1326
tattgttaatgttgttgtatgtgct

SEQ ID NO: 439024 - DNA, 25 bp, Artificial
  probe
  misc_feature (1)..(25): SEQ ID NO: 6454; WAN024FY9; Start 1066; Stop 1090
gttccagcaattattagtgttggtt

SEQ ID NO: 439025 - DNA, 25 bp, Artificial
  probe
  misc_feature (1)..(25): SEQ ID NO: 6454; WAN024FY9; Start 818; Stop 842
agtctgtgaatcgcatgaatcaatt

SEQ ID NO: 439026 - DNA, 25 bp, Artificial
  probe
  misc_feature (1)..(25): SEQ ID NO: 6454; WAN024FY9; Start 817; Stop 841
aagtctgtgaatcgcatgaatcaat

SEQ ID NO: 439027 - DNA, 25 bp, Artificial
  probe
  misc_feature (1)..(25): SEQ ID NO: 6454; WAN024FY9; Start 810; Stop 834
ggataagaagtctgtgaatcgcatg

SEQ ID NO: 439028 - DNA, 25 bp, Artificial
  probe
  misc_feature (1)..(25): SEQ ID NO: 6454; WAN024FY9; Start 1055; Stop 1079
cttcaacaacggttccagcaattat

SEQ ID NO: 439029 - DNA, 25 bp, Artificial
  probe
  misc_feature (1)..(25): SEQ ID NO: 6454; WAN024FY9; Start 1306; Stop 1330
gttaatgttgttgtatgtgctattg

SEQ ID NO: 439030 - DNA, 25 bp, Artificial
  probe
  misc_feature (1)..(25): SEQ ID NO: 6454; WAN024FY9; Start 1301; Stop 1325
ctattgttaatgttgttgtatgtgc

SEQ ID NO: 439031 - DNA, 25 bp, Artificial
  probe
  misc_feature (1)..(25): SEQ ID NO: 6454; WAN024FY9; Start 1240; Stop 1264
tcagcatcaattcttatgtatgttg

SEQ ID NO: 439032 - DNA, 25 bp, Artificial
  probe
  misc_feature (1)..(25): SEQ ID NO: 6454; WAN024FY9; Start 823; Stop 847
gtgaatcgcatgaatcaattatctt

SEQ ID NO: 439033 - DNA, 25 bp, Artificial
  probe
  misc_feature (1)..(25): SEQ ID NO: 6455; WAN024CG4; Start 164; Stop 188
aattggaggagttggaagatgatgg

SEQ ID NO: 439034 - DNA, 25 bp, Artificial
  probe
  misc_feature (1)..(25): SEQ ID NO: 6455; WAN024CG4; Start 162; Stop 186
gaaattggaggagttggaagatgat

SEQ ID NO: 439035 - DNA, 25 bp, Artificial
  probe
  misc_feature (1)..(25): SEQ ID NO: 6455; WAN024CG4; Start 163; Stop 187
aaattggaggagttggaagatgatg

SEQ ID NO: 439036 - DNA, 25 bp, Artificial
  probe
  misc_feature (1)..(25): SEQ ID NO: 6455; WAN024CG4; Start 165; Stop 189
attggaggagttggaagatgatgga

SEQ ID NO: 439037 - DNA, 25 bp, Artificial
  probe
  misc_feature (1)..(25): SEQ ID NO: 6455; WAN024CG4; Start 3; Stop 27
gaagtacgataaacaggctgagatt

SEQ ID NO: 439038 - DNA, 25 bp, Artificial
  probe
  misc_feature (1)..(25): SEQ ID NO: 6455; WAN024CG4; Start 166; Stop 190
ttggaggagttggaagatgatggaa

SEQ ID NO: 439039 - DNA, 25 bp, Artificial
  probe
  misc_feature (1)..(25): SEQ ID NO: 6455; WAN024CG4; Start 4; Stop 28
aagtacgataaacaggctgagattg

SEQ ID NO: 439040 - DNA, 25 bp, Artificial
  probe
  misc_feature (1)..(25): SEQ ID NO: 6455; WAN024CG4; Start 147; Stop 171
taaagaattgagacggaaattggag

SEQ ID NO: 439041 - DNA, 25 bp, Artificial
  probe
  misc_feature (1)..(25): SEQ ID NO: 6455; WAN024CG4; Start 168; Stop 192
ggaggagttggaagatgatggaaga

SEQ ID NO: 439042 - DNA, 25 bp, Artificial
  probe
  misc_feature (1)..(25): SEQ ID NO: 6455; WAN024CG4; Start 6; Stop 30
gtacgataaacaggctgagattgac

SEQ ID NO: 439043 - DNA, 25 bp, Artificial
  probe
  misc_feature (1)..(25): SEQ ID NO: 6455; WAN024CG4; Start 5; Stop 29
agtacgataaacaggctgagattga

SEQ ID NO: 439044 - DNA, 25 bp, Artificial
  probe
  misc_feature (1)..(25): SEQ ID NO: 6455; WAN024CG4; Start 2; Stop 26
tgaagtacgataaacaggctgagat

SEQ ID NO: 439045 - DNA, 25 bp, Artificial
  probe
  misc_feature (1)..(25): SEQ ID NO: 6455; WAN024CG4; Start 1; Stop 25
atgaagtacgataaacaggctgaga

SEQ ID NO: 439046 - DNA, 25 bp, Artificial
  probe
  misc_feature (1)..(25): SEQ ID NO: 6455; WAN024CG4; Start 146; Stop 170
ataaagaattgagacggaaattgga

SEQ ID NO: 439047 - DNA, 25 bp, Artificial
  probe
  misc_feature (1)..(25): SEQ ID NO: 6455; WAN024CG4; Start 148; Stop 172
aaagaattgagacggaaattggagg

SEQ ID NO: 439048 - DNA, 25 bp, Artificial
  probe
  misc_feature (1)..(25): SEQ ID NO: 6455; WAN024CG4; Start 167; Stop 191
tggaggagttggaagatgatggaag

SEQ ID NO: 439049 - DNA, 25 bp, Artificial
  probe
  misc_feature (1)..(25): SEQ ID NO: 6455; WAN024CG4; Start 161; Stop 185
ggaaattggaggagttggaagatga

SEQ ID NO: 439050 - DNA, 25 bp, Artificial
  probe
  misc_feature (1)..(25): SEQ ID NO: 6455; WAN024CG4; Start 145; Stop 169
aataaagaattgagacggaaattgg

SEQ ID NO: 439051 - DNA, 25 bp, Artificial
  probe
  misc_feature (1)..(25): SEQ ID NO: 6455; WAN024CG4; Start 149; Stop 173
aagaattgagacggaaattggagga

SEQ ID NO: 439052 - DNA, 25 bp, Artificial
  probe
  misc_feature (1)..(25): SEQ ID NO: 6455; WAN024CG4; Start 7; Stop 31
tacgataaacaggctgagattgacg

SEQ ID NO: 439053 - DNA, 25 bp, Artificial
  probe
  misc_feature (1)..(25): SEQ ID NO: 6455; WAN024CG4; Start 141; Stop 165
aaagaataaagaattgagacggaaa

SEQ ID NO: 439054 - DNA, 25 bp, Artificial
  probe
  misc_feature (1)..(25): SEQ ID NO: 6455; WAN024CG4; Start 152; Stop 176
aattgagacggaaattggaggagtt

SEQ ID NO: 439055 - DNA, 25 bp, Artificial
  probe
  misc_feature (1)..(25): SEQ ID NO: 6455; WAN024CG4; Start 153; Stop 177
attgagacggaaattggaggagttg

SEQ ID NO: 439056 - DNA, 25 bp, Artificial
  probe
  misc_feature (1)..(25): SEQ ID NO: 6455; WAN024CG4; Start 150; Stop 174
agaattgagacggaaattggaggag

SEQ ID NO: 439057 - DNA, 25 bp, Artificial
  probe
  misc_feature (1)..(25): SEQ ID NO: 6455; WAN024CG4; Start 142; Stop 166
aagaataaagaattgagacggaaat

SEQ ID NO: 439058 - DNA, 25 bp, Artificial
  probe
  misc_feature (1)..(25): SEQ ID NO: 6455; WAN024CG4; Start 56; Stop 80
acgaagagaagataatcgagtattc

SEQ ID NO: 439059 - DNA, 25 bp, Artificial
  probe
  misc_feature (1)..(25): SEQ ID NO: 6455; WAN024CG4; Start 48; Stop 72
cgagcaaaacgaagagaagataatc

SEQ ID NO: 439060 - DNA, 25 bp, Artificial
  probe
  misc_feature (1)..(25): SEQ ID NO: 6455; WAN024CG4; Start 151; Stop 175
gaattgagacggaaattggaggagt

SEQ ID NO: 439061 - DNA, 25 bp, Artificial
  probe
  misc_feature (1)..(25): SEQ ID NO: 6455; WAN024CG4; Start 55; Stop 79
aacgaagagaagataatcgagtatt

SEQ ID NO: 439062 - DNA, 25 bp, Artificial
  probe
  misc_feature (1)..(25): SEQ ID NO: 6455; WAN024CG4; Start 144; Stop 168
gaataaagaattgagacggaaattg

SEQ ID NO: 439063 - DNA, 25 bp, Artificial
  probe
  misc_feature (1)..(25): SEQ ID NO: 6455; WAN024CG4; Start 10; Stop 34
gataaacaggctgagattgacggac

SEQ ID NO: 439064 - DNA, 25 bp, Artificial
  probe
  misc_feature (1)..(25): SEQ ID NO: 6455; WAN024CG4; Start 143; Stop 167
agaataaagaattgagacggaaatt

SEQ ID NO: 439065 - DNA, 25 bp, Artificial
  probe
  misc_feature (1)..(25): SEQ ID NO: 6455; WAN024CG4; Start 160; Stop 184
cggaaattggaggagttggaagatg

SEQ ID NO: 439066 - DNA, 25 bp, Artificial
  probe
  misc_feature (1)..(25): SEQ ID NO: 6456; WAN024BPS; Start 25; Stop 49
acaatgaatcaacaggataacagtc

SEQ ID NO: 439067 - DNA, 25 bp, Artificial
  probe
  misc_feature (1)..(25): SEQ ID NO: 6456; WAN024BPS; Start 26; Stop 50
caatgaatcaacaggataacagtct

SEQ ID NO: 439068 - DNA, 25 bp, Artificial
  probe
  misc_feature (1)..(25): SEQ ID NO: 6456; WAN024BPS; Start 24; Stop 48
aacaatgaatcaacaggataacagt

SEQ ID NO: 439069 - DNA, 25 bp, Artificial
  probe
  misc_feature (1)..(25): SEQ ID NO: 6456; WAN024BPS; Start 408; Stop 432
tgctagaattacagtcaggagagaa

SEQ ID NO: 439070 - DNA, 25 bp, Artificial
  probe
  misc_feature (1)..(25): SEQ ID NO: 6456; WAN024BPS; Start 23; Stop 47
caacaatgaatcaacaggataacag

SEQ ID NO: 439071 - DNA, 25 bp, Artificial
  probe
  misc_feature (1)..(25): SEQ ID NO: 6456; WAN024BPS; Start 407; Stop 431
gtgctagaattacagtcaggagaga

SEQ ID NO: 439072 - DNA, 25 bp, Artificial
  probe
  misc_feature (1)..(25): SEQ ID NO: 6456; WAN024BPS; Start 22; Stop 46
tcaacaatgaatcaacaggataaca

SEQ ID NO: 439073 - DNA, 25 bp, Artificial
  probe
  misc_feature (1)..(25): SEQ ID NO: 6456; WAN024BPS; Start 28; Stop 52
atgaatcaacaggataacagtctga

SEQ ID NO: 439074 - DNA, 25 bp, Artificial
  probe
  misc_feature (1)..(25): SEQ ID NO: 6456; WAN024BPS; Start 200; Stop 224
tgagatcggatgctgatattattca

SEQ ID NO: 439075 - DNA, 25 bp, Artificial
  probe
  misc_feature (1)..(25): SEQ ID NO: 6456; WAN024BPS; Start 34; Stop 58
caacaggataacagtctgatagaga

SEQ ID NO: 439076 - DNA, 25 bp, Artificial
  probe
  misc_feature (1)..(25): SEQ ID NO: 6456; WAN024BPS; Start 33; Stop 57
tcaacaggataacagtctgatagag

SEQ ID NO: 439077 - DNA, 25 bp, Artificial
  probe
  misc_feature (1)..(25): SEQ ID NO: 6456; WAN024BPS; Start 199; Stop 223
atgagatcggatgctgatattattc

SEQ ID NO: 439078 - DNA, 25 bp, Artificial
  probe
  misc_feature (1)..(25): SEQ ID NO: 6456; WAN024BPS; Start 27; Stop 51
aatgaatcaacaggataacagtctg

SEQ ID NO: 439079 - DNA, 25 bp, Artificial
  probe
  misc_feature (1)..(25): SEQ ID NO: 6456; WAN024BPS; Start 18; Stop 42
tgtatcaacaatgaatcaacaggat

SEQ ID NO: 439080 - DNA, 25 bp, Artificial
  probe
  misc_feature (1)..(25): SEQ ID NO: 6456; WAN024BPS; Start 198; Stop 222
catgagatcggatgctgatattatt

SEQ ID NO: 439081 - DNA, 25 bp, Artificial
  probe
  misc_feature (1)..(25): SEQ ID NO: 6456; WAN024BPS; Start 35; Stop 59
aacaggataacagtctgatagagaa

SEQ ID NO: 439082 - DNA, 25 bp, Artificial
  probe
  misc_feature (1)..(25): SEQ ID NO: 6456; WAN024BPS; Start 406; Stop 430
ggtgctagaattacagtcaggagag

SEQ ID NO: 439083 - DNA, 25 bp, Artificial
  probe
  misc_feature (1)..(25): SEQ ID NO: 6456; WAN024BPS; Start 201; Stop 225
gagatcggatgctgatattattcaa

SEQ ID NO: 439084 - DNA, 25 bp, Artificial
  probe
  misc_feature (1)..(25): SEQ ID NO: 6456; WAN024BPS; Start 21; Stop 45
atcaacaatgaatcaacaggataac

SEQ ID NO: 439085 - DNA, 25 bp, Artificial
  probe
  misc_feature (1)..(25): SEQ ID NO: 6456; WAN024BPS; Start 401; Stop 425
ttggtggtgctagaattacagtcag

SEQ ID NO: 439086 - DNA, 25 bp, Artificial
  probe
  misc_feature (1)..(25): SEQ ID NO: 6456; WAN024BPS; Start 512; Stop 536
ttattcaggactgtatcaaggcagg

SEQ ID NO: 439087 - DNA, 25 bp, Artificial
  probe
  misc_feature (1)..(25): SEQ ID NO: 6456; WAN024BPS; Start 404; Stop 428
gtggtgctagaattacagtcaggag

SEQ ID NO: 439088 - DNA, 25 bp, Artificial
  probe
  misc_feature (1)..(25): SEQ ID NO: 6456; WAN024BPS; Start 202; Stop 226
agatcggatgctgatattattcaat

SEQ ID NO: 439089 - DNA, 25 bp, Artificial
  probe
  misc_feature (1)..(25): SEQ ID NO: 6456; WAN024BPS; Start 381; Stop 405
taggtttgaaggtgttaagtttggt

SEQ ID NO: 439090 - DNA, 25 bp, Artificial
  probe
  misc_feature (1)..(25): SEQ ID NO: 6456; WAN024BPS; Start 380; Stop 404
ataggtttgaaggtgttaagtttgg

SEQ ID NO: 439091 - DNA, 25 bp, Artificial
  probe
  misc_feature (1)..(25): SEQ ID NO: 6456; WAN024BPS; Start 658; Stop 682
ccttctataagtgaggtaggagtat

SEQ ID NO: 439092 - DNA, 25 bp, Artificial
  probe
  misc_feature (1)..(25): SEQ ID NO: 6456; WAN024BPS; Start 525; Stop 549
tatcaaggcaggattacgggtatat

SEQ ID NO: 439093 - DNA, 25 bp, Artificial
  probe
  misc_feature (1)..(25): SEQ ID NO: 6456; WAN024BPS; Start 510; Stop 534
atttattcaggactgtatcaaggca

SEQ ID NO: 439094 - DNA, 25 bp, Artificial
  probe
  misc_feature (1)..(25): SEQ ID NO: 6456; WAN024BPS; Start 509; Stop 533
catttattcaggactgtatcaaggc

SEQ ID NO: 439095 - DNA, 25 bp, Artificial
  probe
  misc_feature (1)..(25): SEQ ID NO: 6456; WAN024BPS; Start 405; Stop 429
tggtgctagaattacagtcaggaga

SEQ ID NO: 439096 - DNA, 25 bp, Artificial
  probe
  misc_feature (1)..(25): SEQ ID NO: 6456; WAN024BPS; Start 161; Stop 185
atgaaagaggtattggtttaagtcg

SEQ ID NO: 439097 - DNA, 25 bp, Artificial
  probe
  misc_feature (1)..(25): SEQ ID NO: 6456; WAN024BPS; Start 409; Stop 433
gctagaattacagtcaggagagaaa

SEQ ID NO: 439098 - DNA, 25 bp, Artificial
  probe
  misc_feature (1)..(25): SEQ ID NO: 6456; WAN024BPS; Start 396; Stop 420
taagtttggtggtgctagaattaca

SEQ ID NO: 439099 - DNA, 25 bp, Artificial
  probe
  misc_feature (1)..(25): SEQ ID NO: 6457; WAN024BL3; Start 331; Stop 355
gaagatatggcagtcatccttgaag

SEQ ID NO: 439100 - DNA, 25 bp, Artificial
  probe
  misc_feature (1)..(25): SEQ ID NO: 6457; WAN024BL3; Start 344; Stop 368
tcatccttgaagactatcagaagat

SEQ ID NO: 439101 - DNA, 25 bp, Artificial
  probe
  misc_feature (1)..(25): SEQ ID NO: 6457; WAN024BL3; Start 343; Stop 367
gtcatccttgaagactatcagaaga

SEQ ID NO: 439102 - DNA, 25 bp, Artificial
  probe
  misc_feature (1)..(25): SEQ ID NO: 6457; WAN024BL3; Start 332; Stop 356
aagatatggcagtcatccttgaaga

SEQ ID NO: 439103 - DNA, 25 bp, Artificial
  probe
  misc_feature (1)..(25): SEQ ID NO: 6457; WAN024BL3; Start 392; Stop 416
aggcacatgaattatcagaatcaga

SEQ ID NO: 439104 - DNA, 25 bp, Artificial
  probe
  misc_feature (1)..(25): SEQ ID NO: 6457; WAN024BL3; Start 391; Stop 415
aaggcacatgaattatcagaatcag

SEQ ID NO: 439105 - DNA, 25 bp, Artificial
  probe
  misc_feature (1)..(25): SEQ ID NO: 6457; WAN024BL3; Start 393; Stop 417
ggcacatgaattatcagaatcagat

SEQ ID NO: 439106 - DNA, 25 bp, Artificial
  probe
  misc_feature (1)..(25): SEQ ID NO: 6457; WAN024BL3; Start 345; Stop 369
catccttgaagactatcagaagatt

SEQ ID NO: 439107 - DNA, 25 bp, Artificial
  probe
  misc_feature (1)..(25): SEQ ID NO: 6457; WAN024BL3; Start 1207; Stop 1231
ttatctgatacggatgaacttccag

SEQ ID NO: 439108 - DNA, 25 bp, Artificial
  probe
  misc_feature (1)..(25): SEQ ID NO: 6457; WAN024BL3; Start 1206; Stop 1230
attatctgatacggatgaacttcca

SEQ ID NO: 439109 - DNA, 25 bp, Artificial
  probe
  misc_feature (1)..(25): SEQ ID NO: 6457; WAN024BL3; Start 1205; Stop 1229
cattatctgatacggatgaacttcc

SEQ ID NO: 439110 - DNA, 25 bp, Artificial
  probe
  misc_feature (1)..(25): SEQ ID NO: 6457; WAN024BL3; Start 348; Stop 372
ccttgaagactatcagaagattaca

SEQ ID NO: 439111 - DNA, 25 bp, Artificial
  probe
  misc_feature (1)..(25): SEQ ID NO: 6457; WAN024BL3; Start 394; Stop 418
gcacatgaattatcagaatcagatg

SEQ ID NO: 439112 - DNA, 25 bp, Artificial
  probe
  misc_feature (1)..(25): SEQ ID NO: 6457; WAN024BL3; Start 347; Stop 371
tccttgaagactatcagaagattac

SEQ ID NO: 439113 - DNA, 25 bp, Artificial
  probe
  misc_feature (1)..(25): SEQ ID NO: 6457; WAN024BL3; Start 455; Stop 479
aaggaaaggatttaagacaacaacc

SEQ ID NO: 439114 - DNA, 25 bp, Artificial
  probe
  misc_feature (1)..(25): SEQ ID NO: 6457; WAN024BL3; Start 621; Stop 645
tgaggttattgcagagaagattctt

SEQ ID NO: 439115 - DNA, 25 bp, Artificial
  probe
  misc_feature (1)..(25): SEQ ID NO: 6457; WAN024BL3; Start 333; Stop 357
agatatggcagtcatccttgaagac

SEQ ID NO: 439116 - DNA, 25 bp, Artificial
  probe
  misc_feature (1)..(25): SEQ ID NO: 6457; WAN024BL3; Start 1189; Stop 1213
tttgttgggaaaggttcattatctg

SEQ ID NO: 439117 - DNA, 25 bp, Artificial
  probe
  misc_feature (1)..(25): SEQ ID NO: 6457; WAN024BL3; Start 879; Stop 903
aacagatagttgggaatcatcacat

SEQ ID NO: 439118 - DNA, 25 bp, Artificial
  probe
  misc_feature (1)..(25): SEQ ID NO: 6457; WAN024BL3; Start 317; Stop 341
atgaatggtttgaggaagatatggc

SEQ ID NO: 439119 - DNA, 25 bp, Artificial
  probe
  misc_feature (1)..(25): SEQ ID NO: 6457; WAN024BL3; Start 448; Stop 472
gcaggtaaaggaaaggatttaagac

SEQ ID NO: 439120 - DNA, 25 bp, Artificial
  probe
  misc_feature (1)..(25): SEQ ID NO: 6457; WAN024BL3; Start 395; Stop 419
cacatgaattatcagaatcagatgg

SEQ ID NO: 439121 - DNA, 25 bp, Artificial
  probe
  misc_feature (1)..(25): SEQ ID NO: 6457; WAN024BL3; Start 396; Stop 420
acatgaattatcagaatcagatgga

SEQ ID NO: 439122 - DNA, 25 bp, Artificial
  probe
  misc_feature (1)..(25): SEQ ID NO: 6457; WAN024BL3; Start 1191; Stop 1215
tgttgggaaaggttcattatctgat

SEQ ID NO: 439123 - DNA, 25 bp, Artificial
  probe
  misc_feature (1)..(25): SEQ ID NO: 6457; WAN024BL3; Start 447; Stop 471
ggcaggtaaaggaaaggatttaaga

SEQ ID NO: 439124 - DNA, 25 bp, Artificial
  probe
  misc_feature (1)..(25): SEQ ID NO: 6457; WAN024BL3; Start 1190; Stop 1214
ttgttgggaaaggttcattatctga

SEQ ID NO: 439125 - DNA, 25 bp, Artificial
  probe
  misc_feature (1)..(25): SEQ ID NO: 6457; WAN024BL3; Start 1188; Stop 1212
atttgttgggaaaggttcattatct

SEQ ID NO: 439126 - DNA, 25 bp, Artificial
  probe
  misc_feature (1)..(25): SEQ ID NO: 6457; WAN024BL3; Start 1196; Stop 1220
ggaaaggttcattatctgatacgga

SEQ ID NO: 439127 - DNA, 25 bp, Artificial
  probe
  misc_feature (1)..(25): SEQ ID NO: 6457; WAN024BL3; Start 1194; Stop 1218
tgggaaaggttcattatctgatacg

SEQ ID NO: 439128 - DNA, 25 bp, Artificial
  probe
  misc_feature (1)..(25): SEQ ID NO: 6457; WAN024BL3; Start 316; Stop 340
tatgaatggtttgaggaagatatgg

SEQ ID NO: 439129 - DNA, 25 bp, Artificial
  probe
  misc_feature (1)..(25): SEQ ID NO: 6457; WAN024BL3; Start 1036; Stop 1060
tggcaggaaactagacaaattattt

SEQ ID NO: 439130 - DNA, 25 bp, Artificial
  probe
  misc_feature (1)..(25): SEQ ID NO: 6457; WAN024BL3; Start 863; Stop 887
ttaaagaactagcagcaacagatag

SEQ ID NO: 439131 - DNA, 25 bp, Artificial
  probe
  misc_feature (1)..(25): SEQ ID NO: 6457; WAN024BL3; Start 1033; Stop 1057
gtatggcaggaaactagacaaatta

SEQ ID NO: 439132 - DNA, 25 bp, Artificial
  probe
  misc_feature (1)..(25): SEQ ID NO: 6458; WAN024ATI; Start 2130; Stop 2154
tgctaagtggctcaatatagacctt

SEQ ID NO: 439133 - DNA, 25 bp, Artificial
  probe
  misc_feature (1)..(25): SEQ ID NO: 6458; WAN024ATI; Start 2131; Stop 2155
gctaagtggctcaatatagaccttg

SEQ ID NO: 439134 - DNA, 25 bp, Artificial
  probe
  misc_feature (1)..(25): SEQ ID NO: 6458; WAN024ATI; Start 2129; Stop 2153
ttgctaagtggctcaatatagacct

SEQ ID NO: 439135 - DNA, 25 bp, Artificial
  probe
  misc_feature (1)..(25): SEQ ID NO: 6458; WAN024ATI; Start 2034; Stop 2058
caatcttacacctaaccagcaagtc

SEQ ID NO: 439136 - DNA, 25 bp, Artificial
  probe
  misc_feature (1)..(25): SEQ ID NO: 6458; WAN024ATI; Start 993; Stop 1017
taactatgagccaggttccactatg

SEQ ID NO: 439137 - DNA, 25 bp, Artificial
  probe
  misc_feature (1)..(25): SEQ ID NO: 6458; WAN024ATI; Start 992; Stop 1016
gtaactatgagccaggttccactat

SEQ ID NO: 439138 - DNA, 25 bp, Artificial
  probe
  misc_feature (1)..(25): SEQ ID NO: 6458; WAN024ATI; Start 1576; Stop 1600
actatgtataatcaccacacaggaa

SEQ ID NO: 439139 - DNA, 25 bp, Artificial
  probe
  misc_feature (1)..(25): SEQ ID NO: 6458; WAN024ATI; Start 1575; Stop 1599
aactatgtataatcaccacacagga

SEQ ID NO: 439140 - DNA, 25 bp, Artificial
  probe
  misc_feature (1)..(25): SEQ ID NO: 6458; WAN024ATI; Start 1574; Stop 1598
gaactatgtataatcaccacacagg

SEQ ID NO: 439141 - DNA, 25 bp, Artificial
  probe
  misc_feature (1)..(25): SEQ ID NO: 6458; WAN024ATI; Start 1573; Stop 1597
ggaactatgtataatcaccacacag

SEQ ID NO: 439142 - DNA, 25 bp, Artificial
  probe
  misc_feature (1)..(25): SEQ ID NO: 6458; WAN024ATI; Start 2051; Stop 2075
agcaagtcctgatcttatctgataa

SEQ ID NO: 439143 - DNA, 25 bp, Artificial
  probe
  misc_feature (1)..(25): SEQ ID NO: 6458; WAN024ATI; Start 2050; Stop 2074
cagcaagtcctgatcttatctgata

SEQ ID NO: 439144 - DNA, 25 bp, Artificial
  probe
  misc_feature (1)..(25): SEQ ID NO: 6458; WAN024ATI; Start 2045; Stop 2069
ctaaccagcaagtcctgatcttatc

SEQ ID NO: 439145 - DNA, 25 bp, Artificial
  probe
  misc_feature (1)..(25): SEQ ID NO: 6458; WAN024ATI; Start 2046; Stop 2070
taaccagcaagtcctgatcttatct

SEQ ID NO: 439146 - DNA, 25 bp, Artificial
  probe
  misc_feature (1)..(25): SEQ ID NO: 6458; WAN024ATI; Start 1572; Stop 1596
tggaactatgtataatcaccacaca

SEQ ID NO: 439147 - DNA, 25 bp, Artificial
  probe
  misc_feature (1)..(25): SEQ ID NO: 6458; WAN024ATI; Start 2035; Stop 2059
aatcttacacctaaccagcaagtcc

SEQ ID NO: 439148 - DNA, 25 bp, Artificial
  probe
  misc_feature (1)..(25): SEQ ID NO: 6458; WAN024ATI; Start 991; Stop 1015
agtaactatgagccaggttccacta

SEQ ID NO: 439149 - DNA, 25 bp, Artificial
  probe
  misc_feature (1)..(25): SEQ ID NO: 6458; WAN024ATI; Start 2033; Stop 2057
ccaatcttacacctaaccagcaagt

SEQ ID NO: 439150 - DNA, 25 bp, Artificial
  probe
  misc_feature (1)..(25): SEQ ID NO: 6458; WAN024ATI; Start 2044; Stop 2068
cctaaccagcaagtcctgatcttat

SEQ ID NO: 439151 - DNA, 25 bp, Artificial
  probe
  misc_feature (1)..(25): SEQ ID NO: 6458; WAN024ATI; Start 764; Stop 788
cgatggacggtaaggatgtttatac

SEQ ID NO: 439152 - DNA, 25 bp, Artificial
  probe
  misc_feature (1)..(25): SEQ ID NO: 6458; WAN024ATI; Start 995; Stop 1019
actatgagccaggttccactatgaa

SEQ ID NO: 439153 - DNA, 25 bp, Artificial
  probe
  misc_feature (1)..(25): SEQ ID NO: 6458; WAN024ATI; Start 1571; Stop 1595
atggaactatgtataatcaccacac

SEQ ID NO: 439154 - DNA, 25 bp, Artificial
  probe
  misc_feature (1)..(25): SEQ ID NO: 6458; WAN024ATI; Start 2049; Stop 2073
ccagcaagtcctgatcttatctgat

SEQ ID NO: 439155 - DNA, 25 bp, Artificial
  probe
  misc_feature (1)..(25): SEQ ID NO: 6458; WAN024ATI; Start 1060; Stop 1084
ccaggaggagaagtctttaatagta

SEQ ID NO: 439156 - DNA, 25 bp, Artificial
  probe
  misc_feature (1)..(25): SEQ ID NO: 6458; WAN024ATI; Start 994; Stop 1018
aactatgagccaggttccactatga

SEQ ID NO: 439157 - DNA, 25 bp, Artificial
  probe
  misc_feature (1)..(25): SEQ ID NO: 6458; WAN024ATI; Start 2127; Stop 2151
ctttgctaagtggctcaatatagac

SEQ ID NO: 439158 - DNA, 25 bp, Artificial
  probe
  misc_feature (1)..(25): SEQ ID NO: 6458; WAN024ATI; Start 763; Stop 787
acgatggacggtaaggatgtttata

SEQ ID NO: 439159 - DNA, 25 bp, Artificial
  probe
  misc_feature (1)..(25): SEQ ID NO: 6458; WAN024ATI; Start 2128; Stop 2152
tttgctaagtggctcaatatagacc

SEQ ID NO: 439160 - DNA, 25 bp, Artificial
  probe
  misc_feature (1)..(25): SEQ ID NO: 6458; WAN024ATI; Start 1989; Stop 2013
aggaacaggaacaaagattaaagaa

SEQ ID NO: 439161 - DNA, 25 bp, Artificial
  probe
  misc_feature (1)..(25): SEQ ID NO: 6458; WAN024ATI; Start 2036; Stop 2060
atcttacacctaaccagcaagtcct

SEQ ID NO: 439162 - DNA, 25 bp, Artificial
  probe
  misc_feature (1)..(25): SEQ ID NO: 6458; WAN024ATI; Start 1096; Stop 1120
attgcagatgctactatccgagatt

SEQ ID NO: 439163 - DNA, 25 bp, Artificial
  probe
  misc_feature (1)..(25): SEQ ID NO: 6458; WAN024ATI; Start 1095; Stop 1119
aattgcagatgctactatccgagat

SEQ ID NO: 439164 - DNA, 25 bp, Artificial
  probe
  misc_feature (1)..(25): SEQ ID NO: 6458; WAN024ATI; Start 2047; Stop 2071
aaccagcaagtcctgatcttatctg

SEQ ID NO: 439165 - DNA, 25 bp, Artificial
  probe
  misc_feature (1)..(25): SEQ ID NO: 6459; WAN024ATJ; Start 859; Stop 883
aagtatatgactgcgaccttggtta

SEQ ID NO: 439166 - DNA, 25 bp, Artificial
  probe
  misc_feature (1)..(25): SEQ ID NO: 6459; WAN024ATJ; Start 2135; Stop 2159
aatggttggatattgagctggaatt

SEQ ID NO: 439167 - DNA, 25 bp, Artificial
  probe
  misc_feature (1)..(25): SEQ ID NO: 6459; WAN024ATJ; Start 471; Stop 495
tattacctatgccaacatgatgtcc

SEQ ID NO: 439168 - DNA, 25 bp, Artificial
  probe
  misc_feature (1)..(25): SEQ ID NO: 6459; WAN024ATJ; Start 470; Stop 494
gtattacctatgccaacatgatgtc

SEQ ID NO: 439169 - DNA, 25 bp, Artificial
  probe
  misc_feature (1)..(25): SEQ ID NO: 6459; WAN024ATJ; Start 275; Stop 299
catcttataatgtctatgcggtcat

SEQ ID NO: 439170 - DNA, 25 bp, Artificial
  probe
  misc_feature (1)..(25): SEQ ID NO: 6459; WAN024ATJ; Start 860; Stop 884
agtatatgactgcgaccttggttag

SEQ ID NO: 439171 - DNA, 25 bp, Artificial
  probe
  misc_feature (1)..(25): SEQ ID NO: 6459; WAN024ATJ; Start 862; Stop 886
tatatgactgcgaccttggttagtg

SEQ ID NO: 439172 - DNA, 25 bp, Artificial
  probe
  misc_feature (1)..(25): SEQ ID NO: 6459; WAN024ATJ; Start 861; Stop 885
gtatatgactgcgaccttggttagt

SEQ ID NO: 439173 - DNA, 25 bp, Artificial
  probe
  misc_feature (1)..(25): SEQ ID NO: 6459; WAN024ATJ; Start 936; Stop 960
tgataccaaagaagggattacagag

SEQ ID NO: 439174 - DNA, 25 bp, Artificial
  probe
  misc_feature (1)..(25): SEQ ID NO: 6459; WAN024ATJ; Start 937; Stop 961
gataccaaagaagggattacagagg

SEQ ID NO: 439175 - DNA, 25 bp, Artificial
  probe
  misc_feature (1)..(25): SEQ ID NO: 6459; WAN024ATJ; Start 931; Stop 955
gatgctgataccaaagaagggatta

SEQ ID NO: 439176 - DNA, 25 bp, Artificial
  probe
  misc_feature (1)..(25): SEQ ID NO: 6459; WAN024ATJ; Start 1019; Stop 1043
aggttatgacgttagcttcttctat

SEQ ID NO: 439177 - DNA, 25 bp, Artificial
  probe
  misc_feature (1)..(25): SEQ ID NO: 6459; WAN024ATJ; Start 1125; Stop 1149
tgttaatgaaggtttgactactggt

SEQ ID NO: 439178 - DNA, 25 bp, Artificial
  probe
  misc_feature (1)..(25): SEQ ID NO: 6459; WAN024ATJ; Start 938; Stop 962
ataccaaagaagggattacagagga

SEQ ID NO: 439179 - DNA, 25 bp, Artificial
  probe
  misc_feature (1)..(25): SEQ ID NO: 6459; WAN024ATJ; Start 932; Stop 956
atgctgataccaaagaagggattac

SEQ ID NO: 439180 - DNA, 25 bp, Artificial
  probe
  misc_feature (1)..(25): SEQ ID NO: 6459; WAN024ATJ; Start 576; Stop 600
atttgcttcatctttcatcggacta

SEQ ID NO: 439181 - DNA, 25 bp, Artificial
  probe
  misc_feature (1)..(25): SEQ ID NO: 6459; WAN024ATJ; Start 1126; Stop 1150
gttaatgaaggtttgactactggtg

SEQ ID NO: 439182 - DNA, 25 bp, Artificial
  probe
  misc_feature (1)..(25): SEQ ID NO: 6459; WAN024ATJ; Start 1120; Stop 1144
tgggatgttaatgaaggtttgacta

SEQ ID NO: 439183 - DNA, 25 bp, Artificial
  probe
  misc_feature (1)..(25): SEQ ID NO: 6459; WAN024ATJ; Start 1118; Stop 1142
attgggatgttaatgaaggtttgac

SEQ ID NO: 439184 - DNA, 25 bp, Artificial
  probe
  misc_feature (1)..(25): SEQ ID NO: 6459; WAN024ATJ; Start 766; Stop 790
gtaaacgggaaagatgtctatacga

SEQ ID NO: 439185 - DNA, 25 bp, Artificial
  probe
  misc_feature (1)..(25): SEQ ID NO: 6459; WAN024ATJ; Start 1121; Stop 1145
gggatgttaatgaaggtttgactac

SEQ ID NO: 439186 - DNA, 25 bp, Artificial
  probe
  misc_feature (1)..(25): SEQ ID NO: 6459; WAN024ATJ; Start 1117; Stop 1141
gattgggatgttaatgaaggtttga

SEQ ID NO: 439187 - DNA, 25 bp, Artificial
  probe
  misc_feature (1)..(25): SEQ ID NO: 6459; WAN024ATJ; Start 1116; Stop 1140
agattgggatgttaatgaaggtttg

SEQ ID NO: 439188 - DNA, 25 bp, Artificial
  probe
  misc_feature (1)..(25): SEQ ID NO: 6459; WAN024ATJ; Start 765; Stop 789
tgtaaacgggaaagatgtctatacg

SEQ ID NO: 439189 - DNA, 25 bp, Artificial
  probe
  misc_feature (1)..(25): SEQ ID NO: 6459; WAN024ATJ; Start 1119; Stop 1143
ttgggatgttaatgaaggtttgact

SEQ ID NO: 439190 - DNA, 25 bp, Artificial
  probe
  misc_feature (1)..(25): SEQ ID NO: 6459; WAN024ATJ; Start 1018; Stop 1042
aaggttatgacgttagcttcttcta

SEQ ID NO: 439191 - DNA, 25 bp, Artificial
  probe
  misc_feature (1)..(25): SEQ ID NO: 6459; WAN024ATJ; Start 763; Stop 787
actgtaaacgggaaagatgtctata

SEQ ID NO: 439192 - DNA, 25 bp, Artificial
  probe
  misc_feature (1)..(25): SEQ ID NO: 6459; WAN024ATJ; Start 1143; Stop 1167
tactggtgggatgatgactttctta

SEQ ID NO: 439193 - DNA, 25 bp, Artificial
  probe
  misc_feature (1)..(25): SEQ ID NO: 6459; WAN024ATJ; Start 1127; Stop 1151
ttaatgaaggtttgactactggtgg

SEQ ID NO: 439194 - DNA, 25 bp, Artificial
  probe
  misc_feature (1)..(25): SEQ ID NO: 6459; WAN024ATJ; Start 1115; Stop 1139
gagattgggatgttaatgaaggttt

SEQ ID NO: 439195 - DNA, 25 bp, Artificial
  probe
  misc_feature (1)..(25): SEQ ID NO: 6459; WAN024ATJ; Start 814; Stop 838
tttatggaaagtcaaatggatgcct

SEQ ID NO: 439196 - DNA, 25 bp, Artificial
  probe
  misc_feature (1)..(25): SEQ ID NO: 6459; WAN024ATJ; Start 467; Stop 491
atggtattacctatgccaacatgat

SEQ ID NO: 439197 - DNA, 25 bp, Artificial
  probe
  misc_feature (1)..(25): SEQ ID NO: 6459; WAN024ATJ; Start 466; Stop 490
aatggtattacctatgccaacatga

SEQ ID NO: 439198 - DNA, 25 bp, Artificial
  probe
  misc_feature (1)..(25): SEQ ID NO: 6460; WAN024BM2; Start 216; Stop 240
tctaagagaggcattgattgaagat

SEQ ID NO: 439199 - DNA, 25 bp, Artificial
  probe
  misc_feature (1)..(25): SEQ ID NO: 6460; WAN024BM2; Start 215; Stop 239
atctaagagaggcattgattgaaga

SEQ ID NO: 439200 - DNA, 25 bp, Artificial
  probe
  misc_feature (1)..(25): SEQ ID NO: 6460; WAN024BM2; Start 219; Stop 243
aagagaggcattgattgaagataat

SEQ ID NO: 439201 - DNA, 25 bp, Artificial
  probe
  misc_feature (1)..(25): SEQ ID NO: 6460; WAN024BM2; Start 217; Stop 241
ctaagagaggcattgattgaagata

SEQ ID NO: 439202 - DNA, 25 bp, Artificial
  probe
  misc_feature (1)..(25): SEQ ID NO: 6460; WAN024BM2; Start 218; Stop 242
taagagaggcattgattgaagataa

SEQ ID NO: 439203 - DNA, 25 bp, Artificial
  probe
  misc_feature (1)..(25): SEQ ID NO: 6460; WAN024BM2; Start 220; Stop 244
agagaggcattgattgaagataata

SEQ ID NO: 439204 - DNA, 25 bp, Artificial
  probe
  misc_feature (1)..(25): SEQ ID NO: 6460; WAN024BM2; Start 117; Stop 141
ggcactatactcagagcttgattat

SEQ ID NO: 439205 - DNA, 25 bp, Artificial
  probe
  misc_feature (1)..(25): SEQ ID NO: 6460; WAN024BM2; Start 214; Stop 238
aatctaagagaggcattgattgaag

SEQ ID NO: 439206 - DNA, 25 bp, Artificial
  probe
  misc_feature (1)..(25): SEQ ID NO: 6460; WAN024BM2; Start 372; Stop 396
attaggtggtatgggaactgatatg

SEQ ID NO: 439207 - DNA, 25 bp, Artificial
  probe
  misc_feature (1)..(25): SEQ ID NO: 6460; WAN024BM2; Start 244; Stop 268
aataatggttggaatatcatggtga

SEQ ID NO: 439208 - DNA, 25 bp, Artificial
  probe
  misc_feature (1)..(25): SEQ ID NO: 6460; WAN024BM2; Start 373; Stop 397
ttaggtggtatgggaactgatatgt

SEQ ID NO: 439209 - DNA, 25 bp, Artificial
  probe
  misc_feature (1)..(25): SEQ ID NO: 6460; WAN024BM2; Start 370; Stop 394
caattaggtggtatgggaactgata

SEQ ID NO: 439210 - DNA, 25 bp, Artificial
  probe
  misc_feature (1)..(25): SEQ ID NO: 6460; WAN024BM2; Start 108; Stop 132
agatatttcggcactatactcagag

SEQ ID NO: 439211 - DNA, 25 bp, Artificial
  probe
  misc_feature (1)..(25): SEQ ID NO: 6460; WAN024BM2; Start 221; Stop 245
gagaggcattgattgaagataataa

SEQ ID NO: 439212 - DNA, 25 bp, Artificial
  probe
  misc_feature (1)..(25): SEQ ID NO: 6460; WAN024BM2; Start 376; Stop 400
ggtggtatgggaactgatatgttat

SEQ ID NO: 439213 - DNA, 25 bp, Artificial
  probe
  misc_feature (1)..(25): SEQ ID NO: 6460; WAN024BM2; Start 109; Stop 133
gatatttcggcactatactcagagc

SEQ ID NO: 439214 - DNA, 25 bp, Artificial
  probe
  misc_feature (1)..(25): SEQ ID NO: 6460; WAN024BM2; Start 366; Stop 390
aattcaattaggtggtatgggaact

SEQ ID NO: 439215 - DNA, 25 bp, Artificial
  probe
  misc_feature (1)..(25): SEQ ID NO: 6460; WAN024BM2; Start 367; Stop 391
attcaattaggtggtatgggaactg

SEQ ID NO: 439216 - DNA, 25 bp, Artificial
  probe
  misc_feature (1)..(25): SEQ ID NO: 6460; WAN024BM2; Start 375; Stop 399
aggtggtatgggaactgatatgtta

SEQ ID NO: 439217 - DNA, 25 bp, Artificial
  probe
  misc_feature (1)..(25): SEQ ID NO: 6460; WAN024BM2; Start 374; Stop 398
taggtggtatgggaactgatatgtt

SEQ ID NO: 439218 - DNA, 25 bp, Artificial
  probe
  misc_feature (1)..(25): SEQ ID NO: 6460; WAN024BM2; Start 371; Stop 395
aattaggtggtatgggaactgatat

SEQ ID NO: 439219 - DNA, 25 bp, Artificial
  probe
  misc_feature (1)..(25): SEQ ID NO: 6460; WAN024BM2; Start 107; Stop 131
tagatatttcggcactatactcaga

SEQ ID NO: 439220 - DNA, 25 bp, Artificial
  probe
  misc_feature (1)..(25): SEQ ID NO: 6460; WAN024BM2; Start 377; Stop 401
gtggtatgggaactgatatgttatt

SEQ ID NO: 439221 - DNA, 25 bp, Artificial
  probe
  misc_feature (1)..(25): SEQ ID NO: 6460; WAN024BM2; Start 116; Stop 140
cggcactatactcagagcttgatta

SEQ ID NO: 439222 - DNA, 25 bp, Artificial
  probe
  misc_feature (1)..(25): SEQ ID NO: 6460; WAN024BM2; Start 592; Stop 616
acagaaattcagtcaactacaaact

SEQ ID NO: 439223 - DNA, 25 bp, Artificial
  probe
  misc_feature (1)..(25): SEQ ID NO: 6460; WAN024BM2; Start 369; Stop 393
tcaattaggtggtatgggaactgat

SEQ ID NO: 439224 - DNA, 25 bp, Artificial
  probe
  misc_feature (1)..(25): SEQ ID NO: 6460; WAN024BM2; Start 634; Stop 658
gtttgtatctggattatgggatttg

SEQ ID NO: 439225 - DNA, 25 bp, Artificial
  probe
  misc_feature (1)..(25): SEQ ID NO: 6460; WAN024BM2; Start 368; Stop 392
ttcaattaggtggtatgggaactga

SEQ ID NO: 439226 - DNA, 25 bp, Artificial
  probe
  misc_feature (1)..(25): SEQ ID NO: 6460; WAN024BM2; Start 118; Stop 142
gcactatactcagagcttgattata

SEQ ID NO: 439227 - DNA, 25 bp, Artificial
  probe
  misc_feature (1)..(25): SEQ ID NO: 6460; WAN024BM2; Start 636; Stop 660
ttgtatctggattatgggatttgaa

SEQ ID NO: 439228 - DNA, 25 bp, Artificial
  probe
  misc_feature (1)..(25): SEQ ID NO: 6460; WAN024BM2; Start 635; Stop 659
tttgtatctggattatgggatttga

SEQ ID NO: 439229 - DNA, 25 bp, Artificial
  probe
  misc_feature (1)..(25): SEQ ID NO: 6460; WAN024BM2; Start 633; Stop 657
agtttgtatctggattatgggattt

SEQ ID NO: 439230 - DNA, 25 bp, Artificial
  probe
  misc_feature (1)..(25): SEQ ID NO: 6460; WAN024BM2; Start 106; Stop 130
ttagatatttcggcactatactcag

SEQ ID NO: 439231 - DNA, 25 bp, Artificial
  probe
  misc_feature (1)..(25): SEQ ID NO: 6461; WAN024DQ7; Start 7; Stop 31
ttagtggaggaagtcggagaagtag

SEQ ID NO: 439232 - DNA, 25 bp, Artificial
  probe
  misc_feature (1)..(25): SEQ ID NO: 6461; WAN024DQ7; Start 6; Stop 30
gttagtggaggaagtcggagaagta

SEQ ID NO: 439233 - DNA, 25 bp, Artificial
  probe
  misc_feature (1)..(25): SEQ ID NO: 6461; WAN024DQ7; Start 4; Stop 28
aagttagtggaggaagtcggagaag

SEQ ID NO: 439234 - DNA, 25 bp, Artificial
  probe
  misc_feature (1)..(25): SEQ ID NO: 6461; WAN024DQ7; Start 3; Stop 27
gaagttagtggaggaagtcggagaa

SEQ ID NO: 439235 - DNA, 25 bp, Artificial
  probe
  misc_feature (1)..(25): SEQ ID NO: 6461; WAN024DQ7; Start 1; Stop 25
atgaagttagtggaggaagtcggag

SEQ ID NO: 439236 - DNA, 25 bp, Artificial
  probe
  misc_feature (1)..(25): SEQ ID NO: 6461; WAN024DQ7; Start 5; Stop 29
agttagtggaggaagtcggagaagt

SEQ ID NO: 439237 - DNA, 25 bp, Artificial
  probe
  misc_feature (1)..(25): SEQ ID NO: 6461; WAN024DQ7; Start 2; Stop 26
tgaagttagtggaggaagtcggaga

SEQ ID NO: 439238 - DNA, 25 bp, Artificial
  probe
  misc_feature (1)..(25): SEQ ID NO: 6461; WAN024DQ7; Start 23; Stop 47
gagaagtagccgaggttttgaatag

SEQ ID NO: 439239 - DNA, 25 bp, Artificial
  probe
  misc_feature (1)..(25): SEQ ID NO: 6461; WAN024DQ7; Start 8; Stop 32
tagtggaggaagtcggagaagtagc

SEQ ID NO: 439240 - DNA, 25 bp, Artificial
  probe
  misc_feature (1)..(25): SEQ ID NO: 6461; WAN024DQ7; Start 24; Stop 48
agaagtagccgaggttttgaatagg

SEQ ID NO: 439241 - DNA, 25 bp, Artificial
  probe
  misc_feature (1)..(25): SEQ ID NO: 6461; WAN024DQ7; Start 22; Stop 46
ggagaagtagccgaggttttgaata

SEQ ID NO: 439242 - DNA, 25 bp, Artificial
  probe
  misc_feature (1)..(25): SEQ ID NO: 6461; WAN024DQ7; Start 68; Stop 92
ggataggattcgaacgaggaacttg

SEQ ID NO: 439243 - DNA, 25 bp, Artificial
  probe
  misc_feature (1)..(25): SEQ ID NO: 6461; WAN024DQ7; Start 53; Stop 77
ctggtcgaaaagaagggataggatt

SEQ ID NO: 439244 - DNA, 25 bp, Artificial
  probe
  misc_feature (1)..(25): SEQ ID NO: 6461; WAN024DQ7; Start 54; Stop 78
tggtcgaaaagaagggataggattc

SEQ ID NO: 439245 - DNA, 25 bp, Artificial
  probe
  misc_feature (1)..(25): SEQ ID NO: 6461; WAN024DQ7; Start 61; Stop 85
aaagaagggataggattcgaacgag

SEQ ID NO: 439246 - DNA, 25 bp, Artificial
  probe
  misc_feature (1)..(25): SEQ ID NO: 6461; WAN024DQ7; Start 69; Stop 93
gataggattcgaacgaggaacttgc

SEQ ID NO: 439247 - DNA, 25 bp, Artificial
  probe
  misc_feature (1)..(25): SEQ ID NO: 6461; WAN024DQ7; Start 52; Stop 76
tctggtcgaaaagaagggataggat

SEQ ID NO: 439248 - DNA, 25 bp, Artificial
  probe
  misc_feature (1)..(25): SEQ ID NO: 6461; WAN024DQ7; Start 51; Stop 75
ctctggtcgaaaagaagggatagga

SEQ ID NO: 439249 - DNA, 25 bp, Artificial
  probe
  misc_feature (1)..(25): SEQ ID NO: 6461; WAN024DQ7; Start 64; Stop 88
gaagggataggattcgaacgaggaa

SEQ ID NO: 439250 - DNA, 25 bp, Artificial
  probe
  misc_feature (1)..(25): SEQ ID NO: 6461; WAN024DQ7; Start 62; Stop 86
aagaagggataggattcgaacgagg

SEQ ID NO: 439251 - DNA, 25 bp, Artificial
  probe
  misc_feature (1)..(25): SEQ ID NO: 6461; WAN024DQ7; Start 59; Stop 83
gaaaagaagggataggattcgaacg

SEQ ID NO: 439252 - DNA, 25 bp, Artificial
  probe
  misc_feature (1)..(25): SEQ ID NO: 6461; WAN024DQ7; Start 70; Stop 94
ataggattcgaacgaggaacttgcc

SEQ ID NO: 439253 - DNA, 25 bp, Artificial
  probe
  misc_feature (1)..(25): SEQ ID NO: 6461; WAN024DQ7; Start 60; Stop 84
aaaagaagggataggattcgaacga

SEQ ID NO: 439254 - DNA, 25 bp, Artificial
  probe
  misc_feature (1)..(25): SEQ ID NO: 6461; WAN024DQ7; Start 67; Stop 91
gggataggattcgaacgaggaactt

SEQ ID NO: 439255 - DNA, 25 bp, Artificial
  probe
  misc_feature (1)..(25): SEQ ID NO: 6461; WAN024DQ7; Start 65; Stop 89
aagggataggattcgaacgaggaac

SEQ ID NO: 439256 - DNA, 25 bp, Artificial
  probe
  misc_feature (1)..(25): SEQ ID NO: 6461; WAN024DQ7; Start 63; Stop 87
agaagggataggattcgaacgagga

SEQ ID NO: 439257 - DNA, 25 bp, Artificial
  probe
  misc_feature (1)..(25): SEQ ID NO: 6461; WAN024DQ7; Start 50; Stop 74
gctctggtcgaaaagaagggatagg

SEQ ID NO: 439258 - DNA, 25 bp, Artificial
  probe
  misc_feature (1)..(25): SEQ ID NO: 6461; WAN024DQ7; Start 66; Stop 90
agggataggattcgaacgaggaact

SEQ ID NO: 439259 - DNA, 25 bp, Artificial
  probe
  misc_feature (1)..(25): SEQ ID NO: 6461; WAN024DQ7; Start 49; Stop 73
cgctctggtcgaaaagaagggatag

SEQ ID NO: 439260 - DNA, 25 bp, Artificial
  probe
  misc_feature (1)..(25): SEQ ID NO: 6461; WAN024DQ7; Start 25; Stop 49
gaagtagccgaggttttgaataggc

SEQ ID NO: 439261 - DNA, 25 bp, Artificial
  probe
  misc_feature (1)..(25): SEQ ID NO: 6461; WAN024DQ7; Start 55; Stop 79
ggtcgaaaagaagggataggattcg

SEQ ID NO: 439262 - DNA, 25 bp, Artificial
  probe
  misc_feature (1)..(25): SEQ ID NO: 6461; WAN024DQ7; Start 21; Stop 45
cggagaagtagccgaggttttgaat

SEQ ID NO: 439263 - DNA, 25 bp, Artificial
  probe
  misc_feature (1)..(25): SEQ ID NO: 6461; WAN024DQ7; Start 39; Stop 63
tttgaataggcgctctggtcgaaaa

SEQ ID NO: 439264 - DNA, 25 bp, Artificial
  probe
  misc_feature (1)..(25): SEQ ID NO: 6462; WAN024BKL; Start 77; Stop 101
ctgatgtatgtagtaaggcgttgta

SEQ ID NO: 439265 - DNA, 25 bp, Artificial
  probe
  misc_feature (1)..(25): SEQ ID NO: 6462; WAN024BKL; Start 321; Stop 345
ttcaagaacaataggtggacacatt

SEQ ID NO: 439266 - DNA, 25 bp, Artificial
  probe
  misc_feature (1)..(25): SEQ ID NO: 6462; WAN024BKL; Start 322; Stop 346
tcaagaacaataggtggacacattc

SEQ ID NO: 439267 - DNA, 25 bp, Artificial
  probe
  misc_feature (1)..(25): SEQ ID NO: 6462; WAN024BKL; Start 78; Stop 102
tgatgtatgtagtaaggcgttgtac

SEQ ID NO: 439268 - DNA, 25 bp, Artificial
  probe
  misc_feature (1)..(25): SEQ ID NO: 6462; WAN024BKL; Start 237; Stop 261
atcaagtgattatataggagcctct

SEQ ID NO: 439269 - DNA, 25 bp, Artificial
  probe
  misc_feature (1)..(25): SEQ ID NO: 6462; WAN024BKL; Start 74; Stop 98
atcctgatgtatgtagtaaggcgtt

SEQ ID NO: 439270 - DNA, 25 bp, Artificial
  probe
  misc_feature (1)..(25): SEQ ID NO: 6462; WAN024BKL; Start 238; Stop 262
tcaagtgattatataggagcctcta

SEQ ID NO: 439271 - DNA, 25 bp, Artificial
  probe
  misc_feature (1)..(25): SEQ ID NO: 6462; WAN024BKL; Start 277; Stop 301
gaggcaggattaaacgacagaataa

SEQ ID NO: 439272 - DNA, 25 bp, Artificial
  probe
  misc_feature (1)..(25): SEQ ID NO: 6462; WAN024BKL; Start 320; Stop 344
tttcaagaacaataggtggacacat

SEQ ID NO: 439273 - DNA, 25 bp, Artificial
  probe
  misc_feature (1)..(25): SEQ ID NO: 6462; WAN024BKL; Start 319; Stop 343
atttcaagaacaataggtggacaca

SEQ ID NO: 439274 - DNA, 25 bp, Artificial
  probe
  misc_feature (1)..(25): SEQ ID NO: 6462; WAN024BKL; Start 278; Stop 302
aggcaggattaaacgacagaataat

SEQ ID NO: 439275 - DNA, 25 bp, Artificial
  probe
  misc_feature (1)..(25): SEQ ID NO: 6462; WAN024BKL; Start 367; Stop 391
ttagaaaccgttaatcaggctagag

SEQ ID NO: 439276 - DNA, 25 bp, Artificial
  probe
  misc_feature (1)..(25): SEQ ID NO: 6462; WAN024BKL; Start 75; Stop 99
tcctgatgtatgtagtaaggcgttg

SEQ ID NO: 439277 - DNA, 25 bp, Artificial
  probe
  misc_feature (1)..(25): SEQ ID NO: 6462; WAN024BKL; Start 73; Stop 97
gatcctgatgtatgtagtaaggcgt

SEQ ID NO: 439278 - DNA, 25 bp, Artificial
  probe
  misc_feature (1)..(25): SEQ ID NO: 6462; WAN024BKL; Start 279; Stop 303
ggcaggattaaacgacagaataatt

SEQ ID NO: 439279 - DNA, 25 bp, Artificial
  probe
  misc_feature (1)..(25): SEQ ID NO: 6462; WAN024BKL; Start 317; Stop 341
gtatttcaagaacaataggtggaca

SEQ ID NO: 439280 - DNA, 25 bp, Artificial
  probe
  misc_feature (1)..(25): SEQ ID NO: 6462; WAN024BKL; Start 276; Stop 300
agaggcaggattaaacgacagaata

SEQ ID NO: 439281 - DNA, 25 bp, Artificial
  probe
  misc_feature (1)..(25): SEQ ID NO: 6462; WAN024BKL; Start 316; Stop 340
agtatttcaagaacaataggtggac

SEQ ID NO: 439282 - DNA, 25 bp, Artificial
  probe
  misc_feature (1)..(25): SEQ ID NO: 6462; WAN024BKL; Start 366; Stop 390
attagaaaccgttaatcaggctaga

SEQ ID NO: 439283 - DNA, 25 bp, Artificial
  probe
  misc_feature (1)..(25): SEQ ID NO: 6462; WAN024BKL; Start 76; Stop 100
cctgatgtatgtagtaaggcgttgt

SEQ ID NO: 439284 - DNA, 25 bp, Artificial
  probe
  misc_feature (1)..(25): SEQ ID NO: 6462; WAN024BKL; Start 318; Stop 342
tatttcaagaacaataggtggacac

SEQ ID NO: 439285 - DNA, 25 bp, Artificial
  probe
  misc_feature (1)..(25): SEQ ID NO: 6462; WAN024BKL; Start 323; Stop 347
caagaacaataggtggacacattct

SEQ ID NO: 439286 - DNA, 25 bp, Artificial
  probe
  misc_feature (1)..(25): SEQ ID NO: 6462; WAN024BKL; Start 315; Stop 339
gagtatttcaagaacaataggtgga

SEQ ID NO: 439287 - DNA, 25 bp, Artificial
  probe
  misc_feature (1)..(25): SEQ ID NO: 6462; WAN024BKL; Start 314; Stop 338
tgagtatttcaagaacaataggtgg

SEQ ID NO: 439288 - DNA, 25 bp, Artificial
  probe
  misc_feature (1)..(25): SEQ ID NO: 6462; WAN024BKL; Start 236; Stop 260
tatcaagtgattatataggagcctc

SEQ ID NO: 439289 - DNA, 25 bp, Artificial
  probe
  misc_feature (1)..(25): SEQ ID NO: 6462; WAN024BKL; Start 365; Stop 389
aattagaaaccgttaatcaggctag

SEQ ID NO: 439290 - DNA, 25 bp, Artificial
  probe
  misc_feature (1)..(25): SEQ ID NO: 6462; WAN024BKL; Start 364; Stop 388
aaattagaaaccgttaatcaggcta

SEQ ID NO: 439291 - DNA, 25 bp, Artificial
  probe
  misc_feature (1)..(25): SEQ ID NO: 6462; WAN024BKL; Start 368; Stop 392
tagaaaccgttaatcaggctagagg

SEQ ID NO: 439292 - DNA, 25 bp, Artificial
  probe
  misc_feature (1)..(25): SEQ ID NO: 6462; WAN024BKL; Start 376; Stop 400
gttaatcaggctagaggtggagaaa

SEQ ID NO: 439293 - DNA, 25 bp, Artificial
  probe
  misc_feature (1)..(25): SEQ ID NO: 6462; WAN024BKL; Start 280; Stop 304
gcaggattaaacgacagaataattt

SEQ ID NO: 439294 - DNA, 25 bp, Artificial
  probe
  misc_feature (1)..(25): SEQ ID NO: 6462; WAN024BKL; Start 275; Stop 299
aagaggcaggattaaacgacagaat

SEQ ID NO: 439295 - DNA, 25 bp, Artificial
  probe
  misc_feature (1)..(25): SEQ ID NO: 6462; WAN024BKL; Start 239; Stop 263
caagtgattatataggagcctctat

SEQ ID NO: 439296 - DNA, 25 bp, Artificial
  probe
  misc_feature (1)..(25): SEQ ID NO: 6462; WAN024BKL; Start 235; Stop 259
ttatcaagtgattatataggagcct

SEQ ID NO: 439297 - DNA, 25 bp, Artificial
  probe
  misc_feature (1)..(25): SEQ ID NO: 6463; WAN024BRH; Start 712; Stop 736
tatcttgtaatgttagttccgcttg

SEQ ID NO: 439298 - DNA, 25 bp, Artificial
  probe
  misc_feature (1)..(25): SEQ ID NO: 6463; WAN024BRH; Start 600; Stop 624
agcgatagttatctgtctcttctct

SEQ ID NO: 439299 - DNA, 25 bp, Artificial
  probe
  misc_feature (1)..(25): SEQ ID NO: 6463; WAN024BRH; Start 601; Stop 625
gcgatagttatctgtctcttctcta

SEQ ID NO: 439300 - DNA, 25 bp, Artificial
  probe
  misc_feature (1)..(25): SEQ ID NO: 6463; WAN024BRH; Start 606; Stop 630
agttatctgtctcttctctatcgtt

SEQ ID NO: 439301 - DNA, 25 bp, Artificial
  probe
  misc_feature (1)..(25): SEQ ID NO: 6463; WAN024BRH; Start 711; Stop 735
ttatcttgtaatgttagttccgctt

SEQ ID NO: 439302 - DNA, 25 bp, Artificial
  probe
  misc_feature (1)..(25): SEQ ID NO: 6463; WAN024BRH; Start 713; Stop 737
atcttgtaatgttagttccgcttgc

SEQ ID NO: 439303 - DNA, 25 bp, Artificial
  probe
  misc_feature (1)..(25): SEQ ID NO: 6463; WAN024BRH; Start 599; Stop 623
cagcgatagttatctgtctcttctc

SEQ ID NO: 439304 - DNA, 25 bp, Artificial
  probe
  misc_feature (1)..(25): SEQ ID NO: 6463; WAN024BRH; Start 605; Stop 629
tagttatctgtctcttctctatcgt

SEQ ID NO: 439305 - DNA, 25 bp, Artificial
  probe
  misc_feature (1)..(25): SEQ ID NO: 6463; WAN024BRH; Start 609; Stop 633
tatctgtctcttctctatcgttaca

SEQ ID NO: 439306 - DNA, 25 bp, Artificial
  probe
  misc_feature (1)..(25): SEQ ID NO: 6463; WAN024BRH; Start 608; Stop 632
ttatctgtctcttctctatcgttac

SEQ ID NO: 439307 - DNA, 25 bp, Artificial
  probe
  misc_feature (1)..(25): SEQ ID NO: 6463; WAN024BRH; Start 607; Stop 631
gttatctgtctcttctctatcgtta

SEQ ID NO: 439308 - DNA, 25 bp, Artificial
  probe
  misc_feature (1)..(25): SEQ ID NO: 6463; WAN024BRH; Start 1040; Stop 1064
atgtgaatggaggatactttggaat

SEQ ID NO: 439309 - DNA, 25 bp, Artificial
  probe
  misc_feature (1)..(25): SEQ ID NO: 6463; WAN024BRH; Start 1035; Stop 1059
gggatatgtgaatggaggatacttt

SEQ ID NO: 439310 - DNA, 25 bp, Artificial
  probe
  misc_feature (1)..(25): SEQ ID NO: 6463; WAN024BRH; Start 1039; Stop 1063
tatgtgaatggaggatactttggaa

SEQ ID NO: 439311 - DNA, 25 bp, Artificial
  probe
  misc_feature (1)..(25): SEQ ID NO: 6463; WAN024BRH; Start 1034; Stop 1058
agggatatgtgaatggaggatactt

SEQ ID NO: 439312 - DNA, 25 bp, Artificial
  probe
  misc_feature (1)..(25): SEQ ID NO: 6463; WAN024BRH; Start 1031; Stop 1055
gagagggatatgtgaatggaggata

SEQ ID NO: 439313 - DNA, 25 bp, Artificial
  probe
  misc_feature (1)..(25): SEQ ID NO: 6463; WAN024BRH; Start 1043; Stop 1067
tgaatggaggatactttggaattgt

SEQ ID NO: 439314 - DNA, 25 bp, Artificial
  probe
  misc_feature (1)..(25): SEQ ID NO: 6463; WAN024BRH; Start 1042; Stop 1066
gtgaatggaggatactttggaattg

SEQ ID NO: 439315 - DNA, 25 bp, Artificial
  probe
  misc_feature (1)..(25): SEQ ID NO: 6463; WAN024BRH; Start 1041; Stop 1065
tgtgaatggaggatactttggaatt

SEQ ID NO: 439316 - DNA, 25 bp, Artificial
  probe
  misc_feature (1)..(25): SEQ ID NO: 6463; WAN024BRH; Start 1038; Stop 1062
atatgtgaatggaggatactttgga

SEQ ID NO: 439317 - DNA, 25 bp, Artificial
  probe
  misc_feature (1)..(25): SEQ ID NO: 6463; WAN024BRH; Start 1033; Stop 1057
gagggatatgtgaatggaggatact

SEQ ID NO: 439318 - DNA, 25 bp, Artificial
  probe
  misc_feature (1)..(25): SEQ ID NO: 6463; WAN024BRH; Start 1032; Stop 1056
agagggatatgtgaatggaggatac

SEQ ID NO: 439319 - DNA, 25 bp, Artificial
  probe
  misc_feature (1)..(25): SEQ ID NO: 6463; WAN024BRH; Start 318; Stop 342
tctaccttctaaagccattgtgtta

SEQ ID NO: 439320 - DNA, 25 bp, Artificial
  probe
  misc_feature (1)..(25): SEQ ID NO: 6463; WAN024BRH; Start 1037; Stop 1061
gatatgtgaatggaggatactttgg

SEQ ID NO: 439321 - DNA, 25 bp, Artificial
  probe
  misc_feature (1)..(25): SEQ ID NO: 6463; WAN024BRH; Start 1036; Stop 1060
ggatatgtgaatggaggatactttg

SEQ ID NO: 439322 - DNA, 25 bp, Artificial
  probe
  misc_feature (1)..(25): SEQ ID NO: 6463; WAN024BRH; Start 179; Stop 203
cctatgtgtggtatagtagcttctt

SEQ ID NO: 439323 - DNA, 25 bp, Artificial
  probe
  misc_feature (1)..(25): SEQ ID NO: 6463; WAN024BRH; Start 314; Stop 338
taactctaccttctaaagccattgt

SEQ ID NO: 439324 - DNA, 25 bp, Artificial
  probe
  misc_feature (1)..(25): SEQ ID NO: 6463; WAN024BRH; Start 317; Stop 341
ctctaccttctaaagccattgtgtt

SEQ ID NO: 439325 - DNA, 25 bp, Artificial
  probe
  misc_feature (1)..(25): SEQ ID NO: 6463; WAN024BRH; Start 315; Stop 339
aactctaccttctaaagccattgtg

SEQ ID NO: 439326 - DNA, 25 bp, Artificial
  probe
  misc_feature (1)..(25): SEQ ID NO: 6463; WAN024BRH; Start 825; Stop 849
tgatttgctagatggtgagtttgta

SEQ ID NO: 439327 - DNA, 25 bp, Artificial
  probe
  misc_feature (1)..(25): SEQ ID NO: 6463; WAN024BRH; Start 823; Stop 847
tttgatttgctagatggtgagtttg

SEQ ID NO: 439328 - DNA, 25 bp, Artificial
  probe
  misc_feature (1)..(25): SEQ ID NO: 6463; WAN024BRH; Start 822; Stop 846
gtttgatttgctagatggtgagttt

SEQ ID NO: 439329 - DNA, 25 bp, Artificial
  probe
  misc_feature (1)..(25): SEQ ID NO: 6463; WAN024BRH; Start 777; Stop 801
tttattaagtgggcaagtttcatct

SEQ ID NO: 439330 - DNA, 25 bp, Artificial
  probe
  misc_feature (1)..(25): SEQ ID NO: 6464; WAN024BWP; Start 20; Stop 44
cactcatcgttctaactgtcaacta

SEQ ID NO: 439331 - DNA, 25 bp, Artificial
  probe
  misc_feature (1)..(25): SEQ ID NO: 6464; WAN024BWP; Start 21; Stop 45
actcatcgttctaactgtcaactat

SEQ ID NO: 439332 - DNA, 25 bp, Artificial
  probe
  misc_feature (1)..(25): SEQ ID NO: 6464; WAN024BWP; Start 13; Stop 37
attgtaacactcatcgttctaactg

SEQ ID NO: 439333 - DNA, 25 bp, Artificial
  probe
  misc_feature (1)..(25): SEQ ID NO: 6464; WAN024BWP; Start 22; Stop 46
ctcatcgttctaactgtcaactatt

SEQ ID NO: 439334 - DNA, 25 bp, Artificial
  probe
  misc_feature (1)..(25): SEQ ID NO: 6464; WAN024BWP; Start 17; Stop 41
taacactcatcgttctaactgtcaa

SEQ ID NO: 439335 - DNA, 25 bp, Artificial
  probe
  misc_feature (1)..(25): SEQ ID NO: 6464; WAN024BWP; Start 14; Stop 38
ttgtaacactcatcgttctaactgt

SEQ ID NO: 439336 - DNA, 25 bp, Artificial
  probe
  misc_feature (1)..(25): SEQ ID NO: 6464; WAN024BWP; Start 16; Stop 40
gtaacactcatcgttctaactgtca

SEQ ID NO: 439337 - DNA, 25 bp, Artificial
  probe
  misc_feature (1)..(25): SEQ ID NO: 6464; WAN024BWP; Start 15; Stop 39
tgtaacactcatcgttctaactgtc

SEQ ID NO: 439338 - DNA, 25 bp, Artificial
  probe
  misc_feature (1)..(25): SEQ ID NO: 6464; WAN024BWP; Start 12; Stop 36
aattgtaacactcatcgttctaact

SEQ ID NO: 439339 - DNA, 25 bp, Artificial
  probe
  misc_feature (1)..(25): SEQ ID NO: 6464; WAN024BWP; Start 69; Stop 93
taattattcacaccaccatactccg

SEQ ID NO: 439340 - DNA, 25 bp, Artificial
  probe
  misc_feature (1)..(25): SEQ ID NO: 6464; WAN024BWP; Start 18; Stop 42
aacactcatcgttctaactgtcaac

SEQ ID NO: 439341 - DNA, 25 bp, Artificial
  probe
  misc_feature (1)..(25): SEQ ID NO: 6464; WAN024BWP; Start 19; Stop 43
acactcatcgttctaactgtcaact

SEQ ID NO: 439342 - DNA, 25 bp, Artificial
  probe
  misc_feature (1)..(25): SEQ ID NO: 6464; WAN024BWP; Start 25; Stop 49
atcgttctaactgtcaactatttcg

SEQ ID NO: 439343 - DNA, 25 bp, Artificial
  probe
  misc_feature (1)..(25): SEQ ID NO: 6464; WAN024BWP; Start 11; Stop 35
taattgtaacactcatcgttctaac

SEQ ID NO: 439344 - DNA, 25 bp, Artificial
  probe
  misc_feature (1)..(25): SEQ ID NO: 6464; WAN024BWP; Start 23; Stop 47
tcatcgttctaactgtcaactattt

SEQ ID NO: 439345 - DNA, 25 bp, Artificial
  probe
  misc_feature (1)..(25): SEQ ID NO: 6464; WAN024BWP; Start 24; Stop 48
catcgttctaactgtcaactatttc

SEQ ID NO: 439346 - DNA, 25 bp, Artificial
  probe
  misc_feature (1)..(25): SEQ ID NO: 6464; WAN024BWP; Start 10; Stop 34
ataattgtaacactcatcgttctaa

SEQ ID NO: 439347 - DNA, 25 bp, Artificial
  probe
  misc_feature (1)..(25): SEQ ID NO: 6464; WAN024BWP; Start 9; Stop 33
aataattgtaacactcatcgttcta

SEQ ID NO: 439348 - DNA, 25 bp, Artificial
  probe
  misc_feature (1)..(25): SEQ ID NO: 6464; WAN024BWP; Start 68; Stop 92
ataattattcacaccaccatactcc

SEQ ID NO: 439349 - DNA, 25 bp, Artificial
  probe
  misc_feature (1)..(25): SEQ ID NO: 6464; WAN024BWP; Start 27; Stop 51
cgttctaactgtcaactatttcgat

SEQ ID NO: 439350 - DNA, 25 bp, Artificial
  probe
  misc_feature (1)..(25): SEQ ID NO: 6464; WAN024BWP; Start 33; Stop 57
aactgtcaactatttcgatttggaa

SEQ ID NO: 439351 - DNA, 25 bp, Artificial
  probe
  misc_feature (1)..(25): SEQ ID NO: 6464; WAN024BWP; Start 32; Stop 56
taactgtcaactatttcgatttgga

SEQ ID NO: 439352 - DNA, 25 bp, Artificial
  probe
  misc_feature (1)..(25): SEQ ID NO: 6464; WAN024BWP; Start 8; Stop 32
aaataattgtaacactcatcgttct

SEQ ID NO: 439353 - DNA, 25 bp, Artificial
  probe
  misc_feature (1)..(25): SEQ ID NO: 6464; WAN024BWP; Start 31; Stop 55
ctaactgtcaactatttcgatttgg

SEQ ID NO: 439354 - DNA, 25 bp, Artificial
  probe
  misc_feature (1)..(25): SEQ ID NO: 6464; WAN024BWP; Start 70; Stop 94
aattattcacaccaccatactccgg

SEQ ID NO: 439355 - DNA, 25 bp, Artificial
  probe
  misc_feature (1)..(25): SEQ ID NO: 6464; WAN024BWP; Start 66; Stop 90
tgataattattcacaccaccatact

SEQ ID NO: 439356 - DNA, 25 bp, Artificial
  probe
  misc_feature (1)..(25): SEQ ID NO: 6464; WAN024BWP; Start 67; Stop 91
gataattattcacaccaccatactc

SEQ ID NO: 439357 - DNA, 25 bp, Artificial
  probe
  misc_feature (1)..(25): SEQ ID NO: 6464; WAN024BWP; Start 34; Stop 58
actgtcaactatttcgatttggaaa

SEQ ID NO: 439358 - DNA, 25 bp, Artificial
  probe
  misc_feature (1)..(25): SEQ ID NO: 6464; WAN024BWP; Start 28; Stop 52
gttctaactgtcaactatttcgatt

SEQ ID NO: 439359 - DNA, 25 bp, Artificial
  probe
  misc_feature (1)..(25): SEQ ID NO: 6464; WAN024BWP; Start 65; Stop 89
ttgataattattcacaccaccatac

SEQ ID NO: 439360 - DNA, 25 bp, Artificial
  probe
  misc_feature (1)..(25): SEQ ID NO: 6464; WAN024BWP; Start 26; Stop 50
tcgttctaactgtcaactatttcga

SEQ ID NO: 439361 - DNA, 25 bp, Artificial
  probe
  misc_feature (1)..(25): SEQ ID NO: 6464; WAN024BWP; Start 30; Stop 54
tctaactgtcaactatttcgatttg

SEQ ID NO: 439362 - DNA, 25 bp, Artificial
  probe
  misc_feature (1)..(25): SEQ ID NO: 6464; WAN024BWP; Start 93; Stop 117
ggctcaactaacttttaacgagagt

SEQ ID NO: 439363 - DNA, 25 bp, Artificial
  probe
  misc_feature (1)..(25): SEQ ID NO: 6465; WAN024BP9; Start 96; Stop 120
tgaatggcttattgtagatgatggt

SEQ ID NO: 439364 - DNA, 25 bp, Artificial
  probe
  misc_feature (1)..(25): SEQ ID NO: 6465; WAN024BP9; Start 98; Stop 122
aatggcttattgtagatgatggttc

SEQ ID NO: 439365 - DNA, 25 bp, Artificial
  probe
  misc_feature (1)..(25): SEQ ID NO: 6465; WAN024BP9; Start 97; Stop 121
gaatggcttattgtagatgatggtt

SEQ ID NO: 439366 - DNA, 25 bp, Artificial
  probe
  misc_feature (1)..(25): SEQ ID NO: 6465; WAN024BP9; Start 95; Stop 119
ttgaatggcttattgtagatgatgg

SEQ ID NO: 439367 - DNA, 25 bp, Artificial
  probe
  misc_feature (1)..(25): SEQ ID NO: 6465; WAN024BP9; Start 542; Stop 566
aagttgtcttatggaatgaagttgc

SEQ ID NO: 439368 - DNA, 25 bp, Artificial
  probe
  misc_feature (1)..(25): SEQ ID NO: 6465; WAN024BP9; Start 536; Stop 560
tgagtgaagttgtcttatggaatga

SEQ ID NO: 439369 - DNA, 25 bp, Artificial
  probe
  misc_feature (1)..(25): SEQ ID NO: 6465; WAN024BP9; Start 539; Stop 563
gtgaagttgtcttatggaatgaagt

SEQ ID NO: 439370 - DNA, 25 bp, Artificial
  probe
  misc_feature (1)..(25): SEQ ID NO: 6465; WAN024BP9; Start 281; Stop 305
cattgacagatgatgctattgagaa

SEQ ID NO: 439371 - DNA, 25 bp, Artificial
  probe
  misc_feature (1)..(25): SEQ ID NO: 6465; WAN024BP9; Start 200; Stop 224
atggtggtaagcatagagcaattaa

SEQ ID NO: 439372 - DNA, 25 bp, Artificial
  probe
  misc_feature (1)..(25): SEQ ID NO: 6465; WAN024BP9; Start 199; Stop 223
aatggtggtaagcatagagcaatta

SEQ ID NO: 439373 - DNA, 25 bp, Artificial
  probe
  misc_feature (1)..(25): SEQ ID NO: 6465; WAN024BP9; Start 535; Stop 559
atgagtgaagttgtcttatggaatg

SEQ ID NO: 439374 - DNA, 25 bp, Artificial
  probe
  misc_feature (1)..(25): SEQ ID NO: 6465; WAN024BP9; Start 538; Stop 562
agtgaagttgtcttatggaatgaag

SEQ ID NO: 439375 - DNA, 25 bp, Artificial
  probe
  misc_feature (1)..(25): SEQ ID NO: 6465; WAN024BP9; Start 537; Stop 561
gagtgaagttgtcttatggaatgaa

SEQ ID NO: 439376 - DNA, 25 bp, Artificial
  probe
  misc_feature (1)..(25): SEQ ID NO: 6465; WAN024BP9; Start 250; Stop 274
gagttattcttcatcgttgattccg

SEQ ID NO: 439377 - DNA, 25 bp, Artificial
  probe
  misc_feature (1)..(25): SEQ ID NO: 6465; WAN024BP9; Start 100; Stop 124
tggcttattgtagatgatggttcaa

SEQ ID NO: 439378 - DNA, 25 bp, Artificial
  probe
  misc_feature (1)..(25): SEQ ID NO: 6465; WAN024BP9; Start 99; Stop 123
atggcttattgtagatgatggttca

SEQ ID NO: 439379 - DNA, 25 bp, Artificial
  probe
  misc_feature (1)..(25): SEQ ID NO: 6465; WAN024BP9; Start 540; Stop 564
tgaagttgtcttatggaatgaagtt

SEQ ID NO: 439380 - DNA, 25 bp, Artificial
  probe
  misc_feature (1)..(25): SEQ ID NO: 6465; WAN024BP9; Start 268; Stop 292
gattccgatgattcattgacagatg

SEQ ID NO: 439381 - DNA, 25 bp, Artificial
  probe
  misc_feature (1)..(25): SEQ ID NO: 6465; WAN024BP9; Start 541; Stop 565
gaagttgtcttatggaatgaagttg

SEQ ID NO: 439382 - DNA, 25 bp, Artificial
  probe
  misc_feature (1)..(25): SEQ ID NO: 6465; WAN024BP9; Start 115; Stop 139
gatggttcaatagatcagactggtg

SEQ ID NO: 439383 - DNA, 25 bp, Artificial
  probe
  misc_feature (1)..(25): SEQ ID NO: 6465; WAN024BP9; Start 267; Stop 291
tgattccgatgattcattgacagat

SEQ ID NO: 439384 - DNA, 25 bp, Artificial
  probe
  misc_feature (1)..(25): SEQ ID NO: 6465; WAN024BP9; Start 266; Stop 290
ttgattccgatgattcattgacaga

SEQ ID NO: 439385 - DNA, 25 bp, Artificial
  probe
  misc_feature (1)..(25): SEQ ID NO: 6465; WAN024BP9; Start 265; Stop 289
gttgattccgatgattcattgacag

SEQ ID NO: 439386 - DNA, 25 bp, Artificial
  probe
  misc_feature (1)..(25): SEQ ID NO: 6465; WAN024BP9; Start 202; Stop 226
ggtggtaagcatagagcaattaatc

SEQ ID NO: 439387 - DNA, 25 bp, Artificial
  probe
  misc_feature (1)..(25): SEQ ID NO: 6465; WAN024BP9; Start 201; Stop 225
tggtggtaagcatagagcaattaat

SEQ ID NO: 439388 - DNA, 25 bp, Artificial
  probe
  misc_feature (1)..(25): SEQ ID NO: 6465; WAN024BP9; Start 458; Stop 482
taggagataaggcagaagtatatcg

SEQ ID NO: 439389 - DNA, 25 bp, Artificial
  probe
  misc_feature (1)..(25): SEQ ID NO: 6465; WAN024BP9; Start 684; Stop 708
aatgatgaccaaggaattgttacaa

SEQ ID NO: 439390 - DNA, 25 bp, Artificial
  probe
  misc_feature (1)..(25): SEQ ID NO: 6465; WAN024BP9; Start 533; Stop 557
ttatgagtgaagttgtcttatggaa

SEQ ID NO: 439391 - DNA, 25 bp, Artificial
  probe
  misc_feature (1)..(25): SEQ ID NO: 6465; WAN024BP9; Start 203; Stop 227
gtggtaagcatagagcaattaatca

SEQ ID NO: 439392 - DNA, 25 bp, Artificial
  probe
  misc_feature (1)..(25): SEQ ID NO: 6465; WAN024BP9; Start 116; Stop 140
atggttcaatagatcagactggtga

SEQ ID NO: 439393 - DNA, 25 bp, Artificial
  probe
  misc_feature (1)..(25): SEQ ID NO: 6465; WAN024BP9; Start 249; Stop 273
ggagttattcttcatcgttgattcc

SEQ ID NO: 439394 - DNA, 25 bp, Artificial
  probe
  misc_feature (1)..(25): SEQ ID NO: 6465; WAN024BP9; Start 534; Stop 558
tatgagtgaagttgtcttatggaat

SEQ ID NO: 439395 - DNA, 25 bp, Artificial
  probe
  misc_feature (1)..(25): SEQ ID NO: 6465; WAN024BP9; Start 208; Stop 232
aagcatagagcaattaatcatggtt

SEQ ID NO: 439396 - DNA, 25 bp, Artificial
  probe
  misc_feature (1)..(25): SEQ ID NO: 6466; WAN024BMY; Start 526; Stop 550
gcttatggagatacaactggtgatt

SEQ ID NO: 439397 - DNA, 25 bp, Artificial
  probe
  misc_feature (1)..(25): SEQ ID NO: 6466; WAN024BMY; Start 522; Stop 546
ctacgcttatggagatacaactggt

SEQ ID NO: 439398 - DNA, 25 bp, Artificial
  probe
  misc_feature (1)..(25): SEQ ID NO: 6466; WAN024BMY; Start 167; Stop 191
atgatgactatctctatattgctgc

SEQ ID NO: 439399 - DNA, 25 bp, Artificial
  probe
  misc_feature (1)..(25): SEQ ID NO: 6466; WAN024BMY; Start 523; Stop 547
tacgcttatggagatacaactggtg

SEQ ID NO: 439400 - DNA, 25 bp, Artificial
  probe
  misc_feature (1)..(25): SEQ ID NO: 6466; WAN024BMY; Start 525; Stop 549
cgcttatggagatacaactggtgat

SEQ ID NO: 439401 - DNA, 25 bp, Artificial
  probe
  misc_feature (1)..(25): SEQ ID NO: 6466; WAN024BMY; Start 518; Stop 542
aatcctacgcttatggagatacaac

SEQ ID NO: 439402 - DNA, 25 bp, Artificial
  probe
  misc_feature (1)..(25): SEQ ID NO: 6466; WAN024BMY; Start 440; Stop 464
atactggagaagtgattcctatgtg

SEQ ID NO: 439403 - DNA, 25 bp, Artificial
  probe
  misc_feature (1)..(25): SEQ ID NO: 6466; WAN024BMY; Start 521; Stop 545
cctacgcttatggagatacaactgg

SEQ ID NO: 439404 - DNA, 25 bp, Artificial
  probe
  misc_feature (1)..(25): SEQ ID NO: 6466; WAN024BMY; Start 519; Stop 543
atcctacgcttatggagatacaact

SEQ ID NO: 439405 - DNA, 25 bp, Artificial
  probe
  misc_feature (1)..(25): SEQ ID NO: 6466; WAN024BMY; Start 441; Stop 465
tactggagaagtgattcctatgtgg

SEQ ID NO: 439406 - DNA, 25 bp, Artificial
  probe
  misc_feature (1)..(25): SEQ ID NO: 6466; WAN024BMY; Start 578; Stop 602
cgacagcaataaatcccaataagaa

SEQ ID NO: 439407 - DNA, 25 bp, Artificial
  probe
  misc_feature (1)..(25): SEQ ID NO: 6466; WAN024BMY; Start 404; Stop 428
ggtatgcaagcaattatcttcaact

SEQ ID NO: 439408 - DNA, 25 bp, Artificial
  probe
  misc_feature (1)..(25): SEQ ID NO: 6466; WAN024BMY; Start 403; Stop 427
tggtatgcaagcaattatcttcaac

SEQ ID NO: 439409 - DNA, 25 bp, Artificial
  probe
  misc_feature (1)..(25): SEQ ID NO: 6466; WAN024BMY; Start 402; Stop 426
ctggtatgcaagcaattatcttcaa

SEQ ID NO: 439410 - DNA, 25 bp, Artificial
  probe
  misc_feature (1)..(25): SEQ ID NO: 6466; WAN024BMY; Start 575; Stop 599
ttccgacagcaataaatcccaataa

SEQ ID NO: 439411 - DNA, 25 bp, Artificial
  probe
  misc_feature (1)..(25): SEQ ID NO: 6466; WAN024BMY; Start 168; Stop 192
tgatgactatctctatattgctgca

SEQ ID NO: 439412 - DNA, 25 bp, Artificial
  probe
  misc_feature (1)..(25): SEQ ID NO: 6466; WAN024BMY; Start 574; Stop 598
tttccgacagcaataaatcccaata

SEQ ID NO: 439413 - DNA, 25 bp, Artificial
  probe
  misc_feature (1)..(25): SEQ ID NO: 6466; WAN024BMY; Start 401; Stop 425
tctggtatgcaagcaattatcttca

SEQ ID NO: 439414 - DNA, 25 bp, Artificial
  probe
  misc_feature (1)..(25): SEQ ID NO: 6466; WAN024BMY; Start 400; Stop 424
atctggtatgcaagcaattatcttc

SEQ ID NO: 439415 - DNA, 25 bp, Artificial
  probe
  misc_feature (1)..(25): SEQ ID NO: 6466; WAN024BMY; Start 81; Stop 105
gtgtgtttcctatgatgtatttcca

SEQ ID NO: 439416 - DNA, 25 bp, Artificial
  probe
  misc_feature (1)..(25): SEQ ID NO: 6466; WAN024BMY; Start 520; Stop 544
tcctacgcttatggagatacaactg

SEQ ID NO: 439417 - DNA, 25 bp, Artificial
  probe
  misc_feature (1)..(25): SEQ ID NO: 6466; WAN024BMY; Start 173; Stop 197
actatctctatattgctgcaacact

SEQ ID NO: 439418 - DNA, 25 bp, Artificial
  probe
  misc_feature (1)..(25): SEQ ID NO: 6466; WAN024BMY; Start 171; Stop 195
tgactatctctatattgctgcaaca

SEQ ID NO: 439419 - DNA, 25 bp, Artificial
  probe
  misc_feature (1)..(25): SEQ ID NO: 6466; WAN024BMY; Start 439; Stop 463
tatactggagaagtgattcctatgt

SEQ ID NO: 439420 - DNA, 25 bp, Artificial
  probe
  misc_feature (1)..(25): SEQ ID NO: 6466; WAN024BMY; Start 577; Stop 601
ccgacagcaataaatcccaataaga

SEQ ID NO: 439421 - DNA, 25 bp, Artificial
  probe
  misc_feature (1)..(25): SEQ ID NO: 6466; WAN024BMY; Start 576; Stop 600
tccgacagcaataaatcccaataag

SEQ ID NO: 439422 - DNA, 25 bp, Artificial
  probe
  misc_feature (1)..(25): SEQ ID NO: 6466; WAN024BMY; Start 80; Stop 104
agtgtgtttcctatgatgtatttcc

SEQ ID NO: 439423 - DNA, 25 bp, Artificial
  probe
  misc_feature (1)..(25): SEQ ID NO: 6466; WAN024BMY; Start 172; Stop 196
gactatctctatattgctgcaacac

SEQ ID NO: 439424 - DNA, 25 bp, Artificial
  probe
  misc_feature (1)..(25): SEQ ID NO: 6466; WAN024BMY; Start 527; Stop 551
cttatggagatacaactggtgattt

SEQ ID NO: 439425 - DNA, 25 bp, Artificial
  probe
  misc_feature (1)..(25): SEQ ID NO: 6466; WAN024BMY; Start 350; Stop 374
ggtctcctgatttcttagtctcaaa

SEQ ID NO: 439426 - DNA, 25 bp, Artificial
  probe
  misc_feature (1)..(25): SEQ ID NO: 6466; WAN024BMY; Start 174; Stop 198
ctatctctatattgctgcaacactt

SEQ ID NO: 439427 - DNA, 25 bp, Artificial
  probe
  misc_feature (1)..(25): SEQ ID NO: 6466; WAN024BMY; Start 82; Stop 106
tgtgtttcctatgatgtatttccaa

SEQ ID NO: 439428 - DNA, 25 bp, Artificial
  probe
  misc_feature (1)..(25): SEQ ID NO: 6466; WAN024BMY; Start 405; Stop 429
gtatgcaagcaattatcttcaactt

SEQ ID NO: 439429 - DNA, 25 bp, Artificial
  probe
  misc_feature (1)..(25): SEQ ID NO: 6467; WAN024BNB; Start 44; Stop 68
acgataatcttactaaatcagagaa

SEQ ID NO: 439430 - DNA, 25 bp, Artificial
  probe
  misc_feature (1)..(25): SEQ ID NO: 6468; WAN024BPD; Start 159; Stop 183
aaggcacaatgtaacaagaggattt

SEQ ID NO: 439431 - DNA, 25 bp, Artificial
  probe
  misc_feature (1)..(25): SEQ ID NO: 6468; WAN024BPD; Start 158; Stop 182
aaaggcacaatgtaacaagaggatt

SEQ ID NO: 439432 - DNA, 25 bp, Artificial
  probe
  misc_feature (1)..(25): SEQ ID NO: 6468; WAN024BPD; Start 261; Stop 285
gacattgtggatgcaaggatatgaa

SEQ ID NO: 439433 - DNA, 25 bp, Artificial
  probe
  misc_feature (1)..(25): SEQ ID NO: 6468; WAN024BPD; Start 92; Stop 116
taggaaagtttcttggacaaatacc

SEQ ID NO: 439434 - DNA, 25 bp, Artificial
  probe
  misc_feature (1)..(25): SEQ ID NO: 6468; WAN024BPD; Start 814; Stop 838
tggttagaaagtcatttaggagatg

SEQ ID NO: 439435 - DNA, 25 bp, Artificial
  probe
  misc_feature (1)..(25): SEQ ID NO: 6468; WAN024BPD; Start 495; Stop 519
gacatgggtagatgcgactatatat

SEQ ID NO: 439436 - DNA, 25 bp, Artificial
  probe
  misc_feature (1)..(25): SEQ ID NO: 6468; WAN024BPD; Start 459; Stop 483
tatattaagagtttcattgctggca

SEQ ID NO: 439437 - DNA, 25 bp, Artificial
  probe
  misc_feature (1)..(25): SEQ ID NO: 6468; WAN024BPD; Start 812; Stop 836
tttggttagaaagtcatttaggaga

SEQ ID NO: 439438 - DNA, 25 bp, Artificial
  probe
  misc_feature (1)..(25): SEQ ID NO: 6468; WAN024BPD; Start 494; Stop 518
ggacatgggtagatgcgactatata

SEQ ID NO: 439439 - DNA, 25 bp, Artificial
  probe
  misc_feature (1)..(25): SEQ ID NO: 6468; WAN024BPD; Start 89; Stop 113
tgttaggaaagtttcttggacaaat

SEQ ID NO: 439440 - DNA, 25 bp, Artificial
  probe
  misc_feature (1)..(25): SEQ ID NO: 6468; WAN024BPD; Start 86; Stop 110
aattgttaggaaagtttcttggaca

SEQ ID NO: 439441 - DNA, 25 bp, Artificial
  probe
  misc_feature (1)..(25): SEQ ID NO: 6468; WAN024BPD; Start 813; Stop 837
ttggttagaaagtcatttaggagat

SEQ ID NO: 439442 - DNA, 25 bp, Artificial
  probe
  misc_feature (1)..(25): SEQ ID NO: 6468; WAN024BPD; Start 484; Stop 508
aaatatggagggacatgggtagatg

SEQ ID NO: 439443 - DNA, 25 bp, Artificial
  probe
  misc_feature (1)..(25): SEQ ID NO: 6468; WAN024BPD; Start 258; Stop 282
ttggacattgtggatgcaaggatat

SEQ ID NO: 439444 - DNA, 25 bp, Artificial
  probe
  misc_feature (1)..(25): SEQ ID NO: 6468; WAN024BPD; Start 94; Stop 118
ggaaagtttcttggacaaataccat

SEQ ID NO: 439445 - DNA, 25 bp, Artificial
  probe
  misc_feature (1)..(25): SEQ ID NO: 6468; WAN024BPD; Start 93; Stop 117
aggaaagtttcttggacaaatacca

SEQ ID NO: 439446 - DNA, 25 bp, Artificial
  probe
  misc_feature (1)..(25): SEQ ID NO: 6468; WAN024BPD; Start 461; Stop 485
tattaagagtttcattgctggcaaa

SEQ ID NO: 439447 - DNA, 25 bp, Artificial
  probe
  misc_feature (1)..(25): SEQ ID NO: 6468; WAN024BPD; Start 460; Stop 484
atattaagagtttcattgctggcaa

SEQ ID NO: 439448 - DNA, 25 bp, Artificial
  probe
  misc_feature (1)..(25): SEQ ID NO: 6468; WAN024BPD; Start 251; Stop 275
aaattatttggacattgtggatgca

SEQ ID NO: 439449 - DNA, 25 bp, Artificial
  probe
  misc_feature (1)..(25): SEQ ID NO: 6468; WAN024BPD; Start 91; Stop 115
ttaggaaagtttcttggacaaatac

SEQ ID NO: 439450 - DNA, 25 bp, Artificial
  probe
  misc_feature (1)..(25): SEQ ID NO: 6468; WAN024BPD; Start 90; Stop 114
gttaggaaagtttcttggacaaata

SEQ ID NO: 439451 - DNA, 25 bp, Artificial
  probe
  misc_feature (1)..(25): SEQ ID NO: 6468; WAN024BPD; Start 574; Stop 598
acaggaggaatagaggattattctc

SEQ ID NO: 439452 - DNA, 25 bp, Artificial
  probe
  misc_feature (1)..(25): SEQ ID NO: 6468; WAN024BPD; Start 252; Stop 276
aattatttggacattgtggatgcaa

SEQ ID NO: 439453 - DNA, 25 bp, Artificial
  probe
  misc_feature (1)..(25): SEQ ID NO: 6468; WAN024BPD; Start 458; Stop 482
atatattaagagtttcattgctggc

SEQ ID NO: 439454 - DNA, 25 bp, Artificial
  probe
  misc_feature (1)..(25): SEQ ID NO: 6468; WAN024BPD; Start 253; Stop 277
attatttggacattgtggatgcaag

SEQ ID NO: 439455 - DNA, 25 bp, Artificial
  probe
  misc_feature (1)..(25): SEQ ID NO: 6468; WAN024BPD; Start 744; Stop 768
agcttacaaatacgatgagaagatt

SEQ ID NO: 439456 - DNA, 25 bp, Artificial
  probe
  misc_feature (1)..(25): SEQ ID NO: 6468; WAN024BPD; Start 745; Stop 769
gcttacaaatacgatgagaagatta

SEQ ID NO: 439457 - DNA, 25 bp, Artificial
  probe
  misc_feature (1)..(25): SEQ ID NO: 6468; WAN024BPD; Start 260; Stop 284
ggacattgtggatgcaaggatatga

SEQ ID NO: 439458 - DNA, 25 bp, Artificial
  probe
  misc_feature (1)..(25): SEQ ID NO: 6468; WAN024BPD; Start 262; Stop 286
acattgtggatgcaaggatatgaaa

SEQ ID NO: 439459 - DNA, 25 bp, Artificial
  probe
  misc_feature (1)..(25): SEQ ID NO: 6468; WAN024BPD; Start 573; Stop 597
aacaggaggaatagaggattattct

SEQ ID NO: 439460 - DNA, 25 bp, Artificial
  probe
  misc_feature (1)..(25): SEQ ID NO: 6468; WAN024BPD; Start 259; Stop 283
tggacattgtggatgcaaggatatg

SEQ ID NO: 439461 - DNA, 25 bp, Artificial
  probe
  misc_feature (1)..(25): SEQ ID NO: 6468; WAN024BPD; Start 455; Stop 479
cggatatattaagagtttcattgct

SEQ ID NO: 439462 - DNA, 25 bp, Artificial
  probe
  misc_feature (1)..(25): SEQ ID NO: 6468; WAN024BPD; Start 454; Stop 478
tcggatatattaagagtttcattgc

SEQ ID NO: 439463 - DNA, 25 bp, Artificial
  probe
  misc_feature (1)..(25): SEQ ID NO: 6469; WAN024DRO; Start 167; Stop 191
ctaagaaagattacgaaacggctaa

SEQ ID NO: 439464 - DNA, 25 bp, Artificial
  probe
  misc_feature (1)..(25): SEQ ID NO: 6469; WAN024DRO; Start 168; Stop 192
taagaaagattacgaaacggctaaa

SEQ ID NO: 439465 - DNA, 25 bp, Artificial
  probe
  misc_feature (1)..(25): SEQ ID NO: 6469; WAN024DRO; Start 166; Stop 190
gctaagaaagattacgaaacggcta

SEQ ID NO: 439466 - DNA, 25 bp, Artificial
  probe
  misc_feature (1)..(25): SEQ ID NO: 6469; WAN024DRO; Start 161; Stop 185
aagctgctaagaaagattacgaaac

SEQ ID NO: 439467 - DNA, 25 bp, Artificial
  probe
  misc_feature (1)..(25): SEQ ID NO: 6469; WAN024DRO; Start 160; Stop 184
gaagctgctaagaaagattacgaaa

SEQ ID NO: 439468 - DNA, 25 bp, Artificial
  probe
  misc_feature (1)..(25): SEQ ID NO: 6469; WAN024DRO; Start 159; Stop 183
tgaagctgctaagaaagattacgaa

SEQ ID NO: 439469 - DNA, 25 bp, Artificial
  probe
  misc_feature (1)..(25): SEQ ID NO: 6469; WAN024DRO; Start 164; Stop 188
ctgctaagaaagattacgaaacggc

SEQ ID NO: 439470 - DNA, 25 bp, Artificial
  probe
  misc_feature (1)..(25): SEQ ID NO: 6469; WAN024DRO; Start 163; Stop 187
gctgctaagaaagattacgaaacgg

SEQ ID NO: 439471 - DNA, 25 bp, Artificial
  probe
  misc_feature (1)..(25): SEQ ID NO: 6469; WAN024DRO; Start 158; Stop 182
ctgaagctgctaagaaagattacga

SEQ ID NO: 439472 - DNA, 25 bp, Artificial
  probe
  misc_feature (1)..(25): SEQ ID NO: 6469; WAN024DRO; Start 157; Stop 181
tctgaagctgctaagaaagattacg

SEQ ID NO: 439473 - DNA, 25 bp, Artificial
  probe
  misc_feature (1)..(25): SEQ ID NO: 6469; WAN024DRO; Start 165; Stop 189
tgctaagaaagattacgaaacggct

SEQ ID NO: 439474 - DNA, 25 bp, Artificial
  probe
  misc_feature (1)..(25): SEQ ID NO: 6469; WAN024DRO; Start 162; Stop 186
agctgctaagaaagattacgaaacg

SEQ ID NO: 439475 - DNA, 25 bp, Artificial
  probe
  misc_feature (1)..(25): SEQ ID NO: 6469; WAN024DRO; Start 110; Stop 134
ctaaccagtctaaagctgagaaaga

SEQ ID NO: 439476 - DNA, 25 bp, Artificial
  probe
  misc_feature (1)..(25): SEQ ID NO: 6469; WAN024DRO; Start 156; Stop 180
atctgaagctgctaagaaagattac

SEQ ID NO: 439477 - DNA, 25 bp, Artificial
  probe
  misc_feature (1)..(25): SEQ ID NO: 6469; WAN024DRO; Start 109; Stop 133
gctaaccagtctaaagctgagaaag

SEQ ID NO: 439478 - DNA, 25 bp, Artificial
  probe
  misc_feature (1)..(25): SEQ ID NO: 6469; WAN024DRO; Start 111; Stop 135
taaccagtctaaagctgagaaagac

SEQ ID NO: 439479 - DNA, 25 bp, Artificial
  probe
  misc_feature (1)..(25): SEQ ID NO: 6469; WAN024DRO; Start 153; Stop 177
aaaatctgaagctgctaagaaagat

SEQ ID NO: 439480 - DNA, 25 bp, Artificial
  probe
  misc_feature (1)..(25): SEQ ID NO: 6469; WAN024DRO; Start 101; Stop 125
ctcctgtagctaaccagtctaaagc

SEQ ID NO: 439481 - DNA, 25 bp, Artificial
  probe
  misc_feature (1)..(25): SEQ ID NO: 6469; WAN024DRO; Start 100; Stop 124
gctcctgtagctaaccagtctaaag

SEQ ID NO: 439482 - DNA, 25 bp, Artificial
  probe
  misc_feature (1)..(25): SEQ ID NO: 6469; WAN024DRO; Start 236; Stop 260
agaaaactgaggcaaaagcggaaaa

SEQ ID NO: 439483 - DNA, 25 bp, Artificial
  probe
  misc_feature (1)..(25): SEQ ID NO: 6469; WAN024DRO; Start 235; Stop 259
aagaaaactgaggcaaaagcggaaa

SEQ ID NO: 439484 - DNA, 25 bp, Artificial
  probe
  misc_feature (1)..(25): SEQ ID NO: 6469; WAN024DRO; Start 154; Stop 178
aaatctgaagctgctaagaaagatt

SEQ ID NO: 439485 - DNA, 25 bp, Artificial
  probe
  misc_feature (1)..(25): SEQ ID NO: 6469; WAN024DRO; Start 155; Stop 179
aatctgaagctgctaagaaagatta

SEQ ID NO: 439486 - DNA, 25 bp, Artificial
  probe
  misc_feature (1)..(25): SEQ ID NO: 6469; WAN024DRO; Start 229; Stop 253
gatcagaagaaaactgaggcaaaag

SEQ ID NO: 439487 - DNA, 25 bp, Artificial
  probe
  misc_feature (1)..(25): SEQ ID NO: 6469; WAN024DRO; Start 234; Stop 258
gaagaaaactgaggcaaaagcggaa

SEQ ID NO: 439488 - DNA, 25 bp, Artificial
  probe
  misc_feature (1)..(25): SEQ ID NO: 6469; WAN024DRO; Start 108; Stop 132
agctaaccagtctaaagctgagaaa

SEQ ID NO: 439489 - DNA, 25 bp, Artificial
  probe
  misc_feature (1)..(25): SEQ ID NO: 6469; WAN024DRO; Start 18; Stop 42
gattttaacaagcctagccagcgtc

SEQ ID NO: 439490 - DNA, 25 bp, Artificial
  probe
  misc_feature (1)..(25): SEQ ID NO: 6469; WAN024DRO; Start 228; Stop 252
ggatcagaagaaaactgaggcaaaa

SEQ ID NO: 439491 - DNA, 25 bp, Artificial
  probe
  misc_feature (1)..(25): SEQ ID NO: 6469; WAN024DRO; Start 230; Stop 254
atcagaagaaaactgaggcaaaagc

SEQ ID NO: 439492 - DNA, 25 bp, Artificial
  probe
  misc_feature (1)..(25): SEQ ID NO: 6469; WAN024DRO; Start 227; Stop 251
aggatcagaagaaaactgaggcaaa

SEQ ID NO: 439493 - DNA, 25 bp, Artificial
  probe
  misc_feature (1)..(25): SEQ ID NO: 6469; WAN024DRO; Start 224; Stop 248
atgaggatcagaagaaaactgaggc

SEQ ID NO: 439494 - DNA, 25 bp, Artificial
  probe
  misc_feature (1)..(25): SEQ ID NO: 6469; WAN024DRO; Start 98; Stop 122
aagctcctgtagctaaccagtctaa

SEQ ID NO: 439495 - DNA, 25 bp, Artificial
  probe
  misc_feature (1)..(25): SEQ ID NO: 6469; WAN024DRO; Start 226; Stop 250
gaggatcagaagaaaactgaggcaa

SEQ ID NO: 439496 - DNA, 25 bp, Artificial
  probe
  misc_feature (1)..(25): SEQ ID NO: 6470; WAN024DRN; Start 407; Stop 431
aagataatgctaattcaggttccga

SEQ ID NO: 439497 - DNA, 25 bp, Artificial
  probe
  misc_feature (1)..(25): SEQ ID NO: 6470; WAN024DRN; Start 408; Stop 432
agataatgctaattcaggttccgaa

SEQ ID NO: 439498 - DNA, 25 bp, Artificial
  probe
  misc_feature (1)..(25): SEQ ID NO: 6470; WAN024DRN; Start 409; Stop 433
gataatgctaattcaggttccgaag

SEQ ID NO: 439499 - DNA, 25 bp, Artificial
  probe
  misc_feature (1)..(25): SEQ ID NO: 6470; WAN024DRN; Start 896; Stop 920
aagactattggacttcaggtgatga

SEQ ID NO: 439500 - DNA, 25 bp, Artificial
  probe
  misc_feature (1)..(25): SEQ ID NO: 6470; WAN024DRN; Start 897; Stop 921
agactattggacttcaggtgatgag

SEQ ID NO: 439501 - DNA, 25 bp, Artificial
  probe
  misc_feature (1)..(25): SEQ ID NO: 6470; WAN024DRN; Start 683; Stop 707
tggcaacagagtattctaataatca

SEQ ID NO: 439502 - DNA, 25 bp, Artificial
  probe
  misc_feature (1)..(25): SEQ ID NO: 6470; WAN024DRN; Start 681; Stop 705
cctggcaacagagtattctaataat

SEQ ID NO: 439503 - DNA, 25 bp, Artificial
  probe
  misc_feature (1)..(25): SEQ ID NO: 6470; WAN024DRN; Start 680; Stop 704
gcctggcaacagagtattctaataa

SEQ ID NO: 439504 - DNA, 25 bp, Artificial
  probe
  misc_feature (1)..(25): SEQ ID NO: 6470; WAN024DRN; Start 763; Stop 787
gactacaacgaacaaatctctgaag

SEQ ID NO: 439505 - DNA, 25 bp, Artificial
  probe
  misc_feature (1)..(25): SEQ ID NO: 6470; WAN024DRN; Start 900; Stop 924
ctattggacttcaggtgatgaggac

SEQ ID NO: 439506 - DNA, 25 bp, Artificial
  probe
  misc_feature (1)..(25): SEQ ID NO: 6470; WAN024DRN; Start 898; Stop 922
gactattggacttcaggtgatgagg

SEQ ID NO: 439507 - DNA, 25 bp, Artificial
  probe
  misc_feature (1)..(25): SEQ ID NO: 6470; WAN024DRN; Start 880; Stop 904
aatggagagggtgtagaagactatt

SEQ ID NO: 439508 - DNA, 25 bp, Artificial
  probe
  misc_feature (1)..(25): SEQ ID NO: 6470; WAN024DRN; Start 879; Stop 903
aaatggagagggtgtagaagactat

SEQ ID NO: 439509 - DNA, 25 bp, Artificial
  probe
  misc_feature (1)..(25): SEQ ID NO: 6470; WAN024DRN; Start 765; Stop 789
ctacaacgaacaaatctctgaagga

SEQ ID NO: 439510 - DNA, 25 bp, Artificial
  probe
  misc_feature (1)..(25): SEQ ID NO: 6470; WAN024DRN; Start 121; Stop 145
gctccaacttacgatgatttactga

SEQ ID NO: 439511 - DNA, 25 bp, Artificial
  probe
  misc_feature (1)..(25): SEQ ID NO: 6470; WAN024DRN; Start 401; Stop 425
gggctaaagataatgctaattcagg

SEQ ID NO: 439512 - DNA, 25 bp, Artificial
  probe
  misc_feature (1)..(25): SEQ ID NO: 6470; WAN024DRN; Start 192; Stop 216
acgcacagacttaacagatgaacaa

SEQ ID NO: 439513 - DNA, 25 bp, Artificial
  probe
  misc_feature (1)..(25): SEQ ID NO: 6470; WAN024DRN; Start 191; Stop 215
aacgcacagacttaacagatgaaca

SEQ ID NO: 439514 - DNA, 25 bp, Artificial
  probe
  misc_feature (1)..(25): SEQ ID NO: 6470; WAN024DRN; Start 124; Stop 148
ccaacttacgatgatttactgaagc

SEQ ID NO: 439515 - DNA, 25 bp, Artificial
  probe
  misc_feature (1)..(25): SEQ ID NO: 6470; WAN024DRN; Start 881; Stop 905
atggagagggtgtagaagactattg

SEQ ID NO: 439516 - DNA, 25 bp, Artificial
  probe
  misc_feature (1)..(25): SEQ ID NO: 6470; WAN024DRN; Start 764; Stop 788
actacaacgaacaaatctctgaagg

SEQ ID NO: 439517 - DNA, 25 bp, Artificial
  probe
  misc_feature (1)..(25): SEQ ID NO: 6470; WAN024DRN; Start 406; Stop 430
aaagataatgctaattcaggttccg

SEQ ID NO: 439518 - DNA, 25 bp, Artificial
  probe
  misc_feature (1)..(25): SEQ ID NO: 6470; WAN024DRN; Start 899; Stop 923
actattggacttcaggtgatgagga

SEQ ID NO: 439519 - DNA, 25 bp, Artificial
  probe
  misc_feature (1)..(25): SEQ ID NO: 6470; WAN024DRN; Start 122; Stop 146
ctccaacttacgatgatttactgaa

SEQ ID NO: 439520 - DNA, 25 bp, Artificial
  probe
  misc_feature (1)..(25): SEQ ID NO: 6470; WAN024DRN; Start 762; Stop 786
agactacaacgaacaaatctctgaa

SEQ ID NO: 439521 - DNA, 25 bp, Artificial
  probe
  misc_feature (1)..(25): SEQ ID NO: 6470; WAN024DRN; Start 761; Stop 785
aagactacaacgaacaaatctctga

SEQ ID NO: 439522 - DNA, 25 bp, Artificial
  probe
  misc_feature (1)..(25): SEQ ID NO: 6470; WAN024DRN; Start 760; Stop 784
aaagactacaacgaacaaatctctg

SEQ ID NO: 439523 - DNA, 25 bp, Artificial
  probe
  misc_feature (1)..(25): SEQ ID NO: 6470; WAN024DRN; Start 758; Stop 782
tgaaagactacaacgaacaaatctc

SEQ ID NO: 439524 - DNA, 25 bp, Artificial
  probe
  misc_feature (1)..(25): SEQ ID NO: 6470; WAN024DRN; Start 396; Stop 420
tgtttgggctaaagataatgctaat

SEQ ID NO: 439525 - DNA, 25 bp, Artificial
  probe
  misc_feature (1)..(25): SEQ ID NO: 6470; WAN024DRN; Start 395; Stop 419
atgtttgggctaaagataatgctaa

SEQ ID NO: 439526 - DNA, 25 bp, Artificial
  probe
  misc_feature (1)..(25): SEQ ID NO: 6470; WAN024DRN; Start 394; Stop 418
aatgtttgggctaaagataatgcta

SEQ ID NO: 439527 - DNA, 25 bp, Artificial
  probe
  misc_feature (1)..(25): SEQ ID NO: 6470; WAN024DRN; Start 793; Stop 817
gaaactcttatccttgcgattcaaa

SEQ ID NO: 439528 - DNA, 25 bp, Artificial
  probe
  misc_feature (1)..(25): SEQ ID NO: 6470; WAN024DRN; Start 759; Stop 783
gaaagactacaacgaacaaatctct

SEQ ID NO: 439529 - DNA, 25 bp, Artificial
  probe
  misc_feature (1)..(25): SEQ ID NO: 6471; WAN024DRS; Start 316; Stop 340
gcgtatgtagaatatagagaagcga

SEQ ID NO: 439530 - DNA, 25 bp, Artificial
  probe
  misc_feature (1)..(25): SEQ ID NO: 6471; WAN024DRS; Start 314; Stop 338
aggcgtatgtagaatatagagaagc

SEQ ID NO: 439531 - DNA, 25 bp, Artificial
  probe
  misc_feature (1)..(25): SEQ ID NO: 6471; WAN024DRS; Start 315; Stop 339
ggcgtatgtagaatatagagaagcg

SEQ ID NO: 439532 - DNA, 25 bp, Artificial
  probe
  misc_feature (1)..(25): SEQ ID NO: 6471; WAN024DRS; Start 519; Stop 543
taaggcagttcaagaggtagaagta

SEQ ID NO: 439533 - DNA, 25 bp, Artificial
  probe
  misc_feature (1)..(25): SEQ ID NO: 6471; WAN024DRS; Start 517; Stop 541
gataaggcagttcaagaggtagaag

SEQ ID NO: 439534 - DNA, 25 bp, Artificial
  probe
  misc_feature (1)..(25): SEQ ID NO: 6471; WAN024DRS; Start 524; Stop 548
cagttcaagaggtagaagtagagaa

SEQ ID NO: 439535 - DNA, 25 bp, Artificial
  probe
  misc_feature (1)..(25): SEQ ID NO: 6471; WAN024DRS; Start 518; Stop 542
ataaggcagttcaagaggtagaagt

SEQ ID NO: 439536 - DNA, 25 bp, Artificial
  probe
  misc_feature (1)..(25): SEQ ID NO: 6471; WAN024DRS; Start 512; Stop 536
aatatgataaggcagttcaagaggt

SEQ ID NO: 439537 - DNA, 25 bp, Artificial
  probe
  misc_feature (1)..(25): SEQ ID NO: 6471; WAN024DRS; Start 514; Stop 538
tatgataaggcagttcaagaggtag

SEQ ID NO: 439538 - DNA, 25 bp, Artificial
  probe
  misc_feature (1)..(25): SEQ ID NO: 6471; WAN024DRS; Start 523; Stop 547
gcagttcaagaggtagaagtagaga

SEQ ID NO: 439539 - DNA, 25 bp, Artificial
  probe
  misc_feature (1)..(25): SEQ ID NO: 6471; WAN024DRS; Start 515; Stop 539
atgataaggcagttcaagaggtaga

SEQ ID NO: 439540 - DNA, 25 bp, Artificial
  probe
  misc_feature (1)..(25): SEQ ID NO: 6471; WAN024DRS; Start 513; Stop 537
atatgataaggcagttcaagaggta

SEQ ID NO: 439541 - DNA, 25 bp, Artificial
  probe
  misc_feature (1)..(25): SEQ ID NO: 6471; WAN024DRS; Start 516; Stop 540
tgataaggcagttcaagaggtagaa

SEQ ID NO: 439542 - DNA, 25 bp, Artificial
  probe
  misc_feature (1)..(25): SEQ ID NO: 6471; WAN024DRS; Start 520; Stop 544
aaggcagttcaagaggtagaagtag

SEQ ID NO: 439543 - DNA, 25 bp, Artificial
  probe
  misc_feature (1)..(25): SEQ ID NO: 6471; WAN024DRS; Start 317; Stop 341
cgtatgtagaatatagagaagcgaa

SEQ ID NO: 439544 - DNA, 25 bp, Artificial
  probe
  misc_feature (1)..(25): SEQ ID NO: 6471; WAN024DRS; Start 522; Stop 546
ggcagttcaagaggtagaagtagag

SEQ ID NO: 439545 - DNA, 25 bp, Artificial
  probe
  misc_feature (1)..(25): SEQ ID NO: 6471; WAN024DRS; Start 313; Stop 337
aaggcgtatgtagaatatagagaag

SEQ ID NO: 439546 - DNA, 25 bp, Artificial
  probe
  misc_feature (1)..(25): SEQ ID NO: 6471; WAN024DRS; Start 521; Stop 545
aggcagttcaagaggtagaagtaga

SEQ ID NO: 439547 - DNA, 25 bp, Artificial
  probe
  misc_feature (1)..(25): SEQ ID NO: 6471; WAN024DRS; Start 263; Stop 287
cggttaagaaagttgatgaagaacg

SEQ ID NO: 439548 - DNA, 25 bp, Artificial
  probe
  misc_feature (1)..(25): SEQ ID NO: 6471; WAN024DRS; Start 525; Stop 549
agttcaagaggtagaagtagagaaa

SEQ ID NO: 439549 - DNA, 25 bp, Artificial
  probe
  misc_feature (1)..(25): SEQ ID NO: 6471; WAN024DRS; Start 511; Stop 535
aaatatgataaggcagttcaagagg

SEQ ID NO: 439550 - DNA, 25 bp, Artificial
  probe
  misc_feature (1)..(25): SEQ ID NO: 6471; WAN024DRS; Start 321; Stop 345
tgtagaatatagagaagcgaaagat

SEQ ID NO: 439551 - DNA, 25 bp, Artificial
  probe
  misc_feature (1)..(25): SEQ ID NO: 6471; WAN024DRS; Start 320; Stop 344
atgtagaatatagagaagcgaaaga

SEQ ID NO: 439552 - DNA, 25 bp, Artificial
  probe
  misc_feature (1)..(25): SEQ ID NO: 6471; WAN024DRS; Start 312; Stop 336
aaaggcgtatgtagaatatagagaa

SEQ ID NO: 439553 - DNA, 25 bp, Artificial
  probe
  misc_feature (1)..(25): SEQ ID NO: 6471; WAN024DRS; Start 326; Stop 350
aatatagagaagcgaaagataaagc

SEQ ID NO: 439554 - DNA, 25 bp, Artificial
  probe
  misc_feature (1)..(25): SEQ ID NO: 6471; WAN024DRS; Start 264; Stop 288
ggttaagaaagttgatgaagaacgt

SEQ ID NO: 439555 - DNA, 25 bp, Artificial
  probe
  misc_feature (1)..(25): SEQ ID NO: 6471; WAN024DRS; Start 445; Stop 469
aaggagttagctgctactaaacaaa

SEQ ID NO: 439556 - DNA, 25 bp, Artificial
  probe
  misc_feature (1)..(25): SEQ ID NO: 6471; WAN024DRS; Start 444; Stop 468
aaaggagttagctgctactaaacaa

SEQ ID NO: 439557 - DNA, 25 bp, Artificial
  probe
  misc_feature (1)..(25): SEQ ID NO: 6471; WAN024DRS; Start 443; Stop 467
caaaggagttagctgctactaaaca

SEQ ID NO: 439558 - DNA, 25 bp, Artificial
  probe
  misc_feature (1)..(25): SEQ ID NO: 6471; WAN024DRS; Start 265; Stop 289
gttaagaaagttgatgaagaacgtc

SEQ ID NO: 439559 - DNA, 25 bp, Artificial
  probe
  misc_feature (1)..(25): SEQ ID NO: 6471; WAN024DRS; Start 266; Stop 290
ttaagaaagttgatgaagaacgtca

SEQ ID NO: 439560 - DNA, 25 bp, Artificial
  probe
  misc_feature (1)..(25): SEQ ID NO: 6471; WAN024DRS; Start 564; Stop 588
acaagatgctgaaaacgaaaagaaa

SEQ ID NO: 439561 - DNA, 25 bp, Artificial
  probe
  misc_feature (1)..(25): SEQ ID NO: 6471; WAN024DRS; Start 563; Stop 587
aacaagatgctgaaaacgaaaagaa

SEQ ID NO: 439562 - DNA, 25 bp, Artificial
  probe
  misc_feature (1)..(25): SEQ ID NO: 6472; WAN024DS7; Start 131; Stop 155
aagactatgatacagcgaagagaga

SEQ ID NO: 439563 - DNA, 25 bp, Artificial
  probe
  misc_feature (1)..(25): SEQ ID NO: 6472; WAN024DS7; Start 132; Stop 156
agactatgatacagcgaagagagac

SEQ ID NO: 439564 - DNA, 25 bp, Artificial
  probe
  misc_feature (1)..(25): SEQ ID NO: 6472; WAN024DS7; Start 133; Stop 157
gactatgatacagcgaagagagacg

SEQ ID NO: 439565 - DNA, 25 bp, Artificial
  probe
  misc_feature (1)..(25): SEQ ID NO: 6472; WAN024DS7; Start 326; Stop 350
caggcgacagaagtaagattcagaa

SEQ ID NO: 439566 - DNA, 25 bp, Artificial
  probe
  misc_feature (1)..(25): SEQ ID NO: 6472; WAN024DS7; Start 130; Stop 154
aaagactatgatacagcgaagagag

SEQ ID NO: 439567 - DNA, 25 bp, Artificial
  probe
  misc_feature (1)..(25): SEQ ID NO: 6472; WAN024DS7; Start 129; Stop 153
gaaagactatgatacagcgaagaga

SEQ ID NO: 439568 - DNA, 25 bp, Artificial
  probe
  misc_feature (1)..(25): SEQ ID NO: 6472; WAN024DS7; Start 128; Stop 152
agaaagactatgatacagcgaagag

SEQ ID NO: 439569 - DNA, 25 bp, Artificial
  probe
  misc_feature (1)..(25): SEQ ID NO: 6472; WAN024DS7; Start 127; Stop 151
gagaaagactatgatacagcgaaga

SEQ ID NO: 439570 - DNA, 25 bp, Artificial
  probe
  misc_feature (1)..(25): SEQ ID NO: 6472; WAN024DS7; Start 126; Stop 150
tgagaaagactatgatacagcgaag

SEQ ID NO: 439571 - DNA, 25 bp, Artificial
  probe
  misc_feature (1)..(25): SEQ ID NO: 6472; WAN024DS7; Start 397; Stop 421
tttgataaggttagaggaaaggtga

SEQ ID NO: 439572 - DNA, 25 bp, Artificial
  probe
  misc_feature (1)..(25): SEQ ID NO: 6472; WAN024DS7; Start 399; Stop 423
tgataaggttagaggaaaggtgatt

SEQ ID NO: 439573 - DNA, 25 bp, Artificial
  probe
  misc_feature (1)..(25): SEQ ID NO: 6472; WAN024DS7; Start 398; Stop 422
ttgataaggttagaggaaaggtgat

SEQ ID NO: 439574 - DNA, 25 bp, Artificial
  probe
  misc_feature (1)..(25): SEQ ID NO: 6472; WAN024DS7; Start 324; Stop 348
aacaggcgacagaagtaagattcag

SEQ ID NO: 439575 - DNA, 25 bp, Artificial
  probe
  misc_feature (1)..(25): SEQ ID NO: 6472; WAN024DS7; Start 390; Stop 414
agcagaatttgataaggttagagga

SEQ ID NO: 439576 - DNA, 25 bp, Artificial
  probe
  misc_feature (1)..(25): SEQ ID NO: 6472; WAN024DS7; Start 76; Stop 100
cctactttggtaagagcagaagaag

SEQ ID NO: 439577 - DNA, 25 bp, Artificial
  probe
  misc_feature (1)..(25): SEQ ID NO: 6472; WAN024DS7; Start 329; Stop 353
gcgacagaagtaagattcagaaaga

SEQ ID NO: 439578 - DNA, 25 bp, Artificial
  probe
  misc_feature (1)..(25): SEQ ID NO: 6472; WAN024DS7; Start 341; Stop 365
agattcagaaagaaatggaggaagc

SEQ ID NO: 439579 - DNA, 25 bp, Artificial
  probe
  misc_feature (1)..(25): SEQ ID NO: 6472; WAN024DS7; Start 340; Stop 364
aagattcagaaagaaatggaggaag

SEQ ID NO: 439580 - DNA, 25 bp, Artificial
  probe
  misc_feature (1)..(25): SEQ ID NO: 6472; WAN024DS7; Start 330; Stop 354
cgacagaagtaagattcagaaagaa

SEQ ID NO: 439581 - DNA, 25 bp, Artificial
  probe
  misc_feature (1)..(25): SEQ ID NO: 6472; WAN024DS7; Start 391; Stop 415
gcagaatttgataaggttagaggaa

SEQ ID NO: 439582 - DNA, 25 bp, Artificial
  probe
  misc_feature (1)..(25): SEQ ID NO: 6472; WAN024DS7; Start 389; Stop 413
aagcagaatttgataaggttagagg

SEQ ID NO: 439583 - DNA, 25 bp, Artificial
  probe
  misc_feature (1)..(25): SEQ ID NO: 6472; WAN024DS7; Start 396; Stop 420
atttgataaggttagaggaaaggtg

SEQ ID NO: 439584 - DNA, 25 bp, Artificial
  probe
  misc_feature (1)..(25): SEQ ID NO: 6472; WAN024DS7; Start 400; Stop 424
gataaggttagaggaaaggtgattc

SEQ ID NO: 439585 - DNA, 25 bp, Artificial
  probe
  misc_feature (1)..(25): SEQ ID NO: 6472; WAN024DS7; Start 77; Stop 101
ctactttggtaagagcagaagaagc

SEQ ID NO: 439586 - DNA, 25 bp, Artificial
  probe
  misc_feature (1)..(25): SEQ ID NO: 6472; WAN024DS7; Start 338; Stop 362
gtaagattcagaaagaaatggagga

SEQ ID NO: 439587 - DNA, 25 bp, Artificial
  probe
  misc_feature (1)..(25): SEQ ID NO: 6472; WAN024DS7; Start 337; Stop 361
agtaagattcagaaagaaatggagg

SEQ ID NO: 439588 - DNA, 25 bp, Artificial
  probe
  misc_feature (1)..(25): SEQ ID NO: 6472; WAN024DS7; Start 328; Stop 352
ggcgacagaagtaagattcagaaag

SEQ ID NO: 439589 - DNA, 25 bp, Artificial
  probe
  misc_feature (1)..(25): SEQ ID NO: 6472; WAN024DS7; Start 125; Stop 149
ctgagaaagactatgatacagcgaa

SEQ ID NO: 439590 - DNA, 25 bp, Artificial
  probe
  misc_feature (1)..(25): SEQ ID NO: 6472; WAN024DS7; Start 327; Stop 351
aggcgacagaagtaagattcagaaa

SEQ ID NO: 439591 - DNA, 25 bp, Artificial
  probe
  misc_feature (1)..(25): SEQ ID NO: 6472; WAN024DS7; Start 325; Stop 349
acaggcgacagaagtaagattcaga

SEQ ID NO: 439592 - DNA, 25 bp, Artificial
  probe
  misc_feature (1)..(25): SEQ ID NO: 6472; WAN024DS7; Start 339; Stop 363
taagattcagaaagaaatggaggaa

SEQ ID NO: 439593 - DNA, 25 bp, Artificial
  probe
  misc_feature (1)..(25): SEQ ID NO: 6472; WAN024DS7; Start 395; Stop 419
aatttgataaggttagaggaaaggt

SEQ ID NO: 439594 - DNA, 25 bp, Artificial
  probe
  misc_feature (1)..(25): SEQ ID NO: 6472; WAN024DS7; Start 323; Stop 347
aaacaggcgacagaagtaagattca

SEQ ID NO: 439595 - DNA, 25 bp, Artificial
  probe
  misc_feature (1)..(25): SEQ ID NO: 6473; WAN024DRU; Start 437; Stop 461
ctaaagttctcgcaaaggtaattcc

SEQ ID NO: 439596 - DNA, 25 bp, Artificial
  probe
  misc_feature (1)..(25): SEQ ID NO: 6473; WAN024DRU; Start 251; Stop 275
ctgaggagaaagcgaaagaagtaaa

SEQ ID NO: 439597 - DNA, 25 bp, Artificial
  probe
  misc_feature (1)..(25): SEQ ID NO: 6473; WAN024DRU; Start 436; Stop 460
gctaaagttctcgcaaaggtaattc

SEQ ID NO: 439598 - DNA, 25 bp, Artificial
  probe
  misc_feature (1)..(25): SEQ ID NO: 6473; WAN024DRU; Start 439; Stop 463
aaagttctcgcaaaggtaattccta

SEQ ID NO: 439599 - DNA, 25 bp, Artificial
  probe
  misc_feature (1)..(25): SEQ ID NO: 6473; WAN024DRU; Start 438; Stop 462
taaagttctcgcaaaggtaattcct

SEQ ID NO: 439600 - DNA, 25 bp, Artificial
  probe
  misc_feature (1)..(25): SEQ ID NO: 6473; WAN024DRU; Start 250; Stop 274
actgaggagaaagcgaaagaagtaa

SEQ ID NO: 439601 - DNA, 25 bp, Artificial
  probe
  misc_feature (1)..(25): SEQ ID NO: 6473; WAN024DRU; Start 249; Stop 273
aactgaggagaaagcgaaagaagta

SEQ ID NO: 439602 - DNA, 25 bp, Artificial
  probe
  misc_feature (1)..(25): SEQ ID NO: 6473; WAN024DRU; Start 440; Stop 464
aagttctcgcaaaggtaattcctag

SEQ ID NO: 439603 - DNA, 25 bp, Artificial
  probe
  misc_feature (1)..(25): SEQ ID NO: 6473; WAN024DRU; Start 372; Stop 396
aactgaagctgagaaagtaatgact

SEQ ID NO: 439604 - DNA, 25 bp, Artificial
  probe
  misc_feature (1)..(25): SEQ ID NO: 6473; WAN024DRU; Start 371; Stop 395
gaactgaagctgagaaagtaatgac

SEQ ID NO: 439605 - DNA, 25 bp, Artificial
  probe
  misc_feature (1)..(25): SEQ ID NO: 6473; WAN024DRU; Start 370; Stop 394
agaactgaagctgagaaagtaatga

SEQ ID NO: 439606 - DNA, 25 bp, Artificial
  probe
  misc_feature (1)..(25): SEQ ID NO: 6473; WAN024DRU; Start 369; Stop 393
aagaactgaagctgagaaagtaatg

SEQ ID NO: 439607 - DNA, 25 bp, Artificial
  probe
  misc_feature (1)..(25): SEQ ID NO: 6473; WAN024DRU; Start 373; Stop 397
actgaagctgagaaagtaatgactg

SEQ ID NO: 439608 - DNA, 25 bp, Artificial
  probe
  misc_feature (1)..(25): SEQ ID NO: 6473; WAN024DRU; Start 65; Stop 89
ttacgtctcagcctactgttgtaag

SEQ ID NO: 439609 - DNA, 25 bp, Artificial
  probe
  misc_feature (1)..(25): SEQ ID NO: 6473; WAN024DRU; Start 248; Stop 272
aaactgaggagaaagcgaaagaagt

SEQ ID NO: 439610 - DNA, 25 bp, Artificial
  probe
  misc_feature (1)..(25): SEQ ID NO: 6473; WAN024DRU; Start 368; Stop 392
aaagaactgaagctgagaaagtaat

SEQ ID NO: 439611 - DNA, 25 bp, Artificial
  probe
  misc_feature (1)..(25): SEQ ID NO: 6473; WAN024DRU; Start 64; Stop 88
gttacgtctcagcctactgttgtaa

SEQ ID NO: 439612 - DNA, 25 bp, Artificial
  probe
  misc_feature (1)..(25): SEQ ID NO: 6473; WAN024DRU; Start 66; Stop 90
tacgtctcagcctactgttgtaaga

SEQ ID NO: 439613 - DNA, 25 bp, Artificial
  probe
  misc_feature (1)..(25): SEQ ID NO: 6473; WAN024DRU; Start 639; Stop 663
taaaatcgctgagttggaaaatgaa

SEQ ID NO: 439614 - DNA, 25 bp, Artificial
  probe
  misc_feature (1)..(25): SEQ ID NO: 6473; WAN024DRU; Start 638; Stop 662
ctaaaatcgctgagttggaaaatga

SEQ ID NO: 439615 - DNA, 25 bp, Artificial
  probe
  misc_feature (1)..(25): SEQ ID NO: 6473; WAN024DRU; Start 374; Stop 398
ctgaagctgagaaagtaatgactgc

SEQ ID NO: 439616 - DNA, 25 bp, Artificial
  probe
  misc_feature (1)..(25): SEQ ID NO: 6473; WAN024DRU; Start 252; Stop 276
tgaggagaaagcgaaagaagtaaaa

SEQ ID NO: 439617 - DNA, 25 bp, Artificial
  probe
  misc_feature (1)..(25): SEQ ID NO: 6473; WAN024DRU; Start 243; Stop 267
aaagaaaactgaggagaaagcgaaa

SEQ ID NO: 439618 - DNA, 25 bp, Artificial
  probe
  misc_feature (1)..(25): SEQ ID NO: 6473; WAN024DRU; Start 242; Stop 266
aaaagaaaactgaggagaaagcgaa

SEQ ID NO: 439619 - DNA, 25 bp, Artificial
  probe
  misc_feature (1)..(25): SEQ ID NO: 6473; WAN024DRU; Start 637; Stop 661
gctaaaatcgctgagttggaaaatg

SEQ ID NO: 439620 - DNA, 25 bp, Artificial
  probe
  misc_feature (1)..(25): SEQ ID NO: 6473; WAN024DRU; Start 239; Stop 263
atcaaaagaaaactgaggagaaagc

SEQ ID NO: 439621 - DNA, 25 bp, Artificial
  probe
  misc_feature (1)..(25): SEQ ID NO: 6473; WAN024DRU; Start 441; Stop 465
agttctcgcaaaggtaattcctagc

SEQ ID NO: 439622 - DNA, 25 bp, Artificial
  probe
  misc_feature (1)..(25): SEQ ID NO: 6473; WAN024DRU; Start 435; Stop 459
tgctaaagttctcgcaaaggtaatt

SEQ ID NO: 439623 - DNA, 25 bp, Artificial
  probe
  misc_feature (1)..(25): SEQ ID NO: 6473; WAN024DRU; Start 241; Stop 265
caaaagaaaactgaggagaaagcga

SEQ ID NO: 439624 - DNA, 25 bp, Artificial
  probe
  misc_feature (1)..(25): SEQ ID NO: 6473; WAN024DRU; Start 375; Stop 399
tgaagctgagaaagtaatgactgca

SEQ ID NO: 439625 - DNA, 25 bp, Artificial
  probe
  misc_feature (1)..(25): SEQ ID NO: 6473; WAN024DRU; Start 236; Stop 260
aggatcaaaagaaaactgaggagaa

SEQ ID NO: 439626 - DNA, 25 bp, Artificial
  probe
  misc_feature (1)..(25): SEQ ID NO: 6473; WAN024DRU; Start 235; Stop 259
gaggatcaaaagaaaactgaggaga

SEQ ID NO: 439627 - DNA, 25 bp, Artificial
  probe
  misc_feature (1)..(25): SEQ ID NO: 6473; WAN024DRU; Start 237; Stop 261
ggatcaaaagaaaactgaggagaaa

SEQ ID NO: 439628 - DNA, 25 bp, Artificial
  probe
  misc_feature (1)..(25): SEQ ID NO: 6474; WAN024DRQ; Start 297; Stop 321
taaggcaacagaagaagttcaacaa

SEQ ID NO: 439629 - DNA, 25 bp, Artificial
  probe
  misc_feature (1)..(25): SEQ ID NO: 6474; WAN024DRQ; Start 366; Stop 390
taagatgatagaagaggctcagaga

SEQ ID NO: 439630 - DNA, 25 bp, Artificial
  probe
  misc_feature (1)..(25): SEQ ID NO: 6474; WAN024DRQ; Start 365; Stop 389
ctaagatgatagaagaggctcagag

SEQ ID NO: 439631 - DNA, 25 bp, Artificial
  probe
  misc_feature (1)..(25): SEQ ID NO: 6474; WAN024DRQ; Start 296; Stop 320
ctaaggcaacagaagaagttcaaca

SEQ ID NO: 439632 - DNA, 25 bp, Artificial
  probe
  misc_feature (1)..(25): SEQ ID NO: 6474; WAN024DRQ; Start 367; Stop 391
aagatgatagaagaggctcagagac

SEQ ID NO: 439633 - DNA, 25 bp, Artificial
  probe
  misc_feature (1)..(25): SEQ ID NO: 6474; WAN024DRQ; Start 364; Stop 388
gctaagatgatagaagaggctcaga

SEQ ID NO: 439634 - DNA, 25 bp, Artificial
  probe
  misc_feature (1)..(25): SEQ ID NO: 6474; WAN024DRQ; Start 302; Stop 326
caacagaagaagttcaacaagcgta

SEQ ID NO: 439635 - DNA, 25 bp, Artificial
  probe
  misc_feature (1)..(25): SEQ ID NO: 6474; WAN024DRQ; Start 298; Stop 322
aaggcaacagaagaagttcaacaag

SEQ ID NO: 439636 - DNA, 25 bp, Artificial
  probe
  misc_feature (1)..(25): SEQ ID NO: 6474; WAN024DRQ; Start 307; Stop 331
gaagaagttcaacaagcgtacctag

SEQ ID NO: 439637 - DNA, 25 bp, Artificial
  probe
  misc_feature (1)..(25): SEQ ID NO: 6474; WAN024DRQ; Start 358; Stop 382
gaagcagctaagatgatagaagagg

SEQ ID NO: 439638 - DNA, 25 bp, Artificial
  probe
  misc_feature (1)..(25): SEQ ID NO: 6474; WAN024DRQ; Start 357; Stop 381
cgaagcagctaagatgatagaagag

SEQ ID NO: 439639 - DNA, 25 bp, Artificial
  probe
  misc_feature (1)..(25): SEQ ID NO: 6474; WAN024DRQ; Start 306; Stop 330
agaagaagttcaacaagcgtaccta

SEQ ID NO: 439640 - DNA, 25 bp, Artificial
  probe
  misc_feature (1)..(25): SEQ ID NO: 6474; WAN024DRQ; Start 764; Stop 788
ttgaggagttaagtgataagattga

SEQ ID NO: 439641 - DNA, 25 bp, Artificial
  probe
  misc_feature (1)..(25): SEQ ID NO: 6474; WAN024DRQ; Start 295; Stop 319
gctaaggcaacagaagaagttcaac

SEQ ID NO: 439642 - DNA, 25 bp, Artificial
  probe
  misc_feature (1)..(25): SEQ ID NO: 6474; WAN024DRQ; Start 303; Stop 327
aacagaagaagttcaacaagcgtac

SEQ ID NO: 439643 - DNA, 25 bp, Artificial
  probe
  misc_feature (1)..(25): SEQ ID NO: 6474; WAN024DRQ; Start 767; Stop 791
aggagttaagtgataagattgatga

SEQ ID NO: 439644 - DNA, 25 bp, Artificial
  probe
  misc_feature (1)..(25): SEQ ID NO: 6474; WAN024DRQ; Start 765; Stop 789
tgaggagttaagtgataagattgat

SEQ ID NO: 439645 - DNA, 25 bp, Artificial
  probe
  misc_feature (1)..(25): SEQ ID NO: 6474; WAN024DRQ; Start 768; Stop 792
ggagttaagtgataagattgatgag

SEQ ID NO: 439646 - DNA, 25 bp, Artificial
  probe
  misc_feature (1)..(25): SEQ ID NO: 6474; WAN024DRQ; Start 766; Stop 790
gaggagttaagtgataagattgatg

SEQ ID NO: 439647 - DNA, 25 bp, Artificial
  probe
  misc_feature (1)..(25): SEQ ID NO: 6474; WAN024DRQ; Start 691; Stop 715
gattatgctaaagaaggtttccgtg

SEQ ID NO: 439648 - DNA, 25 bp, Artificial
  probe
  misc_feature (1)..(25): SEQ ID NO: 6474; WAN024DRQ; Start 690; Stop 714
agattatgctaaagaaggtttccgt

SEQ ID NO: 439649 - DNA, 25 bp, Artificial
  probe
  misc_feature (1)..(25): SEQ ID NO: 6474; WAN024DRQ; Start 76; Stop 100
cctactttggtaagagcagaagaat

SEQ ID NO: 439650 - DNA, 25 bp, Artificial
  probe
  misc_feature (1)..(25): SEQ ID NO: 6474; WAN024DRQ; Start 763; Stop 787
cttgaggagttaagtgataagattg

SEQ ID NO: 439651 - DNA, 25 bp, Artificial
  probe
  misc_feature (1)..(25): SEQ ID NO: 6474; WAN024DRQ; Start 689; Stop 713
aagattatgctaaagaaggtttccg

SEQ ID NO: 439652 - DNA, 25 bp, Artificial
  probe
  misc_feature (1)..(25): SEQ ID NO: 6474; WAN024DRQ; Start 452; Stop 476
cagaacagttagctgagactaagaa

SEQ ID NO: 439653 - DNA, 25 bp, Artificial
  probe
  misc_feature (1)..(25): SEQ ID NO: 6474; WAN024DRQ; Start 77; Stop 101
ctactttggtaagagcagaagaatc

SEQ ID NO: 439654 - DNA, 25 bp, Artificial
  probe
  misc_feature (1)..(25): SEQ ID NO: 6474; WAN024DRQ; Start 78; Stop 102
tactttggtaagagcagaagaatct

SEQ ID NO: 439655 - DNA, 25 bp, Artificial
  probe
  misc_feature (1)..(25): SEQ ID NO: 6474; WAN024DRQ; Start 356; Stop 380
ccgaagcagctaagatgatagaaga

SEQ ID NO: 439656 - DNA, 25 bp, Artificial
  probe
  misc_feature (1)..(25): SEQ ID NO: 6474; WAN024DRQ; Start 359; Stop 383
aagcagctaagatgatagaagaggc

SEQ ID NO: 439657 - DNA, 25 bp, Artificial
  probe
  misc_feature (1)..(25): SEQ ID NO: 6474; WAN024DRQ; Start 368; Stop 392
agatgatagaagaggctcagagacg

SEQ ID NO: 439658 - DNA, 25 bp, Artificial
  probe
  misc_feature (1)..(25): SEQ ID NO: 6474; WAN024DRQ; Start 79; Stop 103
actttggtaagagcagaagaatctc

SEQ ID NO: 439659 - DNA, 25 bp, Artificial
  probe
  misc_feature (1)..(25): SEQ ID NO: 6474; WAN024DRQ; Start 449; Stop 473
aaccagaacagttagctgagactaa

SEQ ID NO: 439660 - DNA, 25 bp, Artificial
  probe
  misc_feature (1)..(25): SEQ ID NO: 6474; WAN024DRQ; Start 451; Stop 475
ccagaacagttagctgagactaaga

SEQ ID NO: 439661 - DNA, 25 bp, Artificial
  probe
  misc_feature (1)..(25): SEQ ID NO: 6475; WAN024DRV; Start 350; Stop 374
ttagtgaaagtccagacagaagaaa

SEQ ID NO: 439662 - DNA, 25 bp, Artificial
  probe
  misc_feature (1)..(25): SEQ ID NO: 6475; WAN024DRV; Start 349; Stop 373
cttagtgaaagtccagacagaagaa

SEQ ID NO: 439663 - DNA, 25 bp, Artificial
  probe
  misc_feature (1)..(25): SEQ ID NO: 6475; WAN024DRV; Start 475; Stop 499
aaagtaattcccaaagaaactgagt

SEQ ID NO: 439664 - DNA, 25 bp, Artificial
  probe
  misc_feature (1)..(25): SEQ ID NO: 6475; WAN024DRV; Start 479; Stop 503
taattcccaaagaaactgagttagc

SEQ ID NO: 439665 - DNA, 25 bp, Artificial
  probe
  misc_feature (1)..(25): SEQ ID NO: 6475; WAN024DRV; Start 335; Stop 359
aagcacaaagagaacttagtgaaag

SEQ ID NO: 439666 - DNA, 25 bp, Artificial
  probe
  misc_feature (1)..(25): SEQ ID NO: 6475; WAN024DRV; Start 334; Stop 358
aaagcacaaagagaacttagtgaaa

SEQ ID NO: 439667 - DNA, 25 bp, Artificial
  probe
  misc_feature (1)..(25): SEQ ID NO: 6475; WAN024DRV; Start 476; Stop 500
aagtaattcccaaagaaactgagtt

SEQ ID NO: 439668 - DNA, 25 bp, Artificial
  probe
  misc_feature (1)..(25): SEQ ID NO: 6475; WAN024DRV; Start 403; Stop 427
gcattatcttatattggagaggtag

SEQ ID NO: 439669 - DNA, 25 bp, Artificial
  probe
  misc_feature (1)..(25): SEQ ID NO: 6475; WAN024DRV; Start 485; Stop 509
ccaaagaaactgagttagctgttac

SEQ ID NO: 439670 - DNA, 25 bp, Artificial
  probe
  misc_feature (1)..(25): SEQ ID NO: 6475; WAN024DRV; Start 480; Stop 504
aattcccaaagaaactgagttagct

SEQ ID NO: 439671 - DNA, 25 bp, Artificial
  probe
  misc_feature (1)..(25): SEQ ID NO: 6475; WAN024DRV; Start 484; Stop 508
cccaaagaaactgagttagctgtta

SEQ ID NO: 439672 - DNA, 25 bp, Artificial
  probe
  misc_feature (1)..(25): SEQ ID NO: 6475; WAN024DRV; Start 478; Stop 502
gtaattcccaaagaaactgagttag

SEQ ID NO: 439673 - DNA, 25 bp, Artificial
  probe
  misc_feature (1)..(25): SEQ ID NO: 6475; WAN024DRV; Start 373; Stop 397
aaatctgctgctagaaagaaattag

SEQ ID NO: 439674 - DNA, 25 bp, Artificial
  probe
  misc_feature (1)..(25): SEQ ID NO: 6475; WAN024DRV; Start 486; Stop 510
caaagaaactgagttagctgttact

SEQ ID NO: 439675 - DNA, 25 bp, Artificial
  probe
  misc_feature (1)..(25): SEQ ID NO: 6475; WAN024DRV; Start 481; Stop 505
attcccaaagaaactgagttagctg

SEQ ID NO: 439676 - DNA, 25 bp, Artificial
  probe
  misc_feature (1)..(25): SEQ ID NO: 6475; WAN024DRV; Start 477; Stop 501
agtaattcccaaagaaactgagtta

SEQ ID NO: 439677 - DNA, 25 bp, Artificial
  probe
  misc_feature (1)..(25): SEQ ID NO: 6475; WAN024DRV; Start 409; Stop 433
tcttatattggagaggtagagttaa

SEQ ID NO: 439678 - DNA, 25 bp, Artificial
  probe
  misc_feature (1)..(25): SEQ ID NO: 6475; WAN024DRV; Start 402; Stop 426
tgcattatcttatattggagaggta

SEQ ID NO: 439679 - DNA, 25 bp, Artificial
  probe
  misc_feature (1)..(25): SEQ ID NO: 6475; WAN024DRV; Start 467; Stop 491
aacaagcaaaagtaattcccaaaga

SEQ ID NO: 439680 - DNA, 25 bp, Artificial
  probe
  misc_feature (1)..(25): SEQ ID NO: 6475; WAN024DRV; Start 447; Stop 471
ggaagcgaattttaatacggaacaa

SEQ ID NO: 439681 - DNA, 25 bp, Artificial
  probe
  misc_feature (1)..(25): SEQ ID NO: 6475; WAN024DRV; Start 353; Stop 377
gtgaaagtccagacagaagaaaatc

SEQ ID NO: 439682 - DNA, 25 bp, Artificial
  probe
  misc_feature (1)..(25): SEQ ID NO: 6475; WAN024DRV; Start 351; Stop 375
tagtgaaagtccagacagaagaaaa

SEQ ID NO: 439683 - DNA, 25 bp, Artificial
  probe
  misc_feature (1)..(25): SEQ ID NO: 6475; WAN024DRV; Start 408; Stop 432
atcttatattggagaggtagagtta

SEQ ID NO: 439684 - DNA, 25 bp, Artificial
  probe
  misc_feature (1)..(25): SEQ ID NO: 6475; WAN024DRV; Start 407; Stop 431
tatcttatattggagaggtagagtt

SEQ ID NO: 439685 - DNA, 25 bp, Artificial
  probe
  misc_feature (1)..(25): SEQ ID NO: 6475; WAN024DRV; Start 406; Stop 430
ttatcttatattggagaggtagagt

SEQ ID NO: 439686 - DNA, 25 bp, Artificial
  probe
  misc_feature (1)..(25): SEQ ID NO: 6475; WAN024DRV; Start 352; Stop 376
agtgaaagtccagacagaagaaaat

SEQ ID NO: 439687 - DNA, 25 bp, Artificial
  probe
  misc_feature (1)..(25): SEQ ID NO: 6475; WAN024DRV; Start 487; Stop 511
aaagaaactgagttagctgttacta

SEQ ID NO: 439688 - DNA, 25 bp, Artificial
  probe
  misc_feature (1)..(25): SEQ ID NO: 6475; WAN024DRV; Start 448; Stop 472
gaagcgaattttaatacggaacaag

SEQ ID NO: 439689 - DNA, 25 bp, Artificial
  probe
  misc_feature (1)..(25): SEQ ID NO: 6475; WAN024DRV; Start 483; Stop 507
tcccaaagaaactgagttagctgtt

SEQ ID NO: 439690 - DNA, 25 bp, Artificial
  probe
  misc_feature (1)..(25): SEQ ID NO: 6475; WAN024DRV; Start 482; Stop 506
ttcccaaagaaactgagttagctgt

SEQ ID NO: 439691 - DNA, 25 bp, Artificial
  probe
  misc_feature (1)..(25): SEQ ID NO: 6475; WAN024DRV; Start 452; Stop 476
cgaattttaatacggaacaagcaaa

SEQ ID NO: 439692 - DNA, 25 bp, Artificial
  probe
  misc_feature (1)..(25): SEQ ID NO: 6475; WAN024DRV; Start 468; Stop 492
acaagcaaaagtaattcccaaagaa

SEQ ID NO: 439693 - DNA, 25 bp, Artificial
  probe
  misc_feature (1)..(25): SEQ ID NO: 6475; WAN024DRV; Start 466; Stop 490
gaacaagcaaaagtaattcccaaag

SEQ ID NO: 439694 - DNA, 25 bp, Artificial
  probe
  misc_feature (1)..(25): SEQ ID NO: 6476; WAN024DS9; Start 158; Stop 182
aatatgacgctgctaagaaggatta

SEQ ID NO: 439695 - DNA, 25 bp, Artificial
  probe
  misc_feature (1)..(25): SEQ ID NO: 6476; WAN024DS9; Start 159; Stop 183
atatgacgctgctaagaaggattac

SEQ ID NO: 439696 - DNA, 25 bp, Artificial
  probe
  misc_feature (1)..(25): SEQ ID NO: 6476; WAN024DS9; Start 441; Stop 465
aacaacaatagtagttcctgaacca

SEQ ID NO: 439697 - DNA, 25 bp, Artificial
  probe
  misc_feature (1)..(25): SEQ ID NO: 6476; WAN024DS9; Start 170; Stop 194
ctaagaaggattacgacgaagctaa

SEQ ID NO: 439698 - DNA, 25 bp, Artificial
  probe
  misc_feature (1)..(25): SEQ ID NO: 6476; WAN024DS9; Start 160; Stop 184
tatgacgctgctaagaaggattacg

SEQ ID NO: 439699 - DNA, 25 bp, Artificial
  probe
  misc_feature (1)..(25): SEQ ID NO: 6476; WAN024DS9; Start 446; Stop 470
caatagtagttcctgaaccagatga

SEQ ID NO: 439700 - DNA, 25 bp, Artificial
  probe
  misc_feature (1)..(25): SEQ ID NO: 6476; WAN024DS9; Start 445; Stop 469
acaatagtagttcctgaaccagatg

SEQ ID NO: 439701 - DNA, 25 bp, Artificial
  probe
  misc_feature (1)..(25): SEQ ID NO: 6476; WAN024DS9; Start 443; Stop 467
caacaatagtagttcctgaaccaga

SEQ ID NO: 439702 - DNA, 25 bp, Artificial
  probe
  misc_feature (1)..(25): SEQ ID NO: 6476; WAN024DS9; Start 451; Stop 475
gtagttcctgaaccagatgagttag

SEQ ID NO: 439703 - DNA, 25 bp, Artificial
  probe
  misc_feature (1)..(25): SEQ ID NO: 6476; WAN024DS9; Start 448; Stop 472
atagtagttcctgaaccagatgagt

SEQ ID NO: 439704 - DNA, 25 bp, Artificial
  probe
  misc_feature (1)..(25): SEQ ID NO: 6476; WAN024DS9; Start 442; Stop 466
acaacaatagtagttcctgaaccag

SEQ ID NO: 439705 - DNA, 25 bp, Artificial
  probe
  misc_feature (1)..(25): SEQ ID NO: 6476; WAN024DS9; Start 447; Stop 471
aatagtagttcctgaaccagatgag

SEQ ID NO: 439706 - DNA, 25 bp, Artificial
  probe
  misc_feature (1)..(25): SEQ ID NO: 6476; WAN024DS9; Start 450; Stop 474
agtagttcctgaaccagatgagtta

SEQ ID NO: 439707 - DNA, 25 bp, Artificial
  probe
  misc_feature (1)..(25): SEQ ID NO: 6476; WAN024DS9; Start 449; Stop 473
tagtagttcctgaaccagatgagtt

SEQ ID NO: 439708 - DNA, 25 bp, Artificial
  probe
  misc_feature (1)..(25): SEQ ID NO: 6476; WAN024DS9; Start 444; Stop 468
aacaatagtagttcctgaaccagat

SEQ ID NO: 439709 - DNA, 25 bp, Artificial
  probe
  misc_feature (1)..(25): SEQ ID NO: 6476; WAN024DS9; Start 157; Stop 181
aaatatgacgctgctaagaaggatt

SEQ ID NO: 439710 - DNA, 25 bp, Artificial
  probe
  misc_feature (1)..(25): SEQ ID NO: 6476; WAN024DS9; Start 336; Stop 360
tgctatcagaaatcacaacgaaagt

SEQ ID NO: 439711 - DNA, 25 bp, Artificial
  probe
  misc_feature (1)..(25): SEQ ID NO: 6476; WAN024DS9; Start 452; Stop 476
tagttcctgaaccagatgagttagc

SEQ ID NO: 439712 - DNA, 25 bp, Artificial
  probe
  misc_feature (1)..(25): SEQ ID NO: 6476; WAN024DS9; Start 314; Stop 338
aagcggtcctagattatataactgc

SEQ ID NO: 439713 - DNA, 25 bp, Artificial
  probe
  misc_feature (1)..(25): SEQ ID NO: 6476; WAN024DS9; Start 316; Stop 340
gcggtcctagattatataactgcta

SEQ ID NO: 439714 - DNA, 25 bp, Artificial
  probe
  misc_feature (1)..(25): SEQ ID NO: 6476; WAN024DS9; Start 332; Stop 356
taactgctatcagaaatcacaacga

SEQ ID NO: 439715 - DNA, 25 bp, Artificial
  probe
  misc_feature (1)..(25): SEQ ID NO: 6476; WAN024DS9; Start 335; Stop 359
ctgctatcagaaatcacaacgaaag

SEQ ID NO: 439716 - DNA, 25 bp, Artificial
  probe
  misc_feature (1)..(25): SEQ ID NO: 6476; WAN024DS9; Start 331; Stop 355
ataactgctatcagaaatcacaacg

SEQ ID NO: 439717 - DNA, 25 bp, Artificial
  probe
  misc_feature (1)..(25): SEQ ID NO: 6476; WAN024DS9; Start 166; Stop 190
gctgctaagaaggattacgacgaag

SEQ ID NO: 439718 - DNA, 25 bp, Artificial
  probe
  misc_feature (1)..(25): SEQ ID NO: 6476; WAN024DS9; Start 440; Stop 464
aaacaacaatagtagttcctgaacc

SEQ ID NO: 439719 - DNA, 25 bp, Artificial
  probe
  misc_feature (1)..(25): SEQ ID NO: 6476; WAN024DS9; Start 438; Stop 462
tcaaacaacaatagtagttcctgaa

SEQ ID NO: 439720 - DNA, 25 bp, Artificial
  probe
  misc_feature (1)..(25): SEQ ID NO: 6476; WAN024DS9; Start 437; Stop 461
ttcaaacaacaatagtagttcctga

SEQ ID NO: 439721 - DNA, 25 bp, Artificial
  probe
  misc_feature (1)..(25): SEQ ID NO: 6476; WAN024DS9; Start 338; Stop 362
ctatcagaaatcacaacgaaagtgg

SEQ ID NO: 439722 - DNA, 25 bp, Artificial
  probe
  misc_feature (1)..(25): SEQ ID NO: 6476; WAN024DS9; Start 334; Stop 358
actgctatcagaaatcacaacgaaa

SEQ ID NO: 439723 - DNA, 25 bp, Artificial
  probe
  misc_feature (1)..(25): SEQ ID NO: 6476; WAN024DS9; Start 333; Stop 357
aactgctatcagaaatcacaacgaa

SEQ ID NO: 439724 - DNA, 25 bp, Artificial
  probe
  misc_feature (1)..(25): SEQ ID NO: 6476; WAN024DS9; Start 337; Stop 361
gctatcagaaatcacaacgaaagtg

SEQ ID NO: 439725 - DNA, 25 bp, Artificial
  probe
  misc_feature (1)..(25): SEQ ID NO: 6476; WAN024DS9; Start 171; Stop 195
taagaaggattacgacgaagctaaa

SEQ ID NO: 439726 - DNA, 25 bp, Artificial
  probe
  misc_feature (1)..(25): SEQ ID NO: 6476; WAN024DS9; Start 339; Stop 363
tatcagaaatcacaacgaaagtggg

SEQ ID NO: 439727 - DNA, 25 bp, Artificial
  probe
  misc_feature (1)..(25): SEQ ID NO: 6477; WAN024DRZ; Start 409; Stop 433
aagattagacaagagatcgtggttc

SEQ ID NO: 439728 - DNA, 25 bp, Artificial
  probe
  misc_feature (1)..(25): SEQ ID NO: 6477; WAN024DRZ; Start 433; Stop 457
cctagttcgcaacagttagaagtaa

SEQ ID NO: 439729 - DNA, 25 bp, Artificial
  probe
  misc_feature (1)..(25): SEQ ID NO: 6477; WAN024DRZ; Start 412; Stop 436
attagacaagagatcgtggttccta

SEQ ID NO: 439730 - DNA, 25 bp, Artificial
  probe
  misc_feature (1)..(25): SEQ ID NO: 6477; WAN024DRZ; Start 408; Stop 432
taagattagacaagagatcgtggtt

SEQ ID NO: 439731 - DNA, 25 bp, Artificial
  probe
  misc_feature (1)..(25): SEQ ID NO: 6477; WAN024DRZ; Start 407; Stop 431
ataagattagacaagagatcgtggt

SEQ ID NO: 439732 - DNA, 25 bp, Artificial
  probe
  misc_feature (1)..(25): SEQ ID NO: 6477; WAN024DRZ; Start 432; Stop 456
tcctagttcgcaacagttagaagta

SEQ ID NO: 439733 - DNA, 25 bp, Artificial
  probe
  misc_feature (1)..(25): SEQ ID NO: 6477; WAN024DRZ; Start 413; Stop 437
ttagacaagagatcgtggttcctag

SEQ ID NO: 439734 - DNA, 25 bp, Artificial
  probe
  misc_feature (1)..(25): SEQ ID NO: 6477; WAN024DRZ; Start 76; Stop 100
cctactgttgtaagagcagaagaag

SEQ ID NO: 439735 - DNA, 25 bp, Artificial
  probe
  misc_feature (1)..(25): SEQ ID NO: 6477; WAN024DRZ; Start 430; Stop 454
gttcctagttcgcaacagttagaag

SEQ ID NO: 439736 - DNA, 25 bp, Artificial
  probe
  misc_feature (1)..(25): SEQ ID NO: 6477; WAN024DRZ; Start 411; Stop 435
gattagacaagagatcgtggttcct

SEQ ID NO: 439737 - DNA, 25 bp, Artificial
  probe
  misc_feature (1)..(25): SEQ ID NO: 6477; WAN024DRZ; Start 410; Stop 434
agattagacaagagatcgtggttcc

SEQ ID NO: 439738 - DNA, 25 bp, Artificial
  probe
  misc_feature (1)..(25): SEQ ID NO: 6477; WAN024DRZ; Start 406; Stop 430
aataagattagacaagagatcgtgg

SEQ ID NO: 439739 - DNA, 25 bp, Artificial
  probe
  misc_feature (1)..(25): SEQ ID NO: 6477; WAN024DRZ; Start 431; Stop 455
ttcctagttcgcaacagttagaagt

SEQ ID NO: 439740 - DNA, 25 bp, Artificial
  probe
  misc_feature (1)..(25): SEQ ID NO: 6477; WAN024DRZ; Start 77; Stop 101
ctactgttgtaagagcagaagaagc

SEQ ID NO: 439741 - DNA, 25 bp, Artificial
  probe
  misc_feature (1)..(25): SEQ ID NO: 6477; WAN024DRZ; Start 434; Stop 458
ctagttcgcaacagttagaagtaac

SEQ ID NO: 439742 - DNA, 25 bp, Artificial
  probe
  misc_feature (1)..(25): SEQ ID NO: 6477; WAN024DRZ; Start 414; Stop 438
tagacaagagatcgtggttcctagt

SEQ ID NO: 439743 - DNA, 25 bp, Artificial
  probe
  misc_feature (1)..(25): SEQ ID NO: 6477; WAN024DRZ; Start 713; Stop 737
atgccaaacgaactaaactatcaac

SEQ ID NO: 439744 - DNA, 25 bp, Artificial
  probe
  misc_feature (1)..(25): SEQ ID NO: 6477; WAN024DRZ; Start 307; Stop 331
cagaagtatgttagcgaaagtgatg

SEQ ID NO: 439745 - DNA, 25 bp, Artificial
  probe
  misc_feature (1)..(25): SEQ ID NO: 6477; WAN024DRZ; Start 313; Stop 337
tatgttagcgaaagtgatggaaaga

SEQ ID NO: 439746 - DNA, 25 bp, Artificial
  probe
  misc_feature (1)..(25): SEQ ID NO: 6477; WAN024DRZ; Start 312; Stop 336
gtatgttagcgaaagtgatggaaag

SEQ ID NO: 439747 - DNA, 25 bp, Artificial
  probe
  misc_feature (1)..(25): SEQ ID NO: 6477; WAN024DRZ; Start 716; Stop 740
ccaaacgaactaaactatcaacact

SEQ ID NO: 439748 - DNA, 25 bp, Artificial
  probe
  misc_feature (1)..(25): SEQ ID NO: 6477; WAN024DRZ; Start 311; Stop 335
agtatgttagcgaaagtgatggaaa

SEQ ID NO: 439749 - DNA, 25 bp, Artificial
  probe
  misc_feature (1)..(25): SEQ ID NO: 6477; WAN024DRZ; Start 310; Stop 334
aagtatgttagcgaaagtgatggaa

SEQ ID NO: 439750 - DNA, 25 bp, Artificial
  probe
  misc_feature (1)..(25): SEQ ID NO: 6477; WAN024DRZ; Start 712; Stop 736
gatgccaaacgaactaaactatcaa

SEQ ID NO: 439751 - DNA, 25 bp, Artificial
  probe
  misc_feature (1)..(25): SEQ ID NO: 6477; WAN024DRZ; Start 715; Stop 739
gccaaacgaactaaactatcaacac

SEQ ID NO: 439752 - DNA, 25 bp, Artificial
  probe
  misc_feature (1)..(25): SEQ ID NO: 6477; WAN024DRZ; Start 309; Stop 333
gaagtatgttagcgaaagtgatgga

SEQ ID NO: 439753 - DNA, 25 bp, Artificial
  probe
  misc_feature (1)..(25): SEQ ID NO: 6477; WAN024DRZ; Start 308; Stop 332
agaagtatgttagcgaaagtgatgg

SEQ ID NO: 439754 - DNA, 25 bp, Artificial
  probe
  misc_feature (1)..(25): SEQ ID NO: 6477; WAN024DRZ; Start 314; Stop 338
atgttagcgaaagtgatggaaagaa

SEQ ID NO: 439755 - DNA, 25 bp, Artificial
  probe
  misc_feature (1)..(25): SEQ ID NO: 6477; WAN024DRZ; Start 714; Stop 738
tgccaaacgaactaaactatcaaca

SEQ ID NO: 439756 - DNA, 25 bp, Artificial
  probe
  misc_feature (1)..(25): SEQ ID NO: 6477; WAN024DRZ; Start 315; Stop 339
tgttagcgaaagtgatggaaagaaa

SEQ ID NO: 439757 - DNA, 25 bp, Artificial
  probe
  misc_feature (1)..(25): SEQ ID NO: 6477; WAN024DRZ; Start 416; Stop 440
gacaagagatcgtggttcctagttc

SEQ ID NO: 439758 - DNA, 25 bp, Artificial
  probe
  misc_feature (1)..(25): SEQ ID NO: 6477; WAN024DRZ; Start 624; Stop 648
actagaaacagaactcaaagggatt

SEQ ID NO: 439759 - DNA, 25 bp, Artificial
  probe
  misc_feature (1)..(25): SEQ ID NO: 6477; WAN024DRZ; Start 623; Stop 647
gactagaaacagaactcaaagggat

SEQ ID NO: 439760 - DNA, 25 bp, Artificial
  probe
  misc_feature (1)..(25): SEQ ID NO: 6478; WAN024DS5; Start 366; Stop 390
cgcagcagataagatgatagatgaa

SEQ ID NO: 439761 - DNA, 25 bp, Artificial
  probe
  misc_feature (1)..(25): SEQ ID NO: 6478; WAN024DS5; Start 368; Stop 392
cagcagataagatgatagatgaagc

SEQ ID NO: 439762 - DNA, 25 bp, Artificial
  probe
  misc_feature (1)..(25): SEQ ID NO: 6478; WAN024DS5; Start 367; Stop 391
gcagcagataagatgatagatgaag

SEQ ID NO: 439763 - DNA, 25 bp, Artificial
  probe
  misc_feature (1)..(25): SEQ ID NO: 6478; WAN024DS5; Start 364; Stop 388
gacgcagcagataagatgatagatg

SEQ ID NO: 439764 - DNA, 25 bp, Artificial
  probe
  misc_feature (1)..(25): SEQ ID NO: 6478; WAN024DS5; Start 363; Stop 387
agacgcagcagataagatgatagat

SEQ ID NO: 439765 - DNA, 25 bp, Artificial
  probe
  misc_feature (1)..(25): SEQ ID NO: 6478; WAN024DS5; Start 362; Stop 386
aagacgcagcagataagatgataga

SEQ ID NO: 439766 - DNA, 25 bp, Artificial
  probe
  misc_feature (1)..(25): SEQ ID NO: 6478; WAN024DS5; Start 365; Stop 389
acgcagcagataagatgatagatga

SEQ ID NO: 439767 - DNA, 25 bp, Artificial
  probe
  misc_feature (1)..(25): SEQ ID NO: 6478; WAN024DS5; Start 319; Stop 343
caagcgtatctagcctatcaacaag

SEQ ID NO: 439768 - DNA, 25 bp, Artificial
  probe
  misc_feature (1)..(25): SEQ ID NO: 6478; WAN024DS5; Start 313; Stop 337
gttcaacaagcgtatctagcctatc

SEQ ID NO: 439769 - DNA, 25 bp, Artificial
  probe
  misc_feature (1)..(25): SEQ ID NO: 6478; WAN024DS5; Start 316; Stop 340
caacaagcgtatctagcctatcaac

SEQ ID NO: 439770 - DNA, 25 bp, Artificial
  probe
  misc_feature (1)..(25): SEQ ID NO: 6478; WAN024DS5; Start 315; Stop 339
tcaacaagcgtatctagcctatcaa

SEQ ID NO: 439771 - DNA, 25 bp, Artificial
  probe
  misc_feature (1)..(25): SEQ ID NO: 6478; WAN024DS5; Start 314; Stop 338
ttcaacaagcgtatctagcctatca

SEQ ID NO: 439772 - DNA, 25 bp, Artificial
  probe
  misc_feature (1)..(25): SEQ ID NO: 6478; WAN024DS5; Start 312; Stop 336
agttcaacaagcgtatctagcctat

SEQ ID NO: 439773 - DNA, 25 bp, Artificial
  probe
  misc_feature (1)..(25): SEQ ID NO: 6478; WAN024DS5; Start 318; Stop 342
acaagcgtatctagcctatcaacaa

SEQ ID NO: 439774 - DNA, 25 bp, Artificial
  probe
  misc_feature (1)..(25): SEQ ID NO: 6478; WAN024DS5; Start 317; Stop 341
aacaagcgtatctagcctatcaaca

SEQ ID NO: 439775 - DNA, 25 bp, Artificial
  probe
  misc_feature (1)..(25): SEQ ID NO: 6478; WAN024DS5; Start 311; Stop 335
cagttcaacaagcgtatctagccta

SEQ ID NO: 439776 - DNA, 25 bp, Artificial
  probe
  misc_feature (1)..(25): SEQ ID NO: 6478; WAN024DS5; Start 426; Stop 450
taatactgttcgagcaatggtagtt

SEQ ID NO: 439777 - DNA, 25 bp, Artificial
  probe
  misc_feature (1)..(25): SEQ ID NO: 6478; WAN024DS5; Start 425; Stop 449
ttaatactgttcgagcaatggtagt

SEQ ID NO: 439778 - DNA, 25 bp, Artificial
  probe
  misc_feature (1)..(25): SEQ ID NO: 6478; WAN024DS5; Start 361; Stop 385
aaagacgcagcagataagatgatag

SEQ ID NO: 439779 - DNA, 25 bp, Artificial
  probe
  misc_feature (1)..(25): SEQ ID NO: 6478; WAN024DS5; Start 320; Stop 344
aagcgtatctagcctatcaacaagc

SEQ ID NO: 439780 - DNA, 25 bp, Artificial
  probe
  misc_feature (1)..(25): SEQ ID NO: 6478; WAN024DS5; Start 427; Stop 451
aatactgttcgagcaatggtagttc

SEQ ID NO: 439781 - DNA, 25 bp, Artificial
  probe
  misc_feature (1)..(25): SEQ ID NO: 6478; WAN024DS5; Start 370; Stop 394
gcagataagatgatagatgaagcta

SEQ ID NO: 439782 - DNA, 25 bp, Artificial
  probe
  misc_feature (1)..(25): SEQ ID NO: 6478; WAN024DS5; Start 282; Stop 306
gtctgaagagatggataaggcagtg

SEQ ID NO: 439783 - DNA, 25 bp, Artificial
  probe
  misc_feature (1)..(25): SEQ ID NO: 6478; WAN024DS5; Start 378; Stop 402
gatgatagatgaagctaagaaacgc

SEQ ID NO: 439784 - DNA, 25 bp, Artificial
  probe
  misc_feature (1)..(25): SEQ ID NO: 6478; WAN024DS5; Start 369; Stop 393
agcagataagatgatagatgaagct

SEQ ID NO: 439785 - DNA, 25 bp, Artificial
  probe
  misc_feature (1)..(25): SEQ ID NO: 6478; WAN024DS5; Start 422; Stop 446
aatttaatactgttcgagcaatggt

SEQ ID NO: 439786 - DNA, 25 bp, Artificial
  probe
  misc_feature (1)..(25): SEQ ID NO: 6478; WAN024DS5; Start 428; Stop 452
atactgttcgagcaatggtagttcc

SEQ ID NO: 439787 - DNA, 25 bp, Artificial
  probe
  misc_feature (1)..(25): SEQ ID NO: 6478; WAN024DS5; Start 424; Stop 448
tttaatactgttcgagcaatggtag

SEQ ID NO: 439788 - DNA, 25 bp, Artificial
  probe
  misc_feature (1)..(25): SEQ ID NO: 6478; WAN024DS5; Start 377; Stop 401
agatgatagatgaagctaagaaacg

SEQ ID NO: 439789 - DNA, 25 bp, Artificial
  probe
  misc_feature (1)..(25): SEQ ID NO: 6478; WAN024DS5; Start 423; Stop 447
atttaatactgttcgagcaatggta

SEQ ID NO: 439790 - DNA, 25 bp, Artificial
  probe
  misc_feature (1)..(25): SEQ ID NO: 6478; WAN024DS5; Start 283; Stop 307
tctgaagagatggataaggcagtgg

SEQ ID NO: 439791 - DNA, 25 bp, Artificial
  probe
  misc_feature (1)..(25): SEQ ID NO: 6478; WAN024DS5; Start 421; Stop 445
aaatttaatactgttcgagcaatgg

SEQ ID NO: 439792 - DNA, 25 bp, Artificial
  probe
  misc_feature (1)..(25): SEQ ID NO: 6478; WAN024DS5; Start 331; Stop 355
gcctatcaacaagctacagacaaag

SEQ ID NO: 439793 - DNA, 25 bp, Artificial
  probe
  misc_feature (1)..(25): SEQ ID NO: 6479; WAN024DS8; Start 285; Stop 309
ggtaaacgatgctactttagaggta

SEQ ID NO: 439794 - DNA, 25 bp, Artificial
  probe
  misc_feature (1)..(25): SEQ ID NO: 6479; WAN024DS8; Start 283; Stop 307
aaggtaaacgatgctactttagagg

SEQ ID NO: 439795 - DNA, 25 bp, Artificial
  probe
  misc_feature (1)..(25): SEQ ID NO: 6479; WAN024DS8; Start 281; Stop 305
ggaaggtaaacgatgctactttaga

SEQ ID NO: 439796 - DNA, 25 bp, Artificial
  probe
  misc_feature (1)..(25): SEQ ID NO: 6479; WAN024DS8; Start 280; Stop 304
aggaaggtaaacgatgctactttag

SEQ ID NO: 439797 - DNA, 25 bp, Artificial
  probe
  misc_feature (1)..(25): SEQ ID NO: 6479; WAN024DS8; Start 282; Stop 306
gaaggtaaacgatgctactttagag

SEQ ID NO: 439798 - DNA, 25 bp, Artificial
  probe
  misc_feature (1)..(25): SEQ ID NO: 6479; WAN024DS8; Start 279; Stop 303
taggaaggtaaacgatgctacttta

SEQ ID NO: 439799 - DNA, 25 bp, Artificial
  probe
  misc_feature (1)..(25): SEQ ID NO: 6479; WAN024DS8; Start 278; Stop 302
ctaggaaggtaaacgatgctacttt

SEQ ID NO: 439800 - DNA, 25 bp, Artificial
  probe
  misc_feature (1)..(25): SEQ ID NO: 6479; WAN024DS8; Start 289; Stop 313
aacgatgctactttagaggtacaaa

SEQ ID NO: 439801 - DNA, 25 bp, Artificial
  probe
  misc_feature (1)..(25): SEQ ID NO: 6479; WAN024DS8; Start 288; Stop 312
aaacgatgctactttagaggtacaa

SEQ ID NO: 439802 - DNA, 25 bp, Artificial
  probe
  misc_feature (1)..(25): SEQ ID NO: 6479; WAN024DS8; Start 284; Stop 308
aggtaaacgatgctactttagaggt

SEQ ID NO: 439803 - DNA, 25 bp, Artificial
  probe
  misc_feature (1)..(25): SEQ ID NO: 6479; WAN024DS8; Start 439; Stop 463
caatctgttcgagcaatggtagttc

SEQ ID NO: 439804 - DNA, 25 bp, Artificial
  probe
  misc_feature (1)..(25): SEQ ID NO: 6479; WAN024DS8; Start 277; Stop 301
tctaggaaggtaaacgatgctactt

SEQ ID NO: 439805 - DNA, 25 bp, Artificial
  probe
  misc_feature (1)..(25): SEQ ID NO: 6479; WAN024DS8; Start 276; Stop 300
ttctaggaaggtaaacgatgctact

SEQ ID NO: 439806 - DNA, 25 bp, Artificial
  probe
  misc_feature (1)..(25): SEQ ID NO: 6479; WAN024DS8; Start 287; Stop 311
taaacgatgctactttagaggtaca

SEQ ID NO: 439807 - DNA, 25 bp, Artificial
  probe
  misc_feature (1)..(25): SEQ ID NO: 6479; WAN024DS8; Start 286; Stop 310
gtaaacgatgctactttagaggtac

SEQ ID NO: 439808 - DNA, 25 bp, Artificial
  probe
  misc_feature (1)..(25): SEQ ID NO: 6479; WAN024DS8; Start 438; Stop 462
tcaatctgttcgagcaatggtagtt

SEQ ID NO: 439809 - DNA, 25 bp, Artificial
  probe
  misc_feature (1)..(25): SEQ ID NO: 6479; WAN024DS8; Start 437; Stop 461
ttcaatctgttcgagcaatggtagt

SEQ ID NO: 439810 - DNA, 25 bp, Artificial
  probe
  misc_feature (1)..(25): SEQ ID NO: 6479; WAN024DS8; Start 546; Stop 570
taaggcagctaaagaggtagaagta

SEQ ID NO: 439811 - DNA, 25 bp, Artificial
  probe
  misc_feature (1)..(25): SEQ ID NO: 6479; WAN024DS8; Start 544; Stop 568
gataaggcagctaaagaggtagaag

SEQ ID NO: 439812 - DNA, 25 bp, Artificial
  probe
  misc_feature (1)..(25): SEQ ID NO: 6479; WAN024DS8; Start 545; Stop 569
ataaggcagctaaagaggtagaagt

SEQ ID NO: 439813 - DNA, 25 bp, Artificial
  probe
  misc_feature (1)..(25): SEQ ID NO: 6479; WAN024DS8; Start 543; Stop 567
tgataaggcagctaaagaggtagaa

SEQ ID NO: 439814 - DNA, 25 bp, Artificial
  probe
  misc_feature (1)..(25): SEQ ID NO: 6479; WAN024DS8; Start 547; Stop 571
aaggcagctaaagaggtagaagtag

SEQ ID NO: 439815 - DNA, 25 bp, Artificial
  probe
  misc_feature (1)..(25): SEQ ID NO: 6479; WAN024DS8; Start 440; Stop 464
aatctgttcgagcaatggtagttcc

SEQ ID NO: 439816 - DNA, 25 bp, Artificial
  probe
  misc_feature (1)..(25): SEQ ID NO: 6479; WAN024DS8; Start 436; Stop 460
tttcaatctgttcgagcaatggtag

SEQ ID NO: 439817 - DNA, 25 bp, Artificial
  probe
  misc_feature (1)..(25): SEQ ID NO: 6479; WAN024DS8; Start 435; Stop 459
gtttcaatctgttcgagcaatggta

SEQ ID NO: 439818 - DNA, 25 bp, Artificial
  probe
  misc_feature (1)..(25): SEQ ID NO: 6479; WAN024DS8; Start 538; Stop 562
aaatctgataaggcagctaaagagg

SEQ ID NO: 439819 - DNA, 25 bp, Artificial
  probe
  misc_feature (1)..(25): SEQ ID NO: 6479; WAN024DS8; Start 431; Stop 455
atgagtttcaatctgttcgagcaat

SEQ ID NO: 439820 - DNA, 25 bp, Artificial
  probe
  misc_feature (1)..(25): SEQ ID NO: 6479; WAN024DS8; Start 540; Stop 564
atctgataaggcagctaaagaggta

SEQ ID NO: 439821 - DNA, 25 bp, Artificial
  probe
  misc_feature (1)..(25): SEQ ID NO: 6479; WAN024DS8; Start 430; Stop 454
aatgagtttcaatctgttcgagcaa

SEQ ID NO: 439822 - DNA, 25 bp, Artificial
  probe
  misc_feature (1)..(25): SEQ ID NO: 6479; WAN024DS8; Start 429; Stop 453
aaatgagtttcaatctgttcgagca

SEQ ID NO: 439823 - DNA, 25 bp, Artificial
  probe
  misc_feature (1)..(25): SEQ ID NO: 6479; WAN024DS8; Start 542; Stop 566
ctgataaggcagctaaagaggtaga

SEQ ID NO: 439824 - DNA, 25 bp, Artificial
  probe
  misc_feature (1)..(25): SEQ ID NO: 6479; WAN024DS8; Start 541; Stop 565
tctgataaggcagctaaagaggtag

SEQ ID NO: 439825 - DNA, 25 bp, Artificial
  probe
  misc_feature (1)..(25): SEQ ID NO: 6479; WAN024DS8; Start 539; Stop 563
aatctgataaggcagctaaagaggt

SEQ ID NO: 439826 - DNA, 25 bp, Artificial
  probe
  misc_feature (1)..(25): SEQ ID NO: 6480; WAN024DS6; Start 406; Stop 430
gcaaaccttaataaagttctcgcaa

SEQ ID NO: 439827 - DNA, 25 bp, Artificial
  probe
  misc_feature (1)..(25): SEQ ID NO: 6480; WAN024DS6; Start 407; Stop 431
caaaccttaataaagttctcgcaaa

SEQ ID NO: 439828 - DNA, 25 bp, Artificial
  probe
  misc_feature (1)..(25): SEQ ID NO: 6480; WAN024DS6; Start 379; Stop 403
gctaagcaagaggaagacaaagaaa

SEQ ID NO: 439829 - DNA, 25 bp, Artificial
  probe
  misc_feature (1)..(25): SEQ ID NO: 6480; WAN024DS6; Start 203; Stop 227
ggaaatatgacgaggatcagaagaa

SEQ ID NO: 439830 - DNA, 25 bp, Artificial
  probe
  misc_feature (1)..(25): SEQ ID NO: 6480; WAN024DS6; Start 201; Stop 225
gaggaaatatgacgaggatcagaag

SEQ ID NO: 439831 - DNA, 25 bp, Artificial
  probe
  misc_feature (1)..(25): SEQ ID NO: 6480; WAN024DS6; Start 202; Stop 226
aggaaatatgacgaggatcagaaga

SEQ ID NO: 439832 - DNA, 25 bp, Artificial
  probe
  misc_feature (1)..(25): SEQ ID NO: 6480; WAN024DS6; Start 200; Stop 224
agaggaaatatgacgaggatcagaa

SEQ ID NO: 439833 - DNA, 25 bp, Artificial
  probe
  misc_feature (1)..(25): SEQ ID NO: 6480; WAN024DS6; Start 405; Stop 429
ggcaaaccttaataaagttctcgca

SEQ ID NO: 439834 - DNA, 25 bp, Artificial
  probe
  misc_feature (1)..(25): SEQ ID NO: 6480; WAN024DS6; Start 369; Stop 393
aatgaacgaagctaagcaagaggaa

SEQ ID NO: 439835 - DNA, 25 bp, Artificial
  probe
  misc_feature (1)..(25): SEQ ID NO: 6480; WAN024DS6; Start 154; Stop 178
aaatataaagctgctgaggaagact

SEQ ID NO: 439836 - DNA, 25 bp, Artificial
  probe
  misc_feature (1)..(25): SEQ ID NO: 6480; WAN024DS6; Start 360; Stop 384
tgagaaagaaatgaacgaagctaag

SEQ ID NO: 439837 - DNA, 25 bp, Artificial
  probe
  misc_feature (1)..(25): SEQ ID NO: 6480; WAN024DS6; Start 359; Stop 383
ctgagaaagaaatgaacgaagctaa

SEQ ID NO: 439838 - DNA, 25 bp, Artificial
  probe
  misc_feature (1)..(25): SEQ ID NO: 6480; WAN024DS6; Start 355; Stop 379
aaagctgagaaagaaatgaacgaag

SEQ ID NO: 439839 - DNA, 25 bp, Artificial
  probe
  misc_feature (1)..(25): SEQ ID NO: 6480; WAN024DS6; Start 353; Stop 377
ctaaagctgagaaagaaatgaacga

SEQ ID NO: 439840 - DNA, 25 bp, Artificial
  probe
  misc_feature (1)..(25): SEQ ID NO: 6480; WAN024DS6; Start 204; Stop 228
gaaatatgacgaggatcagaagaaa

SEQ ID NO: 439841 - DNA, 25 bp, Artificial
  probe
  misc_feature (1)..(25): SEQ ID NO: 6480; WAN024DS6; Start 364; Stop 388
aaagaaatgaacgaagctaagcaag

SEQ ID NO: 439842 - DNA, 25 bp, Artificial
  probe
  misc_feature (1)..(25): SEQ ID NO: 6480; WAN024DS6; Start 363; Stop 387
gaaagaaatgaacgaagctaagcaa

SEQ ID NO: 439843 - DNA, 25 bp, Artificial
  probe
  misc_feature (1)..(25): SEQ ID NO: 6480; WAN024DS6; Start 199; Stop 223
cagaggaaatatgacgaggatcaga

SEQ ID NO: 439844 - DNA, 25 bp, Artificial
  probe
  misc_feature (1)..(25): SEQ ID NO: 6480; WAN024DS6; Start 198; Stop 222
tcagaggaaatatgacgaggatcag

SEQ ID NO: 439845 - DNA, 25 bp, Artificial
  probe
  misc_feature (1)..(25): SEQ ID NO: 6480; WAN024DS6; Start 361; Stop 385
gagaaagaaatgaacgaagctaagc

SEQ ID NO: 439846 - DNA, 25 bp, Artificial
  probe
  misc_feature (1)..(25): SEQ ID NO: 6480; WAN024DS6; Start 354; Stop 378
taaagctgagaaagaaatgaacgaa

SEQ ID NO: 439847 - DNA, 25 bp, Artificial
  probe
  misc_feature (1)..(25): SEQ ID NO: 6480; WAN024DS6; Start 155; Stop 179
aatataaagctgctgaggaagactt

SEQ ID NO: 439848 - DNA, 25 bp, Artificial
  probe
  misc_feature (1)..(25): SEQ ID NO: 6480; WAN024DS6; Start 623; Stop 647
ttcataggctagaacaagatctcaa

SEQ ID NO: 439849 - DNA, 25 bp, Artificial
  probe
  misc_feature (1)..(25): SEQ ID NO: 6480; WAN024DS6; Start 197; Stop 221
ctcagaggaaatatgacgaggatca

SEQ ID NO: 439850 - DNA, 25 bp, Artificial
  probe
  misc_feature (1)..(25): SEQ ID NO: 6480; WAN024DS6; Start 352; Stop 376
gctaaagctgagaaagaaatgaacg

SEQ ID NO: 439851 - DNA, 25 bp, Artificial
  probe
  misc_feature (1)..(25): SEQ ID NO: 6480; WAN024DS6; Start 156; Stop 180
atataaagctgctgaggaagactta

SEQ ID NO: 439852 - DNA, 25 bp, Artificial
  probe
  misc_feature (1)..(25): SEQ ID NO: 6480; WAN024DS6; Start 365; Stop 389
aagaaatgaacgaagctaagcaaga

SEQ ID NO: 439853 - DNA, 25 bp, Artificial
  probe
  misc_feature (1)..(25): SEQ ID NO: 6480; WAN024DS6; Start 362; Stop 386
agaaagaaatgaacgaagctaagca

SEQ ID NO: 439854 - DNA, 25 bp, Artificial
  probe
  misc_feature (1)..(25): SEQ ID NO: 6480; WAN024DS6; Start 370; Stop 394
atgaacgaagctaagcaagaggaag

SEQ ID NO: 439855 - DNA, 25 bp, Artificial
  probe
  misc_feature (1)..(25): SEQ ID NO: 6480; WAN024DS6; Start 280; Stop 304
gcaactctgaaatatcaactaaagt

SEQ ID NO: 439856 - DNA, 25 bp, Artificial
  probe
  misc_feature (1)..(25): SEQ ID NO: 6480; WAN024DS6; Start 404; Stop 428
aggcaaaccttaataaagttctcgc

SEQ ID NO: 439857 - DNA, 25 bp, Artificial
  probe
  misc_feature (1)..(25): SEQ ID NO: 6480; WAN024DS6; Start 366; Stop 390
agaaatgaacgaagctaagcaagag

SEQ ID NO: 439858 - DNA, 25 bp, Artificial
  probe
  misc_feature (1)..(25): SEQ ID NO: 6480; WAN024DS6; Start 271; Stop 295
caacaagctgcaactctgaaatatc

SEQ ID NO: 439859 - DNA, 25 bp, Artificial
  probe
  misc_feature (1)..(25): SEQ ID NO: 6481; WAN024DRW; Start 324; Stop 348
agcggtcctagataatataactgtt

SEQ ID NO: 439860 - DNA, 25 bp, Artificial
  probe
  misc_feature (1)..(25): SEQ ID NO: 6481; WAN024DRW; Start 323; Stop 347
aagcggtcctagataatataactgt

SEQ ID NO: 439861 - DNA, 25 bp, Artificial
  probe
  misc_feature (1)..(25): SEQ ID NO: 6481; WAN024DRW; Start 325; Stop 349
gcggtcctagataatataactgtta

SEQ ID NO: 439862 - DNA, 25 bp, Artificial
  probe
  misc_feature (1)..(25): SEQ ID NO: 6481; WAN024DRW; Start 163; Stop 187
gctgataagaaagaatacgaagacg

SEQ ID NO: 439863 - DNA, 25 bp, Artificial
  probe
  misc_feature (1)..(25): SEQ ID NO: 6481; WAN024DRW; Start 252; Stop 276
tgaagagaaagcagagaaagcaaac

SEQ ID NO: 439864 - DNA, 25 bp, Artificial
  probe
  misc_feature (1)..(25): SEQ ID NO: 6481; WAN024DRW; Start 346; Stop 370
gttatcagaaattcacaacgaaagt

SEQ ID NO: 439865 - DNA, 25 bp, Artificial
  probe
  misc_feature (1)..(25): SEQ ID NO: 6481; WAN024DRW; Start 343; Stop 367
actgttatcagaaattcacaacgaa

SEQ ID NO: 439866 - DNA, 25 bp, Artificial
  probe
  misc_feature (1)..(25): SEQ ID NO: 6481; WAN024DRW; Start 342; Stop 366
aactgttatcagaaattcacaacga

SEQ ID NO: 439867 - DNA, 25 bp, Artificial
  probe
  misc_feature (1)..(25): SEQ ID NO: 6481; WAN024DRW; Start 348; Stop 372
tatcagaaattcacaacgaaagtgg

SEQ ID NO: 439868 - DNA, 25 bp, Artificial
  probe
  misc_feature (1)..(25): SEQ ID NO: 6481; WAN024DRW; Start 322; Stop 346
aaagcggtcctagataatataactg

SEQ ID NO: 439869 - DNA, 25 bp, Artificial
  probe
  misc_feature (1)..(25): SEQ ID NO: 6481; WAN024DRW; Start 345; Stop 369
tgttatcagaaattcacaacgaaag

SEQ ID NO: 439870 - DNA, 25 bp, Artificial
  probe
  misc_feature (1)..(25): SEQ ID NO: 6481; WAN024DRW; Start 344; Stop 368
ctgttatcagaaattcacaacgaaa

SEQ ID NO: 439871 - DNA, 25 bp, Artificial
  probe
  misc_feature (1)..(25): SEQ ID NO: 6481; WAN024DRW; Start 251; Stop 275
ctgaagagaaagcagagaaagcaaa

SEQ ID NO: 439872 - DNA, 25 bp, Artificial
  probe
  misc_feature (1)..(25): SEQ ID NO: 6481; WAN024DRW; Start 248; Stop 272
aaactgaagagaaagcagagaaagc

SEQ ID NO: 439873 - DNA, 25 bp, Artificial
  probe
  misc_feature (1)..(25): SEQ ID NO: 6481; WAN024DRW; Start 352; Stop 376
agaaattcacaacgaaagtgggaaa

SEQ ID NO: 439874 - DNA, 25 bp, Artificial
  probe
  misc_feature (1)..(25): SEQ ID NO: 6481; WAN024DRW; Start 162; Stop 186
agctgataagaaagaatacgaagac

SEQ ID NO: 439875 - DNA, 25 bp, Artificial
  probe
  misc_feature (1)..(25): SEQ ID NO: 6481; WAN024DRW; Start 158; Stop 182
ctgaagctgataagaaagaatacga

SEQ ID NO: 439876 - DNA, 25 bp, Artificial
  probe
  misc_feature (1)..(25): SEQ ID NO: 6481; WAN024DRW; Start 347; Stop 371
ttatcagaaattcacaacgaaagtg

SEQ ID NO: 439877 - DNA, 25 bp, Artificial
  probe
  misc_feature (1)..(25): SEQ ID NO: 6481; WAN024DRW; Start 253; Stop 277
gaagagaaagcagagaaagcaaacg

SEQ ID NO: 439878 - DNA, 25 bp, Artificial
  probe
  misc_feature (1)..(25): SEQ ID NO: 6481; WAN024DRW; Start 157; Stop 181
tctgaagctgataagaaagaatacg

SEQ ID NO: 439879 - DNA, 25 bp, Artificial
  probe
  misc_feature (1)..(25): SEQ ID NO: 6481; WAN024DRW; Start 159; Stop 183
tgaagctgataagaaagaatacgaa

SEQ ID NO: 439880 - DNA, 25 bp, Artificial
  probe
  misc_feature (1)..(25): SEQ ID NO: 6481; WAN024DRW; Start 341; Stop 365
taactgttatcagaaattcacaacg

SEQ ID NO: 439881 - DNA, 25 bp, Artificial
  probe
  misc_feature (1)..(25): SEQ ID NO: 6481; WAN024DRW; Start 349; Stop 373
atcagaaattcacaacgaaagtggg

SEQ ID NO: 439882 - DNA, 25 bp, Artificial
  probe
  misc_feature (1)..(25): SEQ ID NO: 6481; WAN024DRW; Start 281; Stop 305
cttctgaagagatagctaaggccaa

SEQ ID NO: 439883 - DNA, 25 bp, Artificial
  probe
  misc_feature (1)..(25): SEQ ID NO: 6481; WAN024DRW; Start 161; Stop 185
aagctgataagaaagaatacgaaga

SEQ ID NO: 439884 - DNA, 25 bp, Artificial
  probe
  misc_feature (1)..(25): SEQ ID NO: 6481; WAN024DRW; Start 351; Stop 375
cagaaattcacaacgaaagtgggaa

SEQ ID NO: 439885 - DNA, 25 bp, Artificial
  probe
  misc_feature (1)..(25): SEQ ID NO: 6481; WAN024DRW; Start 160; Stop 184
gaagctgataagaaagaatacgaag

SEQ ID NO: 439886 - DNA, 25 bp, Artificial
  probe
  misc_feature (1)..(25): SEQ ID NO: 6481; WAN024DRW; Start 282; Stop 306
ttctgaagagatagctaaggccaac

SEQ ID NO: 439887 - DNA, 25 bp, Artificial
  probe
  misc_feature (1)..(25): SEQ ID NO: 6481; WAN024DRW; Start 286; Stop 310
gaagagatagctaaggccaacagag

SEQ ID NO: 439888 - DNA, 25 bp, Artificial
  probe
  misc_feature (1)..(25): SEQ ID NO: 6481; WAN024DRW; Start 250; Stop 274
actgaagagaaagcagagaaagcaa

SEQ ID NO: 439889 - DNA, 25 bp, Artificial
  probe
  misc_feature (1)..(25): SEQ ID NO: 6481; WAN024DRW; Start 249; Stop 273
aactgaagagaaagcagagaaagca

SEQ ID NO: 439890 - DNA, 25 bp, Artificial
  probe
  misc_feature (1)..(25): SEQ ID NO: 6481; WAN024DRW; Start 129; Stop 153
gaaagactacgatgcagcaatgaaa

SEQ ID NO: 439891 - DNA, 25 bp, Artificial
  probe
  misc_feature (1)..(25): SEQ ID NO: 6481; WAN024DRW; Start 350; Stop 374
tcagaaattcacaacgaaagtggga

SEQ ID NO: 439892 - DNA, 25 bp, Artificial
  probe
  misc_feature (1)..(25): SEQ ID NO: 6482; WAN024BVP; Start 36; Stop 60
ctctgtgaatgaaggtaagaaactt

SEQ ID NO: 439893 - DNA, 25 bp, Artificial
  probe
  misc_feature (1)..(25): SEQ ID NO: 6482; WAN024BVP; Start 35; Stop 59
gctctgtgaatgaaggtaagaaact

SEQ ID NO: 439894 - DNA, 25 bp, Artificial
  probe
  misc_feature (1)..(25): SEQ ID NO: 6482; WAN024BVP; Start 37; Stop 61
tctgtgaatgaaggtaagaaacttt

SEQ ID NO: 439895 - DNA, 25 bp, Artificial
  probe
  misc_feature (1)..(25): SEQ ID NO: 6482; WAN024BVP; Start 34; Stop 58
agctctgtgaatgaaggtaagaaac

SEQ ID NO: 439896 - DNA, 25 bp, Artificial
  probe
  misc_feature (1)..(25): SEQ ID NO: 6482; WAN024BVP; Start 38; Stop 62
ctgtgaatgaaggtaagaaactttt

SEQ ID NO: 439897 - DNA, 25 bp, Artificial
  probe
  misc_feature (1)..(25): SEQ ID NO: 6482; WAN024BVP; Start 39; Stop 63
tgtgaatgaaggtaagaaacttttc

SEQ ID NO: 439898 - DNA, 25 bp, Artificial
  probe
  misc_feature (1)..(25): SEQ ID NO: 6482; WAN024BVP; Start 29; Stop 53
aatcgagctctgtgaatgaaggtaa

SEQ ID NO: 439899 - DNA, 25 bp, Artificial
  probe
  misc_feature (1)..(25): SEQ ID NO: 6482; WAN024BVP; Start 46; Stop 70
gaaggtaagaaacttttcattcgat

SEQ ID NO: 439900 - DNA, 25 bp, Artificial
  probe
  misc_feature (1)..(25): SEQ ID NO: 6482; WAN024BVP; Start 30; Stop 54
atcgagctctgtgaatgaaggtaag

SEQ ID NO: 439901 - DNA, 25 bp, Artificial
  probe
  misc_feature (1)..(25): SEQ ID NO: 6482; WAN024BVP; Start 48; Stop 72
aggtaagaaacttttcattcgattt

SEQ ID NO: 439902 - DNA, 25 bp, Artificial
  probe
  misc_feature (1)..(25): SEQ ID NO: 6482; WAN024BVP; Start 47; Stop 71
aaggtaagaaacttttcattcgatt

SEQ ID NO: 439903 - DNA, 25 bp, Artificial
  probe
  misc_feature (1)..(25): SEQ ID NO: 6482; WAN024BVP; Start 32; Stop 56
cgagctctgtgaatgaaggtaagaa

SEQ ID NO: 439904 - DNA, 25 bp, Artificial
  probe
  misc_feature (1)..(25): SEQ ID NO: 6482; WAN024BVP; Start 33; Stop 57
gagctctgtgaatgaaggtaagaaa

SEQ ID NO: 439905 - DNA, 25 bp, Artificial
  probe
  misc_feature (1)..(25): SEQ ID NO: 6482; WAN024BVP; Start 49; Stop 73
ggtaagaaacttttcattcgatttt

SEQ ID NO: 439906 - DNA, 25 bp, Artificial
  probe
  misc_feature (1)..(25): SEQ ID NO: 6482; WAN024BVP; Start 40; Stop 64
gtgaatgaaggtaagaaacttttca

SEQ ID NO: 439907 - DNA, 25 bp, Artificial
  probe
  misc_feature (1)..(25): SEQ ID NO: 6482; WAN024BVP; Start 45; Stop 69
tgaaggtaagaaacttttcattcga

SEQ ID NO: 439908 - DNA, 25 bp, Artificial
  probe
  misc_feature (1)..(25): SEQ ID NO: 6482; WAN024BVP; Start 31; Stop 55
tcgagctctgtgaatgaaggtaaga

SEQ ID NO: 439909 - DNA, 25 bp, Artificial
  probe
  misc_feature (1)..(25): SEQ ID NO: 6482; WAN024BVP; Start 28; Stop 52
aaatcgagctctgtgaatgaaggta

SEQ ID NO: 439910 - DNA, 25 bp, Artificial
  probe
  misc_feature (1)..(25): SEQ ID NO: 6482; WAN024BVP; Start 25; Stop 49
ctaaaatcgagctctgtgaatgaag

SEQ ID NO: 439911 - DNA, 25 bp, Artificial
  probe
  misc_feature (1)..(25): SEQ ID NO: 6482; WAN024BVP; Start 24; Stop 48
tctaaaatcgagctctgtgaatgaa

SEQ ID NO: 439912 - DNA, 25 bp, Artificial
  probe
  misc_feature (1)..(25): SEQ ID NO: 6482; WAN024BVP; Start 26; Stop 50
taaaatcgagctctgtgaatgaagg

SEQ ID NO: 439913 - DNA, 25 bp, Artificial
  probe
  misc_feature (1)..(25): SEQ ID NO: 6482; WAN024BVP; Start 23; Stop 47
ctctaaaatcgagctctgtgaatga

SEQ ID NO: 439914 - DNA, 25 bp, Artificial
  probe
  misc_feature (1)..(25): SEQ ID NO: 6482; WAN024BVP; Start 27; Stop 51
aaaatcgagctctgtgaatgaaggt

SEQ ID NO: 439915 - DNA, 25 bp, Artificial
  probe
  misc_feature (1)..(25): SEQ ID NO: 6482; WAN024BVP; Start 44; Stop 68
atgaaggtaagaaacttttcattcg

SEQ ID NO: 439916 - DNA, 25 bp, Artificial
  probe
  misc_feature (1)..(25): SEQ ID NO: 6482; WAN024BVP; Start 41; Stop 65
tgaatgaaggtaagaaacttttcat

SEQ ID NO: 439917 - DNA, 25 bp, Artificial
  probe
  misc_feature (1)..(25): SEQ ID NO: 6483; WAN024FML; Start 418; Stop 442
aagagtgcagagttggaagattatt

SEQ ID NO: 439918 - DNA, 25 bp, Artificial
  probe
  misc_feature (1)..(25): SEQ ID NO: 6483; WAN024FML; Start 354; Stop 378
tggagcatacaaagatagtgacaat

SEQ ID NO: 439919 - DNA, 25 bp, Artificial
  probe
  misc_feature (1)..(25): SEQ ID NO: 6483; WAN024FML; Start 589; Stop 613
cgacttggaatagatgataattgtt

SEQ ID NO: 439920 - DNA, 25 bp, Artificial
  probe
  misc_feature (1)..(25): SEQ ID NO: 6483; WAN024FML; Start 353; Stop 377
gtggagcatacaaagatagtgacaa

SEQ ID NO: 439921 - DNA, 25 bp, Artificial
  probe
  misc_feature (1)..(25): SEQ ID NO: 6483; WAN024FML; Start 170; Stop 194
gttatgaattagtgtgggtgttgaa

SEQ ID NO: 439922 - DNA, 25 bp, Artificial
  probe
  misc_feature (1)..(25): SEQ ID NO: 6483; WAN024FML; Start 167; Stop 191
atcgttatgaattagtgtgggtgtt

SEQ ID NO: 439923 - DNA, 25 bp, Artificial
  probe
  misc_feature (1)..(25): SEQ ID NO: 6483; WAN024FML; Start 166; Stop 190
aatcgttatgaattagtgtgggtgt

SEQ ID NO: 439924 - DNA, 25 bp, Artificial
  probe
  misc_feature (1)..(25): SEQ ID NO: 6483; WAN024FML; Start 172; Stop 196
tatgaattagtgtgggtgttgaagg

SEQ ID NO: 439925 - DNA, 25 bp, Artificial
  probe
  misc_feature (1)..(25): SEQ ID NO: 6483; WAN024FML; Start 171; Stop 195
ttatgaattagtgtgggtgttgaag

SEQ ID NO: 439926 - DNA, 25 bp, Artificial
  probe
  misc_feature (1)..(25): SEQ ID NO: 6483; WAN024FML; Start 355; Stop 379
ggagcatacaaagatagtgacaatt

SEQ ID NO: 439927 - DNA, 25 bp, Artificial
  probe
  misc_feature (1)..(25): SEQ ID NO: 6483; WAN024FML; Start 169; Stop 193
cgttatgaattagtgtgggtgttga

SEQ ID NO: 439928 - DNA, 25 bp, Artificial
  probe
  misc_feature (1)..(25): SEQ ID NO: 6483; WAN024FML; Start 168; Stop 192
tcgttatgaattagtgtgggtgttg

SEQ ID NO: 439929 - DNA, 25 bp, Artificial
  probe
  misc_feature (1)..(25): SEQ ID NO: 6483; WAN024FML; Start 588; Stop 612
tcgacttggaatagatgataattgt

SEQ ID NO: 439930 - DNA, 25 bp, Artificial
  probe
  misc_feature (1)..(25): SEQ ID NO: 6483; WAN024FML; Start 165; Stop 189
taatcgttatgaattagtgtgggtg

SEQ ID NO: 439931 - DNA, 25 bp, Artificial
  probe
  misc_feature (1)..(25): SEQ ID NO: 6483; WAN024FML; Start 983; Stop 1007
acgaagagttgattgcatatatctc

SEQ ID NO: 439932 - DNA, 25 bp, Artificial
  probe
  misc_feature (1)..(25): SEQ ID NO: 6483; WAN024FML; Start 982; Stop 1006
aacgaagagttgattgcatatatct

SEQ ID NO: 439933 - DNA, 25 bp, Artificial
  probe
  misc_feature (1)..(25): SEQ ID NO: 6483; WAN024FML; Start 350; Stop 374
gaggtggagcatacaaagatagtga

SEQ ID NO: 439934 - DNA, 25 bp, Artificial
  probe
  misc_feature (1)..(25): SEQ ID NO: 6483; WAN024FML; Start 547; Stop 571
cgtaatcaagcagatgatggtctaa

SEQ ID NO: 439935 - DNA, 25 bp, Artificial
  probe
  misc_feature (1)..(25): SEQ ID NO: 6483; WAN024FML; Start 542; Stop 566
taattcgtaatcaagcagatgatgg

SEQ ID NO: 439936 - DNA, 25 bp, Artificial
  probe
  misc_feature (1)..(25): SEQ ID NO: 6483; WAN024FML; Start 543; Stop 567
aattcgtaatcaagcagatgatggt

SEQ ID NO: 439937 - DNA, 25 bp, Artificial
  probe
  misc_feature (1)..(25): SEQ ID NO: 6483; WAN024FML; Start 859; Stop 883
atatgggatatgattcatggaggga

SEQ ID NO: 439938 - DNA, 25 bp, Artificial
  probe
  misc_feature (1)..(25): SEQ ID NO: 6483; WAN024FML; Start 858; Stop 882
aatatgggatatgattcatggaggg

SEQ ID NO: 439939 - DNA, 25 bp, Artificial
  probe
  misc_feature (1)..(25): SEQ ID NO: 6483; WAN024FML; Start 841; Stop 865
actgattactcttcaacaatatggg

SEQ ID NO: 439940 - DNA, 25 bp, Artificial
  probe
  misc_feature (1)..(25): SEQ ID NO: 6483; WAN024FML; Start 332; Stop 356
atataaatacatggcatggaggtgg

SEQ ID NO: 439941 - DNA, 25 bp, Artificial
  probe
  misc_feature (1)..(25): SEQ ID NO: 6483; WAN024FML; Start 860; Stop 884
tatgggatatgattcatggagggaa

SEQ ID NO: 439942 - DNA, 25 bp, Artificial
  probe
  misc_feature (1)..(25): SEQ ID NO: 6483; WAN024FML; Start 351; Stop 375
aggtggagcatacaaagatagtgac

SEQ ID NO: 439943 - DNA, 25 bp, Artificial
  probe
  misc_feature (1)..(25): SEQ ID NO: 6483; WAN024FML; Start 347; Stop 371
atggaggtggagcatacaaagatag

SEQ ID NO: 439944 - DNA, 25 bp, Artificial
  probe
  misc_feature (1)..(25): SEQ ID NO: 6483; WAN024FML; Start 164; Stop 188
ttaatcgttatgaattagtgtgggt

SEQ ID NO: 439945 - DNA, 25 bp, Artificial
  probe
  misc_feature (1)..(25): SEQ ID NO: 6483; WAN024FML; Start 979; Stop 1003
actaacgaagagttgattgcatata

SEQ ID NO: 439946 - DNA, 25 bp, Artificial
  probe
  misc_feature (1)..(25): SEQ ID NO: 6483; WAN024FML; Start 544; Stop 568
attcgtaatcaagcagatgatggtc

SEQ ID NO: 439947 - DNA, 25 bp, Artificial
  probe
  misc_feature (1)..(25): SEQ ID NO: 6483; WAN024FML; Start 842; Stop 866
ctgattactcttcaacaatatggga

SEQ ID NO: 439948 - DNA, 25 bp, Artificial
  probe
  misc_feature (1)..(25): SEQ ID NO: 6483; WAN024FML; Start 173; Stop 197
atgaattagtgtgggtgttgaagga

SEQ ID NO: 439949 - DNA, 25 bp, Artificial
  probe
  misc_feature (1)..(25): SEQ ID NO: 6483; WAN024FML; Start 857; Stop 881
caatatgggatatgattcatggagg

SEQ ID NO: 439950 - DNA, 25 bp, Artificial
  probe
  misc_feature (1)..(25): SEQ ID NO: 6484; WAN024BSV; Start 140; Stop 164
tgtatgatattaaggtcgctgatga

SEQ ID NO: 439951 - DNA, 25 bp, Artificial
  probe
  misc_feature (1)..(25): SEQ ID NO: 6484; WAN024BSV; Start 141; Stop 165
gtatgatattaaggtcgctgatgaa

SEQ ID NO: 439952 - DNA, 25 bp, Artificial
  probe
  misc_feature (1)..(25): SEQ ID NO: 6484; WAN024BSV; Start 139; Stop 163
atgtatgatattaaggtcgctgatg

SEQ ID NO: 439953 - DNA, 25 bp, Artificial
  probe
  misc_feature (1)..(25): SEQ ID NO: 6484; WAN024BSV; Start 142; Stop 166
tatgatattaaggtcgctgatgaag

SEQ ID NO: 439954 - DNA, 25 bp, Artificial
  probe
  misc_feature (1)..(25): SEQ ID NO: 6484; WAN024BSV; Start 138; Stop 162
tatgtatgatattaaggtcgctgat

SEQ ID NO: 439955 - DNA, 25 bp, Artificial
  probe
  misc_feature (1)..(25): SEQ ID NO: 6484; WAN024BSV; Start 137; Stop 161
atatgtatgatattaaggtcgctga

SEQ ID NO: 439956 - DNA, 25 bp, Artificial
  probe
  misc_feature (1)..(25): SEQ ID NO: 6484; WAN024BSV; Start 209; Stop 233
atgaagaaatgatgagacgctatgg

SEQ ID NO: 439957 - DNA, 25 bp, Artificial
  probe
  misc_feature (1)..(25): SEQ ID NO: 6484; WAN024BSV; Start 136; Stop 160
gatatgtatgatattaaggtcgctg

SEQ ID NO: 439958 - DNA, 25 bp, Artificial
  probe
  misc_feature (1)..(25): SEQ ID NO: 6484; WAN024BSV; Start 135; Stop 159
agatatgtatgatattaaggtcgct

SEQ ID NO: 439959 - DNA, 25 bp, Artificial
  probe
  misc_feature (1)..(25): SEQ ID NO: 6484; WAN024BSV; Start 143; Stop 167
atgatattaaggtcgctgatgaagc

SEQ ID NO: 439960 - DNA, 25 bp, Artificial
  probe
  misc_feature (1)..(25): SEQ ID NO: 6484; WAN024BSV; Start 208; Stop 232
catgaagaaatgatgagacgctatg

SEQ ID NO: 439961 - DNA, 25 bp, Artificial
  probe
  misc_feature (1)..(25): SEQ ID NO: 6484; WAN024BSV; Start 207; Stop 231
acatgaagaaatgatgagacgctat

SEQ ID NO: 439962 - DNA, 25 bp, Artificial
  probe
  misc_feature (1)..(25): SEQ ID NO: 6484; WAN024BSV; Start 206; Stop 230
cacatgaagaaatgatgagacgcta

SEQ ID NO: 439963 - DNA, 25 bp, Artificial
  probe
  misc_feature (1)..(25): SEQ ID NO: 6484; WAN024BSV; Start 134; Stop 158
aagatatgtatgatattaaggtcgc

SEQ ID NO: 439964 - DNA, 25 bp, Artificial
  probe
  misc_feature (1)..(25): SEQ ID NO: 6484; WAN024BSV; Start 199; Stop 223
gctatctcacatgaagaaatgatga

SEQ ID NO: 439965 - DNA, 25 bp, Artificial
  probe
  misc_feature (1)..(25): SEQ ID NO: 6484; WAN024BSV; Start 94; Stop 118
aagactgactttattagacaagctg

SEQ ID NO: 439966 - DNA, 25 bp, Artificial
  probe
  misc_feature (1)..(25): SEQ ID NO: 6484; WAN024BSV; Start 198; Stop 222
agctatctcacatgaagaaatgatg

SEQ ID NO: 439967 - DNA, 25 bp, Artificial
  probe
  misc_feature (1)..(25): SEQ ID NO: 6484; WAN024BSV; Start 95; Stop 119
agactgactttattagacaagctgt

SEQ ID NO: 439968 - DNA, 25 bp, Artificial
  probe
  misc_feature (1)..(25): SEQ ID NO: 6484; WAN024BSV; Start 96; Stop 120
gactgactttattagacaagctgtt

SEQ ID NO: 439969 - DNA, 25 bp, Artificial
  probe
  misc_feature (1)..(25): SEQ ID NO: 6484; WAN024BSV; Start 144; Stop 168
tgatattaaggtcgctgatgaagct

SEQ ID NO: 439970 - DNA, 25 bp, Artificial
  probe
  misc_feature (1)..(25): SEQ ID NO: 6484; WAN024BSV; Start 196; Stop 220
aaagctatctcacatgaagaaatga

SEQ ID NO: 439971 - DNA, 25 bp, Artificial
  probe
  misc_feature (1)..(25): SEQ ID NO: 6484; WAN024BSV; Start 210; Stop 234
tgaagaaatgatgagacgctatggc

SEQ ID NO: 439972 - DNA, 25 bp, Artificial
  probe
  misc_feature (1)..(25): SEQ ID NO: 6484; WAN024BSV; Start 197; Stop 221
aagctatctcacatgaagaaatgat

SEQ ID NO: 439973 - DNA, 25 bp, Artificial
  probe
  misc_feature (1)..(25): SEQ ID NO: 6484; WAN024BSV; Start 205; Stop 229
tcacatgaagaaatgatgagacgct

SEQ ID NO: 439974 - DNA, 25 bp, Artificial
  probe
  misc_feature (1)..(25): SEQ ID NO: 6484; WAN024BSV; Start 92; Stop 116
caaagactgactttattagacaagc

SEQ ID NO: 439975 - DNA, 25 bp, Artificial
  probe
  misc_feature (1)..(25): SEQ ID NO: 6484; WAN024BSV; Start 97; Stop 121
actgactttattagacaagctgtta

SEQ ID NO: 439976 - DNA, 25 bp, Artificial
  probe
  misc_feature (1)..(25): SEQ ID NO: 6484; WAN024BSV; Start 93; Stop 117
aaagactgactttattagacaagct

SEQ ID NO: 439977 - DNA, 25 bp, Artificial
  probe
  misc_feature (1)..(25): SEQ ID NO: 6484; WAN024BSV; Start 89; Stop 113
caacaaagactgactttattagaca

SEQ ID NO: 439978 - DNA, 25 bp, Artificial
  probe
  misc_feature (1)..(25): SEQ ID NO: 6484; WAN024BSV; Start 88; Stop 112
acaacaaagactgactttattagac

SEQ ID NO: 439979 - DNA, 25 bp, Artificial
  probe
  misc_feature (1)..(25): SEQ ID NO: 6484; WAN024BSV; Start 91; Stop 115
acaaagactgactttattagacaag

SEQ ID NO: 439980 - DNA, 25 bp, Artificial
  probe
  misc_feature (1)..(25): SEQ ID NO: 6484; WAN024BSV; Start 149; Stop 173
ttaaggtcgctgatgaagcttataa

SEQ ID NO: 439981 - DNA, 25 bp, Artificial
  probe
  misc_feature (1)..(25): SEQ ID NO: 6484; WAN024BSV; Start 148; Stop 172
attaaggtcgctgatgaagcttata

SEQ ID NO: 439982 - DNA, 25 bp, Artificial
  probe
  misc_feature (1)..(25): SEQ ID NO: 6484; WAN024BSV; Start 147; Stop 171
tattaaggtcgctgatgaagcttat

SEQ ID NO: 439983 - DNA, 25 bp, Artificial
  probe
  misc_feature (1)..(25): SEQ ID NO: 6485; WAN024BV3; Start 133; Stop 157
tatcctcatccattaagtccagtca

SEQ ID NO: 439984 - DNA, 25 bp, Artificial
  probe
  misc_feature (1)..(25): SEQ ID NO: 6485; WAN024BV3; Start 132; Stop 156
atatcctcatccattaagtccagtc

SEQ ID NO: 439985 - DNA, 25 bp, Artificial
  probe
  misc_feature (1)..(25): SEQ ID NO: 6485; WAN024BV3; Start 188; Stop 212
gacatccatctgacattgctaactt

SEQ ID NO: 439986 - DNA, 25 bp, Artificial
  probe
  misc_feature (1)..(25): SEQ ID NO: 6485; WAN024BV3; Start 134; Stop 158
atcctcatccattaagtccagtcat

SEQ ID NO: 439987 - DNA, 25 bp, Artificial
  probe
  misc_feature (1)..(25): SEQ ID NO: 6485; WAN024BV3; Start 189; Stop 213
acatccatctgacattgctaacttg

SEQ ID NO: 439988 - DNA, 25 bp, Artificial
  probe
  misc_feature (1)..(25): SEQ ID NO: 6485; WAN024BV3; Start 136; Stop 160
cctcatccattaagtccagtcattg

SEQ ID NO: 439989 - DNA, 25 bp, Artificial
  probe
  misc_feature (1)..(25): SEQ ID NO: 6485; WAN024BV3; Start 135; Stop 159
tcctcatccattaagtccagtcatt

SEQ ID NO: 439990 - DNA, 25 bp, Artificial
  probe
  misc_feature (1)..(25): SEQ ID NO: 6485; WAN024BV3; Start 137; Stop 161
ctcatccattaagtccagtcattga

SEQ ID NO: 439991 - DNA, 25 bp, Artificial
  probe
  misc_feature (1)..(25): SEQ ID NO: 6485; WAN024BV3; Start 179; Stop 203
ataagaacggacatccatctgacat

SEQ ID NO: 439992 - DNA, 25 bp, Artificial
  probe
  misc_feature (1)..(25): SEQ ID NO: 6485; WAN024BV3; Start 180; Stop 204
taagaacggacatccatctgacatt

SEQ ID NO: 439993 - DNA, 25 bp, Artificial
  probe
  misc_feature (1)..(25): SEQ ID NO: 6485; WAN024BV3; Start 178; Stop 202
aataagaacggacatccatctgaca

SEQ ID NO: 439994 - DNA, 25 bp, Artificial
  probe
  misc_feature (1)..(25): SEQ ID NO: 6485; WAN024BV3; Start 190; Stop 214
catccatctgacattgctaacttgc

SEQ ID NO: 439995 - DNA, 25 bp, Artificial
  probe
  misc_feature (1)..(25): SEQ ID NO: 6485; WAN024BV3; Start 255; Stop 279
gctatatgctgatgagaagacaaac

SEQ ID NO: 439996 - DNA, 25 bp, Artificial
  probe
  misc_feature (1)..(25): SEQ ID NO: 6485; WAN024BV3; Start 187; Stop 211
ggacatccatctgacattgctaact

SEQ ID NO: 439997 - DNA, 25 bp, Artificial
  probe
  misc_feature (1)..(25): SEQ ID NO: 6485; WAN024BV3; Start 157; Stop 181
attgaccacatcgttccagtaaata

SEQ ID NO: 439998 - DNA, 25 bp, Artificial
  probe
  misc_feature (1)..(25): SEQ ID NO: 6485; WAN024BV3; Start 256; Stop 280
ctatatgctgatgagaagacaaacg

SEQ ID NO: 439999 - DNA, 25 bp, Artificial
  probe
  misc_feature (1)..(25): SEQ ID NO: 6485; WAN024BV3; Start 158; Stop 182
ttgaccacatcgttccagtaaataa

SEQ ID NO: 440000 - DNA, 25 bp, Artificial
  probe
  misc_feature (1)..(25): SEQ ID NO: 6485; WAN024BV3; Start 138; Stop 162
tcatccattaagtccagtcattgac

SEQ ID NO: 440001 - DNA, 25 bp, Artificial
  probe
  misc_feature (1)..(25): SEQ ID NO: 6485; WAN024BV3; Start 160; Stop 184
gaccacatcgttccagtaaataaga

SEQ ID NO: 440002 - DNA, 25 bp, Artificial
  probe
  misc_feature (1)..(25): SEQ ID NO: 6485; WAN024BV3; Start 144; Stop 168
attaagtccagtcattgaccacatc

SEQ ID NO: 440003 - DNA, 25 bp, Artificial
  probe
  misc_feature (1)..(25): SEQ ID NO: 6485; WAN024BV3; Start 257; Stop 281
tatatgctgatgagaagacaaacgg

SEQ ID NO: 440004 - DNA, 25 bp, Artificial
  probe
  misc_feature (1)..(25): SEQ ID NO: 6485; WAN024BV3; Start 159; Stop 183
tgaccacatcgttccagtaaataag

SEQ ID NO: 440005 - DNA, 25 bp, Artificial
  probe
  misc_feature (1)..(25): SEQ ID NO: 6485; WAN024BV3; Start 143; Stop 167
cattaagtccagtcattgaccacat

SEQ ID NO: 440006 - DNA, 25 bp, Artificial
  probe
  misc_feature (1)..(25): SEQ ID NO: 6485; WAN024BV3; Start 286; Stop 310
aaggtcattggtaataggaacttac

SEQ ID NO: 440007 - DNA, 25 bp, Artificial
  probe
  misc_feature (1)..(25): SEQ ID NO: 6485; WAN024BV3; Start 161; Stop 185
accacatcgttccagtaaataagaa

SEQ ID NO: 440008 - DNA, 25 bp, Artificial
  probe
  misc_feature (1)..(25): SEQ ID NO: 6485; WAN024BV3; Start 39; Stop 63
ccatagagtagcctttgagaagaat

SEQ ID NO: 440009 - DNA, 25 bp, Artificial
  probe
  misc_feature (1)..(25): SEQ ID NO: 6485; WAN024BV3; Start 173; Stop 197
cagtaaataagaacggacatccatc

SEQ ID NO: 440010 - DNA, 25 bp, Artificial
  probe
  misc_feature (1)..(25): SEQ ID NO: 6485; WAN024BV3; Start 131; Stop 155
gatatcctcatccattaagtccagt

SEQ ID NO: 440011 - DNA, 25 bp, Artificial
  probe
  misc_feature (1)..(25): SEQ ID NO: 6485; WAN024BV3; Start 172; Stop 196
ccagtaaataagaacggacatccat

SEQ ID NO: 440012 - DNA, 25 bp, Artificial
  probe
  misc_feature (1)..(25): SEQ ID NO: 6485; WAN024BV3; Start 283; Stop 307
acaaaggtcattggtaataggaact

SEQ ID NO: 440013 - DNA, 25 bp, Artificial
  probe
  misc_feature (1)..(25): SEQ ID NO: 6485; WAN024BV3; Start 130; Stop 154
agatatcctcatccattaagtccag

SEQ ID NO: 440014 - DNA, 25 bp, Artificial
  probe
  misc_feature (1)..(25): SEQ ID NO: 6485; WAN024BV3; Start 139; Stop 163
catccattaagtccagtcattgacc

SEQ ID NO: 440015 - DNA, 25 bp, Artificial
  probe
  misc_feature (1)..(25): SEQ ID NO: 6485; WAN024BV3; Start 280; Stop 304
ggaacaaaggtcattggtaatagga

SEQ ID NO: 440016 - DNA, 25 bp, Artificial
  probe
  misc_feature (1)..(25): SEQ ID NO: 6486; WAN0249EF; Start 90; Stop 114
gattgcgttcagctaattctagtaa

SEQ ID NO: 440017 - DNA, 25 bp, Artificial
  probe
  misc_feature (1)..(25): SEQ ID NO: 6486; WAN0249EF; Start 89; Stop 113
tgattgcgttcagctaattctagta

SEQ ID NO: 440018 - DNA, 25 bp, Artificial
  probe
  misc_feature (1)..(25): SEQ ID NO: 6486; WAN0249EF; Start 86; Stop 110
aagtgattgcgttcagctaattcta

SEQ ID NO: 440019 - DNA, 25 bp, Artificial
  probe
  misc_feature (1)..(25): SEQ ID NO: 6486; WAN0249EF; Start 87; Stop 111
agtgattgcgttcagctaattctag

SEQ ID NO: 440020 - DNA, 25 bp, Artificial
  probe
  misc_feature (1)..(25): SEQ ID NO: 6486; WAN0249EF; Start 88; Stop 112
gtgattgcgttcagctaattctagt

SEQ ID NO: 440021 - DNA, 25 bp, Artificial
  probe
  misc_feature (1)..(25): SEQ ID NO: 6486; WAN0249EF; Start 83; Stop 107
ttcaagtgattgcgttcagctaatt

SEQ ID NO: 440022 - DNA, 25 bp, Artificial
  probe
  misc_feature (1)..(25): SEQ ID NO: 6486; WAN0249EF; Start 85; Stop 109
caagtgattgcgttcagctaattct

SEQ ID NO: 440023 - DNA, 25 bp, Artificial
  probe
  misc_feature (1)..(25): SEQ ID NO: 6486; WAN0249EF; Start 84; Stop 108
tcaagtgattgcgttcagctaattc

SEQ ID NO: 440024 - DNA, 25 bp, Artificial
  probe
  misc_feature (1)..(25): SEQ ID NO: 6486; WAN0249EF; Start 33; Stop 57
ataacgctatccataccatttctat

SEQ ID NO: 440025 - DNA, 25 bp, Artificial
  probe
  misc_feature (1)..(25): SEQ ID NO: 6486; WAN0249EF; Start 35; Stop 59
aacgctatccataccatttctatat

SEQ ID NO: 440026 - DNA, 25 bp, Artificial
  probe
  misc_feature (1)..(25): SEQ ID NO: 6486; WAN0249EF; Start 92; Stop 116
ttgcgttcagctaattctagtaaat

SEQ ID NO: 440027 - DNA, 25 bp, Artificial
  probe
  misc_feature (1)..(25): SEQ ID NO: 6486; WAN0249EF; Start 91; Stop 115
attgcgttcagctaattctagtaaa

SEQ ID NO: 440028 - DNA, 25 bp, Artificial
  probe
  misc_feature (1)..(25): SEQ ID NO: 6486; WAN0249EF; Start 31; Stop 55
gtataacgctatccataccatttct

SEQ ID NO: 440029 - DNA, 25 bp, Artificial
  probe
  misc_feature (1)..(25): SEQ ID NO: 6486; WAN0249EF; Start 30; Stop 54
agtataacgctatccataccatttc

SEQ ID NO: 440030 - DNA, 25 bp, Artificial
  probe
  misc_feature (1)..(25): SEQ ID NO: 6486; WAN0249EF; Start 34; Stop 58
taacgctatccataccatttctata

SEQ ID NO: 440031 - DNA, 25 bp, Artificial
  probe
  misc_feature (1)..(25): SEQ ID NO: 6486; WAN0249EF; Start 32; Stop 56
tataacgctatccataccatttcta

SEQ ID NO: 440032 - DNA, 25 bp, Artificial
  probe
  misc_feature (1)..(25): SEQ ID NO: 6486; WAN0249EF; Start 93; Stop 117
tgcgttcagctaattctagtaaata

SEQ ID NO: 440033 - DNA, 25 bp, Artificial
  probe
  misc_feature (1)..(25): SEQ ID NO: 6486; WAN0249EF; Start 94; Stop 118
gcgttcagctaattctagtaaatag

SEQ ID NO: 440034 - DNA, 25 bp, Artificial
  probe
  misc_feature (1)..(25): SEQ ID NO: 6486; WAN0249EF; Start 82; Stop 106
tttcaagtgattgcgttcagctaat

SEQ ID NO: 440035 - DNA, 25 bp, Artificial
  probe
  misc_feature (1)..(25): SEQ ID NO: 6486; WAN0249EF; Start 36; Stop 60
acgctatccataccatttctatata

SEQ ID NO: 440036 - DNA, 25 bp, Artificial
  probe
  misc_feature (1)..(25): SEQ ID NO: 6486; WAN0249EF; Start 95; Stop 119
cgttcagctaattctagtaaatagg

SEQ ID NO: 440037 - DNA, 25 bp, Artificial
  probe
  misc_feature (1)..(25): SEQ ID NO: 6486; WAN0249EF; Start 99; Stop 123
cagctaattctagtaaataggtgtg

SEQ ID NO: 440038 - DNA, 25 bp, Artificial
  probe
  misc_feature (1)..(25): SEQ ID NO: 6486; WAN0249EF; Start 164; Stop 188
tctagtatattttggtacgcctctt

SEQ ID NO: 440039 - DNA, 25 bp, Artificial
  probe
  misc_feature (1)..(25): SEQ ID NO: 6486; WAN0249EF; Start 163; Stop 187
ttctagtatattttggtacgcctct

SEQ ID NO: 440040 - DNA, 25 bp, Artificial
  probe
  misc_feature (1)..(25): SEQ ID NO: 6486; WAN0249EF; Start 78; Stop 102
taattttcaagtgattgcgttcagc

SEQ ID NO: 440041 - DNA, 25 bp, Artificial
  probe
  misc_feature (1)..(25): SEQ ID NO: 6486; WAN0249EF; Start 100; Stop 124
agctaattctagtaaataggtgtga

SEQ ID NO: 440042 - DNA, 25 bp, Artificial
  probe
  misc_feature (1)..(25): SEQ ID NO: 6486; WAN0249EF; Start 98; Stop 122
tcagctaattctagtaaataggtgt

SEQ ID NO: 440043 - DNA, 25 bp, Artificial
  probe
  misc_feature (1)..(25): SEQ ID NO: 6486; WAN0249EF; Start 101; Stop 125
gctaattctagtaaataggtgtgaa

SEQ ID NO: 440044 - DNA, 25 bp, Artificial
  probe
  misc_feature (1)..(25): SEQ ID NO: 6486; WAN0249EF; Start 165; Stop 189
ctagtatattttggtacgcctcttt

SEQ ID NO: 440045 - DNA, 25 bp, Artificial
  probe
  misc_feature (1)..(25): SEQ ID NO: 6486; WAN0249EF; Start 162; Stop 186
tttctagtatattttggtacgcctc

SEQ ID NO: 440046 - DNA, 25 bp, Artificial
  probe
  misc_feature (1)..(25): SEQ ID NO: 6486; WAN0249EF; Start 166; Stop 190
tagtatattttggtacgcctctttt

SEQ ID NO: 440047 - DNA, 25 bp, Artificial
  probe
  misc_feature (1)..(25): SEQ ID NO: 6486; WAN0249EF; Start 161; Stop 185
ttttctagtatattttggtacgcct

SEQ ID NO: 440048 - DNA, 25 bp, Artificial
  probe
  misc_feature (1)..(25): SEQ ID NO: 6486; WAN0249EF; Start 97; Stop 121
ttcagctaattctagtaaataggtg

SEQ ID NO: 440049 - DNA, 25 bp, Artificial
  probe
  misc_feature (1)..(25): SEQ ID NO: 6487; WAN0249EE; Start 119; Stop 143
ttcaagtgattgcgttcagttaatt

SEQ ID NO: 440050 - DNA, 25 bp, Artificial
  probe
  misc_feature (1)..(25): SEQ ID NO: 6487; WAN0249EE; Start 121; Stop 145
caagtgattgcgttcagttaattct

SEQ ID NO: 440051 - DNA, 25 bp, Artificial
  probe
  misc_feature (1)..(25): SEQ ID NO: 6487; WAN0249EE; Start 120; Stop 144
tcaagtgattgcgttcagttaattc

SEQ ID NO: 440052 - DNA, 25 bp, Artificial
  probe
  misc_feature (1)..(25): SEQ ID NO: 6487; WAN0249EE; Start 124; Stop 148
gtgattgcgttcagttaattctagt

SEQ ID NO: 440053 - DNA, 25 bp, Artificial
  probe
  misc_feature (1)..(25): SEQ ID NO: 6487; WAN0249EE; Start 122; Stop 146
aagtgattgcgttcagttaattcta

SEQ ID NO: 440054 - DNA, 25 bp, Artificial
  probe
  misc_feature (1)..(25): SEQ ID NO: 6487; WAN0249EE; Start 123; Stop 147
agtgattgcgttcagttaattctag

SEQ ID NO: 440055 - DNA, 25 bp, Artificial
  probe
  misc_feature (1)..(25): SEQ ID NO: 6487; WAN0249EE; Start 125; Stop 149
tgattgcgttcagttaattctagta

SEQ ID NO: 440056 - DNA, 25 bp, Artificial
  probe
  misc_feature (1)..(25): SEQ ID NO: 6487; WAN0249EE; Start 126; Stop 150
gattgcgttcagttaattctagtaa

SEQ ID NO: 440057 - DNA, 25 bp, Artificial
  probe
  misc_feature (1)..(25): SEQ ID NO: 6487; WAN0249EE; Start 118; Stop 142
tttcaagtgattgcgttcagttaat

SEQ ID NO: 440058 - DNA, 25 bp, Artificial
  probe
  misc_feature (1)..(25): SEQ ID NO: 6487; WAN0249EE; Start 34; Stop 58
taacgctatccataccatttgtaaa

SEQ ID NO: 440059 - DNA, 25 bp, Artificial
  probe
  misc_feature (1)..(25): SEQ ID NO: 6487; WAN0249EE; Start 33; Stop 57
ataacgctatccataccatttgtaa

SEQ ID NO: 440060 - DNA, 25 bp, Artificial
  probe
  misc_feature (1)..(25): SEQ ID NO: 6487; WAN0249EE; Start 31; Stop 55
gtataacgctatccataccatttgt

SEQ ID NO: 440061 - DNA, 25 bp, Artificial
  probe
  misc_feature (1)..(25): SEQ ID NO: 6487; WAN0249EE; Start 32; Stop 56
tataacgctatccataccatttgta

SEQ ID NO: 440062 - DNA, 25 bp, Artificial
  probe
  misc_feature (1)..(25): SEQ ID NO: 6487; WAN0249EE; Start 30; Stop 54
agtataacgctatccataccatttg

SEQ ID NO: 440063 - DNA, 25 bp, Artificial
  probe
  misc_feature (1)..(25): SEQ ID NO: 6487; WAN0249EE; Start 128; Stop 152
ttgcgttcagttaattctagtaaat

SEQ ID NO: 440064 - DNA, 25 bp, Artificial
  probe
  misc_feature (1)..(25): SEQ ID NO: 6487; WAN0249EE; Start 127; Stop 151
attgcgttcagttaattctagtaaa

SEQ ID NO: 440065 - DNA, 25 bp, Artificial
  probe
  misc_feature (1)..(25): SEQ ID NO: 6487; WAN0249EE; Start 35; Stop 59
aacgctatccataccatttgtaaaa

SEQ ID NO: 440066 - DNA, 25 bp, Artificial
  probe
  misc_feature (1)..(25): SEQ ID NO: 6487; WAN0249EE; Start 116; Stop 140
attttcaagtgattgcgttcagtta

SEQ ID NO: 440067 - DNA, 25 bp, Artificial
  probe
  misc_feature (1)..(25): SEQ ID NO: 6487; WAN0249EE; Start 117; Stop 141
ttttcaagtgattgcgttcagttaa

SEQ ID NO: 440068 - DNA, 25 bp, Artificial
  probe
  misc_feature (1)..(25): SEQ ID NO: 6487; WAN0249EE; Start 114; Stop 138
taattttcaagtgattgcgttcagt

SEQ ID NO: 440069 - DNA, 25 bp, Artificial
  probe
  misc_feature (1)..(25): SEQ ID NO: 6487; WAN0249EE; Start 115; Stop 139
aattttcaagtgattgcgttcagtt

SEQ ID NO: 440070 - DNA, 25 bp, Artificial
  probe
  misc_feature (1)..(25): SEQ ID NO: 6487; WAN0249EE; Start 129; Stop 153
tgcgttcagttaattctagtaaata

SEQ ID NO: 440071 - DNA, 25 bp, Artificial
  probe
  misc_feature (1)..(25): SEQ ID NO: 6487; WAN0249EE; Start 36; Stop 60
acgctatccataccatttgtaaaat

SEQ ID NO: 440072 - DNA, 25 bp, Artificial
  probe
  misc_feature (1)..(25): SEQ ID NO: 6487; WAN0249EE; Start 74; Stop 98
cgaagcgataggatttctatatatc

SEQ ID NO: 440073 - DNA, 25 bp, Artificial
  probe
  misc_feature (1)..(25): SEQ ID NO: 6487; WAN0249EE; Start 130; Stop 154
gcgttcagttaattctagtaaatag

SEQ ID NO: 440074 - DNA, 25 bp, Artificial
  probe
  misc_feature (1)..(25): SEQ ID NO: 6487; WAN0249EE; Start 57; Stop 81
aaatatagaaatcctatcgaagcga

SEQ ID NO: 440075 - DNA, 25 bp, Artificial
  probe
  misc_feature (1)..(25): SEQ ID NO: 6487; WAN0249EE; Start 200; Stop 224
tctagtatattttggtacgcatctt

SEQ ID NO: 440076 - DNA, 25 bp, Artificial
  probe
  misc_feature (1)..(25): SEQ ID NO: 6487; WAN0249EE; Start 199; Stop 223
ttctagtatattttggtacgcatct

SEQ ID NO: 440077 - DNA, 25 bp, Artificial
  probe
  misc_feature (1)..(25): SEQ ID NO: 6487; WAN0249EE; Start 37; Stop 61
cgctatccataccatttgtaaaata

SEQ ID NO: 440078 - DNA, 25 bp, Artificial
  probe
  misc_feature (1)..(25): SEQ ID NO: 6487; WAN0249EE; Start 201; Stop 225
ctagtatattttggtacgcatcttt

SEQ ID NO: 440079 - DNA, 25 bp, Artificial
  probe
  misc_feature (1)..(25): SEQ ID NO: 6487; WAN0249EE; Start 198; Stop 222
tttctagtatattttggtacgcatc

SEQ ID NO: 440080 - DNA, 25 bp, Artificial
  probe
  misc_feature (1)..(25): SEQ ID NO: 6487; WAN0249EE; Start 131; Stop 155
cgttcagttaattctagtaaatagg

SEQ ID NO: 440081 - DNA, 25 bp, Artificial
  probe
  misc_feature (1)..(25): SEQ ID NO: 6487; WAN0249EE; Start 135; Stop 159
cagttaattctagtaaataggtgtg

SEQ ID NO: 440082 - DNA, 25 bp, Artificial
  probe
  misc_feature (1)..(25): SEQ ID NO: 6488; WAN024BQG; Start 206; Stop 230
atggaggcttagtatctgctacaat

SEQ ID NO: 440083 - DNA, 25 bp, Artificial
  probe
  misc_feature (1)..(25): SEQ ID NO: 6488; WAN024BQG; Start 205; Stop 229
aatggaggcttagtatctgctacaa

SEQ ID NO: 440084 - DNA, 25 bp, Artificial
  probe
  misc_feature (1)..(25): SEQ ID NO: 6488; WAN024BQG; Start 1642; Stop 1666
ggacgcctagttagtatcatcaatg

SEQ ID NO: 440085 - DNA, 25 bp, Artificial
  probe
  misc_feature (1)..(25): SEQ ID NO: 6488; WAN024BQG; Start 207; Stop 231
tggaggcttagtatctgctacaatt

SEQ ID NO: 440086 - DNA, 25 bp, Artificial
  probe
  misc_feature (1)..(25): SEQ ID NO: 6488; WAN024BQG; Start 1643; Stop 1667
gacgcctagttagtatcatcaatga

SEQ ID NO: 440087 - DNA, 25 bp, Artificial
  probe
  misc_feature (1)..(25): SEQ ID NO: 6488; WAN024BQG; Start 1644; Stop 1668
acgcctagttagtatcatcaatgaa

SEQ ID NO: 440088 - DNA, 25 bp, Artificial
  probe
  misc_feature (1)..(25): SEQ ID NO: 6488; WAN024BQG; Start 677; Stop 701
ctaactcaatgatgaaggaaggagc

SEQ ID NO: 440089 - DNA, 25 bp, Artificial
  probe
  misc_feature (1)..(25): SEQ ID NO: 6488; WAN024BQG; Start 1362; Stop 1386
tcaagattacactaacattcatcca

SEQ ID NO: 440090 - DNA, 25 bp, Artificial
  probe
  misc_feature (1)..(25): SEQ ID NO: 6488; WAN024BQG; Start 1645; Stop 1669
cgcctagttagtatcatcaatgaac

SEQ ID NO: 440091 - DNA, 25 bp, Artificial
  probe
  misc_feature (1)..(25): SEQ ID NO: 6488; WAN024BQG; Start 676; Stop 700
cctaactcaatgatgaaggaaggag

SEQ ID NO: 440092 - DNA, 25 bp, Artificial
  probe
  misc_feature (1)..(25): SEQ ID NO: 6488; WAN024BQG; Start 723; Stop 747
atgtaggatagcatatcagagtctt

SEQ ID NO: 440093 - DNA, 25 bp, Artificial
  probe
  misc_feature (1)..(25): SEQ ID NO: 6488; WAN024BQG; Start 722; Stop 746
aatgtaggatagcatatcagagtct

SEQ ID NO: 440094 - DNA, 25 bp, Artificial
  probe
  misc_feature (1)..(25): SEQ ID NO: 6488; WAN024BQG; Start 670; Stop 694
ggtaatcctaactcaatgatgaagg

SEQ ID NO: 440095 - DNA, 25 bp, Artificial
  probe
  misc_feature (1)..(25): SEQ ID NO: 6488; WAN024BQG; Start 114; Stop 138
cttagtagatgatggttcgacagat

SEQ ID NO: 440096 - DNA, 25 bp, Artificial
  probe
  misc_feature (1)..(25): SEQ ID NO: 6488; WAN024BQG; Start 117; Stop 141
agtagatgatggttcgacagatagt

SEQ ID NO: 440097 - DNA, 25 bp, Artificial
  probe
  misc_feature (1)..(25): SEQ ID NO: 6488; WAN024BQG; Start 118; Stop 142
gtagatgatggttcgacagatagta

SEQ ID NO: 440098 - DNA, 25 bp, Artificial
  probe
  misc_feature (1)..(25): SEQ ID NO: 6488; WAN024BQG; Start 277; Stop 301
ccagatgataagttaggattggact

SEQ ID NO: 440099 - DNA, 25 bp, Artificial
  probe
  misc_feature (1)..(25): SEQ ID NO: 6488; WAN024BQG; Start 1363; Stop 1387
caagattacactaacattcatccaa

SEQ ID NO: 440100 - DNA, 25 bp, Artificial
  probe
  misc_feature (1)..(25): SEQ ID NO: 6488; WAN024BQG; Start 119; Stop 143
tagatgatggttcgacagatagtag

SEQ ID NO: 440101 - DNA, 25 bp, Artificial
  probe
  misc_feature (1)..(25): SEQ ID NO: 6488; WAN024BQG; Start 116; Stop 140
tagtagatgatggttcgacagatag

SEQ ID NO: 440102 - DNA, 25 bp, Artificial
  probe
  misc_feature (1)..(25): SEQ ID NO: 6488; WAN024BQG; Start 113; Stop 137
tcttagtagatgatggttcgacaga

SEQ ID NO: 440103 - DNA, 25 bp, Artificial
  probe
  misc_feature (1)..(25): SEQ ID NO: 6488; WAN024BQG; Start 944; Stop 968
aacttcagctattgatgattcgtct

SEQ ID NO: 440104 - DNA, 25 bp, Artificial
  probe
  misc_feature (1)..(25): SEQ ID NO: 6488; WAN024BQG; Start 945; Stop 969
acttcagctattgatgattcgtcta

SEQ ID NO: 440105 - DNA, 25 bp, Artificial
  probe
  misc_feature (1)..(25): SEQ ID NO: 6488; WAN024BQG; Start 1608; Stop 1632
atggtctggatttatgattgcttct

SEQ ID NO: 440106 - DNA, 25 bp, Artificial
  probe
  misc_feature (1)..(25): SEQ ID NO: 6488; WAN024BQG; Start 1263; Stop 1287
tggctttgatgagatacctgaaata

SEQ ID NO: 440107 - DNA, 25 bp, Artificial
  probe
  misc_feature (1)..(25): SEQ ID NO: 6488; WAN024BQG; Start 1262; Stop 1286
atggctttgatgagatacctgaaat

SEQ ID NO: 440108 - DNA, 25 bp, Artificial
  probe
  misc_feature (1)..(25): SEQ ID NO: 6488; WAN024BQG; Start 806; Stop 830
tcttagtgctttctttcttcaatcg

SEQ ID NO: 440109 - DNA, 25 bp, Artificial
  probe
  misc_feature (1)..(25): SEQ ID NO: 6488; WAN024BQG; Start 682; Stop 706
tcaatgatgaaggaaggagctatta

SEQ ID NO: 440110 - DNA, 25 bp, Artificial
  probe
  misc_feature (1)..(25): SEQ ID NO: 6488; WAN024BQG; Start 681; Stop 705
ctcaatgatgaaggaaggagctatt

SEQ ID NO: 440111 - DNA, 25 bp, Artificial
  probe
  misc_feature (1)..(25): SEQ ID NO: 6488; WAN024BQG; Start 115; Stop 139
ttagtagatgatggttcgacagata

SEQ ID NO: 440112 - DNA, 25 bp, Artificial
  probe
  misc_feature (1)..(25): SEQ ID NO: 6488; WAN024BQG; Start 79; Stop 103
ttgaagcagcagacgtataagaatt

SEQ ID NO: 440113 - DNA, 25 bp, Artificial
  probe
  misc_feature (1)..(25): SEQ ID NO: 6488; WAN024BQG; Start 724; Stop 748
tgtaggatagcatatcagagtctta

SEQ ID NO: 440114 - DNA, 25 bp, Artificial
  probe
  misc_feature (1)..(25): SEQ ID NO: 6488; WAN024BQG; Start 1264; Stop 1288
ggctttgatgagatacctgaaatag

SEQ ID NO: 440115 - DNA, 25 bp, Artificial
  probe
  misc_feature (1)..(25): SEQ ID NO: 6489; WAN024BVD; Start 381; Stop 405
ttatcctcgtattcaatccagtgtt

SEQ ID NO: 440116 - DNA, 25 bp, Artificial
  probe
  misc_feature (1)..(25): SEQ ID NO: 6489; WAN024BVD; Start 380; Stop 404
cttatcctcgtattcaatccagtgt

SEQ ID NO: 440117 - DNA, 25 bp, Artificial
  probe
  misc_feature (1)..(25): SEQ ID NO: 6489; WAN024BVD; Start 6; Stop 30
tagattagtgaacgatagcaggaag

SEQ ID NO: 440118 - DNA, 25 bp, Artificial
  probe
  misc_feature (1)..(25): SEQ ID NO: 6489; WAN024BVD; Start 5; Stop 29
atagattagtgaacgatagcaggaa

SEQ ID NO: 440119 - DNA, 25 bp, Artificial
  probe
  misc_feature (1)..(25): SEQ ID NO: 6489; WAN024BVD; Start 4; Stop 28
aatagattagtgaacgatagcagga

SEQ ID NO: 440120 - DNA, 25 bp, Artificial
  probe
  misc_feature (1)..(25): SEQ ID NO: 6489; WAN024BVD; Start 3; Stop 27
gaatagattagtgaacgatagcagg

SEQ ID NO: 440121 - DNA, 25 bp, Artificial
  probe
  misc_feature (1)..(25): SEQ ID NO: 6489; WAN024BVD; Start 8; Stop 32
gattagtgaacgatagcaggaagtg

SEQ ID NO: 440122 - DNA, 25 bp, Artificial
  probe
  misc_feature (1)..(25): SEQ ID NO: 6489; WAN024BVD; Start 7; Stop 31
agattagtgaacgatagcaggaagt

SEQ ID NO: 440123 - DNA, 25 bp, Artificial
  probe
  misc_feature (1)..(25): SEQ ID NO: 6489; WAN024BVD; Start 382; Stop 406
tatcctcgtattcaatccagtgttg

SEQ ID NO: 440124 - DNA, 25 bp, Artificial
  probe
  misc_feature (1)..(25): SEQ ID NO: 6489; WAN024BVD; Start 379; Stop 403
acttatcctcgtattcaatccagtg

SEQ ID NO: 440125 - DNA, 25 bp, Artificial
  probe
  misc_feature (1)..(25): SEQ ID NO: 6489; WAN024BVD; Start 378; Stop 402
aacttatcctcgtattcaatccagt

SEQ ID NO: 440126 - DNA, 25 bp, Artificial
  probe
  misc_feature (1)..(25): SEQ ID NO: 6489; WAN024BVD; Start 2; Stop 26
tgaatagattagtgaacgatagcag

SEQ ID NO: 440127 - DNA, 25 bp, Artificial
  probe
  misc_feature (1)..(25): SEQ ID NO: 6489; WAN024BVD; Start 9; Stop 33
attagtgaacgatagcaggaagtgt

SEQ ID NO: 440128 - DNA, 25 bp, Artificial
  probe
  misc_feature (1)..(25): SEQ ID NO: 6489; WAN024BVD; Start 1; Stop 25
atgaatagattagtgaacgatagca

SEQ ID NO: 440129 - DNA, 25 bp, Artificial
  probe
  misc_feature (1)..(25): SEQ ID NO: 6489; WAN024BVD; Start 10; Stop 34
ttagtgaacgatagcaggaagtgtg

SEQ ID NO: 440130 - DNA, 25 bp, Artificial
  probe
  misc_feature (1)..(25): SEQ ID NO: 6489; WAN024BVD; Start 386; Stop 410
ctcgtattcaatccagtgttggtat

SEQ ID NO: 440131 - DNA, 25 bp, Artificial
  probe
  misc_feature (1)..(25): SEQ ID NO: 6489; WAN024BVD; Start 387; Stop 411
tcgtattcaatccagtgttggtatc

SEQ ID NO: 440132 - DNA, 25 bp, Artificial
  probe
  misc_feature (1)..(25): SEQ ID NO: 6489; WAN024BVD; Start 388; Stop 412
cgtattcaatccagtgttggtatca

SEQ ID NO: 440133 - DNA, 25 bp, Artificial
  probe
  misc_feature (1)..(25): SEQ ID NO: 6489; WAN024BVD; Start 748; Stop 772
tgtagaaactatgtagcacgagaaa

SEQ ID NO: 440134 - DNA, 25 bp, Artificial
  probe
  misc_feature (1)..(25): SEQ ID NO: 6489; WAN024BVD; Start 747; Stop 771
ttgtagaaactatgtagcacgagaa

SEQ ID NO: 440135 - DNA, 25 bp, Artificial
  probe
  misc_feature (1)..(25): SEQ ID NO: 6489; WAN024BVD; Start 746; Stop 770
tttgtagaaactatgtagcacgaga

SEQ ID NO: 440136 - DNA, 25 bp, Artificial
  probe
  misc_feature (1)..(25): SEQ ID NO: 6489; WAN024BVD; Start 389; Stop 413
gtattcaatccagtgttggtatcat

SEQ ID NO: 440137 - DNA, 25 bp, Artificial
  probe
  misc_feature (1)..(25): SEQ ID NO: 6489; WAN024BVD; Start 745; Stop 769
atttgtagaaactatgtagcacgag

SEQ ID NO: 440138 - DNA, 25 bp, Artificial
  probe
  misc_feature (1)..(25): SEQ ID NO: 6489; WAN024BVD; Start 391; Stop 415
attcaatccagtgttggtatcatgt

SEQ ID NO: 440139 - DNA, 25 bp, Artificial
  probe
  misc_feature (1)..(25): SEQ ID NO: 6489; WAN024BVD; Start 150; Stop 174
gacactcactttagacactctcttt

SEQ ID NO: 440140 - DNA, 25 bp, Artificial
  probe
  misc_feature (1)..(25): SEQ ID NO: 6489; WAN024BVD; Start 679; Stop 703
gctagtaactcagtgagaattatgt

SEQ ID NO: 440141 - DNA, 25 bp, Artificial
  probe
  misc_feature (1)..(25): SEQ ID NO: 6489; WAN024BVD; Start 678; Stop 702
tgctagtaactcagtgagaattatg

SEQ ID NO: 440142 - DNA, 25 bp, Artificial
  probe
  misc_feature (1)..(25): SEQ ID NO: 6489; WAN024BVD; Start 151; Stop 175
acactcactttagacactctctttg

SEQ ID NO: 440143 - DNA, 25 bp, Artificial
  probe
  misc_feature (1)..(25): SEQ ID NO: 6489; WAN024BVD; Start 377; Stop 401
aaacttatcctcgtattcaatccag

SEQ ID NO: 440144 - DNA, 25 bp, Artificial
  probe
  misc_feature (1)..(25): SEQ ID NO: 6489; WAN024BVD; Start 657; Stop 681
ggatgataaacgaggagttattgct

SEQ ID NO: 440145 - DNA, 25 bp, Artificial
  probe
  misc_feature (1)..(25): SEQ ID NO: 6489; WAN024BVD; Start 246; Stop 270
aattataaggacacagtctgaagtg

SEQ ID NO: 440146 - DNA, 25 bp, Artificial
  probe
  misc_feature (1)..(25): SEQ ID NO: 6489; WAN024BVD; Start 390; Stop 414
tattcaatccagtgttggtatcatg

SEQ ID NO: 440147 - DNA, 25 bp, Artificial
  probe
  misc_feature (1)..(25): SEQ ID NO: 6489; WAN024BVD; Start 146; Stop 170
atttgacactcactttagacactct

SEQ ID NO: 440148 - DNA, 25 bp, Artificial
  probe
  misc_feature (1)..(25): SEQ ID NO: 6490; WAN024BRJ; Start 441; Stop 465
agtgagtattggtgagaatagtgtg

SEQ ID NO: 440149 - DNA, 25 bp, Artificial
  probe
  misc_feature (1)..(25): SEQ ID NO: 6490; WAN024BRJ; Start 440; Stop 464
gagtgagtattggtgagaatagtgt

SEQ ID NO: 440150 - DNA, 25 bp, Artificial
  probe
  misc_feature (1)..(25): SEQ ID NO: 6490; WAN024BRJ; Start 444; Stop 468
gagtattggtgagaatagtgtggtt

SEQ ID NO: 440151 - DNA, 25 bp, Artificial
  probe
  misc_feature (1)..(25): SEQ ID NO: 6490; WAN024BRJ; Start 439; Stop 463
ggagtgagtattggtgagaatagtg

SEQ ID NO: 440152 - DNA, 25 bp, Artificial
  probe
  misc_feature (1)..(25): SEQ ID NO: 6490; WAN024BRJ; Start 445; Stop 469
agtattggtgagaatagtgtggttg

SEQ ID NO: 440153 - DNA, 25 bp, Artificial
  probe
  misc_feature (1)..(25): SEQ ID NO: 6490; WAN024BRJ; Start 442; Stop 466
gtgagtattggtgagaatagtgtgg

SEQ ID NO: 440154 - DNA, 25 bp, Artificial
  probe
  misc_feature (1)..(25): SEQ ID NO: 6490; WAN024BRJ; Start 443; Stop 467
tgagtattggtgagaatagtgtggt

SEQ ID NO: 440155 - DNA, 25 bp, Artificial
  probe
  misc_feature (1)..(25): SEQ ID NO: 6490; WAN024BRJ; Start 446; Stop 470
gtattggtgagaatagtgtggttgc

SEQ ID NO: 440156 - DNA, 25 bp, Artificial
  probe
  misc_feature (1)..(25): SEQ ID NO: 6490; WAN024BRJ; Start 329; Stop 353
atgactatgatgttagtgttccagg

SEQ ID NO: 440157 - DNA, 25 bp, Artificial
  probe
  misc_feature (1)..(25): SEQ ID NO: 6490; WAN024BRJ; Start 331; Stop 355
gactatgatgttagtgttccaggtg

SEQ ID NO: 440158 - DNA, 25 bp, Artificial
  probe
  misc_feature (1)..(25): SEQ ID NO: 6490; WAN024BRJ; Start 330; Stop 354
tgactatgatgttagtgttccaggt

SEQ ID NO: 440159 - DNA, 25 bp, Artificial
  probe
  misc_feature (1)..(25): SEQ ID NO: 6490; WAN024BRJ; Start 427; Stop 451
attgtcttgaagggagtgagtattg

SEQ ID NO: 440160 - DNA, 25 bp, Artificial
  probe
  misc_feature (1)..(25): SEQ ID NO: 6490; WAN024BRJ; Start 426; Stop 450
cattgtcttgaagggagtgagtatt

SEQ ID NO: 440161 - DNA, 25 bp, Artificial
  probe
  misc_feature (1)..(25): SEQ ID NO: 6490; WAN024BRJ; Start 328; Stop 352
catgactatgatgttagtgttccag

SEQ ID NO: 440162 - DNA, 25 bp, Artificial
  probe
  misc_feature (1)..(25): SEQ ID NO: 6490; WAN024BRJ; Start 436; Stop 460
aagggagtgagtattggtgagaata

SEQ ID NO: 440163 - DNA, 25 bp, Artificial
  probe
  misc_feature (1)..(25): SEQ ID NO: 6490; WAN024BRJ; Start 437; Stop 461
agggagtgagtattggtgagaatag

SEQ ID NO: 440164 - DNA, 25 bp, Artificial
  probe
  misc_feature (1)..(25): SEQ ID NO: 6490; WAN024BRJ; Start 435; Stop 459
gaagggagtgagtattggtgagaat

SEQ ID NO: 440165 - DNA, 25 bp, Artificial
  probe
  misc_feature (1)..(25): SEQ ID NO: 6490; WAN024BRJ; Start 438; Stop 462
gggagtgagtattggtgagaatagt

SEQ ID NO: 440166 - DNA, 25 bp, Artificial
  probe
  misc_feature (1)..(25): SEQ ID NO: 6490; WAN024BRJ; Start 332; Stop 356
actatgatgttagtgttccaggtgg

SEQ ID NO: 440167 - DNA, 25 bp, Artificial
  probe
  misc_feature (1)..(25): SEQ ID NO: 6490; WAN024BRJ; Start 334; Stop 358
tatgatgttagtgttccaggtggat

SEQ ID NO: 440168 - DNA, 25 bp, Artificial
  probe
  misc_feature (1)..(25): SEQ ID NO: 6490; WAN024BRJ; Start 428; Stop 452
ttgtcttgaagggagtgagtattgg

SEQ ID NO: 440169 - DNA, 25 bp, Artificial
  probe
  misc_feature (1)..(25): SEQ ID NO: 6490; WAN024BRJ; Start 333; Stop 357
ctatgatgttagtgttccaggtgga

SEQ ID NO: 440170 - DNA, 25 bp, Artificial
  probe
  misc_feature (1)..(25): SEQ ID NO: 6490; WAN024BRJ; Start 335; Stop 359
atgatgttagtgttccaggtggatt

SEQ ID NO: 440171 - DNA, 25 bp, Artificial
  probe
  misc_feature (1)..(25): SEQ ID NO: 6490; WAN024BRJ; Start 447; Stop 471
tattggtgagaatagtgtggttgca

SEQ ID NO: 440172 - DNA, 25 bp, Artificial
  probe
  misc_feature (1)..(25): SEQ ID NO: 6490; WAN024BRJ; Start 301; Stop 325
tgtggtcctggagtacttatatatg

SEQ ID NO: 440173 - DNA, 25 bp, Artificial
  probe
  misc_feature (1)..(25): SEQ ID NO: 6490; WAN024BRJ; Start 109; Stop 133
tttggaaagaatgtaactgtcgaac

SEQ ID NO: 440174 - DNA, 25 bp, Artificial
  probe
  misc_feature (1)..(25): SEQ ID NO: 6490; WAN024BRJ; Start 338; Stop 362
atgttagtgttccaggtggattgaa

SEQ ID NO: 440175 - DNA, 25 bp, Artificial
  probe
  misc_feature (1)..(25): SEQ ID NO: 6490; WAN024BRJ; Start 432; Stop 456
cttgaagggagtgagtattggtgag

SEQ ID NO: 440176 - DNA, 25 bp, Artificial
  probe
  misc_feature (1)..(25): SEQ ID NO: 6490; WAN024BRJ; Start 425; Stop 449
gcattgtcttgaagggagtgagtat

SEQ ID NO: 440177 - DNA, 25 bp, Artificial
  probe
  misc_feature (1)..(25): SEQ ID NO: 6490; WAN024BRJ; Start 473; Stop 497
caggaagtgttgtaacaaaggatat

SEQ ID NO: 440178 - DNA, 25 bp, Artificial
  probe
  misc_feature (1)..(25): SEQ ID NO: 6490; WAN024BRJ; Start 127; Stop 151
gtcgaacaggaatctaatgctaaat

SEQ ID NO: 440179 - DNA, 25 bp, Artificial
  probe
  misc_feature (1)..(25): SEQ ID NO: 6490; WAN024BRJ; Start 108; Stop 132
atttggaaagaatgtaactgtcgaa

SEQ ID NO: 440180 - DNA, 25 bp, Artificial
  probe
  misc_feature (1)..(25): SEQ ID NO: 6490; WAN024BRJ; Start 107; Stop 131
aatttggaaagaatgtaactgtcga

SEQ ID NO: 440181 - DNA, 25 bp, Artificial
  probe
  misc_feature (1)..(25): SEQ ID NO: 6491; WAN024BZP; Start 97; Stop 121
ctactcgcacctaattctcaagatt

SEQ ID NO: 440182 - DNA, 25 bp, Artificial
  probe
  misc_feature (1)..(25): SEQ ID NO: 6491; WAN024BZP; Start 89; Stop 113
atgtaactctactcgcacctaattc

SEQ ID NO: 440183 - DNA, 25 bp, Artificial
  probe
  misc_feature (1)..(25): SEQ ID NO: 6491; WAN024BZP; Start 88; Stop 112
gatgtaactctactcgcacctaatt

SEQ ID NO: 440184 - DNA, 25 bp, Artificial
  probe
  misc_feature (1)..(25): SEQ ID NO: 6491; WAN024BZP; Start 91; Stop 115
gtaactctactcgcacctaattctc

SEQ ID NO: 440185 - DNA, 25 bp, Artificial
  probe
  misc_feature (1)..(25): SEQ ID NO: 6491; WAN024BZP; Start 92; Stop 116
taactctactcgcacctaattctca

SEQ ID NO: 440186 - DNA, 25 bp, Artificial
  probe
  misc_feature (1)..(25): SEQ ID NO: 6491; WAN024BZP; Start 90; Stop 114
tgtaactctactcgcacctaattct

SEQ ID NO: 440187 - DNA, 25 bp, Artificial
  probe
  misc_feature (1)..(25): SEQ ID NO: 6491; WAN024BZP; Start 96; Stop 120
tctactcgcacctaattctcaagat

SEQ ID NO: 440188 - DNA, 25 bp, Artificial
  probe
  misc_feature (1)..(25): SEQ ID NO: 6491; WAN024BZP; Start 93; Stop 117
aactctactcgcacctaattctcaa

SEQ ID NO: 440189 - DNA, 25 bp, Artificial
  probe
  misc_feature (1)..(25): SEQ ID NO: 6491; WAN024BZP; Start 95; Stop 119
ctctactcgcacctaattctcaaga

SEQ ID NO: 440190 - DNA, 25 bp, Artificial
  probe
  misc_feature (1)..(25): SEQ ID NO: 6491; WAN024BZP; Start 94; Stop 118
actctactcgcacctaattctcaag

SEQ ID NO: 440191 - DNA, 25 bp, Artificial
  probe
  misc_feature (1)..(25): SEQ ID NO: 6491; WAN024BZP; Start 71; Stop 95
ctaatagattggagggcgatgtaac

SEQ ID NO: 440192 - DNA, 25 bp, Artificial
  probe
  misc_feature (1)..(25): SEQ ID NO: 6491; WAN024BZP; Start 139; Stop 163
gctatgctttccaattctaatctcg

SEQ ID NO: 440193 - DNA, 25 bp, Artificial
  probe
  misc_feature (1)..(25): SEQ ID NO: 6491; WAN024BZP; Start 98; Stop 122
tactcgcacctaattctcaagattt

SEQ ID NO: 440194 - DNA, 25 bp, Artificial
  probe
  misc_feature (1)..(25): SEQ ID NO: 6491; WAN024BZP; Start 140; Stop 164
ctatgctttccaattctaatctcgg

SEQ ID NO: 440195 - DNA, 25 bp, Artificial
  probe
  misc_feature (1)..(25): SEQ ID NO: 6491; WAN024BZP; Start 72; Stop 96
taatagattggagggcgatgtaact

SEQ ID NO: 440196 - DNA, 25 bp, Artificial
  probe
  misc_feature (1)..(25): SEQ ID NO: 6491; WAN024BZP; Start 138; Stop 162
tgctatgctttccaattctaatctc

SEQ ID NO: 440197 - DNA, 25 bp, Artificial
  probe
  misc_feature (1)..(25): SEQ ID NO: 6491; WAN024BZP; Start 103; Stop 127
gcacctaattctcaagatttggaag

SEQ ID NO: 440198 - DNA, 25 bp, Artificial
  probe
  misc_feature (1)..(25): SEQ ID NO: 6491; WAN024BZP; Start 60; Stop 84
tataagcgaggctaatagattggag

SEQ ID NO: 440199 - DNA, 25 bp, Artificial
  probe
  misc_feature (1)..(25): SEQ ID NO: 6491; WAN024BZP; Start 137; Stop 161
atgctatgctttccaattctaatct

SEQ ID NO: 440200 - DNA, 25 bp, Artificial
  probe
  misc_feature (1)..(25): SEQ ID NO: 6491; WAN024BZP; Start 59; Stop 83
atataagcgaggctaatagattgga

SEQ ID NO: 440201 - DNA, 25 bp, Artificial
  probe
  misc_feature (1)..(25): SEQ ID NO: 6491; WAN024BZP; Start 104; Stop 128
cacctaattctcaagatttggaaga

SEQ ID NO: 440202 - DNA, 25 bp, Artificial
  probe
  misc_feature (1)..(25): SEQ ID NO: 6491; WAN024BZP; Start 99; Stop 123
actcgcacctaattctcaagatttg

SEQ ID NO: 440203 - DNA, 25 bp, Artificial
  probe
  misc_feature (1)..(25): SEQ ID NO: 6491; WAN024BZP; Start 102; Stop 126
cgcacctaattctcaagatttggaa

SEQ ID NO: 440204 - DNA, 25 bp, Artificial
  probe
  misc_feature (1)..(25): SEQ ID NO: 6491; WAN024BZP; Start 136; Stop 160
aatgctatgctttccaattctaatc

SEQ ID NO: 440205 - DNA, 25 bp, Artificial
  probe
  misc_feature (1)..(25): SEQ ID NO: 6491; WAN024BZP; Start 70; Stop 94
gctaatagattggagggcgatgtaa

SEQ ID NO: 440206 - DNA, 25 bp, Artificial
  probe
  misc_feature (1)..(25): SEQ ID NO: 6491; WAN024BZP; Start 61; Stop 85
ataagcgaggctaatagattggagg

SEQ ID NO: 440207 - DNA, 25 bp, Artificial
  probe
  misc_feature (1)..(25): SEQ ID NO: 6491; WAN024BZP; Start 141; Stop 165
tatgctttccaattctaatctcgga

SEQ ID NO: 440208 - DNA, 25 bp, Artificial
  probe
  misc_feature (1)..(25): SEQ ID NO: 6491; WAN024BZP; Start 142; Stop 166
atgctttccaattctaatctcggat

SEQ ID NO: 440209 - DNA, 25 bp, Artificial
  probe
  misc_feature (1)..(25): SEQ ID NO: 6491; WAN024BZP; Start 100; Stop 124
ctcgcacctaattctcaagatttgg

SEQ ID NO: 440210 - DNA, 25 bp, Artificial
  probe
  misc_feature (1)..(25): SEQ ID NO: 6491; WAN024BZP; Start 87; Stop 111
cgatgtaactctactcgcacctaat

SEQ ID NO: 440211 - DNA, 25 bp, Artificial
  probe
  misc_feature (1)..(25): SEQ ID NO: 6491; WAN024BZP; Start 135; Stop 159
aaatgctatgctttccaattctaat

SEQ ID NO: 440212 - DNA, 25 bp, Artificial
  probe
  misc_feature (1)..(25): SEQ ID NO: 6491; WAN024BZP; Start 105; Stop 129
acctaattctcaagatttggaagat

SEQ ID NO: 440213 - DNA, 25 bp, Artificial
  probe
  misc_feature (1)..(25): SEQ ID NO: 6491; WAN024BZP; Start 101; Stop 125
tcgcacctaattctcaagatttgga

SEQ ID NO: 440214 - DNA, 25 bp, Artificial
  probe
  misc_feature (1)..(25): SEQ ID NO: 6492; WAN024BR8; Start 100; Stop 124
aacagatggattaaagaaatgcgag

SEQ ID NO: 440215 - DNA, 25 bp, Artificial
  probe
  misc_feature (1)..(25): SEQ ID NO: 6492; WAN024BR8; Start 99; Stop 123
gaacagatggattaaagaaatgcga

SEQ ID NO: 440216 - DNA, 25 bp, Artificial
  probe
  misc_feature (1)..(25): SEQ ID NO: 6492; WAN024BR8; Start 102; Stop 126
cagatggattaaagaaatgcgagaa

SEQ ID NO: 440217 - DNA, 25 bp, Artificial
  probe
  misc_feature (1)..(25): SEQ ID NO: 6492; WAN024BR8; Start 98; Stop 122
tgaacagatggattaaagaaatgcg

SEQ ID NO: 440218 - DNA, 25 bp, Artificial
  probe
  misc_feature (1)..(25): SEQ ID NO: 6492; WAN024BR8; Start 101; Stop 125
acagatggattaaagaaatgcgaga

SEQ ID NO: 440219 - DNA, 25 bp, Artificial
  probe
  misc_feature (1)..(25): SEQ ID NO: 6492; WAN024BR8; Start 103; Stop 127
agatggattaaagaaatgcgagaaa

SEQ ID NO: 440220 - DNA, 25 bp, Artificial
  probe
  misc_feature (1)..(25): SEQ ID NO: 6492; WAN024BR8; Start 150; Stop 174
aattaacccaacccataaacttgtt

SEQ ID NO: 440221 - DNA, 25 bp, Artificial
  probe
  misc_feature (1)..(25): SEQ ID NO: 6492; WAN024BR8; Start 97; Stop 121
ttgaacagatggattaaagaaatgc

SEQ ID NO: 440222 - DNA, 25 bp, Artificial
  probe
  misc_feature (1)..(25): SEQ ID NO: 6492; WAN024BR8; Start 151; Stop 175
attaacccaacccataaacttgttt

SEQ ID NO: 440223 - DNA, 25 bp, Artificial
  probe
  misc_feature (1)..(25): SEQ ID NO: 6492; WAN024BR8; Start 139; Stop 163
tccatgtatgtaattaacccaaccc

SEQ ID NO: 440224 - DNA, 25 bp, Artificial
  probe
  misc_feature (1)..(25): SEQ ID NO: 6492; WAN024BR8; Start 140; Stop 164
ccatgtatgtaattaacccaaccca

SEQ ID NO: 440225 - DNA, 25 bp, Artificial
  probe
  misc_feature (1)..(25): SEQ ID NO: 6492; WAN024BR8; Start 138; Stop 162
ttccatgtatgtaattaacccaacc

SEQ ID NO: 440226 - DNA, 25 bp, Artificial
  probe
  misc_feature (1)..(25): SEQ ID NO: 6492; WAN024BR8; Start 141; Stop 165
catgtatgtaattaacccaacccat

SEQ ID NO: 440227 - DNA, 25 bp, Artificial
  probe
  misc_feature (1)..(25): SEQ ID NO: 6492; WAN024BR8; Start 147; Stop 171
tgtaattaacccaacccataaactt

SEQ ID NO: 440228 - DNA, 25 bp, Artificial
  probe
  misc_feature (1)..(25): SEQ ID NO: 6492; WAN024BR8; Start 149; Stop 173
taattaacccaacccataaacttgt

SEQ ID NO: 440229 - DNA, 25 bp, Artificial
  probe
  misc_feature (1)..(25): SEQ ID NO: 6492; WAN024BR8; Start 146; Stop 170
atgtaattaacccaacccataaact

SEQ ID NO: 440230 - DNA, 25 bp, Artificial
  probe
  misc_feature (1)..(25): SEQ ID NO: 6492; WAN024BR8; Start 148; Stop 172
gtaattaacccaacccataaacttg

SEQ ID NO: 440231 - DNA, 25 bp, Artificial
  probe
  misc_feature (1)..(25): SEQ ID NO: 6492; WAN024BR8; Start 94; Stop 118
acattgaacagatggattaaagaaa

SEQ ID NO: 440232 - DNA, 25 bp, Artificial
  probe
  misc_feature (1)..(25): SEQ ID NO: 6492; WAN024BR8; Start 137; Stop 161
tttccatgtatgtaattaacccaac

SEQ ID NO: 440233 - DNA, 25 bp, Artificial
  probe
  misc_feature (1)..(25): SEQ ID NO: 6492; WAN024BR8; Start 111; Stop 135
taaagaaatgcgagaaaacagaaca

SEQ ID NO: 440234 - DNA, 25 bp, Artificial
  probe
  misc_feature (1)..(25): SEQ ID NO: 6492; WAN024BR8; Start 106; Stop 130
tggattaaagaaatgcgagaaaaca

SEQ ID NO: 440235 - DNA, 25 bp, Artificial
  probe
  misc_feature (1)..(25): SEQ ID NO: 6492; WAN024BR8; Start 112; Stop 136
aaagaaatgcgagaaaacagaacat

SEQ ID NO: 440236 - DNA, 25 bp, Artificial
  probe
  misc_feature (1)..(25): SEQ ID NO: 6492; WAN024BR8; Start 107; Stop 131
ggattaaagaaatgcgagaaaacag

SEQ ID NO: 440237 - DNA, 25 bp, Artificial
  probe
  misc_feature (1)..(25): SEQ ID NO: 6492; WAN024BR8; Start 15; Stop 39
tatatctgtccgaaaattccattgc

SEQ ID NO: 440238 - DNA, 25 bp, Artificial
  probe
  misc_feature (1)..(25): SEQ ID NO: 6492; WAN024BR8; Start 143; Stop 167
tgtatgtaattaacccaacccataa

SEQ ID NO: 440239 - DNA, 25 bp, Artificial
  probe
  misc_feature (1)..(25): SEQ ID NO: 6492; WAN024BR8; Start 110; Stop 134
ttaaagaaatgcgagaaaacagaac

SEQ ID NO: 440240 - DNA, 25 bp, Artificial
  probe
  misc_feature (1)..(25): SEQ ID NO: 6492; WAN024BR8; Start 105; Stop 129
atggattaaagaaatgcgagaaaac

SEQ ID NO: 440241 - DNA, 25 bp, Artificial
  probe
  misc_feature (1)..(25): SEQ ID NO: 6492; WAN024BR8; Start 142; Stop 166
atgtatgtaattaacccaacccata

SEQ ID NO: 440242 - DNA, 25 bp, Artificial
  probe
  misc_feature (1)..(25): SEQ ID NO: 6492; WAN024BR8; Start 104; Stop 128
gatggattaaagaaatgcgagaaaa

SEQ ID NO: 440243 - DNA, 25 bp, Artificial
  probe
  misc_feature (1)..(25): SEQ ID NO: 6492; WAN024BR8; Start 108; Stop 132
gattaaagaaatgcgagaaaacaga

SEQ ID NO: 440244 - DNA, 25 bp, Artificial
  probe
  misc_feature (1)..(25): SEQ ID NO: 6492; WAN024BR8; Start 93; Stop 117
tacattgaacagatggattaaagaa

SEQ ID NO: 440245 - DNA, 25 bp, Artificial
  probe
  misc_feature (1)..(25): SEQ ID NO: 6492; WAN024BR8; Start 153; Stop 177
taacccaacccataaacttgttttc

SEQ ID NO: 440246 - DNA, 25 bp, Artificial
  probe
  misc_feature (1)..(25): SEQ ID NO: 6492; WAN024BR8; Start 156; Stop 180
cccaacccataaacttgttttcatt

SEQ ID NO: 440247 - DNA, 25 bp, Artificial
  probe
  misc_feature (1)..(25): SEQ ID NO: 6493; WAN024BNG; Start 153; Stop 177
gaatatcatcacttgccctaattgt

SEQ ID NO: 440248 - DNA, 25 bp, Artificial
  probe
  misc_feature (1)..(25): SEQ ID NO: 6493; WAN024BNG; Start 43; Stop 67
ggtgtcataggtgcagtaattgata

SEQ ID NO: 440249 - DNA, 25 bp, Artificial
  probe
  misc_feature (1)..(25): SEQ ID NO: 6493; WAN024BNG; Start 152; Stop 176
agaatatcatcacttgccctaattg

SEQ ID NO: 440250 - DNA, 25 bp, Artificial
  probe
  misc_feature (1)..(25): SEQ ID NO: 6493; WAN024BNG; Start 151; Stop 175
cagaatatcatcacttgccctaatt

SEQ ID NO: 440251 - DNA, 25 bp, Artificial
  probe
  misc_feature (1)..(25): SEQ ID NO: 6493; WAN024BNG; Start 97; Stop 121
cgtgaacttgaaacatttagagcaa

SEQ ID NO: 440252 - DNA, 25 bp, Artificial
  probe
  misc_feature (1)..(25): SEQ ID NO: 6493; WAN024BNG; Start 167; Stop 191
gccctaattgtaagtctaaagatgt

SEQ ID NO: 440253 - DNA, 25 bp, Artificial
  probe
  misc_feature (1)..(25): SEQ ID NO: 6493; WAN024BNG; Start 166; Stop 190
tgccctaattgtaagtctaaagatg

SEQ ID NO: 440254 - DNA, 25 bp, Artificial
  probe
  misc_feature (1)..(25): SEQ ID NO: 6493; WAN024BNG; Start 45; Stop 69
tgtcataggtgcagtaattgataac

SEQ ID NO: 440255 - DNA, 25 bp, Artificial
  probe
  misc_feature (1)..(25): SEQ ID NO: 6493; WAN024BNG; Start 44; Stop 68
gtgtcataggtgcagtaattgataa

SEQ ID NO: 440256 - DNA, 25 bp, Artificial
  probe
  misc_feature (1)..(25): SEQ ID NO: 6493; WAN024BNG; Start 98; Stop 122
gtgaacttgaaacatttagagcaaa

SEQ ID NO: 440257 - DNA, 25 bp, Artificial
  probe
  misc_feature (1)..(25): SEQ ID NO: 6493; WAN024BNG; Start 156; Stop 180
tatcatcacttgccctaattgtaag

SEQ ID NO: 440258 - DNA, 25 bp, Artificial
  probe
  misc_feature (1)..(25): SEQ ID NO: 6493; WAN024BNG; Start 164; Stop 188
cttgccctaattgtaagtctaaaga

SEQ ID NO: 440259 - DNA, 25 bp, Artificial
  probe
  misc_feature (1)..(25): SEQ ID NO: 6493; WAN024BNG; Start 42; Stop 66
aggtgtcataggtgcagtaattgat

SEQ ID NO: 440260 - DNA, 25 bp, Artificial
  probe
  misc_feature (1)..(25): SEQ ID NO: 6493; WAN024BNG; Start 155; Stop 179
atatcatcacttgccctaattgtaa

SEQ ID NO: 440261 - DNA, 25 bp, Artificial
  probe
  misc_feature (1)..(25): SEQ ID NO: 6493; WAN024BNG; Start 154; Stop 178
aatatcatcacttgccctaattgta

SEQ ID NO: 440262 - DNA, 25 bp, Artificial
  probe
  misc_feature (1)..(25): SEQ ID NO: 6493; WAN024BNG; Start 165; Stop 189
ttgccctaattgtaagtctaaagat

SEQ ID NO: 440263 - DNA, 25 bp, Artificial
  probe
  misc_feature (1)..(25): SEQ ID NO: 6493; WAN024BNG; Start 47; Stop 71
tcataggtgcagtaattgataacca

SEQ ID NO: 440264 - DNA, 25 bp, Artificial
  probe
  misc_feature (1)..(25): SEQ ID NO: 6493; WAN024BNG; Start 46; Stop 70
gtcataggtgcagtaattgataacc

SEQ ID NO: 440265 - DNA, 25 bp, Artificial
  probe
  misc_feature (1)..(25): SEQ ID NO: 6493; WAN024BNG; Start 109; Stop 133
acatttagagcaaatcaagagaaga

SEQ ID NO: 440266 - DNA, 25 bp, Artificial
  probe
  misc_feature (1)..(25): SEQ ID NO: 6493; WAN024BNG; Start 48; Stop 72
cataggtgcagtaattgataaccaa

SEQ ID NO: 440267 - DNA, 25 bp, Artificial
  probe
  misc_feature (1)..(25): SEQ ID NO: 6493; WAN024BNG; Start 41; Stop 65
gaggtgtcataggtgcagtaattga

SEQ ID NO: 440268 - DNA, 25 bp, Artificial
  probe
  misc_feature (1)..(25): SEQ ID NO: 6493; WAN024BNG; Start 105; Stop 129
tgaaacatttagagcaaatcaagag

SEQ ID NO: 440269 - DNA, 25 bp, Artificial
  probe
  misc_feature (1)..(25): SEQ ID NO: 6493; WAN024BNG; Start 90; Stop 114
gagagaacgtgaacttgaaacattt

SEQ ID NO: 440270 - DNA, 25 bp, Artificial
  probe
  misc_feature (1)..(25): SEQ ID NO: 6493; WAN024BNG; Start 106; Stop 130
gaaacatttagagcaaatcaagaga

SEQ ID NO: 440271 - DNA, 25 bp, Artificial
  probe
  misc_feature (1)..(25): SEQ ID NO: 6493; WAN024BNG; Start 101; Stop 125
aacttgaaacatttagagcaaatca

SEQ ID NO: 440272 - DNA, 25 bp, Artificial
  probe
  misc_feature (1)..(25): SEQ ID NO: 6493; WAN024BNG; Start 99; Stop 123
tgaacttgaaacatttagagcaaat

SEQ ID NO: 440273 - DNA, 25 bp, Artificial
  probe
  misc_feature (1)..(25): SEQ ID NO: 6493; WAN024BNG; Start 95; Stop 119
aacgtgaacttgaaacatttagagc

SEQ ID NO: 440274 - DNA, 25 bp, Artificial
  probe
  misc_feature (1)..(25): SEQ ID NO: 6493; WAN024BNG; Start 93; Stop 117
agaacgtgaacttgaaacatttaga

SEQ ID NO: 440275 - DNA, 25 bp, Artificial
  probe
  misc_feature (1)..(25): SEQ ID NO: 6493; WAN024BNG; Start 91; Stop 115
agagaacgtgaacttgaaacattta

SEQ ID NO: 440276 - DNA, 25 bp, Artificial
  probe
  misc_feature (1)..(25): SEQ ID NO: 6493; WAN024BNG; Start 108; Stop 132
aacatttagagcaaatcaagagaag

SEQ ID NO: 440277 - DNA, 25 bp, Artificial
  probe
  misc_feature (1)..(25): SEQ ID NO: 6493; WAN024BNG; Start 89; Stop 113
agagagaacgtgaacttgaaacatt

SEQ ID NO: 440278 - DNA, 25 bp, Artificial
  probe
  misc_feature (1)..(25): SEQ ID NO: 6493; WAN024BNG; Start 168; Stop 192
ccctaattgtaagtctaaagatgtg

SEQ ID NO: 440279 - DNA, 25 bp, Artificial
  probe
  misc_feature (1)..(25): SEQ ID NO: 6493; WAN024BNG; Start 94; Stop 118
gaacgtgaacttgaaacatttagag

SEQ ID NO: 440280 - DNA, 25 bp, Artificial
  probe
  misc_feature (1)..(25): SEQ ID NO: 6494; WAN024BOB; Start 231; Stop 255
tgtcacctttaggagatataccact

SEQ ID NO: 440281 - DNA, 25 bp, Artificial
  probe
  misc_feature (1)..(25): SEQ ID NO: 6494; WAN024BOB; Start 226; Stop 250
ggcattgtcacctttaggagatata

SEQ ID NO: 440282 - DNA, 25 bp, Artificial
  probe
  misc_feature (1)..(25): SEQ ID NO: 6494; WAN024BOB; Start 230; Stop 254
ttgtcacctttaggagatataccac

SEQ ID NO: 440283 - DNA, 25 bp, Artificial
  probe
  misc_feature (1)..(25): SEQ ID NO: 6494; WAN024BOB; Start 227; Stop 251
gcattgtcacctttaggagatatac

SEQ ID NO: 440284 - DNA, 25 bp, Artificial
  probe
  misc_feature (1)..(25): SEQ ID NO: 6494; WAN024BOB; Start 1; Stop 25
atgaatatcgccattaaagttgact

SEQ ID NO: 440285 - DNA, 25 bp, Artificial
  probe
  misc_feature (1)..(25): SEQ ID NO: 6494; WAN024BOB; Start 167; Stop 191
aaggtgatgctgttgtctatggaac

SEQ ID NO: 440286 - DNA, 25 bp, Artificial
  probe
  misc_feature (1)..(25): SEQ ID NO: 6494; WAN024BOB; Start 229; Stop 253
attgtcacctttaggagatatacca

SEQ ID NO: 440287 - DNA, 25 bp, Artificial
  probe
  misc_feature (1)..(25): SEQ ID NO: 6494; WAN024BOB; Start 166; Stop 190
caaggtgatgctgttgtctatggaa

SEQ ID NO: 440288 - DNA, 25 bp, Artificial
  probe
  misc_feature (1)..(25): SEQ ID NO: 6494; WAN024BOB; Start 228; Stop 252
cattgtcacctttaggagatatacc

SEQ ID NO: 440289 - DNA, 25 bp, Artificial
  probe
  misc_feature (1)..(25): SEQ ID NO: 6494; WAN024BOB; Start 232; Stop 256
gtcacctttaggagatataccactc

SEQ ID NO: 440290 - DNA, 25 bp, Artificial
  probe
  misc_feature (1)..(25): SEQ ID NO: 6494; WAN024BOB; Start 4; Stop 28
aatatcgccattaaagttgacttgc

SEQ ID NO: 440291 - DNA, 25 bp, Artificial
  probe
  misc_feature (1)..(25): SEQ ID NO: 6494; WAN024BOB; Start 183; Stop 207
ctatggaacagtttatgctagagcg

SEQ ID NO: 440292 - DNA, 25 bp, Artificial
  probe
  misc_feature (1)..(25): SEQ ID NO: 6494; WAN024BOB; Start 2; Stop 26
tgaatatcgccattaaagttgactt

SEQ ID NO: 440293 - DNA, 25 bp, Artificial
  probe
  misc_feature (1)..(25): SEQ ID NO: 6494; WAN024BOB; Start 3; Stop 27
gaatatcgccattaaagttgacttg

SEQ ID NO: 440294 - DNA, 25 bp, Artificial
  probe
  misc_feature (1)..(25): SEQ ID NO: 6494; WAN024BOB; Start 178; Stop 202
gttgtctatggaacagtttatgcta

SEQ ID NO: 440295 - DNA, 25 bp, Artificial
  probe
  misc_feature (1)..(25): SEQ ID NO: 6494; WAN024BOB; Start 179; Stop 203
ttgtctatggaacagtttatgctag

SEQ ID NO: 440296 - DNA, 25 bp, Artificial
  probe
  misc_feature (1)..(25): SEQ ID NO: 6494; WAN024BOB; Start 225; Stop 249
cggcattgtcacctttaggagatat

SEQ ID NO: 440297 - DNA, 25 bp, Artificial
  probe
  misc_feature (1)..(25): SEQ ID NO: 6494; WAN024BOB; Start 182; Stop 206
tctatggaacagtttatgctagagc

SEQ ID NO: 440298 - DNA, 25 bp, Artificial
  probe
  misc_feature (1)..(25): SEQ ID NO: 6494; WAN024BOB; Start 180; Stop 204
tgtctatggaacagtttatgctaga

SEQ ID NO: 440299 - DNA, 25 bp, Artificial
  probe
  misc_feature (1)..(25): SEQ ID NO: 6494; WAN024BOB; Start 293; Stop 317
gtaaacatgctgaagaatgggctag

SEQ ID NO: 440300 - DNA, 25 bp, Artificial
  probe
  misc_feature (1)..(25): SEQ ID NO: 6494; WAN024BOB; Start 290; Stop 314
ctagtaaacatgctgaagaatgggc

SEQ ID NO: 440301 - DNA, 25 bp, Artificial
  probe
  misc_feature (1)..(25): SEQ ID NO: 6494; WAN024BOB; Start 181; Stop 205
gtctatggaacagtttatgctagag

SEQ ID NO: 440302 - DNA, 25 bp, Artificial
  probe
  misc_feature (1)..(25): SEQ ID NO: 6494; WAN024BOB; Start 294; Stop 318
taaacatgctgaagaatgggctaga

SEQ ID NO: 440303 - DNA, 25 bp, Artificial
  probe
  misc_feature (1)..(25): SEQ ID NO: 6494; WAN024BOB; Start 268; Stop 292
aaacgatgggatcaagttgctacta

SEQ ID NO: 440304 - DNA, 25 bp, Artificial
  probe
  misc_feature (1)..(25): SEQ ID NO: 6494; WAN024BOB; Start 24; Stop 48
cttgcagaaagctaaacagaaactt

SEQ ID NO: 440305 - DNA, 25 bp, Artificial
  probe
  misc_feature (1)..(25): SEQ ID NO: 6494; WAN024BOB; Start 12; Stop 36
cattaaagttgacttgcagaaagct

SEQ ID NO: 440306 - DNA, 25 bp, Artificial
  probe
  misc_feature (1)..(25): SEQ ID NO: 6494; WAN024BOB; Start 15; Stop 39
taaagttgacttgcagaaagctaaa

SEQ ID NO: 440307 - DNA, 25 bp, Artificial
  probe
  misc_feature (1)..(25): SEQ ID NO: 6494; WAN024BOB; Start 14; Stop 38
ttaaagttgacttgcagaaagctaa

SEQ ID NO: 440308 - DNA, 25 bp, Artificial
  probe
  misc_feature (1)..(25): SEQ ID NO: 6494; WAN024BOB; Start 55; Stop 79
gaatccatgacaagaggaaagattg

SEQ ID NO: 440309 - DNA, 25 bp, Artificial
  probe
  misc_feature (1)..(25): SEQ ID NO: 6494; WAN024BOB; Start 292; Stop 316
agtaaacatgctgaagaatgggcta

SEQ ID NO: 440310 - DNA, 25 bp, Artificial
  probe
  misc_feature (1)..(25): SEQ ID NO: 6494; WAN024BOB; Start 291; Stop 315
tagtaaacatgctgaagaatgggct

SEQ ID NO: 440311 - DNA, 25 bp, Artificial
  probe
  misc_feature (1)..(25): SEQ ID NO: 6494; WAN024BOB; Start 13; Stop 37
attaaagttgacttgcagaaagcta

SEQ ID NO: 440312 - DNA, 25 bp, Artificial
  probe
  misc_feature (1)..(25): SEQ ID NO: 6494; WAN024BOB; Start 16; Stop 40
aaagttgacttgcagaaagctaaac

SEQ ID NO: 440313 - DNA, 25 bp, Artificial
  probe
  misc_feature (1)..(25): SEQ ID NO: 6495; WAN024CDV; Start 101; Stop 125
ataatgcgtccatcttctcgaatat

SEQ ID NO: 440314 - DNA, 25 bp, Artificial
  probe
  misc_feature (1)..(25): SEQ ID NO: 6495; WAN024CDV; Start 102; Stop 126
taatgcgtccatcttctcgaatatc

SEQ ID NO: 440315 - DNA, 25 bp, Artificial
  probe
  misc_feature (1)..(25): SEQ ID NO: 6495; WAN024CDV; Start 100; Stop 124
gataatgcgtccatcttctcgaata

SEQ ID NO: 440316 - DNA, 25 bp, Artificial
  probe
  misc_feature (1)..(25): SEQ ID NO: 6495; WAN024CDV; Start 304; Stop 328
gtaaagaccataatgttccctcact

SEQ ID NO: 440317 - DNA, 25 bp, Artificial
  probe
  misc_feature (1)..(25): SEQ ID NO: 6495; WAN024CDV; Start 168; Stop 192
ttccctccaaatcttccaagtaaat

SEQ ID NO: 440318 - DNA, 25 bp, Artificial
  probe
  misc_feature (1)..(25): SEQ ID NO: 6495; WAN024CDV; Start 171; Stop 195
cctccaaatcttccaagtaaatagc

SEQ ID NO: 440319 - DNA, 25 bp, Artificial
  probe
  misc_feature (1)..(25): SEQ ID NO: 6495; WAN024CDV; Start 167; Stop 191
tttccctccaaatcttccaagtaaa

SEQ ID NO: 440320 - DNA, 25 bp, Artificial
  probe
  misc_feature (1)..(25): SEQ ID NO: 6495; WAN024CDV; Start 169; Stop 193
tccctccaaatcttccaagtaaata

SEQ ID NO: 440321 - DNA, 25 bp, Artificial
  probe
  misc_feature (1)..(25): SEQ ID NO: 6495; WAN024CDV; Start 14; Stop 38
attcttgtaccttctgccaggataa

SEQ ID NO: 440322 - DNA, 25 bp, Artificial
  probe
  misc_feature (1)..(25): SEQ ID NO: 6495; WAN024CDV; Start 138; Stop 162
ctggcttatctcgatagagttcaat

SEQ ID NO: 440323 - DNA, 25 bp, Artificial
  probe
  misc_feature (1)..(25): SEQ ID NO: 6495; WAN024CDV; Start 144; Stop 168
tatctcgatagagttcaatgccatt

SEQ ID NO: 440324 - DNA, 25 bp, Artificial
  probe
  misc_feature (1)..(25): SEQ ID NO: 6495; WAN024CDV; Start 143; Stop 167
ttatctcgatagagttcaatgccat

SEQ ID NO: 440325 - DNA, 25 bp, Artificial
  probe
  misc_feature (1)..(25): SEQ ID NO: 6495; WAN024CDV; Start 142; Stop 166
cttatctcgatagagttcaatgcca

SEQ ID NO: 440326 - DNA, 25 bp, Artificial
  probe
  misc_feature (1)..(25): SEQ ID NO: 6495; WAN024CDV; Start 139; Stop 163
tggcttatctcgatagagttcaatg

SEQ ID NO: 440327 - DNA, 25 bp, Artificial
  probe
  misc_feature (1)..(25): SEQ ID NO: 6495; WAN024CDV; Start 305; Stop 329
taaagaccataatgttccctcactt

SEQ ID NO: 440328 - DNA, 25 bp, Artificial
  probe
  misc_feature (1)..(25): SEQ ID NO: 6495; WAN024CDV; Start 170; Stop 194
ccctccaaatcttccaagtaaatag

SEQ ID NO: 440329 - DNA, 25 bp, Artificial
  probe
  misc_feature (1)..(25): SEQ ID NO: 6495; WAN024CDV; Start 306; Stop 330
aaagaccataatgttccctcacttc

SEQ ID NO: 440330 - DNA, 25 bp, Artificial
  probe
  misc_feature (1)..(25): SEQ ID NO: 6495; WAN024CDV; Start 137; Stop 161
actggcttatctcgatagagttcaa

SEQ ID NO: 440331 - DNA, 25 bp, Artificial
  probe
  misc_feature (1)..(25): SEQ ID NO: 6495; WAN024CDV; Start 141; Stop 165
gcttatctcgatagagttcaatgcc

SEQ ID NO: 440332 - DNA, 25 bp, Artificial
  probe
  misc_feature (1)..(25): SEQ ID NO: 6495; WAN024CDV; Start 140; Stop 164
ggcttatctcgatagagttcaatgc

SEQ ID NO: 440333 - DNA, 25 bp, Artificial
  probe
  misc_feature (1)..(25): SEQ ID NO: 6495; WAN024CDV; Start 13; Stop 37
cattcttgtaccttctgccaggata

SEQ ID NO: 440334 - DNA, 25 bp, Artificial
  probe
  misc_feature (1)..(25): SEQ ID NO: 6495; WAN024CDV; Start 307; Stop 331
aagaccataatgttccctcacttct

SEQ ID NO: 440335 - DNA, 25 bp, Artificial
  probe
  misc_feature (1)..(25): SEQ ID NO: 6495; WAN024CDV; Start 166; Stop 190
atttccctccaaatcttccaagtaa

SEQ ID NO: 440336 - DNA, 25 bp, Artificial
  probe
  misc_feature (1)..(25): SEQ ID NO: 6495; WAN024CDV; Start 165; Stop 189
catttccctccaaatcttccaagta

SEQ ID NO: 440337 - DNA, 25 bp, Artificial
  probe
  misc_feature (1)..(25): SEQ ID NO: 6495; WAN024CDV; Start 308; Stop 332
agaccataatgttccctcacttctc

SEQ ID NO: 440338 - DNA, 25 bp, Artificial
  probe
  misc_feature (1)..(25): SEQ ID NO: 6495; WAN024CDV; Start 150; Stop 174
gatagagttcaatgccatttccctc

SEQ ID NO: 440339 - DNA, 25 bp, Artificial
  probe
  misc_feature (1)..(25): SEQ ID NO: 6495; WAN024CDV; Start 309; Stop 333
gaccataatgttccctcacttctcc

SEQ ID NO: 440340 - DNA, 25 bp, Artificial
  probe
  misc_feature (1)..(25): SEQ ID NO: 6495; WAN024CDV; Start 103; Stop 127
aatgcgtccatcttctcgaatatcc

SEQ ID NO: 440341 - DNA, 25 bp, Artificial
  probe
  misc_feature (1)..(25): SEQ ID NO: 6495; WAN024CDV; Start 172; Stop 196
ctccaaatcttccaagtaaatagct

SEQ ID NO: 440342 - DNA, 25 bp, Artificial
  probe
  misc_feature (1)..(25): SEQ ID NO: 6495; WAN024CDV; Start 179; Stop 203
tcttccaagtaaatagcttcactgt

SEQ ID NO: 440343 - DNA, 25 bp, Artificial
  probe
  misc_feature (1)..(25): SEQ ID NO: 6495; WAN024CDV; Start 183; Stop 207
ccaagtaaatagcttcactgtaacc

SEQ ID NO: 440344 - DNA, 25 bp, Artificial
  probe
  misc_feature (1)..(25): SEQ ID NO: 6495; WAN024CDV; Start 303; Stop 327
ggtaaagaccataatgttccctcac

SEQ ID NO: 440345 - DNA, 25 bp, Artificial
  probe
  misc_feature (1)..(25): SEQ ID NO: 6495; WAN024CDV; Start 184; Stop 208
caagtaaatagcttcactgtaacca

SEQ ID NO: 440346 - DNA, 25 bp, Artificial
  probe
  misc_feature (1)..(25): SEQ ID NO: 6496; WAN024CG2; Start 464; Stop 488
attgtgaaggaattgagattgagga

SEQ ID NO: 440347 - DNA, 25 bp, Artificial
  probe
  misc_feature (1)..(25): SEQ ID NO: 6496; WAN024CG2; Start 463; Stop 487
gattgtgaaggaattgagattgagg

SEQ ID NO: 440348 - DNA, 25 bp, Artificial
  probe
  misc_feature (1)..(25): SEQ ID NO: 6496; WAN024CG2; Start 465; Stop 489
ttgtgaaggaattgagattgaggag

SEQ ID NO: 440349 - DNA, 25 bp, Artificial
  probe
  misc_feature (1)..(25): SEQ ID NO: 6496; WAN024CG2; Start 462; Stop 486
tgattgtgaaggaattgagattgag

SEQ ID NO: 440350 - DNA, 25 bp, Artificial
  probe
  misc_feature (1)..(25): SEQ ID NO: 6496; WAN024CG2; Start 461; Stop 485
ttgattgtgaaggaattgagattga

SEQ ID NO: 440351 - DNA, 25 bp, Artificial
  probe
  misc_feature (1)..(25): SEQ ID NO: 6496; WAN024CG2; Start 23; Stop 47
agaagtatgaagaattgtggaatga

SEQ ID NO: 440352 - DNA, 25 bp, Artificial
  probe
  misc_feature (1)..(25): SEQ ID NO: 6496; WAN024CG2; Start 64; Stop 88
gaacctgtaccttatacttcaatgg

SEQ ID NO: 440353 - DNA, 25 bp, Artificial
  probe
  misc_feature (1)..(25): SEQ ID NO: 6496; WAN024CG2; Start 26; Stop 50
agtatgaagaattgtggaatgaaca

SEQ ID NO: 440354 - DNA, 25 bp, Artificial
  probe
  misc_feature (1)..(25): SEQ ID NO: 6496; WAN024CG2; Start 468; Stop 492
tgaaggaattgagattgaggaggtg

SEQ ID NO: 440355 - DNA, 25 bp, Artificial
  probe
  misc_feature (1)..(25): SEQ ID NO: 6496; WAN024CG2; Start 467; Stop 491
gtgaaggaattgagattgaggaggt

SEQ ID NO: 440356 - DNA, 25 bp, Artificial
  probe
  misc_feature (1)..(25): SEQ ID NO: 6496; WAN024CG2; Start 466; Stop 490
tgtgaaggaattgagattgaggagg

SEQ ID NO: 440357 - DNA, 25 bp, Artificial
  probe
  misc_feature (1)..(25): SEQ ID NO: 6496; WAN024CG2; Start 25; Stop 49
aagtatgaagaattgtggaatgaac

SEQ ID NO: 440358 - DNA, 25 bp, Artificial
  probe
  misc_feature (1)..(25): SEQ ID NO: 6496; WAN024CG2; Start 24; Stop 48
gaagtatgaagaattgtggaatgaa

SEQ ID NO: 440359 - DNA, 25 bp, Artificial
  probe
  misc_feature (1)..(25): SEQ ID NO: 6496; WAN024CG2; Start 22; Stop 46
aagaagtatgaagaattgtggaatg

SEQ ID NO: 440360 - DNA, 25 bp, Artificial
  probe
  misc_feature (1)..(25): SEQ ID NO: 6496; WAN024CG2; Start 27; Stop 51
gtatgaagaattgtggaatgaacac

SEQ ID NO: 440361 - DNA, 25 bp, Artificial
  probe
  misc_feature (1)..(25): SEQ ID NO: 6496; WAN024CG2; Start 66; Stop 90
acctgtaccttatacttcaatggtt

SEQ ID NO: 440362 - DNA, 25 bp, Artificial
  probe
  misc_feature (1)..(25): SEQ ID NO: 6496; WAN024CG2; Start 65; Stop 89
aacctgtaccttatacttcaatggt

SEQ ID NO: 440363 - DNA, 25 bp, Artificial
  probe
  misc_feature (1)..(25): SEQ ID NO: 6496; WAN024CG2; Start 469; Stop 493
gaaggaattgagattgaggaggtgg

SEQ ID NO: 440364 - DNA, 25 bp, Artificial
  probe
  misc_feature (1)..(25): SEQ ID NO: 6496; WAN024CG2; Start 457; Stop 481
gtgtttgattgtgaaggaattgaga

SEQ ID NO: 440365 - DNA, 25 bp, Artificial
  probe
  misc_feature (1)..(25): SEQ ID NO: 6496; WAN024CG2; Start 67; Stop 91
cctgtaccttatacttcaatggttg

SEQ ID NO: 440366 - DNA, 25 bp, Artificial
  probe
  misc_feature (1)..(25): SEQ ID NO: 6496; WAN024CG2; Start 456; Stop 480
ggtgtttgattgtgaaggaattgag

SEQ ID NO: 440367 - DNA, 25 bp, Artificial
  probe
  misc_feature (1)..(25): SEQ ID NO: 6496; WAN024CG2; Start 458; Stop 482
tgtttgattgtgaaggaattgagat

SEQ ID NO: 440368 - DNA, 25 bp, Artificial
  probe
  misc_feature (1)..(25): SEQ ID NO: 6496; WAN024CG2; Start 470; Stop 494
aaggaattgagattgaggaggtgga

SEQ ID NO: 440369 - DNA, 25 bp, Artificial
  probe
  misc_feature (1)..(25): SEQ ID NO: 6496; WAN024CG2; Start 109; Stop 133
ttgaaacaactagacgaaccagaaa

SEQ ID NO: 440370 - DNA, 25 bp, Artificial
  probe
  misc_feature (1)..(25): SEQ ID NO: 6496; WAN024CG2; Start 460; Stop 484
tttgattgtgaaggaattgagattg

SEQ ID NO: 440371 - DNA, 25 bp, Artificial
  probe
  misc_feature (1)..(25): SEQ ID NO: 6496; WAN024CG2; Start 459; Stop 483
gtttgattgtgaaggaattgagatt

SEQ ID NO: 440372 - DNA, 25 bp, Artificial
  probe
  misc_feature (1)..(25): SEQ ID NO: 6496; WAN024CG2; Start 455; Stop 479
gggtgtttgattgtgaaggaattga

SEQ ID NO: 440373 - DNA, 25 bp, Artificial
  probe
  misc_feature (1)..(25): SEQ ID NO: 6496; WAN024CG2; Start 453; Stop 477
ctgggtgtttgattgtgaaggaatt

SEQ ID NO: 440374 - DNA, 25 bp, Artificial
  probe
  misc_feature (1)..(25): SEQ ID NO: 6496; WAN024CG2; Start 454; Stop 478
tgggtgtttgattgtgaaggaattg

SEQ ID NO: 440375 - DNA, 25 bp, Artificial
  probe
  misc_feature (1)..(25): SEQ ID NO: 6496; WAN024CG2; Start 471; Stop 495
aggaattgagattgaggaggtggag

SEQ ID NO: 440376 - DNA, 25 bp, Artificial
  probe
  misc_feature (1)..(25): SEQ ID NO: 6496; WAN024CG2; Start 388; Stop 412
agtcaagatataacagctaggaatt

SEQ ID NO: 440377 - DNA, 25 bp, Artificial
  probe
  misc_feature (1)..(25): SEQ ID NO: 6496; WAN024CG2; Start 12; Stop 36
agcattgattaagaagtatgaagaa

SEQ ID NO: 440378 - DNA, 25 bp, Artificial
  probe
  misc_feature (1)..(25): SEQ ID NO: 6496; WAN024CG2; Start 11; Stop 35
aagcattgattaagaagtatgaaga

SEQ ID NO: 440379 - DNA, 25 bp, Artificial
  probe
  misc_feature (1)..(25): SEQ ID NO: 6497; WAN024FTM; Start 607; Stop 631
tatcattactatcgtcgtcctggta

SEQ ID NO: 440380 - DNA, 25 bp, Artificial
  probe
  misc_feature (1)..(25): SEQ ID NO: 6497; WAN024FTM; Start 608; Stop 632
atcattactatcgtcgtcctggtag

SEQ ID NO: 440381 - DNA, 25 bp, Artificial
  probe
  misc_feature (1)..(25): SEQ ID NO: 6497; WAN024FTM; Start 606; Stop 630
gtatcattactatcgtcgtcctggt

SEQ ID NO: 440382 - DNA, 25 bp, Artificial
  probe
  misc_feature (1)..(25): SEQ ID NO: 6497; WAN024FTM; Start 232; Stop 256
agagcaactaatgagtggatattct

SEQ ID NO: 440383 - DNA, 25 bp, Artificial
  probe
  misc_feature (1)..(25): SEQ ID NO: 6497; WAN024FTM; Start 222; Stop 246
tggtgtattaagagcaactaatgag

SEQ ID NO: 440384 - DNA, 25 bp, Artificial
  probe
  misc_feature (1)..(25): SEQ ID NO: 6497; WAN024FTM; Start 233; Stop 257
gagcaactaatgagtggatattctt

SEQ ID NO: 440385 - DNA, 25 bp, Artificial
  probe
  misc_feature (1)..(25): SEQ ID NO: 6497; WAN024FTM; Start 231; Stop 255
aagagcaactaatgagtggatattc

SEQ ID NO: 440386 - DNA, 25 bp, Artificial
  probe
  misc_feature (1)..(25): SEQ ID NO: 6497; WAN024FTM; Start 153; Stop 177
tgctcaagaatatgattggattagg

SEQ ID NO: 440387 - DNA, 25 bp, Artificial
  probe
  misc_feature (1)..(25): SEQ ID NO: 6497; WAN024FTM; Start 623; Stop 647
gtcctggtagtatcgtacaatctca

SEQ ID NO: 440388 - DNA, 25 bp, Artificial
  probe
  misc_feature (1)..(25): SEQ ID NO: 6497; WAN024FTM; Start 225; Stop 249
tgtattaagagcaactaatgagtgg

SEQ ID NO: 440389 - DNA, 25 bp, Artificial
  probe
  misc_feature (1)..(25): SEQ ID NO: 6497; WAN024FTM; Start 223; Stop 247
ggtgtattaagagcaactaatgagt

SEQ ID NO: 440390 - DNA, 25 bp, Artificial
  probe
  misc_feature (1)..(25): SEQ ID NO: 6497; WAN024FTM; Start 226; Stop 250
gtattaagagcaactaatgagtgga

SEQ ID NO: 440391 - DNA, 25 bp, Artificial
  probe
  misc_feature (1)..(25): SEQ ID NO: 6497; WAN024FTM; Start 33; Stop 57
tgttgaggattaccttcattatgct

SEQ ID NO: 440392 - DNA, 25 bp, Artificial
  probe
  misc_feature (1)..(25): SEQ ID NO: 6497; WAN024FTM; Start 221; Stop 245
atggtgtattaagagcaactaatga

SEQ ID NO: 440393 - DNA, 25 bp, Artificial
  probe
  misc_feature (1)..(25): SEQ ID NO: 6497; WAN024FTM; Start 213; Stop 237
gcgtaattatggtgtattaagagca

SEQ ID NO: 440394 - DNA, 25 bp, Artificial
  probe
  misc_feature (1)..(25): SEQ ID NO: 6497; WAN024FTM; Start 32; Stop 56
atgttgaggattaccttcattatgc

SEQ ID NO: 440395 - DNA, 25 bp, Artificial
  probe
  misc_feature (1)..(25): SEQ ID NO: 6497; WAN024FTM; Start 605; Stop 629
cgtatcattactatcgtcgtcctgg

SEQ ID NO: 440396 - DNA, 25 bp, Artificial
  probe
  misc_feature (1)..(25): SEQ ID NO: 6497; WAN024FTM; Start 626; Stop 650
ctggtagtatcgtacaatctcagtt

SEQ ID NO: 440397 - DNA, 25 bp, Artificial
  probe
  misc_feature (1)..(25): SEQ ID NO: 6497; WAN024FTM; Start 624; Stop 648
tcctggtagtatcgtacaatctcag

SEQ ID NO: 440398 - DNA, 25 bp, Artificial
  probe
  misc_feature (1)..(25): SEQ ID NO: 6497; WAN024FTM; Start 615; Stop 639
ctatcgtcgtcctggtagtatcgta

SEQ ID NO: 440399 - DNA, 25 bp, Artificial
  probe
  misc_feature (1)..(25): SEQ ID NO: 6497; WAN024FTM; Start 622; Stop 646
cgtcctggtagtatcgtacaatctc

SEQ ID NO: 440400 - DNA, 25 bp, Artificial
  probe
  misc_feature (1)..(25): SEQ ID NO: 6497; WAN024FTM; Start 224; Stop 248
gtgtattaagagcaactaatgagtg

SEQ ID NO: 440401 - DNA, 25 bp, Artificial
  probe
  misc_feature (1)..(25): SEQ ID NO: 6497; WAN024FTM; Start 428; Stop 452
aagcactagaattaatgttggaaga

SEQ ID NO: 440402 - DNA, 25 bp, Artificial
  probe
  misc_feature (1)..(25): SEQ ID NO: 6497; WAN024FTM; Start 426; Stop 450
agaagcactagaattaatgttggaa

SEQ ID NO: 440403 - DNA, 25 bp, Artificial
  probe
  misc_feature (1)..(25): SEQ ID NO: 6497; WAN024FTM; Start 425; Stop 449
aagaagcactagaattaatgttgga

SEQ ID NO: 440404 - DNA, 25 bp, Artificial
  probe
  misc_feature (1)..(25): SEQ ID NO: 6497; WAN024FTM; Start 625; Stop 649
cctggtagtatcgtacaatctcagt

SEQ ID NO: 440405 - DNA, 25 bp, Artificial
  probe
  misc_feature (1)..(25): SEQ ID NO: 6497; WAN024FTM; Start 34; Stop 58
gttgaggattaccttcattatgcta

SEQ ID NO: 440406 - DNA, 25 bp, Artificial
  probe
  misc_feature (1)..(25): SEQ ID NO: 6497; WAN024FTM; Start 445; Stop 469
ttggaagataaagttgctacggtat

SEQ ID NO: 440407 - DNA, 25 bp, Artificial
  probe
  misc_feature (1)..(25): SEQ ID NO: 6497; WAN024FTM; Start 441; Stop 465
aatgttggaagataaagttgctacg

SEQ ID NO: 440408 - DNA, 25 bp, Artificial
  probe
  misc_feature (1)..(25): SEQ ID NO: 6497; WAN024FTM; Start 674; Stop 698
ttgatgcaggtgagtataacagaag

SEQ ID NO: 440409 - DNA, 25 bp, Artificial
  probe
  misc_feature (1)..(25): SEQ ID NO: 6497; WAN024FTM; Start 621; Stop 645
tcgtcctggtagtatcgtacaatct

SEQ ID NO: 440410 - DNA, 25 bp, Artificial
  probe
  misc_feature (1)..(25): SEQ ID NO: 6497; WAN024FTM; Start 620; Stop 644
gtcgtcctggtagtatcgtacaatc

SEQ ID NO: 440411 - DNA, 25 bp, Artificial
  probe
  misc_feature (1)..(25): SEQ ID NO: 6497; WAN024FTM; Start 429; Stop 453
agcactagaattaatgttggaagat

SEQ ID NO: 440412 - DNA, 25 bp, Artificial
  probe
  misc_feature (1)..(25): SEQ ID NO: 6498; WAN024BQI; Start 316; Stop 340
attgaggatgatgtatggattggtt

SEQ ID NO: 440413 - DNA, 25 bp, Artificial
  probe
  misc_feature (1)..(25): SEQ ID NO: 6498; WAN024BQI; Start 315; Stop 339
cattgaggatgatgtatggattggt

SEQ ID NO: 440414 - DNA, 25 bp, Artificial
  probe
  misc_feature (1)..(25): SEQ ID NO: 6498; WAN024BQI; Start 414; Stop 438
atcagttcctccttacgctattgta

SEQ ID NO: 440415 - DNA, 25 bp, Artificial
  probe
  misc_feature (1)..(25): SEQ ID NO: 6498; WAN024BQI; Start 415; Stop 439
tcagttcctccttacgctattgtag

SEQ ID NO: 440416 - DNA, 25 bp, Artificial
  probe
  misc_feature (1)..(25): SEQ ID NO: 6498; WAN024BQI; Start 413; Stop 437
aatcagttcctccttacgctattgt

SEQ ID NO: 440417 - DNA, 25 bp, Artificial
  probe
  misc_feature (1)..(25): SEQ ID NO: 6498; WAN024BQI; Start 545; Stop 569
ttacggaagagttgtatcagccaat

SEQ ID NO: 440418 - DNA, 25 bp, Artificial
  probe
  misc_feature (1)..(25): SEQ ID NO: 6498; WAN024BQI; Start 546; Stop 570
tacggaagagttgtatcagccaatt

SEQ ID NO: 440419 - DNA, 25 bp, Artificial
  probe
  misc_feature (1)..(25): SEQ ID NO: 6498; WAN024BQI; Start 541; Stop 565
aaggttacggaagagttgtatcagc

SEQ ID NO: 440420 - DNA, 25 bp, Artificial
  probe
  misc_feature (1)..(25): SEQ ID NO: 6498; WAN024BQI; Start 410; Stop 434
ctaaatcagttcctccttacgctat

SEQ ID NO: 440421 - DNA, 25 bp, Artificial
  probe
  misc_feature (1)..(25): SEQ ID NO: 6498; WAN024BQI; Start 317; Stop 341
ttgaggatgatgtatggattggttt

SEQ ID NO: 440422 - DNA, 25 bp, Artificial
  probe
  misc_feature (1)..(25): SEQ ID NO: 6498; WAN024BQI; Start 411; Stop 435
taaatcagttcctccttacgctatt

SEQ ID NO: 440423 - DNA, 25 bp, Artificial
  probe
  misc_feature (1)..(25): SEQ ID NO: 6498; WAN024BQI; Start 540; Stop 564
aaaggttacggaagagttgtatcag

SEQ ID NO: 440424 - DNA, 25 bp, Artificial
  probe
  misc_feature (1)..(25): SEQ ID NO: 6498; WAN024BQI; Start 346; Stop 370
tctacaattctttcgggagttacaa

SEQ ID NO: 440425 - DNA, 25 bp, Artificial
  probe
  misc_feature (1)..(25): SEQ ID NO: 6498; WAN024BQI; Start 345; Stop 369
ttctacaattctttcgggagttaca

SEQ ID NO: 440426 - DNA, 25 bp, Artificial
  probe
  misc_feature (1)..(25): SEQ ID NO: 6498; WAN024BQI; Start 557; Stop 581
tgtatcagccaatttcgtcaataag

SEQ ID NO: 440427 - DNA, 25 bp, Artificial
  probe
  misc_feature (1)..(25): SEQ ID NO: 6498; WAN024BQI; Start 425; Stop 449
cttacgctattgtaggtggagttcc

SEQ ID NO: 440428 - DNA, 25 bp, Artificial
  probe
  misc_feature (1)..(25): SEQ ID NO: 6498; WAN024BQI; Start 412; Stop 436
aaatcagttcctccttacgctattg

SEQ ID NO: 440429 - DNA, 25 bp, Artificial
  probe
  misc_feature (1)..(25): SEQ ID NO: 6498; WAN024BQI; Start 344; Stop 368
gttctacaattctttcgggagttac

SEQ ID NO: 440430 - DNA, 25 bp, Artificial
  probe
  misc_feature (1)..(25): SEQ ID NO: 6498; WAN024BQI; Start 558; Stop 582
gtatcagccaatttcgtcaataaga

SEQ ID NO: 440431 - DNA, 25 bp, Artificial
  probe
  misc_feature (1)..(25): SEQ ID NO: 6498; WAN024BQI; Start 475; Stop 499
gaaacagagattcgtgaagaaatga

SEQ ID NO: 440432 - DNA, 25 bp, Artificial
  probe
  misc_feature (1)..(25): SEQ ID NO: 6498; WAN024BQI; Start 477; Stop 501
aacagagattcgtgaagaaatgaaa

SEQ ID NO: 440433 - DNA, 25 bp, Artificial
  probe
  misc_feature (1)..(25): SEQ ID NO: 6498; WAN024BQI; Start 476; Stop 500
aaacagagattcgtgaagaaatgaa

SEQ ID NO: 440434 - DNA, 25 bp, Artificial
  probe
  misc_feature (1)..(25): SEQ ID NO: 6498; WAN024BQI; Start 347; Stop 371
ctacaattctttcgggagttacaat

SEQ ID NO: 440435 - DNA, 25 bp, Artificial
  probe
  misc_feature (1)..(25): SEQ ID NO: 6498; WAN024BQI; Start 343; Stop 367
cgttctacaattctttcgggagtta

SEQ ID NO: 440436 - DNA, 25 bp, Artificial
  probe
  misc_feature (1)..(25): SEQ ID NO: 6498; WAN024BQI; Start 544; Stop 568
gttacggaagagttgtatcagccaa

SEQ ID NO: 440437 - DNA, 25 bp, Artificial
  probe
  misc_feature (1)..(25): SEQ ID NO: 6498; WAN024BQI; Start 555; Stop 579
gttgtatcagccaatttcgtcaata

SEQ ID NO: 440438 - DNA, 25 bp, Artificial
  probe
  misc_feature (1)..(25): SEQ ID NO: 6498; WAN024BQI; Start 340; Stop 364
tttcgttctacaattctttcgggag

SEQ ID NO: 440439 - DNA, 25 bp, Artificial
  probe
  misc_feature (1)..(25): SEQ ID NO: 6498; WAN024BQI; Start 556; Stop 580
ttgtatcagccaatttcgtcaataa

SEQ ID NO: 440440 - DNA, 25 bp, Artificial
  probe
  misc_feature (1)..(25): SEQ ID NO: 6498; WAN024BQI; Start 416; Stop 440
cagttcctccttacgctattgtagg

SEQ ID NO: 440441 - DNA, 25 bp, Artificial
  probe
  misc_feature (1)..(25): SEQ ID NO: 6498; WAN024BQI; Start 409; Stop 433
actaaatcagttcctccttacgcta

SEQ ID NO: 440442 - DNA, 25 bp, Artificial
  probe
  misc_feature (1)..(25): SEQ ID NO: 6498; WAN024BQI; Start 314; Stop 338
tcattgaggatgatgtatggattgg

SEQ ID NO: 440443 - DNA, 25 bp, Artificial
  probe
  misc_feature (1)..(25): SEQ ID NO: 6498; WAN024BQI; Start 554; Stop 578
agttgtatcagccaatttcgtcaat

SEQ ID NO: 440444 - DNA, 25 bp, Artificial
  probe
  misc_feature (1)..(25): SEQ ID NO: 6498; WAN024BQI; Start 563; Stop 587
agccaatttcgtcaataagacaaat

SEQ ID NO: 440445 - DNA, 25 bp, Artificial
  probe
  misc_feature (1)..(25): SEQ ID NO: 6499; WAN024BZS; Start 1908; Stop 1932
ttatgatgaagatggtcgtgcttat

SEQ ID NO: 440446 - DNA, 25 bp, Artificial
  probe
  misc_feature (1)..(25): SEQ ID NO: 6499; WAN024BZS; Start 1083; Stop 1107
taagaagcaactattcaagccacta

SEQ ID NO: 440447 - DNA, 25 bp, Artificial
  probe
  misc_feature (1)..(25): SEQ ID NO: 6499; WAN024BZS; Start 1392; Stop 1416
tgatgaaccgatgattgtccataat

SEQ ID NO: 440448 - DNA, 25 bp, Artificial
  probe
  misc_feature (1)..(25): SEQ ID NO: 6499; WAN024BZS; Start 1391; Stop 1415
ttgatgaaccgatgattgtccataa

SEQ ID NO: 440449 - DNA, 25 bp, Artificial
  probe
  misc_feature (1)..(25): SEQ ID NO: 6499; WAN024BZS; Start 1909; Stop 1933
tatgatgaagatggtcgtgcttatg

SEQ ID NO: 440450 - DNA, 25 bp, Artificial
  probe
  misc_feature (1)..(25): SEQ ID NO: 6499; WAN024BZS; Start 1079; Stop 1103
atcctaagaagcaactattcaagcc

SEQ ID NO: 440451 - DNA, 25 bp, Artificial
  probe
  misc_feature (1)..(25): SEQ ID NO: 6499; WAN024BZS; Start 1082; Stop 1106
ctaagaagcaactattcaagccact

SEQ ID NO: 440452 - DNA, 25 bp, Artificial
  probe
  misc_feature (1)..(25): SEQ ID NO: 6499; WAN024BZS; Start 1163; Stop 1187
ctattggtatcgtaggagagtctgg

SEQ ID NO: 440453 - DNA, 25 bp, Artificial
  probe
  misc_feature (1)..(25): SEQ ID NO: 6499; WAN024BZS; Start 1393; Stop 1417
gatgaaccgatgattgtccataata

SEQ ID NO: 440454 - DNA, 25 bp, Artificial
  probe
  misc_feature (1)..(25): SEQ ID NO: 6499; WAN024BZS; Start 1164; Stop 1188
tattggtatcgtaggagagtctgga

SEQ ID NO: 440455 - DNA, 25 bp, Artificial
  probe
  misc_feature (1)..(25): SEQ ID NO: 6499; WAN024BZS; Start 1078; Stop 1102
tatcctaagaagcaactattcaagc

SEQ ID NO: 440456 - DNA, 25 bp, Artificial
  probe
  misc_feature (1)..(25): SEQ ID NO: 6499; WAN024BZS; Start 1162; Stop 1186
actattggtatcgtaggagagtctg

SEQ ID NO: 440457 - DNA, 25 bp, Artificial
  probe
  misc_feature (1)..(25): SEQ ID NO: 6499; WAN024BZS; Start 1161; Stop 1185
tactattggtatcgtaggagagtct

SEQ ID NO: 440458 - DNA, 25 bp, Artificial
  probe
  misc_feature (1)..(25): SEQ ID NO: 6499; WAN024BZS; Start 137; Stop 161
gcggtaagagtgtaacagtgaatac

SEQ ID NO: 440459 - DNA, 25 bp, Artificial
  probe
  misc_feature (1)..(25): SEQ ID NO: 6499; WAN024BZS; Start 1084; Stop 1108
aagaagcaactattcaagccactag

SEQ ID NO: 440460 - DNA, 25 bp, Artificial
  probe
  misc_feature (1)..(25): SEQ ID NO: 6499; WAN024BZS; Start 136; Stop 160
tgcggtaagagtgtaacagtgaata

SEQ ID NO: 440461 - DNA, 25 bp, Artificial
  probe
  misc_feature (1)..(25): SEQ ID NO: 6499; WAN024BZS; Start 1090; Stop 1114
caactattcaagccactaggttctc

SEQ ID NO: 440462 - DNA, 25 bp, Artificial
  probe
  misc_feature (1)..(25): SEQ ID NO: 6499; WAN024BZS; Start 1394; Stop 1418
atgaaccgatgattgtccataatat

SEQ ID NO: 440463 - DNA, 25 bp, Artificial
  probe
  misc_feature (1)..(25): SEQ ID NO: 6499; WAN024BZS; Start 1813; Stop 1837
gctgctattccagaagttgattatc

SEQ ID NO: 440464 - DNA, 25 bp, Artificial
  probe
  misc_feature (1)..(25): SEQ ID NO: 6499; WAN024BZS; Start 1081; Stop 1105
cctaagaagcaactattcaagccac

SEQ ID NO: 440465 - DNA, 25 bp, Artificial
  probe
  misc_feature (1)..(25): SEQ ID NO: 6499; WAN024BZS; Start 1080; Stop 1104
tcctaagaagcaactattcaagcca

SEQ ID NO: 440466 - DNA, 25 bp, Artificial
  probe
  misc_feature (1)..(25): SEQ ID NO: 6499; WAN024BZS; Start 1911; Stop 1935
tgatgaagatggtcgtgcttatgat

SEQ ID NO: 440467 - DNA, 25 bp, Artificial
  probe
  misc_feature (1)..(25): SEQ ID NO: 6499; WAN024BZS; Start 1910; Stop 1934
atgatgaagatggtcgtgcttatga

SEQ ID NO: 440468 - DNA, 25 bp, Artificial
  probe
  misc_feature (1)..(25): SEQ ID NO: 6499; WAN024BZS; Start 1815; Stop 1839
tgctattccagaagttgattatcac

SEQ ID NO: 440469 - DNA, 25 bp, Artificial
  probe
  misc_feature (1)..(25): SEQ ID NO: 6499; WAN024BZS; Start 1165; Stop 1189
attggtatcgtaggagagtctggaa

SEQ ID NO: 440470 - DNA, 25 bp, Artificial
  probe
  misc_feature (1)..(25): SEQ ID NO: 6499; WAN024BZS; Start 135; Stop 159
atgcggtaagagtgtaacagtgaat

SEQ ID NO: 440471 - DNA, 25 bp, Artificial
  probe
  misc_feature (1)..(25): SEQ ID NO: 6499; WAN024BZS; Start 1912; Stop 1936
gatgaagatggtcgtgcttatgatc

SEQ ID NO: 440472 - DNA, 25 bp, Artificial
  probe
  misc_feature (1)..(25): SEQ ID NO: 6499; WAN024BZS; Start 1816; Stop 1840
gctattccagaagttgattatcact

SEQ ID NO: 440473 - DNA, 25 bp, Artificial
  probe
  misc_feature (1)..(25): SEQ ID NO: 6499; WAN024BZS; Start 461; Stop 485
gcatgaatgactatccacaccaatt

SEQ ID NO: 440474 - DNA, 25 bp, Artificial
  probe
  misc_feature (1)..(25): SEQ ID NO: 6499; WAN024BZS; Start 1091; Stop 1115
aactattcaagccactaggttctcc

SEQ ID NO: 440475 - DNA, 25 bp, Artificial
  probe
  misc_feature (1)..(25): SEQ ID NO: 6499; WAN024BZS; Start 127; Stop 151
gaatctggatgcggtaagagtgtaa

SEQ ID NO: 440476 - DNA, 25 bp, Artificial
  probe
  misc_feature (1)..(25): SEQ ID NO: 6499; WAN024BZS; Start 1076; Stop 1100
actatcctaagaagcaactattcaa

SEQ ID NO: 440477 - DNA, 25 bp, Artificial
  probe
  misc_feature (1)..(25): SEQ ID NO: 6499; WAN024BZS; Start 1814; Stop 1838
ctgctattccagaagttgattatca

SEQ ID NO: 440478 - DNA, 25 bp, Artificial
  probe
  misc_feature (1)..(25): SEQ ID NO: 6500; WAN024BR7; Start 239; Stop 263
acagtagtggtattagacagtatga

SEQ ID NO: 440479 - DNA, 25 bp, Artificial
  probe
  misc_feature (1)..(25): SEQ ID NO: 6500; WAN024BR7; Start 236; Stop 260
aagacagtagtggtattagacagta

SEQ ID NO: 440480 - DNA, 25 bp, Artificial
  probe
  misc_feature (1)..(25): SEQ ID NO: 6500; WAN024BR7; Start 238; Stop 262
gacagtagtggtattagacagtatg

SEQ ID NO: 440481 - DNA, 25 bp, Artificial
  probe
  misc_feature (1)..(25): SEQ ID NO: 6500; WAN024BR7; Start 237; Stop 261
agacagtagtggtattagacagtat

SEQ ID NO: 440482 - DNA, 25 bp, Artificial
  probe
  misc_feature (1)..(25): SEQ ID NO: 6500; WAN024BR7; Start 240; Stop 264
cagtagtggtattagacagtatgaa

SEQ ID NO: 440483 - DNA, 25 bp, Artificial
  probe
  misc_feature (1)..(25): SEQ ID NO: 6500; WAN024BR7; Start 226; Stop 250
aagatgaacaaagacagtagtggta

SEQ ID NO: 440484 - DNA, 25 bp, Artificial
  probe
  misc_feature (1)..(25): SEQ ID NO: 6500; WAN024BR7; Start 227; Stop 251
agatgaacaaagacagtagtggtat

SEQ ID NO: 440485 - DNA, 25 bp, Artificial
  probe
  misc_feature (1)..(25): SEQ ID NO: 6500; WAN024BR7; Start 233; Stop 257
acaaagacagtagtggtattagaca

SEQ ID NO: 440486 - DNA, 25 bp, Artificial
  probe
  misc_feature (1)..(25): SEQ ID NO: 6500; WAN024BR7; Start 225; Stop 249
caagatgaacaaagacagtagtggt

SEQ ID NO: 440487 - DNA, 25 bp, Artificial
  probe
  misc_feature (1)..(25): SEQ ID NO: 6500; WAN024BR7; Start 235; Stop 259
aaagacagtagtggtattagacagt

SEQ ID NO: 440488 - DNA, 25 bp, Artificial
  probe
  misc_feature (1)..(25): SEQ ID NO: 6500; WAN024BR7; Start 228; Stop 252
gatgaacaaagacagtagtggtatt

SEQ ID NO: 440489 - DNA, 25 bp, Artificial
  probe
  misc_feature (1)..(25): SEQ ID NO: 6500; WAN024BR7; Start 234; Stop 258
caaagacagtagtggtattagacag

SEQ ID NO: 440490 - DNA, 25 bp, Artificial
  probe
  misc_feature (1)..(25): SEQ ID NO: 6500; WAN024BR7; Start 255; Stop 279
acagtatgaatatcagagacattgt

SEQ ID NO: 440491 - DNA, 25 bp, Artificial
  probe
  misc_feature (1)..(25): SEQ ID NO: 6500; WAN024BR7; Start 254; Stop 278
gacagtatgaatatcagagacattg

SEQ ID NO: 440492 - DNA, 25 bp, Artificial
  probe
  misc_feature (1)..(25): SEQ ID NO: 6500; WAN024BR7; Start 224; Stop 248
tcaagatgaacaaagacagtagtgg

SEQ ID NO: 440493 - DNA, 25 bp, Artificial
  probe
  misc_feature (1)..(25): SEQ ID NO: 6500; WAN024BR7; Start 253; Stop 277
agacagtatgaatatcagagacatt

SEQ ID NO: 440494 - DNA, 25 bp, Artificial
  probe
  misc_feature (1)..(25): SEQ ID NO: 6500; WAN024BR7; Start 232; Stop 256
aacaaagacagtagtggtattagac

SEQ ID NO: 440495 - DNA, 25 bp, Artificial
  probe
  misc_feature (1)..(25): SEQ ID NO: 6500; WAN024BR7; Start 230; Stop 254
tgaacaaagacagtagtggtattag

SEQ ID NO: 440496 - DNA, 25 bp, Artificial
  probe
  misc_feature (1)..(25): SEQ ID NO: 6500; WAN024BR7; Start 223; Stop 247
atcaagatgaacaaagacagtagtg

SEQ ID NO: 440497 - DNA, 25 bp, Artificial
  probe
  misc_feature (1)..(25): SEQ ID NO: 6500; WAN024BR7; Start 181; Stop 205
agtaaatctttagacggtcgtgatc

SEQ ID NO: 440498 - DNA, 25 bp, Artificial
  probe
  misc_feature (1)..(25): SEQ ID NO: 6500; WAN024BR7; Start 180; Stop 204
aagtaaatctttagacggtcgtgat

SEQ ID NO: 440499 - DNA, 25 bp, Artificial
  probe
  misc_feature (1)..(25): SEQ ID NO: 6500; WAN024BR7; Start 231; Stop 255
gaacaaagacagtagtggtattaga

SEQ ID NO: 440500 - DNA, 25 bp, Artificial
  probe
  misc_feature (1)..(25): SEQ ID NO: 6500; WAN024BR7; Start 241; Stop 265
agtagtggtattagacagtatgaat

SEQ ID NO: 440501 - DNA, 25 bp, Artificial
  probe
  misc_feature (1)..(25): SEQ ID NO: 6500; WAN024BR7; Start 229; Stop 253
atgaacaaagacagtagtggtatta

SEQ ID NO: 440502 - DNA, 25 bp, Artificial
  probe
  misc_feature (1)..(25): SEQ ID NO: 6500; WAN024BR7; Start 219; Stop 243
ttctatcaagatgaacaaagacagt

SEQ ID NO: 440503 - DNA, 25 bp, Artificial
  probe
  misc_feature (1)..(25): SEQ ID NO: 6500; WAN024BR7; Start 256; Stop 280
cagtatgaatatcagagacattgtt

SEQ ID NO: 440504 - DNA, 25 bp, Artificial
  probe
  misc_feature (1)..(25): SEQ ID NO: 6500; WAN024BR7; Start 251; Stop 275
ttagacagtatgaatatcagagaca

SEQ ID NO: 440505 - DNA, 25 bp, Artificial
  probe
  misc_feature (1)..(25): SEQ ID NO: 6500; WAN024BR7; Start 222; Stop 246
tatcaagatgaacaaagacagtagt

SEQ ID NO: 440506 - DNA, 25 bp, Artificial
  probe
  misc_feature (1)..(25): SEQ ID NO: 6500; WAN024BR7; Start 252; Stop 276
tagacagtatgaatatcagagacat

SEQ ID NO: 440507 - DNA, 25 bp, Artificial
  probe
  misc_feature (1)..(25): SEQ ID NO: 6500; WAN024BR7; Start 220; Stop 244
tctatcaagatgaacaaagacagta

SEQ ID NO: 440508 - DNA, 25 bp, Artificial
  probe
  misc_feature (1)..(25): SEQ ID NO: 6500; WAN024BR7; Start 221; Stop 245
ctatcaagatgaacaaagacagtag

SEQ ID NO: 440509 - DNA, 25 bp, Artificial
  probe
  misc_feature (1)..(25): SEQ ID NO: 6500; WAN024BR7; Start 218; Stop 242
tttctatcaagatgaacaaagacag

SEQ ID NO: 440510 - DNA, 25 bp, Artificial
  probe
  misc_feature (1)..(25): SEQ ID NO: 6500; WAN024BR7; Start 179; Stop 203
aaagtaaatctttagacggtcgtga

SEQ ID NO: 440511 - DNA, 25 bp, Artificial
  probe
  misc_feature (1)..(25): SEQ ID NO: 6501; WAN024GHX; Start 251; Stop 275
gagttgctggaatagacttgatgaa

SEQ ID NO: 440512 - DNA, 25 bp, Artificial
  probe
  misc_feature (1)..(25): SEQ ID NO: 6501; WAN024GHX; Start 175; Stop 199
gaatcaggaataattaatgccgacg

SEQ ID NO: 440513 - DNA, 25 bp, Artificial
  probe
  misc_feature (1)..(25): SEQ ID NO: 6501; WAN024GHX; Start 174; Stop 198
tgaatcaggaataattaatgccgac

SEQ ID NO: 440514 - DNA, 25 bp, Artificial
  probe
  misc_feature (1)..(25): SEQ ID NO: 6501; WAN024GHX; Start 173; Stop 197
atgaatcaggaataattaatgccga

SEQ ID NO: 440515 - DNA, 25 bp, Artificial
  probe
  misc_feature (1)..(25): SEQ ID NO: 6501; WAN024GHX; Start 527; Stop 551
tggataatggaattaatgctgtgtt

SEQ ID NO: 440516 - DNA, 25 bp, Artificial
  probe
  misc_feature (1)..(25): SEQ ID NO: 6501; WAN024GHX; Start 176; Stop 200
aatcaggaataattaatgccgacgg

SEQ ID NO: 440517 - DNA, 25 bp, Artificial
  probe
  misc_feature (1)..(25): SEQ ID NO: 6501; WAN024GHX; Start 131; Stop 155
ttaatcagtgctatgaagatgagaa

SEQ ID NO: 440518 - DNA, 25 bp, Artificial
  probe
  misc_feature (1)..(25): SEQ ID NO: 6501; WAN024GHX; Start 526; Stop 550
atggataatggaattaatgctgtgt

SEQ ID NO: 440519 - DNA, 25 bp, Artificial
  probe
  misc_feature (1)..(25): SEQ ID NO: 6501; WAN024GHX; Start 525; Stop 549
catggataatggaattaatgctgtg

SEQ ID NO: 440520 - DNA, 25 bp, Artificial
  probe
  misc_feature (1)..(25): SEQ ID NO: 6501; WAN024GHX; Start 524; Stop 548
tcatggataatggaattaatgctgt

SEQ ID NO: 440521 - DNA, 25 bp, Artificial
  probe
  misc_feature (1)..(25): SEQ ID NO: 6501; WAN024GHX; Start 254; Stop 278
ttgctggaatagacttgatgaaaca

SEQ ID NO: 440522 - DNA, 25 bp, Artificial
  probe
  misc_feature (1)..(25): SEQ ID NO: 6501; WAN024GHX; Start 172; Stop 196
aatgaatcaggaataattaatgccg

SEQ ID NO: 440523 - DNA, 25 bp, Artificial
  probe
  misc_feature (1)..(25): SEQ ID NO: 6501; WAN024GHX; Start 256; Stop 280
gctggaatagacttgatgaaacatt

SEQ ID NO: 440524 - DNA, 25 bp, Artificial
  probe
  misc_feature (1)..(25): SEQ ID NO: 6501; WAN024GHX; Start 255; Stop 279
tgctggaatagacttgatgaaacat

SEQ ID NO: 440525 - DNA, 25 bp, Artificial
  probe
  misc_feature (1)..(25): SEQ ID NO: 6501; WAN024GHX; Start 250; Stop 274
cgagttgctggaatagacttgatga

SEQ ID NO: 440526 - DNA, 25 bp, Artificial
  probe
  misc_feature (1)..(25): SEQ ID NO: 6501; WAN024GHX; Start 253; Stop 277
gttgctggaatagacttgatgaaac

SEQ ID NO: 440527 - DNA, 25 bp, Artificial
  probe
  misc_feature (1)..(25): SEQ ID NO: 6501; WAN024GHX; Start 252; Stop 276
agttgctggaatagacttgatgaaa

SEQ ID NO: 440528 - DNA, 25 bp, Artificial
  probe
  misc_feature (1)..(25): SEQ ID NO: 6501; WAN024GHX; Start 177; Stop 201
atcaggaataattaatgccgacggt

SEQ ID NO: 440529 - DNA, 25 bp, Artificial
  probe
  misc_feature (1)..(25): SEQ ID NO: 6501; WAN024GHX; Start 523; Stop 547
ttcatggataatggaattaatgctg

SEQ ID NO: 440530 - DNA, 25 bp, Artificial
  probe
  misc_feature (1)..(25): SEQ ID NO: 6501; WAN024GHX; Start 577; Stop 601
gtactatcagggcatatcaaacgag

SEQ ID NO: 440531 - DNA, 25 bp, Artificial
  probe
  misc_feature (1)..(25): SEQ ID NO: 6501; WAN024GHX; Start 575; Stop 599
atgtactatcagggcatatcaaacg

SEQ ID NO: 440532 - DNA, 25 bp, Artificial
  probe
  misc_feature (1)..(25): SEQ ID NO: 6501; WAN024GHX; Start 574; Stop 598
gatgtactatcagggcatatcaaac

SEQ ID NO: 440533 - DNA, 25 bp, Artificial
  probe
  misc_feature (1)..(25): SEQ ID NO: 6501; WAN024GHX; Start 130; Stop 154
attaatcagtgctatgaagatgaga

SEQ ID NO: 440534 - DNA, 25 bp, Artificial
  probe
  misc_feature (1)..(25): SEQ ID NO: 6501; WAN024GHX; Start 576; Stop 600
tgtactatcagggcatatcaaacga

SEQ ID NO: 440535 - DNA, 25 bp, Artificial
  probe
  misc_feature (1)..(25): SEQ ID NO: 6501; WAN024GHX; Start 533; Stop 557
atggaattaatgctgtgtttatggg

SEQ ID NO: 440536 - DNA, 25 bp, Artificial
  probe
  misc_feature (1)..(25): SEQ ID NO: 6501; WAN024GHX; Start 578; Stop 602
tactatcagggcatatcaaacgagc

SEQ ID NO: 440537 - DNA, 25 bp, Artificial
  probe
  misc_feature (1)..(25): SEQ ID NO: 6501; WAN024GHX; Start 182; Stop 206
gaataattaatgccgacggtgcttc

SEQ ID NO: 440538 - DNA, 25 bp, Artificial
  probe
  misc_feature (1)..(25): SEQ ID NO: 6501; WAN024GHX; Start 257; Stop 281
ctggaatagacttgatgaaacattt

SEQ ID NO: 440539 - DNA, 25 bp, Artificial
  probe
  misc_feature (1)..(25): SEQ ID NO: 6501; WAN024GHX; Start 473; Stop 497
ttgtgtttgtaggaattacttctcc

SEQ ID NO: 440540 - DNA, 25 bp, Artificial
  probe
  misc_feature (1)..(25): SEQ ID NO: 6501; WAN024GHX; Start 132; Stop 156
taatcagtgctatgaagatgagaaa

SEQ ID NO: 440541 - DNA, 25 bp, Artificial
  probe
  misc_feature (1)..(25): SEQ ID NO: 6501; WAN024GHX; Start 178; Stop 202
tcaggaataattaatgccgacggtg

SEQ ID NO: 440542 - DNA, 25 bp, Artificial
  probe
  misc_feature (1)..(25): SEQ ID NO: 6501; WAN024GHX; Start 532; Stop 556
aatggaattaatgctgtgtttatgg

SEQ ID NO: 440543 - DNA, 25 bp, Artificial
  probe
  misc_feature (1)..(25): SEQ ID NO: 6501; WAN024GHX; Start 472; Stop 496
tttgtgtttgtaggaattacttctc

SEQ ID NO: 440544 - DNA, 25 bp, Artificial
  probe
  misc_feature (1)..(25): SEQ ID NO: 6502; WAN024ET7; Start 2; Stop 26
tgaatgatgaagcaagtaaacaatt

SEQ ID NO: 440545 - DNA, 25 bp, Artificial
  probe
  misc_feature (1)..(25): SEQ ID NO: 6502; WAN024ET7; Start 1; Stop 25
atgaatgatgaagcaagtaaacaat

SEQ ID NO: 440546 - DNA, 25 bp, Artificial
  probe
  misc_feature (1)..(25): SEQ ID NO: 6502; WAN024ET7; Start 6; Stop 30
tgatgaagcaagtaaacaattaact

SEQ ID NO: 440547 - DNA, 25 bp, Artificial
  probe
  misc_feature (1)..(25): SEQ ID NO: 6502; WAN024ET7; Start 7; Stop 31
gatgaagcaagtaaacaattaactg

SEQ ID NO: 440548 - DNA, 25 bp, Artificial
  probe
  misc_feature (1)..(25): SEQ ID NO: 6502; WAN024ET7; Start 5; Stop 29
atgatgaagcaagtaaacaattaac

SEQ ID NO: 440549 - DNA, 25 bp, Artificial
  probe
  misc_feature (1)..(25): SEQ ID NO: 6502; WAN024ET7; Start 3; Stop 27
gaatgatgaagcaagtaaacaatta

SEQ ID NO: 440550 - DNA, 25 bp, Artificial
  probe
  misc_feature (1)..(25): SEQ ID NO: 6502; WAN024ET7; Start 4; Stop 28
aatgatgaagcaagtaaacaattaa

SEQ ID NO: 440551 - DNA, 25 bp, Artificial
  probe
  misc_feature (1)..(25): SEQ ID NO: 6502; WAN024ET7; Start 69; Stop 93
cacttttgaagagatgttagctgta

SEQ ID NO: 440552 - DNA, 25 bp, Artificial
  probe
  misc_feature (1)..(25): SEQ ID NO: 6502; WAN024ET7; Start 68; Stop 92
ccacttttgaagagatgttagctgt

SEQ ID NO: 440553 - DNA, 25 bp, Artificial
  probe
  misc_feature (1)..(25): SEQ ID NO: 6503; WAN024CEN; Start 230; Stop 254
tcaatctgatgttggttctaggatt

SEQ ID NO: 440554 - DNA, 25 bp, Artificial
  probe
  misc_feature (1)..(25): SEQ ID NO: 6503; WAN024CEN; Start 127; Stop 151
gtggaggtctatggaatttatctgt

SEQ ID NO: 440555 - DNA, 25 bp, Artificial
  probe
  misc_feature (1)..(25): SEQ ID NO: 6503; WAN024CEN; Start 128; Stop 152
tggaggtctatggaatttatctgtt

SEQ ID NO: 440556 - DNA, 25 bp, Artificial
  probe
  misc_feature (1)..(25): SEQ ID NO: 6503; WAN024CEN; Start 126; Stop 150
cgtggaggtctatggaatttatctg

SEQ ID NO: 440557 - DNA, 25 bp, Artificial
  probe
  misc_feature (1)..(25): SEQ ID NO: 6503; WAN024CEN; Start 237; Stop 261
gatgttggttctaggatttagttgg

SEQ ID NO: 440558 - DNA, 25 bp, Artificial
  probe
  misc_feature (1)..(25): SEQ ID NO: 6503; WAN024CEN; Start 234; Stop 258
tctgatgttggttctaggatttagt

SEQ ID NO: 440559 - DNA, 25 bp, Artificial
  probe
  misc_feature (1)..(25): SEQ ID NO: 6503; WAN024CEN; Start 238; Stop 262
atgttggttctaggatttagttggc

SEQ ID NO: 440560 - DNA, 25 bp, Artificial
  probe
  misc_feature (1)..(25): SEQ ID NO: 6503; WAN024CEN; Start 236; Stop 260
tgatgttggttctaggatttagttg

SEQ ID NO: 440561 - DNA, 25 bp, Artificial
  probe
  misc_feature (1)..(25): SEQ ID NO: 6503; WAN024CEN; Start 129; Stop 153
ggaggtctatggaatttatctgttc

SEQ ID NO: 440562 - DNA, 25 bp, Artificial
  probe
  misc_feature (1)..(25): SEQ ID NO: 6503; WAN024CEN; Start 229; Stop 253
atcaatctgatgttggttctaggat

SEQ ID NO: 440563 - DNA, 25 bp, Artificial
  probe
  misc_feature (1)..(25): SEQ ID NO: 6503; WAN024CEN; Start 235; Stop 259
ctgatgttggttctaggatttagtt

SEQ ID NO: 440564 - DNA, 25 bp, Artificial
  probe
  misc_feature (1)..(25): SEQ ID NO: 6503; WAN024CEN; Start 233; Stop 257
atctgatgttggttctaggatttag

SEQ ID NO: 440565 - DNA, 25 bp, Artificial
  probe
  misc_feature (1)..(25): SEQ ID NO: 6503; WAN024CEN; Start 130; Stop 154
gaggtctatggaatttatctgttct

SEQ ID NO: 440566 - DNA, 25 bp, Artificial
  probe
  misc_feature (1)..(25): SEQ ID NO: 6503; WAN024CEN; Start 231; Stop 255
caatctgatgttggttctaggattt

SEQ ID NO: 440567 - DNA, 25 bp, Artificial
  probe
  misc_feature (1)..(25): SEQ ID NO: 6503; WAN024CEN; Start 131; Stop 155
aggtctatggaatttatctgttctt

SEQ ID NO: 440568 - DNA, 25 bp, Artificial
  probe
  misc_feature (1)..(25): SEQ ID NO: 6503; WAN024CEN; Start 239; Stop 263
tgttggttctaggatttagttggcg

SEQ ID NO: 440569 - DNA, 25 bp, Artificial
  probe
  misc_feature (1)..(25): SEQ ID NO: 6503; WAN024CEN; Start 116; Stop 140
ttcttattttcgtggaggtctatgg

SEQ ID NO: 440570 - DNA, 25 bp, Artificial
  probe
  misc_feature (1)..(25): SEQ ID NO: 6503; WAN024CEN; Start 112; Stop 136
agttttcttattttcgtggaggtct

SEQ ID NO: 440571 - DNA, 25 bp, Artificial
  probe
  misc_feature (1)..(25): SEQ ID NO: 6503; WAN024CEN; Start 111; Stop 135
cagttttcttattttcgtggaggtc

SEQ ID NO: 440572 - DNA, 25 bp, Artificial
  probe
  misc_feature (1)..(25): SEQ ID NO: 6503; WAN024CEN; Start 109; Stop 133
atcagttttcttattttcgtggagg

SEQ ID NO: 440573 - DNA, 25 bp, Artificial
  probe
  misc_feature (1)..(25): SEQ ID NO: 6503; WAN024CEN; Start 110; Stop 134
tcagttttcttattttcgtggaggt

SEQ ID NO: 440574 - DNA, 25 bp, Artificial
  probe
  misc_feature (1)..(25): SEQ ID NO: 6503; WAN024CEN; Start 132; Stop 156
ggtctatggaatttatctgttcttt

SEQ ID NO: 440575 - DNA, 25 bp, Artificial
  probe
  misc_feature (1)..(25): SEQ ID NO: 6503; WAN024CEN; Start 113; Stop 137
gttttcttattttcgtggaggtcta

SEQ ID NO: 440576 - DNA, 25 bp, Artificial
  probe
  misc_feature (1)..(25): SEQ ID NO: 6503; WAN024CEN; Start 117; Stop 141
tcttattttcgtggaggtctatgga

SEQ ID NO: 440577 - DNA, 25 bp, Artificial
  probe
  misc_feature (1)..(25): SEQ ID NO: 6503; WAN024CEN; Start 115; Stop 139
tttcttattttcgtggaggtctatg

SEQ ID NO: 440578 - DNA, 25 bp, Artificial
  probe
  misc_feature (1)..(25): SEQ ID NO: 6503; WAN024CEN; Start 232; Stop 256
aatctgatgttggttctaggattta

SEQ ID NO: 440579 - DNA, 25 bp, Artificial
  probe
  misc_feature (1)..(25): SEQ ID NO: 6503; WAN024CEN; Start 114; Stop 138
ttttcttattttcgtggaggtctat

SEQ ID NO: 440580 - DNA, 25 bp, Artificial
  probe
  misc_feature (1)..(25): SEQ ID NO: 6503; WAN024CEN; Start 138; Stop 162
tggaatttatctgttctttactgaa

SEQ ID NO: 440581 - DNA, 25 bp, Artificial
  probe
  misc_feature (1)..(25): SEQ ID NO: 6503; WAN024CEN; Start 137; Stop 161
atggaatttatctgttctttactga

SEQ ID NO: 440582 - DNA, 25 bp, Artificial
  probe
  misc_feature (1)..(25): SEQ ID NO: 6503; WAN024CEN; Start 182; Stop 206
atatcagacaacatggtttaactag

SEQ ID NO: 440583 - DNA, 25 bp, Artificial
  probe
  misc_feature (1)..(25): SEQ ID NO: 6503; WAN024CEN; Start 84; Stop 108
cagtggacttttccttattggtttt

SEQ ID NO: 440584 - DNA, 25 bp, Artificial
  probe
  misc_feature (1)..(25): SEQ ID NO: 6503; WAN024CEN; Start 78; Stop 102
tattgccagtggacttttccttatt

SEQ ID NO: 440585 - DNA, 25 bp, Artificial
  probe
  misc_feature (1)..(25): SEQ ID NO: 6503; WAN024CEN; Start 77; Stop 101
ttattgccagtggacttttccttat

SEQ ID NO: 440586 - DNA, 25 bp, Artificial
  probe
  misc_feature (1)..(25): SEQ ID NO: 6504; WAN024CEO; Start 126; Stop 150
cgtggaggtctatggaatttatctt

SEQ ID NO: 440587 - DNA, 25 bp, Artificial
  probe
  misc_feature (1)..(25): SEQ ID NO: 6504; WAN024CEO; Start 128; Stop 152
tggaggtctatggaatttatcttct

SEQ ID NO: 440588 - DNA, 25 bp, Artificial
  probe
  misc_feature (1)..(25): SEQ ID NO: 6504; WAN024CEO; Start 127; Stop 151
gtggaggtctatggaatttatcttc

SEQ ID NO: 440589 - DNA, 25 bp, Artificial
  probe
  misc_feature (1)..(25): SEQ ID NO: 6504; WAN024CEO; Start 154; Stop 178
tttacagaaactgaactttacacgg

SEQ ID NO: 440590 - DNA, 25 bp, Artificial
  probe
  misc_feature (1)..(25): SEQ ID NO: 6504; WAN024CEO; Start 162; Stop 186
aactgaactttacacggcagattta

SEQ ID NO: 440591 - DNA, 25 bp, Artificial
  probe
  misc_feature (1)..(25): SEQ ID NO: 6504; WAN024CEO; Start 163; Stop 187
actgaactttacacggcagatttag

SEQ ID NO: 440592 - DNA, 25 bp, Artificial
  probe
  misc_feature (1)..(25): SEQ ID NO: 6504; WAN024CEO; Start 153; Stop 177
ctttacagaaactgaactttacacg

SEQ ID NO: 440593 - DNA, 25 bp, Artificial
  probe
  misc_feature (1)..(25): SEQ ID NO: 6504; WAN024CEO; Start 129; Stop 153
ggaggtctatggaatttatcttctc

SEQ ID NO: 440594 - DNA, 25 bp, Artificial
  probe
  misc_feature (1)..(25): SEQ ID NO: 6504; WAN024CEO; Start 161; Stop 185
aaactgaactttacacggcagattt

SEQ ID NO: 440595 - DNA, 25 bp, Artificial
  probe
  misc_feature (1)..(25): SEQ ID NO: 6504; WAN024CEO; Start 155; Stop 179
ttacagaaactgaactttacacggc

SEQ ID NO: 440596 - DNA, 25 bp, Artificial
  probe
  misc_feature (1)..(25): SEQ ID NO: 6504; WAN024CEO; Start 160; Stop 184
gaaactgaactttacacggcagatt

SEQ ID NO: 440597 - DNA, 25 bp, Artificial
  probe
  misc_feature (1)..(25): SEQ ID NO: 6504; WAN024CEO; Start 169; Stop 193
ctttacacggcagatttagctcaaa

SEQ ID NO: 440598 - DNA, 25 bp, Artificial
  probe
  misc_feature (1)..(25): SEQ ID NO: 6504; WAN024CEO; Start 130; Stop 154
gaggtctatggaatttatcttctct

SEQ ID NO: 440599 - DNA, 25 bp, Artificial
  probe
  misc_feature (1)..(25): SEQ ID NO: 6504; WAN024CEO; Start 164; Stop 188
ctgaactttacacggcagatttagc

SEQ ID NO: 440600 - DNA, 25 bp, Artificial
  probe
  misc_feature (1)..(25): SEQ ID NO: 6504; WAN024CEO; Start 152; Stop 176
tctttacagaaactgaactttacac

SEQ ID NO: 440601 - DNA, 25 bp, Artificial
  probe
  misc_feature (1)..(25): SEQ ID NO: 6504; WAN024CEO; Start 166; Stop 190
gaactttacacggcagatttagctc

SEQ ID NO: 440602 - DNA, 25 bp, Artificial
  probe
  misc_feature (1)..(25): SEQ ID NO: 6504; WAN024CEO; Start 159; Stop 183
agaaactgaactttacacggcagat

SEQ ID NO: 440603 - DNA, 25 bp, Artificial
  probe
  misc_feature (1)..(25): SEQ ID NO: 6504; WAN024CEO; Start 156; Stop 180
tacagaaactgaactttacacggca

SEQ ID NO: 440604 - DNA, 25 bp, Artificial
  probe
  misc_feature (1)..(25): SEQ ID NO: 6504; WAN024CEO; Start 131; Stop 155
aggtctatggaatttatcttctctt

SEQ ID NO: 440605 - DNA, 25 bp, Artificial
  probe
  misc_feature (1)..(25): SEQ ID NO: 6504; WAN024CEO; Start 106; Stop 130
tttgtcagtttccttattttcgtgg

SEQ ID NO: 440606 - DNA, 25 bp, Artificial
  probe
  misc_feature (1)..(25): SEQ ID NO: 6504; WAN024CEO; Start 103; Stop 127
ggttttgtcagtttccttattttcg

SEQ ID NO: 440607 - DNA, 25 bp, Artificial
  probe
  misc_feature (1)..(25): SEQ ID NO: 6504; WAN024CEO; Start 86; Stop 110
gtggacttttcttgattggttttgt

SEQ ID NO: 440608 - DNA, 25 bp, Artificial
  probe
  misc_feature (1)..(25): SEQ ID NO: 6504; WAN024CEO; Start 85; Stop 109
agtggacttttcttgattggttttg

SEQ ID NO: 440609 - DNA, 25 bp, Artificial
  probe
  misc_feature (1)..(25): SEQ ID NO: 6504; WAN024CEO; Start 84; Stop 108
cagtggacttttcttgattggtttt

SEQ ID NO: 440610 - DNA, 25 bp, Artificial
  probe
  misc_feature (1)..(25): SEQ ID NO: 6504; WAN024CEO; Start 151; Stop 175
ctctttacagaaactgaactttaca

SEQ ID NO: 440611 - DNA, 25 bp, Artificial
  probe
  misc_feature (1)..(25): SEQ ID NO: 6504; WAN024CEO; Start 105; Stop 129
ttttgtcagtttccttattttcgtg

SEQ ID NO: 440612 - DNA, 25 bp, Artificial
  probe
  misc_feature (1)..(25): SEQ ID NO: 6504; WAN024CEO; Start 104; Stop 128
gttttgtcagtttccttattttcgt

SEQ ID NO: 440613 - DNA, 25 bp, Artificial
  probe
  misc_feature (1)..(25): SEQ ID NO: 6504; WAN024CEO; Start 74; Stop 98
ttcttattgccagtggacttttctt

SEQ ID NO: 440614 - DNA, 25 bp, Artificial
  probe
  misc_feature (1)..(25): SEQ ID NO: 6504; WAN024CEO; Start 73; Stop 97
tttcttattgccagtggacttttct

SEQ ID NO: 440615 - DNA, 25 bp, Artificial
  probe
  misc_feature (1)..(25): SEQ ID NO: 6504; WAN024CEO; Start 168; Stop 192
actttacacggcagatttagctcaa

SEQ ID NO: 440616 - DNA, 25 bp, Artificial
  probe
  misc_feature (1)..(25): SEQ ID NO: 6504; WAN024CEO; Start 167; Stop 191
aactttacacggcagatttagctca

SEQ ID NO: 440617 - DNA, 25 bp, Artificial
  probe
  misc_feature (1)..(25): SEQ ID NO: 6504; WAN024CEO; Start 165; Stop 189
tgaactttacacggcagatttagct

SEQ ID NO: 440618 - DNA, 25 bp, Artificial
  probe
  misc_feature (1)..(25): SEQ ID NO: 6504; WAN024CEO; Start 78; Stop 102
tattgccagtggacttttcttgatt

SEQ ID NO: 440619 - DNA, 25 bp, Artificial
  probe
  misc_feature (1)..(25): SEQ ID NO: 6505; WAN024BSY; Start 66; Stop 90
caacaacaatcaaactaaagaacca

SEQ ID NO: 440620 - DNA, 25 bp, Artificial
  probe
  misc_feature (1)..(25): SEQ ID NO: 6505; WAN024BSY; Start 65; Stop 89
tcaacaacaatcaaactaaagaacc

SEQ ID NO: 440621 - DNA, 25 bp, Artificial
  probe
  misc_feature (1)..(25): SEQ ID NO: 6505; WAN024BSY; Start 68; Stop 92
acaacaatcaaactaaagaaccaaa

SEQ ID NO: 440622 - DNA, 25 bp, Artificial
  probe
  misc_feature (1)..(25): SEQ ID NO: 6505; WAN024BSY; Start 67; Stop 91
aacaacaatcaaactaaagaaccaa

SEQ ID NO: 440623 - DNA, 25 bp, Artificial
  probe
  misc_feature (1)..(25): SEQ ID NO: 6505; WAN024BSY; Start 63; Stop 87
actcaacaacaatcaaactaaagaa

SEQ ID NO: 440624 - DNA, 25 bp, Artificial
  probe
  misc_feature (1)..(25): SEQ ID NO: 6505; WAN024BSY; Start 64; Stop 88
ctcaacaacaatcaaactaaagaac

SEQ ID NO: 440625 - DNA, 25 bp, Artificial
  probe
  misc_feature (1)..(25): SEQ ID NO: 6505; WAN024BSY; Start 69; Stop 93
caacaatcaaactaaagaaccaaat

SEQ ID NO: 440626 - DNA, 25 bp, Artificial
  probe
  misc_feature (1)..(25): SEQ ID NO: 6505; WAN024BSY; Start 62; Stop 86
tactcaacaacaatcaaactaaaga

SEQ ID NO: 440627 - DNA, 25 bp, Artificial
  probe
  misc_feature (1)..(25): SEQ ID NO: 6505; WAN024BSY; Start 171; Stop 195
catccctactgctttccaattttat

SEQ ID NO: 440628 - DNA, 25 bp, Artificial
  probe
  misc_feature (1)..(25): SEQ ID NO: 6505; WAN024BSY; Start 170; Stop 194
ccatccctactgctttccaatttta

SEQ ID NO: 440629 - DNA, 25 bp, Artificial
  probe
  misc_feature (1)..(25): SEQ ID NO: 6505; WAN024BSY; Start 61; Stop 85
atactcaacaacaatcaaactaaag

SEQ ID NO: 440630 - DNA, 25 bp, Artificial
  probe
  misc_feature (1)..(25): SEQ ID NO: 6505; WAN024BSY; Start 168; Stop 192
tcccatccctactgctttccaattt

SEQ ID NO: 440631 - DNA, 25 bp, Artificial
  probe
  misc_feature (1)..(25): SEQ ID NO: 6505; WAN024BSY; Start 167; Stop 191
ttcccatccctactgctttccaatt

SEQ ID NO: 440632 - DNA, 25 bp, Artificial
  probe
  misc_feature (1)..(25): SEQ ID NO: 6505; WAN024BSY; Start 172; Stop 196
atccctactgctttccaattttata

SEQ ID NO: 440633 - DNA, 25 bp, Artificial
  probe
  misc_feature (1)..(25): SEQ ID NO: 6505; WAN024BSY; Start 166; Stop 190
cttcccatccctactgctttccaat

SEQ ID NO: 440634 - DNA, 25 bp, Artificial
  probe
  misc_feature (1)..(25): SEQ ID NO: 6505; WAN024BSY; Start 173; Stop 197
tccctactgctttccaattttataa

SEQ ID NO: 440635 - DNA, 25 bp, Artificial
  probe
  misc_feature (1)..(25): SEQ ID NO: 6505; WAN024BSY; Start 150; Stop 174
taaatctgtggtagtacttcccatc

SEQ ID NO: 440636 - DNA, 25 bp, Artificial
  probe
  misc_feature (1)..(25): SEQ ID NO: 6505; WAN024BSY; Start 147; Stop 171
taataaatctgtggtagtacttccc

SEQ ID NO: 440637 - DNA, 25 bp, Artificial
  probe
  misc_feature (1)..(25): SEQ ID NO: 6505; WAN024BSY; Start 148; Stop 172
aataaatctgtggtagtacttccca

SEQ ID NO: 440638 - DNA, 25 bp, Artificial
  probe
  misc_feature (1)..(25): SEQ ID NO: 6505; WAN024BSY; Start 71; Stop 95
acaatcaaactaaagaaccaaataa

SEQ ID NO: 440639 - DNA, 25 bp, Artificial
  probe
  misc_feature (1)..(25): SEQ ID NO: 6505; WAN024BSY; Start 70; Stop 94
aacaatcaaactaaagaaccaaata

SEQ ID NO: 440640 - DNA, 25 bp, Artificial
  probe
  misc_feature (1)..(25): SEQ ID NO: 6505; WAN024BSY; Start 149; Stop 173
ataaatctgtggtagtacttcccat

SEQ ID NO: 440641 - DNA, 25 bp, Artificial
  probe
  misc_feature (1)..(25): SEQ ID NO: 6505; WAN024BSY; Start 58; Stop 82
gttatactcaacaacaatcaaacta

SEQ ID NO: 440642 - DNA, 25 bp, Artificial
  probe
  misc_feature (1)..(25): SEQ ID NO: 6505; WAN024BSY; Start 163; Stop 187
gtacttcccatccctactgctttcc

SEQ ID NO: 440643 - DNA, 25 bp, Artificial
  probe
  misc_feature (1)..(25): SEQ ID NO: 6505; WAN024BSY; Start 164; Stop 188
tacttcccatccctactgctttcca

SEQ ID NO: 440644 - DNA, 25 bp, Artificial
  probe
  misc_feature (1)..(25): SEQ ID NO: 6505; WAN024BSY; Start 151; Stop 175
aaatctgtggtagtacttcccatcc

SEQ ID NO: 440645 - DNA, 25 bp, Artificial
  probe
  misc_feature (1)..(25): SEQ ID NO: 6505; WAN024BSY; Start 56; Stop 80
tagttatactcaacaacaatcaaac

SEQ ID NO: 440646 - DNA, 25 bp, Artificial
  probe
  misc_feature (1)..(25): SEQ ID NO: 6505; WAN024BSY; Start 169; Stop 193
cccatccctactgctttccaatttt

SEQ ID NO: 440647 - DNA, 25 bp, Artificial
  probe
  misc_feature (1)..(25): SEQ ID NO: 6505; WAN024BSY; Start 57; Stop 81
agttatactcaacaacaatcaaact

SEQ ID NO: 440648 - DNA, 25 bp, Artificial
  probe
  misc_feature (1)..(25): SEQ ID NO: 6505; WAN024BSY; Start 174; Stop 198
ccctactgctttccaattttataat

SEQ ID NO: 440649 - DNA, 25 bp, Artificial
  probe
  misc_feature (1)..(25): SEQ ID NO: 6505; WAN024BSY; Start 117; Stop 141
ttggatttcaaacaatactgataaa

SEQ ID NO: 440650 - DNA, 25 bp, Artificial
  probe
  misc_feature (1)..(25): SEQ ID NO: 6505; WAN024BSY; Start 6; Stop 30
tggtcatcaaaacatcttgaacaat

SEQ ID NO: 440651 - DNA, 25 bp, Artificial
  probe
  misc_feature (1)..(25): SEQ ID NO: 6505; WAN024BSY; Start 5; Stop 29
atggtcatcaaaacatcttgaacaa

SEQ ID NO: 440652 - DNA, 25 bp, Artificial
  probe
  misc_feature (1)..(25): SEQ ID NO: 6506; WAN024BU5; Start 396; Stop 420
tactggattctcatacttcaacgat

SEQ ID NO: 440653 - DNA, 25 bp, Artificial
  probe
  misc_feature (1)..(25): SEQ ID NO: 6506; WAN024BU5; Start 397; Stop 421
actggattctcatacttcaacgatg

SEQ ID NO: 440654 - DNA, 25 bp, Artificial
  probe
  misc_feature (1)..(25): SEQ ID NO: 6506; WAN024BU5; Start 293; Stop 317
ttcttaactacgctaacgaacaatt

SEQ ID NO: 440655 - DNA, 25 bp, Artificial
  probe
  misc_feature (1)..(25): SEQ ID NO: 6506; WAN024BU5; Start 398; Stop 422
ctggattctcatacttcaacgatgg

SEQ ID NO: 440656 - DNA, 25 bp, Artificial
  probe
  misc_feature (1)..(25): SEQ ID NO: 6506; WAN024BU5; Start 393; Stop 417
tggtactggattctcatacttcaac

SEQ ID NO: 440657 - DNA, 25 bp, Artificial
  probe
  misc_feature (1)..(25): SEQ ID NO: 6506; WAN024BU5; Start 395; Stop 419
gtactggattctcatacttcaacga

SEQ ID NO: 440658 - DNA, 25 bp, Artificial
  probe
  misc_feature (1)..(25): SEQ ID NO: 6506; WAN024BU5; Start 392; Stop 416
ctggtactggattctcatacttcaa

SEQ ID NO: 440659 - DNA, 25 bp, Artificial
  probe
  misc_feature (1)..(25): SEQ ID NO: 6506; WAN024BU5; Start 394; Stop 418
ggtactggattctcatacttcaacg

SEQ ID NO: 440660 - DNA, 25 bp, Artificial
  probe
  misc_feature (1)..(25): SEQ ID NO: 6506; WAN024BU5; Start 501; Stop 525
taagtacatgaatggagaggtcgtt

SEQ ID NO: 440661 - DNA, 25 bp, Artificial
  probe
  misc_feature (1)..(25): SEQ ID NO: 6506; WAN024BU5; Start 391; Stop 415
gctggtactggattctcatacttca

SEQ ID NO: 440662 - DNA, 25 bp, Artificial
  probe
  misc_feature (1)..(25): SEQ ID NO: 6506; WAN024BU5; Start 500; Stop 524
ctaagtacatgaatggagaggtcgt

SEQ ID NO: 440663 - DNA, 25 bp, Artificial
  probe
  misc_feature (1)..(25): SEQ ID NO: 6506; WAN024BU5; Start 493; Stop 517
atggagcctaagtacatgaatggag

SEQ ID NO: 440664 - DNA, 25 bp, Artificial
  probe
  misc_feature (1)..(25): SEQ ID NO: 6506; WAN024BU5; Start 495; Stop 519
ggagcctaagtacatgaatggagag

SEQ ID NO: 440665 - DNA, 25 bp, Artificial
  probe
  misc_feature (1)..(25): SEQ ID NO: 6506; WAN024BU5; Start 390; Stop 414
agctggtactggattctcatacttc

SEQ ID NO: 440666 - DNA, 25 bp, Artificial
  probe
  misc_feature (1)..(25): SEQ ID NO: 6506; WAN024BU5; Start 405; Stop 429
ctcatacttcaacgatgggaactat

SEQ ID NO: 440667 - DNA, 25 bp, Artificial
  probe
  misc_feature (1)..(25): SEQ ID NO: 6506; WAN024BU5; Start 191; Stop 215
gatgggaagacaatcaacaagaatt

SEQ ID NO: 440668 - DNA, 25 bp, Artificial
  probe
  misc_feature (1)..(25): SEQ ID NO: 6506; WAN024BU5; Start 401; Stop 425
gattctcatacttcaacgatgggaa

SEQ ID NO: 440669 - DNA, 25 bp, Artificial
  probe
  misc_feature (1)..(25): SEQ ID NO: 6506; WAN024BU5; Start 502; Stop 526
aagtacatgaatggagaggtcgttc

SEQ ID NO: 440670 - DNA, 25 bp, Artificial
  probe
  misc_feature (1)..(25): SEQ ID NO: 6506; WAN024BU5; Start 288; Stop 312
aaaggttcttaactacgctaacgaa

SEQ ID NO: 440671 - DNA, 25 bp, Artificial
  probe
  misc_feature (1)..(25): SEQ ID NO: 6506; WAN024BU5; Start 402; Stop 426
attctcatacttcaacgatgggaac

SEQ ID NO: 440672 - DNA, 25 bp, Artificial
  probe
  misc_feature (1)..(25): SEQ ID NO: 6506; WAN024BU5; Start 190; Stop 214
ggatgggaagacaatcaacaagaat

SEQ ID NO: 440673 - DNA, 25 bp, Artificial
  probe
  misc_feature (1)..(25): SEQ ID NO: 6506; WAN024BU5; Start 404; Stop 428
tctcatacttcaacgatgggaacta

SEQ ID NO: 440674 - DNA, 25 bp, Artificial
  probe
  misc_feature (1)..(25): SEQ ID NO: 6506; WAN024BU5; Start 621; Stop 645
cggtcttagactcgtctctatcaat

SEQ ID NO: 440675 - DNA, 25 bp, Artificial
  probe
  misc_feature (1)..(25): SEQ ID NO: 6506; WAN024BU5; Start 260; Stop 284
ttgtcaaactatcaactccgagaaa

SEQ ID NO: 440676 - DNA, 25 bp, Artificial
  probe
  misc_feature (1)..(25): SEQ ID NO: 6506; WAN024BU5; Start 622; Stop 646
ggtcttagactcgtctctatcaata

SEQ ID NO: 440677 - DNA, 25 bp, Artificial
  probe
  misc_feature (1)..(25): SEQ ID NO: 6506; WAN024BU5; Start 162; Stop 186
attaaatgtatcacctggagacttg

SEQ ID NO: 440678 - DNA, 25 bp, Artificial
  probe
  misc_feature (1)..(25): SEQ ID NO: 6506; WAN024BU5; Start 72; Stop 96
tgtaggtgtctctcgttctactatt

SEQ ID NO: 440679 - DNA, 25 bp, Artificial
  probe
  misc_feature (1)..(25): SEQ ID NO: 6506; WAN024BU5; Start 408; Stop 432
atacttcaacgatgggaactatgac

SEQ ID NO: 440680 - DNA, 25 bp, Artificial
  probe
  misc_feature (1)..(25): SEQ ID NO: 6506; WAN024BU5; Start 163; Stop 187
ttaaatgtatcacctggagacttga

SEQ ID NO: 440681 - DNA, 25 bp, Artificial
  probe
  misc_feature (1)..(25): SEQ ID NO: 6506; WAN024BU5; Start 494; Stop 518
tggagcctaagtacatgaatggaga

SEQ ID NO: 440682 - DNA, 25 bp, Artificial
  probe
  misc_feature (1)..(25): SEQ ID NO: 6506; WAN024BU5; Start 71; Stop 95
gtgtaggtgtctctcgttctactat

SEQ ID NO: 440683 - DNA, 25 bp, Artificial
  probe
  misc_feature (1)..(25): SEQ ID NO: 6506; WAN024BU5; Start 67; Stop 91
gaaagtgtaggtgtctctcgttcta

SEQ ID NO: 440684 - DNA, 25 bp, Artificial
  probe
  misc_feature (1)..(25): SEQ ID NO: 6506; WAN024BU5; Start 153; Stop 177
cgctgacaaattaaatgtatcacct

SEQ ID NO: 440685 - DNA, 25 bp, Artificial
  probe
  misc_feature (1)..(25): SEQ ID NO: 6507; WAN024BKT; Start 57; Stop 81
cctaatcttcatgtgtgtttacttg

SEQ ID NO: 440686 - DNA, 25 bp, Artificial
  probe
  misc_feature (1)..(25): SEQ ID NO: 6507; WAN024BKT; Start 56; Stop 80
tcctaatcttcatgtgtgtttactt

SEQ ID NO: 440687 - DNA, 25 bp, Artificial
  probe
  misc_feature (1)..(25): SEQ ID NO: 6507; WAN024BKT; Start 55; Stop 79
ttcctaatcttcatgtgtgtttact

SEQ ID NO: 440688 - DNA, 25 bp, Artificial
  probe
  misc_feature (1)..(25): SEQ ID NO: 6507; WAN024BKT; Start 54; Stop 78
attcctaatcttcatgtgtgtttac

SEQ ID NO: 440689 - DNA, 25 bp, Artificial
  probe
  misc_feature (1)..(25): SEQ ID NO: 6507; WAN024BKT; Start 52; Stop 76
aaattcctaatcttcatgtgtgttt

SEQ ID NO: 440690 - DNA, 25 bp, Artificial
  probe
  misc_feature (1)..(25): SEQ ID NO: 6507; WAN024BKT; Start 6; Stop 30
ttccctccttttctatatcattcgt

SEQ ID NO: 440691 - DNA, 25 bp, Artificial
  probe
  misc_feature (1)..(25): SEQ ID NO: 6507; WAN024BKT; Start 61; Stop 85
atcttcatgtgtgtttacttgattt

SEQ ID NO: 440692 - DNA, 25 bp, Artificial
  probe
  misc_feature (1)..(25): SEQ ID NO: 6507; WAN024BKT; Start 58; Stop 82
ctaatcttcatgtgtgtttacttga

SEQ ID NO: 440693 - DNA, 25 bp, Artificial
  probe
  misc_feature (1)..(25): SEQ ID NO: 6507; WAN024BKT; Start 7; Stop 31
tccctccttttctatatcattcgta

SEQ ID NO: 440694 - DNA, 25 bp, Artificial
  probe
  misc_feature (1)..(25): SEQ ID NO: 6507; WAN024BKT; Start 68; Stop 92
tgtgtgtttacttgattttcttagc

SEQ ID NO: 440695 - DNA, 25 bp, Artificial
  probe
  misc_feature (1)..(25): SEQ ID NO: 6507; WAN024BKT; Start 53; Stop 77
aattcctaatcttcatgtgtgttta

SEQ ID NO: 440696 - DNA, 25 bp, Artificial
  probe
  misc_feature (1)..(25): SEQ ID NO: 6507; WAN024BKT; Start 5; Stop 29
attccctccttttctatatcattcg

SEQ ID NO: 440697 - DNA, 25 bp, Artificial
  probe
  misc_feature (1)..(25): SEQ ID NO: 6507; WAN024BKT; Start 8; Stop 32
ccctccttttctatatcattcgtaa

SEQ ID NO: 440698 - DNA, 25 bp, Artificial
  probe
  misc_feature (1)..(25): SEQ ID NO: 6507; WAN024BKT; Start 60; Stop 84
aatcttcatgtgtgtttacttgatt

SEQ ID NO: 440699 - DNA, 25 bp, Artificial
  probe
  misc_feature (1)..(25): SEQ ID NO: 6507; WAN024BKT; Start 59; Stop 83
taatcttcatgtgtgtttacttgat

SEQ ID NO: 440700 - DNA, 25 bp, Artificial
  probe
  misc_feature (1)..(25): SEQ ID NO: 6507; WAN024BKT; Start 84; Stop 108
tttcttagctagtaaggtcgcaaag

SEQ ID NO: 440701 - DNA, 25 bp, Artificial
  probe
  misc_feature (1)..(25): SEQ ID NO: 6507; WAN024BKT; Start 50; Stop 74
gaaaattcctaatcttcatgtgtgt

SEQ ID NO: 440702 - DNA, 25 bp, Artificial
  probe
  misc_feature (1)..(25): SEQ ID NO: 6507; WAN024BKT; Start 69; Stop 93
gtgtgtttacttgattttcttagct

SEQ ID NO: 440703 - DNA, 25 bp, Artificial
  probe
  misc_feature (1)..(25): SEQ ID NO: 6507; WAN024BKT; Start 51; Stop 75
aaaattcctaatcttcatgtgtgtt

SEQ ID NO: 440704 - DNA, 25 bp, Artificial
  probe
  misc_feature (1)..(25): SEQ ID NO: 6507; WAN024BKT; Start 65; Stop 89
tcatgtgtgtttacttgattttctt

SEQ ID NO: 440705 - DNA, 25 bp, Artificial
  probe
  misc_feature (1)..(25): SEQ ID NO: 6507; WAN024BKT; Start 64; Stop 88
ttcatgtgtgtttacttgattttct

SEQ ID NO: 440706 - DNA, 25 bp, Artificial
  probe
  misc_feature (1)..(25): SEQ ID NO: 6507; WAN024BKT; Start 62; Stop 86
tcttcatgtgtgtttacttgatttt

SEQ ID NO: 440707 - DNA, 25 bp, Artificial
  probe
  misc_feature (1)..(25): SEQ ID NO: 6507; WAN024BKT; Start 49; Stop 73
ggaaaattcctaatcttcatgtgtg

SEQ ID NO: 440708 - DNA, 25 bp, Artificial
  probe
  misc_feature (1)..(25): SEQ ID NO: 6507; WAN024BKT; Start 63; Stop 87
cttcatgtgtgtttacttgattttc

SEQ ID NO: 440709 - DNA, 25 bp, Artificial
  probe
  misc_feature (1)..(25): SEQ ID NO: 6507; WAN024BKT; Start 9; Stop 33
cctccttttctatatcattcgtaaa

SEQ ID NO: 440710 - DNA, 25 bp, Artificial
  probe
  misc_feature (1)..(25): SEQ ID NO: 6507; WAN024BKT; Start 4; Stop 28
aattccctccttttctatatcattc

SEQ ID NO: 440711 - DNA, 25 bp, Artificial
  probe
  misc_feature (1)..(25): SEQ ID NO: 6507; WAN024BKT; Start 67; Stop 91
atgtgtgtttacttgattttcttag

SEQ ID NO: 440712 - DNA, 25 bp, Artificial
  probe
  misc_feature (1)..(25): SEQ ID NO: 6507; WAN024BKT; Start 82; Stop 106
attttcttagctagtaaggtcgcaa

SEQ ID NO: 440713 - DNA, 25 bp, Artificial
  probe
  misc_feature (1)..(25): SEQ ID NO: 6507; WAN024BKT; Start 83; Stop 107
ttttcttagctagtaaggtcgcaaa

SEQ ID NO: 440714 - DNA, 25 bp, Artificial
  probe
  misc_feature (1)..(25): SEQ ID NO: 6507; WAN024BKT; Start 81; Stop 105
gattttcttagctagtaaggtcgca

SEQ ID NO: 440715 - DNA, 25 bp, Artificial
  probe
  misc_feature (1)..(25): SEQ ID NO: 6507; WAN024BKT; Start 80; Stop 104
tgattttcttagctagtaaggtcgc

SEQ ID NO: 440716 - DNA, 25 bp, Artificial
  probe
  misc_feature (1)..(25): SEQ ID NO: 6507; WAN024BKT; Start 66; Stop 90
catgtgtgtttacttgattttctta

SEQ ID NO: 440717 - DNA, 25 bp, Artificial
  probe
  misc_feature (1)..(25): SEQ ID NO: 6507; WAN024BKT; Start 85; Stop 109
ttcttagctagtaaggtcgcaaagc

SEQ ID NO: 440718 - DNA, 25 bp, Artificial
  probe
  misc_feature (1)..(25): SEQ ID NO: 6508; WAN024BR2; Start 43; Stop 67
gtatctcttgcagaaggtatgttga

SEQ ID NO: 440719 - DNA, 25 bp, Artificial
  probe
  misc_feature (1)..(25): SEQ ID NO: 6508; WAN024BR2; Start 44; Stop 68
tatctcttgcagaaggtatgttgat

SEQ ID NO: 440720 - DNA, 25 bp, Artificial
  probe
  misc_feature (1)..(25): SEQ ID NO: 6508; WAN024BR2; Start 42; Stop 66
tgtatctcttgcagaaggtatgttg

SEQ ID NO: 440721 - DNA, 25 bp, Artificial
  probe
  misc_feature (1)..(25): SEQ ID NO: 6508; WAN024BR2; Start 41; Stop 65
gtgtatctcttgcagaaggtatgtt

SEQ ID NO: 440722 - DNA, 25 bp, Artificial
  probe
  misc_feature (1)..(25): SEQ ID NO: 6508; WAN024BR2; Start 45; Stop 69
atctcttgcagaaggtatgttgatg

SEQ ID NO: 440723 - DNA, 25 bp, Artificial
  probe
  misc_feature (1)..(25): SEQ ID NO: 6508; WAN024BR2; Start 47; Stop 71
ctcttgcagaaggtatgttgatgaa

SEQ ID NO: 440724 - DNA, 25 bp, Artificial
  probe
  misc_feature (1)..(25): SEQ ID NO: 6508; WAN024BR2; Start 48; Stop 72
tcttgcagaaggtatgttgatgaac

SEQ ID NO: 440725 - DNA, 25 bp, Artificial
  probe
  misc_feature (1)..(25): SEQ ID NO: 6508; WAN024BR2; Start 56; Stop 80
aaggtatgttgatgaacggtttgtt

SEQ ID NO: 440726 - DNA, 25 bp, Artificial
  probe
  misc_feature (1)..(25): SEQ ID NO: 6508; WAN024BR2; Start 54; Stop 78
agaaggtatgttgatgaacggtttg

SEQ ID NO: 440727 - DNA, 25 bp, Artificial
  probe
  misc_feature (1)..(25): SEQ ID NO: 6508; WAN024BR2; Start 53; Stop 77
cagaaggtatgttgatgaacggttt

SEQ ID NO: 440728 - DNA, 25 bp, Artificial
  probe
  misc_feature (1)..(25): SEQ ID NO: 6508; WAN024BR2; Start 46; Stop 70
tctcttgcagaaggtatgttgatga

SEQ ID NO: 440729 - DNA, 25 bp, Artificial
  probe
  misc_feature (1)..(25): SEQ ID NO: 6508; WAN024BR2; Start 97; Stop 121
caaccagacatcatcccacaattac

SEQ ID NO: 440730 - DNA, 25 bp, Artificial
  probe
  misc_feature (1)..(25): SEQ ID NO: 6508; WAN024BR2; Start 55; Stop 79
gaaggtatgttgatgaacggtttgt

SEQ ID NO: 440731 - DNA, 25 bp, Artificial
  probe
  misc_feature (1)..(25): SEQ ID NO: 6508; WAN024BR2; Start 40; Stop 64
ggtgtatctcttgcagaaggtatgt

SEQ ID NO: 440732 - DNA, 25 bp, Artificial
  probe
  misc_feature (1)..(25): SEQ ID NO: 6508; WAN024BR2; Start 52; Stop 76
gcagaaggtatgttgatgaacggtt

SEQ ID NO: 440733 - DNA, 25 bp, Artificial
  probe
  misc_feature (1)..(25): SEQ ID NO: 6508; WAN024BR2; Start 49; Stop 73
cttgcagaaggtatgttgatgaacg

SEQ ID NO: 440734 - DNA, 25 bp, Artificial
  probe
  misc_feature (1)..(25): SEQ ID NO: 6508; WAN024BR2; Start 22; Stop 46
ctttgtcttgcctgtatgggtgtat

SEQ ID NO: 440735 - DNA, 25 bp, Artificial
  probe
  misc_feature (1)..(25): SEQ ID NO: 6508; WAN024BR2; Start 23; Stop 47
tttgtcttgcctgtatgggtgtatc

SEQ ID NO: 440736 - DNA, 25 bp, Artificial
  probe
  misc_feature (1)..(25): SEQ ID NO: 6508; WAN024BR2; Start 96; Stop 120
ccaaccagacatcatcccacaatta

SEQ ID NO: 440737 - DNA, 25 bp, Artificial
  probe
  misc_feature (1)..(25): SEQ ID NO: 6508; WAN024BR2; Start 28; Stop 52
cttgcctgtatgggtgtatctcttg

SEQ ID NO: 440738 - DNA, 25 bp, Artificial
  probe
  misc_feature (1)..(25): SEQ ID NO: 6508; WAN024BR2; Start 27; Stop 51
tcttgcctgtatgggtgtatctctt

SEQ ID NO: 440739 - DNA, 25 bp, Artificial
  probe
  misc_feature (1)..(25): SEQ ID NO: 6508; WAN024BR2; Start 112; Stop 136
ccacaattacgtagcttaatgatca

SEQ ID NO: 440740 - DNA, 25 bp, Artificial
  probe
  misc_feature (1)..(25): SEQ ID NO: 6508; WAN024BR2; Start 98; Stop 122
aaccagacatcatcccacaattacg

SEQ ID NO: 440741 - DNA, 25 bp, Artificial
  probe
  misc_feature (1)..(25): SEQ ID NO: 6508; WAN024BR2; Start 175; Stop 199
ctcgtcttttcattcgtcatcaaat

SEQ ID NO: 440742 - DNA, 25 bp, Artificial
  probe
  misc_feature (1)..(25): SEQ ID NO: 6508; WAN024BR2; Start 24; Stop 48
ttgtcttgcctgtatgggtgtatct

SEQ ID NO: 440743 - DNA, 25 bp, Artificial
  probe
  misc_feature (1)..(25): SEQ ID NO: 6508; WAN024BR2; Start 176; Stop 200
tcgtcttttcattcgtcatcaaata

SEQ ID NO: 440744 - DNA, 25 bp, Artificial
  probe
  misc_feature (1)..(25): SEQ ID NO: 6508; WAN024BR2; Start 177; Stop 201
cgtcttttcattcgtcatcaaatag

SEQ ID NO: 440745 - DNA, 25 bp, Artificial
  probe
  misc_feature (1)..(25): SEQ ID NO: 6508; WAN024BR2; Start 26; Stop 50
gtcttgcctgtatgggtgtatctct

SEQ ID NO: 440746 - DNA, 25 bp, Artificial
  probe
  misc_feature (1)..(25): SEQ ID NO: 6508; WAN024BR2; Start 15; Stop 39
tttcggtctttgtcttgcctgtatg

SEQ ID NO: 440747 - DNA, 25 bp, Artificial
  probe
  misc_feature (1)..(25): SEQ ID NO: 6508; WAN024BR2; Start 34; Stop 58
tgtatgggtgtatctcttgcagaag

SEQ ID NO: 440748 - DNA, 25 bp, Artificial
  probe
  misc_feature (1)..(25): SEQ ID NO: 6508; WAN024BR2; Start 21; Stop 45
tctttgtcttgcctgtatgggtgta

SEQ ID NO: 440749 - DNA, 25 bp, Artificial
  probe
  misc_feature (1)..(25): SEQ ID NO: 6508; WAN024BR2; Start 50; Stop 74
ttgcagaaggtatgttgatgaacgg

SEQ ID NO: 440750 - DNA, 25 bp, Artificial
  probe
  misc_feature (1)..(25): SEQ ID NO: 6508; WAN024BR2; Start 174; Stop 198
cctcgtcttttcattcgtcatcaaa

SEQ ID NO: 440751 - DNA, 25 bp, Artificial
  probe
  misc_feature (1)..(25): SEQ ID NO: 6509; WAN024BRK; Start 847; Stop 871
ggtgaaggaatgagcaatgtattac

SEQ ID NO: 440752 - DNA, 25 bp, Artificial
  probe
  misc_feature (1)..(25): SEQ ID NO: 6509; WAN024BRK; Start 844; Stop 868
tatggtgaaggaatgagcaatgtat

SEQ ID NO: 440753 - DNA, 25 bp, Artificial
  probe
  misc_feature (1)..(25): SEQ ID NO: 6509; WAN024BRK; Start 386; Stop 410
taagaagcctggtgttattactgtt

SEQ ID NO: 440754 - DNA, 25 bp, Artificial
  probe
  misc_feature (1)..(25): SEQ ID NO: 6509; WAN024BRK; Start 381; Stop 405
ttgtgtaagaagcctggtgttatta

SEQ ID NO: 440755 - DNA, 25 bp, Artificial
  probe
  misc_feature (1)..(25): SEQ ID NO: 6509; WAN024BRK; Start 846; Stop 870
tggtgaaggaatgagcaatgtatta

SEQ ID NO: 440756 - DNA, 25 bp, Artificial
  probe
  misc_feature (1)..(25): SEQ ID NO: 6509; WAN024BRK; Start 845; Stop 869
atggtgaaggaatgagcaatgtatt

SEQ ID NO: 440757 - DNA, 25 bp, Artificial
  probe
  misc_feature (1)..(25): SEQ ID NO: 6509; WAN024BRK; Start 843; Stop 867
gtatggtgaaggaatgagcaatgta

SEQ ID NO: 440758 - DNA, 25 bp, Artificial
  probe
  misc_feature (1)..(25): SEQ ID NO: 6509; WAN024BRK; Start 848; Stop 872
gtgaaggaatgagcaatgtattact

SEQ ID NO: 440759 - DNA, 25 bp, Artificial
  probe
  misc_feature (1)..(25): SEQ ID NO: 6509; WAN024BRK; Start 380; Stop 404
cttgtgtaagaagcctggtgttatt

SEQ ID NO: 440760 - DNA, 25 bp, Artificial
  probe
  misc_feature (1)..(25): SEQ ID NO: 6509; WAN024BRK; Start 900; Stop 924
aattacgacagataatccaggttgc

SEQ ID NO: 440761 - DNA, 25 bp, Artificial
  probe
  misc_feature (1)..(25): SEQ ID NO: 6509; WAN024BRK; Start 261; Stop 285
ggatatagacttgacatataccgtg

SEQ ID NO: 440762 - DNA, 25 bp, Artificial
  probe
  misc_feature (1)..(25): SEQ ID NO: 6509; WAN024BRK; Start 712; Stop 736
gaaccgacagagagtaattatgaac

SEQ ID NO: 440763 - DNA, 25 bp, Artificial
  probe
  misc_feature (1)..(25): SEQ ID NO: 6509; WAN024BRK; Start 711; Stop 735
agaaccgacagagagtaattatgaa

SEQ ID NO: 440764 - DNA, 25 bp, Artificial
  probe
  misc_feature (1)..(25): SEQ ID NO: 6509; WAN024BRK; Start 849; Stop 873
tgaaggaatgagcaatgtattacta

SEQ ID NO: 440765 - DNA, 25 bp, Artificial
  probe
  misc_feature (1)..(25): SEQ ID NO: 6509; WAN024BRK; Start 841; Stop 865
gtgtatggtgaaggaatgagcaatg

SEQ ID NO: 440766 - DNA, 25 bp, Artificial
  probe
  misc_feature (1)..(25): SEQ ID NO: 6509; WAN024BRK; Start 103; Stop 127
gaagtgctagtgtcatgtccttatg

SEQ ID NO: 440767 - DNA, 25 bp, Artificial
  probe
  misc_feature (1)..(25): SEQ ID NO: 6509; WAN024BRK; Start 842; Stop 866
tgtatggtgaaggaatgagcaatgt

SEQ ID NO: 440768 - DNA, 25 bp, Artificial
  probe
  misc_feature (1)..(25): SEQ ID NO: 6509; WAN024BRK; Start 840; Stop 864
tgtgtatggtgaaggaatgagcaat

SEQ ID NO: 440769 - DNA, 25 bp, Artificial
  probe
  misc_feature (1)..(25): SEQ ID NO: 6509; WAN024BRK; Start 710; Stop 734
tagaaccgacagagagtaattatga

SEQ ID NO: 440770 - DNA, 25 bp, Artificial
  probe
  misc_feature (1)..(25): SEQ ID NO: 6509; WAN024BRK; Start 714; Stop 738
accgacagagagtaattatgaactt

SEQ ID NO: 440771 - DNA, 25 bp, Artificial
  probe
  misc_feature (1)..(25): SEQ ID NO: 6509; WAN024BRK; Start 713; Stop 737
aaccgacagagagtaattatgaact

SEQ ID NO: 440772 - DNA, 25 bp, Artificial
  probe
  misc_feature (1)..(25): SEQ ID NO: 6509; WAN024BRK; Start 385; Stop 409
gtaagaagcctggtgttattactgt

SEQ ID NO: 440773 - DNA, 25 bp, Artificial
  probe
  misc_feature (1)..(25): SEQ ID NO: 6509; WAN024BRK; Start 384; Stop 408
tgtaagaagcctggtgttattactg

SEQ ID NO: 440774 - DNA, 25 bp, Artificial
  probe
  misc_feature (1)..(25): SEQ ID NO: 6509; WAN024BRK; Start 383; Stop 407
gtgtaagaagcctggtgttattact

SEQ ID NO: 440775 - DNA, 25 bp, Artificial
  probe
  misc_feature (1)..(25): SEQ ID NO: 6509; WAN024BRK; Start 382; Stop 406
tgtgtaagaagcctggtgttattac

SEQ ID NO: 440776 - DNA, 25 bp, Artificial
  probe
  misc_feature (1)..(25): SEQ ID NO: 6509; WAN024BRK; Start 127; Stop 151
ggagataagatagagttgatgaagt

SEQ ID NO: 440777 - DNA, 25 bp, Artificial
  probe
  misc_feature (1)..(25): SEQ ID NO: 6509; WAN024BRK; Start 126; Stop 150
tggagataagatagagttgatgaag

SEQ ID NO: 440778 - DNA, 25 bp, Artificial
  probe
  misc_feature (1)..(25): SEQ ID NO: 6509; WAN024BRK; Start 899; Stop 923
taattacgacagataatccaggttg

SEQ ID NO: 440779 - DNA, 25 bp, Artificial
  probe
  misc_feature (1)..(25): SEQ ID NO: 6509; WAN024BRK; Start 262; Stop 286
gatatagacttgacatataccgtga

SEQ ID NO: 440780 - DNA, 25 bp, Artificial
  probe
  misc_feature (1)..(25): SEQ ID NO: 6509; WAN024BRK; Start 102; Stop 126
tgaagtgctagtgtcatgtccttat

SEQ ID NO: 440781 - DNA, 25 bp, Artificial
  probe
  misc_feature (1)..(25): SEQ ID NO: 6509; WAN024BRK; Start 852; Stop 876
aggaatgagcaatgtattactagaa

SEQ ID NO: 440782 - DNA, 25 bp, Artificial
  probe
  misc_feature (1)..(25): SEQ ID NO: 6509; WAN024BRK; Start 851; Stop 875
aaggaatgagcaatgtattactaga

SEQ ID NO: 440783 - DNA, 25 bp, Artificial
  probe
  misc_feature (1)..(25): SEQ ID NO: 6509; WAN024BRK; Start 704; Stop 728
gctttatagaaccgacagagagtaa

SEQ ID NO: 440784 - DNA, 25 bp, Artificial
  probe
  misc_feature (1)..(25): SEQ ID NO: 6510; WAN024BMC; Start 666; Stop 690
gattattgcggaagtcttgatacac

SEQ ID NO: 440785 - DNA, 25 bp, Artificial
  probe
  misc_feature (1)..(25): SEQ ID NO: 6510; WAN024BMC; Start 664; Stop 688
gtgattattgcggaagtcttgatac

SEQ ID NO: 440786 - DNA, 25 bp, Artificial
  probe
  misc_feature (1)..(25): SEQ ID NO: 6510; WAN024BMC; Start 665; Stop 689
tgattattgcggaagtcttgataca

SEQ ID NO: 440787 - DNA, 25 bp, Artificial
  probe
  misc_feature (1)..(25): SEQ ID NO: 6510; WAN024BMC; Start 663; Stop 687
ggtgattattgcggaagtcttgata

SEQ ID NO: 440788 - DNA, 25 bp, Artificial
  probe
  misc_feature (1)..(25): SEQ ID NO: 6510; WAN024BMC; Start 667; Stop 691
attattgcggaagtcttgatacacg

SEQ ID NO: 440789 - DNA, 25 bp, Artificial
  probe
  misc_feature (1)..(25): SEQ ID NO: 6510; WAN024BMC; Start 201; Stop 225
tatggtagcaggtcttgtatcagga

SEQ ID NO: 440790 - DNA, 25 bp, Artificial
  probe
  misc_feature (1)..(25): SEQ ID NO: 6510; WAN024BMC; Start 200; Stop 224
gtatggtagcaggtcttgtatcagg

SEQ ID NO: 440791 - DNA, 25 bp, Artificial
  probe
  misc_feature (1)..(25): SEQ ID NO: 6510; WAN024BMC; Start 199; Stop 223
ggtatggtagcaggtcttgtatcag

SEQ ID NO: 440792 - DNA, 25 bp, Artificial
  probe
  misc_feature (1)..(25): SEQ ID NO: 6510; WAN024BMC; Start 197; Stop 221
caggtatggtagcaggtcttgtatc

SEQ ID NO: 440793 - DNA, 25 bp, Artificial
  probe
  misc_feature (1)..(25): SEQ ID NO: 6510; WAN024BMC; Start 668; Stop 692
ttattgcggaagtcttgatacacga

SEQ ID NO: 440794 - DNA, 25 bp, Artificial
  probe
  misc_feature (1)..(25): SEQ ID NO: 6510; WAN024BMC; Start 572; Stop 596
tgattgctctatgtggttccttgtt

SEQ ID NO: 440795 - DNA, 25 bp, Artificial
  probe
  misc_feature (1)..(25): SEQ ID NO: 6510; WAN024BMC; Start 571; Stop 595
ttgattgctctatgtggttccttgt

SEQ ID NO: 440796 - DNA, 25 bp, Artificial
  probe
  misc_feature (1)..(25): SEQ ID NO: 6510; WAN024BMC; Start 198; Stop 222
aggtatggtagcaggtcttgtatca

SEQ ID NO: 440797 - DNA, 25 bp, Artificial
  probe
  misc_feature (1)..(25): SEQ ID NO: 6510; WAN024BMC; Start 526; Stop 550
aatgtagacaccatgaagattgttg

SEQ ID NO: 440798 - DNA, 25 bp, Artificial
  probe
  misc_feature (1)..(25): SEQ ID NO: 6510; WAN024BMC; Start 522; Stop 546
agtcaatgtagacaccatgaagatt

SEQ ID NO: 440799 - DNA, 25 bp, Artificial
  probe
  misc_feature (1)..(25): SEQ ID NO: 6510; WAN024BMC; Start 521; Stop 545
gagtcaatgtagacaccatgaagat

SEQ ID NO: 440800 - DNA, 25 bp, Artificial
  probe
  misc_feature (1)..(25): SEQ ID NO: 6510; WAN024BMC; Start 204; Stop 228
ggtagcaggtcttgtatcaggaatg

SEQ ID NO: 440801 - DNA, 25 bp, Artificial
  probe
  misc_feature (1)..(25): SEQ ID NO: 6510; WAN024BMC; Start 713; Stop 737
tattatccatcggaatcggtgctat

SEQ ID NO: 440802 - DNA, 25 bp, Artificial
  probe
  misc_feature (1)..(25): SEQ ID NO: 6510; WAN024BMC; Start 679; Stop 703
gtcttgatacacgacttgaccattg

SEQ ID NO: 440803 - DNA, 25 bp, Artificial
  probe
  misc_feature (1)..(25): SEQ ID NO: 6510; WAN024BMC; Start 20; Stop 44
gtttatcagaaggtttgttgtggtc

SEQ ID NO: 440804 - DNA, 25 bp, Artificial
  probe
  misc_feature (1)..(25): SEQ ID NO: 6510; WAN024BMC; Start 712; Stop 736
ttattatccatcggaatcggtgcta

SEQ ID NO: 440805 - DNA, 25 bp, Artificial
  probe
  misc_feature (1)..(25): SEQ ID NO: 6510; WAN024BMC; Start 203; Stop 227
tggtagcaggtcttgtatcaggaat

SEQ ID NO: 440806 - DNA, 25 bp, Artificial
  probe
  misc_feature (1)..(25): SEQ ID NO: 6510; WAN024BMC; Start 202; Stop 226
atggtagcaggtcttgtatcaggaa

SEQ ID NO: 440807 - DNA, 25 bp, Artificial
  probe
  misc_feature (1)..(25): SEQ ID NO: 6510; WAN024BMC; Start 19; Stop 43
agtttatcagaaggtttgttgtggt

SEQ ID NO: 440808 - DNA, 25 bp, Artificial
  probe
  misc_feature (1)..(25): SEQ ID NO: 6510; WAN024BMC; Start 18; Stop 42
tagtttatcagaaggtttgttgtgg

SEQ ID NO: 440809 - DNA, 25 bp, Artificial
  probe
  misc_feature (1)..(25): SEQ ID NO: 6510; WAN024BMC; Start 854; Stop 878
agagattaaagattcgtggtctgaa

SEQ ID NO: 440810 - DNA, 25 bp, Artificial
  probe
  misc_feature (1)..(25): SEQ ID NO: 6510; WAN024BMC; Start 853; Stop 877
aagagattaaagattcgtggtctga

SEQ ID NO: 440811 - DNA, 25 bp, Artificial
  probe
  misc_feature (1)..(25): SEQ ID NO: 6510; WAN024BMC; Start 682; Stop 706
ttgatacacgacttgaccattggag

SEQ ID NO: 440812 - DNA, 25 bp, Artificial
  probe
  misc_feature (1)..(25): SEQ ID NO: 6510; WAN024BMC; Start 681; Stop 705
cttgatacacgacttgaccattgga

SEQ ID NO: 440813 - DNA, 25 bp, Artificial
  probe
  misc_feature (1)..(25): SEQ ID NO: 6510; WAN024BMC; Start 680; Stop 704
tcttgatacacgacttgaccattgg

SEQ ID NO: 440814 - DNA, 25 bp, Artificial
  probe
  misc_feature (1)..(25): SEQ ID NO: 6510; WAN024BMC; Start 865; Stop 889
attcgtggtctgaaattgagaaatg

SEQ ID NO: 440815 - DNA, 25 bp, Artificial
  probe
  misc_feature (1)..(25): SEQ ID NO: 6510; WAN024BMC; Start 864; Stop 888
gattcgtggtctgaaattgagaaat

SEQ ID NO: 440816 - DNA, 25 bp, Artificial
  probe
  misc_feature (1)..(25): SEQ ID NO: 6510; WAN024BMC; Start 82; Stop 106
ttggatattgcggatatgactgctg

SEQ ID NO: 440817 - DNA, 25 bp, Artificial
  probe
  misc_feature (1)..(25): SEQ ID NO: 6511; WAN024BY6; Start 52; Stop 76
gcaagatacggaacattagaagaac

SEQ ID NO: 440818 - DNA, 25 bp, Artificial
  probe
  misc_feature (1)..(25): SEQ ID NO: 6511; WAN024BY6; Start 53; Stop 77
caagatacggaacattagaagaact

SEQ ID NO: 440819 - DNA, 25 bp, Artificial
  probe
  misc_feature (1)..(25): SEQ ID NO: 6511; WAN024BY6; Start 341; Stop 365
gtgaggcagaacataatggctatta

SEQ ID NO: 440820 - DNA, 25 bp, Artificial
  probe
  misc_feature (1)..(25): SEQ ID NO: 6511; WAN024BY6; Start 376; Stop 400
ggctctctagtgattggtgatattc

SEQ ID NO: 440821 - DNA, 25 bp, Artificial
  probe
  misc_feature (1)..(25): SEQ ID NO: 6511; WAN024BY6; Start 217; Stop 241
cttgacgctgtaatcactaatgttg

SEQ ID NO: 440822 - DNA, 25 bp, Artificial
  probe
  misc_feature (1)..(25): SEQ ID NO: 6511; WAN024BY6; Start 213; Stop 237
ttcacttgacgctgtaatcactaat

SEQ ID NO: 440823 - DNA, 25 bp, Artificial
  probe
  misc_feature (1)..(25): SEQ ID NO: 6511; WAN024BY6; Start 219; Stop 243
tgacgctgtaatcactaatgttgaa

SEQ ID NO: 440824 - DNA, 25 bp, Artificial
  probe
  misc_feature (1)..(25): SEQ ID NO: 6511; WAN024BY6; Start 218; Stop 242
ttgacgctgtaatcactaatgttga

SEQ ID NO: 440825 - DNA, 25 bp, Artificial
  probe
  misc_feature (1)..(25): SEQ ID NO: 6511; WAN024BY6; Start 216; Stop 240
acttgacgctgtaatcactaatgtt

SEQ ID NO: 440826 - DNA, 25 bp, Artificial
  probe
  misc_feature (1)..(25): SEQ ID NO: 6511; WAN024BY6; Start 377; Stop 401
gctctctagtgattggtgatattca

SEQ ID NO: 440827 - DNA, 25 bp, Artificial
  probe
  misc_feature (1)..(25): SEQ ID NO: 6511; WAN024BY6; Start 214; Stop 238
tcacttgacgctgtaatcactaatg

SEQ ID NO: 440828 - DNA, 25 bp, Artificial
  probe
  misc_feature (1)..(25): SEQ ID NO: 6511; WAN024BY6; Start 215; Stop 239
cacttgacgctgtaatcactaatgt

SEQ ID NO: 440829 - DNA, 25 bp, Artificial
  probe
  misc_feature (1)..(25): SEQ ID NO: 6511; WAN024BY6; Start 335; Stop 359
ctaactgtgaggcagaacataatgg

SEQ ID NO: 440830 - DNA, 25 bp, Artificial
  probe
  misc_feature (1)..(25): SEQ ID NO: 6511; WAN024BY6; Start 14; Stop 38
tcgaactaccagactattatgaacc

SEQ ID NO: 440831 - DNA, 25 bp, Artificial
  probe
  misc_feature (1)..(25): SEQ ID NO: 6511; WAN024BY6; Start 54; Stop 78
aagatacggaacattagaagaacta

SEQ ID NO: 440832 - DNA, 25 bp, Artificial
  probe
  misc_feature (1)..(25): SEQ ID NO: 6511; WAN024BY6; Start 51; Stop 75
tgcaagatacggaacattagaagaa

SEQ ID NO: 440833 - DNA, 25 bp, Artificial
  probe
  misc_feature (1)..(25): SEQ ID NO: 6511; WAN024BY6; Start 342; Stop 366
tgaggcagaacataatggctattat

SEQ ID NO: 440834 - DNA, 25 bp, Artificial
  probe
  misc_feature (1)..(25): SEQ ID NO: 6511; WAN024BY6; Start 20; Stop 44
taccagactattatgaacccgattg

SEQ ID NO: 440835 - DNA, 25 bp, Artificial
  probe
  misc_feature (1)..(25): SEQ ID NO: 6511; WAN024BY6; Start 157; Stop 181
attgaaatgtctgaaagtgattgct

SEQ ID NO: 440836 - DNA, 25 bp, Artificial
  probe
  misc_feature (1)..(25): SEQ ID NO: 6511; WAN024BY6; Start 19; Stop 43
ctaccagactattatgaacccgatt

SEQ ID NO: 440837 - DNA, 25 bp, Artificial
  probe
  misc_feature (1)..(25): SEQ ID NO: 6511; WAN024BY6; Start 158; Stop 182
ttgaaatgtctgaaagtgattgctg

SEQ ID NO: 440838 - DNA, 25 bp, Artificial
  probe
  misc_feature (1)..(25): SEQ ID NO: 6511; WAN024BY6; Start 16; Stop 40
gaactaccagactattatgaacccg

SEQ ID NO: 440839 - DNA, 25 bp, Artificial
  probe
  misc_feature (1)..(25): SEQ ID NO: 6511; WAN024BY6; Start 15; Stop 39
cgaactaccagactattatgaaccc

SEQ ID NO: 440840 - DNA, 25 bp, Artificial
  probe
  misc_feature (1)..(25): SEQ ID NO: 6511; WAN024BY6; Start 18; Stop 42
actaccagactattatgaacccgat

SEQ ID NO: 440841 - DNA, 25 bp, Artificial
  probe
  misc_feature (1)..(25): SEQ ID NO: 6511; WAN024BY6; Start 334; Stop 358
gctaactgtgaggcagaacataatg

SEQ ID NO: 440842 - DNA, 25 bp, Artificial
  probe
  misc_feature (1)..(25): SEQ ID NO: 6511; WAN024BY6; Start 50; Stop 74
atgcaagatacggaacattagaaga

SEQ ID NO: 440843 - DNA, 25 bp, Artificial
  probe
  misc_feature (1)..(25): SEQ ID NO: 6511; WAN024BY6; Start 17; Stop 41
aactaccagactattatgaacccga

SEQ ID NO: 440844 - DNA, 25 bp, Artificial
  probe
  misc_feature (1)..(25): SEQ ID NO: 6511; WAN024BY6; Start 378; Stop 402
ctctctagtgattggtgatattcat

SEQ ID NO: 440845 - DNA, 25 bp, Artificial
  probe
  misc_feature (1)..(25): SEQ ID NO: 6511; WAN024BY6; Start 207; Stop 231
aaatgtttcacttgacgctgtaatc

SEQ ID NO: 440846 - DNA, 25 bp, Artificial
  probe
  misc_feature (1)..(25): SEQ ID NO: 6511; WAN024BY6; Start 340; Stop 364
tgtgaggcagaacataatggctatt

SEQ ID NO: 440847 - DNA, 25 bp, Artificial
  probe
  misc_feature (1)..(25): SEQ ID NO: 6511; WAN024BY6; Start 294; Stop 318
caaagtaaccatcttccacaatcaa

SEQ ID NO: 440848 - DNA, 25 bp, Artificial
  probe
  misc_feature (1)..(25): SEQ ID NO: 6511; WAN024BY6; Start 292; Stop 316
aacaaagtaaccatcttccacaatc

SEQ ID NO: 440849 - DNA, 25 bp, Artificial
  probe
  misc_feature (1)..(25): SEQ ID NO: 6511; WAN024BY6; Start 240; Stop 264
tgaaattggagaacaggaagaaatc

SEQ ID NO: 440850 - DNA, 25 bp, Artificial
  probe
  misc_feature (1)..(25): SEQ ID NO: 6512; WAN024BYT; Start 68; Stop 92
atgatattagtcgcatctgtctagg

SEQ ID NO: 440851 - DNA, 25 bp, Artificial
  probe
  misc_feature (1)..(25): SEQ ID NO: 6512; WAN024BYT; Start 69; Stop 93
tgatattagtcgcatctgtctaggc

SEQ ID NO: 440852 - DNA, 25 bp, Artificial
  probe
  misc_feature (1)..(25): SEQ ID NO: 6512; WAN024BYT; Start 59; Stop 83
tcaacatagatgatattagtcgcat

SEQ ID NO: 440853 - DNA, 25 bp, Artificial
  probe
  misc_feature (1)..(25): SEQ ID NO: 6512; WAN024BYT; Start 43; Stop 67
actgaagatgagcttatcaacatag

SEQ ID NO: 440854 - DNA, 25 bp, Artificial
  probe
  misc_feature (1)..(25): SEQ ID NO: 6512; WAN024BYT; Start 44; Stop 68
ctgaagatgagcttatcaacataga

SEQ ID NO: 440855 - DNA, 25 bp, Artificial
  probe
  misc_feature (1)..(25): SEQ ID NO: 6512; WAN024BYT; Start 40; Stop 64
aatactgaagatgagcttatcaaca

SEQ ID NO: 440856 - DNA, 25 bp, Artificial
  probe
  misc_feature (1)..(25): SEQ ID NO: 6512; WAN024BYT; Start 41; Stop 65
atactgaagatgagcttatcaacat

SEQ ID NO: 440857 - DNA, 25 bp, Artificial
  probe
  misc_feature (1)..(25): SEQ ID NO: 6512; WAN024BYT; Start 117; Stop 141
accttacaatttaggagaacaccat

SEQ ID NO: 440858 - DNA, 25 bp, Artificial
  probe
  misc_feature (1)..(25): SEQ ID NO: 6512; WAN024BYT; Start 116; Stop 140
caccttacaatttaggagaacacca

SEQ ID NO: 440859 - DNA, 25 bp, Artificial
  probe
  misc_feature (1)..(25): SEQ ID NO: 6512; WAN024BYT; Start 115; Stop 139
acaccttacaatttaggagaacacc

SEQ ID NO: 440860 - DNA, 25 bp, Artificial
  probe
  misc_feature (1)..(25): SEQ ID NO: 6512; WAN024BYT; Start 114; Stop 138
aacaccttacaatttaggagaacac

SEQ ID NO: 440861 - DNA, 25 bp, Artificial
  probe
  misc_feature (1)..(25): SEQ ID NO: 6512; WAN024BYT; Start 47; Stop 71
aagatgagcttatcaacatagatga

SEQ ID NO: 440862 - DNA, 25 bp, Artificial
  probe
  misc_feature (1)..(25): SEQ ID NO: 6512; WAN024BYT; Start 45; Stop 69
tgaagatgagcttatcaacatagat

SEQ ID NO: 440863 - DNA, 25 bp, Artificial
  probe
  misc_feature (1)..(25): SEQ ID NO: 6512; WAN024BYT; Start 113; Stop 137
gaacaccttacaatttaggagaaca

SEQ ID NO: 440864 - DNA, 25 bp, Artificial
  probe
  misc_feature (1)..(25): SEQ ID NO: 6512; WAN024BYT; Start 31; Stop 55
tatagaggaaatactgaagatgagc

SEQ ID NO: 440865 - DNA, 25 bp, Artificial
  probe
  misc_feature (1)..(25): SEQ ID NO: 6512; WAN024BYT; Start 46; Stop 70
gaagatgagcttatcaacatagatg

SEQ ID NO: 440866 - DNA, 25 bp, Artificial
  probe
  misc_feature (1)..(25): SEQ ID NO: 6512; WAN024BYT; Start 112; Stop 136
agaacaccttacaatttaggagaac

SEQ ID NO: 440867 - DNA, 25 bp, Artificial
  probe
  misc_feature (1)..(25): SEQ ID NO: 6512; WAN024BYT; Start 42; Stop 66
tactgaagatgagcttatcaacata

SEQ ID NO: 440868 - DNA, 25 bp, Artificial
  probe
  misc_feature (1)..(25): SEQ ID NO: 6512; WAN024BYT; Start 32; Stop 56
atagaggaaatactgaagatgagct

SEQ ID NO: 440869 - DNA, 25 bp, Artificial
  probe
  misc_feature (1)..(25): SEQ ID NO: 6512; WAN024BYT; Start 34; Stop 58
agaggaaatactgaagatgagctta

SEQ ID NO: 440870 - DNA, 25 bp, Artificial
  probe
  misc_feature (1)..(25): SEQ ID NO: 6512; WAN024BYT; Start 33; Stop 57
tagaggaaatactgaagatgagctt

SEQ ID NO: 440871 - DNA, 25 bp, Artificial
  probe
  misc_feature (1)..(25): SEQ ID NO: 6512; WAN024BYT; Start 118; Stop 142
ccttacaatttaggagaacaccata

SEQ ID NO: 440872 - DNA, 25 bp, Artificial
  probe
  misc_feature (1)..(25): SEQ ID NO: 6512; WAN024BYT; Start 67; Stop 91
gatgatattagtcgcatctgtctag

SEQ ID NO: 440873 - DNA, 25 bp, Artificial
  probe
  misc_feature (1)..(25): SEQ ID NO: 6512; WAN024BYT; Start 58; Stop 82
atcaacatagatgatattagtcgca

SEQ ID NO: 440874 - DNA, 25 bp, Artificial
  probe
  misc_feature (1)..(25): SEQ ID NO: 6512; WAN024BYT; Start 122; Stop 146
acaatttaggagaacaccatatttc

SEQ ID NO: 440875 - DNA, 25 bp, Artificial
  probe
  misc_feature (1)..(25): SEQ ID NO: 6512; WAN024BYT; Start 111; Stop 135
aagaacaccttacaatttaggagaa

SEQ ID NO: 440876 - DNA, 25 bp, Artificial
  probe
  misc_feature (1)..(25): SEQ ID NO: 6512; WAN024BYT; Start 133; Stop 157
gaacaccatatttctatcactcaaa

SEQ ID NO: 440877 - DNA, 25 bp, Artificial
  probe
  misc_feature (1)..(25): SEQ ID NO: 6512; WAN024BYT; Start 36; Stop 60
aggaaatactgaagatgagcttatc

SEQ ID NO: 440878 - DNA, 25 bp, Artificial
  probe
  misc_feature (1)..(25): SEQ ID NO: 6512; WAN024BYT; Start 35; Stop 59
gaggaaatactgaagatgagcttat

SEQ ID NO: 440879 - DNA, 25 bp, Artificial
  probe
  misc_feature (1)..(25): SEQ ID NO: 6512; WAN024BYT; Start 37; Stop 61
ggaaatactgaagatgagcttatca

SEQ ID NO: 440880 - DNA, 25 bp, Artificial
  probe
  misc_feature (1)..(25): SEQ ID NO: 6512; WAN024BYT; Start 70; Stop 94
gatattagtcgcatctgtctaggcc

SEQ ID NO: 440881 - DNA, 25 bp, Artificial
  probe
  misc_feature (1)..(25): SEQ ID NO: 6512; WAN024BYT; Start 180; Stop 204
agtattggatattattggggaggtg

SEQ ID NO: 440882 - DNA, 25 bp, Artificial
  probe
  misc_feature (1)..(25): SEQ ID NO: 6512; WAN024BYT; Start 182; Stop 206
tattggatattattggggaggtgga

SEQ ID NO: 440883 - DNA, 25 bp, Artificial
  probe
  misc_feature (1)..(25): SEQ ID NO: 6513; WAN024BOG; Start 811; Stop 835
gttgatagtagtggagaagttggtt

SEQ ID NO: 440884 - DNA, 25 bp, Artificial
  probe
  misc_feature (1)..(25): SEQ ID NO: 6513; WAN024BOG; Start 1347; Stop 1371
tgaggacgatagtgtgtatattgac

SEQ ID NO: 440885 - DNA, 25 bp, Artificial
  probe
  misc_feature (1)..(25): SEQ ID NO: 6513; WAN024BOG; Start 1346; Stop 1370
gtgaggacgatagtgtgtatattga

SEQ ID NO: 440886 - DNA, 25 bp, Artificial
  probe
  misc_feature (1)..(25): SEQ ID NO: 6513; WAN024BOG; Start 1345; Stop 1369
agtgaggacgatagtgtgtatattg

SEQ ID NO: 440887 - DNA, 25 bp, Artificial
  probe
  misc_feature (1)..(25): SEQ ID NO: 6513; WAN024BOG; Start 1344; Stop 1368
cagtgaggacgatagtgtgtatatt

SEQ ID NO: 440888 - DNA, 25 bp, Artificial
  probe
  misc_feature (1)..(25): SEQ ID NO: 6513; WAN024BOG; Start 809; Stop 833
ctgttgatagtagtggagaagttgg

SEQ ID NO: 440889 - DNA, 25 bp, Artificial
  probe
  misc_feature (1)..(25): SEQ ID NO: 6513; WAN024BOG; Start 808; Stop 832
cctgttgatagtagtggagaagttg

SEQ ID NO: 440890 - DNA, 25 bp, Artificial
  probe
  misc_feature (1)..(25): SEQ ID NO: 6513; WAN024BOG; Start 1348; Stop 1372
gaggacgatagtgtgtatattgacg

SEQ ID NO: 440891 - DNA, 25 bp, Artificial
  probe
  misc_feature (1)..(25): SEQ ID NO: 6513; WAN024BOG; Start 816; Stop 840
tagtagtggagaagttggttcattg

SEQ ID NO: 440892 - DNA, 25 bp, Artificial
  probe
  misc_feature (1)..(25): SEQ ID NO: 6513; WAN024BOG; Start 814; Stop 838
gatagtagtggagaagttggttcat

SEQ ID NO: 440893 - DNA, 25 bp, Artificial
  probe
  misc_feature (1)..(25): SEQ ID NO: 6513; WAN024BOG; Start 812; Stop 836
ttgatagtagtggagaagttggttc

SEQ ID NO: 440894 - DNA, 25 bp, Artificial
  probe
  misc_feature (1)..(25): SEQ ID NO: 6513; WAN024BOG; Start 676; Stop 700
aatgataataaggagcgtcttgttg

SEQ ID NO: 440895 - DNA, 25 bp, Artificial
  probe
  misc_feature (1)..(25): SEQ ID NO: 6513; WAN024BOG; Start 815; Stop 839
atagtagtggagaagttggttcatt

SEQ ID NO: 440896 - DNA, 25 bp, Artificial
  probe
  misc_feature (1)..(25): SEQ ID NO: 6513; WAN024BOG; Start 810; Stop 834
tgttgatagtagtggagaagttggt

SEQ ID NO: 440897 - DNA, 25 bp, Artificial
  probe
  misc_feature (1)..(25): SEQ ID NO: 6513; WAN024BOG; Start 120; Stop 144
cgtgaatatccaacaggttaagatt

SEQ ID NO: 440898 - DNA, 25 bp, Artificial
  probe
  misc_feature (1)..(25): SEQ ID NO: 6513; WAN024BOG; Start 677; Stop 701
atgataataaggagcgtcttgttgg

SEQ ID NO: 440899 - DNA, 25 bp, Artificial
  probe
  misc_feature (1)..(25): SEQ ID NO: 6513; WAN024BOG; Start 119; Stop 143
gcgtgaatatccaacaggttaagat

SEQ ID NO: 440900 - DNA, 25 bp, Artificial
  probe
  misc_feature (1)..(25): SEQ ID NO: 6513; WAN024BOG; Start 1291; Stop 1315
aagagtagagatattcctaatcgct

SEQ ID NO: 440901 - DNA, 25 bp, Artificial
  probe
  misc_feature (1)..(25): SEQ ID NO: 6513; WAN024BOG; Start 813; Stop 837
tgatagtagtggagaagttggttca

SEQ ID NO: 440902 - DNA, 25 bp, Artificial
  probe
  misc_feature (1)..(25): SEQ ID NO: 6513; WAN024BOG; Start 1336; Stop 1360
gtaatcaacagtgaggacgatagtg

SEQ ID NO: 440903 - DNA, 25 bp, Artificial
  probe
  misc_feature (1)..(25): SEQ ID NO: 6513; WAN024BOG; Start 819; Stop 843
tagtggagaagttggttcattgaat

SEQ ID NO: 440904 - DNA, 25 bp, Artificial
  probe
  misc_feature (1)..(25): SEQ ID NO: 6513; WAN024BOG; Start 1349; Stop 1373
aggacgatagtgtgtatattgacgg

SEQ ID NO: 440905 - DNA, 25 bp, Artificial
  probe
  misc_feature (1)..(25): SEQ ID NO: 6513; WAN024BOG; Start 1334; Stop 1358
ttgtaatcaacagtgaggacgatag

SEQ ID NO: 440906 - DNA, 25 bp, Artificial
  probe
  misc_feature (1)..(25): SEQ ID NO: 6513; WAN024BOG; Start 817; Stop 841
agtagtggagaagttggttcattga

SEQ ID NO: 440907 - DNA, 25 bp, Artificial
  probe
  misc_feature (1)..(25): SEQ ID NO: 6513; WAN024BOG; Start 1343; Stop 1367
acagtgaggacgatagtgtgtatat

SEQ ID NO: 440908 - DNA, 25 bp, Artificial
  probe
  misc_feature (1)..(25): SEQ ID NO: 6513; WAN024BOG; Start 818; Stop 842
gtagtggagaagttggttcattgaa

SEQ ID NO: 440909 - DNA, 25 bp, Artificial
  probe
  misc_feature (1)..(25): SEQ ID NO: 6513; WAN024BOG; Start 1342; Stop 1366
aacagtgaggacgatagtgtgtata

SEQ ID NO: 440910 - DNA, 25 bp, Artificial
  probe
  misc_feature (1)..(25): SEQ ID NO: 6513; WAN024BOG; Start 1337; Stop 1361
taatcaacagtgaggacgatagtgt

SEQ ID NO: 440911 - DNA, 25 bp, Artificial
  probe
  misc_feature (1)..(25): SEQ ID NO: 6513; WAN024BOG; Start 1335; Stop 1359
tgtaatcaacagtgaggacgatagt

SEQ ID NO: 440912 - DNA, 25 bp, Artificial
  probe
  misc_feature (1)..(25): SEQ ID NO: 6513; WAN024BOG; Start 1297; Stop 1321
agagatattcctaatcgctatccaa

SEQ ID NO: 440913 - DNA, 25 bp, Artificial
  probe
  misc_feature (1)..(25): SEQ ID NO: 6513; WAN024BOG; Start 820; Stop 844
agtggagaagttggttcattgaatg

SEQ ID NO: 440914 - DNA, 25 bp, Artificial
  probe
  misc_feature (1)..(25): SEQ ID NO: 6513; WAN024BOG; Start 966; Stop 990
tcagacacttgattgtgagtatagt

SEQ ID NO: 440915 - DNA, 25 bp, Artificial
  probe
  misc_feature (1)..(25): SEQ ID NO: 6513; WAN024BOG; Start 1292; Stop 1316
agagtagagatattcctaatcgcta

SEQ ID NO: 440916 - DNA, 25 bp, Artificial
  probe
  misc_feature (1)..(25): SEQ ID NO: 6514; WAN024CY9; Start 222; Stop 246
ccagttggtaatatctccatatcca

SEQ ID NO: 440917 - DNA, 25 bp, Artificial
  probe
  misc_feature (1)..(25): SEQ ID NO: 6514; WAN024CY9; Start 221; Stop 245
gccagttggtaatatctccatatcc

SEQ ID NO: 440918 - DNA, 25 bp, Artificial
  probe
  misc_feature (1)..(25): SEQ ID NO: 6514; WAN024CY9; Start 18; Stop 42
aatcttatgctgggtatctttgtca

SEQ ID NO: 440919 - DNA, 25 bp, Artificial
  probe
  misc_feature (1)..(25): SEQ ID NO: 6514; WAN024CY9; Start 249; Stop 273
accagttgttgtaatgatgttggaa

SEQ ID NO: 440920 - DNA, 25 bp, Artificial
  probe
  misc_feature (1)..(25): SEQ ID NO: 6514; WAN024CY9; Start 248; Stop 272
aaccagttgttgtaatgatgttgga

SEQ ID NO: 440921 - DNA, 25 bp, Artificial
  probe
  misc_feature (1)..(25): SEQ ID NO: 6514; WAN024CY9; Start 17; Stop 41
gaatcttatgctgggtatctttgtc

SEQ ID NO: 440922 - DNA, 25 bp, Artificial
  probe
  misc_feature (1)..(25): SEQ ID NO: 6514; WAN024CY9; Start 11; Stop 35
acttgagaatcttatgctgggtatc

SEQ ID NO: 440923 - DNA, 25 bp, Artificial
  probe
  misc_feature (1)..(25): SEQ ID NO: 6514; WAN024CY9; Start 20; Stop 44
tcttatgctgggtatctttgtcaat

SEQ ID NO: 440924 - DNA, 25 bp, Artificial
  probe
  misc_feature (1)..(25): SEQ ID NO: 6514; WAN024CY9; Start 19; Stop 43
atcttatgctgggtatctttgtcaa

SEQ ID NO: 440925 - DNA, 25 bp, Artificial
  probe
  misc_feature (1)..(25): SEQ ID NO: 6514; WAN024CY9; Start 22; Stop 46
ttatgctgggtatctttgtcaatca

SEQ ID NO: 440926 - DNA, 25 bp, Artificial
  probe
  misc_feature (1)..(25): SEQ ID NO: 6514; WAN024CY9; Start 21; Stop 45
cttatgctgggtatctttgtcaatc

SEQ ID NO: 440927 - DNA, 25 bp, Artificial
  probe
  misc_feature (1)..(25): SEQ ID NO: 6514; WAN024CY9; Start 23; Stop 47
tatgctgggtatctttgtcaatcac

SEQ ID NO: 440928 - DNA, 25 bp, Artificial
  probe
  misc_feature (1)..(25): SEQ ID NO: 6514; WAN024CY9; Start 254; Stop 278
ttgttgtaatgatgttggaaacctg

SEQ ID NO: 440929 - DNA, 25 bp, Artificial
  probe
  misc_feature (1)..(25): SEQ ID NO: 6514; WAN024CY9; Start 253; Stop 277
gttgttgtaatgatgttggaaacct

SEQ ID NO: 440930 - DNA, 25 bp, Artificial
  probe
  misc_feature (1)..(25): SEQ ID NO: 6514; WAN024CY9; Start 252; Stop 276
agttgttgtaatgatgttggaaacc

SEQ ID NO: 440931 - DNA, 25 bp, Artificial
  probe
  misc_feature (1)..(25): SEQ ID NO: 6514; WAN024CY9; Start 12; Stop 36
cttgagaatcttatgctgggtatct

SEQ ID NO: 440932 - DNA, 25 bp, Artificial
  probe
  misc_feature (1)..(25): SEQ ID NO: 6514; WAN024CY9; Start 260; Stop 284
taatgatgttggaaacctggaagaa

SEQ ID NO: 440933 - DNA, 25 bp, Artificial
  probe
  misc_feature (1)..(25): SEQ ID NO: 6514; WAN024CY9; Start 16; Stop 40
agaatcttatgctgggtatctttgt

SEQ ID NO: 440934 - DNA, 25 bp, Artificial
  probe
  misc_feature (1)..(25): SEQ ID NO: 6514; WAN024CY9; Start 10; Stop 34
tacttgagaatcttatgctgggtat

SEQ ID NO: 440935 - DNA, 25 bp, Artificial
  probe
  misc_feature (1)..(25): SEQ ID NO: 6514; WAN024CY9; Start 14; Stop 38
tgagaatcttatgctgggtatcttt

SEQ ID NO: 440936 - DNA, 25 bp, Artificial
  probe
  misc_feature (1)..(25): SEQ ID NO: 6514; WAN024CY9; Start 13; Stop 37
ttgagaatcttatgctgggtatctt

SEQ ID NO: 440937 - DNA, 25 bp, Artificial
  probe
  misc_feature (1)..(25): SEQ ID NO: 6514; WAN024CY9; Start 251; Stop 275
cagttgttgtaatgatgttggaaac

SEQ ID NO: 440938 - DNA, 25 bp, Artificial
  probe
  misc_feature (1)..(25): SEQ ID NO: 6514; WAN024CY9; Start 15; Stop 39
gagaatcttatgctgggtatctttg

SEQ ID NO: 440939 - DNA, 25 bp, Artificial
  probe
  misc_feature (1)..(25): SEQ ID NO: 6514; WAN024CY9; Start 257; Stop 281
ttgtaatgatgttggaaacctggaa

SEQ ID NO: 440940 - DNA, 25 bp, Artificial
  probe
  misc_feature (1)..(25): SEQ ID NO: 6514; WAN024CY9; Start 194; Stop 218
aaaggaggataaactgggagaagag

SEQ ID NO: 440941 - DNA, 25 bp, Artificial
  probe
  misc_feature (1)..(25): SEQ ID NO: 6514; WAN024CY9; Start 259; Stop 283
gtaatgatgttggaaacctggaaga

SEQ ID NO: 440942 - DNA, 25 bp, Artificial
  probe
  misc_feature (1)..(25): SEQ ID NO: 6514; WAN024CY9; Start 9; Stop 33
gtacttgagaatcttatgctgggta

SEQ ID NO: 440943 - DNA, 25 bp, Artificial
  probe
  misc_feature (1)..(25): SEQ ID NO: 6514; WAN024CY9; Start 258; Stop 282
tgtaatgatgttggaaacctggaag

SEQ ID NO: 440944 - DNA, 25 bp, Artificial
  probe
  misc_feature (1)..(25): SEQ ID NO: 6514; WAN024CY9; Start 261; Stop 285
aatgatgttggaaacctggaagaag

SEQ ID NO: 440945 - DNA, 25 bp, Artificial
  probe
  misc_feature (1)..(25): SEQ ID NO: 6514; WAN024CY9; Start 256; Stop 280
gttgtaatgatgttggaaacctgga

SEQ ID NO: 440946 - DNA, 25 bp, Artificial
  probe
  misc_feature (1)..(25): SEQ ID NO: 6514; WAN024CY9; Start 255; Stop 279
tgttgtaatgatgttggaaacctgg

SEQ ID NO: 440947 - DNA, 25 bp, Artificial
  probe
  misc_feature (1)..(25): SEQ ID NO: 6514; WAN024CY9; Start 250; Stop 274
ccagttgttgtaatgatgttggaaa

SEQ ID NO: 440948 - DNA, 25 bp, Artificial
  probe
  misc_feature (1)..(25): SEQ ID NO: 6514; WAN024CY9; Start 247; Stop 271
aaaccagttgttgtaatgatgttgg

SEQ ID NO: 440949 - DNA, 25 bp, Artificial
  probe
  misc_feature (1)..(25): SEQ ID NO: 6515; WAN024BNM; Start 42; Stop 66
aggaggaaagaaatatgccaaattg

SEQ ID NO: 440950 - DNA, 25 bp, Artificial
  probe
  misc_feature (1)..(25): SEQ ID NO: 6515; WAN024BNM; Start 40; Stop 64
aaaggaggaaagaaatatgccaaat

SEQ ID NO: 440951 - DNA, 25 bp, Artificial
  probe
  misc_feature (1)..(25): SEQ ID NO: 6515; WAN024BNM; Start 41; Stop 65
aaggaggaaagaaatatgccaaatt

SEQ ID NO: 440952 - DNA, 25 bp, Artificial
  probe
  misc_feature (1)..(25): SEQ ID NO: 6515; WAN024BNM; Start 39; Stop 63
taaaggaggaaagaaatatgccaaa

SEQ ID NO: 440953 - DNA, 25 bp, Artificial
  probe
  misc_feature (1)..(25): SEQ ID NO: 6515; WAN024BNM; Start 38; Stop 62
ttaaaggaggaaagaaatatgccaa

SEQ ID NO: 440954 - DNA, 25 bp, Artificial
  probe
  misc_feature (1)..(25): SEQ ID NO: 6515; WAN024BNM; Start 37; Stop 61
tttaaaggaggaaagaaatatgcca

SEQ ID NO: 440955 - DNA, 25 bp, Artificial
  probe
  misc_feature (1)..(25): SEQ ID NO: 6515; WAN024BNM; Start 44; Stop 68
gaggaaagaaatatgccaaattggg

SEQ ID NO: 440956 - DNA, 25 bp, Artificial
  probe
  misc_feature (1)..(25): SEQ ID NO: 6515; WAN024BNM; Start 43; Stop 67
ggaggaaagaaatatgccaaattgg

SEQ ID NO: 440957 - DNA, 25 bp, Artificial
  probe
  misc_feature (1)..(25): SEQ ID NO: 6515; WAN024BNM; Start 36; Stop 60
ttttaaaggaggaaagaaatatgcc

SEQ ID NO: 440958 - DNA, 25 bp, Artificial
  probe
  misc_feature (1)..(25): SEQ ID NO: 6515; WAN024BNM; Start 45; Stop 69
aggaaagaaatatgccaaattgggc

SEQ ID NO: 440959 - DNA, 25 bp, Artificial
  probe
  misc_feature (1)..(25): SEQ ID NO: 6516; WAN024FTT; Start 435; Stop 459
cattgagaagcaacaacctgaatac

SEQ ID NO: 440960 - DNA, 25 bp, Artificial
  probe
  misc_feature (1)..(25): SEQ ID NO: 6516; WAN024FTT; Start 434; Stop 458
tcattgagaagcaacaacctgaata

SEQ ID NO: 440961 - DNA, 25 bp, Artificial
  probe
  misc_feature (1)..(25): SEQ ID NO: 6516; WAN024FTT; Start 630; Stop 654
tggtcgtgtaagtgaactattattc

SEQ ID NO: 440962 - DNA, 25 bp, Artificial
  probe
  misc_feature (1)..(25): SEQ ID NO: 6516; WAN024FTT; Start 442; Stop 466
aagcaacaacctgaataccttgatt

SEQ ID NO: 440963 - DNA, 25 bp, Artificial
  probe
  misc_feature (1)..(25): SEQ ID NO: 6516; WAN024FTT; Start 629; Stop 653
ttggtcgtgtaagtgaactattatt

SEQ ID NO: 440964 - DNA, 25 bp, Artificial
  probe
  misc_feature (1)..(25): SEQ ID NO: 6516; WAN024FTT; Start 441; Stop 465
gaagcaacaacctgaataccttgat

SEQ ID NO: 440965 - DNA, 25 bp, Artificial
  probe
  misc_feature (1)..(25): SEQ ID NO: 6516; WAN024FTT; Start 436; Stop 460
attgagaagcaacaacctgaatacc

SEQ ID NO: 440966 - DNA, 25 bp, Artificial
  probe
  misc_feature (1)..(25): SEQ ID NO: 6516; WAN024FTT; Start 439; Stop 463
gagaagcaacaacctgaataccttg

SEQ ID NO: 440967 - DNA, 25 bp, Artificial
  probe
  misc_feature (1)..(25): SEQ ID NO: 6516; WAN024FTT; Start 438; Stop 462
tgagaagcaacaacctgaatacctt

SEQ ID NO: 440968 - DNA, 25 bp, Artificial
  probe
  misc_feature (1)..(25): SEQ ID NO: 6516; WAN024FTT; Start 433; Stop 457
gtcattgagaagcaacaacctgaat

SEQ ID NO: 440969 - DNA, 25 bp, Artificial
  probe
  misc_feature (1)..(25): SEQ ID NO: 6516; WAN024FTT; Start 440; Stop 464
agaagcaacaacctgaataccttga

SEQ ID NO: 440970 - DNA, 25 bp, Artificial
  probe
  misc_feature (1)..(25): SEQ ID NO: 6516; WAN024FTT; Start 437; Stop 461
ttgagaagcaacaacctgaatacct

SEQ ID NO: 440971 - DNA, 25 bp, Artificial
  probe
  misc_feature (1)..(25): SEQ ID NO: 6516; WAN024FTT; Start 764; Stop 788
ttggtaagaagtatggacagagttt

SEQ ID NO: 440972 - DNA, 25 bp, Artificial
  probe
  misc_feature (1)..(25): SEQ ID NO: 6516; WAN024FTT; Start 763; Stop 787
tttggtaagaagtatggacagagtt

SEQ ID NO: 440973 - DNA, 25 bp, Artificial
  probe
  misc_feature (1)..(25): SEQ ID NO: 6516; WAN024FTT; Start 652; Stop 676
ttcaacgtatggctagagaagaatt

SEQ ID NO: 440974 - DNA, 25 bp, Artificial
  probe
  misc_feature (1)..(25): SEQ ID NO: 6516; WAN024FTT; Start 650; Stop 674
tattcaacgtatggctagagaagaa

SEQ ID NO: 440975 - DNA, 25 bp, Artificial
  probe
  misc_feature (1)..(25): SEQ ID NO: 6516; WAN024FTT; Start 649; Stop 673
ttattcaacgtatggctagagaaga

SEQ ID NO: 440976 - DNA, 25 bp, Artificial
  probe
  misc_feature (1)..(25): SEQ ID NO: 6516; WAN024FTT; Start 221; Stop 245
tagttcattaccgccgatatttcac

SEQ ID NO: 440977 - DNA, 25 bp, Artificial
  probe
  misc_feature (1)..(25): SEQ ID NO: 6516; WAN024FTT; Start 443; Stop 467
agcaacaacctgaataccttgattc

SEQ ID NO: 440978 - DNA, 25 bp, Artificial
  probe
  misc_feature (1)..(25): SEQ ID NO: 6516; WAN024FTT; Start 432; Stop 456
agtcattgagaagcaacaacctgaa

SEQ ID NO: 440979 - DNA, 25 bp, Artificial
  probe
  misc_feature (1)..(25): SEQ ID NO: 6516; WAN024FTT; Start 431; Stop 455
aagtcattgagaagcaacaacctga

SEQ ID NO: 440980 - DNA, 25 bp, Artificial
  probe
  misc_feature (1)..(25): SEQ ID NO: 6516; WAN024FTT; Start 220; Stop 244
ctagttcattaccgccgatatttca

SEQ ID NO: 440981 - DNA, 25 bp, Artificial
  probe
  misc_feature (1)..(25): SEQ ID NO: 6516; WAN024FTT; Start 165; Stop 189
tgaattaacaggtttatattgggca

SEQ ID NO: 440982 - DNA, 25 bp, Artificial
  probe
  misc_feature (1)..(25): SEQ ID NO: 6516; WAN024FTT; Start 374; Stop 398
ctctatgttctcattatgcacacac

SEQ ID NO: 440983 - DNA, 25 bp, Artificial
  probe
  misc_feature (1)..(25): SEQ ID NO: 6516; WAN024FTT; Start 373; Stop 397
actctatgttctcattatgcacaca

SEQ ID NO: 440984 - DNA, 25 bp, Artificial
  probe
  misc_feature (1)..(25): SEQ ID NO: 6516; WAN024FTT; Start 648; Stop 672
attattcaacgtatggctagagaag

SEQ ID NO: 440985 - DNA, 25 bp, Artificial
  probe
  misc_feature (1)..(25): SEQ ID NO: 6516; WAN024FTT; Start 199; Stop 223
ctagattgcgattatcttggactag

SEQ ID NO: 440986 - DNA, 25 bp, Artificial
  probe
  misc_feature (1)..(25): SEQ ID NO: 6516; WAN024FTT; Start 136; Stop 160
aacatttcccagttaaacccttatt

SEQ ID NO: 440987 - DNA, 25 bp, Artificial
  probe
  misc_feature (1)..(25): SEQ ID NO: 6516; WAN024FTT; Start 135; Stop 159
aaacatttcccagttaaacccttat

SEQ ID NO: 440988 - DNA, 25 bp, Artificial
  probe
  misc_feature (1)..(25): SEQ ID NO: 6516; WAN024FTT; Start 164; Stop 188
gtgaattaacaggtttatattgggc

SEQ ID NO: 440989 - DNA, 25 bp, Artificial
  probe
  misc_feature (1)..(25): SEQ ID NO: 6516; WAN024FTT; Start 372; Stop 396
aactctatgttctcattatgcacac

SEQ ID NO: 440990 - DNA, 25 bp, Artificial
  probe
  misc_feature (1)..(25): SEQ ID NO: 6516; WAN024FTT; Start 645; Stop 669
actattattcaacgtatggctagag

SEQ ID NO: 440991 - DNA, 25 bp, Artificial
  probe
  misc_feature (1)..(25): SEQ ID NO: 6516; WAN024FTT; Start 628; Stop 652
tttggtcgtgtaagtgaactattat

SEQ ID NO: 440992 - DNA, 25 bp, Artificial
  probe
  misc_feature (1)..(25): SEQ ID NO: 6517; WAN024BMX; Start 153; Stop 177
tgatactgttgaagataccgatgtc

SEQ ID NO: 440993 - DNA, 25 bp, Artificial
  probe
  misc_feature (1)..(25): SEQ ID NO: 6517; WAN024BMX; Start 152; Stop 176
atgatactgttgaagataccgatgt

SEQ ID NO: 440994 - DNA, 25 bp, Artificial
  probe
  misc_feature (1)..(25): SEQ ID NO: 6517; WAN024BMX; Start 154; Stop 178
gatactgttgaagataccgatgtca

SEQ ID NO: 440995 - DNA, 25 bp, Artificial
  probe
  misc_feature (1)..(25): SEQ ID NO: 6517; WAN024BMX; Start 166; Stop 190
gataccgatgtcagtcttgaagata

SEQ ID NO: 440996 - DNA, 25 bp, Artificial
  probe
  misc_feature (1)..(25): SEQ ID NO: 6517; WAN024BMX; Start 169; Stop 193
accgatgtcagtcttgaagatatta

SEQ ID NO: 440997 - DNA, 25 bp, Artificial
  probe
  misc_feature (1)..(25): SEQ ID NO: 6517; WAN024BMX; Start 168; Stop 192
taccgatgtcagtcttgaagatatt

SEQ ID NO: 440998 - DNA, 25 bp, Artificial
  probe
  misc_feature (1)..(25): SEQ ID NO: 6517; WAN024BMX; Start 155; Stop 179
atactgttgaagataccgatgtcag

SEQ ID NO: 440999 - DNA, 25 bp, Artificial
  probe
  misc_feature (1)..(25): SEQ ID NO: 6517; WAN024BMX; Start 151; Stop 175
catgatactgttgaagataccgatg

SEQ ID NO: 441000 - DNA, 25 bp, Artificial
  probe
  misc_feature (1)..(25): SEQ ID NO: 6517; WAN024BMX; Start 167; Stop 191
ataccgatgtcagtcttgaagatat

SEQ ID NO: 441001 - DNA, 25 bp, Artificial
  probe
  misc_feature (1)..(25): SEQ ID NO: 6517; WAN024BMX; Start 165; Stop 189
agataccgatgtcagtcttgaagat

SEQ ID NO: 441002 - DNA, 25 bp, Artificial
  probe
  misc_feature (1)..(25): SEQ ID NO: 6517; WAN024BMX; Start 170; Stop 194
ccgatgtcagtcttgaagatattaa

SEQ ID NO: 441003 - DNA, 25 bp, Artificial
  probe
  misc_feature (1)..(25): SEQ ID NO: 6517; WAN024BMX; Start 150; Stop 174
acatgatactgttgaagataccgat

SEQ ID NO: 441004 - DNA, 25 bp, Artificial
  probe
  misc_feature (1)..(25): SEQ ID NO: 6517; WAN024BMX; Start 142; Stop 166
ggatggttacatgatactgttgaag

SEQ ID NO: 441005 - DNA, 25 bp, Artificial
  probe
  misc_feature (1)..(25): SEQ ID NO: 6517; WAN024BMX; Start 149; Stop 173
tacatgatactgttgaagataccga

SEQ ID NO: 441006 - DNA, 25 bp, Artificial
  probe
  misc_feature (1)..(25): SEQ ID NO: 6517; WAN024BMX; Start 141; Stop 165
cggatggttacatgatactgttgaa

SEQ ID NO: 441007 - DNA, 25 bp, Artificial
  probe
  misc_feature (1)..(25): SEQ ID NO: 6517; WAN024BMX; Start 143; Stop 167
gatggttacatgatactgttgaaga

SEQ ID NO: 441008 - DNA, 25 bp, Artificial
  probe
  misc_feature (1)..(25): SEQ ID NO: 6517; WAN024BMX; Start 148; Stop 172
ttacatgatactgttgaagataccg

SEQ ID NO: 441009 - DNA, 25 bp, Artificial
  probe
  misc_feature (1)..(25): SEQ ID NO: 6517; WAN024BMX; Start 158; Stop 182
ctgttgaagataccgatgtcagtct

SEQ ID NO: 441010 - DNA, 25 bp, Artificial
  probe
  misc_feature (1)..(25): SEQ ID NO: 6517; WAN024BMX; Start 254; Stop 278
ttaaagattggcaaactcgtaaaga

SEQ ID NO: 441011 - DNA, 25 bp, Artificial
  probe
  misc_feature (1)..(25): SEQ ID NO: 6517; WAN024BMX; Start 393; Stop 417
aataattggtggtttactatgggac

SEQ ID NO: 441012 - DNA, 25 bp, Artificial
  probe
  misc_feature (1)..(25): SEQ ID NO: 6517; WAN024BMX; Start 144; Stop 168
atggttacatgatactgttgaagat

SEQ ID NO: 441013 - DNA, 25 bp, Artificial
  probe
  misc_feature (1)..(25): SEQ ID NO: 6517; WAN024BMX; Start 104; Stop 128
tagaaaccctaacagaagatcctca

SEQ ID NO: 441014 - DNA, 25 bp, Artificial
  probe
  misc_feature (1)..(25): SEQ ID NO: 6517; WAN024BMX; Start 106; Stop 130
gaaaccctaacagaagatcctcata

SEQ ID NO: 441015 - DNA, 25 bp, Artificial
  probe
  misc_feature (1)..(25): SEQ ID NO: 6517; WAN024BMX; Start 253; Stop 277
attaaagattggcaaactcgtaaag

SEQ ID NO: 441016 - DNA, 25 bp, Artificial
  probe
  misc_feature (1)..(25): SEQ ID NO: 6517; WAN024BMX; Start 255; Stop 279
taaagattggcaaactcgtaaagag

SEQ ID NO: 441017 - DNA, 25 bp, Artificial
  probe
  misc_feature (1)..(25): SEQ ID NO: 6517; WAN024BMX; Start 163; Stop 187
gaagataccgatgtcagtcttgaag

SEQ ID NO: 441018 - DNA, 25 bp, Artificial
  probe
  misc_feature (1)..(25): SEQ ID NO: 6517; WAN024BMX; Start 105; Stop 129
agaaaccctaacagaagatcctcat

SEQ ID NO: 441019 - DNA, 25 bp, Artificial
  probe
  misc_feature (1)..(25): SEQ ID NO: 6517; WAN024BMX; Start 164; Stop 188
aagataccgatgtcagtcttgaaga

SEQ ID NO: 441020 - DNA, 25 bp, Artificial
  probe
  misc_feature (1)..(25): SEQ ID NO: 6517; WAN024BMX; Start 108; Stop 132
aaccctaacagaagatcctcatatt

SEQ ID NO: 441021 - DNA, 25 bp, Artificial
  probe
  misc_feature (1)..(25): SEQ ID NO: 6517; WAN024BMX; Start 107; Stop 131
aaaccctaacagaagatcctcatat

SEQ ID NO: 441022 - DNA, 25 bp, Artificial
  probe
  misc_feature (1)..(25): SEQ ID NO: 6517; WAN024BMX; Start 162; Stop 186
tgaagataccgatgtcagtcttgaa

SEQ ID NO: 441023 - DNA, 25 bp, Artificial
  probe
  misc_feature (1)..(25): SEQ ID NO: 6517; WAN024BMX; Start 161; Stop 185
ttgaagataccgatgtcagtcttga

SEQ ID NO: 441024 - DNA, 25 bp, Artificial
  probe
  misc_feature (1)..(25): SEQ ID NO: 6517; WAN024BMX; Start 160; Stop 184
gttgaagataccgatgtcagtcttg

SEQ ID NO: 441025 - DNA, 25 bp, Artificial
  probe
  misc_feature (1)..(25): SEQ ID NO: 6518; WAN024BNT; Start 81; Stop 105
agatggaacagagtattatgatgcc

SEQ ID NO: 441026 - DNA, 25 bp, Artificial
  probe
  misc_feature (1)..(25): SEQ ID NO: 6518; WAN024BNT; Start 86; Stop 110
gaacagagtattatgatgccaacaa

SEQ ID NO: 441027 - DNA, 25 bp, Artificial
  probe
  misc_feature (1)..(25): SEQ ID NO: 6518; WAN024BNT; Start 80; Stop 104
cagatggaacagagtattatgatgc

SEQ ID NO: 441028 - DNA, 25 bp, Artificial
  probe
  misc_feature (1)..(25): SEQ ID NO: 6518; WAN024BNT; Start 79; Stop 103
gcagatggaacagagtattatgatg

SEQ ID NO: 441029 - DNA, 25 bp, Artificial
  probe
  misc_feature (1)..(25): SEQ ID NO: 6518; WAN024BNT; Start 85; Stop 109
ggaacagagtattatgatgccaaca

SEQ ID NO: 441030 - DNA, 25 bp, Artificial
  probe
  misc_feature (1)..(25): SEQ ID NO: 6518; WAN024BNT; Start 472; Stop 496
ggagtatctcaagtagcaacagtta

SEQ ID NO: 441031 - DNA, 25 bp, Artificial
  probe
  misc_feature (1)..(25): SEQ ID NO: 6518; WAN024BNT; Start 469; Stop 493
aatggagtatctcaagtagcaacag

SEQ ID NO: 441032 - DNA, 25 bp, Artificial
  probe
  misc_feature (1)..(25): SEQ ID NO: 6518; WAN024BNT; Start 468; Stop 492
taatggagtatctcaagtagcaaca

SEQ ID NO: 441033 - DNA, 25 bp, Artificial
  probe
  misc_feature (1)..(25): SEQ ID NO: 6518; WAN024BNT; Start 25; Stop 49
gcattggaatacgcagtagaactaa

SEQ ID NO: 441034 - DNA, 25 bp, Artificial
  probe
  misc_feature (1)..(25): SEQ ID NO: 6518; WAN024BNT; Start 470; Stop 494
atggagtatctcaagtagcaacagt

SEQ ID NO: 441035 - DNA, 25 bp, Artificial
  probe
  misc_feature (1)..(25): SEQ ID NO: 6518; WAN024BNT; Start 471; Stop 495
tggagtatctcaagtagcaacagtt

SEQ ID NO: 441036 - DNA, 25 bp, Artificial
  probe
  misc_feature (1)..(25): SEQ ID NO: 6518; WAN024BNT; Start 473; Stop 497
gagtatctcaagtagcaacagttaa

SEQ ID NO: 441037 - DNA, 25 bp, Artificial
  probe
  misc_feature (1)..(25): SEQ ID NO: 6518; WAN024BNT; Start 24; Stop 48
agcattggaatacgcagtagaacta

SEQ ID NO: 441038 - DNA, 25 bp, Artificial
  probe
  misc_feature (1)..(25): SEQ ID NO: 6518; WAN024BNT; Start 21; Stop 45
atcagcattggaatacgcagtagaa

SEQ ID NO: 441039 - DNA, 25 bp, Artificial
  probe
  misc_feature (1)..(25): SEQ ID NO: 6518; WAN024BNT; Start 20; Stop 44
aatcagcattggaatacgcagtaga

SEQ ID NO: 441040 - DNA, 25 bp, Artificial
  probe
  misc_feature (1)..(25): SEQ ID NO: 6518; WAN024BNT; Start 467; Stop 491
ataatggagtatctcaagtagcaac

SEQ ID NO: 441041 - DNA, 25 bp, Artificial
  probe
  misc_feature (1)..(25): SEQ ID NO: 6518; WAN024BNT; Start 83; Stop 107
atggaacagagtattatgatgccaa

SEQ ID NO: 441042 - DNA, 25 bp, Artificial
  probe
  misc_feature (1)..(25): SEQ ID NO: 6518; WAN024BNT; Start 82; Stop 106
gatggaacagagtattatgatgcca

SEQ ID NO: 441043 - DNA, 25 bp, Artificial
  probe
  misc_feature (1)..(25): SEQ ID NO: 6518; WAN024BNT; Start 466; Stop 490
gataatggagtatctcaagtagcaa

SEQ ID NO: 441044 - DNA, 25 bp, Artificial
  probe
  misc_feature (1)..(25): SEQ ID NO: 6518; WAN024BNT; Start 84; Stop 108
tggaacagagtattatgatgccaac

SEQ ID NO: 441045 - DNA, 25 bp, Artificial
  probe
  misc_feature (1)..(25): SEQ ID NO: 6518; WAN024BNT; Start 78; Stop 102
tgcagatggaacagagtattatgat

SEQ ID NO: 441046 - DNA, 25 bp, Artificial
  probe
  misc_feature (1)..(25): SEQ ID NO: 6518; WAN024BNT; Start 14; Stop 38
atcttaaatcagcattggaatacgc

SEQ ID NO: 441047 - DNA, 25 bp, Artificial
  probe
  misc_feature (1)..(25): SEQ ID NO: 6518; WAN024BNT; Start 18; Stop 42
taaatcagcattggaatacgcagta

SEQ ID NO: 441048 - DNA, 25 bp, Artificial
  probe
  misc_feature (1)..(25): SEQ ID NO: 6518; WAN024BNT; Start 87; Stop 111
aacagagtattatgatgccaacaaa

SEQ ID NO: 441049 - DNA, 25 bp, Artificial
  probe
  misc_feature (1)..(25): SEQ ID NO: 6518; WAN024BNT; Start 16; Stop 40
cttaaatcagcattggaatacgcag

SEQ ID NO: 441050 - DNA, 25 bp, Artificial
  probe
  misc_feature (1)..(25): SEQ ID NO: 6518; WAN024BNT; Start 622; Stop 646
aatatggctttatttgaggcagatg

SEQ ID NO: 441051 - DNA, 25 bp, Artificial
  probe
  misc_feature (1)..(25): SEQ ID NO: 6518; WAN024BNT; Start 121; Stop 145
aaagaacttgaccctaaacgctatc

SEQ ID NO: 441052 - DNA, 25 bp, Artificial
  probe
  misc_feature (1)..(25): SEQ ID NO: 6518; WAN024BNT; Start 88; Stop 112
acagagtattatgatgccaacaaat

SEQ ID NO: 441053 - DNA, 25 bp, Artificial
  probe
  misc_feature (1)..(25): SEQ ID NO: 6518; WAN024BNT; Start 623; Stop 647
atatggctttatttgaggcagatgg

SEQ ID NO: 441054 - DNA, 25 bp, Artificial
  probe
  misc_feature (1)..(25): SEQ ID NO: 6518; WAN024BNT; Start 104; Stop 128
ccaacaaattcaacctcaaagaact

SEQ ID NO: 441055 - DNA, 25 bp, Artificial
  probe
  misc_feature (1)..(25): SEQ ID NO: 6518; WAN024BNT; Start 15; Stop 39
tcttaaatcagcattggaatacgca

SEQ ID NO: 441056 - DNA, 25 bp, Artificial
  probe
  misc_feature (1)..(25): SEQ ID NO: 6518; WAN024BNT; Start 621; Stop 645
caatatggctttatttgaggcagat

SEQ ID NO: 441057 - DNA, 25 bp, Artificial
  probe
  misc_feature (1)..(25): SEQ ID NO: 6518; WAN024BNT; Start 596; Stop 620
ttgtctttaggattgataagcaagc

SEQ ID NO: 441058 - DNA, 25 bp, Artificial
  probe
  misc_feature (1)..(25): SEQ ID NO: 6519; WAN024BN6-5; Start 1585; Stop 1609
cctatgtatgtccttagcgatgtat

SEQ ID NO: 441059 - DNA, 25 bp, Artificial
  probe
  misc_feature (1)..(25): SEQ ID NO: 6519; WAN024BN6-5; Start 1576; Stop 1600
tacctatcgcctatgtatgtcctta

SEQ ID NO: 441060 - DNA, 25 bp, Artificial
  probe
  misc_feature (1)..(25): SEQ ID NO: 6519; WAN024BN6-5; Start 1577; Stop 1601
acctatcgcctatgtatgtccttag

SEQ ID NO: 441061 - DNA, 25 bp, Artificial
  probe
  misc_feature (1)..(25): SEQ ID NO: 6519; WAN024BN6-5; Start 848; Stop 872
ttcaggatacttcagttgttcagaa

SEQ ID NO: 441062 - DNA, 25 bp, Artificial
  probe
  misc_feature (1)..(25): SEQ ID NO: 6519; WAN024BN6-5; Start 1076; Stop 1100
tcagtcataatccaagagaagagaa

SEQ ID NO: 441063 - DNA, 25 bp, Artificial
  probe
  misc_feature (1)..(25): SEQ ID NO: 6519; WAN024BN6-5; Start 849; Stop 873
tcaggatacttcagttgttcagaat

SEQ ID NO: 441064 - DNA, 25 bp, Artificial
  probe
  misc_feature (1)..(25): SEQ ID NO: 6519; WAN024BN6-5; Start 956; Stop 980
tccaaggagtaagtgcgaataatat

SEQ ID NO: 441065 - DNA, 25 bp, Artificial
  probe
  misc_feature (1)..(25): SEQ ID NO: 6519; WAN024BN6-5; Start 1075; Stop 1099
atcagtcataatccaagagaagaga

SEQ ID NO: 441066 - DNA, 25 bp, Artificial
  probe
  misc_feature (1)..(25): SEQ ID NO: 6519; WAN024BN6-5; Start 955; Stop 979
ttccaaggagtaagtgcgaataata

SEQ ID NO: 441067 - DNA, 25 bp, Artificial
  probe
  misc_feature (1)..(25): SEQ ID NO: 6519; WAN024BN6-5; Start 1807; Stop 1831
tctccaagtaactgcgttcaattaa

SEQ ID NO: 441068 - DNA, 25 bp, Artificial
  probe
  misc_feature (1)..(25): SEQ ID NO: 6519; WAN024BN6-5; Start 1806; Stop 1830
ttctccaagtaactgcgttcaatta

SEQ ID NO: 441069 - DNA, 25 bp, Artificial
  probe
  misc_feature (1)..(25): SEQ ID NO: 6519; WAN024BN6-5; Start 266; Stop 290
ggcgtaaggtaagagtatcaactat

SEQ ID NO: 441070 - DNA, 25 bp, Artificial
  probe
  misc_feature (1)..(25): SEQ ID NO: 6519; WAN024BN6-5; Start 1584; Stop 1608
gcctatgtatgtccttagcgatgta

SEQ ID NO: 441071 - DNA, 25 bp, Artificial
  probe
  misc_feature (1)..(25): SEQ ID NO: 6519; WAN024BN6-5; Start 1687; Stop 1711
tacaagttaatgttgatggaatgcc

SEQ ID NO: 441072 - DNA, 25 bp, Artificial
  probe
  misc_feature (1)..(25): SEQ ID NO: 6519; WAN024BN6-5; Start 1586; Stop 1610
ctatgtatgtccttagcgatgtatt

SEQ ID NO: 441073 - DNA, 25 bp, Artificial
  probe
  misc_feature (1)..(25): SEQ ID NO: 6519; WAN024BN6-5; Start 1074; Stop 1098
aatcagtcataatccaagagaagag

SEQ ID NO: 441074 - DNA, 25 bp, Artificial
  probe
  misc_feature (1)..(25): SEQ ID NO: 6519; WAN024BN6-5; Start 267; Stop 291
gcgtaaggtaagagtatcaactatc

SEQ ID NO: 441075 - DNA, 25 bp, Artificial
  probe
  misc_feature (1)..(25): SEQ ID NO: 6519; WAN024BN6-5; Start 850; Stop 874
caggatacttcagttgttcagaata

SEQ ID NO: 441076 - DNA, 25 bp, Artificial
  probe
  misc_feature (1)..(25): SEQ ID NO: 6519; WAN024BN6-5; Start 1796; Stop 1820
atatctcaggttctccaagtaactg

SEQ ID NO: 441077 - DNA, 25 bp, Artificial
  probe
  misc_feature (1)..(25): SEQ ID NO: 6519; WAN024BN6-5; Start 1578; Stop 1602
cctatcgcctatgtatgtccttagc

SEQ ID NO: 441078 - DNA, 25 bp, Artificial
  probe
  misc_feature (1)..(25): SEQ ID NO: 6519; WAN024BN6-5; Start 1575; Stop 1599
atacctatcgcctatgtatgtcctt

SEQ ID NO: 441079 - DNA, 25 bp, Artificial
  probe
  misc_feature (1)..(25): SEQ ID NO: 6519; WAN024BN6-5; Start 1574; Stop 1598
aatacctatcgcctatgtatgtcct

SEQ ID NO: 441080 - DNA, 25 bp, Artificial
  probe
  misc_feature (1)..(25): SEQ ID NO: 6519; WAN024BN6-5; Start 273; Stop 297
ggtaagagtatcaactatccatgct

SEQ ID NO: 441081 - DNA, 25 bp, Artificial
  probe
  misc_feature (1)..(25): SEQ ID NO: 6519; WAN024BN6-5; Start 272; Stop 296
aggtaagagtatcaactatccatgc

SEQ ID NO: 441082 - DNA, 25 bp, Artificial
  probe
  misc_feature (1)..(25): SEQ ID NO: 6519; WAN024BN6-5; Start 1060; Stop 1084
gcttcaagacaactaatcagtcata

SEQ ID NO: 441083 - DNA, 25 bp, Artificial
  probe
  misc_feature (1)..(25): SEQ ID NO: 6519; WAN024BN6-5; Start 1588; Stop 1612
atgtatgtccttagcgatgtattaa

SEQ ID NO: 441084 - DNA, 25 bp, Artificial
  probe
  misc_feature (1)..(25): SEQ ID NO: 6519; WAN024BN6-5; Start 1809; Stop 1833
tccaagtaactgcgttcaattaatg

SEQ ID NO: 441085 - DNA, 25 bp, Artificial
  probe
  misc_feature (1)..(25): SEQ ID NO: 6519; WAN024BN6-5; Start 1808; Stop 1832
ctccaagtaactgcgttcaattaat

SEQ ID NO: 441086 - DNA, 25 bp, Artificial
  probe
  misc_feature (1)..(25): SEQ ID NO: 6519; WAN024BN6-5; Start 1805; Stop 1829
gttctccaagtaactgcgttcaatt

SEQ ID NO: 441087 - DNA, 25 bp, Artificial
  probe
  misc_feature (1)..(25): SEQ ID NO: 6519; WAN024BN6-5; Start 957; Stop 981
ccaaggagtaagtgcgaataatatt

SEQ ID NO: 441088 - DNA, 25 bp, Artificial
  probe
  misc_feature (1)..(25): SEQ ID NO: 6519; WAN024BN6-5; Start 268; Stop 292
cgtaaggtaagagtatcaactatcc

SEQ ID NO: 441089 - DNA, 25 bp, Artificial
  probe
  misc_feature (1)..(25): SEQ ID NO: 6519; WAN024BN6-5; Start 1686; Stop 1710
ttacaagttaatgttgatggaatgc

SEQ ID NO: 441090 - DNA, 25 bp, Artificial
  probe
  misc_feature (1)..(25): SEQ ID NO: 6519; WAN024BN6-5; Start 1933; Stop 1957
aattcaggtagattctcttatccac

SEQ ID NO: 441091 - DNA, 25 bp, Artificial
  probe
  misc_feature (1)..(25): SEQ ID NO: 6520; WAN024BQW; Start 12; Stop 36
tttaggaaaccctgttacctttacc

SEQ ID NO: 441092 - DNA, 25 bp, Artificial
  probe
  misc_feature (1)..(25): SEQ ID NO: 6520; WAN024BQW; Start 13; Stop 37
ttaggaaaccctgttacctttaccg

SEQ ID NO: 441093 - DNA, 25 bp, Artificial
  probe
  misc_feature (1)..(25): SEQ ID NO: 6520; WAN024BQW; Start 27; Stop 51
tacctttaccggatctcaacttcaa

SEQ ID NO: 441094 - DNA, 25 bp, Artificial
  probe
  misc_feature (1)..(25): SEQ ID NO: 6520; WAN024BQW; Start 26; Stop 50
ttacctttaccggatctcaacttca

SEQ ID NO: 441095 - DNA, 25 bp, Artificial
  probe
  misc_feature (1)..(25): SEQ ID NO: 6520; WAN024BQW; Start 25; Stop 49
gttacctttaccggatctcaacttc

SEQ ID NO: 441096 - DNA, 25 bp, Artificial
  probe
  misc_feature (1)..(25): SEQ ID NO: 6520; WAN024BQW; Start 46; Stop 70
cttcaagttggcgatactgctcatg

SEQ ID NO: 441097 - DNA, 25 bp, Artificial
  probe
  misc_feature (1)..(25): SEQ ID NO: 6520; WAN024BQW; Start 24; Stop 48
tgttacctttaccggatctcaactt

SEQ ID NO: 441098 - DNA, 25 bp, Artificial
  probe
  misc_feature (1)..(25): SEQ ID NO: 6520; WAN024BQW; Start 45; Stop 69
acttcaagttggcgatactgctcat

SEQ ID NO: 441099 - DNA, 25 bp, Artificial
  probe
  misc_feature (1)..(25): SEQ ID NO: 6520; WAN024BQW; Start 74; Stop 98
tttcactgaccactcctaacttgga

SEQ ID NO: 441100 - DNA, 25 bp, Artificial
  probe
  misc_feature (1)..(25): SEQ ID NO: 6520; WAN024BQW; Start 23; Stop 47
ctgttacctttaccggatctcaact

SEQ ID NO: 441101 - DNA, 25 bp, Artificial
  probe
  misc_feature (1)..(25): SEQ ID NO: 6520; WAN024BQW; Start 11; Stop 35
ttttaggaaaccctgttacctttac

SEQ ID NO: 441102 - DNA, 25 bp, Artificial
  probe
  misc_feature (1)..(25): SEQ ID NO: 6520; WAN024BQW; Start 28; Stop 52
acctttaccggatctcaacttcaag

SEQ ID NO: 441103 - DNA, 25 bp, Artificial
  probe
  misc_feature (1)..(25): SEQ ID NO: 6520; WAN024BQW; Start 29; Stop 53
cctttaccggatctcaacttcaagt

SEQ ID NO: 441104 - DNA, 25 bp, Artificial
  probe
  misc_feature (1)..(25): SEQ ID NO: 6520; WAN024BQW; Start 22; Stop 46
cctgttacctttaccggatctcaac

SEQ ID NO: 441105 - DNA, 25 bp, Artificial
  probe
  misc_feature (1)..(25): SEQ ID NO: 6520; WAN024BQW; Start 49; Stop 73
caagttggcgatactgctcatgatt

SEQ ID NO: 441106 - DNA, 25 bp, Artificial
  probe
  misc_feature (1)..(25): SEQ ID NO: 6520; WAN024BQW; Start 17; Stop 41
gaaaccctgttacctttaccggatc

SEQ ID NO: 441107 - DNA, 25 bp, Artificial
  probe
  misc_feature (1)..(25): SEQ ID NO: 6520; WAN024BQW; Start 30; Stop 54
ctttaccggatctcaacttcaagtt

SEQ ID NO: 441108 - DNA, 25 bp, Artificial
  probe
  misc_feature (1)..(25): SEQ ID NO: 6520; WAN024BQW; Start 73; Stop 97
ttttcactgaccactcctaacttgg

SEQ ID NO: 441109 - DNA, 25 bp, Artificial
  probe
  misc_feature (1)..(25): SEQ ID NO: 6520; WAN024BQW; Start 18; Stop 42
aaaccctgttacctttaccggatct

SEQ ID NO: 441110 - DNA, 25 bp, Artificial
  probe
  misc_feature (1)..(25): SEQ ID NO: 6520; WAN024BQW; Start 21; Stop 45
ccctgttacctttaccggatctcaa

SEQ ID NO: 441111 - DNA, 25 bp, Artificial
  probe
  misc_feature (1)..(25): SEQ ID NO: 6520; WAN024BQW; Start 50; Stop 74
aagttggcgatactgctcatgattt

SEQ ID NO: 441112 - DNA, 25 bp, Artificial
  probe
  misc_feature (1)..(25): SEQ ID NO: 6520; WAN024BQW; Start 19; Stop 43
aaccctgttacctttaccggatctc

SEQ ID NO: 441113 - DNA, 25 bp, Artificial
  probe
  misc_feature (1)..(25): SEQ ID NO: 6520; WAN024BQW; Start 48; Stop 72
tcaagttggcgatactgctcatgat

SEQ ID NO: 441114 - DNA, 25 bp, Artificial
  probe
  misc_feature (1)..(25): SEQ ID NO: 6520; WAN024BQW; Start 47; Stop 71
ttcaagttggcgatactgctcatga

SEQ ID NO: 441115 - DNA, 25 bp, Artificial
  probe
  misc_feature (1)..(25): SEQ ID NO: 6520; WAN024BQW; Start 14; Stop 38
taggaaaccctgttacctttaccgg

SEQ ID NO: 441116 - DNA, 25 bp, Artificial
  probe
  misc_feature (1)..(25): SEQ ID NO: 6520; WAN024BQW; Start 44; Stop 68
aacttcaagttggcgatactgctca

SEQ ID NO: 441117 - DNA, 25 bp, Artificial
  probe
  misc_feature (1)..(25): SEQ ID NO: 6520; WAN024BQW; Start 16; Stop 40
ggaaaccctgttacctttaccggat

SEQ ID NO: 441118 - DNA, 25 bp, Artificial
  probe
  misc_feature (1)..(25): SEQ ID NO: 6520; WAN024BQW; Start 77; Stop 101
cactgaccactcctaacttggagaa

SEQ ID NO: 441119 - DNA, 25 bp, Artificial
  probe
  misc_feature (1)..(25): SEQ ID NO: 6520; WAN024BQW; Start 75; Stop 99
ttcactgaccactcctaacttggag

SEQ ID NO: 441120 - DNA, 25 bp, Artificial
  probe
  misc_feature (1)..(25): SEQ ID NO: 6520; WAN024BQW; Start 20; Stop 44
accctgttacctttaccggatctca

SEQ ID NO: 441121 - DNA, 25 bp, Artificial
  probe
  misc_feature (1)..(25): SEQ ID NO: 6520; WAN024BQW; Start 78; Stop 102
actgaccactcctaacttggagaaa

SEQ ID NO: 441122 - DNA, 25 bp, Artificial
  probe
  misc_feature (1)..(25): SEQ ID NO: 6520; WAN024BQW; Start 51; Stop 75
agttggcgatactgctcatgatttt

SEQ ID NO: 441123 - DNA, 25 bp, Artificial
  probe
  misc_feature (1)..(25): SEQ ID NO: 6520; WAN024BQW; Start 76; Stop 100
tcactgaccactcctaacttggaga

SEQ ID NO: 441124 - DNA, 25 bp, Artificial
  probe
  misc_feature (1)..(25): SEQ ID NO: 6521; WAN024BMB; Start 659; Stop 683
atcgtctcattatgctctatcaagg

SEQ ID NO: 441125 - DNA, 25 bp, Artificial
  probe
  misc_feature (1)..(25): SEQ ID NO: 6521; WAN024BMB; Start 300; Stop 324
gacgattgaggagaatatggctatt

SEQ ID NO: 441126 - DNA, 25 bp, Artificial
  probe
  misc_feature (1)..(25): SEQ ID NO: 6521; WAN024BMB; Start 657; Stop 681
caatcgtctcattatgctctatcaa

SEQ ID NO: 441127 - DNA, 25 bp, Artificial
  probe
  misc_feature (1)..(25): SEQ ID NO: 6521; WAN024BMB; Start 301; Stop 325
acgattgaggagaatatggctattg

SEQ ID NO: 441128 - DNA, 25 bp, Artificial
  probe
  misc_feature (1)..(25): SEQ ID NO: 6521; WAN024BMB; Start 299; Stop 323
tgacgattgaggagaatatggctat

SEQ ID NO: 441129 - DNA, 25 bp, Artificial
  probe
  misc_feature (1)..(25): SEQ ID NO: 6521; WAN024BMB; Start 154; Stop 178
atgaatatcttggctggcaatctat

SEQ ID NO: 441130 - DNA, 25 bp, Artificial
  probe
  misc_feature (1)..(25): SEQ ID NO: 6521; WAN024BMB; Start 298; Stop 322
ttgacgattgaggagaatatggcta

SEQ ID NO: 441131 - DNA, 25 bp, Artificial
  probe
  misc_feature (1)..(25): SEQ ID NO: 6521; WAN024BMB; Start 658; Stop 682
aatcgtctcattatgctctatcaag

SEQ ID NO: 441132 - DNA, 25 bp, Artificial
  probe
  misc_feature (1)..(25): SEQ ID NO: 6521; WAN024BMB; Start 155; Stop 179
tgaatatcttggctggcaatctatc

SEQ ID NO: 441133 - DNA, 25 bp, Artificial
  probe
  misc_feature (1)..(25): SEQ ID NO: 6521; WAN024BMB; Start 153; Stop 177
gatgaatatcttggctggcaatcta

SEQ ID NO: 441134 - DNA, 25 bp, Artificial
  probe
  misc_feature (1)..(25): SEQ ID NO: 6521; WAN024BMB; Start 771; Stop 795
aagtctggtcagtgatgaattagtt

SEQ ID NO: 441135 - DNA, 25 bp, Artificial
  probe
  misc_feature (1)..(25): SEQ ID NO: 6521; WAN024BMB; Start 444; Stop 468
tactcaatatctctcaggaggacaa

SEQ ID NO: 441136 - DNA, 25 bp, Artificial
  probe
  misc_feature (1)..(25): SEQ ID NO: 6521; WAN024BMB; Start 443; Stop 467
atactcaatatctctcaggaggaca

SEQ ID NO: 441137 - DNA, 25 bp, Artificial
  probe
  misc_feature (1)..(25): SEQ ID NO: 6521; WAN024BMB; Start 442; Stop 466
gatactcaatatctctcaggaggac

SEQ ID NO: 441138 - DNA, 25 bp, Artificial
  probe
  misc_feature (1)..(25): SEQ ID NO: 6521; WAN024BMB; Start 302; Stop 326
cgattgaggagaatatggctattgc

SEQ ID NO: 441139 - DNA, 25 bp, Artificial
  probe
  misc_feature (1)..(25): SEQ ID NO: 6521; WAN024BMB; Start 156; Stop 180
gaatatcttggctggcaatctatcg

SEQ ID NO: 441140 - DNA, 25 bp, Artificial
  probe
  misc_feature (1)..(25): SEQ ID NO: 6521; WAN024BMB; Start 151; Stop 175
ttgatgaatatcttggctggcaatc

SEQ ID NO: 441141 - DNA, 25 bp, Artificial
  probe
  misc_feature (1)..(25): SEQ ID NO: 6521; WAN024BMB; Start 721; Stop 745
catctgacagttgaagaccttatgc

SEQ ID NO: 441142 - DNA, 25 bp, Artificial
  probe
  misc_feature (1)..(25): SEQ ID NO: 6521; WAN024BMB; Start 720; Stop 744
gcatctgacagttgaagaccttatg

SEQ ID NO: 441143 - DNA, 25 bp, Artificial
  probe
  misc_feature (1)..(25): SEQ ID NO: 6521; WAN024BMB; Start 719; Stop 743
agcatctgacagttgaagaccttat

SEQ ID NO: 441144 - DNA, 25 bp, Artificial
  probe
  misc_feature (1)..(25): SEQ ID NO: 6521; WAN024BMB; Start 401; Stop 425
tgaaggagttgaatattggtcttga

SEQ ID NO: 441145 - DNA, 25 bp, Artificial
  probe
  misc_feature (1)..(25): SEQ ID NO: 6521; WAN024BMB; Start 718; Stop 742
aagcatctgacagttgaagacctta

SEQ ID NO: 441146 - DNA, 25 bp, Artificial
  probe
  misc_feature (1)..(25): SEQ ID NO: 6521; WAN024BMB; Start 660; Stop 684
tcgtctcattatgctctatcaaggc

SEQ ID NO: 441147 - DNA, 25 bp, Artificial
  probe
  misc_feature (1)..(25): SEQ ID NO: 6521; WAN024BMB; Start 400; Stop 424
ttgaaggagttgaatattggtcttg

SEQ ID NO: 441148 - DNA, 25 bp, Artificial
  probe
  misc_feature (1)..(25): SEQ ID NO: 6521; WAN024BMB; Start 402; Stop 426
gaaggagttgaatattggtcttgaa

SEQ ID NO: 441149 - DNA, 25 bp, Artificial
  probe
  misc_feature (1)..(25): SEQ ID NO: 6521; WAN024BMB; Start 399; Stop 423
cttgaaggagttgaatattggtctt

SEQ ID NO: 441150 - DNA, 25 bp, Artificial
  probe
  misc_feature (1)..(25): SEQ ID NO: 6521; WAN024BMB; Start 152; Stop 176
tgatgaatatcttggctggcaatct

SEQ ID NO: 441151 - DNA, 25 bp, Artificial
  probe
  misc_feature (1)..(25): SEQ ID NO: 6521; WAN024BMB; Start 85; Stop 109
gatttagaggttgaagagggagatt

SEQ ID NO: 441152 - DNA, 25 bp, Artificial
  probe
  misc_feature (1)..(25): SEQ ID NO: 6521; WAN024BMB; Start 83; Stop 107
tagatttagaggttgaagagggaga

SEQ ID NO: 441153 - DNA, 25 bp, Artificial
  probe
  misc_feature (1)..(25): SEQ ID NO: 6521; WAN024BMB; Start 676; Stop 700
tatcaaggcaagatagtggtggatg

SEQ ID NO: 441154 - DNA, 25 bp, Artificial
  probe
  misc_feature (1)..(25): SEQ ID NO: 6521; WAN024BMB; Start 84; Stop 108
agatttagaggttgaagagggagat

SEQ ID NO: 441155 - DNA, 25 bp, Artificial
  probe
  misc_feature (1)..(25): SEQ ID NO: 6521; WAN024BMB; Start 86; Stop 110
atttagaggttgaagagggagattt

SEQ ID NO: 441156 - DNA, 25 bp, Artificial
  probe
  misc_feature (1)..(25): SEQ ID NO: 6521; WAN024BMB; Start 82; Stop 106
ttagatttagaggttgaagagggag

SEQ ID NO: 441157 - DNA, 25 bp, Artificial
  probe
  misc_feature (1)..(25): SEQ ID NO: 6522; WAN024BOK; Start 157; Stop 181
gctaacaatcgtatcagtatgcgta

SEQ ID NO: 441158 - DNA, 25 bp, Artificial
  probe
  misc_feature (1)..(25): SEQ ID NO: 6522; WAN024BOK; Start 159; Stop 183
taacaatcgtatcagtatgcgtaag

SEQ ID NO: 441159 - DNA, 25 bp, Artificial
  probe
  misc_feature (1)..(25): SEQ ID NO: 6522; WAN024BOK; Start 158; Stop 182
ctaacaatcgtatcagtatgcgtaa

SEQ ID NO: 441160 - DNA, 25 bp, Artificial
  probe
  misc_feature (1)..(25): SEQ ID NO: 6522; WAN024BOK; Start 160; Stop 184
aacaatcgtatcagtatgcgtaagc

SEQ ID NO: 441161 - DNA, 25 bp, Artificial
  probe
  misc_feature (1)..(25): SEQ ID NO: 6522; WAN024BOK; Start 180; Stop 204
taagcatgagcaagagttacgagaa

SEQ ID NO: 441162 - DNA, 25 bp, Artificial
  probe
  misc_feature (1)..(25): SEQ ID NO: 6522; WAN024BOK; Start 208; Stop 232
cgctataagattgaagatgccattt

SEQ ID NO: 441163 - DNA, 25 bp, Artificial
  probe
  misc_feature (1)..(25): SEQ ID NO: 6522; WAN024BOK; Start 243; Stop 267
ggaagcagattctgagcataaggaa

SEQ ID NO: 441164 - DNA, 25 bp, Artificial
  probe
  misc_feature (1)..(25): SEQ ID NO: 6522; WAN024BOK; Start 179; Stop 203
gtaagcatgagcaagagttacgaga

SEQ ID NO: 441165 - DNA, 25 bp, Artificial
  probe
  misc_feature (1)..(25): SEQ ID NO: 6522; WAN024BOK; Start 241; Stop 265
ctggaagcagattctgagcataagg

SEQ ID NO: 441166 - DNA, 25 bp, Artificial
  probe
  misc_feature (1)..(25): SEQ ID NO: 6522; WAN024BOK; Start 182; Stop 206
agcatgagcaagagttacgagaaat

SEQ ID NO: 441167 - DNA, 25 bp, Artificial
  probe
  misc_feature (1)..(25): SEQ ID NO: 6522; WAN024BOK; Start 90; Stop 114
tgtaatcaacacagacaataaagct

SEQ ID NO: 441168 - DNA, 25 bp, Artificial
  probe
  misc_feature (1)..(25): SEQ ID NO: 6522; WAN024BOK; Start 183; Stop 207
gcatgagcaagagttacgagaaatg

SEQ ID NO: 441169 - DNA, 25 bp, Artificial
  probe
  misc_feature (1)..(25): SEQ ID NO: 6522; WAN024BOK; Start 181; Stop 205
aagcatgagcaagagttacgagaaa

SEQ ID NO: 441170 - DNA, 25 bp, Artificial
  probe
  misc_feature (1)..(25): SEQ ID NO: 6522; WAN024BOK; Start 101; Stop 125
cagacaataaagctgtttcaacaat

SEQ ID NO: 441171 - DNA, 25 bp, Artificial
  probe
  misc_feature (1)..(25): SEQ ID NO: 6522; WAN024BOK; Start 91; Stop 115
gtaatcaacacagacaataaagctg

SEQ ID NO: 441172 - DNA, 25 bp, Artificial
  probe
  misc_feature (1)..(25): SEQ ID NO: 6522; WAN024BOK; Start 161; Stop 185
acaatcgtatcagtatgcgtaagca

SEQ ID NO: 441173 - DNA, 25 bp, Artificial
  probe
  misc_feature (1)..(25): SEQ ID NO: 6522; WAN024BOK; Start 242; Stop 266
tggaagcagattctgagcataagga

SEQ ID NO: 441174 - DNA, 25 bp, Artificial
  probe
  misc_feature (1)..(25): SEQ ID NO: 6522; WAN024BOK; Start 120; Stop 144
aacaatatctgaaacgctgcatgac

SEQ ID NO: 441175 - DNA, 25 bp, Artificial
  probe
  misc_feature (1)..(25): SEQ ID NO: 6522; WAN024BOK; Start 119; Stop 143
caacaatatctgaaacgctgcatga

SEQ ID NO: 441176 - DNA, 25 bp, Artificial
  probe
  misc_feature (1)..(25): SEQ ID NO: 6522; WAN024BOK; Start 207; Stop 231
gcgctataagattgaagatgccatt

SEQ ID NO: 441177 - DNA, 25 bp, Artificial
  probe
  misc_feature (1)..(25): SEQ ID NO: 6522; WAN024BOK; Start 204; Stop 228
aatgcgctataagattgaagatgcc

SEQ ID NO: 441178 - DNA, 25 bp, Artificial
  probe
  misc_feature (1)..(25): SEQ ID NO: 6522; WAN024BOK; Start 152; Stop 176
tgtacgctaacaatcgtatcagtat

SEQ ID NO: 441179 - DNA, 25 bp, Artificial
  probe
  misc_feature (1)..(25): SEQ ID NO: 6522; WAN024BOK; Start 151; Stop 175
ctgtacgctaacaatcgtatcagta

SEQ ID NO: 441180 - DNA, 25 bp, Artificial
  probe
  misc_feature (1)..(25): SEQ ID NO: 6522; WAN024BOK; Start 153; Stop 177
gtacgctaacaatcgtatcagtatg

SEQ ID NO: 441181 - DNA, 25 bp, Artificial
  probe
  misc_feature (1)..(25): SEQ ID NO: 6522; WAN024BOK; Start 149; Stop 173
atctgtacgctaacaatcgtatcag

SEQ ID NO: 441182 - DNA, 25 bp, Artificial
  probe
  misc_feature (1)..(25): SEQ ID NO: 6522; WAN024BOK; Start 148; Stop 172
gatctgtacgctaacaatcgtatca

SEQ ID NO: 441183 - DNA, 25 bp, Artificial
  probe
  misc_feature (1)..(25): SEQ ID NO: 6522; WAN024BOK; Start 78; Stop 102
ggtcaaaactactgtaatcaacaca

SEQ ID NO: 441184 - DNA, 25 bp, Artificial
  probe
  misc_feature (1)..(25): SEQ ID NO: 6522; WAN024BOK; Start 77; Stop 101
tggtcaaaactactgtaatcaacac

SEQ ID NO: 441185 - DNA, 25 bp, Artificial
  probe
  misc_feature (1)..(25): SEQ ID NO: 6522; WAN024BOK; Start 154; Stop 178
tacgctaacaatcgtatcagtatgc

SEQ ID NO: 441186 - DNA, 25 bp, Artificial
  probe
  misc_feature (1)..(25): SEQ ID NO: 6522; WAN024BOK; Start 118; Stop 142
tcaacaatatctgaaacgctgcatg

SEQ ID NO: 441187 - DNA, 25 bp, Artificial
  probe
  misc_feature (1)..(25): SEQ ID NO: 6522; WAN024BOK; Start 209; Stop 233
gctataagattgaagatgccatttt

SEQ ID NO: 441188 - DNA, 25 bp, Artificial
  probe
  misc_feature (1)..(25): SEQ ID NO: 6522; WAN024BOK; Start 147; Stop 171
ggatctgtacgctaacaatcgtatc

SEQ ID NO: 441189 - DNA, 25 bp, Artificial
  probe
  misc_feature (1)..(25): SEQ ID NO: 6522; WAN024BOK; Start 102; Stop 126
agacaataaagctgtttcaacaata

SEQ ID NO: 441190 - DNA, 25 bp, Artificial
  probe
  misc_feature (1)..(25): SEQ ID NO: 6523; WAN024BXQ; Start 125; Stop 149
acggtaatgaagagatgttgactta

SEQ ID NO: 441191 - DNA, 25 bp, Artificial
  probe
  misc_feature (1)..(25): SEQ ID NO: 6523; WAN024BXQ; Start 124; Stop 148
aacggtaatgaagagatgttgactt

SEQ ID NO: 441192 - DNA, 25 bp, Artificial
  probe
  misc_feature (1)..(25): SEQ ID NO: 6523; WAN024BXQ; Start 556; Stop 580
catcaagtaagttatcagcctatgg

SEQ ID NO: 441193 - DNA, 25 bp, Artificial
  probe
  misc_feature (1)..(25): SEQ ID NO: 6523; WAN024BXQ; Start 126; Stop 150
cggtaatgaagagatgttgacttat

SEQ ID NO: 441194 - DNA, 25 bp, Artificial
  probe
  misc_feature (1)..(25): SEQ ID NO: 6523; WAN024BXQ; Start 344; Stop 368
ctgtgttacttatcggtcaattcgg

SEQ ID NO: 441195 - DNA, 25 bp, Artificial
  probe
  misc_feature (1)..(25): SEQ ID NO: 6523; WAN024BXQ; Start 343; Stop 367
cctgtgttacttatcggtcaattcg

SEQ ID NO: 441196 - DNA, 25 bp, Artificial
  probe
  misc_feature (1)..(25): SEQ ID NO: 6523; WAN024BXQ; Start 555; Stop 579
tcatcaagtaagttatcagcctatg

SEQ ID NO: 441197 - DNA, 25 bp, Artificial
  probe
  misc_feature (1)..(25): SEQ ID NO: 6523; WAN024BXQ; Start 553; Stop 577
gatcatcaagtaagttatcagccta

SEQ ID NO: 441198 - DNA, 25 bp, Artificial
  probe
  misc_feature (1)..(25): SEQ ID NO: 6523; WAN024BXQ; Start 554; Stop 578
atcatcaagtaagttatcagcctat

SEQ ID NO: 441199 - DNA, 25 bp, Artificial
  probe
  misc_feature (1)..(25): SEQ ID NO: 6523; WAN024BXQ; Start 335; Stop 359
attatctccctgtgttacttatcgg

SEQ ID NO: 441200 - DNA, 25 bp, Artificial
  probe
  misc_feature (1)..(25): SEQ ID NO: 6523; WAN024BXQ; Start 127; Stop 151
ggtaatgaagagatgttgacttatc

SEQ ID NO: 441201 - DNA, 25 bp, Artificial
  probe
  misc_feature (1)..(25): SEQ ID NO: 6523; WAN024BXQ; Start 336; Stop 360
ttatctccctgtgttacttatcggt

SEQ ID NO: 441202 - DNA, 25 bp, Artificial
  probe
  misc_feature (1)..(25): SEQ ID NO: 6523; WAN024BXQ; Start 347; Stop 371
tgttacttatcggtcaattcggcaa

SEQ ID NO: 441203 - DNA, 25 bp, Artificial
  probe
  misc_feature (1)..(25): SEQ ID NO: 6523; WAN024BXQ; Start 337; Stop 361
tatctccctgtgttacttatcggtc

SEQ ID NO: 441204 - DNA, 25 bp, Artificial
  probe
  misc_feature (1)..(25): SEQ ID NO: 6523; WAN024BXQ; Start 574; Stop 598
cctatggcattaaatatgtcgctct

SEQ ID NO: 441205 - DNA, 25 bp, Artificial
  probe
  misc_feature (1)..(25): SEQ ID NO: 6523; WAN024BXQ; Start 334; Stop 358
gattatctccctgtgttacttatcg

SEQ ID NO: 441206 - DNA, 25 bp, Artificial
  probe
  misc_feature (1)..(25): SEQ ID NO: 6523; WAN024BXQ; Start 342; Stop 366
ccctgtgttacttatcggtcaattc

SEQ ID NO: 441207 - DNA, 25 bp, Artificial
  probe
  misc_feature (1)..(25): SEQ ID NO: 6523; WAN024BXQ; Start 575; Stop 599
ctatggcattaaatatgtcgctcta

SEQ ID NO: 441208 - DNA, 25 bp, Artificial
  probe
  misc_feature (1)..(25): SEQ ID NO: 6523; WAN024BXQ; Start 341; Stop 365
tccctgtgttacttatcggtcaatt

SEQ ID NO: 441209 - DNA, 25 bp, Artificial
  probe
  misc_feature (1)..(25): SEQ ID NO: 6523; WAN024BXQ; Start 578; Stop 602
tggcattaaatatgtcgctctataa

SEQ ID NO: 441210 - DNA, 25 bp, Artificial
  probe
  misc_feature (1)..(25): SEQ ID NO: 6523; WAN024BXQ; Start 348; Stop 372
gttacttatcggtcaattcggcaaa

SEQ ID NO: 441211 - DNA, 25 bp, Artificial
  probe
  misc_feature (1)..(25): SEQ ID NO: 6523; WAN024BXQ; Start 340; Stop 364
ctccctgtgttacttatcggtcaat

SEQ ID NO: 441212 - DNA, 25 bp, Artificial
  probe
  misc_feature (1)..(25): SEQ ID NO: 6523; WAN024BXQ; Start 346; Stop 370
gtgttacttatcggtcaattcggca

SEQ ID NO: 441213 - DNA, 25 bp, Artificial
  probe
  misc_feature (1)..(25): SEQ ID NO: 6523; WAN024BXQ; Start 345; Stop 369
tgtgttacttatcggtcaattcggc

SEQ ID NO: 441214 - DNA, 25 bp, Artificial
  probe
  misc_feature (1)..(25): SEQ ID NO: 6523; WAN024BXQ; Start 577; Stop 601
atggcattaaatatgtcgctctata

SEQ ID NO: 441215 - DNA, 25 bp, Artificial
  probe
  misc_feature (1)..(25): SEQ ID NO: 6523; WAN024BXQ; Start 576; Stop 600
tatggcattaaatatgtcgctctat

SEQ ID NO: 441216 - DNA, 25 bp, Artificial
  probe
  misc_feature (1)..(25): SEQ ID NO: 6523; WAN024BXQ; Start 15; Stop 39
aacaccacttaagcaatatcttgaa

SEQ ID NO: 441217 - DNA, 25 bp, Artificial
  probe
  misc_feature (1)..(25): SEQ ID NO: 6523; WAN024BXQ; Start 447; Stop 471
aattgtaggaactcagatggtattt

SEQ ID NO: 441218 - DNA, 25 bp, Artificial
  probe
  misc_feature (1)..(25): SEQ ID NO: 6523; WAN024BXQ; Start 518; Stop 542
tcggatttgttgcttacagtcaatt

SEQ ID NO: 441219 - DNA, 25 bp, Artificial
  probe
  misc_feature (1)..(25): SEQ ID NO: 6523; WAN024BXQ; Start 517; Stop 541
ttcggatttgttgcttacagtcaat

SEQ ID NO: 441220 - DNA, 25 bp, Artificial
  probe
  misc_feature (1)..(25): SEQ ID NO: 6523; WAN024BXQ; Start 204; Stop 228
cgttgaagaaactgaaacaaataac

SEQ ID NO: 441221 - DNA, 25 bp, Artificial
  probe
  misc_feature (1)..(25): SEQ ID NO: 6523; WAN024BXQ; Start 445; Stop 469
gcaattgtaggaactcagatggtat

SEQ ID NO: 441222 - DNA, 25 bp, Artificial
  probe
  misc_feature (1)..(25): SEQ ID NO: 6523; WAN024BXQ; Start 333; Stop 357
tgattatctccctgtgttacttatc

SEQ ID NO: 441223 - DNA, 25 bp, Artificial
  probe
  misc_feature (1)..(25): SEQ ID NO: 6524; WAN024BKW; Start 565; Stop 589
gctgtctataacgaagttgatgtga

SEQ ID NO: 441224 - DNA, 25 bp, Artificial
  probe
  misc_feature (1)..(25): SEQ ID NO: 6524; WAN024BKW; Start 566; Stop 590
ctgtctataacgaagttgatgtgat

SEQ ID NO: 441225 - DNA, 25 bp, Artificial
  probe
  misc_feature (1)..(25): SEQ ID NO: 6524; WAN024BKW; Start 574; Stop 598
aacgaagttgatgtgataattgaca

SEQ ID NO: 441226 - DNA, 25 bp, Artificial
  probe
  misc_feature (1)..(25): SEQ ID NO: 6524; WAN024BKW; Start 276; Stop 300
aacagtgtatgataatctgagcctt

SEQ ID NO: 441227 - DNA, 25 bp, Artificial
  probe
  misc_feature (1)..(25): SEQ ID NO: 6524; WAN024BKW; Start 277; Stop 301
acagtgtatgataatctgagcctta

SEQ ID NO: 441228 - DNA, 25 bp, Artificial
  probe
  misc_feature (1)..(25): SEQ ID NO: 6524; WAN024BKW; Start 573; Stop 597
taacgaagttgatgtgataattgac

SEQ ID NO: 441229 - DNA, 25 bp, Artificial
  probe
  misc_feature (1)..(25): SEQ ID NO: 6524; WAN024BKW; Start 567; Stop 591
tgtctataacgaagttgatgtgata

SEQ ID NO: 441230 - DNA, 25 bp, Artificial
  probe
  misc_feature (1)..(25): SEQ ID NO: 6524; WAN024BKW; Start 564; Stop 588
agctgtctataacgaagttgatgtg

SEQ ID NO: 441231 - DNA, 25 bp, Artificial
  probe
  misc_feature (1)..(25): SEQ ID NO: 6524; WAN024BKW; Start 278; Stop 302
cagtgtatgataatctgagccttat

SEQ ID NO: 441232 - DNA, 25 bp, Artificial
  probe
  misc_feature (1)..(25): SEQ ID NO: 6524; WAN024BKW; Start 447; Stop 471
tatcttagcagatgaacctacagga

SEQ ID NO: 441233 - DNA, 25 bp, Artificial
  probe
  misc_feature (1)..(25): SEQ ID NO: 6524; WAN024BKW; Start 446; Stop 470
ttatcttagcagatgaacctacagg

SEQ ID NO: 441234 - DNA, 25 bp, Artificial
  probe
  misc_feature (1)..(25): SEQ ID NO: 6524; WAN024BKW; Start 415; Stop 439
attgccagaatgttaatgaaaccac

SEQ ID NO: 441235 - DNA, 25 bp, Artificial
  probe
  misc_feature (1)..(25): SEQ ID NO: 6524; WAN024BKW; Start 412; Stop 436
gctattgccagaatgttaatgaaac

SEQ ID NO: 441236 - DNA, 25 bp, Artificial
  probe
  misc_feature (1)..(25): SEQ ID NO: 6524; WAN024BKW; Start 414; Stop 438
tattgccagaatgttaatgaaacca

SEQ ID NO: 441237 - DNA, 25 bp, Artificial
  probe
  misc_feature (1)..(25): SEQ ID NO: 6524; WAN024BKW; Start 291; Stop 315
tctgagccttatcactaaagacaaa

SEQ ID NO: 441238 - DNA, 25 bp, Artificial
  probe
  misc_feature (1)..(25): SEQ ID NO: 6524; WAN024BKW; Start 290; Stop 314
atctgagccttatcactaaagacaa

SEQ ID NO: 441239 - DNA, 25 bp, Artificial
  probe
  misc_feature (1)..(25): SEQ ID NO: 6524; WAN024BKW; Start 289; Stop 313
aatctgagccttatcactaaagaca

SEQ ID NO: 441240 - DNA, 25 bp, Artificial
  probe
  misc_feature (1)..(25): SEQ ID NO: 6524; WAN024BKW; Start 448; Stop 472
atcttagcagatgaacctacaggag

SEQ ID NO: 441241 - DNA, 25 bp, Artificial
  probe
  misc_feature (1)..(25): SEQ ID NO: 6524; WAN024BKW; Start 374; Stop 398
aaatatatgaattgtctggagggca

SEQ ID NO: 441242 - DNA, 25 bp, Artificial
  probe
  misc_feature (1)..(25): SEQ ID NO: 6524; WAN024BKW; Start 413; Stop 437
ctattgccagaatgttaatgaaacc

SEQ ID NO: 441243 - DNA, 25 bp, Artificial
  probe
  misc_feature (1)..(25): SEQ ID NO: 6524; WAN024BKW; Start 572; Stop 596
ataacgaagttgatgtgataattga

SEQ ID NO: 441244 - DNA, 25 bp, Artificial
  probe
  misc_feature (1)..(25): SEQ ID NO: 6524; WAN024BKW; Start 568; Stop 592
gtctataacgaagttgatgtgataa

SEQ ID NO: 441245 - DNA, 25 bp, Artificial
  probe
  misc_feature (1)..(25): SEQ ID NO: 6524; WAN024BKW; Start 275; Stop 299
aaacagtgtatgataatctgagcct

SEQ ID NO: 441246 - DNA, 25 bp, Artificial
  probe
  misc_feature (1)..(25): SEQ ID NO: 6524; WAN024BKW; Start 408; Stop 432
tgtagctattgccagaatgttaatg

SEQ ID NO: 441247 - DNA, 25 bp, Artificial
  probe
  misc_feature (1)..(25): SEQ ID NO: 6524; WAN024BKW; Start 407; Stop 431
gtgtagctattgccagaatgttaat

SEQ ID NO: 441248 - DNA, 25 bp, Artificial
  probe
  misc_feature (1)..(25): SEQ ID NO: 6524; WAN024BKW; Start 575; Stop 599
acgaagttgatgtgataattgacat

SEQ ID NO: 441249 - DNA, 25 bp, Artificial
  probe
  misc_feature (1)..(25): SEQ ID NO: 6524; WAN024BKW; Start 445; Stop 469
attatcttagcagatgaacctacag

SEQ ID NO: 441250 - DNA, 25 bp, Artificial
  probe
  misc_feature (1)..(25): SEQ ID NO: 6524; WAN024BKW; Start 409; Stop 433
gtagctattgccagaatgttaatga

SEQ ID NO: 441251 - DNA, 25 bp, Artificial
  probe
  misc_feature (1)..(25): SEQ ID NO: 6524; WAN024BKW; Start 457; Stop 481
gatgaacctacaggagctttagatg

SEQ ID NO: 441252 - DNA, 25 bp, Artificial
  probe
  misc_feature (1)..(25): SEQ ID NO: 6524; WAN024BKW; Start 456; Stop 480
agatgaacctacaggagctttagat

SEQ ID NO: 441253 - DNA, 25 bp, Artificial
  probe
  misc_feature (1)..(25): SEQ ID NO: 6524; WAN024BKW; Start 411; Stop 435
agctattgccagaatgttaatgaaa

SEQ ID NO: 441254 - DNA, 25 bp, Artificial
  probe
  misc_feature (1)..(25): SEQ ID NO: 6524; WAN024BKW; Start 375; Stop 399
aatatatgaattgtctggagggcag

SEQ ID NO: 441255 - DNA, 25 bp, Artificial
  probe
  misc_feature (1)..(25): SEQ ID NO: 6524; WAN024BKW; Start 541; Stop 565
gtcattatagcgacacatgatccag

SEQ ID NO: 441256 - DNA, 25 bp, Artificial
  probe
  misc_feature (1)..(25): SEQ ID NO: 6525; WAN024BVV; Start 783; Stop 807
agttgaaccattgcctattgaagag

SEQ ID NO: 441257 - DNA, 25 bp, Artificial
  probe
  misc_feature (1)..(25): SEQ ID NO: 6525; WAN024BVV; Start 782; Stop 806
cagttgaaccattgcctattgaaga

SEQ ID NO: 441258 - DNA, 25 bp, Artificial
  probe
  misc_feature (1)..(25): SEQ ID NO: 6525; WAN024BVV; Start 26; Stop 50
tccagagtaatcttgtctatccatt

SEQ ID NO: 441259 - DNA, 25 bp, Artificial
  probe
  misc_feature (1)..(25): SEQ ID NO: 6525; WAN024BVV; Start 25; Stop 49
ttccagagtaatcttgtctatccat

SEQ ID NO: 441260 - DNA, 25 bp, Artificial
  probe
  misc_feature (1)..(25): SEQ ID NO: 6525; WAN024BVV; Start 781; Stop 805
acagttgaaccattgcctattgaag

SEQ ID NO: 441261 - DNA, 25 bp, Artificial
  probe
  misc_feature (1)..(25): SEQ ID NO: 6525; WAN024BVV; Start 780; Stop 804
gacagttgaaccattgcctattgaa

SEQ ID NO: 441262 - DNA, 25 bp, Artificial
  probe
  misc_feature (1)..(25): SEQ ID NO: 6525; WAN024BVV; Start 50; Stop 74
ttgataagattgagccgttccagta

SEQ ID NO: 441263 - DNA, 25 bp, Artificial
  probe
  misc_feature (1)..(25): SEQ ID NO: 6525; WAN024BVV; Start 521; Stop 545
agattgtagagcatggacttgatta

SEQ ID NO: 441264 - DNA, 25 bp, Artificial
  probe
  misc_feature (1)..(25): SEQ ID NO: 6525; WAN024BVV; Start 520; Stop 544
aagattgtagagcatggacttgatt

SEQ ID NO: 441265 - DNA, 25 bp, Artificial
  probe
  misc_feature (1)..(25): SEQ ID NO: 6525; WAN024BVV; Start 523; Stop 547
attgtagagcatggacttgattatc

SEQ ID NO: 441266 - DNA, 25 bp, Artificial
  probe
  misc_feature (1)..(25): SEQ ID NO: 6525; WAN024BVV; Start 522; Stop 546
gattgtagagcatggacttgattat

SEQ ID NO: 441267 - DNA, 25 bp, Artificial
  probe
  misc_feature (1)..(25): SEQ ID NO: 6525; WAN024BVV; Start 53; Stop 77
ataagattgagccgttccagtacat

SEQ ID NO: 441268 - DNA, 25 bp, Artificial
  probe
  misc_feature (1)..(25): SEQ ID NO: 6525; WAN024BVV; Start 54; Stop 78
taagattgagccgttccagtacatt

SEQ ID NO: 441269 - DNA, 25 bp, Artificial
  probe
  misc_feature (1)..(25): SEQ ID NO: 6525; WAN024BVV; Start 784; Stop 808
gttgaaccattgcctattgaagagc

SEQ ID NO: 441270 - DNA, 25 bp, Artificial
  probe
  misc_feature (1)..(25): SEQ ID NO: 6525; WAN024BVV; Start 779; Stop 803
tgacagttgaaccattgcctattga

SEQ ID NO: 441271 - DNA, 25 bp, Artificial
  probe
  misc_feature (1)..(25): SEQ ID NO: 6525; WAN024BVV; Start 778; Stop 802
gtgacagttgaaccattgcctattg

SEQ ID NO: 441272 - DNA, 25 bp, Artificial
  probe
  misc_feature (1)..(25): SEQ ID NO: 6525; WAN024BVV; Start 237; Stop 261
tgattatgacgatatacaagggacg

SEQ ID NO: 441273 - DNA, 25 bp, Artificial
  probe
  misc_feature (1)..(25): SEQ ID NO: 6525; WAN024BVV; Start 753; Stop 777
tgaactgacaaagatagcaaatagc

SEQ ID NO: 441274 - DNA, 25 bp, Artificial
  probe
  misc_feature (1)..(25): SEQ ID NO: 6525; WAN024BVV; Start 787; Stop 811
gaaccattgcctattgaagagctag

SEQ ID NO: 441275 - DNA, 25 bp, Artificial
  probe
  misc_feature (1)..(25): SEQ ID NO: 6525; WAN024BVV; Start 754; Stop 778
gaactgacaaagatagcaaatagcg

SEQ ID NO: 441276 - DNA, 25 bp, Artificial
  probe
  misc_feature (1)..(25): SEQ ID NO: 6525; WAN024BVV; Start 524; Stop 548
ttgtagagcatggacttgattatcc

SEQ ID NO: 441277 - DNA, 25 bp, Artificial
  probe
  misc_feature (1)..(25): SEQ ID NO: 6525; WAN024BVV; Start 198; Stop 222
aaacaactccagtctaatctatcgg

SEQ ID NO: 441278 - DNA, 25 bp, Artificial
  probe
  misc_feature (1)..(25): SEQ ID NO: 6525; WAN024BVV; Start 52; Stop 76
gataagattgagccgttccagtaca

SEQ ID NO: 441279 - DNA, 25 bp, Artificial
  probe
  misc_feature (1)..(25): SEQ ID NO: 6525; WAN024BVV; Start 51; Stop 75
tgataagattgagccgttccagtac

SEQ ID NO: 441280 - DNA, 25 bp, Artificial
  probe
  misc_feature (1)..(25): SEQ ID NO: 6525; WAN024BVV; Start 194; Stop 218
aacgaaacaactccagtctaatcta

SEQ ID NO: 441281 - DNA, 25 bp, Artificial
  probe
  misc_feature (1)..(25): SEQ ID NO: 6525; WAN024BVV; Start 149; Stop 173
attgtttaagtggtaaggttatgcc

SEQ ID NO: 441282 - DNA, 25 bp, Artificial
  probe
  misc_feature (1)..(25): SEQ ID NO: 6525; WAN024BVV; Start 193; Stop 217
aaacgaaacaactccagtctaatct

SEQ ID NO: 441283 - DNA, 25 bp, Artificial
  probe
  misc_feature (1)..(25): SEQ ID NO: 6525; WAN024BVV; Start 192; Stop 216
caaacgaaacaactccagtctaatc

SEQ ID NO: 441284 - DNA, 25 bp, Artificial
  probe
  misc_feature (1)..(25): SEQ ID NO: 6525; WAN024BVV; Start 190; Stop 214
tacaaacgaaacaactccagtctaa

SEQ ID NO: 441285 - DNA, 25 bp, Artificial
  probe
  misc_feature (1)..(25): SEQ ID NO: 6525; WAN024BVV; Start 189; Stop 213
ttacaaacgaaacaactccagtcta

SEQ ID NO: 441286 - DNA, 25 bp, Artificial
  probe
  misc_feature (1)..(25): SEQ ID NO: 6525; WAN024BVV; Start 195; Stop 219
acgaaacaactccagtctaatctat

SEQ ID NO: 441287 - DNA, 25 bp, Artificial
  probe
  misc_feature (1)..(25): SEQ ID NO: 6525; WAN024BVV; Start 788; Stop 812
aaccattgcctattgaagagctaga

SEQ ID NO: 441288 - DNA, 25 bp, Artificial
  probe
  misc_feature (1)..(25): SEQ ID NO: 6525; WAN024BVV; Start 44; Stop 68
atccatttgataagattgagccgtt

SEQ ID NO: 441289 - DNA, 25 bp, Artificial
  probe
  misc_feature (1)..(25): SEQ ID NO: 6526; WAN024ETL; Start 32; Stop 56
ccatctcatgtgttacgataaccat

SEQ ID NO: 441290 - DNA, 25 bp, Artificial
  probe
  misc_feature (1)..(25): SEQ ID NO: 6526; WAN024ETL; Start 98; Stop 122
cttctccaaccatctcaggatctag

SEQ ID NO: 441291 - DNA, 25 bp, Artificial
  probe
  misc_feature (1)..(25): SEQ ID NO: 6526; WAN024ETL; Start 28; Stop 52
aatcccatctcatgtgttacgataa

SEQ ID NO: 441292 - DNA, 25 bp, Artificial
  probe
  misc_feature (1)..(25): SEQ ID NO: 6526; WAN024ETL; Start 27; Stop 51
aaatcccatctcatgtgttacgata

SEQ ID NO: 441293 - DNA, 25 bp, Artificial
  probe
  misc_feature (1)..(25): SEQ ID NO: 6526; WAN024ETL; Start 97; Stop 121
acttctccaaccatctcaggatcta

SEQ ID NO: 441294 - DNA, 25 bp, Artificial
  probe
  misc_feature (1)..(25): SEQ ID NO: 6526; WAN024ETL; Start 26; Stop 50
caaatcccatctcatgtgttacgat

SEQ ID NO: 441295 - DNA, 25 bp, Artificial
  probe
  misc_feature (1)..(25): SEQ ID NO: 6526; WAN024ETL; Start 77; Stop 101
gatcttgcataacagccagaacttc

SEQ ID NO: 441296 - DNA, 25 bp, Artificial
  probe
  misc_feature (1)..(25): SEQ ID NO: 6526; WAN024ETL; Start 95; Stop 119
gaacttctccaaccatctcaggatc

SEQ ID NO: 441297 - DNA, 25 bp, Artificial
  probe
  misc_feature (1)..(25): SEQ ID NO: 6526; WAN024ETL; Start 78; Stop 102
atcttgcataacagccagaacttct

SEQ ID NO: 441298 - DNA, 25 bp, Artificial
  probe
  misc_feature (1)..(25): SEQ ID NO: 6526; WAN024ETL; Start 99; Stop 123
ttctccaaccatctcaggatctagg

SEQ ID NO: 441299 - DNA, 25 bp, Artificial
  probe
  misc_feature (1)..(25): SEQ ID NO: 6526; WAN024ETL; Start 67; Stop 91
gacttggctagatcttgcataacag

SEQ ID NO: 441300 - DNA, 25 bp, Artificial
  probe
  misc_feature (1)..(25): SEQ ID NO: 6526; WAN024ETL; Start 65; Stop 89
ctgacttggctagatcttgcataac

SEQ ID NO: 441301 - DNA, 25 bp, Artificial
  probe
  misc_feature (1)..(25): SEQ ID NO: 6526; WAN024ETL; Start 94; Stop 118
agaacttctccaaccatctcaggat

SEQ ID NO: 441302 - DNA, 25 bp, Artificial
  probe
  misc_feature (1)..(25): SEQ ID NO: 6526; WAN024ETL; Start 84; Stop 108
cataacagccagaacttctccaacc

SEQ ID NO: 441303 - DNA, 25 bp, Artificial
  probe
  misc_feature (1)..(25): SEQ ID NO: 6526; WAN024ETL; Start 96; Stop 120
aacttctccaaccatctcaggatct

SEQ ID NO: 441304 - DNA, 25 bp, Artificial
  probe
  misc_feature (1)..(25): SEQ ID NO: 6526; WAN024ETL; Start 74; Stop 98
ctagatcttgcataacagccagaac

SEQ ID NO: 441305 - DNA, 25 bp, Artificial
  probe
  misc_feature (1)..(25): SEQ ID NO: 6526; WAN024ETL; Start 29; Stop 53
atcccatctcatgtgttacgataac

SEQ ID NO: 441306 - DNA, 25 bp, Artificial
  probe
  misc_feature (1)..(25): SEQ ID NO: 6526; WAN024ETL; Start 75; Stop 99
tagatcttgcataacagccagaact

SEQ ID NO: 441307 - DNA, 25 bp, Artificial
  probe
  misc_feature (1)..(25): SEQ ID NO: 6526; WAN024ETL; Start 66; Stop 90
tgacttggctagatcttgcataaca

SEQ ID NO: 441308 - DNA, 25 bp, Artificial
  probe
  misc_feature (1)..(25): SEQ ID NO: 6526; WAN024ETL; Start 33; Stop 57
catctcatgtgttacgataaccatg

SEQ ID NO: 441309 - DNA, 25 bp, Artificial
  probe
  misc_feature (1)..(25): SEQ ID NO: 6526; WAN024ETL; Start 86; Stop 110
taacagccagaacttctccaaccat

SEQ ID NO: 441310 - DNA, 25 bp, Artificial
  probe
  misc_feature (1)..(25): SEQ ID NO: 6526; WAN024ETL; Start 85; Stop 109
ataacagccagaacttctccaacca

SEQ ID NO: 441311 - DNA, 25 bp, Artificial
  probe
  misc_feature (1)..(25): SEQ ID NO: 6526; WAN024ETL; Start 79; Stop 103
tcttgcataacagccagaacttctc

SEQ ID NO: 441312 - DNA, 25 bp, Artificial
  probe
  misc_feature (1)..(25): SEQ ID NO: 6526; WAN024ETL; Start 64; Stop 88
cctgacttggctagatcttgcataa

SEQ ID NO: 441313 - DNA, 25 bp, Artificial
  probe
  misc_feature (1)..(25): SEQ ID NO: 6526; WAN024ETL; Start 83; Stop 107
gcataacagccagaacttctccaac

SEQ ID NO: 441314 - DNA, 25 bp, Artificial
  probe
  misc_feature (1)..(25): SEQ ID NO: 6526; WAN024ETL; Start 59; Stop 83
tcattcctgacttggctagatcttg

SEQ ID NO: 441315 - DNA, 25 bp, Artificial
  probe
  misc_feature (1)..(25): SEQ ID NO: 6526; WAN024ETL; Start 76; Stop 100
agatcttgcataacagccagaactt

SEQ ID NO: 441316 - DNA, 25 bp, Artificial
  probe
  misc_feature (1)..(25): SEQ ID NO: 6526; WAN024ETL; Start 30; Stop 54
tcccatctcatgtgttacgataacc

SEQ ID NO: 441317 - DNA, 25 bp, Artificial
  probe
  misc_feature (1)..(25): SEQ ID NO: 6526; WAN024ETL; Start 93; Stop 117
cagaacttctccaaccatctcagga

SEQ ID NO: 441318 - DNA, 25 bp, Artificial
  probe
  misc_feature (1)..(25): SEQ ID NO: 6526; WAN024ETL; Start 31; Stop 55
cccatctcatgtgttacgataacca

SEQ ID NO: 441319 - DNA, 25 bp, Artificial
  probe
  misc_feature (1)..(25): SEQ ID NO: 6526; WAN024ETL; Start 63; Stop 87
tcctgacttggctagatcttgcata

SEQ ID NO: 441320 - DNA, 25 bp, Artificial
  probe
  misc_feature (1)..(25): SEQ ID NO: 6526; WAN024ETL; Start 141; Stop 165
aaagagcaaaacatctggttccata

SEQ ID NO: 441321 - DNA, 25 bp, Artificial
  probe
  misc_feature (1)..(25): SEQ ID NO: 6526; WAN024ETL; Start 142; Stop 166
aagagcaaaacatctggttccatag

SEQ ID NO: 441322 - DNA, 25 bp, Artificial
  probe
  misc_feature (1)..(25): SEQ ID NO: 6527; WAN024BJP; Start 16; Stop 40
ctctgcgaagaatatcaagtagaac

SEQ ID NO: 441323 - DNA, 25 bp, Artificial
  probe
  misc_feature (1)..(25): SEQ ID NO: 6527; WAN024BJP; Start 17; Stop 41
tctgcgaagaatatcaagtagaact

SEQ ID NO: 441324 - DNA, 25 bp, Artificial
  probe
  misc_feature (1)..(25): SEQ ID NO: 6527; WAN024BJP; Start 15; Stop 39
actctgcgaagaatatcaagtagaa

SEQ ID NO: 441325 - DNA, 25 bp, Artificial
  probe
  misc_feature (1)..(25): SEQ ID NO: 6527; WAN024BJP; Start 14; Stop 38
aactctgcgaagaatatcaagtaga

SEQ ID NO: 441326 - DNA, 25 bp, Artificial
  probe
  misc_feature (1)..(25): SEQ ID NO: 6527; WAN024BJP; Start 108; Stop 132
tattgaccacaacttgactcctgaa

SEQ ID NO: 441327 - DNA, 25 bp, Artificial
  probe
  misc_feature (1)..(25): SEQ ID NO: 6527; WAN024BJP; Start 107; Stop 131
ctattgaccacaacttgactcctga

SEQ ID NO: 441328 - DNA, 25 bp, Artificial
  probe
  misc_feature (1)..(25): SEQ ID NO: 6527; WAN024BJP; Start 10; Stop 34
gctaaactctgcgaagaatatcaag

SEQ ID NO: 441329 - DNA, 25 bp, Artificial
  probe
  misc_feature (1)..(25): SEQ ID NO: 6527; WAN024BJP; Start 117; Stop 141
caacttgactcctgaacaacaaatc

SEQ ID NO: 441330 - DNA, 25 bp, Artificial
  probe
  misc_feature (1)..(25): SEQ ID NO: 6527; WAN024BJP; Start 219; Stop 243
cgaagctgataggaatatgatccat

SEQ ID NO: 441331 - DNA, 25 bp, Artificial
  probe
  misc_feature (1)..(25): SEQ ID NO: 6527; WAN024BJP; Start 217; Stop 241
aacgaagctgataggaatatgatcc

SEQ ID NO: 441332 - DNA, 25 bp, Artificial
  probe
  misc_feature (1)..(25): SEQ ID NO: 6527; WAN024BJP; Start 116; Stop 140
acaacttgactcctgaacaacaaat

SEQ ID NO: 441333 - DNA, 25 bp, Artificial
  probe
  misc_feature (1)..(25): SEQ ID NO: 6527; WAN024BJP; Start 13; Stop 37
aaactctgcgaagaatatcaagtag

SEQ ID NO: 441334 - DNA, 25 bp, Artificial
  probe
  misc_feature (1)..(25): SEQ ID NO: 6527; WAN024BJP; Start 11; Stop 35
ctaaactctgcgaagaatatcaagt

SEQ ID NO: 441335 - DNA, 25 bp, Artificial
  probe
  misc_feature (1)..(25): SEQ ID NO: 6527; WAN024BJP; Start 109; Stop 133
attgaccacaacttgactcctgaac

SEQ ID NO: 441336 - DNA, 25 bp, Artificial
  probe
  misc_feature (1)..(25): SEQ ID NO: 6527; WAN024BJP; Start 67; Stop 91
cacaatagcggtttctacaatccag

SEQ ID NO: 441337 - DNA, 25 bp, Artificial
  probe
  misc_feature (1)..(25): SEQ ID NO: 6527; WAN024BJP; Start 218; Stop 242
acgaagctgataggaatatgatcca

SEQ ID NO: 441338 - DNA, 25 bp, Artificial
  probe
  misc_feature (1)..(25): SEQ ID NO: 6527; WAN024BJP; Start 69; Stop 93
caatagcggtttctacaatccagac

SEQ ID NO: 441339 - DNA, 25 bp, Artificial
  probe
  misc_feature (1)..(25): SEQ ID NO: 6527; WAN024BJP; Start 121; Stop 145
ttgactcctgaacaacaaatccaag

SEQ ID NO: 441340 - DNA, 25 bp, Artificial
  probe
  misc_feature (1)..(25): SEQ ID NO: 6527; WAN024BJP; Start 120; Stop 144
cttgactcctgaacaacaaatccaa

SEQ ID NO: 441341 - DNA, 25 bp, Artificial
  probe
  misc_feature (1)..(25): SEQ ID NO: 6527; WAN024BJP; Start 118; Stop 142
aacttgactcctgaacaacaaatcc

SEQ ID NO: 441342 - DNA, 25 bp, Artificial
  probe
  misc_feature (1)..(25): SEQ ID NO: 6527; WAN024BJP; Start 220; Stop 244
gaagctgataggaatatgatccatc

SEQ ID NO: 441343 - DNA, 25 bp, Artificial
  probe
  misc_feature (1)..(25): SEQ ID NO: 6527; WAN024BJP; Start 70; Stop 94
aatagcggtttctacaatccagaca

SEQ ID NO: 441344 - DNA, 25 bp, Artificial
  probe
  misc_feature (1)..(25): SEQ ID NO: 6527; WAN024BJP; Start 68; Stop 92
acaatagcggtttctacaatccaga

SEQ ID NO: 441345 - DNA, 25 bp, Artificial
  probe
  misc_feature (1)..(25): SEQ ID NO: 6527; WAN024BJP; Start 115; Stop 139
cacaacttgactcctgaacaacaaa

SEQ ID NO: 441346 - DNA, 25 bp, Artificial
  probe
  misc_feature (1)..(25): SEQ ID NO: 6527; WAN024BJP; Start 18; Stop 42
ctgcgaagaatatcaagtagaactt

SEQ ID NO: 441347 - DNA, 25 bp, Artificial
  probe
  misc_feature (1)..(25): SEQ ID NO: 6527; WAN024BJP; Start 114; Stop 138
ccacaacttgactcctgaacaacaa

SEQ ID NO: 441348 - DNA, 25 bp, Artificial
  probe
  misc_feature (1)..(25): SEQ ID NO: 6527; WAN024BJP; Start 106; Stop 130
gctattgaccacaacttgactcctg

SEQ ID NO: 441349 - DNA, 25 bp, Artificial
  probe
  misc_feature (1)..(25): SEQ ID NO: 6527; WAN024BJP; Start 12; Stop 36
taaactctgcgaagaatatcaagta

SEQ ID NO: 441350 - DNA, 25 bp, Artificial
  probe
  misc_feature (1)..(25): SEQ ID NO: 6527; WAN024BJP; Start 103; Stop 127
ctcgctattgaccacaacttgactc

SEQ ID NO: 441351 - DNA, 25 bp, Artificial
  probe
  misc_feature (1)..(25): SEQ ID NO: 6527; WAN024BJP; Start 229; Stop 253
aggaatatgatccatcatctcgtaa

SEQ ID NO: 441352 - DNA, 25 bp, Artificial
  probe
  misc_feature (1)..(25): SEQ ID NO: 6527; WAN024BJP; Start 216; Stop 240
aaacgaagctgataggaatatgatc

SEQ ID NO: 441353 - DNA, 25 bp, Artificial
  probe
  misc_feature (1)..(25): SEQ ID NO: 6527; WAN024BJP; Start 221; Stop 245
aagctgataggaatatgatccatca

SEQ ID NO: 441354 - DNA, 25 bp, Artificial
  probe
  misc_feature (1)..(25): SEQ ID NO: 6527; WAN024BJP; Start 227; Stop 251
ataggaatatgatccatcatctcgt

SEQ ID NO: 441355 - DNA, 25 bp, Artificial
  probe
  misc_feature (1)..(25): SEQ ID NO: 6528; WAN024GLL; Start 55; Stop 79
aggtttcatagactctcgtttcaat

SEQ ID NO: 441356 - DNA, 25 bp, Artificial
  probe
  misc_feature (1)..(25): SEQ ID NO: 6528; WAN024GLL; Start 54; Stop 78
aaggtttcatagactctcgtttcaa

SEQ ID NO: 441357 - DNA, 25 bp, Artificial
  probe
  misc_feature (1)..(25): SEQ ID NO: 6528; WAN024GLL; Start 51; Stop 75
ttcaaggtttcatagactctcgttt

SEQ ID NO: 441358 - DNA, 25 bp, Artificial
  probe
  misc_feature (1)..(25): SEQ ID NO: 6528; WAN024GLL; Start 50; Stop 74
tttcaaggtttcatagactctcgtt

SEQ ID NO: 441359 - DNA, 25 bp, Artificial
  probe
  misc_feature (1)..(25): SEQ ID NO: 6528; WAN024GLL; Start 52; Stop 76
tcaaggtttcatagactctcgtttc

SEQ ID NO: 441360 - DNA, 25 bp, Artificial
  probe
  misc_feature (1)..(25): SEQ ID NO: 6528; WAN024GLL; Start 61; Stop 85
catagactctcgtttcaatttcctg

SEQ ID NO: 441361 - DNA, 25 bp, Artificial
  probe
  misc_feature (1)..(25): SEQ ID NO: 6528; WAN024GLL; Start 60; Stop 84
tcatagactctcgtttcaatttcct

SEQ ID NO: 441362 - DNA, 25 bp, Artificial
  probe
  misc_feature (1)..(25): SEQ ID NO: 6528; WAN024GLL; Start 53; Stop 77
caaggtttcatagactctcgtttca

SEQ ID NO: 441363 - DNA, 25 bp, Artificial
  probe
  misc_feature (1)..(25): SEQ ID NO: 6528; WAN024GLL; Start 56; Stop 80
ggtttcatagactctcgtttcaatt

SEQ ID NO: 441364 - DNA, 25 bp, Artificial
  probe
  misc_feature (1)..(25): SEQ ID NO: 6528; WAN024GLL; Start 59; Stop 83
ttcatagactctcgtttcaatttcc

SEQ ID NO: 441365 - DNA, 25 bp, Artificial
  probe
  misc_feature (1)..(25): SEQ ID NO: 6528; WAN024GLL; Start 213; Stop 237
tttatatcctgtccttcccaaagat

SEQ ID NO: 441366 - DNA, 25 bp, Artificial
  probe
  misc_feature (1)..(25): SEQ ID NO: 6528; WAN024GLL; Start 62; Stop 86
atagactctcgtttcaatttcctgc

SEQ ID NO: 441367 - DNA, 25 bp, Artificial
  probe
  misc_feature (1)..(25): SEQ ID NO: 6528; WAN024GLL; Start 23; Stop 47
attacggaattcatagagaccacag

SEQ ID NO: 441368 - DNA, 25 bp, Artificial
  probe
  misc_feature (1)..(25): SEQ ID NO: 6528; WAN024GLL; Start 63; Stop 87
tagactctcgtttcaatttcctgct

SEQ ID NO: 441369 - DNA, 25 bp, Artificial
  probe
  misc_feature (1)..(25): SEQ ID NO: 6528; WAN024GLL; Start 25; Stop 49
tacggaattcatagagaccacagat

SEQ ID NO: 441370 - DNA, 25 bp, Artificial
  probe
  misc_feature (1)..(25): SEQ ID NO: 6528; WAN024GLL; Start 215; Stop 239
tatatcctgtccttcccaaagatag

SEQ ID NO: 441371 - DNA, 25 bp, Artificial
  probe
  misc_feature (1)..(25): SEQ ID NO: 6528; WAN024GLL; Start 24; Stop 48
ttacggaattcatagagaccacaga

SEQ ID NO: 441372 - DNA, 25 bp, Artificial
  probe
  misc_feature (1)..(25): SEQ ID NO: 6528; WAN024GLL; Start 57; Stop 81
gtttcatagactctcgtttcaattt

SEQ ID NO: 441373 - DNA, 25 bp, Artificial
  probe
  misc_feature (1)..(25): SEQ ID NO: 6528; WAN024GLL; Start 58; Stop 82
tttcatagactctcgtttcaatttc

SEQ ID NO: 441374 - DNA, 25 bp, Artificial
  probe
  misc_feature (1)..(25): SEQ ID NO: 6528; WAN024GLL; Start 216; Stop 240
atatcctgtccttcccaaagatagc

SEQ ID NO: 441375 - DNA, 25 bp, Artificial
  probe
  misc_feature (1)..(25): SEQ ID NO: 6528; WAN024GLL; Start 214; Stop 238
ttatatcctgtccttcccaaagata

SEQ ID NO: 441376 - DNA, 25 bp, Artificial
  probe
  misc_feature (1)..(25): SEQ ID NO: 6528; WAN024GLL; Start 26; Stop 50
acggaattcatagagaccacagatt

SEQ ID NO: 441377 - DNA, 25 bp, Artificial
  probe
  misc_feature (1)..(25): SEQ ID NO: 6528; WAN024GLL; Start 22; Stop 46
aattacggaattcatagagaccaca

SEQ ID NO: 441378 - DNA, 25 bp, Artificial
  probe
  misc_feature (1)..(25): SEQ ID NO: 6528; WAN024GLL; Start 21; Stop 45
caattacggaattcatagagaccac

SEQ ID NO: 441379 - DNA, 25 bp, Artificial
  probe
  misc_feature (1)..(25): SEQ ID NO: 6528; WAN024GLL; Start 20; Stop 44
ccaattacggaattcatagagacca

SEQ ID NO: 441380 - DNA, 25 bp, Artificial
  probe
  misc_feature (1)..(25): SEQ ID NO: 6528; WAN024GLL; Start 19; Stop 43
gccaattacggaattcatagagacc

SEQ ID NO: 441381 - DNA, 25 bp, Artificial
  probe
  misc_feature (1)..(25): SEQ ID NO: 6528; WAN024GLL; Start 64; Stop 88
agactctcgtttcaatttcctgctc

SEQ ID NO: 441382 - DNA, 25 bp, Artificial
  probe
  misc_feature (1)..(25): SEQ ID NO: 6528; WAN024GLL; Start 18; Stop 42
ggccaattacggaattcatagagac

SEQ ID NO: 441383 - DNA, 25 bp, Artificial
  probe
  misc_feature (1)..(25): SEQ ID NO: 6528; WAN024GLL; Start 33; Stop 57
tcatagagaccacagattttcaagg

SEQ ID NO: 441384 - DNA, 25 bp, Artificial
  probe
  misc_feature (1)..(25): SEQ ID NO: 6528; WAN024GLL; Start 210; Stop 234
ccttttatatcctgtccttcccaaa

SEQ ID NO: 441385 - DNA, 25 bp, Artificial
  probe
  misc_feature (1)..(25): SEQ ID NO: 6528; WAN024GLL; Start 49; Stop 73
ttttcaaggtttcatagactctcgt

SEQ ID NO: 441386 - DNA, 25 bp, Artificial
  probe
  misc_feature (1)..(25): SEQ ID NO: 6528; WAN024GLL; Start 206; Stop 230
atctccttttatatcctgtccttcc

SEQ ID NO: 441387 - DNA, 25 bp, Artificial
  probe
  misc_feature (1)..(25): SEQ ID NO: 6528; WAN024GLL; Start 139; Stop 163
tggttgaaatcatttgattgggatt

SEQ ID NO: 441388 - DNA, 25 bp, Artificial
  probe
  misc_feature (1)..(25): SEQ ID NO: 6529; WAN024BZU; Start 347; Stop 371
acatacttgaattgcgattagagga

SEQ ID NO: 441389 - DNA, 25 bp, Artificial
  probe
  misc_feature (1)..(25): SEQ ID NO: 6529; WAN024BZU; Start 346; Stop 370
aacatacttgaattgcgattagagg

SEQ ID NO: 441390 - DNA, 25 bp, Artificial
  probe
  misc_feature (1)..(25): SEQ ID NO: 6529; WAN024BZU; Start 348; Stop 372
catacttgaattgcgattagaggaa

SEQ ID NO: 441391 - DNA, 25 bp, Artificial
  probe
  misc_feature (1)..(25): SEQ ID NO: 6529; WAN024BZU; Start 349; Stop 373
atacttgaattgcgattagaggaat

SEQ ID NO: 441392 - DNA, 25 bp, Artificial
  probe
  misc_feature (1)..(25): SEQ ID NO: 6529; WAN024BZU; Start 354; Stop 378
tgaattgcgattagaggaattagtc

SEQ ID NO: 441393 - DNA, 25 bp, Artificial
  probe
  misc_feature (1)..(25): SEQ ID NO: 6529; WAN024BZU; Start 353; Stop 377
ttgaattgcgattagaggaattagt

SEQ ID NO: 441394 - DNA, 25 bp, Artificial
  probe
  misc_feature (1)..(25): SEQ ID NO: 6529; WAN024BZU; Start 351; Stop 375
acttgaattgcgattagaggaatta

SEQ ID NO: 441395 - DNA, 25 bp, Artificial
  probe
  misc_feature (1)..(25): SEQ ID NO: 6529; WAN024BZU; Start 350; Stop 374
tacttgaattgcgattagaggaatt

SEQ ID NO: 441396 - DNA, 25 bp, Artificial
  probe
  misc_feature (1)..(25): SEQ ID NO: 6529; WAN024BZU; Start 355; Stop 379
gaattgcgattagaggaattagtcc

SEQ ID NO: 441397 - DNA, 25 bp, Artificial
  probe
  misc_feature (1)..(25): SEQ ID NO: 6529; WAN024BZU; Start 352; Stop 376
cttgaattgcgattagaggaattag

SEQ ID NO: 441398 - DNA, 25 bp, Artificial
  probe
  misc_feature (1)..(25): SEQ ID NO: 6529; WAN024BZU; Start 217; Stop 241
ggagatattcttgcgattgctgttg

SEQ ID NO: 441399 - DNA, 25 bp, Artificial
  probe
  misc_feature (1)..(25): SEQ ID NO: 6529; WAN024BZU; Start 306; Stop 330
tgagcctgataccttagtctttcta

SEQ ID NO: 441400 - DNA, 25 bp, Artificial
  probe
  misc_feature (1)..(25): SEQ ID NO: 6529; WAN024BZU; Start 373; Stop 397
ttagtcccatattcgttctcaagtc

SEQ ID NO: 441401 - DNA, 25 bp, Artificial
  probe
  misc_feature (1)..(25): SEQ ID NO: 6529; WAN024BZU; Start 216; Stop 240
aggagatattcttgcgattgctgtt

SEQ ID NO: 441402 - DNA, 25 bp, Artificial
  probe
  misc_feature (1)..(25): SEQ ID NO: 6529; WAN024BZU; Start 215; Stop 239
aaggagatattcttgcgattgctgt

SEQ ID NO: 441403 - DNA, 25 bp, Artificial
  probe
  misc_feature (1)..(25): SEQ ID NO: 6529; WAN024BZU; Start 372; Stop 396
attagtcccatattcgttctcaagt

SEQ ID NO: 441404 - DNA, 25 bp, Artificial
  probe
  misc_feature (1)..(25): SEQ ID NO: 6529; WAN024BZU; Start 375; Stop 399
agtcccatattcgttctcaagtcta

SEQ ID NO: 441405 - DNA, 25 bp, Artificial
  probe
  misc_feature (1)..(25): SEQ ID NO: 6529; WAN024BZU; Start 374; Stop 398
tagtcccatattcgttctcaagtct

SEQ ID NO: 441406 - DNA, 25 bp, Artificial
  probe
  misc_feature (1)..(25): SEQ ID NO: 6529; WAN024BZU; Start 342; Stop 366
gggaaacatacttgaattgcgatta

SEQ ID NO: 441407 - DNA, 25 bp, Artificial
  probe
  misc_feature (1)..(25): SEQ ID NO: 6529; WAN024BZU; Start 307; Stop 331
gagcctgataccttagtctttctat

SEQ ID NO: 441408 - DNA, 25 bp, Artificial
  probe
  misc_feature (1)..(25): SEQ ID NO: 6529; WAN024BZU; Start 55; Stop 79
aatgcttactgtccgtattccaaat

SEQ ID NO: 441409 - DNA, 25 bp, Artificial
  probe
  misc_feature (1)..(25): SEQ ID NO: 6529; WAN024BZU; Start 247; Stop 271
gaaactgaagactacttaccaccat

SEQ ID NO: 441410 - DNA, 25 bp, Artificial
  probe
  misc_feature (1)..(25): SEQ ID NO: 6529; WAN024BZU; Start 54; Stop 78
aaatgcttactgtccgtattccaaa

SEQ ID NO: 441411 - DNA, 25 bp, Artificial
  probe
  misc_feature (1)..(25): SEQ ID NO: 6529; WAN024BZU; Start 145; Stop 169
gtatcgtttggtgtaactaactgtg

SEQ ID NO: 441412 - DNA, 25 bp, Artificial
  probe
  misc_feature (1)..(25): SEQ ID NO: 6529; WAN024BZU; Start 144; Stop 168
tgtatcgtttggtgtaactaactgt

SEQ ID NO: 441413 - DNA, 25 bp, Artificial
  probe
  misc_feature (1)..(25): SEQ ID NO: 6529; WAN024BZU; Start 56; Stop 80
atgcttactgtccgtattccaaatt

SEQ ID NO: 441414 - DNA, 25 bp, Artificial
  probe
  misc_feature (1)..(25): SEQ ID NO: 6529; WAN024BZU; Start 337; Stop 361
ggtaagggaaacatacttgaattgc

SEQ ID NO: 441415 - DNA, 25 bp, Artificial
  probe
  misc_feature (1)..(25): SEQ ID NO: 6529; WAN024BZU; Start 308; Stop 332
agcctgataccttagtctttctatt

SEQ ID NO: 441416 - DNA, 25 bp, Artificial
  probe
  misc_feature (1)..(25): SEQ ID NO: 6529; WAN024BZU; Start 376; Stop 400
gtcccatattcgttctcaagtctag

SEQ ID NO: 441417 - DNA, 25 bp, Artificial
  probe
  misc_feature (1)..(25): SEQ ID NO: 6529; WAN024BZU; Start 343; Stop 367
ggaaacatacttgaattgcgattag

SEQ ID NO: 441418 - DNA, 25 bp, Artificial
  probe
  misc_feature (1)..(25): SEQ ID NO: 6529; WAN024BZU; Start 339; Stop 363
taagggaaacatacttgaattgcga

SEQ ID NO: 441419 - DNA, 25 bp, Artificial
  probe
  misc_feature (1)..(25): SEQ ID NO: 6529; WAN024BZU; Start 338; Stop 362
gtaagggaaacatacttgaattgcg

SEQ ID NO: 441420 - DNA, 25 bp, Artificial
  probe
  misc_feature (1)..(25): SEQ ID NO: 6529; WAN024BZU; Start 303; Stop 327
ttgtgagcctgataccttagtcttt

SEQ ID NO: 441421 - DNA, 25 bp, Artificial
  probe
  misc_feature (1)..(25): SEQ ID NO: 6530; WAN024BWA; Start 342; Stop 366
cggtgttgcttatgacgacattatt

SEQ ID NO: 441422 - DNA, 25 bp, Artificial
  probe
  misc_feature (1)..(25): SEQ ID NO: 6530; WAN024BWA; Start 11; Stop 35
gcaaccgcctttctataattcataa

SEQ ID NO: 441423 - DNA, 25 bp, Artificial
  probe
  misc_feature (1)..(25): SEQ ID NO: 6530; WAN024BWA; Start 181; Stop 205
ggctatttgcgtcttacattgaaag

SEQ ID NO: 441424 - DNA, 25 bp, Artificial
  probe
  misc_feature (1)..(25): SEQ ID NO: 6530; WAN024BWA; Start 183; Stop 207
ctatttgcgtcttacattgaaagcg

SEQ ID NO: 441425 - DNA, 25 bp, Artificial
  probe
  misc_feature (1)..(25): SEQ ID NO: 6530; WAN024BWA; Start 255; Stop 279
aggaatttctacaactacttggagt

SEQ ID NO: 441426 - DNA, 25 bp, Artificial
  probe
  misc_feature (1)..(25): SEQ ID NO: 6530; WAN024BWA; Start 226; Stop 250
atgaaacaatcagaggtagcacaaa

SEQ ID NO: 441427 - DNA, 25 bp, Artificial
  probe
  misc_feature (1)..(25): SEQ ID NO: 6530; WAN024BWA; Start 343; Stop 367
ggtgttgcttatgacgacattattt

SEQ ID NO: 441428 - DNA, 25 bp, Artificial
  probe
  misc_feature (1)..(25): SEQ ID NO: 6530; WAN024BWA; Start 184; Stop 208
tatttgcgtcttacattgaaagcgt

SEQ ID NO: 441429 - DNA, 25 bp, Artificial
  probe
  misc_feature (1)..(25): SEQ ID NO: 6530; WAN024BWA; Start 180; Stop 204
gggctatttgcgtcttacattgaaa

SEQ ID NO: 441430 - DNA, 25 bp, Artificial
  probe
  misc_feature (1)..(25): SEQ ID NO: 6530; WAN024BWA; Start 124; Stop 148
ttaccgtatactgtcattgtatccg

SEQ ID NO: 441431 - DNA, 25 bp, Artificial
  probe
  misc_feature (1)..(25): SEQ ID NO: 6530; WAN024BWA; Start 261; Stop 285
ttctacaactacttggagtaagtgg

SEQ ID NO: 441432 - DNA, 25 bp, Artificial
  probe
  misc_feature (1)..(25): SEQ ID NO: 6530; WAN024BWA; Start 127; Stop 151
ccgtatactgtcattgtatccgatt

SEQ ID NO: 441433 - DNA, 25 bp, Artificial
  probe
  misc_feature (1)..(25): SEQ ID NO: 6530; WAN024BWA; Start 219; Stop 243
tagcaacatgaaacaatcagaggta

SEQ ID NO: 441434 - DNA, 25 bp, Artificial
  probe
  misc_feature (1)..(25): SEQ ID NO: 6530; WAN024BWA; Start 217; Stop 241
aatagcaacatgaaacaatcagagg

SEQ ID NO: 441435 - DNA, 25 bp, Artificial
  probe
  misc_feature (1)..(25): SEQ ID NO: 6530; WAN024BWA; Start 125; Stop 149
taccgtatactgtcattgtatccga

SEQ ID NO: 441436 - DNA, 25 bp, Artificial
  probe
  misc_feature (1)..(25): SEQ ID NO: 6530; WAN024BWA; Start 218; Stop 242
atagcaacatgaaacaatcagaggt

SEQ ID NO: 441437 - DNA, 25 bp, Artificial
  probe
  misc_feature (1)..(25): SEQ ID NO: 6530; WAN024BWA; Start 133; Stop 157
actgtcattgtatccgatttaaacg

SEQ ID NO: 441438 - DNA, 25 bp, Artificial
  probe
  misc_feature (1)..(25): SEQ ID NO: 6530; WAN024BWA; Start 126; Stop 150
accgtatactgtcattgtatccgat

SEQ ID NO: 441439 - DNA, 25 bp, Artificial
  probe
  misc_feature (1)..(25): SEQ ID NO: 6530; WAN024BWA; Start 254; Stop 278
taggaatttctacaactacttggag

SEQ ID NO: 441440 - DNA, 25 bp, Artificial
  probe
  misc_feature (1)..(25): SEQ ID NO: 6530; WAN024BWA; Start 220; Stop 244
agcaacatgaaacaatcagaggtag

SEQ ID NO: 441441 - DNA, 25 bp, Artificial
  probe
  misc_feature (1)..(25): SEQ ID NO: 6530; WAN024BWA; Start 12; Stop 36
caaccgcctttctataattcataat

SEQ ID NO: 441442 - DNA, 25 bp, Artificial
  probe
  misc_feature (1)..(25): SEQ ID NO: 6530; WAN024BWA; Start 185; Stop 209
atttgcgtcttacattgaaagcgtt

SEQ ID NO: 441443 - DNA, 25 bp, Artificial
  probe
  misc_feature (1)..(25): SEQ ID NO: 6530; WAN024BWA; Start 225; Stop 249
catgaaacaatcagaggtagcacaa

SEQ ID NO: 441444 - DNA, 25 bp, Artificial
  probe
  misc_feature (1)..(25): SEQ ID NO: 6530; WAN024BWA; Start 223; Stop 247
aacatgaaacaatcagaggtagcac

SEQ ID NO: 441445 - DNA, 25 bp, Artificial
  probe
  misc_feature (1)..(25): SEQ ID NO: 6530; WAN024BWA; Start 222; Stop 246
caacatgaaacaatcagaggtagca

SEQ ID NO: 441446 - DNA, 25 bp, Artificial
  probe
  misc_feature (1)..(25): SEQ ID NO: 6530; WAN024BWA; Start 179; Stop 203
agggctatttgcgtcttacattgaa

SEQ ID NO: 441447 - DNA, 25 bp, Artificial
  probe
  misc_feature (1)..(25): SEQ ID NO: 6530; WAN024BWA; Start 10; Stop 34
tgcaaccgcctttctataattcata

SEQ ID NO: 441448 - DNA, 25 bp, Artificial
  probe
  misc_feature (1)..(25): SEQ ID NO: 6530; WAN024BWA; Start 341; Stop 365
tcggtgttgcttatgacgacattat

SEQ ID NO: 441449 - DNA, 25 bp, Artificial
  probe
  misc_feature (1)..(25): SEQ ID NO: 6530; WAN024BWA; Start 253; Stop 277
ttaggaatttctacaactacttgga

SEQ ID NO: 441450 - DNA, 25 bp, Artificial
  probe
  misc_feature (1)..(25): SEQ ID NO: 6530; WAN024BWA; Start 178; Stop 202
gagggctatttgcgtcttacattga

SEQ ID NO: 441451 - DNA, 25 bp, Artificial
  probe
  misc_feature (1)..(25): SEQ ID NO: 6530; WAN024BWA; Start 340; Stop 364
ttcggtgttgcttatgacgacatta

SEQ ID NO: 441452 - DNA, 25 bp, Artificial
  probe
  misc_feature (1)..(25): SEQ ID NO: 6530; WAN024BWA; Start 166; Stop 190
aaagaaaggagtgagggctatttgc

SEQ ID NO: 441453 - DNA, 25 bp, Artificial
  probe
  misc_feature (1)..(25): SEQ ID NO: 6530; WAN024BWA; Start 216; Stop 240
taatagcaacatgaaacaatcagag

SEQ ID NO: 441454 - DNA, 25 bp, Artificial
  probe
  misc_feature (1)..(25): SEQ ID NO: 6531; WAN024BVX; Start 338; Stop 362
aactattagactatgctgaacgctt

SEQ ID NO: 441455 - DNA, 25 bp, Artificial
  probe
  misc_feature (1)..(25): SEQ ID NO: 6531; WAN024BVX; Start 335; Stop 359
tggaactattagactatgctgaacg

SEQ ID NO: 441456 - DNA, 25 bp, Artificial
  probe
  misc_feature (1)..(25): SEQ ID NO: 6531; WAN024BVX; Start 333; Stop 357
gctggaactattagactatgctgaa

SEQ ID NO: 441457 - DNA, 25 bp, Artificial
  probe
  misc_feature (1)..(25): SEQ ID NO: 6531; WAN024BVX; Start 337; Stop 361
gaactattagactatgctgaacgct

SEQ ID NO: 441458 - DNA, 25 bp, Artificial
  probe
  misc_feature (1)..(25): SEQ ID NO: 6531; WAN024BVX; Start 339; Stop 363
actattagactatgctgaacgcttg

SEQ ID NO: 441459 - DNA, 25 bp, Artificial
  probe
  misc_feature (1)..(25): SEQ ID NO: 6531; WAN024BVX; Start 334; Stop 358
ctggaactattagactatgctgaac

SEQ ID NO: 441460 - DNA, 25 bp, Artificial
  probe
  misc_feature (1)..(25): SEQ ID NO: 6531; WAN024BVX; Start 336; Stop 360
ggaactattagactatgctgaacgc

SEQ ID NO: 441461 - DNA, 25 bp, Artificial
  probe
  misc_feature (1)..(25): SEQ ID NO: 6531; WAN024BVX; Start 213; Stop 237
ctattacaagcaaccagtgaacgat

SEQ ID NO: 441462 - DNA, 25 bp, Artificial
  probe
  misc_feature (1)..(25): SEQ ID NO: 6531; WAN024BVX; Start 209; Stop 233
aagactattacaagcaaccagtgaa

SEQ ID NO: 441463 - DNA, 25 bp, Artificial
  probe
  misc_feature (1)..(25): SEQ ID NO: 6531; WAN024BVX; Start 214; Stop 238
tattacaagcaaccagtgaacgatg

SEQ ID NO: 441464 - DNA, 25 bp, Artificial
  probe
  misc_feature (1)..(25): SEQ ID NO: 6531; WAN024BVX; Start 210; Stop 234
agactattacaagcaaccagtgaac

SEQ ID NO: 441465 - DNA, 25 bp, Artificial
  probe
  misc_feature (1)..(25): SEQ ID NO: 6531; WAN024BVX; Start 340; Stop 364
ctattagactatgctgaacgcttgc

SEQ ID NO: 441466 - DNA, 25 bp, Artificial
  probe
  misc_feature (1)..(25): SEQ ID NO: 6531; WAN024BVX; Start 341; Stop 365
tattagactatgctgaacgcttgct

SEQ ID NO: 441467 - DNA, 25 bp, Artificial
  probe
  misc_feature (1)..(25): SEQ ID NO: 6531; WAN024BVX; Start 306; Stop 330
cttgctgaataaggtcacagactac

SEQ ID NO: 441468 - DNA, 25 bp, Artificial
  probe
  misc_feature (1)..(25): SEQ ID NO: 6531; WAN024BVX; Start 326; Stop 350
actacgagctggaactattagacta

SEQ ID NO: 441469 - DNA, 25 bp, Artificial
  probe
  misc_feature (1)..(25): SEQ ID NO: 6531; WAN024BVX; Start 328; Stop 352
tacgagctggaactattagactatg

SEQ ID NO: 441470 - DNA, 25 bp, Artificial
  probe
  misc_feature (1)..(25): SEQ ID NO: 6531; WAN024BVX; Start 327; Stop 351
ctacgagctggaactattagactat

SEQ ID NO: 441471 - DNA, 25 bp, Artificial
  probe
  misc_feature (1)..(25): SEQ ID NO: 6531; WAN024BVX; Start 211; Stop 235
gactattacaagcaaccagtgaacg

SEQ ID NO: 441472 - DNA, 25 bp, Artificial
  probe
  misc_feature (1)..(25): SEQ ID NO: 6531; WAN024BVX; Start 325; Stop 349
gactacgagctggaactattagact

SEQ ID NO: 441473 - DNA, 25 bp, Artificial
  probe
  misc_feature (1)..(25): SEQ ID NO: 6531; WAN024BVX; Start 324; Stop 348
agactacgagctggaactattagac

SEQ ID NO: 441474 - DNA, 25 bp, Artificial
  probe
  misc_feature (1)..(25): SEQ ID NO: 6531; WAN024BVX; Start 342; Stop 366
attagactatgctgaacgcttgctt

SEQ ID NO: 441475 - DNA, 25 bp, Artificial
  probe
  misc_feature (1)..(25): SEQ ID NO: 6531; WAN024BVX; Start 414; Stop 438
ggaaatgctgggtaatgaaagtatt

SEQ ID NO: 441476 - DNA, 25 bp, Artificial
  probe
  misc_feature (1)..(25): SEQ ID NO: 6531; WAN024BVX; Start 413; Stop 437
tggaaatgctgggtaatgaaagtat

SEQ ID NO: 441477 - DNA, 25 bp, Artificial
  probe
  misc_feature (1)..(25): SEQ ID NO: 6531; WAN024BVX; Start 212; Stop 236
actattacaagcaaccagtgaacga

SEQ ID NO: 441478 - DNA, 25 bp, Artificial
  probe
  misc_feature (1)..(25): SEQ ID NO: 6531; WAN024BVX; Start 205; Stop 229
ttcaaagactattacaagcaaccag

SEQ ID NO: 441479 - DNA, 25 bp, Artificial
  probe
  misc_feature (1)..(25): SEQ ID NO: 6531; WAN024BVX; Start 412; Stop 436
ttggaaatgctgggtaatgaaagta

SEQ ID NO: 441480 - DNA, 25 bp, Artificial
  probe
  misc_feature (1)..(25): SEQ ID NO: 6531; WAN024BVX; Start 215; Stop 239
attacaagcaaccagtgaacgatga

SEQ ID NO: 441481 - DNA, 25 bp, Artificial
  probe
  misc_feature (1)..(25): SEQ ID NO: 6531; WAN024BVX; Start 204; Stop 228
tttcaaagactattacaagcaacca

SEQ ID NO: 441482 - DNA, 25 bp, Artificial
  probe
  misc_feature (1)..(25): SEQ ID NO: 6531; WAN024BVX; Start 356; Stop 380
aacgcttgctttctgataagtctat

SEQ ID NO: 441483 - DNA, 25 bp, Artificial
  probe
  misc_feature (1)..(25): SEQ ID NO: 6531; WAN024BVX; Start 124; Stop 148
tacaagaataaagggacgctagtag

SEQ ID NO: 441484 - DNA, 25 bp, Artificial
  probe
  misc_feature (1)..(25): SEQ ID NO: 6531; WAN024BVX; Start 123; Stop 147
ctacaagaataaagggacgctagta

SEQ ID NO: 441485 - DNA, 25 bp, Artificial
  probe
  misc_feature (1)..(25): SEQ ID NO: 6531; WAN024BVX; Start 216; Stop 240
ttacaagcaaccagtgaacgatgaa

SEQ ID NO: 441486 - DNA, 25 bp, Artificial
  probe
  misc_feature (1)..(25): SEQ ID NO: 6531; WAN024BVX; Start 329; Stop 353
acgagctggaactattagactatgc

SEQ ID NO: 441487 - DNA, 25 bp, Artificial
  probe
  misc_feature (1)..(25): SEQ ID NO: 6532; WAN024FO9; Start 867; Stop 891
agatacttcaggagtcagagttctt

SEQ ID NO: 441488 - DNA, 25 bp, Artificial
  probe
  misc_feature (1)..(25): SEQ ID NO: 6532; WAN024FO9; Start 318; Stop 342
tagtcctgctagtcctgaattatac

SEQ ID NO: 441489 - DNA, 25 bp, Artificial
  probe
  misc_feature (1)..(25): SEQ ID NO: 6532; WAN024FO9; Start 714; Stop 738
aagtacaggtagtcagttaagatcc

SEQ ID NO: 441490 - DNA, 25 bp, Artificial
  probe
  misc_feature (1)..(25): SEQ ID NO: 6532; WAN024FO9; Start 866; Stop 890
cagatacttcaggagtcagagttct

SEQ ID NO: 441491 - DNA, 25 bp, Artificial
  probe
  misc_feature (1)..(25): SEQ ID NO: 6532; WAN024FO9; Start 319; Stop 343
agtcctgctagtcctgaattatacg

SEQ ID NO: 441492 - DNA, 25 bp, Artificial
  probe
  misc_feature (1)..(25): SEQ ID NO: 6532; WAN024FO9; Start 641; Stop 665
ccaaggactctgataatcgtgtatc

SEQ ID NO: 441493 - DNA, 25 bp, Artificial
  probe
  misc_feature (1)..(25): SEQ ID NO: 6532; WAN024FO9; Start 894; Stop 918
tgatatacctataactcaagagcga

SEQ ID NO: 441494 - DNA, 25 bp, Artificial
  probe
  misc_feature (1)..(25): SEQ ID NO: 6532; WAN024FO9; Start 640; Stop 664
gccaaggactctgataatcgtgtat

SEQ ID NO: 441495 - DNA, 25 bp, Artificial
  probe
  misc_feature (1)..(25): SEQ ID NO: 6532; WAN024FO9; Start 895; Stop 919
gatatacctataactcaagagcgaa

SEQ ID NO: 441496 - DNA, 25 bp, Artificial
  probe
  misc_feature (1)..(25): SEQ ID NO: 6532; WAN024FO9; Start 715; Stop 739
agtacaggtagtcagttaagatcct

SEQ ID NO: 441497 - DNA, 25 bp, Artificial
  probe
  misc_feature (1)..(25): SEQ ID NO: 6532; WAN024FO9; Start 386; Stop 410
tgtataatctactggaatacgccaa

SEQ ID NO: 441498 - DNA, 25 bp, Artificial
  probe
  misc_feature (1)..(25): SEQ ID NO: 6532; WAN024FO9; Start 721; Stop 745
ggtagtcagttaagatcctattgtt

SEQ ID NO: 441499 - DNA, 25 bp, Artificial
  probe
  misc_feature (1)..(25): SEQ ID NO: 6532; WAN024FO9; Start 385; Stop 409
atgtataatctactggaatacgcca

SEQ ID NO: 441500 - DNA, 25 bp, Artificial
  probe
  misc_feature (1)..(25): SEQ ID NO: 6532; WAN024FO9; Start 383; Stop 407
gcatgtataatctactggaatacgc

SEQ ID NO: 441501 - DNA, 25 bp, Artificial
  probe
  misc_feature (1)..(25): SEQ ID NO: 6532; WAN024FO9; Start 322; Stop 346
cctgctagtcctgaattatacgtta

SEQ ID NO: 441502 - DNA, 25 bp, Artificial
  probe
  misc_feature (1)..(25): SEQ ID NO: 6532; WAN024FO9; Start 1005; Stop 1029
aggcttccatcacacatttagtatt

SEQ ID NO: 441503 - DNA, 25 bp, Artificial
  probe
  misc_feature (1)..(25): SEQ ID NO: 6532; WAN024FO9; Start 185; Stop 209
tttgttgtggaagagagtttgaatc

SEQ ID NO: 441504 - DNA, 25 bp, Artificial
  probe
  misc_feature (1)..(25): SEQ ID NO: 6532; WAN024FO9; Start 1003; Stop 1027
gtaggcttccatcacacatttagta

SEQ ID NO: 441505 - DNA, 25 bp, Artificial
  probe
  misc_feature (1)..(25): SEQ ID NO: 6532; WAN024FO9; Start 1006; Stop 1030
ggcttccatcacacatttagtattt

SEQ ID NO: 441506 - DNA, 25 bp, Artificial
  probe
  misc_feature (1)..(25): SEQ ID NO: 6532; WAN024FO9; Start 865; Stop 889
gcagatacttcaggagtcagagttc

SEQ ID NO: 441507 - DNA, 25 bp, Artificial
  probe
  misc_feature (1)..(25): SEQ ID NO: 6532; WAN024FO9; Start 1004; Stop 1028
taggcttccatcacacatttagtat

SEQ ID NO: 441508 - DNA, 25 bp, Artificial
  probe
  misc_feature (1)..(25): SEQ ID NO: 6532; WAN024FO9; Start 893; Stop 917
atgatatacctataactcaagagcg

SEQ ID NO: 441509 - DNA, 25 bp, Artificial
  probe
  misc_feature (1)..(25): SEQ ID NO: 6532; WAN024FO9; Start 248; Stop 272
actttgtgttctatgatgcgactaa

SEQ ID NO: 441510 - DNA, 25 bp, Artificial
  probe
  misc_feature (1)..(25): SEQ ID NO: 6532; WAN024FO9; Start 762; Stop 786
cagtgcaattctaagtgttcttctt

SEQ ID NO: 441511 - DNA, 25 bp, Artificial
  probe
  misc_feature (1)..(25): SEQ ID NO: 6532; WAN024FO9; Start 384; Stop 408
catgtataatctactggaatacgcc

SEQ ID NO: 441512 - DNA, 25 bp, Artificial
  probe
  misc_feature (1)..(25): SEQ ID NO: 6532; WAN024FO9; Start 382; Stop 406
ggcatgtataatctactggaatacg

SEQ ID NO: 441513 - DNA, 25 bp, Artificial
  probe
  misc_feature (1)..(25): SEQ ID NO: 6532; WAN024FO9; Start 188; Stop 212
gttgtggaagagagtttgaatcatt

SEQ ID NO: 441514 - DNA, 25 bp, Artificial
  probe
  misc_feature (1)..(25): SEQ ID NO: 6532; WAN024FO9; Start 716; Stop 740
gtacaggtagtcagttaagatccta

SEQ ID NO: 441515 - DNA, 25 bp, Artificial
  probe
  misc_feature (1)..(25): SEQ ID NO: 6532; WAN024FO9; Start 187; Stop 211
tgttgtggaagagagtttgaatcat

SEQ ID NO: 441516 - DNA, 25 bp, Artificial
  probe
  misc_feature (1)..(25): SEQ ID NO: 6532; WAN024FO9; Start 321; Stop 345
tcctgctagtcctgaattatacgtt

SEQ ID NO: 441517 - DNA, 25 bp, Artificial
  probe
  misc_feature (1)..(25): SEQ ID NO: 6532; WAN024FO9; Start 186; Stop 210
ttgttgtggaagagagtttgaatca

SEQ ID NO: 441518 - DNA, 25 bp, Artificial
  probe
  misc_feature (1)..(25): SEQ ID NO: 6532; WAN024FO9; Start 720; Stop 744
aggtagtcagttaagatcctattgt

SEQ ID NO: 441519 - DNA, 25 bp, Artificial
  probe
  misc_feature (1)..(25): SEQ ID NO: 6532; WAN024FO9; Start 718; Stop 742
acaggtagtcagttaagatcctatt

SEQ ID NO: 441520 - DNA, 25 bp, Artificial
  probe
  misc_feature (1)..(25): SEQ ID NO: 6533; WAN024BYR; Start 148; Stop 172
gttagagacgaatacctcaggaatc

SEQ ID NO: 441521 - DNA, 25 bp, Artificial
  probe
  misc_feature (1)..(25): SEQ ID NO: 6533; WAN024BYR; Start 147; Stop 171
agttagagacgaatacctcaggaat

SEQ ID NO: 441522 - DNA, 25 bp, Artificial
  probe
  misc_feature (1)..(25): SEQ ID NO: 6533; WAN024BYR; Start 146; Stop 170
cagttagagacgaatacctcaggaa

SEQ ID NO: 441523 - DNA, 25 bp, Artificial
  probe
  misc_feature (1)..(25): SEQ ID NO: 6533; WAN024BYR; Start 145; Stop 169
tcagttagagacgaatacctcagga

SEQ ID NO: 441524 - DNA, 25 bp, Artificial
  probe
  misc_feature (1)..(25): SEQ ID NO: 6533; WAN024BYR; Start 144; Stop 168
gtcagttagagacgaatacctcagg

SEQ ID NO: 441525 - DNA, 25 bp, Artificial
  probe
  misc_feature (1)..(25): SEQ ID NO: 6533; WAN024BYR; Start 141; Stop 165
ttggtcagttagagacgaatacctc

SEQ ID NO: 441526 - DNA, 25 bp, Artificial
  probe
  misc_feature (1)..(25): SEQ ID NO: 6533; WAN024BYR; Start 143; Stop 167
ggtcagttagagacgaatacctcag

SEQ ID NO: 441527 - DNA, 25 bp, Artificial
  probe
  misc_feature (1)..(25): SEQ ID NO: 6533; WAN024BYR; Start 137; Stop 161
atgtttggtcagttagagacgaata

SEQ ID NO: 441528 - DNA, 25 bp, Artificial
  probe
  misc_feature (1)..(25): SEQ ID NO: 6533; WAN024BYR; Start 136; Stop 160
aatgtttggtcagttagagacgaat

SEQ ID NO: 441529 - DNA, 25 bp, Artificial
  probe
  misc_feature (1)..(25): SEQ ID NO: 6533; WAN024BYR; Start 149; Stop 173
ttagagacgaatacctcaggaatcg

SEQ ID NO: 441530 - DNA, 25 bp, Artificial
  probe
  misc_feature (1)..(25): SEQ ID NO: 6533; WAN024BYR; Start 138; Stop 162
tgtttggtcagttagagacgaatac

SEQ ID NO: 441531 - DNA, 25 bp, Artificial
  probe
  misc_feature (1)..(25): SEQ ID NO: 6533; WAN024BYR; Start 142; Stop 166
tggtcagttagagacgaatacctca

SEQ ID NO: 441532 - DNA, 25 bp, Artificial
  probe
  misc_feature (1)..(25): SEQ ID NO: 6533; WAN024BYR; Start 132; Stop 156
aatcaatgtttggtcagttagagac

SEQ ID NO: 441533 - DNA, 25 bp, Artificial
  probe
  misc_feature (1)..(25): SEQ ID NO: 6533; WAN024BYR; Start 222; Stop 246
ttggaggtcaacgagtgagatattt

SEQ ID NO: 441534 - DNA, 25 bp, Artificial
  probe
  misc_feature (1)..(25): SEQ ID NO: 6533; WAN024BYR; Start 221; Stop 245
tttggaggtcaacgagtgagatatt

SEQ ID NO: 441535 - DNA, 25 bp, Artificial
  probe
  misc_feature (1)..(25): SEQ ID NO: 6533; WAN024BYR; Start 133; Stop 157
atcaatgtttggtcagttagagacg

SEQ ID NO: 441536 - DNA, 25 bp, Artificial
  probe
  misc_feature (1)..(25): SEQ ID NO: 6533; WAN024BYR; Start 135; Stop 159
caatgtttggtcagttagagacgaa

SEQ ID NO: 441537 - DNA, 25 bp, Artificial
  probe
  misc_feature (1)..(25): SEQ ID NO: 6533; WAN024BYR; Start 131; Stop 155
taatcaatgtttggtcagttagaga

SEQ ID NO: 441538 - DNA, 25 bp, Artificial
  probe
  misc_feature (1)..(25): SEQ ID NO: 6533; WAN024BYR; Start 134; Stop 158
tcaatgtttggtcagttagagacga

SEQ ID NO: 441539 - DNA, 25 bp, Artificial
  probe
  misc_feature (1)..(25): SEQ ID NO: 6533; WAN024BYR; Start 140; Stop 164
tttggtcagttagagacgaatacct

SEQ ID NO: 441540 - DNA, 25 bp, Artificial
  probe
  misc_feature (1)..(25): SEQ ID NO: 6533; WAN024BYR; Start 139; Stop 163
gtttggtcagttagagacgaatacc

SEQ ID NO: 441541 - DNA, 25 bp, Artificial
  probe
  misc_feature (1)..(25): SEQ ID NO: 6533; WAN024BYR; Start 130; Stop 154
ttaatcaatgtttggtcagttagag

SEQ ID NO: 441542 - DNA, 25 bp, Artificial
  probe
  misc_feature (1)..(25): SEQ ID NO: 6533; WAN024BYR; Start 123; Stop 147
aggttatttaatcaatgtttggtca

SEQ ID NO: 441543 - DNA, 25 bp, Artificial
  probe
  misc_feature (1)..(25): SEQ ID NO: 6533; WAN024BYR; Start 121; Stop 145
acaggttatttaatcaatgtttggt

SEQ ID NO: 441544 - DNA, 25 bp, Artificial
  probe
  misc_feature (1)..(25): SEQ ID NO: 6533; WAN024BYR; Start 9; Stop 33
atttgatgaaatgcagcaattaagc

SEQ ID NO: 441545 - DNA, 25 bp, Artificial
  probe
  misc_feature (1)..(25): SEQ ID NO: 6533; WAN024BYR; Start 124; Stop 148
ggttatttaatcaatgtttggtcag

SEQ ID NO: 441546 - DNA, 25 bp, Artificial
  probe
  misc_feature (1)..(25): SEQ ID NO: 6533; WAN024BYR; Start 122; Stop 146
caggttatttaatcaatgtttggtc

SEQ ID NO: 441547 - DNA, 25 bp, Artificial
  probe
  misc_feature (1)..(25): SEQ ID NO: 6533; WAN024BYR; Start 150; Stop 174
tagagacgaatacctcaggaatcga

SEQ ID NO: 441548 - DNA, 25 bp, Artificial
  probe
  misc_feature (1)..(25): SEQ ID NO: 6533; WAN024BYR; Start 129; Stop 153
tttaatcaatgtttggtcagttaga

SEQ ID NO: 441549 - DNA, 25 bp, Artificial
  probe
  misc_feature (1)..(25): SEQ ID NO: 6533; WAN024BYR; Start 2; Stop 26
tgacattatttgatgaaatgcagca

SEQ ID NO: 441550 - DNA, 25 bp, Artificial
  probe
  misc_feature (1)..(25): SEQ ID NO: 6533; WAN024BYR; Start 3; Stop 27
gacattatttgatgaaatgcagcaa

SEQ ID NO: 441551 - DNA, 25 bp, Artificial
  probe
  misc_feature (1)..(25): SEQ ID NO: 6533; WAN024BYR; Start 125; Stop 149
gttatttaatcaatgtttggtcagt

SEQ ID NO: 441552 - DNA, 25 bp, Artificial
  probe
  misc_feature (1)..(25): SEQ ID NO: 6533; WAN024BYR; Start 1; Stop 25
atgacattatttgatgaaatgcagc

SEQ ID NO: 441553 - DNA, 25 bp, Artificial
  probe
  misc_feature (1)..(25): SEQ ID NO: 6534; WAN024BV2; Start 1371; Stop 1395
actcttactaacctcaactggaatg

SEQ ID NO: 441554 - DNA, 25 bp, Artificial
  probe
  misc_feature (1)..(25): SEQ ID NO: 6534; WAN024BV2; Start 1364; Stop 1388
acggaatactcttactaacctcaac

SEQ ID NO: 441555 - DNA, 25 bp, Artificial
  probe
  misc_feature (1)..(25): SEQ ID NO: 6534; WAN024BV2; Start 1365; Stop 1389
cggaatactcttactaacctcaact

SEQ ID NO: 441556 - DNA, 25 bp, Artificial
  probe
  misc_feature (1)..(25): SEQ ID NO: 6534; WAN024BV2; Start 482; Stop 506
gtgatgtgacttggttctatcctaa

SEQ ID NO: 441557 - DNA, 25 bp, Artificial
  probe
  misc_feature (1)..(25): SEQ ID NO: 6534; WAN024BV2; Start 1363; Stop 1387
aacggaatactcttactaacctcaa

SEQ ID NO: 441558 - DNA, 25 bp, Artificial
  probe
  misc_feature (1)..(25): SEQ ID NO: 6534; WAN024BV2; Start 1370; Stop 1394
tactcttactaacctcaactggaat

SEQ ID NO: 441559 - DNA, 25 bp, Artificial
  probe
  misc_feature (1)..(25): SEQ ID NO: 6534; WAN024BV2; Start 1369; Stop 1393
atactcttactaacctcaactggaa

SEQ ID NO: 441560 - DNA, 25 bp, Artificial
  probe
  misc_feature (1)..(25): SEQ ID NO: 6534; WAN024BV2; Start 1368; Stop 1392
aatactcttactaacctcaactgga

SEQ ID NO: 441561 - DNA, 25 bp, Artificial
  probe
  misc_feature (1)..(25): SEQ ID NO: 6534; WAN024BV2; Start 1372; Stop 1396
ctcttactaacctcaactggaatga

SEQ ID NO: 441562 - DNA, 25 bp, Artificial
  probe
  misc_feature (1)..(25): SEQ ID NO: 6534; WAN024BV2; Start 1367; Stop 1391
gaatactcttactaacctcaactgg

SEQ ID NO: 441563 - DNA, 25 bp, Artificial
  probe
  misc_feature (1)..(25): SEQ ID NO: 6534; WAN024BV2; Start 1366; Stop 1390
ggaatactcttactaacctcaactg

SEQ ID NO: 441564 - DNA, 25 bp, Artificial
  probe
  misc_feature (1)..(25): SEQ ID NO: 6534; WAN024BV2; Start 481; Stop 505
agtgatgtgacttggttctatccta

SEQ ID NO: 441565 - DNA, 25 bp, Artificial
  probe
  misc_feature (1)..(25): SEQ ID NO: 6534; WAN024BV2; Start 480; Stop 504
tagtgatgtgacttggttctatcct

SEQ ID NO: 441566 - DNA, 25 bp, Artificial
  probe
  misc_feature (1)..(25): SEQ ID NO: 6534; WAN024BV2; Start 1384; Stop 1408
tcaactggaatgagtaagcaagaag

SEQ ID NO: 441567 - DNA, 25 bp, Artificial
  probe
  misc_feature (1)..(25): SEQ ID NO: 6534; WAN024BV2; Start 479; Stop 503
ctagtgatgtgacttggttctatcc

SEQ ID NO: 441568 - DNA, 25 bp, Artificial
  probe
  misc_feature (1)..(25): SEQ ID NO: 6534; WAN024BV2; Start 245; Stop 269
ttgctcagaacaatccagatgtatt

SEQ ID NO: 441569 - DNA, 25 bp, Artificial
  probe
  misc_feature (1)..(25): SEQ ID NO: 6534; WAN024BV2; Start 246; Stop 270
tgctcagaacaatccagatgtattc

SEQ ID NO: 441570 - DNA, 25 bp, Artificial
  probe
  misc_feature (1)..(25): SEQ ID NO: 6534; WAN024BV2; Start 1408; Stop 1432
gcggaagctatgattaataagactg

SEQ ID NO: 441571 - DNA, 25 bp, Artificial
  probe
  misc_feature (1)..(25): SEQ ID NO: 6534; WAN024BV2; Start 556; Stop 580
gtaccagtcattcatagacctgatg

SEQ ID NO: 441572 - DNA, 25 bp, Artificial
  probe
  misc_feature (1)..(25): SEQ ID NO: 6534; WAN024BV2; Start 94; Stop 118
aatgagatagatgttggtattacga

SEQ ID NO: 441573 - DNA, 25 bp, Artificial
  probe
  misc_feature (1)..(25): SEQ ID NO: 6534; WAN024BV2; Start 60; Stop 84
agacactagatacaatcagtatgct

SEQ ID NO: 441574 - DNA, 25 bp, Artificial
  probe
  misc_feature (1)..(25): SEQ ID NO: 6534; WAN024BV2; Start 90; Stop 114
acacaatgagatagatgttggtatt

SEQ ID NO: 441575 - DNA, 25 bp, Artificial
  probe
  misc_feature (1)..(25): SEQ ID NO: 6534; WAN024BV2; Start 1025; Stop 1049
atgtggctacttgtttacgagataa

SEQ ID NO: 441576 - DNA, 25 bp, Artificial
  probe
  misc_feature (1)..(25): SEQ ID NO: 6534; WAN024BV2; Start 1023; Stop 1047
ttatgtggctacttgtttacgagat

SEQ ID NO: 441577 - DNA, 25 bp, Artificial
  probe
  misc_feature (1)..(25): SEQ ID NO: 6534; WAN024BV2; Start 557; Stop 581
taccagtcattcatagacctgatgc

SEQ ID NO: 441578 - DNA, 25 bp, Artificial
  probe
  misc_feature (1)..(25): SEQ ID NO: 6534; WAN024BV2; Start 95; Stop 119
atgagatagatgttggtattacgat

SEQ ID NO: 441579 - DNA, 25 bp, Artificial
  probe
  misc_feature (1)..(25): SEQ ID NO: 6534; WAN024BV2; Start 93; Stop 117
caatgagatagatgttggtattacg

SEQ ID NO: 441580 - DNA, 25 bp, Artificial
  probe
  misc_feature (1)..(25): SEQ ID NO: 6534; WAN024BV2; Start 1385; Stop 1409
caactggaatgagtaagcaagaagc

SEQ ID NO: 441581 - DNA, 25 bp, Artificial
  probe
  misc_feature (1)..(25): SEQ ID NO: 6534; WAN024BV2; Start 1022; Stop 1046
cttatgtggctacttgtttacgaga

SEQ ID NO: 441582 - DNA, 25 bp, Artificial
  probe
  misc_feature (1)..(25): SEQ ID NO: 6534; WAN024BV2; Start 1024; Stop 1048
tatgtggctacttgtttacgagata

SEQ ID NO: 441583 - DNA, 25 bp, Artificial
  probe
  misc_feature (1)..(25): SEQ ID NO: 6534; WAN024BV2; Start 1362; Stop 1386
aaacggaatactcttactaacctca

SEQ ID NO: 441584 - DNA, 25 bp, Artificial
  probe
  misc_feature (1)..(25): SEQ ID NO: 6534; WAN024BV2; Start 1015; Stop 1039
aatgtggcttatgtggctacttgtt

SEQ ID NO: 441585 - DNA, 25 bp, Artificial
  probe
  misc_feature (1)..(25): SEQ ID NO: 6534; WAN024BV2; Start 483; Stop 507
tgatgtgacttggttctatcctaaa

SEQ ID NO: 441586 - DNA, 25 bp, Artificial
  probe
  misc_feature (1)..(25): SEQ ID NO: 6535; WAN024CCB; Start 62; Stop 86
atctaccaacctcttattctgaacc

SEQ ID NO: 441587 - DNA, 25 bp, Artificial
  probe
  misc_feature (1)..(25): SEQ ID NO: 6535; WAN024CCB; Start 54; Stop 78
ggctgataatctaccaacctcttat

SEQ ID NO: 441588 - DNA, 25 bp, Artificial
  probe
  misc_feature (1)..(25): SEQ ID NO: 6535; WAN024CCB; Start 243; Stop 267
tcaaggcagataccaagagatactt

SEQ ID NO: 441589 - DNA, 25 bp, Artificial
  probe
  misc_feature (1)..(25): SEQ ID NO: 6535; WAN024CCB; Start 61; Stop 85
aatctaccaacctcttattctgaac

SEQ ID NO: 441590 - DNA, 25 bp, Artificial
  probe
  misc_feature (1)..(25): SEQ ID NO: 6535; WAN024CCB; Start 55; Stop 79
gctgataatctaccaacctcttatt

SEQ ID NO: 441591 - DNA, 25 bp, Artificial
  probe
  misc_feature (1)..(25): SEQ ID NO: 6535; WAN024CCB; Start 242; Stop 266
ctcaaggcagataccaagagatact

SEQ ID NO: 441592 - DNA, 25 bp, Artificial
  probe
  misc_feature (1)..(25): SEQ ID NO: 6535; WAN024CCB; Start 53; Stop 77
aggctgataatctaccaacctctta

SEQ ID NO: 441593 - DNA, 25 bp, Artificial
  probe
  misc_feature (1)..(25): SEQ ID NO: 6535; WAN024CCB; Start 181; Stop 205
aattgtagtcgctcctatctgatgc

SEQ ID NO: 441594 - DNA, 25 bp, Artificial
  probe
  misc_feature (1)..(25): SEQ ID NO: 6535; WAN024CCB; Start 244; Stop 268
caaggcagataccaagagatacttt

SEQ ID NO: 441595 - DNA, 25 bp, Artificial
  probe
  misc_feature (1)..(25): SEQ ID NO: 6535; WAN024CCB; Start 47; Stop 71
agaaagaggctgataatctaccaac

SEQ ID NO: 441596 - DNA, 25 bp, Artificial
  probe
  misc_feature (1)..(25): SEQ ID NO: 6535; WAN024CCB; Start 45; Stop 69
caagaaagaggctgataatctacca

SEQ ID NO: 441597 - DNA, 25 bp, Artificial
  probe
  misc_feature (1)..(25): SEQ ID NO: 6535; WAN024CCB; Start 44; Stop 68
acaagaaagaggctgataatctacc

SEQ ID NO: 441598 - DNA, 25 bp, Artificial
  probe
  misc_feature (1)..(25): SEQ ID NO: 6535; WAN024CCB; Start 42; Stop 66
cgacaagaaagaggctgataatcta

SEQ ID NO: 441599 - DNA, 25 bp, Artificial
  probe
  misc_feature (1)..(25): SEQ ID NO: 6535; WAN024CCB; Start 65; Stop 89
taccaacctcttattctgaacccat

SEQ ID NO: 441600 - DNA, 25 bp, Artificial
  probe
  misc_feature (1)..(25): SEQ ID NO: 6535; WAN024CCB; Start 46; Stop 70
aagaaagaggctgataatctaccaa

SEQ ID NO: 441601 - DNA, 25 bp, Artificial
  probe
  misc_feature (1)..(25): SEQ ID NO: 6535; WAN024CCB; Start 60; Stop 84
taatctaccaacctcttattctgaa

SEQ ID NO: 441602 - DNA, 25 bp, Artificial
  probe
  misc_feature (1)..(25): SEQ ID NO: 6535; WAN024CCB; Start 48; Stop 72
gaaagaggctgataatctaccaacc

SEQ ID NO: 441603 - DNA, 25 bp, Artificial
  probe
  misc_feature (1)..(25): SEQ ID NO: 6535; WAN024CCB; Start 63; Stop 87
tctaccaacctcttattctgaaccc

SEQ ID NO: 441604 - DNA, 25 bp, Artificial
  probe
  misc_feature (1)..(25): SEQ ID NO: 6535; WAN024CCB; Start 43; Stop 67
gacaagaaagaggctgataatctac

SEQ ID NO: 441605 - DNA, 25 bp, Artificial
  probe
  misc_feature (1)..(25): SEQ ID NO: 6535; WAN024CCB; Start 241; Stop 265
gctcaaggcagataccaagagatac

SEQ ID NO: 441606 - DNA, 25 bp, Artificial
  probe
  misc_feature (1)..(25): SEQ ID NO: 6535; WAN024CCB; Start 133; Stop 157
aatctggtattcgacttggtcattc

SEQ ID NO: 441607 - DNA, 25 bp, Artificial
  probe
  misc_feature (1)..(25): SEQ ID NO: 6535; WAN024CCB; Start 132; Stop 156
caatctggtattcgacttggtcatt

SEQ ID NO: 441608 - DNA, 25 bp, Artificial
  probe
  misc_feature (1)..(25): SEQ ID NO: 6535; WAN024CCB; Start 64; Stop 88
ctaccaacctcttattctgaaccca

SEQ ID NO: 441609 - DNA, 25 bp, Artificial
  probe
  misc_feature (1)..(25): SEQ ID NO: 6535; WAN024CCB; Start 59; Stop 83
ataatctaccaacctcttattctga

SEQ ID NO: 441610 - DNA, 25 bp, Artificial
  probe
  misc_feature (1)..(25): SEQ ID NO: 6535; WAN024CCB; Start 57; Stop 81
tgataatctaccaacctcttattct

SEQ ID NO: 441611 - DNA, 25 bp, Artificial
  probe
  misc_feature (1)..(25): SEQ ID NO: 6535; WAN024CCB; Start 41; Stop 65
acgacaagaaagaggctgataatct

SEQ ID NO: 441612 - DNA, 25 bp, Artificial
  probe
  misc_feature (1)..(25): SEQ ID NO: 6535; WAN024CCB; Start 58; Stop 82
gataatctaccaacctcttattctg

SEQ ID NO: 441613 - DNA, 25 bp, Artificial
  probe
  misc_feature (1)..(25): SEQ ID NO: 6535; WAN024CCB; Start 56; Stop 80
ctgataatctaccaacctcttattc

SEQ ID NO: 441614 - DNA, 25 bp, Artificial
  probe
  misc_feature (1)..(25): SEQ ID NO: 6535; WAN024CCB; Start 49; Stop 73
aaagaggctgataatctaccaacct

SEQ ID NO: 441615 - DNA, 25 bp, Artificial
  probe
  misc_feature (1)..(25): SEQ ID NO: 6535; WAN024CCB; Start 180; Stop 204
caattgtagtcgctcctatctgatg

SEQ ID NO: 441616 - DNA, 25 bp, Artificial
  probe
  misc_feature (1)..(25): SEQ ID NO: 6535; WAN024CCB; Start 134; Stop 158
atctggtattcgacttggtcattcc

SEQ ID NO: 441617 - DNA, 25 bp, Artificial
  probe
  misc_feature (1)..(25): SEQ ID NO: 6535; WAN024CCB; Start 240; Stop 264
ggctcaaggcagataccaagagata

SEQ ID NO: 441618 - DNA, 25 bp, Artificial
  probe
  misc_feature (1)..(25): SEQ ID NO: 6535; WAN024CCB; Start 131; Stop 155
gcaatctggtattcgacttggtcat

SEQ ID NO: 441619 - DNA, 25 bp, Artificial
  probe
  misc_feature (1)..(25): SEQ ID NO: 6536; WAN024BMM; Start 764; Stop 788
ttgactattatttacaggctcgtga

SEQ ID NO: 441620 - DNA, 25 bp, Artificial
  probe
  misc_feature (1)..(25): SEQ ID NO: 6536; WAN024BMM; Start 765; Stop 789
tgactattatttacaggctcgtgat

SEQ ID NO: 441621 - DNA, 25 bp, Artificial
  probe
  misc_feature (1)..(25): SEQ ID NO: 6536; WAN024BMM; Start 763; Stop 787
cttgactattatttacaggctcgtg

SEQ ID NO: 441622 - DNA, 25 bp, Artificial
  probe
  misc_feature (1)..(25): SEQ ID NO: 6536; WAN024BMM; Start 762; Stop 786
tcttgactattatttacaggctcgt

SEQ ID NO: 441623 - DNA, 25 bp, Artificial
  probe
  misc_feature (1)..(25): SEQ ID NO: 6536; WAN024BMM; Start 434; Stop 458
gctcatctgtgtatcttaaactcct

SEQ ID NO: 441624 - DNA, 25 bp, Artificial
  probe
  misc_feature (1)..(25): SEQ ID NO: 6536; WAN024BMM; Start 187; Stop 211
gatgaacagattgaaatgacttcca

SEQ ID NO: 441625 - DNA, 25 bp, Artificial
  probe
  misc_feature (1)..(25): SEQ ID NO: 6536; WAN024BMM; Start 217; Stop 241
acaccgtttaagaaattagcagaaa

SEQ ID NO: 441626 - DNA, 25 bp, Artificial
  probe
  misc_feature (1)..(25): SEQ ID NO: 6536; WAN024BMM; Start 186; Stop 210
cgatgaacagattgaaatgacttcc

SEQ ID NO: 441627 - DNA, 25 bp, Artificial
  probe
  misc_feature (1)..(25): SEQ ID NO: 6536; WAN024BMM; Start 648; Stop 672
agaagccttagaaaccattgacttt

SEQ ID NO: 441628 - DNA, 25 bp, Artificial
  probe
  misc_feature (1)..(25): SEQ ID NO: 6536; WAN024BMM; Start 647; Stop 671
aagaagccttagaaaccattgactt

SEQ ID NO: 441629 - DNA, 25 bp, Artificial
  probe
  misc_feature (1)..(25): SEQ ID NO: 6536; WAN024BMM; Start 199; Stop 223
gaaatgacttccaatataacaccgt

SEQ ID NO: 441630 - DNA, 25 bp, Artificial
  probe
  misc_feature (1)..(25): SEQ ID NO: 6536; WAN024BMM; Start 198; Stop 222
tgaaatgacttccaatataacaccg

SEQ ID NO: 441631 - DNA, 25 bp, Artificial
  probe
  misc_feature (1)..(25): SEQ ID NO: 6536; WAN024BMM; Start 436; Stop 460
tcatctgtgtatcttaaactcctca

SEQ ID NO: 441632 - DNA, 25 bp, Artificial
  probe
  misc_feature (1)..(25): SEQ ID NO: 6536; WAN024BMM; Start 761; Stop 785
ttcttgactattatttacaggctcg

SEQ ID NO: 441633 - DNA, 25 bp, Artificial
  probe
  misc_feature (1)..(25): SEQ ID NO: 6536; WAN024BMM; Start 745; Stop 769
ttaaagcacgatgaaattcttgact

SEQ ID NO: 441634 - DNA, 25 bp, Artificial
  probe
  misc_feature (1)..(25): SEQ ID NO: 6536; WAN024BMM; Start 157; Stop 181
cggcttcaagttcccttagattatt

SEQ ID NO: 441635 - DNA, 25 bp, Artificial
  probe
  misc_feature (1)..(25): SEQ ID NO: 6536; WAN024BMM; Start 128; Stop 152
ccgctgatttactctataaacttgc

SEQ ID NO: 441636 - DNA, 25 bp, Artificial
  probe
  misc_feature (1)..(25): SEQ ID NO: 6536; WAN024BMM; Start 127; Stop 151
gccgctgatttactctataaacttg

SEQ ID NO: 441637 - DNA, 25 bp, Artificial
  probe
  misc_feature (1)..(25): SEQ ID NO: 6536; WAN024BMM; Start 126; Stop 150
tgccgctgatttactctataaactt

SEQ ID NO: 441638 - DNA, 25 bp, Artificial
  probe
  misc_feature (1)..(25): SEQ ID NO: 6536; WAN024BMM; Start 748; Stop 772
aagcacgatgaaattcttgactatt

SEQ ID NO: 441639 - DNA, 25 bp, Artificial
  probe
  misc_feature (1)..(25): SEQ ID NO: 6536; WAN024BMM; Start 747; Stop 771
aaagcacgatgaaattcttgactat

SEQ ID NO: 441640 - DNA, 25 bp, Artificial
  probe
  misc_feature (1)..(25): SEQ ID NO: 6536; WAN024BMM; Start 158; Stop 182
ggcttcaagttcccttagattattt

SEQ ID NO: 441641 - DNA, 25 bp, Artificial
  probe
  misc_feature (1)..(25): SEQ ID NO: 6536; WAN024BMM; Start 216; Stop 240
aacaccgtttaagaaattagcagaa

SEQ ID NO: 441642 - DNA, 25 bp, Artificial
  probe
  misc_feature (1)..(25): SEQ ID NO: 6536; WAN024BMM; Start 201; Stop 225
aatgacttccaatataacaccgttt

SEQ ID NO: 441643 - DNA, 25 bp, Artificial
  probe
  misc_feature (1)..(25): SEQ ID NO: 6536; WAN024BMM; Start 200; Stop 224
aaatgacttccaatataacaccgtt

SEQ ID NO: 441644 - DNA, 25 bp, Artificial
  probe
  misc_feature (1)..(25): SEQ ID NO: 6536; WAN024BMM; Start 125; Stop 149
ctgccgctgatttactctataaact

SEQ ID NO: 441645 - DNA, 25 bp, Artificial
  probe
  misc_feature (1)..(25): SEQ ID NO: 6536; WAN024BMM; Start 188; Stop 212
atgaacagattgaaatgacttccaa

SEQ ID NO: 441646 - DNA, 25 bp, Artificial
  probe
  misc_feature (1)..(25): SEQ ID NO: 6536; WAN024BMM; Start 749; Stop 773
agcacgatgaaattcttgactatta

SEQ ID NO: 441647 - DNA, 25 bp, Artificial
  probe
  misc_feature (1)..(25): SEQ ID NO: 6536; WAN024BMM; Start 435; Stop 459
ctcatctgtgtatcttaaactcctc

SEQ ID NO: 441648 - DNA, 25 bp, Artificial
  probe
  misc_feature (1)..(25): SEQ ID NO: 6536; WAN024BMM; Start 746; Stop 770
taaagcacgatgaaattcttgacta

SEQ ID NO: 441649 - DNA, 25 bp, Artificial
  probe
  misc_feature (1)..(25): SEQ ID NO: 6536; WAN024BMM; Start 368; Stop 392
acttacatagttccaaagatgaagc

SEQ ID NO: 441650 - DNA, 25 bp, Artificial
  probe
  misc_feature (1)..(25): SEQ ID NO: 6536; WAN024BMM; Start 646; Stop 670
caagaagccttagaaaccattgact

SEQ ID NO: 441651 - DNA, 25 bp, Artificial
  probe
  misc_feature (1)..(25): SEQ ID NO: 6536; WAN024BMM; Start 156; Stop 180
tcggcttcaagttcccttagattat

SEQ ID NO: 441652 - DNA, 25 bp, Artificial
  probe
  misc_feature (1)..(25): SEQ ID NO: 6537; WAN024BO3; Start 587; Stop 611
cctatcttgatgatgaactcggatt

SEQ ID NO: 441653 - DNA, 25 bp, Artificial
  probe
  misc_feature (1)..(25): SEQ ID NO: 6537; WAN024BO3; Start 169; Stop 193
aatatcgttgttatccgtaaggtgg

SEQ ID NO: 441654 - DNA, 25 bp, Artificial
  probe
  misc_feature (1)..(25): SEQ ID NO: 6537; WAN024BO3; Start 589; Stop 613
tatcttgatgatgaactcggattcg

SEQ ID NO: 441655 - DNA, 25 bp, Artificial
  probe
  misc_feature (1)..(25): SEQ ID NO: 6537; WAN024BO3; Start 582; Stop 606
aagcacctatcttgatgatgaactc

SEQ ID NO: 441656 - DNA, 25 bp, Artificial
  probe
  misc_feature (1)..(25): SEQ ID NO: 6537; WAN024BO3; Start 588; Stop 612
ctatcttgatgatgaactcggattc

SEQ ID NO: 441657 - DNA, 25 bp, Artificial
  probe
  misc_feature (1)..(25): SEQ ID NO: 6537; WAN024BO3; Start 586; Stop 610
acctatcttgatgatgaactcggat

SEQ ID NO: 441658 - DNA, 25 bp, Artificial
  probe
  misc_feature (1)..(25): SEQ ID NO: 6537; WAN024BO3; Start 168; Stop 192
caatatcgttgttatccgtaaggtg

SEQ ID NO: 441659 - DNA, 25 bp, Artificial
  probe
  misc_feature (1)..(25): SEQ ID NO: 6537; WAN024BO3; Start 140; Stop 164
taaggtatattatcgctggagaggc

SEQ ID NO: 441660 - DNA, 25 bp, Artificial
  probe
  misc_feature (1)..(25): SEQ ID NO: 6537; WAN024BO3; Start 139; Stop 163
ataaggtatattatcgctggagagg

SEQ ID NO: 441661 - DNA, 25 bp, Artificial
  probe
  misc_feature (1)..(25): SEQ ID NO: 6537; WAN024BO3; Start 167; Stop 191
ccaatatcgttgttatccgtaaggt

SEQ ID NO: 441662 - DNA, 25 bp, Artificial
  probe
  misc_feature (1)..(25): SEQ ID NO: 6537; WAN024BO3; Start 592; Stop 616
cttgatgatgaactcggattcgtta

SEQ ID NO: 441663 - DNA, 25 bp, Artificial
  probe
  misc_feature (1)..(25): SEQ ID NO: 6537; WAN024BO3; Start 593; Stop 617
ttgatgatgaactcggattcgttac

SEQ ID NO: 441664 - DNA, 25 bp, Artificial
  probe
  misc_feature (1)..(25): SEQ ID NO: 6537; WAN024BO3; Start 1160; Stop 1184
ttgaagaacacaagatgtatcgttg

SEQ ID NO: 441665 - DNA, 25 bp, Artificial
  probe
  misc_feature (1)..(25): SEQ ID NO: 6537; WAN024BO3; Start 676; Stop 700
tacttatatctaggtgaggcagtgg

SEQ ID NO: 441666 - DNA, 25 bp, Artificial
  probe
  misc_feature (1)..(25): SEQ ID NO: 6537; WAN024BO3; Start 595; Stop 619
gatgatgaactcggattcgttactg

SEQ ID NO: 441667 - DNA, 25 bp, Artificial
  probe
  misc_feature (1)..(25): SEQ ID NO: 6537; WAN024BO3; Start 585; Stop 609
cacctatcttgatgatgaactcgga

SEQ ID NO: 441668 - DNA, 25 bp, Artificial
  probe
  misc_feature (1)..(25): SEQ ID NO: 6537; WAN024BO3; Start 946; Stop 970
atgcgatcagttattgagaagtaca

SEQ ID NO: 441669 - DNA, 25 bp, Artificial
  probe
  misc_feature (1)..(25): SEQ ID NO: 6537; WAN024BO3; Start 675; Stop 699
atacttatatctaggtgaggcagtg

SEQ ID NO: 441670 - DNA, 25 bp, Artificial
  probe
  misc_feature (1)..(25): SEQ ID NO: 6537; WAN024BO3; Start 1159; Stop 1183
attgaagaacacaagatgtatcgtt

SEQ ID NO: 441671 - DNA, 25 bp, Artificial
  probe
  misc_feature (1)..(25): SEQ ID NO: 6537; WAN024BO3; Start 948; Stop 972
gcgatcagttattgagaagtacaga

SEQ ID NO: 441672 - DNA, 25 bp, Artificial
  probe
  misc_feature (1)..(25): SEQ ID NO: 6537; WAN024BO3; Start 947; Stop 971
tgcgatcagttattgagaagtacag

SEQ ID NO: 441673 - DNA, 25 bp, Artificial
  probe
  misc_feature (1)..(25): SEQ ID NO: 6537; WAN024BO3; Start 596; Stop 620
atgatgaactcggattcgttactga

SEQ ID NO: 441674 - DNA, 25 bp, Artificial
  probe
  misc_feature (1)..(25): SEQ ID NO: 6537; WAN024BO3; Start 594; Stop 618
tgatgatgaactcggattcgttact

SEQ ID NO: 441675 - DNA, 25 bp, Artificial
  probe
  misc_feature (1)..(25): SEQ ID NO: 6537; WAN024BO3; Start 939; Stop 963
tgcttatatgcgatcagttattgag

SEQ ID NO: 441676 - DNA, 25 bp, Artificial
  probe
  misc_feature (1)..(25): SEQ ID NO: 6537; WAN024BO3; Start 1161; Stop 1185
tgaagaacacaagatgtatcgttgg

SEQ ID NO: 441677 - DNA, 25 bp, Artificial
  probe
  misc_feature (1)..(25): SEQ ID NO: 6537; WAN024BO3; Start 590; Stop 614
atcttgatgatgaactcggattcgt

SEQ ID NO: 441678 - DNA, 25 bp, Artificial
  probe
  misc_feature (1)..(25): SEQ ID NO: 6537; WAN024BO3; Start 166; Stop 190
gccaatatcgttgttatccgtaagg

SEQ ID NO: 441679 - DNA, 25 bp, Artificial
  probe
  misc_feature (1)..(25): SEQ ID NO: 6537; WAN024BO3; Start 949; Stop 973
cgatcagttattgagaagtacagag

SEQ ID NO: 441680 - DNA, 25 bp, Artificial
  probe
  misc_feature (1)..(25): SEQ ID NO: 6537; WAN024BO3; Start 940; Stop 964
gcttatatgcgatcagttattgaga

SEQ ID NO: 441681 - DNA, 25 bp, Artificial
  probe
  misc_feature (1)..(25): SEQ ID NO: 6537; WAN024BO3; Start 985; Stop 1009
caatacacaatagatagtgctgagg

SEQ ID NO: 441682 - DNA, 25 bp, Artificial
  probe
  misc_feature (1)..(25): SEQ ID NO: 6537; WAN024BO3; Start 674; Stop 698
gatacttatatctaggtgaggcagt

SEQ ID NO: 441683 - DNA, 25 bp, Artificial
  probe
  misc_feature (1)..(25): SEQ ID NO: 6537; WAN024BO3; Start 583; Stop 607
agcacctatcttgatgatgaactcg

SEQ ID NO: 441684 - DNA, 25 bp, Artificial
  probe
  misc_feature (1)..(25): SEQ ID NO: 6537; WAN024BO3; Start 945; Stop 969
tatgcgatcagttattgagaagtac

SEQ ID NO: 441685 - DNA, 25 bp, Artificial
  probe
  misc_feature (1)..(25): SEQ ID NO: 6538; WAN024BX6; Start 508; Stop 532
ggtaagccaataggtgagaataact

SEQ ID NO: 441686 - DNA, 25 bp, Artificial
  probe
  misc_feature (1)..(25): SEQ ID NO: 6538; WAN024BX6; Start 282; Stop 306
cgtaatctatctgatggatggtgaa

SEQ ID NO: 441687 - DNA, 25 bp, Artificial
  probe
  misc_feature (1)..(25): SEQ ID NO: 6538; WAN024BX6; Start 452; Stop 476
ttaaggaactgacacaacaaggtaa

SEQ ID NO: 441688 - DNA, 25 bp, Artificial
  probe
  misc_feature (1)..(25): SEQ ID NO: 6538; WAN024BX6; Start 509; Stop 533
gtaagccaataggtgagaataactg

SEQ ID NO: 441689 - DNA, 25 bp, Artificial
  probe
  misc_feature (1)..(25): SEQ ID NO: 6538; WAN024BX6; Start 505; Stop 529
tacggtaagccaataggtgagaata

SEQ ID NO: 441690 - DNA, 25 bp, Artificial
  probe
  misc_feature (1)..(25): SEQ ID NO: 6538; WAN024BX6; Start 507; Stop 531
cggtaagccaataggtgagaataac

SEQ ID NO: 441691 - DNA, 25 bp, Artificial
  probe
  misc_feature (1)..(25): SEQ ID NO: 6538; WAN024BX6; Start 504; Stop 528
atacggtaagccaataggtgagaat

SEQ ID NO: 441692 - DNA, 25 bp, Artificial
  probe
  misc_feature (1)..(25): SEQ ID NO: 6538; WAN024BX6; Start 451; Stop 475
gttaaggaactgacacaacaaggta

SEQ ID NO: 441693 - DNA, 25 bp, Artificial
  probe
  misc_feature (1)..(25): SEQ ID NO: 6538; WAN024BX6; Start 506; Stop 530
acggtaagccaataggtgagaataa

SEQ ID NO: 441694 - DNA, 25 bp, Artificial
  probe
  misc_feature (1)..(25): SEQ ID NO: 6538; WAN024BX6; Start 480; Stop 504
tgttacttatccagtgatgaactca

SEQ ID NO: 441695 - DNA, 25 bp, Artificial
  probe
  misc_feature (1)..(25): SEQ ID NO: 6538; WAN024BX6; Start 496; Stop 520
atgaactcatacggtaagccaatag

SEQ ID NO: 441696 - DNA, 25 bp, Artificial
  probe
  misc_feature (1)..(25): SEQ ID NO: 6538; WAN024BX6; Start 495; Stop 519
gatgaactcatacggtaagccaata

SEQ ID NO: 441697 - DNA, 25 bp, Artificial
  probe
  misc_feature (1)..(25): SEQ ID NO: 6538; WAN024BX6; Start 484; Stop 508
acttatccagtgatgaactcatacg

SEQ ID NO: 441698 - DNA, 25 bp, Artificial
  probe
  misc_feature (1)..(25): SEQ ID NO: 6538; WAN024BX6; Start 281; Stop 305
gcgtaatctatctgatggatggtga

SEQ ID NO: 441699 - DNA, 25 bp, Artificial
  probe
  misc_feature (1)..(25): SEQ ID NO: 6538; WAN024BX6; Start 487; Stop 511
tatccagtgatgaactcatacggta

SEQ ID NO: 441700 - DNA, 25 bp, Artificial
  probe
  misc_feature (1)..(25): SEQ ID NO: 6538; WAN024BX6; Start 503; Stop 527
catacggtaagccaataggtgagaa

SEQ ID NO: 441701 - DNA, 25 bp, Artificial
  probe
  misc_feature (1)..(25): SEQ ID NO: 6538; WAN024BX6; Start 498; Stop 522
gaactcatacggtaagccaataggt

SEQ ID NO: 441702 - DNA, 25 bp, Artificial
  probe
  misc_feature (1)..(25): SEQ ID NO: 6538; WAN024BX6; Start 485; Stop 509
cttatccagtgatgaactcatacgg

SEQ ID NO: 441703 - DNA, 25 bp, Artificial
  probe
  misc_feature (1)..(25): SEQ ID NO: 6538; WAN024BX6; Start 479; Stop 503
atgttacttatccagtgatgaactc

SEQ ID NO: 441704 - DNA, 25 bp, Artificial
  probe
  misc_feature (1)..(25): SEQ ID NO: 6538; WAN024BX6; Start 478; Stop 502
gatgttacttatccagtgatgaact

SEQ ID NO: 441705 - DNA, 25 bp, Artificial
  probe
  misc_feature (1)..(25): SEQ ID NO: 6538; WAN024BX6; Start 477; Stop 501
agatgttacttatccagtgatgaac

SEQ ID NO: 441706 - DNA, 25 bp, Artificial
  probe
  misc_feature (1)..(25): SEQ ID NO: 6538; WAN024BX6; Start 497; Stop 521
tgaactcatacggtaagccaatagg

SEQ ID NO: 441707 - DNA, 25 bp, Artificial
  probe
  misc_feature (1)..(25): SEQ ID NO: 6538; WAN024BX6; Start 488; Stop 512
atccagtgatgaactcatacggtaa

SEQ ID NO: 441708 - DNA, 25 bp, Artificial
  probe
  misc_feature (1)..(25): SEQ ID NO: 6538; WAN024BX6; Start 486; Stop 510
ttatccagtgatgaactcatacggt

SEQ ID NO: 441709 - DNA, 25 bp, Artificial
  probe
  misc_feature (1)..(25): SEQ ID NO: 6538; WAN024BX6; Start 499; Stop 523
aactcatacggtaagccaataggtg

SEQ ID NO: 441710 - DNA, 25 bp, Artificial
  probe
  misc_feature (1)..(25): SEQ ID NO: 6538; WAN024BX6; Start 663; Stop 687
cacacctcaagagagcctaactaat

SEQ ID NO: 441711 - DNA, 25 bp, Artificial
  probe
  misc_feature (1)..(25): SEQ ID NO: 6538; WAN024BX6; Start 481; Stop 505
gttacttatccagtgatgaactcat

SEQ ID NO: 441712 - DNA, 25 bp, Artificial
  probe
  misc_feature (1)..(25): SEQ ID NO: 6538; WAN024BX6; Start 510; Stop 534
taagccaataggtgagaataactgg

SEQ ID NO: 441713 - DNA, 25 bp, Artificial
  probe
  misc_feature (1)..(25): SEQ ID NO: 6538; WAN024BX6; Start 476; Stop 500
aagatgttacttatccagtgatgaa

SEQ ID NO: 441714 - DNA, 25 bp, Artificial
  probe
  misc_feature (1)..(25): SEQ ID NO: 6538; WAN024BX6; Start 489; Stop 513
tccagtgatgaactcatacggtaag

SEQ ID NO: 441715 - DNA, 25 bp, Artificial
  probe
  misc_feature (1)..(25): SEQ ID NO: 6538; WAN024BX6; Start 525; Stop 549
gaataactgggatactatgccttgt

SEQ ID NO: 441716 - DNA, 25 bp, Artificial
  probe
  misc_feature (1)..(25): SEQ ID NO: 6538; WAN024BX6; Start 524; Stop 548
agaataactgggatactatgccttg

SEQ ID NO: 441717 - DNA, 25 bp, Artificial
  probe
  misc_feature (1)..(25): SEQ ID NO: 6538; WAN024BX6; Start 453; Stop 477
taaggaactgacacaacaaggtaaa

SEQ ID NO: 441718 - DNA, 25 bp, Artificial
  probe
  misc_feature (1)..(25): SEQ ID NO: 6539; WAN024FFK; Start 112; Stop 136
gctctctacaataatatctcgcctt

SEQ ID NO: 441719 - DNA, 25 bp, Artificial
  probe
  misc_feature (1)..(25): SEQ ID NO: 6539; WAN024FFK; Start 109; Stop 133
ttggctctctacaataatatctcgc

SEQ ID NO: 441720 - DNA, 25 bp, Artificial
  probe
  misc_feature (1)..(25): SEQ ID NO: 6539; WAN024FFK; Start 137; Stop 161
ttactaggatggtattcgttgcata

SEQ ID NO: 441721 - DNA, 25 bp, Artificial
  probe
  misc_feature (1)..(25): SEQ ID NO: 6539; WAN024FFK; Start 139; Stop 163
actaggatggtattcgttgcatata

SEQ ID NO: 441722 - DNA, 25 bp, Artificial
  probe
  misc_feature (1)..(25): SEQ ID NO: 6539; WAN024FFK; Start 138; Stop 162
tactaggatggtattcgttgcatat

SEQ ID NO: 441723 - DNA, 25 bp, Artificial
  probe
  misc_feature (1)..(25): SEQ ID NO: 6539; WAN024FFK; Start 225; Stop 249
tgggaataactttaccgtgttcaat

SEQ ID NO: 441724 - DNA, 25 bp, Artificial
  probe
  misc_feature (1)..(25): SEQ ID NO: 6539; WAN024FFK; Start 221; Stop 245
aaactgggaataactttaccgtgtt

SEQ ID NO: 441725 - DNA, 25 bp, Artificial
  probe
  misc_feature (1)..(25): SEQ ID NO: 6539; WAN024FFK; Start 226; Stop 250
gggaataactttaccgtgttcaata

SEQ ID NO: 441726 - DNA, 25 bp, Artificial
  probe
  misc_feature (1)..(25): SEQ ID NO: 6539; WAN024FFK; Start 224; Stop 248
ctgggaataactttaccgtgttcaa

SEQ ID NO: 441727 - DNA, 25 bp, Artificial
  probe
  misc_feature (1)..(25): SEQ ID NO: 6539; WAN024FFK; Start 222; Stop 246
aactgggaataactttaccgtgttc

SEQ ID NO: 441728 - DNA, 25 bp, Artificial
  probe
  misc_feature (1)..(25): SEQ ID NO: 6539; WAN024FFK; Start 113; Stop 137
ctctctacaataatatctcgccttt

SEQ ID NO: 441729 - DNA, 25 bp, Artificial
  probe
  misc_feature (1)..(25): SEQ ID NO: 6539; WAN024FFK; Start 140; Stop 164
ctaggatggtattcgttgcatatat

SEQ ID NO: 441730 - DNA, 25 bp, Artificial
  probe
  misc_feature (1)..(25): SEQ ID NO: 6539; WAN024FFK; Start 108; Stop 132
tttggctctctacaataatatctcg

SEQ ID NO: 441731 - DNA, 25 bp, Artificial
  probe
  misc_feature (1)..(25): SEQ ID NO: 6539; WAN024FFK; Start 181; Stop 205
gctcatatcaatttgttcaagaaga

SEQ ID NO: 441732 - DNA, 25 bp, Artificial
  probe
  misc_feature (1)..(25): SEQ ID NO: 6539; WAN024FFK; Start 223; Stop 247
actgggaataactttaccgtgttca

SEQ ID NO: 441733 - DNA, 25 bp, Artificial
  probe
  misc_feature (1)..(25): SEQ ID NO: 6539; WAN024FFK; Start 56; Stop 80
catttctcagtgagttcaaccattt

SEQ ID NO: 441734 - DNA, 25 bp, Artificial
  probe
  misc_feature (1)..(25): SEQ ID NO: 6539; WAN024FFK; Start 168; Stop 192
tgaattctgccaagctcatatcaat

SEQ ID NO: 441735 - DNA, 25 bp, Artificial
  probe
  misc_feature (1)..(25): SEQ ID NO: 6539; WAN024FFK; Start 143; Stop 167
ggatggtattcgttgcatatatact

SEQ ID NO: 441736 - DNA, 25 bp, Artificial
  probe
  misc_feature (1)..(25): SEQ ID NO: 6539; WAN024FFK; Start 142; Stop 166
aggatggtattcgttgcatatatac

SEQ ID NO: 441737 - DNA, 25 bp, Artificial
  probe
  misc_feature (1)..(25): SEQ ID NO: 6539; WAN024FFK; Start 55; Stop 79
acatttctcagtgagttcaaccatt

SEQ ID NO: 441738 - DNA, 25 bp, Artificial
  probe
  misc_feature (1)..(25): SEQ ID NO: 6539; WAN024FFK; Start 169; Stop 193
gaattctgccaagctcatatcaatt

SEQ ID NO: 441739 - DNA, 25 bp, Artificial
  probe
  misc_feature (1)..(25): SEQ ID NO: 6539; WAN024FFK; Start 171; Stop 195
attctgccaagctcatatcaatttg

SEQ ID NO: 441740 - DNA, 25 bp, Artificial
  probe
  misc_feature (1)..(25): SEQ ID NO: 6539; WAN024FFK; Start 54; Stop 78
gacatttctcagtgagttcaaccat

SEQ ID NO: 441741 - DNA, 25 bp, Artificial
  probe
  misc_feature (1)..(25): SEQ ID NO: 6539; WAN024FFK; Start 176; Stop 200
gccaagctcatatcaatttgttcaa

SEQ ID NO: 441742 - DNA, 25 bp, Artificial
  probe
  misc_feature (1)..(25): SEQ ID NO: 6539; WAN024FFK; Start 146; Stop 170
tggtattcgttgcatatatacttga

SEQ ID NO: 441743 - DNA, 25 bp, Artificial
  probe
  misc_feature (1)..(25): SEQ ID NO: 6539; WAN024FFK; Start 227; Stop 251
ggaataactttaccgtgttcaatat

SEQ ID NO: 441744 - DNA, 25 bp, Artificial
  probe
  misc_feature (1)..(25): SEQ ID NO: 6539; WAN024FFK; Start 177; Stop 201
ccaagctcatatcaatttgttcaag

SEQ ID NO: 441745 - DNA, 25 bp, Artificial
  probe
  misc_feature (1)..(25): SEQ ID NO: 6539; WAN024FFK; Start 174; Stop 198
ctgccaagctcatatcaatttgttc

SEQ ID NO: 441746 - DNA, 25 bp, Artificial
  probe
  misc_feature (1)..(25): SEQ ID NO: 6539; WAN024FFK; Start 136; Stop 160
tttactaggatggtattcgttgcat

SEQ ID NO: 441747 - DNA, 25 bp, Artificial
  probe
  misc_feature (1)..(25): SEQ ID NO: 6539; WAN024FFK; Start 173; Stop 197
tctgccaagctcatatcaatttgtt

SEQ ID NO: 441748 - DNA, 25 bp, Artificial
  probe
  misc_feature (1)..(25): SEQ ID NO: 6539; WAN024FFK; Start 172; Stop 196
ttctgccaagctcatatcaatttgt

SEQ ID NO: 441749 - DNA, 25 bp, Artificial
  probe
  misc_feature (1)..(25): SEQ ID NO: 6539; WAN024FFK; Start 170; Stop 194
aattctgccaagctcatatcaattt

SEQ ID NO: 441750 - DNA, 25 bp, Artificial
  probe
  misc_feature (1)..(25): SEQ ID NO: 6539; WAN024FFK; Start 175; Stop 199
tgccaagctcatatcaatttgttca

SEQ ID NO: 441751 - DNA, 25 bp, Artificial
  probe
  misc_feature (1)..(25): SEQ ID NO: 6540; WAN024BZV; Start 119; Stop 143
tggctgagaacacaagattagaatt

SEQ ID NO: 441752 - DNA, 25 bp, Artificial
  probe
  misc_feature (1)..(25): SEQ ID NO: 6540; WAN024BZV; Start 118; Stop 142
ttggctgagaacacaagattagaat

SEQ ID NO: 441753 - DNA, 25 bp, Artificial
  probe
  misc_feature (1)..(25): SEQ ID NO: 6540; WAN024BZV; Start 120; Stop 144
ggctgagaacacaagattagaattt

SEQ ID NO: 441754 - DNA, 25 bp, Artificial
  probe
  misc_feature (1)..(25): SEQ ID NO: 6540; WAN024BZV; Start 117; Stop 141
tttggctgagaacacaagattagaa

SEQ ID NO: 441755 - DNA, 25 bp, Artificial
  probe
  misc_feature (1)..(25): SEQ ID NO: 6540; WAN024BZV; Start 114; Stop 138
aagtttggctgagaacacaagatta

SEQ ID NO: 441756 - DNA, 25 bp, Artificial
  probe
  misc_feature (1)..(25): SEQ ID NO: 6540; WAN024BZV; Start 128; Stop 152
acacaagattagaatttgctcatca

SEQ ID NO: 441757 - DNA, 25 bp, Artificial
  probe
  misc_feature (1)..(25): SEQ ID NO: 6540; WAN024BZV; Start 116; Stop 140
gtttggctgagaacacaagattaga

SEQ ID NO: 441758 - DNA, 25 bp, Artificial
  probe
  misc_feature (1)..(25): SEQ ID NO: 6540; WAN024BZV; Start 115; Stop 139
agtttggctgagaacacaagattag

SEQ ID NO: 441759 - DNA, 25 bp, Artificial
  probe
  misc_feature (1)..(25): SEQ ID NO: 6540; WAN024BZV; Start 125; Stop 149
agaacacaagattagaatttgctca

SEQ ID NO: 441760 - DNA, 25 bp, Artificial
  probe
  misc_feature (1)..(25): SEQ ID NO: 6540; WAN024BZV; Start 123; Stop 147
tgagaacacaagattagaatttgct

SEQ ID NO: 441761 - DNA, 25 bp, Artificial
  probe
  misc_feature (1)..(25): SEQ ID NO: 6540; WAN024BZV; Start 122; Stop 146
ctgagaacacaagattagaatttgc

SEQ ID NO: 441762 - DNA, 25 bp, Artificial
  probe
  misc_feature (1)..(25): SEQ ID NO: 6540; WAN024BZV; Start 121; Stop 145
gctgagaacacaagattagaatttg

SEQ ID NO: 441763 - DNA, 25 bp, Artificial
  probe
  misc_feature (1)..(25): SEQ ID NO: 6540; WAN024BZV; Start 124; Stop 148
gagaacacaagattagaatttgctc

SEQ ID NO: 441764 - DNA, 25 bp, Artificial
  probe
  misc_feature (1)..(25): SEQ ID NO: 6540; WAN024BZV; Start 65; Stop 89
ctatcctcaaaccaaagattcgtgc

SEQ ID NO: 441765 - DNA, 25 bp, Artificial
  probe
  misc_feature (1)..(25): SEQ ID NO: 6540; WAN024BZV; Start 64; Stop 88
gctatcctcaaaccaaagattcgtg

SEQ ID NO: 441766 - DNA, 25 bp, Artificial
  probe
  misc_feature (1)..(25): SEQ ID NO: 6540; WAN024BZV; Start 127; Stop 151
aacacaagattagaatttgctcatc

SEQ ID NO: 441767 - DNA, 25 bp, Artificial
  probe
  misc_feature (1)..(25): SEQ ID NO: 6540; WAN024BZV; Start 126; Stop 150
gaacacaagattagaatttgctcat

SEQ ID NO: 441768 - DNA, 25 bp, Artificial
  probe
  misc_feature (1)..(25): SEQ ID NO: 6540; WAN024BZV; Start 166; Stop 190
ggtatgcttggagcctactatcatt

SEQ ID NO: 441769 - DNA, 25 bp, Artificial
  probe
  misc_feature (1)..(25): SEQ ID NO: 6540; WAN024BZV; Start 129; Stop 153
cacaagattagaatttgctcatcat

SEQ ID NO: 441770 - DNA, 25 bp, Artificial
  probe
  misc_feature (1)..(25): SEQ ID NO: 6540; WAN024BZV; Start 113; Stop 137
caagtttggctgagaacacaagatt

SEQ ID NO: 441771 - DNA, 25 bp, Artificial
  probe
  misc_feature (1)..(25): SEQ ID NO: 6540; WAN024BZV; Start 60; Stop 84
agaagctatcctcaaaccaaagatt

SEQ ID NO: 441772 - DNA, 25 bp, Artificial
  probe
  misc_feature (1)..(25): SEQ ID NO: 6540; WAN024BZV; Start 59; Stop 83
aagaagctatcctcaaaccaaagat

SEQ ID NO: 441773 - DNA, 25 bp, Artificial
  probe
  misc_feature (1)..(25): SEQ ID NO: 6540; WAN024BZV; Start 61; Stop 85
gaagctatcctcaaaccaaagattc

SEQ ID NO: 441774 - DNA, 25 bp, Artificial
  probe
  misc_feature (1)..(25): SEQ ID NO: 6540; WAN024BZV; Start 58; Stop 82
caagaagctatcctcaaaccaaaga

SEQ ID NO: 441775 - DNA, 25 bp, Artificial
  probe
  misc_feature (1)..(25): SEQ ID NO: 6540; WAN024BZV; Start 131; Stop 155
caagattagaatttgctcatcatca

SEQ ID NO: 441776 - DNA, 25 bp, Artificial
  probe
  misc_feature (1)..(25): SEQ ID NO: 6540; WAN024BZV; Start 130; Stop 154
acaagattagaatttgctcatcatc

SEQ ID NO: 441777 - DNA, 25 bp, Artificial
  probe
  misc_feature (1)..(25): SEQ ID NO: 6540; WAN024BZV; Start 57; Stop 81
acaagaagctatcctcaaaccaaag

SEQ ID NO: 441778 - DNA, 25 bp, Artificial
  probe
  misc_feature (1)..(25): SEQ ID NO: 6540; WAN024BZV; Start 56; Stop 80
gacaagaagctatcctcaaaccaaa

SEQ ID NO: 441779 - DNA, 25 bp, Artificial
  probe
  misc_feature (1)..(25): SEQ ID NO: 6540; WAN024BZV; Start 62; Stop 86
aagctatcctcaaaccaaagattcg

SEQ ID NO: 441780 - DNA, 25 bp, Artificial
  probe
  misc_feature (1)..(25): SEQ ID NO: 6540; WAN024BZV; Start 165; Stop 189
tggtatgcttggagcctactatcat

SEQ ID NO: 441781 - DNA, 25 bp, Artificial
  probe
  misc_feature (1)..(25): SEQ ID NO: 6540; WAN024BZV; Start 167; Stop 191
gtatgcttggagcctactatcattt

SEQ ID NO: 441782 - DNA, 25 bp, Artificial
  probe
  misc_feature (1)..(25): SEQ ID NO: 6540; WAN024BZV; Start 63; Stop 87
agctatcctcaaaccaaagattcgt

SEQ ID NO: 441783 - DNA, 25 bp, Artificial
  probe
  misc_feature (1)..(25): SEQ ID NO: 6540; WAN024BZV; Start 132; Stop 156
aagattagaatttgctcatcatcaa

SEQ ID NO: 441784 - DNA, 25 bp, Artificial
  probe
  misc_feature (1)..(25): SEQ ID NO: 6541; WAN024C8W; Start 235; Stop 259
atatggtacggagttgacagaatac

SEQ ID NO: 441785 - DNA, 25 bp, Artificial
  probe
  misc_feature (1)..(25): SEQ ID NO: 6541; WAN024C8W; Start 233; Stop 257
gaatatggtacggagttgacagaat

SEQ ID NO: 441786 - DNA, 25 bp, Artificial
  probe
  misc_feature (1)..(25): SEQ ID NO: 6541; WAN024C8W; Start 234; Stop 258
aatatggtacggagttgacagaata

SEQ ID NO: 441787 - DNA, 25 bp, Artificial
  probe
  misc_feature (1)..(25): SEQ ID NO: 6541; WAN024C8W; Start 232; Stop 256
ggaatatggtacggagttgacagaa

SEQ ID NO: 441788 - DNA, 25 bp, Artificial
  probe
  misc_feature (1)..(25): SEQ ID NO: 6541; WAN024C8W; Start 230; Stop 254
aaggaatatggtacggagttgacag

SEQ ID NO: 441789 - DNA, 25 bp, Artificial
  probe
  misc_feature (1)..(25): SEQ ID NO: 6541; WAN024C8W; Start 229; Stop 253
gaaggaatatggtacggagttgaca

SEQ ID NO: 441790 - DNA, 25 bp, Artificial
  probe
  misc_feature (1)..(25): SEQ ID NO: 6541; WAN024C8W; Start 409; Stop 433
agaaggttcgcaacttacaagagag

SEQ ID NO: 441791 - DNA, 25 bp, Artificial
  probe
  misc_feature (1)..(25): SEQ ID NO: 6541; WAN024C8W; Start 289; Stop 313
aacgcaaagaaacgattcatagatt

SEQ ID NO: 441792 - DNA, 25 bp, Artificial
  probe
  misc_feature (1)..(25): SEQ ID NO: 6541; WAN024C8W; Start 288; Stop 312
gaacgcaaagaaacgattcatagat

SEQ ID NO: 441793 - DNA, 25 bp, Artificial
  probe
  misc_feature (1)..(25): SEQ ID NO: 6541; WAN024C8W; Start 290; Stop 314
acgcaaagaaacgattcatagatta

SEQ ID NO: 441794 - DNA, 25 bp, Artificial
  probe
  misc_feature (1)..(25): SEQ ID NO: 6541; WAN024C8W; Start 291; Stop 315
cgcaaagaaacgattcatagattac

SEQ ID NO: 441795 - DNA, 25 bp, Artificial
  probe
  misc_feature (1)..(25): SEQ ID NO: 6541; WAN024C8W; Start 231; Stop 255
aggaatatggtacggagttgacaga

SEQ ID NO: 441796 - DNA, 25 bp, Artificial
  probe
  misc_feature (1)..(25): SEQ ID NO: 6541; WAN024C8W; Start 452; Stop 476
atctggaaagactcaagagaattgt

SEQ ID NO: 441797 - DNA, 25 bp, Artificial
  probe
  misc_feature (1)..(25): SEQ ID NO: 6541; WAN024C8W; Start 408; Stop 432
cagaaggttcgcaacttacaagaga

SEQ ID NO: 441798 - DNA, 25 bp, Artificial
  probe
  misc_feature (1)..(25): SEQ ID NO: 6541; WAN024C8W; Start 248; Stop 272
ttgacagaatacccgatgaagaact

SEQ ID NO: 441799 - DNA, 25 bp, Artificial
  probe
  misc_feature (1)..(25): SEQ ID NO: 6541; WAN024C8W; Start 246; Stop 270
agttgacagaatacccgatgaagaa

SEQ ID NO: 441800 - DNA, 25 bp, Artificial
  probe
  misc_feature (1)..(25): SEQ ID NO: 6541; WAN024C8W; Start 551; Stop 575
ttctcagaaggatctacgaagtttc

SEQ ID NO: 441801 - DNA, 25 bp, Artificial
  probe
  misc_feature (1)..(25): SEQ ID NO: 6541; WAN024C8W; Start 550; Stop 574
tttctcagaaggatctacgaagttt

SEQ ID NO: 441802 - DNA, 25 bp, Artificial
  probe
  misc_feature (1)..(25): SEQ ID NO: 6541; WAN024C8W; Start 549; Stop 573
gtttctcagaaggatctacgaagtt

SEQ ID NO: 441803 - DNA, 25 bp, Artificial
  probe
  misc_feature (1)..(25): SEQ ID NO: 6541; WAN024C8W; Start 228; Stop 252
cgaaggaatatggtacggagttgac

SEQ ID NO: 441804 - DNA, 25 bp, Artificial
  probe
  misc_feature (1)..(25): SEQ ID NO: 6541; WAN024C8W; Start 450; Stop 474
cgatctggaaagactcaagagaatt

SEQ ID NO: 441805 - DNA, 25 bp, Artificial
  probe
  misc_feature (1)..(25): SEQ ID NO: 6541; WAN024C8W; Start 247; Stop 271
gttgacagaatacccgatgaagaac

SEQ ID NO: 441806 - DNA, 25 bp, Artificial
  probe
  misc_feature (1)..(25): SEQ ID NO: 6541; WAN024C8W; Start 451; Stop 475
gatctggaaagactcaagagaattg

SEQ ID NO: 441807 - DNA, 25 bp, Artificial
  probe
  misc_feature (1)..(25): SEQ ID NO: 6541; WAN024C8W; Start 553; Stop 577
ctcagaaggatctacgaagtttcac

SEQ ID NO: 441808 - DNA, 25 bp, Artificial
  probe
  misc_feature (1)..(25): SEQ ID NO: 6541; WAN024C8W; Start 548; Stop 572
agtttctcagaaggatctacgaagt

SEQ ID NO: 441809 - DNA, 25 bp, Artificial
  probe
  misc_feature (1)..(25): SEQ ID NO: 6541; WAN024C8W; Start 455; Stop 479
tggaaagactcaagagaattgtcaa

SEQ ID NO: 441810 - DNA, 25 bp, Artificial
  probe
  misc_feature (1)..(25): SEQ ID NO: 6541; WAN024C8W; Start 249; Stop 273
tgacagaatacccgatgaagaactc

SEQ ID NO: 441811 - DNA, 25 bp, Artificial
  probe
  misc_feature (1)..(25): SEQ ID NO: 6541; WAN024C8W; Start 245; Stop 269
gagttgacagaatacccgatgaaga

SEQ ID NO: 441812 - DNA, 25 bp, Artificial
  probe
  misc_feature (1)..(25): SEQ ID NO: 6541; WAN024C8W; Start 552; Stop 576
tctcagaaggatctacgaagtttca

SEQ ID NO: 441813 - DNA, 25 bp, Artificial
  probe
  misc_feature (1)..(25): SEQ ID NO: 6541; WAN024C8W; Start 453; Stop 477
tctggaaagactcaagagaattgtc

SEQ ID NO: 441814 - DNA, 25 bp, Artificial
  probe
  misc_feature (1)..(25): SEQ ID NO: 6541; WAN024C8W; Start 250; Stop 274
gacagaatacccgatgaagaactct

SEQ ID NO: 441815 - DNA, 25 bp, Artificial
  probe
  misc_feature (1)..(25): SEQ ID NO: 6541; WAN024C8W; Start 454; Stop 478
ctggaaagactcaagagaattgtca

SEQ ID NO: 441816 - DNA, 25 bp, Artificial
  probe
  misc_feature (1)..(25): SEQ ID NO: 6541; WAN024C8W; Start 543; Stop 567
aaaggagtttctcagaaggatctac

SEQ ID NO: 441817 - DNA, 25 bp, Artificial
  probe
  misc_feature (1)..(25): SEQ ID NO: 6542; WAN024AUQ; Start 210; Stop 234
ggaagaaaagatagatggagttgct

SEQ ID NO: 441818 - DNA, 25 bp, Artificial
  probe
  misc_feature (1)..(25): SEQ ID NO: 6542; WAN024AUQ; Start 212; Stop 236
aagaaaagatagatggagttgctac

SEQ ID NO: 441819 - DNA, 25 bp, Artificial
  probe
  misc_feature (1)..(25): SEQ ID NO: 6542; WAN024AUQ; Start 218; Stop 242
agatagatggagttgctacttttca

SEQ ID NO: 441820 - DNA, 25 bp, Artificial
  probe
  misc_feature (1)..(25): SEQ ID NO: 6542; WAN024AUQ; Start 211; Stop 235
gaagaaaagatagatggagttgcta

SEQ ID NO: 441821 - DNA, 25 bp, Artificial
  probe
  misc_feature (1)..(25): SEQ ID NO: 6542; WAN024AUQ; Start 213; Stop 237
agaaaagatagatggagttgctact

SEQ ID NO: 441822 - DNA, 25 bp, Artificial
  probe
  misc_feature (1)..(25): SEQ ID NO: 6542; WAN024AUQ; Start 209; Stop 233
cggaagaaaagatagatggagttgc

SEQ ID NO: 441823 - DNA, 25 bp, Artificial
  probe
  misc_feature (1)..(25): SEQ ID NO: 6542; WAN024AUQ; Start 219; Stop 243
gatagatggagttgctacttttcat

SEQ ID NO: 441824 - DNA, 25 bp, Artificial
  probe
  misc_feature (1)..(25): SEQ ID NO: 6542; WAN024AUQ; Start 217; Stop 241
aagatagatggagttgctacttttc

SEQ ID NO: 441825 - DNA, 25 bp, Artificial
  probe
  misc_feature (1)..(25): SEQ ID NO: 6542; WAN024AUQ; Start 214; Stop 238
gaaaagatagatggagttgctactt

SEQ ID NO: 441826 - DNA, 25 bp, Artificial
  probe
  misc_feature (1)..(25): SEQ ID NO: 6542; WAN024AUQ; Start 220; Stop 244
atagatggagttgctacttttcatg

SEQ ID NO: 441827 - DNA, 25 bp, Artificial
  probe
  misc_feature (1)..(25): SEQ ID NO: 6542; WAN024AUQ; Start 171; Stop 195
gcttccaaaacgtgaaatcttgatt

SEQ ID NO: 441828 - DNA, 25 bp, Artificial
  probe
  misc_feature (1)..(25): SEQ ID NO: 6542; WAN024AUQ; Start 185; Stop 209
aaatcttgattttgacacgtaaccc

SEQ ID NO: 441829 - DNA, 25 bp, Artificial
  probe
  misc_feature (1)..(25): SEQ ID NO: 6542; WAN024AUQ; Start 184; Stop 208
gaaatcttgattttgacacgtaacc

SEQ ID NO: 441830 - DNA, 25 bp, Artificial
  probe
  misc_feature (1)..(25): SEQ ID NO: 6542; WAN024AUQ; Start 172; Stop 196
cttccaaaacgtgaaatcttgattt

SEQ ID NO: 441831 - DNA, 25 bp, Artificial
  probe
  misc_feature (1)..(25): SEQ ID NO: 6542; WAN024AUQ; Start 186; Stop 210
aatcttgattttgacacgtaacccg

SEQ ID NO: 441832 - DNA, 25 bp, Artificial
  probe
  misc_feature (1)..(25): SEQ ID NO: 6542; WAN024AUQ; Start 178; Stop 202
aaacgtgaaatcttgattttgacac

SEQ ID NO: 441833 - DNA, 25 bp, Artificial
  probe
  misc_feature (1)..(25): SEQ ID NO: 6542; WAN024AUQ; Start 216; Stop 240
aaagatagatggagttgctactttt

SEQ ID NO: 441834 - DNA, 25 bp, Artificial
  probe
  misc_feature (1)..(25): SEQ ID NO: 6542; WAN024AUQ; Start 215; Stop 239
aaaagatagatggagttgctacttt

SEQ ID NO: 441835 - DNA, 25 bp, Artificial
  probe
  misc_feature (1)..(25): SEQ ID NO: 6542; WAN024AUQ; Start 168; Stop 192
cttgcttccaaaacgtgaaatcttg

SEQ ID NO: 441836 - DNA, 25 bp, Artificial
  probe
  misc_feature (1)..(25): SEQ ID NO: 6542; WAN024AUQ; Start 183; Stop 207
tgaaatcttgattttgacacgtaac

SEQ ID NO: 441837 - DNA, 25 bp, Artificial
  probe
  misc_feature (1)..(25): SEQ ID NO: 6542; WAN024AUQ; Start 170; Stop 194
tgcttccaaaacgtgaaatcttgat

SEQ ID NO: 441838 - DNA, 25 bp, Artificial
  probe
  misc_feature (1)..(25): SEQ ID NO: 6542; WAN024AUQ; Start 203; Stop 227
gtaacccggaagaaaagatagatgg

SEQ ID NO: 441839 - DNA, 25 bp, Artificial
  probe
  misc_feature (1)..(25): SEQ ID NO: 6542; WAN024AUQ; Start 204; Stop 228
taacccggaagaaaagatagatgga

SEQ ID NO: 441840 - DNA, 25 bp, Artificial
  probe
  misc_feature (1)..(25): SEQ ID NO: 6542; WAN024AUQ; Start 177; Stop 201
aaaacgtgaaatcttgattttgaca

SEQ ID NO: 441841 - DNA, 25 bp, Artificial
  probe
  misc_feature (1)..(25): SEQ ID NO: 6542; WAN024AUQ; Start 169; Stop 193
ttgcttccaaaacgtgaaatcttga

SEQ ID NO: 441842 - DNA, 25 bp, Artificial
  probe
  misc_feature (1)..(25): SEQ ID NO: 6542; WAN024AUQ; Start 182; Stop 206
gtgaaatcttgattttgacacgtaa

SEQ ID NO: 441843 - DNA, 25 bp, Artificial
  probe
  misc_feature (1)..(25): SEQ ID NO: 6542; WAN024AUQ; Start 173; Stop 197
ttccaaaacgtgaaatcttgatttt

SEQ ID NO: 441844 - DNA, 25 bp, Artificial
  probe
  misc_feature (1)..(25): SEQ ID NO: 6542; WAN024AUQ; Start 208; Stop 232
ccggaagaaaagatagatggagttg

SEQ ID NO: 441845 - DNA, 25 bp, Artificial
  probe
  misc_feature (1)..(25): SEQ ID NO: 6542; WAN024AUQ; Start 202; Stop 226
cgtaacccggaagaaaagatagatg

SEQ ID NO: 441846 - DNA, 25 bp, Artificial
  probe
  misc_feature (1)..(25): SEQ ID NO: 6542; WAN024AUQ; Start 201; Stop 225
acgtaacccggaagaaaagatagat

SEQ ID NO: 441847 - DNA, 25 bp, Artificial
  probe
  misc_feature (1)..(25): SEQ ID NO: 6542; WAN024AUQ; Start 207; Stop 231
cccggaagaaaagatagatggagtt

SEQ ID NO: 441848 - DNA, 25 bp, Artificial
  probe
  misc_feature (1)..(25): SEQ ID NO: 6542; WAN024AUQ; Start 205; Stop 229
aacccggaagaaaagatagatggag

SEQ ID NO: 441849 - DNA, 25 bp, Artificial
  probe
  misc_feature (1)..(25): SEQ ID NO: 6542; WAN024AUQ; Start 223; Stop 247
gatggagttgctacttttcatgatg

SEQ ID NO: 441850 - DNA, 25 bp, Artificial
  probe
  misc_feature (1)..(25): SEQ ID NO: 6543; WAN024DVK; Start 703; Stop 727
cctagatggtggattattggataca

SEQ ID NO: 441851 - DNA, 25 bp, Artificial
  probe
  misc_feature (1)..(25): SEQ ID NO: 6543; WAN024DVK; Start 712; Stop 736
tggattattggatacacaggtaatg

SEQ ID NO: 441852 - DNA, 25 bp, Artificial
  probe
  misc_feature (1)..(25): SEQ ID NO: 6543; WAN024DVK; Start 710; Stop 734
ggtggattattggatacacaggtaa

SEQ ID NO: 441853 - DNA, 25 bp, Artificial
  probe
  misc_feature (1)..(25): SEQ ID NO: 6543; WAN024DVK; Start 706; Stop 730
agatggtggattattggatacacag

SEQ ID NO: 441854 - DNA, 25 bp, Artificial
  probe
  misc_feature (1)..(25): SEQ ID NO: 6543; WAN024DVK; Start 53; Stop 77
ttctagtagtcataggtcatgtgtt

SEQ ID NO: 441855 - DNA, 25 bp, Artificial
  probe
  misc_feature (1)..(25): SEQ ID NO: 6543; WAN024DVK; Start 709; Stop 733
tggtggattattggatacacaggta

SEQ ID NO: 441856 - DNA, 25 bp, Artificial
  probe
  misc_feature (1)..(25): SEQ ID NO: 6543; WAN024DVK; Start 713; Stop 737
ggattattggatacacaggtaatgt

SEQ ID NO: 441857 - DNA, 25 bp, Artificial
  probe
  misc_feature (1)..(25): SEQ ID NO: 6543; WAN024DVK; Start 707; Stop 731
gatggtggattattggatacacagg

SEQ ID NO: 441858 - DNA, 25 bp, Artificial
  probe
  misc_feature (1)..(25): SEQ ID NO: 6543; WAN024DVK; Start 705; Stop 729
tagatggtggattattggatacaca

SEQ ID NO: 441859 - DNA, 25 bp, Artificial
  probe
  misc_feature (1)..(25): SEQ ID NO: 6543; WAN024DVK; Start 688; Stop 712
acggactataactatcctagatggt

SEQ ID NO: 441860 - DNA, 25 bp, Artificial
  probe
  misc_feature (1)..(25): SEQ ID NO: 6543; WAN024DVK; Start 689; Stop 713
cggactataactatcctagatggtg

SEQ ID NO: 441861 - DNA, 25 bp, Artificial
  probe
  misc_feature (1)..(25): SEQ ID NO: 6543; WAN024DVK; Start 702; Stop 726
tcctagatggtggattattggatac

SEQ ID NO: 441862 - DNA, 25 bp, Artificial
  probe
  misc_feature (1)..(25): SEQ ID NO: 6543; WAN024DVK; Start 708; Stop 732
atggtggattattggatacacaggt

SEQ ID NO: 441863 - DNA, 25 bp, Artificial
  probe
  misc_feature (1)..(25): SEQ ID NO: 6543; WAN024DVK; Start 690; Stop 714
ggactataactatcctagatggtgg

SEQ ID NO: 441864 - DNA, 25 bp, Artificial
  probe
  misc_feature (1)..(25): SEQ ID NO: 6543; WAN024DVK; Start 711; Stop 735
gtggattattggatacacaggtaat

SEQ ID NO: 441865 - DNA, 25 bp, Artificial
  probe
  misc_feature (1)..(25): SEQ ID NO: 6543; WAN024DVK; Start 704; Stop 728
ctagatggtggattattggatacac

SEQ ID NO: 441866 - DNA, 25 bp, Artificial
  probe
  misc_feature (1)..(25): SEQ ID NO: 6543; WAN024DVK; Start 921; Stop 945
tattgtcttgggctggtatttatca

SEQ ID NO: 441867 - DNA, 25 bp, Artificial
  probe
  misc_feature (1)..(25): SEQ ID NO: 6543; WAN024DVK; Start 687; Stop 711
aacggactataactatcctagatgg

SEQ ID NO: 441868 - DNA, 25 bp, Artificial
  probe
  misc_feature (1)..(25): SEQ ID NO: 6543; WAN024DVK; Start 920; Stop 944
gtattgtcttgggctggtatttatc

SEQ ID NO: 441869 - DNA, 25 bp, Artificial
  probe
  misc_feature (1)..(25): SEQ ID NO: 6543; WAN024DVK; Start 919; Stop 943
ggtattgtcttgggctggtatttat

SEQ ID NO: 441870 - DNA, 25 bp, Artificial
  probe
  misc_feature (1)..(25): SEQ ID NO: 6543; WAN024DVK; Start 910; Stop 934
attgttattggtattgtcttgggct

SEQ ID NO: 441871 - DNA, 25 bp, Artificial
  probe
  misc_feature (1)..(25): SEQ ID NO: 6543; WAN024DVK; Start 909; Stop 933
tattgttattggtattgtcttgggc

SEQ ID NO: 441872 - DNA, 25 bp, Artificial
  probe
  misc_feature (1)..(25): SEQ ID NO: 6543; WAN024DVK; Start 161; Stop 185
ttccagtattctttgctttatcagg

SEQ ID NO: 441873 - DNA, 25 bp, Artificial
  probe
  misc_feature (1)..(25): SEQ ID NO: 6543; WAN024DVK; Start 719; Stop 743
ttggatacacaggtaatgttatctt

SEQ ID NO: 441874 - DNA, 25 bp, Artificial
  probe
  misc_feature (1)..(25): SEQ ID NO: 6543; WAN024DVK; Start 163; Stop 187
ccagtattctttgctttatcaggat

SEQ ID NO: 441875 - DNA, 25 bp, Artificial
  probe
  misc_feature (1)..(25): SEQ ID NO: 6543; WAN024DVK; Start 691; Stop 715
gactataactatcctagatggtgga

SEQ ID NO: 441876 - DNA, 25 bp, Artificial
  probe
  misc_feature (1)..(25): SEQ ID NO: 6543; WAN024DVK; Start 104; Stop 128
ttacaagtgatgccaaatggttatc

SEQ ID NO: 441877 - DNA, 25 bp, Artificial
  probe
  misc_feature (1)..(25): SEQ ID NO: 6543; WAN024DVK; Start 103; Stop 127
tttacaagtgatgccaaatggttat

SEQ ID NO: 441878 - DNA, 25 bp, Artificial
  probe
  misc_feature (1)..(25): SEQ ID NO: 6543; WAN024DVK; Start 924; Stop 948
tgtcttgggctggtatttatcaata

SEQ ID NO: 441879 - DNA, 25 bp, Artificial
  probe
  misc_feature (1)..(25): SEQ ID NO: 6543; WAN024DVK; Start 923; Stop 947
ttgtcttgggctggtatttatcaat

SEQ ID NO: 441880 - DNA, 25 bp, Artificial
  probe
  misc_feature (1)..(25): SEQ ID NO: 6543; WAN024DVK; Start 922; Stop 946
attgtcttgggctggtatttatcaa

SEQ ID NO: 441881 - DNA, 25 bp, Artificial
  probe
  misc_feature (1)..(25): SEQ ID NO: 6543; WAN024DVK; Start 718; Stop 742
attggatacacaggtaatgttatct

SEQ ID NO: 441882 - DNA, 25 bp, Artificial
  probe
  misc_feature (1)..(25): SEQ ID NO: 6543; WAN024DVK; Start 915; Stop 939
tattggtattgtcttgggctggtat

SEQ ID NO: 441883 - DNA, 25 bp, Artificial
  probe
  misc_feature (1)..(25): SEQ ID NO: 6544; WAN024C2Z; Start 235; Stop 259
gccatagatgaagcggatgttatta

SEQ ID NO: 441884 - DNA, 25 bp, Artificial
  probe
  misc_feature (1)..(25): SEQ ID NO: 6544; WAN024C2Z; Start 802; Stop 826
gaacaaggcatcattgaacaagata

SEQ ID NO: 441885 - DNA, 25 bp, Artificial
  probe
  misc_feature (1)..(25): SEQ ID NO: 6544; WAN024C2Z; Start 629; Stop 653
cgagagacgctattgatacagagta

SEQ ID NO: 441886 - DNA, 25 bp, Artificial
  probe
  misc_feature (1)..(25): SEQ ID NO: 6544; WAN024C2Z; Start 803; Stop 827
aacaaggcatcattgaacaagataa

SEQ ID NO: 441887 - DNA, 25 bp, Artificial
  probe
  misc_feature (1)..(25): SEQ ID NO: 6544; WAN024C2Z; Start 236; Stop 260
ccatagatgaagcggatgttattat

SEQ ID NO: 441888 - DNA, 25 bp, Artificial
  probe
  misc_feature (1)..(25): SEQ ID NO: 6544; WAN024C2Z; Start 801; Stop 825
agaacaaggcatcattgaacaagat

SEQ ID NO: 441889 - DNA, 25 bp, Artificial
  probe
  misc_feature (1)..(25): SEQ ID NO: 6544; WAN024C2Z; Start 627; Stop 651
aacgagagacgctattgatacagag

SEQ ID NO: 441890 - DNA, 25 bp, Artificial
  probe
  misc_feature (1)..(25): SEQ ID NO: 6544; WAN024C2Z; Start 448; Stop 472
ttaggtcttggtgacttgttagatg

SEQ ID NO: 441891 - DNA, 25 bp, Artificial
  probe
  misc_feature (1)..(25): SEQ ID NO: 6544; WAN024C2Z; Start 646; Stop 670
acagagtatagttatgatggacaag

SEQ ID NO: 441892 - DNA, 25 bp, Artificial
  probe
  misc_feature (1)..(25): SEQ ID NO: 6544; WAN024C2Z; Start 630; Stop 654
gagagacgctattgatacagagtat

SEQ ID NO: 441893 - DNA, 25 bp, Artificial
  probe
  misc_feature (1)..(25): SEQ ID NO: 6544; WAN024C2Z; Start 800; Stop 824
cagaacaaggcatcattgaacaaga

SEQ ID NO: 441894 - DNA, 25 bp, Artificial
  probe
  misc_feature (1)..(25): SEQ ID NO: 6544; WAN024C2Z; Start 626; Stop 650
caacgagagacgctattgatacaga

SEQ ID NO: 441895 - DNA, 25 bp, Artificial
  probe
  misc_feature (1)..(25): SEQ ID NO: 6544; WAN024C2Z; Start 647; Stop 671
cagagtatagttatgatggacaaga

SEQ ID NO: 441896 - DNA, 25 bp, Artificial
  probe
  misc_feature (1)..(25): SEQ ID NO: 6544; WAN024C2Z; Start 633; Stop 657
agacgctattgatacagagtatagt

SEQ ID NO: 441897 - DNA, 25 bp, Artificial
  probe
  misc_feature (1)..(25): SEQ ID NO: 6544; WAN024C2Z; Start 867; Stop 891
cgtgattgtcgtaaataaatgggat

SEQ ID NO: 441898 - DNA, 25 bp, Artificial
  probe
  misc_feature (1)..(25): SEQ ID NO: 6544; WAN024C2Z; Start 864; Stop 888
agtcgtgattgtcgtaaataaatgg

SEQ ID NO: 441899 - DNA, 25 bp, Artificial
  probe
  misc_feature (1)..(25): SEQ ID NO: 6544; WAN024C2Z; Start 862; Stop 886
gcagtcgtgattgtcgtaaataaat

SEQ ID NO: 441900 - DNA, 25 bp, Artificial
  probe
  misc_feature (1)..(25): SEQ ID NO: 6544; WAN024C2Z; Start 625; Stop 649
acaacgagagacgctattgatacag

SEQ ID NO: 441901 - DNA, 25 bp, Artificial
  probe
  misc_feature (1)..(25): SEQ ID NO: 6544; WAN024C2Z; Start 624; Stop 648
gacaacgagagacgctattgataca

SEQ ID NO: 441902 - DNA, 25 bp, Artificial
  probe
  misc_feature (1)..(25): SEQ ID NO: 6544; WAN024C2Z; Start 866; Stop 890
tcgtgattgtcgtaaataaatggga

SEQ ID NO: 441903 - DNA, 25 bp, Artificial
  probe
  misc_feature (1)..(25): SEQ ID NO: 6544; WAN024C2Z; Start 865; Stop 889
gtcgtgattgtcgtaaataaatggg

SEQ ID NO: 441904 - DNA, 25 bp, Artificial
  probe
  misc_feature (1)..(25): SEQ ID NO: 6544; WAN024C2Z; Start 875; Stop 899
tcgtaaataaatgggatactgtgga

SEQ ID NO: 441905 - DNA, 25 bp, Artificial
  probe
  misc_feature (1)..(25): SEQ ID NO: 6544; WAN024C2Z; Start 874; Stop 898
gtcgtaaataaatgggatactgtgg

SEQ ID NO: 441906 - DNA, 25 bp, Artificial
  probe
  misc_feature (1)..(25): SEQ ID NO: 6544; WAN024C2Z; Start 631; Stop 655
agagacgctattgatacagagtata

SEQ ID NO: 441907 - DNA, 25 bp, Artificial
  probe
  misc_feature (1)..(25): SEQ ID NO: 6544; WAN024C2Z; Start 628; Stop 652
acgagagacgctattgatacagagt

SEQ ID NO: 441908 - DNA, 25 bp, Artificial
  probe
  misc_feature (1)..(25): SEQ ID NO: 6544; WAN024C2Z; Start 171; Stop 195
tacaggtggtattgaaattggtgat

SEQ ID NO: 441909 - DNA, 25 bp, Artificial
  probe
  misc_feature (1)..(25): SEQ ID NO: 6544; WAN024C2Z; Start 806; Stop 830
aaggcatcattgaacaagataaacg

SEQ ID NO: 441910 - DNA, 25 bp, Artificial
  probe
  misc_feature (1)..(25): SEQ ID NO: 6544; WAN024C2Z; Start 836; Stop 860
caggatatgcacatgaacaaggtaa

SEQ ID NO: 441911 - DNA, 25 bp, Artificial
  probe
  misc_feature (1)..(25): SEQ ID NO: 6544; WAN024C2Z; Start 863; Stop 887
cagtcgtgattgtcgtaaataaatg

SEQ ID NO: 441912 - DNA, 25 bp, Artificial
  probe
  misc_feature (1)..(25): SEQ ID NO: 6544; WAN024C2Z; Start 861; Stop 885
agcagtcgtgattgtcgtaaataaa

SEQ ID NO: 441913 - DNA, 25 bp, Artificial
  probe
  misc_feature (1)..(25): SEQ ID NO: 6544; WAN024C2Z; Start 860; Stop 884
aagcagtcgtgattgtcgtaaataa

SEQ ID NO: 441914 - DNA, 25 bp, Artificial
  probe
  misc_feature (1)..(25): SEQ ID NO: 6544; WAN024C2Z; Start 859; Stop 883
aaagcagtcgtgattgtcgtaaata

SEQ ID NO: 441915 - DNA, 25 bp, Artificial
  probe
  misc_feature (1)..(25): SEQ ID NO: 6544; WAN024C2Z; Start 858; Stop 882
taaagcagtcgtgattgtcgtaaat

SEQ ID NO: 441916 - DNA, 25 bp, Artificial
  probe
  misc_feature (1)..(25): SEQ ID NO: 6545; WAN024BOJ; Start 68; Stop 92
atatcgctaacaattcctcaagagt

SEQ ID NO: 441917 - DNA, 25 bp, Artificial
  probe
  misc_feature (1)..(25): SEQ ID NO: 6545; WAN024BOJ; Start 11; Stop 35
ttatcaattctagcggttcactaca

SEQ ID NO: 441918 - DNA, 25 bp, Artificial
  probe
  misc_feature (1)..(25): SEQ ID NO: 6545; WAN024BOJ; Start 69; Stop 93
tatcgctaacaattcctcaagagtt

SEQ ID NO: 441919 - DNA, 25 bp, Artificial
  probe
  misc_feature (1)..(25): SEQ ID NO: 6545; WAN024BOJ; Start 12; Stop 36
tatcaattctagcggttcactacac

SEQ ID NO: 441920 - DNA, 25 bp, Artificial
  probe
  misc_feature (1)..(25): SEQ ID NO: 6545; WAN024BOJ; Start 715; Stop 739
actgatatgaatactgttgctaggc

SEQ ID NO: 441921 - DNA, 25 bp, Artificial
  probe
  misc_feature (1)..(25): SEQ ID NO: 6545; WAN024BOJ; Start 950; Stop 974
gcaggcaatcagatactagagatat

SEQ ID NO: 441922 - DNA, 25 bp, Artificial
  probe
  misc_feature (1)..(25): SEQ ID NO: 6545; WAN024BOJ; Start 714; Stop 738
gactgatatgaatactgttgctagg

SEQ ID NO: 441923 - DNA, 25 bp, Artificial
  probe
  misc_feature (1)..(25): SEQ ID NO: 6545; WAN024BOJ; Start 711; Stop 735
attgactgatatgaatactgttgct

SEQ ID NO: 441924 - DNA, 25 bp, Artificial
  probe
  misc_feature (1)..(25): SEQ ID NO: 6545; WAN024BOJ; Start 949; Stop 973
ggcaggcaatcagatactagagata

SEQ ID NO: 441925 - DNA, 25 bp, Artificial
  probe
  misc_feature (1)..(25): SEQ ID NO: 6545; WAN024BOJ; Start 710; Stop 734
cattgactgatatgaatactgttgc

SEQ ID NO: 441926 - DNA, 25 bp, Artificial
  probe
  misc_feature (1)..(25): SEQ ID NO: 6545; WAN024BOJ; Start 1260; Stop 1284
tgtggtcataggaactctatctgat

SEQ ID NO: 441927 - DNA, 25 bp, Artificial
  probe
  misc_feature (1)..(25): SEQ ID NO: 6545; WAN024BOJ; Start 1456; Stop 1480
ttgactgacaataatggatgtggaa

SEQ ID NO: 441928 - DNA, 25 bp, Artificial
  probe
  misc_feature (1)..(25): SEQ ID NO: 6545; WAN024BOJ; Start 1259; Stop 1283
ttgtggtcataggaactctatctga

SEQ ID NO: 441929 - DNA, 25 bp, Artificial
  probe
  misc_feature (1)..(25): SEQ ID NO: 6545; WAN024BOJ; Start 1616; Stop 1640
gtattcaacgcttcactacctcaac

SEQ ID NO: 441930 - DNA, 25 bp, Artificial
  probe
  misc_feature (1)..(25): SEQ ID NO: 6545; WAN024BOJ; Start 1635; Stop 1659
ctcaacaggatatatggcagttagg

SEQ ID NO: 441931 - DNA, 25 bp, Artificial
  probe
  misc_feature (1)..(25): SEQ ID NO: 6545; WAN024BOJ; Start 1704; Stop 1728
gcaacaatccaagtctactaataac

SEQ ID NO: 441932 - DNA, 25 bp, Artificial
  probe
  misc_feature (1)..(25): SEQ ID NO: 6545; WAN024BOJ; Start 713; Stop 737
tgactgatatgaatactgttgctag

SEQ ID NO: 441933 - DNA, 25 bp, Artificial
  probe
  misc_feature (1)..(25): SEQ ID NO: 6545; WAN024BOJ; Start 13; Stop 37
atcaattctagcggttcactacact

SEQ ID NO: 441934 - DNA, 25 bp, Artificial
  probe
  misc_feature (1)..(25): SEQ ID NO: 6545; WAN024BOJ; Start 1617; Stop 1641
tattcaacgcttcactacctcaaca

SEQ ID NO: 441935 - DNA, 25 bp, Artificial
  probe
  misc_feature (1)..(25): SEQ ID NO: 6545; WAN024BOJ; Start 712; Stop 736
ttgactgatatgaatactgttgcta

SEQ ID NO: 441936 - DNA, 25 bp, Artificial
  probe
  misc_feature (1)..(25): SEQ ID NO: 6545; WAN024BOJ; Start 1261; Stop 1285
gtggtcataggaactctatctgata

SEQ ID NO: 441937 - DNA, 25 bp, Artificial
  probe
  misc_feature (1)..(25): SEQ ID NO: 6545; WAN024BOJ; Start 1931; Stop 1955
tcagaccatctacaacattattcaa

SEQ ID NO: 441938 - DNA, 25 bp, Artificial
  probe
  misc_feature (1)..(25): SEQ ID NO: 6545; WAN024BOJ; Start 1930; Stop 1954
ttcagaccatctacaacattattca

SEQ ID NO: 441939 - DNA, 25 bp, Artificial
  probe
  misc_feature (1)..(25): SEQ ID NO: 6545; WAN024BOJ; Start 1039; Stop 1063
acacctaacattattcaagttgtca

SEQ ID NO: 441940 - DNA, 25 bp, Artificial
  probe
  misc_feature (1)..(25): SEQ ID NO: 6545; WAN024BOJ; Start 14; Stop 38
tcaattctagcggttcactacactt

SEQ ID NO: 441941 - DNA, 25 bp, Artificial
  probe
  misc_feature (1)..(25): SEQ ID NO: 6545; WAN024BOJ; Start 76; Stop 100
aacaattcctcaagagttagttgga

SEQ ID NO: 441942 - DNA, 25 bp, Artificial
  probe
  misc_feature (1)..(25): SEQ ID NO: 6545; WAN024BOJ; Start 70; Stop 94
atcgctaacaattcctcaagagtta

SEQ ID NO: 441943 - DNA, 25 bp, Artificial
  probe
  misc_feature (1)..(25): SEQ ID NO: 6545; WAN024BOJ; Start 1041; Stop 1065
acctaacattattcaagttgtcagg

SEQ ID NO: 441944 - DNA, 25 bp, Artificial
  probe
  misc_feature (1)..(25): SEQ ID NO: 6545; WAN024BOJ; Start 366; Stop 390
cattcctcgatctagtagtgtaagc

SEQ ID NO: 441945 - DNA, 25 bp, Artificial
  probe
  misc_feature (1)..(25): SEQ ID NO: 6545; WAN024BOJ; Start 365; Stop 389
gcattcctcgatctagtagtgtaag

SEQ ID NO: 441946 - DNA, 25 bp, Artificial
  probe
  misc_feature (1)..(25): SEQ ID NO: 6545; WAN024BOJ; Start 1042; Stop 1066
cctaacattattcaagttgtcagga

SEQ ID NO: 441947 - DNA, 25 bp, Artificial
  probe
  misc_feature (1)..(25): SEQ ID NO: 6545; WAN024BOJ; Start 15; Stop 39
caattctagcggttcactacacttg

SEQ ID NO: 441948 - DNA, 25 bp, Artificial
  probe
  misc_feature (1)..(25): SEQ ID NO: 6545; WAN024BOJ; Start 364; Stop 388
agcattcctcgatctagtagtgtaa

SEQ ID NO: 441949 - DNA, 25 bp, Artificial
  probe
  misc_feature (1)..(25): SEQ ID NO: 6546; WAN024AUR; Start 204; Stop 228
taacctagaagaaacgatagatggg

SEQ ID NO: 441950 - DNA, 25 bp, Artificial
  probe
  misc_feature (1)..(25): SEQ ID NO: 6546; WAN024AUR; Start 203; Stop 227
gtaacctagaagaaacgatagatgg

SEQ ID NO: 441951 - DNA, 25 bp, Artificial
  probe
  misc_feature (1)..(25): SEQ ID NO: 6546; WAN024AUR; Start 58; Stop 82
gacaatcgtctaccttggcatttac

SEQ ID NO: 441952 - DNA, 25 bp, Artificial
  probe
  misc_feature (1)..(25): SEQ ID NO: 6546; WAN024AUR; Start 34; Stop 58
gatgaagagggtgtgattgggaaag

SEQ ID NO: 441953 - DNA, 25 bp, Artificial
  probe
  misc_feature (1)..(25): SEQ ID NO: 6546; WAN024AUR; Start 59; Stop 83
acaatcgtctaccttggcatttacc

SEQ ID NO: 441954 - DNA, 25 bp, Artificial
  probe
  misc_feature (1)..(25): SEQ ID NO: 6546; WAN024AUR; Start 219; Stop 243
gatagatggggttgctacttttcat

SEQ ID NO: 441955 - DNA, 25 bp, Artificial
  probe
  misc_feature (1)..(25): SEQ ID NO: 6546; WAN024AUR; Start 35; Stop 59
atgaagagggtgtgattgggaaaga

SEQ ID NO: 441956 - DNA, 25 bp, Artificial
  probe
  misc_feature (1)..(25): SEQ ID NO: 6546; WAN024AUR; Start 202; Stop 226
cgtaacctagaagaaacgatagatg

SEQ ID NO: 441957 - DNA, 25 bp, Artificial
  probe
  misc_feature (1)..(25): SEQ ID NO: 6546; WAN024AUR; Start 208; Stop 232
ctagaagaaacgatagatggggttg

SEQ ID NO: 441958 - DNA, 25 bp, Artificial
  probe
  misc_feature (1)..(25): SEQ ID NO: 6546; WAN024AUR; Start 61; Stop 85
aatcgtctaccttggcatttaccag

SEQ ID NO: 441959 - DNA, 25 bp, Artificial
  probe
  misc_feature (1)..(25): SEQ ID NO: 6546; WAN024AUR; Start 205; Stop 229
aacctagaagaaacgatagatgggg

SEQ ID NO: 441960 - DNA, 25 bp, Artificial
  probe
  misc_feature (1)..(25): SEQ ID NO: 6546; WAN024AUR; Start 220; Stop 244
atagatggggttgctacttttcatg

SEQ ID NO: 441961 - DNA, 25 bp, Artificial
  probe
  misc_feature (1)..(25): SEQ ID NO: 6546; WAN024AUR; Start 207; Stop 231
cctagaagaaacgatagatggggtt

SEQ ID NO: 441962 - DNA, 25 bp, Artificial
  probe
  misc_feature (1)..(25): SEQ ID NO: 6546; WAN024AUR; Start 60; Stop 84
caatcgtctaccttggcatttacca

SEQ ID NO: 441963 - DNA, 25 bp, Artificial
  probe
  misc_feature (1)..(25): SEQ ID NO: 6546; WAN024AUR; Start 142; Stop 166
gtaacctttgatggaatagggcgtc

SEQ ID NO: 441964 - DNA, 25 bp, Artificial
  probe
  misc_feature (1)..(25): SEQ ID NO: 6546; WAN024AUR; Start 216; Stop 240
aacgatagatggggttgctactttt

SEQ ID NO: 441965 - DNA, 25 bp, Artificial
  probe
  misc_feature (1)..(25): SEQ ID NO: 6546; WAN024AUR; Start 215; Stop 239
aaacgatagatggggttgctacttt

SEQ ID NO: 441966 - DNA, 25 bp, Artificial
  probe
  misc_feature (1)..(25): SEQ ID NO: 6546; WAN024AUR; Start 172; Stop 196
cttccacaacgggagactttgattt

SEQ ID NO: 441967 - DNA, 25 bp, Artificial
  probe
  misc_feature (1)..(25): SEQ ID NO: 6546; WAN024AUR; Start 200; Stop 224
cacgtaacctagaagaaacgataga

SEQ ID NO: 441968 - DNA, 25 bp, Artificial
  probe
  misc_feature (1)..(25): SEQ ID NO: 6546; WAN024AUR; Start 199; Stop 223
acacgtaacctagaagaaacgatag

SEQ ID NO: 441969 - DNA, 25 bp, Artificial
  probe
  misc_feature (1)..(25): SEQ ID NO: 6546; WAN024AUR; Start 198; Stop 222
gacacgtaacctagaagaaacgata

SEQ ID NO: 441970 - DNA, 25 bp, Artificial
  probe
  misc_feature (1)..(25): SEQ ID NO: 6546; WAN024AUR; Start 218; Stop 242
cgatagatggggttgctacttttca

SEQ ID NO: 441971 - DNA, 25 bp, Artificial
  probe
  misc_feature (1)..(25): SEQ ID NO: 6546; WAN024AUR; Start 217; Stop 241
acgatagatggggttgctacttttc

SEQ ID NO: 441972 - DNA, 25 bp, Artificial
  probe
  misc_feature (1)..(25): SEQ ID NO: 6546; WAN024AUR; Start 211; Stop 235
gaagaaacgatagatggggttgcta

SEQ ID NO: 441973 - DNA, 25 bp, Artificial
  probe
  misc_feature (1)..(25): SEQ ID NO: 6546; WAN024AUR; Start 209; Stop 233
tagaagaaacgatagatggggttgc

SEQ ID NO: 441974 - DNA, 25 bp, Artificial
  probe
  misc_feature (1)..(25): SEQ ID NO: 6546; WAN024AUR; Start 201; Stop 225
acgtaacctagaagaaacgatagat

SEQ ID NO: 441975 - DNA, 25 bp, Artificial
  probe
  misc_feature (1)..(25): SEQ ID NO: 6546; WAN024AUR; Start 191; Stop 215
tgattttgacacgtaacctagaaga

SEQ ID NO: 441976 - DNA, 25 bp, Artificial
  probe
  misc_feature (1)..(25): SEQ ID NO: 6546; WAN024AUR; Start 186; Stop 210
gactttgattttgacacgtaaccta

SEQ ID NO: 441977 - DNA, 25 bp, Artificial
  probe
  misc_feature (1)..(25): SEQ ID NO: 6546; WAN024AUR; Start 194; Stop 218
ttttgacacgtaacctagaagaaac

SEQ ID NO: 441978 - DNA, 25 bp, Artificial
  probe
  misc_feature (1)..(25): SEQ ID NO: 6546; WAN024AUR; Start 187; Stop 211
actttgattttgacacgtaacctag

SEQ ID NO: 441979 - DNA, 25 bp, Artificial
  probe
  misc_feature (1)..(25): SEQ ID NO: 6546; WAN024AUR; Start 184; Stop 208
gagactttgattttgacacgtaacc

SEQ ID NO: 441980 - DNA, 25 bp, Artificial
  probe
  misc_feature (1)..(25): SEQ ID NO: 6546; WAN024AUR; Start 183; Stop 207
ggagactttgattttgacacgtaac

SEQ ID NO: 441981 - DNA, 25 bp, Artificial
  probe
  misc_feature (1)..(25): SEQ ID NO: 6546; WAN024AUR; Start 214; Stop 238
gaaacgatagatggggttgctactt

SEQ ID NO: 441982 - DNA, 25 bp, Artificial
  probe
  misc_feature (1)..(25): SEQ ID NO: 6547; WAN024AUP; Start 339; Stop 363
agatgaagtaattgtcactcacatt

SEQ ID NO: 441983 - DNA, 25 bp, Artificial
  probe
  misc_feature (1)..(25): SEQ ID NO: 6547; WAN024AUP; Start 344; Stop 368
aagtaattgtcactcacattcatgc

SEQ ID NO: 441984 - DNA, 25 bp, Artificial
  probe
  misc_feature (1)..(25): SEQ ID NO: 6547; WAN024AUP; Start 346; Stop 370
gtaattgtcactcacattcatgctc

SEQ ID NO: 441985 - DNA, 25 bp, Artificial
  probe
  misc_feature (1)..(25): SEQ ID NO: 6547; WAN024AUP; Start 340; Stop 364
gatgaagtaattgtcactcacattc

SEQ ID NO: 441986 - DNA, 25 bp, Artificial
  probe
  misc_feature (1)..(25): SEQ ID NO: 6547; WAN024AUP; Start 345; Stop 369
agtaattgtcactcacattcatgct

SEQ ID NO: 441987 - DNA, 25 bp, Artificial
  probe
  misc_feature (1)..(25): SEQ ID NO: 6547; WAN024AUP; Start 337; Stop 361
ttagatgaagtaattgtcactcaca

SEQ ID NO: 441988 - DNA, 25 bp, Artificial
  probe
  misc_feature (1)..(25): SEQ ID NO: 6547; WAN024AUP; Start 343; Stop 367
gaagtaattgtcactcacattcatg

SEQ ID NO: 441989 - DNA, 25 bp, Artificial
  probe
  misc_feature (1)..(25): SEQ ID NO: 6547; WAN024AUP; Start 338; Stop 362
tagatgaagtaattgtcactcacat

SEQ ID NO: 441990 - DNA, 25 bp, Artificial
  probe
  misc_feature (1)..(25): SEQ ID NO: 6547; WAN024AUP; Start 347; Stop 371
taattgtcactcacattcatgctcg

SEQ ID NO: 441991 - DNA, 25 bp, Artificial
  probe
  misc_feature (1)..(25): SEQ ID NO: 6547; WAN024AUP; Start 105; Stop 129
ggaaacaactctgaatcatgctatc

SEQ ID NO: 441992 - DNA, 25 bp, Artificial
  probe
  misc_feature (1)..(25): SEQ ID NO: 6547; WAN024AUP; Start 104; Stop 128
aggaaacaactctgaatcatgctat

SEQ ID NO: 441993 - DNA, 25 bp, Artificial
  probe
  misc_feature (1)..(25): SEQ ID NO: 6547; WAN024AUP; Start 103; Stop 127
aaggaaacaactctgaatcatgcta

SEQ ID NO: 441994 - DNA, 25 bp, Artificial
  probe
  misc_feature (1)..(25): SEQ ID NO: 6547; WAN024AUP; Start 325; Stop 349
tttgagccctatttagatgaagtaa

SEQ ID NO: 441995 - DNA, 25 bp, Artificial
  probe
  misc_feature (1)..(25): SEQ ID NO: 6547; WAN024AUP; Start 329; Stop 353
agccctatttagatgaagtaattgt

SEQ ID NO: 441996 - DNA, 25 bp, Artificial
  probe
  misc_feature (1)..(25): SEQ ID NO: 6547; WAN024AUP; Start 326; Stop 350
ttgagccctatttagatgaagtaat

SEQ ID NO: 441997 - DNA, 25 bp, Artificial
  probe
  misc_feature (1)..(25): SEQ ID NO: 6547; WAN024AUP; Start 102; Stop 126
caaggaaacaactctgaatcatgct

SEQ ID NO: 441998 - DNA, 25 bp, Artificial
  probe
  misc_feature (1)..(25): SEQ ID NO: 6547; WAN024AUP; Start 342; Stop 366
tgaagtaattgtcactcacattcat

SEQ ID NO: 441999 - DNA, 25 bp, Artificial
  probe
  misc_feature (1)..(25): SEQ ID NO: 6547; WAN024AUP; Start 341; Stop 365
atgaagtaattgtcactcacattca

SEQ ID NO: 442000 - DNA, 25 bp, Artificial
  probe
  misc_feature (1)..(25): SEQ ID NO: 6547; WAN024AUP; Start 330; Stop 354
gccctatttagatgaagtaattgtc

SEQ ID NO: 442001 - DNA, 25 bp, Artificial
  probe
  misc_feature (1)..(25): SEQ ID NO: 6547; WAN024AUP; Start 327; Stop 351
tgagccctatttagatgaagtaatt

SEQ ID NO: 442002 - DNA, 25 bp, Artificial
  probe
  misc_feature (1)..(25): SEQ ID NO: 6547; WAN024AUP; Start 328; Stop 352
gagccctatttagatgaagtaattg

SEQ ID NO: 442003 - DNA, 25 bp, Artificial
  probe
  misc_feature (1)..(25): SEQ ID NO: 6547; WAN024AUP; Start 101; Stop 125
tcaaggaaacaactctgaatcatgc

SEQ ID NO: 442004 - DNA, 25 bp, Artificial
  probe
  misc_feature (1)..(25): SEQ ID NO: 6547; WAN024AUP; Start 94; Stop 118
caacatttcaaggaaacaactctga

SEQ ID NO: 442005 - DNA, 25 bp, Artificial
  probe
  misc_feature (1)..(25): SEQ ID NO: 6547; WAN024AUP; Start 336; Stop 360
tttagatgaagtaattgtcactcac

SEQ ID NO: 442006 - DNA, 25 bp, Artificial
  probe
  misc_feature (1)..(25): SEQ ID NO: 6547; WAN024AUP; Start 211; Stop 235
gaagaaaagatagatggggctgtta

SEQ ID NO: 442007 - DNA, 25 bp, Artificial
  probe
  misc_feature (1)..(25): SEQ ID NO: 6547; WAN024AUP; Start 212; Stop 236
aagaaaagatagatggggctgttac

SEQ ID NO: 442008 - DNA, 25 bp, Artificial
  probe
  misc_feature (1)..(25): SEQ ID NO: 6547; WAN024AUP; Start 93; Stop 117
gcaacatttcaaggaaacaactctg

SEQ ID NO: 442009 - DNA, 25 bp, Artificial
  probe
  misc_feature (1)..(25): SEQ ID NO: 6547; WAN024AUP; Start 217; Stop 241
aagatagatggggctgttacttttc

SEQ ID NO: 442010 - DNA, 25 bp, Artificial
  probe
  misc_feature (1)..(25): SEQ ID NO: 6547; WAN024AUP; Start 214; Stop 238
gaaaagatagatggggctgttactt

SEQ ID NO: 442011 - DNA, 25 bp, Artificial
  probe
  misc_feature (1)..(25): SEQ ID NO: 6547; WAN024AUP; Start 213; Stop 237
agaaaagatagatggggctgttact

SEQ ID NO: 442012 - DNA, 25 bp, Artificial
  probe
  misc_feature (1)..(25): SEQ ID NO: 6547; WAN024AUP; Start 348; Stop 372
aattgtcactcacattcatgctcgg

SEQ ID NO: 442013 - DNA, 25 bp, Artificial
  probe
  misc_feature (1)..(25): SEQ ID NO: 6547; WAN024AUP; Start 95; Stop 119
aacatttcaaggaaacaactctgaa

SEQ ID NO: 442014 - DNA, 25 bp, Artificial
  probe
  misc_feature (1)..(25): SEQ ID NO: 6547; WAN024AUP; Start 218; Stop 242
agatagatggggctgttacttttca

SEQ ID NO: 442015 - DNA, 25 bp, Artificial
  probe
  misc_feature (1)..(25): SEQ ID NO: 6548; WAN024AUM; Start 265; Stop 289
tggtatcaggctcaagataagaatc

SEQ ID NO: 442016 - DNA, 25 bp, Artificial
  probe
  misc_feature (1)..(25): SEQ ID NO: 6548; WAN024AUM; Start 331; Stop 355
gcttaccttgatgaagtgattgtca

SEQ ID NO: 442017 - DNA, 25 bp, Artificial
  probe
  misc_feature (1)..(25): SEQ ID NO: 6548; WAN024AUM; Start 264; Stop 288
ctggtatcaggctcaagataagaat

SEQ ID NO: 442018 - DNA, 25 bp, Artificial
  probe
  misc_feature (1)..(25): SEQ ID NO: 6548; WAN024AUM; Start 263; Stop 287
actggtatcaggctcaagataagaa

SEQ ID NO: 442019 - DNA, 25 bp, Artificial
  probe
  misc_feature (1)..(25): SEQ ID NO: 6548; WAN024AUM; Start 262; Stop 286
gactggtatcaggctcaagataaga

SEQ ID NO: 442020 - DNA, 25 bp, Artificial
  probe
  misc_feature (1)..(25): SEQ ID NO: 6548; WAN024AUM; Start 330; Stop 354
agcttaccttgatgaagtgattgtc

SEQ ID NO: 442021 - DNA, 25 bp, Artificial
  probe
  misc_feature (1)..(25): SEQ ID NO: 6548; WAN024AUM; Start 266; Stop 290
ggtatcaggctcaagataagaatct

SEQ ID NO: 442022 - DNA, 25 bp, Artificial
  probe
  misc_feature (1)..(25): SEQ ID NO: 6548; WAN024AUM; Start 261; Stop 285
cgactggtatcaggctcaagataag

SEQ ID NO: 442023 - DNA, 25 bp, Artificial
  probe
  misc_feature (1)..(25): SEQ ID NO: 6548; WAN024AUM; Start 376; Stop 400
gaaggagatacctatttccctggag

SEQ ID NO: 442024 - DNA, 25 bp, Artificial
  probe
  misc_feature (1)..(25): SEQ ID NO: 6548; WAN024AUM; Start 377; Stop 401
aaggagatacctatttccctggaga

SEQ ID NO: 442025 - DNA, 25 bp, Artificial
  probe
  misc_feature (1)..(25): SEQ ID NO: 6548; WAN024AUM; Start 260; Stop 284
tcgactggtatcaggctcaagataa

SEQ ID NO: 442026 - DNA, 25 bp, Artificial
  probe
  misc_feature (1)..(25): SEQ ID NO: 6548; WAN024AUM; Start 378; Stop 402
aggagatacctatttccctggagag

SEQ ID NO: 442027 - DNA, 25 bp, Artificial
  probe
  misc_feature (1)..(25): SEQ ID NO: 6548; WAN024AUM; Start 382; Stop 406
gatacctatttccctggagagcttg

SEQ ID NO: 442028 - DNA, 25 bp, Artificial
  probe
  misc_feature (1)..(25): SEQ ID NO: 6548; WAN024AUM; Start 381; Stop 405
agatacctatttccctggagagctt

SEQ ID NO: 442029 - DNA, 25 bp, Artificial
  probe
  misc_feature (1)..(25): SEQ ID NO: 6548; WAN024AUM; Start 328; Stop 352
gaagcttaccttgatgaagtgattg

SEQ ID NO: 442030 - DNA, 25 bp, Artificial
  probe
  misc_feature (1)..(25): SEQ ID NO: 6548; WAN024AUM; Start 212; Stop 236
aagaaaagatagacggggttactac

SEQ ID NO: 442031 - DNA, 25 bp, Artificial
  probe
  misc_feature (1)..(25): SEQ ID NO: 6548; WAN024AUM; Start 327; Stop 351
tgaagcttaccttgatgaagtgatt

SEQ ID NO: 442032 - DNA, 25 bp, Artificial
  probe
  misc_feature (1)..(25): SEQ ID NO: 6548; WAN024AUM; Start 326; Stop 350
ttgaagcttaccttgatgaagtgat

SEQ ID NO: 442033 - DNA, 25 bp, Artificial
  probe
  misc_feature (1)..(25): SEQ ID NO: 6548; WAN024AUM; Start 223; Stop 247
gacggggttactacttttcagaata

SEQ ID NO: 442034 - DNA, 25 bp, Artificial
  probe
  misc_feature (1)..(25): SEQ ID NO: 6548; WAN024AUM; Start 219; Stop 243
gatagacggggttactacttttcag

SEQ ID NO: 442035 - DNA, 25 bp, Artificial
  probe
  misc_feature (1)..(25): SEQ ID NO: 6548; WAN024AUM; Start 213; Stop 237
agaaaagatagacggggttactact

SEQ ID NO: 442036 - DNA, 25 bp, Artificial
  probe
  misc_feature (1)..(25): SEQ ID NO: 6548; WAN024AUM; Start 211; Stop 235
gaagaaaagatagacggggttacta

SEQ ID NO: 442037 - DNA, 25 bp, Artificial
  probe
  misc_feature (1)..(25): SEQ ID NO: 6548; WAN024AUM; Start 329; Stop 353
aagcttaccttgatgaagtgattgt

SEQ ID NO: 442038 - DNA, 25 bp, Artificial
  probe
  misc_feature (1)..(25): SEQ ID NO: 6548; WAN024AUM; Start 224; Stop 248
acggggttactacttttcagaatat

SEQ ID NO: 442039 - DNA, 25 bp, Artificial
  probe
  misc_feature (1)..(25): SEQ ID NO: 6548; WAN024AUM; Start 220; Stop 244
atagacggggttactacttttcaga

SEQ ID NO: 442040 - DNA, 25 bp, Artificial
  probe
  misc_feature (1)..(25): SEQ ID NO: 6548; WAN024AUM; Start 218; Stop 242
agatagacggggttactacttttca

SEQ ID NO: 442041 - DNA, 25 bp, Artificial
  probe
  misc_feature (1)..(25): SEQ ID NO: 6548; WAN024AUM; Start 217; Stop 241
aagatagacggggttactacttttc

SEQ ID NO: 442042 - DNA, 25 bp, Artificial
  probe
  misc_feature (1)..(25): SEQ ID NO: 6548; WAN024AUM; Start 214; Stop 238
gaaaagatagacggggttactactt

SEQ ID NO: 442043 - DNA, 25 bp, Artificial
  probe
  misc_feature (1)..(25): SEQ ID NO: 6548; WAN024AUM; Start 221; Stop 245
tagacggggttactacttttcagaa

SEQ ID NO: 442044 - DNA, 25 bp, Artificial
  probe
  misc_feature (1)..(25): SEQ ID NO: 6548; WAN024AUM; Start 259; Stop 283
ctcgactggtatcaggctcaagata

SEQ ID NO: 442045 - DNA, 25 bp, Artificial
  probe
  misc_feature (1)..(25): SEQ ID NO: 6548; WAN024AUM; Start 383; Stop 407
atacctatttccctggagagcttga

SEQ ID NO: 442046 - DNA, 25 bp, Artificial
  probe
  misc_feature (1)..(25): SEQ ID NO: 6548; WAN024AUM; Start 225; Stop 249
cggggttactacttttcagaatatc

SEQ ID NO: 442047 - DNA, 25 bp, Artificial
  probe
  misc_feature (1)..(25): SEQ ID NO: 6548; WAN024AUM; Start 204; Stop 228
taattcggaagaaaagatagacggg

SEQ ID NO: 442048 - DNA, 25 bp, Artificial
  probe
  misc_feature (1)..(25): SEQ ID NO: 6549; WAN024AUN; Start 45; Stop 69
tgtgattggtaaggataatcgtctg

SEQ ID NO: 442049 - DNA, 25 bp, Artificial
  probe
  misc_feature (1)..(25): SEQ ID NO: 6549; WAN024AUN; Start 44; Stop 68
gtgtgattggtaaggataatcgtct

SEQ ID NO: 442050 - DNA, 25 bp, Artificial
  probe
  misc_feature (1)..(25): SEQ ID NO: 6549; WAN024AUN; Start 265; Stop 289
tggtatcagtctcaagacaagaatc

SEQ ID NO: 442051 - DNA, 25 bp, Artificial
  probe
  misc_feature (1)..(25): SEQ ID NO: 6549; WAN024AUN; Start 264; Stop 288
ctggtatcagtctcaagacaagaat

SEQ ID NO: 442052 - DNA, 25 bp, Artificial
  probe
  misc_feature (1)..(25): SEQ ID NO: 6549; WAN024AUN; Start 266; Stop 290
ggtatcagtctcaagacaagaatct

SEQ ID NO: 442053 - DNA, 25 bp, Artificial
  probe
  misc_feature (1)..(25): SEQ ID NO: 6549; WAN024AUN; Start 474; Stop 498
taccatccaataccgtaagagaaag

SEQ ID NO: 442054 - DNA, 25 bp, Artificial
  probe
  misc_feature (1)..(25): SEQ ID NO: 6549; WAN024AUN; Start 43; Stop 67
ggtgtgattggtaaggataatcgtc

SEQ ID NO: 442055 - DNA, 25 bp, Artificial
  probe
  misc_feature (1)..(25): SEQ ID NO: 6549; WAN024AUN; Start 39; Stop 63
agagggtgtgattggtaaggataat

SEQ ID NO: 442056 - DNA, 25 bp, Artificial
  probe
  misc_feature (1)..(25): SEQ ID NO: 6549; WAN024AUN; Start 480; Stop 504
ccaataccgtaagagaaaggaagtc

SEQ ID NO: 442057 - DNA, 25 bp, Artificial
  probe
  misc_feature (1)..(25): SEQ ID NO: 6549; WAN024AUN; Start 38; Stop 62
aagagggtgtgattggtaaggataa

SEQ ID NO: 442058 - DNA, 25 bp, Artificial
  probe
  misc_feature (1)..(25): SEQ ID NO: 6549; WAN024AUN; Start 481; Stop 505
caataccgtaagagaaaggaagtct

SEQ ID NO: 442059 - DNA, 25 bp, Artificial
  probe
  misc_feature (1)..(25): SEQ ID NO: 6549; WAN024AUN; Start 46; Stop 70
gtgattggtaaggataatcgtctgc

SEQ ID NO: 442060 - DNA, 25 bp, Artificial
  probe
  misc_feature (1)..(25): SEQ ID NO: 6549; WAN024AUN; Start 290; Stop 314
tttatattctcggtggaaagcaaat

SEQ ID NO: 442061 - DNA, 25 bp, Artificial
  probe
  misc_feature (1)..(25): SEQ ID NO: 6549; WAN024AUN; Start 240; Stop 264
ttatgatgttcagtctgttctcgac

SEQ ID NO: 442062 - DNA, 25 bp, Artificial
  probe
  misc_feature (1)..(25): SEQ ID NO: 6549; WAN024AUN; Start 37; Stop 61
gaagagggtgtgattggtaaggata

SEQ ID NO: 442063 - DNA, 25 bp, Artificial
  probe
  misc_feature (1)..(25): SEQ ID NO: 6549; WAN024AUN; Start 291; Stop 315
ttatattctcggtggaaagcaaatt

SEQ ID NO: 442064 - DNA, 25 bp, Artificial
  probe
  misc_feature (1)..(25): SEQ ID NO: 6549; WAN024AUN; Start 483; Stop 507
ataccgtaagagaaaggaagtctaa

SEQ ID NO: 442065 - DNA, 25 bp, Artificial
  probe
  misc_feature (1)..(25): SEQ ID NO: 6549; WAN024AUN; Start 482; Stop 506
aataccgtaagagaaaggaagtcta

SEQ ID NO: 442066 - DNA, 25 bp, Artificial
  probe
  misc_feature (1)..(25): SEQ ID NO: 6549; WAN024AUN; Start 57; Stop 81
ggataatcgtctgccttggtatttg

SEQ ID NO: 442067 - DNA, 25 bp, Artificial
  probe
  misc_feature (1)..(25): SEQ ID NO: 6549; WAN024AUN; Start 391; Stop 415
tttcctgaagagtttgacttgtctc

SEQ ID NO: 442068 - DNA, 25 bp, Artificial
  probe
  misc_feature (1)..(25): SEQ ID NO: 6549; WAN024AUN; Start 48; Stop 72
gattggtaaggataatcgtctgcct

SEQ ID NO: 442069 - DNA, 25 bp, Artificial
  probe
  misc_feature (1)..(25): SEQ ID NO: 6549; WAN024AUN; Start 475; Stop 499
accatccaataccgtaagagaaagg

SEQ ID NO: 442070 - DNA, 25 bp, Artificial
  probe
  misc_feature (1)..(25): SEQ ID NO: 6549; WAN024AUN; Start 47; Stop 71
tgattggtaaggataatcgtctgcc

SEQ ID NO: 442071 - DNA, 25 bp, Artificial
  probe
  misc_feature (1)..(25): SEQ ID NO: 6549; WAN024AUN; Start 58; Stop 82
gataatcgtctgccttggtatttgc

SEQ ID NO: 442072 - DNA, 25 bp, Artificial
  probe
  misc_feature (1)..(25): SEQ ID NO: 6549; WAN024AUN; Start 478; Stop 502
atccaataccgtaagagaaaggaag

SEQ ID NO: 442073 - DNA, 25 bp, Artificial
  probe
  misc_feature (1)..(25): SEQ ID NO: 6549; WAN024AUN; Start 477; Stop 501
catccaataccgtaagagaaaggaa

SEQ ID NO: 442074 - DNA, 25 bp, Artificial
  probe
  misc_feature (1)..(25): SEQ ID NO: 6549; WAN024AUN; Start 473; Stop 497
ttaccatccaataccgtaagagaaa

SEQ ID NO: 442075 - DNA, 25 bp, Artificial
  probe
  misc_feature (1)..(25): SEQ ID NO: 6549; WAN024AUN; Start 472; Stop 496
tttaccatccaataccgtaagagaa

SEQ ID NO: 442076 - DNA, 25 bp, Artificial
  probe
  misc_feature (1)..(25): SEQ ID NO: 6549; WAN024AUN; Start 267; Stop 291
gtatcagtctcaagacaagaatctt

SEQ ID NO: 442077 - DNA, 25 bp, Artificial
  probe
  misc_feature (1)..(25): SEQ ID NO: 6549; WAN024AUN; Start 425; Stop 449
cagtttcaagcaaatcctatagcaa

SEQ ID NO: 442078 - DNA, 25 bp, Artificial
  probe
  misc_feature (1)..(25): SEQ ID NO: 6549; WAN024AUN; Start 423; Stop 447
gacagtttcaagcaaatcctatagc

SEQ ID NO: 442079 - DNA, 25 bp, Artificial
  probe
  misc_feature (1)..(25): SEQ ID NO: 6549; WAN024AUN; Start 479; Stop 503
tccaataccgtaagagaaaggaagt

SEQ ID NO: 442080 - DNA, 25 bp, Artificial
  probe
  misc_feature (1)..(25): SEQ ID NO: 6549; WAN024AUN; Start 40; Stop 64
gagggtgtgattggtaaggataatc

SEQ ID NO: 442081 - DNA, 25 bp, Artificial
  probe
  misc_feature (1)..(25): SEQ ID NO: 6550; WAN024AUO; Start 421; Stop 445
gagacagtttcaagcaaatcctatg

SEQ ID NO: 442082 - DNA, 25 bp, Artificial
  probe
  misc_feature (1)..(25): SEQ ID NO: 6550; WAN024AUO; Start 293; Stop 317
atattctcggtgggaagcagattta

SEQ ID NO: 442083 - DNA, 25 bp, Artificial
  probe
  misc_feature (1)..(25): SEQ ID NO: 6550; WAN024AUO; Start 292; Stop 316
tatattctcggtgggaagcagattt

SEQ ID NO: 442084 - DNA, 25 bp, Artificial
  probe
  misc_feature (1)..(25): SEQ ID NO: 6550; WAN024AUO; Start 286; Stop 310
aatctctatattctcggtgggaagc

SEQ ID NO: 442085 - DNA, 25 bp, Artificial
  probe
  misc_feature (1)..(25): SEQ ID NO: 6550; WAN024AUO; Start 291; Stop 315
ctatattctcggtgggaagcagatt

SEQ ID NO: 442086 - DNA, 25 bp, Artificial
  probe
  misc_feature (1)..(25): SEQ ID NO: 6550; WAN024AUO; Start 240; Stop 264
ttatgatgtccagtctgttctcgac

SEQ ID NO: 442087 - DNA, 25 bp, Artificial
  probe
  misc_feature (1)..(25): SEQ ID NO: 6550; WAN024AUO; Start 285; Stop 309
gaatctctatattctcggtgggaag

SEQ ID NO: 442088 - DNA, 25 bp, Artificial
  probe
  misc_feature (1)..(25): SEQ ID NO: 6550; WAN024AUO; Start 294; Stop 318
tattctcggtgggaagcagatttac

SEQ ID NO: 442089 - DNA, 25 bp, Artificial
  probe
  misc_feature (1)..(25): SEQ ID NO: 6550; WAN024AUO; Start 287; Stop 311
atctctatattctcggtgggaagca

SEQ ID NO: 442090 - DNA, 25 bp, Artificial
  probe
  misc_feature (1)..(25): SEQ ID NO: 6550; WAN024AUO; Start 290; Stop 314
tctatattctcggtgggaagcagat

SEQ ID NO: 442091 - DNA, 25 bp, Artificial
  probe
  misc_feature (1)..(25): SEQ ID NO: 6550; WAN024AUO; Start 435; Stop 459
caaatcctatgctaaagatgagaaa

SEQ ID NO: 442092 - DNA, 25 bp, Artificial
  probe
  misc_feature (1)..(25): SEQ ID NO: 6550; WAN024AUO; Start 239; Stop 263
tttatgatgtccagtctgttctcga

SEQ ID NO: 442093 - DNA, 25 bp, Artificial
  probe
  misc_feature (1)..(25): SEQ ID NO: 6550; WAN024AUO; Start 391; Stop 415
tttcctgaagagtttgacttgtccc

SEQ ID NO: 442094 - DNA, 25 bp, Artificial
  probe
  misc_feature (1)..(25): SEQ ID NO: 6550; WAN024AUO; Start 200; Stop 224
ctcgtaacccagaagaaaagataga

SEQ ID NO: 442095 - DNA, 25 bp, Artificial
  probe
  misc_feature (1)..(25): SEQ ID NO: 6550; WAN024AUO; Start 199; Stop 223
actcgtaacccagaagaaaagatag

SEQ ID NO: 442096 - DNA, 25 bp, Artificial
  probe
  misc_feature (1)..(25): SEQ ID NO: 6550; WAN024AUO; Start 198; Stop 222
gactcgtaacccagaagaaaagata

SEQ ID NO: 442097 - DNA, 25 bp, Artificial
  probe
  misc_feature (1)..(25): SEQ ID NO: 6550; WAN024AUO; Start 288; Stop 312
tctctatattctcggtgggaagcag

SEQ ID NO: 442098 - DNA, 25 bp, Artificial
  probe
  misc_feature (1)..(25): SEQ ID NO: 6550; WAN024AUO; Start 193; Stop 217
attttgactcgtaacccagaagaaa

SEQ ID NO: 442099 - DNA, 25 bp, Artificial
  probe
  misc_feature (1)..(25): SEQ ID NO: 6550; WAN024AUO; Start 202; Stop 226
cgtaacccagaagaaaagatagatg

SEQ ID NO: 442100 - DNA, 25 bp, Artificial
  probe
  misc_feature (1)..(25): SEQ ID NO: 6550; WAN024AUO; Start 289; Stop 313
ctctatattctcggtgggaagcaga

SEQ ID NO: 442101 - DNA, 25 bp, Artificial
  probe
  misc_feature (1)..(25): SEQ ID NO: 6550; WAN024AUO; Start 274; Stop 298
ggccaagacaagaatctctatattc

SEQ ID NO: 442102 - DNA, 25 bp, Artificial
  probe
  misc_feature (1)..(25): SEQ ID NO: 6550; WAN024AUO; Start 201; Stop 225
tcgtaacccagaagaaaagatagat

SEQ ID NO: 442103 - DNA, 25 bp, Artificial
  probe
  misc_feature (1)..(25): SEQ ID NO: 6550; WAN024AUO; Start 192; Stop 216
gattttgactcgtaacccagaagaa

SEQ ID NO: 442104 - DNA, 25 bp, Artificial
  probe
  misc_feature (1)..(25): SEQ ID NO: 6550; WAN024AUO; Start 210; Stop 234
agaagaaaagatagatggggttact

SEQ ID NO: 442105 - DNA, 25 bp, Artificial
  probe
  misc_feature (1)..(25): SEQ ID NO: 6550; WAN024AUO; Start 209; Stop 233
cagaagaaaagatagatggggttac

SEQ ID NO: 442106 - DNA, 25 bp, Artificial
  probe
  misc_feature (1)..(25): SEQ ID NO: 6550; WAN024AUO; Start 238; Stop 262
ttttatgatgtccagtctgttctcg

SEQ ID NO: 442107 - DNA, 25 bp, Artificial
  probe
  misc_feature (1)..(25): SEQ ID NO: 6550; WAN024AUO; Start 195; Stop 219
tttgactcgtaacccagaagaaaag

SEQ ID NO: 442108 - DNA, 25 bp, Artificial
  probe
  misc_feature (1)..(25): SEQ ID NO: 6550; WAN024AUO; Start 190; Stop 214
ttgattttgactcgtaacccagaag

SEQ ID NO: 442109 - DNA, 25 bp, Artificial
  probe
  misc_feature (1)..(25): SEQ ID NO: 6550; WAN024AUO; Start 189; Stop 213
cttgattttgactcgtaacccagaa

SEQ ID NO: 442110 - DNA, 25 bp, Artificial
  probe
  misc_feature (1)..(25): SEQ ID NO: 6550; WAN024AUO; Start 434; Stop 458
gcaaatcctatgctaaagatgagaa

SEQ ID NO: 442111 - DNA, 25 bp, Artificial
  probe
  misc_feature (1)..(25): SEQ ID NO: 6550; WAN024AUO; Start 197; Stop 221
tgactcgtaacccagaagaaaagat

SEQ ID NO: 442112 - DNA, 25 bp, Artificial
  probe
  misc_feature (1)..(25): SEQ ID NO: 6550; WAN024AUO; Start 273; Stop 297
gggccaagacaagaatctctatatt

SEQ ID NO: 442113 - DNA, 25 bp, Artificial
  probe
  misc_feature (1)..(25): SEQ ID NO: 6550; WAN024AUO; Start 196; Stop 220
ttgactcgtaacccagaagaaaaga

SEQ ID NO: 442114 - DNA, 25 bp, Artificial
  probe
  misc_feature (1)..(25): SEQ ID NO: 6551; WAN024BY2; Start 341; Stop 365
atgaacttggatacacagcagataa

SEQ ID NO: 442115 - DNA, 25 bp, Artificial
  probe
  misc_feature (1)..(25): SEQ ID NO: 6551; WAN024BY2; Start 627; Stop 651
ttatgctgaatggactaacgctatt

SEQ ID NO: 442116 - DNA, 25 bp, Artificial
  probe
  misc_feature (1)..(25): SEQ ID NO: 6551; WAN024BY2; Start 340; Stop 364
gatgaacttggatacacagcagata

SEQ ID NO: 442117 - DNA, 25 bp, Artificial
  probe
  misc_feature (1)..(25): SEQ ID NO: 6551; WAN024BY2; Start 596; Stop 620
aaccacctgtaactattcttatcgc

SEQ ID NO: 442118 - DNA, 25 bp, Artificial
  probe
  misc_feature (1)..(25): SEQ ID NO: 6551; WAN024BY2; Start 329; Stop 353
ttgatgaaggtgatgaacttggata

SEQ ID NO: 442119 - DNA, 25 bp, Artificial
  probe
  misc_feature (1)..(25): SEQ ID NO: 6551; WAN024BY2; Start 331; Stop 355
gatgaaggtgatgaacttggataca

SEQ ID NO: 442120 - DNA, 25 bp, Artificial
  probe
  misc_feature (1)..(25): SEQ ID NO: 6551; WAN024BY2; Start 330; Stop 354
tgatgaaggtgatgaacttggatac

SEQ ID NO: 442121 - DNA, 25 bp, Artificial
  probe
  misc_feature (1)..(25): SEQ ID NO: 6551; WAN024BY2; Start 328; Stop 352
cttgatgaaggtgatgaacttggat

SEQ ID NO: 442122 - DNA, 25 bp, Artificial
  probe
  misc_feature (1)..(25): SEQ ID NO: 6551; WAN024BY2; Start 326; Stop 350
aacttgatgaaggtgatgaacttgg

SEQ ID NO: 442123 - DNA, 25 bp, Artificial
  probe
  misc_feature (1)..(25): SEQ ID NO: 6551; WAN024BY2; Start 339; Stop 363
tgatgaacttggatacacagcagat

SEQ ID NO: 442124 - DNA, 25 bp, Artificial
  probe
  misc_feature (1)..(25): SEQ ID NO: 6551; WAN024BY2; Start 327; Stop 351
acttgatgaaggtgatgaacttgga

SEQ ID NO: 442125 - DNA, 25 bp, Artificial
  probe
  misc_feature (1)..(25): SEQ ID NO: 6551; WAN024BY2; Start 332; Stop 356
atgaaggtgatgaacttggatacac

SEQ ID NO: 442126 - DNA, 25 bp, Artificial
  probe
  misc_feature (1)..(25): SEQ ID NO: 6551; WAN024BY2; Start 637; Stop 661
tggactaacgctattcctgaattaa

SEQ ID NO: 442127 - DNA, 25 bp, Artificial
  probe
  misc_feature (1)..(25): SEQ ID NO: 6551; WAN024BY2; Start 635; Stop 659
aatggactaacgctattcctgaatt

SEQ ID NO: 442128 - DNA, 25 bp, Artificial
  probe
  misc_feature (1)..(25): SEQ ID NO: 6551; WAN024BY2; Start 636; Stop 660
atggactaacgctattcctgaatta

SEQ ID NO: 442129 - DNA, 25 bp, Artificial
  probe
  misc_feature (1)..(25): SEQ ID NO: 6551; WAN024BY2; Start 626; Stop 650
gttatgctgaatggactaacgctat

SEQ ID NO: 442130 - DNA, 25 bp, Artificial
  probe
  misc_feature (1)..(25): SEQ ID NO: 6551; WAN024BY2; Start 334; Stop 358
gaaggtgatgaacttggatacacag

SEQ ID NO: 442131 - DNA, 25 bp, Artificial
  probe
  misc_feature (1)..(25): SEQ ID NO: 6551; WAN024BY2; Start 634; Stop 658
gaatggactaacgctattcctgaat

SEQ ID NO: 442132 - DNA, 25 bp, Artificial
  probe
  misc_feature (1)..(25): SEQ ID NO: 6551; WAN024BY2; Start 628; Stop 652
tatgctgaatggactaacgctattc

SEQ ID NO: 442133 - DNA, 25 bp, Artificial
  probe
  misc_feature (1)..(25): SEQ ID NO: 6551; WAN024BY2; Start 592; Stop 616
agcaaaccacctgtaactattctta

SEQ ID NO: 442134 - DNA, 25 bp, Artificial
  probe
  misc_feature (1)..(25): SEQ ID NO: 6551; WAN024BY2; Start 342; Stop 366
tgaacttggatacacagcagataaa

SEQ ID NO: 442135 - DNA, 25 bp, Artificial
  probe
  misc_feature (1)..(25): SEQ ID NO: 6551; WAN024BY2; Start 690; Stop 714
taacccaagaaatgccactataaga

SEQ ID NO: 442136 - DNA, 25 bp, Artificial
  probe
  misc_feature (1)..(25): SEQ ID NO: 6551; WAN024BY2; Start 689; Stop 713
gtaacccaagaaatgccactataag

SEQ ID NO: 442137 - DNA, 25 bp, Artificial
  probe
  misc_feature (1)..(25): SEQ ID NO: 6551; WAN024BY2; Start 590; Stop 614
aaagcaaaccacctgtaactattct

SEQ ID NO: 442138 - DNA, 25 bp, Artificial
  probe
  misc_feature (1)..(25): SEQ ID NO: 6551; WAN024BY2; Start 691; Stop 715
aacccaagaaatgccactataagag

SEQ ID NO: 442139 - DNA, 25 bp, Artificial
  probe
  misc_feature (1)..(25): SEQ ID NO: 6551; WAN024BY2; Start 120; Stop 144
aaataactccactgaaagcactgaa

SEQ ID NO: 442140 - DNA, 25 bp, Artificial
  probe
  misc_feature (1)..(25): SEQ ID NO: 6551; WAN024BY2; Start 33; Stop 57
tttaacaacaactcacaaaggcaaa

SEQ ID NO: 442141 - DNA, 25 bp, Artificial
  probe
  misc_feature (1)..(25): SEQ ID NO: 6551; WAN024BY2; Start 593; Stop 617
gcaaaccacctgtaactattcttat

SEQ ID NO: 442142 - DNA, 25 bp, Artificial
  probe
  misc_feature (1)..(25): SEQ ID NO: 6551; WAN024BY2; Start 343; Stop 367
gaacttggatacacagcagataaat

SEQ ID NO: 442143 - DNA, 25 bp, Artificial
  probe
  misc_feature (1)..(25): SEQ ID NO: 6551; WAN024BY2; Start 333; Stop 357
tgaaggtgatgaacttggatacaca

SEQ ID NO: 442144 - DNA, 25 bp, Artificial
  probe
  misc_feature (1)..(25): SEQ ID NO: 6551; WAN024BY2; Start 325; Stop 349
aaacttgatgaaggtgatgaacttg

SEQ ID NO: 442145 - DNA, 25 bp, Artificial
  probe
  misc_feature (1)..(25): SEQ ID NO: 6551; WAN024BY2; Start 324; Stop 348
caaacttgatgaaggtgatgaactt

SEQ ID NO: 442146 - DNA, 25 bp, Artificial
  probe
  misc_feature (1)..(25): SEQ ID NO: 6551; WAN024BY2; Start 34; Stop 58
ttaacaacaactcacaaaggcaaag

SEQ ID NO: 442147 - DNA, 25 bp, Artificial
  probe
  misc_feature (1)..(25): SEQ ID NO: 6552; WAN024BMT; Start 68; Stop 92
ttgctaccgaagatgttgaactaat

SEQ ID NO: 442148 - DNA, 25 bp, Artificial
  probe
  misc_feature (1)..(25): SEQ ID NO: 6552; WAN024BMT; Start 69; Stop 93
tgctaccgaagatgttgaactaatc

SEQ ID NO: 442149 - DNA, 25 bp, Artificial
  probe
  misc_feature (1)..(25): SEQ ID NO: 6552; WAN024BMT; Start 67; Stop 91
cttgctaccgaagatgttgaactaa

SEQ ID NO: 442150 - DNA, 25 bp, Artificial
  probe
  misc_feature (1)..(25): SEQ ID NO: 6552; WAN024BMT; Start 70; Stop 94
gctaccgaagatgttgaactaatca

SEQ ID NO: 442151 - DNA, 25 bp, Artificial
  probe
  misc_feature (1)..(25): SEQ ID NO: 6552; WAN024BMT; Start 582; Stop 606
tcctgtaatcattatcatcacacga

SEQ ID NO: 442152 - DNA, 25 bp, Artificial
  probe
  misc_feature (1)..(25): SEQ ID NO: 6552; WAN024BMT; Start 667; Stop 691
acgagtaatcctagtaatccttctt

SEQ ID NO: 442153 - DNA, 25 bp, Artificial
  probe
  misc_feature (1)..(25): SEQ ID NO: 6552; WAN024BMT; Start 666; Stop 690
aacgagtaatcctagtaatccttct

SEQ ID NO: 442154 - DNA, 25 bp, Artificial
  probe
  misc_feature (1)..(25): SEQ ID NO: 6552; WAN024BMT; Start 583; Stop 607
cctgtaatcattatcatcacacgat

SEQ ID NO: 442155 - DNA, 25 bp, Artificial
  probe
  misc_feature (1)..(25): SEQ ID NO: 6552; WAN024BMT; Start 581; Stop 605
atcctgtaatcattatcatcacacg

SEQ ID NO: 442156 - DNA, 25 bp, Artificial
  probe
  misc_feature (1)..(25): SEQ ID NO: 6552; WAN024BMT; Start 605; Stop 629
gatcttacaataagtggtacgatgc

SEQ ID NO: 442157 - DNA, 25 bp, Artificial
  probe
  misc_feature (1)..(25): SEQ ID NO: 6552; WAN024BMT; Start 603; Stop 627
acgatcttacaataagtggtacgat

SEQ ID NO: 442158 - DNA, 25 bp, Artificial
  probe
  misc_feature (1)..(25): SEQ ID NO: 6552; WAN024BMT; Start 590; Stop 614
tcattatcatcacacgatcttacaa

SEQ ID NO: 442159 - DNA, 25 bp, Artificial
  probe
  misc_feature (1)..(25): SEQ ID NO: 6552; WAN024BMT; Start 604; Stop 628
cgatcttacaataagtggtacgatg

SEQ ID NO: 442160 - DNA, 25 bp, Artificial
  probe
  misc_feature (1)..(25): SEQ ID NO: 6552; WAN024BMT; Start 598; Stop 622
atcacacgatcttacaataagtggt

SEQ ID NO: 442161 - DNA, 25 bp, Artificial
  probe
  misc_feature (1)..(25): SEQ ID NO: 6552; WAN024BMT; Start 597; Stop 621
catcacacgatcttacaataagtgg

SEQ ID NO: 442162 - DNA, 25 bp, Artificial
  probe
  misc_feature (1)..(25): SEQ ID NO: 6552; WAN024BMT; Start 602; Stop 626
cacgatcttacaataagtggtacga

SEQ ID NO: 442163 - DNA, 25 bp, Artificial
  probe
  misc_feature (1)..(25): SEQ ID NO: 6552; WAN024BMT; Start 600; Stop 624
cacacgatcttacaataagtggtac

SEQ ID NO: 442164 - DNA, 25 bp, Artificial
  probe
  misc_feature (1)..(25): SEQ ID NO: 6552; WAN024BMT; Start 599; Stop 623
tcacacgatcttacaataagtggta

SEQ ID NO: 442165 - DNA, 25 bp, Artificial
  probe
  misc_feature (1)..(25): SEQ ID NO: 6552; WAN024BMT; Start 589; Stop 613
atcattatcatcacacgatcttaca

SEQ ID NO: 442166 - DNA, 25 bp, Artificial
  probe
  misc_feature (1)..(25): SEQ ID NO: 6552; WAN024BMT; Start 601; Stop 625
acacgatcttacaataagtggtacg

SEQ ID NO: 442167 - DNA, 25 bp, Artificial
  probe
  misc_feature (1)..(25): SEQ ID NO: 6552; WAN024BMT; Start 596; Stop 620
tcatcacacgatcttacaataagtg

SEQ ID NO: 442168 - DNA, 25 bp, Artificial
  probe
  misc_feature (1)..(25): SEQ ID NO: 6552; WAN024BMT; Start 20; Stop 44
cctggaatcaattatctaacgtcga

SEQ ID NO: 442169 - DNA, 25 bp, Artificial
  probe
  misc_feature (1)..(25): SEQ ID NO: 6552; WAN024BMT; Start 610; Stop 634
tacaataagtggtacgatgcaattc

SEQ ID NO: 442170 - DNA, 25 bp, Artificial
  probe
  misc_feature (1)..(25): SEQ ID NO: 6552; WAN024BMT; Start 609; Stop 633
ttacaataagtggtacgatgcaatt

SEQ ID NO: 442171 - DNA, 25 bp, Artificial
  probe
  misc_feature (1)..(25): SEQ ID NO: 6552; WAN024BMT; Start 337; Stop 361
gatacgaatgaatttggttactggg

SEQ ID NO: 442172 - DNA, 25 bp, Artificial
  probe
  misc_feature (1)..(25): SEQ ID NO: 6552; WAN024BMT; Start 342; Stop 366
gaatgaatttggttactgggctaaa

SEQ ID NO: 442173 - DNA, 25 bp, Artificial
  probe
  misc_feature (1)..(25): SEQ ID NO: 6552; WAN024BMT; Start 613; Stop 637
aataagtggtacgatgcaattcctc

SEQ ID NO: 442174 - DNA, 25 bp, Artificial
  probe
  misc_feature (1)..(25): SEQ ID NO: 6552; WAN024BMT; Start 21; Stop 45
ctggaatcaattatctaacgtcgat

SEQ ID NO: 442175 - DNA, 25 bp, Artificial
  probe
  misc_feature (1)..(25): SEQ ID NO: 6552; WAN024BMT; Start 510; Stop 534
caaagaaggttatttcccaacacaa

SEQ ID NO: 442176 - DNA, 25 bp, Artificial
  probe
  misc_feature (1)..(25): SEQ ID NO: 6552; WAN024BMT; Start 506; Stop 530
taagcaaagaaggttatttcccaac

SEQ ID NO: 442177 - DNA, 25 bp, Artificial
  probe
  misc_feature (1)..(25): SEQ ID NO: 6552; WAN024BMT; Start 336; Stop 360
agatacgaatgaatttggttactgg

SEQ ID NO: 442178 - DNA, 25 bp, Artificial
  probe
  misc_feature (1)..(25): SEQ ID NO: 6552; WAN024BMT; Start 585; Stop 609
tgtaatcattatcatcacacgatct

SEQ ID NO: 442179 - DNA, 25 bp, Artificial
  probe
  misc_feature (1)..(25): SEQ ID NO: 6552; WAN024BMT; Start 511; Stop 535
aaagaaggttatttcccaacacaaa

SEQ ID NO: 442180 - DNA, 25 bp, Artificial
  probe
  misc_feature (1)..(25): SEQ ID NO: 6553; WAN024CUF; Start 124; Stop 148
actgattggttgaactggcttagaa

SEQ ID NO: 442181 - DNA, 25 bp, Artificial
  probe
  misc_feature (1)..(25): SEQ ID NO: 6553; WAN024CUF; Start 70; Stop 94
aatgtaagctccactgtgttgaatt

SEQ ID NO: 442182 - DNA, 25 bp, Artificial
  probe
  misc_feature (1)..(25): SEQ ID NO: 6553; WAN024CUF; Start 123; Stop 147
gactgattggttgaactggcttaga

SEQ ID NO: 442183 - DNA, 25 bp, Artificial
  probe
  misc_feature (1)..(25): SEQ ID NO: 6553; WAN024CUF; Start 122; Stop 146
tgactgattggttgaactggcttag

SEQ ID NO: 442184 - DNA, 25 bp, Artificial
  probe
  misc_feature (1)..(25): SEQ ID NO: 6553; WAN024CUF; Start 121; Stop 145
ctgactgattggttgaactggctta

SEQ ID NO: 442185 - DNA, 25 bp, Artificial
  probe
  misc_feature (1)..(25): SEQ ID NO: 6553; WAN024CUF; Start 71; Stop 95
atgtaagctccactgtgttgaattg

SEQ ID NO: 442186 - DNA, 25 bp, Artificial
  probe
  misc_feature (1)..(25): SEQ ID NO: 6553; WAN024CUF; Start 128; Stop 152
attggttgaactggcttagaaactt

SEQ ID NO: 442187 - DNA, 25 bp, Artificial
  probe
  misc_feature (1)..(25): SEQ ID NO: 6553; WAN024CUF; Start 125; Stop 149
ctgattggttgaactggcttagaaa

SEQ ID NO: 442188 - DNA, 25 bp, Artificial
  probe
  misc_feature (1)..(25): SEQ ID NO: 6553; WAN024CUF; Start 69; Stop 93
caatgtaagctccactgtgttgaat

SEQ ID NO: 442189 - DNA, 25 bp, Artificial
  probe
  misc_feature (1)..(25): SEQ ID NO: 6553; WAN024CUF; Start 133; Stop 157
ttgaactggcttagaaacttgtgtc

SEQ ID NO: 442190 - DNA, 25 bp, Artificial
  probe
  misc_feature (1)..(25): SEQ ID NO: 6553; WAN024CUF; Start 127; Stop 151
gattggttgaactggcttagaaact

SEQ ID NO: 442191 - DNA, 25 bp, Artificial
  probe
  misc_feature (1)..(25): SEQ ID NO: 6553; WAN024CUF; Start 73; Stop 97
gtaagctccactgtgttgaattgtc

SEQ ID NO: 442192 - DNA, 25 bp, Artificial
  probe
  misc_feature (1)..(25): SEQ ID NO: 6553; WAN024CUF; Start 126; Stop 150
tgattggttgaactggcttagaaac

SEQ ID NO: 442193 - DNA, 25 bp, Artificial
  probe
  misc_feature (1)..(25): SEQ ID NO: 6553; WAN024CUF; Start 132; Stop 156
gttgaactggcttagaaacttgtgt

SEQ ID NO: 442194 - DNA, 25 bp, Artificial
  probe
  misc_feature (1)..(25): SEQ ID NO: 6553; WAN024CUF; Start 129; Stop 153
ttggttgaactggcttagaaacttg

SEQ ID NO: 442195 - DNA, 25 bp, Artificial
  probe
  misc_feature (1)..(25): SEQ ID NO: 6553; WAN024CUF; Start 72; Stop 96
tgtaagctccactgtgttgaattgt

SEQ ID NO: 442196 - DNA, 25 bp, Artificial
  probe
  misc_feature (1)..(25): SEQ ID NO: 6553; WAN024CUF; Start 74; Stop 98
taagctccactgtgttgaattgtca

SEQ ID NO: 442197 - DNA, 25 bp, Artificial
  probe
  misc_feature (1)..(25): SEQ ID NO: 6553; WAN024CUF; Start 8; Stop 32
cgaacaacttggtttccatctttat

SEQ ID NO: 442198 - DNA, 25 bp, Artificial
  probe
  misc_feature (1)..(25): SEQ ID NO: 6553; WAN024CUF; Start 79; Stop 103
tccactgtgttgaattgtcaatgtt

SEQ ID NO: 442199 - DNA, 25 bp, Artificial
  probe
  misc_feature (1)..(25): SEQ ID NO: 6553; WAN024CUF; Start 131; Stop 155
ggttgaactggcttagaaacttgtg

SEQ ID NO: 442200 - DNA, 25 bp, Artificial
  probe
  misc_feature (1)..(25): SEQ ID NO: 6553; WAN024CUF; Start 15; Stop 39
cttggtttccatctttatctactgg

SEQ ID NO: 442201 - DNA, 25 bp, Artificial
  probe
  misc_feature (1)..(25): SEQ ID NO: 6553; WAN024CUF; Start 117; Stop 141
gagtctgactgattggttgaactgg

SEQ ID NO: 442202 - DNA, 25 bp, Artificial
  probe
  misc_feature (1)..(25): SEQ ID NO: 6553; WAN024CUF; Start 116; Stop 140
ggagtctgactgattggttgaactg

SEQ ID NO: 442203 - DNA, 25 bp, Artificial
  probe
  misc_feature (1)..(25): SEQ ID NO: 6553; WAN024CUF; Start 7; Stop 31
acgaacaacttggtttccatcttta

SEQ ID NO: 442204 - DNA, 25 bp, Artificial
  probe
  misc_feature (1)..(25): SEQ ID NO: 6553; WAN024CUF; Start 6; Stop 30
tacgaacaacttggtttccatcttt

SEQ ID NO: 442205 - DNA, 25 bp, Artificial
  probe
  misc_feature (1)..(25): SEQ ID NO: 6553; WAN024CUF; Start 10; Stop 34
aacaacttggtttccatctttatct

SEQ ID NO: 442206 - DNA, 25 bp, Artificial
  probe
  misc_feature (1)..(25): SEQ ID NO: 6553; WAN024CUF; Start 78; Stop 102
ctccactgtgttgaattgtcaatgt

SEQ ID NO: 442207 - DNA, 25 bp, Artificial
  probe
  misc_feature (1)..(25): SEQ ID NO: 6553; WAN024CUF; Start 130; Stop 154
tggttgaactggcttagaaacttgt

SEQ ID NO: 442208 - DNA, 25 bp, Artificial
  probe
  misc_feature (1)..(25): SEQ ID NO: 6553; WAN024CUF; Start 115; Stop 139
aggagtctgactgattggttgaact

SEQ ID NO: 442209 - DNA, 25 bp, Artificial
  probe
  misc_feature (1)..(25): SEQ ID NO: 6553; WAN024CUF; Start 9; Stop 33
gaacaacttggtttccatctttatc

SEQ ID NO: 442210 - DNA, 25 bp, Artificial
  probe
  misc_feature (1)..(25): SEQ ID NO: 6553; WAN024CUF; Start 14; Stop 38
acttggtttccatctttatctactg

SEQ ID NO: 442211 - DNA, 25 bp, Artificial
  probe
  misc_feature (1)..(25): SEQ ID NO: 6553; WAN024CUF; Start 5; Stop 29
ctacgaacaacttggtttccatctt

SEQ ID NO: 442212 - DNA, 25 bp, Artificial
  probe
  misc_feature (1)..(25): SEQ ID NO: 6553; WAN024CUF; Start 114; Stop 138
caggagtctgactgattggttgaac

SEQ ID NO: 442213 - DNA, 25 bp, Artificial
  probe
  misc_feature (1)..(25): SEQ ID NO: 6554; WAN024BLB; Start 2; Stop 26
tgactatcactatcaacttcacaga

SEQ ID NO: 442214 - DNA, 25 bp, Artificial
  probe
  misc_feature (1)..(25): SEQ ID NO: 6554; WAN024BLB; Start 194; Stop 218
tcttggatgaactaggactaactcg

SEQ ID NO: 442215 - DNA, 25 bp, Artificial
  probe
  misc_feature (1)..(25): SEQ ID NO: 6554; WAN024BLB; Start 184; Stop 208
atggatgaggtcttggatgaactag

SEQ ID NO: 442216 - DNA, 25 bp, Artificial
  probe
  misc_feature (1)..(25): SEQ ID NO: 6554; WAN024BLB; Start 3; Stop 27
gactatcactatcaacttcacagaa

SEQ ID NO: 442217 - DNA, 25 bp, Artificial
  probe
  misc_feature (1)..(25): SEQ ID NO: 6554; WAN024BLB; Start 193; Stop 217
gtcttggatgaactaggactaactc

SEQ ID NO: 442218 - DNA, 25 bp, Artificial
  probe
  misc_feature (1)..(25): SEQ ID NO: 6554; WAN024BLB; Start 1; Stop 25
atgactatcactatcaacttcacag

SEQ ID NO: 442219 - DNA, 25 bp, Artificial
  probe
  misc_feature (1)..(25): SEQ ID NO: 6554; WAN024BLB; Start 190; Stop 214
gaggtcttggatgaactaggactaa

SEQ ID NO: 442220 - DNA, 25 bp, Artificial
  probe
  misc_feature (1)..(25): SEQ ID NO: 6554; WAN024BLB; Start 192; Stop 216
ggtcttggatgaactaggactaact

SEQ ID NO: 442221 - DNA, 25 bp, Artificial
  probe
  misc_feature (1)..(25): SEQ ID NO: 6554; WAN024BLB; Start 191; Stop 215
aggtcttggatgaactaggactaac

SEQ ID NO: 442222 - DNA, 25 bp, Artificial
  probe
  misc_feature (1)..(25): SEQ ID NO: 6554; WAN024BLB; Start 183; Stop 207
catggatgaggtcttggatgaacta

SEQ ID NO: 442223 - DNA, 25 bp, Artificial
  probe
  misc_feature (1)..(25): SEQ ID NO: 6554; WAN024BLB; Start 31; Stop 55
aattcctacattacggactacctaa

SEQ ID NO: 442224 - DNA, 25 bp, Artificial
  probe
  misc_feature (1)..(25): SEQ ID NO: 6554; WAN024BLB; Start 39; Stop 63
cattacggactacctaaacaaacac

SEQ ID NO: 442225 - DNA, 25 bp, Artificial
  probe
  misc_feature (1)..(25): SEQ ID NO: 6554; WAN024BLB; Start 38; Stop 62
acattacggactacctaaacaaaca

SEQ ID NO: 442226 - DNA, 25 bp, Artificial
  probe
  misc_feature (1)..(25): SEQ ID NO: 6554; WAN024BLB; Start 35; Stop 59
cctacattacggactacctaaacaa

SEQ ID NO: 442227 - DNA, 25 bp, Artificial
  probe
  misc_feature (1)..(25): SEQ ID NO: 6554; WAN024BLB; Start 195; Stop 219
cttggatgaactaggactaactcga

SEQ ID NO: 442228 - DNA, 25 bp, Artificial
  probe
  misc_feature (1)..(25): SEQ ID NO: 6554; WAN024BLB; Start 189; Stop 213
tgaggtcttggatgaactaggacta

SEQ ID NO: 442229 - DNA, 25 bp, Artificial
  probe
  misc_feature (1)..(25): SEQ ID NO: 6554; WAN024BLB; Start 143; Stop 167
aagcctatatggagtatttagccga

SEQ ID NO: 442230 - DNA, 25 bp, Artificial
  probe
  misc_feature (1)..(25): SEQ ID NO: 6554; WAN024BLB; Start 142; Stop 166
caagcctatatggagtatttagccg

SEQ ID NO: 442231 - DNA, 25 bp, Artificial
  probe
  misc_feature (1)..(25): SEQ ID NO: 6554; WAN024BLB; Start 40; Stop 64
attacggactacctaaacaaacacg

SEQ ID NO: 442232 - DNA, 25 bp, Artificial
  probe
  misc_feature (1)..(25): SEQ ID NO: 6554; WAN024BLB; Start 187; Stop 211
gatgaggtcttggatgaactaggac

SEQ ID NO: 442233 - DNA, 25 bp, Artificial
  probe
  misc_feature (1)..(25): SEQ ID NO: 6554; WAN024BLB; Start 37; Stop 61
tacattacggactacctaaacaaac

SEQ ID NO: 442234 - DNA, 25 bp, Artificial
  probe
  misc_feature (1)..(25): SEQ ID NO: 6554; WAN024BLB; Start 144; Stop 168
agcctatatggagtatttagccgac

SEQ ID NO: 442235 - DNA, 25 bp, Artificial
  probe
  misc_feature (1)..(25): SEQ ID NO: 6554; WAN024BLB; Start 36; Stop 60
ctacattacggactacctaaacaaa

SEQ ID NO: 442236 - DNA, 25 bp, Artificial
  probe
  misc_feature (1)..(25): SEQ ID NO: 6554; WAN024BLB; Start 186; Stop 210
ggatgaggtcttggatgaactagga

SEQ ID NO: 442237 - DNA, 25 bp, Artificial
  probe
  misc_feature (1)..(25): SEQ ID NO: 6554; WAN024BLB; Start 188; Stop 212
atgaggtcttggatgaactaggact

SEQ ID NO: 442238 - DNA, 25 bp, Artificial
  probe
  misc_feature (1)..(25): SEQ ID NO: 6554; WAN024BLB; Start 146; Stop 170
cctatatggagtatttagccgaccc

SEQ ID NO: 442239 - DNA, 25 bp, Artificial
  probe
  misc_feature (1)..(25): SEQ ID NO: 6554; WAN024BLB; Start 185; Stop 209
tggatgaggtcttggatgaactagg

SEQ ID NO: 442240 - DNA, 25 bp, Artificial
  probe
  misc_feature (1)..(25): SEQ ID NO: 6554; WAN024BLB; Start 145; Stop 169
gcctatatggagtatttagccgacc

SEQ ID NO: 442241 - DNA, 25 bp, Artificial
  probe
  misc_feature (1)..(25): SEQ ID NO: 6554; WAN024BLB; Start 33; Stop 57
ttcctacattacggactacctaaac

SEQ ID NO: 442242 - DNA, 25 bp, Artificial
  probe
  misc_feature (1)..(25): SEQ ID NO: 6554; WAN024BLB; Start 34; Stop 58
tcctacattacggactacctaaaca

SEQ ID NO: 442243 - DNA, 25 bp, Artificial
  probe
  misc_feature (1)..(25): SEQ ID NO: 6554; WAN024BLB; Start 4; Stop 28
actatcactatcaacttcacagaaa

SEQ ID NO: 442244 - DNA, 25 bp, Artificial
  probe
  misc_feature (1)..(25): SEQ ID NO: 6554; WAN024BLB; Start 140; Stop 164
accaagcctatatggagtatttagc

SEQ ID NO: 442245 - DNA, 25 bp, Artificial
  probe
  misc_feature (1)..(25): SEQ ID NO: 6554; WAN024BLB; Start 138; Stop 162
cgaccaagcctatatggagtattta

SEQ ID NO: 442246 - DNA, 25 bp, Artificial
  probe
  misc_feature (1)..(25): SEQ ID NO: 6555; WAN024FT2; Start 1069; Stop 1093
atacctctacttctatcagcaatgg

SEQ ID NO: 442247 - DNA, 25 bp, Artificial
  probe
  misc_feature (1)..(25): SEQ ID NO: 6555; WAN024FT2; Start 933; Stop 957
aatgccgttgctaagtgttatgata

SEQ ID NO: 442248 - DNA, 25 bp, Artificial
  probe
  misc_feature (1)..(25): SEQ ID NO: 6555; WAN024FT2; Start 934; Stop 958
atgccgttgctaagtgttatgataa

SEQ ID NO: 442249 - DNA, 25 bp, Artificial
  probe
  misc_feature (1)..(25): SEQ ID NO: 6555; WAN024FT2; Start 167; Stop 191
cggatgtaatcgctaatagaattgc

SEQ ID NO: 442250 - DNA, 25 bp, Artificial
  probe
  misc_feature (1)..(25): SEQ ID NO: 6555; WAN024FT2; Start 168; Stop 192
ggatgtaatcgctaatagaattgct

SEQ ID NO: 442251 - DNA, 25 bp, Artificial
  probe
  misc_feature (1)..(25): SEQ ID NO: 6555; WAN024FT2; Start 1073; Stop 1097
ctctacttctatcagcaatggttga

SEQ ID NO: 442252 - DNA, 25 bp, Artificial
  probe
  misc_feature (1)..(25): SEQ ID NO: 6555; WAN024FT2; Start 1074; Stop 1098
tctacttctatcagcaatggttgaa

SEQ ID NO: 442253 - DNA, 25 bp, Artificial
  probe
  misc_feature (1)..(25): SEQ ID NO: 6555; WAN024FT2; Start 411; Stop 435
ttcattagtaactgttgctgttgag

SEQ ID NO: 442254 - DNA, 25 bp, Artificial
  probe
  misc_feature (1)..(25): SEQ ID NO: 6555; WAN024FT2; Start 1072; Stop 1096
cctctacttctatcagcaatggttg

SEQ ID NO: 442255 - DNA, 25 bp, Artificial
  probe
  misc_feature (1)..(25): SEQ ID NO: 6555; WAN024FT2; Start 412; Stop 436
tcattagtaactgttgctgttgagg

SEQ ID NO: 442256 - DNA, 25 bp, Artificial
  probe
  misc_feature (1)..(25): SEQ ID NO: 6555; WAN024FT2; Start 765; Stop 789
tagtgaatcctatactcatcgtgtt

SEQ ID NO: 442257 - DNA, 25 bp, Artificial
  probe
  misc_feature (1)..(25): SEQ ID NO: 6555; WAN024FT2; Start 1054; Stop 1078
ggcttatccattctaatacctctac

SEQ ID NO: 442258 - DNA, 25 bp, Artificial
  probe
  misc_feature (1)..(25): SEQ ID NO: 6555; WAN024FT2; Start 684; Stop 708
tcacagaccagtaattataacgaca

SEQ ID NO: 442259 - DNA, 25 bp, Artificial
  probe
  misc_feature (1)..(25): SEQ ID NO: 6555; WAN024FT2; Start 1068; Stop 1092
aatacctctacttctatcagcaatg

SEQ ID NO: 442260 - DNA, 25 bp, Artificial
  probe
  misc_feature (1)..(25): SEQ ID NO: 6555; WAN024FT2; Start 1065; Stop 1089
tctaatacctctacttctatcagca

SEQ ID NO: 442261 - DNA, 25 bp, Artificial
  probe
  misc_feature (1)..(25): SEQ ID NO: 6555; WAN024FT2; Start 764; Stop 788
atagtgaatcctatactcatcgtgt

SEQ ID NO: 442262 - DNA, 25 bp, Artificial
  probe
  misc_feature (1)..(25): SEQ ID NO: 6555; WAN024FT2; Start 686; Stop 710
acagaccagtaattataacgacatg

SEQ ID NO: 442263 - DNA, 25 bp, Artificial
  probe
  misc_feature (1)..(25): SEQ ID NO: 6555; WAN024FT2; Start 685; Stop 709
cacagaccagtaattataacgacat

SEQ ID NO: 442264 - DNA, 25 bp, Artificial
  probe
  misc_feature (1)..(25): SEQ ID NO: 6555; WAN024FT2; Start 683; Stop 707
atcacagaccagtaattataacgac

SEQ ID NO: 442265 - DNA, 25 bp, Artificial
  probe
  misc_feature (1)..(25): SEQ ID NO: 6555; WAN024FT2; Start 169; Stop 193
gatgtaatcgctaatagaattgctt

SEQ ID NO: 442266 - DNA, 25 bp, Artificial
  probe
  misc_feature (1)..(25): SEQ ID NO: 6555; WAN024FT2; Start 545; Stop 569
cgaagtaccaagttgatagcttagt

SEQ ID NO: 442267 - DNA, 25 bp, Artificial
  probe
  misc_feature (1)..(25): SEQ ID NO: 6555; WAN024FT2; Start 544; Stop 568
acgaagtaccaagttgatagcttag

SEQ ID NO: 442268 - DNA, 25 bp, Artificial
  probe
  misc_feature (1)..(25): SEQ ID NO: 6555; WAN024FT2; Start 1070; Stop 1094
tacctctacttctatcagcaatggt

SEQ ID NO: 442269 - DNA, 25 bp, Artificial
  probe
  misc_feature (1)..(25): SEQ ID NO: 6555; WAN024FT2; Start 543; Stop 567
tacgaagtaccaagttgatagctta

SEQ ID NO: 442270 - DNA, 25 bp, Artificial
  probe
  misc_feature (1)..(25): SEQ ID NO: 6555; WAN024FT2; Start 1066; Stop 1090
ctaatacctctacttctatcagcaa

SEQ ID NO: 442271 - DNA, 25 bp, Artificial
  probe
  misc_feature (1)..(25): SEQ ID NO: 6555; WAN024FT2; Start 1055; Stop 1079
gcttatccattctaatacctctact

SEQ ID NO: 442272 - DNA, 25 bp, Artificial
  probe
  misc_feature (1)..(25): SEQ ID NO: 6555; WAN024FT2; Start 1052; Stop 1076
ttggcttatccattctaatacctct

SEQ ID NO: 442273 - DNA, 25 bp, Artificial
  probe
  misc_feature (1)..(25): SEQ ID NO: 6555; WAN024FT2; Start 87; Stop 111
gggtttgtccagtatagttcagtat

SEQ ID NO: 442274 - DNA, 25 bp, Artificial
  probe
  misc_feature (1)..(25): SEQ ID NO: 6555; WAN024FT2; Start 71; Stop 95
aggtaatagtgaatctgggtttgtc

SEQ ID NO: 442275 - DNA, 25 bp, Artificial
  probe
  misc_feature (1)..(25): SEQ ID NO: 6555; WAN024FT2; Start 1071; Stop 1095
acctctacttctatcagcaatggtt

SEQ ID NO: 442276 - DNA, 25 bp, Artificial
  probe
  misc_feature (1)..(25): SEQ ID NO: 6555; WAN024FT2; Start 763; Stop 787
aatagtgaatcctatactcatcgtg

SEQ ID NO: 442277 - DNA, 25 bp, Artificial
  probe
  misc_feature (1)..(25): SEQ ID NO: 6555; WAN024FT2; Start 867; Stop 891
tggtgatatgacgaaaggttatact

SEQ ID NO: 442278 - DNA, 25 bp, Artificial
  probe
  misc_feature (1)..(25): SEQ ID NO: 6555; WAN024FT2; Start 973; Stop 997
ggcttaatagggtatggagtagtct

SEQ ID NO: 442279 - DNA, 25 bp, Artificial
  probe
  misc_feature (1)..(25): SEQ ID NO: 6556; WAN024BNH; Start 216; Stop 240
gcttgaggctaataggaatatgatc

SEQ ID NO: 442280 - DNA, 25 bp, Artificial
  probe
  misc_feature (1)..(25): SEQ ID NO: 6556; WAN024BNH; Start 266; Stop 290
atatagccgaagatgccactacatt

SEQ ID NO: 442281 - DNA, 25 bp, Artificial
  probe
  misc_feature (1)..(25): SEQ ID NO: 6556; WAN024BNH; Start 265; Stop 289
gatatagccgaagatgccactacat

SEQ ID NO: 442282 - DNA, 25 bp, Artificial
  probe
  misc_feature (1)..(25): SEQ ID NO: 6556; WAN024BNH; Start 229; Stop 253
aggaatatgatccatcaccttatga

SEQ ID NO: 442283 - DNA, 25 bp, Artificial
  probe
  misc_feature (1)..(25): SEQ ID NO: 6556; WAN024BNH; Start 218; Stop 242
ttgaggctaataggaatatgatcca

SEQ ID NO: 442284 - DNA, 25 bp, Artificial
  probe
  misc_feature (1)..(25): SEQ ID NO: 6556; WAN024BNH; Start 223; Stop 247
gctaataggaatatgatccatcacc

SEQ ID NO: 442285 - DNA, 25 bp, Artificial
  probe
  misc_feature (1)..(25): SEQ ID NO: 6556; WAN024BNH; Start 222; Stop 246
ggctaataggaatatgatccatcac

SEQ ID NO: 442286 - DNA, 25 bp, Artificial
  probe
  misc_feature (1)..(25): SEQ ID NO: 6556; WAN024BNH; Start 221; Stop 245
aggctaataggaatatgatccatca

SEQ ID NO: 442287 - DNA, 25 bp, Artificial
  probe
  misc_feature (1)..(25): SEQ ID NO: 6556; WAN024BNH; Start 219; Stop 243
tgaggctaataggaatatgatccat

SEQ ID NO: 442288 - DNA, 25 bp, Artificial
  probe
  misc_feature (1)..(25): SEQ ID NO: 6556; WAN024BNH; Start 257; Stop 281
ctgagttggatatagccgaagatgc

SEQ ID NO: 442289 - DNA, 25 bp, Artificial
  probe
  misc_feature (1)..(25): SEQ ID NO: 6556; WAN024BNH; Start 217; Stop 241
cttgaggctaataggaatatgatcc

SEQ ID NO: 442290 - DNA, 25 bp, Artificial
  probe
  misc_feature (1)..(25): SEQ ID NO: 6556; WAN024BNH; Start 230; Stop 254
ggaatatgatccatcaccttatgaa

SEQ ID NO: 442291 - DNA, 25 bp, Artificial
  probe
  misc_feature (1)..(25): SEQ ID NO: 6556; WAN024BNH; Start 220; Stop 244
gaggctaataggaatatgatccatc

SEQ ID NO: 442292 - DNA, 25 bp, Artificial
  probe
  misc_feature (1)..(25): SEQ ID NO: 6556; WAN024BNH; Start 140; Stop 164
tacaagtcgctttacatgagatagg

SEQ ID NO: 442293 - DNA, 25 bp, Artificial
  probe
  misc_feature (1)..(25): SEQ ID NO: 6556; WAN024BNH; Start 138; Stop 162
ggtacaagtcgctttacatgagata

SEQ ID NO: 442294 - DNA, 25 bp, Artificial
  probe
  misc_feature (1)..(25): SEQ ID NO: 6556; WAN024BNH; Start 139; Stop 163
gtacaagtcgctttacatgagatag

SEQ ID NO: 442295 - DNA, 25 bp, Artificial
  probe
  misc_feature (1)..(25): SEQ ID NO: 6556; WAN024BNH; Start 268; Stop 292
atagccgaagatgccactacattta

SEQ ID NO: 442296 - DNA, 25 bp, Artificial
  probe
  misc_feature (1)..(25): SEQ ID NO: 6556; WAN024BNH; Start 267; Stop 291
tatagccgaagatgccactacattt

SEQ ID NO: 442297 - DNA, 25 bp, Artificial
  probe
  misc_feature (1)..(25): SEQ ID NO: 6556; WAN024BNH; Start 109; Stop 133
ttgagtgatgctatatctgatgaaa

SEQ ID NO: 442298 - DNA, 25 bp, Artificial
  probe
  misc_feature (1)..(25): SEQ ID NO: 6556; WAN024BNH; Start 108; Stop 132
tttgagtgatgctatatctgatgaa

SEQ ID NO: 442299 - DNA, 25 bp, Artificial
  probe
  misc_feature (1)..(25): SEQ ID NO: 6556; WAN024BNH; Start 271; Stop 295
gccgaagatgccactacatttaatt

SEQ ID NO: 442300 - DNA, 25 bp, Artificial
  probe
  misc_feature (1)..(25): SEQ ID NO: 6556; WAN024BNH; Start 336; Stop 360
cgatgaaatcatggtcaaagaagaa

SEQ ID NO: 442301 - DNA, 25 bp, Artificial
  probe
  misc_feature (1)..(25): SEQ ID NO: 6556; WAN024BNH; Start 272; Stop 296
ccgaagatgccactacatttaatta

SEQ ID NO: 442302 - DNA, 25 bp, Artificial
  probe
  misc_feature (1)..(25): SEQ ID NO: 6556; WAN024BNH; Start 269; Stop 293
tagccgaagatgccactacatttaa

SEQ ID NO: 442303 - DNA, 25 bp, Artificial
  probe
  misc_feature (1)..(25): SEQ ID NO: 6556; WAN024BNH; Start 228; Stop 252
taggaatatgatccatcaccttatg

SEQ ID NO: 442304 - DNA, 25 bp, Artificial
  probe
  misc_feature (1)..(25): SEQ ID NO: 6556; WAN024BNH; Start 276; Stop 300
agatgccactacatttaattacctg

SEQ ID NO: 442305 - DNA, 25 bp, Artificial
  probe
  misc_feature (1)..(25): SEQ ID NO: 6556; WAN024BNH; Start 264; Stop 288
ggatatagccgaagatgccactaca

SEQ ID NO: 442306 - DNA, 25 bp, Artificial
  probe
  misc_feature (1)..(25): SEQ ID NO: 6556; WAN024BNH; Start 233; Stop 257
atatgatccatcaccttatgaaagc

SEQ ID NO: 442307 - DNA, 25 bp, Artificial
  probe
  misc_feature (1)..(25): SEQ ID NO: 6556; WAN024BNH; Start 213; Stop 237
tgagcttgaggctaataggaatatg

SEQ ID NO: 442308 - DNA, 25 bp, Artificial
  probe
  misc_feature (1)..(25): SEQ ID NO: 6556; WAN024BNH; Start 212; Stop 236
gtgagcttgaggctaataggaatat

SEQ ID NO: 442309 - DNA, 25 bp, Artificial
  probe
  misc_feature (1)..(25): SEQ ID NO: 6556; WAN024BNH; Start 214; Stop 238
gagcttgaggctaataggaatatga

SEQ ID NO: 442310 - DNA, 25 bp, Artificial
  probe
  misc_feature (1)..(25): SEQ ID NO: 6556; WAN024BNH; Start 245; Stop 269
accttatgaaagctgagttggatat

SEQ ID NO: 442311 - DNA, 25 bp, Artificial
  probe
  misc_feature (1)..(25): SEQ ID NO: 6556; WAN024BNH; Start 335; Stop 359
ccgatgaaatcatggtcaaagaaga

SEQ ID NO: 442312 - DNA, 25 bp, Artificial
  probe
  misc_feature (1)..(25): SEQ ID NO: 6557; WAN024BYY; Start 307; Stop 331
ttcacatacgatagcattcctgtag

SEQ ID NO: 442313 - DNA, 25 bp, Artificial
  probe
  misc_feature (1)..(25): SEQ ID NO: 6557; WAN024BYY; Start 306; Stop 330
attcacatacgatagcattcctgta

SEQ ID NO: 442314 - DNA, 25 bp, Artificial
  probe
  misc_feature (1)..(25): SEQ ID NO: 6557; WAN024BYY; Start 305; Stop 329
tattcacatacgatagcattcctgt

SEQ ID NO: 442315 - DNA, 25 bp, Artificial
  probe
  misc_feature (1)..(25): SEQ ID NO: 6557; WAN024BYY; Start 36; Stop 60
cattgtcactatgtgcttcatcttc

SEQ ID NO: 442316 - DNA, 25 bp, Artificial
  probe
  misc_feature (1)..(25): SEQ ID NO: 6557; WAN024BYY; Start 304; Stop 328
gtattcacatacgatagcattcctg

SEQ ID NO: 442317 - DNA, 25 bp, Artificial
  probe
  misc_feature (1)..(25): SEQ ID NO: 6557; WAN024BYY; Start 35; Stop 59
ccattgtcactatgtgcttcatctt

SEQ ID NO: 442318 - DNA, 25 bp, Artificial
  probe
  misc_feature (1)..(25): SEQ ID NO: 6557; WAN024BYY; Start 37; Stop 61
attgtcactatgtgcttcatcttcg

SEQ ID NO: 442319 - DNA, 25 bp, Artificial
  probe
  misc_feature (1)..(25): SEQ ID NO: 6557; WAN024BYY; Start 195; Stop 219
aatgcttacgaaatacggatacaaa

SEQ ID NO: 442320 - DNA, 25 bp, Artificial
  probe
  misc_feature (1)..(25): SEQ ID NO: 6557; WAN024BYY; Start 194; Stop 218
aaatgcttacgaaatacggatacaa

SEQ ID NO: 442321 - DNA, 25 bp, Artificial
  probe
  misc_feature (1)..(25): SEQ ID NO: 6557; WAN024BYY; Start 308; Stop 332
tcacatacgatagcattcctgtagc

SEQ ID NO: 442322 - DNA, 25 bp, Artificial
  probe
  misc_feature (1)..(25): SEQ ID NO: 6557; WAN024BYY; Start 164; Stop 188
cttacctgtttatgggaatacctgc

SEQ ID NO: 442323 - DNA, 25 bp, Artificial
  probe
  misc_feature (1)..(25): SEQ ID NO: 6557; WAN024BYY; Start 163; Stop 187
gcttacctgtttatgggaatacctg

SEQ ID NO: 442324 - DNA, 25 bp, Artificial
  probe
  misc_feature (1)..(25): SEQ ID NO: 6557; WAN024BYY; Start 257; Stop 281
gtttgtgtttccagtatctctcaag

SEQ ID NO: 442325 - DNA, 25 bp, Artificial
  probe
  misc_feature (1)..(25): SEQ ID NO: 6557; WAN024BYY; Start 3; Stop 27
gactgaaacaaacaagaatggcaag

SEQ ID NO: 442326 - DNA, 25 bp, Artificial
  probe
  misc_feature (1)..(25): SEQ ID NO: 6557; WAN024BYY; Start 256; Stop 280
ggtttgtgtttccagtatctctcaa

SEQ ID NO: 442327 - DNA, 25 bp, Artificial
  probe
  misc_feature (1)..(25): SEQ ID NO: 6557; WAN024BYY; Start 258; Stop 282
tttgtgtttccagtatctctcaagc

SEQ ID NO: 442328 - DNA, 25 bp, Artificial
  probe
  misc_feature (1)..(25): SEQ ID NO: 6557; WAN024BYY; Start 1; Stop 25
atgactgaaacaaacaagaatggca

SEQ ID NO: 442329 - DNA, 25 bp, Artificial
  probe
  misc_feature (1)..(25): SEQ ID NO: 6557; WAN024BYY; Start 162; Stop 186
ggcttacctgtttatgggaatacct

SEQ ID NO: 442330 - DNA, 25 bp, Artificial
  probe
  misc_feature (1)..(25): SEQ ID NO: 6557; WAN024BYY; Start 9; Stop 33
aacaaacaagaatggcaaggtgatt

SEQ ID NO: 442331 - DNA, 25 bp, Artificial
  probe
  misc_feature (1)..(25): SEQ ID NO: 6557; WAN024BYY; Start 8; Stop 32
aaacaaacaagaatggcaaggtgat

SEQ ID NO: 442332 - DNA, 25 bp, Artificial
  probe
  misc_feature (1)..(25): SEQ ID NO: 6557; WAN024BYY; Start 2; Stop 26
tgactgaaacaaacaagaatggcaa

SEQ ID NO: 442333 - DNA, 25 bp, Artificial
  probe
  misc_feature (1)..(25): SEQ ID NO: 6557; WAN024BYY; Start 30; Stop 54
gattgccattgtcactatgtgcttc

SEQ ID NO: 442334 - DNA, 25 bp, Artificial
  probe
  misc_feature (1)..(25): SEQ ID NO: 6557; WAN024BYY; Start 309; Stop 333
cacatacgatagcattcctgtagcc

SEQ ID NO: 442335 - DNA, 25 bp, Artificial
  probe
  misc_feature (1)..(25): SEQ ID NO: 6557; WAN024BYY; Start 7; Stop 31
gaaacaaacaagaatggcaaggtga

SEQ ID NO: 442336 - DNA, 25 bp, Artificial
  probe
  misc_feature (1)..(25): SEQ ID NO: 6557; WAN024BYY; Start 5; Stop 29
ctgaaacaaacaagaatggcaaggt

SEQ ID NO: 442337 - DNA, 25 bp, Artificial
  probe
  misc_feature (1)..(25): SEQ ID NO: 6557; WAN024BYY; Start 4; Stop 28
actgaaacaaacaagaatggcaagg

SEQ ID NO: 442338 - DNA, 25 bp, Artificial
  probe
  misc_feature (1)..(25): SEQ ID NO: 6557; WAN024BYY; Start 249; Stop 273
tatcgttggtttgtgtttccagtat

SEQ ID NO: 442339 - DNA, 25 bp, Artificial
  probe
  misc_feature (1)..(25): SEQ ID NO: 6557; WAN024BYY; Start 32; Stop 56
ttgccattgtcactatgtgcttcat

SEQ ID NO: 442340 - DNA, 25 bp, Artificial
  probe
  misc_feature (1)..(25): SEQ ID NO: 6557; WAN024BYY; Start 31; Stop 55
attgccattgtcactatgtgcttca

SEQ ID NO: 442341 - DNA, 25 bp, Artificial
  probe
  misc_feature (1)..(25): SEQ ID NO: 6557; WAN024BYY; Start 29; Stop 53
tgattgccattgtcactatgtgctt

SEQ ID NO: 442342 - DNA, 25 bp, Artificial
  probe
  misc_feature (1)..(25): SEQ ID NO: 6557; WAN024BYY; Start 254; Stop 278
ttggtttgtgtttccagtatctctc

SEQ ID NO: 442343 - DNA, 25 bp, Artificial
  probe
  misc_feature (1)..(25): SEQ ID NO: 6557; WAN024BYY; Start 6; Stop 30
tgaaacaaacaagaatggcaaggtg

SEQ ID NO: 442344 - DNA, 25 bp, Artificial
  probe
  misc_feature (1)..(25): SEQ ID NO: 6557; WAN024BYY; Start 34; Stop 58
gccattgtcactatgtgcttcatct

SEQ ID NO: 442345 - DNA, 25 bp, Artificial
  probe
  misc_feature (1)..(25): SEQ ID NO: 6558; WAN024BXH; Start 196; Stop 220
gactatcgtatccatccaatgttca

SEQ ID NO: 442346 - DNA, 25 bp, Artificial
  probe
  misc_feature (1)..(25): SEQ ID NO: 6558; WAN024BXH; Start 195; Stop 219
tgactatcgtatccatccaatgttc

SEQ ID NO: 442347 - DNA, 25 bp, Artificial
  probe
  misc_feature (1)..(25): SEQ ID NO: 6558; WAN024BXH; Start 194; Stop 218
ctgactatcgtatccatccaatgtt

SEQ ID NO: 442348 - DNA, 25 bp, Artificial
  probe
  misc_feature (1)..(25): SEQ ID NO: 6558; WAN024BXH; Start 197; Stop 221
actatcgtatccatccaatgttcat

SEQ ID NO: 442349 - DNA, 25 bp, Artificial
  probe
  misc_feature (1)..(25): SEQ ID NO: 6558; WAN024BXH; Start 200; Stop 224
atcgtatccatccaatgttcattca

SEQ ID NO: 442350 - DNA, 25 bp, Artificial
  probe
  misc_feature (1)..(25): SEQ ID NO: 6558; WAN024BXH; Start 201; Stop 225
tcgtatccatccaatgttcattcaa

SEQ ID NO: 442351 - DNA, 25 bp, Artificial
  probe
  misc_feature (1)..(25): SEQ ID NO: 6558; WAN024BXH; Start 199; Stop 223
tatcgtatccatccaatgttcattc

SEQ ID NO: 442352 - DNA, 25 bp, Artificial
  probe
  misc_feature (1)..(25): SEQ ID NO: 6558; WAN024BXH; Start 198; Stop 222
ctatcgtatccatccaatgttcatt

SEQ ID NO: 442353 - DNA, 25 bp, Artificial
  probe
  misc_feature (1)..(25): SEQ ID NO: 6558; WAN024BXH; Start 169; Stop 193
tatatctacattcactatcgtggcg

SEQ ID NO: 442354 - DNA, 25 bp, Artificial
  probe
  misc_feature (1)..(25): SEQ ID NO: 6558; WAN024BXH; Start 193; Stop 217
gctgactatcgtatccatccaatgt

SEQ ID NO: 442355 - DNA, 25 bp, Artificial
  probe
  misc_feature (1)..(25): SEQ ID NO: 6558; WAN024BXH; Start 168; Stop 192
ttatatctacattcactatcgtggc

SEQ ID NO: 442356 - DNA, 25 bp, Artificial
  probe
  misc_feature (1)..(25): SEQ ID NO: 6558; WAN024BXH; Start 117; Stop 141
actctactcaccaatttctaaacct

SEQ ID NO: 442357 - DNA, 25 bp, Artificial
  probe
  misc_feature (1)..(25): SEQ ID NO: 6558; WAN024BXH; Start 78; Stop 102
tatggctaatccttacatttggtgg

SEQ ID NO: 442358 - DNA, 25 bp, Artificial
  probe
  misc_feature (1)..(25): SEQ ID NO: 6558; WAN024BXH; Start 127; Stop 151
ccaatttctaaacctgaagcaaact

SEQ ID NO: 442359 - DNA, 25 bp, Artificial
  probe
  misc_feature (1)..(25): SEQ ID NO: 6558; WAN024BXH; Start 129; Stop 153
aatttctaaacctgaagcaaactcg

SEQ ID NO: 442360 - DNA, 25 bp, Artificial
  probe
  misc_feature (1)..(25): SEQ ID NO: 6558; WAN024BXH; Start 118; Stop 142
ctctactcaccaatttctaaacctg

SEQ ID NO: 442361 - DNA, 25 bp, Artificial
  probe
  misc_feature (1)..(25): SEQ ID NO: 6558; WAN024BXH; Start 126; Stop 150
accaatttctaaacctgaagcaaac

SEQ ID NO: 442362 - DNA, 25 bp, Artificial
  probe
  misc_feature (1)..(25): SEQ ID NO: 6558; WAN024BXH; Start 125; Stop 149
caccaatttctaaacctgaagcaaa

SEQ ID NO: 442363 - DNA, 25 bp, Artificial
  probe
  misc_feature (1)..(25): SEQ ID NO: 6558; WAN024BXH; Start 210; Stop 234
tccaatgttcattcaaatcgtttct

SEQ ID NO: 442364 - DNA, 25 bp, Artificial
  probe
  misc_feature (1)..(25): SEQ ID NO: 6558; WAN024BXH; Start 77; Stop 101
atatggctaatccttacatttggtg

SEQ ID NO: 442365 - DNA, 25 bp, Artificial
  probe
  misc_feature (1)..(25): SEQ ID NO: 6558; WAN024BXH; Start 128; Stop 152
caatttctaaacctgaagcaaactc

SEQ ID NO: 442366 - DNA, 25 bp, Artificial
  probe
  misc_feature (1)..(25): SEQ ID NO: 6558; WAN024BXH; Start 116; Stop 140
aactctactcaccaatttctaaacc

SEQ ID NO: 442367 - DNA, 25 bp, Artificial
  probe
  misc_feature (1)..(25): SEQ ID NO: 6558; WAN024BXH; Start 202; Stop 226
cgtatccatccaatgttcattcaaa

SEQ ID NO: 442368 - DNA, 25 bp, Artificial
  probe
  misc_feature (1)..(25): SEQ ID NO: 6558; WAN024BXH; Start 205; Stop 229
atccatccaatgttcattcaaatcg

SEQ ID NO: 442369 - DNA, 25 bp, Artificial
  probe
  misc_feature (1)..(25): SEQ ID NO: 6558; WAN024BXH; Start 192; Stop 216
cgctgactatcgtatccatccaatg

SEQ ID NO: 442370 - DNA, 25 bp, Artificial
  probe
  misc_feature (1)..(25): SEQ ID NO: 6558; WAN024BXH; Start 158; Stop 182
accatcaggattatatctacattca

SEQ ID NO: 442371 - DNA, 25 bp, Artificial
  probe
  misc_feature (1)..(25): SEQ ID NO: 6558; WAN024BXH; Start 57; Stop 81
cgattgtgtaatgggaccaaatatg

SEQ ID NO: 442372 - DNA, 25 bp, Artificial
  probe
  misc_feature (1)..(25): SEQ ID NO: 6558; WAN024BXH; Start 207; Stop 231
ccatccaatgttcattcaaatcgtt

SEQ ID NO: 442373 - DNA, 25 bp, Artificial
  probe
  misc_feature (1)..(25): SEQ ID NO: 6558; WAN024BXH; Start 119; Stop 143
tctactcaccaatttctaaacctga

SEQ ID NO: 442374 - DNA, 25 bp, Artificial
  probe
  misc_feature (1)..(25): SEQ ID NO: 6558; WAN024BXH; Start 56; Stop 80
acgattgtgtaatgggaccaaatat

SEQ ID NO: 442375 - DNA, 25 bp, Artificial
  probe
  misc_feature (1)..(25): SEQ ID NO: 6558; WAN024BXH; Start 209; Stop 233
atccaatgttcattcaaatcgtttc

SEQ ID NO: 442376 - DNA, 25 bp, Artificial
  probe
  misc_feature (1)..(25): SEQ ID NO: 6558; WAN024BXH; Start 208; Stop 232
catccaatgttcattcaaatcgttt

SEQ ID NO: 442377 - DNA, 25 bp, Artificial
  probe
  misc_feature (1)..(25): SEQ ID NO: 6558; WAN024BXH; Start 159; Stop 183
ccatcaggattatatctacattcac

SEQ ID NO: 442378 - DNA, 25 bp, Artificial
  probe
  misc_feature (1)..(25): SEQ ID NO: 6559; WAN024F8X; Start 166; Stop 190
gttgagttggttgttggagatattg

SEQ ID NO: 442379 - DNA, 25 bp, Artificial
  probe
  misc_feature (1)..(25): SEQ ID NO: 6559; WAN024F8X; Start 165; Stop 189
tgttgagttggttgttggagatatt

SEQ ID NO: 442380 - DNA, 25 bp, Artificial
  probe
  misc_feature (1)..(25): SEQ ID NO: 6559; WAN024F8X; Start 615; Stop 639
gattacgaatatcttgagcggtatc

SEQ ID NO: 442381 - DNA, 25 bp, Artificial
  probe
  misc_feature (1)..(25): SEQ ID NO: 6559; WAN024F8X; Start 164; Stop 188
gtgttgagttggttgttggagatat

SEQ ID NO: 442382 - DNA, 25 bp, Artificial
  probe
  misc_feature (1)..(25): SEQ ID NO: 6559; WAN024F8X; Start 616; Stop 640
attacgaatatcttgagcggtatca

SEQ ID NO: 442383 - DNA, 25 bp, Artificial
  probe
  misc_feature (1)..(25): SEQ ID NO: 6559; WAN024F8X; Start 172; Stop 196
ttggttgttggagatattgctgatg

SEQ ID NO: 442384 - DNA, 25 bp, Artificial
  probe
  misc_feature (1)..(25): SEQ ID NO: 6559; WAN024F8X; Start 171; Stop 195
gttggttgttggagatattgctgat

SEQ ID NO: 442385 - DNA, 25 bp, Artificial
  probe
  misc_feature (1)..(25): SEQ ID NO: 6559; WAN024F8X; Start 167; Stop 191
ttgagttggttgttggagatattgc

SEQ ID NO: 442386 - DNA, 25 bp, Artificial
  probe
  misc_feature (1)..(25): SEQ ID NO: 6559; WAN024F8X; Start 647; Stop 671
aactctacggagaaggtaagaatgt

SEQ ID NO: 442387 - DNA, 25 bp, Artificial
  probe
  misc_feature (1)..(25): SEQ ID NO: 6559; WAN024F8X; Start 169; Stop 193
gagttggttgttggagatattgctg

SEQ ID NO: 442388 - DNA, 25 bp, Artificial
  probe
  misc_feature (1)..(25): SEQ ID NO: 6559; WAN024F8X; Start 648; Stop 672
actctacggagaaggtaagaatgtg

SEQ ID NO: 442389 - DNA, 25 bp, Artificial
  probe
  misc_feature (1)..(25): SEQ ID NO: 6559; WAN024F8X; Start 170; Stop 194
agttggttgttggagatattgctga

SEQ ID NO: 442390 - DNA, 25 bp, Artificial
  probe
  misc_feature (1)..(25): SEQ ID NO: 6559; WAN024F8X; Start 168; Stop 192
tgagttggttgttggagatattgct

SEQ ID NO: 442391 - DNA, 25 bp, Artificial
  probe
  misc_feature (1)..(25): SEQ ID NO: 6559; WAN024F8X; Start 582; Stop 606
ataccagcatatcgagaagttcatt

SEQ ID NO: 442392 - DNA, 25 bp, Artificial
  probe
  misc_feature (1)..(25): SEQ ID NO: 6559; WAN024F8X; Start 581; Stop 605
cataccagcatatcgagaagttcat

SEQ ID NO: 442393 - DNA, 25 bp, Artificial
  probe
  misc_feature (1)..(25): SEQ ID NO: 6559; WAN024F8X; Start 583; Stop 607
taccagcatatcgagaagttcattc

SEQ ID NO: 442394 - DNA, 25 bp, Artificial
  probe
  misc_feature (1)..(25): SEQ ID NO: 6559; WAN024F8X; Start 259; Stop 283
cacaatgataactcgctcaatgacc

SEQ ID NO: 442395 - DNA, 25 bp, Artificial
  probe
  misc_feature (1)..(25): SEQ ID NO: 6559; WAN024F8X; Start 258; Stop 282
ccacaatgataactcgctcaatgac

SEQ ID NO: 442396 - DNA, 25 bp, Artificial
  probe
  misc_feature (1)..(25): SEQ ID NO: 6559; WAN024F8X; Start 290; Stop 314
catttatccacaccaactttatcgg

SEQ ID NO: 442397 - DNA, 25 bp, Artificial
  probe
  misc_feature (1)..(25): SEQ ID NO: 6559; WAN024F8X; Start 289; Stop 313
ccatttatccacaccaactttatcg

SEQ ID NO: 442398 - DNA, 25 bp, Artificial
  probe
  misc_feature (1)..(25): SEQ ID NO: 6559; WAN024F8X; Start 303; Stop 327
caactttatcggaacttacacactt

SEQ ID NO: 442399 - DNA, 25 bp, Artificial
  probe
  misc_feature (1)..(25): SEQ ID NO: 6559; WAN024F8X; Start 43; Stop 67
tttatcggttctaactttgtccact

SEQ ID NO: 442400 - DNA, 25 bp, Artificial
  probe
  misc_feature (1)..(25): SEQ ID NO: 6559; WAN024F8X; Start 287; Stop 311
gtccatttatccacaccaactttat

SEQ ID NO: 442401 - DNA, 25 bp, Artificial
  probe
  misc_feature (1)..(25): SEQ ID NO: 6559; WAN024F8X; Start 46; Stop 70
atcggttctaactttgtccactatg

SEQ ID NO: 442402 - DNA, 25 bp, Artificial
  probe
  misc_feature (1)..(25): SEQ ID NO: 6559; WAN024F8X; Start 44; Stop 68
ttatcggttctaactttgtccacta

SEQ ID NO: 442403 - DNA, 25 bp, Artificial
  probe
  misc_feature (1)..(25): SEQ ID NO: 6559; WAN024F8X; Start 45; Stop 69
tatcggttctaactttgtccactat

SEQ ID NO: 442404 - DNA, 25 bp, Artificial
  probe
  misc_feature (1)..(25): SEQ ID NO: 6559; WAN024F8X; Start 302; Stop 326
ccaactttatcggaacttacacact

SEQ ID NO: 442405 - DNA, 25 bp, Artificial
  probe
  misc_feature (1)..(25): SEQ ID NO: 6559; WAN024F8X; Start 288; Stop 312
tccatttatccacaccaactttatc

SEQ ID NO: 442406 - DNA, 25 bp, Artificial
  probe
  misc_feature (1)..(25): SEQ ID NO: 6559; WAN024F8X; Start 304; Stop 328
aactttatcggaacttacacacttt

SEQ ID NO: 442407 - DNA, 25 bp, Artificial
  probe
  misc_feature (1)..(25): SEQ ID NO: 6559; WAN024F8X; Start 613; Stop 637
cagattacgaatatcttgagcggta

SEQ ID NO: 442408 - DNA, 25 bp, Artificial
  probe
  misc_feature (1)..(25): SEQ ID NO: 6559; WAN024F8X; Start 545; Stop 569
aagcaacgatttctaactgttcaaa

SEQ ID NO: 442409 - DNA, 25 bp, Artificial
  probe
  misc_feature (1)..(25): SEQ ID NO: 6559; WAN024F8X; Start 544; Stop 568
aaagcaacgatttctaactgttcaa

SEQ ID NO: 442410 - DNA, 25 bp, Artificial
  probe
  misc_feature (1)..(25): SEQ ID NO: 6559; WAN024F8X; Start 614; Stop 638
agattacgaatatcttgagcggtat

SEQ ID NO: 442411 - DNA, 25 bp, Artificial
  probe
  misc_feature (1)..(25): SEQ ID NO: 6560; WAN024BW8; Start 130; Stop 154
gaagttattagaaaggcagttgagc

SEQ ID NO: 442412 - DNA, 25 bp, Artificial
  probe
  misc_feature (1)..(25): SEQ ID NO: 6560; WAN024BW8; Start 62; Stop 86
taaggtttaatgatgagcaaagcag

SEQ ID NO: 442413 - DNA, 25 bp, Artificial
  probe
  misc_feature (1)..(25): SEQ ID NO: 6560; WAN024BW8; Start 131; Stop 155
aagttattagaaaggcagttgagca

SEQ ID NO: 442414 - DNA, 25 bp, Artificial
  probe
  misc_feature (1)..(25): SEQ ID NO: 6560; WAN024BW8; Start 65; Stop 89
ggtttaatgatgagcaaagcagaaa

SEQ ID NO: 442415 - DNA, 25 bp, Artificial
  probe
  misc_feature (1)..(25): SEQ ID NO: 6560; WAN024BW8; Start 132; Stop 156
agttattagaaaggcagttgagcaa

SEQ ID NO: 442416 - DNA, 25 bp, Artificial
  probe
  misc_feature (1)..(25): SEQ ID NO: 6560; WAN024BW8; Start 61; Stop 85
ataaggtttaatgatgagcaaagca

SEQ ID NO: 442417 - DNA, 25 bp, Artificial
  probe
  misc_feature (1)..(25): SEQ ID NO: 6560; WAN024BW8; Start 129; Stop 153
tgaagttattagaaaggcagttgag

SEQ ID NO: 442418 - DNA, 25 bp, Artificial
  probe
  misc_feature (1)..(25): SEQ ID NO: 6560; WAN024BW8; Start 64; Stop 88
aggtttaatgatgagcaaagcagaa

SEQ ID NO: 442419 - DNA, 25 bp, Artificial
  probe
  misc_feature (1)..(25): SEQ ID NO: 6560; WAN024BW8; Start 63; Stop 87
aaggtttaatgatgagcaaagcaga

SEQ ID NO: 442420 - DNA, 25 bp, Artificial
  probe
  misc_feature (1)..(25): SEQ ID NO: 6560; WAN024BW8; Start 56; Stop 80
tgacaataaggtttaatgatgagca

SEQ ID NO: 442421 - DNA, 25 bp, Artificial
  probe
  misc_feature (1)..(25): SEQ ID NO: 6560; WAN024BW8; Start 60; Stop 84
aataaggtttaatgatgagcaaagc

SEQ ID NO: 442422 - DNA, 25 bp, Artificial
  probe
  misc_feature (1)..(25): SEQ ID NO: 6560; WAN024BW8; Start 125; Stop 149
agtctgaagttattagaaaggcagt

SEQ ID NO: 442423 - DNA, 25 bp, Artificial
  probe
  misc_feature (1)..(25): SEQ ID NO: 6560; WAN024BW8; Start 57; Stop 81
gacaataaggtttaatgatgagcaa

SEQ ID NO: 442424 - DNA, 25 bp, Artificial
  probe
  misc_feature (1)..(25): SEQ ID NO: 6560; WAN024BW8; Start 133; Stop 157
gttattagaaaggcagttgagcaac

SEQ ID NO: 442425 - DNA, 25 bp, Artificial
  probe
  misc_feature (1)..(25): SEQ ID NO: 6560; WAN024BW8; Start 128; Stop 152
ctgaagttattagaaaggcagttga

SEQ ID NO: 442426 - DNA, 25 bp, Artificial
  probe
  misc_feature (1)..(25): SEQ ID NO: 6560; WAN024BW8; Start 127; Stop 151
tctgaagttattagaaaggcagttg

SEQ ID NO: 442427 - DNA, 25 bp, Artificial
  probe
  misc_feature (1)..(25): SEQ ID NO: 6560; WAN024BW8; Start 126; Stop 150
gtctgaagttattagaaaggcagtt

SEQ ID NO: 442428 - DNA, 25 bp, Artificial
  probe
  misc_feature (1)..(25): SEQ ID NO: 6560; WAN024BW8; Start 124; Stop 148
aagtctgaagttattagaaaggcag

SEQ ID NO: 442429 - DNA, 25 bp, Artificial
  probe
  misc_feature (1)..(25): SEQ ID NO: 6560; WAN024BW8; Start 55; Stop 79
atgacaataaggtttaatgatgagc

SEQ ID NO: 442430 - DNA, 25 bp, Artificial
  probe
  misc_feature (1)..(25): SEQ ID NO: 6560; WAN024BW8; Start 123; Stop 147
taagtctgaagttattagaaaggca

SEQ ID NO: 442431 - DNA, 25 bp, Artificial
  probe
  misc_feature (1)..(25): SEQ ID NO: 6560; WAN024BW8; Start 58; Stop 82
acaataaggtttaatgatgagcaaa

SEQ ID NO: 442432 - DNA, 25 bp, Artificial
  probe
  misc_feature (1)..(25): SEQ ID NO: 6560; WAN024BW8; Start 59; Stop 83
caataaggtttaatgatgagcaaag

SEQ ID NO: 442433 - DNA, 25 bp, Artificial
  probe
  misc_feature (1)..(25): SEQ ID NO: 6560; WAN024BW8; Start 122; Stop 146
ctaagtctgaagttattagaaaggc

SEQ ID NO: 442434 - DNA, 25 bp, Artificial
  probe
  misc_feature (1)..(25): SEQ ID NO: 6560; WAN024BW8; Start 66; Stop 90
gtttaatgatgagcaaagcagaaaa

SEQ ID NO: 442435 - DNA, 25 bp, Artificial
  probe
  misc_feature (1)..(25): SEQ ID NO: 6560; WAN024BW8; Start 112; Stop 136
aacaatcttactaagtctgaagtta

SEQ ID NO: 442436 - DNA, 25 bp, Artificial
  probe
  misc_feature (1)..(25): SEQ ID NO: 6560; WAN024BW8; Start 113; Stop 137
acaatcttactaagtctgaagttat

SEQ ID NO: 442437 - DNA, 25 bp, Artificial
  probe
  misc_feature (1)..(25): SEQ ID NO: 6560; WAN024BW8; Start 111; Stop 135
aaacaatcttactaagtctgaagtt

SEQ ID NO: 442438 - DNA, 25 bp, Artificial
  probe
  misc_feature (1)..(25): SEQ ID NO: 6560; WAN024BW8; Start 54; Stop 78
aatgacaataaggtttaatgatgag

SEQ ID NO: 442439 - DNA, 25 bp, Artificial
  probe
  misc_feature (1)..(25): SEQ ID NO: 6560; WAN024BW8; Start 135; Stop 159
tattagaaaggcagttgagcaactt

SEQ ID NO: 442440 - DNA, 25 bp, Artificial
  probe
  misc_feature (1)..(25): SEQ ID NO: 6560; WAN024BW8; Start 134; Stop 158
ttattagaaaggcagttgagcaact

SEQ ID NO: 442441 - DNA, 25 bp, Artificial
  probe
  misc_feature (1)..(25): SEQ ID NO: 6560; WAN024BW8; Start 121; Stop 145
actaagtctgaagttattagaaagg

SEQ ID NO: 442442 - DNA, 25 bp, Artificial
  probe
  misc_feature (1)..(25): SEQ ID NO: 6560; WAN024BW8; Start 136; Stop 160
attagaaaggcagttgagcaacttc

SEQ ID NO: 442443 - DNA, 25 bp, Artificial
  probe
  misc_feature (1)..(25): SEQ ID NO: 6560; WAN024BW8; Start 107; Stop 131
gtcaaaacaatcttactaagtctga

SEQ ID NO: 442444 - DNA, 25 bp, Artificial
  probe
  misc_feature (1)..(25): SEQ ID NO: 6561; WAN024BXS; Start 155; Stop 179
gccaactactcatctactccattat

SEQ ID NO: 442445 - DNA, 25 bp, Artificial
  probe
  misc_feature (1)..(25): SEQ ID NO: 6561; WAN024BXS; Start 154; Stop 178
agccaactactcatctactccatta

SEQ ID NO: 442446 - DNA, 25 bp, Artificial
  probe
  misc_feature (1)..(25): SEQ ID NO: 6561; WAN024BXS; Start 127; Stop 151
tccaagattactatcagattgacca

SEQ ID NO: 442447 - DNA, 25 bp, Artificial
  probe
  misc_feature (1)..(25): SEQ ID NO: 6561; WAN024BXS; Start 162; Stop 186
actcatctactccattattctaacg

SEQ ID NO: 442448 - DNA, 25 bp, Artificial
  probe
  misc_feature (1)..(25): SEQ ID NO: 6561; WAN024BXS; Start 133; Stop 157
attactatcagattgaccatgagcc

SEQ ID NO: 442449 - DNA, 25 bp, Artificial
  probe
  misc_feature (1)..(25): SEQ ID NO: 6561; WAN024BXS; Start 153; Stop 177
gagccaactactcatctactccatt

SEQ ID NO: 442450 - DNA, 25 bp, Artificial
  probe
  misc_feature (1)..(25): SEQ ID NO: 6561; WAN024BXS; Start 126; Stop 150
gtccaagattactatcagattgacc

SEQ ID NO: 442451 - DNA, 25 bp, Artificial
  probe
  misc_feature (1)..(25): SEQ ID NO: 6561; WAN024BXS; Start 156; Stop 180
ccaactactcatctactccattatt

SEQ ID NO: 442452 - DNA, 25 bp, Artificial
  probe
  misc_feature (1)..(25): SEQ ID NO: 6561; WAN024BXS; Start 128; Stop 152
ccaagattactatcagattgaccat

SEQ ID NO: 442453 - DNA, 25 bp, Artificial
  probe
  misc_feature (1)..(25): SEQ ID NO: 6561; WAN024BXS; Start 132; Stop 156
gattactatcagattgaccatgagc

SEQ ID NO: 442454 - DNA, 25 bp, Artificial
  probe
  misc_feature (1)..(25): SEQ ID NO: 6561; WAN024BXS; Start 163; Stop 187
ctcatctactccattattctaacga

SEQ ID NO: 442455 - DNA, 25 bp, Artificial
  probe
  misc_feature (1)..(25): SEQ ID NO: 6561; WAN024BXS; Start 138; Stop 162
tatcagattgaccatgagccaacta

SEQ ID NO: 442456 - DNA, 25 bp, Artificial
  probe
  misc_feature (1)..(25): SEQ ID NO: 6561; WAN024BXS; Start 135; Stop 159
tactatcagattgaccatgagccaa

SEQ ID NO: 442457 - DNA, 25 bp, Artificial
  probe
  misc_feature (1)..(25): SEQ ID NO: 6561; WAN024BXS; Start 134; Stop 158
ttactatcagattgaccatgagcca

SEQ ID NO: 442458 - DNA, 25 bp, Artificial
  probe
  misc_feature (1)..(25): SEQ ID NO: 6561; WAN024BXS; Start 120; Stop 144
ccttatgtccaagattactatcaga

SEQ ID NO: 442459 - DNA, 25 bp, Artificial
  probe
  misc_feature (1)..(25): SEQ ID NO: 6561; WAN024BXS; Start 125; Stop 149
tgtccaagattactatcagattgac

SEQ ID NO: 442460 - DNA, 25 bp, Artificial
  probe
  misc_feature (1)..(25): SEQ ID NO: 6561; WAN024BXS; Start 118; Stop 142
gcccttatgtccaagattactatca

SEQ ID NO: 442461 - DNA, 25 bp, Artificial
  probe
  misc_feature (1)..(25): SEQ ID NO: 6561; WAN024BXS; Start 164; Stop 188
tcatctactccattattctaacgaa

SEQ ID NO: 442462 - DNA, 25 bp, Artificial
  probe
  misc_feature (1)..(25): SEQ ID NO: 6561; WAN024BXS; Start 124; Stop 148
atgtccaagattactatcagattga

SEQ ID NO: 442463 - DNA, 25 bp, Artificial
  probe
  misc_feature (1)..(25): SEQ ID NO: 6561; WAN024BXS; Start 137; Stop 161
ctatcagattgaccatgagccaact

SEQ ID NO: 442464 - DNA, 25 bp, Artificial
  probe
  misc_feature (1)..(25): SEQ ID NO: 6561; WAN024BXS; Start 131; Stop 155
agattactatcagattgaccatgag

SEQ ID NO: 442465 - DNA, 25 bp, Artificial
  probe
  misc_feature (1)..(25): SEQ ID NO: 6561; WAN024BXS; Start 157; Stop 181
caactactcatctactccattattc

SEQ ID NO: 442466 - DNA, 25 bp, Artificial
  probe
  misc_feature (1)..(25): SEQ ID NO: 6561; WAN024BXS; Start 139; Stop 163
atcagattgaccatgagccaactac

SEQ ID NO: 442467 - DNA, 25 bp, Artificial
  probe
  misc_feature (1)..(25): SEQ ID NO: 6561; WAN024BXS; Start 136; Stop 160
actatcagattgaccatgagccaac

SEQ ID NO: 442468 - DNA, 25 bp, Artificial
  probe
  misc_feature (1)..(25): SEQ ID NO: 6561; WAN024BXS; Start 129; Stop 153
caagattactatcagattgaccatg

SEQ ID NO: 442469 - DNA, 25 bp, Artificial
  probe
  misc_feature (1)..(25): SEQ ID NO: 6561; WAN024BXS; Start 119; Stop 143
cccttatgtccaagattactatcag

SEQ ID NO: 442470 - DNA, 25 bp, Artificial
  probe
  misc_feature (1)..(25): SEQ ID NO: 6561; WAN024BXS; Start 158; Stop 182
aactactcatctactccattattct

SEQ ID NO: 442471 - DNA, 25 bp, Artificial
  probe
  misc_feature (1)..(25): SEQ ID NO: 6561; WAN024BXS; Start 130; Stop 154
aagattactatcagattgaccatga

SEQ ID NO: 442472 - DNA, 25 bp, Artificial
  probe
  misc_feature (1)..(25): SEQ ID NO: 6561; WAN024BXS; Start 188; Stop 212
atatgagctacaaacgcaagagaaa

SEQ ID NO: 442473 - DNA, 25 bp, Artificial
  probe
  misc_feature (1)..(25): SEQ ID NO: 6561; WAN024BXS; Start 187; Stop 211
aatatgagctacaaacgcaagagaa

SEQ ID NO: 442474 - DNA, 25 bp, Artificial
  probe
  misc_feature (1)..(25): SEQ ID NO: 6561; WAN024BXS; Start 179; Stop 203
ttctaacgaatatgagctacaaacg

SEQ ID NO: 442475 - DNA, 25 bp, Artificial
  probe
  misc_feature (1)..(25): SEQ ID NO: 6561; WAN024BXS; Start 186; Stop 210
gaatatgagctacaaacgcaagaga

SEQ ID NO: 442476 - DNA, 25 bp, Artificial
  probe
  misc_feature (1)..(25): SEQ ID NO: 6561; WAN024BXS; Start 182; Stop 206
taacgaatatgagctacaaacgcaa

SEQ ID NO: 442477 - DNA, 25 bp, Artificial
  probe
  misc_feature (1)..(25): SEQ ID NO: 6562; WAN024GHV; Start 18; Stop 42
actctgcctgaccttattcttatta

SEQ ID NO: 442478 - DNA, 25 bp, Artificial
  probe
  misc_feature (1)..(25): SEQ ID NO: 6562; WAN024GHV; Start 17; Stop 41
tactctgcctgaccttattcttatt

SEQ ID NO: 442479 - DNA, 25 bp, Artificial
  probe
  misc_feature (1)..(25): SEQ ID NO: 6562; WAN024GHV; Start 16; Stop 40
ttactctgcctgaccttattcttat

SEQ ID NO: 442480 - DNA, 25 bp, Artificial
  probe
  misc_feature (1)..(25): SEQ ID NO: 6562; WAN024GHV; Start 555; Stop 579
actgctcttagttccattcttgatt

SEQ ID NO: 442481 - DNA, 25 bp, Artificial
  probe
  misc_feature (1)..(25): SEQ ID NO: 6562; WAN024GHV; Start 553; Stop 577
ttactgctcttagttccattcttga

SEQ ID NO: 442482 - DNA, 25 bp, Artificial
  probe
  misc_feature (1)..(25): SEQ ID NO: 6562; WAN024GHV; Start 554; Stop 578
tactgctcttagttccattcttgat

SEQ ID NO: 442483 - DNA, 25 bp, Artificial
  probe
  misc_feature (1)..(25): SEQ ID NO: 6562; WAN024GHV; Start 20; Stop 44
tctgcctgaccttattcttattaac

SEQ ID NO: 442484 - DNA, 25 bp, Artificial
  probe
  misc_feature (1)..(25): SEQ ID NO: 6562; WAN024GHV; Start 21; Stop 45
ctgcctgaccttattcttattaact

SEQ ID NO: 442485 - DNA, 25 bp, Artificial
  probe
  misc_feature (1)..(25): SEQ ID NO: 6562; WAN024GHV; Start 19; Stop 43
ctctgcctgaccttattcttattaa

SEQ ID NO: 442486 - DNA, 25 bp, Artificial
  probe
  misc_feature (1)..(25): SEQ ID NO: 6562; WAN024GHV; Start 22; Stop 46
tgcctgaccttattcttattaactt

SEQ ID NO: 442487 - DNA, 25 bp, Artificial
  probe
  misc_feature (1)..(25): SEQ ID NO: 6562; WAN024GHV; Start 937; Stop 961
gtcaattacaatagtaccgttcact

SEQ ID NO: 442488 - DNA, 25 bp, Artificial
  probe
  misc_feature (1)..(25): SEQ ID NO: 6562; WAN024GHV; Start 936; Stop 960
tgtcaattacaatagtaccgttcac

SEQ ID NO: 442489 - DNA, 25 bp, Artificial
  probe
  misc_feature (1)..(25): SEQ ID NO: 6562; WAN024GHV; Start 938; Stop 962
tcaattacaatagtaccgttcactt

SEQ ID NO: 442490 - DNA, 25 bp, Artificial
  probe
  misc_feature (1)..(25): SEQ ID NO: 6562; WAN024GHV; Start 111; Stop 135
tctcattagttctgtatttgccctt

SEQ ID NO: 442491 - DNA, 25 bp, Artificial
  probe
  misc_feature (1)..(25): SEQ ID NO: 6562; WAN024GHV; Start 110; Stop 134
ttctcattagttctgtatttgccct

SEQ ID NO: 442492 - DNA, 25 bp, Artificial
  probe
  misc_feature (1)..(25): SEQ ID NO: 6562; WAN024GHV; Start 944; Stop 968
acaatagtaccgttcacttagaatt

SEQ ID NO: 442493 - DNA, 25 bp, Artificial
  probe
  misc_feature (1)..(25): SEQ ID NO: 6562; WAN024GHV; Start 556; Stop 580
ctgctcttagttccattcttgattt

SEQ ID NO: 442494 - DNA, 25 bp, Artificial
  probe
  misc_feature (1)..(25): SEQ ID NO: 6562; WAN024GHV; Start 109; Stop 133
tttctcattagttctgtatttgccc

SEQ ID NO: 442495 - DNA, 25 bp, Artificial
  probe
  misc_feature (1)..(25): SEQ ID NO: 6562; WAN024GHV; Start 1304; Stop 1328
tctctgacacaagtattaaatcgga

SEQ ID NO: 442496 - DNA, 25 bp, Artificial
  probe
  misc_feature (1)..(25): SEQ ID NO: 6562; WAN024GHV; Start 352; Stop 376
attcataatcttgcacttagccatg

SEQ ID NO: 442497 - DNA, 25 bp, Artificial
  probe
  misc_feature (1)..(25): SEQ ID NO: 6562; WAN024GHV; Start 1175; Stop 1199
tatcgtccattgagcaatactcgtt

SEQ ID NO: 442498 - DNA, 25 bp, Artificial
  probe
  misc_feature (1)..(25): SEQ ID NO: 6562; WAN024GHV; Start 1174; Stop 1198
ttatcgtccattgagcaatactcgt

SEQ ID NO: 442499 - DNA, 25 bp, Artificial
  probe
  misc_feature (1)..(25): SEQ ID NO: 6562; WAN024GHV; Start 15; Stop 39
tttactctgcctgaccttattctta

SEQ ID NO: 442500 - DNA, 25 bp, Artificial
  probe
  misc_feature (1)..(25): SEQ ID NO: 6562; WAN024GHV; Start 961; Stop 985
ttagaatttcggcagttagggatta

SEQ ID NO: 442501 - DNA, 25 bp, Artificial
  probe
  misc_feature (1)..(25): SEQ ID NO: 6562; WAN024GHV; Start 1303; Stop 1327
ctctctgacacaagtattaaatcgg

SEQ ID NO: 442502 - DNA, 25 bp, Artificial
  probe
  misc_feature (1)..(25): SEQ ID NO: 6562; WAN024GHV; Start 962; Stop 986
tagaatttcggcagttagggattac

SEQ ID NO: 442503 - DNA, 25 bp, Artificial
  probe
  misc_feature (1)..(25): SEQ ID NO: 6562; WAN024GHV; Start 1187; Stop 1211
agcaatactcgtttacaacaatcag

SEQ ID NO: 442504 - DNA, 25 bp, Artificial
  probe
  misc_feature (1)..(25): SEQ ID NO: 6562; WAN024GHV; Start 1236; Stop 1260
cttggtttacctaatggctttcttt

SEQ ID NO: 442505 - DNA, 25 bp, Artificial
  probe
  misc_feature (1)..(25): SEQ ID NO: 6562; WAN024GHV; Start 1235; Stop 1259
tcttggtttacctaatggctttctt

SEQ ID NO: 442506 - DNA, 25 bp, Artificial
  probe
  misc_feature (1)..(25): SEQ ID NO: 6562; WAN024GHV; Start 1232; Stop 1256
tagtcttggtttacctaatggcttt

SEQ ID NO: 442507 - DNA, 25 bp, Artificial
  probe
  misc_feature (1)..(25): SEQ ID NO: 6562; WAN024GHV; Start 1231; Stop 1255
atagtcttggtttacctaatggctt

SEQ ID NO: 442508 - DNA, 25 bp, Artificial
  probe
  misc_feature (1)..(25): SEQ ID NO: 6562; WAN024GHV; Start 960; Stop 984
cttagaatttcggcagttagggatt

SEQ ID NO: 442509 - DNA, 25 bp, Artificial
  probe
  misc_feature (1)..(25): SEQ ID NO: 6562; WAN024GHV; Start 1305; Stop 1329
ctctgacacaagtattaaatcggaa

SEQ ID NO: 442510 - DNA, 25 bp, Artificial
  probe
  misc_feature (1)..(25): SEQ ID NO: 6563; WAN024BO9; Start 266; Stop 290
catcaatctcttatagcacctcaca

SEQ ID NO: 442511 - DNA, 25 bp, Artificial
  probe
  misc_feature (1)..(25): SEQ ID NO: 6563; WAN024BO9; Start 265; Stop 289
acatcaatctcttatagcacctcac

SEQ ID NO: 442512 - DNA, 25 bp, Artificial
  probe
  misc_feature (1)..(25): SEQ ID NO: 6563; WAN024BO9; Start 267; Stop 291
atcaatctcttatagcacctcacaa

SEQ ID NO: 442513 - DNA, 25 bp, Artificial
  probe
  misc_feature (1)..(25): SEQ ID NO: 6563; WAN024BO9; Start 264; Stop 288
tacatcaatctcttatagcacctca

SEQ ID NO: 442514 - DNA, 25 bp, Artificial
  probe
  misc_feature (1)..(25): SEQ ID NO: 6563; WAN024BO9; Start 262; Stop 286
cgtacatcaatctcttatagcacct

SEQ ID NO: 442515 - DNA, 25 bp, Artificial
  probe
  misc_feature (1)..(25): SEQ ID NO: 6563; WAN024BO9; Start 86; Stop 110
tagcgattgacctatacactaacgg

SEQ ID NO: 442516 - DNA, 25 bp, Artificial
  probe
  misc_feature (1)..(25): SEQ ID NO: 6563; WAN024BO9; Start 261; Stop 285
ccgtacatcaatctcttatagcacc

SEQ ID NO: 442517 - DNA, 25 bp, Artificial
  probe
  misc_feature (1)..(25): SEQ ID NO: 6563; WAN024BO9; Start 85; Stop 109
atagcgattgacctatacactaacg

SEQ ID NO: 442518 - DNA, 25 bp, Artificial
  probe
  misc_feature (1)..(25): SEQ ID NO: 6563; WAN024BO9; Start 364; Stop 388
ctagttgttggagttgcctatgatc

SEQ ID NO: 442519 - DNA, 25 bp, Artificial
  probe
  misc_feature (1)..(25): SEQ ID NO: 6563; WAN024BO9; Start 263; Stop 287
gtacatcaatctcttatagcacctc

SEQ ID NO: 442520 - DNA, 25 bp, Artificial
  probe
  misc_feature (1)..(25): SEQ ID NO: 6563; WAN024BO9; Start 260; Stop 284
gccgtacatcaatctcttatagcac

SEQ ID NO: 442521 - DNA, 25 bp, Artificial
  probe
  misc_feature (1)..(25): SEQ ID NO: 6563; WAN024BO9; Start 84; Stop 108
gatagcgattgacctatacactaac

SEQ ID NO: 442522 - DNA, 25 bp, Artificial
  probe
  misc_feature (1)..(25): SEQ ID NO: 6563; WAN024BO9; Start 83; Stop 107
agatagcgattgacctatacactaa

SEQ ID NO: 442523 - DNA, 25 bp, Artificial
  probe
  misc_feature (1)..(25): SEQ ID NO: 6563; WAN024BO9; Start 82; Stop 106
aagatagcgattgacctatacacta

SEQ ID NO: 442524 - DNA, 25 bp, Artificial
  probe
  misc_feature (1)..(25): SEQ ID NO: 6563; WAN024BO9; Start 16; Stop 40
caagaggagttcgatgagttagatt

SEQ ID NO: 442525 - DNA, 25 bp, Artificial
  probe
  misc_feature (1)..(25): SEQ ID NO: 6563; WAN024BO9; Start 195; Stop 219
ctatctcgatgcctctggtattatg

SEQ ID NO: 442526 - DNA, 25 bp, Artificial
  probe
  misc_feature (1)..(25): SEQ ID NO: 6563; WAN024BO9; Start 196; Stop 220
tatctcgatgcctctggtattatgt

SEQ ID NO: 442527 - DNA, 25 bp, Artificial
  probe
  misc_feature (1)..(25): SEQ ID NO: 6563; WAN024BO9; Start 363; Stop 387
cctagttgttggagttgcctatgat

SEQ ID NO: 442528 - DNA, 25 bp, Artificial
  probe
  misc_feature (1)..(25): SEQ ID NO: 6563; WAN024BO9; Start 89; Stop 113
cgattgacctatacactaacggtat

SEQ ID NO: 442529 - DNA, 25 bp, Artificial
  probe
  misc_feature (1)..(25): SEQ ID NO: 6563; WAN024BO9; Start 15; Stop 39
acaagaggagttcgatgagttagat

SEQ ID NO: 442530 - DNA, 25 bp, Artificial
  probe
  misc_feature (1)..(25): SEQ ID NO: 6563; WAN024BO9; Start 194; Stop 218
cctatctcgatgcctctggtattat

SEQ ID NO: 442531 - DNA, 25 bp, Artificial
  probe
  misc_feature (1)..(25): SEQ ID NO: 6563; WAN024BO9; Start 268; Stop 292
tcaatctcttatagcacctcacaaa

SEQ ID NO: 442532 - DNA, 25 bp, Artificial
  probe
  misc_feature (1)..(25): SEQ ID NO: 6563; WAN024BO9; Start 276; Stop 300
ttatagcacctcacaaagcacatta

SEQ ID NO: 442533 - DNA, 25 bp, Artificial
  probe
  misc_feature (1)..(25): SEQ ID NO: 6563; WAN024BO9; Start 309; Stop 333
gcgatttaatttgtctatggatgct

SEQ ID NO: 442534 - DNA, 25 bp, Artificial
  probe
  misc_feature (1)..(25): SEQ ID NO: 6563; WAN024BO9; Start 308; Stop 332
agcgatttaatttgtctatggatgc

SEQ ID NO: 442535 - DNA, 25 bp, Artificial
  probe
  misc_feature (1)..(25): SEQ ID NO: 6563; WAN024BO9; Start 304; Stop 328
ggtcagcgatttaatttgtctatgg

SEQ ID NO: 442536 - DNA, 25 bp, Artificial
  probe
  misc_feature (1)..(25): SEQ ID NO: 6563; WAN024BO9; Start 277; Stop 301
tatagcacctcacaaagcacattag

SEQ ID NO: 442537 - DNA, 25 bp, Artificial
  probe
  misc_feature (1)..(25): SEQ ID NO: 6563; WAN024BO9; Start 305; Stop 329
gtcagcgatttaatttgtctatgga

SEQ ID NO: 442538 - DNA, 25 bp, Artificial
  probe
  misc_feature (1)..(25): SEQ ID NO: 6563; WAN024BO9; Start 303; Stop 327
aggtcagcgatttaatttgtctatg

SEQ ID NO: 442539 - DNA, 25 bp, Artificial
  probe
  misc_feature (1)..(25): SEQ ID NO: 6563; WAN024BO9; Start 302; Stop 326
caggtcagcgatttaatttgtctat

SEQ ID NO: 442540 - DNA, 25 bp, Artificial
  probe
  misc_feature (1)..(25): SEQ ID NO: 6563; WAN024BO9; Start 269; Stop 293
caatctcttatagcacctcacaaag

SEQ ID NO: 442541 - DNA, 25 bp, Artificial
  probe
  misc_feature (1)..(25): SEQ ID NO: 6563; WAN024BO9; Start 365; Stop 389
tagttgttggagttgcctatgatcg

SEQ ID NO: 442542 - DNA, 25 bp, Artificial
  probe
  misc_feature (1)..(25): SEQ ID NO: 6563; WAN024BO9; Start 270; Stop 294
aatctcttatagcacctcacaaagc

SEQ ID NO: 442543 - DNA, 25 bp, Artificial
  probe
  misc_feature (1)..(25): SEQ ID NO: 6564; WAN024C2O; Start 229; Stop 253
agtatgagttccatcgttgttatcc

SEQ ID NO: 442544 - DNA, 25 bp, Artificial
  probe
  misc_feature (1)..(25): SEQ ID NO: 6564; WAN024C2O; Start 228; Stop 252
cagtatgagttccatcgttgttatc

SEQ ID NO: 442545 - DNA, 25 bp, Artificial
  probe
  misc_feature (1)..(25): SEQ ID NO: 6564; WAN024C2O; Start 237; Stop 261
ttccatcgttgttatccgttacttc

SEQ ID NO: 442546 - DNA, 25 bp, Artificial
  probe
  misc_feature (1)..(25): SEQ ID NO: 6564; WAN024C2O; Start 236; Stop 260
gttccatcgttgttatccgttactt

SEQ ID NO: 442547 - DNA, 25 bp, Artificial
  probe
  misc_feature (1)..(25): SEQ ID NO: 6564; WAN024C2O; Start 234; Stop 258
gagttccatcgttgttatccgttac

SEQ ID NO: 442548 - DNA, 25 bp, Artificial
  probe
  misc_feature (1)..(25): SEQ ID NO: 6564; WAN024C2O; Start 230; Stop 254
gtatgagttccatcgttgttatccg

SEQ ID NO: 442549 - DNA, 25 bp, Artificial
  probe
  misc_feature (1)..(25): SEQ ID NO: 6564; WAN024C2O; Start 227; Stop 251
acagtatgagttccatcgttgttat

SEQ ID NO: 442550 - DNA, 25 bp, Artificial
  probe
  misc_feature (1)..(25): SEQ ID NO: 6564; WAN024C2O; Start 224; Stop 248
ttaacagtatgagttccatcgttgt

SEQ ID NO: 442551 - DNA, 25 bp, Artificial
  probe
  misc_feature (1)..(25): SEQ ID NO: 6564; WAN024C2O; Start 239; Stop 263
ccatcgttgttatccgttacttcaa

SEQ ID NO: 442552 - DNA, 25 bp, Artificial
  probe
  misc_feature (1)..(25): SEQ ID NO: 6564; WAN024C2O; Start 104; Stop 128
ttagtgattgttactgtgtggcttc

SEQ ID NO: 442553 - DNA, 25 bp, Artificial
  probe
  misc_feature (1)..(25): SEQ ID NO: 6564; WAN024C2O; Start 238; Stop 262
tccatcgttgttatccgttacttca

SEQ ID NO: 442554 - DNA, 25 bp, Artificial
  probe
  misc_feature (1)..(25): SEQ ID NO: 6564; WAN024C2O; Start 233; Stop 257
tgagttccatcgttgttatccgtta

SEQ ID NO: 442555 - DNA, 25 bp, Artificial
  probe
  misc_feature (1)..(25): SEQ ID NO: 6564; WAN024C2O; Start 231; Stop 255
tatgagttccatcgttgttatccgt

SEQ ID NO: 442556 - DNA, 25 bp, Artificial
  probe
  misc_feature (1)..(25): SEQ ID NO: 6564; WAN024C2O; Start 103; Stop 127
gttagtgattgttactgtgtggctt

SEQ ID NO: 442557 - DNA, 25 bp, Artificial
  probe
  misc_feature (1)..(25): SEQ ID NO: 6564; WAN024C2O; Start 182; Stop 206
ttgatgatagcgttggtaacattgc

SEQ ID NO: 442558 - DNA, 25 bp, Artificial
  probe
  misc_feature (1)..(25): SEQ ID NO: 6564; WAN024C2O; Start 235; Stop 259
agttccatcgttgttatccgttact

SEQ ID NO: 442559 - DNA, 25 bp, Artificial
  probe
  misc_feature (1)..(25): SEQ ID NO: 6564; WAN024C2O; Start 232; Stop 256
atgagttccatcgttgttatccgtt

SEQ ID NO: 442560 - DNA, 25 bp, Artificial
  probe
  misc_feature (1)..(25): SEQ ID NO: 6564; WAN024C2O; Start 264; Stop 288
ctttaggagtcttaccgtctttacc

SEQ ID NO: 442561 - DNA, 25 bp, Artificial
  probe
  misc_feature (1)..(25): SEQ ID NO: 6564; WAN024C2O; Start 62; Stop 86
cgtccattcttaacaacaaactcat

SEQ ID NO: 442562 - DNA, 25 bp, Artificial
  probe
  misc_feature (1)..(25): SEQ ID NO: 6564; WAN024C2O; Start 162; Stop 186
ctttaccgtctttaccatctttgat

SEQ ID NO: 442563 - DNA, 25 bp, Artificial
  probe
  misc_feature (1)..(25): SEQ ID NO: 6564; WAN024C2O; Start 181; Stop 205
tttgatgatagcgttggtaacattg

SEQ ID NO: 442564 - DNA, 25 bp, Artificial
  probe
  misc_feature (1)..(25): SEQ ID NO: 6564; WAN024C2O; Start 180; Stop 204
ctttgatgatagcgttggtaacatt

SEQ ID NO: 442565 - DNA, 25 bp, Artificial
  probe
  misc_feature (1)..(25): SEQ ID NO: 6564; WAN024C2O; Start 179; Stop 203
tctttgatgatagcgttggtaacat

SEQ ID NO: 442566 - DNA, 25 bp, Artificial
  probe
  misc_feature (1)..(25): SEQ ID NO: 6564; WAN024C2O; Start 178; Stop 202
atctttgatgatagcgttggtaaca

SEQ ID NO: 442567 - DNA, 25 bp, Artificial
  probe
  misc_feature (1)..(25): SEQ ID NO: 6564; WAN024C2O; Start 161; Stop 185
gctttaccgtctttaccatctttga

SEQ ID NO: 442568 - DNA, 25 bp, Artificial
  probe
  misc_feature (1)..(25): SEQ ID NO: 6564; WAN024C2O; Start 223; Stop 247
tttaacagtatgagttccatcgttg

SEQ ID NO: 442569 - DNA, 25 bp, Artificial
  probe
  misc_feature (1)..(25): SEQ ID NO: 6564; WAN024C2O; Start 105; Stop 129
tagtgattgttactgtgtggcttcc

SEQ ID NO: 442570 - DNA, 25 bp, Artificial
  probe
  misc_feature (1)..(25): SEQ ID NO: 6564; WAN024C2O; Start 222; Stop 246
ctttaacagtatgagttccatcgtt

SEQ ID NO: 442571 - DNA, 25 bp, Artificial
  probe
  misc_feature (1)..(25): SEQ ID NO: 6564; WAN024C2O; Start 221; Stop 245
actttaacagtatgagttccatcgt

SEQ ID NO: 442572 - DNA, 25 bp, Artificial
  probe
  misc_feature (1)..(25): SEQ ID NO: 6564; WAN024C2O; Start 263; Stop 287
actttaggagtcttaccgtctttac

SEQ ID NO: 442573 - DNA, 25 bp, Artificial
  probe
  misc_feature (1)..(25): SEQ ID NO: 6564; WAN024C2O; Start 256; Stop 280
tacttcaactttaggagtcttaccg

SEQ ID NO: 442574 - DNA, 25 bp, Artificial
  probe
  misc_feature (1)..(25): SEQ ID NO: 6564; WAN024C2O; Start 261; Stop 285
caactttaggagtcttaccgtcttt

SEQ ID NO: 442575 - DNA, 25 bp, Artificial
  probe
  misc_feature (1)..(25): SEQ ID NO: 6564; WAN024C2O; Start 252; Stop 276
ccgttacttcaactttaggagtctt

SEQ ID NO: 442576 - DNA, 25 bp, Artificial
  probe
  misc_feature (1)..(25): SEQ ID NO: 6565; WAN024AVB; Start 51; Stop 75
tgtggctccagctactctaactaat

SEQ ID NO: 442577 - DNA, 25 bp, Artificial
  probe
  misc_feature (1)..(25): SEQ ID NO: 6565; WAN024AVB; Start 50; Stop 74
ttgtggctccagctactctaactaa

SEQ ID NO: 442578 - DNA, 25 bp, Artificial
  probe
  misc_feature (1)..(25): SEQ ID NO: 6565; WAN024AVB; Start 49; Stop 73
gttgtggctccagctactctaacta

SEQ ID NO: 442579 - DNA, 25 bp, Artificial
  probe
  misc_feature (1)..(25): SEQ ID NO: 6565; WAN024AVB; Start 47; Stop 71
aagttgtggctccagctactctaac

SEQ ID NO: 442580 - DNA, 25 bp, Artificial
  probe
  misc_feature (1)..(25): SEQ ID NO: 6565; WAN024AVB; Start 46; Stop 70
caagttgtggctccagctactctaa

SEQ ID NO: 442581 - DNA, 25 bp, Artificial
  probe
  misc_feature (1)..(25): SEQ ID NO: 6565; WAN024AVB; Start 45; Stop 69
tcaagttgtggctccagctactcta

SEQ ID NO: 442582 - DNA, 25 bp, Artificial
  probe
  misc_feature (1)..(25): SEQ ID NO: 6565; WAN024AVB; Start 48; Stop 72
agttgtggctccagctactctaact

SEQ ID NO: 442583 - DNA, 25 bp, Artificial
  probe
  misc_feature (1)..(25): SEQ ID NO: 6566; WAN024BR9; Start 551; Stop 575
tagacagcgatgagattattccttc

SEQ ID NO: 442584 - DNA, 25 bp, Artificial
  probe
  misc_feature (1)..(25): SEQ ID NO: 6566; WAN024BR9; Start 143; Stop 167
tggtattagtcgtattgaatgcctt

SEQ ID NO: 442585 - DNA, 25 bp, Artificial
  probe
  misc_feature (1)..(25): SEQ ID NO: 6566; WAN024BR9; Start 142; Stop 166
ttggtattagtcgtattgaatgcct

SEQ ID NO: 442586 - DNA, 25 bp, Artificial
  probe
  misc_feature (1)..(25): SEQ ID NO: 6566; WAN024BR9; Start 550; Stop 574
ttagacagcgatgagattattcctt

SEQ ID NO: 442587 - DNA, 25 bp, Artificial
  probe
  misc_feature (1)..(25): SEQ ID NO: 6566; WAN024BR9; Start 1013; Stop 1037
aatggcaggagaagttagatattgt

SEQ ID NO: 442588 - DNA, 25 bp, Artificial
  probe
  misc_feature (1)..(25): SEQ ID NO: 6566; WAN024BR9; Start 549; Stop 573
attagacagcgatgagattattcct

SEQ ID NO: 442589 - DNA, 25 bp, Artificial
  probe
  misc_feature (1)..(25): SEQ ID NO: 6566; WAN024BR9; Start 141; Stop 165
attggtattagtcgtattgaatgcc

SEQ ID NO: 442590 - DNA, 25 bp, Artificial
  probe
  misc_feature (1)..(25): SEQ ID NO: 6566; WAN024BR9; Start 1015; Stop 1039
tggcaggagaagttagatattgtat

SEQ ID NO: 442591 - DNA, 25 bp, Artificial
  probe
  misc_feature (1)..(25): SEQ ID NO: 6566; WAN024BR9; Start 1014; Stop 1038
atggcaggagaagttagatattgta

SEQ ID NO: 442592 - DNA, 25 bp, Artificial
  probe
  misc_feature (1)..(25): SEQ ID NO: 6566; WAN024BR9; Start 144; Stop 168
ggtattagtcgtattgaatgcctta

SEQ ID NO: 442593 - DNA, 25 bp, Artificial
  probe
  misc_feature (1)..(25): SEQ ID NO: 6566; WAN024BR9; Start 553; Stop 577
gacagcgatgagattattccttcaa

SEQ ID NO: 442594 - DNA, 25 bp, Artificial
  probe
  misc_feature (1)..(25): SEQ ID NO: 6566; WAN024BR9; Start 1016; Stop 1040
ggcaggagaagttagatattgtatt

SEQ ID NO: 442595 - DNA, 25 bp, Artificial
  probe
  misc_feature (1)..(25): SEQ ID NO: 6566; WAN024BR9; Start 548; Stop 572
tattagacagcgatgagattattcc

SEQ ID NO: 442596 - DNA, 25 bp, Artificial
  probe
  misc_feature (1)..(25): SEQ ID NO: 6566; WAN024BR9; Start 304; Stop 328
ttgctatattgtaccgctaatgatt

SEQ ID NO: 442597 - DNA, 25 bp, Artificial
  probe
  misc_feature (1)..(25): SEQ ID NO: 6566; WAN024BR9; Start 552; Stop 576
agacagcgatgagattattccttca

SEQ ID NO: 442598 - DNA, 25 bp, Artificial
  probe
  misc_feature (1)..(25): SEQ ID NO: 6566; WAN024BR9; Start 137; Stop 161
tggtattggtattagtcgtattgaa

SEQ ID NO: 442599 - DNA, 25 bp, Artificial
  probe
  misc_feature (1)..(25): SEQ ID NO: 6566; WAN024BR9; Start 136; Stop 160
ttggtattggtattagtcgtattga

SEQ ID NO: 442600 - DNA, 25 bp, Artificial
  probe
  misc_feature (1)..(25): SEQ ID NO: 6566; WAN024BR9; Start 34; Stop 58
attacattgttactgtcatggttgg

SEQ ID NO: 442601 - DNA, 25 bp, Artificial
  probe
  misc_feature (1)..(25): SEQ ID NO: 6566; WAN024BR9; Start 747; Stop 771
atcactattaggtcatggtgctatg

SEQ ID NO: 442602 - DNA, 25 bp, Artificial
  probe
  misc_feature (1)..(25): SEQ ID NO: 6566; WAN024BR9; Start 334; Stop 358
ccagagtgtttagtagaatcaatgc

SEQ ID NO: 442603 - DNA, 25 bp, Artificial
  probe
  misc_feature (1)..(25): SEQ ID NO: 6566; WAN024BR9; Start 872; Stop 896
taggatttgctgacgatattgtttg

SEQ ID NO: 442604 - DNA, 25 bp, Artificial
  probe
  misc_feature (1)..(25): SEQ ID NO: 6566; WAN024BR9; Start 871; Stop 895
gtaggatttgctgacgatattgttt

SEQ ID NO: 442605 - DNA, 25 bp, Artificial
  probe
  misc_feature (1)..(25): SEQ ID NO: 6566; WAN024BR9; Start 132; Stop 156
gcctttggtattggtattagtcgta

SEQ ID NO: 442606 - DNA, 25 bp, Artificial
  probe
  misc_feature (1)..(25): SEQ ID NO: 6566; WAN024BR9; Start 869; Stop 893
atgtaggatttgctgacgatattgt

SEQ ID NO: 442607 - DNA, 25 bp, Artificial
  probe
  misc_feature (1)..(25): SEQ ID NO: 6566; WAN024BR9; Start 1172; Stop 1196
tggctccaatgtctaatgatattat

SEQ ID NO: 442608 - DNA, 25 bp, Artificial
  probe
  misc_feature (1)..(25): SEQ ID NO: 6566; WAN024BR9; Start 870; Stop 894
tgtaggatttgctgacgatattgtt

SEQ ID NO: 442609 - DNA, 25 bp, Artificial
  probe
  misc_feature (1)..(25): SEQ ID NO: 6566; WAN024BR9; Start 140; Stop 164
tattggtattagtcgtattgaatgc

SEQ ID NO: 442610 - DNA, 25 bp, Artificial
  probe
  misc_feature (1)..(25): SEQ ID NO: 6566; WAN024BR9; Start 945; Stop 969
taaatggacgcaaggaaatatggaa

SEQ ID NO: 442611 - DNA, 25 bp, Artificial
  probe
  misc_feature (1)..(25): SEQ ID NO: 6566; WAN024BR9; Start 479; Stop 503
gaaatggctttaaggctggtaatat

SEQ ID NO: 442612 - DNA, 25 bp, Artificial
  probe
  misc_feature (1)..(25): SEQ ID NO: 6566; WAN024BR9; Start 942; Stop 966
ttctaaatggacgcaaggaaatatg

SEQ ID NO: 442613 - DNA, 25 bp, Artificial
  probe
  misc_feature (1)..(25): SEQ ID NO: 6566; WAN024BR9; Start 745; Stop 769
ttatcactattaggtcatggtgcta

SEQ ID NO: 442614 - DNA, 25 bp, Artificial
  probe
  misc_feature (1)..(25): SEQ ID NO: 6566; WAN024BR9; Start 81; Stop 105
agcatttattcacaccgttagagac

SEQ ID NO: 442615 - DNA, 25 bp, Artificial
  probe
  misc_feature (1)..(25): SEQ ID NO: 6566; WAN024BR9; Start 80; Stop 104
cagcatttattcacaccgttagaga

SEQ ID NO: 442616 - DNA, 25 bp, Artificial
  probe
  misc_feature (1)..(25): SEQ ID NO: 6567; WAN024GHY; Start 603; Stop 627
tcttattgatgcgatgtctctgatt

SEQ ID NO: 442617 - DNA, 25 bp, Artificial
  probe
  misc_feature (1)..(25): SEQ ID NO: 6567; WAN024GHY; Start 602; Stop 626
atcttattgatgcgatgtctctgat

SEQ ID NO: 442618 - DNA, 25 bp, Artificial
  probe
  misc_feature (1)..(25): SEQ ID NO: 6567; WAN024GHY; Start 593; Stop 617
gcttgaactatcttattgatgcgat

SEQ ID NO: 442619 - DNA, 25 bp, Artificial
  probe
  misc_feature (1)..(25): SEQ ID NO: 6567; WAN024GHY; Start 601; Stop 625
tatcttattgatgcgatgtctctga

SEQ ID NO: 442620 - DNA, 25 bp, Artificial
  probe
  misc_feature (1)..(25): SEQ ID NO: 6567; WAN024GHY; Start 599; Stop 623
actatcttattgatgcgatgtctct

SEQ ID NO: 442621 - DNA, 25 bp, Artificial
  probe
  misc_feature (1)..(25): SEQ ID NO: 6567; WAN024GHY; Start 600; Stop 624
ctatcttattgatgcgatgtctctg

SEQ ID NO: 442622 - DNA, 25 bp, Artificial
  probe
  misc_feature (1)..(25): SEQ ID NO: 6567; WAN024GHY; Start 596; Stop 620
tgaactatcttattgatgcgatgtc

SEQ ID NO: 442623 - DNA, 25 bp, Artificial
  probe
  misc_feature (1)..(25): SEQ ID NO: 6567; WAN024GHY; Start 267; Stop 291
tatcactctggtccatactcatcat

SEQ ID NO: 442624 - DNA, 25 bp, Artificial
  probe
  misc_feature (1)..(25): SEQ ID NO: 6567; WAN024GHY; Start 266; Stop 290
atatcactctggtccatactcatca

SEQ ID NO: 442625 - DNA, 25 bp, Artificial
  probe
  misc_feature (1)..(25): SEQ ID NO: 6567; WAN024GHY; Start 598; Stop 622
aactatcttattgatgcgatgtctc

SEQ ID NO: 442626 - DNA, 25 bp, Artificial
  probe
  misc_feature (1)..(25): SEQ ID NO: 6567; WAN024GHY; Start 597; Stop 621
gaactatcttattgatgcgatgtct

SEQ ID NO: 442627 - DNA, 25 bp, Artificial
  probe
  misc_feature (1)..(25): SEQ ID NO: 6567; WAN024GHY; Start 595; Stop 619
ttgaactatcttattgatgcgatgt

SEQ ID NO: 442628 - DNA, 25 bp, Artificial
  probe
  misc_feature (1)..(25): SEQ ID NO: 6567; WAN024GHY; Start 592; Stop 616
ggcttgaactatcttattgatgcga

SEQ ID NO: 442629 - DNA, 25 bp, Artificial
  probe
  misc_feature (1)..(25): SEQ ID NO: 6567; WAN024GHY; Start 594; Stop 618
cttgaactatcttattgatgcgatg

SEQ ID NO: 442630 - DNA, 25 bp, Artificial
  probe
  misc_feature (1)..(25): SEQ ID NO: 6567; WAN024GHY; Start 268; Stop 292
atcactctggtccatactcatcatc

SEQ ID NO: 442631 - DNA, 25 bp, Artificial
  probe
  misc_feature (1)..(25): SEQ ID NO: 6567; WAN024GHY; Start 521; Stop 545
aacaggttgatgagattatgaagtt

SEQ ID NO: 442632 - DNA, 25 bp, Artificial
  probe
  misc_feature (1)..(25): SEQ ID NO: 6567; WAN024GHY; Start 481; Stop 505
actgtcatctataacggagtaatct

SEQ ID NO: 442633 - DNA, 25 bp, Artificial
  probe
  misc_feature (1)..(25): SEQ ID NO: 6567; WAN024GHY; Start 482; Stop 506
ctgtcatctataacggagtaatctt

SEQ ID NO: 442634 - DNA, 25 bp, Artificial
  probe
  misc_feature (1)..(25): SEQ ID NO: 6567; WAN024GHY; Start 661; Stop 685
gatggagagcttagaactgaactag

SEQ ID NO: 442635 - DNA, 25 bp, Artificial
  probe
  misc_feature (1)..(25): SEQ ID NO: 6567; WAN024GHY; Start 662; Stop 686
atggagagcttagaactgaactaga

SEQ ID NO: 442636 - DNA, 25 bp, Artificial
  probe
  misc_feature (1)..(25): SEQ ID NO: 6567; WAN024GHY; Start 73; Stop 97
attgtgtaccagttgagttctgatt

SEQ ID NO: 442637 - DNA, 25 bp, Artificial
  probe
  misc_feature (1)..(25): SEQ ID NO: 6567; WAN024GHY; Start 663; Stop 687
tggagagcttagaactgaactagaa

SEQ ID NO: 442638 - DNA, 25 bp, Artificial
  probe
  misc_feature (1)..(25): SEQ ID NO: 6567; WAN024GHY; Start 660; Stop 684
tgatggagagcttagaactgaacta

SEQ ID NO: 442639 - DNA, 25 bp, Artificial
  probe
  misc_feature (1)..(25): SEQ ID NO: 6567; WAN024GHY; Start 72; Stop 96
gattgtgtaccagttgagttctgat

SEQ ID NO: 442640 - DNA, 25 bp, Artificial
  probe
  misc_feature (1)..(25): SEQ ID NO: 6567; WAN024GHY; Start 69; Stop 93
gaggattgtgtaccagttgagttct

SEQ ID NO: 442641 - DNA, 25 bp, Artificial
  probe
  misc_feature (1)..(25): SEQ ID NO: 6567; WAN024GHY; Start 68; Stop 92
agaggattgtgtaccagttgagttc

SEQ ID NO: 442642 - DNA, 25 bp, Artificial
  probe
  misc_feature (1)..(25): SEQ ID NO: 6567; WAN024GHY; Start 67; Stop 91
gagaggattgtgtaccagttgagtt

SEQ ID NO: 442643 - DNA, 25 bp, Artificial
  probe
  misc_feature (1)..(25): SEQ ID NO: 6567; WAN024GHY; Start 605; Stop 629
ttattgatgcgatgtctctgatttc

SEQ ID NO: 442644 - DNA, 25 bp, Artificial
  probe
  misc_feature (1)..(25): SEQ ID NO: 6567; WAN024GHY; Start 604; Stop 628
cttattgatgcgatgtctctgattt

SEQ ID NO: 442645 - DNA, 25 bp, Artificial
  probe
  misc_feature (1)..(25): SEQ ID NO: 6567; WAN024GHY; Start 265; Stop 289
gatatcactctggtccatactcatc

SEQ ID NO: 442646 - DNA, 25 bp, Artificial
  probe
  misc_feature (1)..(25): SEQ ID NO: 6567; WAN024GHY; Start 646; Stop 670
ttatttatcgttggtgatggagagc

SEQ ID NO: 442647 - DNA, 25 bp, Artificial
  probe
  misc_feature (1)..(25): SEQ ID NO: 6567; WAN024GHY; Start 590; Stop 614
agggcttgaactatcttattgatgc

SEQ ID NO: 442648 - DNA, 25 bp, Artificial
  probe
  misc_feature (1)..(25): SEQ ID NO: 6567; WAN024GHY; Start 272; Stop 296
ctctggtccatactcatcatcgaat

SEQ ID NO: 442649 - DNA, 25 bp, Artificial
  probe
  misc_feature (1)..(25): SEQ ID NO: 6568; WAN024BMO; Start 166; Stop 190
gctatggatagtggtgaagtgaata

SEQ ID NO: 442650 - DNA, 25 bp, Artificial
  probe
  misc_feature (1)..(25): SEQ ID NO: 6568; WAN024BMO; Start 769; Stop 793
tcggatatagaacttgaacttcagg

SEQ ID NO: 442651 - DNA, 25 bp, Artificial
  probe
  misc_feature (1)..(25): SEQ ID NO: 6568; WAN024BMO; Start 167; Stop 191
ctatggatagtggtgaagtgaatat

SEQ ID NO: 442652 - DNA, 25 bp, Artificial
  probe
  misc_feature (1)..(25): SEQ ID NO: 6568; WAN024BMO; Start 768; Stop 792
ttcggatatagaacttgaacttcag

SEQ ID NO: 442653 - DNA, 25 bp, Artificial
  probe
  misc_feature (1)..(25): SEQ ID NO: 6568; WAN024BMO; Start 165; Stop 189
agctatggatagtggtgaagtgaat

SEQ ID NO: 442654 - DNA, 25 bp, Artificial
  probe
  misc_feature (1)..(25): SEQ ID NO: 6568; WAN024BMO; Start 653; Stop 677
tgaaggaattaatagatggtgcaga

SEQ ID NO: 442655 - DNA, 25 bp, Artificial
  probe
  misc_feature (1)..(25): SEQ ID NO: 6568; WAN024BMO; Start 566; Stop 590
tatccagccacattatttcagaact

SEQ ID NO: 442656 - DNA, 25 bp, Artificial
  probe
  misc_feature (1)..(25): SEQ ID NO: 6568; WAN024BMO; Start 896; Stop 920
attactttaagcggataacaggagg

SEQ ID NO: 442657 - DNA, 25 bp, Artificial
  probe
  misc_feature (1)..(25): SEQ ID NO: 6568; WAN024BMO; Start 894; Stop 918
ggattactttaagcggataacagga

SEQ ID NO: 442658 - DNA, 25 bp, Artificial
  probe
  misc_feature (1)..(25): SEQ ID NO: 6568; WAN024BMO; Start 893; Stop 917
aggattactttaagcggataacagg

SEQ ID NO: 442659 - DNA, 25 bp, Artificial
  probe
  misc_feature (1)..(25): SEQ ID NO: 6568; WAN024BMO; Start 87; Stop 111
acagggagaaatctatggcttacta

SEQ ID NO: 442660 - DNA, 25 bp, Artificial
  probe
  misc_feature (1)..(25): SEQ ID NO: 6568; WAN024BMO; Start 891; Stop 915
agaggattactttaagcggataaca

SEQ ID NO: 442661 - DNA, 25 bp, Artificial
  probe
  misc_feature (1)..(25): SEQ ID NO: 6568; WAN024BMO; Start 567; Stop 591
atccagccacattatttcagaactt

SEQ ID NO: 442662 - DNA, 25 bp, Artificial
  probe
  misc_feature (1)..(25): SEQ ID NO: 6568; WAN024BMO; Start 565; Stop 589
atatccagccacattatttcagaac

SEQ ID NO: 442663 - DNA, 25 bp, Artificial
  probe
  misc_feature (1)..(25): SEQ ID NO: 6568; WAN024BMO; Start 895; Stop 919
gattactttaagcggataacaggag

SEQ ID NO: 442664 - DNA, 25 bp, Artificial
  probe
  misc_feature (1)..(25): SEQ ID NO: 6568; WAN024BMO; Start 892; Stop 916
gaggattactttaagcggataacag

SEQ ID NO: 442665 - DNA, 25 bp, Artificial
  probe
  misc_feature (1)..(25): SEQ ID NO: 6568; WAN024BMO; Start 652; Stop 676
atgaaggaattaatagatggtgcag

SEQ ID NO: 442666 - DNA, 25 bp, Artificial
  probe
  misc_feature (1)..(25): SEQ ID NO: 6568; WAN024BMO; Start 494; Stop 518
atcctattggtatccttgaaatgcg

SEQ ID NO: 442667 - DNA, 25 bp, Artificial
  probe
  misc_feature (1)..(25): SEQ ID NO: 6568; WAN024BMO; Start 81; Stop 105
attaagacagggagaaatctatggc

SEQ ID NO: 442668 - DNA, 25 bp, Artificial
  probe
  misc_feature (1)..(25): SEQ ID NO: 6568; WAN024BMO; Start 654; Stop 678
gaaggaattaatagatggtgcagat

SEQ ID NO: 442669 - DNA, 25 bp, Artificial
  probe
  misc_feature (1)..(25): SEQ ID NO: 6568; WAN024BMO; Start 813; Stop 837
cattgcagtcgtatctaactcctta

SEQ ID NO: 442670 - DNA, 25 bp, Artificial
  probe
  misc_feature (1)..(25): SEQ ID NO: 6568; WAN024BMO; Start 311; Stop 335
caagattgagagggatttcgctaaa

SEQ ID NO: 442671 - DNA, 25 bp, Artificial
  probe
  misc_feature (1)..(25): SEQ ID NO: 6568; WAN024BMO; Start 88; Stop 112
cagggagaaatctatggcttactag

SEQ ID NO: 442672 - DNA, 25 bp, Artificial
  probe
  misc_feature (1)..(25): SEQ ID NO: 6568; WAN024BMO; Start 814; Stop 838
attgcagtcgtatctaactccttaa

SEQ ID NO: 442673 - DNA, 25 bp, Artificial
  probe
  misc_feature (1)..(25): SEQ ID NO: 6568; WAN024BMO; Start 887; Stop 911
gtttagaggattactttaagcggat

SEQ ID NO: 442674 - DNA, 25 bp, Artificial
  probe
  misc_feature (1)..(25): SEQ ID NO: 6568; WAN024BMO; Start 91; Stop 115
ggagaaatctatggcttactaggaa

SEQ ID NO: 442675 - DNA, 25 bp, Artificial
  probe
  misc_feature (1)..(25): SEQ ID NO: 6568; WAN024BMO; Start 84; Stop 108
aagacagggagaaatctatggctta

SEQ ID NO: 442676 - DNA, 25 bp, Artificial
  probe
  misc_feature (1)..(25): SEQ ID NO: 6568; WAN024BMO; Start 83; Stop 107
taagacagggagaaatctatggctt

SEQ ID NO: 442677 - DNA, 25 bp, Artificial
  probe
  misc_feature (1)..(25): SEQ ID NO: 6568; WAN024BMO; Start 82; Stop 106
ttaagacagggagaaatctatggct

SEQ ID NO: 442678 - DNA, 25 bp, Artificial
  probe
  misc_feature (1)..(25): SEQ ID NO: 6568; WAN024BMO; Start 90; Stop 114
gggagaaatctatggcttactagga

SEQ ID NO: 442679 - DNA, 25 bp, Artificial
  probe
  misc_feature (1)..(25): SEQ ID NO: 6568; WAN024BMO; Start 89; Stop 113
agggagaaatctatggcttactagg

SEQ ID NO: 442680 - DNA, 25 bp, Artificial
  probe
  misc_feature (1)..(25): SEQ ID NO: 6568; WAN024BMO; Start 598; Stop 622
cttgtagatagagttgggatactgc

SEQ ID NO: 442681 - DNA, 25 bp, Artificial
  probe
  misc_feature (1)..(25): SEQ ID NO: 6568; WAN024BMO; Start 597; Stop 621
gcttgtagatagagttgggatactg

SEQ ID NO: 442682 - DNA, 25 bp, Artificial
  probe
  misc_feature (1)..(25): SEQ ID NO: 6569; WAN024BML; Start 412; Stop 436
catacagcacttactcagattcaga

SEQ ID NO: 442683 - DNA, 25 bp, Artificial
  probe
  misc_feature (1)..(25): SEQ ID NO: 6569; WAN024BML; Start 167; Stop 191
tgacgattgatggtatgagtatagc

SEQ ID NO: 442684 - DNA, 25 bp, Artificial
  probe
  misc_feature (1)..(25): SEQ ID NO: 6569; WAN024BML; Start 163; Stop 187
gagttgacgattgatggtatgagta

SEQ ID NO: 442685 - DNA, 25 bp, Artificial
  probe
  misc_feature (1)..(25): SEQ ID NO: 6569; WAN024BML; Start 164; Stop 188
agttgacgattgatggtatgagtat

SEQ ID NO: 442686 - DNA, 25 bp, Artificial
  probe
  misc_feature (1)..(25): SEQ ID NO: 6569; WAN024BML; Start 423; Stop 447
tactcagattcagaagacctacact

SEQ ID NO: 442687 - DNA, 25 bp, Artificial
  probe
  misc_feature (1)..(25): SEQ ID NO: 6569; WAN024BML; Start 422; Stop 446
ttactcagattcagaagacctacac

SEQ ID NO: 442688 - DNA, 25 bp, Artificial
  probe
  misc_feature (1)..(25): SEQ ID NO: 6569; WAN024BML; Start 413; Stop 437
atacagcacttactcagattcagaa

SEQ ID NO: 442689 - DNA, 25 bp, Artificial
  probe
  misc_feature (1)..(25): SEQ ID NO: 6569; WAN024BML; Start 414; Stop 438
tacagcacttactcagattcagaag

SEQ ID NO: 442690 - DNA, 25 bp, Artificial
  probe
  misc_feature (1)..(25): SEQ ID NO: 6569; WAN024BML; Start 411; Stop 435
ccatacagcacttactcagattcag

SEQ ID NO: 442691 - DNA, 25 bp, Artificial
  probe
  misc_feature (1)..(25): SEQ ID NO: 6569; WAN024BML; Start 244; Stop 268
ccatcaagacgaacctatattccta

SEQ ID NO: 442692 - DNA, 25 bp, Artificial
  probe
  misc_feature (1)..(25): SEQ ID NO: 6569; WAN024BML; Start 421; Stop 445
cttactcagattcagaagacctaca

SEQ ID NO: 442693 - DNA, 25 bp, Artificial
  probe
  misc_feature (1)..(25): SEQ ID NO: 6569; WAN024BML; Start 420; Stop 444
acttactcagattcagaagacctac

SEQ ID NO: 442694 - DNA, 25 bp, Artificial
  probe
  misc_feature (1)..(25): SEQ ID NO: 6569; WAN024BML; Start 419; Stop 443
cacttactcagattcagaagaccta

SEQ ID NO: 442695 - DNA, 25 bp, Artificial
  probe
  misc_feature (1)..(25): SEQ ID NO: 6569; WAN024BML; Start 824; Stop 848
aagttatccagcgtattcgtcaatt

SEQ ID NO: 442696 - DNA, 25 bp, Artificial
  probe
  misc_feature (1)..(25): SEQ ID NO: 6569; WAN024BML; Start 158; Stop 182
tagacgagttgacgattgatggtat

SEQ ID NO: 442697 - DNA, 25 bp, Artificial
  probe
  misc_feature (1)..(25): SEQ ID NO: 6569; WAN024BML; Start 1080; Stop 1104
atatcatctgtatattcgccaatcg

SEQ ID NO: 442698 - DNA, 25 bp, Artificial
  probe
  misc_feature (1)..(25): SEQ ID NO: 6569; WAN024BML; Start 1040; Stop 1064
ccttgattaccaatgcgagagataa

SEQ ID NO: 442699 - DNA, 25 bp, Artificial
  probe
  misc_feature (1)..(25): SEQ ID NO: 6569; WAN024BML; Start 416; Stop 440
cagcacttactcagattcagaagac

SEQ ID NO: 442700 - DNA, 25 bp, Artificial
  probe
  misc_feature (1)..(25): SEQ ID NO: 6569; WAN024BML; Start 823; Stop 847
gaagttatccagcgtattcgtcaat

SEQ ID NO: 442701 - DNA, 25 bp, Artificial
  probe
  misc_feature (1)..(25): SEQ ID NO: 6569; WAN024BML; Start 415; Stop 439
acagcacttactcagattcagaaga

SEQ ID NO: 442702 - DNA, 25 bp, Artificial
  probe
  misc_feature (1)..(25): SEQ ID NO: 6569; WAN024BML; Start 165; Stop 189
gttgacgattgatggtatgagtata

SEQ ID NO: 442703 - DNA, 25 bp, Artificial
  probe
  misc_feature (1)..(25): SEQ ID NO: 6569; WAN024BML; Start 777; Stop 801
agcaagaagagcattagaatgtgtt

SEQ ID NO: 442704 - DNA, 25 bp, Artificial
  probe
  misc_feature (1)..(25): SEQ ID NO: 6569; WAN024BML; Start 776; Stop 800
aagcaagaagagcattagaatgtgt

SEQ ID NO: 442705 - DNA, 25 bp, Artificial
  probe
  misc_feature (1)..(25): SEQ ID NO: 6569; WAN024BML; Start 166; Stop 190
ttgacgattgatggtatgagtatag

SEQ ID NO: 442706 - DNA, 25 bp, Artificial
  probe
  misc_feature (1)..(25): SEQ ID NO: 6569; WAN024BML; Start 691; Stop 715
atgacggattatgtgaagaacttct

SEQ ID NO: 442707 - DNA, 25 bp, Artificial
  probe
  misc_feature (1)..(25): SEQ ID NO: 6569; WAN024BML; Start 689; Stop 713
atatgacggattatgtgaagaactt

SEQ ID NO: 442708 - DNA, 25 bp, Artificial
  probe
  misc_feature (1)..(25): SEQ ID NO: 6569; WAN024BML; Start 811; Stop 835
aatcaacgacaagaagttatccagc

SEQ ID NO: 442709 - DNA, 25 bp, Artificial
  probe
  misc_feature (1)..(25): SEQ ID NO: 6569; WAN024BML; Start 697; Stop 721
gattatgtgaagaacttctgccaag

SEQ ID NO: 442710 - DNA, 25 bp, Artificial
  probe
  misc_feature (1)..(25): SEQ ID NO: 6569; WAN024BML; Start 820; Stop 844
caagaagttatccagcgtattcgtc

SEQ ID NO: 442711 - DNA, 25 bp, Artificial
  probe
  misc_feature (1)..(25): SEQ ID NO: 6569; WAN024BML; Start 818; Stop 842
gacaagaagttatccagcgtattcg

SEQ ID NO: 442712 - DNA, 25 bp, Artificial
  probe
  misc_feature (1)..(25): SEQ ID NO: 6569; WAN024BML; Start 817; Stop 841
cgacaagaagttatccagcgtattc

SEQ ID NO: 442713 - DNA, 25 bp, Artificial
  probe
  misc_feature (1)..(25): SEQ ID NO: 6569; WAN024BML; Start 1039; Stop 1063
accttgattaccaatgcgagagata

SEQ ID NO: 442714 - DNA, 25 bp, Artificial
  probe
  misc_feature (1)..(25): SEQ ID NO: 6569; WAN024BML; Start 692; Stop 716
tgacggattatgtgaagaacttctg

SEQ ID NO: 442715 - DNA, 25 bp, Artificial
  probe
  misc_feature (1)..(25): SEQ ID NO: 6570; WAN024DKC; Start 31; Stop 55
aatcactatgactacctgtcctcag

SEQ ID NO: 442716 - DNA, 25 bp, Artificial
  probe
  misc_feature (1)..(25): SEQ ID NO: 6570; WAN024DKC; Start 27; Stop 51
aacaaatcactatgactacctgtcc

SEQ ID NO: 442717 - DNA, 25 bp, Artificial
  probe
  misc_feature (1)..(25): SEQ ID NO: 6570; WAN024DKC; Start 29; Stop 53
caaatcactatgactacctgtcctc

SEQ ID NO: 442718 - DNA, 25 bp, Artificial
  probe
  misc_feature (1)..(25): SEQ ID NO: 6570; WAN024DKC; Start 30; Stop 54
aaatcactatgactacctgtcctca

SEQ ID NO: 442719 - DNA, 25 bp, Artificial
  probe
  misc_feature (1)..(25): SEQ ID NO: 6570; WAN024DKC; Start 28; Stop 52
acaaatcactatgactacctgtcct

SEQ ID NO: 442720 - DNA, 25 bp, Artificial
  probe
  misc_feature (1)..(25): SEQ ID NO: 6570; WAN024DKC; Start 26; Stop 50
aaacaaatcactatgactacctgtc

SEQ ID NO: 442721 - DNA, 25 bp, Artificial
  probe
  misc_feature (1)..(25): SEQ ID NO: 6570; WAN024DKC; Start 32; Stop 56
atcactatgactacctgtcctcagc

SEQ ID NO: 442722 - DNA, 25 bp, Artificial
  probe
  misc_feature (1)..(25): SEQ ID NO: 6570; WAN024DKC; Start 37; Stop 61
tatgactacctgtcctcagcaaatt

SEQ ID NO: 442723 - DNA, 25 bp, Artificial
  probe
  misc_feature (1)..(25): SEQ ID NO: 6570; WAN024DKC; Start 36; Stop 60
ctatgactacctgtcctcagcaaat

SEQ ID NO: 442724 - DNA, 25 bp, Artificial
  probe
  misc_feature (1)..(25): SEQ ID NO: 6570; WAN024DKC; Start 34; Stop 58
cactatgactacctgtcctcagcaa

SEQ ID NO: 442725 - DNA, 25 bp, Artificial
  probe
  misc_feature (1)..(25): SEQ ID NO: 6570; WAN024DKC; Start 114; Stop 138
atatggcactcacgaactccttgaa

SEQ ID NO: 442726 - DNA, 25 bp, Artificial
  probe
  misc_feature (1)..(25): SEQ ID NO: 6570; WAN024DKC; Start 41; Stop 65
actacctgtcctcagcaaatttaaa

SEQ ID NO: 442727 - DNA, 25 bp, Artificial
  probe
  misc_feature (1)..(25): SEQ ID NO: 6570; WAN024DKC; Start 40; Stop 64
gactacctgtcctcagcaaatttaa

SEQ ID NO: 442728 - DNA, 25 bp, Artificial
  probe
  misc_feature (1)..(25): SEQ ID NO: 6570; WAN024DKC; Start 64; Stop 88
aaatcaattcttccttgtctacttt

SEQ ID NO: 442729 - DNA, 25 bp, Artificial
  probe
  misc_feature (1)..(25): SEQ ID NO: 6570; WAN024DKC; Start 35; Stop 59
actatgactacctgtcctcagcaaa

SEQ ID NO: 442730 - DNA, 25 bp, Artificial
  probe
  misc_feature (1)..(25): SEQ ID NO: 6570; WAN024DKC; Start 113; Stop 137
gatatggcactcacgaactccttga

SEQ ID NO: 442731 - DNA, 25 bp, Artificial
  probe
  misc_feature (1)..(25): SEQ ID NO: 6570; WAN024DKC; Start 39; Stop 63
tgactacctgtcctcagcaaattta

SEQ ID NO: 442732 - DNA, 25 bp, Artificial
  probe
  misc_feature (1)..(25): SEQ ID NO: 6570; WAN024DKC; Start 33; Stop 57
tcactatgactacctgtcctcagca

SEQ ID NO: 442733 - DNA, 25 bp, Artificial
  probe
  misc_feature (1)..(25): SEQ ID NO: 6570; WAN024DKC; Start 38; Stop 62
atgactacctgtcctcagcaaattt

SEQ ID NO: 442734 - DNA, 25 bp, Artificial
  probe
  misc_feature (1)..(25): SEQ ID NO: 6570; WAN024DKC; Start 25; Stop 49
aaaacaaatcactatgactacctgt

SEQ ID NO: 442735 - DNA, 25 bp, Artificial
  probe
  misc_feature (1)..(25): SEQ ID NO: 6570; WAN024DKC; Start 65; Stop 89
aatcaattcttccttgtctacttta

SEQ ID NO: 442736 - DNA, 25 bp, Artificial
  probe
  misc_feature (1)..(25): SEQ ID NO: 6570; WAN024DKC; Start 66; Stop 90
atcaattcttccttgtctactttat

SEQ ID NO: 442737 - DNA, 25 bp, Artificial
  probe
  misc_feature (1)..(25): SEQ ID NO: 6570; WAN024DKC; Start 115; Stop 139
tatggcactcacgaactccttgaaa

SEQ ID NO: 442738 - DNA, 25 bp, Artificial
  probe
  misc_feature (1)..(25): SEQ ID NO: 6570; WAN024DKC; Start 122; Stop 146
ctcacgaactccttgaaaatgcttg

SEQ ID NO: 442739 - DNA, 25 bp, Artificial
  probe
  misc_feature (1)..(25): SEQ ID NO: 6570; WAN024DKC; Start 45; Stop 69
cctgtcctcagcaaatttaaaatca

SEQ ID NO: 442740 - DNA, 25 bp, Artificial
  probe
  misc_feature (1)..(25): SEQ ID NO: 6570; WAN024DKC; Start 44; Stop 68
acctgtcctcagcaaatttaaaatc

SEQ ID NO: 442741 - DNA, 25 bp, Artificial
  probe
  misc_feature (1)..(25): SEQ ID NO: 6570; WAN024DKC; Start 42; Stop 66
ctacctgtcctcagcaaatttaaaa

SEQ ID NO: 442742 - DNA, 25 bp, Artificial
  probe
  misc_feature (1)..(25): SEQ ID NO: 6570; WAN024DKC; Start 72; Stop 96
tcttccttgtctactttataaacca

SEQ ID NO: 442743 - DNA, 25 bp, Artificial
  probe
  misc_feature (1)..(25): SEQ ID NO: 6570; WAN024DKC; Start 47; Stop 71
tgtcctcagcaaatttaaaatcaat

SEQ ID NO: 442744 - DNA, 25 bp, Artificial
  probe
  misc_feature (1)..(25): SEQ ID NO: 6570; WAN024DKC; Start 43; Stop 67
tacctgtcctcagcaaatttaaaat

SEQ ID NO: 442745 - DNA, 25 bp, Artificial
  probe
  misc_feature (1)..(25): SEQ ID NO: 6570; WAN024DKC; Start 121; Stop 145
actcacgaactccttgaaaatgctt

SEQ ID NO: 442746 - DNA, 25 bp, Artificial
  probe
  misc_feature (1)..(25): SEQ ID NO: 6570; WAN024DKC; Start 67; Stop 91
tcaattcttccttgtctactttata

SEQ ID NO: 442747 - DNA, 25 bp, Artificial
  probe
  misc_feature (1)..(25): SEQ ID NO: 6570; WAN024DKC; Start 63; Stop 87
aaaatcaattcttccttgtctactt

SEQ ID NO: 442748 - DNA, 25 bp, Artificial
  probe
  misc_feature (1)..(25): SEQ ID NO: 6571; WAN024BKI; Start 145; Stop 169
actggagcaatcggaattatctcaa

SEQ ID NO: 442749 - DNA, 25 bp, Artificial
  probe
  misc_feature (1)..(25): SEQ ID NO: 6571; WAN024BKI; Start 144; Stop 168
aactggagcaatcggaattatctca

SEQ ID NO: 442750 - DNA, 25 bp, Artificial
  probe
  misc_feature (1)..(25): SEQ ID NO: 6571; WAN024BKI; Start 202; Stop 226
acagatattgcctttgaatttgctt

SEQ ID NO: 442751 - DNA, 25 bp, Artificial
  probe
  misc_feature (1)..(25): SEQ ID NO: 6571; WAN024BKI; Start 201; Stop 225
tacagatattgcctttgaatttgct

SEQ ID NO: 442752 - DNA, 25 bp, Artificial
  probe
  misc_feature (1)..(25): SEQ ID NO: 6571; WAN024BKI; Start 89; Stop 113
aatcggaagctggatataattcatt

SEQ ID NO: 442753 - DNA, 25 bp, Artificial
  probe
  misc_feature (1)..(25): SEQ ID NO: 6571; WAN024BKI; Start 203; Stop 227
cagatattgcctttgaatttgcttt

SEQ ID NO: 442754 - DNA, 25 bp, Artificial
  probe
  misc_feature (1)..(25): SEQ ID NO: 6571; WAN024BKI; Start 200; Stop 224
atacagatattgcctttgaatttgc

SEQ ID NO: 442755 - DNA, 25 bp, Artificial
  probe
  misc_feature (1)..(25): SEQ ID NO: 6571; WAN024BKI; Start 117; Stop 141
attgtctcctaagaaatgggtagag

SEQ ID NO: 442756 - DNA, 25 bp, Artificial
  probe
  misc_feature (1)..(25): SEQ ID NO: 6571; WAN024BKI; Start 210; Stop 234
tgcctttgaatttgctttatgtatt

SEQ ID NO: 442757 - DNA, 25 bp, Artificial
  probe
  misc_feature (1)..(25): SEQ ID NO: 6571; WAN024BKI; Start 209; Stop 233
ttgcctttgaatttgctttatgtat

SEQ ID NO: 442758 - DNA, 25 bp, Artificial
  probe
  misc_feature (1)..(25): SEQ ID NO: 6571; WAN024BKI; Start 208; Stop 232
attgcctttgaatttgctttatgta

SEQ ID NO: 442759 - DNA, 25 bp, Artificial
  probe
  misc_feature (1)..(25): SEQ ID NO: 6571; WAN024BKI; Start 207; Stop 231
tattgcctttgaatttgctttatgt

SEQ ID NO: 442760 - DNA, 25 bp, Artificial
  probe
  misc_feature (1)..(25): SEQ ID NO: 6571; WAN024BKI; Start 146; Stop 170
ctggagcaatcggaattatctcaaa

SEQ ID NO: 442761 - DNA, 25 bp, Artificial
  probe
  misc_feature (1)..(25): SEQ ID NO: 6571; WAN024BKI; Start 143; Stop 167
aaactggagcaatcggaattatctc

SEQ ID NO: 442762 - DNA, 25 bp, Artificial
  probe
  misc_feature (1)..(25): SEQ ID NO: 6571; WAN024BKI; Start 197; Stop 221
cacatacagatattgcctttgaatt

SEQ ID NO: 442763 - DNA, 25 bp, Artificial
  probe
  misc_feature (1)..(25): SEQ ID NO: 6571; WAN024BKI; Start 218; Stop 242
aatttgctttatgtatttctgctga

SEQ ID NO: 442764 - DNA, 25 bp, Artificial
  probe
  misc_feature (1)..(25): SEQ ID NO: 6571; WAN024BKI; Start 220; Stop 244
tttgctttatgtatttctgctgaat

SEQ ID NO: 442765 - DNA, 25 bp, Artificial
  probe
  misc_feature (1)..(25): SEQ ID NO: 6571; WAN024BKI; Start 219; Stop 243
atttgctttatgtatttctgctgaa

SEQ ID NO: 442766 - DNA, 25 bp, Artificial
  probe
  misc_feature (1)..(25): SEQ ID NO: 6571; WAN024BKI; Start 204; Stop 228
agatattgcctttgaatttgcttta

SEQ ID NO: 442767 - DNA, 25 bp, Artificial
  probe
  misc_feature (1)..(25): SEQ ID NO: 6571; WAN024BKI; Start 222; Stop 246
tgctttatgtatttctgctgaattt

SEQ ID NO: 442768 - DNA, 25 bp, Artificial
  probe
  misc_feature (1)..(25): SEQ ID NO: 6571; WAN024BKI; Start 221; Stop 245
ttgctttatgtatttctgctgaatt

SEQ ID NO: 442769 - DNA, 25 bp, Artificial
  probe
  misc_feature (1)..(25): SEQ ID NO: 6571; WAN024BKI; Start 216; Stop 240
tgaatttgctttatgtatttctgct

SEQ ID NO: 442770 - DNA, 25 bp, Artificial
  probe
  misc_feature (1)..(25): SEQ ID NO: 6571; WAN024BKI; Start 217; Stop 241
gaatttgctttatgtatttctgctg

SEQ ID NO: 442771 - DNA, 25 bp, Artificial
  probe
  misc_feature (1)..(25): SEQ ID NO: 6571; WAN024BKI; Start 211; Stop 235
gcctttgaatttgctttatgtattt

SEQ ID NO: 442772 - DNA, 25 bp, Artificial
  probe
  misc_feature (1)..(25): SEQ ID NO: 6571; WAN024BKI; Start 198; Stop 222
acatacagatattgcctttgaattt

SEQ ID NO: 442773 - DNA, 25 bp, Artificial
  probe
  misc_feature (1)..(25): SEQ ID NO: 6571; WAN024BKI; Start 206; Stop 230
atattgcctttgaatttgctttatg

SEQ ID NO: 442774 - DNA, 25 bp, Artificial
  probe
  misc_feature (1)..(25): SEQ ID NO: 6571; WAN024BKI; Start 116; Stop 140
cattgtctcctaagaaatgggtaga

SEQ ID NO: 442775 - DNA, 25 bp, Artificial
  probe
  misc_feature (1)..(25): SEQ ID NO: 6571; WAN024BKI; Start 115; Stop 139
acattgtctcctaagaaatgggtag

SEQ ID NO: 442776 - DNA, 25 bp, Artificial
  probe
  misc_feature (1)..(25): SEQ ID NO: 6571; WAN024BKI; Start 113; Stop 137
ttacattgtctcctaagaaatgggt

SEQ ID NO: 442777 - DNA, 25 bp, Artificial
  probe
  misc_feature (1)..(25): SEQ ID NO: 6571; WAN024BKI; Start 199; Stop 223
catacagatattgcctttgaatttg

SEQ ID NO: 442778 - DNA, 25 bp, Artificial
  probe
  misc_feature (1)..(25): SEQ ID NO: 6571; WAN024BKI; Start 90; Stop 114
atcggaagctggatataattcattt

SEQ ID NO: 442779 - DNA, 25 bp, Artificial
  probe
  misc_feature (1)..(25): SEQ ID NO: 6571; WAN024BKI; Start 88; Stop 112
aaatcggaagctggatataattcat

SEQ ID NO: 442780 - DNA, 25 bp, Artificial
  probe
  misc_feature (1)..(25): SEQ ID NO: 6571; WAN024BKI; Start 215; Stop 239
ttgaatttgctttatgtatttctgc

SEQ ID NO: 442781 - DNA, 25 bp, Artificial
  probe
  misc_feature (1)..(25): SEQ ID NO: 6572; WAN024BPX; Start 970; Stop 994
agtcaagttagcagttatggtagta

SEQ ID NO: 442782 - DNA, 25 bp, Artificial
  probe
  misc_feature (1)..(25): SEQ ID NO: 6572; WAN024BPX; Start 969; Stop 993
tagtcaagttagcagttatggtagt

SEQ ID NO: 442783 - DNA, 25 bp, Artificial
  probe
  misc_feature (1)..(25): SEQ ID NO: 6572; WAN024BPX; Start 256; Stop 280
gtcacactacaagttctgctatcta

SEQ ID NO: 442784 - DNA, 25 bp, Artificial
  probe
  misc_feature (1)..(25): SEQ ID NO: 6572; WAN024BPX; Start 145; Stop 169
tctattctagcaagtgacgaagatg

SEQ ID NO: 442785 - DNA, 25 bp, Artificial
  probe
  misc_feature (1)..(25): SEQ ID NO: 6572; WAN024BPX; Start 144; Stop 168
ttctattctagcaagtgacgaagat

SEQ ID NO: 442786 - DNA, 25 bp, Artificial
  probe
  misc_feature (1)..(25): SEQ ID NO: 6572; WAN024BPX; Start 143; Stop 167
attctattctagcaagtgacgaaga

SEQ ID NO: 442787 - DNA, 25 bp, Artificial
  probe
  misc_feature (1)..(25): SEQ ID NO: 6572; WAN024BPX; Start 257; Stop 281
tcacactacaagttctgctatctat

SEQ ID NO: 442788 - DNA, 25 bp, Artificial
  probe
  misc_feature (1)..(25): SEQ ID NO: 6572; WAN024BPX; Start 971; Stop 995
gtcaagttagcagttatggtagtat

SEQ ID NO: 442789 - DNA, 25 bp, Artificial
  probe
  misc_feature (1)..(25): SEQ ID NO: 6572; WAN024BPX; Start 142; Stop 166
aattctattctagcaagtgacgaag

SEQ ID NO: 442790 - DNA, 25 bp, Artificial
  probe
  misc_feature (1)..(25): SEQ ID NO: 6572; WAN024BPX; Start 1133; Stop 1157
caggaattggaatgataattgctca

SEQ ID NO: 442791 - DNA, 25 bp, Artificial
  probe
  misc_feature (1)..(25): SEQ ID NO: 6572; WAN024BPX; Start 1132; Stop 1156
acaggaattggaatgataattgctc

SEQ ID NO: 442792 - DNA, 25 bp, Artificial
  probe
  misc_feature (1)..(25): SEQ ID NO: 6572; WAN024BPX; Start 968; Stop 992
ttagtcaagttagcagttatggtag

SEQ ID NO: 442793 - DNA, 25 bp, Artificial
  probe
  misc_feature (1)..(25): SEQ ID NO: 6572; WAN024BPX; Start 1131; Stop 1155
aacaggaattggaatgataattgct

SEQ ID NO: 442794 - DNA, 25 bp, Artificial
  probe
  misc_feature (1)..(25): SEQ ID NO: 6572; WAN024BPX; Start 1134; Stop 1158
aggaattggaatgataattgctcaa

SEQ ID NO: 442795 - DNA, 25 bp, Artificial
  probe
  misc_feature (1)..(25): SEQ ID NO: 6572; WAN024BPX; Start 258; Stop 282
cacactacaagttctgctatctatt

SEQ ID NO: 442796 - DNA, 25 bp, Artificial
  probe
  misc_feature (1)..(25): SEQ ID NO: 6572; WAN024BPX; Start 254; Stop 278
ctgtcacactacaagttctgctatc

SEQ ID NO: 442797 - DNA, 25 bp, Artificial
  probe
  misc_feature (1)..(25): SEQ ID NO: 6572; WAN024BPX; Start 255; Stop 279
tgtcacactacaagttctgctatct

SEQ ID NO: 442798 - DNA, 25 bp, Artificial
  probe
  misc_feature (1)..(25): SEQ ID NO: 6572; WAN024BPX; Start 253; Stop 277
tctgtcacactacaagttctgctat

SEQ ID NO: 442799 - DNA, 25 bp, Artificial
  probe
  misc_feature (1)..(25): SEQ ID NO: 6572; WAN024BPX; Start 250; Stop 274
aattctgtcacactacaagttctgc

SEQ ID NO: 442800 - DNA, 25 bp, Artificial
  probe
  misc_feature (1)..(25): SEQ ID NO: 6572; WAN024BPX; Start 252; Stop 276
ttctgtcacactacaagttctgcta

SEQ ID NO: 442801 - DNA, 25 bp, Artificial
  probe
  misc_feature (1)..(25): SEQ ID NO: 6572; WAN024BPX; Start 141; Stop 165
taattctattctagcaagtgacgaa

SEQ ID NO: 442802 - DNA, 25 bp, Artificial
  probe
  misc_feature (1)..(25): SEQ ID NO: 6572; WAN024BPX; Start 140; Stop 164
ataattctattctagcaagtgacga

SEQ ID NO: 442803 - DNA, 25 bp, Artificial
  probe
  misc_feature (1)..(25): SEQ ID NO: 6572; WAN024BPX; Start 668; Stop 692
ggaattggcactcttctgaattaat

SEQ ID NO: 442804 - DNA, 25 bp, Artificial
  probe
  misc_feature (1)..(25): SEQ ID NO: 6572; WAN024BPX; Start 251; Stop 275
attctgtcacactacaagttctgct

SEQ ID NO: 442805 - DNA, 25 bp, Artificial
  probe
  misc_feature (1)..(25): SEQ ID NO: 6572; WAN024BPX; Start 104; Stop 128
ctttgctattcatcgggattgtaac

SEQ ID NO: 442806 - DNA, 25 bp, Artificial
  probe
  misc_feature (1)..(25): SEQ ID NO: 6572; WAN024BPX; Start 103; Stop 127
tctttgctattcatcgggattgtaa

SEQ ID NO: 442807 - DNA, 25 bp, Artificial
  probe
  misc_feature (1)..(25): SEQ ID NO: 6572; WAN024BPX; Start 102; Stop 126
ttctttgctattcatcgggattgta

SEQ ID NO: 442808 - DNA, 25 bp, Artificial
  probe
  misc_feature (1)..(25): SEQ ID NO: 6572; WAN024BPX; Start 30; Stop 54
gctgtgtggtttattgtatattggt

SEQ ID NO: 442809 - DNA, 25 bp, Artificial
  probe
  misc_feature (1)..(25): SEQ ID NO: 6572; WAN024BPX; Start 29; Stop 53
tgctgtgtggtttattgtatattgg

SEQ ID NO: 442810 - DNA, 25 bp, Artificial
  probe
  misc_feature (1)..(25): SEQ ID NO: 6572; WAN024BPX; Start 100; Stop 124
tattctttgctattcatcgggattg

SEQ ID NO: 442811 - DNA, 25 bp, Artificial
  probe
  misc_feature (1)..(25): SEQ ID NO: 6572; WAN024BPX; Start 1159; Stop 1183
ttaggattcgtgggtgtgataatat

SEQ ID NO: 442812 - DNA, 25 bp, Artificial
  probe
  misc_feature (1)..(25): SEQ ID NO: 6572; WAN024BPX; Start 1309; Stop 1333
tctcctaactcatgcaccttatatt

SEQ ID NO: 442813 - DNA, 25 bp, Artificial
  probe
  misc_feature (1)..(25): SEQ ID NO: 6572; WAN024BPX; Start 1308; Stop 1332
ttctcctaactcatgcaccttatat

SEQ ID NO: 442814 - DNA, 25 bp, Artificial
  probe
  misc_feature (1)..(25): SEQ ID NO: 6573; WAN024BZ2; Start 786; Stop 810
tatgatacacatgagagcatctgac

SEQ ID NO: 442815 - DNA, 25 bp, Artificial
  probe
  misc_feature (1)..(25): SEQ ID NO: 6573; WAN024BZ2; Start 84; Stop 108
ccttccaccagatatagattacgag

SEQ ID NO: 442816 - DNA, 25 bp, Artificial
  probe
  misc_feature (1)..(25): SEQ ID NO: 6573; WAN024BZ2; Start 83; Stop 107
accttccaccagatatagattacga

SEQ ID NO: 442817 - DNA, 25 bp, Artificial
  probe
  misc_feature (1)..(25): SEQ ID NO: 6573; WAN024BZ2; Start 82; Stop 106
aaccttccaccagatatagattacg

SEQ ID NO: 442818 - DNA, 25 bp, Artificial
  probe
  misc_feature (1)..(25): SEQ ID NO: 6573; WAN024BZ2; Start 785; Stop 809
atatgatacacatgagagcatctga

SEQ ID NO: 442819 - DNA, 25 bp, Artificial
  probe
  misc_feature (1)..(25): SEQ ID NO: 6573; WAN024BZ2; Start 85; Stop 109
cttccaccagatatagattacgaga

SEQ ID NO: 442820 - DNA, 25 bp, Artificial
  probe
  misc_feature (1)..(25): SEQ ID NO: 6573; WAN024BZ2; Start 694; Stop 718
catcgccgaccagatattagtatag

SEQ ID NO: 442821 - DNA, 25 bp, Artificial
  probe
  misc_feature (1)..(25): SEQ ID NO: 6573; WAN024BZ2; Start 695; Stop 719
atcgccgaccagatattagtatagt

SEQ ID NO: 442822 - DNA, 25 bp, Artificial
  probe
  misc_feature (1)..(25): SEQ ID NO: 6573; WAN024BZ2; Start 86; Stop 110
ttccaccagatatagattacgagat

SEQ ID NO: 442823 - DNA, 25 bp, Artificial
  probe
  misc_feature (1)..(25): SEQ ID NO: 6573; WAN024BZ2; Start 693; Stop 717
acatcgccgaccagatattagtata

SEQ ID NO: 442824 - DNA, 25 bp, Artificial
  probe
  misc_feature (1)..(25): SEQ ID NO: 6573; WAN024BZ2; Start 692; Stop 716
tacatcgccgaccagatattagtat

SEQ ID NO: 442825 - DNA, 25 bp, Artificial
  probe
  misc_feature (1)..(25): SEQ ID NO: 6573; WAN024BZ2; Start 691; Stop 715
ttacatcgccgaccagatattagta

SEQ ID NO: 442826 - DNA, 25 bp, Artificial
  probe
  misc_feature (1)..(25): SEQ ID NO: 6573; WAN024BZ2; Start 90; Stop 114
accagatatagattacgagatagca

SEQ ID NO: 442827 - DNA, 25 bp, Artificial
  probe
  misc_feature (1)..(25): SEQ ID NO: 6573; WAN024BZ2; Start 89; Stop 113
caccagatatagattacgagatagc

SEQ ID NO: 442828 - DNA, 25 bp, Artificial
  probe
  misc_feature (1)..(25): SEQ ID NO: 6573; WAN024BZ2; Start 697; Stop 721
cgccgaccagatattagtatagtct

SEQ ID NO: 442829 - DNA, 25 bp, Artificial
  probe
  misc_feature (1)..(25): SEQ ID NO: 6573; WAN024BZ2; Start 87; Stop 111
tccaccagatatagattacgagata

SEQ ID NO: 442830 - DNA, 25 bp, Artificial
  probe
  misc_feature (1)..(25): SEQ ID NO: 6573; WAN024BZ2; Start 787; Stop 811
atgatacacatgagagcatctgacg

SEQ ID NO: 442831 - DNA, 25 bp, Artificial
  probe
  misc_feature (1)..(25): SEQ ID NO: 6573; WAN024BZ2; Start 784; Stop 808
aatatgatacacatgagagcatctg

SEQ ID NO: 442832 - DNA, 25 bp, Artificial
  probe
  misc_feature (1)..(25): SEQ ID NO: 6573; WAN024BZ2; Start 88; Stop 112
ccaccagatatagattacgagatag

SEQ ID NO: 442833 - DNA, 25 bp, Artificial
  probe
  misc_feature (1)..(25): SEQ ID NO: 6573; WAN024BZ2; Start 696; Stop 720
tcgccgaccagatattagtatagtc

SEQ ID NO: 442834 - DNA, 25 bp, Artificial
  probe
  misc_feature (1)..(25): SEQ ID NO: 6573; WAN024BZ2; Start 91; Stop 115
ccagatatagattacgagatagcaa

SEQ ID NO: 442835 - DNA, 25 bp, Artificial
  probe
  misc_feature (1)..(25): SEQ ID NO: 6573; WAN024BZ2; Start 389; Stop 413
tgacagtacatgatatgattcctga

SEQ ID NO: 442836 - DNA, 25 bp, Artificial
  probe
  misc_feature (1)..(25): SEQ ID NO: 6573; WAN024BZ2; Start 831; Stop 855
tagattcgccctttgtttcatacta

SEQ ID NO: 442837 - DNA, 25 bp, Artificial
  probe
  misc_feature (1)..(25): SEQ ID NO: 6573; WAN024BZ2; Start 830; Stop 854
atagattcgccctttgtttcatact

SEQ ID NO: 442838 - DNA, 25 bp, Artificial
  probe
  misc_feature (1)..(25): SEQ ID NO: 6573; WAN024BZ2; Start 832; Stop 856
agattcgccctttgtttcatactaa

SEQ ID NO: 442839 - DNA, 25 bp, Artificial
  probe
  misc_feature (1)..(25): SEQ ID NO: 6573; WAN024BZ2; Start 394; Stop 418
gtacatgatatgattcctgaactca

SEQ ID NO: 442840 - DNA, 25 bp, Artificial
  probe
  misc_feature (1)..(25): SEQ ID NO: 6573; WAN024BZ2; Start 102; Stop 126
ttacgagatagcaatttgtgagact

SEQ ID NO: 442841 - DNA, 25 bp, Artificial
  probe
  misc_feature (1)..(25): SEQ ID NO: 6573; WAN024BZ2; Start 829; Stop 853
tatagattcgccctttgtttcatac

SEQ ID NO: 442842 - DNA, 25 bp, Artificial
  probe
  misc_feature (1)..(25): SEQ ID NO: 6573; WAN024BZ2; Start 103; Stop 127
tacgagatagcaatttgtgagactg

SEQ ID NO: 442843 - DNA, 25 bp, Artificial
  probe
  misc_feature (1)..(25): SEQ ID NO: 6573; WAN024BZ2; Start 101; Stop 125
attacgagatagcaatttgtgagac

SEQ ID NO: 442844 - DNA, 25 bp, Artificial
  probe
  misc_feature (1)..(25): SEQ ID NO: 6573; WAN024BZ2; Start 836; Stop 860
tcgccctttgtttcatactaactaa

SEQ ID NO: 442845 - DNA, 25 bp, Artificial
  probe
  misc_feature (1)..(25): SEQ ID NO: 6573; WAN024BZ2; Start 835; Stop 859
ttcgccctttgtttcatactaacta

SEQ ID NO: 442846 - DNA, 25 bp, Artificial
  probe
  misc_feature (1)..(25): SEQ ID NO: 6573; WAN024BZ2; Start 796; Stop 820
atgagagcatctgacgaagaacttg

SEQ ID NO: 442847 - DNA, 25 bp, Artificial
  probe
  misc_feature (1)..(25): SEQ ID NO: 6574; WAN024BXC; Start 1; Stop 25
atgagaccaagacgatatccgtata

SEQ ID NO: 442848 - DNA, 25 bp, Artificial
  probe
  misc_feature (1)..(25): SEQ ID NO: 6574; WAN024BXC; Start 3; Stop 27
gagaccaagacgatatccgtatagt

SEQ ID NO: 442849 - DNA, 25 bp, Artificial
  probe
  misc_feature (1)..(25): SEQ ID NO: 6574; WAN024BXC; Start 2; Stop 26
tgagaccaagacgatatccgtatag

SEQ ID NO: 442850 - DNA, 25 bp, Artificial
  probe
  misc_feature (1)..(25): SEQ ID NO: 6574; WAN024BXC; Start 4; Stop 28
agaccaagacgatatccgtatagtg

SEQ ID NO: 442851 - DNA, 25 bp, Artificial
  probe
  misc_feature (1)..(25): SEQ ID NO: 6574; WAN024BXC; Start 141; Stop 165
cttagaagaatttaagcgtcttagc

SEQ ID NO: 442852 - DNA, 25 bp, Artificial
  probe
  misc_feature (1)..(25): SEQ ID NO: 6574; WAN024BXC; Start 136; Stop 160
atagacttagaagaatttaagcgtc

SEQ ID NO: 442853 - DNA, 25 bp, Artificial
  probe
  misc_feature (1)..(25): SEQ ID NO: 6574; WAN024BXC; Start 135; Stop 159
gatagacttagaagaatttaagcgt

SEQ ID NO: 442854 - DNA, 25 bp, Artificial
  probe
  misc_feature (1)..(25): SEQ ID NO: 6574; WAN024BXC; Start 5; Stop 29
gaccaagacgatatccgtatagtgg

SEQ ID NO: 442855 - DNA, 25 bp, Artificial
  probe
  misc_feature (1)..(25): SEQ ID NO: 6574; WAN024BXC; Start 134; Stop 158
agatagacttagaagaatttaagcg

SEQ ID NO: 442856 - DNA, 25 bp, Artificial
  probe
  misc_feature (1)..(25): SEQ ID NO: 6574; WAN024BXC; Start 142; Stop 166
ttagaagaatttaagcgtcttagct

SEQ ID NO: 442857 - DNA, 25 bp, Artificial
  probe
  misc_feature (1)..(25): SEQ ID NO: 6574; WAN024BXC; Start 153; Stop 177
taagcgtcttagctatgaagccatt

SEQ ID NO: 442858 - DNA, 25 bp, Artificial
  probe
  misc_feature (1)..(25): SEQ ID NO: 6574; WAN024BXC; Start 152; Stop 176
ttaagcgtcttagctatgaagccat

SEQ ID NO: 442859 - DNA, 25 bp, Artificial
  probe
  misc_feature (1)..(25): SEQ ID NO: 6574; WAN024BXC; Start 170; Stop 194
aagccattcatgatacttctcaagt

SEQ ID NO: 442860 - DNA, 25 bp, Artificial
  probe
  misc_feature (1)..(25): SEQ ID NO: 6574; WAN024BXC; Start 169; Stop 193
gaagccattcatgatacttctcaag

SEQ ID NO: 442861 - DNA, 25 bp, Artificial
  probe
  misc_feature (1)..(25): SEQ ID NO: 6574; WAN024BXC; Start 168; Stop 192
tgaagccattcatgatacttctcaa

SEQ ID NO: 442862 - DNA, 25 bp, Artificial
  probe
  misc_feature (1)..(25): SEQ ID NO: 6574; WAN024BXC; Start 140; Stop 164
acttagaagaatttaagcgtcttag

SEQ ID NO: 442863 - DNA, 25 bp, Artificial
  probe
  misc_feature (1)..(25): SEQ ID NO: 6574; WAN024BXC; Start 139; Stop 163
gacttagaagaatttaagcgtctta

SEQ ID NO: 442864 - DNA, 25 bp, Artificial
  probe
  misc_feature (1)..(25): SEQ ID NO: 6574; WAN024BXC; Start 9; Stop 33
aagacgatatccgtatagtgggaaa

SEQ ID NO: 442865 - DNA, 25 bp, Artificial
  probe
  misc_feature (1)..(25): SEQ ID NO: 6574; WAN024BXC; Start 8; Stop 32
caagacgatatccgtatagtgggaa

SEQ ID NO: 442866 - DNA, 25 bp, Artificial
  probe
  misc_feature (1)..(25): SEQ ID NO: 6574; WAN024BXC; Start 149; Stop 173
aatttaagcgtcttagctatgaagc

SEQ ID NO: 442867 - DNA, 25 bp, Artificial
  probe
  misc_feature (1)..(25): SEQ ID NO: 6574; WAN024BXC; Start 138; Stop 162
agacttagaagaatttaagcgtctt

SEQ ID NO: 442868 - DNA, 25 bp, Artificial
  probe
  misc_feature (1)..(25): SEQ ID NO: 6574; WAN024BXC; Start 150; Stop 174
atttaagcgtcttagctatgaagcc

SEQ ID NO: 442869 - DNA, 25 bp, Artificial
  probe
  misc_feature (1)..(25): SEQ ID NO: 6574; WAN024BXC; Start 154; Stop 178
aagcgtcttagctatgaagccattc

SEQ ID NO: 442870 - DNA, 25 bp, Artificial
  probe
  misc_feature (1)..(25): SEQ ID NO: 6574; WAN024BXC; Start 147; Stop 171
agaatttaagcgtcttagctatgaa

SEQ ID NO: 442871 - DNA, 25 bp, Artificial
  probe
  misc_feature (1)..(25): SEQ ID NO: 6574; WAN024BXC; Start 146; Stop 170
aagaatttaagcgtcttagctatga

SEQ ID NO: 442872 - DNA, 25 bp, Artificial
  probe
  misc_feature (1)..(25): SEQ ID NO: 6574; WAN024BXC; Start 148; Stop 172
gaatttaagcgtcttagctatgaag

SEQ ID NO: 442873 - DNA, 25 bp, Artificial
  probe
  misc_feature (1)..(25): SEQ ID NO: 6574; WAN024BXC; Start 145; Stop 169
gaagaatttaagcgtcttagctatg

SEQ ID NO: 442874 - DNA, 25 bp, Artificial
  probe
  misc_feature (1)..(25): SEQ ID NO: 6574; WAN024BXC; Start 137; Stop 161
tagacttagaagaatttaagcgtct

SEQ ID NO: 442875 - DNA, 25 bp, Artificial
  probe
  misc_feature (1)..(25): SEQ ID NO: 6574; WAN024BXC; Start 144; Stop 168
agaagaatttaagcgtcttagctat

SEQ ID NO: 442876 - DNA, 25 bp, Artificial
  probe
  misc_feature (1)..(25): SEQ ID NO: 6574; WAN024BXC; Start 171; Stop 195
agccattcatgatacttctcaagta

SEQ ID NO: 442877 - DNA, 25 bp, Artificial
  probe
  misc_feature (1)..(25): SEQ ID NO: 6574; WAN024BXC; Start 133; Stop 157
cagatagacttagaagaatttaagc

SEQ ID NO: 442878 - DNA, 25 bp, Artificial
  probe
  misc_feature (1)..(25): SEQ ID NO: 6574; WAN024BXC; Start 172; Stop 196
gccattcatgatacttctcaagtaa

SEQ ID NO: 442879 - DNA, 25 bp, Artificial
  probe
  misc_feature (1)..(25): SEQ ID NO: 6574; WAN024BXC; Start 151; Stop 175
tttaagcgtcttagctatgaagcca

SEQ ID NO: 442880 - DNA, 25 bp, Artificial
  probe
  misc_feature (1)..(25): SEQ ID NO: 6575; WAN024BVA; Start 206; Stop 230
tagttacgaaagagcagtttgagaa

SEQ ID NO: 442881 - DNA, 25 bp, Artificial
  probe
  misc_feature (1)..(25): SEQ ID NO: 6575; WAN024BVA; Start 205; Stop 229
gtagttacgaaagagcagtttgaga

SEQ ID NO: 442882 - DNA, 25 bp, Artificial
  probe
  misc_feature (1)..(25): SEQ ID NO: 6575; WAN024BVA; Start 207; Stop 231
agttacgaaagagcagtttgagaaa

SEQ ID NO: 442883 - DNA, 25 bp, Artificial
  probe
  misc_feature (1)..(25): SEQ ID NO: 6575; WAN024BVA; Start 175; Stop 199
acagtaactatcagagactatggga

SEQ ID NO: 442884 - DNA, 25 bp, Artificial
  probe
  misc_feature (1)..(25): SEQ ID NO: 6575; WAN024BVA; Start 176; Stop 200
cagtaactatcagagactatgggat

SEQ ID NO: 442885 - DNA, 25 bp, Artificial
  probe
  misc_feature (1)..(25): SEQ ID NO: 6575; WAN024BVA; Start 174; Stop 198
tacagtaactatcagagactatggg

SEQ ID NO: 442886 - DNA, 25 bp, Artificial
  probe
  misc_feature (1)..(25): SEQ ID NO: 6575; WAN024BVA; Start 173; Stop 197
atacagtaactatcagagactatgg

SEQ ID NO: 442887 - DNA, 25 bp, Artificial
  probe
  misc_feature (1)..(25): SEQ ID NO: 6575; WAN024BVA; Start 91; Stop 115
ccgatggttgtctataaagctgata

SEQ ID NO: 442888 - DNA, 25 bp, Artificial
  probe
  misc_feature (1)..(25): SEQ ID NO: 6575; WAN024BVA; Start 177; Stop 201
agtaactatcagagactatgggatt

SEQ ID NO: 442889 - DNA, 25 bp, Artificial
  probe
  misc_feature (1)..(25): SEQ ID NO: 6575; WAN024BVA; Start 178; Stop 202
gtaactatcagagactatgggattt

SEQ ID NO: 442890 - DNA, 25 bp, Artificial
  probe
  misc_feature (1)..(25): SEQ ID NO: 6575; WAN024BVA; Start 92; Stop 116
cgatggttgtctataaagctgataa

SEQ ID NO: 442891 - DNA, 25 bp, Artificial
  probe
  misc_feature (1)..(25): SEQ ID NO: 6575; WAN024BVA; Start 63; Stop 87
caggattcgagatttggaagagaaa

SEQ ID NO: 442892 - DNA, 25 bp, Artificial
  probe
  misc_feature (1)..(25): SEQ ID NO: 6575; WAN024BVA; Start 94; Stop 118
atggttgtctataaagctgataacg

SEQ ID NO: 442893 - DNA, 25 bp, Artificial
  probe
  misc_feature (1)..(25): SEQ ID NO: 6575; WAN024BVA; Start 14; Stop 38
tagctatctggattcttgtctctgc

SEQ ID NO: 442894 - DNA, 25 bp, Artificial
  probe
  misc_feature (1)..(25): SEQ ID NO: 6575; WAN024BVA; Start 56; Stop 80
atatggacaggattcgagatttgga

SEQ ID NO: 442895 - DNA, 25 bp, Artificial
  probe
  misc_feature (1)..(25): SEQ ID NO: 6575; WAN024BVA; Start 95; Stop 119
tggttgtctataaagctgataacgc

SEQ ID NO: 442896 - DNA, 25 bp, Artificial
  probe
  misc_feature (1)..(25): SEQ ID NO: 6575; WAN024BVA; Start 41; Stop 65
gattgaacatctggcatatggacag

SEQ ID NO: 442897 - DNA, 25 bp, Artificial
  probe
  misc_feature (1)..(25): SEQ ID NO: 6575; WAN024BVA; Start 57; Stop 81
tatggacaggattcgagatttggaa

SEQ ID NO: 442898 - DNA, 25 bp, Artificial
  probe
  misc_feature (1)..(25): SEQ ID NO: 6575; WAN024BVA; Start 62; Stop 86
acaggattcgagatttggaagagaa

SEQ ID NO: 442899 - DNA, 25 bp, Artificial
  probe
  misc_feature (1)..(25): SEQ ID NO: 6575; WAN024BVA; Start 210; Stop 234
tacgaaagagcagtttgagaaaatc

SEQ ID NO: 442900 - DNA, 25 bp, Artificial
  probe
  misc_feature (1)..(25): SEQ ID NO: 6575; WAN024BVA; Start 208; Stop 232
gttacgaaagagcagtttgagaaaa

SEQ ID NO: 442901 - DNA, 25 bp, Artificial
  probe
  misc_feature (1)..(25): SEQ ID NO: 6575; WAN024BVA; Start 209; Stop 233
ttacgaaagagcagtttgagaaaat

SEQ ID NO: 442902 - DNA, 25 bp, Artificial
  probe
  misc_feature (1)..(25): SEQ ID NO: 6575; WAN024BVA; Start 40; Stop 64
ggattgaacatctggcatatggaca

SEQ ID NO: 442903 - DNA, 25 bp, Artificial
  probe
  misc_feature (1)..(25): SEQ ID NO: 6575; WAN024BVA; Start 184; Stop 208
atcagagactatgggattttcgtag

SEQ ID NO: 442904 - DNA, 25 bp, Artificial
  probe
  misc_feature (1)..(25): SEQ ID NO: 6575; WAN024BVA; Start 182; Stop 206
ctatcagagactatgggattttcgt

SEQ ID NO: 442905 - DNA, 25 bp, Artificial
  probe
  misc_feature (1)..(25): SEQ ID NO: 6575; WAN024BVA; Start 181; Stop 205
actatcagagactatgggattttcg

SEQ ID NO: 442906 - DNA, 25 bp, Artificial
  probe
  misc_feature (1)..(25): SEQ ID NO: 6575; WAN024BVA; Start 61; Stop 85
gacaggattcgagatttggaagaga

SEQ ID NO: 442907 - DNA, 25 bp, Artificial
  probe
  misc_feature (1)..(25): SEQ ID NO: 6575; WAN024BVA; Start 55; Stop 79
catatggacaggattcgagatttgg

SEQ ID NO: 442908 - DNA, 25 bp, Artificial
  probe
  misc_feature (1)..(25): SEQ ID NO: 6575; WAN024BVA; Start 46; Stop 70
aacatctggcatatggacaggattc

SEQ ID NO: 442909 - DNA, 25 bp, Artificial
  probe
  misc_feature (1)..(25): SEQ ID NO: 6575; WAN024BVA; Start 45; Stop 69
gaacatctggcatatggacaggatt

SEQ ID NO: 442910 - DNA, 25 bp, Artificial
  probe
  misc_feature (1)..(25): SEQ ID NO: 6575; WAN024BVA; Start 15; Stop 39
agctatctggattcttgtctctgcc

SEQ ID NO: 442911 - DNA, 25 bp, Artificial
  probe
  misc_feature (1)..(25): SEQ ID NO: 6575; WAN024BVA; Start 93; Stop 117
gatggttgtctataaagctgataac

SEQ ID NO: 442912 - DNA, 25 bp, Artificial
  probe
  misc_feature (1)..(25): SEQ ID NO: 6575; WAN024BVA; Start 216; Stop 240
agagcagtttgagaaaatcagagta

SEQ ID NO: 442913 - DNA, 25 bp, Artificial
  probe
  misc_feature (1)..(25): SEQ ID NO: 6576; WAN024CZW; Start 24; Stop 48
gggtgagatattagtagatagagcg

SEQ ID NO: 442914 - DNA, 25 bp, Artificial
  probe
  misc_feature (1)..(25): SEQ ID NO: 6576; WAN024CZW; Start 23; Stop 47
agggtgagatattagtagatagagc

SEQ ID NO: 442915 - DNA, 25 bp, Artificial
  probe
  misc_feature (1)..(25): SEQ ID NO: 6576; WAN024CZW; Start 51; Stop 75
aataacggtggctgttgtgagtaag

SEQ ID NO: 442916 - DNA, 25 bp, Artificial
  probe
  misc_feature (1)..(25): SEQ ID NO: 6576; WAN024CZW; Start 50; Stop 74
caataacggtggctgttgtgagtaa

SEQ ID NO: 442917 - DNA, 25 bp, Artificial
  probe
  misc_feature (1)..(25): SEQ ID NO: 6576; WAN024CZW; Start 27; Stop 51
tgagatattagtagatagagcgcca

SEQ ID NO: 442918 - DNA, 25 bp, Artificial
  probe
  misc_feature (1)..(25): SEQ ID NO: 6576; WAN024CZW; Start 26; Stop 50
gtgagatattagtagatagagcgcc

SEQ ID NO: 442919 - DNA, 25 bp, Artificial
  probe
  misc_feature (1)..(25): SEQ ID NO: 6576; WAN024CZW; Start 25; Stop 49
ggtgagatattagtagatagagcgc

SEQ ID NO: 442920 - DNA, 25 bp, Artificial
  probe
  misc_feature (1)..(25): SEQ ID NO: 6576; WAN024CZW; Start 33; Stop 57
attagtagatagagcgccaataacg

SEQ ID NO: 442921 - DNA, 25 bp, Artificial
  probe
  misc_feature (1)..(25): SEQ ID NO: 6576; WAN024CZW; Start 28; Stop 52
gagatattagtagatagagcgccaa

SEQ ID NO: 442922 - DNA, 25 bp, Artificial
  probe
  misc_feature (1)..(25): SEQ ID NO: 6576; WAN024CZW; Start 13; Stop 37
gctgatgaaaagggtgagatattag

SEQ ID NO: 442923 - DNA, 25 bp, Artificial
  probe
  misc_feature (1)..(25): SEQ ID NO: 6576; WAN024CZW; Start 29; Stop 53
agatattagtagatagagcgccaat

SEQ ID NO: 442924 - DNA, 25 bp, Artificial
  probe
  misc_feature (1)..(25): SEQ ID NO: 6576; WAN024CZW; Start 34; Stop 58
ttagtagatagagcgccaataacgg

SEQ ID NO: 442925 - DNA, 25 bp, Artificial
  probe
  misc_feature (1)..(25): SEQ ID NO: 6576; WAN024CZW; Start 22; Stop 46
aagggtgagatattagtagatagag

SEQ ID NO: 442926 - DNA, 25 bp, Artificial
  probe
  misc_feature (1)..(25): SEQ ID NO: 6576; WAN024CZW; Start 14; Stop 38
ctgatgaaaagggtgagatattagt

SEQ ID NO: 442927 - DNA, 25 bp, Artificial
  probe
  misc_feature (1)..(25): SEQ ID NO: 6576; WAN024CZW; Start 32; Stop 56
tattagtagatagagcgccaataac

SEQ ID NO: 442928 - DNA, 25 bp, Artificial
  probe
  misc_feature (1)..(25): SEQ ID NO: 6576; WAN024CZW; Start 12; Stop 36
agctgatgaaaagggtgagatatta

SEQ ID NO: 442929 - DNA, 25 bp, Artificial
  probe
  misc_feature (1)..(25): SEQ ID NO: 6576; WAN024CZW; Start 30; Stop 54
gatattagtagatagagcgccaata

SEQ ID NO: 442930 - DNA, 25 bp, Artificial
  probe
  misc_feature (1)..(25): SEQ ID NO: 6576; WAN024CZW; Start 35; Stop 59
tagtagatagagcgccaataacggt

SEQ ID NO: 442931 - DNA, 25 bp, Artificial
  probe
  misc_feature (1)..(25): SEQ ID NO: 6576; WAN024CZW; Start 21; Stop 45
aaagggtgagatattagtagataga

SEQ ID NO: 442932 - DNA, 25 bp, Artificial
  probe
  misc_feature (1)..(25): SEQ ID NO: 6576; WAN024CZW; Start 15; Stop 39
tgatgaaaagggtgagatattagta

SEQ ID NO: 442933 - DNA, 25 bp, Artificial
  probe
  misc_feature (1)..(25): SEQ ID NO: 6576; WAN024CZW; Start 31; Stop 55
atattagtagatagagcgccaataa

SEQ ID NO: 442934 - DNA, 25 bp, Artificial
  probe
  misc_feature (1)..(25): SEQ ID NO: 6576; WAN024CZW; Start 18; Stop 42
tgaaaagggtgagatattagtagat

SEQ ID NO: 442935 - DNA, 25 bp, Artificial
  probe
  misc_feature (1)..(25): SEQ ID NO: 6576; WAN024CZW; Start 17; Stop 41
atgaaaagggtgagatattagtaga

SEQ ID NO: 442936 - DNA, 25 bp, Artificial
  probe
  misc_feature (1)..(25): SEQ ID NO: 6576; WAN024CZW; Start 49; Stop 73
ccaataacggtggctgttgtgagta

SEQ ID NO: 442937 - DNA, 25 bp, Artificial
  probe
  misc_feature (1)..(25): SEQ ID NO: 6576; WAN024CZW; Start 16; Stop 40
gatgaaaagggtgagatattagtag

SEQ ID NO: 442938 - DNA, 25 bp, Artificial
  probe
  misc_feature (1)..(25): SEQ ID NO: 6576; WAN024CZW; Start 36; Stop 60
agtagatagagcgccaataacggtg

SEQ ID NO: 442939 - DNA, 25 bp, Artificial
  probe
  misc_feature (1)..(25): SEQ ID NO: 6576; WAN024CZW; Start 20; Stop 44
aaaagggtgagatattagtagatag

SEQ ID NO: 442940 - DNA, 25 bp, Artificial
  probe
  misc_feature (1)..(25): SEQ ID NO: 6576; WAN024CZW; Start 19; Stop 43
gaaaagggtgagatattagtagata

SEQ ID NO: 442941 - DNA, 25 bp, Artificial
  probe
  misc_feature (1)..(25): SEQ ID NO: 6576; WAN024CZW; Start 37; Stop 61
gtagatagagcgccaataacggtgg

SEQ ID NO: 442942 - DNA, 25 bp, Artificial
  probe
  misc_feature (1)..(25): SEQ ID NO: 6577; WAN024BRF; Start 469; Stop 493
gcaacagaagataaggtagacaatc

SEQ ID NO: 442943 - DNA, 25 bp, Artificial
  probe
  misc_feature (1)..(25): SEQ ID NO: 6577; WAN024BRF; Start 71; Stop 95
tggaattagaaggaacgatgacaat

SEQ ID NO: 442944 - DNA, 25 bp, Artificial
  probe
  misc_feature (1)..(25): SEQ ID NO: 6577; WAN024BRF; Start 69; Stop 93
attggaattagaaggaacgatgaca

SEQ ID NO: 442945 - DNA, 25 bp, Artificial
  probe
  misc_feature (1)..(25): SEQ ID NO: 6577; WAN024BRF; Start 72; Stop 96
ggaattagaaggaacgatgacaatc

SEQ ID NO: 442946 - DNA, 25 bp, Artificial
  probe
  misc_feature (1)..(25): SEQ ID NO: 6577; WAN024BRF; Start 470; Stop 494
caacagaagataaggtagacaatcc

SEQ ID NO: 442947 - DNA, 25 bp, Artificial
  probe
  misc_feature (1)..(25): SEQ ID NO: 6577; WAN024BRF; Start 70; Stop 94
ttggaattagaaggaacgatgacaa

SEQ ID NO: 442948 - DNA, 25 bp, Artificial
  probe
  misc_feature (1)..(25): SEQ ID NO: 6577; WAN024BRF; Start 68; Stop 92
tattggaattagaaggaacgatgac

SEQ ID NO: 442949 - DNA, 25 bp, Artificial
  probe
  misc_feature (1)..(25): SEQ ID NO: 6577; WAN024BRF; Start 383; Stop 407
cgtatgagatatatgatggtggtgt

SEQ ID NO: 442950 - DNA, 25 bp, Artificial
  probe
  misc_feature (1)..(25): SEQ ID NO: 6577; WAN024BRF; Start 382; Stop 406
tcgtatgagatatatgatggtggtg

SEQ ID NO: 442951 - DNA, 25 bp, Artificial
  probe
  misc_feature (1)..(25): SEQ ID NO: 6577; WAN024BRF; Start 385; Stop 409
tatgagatatatgatggtggtgtgg

SEQ ID NO: 442952 - DNA, 25 bp, Artificial
  probe
  misc_feature (1)..(25): SEQ ID NO: 6577; WAN024BRF; Start 251; Stop 275
agagttatcatcctcagattgttgt

SEQ ID NO: 442953 - DNA, 25 bp, Artificial
  probe
  misc_feature (1)..(25): SEQ ID NO: 6577; WAN024BRF; Start 73; Stop 97
gaattagaaggaacgatgacaatca

SEQ ID NO: 442954 - DNA, 25 bp, Artificial
  probe
  misc_feature (1)..(25): SEQ ID NO: 6577; WAN024BRF; Start 388; Stop 412
gagatatatgatggtggtgtggaac

SEQ ID NO: 442955 - DNA, 25 bp, Artificial
  probe
  misc_feature (1)..(25): SEQ ID NO: 6577; WAN024BRF; Start 386; Stop 410
atgagatatatgatggtggtgtgga

SEQ ID NO: 442956 - DNA, 25 bp, Artificial
  probe
  misc_feature (1)..(25): SEQ ID NO: 6577; WAN024BRF; Start 387; Stop 411
tgagatatatgatggtggtgtggaa

SEQ ID NO: 442957 - DNA, 25 bp, Artificial
  probe
  misc_feature (1)..(25): SEQ ID NO: 6577; WAN024BRF; Start 381; Stop 405
ttcgtatgagatatatgatggtggt

SEQ ID NO: 442958 - DNA, 25 bp, Artificial
  probe
  misc_feature (1)..(25): SEQ ID NO: 6577; WAN024BRF; Start 252; Stop 276
gagttatcatcctcagattgttgtt

SEQ ID NO: 442959 - DNA, 25 bp, Artificial
  probe
  misc_feature (1)..(25): SEQ ID NO: 6577; WAN024BRF; Start 67; Stop 91
ttattggaattagaaggaacgatga

SEQ ID NO: 442960 - DNA, 25 bp, Artificial
  probe
  misc_feature (1)..(25): SEQ ID NO: 6577; WAN024BRF; Start 384; Stop 408
gtatgagatatatgatggtggtgtg

SEQ ID NO: 442961 - DNA, 25 bp, Artificial
  probe
  misc_feature (1)..(25): SEQ ID NO: 6577; WAN024BRF; Start 250; Stop 274
aagagttatcatcctcagattgttg

SEQ ID NO: 442962 - DNA, 25 bp, Artificial
  probe
  misc_feature (1)..(25): SEQ ID NO: 6577; WAN024BRF; Start 253; Stop 277
agttatcatcctcagattgttgtta

SEQ ID NO: 442963 - DNA, 25 bp, Artificial
  probe
  misc_feature (1)..(25): SEQ ID NO: 6577; WAN024BRF; Start 471; Stop 495
aacagaagataaggtagacaatcct

SEQ ID NO: 442964 - DNA, 25 bp, Artificial
  probe
  misc_feature (1)..(25): SEQ ID NO: 6577; WAN024BRF; Start 389; Stop 413
agatatatgatggtggtgtggaaca

SEQ ID NO: 442965 - DNA, 25 bp, Artificial
  probe
  misc_feature (1)..(25): SEQ ID NO: 6577; WAN024BRF; Start 380; Stop 404
attcgtatgagatatatgatggtgg

SEQ ID NO: 442966 - DNA, 25 bp, Artificial
  probe
  misc_feature (1)..(25): SEQ ID NO: 6577; WAN024BRF; Start 468; Stop 492
tgcaacagaagataaggtagacaat

SEQ ID NO: 442967 - DNA, 25 bp, Artificial
  probe
  misc_feature (1)..(25): SEQ ID NO: 6577; WAN024BRF; Start 1015; Stop 1039
ttacgagaaggtttgagaaagtttg

SEQ ID NO: 442968 - DNA, 25 bp, Artificial
  probe
  misc_feature (1)..(25): SEQ ID NO: 6577; WAN024BRF; Start 493; Stop 517
cctatttcactatatgctgcgacta

SEQ ID NO: 442969 - DNA, 25 bp, Artificial
  probe
  misc_feature (1)..(25): SEQ ID NO: 6577; WAN024BRF; Start 490; Stop 514
aatcctatttcactatatgctgcga

SEQ ID NO: 442970 - DNA, 25 bp, Artificial
  probe
  misc_feature (1)..(25): SEQ ID NO: 6577; WAN024BRF; Start 489; Stop 513
caatcctatttcactatatgctgcg

SEQ ID NO: 442971 - DNA, 25 bp, Artificial
  probe
  misc_feature (1)..(25): SEQ ID NO: 6577; WAN024BRF; Start 342; Stop 366
tatcgttggctttcataatgtgttg

SEQ ID NO: 442972 - DNA, 25 bp, Artificial
  probe
  misc_feature (1)..(25): SEQ ID NO: 6577; WAN024BRF; Start 472; Stop 496
acagaagataaggtagacaatccta

SEQ ID NO: 442973 - DNA, 25 bp, Artificial
  probe
  misc_feature (1)..(25): SEQ ID NO: 6577; WAN024BRF; Start 491; Stop 515
atcctatttcactatatgctgcgac

SEQ ID NO: 442974 - DNA, 25 bp, Artificial
  probe
  misc_feature (1)..(25): SEQ ID NO: 6577; WAN024BRF; Start 341; Stop 365
atatcgttggctttcataatgtgtt

SEQ ID NO: 442975 - DNA, 25 bp, Artificial
  probe
  misc_feature (1)..(25): SEQ ID NO: 6578; WAN024DWV; Start 107; Stop 131
aacgagcgattaagatattgaacac

SEQ ID NO: 442976 - DNA, 25 bp, Artificial
  probe
  misc_feature (1)..(25): SEQ ID NO: 6578; WAN024DWV; Start 110; Stop 134
gagcgattaagatattgaacaccat

SEQ ID NO: 442977 - DNA, 25 bp, Artificial
  probe
  misc_feature (1)..(25): SEQ ID NO: 6578; WAN024DWV; Start 109; Stop 133
cgagcgattaagatattgaacacca

SEQ ID NO: 442978 - DNA, 25 bp, Artificial
  probe
  misc_feature (1)..(25): SEQ ID NO: 6578; WAN024DWV; Start 108; Stop 132
acgagcgattaagatattgaacacc

SEQ ID NO: 442979 - DNA, 25 bp, Artificial
  probe
  misc_feature (1)..(25): SEQ ID NO: 6578; WAN024DWV; Start 113; Stop 137
cgattaagatattgaacaccatgcc

SEQ ID NO: 442980 - DNA, 25 bp, Artificial
  probe
  misc_feature (1)..(25): SEQ ID NO: 6578; WAN024DWV; Start 111; Stop 135
agcgattaagatattgaacaccatg

SEQ ID NO: 442981 - DNA, 25 bp, Artificial
  probe
  misc_feature (1)..(25): SEQ ID NO: 6578; WAN024DWV; Start 115; Stop 139
attaagatattgaacaccatgcctg

SEQ ID NO: 442982 - DNA, 25 bp, Artificial
  probe
  misc_feature (1)..(25): SEQ ID NO: 6578; WAN024DWV; Start 114; Stop 138
gattaagatattgaacaccatgcct

SEQ ID NO: 442983 - DNA, 25 bp, Artificial
  probe
  misc_feature (1)..(25): SEQ ID NO: 6578; WAN024DWV; Start 112; Stop 136
gcgattaagatattgaacaccatgc

SEQ ID NO: 442984 - DNA, 25 bp, Artificial
  probe
  misc_feature (1)..(25): SEQ ID NO: 6578; WAN024DWV; Start 116; Stop 140
ttaagatattgaacaccatgcctgc

SEQ ID NO: 442985 - DNA, 25 bp, Artificial
  probe
  misc_feature (1)..(25): SEQ ID NO: 6578; WAN024DWV; Start 106; Stop 130
aaacgagcgattaagatattgaaca

SEQ ID NO: 442986 - DNA, 25 bp, Artificial
  probe
  misc_feature (1)..(25): SEQ ID NO: 6578; WAN024DWV; Start 50; Stop 74
tacatgccatatatagagtgtggtg

SEQ ID NO: 442987 - DNA, 25 bp, Artificial
  probe
  misc_feature (1)..(25): SEQ ID NO: 6578; WAN024DWV; Start 49; Stop 73
atacatgccatatatagagtgtggt

SEQ ID NO: 442988 - DNA, 25 bp, Artificial
  probe
  misc_feature (1)..(25): SEQ ID NO: 6578; WAN024DWV; Start 60; Stop 84
atatagagtgtggtgccctgttaaa

SEQ ID NO: 442989 - DNA, 25 bp, Artificial
  probe
  misc_feature (1)..(25): SEQ ID NO: 6578; WAN024DWV; Start 59; Stop 83
tatatagagtgtggtgccctgttaa

SEQ ID NO: 442990 - DNA, 25 bp, Artificial
  probe
  misc_feature (1)..(25): SEQ ID NO: 6578; WAN024DWV; Start 48; Stop 72
catacatgccatatatagagtgtgg

SEQ ID NO: 442991 - DNA, 25 bp, Artificial
  probe
  misc_feature (1)..(25): SEQ ID NO: 6578; WAN024DWV; Start 58; Stop 82
atatatagagtgtggtgccctgtta

SEQ ID NO: 442992 - DNA, 25 bp, Artificial
  probe
  misc_feature (1)..(25): SEQ ID NO: 6578; WAN024DWV; Start 47; Stop 71
tcatacatgccatatatagagtgtg

SEQ ID NO: 442993 - DNA, 25 bp, Artificial
  probe
  misc_feature (1)..(25): SEQ ID NO: 6578; WAN024DWV; Start 40; Stop 64
accgcaatcatacatgccatatata

SEQ ID NO: 442994 - DNA, 25 bp, Artificial
  probe
  misc_feature (1)..(25): SEQ ID NO: 6578; WAN024DWV; Start 41; Stop 65
ccgcaatcatacatgccatatatag

SEQ ID NO: 442995 - DNA, 25 bp, Artificial
  probe
  misc_feature (1)..(25): SEQ ID NO: 6578; WAN024DWV; Start 142; Stop 166
aacataatcattgcagtagctgagc

SEQ ID NO: 442996 - DNA, 25 bp, Artificial
  probe
  misc_feature (1)..(25): SEQ ID NO: 6578; WAN024DWV; Start 117; Stop 141
taagatattgaacaccatgcctgca

SEQ ID NO: 442997 - DNA, 25 bp, Artificial
  probe
  misc_feature (1)..(25): SEQ ID NO: 6578; WAN024DWV; Start 155; Stop 179
cagtagctgagccatatgttgttaa

SEQ ID NO: 442998 - DNA, 25 bp, Artificial
  probe
  misc_feature (1)..(25): SEQ ID NO: 6578; WAN024DWV; Start 57; Stop 81
catatatagagtgtggtgccctgtt

SEQ ID NO: 442999 - DNA, 25 bp, Artificial
  probe
  misc_feature (1)..(25): SEQ ID NO: 6578; WAN024DWV; Start 146; Stop 170
taatcattgcagtagctgagccata

SEQ ID NO: 443000 - DNA, 25 bp, Artificial
  probe
  misc_feature (1)..(25): SEQ ID NO: 6578; WAN024DWV; Start 42; Stop 66
cgcaatcatacatgccatatataga

SEQ ID NO: 443001 - DNA, 25 bp, Artificial
  probe
  misc_feature (1)..(25): SEQ ID NO: 6578; WAN024DWV; Start 39; Stop 63
gaccgcaatcatacatgccatatat

SEQ ID NO: 443002 - DNA, 25 bp, Artificial
  probe
  misc_feature (1)..(25): SEQ ID NO: 6578; WAN024DWV; Start 51; Stop 75
acatgccatatatagagtgtggtgc

SEQ ID NO: 443003 - DNA, 25 bp, Artificial
  probe
  misc_feature (1)..(25): SEQ ID NO: 6578; WAN024DWV; Start 46; Stop 70
atcatacatgccatatatagagtgt

SEQ ID NO: 443004 - DNA, 25 bp, Artificial
  probe
  misc_feature (1)..(25): SEQ ID NO: 6578; WAN024DWV; Start 147; Stop 171
aatcattgcagtagctgagccatat

SEQ ID NO: 443005 - DNA, 25 bp, Artificial
  probe
  misc_feature (1)..(25): SEQ ID NO: 6578; WAN024DWV; Start 145; Stop 169
ataatcattgcagtagctgagccat

SEQ ID NO: 443006 - DNA, 25 bp, Artificial
  probe
  misc_feature (1)..(25): SEQ ID NO: 6578; WAN024DWV; Start 157; Stop 181
gtagctgagccatatgttgttaaag

SEQ ID NO: 443007 - DNA, 25 bp, Artificial
  probe
  misc_feature (1)..(25): SEQ ID NO: 6578; WAN024DWV; Start 156; Stop 180
agtagctgagccatatgttgttaaa

SEQ ID NO: 443008 - DNA, 25 bp, Artificial
  probe
  misc_feature (1)..(25): SEQ ID NO: 6579; WAN024F8K; Start 38; Stop 62
ataggtctcctgacgaatatcctga

SEQ ID NO: 443009 - DNA, 25 bp, Artificial
  probe
  misc_feature (1)..(25): SEQ ID NO: 6579; WAN024F8K; Start 37; Stop 61
cataggtctcctgacgaatatcctg

SEQ ID NO: 443010 - DNA, 25 bp, Artificial
  probe
  misc_feature (1)..(25): SEQ ID NO: 6579; WAN024F8K; Start 69; Stop 93
agaccgatttctccctgatattcta

SEQ ID NO: 443011 - DNA, 25 bp, Artificial
  probe
  misc_feature (1)..(25): SEQ ID NO: 6579; WAN024F8K; Start 70; Stop 94
gaccgatttctccctgatattctag

SEQ ID NO: 443012 - DNA, 25 bp, Artificial
  probe
  misc_feature (1)..(25): SEQ ID NO: 6579; WAN024F8K; Start 34; Stop 58
gagcataggtctcctgacgaatatc

SEQ ID NO: 443013 - DNA, 25 bp, Artificial
  probe
  misc_feature (1)..(25): SEQ ID NO: 6579; WAN024F8K; Start 43; Stop 67
tctcctgacgaatatcctgaccatc

SEQ ID NO: 443014 - DNA, 25 bp, Artificial
  probe
  misc_feature (1)..(25): SEQ ID NO: 6579; WAN024F8K; Start 39; Stop 63
taggtctcctgacgaatatcctgac

SEQ ID NO: 443015 - DNA, 25 bp, Artificial
  probe
  misc_feature (1)..(25): SEQ ID NO: 6579; WAN024F8K; Start 22; Stop 46
gataaccaatccgagcataggtctc

SEQ ID NO: 443016 - DNA, 25 bp, Artificial
  probe
  misc_feature (1)..(25): SEQ ID NO: 6579; WAN024F8K; Start 53; Stop 77
aatatcctgaccatccagaccgatt

SEQ ID NO: 443017 - DNA, 25 bp, Artificial
  probe
  misc_feature (1)..(25): SEQ ID NO: 6579; WAN024F8K; Start 10; Stop 34
gttcttcaggcagataaccaatccg

SEQ ID NO: 443018 - DNA, 25 bp, Artificial
  probe
  misc_feature (1)..(25): SEQ ID NO: 6579; WAN024F8K; Start 9; Stop 33
cgttcttcaggcagataaccaatcc

SEQ ID NO: 443019 - DNA, 25 bp, Artificial
  probe
  misc_feature (1)..(25): SEQ ID NO: 6579; WAN024F8K; Start 73; Stop 97
cgatttctccctgatattctaggaa

SEQ ID NO: 443020 - DNA, 25 bp, Artificial
  probe
  misc_feature (1)..(25): SEQ ID NO: 6579; WAN024F8K; Start 68; Stop 92
cagaccgatttctccctgatattct

SEQ ID NO: 443021 - DNA, 25 bp, Artificial
  probe
  misc_feature (1)..(25): SEQ ID NO: 6579; WAN024F8K; Start 21; Stop 45
agataaccaatccgagcataggtct

SEQ ID NO: 443022 - DNA, 25 bp, Artificial
  probe
  misc_feature (1)..(25): SEQ ID NO: 6579; WAN024F8K; Start 20; Stop 44
cagataaccaatccgagcataggtc

SEQ ID NO: 443023 - DNA, 25 bp, Artificial
  probe
  misc_feature (1)..(25): SEQ ID NO: 6579; WAN024F8K; Start 72; Stop 96
ccgatttctccctgatattctagga

SEQ ID NO: 443024 - DNA, 25 bp, Artificial
  probe
  misc_feature (1)..(25): SEQ ID NO: 6579; WAN024F8K; Start 71; Stop 95
accgatttctccctgatattctagg

SEQ ID NO: 443025 - DNA, 25 bp, Artificial
  probe
  misc_feature (1)..(25): SEQ ID NO: 6579; WAN024F8K; Start 11; Stop 35
ttcttcaggcagataaccaatccga

SEQ ID NO: 443026 - DNA, 25 bp, Artificial
  probe
  misc_feature (1)..(25): SEQ ID NO: 6579; WAN024F8K; Start 36; Stop 60
gcataggtctcctgacgaatatcct

SEQ ID NO: 443027 - DNA, 25 bp, Artificial
  probe
  misc_feature (1)..(25): SEQ ID NO: 6579; WAN024F8K; Start 35; Stop 59
agcataggtctcctgacgaatatcc

SEQ ID NO: 443028 - DNA, 25 bp, Artificial
  probe
  misc_feature (1)..(25): SEQ ID NO: 6579; WAN024F8K; Start 52; Stop 76
gaatatcctgaccatccagaccgat

SEQ ID NO: 443029 - DNA, 25 bp, Artificial
  probe
  misc_feature (1)..(25): SEQ ID NO: 6579; WAN024F8K; Start 47; Stop 71
ctgacgaatatcctgaccatccaga

SEQ ID NO: 443030 - DNA, 25 bp, Artificial
  probe
  misc_feature (1)..(25): SEQ ID NO: 6579; WAN024F8K; Start 42; Stop 66
gtctcctgacgaatatcctgaccat

SEQ ID NO: 443031 - DNA, 25 bp, Artificial
  probe
  misc_feature (1)..(25): SEQ ID NO: 6579; WAN024F8K; Start 44; Stop 68
ctcctgacgaatatcctgaccatcc

SEQ ID NO: 443032 - DNA, 25 bp, Artificial
  probe
  misc_feature (1)..(25): SEQ ID NO: 6579; WAN024F8K; Start 48; Stop 72
tgacgaatatcctgaccatccagac

SEQ ID NO: 443033 - DNA, 25 bp, Artificial
  probe
  misc_feature (1)..(25): SEQ ID NO: 6579; WAN024F8K; Start 33; Stop 57
cgagcataggtctcctgacgaatat

SEQ ID NO: 443034 - DNA, 25 bp, Artificial
  probe
  misc_feature (1)..(25): SEQ ID NO: 6579; WAN024F8K; Start 78; Stop 102
tctccctgatattctaggaatttca

SEQ ID NO: 443035 - DNA, 25 bp, Artificial
  probe
  misc_feature (1)..(25): SEQ ID NO: 6579; WAN024F8K; Start 17; Stop 41
aggcagataaccaatccgagcatag

SEQ ID NO: 443036 - DNA, 25 bp, Artificial
  probe
  misc_feature (1)..(25): SEQ ID NO: 6579; WAN024F8K; Start 12; Stop 36
tcttcaggcagataaccaatccgag

SEQ ID NO: 443037 - DNA, 25 bp, Artificial
  probe
  misc_feature (1)..(25): SEQ ID NO: 6579; WAN024F8K; Start 67; Stop 91
ccagaccgatttctccctgatattc

SEQ ID NO: 443038 - DNA, 25 bp, Artificial
  probe
  misc_feature (1)..(25): SEQ ID NO: 6579; WAN024F8K; Start 65; Stop 89
atccagaccgatttctccctgatat

SEQ ID NO: 443039 - DNA, 25 bp, Artificial
  probe
  misc_feature (1)..(25): SEQ ID NO: 6579; WAN024F8K; Start 8; Stop 32
gcgttcttcaggcagataaccaatc

SEQ ID NO: 443040 - DNA, 25 bp, Artificial
  probe
  misc_feature (1)..(25): SEQ ID NO: 6579; WAN024F8K; Start 79; Stop 103
ctccctgatattctaggaatttcaa

SEQ ID NO: 443041 - DNA, 25 bp, Artificial
  probe
  misc_feature (1)..(25): SEQ ID NO: 6580; WAN024BNQ; Start 136; Stop 160
atcaaggtatcagaagtagaggagg

SEQ ID NO: 443042 - DNA, 25 bp, Artificial
  probe
  misc_feature (1)..(25): SEQ ID NO: 6580; WAN024BNQ; Start 135; Stop 159
aatcaaggtatcagaagtagaggag

SEQ ID NO: 443043 - DNA, 25 bp, Artificial
  probe
  misc_feature (1)..(25): SEQ ID NO: 6580; WAN024BNQ; Start 138; Stop 162
caaggtatcagaagtagaggaggtg

SEQ ID NO: 443044 - DNA, 25 bp, Artificial
  probe
  misc_feature (1)..(25): SEQ ID NO: 6580; WAN024BNQ; Start 137; Stop 161
tcaaggtatcagaagtagaggaggt

SEQ ID NO: 443045 - DNA, 25 bp, Artificial
  probe
  misc_feature (1)..(25): SEQ ID NO: 6580; WAN024BNQ; Start 72; Stop 96
atttatggctgctattgagtttgtg

SEQ ID NO: 443046 - DNA, 25 bp, Artificial
  probe
  misc_feature (1)..(25): SEQ ID NO: 6580; WAN024BNQ; Start 71; Stop 95
catttatggctgctattgagtttgt

SEQ ID NO: 443047 - DNA, 25 bp, Artificial
  probe
  misc_feature (1)..(25): SEQ ID NO: 6580; WAN024BNQ; Start 75; Stop 99
tatggctgctattgagtttgtgaaa

SEQ ID NO: 443048 - DNA, 25 bp, Artificial
  probe
  misc_feature (1)..(25): SEQ ID NO: 6580; WAN024BNQ; Start 74; Stop 98
ttatggctgctattgagtttgtgaa

SEQ ID NO: 443049 - DNA, 25 bp, Artificial
  probe
  misc_feature (1)..(25): SEQ ID NO: 6580; WAN024BNQ; Start 73; Stop 97
tttatggctgctattgagtttgtga

SEQ ID NO: 443050 - DNA, 25 bp, Artificial
  probe
  misc_feature (1)..(25): SEQ ID NO: 6580; WAN024BNQ; Start 139; Stop 163
aaggtatcagaagtagaggaggtgc

SEQ ID NO: 443051 - DNA, 25 bp, Artificial
  probe
  misc_feature (1)..(25): SEQ ID NO: 6580; WAN024BNQ; Start 134; Stop 158
aaatcaaggtatcagaagtagagga

SEQ ID NO: 443052 - DNA, 25 bp, Artificial
  probe
  misc_feature (1)..(25): SEQ ID NO: 6580; WAN024BNQ; Start 133; Stop 157
gaaatcaaggtatcagaagtagagg

SEQ ID NO: 443053 - DNA, 25 bp, Artificial
  probe
  misc_feature (1)..(25): SEQ ID NO: 6580; WAN024BNQ; Start 70; Stop 94
tcatttatggctgctattgagtttg

SEQ ID NO: 443054 - DNA, 25 bp, Artificial
  probe
  misc_feature (1)..(25): SEQ ID NO: 6580; WAN024BNQ; Start 92; Stop 116
ttgtgaaacgatataccgacttatt

SEQ ID NO: 443055 - DNA, 25 bp, Artificial
  probe
  misc_feature (1)..(25): SEQ ID NO: 6580; WAN024BNQ; Start 91; Stop 115
tttgtgaaacgatataccgacttat

SEQ ID NO: 443056 - DNA, 25 bp, Artificial
  probe
  misc_feature (1)..(25): SEQ ID NO: 6580; WAN024BNQ; Start 69; Stop 93
ttcatttatggctgctattgagttt

SEQ ID NO: 443057 - DNA, 25 bp, Artificial
  probe
  misc_feature (1)..(25): SEQ ID NO: 6580; WAN024BNQ; Start 68; Stop 92
attcatttatggctgctattgagtt

SEQ ID NO: 443058 - DNA, 25 bp, Artificial
  probe
  misc_feature (1)..(25): SEQ ID NO: 6580; WAN024BNQ; Start 67; Stop 91
aattcatttatggctgctattgagt

SEQ ID NO: 443059 - DNA, 25 bp, Artificial
  probe
  misc_feature (1)..(25): SEQ ID NO: 6580; WAN024BNQ; Start 93; Stop 117
tgtgaaacgatataccgacttatta

SEQ ID NO: 443060 - DNA, 25 bp, Artificial
  probe
  misc_feature (1)..(25): SEQ ID NO: 6580; WAN024BNQ; Start 123; Stop 147
tggttcaaatgaaatcaaggtatca

SEQ ID NO: 443061 - DNA, 25 bp, Artificial
  probe
  misc_feature (1)..(25): SEQ ID NO: 6580; WAN024BNQ; Start 66; Stop 90
aaattcatttatggctgctattgag

SEQ ID NO: 443062 - DNA, 25 bp, Artificial
  probe
  misc_feature (1)..(25): SEQ ID NO: 6580; WAN024BNQ; Start 124; Stop 148
ggttcaaatgaaatcaaggtatcag

SEQ ID NO: 443063 - DNA, 25 bp, Artificial
  probe
  misc_feature (1)..(25): SEQ ID NO: 6580; WAN024BNQ; Start 132; Stop 156
tgaaatcaaggtatcagaagtagag

SEQ ID NO: 443064 - DNA, 25 bp, Artificial
  probe
  misc_feature (1)..(25): SEQ ID NO: 6580; WAN024BNQ; Start 122; Stop 146
ttggttcaaatgaaatcaaggtatc

SEQ ID NO: 443065 - DNA, 25 bp, Artificial
  probe
  misc_feature (1)..(25): SEQ ID NO: 6580; WAN024BNQ; Start 128; Stop 152
caaatgaaatcaaggtatcagaagt

SEQ ID NO: 443066 - DNA, 25 bp, Artificial
  probe
  misc_feature (1)..(25): SEQ ID NO: 6580; WAN024BNQ; Start 127; Stop 151
tcaaatgaaatcaaggtatcagaag

SEQ ID NO: 443067 - DNA, 25 bp, Artificial
  probe
  misc_feature (1)..(25): SEQ ID NO: 6580; WAN024BNQ; Start 94; Stop 118
gtgaaacgatataccgacttattaa

SEQ ID NO: 443068 - DNA, 25 bp, Artificial
  probe
  misc_feature (1)..(25): SEQ ID NO: 6580; WAN024BNQ; Start 131; Stop 155
atgaaatcaaggtatcagaagtaga

SEQ ID NO: 443069 - DNA, 25 bp, Artificial
  probe
  misc_feature (1)..(25): SEQ ID NO: 6580; WAN024BNQ; Start 125; Stop 149
gttcaaatgaaatcaaggtatcaga

SEQ ID NO: 443070 - DNA, 25 bp, Artificial
  probe
  misc_feature (1)..(25): SEQ ID NO: 6580; WAN024BNQ; Start 85; Stop 109
attgagtttgtgaaacgatataccg

SEQ ID NO: 443071 - DNA, 25 bp, Artificial
  probe
  misc_feature (1)..(25): SEQ ID NO: 6580; WAN024BNQ; Start 80; Stop 104
ctgctattgagtttgtgaaacgata

SEQ ID NO: 443072 - DNA, 25 bp, Artificial
  probe
  misc_feature (1)..(25): SEQ ID NO: 6580; WAN024BNQ; Start 89; Stop 113
agtttgtgaaacgatataccgactt

SEQ ID NO: 443073 - DNA, 25 bp, Artificial
  probe
  misc_feature (1)..(25): SEQ ID NO: 6580; WAN024BNQ; Start 86; Stop 110
ttgagtttgtgaaacgatataccga

SEQ ID NO: 443074 - DNA, 25 bp, Artificial
  probe
  misc_feature (1)..(25): SEQ ID NO: 6581; WAN024FQ2; Start 441; Stop 465
tctatctgtattgctggttattggt

SEQ ID NO: 443075 - DNA, 25 bp, Artificial
  probe
  misc_feature (1)..(25): SEQ ID NO: 6581; WAN024FQ2; Start 676; Stop 700
ttagcgaagaccacttaccataatc

SEQ ID NO: 443076 - DNA, 25 bp, Artificial
  probe
  misc_feature (1)..(25): SEQ ID NO: 6581; WAN024FQ2; Start 675; Stop 699
cttagcgaagaccacttaccataat

SEQ ID NO: 443077 - DNA, 25 bp, Artificial
  probe
  misc_feature (1)..(25): SEQ ID NO: 6581; WAN024FQ2; Start 442; Stop 466
ctatctgtattgctggttattggtt

SEQ ID NO: 443078 - DNA, 25 bp, Artificial
  probe
  misc_feature (1)..(25): SEQ ID NO: 6581; WAN024FQ2; Start 440; Stop 464
ttctatctgtattgctggttattgg

SEQ ID NO: 443079 - DNA, 25 bp, Artificial
  probe
  misc_feature (1)..(25): SEQ ID NO: 6581; WAN024FQ2; Start 677; Stop 701
tagcgaagaccacttaccataatct

SEQ ID NO: 443080 - DNA, 25 bp, Artificial
  probe
  misc_feature (1)..(25): SEQ ID NO: 6581; WAN024FQ2; Start 52; Stop 76
gttggagtcgttctacttcatacag

SEQ ID NO: 443081 - DNA, 25 bp, Artificial
  probe
  misc_feature (1)..(25): SEQ ID NO: 6581; WAN024FQ2; Start 53; Stop 77
ttggagtcgttctacttcatacagc

SEQ ID NO: 443082 - DNA, 25 bp, Artificial
  probe
  misc_feature (1)..(25): SEQ ID NO: 6581; WAN024FQ2; Start 56; Stop 80
gagtcgttctacttcatacagctat

SEQ ID NO: 443083 - DNA, 25 bp, Artificial
  probe
  misc_feature (1)..(25): SEQ ID NO: 6581; WAN024FQ2; Start 446; Stop 470
ctgtattgctggttattggtttgat

SEQ ID NO: 443084 - DNA, 25 bp, Artificial
  probe
  misc_feature (1)..(25): SEQ ID NO: 6581; WAN024FQ2; Start 444; Stop 468
atctgtattgctggttattggtttg

SEQ ID NO: 443085 - DNA, 25 bp, Artificial
  probe
  misc_feature (1)..(25): SEQ ID NO: 6581; WAN024FQ2; Start 447; Stop 471
tgtattgctggttattggtttgatt

SEQ ID NO: 443086 - DNA, 25 bp, Artificial
  probe
  misc_feature (1)..(25): SEQ ID NO: 6581; WAN024FQ2; Start 445; Stop 469
tctgtattgctggttattggtttga

SEQ ID NO: 443087 - DNA, 25 bp, Artificial
  probe
  misc_feature (1)..(25): SEQ ID NO: 6581; WAN024FQ2; Start 437; Stop 461
acattctatctgtattgctggttat

SEQ ID NO: 443088 - DNA, 25 bp, Artificial
  probe
  misc_feature (1)..(25): SEQ ID NO: 6581; WAN024FQ2; Start 439; Stop 463
attctatctgtattgctggttattg

SEQ ID NO: 443089 - DNA, 25 bp, Artificial
  probe
  misc_feature (1)..(25): SEQ ID NO: 6581; WAN024FQ2; Start 438; Stop 462
cattctatctgtattgctggttatt

SEQ ID NO: 443090 - DNA, 25 bp, Artificial
  probe
  misc_feature (1)..(25): SEQ ID NO: 6581; WAN024FQ2; Start 55; Stop 79
ggagtcgttctacttcatacagcta

SEQ ID NO: 443091 - DNA, 25 bp, Artificial
  probe
  misc_feature (1)..(25): SEQ ID NO: 6581; WAN024FQ2; Start 448; Stop 472
gtattgctggttattggtttgattt

SEQ ID NO: 443092 - DNA, 25 bp, Artificial
  probe
  misc_feature (1)..(25): SEQ ID NO: 6581; WAN024FQ2; Start 57; Stop 81
agtcgttctacttcatacagctatg

SEQ ID NO: 443093 - DNA, 25 bp, Artificial
  probe
  misc_feature (1)..(25): SEQ ID NO: 6581; WAN024FQ2; Start 443; Stop 467
tatctgtattgctggttattggttt

SEQ ID NO: 443094 - DNA, 25 bp, Artificial
  probe
  misc_feature (1)..(25): SEQ ID NO: 6581; WAN024FQ2; Start 522; Stop 546
acaaacctttagattatggacttgg

SEQ ID NO: 443095 - DNA, 25 bp, Artificial
  probe
  misc_feature (1)..(25): SEQ ID NO: 6581; WAN024FQ2; Start 58; Stop 82
gtcgttctacttcatacagctatgg

SEQ ID NO: 443096 - DNA, 25 bp, Artificial
  probe
  misc_feature (1)..(25): SEQ ID NO: 6581; WAN024FQ2; Start 491; Stop 515
tatttcaaatgccagcacaaacata

SEQ ID NO: 443097 - DNA, 25 bp, Artificial
  probe
  misc_feature (1)..(25): SEQ ID NO: 6581; WAN024FQ2; Start 492; Stop 516
atttcaaatgccagcacaaacatat

SEQ ID NO: 443098 - DNA, 25 bp, Artificial
  probe
  misc_feature (1)..(25): SEQ ID NO: 6581; WAN024FQ2; Start 674; Stop 698
tcttagcgaagaccacttaccataa

SEQ ID NO: 443099 - DNA, 25 bp, Artificial
  probe
  misc_feature (1)..(25): SEQ ID NO: 6581; WAN024FQ2; Start 673; Stop 697
ttcttagcgaagaccacttaccata

SEQ ID NO: 443100 - DNA, 25 bp, Artificial
  probe
  misc_feature (1)..(25): SEQ ID NO: 6581; WAN024FQ2; Start 490; Stop 514
gtatttcaaatgccagcacaaacat

SEQ ID NO: 443101 - DNA, 25 bp, Artificial
  probe
  misc_feature (1)..(25): SEQ ID NO: 6581; WAN024FQ2; Start 485; Stop 509
atattgtatttcaaatgccagcaca

SEQ ID NO: 443102 - DNA, 25 bp, Artificial
  probe
  misc_feature (1)..(25): SEQ ID NO: 6581; WAN024FQ2; Start 678; Stop 702
agcgaagaccacttaccataatctt

SEQ ID NO: 443103 - DNA, 25 bp, Artificial
  probe
  misc_feature (1)..(25): SEQ ID NO: 6581; WAN024FQ2; Start 480; Stop 504
agcgaatattgtatttcaaatgcca

SEQ ID NO: 443104 - DNA, 25 bp, Artificial
  probe
  misc_feature (1)..(25): SEQ ID NO: 6581; WAN024FQ2; Start 608; Stop 632
ggtttaagatatggatgaaagtagc

SEQ ID NO: 443105 - DNA, 25 bp, Artificial
  probe
  misc_feature (1)..(25): SEQ ID NO: 6581; WAN024FQ2; Start 482; Stop 506
cgaatattgtatttcaaatgccagc

SEQ ID NO: 443106 - DNA, 25 bp, Artificial
  probe
  misc_feature (1)..(25): SEQ ID NO: 6581; WAN024FQ2; Start 481; Stop 505
gcgaatattgtatttcaaatgccag

SEQ ID NO: 443107 - DNA, 25 bp, Artificial
  probe
  misc_feature (1)..(25): SEQ ID NO: 6583; WAN024D82; Start 55; Stop 79
caagcaatctacaagcacatcataa

SEQ ID NO: 443108 - DNA, 25 bp, Artificial
  probe
  misc_feature (1)..(25): SEQ ID NO: 6583; WAN024D82; Start 54; Stop 78
tcaagcaatctacaagcacatcata

SEQ ID NO: 443109 - DNA, 25 bp, Artificial
  probe
  misc_feature (1)..(25): SEQ ID NO: 6583; WAN024D82; Start 53; Stop 77
ttcaagcaatctacaagcacatcat

SEQ ID NO: 443110 - DNA, 25 bp, Artificial
  probe
  misc_feature (1)..(25): SEQ ID NO: 6583; WAN024D82; Start 52; Stop 76
gttcaagcaatctacaagcacatca

SEQ ID NO: 443111 - DNA, 25 bp, Artificial
  probe
  misc_feature (1)..(25): SEQ ID NO: 6583; WAN024D82; Start 45; Stop 69
caagtcggttcaagcaatctacaag

SEQ ID NO: 443112 - DNA, 25 bp, Artificial
  probe
  misc_feature (1)..(25): SEQ ID NO: 6583; WAN024D82; Start 51; Stop 75
ggttcaagcaatctacaagcacatc

SEQ ID NO: 443113 - DNA, 25 bp, Artificial
  probe
  misc_feature (1)..(25): SEQ ID NO: 6583; WAN024D82; Start 44; Stop 68
tcaagtcggttcaagcaatctacaa

SEQ ID NO: 443114 - DNA, 25 bp, Artificial
  probe
  misc_feature (1)..(25): SEQ ID NO: 6583; WAN024D82; Start 43; Stop 67
ttcaagtcggttcaagcaatctaca

SEQ ID NO: 443115 - DNA, 25 bp, Artificial
  probe
  misc_feature (1)..(25): SEQ ID NO: 6583; WAN024D82; Start 56; Stop 80
aagcaatctacaagcacatcataaa

SEQ ID NO: 443116 - DNA, 25 bp, Artificial
  probe
  misc_feature (1)..(25): SEQ ID NO: 6583; WAN024D82; Start 42; Stop 66
tttcaagtcggttcaagcaatctac

SEQ ID NO: 443117 - DNA, 25 bp, Artificial
  probe
  misc_feature (1)..(25): SEQ ID NO: 6583; WAN024D82; Start 81; Stop 105
aaagatttgctctgtgattgtaggc

SEQ ID NO: 443118 - DNA, 25 bp, Artificial
  probe
  misc_feature (1)..(25): SEQ ID NO: 6583; WAN024D82; Start 46; Stop 70
aagtcggttcaagcaatctacaagc

SEQ ID NO: 443119 - DNA, 25 bp, Artificial
  probe
  misc_feature (1)..(25): SEQ ID NO: 6583; WAN024D82; Start 50; Stop 74
cggttcaagcaatctacaagcacat

SEQ ID NO: 443120 - DNA, 25 bp, Artificial
  probe
  misc_feature (1)..(25): SEQ ID NO: 6583; WAN024D82; Start 57; Stop 81
agcaatctacaagcacatcataaaa

SEQ ID NO: 443121 - DNA, 25 bp, Artificial
  probe
  misc_feature (1)..(25): SEQ ID NO: 6583; WAN024D82; Start 80; Stop 104
aaaagatttgctctgtgattgtagg

SEQ ID NO: 443122 - DNA, 25 bp, Artificial
  probe
  misc_feature (1)..(25): SEQ ID NO: 6583; WAN024D82; Start 41; Stop 65
ttttcaagtcggttcaagcaatcta

SEQ ID NO: 443123 - DNA, 25 bp, Artificial
  probe
  misc_feature (1)..(25): SEQ ID NO: 6583; WAN024D82; Start 48; Stop 72
gtcggttcaagcaatctacaagcac

SEQ ID NO: 443124 - DNA, 25 bp, Artificial
  probe
  misc_feature (1)..(25): SEQ ID NO: 6583; WAN024D82; Start 47; Stop 71
agtcggttcaagcaatctacaagca

SEQ ID NO: 443125 - DNA, 25 bp, Artificial
  probe
  misc_feature (1)..(25): SEQ ID NO: 6583; WAN024D82; Start 49; Stop 73
tcggttcaagcaatctacaagcaca

SEQ ID NO: 443126 - DNA, 25 bp, Artificial
  probe
  misc_feature (1)..(25): SEQ ID NO: 6583; WAN024D82; Start 82; Stop 106
aagatttgctctgtgattgtaggcc

SEQ ID NO: 443127 - DNA, 25 bp, Artificial
  probe
  misc_feature (1)..(25): SEQ ID NO: 6583; WAN024D82; Start 84; Stop 108
gatttgctctgtgattgtaggccag

SEQ ID NO: 443128 - DNA, 25 bp, Artificial
  probe
  misc_feature (1)..(25): SEQ ID NO: 6583; WAN024D82; Start 83; Stop 107
agatttgctctgtgattgtaggcca

SEQ ID NO: 443129 - DNA, 25 bp, Artificial
  probe
  misc_feature (1)..(25): SEQ ID NO: 6583; WAN024D82; Start 95; Stop 119
tgattgtaggccagaacctggataa

SEQ ID NO: 443130 - DNA, 25 bp, Artificial
  probe
  misc_feature (1)..(25): SEQ ID NO: 6583; WAN024D82; Start 97; Stop 121
attgtaggccagaacctggataaag

SEQ ID NO: 443131 - DNA, 25 bp, Artificial
  probe
  misc_feature (1)..(25): SEQ ID NO: 6583; WAN024D82; Start 96; Stop 120
gattgtaggccagaacctggataaa

SEQ ID NO: 443132 - DNA, 25 bp, Artificial
  probe
  misc_feature (1)..(25): SEQ ID NO: 6583; WAN024D82; Start 100; Stop 124
gtaggccagaacctggataaagttt

SEQ ID NO: 443133 - DNA, 25 bp, Artificial
  probe
  misc_feature (1)..(25): SEQ ID NO: 6583; WAN024D82; Start 90; Stop 114
ctctgtgattgtaggccagaacctg

SEQ ID NO: 443134 - DNA, 25 bp, Artificial
  probe
  misc_feature (1)..(25): SEQ ID NO: 6583; WAN024D82; Start 94; Stop 118
gtgattgtaggccagaacctggata

SEQ ID NO: 443135 - DNA, 25 bp, Artificial
  probe
  misc_feature (1)..(25): SEQ ID NO: 6583; WAN024D82; Start 87; Stop 111
ttgctctgtgattgtaggccagaac

SEQ ID NO: 443136 - DNA, 25 bp, Artificial
  probe
  misc_feature (1)..(25): SEQ ID NO: 6583; WAN024D82; Start 85; Stop 109
atttgctctgtgattgtaggccaga

SEQ ID NO: 443137 - DNA, 25 bp, Artificial
  probe
  misc_feature (1)..(25): SEQ ID NO: 6583; WAN024D82; Start 86; Stop 110
tttgctctgtgattgtaggccagaa

SEQ ID NO: 443138 - DNA, 25 bp, Artificial
  probe
  misc_feature (1)..(25): SEQ ID NO: 6583; WAN024D82; Start 99; Stop 123
tgtaggccagaacctggataaagtt

SEQ ID NO: 443139 - DNA, 25 bp, Artificial
  probe
  misc_feature (1)..(25): SEQ ID NO: 6583; WAN024D82; Start 98; Stop 122
ttgtaggccagaacctggataaagt

SEQ ID NO: 443140 - DNA, 25 bp, Artificial
  probe
  misc_feature (1)..(25): SEQ ID NO: 6584; WAN024BY8; Start 143; Stop 167
acatcaagacgctacaagaggttaa

SEQ ID NO: 443141 - DNA, 25 bp, Artificial
  probe
  misc_feature (1)..(25): SEQ ID NO: 6584; WAN024BY8; Start 142; Stop 166
aacatcaagacgctacaagaggtta

SEQ ID NO: 443142 - DNA, 25 bp, Artificial
  probe
  misc_feature (1)..(25): SEQ ID NO: 6584; WAN024BY8; Start 36; Stop 60
tacactagatgacaatggtgacctt

SEQ ID NO: 443143 - DNA, 25 bp, Artificial
  probe
  misc_feature (1)..(25): SEQ ID NO: 6584; WAN024BY8; Start 32; Stop 56
ctcctacactagatgacaatggtga

SEQ ID NO: 443144 - DNA, 25 bp, Artificial
  probe
  misc_feature (1)..(25): SEQ ID NO: 6584; WAN024BY8; Start 35; Stop 59
ctacactagatgacaatggtgacct

SEQ ID NO: 443145 - DNA, 25 bp, Artificial
  probe
  misc_feature (1)..(25): SEQ ID NO: 6584; WAN024BY8; Start 33; Stop 57
tcctacactagatgacaatggtgac

SEQ ID NO: 443146 - DNA, 25 bp, Artificial
  probe
  misc_feature (1)..(25): SEQ ID NO: 6584; WAN024BY8; Start 144; Stop 168
catcaagacgctacaagaggttaaa

SEQ ID NO: 443147 - DNA, 25 bp, Artificial
  probe
  misc_feature (1)..(25): SEQ ID NO: 6584; WAN024BY8; Start 34; Stop 58
cctacactagatgacaatggtgacc

SEQ ID NO: 443148 - DNA, 25 bp, Artificial
  probe
  misc_feature (1)..(25): SEQ ID NO: 6584; WAN024BY8; Start 141; Stop 165
caacatcaagacgctacaagaggtt

SEQ ID NO: 443149 - DNA, 25 bp, Artificial
  probe
  misc_feature (1)..(25): SEQ ID NO: 6584; WAN024BY8; Start 205; Stop 229
ctctttgagatggcaggatttaagg

SEQ ID NO: 443150 - DNA, 25 bp, Artificial
  probe
  misc_feature (1)..(25): SEQ ID NO: 6584; WAN024BY8; Start 31; Stop 55
gctcctacactagatgacaatggtg

SEQ ID NO: 443151 - DNA, 25 bp, Artificial
  probe
  misc_feature (1)..(25): SEQ ID NO: 6584; WAN024BY8; Start 30; Stop 54
ggctcctacactagatgacaatggt

SEQ ID NO: 443152 - DNA, 25 bp, Artificial
  probe
  misc_feature (1)..(25): SEQ ID NO: 6584; WAN024BY8; Start 206; Stop 230
tctttgagatggcaggatttaaggg

SEQ ID NO: 443153 - DNA, 25 bp, Artificial
  probe
  misc_feature (1)..(25): SEQ ID NO: 6584; WAN024BY8; Start 28; Stop 52
acggctcctacactagatgacaatg

SEQ ID NO: 443154 - DNA, 25 bp, Artificial
  probe
  misc_feature (1)..(25): SEQ ID NO: 6584; WAN024BY8; Start 27; Stop 51
cacggctcctacactagatgacaat

SEQ ID NO: 443155 - DNA, 25 bp, Artificial
  probe
  misc_feature (1)..(25): SEQ ID NO: 6584; WAN024BY8; Start 37; Stop 61
acactagatgacaatggtgaccttt

SEQ ID NO: 443156 - DNA, 25 bp, Artificial
  probe
  misc_feature (1)..(25): SEQ ID NO: 6584; WAN024BY8; Start 14; Stop 38
ttgataacaaagacacggctcctac

SEQ ID NO: 443157 - DNA, 25 bp, Artificial
  probe
  misc_feature (1)..(25): SEQ ID NO: 6584; WAN024BY8; Start 18; Stop 42
taacaaagacacggctcctacacta

SEQ ID NO: 443158 - DNA, 25 bp, Artificial
  probe
  misc_feature (1)..(25): SEQ ID NO: 6584; WAN024BY8; Start 145; Stop 169
atcaagacgctacaagaggttaaaa

SEQ ID NO: 443159 - DNA, 25 bp, Artificial
  probe
  misc_feature (1)..(25): SEQ ID NO: 6584; WAN024BY8; Start 16; Stop 40
gataacaaagacacggctcctacac

SEQ ID NO: 443160 - DNA, 25 bp, Artificial
  probe
  misc_feature (1)..(25): SEQ ID NO: 6584; WAN024BY8; Start 123; Stop 147
attaacacgggtcaagagcaacatc

SEQ ID NO: 443161 - DNA, 25 bp, Artificial
  probe
  misc_feature (1)..(25): SEQ ID NO: 6584; WAN024BY8; Start 29; Stop 53
cggctcctacactagatgacaatgg

SEQ ID NO: 443162 - DNA, 25 bp, Artificial
  probe
  misc_feature (1)..(25): SEQ ID NO: 6584; WAN024BY8; Start 17; Stop 41
ataacaaagacacggctcctacact

SEQ ID NO: 443163 - DNA, 25 bp, Artificial
  probe
  misc_feature (1)..(25): SEQ ID NO: 6584; WAN024BY8; Start 15; Stop 39
tgataacaaagacacggctcctaca

SEQ ID NO: 443164 - DNA, 25 bp, Artificial
  probe
  misc_feature (1)..(25): SEQ ID NO: 6584; WAN024BY8; Start 122; Stop 146
cattaacacgggtcaagagcaacat

SEQ ID NO: 443165 - DNA, 25 bp, Artificial
  probe
  misc_feature (1)..(25): SEQ ID NO: 6584; WAN024BY8; Start 23; Stop 47
aagacacggctcctacactagatga

SEQ ID NO: 443166 - DNA, 25 bp, Artificial
  probe
  misc_feature (1)..(25): SEQ ID NO: 6584; WAN024BY8; Start 136; Stop 160
aagagcaacatcaagacgctacaag

SEQ ID NO: 443167 - DNA, 25 bp, Artificial
  probe
  misc_feature (1)..(25): SEQ ID NO: 6584; WAN024BY8; Start 22; Stop 46
aaagacacggctcctacactagatg

SEQ ID NO: 443168 - DNA, 25 bp, Artificial
  probe
  misc_feature (1)..(25): SEQ ID NO: 6584; WAN024BY8; Start 21; Stop 45
caaagacacggctcctacactagat

SEQ ID NO: 443169 - DNA, 25 bp, Artificial
  probe
  misc_feature (1)..(25): SEQ ID NO: 6584; WAN024BY8; Start 13; Stop 37
tttgataacaaagacacggctccta

SEQ ID NO: 443170 - DNA, 25 bp, Artificial
  probe
  misc_feature (1)..(25): SEQ ID NO: 6584; WAN024BY8; Start 135; Stop 159
caagagcaacatcaagacgctacaa

SEQ ID NO: 443171 - DNA, 25 bp, Artificial
  probe
  misc_feature (1)..(25): SEQ ID NO: 6584; WAN024BY8; Start 114; Stop 138
tttcacctcattaacacgggtcaag

SEQ ID NO: 443172 - DNA, 25 bp, Artificial
  probe
  misc_feature (1)..(25): SEQ ID NO: 6584; WAN024BY8; Start 204; Stop 228
tctctttgagatggcaggatttaag

SEQ ID NO: 443173 - DNA, 25 bp, Artificial
  probe
  misc_feature (1)..(25): SEQ ID NO: 6585; WAN024BO4; Start 324; Stop 348
gctaactaacgaccgattcaataag

SEQ ID NO: 443174 - DNA, 25 bp, Artificial
  probe
  misc_feature (1)..(25): SEQ ID NO: 6585; WAN024BO4; Start 322; Stop 346
atgctaactaacgaccgattcaata

SEQ ID NO: 443175 - DNA, 25 bp, Artificial
  probe
  misc_feature (1)..(25): SEQ ID NO: 6585; WAN024BO4; Start 1483; Stop 1507
agtgagttgctacctatgaatgatg

SEQ ID NO: 443176 - DNA, 25 bp, Artificial
  probe
  misc_feature (1)..(25): SEQ ID NO: 6585; WAN024BO4; Start 323; Stop 347
tgctaactaacgaccgattcaataa

SEQ ID NO: 443177 - DNA, 25 bp, Artificial
  probe
  misc_feature (1)..(25): SEQ ID NO: 6585; WAN024BO4; Start 1033; Stop 1057
attacagaccttacctcaccaattc

SEQ ID NO: 443178 - DNA, 25 bp, Artificial
  probe
  misc_feature (1)..(25): SEQ ID NO: 6585; WAN024BO4; Start 1497; Stop 1521
tatgaatgatgccgaacttgctatt

SEQ ID NO: 443179 - DNA, 25 bp, Artificial
  probe
  misc_feature (1)..(25): SEQ ID NO: 6585; WAN024BO4; Start 1032; Stop 1056
cattacagaccttacctcaccaatt

SEQ ID NO: 443180 - DNA, 25 bp, Artificial
  probe
  misc_feature (1)..(25): SEQ ID NO: 6585; WAN024BO4; Start 1482; Stop 1506
tagtgagttgctacctatgaatgat

SEQ ID NO: 443181 - DNA, 25 bp, Artificial
  probe
  misc_feature (1)..(25): SEQ ID NO: 6585; WAN024BO4; Start 1182; Stop 1206
cgagaactcagacacttatcagatg

SEQ ID NO: 443182 - DNA, 25 bp, Artificial
  probe
  misc_feature (1)..(25): SEQ ID NO: 6585; WAN024BO4; Start 1183; Stop 1207
gagaactcagacacttatcagatgc

SEQ ID NO: 443183 - DNA, 25 bp, Artificial
  probe
  misc_feature (1)..(25): SEQ ID NO: 6585; WAN024BO4; Start 1496; Stop 1520
ctatgaatgatgccgaacttgctat

SEQ ID NO: 443184 - DNA, 25 bp, Artificial
  probe
  misc_feature (1)..(25): SEQ ID NO: 6585; WAN024BO4; Start 1197; Stop 1221
ttatcagatgcgaagtagtattgtc

SEQ ID NO: 443185 - DNA, 25 bp, Artificial
  probe
  misc_feature (1)..(25): SEQ ID NO: 6585; WAN024BO4; Start 649; Stop 673
gatgtgaatgatgtgttaggtcaac

SEQ ID NO: 443186 - DNA, 25 bp, Artificial
  probe
  misc_feature (1)..(25): SEQ ID NO: 6585; WAN024BO4; Start 648; Stop 672
agatgtgaatgatgtgttaggtcaa

SEQ ID NO: 443187 - DNA, 25 bp, Artificial
  probe
  misc_feature (1)..(25): SEQ ID NO: 6585; WAN024BO4; Start 325; Stop 349
ctaactaacgaccgattcaataaga

SEQ ID NO: 443188 - DNA, 25 bp, Artificial
  probe
  misc_feature (1)..(25): SEQ ID NO: 6585; WAN024BO4; Start 1492; Stop 1516
ctacctatgaatgatgccgaacttg

SEQ ID NO: 443189 - DNA, 25 bp, Artificial
  probe
  misc_feature (1)..(25): SEQ ID NO: 6585; WAN024BO4; Start 1474; Stop 1498
gctatcaatagtgagttgctaccta

SEQ ID NO: 443190 - DNA, 25 bp, Artificial
  probe
  misc_feature (1)..(25): SEQ ID NO: 6585; WAN024BO4; Start 1469; Stop 1493
tcaatgctatcaatagtgagttgct

SEQ ID NO: 443191 - DNA, 25 bp, Artificial
  probe
  misc_feature (1)..(25): SEQ ID NO: 6585; WAN024BO4; Start 646; Stop 670
tcagatgtgaatgatgtgttaggtc

SEQ ID NO: 443192 - DNA, 25 bp, Artificial
  probe
  misc_feature (1)..(25): SEQ ID NO: 6585; WAN024BO4; Start 643; Stop 667
aggtcagatgtgaatgatgtgttag

SEQ ID NO: 443193 - DNA, 25 bp, Artificial
  probe
  misc_feature (1)..(25): SEQ ID NO: 6585; WAN024BO4; Start 1472; Stop 1496
atgctatcaatagtgagttgctacc

SEQ ID NO: 443194 - DNA, 25 bp, Artificial
  probe
  misc_feature (1)..(25): SEQ ID NO: 6585; WAN024BO4; Start 262; Stop 286
tacaatgaacaggcaactatcacaa

SEQ ID NO: 443195 - DNA, 25 bp, Artificial
  probe
  misc_feature (1)..(25): SEQ ID NO: 6585; WAN024BO4; Start 261; Stop 285
ttacaatgaacaggcaactatcaca

SEQ ID NO: 443196 - DNA, 25 bp, Artificial
  probe
  misc_feature (1)..(25): SEQ ID NO: 6585; WAN024BO4; Start 1196; Stop 1220
cttatcagatgcgaagtagtattgt

SEQ ID NO: 443197 - DNA, 25 bp, Artificial
  probe
  misc_feature (1)..(25): SEQ ID NO: 6585; WAN024BO4; Start 647; Stop 671
cagatgtgaatgatgtgttaggtca

SEQ ID NO: 443198 - DNA, 25 bp, Artificial
  probe
  misc_feature (1)..(25): SEQ ID NO: 6585; WAN024BO4; Start 645; Stop 669
gtcagatgtgaatgatgtgttaggt

SEQ ID NO: 443199 - DNA, 25 bp, Artificial
  probe
  misc_feature (1)..(25): SEQ ID NO: 6585; WAN024BO4; Start 642; Stop 666
caggtcagatgtgaatgatgtgtta

SEQ ID NO: 443200 - DNA, 25 bp, Artificial
  probe
  misc_feature (1)..(25): SEQ ID NO: 6585; WAN024BO4; Start 169; Stop 193
cagtacaagaatacggatggagata

SEQ ID NO: 443201 - DNA, 25 bp, Artificial
  probe
  misc_feature (1)..(25): SEQ ID NO: 6585; WAN024BO4; Start 1484; Stop 1508
gtgagttgctacctatgaatgatgc

SEQ ID NO: 443202 - DNA, 25 bp, Artificial
  probe
  misc_feature (1)..(25): SEQ ID NO: 6585; WAN024BO4; Start 168; Stop 192
tcagtacaagaatacggatggagat

SEQ ID NO: 443203 - DNA, 25 bp, Artificial
  probe
  misc_feature (1)..(25): SEQ ID NO: 6585; WAN024BO4; Start 1471; Stop 1495
aatgctatcaatagtgagttgctac

SEQ ID NO: 443204 - DNA, 25 bp, Artificial
  probe
  misc_feature (1)..(25): SEQ ID NO: 6585; WAN024BO4; Start 1470; Stop 1494
caatgctatcaatagtgagttgcta

SEQ ID NO: 443205 - DNA, 25 bp, Artificial
  probe
  misc_feature (1)..(25): SEQ ID NO: 6585; WAN024BO4; Start 1186; Stop 1210
aactcagacacttatcagatgcgaa

SEQ ID NO: 443206 - DNA, 25 bp, Artificial
  probe
  misc_feature (1)..(25): SEQ ID NO: 6586; WAN024FP3; Start 122; Stop 146
ttatactcaaggctgatgacatctg

SEQ ID NO: 443207 - DNA, 25 bp, Artificial
  probe
  misc_feature (1)..(25): SEQ ID NO: 6586; WAN024FP3; Start 123; Stop 147
tatactcaaggctgatgacatctgt

SEQ ID NO: 443208 - DNA, 25 bp, Artificial
  probe
  misc_feature (1)..(25): SEQ ID NO: 6586; WAN024FP3; Start 161; Stop 185
tcacggtactccagattaagttcat

SEQ ID NO: 443209 - DNA, 25 bp, Artificial
  probe
  misc_feature (1)..(25): SEQ ID NO: 6586; WAN024FP3; Start 162; Stop 186
cacggtactccagattaagttcatg

SEQ ID NO: 443210 - DNA, 25 bp, Artificial
  probe
  misc_feature (1)..(25): SEQ ID NO: 6586; WAN024FP3; Start 36; Stop 60
tataggcatcaaactcagacatcat

SEQ ID NO: 443211 - DNA, 25 bp, Artificial
  probe
  misc_feature (1)..(25): SEQ ID NO: 6586; WAN024FP3; Start 35; Stop 59
atataggcatcaaactcagacatca

SEQ ID NO: 443212 - DNA, 25 bp, Artificial
  probe
  misc_feature (1)..(25): SEQ ID NO: 6586; WAN024FP3; Start 160; Stop 184
gtcacggtactccagattaagttca

SEQ ID NO: 443213 - DNA, 25 bp, Artificial
  probe
  misc_feature (1)..(25): SEQ ID NO: 6586; WAN024FP3; Start 159; Stop 183
tgtcacggtactccagattaagttc

SEQ ID NO: 443214 - DNA, 25 bp, Artificial
  probe
  misc_feature (1)..(25): SEQ ID NO: 6586; WAN024FP3; Start 37; Stop 61
ataggcatcaaactcagacatcatc

SEQ ID NO: 443215 - DNA, 25 bp, Artificial
  probe
  misc_feature (1)..(25): SEQ ID NO: 6586; WAN024FP3; Start 32; Stop 56
ccaatataggcatcaaactcagaca

SEQ ID NO: 443216 - DNA, 25 bp, Artificial
  probe
  misc_feature (1)..(25): SEQ ID NO: 6586; WAN024FP3; Start 112; Stop 136
caattctggtttatactcaaggctg

SEQ ID NO: 443217 - DNA, 25 bp, Artificial
  probe
  misc_feature (1)..(25): SEQ ID NO: 6586; WAN024FP3; Start 33; Stop 57
caatataggcatcaaactcagacat

SEQ ID NO: 443218 - DNA, 25 bp, Artificial
  probe
  misc_feature (1)..(25): SEQ ID NO: 6586; WAN024FP3; Start 31; Stop 55
cccaatataggcatcaaactcagac

SEQ ID NO: 443219 - DNA, 25 bp, Artificial
  probe
  misc_feature (1)..(25): SEQ ID NO: 6586; WAN024FP3; Start 158; Stop 182
gtgtcacggtactccagattaagtt

SEQ ID NO: 443220 - DNA, 25 bp, Artificial
  probe
  misc_feature (1)..(25): SEQ ID NO: 6586; WAN024FP3; Start 34; Stop 58
aatataggcatcaaactcagacatc

SEQ ID NO: 443221 - DNA, 25 bp, Artificial
  probe
  misc_feature (1)..(25): SEQ ID NO: 6586; WAN024FP3; Start 114; Stop 138
attctggtttatactcaaggctgat

SEQ ID NO: 443222 - DNA, 25 bp, Artificial
  probe
  misc_feature (1)..(25): SEQ ID NO: 6586; WAN024FP3; Start 113; Stop 137
aattctggtttatactcaaggctga

SEQ ID NO: 443223 - DNA, 25 bp, Artificial
  probe
  misc_feature (1)..(25): SEQ ID NO: 6586; WAN024FP3; Start 119; Stop 143
ggtttatactcaaggctgatgacat

SEQ ID NO: 443224 - DNA, 25 bp, Artificial
  probe
  misc_feature (1)..(25): SEQ ID NO: 6586; WAN024FP3; Start 115; Stop 139
ttctggtttatactcaaggctgatg

SEQ ID NO: 443225 - DNA, 25 bp, Artificial
  probe
  misc_feature (1)..(25): SEQ ID NO: 6586; WAN024FP3; Start 78; Stop 102
tttcaagcaaatcctcttcgtcaaa

SEQ ID NO: 443226 - DNA, 25 bp, Artificial
  probe
  misc_feature (1)..(25): SEQ ID NO: 6586; WAN024FP3; Start 38; Stop 62
taggcatcaaactcagacatcatct

SEQ ID NO: 443227 - DNA, 25 bp, Artificial
  probe
  misc_feature (1)..(25): SEQ ID NO: 6586; WAN024FP3; Start 117; Stop 141
ctggtttatactcaaggctgatgac

SEQ ID NO: 443228 - DNA, 25 bp, Artificial
  probe
  misc_feature (1)..(25): SEQ ID NO: 6586; WAN024FP3; Start 116; Stop 140
tctggtttatactcaaggctgatga

SEQ ID NO: 443229 - DNA, 25 bp, Artificial
  probe
  misc_feature (1)..(25): SEQ ID NO: 6586; WAN024FP3; Start 124; Stop 148
atactcaaggctgatgacatctgtc

SEQ ID NO: 443230 - DNA, 25 bp, Artificial
  probe
  misc_feature (1)..(25): SEQ ID NO: 6586; WAN024FP3; Start 54; Stop 78
acatcatctctgccaattctggatt

SEQ ID NO: 443231 - DNA, 25 bp, Artificial
  probe
  misc_feature (1)..(25): SEQ ID NO: 6586; WAN024FP3; Start 120; Stop 144
gtttatactcaaggctgatgacatc

SEQ ID NO: 443232 - DNA, 25 bp, Artificial
  probe
  misc_feature (1)..(25): SEQ ID NO: 6586; WAN024FP3; Start 121; Stop 145
tttatactcaaggctgatgacatct

SEQ ID NO: 443233 - DNA, 25 bp, Artificial
  probe
  misc_feature (1)..(25): SEQ ID NO: 6586; WAN024FP3; Start 79; Stop 103
ttcaagcaaatcctcttcgtcaaag

SEQ ID NO: 443234 - DNA, 25 bp, Artificial
  probe
  misc_feature (1)..(25): SEQ ID NO: 6586; WAN024FP3; Start 118; Stop 142
tggtttatactcaaggctgatgaca

SEQ ID NO: 443235 - DNA, 25 bp, Artificial
  probe
  misc_feature (1)..(25): SEQ ID NO: 6586; WAN024FP3; Start 53; Stop 77
gacatcatctctgccaattctggat

SEQ ID NO: 443236 - DNA, 25 bp, Artificial
  probe
  misc_feature (1)..(25): SEQ ID NO: 6586; WAN024FP3; Start 93; Stop 117
cttcgtcaaaggcaatttccaattc

SEQ ID NO: 443237 - DNA, 25 bp, Artificial
  probe
  misc_feature (1)..(25): SEQ ID NO: 6586; WAN024FP3; Start 91; Stop 115
ctcttcgtcaaaggcaatttccaat

SEQ ID NO: 443238 - DNA, 25 bp, Artificial
  probe
  misc_feature (1)..(25): SEQ ID NO: 6586; WAN024FP3; Start 100; Stop 124
aaaggcaatttccaattctggttta

SEQ ID NO: 443239 - DNA, 25 bp, Artificial
  probe
  misc_feature (1)..(25): SEQ ID NO: 6587; WAN024CGN; Start 176; Stop 200
ccttagttccacctgttgagataat

SEQ ID NO: 443240 - DNA, 25 bp, Artificial
  probe
  misc_feature (1)..(25): SEQ ID NO: 6587; WAN024CGN; Start 175; Stop 199
accttagttccacctgttgagataa

SEQ ID NO: 443241 - DNA, 25 bp, Artificial
  probe
  misc_feature (1)..(25): SEQ ID NO: 6587; WAN024CGN; Start 177; Stop 201
cttagttccacctgttgagataatc

SEQ ID NO: 443242 - DNA, 25 bp, Artificial
  probe
  misc_feature (1)..(25): SEQ ID NO: 6587; WAN024CGN; Start 174; Stop 198
aaccttagttccacctgttgagata

SEQ ID NO: 443243 - DNA, 25 bp, Artificial
  probe
  misc_feature (1)..(25): SEQ ID NO: 6587; WAN024CGN; Start 178; Stop 202
ttagttccacctgttgagataatct

SEQ ID NO: 443244 - DNA, 25 bp, Artificial
  probe
  misc_feature (1)..(25): SEQ ID NO: 6587; WAN024CGN; Start 219; Stop 243
gagttcttgggcaaattcaacaatg

SEQ ID NO: 443245 - DNA, 25 bp, Artificial
  probe
  misc_feature (1)..(25): SEQ ID NO: 6587; WAN024CGN; Start 218; Stop 242
tgagttcttgggcaaattcaacaat

SEQ ID NO: 443246 - DNA, 25 bp, Artificial
  probe
  misc_feature (1)..(25): SEQ ID NO: 6587; WAN024CGN; Start 273; Stop 297
gcgtttagtcattatattctccttt

SEQ ID NO: 443247 - DNA, 25 bp, Artificial
  probe
  misc_feature (1)..(25): SEQ ID NO: 6587; WAN024CGN; Start 127; Stop 151
gtcacatcatcgatagcaatggtat

SEQ ID NO: 443248 - DNA, 25 bp, Artificial
  probe
  misc_feature (1)..(25): SEQ ID NO: 6587; WAN024CGN; Start 128; Stop 152
tcacatcatcgatagcaatggtatc

SEQ ID NO: 443249 - DNA, 25 bp, Artificial
  probe
  misc_feature (1)..(25): SEQ ID NO: 6587; WAN024CGN; Start 126; Stop 150
agtcacatcatcgatagcaatggta

SEQ ID NO: 443250 - DNA, 25 bp, Artificial
  probe
  misc_feature (1)..(25): SEQ ID NO: 6587; WAN024CGN; Start 179; Stop 203
tagttccacctgttgagataatctc

SEQ ID NO: 443251 - DNA, 25 bp, Artificial
  probe
  misc_feature (1)..(25): SEQ ID NO: 6587; WAN024CGN; Start 129; Stop 153
cacatcatcgatagcaatggtatcc

SEQ ID NO: 443252 - DNA, 25 bp, Artificial
  probe
  misc_feature (1)..(25): SEQ ID NO: 6587; WAN024CGN; Start 8; Stop 32
caatcttgttgtccttagccgcttc

SEQ ID NO: 443253 - DNA, 25 bp, Artificial
  probe
  misc_feature (1)..(25): SEQ ID NO: 6587; WAN024CGN; Start 122; Stop 146
aaccagtcacatcatcgatagcaat

SEQ ID NO: 443254 - DNA, 25 bp, Artificial
  probe
  misc_feature (1)..(25): SEQ ID NO: 6587; WAN024CGN; Start 180; Stop 204
agttccacctgttgagataatctcc

SEQ ID NO: 443255 - DNA, 25 bp, Artificial
  probe
  misc_feature (1)..(25): SEQ ID NO: 6587; WAN024CGN; Start 131; Stop 155
catcatcgatagcaatggtatccac

SEQ ID NO: 443256 - DNA, 25 bp, Artificial
  probe
  misc_feature (1)..(25): SEQ ID NO: 6587; WAN024CGN; Start 173; Stop 197
caaccttagttccacctgttgagat

SEQ ID NO: 443257 - DNA, 25 bp, Artificial
  probe
  misc_feature (1)..(25): SEQ ID NO: 6587; WAN024CGN; Start 217; Stop 241
ttgagttcttgggcaaattcaacaa

SEQ ID NO: 443258 - DNA, 25 bp, Artificial
  probe
  misc_feature (1)..(25): SEQ ID NO: 6587; WAN024CGN; Start 216; Stop 240
tttgagttcttgggcaaattcaaca

SEQ ID NO: 443259 - DNA, 25 bp, Artificial
  probe
  misc_feature (1)..(25): SEQ ID NO: 6587; WAN024CGN; Start 247; Stop 271
gctttgtctgagacgctgattaaga

SEQ ID NO: 443260 - DNA, 25 bp, Artificial
  probe
  misc_feature (1)..(25): SEQ ID NO: 6587; WAN024CGN; Start 7; Stop 31
tcaatcttgttgtccttagccgctt

SEQ ID NO: 443261 - DNA, 25 bp, Artificial
  probe
  misc_feature (1)..(25): SEQ ID NO: 6587; WAN024CGN; Start 130; Stop 154
acatcatcgatagcaatggtatcca

SEQ ID NO: 443262 - DNA, 25 bp, Artificial
  probe
  misc_feature (1)..(25): SEQ ID NO: 6587; WAN024CGN; Start 125; Stop 149
cagtcacatcatcgatagcaatggt

SEQ ID NO: 443263 - DNA, 25 bp, Artificial
  probe
  misc_feature (1)..(25): SEQ ID NO: 6587; WAN024CGN; Start 123; Stop 147
accagtcacatcatcgatagcaatg

SEQ ID NO: 443264 - DNA, 25 bp, Artificial
  probe
  misc_feature (1)..(25): SEQ ID NO: 6587; WAN024CGN; Start 272; Stop 296
cgcgtttagtcattatattctcctt

SEQ ID NO: 443265 - DNA, 25 bp, Artificial
  probe
  misc_feature (1)..(25): SEQ ID NO: 6587; WAN024CGN; Start 132; Stop 156
atcatcgatagcaatggtatccacc

SEQ ID NO: 443266 - DNA, 25 bp, Artificial
  probe
  misc_feature (1)..(25): SEQ ID NO: 6587; WAN024CGN; Start 191; Stop 215
ttgagataatctcccaaccaagttt

SEQ ID NO: 443267 - DNA, 25 bp, Artificial
  probe
  misc_feature (1)..(25): SEQ ID NO: 6587; WAN024CGN; Start 75; Stop 99
gatatttgggtggagggtcttcaca

SEQ ID NO: 443268 - DNA, 25 bp, Artificial
  probe
  misc_feature (1)..(25): SEQ ID NO: 6587; WAN024CGN; Start 72; Stop 96
gtggatatttgggtggagggtcttc

SEQ ID NO: 443269 - DNA, 25 bp, Artificial
  probe
  misc_feature (1)..(25): SEQ ID NO: 6587; WAN024CGN; Start 6; Stop 30
ctcaatcttgttgtccttagccgct

SEQ ID NO: 443270 - DNA, 25 bp, Artificial
  probe
  misc_feature (1)..(25): SEQ ID NO: 6587; WAN024CGN; Start 248; Stop 272
ctttgtctgagacgctgattaagac

SEQ ID NO: 443271 - DNA, 25 bp, Artificial
  probe
  misc_feature (1)..(25): SEQ ID NO: 6587; WAN024CGN; Start 190; Stop 214
gttgagataatctcccaaccaagtt

SEQ ID NO: 443272 - DNA, 25 bp, Artificial
  probe
  misc_feature (1)..(25): SEQ ID NO: 6588; WAN024FHE; Start 84; Stop 108
agattggagtatcctatggctaact

SEQ ID NO: 443273 - DNA, 25 bp, Artificial
  probe
  misc_feature (1)..(25): SEQ ID NO: 6588; WAN024FHE; Start 83; Stop 107
aagattggagtatcctatggctaac

SEQ ID NO: 443274 - DNA, 25 bp, Artificial
  probe
  misc_feature (1)..(25): SEQ ID NO: 6588; WAN024FHE; Start 85; Stop 109
gattggagtatcctatggctaacta

SEQ ID NO: 443275 - DNA, 25 bp, Artificial
  probe
  misc_feature (1)..(25): SEQ ID NO: 6588; WAN024FHE; Start 87; Stop 111
ttggagtatcctatggctaactaat

SEQ ID NO: 443276 - DNA, 25 bp, Artificial
  probe
  misc_feature (1)..(25): SEQ ID NO: 6588; WAN024FHE; Start 86; Stop 110
attggagtatcctatggctaactaa

SEQ ID NO: 443277 - DNA, 25 bp, Artificial
  probe
  misc_feature (1)..(25): SEQ ID NO: 6588; WAN024FHE; Start 82; Stop 106
aaagattggagtatcctatggctaa

SEQ ID NO: 443278 - DNA, 25 bp, Artificial
  probe
  misc_feature (1)..(25): SEQ ID NO: 6588; WAN024FHE; Start 16; Stop 40
ttctatgcccatatttccggtcaaa

SEQ ID NO: 443279 - DNA, 25 bp, Artificial
  probe
  misc_feature (1)..(25): SEQ ID NO: 6588; WAN024FHE; Start 15; Stop 39
tttctatgcccatatttccggtcaa

SEQ ID NO: 443280 - DNA, 25 bp, Artificial
  probe
  misc_feature (1)..(25): SEQ ID NO: 6588; WAN024FHE; Start 81; Stop 105
aaaagattggagtatcctatggcta

SEQ ID NO: 443281 - DNA, 25 bp, Artificial
  probe
  misc_feature (1)..(25): SEQ ID NO: 6588; WAN024FHE; Start 18; Stop 42
ctatgcccatatttccggtcaaatc

SEQ ID NO: 443282 - DNA, 25 bp, Artificial
  probe
  misc_feature (1)..(25): SEQ ID NO: 6588; WAN024FHE; Start 17; Stop 41
tctatgcccatatttccggtcaaat

SEQ ID NO: 443283 - DNA, 25 bp, Artificial
  probe
  misc_feature (1)..(25): SEQ ID NO: 6588; WAN024FHE; Start 39; Stop 63
aatcattggaaaattccgactgttt

SEQ ID NO: 443284 - DNA, 25 bp, Artificial
  probe
  misc_feature (1)..(25): SEQ ID NO: 6588; WAN024FHE; Start 38; Stop 62
aaatcattggaaaattccgactgtt

SEQ ID NO: 443285 - DNA, 25 bp, Artificial
  probe
  misc_feature (1)..(25): SEQ ID NO: 6588; WAN024FHE; Start 24; Stop 48
ccatatttccggtcaaatcattgga

SEQ ID NO: 443286 - DNA, 25 bp, Artificial
  probe
  misc_feature (1)..(25): SEQ ID NO: 6588; WAN024FHE; Start 36; Stop 60
tcaaatcattggaaaattccgactg

SEQ ID NO: 443287 - DNA, 25 bp, Artificial
  probe
  misc_feature (1)..(25): SEQ ID NO: 6588; WAN024FHE; Start 35; Stop 59
gtcaaatcattggaaaattccgact

SEQ ID NO: 443288 - DNA, 25 bp, Artificial
  probe
  misc_feature (1)..(25): SEQ ID NO: 6588; WAN024FHE; Start 37; Stop 61
caaatcattggaaaattccgactgt

SEQ ID NO: 443289 - DNA, 25 bp, Artificial
  probe
  misc_feature (1)..(25): SEQ ID NO: 6588; WAN024FHE; Start 48; Stop 72
aaaattccgactgtttcagctaaaa

SEQ ID NO: 443290 - DNA, 25 bp, Artificial
  probe
  misc_feature (1)..(25): SEQ ID NO: 6588; WAN024FHE; Start 56; Stop 80
gactgtttcagctaaaatggaagaa

SEQ ID NO: 443291 - DNA, 25 bp, Artificial
  probe
  misc_feature (1)..(25): SEQ ID NO: 6588; WAN024FHE; Start 50; Stop 74
aattccgactgtttcagctaaaatg

SEQ ID NO: 443292 - DNA, 25 bp, Artificial
  probe
  misc_feature (1)..(25): SEQ ID NO: 6588; WAN024FHE; Start 49; Stop 73
aaattccgactgtttcagctaaaat

SEQ ID NO: 443293 - DNA, 25 bp, Artificial
  probe
  misc_feature (1)..(25): SEQ ID NO: 6588; WAN024FHE; Start 19; Stop 43
tatgcccatatttccggtcaaatca

SEQ ID NO: 443294 - DNA, 25 bp, Artificial
  probe
  misc_feature (1)..(25): SEQ ID NO: 6588; WAN024FHE; Start 34; Stop 58
ggtcaaatcattggaaaattccgac

SEQ ID NO: 443295 - DNA, 25 bp, Artificial
  probe
  misc_feature (1)..(25): SEQ ID NO: 6588; WAN024FHE; Start 40; Stop 64
atcattggaaaattccgactgtttc

SEQ ID NO: 443296 - DNA, 25 bp, Artificial
  probe
  misc_feature (1)..(25): SEQ ID NO: 6588; WAN024FHE; Start 55; Stop 79
cgactgtttcagctaaaatggaaga

SEQ ID NO: 443297 - DNA, 25 bp, Artificial
  probe
  misc_feature (1)..(25): SEQ ID NO: 6588; WAN024FHE; Start 22; Stop 46
gcccatatttccggtcaaatcattg

SEQ ID NO: 443298 - DNA, 25 bp, Artificial
  probe
  misc_feature (1)..(25): SEQ ID NO: 6588; WAN024FHE; Start 23; Stop 47
cccatatttccggtcaaatcattgg

SEQ ID NO: 443299 - DNA, 25 bp, Artificial
  probe
  misc_feature (1)..(25): SEQ ID NO: 6588; WAN024FHE; Start 20; Stop 44
atgcccatatttccggtcaaatcat

SEQ ID NO: 443300 - DNA, 25 bp, Artificial
  probe
  misc_feature (1)..(25): SEQ ID NO: 6588; WAN024FHE; Start 42; Stop 66
cattggaaaattccgactgtttcag

SEQ ID NO: 443301 - DNA, 25 bp, Artificial
  probe
  misc_feature (1)..(25): SEQ ID NO: 6588; WAN024FHE; Start 51; Stop 75
attccgactgtttcagctaaaatgg

SEQ ID NO: 443302 - DNA, 25 bp, Artificial
  probe
  misc_feature (1)..(25): SEQ ID NO: 6588; WAN024FHE; Start 47; Stop 71
gaaaattccgactgtttcagctaaa

SEQ ID NO: 443303 - DNA, 25 bp, Artificial
  probe
  misc_feature (1)..(25): SEQ ID NO: 6588; WAN024FHE; Start 41; Stop 65
tcattggaaaattccgactgtttca

SEQ ID NO: 443304 - DNA, 25 bp, Artificial
  probe
  misc_feature (1)..(25): SEQ ID NO: 6588; WAN024FHE; Start 21; Stop 45
tgcccatatttccggtcaaatcatt

SEQ ID NO: 443305 - DNA, 25 bp, Artificial
  probe
  misc_feature (1)..(25): SEQ ID NO: 6589; WAN024BYF; Start 22; Stop 46
cattatatccaagaggagcaggtta

SEQ ID NO: 443306 - DNA, 25 bp, Artificial
  probe
  misc_feature (1)..(25): SEQ ID NO: 6589; WAN024BYF; Start 23; Stop 47
attatatccaagaggagcaggttag

SEQ ID NO: 443307 - DNA, 25 bp, Artificial
  probe
  misc_feature (1)..(25): SEQ ID NO: 6589; WAN024BYF; Start 77; Stop 101
tagaagagttgaagaatctagccaa

SEQ ID NO: 443308 - DNA, 25 bp, Artificial
  probe
  misc_feature (1)..(25): SEQ ID NO: 6589; WAN024BYF; Start 21; Stop 45
tcattatatccaagaggagcaggtt

SEQ ID NO: 443309 - DNA, 25 bp, Artificial
  probe
  misc_feature (1)..(25): SEQ ID NO: 6589; WAN024BYF; Start 24; Stop 48
ttatatccaagaggagcaggttagc

SEQ ID NO: 443310 - DNA, 25 bp, Artificial
  probe
  misc_feature (1)..(25): SEQ ID NO: 6589; WAN024BYF; Start 20; Stop 44
gtcattatatccaagaggagcaggt

SEQ ID NO: 443311 - DNA, 25 bp, Artificial
  probe
  misc_feature (1)..(25): SEQ ID NO: 6589; WAN024BYF; Start 37; Stop 61
gagcaggttagccagtattctgatt

SEQ ID NO: 443312 - DNA, 25 bp, Artificial
  probe
  misc_feature (1)..(25): SEQ ID NO: 6589; WAN024BYF; Start 145; Stop 169
attgtagaggtgctggaggatttaa

SEQ ID NO: 443313 - DNA, 25 bp, Artificial
  probe
  misc_feature (1)..(25): SEQ ID NO: 6589; WAN024BYF; Start 144; Stop 168
aattgtagaggtgctggaggattta

SEQ ID NO: 443314 - DNA, 25 bp, Artificial
  probe
  misc_feature (1)..(25): SEQ ID NO: 6589; WAN024BYF; Start 81; Stop 105
agagttgaagaatctagccaaagaa

SEQ ID NO: 443315 - DNA, 25 bp, Artificial
  probe
  misc_feature (1)..(25): SEQ ID NO: 6589; WAN024BYF; Start 80; Stop 104
aagagttgaagaatctagccaaaga

SEQ ID NO: 443316 - DNA, 25 bp, Artificial
  probe
  misc_feature (1)..(25): SEQ ID NO: 6589; WAN024BYF; Start 78; Stop 102
agaagagttgaagaatctagccaaa

SEQ ID NO: 443317 - DNA, 25 bp, Artificial
  probe
  misc_feature (1)..(25): SEQ ID NO: 6589; WAN024BYF; Start 82; Stop 106
gagttgaagaatctagccaaagaag

SEQ ID NO: 443318 - DNA, 25 bp, Artificial
  probe
  misc_feature (1)..(25): SEQ ID NO: 6589; WAN024BYF; Start 79; Stop 103
gaagagttgaagaatctagccaaag

SEQ ID NO: 443319 - DNA, 25 bp, Artificial
  probe
  misc_feature (1)..(25): SEQ ID NO: 6589; WAN024BYF; Start 39; Stop 63
gcaggttagccagtattctgattta

SEQ ID NO: 443320 - DNA, 25 bp, Artificial
  probe
  misc_feature (1)..(25): SEQ ID NO: 6589; WAN024BYF; Start 83; Stop 107
agttgaagaatctagccaaagaagc

SEQ ID NO: 443321 - DNA, 25 bp, Artificial
  probe
  misc_feature (1)..(25): SEQ ID NO: 6589; WAN024BYF; Start 19; Stop 43
cgtcattatatccaagaggagcagg

SEQ ID NO: 443322 - DNA, 25 bp, Artificial
  probe
  misc_feature (1)..(25): SEQ ID NO: 6589; WAN024BYF; Start 41; Stop 65
aggttagccagtattctgatttaga

SEQ ID NO: 443323 - DNA, 25 bp, Artificial
  probe
  misc_feature (1)..(25): SEQ ID NO: 6589; WAN024BYF; Start 40; Stop 64
caggttagccagtattctgatttag

SEQ ID NO: 443324 - DNA, 25 bp, Artificial
  probe
  misc_feature (1)..(25): SEQ ID NO: 6589; WAN024BYF; Start 42; Stop 66
ggttagccagtattctgatttagag

SEQ ID NO: 443325 - DNA, 25 bp, Artificial
  probe
  misc_feature (1)..(25): SEQ ID NO: 6589; WAN024BYF; Start 32; Stop 56
aagaggagcaggttagccagtattc

SEQ ID NO: 443326 - DNA, 25 bp, Artificial
  probe
  misc_feature (1)..(25): SEQ ID NO: 6589; WAN024BYF; Start 142; Stop 166
gaaattgtagaggtgctggaggatt

SEQ ID NO: 443327 - DNA, 25 bp, Artificial
  probe
  misc_feature (1)..(25): SEQ ID NO: 6589; WAN024BYF; Start 25; Stop 49
tatatccaagaggagcaggttagcc

SEQ ID NO: 443328 - DNA, 25 bp, Artificial
  probe
  misc_feature (1)..(25): SEQ ID NO: 6589; WAN024BYF; Start 143; Stop 167
aaattgtagaggtgctggaggattt

SEQ ID NO: 443329 - DNA, 25 bp, Artificial
  probe
  misc_feature (1)..(25): SEQ ID NO: 6589; WAN024BYF; Start 38; Stop 62
agcaggttagccagtattctgattt

SEQ ID NO: 443330 - DNA, 25 bp, Artificial
  probe
  misc_feature (1)..(25): SEQ ID NO: 6589; WAN024BYF; Start 31; Stop 55
caagaggagcaggttagccagtatt

SEQ ID NO: 443331 - DNA, 25 bp, Artificial
  probe
  misc_feature (1)..(25): SEQ ID NO: 6589; WAN024BYF; Start 146; Stop 170
ttgtagaggtgctggaggatttaaa

SEQ ID NO: 443332 - DNA, 25 bp, Artificial
  probe
  misc_feature (1)..(25): SEQ ID NO: 6589; WAN024BYF; Start 18; Stop 42
acgtcattatatccaagaggagcag

SEQ ID NO: 443333 - DNA, 25 bp, Artificial
  probe
  misc_feature (1)..(25): SEQ ID NO: 6589; WAN024BYF; Start 43; Stop 67
gttagccagtattctgatttagaga

SEQ ID NO: 443334 - DNA, 25 bp, Artificial
  probe
  misc_feature (1)..(25): SEQ ID NO: 6589; WAN024BYF; Start 36; Stop 60
ggagcaggttagccagtattctgat

SEQ ID NO: 443335 - DNA, 25 bp, Artificial
  probe
  misc_feature (1)..(25): SEQ ID NO: 6589; WAN024BYF; Start 121; Stop 145
gcctataagttatcaaaagccgaaa

SEQ ID NO: 443336 - DNA, 25 bp, Artificial
  probe
  misc_feature (1)..(25): SEQ ID NO: 6589; WAN024BYF; Start 130; Stop 154
ttatcaaaagccgaaattgtagagg

SEQ ID NO: 443337 - DNA, 25 bp, Artificial
  probe
  misc_feature (1)..(25): SEQ ID NO: 6589; WAN024BYF; Start 131; Stop 155
tatcaaaagccgaaattgtagaggt

SEQ ID NO: 443338 - DNA, 25 bp, Artificial
  probe
  misc_feature (1)..(25): SEQ ID NO: 6590; WAN024FOR; Start 202; Stop 226
ggtggatattctgttggaaataatt

SEQ ID NO: 443339 - DNA, 25 bp, Artificial
  probe
  misc_feature (1)..(25): SEQ ID NO: 6590; WAN024FOR; Start 1; Stop 25
atgaggaaagaaattaaagctgttt

SEQ ID NO: 443340 - DNA, 25 bp, Artificial
  probe
  misc_feature (1)..(25): SEQ ID NO: 6590; WAN024FOR; Start 2; Stop 26
tgaggaaagaaattaaagctgttta

SEQ ID NO: 443341 - DNA, 25 bp, Artificial
  probe
  misc_feature (1)..(25): SEQ ID NO: 6590; WAN024FOR; Start 544; Stop 568
tttgctgtaagactgtctgattttc

SEQ ID NO: 443342 - DNA, 25 bp, Artificial
  probe
  misc_feature (1)..(25): SEQ ID NO: 6590; WAN024FOR; Start 543; Stop 567
ttttgctgtaagactgtctgatttt

SEQ ID NO: 443343 - DNA, 25 bp, Artificial
  probe
  misc_feature (1)..(25): SEQ ID NO: 6590; WAN024FOR; Start 547; Stop 571
gctgtaagactgtctgattttcatg

SEQ ID NO: 443344 - DNA, 25 bp, Artificial
  probe
  misc_feature (1)..(25): SEQ ID NO: 6590; WAN024FOR; Start 546; Stop 570
tgctgtaagactgtctgattttcat

SEQ ID NO: 443345 - DNA, 25 bp, Artificial
  probe
  misc_feature (1)..(25): SEQ ID NO: 6590; WAN024FOR; Start 545; Stop 569
ttgctgtaagactgtctgattttca

SEQ ID NO: 443346 - DNA, 25 bp, Artificial
  probe
  misc_feature (1)..(25): SEQ ID NO: 6590; WAN024FOR; Start 450; Stop 474
tttaaccagaaaatggcgaagaaaa

SEQ ID NO: 443347 - DNA, 25 bp, Artificial
  probe
  misc_feature (1)..(25): SEQ ID NO: 6590; WAN024FOR; Start 449; Stop 473
ttttaaccagaaaatggcgaagaaa

SEQ ID NO: 443348 - DNA, 25 bp, Artificial
  probe
  misc_feature (1)..(25): SEQ ID NO: 6590; WAN024FOR; Start 684; Stop 708
ccacaatcattcaacttctataaat

SEQ ID NO: 443349 - DNA, 25 bp, Artificial
  probe
  misc_feature (1)..(25): SEQ ID NO: 6590; WAN024FOR; Start 203; Stop 227
gtggatattctgttggaaataattt

SEQ ID NO: 443350 - DNA, 25 bp, Artificial
  probe
  misc_feature (1)..(25): SEQ ID NO: 6590; WAN024FOR; Start 814; Stop 838
aaatctgtcatgatgctatccattt

SEQ ID NO: 443351 - DNA, 25 bp, Artificial
  probe
  misc_feature (1)..(25): SEQ ID NO: 6590; WAN024FOR; Start 215; Stop 239
ttggaaataattttgcagcacgaaa

SEQ ID NO: 443352 - DNA, 25 bp, Artificial
  probe
  misc_feature (1)..(25): SEQ ID NO: 6590; WAN024FOR; Start 4; Stop 28
aggaaagaaattaaagctgtttatg

SEQ ID NO: 443353 - DNA, 25 bp, Artificial
  probe
  misc_feature (1)..(25): SEQ ID NO: 6590; WAN024FOR; Start 214; Stop 238
gttggaaataattttgcagcacgaa

SEQ ID NO: 443354 - DNA, 25 bp, Artificial
  probe
  misc_feature (1)..(25): SEQ ID NO: 6590; WAN024FOR; Start 210; Stop 234
ttctgttggaaataattttgcagca

SEQ ID NO: 443355 - DNA, 25 bp, Artificial
  probe
  misc_feature (1)..(25): SEQ ID NO: 6590; WAN024FOR; Start 209; Stop 233
attctgttggaaataattttgcagc

SEQ ID NO: 443356 - DNA, 25 bp, Artificial
  probe
  misc_feature (1)..(25): SEQ ID NO: 6590; WAN024FOR; Start 3; Stop 27
gaggaaagaaattaaagctgtttat

SEQ ID NO: 443357 - DNA, 25 bp, Artificial
  probe
  misc_feature (1)..(25): SEQ ID NO: 6590; WAN024FOR; Start 217; Stop 241
ggaaataattttgcagcacgaaaag

SEQ ID NO: 443358 - DNA, 25 bp, Artificial
  probe
  misc_feature (1)..(25): SEQ ID NO: 6590; WAN024FOR; Start 211; Stop 235
tctgttggaaataattttgcagcac

SEQ ID NO: 443359 - DNA, 25 bp, Artificial
  probe
  misc_feature (1)..(25): SEQ ID NO: 6590; WAN024FOR; Start 218; Stop 242
gaaataattttgcagcacgaaaagc

SEQ ID NO: 443360 - DNA, 25 bp, Artificial
  probe
  misc_feature (1)..(25): SEQ ID NO: 6590; WAN024FOR; Start 216; Stop 240
tggaaataattttgcagcacgaaaa

SEQ ID NO: 443361 - DNA, 25 bp, Artificial
  probe
  misc_feature (1)..(25): SEQ ID NO: 6590; WAN024FOR; Start 213; Stop 237
tgttggaaataattttgcagcacga

SEQ ID NO: 443362 - DNA, 25 bp, Artificial
  probe
  misc_feature (1)..(25): SEQ ID NO: 6590; WAN024FOR; Start 517; Stop 541
gatgtagatcttgttaaaggatcgt

SEQ ID NO: 443363 - DNA, 25 bp, Artificial
  probe
  misc_feature (1)..(25): SEQ ID NO: 6590; WAN024FOR; Start 519; Stop 543
tgtagatcttgttaaaggatcgttt

SEQ ID NO: 443364 - DNA, 25 bp, Artificial
  probe
  misc_feature (1)..(25): SEQ ID NO: 6590; WAN024FOR; Start 516; Stop 540
agatgtagatcttgttaaaggatcg

SEQ ID NO: 443365 - DNA, 25 bp, Artificial
  probe
  misc_feature (1)..(25): SEQ ID NO: 6590; WAN024FOR; Start 212; Stop 236
ctgttggaaataattttgcagcacg

SEQ ID NO: 443366 - DNA, 25 bp, Artificial
  probe
  misc_feature (1)..(25): SEQ ID NO: 6590; WAN024FOR; Start 518; Stop 542
atgtagatcttgttaaaggatcgtt

SEQ ID NO: 443367 - DNA, 25 bp, Artificial
  probe
  misc_feature (1)..(25): SEQ ID NO: 6590; WAN024FOR; Start 554; Stop 578
gactgtctgattttcatgatgttgg

SEQ ID NO: 443368 - DNA, 25 bp, Artificial
  probe
  misc_feature (1)..(25): SEQ ID NO: 6590; WAN024FOR; Start 553; Stop 577
agactgtctgattttcatgatgttg

SEQ ID NO: 443369 - DNA, 25 bp, Artificial
  probe
  misc_feature (1)..(25): SEQ ID NO: 6590; WAN024FOR; Start 219; Stop 243
aaataattttgcagcacgaaaagct

SEQ ID NO: 443370 - DNA, 25 bp, Artificial
  probe
  misc_feature (1)..(25): SEQ ID NO: 6590; WAN024FOR; Start 815; Stop 839
aatctgtcatgatgctatccatttt

SEQ ID NO: 443371 - DNA, 25 bp, Artificial
  probe
  misc_feature (1)..(25): SEQ ID NO: 6591; WAN024FDJ; Start 55; Stop 79
atagttgagcctaaagaagtggaag

SEQ ID NO: 443372 - DNA, 25 bp, Artificial
  probe
  misc_feature (1)..(25): SEQ ID NO: 6591; WAN024FDJ; Start 54; Stop 78
gatagttgagcctaaagaagtggaa

SEQ ID NO: 443373 - DNA, 25 bp, Artificial
  probe
  misc_feature (1)..(25): SEQ ID NO: 6591; WAN024FDJ; Start 56; Stop 80
tagttgagcctaaagaagtggaagt

SEQ ID NO: 443374 - DNA, 25 bp, Artificial
  probe
  misc_feature (1)..(25): SEQ ID NO: 6591; WAN024FDJ; Start 4; Stop 28
aggagaggtatcagcatgagagatt

SEQ ID NO: 443375 - DNA, 25 bp, Artificial
  probe
  misc_feature (1)..(25): SEQ ID NO: 6591; WAN024FDJ; Start 53; Stop 77
ggatagttgagcctaaagaagtgga

SEQ ID NO: 443376 - DNA, 25 bp, Artificial
  probe
  misc_feature (1)..(25): SEQ ID NO: 6591; WAN024FDJ; Start 3; Stop 27
gaggagaggtatcagcatgagagat

SEQ ID NO: 443377 - DNA, 25 bp, Artificial
  probe
  misc_feature (1)..(25): SEQ ID NO: 6591; WAN024FDJ; Start 6; Stop 30
gagaggtatcagcatgagagatttg

SEQ ID NO: 443378 - DNA, 25 bp, Artificial
  probe
  misc_feature (1)..(25): SEQ ID NO: 6591; WAN024FDJ; Start 1; Stop 25
atgaggagaggtatcagcatgagag

SEQ ID NO: 443379 - DNA, 25 bp, Artificial
  probe
  misc_feature (1)..(25): SEQ ID NO: 6591; WAN024FDJ; Start 7; Stop 31
agaggtatcagcatgagagatttga

SEQ ID NO: 443380 - DNA, 25 bp, Artificial
  probe
  misc_feature (1)..(25): SEQ ID NO: 6591; WAN024FDJ; Start 57; Stop 81
agttgagcctaaagaagtggaagtg

SEQ ID NO: 443381 - DNA, 25 bp, Artificial
  probe
  misc_feature (1)..(25): SEQ ID NO: 6591; WAN024FDJ; Start 5; Stop 29
ggagaggtatcagcatgagagattt

SEQ ID NO: 443382 - DNA, 25 bp, Artificial
  probe
  misc_feature (1)..(25): SEQ ID NO: 6591; WAN024FDJ; Start 52; Stop 76
aggatagttgagcctaaagaagtgg

SEQ ID NO: 443383 - DNA, 25 bp, Artificial
  probe
  misc_feature (1)..(25): SEQ ID NO: 6591; WAN024FDJ; Start 2; Stop 26
tgaggagaggtatcagcatgagaga

SEQ ID NO: 443384 - DNA, 25 bp, Artificial
  probe
  misc_feature (1)..(25): SEQ ID NO: 6591; WAN024FDJ; Start 9; Stop 33
aggtatcagcatgagagatttgatt

SEQ ID NO: 443385 - DNA, 25 bp, Artificial
  probe
  misc_feature (1)..(25): SEQ ID NO: 6591; WAN024FDJ; Start 8; Stop 32
gaggtatcagcatgagagatttgat

SEQ ID NO: 443386 - DNA, 25 bp, Artificial
  probe
  misc_feature (1)..(25): SEQ ID NO: 6591; WAN024FDJ; Start 51; Stop 75
taggatagttgagcctaaagaagtg

SEQ ID NO: 443387 - DNA, 25 bp, Artificial
  probe
  misc_feature (1)..(25): SEQ ID NO: 6591; WAN024FDJ; Start 10; Stop 34
ggtatcagcatgagagatttgattt

SEQ ID NO: 443388 - DNA, 25 bp, Artificial
  probe
  misc_feature (1)..(25): SEQ ID NO: 6591; WAN024FDJ; Start 50; Stop 74
ataggatagttgagcctaaagaagt

SEQ ID NO: 443389 - DNA, 25 bp, Artificial
  probe
  misc_feature (1)..(25): SEQ ID NO: 6591; WAN024FDJ; Start 15; Stop 39
cagcatgagagatttgattttcctt

SEQ ID NO: 443390 - DNA, 25 bp, Artificial
  probe
  misc_feature (1)..(25): SEQ ID NO: 6591; WAN024FDJ; Start 58; Stop 82
gttgagcctaaagaagtggaagtgc

SEQ ID NO: 443391 - DNA, 25 bp, Artificial
  probe
  misc_feature (1)..(25): SEQ ID NO: 6591; WAN024FDJ; Start 20; Stop 44
tgagagatttgattttccttaaagc

SEQ ID NO: 443392 - DNA, 25 bp, Artificial
  probe
  misc_feature (1)..(25): SEQ ID NO: 6591; WAN024FDJ; Start 14; Stop 38
tcagcatgagagatttgattttcct

SEQ ID NO: 443393 - DNA, 25 bp, Artificial
  probe
  misc_feature (1)..(25): SEQ ID NO: 6591; WAN024FDJ; Start 16; Stop 40
agcatgagagatttgattttcctta

SEQ ID NO: 443394 - DNA, 25 bp, Artificial
  probe
  misc_feature (1)..(25): SEQ ID NO: 6591; WAN024FDJ; Start 49; Stop 73
aataggatagttgagcctaaagaag

SEQ ID NO: 443395 - DNA, 25 bp, Artificial
  probe
  misc_feature (1)..(25): SEQ ID NO: 6591; WAN024FDJ; Start 17; Stop 41
gcatgagagatttgattttccttaa

SEQ ID NO: 443396 - DNA, 25 bp, Artificial
  probe
  misc_feature (1)..(25): SEQ ID NO: 6591; WAN024FDJ; Start 48; Stop 72
aaataggatagttgagcctaaagaa

SEQ ID NO: 443397 - DNA, 25 bp, Artificial
  probe
  misc_feature (1)..(25): SEQ ID NO: 6591; WAN024FDJ; Start 21; Stop 45
gagagatttgattttccttaaagct

SEQ ID NO: 443398 - DNA, 25 bp, Artificial
  probe
  misc_feature (1)..(25): SEQ ID NO: 6591; WAN024FDJ; Start 13; Stop 37
atcagcatgagagatttgattttcc

SEQ ID NO: 443399 - DNA, 25 bp, Artificial
  probe
  misc_feature (1)..(25): SEQ ID NO: 6591; WAN024FDJ; Start 23; Stop 47
gagatttgattttccttaaagctca

SEQ ID NO: 443400 - DNA, 25 bp, Artificial
  probe
  misc_feature (1)..(25): SEQ ID NO: 6591; WAN024FDJ; Start 63; Stop 87
gcctaaagaagtggaagtgctgact

SEQ ID NO: 443401 - DNA, 25 bp, Artificial
  probe
  misc_feature (1)..(25): SEQ ID NO: 6591; WAN024FDJ; Start 22; Stop 46
agagatttgattttccttaaagctc

SEQ ID NO: 443402 - DNA, 25 bp, Artificial
  probe
  misc_feature (1)..(25): SEQ ID NO: 6591; WAN024FDJ; Start 59; Stop 83
ttgagcctaaagaagtggaagtgct

SEQ ID NO: 443403 - DNA, 25 bp, Artificial
  probe
  misc_feature (1)..(25): SEQ ID NO: 6591; WAN024FDJ; Start 11; Stop 35
gtatcagcatgagagatttgatttt

SEQ ID NO: 443404 - DNA, 25 bp, Artificial
  probe
  misc_feature (1)..(25): SEQ ID NO: 6592; WAN024CD2; Start 413; Stop 437
agttagataatggtgctgtagttcc

SEQ ID NO: 443405 - DNA, 25 bp, Artificial
  probe
  misc_feature (1)..(25): SEQ ID NO: 6592; WAN024CD2; Start 407; Stop 431
atgttgagttagataatggtgctgt

SEQ ID NO: 443406 - DNA, 25 bp, Artificial
  probe
  misc_feature (1)..(25): SEQ ID NO: 6592; WAN024CD2; Start 406; Stop 430
gatgttgagttagataatggtgctg

SEQ ID NO: 443407 - DNA, 25 bp, Artificial
  probe
  misc_feature (1)..(25): SEQ ID NO: 6592; WAN024CD2; Start 19; Stop 43
atgacaacctataatggagcagatt

SEQ ID NO: 443408 - DNA, 25 bp, Artificial
  probe
  misc_feature (1)..(25): SEQ ID NO: 6592; WAN024CD2; Start 18; Stop 42
gatgacaacctataatggagcagat

SEQ ID NO: 443409 - DNA, 25 bp, Artificial
  probe
  misc_feature (1)..(25): SEQ ID NO: 6592; WAN024CD2; Start 408; Stop 432
tgttgagttagataatggtgctgta

SEQ ID NO: 443410 - DNA, 25 bp, Artificial
  probe
  misc_feature (1)..(25): SEQ ID NO: 6592; WAN024CD2; Start 411; Stop 435
tgagttagataatggtgctgtagtt

SEQ ID NO: 443411 - DNA, 25 bp, Artificial
  probe
  misc_feature (1)..(25): SEQ ID NO: 6592; WAN024CD2; Start 410; Stop 434
ttgagttagataatggtgctgtagt

SEQ ID NO: 443412 - DNA, 25 bp, Artificial
  probe
  misc_feature (1)..(25): SEQ ID NO: 6592; WAN024CD2; Start 641; Stop 665
cttctgctcctaaccaatctcttaa

SEQ ID NO: 443413 - DNA, 25 bp, Artificial
  probe
  misc_feature (1)..(25): SEQ ID NO: 6592; WAN024CD2; Start 648; Stop 672
tcctaaccaatctcttaatcgtgac

SEQ ID NO: 443414 - DNA, 25 bp, Artificial
  probe
  misc_feature (1)..(25): SEQ ID NO: 6592; WAN024CD2; Start 647; Stop 671
ctcctaaccaatctcttaatcgtga

SEQ ID NO: 443415 - DNA, 25 bp, Artificial
  probe
  misc_feature (1)..(25): SEQ ID NO: 6592; WAN024CD2; Start 643; Stop 667
tctgctcctaaccaatctcttaatc

SEQ ID NO: 443416 - DNA, 25 bp, Artificial
  probe
  misc_feature (1)..(25): SEQ ID NO: 6592; WAN024CD2; Start 405; Stop 429
ggatgttgagttagataatggtgct

SEQ ID NO: 443417 - DNA, 25 bp, Artificial
  probe
  misc_feature (1)..(25): SEQ ID NO: 6592; WAN024CD2; Start 409; Stop 433
gttgagttagataatggtgctgtag

SEQ ID NO: 443418 - DNA, 25 bp, Artificial
  probe
  misc_feature (1)..(25): SEQ ID NO: 6592; WAN024CD2; Start 642; Stop 666
ttctgctcctaaccaatctcttaat

SEQ ID NO: 443419 - DNA, 25 bp, Artificial
  probe
  misc_feature (1)..(25): SEQ ID NO: 6592; WAN024CD2; Start 412; Stop 436
gagttagataatggtgctgtagttc

SEQ ID NO: 443420 - DNA, 25 bp, Artificial
  probe
  misc_feature (1)..(25): SEQ ID NO: 6592; WAN024CD2; Start 649; Stop 673
cctaaccaatctcttaatcgtgacc

SEQ ID NO: 443421 - DNA, 25 bp, Artificial
  probe
  misc_feature (1)..(25): SEQ ID NO: 6592; WAN024CD2; Start 644; Stop 668
ctgctcctaaccaatctcttaatcg

SEQ ID NO: 443422 - DNA, 25 bp, Artificial
  probe
  misc_feature (1)..(25): SEQ ID NO: 6592; WAN024CD2; Start 496; Stop 520
aagcgtgagttaatagttctgttag

SEQ ID NO: 443423 - DNA, 25 bp, Artificial
  probe
  misc_feature (1)..(25): SEQ ID NO: 6592; WAN024CD2; Start 497; Stop 521
agcgtgagttaatagttctgttaga

SEQ ID NO: 443424 - DNA, 25 bp, Artificial
  probe
  misc_feature (1)..(25): SEQ ID NO: 6592; WAN024CD2; Start 414; Stop 438
gttagataatggtgctgtagttccg

SEQ ID NO: 443425 - DNA, 25 bp, Artificial
  probe
  misc_feature (1)..(25): SEQ ID NO: 6592; WAN024CD2; Start 86; Stop 110
tggctgatgaagttattattgttga

SEQ ID NO: 443426 - DNA, 25 bp, Artificial
  probe
  misc_feature (1)..(25): SEQ ID NO: 6592; WAN024CD2; Start 20; Stop 44
tgacaacctataatggagcagatta

SEQ ID NO: 443427 - DNA, 25 bp, Artificial
  probe
  misc_feature (1)..(25): SEQ ID NO: 6592; WAN024CD2; Start 490; Stop 514
gcagttaagcgtgagttaatagttc

SEQ ID NO: 443428 - DNA, 25 bp, Artificial
  probe
  misc_feature (1)..(25): SEQ ID NO: 6592; WAN024CD2; Start 236; Stop 260
ttcaagagacaacaggagatatagt

SEQ ID NO: 443429 - DNA, 25 bp, Artificial
  probe
  misc_feature (1)..(25): SEQ ID NO: 6592; WAN024CD2; Start 650; Stop 674
ctaaccaatctcttaatcgtgaccg

SEQ ID NO: 443430 - DNA, 25 bp, Artificial
  probe
  misc_feature (1)..(25): SEQ ID NO: 6592; WAN024CD2; Start 646; Stop 670
gctcctaaccaatctcttaatcgtg

SEQ ID NO: 443431 - DNA, 25 bp, Artificial
  probe
  misc_feature (1)..(25): SEQ ID NO: 6592; WAN024CD2; Start 416; Stop 440
tagataatggtgctgtagttccgtt

SEQ ID NO: 443432 - DNA, 25 bp, Artificial
  probe
  misc_feature (1)..(25): SEQ ID NO: 6592; WAN024CD2; Start 415; Stop 439
ttagataatggtgctgtagttccgt

SEQ ID NO: 443433 - DNA, 25 bp, Artificial
  probe
  misc_feature (1)..(25): SEQ ID NO: 6592; WAN024CD2; Start 493; Stop 517
gttaagcgtgagttaatagttctgt

SEQ ID NO: 443434 - DNA, 25 bp, Artificial
  probe
  misc_feature (1)..(25): SEQ ID NO: 6592; WAN024CD2; Start 645; Stop 669
tgctcctaaccaatctcttaatcgt

SEQ ID NO: 443435 - DNA, 25 bp, Artificial
  probe
  misc_feature (1)..(25): SEQ ID NO: 6592; WAN024CD2; Start 859; Stop 883
catacttattatcctacattccgca

SEQ ID NO: 443436 - DNA, 25 bp, Artificial
  probe
  misc_feature (1)..(25): SEQ ID NO: 6592; WAN024CD2; Start 492; Stop 516
agttaagcgtgagttaatagttctg

SEQ ID NO: 443437 - DNA, 25 bp, Artificial
  probe
  misc_feature (1)..(25): SEQ ID NO: 6593; WAN024CHL; Start 113; Stop 137
atatgaatgctatccttatcctgcc

SEQ ID NO: 443438 - DNA, 25 bp, Artificial
  probe
  misc_feature (1)..(25): SEQ ID NO: 6593; WAN024CHL; Start 112; Stop 136
aatatgaatgctatccttatcctgc

SEQ ID NO: 443439 - DNA, 25 bp, Artificial
  probe
  misc_feature (1)..(25): SEQ ID NO: 6593; WAN024CHL; Start 111; Stop 135
caatatgaatgctatccttatcctg

SEQ ID NO: 443440 - DNA, 25 bp, Artificial
  probe
  misc_feature (1)..(25): SEQ ID NO: 6593; WAN024CHL; Start 114; Stop 138
tatgaatgctatccttatcctgccc

SEQ ID NO: 443441 - DNA, 25 bp, Artificial
  probe
  misc_feature (1)..(25): SEQ ID NO: 6593; WAN024CHL; Start 8; Stop 32
ttatagtctggactaggtgccataa

SEQ ID NO: 443442 - DNA, 25 bp, Artificial
  probe
  misc_feature (1)..(25): SEQ ID NO: 6593; WAN024CHL; Start 7; Stop 31
cttatagtctggactaggtgccata

SEQ ID NO: 443443 - DNA, 25 bp, Artificial
  probe
  misc_feature (1)..(25): SEQ ID NO: 6593; WAN024CHL; Start 108; Stop 132
cggcaatatgaatgctatccttatc

SEQ ID NO: 443444 - DNA, 25 bp, Artificial
  probe
  misc_feature (1)..(25): SEQ ID NO: 6593; WAN024CHL; Start 107; Stop 131
tcggcaatatgaatgctatccttat

SEQ ID NO: 443445 - DNA, 25 bp, Artificial
  probe
  misc_feature (1)..(25): SEQ ID NO: 6593; WAN024CHL; Start 106; Stop 130
atcggcaatatgaatgctatcctta

SEQ ID NO: 443446 - DNA, 25 bp, Artificial
  probe
  misc_feature (1)..(25): SEQ ID NO: 6593; WAN024CHL; Start 109; Stop 133
ggcaatatgaatgctatccttatcc

SEQ ID NO: 443447 - DNA, 25 bp, Artificial
  probe
  misc_feature (1)..(25): SEQ ID NO: 6593; WAN024CHL; Start 105; Stop 129
gatcggcaatatgaatgctatcctt

SEQ ID NO: 443448 - DNA, 25 bp, Artificial
  probe
  misc_feature (1)..(25): SEQ ID NO: 6593; WAN024CHL; Start 110; Stop 134
gcaatatgaatgctatccttatcct

SEQ ID NO: 443449 - DNA, 25 bp, Artificial
  probe
  misc_feature (1)..(25): SEQ ID NO: 6593; WAN024CHL; Start 1; Stop 25
atgaggcttatagtctggactaggt

SEQ ID NO: 443450 - DNA, 25 bp, Artificial
  probe
  misc_feature (1)..(25): SEQ ID NO: 6593; WAN024CHL; Start 147; Stop 171
catagtagtggagcaatttcccttc

SEQ ID NO: 443451 - DNA, 25 bp, Artificial
  probe
  misc_feature (1)..(25): SEQ ID NO: 6593; WAN024CHL; Start 38; Stop 62
gtcactcctgtccattcttcctcaa

SEQ ID NO: 443452 - DNA, 25 bp, Artificial
  probe
  misc_feature (1)..(25): SEQ ID NO: 6593; WAN024CHL; Start 102; Stop 126
ctggatcggcaatatgaatgctatc

SEQ ID NO: 443453 - DNA, 25 bp, Artificial
  probe
  misc_feature (1)..(25): SEQ ID NO: 6593; WAN024CHL; Start 152; Stop 176
tagtggagcaatttcccttccttaa

SEQ ID NO: 443454 - DNA, 25 bp, Artificial
  probe
  misc_feature (1)..(25): SEQ ID NO: 6593; WAN024CHL; Start 146; Stop 170
acatagtagtggagcaatttccctt

SEQ ID NO: 443455 - DNA, 25 bp, Artificial
  probe
  misc_feature (1)..(25): SEQ ID NO: 6593; WAN024CHL; Start 101; Stop 125
tctggatcggcaatatgaatgctat

SEQ ID NO: 443456 - DNA, 25 bp, Artificial
  probe
  misc_feature (1)..(25): SEQ ID NO: 6593; WAN024CHL; Start 100; Stop 124
atctggatcggcaatatgaatgcta

SEQ ID NO: 443457 - DNA, 25 bp, Artificial
  probe
  misc_feature (1)..(25): SEQ ID NO: 6593; WAN024CHL; Start 148; Stop 172
atagtagtggagcaatttcccttcc

SEQ ID NO: 443458 - DNA, 25 bp, Artificial
  probe
  misc_feature (1)..(25): SEQ ID NO: 6593; WAN024CHL; Start 311; Stop 335
gtcttagccaattctcgcaagtgag

SEQ ID NO: 443459 - DNA, 25 bp, Artificial
  probe
  misc_feature (1)..(25): SEQ ID NO: 6593; WAN024CHL; Start 151; Stop 175
gtagtggagcaatttcccttcctta

SEQ ID NO: 443460 - DNA, 25 bp, Artificial
  probe
  misc_feature (1)..(25): SEQ ID NO: 6593; WAN024CHL; Start 2; Stop 26
tgaggcttatagtctggactaggtg

SEQ ID NO: 443461 - DNA, 25 bp, Artificial
  probe
  misc_feature (1)..(25): SEQ ID NO: 6593; WAN024CHL; Start 259; Stop 283
aatctcctctgccaccttaaccaag

SEQ ID NO: 443462 - DNA, 25 bp, Artificial
  probe
  misc_feature (1)..(25): SEQ ID NO: 6593; WAN024CHL; Start 115; Stop 139
atgaatgctatccttatcctgccca

SEQ ID NO: 443463 - DNA, 25 bp, Artificial
  probe
  misc_feature (1)..(25): SEQ ID NO: 6593; WAN024CHL; Start 39; Stop 63
tcactcctgtccattcttcctcaaa

SEQ ID NO: 443464 - DNA, 25 bp, Artificial
  probe
  misc_feature (1)..(25): SEQ ID NO: 6593; WAN024CHL; Start 145; Stop 169
cacatagtagtggagcaatttccct

SEQ ID NO: 443465 - DNA, 25 bp, Artificial
  probe
  misc_feature (1)..(25): SEQ ID NO: 6593; WAN024CHL; Start 9; Stop 33
tatagtctggactaggtgccataaa

SEQ ID NO: 443466 - DNA, 25 bp, Artificial
  probe
  misc_feature (1)..(25): SEQ ID NO: 6593; WAN024CHL; Start 258; Stop 282
caatctcctctgccaccttaaccaa

SEQ ID NO: 443467 - DNA, 25 bp, Artificial
  probe
  misc_feature (1)..(25): SEQ ID NO: 6593; WAN024CHL; Start 255; Stop 279
aaccaatctcctctgccaccttaac

SEQ ID NO: 443468 - DNA, 25 bp, Artificial
  probe
  misc_feature (1)..(25): SEQ ID NO: 6593; WAN024CHL; Start 97; Stop 121
gggatctggatcggcaatatgaatg

SEQ ID NO: 443469 - DNA, 25 bp, Artificial
  probe
  misc_feature (1)..(25): SEQ ID NO: 6593; WAN024CHL; Start 37; Stop 61
agtcactcctgtccattcttcctca

SEQ ID NO: 443470 - DNA, 25 bp, Artificial
  probe
  misc_feature (1)..(25): SEQ ID NO: 6594; WAN024BRY; Start 91; Stop 115
aatcgcttgctactaaggaagataa

SEQ ID NO: 443471 - DNA, 25 bp, Artificial
  probe
  misc_feature (1)..(25): SEQ ID NO: 6594; WAN024BRY; Start 93; Stop 117
tcgcttgctactaaggaagataatc

SEQ ID NO: 443472 - DNA, 25 bp, Artificial
  probe
  misc_feature (1)..(25): SEQ ID NO: 6594; WAN024BRY; Start 92; Stop 116
atcgcttgctactaaggaagataat

SEQ ID NO: 443473 - DNA, 25 bp, Artificial
  probe
  misc_feature (1)..(25): SEQ ID NO: 6594; WAN024BRY; Start 89; Stop 113
ctaatcgcttgctactaaggaagat

SEQ ID NO: 443474 - DNA, 25 bp, Artificial
  probe
  misc_feature (1)..(25): SEQ ID NO: 6594; WAN024BRY; Start 112; Stop 136
ataatccagagcgttacagtctatg

SEQ ID NO: 443475 - DNA, 25 bp, Artificial
  probe
  misc_feature (1)..(25): SEQ ID NO: 6594; WAN024BRY; Start 111; Stop 135
gataatccagagcgttacagtctat

SEQ ID NO: 443476 - DNA, 25 bp, Artificial
  probe
  misc_feature (1)..(25): SEQ ID NO: 6594; WAN024BRY; Start 108; Stop 132
gaagataatccagagcgttacagtc

SEQ ID NO: 443477 - DNA, 25 bp, Artificial
  probe
  misc_feature (1)..(25): SEQ ID NO: 6594; WAN024BRY; Start 90; Stop 114
taatcgcttgctactaaggaagata

SEQ ID NO: 443478 - DNA, 25 bp, Artificial
  probe
  misc_feature (1)..(25): SEQ ID NO: 6594; WAN024BRY; Start 110; Stop 134
agataatccagagcgttacagtcta

SEQ ID NO: 443479 - DNA, 25 bp, Artificial
  probe
  misc_feature (1)..(25): SEQ ID NO: 6594; WAN024BRY; Start 113; Stop 137
taatccagagcgttacagtctatga

SEQ ID NO: 443480 - DNA, 25 bp, Artificial
  probe
  misc_feature (1)..(25): SEQ ID NO: 6594; WAN024BRY; Start 109; Stop 133
aagataatccagagcgttacagtct

SEQ ID NO: 443481 - DNA, 25 bp, Artificial
  probe
  misc_feature (1)..(25): SEQ ID NO: 6594; WAN024BRY; Start 114; Stop 138
aatccagagcgttacagtctatgaa

SEQ ID NO: 443482 - DNA, 25 bp, Artificial
  probe
  misc_feature (1)..(25): SEQ ID NO: 6594; WAN024BRY; Start 115; Stop 139
atccagagcgttacagtctatgaag

SEQ ID NO: 443483 - DNA, 25 bp, Artificial
  probe
  misc_feature (1)..(25): SEQ ID NO: 6594; WAN024BRY; Start 117; Stop 141
ccagagcgttacagtctatgaagaa

SEQ ID NO: 443484 - DNA, 25 bp, Artificial
  probe
  misc_feature (1)..(25): SEQ ID NO: 6594; WAN024BRY; Start 104; Stop 128
taaggaagataatccagagcgttac

SEQ ID NO: 443485 - DNA, 25 bp, Artificial
  probe
  misc_feature (1)..(25): SEQ ID NO: 6594; WAN024BRY; Start 100; Stop 124
ctactaaggaagataatccagagcg

SEQ ID NO: 443486 - DNA, 25 bp, Artificial
  probe
  misc_feature (1)..(25): SEQ ID NO: 6594; WAN024BRY; Start 95; Stop 119
gcttgctactaaggaagataatcca

SEQ ID NO: 443487 - DNA, 25 bp, Artificial
  probe
  misc_feature (1)..(25): SEQ ID NO: 6594; WAN024BRY; Start 103; Stop 127
ctaaggaagataatccagagcgtta

SEQ ID NO: 443488 - DNA, 25 bp, Artificial
  probe
  misc_feature (1)..(25): SEQ ID NO: 6594; WAN024BRY; Start 101; Stop 125
tactaaggaagataatccagagcgt

SEQ ID NO: 443489 - DNA, 25 bp, Artificial
  probe
  misc_feature (1)..(25): SEQ ID NO: 6594; WAN024BRY; Start 98; Stop 122
tgctactaaggaagataatccagag

SEQ ID NO: 443490 - DNA, 25 bp, Artificial
  probe
  misc_feature (1)..(25): SEQ ID NO: 6594; WAN024BRY; Start 88; Stop 112
gctaatcgcttgctactaaggaaga

SEQ ID NO: 443491 - DNA, 25 bp, Artificial
  probe
  misc_feature (1)..(25): SEQ ID NO: 6594; WAN024BRY; Start 94; Stop 118
cgcttgctactaaggaagataatcc

SEQ ID NO: 443492 - DNA, 25 bp, Artificial
  probe
  misc_feature (1)..(25): SEQ ID NO: 6594; WAN024BRY; Start 102; Stop 126
actaaggaagataatccagagcgtt

SEQ ID NO: 443493 - DNA, 25 bp, Artificial
  probe
  misc_feature (1)..(25): SEQ ID NO: 6594; WAN024BRY; Start 97; Stop 121
ttgctactaaggaagataatccaga

SEQ ID NO: 443494 - DNA, 25 bp, Artificial
  probe
  misc_feature (1)..(25): SEQ ID NO: 6594; WAN024BRY; Start 105; Stop 129
aaggaagataatccagagcgttaca

SEQ ID NO: 443495 - DNA, 25 bp, Artificial
  probe
  misc_feature (1)..(25): SEQ ID NO: 6594; WAN024BRY; Start 96; Stop 120
cttgctactaaggaagataatccag

SEQ ID NO: 443496 - DNA, 25 bp, Artificial
  probe
  misc_feature (1)..(25): SEQ ID NO: 6594; WAN024BRY; Start 116; Stop 140
tccagagcgttacagtctatgaaga

SEQ ID NO: 443497 - DNA, 25 bp, Artificial
  probe
  misc_feature (1)..(25): SEQ ID NO: 6594; WAN024BRY; Start 161; Stop 185
aatctggcatcgaattggaagtatg

SEQ ID NO: 443498 - DNA, 25 bp, Artificial
  probe
  misc_feature (1)..(25): SEQ ID NO: 6594; WAN024BRY; Start 118; Stop 142
cagagcgttacagtctatgaagaaa

SEQ ID NO: 443499 - DNA, 25 bp, Artificial
  probe
  misc_feature (1)..(25): SEQ ID NO: 6594; WAN024BRY; Start 106; Stop 130
aggaagataatccagagcgttacag

SEQ ID NO: 443500 - DNA, 25 bp, Artificial
  probe
  misc_feature (1)..(25): SEQ ID NO: 6594; WAN024BRY; Start 99; Stop 123
gctactaaggaagataatccagagc

SEQ ID NO: 443501 - DNA, 25 bp, Artificial
  probe
  misc_feature (1)..(25): SEQ ID NO: 6594; WAN024BRY; Start 107; Stop 131
ggaagataatccagagcgttacagt

SEQ ID NO: 443502 - DNA, 25 bp, Artificial
  probe
  misc_feature (1)..(25): SEQ ID NO: 6594; WAN024BRY; Start 162; Stop 186
atctggcatcgaattggaagtatga

SEQ ID NO: 443503 - DNA, 25 bp, Artificial
  probe
  misc_feature (1)..(25): SEQ ID NO: 6595; WAN024BP5; Start 911; Stop 935
tatcgcttccattgtcagtattctt

SEQ ID NO: 443504 - DNA, 25 bp, Artificial
  probe
  misc_feature (1)..(25): SEQ ID NO: 6595; WAN024BP5; Start 910; Stop 934
ttatcgcttccattgtcagtattct

SEQ ID NO: 443505 - DNA, 25 bp, Artificial
  probe
  misc_feature (1)..(25): SEQ ID NO: 6595; WAN024BP5; Start 909; Stop 933
cttatcgcttccattgtcagtattc

SEQ ID NO: 443506 - DNA, 25 bp, Artificial
  probe
  misc_feature (1)..(25): SEQ ID NO: 6595; WAN024BP5; Start 908; Stop 932
tcttatcgcttccattgtcagtatt

SEQ ID NO: 443507 - DNA, 25 bp, Artificial
  probe
  misc_feature (1)..(25): SEQ ID NO: 6595; WAN024BP5; Start 907; Stop 931
ttcttatcgcttccattgtcagtat

SEQ ID NO: 443508 - DNA, 25 bp, Artificial
  probe
  misc_feature (1)..(25): SEQ ID NO: 6595; WAN024BP5; Start 906; Stop 930
attcttatcgcttccattgtcagta

SEQ ID NO: 443509 - DNA, 25 bp, Artificial
  probe
  misc_feature (1)..(25): SEQ ID NO: 6595; WAN024BP5; Start 905; Stop 929
tattcttatcgcttccattgtcagt

SEQ ID NO: 443510 - DNA, 25 bp, Artificial
  probe
  misc_feature (1)..(25): SEQ ID NO: 6595; WAN024BP5; Start 902; Stop 926
cgttattcttatcgcttccattgtc

SEQ ID NO: 443511 - DNA, 25 bp, Artificial
  probe
  misc_feature (1)..(25): SEQ ID NO: 6595; WAN024BP5; Start 1200; Stop 1224
attcgttgtattatgcgttcagatt

SEQ ID NO: 443512 - DNA, 25 bp, Artificial
  probe
  misc_feature (1)..(25): SEQ ID NO: 6595; WAN024BP5; Start 903; Stop 927
gttattcttatcgcttccattgtca

SEQ ID NO: 443513 - DNA, 25 bp, Artificial
  probe
  misc_feature (1)..(25): SEQ ID NO: 6595; WAN024BP5; Start 904; Stop 928
ttattcttatcgcttccattgtcag

SEQ ID NO: 443514 - DNA, 25 bp, Artificial
  probe
  misc_feature (1)..(25): SEQ ID NO: 6595; WAN024BP5; Start 1199; Stop 1223
aattcgttgtattatgcgttcagat

SEQ ID NO: 443515 - DNA, 25 bp, Artificial
  probe
  misc_feature (1)..(25): SEQ ID NO: 6595; WAN024BP5; Start 1105; Stop 1129
gtgacttcaggagcgttaatagatt

SEQ ID NO: 443516 - DNA, 25 bp, Artificial
  probe
  misc_feature (1)..(25): SEQ ID NO: 6595; WAN024BP5; Start 825; Stop 849
tccaagaatgtcctactatgctaat

SEQ ID NO: 443517 - DNA, 25 bp, Artificial
  probe
  misc_feature (1)..(25): SEQ ID NO: 6595; WAN024BP5; Start 823; Stop 847
cttccaagaatgtcctactatgcta

SEQ ID NO: 443518 - DNA, 25 bp, Artificial
  probe
  misc_feature (1)..(25): SEQ ID NO: 6595; WAN024BP5; Start 824; Stop 848
ttccaagaatgtcctactatgctaa

SEQ ID NO: 443519 - DNA, 25 bp, Artificial
  probe
  misc_feature (1)..(25): SEQ ID NO: 6595; WAN024BP5; Start 1387; Stop 1411
tacggtgtgattctagtgttgttaa

SEQ ID NO: 443520 - DNA, 25 bp, Artificial
  probe
  misc_feature (1)..(25): SEQ ID NO: 6595; WAN024BP5; Start 1386; Stop 1410
ttacggtgtgattctagtgttgtta

SEQ ID NO: 443521 - DNA, 25 bp, Artificial
  probe
  misc_feature (1)..(25): SEQ ID NO: 6595; WAN024BP5; Start 702; Stop 726
gaatcttgataccgttatgctagga

SEQ ID NO: 443522 - DNA, 25 bp, Artificial
  probe
  misc_feature (1)..(25): SEQ ID NO: 6595; WAN024BP5; Start 703; Stop 727
aatcttgataccgttatgctaggaa

SEQ ID NO: 443523 - DNA, 25 bp, Artificial
  probe
  misc_feature (1)..(25): SEQ ID NO: 6595; WAN024BP5; Start 820; Stop 844
ttgcttccaagaatgtcctactatg

SEQ ID NO: 443524 - DNA, 25 bp, Artificial
  probe
  misc_feature (1)..(25): SEQ ID NO: 6595; WAN024BP5; Start 259; Stop 283
tctaccattgtccaagaactattga

SEQ ID NO: 443525 - DNA, 25 bp, Artificial
  probe
  misc_feature (1)..(25): SEQ ID NO: 6595; WAN024BP5; Start 1104; Stop 1128
agtgacttcaggagcgttaatagat

SEQ ID NO: 443526 - DNA, 25 bp, Artificial
  probe
  misc_feature (1)..(25): SEQ ID NO: 6595; WAN024BP5; Start 704; Stop 728
atcttgataccgttatgctaggaag

SEQ ID NO: 443527 - DNA, 25 bp, Artificial
  probe
  misc_feature (1)..(25): SEQ ID NO: 6595; WAN024BP5; Start 181; Stop 205
atgatgattgcttcacttggtattc

SEQ ID NO: 443528 - DNA, 25 bp, Artificial
  probe
  misc_feature (1)..(25): SEQ ID NO: 6595; WAN024BP5; Start 706; Stop 730
cttgataccgttatgctaggaagta

SEQ ID NO: 443529 - DNA, 25 bp, Artificial
  probe
  misc_feature (1)..(25): SEQ ID NO: 6595; WAN024BP5; Start 782; Stop 806
ggattctcttgagtgttgttacttc

SEQ ID NO: 443530 - DNA, 25 bp, Artificial
  probe
  misc_feature (1)..(25): SEQ ID NO: 6595; WAN024BP5; Start 1383; Stop 1407
aagttacggtgtgattctagtgttg

SEQ ID NO: 443531 - DNA, 25 bp, Artificial
  probe
  misc_feature (1)..(25): SEQ ID NO: 6595; WAN024BP5; Start 1348; Stop 1372
ttgttattatgtgtggaaggaatca

SEQ ID NO: 443532 - DNA, 25 bp, Artificial
  probe
  misc_feature (1)..(25): SEQ ID NO: 6595; WAN024BP5; Start 1382; Stop 1406
gaagttacggtgtgattctagtgtt

SEQ ID NO: 443533 - DNA, 25 bp, Artificial
  probe
  misc_feature (1)..(25): SEQ ID NO: 6595; WAN024BP5; Start 701; Stop 725
cgaatcttgataccgttatgctagg

SEQ ID NO: 443534 - DNA, 25 bp, Artificial
  probe
  misc_feature (1)..(25): SEQ ID NO: 6595; WAN024BP5; Start 1385; Stop 1409
gttacggtgtgattctagtgttgtt

SEQ ID NO: 443535 - DNA, 25 bp, Artificial
  probe
  misc_feature (1)..(25): SEQ ID NO: 6595; WAN024BP5; Start 1101; Stop 1125
ttcagtgacttcaggagcgttaata

SEQ ID NO: 443536 - DNA, 25 bp, Artificial
  probe
  misc_feature (1)..(25): SEQ ID NO: 6596; WAN024BTP; Start 31; Stop 55
aacctttctaatacctcaaatagca

SEQ ID NO: 443537 - DNA, 25 bp, Artificial
  probe
  misc_feature (1)..(25): SEQ ID NO: 6596; WAN024BTP; Start 32; Stop 56
acctttctaatacctcaaatagcat

SEQ ID NO: 443538 - DNA, 25 bp, Artificial
  probe
  misc_feature (1)..(25): SEQ ID NO: 6596; WAN024BTP; Start 7; Stop 31
ggcttggctttaattgtggatgaaa

SEQ ID NO: 443539 - DNA, 25 bp, Artificial
  probe
  misc_feature (1)..(25): SEQ ID NO: 6596; WAN024BTP; Start 30; Stop 54
aaacctttctaatacctcaaatagc

SEQ ID NO: 443540 - DNA, 25 bp, Artificial
  probe
  misc_feature (1)..(25): SEQ ID NO: 6596; WAN024BTP; Start 9; Stop 33
cttggctttaattgtggatgaaaac

SEQ ID NO: 443541 - DNA, 25 bp, Artificial
  probe
  misc_feature (1)..(25): SEQ ID NO: 6596; WAN024BTP; Start 12; Stop 36
ggctttaattgtggatgaaaacctt

SEQ ID NO: 443542 - DNA, 25 bp, Artificial
  probe
  misc_feature (1)..(25): SEQ ID NO: 6596; WAN024BTP; Start 10; Stop 34
ttggctttaattgtggatgaaaacc

SEQ ID NO: 443543 - DNA, 25 bp, Artificial
  probe
  misc_feature (1)..(25): SEQ ID NO: 6596; WAN024BTP; Start 13; Stop 37
gctttaattgtggatgaaaaccttt

SEQ ID NO: 443544 - DNA, 25 bp, Artificial
  probe
  misc_feature (1)..(25): SEQ ID NO: 6596; WAN024BTP; Start 8; Stop 32
gcttggctttaattgtggatgaaaa

SEQ ID NO: 443545 - DNA, 25 bp, Artificial
  probe
  misc_feature (1)..(25): SEQ ID NO: 6596; WAN024BTP; Start 11; Stop 35
tggctttaattgtggatgaaaacct

SEQ ID NO: 443546 - DNA, 25 bp, Artificial
  probe
  misc_feature (1)..(25): SEQ ID NO: 6596; WAN024BTP; Start 33; Stop 57
cctttctaatacctcaaatagcata

SEQ ID NO: 443547 - DNA, 25 bp, Artificial
  probe
  misc_feature (1)..(25): SEQ ID NO: 6596; WAN024BTP; Start 6; Stop 30
gggcttggctttaattgtggatgaa

SEQ ID NO: 443548 - DNA, 25 bp, Artificial
  probe
  misc_feature (1)..(25): SEQ ID NO: 6596; WAN024BTP; Start 21; Stop 45
tgtggatgaaaacctttctaatacc

SEQ ID NO: 443549 - DNA, 25 bp, Artificial
  probe
  misc_feature (1)..(25): SEQ ID NO: 6596; WAN024BTP; Start 22; Stop 46
gtggatgaaaacctttctaatacct

SEQ ID NO: 443550 - DNA, 25 bp, Artificial
  probe
  misc_feature (1)..(25): SEQ ID NO: 6596; WAN024BTP; Start 24; Stop 48
ggatgaaaacctttctaatacctca

SEQ ID NO: 443551 - DNA, 25 bp, Artificial
  probe
  misc_feature (1)..(25): SEQ ID NO: 6596; WAN024BTP; Start 23; Stop 47
tggatgaaaacctttctaatacctc

SEQ ID NO: 443552 - DNA, 25 bp, Artificial
  probe
  misc_feature (1)..(25): SEQ ID NO: 6596; WAN024BTP; Start 20; Stop 44
ttgtggatgaaaacctttctaatac

SEQ ID NO: 443553 - DNA, 25 bp, Artificial
  probe
  misc_feature (1)..(25): SEQ ID NO: 6596; WAN024BTP; Start 15; Stop 39
tttaattgtggatgaaaacctttct

SEQ ID NO: 443554 - DNA, 25 bp, Artificial
  probe
  misc_feature (1)..(25): SEQ ID NO: 6596; WAN024BTP; Start 14; Stop 38
ctttaattgtggatgaaaacctttc

SEQ ID NO: 443555 - DNA, 25 bp, Artificial
  probe
  misc_feature (1)..(25): SEQ ID NO: 6596; WAN024BTP; Start 18; Stop 42
aattgtggatgaaaacctttctaat

SEQ ID NO: 443556 - DNA, 25 bp, Artificial
  probe
  misc_feature (1)..(25): SEQ ID NO: 6596; WAN024BTP; Start 25; Stop 49
gatgaaaacctttctaatacctcaa

SEQ ID NO: 443557 - DNA, 25 bp, Artificial
  probe
  misc_feature (1)..(25): SEQ ID NO: 6596; WAN024BTP; Start 17; Stop 41
taattgtggatgaaaacctttctaa

SEQ ID NO: 443558 - DNA, 25 bp, Artificial
  probe
  misc_feature (1)..(25): SEQ ID NO: 6596; WAN024BTP; Start 16; Stop 40
ttaattgtggatgaaaacctttcta

SEQ ID NO: 443559 - DNA, 25 bp, Artificial
  probe
  misc_feature (1)..(25): SEQ ID NO: 6596; WAN024BTP; Start 27; Stop 51
tgaaaacctttctaatacctcaaat

SEQ ID NO: 443560 - DNA, 25 bp, Artificial
  probe
  misc_feature (1)..(25): SEQ ID NO: 6596; WAN024BTP; Start 26; Stop 50
atgaaaacctttctaatacctcaaa

SEQ ID NO: 443561 - DNA, 25 bp, Artificial
  probe
  misc_feature (1)..(25): SEQ ID NO: 6596; WAN024BTP; Start 19; Stop 43
attgtggatgaaaacctttctaata

SEQ ID NO: 443562 - DNA, 25 bp, Artificial
  probe
  misc_feature (1)..(25): SEQ ID NO: 6596; WAN024BTP; Start 29; Stop 53
aaaacctttctaatacctcaaatag

SEQ ID NO: 443563 - DNA, 25 bp, Artificial
  probe
  misc_feature (1)..(25): SEQ ID NO: 6596; WAN024BTP; Start 28; Stop 52
gaaaacctttctaatacctcaaata

SEQ ID NO: 443564 - DNA, 25 bp, Artificial
  probe
  misc_feature (1)..(25): SEQ ID NO: 6597; WAN024BAM; Start 72; Stop 96
ctctttgattttaattgggcctcta

SEQ ID NO: 443565 - DNA, 25 bp, Artificial
  probe
  misc_feature (1)..(25): SEQ ID NO: 6597; WAN024BAM; Start 75; Stop 99
tttgattttaattgggcctctaact

SEQ ID NO: 443566 - DNA, 25 bp, Artificial
  probe
  misc_feature (1)..(25): SEQ ID NO: 6597; WAN024BAM; Start 74; Stop 98
ctttgattttaattgggcctctaac

SEQ ID NO: 443567 - DNA, 25 bp, Artificial
  probe
  misc_feature (1)..(25): SEQ ID NO: 6597; WAN024BAM; Start 73; Stop 97
tctttgattttaattgggcctctaa

SEQ ID NO: 443568 - DNA, 25 bp, Artificial
  probe
  misc_feature (1)..(25): SEQ ID NO: 6597; WAN024BAM; Start 71; Stop 95
gctctttgattttaattgggcctct

SEQ ID NO: 443569 - DNA, 25 bp, Artificial
  probe
  misc_feature (1)..(25): SEQ ID NO: 6597; WAN024BAM; Start 77; Stop 101
tgattttaattgggcctctaactaa

SEQ ID NO: 443570 - DNA, 25 bp, Artificial
  probe
  misc_feature (1)..(25): SEQ ID NO: 6597; WAN024BAM; Start 76; Stop 100
ttgattttaattgggcctctaacta

SEQ ID NO: 443571 - DNA, 25 bp, Artificial
  probe
  misc_feature (1)..(25): SEQ ID NO: 6597; WAN024BAM; Start 70; Stop 94
tgctctttgattttaattgggcctc

SEQ ID NO: 443572 - DNA, 25 bp, Artificial
  probe
  misc_feature (1)..(25): SEQ ID NO: 6597; WAN024BAM; Start 78; Stop 102
gattttaattgggcctctaactaat

SEQ ID NO: 443573 - DNA, 25 bp, Artificial
  probe
  misc_feature (1)..(25): SEQ ID NO: 6598; WAN024BKN; Start 13; Stop 37
gcgacacccgattattctttagata

SEQ ID NO: 443574 - DNA, 25 bp, Artificial
  probe
  misc_feature (1)..(25): SEQ ID NO: 6598; WAN024BKN; Start 14; Stop 38
cgacacccgattattctttagataa

SEQ ID NO: 443575 - DNA, 25 bp, Artificial
  probe
  misc_feature (1)..(25): SEQ ID NO: 6598; WAN024BKN; Start 10; Stop 34
cttgcgacacccgattattctttag

SEQ ID NO: 443576 - DNA, 25 bp, Artificial
  probe
  misc_feature (1)..(25): SEQ ID NO: 6598; WAN024BKN; Start 12; Stop 36
tgcgacacccgattattctttagat

SEQ ID NO: 443577 - DNA, 25 bp, Artificial
  probe
  misc_feature (1)..(25): SEQ ID NO: 6598; WAN024BKN; Start 7; Stop 31
tatcttgcgacacccgattattctt

SEQ ID NO: 443578 - DNA, 25 bp, Artificial
  probe
  misc_feature (1)..(25): SEQ ID NO: 6598; WAN024BKN; Start 9; Stop 33
tcttgcgacacccgattattcttta

SEQ ID NO: 443579 - DNA, 25 bp, Artificial
  probe
  misc_feature (1)..(25): SEQ ID NO: 6598; WAN024BKN; Start 11; Stop 35
ttgcgacacccgattattctttaga

SEQ ID NO: 443580 - DNA, 25 bp, Artificial
  probe
  misc_feature (1)..(25): SEQ ID NO: 6598; WAN024BKN; Start 50; Stop 74
aattggcttcatttatctttccttt

SEQ ID NO: 443581 - DNA, 25 bp, Artificial
  probe
  misc_feature (1)..(25): SEQ ID NO: 6598; WAN024BKN; Start 6; Stop 30
gtatcttgcgacacccgattattct

SEQ ID NO: 443582 - DNA, 25 bp, Artificial
  probe
  misc_feature (1)..(25): SEQ ID NO: 6598; WAN024BKN; Start 8; Stop 32
atcttgcgacacccgattattcttt

SEQ ID NO: 443583 - DNA, 25 bp, Artificial
  probe
  misc_feature (1)..(25): SEQ ID NO: 6598; WAN024BKN; Start 15; Stop 39
gacacccgattattctttagataag

SEQ ID NO: 443584 - DNA, 25 bp, Artificial
  probe
  misc_feature (1)..(25): SEQ ID NO: 6598; WAN024BKN; Start 45; Stop 69
cggtcaattggcttcatttatcttt

SEQ ID NO: 443585 - DNA, 25 bp, Artificial
  probe
  misc_feature (1)..(25): SEQ ID NO: 6598; WAN024BKN; Start 42; Stop 66
aaacggtcaattggcttcatttatc

SEQ ID NO: 443586 - DNA, 25 bp, Artificial
  probe
  misc_feature (1)..(25): SEQ ID NO: 6598; WAN024BKN; Start 47; Stop 71
gtcaattggcttcatttatctttcc

SEQ ID NO: 443587 - DNA, 25 bp, Artificial
  probe
  misc_feature (1)..(25): SEQ ID NO: 6598; WAN024BKN; Start 46; Stop 70
ggtcaattggcttcatttatctttc

SEQ ID NO: 443588 - DNA, 25 bp, Artificial
  probe
  misc_feature (1)..(25): SEQ ID NO: 6598; WAN024BKN; Start 48; Stop 72
tcaattggcttcatttatctttcct

SEQ ID NO: 443589 - DNA, 25 bp, Artificial
  probe
  misc_feature (1)..(25): SEQ ID NO: 6598; WAN024BKN; Start 44; Stop 68
acggtcaattggcttcatttatctt

SEQ ID NO: 443590 - DNA, 25 bp, Artificial
  probe
  misc_feature (1)..(25): SEQ ID NO: 6598; WAN024BKN; Start 43; Stop 67
aacggtcaattggcttcatttatct

SEQ ID NO: 443591 - DNA, 25 bp, Artificial
  probe
  misc_feature (1)..(25): SEQ ID NO: 6598; WAN024BKN; Start 49; Stop 73
caattggcttcatttatctttcctt

SEQ ID NO: 443592 - DNA, 25 bp, Artificial
  probe
  misc_feature (1)..(25): SEQ ID NO: 6598; WAN024BKN; Start 51; Stop 75
attggcttcatttatctttcctttt

SEQ ID NO: 443593 - DNA, 25 bp, Artificial
  probe
  misc_feature (1)..(25): SEQ ID NO: 6598; WAN024BKN; Start 16; Stop 40
acacccgattattctttagataaga

SEQ ID NO: 443594 - DNA, 25 bp, Artificial
  probe
  misc_feature (1)..(25): SEQ ID NO: 6598; WAN024BKN; Start 5; Stop 29
ggtatcttgcgacacccgattattc

SEQ ID NO: 443595 - DNA, 25 bp, Artificial
  probe
  misc_feature (1)..(25): SEQ ID NO: 6598; WAN024BKN; Start 4; Stop 28
aggtatcttgcgacacccgattatt

SEQ ID NO: 443596 - DNA, 25 bp, Artificial
  probe
  misc_feature (1)..(25): SEQ ID NO: 6598; WAN024BKN; Start 41; Stop 65
aaaacggtcaattggcttcatttat

SEQ ID NO: 443597 - DNA, 25 bp, Artificial
  probe
  misc_feature (1)..(25): SEQ ID NO: 6598; WAN024BKN; Start 3; Stop 27
gaggtatcttgcgacacccgattat

SEQ ID NO: 443598 - DNA, 25 bp, Artificial
  probe
  misc_feature (1)..(25): SEQ ID NO: 6598; WAN024BKN; Start 17; Stop 41
cacccgattattctttagataagaa

SEQ ID NO: 443599 - DNA, 25 bp, Artificial
  probe
  misc_feature (1)..(25): SEQ ID NO: 6598; WAN024BKN; Start 18; Stop 42
acccgattattctttagataagaaa

SEQ ID NO: 443600 - DNA, 25 bp, Artificial
  probe
  misc_feature (1)..(25): SEQ ID NO: 6598; WAN024BKN; Start 19; Stop 43
cccgattattctttagataagaaaa

SEQ ID NO: 443601 - DNA, 25 bp, Artificial
  probe
  misc_feature (1)..(25): SEQ ID NO: 6599; WAN024BMZ; Start 197; Stop 221
attatgtagtggatgattctgttca

SEQ ID NO: 443602 - DNA, 25 bp, Artificial
  probe
  misc_feature (1)..(25): SEQ ID NO: 6599; WAN024BMZ; Start 149; Stop 173
aatctgaagagtttgagtgtgactt

SEQ ID NO: 443603 - DNA, 25 bp, Artificial
  probe
  misc_feature (1)..(25): SEQ ID NO: 6599; WAN024BMZ; Start 148; Stop 172
caatctgaagagtttgagtgtgact

SEQ ID NO: 443604 - DNA, 25 bp, Artificial
  probe
  misc_feature (1)..(25): SEQ ID NO: 6599; WAN024BMZ; Start 146; Stop 170
aacaatctgaagagtttgagtgtga

SEQ ID NO: 443605 - DNA, 25 bp, Artificial
  probe
  misc_feature (1)..(25): SEQ ID NO: 6599; WAN024BMZ; Start 4; Stop 28
aggtcacgcatggaatttattagag

SEQ ID NO: 443606 - DNA, 25 bp, Artificial
  probe
  misc_feature (1)..(25): SEQ ID NO: 6599; WAN024BMZ; Start 3; Stop 27
gaggtcacgcatggaatttattaga

SEQ ID NO: 443607 - DNA, 25 bp, Artificial
  probe
  misc_feature (1)..(25): SEQ ID NO: 6599; WAN024BMZ; Start 1; Stop 25
atgaggtcacgcatggaatttatta

SEQ ID NO: 443608 - DNA, 25 bp, Artificial
  probe
  misc_feature (1)..(25): SEQ ID NO: 6599; WAN024BMZ; Start 2; Stop 26
tgaggtcacgcatggaatttattag

SEQ ID NO: 443609 - DNA, 25 bp, Artificial
  probe
  misc_feature (1)..(25): SEQ ID NO: 6599; WAN024BMZ; Start 147; Stop 171
acaatctgaagagtttgagtgtgac

SEQ ID NO: 443610 - DNA, 25 bp, Artificial
  probe
  misc_feature (1)..(25): SEQ ID NO: 6599; WAN024BMZ; Start 70; Stop 94
cttgaccgtattgaaagtatagaga

SEQ ID NO: 443611 - DNA, 25 bp, Artificial
  probe
  misc_feature (1)..(25): SEQ ID NO: 6599; WAN024BMZ; Start 156; Stop 180
agagtttgagtgtgacttctttaat

SEQ ID NO: 443612 - DNA, 25 bp, Artificial
  probe
  misc_feature (1)..(25): SEQ ID NO: 6599; WAN024BMZ; Start 239; Stop 263
acttagagaatagttcctatgtgtt

SEQ ID NO: 443613 - DNA, 25 bp, Artificial
  probe
  misc_feature (1)..(25): SEQ ID NO: 6599; WAN024BMZ; Start 69; Stop 93
tcttgaccgtattgaaagtatagag

SEQ ID NO: 443614 - DNA, 25 bp, Artificial
  probe
  misc_feature (1)..(25): SEQ ID NO: 6599; WAN024BMZ; Start 15; Stop 39
ggaatttattagagctgcgaatcaa

SEQ ID NO: 443615 - DNA, 25 bp, Artificial
  probe
  misc_feature (1)..(25): SEQ ID NO: 6599; WAN024BMZ; Start 12; Stop 36
catggaatttattagagctgcgaat

SEQ ID NO: 443616 - DNA, 25 bp, Artificial
  probe
  misc_feature (1)..(25): SEQ ID NO: 6599; WAN024BMZ; Start 13; Stop 37
atggaatttattagagctgcgaatc

SEQ ID NO: 443617 - DNA, 25 bp, Artificial
  probe
  misc_feature (1)..(25): SEQ ID NO: 6599; WAN024BMZ; Start 14; Stop 38
tggaatttattagagctgcgaatca

SEQ ID NO: 443618 - DNA, 25 bp, Artificial
  probe
  misc_feature (1)..(25): SEQ ID NO: 6599; WAN024BMZ; Start 196; Stop 220
tattatgtagtggatgattctgttc

SEQ ID NO: 443619 - DNA, 25 bp, Artificial
  probe
  misc_feature (1)..(25): SEQ ID NO: 6599; WAN024BMZ; Start 25; Stop 49
agagctgcgaatcaatttatagaaa

SEQ ID NO: 443620 - DNA, 25 bp, Artificial
  probe
  misc_feature (1)..(25): SEQ ID NO: 6599; WAN024BMZ; Start 74; Stop 98
accgtattgaaagtatagagatagg

SEQ ID NO: 443621 - DNA, 25 bp, Artificial
  probe
  misc_feature (1)..(25): SEQ ID NO: 6599; WAN024BMZ; Start 71; Stop 95
ttgaccgtattgaaagtatagagat

SEQ ID NO: 443622 - DNA, 25 bp, Artificial
  probe
  misc_feature (1)..(25): SEQ ID NO: 6599; WAN024BMZ; Start 157; Stop 181
gagtttgagtgtgacttctttaatt

SEQ ID NO: 443623 - DNA, 25 bp, Artificial
  probe
  misc_feature (1)..(25): SEQ ID NO: 6599; WAN024BMZ; Start 7; Stop 31
tcacgcatggaatttattagagctg

SEQ ID NO: 443624 - DNA, 25 bp, Artificial
  probe
  misc_feature (1)..(25): SEQ ID NO: 6599; WAN024BMZ; Start 6; Stop 30
gtcacgcatggaatttattagagct

SEQ ID NO: 443625 - DNA, 25 bp, Artificial
  probe
  misc_feature (1)..(25): SEQ ID NO: 6599; WAN024BMZ; Start 199; Stop 223
tatgtagtggatgattctgttcatt

SEQ ID NO: 443626 - DNA, 25 bp, Artificial
  probe
  misc_feature (1)..(25): SEQ ID NO: 6599; WAN024BMZ; Start 198; Stop 222
ttatgtagtggatgattctgttcat

SEQ ID NO: 443627 - DNA, 25 bp, Artificial
  probe
  misc_feature (1)..(25): SEQ ID NO: 6599; WAN024BMZ; Start 68; Stop 92
atcttgaccgtattgaaagtataga

SEQ ID NO: 443628 - DNA, 25 bp, Artificial
  probe
  misc_feature (1)..(25): SEQ ID NO: 6599; WAN024BMZ; Start 5; Stop 29
ggtcacgcatggaatttattagagc

SEQ ID NO: 443629 - DNA, 25 bp, Artificial
  probe
  misc_feature (1)..(25): SEQ ID NO: 6599; WAN024BMZ; Start 75; Stop 99
ccgtattgaaagtatagagatagga

SEQ ID NO: 443630 - DNA, 25 bp, Artificial
  probe
  misc_feature (1)..(25): SEQ ID NO: 6599; WAN024BMZ; Start 24; Stop 48
tagagctgcgaatcaatttatagaa

SEQ ID NO: 443631 - DNA, 25 bp, Artificial
  probe
  misc_feature (1)..(25): SEQ ID NO: 6599; WAN024BMZ; Start 23; Stop 47
ttagagctgcgaatcaatttataga

SEQ ID NO: 443632 - DNA, 25 bp, Artificial
  probe
  misc_feature (1)..(25): SEQ ID NO: 6599; WAN024BMZ; Start 16; Stop 40
gaatttattagagctgcgaatcaat

SEQ ID NO: 443633 - DNA, 25 bp, Artificial
  probe
  misc_feature (1)..(25): SEQ ID NO: 6599; WAN024BMZ; Start 195; Stop 219
ttattatgtagtggatgattctgtt

SEQ ID NO: 443634 - DNA, 25 bp, Artificial
  probe
  misc_feature (1)..(25): SEQ ID NO: 6600; WAN024BMK; Start 90; Stop 114
taagaccatcaaacattcattcagc

SEQ ID NO: 443635 - DNA, 25 bp, Artificial
  probe
  misc_feature (1)..(25): SEQ ID NO: 6600; WAN024BMK; Start 82; Stop 106
ccactctttaagaccatcaaacatt

SEQ ID NO: 443636 - DNA, 25 bp, Artificial
  probe
  misc_feature (1)..(25): SEQ ID NO: 6600; WAN024BMK; Start 81; Stop 105
cccactctttaagaccatcaaacat

SEQ ID NO: 443637 - DNA, 25 bp, Artificial
  probe
  misc_feature (1)..(25): SEQ ID NO: 6600; WAN024BMK; Start 91; Stop 115
aagaccatcaaacattcattcagcc

SEQ ID NO: 443638 - DNA, 25 bp, Artificial
  probe
  misc_feature (1)..(25): SEQ ID NO: 6600; WAN024BMK; Start 84; Stop 108
actctttaagaccatcaaacattca

SEQ ID NO: 443639 - DNA, 25 bp, Artificial
  probe
  misc_feature (1)..(25): SEQ ID NO: 6600; WAN024BMK; Start 89; Stop 113
ttaagaccatcaaacattcattcag

SEQ ID NO: 443640 - DNA, 25 bp, Artificial
  probe
  misc_feature (1)..(25): SEQ ID NO: 6600; WAN024BMK; Start 93; Stop 117
gaccatcaaacattcattcagccaa

SEQ ID NO: 443641 - DNA, 25 bp, Artificial
  probe
  misc_feature (1)..(25): SEQ ID NO: 6600; WAN024BMK; Start 83; Stop 107
cactctttaagaccatcaaacattc

SEQ ID NO: 443642 - DNA, 25 bp, Artificial
  probe
  misc_feature (1)..(25): SEQ ID NO: 6600; WAN024BMK; Start 88; Stop 112
tttaagaccatcaaacattcattca

SEQ ID NO: 443643 - DNA, 25 bp, Artificial
  probe
  misc_feature (1)..(25): SEQ ID NO: 6600; WAN024BMK; Start 92; Stop 116
agaccatcaaacattcattcagcca

SEQ ID NO: 443644 - DNA, 25 bp, Artificial
  probe
  misc_feature (1)..(25): SEQ ID NO: 6600; WAN024BMK; Start 85; Stop 109
ctctttaagaccatcaaacattcat

SEQ ID NO: 443645 - DNA, 25 bp, Artificial
  probe
  misc_feature (1)..(25): SEQ ID NO: 6600; WAN024BMK; Start 87; Stop 111
ctttaagaccatcaaacattcattc

SEQ ID NO: 443646 - DNA, 25 bp, Artificial
  probe
  misc_feature (1)..(25): SEQ ID NO: 6600; WAN024BMK; Start 27; Stop 51
tttgaaaggaagtgaacttatgaaa

SEQ ID NO: 443647 - DNA, 25 bp, Artificial
  probe
  misc_feature (1)..(25): SEQ ID NO: 6600; WAN024BMK; Start 86; Stop 110
tctttaagaccatcaaacattcatt

SEQ ID NO: 443648 - DNA, 25 bp, Artificial
  probe
  misc_feature (1)..(25): SEQ ID NO: 6600; WAN024BMK; Start 16; Stop 40
ttttacccgattttgaaaggaagtg

SEQ ID NO: 443649 - DNA, 25 bp, Artificial
  probe
  misc_feature (1)..(25): SEQ ID NO: 6600; WAN024BMK; Start 18; Stop 42
ttacccgattttgaaaggaagtgaa

SEQ ID NO: 443650 - DNA, 25 bp, Artificial
  probe
  misc_feature (1)..(25): SEQ ID NO: 6600; WAN024BMK; Start 17; Stop 41
tttacccgattttgaaaggaagtga

SEQ ID NO: 443651 - DNA, 25 bp, Artificial
  probe
  misc_feature (1)..(25): SEQ ID NO: 6600; WAN024BMK; Start 57; Stop 81
aaatcaagaatcaaaaggtcgttcc

SEQ ID NO: 443652 - DNA, 25 bp, Artificial
  probe
  misc_feature (1)..(25): SEQ ID NO: 6600; WAN024BMK; Start 56; Stop 80
aaaatcaagaatcaaaaggtcgttc

SEQ ID NO: 443653 - DNA, 25 bp, Artificial
  probe
  misc_feature (1)..(25): SEQ ID NO: 6600; WAN024BMK; Start 19; Stop 43
tacccgattttgaaaggaagtgaac

SEQ ID NO: 443654 - DNA, 25 bp, Artificial
  probe
  misc_feature (1)..(25): SEQ ID NO: 6600; WAN024BMK; Start 22; Stop 46
ccgattttgaaaggaagtgaactta

SEQ ID NO: 443655 - DNA, 25 bp, Artificial
  probe
  misc_feature (1)..(25): SEQ ID NO: 6600; WAN024BMK; Start 58; Stop 82
aatcaagaatcaaaaggtcgttccc

SEQ ID NO: 443656 - DNA, 25 bp, Artificial
  probe
  misc_feature (1)..(25): SEQ ID NO: 6600; WAN024BMK; Start 78; Stop 102
ttccccactctttaagaccatcaaa

SEQ ID NO: 443657 - DNA, 25 bp, Artificial
  probe
  misc_feature (1)..(25): SEQ ID NO: 6600; WAN024BMK; Start 23; Stop 47
cgattttgaaaggaagtgaacttat

SEQ ID NO: 443658 - DNA, 25 bp, Artificial
  probe
  misc_feature (1)..(25): SEQ ID NO: 6600; WAN024BMK; Start 21; Stop 45
cccgattttgaaaggaagtgaactt

SEQ ID NO: 443659 - DNA, 25 bp, Artificial
  probe
  misc_feature (1)..(25): SEQ ID NO: 6600; WAN024BMK; Start 30; Stop 54
gaaaggaagtgaacttatgaaaaca

SEQ ID NO: 443660 - DNA, 25 bp, Artificial
  probe
  misc_feature (1)..(25): SEQ ID NO: 6600; WAN024BMK; Start 29; Stop 53
tgaaaggaagtgaacttatgaaaac

SEQ ID NO: 443661 - DNA, 25 bp, Artificial
  probe
  misc_feature (1)..(25): SEQ ID NO: 6600; WAN024BMK; Start 20; Stop 44
acccgattttgaaaggaagtgaact

SEQ ID NO: 443662 - DNA, 25 bp, Artificial
  probe
  misc_feature (1)..(25): SEQ ID NO: 6600; WAN024BMK; Start 79; Stop 103
tccccactctttaagaccatcaaac

SEQ ID NO: 443663 - DNA, 25 bp, Artificial
  probe
  misc_feature (1)..(25): SEQ ID NO: 6600; WAN024BMK; Start 77; Stop 101
gttccccactctttaagaccatcaa

SEQ ID NO: 443664 - DNA, 25 bp, Artificial
  probe
  misc_feature (1)..(25): SEQ ID NO: 6600; WAN024BMK; Start 33; Stop 57
aggaagtgaacttatgaaaacaaaa

SEQ ID NO: 443665 - DNA, 25 bp, Artificial
  probe
  misc_feature (1)..(25): SEQ ID NO: 6600; WAN024BMK; Start 32; Stop 56
aaggaagtgaacttatgaaaacaaa

SEQ ID NO: 443666 - DNA, 25 bp, Artificial
  probe
  misc_feature (1)..(25): SEQ ID NO: 6600; WAN024BMK; Start 31; Stop 55
aaaggaagtgaacttatgaaaacaa

SEQ ID NO: 443667 - DNA, 25 bp, Artificial
  probe
  misc_feature (1)..(25): SEQ ID NO: 6601; WAN024BZA; Start 13; Stop 37
aacaagatgcgtggatataggaata

SEQ ID NO: 443668 - DNA, 25 bp, Artificial
  probe
  misc_feature (1)..(25): SEQ ID NO: 6601; WAN024BZA; Start 18; Stop 42
gatgcgtggatataggaatatgcta

SEQ ID NO: 443669 - DNA, 25 bp, Artificial
  probe
  misc_feature (1)..(25): SEQ ID NO: 6601; WAN024BZA; Start 14; Stop 38
acaagatgcgtggatataggaatat

SEQ ID NO: 443670 - DNA, 25 bp, Artificial
  probe
  misc_feature (1)..(25): SEQ ID NO: 6601; WAN024BZA; Start 16; Stop 40
aagatgcgtggatataggaatatgc

SEQ ID NO: 443671 - DNA, 25 bp, Artificial
  probe
  misc_feature (1)..(25): SEQ ID NO: 6601; WAN024BZA; Start 15; Stop 39
caagatgcgtggatataggaatatg

SEQ ID NO: 443672 - DNA, 25 bp, Artificial
  probe
  misc_feature (1)..(25): SEQ ID NO: 6601; WAN024BZA; Start 19; Stop 43
atgcgtggatataggaatatgctag

SEQ ID NO: 443673 - DNA, 25 bp, Artificial
  probe
  misc_feature (1)..(25): SEQ ID NO: 6601; WAN024BZA; Start 22; Stop 46
cgtggatataggaatatgctaggtt

SEQ ID NO: 443674 - DNA, 25 bp, Artificial
  probe
  misc_feature (1)..(25): SEQ ID NO: 6601; WAN024BZA; Start 17; Stop 41
agatgcgtggatataggaatatgct

SEQ ID NO: 443675 - DNA, 25 bp, Artificial
  probe
  misc_feature (1)..(25): SEQ ID NO: 6601; WAN024BZA; Start 21; Stop 45
gcgtggatataggaatatgctaggt

SEQ ID NO: 443676 - DNA, 25 bp, Artificial
  probe
  misc_feature (1)..(25): SEQ ID NO: 6601; WAN024BZA; Start 20; Stop 44
tgcgtggatataggaatatgctagg

SEQ ID NO: 443677 - DNA, 25 bp, Artificial
  probe
  misc_feature (1)..(25): SEQ ID NO: 6601; WAN024BZA; Start 95; Stop 119
attacaacaaagaaagtgggaagac

SEQ ID NO: 443678 - DNA, 25 bp, Artificial
  probe
  misc_feature (1)..(25): SEQ ID NO: 6601; WAN024BZA; Start 12; Stop 36
aaacaagatgcgtggatataggaat

SEQ ID NO: 443679 - DNA, 25 bp, Artificial
  probe
  misc_feature (1)..(25): SEQ ID NO: 6601; WAN024BZA; Start 96; Stop 120
ttacaacaaagaaagtgggaagaca

SEQ ID NO: 443680 - DNA, 25 bp, Artificial
  probe
  misc_feature (1)..(25): SEQ ID NO: 6601; WAN024BZA; Start 94; Stop 118
tattacaacaaagaaagtgggaaga

SEQ ID NO: 443681 - DNA, 25 bp, Artificial
  probe
  misc_feature (1)..(25): SEQ ID NO: 6601; WAN024BZA; Start 32; Stop 56
ggaatatgctaggtttaacacaaga

SEQ ID NO: 443682 - DNA, 25 bp, Artificial
  probe
  misc_feature (1)..(25): SEQ ID NO: 6601; WAN024BZA; Start 31; Stop 55
aggaatatgctaggtttaacacaag

SEQ ID NO: 443683 - DNA, 25 bp, Artificial
  probe
  misc_feature (1)..(25): SEQ ID NO: 6601; WAN024BZA; Start 91; Stop 115
agttattacaacaaagaaagtggga

SEQ ID NO: 443684 - DNA, 25 bp, Artificial
  probe
  misc_feature (1)..(25): SEQ ID NO: 6601; WAN024BZA; Start 90; Stop 114
gagttattacaacaaagaaagtggg

SEQ ID NO: 443685 - DNA, 25 bp, Artificial
  probe
  misc_feature (1)..(25): SEQ ID NO: 6601; WAN024BZA; Start 72; Stop 96
acttggtatatctaagcagagttat

SEQ ID NO: 443686 - DNA, 25 bp, Artificial
  probe
  misc_feature (1)..(25): SEQ ID NO: 6601; WAN024BZA; Start 36; Stop 60
tatgctaggtttaacacaagagaaa

SEQ ID NO: 443687 - DNA, 25 bp, Artificial
  probe
  misc_feature (1)..(25): SEQ ID NO: 6601; WAN024BZA; Start 102; Stop 126
caaagaaagtgggaagacacaattt

SEQ ID NO: 443688 - DNA, 25 bp, Artificial
  probe
  misc_feature (1)..(25): SEQ ID NO: 6601; WAN024BZA; Start 93; Stop 117
ttattacaacaaagaaagtgggaag

SEQ ID NO: 443689 - DNA, 25 bp, Artificial
  probe
  misc_feature (1)..(25): SEQ ID NO: 6601; WAN024BZA; Start 87; Stop 111
gcagagttattacaacaaagaaagt

SEQ ID NO: 443690 - DNA, 25 bp, Artificial
  probe
  misc_feature (1)..(25): SEQ ID NO: 6601; WAN024BZA; Start 35; Stop 59
atatgctaggtttaacacaagagaa

SEQ ID NO: 443691 - DNA, 25 bp, Artificial
  probe
  misc_feature (1)..(25): SEQ ID NO: 6601; WAN024BZA; Start 34; Stop 58
aatatgctaggtttaacacaagaga

SEQ ID NO: 443692 - DNA, 25 bp, Artificial
  probe
  misc_feature (1)..(25): SEQ ID NO: 6601; WAN024BZA; Start 92; Stop 116
gttattacaacaaagaaagtgggaa

SEQ ID NO: 443693 - DNA, 25 bp, Artificial
  probe
  misc_feature (1)..(25): SEQ ID NO: 6601; WAN024BZA; Start 86; Stop 110
agcagagttattacaacaaagaaag

SEQ ID NO: 443694 - DNA, 25 bp, Artificial
  probe
  misc_feature (1)..(25): SEQ ID NO: 6601; WAN024BZA; Start 101; Stop 125
acaaagaaagtgggaagacacaatt

SEQ ID NO: 443695 - DNA, 25 bp, Artificial
  probe
  misc_feature (1)..(25): SEQ ID NO: 6601; WAN024BZA; Start 100; Stop 124
aacaaagaaagtgggaagacacaat

SEQ ID NO: 443696 - DNA, 25 bp, Artificial
  probe
  misc_feature (1)..(25): SEQ ID NO: 6601; WAN024BZA; Start 33; Stop 57
gaatatgctaggtttaacacaagag

SEQ ID NO: 443697 - DNA, 25 bp, Artificial
  probe
  misc_feature (1)..(25): SEQ ID NO: 6601; WAN024BZA; Start 97; Stop 121
tacaacaaagaaagtgggaagacac

SEQ ID NO: 443698 - DNA, 25 bp, Artificial
  probe
  misc_feature (1)..(25): SEQ ID NO: 6601; WAN024BZA; Start 30; Stop 54
taggaatatgctaggtttaacacaa

SEQ ID NO: 443699 - DNA, 25 bp, Artificial
  probe
  misc_feature (1)..(25): SEQ ID NO: 6601; WAN024BZA; Start 23; Stop 47
gtggatataggaatatgctaggttt

SEQ ID NO: 443700 - DNA, 25 bp, Artificial
  probe
  misc_feature (1)..(25): SEQ ID NO: 6602; WAN024FY7; Start 891; Stop 915
gattatagcgagcggtatcattcta

SEQ ID NO: 443701 - DNA, 25 bp, Artificial
  probe
  misc_feature (1)..(25): SEQ ID NO: 6602; WAN024FY7; Start 101; Stop 125
aagttctaacaacgacagagtatgg

SEQ ID NO: 443702 - DNA, 25 bp, Artificial
  probe
  misc_feature (1)..(25): SEQ ID NO: 6602; WAN024FY7; Start 103; Stop 127
gttctaacaacgacagagtatggtt

SEQ ID NO: 443703 - DNA, 25 bp, Artificial
  probe
  misc_feature (1)..(25): SEQ ID NO: 6602; WAN024FY7; Start 428; Stop 452
taacggctatctctggagtcataag

SEQ ID NO: 443704 - DNA, 25 bp, Artificial
  probe
  misc_feature (1)..(25): SEQ ID NO: 6602; WAN024FY7; Start 427; Stop 451
gtaacggctatctctggagtcataa

SEQ ID NO: 443705 - DNA, 25 bp, Artificial
  probe
  misc_feature (1)..(25): SEQ ID NO: 6602; WAN024FY7; Start 924; Stop 948
accaatctctaatatactcttcgga

SEQ ID NO: 443706 - DNA, 25 bp, Artificial
  probe
  misc_feature (1)..(25): SEQ ID NO: 6602; WAN024FY7; Start 102; Stop 126
agttctaacaacgacagagtatggt

SEQ ID NO: 443707 - DNA, 25 bp, Artificial
  probe
  misc_feature (1)..(25): SEQ ID NO: 6602; WAN024FY7; Start 893; Stop 917
ttatagcgagcggtatcattctatt

SEQ ID NO: 443708 - DNA, 25 bp, Artificial
  probe
  misc_feature (1)..(25): SEQ ID NO: 6602; WAN024FY7; Start 892; Stop 916
attatagcgagcggtatcattctat

SEQ ID NO: 443709 - DNA, 25 bp, Artificial
  probe
  misc_feature (1)..(25): SEQ ID NO: 6602; WAN024FY7; Start 171; Stop 195
cctgacattgaatatatctgaagca

SEQ ID NO: 443710 - DNA, 25 bp, Artificial
  probe
  misc_feature (1)..(25): SEQ ID NO: 6602; WAN024FY7; Start 783; Stop 807
cgctatattcattcaatcgtggcaa

SEQ ID NO: 443711 - DNA, 25 bp, Artificial
  probe
  misc_feature (1)..(25): SEQ ID NO: 6602; WAN024FY7; Start 170; Stop 194
tcctgacattgaatatatctgaagc

SEQ ID NO: 443712 - DNA, 25 bp, Artificial
  probe
  misc_feature (1)..(25): SEQ ID NO: 6602; WAN024FY7; Start 926; Stop 950
caatctctaatatactcttcggagc

SEQ ID NO: 443713 - DNA, 25 bp, Artificial
  probe
  misc_feature (1)..(25): SEQ ID NO: 6602; WAN024FY7; Start 923; Stop 947
aaccaatctctaatatactcttcgg

SEQ ID NO: 443714 - DNA, 25 bp, Artificial
  probe
  misc_feature (1)..(25): SEQ ID NO: 6602; WAN024FY7; Start 426; Stop 450
tgtaacggctatctctggagtcata

SEQ ID NO: 443715 - DNA, 25 bp, Artificial
  probe
  misc_feature (1)..(25): SEQ ID NO: 6602; WAN024FY7; Start 925; Stop 949
ccaatctctaatatactcttcggag

SEQ ID NO: 443716 - DNA, 25 bp, Artificial
  probe
  misc_feature (1)..(25): SEQ ID NO: 6602; WAN024FY7; Start 1061; Stop 1085
atattgctaaatctgctttggttgg

SEQ ID NO: 443717 - DNA, 25 bp, Artificial
  probe
  misc_feature (1)..(25): SEQ ID NO: 6602; WAN024FY7; Start 790; Stop 814
ttcattcaatcgtggcaaatatctg

SEQ ID NO: 443718 - DNA, 25 bp, Artificial
  probe
  misc_feature (1)..(25): SEQ ID NO: 6602; WAN024FY7; Start 784; Stop 808
gctatattcattcaatcgtggcaaa

SEQ ID NO: 443719 - DNA, 25 bp, Artificial
  probe
  misc_feature (1)..(25): SEQ ID NO: 6602; WAN024FY7; Start 536; Stop 560
gtgggtatgtcattccttgtgtata

SEQ ID NO: 443720 - DNA, 25 bp, Artificial
  probe
  misc_feature (1)..(25): SEQ ID NO: 6602; WAN024FY7; Start 531; Stop 555
tatttgtgggtatgtcattccttgt

SEQ ID NO: 443721 - DNA, 25 bp, Artificial
  probe
  misc_feature (1)..(25): SEQ ID NO: 6602; WAN024FY7; Start 1069; Stop 1093
aaatctgctttggttggaatgatag

SEQ ID NO: 443722 - DNA, 25 bp, Artificial
  probe
  misc_feature (1)..(25): SEQ ID NO: 6602; WAN024FY7; Start 1067; Stop 1091
ctaaatctgctttggttggaatgat

SEQ ID NO: 443723 - DNA, 25 bp, Artificial
  probe
  misc_feature (1)..(25): SEQ ID NO: 6602; WAN024FY7; Start 899; Stop 923
cgagcggtatcattctatttgtaaa

SEQ ID NO: 443724 - DNA, 25 bp, Artificial
  probe
  misc_feature (1)..(25): SEQ ID NO: 6602; WAN024FY7; Start 789; Stop 813
attcattcaatcgtggcaaatatct

SEQ ID NO: 443725 - DNA, 25 bp, Artificial
  probe
  misc_feature (1)..(25): SEQ ID NO: 6602; WAN024FY7; Start 429; Stop 453
aacggctatctctggagtcataagt

SEQ ID NO: 443726 - DNA, 25 bp, Artificial
  probe
  misc_feature (1)..(25): SEQ ID NO: 6602; WAN024FY7; Start 1195; Stop 1219
gatagtgttgaagaaattgctccag

SEQ ID NO: 443727 - DNA, 25 bp, Artificial
  probe
  misc_feature (1)..(25): SEQ ID NO: 6602; WAN024FY7; Start 930; Stop 954
ctctaatatactcttcggagcttca

SEQ ID NO: 443728 - DNA, 25 bp, Artificial
  probe
  misc_feature (1)..(25): SEQ ID NO: 6602; WAN024FY7; Start 717; Stop 741
aggtatacaagctagtgcgattatt

SEQ ID NO: 443729 - DNA, 25 bp, Artificial
  probe
  misc_feature (1)..(25): SEQ ID NO: 6602; WAN024FY7; Start 537; Stop 561
tgggtatgtcattccttgtgtatat

SEQ ID NO: 443730 - DNA, 25 bp, Artificial
  probe
  misc_feature (1)..(25): SEQ ID NO: 6602; WAN024FY7; Start 1196; Stop 1220
atagtgttgaagaaattgctccaga

SEQ ID NO: 443731 - DNA, 25 bp, Artificial
  probe
  misc_feature (1)..(25): SEQ ID NO: 6602; WAN024FY7; Start 1194; Stop 1218
agatagtgttgaagaaattgctcca

SEQ ID NO: 443732 - DNA, 25 bp, Artificial
  probe
  misc_feature (1)..(25): SEQ ID NO: 6602; WAN024FY7; Start 1193; Stop 1217
aagatagtgttgaagaaattgctcc

SEQ ID NO: 443733 - DNA, 25 bp, Artificial
  probe
  misc_feature (1)..(25): SEQ ID NO: 6603; WAN024BP8; Start 717; Stop 741
ggatggcgattctatattaacttgt

SEQ ID NO: 443734 - DNA, 25 bp, Artificial
  probe
  misc_feature (1)..(25): SEQ ID NO: 6603; WAN024BP8; Start 720; Stop 744
tggcgattctatattaacttgttca

SEQ ID NO: 443735 - DNA, 25 bp, Artificial
  probe
  misc_feature (1)..(25): SEQ ID NO: 6603; WAN024BP8; Start 722; Stop 746
gcgattctatattaacttgttcagg

SEQ ID NO: 443736 - DNA, 25 bp, Artificial
  probe
  misc_feature (1)..(25): SEQ ID NO: 6603; WAN024BP8; Start 721; Stop 745
ggcgattctatattaacttgttcag

SEQ ID NO: 443737 - DNA, 25 bp, Artificial
  probe
  misc_feature (1)..(25): SEQ ID NO: 6603; WAN024BP8; Start 918; Stop 942
tatgactgaagagcaatatgagatt

SEQ ID NO: 443738 - DNA, 25 bp, Artificial
  probe
  misc_feature (1)..(25): SEQ ID NO: 6603; WAN024BP8; Start 916; Stop 940
aatatgactgaagagcaatatgaga

SEQ ID NO: 443739 - DNA, 25 bp, Artificial
  probe
  misc_feature (1)..(25): SEQ ID NO: 6603; WAN024BP8; Start 917; Stop 941
atatgactgaagagcaatatgagat

SEQ ID NO: 443740 - DNA, 25 bp, Artificial
  probe
  misc_feature (1)..(25): SEQ ID NO: 6603; WAN024BP8; Start 719; Stop 743
atggcgattctatattaacttgttc

SEQ ID NO: 443741 - DNA, 25 bp, Artificial
  probe
  misc_feature (1)..(25): SEQ ID NO: 6603; WAN024BP8; Start 718; Stop 742
gatggcgattctatattaacttgtt

SEQ ID NO: 443742 - DNA, 25 bp, Artificial
  probe
  misc_feature (1)..(25): SEQ ID NO: 6603; WAN024BP8; Start 708; Stop 732
attagtttgggatggcgattctata

SEQ ID NO: 443743 - DNA, 25 bp, Artificial
  probe
  misc_feature (1)..(25): SEQ ID NO: 6603; WAN024BP8; Start 711; Stop 735
agtttgggatggcgattctatatta

SEQ ID NO: 443744 - DNA, 25 bp, Artificial
  probe
  misc_feature (1)..(25): SEQ ID NO: 6603; WAN024BP8; Start 710; Stop 734
tagtttgggatggcgattctatatt

SEQ ID NO: 443745 - DNA, 25 bp, Artificial
  probe
  misc_feature (1)..(25): SEQ ID NO: 6603; WAN024BP8; Start 709; Stop 733
ttagtttgggatggcgattctatat

SEQ ID NO: 443746 - DNA, 25 bp, Artificial
  probe
  misc_feature (1)..(25): SEQ ID NO: 6603; WAN024BP8; Start 715; Stop 739
tgggatggcgattctatattaactt

SEQ ID NO: 443747 - DNA, 25 bp, Artificial
  probe
  misc_feature (1)..(25): SEQ ID NO: 6603; WAN024BP8; Start 714; Stop 738
ttgggatggcgattctatattaact

SEQ ID NO: 443748 - DNA, 25 bp, Artificial
  probe
  misc_feature (1)..(25): SEQ ID NO: 6603; WAN024BP8; Start 707; Stop 731
gattagtttgggatggcgattctat

SEQ ID NO: 443749 - DNA, 25 bp, Artificial
  probe
  misc_feature (1)..(25): SEQ ID NO: 6603; WAN024BP8; Start 309; Stop 333
agagtcgttaagatattcgggaaat

SEQ ID NO: 443750 - DNA, 25 bp, Artificial
  probe
  misc_feature (1)..(25): SEQ ID NO: 6603; WAN024BP8; Start 716; Stop 740
gggatggcgattctatattaacttg

SEQ ID NO: 443751 - DNA, 25 bp, Artificial
  probe
  misc_feature (1)..(25): SEQ ID NO: 6603; WAN024BP8; Start 308; Stop 332
tagagtcgttaagatattcgggaaa

SEQ ID NO: 443752 - DNA, 25 bp, Artificial
  probe
  misc_feature (1)..(25): SEQ ID NO: 6603; WAN024BP8; Start 307; Stop 331
ttagagtcgttaagatattcgggaa

SEQ ID NO: 443753 - DNA, 25 bp, Artificial
  probe
  misc_feature (1)..(25): SEQ ID NO: 6603; WAN024BP8; Start 306; Stop 330
tttagagtcgttaagatattcggga

SEQ ID NO: 443754 - DNA, 25 bp, Artificial
  probe
  misc_feature (1)..(25): SEQ ID NO: 6603; WAN024BP8; Start 713; Stop 737
tttgggatggcgattctatattaac

SEQ ID NO: 443755 - DNA, 25 bp, Artificial
  probe
  misc_feature (1)..(25): SEQ ID NO: 6603; WAN024BP8; Start 712; Stop 736
gtttgggatggcgattctatattaa

SEQ ID NO: 443756 - DNA, 25 bp, Artificial
  probe
  misc_feature (1)..(25): SEQ ID NO: 6603; WAN024BP8; Start 821; Stop 845
ttatttggaaacaatctgccttgag

SEQ ID NO: 443757 - DNA, 25 bp, Artificial
  probe
  misc_feature (1)..(25): SEQ ID NO: 6603; WAN024BP8; Start 820; Stop 844
attatttggaaacaatctgccttga

SEQ ID NO: 443758 - DNA, 25 bp, Artificial
  probe
  misc_feature (1)..(25): SEQ ID NO: 6603; WAN024BP8; Start 822; Stop 846
tatttggaaacaatctgccttgagt

SEQ ID NO: 443759 - DNA, 25 bp, Artificial
  probe
  misc_feature (1)..(25): SEQ ID NO: 6603; WAN024BP8; Start 919; Stop 943
atgactgaagagcaatatgagattt

SEQ ID NO: 443760 - DNA, 25 bp, Artificial
  probe
  misc_feature (1)..(25): SEQ ID NO: 6603; WAN024BP8; Start 378; Stop 402
tgtgattatttgtcataaccaacga

SEQ ID NO: 443761 - DNA, 25 bp, Artificial
  probe
  misc_feature (1)..(25): SEQ ID NO: 6603; WAN024BP8; Start 305; Stop 329
atttagagtcgttaagatattcggg

SEQ ID NO: 443762 - DNA, 25 bp, Artificial
  probe
  misc_feature (1)..(25): SEQ ID NO: 6603; WAN024BP8; Start 373; Stop 397
gctgatgtgattatttgtcataacc

SEQ ID NO: 443763 - DNA, 25 bp, Artificial
  probe
  misc_feature (1)..(25): SEQ ID NO: 6603; WAN024BP8; Start 310; Stop 334
gagtcgttaagatattcgggaaata

SEQ ID NO: 443764 - DNA, 25 bp, Artificial
  probe
  misc_feature (1)..(25): SEQ ID NO: 6603; WAN024BP8; Start 732; Stop 756
attaacttgttcagggattactggg

SEQ ID NO: 443765 - DNA, 25 bp, Artificial
  probe
  misc_feature (1)..(25): SEQ ID NO: 6603; WAN024BP8; Start 913; Stop 937
actaatatgactgaagagcaatatg

SEQ ID NO: 443766 - DNA, 25 bp, Artificial
  probe
  misc_feature (1)..(25): SEQ ID NO: 6604; WAN024BQF; Start 483; Stop 507
cattgattcagttgctcgcataatt

SEQ ID NO: 443767 - DNA, 25 bp, Artificial
  probe
  misc_feature (1)..(25): SEQ ID NO: 6604; WAN024BQF; Start 117; Stop 141
acaatatgtcggtattagtggactt

SEQ ID NO: 443768 - DNA, 25 bp, Artificial
  probe
  misc_feature (1)..(25): SEQ ID NO: 6604; WAN024BQF; Start 482; Stop 506
acattgattcagttgctcgcataat

SEQ ID NO: 443769 - DNA, 25 bp, Artificial
  probe
  misc_feature (1)..(25): SEQ ID NO: 6604; WAN024BQF; Start 861; Stop 885
tagtgttggacatagtgttgctact

SEQ ID NO: 443770 - DNA, 25 bp, Artificial
  probe
  misc_feature (1)..(25): SEQ ID NO: 6604; WAN024BQF; Start 116; Stop 140
tacaatatgtcggtattagtggact

SEQ ID NO: 443771 - DNA, 25 bp, Artificial
  probe
  misc_feature (1)..(25): SEQ ID NO: 6604; WAN024BQF; Start 860; Stop 884
ctagtgttggacatagtgttgctac

SEQ ID NO: 443772 - DNA, 25 bp, Artificial
  probe
  misc_feature (1)..(25): SEQ ID NO: 6604; WAN024BQF; Start 851; Stop 875
gaatgagtgctagtgttggacatag

SEQ ID NO: 443773 - DNA, 25 bp, Artificial
  probe
  misc_feature (1)..(25): SEQ ID NO: 6604; WAN024BQF; Start 843; Stop 867
ttctacaggaatgagtgctagtgtt

SEQ ID NO: 443774 - DNA, 25 bp, Artificial
  probe
  misc_feature (1)..(25): SEQ ID NO: 6604; WAN024BQF; Start 113; Stop 137
ggatacaatatgtcggtattagtgg

SEQ ID NO: 443775 - DNA, 25 bp, Artificial
  probe
  misc_feature (1)..(25): SEQ ID NO: 6604; WAN024BQF; Start 481; Stop 505
aacattgattcagttgctcgcataa

SEQ ID NO: 443776 - DNA, 25 bp, Artificial
  probe
  misc_feature (1)..(25): SEQ ID NO: 6604; WAN024BQF; Start 852; Stop 876
aatgagtgctagtgttggacatagt

SEQ ID NO: 443777 - DNA, 25 bp, Artificial
  probe
  misc_feature (1)..(25): SEQ ID NO: 6604; WAN024BQF; Start 923; Stop 947
ttacatttggtttctcttggttagc

SEQ ID NO: 443778 - DNA, 25 bp, Artificial
  probe
  misc_feature (1)..(25): SEQ ID NO: 6604; WAN024BQF; Start 864; Stop 888
tgttggacatagtgttgctactgaa

SEQ ID NO: 443779 - DNA, 25 bp, Artificial
  probe
  misc_feature (1)..(25): SEQ ID NO: 6604; WAN024BQF; Start 844; Stop 868
tctacaggaatgagtgctagtgttg

SEQ ID NO: 443780 - DNA, 25 bp, Artificial
  probe
  misc_feature (1)..(25): SEQ ID NO: 6604; WAN024BQF; Start 1073; Stop 1097
caggtgatatgcggagccaatatat

SEQ ID NO: 443781 - DNA, 25 bp, Artificial
  probe
  misc_feature (1)..(25): SEQ ID NO: 6604; WAN024BQF; Start 769; Stop 793
gggattacgacagtgggaatttata

SEQ ID NO: 443782 - DNA, 25 bp, Artificial
  probe
  misc_feature (1)..(25): SEQ ID NO: 6604; WAN024BQF; Start 970; Stop 994
ttatgtctgttccaaccatttatgc

SEQ ID NO: 443783 - DNA, 25 bp, Artificial
  probe
  misc_feature (1)..(25): SEQ ID NO: 6604; WAN024BQF; Start 203; Stop 227
atagtatgtataaacctcttgccca

SEQ ID NO: 443784 - DNA, 25 bp, Artificial
  probe
  misc_feature (1)..(25): SEQ ID NO: 6604; WAN024BQF; Start 971; Stop 995
tatgtctgttccaaccatttatgct

SEQ ID NO: 443785 - DNA, 25 bp, Artificial
  probe
  misc_feature (1)..(25): SEQ ID NO: 6604; WAN024BQF; Start 115; Stop 139
atacaatatgtcggtattagtggac

SEQ ID NO: 443786 - DNA, 25 bp, Artificial
  probe
  misc_feature (1)..(25): SEQ ID NO: 6604; WAN024BQF; Start 920; Stop 944
atcttacatttggtttctcttggtt

SEQ ID NO: 443787 - DNA, 25 bp, Artificial
  probe
  misc_feature (1)..(25): SEQ ID NO: 6604; WAN024BQF; Start 919; Stop 943
aatcttacatttggtttctcttggt

SEQ ID NO: 443788 - DNA, 25 bp, Artificial
  probe
  misc_feature (1)..(25): SEQ ID NO: 6604; WAN024BQF; Start 57; Stop 81
gcttattgcgattgctttaccattt

SEQ ID NO: 443789 - DNA, 25 bp, Artificial
  probe
  misc_feature (1)..(25): SEQ ID NO: 6604; WAN024BQF; Start 770; Stop 794
ggattacgacagtgggaatttatag

SEQ ID NO: 443790 - DNA, 25 bp, Artificial
  probe
  misc_feature (1)..(25): SEQ ID NO: 6604; WAN024BQF; Start 767; Stop 791
tagggattacgacagtgggaattta

SEQ ID NO: 443791 - DNA, 25 bp, Artificial
  probe
  misc_feature (1)..(25): SEQ ID NO: 6604; WAN024BQF; Start 853; Stop 877
atgagtgctagtgttggacatagtg

SEQ ID NO: 443792 - DNA, 25 bp, Artificial
  probe
  misc_feature (1)..(25): SEQ ID NO: 6604; WAN024BQF; Start 850; Stop 874
ggaatgagtgctagtgttggacata

SEQ ID NO: 443793 - DNA, 25 bp, Artificial
  probe
  misc_feature (1)..(25): SEQ ID NO: 6604; WAN024BQF; Start 204; Stop 228
tagtatgtataaacctcttgcccat

SEQ ID NO: 443794 - DNA, 25 bp, Artificial
  probe
  misc_feature (1)..(25): SEQ ID NO: 6604; WAN024BQF; Start 973; Stop 997
tgtctgttccaaccatttatgcttt

SEQ ID NO: 443795 - DNA, 25 bp, Artificial
  probe
  misc_feature (1)..(25): SEQ ID NO: 6604; WAN024BQF; Start 114; Stop 138
gatacaatatgtcggtattagtgga

SEQ ID NO: 443796 - DNA, 25 bp, Artificial
  probe
  misc_feature (1)..(25): SEQ ID NO: 6604; WAN024BQF; Start 560; Stop 584
ttgctttagtaattccctgtatgac

SEQ ID NO: 443797 - DNA, 25 bp, Artificial
  probe
  misc_feature (1)..(25): SEQ ID NO: 6604; WAN024BQF; Start 972; Stop 996
atgtctgttccaaccatttatgctt

SEQ ID NO: 443798 - DNA, 25 bp, Artificial
  probe
  misc_feature (1)..(25): SEQ ID NO: 6604; WAN024BQF; Start 872; Stop 896
atagtgttgctactgaaagtgttga

SEQ ID NO: 443799 - DNA, 25 bp, Artificial
  probe
  misc_feature (1)..(25): SEQ ID NO: 6605; WAN024C2L; Start 75; Stop 99
cgttaattgtaattgtatgcgttcc

SEQ ID NO: 443800 - DNA, 25 bp, Artificial
  probe
  misc_feature (1)..(25): SEQ ID NO: 6605; WAN024C2L; Start 81; Stop 105
ttgtaattgtatgcgttccatcttg

SEQ ID NO: 443801 - DNA, 25 bp, Artificial
  probe
  misc_feature (1)..(25): SEQ ID NO: 6605; WAN024C2L; Start 83; Stop 107
gtaattgtatgcgttccatcttgac

SEQ ID NO: 443802 - DNA, 25 bp, Artificial
  probe
  misc_feature (1)..(25): SEQ ID NO: 6605; WAN024C2L; Start 80; Stop 104
attgtaattgtatgcgttccatctt

SEQ ID NO: 443803 - DNA, 25 bp, Artificial
  probe
  misc_feature (1)..(25): SEQ ID NO: 6605; WAN024C2L; Start 79; Stop 103
aattgtaattgtatgcgttccatct

SEQ ID NO: 443804 - DNA, 25 bp, Artificial
  probe
  misc_feature (1)..(25): SEQ ID NO: 6605; WAN024C2L; Start 71; Stop 95
ccatcgttaattgtaattgtatgcg

SEQ ID NO: 443805 - DNA, 25 bp, Artificial
  probe
  misc_feature (1)..(25): SEQ ID NO: 6605; WAN024C2L; Start 82; Stop 106
tgtaattgtatgcgttccatcttga

SEQ ID NO: 443806 - DNA, 25 bp, Artificial
  probe
  misc_feature (1)..(25): SEQ ID NO: 6605; WAN024C2L; Start 74; Stop 98
tcgttaattgtaattgtatgcgttc

SEQ ID NO: 443807 - DNA, 25 bp, Artificial
  probe
  misc_feature (1)..(25): SEQ ID NO: 6605; WAN024C2L; Start 95; Stop 119
gttccatcttgaccatcagttactt

SEQ ID NO: 443808 - DNA, 25 bp, Artificial
  probe
  misc_feature (1)..(25): SEQ ID NO: 6605; WAN024C2L; Start 76; Stop 100
gttaattgtaattgtatgcgttcca

SEQ ID NO: 443809 - DNA, 25 bp, Artificial
  probe
  misc_feature (1)..(25): SEQ ID NO: 6605; WAN024C2L; Start 72; Stop 96
catcgttaattgtaattgtatgcgt

SEQ ID NO: 443810 - DNA, 25 bp, Artificial
  probe
  misc_feature (1)..(25): SEQ ID NO: 6605; WAN024C2L; Start 84; Stop 108
taattgtatgcgttccatcttgacc

SEQ ID NO: 443811 - DNA, 25 bp, Artificial
  probe
  misc_feature (1)..(25): SEQ ID NO: 6605; WAN024C2L; Start 70; Stop 94
accatcgttaattgtaattgtatgc

SEQ ID NO: 443812 - DNA, 25 bp, Artificial
  probe
  misc_feature (1)..(25): SEQ ID NO: 6605; WAN024C2L; Start 73; Stop 97
atcgttaattgtaattgtatgcgtt

SEQ ID NO: 443813 - DNA, 25 bp, Artificial
  probe
  misc_feature (1)..(25): SEQ ID NO: 6605; WAN024C2L; Start 78; Stop 102
taattgtaattgtatgcgttccatc

SEQ ID NO: 443814 - DNA, 25 bp, Artificial
  probe
  misc_feature (1)..(25): SEQ ID NO: 6605; WAN024C2L; Start 77; Stop 101
ttaattgtaattgtatgcgttccat

SEQ ID NO: 443815 - DNA, 25 bp, Artificial
  probe
  misc_feature (1)..(25): SEQ ID NO: 6605; WAN024C2L; Start 53; Stop 77
gtagttataccacctttaccatcgt

SEQ ID NO: 443816 - DNA, 25 bp, Artificial
  probe
  misc_feature (1)..(25): SEQ ID NO: 6605; WAN024C2L; Start 23; Stop 47
gcaccatcaaatccatctcttacta

SEQ ID NO: 443817 - DNA, 25 bp, Artificial
  probe
  misc_feature (1)..(25): SEQ ID NO: 6605; WAN024C2L; Start 52; Stop 76
agtagttataccacctttaccatcg

SEQ ID NO: 443818 - DNA, 25 bp, Artificial
  probe
  misc_feature (1)..(25): SEQ ID NO: 6605; WAN024C2L; Start 94; Stop 118
cgttccatcttgaccatcagttact

SEQ ID NO: 443819 - DNA, 25 bp, Artificial
  probe
  misc_feature (1)..(25): SEQ ID NO: 6605; WAN024C2L; Start 55; Stop 79
agttataccacctttaccatcgtta

SEQ ID NO: 443820 - DNA, 25 bp, Artificial
  probe
  misc_feature (1)..(25): SEQ ID NO: 6605; WAN024C2L; Start 54; Stop 78
tagttataccacctttaccatcgtt

SEQ ID NO: 443821 - DNA, 25 bp, Artificial
  probe
  misc_feature (1)..(25): SEQ ID NO: 6605; WAN024C2L; Start 60; Stop 84
taccacctttaccatcgttaattgt

SEQ ID NO: 443822 - DNA, 25 bp, Artificial
  probe
  misc_feature (1)..(25): SEQ ID NO: 6605; WAN024C2L; Start 86; Stop 110
attgtatgcgttccatcttgaccat

SEQ ID NO: 443823 - DNA, 25 bp, Artificial
  probe
  misc_feature (1)..(25): SEQ ID NO: 6605; WAN024C2L; Start 61; Stop 85
accacctttaccatcgttaattgta

SEQ ID NO: 443824 - DNA, 25 bp, Artificial
  probe
  misc_feature (1)..(25): SEQ ID NO: 6605; WAN024C2L; Start 24; Stop 48
caccatcaaatccatctcttactac

SEQ ID NO: 443825 - DNA, 25 bp, Artificial
  probe
  misc_feature (1)..(25): SEQ ID NO: 6605; WAN024C2L; Start 25; Stop 49
accatcaaatccatctcttactact

SEQ ID NO: 443826 - DNA, 25 bp, Artificial
  probe
  misc_feature (1)..(25): SEQ ID NO: 6605; WAN024C2L; Start 26; Stop 50
ccatcaaatccatctcttactactg

SEQ ID NO: 443827 - DNA, 25 bp, Artificial
  probe
  misc_feature (1)..(25): SEQ ID NO: 6605; WAN024C2L; Start 59; Stop 83
ataccacctttaccatcgttaattg

SEQ ID NO: 443828 - DNA, 25 bp, Artificial
  probe
  misc_feature (1)..(25): SEQ ID NO: 6605; WAN024C2L; Start 96; Stop 120
ttccatcttgaccatcagttacttt

SEQ ID NO: 443829 - DNA, 25 bp, Artificial
  probe
  misc_feature (1)..(25): SEQ ID NO: 6605; WAN024C2L; Start 56; Stop 80
gttataccacctttaccatcgttaa

SEQ ID NO: 443830 - DNA, 25 bp, Artificial
  probe
  misc_feature (1)..(25): SEQ ID NO: 6605; WAN024C2L; Start 97; Stop 121
tccatcttgaccatcagttacttta

SEQ ID NO: 443831 - DNA, 25 bp, Artificial
  probe
  misc_feature (1)..(25): SEQ ID NO: 6605; WAN024C2L; Start 85; Stop 109
aattgtatgcgttccatcttgacca

SEQ ID NO: 443832 - DNA, 25 bp, Artificial
  probe
  misc_feature (1)..(25): SEQ ID NO: 6607; WAN024BQN; Start 779; Stop 803
taacaggtagattacgacttggaag

SEQ ID NO: 443833 - DNA, 25 bp, Artificial
  probe
  misc_feature (1)..(25): SEQ ID NO: 6607; WAN024BQN; Start 778; Stop 802
ttaacaggtagattacgacttggaa

SEQ ID NO: 443834 - DNA, 25 bp, Artificial
  probe
  misc_feature (1)..(25): SEQ ID NO: 6607; WAN024BQN; Start 777; Stop 801
attaacaggtagattacgacttgga

SEQ ID NO: 443835 - DNA, 25 bp, Artificial
  probe
  misc_feature (1)..(25): SEQ ID NO: 6607; WAN024BQN; Start 100; Stop 124
gcatatcctctgttaagtgaattga

SEQ ID NO: 443836 - DNA, 25 bp, Artificial
  probe
  misc_feature (1)..(25): SEQ ID NO: 6607; WAN024BQN; Start 776; Stop 800
tattaacaggtagattacgacttgg

SEQ ID NO: 443837 - DNA, 25 bp, Artificial
  probe
  misc_feature (1)..(25): SEQ ID NO: 6607; WAN024BQN; Start 1064; Stop 1088
tagacatagtgtataatccagcgat

SEQ ID NO: 443838 - DNA, 25 bp, Artificial
  probe
  misc_feature (1)..(25): SEQ ID NO: 6607; WAN024BQN; Start 1063; Stop 1087
atagacatagtgtataatccagcga

SEQ ID NO: 443839 - DNA, 25 bp, Artificial
  probe
  misc_feature (1)..(25): SEQ ID NO: 6607; WAN024BQN; Start 604; Stop 628
ttctactactctacagcagctattg

SEQ ID NO: 443840 - DNA, 25 bp, Artificial
  probe
  misc_feature (1)..(25): SEQ ID NO: 6607; WAN024BQN; Start 780; Stop 804
aacaggtagattacgacttggaagt

SEQ ID NO: 443841 - DNA, 25 bp, Artificial
  probe
  misc_feature (1)..(25): SEQ ID NO: 6607; WAN024BQN; Start 727; Stop 751
tcatggagttatcggtatagactac

SEQ ID NO: 443842 - DNA, 25 bp, Artificial
  probe
  misc_feature (1)..(25): SEQ ID NO: 6607; WAN024BQN; Start 725; Stop 749
tgtcatggagttatcggtatagact

SEQ ID NO: 443843 - DNA, 25 bp, Artificial
  probe
  misc_feature (1)..(25): SEQ ID NO: 6607; WAN024BQN; Start 724; Stop 748
ttgtcatggagttatcggtatagac

SEQ ID NO: 443844 - DNA, 25 bp, Artificial
  probe
  misc_feature (1)..(25): SEQ ID NO: 6607; WAN024BQN; Start 599; Stop 623
cagtattctactactctacagcagc

SEQ ID NO: 443845 - DNA, 25 bp, Artificial
  probe
  misc_feature (1)..(25): SEQ ID NO: 6607; WAN024BQN; Start 598; Stop 622
gcagtattctactactctacagcag

SEQ ID NO: 443846 - DNA, 25 bp, Artificial
  probe
  misc_feature (1)..(25): SEQ ID NO: 6607; WAN024BQN; Start 1062; Stop 1086
aatagacatagtgtataatccagcg

SEQ ID NO: 443847 - DNA, 25 bp, Artificial
  probe
  misc_feature (1)..(25): SEQ ID NO: 6607; WAN024BQN; Start 1065; Stop 1089
agacatagtgtataatccagcgatt

SEQ ID NO: 443848 - DNA, 25 bp, Artificial
  probe
  misc_feature (1)..(25): SEQ ID NO: 6607; WAN024BQN; Start 601; Stop 625
gtattctactactctacagcagcta

SEQ ID NO: 443849 - DNA, 25 bp, Artificial
  probe
  misc_feature (1)..(25): SEQ ID NO: 6607; WAN024BQN; Start 603; Stop 627
attctactactctacagcagctatt

SEQ ID NO: 443850 - DNA, 25 bp, Artificial
  probe
  misc_feature (1)..(25): SEQ ID NO: 6607; WAN024BQN; Start 726; Stop 750
gtcatggagttatcggtatagacta

SEQ ID NO: 443851 - DNA, 25 bp, Artificial
  probe
  misc_feature (1)..(25): SEQ ID NO: 6607; WAN024BQN; Start 597; Stop 621
ggcagtattctactactctacagca

SEQ ID NO: 443852 - DNA, 25 bp, Artificial
  probe
  misc_feature (1)..(25): SEQ ID NO: 6607; WAN024BQN; Start 575; Stop 599
tatatgctttaactgatacgagggc

SEQ ID NO: 443853 - DNA, 25 bp, Artificial
  probe
  misc_feature (1)..(25): SEQ ID NO: 6607; WAN024BQN; Start 781; Stop 805
acaggtagattacgacttggaagtg

SEQ ID NO: 443854 - DNA, 25 bp, Artificial
  probe
  misc_feature (1)..(25): SEQ ID NO: 6607; WAN024BQN; Start 99; Stop 123
tgcatatcctctgttaagtgaattg

SEQ ID NO: 443855 - DNA, 25 bp, Artificial
  probe
  misc_feature (1)..(25): SEQ ID NO: 6607; WAN024BQN; Start 606; Stop 630
ctactactctacagcagctattgtt

SEQ ID NO: 443856 - DNA, 25 bp, Artificial
  probe
  misc_feature (1)..(25): SEQ ID NO: 6607; WAN024BQN; Start 605; Stop 629
tctactactctacagcagctattgt

SEQ ID NO: 443857 - DNA, 25 bp, Artificial
  probe
  misc_feature (1)..(25): SEQ ID NO: 6607; WAN024BQN; Start 608; Stop 632
actactctacagcagctattgttat

SEQ ID NO: 443858 - DNA, 25 bp, Artificial
  probe
  misc_feature (1)..(25): SEQ ID NO: 6607; WAN024BQN; Start 574; Stop 598
ctatatgctttaactgatacgaggg

SEQ ID NO: 443859 - DNA, 25 bp, Artificial
  probe
  misc_feature (1)..(25): SEQ ID NO: 6607; WAN024BQN; Start 602; Stop 626
tattctactactctacagcagctat

SEQ ID NO: 443860 - DNA, 25 bp, Artificial
  probe
  misc_feature (1)..(25): SEQ ID NO: 6607; WAN024BQN; Start 607; Stop 631
tactactctacagcagctattgtta

SEQ ID NO: 443861 - DNA, 25 bp, Artificial
  probe
  misc_feature (1)..(25): SEQ ID NO: 6607; WAN024BQN; Start 411; Stop 435
ctcagcaattagatcagatgggaaa

SEQ ID NO: 443862 - DNA, 25 bp, Artificial
  probe
  misc_feature (1)..(25): SEQ ID NO: 6607; WAN024BQN; Start 408; Stop 432
aaactcagcaattagatcagatggg

SEQ ID NO: 443863 - DNA, 25 bp, Artificial
  probe
  misc_feature (1)..(25): SEQ ID NO: 6607; WAN024BQN; Start 1023; Stop 1047
tgtgttcttatcactacattctaca

SEQ ID NO: 443864 - DNA, 25 bp, Artificial
  probe
  misc_feature (1)..(25): SEQ ID NO: 6607; WAN024BQN; Start 600; Stop 624
agtattctactactctacagcagct

SEQ ID NO: 443865 - DNA, 25 bp, Artificial
  probe
  misc_feature (1)..(25): SEQ ID NO: 6608; WAN024BYO; Start 192; Stop 216
cttgcttgttattcgtaggtattcg

SEQ ID NO: 443866 - DNA, 25 bp, Artificial
  probe
  misc_feature (1)..(25): SEQ ID NO: 6608; WAN024BYO; Start 595; Stop 619
acattcgctactacaaccacttata

SEQ ID NO: 443867 - DNA, 25 bp, Artificial
  probe
  misc_feature (1)..(25): SEQ ID NO: 6608; WAN024BYO; Start 1055; Stop 1079
aaggtaaggatagtattatggcagg

SEQ ID NO: 443868 - DNA, 25 bp, Artificial
  probe
  misc_feature (1)..(25): SEQ ID NO: 6608; WAN024BYO; Start 1059; Stop 1083
taaggatagtattatggcaggcgta

SEQ ID NO: 443869 - DNA, 25 bp, Artificial
  probe
  misc_feature (1)..(25): SEQ ID NO: 6608; WAN024BYO; Start 191; Stop 215
acttgcttgttattcgtaggtattc

SEQ ID NO: 443870 - DNA, 25 bp, Artificial
  probe
  misc_feature (1)..(25): SEQ ID NO: 6608; WAN024BYO; Start 594; Stop 618
cacattcgctactacaaccacttat

SEQ ID NO: 443871 - DNA, 25 bp, Artificial
  probe
  misc_feature (1)..(25): SEQ ID NO: 6608; WAN024BYO; Start 765; Stop 789
cgataaggatgaattgctacgagat

SEQ ID NO: 443872 - DNA, 25 bp, Artificial
  probe
  misc_feature (1)..(25): SEQ ID NO: 6608; WAN024BYO; Start 1060; Stop 1084
aaggatagtattatggcaggcgtat

SEQ ID NO: 443873 - DNA, 25 bp, Artificial
  probe
  misc_feature (1)..(25): SEQ ID NO: 6608; WAN024BYO; Start 1056; Stop 1080
aggtaaggatagtattatggcaggc

SEQ ID NO: 443874 - DNA, 25 bp, Artificial
  probe
  misc_feature (1)..(25): SEQ ID NO: 6608; WAN024BYO; Start 189; Stop 213
caacttgcttgttattcgtaggtat

SEQ ID NO: 443875 - DNA, 25 bp, Artificial
  probe
  misc_feature (1)..(25): SEQ ID NO: 6608; WAN024BYO; Start 766; Stop 790
gataaggatgaattgctacgagatt

SEQ ID NO: 443876 - DNA, 25 bp, Artificial
  probe
  misc_feature (1)..(25): SEQ ID NO: 6608; WAN024BYO; Start 190; Stop 214
aacttgcttgttattcgtaggtatt

SEQ ID NO: 443877 - DNA, 25 bp, Artificial
  probe
  misc_feature (1)..(25): SEQ ID NO: 6608; WAN024BYO; Start 188; Stop 212
ccaacttgcttgttattcgtaggta

SEQ ID NO: 443878 - DNA, 25 bp, Artificial
  probe
  misc_feature (1)..(25): SEQ ID NO: 6608; WAN024BYO; Start 1058; Stop 1082
gtaaggatagtattatggcaggcgt

SEQ ID NO: 443879 - DNA, 25 bp, Artificial
  probe
  misc_feature (1)..(25): SEQ ID NO: 6608; WAN024BYO; Start 593; Stop 617
acacattcgctactacaaccactta

SEQ ID NO: 443880 - DNA, 25 bp, Artificial
  probe
  misc_feature (1)..(25): SEQ ID NO: 6608; WAN024BYO; Start 596; Stop 620
cattcgctactacaaccacttataa

SEQ ID NO: 443881 - DNA, 25 bp, Artificial
  probe
  misc_feature (1)..(25): SEQ ID NO: 6608; WAN024BYO; Start 1061; Stop 1085
aggatagtattatggcaggcgtatc

SEQ ID NO: 443882 - DNA, 25 bp, Artificial
  probe
  misc_feature (1)..(25): SEQ ID NO: 6608; WAN024BYO; Start 1057; Stop 1081
ggtaaggatagtattatggcaggcg

SEQ ID NO: 443883 - DNA, 25 bp, Artificial
  probe
  misc_feature (1)..(25): SEQ ID NO: 6608; WAN024BYO; Start 1013; Stop 1037
tcaggtcagaacatggcatatctag

SEQ ID NO: 443884 - DNA, 25 bp, Artificial
  probe
  misc_feature (1)..(25): SEQ ID NO: 6608; WAN024BYO; Start 1012; Stop 1036
ctcaggtcagaacatggcatatcta

SEQ ID NO: 443885 - DNA, 25 bp, Artificial
  probe
  misc_feature (1)..(25): SEQ ID NO: 6608; WAN024BYO; Start 793; Stop 817
gctaataagttatgtatcggtcttg

SEQ ID NO: 443886 - DNA, 25 bp, Artificial
  probe
  misc_feature (1)..(25): SEQ ID NO: 6608; WAN024BYO; Start 27; Stop 51
aagtgatattgtaatcgacctacct

SEQ ID NO: 443887 - DNA, 25 bp, Artificial
  probe
  misc_feature (1)..(25): SEQ ID NO: 6608; WAN024BYO; Start 1046; Stop 1070
agagtcggaaaggtaaggatagtat

SEQ ID NO: 443888 - DNA, 25 bp, Artificial
  probe
  misc_feature (1)..(25): SEQ ID NO: 6608; WAN024BYO; Start 865; Stop 889
aatgacacgacgaaagagatttatg

SEQ ID NO: 443889 - DNA, 25 bp, Artificial
  probe
  misc_feature (1)..(25): SEQ ID NO: 6608; WAN024BYO; Start 844; Stop 868
gctttgtgttgttcgttgataaatg

SEQ ID NO: 443890 - DNA, 25 bp, Artificial
  probe
  misc_feature (1)..(25): SEQ ID NO: 6608; WAN024BYO; Start 860; Stop 884
tgataaatgacacgacgaaagagat

SEQ ID NO: 443891 - DNA, 25 bp, Artificial
  probe
  misc_feature (1)..(25): SEQ ID NO: 6608; WAN024BYO; Start 861; Stop 885
gataaatgacacgacgaaagagatt

SEQ ID NO: 443892 - DNA, 25 bp, Artificial
  probe
  misc_feature (1)..(25): SEQ ID NO: 6608; WAN024BYO; Start 1047; Stop 1071
gagtcggaaaggtaaggatagtatt

SEQ ID NO: 443893 - DNA, 25 bp, Artificial
  probe
  misc_feature (1)..(25): SEQ ID NO: 6608; WAN024BYO; Start 1045; Stop 1069
gagagtcggaaaggtaaggatagta

SEQ ID NO: 443894 - DNA, 25 bp, Artificial
  probe
  misc_feature (1)..(25): SEQ ID NO: 6608; WAN024BYO; Start 898; Stop 922
gaggcgtataaagtcggattgataa

SEQ ID NO: 443895 - DNA, 25 bp, Artificial
  probe
  misc_feature (1)..(25): SEQ ID NO: 6608; WAN024BYO; Start 859; Stop 883
ttgataaatgacacgacgaaagaga

SEQ ID NO: 443896 - DNA, 25 bp, Artificial
  probe
  misc_feature (1)..(25): SEQ ID NO: 6608; WAN024BYO; Start 858; Stop 882
gttgataaatgacacgacgaaagag

SEQ ID NO: 443897 - DNA, 25 bp, Artificial
  probe
  misc_feature (1)..(25): SEQ ID NO: 6608; WAN024BYO; Start 767; Stop 791
ataaggatgaattgctacgagattc

SEQ ID NO: 443898 - DNA, 25 bp, Artificial
  probe
  misc_feature (1)..(25): SEQ ID NO: 6609; WAN024CBR; Start 176; Stop 200
acagaatctttaaggcaagtaaggt

SEQ ID NO: 443899 - DNA, 25 bp, Artificial
  probe
  misc_feature (1)..(25): SEQ ID NO: 6609; WAN024CBR; Start 175; Stop 199
aacagaatctttaaggcaagtaagg

SEQ ID NO: 443900 - DNA, 25 bp, Artificial
  probe
  misc_feature (1)..(25): SEQ ID NO: 6609; WAN024CBR; Start 177; Stop 201
cagaatctttaaggcaagtaaggta

SEQ ID NO: 443901 - DNA, 25 bp, Artificial
  probe
  misc_feature (1)..(25): SEQ ID NO: 6609; WAN024CBR; Start 182; Stop 206
tctttaaggcaagtaaggtaatgaa

SEQ ID NO: 443902 - DNA, 25 bp, Artificial
  probe
  misc_feature (1)..(25): SEQ ID NO: 6609; WAN024CBR; Start 181; Stop 205
atctttaaggcaagtaaggtaatga

SEQ ID NO: 443903 - DNA, 25 bp, Artificial
  probe
  misc_feature (1)..(25): SEQ ID NO: 6609; WAN024CBR; Start 178; Stop 202
agaatctttaaggcaagtaaggtaa

SEQ ID NO: 443904 - DNA, 25 bp, Artificial
  probe
  misc_feature (1)..(25): SEQ ID NO: 6609; WAN024CBR; Start 174; Stop 198
aaacagaatctttaaggcaagtaag

SEQ ID NO: 443905 - DNA, 25 bp, Artificial
  probe
  misc_feature (1)..(25): SEQ ID NO: 6609; WAN024CBR; Start 183; Stop 207
ctttaaggcaagtaaggtaatgaaa

SEQ ID NO: 443906 - DNA, 25 bp, Artificial
  probe
  misc_feature (1)..(25): SEQ ID NO: 6609; WAN024CBR; Start 180; Stop 204
aatctttaaggcaagtaaggtaatg

SEQ ID NO: 443907 - DNA, 25 bp, Artificial
  probe
  misc_feature (1)..(25): SEQ ID NO: 6609; WAN024CBR; Start 107; Stop 131
cagcaggtgtattggctcttatctt

SEQ ID NO: 443908 - DNA, 25 bp, Artificial
  probe
  misc_feature (1)..(25): SEQ ID NO: 6609; WAN024CBR; Start 179; Stop 203
gaatctttaaggcaagtaaggtaat

SEQ ID NO: 443909 - DNA, 25 bp, Artificial
  probe
  misc_feature (1)..(25): SEQ ID NO: 6609; WAN024CBR; Start 187; Stop 211
aaggcaagtaaggtaatgaaaagga

SEQ ID NO: 443910 - DNA, 25 bp, Artificial
  probe
  misc_feature (1)..(25): SEQ ID NO: 6609; WAN024CBR; Start 11; Stop 35
gaacttttatagcattgactggagc

SEQ ID NO: 443911 - DNA, 25 bp, Artificial
  probe
  misc_feature (1)..(25): SEQ ID NO: 6609; WAN024CBR; Start 10; Stop 34
ggaacttttatagcattgactggag

SEQ ID NO: 443912 - DNA, 25 bp, Artificial
  probe
  misc_feature (1)..(25): SEQ ID NO: 6609; WAN024CBR; Start 9; Stop 33
aggaacttttatagcattgactgga

SEQ ID NO: 443913 - DNA, 25 bp, Artificial
  probe
  misc_feature (1)..(25): SEQ ID NO: 6609; WAN024CBR; Start 190; Stop 214
gcaagtaaggtaatgaaaaggagga

SEQ ID NO: 443914 - DNA, 25 bp, Artificial
  probe
  misc_feature (1)..(25): SEQ ID NO: 6609; WAN024CBR; Start 188; Stop 212
aggcaagtaaggtaatgaaaaggag

SEQ ID NO: 443915 - DNA, 25 bp, Artificial
  probe
  misc_feature (1)..(25): SEQ ID NO: 6609; WAN024CBR; Start 186; Stop 210
taaggcaagtaaggtaatgaaaagg

SEQ ID NO: 443916 - DNA, 25 bp, Artificial
  probe
  misc_feature (1)..(25): SEQ ID NO: 6609; WAN024CBR; Start 6; Stop 30
tccaggaacttttatagcattgact

SEQ ID NO: 443917 - DNA, 25 bp, Artificial
  probe
  misc_feature (1)..(25): SEQ ID NO: 6609; WAN024CBR; Start 109; Stop 133
gcaggtgtattggctcttatctttt

SEQ ID NO: 443918 - DNA, 25 bp, Artificial
  probe
  misc_feature (1)..(25): SEQ ID NO: 6609; WAN024CBR; Start 57; Stop 81
aataaactatattaaggttggaggc

SEQ ID NO: 443919 - DNA, 25 bp, Artificial
  probe
  misc_feature (1)..(25): SEQ ID NO: 6609; WAN024CBR; Start 191; Stop 215
caagtaaggtaatgaaaaggaggat

SEQ ID NO: 443920 - DNA, 25 bp, Artificial
  probe
  misc_feature (1)..(25): SEQ ID NO: 6609; WAN024CBR; Start 173; Stop 197
taaacagaatctttaaggcaagtaa

SEQ ID NO: 443921 - DNA, 25 bp, Artificial
  probe
  misc_feature (1)..(25): SEQ ID NO: 6609; WAN024CBR; Start 189; Stop 213
ggcaagtaaggtaatgaaaaggagg

SEQ ID NO: 443922 - DNA, 25 bp, Artificial
  probe
  misc_feature (1)..(25): SEQ ID NO: 6609; WAN024CBR; Start 4; Stop 28
agtccaggaacttttatagcattga

SEQ ID NO: 443923 - DNA, 25 bp, Artificial
  probe
  misc_feature (1)..(25): SEQ ID NO: 6609; WAN024CBR; Start 2; Stop 26
tgagtccaggaacttttatagcatt

SEQ ID NO: 443924 - DNA, 25 bp, Artificial
  probe
  misc_feature (1)..(25): SEQ ID NO: 6609; WAN024CBR; Start 3; Stop 27
gagtccaggaacttttatagcattg

SEQ ID NO: 443925 - DNA, 25 bp, Artificial
  probe
  misc_feature (1)..(25): SEQ ID NO: 6609; WAN024CBR; Start 1; Stop 25
atgagtccaggaacttttatagcat

SEQ ID NO: 443926 - DNA, 25 bp, Artificial
  probe
  misc_feature (1)..(25): SEQ ID NO: 6609; WAN024CBR; Start 108; Stop 132
agcaggtgtattggctcttatcttt

SEQ ID NO: 443927 - DNA, 25 bp, Artificial
  probe
  misc_feature (1)..(25): SEQ ID NO: 6609; WAN024CBR; Start 8; Stop 32
caggaacttttatagcattgactgg

SEQ ID NO: 443928 - DNA, 25 bp, Artificial
  probe
  misc_feature (1)..(25): SEQ ID NO: 6609; WAN024CBR; Start 7; Stop 31
ccaggaacttttatagcattgactg

SEQ ID NO: 443929 - DNA, 25 bp, Artificial
  probe
  misc_feature (1)..(25): SEQ ID NO: 6609; WAN024CBR; Start 145; Stop 169
tgtgtagatactacgataaaggttc

SEQ ID NO: 443930 - DNA, 25 bp, Artificial
  probe
  misc_feature (1)..(25): SEQ ID NO: 6609; WAN024CBR; Start 5; Stop 29
gtccaggaacttttatagcattgac

SEQ ID NO: 443931 - DNA, 25 bp, Artificial
  probe
  misc_feature (1)..(25): SEQ ID NO: 6610; WAN024BSQ; Start 399; Stop 423
tgatatgataaggcaggtaaggatg

SEQ ID NO: 443932 - DNA, 25 bp, Artificial
  probe
  misc_feature (1)..(25): SEQ ID NO: 6610; WAN024BSQ; Start 396; Stop 420
tgatgatatgataaggcaggtaagg

SEQ ID NO: 443933 - DNA, 25 bp, Artificial
  probe
  misc_feature (1)..(25): SEQ ID NO: 6610; WAN024BSQ; Start 401; Stop 425
atatgataaggcaggtaaggatgag

SEQ ID NO: 443934 - DNA, 25 bp, Artificial
  probe
  misc_feature (1)..(25): SEQ ID NO: 6610; WAN024BSQ; Start 400; Stop 424
gatatgataaggcaggtaaggatga

SEQ ID NO: 443935 - DNA, 25 bp, Artificial
  probe
  misc_feature (1)..(25): SEQ ID NO: 6610; WAN024BSQ; Start 397; Stop 421
gatgatatgataaggcaggtaagga

SEQ ID NO: 443936 - DNA, 25 bp, Artificial
  probe
  misc_feature (1)..(25): SEQ ID NO: 6610; WAN024BSQ; Start 394; Stop 418
agtgatgatatgataaggcaggtaa

SEQ ID NO: 443937 - DNA, 25 bp, Artificial
  probe
  misc_feature (1)..(25): SEQ ID NO: 6610; WAN024BSQ; Start 393; Stop 417
aagtgatgatatgataaggcaggta

SEQ ID NO: 443938 - DNA, 25 bp, Artificial
  probe
  misc_feature (1)..(25): SEQ ID NO: 6610; WAN024BSQ; Start 395; Stop 419
gtgatgatatgataaggcaggtaag

SEQ ID NO: 443939 - DNA, 25 bp, Artificial
  probe
  misc_feature (1)..(25): SEQ ID NO: 6610; WAN024BSQ; Start 244; Stop 268
aattacactacttcagaatggcgag

SEQ ID NO: 443940 - DNA, 25 bp, Artificial
  probe
  misc_feature (1)..(25): SEQ ID NO: 6610; WAN024BSQ; Start 398; Stop 422
atgatatgataaggcaggtaaggat

SEQ ID NO: 443941 - DNA, 25 bp, Artificial
  probe
  misc_feature (1)..(25): SEQ ID NO: 6610; WAN024BSQ; Start 245; Stop 269
attacactacttcagaatggcgaga

SEQ ID NO: 443942 - DNA, 25 bp, Artificial
  probe
  misc_feature (1)..(25): SEQ ID NO: 6610; WAN024BSQ; Start 402; Stop 426
tatgataaggcaggtaaggatgagc

SEQ ID NO: 443943 - DNA, 25 bp, Artificial
  probe
  misc_feature (1)..(25): SEQ ID NO: 6610; WAN024BSQ; Start 114; Stop 138
agaggagttagaatcaatcatcact

SEQ ID NO: 443944 - DNA, 25 bp, Artificial
  probe
  misc_feature (1)..(25): SEQ ID NO: 6610; WAN024BSQ; Start 246; Stop 270
ttacactacttcagaatggcgagaa

SEQ ID NO: 443945 - DNA, 25 bp, Artificial
  probe
  misc_feature (1)..(25): SEQ ID NO: 6610; WAN024BSQ; Start 196; Stop 220
aaggtatcttcttcaagcgtgattg

SEQ ID NO: 443946 - DNA, 25 bp, Artificial
  probe
  misc_feature (1)..(25): SEQ ID NO: 6610; WAN024BSQ; Start 195; Stop 219
caaggtatcttcttcaagcgtgatt

SEQ ID NO: 443947 - DNA, 25 bp, Artificial
  probe
  misc_feature (1)..(25): SEQ ID NO: 6610; WAN024BSQ; Start 113; Stop 137
tagaggagttagaatcaatcatcac

SEQ ID NO: 443948 - DNA, 25 bp, Artificial
  probe
  misc_feature (1)..(25): SEQ ID NO: 6610; WAN024BSQ; Start 411; Stop 435
gcaggtaaggatgagctatgttatt

SEQ ID NO: 443949 - DNA, 25 bp, Artificial
  probe
  misc_feature (1)..(25): SEQ ID NO: 6610; WAN024BSQ; Start 194; Stop 218
tcaaggtatcttcttcaagcgtgat

SEQ ID NO: 443950 - DNA, 25 bp, Artificial
  probe
  misc_feature (1)..(25): SEQ ID NO: 6610; WAN024BSQ; Start 193; Stop 217
ttcaaggtatcttcttcaagcgtga

SEQ ID NO: 443951 - DNA, 25 bp, Artificial
  probe
  misc_feature (1)..(25): SEQ ID NO: 6610; WAN024BSQ; Start 115; Stop 139
gaggagttagaatcaatcatcacta

SEQ ID NO: 443952 - DNA, 25 bp, Artificial
  probe
  misc_feature (1)..(25): SEQ ID NO: 6610; WAN024BSQ; Start 405; Stop 429
gataaggcaggtaaggatgagctat

SEQ ID NO: 443953 - DNA, 25 bp, Artificial
  probe
  misc_feature (1)..(25): SEQ ID NO: 6610; WAN024BSQ; Start 392; Stop 416
aaagtgatgatatgataaggcaggt

SEQ ID NO: 443954 - DNA, 25 bp, Artificial
  probe
  misc_feature (1)..(25): SEQ ID NO: 6610; WAN024BSQ; Start 406; Stop 430
ataaggcaggtaaggatgagctatg

SEQ ID NO: 443955 - DNA, 25 bp, Artificial
  probe
  misc_feature (1)..(25): SEQ ID NO: 6610; WAN024BSQ; Start 243; Stop 267
aaattacactacttcagaatggcga

SEQ ID NO: 443956 - DNA, 25 bp, Artificial
  probe
  misc_feature (1)..(25): SEQ ID NO: 6610; WAN024BSQ; Start 410; Stop 434
ggcaggtaaggatgagctatgttat

SEQ ID NO: 443957 - DNA, 25 bp, Artificial
  probe
  misc_feature (1)..(25): SEQ ID NO: 6610; WAN024BSQ; Start 112; Stop 136
atagaggagttagaatcaatcatca

SEQ ID NO: 443958 - DNA, 25 bp, Artificial
  probe
  misc_feature (1)..(25): SEQ ID NO: 6610; WAN024BSQ; Start 192; Stop 216
tttcaaggtatcttcttcaagcgtg

SEQ ID NO: 443959 - DNA, 25 bp, Artificial
  probe
  misc_feature (1)..(25): SEQ ID NO: 6610; WAN024BSQ; Start 412; Stop 436
caggtaaggatgagctatgttatta

SEQ ID NO: 443960 - DNA, 25 bp, Artificial
  probe
  misc_feature (1)..(25): SEQ ID NO: 6610; WAN024BSQ; Start 250; Stop 274
actacttcagaatggcgagaaattg

SEQ ID NO: 443961 - DNA, 25 bp, Artificial
  probe
  misc_feature (1)..(25): SEQ ID NO: 6610; WAN024BSQ; Start 249; Stop 273
cactacttcagaatggcgagaaatt

SEQ ID NO: 443962 - DNA, 25 bp, Artificial
  probe
  misc_feature (1)..(25): SEQ ID NO: 6610; WAN024BSQ; Start 247; Stop 271
tacactacttcagaatggcgagaaa

SEQ ID NO: 443963 - DNA, 25 bp, Artificial
  probe
  misc_feature (1)..(25): SEQ ID NO: 6610; WAN024BSQ; Start 116; Stop 140
aggagttagaatcaatcatcactaa

SEQ ID NO: 443964 - DNA, 25 bp, Artificial
  probe
  misc_feature (1)..(25): SEQ ID NO: 6611; WAN024BVT; Start 123; Stop 147
tatcaagcgtctagtagttaagcac

SEQ ID NO: 443965 - DNA, 25 bp, Artificial
  probe
  misc_feature (1)..(25): SEQ ID NO: 6611; WAN024BVT; Start 122; Stop 146
ttatcaagcgtctagtagttaagca

SEQ ID NO: 443966 - DNA, 25 bp, Artificial
  probe
  misc_feature (1)..(25): SEQ ID NO: 6611; WAN024BVT; Start 121; Stop 145
attatcaagcgtctagtagttaagc

SEQ ID NO: 443967 - DNA, 25 bp, Artificial
  probe
  misc_feature (1)..(25): SEQ ID NO: 6611; WAN024BVT; Start 130; Stop 154
cgtctagtagttaagcacaacatcc

SEQ ID NO: 443968 - DNA, 25 bp, Artificial
  probe
  misc_feature (1)..(25): SEQ ID NO: 6611; WAN024BVT; Start 1; Stop 25
atgagtctatcagagaatgacaagc

SEQ ID NO: 443969 - DNA, 25 bp, Artificial
  probe
  misc_feature (1)..(25): SEQ ID NO: 6611; WAN024BVT; Start 124; Stop 148
atcaagcgtctagtagttaagcaca

SEQ ID NO: 443970 - DNA, 25 bp, Artificial
  probe
  misc_feature (1)..(25): SEQ ID NO: 6611; WAN024BVT; Start 6; Stop 30
tctatcagagaatgacaagcgagtt

SEQ ID NO: 443971 - DNA, 25 bp, Artificial
  probe
  misc_feature (1)..(25): SEQ ID NO: 6611; WAN024BVT; Start 116; Stop 140
gtgacattatcaagcgtctagtagt

SEQ ID NO: 443972 - DNA, 25 bp, Artificial
  probe
  misc_feature (1)..(25): SEQ ID NO: 6611; WAN024BVT; Start 117; Stop 141
tgacattatcaagcgtctagtagtt

SEQ ID NO: 443973 - DNA, 25 bp, Artificial
  probe
  misc_feature (1)..(25): SEQ ID NO: 6611; WAN024BVT; Start 125; Stop 149
tcaagcgtctagtagttaagcacaa

SEQ ID NO: 443974 - DNA, 25 bp, Artificial
  probe
  misc_feature (1)..(25): SEQ ID NO: 6611; WAN024BVT; Start 129; Stop 153
gcgtctagtagttaagcacaacatc

SEQ ID NO: 443975 - DNA, 25 bp, Artificial
  probe
  misc_feature (1)..(25): SEQ ID NO: 6611; WAN024BVT; Start 126; Stop 150
caagcgtctagtagttaagcacaac

SEQ ID NO: 443976 - DNA, 25 bp, Artificial
  probe
  misc_feature (1)..(25): SEQ ID NO: 6611; WAN024BVT; Start 115; Stop 139
cgtgacattatcaagcgtctagtag

SEQ ID NO: 443977 - DNA, 25 bp, Artificial
  probe
  misc_feature (1)..(25): SEQ ID NO: 6611; WAN024BVT; Start 128; Stop 152
agcgtctagtagttaagcacaacat

SEQ ID NO: 443978 - DNA, 25 bp, Artificial
  probe
  misc_feature (1)..(25): SEQ ID NO: 6611; WAN024BVT; Start 119; Stop 143
acattatcaagcgtctagtagttaa

SEQ ID NO: 443979 - DNA, 25 bp, Artificial
  probe
  misc_feature (1)..(25): SEQ ID NO: 6611; WAN024BVT; Start 127; Stop 151
aagcgtctagtagttaagcacaaca

SEQ ID NO: 443980 - DNA, 25 bp, Artificial
  probe
  misc_feature (1)..(25): SEQ ID NO: 6611; WAN024BVT; Start 4; Stop 28
agtctatcagagaatgacaagcgag

SEQ ID NO: 443981 - DNA, 25 bp, Artificial
  probe
  misc_feature (1)..(25): SEQ ID NO: 6611; WAN024BVT; Start 3; Stop 27
gagtctatcagagaatgacaagcga

SEQ ID NO: 443982 - DNA, 25 bp, Artificial
  probe
  misc_feature (1)..(25): SEQ ID NO: 6611; WAN024BVT; Start 118; Stop 142
gacattatcaagcgtctagtagtta

SEQ ID NO: 443983 - DNA, 25 bp, Artificial
  probe
  misc_feature (1)..(25): SEQ ID NO: 6611; WAN024BVT; Start 59; Stop 83
actccataacagggtcagaaattag

SEQ ID NO: 443984 - DNA, 25 bp, Artificial
  probe
  misc_feature (1)..(25): SEQ ID NO: 6611; WAN024BVT; Start 58; Stop 82
aactccataacagggtcagaaatta

SEQ ID NO: 443985 - DNA, 25 bp, Artificial
  probe
  misc_feature (1)..(25): SEQ ID NO: 6611; WAN024BVT; Start 57; Stop 81
gaactccataacagggtcagaaatt

SEQ ID NO: 443986 - DNA, 25 bp, Artificial
  probe
  misc_feature (1)..(25): SEQ ID NO: 6611; WAN024BVT; Start 5; Stop 29
gtctatcagagaatgacaagcgagt

SEQ ID NO: 443987 - DNA, 25 bp, Artificial
  probe
  misc_feature (1)..(25): SEQ ID NO: 6611; WAN024BVT; Start 2; Stop 26
tgagtctatcagagaatgacaagcg

SEQ ID NO: 443988 - DNA, 25 bp, Artificial
  probe
  misc_feature (1)..(25): SEQ ID NO: 6611; WAN024BVT; Start 135; Stop 159
agtagttaagcacaacatccctatt

SEQ ID NO: 443989 - DNA, 25 bp, Artificial
  probe
  misc_feature (1)..(25): SEQ ID NO: 6611; WAN024BVT; Start 120; Stop 144
cattatcaagcgtctagtagttaag

SEQ ID NO: 443990 - DNA, 25 bp, Artificial
  probe
  misc_feature (1)..(25): SEQ ID NO: 6611; WAN024BVT; Start 136; Stop 160
gtagttaagcacaacatccctattg

SEQ ID NO: 443991 - DNA, 25 bp, Artificial
  probe
  misc_feature (1)..(25): SEQ ID NO: 6611; WAN024BVT; Start 56; Stop 80
agaactccataacagggtcagaaat

SEQ ID NO: 443992 - DNA, 25 bp, Artificial
  probe
  misc_feature (1)..(25): SEQ ID NO: 6611; WAN024BVT; Start 278; Stop 302
tgttgatgaatagcgacctagaaag

SEQ ID NO: 443993 - DNA, 25 bp, Artificial
  probe
  misc_feature (1)..(25): SEQ ID NO: 6611; WAN024BVT; Start 60; Stop 84
ctccataacagggtcagaaattagc

SEQ ID NO: 443994 - DNA, 25 bp, Artificial
  probe
  misc_feature (1)..(25): SEQ ID NO: 6611; WAN024BVT; Start 277; Stop 301
gtgttgatgaatagcgacctagaaa

SEQ ID NO: 443995 - DNA, 25 bp, Artificial
  probe
  misc_feature (1)..(25): SEQ ID NO: 6611; WAN024BVT; Start 134; Stop 158
tagtagttaagcacaacatccctat

SEQ ID NO: 443996 - DNA, 25 bp, Artificial
  probe
  misc_feature (1)..(25): SEQ ID NO: 6611; WAN024BVT; Start 133; Stop 157
ctagtagttaagcacaacatcccta

SEQ ID NO: 443997 - DNA, 25 bp, Artificial
  probe
  misc_feature (1)..(25): SEQ ID NO: 6612; WAN024BKG; Start 15; Stop 39
tcaagttggaatgtttgtatctaaa

SEQ ID NO: 443998 - DNA, 25 bp, Artificial
  probe
  misc_feature (1)..(25): SEQ ID NO: 6612; WAN024BKG; Start 55; Stop 79
ttagataagatgtctgcaatccttt

SEQ ID NO: 443999 - DNA, 25 bp, Artificial
  probe
  misc_feature (1)..(25): SEQ ID NO: 6612; WAN024BKG; Start 54; Stop 78
tttagataagatgtctgcaatcctt

SEQ ID NO: 444000 - DNA, 25 bp, Artificial
  probe
  misc_feature (1)..(25): SEQ ID NO: 6612; WAN024BKG; Start 14; Stop 38
atcaagttggaatgtttgtatctaa

SEQ ID NO: 444001 - DNA, 25 bp, Artificial
  probe
  misc_feature (1)..(25): SEQ ID NO: 6612; WAN024BKG; Start 12; Stop 36
ttatcaagttggaatgtttgtatct

SEQ ID NO: 444002 - DNA, 25 bp, Artificial
  probe
  misc_feature (1)..(25): SEQ ID NO: 6612; WAN024BKG; Start 57; Stop 81
agataagatgtctgcaatcctttat

SEQ ID NO: 444003 - DNA, 25 bp, Artificial
  probe
  misc_feature (1)..(25): SEQ ID NO: 6612; WAN024BKG; Start 53; Stop 77
atttagataagatgtctgcaatcct

SEQ ID NO: 444004 - DNA, 25 bp, Artificial
  probe
  misc_feature (1)..(25): SEQ ID NO: 6612; WAN024BKG; Start 56; Stop 80
tagataagatgtctgcaatccttta

SEQ ID NO: 444005 - DNA, 25 bp, Artificial
  probe
  misc_feature (1)..(25): SEQ ID NO: 6612; WAN024BKG; Start 46; Stop 70
agcatgtatttagataagatgtctg

SEQ ID NO: 444006 - DNA, 25 bp, Artificial
  probe
  misc_feature (1)..(25): SEQ ID NO: 6612; WAN024BKG; Start 16; Stop 40
caagttggaatgtttgtatctaaat

SEQ ID NO: 444007 - DNA, 25 bp, Artificial
  probe
  misc_feature (1)..(25): SEQ ID NO: 6612; WAN024BKG; Start 47; Stop 71
gcatgtatttagataagatgtctgc

SEQ ID NO: 444008 - DNA, 25 bp, Artificial
  probe
  misc_feature (1)..(25): SEQ ID NO: 6612; WAN024BKG; Start 13; Stop 37
tatcaagttggaatgtttgtatcta

SEQ ID NO: 444009 - DNA, 25 bp, Artificial
  probe
  misc_feature (1)..(25): SEQ ID NO: 6612; WAN024BKG; Start 11; Stop 35
attatcaagttggaatgtttgtatc

SEQ ID NO: 444010 - DNA, 25 bp, Artificial
  probe
  misc_feature (1)..(25): SEQ ID NO: 6612; WAN024BKG; Start 48; Stop 72
catgtatttagataagatgtctgca

SEQ ID NO: 444011 - DNA, 25 bp, Artificial
  probe
  misc_feature (1)..(25): SEQ ID NO: 6612; WAN024BKG; Start 4; Stop 28
agtgaaaattatcaagttggaatgt

SEQ ID NO: 444012 - DNA, 25 bp, Artificial
  probe
  misc_feature (1)..(25): SEQ ID NO: 6612; WAN024BKG; Start 58; Stop 82
gataagatgtctgcaatcctttata

SEQ ID NO: 444013 - DNA, 25 bp, Artificial
  probe
  misc_feature (1)..(25): SEQ ID NO: 6612; WAN024BKG; Start 52; Stop 76
tatttagataagatgtctgcaatcc

SEQ ID NO: 444014 - DNA, 25 bp, Artificial
  probe
  misc_feature (1)..(25): SEQ ID NO: 6612; WAN024BKG; Start 2; Stop 26
tgagtgaaaattatcaagttggaat

SEQ ID NO: 444015 - DNA, 25 bp, Artificial
  probe
  misc_feature (1)..(25): SEQ ID NO: 6612; WAN024BKG; Start 1; Stop 25
atgagtgaaaattatcaagttggaa

SEQ ID NO: 444016 - DNA, 25 bp, Artificial
  probe
  misc_feature (1)..(25): SEQ ID NO: 6612; WAN024BKG; Start 9; Stop 33
aaattatcaagttggaatgtttgta

SEQ ID NO: 444017 - DNA, 25 bp, Artificial
  probe
  misc_feature (1)..(25): SEQ ID NO: 6612; WAN024BKG; Start 3; Stop 27
gagtgaaaattatcaagttggaatg

SEQ ID NO: 444018 - DNA, 25 bp, Artificial
  probe
  misc_feature (1)..(25): SEQ ID NO: 6612; WAN024BKG; Start 10; Stop 34
aattatcaagttggaatgtttgtat

SEQ ID NO: 444019 - DNA, 25 bp, Artificial
  probe
  misc_feature (1)..(25): SEQ ID NO: 6612; WAN024BKG; Start 5; Stop 29
gtgaaaattatcaagttggaatgtt

SEQ ID NO: 444020 - DNA, 25 bp, Artificial
  probe
  misc_feature (1)..(25): SEQ ID NO: 6612; WAN024BKG; Start 50; Stop 74
tgtatttagataagatgtctgcaat

SEQ ID NO: 444021 - DNA, 25 bp, Artificial
  probe
  misc_feature (1)..(25): SEQ ID NO: 6612; WAN024BKG; Start 49; Stop 73
atgtatttagataagatgtctgcaa

SEQ ID NO: 444022 - DNA, 25 bp, Artificial
  probe
  misc_feature (1)..(25): SEQ ID NO: 6612; WAN024BKG; Start 8; Stop 32
aaaattatcaagttggaatgtttgt

SEQ ID NO: 444023 - DNA, 25 bp, Artificial
  probe
  misc_feature (1)..(25): SEQ ID NO: 6612; WAN024BKG; Start 59; Stop 83
ataagatgtctgcaatcctttatat

SEQ ID NO: 444024 - DNA, 25 bp, Artificial
  probe
  misc_feature (1)..(25): SEQ ID NO: 6612; WAN024BKG; Start 51; Stop 75
gtatttagataagatgtctgcaatc

SEQ ID NO: 444025 - DNA, 25 bp, Artificial
  probe
  misc_feature (1)..(25): SEQ ID NO: 6612; WAN024BKG; Start 45; Stop 69
tagcatgtatttagataagatgtct

SEQ ID NO: 444026 - DNA, 25 bp, Artificial
  probe
  misc_feature (1)..(25): SEQ ID NO: 6612; WAN024BKG; Start 6; Stop 30
tgaaaattatcaagttggaatgttt

SEQ ID NO: 444027 - DNA, 25 bp, Artificial
  probe
  misc_feature (1)..(25): SEQ ID NO: 6612; WAN024BKG; Start 7; Stop 31
gaaaattatcaagttggaatgtttg

SEQ ID NO: 444028 - DNA, 25 bp, Artificial
  probe
  misc_feature (1)..(25): SEQ ID NO: 6612; WAN024BKG; Start 60; Stop 84
taagatgtctgcaatcctttatata

SEQ ID NO: 444029 - DNA, 25 bp, Artificial
  probe
  misc_feature (1)..(25): SEQ ID NO: 6613; WAN024BGA; Start 5; Stop 29
gtgaagtaactcttgttcaaagtgg

SEQ ID NO: 444030 - DNA, 25 bp, Artificial
  probe
  misc_feature (1)..(25): SEQ ID NO: 6613; WAN024BGA; Start 4; Stop 28
agtgaagtaactcttgttcaaagtg

SEQ ID NO: 444031 - DNA, 25 bp, Artificial
  probe
  misc_feature (1)..(25): SEQ ID NO: 6613; WAN024BGA; Start 3; Stop 27
gagtgaagtaactcttgttcaaagt

SEQ ID NO: 444032 - DNA, 25 bp, Artificial
  probe
  misc_feature (1)..(25): SEQ ID NO: 6613; WAN024BGA; Start 2; Stop 26
tgagtgaagtaactcttgttcaaag

SEQ ID NO: 444033 - DNA, 25 bp, Artificial
  probe
  misc_feature (1)..(25): SEQ ID NO: 6613; WAN024BGA; Start 1; Stop 25
atgagtgaagtaactcttgttcaaa

SEQ ID NO: 444034 - DNA, 25 bp, Artificial
  probe
  misc_feature (1)..(25): SEQ ID NO: 6613; WAN024BGA; Start 52; Stop 76
ctcagttctgaggacacggtgattg

SEQ ID NO: 444035 - DNA, 25 bp, Artificial
  probe
  misc_feature (1)..(25): SEQ ID NO: 6614; WAN024BJV; Start 14; Stop 38
aacaacggatgattgaagaatacaa

SEQ ID NO: 444036 - DNA, 25 bp, Artificial
  probe
  misc_feature (1)..(25): SEQ ID NO: 6614; WAN024BJV; Start 3; Stop 27
gagtgattacaaacaacggatgatt

SEQ ID NO: 444037 - DNA, 25 bp, Artificial
  probe
  misc_feature (1)..(25): SEQ ID NO: 6614; WAN024BJV; Start 2; Stop 26
tgagtgattacaaacaacggatgat

SEQ ID NO: 444038 - DNA, 25 bp, Artificial
  probe
  misc_feature (1)..(25): SEQ ID NO: 6614; WAN024BJV; Start 1; Stop 25
atgagtgattacaaacaacggatga

SEQ ID NO: 444039 - DNA, 25 bp, Artificial
  probe
  misc_feature (1)..(25): SEQ ID NO: 6614; WAN024BJV; Start 153; Stop 177
aatgtgtgcatatctcaagatcctt

SEQ ID NO: 444040 - DNA, 25 bp, Artificial
  probe
  misc_feature (1)..(25): SEQ ID NO: 6614; WAN024BJV; Start 152; Stop 176
caatgtgtgcatatctcaagatcct

SEQ ID NO: 444041 - DNA, 25 bp, Artificial
  probe
  misc_feature (1)..(25): SEQ ID NO: 6614; WAN024BJV; Start 52; Stop 76
cgcaccaataagttaagtttgatga

SEQ ID NO: 444042 - DNA, 25 bp, Artificial
  probe
  misc_feature (1)..(25): SEQ ID NO: 6614; WAN024BJV; Start 5; Stop 29
gtgattacaaacaacggatgattga

SEQ ID NO: 444043 - DNA, 25 bp, Artificial
  probe
  misc_feature (1)..(25): SEQ ID NO: 6614; WAN024BJV; Start 4; Stop 28
agtgattacaaacaacggatgattg

SEQ ID NO: 444044 - DNA, 25 bp, Artificial
  probe
  misc_feature (1)..(25): SEQ ID NO: 6614; WAN024BJV; Start 6; Stop 30
tgattacaaacaacggatgattgaa

SEQ ID NO: 444045 - DNA, 25 bp, Artificial
  probe
  misc_feature (1)..(25): SEQ ID NO: 6614; WAN024BJV; Start 9; Stop 33
ttacaaacaacggatgattgaagaa

SEQ ID NO: 444046 - DNA, 25 bp, Artificial
  probe
  misc_feature (1)..(25): SEQ ID NO: 6614; WAN024BJV; Start 18; Stop 42
acggatgattgaagaatacaaacaa

SEQ ID NO: 444047 - DNA, 25 bp, Artificial
  probe
  misc_feature (1)..(25): SEQ ID NO: 6614; WAN024BJV; Start 17; Stop 41
aacggatgattgaagaatacaaaca

SEQ ID NO: 444048 - DNA, 25 bp, Artificial
  probe
  misc_feature (1)..(25): SEQ ID NO: 6614; WAN024BJV; Start 15; Stop 39
acaacggatgattgaagaatacaaa

SEQ ID NO: 444049 - DNA, 25 bp, Artificial
  probe
  misc_feature (1)..(25): SEQ ID NO: 6614; WAN024BJV; Start 13; Stop 37
aaacaacggatgattgaagaataca

SEQ ID NO: 444050 - DNA, 25 bp, Artificial
  probe
  misc_feature (1)..(25): SEQ ID NO: 6614; WAN024BJV; Start 11; Stop 35
acaaacaacggatgattgaagaata

SEQ ID NO: 444051 - DNA, 25 bp, Artificial
  probe
  misc_feature (1)..(25): SEQ ID NO: 6614; WAN024BJV; Start 10; Stop 34
tacaaacaacggatgattgaagaat

SEQ ID NO: 444052 - DNA, 25 bp, Artificial
  probe
  misc_feature (1)..(25): SEQ ID NO: 6614; WAN024BJV; Start 8; Stop 32
attacaaacaacggatgattgaaga

SEQ ID NO: 444053 - DNA, 25 bp, Artificial
  probe
  misc_feature (1)..(25): SEQ ID NO: 6614; WAN024BJV; Start 16; Stop 40
caacggatgattgaagaatacaaac

SEQ ID NO: 444054 - DNA, 25 bp, Artificial
  probe
  misc_feature (1)..(25): SEQ ID NO: 6614; WAN024BJV; Start 12; Stop 36
caaacaacggatgattgaagaatac

SEQ ID NO: 444055 - DNA, 25 bp, Artificial
  probe
  misc_feature (1)..(25): SEQ ID NO: 6614; WAN024BJV; Start 7; Stop 31
gattacaaacaacggatgattgaag

SEQ ID NO: 444056 - DNA, 25 bp, Artificial
  probe
  misc_feature (1)..(25): SEQ ID NO: 6614; WAN024BJV; Start 150; Stop 174
tacaatgtgtgcatatctcaagatc

SEQ ID NO: 444057 - DNA, 25 bp, Artificial
  probe
  misc_feature (1)..(25): SEQ ID NO: 6614; WAN024BJV; Start 151; Stop 175
acaatgtgtgcatatctcaagatcc

SEQ ID NO: 444058 - DNA, 25 bp, Artificial
  probe
  misc_feature (1)..(25): SEQ ID NO: 6614; WAN024BJV; Start 149; Stop 173
atacaatgtgtgcatatctcaagat

SEQ ID NO: 444059 - DNA, 25 bp, Artificial
  probe
  misc_feature (1)..(25): SEQ ID NO: 6614; WAN024BJV; Start 145; Stop 169
cactatacaatgtgtgcatatctca

SEQ ID NO: 444060 - DNA, 25 bp, Artificial
  probe
  misc_feature (1)..(25): SEQ ID NO: 6614; WAN024BJV; Start 53; Stop 77
gcaccaataagttaagtttgatgat

SEQ ID NO: 444061 - DNA, 25 bp, Artificial
  probe
  misc_feature (1)..(25): SEQ ID NO: 6614; WAN024BJV; Start 146; Stop 170
actatacaatgtgtgcatatctcaa

SEQ ID NO: 444062 - DNA, 25 bp, Artificial
  probe
  misc_feature (1)..(25): SEQ ID NO: 6614; WAN024BJV; Start 148; Stop 172
tatacaatgtgtgcatatctcaaga

SEQ ID NO: 444063 - DNA, 25 bp, Artificial
  probe
  misc_feature (1)..(25): SEQ ID NO: 6614; WAN024BJV; Start 147; Stop 171
ctatacaatgtgtgcatatctcaag

SEQ ID NO: 444064 - DNA, 25 bp, Artificial
  probe
  misc_feature (1)..(25): SEQ ID NO: 6614; WAN024BJV; Start 116; Stop 140
aatgtcctattgagttacttgaaac

SEQ ID NO: 444065 - DNA, 25 bp, Artificial
  probe
  misc_feature (1)..(25): SEQ ID NO: 6614; WAN024BJV; Start 82; Stop 106
aactattacgtaggaacacttgatt

SEQ ID NO: 444066 - DNA, 25 bp, Artificial
  probe
  misc_feature (1)..(25): SEQ ID NO: 6614; WAN024BJV; Start 115; Stop 139
aaatgtcctattgagttacttgaaa

SEQ ID NO: 444067 - DNA, 25 bp, Artificial
  probe
  misc_feature (1)..(25): SEQ ID NO: 6614; WAN024BJV; Start 19; Stop 43
cggatgattgaagaatacaaacaat

SEQ ID NO: 444068 - DNA, 25 bp, Artificial
  probe
  misc_feature (1)..(25): SEQ ID NO: 6615; WAN024BQ9; Start 858; Stop 882
gactgctgaaccactaactatctta

SEQ ID NO: 444069 - DNA, 25 bp, Artificial
  probe
  misc_feature (1)..(25): SEQ ID NO: 6615; WAN024BQ9; Start 859; Stop 883
actgctgaaccactaactatcttaa

SEQ ID NO: 444070 - DNA, 25 bp, Artificial
  probe
  misc_feature (1)..(25): SEQ ID NO: 6615; WAN024BQ9; Start 420; Stop 444
tggaattacaatggcttatacaggt

SEQ ID NO: 444071 - DNA, 25 bp, Artificial
  probe
  misc_feature (1)..(25): SEQ ID NO: 6615; WAN024BQ9; Start 421; Stop 445
ggaattacaatggcttatacaggtt

SEQ ID NO: 444072 - DNA, 25 bp, Artificial
  probe
  misc_feature (1)..(25): SEQ ID NO: 6615; WAN024BQ9; Start 857; Stop 881
tgactgctgaaccactaactatctt

SEQ ID NO: 444073 - DNA, 25 bp, Artificial
  probe
  misc_feature (1)..(25): SEQ ID NO: 6615; WAN024BQ9; Start 404; Stop 428
tagtatctgctgttgttggaattac

SEQ ID NO: 444074 - DNA, 25 bp, Artificial
  probe
  misc_feature (1)..(25): SEQ ID NO: 6615; WAN024BQ9; Start 862; Stop 886
gctgaaccactaactatcttaatgt

SEQ ID NO: 444075 - DNA, 25 bp, Artificial
  probe
  misc_feature (1)..(25): SEQ ID NO: 6615; WAN024BQ9; Start 861; Stop 885
tgctgaaccactaactatcttaatg

SEQ ID NO: 444076 - DNA, 25 bp, Artificial
  probe
  misc_feature (1)..(25): SEQ ID NO: 6615; WAN024BQ9; Start 749; Stop 773
caggaatgtctcaggttaatgatga

SEQ ID NO: 444077 - DNA, 25 bp, Artificial
  probe
  misc_feature (1)..(25): SEQ ID NO: 6615; WAN024BQ9; Start 750; Stop 774
aggaatgtctcaggttaatgatgat

SEQ ID NO: 444078 - DNA, 25 bp, Artificial
  probe
  misc_feature (1)..(25): SEQ ID NO: 6615; WAN024BQ9; Start 860; Stop 884
ctgctgaaccactaactatcttaat

SEQ ID NO: 444079 - DNA, 25 bp, Artificial
  probe
  misc_feature (1)..(25): SEQ ID NO: 6615; WAN024BQ9; Start 419; Stop 443
ttggaattacaatggcttatacagg

SEQ ID NO: 444080 - DNA, 25 bp, Artificial
  probe
  misc_feature (1)..(25): SEQ ID NO: 6615; WAN024BQ9; Start 402; Stop 426
gctagtatctgctgttgttggaatt

SEQ ID NO: 444081 - DNA, 25 bp, Artificial
  probe
  misc_feature (1)..(25): SEQ ID NO: 6615; WAN024BQ9; Start 1279; Stop 1303
caagttgttactggtgtctctagtt

SEQ ID NO: 444082 - DNA, 25 bp, Artificial
  probe
  misc_feature (1)..(25): SEQ ID NO: 6615; WAN024BQ9; Start 403; Stop 427
ctagtatctgctgttgttggaatta

SEQ ID NO: 444083 - DNA, 25 bp, Artificial
  probe
  misc_feature (1)..(25): SEQ ID NO: 6615; WAN024BQ9; Start 405; Stop 429
agtatctgctgttgttggaattaca

SEQ ID NO: 444084 - DNA, 25 bp, Artificial
  probe
  misc_feature (1)..(25): SEQ ID NO: 6615; WAN024BQ9; Start 748; Stop 772
ccaggaatgtctcaggttaatgatg

SEQ ID NO: 444085 - DNA, 25 bp, Artificial
  probe
  misc_feature (1)..(25): SEQ ID NO: 6615; WAN024BQ9; Start 1285; Stop 1309
gttactggtgtctctagttatctca

SEQ ID NO: 444086 - DNA, 25 bp, Artificial
  probe
  misc_feature (1)..(25): SEQ ID NO: 6615; WAN024BQ9; Start 1284; Stop 1308
tgttactggtgtctctagttatctc

SEQ ID NO: 444087 - DNA, 25 bp, Artificial
  probe
  misc_feature (1)..(25): SEQ ID NO: 6615; WAN024BQ9; Start 1280; Stop 1304
aagttgttactggtgtctctagtta

SEQ ID NO: 444088 - DNA, 25 bp, Artificial
  probe
  misc_feature (1)..(25): SEQ ID NO: 6615; WAN024BQ9; Start 916; Stop 940
ttcgttgtgattgtatgttcggaag

SEQ ID NO: 444089 - DNA, 25 bp, Artificial
  probe
  misc_feature (1)..(25): SEQ ID NO: 6615; WAN024BQ9; Start 915; Stop 939
cttcgttgtgattgtatgttcggaa

SEQ ID NO: 444090 - DNA, 25 bp, Artificial
  probe
  misc_feature (1)..(25): SEQ ID NO: 6615; WAN024BQ9; Start 1281; Stop 1305
agttgttactggtgtctctagttat

SEQ ID NO: 444091 - DNA, 25 bp, Artificial
  probe
  misc_feature (1)..(25): SEQ ID NO: 6615; WAN024BQ9; Start 418; Stop 442
gttggaattacaatggcttatacag

SEQ ID NO: 444092 - DNA, 25 bp, Artificial
  probe
  misc_feature (1)..(25): SEQ ID NO: 6615; WAN024BQ9; Start 1282; Stop 1306
gttgttactggtgtctctagttatc

SEQ ID NO: 444093 - DNA, 25 bp, Artificial
  probe
  misc_feature (1)..(25): SEQ ID NO: 6615; WAN024BQ9; Start 417; Stop 441
tgttggaattacaatggcttataca

SEQ ID NO: 444094 - DNA, 25 bp, Artificial
  probe
  misc_feature (1)..(25): SEQ ID NO: 6615; WAN024BQ9; Start 1283; Stop 1307
ttgttactggtgtctctagttatct

SEQ ID NO: 444095 - DNA, 25 bp, Artificial
  probe
  misc_feature (1)..(25): SEQ ID NO: 6615; WAN024BQ9; Start 850; Stop 874
ttaattgtgactgctgaaccactaa

SEQ ID NO: 444096 - DNA, 25 bp, Artificial
  probe
  misc_feature (1)..(25): SEQ ID NO: 6615; WAN024BQ9; Start 751; Stop 775
ggaatgtctcaggttaatgatgata

SEQ ID NO: 444097 - DNA, 25 bp, Artificial
  probe
  misc_feature (1)..(25): SEQ ID NO: 6615; WAN024BQ9; Start 1277; Stop 1301
tacaagttgttactggtgtctctag

SEQ ID NO: 444098 - DNA, 25 bp, Artificial
  probe
  misc_feature (1)..(25): SEQ ID NO: 6615; WAN024BQ9; Start 1272; Stop 1296
attgttacaagttgttactggtgtc

SEQ ID NO: 444099 - DNA, 25 bp, Artificial
  probe
  misc_feature (1)..(25): SEQ ID NO: 6615; WAN024BQ9; Start 1273; Stop 1297
ttgttacaagttgttactggtgtct

SEQ ID NO: 444100 - DNA, 25 bp, Artificial
  probe
  misc_feature (1)..(25): SEQ ID NO: 6615; WAN024BQ9; Start 1276; Stop 1300
ttacaagttgttactggtgtctcta

SEQ ID NO: 444101 - DNA, 25 bp, Artificial
  probe
  misc_feature (1)..(25): SEQ ID NO: 6616; WAN024EUQ; Start 72; Stop 96
tctcattaaattcctcaaacgcaac

SEQ ID NO: 444102 - DNA, 25 bp, Artificial
  probe
  misc_feature (1)..(25): SEQ ID NO: 6616; WAN024EUQ; Start 71; Stop 95
atctcattaaattcctcaaacgcaa

SEQ ID NO: 444103 - DNA, 25 bp, Artificial
  probe
  misc_feature (1)..(25): SEQ ID NO: 6616; WAN024EUQ; Start 70; Stop 94
aatctcattaaattcctcaaacgca

SEQ ID NO: 444104 - DNA, 25 bp, Artificial
  probe
  misc_feature (1)..(25): SEQ ID NO: 6616; WAN024EUQ; Start 73; Stop 97
ctcattaaattcctcaaacgcaacg

SEQ ID NO: 444105 - DNA, 25 bp, Artificial
  probe
  misc_feature (1)..(25): SEQ ID NO: 6616; WAN024EUQ; Start 37; Stop 61
cgttattgggcggttacattagaag

SEQ ID NO: 444106 - DNA, 25 bp, Artificial
  probe
  misc_feature (1)..(25): SEQ ID NO: 6616; WAN024EUQ; Start 34; Stop 58
cttcgttattgggcggttacattag

SEQ ID NO: 444107 - DNA, 25 bp, Artificial
  probe
  misc_feature (1)..(25): SEQ ID NO: 6616; WAN024EUQ; Start 38; Stop 62
gttattgggcggttacattagaagc

SEQ ID NO: 444108 - DNA, 25 bp, Artificial
  probe
  misc_feature (1)..(25): SEQ ID NO: 6616; WAN024EUQ; Start 36; Stop 60
tcgttattgggcggttacattagaa

SEQ ID NO: 444109 - DNA, 25 bp, Artificial
  probe
  misc_feature (1)..(25): SEQ ID NO: 6616; WAN024EUQ; Start 35; Stop 59
ttcgttattgggcggttacattaga

SEQ ID NO: 444110 - DNA, 25 bp, Artificial
  probe
  misc_feature (1)..(25): SEQ ID NO: 6616; WAN024EUQ; Start 69; Stop 93
taatctcattaaattcctcaaacgc

SEQ ID NO: 444111 - DNA, 25 bp, Artificial
  probe
  misc_feature (1)..(25): SEQ ID NO: 6616; WAN024EUQ; Start 28; Stop 52
aatagacttcgttattgggcggtta

SEQ ID NO: 444112 - DNA, 25 bp, Artificial
  probe
  misc_feature (1)..(25): SEQ ID NO: 6616; WAN024EUQ; Start 33; Stop 57
acttcgttattgggcggttacatta

SEQ ID NO: 444113 - DNA, 25 bp, Artificial
  probe
  misc_feature (1)..(25): SEQ ID NO: 6616; WAN024EUQ; Start 29; Stop 53
atagacttcgttattgggcggttac

SEQ ID NO: 444114 - DNA, 25 bp, Artificial
  probe
  misc_feature (1)..(25): SEQ ID NO: 6616; WAN024EUQ; Start 46; Stop 70
gcggttacattagaagcgactaata

SEQ ID NO: 444115 - DNA, 25 bp, Artificial
  probe
  misc_feature (1)..(25): SEQ ID NO: 6616; WAN024EUQ; Start 47; Stop 71
cggttacattagaagcgactaataa

SEQ ID NO: 444116 - DNA, 25 bp, Artificial
  probe
  misc_feature (1)..(25): SEQ ID NO: 6616; WAN024EUQ; Start 74; Stop 98
tcattaaattcctcaaacgcaacgc

SEQ ID NO: 444117 - DNA, 25 bp, Artificial
  probe
  misc_feature (1)..(25): SEQ ID NO: 6616; WAN024EUQ; Start 39; Stop 63
ttattgggcggttacattagaagcg

SEQ ID NO: 444118 - DNA, 25 bp, Artificial
  probe
  misc_feature (1)..(25): SEQ ID NO: 6616; WAN024EUQ; Start 52; Stop 76
acattagaagcgactaataatctca

SEQ ID NO: 444119 - DNA, 25 bp, Artificial
  probe
  misc_feature (1)..(25): SEQ ID NO: 6616; WAN024EUQ; Start 32; Stop 56
gacttcgttattgggcggttacatt

SEQ ID NO: 444120 - DNA, 25 bp, Artificial
  probe
  misc_feature (1)..(25): SEQ ID NO: 6616; WAN024EUQ; Start 30; Stop 54
tagacttcgttattgggcggttaca

SEQ ID NO: 444121 - DNA, 25 bp, Artificial
  probe
  misc_feature (1)..(25): SEQ ID NO: 6616; WAN024EUQ; Start 56; Stop 80
tagaagcgactaataatctcattaa

SEQ ID NO: 444122 - DNA, 25 bp, Artificial
  probe
  misc_feature (1)..(25): SEQ ID NO: 6616; WAN024EUQ; Start 61; Stop 85
gcgactaataatctcattaaattcc

SEQ ID NO: 444123 - DNA, 25 bp, Artificial
  probe
  misc_feature (1)..(25): SEQ ID NO: 6616; WAN024EUQ; Start 57; Stop 81
agaagcgactaataatctcattaaa

SEQ ID NO: 444124 - DNA, 25 bp, Artificial
  probe
  misc_feature (1)..(25): SEQ ID NO: 6616; WAN024EUQ; Start 75; Stop 99
cattaaattcctcaaacgcaacgcc

SEQ ID NO: 444125 - DNA, 25 bp, Artificial
  probe
  misc_feature (1)..(25): SEQ ID NO: 6616; WAN024EUQ; Start 45; Stop 69
ggcggttacattagaagcgactaat

SEQ ID NO: 444126 - DNA, 25 bp, Artificial
  probe
  misc_feature (1)..(25): SEQ ID NO: 6616; WAN024EUQ; Start 76; Stop 100
attaaattcctcaaacgcaacgcct

SEQ ID NO: 444127 - DNA, 25 bp, Artificial
  probe
  misc_feature (1)..(25): SEQ ID NO: 6616; WAN024EUQ; Start 55; Stop 79
ttagaagcgactaataatctcatta

SEQ ID NO: 444128 - DNA, 25 bp, Artificial
  probe
  misc_feature (1)..(25): SEQ ID NO: 6616; WAN024EUQ; Start 40; Stop 64
tattgggcggttacattagaagcga

SEQ ID NO: 444129 - DNA, 25 bp, Artificial
  probe
  misc_feature (1)..(25): SEQ ID NO: 6616; WAN024EUQ; Start 77; Stop 101
ttaaattcctcaaacgcaacgcctt

SEQ ID NO: 444130 - DNA, 25 bp, Artificial
  probe
  misc_feature (1)..(25): SEQ ID NO: 6616; WAN024EUQ; Start 78; Stop 102
taaattcctcaaacgcaacgccttt

SEQ ID NO: 444131 - DNA, 25 bp, Artificial
  probe
  misc_feature (1)..(25): SEQ ID NO: 6616; WAN024EUQ; Start 31; Stop 55
agacttcgttattgggcggttacat

SEQ ID NO: 444132 - DNA, 25 bp, Artificial
  probe
  misc_feature (1)..(25): SEQ ID NO: 6616; WAN024EUQ; Start 48; Stop 72
ggttacattagaagcgactaataat

SEQ ID NO: 444133 - DNA, 25 bp, Artificial
  probe
  misc_feature (1)..(25): SEQ ID NO: 6616; WAN024EUQ; Start 53; Stop 77
cattagaagcgactaataatctcat

SEQ ID NO: 444134 - DNA, 25 bp, Artificial
  probe
  misc_feature (1)..(25): SEQ ID NO: 6617; WAN024BGB; Start 31; Stop 55
actcttcaatatgtgcgagaatatc

SEQ ID NO: 444135 - DNA, 25 bp, Artificial
  probe
  misc_feature (1)..(25): SEQ ID NO: 6617; WAN024BGB; Start 30; Stop 54
cactcttcaatatgtgcgagaatat

SEQ ID NO: 444136 - DNA, 25 bp, Artificial
  probe
  misc_feature (1)..(25): SEQ ID NO: 6617; WAN024BGB; Start 174; Stop 198
cagttctgaggacacggtaatgatt

SEQ ID NO: 444137 - DNA, 25 bp, Artificial
  probe
  misc_feature (1)..(25): SEQ ID NO: 6617; WAN024BGB; Start 32; Stop 56
ctcttcaatatgtgcgagaatatcg

SEQ ID NO: 444138 - DNA, 25 bp, Artificial
  probe
  misc_feature (1)..(25): SEQ ID NO: 6617; WAN024BGB; Start 47; Stop 71
gagaatatcgcacttatgaacaaat

SEQ ID NO: 444139 - DNA, 25 bp, Artificial
  probe
  misc_feature (1)..(25): SEQ ID NO: 6617; WAN024BGB; Start 49; Stop 73
gaatatcgcacttatgaacaaattg

SEQ ID NO: 444140 - DNA, 25 bp, Artificial
  probe
  misc_feature (1)..(25): SEQ ID NO: 6617; WAN024BGB; Start 48; Stop 72
agaatatcgcacttatgaacaaatt

SEQ ID NO: 444141 - DNA, 25 bp, Artificial
  probe
  misc_feature (1)..(25): SEQ ID NO: 6617; WAN024BGB; Start 173; Stop 197
tcagttctgaggacacggtaatgat

SEQ ID NO: 444142 - DNA, 25 bp, Artificial
  probe
  misc_feature (1)..(25): SEQ ID NO: 6617; WAN024BGB; Start 46; Stop 70
cgagaatatcgcacttatgaacaaa

SEQ ID NO: 444143 - DNA, 25 bp, Artificial
  probe
  misc_feature (1)..(25): SEQ ID NO: 6617; WAN024BGB; Start 50; Stop 74
aatatcgcacttatgaacaaattgc

SEQ ID NO: 444144 - DNA, 25 bp, Artificial
  probe
  misc_feature (1)..(25): SEQ ID NO: 6617; WAN024BGB; Start 3; Stop 27
gagttgtttgatcgcttttcatttg

SEQ ID NO: 444145 - DNA, 25 bp, Artificial
  probe
  misc_feature (1)..(25): SEQ ID NO: 6617; WAN024BGB; Start 2; Stop 26
tgagttgtttgatcgcttttcattt

SEQ ID NO: 444146 - DNA, 25 bp, Artificial
  probe
  misc_feature (1)..(25): SEQ ID NO: 6617; WAN024BGB; Start 4; Stop 28
agttgtttgatcgcttttcatttgg

SEQ ID NO: 444147 - DNA, 25 bp, Artificial
  probe
  misc_feature (1)..(25): SEQ ID NO: 6617; WAN024BGB; Start 5; Stop 29
gttgtttgatcgcttttcatttggc

SEQ ID NO: 444148 - DNA, 25 bp, Artificial
  probe
  misc_feature (1)..(25): SEQ ID NO: 6617; WAN024BGB; Start 1; Stop 25
atgagttgtttgatcgcttttcatt

SEQ ID NO: 444149 - DNA, 25 bp, Artificial
  probe
  misc_feature (1)..(25): SEQ ID NO: 6617; WAN024BGB; Start 170; Stop 194
ctctcagttctgaggacacggtaat

SEQ ID NO: 444150 - DNA, 25 bp, Artificial
  probe
  misc_feature (1)..(25): SEQ ID NO: 6617; WAN024BGB; Start 172; Stop 196
ctcagttctgaggacacggtaatga

SEQ ID NO: 444151 - DNA, 25 bp, Artificial
  probe
  misc_feature (1)..(25): SEQ ID NO: 6617; WAN024BGB; Start 171; Stop 195
tctcagttctgaggacacggtaatg

SEQ ID NO: 444152 - DNA, 25 bp, Artificial
  probe
  misc_feature (1)..(25): SEQ ID NO: 6617; WAN024BGB; Start 6; Stop 30
ttgtttgatcgcttttcatttggcc

SEQ ID NO: 444153 - DNA, 25 bp, Artificial
  probe
  misc_feature (1)..(25): SEQ ID NO: 6618; WAN024BOS; Start 813; Stop 837
tatagcagtcggtattattgtagca

SEQ ID NO: 444154 - DNA, 25 bp, Artificial
  probe
  misc_feature (1)..(25): SEQ ID NO: 6618; WAN024BOS; Start 371; Stop 395
gaggatattcagagacagtaatcgt

SEQ ID NO: 444155 - DNA, 25 bp, Artificial
  probe
  misc_feature (1)..(25): SEQ ID NO: 6618; WAN024BOS; Start 374; Stop 398
gatattcagagacagtaatcgttgg

SEQ ID NO: 444156 - DNA, 25 bp, Artificial
  probe
  misc_feature (1)..(25): SEQ ID NO: 6618; WAN024BOS; Start 373; Stop 397
ggatattcagagacagtaatcgttg

SEQ ID NO: 444157 - DNA, 25 bp, Artificial
  probe
  misc_feature (1)..(25): SEQ ID NO: 6618; WAN024BOS; Start 372; Stop 396
aggatattcagagacagtaatcgtt

SEQ ID NO: 444158 - DNA, 25 bp, Artificial
  probe
  misc_feature (1)..(25): SEQ ID NO: 6618; WAN024BOS; Start 99; Stop 123
tgagtggataattgtagatgatggt

SEQ ID NO: 444159 - DNA, 25 bp, Artificial
  probe
  misc_feature (1)..(25): SEQ ID NO: 6618; WAN024BOS; Start 814; Stop 838
atagcagtcggtattattgtagcaa

SEQ ID NO: 444160 - DNA, 25 bp, Artificial
  probe
  misc_feature (1)..(25): SEQ ID NO: 6618; WAN024BOS; Start 305; Stop 329
ccaccgttattgatagattcacaac

SEQ ID NO: 444161 - DNA, 25 bp, Artificial
  probe
  misc_feature (1)..(25): SEQ ID NO: 6618; WAN024BOS; Start 113; Stop 137
tagatgatggttcaacggatgatac

SEQ ID NO: 444162 - DNA, 25 bp, Artificial
  probe
  misc_feature (1)..(25): SEQ ID NO: 6618; WAN024BOS; Start 112; Stop 136
gtagatgatggttcaacggatgata

SEQ ID NO: 444163 - DNA, 25 bp, Artificial
  probe
  misc_feature (1)..(25): SEQ ID NO: 6618; WAN024BOS; Start 301; Stop 325
atagccaccgttattgatagattca

SEQ ID NO: 444164 - DNA, 25 bp, Artificial
  probe
  misc_feature (1)..(25): SEQ ID NO: 6618; WAN024BOS; Start 302; Stop 326
tagccaccgttattgatagattcac

SEQ ID NO: 444165 - DNA, 25 bp, Artificial
  probe
  misc_feature (1)..(25): SEQ ID NO: 6618; WAN024BOS; Start 107; Stop 131
taattgtagatgatggttcaacgga

SEQ ID NO: 444166 - DNA, 25 bp, Artificial
  probe
  misc_feature (1)..(25): SEQ ID NO: 6618; WAN024BOS; Start 108; Stop 132
aattgtagatgatggttcaacggat

SEQ ID NO: 444167 - DNA, 25 bp, Artificial
  probe
  misc_feature (1)..(25): SEQ ID NO: 6618; WAN024BOS; Start 306; Stop 330
caccgttattgatagattcacaact

SEQ ID NO: 444168 - DNA, 25 bp, Artificial
  probe
  misc_feature (1)..(25): SEQ ID NO: 6618; WAN024BOS; Start 611; Stop 635
acatatctgattacctagaggacgg

SEQ ID NO: 444169 - DNA, 25 bp, Artificial
  probe
  misc_feature (1)..(25): SEQ ID NO: 6618; WAN024BOS; Start 106; Stop 130
ataattgtagatgatggttcaacgg

SEQ ID NO: 444170 - DNA, 25 bp, Artificial
  probe
  misc_feature (1)..(25): SEQ ID NO: 6618; WAN024BOS; Start 101; Stop 125
agtggataattgtagatgatggttc

SEQ ID NO: 444171 - DNA, 25 bp, Artificial
  probe
  misc_feature (1)..(25): SEQ ID NO: 6618; WAN024BOS; Start 100; Stop 124
gagtggataattgtagatgatggtt

SEQ ID NO: 444172 - DNA, 25 bp, Artificial
  probe
  misc_feature (1)..(25): SEQ ID NO: 6618; WAN024BOS; Start 98; Stop 122
ttgagtggataattgtagatgatgg

SEQ ID NO: 444173 - DNA, 25 bp, Artificial
  probe
  misc_feature (1)..(25): SEQ ID NO: 6618; WAN024BOS; Start 812; Stop 836
atatagcagtcggtattattgtagc

SEQ ID NO: 444174 - DNA, 25 bp, Artificial
  probe
  misc_feature (1)..(25): SEQ ID NO: 6618; WAN024BOS; Start 60; Stop 84
attgtatgactctctagtgaagcaa

SEQ ID NO: 444175 - DNA, 25 bp, Artificial
  probe
  misc_feature (1)..(25): SEQ ID NO: 6618; WAN024BOS; Start 59; Stop 83
aattgtatgactctctagtgaagca

SEQ ID NO: 444176 - DNA, 25 bp, Artificial
  probe
  misc_feature (1)..(25): SEQ ID NO: 6618; WAN024BOS; Start 300; Stop 324
tatagccaccgttattgatagattc

SEQ ID NO: 444177 - DNA, 25 bp, Artificial
  probe
  misc_feature (1)..(25): SEQ ID NO: 6618; WAN024BOS; Start 109; Stop 133
attgtagatgatggttcaacggatg

SEQ ID NO: 444178 - DNA, 25 bp, Artificial
  probe
  misc_feature (1)..(25): SEQ ID NO: 6618; WAN024BOS; Start 304; Stop 328
gccaccgttattgatagattcacaa

SEQ ID NO: 444179 - DNA, 25 bp, Artificial
  probe
  misc_feature (1)..(25): SEQ ID NO: 6618; WAN024BOS; Start 102; Stop 126
gtggataattgtagatgatggttca

SEQ ID NO: 444180 - DNA, 25 bp, Artificial
  probe
  misc_feature (1)..(25): SEQ ID NO: 6618; WAN024BOS; Start 610; Stop 634
tacatatctgattacctagaggacg

SEQ ID NO: 444181 - DNA, 25 bp, Artificial
  probe
  misc_feature (1)..(25): SEQ ID NO: 6618; WAN024BOS; Start 111; Stop 135
tgtagatgatggttcaacggatgat

SEQ ID NO: 444182 - DNA, 25 bp, Artificial
  probe
  misc_feature (1)..(25): SEQ ID NO: 6618; WAN024BOS; Start 105; Stop 129
gataattgtagatgatggttcaacg

SEQ ID NO: 444183 - DNA, 25 bp, Artificial
  probe
  misc_feature (1)..(25): SEQ ID NO: 6618; WAN024BOS; Start 613; Stop 637
atatctgattacctagaggacggct

SEQ ID NO: 444184 - DNA, 25 bp, Artificial
  probe
  misc_feature (1)..(25): SEQ ID NO: 6618; WAN024BOS; Start 612; Stop 636
catatctgattacctagaggacggc

SEQ ID NO: 444185 - DNA, 25 bp, Artificial
  probe
  misc_feature (1)..(25): SEQ ID NO: 6618; WAN024BOS; Start 110; Stop 134
ttgtagatgatggttcaacggatga

SEQ ID NO: 444186 - DNA, 25 bp, Artificial
  probe
  misc_feature (1)..(25): SEQ ID NO: 6619; WAN024BP4; Start 669; Stop 693
tgctcatcttgttctcataggtaag

SEQ ID NO: 444187 - DNA, 25 bp, Artificial
  probe
  misc_feature (1)..(25): SEQ ID NO: 6619; WAN024BP4; Start 668; Stop 692
atgctcatcttgttctcataggtaa

SEQ ID NO: 444188 - DNA, 25 bp, Artificial
  probe
  misc_feature (1)..(25): SEQ ID NO: 6619; WAN024BP4; Start 670; Stop 694
gctcatcttgttctcataggtaagg

SEQ ID NO: 444189 - DNA, 25 bp, Artificial
  probe
  misc_feature (1)..(25): SEQ ID NO: 6619; WAN024BP4; Start 765; Stop 789
cgagtcttctaatgtgaatgaactg

SEQ ID NO: 444190 - DNA, 25 bp, Artificial
  probe
  misc_feature (1)..(25): SEQ ID NO: 6619; WAN024BP4; Start 761; Stop 785
taggcgagtcttctaatgtgaatga

SEQ ID NO: 444191 - DNA, 25 bp, Artificial
  probe
  misc_feature (1)..(25): SEQ ID NO: 6619; WAN024BP4; Start 667; Stop 691
gatgctcatcttgttctcataggta

SEQ ID NO: 444192 - DNA, 25 bp, Artificial
  probe
  misc_feature (1)..(25): SEQ ID NO: 6619; WAN024BP4; Start 30; Stop 54
gactatggatagaggtggtgtatct

SEQ ID NO: 444193 - DNA, 25 bp, Artificial
  probe
  misc_feature (1)..(25): SEQ ID NO: 6619; WAN024BP4; Start 764; Stop 788
gcgagtcttctaatgtgaatgaact

SEQ ID NO: 444194 - DNA, 25 bp, Artificial
  probe
  misc_feature (1)..(25): SEQ ID NO: 6619; WAN024BP4; Start 766; Stop 790
gagtcttctaatgtgaatgaactga

SEQ ID NO: 444195 - DNA, 25 bp, Artificial
  probe
  misc_feature (1)..(25): SEQ ID NO: 6619; WAN024BP4; Start 885; Stop 909
ttctgataatgttccaagtgagatt

SEQ ID NO: 444196 - DNA, 25 bp, Artificial
  probe
  misc_feature (1)..(25): SEQ ID NO: 6619; WAN024BP4; Start 760; Stop 784
ttaggcgagtcttctaatgtgaatg

SEQ ID NO: 444197 - DNA, 25 bp, Artificial
  probe
  misc_feature (1)..(25): SEQ ID NO: 6619; WAN024BP4; Start 763; Stop 787
ggcgagtcttctaatgtgaatgaac

SEQ ID NO: 444198 - DNA, 25 bp, Artificial
  probe
  misc_feature (1)..(25): SEQ ID NO: 6619; WAN024BP4; Start 762; Stop 786
aggcgagtcttctaatgtgaatgaa

SEQ ID NO: 444199 - DNA, 25 bp, Artificial
  probe
  misc_feature (1)..(25): SEQ ID NO: 6619; WAN024BP4; Start 29; Stop 53
ggactatggatagaggtggtgtatc

SEQ ID NO: 444200 - DNA, 25 bp, Artificial
  probe
  misc_feature (1)..(25): SEQ ID NO: 6619; WAN024BP4; Start 34; Stop 58
atggatagaggtggtgtatctactt

SEQ ID NO: 444201 - DNA, 25 bp, Artificial
  probe
  misc_feature (1)..(25): SEQ ID NO: 6619; WAN024BP4; Start 767; Stop 791
agtcttctaatgtgaatgaactgat

SEQ ID NO: 444202 - DNA, 25 bp, Artificial
  probe
  misc_feature (1)..(25): SEQ ID NO: 6619; WAN024BP4; Start 33; Stop 57
tatggatagaggtggtgtatctact

SEQ ID NO: 444203 - DNA, 25 bp, Artificial
  probe
  misc_feature (1)..(25): SEQ ID NO: 6619; WAN024BP4; Start 31; Stop 55
actatggatagaggtggtgtatcta

SEQ ID NO: 444204 - DNA, 25 bp, Artificial
  probe
  misc_feature (1)..(25): SEQ ID NO: 6619; WAN024BP4; Start 32; Stop 56
ctatggatagaggtggtgtatctac

SEQ ID NO: 444205 - DNA, 25 bp, Artificial
  probe
  misc_feature (1)..(25): SEQ ID NO: 6619; WAN024BP4; Start 578; Stop 602
ttgttattggtcatgtaggacgatt

SEQ ID NO: 444206 - DNA, 25 bp, Artificial
  probe
  misc_feature (1)..(25): SEQ ID NO: 6619; WAN024BP4; Start 1034; Stop 1058
acctgtctgatatggttcataagtt

SEQ ID NO: 444207 - DNA, 25 bp, Artificial
  probe
  misc_feature (1)..(25): SEQ ID NO: 6619; WAN024BP4; Start 886; Stop 910
tctgataatgttccaagtgagatta

SEQ ID NO: 444208 - DNA, 25 bp, Artificial
  probe
  misc_feature (1)..(25): SEQ ID NO: 6619; WAN024BP4; Start 768; Stop 792
gtcttctaatgtgaatgaactgatt

SEQ ID NO: 444209 - DNA, 25 bp, Artificial
  probe
  misc_feature (1)..(25): SEQ ID NO: 6619; WAN024BP4; Start 882; Stop 906
ggtttctgataatgttccaagtgag

SEQ ID NO: 444210 - DNA, 25 bp, Artificial
  probe
  misc_feature (1)..(25): SEQ ID NO: 6619; WAN024BP4; Start 319; Stop 343
attcctattcgtatttcacattgcc

SEQ ID NO: 444211 - DNA, 25 bp, Artificial
  probe
  misc_feature (1)..(25): SEQ ID NO: 6619; WAN024BP4; Start 321; Stop 345
tcctattcgtatttcacattgccat

SEQ ID NO: 444212 - DNA, 25 bp, Artificial
  probe
  misc_feature (1)..(25): SEQ ID NO: 6619; WAN024BP4; Start 322; Stop 346
cctattcgtatttcacattgccata

SEQ ID NO: 444213 - DNA, 25 bp, Artificial
  probe
  misc_feature (1)..(25): SEQ ID NO: 6619; WAN024BP4; Start 320; Stop 344
ttcctattcgtatttcacattgcca

SEQ ID NO: 444214 - DNA, 25 bp, Artificial
  probe
  misc_feature (1)..(25): SEQ ID NO: 6619; WAN024BP4; Start 684; Stop 708
cataggtaagggagaattggaagag

SEQ ID NO: 444215 - DNA, 25 bp, Artificial
  probe
  misc_feature (1)..(25): SEQ ID NO: 6619; WAN024BP4; Start 309; Stop 333
agagtgtgatattcctattcgtatt

SEQ ID NO: 444216 - DNA, 25 bp, Artificial
  probe
  misc_feature (1)..(25): SEQ ID NO: 6619; WAN024BP4; Start 308; Stop 332
aagagtgtgatattcctattcgtat

SEQ ID NO: 444217 - DNA, 25 bp, Artificial
  probe
  misc_feature (1)..(25): SEQ ID NO: 6619; WAN024BP4; Start 689; Stop 713
gtaagggagaattggaagaggttat

SEQ ID NO: 444218 - DNA, 25 bp, Artificial
  probe
  misc_feature (1)..(25): SEQ ID NO: 6619; WAN024BP4; Start 683; Stop 707
tcataggtaagggagaattggaaga

SEQ ID NO: 444219 - DNA, 25 bp, Artificial
  probe
  misc_feature (1)..(25): SEQ ID NO: 6620; WAN024BPR; Start 83; Stop 107
attatgaaggtagtgagttgaggaa

SEQ ID NO: 444220 - DNA, 25 bp, Artificial
  probe
  misc_feature (1)..(25): SEQ ID NO: 6620; WAN024BPR; Start 82; Stop 106
aattatgaaggtagtgagttgagga

SEQ ID NO: 444221 - DNA, 25 bp, Artificial
  probe
  misc_feature (1)..(25): SEQ ID NO: 6620; WAN024BPR; Start 81; Stop 105
caattatgaaggtagtgagttgagg

SEQ ID NO: 444222 - DNA, 25 bp, Artificial
  probe
  misc_feature (1)..(25): SEQ ID NO: 6620; WAN024BPR; Start 80; Stop 104
acaattatgaaggtagtgagttgag

SEQ ID NO: 444223 - DNA, 25 bp, Artificial
  probe
  misc_feature (1)..(25): SEQ ID NO: 6620; WAN024BPR; Start 40; Stop 64
tataatactggcgagacagacattg

SEQ ID NO: 444224 - DNA, 25 bp, Artificial
  probe
  misc_feature (1)..(25): SEQ ID NO: 6620; WAN024BPR; Start 41; Stop 65
ataatactggcgagacagacattga

SEQ ID NO: 444225 - DNA, 25 bp, Artificial
  probe
  misc_feature (1)..(25): SEQ ID NO: 6620; WAN024BPR; Start 197; Stop 221
tattaggagctattagacatggagg

SEQ ID NO: 444226 - DNA, 25 bp, Artificial
  probe
  misc_feature (1)..(25): SEQ ID NO: 6620; WAN024BPR; Start 39; Stop 63
ttataatactggcgagacagacatt

SEQ ID NO: 444227 - DNA, 25 bp, Artificial
  probe
  misc_feature (1)..(25): SEQ ID NO: 6620; WAN024BPR; Start 198; Stop 222
attaggagctattagacatggaggc

SEQ ID NO: 444228 - DNA, 25 bp, Artificial
  probe
  misc_feature (1)..(25): SEQ ID NO: 6620; WAN024BPR; Start 414; Stop 438
acataatcagcgtaaatacagaggt

SEQ ID NO: 444229 - DNA, 25 bp, Artificial
  probe
  misc_feature (1)..(25): SEQ ID NO: 6620; WAN024BPR; Start 85; Stop 109
tatgaaggtagtgagttgaggaaag

SEQ ID NO: 444230 - DNA, 25 bp, Artificial
  probe
  misc_feature (1)..(25): SEQ ID NO: 6620; WAN024BPR; Start 415; Stop 439
cataatcagcgtaaatacagaggtg

SEQ ID NO: 444231 - DNA, 25 bp, Artificial
  probe
  misc_feature (1)..(25): SEQ ID NO: 6620; WAN024BPR; Start 455; Stop 479
tcccttatggttatggtgtaatgaa

SEQ ID NO: 444232 - DNA, 25 bp, Artificial
  probe
  misc_feature (1)..(25): SEQ ID NO: 6620; WAN024BPR; Start 454; Stop 478
ttcccttatggttatggtgtaatga

SEQ ID NO: 444233 - DNA, 25 bp, Artificial
  probe
  misc_feature (1)..(25): SEQ ID NO: 6620; WAN024BPR; Start 449; Stop 473
acttattcccttatggttatggtgt

SEQ ID NO: 444234 - DNA, 25 bp, Artificial
  probe
  misc_feature (1)..(25): SEQ ID NO: 6620; WAN024BPR; Start 84; Stop 108
ttatgaaggtagtgagttgaggaaa

SEQ ID NO: 444235 - DNA, 25 bp, Artificial
  probe
  misc_feature (1)..(25): SEQ ID NO: 6620; WAN024BPR; Start 447; Stop 471
tgacttattcccttatggttatggt

SEQ ID NO: 444236 - DNA, 25 bp, Artificial
  probe
  misc_feature (1)..(25): SEQ ID NO: 6620; WAN024BPR; Start 413; Stop 437
aacataatcagcgtaaatacagagg

SEQ ID NO: 444237 - DNA, 25 bp, Artificial
  probe
  misc_feature (1)..(25): SEQ ID NO: 6620; WAN024BPR; Start 79; Stop 103
tacaattatgaaggtagtgagttga

SEQ ID NO: 444238 - DNA, 25 bp, Artificial
  probe
  misc_feature (1)..(25): SEQ ID NO: 6620; WAN024BPR; Start 448; Stop 472
gacttattcccttatggttatggtg

SEQ ID NO: 444239 - DNA, 25 bp, Artificial
  probe
  misc_feature (1)..(25): SEQ ID NO: 6620; WAN024BPR; Start 42; Stop 66
taatactggcgagacagacattgag

SEQ ID NO: 444240 - DNA, 25 bp, Artificial
  probe
  misc_feature (1)..(25): SEQ ID NO: 6620; WAN024BPR; Start 460; Stop 484
tatggttatggtgtaatgaaatggg

SEQ ID NO: 444241 - DNA, 25 bp, Artificial
  probe
  misc_feature (1)..(25): SEQ ID NO: 6620; WAN024BPR; Start 456; Stop 480
cccttatggttatggtgtaatgaaa

SEQ ID NO: 444242 - DNA, 25 bp, Artificial
  probe
  misc_feature (1)..(25): SEQ ID NO: 6620; WAN024BPR; Start 86; Stop 110
atgaaggtagtgagttgaggaaagt

SEQ ID NO: 444243 - DNA, 25 bp, Artificial
  probe
  misc_feature (1)..(25): SEQ ID NO: 6620; WAN024BPR; Start 88; Stop 112
gaaggtagtgagttgaggaaagttc

SEQ ID NO: 444244 - DNA, 25 bp, Artificial
  probe
  misc_feature (1)..(25): SEQ ID NO: 6620; WAN024BPR; Start 453; Stop 477
attcccttatggttatggtgtaatg

SEQ ID NO: 444245 - DNA, 25 bp, Artificial
  probe
  misc_feature (1)..(25): SEQ ID NO: 6620; WAN024BPR; Start 87; Stop 111
tgaaggtagtgagttgaggaaagtt

SEQ ID NO: 444246 - DNA, 25 bp, Artificial
  probe
  misc_feature (1)..(25): SEQ ID NO: 6620; WAN024BPR; Start 101; Stop 125
tgaggaaagttcaagttcgtatgat

SEQ ID NO: 444247 - DNA, 25 bp, Artificial
  probe
  misc_feature (1)..(25): SEQ ID NO: 6620; WAN024BPR; Start 103; Stop 127
aggaaagttcaagttcgtatgattg

SEQ ID NO: 444248 - DNA, 25 bp, Artificial
  probe
  misc_feature (1)..(25): SEQ ID NO: 6620; WAN024BPR; Start 411; Stop 435
tcaacataatcagcgtaaatacaga

SEQ ID NO: 444249 - DNA, 25 bp, Artificial
  probe
  misc_feature (1)..(25): SEQ ID NO: 6620; WAN024BPR; Start 102; Stop 126
gaggaaagttcaagttcgtatgatt

SEQ ID NO: 444250 - DNA, 25 bp, Artificial
  probe
  misc_feature (1)..(25): SEQ ID NO: 6620; WAN024BPR; Start 114; Stop 138
agttcgtatgattgatatgctttct

SEQ ID NO: 444251 - DNA, 25 bp, Artificial
  probe
  misc_feature (1)..(25): SEQ ID NO: 6620; WAN024BPR; Start 446; Stop 470
ttgacttattcccttatggttatgg

SEQ ID NO: 444252 - DNA, 25 bp, Artificial
  probe
  misc_feature (1)..(25): SEQ ID NO: 6621; WAN024D7N; Start 32; Stop 56
ttacaagagatgccgaactgagata

SEQ ID NO: 444253 - DNA, 25 bp, Artificial
  probe
  misc_feature (1)..(25): SEQ ID NO: 6621; WAN024D7N; Start 204; Stop 228
ctctcttatcggagttacaggagta

SEQ ID NO: 444254 - DNA, 25 bp, Artificial
  probe
  misc_feature (1)..(25): SEQ ID NO: 6621; WAN024D7N; Start 33; Stop 57
tacaagagatgccgaactgagatac

SEQ ID NO: 444255 - DNA, 25 bp, Artificial
  probe
  misc_feature (1)..(25): SEQ ID NO: 6621; WAN024D7N; Start 148; Stop 172
aattgcgttatctggagacagttag

SEQ ID NO: 444256 - DNA, 25 bp, Artificial
  probe
  misc_feature (1)..(25): SEQ ID NO: 6621; WAN024D7N; Start 205; Stop 229
tctcttatcggagttacaggagtaa

SEQ ID NO: 444257 - DNA, 25 bp, Artificial
  probe
  misc_feature (1)..(25): SEQ ID NO: 6621; WAN024D7N; Start 31; Stop 55
cttacaagagatgccgaactgagat

SEQ ID NO: 444258 - DNA, 25 bp, Artificial
  probe
  misc_feature (1)..(25): SEQ ID NO: 6621; WAN024D7N; Start 206; Stop 230
ctcttatcggagttacaggagtaat

SEQ ID NO: 444259 - DNA, 25 bp, Artificial
  probe
  misc_feature (1)..(25): SEQ ID NO: 6621; WAN024D7N; Start 210; Stop 234
tatcggagttacaggagtaattcaa

SEQ ID NO: 444260 - DNA, 25 bp, Artificial
  probe
  misc_feature (1)..(25): SEQ ID NO: 6621; WAN024D7N; Start 209; Stop 233
ttatcggagttacaggagtaattca

SEQ ID NO: 444261 - DNA, 25 bp, Artificial
  probe
  misc_feature (1)..(25): SEQ ID NO: 6621; WAN024D7N; Start 274; Stop 298
gtcacagaagttgttgccagtaatt

SEQ ID NO: 444262 - DNA, 25 bp, Artificial
  probe
  misc_feature (1)..(25): SEQ ID NO: 6621; WAN024D7N; Start 207; Stop 231
tcttatcggagttacaggagtaatt

SEQ ID NO: 444263 - DNA, 25 bp, Artificial
  probe
  misc_feature (1)..(25): SEQ ID NO: 6621; WAN024D7N; Start 208; Stop 232
cttatcggagttacaggagtaattc

SEQ ID NO: 444264 - DNA, 25 bp, Artificial
  probe
  misc_feature (1)..(25): SEQ ID NO: 6621; WAN024D7N; Start 271; Stop 295
tatgtcacagaagttgttgccagta

SEQ ID NO: 444265 - DNA, 25 bp, Artificial
  probe
  misc_feature (1)..(25): SEQ ID NO: 6621; WAN024D7N; Start 376; Stop 400
ggctacagtaatcaaggcagttctt

SEQ ID NO: 444266 - DNA, 25 bp, Artificial
  probe
  misc_feature (1)..(25): SEQ ID NO: 6621; WAN024D7N; Start 378; Stop 402
ctacagtaatcaaggcagttctttc

SEQ ID NO: 444267 - DNA, 25 bp, Artificial
  probe
  misc_feature (1)..(25): SEQ ID NO: 6621; WAN024D7N; Start 62; Stop 86
aatctaatattgcggttgctacgtt

SEQ ID NO: 444268 - DNA, 25 bp, Artificial
  probe
  misc_feature (1)..(25): SEQ ID NO: 6621; WAN024D7N; Start 379; Stop 403
tacagtaatcaaggcagttctttcc

SEQ ID NO: 444269 - DNA, 25 bp, Artificial
  probe
  misc_feature (1)..(25): SEQ ID NO: 6621; WAN024D7N; Start 382; Stop 406
agtaatcaaggcagttctttccaaa

SEQ ID NO: 444270 - DNA, 25 bp, Artificial
  probe
  misc_feature (1)..(25): SEQ ID NO: 6621; WAN024D7N; Start 29; Stop 53
gacttacaagagatgccgaactgag

SEQ ID NO: 444271 - DNA, 25 bp, Artificial
  probe
  misc_feature (1)..(25): SEQ ID NO: 6621; WAN024D7N; Start 45; Stop 69
cgaactgagatacacgcaatctaat

SEQ ID NO: 444272 - DNA, 25 bp, Artificial
  probe
  misc_feature (1)..(25): SEQ ID NO: 6621; WAN024D7N; Start 35; Stop 59
caagagatgccgaactgagatacac

SEQ ID NO: 444273 - DNA, 25 bp, Artificial
  probe
  misc_feature (1)..(25): SEQ ID NO: 6621; WAN024D7N; Start 377; Stop 401
gctacagtaatcaaggcagttcttt

SEQ ID NO: 444274 - DNA, 25 bp, Artificial
  probe
  misc_feature (1)..(25): SEQ ID NO: 6621; WAN024D7N; Start 381; Stop 405
cagtaatcaaggcagttctttccaa

SEQ ID NO: 444275 - DNA, 25 bp, Artificial
  probe
  misc_feature (1)..(25): SEQ ID NO: 6621; WAN024D7N; Start 46; Stop 70
gaactgagatacacgcaatctaata

SEQ ID NO: 444276 - DNA, 25 bp, Artificial
  probe
  misc_feature (1)..(25): SEQ ID NO: 6621; WAN024D7N; Start 92; Stop 116
ttgctgtaaaccgtccatttaagaa

SEQ ID NO: 444277 - DNA, 25 bp, Artificial
  probe
  misc_feature (1)..(25): SEQ ID NO: 6621; WAN024D7N; Start 405; Stop 429
aaatggaaatagttacgggcaacaa

SEQ ID NO: 444278 - DNA, 25 bp, Artificial
  probe
  misc_feature (1)..(25): SEQ ID NO: 6621; WAN024D7N; Start 18; Stop 42
tttagtagggcgacttacaagagat

SEQ ID NO: 444279 - DNA, 25 bp, Artificial
  probe
  misc_feature (1)..(25): SEQ ID NO: 6621; WAN024D7N; Start 273; Stop 297
tgtcacagaagttgttgccagtaat

SEQ ID NO: 444280 - DNA, 25 bp, Artificial
  probe
  misc_feature (1)..(25): SEQ ID NO: 6621; WAN024D7N; Start 272; Stop 296
atgtcacagaagttgttgccagtaa

SEQ ID NO: 444281 - DNA, 25 bp, Artificial
  probe
  misc_feature (1)..(25): SEQ ID NO: 6621; WAN024D7N; Start 270; Stop 294
ttatgtcacagaagttgttgccagt

SEQ ID NO: 444282 - DNA, 25 bp, Artificial
  probe
  misc_feature (1)..(25): SEQ ID NO: 6621; WAN024D7N; Start 91; Stop 115
cttgctgtaaaccgtccatttaaga

SEQ ID NO: 444283 - DNA, 25 bp, Artificial
  probe
  misc_feature (1)..(25): SEQ ID NO: 6621; WAN024D7N; Start 90; Stop 114
tcttgctgtaaaccgtccatttaag

SEQ ID NO: 444284 - DNA, 25 bp, Artificial
  probe
  misc_feature (1)..(25): SEQ ID NO: 6621; WAN024D7N; Start 89; Stop 113
ctcttgctgtaaaccgtccatttaa

SEQ ID NO: 444285 - DNA, 25 bp, Artificial
  probe
  misc_feature (1)..(25): SEQ ID NO: 6622; WAN024CQZ; Start 89; Stop 113
caggatcatttgccaagttcataaa

SEQ ID NO: 444286 - DNA, 25 bp, Artificial
  probe
  misc_feature (1)..(25): SEQ ID NO: 6622; WAN024CQZ; Start 90; Stop 114
aggatcatttgccaagttcataaat

SEQ ID NO: 444287 - DNA, 25 bp, Artificial
  probe
  misc_feature (1)..(25): SEQ ID NO: 6622; WAN024CQZ; Start 1; Stop 25
atgataactagaacgtgcatatctt

SEQ ID NO: 444288 - DNA, 25 bp, Artificial
  probe
  misc_feature (1)..(25): SEQ ID NO: 6622; WAN024CQZ; Start 182; Stop 206
taatacccattgctgcaaatacaac

SEQ ID NO: 444289 - DNA, 25 bp, Artificial
  probe
  misc_feature (1)..(25): SEQ ID NO: 6622; WAN024CQZ; Start 181; Stop 205
gtaatacccattgctgcaaatacaa

SEQ ID NO: 444290 - DNA, 25 bp, Artificial
  probe
  misc_feature (1)..(25): SEQ ID NO: 6622; WAN024CQZ; Start 179; Stop 203
aagtaatacccattgctgcaaatac

SEQ ID NO: 444291 - DNA, 25 bp, Artificial
  probe
  misc_feature (1)..(25): SEQ ID NO: 6622; WAN024CQZ; Start 180; Stop 204
agtaatacccattgctgcaaataca

SEQ ID NO: 444292 - DNA, 25 bp, Artificial
  probe
  misc_feature (1)..(25): SEQ ID NO: 6622; WAN024CQZ; Start 178; Stop 202
aaagtaatacccattgctgcaaata

SEQ ID NO: 444293 - DNA, 25 bp, Artificial
  probe
  misc_feature (1)..(25): SEQ ID NO: 6622; WAN024CQZ; Start 91; Stop 115
ggatcatttgccaagttcataaata

SEQ ID NO: 444294 - DNA, 25 bp, Artificial
  probe
  misc_feature (1)..(25): SEQ ID NO: 6622; WAN024CQZ; Start 99; Stop 123
tgccaagttcataaataaaaccgaa

SEQ ID NO: 444295 - DNA, 25 bp, Artificial
  probe
  misc_feature (1)..(25): SEQ ID NO: 6622; WAN024CQZ; Start 98; Stop 122
ttgccaagttcataaataaaaccga

SEQ ID NO: 444296 - DNA, 25 bp, Artificial
  probe
  misc_feature (1)..(25): SEQ ID NO: 6622; WAN024CQZ; Start 172; Stop 196
tcttcaaaagtaatacccattgctg

SEQ ID NO: 444297 - DNA, 25 bp, Artificial
  probe
  misc_feature (1)..(25): SEQ ID NO: 6622; WAN024CQZ; Start 97; Stop 121
tttgccaagttcataaataaaaccg

SEQ ID NO: 444298 - DNA, 25 bp, Artificial
  probe
  misc_feature (1)..(25): SEQ ID NO: 6622; WAN024CQZ; Start 173; Stop 197
cttcaaaagtaatacccattgctgc

SEQ ID NO: 444299 - DNA, 25 bp, Artificial
  probe
  misc_feature (1)..(25): SEQ ID NO: 6622; WAN024CQZ; Start 2; Stop 26
tgataactagaacgtgcatatcttt

SEQ ID NO: 444300 - DNA, 25 bp, Artificial
  probe
  misc_feature (1)..(25): SEQ ID NO: 6622; WAN024CQZ; Start 171; Stop 195
ttcttcaaaagtaatacccattgct

SEQ ID NO: 444301 - DNA, 25 bp, Artificial
  probe
  misc_feature (1)..(25): SEQ ID NO: 6622; WAN024CQZ; Start 231; Stop 255
aacagtcgcttgtcttgctatctga

SEQ ID NO: 444302 - DNA, 25 bp, Artificial
  probe
  misc_feature (1)..(25): SEQ ID NO: 6622; WAN024CQZ; Start 183; Stop 207
aatacccattgctgcaaatacaacc

SEQ ID NO: 444303 - DNA, 25 bp, Artificial
  probe
  misc_feature (1)..(25): SEQ ID NO: 6622; WAN024CQZ; Start 170; Stop 194
cttcttcaaaagtaatacccattgc

SEQ ID NO: 444304 - DNA, 25 bp, Artificial
  probe
  misc_feature (1)..(25): SEQ ID NO: 6622; WAN024CQZ; Start 169; Stop 193
gcttcttcaaaagtaatacccattg

SEQ ID NO: 444305 - DNA, 25 bp, Artificial
  probe
  misc_feature (1)..(25): SEQ ID NO: 6622; WAN024CQZ; Start 227; Stop 251
ttaaaacagtcgcttgtcttgctat

SEQ ID NO: 444306 - DNA, 25 bp, Artificial
  probe
  misc_feature (1)..(25): SEQ ID NO: 6622; WAN024CQZ; Start 75; Stop 99
aatacgctcaattgcaggatcattt

SEQ ID NO: 444307 - DNA, 25 bp, Artificial
  probe
  misc_feature (1)..(25): SEQ ID NO: 6622; WAN024CQZ; Start 230; Stop 254
aaacagtcgcttgtcttgctatctg

SEQ ID NO: 444308 - DNA, 25 bp, Artificial
  probe
  misc_feature (1)..(25): SEQ ID NO: 6622; WAN024CQZ; Start 32; Stop 56
aagctagatactctgccgcagttaa

SEQ ID NO: 444309 - DNA, 25 bp, Artificial
  probe
  misc_feature (1)..(25): SEQ ID NO: 6622; WAN024CQZ; Start 88; Stop 112
gcaggatcatttgccaagttcataa

SEQ ID NO: 444310 - DNA, 25 bp, Artificial
  probe
  misc_feature (1)..(25): SEQ ID NO: 6622; WAN024CQZ; Start 228; Stop 252
taaaacagtcgcttgtcttgctatc

SEQ ID NO: 444311 - DNA, 25 bp, Artificial
  probe
  misc_feature (1)..(25): SEQ ID NO: 6622; WAN024CQZ; Start 218; Stop 242
catcagaatttaaaacagtcgcttg

SEQ ID NO: 444312 - DNA, 25 bp, Artificial
  probe
  misc_feature (1)..(25): SEQ ID NO: 6622; WAN024CQZ; Start 217; Stop 241
tcatcagaatttaaaacagtcgctt

SEQ ID NO: 444313 - DNA, 25 bp, Artificial
  probe
  misc_feature (1)..(25): SEQ ID NO: 6622; WAN024CQZ; Start 166; Stop 190
tcagcttcttcaaaagtaataccca

SEQ ID NO: 444314 - DNA, 25 bp, Artificial
  probe
  misc_feature (1)..(25): SEQ ID NO: 6622; WAN024CQZ; Start 165; Stop 189
ctcagcttcttcaaaagtaataccc

SEQ ID NO: 444315 - DNA, 25 bp, Artificial
  probe
  misc_feature (1)..(25): SEQ ID NO: 6622; WAN024CQZ; Start 74; Stop 98
caatacgctcaattgcaggatcatt

SEQ ID NO: 444316 - DNA, 25 bp, Artificial
  probe
  misc_feature (1)..(25): SEQ ID NO: 6622; WAN024CQZ; Start 216; Stop 240
ttcatcagaatttaaaacagtcgct

SEQ ID NO: 444317 - DNA, 25 bp, Artificial
  probe
  misc_feature (1)..(25): SEQ ID NO: 6622; WAN024CQZ; Start 167; Stop 191
cagcttcttcaaaagtaatacccat

SEQ ID NO: 444318 - DNA, 25 bp, Artificial
  probe
  misc_feature (1)..(25): SEQ ID NO: 6623; WAN024BTB; Start 84; Stop 108
ttcactcgttattactggttccttg

SEQ ID NO: 444319 - DNA, 25 bp, Artificial
  probe
  misc_feature (1)..(25): SEQ ID NO: 6623; WAN024BTB; Start 109; Stop 133
gcaagaggtaatccaagaatcaagg

SEQ ID NO: 444320 - DNA, 25 bp, Artificial
  probe
  misc_feature (1)..(25): SEQ ID NO: 6623; WAN024BTB; Start 108; Stop 132
ggcaagaggtaatccaagaatcaag

SEQ ID NO: 444321 - DNA, 25 bp, Artificial
  probe
  misc_feature (1)..(25): SEQ ID NO: 6623; WAN024BTB; Start 398; Stop 422
agactcgctctatgattcaggaatt

SEQ ID NO: 444322 - DNA, 25 bp, Artificial
  probe
  misc_feature (1)..(25): SEQ ID NO: 6623; WAN024BTB; Start 6; Stop 30
aacttataggaatgacttgctgtct

SEQ ID NO: 444323 - DNA, 25 bp, Artificial
  probe
  misc_feature (1)..(25): SEQ ID NO: 6623; WAN024BTB; Start 85; Stop 109
tcactcgttattactggttccttgg

SEQ ID NO: 444324 - DNA, 25 bp, Artificial
  probe
  misc_feature (1)..(25): SEQ ID NO: 6623; WAN024BTB; Start 4; Stop 28
ataacttataggaatgacttgctgt

SEQ ID NO: 444325 - DNA, 25 bp, Artificial
  probe
  misc_feature (1)..(25): SEQ ID NO: 6623; WAN024BTB; Start 7; Stop 31
acttataggaatgacttgctgtcta

SEQ ID NO: 444326 - DNA, 25 bp, Artificial
  probe
  misc_feature (1)..(25): SEQ ID NO: 6623; WAN024BTB; Start 110; Stop 134
caagaggtaatccaagaatcaagga

SEQ ID NO: 444327 - DNA, 25 bp, Artificial
  probe
  misc_feature (1)..(25): SEQ ID NO: 6623; WAN024BTB; Start 397; Stop 421
cagactcgctctatgattcaggaat

SEQ ID NO: 444328 - DNA, 25 bp, Artificial
  probe
  misc_feature (1)..(25): SEQ ID NO: 6623; WAN024BTB; Start 2; Stop 26
tgataacttataggaatgacttgct

SEQ ID NO: 444329 - DNA, 25 bp, Artificial
  probe
  misc_feature (1)..(25): SEQ ID NO: 6623; WAN024BTB; Start 91; Stop 115
gttattactggttccttggcaagag

SEQ ID NO: 444330 - DNA, 25 bp, Artificial
  probe
  misc_feature (1)..(25): SEQ ID NO: 6623; WAN024BTB; Start 5; Stop 29
taacttataggaatgacttgctgtc

SEQ ID NO: 444331 - DNA, 25 bp, Artificial
  probe
  misc_feature (1)..(25): SEQ ID NO: 6623; WAN024BTB; Start 3; Stop 27
gataacttataggaatgacttgctg

SEQ ID NO: 444332 - DNA, 25 bp, Artificial
  probe
  misc_feature (1)..(25): SEQ ID NO: 6623; WAN024BTB; Start 278; Stop 302
gaagtcgttatcgtggaattattaa

SEQ ID NO: 444333 - DNA, 25 bp, Artificial
  probe
  misc_feature (1)..(25): SEQ ID NO: 6623; WAN024BTB; Start 83; Stop 107
tttcactcgttattactggttcctt

SEQ ID NO: 444334 - DNA, 25 bp, Artificial
  probe
  misc_feature (1)..(25): SEQ ID NO: 6623; WAN024BTB; Start 82; Stop 106
atttcactcgttattactggttcct

SEQ ID NO: 444335 - DNA, 25 bp, Artificial
  probe
  misc_feature (1)..(25): SEQ ID NO: 6623; WAN024BTB; Start 8; Stop 32
cttataggaatgacttgctgtctaa

SEQ ID NO: 444336 - DNA, 25 bp, Artificial
  probe
  misc_feature (1)..(25): SEQ ID NO: 6623; WAN024BTB; Start 210; Stop 234
tttagagggaaggtttcactttgta

SEQ ID NO: 444337 - DNA, 25 bp, Artificial
  probe
  misc_feature (1)..(25): SEQ ID NO: 6623; WAN024BTB; Start 165; Stop 189
agttatagtagacagtattcagcaa

SEQ ID NO: 444338 - DNA, 25 bp, Artificial
  probe
  misc_feature (1)..(25): SEQ ID NO: 6623; WAN024BTB; Start 81; Stop 105
aatttcactcgttattactggttcc

SEQ ID NO: 444339 - DNA, 25 bp, Artificial
  probe
  misc_feature (1)..(25): SEQ ID NO: 6623; WAN024BTB; Start 207; Stop 231
gactttagagggaaggtttcacttt

SEQ ID NO: 444340 - DNA, 25 bp, Artificial
  probe
  misc_feature (1)..(25): SEQ ID NO: 6623; WAN024BTB; Start 129; Stop 153
caaggatgggaaattagaatcggat

SEQ ID NO: 444341 - DNA, 25 bp, Artificial
  probe
  misc_feature (1)..(25): SEQ ID NO: 6623; WAN024BTB; Start 127; Stop 151
atcaaggatgggaaattagaatcgg

SEQ ID NO: 444342 - DNA, 25 bp, Artificial
  probe
  misc_feature (1)..(25): SEQ ID NO: 6623; WAN024BTB; Start 130; Stop 154
aaggatgggaaattagaatcggata

SEQ ID NO: 444343 - DNA, 25 bp, Artificial
  probe
  misc_feature (1)..(25): SEQ ID NO: 6623; WAN024BTB; Start 209; Stop 233
ctttagagggaaggtttcactttgt

SEQ ID NO: 444344 - DNA, 25 bp, Artificial
  probe
  misc_feature (1)..(25): SEQ ID NO: 6623; WAN024BTB; Start 208; Stop 232
actttagagggaaggtttcactttg

SEQ ID NO: 444345 - DNA, 25 bp, Artificial
  probe
  misc_feature (1)..(25): SEQ ID NO: 6623; WAN024BTB; Start 88; Stop 112
ctcgttattactggttccttggcaa

SEQ ID NO: 444346 - DNA, 25 bp, Artificial
  probe
  misc_feature (1)..(25): SEQ ID NO: 6623; WAN024BTB; Start 126; Stop 150
aatcaaggatgggaaattagaatcg

SEQ ID NO: 444347 - DNA, 25 bp, Artificial
  probe
  misc_feature (1)..(25): SEQ ID NO: 6623; WAN024BTB; Start 131; Stop 155
aggatgggaaattagaatcggatat

SEQ ID NO: 444348 - DNA, 25 bp, Artificial
  probe
  misc_feature (1)..(25): SEQ ID NO: 6623; WAN024BTB; Start 399; Stop 423
gactcgctctatgattcaggaattt

SEQ ID NO: 444349 - DNA, 25 bp, Artificial
  probe
  misc_feature (1)..(25): SEQ ID NO: 6623; WAN024BTB; Start 206; Stop 230
agactttagagggaaggtttcactt

SEQ ID NO: 444350 - DNA, 25 bp, Artificial
  probe
  misc_feature (1)..(25): SEQ ID NO: 6623; WAN024BTB; Start 205; Stop 229
aagactttagagggaaggtttcact

SEQ ID NO: 444351 - DNA, 25 bp, Artificial
  probe
  misc_feature (1)..(25): SEQ ID NO: 6624; WAN024BTE; Start 420; Stop 444
aatcattacagcagaattaccaagg

SEQ ID NO: 444352 - DNA, 25 bp, Artificial
  probe
  misc_feature (1)..(25): SEQ ID NO: 6624; WAN024BTE; Start 418; Stop 442
tcaatcattacagcagaattaccaa

SEQ ID NO: 444353 - DNA, 25 bp, Artificial
  probe
  misc_feature (1)..(25): SEQ ID NO: 6624; WAN024BTE; Start 419; Stop 443
caatcattacagcagaattaccaag

SEQ ID NO: 444354 - DNA, 25 bp, Artificial
  probe
  misc_feature (1)..(25): SEQ ID NO: 6624; WAN024BTE; Start 417; Stop 441
ttcaatcattacagcagaattacca

SEQ ID NO: 444355 - DNA, 25 bp, Artificial
  probe
  misc_feature (1)..(25): SEQ ID NO: 6624; WAN024BTE; Start 323; Stop 347
aggaattggactgtaactatgtatt

SEQ ID NO: 444356 - DNA, 25 bp, Artificial
  probe
  misc_feature (1)..(25): SEQ ID NO: 6624; WAN024BTE; Start 322; Stop 346
aaggaattggactgtaactatgtat

SEQ ID NO: 444357 - DNA, 25 bp, Artificial
  probe
  misc_feature (1)..(25): SEQ ID NO: 6624; WAN024BTE; Start 320; Stop 344
ataaggaattggactgtaactatgt

SEQ ID NO: 444358 - DNA, 25 bp, Artificial
  probe
  misc_feature (1)..(25): SEQ ID NO: 6624; WAN024BTE; Start 317; Stop 341
ttcataaggaattggactgtaacta

SEQ ID NO: 444359 - DNA, 25 bp, Artificial
  probe
  misc_feature (1)..(25): SEQ ID NO: 6624; WAN024BTE; Start 318; Stop 342
tcataaggaattggactgtaactat

SEQ ID NO: 444360 - DNA, 25 bp, Artificial
  probe
  misc_feature (1)..(25): SEQ ID NO: 6624; WAN024BTE; Start 429; Stop 453
agcagaattaccaagggagtataac

SEQ ID NO: 444361 - DNA, 25 bp, Artificial
  probe
  misc_feature (1)..(25): SEQ ID NO: 6624; WAN024BTE; Start 428; Stop 452
cagcagaattaccaagggagtataa

SEQ ID NO: 444362 - DNA, 25 bp, Artificial
  probe
  misc_feature (1)..(25): SEQ ID NO: 6624; WAN024BTE; Start 373; Stop 397
agggaagggatttgtgaatttaact

SEQ ID NO: 444363 - DNA, 25 bp, Artificial
  probe
  misc_feature (1)..(25): SEQ ID NO: 6624; WAN024BTE; Start 421; Stop 445
atcattacagcagaattaccaaggg

SEQ ID NO: 444364 - DNA, 25 bp, Artificial
  probe
  misc_feature (1)..(25): SEQ ID NO: 6624; WAN024BTE; Start 374; Stop 398
gggaagggatttgtgaatttaactt

SEQ ID NO: 444365 - DNA, 25 bp, Artificial
  probe
  misc_feature (1)..(25): SEQ ID NO: 6624; WAN024BTE; Start 427; Stop 451
acagcagaattaccaagggagtata

SEQ ID NO: 444366 - DNA, 25 bp, Artificial
  probe
  misc_feature (1)..(25): SEQ ID NO: 6624; WAN024BTE; Start 426; Stop 450
tacagcagaattaccaagggagtat

SEQ ID NO: 444367 - DNA, 25 bp, Artificial
  probe
  misc_feature (1)..(25): SEQ ID NO: 6624; WAN024BTE; Start 372; Stop 396
tagggaagggatttgtgaatttaac

SEQ ID NO: 444368 - DNA, 25 bp, Artificial
  probe
  misc_feature (1)..(25): SEQ ID NO: 6624; WAN024BTE; Start 425; Stop 449
ttacagcagaattaccaagggagta

SEQ ID NO: 444369 - DNA, 25 bp, Artificial
  probe
  misc_feature (1)..(25): SEQ ID NO: 6624; WAN024BTE; Start 569; Stop 593
tttctatcggtaactttcttggaag

SEQ ID NO: 444370 - DNA, 25 bp, Artificial
  probe
  misc_feature (1)..(25): SEQ ID NO: 6624; WAN024BTE; Start 430; Stop 454
gcagaattaccaagggagtataact

SEQ ID NO: 444371 - DNA, 25 bp, Artificial
  probe
  misc_feature (1)..(25): SEQ ID NO: 6624; WAN024BTE; Start 321; Stop 345
taaggaattggactgtaactatgta

SEQ ID NO: 444372 - DNA, 25 bp, Artificial
  probe
  misc_feature (1)..(25): SEQ ID NO: 6624; WAN024BTE; Start 423; Stop 447
cattacagcagaattaccaagggag

SEQ ID NO: 444373 - DNA, 25 bp, Artificial
  probe
  misc_feature (1)..(25): SEQ ID NO: 6624; WAN024BTE; Start 72; Stop 96
tgctagtgtattatacccagatgtt

SEQ ID NO: 444374 - DNA, 25 bp, Artificial
  probe
  misc_feature (1)..(25): SEQ ID NO: 6624; WAN024BTE; Start 66; Stop 90
agttgatgctagtgtattataccca

SEQ ID NO: 444375 - DNA, 25 bp, Artificial
  probe
  misc_feature (1)..(25): SEQ ID NO: 6624; WAN024BTE; Start 71; Stop 95
atgctagtgtattatacccagatgt

SEQ ID NO: 444376 - DNA, 25 bp, Artificial
  probe
  misc_feature (1)..(25): SEQ ID NO: 6624; WAN024BTE; Start 68; Stop 92
ttgatgctagtgtattatacccaga

SEQ ID NO: 444377 - DNA, 25 bp, Artificial
  probe
  misc_feature (1)..(25): SEQ ID NO: 6624; WAN024BTE; Start 67; Stop 91
gttgatgctagtgtattatacccag

SEQ ID NO: 444378 - DNA, 25 bp, Artificial
  probe
  misc_feature (1)..(25): SEQ ID NO: 6624; WAN024BTE; Start 65; Stop 89
cagttgatgctagtgtattataccc

SEQ ID NO: 444379 - DNA, 25 bp, Artificial
  probe
  misc_feature (1)..(25): SEQ ID NO: 6624; WAN024BTE; Start 424; Stop 448
attacagcagaattaccaagggagt

SEQ ID NO: 444380 - DNA, 25 bp, Artificial
  probe
  misc_feature (1)..(25): SEQ ID NO: 6624; WAN024BTE; Start 422; Stop 446
tcattacagcagaattaccaaggga

SEQ ID NO: 444381 - DNA, 25 bp, Artificial
  probe
  misc_feature (1)..(25): SEQ ID NO: 6624; WAN024BTE; Start 371; Stop 395
ttagggaagggatttgtgaatttaa

SEQ ID NO: 444382 - DNA, 25 bp, Artificial
  probe
  misc_feature (1)..(25): SEQ ID NO: 6624; WAN024BTE; Start 370; Stop 394
tttagggaagggatttgtgaattta

SEQ ID NO: 444383 - DNA, 25 bp, Artificial
  probe
  misc_feature (1)..(25): SEQ ID NO: 6624; WAN024BTE; Start 69; Stop 93
tgatgctagtgtattatacccagat

SEQ ID NO: 444384 - DNA, 25 bp, Artificial
  probe
  misc_feature (1)..(25): SEQ ID NO: 6625; WAN024BPY; Start 458; Stop 482
tgctaatggaacaatatggaggaat

SEQ ID NO: 444385 - DNA, 25 bp, Artificial
  probe
  misc_feature (1)..(25): SEQ ID NO: 6625; WAN024BPY; Start 457; Stop 481
atgctaatggaacaatatggaggaa

SEQ ID NO: 444386 - DNA, 25 bp, Artificial
  probe
  misc_feature (1)..(25): SEQ ID NO: 6625; WAN024BPY; Start 456; Stop 480
tatgctaatggaacaatatggagga

SEQ ID NO: 444387 - DNA, 25 bp, Artificial
  probe
  misc_feature (1)..(25): SEQ ID NO: 6625; WAN024BPY; Start 459; Stop 483
gctaatggaacaatatggaggaatt

SEQ ID NO: 444388 - DNA, 25 bp, Artificial
  probe
  misc_feature (1)..(25): SEQ ID NO: 6625; WAN024BPY; Start 485; Stop 509
ggttagattcaacgatgtatgtcca

SEQ ID NO: 444389 - DNA, 25 bp, Artificial
  probe
  misc_feature (1)..(25): SEQ ID NO: 6625; WAN024BPY; Start 484; Stop 508
tggttagattcaacgatgtatgtcc

SEQ ID NO: 444390 - DNA, 25 bp, Artificial
  probe
  misc_feature (1)..(25): SEQ ID NO: 6625; WAN024BPY; Start 455; Stop 479
ttatgctaatggaacaatatggagg

SEQ ID NO: 444391 - DNA, 25 bp, Artificial
  probe
  misc_feature (1)..(25): SEQ ID NO: 6625; WAN024BPY; Start 486; Stop 510
gttagattcaacgatgtatgtccat

SEQ ID NO: 444392 - DNA, 25 bp, Artificial
  probe
  misc_feature (1)..(25): SEQ ID NO: 6625; WAN024BPY; Start 483; Stop 507
ttggttagattcaacgatgtatgtc

SEQ ID NO: 444393 - DNA, 25 bp, Artificial
  probe
  misc_feature (1)..(25): SEQ ID NO: 6625; WAN024BPY; Start 35; Stop 59
cgattcaacaatgtagtggcgataa

SEQ ID NO: 444394 - DNA, 25 bp, Artificial
  probe
  misc_feature (1)..(25): SEQ ID NO: 6625; WAN024BPY; Start 27; Stop 51
atcacttacgattcaacaatgtagt

SEQ ID NO: 444395 - DNA, 25 bp, Artificial
  probe
  misc_feature (1)..(25): SEQ ID NO: 6625; WAN024BPY; Start 22; Stop 46
cgattatcacttacgattcaacaat

SEQ ID NO: 444396 - DNA, 25 bp, Artificial
  probe
  misc_feature (1)..(25): SEQ ID NO: 6625; WAN024BPY; Start 30; Stop 54
acttacgattcaacaatgtagtggc

SEQ ID NO: 444397 - DNA, 25 bp, Artificial
  probe
  misc_feature (1)..(25): SEQ ID NO: 6625; WAN024BPY; Start 330; Stop 354
tggttatacgacagtagttattgat

SEQ ID NO: 444398 - DNA, 25 bp, Artificial
  probe
  misc_feature (1)..(25): SEQ ID NO: 6625; WAN024BPY; Start 329; Stop 353
atggttatacgacagtagttattga

SEQ ID NO: 444399 - DNA, 25 bp, Artificial
  probe
  misc_feature (1)..(25): SEQ ID NO: 6625; WAN024BPY; Start 31; Stop 55
cttacgattcaacaatgtagtggcg

SEQ ID NO: 444400 - DNA, 25 bp, Artificial
  probe
  misc_feature (1)..(25): SEQ ID NO: 6625; WAN024BPY; Start 573; Stop 597
cagccaatcaatggatgacaatata

SEQ ID NO: 444401 - DNA, 25 bp, Artificial
  probe
  misc_feature (1)..(25): SEQ ID NO: 6625; WAN024BPY; Start 34; Stop 58
acgattcaacaatgtagtggcgata

SEQ ID NO: 444402 - DNA, 25 bp, Artificial
  probe
  misc_feature (1)..(25): SEQ ID NO: 6625; WAN024BPY; Start 33; Stop 57
tacgattcaacaatgtagtggcgat

SEQ ID NO: 444403 - DNA, 25 bp, Artificial
  probe
  misc_feature (1)..(25): SEQ ID NO: 6625; WAN024BPY; Start 402; Stop 426
aaagttggagaagggtagtataggt

SEQ ID NO: 444404 - DNA, 25 bp, Artificial
  probe
  misc_feature (1)..(25): SEQ ID NO: 6625; WAN024BPY; Start 502; Stop 526
tatgtccatccagatttccctattg

SEQ ID NO: 444405 - DNA, 25 bp, Artificial
  probe
  misc_feature (1)..(25): SEQ ID NO: 6625; WAN024BPY; Start 501; Stop 525
gtatgtccatccagatttccctatt

SEQ ID NO: 444406 - DNA, 25 bp, Artificial
  probe
  misc_feature (1)..(25): SEQ ID NO: 6625; WAN024BPY; Start 401; Stop 425
caaagttggagaagggtagtatagg

SEQ ID NO: 444407 - DNA, 25 bp, Artificial
  probe
  misc_feature (1)..(25): SEQ ID NO: 6625; WAN024BPY; Start 590; Stop 614
acaatataacaaataaacgctgggt

SEQ ID NO: 444408 - DNA, 25 bp, Artificial
  probe
  misc_feature (1)..(25): SEQ ID NO: 6625; WAN024BPY; Start 500; Stop 524
tgtatgtccatccagatttccctat

SEQ ID NO: 444409 - DNA, 25 bp, Artificial
  probe
  misc_feature (1)..(25): SEQ ID NO: 6625; WAN024BPY; Start 400; Stop 424
gcaaagttggagaagggtagtatag

SEQ ID NO: 444410 - DNA, 25 bp, Artificial
  probe
  misc_feature (1)..(25): SEQ ID NO: 6625; WAN024BPY; Start 37; Stop 61
attcaacaatgtagtggcgataaac

SEQ ID NO: 444411 - DNA, 25 bp, Artificial
  probe
  misc_feature (1)..(25): SEQ ID NO: 6625; WAN024BPY; Start 36; Stop 60
gattcaacaatgtagtggcgataaa

SEQ ID NO: 444412 - DNA, 25 bp, Artificial
  probe
  misc_feature (1)..(25): SEQ ID NO: 6625; WAN024BPY; Start 32; Stop 56
ttacgattcaacaatgtagtggcga

SEQ ID NO: 444413 - DNA, 25 bp, Artificial
  probe
  misc_feature (1)..(25): SEQ ID NO: 6625; WAN024BPY; Start 575; Stop 599
gccaatcaatggatgacaatataac

SEQ ID NO: 444414 - DNA, 25 bp, Artificial
  probe
  misc_feature (1)..(25): SEQ ID NO: 6625; WAN024BPY; Start 574; Stop 598
agccaatcaatggatgacaatataa

SEQ ID NO: 444415 - DNA, 25 bp, Artificial
  probe
  misc_feature (1)..(25): SEQ ID NO: 6625; WAN024BPY; Start 572; Stop 596
ccagccaatcaatggatgacaatat

SEQ ID NO: 444416 - DNA, 25 bp, Artificial
  probe
  misc_feature (1)..(25): SEQ ID NO: 6625; WAN024BPY; Start 403; Stop 427
aagttggagaagggtagtataggtg

SEQ ID NO: 444417 - DNA, 25 bp, Artificial
  probe
  misc_feature (1)..(25): SEQ ID NO: 6626; WAN024CFX; Start 93; Stop 117
tattatcaacgaagtggtagaagcc

SEQ ID NO: 444418 - DNA, 25 bp, Artificial
  probe
  misc_feature (1)..(25): SEQ ID NO: 6626; WAN024CFX; Start 165; Stop 189
aacattaggacaatcaacaggactc

SEQ ID NO: 444419 - DNA, 25 bp, Artificial
  probe
  misc_feature (1)..(25): SEQ ID NO: 6626; WAN024CFX; Start 164; Stop 188
caacattaggacaatcaacaggact

SEQ ID NO: 444420 - DNA, 25 bp, Artificial
  probe
  misc_feature (1)..(25): SEQ ID NO: 6626; WAN024CFX; Start 92; Stop 116
ttattatcaacgaagtggtagaagc

SEQ ID NO: 444421 - DNA, 25 bp, Artificial
  probe
  misc_feature (1)..(25): SEQ ID NO: 6626; WAN024CFX; Start 168; Stop 192
attaggacaatcaacaggactcaga

SEQ ID NO: 444422 - DNA, 25 bp, Artificial
  probe
  misc_feature (1)..(25): SEQ ID NO: 6626; WAN024CFX; Start 167; Stop 191
cattaggacaatcaacaggactcag

SEQ ID NO: 444423 - DNA, 25 bp, Artificial
  probe
  misc_feature (1)..(25): SEQ ID NO: 6626; WAN024CFX; Start 166; Stop 190
acattaggacaatcaacaggactca

SEQ ID NO: 444424 - DNA, 25 bp, Artificial
  probe
  misc_feature (1)..(25): SEQ ID NO: 6626; WAN024CFX; Start 176; Stop 200
aatcaacaggactcagagacaagaa

SEQ ID NO: 444425 - DNA, 25 bp, Artificial
  probe
  misc_feature (1)..(25): SEQ ID NO: 6626; WAN024CFX; Start 169; Stop 193
ttaggacaatcaacaggactcagag

SEQ ID NO: 444426 - DNA, 25 bp, Artificial
  probe
  misc_feature (1)..(25): SEQ ID NO: 6626; WAN024CFX; Start 163; Stop 187
gcaacattaggacaatcaacaggac

SEQ ID NO: 444427 - DNA, 25 bp, Artificial
  probe
  misc_feature (1)..(25): SEQ ID NO: 6626; WAN024CFX; Start 161; Stop 185
cagcaacattaggacaatcaacagg

SEQ ID NO: 444428 - DNA, 25 bp, Artificial
  probe
  misc_feature (1)..(25): SEQ ID NO: 6626; WAN024CFX; Start 160; Stop 184
ccagcaacattaggacaatcaacag

SEQ ID NO: 444429 - DNA, 25 bp, Artificial
  probe
  misc_feature (1)..(25): SEQ ID NO: 6626; WAN024CFX; Start 177; Stop 201
atcaacaggactcagagacaagaac

SEQ ID NO: 444430 - DNA, 25 bp, Artificial
  probe
  misc_feature (1)..(25): SEQ ID NO: 6626; WAN024CFX; Start 175; Stop 199
caatcaacaggactcagagacaaga

SEQ ID NO: 444431 - DNA, 25 bp, Artificial
  probe
  misc_feature (1)..(25): SEQ ID NO: 6626; WAN024CFX; Start 162; Stop 186
agcaacattaggacaatcaacagga

SEQ ID NO: 444432 - DNA, 25 bp, Artificial
  probe
  misc_feature (1)..(25): SEQ ID NO: 6626; WAN024CFX; Start 174; Stop 198
acaatcaacaggactcagagacaag

SEQ ID NO: 444433 - DNA, 25 bp, Artificial
  probe
  misc_feature (1)..(25): SEQ ID NO: 6626; WAN024CFX; Start 173; Stop 197
gacaatcaacaggactcagagacaa

SEQ ID NO: 444434 - DNA, 25 bp, Artificial
  probe
  misc_feature (1)..(25): SEQ ID NO: 6626; WAN024CFX; Start 170; Stop 194
taggacaatcaacaggactcagaga

SEQ ID NO: 444435 - DNA, 25 bp, Artificial
  probe
  misc_feature (1)..(25): SEQ ID NO: 6626; WAN024CFX; Start 157; Stop 181
aatccagcaacattaggacaatcaa

SEQ ID NO: 444436 - DNA, 25 bp, Artificial
  probe
  misc_feature (1)..(25): SEQ ID NO: 6626; WAN024CFX; Start 104; Stop 128
aagtggtagaagccaatgaacaata

SEQ ID NO: 444437 - DNA, 25 bp, Artificial
  probe
  misc_feature (1)..(25): SEQ ID NO: 6626; WAN024CFX; Start 68; Stop 92
taattgaagatagaggaagagcatt

SEQ ID NO: 444438 - DNA, 25 bp, Artificial
  probe
  misc_feature (1)..(25): SEQ ID NO: 6626; WAN024CFX; Start 67; Stop 91
ttaattgaagatagaggaagagcat

SEQ ID NO: 444439 - DNA, 25 bp, Artificial
  probe
  misc_feature (1)..(25): SEQ ID NO: 6626; WAN024CFX; Start 107; Stop 131
tggtagaagccaatgaacaatacat

SEQ ID NO: 444440 - DNA, 25 bp, Artificial
  probe
  misc_feature (1)..(25): SEQ ID NO: 6626; WAN024CFX; Start 105; Stop 129
agtggtagaagccaatgaacaatac

SEQ ID NO: 444441 - DNA, 25 bp, Artificial
  probe
  misc_feature (1)..(25): SEQ ID NO: 6626; WAN024CFX; Start 13; Stop 37
tttagagggttatccattgacgaaa

SEQ ID NO: 444442 - DNA, 25 bp, Artificial
  probe
  misc_feature (1)..(25): SEQ ID NO: 6626; WAN024CFX; Start 86; Stop 110
gagcatttattatcaacgaagtggt

SEQ ID NO: 444443 - DNA, 25 bp, Artificial
  probe
  misc_feature (1)..(25): SEQ ID NO: 6626; WAN024CFX; Start 12; Stop 36
atttagagggttatccattgacgaa

SEQ ID NO: 444444 - DNA, 25 bp, Artificial
  probe
  misc_feature (1)..(25): SEQ ID NO: 6626; WAN024CFX; Start 85; Stop 109
agagcatttattatcaacgaagtgg

SEQ ID NO: 444445 - DNA, 25 bp, Artificial
  probe
  misc_feature (1)..(25): SEQ ID NO: 6626; WAN024CFX; Start 312; Stop 336
atatctaaagggattgctaagtggg

SEQ ID NO: 444446 - DNA, 25 bp, Artificial
  probe
  misc_feature (1)..(25): SEQ ID NO: 6626; WAN024CFX; Start 158; Stop 182
atccagcaacattaggacaatcaac

SEQ ID NO: 444447 - DNA, 25 bp, Artificial
  probe
  misc_feature (1)..(25): SEQ ID NO: 6626; WAN024CFX; Start 106; Stop 130
gtggtagaagccaatgaacaataca

SEQ ID NO: 444448 - DNA, 25 bp, Artificial
  probe
  misc_feature (1)..(25): SEQ ID NO: 6626; WAN024CFX; Start 316; Stop 340
ctaaagggattgctaagtgggtatg

SEQ ID NO: 444449 - DNA, 25 bp, Artificial
  probe
  misc_feature (1)..(25): SEQ ID NO: 6626; WAN024CFX; Start 315; Stop 339
tctaaagggattgctaagtgggtat

SEQ ID NO: 444450 - DNA, 25 bp, Artificial
  probe
  misc_feature (1)..(25): SEQ ID NO: 6627; WAN024BZJ; Start 28; Stop 52
ttcaaggcattcaagagtaaggcta

SEQ ID NO: 444451 - DNA, 25 bp, Artificial
  probe
  misc_feature (1)..(25): SEQ ID NO: 6627; WAN024BZJ; Start 161; Stop 185
caagaccgacgataccactaattaa

SEQ ID NO: 444452 - DNA, 25 bp, Artificial
  probe
  misc_feature (1)..(25): SEQ ID NO: 6627; WAN024BZJ; Start 160; Stop 184
acaagaccgacgataccactaatta

SEQ ID NO: 444453 - DNA, 25 bp, Artificial
  probe
  misc_feature (1)..(25): SEQ ID NO: 6627; WAN024BZJ; Start 29; Stop 53
tcaaggcattcaagagtaaggctac

SEQ ID NO: 444454 - DNA, 25 bp, Artificial
  probe
  misc_feature (1)..(25): SEQ ID NO: 6627; WAN024BZJ; Start 159; Stop 183
cacaagaccgacgataccactaatt

SEQ ID NO: 444455 - DNA, 25 bp, Artificial
  probe
  misc_feature (1)..(25): SEQ ID NO: 6627; WAN024BZJ; Start 31; Stop 55
aaggcattcaagagtaaggctacac

SEQ ID NO: 444456 - DNA, 25 bp, Artificial
  probe
  misc_feature (1)..(25): SEQ ID NO: 6627; WAN024BZJ; Start 30; Stop 54
caaggcattcaagagtaaggctaca

SEQ ID NO: 444457 - DNA, 25 bp, Artificial
  probe
  misc_feature (1)..(25): SEQ ID NO: 6627; WAN024BZJ; Start 73; Stop 97
gtagctcctccattaagagttgtag

SEQ ID NO: 444458 - DNA, 25 bp, Artificial
  probe
  misc_feature (1)..(25): SEQ ID NO: 6627; WAN024BZJ; Start 72; Stop 96
agtagctcctccattaagagttgta

SEQ ID NO: 444459 - DNA, 25 bp, Artificial
  probe
  misc_feature (1)..(25): SEQ ID NO: 6627; WAN024BZJ; Start 35; Stop 59
cattcaagagtaaggctacacctga

SEQ ID NO: 444460 - DNA, 25 bp, Artificial
  probe
  misc_feature (1)..(25): SEQ ID NO: 6627; WAN024BZJ; Start 27; Stop 51
cttcaaggcattcaagagtaaggct

SEQ ID NO: 444461 - DNA, 25 bp, Artificial
  probe
  misc_feature (1)..(25): SEQ ID NO: 6627; WAN024BZJ; Start 23; Stop 47
caatcttcaaggcattcaagagtaa

SEQ ID NO: 444462 - DNA, 25 bp, Artificial
  probe
  misc_feature (1)..(25): SEQ ID NO: 6627; WAN024BZJ; Start 24; Stop 48
aatcttcaaggcattcaagagtaag

SEQ ID NO: 444463 - DNA, 25 bp, Artificial
  probe
  misc_feature (1)..(25): SEQ ID NO: 6627; WAN024BZJ; Start 25; Stop 49
atcttcaaggcattcaagagtaagg

SEQ ID NO: 444464 - DNA, 25 bp, Artificial
  probe
  misc_feature (1)..(25): SEQ ID NO: 6627; WAN024BZJ; Start 77; Stop 101
ctcctccattaagagttgtagcagc

SEQ ID NO: 444465 - DNA, 25 bp, Artificial
  probe
  misc_feature (1)..(25): SEQ ID NO: 6627; WAN024BZJ; Start 71; Stop 95
cagtagctcctccattaagagttgt

SEQ ID NO: 444466 - DNA, 25 bp, Artificial
  probe
  misc_feature (1)..(25): SEQ ID NO: 6627; WAN024BZJ; Start 167; Stop 191
cgacgataccactaattaaagcaag

SEQ ID NO: 444467 - DNA, 25 bp, Artificial
  probe
  misc_feature (1)..(25): SEQ ID NO: 6627; WAN024BZJ; Start 163; Stop 187
agaccgacgataccactaattaaag

SEQ ID NO: 444468 - DNA, 25 bp, Artificial
  probe
  misc_feature (1)..(25): SEQ ID NO: 6627; WAN024BZJ; Start 162; Stop 186
aagaccgacgataccactaattaaa

SEQ ID NO: 444469 - DNA, 25 bp, Artificial
  probe
  misc_feature (1)..(25): SEQ ID NO: 6627; WAN024BZJ; Start 22; Stop 46
gcaatcttcaaggcattcaagagta

SEQ ID NO: 444470 - DNA, 25 bp, Artificial
  probe
  misc_feature (1)..(25): SEQ ID NO: 6627; WAN024BZJ; Start 166; Stop 190
ccgacgataccactaattaaagcaa

SEQ ID NO: 444471 - DNA, 25 bp, Artificial
  probe
  misc_feature (1)..(25): SEQ ID NO: 6627; WAN024BZJ; Start 169; Stop 193
acgataccactaattaaagcaagtc

SEQ ID NO: 444472 - DNA, 25 bp, Artificial
  probe
  misc_feature (1)..(25): SEQ ID NO: 6627; WAN024BZJ; Start 168; Stop 192
gacgataccactaattaaagcaagt

SEQ ID NO: 444473 - DNA, 25 bp, Artificial
  probe
  misc_feature (1)..(25): SEQ ID NO: 6627; WAN024BZJ; Start 164; Stop 188
gaccgacgataccactaattaaagc

SEQ ID NO: 444474 - DNA, 25 bp, Artificial
  probe
  misc_feature (1)..(25): SEQ ID NO: 6627; WAN024BZJ; Start 36; Stop 60
attcaagagtaaggctacacctgaa

SEQ ID NO: 444475 - DNA, 25 bp, Artificial
  probe
  misc_feature (1)..(25): SEQ ID NO: 6627; WAN024BZJ; Start 170; Stop 194
cgataccactaattaaagcaagtct

SEQ ID NO: 444476 - DNA, 25 bp, Artificial
  probe
  misc_feature (1)..(25): SEQ ID NO: 6627; WAN024BZJ; Start 107; Stop 131
ttaccgctattcccaacaagacaaa

SEQ ID NO: 444477 - DNA, 25 bp, Artificial
  probe
  misc_feature (1)..(25): SEQ ID NO: 6627; WAN024BZJ; Start 106; Stop 130
tttaccgctattcccaacaagacaa

SEQ ID NO: 444478 - DNA, 25 bp, Artificial
  probe
  misc_feature (1)..(25): SEQ ID NO: 6627; WAN024BZJ; Start 165; Stop 189
accgacgataccactaattaaagca

SEQ ID NO: 444479 - DNA, 25 bp, Artificial
  probe
  misc_feature (1)..(25): SEQ ID NO: 6627; WAN024BZJ; Start 74; Stop 98
tagctcctccattaagagttgtagc

SEQ ID NO: 444480 - DNA, 25 bp, Artificial
  probe
  misc_feature (1)..(25): SEQ ID NO: 6627; WAN024BZJ; Start 70; Stop 94
gcagtagctcctccattaagagttg

SEQ ID NO: 444481 - DNA, 25 bp, Artificial
  probe
  misc_feature (1)..(25): SEQ ID NO: 6627; WAN024BZJ; Start 34; Stop 58
gcattcaagagtaaggctacacctg

SEQ ID NO: 444482 - DNA, 25 bp, Artificial
  probe
  misc_feature (1)..(25): SEQ ID NO: 6627; WAN024BZJ; Start 158; Stop 182
ccacaagaccgacgataccactaat

SEQ ID NO: 444483 - DNA, 25 bp, Artificial
  probe
  misc_feature (1)..(25): SEQ ID NO: 6628; WAN024CFW; Start 202; Stop 226
ggcgatattgtacgaactactagat

SEQ ID NO: 444484 - DNA, 25 bp, Artificial
  probe
  misc_feature (1)..(25): SEQ ID NO: 6628; WAN024CFW; Start 200; Stop 224
aaggcgatattgtacgaactactag

SEQ ID NO: 444485 - DNA, 25 bp, Artificial
  probe
  misc_feature (1)..(25): SEQ ID NO: 6628; WAN024CFW; Start 199; Stop 223
gaaggcgatattgtacgaactacta

SEQ ID NO: 444486 - DNA, 25 bp, Artificial
  probe
  misc_feature (1)..(25): SEQ ID NO: 6628; WAN024CFW; Start 201; Stop 225
aggcgatattgtacgaactactaga

SEQ ID NO: 444487 - DNA, 25 bp, Artificial
  probe
  misc_feature (1)..(25): SEQ ID NO: 6628; WAN024CFW; Start 197; Stop 221
ttgaaggcgatattgtacgaactac

SEQ ID NO: 444488 - DNA, 25 bp, Artificial
  probe
  misc_feature (1)..(25): SEQ ID NO: 6628; WAN024CFW; Start 203; Stop 227
gcgatattgtacgaactactagatt

SEQ ID NO: 444489 - DNA, 25 bp, Artificial
  probe
  misc_feature (1)..(25): SEQ ID NO: 6628; WAN024CFW; Start 198; Stop 222
tgaaggcgatattgtacgaactact

SEQ ID NO: 444490 - DNA, 25 bp, Artificial
  probe
  misc_feature (1)..(25): SEQ ID NO: 6628; WAN024CFW; Start 354; Stop 378
aattgatgaatctgaagtgcttggc

SEQ ID NO: 444491 - DNA, 25 bp, Artificial
  probe
  misc_feature (1)..(25): SEQ ID NO: 6628; WAN024CFW; Start 158; Stop 182
aatcaacaggactcaaagacaagaa

SEQ ID NO: 444492 - DNA, 25 bp, Artificial
  probe
  misc_feature (1)..(25): SEQ ID NO: 6628; WAN024CFW; Start 189; Stop 213
ggaaatctttgaaggcgatattgta

SEQ ID NO: 444493 - DNA, 25 bp, Artificial
  probe
  misc_feature (1)..(25): SEQ ID NO: 6628; WAN024CFW; Start 171; Stop 195
caaagacaagaacggaaaggaaatc

SEQ ID NO: 444494 - DNA, 25 bp, Artificial
  probe
  misc_feature (1)..(25): SEQ ID NO: 6628; WAN024CFW; Start 28; Stop 52
catgaattaggtagactgatgtcag

SEQ ID NO: 444495 - DNA, 25 bp, Artificial
  probe
  misc_feature (1)..(25): SEQ ID NO: 6628; WAN024CFW; Start 350; Stop 374
ctgaaattgatgaatctgaagtgct

SEQ ID NO: 444496 - DNA, 25 bp, Artificial
  probe
  misc_feature (1)..(25): SEQ ID NO: 6628; WAN024CFW; Start 349; Stop 373
tctgaaattgatgaatctgaagtgc

SEQ ID NO: 444497 - DNA, 25 bp, Artificial
  probe
  misc_feature (1)..(25): SEQ ID NO: 6628; WAN024CFW; Start 343; Stop 367
ttgtggtctgaaattgatgaatctg

SEQ ID NO: 444498 - DNA, 25 bp, Artificial
  probe
  misc_feature (1)..(25): SEQ ID NO: 6628; WAN024CFW; Start 353; Stop 377
aaattgatgaatctgaagtgcttgg

SEQ ID NO: 444499 - DNA, 25 bp, Artificial
  probe
  misc_feature (1)..(25): SEQ ID NO: 6628; WAN024CFW; Start 345; Stop 369
gtggtctgaaattgatgaatctgaa

SEQ ID NO: 444500 - DNA, 25 bp, Artificial
  probe
  misc_feature (1)..(25): SEQ ID NO: 6628; WAN024CFW; Start 344; Stop 368
tgtggtctgaaattgatgaatctga

SEQ ID NO: 444501 - DNA, 25 bp, Artificial
  probe
  misc_feature (1)..(25): SEQ ID NO: 6628; WAN024CFW; Start 281; Stop 305
taggagttgtaaaggttcttgaagg

SEQ ID NO: 444502 - DNA, 25 bp, Artificial
  probe
  misc_feature (1)..(25): SEQ ID NO: 6628; WAN024CFW; Start 187; Stop 211
aaggaaatctttgaaggcgatattg

SEQ ID NO: 444503 - DNA, 25 bp, Artificial
  probe
  misc_feature (1)..(25): SEQ ID NO: 6628; WAN024CFW; Start 351; Stop 375
tgaaattgatgaatctgaagtgctt

SEQ ID NO: 444504 - DNA, 25 bp, Artificial
  probe
  misc_feature (1)..(25): SEQ ID NO: 6628; WAN024CFW; Start 298; Stop 322
cttgaagggtcttgggttattgata

SEQ ID NO: 444505 - DNA, 25 bp, Artificial
  probe
  misc_feature (1)..(25): SEQ ID NO: 6628; WAN024CFW; Start 279; Stop 303
tgtaggagttgtaaaggttcttgaa

SEQ ID NO: 444506 - DNA, 25 bp, Artificial
  probe
  misc_feature (1)..(25): SEQ ID NO: 6628; WAN024CFW; Start 278; Stop 302
atgtaggagttgtaaaggttcttga

SEQ ID NO: 444507 - DNA, 25 bp, Artificial
  probe
  misc_feature (1)..(25): SEQ ID NO: 6628; WAN024CFW; Start 340; Stop 364
cgtttgtggtctgaaattgatgaat

SEQ ID NO: 444508 - DNA, 25 bp, Artificial
  probe
  misc_feature (1)..(25): SEQ ID NO: 6628; WAN024CFW; Start 299; Stop 323
ttgaagggtcttgggttattgatac

SEQ ID NO: 444509 - DNA, 25 bp, Artificial
  probe
  misc_feature (1)..(25): SEQ ID NO: 6628; WAN024CFW; Start 188; Stop 212
aggaaatctttgaaggcgatattgt

SEQ ID NO: 444510 - DNA, 25 bp, Artificial
  probe
  misc_feature (1)..(25): SEQ ID NO: 6628; WAN024CFW; Start 352; Stop 376
gaaattgatgaatctgaagtgcttg

SEQ ID NO: 444511 - DNA, 25 bp, Artificial
  probe
  misc_feature (1)..(25): SEQ ID NO: 6628; WAN024CFW; Start 347; Stop 371
ggtctgaaattgatgaatctgaagt

SEQ ID NO: 444512 - DNA, 25 bp, Artificial
  probe
  misc_feature (1)..(25): SEQ ID NO: 6628; WAN024CFW; Start 346; Stop 370
tggtctgaaattgatgaatctgaag

SEQ ID NO: 444513 - DNA, 25 bp, Artificial
  probe
  misc_feature (1)..(25): SEQ ID NO: 6628; WAN024CFW; Start 170; Stop 194
tcaaagacaagaacggaaaggaaat

SEQ ID NO: 444514 - DNA, 25 bp, Artificial
  probe
  misc_feature (1)..(25): SEQ ID NO: 6628; WAN024CFW; Start 247; Stop 271
attggcggtttctatgaatatgaga

SEQ ID NO: 444515 - DNA, 25 bp, Artificial
  probe
  misc_feature (1)..(25): SEQ ID NO: 6628; WAN024CFW; Start 341; Stop 365
gtttgtggtctgaaattgatgaatc

SEQ ID NO: 444516 - DNA, 25 bp, Artificial
  probe
  misc_feature (1)..(25): SEQ ID NO: 6629; WAN024CFY; Start 20; Stop 44
tgtggcattatgaattaggtagact

SEQ ID NO: 444517 - DNA, 25 bp, Artificial
  probe
  misc_feature (1)..(25): SEQ ID NO: 6629; WAN024CFY; Start 19; Stop 43
gtgtggcattatgaattaggtagac

SEQ ID NO: 444518 - DNA, 25 bp, Artificial
  probe
  misc_feature (1)..(25): SEQ ID NO: 6629; WAN024CFY; Start 18; Stop 42
agtgtggcattatgaattaggtaga

SEQ ID NO: 444519 - DNA, 25 bp, Artificial
  probe
  misc_feature (1)..(25): SEQ ID NO: 6629; WAN024CFY; Start 16; Stop 40
agagtgtggcattatgaattaggta

SEQ ID NO: 444520 - DNA, 25 bp, Artificial
  probe
  misc_feature (1)..(25): SEQ ID NO: 6629; WAN024CFY; Start 15; Stop 39
tagagtgtggcattatgaattaggt

SEQ ID NO: 444521 - DNA, 25 bp, Artificial
  probe
  misc_feature (1)..(25): SEQ ID NO: 6629; WAN024CFY; Start 22; Stop 46
tggcattatgaattaggtagactga

SEQ ID NO: 444522 - DNA, 25 bp, Artificial
  probe
  misc_feature (1)..(25): SEQ ID NO: 6629; WAN024CFY; Start 21; Stop 45
gtggcattatgaattaggtagactg

SEQ ID NO: 444523 - DNA, 25 bp, Artificial
  probe
  misc_feature (1)..(25): SEQ ID NO: 6629; WAN024CFY; Start 17; Stop 41
gagtgtggcattatgaattaggtag

SEQ ID NO: 444524 - DNA, 25 bp, Artificial
  probe
  misc_feature (1)..(25): SEQ ID NO: 6629; WAN024CFY; Start 14; Stop 38
ttagagtgtggcattatgaattagg

SEQ ID NO: 444525 - DNA, 25 bp, Artificial
  probe
  misc_feature (1)..(25): SEQ ID NO: 6629; WAN024CFY; Start 23; Stop 47
ggcattatgaattaggtagactgat

SEQ ID NO: 444526 - DNA, 25 bp, Artificial
  probe
  misc_feature (1)..(25): SEQ ID NO: 6629; WAN024CFY; Start 254; Stop 278
aagaatacggtggcacatacatagg

SEQ ID NO: 444527 - DNA, 25 bp, Artificial
  probe
  misc_feature (1)..(25): SEQ ID NO: 6629; WAN024CFY; Start 24; Stop 48
gcattatgaattaggtagactgatg

SEQ ID NO: 444528 - DNA, 25 bp, Artificial
  probe
  misc_feature (1)..(25): SEQ ID NO: 6629; WAN024CFY; Start 149; Stop 173
aactcatgcaatcaacaggacttaa

SEQ ID NO: 444529 - DNA, 25 bp, Artificial
  probe
  misc_feature (1)..(25): SEQ ID NO: 6629; WAN024CFY; Start 84; Stop 108
tgaagaatttgagttaaacgatgct

SEQ ID NO: 444530 - DNA, 25 bp, Artificial
  probe
  misc_feature (1)..(25): SEQ ID NO: 6629; WAN024CFY; Start 142; Stop 166
gatatcgaactcatgcaatcaacag

SEQ ID NO: 444531 - DNA, 25 bp, Artificial
  probe
  misc_feature (1)..(25): SEQ ID NO: 6629; WAN024CFY; Start 148; Stop 172
gaactcatgcaatcaacaggactta

SEQ ID NO: 444532 - DNA, 25 bp, Artificial
  probe
  misc_feature (1)..(25): SEQ ID NO: 6629; WAN024CFY; Start 120; Stop 144
ttacattacagcttatcctgacgat

SEQ ID NO: 444533 - DNA, 25 bp, Artificial
  probe
  misc_feature (1)..(25): SEQ ID NO: 6629; WAN024CFY; Start 119; Stop 143
attacattacagcttatcctgacga

SEQ ID NO: 444534 - DNA, 25 bp, Artificial
  probe
  misc_feature (1)..(25): SEQ ID NO: 6629; WAN024CFY; Start 122; Stop 146
acattacagcttatcctgacgatat

SEQ ID NO: 444535 - DNA, 25 bp, Artificial
  probe
  misc_feature (1)..(25): SEQ ID NO: 6629; WAN024CFY; Start 118; Stop 142
gattacattacagcttatcctgacg

SEQ ID NO: 444536 - DNA, 25 bp, Artificial
  probe
  misc_feature (1)..(25): SEQ ID NO: 6629; WAN024CFY; Start 253; Stop 277
aaagaatacggtggcacatacatag

SEQ ID NO: 444537 - DNA, 25 bp, Artificial
  probe
  misc_feature (1)..(25): SEQ ID NO: 6629; WAN024CFY; Start 143; Stop 167
atatcgaactcatgcaatcaacagg

SEQ ID NO: 444538 - DNA, 25 bp, Artificial
  probe
  misc_feature (1)..(25): SEQ ID NO: 6629; WAN024CFY; Start 83; Stop 107
ttgaagaatttgagttaaacgatgc

SEQ ID NO: 444539 - DNA, 25 bp, Artificial
  probe
  misc_feature (1)..(25): SEQ ID NO: 6629; WAN024CFY; Start 121; Stop 145
tacattacagcttatcctgacgata

SEQ ID NO: 444540 - DNA, 25 bp, Artificial
  probe
  misc_feature (1)..(25): SEQ ID NO: 6629; WAN024CFY; Start 158; Stop 182
aatcaacaggacttaaggacaagaa

SEQ ID NO: 444541 - DNA, 25 bp, Artificial
  probe
  misc_feature (1)..(25): SEQ ID NO: 6629; WAN024CFY; Start 85; Stop 109
gaagaatttgagttaaacgatgctt

SEQ ID NO: 444542 - DNA, 25 bp, Artificial
  probe
  misc_feature (1)..(25): SEQ ID NO: 6629; WAN024CFY; Start 159; Stop 183
atcaacaggacttaaggacaagaac

SEQ ID NO: 444543 - DNA, 25 bp, Artificial
  probe
  misc_feature (1)..(25): SEQ ID NO: 6629; WAN024CFY; Start 157; Stop 181
caatcaacaggacttaaggacaaga

SEQ ID NO: 444544 - DNA, 25 bp, Artificial
  probe
  misc_feature (1)..(25): SEQ ID NO: 6629; WAN024CFY; Start 150; Stop 174
actcatgcaatcaacaggacttaag

SEQ ID NO: 444545 - DNA, 25 bp, Artificial
  probe
  misc_feature (1)..(25): SEQ ID NO: 6629; WAN024CFY; Start 117; Stop 141
tgattacattacagcttatcctgac

SEQ ID NO: 444546 - DNA, 25 bp, Artificial
  probe
  misc_feature (1)..(25): SEQ ID NO: 6629; WAN024CFY; Start 255; Stop 279
agaatacggtggcacatacataggt

SEQ ID NO: 444547 - DNA, 25 bp, Artificial
  probe
  misc_feature (1)..(25): SEQ ID NO: 6629; WAN024CFY; Start 86; Stop 110
aagaatttgagttaaacgatgcttt

SEQ ID NO: 444548 - DNA, 25 bp, Artificial
  probe
  misc_feature (1)..(25): SEQ ID NO: 6629; WAN024CFY; Start 144; Stop 168
tatcgaactcatgcaatcaacagga

SEQ ID NO: 444549 - DNA, 25 bp, Artificial
  probe
  misc_feature (1)..(25): SEQ ID NO: 6630; WAN024C3A; Start 35; Stop 59
aacttcaaacatgcttaggacaaga

SEQ ID NO: 444550 - DNA, 25 bp, Artificial
  probe
  misc_feature (1)..(25): SEQ ID NO: 6630; WAN024C3A; Start 34; Stop 58
caacttcaaacatgcttaggacaag

SEQ ID NO: 444551 - DNA, 25 bp, Artificial
  probe
  misc_feature (1)..(25): SEQ ID NO: 6630; WAN024C3A; Start 36; Stop 60
acttcaaacatgcttaggacaagag

SEQ ID NO: 444552 - DNA, 25 bp, Artificial
  probe
  misc_feature (1)..(25): SEQ ID NO: 6630; WAN024C3A; Start 33; Stop 57
ccaacttcaaacatgcttaggacaa

SEQ ID NO: 444553 - DNA, 25 bp, Artificial
  probe
  misc_feature (1)..(25): SEQ ID NO: 6630; WAN024C3A; Start 29; Stop 53
tttcccaacttcaaacatgcttagg

SEQ ID NO: 444554 - DNA, 25 bp, Artificial
  probe
  misc_feature (1)..(25): SEQ ID NO: 6630; WAN024C3A; Start 40; Stop 64
caaacatgcttaggacaagaggaag

SEQ ID NO: 444555 - DNA, 25 bp, Artificial
  probe
  misc_feature (1)..(25): SEQ ID NO: 6630; WAN024C3A; Start 37; Stop 61
cttcaaacatgcttaggacaagagg

SEQ ID NO: 444556 - DNA, 25 bp, Artificial
  probe
  misc_feature (1)..(25): SEQ ID NO: 6630; WAN024C3A; Start 47; Stop 71
gcttaggacaagaggaaggtgactt

SEQ ID NO: 444557 - DNA, 25 bp, Artificial
  probe
  misc_feature (1)..(25): SEQ ID NO: 6630; WAN024C3A; Start 39; Stop 63
tcaaacatgcttaggacaagaggaa

SEQ ID NO: 444558 - DNA, 25 bp, Artificial
  probe
  misc_feature (1)..(25): SEQ ID NO: 6630; WAN024C3A; Start 38; Stop 62
ttcaaacatgcttaggacaagagga

SEQ ID NO: 444559 - DNA, 25 bp, Artificial
  probe
  misc_feature (1)..(25): SEQ ID NO: 6630; WAN024C3A; Start 45; Stop 69
atgcttaggacaagaggaaggtgac

SEQ ID NO: 444560 - DNA, 25 bp, Artificial
  probe
  misc_feature (1)..(25): SEQ ID NO: 6630; WAN024C3A; Start 42; Stop 66
aacatgcttaggacaagaggaaggt

SEQ ID NO: 444561 - DNA, 25 bp, Artificial
  probe
  misc_feature (1)..(25): SEQ ID NO: 6630; WAN024C3A; Start 48; Stop 72
cttaggacaagaggaaggtgacttc

SEQ ID NO: 444562 - DNA, 25 bp, Artificial
  probe
  misc_feature (1)..(25): SEQ ID NO: 6630; WAN024C3A; Start 41; Stop 65
aaacatgcttaggacaagaggaagg

SEQ ID NO: 444563 - DNA, 25 bp, Artificial
  probe
  misc_feature (1)..(25): SEQ ID NO: 6630; WAN024C3A; Start 44; Stop 68
catgcttaggacaagaggaaggtga

SEQ ID NO: 444564 - DNA, 25 bp, Artificial
  probe
  misc_feature (1)..(25): SEQ ID NO: 6630; WAN024C3A; Start 43; Stop 67
acatgcttaggacaagaggaaggtg

SEQ ID NO: 444565 - DNA, 25 bp, Artificial
  probe
  misc_feature (1)..(25): SEQ ID NO: 6630; WAN024C3A; Start 28; Stop 52
ttttcccaacttcaaacatgcttag

SEQ ID NO: 444566 - DNA, 25 bp, Artificial
  probe
  misc_feature (1)..(25): SEQ ID NO: 6630; WAN024C3A; Start 30; Stop 54
ttcccaacttcaaacatgcttagga

SEQ ID NO: 444567 - DNA, 25 bp, Artificial
  probe
  misc_feature (1)..(25): SEQ ID NO: 6630; WAN024C3A; Start 32; Stop 56
cccaacttcaaacatgcttaggaca

SEQ ID NO: 444568 - DNA, 25 bp, Artificial
  probe
  misc_feature (1)..(25): SEQ ID NO: 6630; WAN024C3A; Start 46; Stop 70
tgcttaggacaagaggaaggtgact

SEQ ID NO: 444569 - DNA, 25 bp, Artificial
  probe
  misc_feature (1)..(25): SEQ ID NO: 6630; WAN024C3A; Start 31; Stop 55
tcccaacttcaaacatgcttaggac

SEQ ID NO: 444570 - DNA, 25 bp, Artificial
  probe
  misc_feature (1)..(25): SEQ ID NO: 6630; WAN024C3A; Start 49; Stop 73
ttaggacaagaggaaggtgacttcg

SEQ ID NO: 444571 - DNA, 25 bp, Artificial
  probe
  misc_feature (1)..(25): SEQ ID NO: 6630; WAN024C3A; Start 50; Stop 74
taggacaagaggaaggtgacttcgt

SEQ ID NO: 444572 - DNA, 25 bp, Artificial
  probe
  misc_feature (1)..(25): SEQ ID NO: 6631; WAN024FXT; Start 177; Stop 201
tttcatctttggtcaatccgagttt

SEQ ID NO: 444573 - DNA, 25 bp, Artificial
  probe
  misc_feature (1)..(25): SEQ ID NO: 6631; WAN024FXT; Start 176; Stop 200
gtttcatctttggtcaatccgagtt

SEQ ID NO: 444574 - DNA, 25 bp, Artificial
  probe
  misc_feature (1)..(25): SEQ ID NO: 6631; WAN024FXT; Start 173; Stop 197
atggtttcatctttggtcaatccga

SEQ ID NO: 444575 - DNA, 25 bp, Artificial
  probe
  misc_feature (1)..(25): SEQ ID NO: 6631; WAN024FXT; Start 175; Stop 199
ggtttcatctttggtcaatccgagt

SEQ ID NO: 444576 - DNA, 25 bp, Artificial
  probe
  misc_feature (1)..(25): SEQ ID NO: 6631; WAN024FXT; Start 174; Stop 198
tggtttcatctttggtcaatccgag

SEQ ID NO: 444577 - DNA, 25 bp, Artificial
  probe
  misc_feature (1)..(25): SEQ ID NO: 6631; WAN024FXT; Start 172; Stop 196
catggtttcatctttggtcaatccg

SEQ ID NO: 444578 - DNA, 25 bp, Artificial
  probe
  misc_feature (1)..(25): SEQ ID NO: 6631; WAN024FXT; Start 60; Stop 84
ttttggtgatgtatttggcgatttt

SEQ ID NO: 444579 - DNA, 25 bp, Artificial
  probe
  misc_feature (1)..(25): SEQ ID NO: 6631; WAN024FXT; Start 54; Stop 78
catttgttttggtgatgtatttggc

SEQ ID NO: 444580 - DNA, 25 bp, Artificial
  probe
  misc_feature (1)..(25): SEQ ID NO: 6631; WAN024FXT; Start 59; Stop 83
gttttggtgatgtatttggcgattt

SEQ ID NO: 444581 - DNA, 25 bp, Artificial
  probe
  misc_feature (1)..(25): SEQ ID NO: 6631; WAN024FXT; Start 178; Stop 202
ttcatctttggtcaatccgagtttt

SEQ ID NO: 444582 - DNA, 25 bp, Artificial
  probe
  misc_feature (1)..(25): SEQ ID NO: 6631; WAN024FXT; Start 55; Stop 79
atttgttttggtgatgtatttggcg

SEQ ID NO: 444583 - DNA, 25 bp, Artificial
  probe
  misc_feature (1)..(25): SEQ ID NO: 6631; WAN024FXT; Start 50; Stop 74
tcgtcatttgttttggtgatgtatt

SEQ ID NO: 444584 - DNA, 25 bp, Artificial
  probe
  misc_feature (1)..(25): SEQ ID NO: 6631; WAN024FXT; Start 49; Stop 73
ttcgtcatttgttttggtgatgtat

SEQ ID NO: 444585 - DNA, 25 bp, Artificial
  probe
  misc_feature (1)..(25): SEQ ID NO: 6631; WAN024FXT; Start 48; Stop 72
attcgtcatttgttttggtgatgta

SEQ ID NO: 444586 - DNA, 25 bp, Artificial
  probe
  misc_feature (1)..(25): SEQ ID NO: 6631; WAN024FXT; Start 47; Stop 71
gattcgtcatttgttttggtgatgt

SEQ ID NO: 444587 - DNA, 25 bp, Artificial
  probe
  misc_feature (1)..(25): SEQ ID NO: 6631; WAN024FXT; Start 51; Stop 75
cgtcatttgttttggtgatgtattt

SEQ ID NO: 444588 - DNA, 25 bp, Artificial
  probe
  misc_feature (1)..(25): SEQ ID NO: 6631; WAN024FXT; Start 53; Stop 77
tcatttgttttggtgatgtatttgg

SEQ ID NO: 444589 - DNA, 25 bp, Artificial
  probe
  misc_feature (1)..(25): SEQ ID NO: 6631; WAN024FXT; Start 58; Stop 82
tgttttggtgatgtatttggcgatt

SEQ ID NO: 444590 - DNA, 25 bp, Artificial
  probe
  misc_feature (1)..(25): SEQ ID NO: 6631; WAN024FXT; Start 57; Stop 81
ttgttttggtgatgtatttggcgat

SEQ ID NO: 444591 - DNA, 25 bp, Artificial
  probe
  misc_feature (1)..(25): SEQ ID NO: 6631; WAN024FXT; Start 46; Stop 70
ggattcgtcatttgttttggtgatg

SEQ ID NO: 444592 - DNA, 25 bp, Artificial
  probe
  misc_feature (1)..(25): SEQ ID NO: 6631; WAN024FXT; Start 56; Stop 80
tttgttttggtgatgtatttggcga

SEQ ID NO: 444593 - DNA, 25 bp, Artificial
  probe
  misc_feature (1)..(25): SEQ ID NO: 6631; WAN024FXT; Start 150; Stop 174
cattttcttcatcaccgattgccat

SEQ ID NO: 444594 - DNA, 25 bp, Artificial
  probe
  misc_feature (1)..(25): SEQ ID NO: 6631; WAN024FXT; Start 52; Stop 76
gtcatttgttttggtgatgtatttg

SEQ ID NO: 444595 - DNA, 25 bp, Artificial
  probe
  misc_feature (1)..(25): SEQ ID NO: 6631; WAN024FXT; Start 148; Stop 172
gtcattttcttcatcaccgattgcc

SEQ ID NO: 444596 - DNA, 25 bp, Artificial
  probe
  misc_feature (1)..(25): SEQ ID NO: 6631; WAN024FXT; Start 45; Stop 69
cggattcgtcatttgttttggtgat

SEQ ID NO: 444597 - DNA, 25 bp, Artificial
  probe
  misc_feature (1)..(25): SEQ ID NO: 6631; WAN024FXT; Start 7; Stop 31
cttttacagtacccatgttcggatg

SEQ ID NO: 444598 - DNA, 25 bp, Artificial
  probe
  misc_feature (1)..(25): SEQ ID NO: 6631; WAN024FXT; Start 3; Stop 27
gatacttttacagtacccatgttcg

SEQ ID NO: 444599 - DNA, 25 bp, Artificial
  probe
  misc_feature (1)..(25): SEQ ID NO: 6631; WAN024FXT; Start 4; Stop 28
atacttttacagtacccatgttcgg

SEQ ID NO: 444600 - DNA, 25 bp, Artificial
  probe
  misc_feature (1)..(25): SEQ ID NO: 6631; WAN024FXT; Start 151; Stop 175
attttcttcatcaccgattgccatg

SEQ ID NO: 444601 - DNA, 25 bp, Artificial
  probe
  misc_feature (1)..(25): SEQ ID NO: 6631; WAN024FXT; Start 6; Stop 30
acttttacagtacccatgttcggat

SEQ ID NO: 444602 - DNA, 25 bp, Artificial
  probe
  misc_feature (1)..(25): SEQ ID NO: 6631; WAN024FXT; Start 149; Stop 173
tcattttcttcatcaccgattgcca

SEQ ID NO: 444603 - DNA, 25 bp, Artificial
  probe
  misc_feature (1)..(25): SEQ ID NO: 6631; WAN024FXT; Start 5; Stop 29
tacttttacagtacccatgttcgga

SEQ ID NO: 444604 - DNA, 25 bp, Artificial
  probe
  misc_feature (1)..(25): SEQ ID NO: 6631; WAN024FXT; Start 2; Stop 26
tgatacttttacagtacccatgttc

SEQ ID NO: 444605 - DNA, 25 bp, Artificial
  probe
  misc_feature (1)..(25): SEQ ID NO: 6632; WAN024AWW; Start 173; Stop 197
ttctaactgttcaggagactctctt

SEQ ID NO: 444606 - DNA, 25 bp, Artificial
  probe
  misc_feature (1)..(25): SEQ ID NO: 6632; WAN024AWW; Start 5; Stop 29
tagaaatcaaacgaatccaacagca

SEQ ID NO: 444607 - DNA, 25 bp, Artificial
  probe
  misc_feature (1)..(25): SEQ ID NO: 6632; WAN024AWW; Start 160; Stop 184
gaagtgattggctttctaactgttc

SEQ ID NO: 444608 - DNA, 25 bp, Artificial
  probe
  misc_feature (1)..(25): SEQ ID NO: 6632; WAN024AWW; Start 90; Stop 114
gacactagaacaaatccaagcagat

SEQ ID NO: 444609 - DNA, 25 bp, Artificial
  probe
  misc_feature (1)..(25): SEQ ID NO: 6632; WAN024AWW; Start 161; Stop 185
aagtgattggctttctaactgttca

SEQ ID NO: 444610 - DNA, 25 bp, Artificial
  probe
  misc_feature (1)..(25): SEQ ID NO: 6632; WAN024AWW; Start 165; Stop 189
gattggctttctaactgttcaggag

SEQ ID NO: 444611 - DNA, 25 bp, Artificial
  probe
  misc_feature (1)..(25): SEQ ID NO: 6632; WAN024AWW; Start 7; Stop 31
gaaatcaaacgaatccaacagcaac

SEQ ID NO: 444612 - DNA, 25 bp, Artificial
  probe
  misc_feature (1)..(25): SEQ ID NO: 6632; WAN024AWW; Start 6; Stop 30
agaaatcaaacgaatccaacagcaa

SEQ ID NO: 444613 - DNA, 25 bp, Artificial
  probe
  misc_feature (1)..(25): SEQ ID NO: 6632; WAN024AWW; Start 91; Stop 115
acactagaacaaatccaagcagatc

SEQ ID NO: 444614 - DNA, 25 bp, Artificial
  probe
  misc_feature (1)..(25): SEQ ID NO: 6632; WAN024AWW; Start 162; Stop 186
agtgattggctttctaactgttcag

SEQ ID NO: 444615 - DNA, 25 bp, Artificial
  probe
  misc_feature (1)..(25): SEQ ID NO: 6632; WAN024AWW; Start 301; Stop 325
gaagtcagacagtcaaatcaacgag

SEQ ID NO: 444616 - DNA, 25 bp, Artificial
  probe
  misc_feature (1)..(25): SEQ ID NO: 6632; WAN024AWW; Start 166; Stop 190
attggctttctaactgttcaggaga

SEQ ID NO: 444617 - DNA, 25 bp, Artificial
  probe
  misc_feature (1)..(25): SEQ ID NO: 6632; WAN024AWW; Start 171; Stop 195
ctttctaactgttcaggagactctc

SEQ ID NO: 444618 - DNA, 25 bp, Artificial
  probe
  misc_feature (1)..(25): SEQ ID NO: 6632; WAN024AWW; Start 170; Stop 194
gctttctaactgttcaggagactct

SEQ ID NO: 444619 - DNA, 25 bp, Artificial
  probe
  misc_feature (1)..(25): SEQ ID NO: 6632; WAN024AWW; Start 175; Stop 199
ctaactgttcaggagactctctttg

SEQ ID NO: 444620 - DNA, 25 bp, Artificial
  probe
  misc_feature (1)..(25): SEQ ID NO: 6632; WAN024AWW; Start 174; Stop 198
tctaactgttcaggagactctcttt

SEQ ID NO: 444621 - DNA, 25 bp, Artificial
  probe
  misc_feature (1)..(25): SEQ ID NO: 6632; WAN024AWW; Start 172; Stop 196
tttctaactgttcaggagactctct

SEQ ID NO: 444622 - DNA, 25 bp, Artificial
  probe
  misc_feature (1)..(25): SEQ ID NO: 6632; WAN024AWW; Start 176; Stop 200
taactgttcaggagactctctttga

SEQ ID NO: 444623 - DNA, 25 bp, Artificial
  probe
  misc_feature (1)..(25): SEQ ID NO: 6632; WAN024AWW; Start 164; Stop 188
tgattggctttctaactgttcagga

SEQ ID NO: 444624 - DNA, 25 bp, Artificial
  probe
  misc_feature (1)..(25): SEQ ID NO: 6632; WAN024AWW; Start 163; Stop 187
gtgattggctttctaactgttcagg

SEQ ID NO: 444625 - DNA, 25 bp, Artificial
  probe
  misc_feature (1)..(25): SEQ ID NO: 6632; WAN024AWW; Start 167; Stop 191
ttggctttctaactgttcaggagac

SEQ ID NO: 444626 - DNA, 25 bp, Artificial
  probe
  misc_feature (1)..(25): SEQ ID NO: 6632; WAN024AWW; Start 412; Stop 436
atgaagagagaaatagatgaaggat

SEQ ID NO: 444627 - DNA, 25 bp, Artificial
  probe
  misc_feature (1)..(25): SEQ ID NO: 6632; WAN024AWW; Start 8; Stop 32
aaatcaaacgaatccaacagcaacc

SEQ ID NO: 444628 - DNA, 25 bp, Artificial
  probe
  misc_feature (1)..(25): SEQ ID NO: 6632; WAN024AWW; Start 169; Stop 193
ggctttctaactgttcaggagactc

SEQ ID NO: 444629 - DNA, 25 bp, Artificial
  probe
  misc_feature (1)..(25): SEQ ID NO: 6632; WAN024AWW; Start 298; Stop 322
ctcgaagtcagacagtcaaatcaac

SEQ ID NO: 444630 - DNA, 25 bp, Artificial
  probe
  misc_feature (1)..(25): SEQ ID NO: 6632; WAN024AWW; Start 159; Stop 183
agaagtgattggctttctaactgtt

SEQ ID NO: 444631 - DNA, 25 bp, Artificial
  probe
  misc_feature (1)..(25): SEQ ID NO: 6632; WAN024AWW; Start 78; Stop 102
agtcagtccttggacactagaacaa

SEQ ID NO: 444632 - DNA, 25 bp, Artificial
  probe
  misc_feature (1)..(25): SEQ ID NO: 6632; WAN024AWW; Start 340; Stop 364
aagaaagaaaagatggcagttatcg

SEQ ID NO: 444633 - DNA, 25 bp, Artificial
  probe
  misc_feature (1)..(25): SEQ ID NO: 6632; WAN024AWW; Start 81; Stop 105
cagtccttggacactagaacaaatc

SEQ ID NO: 444634 - DNA, 25 bp, Artificial
  probe
  misc_feature (1)..(25): SEQ ID NO: 6632; WAN024AWW; Start 336; Stop 360
ttacaagaaagaaaagatggcagtt

SEQ ID NO: 444635 - DNA, 25 bp, Artificial
  probe
  misc_feature (1)..(25): SEQ ID NO: 6632; WAN024AWW; Start 294; Stop 318
tttcctcgaagtcagacagtcaaat

SEQ ID NO: 444636 - DNA, 25 bp, Artificial
  probe
  misc_feature (1)..(25): SEQ ID NO: 6632; WAN024AWW; Start 335; Stop 359
tttacaagaaagaaaagatggcagt

SEQ ID NO: 444637 - DNA, 25 bp, Artificial
  probe
  misc_feature (1)..(25): SEQ ID NO: 6632; WAN024AWW; Start 158; Stop 182
cagaagtgattggctttctaactgt

SEQ ID NO: 444638 - DNA, 25 bp, Artificial
  probe
  misc_feature (1)..(25): SEQ ID NO: 6633; WAN024AWX; Start 129; Stop 153
gacttggtatgttctggcttatgat

SEQ ID NO: 444639 - DNA, 25 bp, Artificial
  probe
  misc_feature (1)..(25): SEQ ID NO: 6633; WAN024AWX; Start 130; Stop 154
acttggtatgttctggcttatgatg

SEQ ID NO: 444640 - DNA, 25 bp, Artificial
  probe
  misc_feature (1)..(25): SEQ ID NO: 6633; WAN024AWX; Start 131; Stop 155
cttggtatgttctggcttatgatgg

SEQ ID NO: 444641 - DNA, 25 bp, Artificial
  probe
  misc_feature (1)..(25): SEQ ID NO: 6633; WAN024AWX; Start 128; Stop 152
agacttggtatgttctggcttatga

SEQ ID NO: 444642 - DNA, 25 bp, Artificial
  probe
  misc_feature (1)..(25): SEQ ID NO: 6633; WAN024AWX; Start 5; Stop 29
tagaaatcaaacgaatccaacagcg

SEQ ID NO: 444643 - DNA, 25 bp, Artificial
  probe
  misc_feature (1)..(25): SEQ ID NO: 6633; WAN024AWX; Start 132; Stop 156
ttggtatgttctggcttatgatggg

SEQ ID NO: 444644 - DNA, 25 bp, Artificial
  probe
  misc_feature (1)..(25): SEQ ID NO: 6633; WAN024AWX; Start 301; Stop 325
gaagtcagacagtcaaatcatcgag

SEQ ID NO: 444645 - DNA, 25 bp, Artificial
  probe
  misc_feature (1)..(25): SEQ ID NO: 6633; WAN024AWX; Start 7; Stop 31
gaaatcaaacgaatccaacagcgac

SEQ ID NO: 444646 - DNA, 25 bp, Artificial
  probe
  misc_feature (1)..(25): SEQ ID NO: 6633; WAN024AWX; Start 300; Stop 324
tgaagtcagacagtcaaatcatcga

SEQ ID NO: 444647 - DNA, 25 bp, Artificial
  probe
  misc_feature (1)..(25): SEQ ID NO: 6633; WAN024AWX; Start 6; Stop 30
agaaatcaaacgaatccaacagcga

SEQ ID NO: 444648 - DNA, 25 bp, Artificial
  probe
  misc_feature (1)..(25): SEQ ID NO: 6633; WAN024AWX; Start 298; Stop 322
cttgaagtcagacagtcaaatcatc

SEQ ID NO: 444649 - DNA, 25 bp, Artificial
  probe
  misc_feature (1)..(25): SEQ ID NO: 6633; WAN024AWX; Start 127; Stop 151
cagacttggtatgttctggcttatg

SEQ ID NO: 444650 - DNA, 25 bp, Artificial
  probe
  misc_feature (1)..(25): SEQ ID NO: 6633; WAN024AWX; Start 294; Stop 318
tttccttgaagtcagacagtcaaat

SEQ ID NO: 444651 - DNA, 25 bp, Artificial
  probe
  misc_feature (1)..(25): SEQ ID NO: 6633; WAN024AWX; Start 295; Stop 319
ttccttgaagtcagacagtcaaatc

SEQ ID NO: 444652 - DNA, 25 bp, Artificial
  probe
  misc_feature (1)..(25): SEQ ID NO: 6633; WAN024AWX; Start 48; Stop 72
catctacgctgttatggtagctgtt

SEQ ID NO: 444653 - DNA, 25 bp, Artificial
  probe
  misc_feature (1)..(25): SEQ ID NO: 6633; WAN024AWX; Start 297; Stop 321
ccttgaagtcagacagtcaaatcat

SEQ ID NO: 444654 - DNA, 25 bp, Artificial
  probe
  misc_feature (1)..(25): SEQ ID NO: 6633; WAN024AWX; Start 291; Stop 315
aattttccttgaagtcagacagtca

SEQ ID NO: 444655 - DNA, 25 bp, Artificial
  probe
  misc_feature (1)..(25): SEQ ID NO: 6633; WAN024AWX; Start 172; Stop 196
tttctagctgttcaggagaatcttt

SEQ ID NO: 444656 - DNA, 25 bp, Artificial
  probe
  misc_feature (1)..(25): SEQ ID NO: 6633; WAN024AWX; Start 171; Stop 195
ctttctagctgttcaggagaatctt

SEQ ID NO: 444657 - DNA, 25 bp, Artificial
  probe
  misc_feature (1)..(25): SEQ ID NO: 6633; WAN024AWX; Start 299; Stop 323
ttgaagtcagacagtcaaatcatcg

SEQ ID NO: 444658 - DNA, 25 bp, Artificial
  probe
  misc_feature (1)..(25): SEQ ID NO: 6633; WAN024AWX; Start 302; Stop 326
aagtcagacagtcaaatcatcgagc

SEQ ID NO: 444659 - DNA, 25 bp, Artificial
  probe
  misc_feature (1)..(25): SEQ ID NO: 6633; WAN024AWX; Start 296; Stop 320
tccttgaagtcagacagtcaaatca

SEQ ID NO: 444660 - DNA, 25 bp, Artificial
  probe
  misc_feature (1)..(25): SEQ ID NO: 6633; WAN024AWX; Start 51; Stop 75
ctacgctgttatggtagctgtttac

SEQ ID NO: 444661 - DNA, 25 bp, Artificial
  probe
  misc_feature (1)..(25): SEQ ID NO: 6633; WAN024AWX; Start 214; Stop 238
caaatcgctgtcaaagaagcctatc

SEQ ID NO: 444662 - DNA, 25 bp, Artificial
  probe
  misc_feature (1)..(25): SEQ ID NO: 6633; WAN024AWX; Start 50; Stop 74
tctacgctgttatggtagctgttta

SEQ ID NO: 444663 - DNA, 25 bp, Artificial
  probe
  misc_feature (1)..(25): SEQ ID NO: 6633; WAN024AWX; Start 215; Stop 239
aaatcgctgtcaaagaagcctatca

SEQ ID NO: 444664 - DNA, 25 bp, Artificial
  probe
  misc_feature (1)..(25): SEQ ID NO: 6633; WAN024AWX; Start 59; Stop 83
ttatggtagctgtttacccagttag

SEQ ID NO: 444665 - DNA, 25 bp, Artificial
  probe
  misc_feature (1)..(25): SEQ ID NO: 6633; WAN024AWX; Start 58; Stop 82
gttatggtagctgtttacccagtta

SEQ ID NO: 444666 - DNA, 25 bp, Artificial
  probe
  misc_feature (1)..(25): SEQ ID NO: 6633; WAN024AWX; Start 160; Stop 184
gaagtgattggctttctagctgttc

SEQ ID NO: 444667 - DNA, 25 bp, Artificial
  probe
  misc_feature (1)..(25): SEQ ID NO: 6633; WAN024AWX; Start 49; Stop 73
atctacgctgttatggtagctgttt

SEQ ID NO: 444668 - DNA, 25 bp, Artificial
  probe
  misc_feature (1)..(25): SEQ ID NO: 6633; WAN024AWX; Start 290; Stop 314
aaattttccttgaagtcagacagtc

SEQ ID NO: 444669 - DNA, 25 bp, Artificial
  probe
  misc_feature (1)..(25): SEQ ID NO: 6633; WAN024AWX; Start 289; Stop 313
gaaattttccttgaagtcagacagt

SEQ ID NO: 444670 - DNA, 25 bp, Artificial
  probe
  misc_feature (1)..(25): SEQ ID NO: 6633; WAN024AWX; Start 60; Stop 84
tatggtagctgtttacccagttagt

SEQ ID NO: 444671 - DNA, 25 bp, Artificial
  probe
  misc_feature (1)..(25): SEQ ID NO: 6634; WAN024BL6; Start 57; Stop 81
actagaaaatcagaaccataatacc

SEQ ID NO: 444672 - DNA, 25 bp, Artificial
  probe
  misc_feature (1)..(25): SEQ ID NO: 6634; WAN024BL6; Start 58; Stop 82
ctagaaaatcagaaccataatacct

SEQ ID NO: 444673 - DNA, 25 bp, Artificial
  probe
  misc_feature (1)..(25): SEQ ID NO: 6634; WAN024BL6; Start 8; Stop 32
cacttaaaacggccttttctaagaa

SEQ ID NO: 444674 - DNA, 25 bp, Artificial
  probe
  misc_feature (1)..(25): SEQ ID NO: 6634; WAN024BL6; Start 9; Stop 33
acttaaaacggccttttctaagaag

SEQ ID NO: 444675 - DNA, 25 bp, Artificial
  probe
  misc_feature (1)..(25): SEQ ID NO: 6634; WAN024BL6; Start 10; Stop 34
cttaaaacggccttttctaagaaga

SEQ ID NO: 444676 - DNA, 25 bp, Artificial
  probe
  misc_feature (1)..(25): SEQ ID NO: 6634; WAN024BL6; Start 4; Stop 28
atagcacttaaaacggccttttcta

SEQ ID NO: 444677 - DNA, 25 bp, Artificial
  probe
  misc_feature (1)..(25): SEQ ID NO: 6634; WAN024BL6; Start 5; Stop 29
tagcacttaaaacggccttttctaa

SEQ ID NO: 444678 - DNA, 25 bp, Artificial
  probe
  misc_feature (1)..(25): SEQ ID NO: 6634; WAN024BL6; Start 1; Stop 25
atgatagcacttaaaacggcctttt

SEQ ID NO: 444679 - DNA, 25 bp, Artificial
  probe
  misc_feature (1)..(25): SEQ ID NO: 6634; WAN024BL6; Start 3; Stop 27
gatagcacttaaaacggccttttct

SEQ ID NO: 444680 - DNA, 25 bp, Artificial
  probe
  misc_feature (1)..(25): SEQ ID NO: 6634; WAN024BL6; Start 7; Stop 31
gcacttaaaacggccttttctaaga

SEQ ID NO: 444681 - DNA, 25 bp, Artificial
  probe
  misc_feature (1)..(25): SEQ ID NO: 6634; WAN024BL6; Start 6; Stop 30
agcacttaaaacggccttttctaag

SEQ ID NO: 444682 - DNA, 25 bp, Artificial
  probe
  misc_feature (1)..(25): SEQ ID NO: 6634; WAN024BL6; Start 2; Stop 26
tgatagcacttaaaacggccttttc

SEQ ID NO: 444683 - DNA, 25 bp, Artificial
  probe
  misc_feature (1)..(25): SEQ ID NO: 6634; WAN024BL6; Start 14; Stop 38
aaacggccttttctaagaagaattc

SEQ ID NO: 444684 - DNA, 25 bp, Artificial
  probe
  misc_feature (1)..(25): SEQ ID NO: 6634; WAN024BL6; Start 13; Stop 37
aaaacggccttttctaagaagaatt

SEQ ID NO: 444685 - DNA, 25 bp, Artificial
  probe
  misc_feature (1)..(25): SEQ ID NO: 6634; WAN024BL6; Start 60; Stop 84
agaaaatcagaaccataatacctat

SEQ ID NO: 444686 - DNA, 25 bp, Artificial
  probe
  misc_feature (1)..(25): SEQ ID NO: 6634; WAN024BL6; Start 11; Stop 35
ttaaaacggccttttctaagaagaa

SEQ ID NO: 444687 - DNA, 25 bp, Artificial
  probe
  misc_feature (1)..(25): SEQ ID NO: 6634; WAN024BL6; Start 12; Stop 36
taaaacggccttttctaagaagaat

SEQ ID NO: 444688 - DNA, 25 bp, Artificial
  probe
  misc_feature (1)..(25): SEQ ID NO: 6635; WAN024BVK; Start 136; Stop 160
atctggttgtatagagaacgcttga

SEQ ID NO: 444689 - DNA, 25 bp, Artificial
  probe
  misc_feature (1)..(25): SEQ ID NO: 6635; WAN024BVK; Start 135; Stop 159
catctggttgtatagagaacgcttg

SEQ ID NO: 444690 - DNA, 25 bp, Artificial
  probe
  misc_feature (1)..(25): SEQ ID NO: 6635; WAN024BVK; Start 40; Stop 64
ttatcagatgatgcgatggaatatc

SEQ ID NO: 444691 - DNA, 25 bp, Artificial
  probe
  misc_feature (1)..(25): SEQ ID NO: 6635; WAN024BVK; Start 15; Stop 39
gctcttgatccaacatctccataat

SEQ ID NO: 444692 - DNA, 25 bp, Artificial
  probe
  misc_feature (1)..(25): SEQ ID NO: 6635; WAN024BVK; Start 16; Stop 40
ctcttgatccaacatctccataatt

SEQ ID NO: 444693 - DNA, 25 bp, Artificial
  probe
  misc_feature (1)..(25): SEQ ID NO: 6635; WAN024BVK; Start 137; Stop 161
tctggttgtatagagaacgcttgac

SEQ ID NO: 444694 - DNA, 25 bp, Artificial
  probe
  misc_feature (1)..(25): SEQ ID NO: 6635; WAN024BVK; Start 14; Stop 38
tgctcttgatccaacatctccataa

SEQ ID NO: 444695 - DNA, 25 bp, Artificial
  probe
  misc_feature (1)..(25): SEQ ID NO: 6635; WAN024BVK; Start 8; Stop 32
ttaaggtgctcttgatccaacatct

SEQ ID NO: 444696 - DNA, 25 bp, Artificial
  probe
  misc_feature (1)..(25): SEQ ID NO: 6635; WAN024BVK; Start 61; Stop 85
tatcaactctttcatcgtctgtcat

SEQ ID NO: 444697 - DNA, 25 bp, Artificial
  probe
  misc_feature (1)..(25): SEQ ID NO: 6635; WAN024BVK; Start 60; Stop 84
atatcaactctttcatcgtctgtca

SEQ ID NO: 444698 - DNA, 25 bp, Artificial
  probe
  misc_feature (1)..(25): SEQ ID NO: 6635; WAN024BVK; Start 64; Stop 88
caactctttcatcgtctgtcatttc

SEQ ID NO: 444699 - DNA, 25 bp, Artificial
  probe
  misc_feature (1)..(25): SEQ ID NO: 6635; WAN024BVK; Start 62; Stop 86
atcaactctttcatcgtctgtcatt

SEQ ID NO: 444700 - DNA, 25 bp, Artificial
  probe
  misc_feature (1)..(25): SEQ ID NO: 6635; WAN024BVK; Start 159; Stop 183
gaccaaatcagagaaagaacaagaa

SEQ ID NO: 444701 - DNA, 25 bp, Artificial
  probe
  misc_feature (1)..(25): SEQ ID NO: 6635; WAN024BVK; Start 134; Stop 158
ccatctggttgtatagagaacgctt

SEQ ID NO: 444702 - DNA, 25 bp, Artificial
  probe
  misc_feature (1)..(25): SEQ ID NO: 6635; WAN024BVK; Start 63; Stop 87
tcaactctttcatcgtctgtcattt

SEQ ID NO: 444703 - DNA, 25 bp, Artificial
  probe
  misc_feature (1)..(25): SEQ ID NO: 6635; WAN024BVK; Start 56; Stop 80
tggaatatcaactctttcatcgtct

SEQ ID NO: 444704 - DNA, 25 bp, Artificial
  probe
  misc_feature (1)..(25): SEQ ID NO: 6635; WAN024BVK; Start 49; Stop 73
gatgcgatggaatatcaactctttc

SEQ ID NO: 444705 - DNA, 25 bp, Artificial
  probe
  misc_feature (1)..(25): SEQ ID NO: 6635; WAN024BVK; Start 57; Stop 81
ggaatatcaactctttcatcgtctg

SEQ ID NO: 444706 - DNA, 25 bp, Artificial
  probe
  misc_feature (1)..(25): SEQ ID NO: 6635; WAN024BVK; Start 59; Stop 83
aatatcaactctttcatcgtctgtc

SEQ ID NO: 444707 - DNA, 25 bp, Artificial
  probe
  misc_feature (1)..(25): SEQ ID NO: 6635; WAN024BVK; Start 143; Stop 167
tgtatagagaacgcttgaccaaatc

SEQ ID NO: 444708 - DNA, 25 bp, Artificial
  probe
  misc_feature (1)..(25): SEQ ID NO: 6635; WAN024BVK; Start 51; Stop 75
tgcgatggaatatcaactctttcat

SEQ ID NO: 444709 - DNA, 25 bp, Artificial
  probe
  misc_feature (1)..(25): SEQ ID NO: 6635; WAN024BVK; Start 50; Stop 74
atgcgatggaatatcaactctttca

SEQ ID NO: 444710 - DNA, 25 bp, Artificial
  probe
  misc_feature (1)..(25): SEQ ID NO: 6635; WAN024BVK; Start 13; Stop 37
gtgctcttgatccaacatctccata

SEQ ID NO: 444711 - DNA, 25 bp, Artificial
  probe
  misc_feature (1)..(25): SEQ ID NO: 6635; WAN024BVK; Start 9; Stop 33
taaggtgctcttgatccaacatctc

SEQ ID NO: 444712 - DNA, 25 bp, Artificial
  probe
  misc_feature (1)..(25): SEQ ID NO: 6635; WAN024BVK; Start 160; Stop 184
accaaatcagagaaagaacaagaat

SEQ ID NO: 444713 - DNA, 25 bp, Artificial
  probe
  misc_feature (1)..(25): SEQ ID NO: 6635; WAN024BVK; Start 70; Stop 94
tttcatcgtctgtcatttcgtcatt

SEQ ID NO: 444714 - DNA, 25 bp, Artificial
  probe
  misc_feature (1)..(25): SEQ ID NO: 6635; WAN024BVK; Start 58; Stop 82
gaatatcaactctttcatcgtctgt

SEQ ID NO: 444715 - DNA, 25 bp, Artificial
  probe
  misc_feature (1)..(25): SEQ ID NO: 6635; WAN024BVK; Start 55; Stop 79
atggaatatcaactctttcatcgtc

SEQ ID NO: 444716 - DNA, 25 bp, Artificial
  probe
  misc_feature (1)..(25): SEQ ID NO: 6635; WAN024BVK; Start 142; Stop 166
ttgtatagagaacgcttgaccaaat

SEQ ID NO: 444717 - DNA, 25 bp, Artificial
  probe
  misc_feature (1)..(25): SEQ ID NO: 6635; WAN024BVK; Start 158; Stop 182
tgaccaaatcagagaaagaacaaga

SEQ ID NO: 444718 - DNA, 25 bp, Artificial
  probe
  misc_feature (1)..(25): SEQ ID NO: 6635; WAN024BVK; Start 157; Stop 181
ttgaccaaatcagagaaagaacaag

SEQ ID NO: 444719 - DNA, 25 bp, Artificial
  probe
  misc_feature (1)..(25): SEQ ID NO: 6635; WAN024BVK; Start 156; Stop 180
cttgaccaaatcagagaaagaacaa

SEQ ID NO: 444720 - DNA, 25 bp, Artificial
  probe
  misc_feature (1)..(25): SEQ ID NO: 6635; WAN024BVK; Start 65; Stop 89
aactctttcatcgtctgtcatttcg

SEQ ID NO: 444721 - DNA, 25 bp, Artificial
  probe
  misc_feature (1)..(25): SEQ ID NO: 6636; WAN024FZC; Start 21; Stop 45
gatactggtgataatgatgcggata

SEQ ID NO: 444722 - DNA, 25 bp, Artificial
  probe
  misc_feature (1)..(25): SEQ ID NO: 6636; WAN024FZC; Start 22; Stop 46
atactggtgataatgatgcggataa

SEQ ID NO: 444723 - DNA, 25 bp, Artificial
  probe
  misc_feature (1)..(25): SEQ ID NO: 6636; WAN024FZC; Start 23; Stop 47
tactggtgataatgatgcggataac

SEQ ID NO: 444724 - DNA, 25 bp, Artificial
  probe
  misc_feature (1)..(25): SEQ ID NO: 6636; WAN024FZC; Start 27; Stop 51
ggtgataatgatgcggataactgat

SEQ ID NO: 444725 - DNA, 25 bp, Artificial
  probe
  misc_feature (1)..(25): SEQ ID NO: 6636; WAN024FZC; Start 16; Stop 40
aacaagatactggtgataatgatgc

SEQ ID NO: 444726 - DNA, 25 bp, Artificial
  probe
  misc_feature (1)..(25): SEQ ID NO: 6636; WAN024FZC; Start 17; Stop 41
acaagatactggtgataatgatgcg

SEQ ID NO: 444727 - DNA, 25 bp, Artificial
  probe
  misc_feature (1)..(25): SEQ ID NO: 6636; WAN024FZC; Start 28; Stop 52
gtgataatgatgcggataactgata

SEQ ID NO: 444728 - DNA, 25 bp, Artificial
  probe
  misc_feature (1)..(25): SEQ ID NO: 6636; WAN024FZC; Start 1175; Stop 1199
gcaaggacaaggttattgataatga

SEQ ID NO: 444729 - DNA, 25 bp, Artificial
  probe
  misc_feature (1)..(25): SEQ ID NO: 6636; WAN024FZC; Start 114; Stop 138
tcttgatagaacactggataacctt

SEQ ID NO: 444730 - DNA, 25 bp, Artificial
  probe
  misc_feature (1)..(25): SEQ ID NO: 6636; WAN024FZC; Start 1174; Stop 1198
agcaaggacaaggttattgataatg

SEQ ID NO: 444731 - DNA, 25 bp, Artificial
  probe
  misc_feature (1)..(25): SEQ ID NO: 6636; WAN024FZC; Start 20; Stop 44
agatactggtgataatgatgcggat

SEQ ID NO: 444732 - DNA, 25 bp, Artificial
  probe
  misc_feature (1)..(25): SEQ ID NO: 6636; WAN024FZC; Start 344; Stop 368
acaaggttcttcatatcaatctcac

SEQ ID NO: 444733 - DNA, 25 bp, Artificial
  probe
  misc_feature (1)..(25): SEQ ID NO: 6636; WAN024FZC; Start 11; Stop 35
tggtcaacaagatactggtgataat

SEQ ID NO: 444734 - DNA, 25 bp, Artificial
  probe
  misc_feature (1)..(25): SEQ ID NO: 6636; WAN024FZC; Start 10; Stop 34
ctggtcaacaagatactggtgataa

SEQ ID NO: 444735 - DNA, 25 bp, Artificial
  probe
  misc_feature (1)..(25): SEQ ID NO: 6636; WAN024FZC; Start 12; Stop 36
ggtcaacaagatactggtgataatg

SEQ ID NO: 444736 - DNA, 25 bp, Artificial
  probe
  misc_feature (1)..(25): SEQ ID NO: 6636; WAN024FZC; Start 1173; Stop 1197
gagcaaggacaaggttattgataat

SEQ ID NO: 444737 - DNA, 25 bp, Artificial
  probe
  misc_feature (1)..(25): SEQ ID NO: 6636; WAN024FZC; Start 25; Stop 49
ctggtgataatgatgcggataactg

SEQ ID NO: 444738 - DNA, 25 bp, Artificial
  probe
  misc_feature (1)..(25): SEQ ID NO: 6636; WAN024FZC; Start 19; Stop 43
aagatactggtgataatgatgcgga

SEQ ID NO: 444739 - DNA, 25 bp, Artificial
  probe
  misc_feature (1)..(25): SEQ ID NO: 6636; WAN024FZC; Start 18; Stop 42
caagatactggtgataatgatgcgg

SEQ ID NO: 444740 - DNA, 25 bp, Artificial
  probe
  misc_feature (1)..(25): SEQ ID NO: 6636; WAN024FZC; Start 345; Stop 369
caaggttcttcatatcaatctcact

SEQ ID NO: 444741 - DNA, 25 bp, Artificial
  probe
  misc_feature (1)..(25): SEQ ID NO: 6636; WAN024FZC; Start 1172; Stop 1196
cgagcaaggacaaggttattgataa

SEQ ID NO: 444742 - DNA, 25 bp, Artificial
  probe
  misc_feature (1)..(25): SEQ ID NO: 6636; WAN024FZC; Start 574; Stop 598
acaacgagagagttcacctatgata

SEQ ID NO: 444743 - DNA, 25 bp, Artificial
  probe
  misc_feature (1)..(25): SEQ ID NO: 6636; WAN024FZC; Start 9; Stop 33
actggtcaacaagatactggtgata

SEQ ID NO: 444744 - DNA, 25 bp, Artificial
  probe
  misc_feature (1)..(25): SEQ ID NO: 6636; WAN024FZC; Start 26; Stop 50
tggtgataatgatgcggataactga

SEQ ID NO: 444745 - DNA, 25 bp, Artificial
  probe
  misc_feature (1)..(25): SEQ ID NO: 6636; WAN024FZC; Start 24; Stop 48
actggtgataatgatgcggataact

SEQ ID NO: 444746 - DNA, 25 bp, Artificial
  probe
  misc_feature (1)..(25): SEQ ID NO: 6636; WAN024FZC; Start 570; Stop 594
ctacacaacgagagagttcacctat

SEQ ID NO: 444747 - DNA, 25 bp, Artificial
  probe
  misc_feature (1)..(25): SEQ ID NO: 6636; WAN024FZC; Start 29; Stop 53
tgataatgatgcggataactgataa

SEQ ID NO: 444748 - DNA, 25 bp, Artificial
  probe
  misc_feature (1)..(25): SEQ ID NO: 6636; WAN024FZC; Start 13; Stop 37
gtcaacaagatactggtgataatga

SEQ ID NO: 444749 - DNA, 25 bp, Artificial
  probe
  misc_feature (1)..(25): SEQ ID NO: 6636; WAN024FZC; Start 571; Stop 595
tacacaacgagagagttcacctatg

SEQ ID NO: 444750 - DNA, 25 bp, Artificial
  probe
  misc_feature (1)..(25): SEQ ID NO: 6636; WAN024FZC; Start 343; Stop 367
aacaaggttcttcatatcaatctca

SEQ ID NO: 444751 - DNA, 25 bp, Artificial
  probe
  misc_feature (1)..(25): SEQ ID NO: 6636; WAN024FZC; Start 15; Stop 39
caacaagatactggtgataatgatg

SEQ ID NO: 444752 - DNA, 25 bp, Artificial
  probe
  misc_feature (1)..(25): SEQ ID NO: 6636; WAN024FZC; Start 563; Stop 587
atattgcctacacaacgagagagtt

SEQ ID NO: 444753 - DNA, 25 bp, Artificial
  probe
  misc_feature (1)..(25): SEQ ID NO: 6636; WAN024FZC; Start 744; Stop 768
tcgtgctaagattatcagaatgaat

SEQ ID NO: 444754 - DNA, 25 bp, Artificial
  probe
  misc_feature (1)..(25): SEQ ID NO: 6637; WAN024D7M; Start 267; Stop 291
atatgtgactgaagtaatcgctgag

SEQ ID NO: 444755 - DNA, 25 bp, Artificial
  probe
  misc_feature (1)..(25): SEQ ID NO: 6637; WAN024D7M; Start 266; Stop 290
gatatgtgactgaagtaatcgctga

SEQ ID NO: 444756 - DNA, 25 bp, Artificial
  probe
  misc_feature (1)..(25): SEQ ID NO: 6637; WAN024D7M; Start 227; Stop 251
gcttacaagttaggtcttacgagaa

SEQ ID NO: 444757 - DNA, 25 bp, Artificial
  probe
  misc_feature (1)..(25): SEQ ID NO: 6637; WAN024D7M; Start 268; Stop 292
tatgtgactgaagtaatcgctgaga

SEQ ID NO: 444758 - DNA, 25 bp, Artificial
  probe
  misc_feature (1)..(25): SEQ ID NO: 6637; WAN024D7M; Start 226; Stop 250
cgcttacaagttaggtcttacgaga

SEQ ID NO: 444759 - DNA, 25 bp, Artificial
  probe
  misc_feature (1)..(25): SEQ ID NO: 6637; WAN024D7M; Start 274; Stop 298
actgaagtaatcgctgagagtgtag

SEQ ID NO: 444760 - DNA, 25 bp, Artificial
  probe
  misc_feature (1)..(25): SEQ ID NO: 6637; WAN024D7M; Start 273; Stop 297
gactgaagtaatcgctgagagtgta

SEQ ID NO: 444761 - DNA, 25 bp, Artificial
  probe
  misc_feature (1)..(25): SEQ ID NO: 6637; WAN024D7M; Start 269; Stop 293
atgtgactgaagtaatcgctgagag

SEQ ID NO: 444762 - DNA, 25 bp, Artificial
  probe
  misc_feature (1)..(25): SEQ ID NO: 6637; WAN024D7M; Start 229; Stop 253
ttacaagttaggtcttacgagaaag

SEQ ID NO: 444763 - DNA, 25 bp, Artificial
  probe
  misc_feature (1)..(25): SEQ ID NO: 6637; WAN024D7M; Start 228; Stop 252
cttacaagttaggtcttacgagaaa

SEQ ID NO: 444764 - DNA, 25 bp, Artificial
  probe
  misc_feature (1)..(25): SEQ ID NO: 6637; WAN024D7M; Start 271; Stop 295
gtgactgaagtaatcgctgagagtg

SEQ ID NO: 444765 - DNA, 25 bp, Artificial
  probe
  misc_feature (1)..(25): SEQ ID NO: 6637; WAN024D7M; Start 261; Stop 285
gcgtcgatatgtgactgaagtaatc

SEQ ID NO: 444766 - DNA, 25 bp, Artificial
  probe
  misc_feature (1)..(25): SEQ ID NO: 6637; WAN024D7M; Start 260; Stop 284
agcgtcgatatgtgactgaagtaat

SEQ ID NO: 444767 - DNA, 25 bp, Artificial
  probe
  misc_feature (1)..(25): SEQ ID NO: 6637; WAN024D7M; Start 272; Stop 296
tgactgaagtaatcgctgagagtgt

SEQ ID NO: 444768 - DNA, 25 bp, Artificial
  probe
  misc_feature (1)..(25): SEQ ID NO: 6637; WAN024D7M; Start 270; Stop 294
tgtgactgaagtaatcgctgagagt

SEQ ID NO: 444769 - DNA, 25 bp, Artificial
  probe
  misc_feature (1)..(25): SEQ ID NO: 6637; WAN024D7M; Start 66; Stop 90
taatgtatctagtttacagggcacg

SEQ ID NO: 444770 - DNA, 25 bp, Artificial
  probe
  misc_feature (1)..(25): SEQ ID NO: 6637; WAN024D7M; Start 259; Stop 283
cagcgtcgatatgtgactgaagtaa

SEQ ID NO: 444771 - DNA, 25 bp, Artificial
  probe
  misc_feature (1)..(25): SEQ ID NO: 6637; WAN024D7M; Start 199; Stop 223
aagggctcacttattgggatcattg

SEQ ID NO: 444772 - DNA, 25 bp, Artificial
  probe
  misc_feature (1)..(25): SEQ ID NO: 6637; WAN024D7M; Start 275; Stop 299
ctgaagtaatcgctgagagtgtagc

SEQ ID NO: 444773 - DNA, 25 bp, Artificial
  probe
  misc_feature (1)..(25): SEQ ID NO: 6637; WAN024D7M; Start 230; Stop 254
tacaagttaggtcttacgagaaaga

SEQ ID NO: 444774 - DNA, 25 bp, Artificial
  probe
  misc_feature (1)..(25): SEQ ID NO: 6637; WAN024D7M; Start 198; Stop 222
caagggctcacttattgggatcatt

SEQ ID NO: 444775 - DNA, 25 bp, Artificial
  probe
  misc_feature (1)..(25): SEQ ID NO: 6637; WAN024D7M; Start 1; Stop 25
atgatcaataacgtcacactggttg

SEQ ID NO: 444776 - DNA, 25 bp, Artificial
  probe
  misc_feature (1)..(25): SEQ ID NO: 6637; WAN024D7M; Start 65; Stop 89
ataatgtatctagtttacagggcac

SEQ ID NO: 444777 - DNA, 25 bp, Artificial
  probe
  misc_feature (1)..(25): SEQ ID NO: 6637; WAN024D7M; Start 70; Stop 94
gtatctagtttacagggcacgcttg

SEQ ID NO: 444778 - DNA, 25 bp, Artificial
  probe
  misc_feature (1)..(25): SEQ ID NO: 6637; WAN024D7M; Start 277; Stop 301
gaagtaatcgctgagagtgtagctc

SEQ ID NO: 444779 - DNA, 25 bp, Artificial
  probe
  misc_feature (1)..(25): SEQ ID NO: 6637; WAN024D7M; Start 64; Stop 88
aataatgtatctagtttacagggca

SEQ ID NO: 444780 - DNA, 25 bp, Artificial
  probe
  misc_feature (1)..(25): SEQ ID NO: 6637; WAN024D7M; Start 58; Stop 82
acgcctaataatgtatctagtttac

SEQ ID NO: 444781 - DNA, 25 bp, Artificial
  probe
  misc_feature (1)..(25): SEQ ID NO: 6637; WAN024D7M; Start 276; Stop 300
tgaagtaatcgctgagagtgtagct

SEQ ID NO: 444782 - DNA, 25 bp, Artificial
  probe
  misc_feature (1)..(25): SEQ ID NO: 6637; WAN024D7M; Start 67; Stop 91
aatgtatctagtttacagggcacgc

SEQ ID NO: 444783 - DNA, 25 bp, Artificial
  probe
  misc_feature (1)..(25): SEQ ID NO: 6637; WAN024D7M; Start 356; Stop 380
atagctcaccttttaccgatcctaa

SEQ ID NO: 444784 - DNA, 25 bp, Artificial
  probe
  misc_feature (1)..(25): SEQ ID NO: 6637; WAN024D7M; Start 355; Stop 379
aatagctcaccttttaccgatccta

SEQ ID NO: 444785 - DNA, 25 bp, Artificial
  probe
  misc_feature (1)..(25): SEQ ID NO: 6637; WAN024D7M; Start 348; Stop 372
aaatgggaatagctcaccttttacc

SEQ ID NO: 444786 - DNA, 25 bp, Artificial
  probe
  misc_feature (1)..(25): SEQ ID NO: 6637; WAN024D7M; Start 365; Stop 389
cttttaccgatcctaacccctttga

SEQ ID NO: 444787 - DNA, 25 bp, Artificial
  probe
  misc_feature (1)..(25): SEQ ID NO: 6638; WAN024CHW; Start 70; Stop 94
cttatagtccgcatacatctctgtc

SEQ ID NO: 444788 - DNA, 25 bp, Artificial
  probe
  misc_feature (1)..(25): SEQ ID NO: 6638; WAN024CHW; Start 71; Stop 95
ttatagtccgcatacatctctgtcc

SEQ ID NO: 444789 - DNA, 25 bp, Artificial
  probe
  misc_feature (1)..(25): SEQ ID NO: 6638; WAN024CHW; Start 69; Stop 93
ccttatagtccgcatacatctctgt

SEQ ID NO: 444790 - DNA, 25 bp, Artificial
  probe
  misc_feature (1)..(25): SEQ ID NO: 6638; WAN024CHW; Start 263; Stop 287
gctacagaagacccatcaatcaata

SEQ ID NO: 444791 - DNA, 25 bp, Artificial
  probe
  misc_feature (1)..(25): SEQ ID NO: 6638; WAN024CHW; Start 154; Stop 178
caacaaatgactcaacatcaactga

SEQ ID NO: 444792 - DNA, 25 bp, Artificial
  probe
  misc_feature (1)..(25): SEQ ID NO: 6638; WAN024CHW; Start 156; Stop 180
acaaatgactcaacatcaactgaaa

SEQ ID NO: 444793 - DNA, 25 bp, Artificial
  probe
  misc_feature (1)..(25): SEQ ID NO: 6638; WAN024CHW; Start 155; Stop 179
aacaaatgactcaacatcaactgaa

SEQ ID NO: 444794 - DNA, 25 bp, Artificial
  probe
  misc_feature (1)..(25): SEQ ID NO: 6638; WAN024CHW; Start 264; Stop 288
ctacagaagacccatcaatcaataa

SEQ ID NO: 444795 - DNA, 25 bp, Artificial
  probe
  misc_feature (1)..(25): SEQ ID NO: 6638; WAN024CHW; Start 151; Stop 175
ctccaacaaatgactcaacatcaac

SEQ ID NO: 444796 - DNA, 25 bp, Artificial
  probe
  misc_feature (1)..(25): SEQ ID NO: 6638; WAN024CHW; Start 18; Stop 42
gaatgaaaggaaattgctcacgaaa

SEQ ID NO: 444797 - DNA, 25 bp, Artificial
  probe
  misc_feature (1)..(25): SEQ ID NO: 6638; WAN024CHW; Start 153; Stop 177
ccaacaaatgactcaacatcaactg

SEQ ID NO: 444798 - DNA, 25 bp, Artificial
  probe
  misc_feature (1)..(25): SEQ ID NO: 6638; WAN024CHW; Start 152; Stop 176
tccaacaaatgactcaacatcaact

SEQ ID NO: 444799 - DNA, 25 bp, Artificial
  probe
  misc_feature (1)..(25): SEQ ID NO: 6638; WAN024CHW; Start 19; Stop 43
aatgaaaggaaattgctcacgaaac

SEQ ID NO: 444800 - DNA, 25 bp, Artificial
  probe
  misc_feature (1)..(25): SEQ ID NO: 6638; WAN024CHW; Start 23; Stop 47
aaaggaaattgctcacgaaactcat

SEQ ID NO: 444801 - DNA, 25 bp, Artificial
  probe
  misc_feature (1)..(25): SEQ ID NO: 6638; WAN024CHW; Start 68; Stop 92
cccttatagtccgcatacatctctg

SEQ ID NO: 444802 - DNA, 25 bp, Artificial
  probe
  misc_feature (1)..(25): SEQ ID NO: 6638; WAN024CHW; Start 24; Stop 48
aaggaaattgctcacgaaactcatc

SEQ ID NO: 444803 - DNA, 25 bp, Artificial
  probe
  misc_feature (1)..(25): SEQ ID NO: 6638; WAN024CHW; Start 66; Stop 90
cacccttatagtccgcatacatctc

SEQ ID NO: 444804 - DNA, 25 bp, Artificial
  probe
  misc_feature (1)..(25): SEQ ID NO: 6638; WAN024CHW; Start 20; Stop 44
atgaaaggaaattgctcacgaaact

SEQ ID NO: 444805 - DNA, 25 bp, Artificial
  probe
  misc_feature (1)..(25): SEQ ID NO: 6638; WAN024CHW; Start 11; Stop 35
aactcacgaatgaaaggaaattgct

SEQ ID NO: 444806 - DNA, 25 bp, Artificial
  probe
  misc_feature (1)..(25): SEQ ID NO: 6638; WAN024CHW; Start 10; Stop 34
caactcacgaatgaaaggaaattgc

SEQ ID NO: 444807 - DNA, 25 bp, Artificial
  probe
  misc_feature (1)..(25): SEQ ID NO: 6638; WAN024CHW; Start 9; Stop 33
gcaactcacgaatgaaaggaaattg

SEQ ID NO: 444808 - DNA, 25 bp, Artificial
  probe
  misc_feature (1)..(25): SEQ ID NO: 6638; WAN024CHW; Start 8; Stop 32
agcaactcacgaatgaaaggaaatt

SEQ ID NO: 444809 - DNA, 25 bp, Artificial
  probe
  misc_feature (1)..(25): SEQ ID NO: 6638; WAN024CHW; Start 22; Stop 46
gaaaggaaattgctcacgaaactca

SEQ ID NO: 444810 - DNA, 25 bp, Artificial
  probe
  misc_feature (1)..(25): SEQ ID NO: 6638; WAN024CHW; Start 67; Stop 91
acccttatagtccgcatacatctct

SEQ ID NO: 444811 - DNA, 25 bp, Artificial
  probe
  misc_feature (1)..(25): SEQ ID NO: 6638; WAN024CHW; Start 72; Stop 96
tatagtccgcatacatctctgtccg

SEQ ID NO: 444812 - DNA, 25 bp, Artificial
  probe
  misc_feature (1)..(25): SEQ ID NO: 6638; WAN024CHW; Start 13; Stop 37
ctcacgaatgaaaggaaattgctca

SEQ ID NO: 444813 - DNA, 25 bp, Artificial
  probe
  misc_feature (1)..(25): SEQ ID NO: 6638; WAN024CHW; Start 12; Stop 36
actcacgaatgaaaggaaattgctc

SEQ ID NO: 444814 - DNA, 25 bp, Artificial
  probe
  misc_feature (1)..(25): SEQ ID NO: 6638; WAN024CHW; Start 150; Stop 174
gctccaacaaatgactcaacatcaa

SEQ ID NO: 444815 - DNA, 25 bp, Artificial
  probe
  misc_feature (1)..(25): SEQ ID NO: 6638; WAN024CHW; Start 21; Stop 45
tgaaaggaaattgctcacgaaactc

SEQ ID NO: 444816 - DNA, 25 bp, Artificial
  probe
  misc_feature (1)..(25): SEQ ID NO: 6638; WAN024CHW; Start 7; Stop 31
cagcaactcacgaatgaaaggaaat

SEQ ID NO: 444817 - DNA, 25 bp, Artificial
  probe
  misc_feature (1)..(25): SEQ ID NO: 6638; WAN024CHW; Start 14; Stop 38
tcacgaatgaaaggaaattgctcac

SEQ ID NO: 444818 - DNA, 25 bp, Artificial
  probe
  misc_feature (1)..(25): SEQ ID NO: 6638; WAN024CHW; Start 27; Stop 51
gaaattgctcacgaaactcatcagg

SEQ ID NO: 444819 - DNA, 25 bp, Artificial
  probe
  misc_feature (1)..(25): SEQ ID NO: 6638; WAN024CHW; Start 26; Stop 50
ggaaattgctcacgaaactcatcag

SEQ ID NO: 444820 - DNA, 25 bp, Artificial
  probe
  misc_feature (1)..(25): SEQ ID NO: 6639; WAN024CS9; Start 95; Stop 119
tatcagaagccaatacaacaccatt

SEQ ID NO: 444821 - DNA, 25 bp, Artificial
  probe
  misc_feature (1)..(25): SEQ ID NO: 6639; WAN024CS9; Start 94; Stop 118
ctatcagaagccaatacaacaccat

SEQ ID NO: 444822 - DNA, 25 bp, Artificial
  probe
  misc_feature (1)..(25): SEQ ID NO: 6639; WAN024CS9; Start 184; Stop 208
ctaatggtacaacagctaaggtctt

SEQ ID NO: 444823 - DNA, 25 bp, Artificial
  probe
  misc_feature (1)..(25): SEQ ID NO: 6639; WAN024CS9; Start 186; Stop 210
aatggtacaacagctaaggtcttac

SEQ ID NO: 444824 - DNA, 25 bp, Artificial
  probe
  misc_feature (1)..(25): SEQ ID NO: 6639; WAN024CS9; Start 182; Stop 206
ctctaatggtacaacagctaaggtc

SEQ ID NO: 444825 - DNA, 25 bp, Artificial
  probe
  misc_feature (1)..(25): SEQ ID NO: 6639; WAN024CS9; Start 185; Stop 209
taatggtacaacagctaaggtctta

SEQ ID NO: 444826 - DNA, 25 bp, Artificial
  probe
  misc_feature (1)..(25): SEQ ID NO: 6639; WAN024CS9; Start 183; Stop 207
tctaatggtacaacagctaaggtct

SEQ ID NO: 444827 - DNA, 25 bp, Artificial
  probe
  misc_feature (1)..(25): SEQ ID NO: 6639; WAN024CS9; Start 156; Stop 180
acctaaactttctaaacctgctcat

SEQ ID NO: 444828 - DNA, 25 bp, Artificial
  probe
  misc_feature (1)..(25): SEQ ID NO: 6639; WAN024CS9; Start 153; Stop 177
atcacctaaactttctaaacctgct

SEQ ID NO: 444829 - DNA, 25 bp, Artificial
  probe
  misc_feature (1)..(25): SEQ ID NO: 6639; WAN024CS9; Start 154; Stop 178
tcacctaaactttctaaacctgctc

SEQ ID NO: 444830 - DNA, 25 bp, Artificial
  probe
  misc_feature (1)..(25): SEQ ID NO: 6639; WAN024CS9; Start 155; Stop 179
cacctaaactttctaaacctgctca

SEQ ID NO: 444831 - DNA, 25 bp, Artificial
  probe
  misc_feature (1)..(25): SEQ ID NO: 6639; WAN024CS9; Start 251; Stop 275
gcttgtctttcctgtttccattcta

SEQ ID NO: 444832 - DNA, 25 bp, Artificial
  probe
  misc_feature (1)..(25): SEQ ID NO: 6639; WAN024CS9; Start 152; Stop 176
tatcacctaaactttctaaacctgc

SEQ ID NO: 444833 - DNA, 25 bp, Artificial
  probe
  misc_feature (1)..(25): SEQ ID NO: 6639; WAN024CS9; Start 96; Stop 120
atcagaagccaatacaacaccattt

SEQ ID NO: 444834 - DNA, 25 bp, Artificial
  probe
  misc_feature (1)..(25): SEQ ID NO: 6639; WAN024CS9; Start 252; Stop 276
cttgtctttcctgtttccattctag

SEQ ID NO: 444835 - DNA, 25 bp, Artificial
  probe
  misc_feature (1)..(25): SEQ ID NO: 6639; WAN024CS9; Start 230; Stop 254
taatactgtatcaagttgtgggctt

SEQ ID NO: 444836 - DNA, 25 bp, Artificial
  probe
  misc_feature (1)..(25): SEQ ID NO: 6639; WAN024CS9; Start 229; Stop 253
ttaatactgtatcaagttgtgggct

SEQ ID NO: 444837 - DNA, 25 bp, Artificial
  probe
  misc_feature (1)..(25): SEQ ID NO: 6639; WAN024CS9; Start 228; Stop 252
tttaatactgtatcaagttgtgggc

SEQ ID NO: 444838 - DNA, 25 bp, Artificial
  probe
  misc_feature (1)..(25): SEQ ID NO: 6639; WAN024CS9; Start 164; Stop 188
tttctaaacctgctcatgctctaat

SEQ ID NO: 444839 - DNA, 25 bp, Artificial
  probe
  misc_feature (1)..(25): SEQ ID NO: 6639; WAN024CS9; Start 157; Stop 181
cctaaactttctaaacctgctcatg

SEQ ID NO: 444840 - DNA, 25 bp, Artificial
  probe
  misc_feature (1)..(25): SEQ ID NO: 6639; WAN024CS9; Start 158; Stop 182
ctaaactttctaaacctgctcatgc

SEQ ID NO: 444841 - DNA, 25 bp, Artificial
  probe
  misc_feature (1)..(25): SEQ ID NO: 6639; WAN024CS9; Start 159; Stop 183
taaactttctaaacctgctcatgct

SEQ ID NO: 444842 - DNA, 25 bp, Artificial
  probe
  misc_feature (1)..(25): SEQ ID NO: 6639; WAN024CS9; Start 163; Stop 187
ctttctaaacctgctcatgctctaa

SEQ ID NO: 444843 - DNA, 25 bp, Artificial
  probe
  misc_feature (1)..(25): SEQ ID NO: 6639; WAN024CS9; Start 174; Stop 198
tgctcatgctctaatggtacaacag

SEQ ID NO: 444844 - DNA, 25 bp, Artificial
  probe
  misc_feature (1)..(25): SEQ ID NO: 6639; WAN024CS9; Start 173; Stop 197
ctgctcatgctctaatggtacaaca

SEQ ID NO: 444845 - DNA, 25 bp, Artificial
  probe
  misc_feature (1)..(25): SEQ ID NO: 6639; WAN024CS9; Start 190; Stop 214
gtacaacagctaaggtcttaccaag

SEQ ID NO: 444846 - DNA, 25 bp, Artificial
  probe
  misc_feature (1)..(25): SEQ ID NO: 6639; WAN024CS9; Start 165; Stop 189
ttctaaacctgctcatgctctaatg

SEQ ID NO: 444847 - DNA, 25 bp, Artificial
  probe
  misc_feature (1)..(25): SEQ ID NO: 6639; WAN024CS9; Start 162; Stop 186
actttctaaacctgctcatgctcta

SEQ ID NO: 444848 - DNA, 25 bp, Artificial
  probe
  misc_feature (1)..(25): SEQ ID NO: 6639; WAN024CS9; Start 160; Stop 184
aaactttctaaacctgctcatgctc

SEQ ID NO: 444849 - DNA, 25 bp, Artificial
  probe
  misc_feature (1)..(25): SEQ ID NO: 6639; WAN024CS9; Start 179; Stop 203
atgctctaatggtacaacagctaag

SEQ ID NO: 444850 - DNA, 25 bp, Artificial
  probe
  misc_feature (1)..(25): SEQ ID NO: 6639; WAN024CS9; Start 178; Stop 202
catgctctaatggtacaacagctaa

SEQ ID NO: 444851 - DNA, 25 bp, Artificial
  probe
  misc_feature (1)..(25): SEQ ID NO: 6639; WAN024CS9; Start 191; Stop 215
tacaacagctaaggtcttaccaaga

SEQ ID NO: 444852 - DNA, 25 bp, Artificial
  probe
  misc_feature (1)..(25): SEQ ID NO: 6639; WAN024CS9; Start 172; Stop 196
cctgctcatgctctaatggtacaac

SEQ ID NO: 444853 - DNA, 25 bp, Artificial
  probe
  misc_feature (1)..(25): SEQ ID NO: 6640; WAN024CT4; Start 208; Stop 232
aggattgagaatgtacttgataagc

SEQ ID NO: 444854 - DNA, 25 bp, Artificial
  probe
  misc_feature (1)..(25): SEQ ID NO: 6640; WAN024CT4; Start 209; Stop 233
ggattgagaatgtacttgataagct

SEQ ID NO: 444855 - DNA, 25 bp, Artificial
  probe
  misc_feature (1)..(25): SEQ ID NO: 6640; WAN024CT4; Start 255; Stop 279
gaatggcaaagtgtttagtgatgac

SEQ ID NO: 444856 - DNA, 25 bp, Artificial
  probe
  misc_feature (1)..(25): SEQ ID NO: 6640; WAN024CT4; Start 254; Stop 278
tgaatggcaaagtgtttagtgatga

SEQ ID NO: 444857 - DNA, 25 bp, Artificial
  probe
  misc_feature (1)..(25): SEQ ID NO: 6640; WAN024CT4; Start 253; Stop 277
gtgaatggcaaagtgtttagtgatg

SEQ ID NO: 444858 - DNA, 25 bp, Artificial
  probe
  misc_feature (1)..(25): SEQ ID NO: 6640; WAN024CT4; Start 14; Stop 38
gagaaagactgaatgatgtggtgag

SEQ ID NO: 444859 - DNA, 25 bp, Artificial
  probe
  misc_feature (1)..(25): SEQ ID NO: 6640; WAN024CT4; Start 207; Stop 231
caggattgagaatgtacttgataag

SEQ ID NO: 444860 - DNA, 25 bp, Artificial
  probe
  misc_feature (1)..(25): SEQ ID NO: 6640; WAN024CT4; Start 206; Stop 230
tcaggattgagaatgtacttgataa

SEQ ID NO: 444861 - DNA, 25 bp, Artificial
  probe
  misc_feature (1)..(25): SEQ ID NO: 6640; WAN024CT4; Start 22; Stop 46
ctgaatgatgtggtgagcgtgtatt

SEQ ID NO: 444862 - DNA, 25 bp, Artificial
  probe
  misc_feature (1)..(25): SEQ ID NO: 6640; WAN024CT4; Start 256; Stop 280
aatggcaaagtgtttagtgatgacc

SEQ ID NO: 444863 - DNA, 25 bp, Artificial
  probe
  misc_feature (1)..(25): SEQ ID NO: 6640; WAN024CT4; Start 159; Stop 183
aattcttcatgccatagtccgacac

SEQ ID NO: 444864 - DNA, 25 bp, Artificial
  probe
  misc_feature (1)..(25): SEQ ID NO: 6640; WAN024CT4; Start 173; Stop 197
tagtccgacaccaaggcaagattat

SEQ ID NO: 444865 - DNA, 25 bp, Artificial
  probe
  misc_feature (1)..(25): SEQ ID NO: 6640; WAN024CT4; Start 172; Stop 196
atagtccgacaccaaggcaagatta

SEQ ID NO: 444866 - DNA, 25 bp, Artificial
  probe
  misc_feature (1)..(25): SEQ ID NO: 6640; WAN024CT4; Start 252; Stop 276
cgtgaatggcaaagtgtttagtgat

SEQ ID NO: 444867 - DNA, 25 bp, Artificial
  probe
  misc_feature (1)..(25): SEQ ID NO: 6640; WAN024CT4; Start 248; Stop 272
tttccgtgaatggcaaagtgtttag

SEQ ID NO: 444868 - DNA, 25 bp, Artificial
  probe
  misc_feature (1)..(25): SEQ ID NO: 6640; WAN024CT4; Start 118; Stop 142
atacatctgcaccatttcctcatag

SEQ ID NO: 444869 - DNA, 25 bp, Artificial
  probe
  misc_feature (1)..(25): SEQ ID NO: 6640; WAN024CT4; Start 117; Stop 141
gatacatctgcaccatttcctcata

SEQ ID NO: 444870 - DNA, 25 bp, Artificial
  probe
  misc_feature (1)..(25): SEQ ID NO: 6640; WAN024CT4; Start 13; Stop 37
cgagaaagactgaatgatgtggtga

SEQ ID NO: 444871 - DNA, 25 bp, Artificial
  probe
  misc_feature (1)..(25): SEQ ID NO: 6640; WAN024CT4; Start 23; Stop 47
tgaatgatgtggtgagcgtgtattt

SEQ ID NO: 444872 - DNA, 25 bp, Artificial
  probe
  misc_feature (1)..(25): SEQ ID NO: 6640; WAN024CT4; Start 15; Stop 39
agaaagactgaatgatgtggtgagc

SEQ ID NO: 444873 - DNA, 25 bp, Artificial
  probe
  misc_feature (1)..(25): SEQ ID NO: 6640; WAN024CT4; Start 158; Stop 182
aaattcttcatgccatagtccgaca

SEQ ID NO: 444874 - DNA, 25 bp, Artificial
  probe
  misc_feature (1)..(25): SEQ ID NO: 6640; WAN024CT4; Start 259; Stop 283
ggcaaagtgtttagtgatgaccatg

SEQ ID NO: 444875 - DNA, 25 bp, Artificial
  probe
  misc_feature (1)..(25): SEQ ID NO: 6640; WAN024CT4; Start 174; Stop 198
agtccgacaccaaggcaagattatt

SEQ ID NO: 444876 - DNA, 25 bp, Artificial
  probe
  misc_feature (1)..(25): SEQ ID NO: 6640; WAN024CT4; Start 21; Stop 45
actgaatgatgtggtgagcgtgtat

SEQ ID NO: 444877 - DNA, 25 bp, Artificial
  probe
  misc_feature (1)..(25): SEQ ID NO: 6640; WAN024CT4; Start 175; Stop 199
gtccgacaccaaggcaagattattg

SEQ ID NO: 444878 - DNA, 25 bp, Artificial
  probe
  misc_feature (1)..(25): SEQ ID NO: 6640; WAN024CT4; Start 46; Stop 70
ttttcgttgattttcttccatcctg

SEQ ID NO: 444879 - DNA, 25 bp, Artificial
  probe
  misc_feature (1)..(25): SEQ ID NO: 6640; WAN024CT4; Start 114; Stop 138
catgatacatctgcaccatttcctc

SEQ ID NO: 444880 - DNA, 25 bp, Artificial
  probe
  misc_feature (1)..(25): SEQ ID NO: 6640; WAN024CT4; Start 249; Stop 273
ttccgtgaatggcaaagtgtttagt

SEQ ID NO: 444881 - DNA, 25 bp, Artificial
  probe
  misc_feature (1)..(25): SEQ ID NO: 6640; WAN024CT4; Start 86; Stop 110
taaagcgtatcgttgctgatgaaat

SEQ ID NO: 444882 - DNA, 25 bp, Artificial
  probe
  misc_feature (1)..(25): SEQ ID NO: 6640; WAN024CT4; Start 47; Stop 71
tttcgttgattttcttccatcctgt

SEQ ID NO: 444883 - DNA, 25 bp, Artificial
  probe
  misc_feature (1)..(25): SEQ ID NO: 6640; WAN024CT4; Start 184; Stop 208
caaggcaagattattggttttctca

SEQ ID NO: 444884 - DNA, 25 bp, Artificial
  probe
  misc_feature (1)..(25): SEQ ID NO: 6640; WAN024CT4; Start 185; Stop 209
aaggcaagattattggttttctcag

SEQ ID NO: 444885 - DNA, 25 bp, Artificial
  probe
  misc_feature (1)..(25): SEQ ID NO: 6640; WAN024CT4; Start 188; Stop 212
gcaagattattggttttctcaggat

SEQ ID NO: 444886 - DNA, 25 bp, Artificial
  probe
  misc_feature (1)..(25): SEQ ID NO: 6641; WAN024BUP; Start 71; Stop 95
cgaatatgcctgagagttatgtcat

SEQ ID NO: 444887 - DNA, 25 bp, Artificial
  probe
  misc_feature (1)..(25): SEQ ID NO: 6641; WAN024BUP; Start 72; Stop 96
gaatatgcctgagagttatgtcatt

SEQ ID NO: 444888 - DNA, 25 bp, Artificial
  probe
  misc_feature (1)..(25): SEQ ID NO: 6641; WAN024BUP; Start 68; Stop 92
aaccgaatatgcctgagagttatgt

SEQ ID NO: 444889 - DNA, 25 bp, Artificial
  probe
  misc_feature (1)..(25): SEQ ID NO: 6641; WAN024BUP; Start 69; Stop 93
accgaatatgcctgagagttatgtc

SEQ ID NO: 444890 - DNA, 25 bp, Artificial
  probe
  misc_feature (1)..(25): SEQ ID NO: 6641; WAN024BUP; Start 70; Stop 94
ccgaatatgcctgagagttatgtca

SEQ ID NO: 444891 - DNA, 25 bp, Artificial
  probe
  misc_feature (1)..(25): SEQ ID NO: 6641; WAN024BUP; Start 265; Stop 289
gactacaactttacagacacggaaa

SEQ ID NO: 444892 - DNA, 25 bp, Artificial
  probe
  misc_feature (1)..(25): SEQ ID NO: 6641; WAN024BUP; Start 66; Stop 90
taaaccgaatatgcctgagagttat

SEQ ID NO: 444893 - DNA, 25 bp, Artificial
  probe
  misc_feature (1)..(25): SEQ ID NO: 6641; WAN024BUP; Start 65; Stop 89
ataaaccgaatatgcctgagagtta

SEQ ID NO: 444894 - DNA, 25 bp, Artificial
  probe
  misc_feature (1)..(25): SEQ ID NO: 6641; WAN024BUP; Start 266; Stop 290
actacaactttacagacacggaaac

SEQ ID NO: 444895 - DNA, 25 bp, Artificial
  probe
  misc_feature (1)..(25): SEQ ID NO: 6641; WAN024BUP; Start 67; Stop 91
aaaccgaatatgcctgagagttatg

SEQ ID NO: 444896 - DNA, 25 bp, Artificial
  probe
  misc_feature (1)..(25): SEQ ID NO: 6641; WAN024BUP; Start 189; Stop 213
gctgaatgagaaagtcaagaaagta

SEQ ID NO: 444897 - DNA, 25 bp, Artificial
  probe
  misc_feature (1)..(25): SEQ ID NO: 6641; WAN024BUP; Start 264; Stop 288
tgactacaactttacagacacggaa

SEQ ID NO: 444898 - DNA, 25 bp, Artificial
  probe
  misc_feature (1)..(25): SEQ ID NO: 6641; WAN024BUP; Start 302; Stop 326
gctatcaagcggtatatgacattaa

SEQ ID NO: 444899 - DNA, 25 bp, Artificial
  probe
  misc_feature (1)..(25): SEQ ID NO: 6641; WAN024BUP; Start 267; Stop 291
ctacaactttacagacacggaaacg

SEQ ID NO: 444900 - DNA, 25 bp, Artificial
  probe
  misc_feature (1)..(25): SEQ ID NO: 6641; WAN024BUP; Start 73; Stop 97
aatatgcctgagagttatgtcattt

SEQ ID NO: 444901 - DNA, 25 bp, Artificial
  probe
  misc_feature (1)..(25): SEQ ID NO: 6641; WAN024BUP; Start 58; Stop 82
tttgaacataaaccgaatatgcctg

SEQ ID NO: 444902 - DNA, 25 bp, Artificial
  probe
  misc_feature (1)..(25): SEQ ID NO: 6641; WAN024BUP; Start 261; Stop 285
tagtgactacaactttacagacacg

SEQ ID NO: 444903 - DNA, 25 bp, Artificial
  probe
  misc_feature (1)..(25): SEQ ID NO: 6641; WAN024BUP; Start 59; Stop 83
ttgaacataaaccgaatatgcctga

SEQ ID NO: 444904 - DNA, 25 bp, Artificial
  probe
  misc_feature (1)..(25): SEQ ID NO: 6641; WAN024BUP; Start 268; Stop 292
tacaactttacagacacggaaacga

SEQ ID NO: 444905 - DNA, 25 bp, Artificial
  probe
  misc_feature (1)..(25): SEQ ID NO: 6641; WAN024BUP; Start 64; Stop 88
cataaaccgaatatgcctgagagtt

SEQ ID NO: 444906 - DNA, 25 bp, Artificial
  probe
  misc_feature (1)..(25): SEQ ID NO: 6641; WAN024BUP; Start 62; Stop 86
aacataaaccgaatatgcctgagag

SEQ ID NO: 444907 - DNA, 25 bp, Artificial
  probe
  misc_feature (1)..(25): SEQ ID NO: 6641; WAN024BUP; Start 61; Stop 85
gaacataaaccgaatatgcctgaga

SEQ ID NO: 444908 - DNA, 25 bp, Artificial
  probe
  misc_feature (1)..(25): SEQ ID NO: 6641; WAN024BUP; Start 191; Stop 215
tgaatgagaaagtcaagaaagtagt

SEQ ID NO: 444909 - DNA, 25 bp, Artificial
  probe
  misc_feature (1)..(25): SEQ ID NO: 6641; WAN024BUP; Start 60; Stop 84
tgaacataaaccgaatatgcctgag

SEQ ID NO: 444910 - DNA, 25 bp, Artificial
  probe
  misc_feature (1)..(25): SEQ ID NO: 6641; WAN024BUP; Start 276; Stop 300
tacagacacggaaacgaagcaatat

SEQ ID NO: 444911 - DNA, 25 bp, Artificial
  probe
  misc_feature (1)..(25): SEQ ID NO: 6641; WAN024BUP; Start 275; Stop 299
ttacagacacggaaacgaagcaata

SEQ ID NO: 444912 - DNA, 25 bp, Artificial
  probe
  misc_feature (1)..(25): SEQ ID NO: 6641; WAN024BUP; Start 190; Stop 214
ctgaatgagaaagtcaagaaagtag

SEQ ID NO: 444913 - DNA, 25 bp, Artificial
  probe
  misc_feature (1)..(25): SEQ ID NO: 6641; WAN024BUP; Start 270; Stop 294
caactttacagacacggaaacgaag

SEQ ID NO: 444914 - DNA, 25 bp, Artificial
  probe
  misc_feature (1)..(25): SEQ ID NO: 6641; WAN024BUP; Start 187; Stop 211
gagctgaatgagaaagtcaagaaag

SEQ ID NO: 444915 - DNA, 25 bp, Artificial
  probe
  misc_feature (1)..(25): SEQ ID NO: 6641; WAN024BUP; Start 188; Stop 212
agctgaatgagaaagtcaagaaagt

SEQ ID NO: 444916 - DNA, 25 bp, Artificial
  probe
  misc_feature (1)..(25): SEQ ID NO: 6641; WAN024BUP; Start 186; Stop 210
tgagctgaatgagaaagtcaagaaa

SEQ ID NO: 444917 - DNA, 25 bp, Artificial
  probe
  misc_feature (1)..(25): SEQ ID NO: 6641; WAN024BUP; Start 260; Stop 284
atagtgactacaactttacagacac

SEQ ID NO: 444918 - DNA, 25 bp, Artificial
  probe
  misc_feature (1)..(25): SEQ ID NO: 6641; WAN024BUP; Start 63; Stop 87
acataaaccgaatatgcctgagagt

SEQ ID NO: 444919 - DNA, 25 bp, Artificial
  probe
  misc_feature (1)..(25): SEQ ID NO: 6642; WAN024BRT; Start 637; Stop 661
tatcatatccgtcagattatccgtc

SEQ ID NO: 444920 - DNA, 25 bp, Artificial
  probe
  misc_feature (1)..(25): SEQ ID NO: 6642; WAN024BRT; Start 636; Stop 660
atatcatatccgtcagattatccgt

SEQ ID NO: 444921 - DNA, 25 bp, Artificial
  probe
  misc_feature (1)..(25): SEQ ID NO: 6642; WAN024BRT; Start 372; Stop 396
ctctcacaagtatgatggattggta

SEQ ID NO: 444922 - DNA, 25 bp, Artificial
  probe
  misc_feature (1)..(25): SEQ ID NO: 6642; WAN024BRT; Start 368; Stop 392
ctgactctcacaagtatgatggatt

SEQ ID NO: 444923 - DNA, 25 bp, Artificial
  probe
  misc_feature (1)..(25): SEQ ID NO: 6642; WAN024BRT; Start 369; Stop 393
tgactctcacaagtatgatggattg

SEQ ID NO: 444924 - DNA, 25 bp, Artificial
  probe
  misc_feature (1)..(25): SEQ ID NO: 6642; WAN024BRT; Start 689; Stop 713
acttaacagcagaccagaagactaa

SEQ ID NO: 444925 - DNA, 25 bp, Artificial
  probe
  misc_feature (1)..(25): SEQ ID NO: 6642; WAN024BRT; Start 373; Stop 397
tctcacaagtatgatggattggtat

SEQ ID NO: 444926 - DNA, 25 bp, Artificial
  probe
  misc_feature (1)..(25): SEQ ID NO: 6642; WAN024BRT; Start 367; Stop 391
tctgactctcacaagtatgatggat

SEQ ID NO: 444927 - DNA, 25 bp, Artificial
  probe
  misc_feature (1)..(25): SEQ ID NO: 6642; WAN024BRT; Start 757; Stop 781
aatagattgccaattcttctgatgc

SEQ ID NO: 444928 - DNA, 25 bp, Artificial
  probe
  misc_feature (1)..(25): SEQ ID NO: 6642; WAN024BRT; Start 106; Stop 130
aatgatggatctacagatgatacgg

SEQ ID NO: 444929 - DNA, 25 bp, Artificial
  probe
  misc_feature (1)..(25): SEQ ID NO: 6642; WAN024BRT; Start 100; Stop 124
atcgtcaatgatggatctacagatg

SEQ ID NO: 444930 - DNA, 25 bp, Artificial
  probe
  misc_feature (1)..(25): SEQ ID NO: 6642; WAN024BRT; Start 370; Stop 394
gactctcacaagtatgatggattgg

SEQ ID NO: 444931 - DNA, 25 bp, Artificial
  probe
  misc_feature (1)..(25): SEQ ID NO: 6642; WAN024BRT; Start 366; Stop 390
ttctgactctcacaagtatgatgga

SEQ ID NO: 444932 - DNA, 25 bp, Artificial
  probe
  misc_feature (1)..(25): SEQ ID NO: 6642; WAN024BRT; Start 98; Stop 122
ttatcgtcaatgatggatctacaga

SEQ ID NO: 444933 - DNA, 25 bp, Artificial
  probe
  misc_feature (1)..(25): SEQ ID NO: 6642; WAN024BRT; Start 105; Stop 129
caatgatggatctacagatgatacg

SEQ ID NO: 444934 - DNA, 25 bp, Artificial
  probe
  misc_feature (1)..(25): SEQ ID NO: 6642; WAN024BRT; Start 99; Stop 123
tatcgtcaatgatggatctacagat

SEQ ID NO: 444935 - DNA, 25 bp, Artificial
  probe
  misc_feature (1)..(25): SEQ ID NO: 6642; WAN024BRT; Start 638; Stop 662
atcatatccgtcagattatccgtcg

SEQ ID NO: 444936 - DNA, 25 bp, Artificial
  probe
  misc_feature (1)..(25): SEQ ID NO: 6642; WAN024BRT; Start 374; Stop 398
ctcacaagtatgatggattggtatt

SEQ ID NO: 444937 - DNA, 25 bp, Artificial
  probe
  misc_feature (1)..(25): SEQ ID NO: 6642; WAN024BRT; Start 371; Stop 395
actctcacaagtatgatggattggt

SEQ ID NO: 444938 - DNA, 25 bp, Artificial
  probe
  misc_feature (1)..(25): SEQ ID NO: 6642; WAN024BRT; Start 684; Stop 708
caatcacttaacagcagaccagaag

SEQ ID NO: 444939 - DNA, 25 bp, Artificial
  probe
  misc_feature (1)..(25): SEQ ID NO: 6642; WAN024BRT; Start 635; Stop 659
aatatcatatccgtcagattatccg

SEQ ID NO: 444940 - DNA, 25 bp, Artificial
  probe
  misc_feature (1)..(25): SEQ ID NO: 6642; WAN024BRT; Start 102; Stop 126
cgtcaatgatggatctacagatgat

SEQ ID NO: 444941 - DNA, 25 bp, Artificial
  probe
  misc_feature (1)..(25): SEQ ID NO: 6642; WAN024BRT; Start 685; Stop 709
aatcacttaacagcagaccagaaga

SEQ ID NO: 444942 - DNA, 25 bp, Artificial
  probe
  misc_feature (1)..(25): SEQ ID NO: 6642; WAN024BRT; Start 758; Stop 782
atagattgccaattcttctgatgcc

SEQ ID NO: 444943 - DNA, 25 bp, Artificial
  probe
  misc_feature (1)..(25): SEQ ID NO: 6642; WAN024BRT; Start 688; Stop 712
cacttaacagcagaccagaagacta

SEQ ID NO: 444944 - DNA, 25 bp, Artificial
  probe
  misc_feature (1)..(25): SEQ ID NO: 6642; WAN024BRT; Start 96; Stop 120
gattatcgtcaatgatggatctaca

SEQ ID NO: 444945 - DNA, 25 bp, Artificial
  probe
  misc_feature (1)..(25): SEQ ID NO: 6642; WAN024BRT; Start 101; Stop 125
tcgtcaatgatggatctacagatga

SEQ ID NO: 444946 - DNA, 25 bp, Artificial
  probe
  misc_feature (1)..(25): SEQ ID NO: 6642; WAN024BRT; Start 97; Stop 121
attatcgtcaatgatggatctacag

SEQ ID NO: 444947 - DNA, 25 bp, Artificial
  probe
  misc_feature (1)..(25): SEQ ID NO: 6642; WAN024BRT; Start 208; Stop 232
gcttataacttggcttcacagtatg

SEQ ID NO: 444948 - DNA, 25 bp, Artificial
  probe
  misc_feature (1)..(25): SEQ ID NO: 6642; WAN024BRT; Start 107; Stop 131
atgatggatctacagatgatacggc

SEQ ID NO: 444949 - DNA, 25 bp, Artificial
  probe
  misc_feature (1)..(25): SEQ ID NO: 6642; WAN024BRT; Start 680; Stop 704
ttagcaatcacttaacagcagacca

SEQ ID NO: 444950 - DNA, 25 bp, Artificial
  probe
  misc_feature (1)..(25): SEQ ID NO: 6642; WAN024BRT; Start 95; Stop 119
tgattatcgtcaatgatggatctac

SEQ ID NO: 444951 - DNA, 25 bp, Artificial
  probe
  misc_feature (1)..(25): SEQ ID NO: 6642; WAN024BRT; Start 686; Stop 710
atcacttaacagcagaccagaagac

SEQ ID NO: 444952 - DNA, 25 bp, Artificial
  probe
  misc_feature (1)..(25): SEQ ID NO: 6643; WAN024BRA; Start 401; Stop 425
gagaagaacttgttgagaaccttac

SEQ ID NO: 444953 - DNA, 25 bp, Artificial
  probe
  misc_feature (1)..(25): SEQ ID NO: 6643; WAN024BRA; Start 400; Stop 424
ggagaagaacttgttgagaacctta

SEQ ID NO: 444954 - DNA, 25 bp, Artificial
  probe
  misc_feature (1)..(25): SEQ ID NO: 6643; WAN024BRA; Start 402; Stop 426
agaagaacttgttgagaaccttacg

SEQ ID NO: 444955 - DNA, 25 bp, Artificial
  probe
  misc_feature (1)..(25): SEQ ID NO: 6643; WAN024BRA; Start 695; Stop 719
atgttgaactattgccagtagactc

SEQ ID NO: 444956 - DNA, 25 bp, Artificial
  probe
  misc_feature (1)..(25): SEQ ID NO: 6643; WAN024BRA; Start 694; Stop 718
gatgttgaactattgccagtagact

SEQ ID NO: 444957 - DNA, 25 bp, Artificial
  probe
  misc_feature (1)..(25): SEQ ID NO: 6643; WAN024BRA; Start 144; Stop 168
ggttaagccaactctagtctatcat

SEQ ID NO: 444958 - DNA, 25 bp, Artificial
  probe
  misc_feature (1)..(25): SEQ ID NO: 6643; WAN024BRA; Start 143; Stop 167
aggttaagccaactctagtctatca

SEQ ID NO: 444959 - DNA, 25 bp, Artificial
  probe
  misc_feature (1)..(25): SEQ ID NO: 6643; WAN024BRA; Start 693; Stop 717
tgatgttgaactattgccagtagac

SEQ ID NO: 444960 - DNA, 25 bp, Artificial
  probe
  misc_feature (1)..(25): SEQ ID NO: 6643; WAN024BRA; Start 692; Stop 716
gtgatgttgaactattgccagtaga

SEQ ID NO: 444961 - DNA, 25 bp, Artificial
  probe
  misc_feature (1)..(25): SEQ ID NO: 6643; WAN024BRA; Start 691; Stop 715
agtgatgttgaactattgccagtag

SEQ ID NO: 444962 - DNA, 25 bp, Artificial
  probe
  misc_feature (1)..(25): SEQ ID NO: 6643; WAN024BRA; Start 690; Stop 714
gagtgatgttgaactattgccagta

SEQ ID NO: 444963 - DNA, 25 bp, Artificial
  probe
  misc_feature (1)..(25): SEQ ID NO: 6643; WAN024BRA; Start 697; Stop 721
gttgaactattgccagtagactcta

SEQ ID NO: 444964 - DNA, 25 bp, Artificial
  probe
  misc_feature (1)..(25): SEQ ID NO: 6643; WAN024BRA; Start 148; Stop 172
aagccaactctagtctatcattgtg

SEQ ID NO: 444965 - DNA, 25 bp, Artificial
  probe
  misc_feature (1)..(25): SEQ ID NO: 6643; WAN024BRA; Start 685; Stop 709
aaggagagtgatgttgaactattgc

SEQ ID NO: 444966 - DNA, 25 bp, Artificial
  probe
  misc_feature (1)..(25): SEQ ID NO: 6643; WAN024BRA; Start 698; Stop 722
ttgaactattgccagtagactctag

SEQ ID NO: 444967 - DNA, 25 bp, Artificial
  probe
  misc_feature (1)..(25): SEQ ID NO: 6643; WAN024BRA; Start 142; Stop 166
gaggttaagccaactctagtctatc

SEQ ID NO: 444968 - DNA, 25 bp, Artificial
  probe
  misc_feature (1)..(25): SEQ ID NO: 6643; WAN024BRA; Start 147; Stop 171
taagccaactctagtctatcattgt

SEQ ID NO: 444969 - DNA, 25 bp, Artificial
  probe
  misc_feature (1)..(25): SEQ ID NO: 6643; WAN024BRA; Start 141; Stop 165
tgaggttaagccaactctagtctat

SEQ ID NO: 444970 - DNA, 25 bp, Artificial
  probe
  misc_feature (1)..(25): SEQ ID NO: 6643; WAN024BRA; Start 426; Stop 450
gtcacagcattacatcattcgtact

SEQ ID NO: 444971 - DNA, 25 bp, Artificial
  probe
  misc_feature (1)..(25): SEQ ID NO: 6643; WAN024BRA; Start 696; Stop 720
tgttgaactattgccagtagactct

SEQ ID NO: 444972 - DNA, 25 bp, Artificial
  probe
  misc_feature (1)..(25): SEQ ID NO: 6643; WAN024BRA; Start 140; Stop 164
ctgaggttaagccaactctagtcta

SEQ ID NO: 444973 - DNA, 25 bp, Artificial
  probe
  misc_feature (1)..(25): SEQ ID NO: 6643; WAN024BRA; Start 688; Stop 712
gagagtgatgttgaactattgccag

SEQ ID NO: 444974 - DNA, 25 bp, Artificial
  probe
  misc_feature (1)..(25): SEQ ID NO: 6643; WAN024BRA; Start 684; Stop 708
taaggagagtgatgttgaactattg

SEQ ID NO: 444975 - DNA, 25 bp, Artificial
  probe
  misc_feature (1)..(25): SEQ ID NO: 6643; WAN024BRA; Start 699; Stop 723
tgaactattgccagtagactctagc

SEQ ID NO: 444976 - DNA, 25 bp, Artificial
  probe
  misc_feature (1)..(25): SEQ ID NO: 6643; WAN024BRA; Start 274; Stop 298
tacggagctattctggtctatatct

SEQ ID NO: 444977 - DNA, 25 bp, Artificial
  probe
  misc_feature (1)..(25): SEQ ID NO: 6643; WAN024BRA; Start 145; Stop 169
gttaagccaactctagtctatcatt

SEQ ID NO: 444978 - DNA, 25 bp, Artificial
  probe
  misc_feature (1)..(25): SEQ ID NO: 6643; WAN024BRA; Start 146; Stop 170
ttaagccaactctagtctatcattg

SEQ ID NO: 444979 - DNA, 25 bp, Artificial
  probe
  misc_feature (1)..(25): SEQ ID NO: 6643; WAN024BRA; Start 280; Stop 304
gctattctggtctatatctcaacag

SEQ ID NO: 444980 - DNA, 25 bp, Artificial
  probe
  misc_feature (1)..(25): SEQ ID NO: 6643; WAN024BRA; Start 689; Stop 713
agagtgatgttgaactattgccagt

SEQ ID NO: 444981 - DNA, 25 bp, Artificial
  probe
  misc_feature (1)..(25): SEQ ID NO: 6643; WAN024BRA; Start 273; Stop 297
atacggagctattctggtctatatc

SEQ ID NO: 444982 - DNA, 25 bp, Artificial
  probe
  misc_feature (1)..(25): SEQ ID NO: 6643; WAN024BRA; Start 427; Stop 451
tcacagcattacatcattcgtactg

SEQ ID NO: 444983 - DNA, 25 bp, Artificial
  probe
  misc_feature (1)..(25): SEQ ID NO: 6643; WAN024BRA; Start 609; Stop 633
agagtatggctactatcacttatcg

SEQ ID NO: 444984 - DNA, 25 bp, Artificial
  probe
  misc_feature (1)..(25): SEQ ID NO: 6643; WAN024BRA; Start 421; Stop 445
cttacgtcacagcattacatcattc

SEQ ID NO: 444985 - DNA, 25 bp, Artificial
  probe
  misc_feature (1)..(25): SEQ ID NO: 6644; WAN024CVP; Start 196; Stop 220
gatcatctcgttcagaacatgctaa

SEQ ID NO: 444986 - DNA, 25 bp, Artificial
  probe
  misc_feature (1)..(25): SEQ ID NO: 6644; WAN024CVP; Start 154; Stop 178
aatctgctttaccactatctccttg

SEQ ID NO: 444987 - DNA, 25 bp, Artificial
  probe
  misc_feature (1)..(25): SEQ ID NO: 6644; WAN024CVP; Start 153; Stop 177
aaatctgctttaccactatctcctt

SEQ ID NO: 444988 - DNA, 25 bp, Artificial
  probe
  misc_feature (1)..(25): SEQ ID NO: 6644; WAN024CVP; Start 152; Stop 176
caaatctgctttaccactatctcct

SEQ ID NO: 444989 - DNA, 25 bp, Artificial
  probe
  misc_feature (1)..(25): SEQ ID NO: 6644; WAN024CVP; Start 146; Stop 170
gtcaaacaaatctgctttaccacta

SEQ ID NO: 444990 - DNA, 25 bp, Artificial
  probe
  misc_feature (1)..(25): SEQ ID NO: 6644; WAN024CVP; Start 135; Stop 159
cctattccgaagtcaaacaaatctg

SEQ ID NO: 444991 - DNA, 25 bp, Artificial
  probe
  misc_feature (1)..(25): SEQ ID NO: 6644; WAN024CVP; Start 134; Stop 158
tcctattccgaagtcaaacaaatct

SEQ ID NO: 444992 - DNA, 25 bp, Artificial
  probe
  misc_feature (1)..(25): SEQ ID NO: 6644; WAN024CVP; Start 157; Stop 181
ctgctttaccactatctccttgaaa

SEQ ID NO: 444993 - DNA, 25 bp, Artificial
  probe
  misc_feature (1)..(25): SEQ ID NO: 6644; WAN024CVP; Start 151; Stop 175
acaaatctgctttaccactatctcc

SEQ ID NO: 444994 - DNA, 25 bp, Artificial
  probe
  misc_feature (1)..(25): SEQ ID NO: 6644; WAN024CVP; Start 159; Stop 183
gctttaccactatctccttgaaaca

SEQ ID NO: 444995 - DNA, 25 bp, Artificial
  probe
  misc_feature (1)..(25): SEQ ID NO: 6644; WAN024CVP; Start 158; Stop 182
tgctttaccactatctccttgaaac

SEQ ID NO: 444996 - DNA, 25 bp, Artificial
  probe
  misc_feature (1)..(25): SEQ ID NO: 6644; WAN024CVP; Start 136; Stop 160
ctattccgaagtcaaacaaatctgc

SEQ ID NO: 444997 - DNA, 25 bp, Artificial
  probe
  misc_feature (1)..(25): SEQ ID NO: 6644; WAN024CVP; Start 150; Stop 174
aacaaatctgctttaccactatctc

SEQ ID NO: 444998 - DNA, 25 bp, Artificial
  probe
  misc_feature (1)..(25): SEQ ID NO: 6644; WAN024CVP; Start 143; Stop 167
gaagtcaaacaaatctgctttacca

SEQ ID NO: 444999 - DNA, 25 bp, Artificial
  probe
  misc_feature (1)..(25): SEQ ID NO: 6644; WAN024CVP; Start 155; Stop 179
atctgctttaccactatctccttga

SEQ ID NO: 445000 - DNA, 25 bp, Artificial
  probe
  misc_feature (1)..(25): SEQ ID NO: 6644; WAN024CVP; Start 144; Stop 168
aagtcaaacaaatctgctttaccac

SEQ ID NO: 445001 - DNA, 25 bp, Artificial
  probe
  misc_feature (1)..(25): SEQ ID NO: 6644; WAN024CVP; Start 133; Stop 157
ttcctattccgaagtcaaacaaatc

SEQ ID NO: 445002 - DNA, 25 bp, Artificial
  probe
  misc_feature (1)..(25): SEQ ID NO: 6644; WAN024CVP; Start 156; Stop 180
tctgctttaccactatctccttgaa

SEQ ID NO: 445003 - DNA, 25 bp, Artificial
  probe
  misc_feature (1)..(25): SEQ ID NO: 6644; WAN024CVP; Start 137; Stop 161
tattccgaagtcaaacaaatctgct

SEQ ID NO: 445004 - DNA, 25 bp, Artificial
  probe
  misc_feature (1)..(25): SEQ ID NO: 6644; WAN024CVP; Start 147; Stop 171
tcaaacaaatctgctttaccactat

SEQ ID NO: 445005 - DNA, 25 bp, Artificial
  probe
  misc_feature (1)..(25): SEQ ID NO: 6644; WAN024CVP; Start 149; Stop 173
aaacaaatctgctttaccactatct

SEQ ID NO: 445006 - DNA, 25 bp, Artificial
  probe
  misc_feature (1)..(25): SEQ ID NO: 6644; WAN024CVP; Start 148; Stop 172
caaacaaatctgctttaccactatc

SEQ ID NO: 445007 - DNA, 25 bp, Artificial
  probe
  misc_feature (1)..(25): SEQ ID NO: 6644; WAN024CVP; Start 142; Stop 166
cgaagtcaaacaaatctgctttacc

SEQ ID NO: 445008 - DNA, 25 bp, Artificial
  probe
  misc_feature (1)..(25): SEQ ID NO: 6644; WAN024CVP; Start 141; Stop 165
ccgaagtcaaacaaatctgctttac

SEQ ID NO: 445009 - DNA, 25 bp, Artificial
  probe
  misc_feature (1)..(25): SEQ ID NO: 6644; WAN024CVP; Start 165; Stop 189
ccactatctccttgaaacatcagta

SEQ ID NO: 445010 - DNA, 25 bp, Artificial
  probe
  misc_feature (1)..(25): SEQ ID NO: 6644; WAN024CVP; Start 163; Stop 187
taccactatctccttgaaacatcag

SEQ ID NO: 445011 - DNA, 25 bp, Artificial
  probe
  misc_feature (1)..(25): SEQ ID NO: 6644; WAN024CVP; Start 161; Stop 185
tttaccactatctccttgaaacatc

SEQ ID NO: 445012 - DNA, 25 bp, Artificial
  probe
  misc_feature (1)..(25): SEQ ID NO: 6644; WAN024CVP; Start 160; Stop 184
ctttaccactatctccttgaaacat

SEQ ID NO: 445013 - DNA, 25 bp, Artificial
  probe
  misc_feature (1)..(25): SEQ ID NO: 6644; WAN024CVP; Start 140; Stop 164
tccgaagtcaaacaaatctgcttta

SEQ ID NO: 445014 - DNA, 25 bp, Artificial
  probe
  misc_feature (1)..(25): SEQ ID NO: 6644; WAN024CVP; Start 162; Stop 186
ttaccactatctccttgaaacatca

SEQ ID NO: 445015 - DNA, 25 bp, Artificial
  probe
  misc_feature (1)..(25): SEQ ID NO: 6644; WAN024CVP; Start 19; Stop 43
ttagcagcaactgtctatatatgtt

SEQ ID NO: 445016 - DNA, 25 bp, Artificial
  probe
  misc_feature (1)..(25): SEQ ID NO: 6644; WAN024CVP; Start 257; Stop 281
ttgattgtagacagtggtttgtagt

SEQ ID NO: 445017 - DNA, 25 bp, Artificial
  probe
  misc_feature (1)..(25): SEQ ID NO: 6644; WAN024CVP; Start 170; Stop 194
atctccttgaaacatcagtaaaccg

SEQ ID NO: 445018 - DNA, 25 bp, Artificial
  probe
  misc_feature (1)..(25): SEQ ID NO: 6645; WAN024BRD; Start 201; Stop 225
aacagtcgtagtagatgaagaacaa

SEQ ID NO: 445019 - DNA, 25 bp, Artificial
  probe
  misc_feature (1)..(25): SEQ ID NO: 6645; WAN024BRD; Start 200; Stop 224
caacagtcgtagtagatgaagaaca

SEQ ID NO: 445020 - DNA, 25 bp, Artificial
  probe
  misc_feature (1)..(25): SEQ ID NO: 6645; WAN024BRD; Start 199; Stop 223
ccaacagtcgtagtagatgaagaac

SEQ ID NO: 445021 - DNA, 25 bp, Artificial
  probe
  misc_feature (1)..(25): SEQ ID NO: 6645; WAN024BRD; Start 428; Stop 452
ctcttgaggatggtgatattcagtt

SEQ ID NO: 445022 - DNA, 25 bp, Artificial
  probe
  misc_feature (1)..(25): SEQ ID NO: 6645; WAN024BRD; Start 567; Stop 591
ctaccttgctgatgttgaagaccta

SEQ ID NO: 445023 - DNA, 25 bp, Artificial
  probe
  misc_feature (1)..(25): SEQ ID NO: 6645; WAN024BRD; Start 564; Stop 588
gtactaccttgctgatgttgaagac

SEQ ID NO: 445024 - DNA, 25 bp, Artificial
  probe
  misc_feature (1)..(25): SEQ ID NO: 6645; WAN024BRD; Start 565; Stop 589
tactaccttgctgatgttgaagacc

SEQ ID NO: 445025 - DNA, 25 bp, Artificial
  probe
  misc_feature (1)..(25): SEQ ID NO: 6645; WAN024BRD; Start 301; Stop 325
ggtgtcaatctcagtgagtatagaa

SEQ ID NO: 445026 - DNA, 25 bp, Artificial
  probe
  misc_feature (1)..(25): SEQ ID NO: 6645; WAN024BRD; Start 568; Stop 592
taccttgctgatgttgaagacctag

SEQ ID NO: 445027 - DNA, 25 bp, Artificial
  probe
  misc_feature (1)..(25): SEQ ID NO: 6645; WAN024BRD; Start 158; Stop 182
ttacttgccataactgtaaccacaa

SEQ ID NO: 445028 - DNA, 25 bp, Artificial
  probe
  misc_feature (1)..(25): SEQ ID NO: 6645; WAN024BRD; Start 167; Stop 191
ataactgtaaccacaaggtgctaat

SEQ ID NO: 445029 - DNA, 25 bp, Artificial
  probe
  misc_feature (1)..(25): SEQ ID NO: 6645; WAN024BRD; Start 168; Stop 192
taactgtaaccacaaggtgctaatt

SEQ ID NO: 445030 - DNA, 25 bp, Artificial
  probe
  misc_feature (1)..(25): SEQ ID NO: 6645; WAN024BRD; Start 174; Stop 198
taaccacaaggtgctaattgattac

SEQ ID NO: 445031 - DNA, 25 bp, Artificial
  probe
  misc_feature (1)..(25): SEQ ID NO: 6645; WAN024BRD; Start 173; Stop 197
gtaaccacaaggtgctaattgatta

SEQ ID NO: 445032 - DNA, 25 bp, Artificial
  probe
  misc_feature (1)..(25): SEQ ID NO: 6645; WAN024BRD; Start 241; Stop 265
tattgtgcagatggtaatgttgatg

SEQ ID NO: 445033 - DNA, 25 bp, Artificial
  probe
  misc_feature (1)..(25): SEQ ID NO: 6645; WAN024BRD; Start 240; Stop 264
gtattgtgcagatggtaatgttgat

SEQ ID NO: 445034 - DNA, 25 bp, Artificial
  probe
  misc_feature (1)..(25): SEQ ID NO: 6645; WAN024BRD; Start 172; Stop 196
tgtaaccacaaggtgctaattgatt

SEQ ID NO: 445035 - DNA, 25 bp, Artificial
  probe
  misc_feature (1)..(25): SEQ ID NO: 6645; WAN024BRD; Start 239; Stop 263
agtattgtgcagatggtaatgttga

SEQ ID NO: 445036 - DNA, 25 bp, Artificial
  probe
  misc_feature (1)..(25): SEQ ID NO: 6645; WAN024BRD; Start 238; Stop 262
cagtattgtgcagatggtaatgttg

SEQ ID NO: 445037 - DNA, 25 bp, Artificial
  probe
  misc_feature (1)..(25): SEQ ID NO: 6645; WAN024BRD; Start 237; Stop 261
tcagtattgtgcagatggtaatgtt

SEQ ID NO: 445038 - DNA, 25 bp, Artificial
  probe
  misc_feature (1)..(25): SEQ ID NO: 6645; WAN024BRD; Start 236; Stop 260
ttcagtattgtgcagatggtaatgt

SEQ ID NO: 445039 - DNA, 25 bp, Artificial
  probe
  misc_feature (1)..(25): SEQ ID NO: 6645; WAN024BRD; Start 166; Stop 190
cataactgtaaccacaaggtgctaa

SEQ ID NO: 445040 - DNA, 25 bp, Artificial
  probe
  misc_feature (1)..(25): SEQ ID NO: 6645; WAN024BRD; Start 246; Stop 270
tgcagatggtaatgttgatgtactt

SEQ ID NO: 445041 - DNA, 25 bp, Artificial
  probe
  misc_feature (1)..(25): SEQ ID NO: 6645; WAN024BRD; Start 235; Stop 259
attcagtattgtgcagatggtaatg

SEQ ID NO: 445042 - DNA, 25 bp, Artificial
  probe
  misc_feature (1)..(25): SEQ ID NO: 6645; WAN024BRD; Start 202; Stop 226
acagtcgtagtagatgaagaacaaa

SEQ ID NO: 445043 - DNA, 25 bp, Artificial
  probe
  misc_feature (1)..(25): SEQ ID NO: 6645; WAN024BRD; Start 82; Stop 106
gaaagatttgatagggtttatgcgg

SEQ ID NO: 445044 - DNA, 25 bp, Artificial
  probe
  misc_feature (1)..(25): SEQ ID NO: 6645; WAN024BRD; Start 81; Stop 105
tgaaagatttgatagggtttatgcg

SEQ ID NO: 445045 - DNA, 25 bp, Artificial
  probe
  misc_feature (1)..(25): SEQ ID NO: 6645; WAN024BRD; Start 377; Stop 401
cagtagggtatgatgatagagcaat

SEQ ID NO: 445046 - DNA, 25 bp, Artificial
  probe
  misc_feature (1)..(25): SEQ ID NO: 6645; WAN024BRD; Start 336; Stop 360
ttcggatatagagtctttcgttgag

SEQ ID NO: 445047 - DNA, 25 bp, Artificial
  probe
  misc_feature (1)..(25): SEQ ID NO: 6645; WAN024BRD; Start 243; Stop 267
ttgtgcagatggtaatgttgatgta

SEQ ID NO: 445048 - DNA, 25 bp, Artificial
  probe
  misc_feature (1)..(25): SEQ ID NO: 6645; WAN024BRD; Start 335; Stop 359
tttcggatatagagtctttcgttga

SEQ ID NO: 445049 - DNA, 25 bp, Artificial
  probe
  misc_feature (1)..(25): SEQ ID NO: 6645; WAN024BRD; Start 334; Stop 358
gtttcggatatagagtctttcgttg

SEQ ID NO: 445050 - DNA, 25 bp, Artificial
  probe
  misc_feature (1)..(25): SEQ ID NO: 6645; WAN024BRD; Start 333; Stop 357
agtttcggatatagagtctttcgtt

SEQ ID NO: 445051 - DNA, 25 bp, Artificial
  probe
  misc_feature (1)..(25): SEQ ID NO: 6646; WAN024BV7; Start 112; Stop 136
tatagtcgctacctaattgctcaat

SEQ ID NO: 445052 - DNA, 25 bp, Artificial
  probe
  misc_feature (1)..(25): SEQ ID NO: 6646; WAN024BV7; Start 113; Stop 137
atagtcgctacctaattgctcaatg

SEQ ID NO: 445053 - DNA, 25 bp, Artificial
  probe
  misc_feature (1)..(25): SEQ ID NO: 6646; WAN024BV7; Start 111; Stop 135
ctatagtcgctacctaattgctcaa

SEQ ID NO: 445054 - DNA, 25 bp, Artificial
  probe
  misc_feature (1)..(25): SEQ ID NO: 6646; WAN024BV7; Start 114; Stop 138
tagtcgctacctaattgctcaatgg

SEQ ID NO: 445055 - DNA, 25 bp, Artificial
  probe
  misc_feature (1)..(25): SEQ ID NO: 6646; WAN024BV7; Start 17; Stop 41
taaatccaagacaagcaagtaggtt

SEQ ID NO: 445056 - DNA, 25 bp, Artificial
  probe
  misc_feature (1)..(25): SEQ ID NO: 6646; WAN024BV7; Start 16; Stop 40
ttaaatccaagacaagcaagtaggt

SEQ ID NO: 445057 - DNA, 25 bp, Artificial
  probe
  misc_feature (1)..(25): SEQ ID NO: 6646; WAN024BV7; Start 203; Stop 227
ctgctgatattattctcgggagtag

SEQ ID NO: 445058 - DNA, 25 bp, Artificial
  probe
  misc_feature (1)..(25): SEQ ID NO: 6646; WAN024BV7; Start 15; Stop 39
attaaatccaagacaagcaagtagg

SEQ ID NO: 445059 - DNA, 25 bp, Artificial
  probe
  misc_feature (1)..(25): SEQ ID NO: 6646; WAN024BV7; Start 18; Stop 42
aaatccaagacaagcaagtaggttt

SEQ ID NO: 445060 - DNA, 25 bp, Artificial
  probe
  misc_feature (1)..(25): SEQ ID NO: 6646; WAN024BV7; Start 204; Stop 228
tgctgatattattctcgggagtagg

SEQ ID NO: 445061 - DNA, 25 bp, Artificial
  probe
  misc_feature (1)..(25): SEQ ID NO: 6646; WAN024BV7; Start 202; Stop 226
cctgctgatattattctcgggagta

SEQ ID NO: 445062 - DNA, 25 bp, Artificial
  probe
  misc_feature (1)..(25): SEQ ID NO: 6646; WAN024BV7; Start 110; Stop 134
gctatagtcgctacctaattgctca

SEQ ID NO: 445063 - DNA, 25 bp, Artificial
  probe
  misc_feature (1)..(25): SEQ ID NO: 6646; WAN024BV7; Start 206; Stop 230
ctgatattattctcgggagtagggc

SEQ ID NO: 445064 - DNA, 25 bp, Artificial
  probe
  misc_feature (1)..(25): SEQ ID NO: 6646; WAN024BV7; Start 205; Stop 229
gctgatattattctcgggagtaggg

SEQ ID NO: 445065 - DNA, 25 bp, Artificial
  probe
  misc_feature (1)..(25): SEQ ID NO: 6646; WAN024BV7; Start 19; Stop 43
aatccaagacaagcaagtaggtttg

SEQ ID NO: 445066 - DNA, 25 bp, Artificial
  probe
  misc_feature (1)..(25): SEQ ID NO: 6646; WAN024BV7; Start 120; Stop 144
ctacctaattgctcaatgggagaag

SEQ ID NO: 445067 - DNA, 25 bp, Artificial
  probe
  misc_feature (1)..(25): SEQ ID NO: 6646; WAN024BV7; Start 14; Stop 38
aattaaatccaagacaagcaagtag

SEQ ID NO: 445068 - DNA, 25 bp, Artificial
  probe
  misc_feature (1)..(25): SEQ ID NO: 6646; WAN024BV7; Start 109; Stop 133
ggctatagtcgctacctaattgctc

SEQ ID NO: 445069 - DNA, 25 bp, Artificial
  probe
  misc_feature (1)..(25): SEQ ID NO: 6646; WAN024BV7; Start 207; Stop 231
tgatattattctcgggagtagggca

SEQ ID NO: 445070 - DNA, 25 bp, Artificial
  probe
  misc_feature (1)..(25): SEQ ID NO: 6646; WAN024BV7; Start 13; Stop 37
aaattaaatccaagacaagcaagta

SEQ ID NO: 445071 - DNA, 25 bp, Artificial
  probe
  misc_feature (1)..(25): SEQ ID NO: 6646; WAN024BV7; Start 12; Stop 36
taaattaaatccaagacaagcaagt

SEQ ID NO: 445072 - DNA, 25 bp, Artificial
  probe
  misc_feature (1)..(25): SEQ ID NO: 6646; WAN024BV7; Start 199; Stop 223
tttcctgctgatattattctcggga

SEQ ID NO: 445073 - DNA, 25 bp, Artificial
  probe
  misc_feature (1)..(25): SEQ ID NO: 6646; WAN024BV7; Start 132; Stop 156
tcaatgggagaaggaggaaagtgta

SEQ ID NO: 445074 - DNA, 25 bp, Artificial
  probe
  misc_feature (1)..(25): SEQ ID NO: 6646; WAN024BV7; Start 200; Stop 224
ttcctgctgatattattctcgggag

SEQ ID NO: 445075 - DNA, 25 bp, Artificial
  probe
  misc_feature (1)..(25): SEQ ID NO: 6646; WAN024BV7; Start 9; Stop 33
tgataaattaaatccaagacaagca

SEQ ID NO: 445076 - DNA, 25 bp, Artificial
  probe
  misc_feature (1)..(25): SEQ ID NO: 6646; WAN024BV7; Start 33; Stop 57
aagtaggtttgctttcttgctaaag

SEQ ID NO: 445077 - DNA, 25 bp, Artificial
  probe
  misc_feature (1)..(25): SEQ ID NO: 6646; WAN024BV7; Start 106; Stop 130
ctaggctatagtcgctacctaattg

SEQ ID NO: 445078 - DNA, 25 bp, Artificial
  probe
  misc_feature (1)..(25): SEQ ID NO: 6646; WAN024BV7; Start 105; Stop 129
actaggctatagtcgctacctaatt

SEQ ID NO: 445079 - DNA, 25 bp, Artificial
  probe
  misc_feature (1)..(25): SEQ ID NO: 6646; WAN024BV7; Start 104; Stop 128
aactaggctatagtcgctacctaat

SEQ ID NO: 445080 - DNA, 25 bp, Artificial
  probe
  misc_feature (1)..(25): SEQ ID NO: 6646; WAN024BV7; Start 121; Stop 145
tacctaattgctcaatgggagaagg

SEQ ID NO: 445081 - DNA, 25 bp, Artificial
  probe
  misc_feature (1)..(25): SEQ ID NO: 6646; WAN024BV7; Start 66; Stop 90
taaggaaaggaagctgtcacaagaa

SEQ ID NO: 445082 - DNA, 25 bp, Artificial
  probe
  misc_feature (1)..(25): SEQ ID NO: 6646; WAN024BV7; Start 133; Stop 157
caatgggagaaggaggaaagtgtac

SEQ ID NO: 445083 - DNA, 25 bp, Artificial
  probe
  misc_feature (1)..(25): SEQ ID NO: 6646; WAN024BV7; Start 119; Stop 143
gctacctaattgctcaatgggagaa

SEQ ID NO: 445084 - DNA, 25 bp, Artificial
  probe
  misc_feature (1)..(25): SEQ ID NO: 6647; WAN024BLX; Start 134; Stop 158
ggagagatggttatagtataggtga

SEQ ID NO: 445085 - DNA, 25 bp, Artificial
  probe
  misc_feature (1)..(25): SEQ ID NO: 6647; WAN024BLX; Start 226; Stop 250
attagtgaacttccgttaccattaa

SEQ ID NO: 445086 - DNA, 25 bp, Artificial
  probe
  misc_feature (1)..(25): SEQ ID NO: 6647; WAN024BLX; Start 225; Stop 249
aattagtgaacttccgttaccatta

SEQ ID NO: 445087 - DNA, 25 bp, Artificial
  probe
  misc_feature (1)..(25): SEQ ID NO: 6647; WAN024BLX; Start 1488; Stop 1512
gactattgagccaggacagagaatt

SEQ ID NO: 445088 - DNA, 25 bp, Artificial
  probe
  misc_feature (1)..(25): SEQ ID NO: 6647; WAN024BLX; Start 236; Stop 260
ttccgttaccattaatagcattctg

SEQ ID NO: 445089 - DNA, 25 bp, Artificial
  probe
  misc_feature (1)..(25): SEQ ID NO: 6647; WAN024BLX; Start 234; Stop 258
acttccgttaccattaatagcattc

SEQ ID NO: 445090 - DNA, 25 bp, Artificial
  probe
  misc_feature (1)..(25): SEQ ID NO: 6647; WAN024BLX; Start 235; Stop 259
cttccgttaccattaatagcattct

SEQ ID NO: 445091 - DNA, 25 bp, Artificial
  probe
  misc_feature (1)..(25): SEQ ID NO: 6647; WAN024BLX; Start 230; Stop 254
gtgaacttccgttaccattaatagc

SEQ ID NO: 445092 - DNA, 25 bp, Artificial
  probe
  misc_feature (1)..(25): SEQ ID NO: 6647; WAN024BLX; Start 231; Stop 255
tgaacttccgttaccattaatagca

SEQ ID NO: 445093 - DNA, 25 bp, Artificial
  probe
  misc_feature (1)..(25): SEQ ID NO: 6647; WAN024BLX; Start 1489; Stop 1513
actattgagccaggacagagaattg

SEQ ID NO: 445094 - DNA, 25 bp, Artificial
  probe
  misc_feature (1)..(25): SEQ ID NO: 6647; WAN024BLX; Start 1652; Stop 1676
taggagtagttccacaggattcatt

SEQ ID NO: 445095 - DNA, 25 bp, Artificial
  probe
  misc_feature (1)..(25): SEQ ID NO: 6647; WAN024BLX; Start 1651; Stop 1675
ttaggagtagttccacaggattcat

SEQ ID NO: 445096 - DNA, 25 bp, Artificial
  probe
  misc_feature (1)..(25): SEQ ID NO: 6647; WAN024BLX; Start 55; Stop 79
ttatgttgctgcttgtccatactac

SEQ ID NO: 445097 - DNA, 25 bp, Artificial
  probe
  misc_feature (1)..(25): SEQ ID NO: 6647; WAN024BLX; Start 232; Stop 256
gaacttccgttaccattaatagcat

SEQ ID NO: 445098 - DNA, 25 bp, Artificial
  probe
  misc_feature (1)..(25): SEQ ID NO: 6647; WAN024BLX; Start 233; Stop 257
aacttccgttaccattaatagcatt

SEQ ID NO: 445099 - DNA, 25 bp, Artificial
  probe
  misc_feature (1)..(25): SEQ ID NO: 6647; WAN024BLX; Start 135; Stop 159
gagagatggttatagtataggtgac

SEQ ID NO: 445100 - DNA, 25 bp, Artificial
  probe
  misc_feature (1)..(25): SEQ ID NO: 6647; WAN024BLX; Start 229; Stop 253
agtgaacttccgttaccattaatag

SEQ ID NO: 445101 - DNA, 25 bp, Artificial
  probe
  misc_feature (1)..(25): SEQ ID NO: 6647; WAN024BLX; Start 42; Stop 66
aatagaatgtggtttatgttgctgc

SEQ ID NO: 445102 - DNA, 25 bp, Artificial
  probe
  misc_feature (1)..(25): SEQ ID NO: 6647; WAN024BLX; Start 1323; Stop 1347
tttggcagcaggatacttaaataga

SEQ ID NO: 445103 - DNA, 25 bp, Artificial
  probe
  misc_feature (1)..(25): SEQ ID NO: 6647; WAN024BLX; Start 1324; Stop 1348
ttggcagcaggatacttaaatagag

SEQ ID NO: 445104 - DNA, 25 bp, Artificial
  probe
  misc_feature (1)..(25): SEQ ID NO: 6647; WAN024BLX; Start 136; Stop 160
agagatggttatagtataggtgact

SEQ ID NO: 445105 - DNA, 25 bp, Artificial
  probe
  misc_feature (1)..(25): SEQ ID NO: 6647; WAN024BLX; Start 133; Stop 157
gggagagatggttatagtataggtg

SEQ ID NO: 445106 - DNA, 25 bp, Artificial
  probe
  misc_feature (1)..(25): SEQ ID NO: 6647; WAN024BLX; Start 132; Stop 156
agggagagatggttatagtataggt

SEQ ID NO: 445107 - DNA, 25 bp, Artificial
  probe
  misc_feature (1)..(25): SEQ ID NO: 6647; WAN024BLX; Start 43; Stop 67
atagaatgtggtttatgttgctgct

SEQ ID NO: 445108 - DNA, 25 bp, Artificial
  probe
  misc_feature (1)..(25): SEQ ID NO: 6647; WAN024BLX; Start 227; Stop 251
ttagtgaacttccgttaccattaat

SEQ ID NO: 445109 - DNA, 25 bp, Artificial
  probe
  misc_feature (1)..(25): SEQ ID NO: 6647; WAN024BLX; Start 1487; Stop 1511
tgactattgagccaggacagagaat

SEQ ID NO: 445110 - DNA, 25 bp, Artificial
  probe
  misc_feature (1)..(25): SEQ ID NO: 6647; WAN024BLX; Start 56; Stop 80
tatgttgctgcttgtccatactaca

SEQ ID NO: 445111 - DNA, 25 bp, Artificial
  probe
  misc_feature (1)..(25): SEQ ID NO: 6647; WAN024BLX; Start 30; Stop 54
gcaaatgtctcaaatagaatgtggt

SEQ ID NO: 445112 - DNA, 25 bp, Artificial
  probe
  misc_feature (1)..(25): SEQ ID NO: 6647; WAN024BLX; Start 29; Stop 53
agcaaatgtctcaaatagaatgtgg

SEQ ID NO: 445113 - DNA, 25 bp, Artificial
  probe
  misc_feature (1)..(25): SEQ ID NO: 6647; WAN024BLX; Start 44; Stop 68
tagaatgtggtttatgttgctgctt

SEQ ID NO: 445114 - DNA, 25 bp, Artificial
  probe
  misc_feature (1)..(25): SEQ ID NO: 6647; WAN024BLX; Start 1486; Stop 1510
ttgactattgagccaggacagagaa

SEQ ID NO: 445115 - DNA, 25 bp, Artificial
  probe
  misc_feature (1)..(25): SEQ ID NO: 6647; WAN024BLX; Start 642; Stop 666
tatcttggctaggagtatgggaatt

SEQ ID NO: 445116 - DNA, 25 bp, Artificial
  probe
  misc_feature (1)..(25): SEQ ID NO: 6647; WAN024BLX; Start 637; Stop 661
atttctatcttggctaggagtatgg

SEQ ID NO: 445117 - DNA, 25 bp, Artificial
  probe
  misc_feature (1)..(25): SEQ ID NO: 6648; WAN024AV6; Start 115; Stop 139
gaactaaccatcagacttcctcttg

SEQ ID NO: 445118 - DNA, 25 bp, Artificial
  probe
  misc_feature (1)..(25): SEQ ID NO: 6648; WAN024AV6; Start 114; Stop 138
tgaactaaccatcagacttcctctt

SEQ ID NO: 445119 - DNA, 25 bp, Artificial
  probe
  misc_feature (1)..(25): SEQ ID NO: 6648; WAN024AV6; Start 116; Stop 140
aactaaccatcagacttcctcttgc

SEQ ID NO: 445120 - DNA, 25 bp, Artificial
  probe
  misc_feature (1)..(25): SEQ ID NO: 6648; WAN024AV6; Start 191; Stop 215
ctttattgccaagagatacgaaaca

SEQ ID NO: 445121 - DNA, 25 bp, Artificial
  probe
  misc_feature (1)..(25): SEQ ID NO: 6648; WAN024AV6; Start 141; Stop 165
ggtttcaaataagcgagtttatcca

SEQ ID NO: 445122 - DNA, 25 bp, Artificial
  probe
  misc_feature (1)..(25): SEQ ID NO: 6648; WAN024AV6; Start 190; Stop 214
gctttattgccaagagatacgaaac

SEQ ID NO: 445123 - DNA, 25 bp, Artificial
  probe
  misc_feature (1)..(25): SEQ ID NO: 6648; WAN024AV6; Start 140; Stop 164
cggtttcaaataagcgagtttatcc

SEQ ID NO: 445124 - DNA, 25 bp, Artificial
  probe
  misc_feature (1)..(25): SEQ ID NO: 6648; WAN024AV6; Start 192; Stop 216
tttattgccaagagatacgaaacaa

SEQ ID NO: 445125 - DNA, 25 bp, Artificial
  probe
  misc_feature (1)..(25): SEQ ID NO: 6648; WAN024AV6; Start 139; Stop 163
gcggtttcaaataagcgagtttatc

SEQ ID NO: 445126 - DNA, 25 bp, Artificial
  probe
  misc_feature (1)..(25): SEQ ID NO: 6648; WAN024AV6; Start 142; Stop 166
gtttcaaataagcgagtttatccaa

SEQ ID NO: 445127 - DNA, 25 bp, Artificial
  probe
  misc_feature (1)..(25): SEQ ID NO: 6648; WAN024AV6; Start 138; Stop 162
tgcggtttcaaataagcgagtttat

SEQ ID NO: 445128 - DNA, 25 bp, Artificial
  probe
  misc_feature (1)..(25): SEQ ID NO: 6648; WAN024AV6; Start 129; Stop 153
acttcctcttgcggtttcaaataag

SEQ ID NO: 445129 - DNA, 25 bp, Artificial
  probe
  misc_feature (1)..(25): SEQ ID NO: 6648; WAN024AV6; Start 128; Stop 152
gacttcctcttgcggtttcaaataa

SEQ ID NO: 445130 - DNA, 25 bp, Artificial
  probe
  misc_feature (1)..(25): SEQ ID NO: 6648; WAN024AV6; Start 137; Stop 161
ttgcggtttcaaataagcgagttta

SEQ ID NO: 445131 - DNA, 25 bp, Artificial
  probe
  misc_feature (1)..(25): SEQ ID NO: 6648; WAN024AV6; Start 166; Stop 190
aatttgaatctggaggaggctagag

SEQ ID NO: 445132 - DNA, 25 bp, Artificial
  probe
  misc_feature (1)..(25): SEQ ID NO: 6648; WAN024AV6; Start 143; Stop 167
tttcaaataagcgagtttatccaaa

SEQ ID NO: 445133 - DNA, 25 bp, Artificial
  probe
  misc_feature (1)..(25): SEQ ID NO: 6648; WAN024AV6; Start 8; Stop 32
gctattcttcagattgtttcgagtt

SEQ ID NO: 445134 - DNA, 25 bp, Artificial
  probe
  misc_feature (1)..(25): SEQ ID NO: 6648; WAN024AV6; Start 7; Stop 31
agctattcttcagattgtttcgagt

SEQ ID NO: 445135 - DNA, 25 bp, Artificial
  probe
  misc_feature (1)..(25): SEQ ID NO: 6648; WAN024AV6; Start 6; Stop 30
gagctattcttcagattgtttcgag

SEQ ID NO: 445136 - DNA, 25 bp, Artificial
  probe
  misc_feature (1)..(25): SEQ ID NO: 6648; WAN024AV6; Start 186; Stop 210
tagagctttattgccaagagatacg

SEQ ID NO: 445137 - DNA, 25 bp, Artificial
  probe
  misc_feature (1)..(25): SEQ ID NO: 6648; WAN024AV6; Start 184; Stop 208
gctagagctttattgccaagagata

SEQ ID NO: 445138 - DNA, 25 bp, Artificial
  probe
  misc_feature (1)..(25): SEQ ID NO: 6648; WAN024AV6; Start 144; Stop 168
ttcaaataagcgagtttatccaaat

SEQ ID NO: 445139 - DNA, 25 bp, Artificial
  probe
  misc_feature (1)..(25): SEQ ID NO: 6648; WAN024AV6; Start 189; Stop 213
agctttattgccaagagatacgaaa

SEQ ID NO: 445140 - DNA, 25 bp, Artificial
  probe
  misc_feature (1)..(25): SEQ ID NO: 6648; WAN024AV6; Start 185; Stop 209
ctagagctttattgccaagagatac

SEQ ID NO: 445141 - DNA, 25 bp, Artificial
  probe
  misc_feature (1)..(25): SEQ ID NO: 6648; WAN024AV6; Start 145; Stop 169
tcaaataagcgagtttatccaaatt

SEQ ID NO: 445142 - DNA, 25 bp, Artificial
  probe
  misc_feature (1)..(25): SEQ ID NO: 6648; WAN024AV6; Start 127; Stop 151
agacttcctcttgcggtttcaaata

SEQ ID NO: 445143 - DNA, 25 bp, Artificial
  probe
  misc_feature (1)..(25): SEQ ID NO: 6648; WAN024AV6; Start 4; Stop 28
atgagctattcttcagattgtttcg

SEQ ID NO: 445144 - DNA, 25 bp, Artificial
  probe
  misc_feature (1)..(25): SEQ ID NO: 6648; WAN024AV6; Start 188; Stop 212
gagctttattgccaagagatacgaa

SEQ ID NO: 445145 - DNA, 25 bp, Artificial
  probe
  misc_feature (1)..(25): SEQ ID NO: 6648; WAN024AV6; Start 5; Stop 29
tgagctattcttcagattgtttcga

SEQ ID NO: 445146 - DNA, 25 bp, Artificial
  probe
  misc_feature (1)..(25): SEQ ID NO: 6648; WAN024AV6; Start 193; Stop 217
ttattgccaagagatacgaaacaat

SEQ ID NO: 445147 - DNA, 25 bp, Artificial
  probe
  misc_feature (1)..(25): SEQ ID NO: 6648; WAN024AV6; Start 187; Stop 211
agagctttattgccaagagatacga

SEQ ID NO: 445148 - DNA, 25 bp, Artificial
  probe
  misc_feature (1)..(25): SEQ ID NO: 6648; WAN024AV6; Start 165; Stop 189
aaatttgaatctggaggaggctaga

SEQ ID NO: 445149 - DNA, 25 bp, Artificial
  probe
  misc_feature (1)..(25): SEQ ID NO: 6648; WAN024AV6; Start 130; Stop 154
cttcctcttgcggtttcaaataagc

SEQ ID NO: 445150 - DNA, 25 bp, Artificial
  probe
  misc_feature (1)..(25): SEQ ID NO: 6649; WAN024G72; Start 10; Stop 34
atatccatcaccaaaaccaaaatcg

SEQ ID NO: 445151 - DNA, 25 bp, Artificial
  probe
  misc_feature (1)..(25): SEQ ID NO: 6649; WAN024G72; Start 9; Stop 33
aatatccatcaccaaaaccaaaatc

SEQ ID NO: 445152 - DNA, 25 bp, Artificial
  probe
  misc_feature (1)..(25): SEQ ID NO: 6649; WAN024G72; Start 11; Stop 35
tatccatcaccaaaaccaaaatcgg

SEQ ID NO: 445153 - DNA, 25 bp, Artificial
  probe
  misc_feature (1)..(25): SEQ ID NO: 6649; WAN024G72; Start 16; Stop 40
atcaccaaaaccaaaatcggtaaaa

SEQ ID NO: 445154 - DNA, 25 bp, Artificial
  probe
  misc_feature (1)..(25): SEQ ID NO: 6649; WAN024G72; Start 6; Stop 30
gataatatccatcaccaaaaccaaa

SEQ ID NO: 445155 - DNA, 25 bp, Artificial
  probe
  misc_feature (1)..(25): SEQ ID NO: 6649; WAN024G72; Start 15; Stop 39
catcaccaaaaccaaaatcggtaaa

SEQ ID NO: 445156 - DNA, 25 bp, Artificial
  probe
  misc_feature (1)..(25): SEQ ID NO: 6649; WAN024G72; Start 8; Stop 32
taatatccatcaccaaaaccaaaat

SEQ ID NO: 445157 - DNA, 25 bp, Artificial
  probe
  misc_feature (1)..(25): SEQ ID NO: 6649; WAN024G72; Start 7; Stop 31
ataatatccatcaccaaaaccaaaa

SEQ ID NO: 445158 - DNA, 25 bp, Artificial
  probe
  misc_feature (1)..(25): SEQ ID NO: 6649; WAN024G72; Start 14; Stop 38
ccatcaccaaaaccaaaatcggtaa

SEQ ID NO: 445159 - DNA, 25 bp, Artificial
  probe
  misc_feature (1)..(25): SEQ ID NO: 6649; WAN024G72; Start 5; Stop 29
tgataatatccatcaccaaaaccaa

SEQ ID NO: 445160 - DNA, 25 bp, Artificial
  probe
  misc_feature (1)..(25): SEQ ID NO: 6649; WAN024G72; Start 4; Stop 28
atgataatatccatcaccaaaacca

SEQ ID NO: 445161 - DNA, 25 bp, Artificial
  probe
  misc_feature (1)..(25): SEQ ID NO: 6649; WAN024G72; Start 13; Stop 37
tccatcaccaaaaccaaaatcggta

SEQ ID NO: 445162 - DNA, 25 bp, Artificial
  probe
  misc_feature (1)..(25): SEQ ID NO: 6649; WAN024G72; Start 12; Stop 36
atccatcaccaaaaccaaaatcggt

SEQ ID NO: 445163 - DNA, 25 bp, Artificial
  probe
  misc_feature (1)..(25): SEQ ID NO: 6649; WAN024G72; Start 3; Stop 27
gatgataatatccatcaccaaaacc

SEQ ID NO: 445164 - DNA, 25 bp, Artificial
  probe
  misc_feature (1)..(25): SEQ ID NO: 6649; WAN024G72; Start 43; Stop 67
tttgaaattttcttcatacttggac

SEQ ID NO: 445165 - DNA, 25 bp, Artificial
  probe
  misc_feature (1)..(25): SEQ ID NO: 6649; WAN024G72; Start 42; Stop 66
ttttgaaattttcttcatacttgga

SEQ ID NO: 445166 - DNA, 25 bp, Artificial
  probe
  misc_feature (1)..(25): SEQ ID NO: 6649; WAN024G72; Start 41; Stop 65
attttgaaattttcttcatacttgg

SEQ ID NO: 445167 - DNA, 25 bp, Artificial
  probe
  misc_feature (1)..(25): SEQ ID NO: 6650; WAN024CV6; Start 296; Stop 320
caggctaccaacatcaacaagtatc

SEQ ID NO: 445168 - DNA, 25 bp, Artificial
  probe
  misc_feature (1)..(25): SEQ ID NO: 6650; WAN024CV6; Start 51; Stop 75
gaatagacaagtaaccatagactgc

SEQ ID NO: 445169 - DNA, 25 bp, Artificial
  probe
  misc_feature (1)..(25): SEQ ID NO: 6650; WAN024CV6; Start 50; Stop 74
ggaatagacaagtaaccatagactg

SEQ ID NO: 445170 - DNA, 25 bp, Artificial
  probe
  misc_feature (1)..(25): SEQ ID NO: 6650; WAN024CV6; Start 295; Stop 319
acaggctaccaacatcaacaagtat

SEQ ID NO: 445171 - DNA, 25 bp, Artificial
  probe
  misc_feature (1)..(25): SEQ ID NO: 6650; WAN024CV6; Start 294; Stop 318
aacaggctaccaacatcaacaagta

SEQ ID NO: 445172 - DNA, 25 bp, Artificial
  probe
  misc_feature (1)..(25): SEQ ID NO: 6650; WAN024CV6; Start 178; Stop 202
atggttctgttgttcttggtacatt

SEQ ID NO: 445173 - DNA, 25 bp, Artificial
  probe
  misc_feature (1)..(25): SEQ ID NO: 6650; WAN024CV6; Start 177; Stop 201
aatggttctgttgttcttggtacat

SEQ ID NO: 445174 - DNA, 25 bp, Artificial
  probe
  misc_feature (1)..(25): SEQ ID NO: 6650; WAN024CV6; Start 297; Stop 321
aggctaccaacatcaacaagtatcc

SEQ ID NO: 445175 - DNA, 25 bp, Artificial
  probe
  misc_feature (1)..(25): SEQ ID NO: 6650; WAN024CV6; Start 90; Stop 114
acacttggtaattgacctcatatcc

SEQ ID NO: 445176 - DNA, 25 bp, Artificial
  probe
  misc_feature (1)..(25): SEQ ID NO: 6650; WAN024CV6; Start 87; Stop 111
cagacacttggtaattgacctcata

SEQ ID NO: 445177 - DNA, 25 bp, Artificial
  probe
  misc_feature (1)..(25): SEQ ID NO: 6650; WAN024CV6; Start 88; Stop 112
agacacttggtaattgacctcatat

SEQ ID NO: 445178 - DNA, 25 bp, Artificial
  probe
  misc_feature (1)..(25): SEQ ID NO: 6650; WAN024CV6; Start 176; Stop 200
gaatggttctgttgttcttggtaca

SEQ ID NO: 445179 - DNA, 25 bp, Artificial
  probe
  misc_feature (1)..(25): SEQ ID NO: 6650; WAN024CV6; Start 89; Stop 113
gacacttggtaattgacctcatatc

SEQ ID NO: 445180 - DNA, 25 bp, Artificial
  probe
  misc_feature (1)..(25): SEQ ID NO: 6650; WAN024CV6; Start 302; Stop 326
accaacatcaacaagtatcccaata

SEQ ID NO: 445181 - DNA, 25 bp, Artificial
  probe
  misc_feature (1)..(25): SEQ ID NO: 6650; WAN024CV6; Start 281; Stop 305
taaataggaatcaaacaggctacca

SEQ ID NO: 445182 - DNA, 25 bp, Artificial
  probe
  misc_feature (1)..(25): SEQ ID NO: 6650; WAN024CV6; Start 301; Stop 325
taccaacatcaacaagtatcccaat

SEQ ID NO: 445183 - DNA, 25 bp, Artificial
  probe
  misc_feature (1)..(25): SEQ ID NO: 6650; WAN024CV6; Start 282; Stop 306
aaataggaatcaaacaggctaccaa

SEQ ID NO: 445184 - DNA, 25 bp, Artificial
  probe
  misc_feature (1)..(25): SEQ ID NO: 6650; WAN024CV6; Start 303; Stop 327
ccaacatcaacaagtatcccaataa

SEQ ID NO: 445185 - DNA, 25 bp, Artificial
  probe
  misc_feature (1)..(25): SEQ ID NO: 6650; WAN024CV6; Start 300; Stop 324
ctaccaacatcaacaagtatcccaa

SEQ ID NO: 445186 - DNA, 25 bp, Artificial
  probe
  misc_feature (1)..(25): SEQ ID NO: 6650; WAN024CV6; Start 49; Stop 73
tggaatagacaagtaaccatagact

SEQ ID NO: 445187 - DNA, 25 bp, Artificial
  probe
  misc_feature (1)..(25): SEQ ID NO: 6650; WAN024CV6; Start 160; Stop 184
ttgattgtaggcgagagaatggttc

SEQ ID NO: 445188 - DNA, 25 bp, Artificial
  probe
  misc_feature (1)..(25): SEQ ID NO: 6650; WAN024CV6; Start 4; Stop 28
atgataatctgctcccaaataaacc

SEQ ID NO: 445189 - DNA, 25 bp, Artificial
  probe
  misc_feature (1)..(25): SEQ ID NO: 6650; WAN024CV6; Start 283; Stop 307
aataggaatcaaacaggctaccaac

SEQ ID NO: 445190 - DNA, 25 bp, Artificial
  probe
  misc_feature (1)..(25): SEQ ID NO: 6650; WAN024CV6; Start 5; Stop 29
tgataatctgctcccaaataaaccg

SEQ ID NO: 445191 - DNA, 25 bp, Artificial
  probe
  misc_feature (1)..(25): SEQ ID NO: 6650; WAN024CV6; Start 86; Stop 110
tcagacacttggtaattgacctcat

SEQ ID NO: 445192 - DNA, 25 bp, Artificial
  probe
  misc_feature (1)..(25): SEQ ID NO: 6650; WAN024CV6; Start 54; Stop 78
tagacaagtaaccatagactgcatc

SEQ ID NO: 445193 - DNA, 25 bp, Artificial
  probe
  misc_feature (1)..(25): SEQ ID NO: 6650; WAN024CV6; Start 277; Stop 301
acaataaataggaatcaaacaggct

SEQ ID NO: 445194 - DNA, 25 bp, Artificial
  probe
  misc_feature (1)..(25): SEQ ID NO: 6650; WAN024CV6; Start 159; Stop 183
gttgattgtaggcgagagaatggtt

SEQ ID NO: 445195 - DNA, 25 bp, Artificial
  probe
  misc_feature (1)..(25): SEQ ID NO: 6650; WAN024CV6; Start 52; Stop 76
aatagacaagtaaccatagactgca

SEQ ID NO: 445196 - DNA, 25 bp, Artificial
  probe
  misc_feature (1)..(25): SEQ ID NO: 6650; WAN024CV6; Start 280; Stop 304
ataaataggaatcaaacaggctacc

SEQ ID NO: 445197 - DNA, 25 bp, Artificial
  probe
  misc_feature (1)..(25): SEQ ID NO: 6650; WAN024CV6; Start 53; Stop 77
atagacaagtaaccatagactgcat

SEQ ID NO: 445198 - DNA, 25 bp, Artificial
  probe
  misc_feature (1)..(25): SEQ ID NO: 6650; WAN024CV6; Start 48; Stop 72
ttggaatagacaagtaaccatagac

SEQ ID NO: 445199 - DNA, 25 bp, Artificial
  probe
  misc_feature (1)..(25): SEQ ID NO: 6650; WAN024CV6; Start 288; Stop 312
gaatcaaacaggctaccaacatcaa

SEQ ID NO: 445200 - DNA, 25 bp, Artificial
  probe
  misc_feature (1)..(25): SEQ ID NO: 6651; WAN024AVM; Start 46; Stop 70
ggcaagacagatatgatacaaggaa

SEQ ID NO: 445201 - DNA, 25 bp, Artificial
  probe
  misc_feature (1)..(25): SEQ ID NO: 6651; WAN024AVM; Start 273; Stop 297
tgaacaagtagactggcttatgaag

SEQ ID NO: 445202 - DNA, 25 bp, Artificial
  probe
  misc_feature (1)..(25): SEQ ID NO: 6651; WAN024AVM; Start 272; Stop 296
ctgaacaagtagactggcttatgaa

SEQ ID NO: 445203 - DNA, 25 bp, Artificial
  probe
  misc_feature (1)..(25): SEQ ID NO: 6651; WAN024AVM; Start 44; Stop 68
gtggcaagacagatatgatacaagg

SEQ ID NO: 445204 - DNA, 25 bp, Artificial
  probe
  misc_feature (1)..(25): SEQ ID NO: 6651; WAN024AVM; Start 47; Stop 71
gcaagacagatatgatacaaggaat

SEQ ID NO: 445205 - DNA, 25 bp, Artificial
  probe
  misc_feature (1)..(25): SEQ ID NO: 6651; WAN024AVM; Start 45; Stop 69
tggcaagacagatatgatacaagga

SEQ ID NO: 445206 - DNA, 25 bp, Artificial
  probe
  misc_feature (1)..(25): SEQ ID NO: 6651; WAN024AVM; Start 49; Stop 73
aagacagatatgatacaaggaatcg

SEQ ID NO: 445207 - DNA, 25 bp, Artificial
  probe
  misc_feature (1)..(25): SEQ ID NO: 6651; WAN024AVM; Start 43; Stop 67
tgtggcaagacagatatgatacaag

SEQ ID NO: 445208 - DNA, 25 bp, Artificial
  probe
  misc_feature (1)..(25): SEQ ID NO: 6651; WAN024AVM; Start 271; Stop 295
cctgaacaagtagactggcttatga

SEQ ID NO: 445209 - DNA, 25 bp, Artificial
  probe
  misc_feature (1)..(25): SEQ ID NO: 6651; WAN024AVM; Start 270; Stop 294
acctgaacaagtagactggcttatg

SEQ ID NO: 445210 - DNA, 25 bp, Artificial
  probe
  misc_feature (1)..(25): SEQ ID NO: 6651; WAN024AVM; Start 269; Stop 293
cacctgaacaagtagactggcttat

SEQ ID NO: 445211 - DNA, 25 bp, Artificial
  probe
  misc_feature (1)..(25): SEQ ID NO: 6651; WAN024AVM; Start 50; Stop 74
agacagatatgatacaaggaatcga

SEQ ID NO: 445212 - DNA, 25 bp, Artificial
  probe
  misc_feature (1)..(25): SEQ ID NO: 6651; WAN024AVM; Start 48; Stop 72
caagacagatatgatacaaggaatc

SEQ ID NO: 445213 - DNA, 25 bp, Artificial
  probe
  misc_feature (1)..(25): SEQ ID NO: 6651; WAN024AVM; Start 201; Stop 225
actatataaacgctttgagaacgga

SEQ ID NO: 445214 - DNA, 25 bp, Artificial
  probe
  misc_feature (1)..(25): SEQ ID NO: 6651; WAN024AVM; Start 202; Stop 226
ctatataaacgctttgagaacggaa

SEQ ID NO: 445215 - DNA, 25 bp, Artificial
  probe
  misc_feature (1)..(25): SEQ ID NO: 6651; WAN024AVM; Start 40; Stop 64
gtttgtggcaagacagatatgatac

SEQ ID NO: 445216 - DNA, 25 bp, Artificial
  probe
  misc_feature (1)..(25): SEQ ID NO: 6651; WAN024AVM; Start 41; Stop 65
tttgtggcaagacagatatgataca

SEQ ID NO: 445217 - DNA, 25 bp, Artificial
  probe
  misc_feature (1)..(25): SEQ ID NO: 6651; WAN024AVM; Start 39; Stop 63
tgtttgtggcaagacagatatgata

SEQ ID NO: 445218 - DNA, 25 bp, Artificial
  probe
  misc_feature (1)..(25): SEQ ID NO: 6651; WAN024AVM; Start 38; Stop 62
ttgtttgtggcaagacagatatgat

SEQ ID NO: 445219 - DNA, 25 bp, Artificial
  probe
  misc_feature (1)..(25): SEQ ID NO: 6651; WAN024AVM; Start 42; Stop 66
ttgtggcaagacagatatgatacaa

SEQ ID NO: 445220 - DNA, 25 bp, Artificial
  probe
  misc_feature (1)..(25): SEQ ID NO: 6651; WAN024AVM; Start 5; Stop 29
tgattcaactaagtgatttaggtca

SEQ ID NO: 445221 - DNA, 25 bp, Artificial
  probe
  misc_feature (1)..(25): SEQ ID NO: 6651; WAN024AVM; Start 196; Stop 220
tggatactatataaacgctttgaga

SEQ ID NO: 445222 - DNA, 25 bp, Artificial
  probe
  misc_feature (1)..(25): SEQ ID NO: 6651; WAN024AVM; Start 199; Stop 223
atactatataaacgctttgagaacg

SEQ ID NO: 445223 - DNA, 25 bp, Artificial
  probe
  misc_feature (1)..(25): SEQ ID NO: 6651; WAN024AVM; Start 71; Stop 95
tcgattcactggcttatctcgttaa

SEQ ID NO: 445224 - DNA, 25 bp, Artificial
  probe
  misc_feature (1)..(25): SEQ ID NO: 6651; WAN024AVM; Start 74; Stop 98
attcactggcttatctcgttaaaac

SEQ ID NO: 445225 - DNA, 25 bp, Artificial
  probe
  misc_feature (1)..(25): SEQ ID NO: 6651; WAN024AVM; Start 72; Stop 96
cgattcactggcttatctcgttaaa

SEQ ID NO: 445226 - DNA, 25 bp, Artificial
  probe
  misc_feature (1)..(25): SEQ ID NO: 6651; WAN024AVM; Start 87; Stop 111
tctcgttaaaacccactttgaattg

SEQ ID NO: 445227 - DNA, 25 bp, Artificial
  probe
  misc_feature (1)..(25): SEQ ID NO: 6651; WAN024AVM; Start 83; Stop 107
cttatctcgttaaaacccactttga

SEQ ID NO: 445228 - DNA, 25 bp, Artificial
  probe
  misc_feature (1)..(25): SEQ ID NO: 6651; WAN024AVM; Start 82; Stop 106
gcttatctcgttaaaacccactttg

SEQ ID NO: 445229 - DNA, 25 bp, Artificial
  probe
  misc_feature (1)..(25): SEQ ID NO: 6651; WAN024AVM; Start 73; Stop 97
gattcactggcttatctcgttaaaa

SEQ ID NO: 445230 - DNA, 25 bp, Artificial
  probe
  misc_feature (1)..(25): SEQ ID NO: 6651; WAN024AVM; Start 86; Stop 110
atctcgttaaaacccactttgaatt

SEQ ID NO: 445231 - DNA, 25 bp, Artificial
  probe
  misc_feature (1)..(25): SEQ ID NO: 6651; WAN024AVM; Start 195; Stop 219
ttggatactatataaacgctttgag

SEQ ID NO: 445232 - DNA, 25 bp, Artificial
  probe
  misc_feature (1)..(25): SEQ ID NO: 6651; WAN024AVM; Start 84; Stop 108
ttatctcgttaaaacccactttgaa

SEQ ID NO: 445233 - DNA, 25 bp, Artificial
  probe
  misc_feature (1)..(25): SEQ ID NO: 6652; WAN024BWQ; Start 82; Stop 106
ttacacgaatggatagacggaagag

SEQ ID NO: 445234 - DNA, 25 bp, Artificial
  probe
  misc_feature (1)..(25): SEQ ID NO: 6652; WAN024BWQ; Start 189; Stop 213
tcatacaattcctgctacagaagtt

SEQ ID NO: 445235 - DNA, 25 bp, Artificial
  probe
  misc_feature (1)..(25): SEQ ID NO: 6652; WAN024BWQ; Start 188; Stop 212
ttcatacaattcctgctacagaagt

SEQ ID NO: 445236 - DNA, 25 bp, Artificial
  probe
  misc_feature (1)..(25): SEQ ID NO: 6652; WAN024BWQ; Start 185; Stop 209
agattcatacaattcctgctacaga

SEQ ID NO: 445237 - DNA, 25 bp, Artificial
  probe
  misc_feature (1)..(25): SEQ ID NO: 6652; WAN024BWQ; Start 187; Stop 211
attcatacaattcctgctacagaag

SEQ ID NO: 445238 - DNA, 25 bp, Artificial
  probe
  misc_feature (1)..(25): SEQ ID NO: 6652; WAN024BWQ; Start 186; Stop 210
gattcatacaattcctgctacagaa

SEQ ID NO: 445239 - DNA, 25 bp, Artificial
  probe
  misc_feature (1)..(25): SEQ ID NO: 6652; WAN024BWQ; Start 184; Stop 208
aagattcatacaattcctgctacag

SEQ ID NO: 445240 - DNA, 25 bp, Artificial
  probe
  misc_feature (1)..(25): SEQ ID NO: 6652; WAN024BWQ; Start 83; Stop 107
tacacgaatggatagacggaagaga

SEQ ID NO: 445241 - DNA, 25 bp, Artificial
  probe
  misc_feature (1)..(25): SEQ ID NO: 6652; WAN024BWQ; Start 93; Stop 117
gatagacggaagagatgcaatagat

SEQ ID NO: 445242 - DNA, 25 bp, Artificial
  probe
  misc_feature (1)..(25): SEQ ID NO: 6652; WAN024BWQ; Start 206; Stop 230
cagaagtttgtgaagattgggaaat

SEQ ID NO: 445243 - DNA, 25 bp, Artificial
  probe
  misc_feature (1)..(25): SEQ ID NO: 6652; WAN024BWQ; Start 85; Stop 109
cacgaatggatagacggaagagatg

SEQ ID NO: 445244 - DNA, 25 bp, Artificial
  probe
  misc_feature (1)..(25): SEQ ID NO: 6652; WAN024BWQ; Start 154; Stop 178
tatggtgtagaagcaggaaagatac

SEQ ID NO: 445245 - DNA, 25 bp, Artificial
  probe
  misc_feature (1)..(25): SEQ ID NO: 6652; WAN024BWQ; Start 95; Stop 119
tagacggaagagatgcaatagatag

SEQ ID NO: 445246 - DNA, 25 bp, Artificial
  probe
  misc_feature (1)..(25): SEQ ID NO: 6652; WAN024BWQ; Start 17; Stop 41
cttctcttggagttccgatgtgtaa

SEQ ID NO: 445247 - DNA, 25 bp, Artificial
  probe
  misc_feature (1)..(25): SEQ ID NO: 6652; WAN024BWQ; Start 157; Stop 181
ggtgtagaagcaggaaagatactta

SEQ ID NO: 445248 - DNA, 25 bp, Artificial
  probe
  misc_feature (1)..(25): SEQ ID NO: 6652; WAN024BWQ; Start 153; Stop 177
atatggtgtagaagcaggaaagata

SEQ ID NO: 445249 - DNA, 25 bp, Artificial
  probe
  misc_feature (1)..(25): SEQ ID NO: 6652; WAN024BWQ; Start 90; Stop 114
atggatagacggaagagatgcaata

SEQ ID NO: 445250 - DNA, 25 bp, Artificial
  probe
  misc_feature (1)..(25): SEQ ID NO: 6652; WAN024BWQ; Start 94; Stop 118
atagacggaagagatgcaatagata

SEQ ID NO: 445251 - DNA, 25 bp, Artificial
  probe
  misc_feature (1)..(25): SEQ ID NO: 6652; WAN024BWQ; Start 155; Stop 179
atggtgtagaagcaggaaagatact

SEQ ID NO: 445252 - DNA, 25 bp, Artificial
  probe
  misc_feature (1)..(25): SEQ ID NO: 6652; WAN024BWQ; Start 26; Stop 50
gagttccgatgtgtaaaccaattag

SEQ ID NO: 445253 - DNA, 25 bp, Artificial
  probe
  misc_feature (1)..(25): SEQ ID NO: 6652; WAN024BWQ; Start 84; Stop 108
acacgaatggatagacggaagagat

SEQ ID NO: 445254 - DNA, 25 bp, Artificial
  probe
  misc_feature (1)..(25): SEQ ID NO: 6652; WAN024BWQ; Start 92; Stop 116
ggatagacggaagagatgcaataga

SEQ ID NO: 445255 - DNA, 25 bp, Artificial
  probe
  misc_feature (1)..(25): SEQ ID NO: 6652; WAN024BWQ; Start 30; Stop 54
tccgatgtgtaaaccaattagcatt

SEQ ID NO: 445256 - DNA, 25 bp, Artificial
  probe
  misc_feature (1)..(25): SEQ ID NO: 6652; WAN024BWQ; Start 29; Stop 53
ttccgatgtgtaaaccaattagcat

SEQ ID NO: 445257 - DNA, 25 bp, Artificial
  probe
  misc_feature (1)..(25): SEQ ID NO: 6652; WAN024BWQ; Start 159; Stop 183
tgtagaagcaggaaagatacttaga

SEQ ID NO: 445258 - DNA, 25 bp, Artificial
  probe
  misc_feature (1)..(25): SEQ ID NO: 6652; WAN024BWQ; Start 158; Stop 182
gtgtagaagcaggaaagatacttag

SEQ ID NO: 445259 - DNA, 25 bp, Artificial
  probe
  misc_feature (1)..(25): SEQ ID NO: 6652; WAN024BWQ; Start 81; Stop 105
tttacacgaatggatagacggaaga

SEQ ID NO: 445260 - DNA, 25 bp, Artificial
  probe
  misc_feature (1)..(25): SEQ ID NO: 6652; WAN024BWQ; Start 80; Stop 104
ctttacacgaatggatagacggaag

SEQ ID NO: 445261 - DNA, 25 bp, Artificial
  probe
  misc_feature (1)..(25): SEQ ID NO: 6652; WAN024BWQ; Start 91; Stop 115
tggatagacggaagagatgcaatag

SEQ ID NO: 445262 - DNA, 25 bp, Artificial
  probe
  misc_feature (1)..(25): SEQ ID NO: 6652; WAN024BWQ; Start 156; Stop 180
tggtgtagaagcaggaaagatactt

SEQ ID NO: 445263 - DNA, 25 bp, Artificial
  probe
  misc_feature (1)..(25): SEQ ID NO: 6652; WAN024BWQ; Start 183; Stop 207
aaagattcatacaattcctgctaca

SEQ ID NO: 445264 - DNA, 25 bp, Artificial
  probe
  misc_feature (1)..(25): SEQ ID NO: 6652; WAN024BWQ; Start 64; Stop 88
gatgacgaagtacattctttacacg

SEQ ID NO: 445265 - DNA, 25 bp, Artificial
  probe
  misc_feature (1)..(25): SEQ ID NO: 6652; WAN024BWQ; Start 63; Stop 87
cgatgacgaagtacattctttacac

SEQ ID NO: 445266 - DNA, 25 bp, Artificial
  probe
  misc_feature (1)..(25): SEQ ID NO: 6653; WAN024BT8; Start 42; Stop 66
aaagaaagaagaaagcattaagcaa

SEQ ID NO: 445267 - DNA, 25 bp, Artificial
  probe
  misc_feature (1)..(25): SEQ ID NO: 6653; WAN024BT8; Start 43; Stop 67
aagaaagaagaaagcattaagcaat

SEQ ID NO: 445268 - DNA, 25 bp, Artificial
  probe
  misc_feature (1)..(25): SEQ ID NO: 6653; WAN024BT8; Start 44; Stop 68
agaaagaagaaagcattaagcaatt

SEQ ID NO: 445269 - DNA, 25 bp, Artificial
  probe
  misc_feature (1)..(25): SEQ ID NO: 6653; WAN024BT8; Start 48; Stop 72
agaagaaagcattaagcaattacaa

SEQ ID NO: 445270 - DNA, 25 bp, Artificial
  probe
  misc_feature (1)..(25): SEQ ID NO: 6653; WAN024BT8; Start 47; Stop 71
aagaagaaagcattaagcaattaca

SEQ ID NO: 445271 - DNA, 25 bp, Artificial
  probe
  misc_feature (1)..(25): SEQ ID NO: 6653; WAN024BT8; Start 145; Stop 169
aaaggtgcagtgtttgaaagtattt

SEQ ID NO: 445272 - DNA, 25 bp, Artificial
  probe
  misc_feature (1)..(25): SEQ ID NO: 6653; WAN024BT8; Start 49; Stop 73
gaagaaagcattaagcaattacaaa

SEQ ID NO: 445273 - DNA, 25 bp, Artificial
  probe
  misc_feature (1)..(25): SEQ ID NO: 6653; WAN024BT8; Start 46; Stop 70
aaagaagaaagcattaagcaattac

SEQ ID NO: 445274 - DNA, 25 bp, Artificial
  probe
  misc_feature (1)..(25): SEQ ID NO: 6653; WAN024BT8; Start 106; Stop 130
gaacaagaaagaaaagcaagaaaca

SEQ ID NO: 445275 - DNA, 25 bp, Artificial
  probe
  misc_feature (1)..(25): SEQ ID NO: 6653; WAN024BT8; Start 105; Stop 129
tgaacaagaaagaaaagcaagaaac

SEQ ID NO: 445276 - DNA, 25 bp, Artificial
  probe
  misc_feature (1)..(25): SEQ ID NO: 6653; WAN024BT8; Start 45; Stop 69
gaaagaagaaagcattaagcaatta

SEQ ID NO: 445277 - DNA, 25 bp, Artificial
  probe
  misc_feature (1)..(25): SEQ ID NO: 6653; WAN024BT8; Start 108; Stop 132
acaagaaagaaaagcaagaaacaaa

SEQ ID NO: 445278 - DNA, 25 bp, Artificial
  probe
  misc_feature (1)..(25): SEQ ID NO: 6653; WAN024BT8; Start 107; Stop 131
aacaagaaagaaaagcaagaaacaa

SEQ ID NO: 445279 - DNA, 25 bp, Artificial
  probe
  misc_feature (1)..(25): SEQ ID NO: 6653; WAN024BT8; Start 113; Stop 137
aaagaaaagcaagaaacaaaagact

SEQ ID NO: 445280 - DNA, 25 bp, Artificial
  probe
  misc_feature (1)..(25): SEQ ID NO: 6653; WAN024BT8; Start 34; Stop 58
cagattgaaaagaaagaagaaagca

SEQ ID NO: 445281 - DNA, 25 bp, Artificial
  probe
  misc_feature (1)..(25): SEQ ID NO: 6653; WAN024BT8; Start 33; Stop 57
acagattgaaaagaaagaagaaagc

SEQ ID NO: 445282 - DNA, 25 bp, Artificial
  probe
  misc_feature (1)..(25): SEQ ID NO: 6653; WAN024BT8; Start 112; Stop 136
gaaagaaaagcaagaaacaaaagac

SEQ ID NO: 445283 - DNA, 25 bp, Artificial
  probe
  misc_feature (1)..(25): SEQ ID NO: 6653; WAN024BT8; Start 111; Stop 135
agaaagaaaagcaagaaacaaaaga

SEQ ID NO: 445284 - DNA, 25 bp, Artificial
  probe
  misc_feature (1)..(25): SEQ ID NO: 6653; WAN024BT8; Start 104; Stop 128
atgaacaagaaagaaaagcaagaaa

SEQ ID NO: 445285 - DNA, 25 bp, Artificial
  probe
  misc_feature (1)..(25): SEQ ID NO: 6653; WAN024BT8; Start 103; Stop 127
aatgaacaagaaagaaaagcaagaa

SEQ ID NO: 445286 - DNA, 25 bp, Artificial
  probe
  misc_feature (1)..(25): SEQ ID NO: 6653; WAN024BT8; Start 114; Stop 138
aagaaaagcaagaaacaaaagactt

SEQ ID NO: 445287 - DNA, 25 bp, Artificial
  probe
  misc_feature (1)..(25): SEQ ID NO: 6653; WAN024BT8; Start 41; Stop 65
aaaagaaagaagaaagcattaagca

SEQ ID NO: 445288 - DNA, 25 bp, Artificial
  probe
  misc_feature (1)..(25): SEQ ID NO: 6653; WAN024BT8; Start 109; Stop 133
caagaaagaaaagcaagaaacaaaa

SEQ ID NO: 445289 - DNA, 25 bp, Artificial
  probe
  misc_feature (1)..(25): SEQ ID NO: 6653; WAN024BT8; Start 17; Stop 41
gattaagtattgaagaacagattga

SEQ ID NO: 445290 - DNA, 25 bp, Artificial
  probe
  misc_feature (1)..(25): SEQ ID NO: 6653; WAN024BT8; Start 16; Stop 40
agattaagtattgaagaacagattg

SEQ ID NO: 445291 - DNA, 25 bp, Artificial
  probe
  misc_feature (1)..(25): SEQ ID NO: 6653; WAN024BT8; Start 110; Stop 134
aagaaagaaaagcaagaaacaaaag

SEQ ID NO: 445292 - DNA, 25 bp, Artificial
  probe
  misc_feature (1)..(25): SEQ ID NO: 6653; WAN024BT8; Start 99; Stop 123
acttaatgaacaagaaagaaaagca

SEQ ID NO: 445293 - DNA, 25 bp, Artificial
  probe
  misc_feature (1)..(25): SEQ ID NO: 6653; WAN024BT8; Start 40; Stop 64
gaaaagaaagaagaaagcattaagc

SEQ ID NO: 445294 - DNA, 25 bp, Artificial
  probe
  misc_feature (1)..(25): SEQ ID NO: 6653; WAN024BT8; Start 115; Stop 139
agaaaagcaagaaacaaaagactta

SEQ ID NO: 445295 - DNA, 25 bp, Artificial
  probe
  misc_feature (1)..(25): SEQ ID NO: 6653; WAN024BT8; Start 102; Stop 126
taatgaacaagaaagaaaagcaaga

SEQ ID NO: 445296 - DNA, 25 bp, Artificial
  probe
  misc_feature (1)..(25): SEQ ID NO: 6653; WAN024BT8; Start 35; Stop 59
agattgaaaagaaagaagaaagcat

SEQ ID NO: 445297 - DNA, 25 bp, Artificial
  probe
  misc_feature (1)..(25): SEQ ID NO: 6653; WAN024BT8; Start 27; Stop 51
tgaagaacagattgaaaagaaagaa

SEQ ID NO: 445298 - DNA, 25 bp, Artificial
  probe
  misc_feature (1)..(25): SEQ ID NO: 6653; WAN024BT8; Start 26; Stop 50
ttgaagaacagattgaaaagaaaga

SEQ ID NO: 445299 - DNA, 25 bp, Artificial
  probe
  misc_feature (1)..(25): SEQ ID NO: 6654; WAN024B57; Start 65; Stop 89
aaattgcttcaaagttaattctaac

SEQ ID NO: 445300 - DNA, 25 bp, Artificial
  probe
  misc_feature (1)..(25): SEQ ID NO: 6654; WAN024B57; Start 8; Stop 32
gcgctgaaacttctatcgtcaagaa

SEQ ID NO: 445301 - DNA, 25 bp, Artificial
  probe
  misc_feature (1)..(25): SEQ ID NO: 6654; WAN024B57; Start 66; Stop 90
aattgcttcaaagttaattctaact

SEQ ID NO: 445302 - DNA, 25 bp, Artificial
  probe
  misc_feature (1)..(25): SEQ ID NO: 6654; WAN024B57; Start 68; Stop 92
ttgcttcaaagttaattctaactaa

SEQ ID NO: 445303 - DNA, 25 bp, Artificial
  probe
  misc_feature (1)..(25): SEQ ID NO: 6654; WAN024B57; Start 69; Stop 93
tgcttcaaagttaattctaactaat

SEQ ID NO: 445304 - DNA, 25 bp, Artificial
  probe
  misc_feature (1)..(25): SEQ ID NO: 6654; WAN024B57; Start 67; Stop 91
attgcttcaaagttaattctaacta

SEQ ID NO: 445305 - DNA, 25 bp, Artificial
  probe
  misc_feature (1)..(25): SEQ ID NO: 6655; WAN024ETE; Start 54; Stop 78
aaacatgagttacctcccttacttt

SEQ ID NO: 445306 - DNA, 25 bp, Artificial
  probe
  misc_feature (1)..(25): SEQ ID NO: 6655; WAN024ETE; Start 53; Stop 77
gaaacatgagttacctcccttactt

SEQ ID NO: 445307 - DNA, 25 bp, Artificial
  probe
  misc_feature (1)..(25): SEQ ID NO: 6655; WAN024ETE; Start 55; Stop 79
aacatgagttacctcccttacttta

SEQ ID NO: 445308 - DNA, 25 bp, Artificial
  probe
  misc_feature (1)..(25): SEQ ID NO: 6655; WAN024ETE; Start 50; Stop 74
tacgaaacatgagttacctccctta

SEQ ID NO: 445309 - DNA, 25 bp, Artificial
  probe
  misc_feature (1)..(25): SEQ ID NO: 6655; WAN024ETE; Start 56; Stop 80
acatgagttacctcccttactttat

SEQ ID NO: 445310 - DNA, 25 bp, Artificial
  probe
  misc_feature (1)..(25): SEQ ID NO: 6655; WAN024ETE; Start 57; Stop 81
catgagttacctcccttactttatt

SEQ ID NO: 445311 - DNA, 25 bp, Artificial
  probe
  misc_feature (1)..(25): SEQ ID NO: 6655; WAN024ETE; Start 52; Stop 76
cgaaacatgagttacctcccttact

SEQ ID NO: 445312 - DNA, 25 bp, Artificial
  probe
  misc_feature (1)..(25): SEQ ID NO: 6655; WAN024ETE; Start 49; Stop 73
ctacgaaacatgagttacctccctt

SEQ ID NO: 445313 - DNA, 25 bp, Artificial
  probe
  misc_feature (1)..(25): SEQ ID NO: 6655; WAN024ETE; Start 47; Stop 71
ttctacgaaacatgagttacctccc

SEQ ID NO: 445314 - DNA, 25 bp, Artificial
  probe
  misc_feature (1)..(25): SEQ ID NO: 6655; WAN024ETE; Start 58; Stop 82
atgagttacctcccttactttattt

SEQ ID NO: 445315 - DNA, 25 bp, Artificial
  probe
  misc_feature (1)..(25): SEQ ID NO: 6655; WAN024ETE; Start 51; Stop 75
acgaaacatgagttacctcccttac

SEQ ID NO: 445316 - DNA, 25 bp, Artificial
  probe
  misc_feature (1)..(25): SEQ ID NO: 6655; WAN024ETE; Start 46; Stop 70
tttctacgaaacatgagttacctcc

SEQ ID NO: 445317 - DNA, 25 bp, Artificial
  probe
  misc_feature (1)..(25): SEQ ID NO: 6655; WAN024ETE; Start 45; Stop 69
atttctacgaaacatgagttacctc

SEQ ID NO: 445318 - DNA, 25 bp, Artificial
  probe
  misc_feature (1)..(25): SEQ ID NO: 6655; WAN024ETE; Start 48; Stop 72
tctacgaaacatgagttacctccct

SEQ ID NO: 445319 - DNA, 25 bp, Artificial
  probe
  misc_feature (1)..(25): SEQ ID NO: 6655; WAN024ETE; Start 44; Stop 68
tatttctacgaaacatgagttacct

SEQ ID NO: 445320 - DNA, 25 bp, Artificial
  probe
  misc_feature (1)..(25): SEQ ID NO: 6655; WAN024ETE; Start 63; Stop 87
ttacctcccttactttattttacca

SEQ ID NO: 445321 - DNA, 25 bp, Artificial
  probe
  misc_feature (1)..(25): SEQ ID NO: 6655; WAN024ETE; Start 43; Stop 67
ttatttctacgaaacatgagttacc

SEQ ID NO: 445322 - DNA, 25 bp, Artificial
  probe
  misc_feature (1)..(25): SEQ ID NO: 6655; WAN024ETE; Start 65; Stop 89
acctcccttactttattttaccata

SEQ ID NO: 445323 - DNA, 25 bp, Artificial
  probe
  misc_feature (1)..(25): SEQ ID NO: 6655; WAN024ETE; Start 64; Stop 88
tacctcccttactttattttaccat

SEQ ID NO: 445324 - DNA, 25 bp, Artificial
  probe
  misc_feature (1)..(25): SEQ ID NO: 6655; WAN024ETE; Start 62; Stop 86
gttacctcccttactttattttacc

SEQ ID NO: 445325 - DNA, 25 bp, Artificial
  probe
  misc_feature (1)..(25): SEQ ID NO: 6655; WAN024ETE; Start 59; Stop 83
tgagttacctcccttactttatttt

SEQ ID NO: 445326 - DNA, 25 bp, Artificial
  probe
  misc_feature (1)..(25): SEQ ID NO: 6655; WAN024ETE; Start 11; Stop 35
agagtaaaatttctgtggtccaaaa

SEQ ID NO: 445327 - DNA, 25 bp, Artificial
  probe
  misc_feature (1)..(25): SEQ ID NO: 6655; WAN024ETE; Start 10; Stop 34
aagagtaaaatttctgtggtccaaa

SEQ ID NO: 445328 - DNA, 25 bp, Artificial
  probe
  misc_feature (1)..(25): SEQ ID NO: 6655; WAN024ETE; Start 5; Stop 29
tggttaagagtaaaatttctgtggt

SEQ ID NO: 445329 - DNA, 25 bp, Artificial
  probe
  misc_feature (1)..(25): SEQ ID NO: 6655; WAN024ETE; Start 9; Stop 33
taagagtaaaatttctgtggtccaa

SEQ ID NO: 445330 - DNA, 25 bp, Artificial
  probe
  misc_feature (1)..(25): SEQ ID NO: 6655; WAN024ETE; Start 8; Stop 32
ttaagagtaaaatttctgtggtcca

SEQ ID NO: 445331 - DNA, 25 bp, Artificial
  probe
  misc_feature (1)..(25): SEQ ID NO: 6655; WAN024ETE; Start 7; Stop 31
gttaagagtaaaatttctgtggtcc

SEQ ID NO: 445332 - DNA, 25 bp, Artificial
  probe
  misc_feature (1)..(25): SEQ ID NO: 6655; WAN024ETE; Start 6; Stop 30
ggttaagagtaaaatttctgtggtc

SEQ ID NO: 445333 - DNA, 25 bp, Artificial
  probe
  misc_feature (1)..(25): SEQ ID NO: 6655; WAN024ETE; Start 4; Stop 28
atggttaagagtaaaatttctgtgg

SEQ ID NO: 445334 - DNA, 25 bp, Artificial
  probe
  misc_feature (1)..(25): SEQ ID NO: 6655; WAN024ETE; Start 66; Stop 90
cctcccttactttattttaccatat

SEQ ID NO: 445335 - DNA, 25 bp, Artificial
  probe
  misc_feature (1)..(25): SEQ ID NO: 6655; WAN024ETE; Start 61; Stop 85
agttacctcccttactttattttac

SEQ ID NO: 445336 - DNA, 25 bp, Artificial
  probe
  misc_feature (1)..(25): SEQ ID NO: 6655; WAN024ETE; Start 42; Stop 66
tttatttctacgaaacatgagttac

SEQ ID NO: 445337 - DNA, 25 bp, Artificial
  probe
  misc_feature (1)..(25): SEQ ID NO: 6655; WAN024ETE; Start 60; Stop 84
gagttacctcccttactttatttta

SEQ ID NO: 445338 - DNA, 25 bp, Artificial
  probe
  misc_feature (1)..(25): SEQ ID NO: 6656; WAN024COB; Start 249; Stop 273
gatccaccttatcatgccattcatt

SEQ ID NO: 445339 - DNA, 25 bp, Artificial
  probe
  misc_feature (1)..(25): SEQ ID NO: 6656; WAN024COB; Start 250; Stop 274
atccaccttatcatgccattcattg

SEQ ID NO: 445340 - DNA, 25 bp, Artificial
  probe
  misc_feature (1)..(25): SEQ ID NO: 6656; WAN024COB; Start 186; Stop 210
aatcaaagtccaattccaaccattt

SEQ ID NO: 445341 - DNA, 25 bp, Artificial
  probe
  misc_feature (1)..(25): SEQ ID NO: 6656; WAN024COB; Start 262; Stop 286
atgccattcattggttacatcaatt

SEQ ID NO: 445342 - DNA, 25 bp, Artificial
  probe
  misc_feature (1)..(25): SEQ ID NO: 6656; WAN024COB; Start 256; Stop 280
cttatcatgccattcattggttaca

SEQ ID NO: 445343 - DNA, 25 bp, Artificial
  probe
  misc_feature (1)..(25): SEQ ID NO: 6656; WAN024COB; Start 255; Stop 279
ccttatcatgccattcattggttac

SEQ ID NO: 445344 - DNA, 25 bp, Artificial
  probe
  misc_feature (1)..(25): SEQ ID NO: 6656; WAN024COB; Start 190; Stop 214
aaagtccaattccaaccatttatgt

SEQ ID NO: 445345 - DNA, 25 bp, Artificial
  probe
  misc_feature (1)..(25): SEQ ID NO: 6656; WAN024COB; Start 258; Stop 282
tatcatgccattcattggttacatc

SEQ ID NO: 445346 - DNA, 25 bp, Artificial
  probe
  misc_feature (1)..(25): SEQ ID NO: 6656; WAN024COB; Start 254; Stop 278
accttatcatgccattcattggtta

SEQ ID NO: 445347 - DNA, 25 bp, Artificial
  probe
  misc_feature (1)..(25): SEQ ID NO: 6656; WAN024COB; Start 185; Stop 209
taatcaaagtccaattccaaccatt

SEQ ID NO: 445348 - DNA, 25 bp, Artificial
  probe
  misc_feature (1)..(25): SEQ ID NO: 6656; WAN024COB; Start 189; Stop 213
caaagtccaattccaaccatttatg

SEQ ID NO: 445349 - DNA, 25 bp, Artificial
  probe
  misc_feature (1)..(25): SEQ ID NO: 6656; WAN024COB; Start 188; Stop 212
tcaaagtccaattccaaccatttat

SEQ ID NO: 445350 - DNA, 25 bp, Artificial
  probe
  misc_feature (1)..(25): SEQ ID NO: 6656; WAN024COB; Start 187; Stop 211
atcaaagtccaattccaaccattta

SEQ ID NO: 445351 - DNA, 25 bp, Artificial
  probe
  misc_feature (1)..(25): SEQ ID NO: 6656; WAN024COB; Start 263; Stop 287
tgccattcattggttacatcaatta

SEQ ID NO: 445352 - DNA, 25 bp, Artificial
  probe
  misc_feature (1)..(25): SEQ ID NO: 6656; WAN024COB; Start 193; Stop 217
gtccaattccaaccatttatgttca

SEQ ID NO: 445353 - DNA, 25 bp, Artificial
  probe
  misc_feature (1)..(25): SEQ ID NO: 6656; WAN024COB; Start 257; Stop 281
ttatcatgccattcattggttacat

SEQ ID NO: 445354 - DNA, 25 bp, Artificial
  probe
  misc_feature (1)..(25): SEQ ID NO: 6656; WAN024COB; Start 192; Stop 216
agtccaattccaaccatttatgttc

SEQ ID NO: 445355 - DNA, 25 bp, Artificial
  probe
  misc_feature (1)..(25): SEQ ID NO: 6656; WAN024COB; Start 184; Stop 208
ataatcaaagtccaattccaaccat

SEQ ID NO: 445356 - DNA, 25 bp, Artificial
  probe
  misc_feature (1)..(25): SEQ ID NO: 6656; WAN024COB; Start 259; Stop 283
atcatgccattcattggttacatca

SEQ ID NO: 445357 - DNA, 25 bp, Artificial
  probe
  misc_feature (1)..(25): SEQ ID NO: 6656; WAN024COB; Start 194; Stop 218
tccaattccaaccatttatgttcaa

SEQ ID NO: 445358 - DNA, 25 bp, Artificial
  probe
  misc_feature (1)..(25): SEQ ID NO: 6656; WAN024COB; Start 191; Stop 215
aagtccaattccaaccatttatgtt

SEQ ID NO: 445359 - DNA, 25 bp, Artificial
  probe
  misc_feature (1)..(25): SEQ ID NO: 6656; WAN024COB; Start 260; Stop 284
tcatgccattcattggttacatcaa

SEQ ID NO: 445360 - DNA, 25 bp, Artificial
  probe
  misc_feature (1)..(25): SEQ ID NO: 6656; WAN024COB; Start 261; Stop 285
catgccattcattggttacatcaat

SEQ ID NO: 445361 - DNA, 25 bp, Artificial
  probe
  misc_feature (1)..(25): SEQ ID NO: 6656; WAN024COB; Start 183; Stop 207
tataatcaaagtccaattccaacca

SEQ ID NO: 445362 - DNA, 25 bp, Artificial
  probe
  misc_feature (1)..(25): SEQ ID NO: 6656; WAN024COB; Start 195; Stop 219
ccaattccaaccatttatgttcaaa

SEQ ID NO: 445363 - DNA, 25 bp, Artificial
  probe
  misc_feature (1)..(25): SEQ ID NO: 6656; WAN024COB; Start 264; Stop 288
gccattcattggttacatcaattaa

SEQ ID NO: 445364 - DNA, 25 bp, Artificial
  probe
  misc_feature (1)..(25): SEQ ID NO: 6656; WAN024COB; Start 253; Stop 277
caccttatcatgccattcattggtt

SEQ ID NO: 445365 - DNA, 25 bp, Artificial
  probe
  misc_feature (1)..(25): SEQ ID NO: 6656; WAN024COB; Start 40; Stop 64
atagtaccaccaaacttcacgatag

SEQ ID NO: 445366 - DNA, 25 bp, Artificial
  probe
  misc_feature (1)..(25): SEQ ID NO: 6656; WAN024COB; Start 39; Stop 63
gatagtaccaccaaacttcacgata

SEQ ID NO: 445367 - DNA, 25 bp, Artificial
  probe
  misc_feature (1)..(25): SEQ ID NO: 6656; WAN024COB; Start 224; Stop 248
atattcaagatgctctgatctgcct

SEQ ID NO: 445368 - DNA, 25 bp, Artificial
  probe
  misc_feature (1)..(25): SEQ ID NO: 6656; WAN024COB; Start 223; Stop 247
catattcaagatgctctgatctgcc

SEQ ID NO: 445369 - DNA, 25 bp, Artificial
  probe
  misc_feature (1)..(25): SEQ ID NO: 6656; WAN024COB; Start 9; Stop 33
tttgtcccaattctgtccattcaag

SEQ ID NO: 445370 - DNA, 25 bp, Artificial
  probe
  misc_feature (1)..(25): SEQ ID NO: 6656; WAN024COB; Start 152; Stop 176
tcagcaaactgtttatgaatgacaa

SEQ ID NO: 445371 - DNA, 25 bp, Artificial
  probe
  misc_feature (1)..(25): SEQ ID NO: 6657; WAN024BQB; Start 488; Stop 512
ctcttgtagtagcgtggttgtatta

SEQ ID NO: 445372 - DNA, 25 bp, Artificial
  probe
  misc_feature (1)..(25): SEQ ID NO: 6657; WAN024BQB; Start 489; Stop 513
tcttgtagtagcgtggttgtattat

SEQ ID NO: 445373 - DNA, 25 bp, Artificial
  probe
  misc_feature (1)..(25): SEQ ID NO: 6657; WAN024BQB; Start 721; Stop 745
gtagacttcttagagcctattgtgg

SEQ ID NO: 445374 - DNA, 25 bp, Artificial
  probe
  misc_feature (1)..(25): SEQ ID NO: 6657; WAN024BQB; Start 723; Stop 747
agacttcttagagcctattgtggta

SEQ ID NO: 445375 - DNA, 25 bp, Artificial
  probe
  misc_feature (1)..(25): SEQ ID NO: 6657; WAN024BQB; Start 722; Stop 746
tagacttcttagagcctattgtggt

SEQ ID NO: 445376 - DNA, 25 bp, Artificial
  probe
  misc_feature (1)..(25): SEQ ID NO: 6657; WAN024BQB; Start 720; Stop 744
tgtagacttcttagagcctattgtg

SEQ ID NO: 445377 - DNA, 25 bp, Artificial
  probe
  misc_feature (1)..(25): SEQ ID NO: 6657; WAN024BQB; Start 490; Stop 514
cttgtagtagcgtggttgtattatt

SEQ ID NO: 445378 - DNA, 25 bp, Artificial
  probe
  misc_feature (1)..(25): SEQ ID NO: 6657; WAN024BQB; Start 719; Stop 743
atgtagacttcttagagcctattgt

SEQ ID NO: 445379 - DNA, 25 bp, Artificial
  probe
  misc_feature (1)..(25): SEQ ID NO: 6657; WAN024BQB; Start 177; Stop 201
cacctggttgattgttatctatgag

SEQ ID NO: 445380 - DNA, 25 bp, Artificial
  probe
  misc_feature (1)..(25): SEQ ID NO: 6657; WAN024BQB; Start 724; Stop 748
gacttcttagagcctattgtggtac

SEQ ID NO: 445381 - DNA, 25 bp, Artificial
  probe
  misc_feature (1)..(25): SEQ ID NO: 6657; WAN024BQB; Start 178; Stop 202
acctggttgattgttatctatgaga

SEQ ID NO: 445382 - DNA, 25 bp, Artificial
  probe
  misc_feature (1)..(25): SEQ ID NO: 6657; WAN024BQB; Start 176; Stop 200
tcacctggttgattgttatctatga

SEQ ID NO: 445383 - DNA, 25 bp, Artificial
  probe
  misc_feature (1)..(25): SEQ ID NO: 6657; WAN024BQB; Start 718; Stop 742
aatgtagacttcttagagcctattg

SEQ ID NO: 445384 - DNA, 25 bp, Artificial
  probe
  misc_feature (1)..(25): SEQ ID NO: 6657; WAN024BQB; Start 730; Stop 754
ttagagcctattgtggtacagttac

SEQ ID NO: 445385 - DNA, 25 bp, Artificial
  probe
  misc_feature (1)..(25): SEQ ID NO: 6657; WAN024BQB; Start 736; Stop 760
cctattgtggtacagttacttggta

SEQ ID NO: 445386 - DNA, 25 bp, Artificial
  probe
  misc_feature (1)..(25): SEQ ID NO: 6657; WAN024BQB; Start 731; Stop 755
tagagcctattgtggtacagttact

SEQ ID NO: 445387 - DNA, 25 bp, Artificial
  probe
  misc_feature (1)..(25): SEQ ID NO: 6657; WAN024BQB; Start 729; Stop 753
cttagagcctattgtggtacagtta

SEQ ID NO: 445388 - DNA, 25 bp, Artificial
  probe
  misc_feature (1)..(25): SEQ ID NO: 6657; WAN024BQB; Start 726; Stop 750
cttcttagagcctattgtggtacag

SEQ ID NO: 445389 - DNA, 25 bp, Artificial
  probe
  misc_feature (1)..(25): SEQ ID NO: 6657; WAN024BQB; Start 728; Stop 752
tcttagagcctattgtggtacagtt

SEQ ID NO: 445390 - DNA, 25 bp, Artificial
  probe
  misc_feature (1)..(25): SEQ ID NO: 6657; WAN024BQB; Start 727; Stop 751
ttcttagagcctattgtggtacagt

SEQ ID NO: 445391 - DNA, 25 bp, Artificial
  probe
  misc_feature (1)..(25): SEQ ID NO: 6657; WAN024BQB; Start 725; Stop 749
acttcttagagcctattgtggtaca

SEQ ID NO: 445392 - DNA, 25 bp, Artificial
  probe
  misc_feature (1)..(25): SEQ ID NO: 6657; WAN024BQB; Start 733; Stop 757
gagcctattgtggtacagttacttg

SEQ ID NO: 445393 - DNA, 25 bp, Artificial
  probe
  misc_feature (1)..(25): SEQ ID NO: 6657; WAN024BQB; Start 732; Stop 756
agagcctattgtggtacagttactt

SEQ ID NO: 445394 - DNA, 25 bp, Artificial
  probe
  misc_feature (1)..(25): SEQ ID NO: 6657; WAN024BQB; Start 853; Stop 877
gattatgtcattcgattgcttggaa

SEQ ID NO: 445395 - DNA, 25 bp, Artificial
  probe
  misc_feature (1)..(25): SEQ ID NO: 6657; WAN024BQB; Start 95; Stop 119
tgttgtatagattaggcatgatgtt

SEQ ID NO: 445396 - DNA, 25 bp, Artificial
  probe
  misc_feature (1)..(25): SEQ ID NO: 6657; WAN024BQB; Start 94; Stop 118
ttgttgtatagattaggcatgatgt

SEQ ID NO: 445397 - DNA, 25 bp, Artificial
  probe
  misc_feature (1)..(25): SEQ ID NO: 6657; WAN024BQB; Start 850; Stop 874
tctgattatgtcattcgattgcttg

SEQ ID NO: 445398 - DNA, 25 bp, Artificial
  probe
  misc_feature (1)..(25): SEQ ID NO: 6657; WAN024BQB; Start 848; Stop 872
catctgattatgtcattcgattgct

SEQ ID NO: 445399 - DNA, 25 bp, Artificial
  probe
  misc_feature (1)..(25): SEQ ID NO: 6657; WAN024BQB; Start 847; Stop 871
tcatctgattatgtcattcgattgc

SEQ ID NO: 445400 - DNA, 25 bp, Artificial
  probe
  misc_feature (1)..(25): SEQ ID NO: 6657; WAN024BQB; Start 773; Stop 797
ttagcaatcgtacctatatctggtc

SEQ ID NO: 445401 - DNA, 25 bp, Artificial
  probe
  misc_feature (1)..(25): SEQ ID NO: 6657; WAN024BQB; Start 92; Stop 116
acttgttgtatagattaggcatgat

SEQ ID NO: 445402 - DNA, 25 bp, Artificial
  probe
  misc_feature (1)..(25): SEQ ID NO: 6657; WAN024BQB; Start 851; Stop 875
ctgattatgtcattcgattgcttgg

SEQ ID NO: 445403 - DNA, 25 bp, Artificial
  probe
  misc_feature (1)..(25): SEQ ID NO: 6657; WAN024BQB; Start 93; Stop 117
cttgttgtatagattaggcatgatg

SEQ ID NO: 445404 - DNA, 25 bp, Artificial
  probe
  misc_feature (1)..(25): SEQ ID NO: 6658; WAN024BBR; Start 13; Stop 37
attgatcgttacggaatagagttcg

SEQ ID NO: 445405 - DNA, 25 bp, Artificial
  probe
  misc_feature (1)..(25): SEQ ID NO: 6658; WAN024BBR; Start 17; Stop 41
atcgttacggaatagagttcgtcaa

SEQ ID NO: 445406 - DNA, 25 bp, Artificial
  probe
  misc_feature (1)..(25): SEQ ID NO: 6658; WAN024BBR; Start 14; Stop 38
ttgatcgttacggaatagagttcgt

SEQ ID NO: 445407 - DNA, 25 bp, Artificial
  probe
  misc_feature (1)..(25): SEQ ID NO: 6658; WAN024BBR; Start 16; Stop 40
gatcgttacggaatagagttcgtca

SEQ ID NO: 445408 - DNA, 25 bp, Artificial
  probe
  misc_feature (1)..(25): SEQ ID NO: 6658; WAN024BBR; Start 15; Stop 39
tgatcgttacggaatagagttcgtc

SEQ ID NO: 445409 - DNA, 25 bp, Artificial
  probe
  misc_feature (1)..(25): SEQ ID NO: 6658; WAN024BBR; Start 18; Stop 42
tcgttacggaatagagttcgtcaaa

SEQ ID NO: 445410 - DNA, 25 bp, Artificial
  probe
  misc_feature (1)..(25): SEQ ID NO: 6658; WAN024BBR; Start 19; Stop 43
cgttacggaatagagttcgtcaaaa

SEQ ID NO: 445411 - DNA, 25 bp, Artificial
  probe
  misc_feature (1)..(25): SEQ ID NO: 6658; WAN024BBR; Start 65; Stop 89
ctcctgatttaaaacaagaaatgat

SEQ ID NO: 445412 - DNA, 25 bp, Artificial
  probe
  misc_feature (1)..(25): SEQ ID NO: 6659; WAN024BPT; Start 401; Stop 425
atacacataggaagagaccgaacta

SEQ ID NO: 445413 - DNA, 25 bp, Artificial
  probe
  misc_feature (1)..(25): SEQ ID NO: 6659; WAN024BPT; Start 399; Stop 423
taatacacataggaagagaccgaac

SEQ ID NO: 445414 - DNA, 25 bp, Artificial
  probe
  misc_feature (1)..(25): SEQ ID NO: 6659; WAN024BPT; Start 398; Stop 422
gtaatacacataggaagagaccgaa

SEQ ID NO: 445415 - DNA, 25 bp, Artificial
  probe
  misc_feature (1)..(25): SEQ ID NO: 6659; WAN024BPT; Start 393; Stop 417
aggtcgtaatacacataggaagaga

SEQ ID NO: 445416 - DNA, 25 bp, Artificial
  probe
  misc_feature (1)..(25): SEQ ID NO: 6659; WAN024BPT; Start 400; Stop 424
aatacacataggaagagaccgaact

SEQ ID NO: 445417 - DNA, 25 bp, Artificial
  probe
  misc_feature (1)..(25): SEQ ID NO: 6659; WAN024BPT; Start 392; Stop 416
taggtcgtaatacacataggaagag

SEQ ID NO: 445418 - DNA, 25 bp, Artificial
  probe
  misc_feature (1)..(25): SEQ ID NO: 6659; WAN024BPT; Start 397; Stop 421
cgtaatacacataggaagagaccga

SEQ ID NO: 445419 - DNA, 25 bp, Artificial
  probe
  misc_feature (1)..(25): SEQ ID NO: 6659; WAN024BPT; Start 396; Stop 420
tcgtaatacacataggaagagaccg

SEQ ID NO: 445420 - DNA, 25 bp, Artificial
  probe
  misc_feature (1)..(25): SEQ ID NO: 6659; WAN024BPT; Start 117; Stop 141
agatgacggttcaacagataatact

SEQ ID NO: 445421 - DNA, 25 bp, Artificial
  probe
  misc_feature (1)..(25): SEQ ID NO: 6659; WAN024BPT; Start 113; Stop 137
ttagagatgacggttcaacagataa

SEQ ID NO: 445422 - DNA, 25 bp, Artificial
  probe
  misc_feature (1)..(25): SEQ ID NO: 6659; WAN024BPT; Start 110; Stop 134
ttattagagatgacggttcaacaga

SEQ ID NO: 445423 - DNA, 25 bp, Artificial
  probe
  misc_feature (1)..(25): SEQ ID NO: 6659; WAN024BPT; Start 719; Stop 743
ttagtatgtacgatcaagcagagtg

SEQ ID NO: 445424 - DNA, 25 bp, Artificial
  probe
  misc_feature (1)..(25): SEQ ID NO: 6659; WAN024BPT; Start 116; Stop 140
gagatgacggttcaacagataatac

SEQ ID NO: 445425 - DNA, 25 bp, Artificial
  probe
  misc_feature (1)..(25): SEQ ID NO: 6659; WAN024BPT; Start 115; Stop 139
agagatgacggttcaacagataata

SEQ ID NO: 445426 - DNA, 25 bp, Artificial
  probe
  misc_feature (1)..(25): SEQ ID NO: 6659; WAN024BPT; Start 114; Stop 138
tagagatgacggttcaacagataat

SEQ ID NO: 445427 - DNA, 25 bp, Artificial
  probe
  misc_feature (1)..(25): SEQ ID NO: 6659; WAN024BPT; Start 112; Stop 136
attagagatgacggttcaacagata

SEQ ID NO: 445428 - DNA, 25 bp, Artificial
  probe
  misc_feature (1)..(25): SEQ ID NO: 6659; WAN024BPT; Start 111; Stop 135
tattagagatgacggttcaacagat

SEQ ID NO: 445429 - DNA, 25 bp, Artificial
  probe
  misc_feature (1)..(25): SEQ ID NO: 6659; WAN024BPT; Start 714; Stop 738
aacgattagtatgtacgatcaagca

SEQ ID NO: 445430 - DNA, 25 bp, Artificial
  probe
  misc_feature (1)..(25): SEQ ID NO: 6659; WAN024BPT; Start 713; Stop 737
gaacgattagtatgtacgatcaagc

SEQ ID NO: 445431 - DNA, 25 bp, Artificial
  probe
  misc_feature (1)..(25): SEQ ID NO: 6659; WAN024BPT; Start 718; Stop 742
attagtatgtacgatcaagcagagt

SEQ ID NO: 445432 - DNA, 25 bp, Artificial
  probe
  misc_feature (1)..(25): SEQ ID NO: 6659; WAN024BPT; Start 716; Stop 740
cgattagtatgtacgatcaagcaga

SEQ ID NO: 445433 - DNA, 25 bp, Artificial
  probe
  misc_feature (1)..(25): SEQ ID NO: 6659; WAN024BPT; Start 712; Stop 736
cgaacgattagtatgtacgatcaag

SEQ ID NO: 445434 - DNA, 25 bp, Artificial
  probe
  misc_feature (1)..(25): SEQ ID NO: 6659; WAN024BPT; Start 391; Stop 415
ataggtcgtaatacacataggaaga

SEQ ID NO: 445435 - DNA, 25 bp, Artificial
  probe
  misc_feature (1)..(25): SEQ ID NO: 6659; WAN024BPT; Start 715; Stop 739
acgattagtatgtacgatcaagcag

SEQ ID NO: 445436 - DNA, 25 bp, Artificial
  probe
  misc_feature (1)..(25): SEQ ID NO: 6659; WAN024BPT; Start 414; Stop 438
gagaccgaactatactcttgaatct

SEQ ID NO: 445437 - DNA, 25 bp, Artificial
  probe
  misc_feature (1)..(25): SEQ ID NO: 6659; WAN024BPT; Start 405; Stop 429
acataggaagagaccgaactatact

SEQ ID NO: 445438 - DNA, 25 bp, Artificial
  probe
  misc_feature (1)..(25): SEQ ID NO: 6659; WAN024BPT; Start 404; Stop 428
cacataggaagagaccgaactatac

SEQ ID NO: 445439 - DNA, 25 bp, Artificial
  probe
  misc_feature (1)..(25): SEQ ID NO: 6659; WAN024BPT; Start 709; Stop 733
aagcgaacgattagtatgtacgatc

SEQ ID NO: 445440 - DNA, 25 bp, Artificial
  probe
  misc_feature (1)..(25): SEQ ID NO: 6659; WAN024BPT; Start 403; Stop 427
acacataggaagagaccgaactata

SEQ ID NO: 445441 - DNA, 25 bp, Artificial
  probe
  misc_feature (1)..(25): SEQ ID NO: 6659; WAN024BPT; Start 402; Stop 426
tacacataggaagagaccgaactat

SEQ ID NO: 445442 - DNA, 25 bp, Artificial
  probe
  misc_feature (1)..(25): SEQ ID NO: 6659; WAN024BPT; Start 406; Stop 430
cataggaagagaccgaactatactc

SEQ ID NO: 445443 - DNA, 25 bp, Artificial
  probe
  misc_feature (1)..(25): SEQ ID NO: 6659; WAN024BPT; Start 720; Stop 744
tagtatgtacgatcaagcagagtgt

SEQ ID NO: 445444 - DNA, 25 bp, Artificial
  probe
  misc_feature (1)..(25): SEQ ID NO: 6659; WAN024BPT; Start 717; Stop 741
gattagtatgtacgatcaagcagag

SEQ ID NO: 445445 - DNA, 25 bp, Artificial
  probe
  misc_feature (1)..(25): SEQ ID NO: 6660; WAN024BYA; Start 56; Stop 80
tgactgatacttatcctagcgattg

SEQ ID NO: 445446 - DNA, 25 bp, Artificial
  probe
  misc_feature (1)..(25): SEQ ID NO: 6660; WAN024BYA; Start 55; Stop 79
gtgactgatacttatcctagcgatt

SEQ ID NO: 445447 - DNA, 25 bp, Artificial
  probe
  misc_feature (1)..(25): SEQ ID NO: 6660; WAN024BYA; Start 52; Stop 76
aatgtgactgatacttatcctagcg

SEQ ID NO: 445448 - DNA, 25 bp, Artificial
  probe
  misc_feature (1)..(25): SEQ ID NO: 6660; WAN024BYA; Start 57; Stop 81
gactgatacttatcctagcgattgg

SEQ ID NO: 445449 - DNA, 25 bp, Artificial
  probe
  misc_feature (1)..(25): SEQ ID NO: 6660; WAN024BYA; Start 54; Stop 78
tgtgactgatacttatcctagcgat

SEQ ID NO: 445450 - DNA, 25 bp, Artificial
  probe
  misc_feature (1)..(25): SEQ ID NO: 6660; WAN024BYA; Start 53; Stop 77
atgtgactgatacttatcctagcga

SEQ ID NO: 445451 - DNA, 25 bp, Artificial
  probe
  misc_feature (1)..(25): SEQ ID NO: 6660; WAN024BYA; Start 44; Stop 68
tcgcagataatgtgactgatactta

SEQ ID NO: 445452 - DNA, 25 bp, Artificial
  probe
  misc_feature (1)..(25): SEQ ID NO: 6660; WAN024BYA; Start 43; Stop 67
gtcgcagataatgtgactgatactt

SEQ ID NO: 445453 - DNA, 25 bp, Artificial
  probe
  misc_feature (1)..(25): SEQ ID NO: 6660; WAN024BYA; Start 45; Stop 69
cgcagataatgtgactgatacttat

SEQ ID NO: 445454 - DNA, 25 bp, Artificial
  probe
  misc_feature (1)..(25): SEQ ID NO: 6660; WAN024BYA; Start 155; Stop 179
aatcatctatccgctataaggtgga

SEQ ID NO: 445455 - DNA, 25 bp, Artificial
  probe
  misc_feature (1)..(25): SEQ ID NO: 6660; WAN024BYA; Start 40; Stop 64
aaggtcgcagataatgtgactgata

SEQ ID NO: 445456 - DNA, 25 bp, Artificial
  probe
  misc_feature (1)..(25): SEQ ID NO: 6660; WAN024BYA; Start 154; Stop 178
aaatcatctatccgctataaggtgg

SEQ ID NO: 445457 - DNA, 25 bp, Artificial
  probe
  misc_feature (1)..(25): SEQ ID NO: 6660; WAN024BYA; Start 51; Stop 75
taatgtgactgatacttatcctagc

SEQ ID NO: 445458 - DNA, 25 bp, Artificial
  probe
  misc_feature (1)..(25): SEQ ID NO: 6660; WAN024BYA; Start 42; Stop 66
ggtcgcagataatgtgactgatact

SEQ ID NO: 445459 - DNA, 25 bp, Artificial
  probe
  misc_feature (1)..(25): SEQ ID NO: 6660; WAN024BYA; Start 41; Stop 65
aggtcgcagataatgtgactgatac

SEQ ID NO: 445460 - DNA, 25 bp, Artificial
  probe
  misc_feature (1)..(25): SEQ ID NO: 6660; WAN024BYA; Start 308; Stop 332
gctttgaaggtgtcgttgatttaga

SEQ ID NO: 445461 - DNA, 25 bp, Artificial
  probe
  misc_feature (1)..(25): SEQ ID NO: 6660; WAN024BYA; Start 58; Stop 82
actgatacttatcctagcgattggg

SEQ ID NO: 445462 - DNA, 25 bp, Artificial
  probe
  misc_feature (1)..(25): SEQ ID NO: 6660; WAN024BYA; Start 309; Stop 333
ctttgaaggtgtcgttgatttagac

SEQ ID NO: 445463 - DNA, 25 bp, Artificial
  probe
  misc_feature (1)..(25): SEQ ID NO: 6660; WAN024BYA; Start 310; Stop 334
tttgaaggtgtcgttgatttagact

SEQ ID NO: 445464 - DNA, 25 bp, Artificial
  probe
  misc_feature (1)..(25): SEQ ID NO: 6660; WAN024BYA; Start 311; Stop 335
ttgaaggtgtcgttgatttagactc

SEQ ID NO: 445465 - DNA, 25 bp, Artificial
  probe
  misc_feature (1)..(25): SEQ ID NO: 6660; WAN024BYA; Start 313; Stop 337
gaaggtgtcgttgatttagactcag

SEQ ID NO: 445466 - DNA, 25 bp, Artificial
  probe
  misc_feature (1)..(25): SEQ ID NO: 6660; WAN024BYA; Start 314; Stop 338
aaggtgtcgttgatttagactcaga

SEQ ID NO: 445467 - DNA, 25 bp, Artificial
  probe
  misc_feature (1)..(25): SEQ ID NO: 6660; WAN024BYA; Start 61; Stop 85
gatacttatcctagcgattgggaga

SEQ ID NO: 445468 - DNA, 25 bp, Artificial
  probe
  misc_feature (1)..(25): SEQ ID NO: 6660; WAN024BYA; Start 62; Stop 86
atacttatcctagcgattgggagac

SEQ ID NO: 445469 - DNA, 25 bp, Artificial
  probe
  misc_feature (1)..(25): SEQ ID NO: 6660; WAN024BYA; Start 60; Stop 84
tgatacttatcctagcgattgggag

SEQ ID NO: 445470 - DNA, 25 bp, Artificial
  probe
  misc_feature (1)..(25): SEQ ID NO: 6660; WAN024BYA; Start 59; Stop 83
ctgatacttatcctagcgattggga

SEQ ID NO: 445471 - DNA, 25 bp, Artificial
  probe
  misc_feature (1)..(25): SEQ ID NO: 6660; WAN024BYA; Start 312; Stop 336
tgaaggtgtcgttgatttagactca

SEQ ID NO: 445472 - DNA, 25 bp, Artificial
  probe
  misc_feature (1)..(25): SEQ ID NO: 6660; WAN024BYA; Start 322; Stop 346
gttgatttagactcagagcttgttt

SEQ ID NO: 445473 - DNA, 25 bp, Artificial
  probe
  misc_feature (1)..(25): SEQ ID NO: 6660; WAN024BYA; Start 315; Stop 339
aggtgtcgttgatttagactcagag

SEQ ID NO: 445474 - DNA, 25 bp, Artificial
  probe
  misc_feature (1)..(25): SEQ ID NO: 6660; WAN024BYA; Start 179; Stop 203
atatctttgatgataccagcactag

SEQ ID NO: 445475 - DNA, 25 bp, Artificial
  probe
  misc_feature (1)..(25): SEQ ID NO: 6660; WAN024BYA; Start 307; Stop 331
cgctttgaaggtgtcgttgatttag

SEQ ID NO: 445476 - DNA, 25 bp, Artificial
  probe
  misc_feature (1)..(25): SEQ ID NO: 6660; WAN024BYA; Start 165; Stop 189
ccgctataaggtggatatctttgat

SEQ ID NO: 445477 - DNA, 25 bp, Artificial
  probe
  misc_feature (1)..(25): SEQ ID NO: 6660; WAN024BYA; Start 156; Stop 180
atcatctatccgctataaggtggat

SEQ ID NO: 445478 - DNA, 25 bp, Artificial
  probe
  misc_feature (1)..(25): SEQ ID NO: 6661; WAN024BOY; Start 380; Stop 404
ttgatgaggttccagataatgagtc

SEQ ID NO: 445479 - DNA, 25 bp, Artificial
  probe
  misc_feature (1)..(25): SEQ ID NO: 6661; WAN024BOY; Start 159; Stop 183
ggatgacgatattgatgttggtatg

SEQ ID NO: 445480 - DNA, 25 bp, Artificial
  probe
  misc_feature (1)..(25): SEQ ID NO: 6661; WAN024BOY; Start 448; Stop 472
ttatatgtgatgaggatgttgccaa

SEQ ID NO: 445481 - DNA, 25 bp, Artificial
  probe
  misc_feature (1)..(25): SEQ ID NO: 6661; WAN024BOY; Start 446; Stop 470
agttatatgtgatgaggatgttgcc

SEQ ID NO: 445482 - DNA, 25 bp, Artificial
  probe
  misc_feature (1)..(25): SEQ ID NO: 6661; WAN024BOY; Start 445; Stop 469
aagttatatgtgatgaggatgttgc

SEQ ID NO: 445483 - DNA, 25 bp, Artificial
  probe
  misc_feature (1)..(25): SEQ ID NO: 6661; WAN024BOY; Start 447; Stop 471
gttatatgtgatgaggatgttgcca

SEQ ID NO: 445484 - DNA, 25 bp, Artificial
  probe
  misc_feature (1)..(25): SEQ ID NO: 6661; WAN024BOY; Start 161; Stop 185
atgacgatattgatgttggtatgac

SEQ ID NO: 445485 - DNA, 25 bp, Artificial
  probe
  misc_feature (1)..(25): SEQ ID NO: 6661; WAN024BOY; Start 160; Stop 184
gatgacgatattgatgttggtatga

SEQ ID NO: 445486 - DNA, 25 bp, Artificial
  probe
  misc_feature (1)..(25): SEQ ID NO: 6661; WAN024BOY; Start 382; Stop 406
gatgaggttccagataatgagtcag

SEQ ID NO: 445487 - DNA, 25 bp, Artificial
  probe
  misc_feature (1)..(25): SEQ ID NO: 6661; WAN024BOY; Start 383; Stop 407
atgaggttccagataatgagtcaga

SEQ ID NO: 445488 - DNA, 25 bp, Artificial
  probe
  misc_feature (1)..(25): SEQ ID NO: 6661; WAN024BOY; Start 384; Stop 408
tgaggttccagataatgagtcagaa

SEQ ID NO: 445489 - DNA, 25 bp, Artificial
  probe
  misc_feature (1)..(25): SEQ ID NO: 6661; WAN024BOY; Start 381; Stop 405
tgatgaggttccagataatgagtca

SEQ ID NO: 445490 - DNA, 25 bp, Artificial
  probe
  misc_feature (1)..(25): SEQ ID NO: 6661; WAN024BOY; Start 163; Stop 187
gacgatattgatgttggtatgacac

SEQ ID NO: 445491 - DNA, 25 bp, Artificial
  probe
  misc_feature (1)..(25): SEQ ID NO: 6661; WAN024BOY; Start 162; Stop 186
tgacgatattgatgttggtatgaca

SEQ ID NO: 445492 - DNA, 25 bp, Artificial
  probe
  misc_feature (1)..(25): SEQ ID NO: 6661; WAN024BOY; Start 757; Stop 781
cattatggtgagtacatgaagttgc

SEQ ID NO: 445493 - DNA, 25 bp, Artificial
  probe
  misc_feature (1)..(25): SEQ ID NO: 6661; WAN024BOY; Start 756; Stop 780
acattatggtgagtacatgaagttg

SEQ ID NO: 445494 - DNA, 25 bp, Artificial
  probe
  misc_feature (1)..(25): SEQ ID NO: 6661; WAN024BOY; Start 164; Stop 188
acgatattgatgttggtatgacacg

SEQ ID NO: 445495 - DNA, 25 bp, Artificial
  probe
  misc_feature (1)..(25): SEQ ID NO: 6661; WAN024BOY; Start 758; Stop 782
attatggtgagtacatgaagttgcc

SEQ ID NO: 445496 - DNA, 25 bp, Artificial
  probe
  misc_feature (1)..(25): SEQ ID NO: 6661; WAN024BOY; Start 449; Stop 473
tatatgtgatgaggatgttgccaac

SEQ ID NO: 445497 - DNA, 25 bp, Artificial
  probe
  misc_feature (1)..(25): SEQ ID NO: 6661; WAN024BOY; Start 746; Stop 770
acttgactacacattatggtgagta

SEQ ID NO: 445498 - DNA, 25 bp, Artificial
  probe
  misc_feature (1)..(25): SEQ ID NO: 6661; WAN024BOY; Start 745; Stop 769
tacttgactacacattatggtgagt

SEQ ID NO: 445499 - DNA, 25 bp, Artificial
  probe
  misc_feature (1)..(25): SEQ ID NO: 6661; WAN024BOY; Start 748; Stop 772
ttgactacacattatggtgagtaca

SEQ ID NO: 445500 - DNA, 25 bp, Artificial
  probe
  misc_feature (1)..(25): SEQ ID NO: 6661; WAN024BOY; Start 749; Stop 773
tgactacacattatggtgagtacat

SEQ ID NO: 445501 - DNA, 25 bp, Artificial
  probe
  misc_feature (1)..(25): SEQ ID NO: 6661; WAN024BOY; Start 754; Stop 778
acacattatggtgagtacatgaagt

SEQ ID NO: 445502 - DNA, 25 bp, Artificial
  probe
  misc_feature (1)..(25): SEQ ID NO: 6661; WAN024BOY; Start 747; Stop 771
cttgactacacattatggtgagtac

SEQ ID NO: 445503 - DNA, 25 bp, Artificial
  probe
  misc_feature (1)..(25): SEQ ID NO: 6661; WAN024BOY; Start 379; Stop 403
tttgatgaggttccagataatgagt

SEQ ID NO: 445504 - DNA, 25 bp, Artificial
  probe
  misc_feature (1)..(25): SEQ ID NO: 6661; WAN024BOY; Start 751; Stop 775
actacacattatggtgagtacatga

SEQ ID NO: 445505 - DNA, 25 bp, Artificial
  probe
  misc_feature (1)..(25): SEQ ID NO: 6661; WAN024BOY; Start 755; Stop 779
cacattatggtgagtacatgaagtt

SEQ ID NO: 445506 - DNA, 25 bp, Artificial
  probe
  misc_feature (1)..(25): SEQ ID NO: 6661; WAN024BOY; Start 158; Stop 182
gggatgacgatattgatgttggtat

SEQ ID NO: 445507 - DNA, 25 bp, Artificial
  probe
  misc_feature (1)..(25): SEQ ID NO: 6661; WAN024BOY; Start 750; Stop 774
gactacacattatggtgagtacatg

SEQ ID NO: 445508 - DNA, 25 bp, Artificial
  probe
  misc_feature (1)..(25): SEQ ID NO: 6661; WAN024BOY; Start 802; Stop 826
gggcatagaccatatttgattgatt

SEQ ID NO: 445509 - DNA, 25 bp, Artificial
  probe
  misc_feature (1)..(25): SEQ ID NO: 6661; WAN024BOY; Start 744; Stop 768
atacttgactacacattatggtgag

SEQ ID NO: 445510 - DNA, 25 bp, Artificial
  probe
  misc_feature (1)..(25): SEQ ID NO: 6661; WAN024BOY; Start 374; Stop 398
ttccatttgatgaggttccagataa

SEQ ID NO: 445511 - DNA, 25 bp, Artificial
  probe
  misc_feature (1)..(25): SEQ ID NO: 6662; WAN024BPM; Start 504; Stop 528
agtgacatctgtaatgctatcttct

SEQ ID NO: 445512 - DNA, 25 bp, Artificial
  probe
  misc_feature (1)..(25): SEQ ID NO: 6662; WAN024BPM; Start 810; Stop 834
ttcatcattaagtagtggttcagac

SEQ ID NO: 445513 - DNA, 25 bp, Artificial
  probe
  misc_feature (1)..(25): SEQ ID NO: 6662; WAN024BPM; Start 500; Stop 524
ccttagtgacatctgtaatgctatc

SEQ ID NO: 445514 - DNA, 25 bp, Artificial
  probe
  misc_feature (1)..(25): SEQ ID NO: 6662; WAN024BPM; Start 811; Stop 835
tcatcattaagtagtggttcagact

SEQ ID NO: 445515 - DNA, 25 bp, Artificial
  probe
  misc_feature (1)..(25): SEQ ID NO: 6662; WAN024BPM; Start 838; Stop 862
tctgctatacataggtcaatggctt

SEQ ID NO: 445516 - DNA, 25 bp, Artificial
  probe
  misc_feature (1)..(25): SEQ ID NO: 6662; WAN024BPM; Start 837; Stop 861
ttctgctatacataggtcaatggct

SEQ ID NO: 445517 - DNA, 25 bp, Artificial
  probe
  misc_feature (1)..(25): SEQ ID NO: 6662; WAN024BPM; Start 506; Stop 530
tgacatctgtaatgctatcttctac

SEQ ID NO: 445518 - DNA, 25 bp, Artificial
  probe
  misc_feature (1)..(25): SEQ ID NO: 6662; WAN024BPM; Start 505; Stop 529
gtgacatctgtaatgctatcttcta

SEQ ID NO: 445519 - DNA, 25 bp, Artificial
  probe
  misc_feature (1)..(25): SEQ ID NO: 6662; WAN024BPM; Start 503; Stop 527
tagtgacatctgtaatgctatcttc

SEQ ID NO: 445520 - DNA, 25 bp, Artificial
  probe
  misc_feature (1)..(25): SEQ ID NO: 6662; WAN024BPM; Start 501; Stop 525
cttagtgacatctgtaatgctatct

SEQ ID NO: 445521 - DNA, 25 bp, Artificial
  probe
  misc_feature (1)..(25): SEQ ID NO: 6662; WAN024BPM; Start 502; Stop 526
ttagtgacatctgtaatgctatctt

SEQ ID NO: 445522 - DNA, 25 bp, Artificial
  probe
  misc_feature (1)..(25): SEQ ID NO: 6662; WAN024BPM; Start 224; Stop 248
ttcaaggatatgatagtggtggtgc

SEQ ID NO: 445523 - DNA, 25 bp, Artificial
  probe
  misc_feature (1)..(25): SEQ ID NO: 6662; WAN024BPM; Start 643; Stop 667
gcgttgttgttctgttactatttca

SEQ ID NO: 445524 - DNA, 25 bp, Artificial
  probe
  misc_feature (1)..(25): SEQ ID NO: 6662; WAN024BPM; Start 764; Stop 788
taacaatttctggtcgtagcatttc

SEQ ID NO: 445525 - DNA, 25 bp, Artificial
  probe
  misc_feature (1)..(25): SEQ ID NO: 6662; WAN024BPM; Start 311; Stop 335
taccgcaatccaatttaataagagc

SEQ ID NO: 445526 - DNA, 25 bp, Artificial
  probe
  misc_feature (1)..(25): SEQ ID NO: 6662; WAN024BPM; Start 762; Stop 786
gataacaatttctggtcgtagcatt

SEQ ID NO: 445527 - DNA, 25 bp, Artificial
  probe
  misc_feature (1)..(25): SEQ ID NO: 6662; WAN024BPM; Start 313; Stop 337
ccgcaatccaatttaataagagcat

SEQ ID NO: 445528 - DNA, 25 bp, Artificial
  probe
  misc_feature (1)..(25): SEQ ID NO: 6662; WAN024BPM; Start 761; Stop 785
tgataacaatttctggtcgtagcat

SEQ ID NO: 445529 - DNA, 25 bp, Artificial
  probe
  misc_feature (1)..(25): SEQ ID NO: 6662; WAN024BPM; Start 760; Stop 784
atgataacaatttctggtcgtagca

SEQ ID NO: 445530 - DNA, 25 bp, Artificial
  probe
  misc_feature (1)..(25): SEQ ID NO: 6662; WAN024BPM; Start 763; Stop 787
ataacaatttctggtcgtagcattt

SEQ ID NO: 445531 - DNA, 25 bp, Artificial
  probe
  misc_feature (1)..(25): SEQ ID NO: 6662; WAN024BPM; Start 775; Stop 799
ggtcgtagcatttctcagatgataa

SEQ ID NO: 445532 - DNA, 25 bp, Artificial
  probe
  misc_feature (1)..(25): SEQ ID NO: 6662; WAN024BPM; Start 499; Stop 523
cccttagtgacatctgtaatgctat

SEQ ID NO: 445533 - DNA, 25 bp, Artificial
  probe
  misc_feature (1)..(25): SEQ ID NO: 6662; WAN024BPM; Start 759; Stop 783
tatgataacaatttctggtcgtagc

SEQ ID NO: 445534 - DNA, 25 bp, Artificial
  probe
  misc_feature (1)..(25): SEQ ID NO: 6662; WAN024BPM; Start 496; Stop 520
aatcccttagtgacatctgtaatgc

SEQ ID NO: 445535 - DNA, 25 bp, Artificial
  probe
  misc_feature (1)..(25): SEQ ID NO: 6662; WAN024BPM; Start 839; Stop 863
ctgctatacataggtcaatggcttt

SEQ ID NO: 445536 - DNA, 25 bp, Artificial
  probe
  misc_feature (1)..(25): SEQ ID NO: 6662; WAN024BPM; Start 836; Stop 860
tttctgctatacataggtcaatggc

SEQ ID NO: 445537 - DNA, 25 bp, Artificial
  probe
  misc_feature (1)..(25): SEQ ID NO: 6662; WAN024BPM; Start 498; Stop 522
tcccttagtgacatctgtaatgcta

SEQ ID NO: 445538 - DNA, 25 bp, Artificial
  probe
  misc_feature (1)..(25): SEQ ID NO: 6662; WAN024BPM; Start 765; Stop 789
aacaatttctggtcgtagcatttct

SEQ ID NO: 445539 - DNA, 25 bp, Artificial
  probe
  misc_feature (1)..(25): SEQ ID NO: 6662; WAN024BPM; Start 314; Stop 338
cgcaatccaatttaataagagcatt

SEQ ID NO: 445540 - DNA, 25 bp, Artificial
  probe
  misc_feature (1)..(25): SEQ ID NO: 6662; WAN024BPM; Start 223; Stop 247
tttcaaggatatgatagtggtggtg

SEQ ID NO: 445541 - DNA, 25 bp, Artificial
  probe
  misc_feature (1)..(25): SEQ ID NO: 6662; WAN024BPM; Start 776; Stop 800
gtcgtagcatttctcagatgataat

SEQ ID NO: 445542 - DNA, 25 bp, Artificial
  probe
  misc_feature (1)..(25): SEQ ID NO: 6662; WAN024BPM; Start 312; Stop 336
accgcaatccaatttaataagagca

SEQ ID NO: 445543 - DNA, 25 bp, Artificial
  probe
  misc_feature (1)..(25): SEQ ID NO: 6662; WAN024BPM; Start 408; Stop 432
atttgtgaatcattatactttggcg

SEQ ID NO: 445544 - DNA, 25 bp, Artificial
  probe
  misc_feature (1)..(25): SEQ ID NO: 6663; WAN024AWG; Start 147; Stop 171
ccatacacttaactacggtcacatc

SEQ ID NO: 445545 - DNA, 25 bp, Artificial
  probe
  misc_feature (1)..(25): SEQ ID NO: 6663; WAN024AWG; Start 548; Stop 572
ctgagtatgatgatgttgaggaagc

SEQ ID NO: 445546 - DNA, 25 bp, Artificial
  probe
  misc_feature (1)..(25): SEQ ID NO: 6663; WAN024AWG; Start 553; Stop 577
tatgatgatgttgaggaagcgacta

SEQ ID NO: 445547 - DNA, 25 bp, Artificial
  probe
  misc_feature (1)..(25): SEQ ID NO: 6663; WAN024AWG; Start 148; Stop 172
catacacttaactacggtcacatcg

SEQ ID NO: 445548 - DNA, 25 bp, Artificial
  probe
  misc_feature (1)..(25): SEQ ID NO: 6663; WAN024AWG; Start 540; Stop 564
cgactatcctgagtatgatgatgtt

SEQ ID NO: 445549 - DNA, 25 bp, Artificial
  probe
  misc_feature (1)..(25): SEQ ID NO: 6663; WAN024AWG; Start 543; Stop 567
ctatcctgagtatgatgatgttgag

SEQ ID NO: 445550 - DNA, 25 bp, Artificial
  probe
  misc_feature (1)..(25): SEQ ID NO: 6663; WAN024AWG; Start 707; Stop 731
aatctagcctcctcaacaatctctt

SEQ ID NO: 445551 - DNA, 25 bp, Artificial
  probe
  misc_feature (1)..(25): SEQ ID NO: 6663; WAN024AWG; Start 738; Stop 762
ggacaaggctatcgttacagatatt

SEQ ID NO: 445552 - DNA, 25 bp, Artificial
  probe
  misc_feature (1)..(25): SEQ ID NO: 6663; WAN024AWG; Start 542; Stop 566
actatcctgagtatgatgatgttga

SEQ ID NO: 445553 - DNA, 25 bp, Artificial
  probe
  misc_feature (1)..(25): SEQ ID NO: 6663; WAN024AWG; Start 739; Stop 763
gacaaggctatcgttacagatattg

SEQ ID NO: 445554 - DNA, 25 bp, Artificial
  probe
  misc_feature (1)..(25): SEQ ID NO: 6663; WAN024AWG; Start 144; Stop 168
tagccatacacttaactacggtcac

SEQ ID NO: 445555 - DNA, 25 bp, Artificial
  probe
  misc_feature (1)..(25): SEQ ID NO: 6663; WAN024AWG; Start 741; Stop 765
caaggctatcgttacagatattgct

SEQ ID NO: 445556 - DNA, 25 bp, Artificial
  probe
  misc_feature (1)..(25): SEQ ID NO: 6663; WAN024AWG; Start 410; Stop 434
atatcatccgtgctaagacagataa

SEQ ID NO: 445557 - DNA, 25 bp, Artificial
  probe
  misc_feature (1)..(25): SEQ ID NO: 6663; WAN024AWG; Start 143; Stop 167
ctagccatacacttaactacggtca

SEQ ID NO: 445558 - DNA, 25 bp, Artificial
  probe
  misc_feature (1)..(25): SEQ ID NO: 6663; WAN024AWG; Start 541; Stop 565
gactatcctgagtatgatgatgttg

SEQ ID NO: 445559 - DNA, 25 bp, Artificial
  probe
  misc_feature (1)..(25): SEQ ID NO: 6663; WAN024AWG; Start 745; Stop 769
gctatcgttacagatattgctggta

SEQ ID NO: 445560 - DNA, 25 bp, Artificial
  probe
  misc_feature (1)..(25): SEQ ID NO: 6663; WAN024AWG; Start 737; Stop 761
aggacaaggctatcgttacagatat

SEQ ID NO: 445561 - DNA, 25 bp, Artificial
  probe
  misc_feature (1)..(25): SEQ ID NO: 6663; WAN024AWG; Start 740; Stop 764
acaaggctatcgttacagatattgc

SEQ ID NO: 445562 - DNA, 25 bp, Artificial
  probe
  misc_feature (1)..(25): SEQ ID NO: 6663; WAN024AWG; Start 1315; Stop 1339
gatgctgctccagatgaacttatta

SEQ ID NO: 445563 - DNA, 25 bp, Artificial
  probe
  misc_feature (1)..(25): SEQ ID NO: 6663; WAN024AWG; Start 742; Stop 766
aaggctatcgttacagatattgctg

SEQ ID NO: 445564 - DNA, 25 bp, Artificial
  probe
  misc_feature (1)..(25): SEQ ID NO: 6663; WAN024AWG; Start 1316; Stop 1340
atgctgctccagatgaacttattac

SEQ ID NO: 445565 - DNA, 25 bp, Artificial
  probe
  misc_feature (1)..(25): SEQ ID NO: 6663; WAN024AWG; Start 544; Stop 568
tatcctgagtatgatgatgttgagg

SEQ ID NO: 445566 - DNA, 25 bp, Artificial
  probe
  misc_feature (1)..(25): SEQ ID NO: 6663; WAN024AWG; Start 736; Stop 760
gaggacaaggctatcgttacagata

SEQ ID NO: 445567 - DNA, 25 bp, Artificial
  probe
  misc_feature (1)..(25): SEQ ID NO: 6663; WAN024AWG; Start 547; Stop 571
cctgagtatgatgatgttgaggaag

SEQ ID NO: 445568 - DNA, 25 bp, Artificial
  probe
  misc_feature (1)..(25): SEQ ID NO: 6663; WAN024AWG; Start 550; Stop 574
gagtatgatgatgttgaggaagcga

SEQ ID NO: 445569 - DNA, 25 bp, Artificial
  probe
  misc_feature (1)..(25): SEQ ID NO: 6663; WAN024AWG; Start 708; Stop 732
atctagcctcctcaacaatctcttg

SEQ ID NO: 445570 - DNA, 25 bp, Artificial
  probe
  misc_feature (1)..(25): SEQ ID NO: 6663; WAN024AWG; Start 746; Stop 770
ctatcgttacagatattgctggtac

SEQ ID NO: 445571 - DNA, 25 bp, Artificial
  probe
  misc_feature (1)..(25): SEQ ID NO: 6663; WAN024AWG; Start 146; Stop 170
gccatacacttaactacggtcacat

SEQ ID NO: 445572 - DNA, 25 bp, Artificial
  probe
  misc_feature (1)..(25): SEQ ID NO: 6663; WAN024AWG; Start 554; Stop 578
atgatgatgttgaggaagcgactac

SEQ ID NO: 445573 - DNA, 25 bp, Artificial
  probe
  misc_feature (1)..(25): SEQ ID NO: 6663; WAN024AWG; Start 552; Stop 576
gtatgatgatgttgaggaagcgact

SEQ ID NO: 445574 - DNA, 25 bp, Artificial
  probe
  misc_feature (1)..(25): SEQ ID NO: 6663; WAN024AWG; Start 551; Stop 575
agtatgatgatgttgaggaagcgac

SEQ ID NO: 445575 - DNA, 25 bp, Artificial
  probe
  misc_feature (1)..(25): SEQ ID NO: 6663; WAN024AWG; Start 549; Stop 573
tgagtatgatgatgttgaggaagcg

SEQ ID NO: 445576 - DNA, 25 bp, Artificial
  probe
  misc_feature (1)..(25): SEQ ID NO: 6663; WAN024AWG; Start 1332; Stop 1356
acttattacccaactctttagccaa

SEQ ID NO: 445577 - DNA, 25 bp, Artificial
  probe
  misc_feature (1)..(25): SEQ ID NO: 6664; WAN024BQX; Start 232; Stop 256
tccatcctcatcacctatatcaaga

SEQ ID NO: 445578 - DNA, 25 bp, Artificial
  probe
  misc_feature (1)..(25): SEQ ID NO: 6664; WAN024BQX; Start 231; Stop 255
ttccatcctcatcacctatatcaag

SEQ ID NO: 445579 - DNA, 25 bp, Artificial
  probe
  misc_feature (1)..(25): SEQ ID NO: 6664; WAN024BQX; Start 230; Stop 254
cttccatcctcatcacctatatcaa

SEQ ID NO: 445580 - DNA, 25 bp, Artificial
  probe
  misc_feature (1)..(25): SEQ ID NO: 6664; WAN024BQX; Start 23; Stop 47
gattacagcaattccacttcttaca

SEQ ID NO: 445581 - DNA, 25 bp, Artificial
  probe
  misc_feature (1)..(25): SEQ ID NO: 6664; WAN024BQX; Start 24; Stop 48
attacagcaattccacttcttacaa

SEQ ID NO: 445582 - DNA, 25 bp, Artificial
  probe
  misc_feature (1)..(25): SEQ ID NO: 6664; WAN024BQX; Start 229; Stop 253
gcttccatcctcatcacctatatca

SEQ ID NO: 445583 - DNA, 25 bp, Artificial
  probe
  misc_feature (1)..(25): SEQ ID NO: 6664; WAN024BQX; Start 248; Stop 272
atatcaagagcaactccatcatcaa

SEQ ID NO: 445584 - DNA, 25 bp, Artificial
  probe
  misc_feature (1)..(25): SEQ ID NO: 6664; WAN024BQX; Start 245; Stop 269
cctatatcaagagcaactccatcat

SEQ ID NO: 445585 - DNA, 25 bp, Artificial
  probe
  misc_feature (1)..(25): SEQ ID NO: 6664; WAN024BQX; Start 239; Stop 263
tcatcacctatatcaagagcaactc

SEQ ID NO: 445586 - DNA, 25 bp, Artificial
  probe
  misc_feature (1)..(25): SEQ ID NO: 6664; WAN024BQX; Start 238; Stop 262
ctcatcacctatatcaagagcaact

SEQ ID NO: 445587 - DNA, 25 bp, Artificial
  probe
  misc_feature (1)..(25): SEQ ID NO: 6664; WAN024BQX; Start 233; Stop 257
ccatcctcatcacctatatcaagag

SEQ ID NO: 445588 - DNA, 25 bp, Artificial
  probe
  misc_feature (1)..(25): SEQ ID NO: 6664; WAN024BQX; Start 234; Stop 258
catcctcatcacctatatcaagagc

SEQ ID NO: 445589 - DNA, 25 bp, Artificial
  probe
  misc_feature (1)..(25): SEQ ID NO: 6664; WAN024BQX; Start 249; Stop 273
tatcaagagcaactccatcatcaag

SEQ ID NO: 445590 - DNA, 25 bp, Artificial
  probe
  misc_feature (1)..(25): SEQ ID NO: 6664; WAN024BQX; Start 235; Stop 259
atcctcatcacctatatcaagagca

SEQ ID NO: 445591 - DNA, 25 bp, Artificial
  probe
  misc_feature (1)..(25): SEQ ID NO: 6664; WAN024BQX; Start 247; Stop 271
tatatcaagagcaactccatcatca

SEQ ID NO: 445592 - DNA, 25 bp, Artificial
  probe
  misc_feature (1)..(25): SEQ ID NO: 6664; WAN024BQX; Start 243; Stop 267
cacctatatcaagagcaactccatc

SEQ ID NO: 445593 - DNA, 25 bp, Artificial
  probe
  misc_feature (1)..(25): SEQ ID NO: 6664; WAN024BQX; Start 240; Stop 264
catcacctatatcaagagcaactcc

SEQ ID NO: 445594 - DNA, 25 bp, Artificial
  probe
  misc_feature (1)..(25): SEQ ID NO: 6664; WAN024BQX; Start 237; Stop 261
cctcatcacctatatcaagagcaac

SEQ ID NO: 445595 - DNA, 25 bp, Artificial
  probe
  misc_feature (1)..(25): SEQ ID NO: 6664; WAN024BQX; Start 236; Stop 260
tcctcatcacctatatcaagagcaa

SEQ ID NO: 445596 - DNA, 25 bp, Artificial
  probe
  misc_feature (1)..(25): SEQ ID NO: 6664; WAN024BQX; Start 244; Stop 268
acctatatcaagagcaactccatca

SEQ ID NO: 445597 - DNA, 25 bp, Artificial
  probe
  misc_feature (1)..(25): SEQ ID NO: 6664; WAN024BQX; Start 242; Stop 266
tcacctatatcaagagcaactccat

SEQ ID NO: 445598 - DNA, 25 bp, Artificial
  probe
  misc_feature (1)..(25): SEQ ID NO: 6664; WAN024BQX; Start 241; Stop 265
atcacctatatcaagagcaactcca

SEQ ID NO: 445599 - DNA, 25 bp, Artificial
  probe
  misc_feature (1)..(25): SEQ ID NO: 6664; WAN024BQX; Start 246; Stop 270
ctatatcaagagcaactccatcatc

SEQ ID NO: 445600 - DNA, 25 bp, Artificial
  probe
  misc_feature (1)..(25): SEQ ID NO: 6664; WAN024BQX; Start 227; Stop 251
tagcttccatcctcatcacctatat

SEQ ID NO: 445601 - DNA, 25 bp, Artificial
  probe
  misc_feature (1)..(25): SEQ ID NO: 6664; WAN024BQX; Start 22; Stop 46
ggattacagcaattccacttcttac

SEQ ID NO: 445602 - DNA, 25 bp, Artificial
  probe
  misc_feature (1)..(25): SEQ ID NO: 6664; WAN024BQX; Start 226; Stop 250
ttagcttccatcctcatcacctata

SEQ ID NO: 445603 - DNA, 25 bp, Artificial
  probe
  misc_feature (1)..(25): SEQ ID NO: 6664; WAN024BQX; Start 629; Stop 653
cctatctctatgccaatagcctctg

SEQ ID NO: 445604 - DNA, 25 bp, Artificial
  probe
  misc_feature (1)..(25): SEQ ID NO: 6664; WAN024BQX; Start 250; Stop 274
atcaagagcaactccatcatcaaga

SEQ ID NO: 445605 - DNA, 25 bp, Artificial
  probe
  misc_feature (1)..(25): SEQ ID NO: 6664; WAN024BQX; Start 228; Stop 252
agcttccatcctcatcacctatatc

SEQ ID NO: 445606 - DNA, 25 bp, Artificial
  probe
  misc_feature (1)..(25): SEQ ID NO: 6664; WAN024BQX; Start 795; Stop 819
tcctaagcagagaaagaataagcac

SEQ ID NO: 445607 - DNA, 25 bp, Artificial
  probe
  misc_feature (1)..(25): SEQ ID NO: 6664; WAN024BQX; Start 708; Stop 732
ctttatcggctacagtttcaacatc

SEQ ID NO: 445608 - DNA, 25 bp, Artificial
  probe
  misc_feature (1)..(25): SEQ ID NO: 6664; WAN024BQX; Start 707; Stop 731
tctttatcggctacagtttcaacat

SEQ ID NO: 445609 - DNA, 25 bp, Artificial
  probe
  misc_feature (1)..(25): SEQ ID NO: 6664; WAN024BQX; Start 177; Stop 201
ctttatcctgggcatcaatttcttt

SEQ ID NO: 445610 - DNA, 25 bp, Artificial
  probe
  misc_feature (1)..(25): SEQ ID NO: 6665; WAN024BWJ; Start 61; Stop 85
aatgatatggattaccggattgcga

SEQ ID NO: 445611 - DNA, 25 bp, Artificial
  probe
  misc_feature (1)..(25): SEQ ID NO: 6665; WAN024BWJ; Start 62; Stop 86
atgatatggattaccggattgcgag

SEQ ID NO: 445612 - DNA, 25 bp, Artificial
  probe
  misc_feature (1)..(25): SEQ ID NO: 6665; WAN024BWJ; Start 64; Stop 88
gatatggattaccggattgcgagag

SEQ ID NO: 445613 - DNA, 25 bp, Artificial
  probe
  misc_feature (1)..(25): SEQ ID NO: 6665; WAN024BWJ; Start 65; Stop 89
atatggattaccggattgcgagaga

SEQ ID NO: 445614 - DNA, 25 bp, Artificial
  probe
  misc_feature (1)..(25): SEQ ID NO: 6665; WAN024BWJ; Start 60; Stop 84
aaatgatatggattaccggattgcg

SEQ ID NO: 445615 - DNA, 25 bp, Artificial
  probe
  misc_feature (1)..(25): SEQ ID NO: 6665; WAN024BWJ; Start 63; Stop 87
tgatatggattaccggattgcgaga

SEQ ID NO: 445616 - DNA, 25 bp, Artificial
  probe
  misc_feature (1)..(25): SEQ ID NO: 6665; WAN024BWJ; Start 66; Stop 90
tatggattaccggattgcgagagag

SEQ ID NO: 445617 - DNA, 25 bp, Artificial
  probe
  misc_feature (1)..(25): SEQ ID NO: 6665; WAN024BWJ; Start 59; Stop 83
aaaatgatatggattaccggattgc

SEQ ID NO: 445618 - DNA, 25 bp, Artificial
  probe
  misc_feature (1)..(25): SEQ ID NO: 6665; WAN024BWJ; Start 37; Stop 61
cgatttatgtcgagtctatgcaaaa

SEQ ID NO: 445619 - DNA, 25 bp, Artificial
  probe
  misc_feature (1)..(25): SEQ ID NO: 6665; WAN024BWJ; Start 36; Stop 60
tcgatttatgtcgagtctatgcaaa

SEQ ID NO: 445620 - DNA, 25 bp, Artificial
  probe
  misc_feature (1)..(25): SEQ ID NO: 6665; WAN024BWJ; Start 35; Stop 59
atcgatttatgtcgagtctatgcaa

SEQ ID NO: 445621 - DNA, 25 bp, Artificial
  probe
  misc_feature (1)..(25): SEQ ID NO: 6665; WAN024BWJ; Start 34; Stop 58
tatcgatttatgtcgagtctatgca

SEQ ID NO: 445622 - DNA, 25 bp, Artificial
  probe
  misc_feature (1)..(25): SEQ ID NO: 6665; WAN024BWJ; Start 33; Stop 57
atatcgatttatgtcgagtctatgc

SEQ ID NO: 445623 - DNA, 25 bp, Artificial
  probe
  misc_feature (1)..(25): SEQ ID NO: 6665; WAN024BWJ; Start 32; Stop 56
aatatcgatttatgtcgagtctatg

SEQ ID NO: 445624 - DNA, 25 bp, Artificial
  probe
  misc_feature (1)..(25): SEQ ID NO: 6665; WAN024BWJ; Start 31; Stop 55
aaatatcgatttatgtcgagtctat

SEQ ID NO: 445625 - DNA, 25 bp, Artificial
  probe
  misc_feature (1)..(25): SEQ ID NO: 6665; WAN024BWJ; Start 30; Stop 54
aaaatatcgatttatgtcgagtcta

SEQ ID NO: 445626 - DNA, 25 bp, Artificial
  probe
  misc_feature (1)..(25): SEQ ID NO: 6666; WAN024AWR; Start 377; Stop 401
ataattgtatagggatgacttgggc

SEQ ID NO: 445627 - DNA, 25 bp, Artificial
  probe
  misc_feature (1)..(25): SEQ ID NO: 6666; WAN024AWR; Start 342; Stop 366
ttatcgttctatgggctttgaaatc

SEQ ID NO: 445628 - DNA, 25 bp, Artificial
  probe
  misc_feature (1)..(25): SEQ ID NO: 6666; WAN024AWR; Start 246; Stop 270
gattggtagtgccctaatgaaagag

SEQ ID NO: 445629 - DNA, 25 bp, Artificial
  probe
  misc_feature (1)..(25): SEQ ID NO: 6666; WAN024AWR; Start 282; Stop 306
ttacaaagatgcttatcaagtccag

SEQ ID NO: 445630 - DNA, 25 bp, Artificial
  probe
  misc_feature (1)..(25): SEQ ID NO: 6666; WAN024AWR; Start 341; Stop 365
tttatcgttctatgggctttgaaat

SEQ ID NO: 445631 - DNA, 25 bp, Artificial
  probe
  misc_feature (1)..(25): SEQ ID NO: 6666; WAN024AWR; Start 116; Stop 140
cgcattcattagtaatttatctggc

SEQ ID NO: 445632 - DNA, 25 bp, Artificial
  probe
  misc_feature (1)..(25): SEQ ID NO: 6666; WAN024AWR; Start 281; Stop 305
attacaaagatgcttatcaagtcca

SEQ ID NO: 445633 - DNA, 25 bp, Artificial
  probe
  misc_feature (1)..(25): SEQ ID NO: 6666; WAN024AWR; Start 109; Stop 133
gccttatcgcattcattagtaattt

SEQ ID NO: 445634 - DNA, 25 bp, Artificial
  probe
  misc_feature (1)..(25): SEQ ID NO: 6666; WAN024AWR; Start 280; Stop 304
gattacaaagatgcttatcaagtcc

SEQ ID NO: 445635 - DNA, 25 bp, Artificial
  probe
  misc_feature (1)..(25): SEQ ID NO: 6666; WAN024AWR; Start 245; Stop 269
ggattggtagtgccctaatgaaaga

SEQ ID NO: 445636 - DNA, 25 bp, Artificial
  probe
  misc_feature (1)..(25): SEQ ID NO: 6666; WAN024AWR; Start 378; Stop 402
taattgtatagggatgacttgggcg

SEQ ID NO: 445637 - DNA, 25 bp, Artificial
  probe
  misc_feature (1)..(25): SEQ ID NO: 6666; WAN024AWR; Start 117; Stop 141
gcattcattagtaatttatctggca

SEQ ID NO: 445638 - DNA, 25 bp, Artificial
  probe
  misc_feature (1)..(25): SEQ ID NO: 6666; WAN024AWR; Start 108; Stop 132
tgccttatcgcattcattagtaatt

SEQ ID NO: 445639 - DNA, 25 bp, Artificial
  probe
  misc_feature (1)..(25): SEQ ID NO: 6666; WAN024AWR; Start 222; Stop 246
tttaccaatctatcagcgtcaaggg

SEQ ID NO: 445640 - DNA, 25 bp, Artificial
  probe
  misc_feature (1)..(25): SEQ ID NO: 6666; WAN024AWR; Start 376; Stop 400
tataattgtatagggatgacttggg

SEQ ID NO: 445641 - DNA, 25 bp, Artificial
  probe
  misc_feature (1)..(25): SEQ ID NO: 6666; WAN024AWR; Start 115; Stop 139
tcgcattcattagtaatttatctgg

SEQ ID NO: 445642 - DNA, 25 bp, Artificial
  probe
  misc_feature (1)..(25): SEQ ID NO: 6666; WAN024AWR; Start 279; Stop 303
agattacaaagatgcttatcaagtc

SEQ ID NO: 445643 - DNA, 25 bp, Artificial
  probe
  misc_feature (1)..(25): SEQ ID NO: 6666; WAN024AWR; Start 224; Stop 248
taccaatctatcagcgtcaagggat

SEQ ID NO: 445644 - DNA, 25 bp, Artificial
  probe
  misc_feature (1)..(25): SEQ ID NO: 6666; WAN024AWR; Start 247; Stop 271
attggtagtgccctaatgaaagagg

SEQ ID NO: 445645 - DNA, 25 bp, Artificial
  probe
  misc_feature (1)..(25): SEQ ID NO: 6666; WAN024AWR; Start 223; Stop 247
ttaccaatctatcagcgtcaaggga

SEQ ID NO: 445646 - DNA, 25 bp, Artificial
  probe
  misc_feature (1)..(25): SEQ ID NO: 6666; WAN024AWR; Start 278; Stop 302
aagattacaaagatgcttatcaagt

SEQ ID NO: 445647 - DNA, 25 bp, Artificial
  probe
  misc_feature (1)..(25): SEQ ID NO: 6666; WAN024AWR; Start 283; Stop 307
tacaaagatgcttatcaagtccagc

SEQ ID NO: 445648 - DNA, 25 bp, Artificial
  probe
  misc_feature (1)..(25): SEQ ID NO: 6666; WAN024AWR; Start 229; Stop 253
atctatcagcgtcaagggattggta

SEQ ID NO: 445649 - DNA, 25 bp, Artificial
  probe
  misc_feature (1)..(25): SEQ ID NO: 6666; WAN024AWR; Start 337; Stop 361
ggattttatcgttctatgggctttg

SEQ ID NO: 445650 - DNA, 25 bp, Artificial
  probe
  misc_feature (1)..(25): SEQ ID NO: 6666; WAN024AWR; Start 338; Stop 362
gattttatcgttctatgggctttga

SEQ ID NO: 445651 - DNA, 25 bp, Artificial
  probe
  misc_feature (1)..(25): SEQ ID NO: 6666; WAN024AWR; Start 219; Stop 243
tgttttaccaatctatcagcgtcaa

SEQ ID NO: 445652 - DNA, 25 bp, Artificial
  probe
  misc_feature (1)..(25): SEQ ID NO: 6666; WAN024AWR; Start 381; Stop 405
ttgtatagggatgacttgggcgaat

SEQ ID NO: 445653 - DNA, 25 bp, Artificial
  probe
  misc_feature (1)..(25): SEQ ID NO: 6666; WAN024AWR; Start 380; Stop 404
attgtatagggatgacttgggcgaa

SEQ ID NO: 445654 - DNA, 25 bp, Artificial
  probe
  misc_feature (1)..(25): SEQ ID NO: 6666; WAN024AWR; Start 340; Stop 364
ttttatcgttctatgggctttgaaa

SEQ ID NO: 445655 - DNA, 25 bp, Artificial
  probe
  misc_feature (1)..(25): SEQ ID NO: 6666; WAN024AWR; Start 336; Stop 360
gggattttatcgttctatgggcttt

SEQ ID NO: 445656 - DNA, 25 bp, Artificial
  probe
  misc_feature (1)..(25): SEQ ID NO: 6666; WAN024AWR; Start 339; Stop 363
attttatcgttctatgggctttgaa

SEQ ID NO: 445657 - DNA, 25 bp, Artificial
  probe
  misc_feature (1)..(25): SEQ ID NO: 6666; WAN024AWR; Start 379; Stop 403
aattgtatagggatgacttgggcga

SEQ ID NO: 445658 - DNA, 25 bp, Artificial
  probe
  misc_feature (1)..(25): SEQ ID NO: 6666; WAN024AWR; Start 218; Stop 242
ttgttttaccaatctatcagcgtca

SEQ ID NO: 445659 - DNA, 25 bp, Artificial
  probe
  misc_feature (1)..(25): SEQ ID NO: 6667; WAN024BTI; Start 520; Stop 544
gtgatggacttgctcttaatgttaa

SEQ ID NO: 445660 - DNA, 25 bp, Artificial
  probe
  misc_feature (1)..(25): SEQ ID NO: 6667; WAN024BTI; Start 519; Stop 543
ggtgatggacttgctcttaatgtta

SEQ ID NO: 445661 - DNA, 25 bp, Artificial
  probe
  misc_feature (1)..(25): SEQ ID NO: 6667; WAN024BTI; Start 328; Stop 352
gagaagaagcagcaagaagaagaag

SEQ ID NO: 445662 - DNA, 25 bp, Artificial
  probe
  misc_feature (1)..(25): SEQ ID NO: 6667; WAN024BTI; Start 327; Stop 351
agagaagaagcagcaagaagaagaa

SEQ ID NO: 445663 - DNA, 25 bp, Artificial
  probe
  misc_feature (1)..(25): SEQ ID NO: 6667; WAN024BTI; Start 326; Stop 350
aagagaagaagcagcaagaagaaga

SEQ ID NO: 445664 - DNA, 25 bp, Artificial
  probe
  misc_feature (1)..(25): SEQ ID NO: 6667; WAN024BTI; Start 518; Stop 542
aggtgatggacttgctcttaatgtt

SEQ ID NO: 445665 - DNA, 25 bp, Artificial
  probe
  misc_feature (1)..(25): SEQ ID NO: 6667; WAN024BTI; Start 75; Stop 99
agaaggtaaggtctatgctctgatc

SEQ ID NO: 445666 - DNA, 25 bp, Artificial
  probe
  misc_feature (1)..(25): SEQ ID NO: 6667; WAN024BTI; Start 591; Stop 615
ttggaatcaagcagatgaagttata

SEQ ID NO: 445667 - DNA, 25 bp, Artificial
  probe
  misc_feature (1)..(25): SEQ ID NO: 6667; WAN024BTI; Start 330; Stop 354
gaagaagcagcaagaagaagaagtg

SEQ ID NO: 445668 - DNA, 25 bp, Artificial
  probe
  misc_feature (1)..(25): SEQ ID NO: 6667; WAN024BTI; Start 329; Stop 353
agaagaagcagcaagaagaagaagt

SEQ ID NO: 445669 - DNA, 25 bp, Artificial
  probe
  misc_feature (1)..(25): SEQ ID NO: 6667; WAN024BTI; Start 71; Stop 95
ttacagaaggtaaggtctatgctct

SEQ ID NO: 445670 - DNA, 25 bp, Artificial
  probe
  misc_feature (1)..(25): SEQ ID NO: 6667; WAN024BTI; Start 76; Stop 100
gaaggtaaggtctatgctctgatcg

SEQ ID NO: 445671 - DNA, 25 bp, Artificial
  probe
  misc_feature (1)..(25): SEQ ID NO: 6667; WAN024BTI; Start 198; Stop 222
acaaatcaaacagcatcacttcttt

SEQ ID NO: 445672 - DNA, 25 bp, Artificial
  probe
  misc_feature (1)..(25): SEQ ID NO: 6667; WAN024BTI; Start 197; Stop 221
aacaaatcaaacagcatcacttctt

SEQ ID NO: 445673 - DNA, 25 bp, Artificial
  probe
  misc_feature (1)..(25): SEQ ID NO: 6667; WAN024BTI; Start 196; Stop 220
aaacaaatcaaacagcatcacttct

SEQ ID NO: 445674 - DNA, 25 bp, Artificial
  probe
  misc_feature (1)..(25): SEQ ID NO: 6667; WAN024BTI; Start 548; Stop 572
atcaagagcgtataatcattattgc

SEQ ID NO: 445675 - DNA, 25 bp, Artificial
  probe
  misc_feature (1)..(25): SEQ ID NO: 6667; WAN024BTI; Start 286; Stop 310
aatttagatttgggattgattgggc

SEQ ID NO: 445676 - DNA, 25 bp, Artificial
  probe
  misc_feature (1)..(25): SEQ ID NO: 6667; WAN024BTI; Start 287; Stop 311
atttagatttgggattgattgggca

SEQ ID NO: 445677 - DNA, 25 bp, Artificial
  probe
  misc_feature (1)..(25): SEQ ID NO: 6667; WAN024BTI; Start 592; Stop 616
tggaatcaagcagatgaagttataa

SEQ ID NO: 445678 - DNA, 25 bp, Artificial
  probe
  misc_feature (1)..(25): SEQ ID NO: 6667; WAN024BTI; Start 195; Stop 219
gaaacaaatcaaacagcatcacttc

SEQ ID NO: 445679 - DNA, 25 bp, Artificial
  probe
  misc_feature (1)..(25): SEQ ID NO: 6667; WAN024BTI; Start 202; Stop 226
atcaaacagcatcacttctttaagc

SEQ ID NO: 445680 - DNA, 25 bp, Artificial
  probe
  misc_feature (1)..(25): SEQ ID NO: 6667; WAN024BTI; Start 517; Stop 541
gaggtgatggacttgctcttaatgt

SEQ ID NO: 445681 - DNA, 25 bp, Artificial
  probe
  misc_feature (1)..(25): SEQ ID NO: 6667; WAN024BTI; Start 204; Stop 228
caaacagcatcacttctttaagcat

SEQ ID NO: 445682 - DNA, 25 bp, Artificial
  probe
  misc_feature (1)..(25): SEQ ID NO: 6667; WAN024BTI; Start 119; Stop 143
aaacaaccttgcttaatatcttggc

SEQ ID NO: 445683 - DNA, 25 bp, Artificial
  probe
  misc_feature (1)..(25): SEQ ID NO: 6667; WAN024BTI; Start 199; Stop 223
caaatcaaacagcatcacttcttta

SEQ ID NO: 445684 - DNA, 25 bp, Artificial
  probe
  misc_feature (1)..(25): SEQ ID NO: 6667; WAN024BTI; Start 521; Stop 545
tgatggacttgctcttaatgttaaa

SEQ ID NO: 445685 - DNA, 25 bp, Artificial
  probe
  misc_feature (1)..(25): SEQ ID NO: 6667; WAN024BTI; Start 325; Stop 349
aaagagaagaagcagcaagaagaag

SEQ ID NO: 445686 - DNA, 25 bp, Artificial
  probe
  misc_feature (1)..(25): SEQ ID NO: 6667; WAN024BTI; Start 585; Stop 609
cgatatttggaatcaagcagatgaa

SEQ ID NO: 445687 - DNA, 25 bp, Artificial
  probe
  misc_feature (1)..(25): SEQ ID NO: 6667; WAN024BTI; Start 194; Stop 218
tgaaacaaatcaaacagcatcactt

SEQ ID NO: 445688 - DNA, 25 bp, Artificial
  probe
  misc_feature (1)..(25): SEQ ID NO: 6667; WAN024BTI; Start 549; Stop 573
tcaagagcgtataatcattattgca

SEQ ID NO: 445689 - DNA, 25 bp, Artificial
  probe
  misc_feature (1)..(25): SEQ ID NO: 6667; WAN024BTI; Start 288; Stop 312
tttagatttgggattgattgggcaa

SEQ ID NO: 445690 - DNA, 25 bp, Artificial
  probe
  misc_feature (1)..(25): SEQ ID NO: 6667; WAN024BTI; Start 203; Stop 227
tcaaacagcatcacttctttaagca

SEQ ID NO: 445691 - DNA, 25 bp, Artificial
  probe
  misc_feature (1)..(25): SEQ ID NO: 6667; WAN024BTI; Start 590; Stop 614
tttggaatcaagcagatgaagttat

SEQ ID NO: 445692 - DNA, 25 bp, Artificial
  probe
  misc_feature (1)..(25): SEQ ID NO: 6669; WAN024CZX; Start 490; Stop 514
caccaactcaatatactgacctctt

SEQ ID NO: 445693 - DNA, 25 bp, Artificial
  probe
  misc_feature (1)..(25): SEQ ID NO: 6669; WAN024CZX; Start 487; Stop 511
ttccaccaactcaatatactgacct

SEQ ID NO: 445694 - DNA, 25 bp, Artificial
  probe
  misc_feature (1)..(25): SEQ ID NO: 6669; WAN024CZX; Start 205; Stop 229
gcaataactaacggtactcttgatg

SEQ ID NO: 445695 - DNA, 25 bp, Artificial
  probe
  misc_feature (1)..(25): SEQ ID NO: 6669; WAN024CZX; Start 489; Stop 513
ccaccaactcaatatactgacctct

SEQ ID NO: 445696 - DNA, 25 bp, Artificial
  probe
  misc_feature (1)..(25): SEQ ID NO: 6669; WAN024CZX; Start 488; Stop 512
tccaccaactcaatatactgacctc

SEQ ID NO: 445697 - DNA, 25 bp, Artificial
  probe
  misc_feature (1)..(25): SEQ ID NO: 6669; WAN024CZX; Start 206; Stop 230
caataactaacggtactcttgatgt

SEQ ID NO: 445698 - DNA, 25 bp, Artificial
  probe
  misc_feature (1)..(25): SEQ ID NO: 6669; WAN024CZX; Start 207; Stop 231
aataactaacggtactcttgatgtt

SEQ ID NO: 445699 - DNA, 25 bp, Artificial
  probe
  misc_feature (1)..(25): SEQ ID NO: 6669; WAN024CZX; Start 204; Stop 228
tgcaataactaacggtactcttgat

SEQ ID NO: 445700 - DNA, 25 bp, Artificial
  probe
  misc_feature (1)..(25): SEQ ID NO: 6669; WAN024CZX; Start 482; Stop 506
atcgtttccaccaactcaatatact

SEQ ID NO: 445701 - DNA, 25 bp, Artificial
  probe
  misc_feature (1)..(25): SEQ ID NO: 6669; WAN024CZX; Start 483; Stop 507
tcgtttccaccaactcaatatactg

SEQ ID NO: 445702 - DNA, 25 bp, Artificial
  probe
  misc_feature (1)..(25): SEQ ID NO: 6669; WAN024CZX; Start 485; Stop 509
gtttccaccaactcaatatactgac

SEQ ID NO: 445703 - DNA, 25 bp, Artificial
  probe
  misc_feature (1)..(25): SEQ ID NO: 6669; WAN024CZX; Start 486; Stop 510
tttccaccaactcaatatactgacc

SEQ ID NO: 445704 - DNA, 25 bp, Artificial
  probe
  misc_feature (1)..(25): SEQ ID NO: 6669; WAN024CZX; Start 491; Stop 515
accaactcaatatactgacctcttt

SEQ ID NO: 445705 - DNA, 25 bp, Artificial
  probe
  misc_feature (1)..(25): SEQ ID NO: 6669; WAN024CZX; Start 484; Stop 508
cgtttccaccaactcaatatactga

SEQ ID NO: 445706 - DNA, 25 bp, Artificial
  probe
  misc_feature (1)..(25): SEQ ID NO: 6669; WAN024CZX; Start 481; Stop 505
tatcgtttccaccaactcaatatac

SEQ ID NO: 445707 - DNA, 25 bp, Artificial
  probe
  misc_feature (1)..(25): SEQ ID NO: 6669; WAN024CZX; Start 479; Stop 503
tttatcgtttccaccaactcaatat

SEQ ID NO: 445708 - DNA, 25 bp, Artificial
  probe
  misc_feature (1)..(25): SEQ ID NO: 6669; WAN024CZX; Start 480; Stop 504
ttatcgtttccaccaactcaatata

SEQ ID NO: 445709 - DNA, 25 bp, Artificial
  probe
  misc_feature (1)..(25): SEQ ID NO: 6669; WAN024CZX; Start 67; Stop 91
aatattgacctgctggctattgctt

SEQ ID NO: 445710 - DNA, 25 bp, Artificial
  probe
  misc_feature (1)..(25): SEQ ID NO: 6669; WAN024CZX; Start 208; Stop 232
ataactaacggtactcttgatgttt

SEQ ID NO: 445711 - DNA, 25 bp, Artificial
  probe
  misc_feature (1)..(25): SEQ ID NO: 6669; WAN024CZX; Start 68; Stop 92
atattgacctgctggctattgcttt

SEQ ID NO: 445712 - DNA, 25 bp, Artificial
  probe
  misc_feature (1)..(25): SEQ ID NO: 6669; WAN024CZX; Start 570; Stop 594
gtttggtgatacagatcccgattga

SEQ ID NO: 445713 - DNA, 25 bp, Artificial
  probe
  misc_feature (1)..(25): SEQ ID NO: 6669; WAN024CZX; Start 440; Stop 464
gggctaatttgataaccaaaggaat

SEQ ID NO: 445714 - DNA, 25 bp, Artificial
  probe
  misc_feature (1)..(25): SEQ ID NO: 6669; WAN024CZX; Start 475; Stop 499
gtattttatcgtttccaccaactca

SEQ ID NO: 445715 - DNA, 25 bp, Artificial
  probe
  misc_feature (1)..(25): SEQ ID NO: 6669; WAN024CZX; Start 474; Stop 498
tgtattttatcgtttccaccaactc

SEQ ID NO: 445716 - DNA, 25 bp, Artificial
  probe
  misc_feature (1)..(25): SEQ ID NO: 6669; WAN024CZX; Start 477; Stop 501
attttatcgtttccaccaactcaat

SEQ ID NO: 445717 - DNA, 25 bp, Artificial
  probe
  misc_feature (1)..(25): SEQ ID NO: 6669; WAN024CZX; Start 265; Stop 289
taccctaacgccctctacatgattt

SEQ ID NO: 445718 - DNA, 25 bp, Artificial
  probe
  misc_feature (1)..(25): SEQ ID NO: 6669; WAN024CZX; Start 473; Stop 497
atgtattttatcgtttccaccaact

SEQ ID NO: 445719 - DNA, 25 bp, Artificial
  probe
  misc_feature (1)..(25): SEQ ID NO: 6669; WAN024CZX; Start 478; Stop 502
ttttatcgtttccaccaactcaata

SEQ ID NO: 445720 - DNA, 25 bp, Artificial
  probe
  misc_feature (1)..(25): SEQ ID NO: 6669; WAN024CZX; Start 476; Stop 500
tattttatcgtttccaccaactcaa

SEQ ID NO: 445721 - DNA, 25 bp, Artificial
  probe
  misc_feature (1)..(25): SEQ ID NO: 6669; WAN024CZX; Start 569; Stop 593
ggtttggtgatacagatcccgattg

SEQ ID NO: 445722 - DNA, 25 bp, Artificial
  probe
  misc_feature (1)..(25): SEQ ID NO: 6669; WAN024CZX; Start 546; Stop 570
tttactttgtgacaaggctgtaggg

SEQ ID NO: 445723 - DNA, 25 bp, Artificial
  probe
  misc_feature (1)..(25): SEQ ID NO: 6669; WAN024CZX; Start 358; Stop 382
cctctagcgattaccctctgtcaaa

SEQ ID NO: 445724 - DNA, 25 bp, Artificial
  probe
  misc_feature (1)..(25): SEQ ID NO: 6669; WAN024CZX; Start 203; Stop 227
ttgcaataactaacggtactcttga

SEQ ID NO: 445725 - DNA, 25 bp, Artificial
  probe
  misc_feature (1)..(25): SEQ ID NO: 6670; WAN024D4D; Start 12; Stop 36
cattgtcatttccctttcagttcta

SEQ ID NO: 445726 - DNA, 25 bp, Artificial
  probe
  misc_feature (1)..(25): SEQ ID NO: 6670; WAN024D4D; Start 9; Stop 33
ttccattgtcatttccctttcagtt

SEQ ID NO: 445727 - DNA, 25 bp, Artificial
  probe
  misc_feature (1)..(25): SEQ ID NO: 6670; WAN024D4D; Start 17; Stop 41
tcatttccctttcagttctaattcg

SEQ ID NO: 445728 - DNA, 25 bp, Artificial
  probe
  misc_feature (1)..(25): SEQ ID NO: 6670; WAN024D4D; Start 14; Stop 38
ttgtcatttccctttcagttctaat

SEQ ID NO: 445729 - DNA, 25 bp, Artificial
  probe
  misc_feature (1)..(25): SEQ ID NO: 6670; WAN024D4D; Start 13; Stop 37
attgtcatttccctttcagttctaa

SEQ ID NO: 445730 - DNA, 25 bp, Artificial
  probe
  misc_feature (1)..(25): SEQ ID NO: 6670; WAN024D4D; Start 11; Stop 35
ccattgtcatttccctttcagttct

SEQ ID NO: 445731 - DNA, 25 bp, Artificial
  probe
  misc_feature (1)..(25): SEQ ID NO: 6670; WAN024D4D; Start 10; Stop 34
tccattgtcatttccctttcagttc

SEQ ID NO: 445732 - DNA, 25 bp, Artificial
  probe
  misc_feature (1)..(25): SEQ ID NO: 6670; WAN024D4D; Start 4; Stop 28
attcgttccattgtcatttcccttt

SEQ ID NO: 445733 - DNA, 25 bp, Artificial
  probe
  misc_feature (1)..(25): SEQ ID NO: 6670; WAN024D4D; Start 15; Stop 39
tgtcatttccctttcagttctaatt

SEQ ID NO: 445734 - DNA, 25 bp, Artificial
  probe
  misc_feature (1)..(25): SEQ ID NO: 6670; WAN024D4D; Start 8; Stop 32
gttccattgtcatttccctttcagt

SEQ ID NO: 445735 - DNA, 25 bp, Artificial
  probe
  misc_feature (1)..(25): SEQ ID NO: 6670; WAN024D4D; Start 3; Stop 27
gattcgttccattgtcatttccctt

SEQ ID NO: 445736 - DNA, 25 bp, Artificial
  probe
  misc_feature (1)..(25): SEQ ID NO: 6670; WAN024D4D; Start 16; Stop 40
gtcatttccctttcagttctaattc

SEQ ID NO: 445737 - DNA, 25 bp, Artificial
  probe
  misc_feature (1)..(25): SEQ ID NO: 6670; WAN024D4D; Start 5; Stop 29
ttcgttccattgtcatttccctttc

SEQ ID NO: 445738 - DNA, 25 bp, Artificial
  probe
  misc_feature (1)..(25): SEQ ID NO: 6670; WAN024D4D; Start 21; Stop 45
ttccctttcagttctaattcgagtt

SEQ ID NO: 445739 - DNA, 25 bp, Artificial
  probe
  misc_feature (1)..(25): SEQ ID NO: 6670; WAN024D4D; Start 20; Stop 44
tttccctttcagttctaattcgagt

SEQ ID NO: 445740 - DNA, 25 bp, Artificial
  probe
  misc_feature (1)..(25): SEQ ID NO: 6670; WAN024D4D; Start 25; Stop 49
ctttcagttctaattcgagttcgtg

SEQ ID NO: 445741 - DNA, 25 bp, Artificial
  probe
  misc_feature (1)..(25): SEQ ID NO: 6670; WAN024D4D; Start 22; Stop 46
tccctttcagttctaattcgagttc

SEQ ID NO: 445742 - DNA, 25 bp, Artificial
  probe
  misc_feature (1)..(25): SEQ ID NO: 6670; WAN024D4D; Start 18; Stop 42
catttccctttcagttctaattcga

SEQ ID NO: 445743 - DNA, 25 bp, Artificial
  probe
  misc_feature (1)..(25): SEQ ID NO: 6670; WAN024D4D; Start 7; Stop 31
cgttccattgtcatttccctttcag

SEQ ID NO: 445744 - DNA, 25 bp, Artificial
  probe
  misc_feature (1)..(25): SEQ ID NO: 6670; WAN024D4D; Start 19; Stop 43
atttccctttcagttctaattcgag

SEQ ID NO: 445745 - DNA, 25 bp, Artificial
  probe
  misc_feature (1)..(25): SEQ ID NO: 6670; WAN024D4D; Start 24; Stop 48
cctttcagttctaattcgagttcgt

SEQ ID NO: 445746 - DNA, 25 bp, Artificial
  probe
  misc_feature (1)..(25): SEQ ID NO: 6670; WAN024D4D; Start 26; Stop 50
tttcagttctaattcgagttcgtgg

SEQ ID NO: 445747 - DNA, 25 bp, Artificial
  probe
  misc_feature (1)..(25): SEQ ID NO: 6670; WAN024D4D; Start 6; Stop 30
tcgttccattgtcatttccctttca

SEQ ID NO: 445748 - DNA, 25 bp, Artificial
  probe
  misc_feature (1)..(25): SEQ ID NO: 6670; WAN024D4D; Start 23; Stop 47
ccctttcagttctaattcgagttcg

SEQ ID NO: 445749 - DNA, 25 bp, Artificial
  probe
  misc_feature (1)..(25): SEQ ID NO: 6670; WAN024D4D; Start 27; Stop 51
ttcagttctaattcgagttcgtggc

SEQ ID NO: 445750 - DNA, 25 bp, Artificial
  probe
  misc_feature (1)..(25): SEQ ID NO: 6670; WAN024D4D; Start 2; Stop 26
tgattcgttccattgtcatttccct

SEQ ID NO: 445751 - DNA, 25 bp, Artificial
  probe
  misc_feature (1)..(25): SEQ ID NO: 6670; WAN024D4D; Start 1; Stop 25
atgattcgttccattgtcatttccc

SEQ ID NO: 445752 - DNA, 25 bp, Artificial
  probe
  misc_feature (1)..(25): SEQ ID NO: 6670; WAN024D4D; Start 35; Stop 59
taattcgagttcgtggcgactgtat

SEQ ID NO: 445753 - DNA, 25 bp, Artificial
  probe
  misc_feature (1)..(25): SEQ ID NO: 6670; WAN024D4D; Start 34; Stop 58
ctaattcgagttcgtggcgactgta

SEQ ID NO: 445754 - DNA, 25 bp, Artificial
  probe
  misc_feature (1)..(25): SEQ ID NO: 6671; WAN024DVL; Start 85; Stop 109
tccatcctagcaacctatatattga

SEQ ID NO: 445755 - DNA, 25 bp, Artificial
  probe
  misc_feature (1)..(25): SEQ ID NO: 6671; WAN024DVL; Start 6; Stop 30
tctaattctgatgttgaaagtggga

SEQ ID NO: 445756 - DNA, 25 bp, Artificial
  probe
  misc_feature (1)..(25): SEQ ID NO: 6671; WAN024DVL; Start 86; Stop 110
ccatcctagcaacctatatattgaa

SEQ ID NO: 445757 - DNA, 25 bp, Artificial
  probe
  misc_feature (1)..(25): SEQ ID NO: 6671; WAN024DVL; Start 78; Stop 102
gcatttatccatcctagcaacctat

SEQ ID NO: 445758 - DNA, 25 bp, Artificial
  probe
  misc_feature (1)..(25): SEQ ID NO: 6671; WAN024DVL; Start 45; Stop 69
acttcatattgttatcggaattgtt

SEQ ID NO: 445759 - DNA, 25 bp, Artificial
  probe
  misc_feature (1)..(25): SEQ ID NO: 6671; WAN024DVL; Start 11; Stop 35
ttctgatgttgaaagtgggaattag

SEQ ID NO: 445760 - DNA, 25 bp, Artificial
  probe
  misc_feature (1)..(25): SEQ ID NO: 6671; WAN024DVL; Start 7; Stop 31
ctaattctgatgttgaaagtgggaa

SEQ ID NO: 445761 - DNA, 25 bp, Artificial
  probe
  misc_feature (1)..(25): SEQ ID NO: 6671; WAN024DVL; Start 5; Stop 29
ttctaattctgatgttgaaagtggg

SEQ ID NO: 445762 - DNA, 25 bp, Artificial
  probe
  misc_feature (1)..(25): SEQ ID NO: 6671; WAN024DVL; Start 12; Stop 36
tctgatgttgaaagtgggaattagc

SEQ ID NO: 445763 - DNA, 25 bp, Artificial
  probe
  misc_feature (1)..(25): SEQ ID NO: 6671; WAN024DVL; Start 84; Stop 108
atccatcctagcaacctatatattg

SEQ ID NO: 445764 - DNA, 25 bp, Artificial
  probe
  misc_feature (1)..(25): SEQ ID NO: 6671; WAN024DVL; Start 16; Stop 40
atgttgaaagtgggaattagctcta

SEQ ID NO: 445765 - DNA, 25 bp, Artificial
  probe
  misc_feature (1)..(25): SEQ ID NO: 6671; WAN024DVL; Start 77; Stop 101
ggcatttatccatcctagcaaccta

SEQ ID NO: 445766 - DNA, 25 bp, Artificial
  probe
  misc_feature (1)..(25): SEQ ID NO: 6671; WAN024DVL; Start 17; Stop 41
tgttgaaagtgggaattagctctac

SEQ ID NO: 445767 - DNA, 25 bp, Artificial
  probe
  misc_feature (1)..(25): SEQ ID NO: 6671; WAN024DVL; Start 44; Stop 68
tacttcatattgttatcggaattgt

SEQ ID NO: 445768 - DNA, 25 bp, Artificial
  probe
  misc_feature (1)..(25): SEQ ID NO: 6671; WAN024DVL; Start 79; Stop 103
catttatccatcctagcaacctata

SEQ ID NO: 445769 - DNA, 25 bp, Artificial
  probe
  misc_feature (1)..(25): SEQ ID NO: 6671; WAN024DVL; Start 15; Stop 39
gatgttgaaagtgggaattagctct

SEQ ID NO: 445770 - DNA, 25 bp, Artificial
  probe
  misc_feature (1)..(25): SEQ ID NO: 6671; WAN024DVL; Start 26; Stop 50
tgggaattagctctactttacttca

SEQ ID NO: 445771 - DNA, 25 bp, Artificial
  probe
  misc_feature (1)..(25): SEQ ID NO: 6671; WAN024DVL; Start 4; Stop 28
attctaattctgatgttgaaagtgg

SEQ ID NO: 445772 - DNA, 25 bp, Artificial
  probe
  misc_feature (1)..(25): SEQ ID NO: 6671; WAN024DVL; Start 14; Stop 38
tgatgttgaaagtgggaattagctc

SEQ ID NO: 445773 - DNA, 25 bp, Artificial
  probe
  misc_feature (1)..(25): SEQ ID NO: 6671; WAN024DVL; Start 13; Stop 37
ctgatgttgaaagtgggaattagct

SEQ ID NO: 445774 - DNA, 25 bp, Artificial
  probe
  misc_feature (1)..(25): SEQ ID NO: 6671; WAN024DVL; Start 25; Stop 49
gtgggaattagctctactttacttc

SEQ ID NO: 445775 - DNA, 25 bp, Artificial
  probe
  misc_feature (1)..(25): SEQ ID NO: 6671; WAN024DVL; Start 18; Stop 42
gttgaaagtgggaattagctctact

SEQ ID NO: 445776 - DNA, 25 bp, Artificial
  probe
  misc_feature (1)..(25): SEQ ID NO: 6671; WAN024DVL; Start 24; Stop 48
agtgggaattagctctactttactt

SEQ ID NO: 445777 - DNA, 25 bp, Artificial
  probe
  misc_feature (1)..(25): SEQ ID NO: 6671; WAN024DVL; Start 10; Stop 34
attctgatgttgaaagtgggaatta

SEQ ID NO: 445778 - DNA, 25 bp, Artificial
  probe
  misc_feature (1)..(25): SEQ ID NO: 6671; WAN024DVL; Start 8; Stop 32
taattctgatgttgaaagtgggaat

SEQ ID NO: 445779 - DNA, 25 bp, Artificial
  probe
  misc_feature (1)..(25): SEQ ID NO: 6671; WAN024DVL; Start 83; Stop 107
tatccatcctagcaacctatatatt

SEQ ID NO: 445780 - DNA, 25 bp, Artificial
  probe
  misc_feature (1)..(25): SEQ ID NO: 6671; WAN024DVL; Start 82; Stop 106
ttatccatcctagcaacctatatat

SEQ ID NO: 445781 - DNA, 25 bp, Artificial
  probe
  misc_feature (1)..(25): SEQ ID NO: 6671; WAN024DVL; Start 27; Stop 51
gggaattagctctactttacttcat

SEQ ID NO: 445782 - DNA, 25 bp, Artificial
  probe
  misc_feature (1)..(25): SEQ ID NO: 6671; WAN024DVL; Start 80; Stop 104
atttatccatcctagcaacctatat

SEQ ID NO: 445783 - DNA, 25 bp, Artificial
  probe
  misc_feature (1)..(25): SEQ ID NO: 6671; WAN024DVL; Start 51; Stop 75
tattgttatcggaattgttttgggc

SEQ ID NO: 445784 - DNA, 25 bp, Artificial
  probe
  misc_feature (1)..(25): SEQ ID NO: 6671; WAN024DVL; Start 2; Stop 26
tgattctaattctgatgttgaaagt

SEQ ID NO: 445785 - DNA, 25 bp, Artificial
  probe
  misc_feature (1)..(25): SEQ ID NO: 6671; WAN024DVL; Start 43; Stop 67
ttacttcatattgttatcggaattg

SEQ ID NO: 445786 - DNA, 25 bp, Artificial
  probe
  misc_feature (1)..(25): SEQ ID NO: 6671; WAN024DVL; Start 3; Stop 27
gattctaattctgatgttgaaagtg

SEQ ID NO: 445787 - DNA, 25 bp, Artificial
  probe
  misc_feature (1)..(25): SEQ ID NO: 6672; WAN024BOU; Start 93; Stop 117
tgctcacctagaatctcaatctgat

SEQ ID NO: 445788 - DNA, 25 bp, Artificial
  probe
  misc_feature (1)..(25): SEQ ID NO: 6672; WAN024BOU; Start 92; Stop 116
ttgctcacctagaatctcaatctga

SEQ ID NO: 445789 - DNA, 25 bp, Artificial
  probe
  misc_feature (1)..(25): SEQ ID NO: 6672; WAN024BOU; Start 94; Stop 118
gctcacctagaatctcaatctgatt

SEQ ID NO: 445790 - DNA, 25 bp, Artificial
  probe
  misc_feature (1)..(25): SEQ ID NO: 6672; WAN024BOU; Start 91; Stop 115
tttgctcacctagaatctcaatctg

SEQ ID NO: 445791 - DNA, 25 bp, Artificial
  probe
  misc_feature (1)..(25): SEQ ID NO: 6672; WAN024BOU; Start 35; Stop 59
gctttgtcttatataggagtatggg

SEQ ID NO: 445792 - DNA, 25 bp, Artificial
  probe
  misc_feature (1)..(25): SEQ ID NO: 6672; WAN024BOU; Start 28; Stop 52
gccctttgctttgtcttatatagga

SEQ ID NO: 445793 - DNA, 25 bp, Artificial
  probe
  misc_feature (1)..(25): SEQ ID NO: 6672; WAN024BOU; Start 29; Stop 53
ccctttgctttgtcttatataggag

SEQ ID NO: 445794 - DNA, 25 bp, Artificial
  probe
  misc_feature (1)..(25): SEQ ID NO: 6672; WAN024BOU; Start 34; Stop 58
tgctttgtcttatataggagtatgg

SEQ ID NO: 445795 - DNA, 25 bp, Artificial
  probe
  misc_feature (1)..(25): SEQ ID NO: 6672; WAN024BOU; Start 30; Stop 54
cctttgctttgtcttatataggagt

SEQ ID NO: 445796 - DNA, 25 bp, Artificial
  probe
  misc_feature (1)..(25): SEQ ID NO: 6672; WAN024BOU; Start 26; Stop 50
cagccctttgctttgtcttatatag

SEQ ID NO: 445797 - DNA, 25 bp, Artificial
  probe
  misc_feature (1)..(25): SEQ ID NO: 6672; WAN024BOU; Start 25; Stop 49
tcagccctttgctttgtcttatata

SEQ ID NO: 445798 - DNA, 25 bp, Artificial
  probe
  misc_feature (1)..(25): SEQ ID NO: 6672; WAN024BOU; Start 24; Stop 48
atcagccctttgctttgtcttatat

SEQ ID NO: 445799 - DNA, 25 bp, Artificial
  probe
  misc_feature (1)..(25): SEQ ID NO: 6672; WAN024BOU; Start 23; Stop 47
aatcagccctttgctttgtcttata

SEQ ID NO: 445800 - DNA, 25 bp, Artificial
  probe
  misc_feature (1)..(25): SEQ ID NO: 6672; WAN024BOU; Start 95; Stop 119
ctcacctagaatctcaatctgattt

SEQ ID NO: 445801 - DNA, 25 bp, Artificial
  probe
  misc_feature (1)..(25): SEQ ID NO: 6672; WAN024BOU; Start 27; Stop 51
agccctttgctttgtcttatatagg

SEQ ID NO: 445802 - DNA, 25 bp, Artificial
  probe
  misc_feature (1)..(25): SEQ ID NO: 6672; WAN024BOU; Start 36; Stop 60
ctttgtcttatataggagtatgggt

SEQ ID NO: 445803 - DNA, 25 bp, Artificial
  probe
  misc_feature (1)..(25): SEQ ID NO: 6672; WAN024BOU; Start 37; Stop 61
tttgtcttatataggagtatgggtt

SEQ ID NO: 445804 - DNA, 25 bp, Artificial
  probe
  misc_feature (1)..(25): SEQ ID NO: 6672; WAN024BOU; Start 22; Stop 46
gaatcagccctttgctttgtcttat

SEQ ID NO: 445805 - DNA, 25 bp, Artificial
  probe
  misc_feature (1)..(25): SEQ ID NO: 6672; WAN024BOU; Start 63; Stop 87
ctttgaaaaccgactaattgaatgt

SEQ ID NO: 445806 - DNA, 25 bp, Artificial
  probe
  misc_feature (1)..(25): SEQ ID NO: 6672; WAN024BOU; Start 62; Stop 86
actttgaaaaccgactaattgaatg

SEQ ID NO: 445807 - DNA, 25 bp, Artificial
  probe
  misc_feature (1)..(25): SEQ ID NO: 6672; WAN024BOU; Start 86; Stop 110
gtaattttgctcacctagaatctca

SEQ ID NO: 445808 - DNA, 25 bp, Artificial
  probe
  misc_feature (1)..(25): SEQ ID NO: 6672; WAN024BOU; Start 85; Stop 109
tgtaattttgctcacctagaatctc

SEQ ID NO: 445809 - DNA, 25 bp, Artificial
  probe
  misc_feature (1)..(25): SEQ ID NO: 6672; WAN024BOU; Start 90; Stop 114
ttttgctcacctagaatctcaatct

SEQ ID NO: 445810 - DNA, 25 bp, Artificial
  probe
  misc_feature (1)..(25): SEQ ID NO: 6672; WAN024BOU; Start 39; Stop 63
tgtcttatataggagtatgggttac

SEQ ID NO: 445811 - DNA, 25 bp, Artificial
  probe
  misc_feature (1)..(25): SEQ ID NO: 6672; WAN024BOU; Start 89; Stop 113
attttgctcacctagaatctcaatc

SEQ ID NO: 445812 - DNA, 25 bp, Artificial
  probe
  misc_feature (1)..(25): SEQ ID NO: 6672; WAN024BOU; Start 88; Stop 112
aattttgctcacctagaatctcaat

SEQ ID NO: 445813 - DNA, 25 bp, Artificial
  probe
  misc_feature (1)..(25): SEQ ID NO: 6672; WAN024BOU; Start 84; Stop 108
atgtaattttgctcacctagaatct

SEQ ID NO: 445814 - DNA, 25 bp, Artificial
  probe
  misc_feature (1)..(25): SEQ ID NO: 6672; WAN024BOU; Start 81; Stop 105
tgaatgtaattttgctcacctagaa

SEQ ID NO: 445815 - DNA, 25 bp, Artificial
  probe
  misc_feature (1)..(25): SEQ ID NO: 6672; WAN024BOU; Start 80; Stop 104
ttgaatgtaattttgctcacctaga

SEQ ID NO: 445816 - DNA, 25 bp, Artificial
  probe
  misc_feature (1)..(25): SEQ ID NO: 6672; WAN024BOU; Start 136; Stop 160
gctctccttcacccaaaattaataa

SEQ ID NO: 445817 - DNA, 25 bp, Artificial
  probe
  misc_feature (1)..(25): SEQ ID NO: 6672; WAN024BOU; Start 71; Stop 95
accgactaattgaatgtaattttgc

SEQ ID NO: 445818 - DNA, 25 bp, Artificial
  probe
  misc_feature (1)..(25): SEQ ID NO: 6672; WAN024BOU; Start 1; Stop 25
atgattctgaaattgagctttgaat

SEQ ID NO: 445819 - DNA, 25 bp, Artificial
  probe
  misc_feature (1)..(25): SEQ ID NO: 6672; WAN024BOU; Start 59; Stop 83
gttactttgaaaaccgactaattga

SEQ ID NO: 445820 - DNA, 25 bp, Artificial
  probe
  misc_feature (1)..(25): SEQ ID NO: 6673; WAN024BRP; Start 128; Stop 152
tcgtttatgtaatcgttgatgcttt

SEQ ID NO: 445821 - DNA, 25 bp, Artificial
  probe
  misc_feature (1)..(25): SEQ ID NO: 6673; WAN024BRP; Start 127; Stop 151
atcgtttatgtaatcgttgatgctt

SEQ ID NO: 445822 - DNA, 25 bp, Artificial
  probe
  misc_feature (1)..(25): SEQ ID NO: 6673; WAN024BRP; Start 126; Stop 150
aatcgtttatgtaatcgttgatgct

SEQ ID NO: 445823 - DNA, 25 bp, Artificial
  probe
  misc_feature (1)..(25): SEQ ID NO: 6673; WAN024BRP; Start 138; Stop 162
aatcgttgatgctttacttagttga

SEQ ID NO: 445824 - DNA, 25 bp, Artificial
  probe
  misc_feature (1)..(25): SEQ ID NO: 6673; WAN024BRP; Start 125; Stop 149
caatcgtttatgtaatcgttgatgc

SEQ ID NO: 445825 - DNA, 25 bp, Artificial
  probe
  misc_feature (1)..(25): SEQ ID NO: 6673; WAN024BRP; Start 129; Stop 153
cgtttatgtaatcgttgatgcttta

SEQ ID NO: 445826 - DNA, 25 bp, Artificial
  probe
  misc_feature (1)..(25): SEQ ID NO: 6673; WAN024BRP; Start 137; Stop 161
taatcgttgatgctttacttagttg

SEQ ID NO: 445827 - DNA, 25 bp, Artificial
  probe
  misc_feature (1)..(25): SEQ ID NO: 6673; WAN024BRP; Start 135; Stop 159
tgtaatcgttgatgctttacttagt

SEQ ID NO: 445828 - DNA, 25 bp, Artificial
  probe
  misc_feature (1)..(25): SEQ ID NO: 6673; WAN024BRP; Start 136; Stop 160
gtaatcgttgatgctttacttagtt

SEQ ID NO: 445829 - DNA, 25 bp, Artificial
  probe
  misc_feature (1)..(25): SEQ ID NO: 6673; WAN024BRP; Start 134; Stop 158
atgtaatcgttgatgctttacttag

SEQ ID NO: 445830 - DNA, 25 bp, Artificial
  probe
  misc_feature (1)..(25): SEQ ID NO: 6673; WAN024BRP; Start 83; Stop 107
atgatgagaataagatagttagcaa

SEQ ID NO: 445831 - DNA, 25 bp, Artificial
  probe
  misc_feature (1)..(25): SEQ ID NO: 6673; WAN024BRP; Start 82; Stop 106
aatgatgagaataagatagttagca

SEQ ID NO: 445832 - DNA, 25 bp, Artificial
  probe
  misc_feature (1)..(25): SEQ ID NO: 6673; WAN024BRP; Start 130; Stop 154
gtttatgtaatcgttgatgctttac

SEQ ID NO: 445833 - DNA, 25 bp, Artificial
  probe
  misc_feature (1)..(25): SEQ ID NO: 6673; WAN024BRP; Start 132; Stop 156
ttatgtaatcgttgatgctttactt

SEQ ID NO: 445834 - DNA, 25 bp, Artificial
  probe
  misc_feature (1)..(25): SEQ ID NO: 6673; WAN024BRP; Start 131; Stop 155
tttatgtaatcgttgatgctttact

SEQ ID NO: 445835 - DNA, 25 bp, Artificial
  probe
  misc_feature (1)..(25): SEQ ID NO: 6673; WAN024BRP; Start 81; Stop 105
gaatgatgagaataagatagttagc

SEQ ID NO: 445836 - DNA, 25 bp, Artificial
  probe
  misc_feature (1)..(25): SEQ ID NO: 6673; WAN024BRP; Start 124; Stop 148
tcaatcgtttatgtaatcgttgatg

SEQ ID NO: 445837 - DNA, 25 bp, Artificial
  probe
  misc_feature (1)..(25): SEQ ID NO: 6673; WAN024BRP; Start 121; Stop 145
ttatcaatcgtttatgtaatcgttg

SEQ ID NO: 445838 - DNA, 25 bp, Artificial
  probe
  misc_feature (1)..(25): SEQ ID NO: 6673; WAN024BRP; Start 84; Stop 108
tgatgagaataagatagttagcaaa

SEQ ID NO: 445839 - DNA, 25 bp, Artificial
  probe
  misc_feature (1)..(25): SEQ ID NO: 6673; WAN024BRP; Start 133; Stop 157
tatgtaatcgttgatgctttactta

SEQ ID NO: 445840 - DNA, 25 bp, Artificial
  probe
  misc_feature (1)..(25): SEQ ID NO: 6673; WAN024BRP; Start 67; Stop 91
tcaaagttatctaagaatgatgaga

SEQ ID NO: 445841 - DNA, 25 bp, Artificial
  probe
  misc_feature (1)..(25): SEQ ID NO: 6673; WAN024BRP; Start 122; Stop 146
tatcaatcgtttatgtaatcgttga

SEQ ID NO: 445842 - DNA, 25 bp, Artificial
  probe
  misc_feature (1)..(25): SEQ ID NO: 6673; WAN024BRP; Start 120; Stop 144
attatcaatcgtttatgtaatcgtt

SEQ ID NO: 445843 - DNA, 25 bp, Artificial
  probe
  misc_feature (1)..(25): SEQ ID NO: 6673; WAN024BRP; Start 85; Stop 109
gatgagaataagatagttagcaaaa

SEQ ID NO: 445844 - DNA, 25 bp, Artificial
  probe
  misc_feature (1)..(25): SEQ ID NO: 6673; WAN024BRP; Start 123; Stop 147
atcaatcgtttatgtaatcgttgat

SEQ ID NO: 445845 - DNA, 25 bp, Artificial
  probe
  misc_feature (1)..(25): SEQ ID NO: 6674; WAN024B56; Start 211; Stop 235
cttgtgtgtatccttattgacgatg

SEQ ID NO: 445846 - DNA, 25 bp, Artificial
  probe
  misc_feature (1)..(25): SEQ ID NO: 6674; WAN024B56; Start 212; Stop 236
ttgtgtgtatccttattgacgatgt

SEQ ID NO: 445847 - DNA, 25 bp, Artificial
  probe
  misc_feature (1)..(25): SEQ ID NO: 6674; WAN024B56; Start 208; Stop 232
ttccttgtgtgtatccttattgacg

SEQ ID NO: 445848 - DNA, 25 bp, Artificial
  probe
  misc_feature (1)..(25): SEQ ID NO: 6674; WAN024B56; Start 210; Stop 234
ccttgtgtgtatccttattgacgat

SEQ ID NO: 445849 - DNA, 25 bp, Artificial
  probe
  misc_feature (1)..(25): SEQ ID NO: 6674; WAN024B56; Start 209; Stop 233
tccttgtgtgtatccttattgacga

SEQ ID NO: 445850 - DNA, 25 bp, Artificial
  probe
  misc_feature (1)..(25): SEQ ID NO: 6674; WAN024B56; Start 214; Stop 238
gtgtgtatccttattgacgatgtct

SEQ ID NO: 445851 - DNA, 25 bp, Artificial
  probe
  misc_feature (1)..(25): SEQ ID NO: 6674; WAN024B56; Start 213; Stop 237
tgtgtgtatccttattgacgatgtc

SEQ ID NO: 445852 - DNA, 25 bp, Artificial
  probe
  misc_feature (1)..(25): SEQ ID NO: 6674; WAN024B56; Start 215; Stop 239
tgtgtatccttattgacgatgtcta

SEQ ID NO: 445853 - DNA, 25 bp, Artificial
  probe
  misc_feature (1)..(25): SEQ ID NO: 6674; WAN024B56; Start 216; Stop 240
gtgtatccttattgacgatgtctaa

SEQ ID NO: 445854 - DNA, 25 bp, Artificial
  probe
  misc_feature (1)..(25): SEQ ID NO: 6674; WAN024B56; Start 142; Stop 166
atatttcttcatttgacttccgcac

SEQ ID NO: 445855 - DNA, 25 bp, Artificial
  probe
  misc_feature (1)..(25): SEQ ID NO: 6674; WAN024B56; Start 141; Stop 165
catatttcttcatttgacttccgca

SEQ ID NO: 445856 - DNA, 25 bp, Artificial
  probe
  misc_feature (1)..(25): SEQ ID NO: 6674; WAN024B56; Start 207; Stop 231
tttccttgtgtgtatccttattgac

SEQ ID NO: 445857 - DNA, 25 bp, Artificial
  probe
  misc_feature (1)..(25): SEQ ID NO: 6674; WAN024B56; Start 143; Stop 167
tatttcttcatttgacttccgcact

SEQ ID NO: 445858 - DNA, 25 bp, Artificial
  probe
  misc_feature (1)..(25): SEQ ID NO: 6674; WAN024B56; Start 201; Stop 225
cgatgatttccttgtgtgtatcctt

SEQ ID NO: 445859 - DNA, 25 bp, Artificial
  probe
  misc_feature (1)..(25): SEQ ID NO: 6674; WAN024B56; Start 15; Stop 39
cgatagaagtttcagcaaccataat

SEQ ID NO: 445860 - DNA, 25 bp, Artificial
  probe
  misc_feature (1)..(25): SEQ ID NO: 6674; WAN024B56; Start 14; Stop 38
acgatagaagtttcagcaaccataa

SEQ ID NO: 445861 - DNA, 25 bp, Artificial
  probe
  misc_feature (1)..(25): SEQ ID NO: 6674; WAN024B56; Start 93; Stop 117
gcataccagttgtttcaagataagg

SEQ ID NO: 445862 - DNA, 25 bp, Artificial
  probe
  misc_feature (1)..(25): SEQ ID NO: 6674; WAN024B56; Start 92; Stop 116
ggcataccagttgtttcaagataag

SEQ ID NO: 445863 - DNA, 25 bp, Artificial
  probe
  misc_feature (1)..(25): SEQ ID NO: 6674; WAN024B56; Start 90; Stop 114
taggcataccagttgtttcaagata

SEQ ID NO: 445864 - DNA, 25 bp, Artificial
  probe
  misc_feature (1)..(25): SEQ ID NO: 6674; WAN024B56; Start 91; Stop 115
aggcataccagttgtttcaagataa

SEQ ID NO: 445865 - DNA, 25 bp, Artificial
  probe
  misc_feature (1)..(25): SEQ ID NO: 6674; WAN024B56; Start 87; Stop 111
tagtaggcataccagttgtttcaag

SEQ ID NO: 445866 - DNA, 25 bp, Artificial
  probe
  misc_feature (1)..(25): SEQ ID NO: 6674; WAN024B56; Start 13; Stop 37
gacgatagaagtttcagcaaccata

SEQ ID NO: 445867 - DNA, 25 bp, Artificial
  probe
  misc_feature (1)..(25): SEQ ID NO: 6674; WAN024B56; Start 140; Stop 164
tcatatttcttcatttgacttccgc

SEQ ID NO: 445868 - DNA, 25 bp, Artificial
  probe
  misc_feature (1)..(25): SEQ ID NO: 6674; WAN024B56; Start 202; Stop 226
gatgatttccttgtgtgtatcctta

SEQ ID NO: 445869 - DNA, 25 bp, Artificial
  probe
  misc_feature (1)..(25): SEQ ID NO: 6674; WAN024B56; Start 89; Stop 113
gtaggcataccagttgtttcaagat

SEQ ID NO: 445870 - DNA, 25 bp, Artificial
  probe
  misc_feature (1)..(25): SEQ ID NO: 6674; WAN024B56; Start 94; Stop 118
cataccagttgtttcaagataagga

SEQ ID NO: 445871 - DNA, 25 bp, Artificial
  probe
  misc_feature (1)..(25): SEQ ID NO: 6674; WAN024B56; Start 85; Stop 109
tctagtaggcataccagttgtttca

SEQ ID NO: 445872 - DNA, 25 bp, Artificial
  probe
  misc_feature (1)..(25): SEQ ID NO: 6674; WAN024B56; Start 86; Stop 110
ctagtaggcataccagttgtttcaa

SEQ ID NO: 445873 - DNA, 25 bp, Artificial
  probe
  misc_feature (1)..(25): SEQ ID NO: 6674; WAN024B56; Start 206; Stop 230
atttccttgtgtgtatccttattga

SEQ ID NO: 445874 - DNA, 25 bp, Artificial
  probe
  misc_feature (1)..(25): SEQ ID NO: 6674; WAN024B56; Start 204; Stop 228
tgatttccttgtgtgtatccttatt

SEQ ID NO: 445875 - DNA, 25 bp, Artificial
  probe
  misc_feature (1)..(25): SEQ ID NO: 6674; WAN024B56; Start 97; Stop 121
accagttgtttcaagataaggaatt

SEQ ID NO: 445876 - DNA, 25 bp, Artificial
  probe
  misc_feature (1)..(25): SEQ ID NO: 6674; WAN024B56; Start 9; Stop 33
tcttgacgatagaagtttcagcaac

SEQ ID NO: 445877 - DNA, 25 bp, Artificial
  probe
  misc_feature (1)..(25): SEQ ID NO: 6674; WAN024B56; Start 205; Stop 229
gatttccttgtgtgtatccttattg

SEQ ID NO: 445878 - DNA, 25 bp, Artificial
  probe
  misc_feature (1)..(25): SEQ ID NO: 6675; WAN024DNL; Start 63; Stop 87
acaaaatcaagaattttctgtctat

SEQ ID NO: 445879 - DNA, 25 bp, Artificial
  probe
  misc_feature (1)..(25): SEQ ID NO: 6675; WAN024DNL; Start 59; Stop 83
atagacaaaatcaagaattttctgt

SEQ ID NO: 445880 - DNA, 25 bp, Artificial
  probe
  misc_feature (1)..(25): SEQ ID NO: 6675; WAN024DNL; Start 62; Stop 86
gacaaaatcaagaattttctgtcta

SEQ ID NO: 445881 - DNA, 25 bp, Artificial
  probe
  misc_feature (1)..(25): SEQ ID NO: 6675; WAN024DNL; Start 60; Stop 84
tagacaaaatcaagaattttctgtc

SEQ ID NO: 445882 - DNA, 25 bp, Artificial
  probe
  misc_feature (1)..(25): SEQ ID NO: 6675; WAN024DNL; Start 57; Stop 81
tgatagacaaaatcaagaattttct

SEQ ID NO: 445883 - DNA, 25 bp, Artificial
  probe
  misc_feature (1)..(25): SEQ ID NO: 6675; WAN024DNL; Start 58; Stop 82
gatagacaaaatcaagaattttctg

SEQ ID NO: 445884 - DNA, 25 bp, Artificial
  probe
  misc_feature (1)..(25): SEQ ID NO: 6676; WAN024BXF; Start 57; Stop 81
tcaggaatactcatgggaattacac

SEQ ID NO: 445885 - DNA, 25 bp, Artificial
  probe
  misc_feature (1)..(25): SEQ ID NO: 6676; WAN024BXF; Start 58; Stop 82
caggaatactcatgggaattacaca

SEQ ID NO: 445886 - DNA, 25 bp, Artificial
  probe
  misc_feature (1)..(25): SEQ ID NO: 6676; WAN024BXF; Start 56; Stop 80
atcaggaatactcatgggaattaca

SEQ ID NO: 445887 - DNA, 25 bp, Artificial
  probe
  misc_feature (1)..(25): SEQ ID NO: 6676; WAN024BXF; Start 38; Stop 62
tgaggtatgcagtatataatcagga

SEQ ID NO: 445888 - DNA, 25 bp, Artificial
  probe
  misc_feature (1)..(25): SEQ ID NO: 6676; WAN024BXF; Start 59; Stop 83
aggaatactcatgggaattacacat

SEQ ID NO: 445889 - DNA, 25 bp, Artificial
  probe
  misc_feature (1)..(25): SEQ ID NO: 6676; WAN024BXF; Start 60; Stop 84
ggaatactcatgggaattacacatc

SEQ ID NO: 445890 - DNA, 25 bp, Artificial
  probe
  misc_feature (1)..(25): SEQ ID NO: 6676; WAN024BXF; Start 65; Stop 89
actcatgggaattacacatctttga

SEQ ID NO: 445891 - DNA, 25 bp, Artificial
  probe
  misc_feature (1)..(25): SEQ ID NO: 6676; WAN024BXF; Start 64; Stop 88
tactcatgggaattacacatctttg

SEQ ID NO: 445892 - DNA, 25 bp, Artificial
  probe
  misc_feature (1)..(25): SEQ ID NO: 6676; WAN024BXF; Start 66; Stop 90
ctcatgggaattacacatctttgaa

SEQ ID NO: 445893 - DNA, 25 bp, Artificial
  probe
  misc_feature (1)..(25): SEQ ID NO: 6676; WAN024BXF; Start 55; Stop 79
aatcaggaatactcatgggaattac

SEQ ID NO: 445894 - DNA, 25 bp, Artificial
  probe
  misc_feature (1)..(25): SEQ ID NO: 6676; WAN024BXF; Start 39; Stop 63
gaggtatgcagtatataatcaggaa

SEQ ID NO: 445895 - DNA, 25 bp, Artificial
  probe
  misc_feature (1)..(25): SEQ ID NO: 6676; WAN024BXF; Start 61; Stop 85
gaatactcatgggaattacacatct

SEQ ID NO: 445896 - DNA, 25 bp, Artificial
  probe
  misc_feature (1)..(25): SEQ ID NO: 6676; WAN024BXF; Start 37; Stop 61
atgaggtatgcagtatataatcagg

SEQ ID NO: 445897 - DNA, 25 bp, Artificial
  probe
  misc_feature (1)..(25): SEQ ID NO: 6676; WAN024BXF; Start 63; Stop 87
atactcatgggaattacacatcttt

SEQ ID NO: 445898 - DNA, 25 bp, Artificial
  probe
  misc_feature (1)..(25): SEQ ID NO: 6676; WAN024BXF; Start 62; Stop 86
aatactcatgggaattacacatctt

SEQ ID NO: 445899 - DNA, 25 bp, Artificial
  probe
  misc_feature (1)..(25): SEQ ID NO: 6676; WAN024BXF; Start 40; Stop 64
aggtatgcagtatataatcaggaat

SEQ ID NO: 445900 - DNA, 25 bp, Artificial
  probe
  misc_feature (1)..(25): SEQ ID NO: 6676; WAN024BXF; Start 53; Stop 77
ataatcaggaatactcatgggaatt

SEQ ID NO: 445901 - DNA, 25 bp, Artificial
  probe
  misc_feature (1)..(25): SEQ ID NO: 6676; WAN024BXF; Start 8; Stop 32
aaaataagtggagagaaaggggatt

SEQ ID NO: 445902 - DNA, 25 bp, Artificial
  probe
  misc_feature (1)..(25): SEQ ID NO: 6676; WAN024BXF; Start 7; Stop 31
gaaaataagtggagagaaaggggat

SEQ ID NO: 445903 - DNA, 25 bp, Artificial
  probe
  misc_feature (1)..(25): SEQ ID NO: 6676; WAN024BXF; Start 5; Stop 29
ttgaaaataagtggagagaaagggg

SEQ ID NO: 445904 - DNA, 25 bp, Artificial
  probe
  misc_feature (1)..(25): SEQ ID NO: 6676; WAN024BXF; Start 27; Stop 51
gggattaaatatgaggtatgcagta

SEQ ID NO: 445905 - DNA, 25 bp, Artificial
  probe
  misc_feature (1)..(25): SEQ ID NO: 6676; WAN024BXF; Start 9; Stop 33
aaataagtggagagaaaggggatta

SEQ ID NO: 445906 - DNA, 25 bp, Artificial
  probe
  misc_feature (1)..(25): SEQ ID NO: 6676; WAN024BXF; Start 4; Stop 28
attgaaaataagtggagagaaaggg

SEQ ID NO: 445907 - DNA, 25 bp, Artificial
  probe
  misc_feature (1)..(25): SEQ ID NO: 6676; WAN024BXF; Start 13; Stop 37
aagtggagagaaaggggattaaata

SEQ ID NO: 445908 - DNA, 25 bp, Artificial
  probe
  misc_feature (1)..(25): SEQ ID NO: 6676; WAN024BXF; Start 12; Stop 36
taagtggagagaaaggggattaaat

SEQ ID NO: 445909 - DNA, 25 bp, Artificial
  probe
  misc_feature (1)..(25): SEQ ID NO: 6676; WAN024BXF; Start 11; Stop 35
ataagtggagagaaaggggattaaa

SEQ ID NO: 445910 - DNA, 25 bp, Artificial
  probe
  misc_feature (1)..(25): SEQ ID NO: 6676; WAN024BXF; Start 10; Stop 34
aataagtggagagaaaggggattaa

SEQ ID NO: 445911 - DNA, 25 bp, Artificial
  probe
  misc_feature (1)..(25): SEQ ID NO: 6676; WAN024BXF; Start 19; Stop 43
agagaaaggggattaaatatgaggt

SEQ ID NO: 445912 - DNA, 25 bp, Artificial
  probe
  misc_feature (1)..(25): SEQ ID NO: 6676; WAN024BXF; Start 16; Stop 40
tggagagaaaggggattaaatatga

SEQ ID NO: 445913 - DNA, 25 bp, Artificial
  probe
  misc_feature (1)..(25): SEQ ID NO: 6676; WAN024BXF; Start 15; Stop 39
gtggagagaaaggggattaaatatg

SEQ ID NO: 445914 - DNA, 25 bp, Artificial
  probe
  misc_feature (1)..(25): SEQ ID NO: 6676; WAN024BXF; Start 14; Stop 38
agtggagagaaaggggattaaatat

SEQ ID NO: 445915 - DNA, 25 bp, Artificial
  probe
  misc_feature (1)..(25): SEQ ID NO: 6676; WAN024BXF; Start 6; Stop 30
tgaaaataagtggagagaaagggga

SEQ ID NO: 445916 - DNA, 25 bp, Artificial
  probe
  misc_feature (1)..(25): SEQ ID NO: 6676; WAN024BXF; Start 23; Stop 47
aaaggggattaaatatgaggtatgc

SEQ ID NO: 445917 - DNA, 25 bp, Artificial
  probe
  misc_feature (1)..(25): SEQ ID NO: 6677; WAN024BPU; Start 964; Stop 988
cgttattatccaagcgatgtaggtt

SEQ ID NO: 445918 - DNA, 25 bp, Artificial
  probe
  misc_feature (1)..(25): SEQ ID NO: 6677; WAN024BPU; Start 369; Stop 393
agacacttcattattccttcgtact

SEQ ID NO: 445919 - DNA, 25 bp, Artificial
  probe
  misc_feature (1)..(25): SEQ ID NO: 6677; WAN024BPU; Start 61; Stop 85
ttcatgcttatgttatgtgttacgg

SEQ ID NO: 445920 - DNA, 25 bp, Artificial
  probe
  misc_feature (1)..(25): SEQ ID NO: 6677; WAN024BPU; Start 368; Stop 392
aagacacttcattattccttcgtac

SEQ ID NO: 445921 - DNA, 25 bp, Artificial
  probe
  misc_feature (1)..(25): SEQ ID NO: 6677; WAN024BPU; Start 370; Stop 394
gacacttcattattccttcgtacta

SEQ ID NO: 445922 - DNA, 25 bp, Artificial
  probe
  misc_feature (1)..(25): SEQ ID NO: 6677; WAN024BPU; Start 62; Stop 86
tcatgcttatgttatgtgttacggc

SEQ ID NO: 445923 - DNA, 25 bp, Artificial
  probe
  misc_feature (1)..(25): SEQ ID NO: 6677; WAN024BPU; Start 978; Stop 1002
cgatgtaggtttgattggacttatg

SEQ ID NO: 445924 - DNA, 25 bp, Artificial
  probe
  misc_feature (1)..(25): SEQ ID NO: 6677; WAN024BPU; Start 999; Stop 1023
tatgtttagaagtgggattatcggg

SEQ ID NO: 445925 - DNA, 25 bp, Artificial
  probe
  misc_feature (1)..(25): SEQ ID NO: 6677; WAN024BPU; Start 885; Stop 909
tcattacttatttggagcgggatat

SEQ ID NO: 445926 - DNA, 25 bp, Artificial
  probe
  misc_feature (1)..(25): SEQ ID NO: 6677; WAN024BPU; Start 883; Stop 907
aatcattacttatttggagcgggat

SEQ ID NO: 445927 - DNA, 25 bp, Artificial
  probe
  misc_feature (1)..(25): SEQ ID NO: 6677; WAN024BPU; Start 884; Stop 908
atcattacttatttggagcgggata

SEQ ID NO: 445928 - DNA, 25 bp, Artificial
  probe
  misc_feature (1)..(25): SEQ ID NO: 6677; WAN024BPU; Start 371; Stop 395
acacttcattattccttcgtactat

SEQ ID NO: 445929 - DNA, 25 bp, Artificial
  probe
  misc_feature (1)..(25): SEQ ID NO: 6677; WAN024BPU; Start 275; Stop 299
ggctccctgctattgtaatctttaa

SEQ ID NO: 445930 - DNA, 25 bp, Artificial
  probe
  misc_feature (1)..(25): SEQ ID NO: 6677; WAN024BPU; Start 1019; Stop 1043
tcgggctaatttggttaataagttg

SEQ ID NO: 445931 - DNA, 25 bp, Artificial
  probe
  misc_feature (1)..(25): SEQ ID NO: 6677; WAN024BPU; Start 1021; Stop 1045
gggctaatttggttaataagttggt

SEQ ID NO: 445932 - DNA, 25 bp, Artificial
  probe
  misc_feature (1)..(25): SEQ ID NO: 6677; WAN024BPU; Start 1020; Stop 1044
cgggctaatttggttaataagttgg

SEQ ID NO: 445933 - DNA, 25 bp, Artificial
  probe
  misc_feature (1)..(25): SEQ ID NO: 6677; WAN024BPU; Start 965; Stop 989
gttattatccaagcgatgtaggttt

SEQ ID NO: 445934 - DNA, 25 bp, Artificial
  probe
  misc_feature (1)..(25): SEQ ID NO: 6677; WAN024BPU; Start 425; Stop 449
ttgcttgtattgaaatgttctttgc

SEQ ID NO: 445935 - DNA, 25 bp, Artificial
  probe
  misc_feature (1)..(25): SEQ ID NO: 6677; WAN024BPU; Start 66; Stop 90
gcttatgttatgtgttacggcattt

SEQ ID NO: 445936 - DNA, 25 bp, Artificial
  probe
  misc_feature (1)..(25): SEQ ID NO: 6677; WAN024BPU; Start 979; Stop 1003
gatgtaggtttgattggacttatgt

SEQ ID NO: 445937 - DNA, 25 bp, Artificial
  probe
  misc_feature (1)..(25): SEQ ID NO: 6677; WAN024BPU; Start 977; Stop 1001
gcgatgtaggtttgattggacttat

SEQ ID NO: 445938 - DNA, 25 bp, Artificial
  probe
  misc_feature (1)..(25): SEQ ID NO: 6677; WAN024BPU; Start 1153; Stop 1177
ttgataatcactgatgcacctagat

SEQ ID NO: 445939 - DNA, 25 bp, Artificial
  probe
  misc_feature (1)..(25): SEQ ID NO: 6677; WAN024BPU; Start 967; Stop 991
tattatccaagcgatgtaggtttga

SEQ ID NO: 445940 - DNA, 25 bp, Artificial
  probe
  misc_feature (1)..(25): SEQ ID NO: 6677; WAN024BPU; Start 968; Stop 992
attatccaagcgatgtaggtttgat

SEQ ID NO: 445941 - DNA, 25 bp, Artificial
  probe
  misc_feature (1)..(25): SEQ ID NO: 6677; WAN024BPU; Start 427; Stop 451
gcttgtattgaaatgttctttgcca

SEQ ID NO: 445942 - DNA, 25 bp, Artificial
  probe
  misc_feature (1)..(25): SEQ ID NO: 6677; WAN024BPU; Start 426; Stop 450
tgcttgtattgaaatgttctttgcc

SEQ ID NO: 445943 - DNA, 25 bp, Artificial
  probe
  misc_feature (1)..(25): SEQ ID NO: 6677; WAN024BPU; Start 981; Stop 1005
tgtaggtttgattggacttatgttt

SEQ ID NO: 445944 - DNA, 25 bp, Artificial
  probe
  misc_feature (1)..(25): SEQ ID NO: 6677; WAN024BPU; Start 969; Stop 993
ttatccaagcgatgtaggtttgatt

SEQ ID NO: 445945 - DNA, 25 bp, Artificial
  probe
  misc_feature (1)..(25): SEQ ID NO: 6677; WAN024BPU; Start 962; Stop 986
gacgttattatccaagcgatgtagg

SEQ ID NO: 445946 - DNA, 25 bp, Artificial
  probe
  misc_feature (1)..(25): SEQ ID NO: 6677; WAN024BPU; Start 1018; Stop 1042
atcgggctaatttggttaataagtt

SEQ ID NO: 445947 - DNA, 25 bp, Artificial
  probe
  misc_feature (1)..(25): SEQ ID NO: 6677; WAN024BPU; Start 1013; Stop 1037
ggattatcgggctaatttggttaat

SEQ ID NO: 445948 - DNA, 25 bp, Artificial
  probe
  misc_feature (1)..(25): SEQ ID NO: 6677; WAN024BPU; Start 966; Stop 990
ttattatccaagcgatgtaggtttg

SEQ ID NO: 445949 - DNA, 25 bp, Artificial
  probe
  misc_feature (1)..(25): SEQ ID NO: 6677; WAN024BPU; Start 1012; Stop 1036
gggattatcgggctaatttggttaa

SEQ ID NO: 445950 - DNA, 25 bp, Artificial
  probe
  misc_feature (1)..(25): SEQ ID NO: 6678; WAN024BYK; Start 146; Stop 170
tgattgaggatagcgatataactgc

SEQ ID NO: 445951 - DNA, 25 bp, Artificial
  probe
  misc_feature (1)..(25): SEQ ID NO: 6678; WAN024BYK; Start 140; Stop 164
atgatgtgattgaggatagcgatat

SEQ ID NO: 445952 - DNA, 25 bp, Artificial
  probe
  misc_feature (1)..(25): SEQ ID NO: 6678; WAN024BYK; Start 64; Stop 88
gttgattacatacagcatcctctct

SEQ ID NO: 445953 - DNA, 25 bp, Artificial
  probe
  misc_feature (1)..(25): SEQ ID NO: 6678; WAN024BYK; Start 144; Stop 168
tgtgattgaggatagcgatataact

SEQ ID NO: 445954 - DNA, 25 bp, Artificial
  probe
  misc_feature (1)..(25): SEQ ID NO: 6678; WAN024BYK; Start 145; Stop 169
gtgattgaggatagcgatataactg

SEQ ID NO: 445955 - DNA, 25 bp, Artificial
  probe
  misc_feature (1)..(25): SEQ ID NO: 6678; WAN024BYK; Start 141; Stop 165
tgatgtgattgaggatagcgatata

SEQ ID NO: 445956 - DNA, 25 bp, Artificial
  probe
  misc_feature (1)..(25): SEQ ID NO: 6678; WAN024BYK; Start 65; Stop 89
ttgattacatacagcatcctctcta

SEQ ID NO: 445957 - DNA, 25 bp, Artificial
  probe
  misc_feature (1)..(25): SEQ ID NO: 6678; WAN024BYK; Start 66; Stop 90
tgattacatacagcatcctctctat

SEQ ID NO: 445958 - DNA, 25 bp, Artificial
  probe
  misc_feature (1)..(25): SEQ ID NO: 6678; WAN024BYK; Start 143; Stop 167
atgtgattgaggatagcgatataac

SEQ ID NO: 445959 - DNA, 25 bp, Artificial
  probe
  misc_feature (1)..(25): SEQ ID NO: 6678; WAN024BYK; Start 142; Stop 166
gatgtgattgaggatagcgatataa

SEQ ID NO: 445960 - DNA, 25 bp, Artificial
  probe
  misc_feature (1)..(25): SEQ ID NO: 6678; WAN024BYK; Start 139; Stop 163
catgatgtgattgaggatagcgata

SEQ ID NO: 445961 - DNA, 25 bp, Artificial
  probe
  misc_feature (1)..(25): SEQ ID NO: 6678; WAN024BYK; Start 63; Stop 87
tgttgattacatacagcatcctctc

SEQ ID NO: 445962 - DNA, 25 bp, Artificial
  probe
  misc_feature (1)..(25): SEQ ID NO: 6678; WAN024BYK; Start 62; Stop 86
gtgttgattacatacagcatcctct

SEQ ID NO: 445963 - DNA, 25 bp, Artificial
  probe
  misc_feature (1)..(25): SEQ ID NO: 6678; WAN024BYK; Start 61; Stop 85
ggtgttgattacatacagcatcctc

SEQ ID NO: 445964 - DNA, 25 bp, Artificial
  probe
  misc_feature (1)..(25): SEQ ID NO: 6678; WAN024BYK; Start 136; Stop 160
ttacatgatgtgattgaggatagcg

SEQ ID NO: 445965 - DNA, 25 bp, Artificial
  probe
  misc_feature (1)..(25): SEQ ID NO: 6678; WAN024BYK; Start 67; Stop 91
gattacatacagcatcctctctatg

SEQ ID NO: 445966 - DNA, 25 bp, Artificial
  probe
  misc_feature (1)..(25): SEQ ID NO: 6678; WAN024BYK; Start 137; Stop 161
tacatgatgtgattgaggatagcga

SEQ ID NO: 445967 - DNA, 25 bp, Artificial
  probe
  misc_feature (1)..(25): SEQ ID NO: 6678; WAN024BYK; Start 1; Stop 25
atgattgatattgccttggctatcg

SEQ ID NO: 445968 - DNA, 25 bp, Artificial
  probe
  misc_feature (1)..(25): SEQ ID NO: 6678; WAN024BYK; Start 159; Stop 183
cgatataactgctgccgatttattc

SEQ ID NO: 445969 - DNA, 25 bp, Artificial
  probe
  misc_feature (1)..(25): SEQ ID NO: 6678; WAN024BYK; Start 138; Stop 162
acatgatgtgattgaggatagcgat

SEQ ID NO: 445970 - DNA, 25 bp, Artificial
  probe
  misc_feature (1)..(25): SEQ ID NO: 6678; WAN024BYK; Start 147; Stop 171
gattgaggatagcgatataactgct

SEQ ID NO: 445971 - DNA, 25 bp, Artificial
  probe
  misc_feature (1)..(25): SEQ ID NO: 6678; WAN024BYK; Start 47; Stop 71
aggtagataaagcgggtgttgatta

SEQ ID NO: 445972 - DNA, 25 bp, Artificial
  probe
  misc_feature (1)..(25): SEQ ID NO: 6678; WAN024BYK; Start 148; Stop 172
attgaggatagcgatataactgctg

SEQ ID NO: 445973 - DNA, 25 bp, Artificial
  probe
  misc_feature (1)..(25): SEQ ID NO: 6678; WAN024BYK; Start 48; Stop 72
ggtagataaagcgggtgttgattac

SEQ ID NO: 445974 - DNA, 25 bp, Artificial
  probe
  misc_feature (1)..(25): SEQ ID NO: 6678; WAN024BYK; Start 188; Stop 212
ctggcttgtcaaatgaagttgttac

SEQ ID NO: 445975 - DNA, 25 bp, Artificial
  probe
  misc_feature (1)..(25): SEQ ID NO: 6678; WAN024BYK; Start 187; Stop 211
tctggcttgtcaaatgaagttgtta

SEQ ID NO: 445976 - DNA, 25 bp, Artificial
  probe
  misc_feature (1)..(25): SEQ ID NO: 6678; WAN024BYK; Start 97; Stop 121
agtcaagtcaacactgaacaagaaa

SEQ ID NO: 445977 - DNA, 25 bp, Artificial
  probe
  misc_feature (1)..(25): SEQ ID NO: 6678; WAN024BYK; Start 52; Stop 76
gataaagcgggtgttgattacatac

SEQ ID NO: 445978 - DNA, 25 bp, Artificial
  probe
  misc_feature (1)..(25): SEQ ID NO: 6678; WAN024BYK; Start 51; Stop 75
agataaagcgggtgttgattacata

SEQ ID NO: 445979 - DNA, 25 bp, Artificial
  probe
  misc_feature (1)..(25): SEQ ID NO: 6678; WAN024BYK; Start 50; Stop 74
tagataaagcgggtgttgattacat

SEQ ID NO: 445980 - DNA, 25 bp, Artificial
  probe
  misc_feature (1)..(25): SEQ ID NO: 6678; WAN024BYK; Start 4; Stop 28
attgatattgccttggctatcgcta

SEQ ID NO: 445981 - DNA, 25 bp, Artificial
  probe
  misc_feature (1)..(25): SEQ ID NO: 6678; WAN024BYK; Start 53; Stop 77
ataaagcgggtgttgattacataca

SEQ ID NO: 445982 - DNA, 25 bp, Artificial
  probe
  misc_feature (1)..(25): SEQ ID NO: 6678; WAN024BYK; Start 353; Stop 377
ccaatacagactacgagcgtgttaa

SEQ ID NO: 445983 - DNA, 25 bp, Artificial
  probe
  misc_feature (1)..(25): SEQ ID NO: 6679; WAN024FNQ; Start 137; Stop 161
ttcacgaagatacggaagtcatcaa

SEQ ID NO: 445984 - DNA, 25 bp, Artificial
  probe
  misc_feature (1)..(25): SEQ ID NO: 6679; WAN024FNQ; Start 181; Stop 205
gataacatcaaggtcaaccaagtcg

SEQ ID NO: 445985 - DNA, 25 bp, Artificial
  probe
  misc_feature (1)..(25): SEQ ID NO: 6679; WAN024FNQ; Start 41; Stop 65
cattctttcggtctcctatcttaca

SEQ ID NO: 445986 - DNA, 25 bp, Artificial
  probe
  misc_feature (1)..(25): SEQ ID NO: 6679; WAN024FNQ; Start 40; Stop 64
tcattctttcggtctcctatcttac

SEQ ID NO: 445987 - DNA, 25 bp, Artificial
  probe
  misc_feature (1)..(25): SEQ ID NO: 6679; WAN024FNQ; Start 38; Stop 62
tttcattctttcggtctcctatctt

SEQ ID NO: 445988 - DNA, 25 bp, Artificial
  probe
  misc_feature (1)..(25): SEQ ID NO: 6679; WAN024FNQ; Start 37; Stop 61
atttcattctttcggtctcctatct

SEQ ID NO: 445989 - DNA, 25 bp, Artificial
  probe
  misc_feature (1)..(25): SEQ ID NO: 6679; WAN024FNQ; Start 43; Stop 67
ttctttcggtctcctatcttacaaa

SEQ ID NO: 445990 - DNA, 25 bp, Artificial
  probe
  misc_feature (1)..(25): SEQ ID NO: 6679; WAN024FNQ; Start 42; Stop 66
attctttcggtctcctatcttacaa

SEQ ID NO: 445991 - DNA, 25 bp, Artificial
  probe
  misc_feature (1)..(25): SEQ ID NO: 6679; WAN024FNQ; Start 44; Stop 68
tctttcggtctcctatcttacaaat

SEQ ID NO: 445992 - DNA, 25 bp, Artificial
  probe
  misc_feature (1)..(25): SEQ ID NO: 6679; WAN024FNQ; Start 141; Stop 165
cgaagatacggaagtcatcaaagat

SEQ ID NO: 445993 - DNA, 25 bp, Artificial
  probe
  misc_feature (1)..(25): SEQ ID NO: 6679; WAN024FNQ; Start 39; Stop 63
ttcattctttcggtctcctatctta

SEQ ID NO: 445994 - DNA, 25 bp, Artificial
  probe
  misc_feature (1)..(25): SEQ ID NO: 6679; WAN024FNQ; Start 120; Stop 144
gcaatttctcagtaatcttcacgaa

SEQ ID NO: 445995 - DNA, 25 bp, Artificial
  probe
  misc_feature (1)..(25): SEQ ID NO: 6679; WAN024FNQ; Start 213; Stop 237
ggttaaatgcttgaagagagtgtga

SEQ ID NO: 445996 - DNA, 25 bp, Artificial
  probe
  misc_feature (1)..(25): SEQ ID NO: 6679; WAN024FNQ; Start 36; Stop 60
aatttcattctttcggtctcctatc

SEQ ID NO: 445997 - DNA, 25 bp, Artificial
  probe
  misc_feature (1)..(25): SEQ ID NO: 6679; WAN024FNQ; Start 210; Stop 234
ttgggttaaatgcttgaagagagtg

SEQ ID NO: 445998 - DNA, 25 bp, Artificial
  probe
  misc_feature (1)..(25): SEQ ID NO: 6679; WAN024FNQ; Start 209; Stop 233
cttgggttaaatgcttgaagagagt

SEQ ID NO: 445999 - DNA, 25 bp, Artificial
  probe
  misc_feature (1)..(25): SEQ ID NO: 6679; WAN024FNQ; Start 208; Stop 232
acttgggttaaatgcttgaagagag

SEQ ID NO: 446000 - DNA, 25 bp, Artificial
  probe
  misc_feature (1)..(25): SEQ ID NO: 6679; WAN024FNQ; Start 45; Stop 69
ctttcggtctcctatcttacaaatt

SEQ ID NO: 446001 - DNA, 25 bp, Artificial
  probe
  misc_feature (1)..(25): SEQ ID NO: 6679; WAN024FNQ; Start 207; Stop 231
cacttgggttaaatgcttgaagaga

SEQ ID NO: 446002 - DNA, 25 bp, Artificial
  probe
  misc_feature (1)..(25): SEQ ID NO: 6679; WAN024FNQ; Start 140; Stop 164
acgaagatacggaagtcatcaaaga

SEQ ID NO: 446003 - DNA, 25 bp, Artificial
  probe
  misc_feature (1)..(25): SEQ ID NO: 6679; WAN024FNQ; Start 139; Stop 163
cacgaagatacggaagtcatcaaag

SEQ ID NO: 446004 - DNA, 25 bp, Artificial
  probe
  misc_feature (1)..(25): SEQ ID NO: 6679; WAN024FNQ; Start 119; Stop 143
cgcaatttctcagtaatcttcacga

SEQ ID NO: 446005 - DNA, 25 bp, Artificial
  probe
  misc_feature (1)..(25): SEQ ID NO: 6679; WAN024FNQ; Start 138; Stop 162
tcacgaagatacggaagtcatcaaa

SEQ ID NO: 446006 - DNA, 25 bp, Artificial
  probe
  misc_feature (1)..(25): SEQ ID NO: 6679; WAN024FNQ; Start 180; Stop 204
tgataacatcaaggtcaaccaagtc

SEQ ID NO: 446007 - DNA, 25 bp, Artificial
  probe
  misc_feature (1)..(25): SEQ ID NO: 6679; WAN024FNQ; Start 12; Stop 36
tagtttgatccaacaagtccaacaa

SEQ ID NO: 446008 - DNA, 25 bp, Artificial
  probe
  misc_feature (1)..(25): SEQ ID NO: 6679; WAN024FNQ; Start 212; Stop 236
gggttaaatgcttgaagagagtgtg

SEQ ID NO: 446009 - DNA, 25 bp, Artificial
  probe
  misc_feature (1)..(25): SEQ ID NO: 6679; WAN024FNQ; Start 211; Stop 235
tgggttaaatgcttgaagagagtgt

SEQ ID NO: 446010 - DNA, 25 bp, Artificial
  probe
  misc_feature (1)..(25): SEQ ID NO: 6679; WAN024FNQ; Start 182; Stop 206
ataacatcaaggtcaaccaagtcgc

SEQ ID NO: 446011 - DNA, 25 bp, Artificial
  probe
  misc_feature (1)..(25): SEQ ID NO: 6679; WAN024FNQ; Start 11; Stop 35
gtagtttgatccaacaagtccaaca

SEQ ID NO: 446012 - DNA, 25 bp, Artificial
  probe
  misc_feature (1)..(25): SEQ ID NO: 6679; WAN024FNQ; Start 121; Stop 145
caatttctcagtaatcttcacgaag

SEQ ID NO: 446013 - DNA, 25 bp, Artificial
  probe
  misc_feature (1)..(25): SEQ ID NO: 6679; WAN024FNQ; Start 165; Stop 189
tggcatccaatttcttgataacatc

SEQ ID NO: 446014 - DNA, 25 bp, Artificial
  probe
  misc_feature (1)..(25): SEQ ID NO: 6679; WAN024FNQ; Start 21; Stop 45
ccaacaagtccaacaaatttcattc

SEQ ID NO: 446015 - DNA, 25 bp, Artificial
  probe
  misc_feature (1)..(25): SEQ ID NO: 6679; WAN024FNQ; Start 20; Stop 44
tccaacaagtccaacaaatttcatt

SEQ ID NO: 446016 - DNA, 25 bp, Artificial
  probe
  misc_feature (1)..(25): SEQ ID NO: 6680; WAN024AVZ; Start 327; Stop 351
tagtattgaacttgtagaggaggtg

SEQ ID NO: 446017 - DNA, 25 bp, Artificial
  probe
  misc_feature (1)..(25): SEQ ID NO: 6680; WAN024AVZ; Start 329; Stop 353
gtattgaacttgtagaggaggtgct

SEQ ID NO: 446018 - DNA, 25 bp, Artificial
  probe
  misc_feature (1)..(25): SEQ ID NO: 6680; WAN024AVZ; Start 326; Stop 350
ttagtattgaacttgtagaggaggt

SEQ ID NO: 446019 - DNA, 25 bp, Artificial
  probe
  misc_feature (1)..(25): SEQ ID NO: 6680; WAN024AVZ; Start 325; Stop 349
gttagtattgaacttgtagaggagg

SEQ ID NO: 446020 - DNA, 25 bp, Artificial
  probe
  misc_feature (1)..(25): SEQ ID NO: 6680; WAN024AVZ; Start 160; Stop 184
ttattactcctcagtcaggtgtatg

SEQ ID NO: 446021 - DNA, 25 bp, Artificial
  probe
  misc_feature (1)..(25): SEQ ID NO: 6680; WAN024AVZ; Start 2; Stop 26
tgattgatcgttcatacttgccatt

SEQ ID NO: 446022 - DNA, 25 bp, Artificial
  probe
  misc_feature (1)..(25): SEQ ID NO: 6680; WAN024AVZ; Start 330; Stop 354
tattgaacttgtagaggaggtgctc

SEQ ID NO: 446023 - DNA, 25 bp, Artificial
  probe
  misc_feature (1)..(25): SEQ ID NO: 6680; WAN024AVZ; Start 328; Stop 352
agtattgaacttgtagaggaggtgc

SEQ ID NO: 446024 - DNA, 25 bp, Artificial
  probe
  misc_feature (1)..(25): SEQ ID NO: 6680; WAN024AVZ; Start 158; Stop 182
aattattactcctcagtcaggtgta

SEQ ID NO: 446025 - DNA, 25 bp, Artificial
  probe
  misc_feature (1)..(25): SEQ ID NO: 6680; WAN024AVZ; Start 239; Stop 263
atactggaacaataccaagtctgac

SEQ ID NO: 446026 - DNA, 25 bp, Artificial
  probe
  misc_feature (1)..(25): SEQ ID NO: 6680; WAN024AVZ; Start 161; Stop 185
tattactcctcagtcaggtgtatgc

SEQ ID NO: 446027 - DNA, 25 bp, Artificial
  probe
  misc_feature (1)..(25): SEQ ID NO: 6680; WAN024AVZ; Start 324; Stop 348
tgttagtattgaacttgtagaggag

SEQ ID NO: 446028 - DNA, 25 bp, Artificial
  probe
  misc_feature (1)..(25): SEQ ID NO: 6680; WAN024AVZ; Start 236; Stop 260
cctatactggaacaataccaagtct

SEQ ID NO: 446029 - DNA, 25 bp, Artificial
  probe
  misc_feature (1)..(25): SEQ ID NO: 6680; WAN024AVZ; Start 235; Stop 259
tcctatactggaacaataccaagtc

SEQ ID NO: 446030 - DNA, 25 bp, Artificial
  probe
  misc_feature (1)..(25): SEQ ID NO: 6680; WAN024AVZ; Start 159; Stop 183
attattactcctcagtcaggtgtat

SEQ ID NO: 446031 - DNA, 25 bp, Artificial
  probe
  misc_feature (1)..(25): SEQ ID NO: 6680; WAN024AVZ; Start 238; Stop 262
tatactggaacaataccaagtctga

SEQ ID NO: 446032 - DNA, 25 bp, Artificial
  probe
  misc_feature (1)..(25): SEQ ID NO: 6680; WAN024AVZ; Start 37; Stop 61
agagagtaccaggatactaagatgc

SEQ ID NO: 446033 - DNA, 25 bp, Artificial
  probe
  misc_feature (1)..(25): SEQ ID NO: 6680; WAN024AVZ; Start 237; Stop 261
ctatactggaacaataccaagtctg

SEQ ID NO: 446034 - DNA, 25 bp, Artificial
  probe
  misc_feature (1)..(25): SEQ ID NO: 6680; WAN024AVZ; Start 34; Stop 58
gcaagagagtaccaggatactaaga

SEQ ID NO: 446035 - DNA, 25 bp, Artificial
  probe
  misc_feature (1)..(25): SEQ ID NO: 6680; WAN024AVZ; Start 33; Stop 57
agcaagagagtaccaggatactaag

SEQ ID NO: 446036 - DNA, 25 bp, Artificial
  probe
  misc_feature (1)..(25): SEQ ID NO: 6680; WAN024AVZ; Start 323; Stop 347
ttgttagtattgaacttgtagagga

SEQ ID NO: 446037 - DNA, 25 bp, Artificial
  probe
  misc_feature (1)..(25): SEQ ID NO: 6680; WAN024AVZ; Start 32; Stop 56
cagcaagagagtaccaggatactaa

SEQ ID NO: 446038 - DNA, 25 bp, Artificial
  probe
  misc_feature (1)..(25): SEQ ID NO: 6680; WAN024AVZ; Start 36; Stop 60
aagagagtaccaggatactaagatg

SEQ ID NO: 446039 - DNA, 25 bp, Artificial
  probe
  misc_feature (1)..(25): SEQ ID NO: 6680; WAN024AVZ; Start 35; Stop 59
caagagagtaccaggatactaagat

SEQ ID NO: 446040 - DNA, 25 bp, Artificial
  probe
  misc_feature (1)..(25): SEQ ID NO: 6680; WAN024AVZ; Start 240; Stop 264
tactggaacaataccaagtctgacc

SEQ ID NO: 446041 - DNA, 25 bp, Artificial
  probe
  misc_feature (1)..(25): SEQ ID NO: 6680; WAN024AVZ; Start 31; Stop 55
tcagcaagagagtaccaggatacta

SEQ ID NO: 446042 - DNA, 25 bp, Artificial
  probe
  misc_feature (1)..(25): SEQ ID NO: 6680; WAN024AVZ; Start 28; Stop 52
cagtcagcaagagagtaccaggata

SEQ ID NO: 446043 - DNA, 25 bp, Artificial
  probe
  misc_feature (1)..(25): SEQ ID NO: 6680; WAN024AVZ; Start 29; Stop 53
agtcagcaagagagtaccaggatac

SEQ ID NO: 446044 - DNA, 25 bp, Artificial
  probe
  misc_feature (1)..(25): SEQ ID NO: 6680; WAN024AVZ; Start 136; Stop 160
tcagatttgtcactggagaagaaat

SEQ ID NO: 446045 - DNA, 25 bp, Artificial
  probe
  misc_feature (1)..(25): SEQ ID NO: 6680; WAN024AVZ; Start 132; Stop 156
tatgtcagatttgtcactggagaag

SEQ ID NO: 446046 - DNA, 25 bp, Artificial
  probe
  misc_feature (1)..(25): SEQ ID NO: 6680; WAN024AVZ; Start 131; Stop 155
atatgtcagatttgtcactggagaa

SEQ ID NO: 446047 - DNA, 25 bp, Artificial
  probe
  misc_feature (1)..(25): SEQ ID NO: 6680; WAN024AVZ; Start 4; Stop 28
attgatcgttcatacttgccatttc

SEQ ID NO: 446048 - DNA, 25 bp, Artificial
  probe
  misc_feature (1)..(25): SEQ ID NO: 6680; WAN024AVZ; Start 3; Stop 27
gattgatcgttcatacttgccattt

SEQ ID NO: 446049 - DNA, 25 bp, Artificial
  probe
  misc_feature (1)..(25): SEQ ID NO: 6681; WAN024AV5; Start 65; Stop 89
actacggaatagaggtatcttgtca

SEQ ID NO: 446050 - DNA, 25 bp, Artificial
  probe
  misc_feature (1)..(25): SEQ ID NO: 6681; WAN024AV5; Start 64; Stop 88
aactacggaatagaggtatcttgtc

SEQ ID NO: 446051 - DNA, 25 bp, Artificial
  probe
  misc_feature (1)..(25): SEQ ID NO: 6681; WAN024AV5; Start 66; Stop 90
ctacggaatagaggtatcttgtcat

SEQ ID NO: 446052 - DNA, 25 bp, Artificial
  probe
  misc_feature (1)..(25): SEQ ID NO: 6681; WAN024AV5; Start 241; Stop 265
gaactaagcatcagacttcctcttg

SEQ ID NO: 446053 - DNA, 25 bp, Artificial
  probe
  misc_feature (1)..(25): SEQ ID NO: 6681; WAN024AV5; Start 67; Stop 91
tacggaatagaggtatcttgtcatt

SEQ ID NO: 446054 - DNA, 25 bp, Artificial
  probe
  misc_feature (1)..(25): SEQ ID NO: 6681; WAN024AV5; Start 240; Stop 264
tgaactaagcatcagacttcctctt

SEQ ID NO: 446055 - DNA, 25 bp, Artificial
  probe
  misc_feature (1)..(25): SEQ ID NO: 6681; WAN024AV5; Start 68; Stop 92
acggaatagaggtatcttgtcattc

SEQ ID NO: 446056 - DNA, 25 bp, Artificial
  probe
  misc_feature (1)..(25): SEQ ID NO: 6681; WAN024AV5; Start 69; Stop 93
cggaatagaggtatcttgtcattcg

SEQ ID NO: 446057 - DNA, 25 bp, Artificial
  probe
  misc_feature (1)..(25): SEQ ID NO: 6681; WAN024AV5; Start 318; Stop 342
tctattgccaagagatacgaaacaa

SEQ ID NO: 446058 - DNA, 25 bp, Artificial
  probe
  misc_feature (1)..(25): SEQ ID NO: 6681; WAN024AV5; Start 63; Stop 87
aaactacggaatagaggtatcttgt

SEQ ID NO: 446059 - DNA, 25 bp, Artificial
  probe
  misc_feature (1)..(25): SEQ ID NO: 6681; WAN024AV5; Start 185; Stop 209
agaaccgtgacaatctaagattaac

SEQ ID NO: 446060 - DNA, 25 bp, Artificial
  probe
  misc_feature (1)..(25): SEQ ID NO: 6681; WAN024AV5; Start 70; Stop 94
ggaatagaggtatcttgtcattcga

SEQ ID NO: 446061 - DNA, 25 bp, Artificial
  probe
  misc_feature (1)..(25): SEQ ID NO: 6681; WAN024AV5; Start 180; Stop 204
atttaagaaccgtgacaatctaaga

SEQ ID NO: 446062 - DNA, 25 bp, Artificial
  probe
  misc_feature (1)..(25): SEQ ID NO: 6681; WAN024AV5; Start 72; Stop 96
aatagaggtatcttgtcattcgatt

SEQ ID NO: 446063 - DNA, 25 bp, Artificial
  probe
  misc_feature (1)..(25): SEQ ID NO: 6681; WAN024AV5; Start 95; Stop 119
tttctgaaatgacaaaggacaaatt

SEQ ID NO: 446064 - DNA, 25 bp, Artificial
  probe
  misc_feature (1)..(25): SEQ ID NO: 6681; WAN024AV5; Start 184; Stop 208
aagaaccgtgacaatctaagattaa

SEQ ID NO: 446065 - DNA, 25 bp, Artificial
  probe
  misc_feature (1)..(25): SEQ ID NO: 6681; WAN024AV5; Start 182; Stop 206
ttaagaaccgtgacaatctaagatt

SEQ ID NO: 446066 - DNA, 25 bp, Artificial
  probe
  misc_feature (1)..(25): SEQ ID NO: 6681; WAN024AV5; Start 181; Stop 205
tttaagaaccgtgacaatctaagat

SEQ ID NO: 446067 - DNA, 25 bp, Artificial
  probe
  misc_feature (1)..(25): SEQ ID NO: 6681; WAN024AV5; Start 76; Stop 100
gaggtatcttgtcattcgatttctg

SEQ ID NO: 446068 - DNA, 25 bp, Artificial
  probe
  misc_feature (1)..(25): SEQ ID NO: 6681; WAN024AV5; Start 178; Stop 202
cgatttaagaaccgtgacaatctaa

SEQ ID NO: 446069 - DNA, 25 bp, Artificial
  probe
  misc_feature (1)..(25): SEQ ID NO: 6681; WAN024AV5; Start 186; Stop 210
gaaccgtgacaatctaagattaacg

SEQ ID NO: 446070 - DNA, 25 bp, Artificial
  probe
  misc_feature (1)..(25): SEQ ID NO: 6681; WAN024AV5; Start 75; Stop 99
agaggtatcttgtcattcgatttct

SEQ ID NO: 446071 - DNA, 25 bp, Artificial
  probe
  misc_feature (1)..(25): SEQ ID NO: 6681; WAN024AV5; Start 71; Stop 95
gaatagaggtatcttgtcattcgat

SEQ ID NO: 446072 - DNA, 25 bp, Artificial
  probe
  misc_feature (1)..(25): SEQ ID NO: 6681; WAN024AV5; Start 92; Stop 116
cgatttctgaaatgacaaaggacaa

SEQ ID NO: 446073 - DNA, 25 bp, Artificial
  probe
  misc_feature (1)..(25): SEQ ID NO: 6681; WAN024AV5; Start 190; Stop 214
cgtgacaatctaagattaacggatt

SEQ ID NO: 446074 - DNA, 25 bp, Artificial
  probe
  misc_feature (1)..(25): SEQ ID NO: 6681; WAN024AV5; Start 97; Stop 121
tctgaaatgacaaaggacaaattaa

SEQ ID NO: 446075 - DNA, 25 bp, Artificial
  probe
  misc_feature (1)..(25): SEQ ID NO: 6681; WAN024AV5; Start 96; Stop 120
ttctgaaatgacaaaggacaaatta

SEQ ID NO: 446076 - DNA, 25 bp, Artificial
  probe
  misc_feature (1)..(25): SEQ ID NO: 6681; WAN024AV5; Start 77; Stop 101
aggtatcttgtcattcgatttctga

SEQ ID NO: 446077 - DNA, 25 bp, Artificial
  probe
  misc_feature (1)..(25): SEQ ID NO: 6681; WAN024AV5; Start 78; Stop 102
ggtatcttgtcattcgatttctgaa

SEQ ID NO: 446078 - DNA, 25 bp, Artificial
  probe
  misc_feature (1)..(25): SEQ ID NO: 6681; WAN024AV5; Start 183; Stop 207
taagaaccgtgacaatctaagatta

SEQ ID NO: 446079 - DNA, 25 bp, Artificial
  probe
  misc_feature (1)..(25): SEQ ID NO: 6681; WAN024AV5; Start 90; Stop 114
ttcgatttctgaaatgacaaaggac

SEQ ID NO: 446080 - DNA, 25 bp, Artificial
  probe
  misc_feature (1)..(25): SEQ ID NO: 6681; WAN024AV5; Start 319; Stop 343
ctattgccaagagatacgaaacaat

SEQ ID NO: 446081 - DNA, 25 bp, Artificial
  probe
  misc_feature (1)..(25): SEQ ID NO: 6681; WAN024AV5; Start 255; Stop 279
acttcctcttgcagtttcaaataag

SEQ ID NO: 446082 - DNA, 25 bp, Artificial
  probe
  misc_feature (1)..(25): SEQ ID NO: 6682; WAN024BUM; Start 9; Stop 33
cttagacgaggatgctcttatctgt

SEQ ID NO: 446083 - DNA, 25 bp, Artificial
  probe
  misc_feature (1)..(25): SEQ ID NO: 6682; WAN024BUM; Start 10; Stop 34
ttagacgaggatgctcttatctgtg

SEQ ID NO: 446084 - DNA, 25 bp, Artificial
  probe
  misc_feature (1)..(25): SEQ ID NO: 6682; WAN024BUM; Start 13; Stop 37
gacgaggatgctcttatctgtgatt

SEQ ID NO: 446085 - DNA, 25 bp, Artificial
  probe
  misc_feature (1)..(25): SEQ ID NO: 6682; WAN024BUM; Start 308; Stop 332
attatctcgtctttgaatctggtga

SEQ ID NO: 446086 - DNA, 25 bp, Artificial
  probe
  misc_feature (1)..(25): SEQ ID NO: 6682; WAN024BUM; Start 282; Stop 306
taacaaagaagagggagatgaaagg

SEQ ID NO: 446087 - DNA, 25 bp, Artificial
  probe
  misc_feature (1)..(25): SEQ ID NO: 6682; WAN024BUM; Start 41; Stop 65
cggaaacctaccaaatatacgacta

SEQ ID NO: 446088 - DNA, 25 bp, Artificial
  probe
  misc_feature (1)..(25): SEQ ID NO: 6682; WAN024BUM; Start 288; Stop 312
agaagagggagatgaaagggattat

SEQ ID NO: 446089 - DNA, 25 bp, Artificial
  probe
  misc_feature (1)..(25): SEQ ID NO: 6682; WAN024BUM; Start 11; Stop 35
tagacgaggatgctcttatctgtga

SEQ ID NO: 446090 - DNA, 25 bp, Artificial
  probe
  misc_feature (1)..(25): SEQ ID NO: 6682; WAN024BUM; Start 289; Stop 313
gaagagggagatgaaagggattatc

SEQ ID NO: 446091 - DNA, 25 bp, Artificial
  probe
  misc_feature (1)..(25): SEQ ID NO: 6682; WAN024BUM; Start 287; Stop 311
aagaagagggagatgaaagggatta

SEQ ID NO: 446092 - DNA, 25 bp, Artificial
  probe
  misc_feature (1)..(25): SEQ ID NO: 6682; WAN024BUM; Start 26; Stop 50
ttatctgtgatttagcggaaaccta

SEQ ID NO: 446093 - DNA, 25 bp, Artificial
  probe
  misc_feature (1)..(25): SEQ ID NO: 6682; WAN024BUM; Start 23; Stop 47
ctcttatctgtgatttagcggaaac

SEQ ID NO: 446094 - DNA, 25 bp, Artificial
  probe
  misc_feature (1)..(25): SEQ ID NO: 6682; WAN024BUM; Start 27; Stop 51
tatctgtgatttagcggaaacctac

SEQ ID NO: 446095 - DNA, 25 bp, Artificial
  probe
  misc_feature (1)..(25): SEQ ID NO: 6682; WAN024BUM; Start 37; Stop 61
ttagcggaaacctaccaaatatacg

SEQ ID NO: 446096 - DNA, 25 bp, Artificial
  probe
  misc_feature (1)..(25): SEQ ID NO: 6682; WAN024BUM; Start 319; Stop 343
tttgaatctggtgaggactttgaaa

SEQ ID NO: 446097 - DNA, 25 bp, Artificial
  probe
  misc_feature (1)..(25): SEQ ID NO: 6682; WAN024BUM; Start 278; Stop 302
agaataacaaagaagagggagatga

SEQ ID NO: 446098 - DNA, 25 bp, Artificial
  probe
  misc_feature (1)..(25): SEQ ID NO: 6682; WAN024BUM; Start 25; Stop 49
cttatctgtgatttagcggaaacct

SEQ ID NO: 446099 - DNA, 25 bp, Artificial
  probe
  misc_feature (1)..(25): SEQ ID NO: 6682; WAN024BUM; Start 24; Stop 48
tcttatctgtgatttagcggaaacc

SEQ ID NO: 446100 - DNA, 25 bp, Artificial
  probe
  misc_feature (1)..(25): SEQ ID NO: 6682; WAN024BUM; Start 318; Stop 342
ctttgaatctggtgaggactttgaa

SEQ ID NO: 446101 - DNA, 25 bp, Artificial
  probe
  misc_feature (1)..(25): SEQ ID NO: 6682; WAN024BUM; Start 274; Stop 298
acaaagaataacaaagaagagggag

SEQ ID NO: 446102 - DNA, 25 bp, Artificial
  probe
  misc_feature (1)..(25): SEQ ID NO: 6682; WAN024BUM; Start 8; Stop 32
ccttagacgaggatgctcttatctg

SEQ ID NO: 446103 - DNA, 25 bp, Artificial
  probe
  misc_feature (1)..(25): SEQ ID NO: 6682; WAN024BUM; Start 36; Stop 60
tttagcggaaacctaccaaatatac

SEQ ID NO: 446104 - DNA, 25 bp, Artificial
  probe
  misc_feature (1)..(25): SEQ ID NO: 6682; WAN024BUM; Start 286; Stop 310
aaagaagagggagatgaaagggatt

SEQ ID NO: 446105 - DNA, 25 bp, Artificial
  probe
  misc_feature (1)..(25): SEQ ID NO: 6682; WAN024BUM; Start 275; Stop 299
caaagaataacaaagaagagggaga

SEQ ID NO: 446106 - DNA, 25 bp, Artificial
  probe
  misc_feature (1)..(25): SEQ ID NO: 6682; WAN024BUM; Start 38; Stop 62
tagcggaaacctaccaaatatacga

SEQ ID NO: 446107 - DNA, 25 bp, Artificial
  probe
  misc_feature (1)..(25): SEQ ID NO: 6682; WAN024BUM; Start 281; Stop 305
ataacaaagaagagggagatgaaag

SEQ ID NO: 446108 - DNA, 25 bp, Artificial
  probe
  misc_feature (1)..(25): SEQ ID NO: 6682; WAN024BUM; Start 279; Stop 303
gaataacaaagaagagggagatgaa

SEQ ID NO: 446109 - DNA, 25 bp, Artificial
  probe
  misc_feature (1)..(25): SEQ ID NO: 6682; WAN024BUM; Start 277; Stop 301
aagaataacaaagaagagggagatg

SEQ ID NO: 446110 - DNA, 25 bp, Artificial
  probe
  misc_feature (1)..(25): SEQ ID NO: 6682; WAN024BUM; Start 15; Stop 39
cgaggatgctcttatctgtgattta

SEQ ID NO: 446111 - DNA, 25 bp, Artificial
  probe
  misc_feature (1)..(25): SEQ ID NO: 6682; WAN024BUM; Start 309; Stop 333
ttatctcgtctttgaatctggtgag

SEQ ID NO: 446112 - DNA, 25 bp, Artificial
  probe
  misc_feature (1)..(25): SEQ ID NO: 6682; WAN024BUM; Start 194; Stop 218
gactgtctctttctttgtggttgaa

SEQ ID NO: 446113 - DNA, 25 bp, Artificial
  probe
  misc_feature (1)..(25): SEQ ID NO: 6682; WAN024BUM; Start 317; Stop 341
tctttgaatctggtgaggactttga

SEQ ID NO: 446114 - DNA, 25 bp, Artificial
  probe
  misc_feature (1)..(25): SEQ ID NO: 6682; WAN024BUM; Start 12; Stop 36
agacgaggatgctcttatctgtgat

SEQ ID NO: 446115 - DNA, 25 bp, Artificial
  probe
  misc_feature (1)..(25): SEQ ID NO: 6683; WAN024C69; Start 2; Stop 26
tgattgctagtaagagtttgaaatt

SEQ ID NO: 446116 - DNA, 25 bp, Artificial
  probe
  misc_feature (1)..(25): SEQ ID NO: 6683; WAN024C69; Start 1; Stop 25
atgattgctagtaagagtttgaaat

SEQ ID NO: 446117 - DNA, 25 bp, Artificial
  probe
  misc_feature (1)..(25): SEQ ID NO: 6683; WAN024C69; Start 37; Stop 61
cctatcttagaaaagttgacaagtg

SEQ ID NO: 446118 - DNA, 25 bp, Artificial
  probe
  misc_feature (1)..(25): SEQ ID NO: 6683; WAN024C69; Start 36; Stop 60
tcctatcttagaaaagttgacaagt

SEQ ID NO: 446119 - DNA, 25 bp, Artificial
  probe
  misc_feature (1)..(25): SEQ ID NO: 6683; WAN024C69; Start 65; Stop 89
actctttaataaactcttggtttgt

SEQ ID NO: 446120 - DNA, 25 bp, Artificial
  probe
  misc_feature (1)..(25): SEQ ID NO: 6683; WAN024C69; Start 38; Stop 62
ctatcttagaaaagttgacaagtga

SEQ ID NO: 446121 - DNA, 25 bp, Artificial
  probe
  misc_feature (1)..(25): SEQ ID NO: 6683; WAN024C69; Start 3; Stop 27
gattgctagtaagagtttgaaatta

SEQ ID NO: 446122 - DNA, 25 bp, Artificial
  probe
  misc_feature (1)..(25): SEQ ID NO: 6683; WAN024C69; Start 33; Stop 57
caatcctatcttagaaaagttgaca

SEQ ID NO: 446123 - DNA, 25 bp, Artificial
  probe
  misc_feature (1)..(25): SEQ ID NO: 6683; WAN024C69; Start 35; Stop 59
atcctatcttagaaaagttgacaag

SEQ ID NO: 446124 - DNA, 25 bp, Artificial
  probe
  misc_feature (1)..(25): SEQ ID NO: 6683; WAN024C69; Start 49; Stop 73
aagttgacaagtgataactctttaa

SEQ ID NO: 446125 - DNA, 25 bp, Artificial
  probe
  misc_feature (1)..(25): SEQ ID NO: 6683; WAN024C69; Start 48; Stop 72
aaagttgacaagtgataactcttta

SEQ ID NO: 446126 - DNA, 25 bp, Artificial
  probe
  misc_feature (1)..(25): SEQ ID NO: 6683; WAN024C69; Start 42; Stop 66
cttagaaaagttgacaagtgataac

SEQ ID NO: 446127 - DNA, 25 bp, Artificial
  probe
  misc_feature (1)..(25): SEQ ID NO: 6683; WAN024C69; Start 41; Stop 65
tcttagaaaagttgacaagtgataa

SEQ ID NO: 446128 - DNA, 25 bp, Artificial
  probe
  misc_feature (1)..(25): SEQ ID NO: 6683; WAN024C69; Start 50; Stop 74
agttgacaagtgataactctttaat

SEQ ID NO: 446129 - DNA, 25 bp, Artificial
  probe
  misc_feature (1)..(25): SEQ ID NO: 6683; WAN024C69; Start 66; Stop 90
ctctttaataaactcttggtttgtt

SEQ ID NO: 446130 - DNA, 25 bp, Artificial
  probe
  misc_feature (1)..(25): SEQ ID NO: 6683; WAN024C69; Start 64; Stop 88
aactctttaataaactcttggtttg

SEQ ID NO: 446131 - DNA, 25 bp, Artificial
  probe
  misc_feature (1)..(25): SEQ ID NO: 6683; WAN024C69; Start 51; Stop 75
gttgacaagtgataactctttaata

SEQ ID NO: 446132 - DNA, 25 bp, Artificial
  probe
  misc_feature (1)..(25): SEQ ID NO: 6683; WAN024C69; Start 45; Stop 69
agaaaagttgacaagtgataactct

SEQ ID NO: 446133 - DNA, 25 bp, Artificial
  probe
  misc_feature (1)..(25): SEQ ID NO: 6683; WAN024C69; Start 40; Stop 64
atcttagaaaagttgacaagtgata

SEQ ID NO: 446134 - DNA, 25 bp, Artificial
  probe
  misc_feature (1)..(25): SEQ ID NO: 6683; WAN024C69; Start 39; Stop 63
tatcttagaaaagttgacaagtgat

SEQ ID NO: 446135 - DNA, 25 bp, Artificial
  probe
  misc_feature (1)..(25): SEQ ID NO: 6683; WAN024C69; Start 6; Stop 30
tgctagtaagagtttgaaattattt

SEQ ID NO: 446136 - DNA, 25 bp, Artificial
  probe
  misc_feature (1)..(25): SEQ ID NO: 6683; WAN024C69; Start 5; Stop 29
ttgctagtaagagtttgaaattatt

SEQ ID NO: 446137 - DNA, 25 bp, Artificial
  probe
  misc_feature (1)..(25): SEQ ID NO: 6683; WAN024C69; Start 34; Stop 58
aatcctatcttagaaaagttgacaa

SEQ ID NO: 446138 - DNA, 25 bp, Artificial
  probe
  misc_feature (1)..(25): SEQ ID NO: 6683; WAN024C69; Start 83; Stop 107
ggtttgttaaaagatattttgtcca

SEQ ID NO: 446139 - DNA, 25 bp, Artificial
  probe
  misc_feature (1)..(25): SEQ ID NO: 6683; WAN024C69; Start 82; Stop 106
tggtttgttaaaagatattttgtcc

SEQ ID NO: 446140 - DNA, 25 bp, Artificial
  probe
  misc_feature (1)..(25): SEQ ID NO: 6683; WAN024C69; Start 46; Stop 70
gaaaagttgacaagtgataactctt

SEQ ID NO: 446141 - DNA, 25 bp, Artificial
  probe
  misc_feature (1)..(25): SEQ ID NO: 6683; WAN024C69; Start 47; Stop 71
aaaagttgacaagtgataactcttt

SEQ ID NO: 446142 - DNA, 25 bp, Artificial
  probe
  misc_feature (1)..(25): SEQ ID NO: 6683; WAN024C69; Start 44; Stop 68
tagaaaagttgacaagtgataactc

SEQ ID NO: 446143 - DNA, 25 bp, Artificial
  probe
  misc_feature (1)..(25): SEQ ID NO: 6683; WAN024C69; Start 84; Stop 108
gtttgttaaaagatattttgtccac

SEQ ID NO: 446144 - DNA, 25 bp, Artificial
  probe
  misc_feature (1)..(25): SEQ ID NO: 6683; WAN024C69; Start 43; Stop 67
ttagaaaagttgacaagtgataact

SEQ ID NO: 446145 - DNA, 25 bp, Artificial
  probe
  misc_feature (1)..(25): SEQ ID NO: 6683; WAN024C69; Start 32; Stop 56
tcaatcctatcttagaaaagttgac

SEQ ID NO: 446146 - DNA, 25 bp, Artificial
  probe
  misc_feature (1)..(25): SEQ ID NO: 6683; WAN024C69; Start 88; Stop 112
gttaaaagatattttgtccactaca

SEQ ID NO: 446147 - DNA, 25 bp, Artificial
  probe
  misc_feature (1)..(25): SEQ ID NO: 6683; WAN024C69; Start 87; Stop 111
tgttaaaagatattttgtccactac

SEQ ID NO: 446148 - DNA, 25 bp, Artificial
  probe
  misc_feature (1)..(25): SEQ ID NO: 6684; WAN024BVN; Start 185; Stop 209
ctatccaaggaaatcaacaaggaac

SEQ ID NO: 446149 - DNA, 25 bp, Artificial
  probe
  misc_feature (1)..(25): SEQ ID NO: 6684; WAN024BVN; Start 186; Stop 210
tatccaaggaaatcaacaaggaaca

SEQ ID NO: 446150 - DNA, 25 bp, Artificial
  probe
  misc_feature (1)..(25): SEQ ID NO: 6684; WAN024BVN; Start 184; Stop 208
gctatccaaggaaatcaacaaggaa

SEQ ID NO: 446151 - DNA, 25 bp, Artificial
  probe
  misc_feature (1)..(25): SEQ ID NO: 6684; WAN024BVN; Start 181; Stop 205
gtagctatccaaggaaatcaacaag

SEQ ID NO: 446152 - DNA, 25 bp, Artificial
  probe
  misc_feature (1)..(25): SEQ ID NO: 6684; WAN024BVN; Start 182; Stop 206
tagctatccaaggaaatcaacaagg

SEQ ID NO: 446153 - DNA, 25 bp, Artificial
  probe
  misc_feature (1)..(25): SEQ ID NO: 6684; WAN024BVN; Start 1; Stop 25
atgattggtgaagctggtaaagagg

SEQ ID NO: 446154 - DNA, 25 bp, Artificial
  probe
  misc_feature (1)..(25): SEQ ID NO: 6684; WAN024BVN; Start 180; Stop 204
ggtagctatccaaggaaatcaacaa

SEQ ID NO: 446155 - DNA, 25 bp, Artificial
  probe
  misc_feature (1)..(25): SEQ ID NO: 6684; WAN024BVN; Start 29; Stop 53
tcgtaccacttgaaaatacaggatt

SEQ ID NO: 446156 - DNA, 25 bp, Artificial
  probe
  misc_feature (1)..(25): SEQ ID NO: 6684; WAN024BVN; Start 43; Stop 67
aatacaggatttatccaaacacttg

SEQ ID NO: 446157 - DNA, 25 bp, Artificial
  probe
  misc_feature (1)..(25): SEQ ID NO: 6684; WAN024BVN; Start 73; Stop 97
gtagtcagcagtgcggtagtaaatg

SEQ ID NO: 446158 - DNA, 25 bp, Artificial
  probe
  misc_feature (1)..(25): SEQ ID NO: 6684; WAN024BVN; Start 183; Stop 207
agctatccaaggaaatcaacaagga

SEQ ID NO: 446159 - DNA, 25 bp, Artificial
  probe
  misc_feature (1)..(25): SEQ ID NO: 6684; WAN024BVN; Start 28; Stop 52
gtcgtaccacttgaaaatacaggat

SEQ ID NO: 446160 - DNA, 25 bp, Artificial
  probe
  misc_feature (1)..(25): SEQ ID NO: 6684; WAN024BVN; Start 72; Stop 96
agtagtcagcagtgcggtagtaaat

SEQ ID NO: 446161 - DNA, 25 bp, Artificial
  probe
  misc_feature (1)..(25): SEQ ID NO: 6684; WAN024BVN; Start 30; Stop 54
cgtaccacttgaaaatacaggattt

SEQ ID NO: 446162 - DNA, 25 bp, Artificial
  probe
  misc_feature (1)..(25): SEQ ID NO: 6684; WAN024BVN; Start 100; Stop 124
atggctggtattagtccacaaggtg

SEQ ID NO: 446163 - DNA, 25 bp, Artificial
  probe
  misc_feature (1)..(25): SEQ ID NO: 6684; WAN024BVN; Start 42; Stop 66
aaatacaggatttatccaaacactt

SEQ ID NO: 446164 - DNA, 25 bp, Artificial
  probe
  misc_feature (1)..(25): SEQ ID NO: 6684; WAN024BVN; Start 179; Stop 203
gggtagctatccaaggaaatcaaca

SEQ ID NO: 446165 - DNA, 25 bp, Artificial
  probe
  misc_feature (1)..(25): SEQ ID NO: 6684; WAN024BVN; Start 71; Stop 95
gagtagtcagcagtgcggtagtaaa

SEQ ID NO: 446166 - DNA, 25 bp, Artificial
  probe
  misc_feature (1)..(25): SEQ ID NO: 6684; WAN024BVN; Start 99; Stop 123
catggctggtattagtccacaaggt

SEQ ID NO: 446167 - DNA, 25 bp, Artificial
  probe
  misc_feature (1)..(25): SEQ ID NO: 6684; WAN024BVN; Start 33; Stop 57
accacttgaaaatacaggatttatc

SEQ ID NO: 446168 - DNA, 25 bp, Artificial
  probe
  misc_feature (1)..(25): SEQ ID NO: 6684; WAN024BVN; Start 44; Stop 68
atacaggatttatccaaacacttgg

SEQ ID NO: 446169 - DNA, 25 bp, Artificial
  probe
  misc_feature (1)..(25): SEQ ID NO: 6684; WAN024BVN; Start 178; Stop 202
cgggtagctatccaaggaaatcaac

SEQ ID NO: 446170 - DNA, 25 bp, Artificial
  probe
  misc_feature (1)..(25): SEQ ID NO: 6684; WAN024BVN; Start 34; Stop 58
ccacttgaaaatacaggatttatcc

SEQ ID NO: 446171 - DNA, 25 bp, Artificial
  probe
  misc_feature (1)..(25): SEQ ID NO: 6684; WAN024BVN; Start 177; Stop 201
acgggtagctatccaaggaaatcaa

SEQ ID NO: 446172 - DNA, 25 bp, Artificial
  probe
  misc_feature (1)..(25): SEQ ID NO: 6684; WAN024BVN; Start 27; Stop 51
ggtcgtaccacttgaaaatacagga

SEQ ID NO: 446173 - DNA, 25 bp, Artificial
  probe
  misc_feature (1)..(25): SEQ ID NO: 6684; WAN024BVN; Start 31; Stop 55
gtaccacttgaaaatacaggattta

SEQ ID NO: 446174 - DNA, 25 bp, Artificial
  probe
  misc_feature (1)..(25): SEQ ID NO: 6684; WAN024BVN; Start 149; Stop 173
ttattcaaatcgcaggccatgagtt

SEQ ID NO: 446175 - DNA, 25 bp, Artificial
  probe
  misc_feature (1)..(25): SEQ ID NO: 6684; WAN024BVN; Start 59; Stop 83
aaacacttggacgagtagtcagcag

SEQ ID NO: 446176 - DNA, 25 bp, Artificial
  probe
  misc_feature (1)..(25): SEQ ID NO: 6684; WAN024BVN; Start 35; Stop 59
cacttgaaaatacaggatttatcca

SEQ ID NO: 446177 - DNA, 25 bp, Artificial
  probe
  misc_feature (1)..(25): SEQ ID NO: 6684; WAN024BVN; Start 176; Stop 200
gacgggtagctatccaaggaaatca

SEQ ID NO: 446178 - DNA, 25 bp, Artificial
  probe
  misc_feature (1)..(25): SEQ ID NO: 6684; WAN024BVN; Start 150; Stop 174
tattcaaatcgcaggccatgagttc

SEQ ID NO: 446179 - DNA, 25 bp, Artificial
  probe
  misc_feature (1)..(25): SEQ ID NO: 6684; WAN024BVN; Start 58; Stop 82
caaacacttggacgagtagtcagca

SEQ ID NO: 446180 - DNA, 25 bp, Artificial
  probe
  misc_feature (1)..(25): SEQ ID NO: 6684; WAN024BVN; Start 41; Stop 65
aaaatacaggatttatccaaacact

SEQ ID NO: 446181 - DNA, 25 bp, Artificial
  probe
  misc_feature (1)..(25): SEQ ID NO: 6686; WAN024B8F; Start 79; Stop 103
cttccagttgacgataagcttctag

SEQ ID NO: 446182 - DNA, 25 bp, Artificial
  probe
  misc_feature (1)..(25): SEQ ID NO: 6686; WAN024B8F; Start 78; Stop 102
tcttccagttgacgataagcttcta

SEQ ID NO: 446183 - DNA, 25 bp, Artificial
  probe
  misc_feature (1)..(25): SEQ ID NO: 6686; WAN024B8F; Start 76; Stop 100
cttcttccagttgacgataagcttc

SEQ ID NO: 446184 - DNA, 25 bp, Artificial
  probe
  misc_feature (1)..(25): SEQ ID NO: 6686; WAN024B8F; Start 72; Stop 96
gcagcttcttccagttgacgataag

SEQ ID NO: 446185 - DNA, 25 bp, Artificial
  probe
  misc_feature (1)..(25): SEQ ID NO: 6686; WAN024B8F; Start 77; Stop 101
ttcttccagttgacgataagcttct

SEQ ID NO: 446186 - DNA, 25 bp, Artificial
  probe
  misc_feature (1)..(25): SEQ ID NO: 6686; WAN024B8F; Start 58; Stop 82
aacatccaacaagtgcagcttcttc

SEQ ID NO: 446187 - DNA, 25 bp, Artificial
  probe
  misc_feature (1)..(25): SEQ ID NO: 6686; WAN024B8F; Start 71; Stop 95
tgcagcttcttccagttgacgataa

SEQ ID NO: 446188 - DNA, 25 bp, Artificial
  probe
  misc_feature (1)..(25): SEQ ID NO: 6686; WAN024B8F; Start 98; Stop 122
ttctagctgttcgcagtttaccaag

SEQ ID NO: 446189 - DNA, 25 bp, Artificial
  probe
  misc_feature (1)..(25): SEQ ID NO: 6686; WAN024B8F; Start 97; Stop 121
cttctagctgttcgcagtttaccaa

SEQ ID NO: 446190 - DNA, 25 bp, Artificial
  probe
  misc_feature (1)..(25): SEQ ID NO: 6686; WAN024B8F; Start 57; Stop 81
caacatccaacaagtgcagcttctt

SEQ ID NO: 446191 - DNA, 25 bp, Artificial
  probe
  misc_feature (1)..(25): SEQ ID NO: 6686; WAN024B8F; Start 70; Stop 94
gtgcagcttcttccagttgacgata

SEQ ID NO: 446192 - DNA, 25 bp, Artificial
  probe
  misc_feature (1)..(25): SEQ ID NO: 6686; WAN024B8F; Start 80; Stop 104
ttccagttgacgataagcttctagc

SEQ ID NO: 446193 - DNA, 25 bp, Artificial
  probe
  misc_feature (1)..(25): SEQ ID NO: 6686; WAN024B8F; Start 65; Stop 89
aacaagtgcagcttcttccagttga

SEQ ID NO: 446194 - DNA, 25 bp, Artificial
  probe
  misc_feature (1)..(25): SEQ ID NO: 6686; WAN024B8F; Start 85; Stop 109
gttgacgataagcttctagctgttc

SEQ ID NO: 446195 - DNA, 25 bp, Artificial
  probe
  misc_feature (1)..(25): SEQ ID NO: 6686; WAN024B8F; Start 84; Stop 108
agttgacgataagcttctagctgtt

SEQ ID NO: 446196 - DNA, 25 bp, Artificial
  probe
  misc_feature (1)..(25): SEQ ID NO: 6686; WAN024B8F; Start 64; Stop 88
caacaagtgcagcttcttccagttg

SEQ ID NO: 446197 - DNA, 25 bp, Artificial
  probe
  misc_feature (1)..(25): SEQ ID NO: 6686; WAN024B8F; Start 83; Stop 107
cagttgacgataagcttctagctgt

SEQ ID NO: 446198 - DNA, 25 bp, Artificial
  probe
  misc_feature (1)..(25): SEQ ID NO: 6686; WAN024B8F; Start 86; Stop 110
ttgacgataagcttctagctgttcg

SEQ ID NO: 446199 - DNA, 25 bp, Artificial
  probe
  misc_feature (1)..(25): SEQ ID NO: 6686; WAN024B8F; Start 104; Stop 128
ctgttcgcagtttaccaagcttagc

SEQ ID NO: 446200 - DNA, 25 bp, Artificial
  probe
  misc_feature (1)..(25): SEQ ID NO: 6686; WAN024B8F; Start 75; Stop 99
gcttcttccagttgacgataagctt

SEQ ID NO: 446201 - DNA, 25 bp, Artificial
  probe
  misc_feature (1)..(25): SEQ ID NO: 6686; WAN024B8F; Start 91; Stop 115
gataagcttctagctgttcgcagtt

SEQ ID NO: 446202 - DNA, 25 bp, Artificial
  probe
  misc_feature (1)..(25): SEQ ID NO: 6686; WAN024B8F; Start 82; Stop 106
ccagttgacgataagcttctagctg

SEQ ID NO: 446203 - DNA, 25 bp, Artificial
  probe
  misc_feature (1)..(25): SEQ ID NO: 6686; WAN024B8F; Start 81; Stop 105
tccagttgacgataagcttctagct

SEQ ID NO: 446204 - DNA, 25 bp, Artificial
  probe
  misc_feature (1)..(25): SEQ ID NO: 6686; WAN024B8F; Start 93; Stop 117
taagcttctagctgttcgcagttta

SEQ ID NO: 446205 - DNA, 25 bp, Artificial
  probe
  misc_feature (1)..(25): SEQ ID NO: 6686; WAN024B8F; Start 103; Stop 127
gctgttcgcagtttaccaagcttag

SEQ ID NO: 446206 - DNA, 25 bp, Artificial
  probe
  misc_feature (1)..(25): SEQ ID NO: 6686; WAN024B8F; Start 92; Stop 116
ataagcttctagctgttcgcagttt

SEQ ID NO: 446207 - DNA, 25 bp, Artificial
  probe
  misc_feature (1)..(25): SEQ ID NO: 6686; WAN024B8F; Start 94; Stop 118
aagcttctagctgttcgcagtttac

SEQ ID NO: 446208 - DNA, 25 bp, Artificial
  probe
  misc_feature (1)..(25): SEQ ID NO: 6686; WAN024B8F; Start 95; Stop 119
agcttctagctgttcgcagtttacc

SEQ ID NO: 446209 - DNA, 25 bp, Artificial
  probe
  misc_feature (1)..(25): SEQ ID NO: 6686; WAN024B8F; Start 90; Stop 114
cgataagcttctagctgttcgcagt

SEQ ID NO: 446210 - DNA, 25 bp, Artificial
  probe
  misc_feature (1)..(25): SEQ ID NO: 6686; WAN024B8F; Start 89; Stop 113
acgataagcttctagctgttcgcag

SEQ ID NO: 446211 - DNA, 25 bp, Artificial
  probe
  misc_feature (1)..(25): SEQ ID NO: 6686; WAN024B8F; Start 88; Stop 112
gacgataagcttctagctgttcgca

SEQ ID NO: 446212 - DNA, 25 bp, Artificial
  probe
  misc_feature (1)..(25): SEQ ID NO: 6686; WAN024B8F; Start 87; Stop 111
tgacgataagcttctagctgttcgc

SEQ ID NO: 446213 - DNA, 25 bp, Artificial
  probe
  misc_feature (1)..(25): SEQ ID NO: 6686; WAN024B8F; Start 102; Stop 126
agctgttcgcagtttaccaagctta

SEQ ID NO: 446214 - DNA, 25 bp, Artificial
  probe
  misc_feature (1)..(25): SEQ ID NO: 6686; WAN024B8F; Start 101; Stop 125
tagctgttcgcagtttaccaagctt

SEQ ID NO: 446215 - DNA, 25 bp, Artificial
  probe
  misc_feature (1)..(25): SEQ ID NO: 6687; WAN024C2Y; Start 215; Stop 239
ttcaagtctatgccaatcaggttat

SEQ ID NO: 446216 - DNA, 25 bp, Artificial
  probe
  misc_feature (1)..(25): SEQ ID NO: 6687; WAN024C2Y; Start 214; Stop 238
attcaagtctatgccaatcaggtta

SEQ ID NO: 446217 - DNA, 25 bp, Artificial
  probe
  misc_feature (1)..(25): SEQ ID NO: 6687; WAN024C2Y; Start 213; Stop 237
tattcaagtctatgccaatcaggtt

SEQ ID NO: 446218 - DNA, 25 bp, Artificial
  probe
  misc_feature (1)..(25): SEQ ID NO: 6687; WAN024C2Y; Start 218; Stop 242
aagtctatgccaatcaggttatcag

SEQ ID NO: 446219 - DNA, 25 bp, Artificial
  probe
  misc_feature (1)..(25): SEQ ID NO: 6687; WAN024C2Y; Start 216; Stop 240
tcaagtctatgccaatcaggttatc

SEQ ID NO: 446220 - DNA, 25 bp, Artificial
  probe
  misc_feature (1)..(25): SEQ ID NO: 6687; WAN024C2Y; Start 212; Stop 236
atattcaagtctatgccaatcaggt

SEQ ID NO: 446221 - DNA, 25 bp, Artificial
  probe
  misc_feature (1)..(25): SEQ ID NO: 6687; WAN024C2Y; Start 220; Stop 244
gtctatgccaatcaggttatcagtt

SEQ ID NO: 446222 - DNA, 25 bp, Artificial
  probe
  misc_feature (1)..(25): SEQ ID NO: 6687; WAN024C2Y; Start 217; Stop 241
caagtctatgccaatcaggttatca

SEQ ID NO: 446223 - DNA, 25 bp, Artificial
  probe
  misc_feature (1)..(25): SEQ ID NO: 6687; WAN024C2Y; Start 68; Stop 92
ggaacaatacctatcaactgacctt

SEQ ID NO: 446224 - DNA, 25 bp, Artificial
  probe
  misc_feature (1)..(25): SEQ ID NO: 6687; WAN024C2Y; Start 636; Stop 660
tgattatatggtggtgattgacagc

SEQ ID NO: 446225 - DNA, 25 bp, Artificial
  probe
  misc_feature (1)..(25): SEQ ID NO: 6687; WAN024C2Y; Start 357; Stop 381
tgatattgatgataggcatacgctc

SEQ ID NO: 446226 - DNA, 25 bp, Artificial
  probe
  misc_feature (1)..(25): SEQ ID NO: 6687; WAN024C2Y; Start 356; Stop 380
ctgatattgatgataggcatacgct

SEQ ID NO: 446227 - DNA, 25 bp, Artificial
  probe
  misc_feature (1)..(25): SEQ ID NO: 6687; WAN024C2Y; Start 355; Stop 379
tctgatattgatgataggcatacgc

SEQ ID NO: 446228 - DNA, 25 bp, Artificial
  probe
  misc_feature (1)..(25): SEQ ID NO: 6687; WAN024C2Y; Start 350; Stop 374
tcttctctgatattgatgataggca

SEQ ID NO: 446229 - DNA, 25 bp, Artificial
  probe
  misc_feature (1)..(25): SEQ ID NO: 6687; WAN024C2Y; Start 219; Stop 243
agtctatgccaatcaggttatcagt

SEQ ID NO: 446230 - DNA, 25 bp, Artificial
  probe
  misc_feature (1)..(25): SEQ ID NO: 6687; WAN024C2Y; Start 635; Stop 659
atgattatatggtggtgattgacag

SEQ ID NO: 446231 - DNA, 25 bp, Artificial
  probe
  misc_feature (1)..(25): SEQ ID NO: 6687; WAN024C2Y; Start 354; Stop 378
ctctgatattgatgataggcatacg

SEQ ID NO: 446232 - DNA, 25 bp, Artificial
  probe
  misc_feature (1)..(25): SEQ ID NO: 6687; WAN024C2Y; Start 637; Stop 661
gattatatggtggtgattgacagcc

SEQ ID NO: 446233 - DNA, 25 bp, Artificial
  probe
  misc_feature (1)..(25): SEQ ID NO: 6687; WAN024C2Y; Start 368; Stop 392
ataggcatacgctcaatatcaagga

SEQ ID NO: 446234 - DNA, 25 bp, Artificial
  probe
  misc_feature (1)..(25): SEQ ID NO: 6687; WAN024C2Y; Start 358; Stop 382
gatattgatgataggcatacgctca

SEQ ID NO: 446235 - DNA, 25 bp, Artificial
  probe
  misc_feature (1)..(25): SEQ ID NO: 6687; WAN024C2Y; Start 369; Stop 393
taggcatacgctcaatatcaaggat

SEQ ID NO: 446236 - DNA, 25 bp, Artificial
  probe
  misc_feature (1)..(25): SEQ ID NO: 6687; WAN024C2Y; Start 211; Stop 235
tatattcaagtctatgccaatcagg

SEQ ID NO: 446237 - DNA, 25 bp, Artificial
  probe
  misc_feature (1)..(25): SEQ ID NO: 6687; WAN024C2Y; Start 378; Stop 402
gctcaatatcaaggataagaatgcc

SEQ ID NO: 446238 - DNA, 25 bp, Artificial
  probe
  misc_feature (1)..(25): SEQ ID NO: 6687; WAN024C2Y; Start 377; Stop 401
cgctcaatatcaaggataagaatgc

SEQ ID NO: 446239 - DNA, 25 bp, Artificial
  probe
  misc_feature (1)..(25): SEQ ID NO: 6687; WAN024C2Y; Start 372; Stop 396
gcatacgctcaatatcaaggataag

SEQ ID NO: 446240 - DNA, 25 bp, Artificial
  probe
  misc_feature (1)..(25): SEQ ID NO: 6687; WAN024C2Y; Start 363; Stop 387
tgatgataggcatacgctcaatatc

SEQ ID NO: 446241 - DNA, 25 bp, Artificial
  probe
  misc_feature (1)..(25): SEQ ID NO: 6687; WAN024C2Y; Start 371; Stop 395
ggcatacgctcaatatcaaggataa

SEQ ID NO: 446242 - DNA, 25 bp, Artificial
  probe
  misc_feature (1)..(25): SEQ ID NO: 6687; WAN024C2Y; Start 349; Stop 373
ttcttctctgatattgatgataggc

SEQ ID NO: 446243 - DNA, 25 bp, Artificial
  probe
  misc_feature (1)..(25): SEQ ID NO: 6687; WAN024C2Y; Start 376; Stop 400
acgctcaatatcaaggataagaatg

SEQ ID NO: 446244 - DNA, 25 bp, Artificial
  probe
  misc_feature (1)..(25): SEQ ID NO: 6687; WAN024C2Y; Start 780; Stop 804
cgacatgctagaagataaccttgaa

SEQ ID NO: 446245 - DNA, 25 bp, Artificial
  probe
  misc_feature (1)..(25): SEQ ID NO: 6687; WAN024C2Y; Start 351; Stop 375
cttctctgatattgatgataggcat

SEQ ID NO: 446246 - DNA, 25 bp, Artificial
  probe
  misc_feature (1)..(25): SEQ ID NO: 6687; WAN024C2Y; Start 367; Stop 391
gataggcatacgctcaatatcaagg

SEQ ID NO: 446247 - DNA, 25 bp, Artificial
  probe
  misc_feature (1)..(25): SEQ ID NO: 6687; WAN024C2Y; Start 379; Stop 403
ctcaatatcaaggataagaatgcca

SEQ ID NO: 446248 - DNA, 25 bp, Artificial
  probe
  misc_feature (1)..(25): SEQ ID NO: 6688; WAN024BZN; Start 162; Stop 186
gtccttgaacaaccagagtagtatt

SEQ ID NO: 446249 - DNA, 25 bp, Artificial
  probe
  misc_feature (1)..(25): SEQ ID NO: 6688; WAN024BZN; Start 167; Stop 191
tgaacaaccagagtagtattaagca

SEQ ID NO: 446250 - DNA, 25 bp, Artificial
  probe
  misc_feature (1)..(25): SEQ ID NO: 6688; WAN024BZN; Start 163; Stop 187
tccttgaacaaccagagtagtatta

SEQ ID NO: 446251 - DNA, 25 bp, Artificial
  probe
  misc_feature (1)..(25): SEQ ID NO: 6688; WAN024BZN; Start 168; Stop 192
gaacaaccagagtagtattaagcaa

SEQ ID NO: 446252 - DNA, 25 bp, Artificial
  probe
  misc_feature (1)..(25): SEQ ID NO: 6688; WAN024BZN; Start 166; Stop 190
ttgaacaaccagagtagtattaagc

SEQ ID NO: 446253 - DNA, 25 bp, Artificial
  probe
  misc_feature (1)..(25): SEQ ID NO: 6688; WAN024BZN; Start 112; Stop 136
ttaacaacgaacttactcttaaccg

SEQ ID NO: 446254 - DNA, 25 bp, Artificial
  probe
  misc_feature (1)..(25): SEQ ID NO: 6688; WAN024BZN; Start 57; Stop 81
atcaacaagtatcgtagtccattgg

SEQ ID NO: 446255 - DNA, 25 bp, Artificial
  probe
  misc_feature (1)..(25): SEQ ID NO: 6688; WAN024BZN; Start 164; Stop 188
ccttgaacaaccagagtagtattaa

SEQ ID NO: 446256 - DNA, 25 bp, Artificial
  probe
  misc_feature (1)..(25): SEQ ID NO: 6688; WAN024BZN; Start 56; Stop 80
tatcaacaagtatcgtagtccattg

SEQ ID NO: 446257 - DNA, 25 bp, Artificial
  probe
  misc_feature (1)..(25): SEQ ID NO: 6688; WAN024BZN; Start 55; Stop 79
ttatcaacaagtatcgtagtccatt

SEQ ID NO: 446258 - DNA, 25 bp, Artificial
  probe
  misc_feature (1)..(25): SEQ ID NO: 6688; WAN024BZN; Start 150; Stop 174
cttctgtatcaggtccttgaacaac

SEQ ID NO: 446259 - DNA, 25 bp, Artificial
  probe
  misc_feature (1)..(25): SEQ ID NO: 6688; WAN024BZN; Start 80; Stop 104
ggactcaccttccttctatctcatt

SEQ ID NO: 446260 - DNA, 25 bp, Artificial
  probe
  misc_feature (1)..(25): SEQ ID NO: 6688; WAN024BZN; Start 77; Stop 101
attggactcaccttccttctatctc

SEQ ID NO: 446261 - DNA, 25 bp, Artificial
  probe
  misc_feature (1)..(25): SEQ ID NO: 6688; WAN024BZN; Start 83; Stop 107
ctcaccttccttctatctcatttca

SEQ ID NO: 446262 - DNA, 25 bp, Artificial
  probe
  misc_feature (1)..(25): SEQ ID NO: 6688; WAN024BZN; Start 82; Stop 106
actcaccttccttctatctcatttc

SEQ ID NO: 446263 - DNA, 25 bp, Artificial
  probe
  misc_feature (1)..(25): SEQ ID NO: 6688; WAN024BZN; Start 81; Stop 105
gactcaccttccttctatctcattt

SEQ ID NO: 446264 - DNA, 25 bp, Artificial
  probe
  misc_feature (1)..(25): SEQ ID NO: 6688; WAN024BZN; Start 198; Stop 222
aactattactcaagaatcagtccaa

SEQ ID NO: 446265 - DNA, 25 bp, Artificial
  probe
  misc_feature (1)..(25): SEQ ID NO: 6688; WAN024BZN; Start 76; Stop 100
cattggactcaccttccttctatct

SEQ ID NO: 446266 - DNA, 25 bp, Artificial
  probe
  misc_feature (1)..(25): SEQ ID NO: 6688; WAN024BZN; Start 199; Stop 223
actattactcaagaatcagtccaat

SEQ ID NO: 446267 - DNA, 25 bp, Artificial
  probe
  misc_feature (1)..(25): SEQ ID NO: 6688; WAN024BZN; Start 84; Stop 108
tcaccttccttctatctcatttcat

SEQ ID NO: 446268 - DNA, 25 bp, Artificial
  probe
  misc_feature (1)..(25): SEQ ID NO: 6688; WAN024BZN; Start 165; Stop 189
cttgaacaaccagagtagtattaag

SEQ ID NO: 446269 - DNA, 25 bp, Artificial
  probe
  misc_feature (1)..(25): SEQ ID NO: 6688; WAN024BZN; Start 170; Stop 194
acaaccagagtagtattaagcaaac

SEQ ID NO: 446270 - DNA, 25 bp, Artificial
  probe
  misc_feature (1)..(25): SEQ ID NO: 6688; WAN024BZN; Start 14; Stop 38
cctattatcgagagctgttccgtaa

SEQ ID NO: 446271 - DNA, 25 bp, Artificial
  probe
  misc_feature (1)..(25): SEQ ID NO: 6688; WAN024BZN; Start 161; Stop 185
ggtccttgaacaaccagagtagtat

SEQ ID NO: 446272 - DNA, 25 bp, Artificial
  probe
  misc_feature (1)..(25): SEQ ID NO: 6688; WAN024BZN; Start 85; Stop 109
caccttccttctatctcatttcatt

SEQ ID NO: 446273 - DNA, 25 bp, Artificial
  probe
  misc_feature (1)..(25): SEQ ID NO: 6688; WAN024BZN; Start 169; Stop 193
aacaaccagagtagtattaagcaaa

SEQ ID NO: 446274 - DNA, 25 bp, Artificial
  probe
  misc_feature (1)..(25): SEQ ID NO: 6688; WAN024BZN; Start 79; Stop 103
tggactcaccttccttctatctcat

SEQ ID NO: 446275 - DNA, 25 bp, Artificial
  probe
  misc_feature (1)..(25): SEQ ID NO: 6688; WAN024BZN; Start 75; Stop 99
ccattggactcaccttccttctatc

SEQ ID NO: 446276 - DNA, 25 bp, Artificial
  probe
  misc_feature (1)..(25): SEQ ID NO: 6688; WAN024BZN; Start 171; Stop 195
caaccagagtagtattaagcaaact

SEQ ID NO: 446277 - DNA, 25 bp, Artificial
  probe
  misc_feature (1)..(25): SEQ ID NO: 6688; WAN024BZN; Start 78; Stop 102
ttggactcaccttccttctatctca

SEQ ID NO: 446278 - DNA, 25 bp, Artificial
  probe
  misc_feature (1)..(25): SEQ ID NO: 6688; WAN024BZN; Start 149; Stop 173
gcttctgtatcaggtccttgaacaa

SEQ ID NO: 446279 - DNA, 25 bp, Artificial
  probe
  misc_feature (1)..(25): SEQ ID NO: 6688; WAN024BZN; Start 197; Stop 221
taactattactcaagaatcagtcca

SEQ ID NO: 446280 - DNA, 25 bp, Artificial
  probe
  misc_feature (1)..(25): SEQ ID NO: 6688; WAN024BZN; Start 13; Stop 37
tcctattatcgagagctgttccgta

SEQ ID NO: 446281 - DNA, 25 bp, Artificial
  probe
  misc_feature (1)..(25): SEQ ID NO: 6689; WAN024BOZ; Start 46; Stop 70
gtcgttgtcaataggatgcgtataa

SEQ ID NO: 446282 - DNA, 25 bp, Artificial
  probe
  misc_feature (1)..(25): SEQ ID NO: 6689; WAN024BOZ; Start 41; Stop 65
tattagtcgttgtcaataggatgcg

SEQ ID NO: 446283 - DNA, 25 bp, Artificial
  probe
  misc_feature (1)..(25): SEQ ID NO: 6689; WAN024BOZ; Start 458; Stop 482
tcataggattgatgttcatagcgtt

SEQ ID NO: 446284 - DNA, 25 bp, Artificial
  probe
  misc_feature (1)..(25): SEQ ID NO: 6689; WAN024BOZ; Start 457; Stop 481
ttcataggattgatgttcatagcgt

SEQ ID NO: 446285 - DNA, 25 bp, Artificial
  probe
  misc_feature (1)..(25): SEQ ID NO: 6689; WAN024BOZ; Start 456; Stop 480
attcataggattgatgttcatagcg

SEQ ID NO: 446286 - DNA, 25 bp, Artificial
  probe
  misc_feature (1)..(25): SEQ ID NO: 6689; WAN024BOZ; Start 45; Stop 69
agtcgttgtcaataggatgcgtata

SEQ ID NO: 446287 - DNA, 25 bp, Artificial
  probe
  misc_feature (1)..(25): SEQ ID NO: 6689; WAN024BOZ; Start 44; Stop 68
tagtcgttgtcaataggatgcgtat

SEQ ID NO: 446288 - DNA, 25 bp, Artificial
  probe
  misc_feature (1)..(25): SEQ ID NO: 6689; WAN024BOZ; Start 43; Stop 67
ttagtcgttgtcaataggatgcgta

SEQ ID NO: 446289 - DNA, 25 bp, Artificial
  probe
  misc_feature (1)..(25): SEQ ID NO: 6689; WAN024BOZ; Start 42; Stop 66
attagtcgttgtcaataggatgcgt

SEQ ID NO: 446290 - DNA, 25 bp, Artificial
  probe
  misc_feature (1)..(25): SEQ ID NO: 6689; WAN024BOZ; Start 48; Stop 72
cgttgtcaataggatgcgtataaat

SEQ ID NO: 446291 - DNA, 25 bp, Artificial
  probe
  misc_feature (1)..(25): SEQ ID NO: 6689; WAN024BOZ; Start 47; Stop 71
tcgttgtcaataggatgcgtataaa

SEQ ID NO: 446292 - DNA, 25 bp, Artificial
  probe
  misc_feature (1)..(25): SEQ ID NO: 6689; WAN024BOZ; Start 468; Stop 492
gatgttcatagcgtttctgtttcac

SEQ ID NO: 446293 - DNA, 25 bp, Artificial
  probe
  misc_feature (1)..(25): SEQ ID NO: 6689; WAN024BOZ; Start 411; Stop 435
agcacttatagcacactattatctt

SEQ ID NO: 446294 - DNA, 25 bp, Artificial
  probe
  misc_feature (1)..(25): SEQ ID NO: 6689; WAN024BOZ; Start 461; Stop 485
taggattgatgttcatagcgtttct

SEQ ID NO: 446295 - DNA, 25 bp, Artificial
  probe
  misc_feature (1)..(25): SEQ ID NO: 6689; WAN024BOZ; Start 465; Stop 489
attgatgttcatagcgtttctgttt

SEQ ID NO: 446296 - DNA, 25 bp, Artificial
  probe
  misc_feature (1)..(25): SEQ ID NO: 6689; WAN024BOZ; Start 464; Stop 488
gattgatgttcatagcgtttctgtt

SEQ ID NO: 446297 - DNA, 25 bp, Artificial
  probe
  misc_feature (1)..(25): SEQ ID NO: 6689; WAN024BOZ; Start 466; Stop 490
ttgatgttcatagcgtttctgtttc

SEQ ID NO: 446298 - DNA, 25 bp, Artificial
  probe
  misc_feature (1)..(25): SEQ ID NO: 6689; WAN024BOZ; Start 555; Stop 579
gctatgggcattggtatttatatct

SEQ ID NO: 446299 - DNA, 25 bp, Artificial
  probe
  misc_feature (1)..(25): SEQ ID NO: 6689; WAN024BOZ; Start 459; Stop 483
cataggattgatgttcatagcgttt

SEQ ID NO: 446300 - DNA, 25 bp, Artificial
  probe
  misc_feature (1)..(25): SEQ ID NO: 6689; WAN024BOZ; Start 408; Stop 432
tgtagcacttatagcacactattat

SEQ ID NO: 446301 - DNA, 25 bp, Artificial
  probe
  misc_feature (1)..(25): SEQ ID NO: 6689; WAN024BOZ; Start 460; Stop 484
ataggattgatgttcatagcgtttc

SEQ ID NO: 446302 - DNA, 25 bp, Artificial
  probe
  misc_feature (1)..(25): SEQ ID NO: 6689; WAN024BOZ; Start 480; Stop 504
gtttctgtttcacggatctatcatt

SEQ ID NO: 446303 - DNA, 25 bp, Artificial
  probe
  misc_feature (1)..(25): SEQ ID NO: 6689; WAN024BOZ; Start 274; Stop 298
tttctattctcctcagcatgtttct

SEQ ID NO: 446304 - DNA, 25 bp, Artificial
  probe
  misc_feature (1)..(25): SEQ ID NO: 6689; WAN024BOZ; Start 467; Stop 491
tgatgttcatagcgtttctgtttca

SEQ ID NO: 446305 - DNA, 25 bp, Artificial
  probe
  misc_feature (1)..(25): SEQ ID NO: 6689; WAN024BOZ; Start 481; Stop 505
tttctgtttcacggatctatcattt

SEQ ID NO: 446306 - DNA, 25 bp, Artificial
  probe
  misc_feature (1)..(25): SEQ ID NO: 6689; WAN024BOZ; Start 448; Stop 472
cgattcatattcataggattgatgt

SEQ ID NO: 446307 - DNA, 25 bp, Artificial
  probe
  misc_feature (1)..(25): SEQ ID NO: 6689; WAN024BOZ; Start 275; Stop 299
ttctattctcctcagcatgtttcta

SEQ ID NO: 446308 - DNA, 25 bp, Artificial
  probe
  misc_feature (1)..(25): SEQ ID NO: 6689; WAN024BOZ; Start 560; Stop 584
gggcattggtatttatatctatggt

SEQ ID NO: 446309 - DNA, 25 bp, Artificial
  probe
  misc_feature (1)..(25): SEQ ID NO: 6689; WAN024BOZ; Start 559; Stop 583
tgggcattggtatttatatctatgg

SEQ ID NO: 446310 - DNA, 25 bp, Artificial
  probe
  misc_feature (1)..(25): SEQ ID NO: 6689; WAN024BOZ; Start 462; Stop 486
aggattgatgttcatagcgtttctg

SEQ ID NO: 446311 - DNA, 25 bp, Artificial
  probe
  misc_feature (1)..(25): SEQ ID NO: 6689; WAN024BOZ; Start 276; Stop 300
tctattctcctcagcatgtttctat

SEQ ID NO: 446312 - DNA, 25 bp, Artificial
  probe
  misc_feature (1)..(25): SEQ ID NO: 6689; WAN024BOZ; Start 409; Stop 433
gtagcacttatagcacactattatc

SEQ ID NO: 446313 - DNA, 25 bp, Artificial
  probe
  misc_feature (1)..(25): SEQ ID NO: 6689; WAN024BOZ; Start 669; Stop 693
aagtcgtgttatgtattatacagcg

SEQ ID NO: 446314 - DNA, 25 bp, Artificial
  probe
  misc_feature (1)..(25): SEQ ID NO: 6690; WAN024BQO; Start 117; Stop 141
taatgatggaagcacagataagact

SEQ ID NO: 446315 - DNA, 25 bp, Artificial
  probe
  misc_feature (1)..(25): SEQ ID NO: 6690; WAN024BQO; Start 118; Stop 142
aatgatggaagcacagataagactc

SEQ ID NO: 446316 - DNA, 25 bp, Artificial
  probe
  misc_feature (1)..(25): SEQ ID NO: 6690; WAN024BQO; Start 73; Stop 97
aatgtagaggatgagttgaagagtt

SEQ ID NO: 446317 - DNA, 25 bp, Artificial
  probe
  misc_feature (1)..(25): SEQ ID NO: 6690; WAN024BQO; Start 116; Stop 140
ttaatgatggaagcacagataagac

SEQ ID NO: 446318 - DNA, 25 bp, Artificial
  probe
  misc_feature (1)..(25): SEQ ID NO: 6690; WAN024BQO; Start 72; Stop 96
caatgtagaggatgagttgaagagt

SEQ ID NO: 446319 - DNA, 25 bp, Artificial
  probe
  misc_feature (1)..(25): SEQ ID NO: 6690; WAN024BQO; Start 339; Stop 363
caatgtagatatggttgtgacgaat

SEQ ID NO: 446320 - DNA, 25 bp, Artificial
  probe
  misc_feature (1)..(25): SEQ ID NO: 6690; WAN024BQO; Start 340; Stop 364
aatgtagatatggttgtgacgaatt

SEQ ID NO: 446321 - DNA, 25 bp, Artificial
  probe
  misc_feature (1)..(25): SEQ ID NO: 6690; WAN024BQO; Start 119; Stop 143
atgatggaagcacagataagactct

SEQ ID NO: 446322 - DNA, 25 bp, Artificial
  probe
  misc_feature (1)..(25): SEQ ID NO: 6690; WAN024BQO; Start 128; Stop 152
gcacagataagactcttcaagtagt

SEQ ID NO: 446323 - DNA, 25 bp, Artificial
  probe
  misc_feature (1)..(25): SEQ ID NO: 6690; WAN024BQO; Start 127; Stop 151
agcacagataagactcttcaagtag

SEQ ID NO: 446324 - DNA, 25 bp, Artificial
  probe
  misc_feature (1)..(25): SEQ ID NO: 6690; WAN024BQO; Start 126; Stop 150
aagcacagataagactcttcaagta

SEQ ID NO: 446325 - DNA, 25 bp, Artificial
  probe
  misc_feature (1)..(25): SEQ ID NO: 6690; WAN024BQO; Start 120; Stop 144
tgatggaagcacagataagactctt

SEQ ID NO: 446326 - DNA, 25 bp, Artificial
  probe
  misc_feature (1)..(25): SEQ ID NO: 6690; WAN024BQO; Start 868; Stop 892
gactctcgtatgaagacaagctatt

SEQ ID NO: 446327 - DNA, 25 bp, Artificial
  probe
  misc_feature (1)..(25): SEQ ID NO: 6690; WAN024BQO; Start 338; Stop 362
ccaatgtagatatggttgtgacgaa

SEQ ID NO: 446328 - DNA, 25 bp, Artificial
  probe
  misc_feature (1)..(25): SEQ ID NO: 6690; WAN024BQO; Start 110; Stop 134
tgattattaatgatggaagcacaga

SEQ ID NO: 446329 - DNA, 25 bp, Artificial
  probe
  misc_feature (1)..(25): SEQ ID NO: 6690; WAN024BQO; Start 269; Stop 293
agatagtagatggagatgattgggt

SEQ ID NO: 446330 - DNA, 25 bp, Artificial
  probe
  misc_feature (1)..(25): SEQ ID NO: 6690; WAN024BQO; Start 227; Stop 251
cagtaaatagagggatagaggaagc

SEQ ID NO: 446331 - DNA, 25 bp, Artificial
  probe
  misc_feature (1)..(25): SEQ ID NO: 6690; WAN024BQO; Start 226; Stop 250
gcagtaaatagagggatagaggaag

SEQ ID NO: 446332 - DNA, 25 bp, Artificial
  probe
  misc_feature (1)..(25): SEQ ID NO: 6690; WAN024BQO; Start 225; Stop 249
agcagtaaatagagggatagaggaa

SEQ ID NO: 446333 - DNA, 25 bp, Artificial
  probe
  misc_feature (1)..(25): SEQ ID NO: 6690; WAN024BQO; Start 220; Stop 244
ggttcagcagtaaatagagggatag

SEQ ID NO: 446334 - DNA, 25 bp, Artificial
  probe
  misc_feature (1)..(25): SEQ ID NO: 6690; WAN024BQO; Start 81; Stop 105
ggatgagttgaagagtttgtttgaa

SEQ ID NO: 446335 - DNA, 25 bp, Artificial
  probe
  misc_feature (1)..(25): SEQ ID NO: 6690; WAN024BQO; Start 76; Stop 100
gtagaggatgagttgaagagtttgt

SEQ ID NO: 446336 - DNA, 25 bp, Artificial
  probe
  misc_feature (1)..(25): SEQ ID NO: 6690; WAN024BQO; Start 75; Stop 99
tgtagaggatgagttgaagagtttg

SEQ ID NO: 446337 - DNA, 25 bp, Artificial
  probe
  misc_feature (1)..(25): SEQ ID NO: 6690; WAN024BQO; Start 79; Stop 103
gaggatgagttgaagagtttgtttg

SEQ ID NO: 446338 - DNA, 25 bp, Artificial
  probe
  misc_feature (1)..(25): SEQ ID NO: 6690; WAN024BQO; Start 78; Stop 102
agaggatgagttgaagagtttgttt

SEQ ID NO: 446339 - DNA, 25 bp, Artificial
  probe
  misc_feature (1)..(25): SEQ ID NO: 6690; WAN024BQO; Start 785; Stop 809
tggcattcttatcagatgatagaga

SEQ ID NO: 446340 - DNA, 25 bp, Artificial
  probe
  misc_feature (1)..(25): SEQ ID NO: 6690; WAN024BQO; Start 77; Stop 101
tagaggatgagttgaagagtttgtt

SEQ ID NO: 446341 - DNA, 25 bp, Artificial
  probe
  misc_feature (1)..(25): SEQ ID NO: 6690; WAN024BQO; Start 80; Stop 104
aggatgagttgaagagtttgtttga

SEQ ID NO: 446342 - DNA, 25 bp, Artificial
  probe
  misc_feature (1)..(25): SEQ ID NO: 6690; WAN024BQO; Start 224; Stop 248
cagcagtaaatagagggatagagga

SEQ ID NO: 446343 - DNA, 25 bp, Artificial
  probe
  misc_feature (1)..(25): SEQ ID NO: 6690; WAN024BQO; Start 223; Stop 247
tcagcagtaaatagagggatagagg

SEQ ID NO: 446344 - DNA, 25 bp, Artificial
  probe
  misc_feature (1)..(25): SEQ ID NO: 6690; WAN024BQO; Start 221; Stop 245
gttcagcagtaaatagagggataga

SEQ ID NO: 446345 - DNA, 25 bp, Artificial
  probe
  misc_feature (1)..(25): SEQ ID NO: 6690; WAN024BQO; Start 74; Stop 98
atgtagaggatgagttgaagagttt

SEQ ID NO: 446346 - DNA, 25 bp, Artificial
  probe
  misc_feature (1)..(25): SEQ ID NO: 6690; WAN024BQO; Start 219; Stop 243
tggttcagcagtaaatagagggata

SEQ ID NO: 446347 - DNA, 25 bp, Artificial
  probe
  misc_feature (1)..(25): SEQ ID NO: 6691; WAN024AVH; Start 108; Stop 132
aatggaaccagtattaactatgccg

SEQ ID NO: 446348 - DNA, 25 bp, Artificial
  probe
  misc_feature (1)..(25): SEQ ID NO: 6691; WAN024AVH; Start 84; Stop 108
acctaatggttattatccttggcaa

SEQ ID NO: 446349 - DNA, 25 bp, Artificial
  probe
  misc_feature (1)..(25): SEQ ID NO: 6691; WAN024AVH; Start 168; Stop 192
aggatatattggaggaggtaatcat

SEQ ID NO: 446350 - DNA, 25 bp, Artificial
  probe
  misc_feature (1)..(25): SEQ ID NO: 6691; WAN024AVH; Start 169; Stop 193
ggatatattggaggaggtaatcatc

SEQ ID NO: 446351 - DNA, 25 bp, Artificial
  probe
  misc_feature (1)..(25): SEQ ID NO: 6691; WAN024AVH; Start 174; Stop 198
tattggaggaggtaatcatctttgc

SEQ ID NO: 446352 - DNA, 25 bp, Artificial
  probe
  misc_feature (1)..(25): SEQ ID NO: 6691; WAN024AVH; Start 150; Stop 174
cagaggaaccgatgatttaggatat

SEQ ID NO: 446353 - DNA, 25 bp, Artificial
  probe
  misc_feature (1)..(25): SEQ ID NO: 6691; WAN024AVH; Start 88; Stop 112
aatggttattatccttggcaaatgg

SEQ ID NO: 446354 - DNA, 25 bp, Artificial
  probe
  misc_feature (1)..(25): SEQ ID NO: 6691; WAN024AVH; Start 167; Stop 191
taggatatattggaggaggtaatca

SEQ ID NO: 446355 - DNA, 25 bp, Artificial
  probe
  misc_feature (1)..(25): SEQ ID NO: 6691; WAN024AVH; Start 149; Stop 173
ccagaggaaccgatgatttaggata

SEQ ID NO: 446356 - DNA, 25 bp, Artificial
  probe
  misc_feature (1)..(25): SEQ ID NO: 6691; WAN024AVH; Start 85; Stop 109
cctaatggttattatccttggcaaa

SEQ ID NO: 446357 - DNA, 25 bp, Artificial
  probe
  misc_feature (1)..(25): SEQ ID NO: 6691; WAN024AVH; Start 151; Stop 175
agaggaaccgatgatttaggatata

SEQ ID NO: 446358 - DNA, 25 bp, Artificial
  probe
  misc_feature (1)..(25): SEQ ID NO: 6691; WAN024AVH; Start 173; Stop 197
atattggaggaggtaatcatctttg

SEQ ID NO: 446359 - DNA, 25 bp, Artificial
  probe
  misc_feature (1)..(25): SEQ ID NO: 6691; WAN024AVH; Start 107; Stop 131
aaatggaaccagtattaactatgcc

SEQ ID NO: 446360 - DNA, 25 bp, Artificial
  probe
  misc_feature (1)..(25): SEQ ID NO: 6691; WAN024AVH; Start 104; Stop 128
ggcaaatggaaccagtattaactat

SEQ ID NO: 446361 - DNA, 25 bp, Artificial
  probe
  misc_feature (1)..(25): SEQ ID NO: 6691; WAN024AVH; Start 170; Stop 194
gatatattggaggaggtaatcatct

SEQ ID NO: 446362 - DNA, 25 bp, Artificial
  probe
  misc_feature (1)..(25): SEQ ID NO: 6691; WAN024AVH; Start 158; Stop 182
ccgatgatttaggatatattggagg

SEQ ID NO: 446363 - DNA, 25 bp, Artificial
  probe
  misc_feature (1)..(25): SEQ ID NO: 6691; WAN024AVH; Start 119; Stop 143
tattaactatgccggttcatggatt

SEQ ID NO: 446364 - DNA, 25 bp, Artificial
  probe
  misc_feature (1)..(25): SEQ ID NO: 6691; WAN024AVH; Start 118; Stop 142
gtattaactatgccggttcatggat

SEQ ID NO: 446365 - DNA, 25 bp, Artificial
  probe
  misc_feature (1)..(25): SEQ ID NO: 6691; WAN024AVH; Start 162; Stop 186
tgatttaggatatattggaggaggt

SEQ ID NO: 446366 - DNA, 25 bp, Artificial
  probe
  misc_feature (1)..(25): SEQ ID NO: 6691; WAN024AVH; Start 106; Stop 130
caaatggaaccagtattaactatgc

SEQ ID NO: 446367 - DNA, 25 bp, Artificial
  probe
  misc_feature (1)..(25): SEQ ID NO: 6691; WAN024AVH; Start 105; Stop 129
gcaaatggaaccagtattaactatg

SEQ ID NO: 446368 - DNA, 25 bp, Artificial
  probe
  misc_feature (1)..(25): SEQ ID NO: 6691; WAN024AVH; Start 92; Stop 116
gttattatccttggcaaatggaacc

SEQ ID NO: 446369 - DNA, 25 bp, Artificial
  probe
  misc_feature (1)..(25): SEQ ID NO: 6691; WAN024AVH; Start 91; Stop 115
ggttattatccttggcaaatggaac

SEQ ID NO: 446370 - DNA, 25 bp, Artificial
  probe
  misc_feature (1)..(25): SEQ ID NO: 6691; WAN024AVH; Start 89; Stop 113
atggttattatccttggcaaatgga

SEQ ID NO: 446371 - DNA, 25 bp, Artificial
  probe
  misc_feature (1)..(25): SEQ ID NO: 6691; WAN024AVH; Start 90; Stop 114
tggttattatccttggcaaatggaa

SEQ ID NO: 446372 - DNA, 25 bp, Artificial
  probe
  misc_feature (1)..(25): SEQ ID NO: 6691; WAN024AVH; Start 166; Stop 190
ttaggatatattggaggaggtaatc

SEQ ID NO: 446373 - DNA, 25 bp, Artificial
  probe
  misc_feature (1)..(25): SEQ ID NO: 6691; WAN024AVH; Start 103; Stop 127
tggcaaatggaaccagtattaacta

SEQ ID NO: 446374 - DNA, 25 bp, Artificial
  probe
  misc_feature (1)..(25): SEQ ID NO: 6691; WAN024AVH; Start 68; Stop 92
atccctatggtaaagaacctaatgg

SEQ ID NO: 446375 - DNA, 25 bp, Artificial
  probe
  misc_feature (1)..(25): SEQ ID NO: 6691; WAN024AVH; Start 101; Stop 125
cttggcaaatggaaccagtattaac

SEQ ID NO: 446376 - DNA, 25 bp, Artificial
  probe
  misc_feature (1)..(25): SEQ ID NO: 6691; WAN024AVH; Start 87; Stop 111
taatggttattatccttggcaaatg

SEQ ID NO: 446377 - DNA, 25 bp, Artificial
  probe
  misc_feature (1)..(25): SEQ ID NO: 6691; WAN024AVH; Start 69; Stop 93
tccctatggtaaagaacctaatggt

SEQ ID NO: 446378 - DNA, 25 bp, Artificial
  probe
  misc_feature (1)..(25): SEQ ID NO: 6691; WAN024AVH; Start 171; Stop 195
atatattggaggaggtaatcatctt

SEQ ID NO: 446379 - DNA, 25 bp, Artificial
  probe
  misc_feature (1)..(25): SEQ ID NO: 6691; WAN024AVH; Start 93; Stop 117
ttattatccttggcaaatggaacca

SEQ ID NO: 446380 - DNA, 25 bp, Artificial
  probe
  misc_feature (1)..(25): SEQ ID NO: 6692; WAN024F8W; Start 84; Stop 108
agtcaaagctcaagacctaactaat

SEQ ID NO: 446381 - DNA, 25 bp, Artificial
  probe
  misc_feature (1)..(25): SEQ ID NO: 6692; WAN024F8W; Start 83; Stop 107
cagtcaaagctcaagacctaactaa

SEQ ID NO: 446382 - DNA, 25 bp, Artificial
  probe
  misc_feature (1)..(25): SEQ ID NO: 6692; WAN024F8W; Start 82; Stop 106
gcagtcaaagctcaagacctaacta

SEQ ID NO: 446383 - DNA, 25 bp, Artificial
  probe
  misc_feature (1)..(25): SEQ ID NO: 6692; WAN024F8W; Start 2; Stop 26
tgattttaattacaggggcaaatgg

SEQ ID NO: 446384 - DNA, 25 bp, Artificial
  probe
  misc_feature (1)..(25): SEQ ID NO: 6692; WAN024F8W; Start 3; Stop 27
gattttaattacaggggcaaatggc

SEQ ID NO: 446385 - DNA, 25 bp, Artificial
  probe
  misc_feature (1)..(25): SEQ ID NO: 6692; WAN024F8W; Start 56; Stop 80
tggatgaacgtaatgaagaatacgc

SEQ ID NO: 446386 - DNA, 25 bp, Artificial
  probe
  misc_feature (1)..(25): SEQ ID NO: 6692; WAN024F8W; Start 1; Stop 25
atgattttaattacaggggcaaatg

SEQ ID NO: 446387 - DNA, 25 bp, Artificial
  probe
  misc_feature (1)..(25): SEQ ID NO: 6692; WAN024F8W; Start 65; Stop 89
gtaatgaagaatacgcggcagtcaa

SEQ ID NO: 446388 - DNA, 25 bp, Artificial
  probe
  misc_feature (1)..(25): SEQ ID NO: 6692; WAN024F8W; Start 66; Stop 90
taatgaagaatacgcggcagtcaaa

SEQ ID NO: 446389 - DNA, 25 bp, Artificial
  probe
  misc_feature (1)..(25): SEQ ID NO: 6692; WAN024F8W; Start 81; Stop 105
ggcagtcaaagctcaagacctaact

SEQ ID NO: 446390 - DNA, 25 bp, Artificial
  probe
  misc_feature (1)..(25): SEQ ID NO: 6692; WAN024F8W; Start 58; Stop 82
gatgaacgtaatgaagaatacgcgg

SEQ ID NO: 446391 - DNA, 25 bp, Artificial
  probe
  misc_feature (1)..(25): SEQ ID NO: 6692; WAN024F8W; Start 57; Stop 81
ggatgaacgtaatgaagaatacgcg

SEQ ID NO: 446392 - DNA, 25 bp, Artificial
  probe
  misc_feature (1)..(25): SEQ ID NO: 6692; WAN024F8W; Start 67; Stop 91
aatgaagaatacgcggcagtcaaag

SEQ ID NO: 446393 - DNA, 25 bp, Artificial
  probe
  misc_feature (1)..(25): SEQ ID NO: 6692; WAN024F8W; Start 59; Stop 83
atgaacgtaatgaagaatacgcggc

SEQ ID NO: 446394 - DNA, 25 bp, Artificial
  probe
  misc_feature (1)..(25): SEQ ID NO: 6692; WAN024F8W; Start 4; Stop 28
attttaattacaggggcaaatggcc

SEQ ID NO: 446395 - DNA, 25 bp, Artificial
  probe
  misc_feature (1)..(25): SEQ ID NO: 6692; WAN024F8W; Start 61; Stop 85
gaacgtaatgaagaatacgcggcag

SEQ ID NO: 446396 - DNA, 25 bp, Artificial
  probe
  misc_feature (1)..(25): SEQ ID NO: 6693; WAN024C3H; Start 185; Stop 209
ttgctactgataatgtccgtgataa

SEQ ID NO: 446397 - DNA, 25 bp, Artificial
  probe
  misc_feature (1)..(25): SEQ ID NO: 6693; WAN024C3H; Start 184; Stop 208
cttgctactgataatgtccgtgata

SEQ ID NO: 446398 - DNA, 25 bp, Artificial
  probe
  misc_feature (1)..(25): SEQ ID NO: 6693; WAN024C3H; Start 500; Stop 524
gtatggcttactatggtggtcattg

SEQ ID NO: 446399 - DNA, 25 bp, Artificial
  probe
  misc_feature (1)..(25): SEQ ID NO: 6693; WAN024C3H; Start 183; Stop 207
tcttgctactgataatgtccgtgat

SEQ ID NO: 446400 - DNA, 25 bp, Artificial
  probe
  misc_feature (1)..(25): SEQ ID NO: 6693; WAN024C3H; Start 493; Stop 517
aatgatcgtatggcttactatggtg

SEQ ID NO: 446401 - DNA, 25 bp, Artificial
  probe
  misc_feature (1)..(25): SEQ ID NO: 6693; WAN024C3H; Start 492; Stop 516
taatgatcgtatggcttactatggt

SEQ ID NO: 446402 - DNA, 25 bp, Artificial
  probe
  misc_feature (1)..(25): SEQ ID NO: 6693; WAN024C3H; Start 311; Stop 335
attatgctccaattcgtgagttctt

SEQ ID NO: 446403 - DNA, 25 bp, Artificial
  probe
  misc_feature (1)..(25): SEQ ID NO: 6693; WAN024C3H; Start 338; Stop 362
ggcgaatcaataagtatcatggtta

SEQ ID NO: 446404 - DNA, 25 bp, Artificial
  probe
  misc_feature (1)..(25): SEQ ID NO: 6693; WAN024C3H; Start 310; Stop 334
gattatgctccaattcgtgagttct

SEQ ID NO: 446405 - DNA, 25 bp, Artificial
  probe
  misc_feature (1)..(25): SEQ ID NO: 6693; WAN024C3H; Start 501; Stop 525
tatggcttactatggtggtcattgg

SEQ ID NO: 446406 - DNA, 25 bp, Artificial
  probe
  misc_feature (1)..(25): SEQ ID NO: 6693; WAN024C3H; Start 491; Stop 515
ttaatgatcgtatggcttactatgg

SEQ ID NO: 446407 - DNA, 25 bp, Artificial
  probe
  misc_feature (1)..(25): SEQ ID NO: 6693; WAN024C3H; Start 182; Stop 206
gtcttgctactgataatgtccgtga

SEQ ID NO: 446408 - DNA, 25 bp, Artificial
  probe
  misc_feature (1)..(25): SEQ ID NO: 6693; WAN024C3H; Start 494; Stop 518
atgatcgtatggcttactatggtgg

SEQ ID NO: 446409 - DNA, 25 bp, Artificial
  probe
  misc_feature (1)..(25): SEQ ID NO: 6693; WAN024C3H; Start 499; Stop 523
cgtatggcttactatggtggtcatt

SEQ ID NO: 446410 - DNA, 25 bp, Artificial
  probe
  misc_feature (1)..(25): SEQ ID NO: 6693; WAN024C3H; Start 339; Stop 363
gcgaatcaataagtatcatggttac

SEQ ID NO: 446411 - DNA, 25 bp, Artificial
  probe
  misc_feature (1)..(25): SEQ ID NO: 6693; WAN024C3H; Start 186; Stop 210
tgctactgataatgtccgtgataaa

SEQ ID NO: 446412 - DNA, 25 bp, Artificial
  probe
  misc_feature (1)..(25): SEQ ID NO: 6693; WAN024C3H; Start 187; Stop 211
gctactgataatgtccgtgataaac

SEQ ID NO: 446413 - DNA, 25 bp, Artificial
  probe
  misc_feature (1)..(25): SEQ ID NO: 6693; WAN024C3H; Start 276; Stop 300
ggctagtagacatggtcatatagat

SEQ ID NO: 446414 - DNA, 25 bp, Artificial
  probe
  misc_feature (1)..(25): SEQ ID NO: 6693; WAN024C3H; Start 85; Stop 109
aaatatggcaaagacacagatgaaa

SEQ ID NO: 446415 - DNA, 25 bp, Artificial
  probe
  misc_feature (1)..(25): SEQ ID NO: 6693; WAN024C3H; Start 190; Stop 214
actgataatgtccgtgataaacttc

SEQ ID NO: 446416 - DNA, 25 bp, Artificial
  probe
  misc_feature (1)..(25): SEQ ID NO: 6693; WAN024C3H; Start 496; Stop 520
gatcgtatggcttactatggtggtc

SEQ ID NO: 446417 - DNA, 25 bp, Artificial
  probe
  misc_feature (1)..(25): SEQ ID NO: 6693; WAN024C3H; Start 610; Stop 634
gcattaggtctaaatatggcgtatg

SEQ ID NO: 446418 - DNA, 25 bp, Artificial
  probe
  misc_feature (1)..(25): SEQ ID NO: 6693; WAN024C3H; Start 191; Stop 215
ctgataatgtccgtgataaacttct

SEQ ID NO: 446419 - DNA, 25 bp, Artificial
  probe
  misc_feature (1)..(25): SEQ ID NO: 6693; WAN024C3H; Start 332; Stop 356
tctttgggcgaatcaataagtatca

SEQ ID NO: 446420 - DNA, 25 bp, Artificial
  probe
  misc_feature (1)..(25): SEQ ID NO: 6693; WAN024C3H; Start 330; Stop 354
gttctttgggcgaatcaataagtat

SEQ ID NO: 446421 - DNA, 25 bp, Artificial
  probe
  misc_feature (1)..(25): SEQ ID NO: 6693; WAN024C3H; Start 497; Stop 521
atcgtatggcttactatggtggtca

SEQ ID NO: 446422 - DNA, 25 bp, Artificial
  probe
  misc_feature (1)..(25): SEQ ID NO: 6693; WAN024C3H; Start 333; Stop 357
ctttgggcgaatcaataagtatcat

SEQ ID NO: 446423 - DNA, 25 bp, Artificial
  probe
  misc_feature (1)..(25): SEQ ID NO: 6693; WAN024C3H; Start 331; Stop 355
ttctttgggcgaatcaataagtatc

SEQ ID NO: 446424 - DNA, 25 bp, Artificial
  probe
  misc_feature (1)..(25): SEQ ID NO: 6693; WAN024C3H; Start 329; Stop 353
agttctttgggcgaatcaataagta

SEQ ID NO: 446425 - DNA, 25 bp, Artificial
  probe
  misc_feature (1)..(25): SEQ ID NO: 6693; WAN024C3H; Start 46; Stop 70
atttcaacatacaacactatctcgt

SEQ ID NO: 446426 - DNA, 25 bp, Artificial
  probe
  misc_feature (1)..(25): SEQ ID NO: 6693; WAN024C3H; Start 309; Stop 333
ggattatgctccaattcgtgagttc

SEQ ID NO: 446427 - DNA, 25 bp, Artificial
  probe
  misc_feature (1)..(25): SEQ ID NO: 6693; WAN024C3H; Start 498; Stop 522
tcgtatggcttactatggtggtcat

SEQ ID NO: 446428 - DNA, 25 bp, Artificial
  probe
  misc_feature (1)..(25): SEQ ID NO: 6693; WAN024C3H; Start 48; Stop 72
ttcaacatacaacactatctcgttt

SEQ ID NO: 446429 - DNA, 25 bp, Artificial
  probe
  misc_feature (1)..(25): SEQ ID NO: 6694; WAN024FUG; Start 195; Stop 219
agatattgtcattactcatggtgga

SEQ ID NO: 446430 - DNA, 25 bp, Artificial
  probe
  misc_feature (1)..(25): SEQ ID NO: 6694; WAN024FUG; Start 194; Stop 218
cagatattgtcattactcatggtgg

SEQ ID NO: 446431 - DNA, 25 bp, Artificial
  probe
  misc_feature (1)..(25): SEQ ID NO: 6694; WAN024FUG; Start 296; Stop 320
atgtgaatgaccatcagttagaatt

SEQ ID NO: 446432 - DNA, 25 bp, Artificial
  probe
  misc_feature (1)..(25): SEQ ID NO: 6694; WAN024FUG; Start 295; Stop 319
catgtgaatgaccatcagttagaat

SEQ ID NO: 446433 - DNA, 25 bp, Artificial
  probe
  misc_feature (1)..(25): SEQ ID NO: 6694; WAN024FUG; Start 13; Stop 37
actgtaggtacacatgaacaacaat

SEQ ID NO: 446434 - DNA, 25 bp, Artificial
  probe
  misc_feature (1)..(25): SEQ ID NO: 6694; WAN024FUG; Start 14; Stop 38
ctgtaggtacacatgaacaacaatt

SEQ ID NO: 446435 - DNA, 25 bp, Artificial
  probe
  misc_feature (1)..(25): SEQ ID NO: 6694; WAN024FUG; Start 193; Stop 217
tcagatattgtcattactcatggtg

SEQ ID NO: 446436 - DNA, 25 bp, Artificial
  probe
  misc_feature (1)..(25): SEQ ID NO: 6694; WAN024FUG; Start 294; Stop 318
gcatgtgaatgaccatcagttagaa

SEQ ID NO: 446437 - DNA, 25 bp, Artificial
  probe
  misc_feature (1)..(25): SEQ ID NO: 6694; WAN024FUG; Start 197; Stop 221
atattgtcattactcatggtggacc

SEQ ID NO: 446438 - DNA, 25 bp, Artificial
  probe
  misc_feature (1)..(25): SEQ ID NO: 6694; WAN024FUG; Start 12; Stop 36
gactgtaggtacacatgaacaacaa

SEQ ID NO: 446439 - DNA, 25 bp, Artificial
  probe
  misc_feature (1)..(25): SEQ ID NO: 6694; WAN024FUG; Start 196; Stop 220
gatattgtcattactcatggtggac

SEQ ID NO: 446440 - DNA, 25 bp, Artificial
  probe
  misc_feature (1)..(25): SEQ ID NO: 6694; WAN024FUG; Start 292; Stop 316
gagcatgtgaatgaccatcagttag

SEQ ID NO: 446441 - DNA, 25 bp, Artificial
  probe
  misc_feature (1)..(25): SEQ ID NO: 6694; WAN024FUG; Start 293; Stop 317
agcatgtgaatgaccatcagttaga

SEQ ID NO: 446442 - DNA, 25 bp, Artificial
  probe
  misc_feature (1)..(25): SEQ ID NO: 6694; WAN024FUG; Start 291; Stop 315
agagcatgtgaatgaccatcagtta

SEQ ID NO: 446443 - DNA, 25 bp, Artificial
  probe
  misc_feature (1)..(25): SEQ ID NO: 6694; WAN024FUG; Start 11; Stop 35
tgactgtaggtacacatgaacaaca

SEQ ID NO: 446444 - DNA, 25 bp, Artificial
  probe
  misc_feature (1)..(25): SEQ ID NO: 6694; WAN024FUG; Start 192; Stop 216
atcagatattgtcattactcatggt

SEQ ID NO: 446445 - DNA, 25 bp, Artificial
  probe
  misc_feature (1)..(25): SEQ ID NO: 6694; WAN024FUG; Start 10; Stop 34
gtgactgtaggtacacatgaacaac

SEQ ID NO: 446446 - DNA, 25 bp, Artificial
  probe
  misc_feature (1)..(25): SEQ ID NO: 6694; WAN024FUG; Start 254; Stop 278
aaattccgatagttgttcctagaca

SEQ ID NO: 446447 - DNA, 25 bp, Artificial
  probe
  misc_feature (1)..(25): SEQ ID NO: 6694; WAN024FUG; Start 290; Stop 314
aagagcatgtgaatgaccatcagtt

SEQ ID NO: 446448 - DNA, 25 bp, Artificial
  probe
  misc_feature (1)..(25): SEQ ID NO: 6694; WAN024FUG; Start 287; Stop 311
ttgaagagcatgtgaatgaccatca

SEQ ID NO: 446449 - DNA, 25 bp, Artificial
  probe
  misc_feature (1)..(25): SEQ ID NO: 6694; WAN024FUG; Start 20; Stop 44
gtacacatgaacaacaatttgatcg

SEQ ID NO: 446450 - DNA, 25 bp, Artificial
  probe
  misc_feature (1)..(25): SEQ ID NO: 6694; WAN024FUG; Start 198; Stop 222
tattgtcattactcatggtggacca

SEQ ID NO: 446451 - DNA, 25 bp, Artificial
  probe
  misc_feature (1)..(25): SEQ ID NO: 6694; WAN024FUG; Start 18; Stop 42
aggtacacatgaacaacaatttgat

SEQ ID NO: 446452 - DNA, 25 bp, Artificial
  probe
  misc_feature (1)..(25): SEQ ID NO: 6694; WAN024FUG; Start 19; Stop 43
ggtacacatgaacaacaatttgatc

SEQ ID NO: 446453 - DNA, 25 bp, Artificial
  probe
  misc_feature (1)..(25): SEQ ID NO: 6694; WAN024FUG; Start 285; Stop 309
atttgaagagcatgtgaatgaccat

SEQ ID NO: 446454 - DNA, 25 bp, Artificial
  probe
  misc_feature (1)..(25): SEQ ID NO: 6694; WAN024FUG; Start 333; Stop 357
aaagcagacttacccaattattgta

SEQ ID NO: 446455 - DNA, 25 bp, Artificial
  probe
  misc_feature (1)..(25): SEQ ID NO: 6694; WAN024FUG; Start 332; Stop 356
taaagcagacttacccaattattgt

SEQ ID NO: 446456 - DNA, 25 bp, Artificial
  probe
  misc_feature (1)..(25): SEQ ID NO: 6694; WAN024FUG; Start 17; Stop 41
taggtacacatgaacaacaatttga

SEQ ID NO: 446457 - DNA, 25 bp, Artificial
  probe
  misc_feature (1)..(25): SEQ ID NO: 6694; WAN024FUG; Start 16; Stop 40
gtaggtacacatgaacaacaatttg

SEQ ID NO: 446458 - DNA, 25 bp, Artificial
  probe
  misc_feature (1)..(25): SEQ ID NO: 6694; WAN024FUG; Start 284; Stop 308
aatttgaagagcatgtgaatgacca

SEQ ID NO: 446459 - DNA, 25 bp, Artificial
  probe
  misc_feature (1)..(25): SEQ ID NO: 6694; WAN024FUG; Start 289; Stop 313
gaagagcatgtgaatgaccatcagt

SEQ ID NO: 446460 - DNA, 25 bp, Artificial
  probe
  misc_feature (1)..(25): SEQ ID NO: 6694; WAN024FUG; Start 288; Stop 312
tgaagagcatgtgaatgaccatcag

SEQ ID NO: 446461 - DNA, 25 bp, Artificial
  probe
  misc_feature (1)..(25): SEQ ID NO: 6694; WAN024FUG; Start 15; Stop 39
tgtaggtacacatgaacaacaattt

SEQ ID NO: 446462 - DNA, 25 bp, Artificial
  probe
  misc_feature (1)..(25): SEQ ID NO: 6695; WAN024DBX; Start 24; Stop 48
tgaagaacttgtgacaccgattata

SEQ ID NO: 446463 - DNA, 25 bp, Artificial
  probe
  misc_feature (1)..(25): SEQ ID NO: 6695; WAN024DBX; Start 23; Stop 47
atgaagaacttgtgacaccgattat

SEQ ID NO: 446464 - DNA, 25 bp, Artificial
  probe
  misc_feature (1)..(25): SEQ ID NO: 6695; WAN024DBX; Start 25; Stop 49
gaagaacttgtgacaccgattatat

SEQ ID NO: 446465 - DNA, 25 bp, Artificial
  probe
  misc_feature (1)..(25): SEQ ID NO: 6695; WAN024DBX; Start 26; Stop 50
aagaacttgtgacaccgattatatc

SEQ ID NO: 446466 - DNA, 25 bp, Artificial
  probe
  misc_feature (1)..(25): SEQ ID NO: 6695; WAN024DBX; Start 22; Stop 46
gatgaagaacttgtgacaccgatta

SEQ ID NO: 446467 - DNA, 25 bp, Artificial
  probe
  misc_feature (1)..(25): SEQ ID NO: 6695; WAN024DBX; Start 18; Stop 42
aatagatgaagaacttgtgacaccg

SEQ ID NO: 446468 - DNA, 25 bp, Artificial
  probe
  misc_feature (1)..(25): SEQ ID NO: 6695; WAN024DBX; Start 17; Stop 41
caatagatgaagaacttgtgacacc

SEQ ID NO: 446469 - DNA, 25 bp, Artificial
  probe
  misc_feature (1)..(25): SEQ ID NO: 6695; WAN024DBX; Start 16; Stop 40
gcaatagatgaagaacttgtgacac

SEQ ID NO: 446470 - DNA, 25 bp, Artificial
  probe
  misc_feature (1)..(25): SEQ ID NO: 6695; WAN024DBX; Start 27; Stop 51
agaacttgtgacaccgattatatca

SEQ ID NO: 446471 - DNA, 25 bp, Artificial
  probe
  misc_feature (1)..(25): SEQ ID NO: 6695; WAN024DBX; Start 28; Stop 52
gaacttgtgacaccgattatatcag

SEQ ID NO: 446472 - DNA, 25 bp, Artificial
  probe
  misc_feature (1)..(25): SEQ ID NO: 6695; WAN024DBX; Start 29; Stop 53
aacttgtgacaccgattatatcagg

SEQ ID NO: 446473 - DNA, 25 bp, Artificial
  probe
  misc_feature (1)..(25): SEQ ID NO: 6695; WAN024DBX; Start 34; Stop 58
gtgacaccgattatatcaggacttg

SEQ ID NO: 446474 - DNA, 25 bp, Artificial
  probe
  misc_feature (1)..(25): SEQ ID NO: 6695; WAN024DBX; Start 31; Stop 55
cttgtgacaccgattatatcaggac

SEQ ID NO: 446475 - DNA, 25 bp, Artificial
  probe
  misc_feature (1)..(25): SEQ ID NO: 6695; WAN024DBX; Start 20; Stop 44
tagatgaagaacttgtgacaccgat

SEQ ID NO: 446476 - DNA, 25 bp, Artificial
  probe
  misc_feature (1)..(25): SEQ ID NO: 6695; WAN024DBX; Start 19; Stop 43
atagatgaagaacttgtgacaccga

SEQ ID NO: 446477 - DNA, 25 bp, Artificial
  probe
  misc_feature (1)..(25): SEQ ID NO: 6695; WAN024DBX; Start 33; Stop 57
tgtgacaccgattatatcaggactt

SEQ ID NO: 446478 - DNA, 25 bp, Artificial
  probe
  misc_feature (1)..(25): SEQ ID NO: 6695; WAN024DBX; Start 32; Stop 56
ttgtgacaccgattatatcaggact

SEQ ID NO: 446479 - DNA, 25 bp, Artificial
  probe
  misc_feature (1)..(25): SEQ ID NO: 6695; WAN024DBX; Start 30; Stop 54
acttgtgacaccgattatatcagga

SEQ ID NO: 446480 - DNA, 25 bp, Artificial
  probe
  misc_feature (1)..(25): SEQ ID NO: 6695; WAN024DBX; Start 21; Stop 45
agatgaagaacttgtgacaccgatt

SEQ ID NO: 446481 - DNA, 25 bp, Artificial
  probe
  misc_feature (1)..(25): SEQ ID NO: 6695; WAN024DBX; Start 35; Stop 59
tgacaccgattatatcaggacttgc

SEQ ID NO: 446482 - DNA, 25 bp, Artificial
  probe
  misc_feature (1)..(25): SEQ ID NO: 6695; WAN024DBX; Start 14; Stop 38
ctgcaatagatgaagaacttgtgac

SEQ ID NO: 446483 - DNA, 25 bp, Artificial
  probe
  misc_feature (1)..(25): SEQ ID NO: 6695; WAN024DBX; Start 15; Stop 39
tgcaatagatgaagaacttgtgaca

SEQ ID NO: 446484 - DNA, 25 bp, Artificial
  probe
  misc_feature (1)..(25): SEQ ID NO: 6695; WAN024DBX; Start 13; Stop 37
gctgcaatagatgaagaacttgtga

SEQ ID NO: 446485 - DNA, 25 bp, Artificial
  probe
  misc_feature (1)..(25): SEQ ID NO: 6695; WAN024DBX; Start 36; Stop 60
gacaccgattatatcaggacttgca

SEQ ID NO: 446486 - DNA, 25 bp, Artificial
  probe
  misc_feature (1)..(25): SEQ ID NO: 6695; WAN024DBX; Start 12; Stop 36
cgctgcaatagatgaagaacttgtg

SEQ ID NO: 446487 - DNA, 25 bp, Artificial
  probe
  misc_feature (1)..(25): SEQ ID NO: 6695; WAN024DBX; Start 9; Stop 33
gaccgctgcaatagatgaagaactt

SEQ ID NO: 446488 - DNA, 25 bp, Artificial
  probe
  misc_feature (1)..(25): SEQ ID NO: 6695; WAN024DBX; Start 7; Stop 31
aagaccgctgcaatagatgaagaac

SEQ ID NO: 446489 - DNA, 25 bp, Artificial
  probe
  misc_feature (1)..(25): SEQ ID NO: 6695; WAN024DBX; Start 11; Stop 35
ccgctgcaatagatgaagaacttgt

SEQ ID NO: 446490 - DNA, 25 bp, Artificial
  probe
  misc_feature (1)..(25): SEQ ID NO: 6695; WAN024DBX; Start 10; Stop 34
accgctgcaatagatgaagaacttg

SEQ ID NO: 446491 - DNA, 25 bp, Artificial
  probe
  misc_feature (1)..(25): SEQ ID NO: 6695; WAN024DBX; Start 6; Stop 30
aaagaccgctgcaatagatgaagaa

SEQ ID NO: 446492 - DNA, 25 bp, Artificial
  probe
  misc_feature (1)..(25): SEQ ID NO: 6695; WAN024DBX; Start 8; Stop 32
agaccgctgcaatagatgaagaact

SEQ ID NO: 446493 - DNA, 25 bp, Artificial
  probe
  misc_feature (1)..(25): SEQ ID NO: 6695; WAN024DBX; Start 37; Stop 61
acaccgattatatcaggacttgcaa

SEQ ID NO: 446494 - DNA, 25 bp, Artificial
  probe
  misc_feature (1)..(25): SEQ ID NO: 6695; WAN024DBX; Start 57; Stop 81
tgcaagaggatttcttaacatagtt

SEQ ID NO: 446495 - DNA, 25 bp, Artificial
  probe
  misc_feature (1)..(25): SEQ ID NO: 6696; WAN024BUH; Start 30; Stop 54
tatcaaagagattgggatggctatc

SEQ ID NO: 446496 - DNA, 25 bp, Artificial
  probe
  misc_feature (1)..(25): SEQ ID NO: 6696; WAN024BUH; Start 28; Stop 52
tttatcaaagagattgggatggcta

SEQ ID NO: 446497 - DNA, 25 bp, Artificial
  probe
  misc_feature (1)..(25): SEQ ID NO: 6696; WAN024BUH; Start 29; Stop 53
ttatcaaagagattgggatggctat

SEQ ID NO: 446498 - DNA, 25 bp, Artificial
  probe
  misc_feature (1)..(25): SEQ ID NO: 6696; WAN024BUH; Start 3; Stop 27
gcaaaggagagaaataatgaatgat

SEQ ID NO: 446499 - DNA, 25 bp, Artificial
  probe
  misc_feature (1)..(25): SEQ ID NO: 6696; WAN024BUH; Start 89; Stop 113
gtagcactagaggaggacaaatcag

SEQ ID NO: 446500 - DNA, 25 bp, Artificial
  probe
  misc_feature (1)..(25): SEQ ID NO: 6696; WAN024BUH; Start 90; Stop 114
tagcactagaggaggacaaatcaga

SEQ ID NO: 446501 - DNA, 25 bp, Artificial
  probe
  misc_feature (1)..(25): SEQ ID NO: 6696; WAN024BUH; Start 2; Stop 26
tgcaaaggagagaaataatgaatga

SEQ ID NO: 446502 - DNA, 25 bp, Artificial
  probe
  misc_feature (1)..(25): SEQ ID NO: 6696; WAN024BUH; Start 1; Stop 25
atgcaaaggagagaaataatgaatg

SEQ ID NO: 446503 - DNA, 25 bp, Artificial
  probe
  misc_feature (1)..(25): SEQ ID NO: 6696; WAN024BUH; Start 27; Stop 51
ttttatcaaagagattgggatggct

SEQ ID NO: 446504 - DNA, 25 bp, Artificial
  probe
  misc_feature (1)..(25): SEQ ID NO: 6696; WAN024BUH; Start 26; Stop 50
attttatcaaagagattgggatggc

SEQ ID NO: 446505 - DNA, 25 bp, Artificial
  probe
  misc_feature (1)..(25): SEQ ID NO: 6696; WAN024BUH; Start 88; Stop 112
cgtagcactagaggaggacaaatca

SEQ ID NO: 446506 - DNA, 25 bp, Artificial
  probe
  misc_feature (1)..(25): SEQ ID NO: 6696; WAN024BUH; Start 25; Stop 49
gattttatcaaagagattgggatgg

SEQ ID NO: 446507 - DNA, 25 bp, Artificial
  probe
  misc_feature (1)..(25): SEQ ID NO: 6696; WAN024BUH; Start 34; Stop 58
aaagagattgggatggctatcctat

SEQ ID NO: 446508 - DNA, 25 bp, Artificial
  probe
  misc_feature (1)..(25): SEQ ID NO: 6696; WAN024BUH; Start 35; Stop 59
aagagattgggatggctatcctatg

SEQ ID NO: 446509 - DNA, 25 bp, Artificial
  probe
  misc_feature (1)..(25): SEQ ID NO: 6696; WAN024BUH; Start 33; Stop 57
caaagagattgggatggctatccta

SEQ ID NO: 446510 - DNA, 25 bp, Artificial
  probe
  misc_feature (1)..(25): SEQ ID NO: 6696; WAN024BUH; Start 4; Stop 28
caaaggagagaaataatgaatgatt

SEQ ID NO: 446511 - DNA, 25 bp, Artificial
  probe
  misc_feature (1)..(25): SEQ ID NO: 6696; WAN024BUH; Start 31; Stop 55
atcaaagagattgggatggctatcc

SEQ ID NO: 446512 - DNA, 25 bp, Artificial
  probe
  misc_feature (1)..(25): SEQ ID NO: 6696; WAN024BUH; Start 39; Stop 63
gattgggatggctatcctatggatg

SEQ ID NO: 446513 - DNA, 25 bp, Artificial
  probe
  misc_feature (1)..(25): SEQ ID NO: 6696; WAN024BUH; Start 38; Stop 62
agattgggatggctatcctatggat

SEQ ID NO: 446514 - DNA, 25 bp, Artificial
  probe
  misc_feature (1)..(25): SEQ ID NO: 6696; WAN024BUH; Start 87; Stop 111
gcgtagcactagaggaggacaaatc

SEQ ID NO: 446515 - DNA, 25 bp, Artificial
  probe
  misc_feature (1)..(25): SEQ ID NO: 6696; WAN024BUH; Start 40; Stop 64
attgggatggctatcctatggatgt

SEQ ID NO: 446516 - DNA, 25 bp, Artificial
  probe
  misc_feature (1)..(25): SEQ ID NO: 6696; WAN024BUH; Start 37; Stop 61
gagattgggatggctatcctatgga

SEQ ID NO: 446517 - DNA, 25 bp, Artificial
  probe
  misc_feature (1)..(25): SEQ ID NO: 6696; WAN024BUH; Start 36; Stop 60
agagattgggatggctatcctatgg

SEQ ID NO: 446518 - DNA, 25 bp, Artificial
  probe
  misc_feature (1)..(25): SEQ ID NO: 6696; WAN024BUH; Start 42; Stop 66
tgggatggctatcctatggatgttt

SEQ ID NO: 446519 - DNA, 25 bp, Artificial
  probe
  misc_feature (1)..(25): SEQ ID NO: 6696; WAN024BUH; Start 41; Stop 65
ttgggatggctatcctatggatgtt

SEQ ID NO: 446520 - DNA, 25 bp, Artificial
  probe
  misc_feature (1)..(25): SEQ ID NO: 6696; WAN024BUH; Start 32; Stop 56
tcaaagagattgggatggctatcct

SEQ ID NO: 446521 - DNA, 25 bp, Artificial
  probe
  misc_feature (1)..(25): SEQ ID NO: 6696; WAN024BUH; Start 86; Stop 110
agcgtagcactagaggaggacaaat

SEQ ID NO: 446522 - DNA, 25 bp, Artificial
  probe
  misc_feature (1)..(25): SEQ ID NO: 6696; WAN024BUH; Start 24; Stop 48
tgattttatcaaagagattgggatg

SEQ ID NO: 446523 - DNA, 25 bp, Artificial
  probe
  misc_feature (1)..(25): SEQ ID NO: 6696; WAN024BUH; Start 67; Stop 91
ttagggtatctcttgggagagcgta

SEQ ID NO: 446524 - DNA, 25 bp, Artificial
  probe
  misc_feature (1)..(25): SEQ ID NO: 6696; WAN024BUH; Start 43; Stop 67
gggatggctatcctatggatgtttt

SEQ ID NO: 446525 - DNA, 25 bp, Artificial
  probe
  misc_feature (1)..(25): SEQ ID NO: 6696; WAN024BUH; Start 22; Stop 46
aatgattttatcaaagagattggga

SEQ ID NO: 446526 - DNA, 25 bp, Artificial
  probe
  misc_feature (1)..(25): SEQ ID NO: 6696; WAN024BUH; Start 73; Stop 97
tatctcttgggagagcgtagcacta

SEQ ID NO: 446527 - DNA, 25 bp, Artificial
  probe
  misc_feature (1)..(25): SEQ ID NO: 6696; WAN024BUH; Start 68; Stop 92
tagggtatctcttgggagagcgtag

SEQ ID NO: 446528 - DNA, 25 bp, Artificial
  probe
  misc_feature (1)..(25): SEQ ID NO: 6697; WAN024CCL; Start 46; Stop 70
ttaacagtagcagtaggcggtattg

SEQ ID NO: 446529 - DNA, 25 bp, Artificial
  probe
  misc_feature (1)..(25): SEQ ID NO: 6697; WAN024CCL; Start 258; Stop 282
tatgactgacaaagacttagacacc

SEQ ID NO: 446530 - DNA, 25 bp, Artificial
  probe
  misc_feature (1)..(25): SEQ ID NO: 6697; WAN024CCL; Start 257; Stop 281
gtatgactgacaaagacttagacac

SEQ ID NO: 446531 - DNA, 25 bp, Artificial
  probe
  misc_feature (1)..(25): SEQ ID NO: 6697; WAN024CCL; Start 256; Stop 280
agtatgactgacaaagacttagaca

SEQ ID NO: 446532 - DNA, 25 bp, Artificial
  probe
  misc_feature (1)..(25): SEQ ID NO: 6697; WAN024CCL; Start 45; Stop 69
tttaacagtagcagtaggcggtatt

SEQ ID NO: 446533 - DNA, 25 bp, Artificial
  probe
  misc_feature (1)..(25): SEQ ID NO: 6697; WAN024CCL; Start 50; Stop 74
cagtagcagtaggcggtattgtaaa

SEQ ID NO: 446534 - DNA, 25 bp, Artificial
  probe
  misc_feature (1)..(25): SEQ ID NO: 6697; WAN024CCL; Start 49; Stop 73
acagtagcagtaggcggtattgtaa

SEQ ID NO: 446535 - DNA, 25 bp, Artificial
  probe
  misc_feature (1)..(25): SEQ ID NO: 6697; WAN024CCL; Start 48; Stop 72
aacagtagcagtaggcggtattgta

SEQ ID NO: 446536 - DNA, 25 bp, Artificial
  probe
  misc_feature (1)..(25): SEQ ID NO: 6697; WAN024CCL; Start 47; Stop 71
taacagtagcagtaggcggtattgt

SEQ ID NO: 446537 - DNA, 25 bp, Artificial
  probe
  misc_feature (1)..(25): SEQ ID NO: 6697; WAN024CCL; Start 6; Stop 30
acaaattactgaaatcatcattgct

SEQ ID NO: 446538 - DNA, 25 bp, Artificial
  probe
  misc_feature (1)..(25): SEQ ID NO: 6697; WAN024CCL; Start 255; Stop 279
tagtatgactgacaaagacttagac

SEQ ID NO: 446539 - DNA, 25 bp, Artificial
  probe
  misc_feature (1)..(25): SEQ ID NO: 6697; WAN024CCL; Start 5; Stop 29
aacaaattactgaaatcatcattgc

SEQ ID NO: 446540 - DNA, 25 bp, Artificial
  probe
  misc_feature (1)..(25): SEQ ID NO: 6697; WAN024CCL; Start 3; Stop 27
gcaacaaattactgaaatcatcatt

SEQ ID NO: 446541 - DNA, 25 bp, Artificial
  probe
  misc_feature (1)..(25): SEQ ID NO: 6697; WAN024CCL; Start 62; Stop 86
gcggtattgtaaaagcagtaaaaga

SEQ ID NO: 446542 - DNA, 25 bp, Artificial
  probe
  misc_feature (1)..(25): SEQ ID NO: 6697; WAN024CCL; Start 59; Stop 83
taggcggtattgtaaaagcagtaaa

SEQ ID NO: 446543 - DNA, 25 bp, Artificial
  probe
  misc_feature (1)..(25): SEQ ID NO: 6697; WAN024CCL; Start 254; Stop 278
ttagtatgactgacaaagacttaga

SEQ ID NO: 446544 - DNA, 25 bp, Artificial
  probe
  misc_feature (1)..(25): SEQ ID NO: 6697; WAN024CCL; Start 61; Stop 85
ggcggtattgtaaaagcagtaaaag

SEQ ID NO: 446545 - DNA, 25 bp, Artificial
  probe
  misc_feature (1)..(25): SEQ ID NO: 6697; WAN024CCL; Start 58; Stop 82
gtaggcggtattgtaaaagcagtaa

SEQ ID NO: 446546 - DNA, 25 bp, Artificial
  probe
  misc_feature (1)..(25): SEQ ID NO: 6697; WAN024CCL; Start 7; Stop 31
caaattactgaaatcatcattgctt

SEQ ID NO: 446547 - DNA, 25 bp, Artificial
  probe
  misc_feature (1)..(25): SEQ ID NO: 6697; WAN024CCL; Start 60; Stop 84
aggcggtattgtaaaagcagtaaaa

SEQ ID NO: 446548 - DNA, 25 bp, Artificial
  probe
  misc_feature (1)..(25): SEQ ID NO: 6697; WAN024CCL; Start 52; Stop 76
gtagcagtaggcggtattgtaaaag

SEQ ID NO: 446549 - DNA, 25 bp, Artificial
  probe
  misc_feature (1)..(25): SEQ ID NO: 6697; WAN024CCL; Start 2; Stop 26
tgcaacaaattactgaaatcatcat

SEQ ID NO: 446550 - DNA, 25 bp, Artificial
  probe
  misc_feature (1)..(25): SEQ ID NO: 6697; WAN024CCL; Start 1; Stop 25
atgcaacaaattactgaaatcatca

SEQ ID NO: 446551 - DNA, 25 bp, Artificial
  probe
  misc_feature (1)..(25): SEQ ID NO: 6697; WAN024CCL; Start 11; Stop 35
ttactgaaatcatcattgcttttgc

SEQ ID NO: 446552 - DNA, 25 bp, Artificial
  probe
  misc_feature (1)..(25): SEQ ID NO: 6697; WAN024CCL; Start 12; Stop 36
tactgaaatcatcattgcttttgcg

SEQ ID NO: 446553 - DNA, 25 bp, Artificial
  probe
  misc_feature (1)..(25): SEQ ID NO: 6697; WAN024CCL; Start 57; Stop 81
agtaggcggtattgtaaaagcagta

SEQ ID NO: 446554 - DNA, 25 bp, Artificial
  probe
  misc_feature (1)..(25): SEQ ID NO: 6697; WAN024CCL; Start 51; Stop 75
agtagcagtaggcggtattgtaaaa

SEQ ID NO: 446555 - DNA, 25 bp, Artificial
  probe
  misc_feature (1)..(25): SEQ ID NO: 6697; WAN024CCL; Start 167; Stop 191
aagtagcttcagagactggctataa

SEQ ID NO: 446556 - DNA, 25 bp, Artificial
  probe
  misc_feature (1)..(25): SEQ ID NO: 6697; WAN024CCL; Start 44; Stop 68
ttttaacagtagcagtaggcggtat

SEQ ID NO: 446557 - DNA, 25 bp, Artificial
  probe
  misc_feature (1)..(25): SEQ ID NO: 6697; WAN024CCL; Start 17; Stop 41
aaatcatcattgcttttgcgacaag

SEQ ID NO: 446558 - DNA, 25 bp, Artificial
  probe
  misc_feature (1)..(25): SEQ ID NO: 6697; WAN024CCL; Start 16; Stop 40
gaaatcatcattgcttttgcgacaa

SEQ ID NO: 446559 - DNA, 25 bp, Artificial
  probe
  misc_feature (1)..(25): SEQ ID NO: 6697; WAN024CCL; Start 168; Stop 192
agtagcttcagagactggctataag

SEQ ID NO: 446560 - DNA, 25 bp, Artificial
  probe
  misc_feature (1)..(25): SEQ ID NO: 6697; WAN024CCL; Start 63; Stop 87
cggtattgtaaaagcagtaaaagat

SEQ ID NO: 446561 - DNA, 25 bp, Artificial
  probe
  misc_feature (1)..(25): SEQ ID NO: 6698; WAN024CCM; Start 247; Stop 271
tacaatatcagtatgacggacaagg

SEQ ID NO: 446562 - DNA, 25 bp, Artificial
  probe
  misc_feature (1)..(25): SEQ ID NO: 6698; WAN024CCM; Start 252; Stop 276
tatcagtatgacggacaaggactta

SEQ ID NO: 446563 - DNA, 25 bp, Artificial
  probe
  misc_feature (1)..(25): SEQ ID NO: 6698; WAN024CCM; Start 251; Stop 275
atatcagtatgacggacaaggactt

SEQ ID NO: 446564 - DNA, 25 bp, Artificial
  probe
  misc_feature (1)..(25): SEQ ID NO: 6698; WAN024CCM; Start 250; Stop 274
aatatcagtatgacggacaaggact

SEQ ID NO: 446565 - DNA, 25 bp, Artificial
  probe
  misc_feature (1)..(25): SEQ ID NO: 6698; WAN024CCM; Start 249; Stop 273
caatatcagtatgacggacaaggac

SEQ ID NO: 446566 - DNA, 25 bp, Artificial
  probe
  misc_feature (1)..(25): SEQ ID NO: 6698; WAN024CCM; Start 248; Stop 272
acaatatcagtatgacggacaagga

SEQ ID NO: 446567 - DNA, 25 bp, Artificial
  probe
  misc_feature (1)..(25): SEQ ID NO: 6698; WAN024CCM; Start 253; Stop 277
atcagtatgacggacaaggacttag

SEQ ID NO: 446568 - DNA, 25 bp, Artificial
  probe
  misc_feature (1)..(25): SEQ ID NO: 6698; WAN024CCM; Start 257; Stop 281
gtatgacggacaaggacttagacac

SEQ ID NO: 446569 - DNA, 25 bp, Artificial
  probe
  misc_feature (1)..(25): SEQ ID NO: 6698; WAN024CCM; Start 246; Stop 270
atacaatatcagtatgacggacaag

SEQ ID NO: 446570 - DNA, 25 bp, Artificial
  probe
  misc_feature (1)..(25): SEQ ID NO: 6698; WAN024CCM; Start 255; Stop 279
cagtatgacggacaaggacttagac

SEQ ID NO: 446571 - DNA, 25 bp, Artificial
  probe
  misc_feature (1)..(25): SEQ ID NO: 6698; WAN024CCM; Start 254; Stop 278
tcagtatgacggacaaggacttaga

SEQ ID NO: 446572 - DNA, 25 bp, Artificial
  probe
  misc_feature (1)..(25): SEQ ID NO: 6698; WAN024CCM; Start 24; Stop 48
tactaatggagcaatcagcatcctt

SEQ ID NO: 446573 - DNA, 25 bp, Artificial
  probe
  misc_feature (1)..(25): SEQ ID NO: 6698; WAN024CCM; Start 245; Stop 269
aatacaatatcagtatgacggacaa

SEQ ID NO: 446574 - DNA, 25 bp, Artificial
  probe
  misc_feature (1)..(25): SEQ ID NO: 6698; WAN024CCM; Start 256; Stop 280
agtatgacggacaaggacttagaca

SEQ ID NO: 446575 - DNA, 25 bp, Artificial
  probe
  misc_feature (1)..(25): SEQ ID NO: 6698; WAN024CCM; Start 132; Stop 156
aatcttggctaagaacgcagttaat

SEQ ID NO: 446576 - DNA, 25 bp, Artificial
  probe
  misc_feature (1)..(25): SEQ ID NO: 6698; WAN024CCM; Start 29; Stop 53
atggagcaatcagcatccttgttat

SEQ ID NO: 446577 - DNA, 25 bp, Artificial
  probe
  misc_feature (1)..(25): SEQ ID NO: 6698; WAN024CCM; Start 258; Stop 282
tatgacggacaaggacttagacacc

SEQ ID NO: 446578 - DNA, 25 bp, Artificial
  probe
  misc_feature (1)..(25): SEQ ID NO: 6698; WAN024CCM; Start 133; Stop 157
atcttggctaagaacgcagttaatg

SEQ ID NO: 446579 - DNA, 25 bp, Artificial
  probe
  misc_feature (1)..(25): SEQ ID NO: 6698; WAN024CCM; Start 30; Stop 54
tggagcaatcagcatccttgttatt

SEQ ID NO: 446580 - DNA, 25 bp, Artificial
  probe
  misc_feature (1)..(25): SEQ ID NO: 6698; WAN024CCM; Start 28; Stop 52
aatggagcaatcagcatccttgtta

SEQ ID NO: 446581 - DNA, 25 bp, Artificial
  probe
  misc_feature (1)..(25): SEQ ID NO: 6698; WAN024CCM; Start 27; Stop 51
taatggagcaatcagcatccttgtt

SEQ ID NO: 446582 - DNA, 25 bp, Artificial
  probe
  misc_feature (1)..(25): SEQ ID NO: 6698; WAN024CCM; Start 178; Stop 202
gaaactggctacaagggagatgaaa

SEQ ID NO: 446583 - DNA, 25 bp, Artificial
  probe
  misc_feature (1)..(25): SEQ ID NO: 6698; WAN024CCM; Start 26; Stop 50
ctaatggagcaatcagcatccttgt

SEQ ID NO: 446584 - DNA, 25 bp, Artificial
  probe
  misc_feature (1)..(25): SEQ ID NO: 6698; WAN024CCM; Start 25; Stop 49
actaatggagcaatcagcatccttg

SEQ ID NO: 446585 - DNA, 25 bp, Artificial
  probe
  misc_feature (1)..(25): SEQ ID NO: 6698; WAN024CCM; Start 31; Stop 55
ggagcaatcagcatccttgttattt

SEQ ID NO: 446586 - DNA, 25 bp, Artificial
  probe
  misc_feature (1)..(25): SEQ ID NO: 6698; WAN024CCM; Start 244; Stop 268
aaatacaatatcagtatgacggaca

SEQ ID NO: 446587 - DNA, 25 bp, Artificial
  probe
  misc_feature (1)..(25): SEQ ID NO: 6698; WAN024CCM; Start 124; Stop 148
attgttgaaatcttggctaagaacg

SEQ ID NO: 446588 - DNA, 25 bp, Artificial
  probe
  misc_feature (1)..(25): SEQ ID NO: 6698; WAN024CCM; Start 123; Stop 147
gattgttgaaatcttggctaagaac

SEQ ID NO: 446589 - DNA, 25 bp, Artificial
  probe
  misc_feature (1)..(25): SEQ ID NO: 6698; WAN024CCM; Start 42; Stop 66
catccttgttattttggctggtatc

SEQ ID NO: 446590 - DNA, 25 bp, Artificial
  probe
  misc_feature (1)..(25): SEQ ID NO: 6698; WAN024CCM; Start 100; Stop 124
aaaggtggagaaaagactatcaaga

SEQ ID NO: 446591 - DNA, 25 bp, Artificial
  probe
  misc_feature (1)..(25): SEQ ID NO: 6698; WAN024CCM; Start 102; Stop 126
aggtggagaaaagactatcaagatt

SEQ ID NO: 446592 - DNA, 25 bp, Artificial
  probe
  misc_feature (1)..(25): SEQ ID NO: 6698; WAN024CCM; Start 101; Stop 125
aaggtggagaaaagactatcaagat

SEQ ID NO: 446593 - DNA, 25 bp, Artificial
  probe
  misc_feature (1)..(25): SEQ ID NO: 6698; WAN024CCM; Start 131; Stop 155
aaatcttggctaagaacgcagttaa

SEQ ID NO: 446594 - DNA, 25 bp, Artificial
  probe
  misc_feature (1)..(25): SEQ ID NO: 6699; WAN024CA9; Start 13; Stop 37
gtggttcatggttgtatccgagaag

SEQ ID NO: 446595 - DNA, 25 bp, Artificial
  probe
  misc_feature (1)..(25): SEQ ID NO: 6699; WAN024CA9; Start 52; Stop 76
ttgtttgataaccttttggagttgg

SEQ ID NO: 446596 - DNA, 25 bp, Artificial
  probe
  misc_feature (1)..(25): SEQ ID NO: 6699; WAN024CA9; Start 51; Stop 75
tttgtttgataaccttttggagttg

SEQ ID NO: 446597 - DNA, 25 bp, Artificial
  probe
  misc_feature (1)..(25): SEQ ID NO: 6699; WAN024CA9; Start 20; Stop 44
atggttgtatccgagaagccaagaa

SEQ ID NO: 446598 - DNA, 25 bp, Artificial
  probe
  misc_feature (1)..(25): SEQ ID NO: 6699; WAN024CA9; Start 50; Stop 74
ttttgtttgataaccttttggagtt

SEQ ID NO: 446599 - DNA, 25 bp, Artificial
  probe
  misc_feature (1)..(25): SEQ ID NO: 6699; WAN024CA9; Start 12; Stop 36
ggtggttcatggttgtatccgagaa

SEQ ID NO: 446600 - DNA, 25 bp, Artificial
  probe
  misc_feature (1)..(25): SEQ ID NO: 6699; WAN024CA9; Start 60; Stop 84
taaccttttggagttggtcattttc

SEQ ID NO: 446601 - DNA, 25 bp, Artificial
  probe
  misc_feature (1)..(25): SEQ ID NO: 6699; WAN024CA9; Start 58; Stop 82
gataaccttttggagttggtcattt

SEQ ID NO: 446602 - DNA, 25 bp, Artificial
  probe
  misc_feature (1)..(25): SEQ ID NO: 6699; WAN024CA9; Start 54; Stop 78
gtttgataaccttttggagttggtc

SEQ ID NO: 446603 - DNA, 25 bp, Artificial
  probe
  misc_feature (1)..(25): SEQ ID NO: 6699; WAN024CA9; Start 57; Stop 81
tgataaccttttggagttggtcatt

SEQ ID NO: 446604 - DNA, 25 bp, Artificial
  probe
  misc_feature (1)..(25): SEQ ID NO: 6699; WAN024CA9; Start 56; Stop 80
ttgataaccttttggagttggtcat

SEQ ID NO: 446605 - DNA, 25 bp, Artificial
  probe
  misc_feature (1)..(25): SEQ ID NO: 6699; WAN024CA9; Start 59; Stop 83
ataaccttttggagttggtcatttt

SEQ ID NO: 446606 - DNA, 25 bp, Artificial
  probe
  misc_feature (1)..(25): SEQ ID NO: 6699; WAN024CA9; Start 55; Stop 79
tttgataaccttttggagttggtca

SEQ ID NO: 446607 - DNA, 25 bp, Artificial
  probe
  misc_feature (1)..(25): SEQ ID NO: 6699; WAN024CA9; Start 17; Stop 41
ttcatggttgtatccgagaagccaa

SEQ ID NO: 446608 - DNA, 25 bp, Artificial
  probe
  misc_feature (1)..(25): SEQ ID NO: 6699; WAN024CA9; Start 10; Stop 34
gaggtggttcatggttgtatccgag

SEQ ID NO: 446609 - DNA, 25 bp, Artificial
  probe
  misc_feature (1)..(25): SEQ ID NO: 6699; WAN024CA9; Start 53; Stop 77
tgtttgataaccttttggagttggt

SEQ ID NO: 446610 - DNA, 25 bp, Artificial
  probe
  misc_feature (1)..(25): SEQ ID NO: 6699; WAN024CA9; Start 14; Stop 38
tggttcatggttgtatccgagaagc

SEQ ID NO: 446611 - DNA, 25 bp, Artificial
  probe
  misc_feature (1)..(25): SEQ ID NO: 6699; WAN024CA9; Start 62; Stop 86
accttttggagttggtcattttcaa

SEQ ID NO: 446612 - DNA, 25 bp, Artificial
  probe
  misc_feature (1)..(25): SEQ ID NO: 6699; WAN024CA9; Start 61; Stop 85
aaccttttggagttggtcattttca

SEQ ID NO: 446613 - DNA, 25 bp, Artificial
  probe
  misc_feature (1)..(25): SEQ ID NO: 6699; WAN024CA9; Start 19; Stop 43
catggttgtatccgagaagccaaga

SEQ ID NO: 446614 - DNA, 25 bp, Artificial
  probe
  misc_feature (1)..(25): SEQ ID NO: 6699; WAN024CA9; Start 18; Stop 42
tcatggttgtatccgagaagccaag

SEQ ID NO: 446615 - DNA, 25 bp, Artificial
  probe
  misc_feature (1)..(25): SEQ ID NO: 6699; WAN024CA9; Start 63; Stop 87
ccttttggagttggtcattttcaaa

SEQ ID NO: 446616 - DNA, 25 bp, Artificial
  probe
  misc_feature (1)..(25): SEQ ID NO: 6699; WAN024CA9; Start 22; Stop 46
ggttgtatccgagaagccaagaaaa

SEQ ID NO: 446617 - DNA, 25 bp, Artificial
  probe
  misc_feature (1)..(25): SEQ ID NO: 6699; WAN024CA9; Start 21; Stop 45
tggttgtatccgagaagccaagaaa

SEQ ID NO: 446618 - DNA, 25 bp, Artificial
  probe
  misc_feature (1)..(25): SEQ ID NO: 6699; WAN024CA9; Start 16; Stop 40
gttcatggttgtatccgagaagcca

SEQ ID NO: 446619 - DNA, 25 bp, Artificial
  probe
  misc_feature (1)..(25): SEQ ID NO: 6699; WAN024CA9; Start 8; Stop 32
atgaggtggttcatggttgtatccg

SEQ ID NO: 446620 - DNA, 25 bp, Artificial
  probe
  misc_feature (1)..(25): SEQ ID NO: 6699; WAN024CA9; Start 64; Stop 88
cttttggagttggtcattttcaaaa

SEQ ID NO: 446621 - DNA, 25 bp, Artificial
  probe
  misc_feature (1)..(25): SEQ ID NO: 6700; WAN024DQF; Start 60; Stop 84
ttcccattcatattatccaaacaaa

SEQ ID NO: 446622 - DNA, 25 bp, Artificial
  probe
  misc_feature (1)..(25): SEQ ID NO: 6700; WAN024DQF; Start 59; Stop 83
tttcccattcatattatccaaacaa

SEQ ID NO: 446623 - DNA, 25 bp, Artificial
  probe
  misc_feature (1)..(25): SEQ ID NO: 6700; WAN024DQF; Start 80; Stop 104
acaaaagagatggtgataactcaaa

SEQ ID NO: 446624 - DNA, 25 bp, Artificial
  probe
  misc_feature (1)..(25): SEQ ID NO: 6700; WAN024DQF; Start 79; Stop 103
aacaaaagagatggtgataactcaa

SEQ ID NO: 446625 - DNA, 25 bp, Artificial
  probe
  misc_feature (1)..(25): SEQ ID NO: 6700; WAN024DQF; Start 78; Stop 102
aaacaaaagagatggtgataactca

SEQ ID NO: 446626 - DNA, 25 bp, Artificial
  probe
  misc_feature (1)..(25): SEQ ID NO: 6700; WAN024DQF; Start 113; Stop 137
gcaatcttgtaaaattcctagcaaa

SEQ ID NO: 446627 - DNA, 25 bp, Artificial
  probe
  misc_feature (1)..(25): SEQ ID NO: 6700; WAN024DQF; Start 77; Stop 101
caaacaaaagagatggtgataactc

SEQ ID NO: 446628 - DNA, 25 bp, Artificial
  probe
  misc_feature (1)..(25): SEQ ID NO: 6700; WAN024DQF; Start 76; Stop 100
ccaaacaaaagagatggtgataact

SEQ ID NO: 446629 - DNA, 25 bp, Artificial
  probe
  misc_feature (1)..(25): SEQ ID NO: 6700; WAN024DQF; Start 75; Stop 99
tccaaacaaaagagatggtgataac

SEQ ID NO: 446630 - DNA, 25 bp, Artificial
  probe
  misc_feature (1)..(25): SEQ ID NO: 6700; WAN024DQF; Start 81; Stop 105
caaaagagatggtgataactcaaaa

SEQ ID NO: 446631 - DNA, 25 bp, Artificial
  probe
  misc_feature (1)..(25): SEQ ID NO: 6700; WAN024DQF; Start 74; Stop 98
atccaaacaaaagagatggtgataa

SEQ ID NO: 446632 - DNA, 25 bp, Artificial
  probe
  misc_feature (1)..(25): SEQ ID NO: 6700; WAN024DQF; Start 72; Stop 96
ttatccaaacaaaagagatggtgat

SEQ ID NO: 446633 - DNA, 25 bp, Artificial
  probe
  misc_feature (1)..(25): SEQ ID NO: 6700; WAN024DQF; Start 71; Stop 95
attatccaaacaaaagagatggtga

SEQ ID NO: 446634 - DNA, 25 bp, Artificial
  probe
  misc_feature (1)..(25): SEQ ID NO: 6700; WAN024DQF; Start 61; Stop 85
tcccattcatattatccaaacaaaa

SEQ ID NO: 446635 - DNA, 25 bp, Artificial
  probe
  misc_feature (1)..(25): SEQ ID NO: 6700; WAN024DQF; Start 58; Stop 82
ttttcccattcatattatccaaaca

SEQ ID NO: 446636 - DNA, 25 bp, Artificial
  probe
  misc_feature (1)..(25): SEQ ID NO: 6700; WAN024DQF; Start 62; Stop 86
cccattcatattatccaaacaaaag

SEQ ID NO: 446637 - DNA, 25 bp, Artificial
  probe
  misc_feature (1)..(25): SEQ ID NO: 6700; WAN024DQF; Start 73; Stop 97
tatccaaacaaaagagatggtgata

SEQ ID NO: 446638 - DNA, 25 bp, Artificial
  probe
  misc_feature (1)..(25): SEQ ID NO: 6700; WAN024DQF; Start 70; Stop 94
tattatccaaacaaaagagatggtg

SEQ ID NO: 446639 - DNA, 25 bp, Artificial
  probe
  misc_feature (1)..(25): SEQ ID NO: 6700; WAN024DQF; Start 114; Stop 138
caatcttgtaaaattcctagcaaaa

SEQ ID NO: 446640 - DNA, 25 bp, Artificial
  probe
  misc_feature (1)..(25): SEQ ID NO: 6700; WAN024DQF; Start 63; Stop 87
ccattcatattatccaaacaaaaga

SEQ ID NO: 446641 - DNA, 25 bp, Artificial
  probe
  misc_feature (1)..(25): SEQ ID NO: 6700; WAN024DQF; Start 112; Stop 136
tgcaatcttgtaaaattcctagcaa

SEQ ID NO: 446642 - DNA, 25 bp, Artificial
  probe
  misc_feature (1)..(25): SEQ ID NO: 6700; WAN024DQF; Start 69; Stop 93
atattatccaaacaaaagagatggt

SEQ ID NO: 446643 - DNA, 25 bp, Artificial
  probe
  misc_feature (1)..(25): SEQ ID NO: 6700; WAN024DQF; Start 68; Stop 92
catattatccaaacaaaagagatgg

SEQ ID NO: 446644 - DNA, 25 bp, Artificial
  probe
  misc_feature (1)..(25): SEQ ID NO: 6700; WAN024DQF; Start 67; Stop 91
tcatattatccaaacaaaagagatg

SEQ ID NO: 446645 - DNA, 25 bp, Artificial
  probe
  misc_feature (1)..(25): SEQ ID NO: 6700; WAN024DQF; Start 33; Stop 57
tgccattaaagaattttattcaagt

SEQ ID NO: 446646 - DNA, 25 bp, Artificial
  probe
  misc_feature (1)..(25): SEQ ID NO: 6700; WAN024DQF; Start 30; Stop 54
agatgccattaaagaattttattca

SEQ ID NO: 446647 - DNA, 25 bp, Artificial
  probe
  misc_feature (1)..(25): SEQ ID NO: 6700; WAN024DQF; Start 34; Stop 58
gccattaaagaattttattcaagtt

SEQ ID NO: 446648 - DNA, 25 bp, Artificial
  probe
  misc_feature (1)..(25): SEQ ID NO: 6700; WAN024DQF; Start 111; Stop 135
ttgcaatcttgtaaaattcctagca

SEQ ID NO: 446649 - DNA, 25 bp, Artificial
  probe
  misc_feature (1)..(25): SEQ ID NO: 6701; WAN024BO5; Start 198; Stop 222
attgttgcgtgatgtaattgagaat

SEQ ID NO: 446650 - DNA, 25 bp, Artificial
  probe
  misc_feature (1)..(25): SEQ ID NO: 6701; WAN024BO5; Start 202; Stop 226
ttgcgtgatgtaattgagaatgaag

SEQ ID NO: 446651 - DNA, 25 bp, Artificial
  probe
  misc_feature (1)..(25): SEQ ID NO: 6701; WAN024BO5; Start 205; Stop 229
cgtgatgtaattgagaatgaaggtt

SEQ ID NO: 446652 - DNA, 25 bp, Artificial
  probe
  misc_feature (1)..(25): SEQ ID NO: 6701; WAN024BO5; Start 201; Stop 225
gttgcgtgatgtaattgagaatgaa

SEQ ID NO: 446653 - DNA, 25 bp, Artificial
  probe
  misc_feature (1)..(25): SEQ ID NO: 6701; WAN024BO5; Start 197; Stop 221
gattgttgcgtgatgtaattgagaa

SEQ ID NO: 446654 - DNA, 25 bp, Artificial
  probe
  misc_feature (1)..(25): SEQ ID NO: 6701; WAN024BO5; Start 195; Stop 219
aagattgttgcgtgatgtaattgag

SEQ ID NO: 446655 - DNA, 25 bp, Artificial
  probe
  misc_feature (1)..(25): SEQ ID NO: 6701; WAN024BO5; Start 1058; Stop 1082
taacaagagattacagacgagagaa

SEQ ID NO: 446656 - DNA, 25 bp, Artificial
  probe
  misc_feature (1)..(25): SEQ ID NO: 6701; WAN024BO5; Start 199; Stop 223
ttgttgcgtgatgtaattgagaatg

SEQ ID NO: 446657 - DNA, 25 bp, Artificial
  probe
  misc_feature (1)..(25): SEQ ID NO: 6701; WAN024BO5; Start 1057; Stop 1081
ttaacaagagattacagacgagaga

SEQ ID NO: 446658 - DNA, 25 bp, Artificial
  probe
  misc_feature (1)..(25): SEQ ID NO: 6701; WAN024BO5; Start 608; Stop 632
ctgctgaggagttaggagtagatac

SEQ ID NO: 446659 - DNA, 25 bp, Artificial
  probe
  misc_feature (1)..(25): SEQ ID NO: 6701; WAN024BO5; Start 196; Stop 220
agattgttgcgtgatgtaattgaga

SEQ ID NO: 446660 - DNA, 25 bp, Artificial
  probe
  misc_feature (1)..(25): SEQ ID NO: 6701; WAN024BO5; Start 200; Stop 224
tgttgcgtgatgtaattgagaatga

SEQ ID NO: 446661 - DNA, 25 bp, Artificial
  probe
  misc_feature (1)..(25): SEQ ID NO: 6701; WAN024BO5; Start 1056; Stop 1080
cttaacaagagattacagacgagag

SEQ ID NO: 446662 - DNA, 25 bp, Artificial
  probe
  misc_feature (1)..(25): SEQ ID NO: 6701; WAN024BO5; Start 854; Stop 878
tgaagaatctaacaccagaacaagc

SEQ ID NO: 446663 - DNA, 25 bp, Artificial
  probe
  misc_feature (1)..(25): SEQ ID NO: 6701; WAN024BO5; Start 846; Stop 870
agactatctgaagaatctaacacca

SEQ ID NO: 446664 - DNA, 25 bp, Artificial
  probe
  misc_feature (1)..(25): SEQ ID NO: 6701; WAN024BO5; Start 610; Stop 634
gctgaggagttaggagtagatactt

SEQ ID NO: 446665 - DNA, 25 bp, Artificial
  probe
  misc_feature (1)..(25): SEQ ID NO: 6701; WAN024BO5; Start 204; Stop 228
gcgtgatgtaattgagaatgaaggt

SEQ ID NO: 446666 - DNA, 25 bp, Artificial
  probe
  misc_feature (1)..(25): SEQ ID NO: 6701; WAN024BO5; Start 203; Stop 227
tgcgtgatgtaattgagaatgaagg

SEQ ID NO: 446667 - DNA, 25 bp, Artificial
  probe
  misc_feature (1)..(25): SEQ ID NO: 6701; WAN024BO5; Start 139; Stop 163
cacatgctcaatgaacagaatctaa

SEQ ID NO: 446668 - DNA, 25 bp, Artificial
  probe
  misc_feature (1)..(25): SEQ ID NO: 6701; WAN024BO5; Start 853; Stop 877
ctgaagaatctaacaccagaacaag

SEQ ID NO: 446669 - DNA, 25 bp, Artificial
  probe
  misc_feature (1)..(25): SEQ ID NO: 6701; WAN024BO5; Start 609; Stop 633
tgctgaggagttaggagtagatact

SEQ ID NO: 446670 - DNA, 25 bp, Artificial
  probe
  misc_feature (1)..(25): SEQ ID NO: 6701; WAN024BO5; Start 971; Stop 995
aagatgacaagatgatacaagctga

SEQ ID NO: 446671 - DNA, 25 bp, Artificial
  probe
  misc_feature (1)..(25): SEQ ID NO: 6701; WAN024BO5; Start 970; Stop 994
caagatgacaagatgatacaagctg

SEQ ID NO: 446672 - DNA, 25 bp, Artificial
  probe
  misc_feature (1)..(25): SEQ ID NO: 6701; WAN024BO5; Start 972; Stop 996
agatgacaagatgatacaagctgag

SEQ ID NO: 446673 - DNA, 25 bp, Artificial
  probe
  misc_feature (1)..(25): SEQ ID NO: 6701; WAN024BO5; Start 847; Stop 871
gactatctgaagaatctaacaccag

SEQ ID NO: 446674 - DNA, 25 bp, Artificial
  probe
  misc_feature (1)..(25): SEQ ID NO: 6701; WAN024BO5; Start 138; Stop 162
gcacatgctcaatgaacagaatcta

SEQ ID NO: 446675 - DNA, 25 bp, Artificial
  probe
  misc_feature (1)..(25): SEQ ID NO: 6701; WAN024BO5; Start 781; Stop 805
ggaatccattgtggtcattatctga

SEQ ID NO: 446676 - DNA, 25 bp, Artificial
  probe
  misc_feature (1)..(25): SEQ ID NO: 6701; WAN024BO5; Start 780; Stop 804
aggaatccattgtggtcattatctg

SEQ ID NO: 446677 - DNA, 25 bp, Artificial
  probe
  misc_feature (1)..(25): SEQ ID NO: 6701; WAN024BO5; Start 779; Stop 803
taggaatccattgtggtcattatct

SEQ ID NO: 446678 - DNA, 25 bp, Artificial
  probe
  misc_feature (1)..(25): SEQ ID NO: 6701; WAN024BO5; Start 364; Stop 388
aatacaacattacctaagagcttgc

SEQ ID NO: 446679 - DNA, 25 bp, Artificial
  probe
  misc_feature (1)..(25): SEQ ID NO: 6701; WAN024BO5; Start 969; Stop 993
gcaagatgacaagatgatacaagct

SEQ ID NO: 446680 - DNA, 25 bp, Artificial
  probe
  misc_feature (1)..(25): SEQ ID NO: 6701; WAN024BO5; Start 855; Stop 879
gaagaatctaacaccagaacaagct

SEQ ID NO: 446681 - DNA, 25 bp, Artificial
  probe
  misc_feature (1)..(25): SEQ ID NO: 6701; WAN024BO5; Start 557; Stop 581
ctattatcaagagcacaacatacaa

SEQ ID NO: 446682 - DNA, 25 bp, Artificial
  probe
  misc_feature (1)..(25): SEQ ID NO: 6702; WAN024D86; Start 49; Stop 73
cgtgagatgatgacaaccagaattg

SEQ ID NO: 446683 - DNA, 25 bp, Artificial
  probe
  misc_feature (1)..(25): SEQ ID NO: 6702; WAN024D86; Start 23; Stop 47
atttcatatcatccagcaccctaag

SEQ ID NO: 446684 - DNA, 25 bp, Artificial
  probe
  misc_feature (1)..(25): SEQ ID NO: 6702; WAN024D86; Start 346; Stop 370
caactcaatcaagcctttagaactg

SEQ ID NO: 446685 - DNA, 25 bp, Artificial
  probe
  misc_feature (1)..(25): SEQ ID NO: 6702; WAN024D86; Start 19; Stop 43
atagatttcatatcatccagcaccc

SEQ ID NO: 446686 - DNA, 25 bp, Artificial
  probe
  misc_feature (1)..(25): SEQ ID NO: 6702; WAN024D86; Start 22; Stop 46
gatttcatatcatccagcaccctaa

SEQ ID NO: 446687 - DNA, 25 bp, Artificial
  probe
  misc_feature (1)..(25): SEQ ID NO: 6702; WAN024D86; Start 21; Stop 45
agatttcatatcatccagcacccta

SEQ ID NO: 446688 - DNA, 25 bp, Artificial
  probe
  misc_feature (1)..(25): SEQ ID NO: 6702; WAN024D86; Start 20; Stop 44
tagatttcatatcatccagcaccct

SEQ ID NO: 446689 - DNA, 25 bp, Artificial
  probe
  misc_feature (1)..(25): SEQ ID NO: 6702; WAN024D86; Start 345; Stop 369
ccaactcaatcaagcctttagaact

SEQ ID NO: 446690 - DNA, 25 bp, Artificial
  probe
  misc_feature (1)..(25): SEQ ID NO: 6702; WAN024D86; Start 88; Stop 112
tttgacaagcaatcactttcctatc

SEQ ID NO: 446691 - DNA, 25 bp, Artificial
  probe
  misc_feature (1)..(25): SEQ ID NO: 6702; WAN024D86; Start 48; Stop 72
ccgtgagatgatgacaaccagaatt

SEQ ID NO: 446692 - DNA, 25 bp, Artificial
  probe
  misc_feature (1)..(25): SEQ ID NO: 6702; WAN024D86; Start 253; Stop 277
cactattatgacgatctttaccagc

SEQ ID NO: 446693 - DNA, 25 bp, Artificial
  probe
  misc_feature (1)..(25): SEQ ID NO: 6702; WAN024D86; Start 347; Stop 371
aactcaatcaagcctttagaactgc

SEQ ID NO: 446694 - DNA, 25 bp, Artificial
  probe
  misc_feature (1)..(25): SEQ ID NO: 6702; WAN024D86; Start 249; Stop 273
gctccactattatgacgatctttac

SEQ ID NO: 446695 - DNA, 25 bp, Artificial
  probe
  misc_feature (1)..(25): SEQ ID NO: 6702; WAN024D86; Start 251; Stop 275
tccactattatgacgatctttacca

SEQ ID NO: 446696 - DNA, 25 bp, Artificial
  probe
  misc_feature (1)..(25): SEQ ID NO: 6702; WAN024D86; Start 252; Stop 276
ccactattatgacgatctttaccag

SEQ ID NO: 446697 - DNA, 25 bp, Artificial
  probe
  misc_feature (1)..(25): SEQ ID NO: 6702; WAN024D86; Start 443; Stop 467
tggaggcaatcaataaactcatcag

SEQ ID NO: 446698 - DNA, 25 bp, Artificial
  probe
  misc_feature (1)..(25): SEQ ID NO: 6702; WAN024D86; Start 442; Stop 466
ctggaggcaatcaataaactcatca

SEQ ID NO: 446699 - DNA, 25 bp, Artificial
  probe
  misc_feature (1)..(25): SEQ ID NO: 6702; WAN024D86; Start 18; Stop 42
gatagatttcatatcatccagcacc

SEQ ID NO: 446700 - DNA, 25 bp, Artificial
  probe
  misc_feature (1)..(25): SEQ ID NO: 6702; WAN024D86; Start 344; Stop 368
cccaactcaatcaagcctttagaac

SEQ ID NO: 446701 - DNA, 25 bp, Artificial
  probe
  misc_feature (1)..(25): SEQ ID NO: 6702; WAN024D86; Start 250; Stop 274
ctccactattatgacgatctttacc

SEQ ID NO: 446702 - DNA, 25 bp, Artificial
  probe
  misc_feature (1)..(25): SEQ ID NO: 6702; WAN024D86; Start 89; Stop 113
ttgacaagcaatcactttcctatcg

SEQ ID NO: 446703 - DNA, 25 bp, Artificial
  probe
  misc_feature (1)..(25): SEQ ID NO: 6702; WAN024D86; Start 307; Stop 331
gccgaccatttctttgacttgttaa

SEQ ID NO: 446704 - DNA, 25 bp, Artificial
  probe
  misc_feature (1)..(25): SEQ ID NO: 6702; WAN024D86; Start 204; Stop 228
gacacctccagaaatcgtcaataaa

SEQ ID NO: 446705 - DNA, 25 bp, Artificial
  probe
  misc_feature (1)..(25): SEQ ID NO: 6702; WAN024D86; Start 256; Stop 280
tattatgacgatctttaccagctcc

SEQ ID NO: 446706 - DNA, 25 bp, Artificial
  probe
  misc_feature (1)..(25): SEQ ID NO: 6702; WAN024D86; Start 456; Stop 480
taaactcatcagctttcttcaaacc

SEQ ID NO: 446707 - DNA, 25 bp, Artificial
  probe
  misc_feature (1)..(25): SEQ ID NO: 6702; WAN024D86; Start 447; Stop 471
ggcaatcaataaactcatcagcttt

SEQ ID NO: 446708 - DNA, 25 bp, Artificial
  probe
  misc_feature (1)..(25): SEQ ID NO: 6702; WAN024D86; Start 254; Stop 278
actattatgacgatctttaccagct

SEQ ID NO: 446709 - DNA, 25 bp, Artificial
  probe
  misc_feature (1)..(25): SEQ ID NO: 6702; WAN024D86; Start 448; Stop 472
gcaatcaataaactcatcagctttc

SEQ ID NO: 446710 - DNA, 25 bp, Artificial
  probe
  misc_feature (1)..(25): SEQ ID NO: 6702; WAN024D86; Start 248; Stop 272
agctccactattatgacgatcttta

SEQ ID NO: 446711 - DNA, 25 bp, Artificial
  probe
  misc_feature (1)..(25): SEQ ID NO: 6702; WAN024D86; Start 446; Stop 470
aggcaatcaataaactcatcagctt

SEQ ID NO: 446712 - DNA, 25 bp, Artificial
  probe
  misc_feature (1)..(25): SEQ ID NO: 6702; WAN024D86; Start 24; Stop 48
tttcatatcatccagcaccctaagc

SEQ ID NO: 446713 - DNA, 25 bp, Artificial
  probe
  misc_feature (1)..(25): SEQ ID NO: 6702; WAN024D86; Start 417; Stop 441
ccagatgccctattctaactccaag

SEQ ID NO: 446714 - DNA, 25 bp, Artificial
  probe
  misc_feature (1)..(25): SEQ ID NO: 6702; WAN024D86; Start 255; Stop 279
ctattatgacgatctttaccagctc

SEQ ID NO: 446715 - DNA, 25 bp, Artificial
  probe
  misc_feature (1)..(25): SEQ ID NO: 6703; WAN024CSO; Start 90; Stop 114
tatatgttgtaattgtcggcttgtc

SEQ ID NO: 446716 - DNA, 25 bp, Artificial
  probe
  misc_feature (1)..(25): SEQ ID NO: 6703; WAN024CSO; Start 91; Stop 115
atatgttgtaattgtcggcttgtct

SEQ ID NO: 446717 - DNA, 25 bp, Artificial
  probe
  misc_feature (1)..(25): SEQ ID NO: 6703; WAN024CSO; Start 89; Stop 113
ttatatgttgtaattgtcggcttgt

SEQ ID NO: 446718 - DNA, 25 bp, Artificial
  probe
  misc_feature (1)..(25): SEQ ID NO: 6703; WAN024CSO; Start 92; Stop 116
tatgttgtaattgtcggcttgtctt

SEQ ID NO: 446719 - DNA, 25 bp, Artificial
  probe
  misc_feature (1)..(25): SEQ ID NO: 6703; WAN024CSO; Start 39; Stop 63
ttggcttaactgtattcttgtaact

SEQ ID NO: 446720 - DNA, 25 bp, Artificial
  probe
  misc_feature (1)..(25): SEQ ID NO: 6703; WAN024CSO; Start 86; Stop 110
tcattatatgttgtaattgtcggct

SEQ ID NO: 446721 - DNA, 25 bp, Artificial
  probe
  misc_feature (1)..(25): SEQ ID NO: 6703; WAN024CSO; Start 85; Stop 109
ctcattatatgttgtaattgtcggc

SEQ ID NO: 446722 - DNA, 25 bp, Artificial
  probe
  misc_feature (1)..(25): SEQ ID NO: 6703; WAN024CSO; Start 84; Stop 108
gctcattatatgttgtaattgtcgg

SEQ ID NO: 446723 - DNA, 25 bp, Artificial
  probe
  misc_feature (1)..(25): SEQ ID NO: 6703; WAN024CSO; Start 116; Stop 140
ttaactgtatagccattagcagcaa

SEQ ID NO: 446724 - DNA, 25 bp, Artificial
  probe
  misc_feature (1)..(25): SEQ ID NO: 6703; WAN024CSO; Start 88; Stop 112
attatatgttgtaattgtcggcttg

SEQ ID NO: 446725 - DNA, 25 bp, Artificial
  probe
  misc_feature (1)..(25): SEQ ID NO: 6703; WAN024CSO; Start 87; Stop 111
cattatatgttgtaattgtcggctt

SEQ ID NO: 446726 - DNA, 25 bp, Artificial
  probe
  misc_feature (1)..(25): SEQ ID NO: 6703; WAN024CSO; Start 40; Stop 64
tggcttaactgtattcttgtaacta

SEQ ID NO: 446727 - DNA, 25 bp, Artificial
  probe
  misc_feature (1)..(25): SEQ ID NO: 6703; WAN024CSO; Start 48; Stop 72
ctgtattcttgtaactatcccacca

SEQ ID NO: 446728 - DNA, 25 bp, Artificial
  probe
  misc_feature (1)..(25): SEQ ID NO: 6703; WAN024CSO; Start 47; Stop 71
actgtattcttgtaactatcccacc

SEQ ID NO: 446729 - DNA, 25 bp, Artificial
  probe
  misc_feature (1)..(25): SEQ ID NO: 6703; WAN024CSO; Start 102; Stop 126
ttgtcggcttgtctttaactgtata

SEQ ID NO: 446730 - DNA, 25 bp, Artificial
  probe
  misc_feature (1)..(25): SEQ ID NO: 6703; WAN024CSO; Start 103; Stop 127
tgtcggcttgtctttaactgtatag

SEQ ID NO: 446731 - DNA, 25 bp, Artificial
  probe
  misc_feature (1)..(25): SEQ ID NO: 6703; WAN024CSO; Start 96; Stop 120
ttgtaattgtcggcttgtctttaac

SEQ ID NO: 446732 - DNA, 25 bp, Artificial
  probe
  misc_feature (1)..(25): SEQ ID NO: 6703; WAN024CSO; Start 95; Stop 119
gttgtaattgtcggcttgtctttaa

SEQ ID NO: 446733 - DNA, 25 bp, Artificial
  probe
  misc_feature (1)..(25): SEQ ID NO: 6703; WAN024CSO; Start 101; Stop 125
attgtcggcttgtctttaactgtat

SEQ ID NO: 446734 - DNA, 25 bp, Artificial
  probe
  misc_feature (1)..(25): SEQ ID NO: 6703; WAN024CSO; Start 98; Stop 122
gtaattgtcggcttgtctttaactg

SEQ ID NO: 446735 - DNA, 25 bp, Artificial
  probe
  misc_feature (1)..(25): SEQ ID NO: 6703; WAN024CSO; Start 182; Stop 206
ttagtggttgctgtaacagttgtac

SEQ ID NO: 446736 - DNA, 25 bp, Artificial
  probe
  misc_feature (1)..(25): SEQ ID NO: 6703; WAN024CSO; Start 100; Stop 124
aattgtcggcttgtctttaactgta

SEQ ID NO: 446737 - DNA, 25 bp, Artificial
  probe
  misc_feature (1)..(25): SEQ ID NO: 6703; WAN024CSO; Start 99; Stop 123
taattgtcggcttgtctttaactgt

SEQ ID NO: 446738 - DNA, 25 bp, Artificial
  probe
  misc_feature (1)..(25): SEQ ID NO: 6703; WAN024CSO; Start 97; Stop 121
tgtaattgtcggcttgtctttaact

SEQ ID NO: 446739 - DNA, 25 bp, Artificial
  probe
  misc_feature (1)..(25): SEQ ID NO: 6703; WAN024CSO; Start 54; Stop 78
tcttgtaactatcccaccaaacttt

SEQ ID NO: 446740 - DNA, 25 bp, Artificial
  probe
  misc_feature (1)..(25): SEQ ID NO: 6703; WAN024CSO; Start 53; Stop 77
ttcttgtaactatcccaccaaactt

SEQ ID NO: 446741 - DNA, 25 bp, Artificial
  probe
  misc_feature (1)..(25): SEQ ID NO: 6703; WAN024CSO; Start 52; Stop 76
attcttgtaactatcccaccaaact

SEQ ID NO: 446742 - DNA, 25 bp, Artificial
  probe
  misc_feature (1)..(25): SEQ ID NO: 6703; WAN024CSO; Start 112; Stop 136
gtctttaactgtatagccattagca

SEQ ID NO: 446743 - DNA, 25 bp, Artificial
  probe
  misc_feature (1)..(25): SEQ ID NO: 6703; WAN024CSO; Start 111; Stop 135
tgtctttaactgtatagccattagc

SEQ ID NO: 446744 - DNA, 25 bp, Artificial
  probe
  misc_feature (1)..(25): SEQ ID NO: 6703; WAN024CSO; Start 49; Stop 73
tgtattcttgtaactatcccaccaa

SEQ ID NO: 446745 - DNA, 25 bp, Artificial
  probe
  misc_feature (1)..(25): SEQ ID NO: 6703; WAN024CSO; Start 94; Stop 118
tgttgtaattgtcggcttgtcttta

SEQ ID NO: 446746 - DNA, 25 bp, Artificial
  probe
  misc_feature (1)..(25): SEQ ID NO: 6703; WAN024CSO; Start 31; Stop 55
gcgagtatttggcttaactgtattc

SEQ ID NO: 446747 - DNA, 25 bp, Artificial
  probe
  misc_feature (1)..(25): SEQ ID NO: 6703; WAN024CSO; Start 46; Stop 70
aactgtattcttgtaactatcccac

SEQ ID NO: 446748 - DNA, 25 bp, Artificial
  probe
  misc_feature (1)..(25): SEQ ID NO: 6704; WAN024C7S; Start 74; Stop 98
ctctctggaaacaacattgtattga

SEQ ID NO: 446749 - DNA, 25 bp, Artificial
  probe
  misc_feature (1)..(25): SEQ ID NO: 6704; WAN024C7S; Start 73; Stop 97
tctctctggaaacaacattgtattg

SEQ ID NO: 446750 - DNA, 25 bp, Artificial
  probe
  misc_feature (1)..(25): SEQ ID NO: 6704; WAN024C7S; Start 72; Stop 96
gtctctctggaaacaacattgtatt

SEQ ID NO: 446751 - DNA, 25 bp, Artificial
  probe
  misc_feature (1)..(25): SEQ ID NO: 6704; WAN024C7S; Start 75; Stop 99
tctctggaaacaacattgtattgaa

SEQ ID NO: 446752 - DNA, 25 bp, Artificial
  probe
  misc_feature (1)..(25): SEQ ID NO: 6704; WAN024C7S; Start 71; Stop 95
cgtctctctggaaacaacattgtat

SEQ ID NO: 446753 - DNA, 25 bp, Artificial
  probe
  misc_feature (1)..(25): SEQ ID NO: 6704; WAN024C7S; Start 76; Stop 100
ctctggaaacaacattgtattgaat

SEQ ID NO: 446754 - DNA, 25 bp, Artificial
  probe
  misc_feature (1)..(25): SEQ ID NO: 6704; WAN024C7S; Start 64; Stop 88
caatcaacgtctctctggaaacaac

SEQ ID NO: 446755 - DNA, 25 bp, Artificial
  probe
  misc_feature (1)..(25): SEQ ID NO: 6704; WAN024C7S; Start 66; Stop 90
atcaacgtctctctggaaacaacat

SEQ ID NO: 446756 - DNA, 25 bp, Artificial
  probe
  misc_feature (1)..(25): SEQ ID NO: 6704; WAN024C7S; Start 63; Stop 87
tcaatcaacgtctctctggaaacaa

SEQ ID NO: 446757 - DNA, 25 bp, Artificial
  probe
  misc_feature (1)..(25): SEQ ID NO: 6704; WAN024C7S; Start 67; Stop 91
tcaacgtctctctggaaacaacatt

SEQ ID NO: 446758 - DNA, 25 bp, Artificial
  probe
  misc_feature (1)..(25): SEQ ID NO: 6704; WAN024C7S; Start 65; Stop 89
aatcaacgtctctctggaaacaaca

SEQ ID NO: 446759 - DNA, 25 bp, Artificial
  probe
  misc_feature (1)..(25): SEQ ID NO: 6704; WAN024C7S; Start 47; Stop 71
aggatgtttctgagcgtcaatcaac

SEQ ID NO: 446760 - DNA, 25 bp, Artificial
  probe
  misc_feature (1)..(25): SEQ ID NO: 6704; WAN024C7S; Start 70; Stop 94
acgtctctctggaaacaacattgta

SEQ ID NO: 446761 - DNA, 25 bp, Artificial
  probe
  misc_feature (1)..(25): SEQ ID NO: 6704; WAN024C7S; Start 83; Stop 107
aacaacattgtattgaatatggtac

SEQ ID NO: 446762 - DNA, 25 bp, Artificial
  probe
  misc_feature (1)..(25): SEQ ID NO: 6704; WAN024C7S; Start 80; Stop 104
ggaaacaacattgtattgaatatgg

SEQ ID NO: 446763 - DNA, 25 bp, Artificial
  probe
  misc_feature (1)..(25): SEQ ID NO: 6704; WAN024C7S; Start 68; Stop 92
caacgtctctctggaaacaacattg

SEQ ID NO: 446764 - DNA, 25 bp, Artificial
  probe
  misc_feature (1)..(25): SEQ ID NO: 6704; WAN024C7S; Start 77; Stop 101
tctggaaacaacattgtattgaata

SEQ ID NO: 446765 - DNA, 25 bp, Artificial
  probe
  misc_feature (1)..(25): SEQ ID NO: 6704; WAN024C7S; Start 46; Stop 70
caggatgtttctgagcgtcaatcaa

SEQ ID NO: 446766 - DNA, 25 bp, Artificial
  probe
  misc_feature (1)..(25): SEQ ID NO: 6704; WAN024C7S; Start 62; Stop 86
gtcaatcaacgtctctctggaaaca

SEQ ID NO: 446767 - DNA, 25 bp, Artificial
  probe
  misc_feature (1)..(25): SEQ ID NO: 6704; WAN024C7S; Start 69; Stop 93
aacgtctctctggaaacaacattgt

SEQ ID NO: 446768 - DNA, 25 bp, Artificial
  probe
  misc_feature (1)..(25): SEQ ID NO: 6704; WAN024C7S; Start 81; Stop 105
gaaacaacattgtattgaatatggt

SEQ ID NO: 446769 - DNA, 25 bp, Artificial
  probe
  misc_feature (1)..(25): SEQ ID NO: 6704; WAN024C7S; Start 79; Stop 103
tggaaacaacattgtattgaatatg

SEQ ID NO: 446770 - DNA, 25 bp, Artificial
  probe
  misc_feature (1)..(25): SEQ ID NO: 6704; WAN024C7S; Start 78; Stop 102
ctggaaacaacattgtattgaatat

SEQ ID NO: 446771 - DNA, 25 bp, Artificial
  probe
  misc_feature (1)..(25): SEQ ID NO: 6704; WAN024C7S; Start 84; Stop 108
acaacattgtattgaatatggtacc

SEQ ID NO: 446772 - DNA, 25 bp, Artificial
  probe
  misc_feature (1)..(25): SEQ ID NO: 6704; WAN024C7S; Start 43; Stop 67
tttcaggatgtttctgagcgtcaat

SEQ ID NO: 446773 - DNA, 25 bp, Artificial
  probe
  misc_feature (1)..(25): SEQ ID NO: 6704; WAN024C7S; Start 85; Stop 109
caacattgtattgaatatggtaccc

SEQ ID NO: 446774 - DNA, 25 bp, Artificial
  probe
  misc_feature (1)..(25): SEQ ID NO: 6704; WAN024C7S; Start 82; Stop 106
aaacaacattgtattgaatatggta

SEQ ID NO: 446775 - DNA, 25 bp, Artificial
  probe
  misc_feature (1)..(25): SEQ ID NO: 6704; WAN024C7S; Start 44; Stop 68
ttcaggatgtttctgagcgtcaatc

SEQ ID NO: 446776 - DNA, 25 bp, Artificial
  probe
  misc_feature (1)..(25): SEQ ID NO: 6704; WAN024C7S; Start 86; Stop 110
aacattgtattgaatatggtaccca

SEQ ID NO: 446777 - DNA, 25 bp, Artificial
  probe
  misc_feature (1)..(25): SEQ ID NO: 6704; WAN024C7S; Start 61; Stop 85
cgtcaatcaacgtctctctggaaac

SEQ ID NO: 446778 - DNA, 25 bp, Artificial
  probe
  misc_feature (1)..(25): SEQ ID NO: 6704; WAN024C7S; Start 54; Stop 78
ttctgagcgtcaatcaacgtctctc

SEQ ID NO: 446779 - DNA, 25 bp, Artificial
  probe
  misc_feature (1)..(25): SEQ ID NO: 6704; WAN024C7S; Start 48; Stop 72
ggatgtttctgagcgtcaatcaacg

SEQ ID NO: 446780 - DNA, 25 bp, Artificial
  probe
  misc_feature (1)..(25): SEQ ID NO: 6704; WAN024C7S; Start 50; Stop 74
atgtttctgagcgtcaatcaacgtc

SEQ ID NO: 446781 - DNA, 25 bp, Artificial
  probe
  misc_feature (1)..(25): SEQ ID NO: 6705; WAN024BNA; Start 61; Stop 85
gcgtcagtagtaacagttattgcta

SEQ ID NO: 446782 - DNA, 25 bp, Artificial
  probe
  misc_feature (1)..(25): SEQ ID NO: 6705; WAN024BNA; Start 59; Stop 83
tagcgtcagtagtaacagttattgc

SEQ ID NO: 446783 - DNA, 25 bp, Artificial
  probe
  misc_feature (1)..(25): SEQ ID NO: 6705; WAN024BNA; Start 58; Stop 82
gtagcgtcagtagtaacagttattg

SEQ ID NO: 446784 - DNA, 25 bp, Artificial
  probe
  misc_feature (1)..(25): SEQ ID NO: 6705; WAN024BNA; Start 66; Stop 90
agtagtaacagttattgctatcgga

SEQ ID NO: 446785 - DNA, 25 bp, Artificial
  probe
  misc_feature (1)..(25): SEQ ID NO: 6705; WAN024BNA; Start 65; Stop 89
cagtagtaacagttattgctatcgg

SEQ ID NO: 446786 - DNA, 25 bp, Artificial
  probe
  misc_feature (1)..(25): SEQ ID NO: 6705; WAN024BNA; Start 71; Stop 95
taacagttattgctatcggatcagg

SEQ ID NO: 446787 - DNA, 25 bp, Artificial
  probe
  misc_feature (1)..(25): SEQ ID NO: 6705; WAN024BNA; Start 69; Stop 93
agtaacagttattgctatcggatca

SEQ ID NO: 446788 - DNA, 25 bp, Artificial
  probe
  misc_feature (1)..(25): SEQ ID NO: 6705; WAN024BNA; Start 70; Stop 94
gtaacagttattgctatcggatcag

SEQ ID NO: 446789 - DNA, 25 bp, Artificial
  probe
  misc_feature (1)..(25): SEQ ID NO: 6705; WAN024BNA; Start 62; Stop 86
cgtcagtagtaacagttattgctat

SEQ ID NO: 446790 - DNA, 25 bp, Artificial
  probe
  misc_feature (1)..(25): SEQ ID NO: 6705; WAN024BNA; Start 54; Stop 78
ctatgtagcgtcagtagtaacagtt

SEQ ID NO: 446791 - DNA, 25 bp, Artificial
  probe
  misc_feature (1)..(25): SEQ ID NO: 6705; WAN024BNA; Start 52; Stop 76
ctctatgtagcgtcagtagtaacag

SEQ ID NO: 446792 - DNA, 25 bp, Artificial
  probe
  misc_feature (1)..(25): SEQ ID NO: 6705; WAN024BNA; Start 53; Stop 77
tctatgtagcgtcagtagtaacagt

SEQ ID NO: 446793 - DNA, 25 bp, Artificial
  probe
  misc_feature (1)..(25): SEQ ID NO: 6705; WAN024BNA; Start 51; Stop 75
actctatgtagcgtcagtagtaaca

SEQ ID NO: 446794 - DNA, 25 bp, Artificial
  probe
  misc_feature (1)..(25): SEQ ID NO: 6705; WAN024BNA; Start 67; Stop 91
gtagtaacagttattgctatcggat

SEQ ID NO: 446795 - DNA, 25 bp, Artificial
  probe
  misc_feature (1)..(25): SEQ ID NO: 6705; WAN024BNA; Start 64; Stop 88
tcagtagtaacagttattgctatcg

SEQ ID NO: 446796 - DNA, 25 bp, Artificial
  probe
  misc_feature (1)..(25): SEQ ID NO: 6705; WAN024BNA; Start 57; Stop 81
tgtagcgtcagtagtaacagttatt

SEQ ID NO: 446797 - DNA, 25 bp, Artificial
  probe
  misc_feature (1)..(25): SEQ ID NO: 6705; WAN024BNA; Start 56; Stop 80
atgtagcgtcagtagtaacagttat

SEQ ID NO: 446798 - DNA, 25 bp, Artificial
  probe
  misc_feature (1)..(25): SEQ ID NO: 6705; WAN024BNA; Start 75; Stop 99
agttattgctatcggatcaggtgaa

SEQ ID NO: 446799 - DNA, 25 bp, Artificial
  probe
  misc_feature (1)..(25): SEQ ID NO: 6705; WAN024BNA; Start 55; Stop 79
tatgtagcgtcagtagtaacagtta

SEQ ID NO: 446800 - DNA, 25 bp, Artificial
  probe
  misc_feature (1)..(25): SEQ ID NO: 6705; WAN024BNA; Start 72; Stop 96
aacagttattgctatcggatcaggt

SEQ ID NO: 446801 - DNA, 25 bp, Artificial
  probe
  misc_feature (1)..(25): SEQ ID NO: 6705; WAN024BNA; Start 68; Stop 92
tagtaacagttattgctatcggatc

SEQ ID NO: 446802 - DNA, 25 bp, Artificial
  probe
  misc_feature (1)..(25): SEQ ID NO: 6705; WAN024BNA; Start 397; Stop 421
ctacacaattcaatcatgttagcct

SEQ ID NO: 446803 - DNA, 25 bp, Artificial
  probe
  misc_feature (1)..(25): SEQ ID NO: 6705; WAN024BNA; Start 396; Stop 420
tctacacaattcaatcatgttagcc

SEQ ID NO: 446804 - DNA, 25 bp, Artificial
  probe
  misc_feature (1)..(25): SEQ ID NO: 6705; WAN024BNA; Start 74; Stop 98
cagttattgctatcggatcaggtga

SEQ ID NO: 446805 - DNA, 25 bp, Artificial
  probe
  misc_feature (1)..(25): SEQ ID NO: 6705; WAN024BNA; Start 399; Stop 423
acacaattcaatcatgttagcctat

SEQ ID NO: 446806 - DNA, 25 bp, Artificial
  probe
  misc_feature (1)..(25): SEQ ID NO: 6705; WAN024BNA; Start 243; Stop 267
attcagtttgttcttcctaccctac

SEQ ID NO: 446807 - DNA, 25 bp, Artificial
  probe
  misc_feature (1)..(25): SEQ ID NO: 6705; WAN024BNA; Start 50; Stop 74
tactctatgtagcgtcagtagtaac

SEQ ID NO: 446808 - DNA, 25 bp, Artificial
  probe
  misc_feature (1)..(25): SEQ ID NO: 6705; WAN024BNA; Start 255; Stop 279
cttcctaccctacataccattacct

SEQ ID NO: 446809 - DNA, 25 bp, Artificial
  probe
  misc_feature (1)..(25): SEQ ID NO: 6705; WAN024BNA; Start 254; Stop 278
tcttcctaccctacataccattacc

SEQ ID NO: 446810 - DNA, 25 bp, Artificial
  probe
  misc_feature (1)..(25): SEQ ID NO: 6705; WAN024BNA; Start 241; Stop 265
ttattcagtttgttcttcctaccct

SEQ ID NO: 446811 - DNA, 25 bp, Artificial
  probe
  misc_feature (1)..(25): SEQ ID NO: 6705; WAN024BNA; Start 256; Stop 280
ttcctaccctacataccattaccta

SEQ ID NO: 446812 - DNA, 25 bp, Artificial
  probe
  misc_feature (1)..(25): SEQ ID NO: 6705; WAN024BNA; Start 73; Stop 97
acagttattgctatcggatcaggtg

SEQ ID NO: 446813 - DNA, 25 bp, Artificial
  probe
  misc_feature (1)..(25): SEQ ID NO: 6705; WAN024BNA; Start 257; Stop 281
tcctaccctacataccattacctat

SEQ ID NO: 446814 - DNA, 25 bp, Artificial
  probe
  misc_feature (1)..(25): SEQ ID NO: 6706; WAN024CWC; Start 52; Stop 76
ggaagaactgaaattgctttgcgtg

SEQ ID NO: 446815 - DNA, 25 bp, Artificial
  probe
  misc_feature (1)..(25): SEQ ID NO: 6706; WAN024CWC; Start 53; Stop 77
gaagaactgaaattgctttgcgtgc

SEQ ID NO: 446816 - DNA, 25 bp, Artificial
  probe
  misc_feature (1)..(25): SEQ ID NO: 6706; WAN024CWC; Start 9; Stop 33
ttctcagccaatggatcgactttta

SEQ ID NO: 446817 - DNA, 25 bp, Artificial
  probe
  misc_feature (1)..(25): SEQ ID NO: 6706; WAN024CWC; Start 8; Stop 32
cttctcagccaatggatcgactttt

SEQ ID NO: 446818 - DNA, 25 bp, Artificial
  probe
  misc_feature (1)..(25): SEQ ID NO: 6706; WAN024CWC; Start 54; Stop 78
aagaactgaaattgctttgcgtgca

SEQ ID NO: 446819 - DNA, 25 bp, Artificial
  probe
  misc_feature (1)..(25): SEQ ID NO: 6707; WAN024BZH; Start 3; Stop 27
gcagtggacaaaatatcttttaaca

SEQ ID NO: 446820 - DNA, 25 bp, Artificial
  probe
  misc_feature (1)..(25): SEQ ID NO: 6707; WAN024BZH; Start 25; Stop 49
acaaaccaagagtttattaaagagt

SEQ ID NO: 446821 - DNA, 25 bp, Artificial
  probe
  misc_feature (1)..(25): SEQ ID NO: 6707; WAN024BZH; Start 2; Stop 26
tgcagtggacaaaatatcttttaac

SEQ ID NO: 446822 - DNA, 25 bp, Artificial
  probe
  misc_feature (1)..(25): SEQ ID NO: 6707; WAN024BZH; Start 49; Stop 73
ttatcacttttcaacttttctaagc

SEQ ID NO: 446823 - DNA, 25 bp, Artificial
  probe
  misc_feature (1)..(25): SEQ ID NO: 6707; WAN024BZH; Start 26; Stop 50
caaaccaagagtttattaaagagtt

SEQ ID NO: 446824 - DNA, 25 bp, Artificial
  probe
  misc_feature (1)..(25): SEQ ID NO: 6707; WAN024BZH; Start 24; Stop 48
aacaaaccaagagtttattaaagag

SEQ ID NO: 446825 - DNA, 25 bp, Artificial
  probe
  misc_feature (1)..(25): SEQ ID NO: 6707; WAN024BZH; Start 50; Stop 74
tatcacttttcaacttttctaagct

SEQ ID NO: 446826 - DNA, 25 bp, Artificial
  probe
  misc_feature (1)..(25): SEQ ID NO: 6707; WAN024BZH; Start 8; Stop 32
ggacaaaatatcttttaacaaacca

SEQ ID NO: 446827 - DNA, 25 bp, Artificial
  probe
  misc_feature (1)..(25): SEQ ID NO: 6707; WAN024BZH; Start 7; Stop 31
tggacaaaatatcttttaacaaacc

SEQ ID NO: 446828 - DNA, 25 bp, Artificial
  probe
  misc_feature (1)..(25): SEQ ID NO: 6707; WAN024BZH; Start 1; Stop 25
atgcagtggacaaaatatcttttaa

SEQ ID NO: 446829 - DNA, 25 bp, Artificial
  probe
  misc_feature (1)..(25): SEQ ID NO: 6707; WAN024BZH; Start 4; Stop 28
cagtggacaaaatatcttttaacaa

SEQ ID NO: 446830 - DNA, 25 bp, Artificial
  probe
  misc_feature (1)..(25): SEQ ID NO: 6707; WAN024BZH; Start 45; Stop 69
agagttatcacttttcaacttttct

SEQ ID NO: 446831 - DNA, 25 bp, Artificial
  probe
  misc_feature (1)..(25): SEQ ID NO: 6707; WAN024BZH; Start 6; Stop 30
gtggacaaaatatcttttaacaaac

SEQ ID NO: 446832 - DNA, 25 bp, Artificial
  probe
  misc_feature (1)..(25): SEQ ID NO: 6707; WAN024BZH; Start 5; Stop 29
agtggacaaaatatcttttaacaaa

SEQ ID NO: 446833 - DNA, 25 bp, Artificial
  probe
  misc_feature (1)..(25): SEQ ID NO: 6707; WAN024BZH; Start 51; Stop 75
atcacttttcaacttttctaagctt

SEQ ID NO: 446834 - DNA, 25 bp, Artificial
  probe
  misc_feature (1)..(25): SEQ ID NO: 6707; WAN024BZH; Start 48; Stop 72
gttatcacttttcaacttttctaag

SEQ ID NO: 446835 - DNA, 25 bp, Artificial
  probe
  misc_feature (1)..(25): SEQ ID NO: 6707; WAN024BZH; Start 44; Stop 68
aagagttatcacttttcaacttttc

SEQ ID NO: 446836 - DNA, 25 bp, Artificial
  probe
  misc_feature (1)..(25): SEQ ID NO: 6707; WAN024BZH; Start 10; Stop 34
acaaaatatcttttaacaaaccaag

SEQ ID NO: 446837 - DNA, 25 bp, Artificial
  probe
  misc_feature (1)..(25): SEQ ID NO: 6707; WAN024BZH; Start 9; Stop 33
gacaaaatatcttttaacaaaccaa

SEQ ID NO: 446838 - DNA, 25 bp, Artificial
  probe
  misc_feature (1)..(25): SEQ ID NO: 6707; WAN024BZH; Start 43; Stop 67
aaagagttatcacttttcaactttt

SEQ ID NO: 446839 - DNA, 25 bp, Artificial
  probe
  misc_feature (1)..(25): SEQ ID NO: 6707; WAN024BZH; Start 18; Stop 42
tcttttaacaaaccaagagtttatt

SEQ ID NO: 446840 - DNA, 25 bp, Artificial
  probe
  misc_feature (1)..(25): SEQ ID NO: 6707; WAN024BZH; Start 46; Stop 70
gagttatcacttttcaacttttcta

SEQ ID NO: 446841 - DNA, 25 bp, Artificial
  probe
  misc_feature (1)..(25): SEQ ID NO: 6707; WAN024BZH; Start 17; Stop 41
atcttttaacaaaccaagagtttat

SEQ ID NO: 446842 - DNA, 25 bp, Artificial
  probe
  misc_feature (1)..(25): SEQ ID NO: 6707; WAN024BZH; Start 15; Stop 39
atatcttttaacaaaccaagagttt

SEQ ID NO: 446843 - DNA, 25 bp, Artificial
  probe
  misc_feature (1)..(25): SEQ ID NO: 6707; WAN024BZH; Start 14; Stop 38
aatatcttttaacaaaccaagagtt

SEQ ID NO: 446844 - DNA, 25 bp, Artificial
  probe
  misc_feature (1)..(25): SEQ ID NO: 6707; WAN024BZH; Start 13; Stop 37
aaatatcttttaacaaaccaagagt

SEQ ID NO: 446845 - DNA, 25 bp, Artificial
  probe
  misc_feature (1)..(25): SEQ ID NO: 6707; WAN024BZH; Start 47; Stop 71
agttatcacttttcaacttttctaa

SEQ ID NO: 446846 - DNA, 25 bp, Artificial
  probe
  misc_feature (1)..(25): SEQ ID NO: 6707; WAN024BZH; Start 42; Stop 66
taaagagttatcacttttcaacttt

SEQ ID NO: 446847 - DNA, 25 bp, Artificial
  probe
  misc_feature (1)..(25): SEQ ID NO: 6707; WAN024BZH; Start 41; Stop 65
ttaaagagttatcacttttcaactt

SEQ ID NO: 446848 - DNA, 25 bp, Artificial
  probe
  misc_feature (1)..(25): SEQ ID NO: 6708; WAN024BOO; Start 553; Stop 577
acaccaagagattgtgctgatataa

SEQ ID NO: 446849 - DNA, 25 bp, Artificial
  probe
  misc_feature (1)..(25): SEQ ID NO: 6708; WAN024BOO; Start 551; Stop 575
atacaccaagagattgtgctgatat

SEQ ID NO: 446850 - DNA, 25 bp, Artificial
  probe
  misc_feature (1)..(25): SEQ ID NO: 6708; WAN024BOO; Start 549; Stop 573
atatacaccaagagattgtgctgat

SEQ ID NO: 446851 - DNA, 25 bp, Artificial
  probe
  misc_feature (1)..(25): SEQ ID NO: 6708; WAN024BOO; Start 543; Stop 567
tcctacatatacaccaagagattgt

SEQ ID NO: 446852 - DNA, 25 bp, Artificial
  probe
  misc_feature (1)..(25): SEQ ID NO: 6708; WAN024BOO; Start 546; Stop 570
tacatatacaccaagagattgtgct

SEQ ID NO: 446853 - DNA, 25 bp, Artificial
  probe
  misc_feature (1)..(25): SEQ ID NO: 6708; WAN024BOO; Start 548; Stop 572
catatacaccaagagattgtgctga

SEQ ID NO: 446854 - DNA, 25 bp, Artificial
  probe
  misc_feature (1)..(25): SEQ ID NO: 6708; WAN024BOO; Start 552; Stop 576
tacaccaagagattgtgctgatata

SEQ ID NO: 446855 - DNA, 25 bp, Artificial
  probe
  misc_feature (1)..(25): SEQ ID NO: 6708; WAN024BOO; Start 550; Stop 574
tatacaccaagagattgtgctgata

SEQ ID NO: 446856 - DNA, 25 bp, Artificial
  probe
  misc_feature (1)..(25): SEQ ID NO: 6708; WAN024BOO; Start 545; Stop 569
ctacatatacaccaagagattgtgc

SEQ ID NO: 446857 - DNA, 25 bp, Artificial
  probe
  misc_feature (1)..(25): SEQ ID NO: 6708; WAN024BOO; Start 547; Stop 571
acatatacaccaagagattgtgctg

SEQ ID NO: 446858 - DNA, 25 bp, Artificial
  probe
  misc_feature (1)..(25): SEQ ID NO: 6708; WAN024BOO; Start 542; Stop 566
ttcctacatatacaccaagagattg

SEQ ID NO: 446859 - DNA, 25 bp, Artificial
  probe
  misc_feature (1)..(25): SEQ ID NO: 6708; WAN024BOO; Start 544; Stop 568
cctacatatacaccaagagattgtg

SEQ ID NO: 446860 - DNA, 25 bp, Artificial
  probe
  misc_feature (1)..(25): SEQ ID NO: 6708; WAN024BOO; Start 439; Stop 463
atgtatgaagttggaatgaattacc

SEQ ID NO: 446861 - DNA, 25 bp, Artificial
  probe
  misc_feature (1)..(25): SEQ ID NO: 6708; WAN024BOO; Start 560; Stop 584
gagattgtgctgatataaacccttg

SEQ ID NO: 446862 - DNA, 25 bp, Artificial
  probe
  misc_feature (1)..(25): SEQ ID NO: 6708; WAN024BOO; Start 559; Stop 583
agagattgtgctgatataaaccctt

SEQ ID NO: 446863 - DNA, 25 bp, Artificial
  probe
  misc_feature (1)..(25): SEQ ID NO: 6708; WAN024BOO; Start 558; Stop 582
aagagattgtgctgatataaaccct

SEQ ID NO: 446864 - DNA, 25 bp, Artificial
  probe
  misc_feature (1)..(25): SEQ ID NO: 6708; WAN024BOO; Start 566; Stop 590
gtgctgatataaacccttggaagta

SEQ ID NO: 446865 - DNA, 25 bp, Artificial
  probe
  misc_feature (1)..(25): SEQ ID NO: 6708; WAN024BOO; Start 563; Stop 587
attgtgctgatataaacccttggaa

SEQ ID NO: 446866 - DNA, 25 bp, Artificial
  probe
  misc_feature (1)..(25): SEQ ID NO: 6708; WAN024BOO; Start 567; Stop 591
tgctgatataaacccttggaagtat

SEQ ID NO: 446867 - DNA, 25 bp, Artificial
  probe
  misc_feature (1)..(25): SEQ ID NO: 6708; WAN024BOO; Start 301; Stop 325
ggatattgtgatttggatatggtgc

SEQ ID NO: 446868 - DNA, 25 bp, Artificial
  probe
  misc_feature (1)..(25): SEQ ID NO: 6708; WAN024BOO; Start 562; Stop 586
gattgtgctgatataaacccttgga

SEQ ID NO: 446869 - DNA, 25 bp, Artificial
  probe
  misc_feature (1)..(25): SEQ ID NO: 6708; WAN024BOO; Start 561; Stop 585
agattgtgctgatataaacccttgg

SEQ ID NO: 446870 - DNA, 25 bp, Artificial
  probe
  misc_feature (1)..(25): SEQ ID NO: 6708; WAN024BOO; Start 303; Stop 327
atattgtgatttggatatggtgctg

SEQ ID NO: 446871 - DNA, 25 bp, Artificial
  probe
  misc_feature (1)..(25): SEQ ID NO: 6708; WAN024BOO; Start 300; Stop 324
gggatattgtgatttggatatggtg

SEQ ID NO: 446872 - DNA, 25 bp, Artificial
  probe
  misc_feature (1)..(25): SEQ ID NO: 6708; WAN024BOO; Start 564; Stop 588
ttgtgctgatataaacccttggaag

SEQ ID NO: 446873 - DNA, 25 bp, Artificial
  probe
  misc_feature (1)..(25): SEQ ID NO: 6708; WAN024BOO; Start 302; Stop 326
gatattgtgatttggatatggtgct

SEQ ID NO: 446874 - DNA, 25 bp, Artificial
  probe
  misc_feature (1)..(25): SEQ ID NO: 6708; WAN024BOO; Start 541; Stop 565
attcctacatatacaccaagagatt

SEQ ID NO: 446875 - DNA, 25 bp, Artificial
  probe
  misc_feature (1)..(25): SEQ ID NO: 6708; WAN024BOO; Start 304; Stop 328
tattgtgatttggatatggtgctgg

SEQ ID NO: 446876 - DNA, 25 bp, Artificial
  probe
  misc_feature (1)..(25): SEQ ID NO: 6708; WAN024BOO; Start 440; Stop 464
tgtatgaagttggaatgaattacca

SEQ ID NO: 446877 - DNA, 25 bp, Artificial
  probe
  misc_feature (1)..(25): SEQ ID NO: 6708; WAN024BOO; Start 557; Stop 581
caagagattgtgctgatataaaccc

SEQ ID NO: 446878 - DNA, 25 bp, Artificial
  probe
  misc_feature (1)..(25): SEQ ID NO: 6708; WAN024BOO; Start 556; Stop 580
ccaagagattgtgctgatataaacc

SEQ ID NO: 446879 - DNA, 25 bp, Artificial
  probe
  misc_feature (1)..(25): SEQ ID NO: 6708; WAN024BOO; Start 540; Stop 564
aattcctacatatacaccaagagat

SEQ ID NO: 446880 - DNA, 25 bp, Artificial
  probe
  misc_feature (1)..(25): SEQ ID NO: 6708; WAN024BOO; Start 555; Stop 579
accaagagattgtgctgatataaac

SEQ ID NO: 446881 - DNA, 25 bp, Artificial
  probe
  misc_feature (1)..(25): SEQ ID NO: 6709; WAN024BTG; Start 216; Stop 240
tgagagtattacaaccttgagtgag

SEQ ID NO: 446882 - DNA, 25 bp, Artificial
  probe
  misc_feature (1)..(25): SEQ ID NO: 6709; WAN024BTG; Start 215; Stop 239
ttgagagtattacaaccttgagtga

SEQ ID NO: 446883 - DNA, 25 bp, Artificial
  probe
  misc_feature (1)..(25): SEQ ID NO: 6709; WAN024BTG; Start 454; Stop 478
aatgaagcaggaagtaatggaataa

SEQ ID NO: 446884 - DNA, 25 bp, Artificial
  probe
  misc_feature (1)..(25): SEQ ID NO: 6709; WAN024BTG; Start 233; Stop 257
tgagtgaggaagacatggatatagt

SEQ ID NO: 446885 - DNA, 25 bp, Artificial
  probe
  misc_feature (1)..(25): SEQ ID NO: 6709; WAN024BTG; Start 237; Stop 261
tgaggaagacatggatatagtaggt

SEQ ID NO: 446886 - DNA, 25 bp, Artificial
  probe
  misc_feature (1)..(25): SEQ ID NO: 6709; WAN024BTG; Start 236; Stop 260
gtgaggaagacatggatatagtagg

SEQ ID NO: 446887 - DNA, 25 bp, Artificial
  probe
  misc_feature (1)..(25): SEQ ID NO: 6709; WAN024BTG; Start 232; Stop 256
ttgagtgaggaagacatggatatag

SEQ ID NO: 446888 - DNA, 25 bp, Artificial
  probe
  misc_feature (1)..(25): SEQ ID NO: 6709; WAN024BTG; Start 231; Stop 255
cttgagtgaggaagacatggatata

SEQ ID NO: 446889 - DNA, 25 bp, Artificial
  probe
  misc_feature (1)..(25): SEQ ID NO: 6709; WAN024BTG; Start 238; Stop 262
gaggaagacatggatatagtaggtt

SEQ ID NO: 446890 - DNA, 25 bp, Artificial
  probe
  misc_feature (1)..(25): SEQ ID NO: 6709; WAN024BTG; Start 222; Stop 246
tattacaaccttgagtgaggaagac

SEQ ID NO: 446891 - DNA, 25 bp, Artificial
  probe
  misc_feature (1)..(25): SEQ ID NO: 6709; WAN024BTG; Start 221; Stop 245
gtattacaaccttgagtgaggaaga

SEQ ID NO: 446892 - DNA, 25 bp, Artificial
  probe
  misc_feature (1)..(25): SEQ ID NO: 6709; WAN024BTG; Start 220; Stop 244
agtattacaaccttgagtgaggaag

SEQ ID NO: 446893 - DNA, 25 bp, Artificial
  probe
  misc_feature (1)..(25): SEQ ID NO: 6709; WAN024BTG; Start 219; Stop 243
gagtattacaaccttgagtgaggaa

SEQ ID NO: 446894 - DNA, 25 bp, Artificial
  probe
  misc_feature (1)..(25): SEQ ID NO: 6709; WAN024BTG; Start 234; Stop 258
gagtgaggaagacatggatatagta

SEQ ID NO: 446895 - DNA, 25 bp, Artificial
  probe
  misc_feature (1)..(25): SEQ ID NO: 6709; WAN024BTG; Start 877; Stop 901
attgaggatagtcatggagttgatg

SEQ ID NO: 446896 - DNA, 25 bp, Artificial
  probe
  misc_feature (1)..(25): SEQ ID NO: 6709; WAN024BTG; Start 614; Stop 638
ttcacgaatatgaggaactattgtt

SEQ ID NO: 446897 - DNA, 25 bp, Artificial
  probe
  misc_feature (1)..(25): SEQ ID NO: 6709; WAN024BTG; Start 217; Stop 241
gagagtattacaaccttgagtgagg

SEQ ID NO: 446898 - DNA, 25 bp, Artificial
  probe
  misc_feature (1)..(25): SEQ ID NO: 6709; WAN024BTG; Start 880; Stop 904
gaggatagtcatggagttgatgtaa

SEQ ID NO: 446899 - DNA, 25 bp, Artificial
  probe
  misc_feature (1)..(25): SEQ ID NO: 6709; WAN024BTG; Start 235; Stop 259
agtgaggaagacatggatatagtag

SEQ ID NO: 446900 - DNA, 25 bp, Artificial
  probe
  misc_feature (1)..(25): SEQ ID NO: 6709; WAN024BTG; Start 218; Stop 242
agagtattacaaccttgagtgagga

SEQ ID NO: 446901 - DNA, 25 bp, Artificial
  probe
  misc_feature (1)..(25): SEQ ID NO: 6709; WAN024BTG; Start 879; Stop 903
tgaggatagtcatggagttgatgta

SEQ ID NO: 446902 - DNA, 25 bp, Artificial
  probe
  misc_feature (1)..(25): SEQ ID NO: 6709; WAN024BTG; Start 876; Stop 900
aattgaggatagtcatggagttgat

SEQ ID NO: 446903 - DNA, 25 bp, Artificial
  probe
  misc_feature (1)..(25): SEQ ID NO: 6709; WAN024BTG; Start 881; Stop 905
aggatagtcatggagttgatgtaat

SEQ ID NO: 446904 - DNA, 25 bp, Artificial
  probe
  misc_feature (1)..(25): SEQ ID NO: 6709; WAN024BTG; Start 875; Stop 899
taattgaggatagtcatggagttga

SEQ ID NO: 446905 - DNA, 25 bp, Artificial
  probe
  misc_feature (1)..(25): SEQ ID NO: 6709; WAN024BTG; Start 872; Stop 896
agttaattgaggatagtcatggagt

SEQ ID NO: 446906 - DNA, 25 bp, Artificial
  probe
  misc_feature (1)..(25): SEQ ID NO: 6709; WAN024BTG; Start 878; Stop 902
ttgaggatagtcatggagttgatgt

SEQ ID NO: 446907 - DNA, 25 bp, Artificial
  probe
  misc_feature (1)..(25): SEQ ID NO: 6709; WAN024BTG; Start 871; Stop 895
cagttaattgaggatagtcatggag

SEQ ID NO: 446908 - DNA, 25 bp, Artificial
  probe
  misc_feature (1)..(25): SEQ ID NO: 6709; WAN024BTG; Start 224; Stop 248
ttacaaccttgagtgaggaagacat

SEQ ID NO: 446909 - DNA, 25 bp, Artificial
  probe
  misc_feature (1)..(25): SEQ ID NO: 6709; WAN024BTG; Start 223; Stop 247
attacaaccttgagtgaggaagaca

SEQ ID NO: 446910 - DNA, 25 bp, Artificial
  probe
  misc_feature (1)..(25): SEQ ID NO: 6709; WAN024BTG; Start 882; Stop 906
ggatagtcatggagttgatgtaatt

SEQ ID NO: 446911 - DNA, 25 bp, Artificial
  probe
  misc_feature (1)..(25): SEQ ID NO: 6709; WAN024BTG; Start 450; Stop 474
tagaaatgaagcaggaagtaatgga

SEQ ID NO: 446912 - DNA, 25 bp, Artificial
  probe
  misc_feature (1)..(25): SEQ ID NO: 6709; WAN024BTG; Start 874; Stop 898
ttaattgaggatagtcatggagttg

SEQ ID NO: 446913 - DNA, 25 bp, Artificial
  probe
  misc_feature (1)..(25): SEQ ID NO: 6709; WAN024BTG; Start 873; Stop 897
gttaattgaggatagtcatggagtt

SEQ ID NO: 446914 - DNA, 25 bp, Artificial
  probe
  misc_feature (1)..(25): SEQ ID NO: 6710; WAN024F2R; Start 349; Stop 373
ggactgtatatgaacgaacgctatc

SEQ ID NO: 446915 - DNA, 25 bp, Artificial
  probe
  misc_feature (1)..(25): SEQ ID NO: 6710; WAN024F2R; Start 351; Stop 375
actgtatatgaacgaacgctatcaa

SEQ ID NO: 446916 - DNA, 25 bp, Artificial
  probe
  misc_feature (1)..(25): SEQ ID NO: 6710; WAN024F2R; Start 350; Stop 374
gactgtatatgaacgaacgctatca

SEQ ID NO: 446917 - DNA, 25 bp, Artificial
  probe
  misc_feature (1)..(25): SEQ ID NO: 6710; WAN024F2R; Start 185; Stop 209
gaaacttagcgaattggcactataa

SEQ ID NO: 446918 - DNA, 25 bp, Artificial
  probe
  misc_feature (1)..(25): SEQ ID NO: 6710; WAN024F2R; Start 184; Stop 208
agaaacttagcgaattggcactata

SEQ ID NO: 446919 - DNA, 25 bp, Artificial
  probe
  misc_feature (1)..(25): SEQ ID NO: 6710; WAN024F2R; Start 183; Stop 207
tagaaacttagcgaattggcactat

SEQ ID NO: 446920 - DNA, 25 bp, Artificial
  probe
  misc_feature (1)..(25): SEQ ID NO: 6710; WAN024F2R; Start 296; Stop 320
aacaagaaatcaaggtttactacgc

SEQ ID NO: 446921 - DNA, 25 bp, Artificial
  probe
  misc_feature (1)..(25): SEQ ID NO: 6710; WAN024F2R; Start 279; Stop 303
aacacagacagactttcaacaagaa

SEQ ID NO: 446922 - DNA, 25 bp, Artificial
  probe
  misc_feature (1)..(25): SEQ ID NO: 6710; WAN024F2R; Start 278; Stop 302
aaacacagacagactttcaacaaga

SEQ ID NO: 446923 - DNA, 25 bp, Artificial
  probe
  misc_feature (1)..(25): SEQ ID NO: 6710; WAN024F2R; Start 297; Stop 321
acaagaaatcaaggtttactacgcc

SEQ ID NO: 446924 - DNA, 25 bp, Artificial
  probe
  misc_feature (1)..(25): SEQ ID NO: 6710; WAN024F2R; Start 182; Stop 206
ctagaaacttagcgaattggcacta

SEQ ID NO: 446925 - DNA, 25 bp, Artificial
  probe
  misc_feature (1)..(25): SEQ ID NO: 6710; WAN024F2R; Start 352; Stop 376
ctgtatatgaacgaacgctatcaaa

SEQ ID NO: 446926 - DNA, 25 bp, Artificial
  probe
  misc_feature (1)..(25): SEQ ID NO: 6710; WAN024F2R; Start 295; Stop 319
caacaagaaatcaaggtttactacg

SEQ ID NO: 446927 - DNA, 25 bp, Artificial
  probe
  misc_feature (1)..(25): SEQ ID NO: 6710; WAN024F2R; Start 348; Stop 372
gggactgtatatgaacgaacgctat

SEQ ID NO: 446928 - DNA, 25 bp, Artificial
  probe
  misc_feature (1)..(25): SEQ ID NO: 6710; WAN024F2R; Start 298; Stop 322
caagaaatcaaggtttactacgccg

SEQ ID NO: 446929 - DNA, 25 bp, Artificial
  probe
  misc_feature (1)..(25): SEQ ID NO: 6710; WAN024F2R; Start 67; Stop 91
gaccatctcgtctttactattgaaa

SEQ ID NO: 446930 - DNA, 25 bp, Artificial
  probe
  misc_feature (1)..(25): SEQ ID NO: 6710; WAN024F2R; Start 299; Stop 323
aagaaatcaaggtttactacgccga

SEQ ID NO: 446931 - DNA, 25 bp, Artificial
  probe
  misc_feature (1)..(25): SEQ ID NO: 6710; WAN024F2R; Start 294; Stop 318
tcaacaagaaatcaaggtttactac

SEQ ID NO: 446932 - DNA, 25 bp, Artificial
  probe
  misc_feature (1)..(25): SEQ ID NO: 6710; WAN024F2R; Start 287; Stop 311
cagactttcaacaagaaatcaaggt

SEQ ID NO: 446933 - DNA, 25 bp, Artificial
  probe
  misc_feature (1)..(25): SEQ ID NO: 6710; WAN024F2R; Start 286; Stop 310
acagactttcaacaagaaatcaagg

SEQ ID NO: 446934 - DNA, 25 bp, Artificial
  probe
  misc_feature (1)..(25): SEQ ID NO: 6710; WAN024F2R; Start 281; Stop 305
cacagacagactttcaacaagaaat

SEQ ID NO: 446935 - DNA, 25 bp, Artificial
  probe
  misc_feature (1)..(25): SEQ ID NO: 6710; WAN024F2R; Start 283; Stop 307
cagacagactttcaacaagaaatca

SEQ ID NO: 446936 - DNA, 25 bp, Artificial
  probe
  misc_feature (1)..(25): SEQ ID NO: 6710; WAN024F2R; Start 282; Stop 306
acagacagactttcaacaagaaatc

SEQ ID NO: 446937 - DNA, 25 bp, Artificial
  probe
  misc_feature (1)..(25): SEQ ID NO: 6710; WAN024F2R; Start 288; Stop 312
agactttcaacaagaaatcaaggtt

SEQ ID NO: 446938 - DNA, 25 bp, Artificial
  probe
  misc_feature (1)..(25): SEQ ID NO: 6710; WAN024F2R; Start 300; Stop 324
agaaatcaaggtttactacgccgac

SEQ ID NO: 446939 - DNA, 25 bp, Artificial
  probe
  misc_feature (1)..(25): SEQ ID NO: 6710; WAN024F2R; Start 347; Stop 371
agggactgtatatgaacgaacgcta

SEQ ID NO: 446940 - DNA, 25 bp, Artificial
  probe
  misc_feature (1)..(25): SEQ ID NO: 6710; WAN024F2R; Start 345; Stop 369
aaagggactgtatatgaacgaacgc

SEQ ID NO: 446941 - DNA, 25 bp, Artificial
  probe
  misc_feature (1)..(25): SEQ ID NO: 6710; WAN024F2R; Start 284; Stop 308
agacagactttcaacaagaaatcaa

SEQ ID NO: 446942 - DNA, 25 bp, Artificial
  probe
  misc_feature (1)..(25): SEQ ID NO: 6710; WAN024F2R; Start 280; Stop 304
acacagacagactttcaacaagaaa

SEQ ID NO: 446943 - DNA, 25 bp, Artificial
  probe
  misc_feature (1)..(25): SEQ ID NO: 6710; WAN024F2R; Start 285; Stop 309
gacagactttcaacaagaaatcaag

SEQ ID NO: 446944 - DNA, 25 bp, Artificial
  probe
  misc_feature (1)..(25): SEQ ID NO: 6710; WAN024F2R; Start 289; Stop 313
gactttcaacaagaaatcaaggttt

SEQ ID NO: 446945 - DNA, 25 bp, Artificial
  probe
  misc_feature (1)..(25): SEQ ID NO: 6710; WAN024F2R; Start 156; Stop 180
acaaaagagaggctataaacagtca

SEQ ID NO: 446946 - DNA, 25 bp, Artificial
  probe
  misc_feature (1)..(25): SEQ ID NO: 6710; WAN024F2R; Start 152; Stop 176
aggaacaaaagagaggctataaaca

SEQ ID NO: 446947 - DNA, 25 bp, Artificial
  probe
  misc_feature (1)..(25): SEQ ID NO: 6711; WAN024G93; Start 358; Stop 382
cataaattcttgcttggtcataggg

SEQ ID NO: 446948 - DNA, 25 bp, Artificial
  probe
  misc_feature (1)..(25): SEQ ID NO: 6711; WAN024G93; Start 168; Stop 192
attctccatcacgaggtcctgtata

SEQ ID NO: 446949 - DNA, 25 bp, Artificial
  probe
  misc_feature (1)..(25): SEQ ID NO: 6711; WAN024G93; Start 169; Stop 193
ttctccatcacgaggtcctgtatag

SEQ ID NO: 446950 - DNA, 25 bp, Artificial
  probe
  misc_feature (1)..(25): SEQ ID NO: 6711; WAN024G93; Start 263; Stop 287
atgacttcgataggcatacatcctt

SEQ ID NO: 446951 - DNA, 25 bp, Artificial
  probe
  misc_feature (1)..(25): SEQ ID NO: 6711; WAN024G93; Start 167; Stop 191
aattctccatcacgaggtcctgtat

SEQ ID NO: 446952 - DNA, 25 bp, Artificial
  probe
  misc_feature (1)..(25): SEQ ID NO: 6711; WAN024G93; Start 266; Stop 290
acttcgataggcatacatccttcaa

SEQ ID NO: 446953 - DNA, 25 bp, Artificial
  probe
  misc_feature (1)..(25): SEQ ID NO: 6711; WAN024G93; Start 270; Stop 294
cgataggcatacatccttcaaagta

SEQ ID NO: 446954 - DNA, 25 bp, Artificial
  probe
  misc_feature (1)..(25): SEQ ID NO: 6711; WAN024G93; Start 203; Stop 227
tactcaagaccgactggcttcatag

SEQ ID NO: 446955 - DNA, 25 bp, Artificial
  probe
  misc_feature (1)..(25): SEQ ID NO: 6711; WAN024G93; Start 265; Stop 289
gacttcgataggcatacatccttca

SEQ ID NO: 446956 - DNA, 25 bp, Artificial
  probe
  misc_feature (1)..(25): SEQ ID NO: 6711; WAN024G93; Start 264; Stop 288
tgacttcgataggcatacatccttc

SEQ ID NO: 446957 - DNA, 25 bp, Artificial
  probe
  misc_feature (1)..(25): SEQ ID NO: 6711; WAN024G93; Start 262; Stop 286
catgacttcgataggcatacatcct

SEQ ID NO: 446958 - DNA, 25 bp, Artificial
  probe
  misc_feature (1)..(25): SEQ ID NO: 6711; WAN024G93; Start 357; Stop 381
ccataaattcttgcttggtcatagg

SEQ ID NO: 446959 - DNA, 25 bp, Artificial
  probe
  misc_feature (1)..(25): SEQ ID NO: 6711; WAN024G93; Start 351; Stop 375
ggaaatccataaattcttgcttggt

SEQ ID NO: 446960 - DNA, 25 bp, Artificial
  probe
  misc_feature (1)..(25): SEQ ID NO: 6711; WAN024G93; Start 261; Stop 285
ccatgacttcgataggcatacatcc

SEQ ID NO: 446961 - DNA, 25 bp, Artificial
  probe
  misc_feature (1)..(25): SEQ ID NO: 6711; WAN024G93; Start 353; Stop 377
aaatccataaattcttgcttggtca

SEQ ID NO: 446962 - DNA, 25 bp, Artificial
  probe
  misc_feature (1)..(25): SEQ ID NO: 6711; WAN024G93; Start 186; Stop 210
ctgtatagtcgtctgggtactcaag

SEQ ID NO: 446963 - DNA, 25 bp, Artificial
  probe
  misc_feature (1)..(25): SEQ ID NO: 6711; WAN024G93; Start 271; Stop 295
gataggcatacatccttcaaagtac

SEQ ID NO: 446964 - DNA, 25 bp, Artificial
  probe
  misc_feature (1)..(25): SEQ ID NO: 6711; WAN024G93; Start 354; Stop 378
aatccataaattcttgcttggtcat

SEQ ID NO: 446965 - DNA, 25 bp, Artificial
  probe
  misc_feature (1)..(25): SEQ ID NO: 6711; WAN024G93; Start 356; Stop 380
tccataaattcttgcttggtcatag

SEQ ID NO: 446966 - DNA, 25 bp, Artificial
  probe
  misc_feature (1)..(25): SEQ ID NO: 6711; WAN024G93; Start 171; Stop 195
ctccatcacgaggtcctgtatagtc

SEQ ID NO: 446967 - DNA, 25 bp, Artificial
  probe
  misc_feature (1)..(25): SEQ ID NO: 6711; WAN024G93; Start 352; Stop 376
gaaatccataaattcttgcttggtc

SEQ ID NO: 446968 - DNA, 25 bp, Artificial
  probe
  misc_feature (1)..(25): SEQ ID NO: 6711; WAN024G93; Start 126; Stop 150
cattatcctgacgaagttgcacaac

SEQ ID NO: 446969 - DNA, 25 bp, Artificial
  probe
  misc_feature (1)..(25): SEQ ID NO: 6711; WAN024G93; Start 187; Stop 211
tgtatagtcgtctgggtactcaaga

SEQ ID NO: 446970 - DNA, 25 bp, Artificial
  probe
  misc_feature (1)..(25): SEQ ID NO: 6711; WAN024G93; Start 164; Stop 188
ttaaattctccatcacgaggtcctg

SEQ ID NO: 446971 - DNA, 25 bp, Artificial
  probe
  misc_feature (1)..(25): SEQ ID NO: 6711; WAN024G93; Start 355; Stop 379
atccataaattcttgcttggtcata

SEQ ID NO: 446972 - DNA, 25 bp, Artificial
  probe
  misc_feature (1)..(25): SEQ ID NO: 6711; WAN024G93; Start 202; Stop 226
gtactcaagaccgactggcttcata

SEQ ID NO: 446973 - DNA, 25 bp, Artificial
  probe
  misc_feature (1)..(25): SEQ ID NO: 6711; WAN024G93; Start 170; Stop 194
tctccatcacgaggtcctgtatagt

SEQ ID NO: 446974 - DNA, 25 bp, Artificial
  probe
  misc_feature (1)..(25): SEQ ID NO: 6711; WAN024G93; Start 350; Stop 374
tggaaatccataaattcttgcttgg

SEQ ID NO: 446975 - DNA, 25 bp, Artificial
  probe
  misc_feature (1)..(25): SEQ ID NO: 6711; WAN024G93; Start 268; Stop 292
ttcgataggcatacatccttcaaag

SEQ ID NO: 446976 - DNA, 25 bp, Artificial
  probe
  misc_feature (1)..(25): SEQ ID NO: 6711; WAN024G93; Start 267; Stop 291
cttcgataggcatacatccttcaaa

SEQ ID NO: 446977 - DNA, 25 bp, Artificial
  probe
  misc_feature (1)..(25): SEQ ID NO: 6711; WAN024G93; Start 163; Stop 187
tttaaattctccatcacgaggtcct

SEQ ID NO: 446978 - DNA, 25 bp, Artificial
  probe
  misc_feature (1)..(25): SEQ ID NO: 6711; WAN024G93; Start 185; Stop 209
cctgtatagtcgtctgggtactcaa

SEQ ID NO: 446979 - DNA, 25 bp, Artificial
  probe
  misc_feature (1)..(25): SEQ ID NO: 6711; WAN024G93; Start 359; Stop 383
ataaattcttgcttggtcatagggg

SEQ ID NO: 446980 - DNA, 25 bp, Artificial
  probe
  misc_feature (1)..(25): SEQ ID NO: 6712; WAN024F6B; Start 308; Stop 332
cattaacagtaacgtattggtcacc

SEQ ID NO: 446981 - DNA, 25 bp, Artificial
  probe
  misc_feature (1)..(25): SEQ ID NO: 6712; WAN024F6B; Start 307; Stop 331
acattaacagtaacgtattggtcac

SEQ ID NO: 446982 - DNA, 25 bp, Artificial
  probe
  misc_feature (1)..(25): SEQ ID NO: 6712; WAN024F6B; Start 171; Stop 195
gtattattctccatcaaaggcatct

SEQ ID NO: 446983 - DNA, 25 bp, Artificial
  probe
  misc_feature (1)..(25): SEQ ID NO: 6712; WAN024F6B; Start 170; Stop 194
agtattattctccatcaaaggcatc

SEQ ID NO: 446984 - DNA, 25 bp, Artificial
  probe
  misc_feature (1)..(25): SEQ ID NO: 6712; WAN024F6B; Start 168; Stop 192
agagtattattctccatcaaaggca

SEQ ID NO: 446985 - DNA, 25 bp, Artificial
  probe
  misc_feature (1)..(25): SEQ ID NO: 6712; WAN024F6B; Start 305; Stop 329
cgacattaacagtaacgtattggtc

SEQ ID NO: 446986 - DNA, 25 bp, Artificial
  probe
  misc_feature (1)..(25): SEQ ID NO: 6712; WAN024F6B; Start 306; Stop 330
gacattaacagtaacgtattggtca

SEQ ID NO: 446987 - DNA, 25 bp, Artificial
  probe
  misc_feature (1)..(25): SEQ ID NO: 6712; WAN024F6B; Start 169; Stop 193
gagtattattctccatcaaaggcat

SEQ ID NO: 446988 - DNA, 25 bp, Artificial
  probe
  misc_feature (1)..(25): SEQ ID NO: 6712; WAN024F6B; Start 221; Stop 245
tctttggatttactttcaagtcacc

SEQ ID NO: 446989 - DNA, 25 bp, Artificial
  probe
  misc_feature (1)..(25): SEQ ID NO: 6712; WAN024F6B; Start 167; Stop 191
aagagtattattctccatcaaaggc

SEQ ID NO: 446990 - DNA, 25 bp, Artificial
  probe
  misc_feature (1)..(25): SEQ ID NO: 6712; WAN024F6B; Start 172; Stop 196
tattattctccatcaaaggcatctt

SEQ ID NO: 446991 - DNA, 25 bp, Artificial
  probe
  misc_feature (1)..(25): SEQ ID NO: 6712; WAN024F6B; Start 309; Stop 333
attaacagtaacgtattggtcacca

SEQ ID NO: 446992 - DNA, 25 bp, Artificial
  probe
  misc_feature (1)..(25): SEQ ID NO: 6712; WAN024F6B; Start 223; Stop 247
tttggatttactttcaagtcaccag

SEQ ID NO: 446993 - DNA, 25 bp, Artificial
  probe
  misc_feature (1)..(25): SEQ ID NO: 6712; WAN024F6B; Start 222; Stop 246
ctttggatttactttcaagtcacca

SEQ ID NO: 446994 - DNA, 25 bp, Artificial
  probe
  misc_feature (1)..(25): SEQ ID NO: 6712; WAN024F6B; Start 220; Stop 244
ttctttggatttactttcaagtcac

SEQ ID NO: 446995 - DNA, 25 bp, Artificial
  probe
  misc_feature (1)..(25): SEQ ID NO: 6712; WAN024F6B; Start 226; Stop 250
ggatttactttcaagtcaccagcag

SEQ ID NO: 446996 - DNA, 25 bp, Artificial
  probe
  misc_feature (1)..(25): SEQ ID NO: 6712; WAN024F6B; Start 165; Stop 189
cgaagagtattattctccatcaaag

SEQ ID NO: 446997 - DNA, 25 bp, Artificial
  probe
  misc_feature (1)..(25): SEQ ID NO: 6712; WAN024F6B; Start 304; Stop 328
acgacattaacagtaacgtattggt

SEQ ID NO: 446998 - DNA, 25 bp, Artificial
  probe
  misc_feature (1)..(25): SEQ ID NO: 6712; WAN024F6B; Start 371; Stop 395
gtaggcggaatttcttaccagtctg

SEQ ID NO: 446999 - DNA, 25 bp, Artificial
  probe
  misc_feature (1)..(25): SEQ ID NO: 6712; WAN024F6B; Start 184; Stop 208
tcaaaggcatctttaatatggtcaa

SEQ ID NO: 447000 - DNA, 25 bp, Artificial
  probe
  misc_feature (1)..(25): SEQ ID NO: 6712; WAN024F6B; Start 176; Stop 200
attctccatcaaaggcatctttaat

SEQ ID NO: 447001 - DNA, 25 bp, Artificial
  probe
  misc_feature (1)..(25): SEQ ID NO: 6712; WAN024F6B; Start 173; Stop 197
attattctccatcaaaggcatcttt

SEQ ID NO: 447002 - DNA, 25 bp, Artificial
  probe
  misc_feature (1)..(25): SEQ ID NO: 6712; WAN024F6B; Start 224; Stop 248
ttggatttactttcaagtcaccagc

SEQ ID NO: 447003 - DNA, 25 bp, Artificial
  probe
  misc_feature (1)..(25): SEQ ID NO: 6712; WAN024F6B; Start 372; Stop 396
taggcggaatttcttaccagtctga

SEQ ID NO: 447004 - DNA, 25 bp, Artificial
  probe
  misc_feature (1)..(25): SEQ ID NO: 6712; WAN024F6B; Start 227; Stop 251
gatttactttcaagtcaccagcagc

SEQ ID NO: 447005 - DNA, 25 bp, Artificial
  probe
  misc_feature (1)..(25): SEQ ID NO: 6712; WAN024F6B; Start 183; Stop 207
atcaaaggcatctttaatatggtca

SEQ ID NO: 447006 - DNA, 25 bp, Artificial
  probe
  misc_feature (1)..(25): SEQ ID NO: 6712; WAN024F6B; Start 219; Stop 243
tttctttggatttactttcaagtca

SEQ ID NO: 447007 - DNA, 25 bp, Artificial
  probe
  misc_feature (1)..(25): SEQ ID NO: 6712; WAN024F6B; Start 182; Stop 206
catcaaaggcatctttaatatggtc

SEQ ID NO: 447008 - DNA, 25 bp, Artificial
  probe
  misc_feature (1)..(25): SEQ ID NO: 6712; WAN024F6B; Start 166; Stop 190
gaagagtattattctccatcaaagg

SEQ ID NO: 447009 - DNA, 25 bp, Artificial
  probe
  misc_feature (1)..(25): SEQ ID NO: 6712; WAN024F6B; Start 177; Stop 201
ttctccatcaaaggcatctttaata

SEQ ID NO: 447010 - DNA, 25 bp, Artificial
  probe
  misc_feature (1)..(25): SEQ ID NO: 6712; WAN024F6B; Start 175; Stop 199
tattctccatcaaaggcatctttaa

SEQ ID NO: 447011 - DNA, 25 bp, Artificial
  probe
  misc_feature (1)..(25): SEQ ID NO: 6712; WAN024F6B; Start 174; Stop 198
ttattctccatcaaaggcatcttta

SEQ ID NO: 447012 - DNA, 25 bp, Artificial
  probe
  misc_feature (1)..(25): SEQ ID NO: 6712; WAN024F6B; Start 185; Stop 209
caaaggcatctttaatatggtcaaa

SEQ ID NO: 447013 - DNA, 25 bp, Artificial
  probe
  misc_feature (1)..(25): SEQ ID NO: 6713; WAN024BQH; Start 727; Stop 751
ggaatgatgatgttcactgataacg

SEQ ID NO: 447014 - DNA, 25 bp, Artificial
  probe
  misc_feature (1)..(25): SEQ ID NO: 6713; WAN024BQH; Start 726; Stop 750
cggaatgatgatgttcactgataac

SEQ ID NO: 447015 - DNA, 25 bp, Artificial
  probe
  misc_feature (1)..(25): SEQ ID NO: 6713; WAN024BQH; Start 725; Stop 749
acggaatgatgatgttcactgataa

SEQ ID NO: 447016 - DNA, 25 bp, Artificial
  probe
  misc_feature (1)..(25): SEQ ID NO: 6713; WAN024BQH; Start 723; Stop 747
ttacggaatgatgatgttcactgat

SEQ ID NO: 447017 - DNA, 25 bp, Artificial
  probe
  misc_feature (1)..(25): SEQ ID NO: 6713; WAN024BQH; Start 724; Stop 748
tacggaatgatgatgttcactgata

SEQ ID NO: 447018 - DNA, 25 bp, Artificial
  probe
  misc_feature (1)..(25): SEQ ID NO: 6713; WAN024BQH; Start 722; Stop 746
gttacggaatgatgatgttcactga

SEQ ID NO: 447019 - DNA, 25 bp, Artificial
  probe
  misc_feature (1)..(25): SEQ ID NO: 6713; WAN024BQH; Start 719; Stop 743
ttggttacggaatgatgatgttcac

SEQ ID NO: 447020 - DNA, 25 bp, Artificial
  probe
  misc_feature (1)..(25): SEQ ID NO: 6713; WAN024BQH; Start 721; Stop 745
ggttacggaatgatgatgttcactg

SEQ ID NO: 447021 - DNA, 25 bp, Artificial
  probe
  misc_feature (1)..(25): SEQ ID NO: 6713; WAN024BQH; Start 720; Stop 744
tggttacggaatgatgatgttcact

SEQ ID NO: 447022 - DNA, 25 bp, Artificial
  probe
  misc_feature (1)..(25): SEQ ID NO: 6713; WAN024BQH; Start 562; Stop 586
ttggttatatcgtctacgttgagtt

SEQ ID NO: 447023 - DNA, 25 bp, Artificial
  probe
  misc_feature (1)..(25): SEQ ID NO: 6713; WAN024BQH; Start 494; Stop 518
ggattgttgcgttgatactatttga

SEQ ID NO: 447024 - DNA, 25 bp, Artificial
  probe
  misc_feature (1)..(25): SEQ ID NO: 6713; WAN024BQH; Start 900; Stop 924
atattgggatgatagaaatgcgaga

SEQ ID NO: 447025 - DNA, 25 bp, Artificial
  probe
  misc_feature (1)..(25): SEQ ID NO: 6713; WAN024BQH; Start 834; Stop 858
gggaggatatttaggatttggtgtt

SEQ ID NO: 447026 - DNA, 25 bp, Artificial
  probe
  misc_feature (1)..(25): SEQ ID NO: 6713; WAN024BQH; Start 830; Stop 854
ttcagggaggatatttaggatttgg

SEQ ID NO: 447027 - DNA, 25 bp, Artificial
  probe
  misc_feature (1)..(25): SEQ ID NO: 6713; WAN024BQH; Start 901; Stop 925
tattgggatgatagaaatgcgagac

SEQ ID NO: 447028 - DNA, 25 bp, Artificial
  probe
  misc_feature (1)..(25): SEQ ID NO: 6713; WAN024BQH; Start 832; Stop 856
cagggaggatatttaggatttggtg

SEQ ID NO: 447029 - DNA, 25 bp, Artificial
  probe
  misc_feature (1)..(25): SEQ ID NO: 6713; WAN024BQH; Start 831; Stop 855
tcagggaggatatttaggatttggt

SEQ ID NO: 447030 - DNA, 25 bp, Artificial
  probe
  misc_feature (1)..(25): SEQ ID NO: 6713; WAN024BQH; Start 493; Stop 517
gggattgttgcgttgatactatttg

SEQ ID NO: 447031 - DNA, 25 bp, Artificial
  probe
  misc_feature (1)..(25): SEQ ID NO: 6713; WAN024BQH; Start 717; Stop 741
atttggttacggaatgatgatgttc

SEQ ID NO: 447032 - DNA, 25 bp, Artificial
  probe
  misc_feature (1)..(25): SEQ ID NO: 6713; WAN024BQH; Start 833; Stop 857
agggaggatatttaggatttggtgt

SEQ ID NO: 447033 - DNA, 25 bp, Artificial
  probe
  misc_feature (1)..(25): SEQ ID NO: 6713; WAN024BQH; Start 492; Stop 516
tgggattgttgcgttgatactattt

SEQ ID NO: 447034 - DNA, 25 bp, Artificial
  probe
  misc_feature (1)..(25): SEQ ID NO: 6713; WAN024BQH; Start 491; Stop 515
ttgggattgttgcgttgatactatt

SEQ ID NO: 447035 - DNA, 25 bp, Artificial
  probe
  misc_feature (1)..(25): SEQ ID NO: 6713; WAN024BQH; Start 551; Stop 575
cttacagaggtttggttatatcgtc

SEQ ID NO: 447036 - DNA, 25 bp, Artificial
  probe
  misc_feature (1)..(25): SEQ ID NO: 6713; WAN024BQH; Start 554; Stop 578
acagaggtttggttatatcgtctac

SEQ ID NO: 447037 - DNA, 25 bp, Artificial
  probe
  misc_feature (1)..(25): SEQ ID NO: 6713; WAN024BQH; Start 835; Stop 859
ggaggatatttaggatttggtgttt

SEQ ID NO: 447038 - DNA, 25 bp, Artificial
  probe
  misc_feature (1)..(25): SEQ ID NO: 6713; WAN024BQH; Start 734; Stop 758
tgatgttcactgataacgtccatat

SEQ ID NO: 447039 - DNA, 25 bp, Artificial
  probe
  misc_feature (1)..(25): SEQ ID NO: 6713; WAN024BQH; Start 733; Stop 757
atgatgttcactgataacgtccata

SEQ ID NO: 447040 - DNA, 25 bp, Artificial
  probe
  misc_feature (1)..(25): SEQ ID NO: 6713; WAN024BQH; Start 903; Stop 927
ttgggatgatagaaatgcgagacta

SEQ ID NO: 447041 - DNA, 25 bp, Artificial
  probe
  misc_feature (1)..(25): SEQ ID NO: 6713; WAN024BQH; Start 552; Stop 576
ttacagaggtttggttatatcgtct

SEQ ID NO: 447042 - DNA, 25 bp, Artificial
  probe
  misc_feature (1)..(25): SEQ ID NO: 6713; WAN024BQH; Start 139; Stop 163
gcgatatttcaactcttgctgttta

SEQ ID NO: 447043 - DNA, 25 bp, Artificial
  probe
  misc_feature (1)..(25): SEQ ID NO: 6713; WAN024BQH; Start 729; Stop 753
aatgatgatgttcactgataacgtc

SEQ ID NO: 447044 - DNA, 25 bp, Artificial
  probe
  misc_feature (1)..(25): SEQ ID NO: 6713; WAN024BQH; Start 728; Stop 752
gaatgatgatgttcactgataacgt

SEQ ID NO: 447045 - DNA, 25 bp, Artificial
  probe
  misc_feature (1)..(25): SEQ ID NO: 6713; WAN024BQH; Start 676; Stop 700
tttatttgggataacgctatgtcag

SEQ ID NO: 447046 - DNA, 25 bp, Artificial
  probe
  misc_feature (1)..(25): SEQ ID NO: 6714; WAN024FXU; Start 54; Stop 78
cataggtcaaggattcgctgataat

SEQ ID NO: 447047 - DNA, 25 bp, Artificial
  probe
  misc_feature (1)..(25): SEQ ID NO: 6714; WAN024FXU; Start 53; Stop 77
tcataggtcaaggattcgctgataa

SEQ ID NO: 447048 - DNA, 25 bp, Artificial
  probe
  misc_feature (1)..(25): SEQ ID NO: 6714; WAN024FXU; Start 52; Stop 76
ctcataggtcaaggattcgctgata

SEQ ID NO: 447049 - DNA, 25 bp, Artificial
  probe
  misc_feature (1)..(25): SEQ ID NO: 6714; WAN024FXU; Start 41; Stop 65
tccagataatcctcataggtcaagg

SEQ ID NO: 447050 - DNA, 25 bp, Artificial
  probe
  misc_feature (1)..(25): SEQ ID NO: 6714; WAN024FXU; Start 40; Stop 64
atccagataatcctcataggtcaag

SEQ ID NO: 447051 - DNA, 25 bp, Artificial
  probe
  misc_feature (1)..(25): SEQ ID NO: 6714; WAN024FXU; Start 36; Stop 60
ccatatccagataatcctcataggt

SEQ ID NO: 447052 - DNA, 25 bp, Artificial
  probe
  misc_feature (1)..(25): SEQ ID NO: 6714; WAN024FXU; Start 55; Stop 79
ataggtcaaggattcgctgataatc

SEQ ID NO: 447053 - DNA, 25 bp, Artificial
  probe
  misc_feature (1)..(25): SEQ ID NO: 6714; WAN024FXU; Start 35; Stop 59
tccatatccagataatcctcatagg

SEQ ID NO: 447054 - DNA, 25 bp, Artificial
  probe
  misc_feature (1)..(25): SEQ ID NO: 6714; WAN024FXU; Start 59; Stop 83
gtcaaggattcgctgataatctcat

SEQ ID NO: 447055 - DNA, 25 bp, Artificial
  probe
  misc_feature (1)..(25): SEQ ID NO: 6714; WAN024FXU; Start 56; Stop 80
taggtcaaggattcgctgataatct

SEQ ID NO: 447056 - DNA, 25 bp, Artificial
  probe
  misc_feature (1)..(25): SEQ ID NO: 6714; WAN024FXU; Start 39; Stop 63
tatccagataatcctcataggtcaa

SEQ ID NO: 447057 - DNA, 25 bp, Artificial
  probe
  misc_feature (1)..(25): SEQ ID NO: 6714; WAN024FXU; Start 60; Stop 84
tcaaggattcgctgataatctcatg

SEQ ID NO: 447058 - DNA, 25 bp, Artificial
  probe
  misc_feature (1)..(25): SEQ ID NO: 6714; WAN024FXU; Start 34; Stop 58
ttccatatccagataatcctcatag

SEQ ID NO: 447059 - DNA, 25 bp, Artificial
  probe
  misc_feature (1)..(25): SEQ ID NO: 6714; WAN024FXU; Start 32; Stop 56
aattccatatccagataatcctcat

SEQ ID NO: 447060 - DNA, 25 bp, Artificial
  probe
  misc_feature (1)..(25): SEQ ID NO: 6714; WAN024FXU; Start 129; Stop 153
catagtcaccttggtctctcaactg

SEQ ID NO: 447061 - DNA, 25 bp, Artificial
  probe
  misc_feature (1)..(25): SEQ ID NO: 6714; WAN024FXU; Start 38; Stop 62
atatccagataatcctcataggtca

SEQ ID NO: 447062 - DNA, 25 bp, Artificial
  probe
  misc_feature (1)..(25): SEQ ID NO: 6714; WAN024FXU; Start 127; Stop 151
cacatagtcaccttggtctctcaac

SEQ ID NO: 447063 - DNA, 25 bp, Artificial
  probe
  misc_feature (1)..(25): SEQ ID NO: 6714; WAN024FXU; Start 37; Stop 61
catatccagataatcctcataggtc

SEQ ID NO: 447064 - DNA, 25 bp, Artificial
  probe
  misc_feature (1)..(25): SEQ ID NO: 6714; WAN024FXU; Start 128; Stop 152
acatagtcaccttggtctctcaact

SEQ ID NO: 447065 - DNA, 25 bp, Artificial
  probe
  misc_feature (1)..(25): SEQ ID NO: 6714; WAN024FXU; Start 61; Stop 85
caaggattcgctgataatctcatgg

SEQ ID NO: 447066 - DNA, 25 bp, Artificial
  probe
  misc_feature (1)..(25): SEQ ID NO: 6714; WAN024FXU; Start 57; Stop 81
aggtcaaggattcgctgataatctc

SEQ ID NO: 447067 - DNA, 25 bp, Artificial
  probe
  misc_feature (1)..(25): SEQ ID NO: 6714; WAN024FXU; Start 58; Stop 82
ggtcaaggattcgctgataatctca

SEQ ID NO: 447068 - DNA, 25 bp, Artificial
  probe
  misc_feature (1)..(25): SEQ ID NO: 6714; WAN024FXU; Start 113; Stop 137
ccattgaaggtcaccacatagtcac

SEQ ID NO: 447069 - DNA, 25 bp, Artificial
  probe
  misc_feature (1)..(25): SEQ ID NO: 6714; WAN024FXU; Start 33; Stop 57
attccatatccagataatcctcata

SEQ ID NO: 447070 - DNA, 25 bp, Artificial
  probe
  misc_feature (1)..(25): SEQ ID NO: 6714; WAN024FXU; Start 31; Stop 55
gaattccatatccagataatcctca

SEQ ID NO: 447071 - DNA, 25 bp, Artificial
  probe
  misc_feature (1)..(25): SEQ ID NO: 6714; WAN024FXU; Start 114; Stop 138
cattgaaggtcaccacatagtcacc

SEQ ID NO: 447072 - DNA, 25 bp, Artificial
  probe
  misc_feature (1)..(25): SEQ ID NO: 6714; WAN024FXU; Start 111; Stop 135
caccattgaaggtcaccacatagtc

SEQ ID NO: 447073 - DNA, 25 bp, Artificial
  probe
  misc_feature (1)..(25): SEQ ID NO: 6714; WAN024FXU; Start 62; Stop 86
aaggattcgctgataatctcatggc

SEQ ID NO: 447074 - DNA, 25 bp, Artificial
  probe
  misc_feature (1)..(25): SEQ ID NO: 6714; WAN024FXU; Start 130; Stop 154
atagtcaccttggtctctcaactgc

SEQ ID NO: 447075 - DNA, 25 bp, Artificial
  probe
  misc_feature (1)..(25): SEQ ID NO: 6714; WAN024FXU; Start 112; Stop 136
accattgaaggtcaccacatagtca

SEQ ID NO: 447076 - DNA, 25 bp, Artificial
  probe
  misc_feature (1)..(25): SEQ ID NO: 6714; WAN024FXU; Start 51; Stop 75
cctcataggtcaaggattcgctgat

SEQ ID NO: 447077 - DNA, 25 bp, Artificial
  probe
  misc_feature (1)..(25): SEQ ID NO: 6714; WAN024FXU; Start 126; Stop 150
ccacatagtcaccttggtctctcaa

SEQ ID NO: 447078 - DNA, 25 bp, Artificial
  probe
  misc_feature (1)..(25): SEQ ID NO: 6714; WAN024FXU; Start 260; Stop 284
gtgatttccttttggctgttgacta

SEQ ID NO: 447079 - DNA, 25 bp, Artificial
  probe
  misc_feature (1)..(25): SEQ ID NO: 6715; WAN024CLQ; Start 56; Stop 80
agttgcttttcgtatttgataagaa

SEQ ID NO: 447080 - DNA, 25 bp, Artificial
  probe
  misc_feature (1)..(25): SEQ ID NO: 6715; WAN024CLQ; Start 55; Stop 79
aagttgcttttcgtatttgataaga

SEQ ID NO: 447081 - DNA, 25 bp, Artificial
  probe
  misc_feature (1)..(25): SEQ ID NO: 6715; WAN024CLQ; Start 54; Stop 78
taagttgcttttcgtatttgataag

SEQ ID NO: 447082 - DNA, 25 bp, Artificial
  probe
  misc_feature (1)..(25): SEQ ID NO: 6715; WAN024CLQ; Start 51; Stop 75
atttaagttgcttttcgtatttgat

SEQ ID NO: 447083 - DNA, 25 bp, Artificial
  probe
  misc_feature (1)..(25): SEQ ID NO: 6715; WAN024CLQ; Start 57; Stop 81
gttgcttttcgtatttgataagaaa

SEQ ID NO: 447084 - DNA, 25 bp, Artificial
  probe
  misc_feature (1)..(25): SEQ ID NO: 6715; WAN024CLQ; Start 53; Stop 77
ttaagttgcttttcgtatttgataa

SEQ ID NO: 447085 - DNA, 25 bp, Artificial
  probe
  misc_feature (1)..(25): SEQ ID NO: 6715; WAN024CLQ; Start 52; Stop 76
tttaagttgcttttcgtatttgata

SEQ ID NO: 447086 - DNA, 25 bp, Artificial
  probe
  misc_feature (1)..(25): SEQ ID NO: 6715; WAN024CLQ; Start 50; Stop 74
tatttaagttgcttttcgtatttga

SEQ ID NO: 447087 - DNA, 25 bp, Artificial
  probe
  misc_feature (1)..(25): SEQ ID NO: 6715; WAN024CLQ; Start 49; Stop 73
atatttaagttgcttttcgtatttg

SEQ ID NO: 447088 - DNA, 25 bp, Artificial
  probe
  misc_feature (1)..(25): SEQ ID NO: 6715; WAN024CLQ; Start 44; Stop 68
ttgaaatatttaagttgcttttcgt

SEQ ID NO: 447089 - DNA, 25 bp, Artificial
  probe
  misc_feature (1)..(25): SEQ ID NO: 6715; WAN024CLQ; Start 43; Stop 67
gttgaaatatttaagttgcttttcg

SEQ ID NO: 447090 - DNA, 25 bp, Artificial
  probe
  misc_feature (1)..(25): SEQ ID NO: 6715; WAN024CLQ; Start 45; Stop 69
tgaaatatttaagttgcttttcgta

SEQ ID NO: 447091 - DNA, 25 bp, Artificial
  probe
  misc_feature (1)..(25): SEQ ID NO: 6715; WAN024CLQ; Start 42; Stop 66
agttgaaatatttaagttgcttttc

SEQ ID NO: 447092 - DNA, 25 bp, Artificial
  probe
  misc_feature (1)..(25): SEQ ID NO: 6716; WAN024BSR; Start 235; Stop 259
aatgtatggaacacgctatgtagaa

SEQ ID NO: 447093 - DNA, 25 bp, Artificial
  probe
  misc_feature (1)..(25): SEQ ID NO: 6716; WAN024BSR; Start 236; Stop 260
atgtatggaacacgctatgtagaac

SEQ ID NO: 447094 - DNA, 25 bp, Artificial
  probe
  misc_feature (1)..(25): SEQ ID NO: 6716; WAN024BSR; Start 238; Stop 262
gtatggaacacgctatgtagaacac

SEQ ID NO: 447095 - DNA, 25 bp, Artificial
  probe
  misc_feature (1)..(25): SEQ ID NO: 6716; WAN024BSR; Start 237; Stop 261
tgtatggaacacgctatgtagaaca

SEQ ID NO: 447096 - DNA, 25 bp, Artificial
  probe
  misc_feature (1)..(25): SEQ ID NO: 6716; WAN024BSR; Start 301; Stop 325
atagatgggaagacagggatatact

SEQ ID NO: 447097 - DNA, 25 bp, Artificial
  probe
  misc_feature (1)..(25): SEQ ID NO: 6716; WAN024BSR; Start 290; Stop 314
cggatgatgttatagatgggaagac

SEQ ID NO: 447098 - DNA, 25 bp, Artificial
  probe
  misc_feature (1)..(25): SEQ ID NO: 6716; WAN024BSR; Start 89; Stop 113
acttacatggcttgaggtacgaatt

SEQ ID NO: 447099 - DNA, 25 bp, Artificial
  probe
  misc_feature (1)..(25): SEQ ID NO: 6716; WAN024BSR; Start 302; Stop 326
tagatgggaagacagggatatactt

SEQ ID NO: 447100 - DNA, 25 bp, Artificial
  probe
  misc_feature (1)..(25): SEQ ID NO: 6716; WAN024BSR; Start 244; Stop 268
aacacgctatgtagaacacgagatt

SEQ ID NO: 447101 - DNA, 25 bp, Artificial
  probe
  misc_feature (1)..(25): SEQ ID NO: 6716; WAN024BSR; Start 37; Stop 61
gatagcattatagatggagggaagc

SEQ ID NO: 447102 - DNA, 25 bp, Artificial
  probe
  misc_feature (1)..(25): SEQ ID NO: 6716; WAN024BSR; Start 298; Stop 322
gttatagatgggaagacagggatat

SEQ ID NO: 447103 - DNA, 25 bp, Artificial
  probe
  misc_feature (1)..(25): SEQ ID NO: 6716; WAN024BSR; Start 442; Stop 466
gaaattcctaaaggcactgatatgt

SEQ ID NO: 447104 - DNA, 25 bp, Artificial
  probe
  misc_feature (1)..(25): SEQ ID NO: 6716; WAN024BSR; Start 36; Stop 60
agatagcattatagatggagggaag

SEQ ID NO: 447105 - DNA, 25 bp, Artificial
  probe
  misc_feature (1)..(25): SEQ ID NO: 6716; WAN024BSR; Start 511; Stop 535
aattatttagtcaaggctctggcag

SEQ ID NO: 447106 - DNA, 25 bp, Artificial
  probe
  misc_feature (1)..(25): SEQ ID NO: 6716; WAN024BSR; Start 441; Stop 465
agaaattcctaaaggcactgatatg

SEQ ID NO: 447107 - DNA, 25 bp, Artificial
  probe
  misc_feature (1)..(25): SEQ ID NO: 6716; WAN024BSR; Start 88; Stop 112
gacttacatggcttgaggtacgaat

SEQ ID NO: 447108 - DNA, 25 bp, Artificial
  probe
  misc_feature (1)..(25): SEQ ID NO: 6716; WAN024BSR; Start 287; Stop 311
aagcggatgatgttatagatgggaa

SEQ ID NO: 447109 - DNA, 25 bp, Artificial
  probe
  misc_feature (1)..(25): SEQ ID NO: 6716; WAN024BSR; Start 286; Stop 310
aaagcggatgatgttatagatggga

SEQ ID NO: 447110 - DNA, 25 bp, Artificial
  probe
  misc_feature (1)..(25): SEQ ID NO: 6716; WAN024BSR; Start 243; Stop 267
gaacacgctatgtagaacacgagat

SEQ ID NO: 447111 - DNA, 25 bp, Artificial
  probe
  misc_feature (1)..(25): SEQ ID NO: 6716; WAN024BSR; Start 239; Stop 263
tatggaacacgctatgtagaacacg

SEQ ID NO: 447112 - DNA, 25 bp, Artificial
  probe
  misc_feature (1)..(25): SEQ ID NO: 6716; WAN024BSR; Start 300; Stop 324
tatagatgggaagacagggatatac

SEQ ID NO: 447113 - DNA, 25 bp, Artificial
  probe
  misc_feature (1)..(25): SEQ ID NO: 6716; WAN024BSR; Start 297; Stop 321
tgttatagatgggaagacagggata

SEQ ID NO: 447114 - DNA, 25 bp, Artificial
  probe
  misc_feature (1)..(25): SEQ ID NO: 6716; WAN024BSR; Start 234; Stop 258
aaatgtatggaacacgctatgtaga

SEQ ID NO: 447115 - DNA, 25 bp, Artificial
  probe
  misc_feature (1)..(25): SEQ ID NO: 6716; WAN024BSR; Start 439; Stop 463
aaagaaattcctaaaggcactgata

SEQ ID NO: 447116 - DNA, 25 bp, Artificial
  probe
  misc_feature (1)..(25): SEQ ID NO: 6716; WAN024BSR; Start 293; Stop 317
atgatgttatagatgggaagacagg

SEQ ID NO: 447117 - DNA, 25 bp, Artificial
  probe
  misc_feature (1)..(25): SEQ ID NO: 6716; WAN024BSR; Start 291; Stop 315
ggatgatgttatagatgggaagaca

SEQ ID NO: 447118 - DNA, 25 bp, Artificial
  probe
  misc_feature (1)..(25): SEQ ID NO: 6716; WAN024BSR; Start 296; Stop 320
atgttatagatgggaagacagggat

SEQ ID NO: 447119 - DNA, 25 bp, Artificial
  probe
  misc_feature (1)..(25): SEQ ID NO: 6716; WAN024BSR; Start 510; Stop 534
taattatttagtcaaggctctggca

SEQ ID NO: 447120 - DNA, 25 bp, Artificial
  probe
  misc_feature (1)..(25): SEQ ID NO: 6716; WAN024BSR; Start 289; Stop 313
gcggatgatgttatagatgggaaga

SEQ ID NO: 447121 - DNA, 25 bp, Artificial
  probe
  misc_feature (1)..(25): SEQ ID NO: 6716; WAN024BSR; Start 288; Stop 312
agcggatgatgttatagatgggaag

SEQ ID NO: 447122 - DNA, 25 bp, Artificial
  probe
  misc_feature (1)..(25): SEQ ID NO: 6716; WAN024BSR; Start 440; Stop 464
aagaaattcctaaaggcactgatat

SEQ ID NO: 447123 - DNA, 25 bp, Artificial
  probe
  misc_feature (1)..(25): SEQ ID NO: 6716; WAN024BSR; Start 311; Stop 335
agacagggatatacttctttgatgt

SEQ ID NO: 447124 - DNA, 25 bp, Artificial
  probe
  misc_feature (1)..(25): SEQ ID NO: 6716; WAN024BSR; Start 295; Stop 319
gatgttatagatgggaagacaggga

SEQ ID NO: 447125 - DNA, 25 bp, Artificial
  probe
  misc_feature (1)..(25): SEQ ID NO: 6717; WAN024BKR; Start 15; Stop 39
cttgatgtcgtctggagatgacttg

SEQ ID NO: 447126 - DNA, 25 bp, Artificial
  probe
  misc_feature (1)..(25): SEQ ID NO: 6717; WAN024BKR; Start 16; Stop 40
ttgatgtcgtctggagatgacttgt

SEQ ID NO: 447127 - DNA, 25 bp, Artificial
  probe
  misc_feature (1)..(25): SEQ ID NO: 6717; WAN024BKR; Start 17; Stop 41
tgatgtcgtctggagatgacttgtc

SEQ ID NO: 447128 - DNA, 25 bp, Artificial
  probe
  misc_feature (1)..(25): SEQ ID NO: 6717; WAN024BKR; Start 14; Stop 38
ccttgatgtcgtctggagatgactt

SEQ ID NO: 447129 - DNA, 25 bp, Artificial
  probe
  misc_feature (1)..(25): SEQ ID NO: 6717; WAN024BKR; Start 18; Stop 42
gatgtcgtctggagatgacttgtca

SEQ ID NO: 447130 - DNA, 25 bp, Artificial
  probe
  misc_feature (1)..(25): SEQ ID NO: 6717; WAN024BKR; Start 25; Stop 49
tctggagatgacttgtcatttaagg

SEQ ID NO: 447131 - DNA, 25 bp, Artificial
  probe
  misc_feature (1)..(25): SEQ ID NO: 6717; WAN024BKR; Start 27; Stop 51
tggagatgacttgtcatttaaggtc

SEQ ID NO: 447132 - DNA, 25 bp, Artificial
  probe
  misc_feature (1)..(25): SEQ ID NO: 6717; WAN024BKR; Start 26; Stop 50
ctggagatgacttgtcatttaaggt

SEQ ID NO: 447133 - DNA, 25 bp, Artificial
  probe
  misc_feature (1)..(25): SEQ ID NO: 6717; WAN024BKR; Start 24; Stop 48
gtctggagatgacttgtcatttaag

SEQ ID NO: 447134 - DNA, 25 bp, Artificial
  probe
  misc_feature (1)..(25): SEQ ID NO: 6717; WAN024BKR; Start 23; Stop 47
cgtctggagatgacttgtcatttaa

SEQ ID NO: 447135 - DNA, 25 bp, Artificial
  probe
  misc_feature (1)..(25): SEQ ID NO: 6717; WAN024BKR; Start 22; Stop 46
tcgtctggagatgacttgtcattta

SEQ ID NO: 447136 - DNA, 25 bp, Artificial
  probe
  misc_feature (1)..(25): SEQ ID NO: 6717; WAN024BKR; Start 19; Stop 43
atgtcgtctggagatgacttgtcat

SEQ ID NO: 447137 - DNA, 25 bp, Artificial
  probe
  misc_feature (1)..(25): SEQ ID NO: 6717; WAN024BKR; Start 20; Stop 44
tgtcgtctggagatgacttgtcatt

SEQ ID NO: 447138 - DNA, 25 bp, Artificial
  probe
  misc_feature (1)..(25): SEQ ID NO: 6717; WAN024BKR; Start 35; Stop 59
acttgtcatttaaggtcatgaaacc

SEQ ID NO: 447139 - DNA, 25 bp, Artificial
  probe
  misc_feature (1)..(25): SEQ ID NO: 6717; WAN024BKR; Start 36; Stop 60
cttgtcatttaaggtcatgaaaccg

SEQ ID NO: 447140 - DNA, 25 bp, Artificial
  probe
  misc_feature (1)..(25): SEQ ID NO: 6717; WAN024BKR; Start 21; Stop 45
gtcgtctggagatgacttgtcattt

SEQ ID NO: 447141 - DNA, 25 bp, Artificial
  probe
  misc_feature (1)..(25): SEQ ID NO: 6717; WAN024BKR; Start 28; Stop 52
ggagatgacttgtcatttaaggtca

SEQ ID NO: 447142 - DNA, 25 bp, Artificial
  probe
  misc_feature (1)..(25): SEQ ID NO: 6717; WAN024BKR; Start 42; Stop 66
atttaaggtcatgaaaccgccattg

SEQ ID NO: 447143 - DNA, 25 bp, Artificial
  probe
  misc_feature (1)..(25): SEQ ID NO: 6717; WAN024BKR; Start 41; Stop 65
catttaaggtcatgaaaccgccatt

SEQ ID NO: 447144 - DNA, 25 bp, Artificial
  probe
  misc_feature (1)..(25): SEQ ID NO: 6717; WAN024BKR; Start 34; Stop 58
gacttgtcatttaaggtcatgaaac

SEQ ID NO: 447145 - DNA, 25 bp, Artificial
  probe
  misc_feature (1)..(25): SEQ ID NO: 6717; WAN024BKR; Start 37; Stop 61
ttgtcatttaaggtcatgaaaccgc

SEQ ID NO: 447146 - DNA, 25 bp, Artificial
  probe
  misc_feature (1)..(25): SEQ ID NO: 6717; WAN024BKR; Start 40; Stop 64
tcatttaaggtcatgaaaccgccat

SEQ ID NO: 447147 - DNA, 25 bp, Artificial
  probe
  misc_feature (1)..(25): SEQ ID NO: 6717; WAN024BKR; Start 33; Stop 57
tgacttgtcatttaaggtcatgaaa

SEQ ID NO: 447148 - DNA, 25 bp, Artificial
  probe
  misc_feature (1)..(25): SEQ ID NO: 6717; WAN024BKR; Start 39; Stop 63
gtcatttaaggtcatgaaaccgcca

SEQ ID NO: 447149 - DNA, 25 bp, Artificial
  probe
  misc_feature (1)..(25): SEQ ID NO: 6717; WAN024BKR; Start 38; Stop 62
tgtcatttaaggtcatgaaaccgcc

SEQ ID NO: 447150 - DNA, 25 bp, Artificial
  probe
  misc_feature (1)..(25): SEQ ID NO: 6717; WAN024BKR; Start 43; Stop 67
tttaaggtcatgaaaccgccattgc

SEQ ID NO: 447151 - DNA, 25 bp, Artificial
  probe
  misc_feature (1)..(25): SEQ ID NO: 6718; WAN024BNN; Start 106; Stop 130
gaagaatacgatggcactctactaa

SEQ ID NO: 447152 - DNA, 25 bp, Artificial
  probe
  misc_feature (1)..(25): SEQ ID NO: 6718; WAN024BNN; Start 107; Stop 131
aagaatacgatggcactctactaat

SEQ ID NO: 447153 - DNA, 25 bp, Artificial
  probe
  misc_feature (1)..(25): SEQ ID NO: 6718; WAN024BNN; Start 105; Stop 129
agaagaatacgatggcactctacta

SEQ ID NO: 447154 - DNA, 25 bp, Artificial
  probe
  misc_feature (1)..(25): SEQ ID NO: 6718; WAN024BNN; Start 95; Stop 119
caacacttgaagaagaatacgatgg

SEQ ID NO: 447155 - DNA, 25 bp, Artificial
  probe
  misc_feature (1)..(25): SEQ ID NO: 6718; WAN024BNN; Start 94; Stop 118
gcaacacttgaagaagaatacgatg

SEQ ID NO: 447156 - DNA, 25 bp, Artificial
  probe
  misc_feature (1)..(25): SEQ ID NO: 6718; WAN024BNN; Start 103; Stop 127
gaagaagaatacgatggcactctac

SEQ ID NO: 447157 - DNA, 25 bp, Artificial
  probe
  misc_feature (1)..(25): SEQ ID NO: 6718; WAN024BNN; Start 108; Stop 132
agaatacgatggcactctactaata

SEQ ID NO: 447158 - DNA, 25 bp, Artificial
  probe
  misc_feature (1)..(25): SEQ ID NO: 6718; WAN024BNN; Start 104; Stop 128
aagaagaatacgatggcactctact

SEQ ID NO: 447159 - DNA, 25 bp, Artificial
  probe
  misc_feature (1)..(25): SEQ ID NO: 6718; WAN024BNN; Start 102; Stop 126
tgaagaagaatacgatggcactcta

SEQ ID NO: 447160 - DNA, 25 bp, Artificial
  probe
  misc_feature (1)..(25): SEQ ID NO: 6718; WAN024BNN; Start 96; Stop 120
aacacttgaagaagaatacgatggc

SEQ ID NO: 447161 - DNA, 25 bp, Artificial
  probe
  misc_feature (1)..(25): SEQ ID NO: 6718; WAN024BNN; Start 100; Stop 124
cttgaagaagaatacgatggcactc

SEQ ID NO: 447162 - DNA, 25 bp, Artificial
  probe
  misc_feature (1)..(25): SEQ ID NO: 6718; WAN024BNN; Start 109; Stop 133
gaatacgatggcactctactaatat

SEQ ID NO: 447163 - DNA, 25 bp, Artificial
  probe
  misc_feature (1)..(25): SEQ ID NO: 6718; WAN024BNN; Start 101; Stop 125
ttgaagaagaatacgatggcactct

SEQ ID NO: 447164 - DNA, 25 bp, Artificial
  probe
  misc_feature (1)..(25): SEQ ID NO: 6718; WAN024BNN; Start 93; Stop 117
cgcaacacttgaagaagaatacgat

SEQ ID NO: 447165 - DNA, 25 bp, Artificial
  probe
  misc_feature (1)..(25): SEQ ID NO: 6718; WAN024BNN; Start 99; Stop 123
acttgaagaagaatacgatggcact

SEQ ID NO: 447166 - DNA, 25 bp, Artificial
  probe
  misc_feature (1)..(25): SEQ ID NO: 6718; WAN024BNN; Start 98; Stop 122
cacttgaagaagaatacgatggcac

SEQ ID NO: 447167 - DNA, 25 bp, Artificial
  probe
  misc_feature (1)..(25): SEQ ID NO: 6718; WAN024BNN; Start 97; Stop 121
acacttgaagaagaatacgatggca

SEQ ID NO: 447168 - DNA, 25 bp, Artificial
  probe
  misc_feature (1)..(25): SEQ ID NO: 6718; WAN024BNN; Start 334; Stop 358
atgggtatggaatttacacaggaaa

SEQ ID NO: 447169 - DNA, 25 bp, Artificial
  probe
  misc_feature (1)..(25): SEQ ID NO: 6718; WAN024BNN; Start 333; Stop 357
aatgggtatggaatttacacaggaa

SEQ ID NO: 447170 - DNA, 25 bp, Artificial
  probe
  misc_feature (1)..(25): SEQ ID NO: 6718; WAN024BNN; Start 174; Stop 198
gcgtgcgtttatttctagtaaagat

SEQ ID NO: 447171 - DNA, 25 bp, Artificial
  probe
  misc_feature (1)..(25): SEQ ID NO: 6718; WAN024BNN; Start 70; Stop 94
gaaatgctattaggaaataaaggcg

SEQ ID NO: 447172 - DNA, 25 bp, Artificial
  probe
  misc_feature (1)..(25): SEQ ID NO: 6718; WAN024BNN; Start 335; Stop 359
tgggtatggaatttacacaggaaat

SEQ ID NO: 447173 - DNA, 25 bp, Artificial
  probe
  misc_feature (1)..(25): SEQ ID NO: 6718; WAN024BNN; Start 332; Stop 356
aaatgggtatggaatttacacagga

SEQ ID NO: 447174 - DNA, 25 bp, Artificial
  probe
  misc_feature (1)..(25): SEQ ID NO: 6718; WAN024BNN; Start 331; Stop 355
gaaatgggtatggaatttacacagg

SEQ ID NO: 447175 - DNA, 25 bp, Artificial
  probe
  misc_feature (1)..(25): SEQ ID NO: 6718; WAN024BNN; Start 330; Stop 354
tgaaatgggtatggaatttacacag

SEQ ID NO: 447176 - DNA, 25 bp, Artificial
  probe
  misc_feature (1)..(25): SEQ ID NO: 6718; WAN024BNN; Start 407; Stop 431
ttactaactattcatgggatgtgcc

SEQ ID NO: 447177 - DNA, 25 bp, Artificial
  probe
  misc_feature (1)..(25): SEQ ID NO: 6718; WAN024BNN; Start 171; Stop 195
aaggcgtgcgtttatttctagtaaa

SEQ ID NO: 447178 - DNA, 25 bp, Artificial
  probe
  misc_feature (1)..(25): SEQ ID NO: 6718; WAN024BNN; Start 110; Stop 134
aatacgatggcactctactaatatt

SEQ ID NO: 447179 - DNA, 25 bp, Artificial
  probe
  misc_feature (1)..(25): SEQ ID NO: 6718; WAN024BNN; Start 410; Stop 434
ctaactattcatgggatgtgccttt

SEQ ID NO: 447180 - DNA, 25 bp, Artificial
  probe
  misc_feature (1)..(25): SEQ ID NO: 6718; WAN024BNN; Start 329; Stop 353
ttgaaatgggtatggaatttacaca

SEQ ID NO: 447181 - DNA, 25 bp, Artificial
  probe
  misc_feature (1)..(25): SEQ ID NO: 6718; WAN024BNN; Start 408; Stop 432
tactaactattcatgggatgtgcct

SEQ ID NO: 447182 - DNA, 25 bp, Artificial
  probe
  misc_feature (1)..(25): SEQ ID NO: 6718; WAN024BNN; Start 170; Stop 194
caaggcgtgcgtttatttctagtaa

SEQ ID NO: 447183 - DNA, 25 bp, Artificial
  probe
  misc_feature (1)..(25): SEQ ID NO: 6718; WAN024BNN; Start 406; Stop 430
tttactaactattcatgggatgtgc

SEQ ID NO: 447184 - DNA, 25 bp, Artificial
  probe
  misc_feature (1)..(25): SEQ ID NO: 6719; WAN024BPO; Start 462; Stop 486
acctattggaattgttattgatgcg

SEQ ID NO: 447185 - DNA, 25 bp, Artificial
  probe
  misc_feature (1)..(25): SEQ ID NO: 6719; WAN024BPO; Start 463; Stop 487
cctattggaattgttattgatgcgg

SEQ ID NO: 447186 - DNA, 25 bp, Artificial
  probe
  misc_feature (1)..(25): SEQ ID NO: 6719; WAN024BPO; Start 78; Stop 102
gaacctacagttaagtggagatgat

SEQ ID NO: 447187 - DNA, 25 bp, Artificial
  probe
  misc_feature (1)..(25): SEQ ID NO: 6719; WAN024BPO; Start 79; Stop 103
aacctacagttaagtggagatgatt

SEQ ID NO: 447188 - DNA, 25 bp, Artificial
  probe
  misc_feature (1)..(25): SEQ ID NO: 6719; WAN024BPO; Start 464; Stop 488
ctattggaattgttattgatgcggc

SEQ ID NO: 447189 - DNA, 25 bp, Artificial
  probe
  misc_feature (1)..(25): SEQ ID NO: 6719; WAN024BPO; Start 461; Stop 485
cacctattggaattgttattgatgc

SEQ ID NO: 447190 - DNA, 25 bp, Artificial
  probe
  misc_feature (1)..(25): SEQ ID NO: 6719; WAN024BPO; Start 626; Stop 650
atatctcggttgataagtatggagc

SEQ ID NO: 447191 - DNA, 25 bp, Artificial
  probe
  misc_feature (1)..(25): SEQ ID NO: 6719; WAN024BPO; Start 523; Stop 547
ataacagcaacaggtgaggtgaata

SEQ ID NO: 447192 - DNA, 25 bp, Artificial
  probe
  misc_feature (1)..(25): SEQ ID NO: 6719; WAN024BPO; Start 524; Stop 548
taacagcaacaggtgaggtgaataa

SEQ ID NO: 447193 - DNA, 25 bp, Artificial
  probe
  misc_feature (1)..(25): SEQ ID NO: 6719; WAN024BPO; Start 77; Stop 101
cgaacctacagttaagtggagatga

SEQ ID NO: 447194 - DNA, 25 bp, Artificial
  probe
  misc_feature (1)..(25): SEQ ID NO: 6719; WAN024BPO; Start 465; Stop 489
tattggaattgttattgatgcggca

SEQ ID NO: 447195 - DNA, 25 bp, Artificial
  probe
  misc_feature (1)..(25): SEQ ID NO: 6719; WAN024BPO; Start 516; Stop 540
catcttgataacagcaacaggtgag

SEQ ID NO: 447196 - DNA, 25 bp, Artificial
  probe
  misc_feature (1)..(25): SEQ ID NO: 6719; WAN024BPO; Start 76; Stop 100
acgaacctacagttaagtggagatg

SEQ ID NO: 447197 - DNA, 25 bp, Artificial
  probe
  misc_feature (1)..(25): SEQ ID NO: 6719; WAN024BPO; Start 453; Stop 477
tgatacaccacctattggaattgtt

SEQ ID NO: 447198 - DNA, 25 bp, Artificial
  probe
  misc_feature (1)..(25): SEQ ID NO: 6719; WAN024BPO; Start 452; Stop 476
ttgatacaccacctattggaattgt

SEQ ID NO: 447199 - DNA, 25 bp, Artificial
  probe
  misc_feature (1)..(25): SEQ ID NO: 6719; WAN024BPO; Start 451; Stop 475
gttgatacaccacctattggaattg

SEQ ID NO: 447200 - DNA, 25 bp, Artificial
  probe
  misc_feature (1)..(25): SEQ ID NO: 6719; WAN024BPO; Start 450; Stop 474
tgttgatacaccacctattggaatt

SEQ ID NO: 447201 - DNA, 25 bp, Artificial
  probe
  misc_feature (1)..(25): SEQ ID NO: 6719; WAN024BPO; Start 449; Stop 473
ttgttgatacaccacctattggaat

SEQ ID NO: 447202 - DNA, 25 bp, Artificial
  probe
  misc_feature (1)..(25): SEQ ID NO: 6719; WAN024BPO; Start 448; Stop 472
attgttgatacaccacctattggaa

SEQ ID NO: 447203 - DNA, 25 bp, Artificial
  probe
  misc_feature (1)..(25): SEQ ID NO: 6719; WAN024BPO; Start 457; Stop 481
acaccacctattggaattgttattg

SEQ ID NO: 447204 - DNA, 25 bp, Artificial
  probe
  misc_feature (1)..(25): SEQ ID NO: 6719; WAN024BPO; Start 458; Stop 482
caccacctattggaattgttattga

SEQ ID NO: 447205 - DNA, 25 bp, Artificial
  probe
  misc_feature (1)..(25): SEQ ID NO: 6719; WAN024BPO; Start 447; Stop 471
cattgttgatacaccacctattgga

SEQ ID NO: 447206 - DNA, 25 bp, Artificial
  probe
  misc_feature (1)..(25): SEQ ID NO: 6719; WAN024BPO; Start 446; Stop 470
tcattgttgatacaccacctattgg

SEQ ID NO: 447207 - DNA, 25 bp, Artificial
  probe
  misc_feature (1)..(25): SEQ ID NO: 6719; WAN024BPO; Start 254; Stop 278
caagggaaaggattactggactaac

SEQ ID NO: 447208 - DNA, 25 bp, Artificial
  probe
  misc_feature (1)..(25): SEQ ID NO: 6719; WAN024BPO; Start 253; Stop 277
tcaagggaaaggattactggactaa

SEQ ID NO: 447209 - DNA, 25 bp, Artificial
  probe
  misc_feature (1)..(25): SEQ ID NO: 6719; WAN024BPO; Start 252; Stop 276
atcaagggaaaggattactggacta

SEQ ID NO: 447210 - DNA, 25 bp, Artificial
  probe
  misc_feature (1)..(25): SEQ ID NO: 6719; WAN024BPO; Start 80; Stop 104
acctacagttaagtggagatgattt

SEQ ID NO: 447211 - DNA, 25 bp, Artificial
  probe
  misc_feature (1)..(25): SEQ ID NO: 6719; WAN024BPO; Start 454; Stop 478
gatacaccacctattggaattgtta

SEQ ID NO: 447212 - DNA, 25 bp, Artificial
  probe
  misc_feature (1)..(25): SEQ ID NO: 6719; WAN024BPO; Start 81; Stop 105
cctacagttaagtggagatgatttg

SEQ ID NO: 447213 - DNA, 25 bp, Artificial
  probe
  misc_feature (1)..(25): SEQ ID NO: 6719; WAN024BPO; Start 255; Stop 279
aagggaaaggattactggactaaca

SEQ ID NO: 447214 - DNA, 25 bp, Artificial
  probe
  misc_feature (1)..(25): SEQ ID NO: 6719; WAN024BPO; Start 627; Stop 651
tatctcggttgataagtatggagct

SEQ ID NO: 447215 - DNA, 25 bp, Artificial
  probe
  misc_feature (1)..(25): SEQ ID NO: 6719; WAN024BPO; Start 522; Stop 546
gataacagcaacaggtgaggtgaat

SEQ ID NO: 447216 - DNA, 25 bp, Artificial
  probe
  misc_feature (1)..(25): SEQ ID NO: 6719; WAN024BPO; Start 75; Stop 99
cacgaacctacagttaagtggagat

SEQ ID NO: 447217 - DNA, 25 bp, Artificial
  probe
  misc_feature (1)..(25): SEQ ID NO: 6720; WAN024BO7; Start 581; Stop 605
tcgtagatatggcatcagttacaag

SEQ ID NO: 447218 - DNA, 25 bp, Artificial
  probe
  misc_feature (1)..(25): SEQ ID NO: 6720; WAN024BO7; Start 580; Stop 604
atcgtagatatggcatcagttacaa

SEQ ID NO: 447219 - DNA, 25 bp, Artificial
  probe
  misc_feature (1)..(25): SEQ ID NO: 6720; WAN024BO7; Start 579; Stop 603
catcgtagatatggcatcagttaca

SEQ ID NO: 447220 - DNA, 25 bp, Artificial
  probe
  misc_feature (1)..(25): SEQ ID NO: 6720; WAN024BO7; Start 692; Stop 716
ttgagacaggagttatcgctatctt

SEQ ID NO: 447221 - DNA, 25 bp, Artificial
  probe
  misc_feature (1)..(25): SEQ ID NO: 6720; WAN024BO7; Start 694; Stop 718
gagacaggagttatcgctatcttct

SEQ ID NO: 447222 - DNA, 25 bp, Artificial
  probe
  misc_feature (1)..(25): SEQ ID NO: 6720; WAN024BO7; Start 583; Stop 607
gtagatatggcatcagttacaagcg

SEQ ID NO: 447223 - DNA, 25 bp, Artificial
  probe
  misc_feature (1)..(25): SEQ ID NO: 6720; WAN024BO7; Start 582; Stop 606
cgtagatatggcatcagttacaagc

SEQ ID NO: 447224 - DNA, 25 bp, Artificial
  probe
  misc_feature (1)..(25): SEQ ID NO: 6720; WAN024BO7; Start 693; Stop 717
tgagacaggagttatcgctatcttc

SEQ ID NO: 447225 - DNA, 25 bp, Artificial
  probe
  misc_feature (1)..(25): SEQ ID NO: 6720; WAN024BO7; Start 819; Stop 843
tggtacttacactcttgatgacaat

SEQ ID NO: 447226 - DNA, 25 bp, Artificial
  probe
  misc_feature (1)..(25): SEQ ID NO: 6720; WAN024BO7; Start 695; Stop 719
agacaggagttatcgctatcttctc

SEQ ID NO: 447227 - DNA, 25 bp, Artificial
  probe
  misc_feature (1)..(25): SEQ ID NO: 6720; WAN024BO7; Start 696; Stop 720
gacaggagttatcgctatcttctca

SEQ ID NO: 447228 - DNA, 25 bp, Artificial
  probe
  misc_feature (1)..(25): SEQ ID NO: 6720; WAN024BO7; Start 697; Stop 721
acaggagttatcgctatcttctcac

SEQ ID NO: 447229 - DNA, 25 bp, Artificial
  probe
  misc_feature (1)..(25): SEQ ID NO: 6720; WAN024BO7; Start 700; Stop 724
ggagttatcgctatcttctcaccaa

SEQ ID NO: 447230 - DNA, 25 bp, Artificial
  probe
  misc_feature (1)..(25): SEQ ID NO: 6720; WAN024BO7; Start 818; Stop 842
gtggtacttacactcttgatgacaa

SEQ ID NO: 447231 - DNA, 25 bp, Artificial
  probe
  misc_feature (1)..(25): SEQ ID NO: 6720; WAN024BO7; Start 401; Stop 425
gaacagtgaacaagcgaattggtaa

SEQ ID NO: 447232 - DNA, 25 bp, Artificial
  probe
  misc_feature (1)..(25): SEQ ID NO: 6720; WAN024BO7; Start 820; Stop 844
ggtacttacactcttgatgacaata

SEQ ID NO: 447233 - DNA, 25 bp, Artificial
  probe
  misc_feature (1)..(25): SEQ ID NO: 6720; WAN024BO7; Start 732; Stop 756
tatcattccgtttgttggtatctca

SEQ ID NO: 447234 - DNA, 25 bp, Artificial
  probe
  misc_feature (1)..(25): SEQ ID NO: 6720; WAN024BO7; Start 543; Stop 567
gattactgtttacttgcgttctgaa

SEQ ID NO: 447235 - DNA, 25 bp, Artificial
  probe
  misc_feature (1)..(25): SEQ ID NO: 6720; WAN024BO7; Start 698; Stop 722
caggagttatcgctatcttctcacc

SEQ ID NO: 447236 - DNA, 25 bp, Artificial
  probe
  misc_feature (1)..(25): SEQ ID NO: 6720; WAN024BO7; Start 731; Stop 755
ttatcattccgtttgttggtatctc

SEQ ID NO: 447237 - DNA, 25 bp, Artificial
  probe
  misc_feature (1)..(25): SEQ ID NO: 6720; WAN024BO7; Start 690; Stop 714
ctttgagacaggagttatcgctatc

SEQ ID NO: 447238 - DNA, 25 bp, Artificial
  probe
  misc_feature (1)..(25): SEQ ID NO: 6720; WAN024BO7; Start 544; Stop 568
attactgtttacttgcgttctgaat

SEQ ID NO: 447239 - DNA, 25 bp, Artificial
  probe
  misc_feature (1)..(25): SEQ ID NO: 6720; WAN024BO7; Start 250; Stop 274
ggtggtgtgacagaagttaaatatg

SEQ ID NO: 447240 - DNA, 25 bp, Artificial
  probe
  misc_feature (1)..(25): SEQ ID NO: 6720; WAN024BO7; Start 249; Stop 273
tggtggtgtgacagaagttaaatat

SEQ ID NO: 447241 - DNA, 25 bp, Artificial
  probe
  misc_feature (1)..(25): SEQ ID NO: 6720; WAN024BO7; Start 727; Stop 751
ggtattatcattccgtttgttggta

SEQ ID NO: 447242 - DNA, 25 bp, Artificial
  probe
  misc_feature (1)..(25): SEQ ID NO: 6720; WAN024BO7; Start 248; Stop 272
ttggtggtgtgacagaagttaaata

SEQ ID NO: 447243 - DNA, 25 bp, Artificial
  probe
  misc_feature (1)..(25): SEQ ID NO: 6720; WAN024BO7; Start 546; Stop 570
tactgtttacttgcgttctgaattt

SEQ ID NO: 447244 - DNA, 25 bp, Artificial
  probe
  misc_feature (1)..(25): SEQ ID NO: 6720; WAN024BO7; Start 545; Stop 569
ttactgtttacttgcgttctgaatt

SEQ ID NO: 447245 - DNA, 25 bp, Artificial
  probe
  misc_feature (1)..(25): SEQ ID NO: 6720; WAN024BO7; Start 413; Stop 437
agcgaattggtaaatacttgtctga

SEQ ID NO: 447246 - DNA, 25 bp, Artificial
  probe
  misc_feature (1)..(25): SEQ ID NO: 6720; WAN024BO7; Start 414; Stop 438
gcgaattggtaaatacttgtctgac

SEQ ID NO: 447247 - DNA, 25 bp, Artificial
  probe
  misc_feature (1)..(25): SEQ ID NO: 6720; WAN024BO7; Start 412; Stop 436
aagcgaattggtaaatacttgtctg

SEQ ID NO: 447248 - DNA, 25 bp, Artificial
  probe
  misc_feature (1)..(25): SEQ ID NO: 6720; WAN024BO7; Start 702; Stop 726
agttatcgctatcttctcaccaaac

SEQ ID NO: 447249 - DNA, 25 bp, Artificial
  probe
  misc_feature (1)..(25): SEQ ID NO: 6720; WAN024BO7; Start 699; Stop 723
aggagttatcgctatcttctcacca

SEQ ID NO: 447250 - DNA, 25 bp, Artificial
  probe
  misc_feature (1)..(25): SEQ ID NO: 6721; WAN024C2E; Start 100; Stop 124
ccttacctccgagtattagtatctt

SEQ ID NO: 447251 - DNA, 25 bp, Artificial
  probe
  misc_feature (1)..(25): SEQ ID NO: 6721; WAN024C2E; Start 99; Stop 123
cccttacctccgagtattagtatct

SEQ ID NO: 447252 - DNA, 25 bp, Artificial
  probe
  misc_feature (1)..(25): SEQ ID NO: 6721; WAN024C2E; Start 98; Stop 122
tcccttacctccgagtattagtatc

SEQ ID NO: 447253 - DNA, 25 bp, Artificial
  probe
  misc_feature (1)..(25): SEQ ID NO: 6721; WAN024C2E; Start 97; Stop 121
ctcccttacctccgagtattagtat

SEQ ID NO: 447254 - DNA, 25 bp, Artificial
  probe
  misc_feature (1)..(25): SEQ ID NO: 6721; WAN024C2E; Start 96; Stop 120
tctcccttacctccgagtattagta

SEQ ID NO: 447255 - DNA, 25 bp, Artificial
  probe
  misc_feature (1)..(25): SEQ ID NO: 6721; WAN024C2E; Start 93; Stop 117
atgtctcccttacctccgagtatta

SEQ ID NO: 447256 - DNA, 25 bp, Artificial
  probe
  misc_feature (1)..(25): SEQ ID NO: 6721; WAN024C2E; Start 95; Stop 119
gtctcccttacctccgagtattagt

SEQ ID NO: 447257 - DNA, 25 bp, Artificial
  probe
  misc_feature (1)..(25): SEQ ID NO: 6721; WAN024C2E; Start 94; Stop 118
tgtctcccttacctccgagtattag

SEQ ID NO: 447258 - DNA, 25 bp, Artificial
  probe
  misc_feature (1)..(25): SEQ ID NO: 6721; WAN024C2E; Start 101; Stop 125
cttacctccgagtattagtatcttt

SEQ ID NO: 447259 - DNA, 25 bp, Artificial
  probe
  misc_feature (1)..(25): SEQ ID NO: 6721; WAN024C2E; Start 81; Stop 105
acttagctgttcatgtctcccttac

SEQ ID NO: 447260 - DNA, 25 bp, Artificial
  probe
  misc_feature (1)..(25): SEQ ID NO: 6721; WAN024C2E; Start 73; Stop 97
tttgatagacttagctgttcatgtc

SEQ ID NO: 447261 - DNA, 25 bp, Artificial
  probe
  misc_feature (1)..(25): SEQ ID NO: 6721; WAN024C2E; Start 72; Stop 96
atttgatagacttagctgttcatgt

SEQ ID NO: 447262 - DNA, 25 bp, Artificial
  probe
  misc_feature (1)..(25): SEQ ID NO: 6721; WAN024C2E; Start 10; Stop 34
aaagagcataaaagagcacacaaaa

SEQ ID NO: 447263 - DNA, 25 bp, Artificial
  probe
  misc_feature (1)..(25): SEQ ID NO: 6721; WAN024C2E; Start 9; Stop 33
aaaagagcataaaagagcacacaaa

SEQ ID NO: 447264 - DNA, 25 bp, Artificial
  probe
  misc_feature (1)..(25): SEQ ID NO: 6721; WAN024C2E; Start 80; Stop 104
gacttagctgttcatgtctccctta

SEQ ID NO: 447265 - DNA, 25 bp, Artificial
  probe
  misc_feature (1)..(25): SEQ ID NO: 6721; WAN024C2E; Start 82; Stop 106
cttagctgttcatgtctcccttacc

SEQ ID NO: 447266 - DNA, 25 bp, Artificial
  probe
  misc_feature (1)..(25): SEQ ID NO: 6721; WAN024C2E; Start 75; Stop 99
tgatagacttagctgttcatgtctc

SEQ ID NO: 447267 - DNA, 25 bp, Artificial
  probe
  misc_feature (1)..(25): SEQ ID NO: 6721; WAN024C2E; Start 63; Stop 87
aggttctttatttgatagacttagc

SEQ ID NO: 447268 - DNA, 25 bp, Artificial
  probe
  misc_feature (1)..(25): SEQ ID NO: 6721; WAN024C2E; Start 76; Stop 100
gatagacttagctgttcatgtctcc

SEQ ID NO: 447269 - DNA, 25 bp, Artificial
  probe
  misc_feature (1)..(25): SEQ ID NO: 6721; WAN024C2E; Start 74; Stop 98
ttgatagacttagctgttcatgtct

SEQ ID NO: 447270 - DNA, 25 bp, Artificial
  probe
  misc_feature (1)..(25): SEQ ID NO: 6721; WAN024C2E; Start 83; Stop 107
ttagctgttcatgtctcccttacct

SEQ ID NO: 447271 - DNA, 25 bp, Artificial
  probe
  misc_feature (1)..(25): SEQ ID NO: 6721; WAN024C2E; Start 92; Stop 116
catgtctcccttacctccgagtatt

SEQ ID NO: 447272 - DNA, 25 bp, Artificial
  probe
  misc_feature (1)..(25): SEQ ID NO: 6721; WAN024C2E; Start 102; Stop 126
ttacctccgagtattagtatcttta

SEQ ID NO: 447273 - DNA, 25 bp, Artificial
  probe
  misc_feature (1)..(25): SEQ ID NO: 6721; WAN024C2E; Start 147; Stop 171
tttgtcaacagaaaactggaaattc

SEQ ID NO: 447274 - DNA, 25 bp, Artificial
  probe
  misc_feature (1)..(25): SEQ ID NO: 6721; WAN024C2E; Start 84; Stop 108
tagctgttcatgtctcccttacctc

SEQ ID NO: 447275 - DNA, 25 bp, Artificial
  probe
  misc_feature (1)..(25): SEQ ID NO: 6721; WAN024C2E; Start 146; Stop 170
ttttgtcaacagaaaactggaaatt

SEQ ID NO: 447276 - DNA, 25 bp, Artificial
  probe
  misc_feature (1)..(25): SEQ ID NO: 6721; WAN024C2E; Start 144; Stop 168
aattttgtcaacagaaaactggaaa

SEQ ID NO: 447277 - DNA, 25 bp, Artificial
  probe
  misc_feature (1)..(25): SEQ ID NO: 6721; WAN024C2E; Start 104; Stop 128
acctccgagtattagtatctttata

SEQ ID NO: 447278 - DNA, 25 bp, Artificial
  probe
  misc_feature (1)..(25): SEQ ID NO: 6721; WAN024C2E; Start 103; Stop 127
tacctccgagtattagtatctttat

SEQ ID NO: 447279 - DNA, 25 bp, Artificial
  probe
  misc_feature (1)..(25): SEQ ID NO: 6721; WAN024C2E; Start 64; Stop 88
ggttctttatttgatagacttagct

SEQ ID NO: 447280 - DNA, 25 bp, Artificial
  probe
  misc_feature (1)..(25): SEQ ID NO: 6721; WAN024C2E; Start 71; Stop 95
tatttgatagacttagctgttcatg

SEQ ID NO: 447281 - DNA, 25 bp, Artificial
  probe
  misc_feature (1)..(25): SEQ ID NO: 6721; WAN024C2E; Start 145; Stop 169
attttgtcaacagaaaactggaaat

SEQ ID NO: 447282 - DNA, 25 bp, Artificial
  probe
  misc_feature (1)..(25): SEQ ID NO: 6721; WAN024C2E; Start 157; Stop 181
gaaaactggaaattctatgctctaa

SEQ ID NO: 447283 - DNA, 25 bp, Artificial
  probe
  misc_feature (1)..(25): SEQ ID NO: 6722; WAN024BLK; Start 34; Stop 58
tttgatagggaggatatcagggatg

SEQ ID NO: 447284 - DNA, 25 bp, Artificial
  probe
  misc_feature (1)..(25): SEQ ID NO: 6722; WAN024BLK; Start 36; Stop 60
tgatagggaggatatcagggatgaa

SEQ ID NO: 447285 - DNA, 25 bp, Artificial
  probe
  misc_feature (1)..(25): SEQ ID NO: 6722; WAN024BLK; Start 35; Stop 59
ttgatagggaggatatcagggatga

SEQ ID NO: 447286 - DNA, 25 bp, Artificial
  probe
  misc_feature (1)..(25): SEQ ID NO: 6722; WAN024BLK; Start 33; Stop 57
ttttgatagggaggatatcagggat

SEQ ID NO: 447287 - DNA, 25 bp, Artificial
  probe
  misc_feature (1)..(25): SEQ ID NO: 6722; WAN024BLK; Start 30; Stop 54
gtgttttgatagggaggatatcagg

SEQ ID NO: 447288 - DNA, 25 bp, Artificial
  probe
  misc_feature (1)..(25): SEQ ID NO: 6722; WAN024BLK; Start 29; Stop 53
agtgttttgatagggaggatatcag

SEQ ID NO: 447289 - DNA, 25 bp, Artificial
  probe
  misc_feature (1)..(25): SEQ ID NO: 6722; WAN024BLK; Start 28; Stop 52
aagtgttttgatagggaggatatca

SEQ ID NO: 447290 - DNA, 25 bp, Artificial
  probe
  misc_feature (1)..(25): SEQ ID NO: 6722; WAN024BLK; Start 32; Stop 56
gttttgatagggaggatatcaggga

SEQ ID NO: 447291 - DNA, 25 bp, Artificial
  probe
  misc_feature (1)..(25): SEQ ID NO: 6722; WAN024BLK; Start 31; Stop 55
tgttttgatagggaggatatcaggg

SEQ ID NO: 447292 - DNA, 25 bp, Artificial
  probe
  misc_feature (1)..(25): SEQ ID NO: 6723; WAN024FJO; Start 93; Stop 117
taaacgacaggaagtaacaaacatt

SEQ ID NO: 447293 - DNA, 25 bp, Artificial
  probe
  misc_feature (1)..(25): SEQ ID NO: 6723; WAN024FJO; Start 94; Stop 118
aaacgacaggaagtaacaaacattc

SEQ ID NO: 447294 - DNA, 25 bp, Artificial
  probe
  misc_feature (1)..(25): SEQ ID NO: 6723; WAN024FJO; Start 92; Stop 116
ttaaacgacaggaagtaacaaacat

SEQ ID NO: 447295 - DNA, 25 bp, Artificial
  probe
  misc_feature (1)..(25): SEQ ID NO: 6723; WAN024FJO; Start 104; Stop 128
aagtaacaaacattctgagtgggac

SEQ ID NO: 447296 - DNA, 25 bp, Artificial
  probe
  misc_feature (1)..(25): SEQ ID NO: 6723; WAN024FJO; Start 103; Stop 127
gaagtaacaaacattctgagtggga

SEQ ID NO: 447297 - DNA, 25 bp, Artificial
  probe
  misc_feature (1)..(25): SEQ ID NO: 6723; WAN024FJO; Start 101; Stop 125
aggaagtaacaaacattctgagtgg

SEQ ID NO: 447298 - DNA, 25 bp, Artificial
  probe
  misc_feature (1)..(25): SEQ ID NO: 6723; WAN024FJO; Start 95; Stop 119
aacgacaggaagtaacaaacattct

SEQ ID NO: 447299 - DNA, 25 bp, Artificial
  probe
  misc_feature (1)..(25): SEQ ID NO: 6723; WAN024FJO; Start 165; Stop 189
agtgattgaagattatgggattgag

SEQ ID NO: 447300 - DNA, 25 bp, Artificial
  probe
  misc_feature (1)..(25): SEQ ID NO: 6723; WAN024FJO; Start 146; Stop 170
cgaacagtttcattcttcaagtgat

SEQ ID NO: 447301 - DNA, 25 bp, Artificial
  probe
  misc_feature (1)..(25): SEQ ID NO: 6723; WAN024FJO; Start 17; Stop 41
atggtcgtgagaaagtcaatgattt

SEQ ID NO: 447302 - DNA, 25 bp, Artificial
  probe
  misc_feature (1)..(25): SEQ ID NO: 6723; WAN024FJO; Start 16; Stop 40
aatggtcgtgagaaagtcaatgatt

SEQ ID NO: 447303 - DNA, 25 bp, Artificial
  probe
  misc_feature (1)..(25): SEQ ID NO: 6723; WAN024FJO; Start 15; Stop 39
aaatggtcgtgagaaagtcaatgat

SEQ ID NO: 447304 - DNA, 25 bp, Artificial
  probe
  misc_feature (1)..(25): SEQ ID NO: 6723; WAN024FJO; Start 164; Stop 188
aagtgattgaagattatgggattga

SEQ ID NO: 447305 - DNA, 25 bp, Artificial
  probe
  misc_feature (1)..(25): SEQ ID NO: 6723; WAN024FJO; Start 102; Stop 126
ggaagtaacaaacattctgagtggg

SEQ ID NO: 447306 - DNA, 25 bp, Artificial
  probe
  misc_feature (1)..(25): SEQ ID NO: 6723; WAN024FJO; Start 100; Stop 124
caggaagtaacaaacattctgagtg

SEQ ID NO: 447307 - DNA, 25 bp, Artificial
  probe
  misc_feature (1)..(25): SEQ ID NO: 6723; WAN024FJO; Start 98; Stop 122
gacaggaagtaacaaacattctgag

SEQ ID NO: 447308 - DNA, 25 bp, Artificial
  probe
  misc_feature (1)..(25): SEQ ID NO: 6723; WAN024FJO; Start 99; Stop 123
acaggaagtaacaaacattctgagt

SEQ ID NO: 447309 - DNA, 25 bp, Artificial
  probe
  misc_feature (1)..(25): SEQ ID NO: 6723; WAN024FJO; Start 148; Stop 172
aacagtttcattcttcaagtgattg

SEQ ID NO: 447310 - DNA, 25 bp, Artificial
  probe
  misc_feature (1)..(25): SEQ ID NO: 6723; WAN024FJO; Start 163; Stop 187
caagtgattgaagattatgggattg

SEQ ID NO: 447311 - DNA, 25 bp, Artificial
  probe
  misc_feature (1)..(25): SEQ ID NO: 6723; WAN024FJO; Start 143; Stop 167
gagcgaacagtttcattcttcaagt

SEQ ID NO: 447312 - DNA, 25 bp, Artificial
  probe
  misc_feature (1)..(25): SEQ ID NO: 6723; WAN024FJO; Start 147; Stop 171
gaacagtttcattcttcaagtgatt

SEQ ID NO: 447313 - DNA, 25 bp, Artificial
  probe
  misc_feature (1)..(25): SEQ ID NO: 6723; WAN024FJO; Start 14; Stop 38
caaatggtcgtgagaaagtcaatga

SEQ ID NO: 447314 - DNA, 25 bp, Artificial
  probe
  misc_feature (1)..(25): SEQ ID NO: 6723; WAN024FJO; Start 144; Stop 168
agcgaacagtttcattcttcaagtg

SEQ ID NO: 447315 - DNA, 25 bp, Artificial
  probe
  misc_feature (1)..(25): SEQ ID NO: 6723; WAN024FJO; Start 97; Stop 121
cgacaggaagtaacaaacattctga

SEQ ID NO: 447316 - DNA, 25 bp, Artificial
  probe
  misc_feature (1)..(25): SEQ ID NO: 6723; WAN024FJO; Start 13; Stop 37
acaaatggtcgtgagaaagtcaatg

SEQ ID NO: 447317 - DNA, 25 bp, Artificial
  probe
  misc_feature (1)..(25): SEQ ID NO: 6723; WAN024FJO; Start 91; Stop 115
tttaaacgacaggaagtaacaaaca

SEQ ID NO: 447318 - DNA, 25 bp, Artificial
  probe
  misc_feature (1)..(25): SEQ ID NO: 6723; WAN024FJO; Start 96; Stop 120
acgacaggaagtaacaaacattctg

SEQ ID NO: 447319 - DNA, 25 bp, Artificial
  probe
  misc_feature (1)..(25): SEQ ID NO: 6723; WAN024FJO; Start 89; Stop 113
gctttaaacgacaggaagtaacaaa

SEQ ID NO: 447320 - DNA, 25 bp, Artificial
  probe
  misc_feature (1)..(25): SEQ ID NO: 6723; WAN024FJO; Start 85; Stop 109
tatggctttaaacgacaggaagtaa

SEQ ID NO: 447321 - DNA, 25 bp, Artificial
  probe
  misc_feature (1)..(25): SEQ ID NO: 6723; WAN024FJO; Start 84; Stop 108
ttatggctttaaacgacaggaagta

SEQ ID NO: 447322 - DNA, 25 bp, Artificial
  probe
  misc_feature (1)..(25): SEQ ID NO: 6723; WAN024FJO; Start 78; Stop 102
gattgcttatggctttaaacgacag

SEQ ID NO: 447323 - DNA, 25 bp, Artificial
  probe
  misc_feature (1)..(25): SEQ ID NO: 6723; WAN024FJO; Start 145; Stop 169
gcgaacagtttcattcttcaagtga

SEQ ID NO: 447324 - DNA, 25 bp, Artificial
  probe
  misc_feature (1)..(25): SEQ ID NO: 6723; WAN024FJO; Start 90; Stop 114
ctttaaacgacaggaagtaacaaac

SEQ ID NO: 447325 - DNA, 25 bp, Artificial
  probe
  misc_feature (1)..(25): SEQ ID NO: 6724; WAN024FWD; Start 33; Stop 57
ggagttcattaagaaggcagaagaa

SEQ ID NO: 447326 - DNA, 25 bp, Artificial
  probe
  misc_feature (1)..(25): SEQ ID NO: 6724; WAN024FWD; Start 34; Stop 58
gagttcattaagaaggcagaagaat

SEQ ID NO: 447327 - DNA, 25 bp, Artificial
  probe
  misc_feature (1)..(25): SEQ ID NO: 6724; WAN024FWD; Start 431; Stop 455
aagaggtcagtatattgagttggtg

SEQ ID NO: 447328 - DNA, 25 bp, Artificial
  probe
  misc_feature (1)..(25): SEQ ID NO: 6724; WAN024FWD; Start 434; Stop 458
aggtcagtatattgagttggtggaa

SEQ ID NO: 447329 - DNA, 25 bp, Artificial
  probe
  misc_feature (1)..(25): SEQ ID NO: 6724; WAN024FWD; Start 32; Stop 56
tggagttcattaagaaggcagaaga

SEQ ID NO: 447330 - DNA, 25 bp, Artificial
  probe
  misc_feature (1)..(25): SEQ ID NO: 6724; WAN024FWD; Start 433; Stop 457
gaggtcagtatattgagttggtgga

SEQ ID NO: 447331 - DNA, 25 bp, Artificial
  probe
  misc_feature (1)..(25): SEQ ID NO: 6724; WAN024FWD; Start 432; Stop 456
agaggtcagtatattgagttggtgg

SEQ ID NO: 447332 - DNA, 25 bp, Artificial
  probe
  misc_feature (1)..(25): SEQ ID NO: 6724; WAN024FWD; Start 35; Stop 59
agttcattaagaaggcagaagaata

SEQ ID NO: 447333 - DNA, 25 bp, Artificial
  probe
  misc_feature (1)..(25): SEQ ID NO: 6724; WAN024FWD; Start 31; Stop 55
ctggagttcattaagaaggcagaag

SEQ ID NO: 447334 - DNA, 25 bp, Artificial
  probe
  misc_feature (1)..(25): SEQ ID NO: 6724; WAN024FWD; Start 30; Stop 54
actggagttcattaagaaggcagaa

SEQ ID NO: 447335 - DNA, 25 bp, Artificial
  probe
  misc_feature (1)..(25): SEQ ID NO: 6724; WAN024FWD; Start 156; Stop 180
ttccgtaaatatagcaaggtcgttt

SEQ ID NO: 447336 - DNA, 25 bp, Artificial
  probe
  misc_feature (1)..(25): SEQ ID NO: 6724; WAN024FWD; Start 153; Stop 177
tacttccgtaaatatagcaaggtcg

SEQ ID NO: 447337 - DNA, 25 bp, Artificial
  probe
  misc_feature (1)..(25): SEQ ID NO: 6724; WAN024FWD; Start 36; Stop 60
gttcattaagaaggcagaagaatat

SEQ ID NO: 447338 - DNA, 25 bp, Artificial
  probe
  misc_feature (1)..(25): SEQ ID NO: 6724; WAN024FWD; Start 439; Stop 463
agtatattgagttggtggaaacgat

SEQ ID NO: 447339 - DNA, 25 bp, Artificial
  probe
  misc_feature (1)..(25): SEQ ID NO: 6724; WAN024FWD; Start 151; Stop 175
actacttccgtaaatatagcaaggt

SEQ ID NO: 447340 - DNA, 25 bp, Artificial
  probe
  misc_feature (1)..(25): SEQ ID NO: 6724; WAN024FWD; Start 29; Stop 53
aactggagttcattaagaaggcaga

SEQ ID NO: 447341 - DNA, 25 bp, Artificial
  probe
  misc_feature (1)..(25): SEQ ID NO: 6724; WAN024FWD; Start 438; Stop 462
cagtatattgagttggtggaaacga

SEQ ID NO: 447342 - DNA, 25 bp, Artificial
  probe
  misc_feature (1)..(25): SEQ ID NO: 6724; WAN024FWD; Start 155; Stop 179
cttccgtaaatatagcaaggtcgtt

SEQ ID NO: 447343 - DNA, 25 bp, Artificial
  probe
  misc_feature (1)..(25): SEQ ID NO: 6724; WAN024FWD; Start 152; Stop 176
ctacttccgtaaatatagcaaggtc

SEQ ID NO: 447344 - DNA, 25 bp, Artificial
  probe
  misc_feature (1)..(25): SEQ ID NO: 6724; WAN024FWD; Start 436; Stop 460
gtcagtatattgagttggtggaaac

SEQ ID NO: 447345 - DNA, 25 bp, Artificial
  probe
  misc_feature (1)..(25): SEQ ID NO: 6724; WAN024FWD; Start 435; Stop 459
ggtcagtatattgagttggtggaaa

SEQ ID NO: 447346 - DNA, 25 bp, Artificial
  probe
  misc_feature (1)..(25): SEQ ID NO: 6724; WAN024FWD; Start 437; Stop 461
tcagtatattgagttggtggaaacg

SEQ ID NO: 447347 - DNA, 25 bp, Artificial
  probe
  misc_feature (1)..(25): SEQ ID NO: 6724; WAN024FWD; Start 440; Stop 464
gtatattgagttggtggaaacgata

SEQ ID NO: 447348 - DNA, 25 bp, Artificial
  probe
  misc_feature (1)..(25): SEQ ID NO: 6724; WAN024FWD; Start 157; Stop 181
tccgtaaatatagcaaggtcgtttg

SEQ ID NO: 447349 - DNA, 25 bp, Artificial
  probe
  misc_feature (1)..(25): SEQ ID NO: 6724; WAN024FWD; Start 150; Stop 174
aactacttccgtaaatatagcaagg

SEQ ID NO: 447350 - DNA, 25 bp, Artificial
  probe
  misc_feature (1)..(25): SEQ ID NO: 6724; WAN024FWD; Start 346; Stop 370
gtagttcaatcgggatctgtatcac

SEQ ID NO: 447351 - DNA, 25 bp, Artificial
  probe
  misc_feature (1)..(25): SEQ ID NO: 6724; WAN024FWD; Start 43; Stop 67
aagaaggcagaagaatattacaatg

SEQ ID NO: 447352 - DNA, 25 bp, Artificial
  probe
  misc_feature (1)..(25): SEQ ID NO: 6724; WAN024FWD; Start 344; Stop 368
ttgtagttcaatcgggatctgtatc

SEQ ID NO: 447353 - DNA, 25 bp, Artificial
  probe
  misc_feature (1)..(25): SEQ ID NO: 6724; WAN024FWD; Start 343; Stop 367
tttgtagttcaatcgggatctgtat

SEQ ID NO: 447354 - DNA, 25 bp, Artificial
  probe
  misc_feature (1)..(25): SEQ ID NO: 6724; WAN024FWD; Start 342; Stop 366
atttgtagttcaatcgggatctgta

SEQ ID NO: 447355 - DNA, 25 bp, Artificial
  probe
  misc_feature (1)..(25): SEQ ID NO: 6724; WAN024FWD; Start 341; Stop 365
tatttgtagttcaatcgggatctgt

SEQ ID NO: 447356 - DNA, 25 bp, Artificial
  probe
  misc_feature (1)..(25): SEQ ID NO: 6724; WAN024FWD; Start 148; Stop 172
acaactacttccgtaaatatagcaa

SEQ ID NO: 447357 - DNA, 25 bp, Artificial
  probe
  misc_feature (1)..(25): SEQ ID NO: 6724; WAN024FWD; Start 147; Stop 171
aacaactacttccgtaaatatagca

SEQ ID NO: 447358 - DNA, 25 bp, Artificial
  probe
  misc_feature (1)..(25): SEQ ID NO: 6725; WAN024BHZ; Start 463; Stop 487
cctattggagttgttattgattcgg

SEQ ID NO: 447359 - DNA, 25 bp, Artificial
  probe
  misc_feature (1)..(25): SEQ ID NO: 6725; WAN024BHZ; Start 459; Stop 483
agcacctattggagttgttattgat

SEQ ID NO: 447360 - DNA, 25 bp, Artificial
  probe
  misc_feature (1)..(25): SEQ ID NO: 6725; WAN024BHZ; Start 464; Stop 488
ctattggagttgttattgattcggc

SEQ ID NO: 447361 - DNA, 25 bp, Artificial
  probe
  misc_feature (1)..(25): SEQ ID NO: 6725; WAN024BHZ; Start 460; Stop 484
gcacctattggagttgttattgatt

SEQ ID NO: 447362 - DNA, 25 bp, Artificial
  probe
  misc_feature (1)..(25): SEQ ID NO: 6725; WAN024BHZ; Start 465; Stop 489
tattggagttgttattgattcggca

SEQ ID NO: 447363 - DNA, 25 bp, Artificial
  probe
  misc_feature (1)..(25): SEQ ID NO: 6725; WAN024BHZ; Start 462; Stop 486
acctattggagttgttattgattcg

SEQ ID NO: 447364 - DNA, 25 bp, Artificial
  probe
  misc_feature (1)..(25): SEQ ID NO: 6725; WAN024BHZ; Start 458; Stop 482
cagcacctattggagttgttattga

SEQ ID NO: 447365 - DNA, 25 bp, Artificial
  probe
  misc_feature (1)..(25): SEQ ID NO: 6725; WAN024BHZ; Start 33; Stop 57
ggagttcattaagaagacagaggaa

SEQ ID NO: 447366 - DNA, 25 bp, Artificial
  probe
  misc_feature (1)..(25): SEQ ID NO: 6725; WAN024BHZ; Start 32; Stop 56
tggagttcattaagaagacagagga

SEQ ID NO: 447367 - DNA, 25 bp, Artificial
  probe
  misc_feature (1)..(25): SEQ ID NO: 6725; WAN024BHZ; Start 451; Stop 475
gttgatacagcacctattggagttg

SEQ ID NO: 447368 - DNA, 25 bp, Artificial
  probe
  misc_feature (1)..(25): SEQ ID NO: 6725; WAN024BHZ; Start 456; Stop 480
tacagcacctattggagttgttatt

SEQ ID NO: 447369 - DNA, 25 bp, Artificial
  probe
  misc_feature (1)..(25): SEQ ID NO: 6725; WAN024BHZ; Start 455; Stop 479
atacagcacctattggagttgttat

SEQ ID NO: 447370 - DNA, 25 bp, Artificial
  probe
  misc_feature (1)..(25): SEQ ID NO: 6725; WAN024BHZ; Start 454; Stop 478
gatacagcacctattggagttgtta

SEQ ID NO: 447371 - DNA, 25 bp, Artificial
  probe
  misc_feature (1)..(25): SEQ ID NO: 6725; WAN024BHZ; Start 466; Stop 490
attggagttgttattgattcggcaa

SEQ ID NO: 447372 - DNA, 25 bp, Artificial
  probe
  misc_feature (1)..(25): SEQ ID NO: 6725; WAN024BHZ; Start 34; Stop 58
gagttcattaagaagacagaggaat

SEQ ID NO: 447373 - DNA, 25 bp, Artificial
  probe
  misc_feature (1)..(25): SEQ ID NO: 6725; WAN024BHZ; Start 461; Stop 485
cacctattggagttgttattgattc

SEQ ID NO: 447374 - DNA, 25 bp, Artificial
  probe
  misc_feature (1)..(25): SEQ ID NO: 6725; WAN024BHZ; Start 448; Stop 472
attgttgatacagcacctattggag

SEQ ID NO: 447375 - DNA, 25 bp, Artificial
  probe
  misc_feature (1)..(25): SEQ ID NO: 6725; WAN024BHZ; Start 30; Stop 54
actggagttcattaagaagacagag

SEQ ID NO: 447376 - DNA, 25 bp, Artificial
  probe
  misc_feature (1)..(25): SEQ ID NO: 6725; WAN024BHZ; Start 31; Stop 55
ctggagttcattaagaagacagagg

SEQ ID NO: 447377 - DNA, 25 bp, Artificial
  probe
  misc_feature (1)..(25): SEQ ID NO: 6725; WAN024BHZ; Start 447; Stop 471
cattgttgatacagcacctattgga

SEQ ID NO: 447378 - DNA, 25 bp, Artificial
  probe
  misc_feature (1)..(25): SEQ ID NO: 6725; WAN024BHZ; Start 446; Stop 470
tcattgttgatacagcacctattgg

SEQ ID NO: 447379 - DNA, 25 bp, Artificial
  probe
  misc_feature (1)..(25): SEQ ID NO: 6725; WAN024BHZ; Start 502; Stop 526
aagtgtgatgcgtctatcttggtaa

SEQ ID NO: 447380 - DNA, 25 bp, Artificial
  probe
  misc_feature (1)..(25): SEQ ID NO: 6725; WAN024BHZ; Start 45; Stop 69
gaagacagaggaatattacaatgcc

SEQ ID NO: 447381 - DNA, 25 bp, Artificial
  probe
  misc_feature (1)..(25): SEQ ID NO: 6725; WAN024BHZ; Start 457; Stop 481
acagcacctattggagttgttattg

SEQ ID NO: 447382 - DNA, 25 bp, Artificial
  probe
  misc_feature (1)..(25): SEQ ID NO: 6725; WAN024BHZ; Start 29; Stop 53
aactggagttcattaagaagacaga

SEQ ID NO: 447383 - DNA, 25 bp, Artificial
  probe
  misc_feature (1)..(25): SEQ ID NO: 6725; WAN024BHZ; Start 44; Stop 68
agaagacagaggaatattacaatgc

SEQ ID NO: 447384 - DNA, 25 bp, Artificial
  probe
  misc_feature (1)..(25): SEQ ID NO: 6725; WAN024BHZ; Start 503; Stop 527
agtgtgatgcgtctatcttggtaac

SEQ ID NO: 447385 - DNA, 25 bp, Artificial
  probe
  misc_feature (1)..(25): SEQ ID NO: 6725; WAN024BHZ; Start 453; Stop 477
tgatacagcacctattggagttgtt

SEQ ID NO: 447386 - DNA, 25 bp, Artificial
  probe
  misc_feature (1)..(25): SEQ ID NO: 6725; WAN024BHZ; Start 452; Stop 476
ttgatacagcacctattggagttgt

SEQ ID NO: 447387 - DNA, 25 bp, Artificial
  probe
  misc_feature (1)..(25): SEQ ID NO: 6725; WAN024BHZ; Start 450; Stop 474
tgttgatacagcacctattggagtt

SEQ ID NO: 447388 - DNA, 25 bp, Artificial
  probe
  misc_feature (1)..(25): SEQ ID NO: 6725; WAN024BHZ; Start 449; Stop 473
ttgttgatacagcacctattggagt

SEQ ID NO: 447389 - DNA, 25 bp, Artificial
  probe
  misc_feature (1)..(25): SEQ ID NO: 6725; WAN024BHZ; Start 408; Stop 432
tgatatgattgaaaccttgcgtaaa

SEQ ID NO: 447390 - DNA, 25 bp, Artificial
  probe
  misc_feature (1)..(25): SEQ ID NO: 6725; WAN024BHZ; Start 407; Stop 431
atgatatgattgaaaccttgcgtaa

SEQ ID NO: 447391 - DNA, 25 bp, Artificial
  probe
  misc_feature (1)..(25): SEQ ID NO: 6726; WAN024AZM; Start 431; Stop 455
cagatacagacattgccttgatacc

SEQ ID NO: 447392 - DNA, 25 bp, Artificial
  probe
  misc_feature (1)..(25): SEQ ID NO: 6726; WAN024AZM; Start 494; Stop 518
agttgattgaaggagcagaaggatt

SEQ ID NO: 447393 - DNA, 25 bp, Artificial
  probe
  misc_feature (1)..(25): SEQ ID NO: 6726; WAN024AZM; Start 185; Stop 209
cagatggacctgttatagaagaagc

SEQ ID NO: 447394 - DNA, 25 bp, Artificial
  probe
  misc_feature (1)..(25): SEQ ID NO: 6726; WAN024AZM; Start 184; Stop 208
gcagatggacctgttatagaagaag

SEQ ID NO: 447395 - DNA, 25 bp, Artificial
  probe
  misc_feature (1)..(25): SEQ ID NO: 6726; WAN024AZM; Start 493; Stop 517
gagttgattgaaggagcagaaggat

SEQ ID NO: 447396 - DNA, 25 bp, Artificial
  probe
  misc_feature (1)..(25): SEQ ID NO: 6726; WAN024AZM; Start 187; Stop 211
gatggacctgttatagaagaagctg

SEQ ID NO: 447397 - DNA, 25 bp, Artificial
  probe
  misc_feature (1)..(25): SEQ ID NO: 6726; WAN024AZM; Start 186; Stop 210
agatggacctgttatagaagaagct

SEQ ID NO: 447398 - DNA, 25 bp, Artificial
  probe
  misc_feature (1)..(25): SEQ ID NO: 6726; WAN024AZM; Start 491; Stop 515
aagagttgattgaaggagcagaagg

SEQ ID NO: 447399 - DNA, 25 bp, Artificial
  probe
  misc_feature (1)..(25): SEQ ID NO: 6726; WAN024AZM; Start 346; Stop 370
aaagatttggtagatacagcggtta

SEQ ID NO: 447400 - DNA, 25 bp, Artificial
  probe
  misc_feature (1)..(25): SEQ ID NO: 6726; WAN024AZM; Start 347; Stop 371
aagatttggtagatacagcggttaa

SEQ ID NO: 447401 - DNA, 25 bp, Artificial
  probe
  misc_feature (1)..(25): SEQ ID NO: 6726; WAN024AZM; Start 348; Stop 372
agatttggtagatacagcggttaag

SEQ ID NO: 447402 - DNA, 25 bp, Artificial
  probe
  misc_feature (1)..(25): SEQ ID NO: 6726; WAN024AZM; Start 183; Stop 207
cgcagatggacctgttatagaagaa

SEQ ID NO: 447403 - DNA, 25 bp, Artificial
  probe
  misc_feature (1)..(25): SEQ ID NO: 6726; WAN024AZM; Start 188; Stop 212
atggacctgttatagaagaagctgg

SEQ ID NO: 447404 - DNA, 25 bp, Artificial
  probe
  misc_feature (1)..(25): SEQ ID NO: 6726; WAN024AZM; Start 490; Stop 514
aaagagttgattgaaggagcagaag

SEQ ID NO: 447405 - DNA, 25 bp, Artificial
  probe
  misc_feature (1)..(25): SEQ ID NO: 6726; WAN024AZM; Start 489; Stop 513
gaaagagttgattgaaggagcagaa

SEQ ID NO: 447406 - DNA, 25 bp, Artificial
  probe
  misc_feature (1)..(25): SEQ ID NO: 6726; WAN024AZM; Start 349; Stop 373
gatttggtagatacagcggttaagg

SEQ ID NO: 447407 - DNA, 25 bp, Artificial
  probe
  misc_feature (1)..(25): SEQ ID NO: 6726; WAN024AZM; Start 496; Stop 520
ttgattgaaggagcagaaggatttg

SEQ ID NO: 447408 - DNA, 25 bp, Artificial
  probe
  misc_feature (1)..(25): SEQ ID NO: 6726; WAN024AZM; Start 495; Stop 519
gttgattgaaggagcagaaggattt

SEQ ID NO: 447409 - DNA, 25 bp, Artificial
  probe
  misc_feature (1)..(25): SEQ ID NO: 6726; WAN024AZM; Start 458; Stop 482
tagttagtttgacaacaggacttga

SEQ ID NO: 447410 - DNA, 25 bp, Artificial
  probe
  misc_feature (1)..(25): SEQ ID NO: 6726; WAN024AZM; Start 58; Stop 82
ttcgttccttatatcatggctggtg

SEQ ID NO: 447411 - DNA, 25 bp, Artificial
  probe
  misc_feature (1)..(25): SEQ ID NO: 6726; WAN024AZM; Start 502; Stop 526
gaaggagcagaaggatttgtctatg

SEQ ID NO: 447412 - DNA, 25 bp, Artificial
  probe
  misc_feature (1)..(25): SEQ ID NO: 6726; WAN024AZM; Start 641; Stop 665
tatctagtcaagctgatgtagaacg

SEQ ID NO: 447413 - DNA, 25 bp, Artificial
  probe
  misc_feature (1)..(25): SEQ ID NO: 6726; WAN024AZM; Start 459; Stop 483
agttagtttgacaacaggacttgag

SEQ ID NO: 447414 - DNA, 25 bp, Artificial
  probe
  misc_feature (1)..(25): SEQ ID NO: 6726; WAN024AZM; Start 639; Stop 663
ggtatctagtcaagctgatgtagaa

SEQ ID NO: 447415 - DNA, 25 bp, Artificial
  probe
  misc_feature (1)..(25): SEQ ID NO: 6726; WAN024AZM; Start 501; Stop 525
tgaaggagcagaaggatttgtctat

SEQ ID NO: 447416 - DNA, 25 bp, Artificial
  probe
  misc_feature (1)..(25): SEQ ID NO: 6726; WAN024AZM; Start 487; Stop 511
cagaaagagttgattgaaggagcag

SEQ ID NO: 447417 - DNA, 25 bp, Artificial
  probe
  misc_feature (1)..(25): SEQ ID NO: 6726; WAN024AZM; Start 457; Stop 481
ctagttagtttgacaacaggacttg

SEQ ID NO: 447418 - DNA, 25 bp, Artificial
  probe
  misc_feature (1)..(25): SEQ ID NO: 6726; WAN024AZM; Start 498; Stop 522
gattgaaggagcagaaggatttgtc

SEQ ID NO: 447419 - DNA, 25 bp, Artificial
  probe
  misc_feature (1)..(25): SEQ ID NO: 6726; WAN024AZM; Start 488; Stop 512
agaaagagttgattgaaggagcaga

SEQ ID NO: 447420 - DNA, 25 bp, Artificial
  probe
  misc_feature (1)..(25): SEQ ID NO: 6726; WAN024AZM; Start 181; Stop 205
gtcgcagatggacctgttatagaag

SEQ ID NO: 447421 - DNA, 25 bp, Artificial
  probe
  misc_feature (1)..(25): SEQ ID NO: 6726; WAN024AZM; Start 500; Stop 524
ttgaaggagcagaaggatttgtcta

SEQ ID NO: 447422 - DNA, 25 bp, Artificial
  probe
  misc_feature (1)..(25): SEQ ID NO: 6726; WAN024AZM; Start 492; Stop 516
agagttgattgaaggagcagaagga

SEQ ID NO: 447423 - DNA, 25 bp, Artificial
  probe
  misc_feature (1)..(25): SEQ ID NO: 6726; WAN024AZM; Start 516; Stop 540
atttgtctatgctgttgccatcaat

SEQ ID NO: 447424 - DNA, 25 bp, Artificial
  probe
  misc_feature (1)..(25): SEQ ID NO: 6727; WAN024BHG; Start 102; Stop 126
ctgtaatgaatgtgtagagttagcc

SEQ ID NO: 447425 - DNA, 25 bp, Artificial
  probe
  misc_feature (1)..(25): SEQ ID NO: 6727; WAN024BHG; Start 101; Stop 125
tctgtaatgaatgtgtagagttagc

SEQ ID NO: 447426 - DNA, 25 bp, Artificial
  probe
  misc_feature (1)..(25): SEQ ID NO: 6727; WAN024BHG; Start 105; Stop 129
taatgaatgtgtagagttagcccag

SEQ ID NO: 447427 - DNA, 25 bp, Artificial
  probe
  misc_feature (1)..(25): SEQ ID NO: 6727; WAN024BHG; Start 91; Stop 115
aacgcctttatctgtaatgaatgtg

SEQ ID NO: 447428 - DNA, 25 bp, Artificial
  probe
  misc_feature (1)..(25): SEQ ID NO: 6727; WAN024BHG; Start 90; Stop 114
caacgcctttatctgtaatgaatgt

SEQ ID NO: 447429 - DNA, 25 bp, Artificial
  probe
  misc_feature (1)..(25): SEQ ID NO: 6727; WAN024BHG; Start 104; Stop 128
gtaatgaatgtgtagagttagccca

SEQ ID NO: 447430 - DNA, 25 bp, Artificial
  probe
  misc_feature (1)..(25): SEQ ID NO: 6727; WAN024BHG; Start 103; Stop 127
tgtaatgaatgtgtagagttagccc

SEQ ID NO: 447431 - DNA, 25 bp, Artificial
  probe
  misc_feature (1)..(25): SEQ ID NO: 6727; WAN024BHG; Start 93; Stop 117
cgcctttatctgtaatgaatgtgta

SEQ ID NO: 447432 - DNA, 25 bp, Artificial
  probe
  misc_feature (1)..(25): SEQ ID NO: 6727; WAN024BHG; Start 92; Stop 116
acgcctttatctgtaatgaatgtgt

SEQ ID NO: 447433 - DNA, 25 bp, Artificial
  probe
  misc_feature (1)..(25): SEQ ID NO: 6727; WAN024BHG; Start 115; Stop 139
gtagagttagcccaggaaatcattc

SEQ ID NO: 447434 - DNA, 25 bp, Artificial
  probe
  misc_feature (1)..(25): SEQ ID NO: 6727; WAN024BHG; Start 114; Stop 138
tgtagagttagcccaggaaatcatt

SEQ ID NO: 447435 - DNA, 25 bp, Artificial
  probe
  misc_feature (1)..(25): SEQ ID NO: 6727; WAN024BHG; Start 110; Stop 134
aatgtgtagagttagcccaggaaat

SEQ ID NO: 447436 - DNA, 25 bp, Artificial
  probe
  misc_feature (1)..(25): SEQ ID NO: 6727; WAN024BHG; Start 89; Stop 113
acaacgcctttatctgtaatgaatg

SEQ ID NO: 447437 - DNA, 25 bp, Artificial
  probe
  misc_feature (1)..(25): SEQ ID NO: 6727; WAN024BHG; Start 87; Stop 111
gaacaacgcctttatctgtaatgaa

SEQ ID NO: 447438 - DNA, 25 bp, Artificial
  probe
  misc_feature (1)..(25): SEQ ID NO: 6727; WAN024BHG; Start 88; Stop 112
aacaacgcctttatctgtaatgaat

SEQ ID NO: 447439 - DNA, 25 bp, Artificial
  probe
  misc_feature (1)..(25): SEQ ID NO: 6727; WAN024BHG; Start 113; Stop 137
gtgtagagttagcccaggaaatcat

SEQ ID NO: 447440 - DNA, 25 bp, Artificial
  probe
  misc_feature (1)..(25): SEQ ID NO: 6727; WAN024BHG; Start 111; Stop 135
atgtgtagagttagcccaggaaatc

SEQ ID NO: 447441 - DNA, 25 bp, Artificial
  probe
  misc_feature (1)..(25): SEQ ID NO: 6727; WAN024BHG; Start 109; Stop 133
gaatgtgtagagttagcccaggaaa

SEQ ID NO: 447442 - DNA, 25 bp, Artificial
  probe
  misc_feature (1)..(25): SEQ ID NO: 6727; WAN024BHG; Start 94; Stop 118
gcctttatctgtaatgaatgtgtag

SEQ ID NO: 447443 - DNA, 25 bp, Artificial
  probe
  misc_feature (1)..(25): SEQ ID NO: 6727; WAN024BHG; Start 116; Stop 140
tagagttagcccaggaaatcattcg

SEQ ID NO: 447444 - DNA, 25 bp, Artificial
  probe
  misc_feature (1)..(25): SEQ ID NO: 6727; WAN024BHG; Start 106; Stop 130
aatgaatgtgtagagttagcccagg

SEQ ID NO: 447445 - DNA, 25 bp, Artificial
  probe
  misc_feature (1)..(25): SEQ ID NO: 6727; WAN024BHG; Start 86; Stop 110
ggaacaacgcctttatctgtaatga

SEQ ID NO: 447446 - DNA, 25 bp, Artificial
  probe
  misc_feature (1)..(25): SEQ ID NO: 6727; WAN024BHG; Start 100; Stop 124
atctgtaatgaatgtgtagagttag

SEQ ID NO: 447447 - DNA, 25 bp, Artificial
  probe
  misc_feature (1)..(25): SEQ ID NO: 6727; WAN024BHG; Start 8; Stop 32
caactaggaataatgatatgatggt

SEQ ID NO: 447448 - DNA, 25 bp, Artificial
  probe
  misc_feature (1)..(25): SEQ ID NO: 6727; WAN024BHG; Start 7; Stop 31
acaactaggaataatgatatgatgg

SEQ ID NO: 447449 - DNA, 25 bp, Artificial
  probe
  misc_feature (1)..(25): SEQ ID NO: 6727; WAN024BHG; Start 85; Stop 109
gggaacaacgcctttatctgtaatg

SEQ ID NO: 447450 - DNA, 25 bp, Artificial
  probe
  misc_feature (1)..(25): SEQ ID NO: 6727; WAN024BHG; Start 107; Stop 131
atgaatgtgtagagttagcccagga

SEQ ID NO: 447451 - DNA, 25 bp, Artificial
  probe
  misc_feature (1)..(25): SEQ ID NO: 6727; WAN024BHG; Start 112; Stop 136
tgtgtagagttagcccaggaaatca

SEQ ID NO: 447452 - DNA, 25 bp, Artificial
  probe
  misc_feature (1)..(25): SEQ ID NO: 6727; WAN024BHG; Start 108; Stop 132
tgaatgtgtagagttagcccaggaa

SEQ ID NO: 447453 - DNA, 25 bp, Artificial
  probe
  misc_feature (1)..(25): SEQ ID NO: 6727; WAN024BHG; Start 84; Stop 108
tgggaacaacgcctttatctgtaat

SEQ ID NO: 447454 - DNA, 25 bp, Artificial
  probe
  misc_feature (1)..(25): SEQ ID NO: 6727; WAN024BHG; Start 98; Stop 122
ttatctgtaatgaatgtgtagagtt

SEQ ID NO: 447455 - DNA, 25 bp, Artificial
  probe
  misc_feature (1)..(25): SEQ ID NO: 6727; WAN024BHG; Start 83; Stop 107
ctgggaacaacgcctttatctgtaa

SEQ ID NO: 447456 - DNA, 25 bp, Artificial
  probe
  misc_feature (1)..(25): SEQ ID NO: 6727; WAN024BHG; Start 2; Stop 26
tgcctacaactaggaataatgatat

SEQ ID NO: 447457 - DNA, 25 bp, Artificial
  probe
  misc_feature (1)..(25): SEQ ID NO: 6728; WAN024FV9; Start 979; Stop 1003
gctaagtataatatgccgttgatgc

SEQ ID NO: 447458 - DNA, 25 bp, Artificial
  probe
  misc_feature (1)..(25): SEQ ID NO: 6728; WAN024FV9; Start 260; Stop 284
ttgttgattcggatgattatgtctc

SEQ ID NO: 447459 - DNA, 25 bp, Artificial
  probe
  misc_feature (1)..(25): SEQ ID NO: 6728; WAN024FV9; Start 980; Stop 1004
ctaagtataatatgccgttgatgct

SEQ ID NO: 447460 - DNA, 25 bp, Artificial
  probe
  misc_feature (1)..(25): SEQ ID NO: 6728; WAN024FV9; Start 261; Stop 285
tgttgattcggatgattatgtctca

SEQ ID NO: 447461 - DNA, 25 bp, Artificial
  probe
  misc_feature (1)..(25): SEQ ID NO: 6728; WAN024FV9; Start 981; Stop 1005
taagtataatatgccgttgatgctt

SEQ ID NO: 447462 - DNA, 25 bp, Artificial
  probe
  misc_feature (1)..(25): SEQ ID NO: 6728; WAN024FV9; Start 457; Stop 481
gatgtaatatcttcaccaccagaat

SEQ ID NO: 447463 - DNA, 25 bp, Artificial
  probe
  misc_feature (1)..(25): SEQ ID NO: 6728; WAN024FV9; Start 116; Stop 140
atggttctactgacacatctggaag

SEQ ID NO: 447464 - DNA, 25 bp, Artificial
  probe
  misc_feature (1)..(25): SEQ ID NO: 6728; WAN024FV9; Start 120; Stop 144
ttctactgacacatctggaagtctt

SEQ ID NO: 447465 - DNA, 25 bp, Artificial
  probe
  misc_feature (1)..(25): SEQ ID NO: 6728; WAN024FV9; Start 458; Stop 482
atgtaatatcttcaccaccagaatt

SEQ ID NO: 447466 - DNA, 25 bp, Artificial
  probe
  misc_feature (1)..(25): SEQ ID NO: 6728; WAN024FV9; Start 978; Stop 1002
agctaagtataatatgccgttgatg

SEQ ID NO: 447467 - DNA, 25 bp, Artificial
  probe
  misc_feature (1)..(25): SEQ ID NO: 6728; WAN024FV9; Start 119; Stop 143
gttctactgacacatctggaagtct

SEQ ID NO: 447468 - DNA, 25 bp, Artificial
  probe
  misc_feature (1)..(25): SEQ ID NO: 6728; WAN024FV9; Start 917; Stop 941
cagtattacgtcattatccaatccg

SEQ ID NO: 447469 - DNA, 25 bp, Artificial
  probe
  misc_feature (1)..(25): SEQ ID NO: 6728; WAN024FV9; Start 484; Stop 508
attggagatggaaagataggtgttt

SEQ ID NO: 447470 - DNA, 25 bp, Artificial
  probe
  misc_feature (1)..(25): SEQ ID NO: 6728; WAN024FV9; Start 106; Stop 130
ttggtaaatgatggttctactgaca

SEQ ID NO: 447471 - DNA, 25 bp, Artificial
  probe
  misc_feature (1)..(25): SEQ ID NO: 6728; WAN024FV9; Start 253; Stop 277
attgtctttgttgattcggatgatt

SEQ ID NO: 447472 - DNA, 25 bp, Artificial
  probe
  misc_feature (1)..(25): SEQ ID NO: 6728; WAN024FV9; Start 929; Stop 953
attatccaatccgtcgtttaccttt

SEQ ID NO: 447473 - DNA, 25 bp, Artificial
  probe
  misc_feature (1)..(25): SEQ ID NO: 6728; WAN024FV9; Start 108; Stop 132
ggtaaatgatggttctactgacaca

SEQ ID NO: 447474 - DNA, 25 bp, Artificial
  probe
  misc_feature (1)..(25): SEQ ID NO: 6728; WAN024FV9; Start 107; Stop 131
tggtaaatgatggttctactgacac

SEQ ID NO: 447475 - DNA, 25 bp, Artificial
  probe
  misc_feature (1)..(25): SEQ ID NO: 6728; WAN024FV9; Start 105; Stop 129
cttggtaaatgatggttctactgac

SEQ ID NO: 447476 - DNA, 25 bp, Artificial
  probe
  misc_feature (1)..(25): SEQ ID NO: 6728; WAN024FV9; Start 104; Stop 128
tcttggtaaatgatggttctactga

SEQ ID NO: 447477 - DNA, 25 bp, Artificial
  probe
  misc_feature (1)..(25): SEQ ID NO: 6728; WAN024FV9; Start 483; Stop 507
tattggagatggaaagataggtgtt

SEQ ID NO: 447478 - DNA, 25 bp, Artificial
  probe
  misc_feature (1)..(25): SEQ ID NO: 6728; WAN024FV9; Start 482; Stop 506
ttattggagatggaaagataggtgt

SEQ ID NO: 447479 - DNA, 25 bp, Artificial
  probe
  misc_feature (1)..(25): SEQ ID NO: 6728; WAN024FV9; Start 254; Stop 278
ttgtctttgttgattcggatgatta

SEQ ID NO: 447480 - DNA, 25 bp, Artificial
  probe
  misc_feature (1)..(25): SEQ ID NO: 6728; WAN024FV9; Start 455; Stop 479
cagatgtaatatcttcaccaccaga

SEQ ID NO: 447481 - DNA, 25 bp, Artificial
  probe
  misc_feature (1)..(25): SEQ ID NO: 6728; WAN024FV9; Start 452; Stop 476
taccagatgtaatatcttcaccacc

SEQ ID NO: 447482 - DNA, 25 bp, Artificial
  probe
  misc_feature (1)..(25): SEQ ID NO: 6728; WAN024FV9; Start 928; Stop 952
cattatccaatccgtcgtttacctt

SEQ ID NO: 447483 - DNA, 25 bp, Artificial
  probe
  misc_feature (1)..(25): SEQ ID NO: 6728; WAN024FV9; Start 259; Stop 283
tttgttgattcggatgattatgtct

SEQ ID NO: 447484 - DNA, 25 bp, Artificial
  probe
  misc_feature (1)..(25): SEQ ID NO: 6728; WAN024FV9; Start 257; Stop 281
tctttgttgattcggatgattatgt

SEQ ID NO: 447485 - DNA, 25 bp, Artificial
  probe
  misc_feature (1)..(25): SEQ ID NO: 6728; WAN024FV9; Start 255; Stop 279
tgtctttgttgattcggatgattat

SEQ ID NO: 447486 - DNA, 25 bp, Artificial
  probe
  misc_feature (1)..(25): SEQ ID NO: 6728; WAN024FV9; Start 252; Stop 276
tattgtctttgttgattcggatgat

SEQ ID NO: 447487 - DNA, 25 bp, Artificial
  probe
  misc_feature (1)..(25): SEQ ID NO: 6728; WAN024FV9; Start 982; Stop 1006
aagtataatatgccgttgatgcttt

SEQ ID NO: 447488 - DNA, 25 bp, Artificial
  probe
  misc_feature (1)..(25): SEQ ID NO: 6728; WAN024FV9; Start 454; Stop 478
ccagatgtaatatcttcaccaccag

SEQ ID NO: 447489 - DNA, 25 bp, Artificial
  probe
  misc_feature (1)..(25): SEQ ID NO: 6728; WAN024FV9; Start 251; Stop 275
atattgtctttgttgattcggatga

SEQ ID NO: 447490 - DNA, 25 bp, Artificial
  probe
  misc_feature (1)..(25): SEQ ID NO: 6729; WAN024BVI; Start 136; Stop 160
ccaatacctgagataagaccagaga

SEQ ID NO: 447491 - DNA, 25 bp, Artificial
  probe
  misc_feature (1)..(25): SEQ ID NO: 6729; WAN024BVI; Start 135; Stop 159
tccaatacctgagataagaccagag

SEQ ID NO: 447492 - DNA, 25 bp, Artificial
  probe
  misc_feature (1)..(25): SEQ ID NO: 6729; WAN024BVI; Start 134; Stop 158
ctccaatacctgagataagaccaga

SEQ ID NO: 447493 - DNA, 25 bp, Artificial
  probe
  misc_feature (1)..(25): SEQ ID NO: 6729; WAN024BVI; Start 137; Stop 161
caatacctgagataagaccagagat

SEQ ID NO: 447494 - DNA, 25 bp, Artificial
  probe
  misc_feature (1)..(25): SEQ ID NO: 6729; WAN024BVI; Start 138; Stop 162
aatacctgagataagaccagagatt

SEQ ID NO: 447495 - DNA, 25 bp, Artificial
  probe
  misc_feature (1)..(25): SEQ ID NO: 6729; WAN024BVI; Start 8; Stop 32
acaatatccctccaatagaagttcc

SEQ ID NO: 447496 - DNA, 25 bp, Artificial
  probe
  misc_feature (1)..(25): SEQ ID NO: 6729; WAN024BVI; Start 4; Stop 28
cctgacaatatccctccaatagaag

SEQ ID NO: 447497 - DNA, 25 bp, Artificial
  probe
  misc_feature (1)..(25): SEQ ID NO: 6729; WAN024BVI; Start 5; Stop 29
ctgacaatatccctccaatagaagt

SEQ ID NO: 447498 - DNA, 25 bp, Artificial
  probe
  misc_feature (1)..(25): SEQ ID NO: 6729; WAN024BVI; Start 56; Stop 80
aggaaatcgtaactactctgtcttt

SEQ ID NO: 447499 - DNA, 25 bp, Artificial
  probe
  misc_feature (1)..(25): SEQ ID NO: 6729; WAN024BVI; Start 9; Stop 33
caatatccctccaatagaagttcct

SEQ ID NO: 447500 - DNA, 25 bp, Artificial
  probe
  misc_feature (1)..(25): SEQ ID NO: 6729; WAN024BVI; Start 6; Stop 30
tgacaatatccctccaatagaagtt

SEQ ID NO: 447501 - DNA, 25 bp, Artificial
  probe
  misc_feature (1)..(25): SEQ ID NO: 6729; WAN024BVI; Start 140; Stop 164
tacctgagataagaccagagattaa

SEQ ID NO: 447502 - DNA, 25 bp, Artificial
  probe
  misc_feature (1)..(25): SEQ ID NO: 6729; WAN024BVI; Start 133; Stop 157
gctccaatacctgagataagaccag

SEQ ID NO: 447503 - DNA, 25 bp, Artificial
  probe
  misc_feature (1)..(25): SEQ ID NO: 6729; WAN024BVI; Start 55; Stop 79
aaggaaatcgtaactactctgtctt

SEQ ID NO: 447504 - DNA, 25 bp, Artificial
  probe
  misc_feature (1)..(25): SEQ ID NO: 6729; WAN024BVI; Start 13; Stop 37
atccctccaatagaagttcctaaac

SEQ ID NO: 447505 - DNA, 25 bp, Artificial
  probe
  misc_feature (1)..(25): SEQ ID NO: 6729; WAN024BVI; Start 139; Stop 163
atacctgagataagaccagagatta

SEQ ID NO: 447506 - DNA, 25 bp, Artificial
  probe
  misc_feature (1)..(25): SEQ ID NO: 6729; WAN024BVI; Start 54; Stop 78
taaggaaatcgtaactactctgtct

SEQ ID NO: 447507 - DNA, 25 bp, Artificial
  probe
  misc_feature (1)..(25): SEQ ID NO: 6729; WAN024BVI; Start 7; Stop 31
gacaatatccctccaatagaagttc

SEQ ID NO: 447508 - DNA, 25 bp, Artificial
  probe
  misc_feature (1)..(25): SEQ ID NO: 6729; WAN024BVI; Start 141; Stop 165
acctgagataagaccagagattaat

SEQ ID NO: 447509 - DNA, 25 bp, Artificial
  probe
  misc_feature (1)..(25): SEQ ID NO: 6729; WAN024BVI; Start 12; Stop 36
tatccctccaatagaagttcctaaa

SEQ ID NO: 447510 - DNA, 25 bp, Artificial
  probe
  misc_feature (1)..(25): SEQ ID NO: 6729; WAN024BVI; Start 142; Stop 166
cctgagataagaccagagattaatg

SEQ ID NO: 447511 - DNA, 25 bp, Artificial
  probe
  misc_feature (1)..(25): SEQ ID NO: 6729; WAN024BVI; Start 11; Stop 35
atatccctccaatagaagttcctaa

SEQ ID NO: 447512 - DNA, 25 bp, Artificial
  probe
  misc_feature (1)..(25): SEQ ID NO: 6729; WAN024BVI; Start 10; Stop 34
aatatccctccaatagaagttccta

SEQ ID NO: 447513 - DNA, 25 bp, Artificial
  probe
  misc_feature (1)..(25): SEQ ID NO: 6729; WAN024BVI; Start 3; Stop 27
gcctgacaatatccctccaatagaa

SEQ ID NO: 447514 - DNA, 25 bp, Artificial
  probe
  misc_feature (1)..(25): SEQ ID NO: 6729; WAN024BVI; Start 1; Stop 25
atgcctgacaatatccctccaatag

SEQ ID NO: 447515 - DNA, 25 bp, Artificial
  probe
  misc_feature (1)..(25): SEQ ID NO: 6729; WAN024BVI; Start 53; Stop 77
ttaaggaaatcgtaactactctgtc

SEQ ID NO: 447516 - DNA, 25 bp, Artificial
  probe
  misc_feature (1)..(25): SEQ ID NO: 6729; WAN024BVI; Start 52; Stop 76
tttaaggaaatcgtaactactctgt

SEQ ID NO: 447517 - DNA, 25 bp, Artificial
  probe
  misc_feature (1)..(25): SEQ ID NO: 6729; WAN024BVI; Start 143; Stop 167
ctgagataagaccagagattaatga

SEQ ID NO: 447518 - DNA, 25 bp, Artificial
  probe
  misc_feature (1)..(25): SEQ ID NO: 6729; WAN024BVI; Start 144; Stop 168
tgagataagaccagagattaatgat

SEQ ID NO: 447519 - DNA, 25 bp, Artificial
  probe
  misc_feature (1)..(25): SEQ ID NO: 6729; WAN024BVI; Start 132; Stop 156
cgctccaatacctgagataagacca

SEQ ID NO: 447520 - DNA, 25 bp, Artificial
  probe
  misc_feature (1)..(25): SEQ ID NO: 6729; WAN024BVI; Start 2; Stop 26
tgcctgacaatatccctccaataga

SEQ ID NO: 447521 - DNA, 25 bp, Artificial
  probe
  misc_feature (1)..(25): SEQ ID NO: 6729; WAN024BVI; Start 117; Stop 141
aagaattattgttgccgctccaata

SEQ ID NO: 447522 - DNA, 25 bp, Artificial
  probe
  misc_feature (1)..(25): SEQ ID NO: 6729; WAN024BVI; Start 57; Stop 81
ggaaatcgtaactactctgtctttt

SEQ ID NO: 447523 - DNA, 25 bp, Artificial
  probe
  misc_feature (1)..(25): SEQ ID NO: 6730; WAN024GIH; Start 127; Stop 151
tcacagagttccataacatcttcaa

SEQ ID NO: 447524 - DNA, 25 bp, Artificial
  probe
  misc_feature (1)..(25): SEQ ID NO: 6730; WAN024GIH; Start 124; Stop 148
acatcacagagttccataacatctt

SEQ ID NO: 447525 - DNA, 25 bp, Artificial
  probe
  misc_feature (1)..(25): SEQ ID NO: 6730; WAN024GIH; Start 126; Stop 150
atcacagagttccataacatcttca

SEQ ID NO: 447526 - DNA, 25 bp, Artificial
  probe
  misc_feature (1)..(25): SEQ ID NO: 6730; WAN024GIH; Start 123; Stop 147
gacatcacagagttccataacatct

SEQ ID NO: 447527 - DNA, 25 bp, Artificial
  probe
  misc_feature (1)..(25): SEQ ID NO: 6730; WAN024GIH; Start 125; Stop 149
catcacagagttccataacatcttc

SEQ ID NO: 447528 - DNA, 25 bp, Artificial
  probe
  misc_feature (1)..(25): SEQ ID NO: 6730; WAN024GIH; Start 122; Stop 146
ggacatcacagagttccataacatc

SEQ ID NO: 447529 - DNA, 25 bp, Artificial
  probe
  misc_feature (1)..(25): SEQ ID NO: 6730; WAN024GIH; Start 128; Stop 152
cacagagttccataacatcttcaaa

SEQ ID NO: 447530 - DNA, 25 bp, Artificial
  probe
  misc_feature (1)..(25): SEQ ID NO: 6730; WAN024GIH; Start 81; Stop 105
aacttcgacacctttgatagcattt

SEQ ID NO: 447531 - DNA, 25 bp, Artificial
  probe
  misc_feature (1)..(25): SEQ ID NO: 6730; WAN024GIH; Start 80; Stop 104
aaacttcgacacctttgatagcatt

SEQ ID NO: 447532 - DNA, 25 bp, Artificial
  probe
  misc_feature (1)..(25): SEQ ID NO: 6730; WAN024GIH; Start 113; Stop 137
gattggcatggacatcacagagttc

SEQ ID NO: 447533 - DNA, 25 bp, Artificial
  probe
  misc_feature (1)..(25): SEQ ID NO: 6730; WAN024GIH; Start 32; Stop 56
tttcttccttaaagacacgaactgg

SEQ ID NO: 447534 - DNA, 25 bp, Artificial
  probe
  misc_feature (1)..(25): SEQ ID NO: 6730; WAN024GIH; Start 135; Stop 159
ttccataacatcttcaaaagtgacg

SEQ ID NO: 447535 - DNA, 25 bp, Artificial
  probe
  misc_feature (1)..(25): SEQ ID NO: 6730; WAN024GIH; Start 112; Stop 136
agattggcatggacatcacagagtt

SEQ ID NO: 447536 - DNA, 25 bp, Artificial
  probe
  misc_feature (1)..(25): SEQ ID NO: 6730; WAN024GIH; Start 111; Stop 135
aagattggcatggacatcacagagt

SEQ ID NO: 447537 - DNA, 25 bp, Artificial
  probe
  misc_feature (1)..(25): SEQ ID NO: 6730; WAN024GIH; Start 129; Stop 153
acagagttccataacatcttcaaaa

SEQ ID NO: 447538 - DNA, 25 bp, Artificial
  probe
  misc_feature (1)..(25): SEQ ID NO: 6730; WAN024GIH; Start 62; Stop 86
cagggtgttcggtatctaaaacttc

SEQ ID NO: 447539 - DNA, 25 bp, Artificial
  probe
  misc_feature (1)..(25): SEQ ID NO: 6730; WAN024GIH; Start 110; Stop 134
aaagattggcatggacatcacagag

SEQ ID NO: 447540 - DNA, 25 bp, Artificial
  probe
  misc_feature (1)..(25): SEQ ID NO: 6730; WAN024GIH; Start 132; Stop 156
gagttccataacatcttcaaaagtg

SEQ ID NO: 447541 - DNA, 25 bp, Artificial
  probe
  misc_feature (1)..(25): SEQ ID NO: 6730; WAN024GIH; Start 131; Stop 155
agagttccataacatcttcaaaagt

SEQ ID NO: 447542 - DNA, 25 bp, Artificial
  probe
  misc_feature (1)..(25): SEQ ID NO: 6730; WAN024GIH; Start 134; Stop 158
gttccataacatcttcaaaagtgac

SEQ ID NO: 447543 - DNA, 25 bp, Artificial
  probe
  misc_feature (1)..(25): SEQ ID NO: 6730; WAN024GIH; Start 133; Stop 157
agttccataacatcttcaaaagtga

SEQ ID NO: 447544 - DNA, 25 bp, Artificial
  probe
  misc_feature (1)..(25): SEQ ID NO: 6730; WAN024GIH; Start 130; Stop 154
cagagttccataacatcttcaaaag

SEQ ID NO: 447545 - DNA, 25 bp, Artificial
  probe
  misc_feature (1)..(25): SEQ ID NO: 6730; WAN024GIH; Start 136; Stop 160
tccataacatcttcaaaagtgacgc

SEQ ID NO: 447546 - DNA, 25 bp, Artificial
  probe
  misc_feature (1)..(25): SEQ ID NO: 6730; WAN024GIH; Start 189; Stop 213
cataagggaaatctcgatggctgac

SEQ ID NO: 447547 - DNA, 25 bp, Artificial
  probe
  misc_feature (1)..(25): SEQ ID NO: 6730; WAN024GIH; Start 77; Stop 101
ctaaaacttcgacacctttgatagc

SEQ ID NO: 447548 - DNA, 25 bp, Artificial
  probe
  misc_feature (1)..(25): SEQ ID NO: 6730; WAN024GIH; Start 35; Stop 59
cttccttaaagacacgaactgggtg

SEQ ID NO: 447549 - DNA, 25 bp, Artificial
  probe
  misc_feature (1)..(25): SEQ ID NO: 6730; WAN024GIH; Start 33; Stop 57
ttcttccttaaagacacgaactggg

SEQ ID NO: 447550 - DNA, 25 bp, Artificial
  probe
  misc_feature (1)..(25): SEQ ID NO: 6730; WAN024GIH; Start 78; Stop 102
taaaacttcgacacctttgatagca

SEQ ID NO: 447551 - DNA, 25 bp, Artificial
  probe
  misc_feature (1)..(25): SEQ ID NO: 6730; WAN024GIH; Start 73; Stop 97
gtatctaaaacttcgacacctttga

SEQ ID NO: 447552 - DNA, 25 bp, Artificial
  probe
  misc_feature (1)..(25): SEQ ID NO: 6730; WAN024GIH; Start 190; Stop 214
ataagggaaatctcgatggctgaca

SEQ ID NO: 447553 - DNA, 25 bp, Artificial
  probe
  misc_feature (1)..(25): SEQ ID NO: 6730; WAN024GIH; Start 61; Stop 85
ccagggtgttcggtatctaaaactt

SEQ ID NO: 447554 - DNA, 25 bp, Artificial
  probe
  misc_feature (1)..(25): SEQ ID NO: 6730; WAN024GIH; Start 82; Stop 106
acttcgacacctttgatagcatttt

SEQ ID NO: 447555 - DNA, 25 bp, Artificial
  probe
  misc_feature (1)..(25): SEQ ID NO: 6730; WAN024GIH; Start 79; Stop 103
aaaacttcgacacctttgatagcat

SEQ ID NO: 447556 - DNA, 25 bp, Artificial
  probe
  misc_feature (1)..(25): SEQ ID NO: 6731; WAN024CUN; Start 110; Stop 134
tatctcatacaatccaccgaatttc

SEQ ID NO: 447557 - DNA, 25 bp, Artificial
  probe
  misc_feature (1)..(25): SEQ ID NO: 6731; WAN024CUN; Start 111; Stop 135
atctcatacaatccaccgaatttcg

SEQ ID NO: 447558 - DNA, 25 bp, Artificial
  probe
  misc_feature (1)..(25): SEQ ID NO: 6731; WAN024CUN; Start 113; Stop 137
ctcatacaatccaccgaatttcgat

SEQ ID NO: 447559 - DNA, 25 bp, Artificial
  probe
  misc_feature (1)..(25): SEQ ID NO: 6731; WAN024CUN; Start 116; Stop 140
atacaatccaccgaatttcgatgtc

SEQ ID NO: 447560 - DNA, 25 bp, Artificial
  probe
  misc_feature (1)..(25): SEQ ID NO: 6731; WAN024CUN; Start 114; Stop 138
tcatacaatccaccgaatttcgatg

SEQ ID NO: 447561 - DNA, 25 bp, Artificial
  probe
  misc_feature (1)..(25): SEQ ID NO: 6731; WAN024CUN; Start 54; Stop 78
gaccaatatcccaaccttgaaaacc

SEQ ID NO: 447562 - DNA, 25 bp, Artificial
  probe
  misc_feature (1)..(25): SEQ ID NO: 6731; WAN024CUN; Start 115; Stop 139
catacaatccaccgaatttcgatgt

SEQ ID NO: 447563 - DNA, 25 bp, Artificial
  probe
  misc_feature (1)..(25): SEQ ID NO: 6731; WAN024CUN; Start 66; Stop 90
aaccttgaaaacccaccttgaaaac

SEQ ID NO: 447564 - DNA, 25 bp, Artificial
  probe
  misc_feature (1)..(25): SEQ ID NO: 6731; WAN024CUN; Start 57; Stop 81
caatatcccaaccttgaaaacccac

SEQ ID NO: 447565 - DNA, 25 bp, Artificial
  probe
  misc_feature (1)..(25): SEQ ID NO: 6731; WAN024CUN; Start 53; Stop 77
cgaccaatatcccaaccttgaaaac

SEQ ID NO: 447566 - DNA, 25 bp, Artificial
  probe
  misc_feature (1)..(25): SEQ ID NO: 6731; WAN024CUN; Start 112; Stop 136
tctcatacaatccaccgaatttcga

SEQ ID NO: 447567 - DNA, 25 bp, Artificial
  probe
  misc_feature (1)..(25): SEQ ID NO: 6731; WAN024CUN; Start 65; Stop 89
caaccttgaaaacccaccttgaaaa

SEQ ID NO: 447568 - DNA, 25 bp, Artificial
  probe
  misc_feature (1)..(25): SEQ ID NO: 6731; WAN024CUN; Start 68; Stop 92
ccttgaaaacccaccttgaaaacac

SEQ ID NO: 447569 - DNA, 25 bp, Artificial
  probe
  misc_feature (1)..(25): SEQ ID NO: 6731; WAN024CUN; Start 58; Stop 82
aatatcccaaccttgaaaacccacc

SEQ ID NO: 447570 - DNA, 25 bp, Artificial
  probe
  misc_feature (1)..(25): SEQ ID NO: 6731; WAN024CUN; Start 56; Stop 80
ccaatatcccaaccttgaaaaccca

SEQ ID NO: 447571 - DNA, 25 bp, Artificial
  probe
  misc_feature (1)..(25): SEQ ID NO: 6731; WAN024CUN; Start 55; Stop 79
accaatatcccaaccttgaaaaccc

SEQ ID NO: 447572 - DNA, 25 bp, Artificial
  probe
  misc_feature (1)..(25): SEQ ID NO: 6731; WAN024CUN; Start 69; Stop 93
cttgaaaacccaccttgaaaacacg

SEQ ID NO: 447573 - DNA, 25 bp, Artificial
  probe
  misc_feature (1)..(25): SEQ ID NO: 6731; WAN024CUN; Start 67; Stop 91
accttgaaaacccaccttgaaaaca

SEQ ID NO: 447574 - DNA, 25 bp, Artificial
  probe
  misc_feature (1)..(25): SEQ ID NO: 6731; WAN024CUN; Start 51; Stop 75
tgcgaccaatatcccaaccttgaaa

SEQ ID NO: 447575 - DNA, 25 bp, Artificial
  probe
  misc_feature (1)..(25): SEQ ID NO: 6731; WAN024CUN; Start 50; Stop 74
ttgcgaccaatatcccaaccttgaa

SEQ ID NO: 447576 - DNA, 25 bp, Artificial
  probe
  misc_feature (1)..(25): SEQ ID NO: 6731; WAN024CUN; Start 117; Stop 141
tacaatccaccgaatttcgatgtcc

SEQ ID NO: 447577 - DNA, 25 bp, Artificial
  probe
  misc_feature (1)..(25): SEQ ID NO: 6731; WAN024CUN; Start 59; Stop 83
atatcccaaccttgaaaacccacct

SEQ ID NO: 447578 - DNA, 25 bp, Artificial
  probe
  misc_feature (1)..(25): SEQ ID NO: 6731; WAN024CUN; Start 52; Stop 76
gcgaccaatatcccaaccttgaaaa

SEQ ID NO: 447579 - DNA, 25 bp, Artificial
  probe
  misc_feature (1)..(25): SEQ ID NO: 6731; WAN024CUN; Start 60; Stop 84
tatcccaaccttgaaaacccacctt

SEQ ID NO: 447580 - DNA, 25 bp, Artificial
  probe
  misc_feature (1)..(25): SEQ ID NO: 6731; WAN024CUN; Start 64; Stop 88
ccaaccttgaaaacccaccttgaaa

SEQ ID NO: 447581 - DNA, 25 bp, Artificial
  probe
  misc_feature (1)..(25): SEQ ID NO: 6731; WAN024CUN; Start 70; Stop 94
ttgaaaacccaccttgaaaacacgg

SEQ ID NO: 447582 - DNA, 25 bp, Artificial
  probe
  misc_feature (1)..(25): SEQ ID NO: 6731; WAN024CUN; Start 72; Stop 96
gaaaacccaccttgaaaacacggac

SEQ ID NO: 447583 - DNA, 25 bp, Artificial
  probe
  misc_feature (1)..(25): SEQ ID NO: 6731; WAN024CUN; Start 40; Stop 64
gtttctggtgttgcgaccaatatcc

SEQ ID NO: 447584 - DNA, 25 bp, Artificial
  probe
  misc_feature (1)..(25): SEQ ID NO: 6731; WAN024CUN; Start 39; Stop 63
ggtttctggtgttgcgaccaatatc

SEQ ID NO: 447585 - DNA, 25 bp, Artificial
  probe
  misc_feature (1)..(25): SEQ ID NO: 6731; WAN024CUN; Start 38; Stop 62
aggtttctggtgttgcgaccaatat

SEQ ID NO: 447586 - DNA, 25 bp, Artificial
  probe
  misc_feature (1)..(25): SEQ ID NO: 6732; WAN024BK9; Start 53; Stop 77
tcaaagtgtactattttaactccct

SEQ ID NO: 447587 - DNA, 25 bp, Artificial
  probe
  misc_feature (1)..(25): SEQ ID NO: 6732; WAN024BK9; Start 57; Stop 81
agtgtactattttaactccctaact

SEQ ID NO: 447588 - DNA, 25 bp, Artificial
  probe
  misc_feature (1)..(25): SEQ ID NO: 6732; WAN024BK9; Start 52; Stop 76
atcaaagtgtactattttaactccc

SEQ ID NO: 447589 - DNA, 25 bp, Artificial
  probe
  misc_feature (1)..(25): SEQ ID NO: 6732; WAN024BK9; Start 56; Stop 80
aagtgtactattttaactccctaac

SEQ ID NO: 447590 - DNA, 25 bp, Artificial
  probe
  misc_feature (1)..(25): SEQ ID NO: 6732; WAN024BK9; Start 54; Stop 78
caaagtgtactattttaactcccta

SEQ ID NO: 447591 - DNA, 25 bp, Artificial
  probe
  misc_feature (1)..(25): SEQ ID NO: 6732; WAN024BK9; Start 58; Stop 82
gtgtactattttaactccctaacta

SEQ ID NO: 447592 - DNA, 25 bp, Artificial
  probe
  misc_feature (1)..(25): SEQ ID NO: 6732; WAN024BK9; Start 55; Stop 79
aaagtgtactattttaactccctaa

SEQ ID NO: 447593 - DNA, 25 bp, Artificial
  probe
  misc_feature (1)..(25): SEQ ID NO: 6732; WAN024BK9; Start 51; Stop 75
aatcaaagtgtactattttaactcc

SEQ ID NO: 447594 - DNA, 25 bp, Artificial
  probe
  misc_feature (1)..(25): SEQ ID NO: 6733; WAN024F68; Start 19; Stop 43
caccaacaacaagataatcgtacat

SEQ ID NO: 447595 - DNA, 25 bp, Artificial
  probe
  misc_feature (1)..(25): SEQ ID NO: 6733; WAN024F68; Start 16; Stop 40
cagcaccaacaacaagataatcgta

SEQ ID NO: 447596 - DNA, 25 bp, Artificial
  probe
  misc_feature (1)..(25): SEQ ID NO: 6733; WAN024F68; Start 20; Stop 44
accaacaacaagataatcgtacatc

SEQ ID NO: 447597 - DNA, 25 bp, Artificial
  probe
  misc_feature (1)..(25): SEQ ID NO: 6733; WAN024F68; Start 17; Stop 41
agcaccaacaacaagataatcgtac

SEQ ID NO: 447598 - DNA, 25 bp, Artificial
  probe
  misc_feature (1)..(25): SEQ ID NO: 6733; WAN024F68; Start 13; Stop 37
gaccagcaccaacaacaagataatc

SEQ ID NO: 447599 - DNA, 25 bp, Artificial
  probe
  misc_feature (1)..(25): SEQ ID NO: 6733; WAN024F68; Start 18; Stop 42
gcaccaacaacaagataatcgtaca

SEQ ID NO: 447600 - DNA, 25 bp, Artificial
  probe
  misc_feature (1)..(25): SEQ ID NO: 6733; WAN024F68; Start 31; Stop 55
gataatcgtacatctgaagctcctt

SEQ ID NO: 447601 - DNA, 25 bp, Artificial
  probe
  misc_feature (1)..(25): SEQ ID NO: 6733; WAN024F68; Start 12; Stop 36
agaccagcaccaacaacaagataat

SEQ ID NO: 447602 - DNA, 25 bp, Artificial
  probe
  misc_feature (1)..(25): SEQ ID NO: 6733; WAN024F68; Start 26; Stop 50
aacaagataatcgtacatctgaagc

SEQ ID NO: 447603 - DNA, 25 bp, Artificial
  probe
  misc_feature (1)..(25): SEQ ID NO: 6733; WAN024F68; Start 21; Stop 45
ccaacaacaagataatcgtacatct

SEQ ID NO: 447604 - DNA, 25 bp, Artificial
  probe
  misc_feature (1)..(25): SEQ ID NO: 6733; WAN024F68; Start 11; Stop 35
gagaccagcaccaacaacaagataa

SEQ ID NO: 447605 - DNA, 25 bp, Artificial
  probe
  misc_feature (1)..(25): SEQ ID NO: 6733; WAN024F68; Start 54; Stop 78
tttggagttcattatctgcctcttt

SEQ ID NO: 447606 - DNA, 25 bp, Artificial
  probe
  misc_feature (1)..(25): SEQ ID NO: 6733; WAN024F68; Start 53; Stop 77
ctttggagttcattatctgcctctt

SEQ ID NO: 447607 - DNA, 25 bp, Artificial
  probe
  misc_feature (1)..(25): SEQ ID NO: 6733; WAN024F68; Start 22; Stop 46
caacaacaagataatcgtacatctg

SEQ ID NO: 447608 - DNA, 25 bp, Artificial
  probe
  misc_feature (1)..(25): SEQ ID NO: 6733; WAN024F68; Start 24; Stop 48
acaacaagataatcgtacatctgaa

SEQ ID NO: 447609 - DNA, 25 bp, Artificial
  probe
  misc_feature (1)..(25): SEQ ID NO: 6733; WAN024F68; Start 23; Stop 47
aacaacaagataatcgtacatctga

SEQ ID NO: 447610 - DNA, 25 bp, Artificial
  probe
  misc_feature (1)..(25): SEQ ID NO: 6733; WAN024F68; Start 27; Stop 51
acaagataatcgtacatctgaagct

SEQ ID NO: 447611 - DNA, 25 bp, Artificial
  probe
  misc_feature (1)..(25): SEQ ID NO: 6733; WAN024F68; Start 29; Stop 53
aagataatcgtacatctgaagctcc

SEQ ID NO: 447612 - DNA, 25 bp, Artificial
  probe
  misc_feature (1)..(25): SEQ ID NO: 6733; WAN024F68; Start 28; Stop 52
caagataatcgtacatctgaagctc

SEQ ID NO: 447613 - DNA, 25 bp, Artificial
  probe
  misc_feature (1)..(25): SEQ ID NO: 6733; WAN024F68; Start 30; Stop 54
agataatcgtacatctgaagctcct

SEQ ID NO: 447614 - DNA, 25 bp, Artificial
  probe
  misc_feature (1)..(25): SEQ ID NO: 6733; WAN024F68; Start 15; Stop 39
ccagcaccaacaacaagataatcgt

SEQ ID NO: 447615 - DNA, 25 bp, Artificial
  probe
  misc_feature (1)..(25): SEQ ID NO: 6733; WAN024F68; Start 14; Stop 38
accagcaccaacaacaagataatcg

SEQ ID NO: 447616 - DNA, 25 bp, Artificial
  probe
  misc_feature (1)..(25): SEQ ID NO: 6733; WAN024F68; Start 25; Stop 49
caacaagataatcgtacatctgaag

SEQ ID NO: 447617 - DNA, 25 bp, Artificial
  probe
  misc_feature (1)..(25): SEQ ID NO: 6733; WAN024F68; Start 32; Stop 56
ataatcgtacatctgaagctccttt

SEQ ID NO: 447618 - DNA, 25 bp, Artificial
  probe
  misc_feature (1)..(25): SEQ ID NO: 6733; WAN024F68; Start 10; Stop 34
agagaccagcaccaacaacaagata

SEQ ID NO: 447619 - DNA, 25 bp, Artificial
  probe
  misc_feature (1)..(25): SEQ ID NO: 6733; WAN024F68; Start 33; Stop 57
taatcgtacatctgaagctcctttg

SEQ ID NO: 447620 - DNA, 25 bp, Artificial
  probe
  misc_feature (1)..(25): SEQ ID NO: 6733; WAN024F68; Start 52; Stop 76
cctttggagttcattatctgcctct

SEQ ID NO: 447621 - DNA, 25 bp, Artificial
  probe
  misc_feature (1)..(25): SEQ ID NO: 6733; WAN024F68; Start 51; Stop 75
tcctttggagttcattatctgcctc

SEQ ID NO: 447622 - DNA, 25 bp, Artificial
  probe
  misc_feature (1)..(25): SEQ ID NO: 6733; WAN024F68; Start 9; Stop 33
aagagaccagcaccaacaacaagat

SEQ ID NO: 447623 - DNA, 25 bp, Artificial
  probe
  misc_feature (1)..(25): SEQ ID NO: 6733; WAN024F68; Start 56; Stop 80
tggagttcattatctgcctctttta

SEQ ID NO: 447624 - DNA, 25 bp, Artificial
  probe
  misc_feature (1)..(25): SEQ ID NO: 6733; WAN024F68; Start 55; Stop 79
ttggagttcattatctgcctctttt

SEQ ID NO: 447625 - DNA, 25 bp, Artificial
  probe
  misc_feature (1)..(25): SEQ ID NO: 6733; WAN024F68; Start 34; Stop 58
aatcgtacatctgaagctcctttgg

SEQ ID NO: 447626 - DNA, 25 bp, Artificial
  probe
  misc_feature (1)..(25): SEQ ID NO: 6733; WAN024F68; Start 57; Stop 81
ggagttcattatctgcctcttttat

SEQ ID NO: 447627 - DNA, 25 bp, Artificial
  probe
  misc_feature (1)..(25): SEQ ID NO: 6734; WAN024BNU; Start 89; Stop 113
ctcgcttaatccaccataaacaaag

SEQ ID NO: 447628 - DNA, 25 bp, Artificial
  probe
  misc_feature (1)..(25): SEQ ID NO: 6734; WAN024BNU; Start 85; Stop 109
tttcctcgcttaatccaccataaac

SEQ ID NO: 447629 - DNA, 25 bp, Artificial
  probe
  misc_feature (1)..(25): SEQ ID NO: 6734; WAN024BNU; Start 88; Stop 112
cctcgcttaatccaccataaacaaa

SEQ ID NO: 447630 - DNA, 25 bp, Artificial
  probe
  misc_feature (1)..(25): SEQ ID NO: 6734; WAN024BNU; Start 90; Stop 114
tcgcttaatccaccataaacaaagg

SEQ ID NO: 447631 - DNA, 25 bp, Artificial
  probe
  misc_feature (1)..(25): SEQ ID NO: 6734; WAN024BNU; Start 87; Stop 111
tcctcgcttaatccaccataaacaa

SEQ ID NO: 447632 - DNA, 25 bp, Artificial
  probe
  misc_feature (1)..(25): SEQ ID NO: 6734; WAN024BNU; Start 86; Stop 110
ttcctcgcttaatccaccataaaca

SEQ ID NO: 447633 - DNA, 25 bp, Artificial
  probe
  misc_feature (1)..(25): SEQ ID NO: 6734; WAN024BNU; Start 32; Stop 56
acttcaatcactttaaacctcctct

SEQ ID NO: 447634 - DNA, 25 bp, Artificial
  probe
  misc_feature (1)..(25): SEQ ID NO: 6734; WAN024BNU; Start 60; Stop 84
tcaaactctaatctataatgccctt

SEQ ID NO: 447635 - DNA, 25 bp, Artificial
  probe
  misc_feature (1)..(25): SEQ ID NO: 6734; WAN024BNU; Start 31; Stop 55
aacttcaatcactttaaacctcctc

SEQ ID NO: 447636 - DNA, 25 bp, Artificial
  probe
  misc_feature (1)..(25): SEQ ID NO: 6734; WAN024BNU; Start 59; Stop 83
atcaaactctaatctataatgccct

SEQ ID NO: 447637 - DNA, 25 bp, Artificial
  probe
  misc_feature (1)..(25): SEQ ID NO: 6734; WAN024BNU; Start 91; Stop 115
cgcttaatccaccataaacaaagga

SEQ ID NO: 447638 - DNA, 25 bp, Artificial
  probe
  misc_feature (1)..(25): SEQ ID NO: 6734; WAN024BNU; Start 33; Stop 57
cttcaatcactttaaacctcctcta

SEQ ID NO: 447639 - DNA, 25 bp, Artificial
  probe
  misc_feature (1)..(25): SEQ ID NO: 6734; WAN024BNU; Start 61; Stop 85
caaactctaatctataatgcccttt

SEQ ID NO: 447640 - DNA, 25 bp, Artificial
  probe
  misc_feature (1)..(25): SEQ ID NO: 6734; WAN024BNU; Start 48; Stop 72
acctcctctatatcaaactctaatc

SEQ ID NO: 447641 - DNA, 25 bp, Artificial
  probe
  misc_feature (1)..(25): SEQ ID NO: 6734; WAN024BNU; Start 30; Stop 54
taacttcaatcactttaaacctcct

SEQ ID NO: 447642 - DNA, 25 bp, Artificial
  probe
  misc_feature (1)..(25): SEQ ID NO: 6734; WAN024BNU; Start 98; Stop 122
tccaccataaacaaaggataacttt

SEQ ID NO: 447643 - DNA, 25 bp, Artificial
  probe
  misc_feature (1)..(25): SEQ ID NO: 6734; WAN024BNU; Start 34; Stop 58
ttcaatcactttaaacctcctctat

SEQ ID NO: 447644 - DNA, 25 bp, Artificial
  probe
  misc_feature (1)..(25): SEQ ID NO: 6734; WAN024BNU; Start 49; Stop 73
cctcctctatatcaaactctaatct

SEQ ID NO: 447645 - DNA, 25 bp, Artificial
  probe
  misc_feature (1)..(25): SEQ ID NO: 6734; WAN024BNU; Start 46; Stop 70
aaacctcctctatatcaaactctaa

SEQ ID NO: 447646 - DNA, 25 bp, Artificial
  probe
  misc_feature (1)..(25): SEQ ID NO: 6734; WAN024BNU; Start 84; Stop 108
ttttcctcgcttaatccaccataaa

SEQ ID NO: 447647 - DNA, 25 bp, Artificial
  probe
  misc_feature (1)..(25): SEQ ID NO: 6734; WAN024BNU; Start 44; Stop 68
ttaaacctcctctatatcaaactct

SEQ ID NO: 447648 - DNA, 25 bp, Artificial
  probe
  misc_feature (1)..(25): SEQ ID NO: 6734; WAN024BNU; Start 47; Stop 71
aacctcctctatatcaaactctaat

SEQ ID NO: 447649 - DNA, 25 bp, Artificial
  probe
  misc_feature (1)..(25): SEQ ID NO: 6734; WAN024BNU; Start 29; Stop 53
ttaacttcaatcactttaaacctcc

SEQ ID NO: 447650 - DNA, 25 bp, Artificial
  probe
  misc_feature (1)..(25): SEQ ID NO: 6734; WAN024BNU; Start 39; Stop 63
tcactttaaacctcctctatatcaa

SEQ ID NO: 447651 - DNA, 25 bp, Artificial
  probe
  misc_feature (1)..(25): SEQ ID NO: 6734; WAN024BNU; Start 35; Stop 59
tcaatcactttaaacctcctctata

SEQ ID NO: 447652 - DNA, 25 bp, Artificial
  probe
  misc_feature (1)..(25): SEQ ID NO: 6734; WAN024BNU; Start 58; Stop 82
tatcaaactctaatctataatgccc

SEQ ID NO: 447653 - DNA, 25 bp, Artificial
  probe
  misc_feature (1)..(25): SEQ ID NO: 6734; WAN024BNU; Start 38; Stop 62
atcactttaaacctcctctatatca

SEQ ID NO: 447654 - DNA, 25 bp, Artificial
  probe
  misc_feature (1)..(25): SEQ ID NO: 6734; WAN024BNU; Start 92; Stop 116
gcttaatccaccataaacaaaggat

SEQ ID NO: 447655 - DNA, 25 bp, Artificial
  probe
  misc_feature (1)..(25): SEQ ID NO: 6734; WAN024BNU; Start 45; Stop 69
taaacctcctctatatcaaactcta

SEQ ID NO: 447656 - DNA, 25 bp, Artificial
  probe
  misc_feature (1)..(25): SEQ ID NO: 6734; WAN024BNU; Start 97; Stop 121
atccaccataaacaaaggataactt

SEQ ID NO: 447657 - DNA, 25 bp, Artificial
  probe
  misc_feature (1)..(25): SEQ ID NO: 6734; WAN024BNU; Start 96; Stop 120
aatccaccataaacaaaggataact

SEQ ID NO: 447658 - DNA, 25 bp, Artificial
  probe
  misc_feature (1)..(25): SEQ ID NO: 6734; WAN024BNU; Start 41; Stop 65
actttaaacctcctctatatcaaac

SEQ ID NO: 447659 - DNA, 25 bp, Artificial
  probe
  misc_feature (1)..(25): SEQ ID NO: 6734; WAN024BNU; Start 40; Stop 64
cactttaaacctcctctatatcaaa

SEQ ID NO: 447660 - DNA, 25 bp, Artificial
  probe
  misc_feature (1)..(25): SEQ ID NO: 6735; WAN024CTQ; Start 316; Stop 340
ctatcttctccactatctaccacag

SEQ ID NO: 447661 - DNA, 25 bp, Artificial
  probe
  misc_feature (1)..(25): SEQ ID NO: 6735; WAN024CTQ; Start 315; Stop 339
gctatcttctccactatctaccaca

SEQ ID NO: 447662 - DNA, 25 bp, Artificial
  probe
  misc_feature (1)..(25): SEQ ID NO: 6735; WAN024CTQ; Start 242; Stop 266
ccttagtcaagtggatacggtattc

SEQ ID NO: 447663 - DNA, 25 bp, Artificial
  probe
  misc_feature (1)..(25): SEQ ID NO: 6735; WAN024CTQ; Start 317; Stop 341
tatcttctccactatctaccacagt

SEQ ID NO: 447664 - DNA, 25 bp, Artificial
  probe
  misc_feature (1)..(25): SEQ ID NO: 6735; WAN024CTQ; Start 318; Stop 342
atcttctccactatctaccacagtt

SEQ ID NO: 447665 - DNA, 25 bp, Artificial
  probe
  misc_feature (1)..(25): SEQ ID NO: 6735; WAN024CTQ; Start 321; Stop 345
ttctccactatctaccacagttgaa

SEQ ID NO: 447666 - DNA, 25 bp, Artificial
  probe
  misc_feature (1)..(25): SEQ ID NO: 6735; WAN024CTQ; Start 322; Stop 346
tctccactatctaccacagttgaag

SEQ ID NO: 447667 - DNA, 25 bp, Artificial
  probe
  misc_feature (1)..(25): SEQ ID NO: 6735; WAN024CTQ; Start 320; Stop 344
cttctccactatctaccacagttga

SEQ ID NO: 447668 - DNA, 25 bp, Artificial
  probe
  misc_feature (1)..(25): SEQ ID NO: 6735; WAN024CTQ; Start 319; Stop 343
tcttctccactatctaccacagttg

SEQ ID NO: 447669 - DNA, 25 bp, Artificial
  probe
  misc_feature (1)..(25): SEQ ID NO: 6735; WAN024CTQ; Start 243; Stop 267
cttagtcaagtggatacggtattcc

SEQ ID NO: 447670 - DNA, 25 bp, Artificial
  probe
  misc_feature (1)..(25): SEQ ID NO: 6735; WAN024CTQ; Start 314; Stop 338
agctatcttctccactatctaccac

SEQ ID NO: 447671 - DNA, 25 bp, Artificial
  probe
  misc_feature (1)..(25): SEQ ID NO: 6735; WAN024CTQ; Start 245; Stop 269
tagtcaagtggatacggtattcctt

SEQ ID NO: 447672 - DNA, 25 bp, Artificial
  probe
  misc_feature (1)..(25): SEQ ID NO: 6735; WAN024CTQ; Start 244; Stop 268
ttagtcaagtggatacggtattcct

SEQ ID NO: 447673 - DNA, 25 bp, Artificial
  probe
  misc_feature (1)..(25): SEQ ID NO: 6735; WAN024CTQ; Start 241; Stop 265
tccttagtcaagtggatacggtatt

SEQ ID NO: 447674 - DNA, 25 bp, Artificial
  probe
  misc_feature (1)..(25): SEQ ID NO: 6735; WAN024CTQ; Start 240; Stop 264
ttccttagtcaagtggatacggtat

SEQ ID NO: 447675 - DNA, 25 bp, Artificial
  probe
  misc_feature (1)..(25): SEQ ID NO: 6735; WAN024CTQ; Start 313; Stop 337
aagctatcttctccactatctacca

SEQ ID NO: 447676 - DNA, 25 bp, Artificial
  probe
  misc_feature (1)..(25): SEQ ID NO: 6735; WAN024CTQ; Start 329; Stop 353
tatctaccacagttgaagctacttg

SEQ ID NO: 447677 - DNA, 25 bp, Artificial
  probe
  misc_feature (1)..(25): SEQ ID NO: 6735; WAN024CTQ; Start 328; Stop 352
ctatctaccacagttgaagctactt

SEQ ID NO: 447678 - DNA, 25 bp, Artificial
  probe
  misc_feature (1)..(25): SEQ ID NO: 6735; WAN024CTQ; Start 327; Stop 351
actatctaccacagttgaagctact

SEQ ID NO: 447679 - DNA, 25 bp, Artificial
  probe
  misc_feature (1)..(25): SEQ ID NO: 6735; WAN024CTQ; Start 326; Stop 350
cactatctaccacagttgaagctac

SEQ ID NO: 447680 - DNA, 25 bp, Artificial
  probe
  misc_feature (1)..(25): SEQ ID NO: 6735; WAN024CTQ; Start 253; Stop 277
tggatacggtattccttgacttgtt

SEQ ID NO: 447681 - DNA, 25 bp, Artificial
  probe
  misc_feature (1)..(25): SEQ ID NO: 6735; WAN024CTQ; Start 323; Stop 347
ctccactatctaccacagttgaagc

SEQ ID NO: 447682 - DNA, 25 bp, Artificial
  probe
  misc_feature (1)..(25): SEQ ID NO: 6735; WAN024CTQ; Start 107; Stop 131
ctacacgagtttcacctagatacag

SEQ ID NO: 447683 - DNA, 25 bp, Artificial
  probe
  misc_feature (1)..(25): SEQ ID NO: 6735; WAN024CTQ; Start 330; Stop 354
atctaccacagttgaagctacttga

SEQ ID NO: 447684 - DNA, 25 bp, Artificial
  probe
  misc_feature (1)..(25): SEQ ID NO: 6735; WAN024CTQ; Start 118; Stop 142
tcacctagatacagtgttgaatctt

SEQ ID NO: 447685 - DNA, 25 bp, Artificial
  probe
  misc_feature (1)..(25): SEQ ID NO: 6735; WAN024CTQ; Start 149; Stop 173
caactgtcttgtatgccaaatcttt

SEQ ID NO: 447686 - DNA, 25 bp, Artificial
  probe
  misc_feature (1)..(25): SEQ ID NO: 6735; WAN024CTQ; Start 325; Stop 349
ccactatctaccacagttgaagcta

SEQ ID NO: 447687 - DNA, 25 bp, Artificial
  probe
  misc_feature (1)..(25): SEQ ID NO: 6735; WAN024CTQ; Start 108; Stop 132
tacacgagtttcacctagatacagt

SEQ ID NO: 447688 - DNA, 25 bp, Artificial
  probe
  misc_feature (1)..(25): SEQ ID NO: 6735; WAN024CTQ; Start 251; Stop 275
agtggatacggtattccttgacttg

SEQ ID NO: 447689 - DNA, 25 bp, Artificial
  probe
  misc_feature (1)..(25): SEQ ID NO: 6735; WAN024CTQ; Start 148; Stop 172
tcaactgtcttgtatgccaaatctt

SEQ ID NO: 447690 - DNA, 25 bp, Artificial
  probe
  misc_feature (1)..(25): SEQ ID NO: 6735; WAN024CTQ; Start 145; Stop 169
ttctcaactgtcttgtatgccaaat

SEQ ID NO: 447691 - DNA, 25 bp, Artificial
  probe
  misc_feature (1)..(25): SEQ ID NO: 6735; WAN024CTQ; Start 144; Stop 168
tttctcaactgtcttgtatgccaaa

SEQ ID NO: 447692 - DNA, 25 bp, Artificial
  probe
  misc_feature (1)..(25): SEQ ID NO: 6735; WAN024CTQ; Start 252; Stop 276
gtggatacggtattccttgacttgt

SEQ ID NO: 447693 - DNA, 25 bp, Artificial
  probe
  misc_feature (1)..(25): SEQ ID NO: 6736; WAN024BC6; Start 94; Stop 118
caggtaattgataactctcttgctt

SEQ ID NO: 447694 - DNA, 25 bp, Artificial
  probe
  misc_feature (1)..(25): SEQ ID NO: 6736; WAN024BC6; Start 104; Stop 128
ataactctcttgctttcatccaaac

SEQ ID NO: 447695 - DNA, 25 bp, Artificial
  probe
  misc_feature (1)..(25): SEQ ID NO: 6736; WAN024BC6; Start 103; Stop 127
gataactctcttgctttcatccaaa

SEQ ID NO: 447696 - DNA, 25 bp, Artificial
  probe
  misc_feature (1)..(25): SEQ ID NO: 6736; WAN024BC6; Start 102; Stop 126
tgataactctcttgctttcatccaa

SEQ ID NO: 447697 - DNA, 25 bp, Artificial
  probe
  misc_feature (1)..(25): SEQ ID NO: 6736; WAN024BC6; Start 101; Stop 125
ttgataactctcttgctttcatcca

SEQ ID NO: 447698 - DNA, 25 bp, Artificial
  probe
  misc_feature (1)..(25): SEQ ID NO: 6736; WAN024BC6; Start 100; Stop 124
attgataactctcttgctttcatcc

SEQ ID NO: 447699 - DNA, 25 bp, Artificial
  probe
  misc_feature (1)..(25): SEQ ID NO: 6736; WAN024BC6; Start 105; Stop 129
taactctcttgctttcatccaaacc

SEQ ID NO: 447700 - DNA, 25 bp, Artificial
  probe
  misc_feature (1)..(25): SEQ ID NO: 6736; WAN024BC6; Start 95; Stop 119
aggtaattgataactctcttgcttt

SEQ ID NO: 447701 - DNA, 25 bp, Artificial
  probe
  misc_feature (1)..(25): SEQ ID NO: 6736; WAN024BC6; Start 96; Stop 120
ggtaattgataactctcttgctttc

SEQ ID NO: 447702 - DNA, 25 bp, Artificial
  probe
  misc_feature (1)..(25): SEQ ID NO: 6736; WAN024BC6; Start 93; Stop 117
gcaggtaattgataactctcttgct

SEQ ID NO: 447703 - DNA, 25 bp, Artificial
  probe
  misc_feature (1)..(25): SEQ ID NO: 6736; WAN024BC6; Start 133; Stop 157
aatttgctgagagaaataggcgatg

SEQ ID NO: 447704 - DNA, 25 bp, Artificial
  probe
  misc_feature (1)..(25): SEQ ID NO: 6736; WAN024BC6; Start 132; Stop 156
caatttgctgagagaaataggcgat

SEQ ID NO: 447705 - DNA, 25 bp, Artificial
  probe
  misc_feature (1)..(25): SEQ ID NO: 6736; WAN024BC6; Start 99; Stop 123
aattgataactctcttgctttcatc

SEQ ID NO: 447706 - DNA, 25 bp, Artificial
  probe
  misc_feature (1)..(25): SEQ ID NO: 6736; WAN024BC6; Start 97; Stop 121
gtaattgataactctcttgctttca

SEQ ID NO: 447707 - DNA, 25 bp, Artificial
  probe
  misc_feature (1)..(25): SEQ ID NO: 6736; WAN024BC6; Start 181; Stop 205
ttgtcctttagttggctcaagactt

SEQ ID NO: 447708 - DNA, 25 bp, Artificial
  probe
  misc_feature (1)..(25): SEQ ID NO: 6736; WAN024BC6; Start 111; Stop 135
tcttgctttcatccaaaccctcaat

SEQ ID NO: 447709 - DNA, 25 bp, Artificial
  probe
  misc_feature (1)..(25): SEQ ID NO: 6736; WAN024BC6; Start 131; Stop 155
tcaatttgctgagagaaataggcga

SEQ ID NO: 447710 - DNA, 25 bp, Artificial
  probe
  misc_feature (1)..(25): SEQ ID NO: 6736; WAN024BC6; Start 182; Stop 206
tgtcctttagttggctcaagacttc

SEQ ID NO: 447711 - DNA, 25 bp, Artificial
  probe
  misc_feature (1)..(25): SEQ ID NO: 6736; WAN024BC6; Start 92; Stop 116
tgcaggtaattgataactctcttgc

SEQ ID NO: 447712 - DNA, 25 bp, Artificial
  probe
  misc_feature (1)..(25): SEQ ID NO: 6736; WAN024BC6; Start 35; Stop 59
aactctgcaatcgaagtcgtagaac

SEQ ID NO: 447713 - DNA, 25 bp, Artificial
  probe
  misc_feature (1)..(25): SEQ ID NO: 6736; WAN024BC6; Start 34; Stop 58
caactctgcaatcgaagtcgtagaa

SEQ ID NO: 447714 - DNA, 25 bp, Artificial
  probe
  misc_feature (1)..(25): SEQ ID NO: 6736; WAN024BC6; Start 185; Stop 209
cctttagttggctcaagacttcctg

SEQ ID NO: 447715 - DNA, 25 bp, Artificial
  probe
  misc_feature (1)..(25): SEQ ID NO: 6736; WAN024BC6; Start 184; Stop 208
tcctttagttggctcaagacttcct

SEQ ID NO: 447716 - DNA, 25 bp, Artificial
  probe
  misc_feature (1)..(25): SEQ ID NO: 6736; WAN024BC6; Start 110; Stop 134
ctcttgctttcatccaaaccctcaa

SEQ ID NO: 447717 - DNA, 25 bp, Artificial
  probe
  misc_feature (1)..(25): SEQ ID NO: 6736; WAN024BC6; Start 106; Stop 130
aactctcttgctttcatccaaaccc

SEQ ID NO: 447718 - DNA, 25 bp, Artificial
  probe
  misc_feature (1)..(25): SEQ ID NO: 6736; WAN024BC6; Start 108; Stop 132
ctctcttgctttcatccaaaccctc

SEQ ID NO: 447719 - DNA, 25 bp, Artificial
  probe
  misc_feature (1)..(25): SEQ ID NO: 6736; WAN024BC6; Start 183; Stop 207
gtcctttagttggctcaagacttcc

SEQ ID NO: 447720 - DNA, 25 bp, Artificial
  probe
  misc_feature (1)..(25): SEQ ID NO: 6736; WAN024BC6; Start 98; Stop 122
taattgataactctcttgctttcat

SEQ ID NO: 447721 - DNA, 25 bp, Artificial
  probe
  misc_feature (1)..(25): SEQ ID NO: 6736; WAN024BC6; Start 198; Stop 222
caagacttcctgcaatcaagttgag

SEQ ID NO: 447722 - DNA, 25 bp, Artificial
  probe
  misc_feature (1)..(25): SEQ ID NO: 6736; WAN024BC6; Start 196; Stop 220
ctcaagacttcctgcaatcaagttg

SEQ ID NO: 447723 - DNA, 25 bp, Artificial
  probe
  misc_feature (1)..(25): SEQ ID NO: 6736; WAN024BC6; Start 169; Stop 193
cccaatcacaacttgtcctttagtt

SEQ ID NO: 447724 - DNA, 25 bp, Artificial
  probe
  misc_feature (1)..(25): SEQ ID NO: 6736; WAN024BC6; Start 116; Stop 140
ctttcatccaaaccctcaatttgct

SEQ ID NO: 447725 - DNA, 25 bp, Artificial
  probe
  misc_feature (1)..(25): SEQ ID NO: 6736; WAN024BC6; Start 197; Stop 221
tcaagacttcctgcaatcaagttga

SEQ ID NO: 447726 - DNA, 25 bp, Artificial
  probe
  misc_feature (1)..(25): SEQ ID NO: 6737; WAN024BC7; Start 133; Stop 157
aatttgttgagagaaataggcgatg

SEQ ID NO: 447727 - DNA, 25 bp, Artificial
  probe
  misc_feature (1)..(25): SEQ ID NO: 6737; WAN024BC7; Start 132; Stop 156
caatttgttgagagaaataggcgat

SEQ ID NO: 447728 - DNA, 25 bp, Artificial
  probe
  misc_feature (1)..(25): SEQ ID NO: 6737; WAN024BC7; Start 134; Stop 158
atttgttgagagaaataggcgatgc

SEQ ID NO: 447729 - DNA, 25 bp, Artificial
  probe
  misc_feature (1)..(25): SEQ ID NO: 6737; WAN024BC7; Start 116; Stop 140
ctttcatccaaaccctcaatttgtt

SEQ ID NO: 447730 - DNA, 25 bp, Artificial
  probe
  misc_feature (1)..(25): SEQ ID NO: 6737; WAN024BC7; Start 117; Stop 141
tttcatccaaaccctcaatttgttg

SEQ ID NO: 447731 - DNA, 25 bp, Artificial
  probe
  misc_feature (1)..(25): SEQ ID NO: 6737; WAN024BC7; Start 131; Stop 155
tcaatttgttgagagaaataggcga

SEQ ID NO: 447732 - DNA, 25 bp, Artificial
  probe
  misc_feature (1)..(25): SEQ ID NO: 6737; WAN024BC7; Start 118; Stop 142
ttcatccaaaccctcaatttgttga

SEQ ID NO: 447733 - DNA, 25 bp, Artificial
  probe
  misc_feature (1)..(25): SEQ ID NO: 6737; WAN024BC7; Start 135; Stop 159
tttgttgagagaaataggcgatgcg

SEQ ID NO: 447734 - DNA, 25 bp, Artificial
  probe
  misc_feature (1)..(25): SEQ ID NO: 6737; WAN024BC7; Start 115; Stop 139
gctttcatccaaaccctcaatttgt

SEQ ID NO: 447735 - DNA, 25 bp, Artificial
  probe
  misc_feature (1)..(25): SEQ ID NO: 6737; WAN024BC7; Start 138; Stop 162
gttgagagaaataggcgatgcgaac

SEQ ID NO: 447736 - DNA, 25 bp, Artificial
  probe
  misc_feature (1)..(25): SEQ ID NO: 6737; WAN024BC7; Start 111; Stop 135
gcttgctttcatccaaaccctcaat

SEQ ID NO: 447737 - DNA, 25 bp, Artificial
  probe
  misc_feature (1)..(25): SEQ ID NO: 6737; WAN024BC7; Start 139; Stop 163
ttgagagaaataggcgatgcgaaca

SEQ ID NO: 447738 - DNA, 25 bp, Artificial
  probe
  misc_feature (1)..(25): SEQ ID NO: 6737; WAN024BC7; Start 137; Stop 161
tgttgagagaaataggcgatgcgaa

SEQ ID NO: 447739 - DNA, 25 bp, Artificial
  probe
  misc_feature (1)..(25): SEQ ID NO: 6737; WAN024BC7; Start 136; Stop 160
ttgttgagagaaataggcgatgcga

SEQ ID NO: 447740 - DNA, 25 bp, Artificial
  probe
  misc_feature (1)..(25): SEQ ID NO: 6737; WAN024BC7; Start 98; Stop 122
taattgatcacacgcttgctttcat

SEQ ID NO: 447741 - DNA, 25 bp, Artificial
  probe
  misc_feature (1)..(25): SEQ ID NO: 6737; WAN024BC7; Start 43; Stop 67
gatggaagtcgtagaaccaccactg

SEQ ID NO: 447742 - DNA, 25 bp, Artificial
  probe
  misc_feature (1)..(25): SEQ ID NO: 6737; WAN024BC7; Start 35; Stop 59
aactcagcgatggaagtcgtagaac

SEQ ID NO: 447743 - DNA, 25 bp, Artificial
  probe
  misc_feature (1)..(25): SEQ ID NO: 6737; WAN024BC7; Start 34; Stop 58
caactcagcgatggaagtcgtagaa

SEQ ID NO: 447744 - DNA, 25 bp, Artificial
  probe
  misc_feature (1)..(25): SEQ ID NO: 6737; WAN024BC7; Start 94; Stop 118
caggtaattgatcacacgcttgctt

SEQ ID NO: 447745 - DNA, 25 bp, Artificial
  probe
  misc_feature (1)..(25): SEQ ID NO: 6737; WAN024BC7; Start 104; Stop 128
atcacacgcttgctttcatccaaac

SEQ ID NO: 447746 - DNA, 25 bp, Artificial
  probe
  misc_feature (1)..(25): SEQ ID NO: 6737; WAN024BC7; Start 97; Stop 121
gtaattgatcacacgcttgctttca

SEQ ID NO: 447747 - DNA, 25 bp, Artificial
  probe
  misc_feature (1)..(25): SEQ ID NO: 6737; WAN024BC7; Start 103; Stop 127
gatcacacgcttgctttcatccaaa

SEQ ID NO: 447748 - DNA, 25 bp, Artificial
  probe
  misc_feature (1)..(25): SEQ ID NO: 6737; WAN024BC7; Start 201; Stop 225
gacttcctgcaatcaggttaagtag

SEQ ID NO: 447749 - DNA, 25 bp, Artificial
  probe
  misc_feature (1)..(25): SEQ ID NO: 6737; WAN024BC7; Start 200; Stop 224
agacttcctgcaatcaggttaagta

SEQ ID NO: 447750 - DNA, 25 bp, Artificial
  probe
  misc_feature (1)..(25): SEQ ID NO: 6737; WAN024BC7; Start 99; Stop 123
aattgatcacacgcttgctttcatc

SEQ ID NO: 447751 - DNA, 25 bp, Artificial
  probe
  misc_feature (1)..(25): SEQ ID NO: 6737; WAN024BC7; Start 96; Stop 120
ggtaattgatcacacgcttgctttc

SEQ ID NO: 447752 - DNA, 25 bp, Artificial
  probe
  misc_feature (1)..(25): SEQ ID NO: 6737; WAN024BC7; Start 198; Stop 222
caagacttcctgcaatcaggttaag

SEQ ID NO: 447753 - DNA, 25 bp, Artificial
  probe
  misc_feature (1)..(25): SEQ ID NO: 6737; WAN024BC7; Start 199; Stop 223
aagacttcctgcaatcaggttaagt

SEQ ID NO: 447754 - DNA, 25 bp, Artificial
  probe
  misc_feature (1)..(25): SEQ ID NO: 6737; WAN024BC7; Start 197; Stop 221
tcaagacttcctgcaatcaggttaa

SEQ ID NO: 447755 - DNA, 25 bp, Artificial
  probe
  misc_feature (1)..(25): SEQ ID NO: 6737; WAN024BC7; Start 95; Stop 119
aggtaattgatcacacgcttgcttt

SEQ ID NO: 447756 - DNA, 25 bp, Artificial
  probe
  misc_feature (1)..(25): SEQ ID NO: 6737; WAN024BC7; Start 196; Stop 220
ctcaagacttcctgcaatcaggtta

SEQ ID NO: 447757 - DNA, 25 bp, Artificial
  probe
  misc_feature (1)..(25): SEQ ID NO: 6737; WAN024BC7; Start 164; Stop 188
gtttccccaatcacaacttgtcctg

SEQ ID NO: 447758 - DNA, 25 bp, Artificial
  probe
  misc_feature (1)..(25): SEQ ID NO: 6737; WAN024BC7; Start 100; Stop 124
attgatcacacgcttgctttcatcc

SEQ ID NO: 447759 - DNA, 25 bp, Artificial
  probe
  misc_feature (1)..(25): SEQ ID NO: 6738; WAN024BWV; Start 57; Stop 81
gaaattgtcaagcgattggaggaaa

SEQ ID NO: 447760 - DNA, 25 bp, Artificial
  probe
  misc_feature (1)..(25): SEQ ID NO: 6738; WAN024BWV; Start 43; Stop 67
gttagatcctttcggaaattgtcaa

SEQ ID NO: 447761 - DNA, 25 bp, Artificial
  probe
  misc_feature (1)..(25): SEQ ID NO: 6738; WAN024BWV; Start 44; Stop 68
ttagatcctttcggaaattgtcaag

SEQ ID NO: 447762 - DNA, 25 bp, Artificial
  probe
  misc_feature (1)..(25): SEQ ID NO: 6738; WAN024BWV; Start 42; Stop 66
ggttagatcctttcggaaattgtca

SEQ ID NO: 447763 - DNA, 25 bp, Artificial
  probe
  misc_feature (1)..(25): SEQ ID NO: 6738; WAN024BWV; Start 41; Stop 65
tggttagatcctttcggaaattgtc

SEQ ID NO: 447764 - DNA, 25 bp, Artificial
  probe
  misc_feature (1)..(25): SEQ ID NO: 6738; WAN024BWV; Start 38; Stop 62
ctgtggttagatcctttcggaaatt

SEQ ID NO: 447765 - DNA, 25 bp, Artificial
  probe
  misc_feature (1)..(25): SEQ ID NO: 6738; WAN024BWV; Start 45; Stop 69
tagatcctttcggaaattgtcaagc

SEQ ID NO: 447766 - DNA, 25 bp, Artificial
  probe
  misc_feature (1)..(25): SEQ ID NO: 6738; WAN024BWV; Start 40; Stop 64
gtggttagatcctttcggaaattgt

SEQ ID NO: 447767 - DNA, 25 bp, Artificial
  probe
  misc_feature (1)..(25): SEQ ID NO: 6738; WAN024BWV; Start 39; Stop 63
tgtggttagatcctttcggaaattg

SEQ ID NO: 447768 - DNA, 25 bp, Artificial
  probe
  misc_feature (1)..(25): SEQ ID NO: 6738; WAN024BWV; Start 56; Stop 80
ggaaattgtcaagcgattggaggaa

SEQ ID NO: 447769 - DNA, 25 bp, Artificial
  probe
  misc_feature (1)..(25): SEQ ID NO: 6738; WAN024BWV; Start 37; Stop 61
gctgtggttagatcctttcggaaat

SEQ ID NO: 447770 - DNA, 25 bp, Artificial
  probe
  misc_feature (1)..(25): SEQ ID NO: 6738; WAN024BWV; Start 10; Stop 34
caaactcatgaccaattgaaacaaa

SEQ ID NO: 447771 - DNA, 25 bp, Artificial
  probe
  misc_feature (1)..(25): SEQ ID NO: 6738; WAN024BWV; Start 3; Stop 27
gcgttatcaaactcatgaccaattg

SEQ ID NO: 447772 - DNA, 25 bp, Artificial
  probe
  misc_feature (1)..(25): SEQ ID NO: 6738; WAN024BWV; Start 1; Stop 25
atgcgttatcaaactcatgaccaat

SEQ ID NO: 447773 - DNA, 25 bp, Artificial
  probe
  misc_feature (1)..(25): SEQ ID NO: 6738; WAN024BWV; Start 2; Stop 26
tgcgttatcaaactcatgaccaatt

SEQ ID NO: 447774 - DNA, 25 bp, Artificial
  probe
  misc_feature (1)..(25): SEQ ID NO: 6738; WAN024BWV; Start 48; Stop 72
atcctttcggaaattgtcaagcgat

SEQ ID NO: 447775 - DNA, 25 bp, Artificial
  probe
  misc_feature (1)..(25): SEQ ID NO: 6738; WAN024BWV; Start 51; Stop 75
ctttcggaaattgtcaagcgattgg

SEQ ID NO: 447776 - DNA, 25 bp, Artificial
  probe
  misc_feature (1)..(25): SEQ ID NO: 6738; WAN024BWV; Start 50; Stop 74
cctttcggaaattgtcaagcgattg

SEQ ID NO: 447777 - DNA, 25 bp, Artificial
  probe
  misc_feature (1)..(25): SEQ ID NO: 6738; WAN024BWV; Start 46; Stop 70
agatcctttcggaaattgtcaagcg

SEQ ID NO: 447778 - DNA, 25 bp, Artificial
  probe
  misc_feature (1)..(25): SEQ ID NO: 6738; WAN024BWV; Start 49; Stop 73
tcctttcggaaattgtcaagcgatt

SEQ ID NO: 447779 - DNA, 25 bp, Artificial
  probe
  misc_feature (1)..(25): SEQ ID NO: 6738; WAN024BWV; Start 52; Stop 76
tttcggaaattgtcaagcgattgga

SEQ ID NO: 447780 - DNA, 25 bp, Artificial
  probe
  misc_feature (1)..(25): SEQ ID NO: 6738; WAN024BWV; Start 47; Stop 71
gatcctttcggaaattgtcaagcga

SEQ ID NO: 447781 - DNA, 25 bp, Artificial
  probe
  misc_feature (1)..(25): SEQ ID NO: 6738; WAN024BWV; Start 4; Stop 28
cgttatcaaactcatgaccaattga

SEQ ID NO: 447782 - DNA, 25 bp, Artificial
  probe
  misc_feature (1)..(25): SEQ ID NO: 6738; WAN024BWV; Start 9; Stop 33
tcaaactcatgaccaattgaaacaa

SEQ ID NO: 447783 - DNA, 25 bp, Artificial
  probe
  misc_feature (1)..(25): SEQ ID NO: 6738; WAN024BWV; Start 8; Stop 32
atcaaactcatgaccaattgaaaca

SEQ ID NO: 447784 - DNA, 25 bp, Artificial
  probe
  misc_feature (1)..(25): SEQ ID NO: 6738; WAN024BWV; Start 36; Stop 60
agctgtggttagatcctttcggaaa

SEQ ID NO: 447785 - DNA, 25 bp, Artificial
  probe
  misc_feature (1)..(25): SEQ ID NO: 6738; WAN024BWV; Start 35; Stop 59
aagctgtggttagatcctttcggaa

SEQ ID NO: 447786 - DNA, 25 bp, Artificial
  probe
  misc_feature (1)..(25): SEQ ID NO: 6738; WAN024BWV; Start 53; Stop 77
ttcggaaattgtcaagcgattggag

SEQ ID NO: 447787 - DNA, 25 bp, Artificial
  probe
  misc_feature (1)..(25): SEQ ID NO: 6738; WAN024BWV; Start 34; Stop 58
aaagctgtggttagatcctttcgga

SEQ ID NO: 447788 - DNA, 25 bp, Artificial
  probe
  misc_feature (1)..(25): SEQ ID NO: 6738; WAN024BWV; Start 7; Stop 31
tatcaaactcatgaccaattgaaac

SEQ ID NO: 447789 - DNA, 25 bp, Artificial
  probe
  misc_feature (1)..(25): SEQ ID NO: 6738; WAN024BWV; Start 5; Stop 29
gttatcaaactcatgaccaattgaa

SEQ ID NO: 447790 - DNA, 25 bp, Artificial
  probe
  misc_feature (1)..(25): SEQ ID NO: 6738; WAN024BWV; Start 11; Stop 35
aaactcatgaccaattgaaacaaaa

SEQ ID NO: 447791 - DNA, 25 bp, Artificial
  probe
  misc_feature (1)..(25): SEQ ID NO: 6738; WAN024BWV; Start 6; Stop 30
ttatcaaactcatgaccaattgaaa

SEQ ID NO: 447792 - DNA, 25 bp, Artificial
  probe
  misc_feature (1)..(25): SEQ ID NO: 6738; WAN024BWV; Start 33; Stop 57
aaaagctgtggttagatcctttcgg

SEQ ID NO: 447793 - DNA, 25 bp, Artificial
  probe
  misc_feature (1)..(25): SEQ ID NO: 6739; WAN024C2K; Start 94; Stop 118
gttagtcaagctgttagagaatacg

SEQ ID NO: 447794 - DNA, 25 bp, Artificial
  probe
  misc_feature (1)..(25): SEQ ID NO: 6739; WAN024C2K; Start 96; Stop 120
tagtcaagctgttagagaatacgtt

SEQ ID NO: 447795 - DNA, 25 bp, Artificial
  probe
  misc_feature (1)..(25): SEQ ID NO: 6739; WAN024C2K; Start 95; Stop 119
ttagtcaagctgttagagaatacgt

SEQ ID NO: 447796 - DNA, 25 bp, Artificial
  probe
  misc_feature (1)..(25): SEQ ID NO: 6739; WAN024C2K; Start 100; Stop 124
caagctgttagagaatacgttccta

SEQ ID NO: 447797 - DNA, 25 bp, Artificial
  probe
  misc_feature (1)..(25): SEQ ID NO: 6739; WAN024C2K; Start 93; Stop 117
tgttagtcaagctgttagagaatac

SEQ ID NO: 447798 - DNA, 25 bp, Artificial
  probe
  misc_feature (1)..(25): SEQ ID NO: 6739; WAN024C2K; Start 97; Stop 121
agtcaagctgttagagaatacgttc

SEQ ID NO: 447799 - DNA, 25 bp, Artificial
  probe
  misc_feature (1)..(25): SEQ ID NO: 6739; WAN024C2K; Start 83; Stop 107
attccagtattgttagtcaagctgt

SEQ ID NO: 447800 - DNA, 25 bp, Artificial
  probe
  misc_feature (1)..(25): SEQ ID NO: 6739; WAN024C2K; Start 85; Stop 109
tccagtattgttagtcaagctgtta

SEQ ID NO: 447801 - DNA, 25 bp, Artificial
  probe
  misc_feature (1)..(25): SEQ ID NO: 6739; WAN024C2K; Start 84; Stop 108
ttccagtattgttagtcaagctgtt

SEQ ID NO: 447802 - DNA, 25 bp, Artificial
  probe
  misc_feature (1)..(25): SEQ ID NO: 6739; WAN024C2K; Start 86; Stop 110
ccagtattgttagtcaagctgttag

SEQ ID NO: 447803 - DNA, 25 bp, Artificial
  probe
  misc_feature (1)..(25): SEQ ID NO: 6739; WAN024C2K; Start 89; Stop 113
gtattgttagtcaagctgttagaga

SEQ ID NO: 447804 - DNA, 25 bp, Artificial
  probe
  misc_feature (1)..(25): SEQ ID NO: 6739; WAN024C2K; Start 88; Stop 112
agtattgttagtcaagctgttagag

SEQ ID NO: 447805 - DNA, 25 bp, Artificial
  probe
  misc_feature (1)..(25): SEQ ID NO: 6739; WAN024C2K; Start 81; Stop 105
ctattccagtattgttagtcaagct

SEQ ID NO: 447806 - DNA, 25 bp, Artificial
  probe
  misc_feature (1)..(25): SEQ ID NO: 6739; WAN024C2K; Start 79; Stop 103
agctattccagtattgttagtcaag

SEQ ID NO: 447807 - DNA, 25 bp, Artificial
  probe
  misc_feature (1)..(25): SEQ ID NO: 6739; WAN024C2K; Start 80; Stop 104
gctattccagtattgttagtcaagc

SEQ ID NO: 447808 - DNA, 25 bp, Artificial
  probe
  misc_feature (1)..(25): SEQ ID NO: 6739; WAN024C2K; Start 268; Stop 292
ttcttagatgtcttccaagcgaaac

SEQ ID NO: 447809 - DNA, 25 bp, Artificial
  probe
  misc_feature (1)..(25): SEQ ID NO: 6739; WAN024C2K; Start 91; Stop 115
attgttagtcaagctgttagagaat

SEQ ID NO: 447810 - DNA, 25 bp, Artificial
  probe
  misc_feature (1)..(25): SEQ ID NO: 6739; WAN024C2K; Start 99; Stop 123
tcaagctgttagagaatacgttcct

SEQ ID NO: 447811 - DNA, 25 bp, Artificial
  probe
  misc_feature (1)..(25): SEQ ID NO: 6739; WAN024C2K; Start 98; Stop 122
gtcaagctgttagagaatacgttcc

SEQ ID NO: 447812 - DNA, 25 bp, Artificial
  probe
  misc_feature (1)..(25): SEQ ID NO: 6739; WAN024C2K; Start 72; Stop 96
tgaagtaagctattccagtattgtt

SEQ ID NO: 447813 - DNA, 25 bp, Artificial
  probe
  misc_feature (1)..(25): SEQ ID NO: 6739; WAN024C2K; Start 101; Stop 125
aagctgttagagaatacgttcctaa

SEQ ID NO: 447814 - DNA, 25 bp, Artificial
  probe
  misc_feature (1)..(25): SEQ ID NO: 6739; WAN024C2K; Start 87; Stop 111
cagtattgttagtcaagctgttaga

SEQ ID NO: 447815 - DNA, 25 bp, Artificial
  probe
  misc_feature (1)..(25): SEQ ID NO: 6739; WAN024C2K; Start 82; Stop 106
tattccagtattgttagtcaagctg

SEQ ID NO: 447816 - DNA, 25 bp, Artificial
  probe
  misc_feature (1)..(25): SEQ ID NO: 6739; WAN024C2K; Start 78; Stop 102
aagctattccagtattgttagtcaa

SEQ ID NO: 447817 - DNA, 25 bp, Artificial
  probe
  misc_feature (1)..(25): SEQ ID NO: 6739; WAN024C2K; Start 16; Stop 40
gaatccagacagatattagataagc

SEQ ID NO: 447818 - DNA, 25 bp, Artificial
  probe
  misc_feature (1)..(25): SEQ ID NO: 6739; WAN024C2K; Start 71; Stop 95
atgaagtaagctattccagtattgt

SEQ ID NO: 447819 - DNA, 25 bp, Artificial
  probe
  misc_feature (1)..(25): SEQ ID NO: 6739; WAN024C2K; Start 214; Stop 238
tcacttatgttagaggaagatgtat

SEQ ID NO: 447820 - DNA, 25 bp, Artificial
  probe
  misc_feature (1)..(25): SEQ ID NO: 6739; WAN024C2K; Start 213; Stop 237
atcacttatgttagaggaagatgta

SEQ ID NO: 447821 - DNA, 25 bp, Artificial
  probe
  misc_feature (1)..(25): SEQ ID NO: 6739; WAN024C2K; Start 92; Stop 116
ttgttagtcaagctgttagagaata

SEQ ID NO: 447822 - DNA, 25 bp, Artificial
  probe
  misc_feature (1)..(25): SEQ ID NO: 6739; WAN024C2K; Start 90; Stop 114
tattgttagtcaagctgttagagaa

SEQ ID NO: 447823 - DNA, 25 bp, Artificial
  probe
  misc_feature (1)..(25): SEQ ID NO: 6739; WAN024C2K; Start 207; Stop 231
ccagacatcacttatgttagaggaa

SEQ ID NO: 447824 - DNA, 25 bp, Artificial
  probe
  misc_feature (1)..(25): SEQ ID NO: 6739; WAN024C2K; Start 201; Stop 225
ggagtaccagacatcacttatgtta

SEQ ID NO: 447825 - DNA, 25 bp, Artificial
  probe
  misc_feature (1)..(25): SEQ ID NO: 6739; WAN024C2K; Start 184; Stop 208
aaacagagcaataattgggagtacc

SEQ ID NO: 447826 - DNA, 25 bp, Artificial
  probe
  misc_feature (1)..(25): SEQ ID NO: 6740; WAN024BRB; Start 236; Stop 260
aaggtattgttcaggtaggtcataa

SEQ ID NO: 447827 - DNA, 25 bp, Artificial
  probe
  misc_feature (1)..(25): SEQ ID NO: 6740; WAN024BRB; Start 304; Stop 328
tctgataagcgttatagagtagagg

SEQ ID NO: 447828 - DNA, 25 bp, Artificial
  probe
  misc_feature (1)..(25): SEQ ID NO: 6740; WAN024BRB; Start 20; Stop 44
atcttgaagttgttaatgttgaacg

SEQ ID NO: 447829 - DNA, 25 bp, Artificial
  probe
  misc_feature (1)..(25): SEQ ID NO: 6740; WAN024BRB; Start 56; Stop 80
attatagcatgacggtgaacaagaa

SEQ ID NO: 447830 - DNA, 25 bp, Artificial
  probe
  misc_feature (1)..(25): SEQ ID NO: 6740; WAN024BRB; Start 55; Stop 79
gattatagcatgacggtgaacaaga

SEQ ID NO: 447831 - DNA, 25 bp, Artificial
  probe
  misc_feature (1)..(25): SEQ ID NO: 6740; WAN024BRB; Start 54; Stop 78
agattatagcatgacggtgaacaag

SEQ ID NO: 447832 - DNA, 25 bp, Artificial
  probe
  misc_feature (1)..(25): SEQ ID NO: 6740; WAN024BRB; Start 53; Stop 77
cagattatagcatgacggtgaacaa

SEQ ID NO: 447833 - DNA, 25 bp, Artificial
  probe
  misc_feature (1)..(25): SEQ ID NO: 6740; WAN024BRB; Start 57; Stop 81
ttatagcatgacggtgaacaagaac

SEQ ID NO: 447834 - DNA, 25 bp, Artificial
  probe
  misc_feature (1)..(25): SEQ ID NO: 6740; WAN024BRB; Start 51; Stop 75
atcagattatagcatgacggtgaac

SEQ ID NO: 447835 - DNA, 25 bp, Artificial
  probe
  misc_feature (1)..(25): SEQ ID NO: 6740; WAN024BRB; Start 50; Stop 74
catcagattatagcatgacggtgaa

SEQ ID NO: 447836 - DNA, 25 bp, Artificial
  probe
  misc_feature (1)..(25): SEQ ID NO: 6740; WAN024BRB; Start 58; Stop 82
tatagcatgacggtgaacaagaact

SEQ ID NO: 447837 - DNA, 25 bp, Artificial
  probe
  misc_feature (1)..(25): SEQ ID NO: 6740; WAN024BRB; Start 293; Stop 317
gtgaatggaaatctgataagcgtta

SEQ ID NO: 447838 - DNA, 25 bp, Artificial
  probe
  misc_feature (1)..(25): SEQ ID NO: 6740; WAN024BRB; Start 52; Stop 76
tcagattatagcatgacggtgaaca

SEQ ID NO: 447839 - DNA, 25 bp, Artificial
  probe
  misc_feature (1)..(25): SEQ ID NO: 6740; WAN024BRB; Start 292; Stop 316
agtgaatggaaatctgataagcgtt

SEQ ID NO: 447840 - DNA, 25 bp, Artificial
  probe
  misc_feature (1)..(25): SEQ ID NO: 6740; WAN024BRB; Start 289; Stop 313
atgagtgaatggaaatctgataagc

SEQ ID NO: 447841 - DNA, 25 bp, Artificial
  probe
  misc_feature (1)..(25): SEQ ID NO: 6740; WAN024BRB; Start 368; Stop 392
tgaaggactttgatgaactatctga

SEQ ID NO: 447842 - DNA, 25 bp, Artificial
  probe
  misc_feature (1)..(25): SEQ ID NO: 6740; WAN024BRB; Start 237; Stop 261
aggtattgttcaggtaggtcataaa

SEQ ID NO: 447843 - DNA, 25 bp, Artificial
  probe
  misc_feature (1)..(25): SEQ ID NO: 6740; WAN024BRB; Start 235; Stop 259
aaaggtattgttcaggtaggtcata

SEQ ID NO: 447844 - DNA, 25 bp, Artificial
  probe
  misc_feature (1)..(25): SEQ ID NO: 6740; WAN024BRB; Start 21; Stop 45
tcttgaagttgttaatgttgaacgt

SEQ ID NO: 447845 - DNA, 25 bp, Artificial
  probe
  misc_feature (1)..(25): SEQ ID NO: 6740; WAN024BRB; Start 305; Stop 329
ctgataagcgttatagagtagaggg

SEQ ID NO: 447846 - DNA, 25 bp, Artificial
  probe
  misc_feature (1)..(25): SEQ ID NO: 6740; WAN024BRB; Start 362; Stop 386
ttgaattgaaggactttgatgaact

SEQ ID NO: 447847 - DNA, 25 bp, Artificial
  probe
  misc_feature (1)..(25): SEQ ID NO: 6740; WAN024BRB; Start 291; Stop 315
gagtgaatggaaatctgataagcgt

SEQ ID NO: 447848 - DNA, 25 bp, Artificial
  probe
  misc_feature (1)..(25): SEQ ID NO: 6740; WAN024BRB; Start 290; Stop 314
tgagtgaatggaaatctgataagcg

SEQ ID NO: 447849 - DNA, 25 bp, Artificial
  probe
  misc_feature (1)..(25): SEQ ID NO: 6740; WAN024BRB; Start 303; Stop 327
atctgataagcgttatagagtagag

SEQ ID NO: 447850 - DNA, 25 bp, Artificial
  probe
  misc_feature (1)..(25): SEQ ID NO: 6740; WAN024BRB; Start 367; Stop 391
ttgaaggactttgatgaactatctg

SEQ ID NO: 447851 - DNA, 25 bp, Artificial
  probe
  misc_feature (1)..(25): SEQ ID NO: 6740; WAN024BRB; Start 42; Stop 66
acgttactcatcagattatagcatg

SEQ ID NO: 447852 - DNA, 25 bp, Artificial
  probe
  misc_feature (1)..(25): SEQ ID NO: 6740; WAN024BRB; Start 59; Stop 83
atagcatgacggtgaacaagaactt

SEQ ID NO: 447853 - DNA, 25 bp, Artificial
  probe
  misc_feature (1)..(25): SEQ ID NO: 6740; WAN024BRB; Start 369; Stop 393
gaaggactttgatgaactatctgat

SEQ ID NO: 447854 - DNA, 25 bp, Artificial
  probe
  misc_feature (1)..(25): SEQ ID NO: 6740; WAN024BRB; Start 361; Stop 385
tttgaattgaaggactttgatgaac

SEQ ID NO: 447855 - DNA, 25 bp, Artificial
  probe
  misc_feature (1)..(25): SEQ ID NO: 6740; WAN024BRB; Start 294; Stop 318
tgaatggaaatctgataagcgttat

SEQ ID NO: 447856 - DNA, 25 bp, Artificial
  probe
  misc_feature (1)..(25): SEQ ID NO: 6740; WAN024BRB; Start 363; Stop 387
tgaattgaaggactttgatgaacta

SEQ ID NO: 447857 - DNA, 25 bp, Artificial
  probe
  misc_feature (1)..(25): SEQ ID NO: 6740; WAN024BRB; Start 19; Stop 43
aatcttgaagttgttaatgttgaac

SEQ ID NO: 447858 - DNA, 25 bp, Artificial
  probe
  misc_feature (1)..(25): SEQ ID NO: 6740; WAN024BRB; Start 299; Stop 323
ggaaatctgataagcgttatagagt

SEQ ID NO: 447859 - DNA, 25 bp, Artificial
  probe
  misc_feature (1)..(25): SEQ ID NO: 6741; WAN024BT7; Start 45; Stop 69
tgacttacttcaacttctgacttca

SEQ ID NO: 447860 - DNA, 25 bp, Artificial
  probe
  misc_feature (1)..(25): SEQ ID NO: 6741; WAN024BT7; Start 106; Stop 130
ggtatcatcagtaatccagaacaat

SEQ ID NO: 447861 - DNA, 25 bp, Artificial
  probe
  misc_feature (1)..(25): SEQ ID NO: 6741; WAN024BT7; Start 322; Stop 346
ctaatacatagcgacacaggtacaa

SEQ ID NO: 447862 - DNA, 25 bp, Artificial
  probe
  misc_feature (1)..(25): SEQ ID NO: 6741; WAN024BT7; Start 320; Stop 344
ctctaatacatagcgacacaggtac

SEQ ID NO: 447863 - DNA, 25 bp, Artificial
  probe
  misc_feature (1)..(25): SEQ ID NO: 6741; WAN024BT7; Start 323; Stop 347
taatacatagcgacacaggtacaac

SEQ ID NO: 447864 - DNA, 25 bp, Artificial
  probe
  misc_feature (1)..(25): SEQ ID NO: 6741; WAN024BT7; Start 321; Stop 345
tctaatacatagcgacacaggtaca

SEQ ID NO: 447865 - DNA, 25 bp, Artificial
  probe
  misc_feature (1)..(25): SEQ ID NO: 6741; WAN024BT7; Start 46; Stop 70
gacttacttcaacttctgacttcat

SEQ ID NO: 447866 - DNA, 25 bp, Artificial
  probe
  misc_feature (1)..(25): SEQ ID NO: 6741; WAN024BT7; Start 44; Stop 68
atgacttacttcaacttctgacttc

SEQ ID NO: 447867 - DNA, 25 bp, Artificial
  probe
  misc_feature (1)..(25): SEQ ID NO: 6741; WAN024BT7; Start 110; Stop 134
tcatcagtaatccagaacaattcat

SEQ ID NO: 447868 - DNA, 25 bp, Artificial
  probe
  misc_feature (1)..(25): SEQ ID NO: 6741; WAN024BT7; Start 109; Stop 133
atcatcagtaatccagaacaattca

SEQ ID NO: 447869 - DNA, 25 bp, Artificial
  probe
  misc_feature (1)..(25): SEQ ID NO: 6741; WAN024BT7; Start 113; Stop 137
tcagtaatccagaacaattcatctt

SEQ ID NO: 447870 - DNA, 25 bp, Artificial
  probe
  misc_feature (1)..(25): SEQ ID NO: 6741; WAN024BT7; Start 111; Stop 135
catcagtaatccagaacaattcatc

SEQ ID NO: 447871 - DNA, 25 bp, Artificial
  probe
  misc_feature (1)..(25): SEQ ID NO: 6741; WAN024BT7; Start 43; Stop 67
aatgacttacttcaacttctgactt

SEQ ID NO: 447872 - DNA, 25 bp, Artificial
  probe
  misc_feature (1)..(25): SEQ ID NO: 6741; WAN024BT7; Start 50; Stop 74
tacttcaacttctgacttcatggaa

SEQ ID NO: 447873 - DNA, 25 bp, Artificial
  probe
  misc_feature (1)..(25): SEQ ID NO: 6741; WAN024BT7; Start 49; Stop 73
ttacttcaacttctgacttcatgga

SEQ ID NO: 447874 - DNA, 25 bp, Artificial
  probe
  misc_feature (1)..(25): SEQ ID NO: 6741; WAN024BT7; Start 48; Stop 72
cttacttcaacttctgacttcatgg

SEQ ID NO: 447875 - DNA, 25 bp, Artificial
  probe
  misc_feature (1)..(25): SEQ ID NO: 6741; WAN024BT7; Start 112; Stop 136
atcagtaatccagaacaattcatct

SEQ ID NO: 447876 - DNA, 25 bp, Artificial
  probe
  misc_feature (1)..(25): SEQ ID NO: 6741; WAN024BT7; Start 47; Stop 71
acttacttcaacttctgacttcatg

SEQ ID NO: 447877 - DNA, 25 bp, Artificial
  probe
  misc_feature (1)..(25): SEQ ID NO: 6741; WAN024BT7; Start 324; Stop 348
aatacatagcgacacaggtacaaca

SEQ ID NO: 447878 - DNA, 25 bp, Artificial
  probe
  misc_feature (1)..(25): SEQ ID NO: 6741; WAN024BT7; Start 105; Stop 129
tggtatcatcagtaatccagaacaa

SEQ ID NO: 447879 - DNA, 25 bp, Artificial
  probe
  misc_feature (1)..(25): SEQ ID NO: 6741; WAN024BT7; Start 104; Stop 128
ttggtatcatcagtaatccagaaca

SEQ ID NO: 447880 - DNA, 25 bp, Artificial
  probe
  misc_feature (1)..(25): SEQ ID NO: 6741; WAN024BT7; Start 42; Stop 66
taatgacttacttcaacttctgact

SEQ ID NO: 447881 - DNA, 25 bp, Artificial
  probe
  misc_feature (1)..(25): SEQ ID NO: 6741; WAN024BT7; Start 41; Stop 65
ctaatgacttacttcaacttctgac

SEQ ID NO: 447882 - DNA, 25 bp, Artificial
  probe
  misc_feature (1)..(25): SEQ ID NO: 6741; WAN024BT7; Start 392; Stop 416
gtgaatttgccttacagtctctaaa

SEQ ID NO: 447883 - DNA, 25 bp, Artificial
  probe
  misc_feature (1)..(25): SEQ ID NO: 6741; WAN024BT7; Start 391; Stop 415
ggtgaatttgccttacagtctctaa

SEQ ID NO: 447884 - DNA, 25 bp, Artificial
  probe
  misc_feature (1)..(25): SEQ ID NO: 6741; WAN024BT7; Start 40; Stop 64
tctaatgacttacttcaacttctga

SEQ ID NO: 447885 - DNA, 25 bp, Artificial
  probe
  misc_feature (1)..(25): SEQ ID NO: 6741; WAN024BT7; Start 325; Stop 349
atacatagcgacacaggtacaacac

SEQ ID NO: 447886 - DNA, 25 bp, Artificial
  probe
  misc_feature (1)..(25): SEQ ID NO: 6741; WAN024BT7; Start 107; Stop 131
gtatcatcagtaatccagaacaatt

SEQ ID NO: 447887 - DNA, 25 bp, Artificial
  probe
  misc_feature (1)..(25): SEQ ID NO: 6741; WAN024BT7; Start 334; Stop 358
gacacaggtacaacacagatttatg

SEQ ID NO: 447888 - DNA, 25 bp, Artificial
  probe
  misc_feature (1)..(25): SEQ ID NO: 6741; WAN024BT7; Start 362; Stop 386
atacttctaatgtagtccctatggc

SEQ ID NO: 447889 - DNA, 25 bp, Artificial
  probe
  misc_feature (1)..(25): SEQ ID NO: 6741; WAN024BT7; Start 333; Stop 357
cgacacaggtacaacacagatttat

SEQ ID NO: 447890 - DNA, 25 bp, Artificial
  probe
  misc_feature (1)..(25): SEQ ID NO: 6741; WAN024BT7; Start 96; Stop 120
ggcaaagtttggtatcatcagtaat

SEQ ID NO: 447891 - DNA, 25 bp, Artificial
  probe
  misc_feature (1)..(25): SEQ ID NO: 6741; WAN024BT7; Start 357; Stop 381
tgtcaatacttctaatgtagtccct

SEQ ID NO: 447892 - DNA, 25 bp, Artificial
  probe
  misc_feature (1)..(25): SEQ ID NO: 6742; WAN024BTJ; Start 9; Stop 33
tcttgtgggaagatttactccattt

SEQ ID NO: 447893 - DNA, 25 bp, Artificial
  probe
  misc_feature (1)..(25): SEQ ID NO: 6742; WAN024BTJ; Start 8; Stop 32
ttcttgtgggaagatttactccatt

SEQ ID NO: 447894 - DNA, 25 bp, Artificial
  probe
  misc_feature (1)..(25): SEQ ID NO: 6742; WAN024BTJ; Start 7; Stop 31
tttcttgtgggaagatttactccat

SEQ ID NO: 447895 - DNA, 25 bp, Artificial
  probe
  misc_feature (1)..(25): SEQ ID NO: 6742; WAN024BTJ; Start 32; Stop 56
tttcttcaggaattgagattttgcc

SEQ ID NO: 447896 - DNA, 25 bp, Artificial
  probe
  misc_feature (1)..(25): SEQ ID NO: 6742; WAN024BTJ; Start 48; Stop 72
gattttgcccatctcttttcattat

SEQ ID NO: 447897 - DNA, 25 bp, Artificial
  probe
  misc_feature (1)..(25): SEQ ID NO: 6742; WAN024BTJ; Start 31; Stop 55
ttttcttcaggaattgagattttgc

SEQ ID NO: 447898 - DNA, 25 bp, Artificial
  probe
  misc_feature (1)..(25): SEQ ID NO: 6742; WAN024BTJ; Start 33; Stop 57
ttcttcaggaattgagattttgccc

SEQ ID NO: 447899 - DNA, 25 bp, Artificial
  probe
  misc_feature (1)..(25): SEQ ID NO: 6742; WAN024BTJ; Start 36; Stop 60
ttcaggaattgagattttgcccatc

SEQ ID NO: 447900 - DNA, 25 bp, Artificial
  probe
  misc_feature (1)..(25): SEQ ID NO: 6742; WAN024BTJ; Start 35; Stop 59
cttcaggaattgagattttgcccat

SEQ ID NO: 447901 - DNA, 25 bp, Artificial
  probe
  misc_feature (1)..(25): SEQ ID NO: 6742; WAN024BTJ; Start 25; Stop 49
actccattttcttcaggaattgaga

SEQ ID NO: 447902 - DNA, 25 bp, Artificial
  probe
  misc_feature (1)..(25): SEQ ID NO: 6742; WAN024BTJ; Start 28; Stop 52
ccattttcttcaggaattgagattt

SEQ ID NO: 447903 - DNA, 25 bp, Artificial
  probe
  misc_feature (1)..(25): SEQ ID NO: 6742; WAN024BTJ; Start 12; Stop 36
tgtgggaagatttactccattttct

SEQ ID NO: 447904 - DNA, 25 bp, Artificial
  probe
  misc_feature (1)..(25): SEQ ID NO: 6742; WAN024BTJ; Start 26; Stop 50
ctccattttcttcaggaattgagat

SEQ ID NO: 447905 - DNA, 25 bp, Artificial
  probe
  misc_feature (1)..(25): SEQ ID NO: 6742; WAN024BTJ; Start 11; Stop 35
ttgtgggaagatttactccattttc

SEQ ID NO: 447906 - DNA, 25 bp, Artificial
  probe
  misc_feature (1)..(25): SEQ ID NO: 6742; WAN024BTJ; Start 10; Stop 34
cttgtgggaagatttactccatttt

SEQ ID NO: 447907 - DNA, 25 bp, Artificial
  probe
  misc_feature (1)..(25): SEQ ID NO: 6742; WAN024BTJ; Start 24; Stop 48
tactccattttcttcaggaattgag

SEQ ID NO: 447908 - DNA, 25 bp, Artificial
  probe
  misc_feature (1)..(25): SEQ ID NO: 6742; WAN024BTJ; Start 27; Stop 51
tccattttcttcaggaattgagatt

SEQ ID NO: 447909 - DNA, 25 bp, Artificial
  probe
  misc_feature (1)..(25): SEQ ID NO: 6742; WAN024BTJ; Start 23; Stop 47
ttactccattttcttcaggaattga

SEQ ID NO: 447910 - DNA, 25 bp, Artificial
  probe
  misc_feature (1)..(25): SEQ ID NO: 6742; WAN024BTJ; Start 51; Stop 75
tttgcccatctcttttcattatatt

SEQ ID NO: 447911 - DNA, 25 bp, Artificial
  probe
  misc_feature (1)..(25): SEQ ID NO: 6742; WAN024BTJ; Start 50; Stop 74
ttttgcccatctcttttcattatat

SEQ ID NO: 447912 - DNA, 25 bp, Artificial
  probe
  misc_feature (1)..(25): SEQ ID NO: 6742; WAN024BTJ; Start 49; Stop 73
attttgcccatctcttttcattata

SEQ ID NO: 447913 - DNA, 25 bp, Artificial
  probe
  misc_feature (1)..(25): SEQ ID NO: 6742; WAN024BTJ; Start 34; Stop 58
tcttcaggaattgagattttgccca

SEQ ID NO: 447914 - DNA, 25 bp, Artificial
  probe
  misc_feature (1)..(25): SEQ ID NO: 6742; WAN024BTJ; Start 19; Stop 43
agatttactccattttcttcaggaa

SEQ ID NO: 447915 - DNA, 25 bp, Artificial
  probe
  misc_feature (1)..(25): SEQ ID NO: 6742; WAN024BTJ; Start 5; Stop 29
gttttcttgtgggaagatttactcc

SEQ ID NO: 447916 - DNA, 25 bp, Artificial
  probe
  misc_feature (1)..(25): SEQ ID NO: 6742; WAN024BTJ; Start 47; Stop 71
agattttgcccatctcttttcatta

SEQ ID NO: 447917 - DNA, 25 bp, Artificial
  probe
  misc_feature (1)..(25): SEQ ID NO: 6742; WAN024BTJ; Start 6; Stop 30
ttttcttgtgggaagatttactcca

SEQ ID NO: 447918 - DNA, 25 bp, Artificial
  probe
  misc_feature (1)..(25): SEQ ID NO: 6742; WAN024BTJ; Start 4; Stop 28
cgttttcttgtgggaagatttactc

SEQ ID NO: 447919 - DNA, 25 bp, Artificial
  probe
  misc_feature (1)..(25): SEQ ID NO: 6742; WAN024BTJ; Start 13; Stop 37
gtgggaagatttactccattttctt

SEQ ID NO: 447920 - DNA, 25 bp, Artificial
  probe
  misc_feature (1)..(25): SEQ ID NO: 6742; WAN024BTJ; Start 22; Stop 46
tttactccattttcttcaggaattg

SEQ ID NO: 447921 - DNA, 25 bp, Artificial
  probe
  misc_feature (1)..(25): SEQ ID NO: 6742; WAN024BTJ; Start 1; Stop 25
atgcgttttcttgtgggaagattta

SEQ ID NO: 447922 - DNA, 25 bp, Artificial
  probe
  misc_feature (1)..(25): SEQ ID NO: 6742; WAN024BTJ; Start 20; Stop 44
gatttactccattttcttcaggaat

SEQ ID NO: 447923 - DNA, 25 bp, Artificial
  probe
  misc_feature (1)..(25): SEQ ID NO: 6742; WAN024BTJ; Start 18; Stop 42
aagatttactccattttcttcagga

SEQ ID NO: 447924 - DNA, 25 bp, Artificial
  probe
  misc_feature (1)..(25): SEQ ID NO: 6742; WAN024BTJ; Start 3; Stop 27
gcgttttcttgtgggaagatttact

SEQ ID NO: 447925 - DNA, 25 bp, Artificial
  probe
  misc_feature (1)..(25): SEQ ID NO: 6743; WAN024F6K; Start 28; Stop 52
ttactcaacctctttatgctcaatg

SEQ ID NO: 447926 - DNA, 25 bp, Artificial
  probe
  misc_feature (1)..(25): SEQ ID NO: 6743; WAN024F6K; Start 29; Stop 53
tactcaacctctttatgctcaatga

SEQ ID NO: 447927 - DNA, 25 bp, Artificial
  probe
  misc_feature (1)..(25): SEQ ID NO: 6743; WAN024F6K; Start 31; Stop 55
ctcaacctctttatgctcaatgaaa

SEQ ID NO: 447928 - DNA, 25 bp, Artificial
  probe
  misc_feature (1)..(25): SEQ ID NO: 6743; WAN024F6K; Start 30; Stop 54
actcaacctctttatgctcaatgaa

SEQ ID NO: 447929 - DNA, 25 bp, Artificial
  probe
  misc_feature (1)..(25): SEQ ID NO: 6743; WAN024F6K; Start 27; Stop 51
tttactcaacctctttatgctcaat

SEQ ID NO: 447930 - DNA, 25 bp, Artificial
  probe
  misc_feature (1)..(25): SEQ ID NO: 6743; WAN024F6K; Start 26; Stop 50
ttttactcaacctctttatgctcaa

SEQ ID NO: 447931 - DNA, 25 bp, Artificial
  probe
  misc_feature (1)..(25): SEQ ID NO: 6743; WAN024F6K; Start 32; Stop 56
tcaacctctttatgctcaatgaaaa

SEQ ID NO: 447932 - DNA, 25 bp, Artificial
  probe
  misc_feature (1)..(25): SEQ ID NO: 6743; WAN024F6K; Start 35; Stop 59
acctctttatgctcaatgaaaatca

SEQ ID NO: 447933 - DNA, 25 bp, Artificial
  probe
  misc_feature (1)..(25): SEQ ID NO: 6743; WAN024F6K; Start 33; Stop 57
caacctctttatgctcaatgaaaat

SEQ ID NO: 447934 - DNA, 25 bp, Artificial
  probe
  misc_feature (1)..(25): SEQ ID NO: 6743; WAN024F6K; Start 34; Stop 58
aacctctttatgctcaatgaaaatc

SEQ ID NO: 447935 - DNA, 25 bp, Artificial
  probe
  misc_feature (1)..(25): SEQ ID NO: 6743; WAN024F6K; Start 36; Stop 60
cctctttatgctcaatgaaaatcag

SEQ ID NO: 447936 - DNA, 25 bp, Artificial
  probe
  misc_feature (1)..(25): SEQ ID NO: 6743; WAN024F6K; Start 44; Stop 68
tgctcaatgaaaatcagactagaaa

SEQ ID NO: 447937 - DNA, 25 bp, Artificial
  probe
  misc_feature (1)..(25): SEQ ID NO: 6743; WAN024F6K; Start 43; Stop 67
atgctcaatgaaaatcagactagaa

SEQ ID NO: 447938 - DNA, 25 bp, Artificial
  probe
  misc_feature (1)..(25): SEQ ID NO: 6743; WAN024F6K; Start 46; Stop 70
ctcaatgaaaatcagactagaaagc

SEQ ID NO: 447939 - DNA, 25 bp, Artificial
  probe
  misc_feature (1)..(25): SEQ ID NO: 6743; WAN024F6K; Start 45; Stop 69
gctcaatgaaaatcagactagaaag

SEQ ID NO: 447940 - DNA, 25 bp, Artificial
  probe
  misc_feature (1)..(25): SEQ ID NO: 6743; WAN024F6K; Start 39; Stop 63
ctttatgctcaatgaaaatcagact

SEQ ID NO: 447941 - DNA, 25 bp, Artificial
  probe
  misc_feature (1)..(25): SEQ ID NO: 6743; WAN024F6K; Start 38; Stop 62
tctttatgctcaatgaaaatcagac

SEQ ID NO: 447942 - DNA, 25 bp, Artificial
  probe
  misc_feature (1)..(25): SEQ ID NO: 6743; WAN024F6K; Start 37; Stop 61
ctctttatgctcaatgaaaatcaga

SEQ ID NO: 447943 - DNA, 25 bp, Artificial
  probe
  misc_feature (1)..(25): SEQ ID NO: 6743; WAN024F6K; Start 42; Stop 66
tatgctcaatgaaaatcagactaga

SEQ ID NO: 447944 - DNA, 25 bp, Artificial
  probe
  misc_feature (1)..(25): SEQ ID NO: 6743; WAN024F6K; Start 47; Stop 71
tcaatgaaaatcagactagaaagct

SEQ ID NO: 447945 - DNA, 25 bp, Artificial
  probe
  misc_feature (1)..(25): SEQ ID NO: 6743; WAN024F6K; Start 41; Stop 65
ttatgctcaatgaaaatcagactag

SEQ ID NO: 447946 - DNA, 25 bp, Artificial
  probe
  misc_feature (1)..(25): SEQ ID NO: 6743; WAN024F6K; Start 40; Stop 64
tttatgctcaatgaaaatcagacta

SEQ ID NO: 447947 - DNA, 25 bp, Artificial
  probe
  misc_feature (1)..(25): SEQ ID NO: 6743; WAN024F6K; Start 48; Stop 72
caatgaaaatcagactagaaagcta

SEQ ID NO: 447948 - DNA, 25 bp, Artificial
  probe
  misc_feature (1)..(25): SEQ ID NO: 6743; WAN024F6K; Start 49; Stop 73
aatgaaaatcagactagaaagctag

SEQ ID NO: 447949 - DNA, 25 bp, Artificial
  probe
  misc_feature (1)..(25): SEQ ID NO: 6744; WAN024EVM; Start 18; Stop 42
aggctctataatatttgtagtgggt

SEQ ID NO: 447950 - DNA, 25 bp, Artificial
  probe
  misc_feature (1)..(25): SEQ ID NO: 6744; WAN024EVM; Start 48; Stop 72
ccctatggatattatggagcttatt

SEQ ID NO: 447951 - DNA, 25 bp, Artificial
  probe
  misc_feature (1)..(25): SEQ ID NO: 6744; WAN024EVM; Start 17; Stop 41
taggctctataatatttgtagtggg

SEQ ID NO: 447952 - DNA, 25 bp, Artificial
  probe
  misc_feature (1)..(25): SEQ ID NO: 6744; WAN024EVM; Start 47; Stop 71
cccctatggatattatggagcttat

SEQ ID NO: 447953 - DNA, 25 bp, Artificial
  probe
  misc_feature (1)..(25): SEQ ID NO: 6744; WAN024EVM; Start 46; Stop 70
tcccctatggatattatggagctta

SEQ ID NO: 447954 - DNA, 25 bp, Artificial
  probe
  misc_feature (1)..(25): SEQ ID NO: 6744; WAN024EVM; Start 49; Stop 73
cctatggatattatggagcttattt

SEQ ID NO: 447955 - DNA, 25 bp, Artificial
  probe
  misc_feature (1)..(25): SEQ ID NO: 6744; WAN024EVM; Start 16; Stop 40
ttaggctctataatatttgtagtgg

SEQ ID NO: 447956 - DNA, 25 bp, Artificial
  probe
  misc_feature (1)..(25): SEQ ID NO: 6744; WAN024EVM; Start 30; Stop 54
atttgtagtgggtaaatcccctatg

SEQ ID NO: 447957 - DNA, 25 bp, Artificial
  probe
  misc_feature (1)..(25): SEQ ID NO: 6744; WAN024EVM; Start 31; Stop 55
tttgtagtgggtaaatcccctatgg

SEQ ID NO: 447958 - DNA, 25 bp, Artificial
  probe
  misc_feature (1)..(25): SEQ ID NO: 6744; WAN024EVM; Start 43; Stop 67
aaatcccctatggatattatggagc

SEQ ID NO: 447959 - DNA, 25 bp, Artificial
  probe
  misc_feature (1)..(25): SEQ ID NO: 6744; WAN024EVM; Start 36; Stop 60
agtgggtaaatcccctatggatatt

SEQ ID NO: 447960 - DNA, 25 bp, Artificial
  probe
  misc_feature (1)..(25): SEQ ID NO: 6744; WAN024EVM; Start 35; Stop 59
tagtgggtaaatcccctatggatat

SEQ ID NO: 447961 - DNA, 25 bp, Artificial
  probe
  misc_feature (1)..(25): SEQ ID NO: 6744; WAN024EVM; Start 34; Stop 58
gtagtgggtaaatcccctatggata

SEQ ID NO: 447962 - DNA, 25 bp, Artificial
  probe
  misc_feature (1)..(25): SEQ ID NO: 6744; WAN024EVM; Start 37; Stop 61
gtgggtaaatcccctatggatatta

SEQ ID NO: 447963 - DNA, 25 bp, Artificial
  probe
  misc_feature (1)..(25): SEQ ID NO: 6744; WAN024EVM; Start 32; Stop 56
ttgtagtgggtaaatcccctatgga

SEQ ID NO: 447964 - DNA, 25 bp, Artificial
  probe
  misc_feature (1)..(25): SEQ ID NO: 6744; WAN024EVM; Start 45; Stop 69
atcccctatggatattatggagctt

SEQ ID NO: 447965 - DNA, 25 bp, Artificial
  probe
  misc_feature (1)..(25): SEQ ID NO: 6744; WAN024EVM; Start 44; Stop 68
aatcccctatggatattatggagct

SEQ ID NO: 447966 - DNA, 25 bp, Artificial
  probe
  misc_feature (1)..(25): SEQ ID NO: 6744; WAN024EVM; Start 38; Stop 62
tgggtaaatcccctatggatattat

SEQ ID NO: 447967 - DNA, 25 bp, Artificial
  probe
  misc_feature (1)..(25): SEQ ID NO: 6744; WAN024EVM; Start 40; Stop 64
ggtaaatcccctatggatattatgg

SEQ ID NO: 447968 - DNA, 25 bp, Artificial
  probe
  misc_feature (1)..(25): SEQ ID NO: 6744; WAN024EVM; Start 39; Stop 63
gggtaaatcccctatggatattatg

SEQ ID NO: 447969 - DNA, 25 bp, Artificial
  probe
  misc_feature (1)..(25): SEQ ID NO: 6744; WAN024EVM; Start 33; Stop 57
tgtagtgggtaaatcccctatggat

SEQ ID NO: 447970 - DNA, 25 bp, Artificial
  probe
  misc_feature (1)..(25): SEQ ID NO: 6744; WAN024EVM; Start 41; Stop 65
gtaaatcccctatggatattatgga

SEQ ID NO: 447971 - DNA, 25 bp, Artificial
  probe
  misc_feature (1)..(25): SEQ ID NO: 6744; WAN024EVM; Start 42; Stop 66
taaatcccctatggatattatggag

SEQ ID NO: 447972 - DNA, 25 bp, Artificial
  probe
  misc_feature (1)..(25): SEQ ID NO: 6745; WAN024CD8; Start 48; Stop 72
cgataatagcttgcttcaactcatc

SEQ ID NO: 447973 - DNA, 25 bp, Artificial
  probe
  misc_feature (1)..(25): SEQ ID NO: 6745; WAN024CD8; Start 51; Stop 75
taatagcttgcttcaactcatctcc

SEQ ID NO: 447974 - DNA, 25 bp, Artificial
  probe
  misc_feature (1)..(25): SEQ ID NO: 6745; WAN024CD8; Start 50; Stop 74
ataatagcttgcttcaactcatctc

SEQ ID NO: 447975 - DNA, 25 bp, Artificial
  probe
  misc_feature (1)..(25): SEQ ID NO: 6745; WAN024CD8; Start 49; Stop 73
gataatagcttgcttcaactcatct

SEQ ID NO: 447976 - DNA, 25 bp, Artificial
  probe
  misc_feature (1)..(25): SEQ ID NO: 6745; WAN024CD8; Start 47; Stop 71
gcgataatagcttgcttcaactcat

SEQ ID NO: 447977 - DNA, 25 bp, Artificial
  probe
  misc_feature (1)..(25): SEQ ID NO: 6745; WAN024CD8; Start 52; Stop 76
aatagcttgcttcaactcatctcca

SEQ ID NO: 447978 - DNA, 25 bp, Artificial
  probe
  misc_feature (1)..(25): SEQ ID NO: 6745; WAN024CD8; Start 53; Stop 77
atagcttgcttcaactcatctccac

SEQ ID NO: 447979 - DNA, 25 bp, Artificial
  probe
  misc_feature (1)..(25): SEQ ID NO: 6745; WAN024CD8; Start 44; Stop 68
aaggcgataatagcttgcttcaact

SEQ ID NO: 447980 - DNA, 25 bp, Artificial
  probe
  misc_feature (1)..(25): SEQ ID NO: 6745; WAN024CD8; Start 45; Stop 69
aggcgataatagcttgcttcaactc

SEQ ID NO: 447981 - DNA, 25 bp, Artificial
  probe
  misc_feature (1)..(25): SEQ ID NO: 6745; WAN024CD8; Start 46; Stop 70
ggcgataatagcttgcttcaactca

SEQ ID NO: 447982 - DNA, 25 bp, Artificial
  probe
  misc_feature (1)..(25): SEQ ID NO: 6745; WAN024CD8; Start 33; Stop 57
tttgattagcaaaggcgataatagc

SEQ ID NO: 447983 - DNA, 25 bp, Artificial
  probe
  misc_feature (1)..(25): SEQ ID NO: 6745; WAN024CD8; Start 30; Stop 54
ttgtttgattagcaaaggcgataat

SEQ ID NO: 447984 - DNA, 25 bp, Artificial
  probe
  misc_feature (1)..(25): SEQ ID NO: 6745; WAN024CD8; Start 29; Stop 53
gttgtttgattagcaaaggcgataa

SEQ ID NO: 447985 - DNA, 25 bp, Artificial
  probe
  misc_feature (1)..(25): SEQ ID NO: 6745; WAN024CD8; Start 22; Stop 46
aatgtgggttgtttgattagcaaag

SEQ ID NO: 447986 - DNA, 25 bp, Artificial
  probe
  misc_feature (1)..(25): SEQ ID NO: 6745; WAN024CD8; Start 43; Stop 67
aaaggcgataatagcttgcttcaac

SEQ ID NO: 447987 - DNA, 25 bp, Artificial
  probe
  misc_feature (1)..(25): SEQ ID NO: 6745; WAN024CD8; Start 42; Stop 66
caaaggcgataatagcttgcttcaa

SEQ ID NO: 447988 - DNA, 25 bp, Artificial
  probe
  misc_feature (1)..(25): SEQ ID NO: 6745; WAN024CD8; Start 31; Stop 55
tgtttgattagcaaaggcgataata

SEQ ID NO: 447989 - DNA, 25 bp, Artificial
  probe
  misc_feature (1)..(25): SEQ ID NO: 6745; WAN024CD8; Start 21; Stop 45
caatgtgggttgtttgattagcaaa

SEQ ID NO: 447990 - DNA, 25 bp, Artificial
  probe
  misc_feature (1)..(25): SEQ ID NO: 6745; WAN024CD8; Start 18; Stop 42
attcaatgtgggttgtttgattagc

SEQ ID NO: 447991 - DNA, 25 bp, Artificial
  probe
  misc_feature (1)..(25): SEQ ID NO: 6745; WAN024CD8; Start 32; Stop 56
gtttgattagcaaaggcgataatag

SEQ ID NO: 447992 - DNA, 25 bp, Artificial
  probe
  misc_feature (1)..(25): SEQ ID NO: 6745; WAN024CD8; Start 54; Stop 78
tagcttgcttcaactcatctccact

SEQ ID NO: 447993 - DNA, 25 bp, Artificial
  probe
  misc_feature (1)..(25): SEQ ID NO: 6745; WAN024CD8; Start 36; Stop 60
gattagcaaaggcgataatagcttg

SEQ ID NO: 447994 - DNA, 25 bp, Artificial
  probe
  misc_feature (1)..(25): SEQ ID NO: 6745; WAN024CD8; Start 35; Stop 59
tgattagcaaaggcgataatagctt

SEQ ID NO: 447995 - DNA, 25 bp, Artificial
  probe
  misc_feature (1)..(25): SEQ ID NO: 6745; WAN024CD8; Start 34; Stop 58
ttgattagcaaaggcgataatagct

SEQ ID NO: 447996 - DNA, 25 bp, Artificial
  probe
  misc_feature (1)..(25): SEQ ID NO: 6745; WAN024CD8; Start 20; Stop 44
tcaatgtgggttgtttgattagcaa

SEQ ID NO: 447997 - DNA, 25 bp, Artificial
  probe
  misc_feature (1)..(25): SEQ ID NO: 6745; WAN024CD8; Start 19; Stop 43
ttcaatgtgggttgtttgattagca

SEQ ID NO: 447998 - DNA, 25 bp, Artificial
  probe
  misc_feature (1)..(25): SEQ ID NO: 6745; WAN024CD8; Start 28; Stop 52
ggttgtttgattagcaaaggcgata

SEQ ID NO: 447999 - DNA, 25 bp, Artificial
  probe
  misc_feature (1)..(25): SEQ ID NO: 6745; WAN024CD8; Start 23; Stop 47
atgtgggttgtttgattagcaaagg

SEQ ID NO: 448000 - DNA, 25 bp, Artificial
  probe
  misc_feature (1)..(25): SEQ ID NO: 6745; WAN024CD8; Start 15; Stop 39
tttattcaatgtgggttgtttgatt

SEQ ID NO: 448001 - DNA, 25 bp, Artificial
  probe
  misc_feature (1)..(25): SEQ ID NO: 6745; WAN024CD8; Start 17; Stop 41
tattcaatgtgggttgtttgattag

SEQ ID NO: 448002 - DNA, 25 bp, Artificial
  probe
  misc_feature (1)..(25): SEQ ID NO: 6745; WAN024CD8; Start 56; Stop 80
gcttgcttcaactcatctccactga

SEQ ID NO: 448003 - DNA, 25 bp, Artificial
  probe
  misc_feature (1)..(25): SEQ ID NO: 6745; WAN024CD8; Start 16; Stop 40
ttattcaatgtgggttgtttgatta

SEQ ID NO: 448004 - DNA, 25 bp, Artificial
  probe
  misc_feature (1)..(25): SEQ ID NO: 6745; WAN024CD8; Start 61; Stop 85
cttcaactcatctccactgagagtg

SEQ ID NO: 448005 - DNA, 25 bp, Artificial
  probe
  misc_feature (1)..(25): SEQ ID NO: 6746; WAN024BOR; Start 277; Stop 301
gatcaactaattccagaagcgttaa

SEQ ID NO: 448006 - DNA, 25 bp, Artificial
  probe
  misc_feature (1)..(25): SEQ ID NO: 6746; WAN024BOR; Start 165; Stop 189
ggattcacgcattgtaattatagac

SEQ ID NO: 448007 - DNA, 25 bp, Artificial
  probe
  misc_feature (1)..(25): SEQ ID NO: 6746; WAN024BOR; Start 164; Stop 188
aggattcacgcattgtaattataga

SEQ ID NO: 448008 - DNA, 25 bp, Artificial
  probe
  misc_feature (1)..(25): SEQ ID NO: 6746; WAN024BOR; Start 492; Stop 516
tagagagttagctgtgcaatatgac

SEQ ID NO: 448009 - DNA, 25 bp, Artificial
  probe
  misc_feature (1)..(25): SEQ ID NO: 6746; WAN024BOR; Start 491; Stop 515
atagagagttagctgtgcaatatga

SEQ ID NO: 448010 - DNA, 25 bp, Artificial
  probe
  misc_feature (1)..(25): SEQ ID NO: 6746; WAN024BOR; Start 255; Stop 279
cgttgtttatttggatggagatgat

SEQ ID NO: 448011 - DNA, 25 bp, Artificial
  probe
  misc_feature (1)..(25): SEQ ID NO: 6746; WAN024BOR; Start 646; Stop 670
gcaacaaggagtaaagcattaagaa

SEQ ID NO: 448012 - DNA, 25 bp, Artificial
  probe
  misc_feature (1)..(25): SEQ ID NO: 6746; WAN024BOR; Start 537; Stop 561
gatttggcttggtgaggatttattg

SEQ ID NO: 448013 - DNA, 25 bp, Artificial
  probe
  misc_feature (1)..(25): SEQ ID NO: 6746; WAN024BOR; Start 536; Stop 560
agatttggcttggtgaggatttatt

SEQ ID NO: 448014 - DNA, 25 bp, Artificial
  probe
  misc_feature (1)..(25): SEQ ID NO: 6746; WAN024BOR; Start 642; Stop 666
ttcagcaacaaggagtaaagcatta

SEQ ID NO: 448015 - DNA, 25 bp, Artificial
  probe
  misc_feature (1)..(25): SEQ ID NO: 6746; WAN024BOR; Start 645; Stop 669
agcaacaaggagtaaagcattaaga

SEQ ID NO: 448016 - DNA, 25 bp, Artificial
  probe
  misc_feature (1)..(25): SEQ ID NO: 6746; WAN024BOR; Start 644; Stop 668
cagcaacaaggagtaaagcattaag

SEQ ID NO: 448017 - DNA, 25 bp, Artificial
  probe
  misc_feature (1)..(25): SEQ ID NO: 6746; WAN024BOR; Start 357; Stop 381
aattaaggagagaaacggtgtgaaa

SEQ ID NO: 448018 - DNA, 25 bp, Artificial
  probe
  misc_feature (1)..(25): SEQ ID NO: 6746; WAN024BOR; Start 356; Stop 380
aaattaaggagagaaacggtgtgaa

SEQ ID NO: 448019 - DNA, 25 bp, Artificial
  probe
  misc_feature (1)..(25): SEQ ID NO: 6746; WAN024BOR; Start 643; Stop 667
tcagcaacaaggagtaaagcattaa

SEQ ID NO: 448020 - DNA, 25 bp, Artificial
  probe
  misc_feature (1)..(25): SEQ ID NO: 6746; WAN024BOR; Start 535; Stop 559
gagatttggcttggtgaggatttat

SEQ ID NO: 448021 - DNA, 25 bp, Artificial
  probe
  misc_feature (1)..(25): SEQ ID NO: 6746; WAN024BOR; Start 490; Stop 514
aatagagagttagctgtgcaatatg

SEQ ID NO: 448022 - DNA, 25 bp, Artificial
  probe
  misc_feature (1)..(25): SEQ ID NO: 6746; WAN024BOR; Start 392; Stop 416
catacttctcaaaggaaatgctctt

SEQ ID NO: 448023 - DNA, 25 bp, Artificial
  probe
  misc_feature (1)..(25): SEQ ID NO: 6746; WAN024BOR; Start 524; Stop 548
atgaattgaaagagatttggcttgg

SEQ ID NO: 448024 - DNA, 25 bp, Artificial
  probe
  misc_feature (1)..(25): SEQ ID NO: 6746; WAN024BOR; Start 391; Stop 415
ccatacttctcaaaggaaatgctct

SEQ ID NO: 448025 - DNA, 25 bp, Artificial
  probe
  misc_feature (1)..(25): SEQ ID NO: 6746; WAN024BOR; Start 358; Stop 382
attaaggagagaaacggtgtgaaac

SEQ ID NO: 448026 - DNA, 25 bp, Artificial
  probe
  misc_feature (1)..(25): SEQ ID NO: 6746; WAN024BOR; Start 641; Stop 665
attcagcaacaaggagtaaagcatt

SEQ ID NO: 448027 - DNA, 25 bp, Artificial
  probe
  misc_feature (1)..(25): SEQ ID NO: 6746; WAN024BOR; Start 163; Stop 187
aaggattcacgcattgtaattatag

SEQ ID NO: 448028 - DNA, 25 bp, Artificial
  probe
  misc_feature (1)..(25): SEQ ID NO: 6746; WAN024BOR; Start 630; Stop 654
ttacaatcctgattcagcaacaagg

SEQ ID NO: 448029 - DNA, 25 bp, Artificial
  probe
  misc_feature (1)..(25): SEQ ID NO: 6746; WAN024BOR; Start 184; Stop 208
atagacaaagagaagaatgaaggtg

SEQ ID NO: 448030 - DNA, 25 bp, Artificial
  probe
  misc_feature (1)..(25): SEQ ID NO: 6746; WAN024BOR; Start 942; Stop 966
tgagtcatatgtcgttgcgtattat

SEQ ID NO: 448031 - DNA, 25 bp, Artificial
  probe
  misc_feature (1)..(25): SEQ ID NO: 6746; WAN024BOR; Start 943; Stop 967
gagtcatatgtcgttgcgtattatt

SEQ ID NO: 448032 - DNA, 25 bp, Artificial
  probe
  misc_feature (1)..(25): SEQ ID NO: 6746; WAN024BOR; Start 526; Stop 550
gaattgaaagagatttggcttggtg

SEQ ID NO: 448033 - DNA, 25 bp, Artificial
  probe
  misc_feature (1)..(25): SEQ ID NO: 6746; WAN024BOR; Start 278; Stop 302
atcaactaattccagaagcgttaaa

SEQ ID NO: 448034 - DNA, 25 bp, Artificial
  probe
  misc_feature (1)..(25): SEQ ID NO: 6746; WAN024BOR; Start 495; Stop 519
agagttagctgtgcaatatgacatt

SEQ ID NO: 448035 - DNA, 25 bp, Artificial
  probe
  misc_feature (1)..(25): SEQ ID NO: 6746; WAN024BOR; Start 941; Stop 965
atgagtcatatgtcgttgcgtatta

SEQ ID NO: 448036 - DNA, 25 bp, Artificial
  probe
  misc_feature (1)..(25): SEQ ID NO: 6746; WAN024BOR; Start 527; Stop 551
aattgaaagagatttggcttggtga

SEQ ID NO: 448037 - DNA, 25 bp, Artificial
  probe
  misc_feature (1)..(25): SEQ ID NO: 6746; WAN024BOR; Start 525; Stop 549
tgaattgaaagagatttggcttggt

SEQ ID NO: 448038 - DNA, 25 bp, Artificial
  probe
  misc_feature (1)..(25): SEQ ID NO: 6747; WAN024CSZ; Start 206; Stop 230
ggtatgcgtcttctatttcagtttc

SEQ ID NO: 448039 - DNA, 25 bp, Artificial
  probe
  misc_feature (1)..(25): SEQ ID NO: 6747; WAN024CSZ; Start 204; Stop 228
atggtatgcgtcttctatttcagtt

SEQ ID NO: 448040 - DNA, 25 bp, Artificial
  probe
  misc_feature (1)..(25): SEQ ID NO: 6747; WAN024CSZ; Start 203; Stop 227
tatggtatgcgtcttctatttcagt

SEQ ID NO: 448041 - DNA, 25 bp, Artificial
  probe
  misc_feature (1)..(25): SEQ ID NO: 6747; WAN024CSZ; Start 116; Stop 140
ccttagattgggtgatattagacgg

SEQ ID NO: 448042 - DNA, 25 bp, Artificial
  probe
  misc_feature (1)..(25): SEQ ID NO: 6747; WAN024CSZ; Start 207; Stop 231
gtatgcgtcttctatttcagtttca

SEQ ID NO: 448043 - DNA, 25 bp, Artificial
  probe
  misc_feature (1)..(25): SEQ ID NO: 6747; WAN024CSZ; Start 205; Stop 229
tggtatgcgtcttctatttcagttt

SEQ ID NO: 448044 - DNA, 25 bp, Artificial
  probe
  misc_feature (1)..(25): SEQ ID NO: 6747; WAN024CSZ; Start 124; Stop 148
tgggtgatattagacggcaaattat

SEQ ID NO: 448045 - DNA, 25 bp, Artificial
  probe
  misc_feature (1)..(25): SEQ ID NO: 6747; WAN024CSZ; Start 117; Stop 141
cttagattgggtgatattagacggc

SEQ ID NO: 448046 - DNA, 25 bp, Artificial
  probe
  misc_feature (1)..(25): SEQ ID NO: 6747; WAN024CSZ; Start 202; Stop 226
ttatggtatgcgtcttctatttcag

SEQ ID NO: 448047 - DNA, 25 bp, Artificial
  probe
  misc_feature (1)..(25): SEQ ID NO: 6747; WAN024CSZ; Start 118; Stop 142
ttagattgggtgatattagacggca

SEQ ID NO: 448048 - DNA, 25 bp, Artificial
  probe
  misc_feature (1)..(25): SEQ ID NO: 6747; WAN024CSZ; Start 123; Stop 147
ttgggtgatattagacggcaaatta

SEQ ID NO: 448049 - DNA, 25 bp, Artificial
  probe
  misc_feature (1)..(25): SEQ ID NO: 6747; WAN024CSZ; Start 122; Stop 146
attgggtgatattagacggcaaatt

SEQ ID NO: 448050 - DNA, 25 bp, Artificial
  probe
  misc_feature (1)..(25): SEQ ID NO: 6747; WAN024CSZ; Start 209; Stop 233
atgcgtcttctatttcagtttcata

SEQ ID NO: 448051 - DNA, 25 bp, Artificial
  probe
  misc_feature (1)..(25): SEQ ID NO: 6747; WAN024CSZ; Start 208; Stop 232
tatgcgtcttctatttcagtttcat

SEQ ID NO: 448052 - DNA, 25 bp, Artificial
  probe
  misc_feature (1)..(25): SEQ ID NO: 6747; WAN024CSZ; Start 125; Stop 149
gggtgatattagacggcaaattata

SEQ ID NO: 448053 - DNA, 25 bp, Artificial
  probe
  misc_feature (1)..(25): SEQ ID NO: 6747; WAN024CSZ; Start 121; Stop 145
gattgggtgatattagacggcaaat

SEQ ID NO: 448054 - DNA, 25 bp, Artificial
  probe
  misc_feature (1)..(25): SEQ ID NO: 6747; WAN024CSZ; Start 201; Stop 225
attatggtatgcgtcttctatttca

SEQ ID NO: 448055 - DNA, 25 bp, Artificial
  probe
  misc_feature (1)..(25): SEQ ID NO: 6747; WAN024CSZ; Start 119; Stop 143
tagattgggtgatattagacggcaa

SEQ ID NO: 448056 - DNA, 25 bp, Artificial
  probe
  misc_feature (1)..(25): SEQ ID NO: 6747; WAN024CSZ; Start 210; Stop 234
tgcgtcttctatttcagtttcatag

SEQ ID NO: 448057 - DNA, 25 bp, Artificial
  probe
  misc_feature (1)..(25): SEQ ID NO: 6747; WAN024CSZ; Start 120; Stop 144
agattgggtgatattagacggcaaa

SEQ ID NO: 448058 - DNA, 25 bp, Artificial
  probe
  misc_feature (1)..(25): SEQ ID NO: 6747; WAN024CSZ; Start 200; Stop 224
aattatggtatgcgtcttctatttc

SEQ ID NO: 448059 - DNA, 25 bp, Artificial
  probe
  misc_feature (1)..(25): SEQ ID NO: 6747; WAN024CSZ; Start 126; Stop 150
ggtgatattagacggcaaattatat

SEQ ID NO: 448060 - DNA, 25 bp, Artificial
  probe
  misc_feature (1)..(25): SEQ ID NO: 6747; WAN024CSZ; Start 135; Stop 159
agacggcaaattatataaccaatgt

SEQ ID NO: 448061 - DNA, 25 bp, Artificial
  probe
  misc_feature (1)..(25): SEQ ID NO: 6747; WAN024CSZ; Start 115; Stop 139
cccttagattgggtgatattagacg

SEQ ID NO: 448062 - DNA, 25 bp, Artificial
  probe
  misc_feature (1)..(25): SEQ ID NO: 6747; WAN024CSZ; Start 199; Stop 223
aaattatggtatgcgtcttctattt

SEQ ID NO: 448063 - DNA, 25 bp, Artificial
  probe
  misc_feature (1)..(25): SEQ ID NO: 6747; WAN024CSZ; Start 114; Stop 138
tcccttagattgggtgatattagac

SEQ ID NO: 448064 - DNA, 25 bp, Artificial
  probe
  misc_feature (1)..(25): SEQ ID NO: 6747; WAN024CSZ; Start 138; Stop 162
cggcaaattatataaccaatgttca

SEQ ID NO: 448065 - DNA, 25 bp, Artificial
  probe
  misc_feature (1)..(25): SEQ ID NO: 6747; WAN024CSZ; Start 137; Stop 161
acggcaaattatataaccaatgttc

SEQ ID NO: 448066 - DNA, 25 bp, Artificial
  probe
  misc_feature (1)..(25): SEQ ID NO: 6747; WAN024CSZ; Start 136; Stop 160
gacggcaaattatataaccaatgtt

SEQ ID NO: 448067 - DNA, 25 bp, Artificial
  probe
  misc_feature (1)..(25): SEQ ID NO: 6747; WAN024CSZ; Start 198; Stop 222
taaattatggtatgcgtcttctatt

SEQ ID NO: 448068 - DNA, 25 bp, Artificial
  probe
  misc_feature (1)..(25): SEQ ID NO: 6747; WAN024CSZ; Start 196; Stop 220
aataaattatggtatgcgtcttcta

SEQ ID NO: 448069 - DNA, 25 bp, Artificial
  probe
  misc_feature (1)..(25): SEQ ID NO: 6747; WAN024CSZ; Start 195; Stop 219
taataaattatggtatgcgtcttct

SEQ ID NO: 448070 - DNA, 25 bp, Artificial
  probe
  misc_feature (1)..(25): SEQ ID NO: 6747; WAN024CSZ; Start 113; Stop 137
atcccttagattgggtgatattaga

SEQ ID NO: 448071 - DNA, 25 bp, Artificial
  probe
  misc_feature (1)..(25): SEQ ID NO: 6748; WAN024CW4; Start 4; Stop 28
ctactaggcacaacagttacagcag

SEQ ID NO: 448072 - DNA, 25 bp, Artificial
  probe
  misc_feature (1)..(25): SEQ ID NO: 6748; WAN024CW4; Start 7; Stop 31
ctaggcacaacagttacagcagaag

SEQ ID NO: 448073 - DNA, 25 bp, Artificial
  probe
  misc_feature (1)..(25): SEQ ID NO: 6748; WAN024CW4; Start 5; Stop 29
tactaggcacaacagttacagcaga

SEQ ID NO: 448074 - DNA, 25 bp, Artificial
  probe
  misc_feature (1)..(25): SEQ ID NO: 6748; WAN024CW4; Start 127; Stop 151
cctatagtattcaagtcgaaacggt

SEQ ID NO: 448075 - DNA, 25 bp, Artificial
  probe
  misc_feature (1)..(25): SEQ ID NO: 6748; WAN024CW4; Start 126; Stop 150
acctatagtattcaagtcgaaacgg

SEQ ID NO: 448076 - DNA, 25 bp, Artificial
  probe
  misc_feature (1)..(25): SEQ ID NO: 6748; WAN024CW4; Start 129; Stop 153
tatagtattcaagtcgaaacggtgc

SEQ ID NO: 448077 - DNA, 25 bp, Artificial
  probe
  misc_feature (1)..(25): SEQ ID NO: 6748; WAN024CW4; Start 128; Stop 152
ctatagtattcaagtcgaaacggtg

SEQ ID NO: 448078 - DNA, 25 bp, Artificial
  probe
  misc_feature (1)..(25): SEQ ID NO: 6748; WAN024CW4; Start 226; Stop 250
aaagtaatccctaaagattgtgtgt

SEQ ID NO: 448079 - DNA, 25 bp, Artificial
  probe
  misc_feature (1)..(25): SEQ ID NO: 6748; WAN024CW4; Start 1; Stop 25
atgctactaggcacaacagttacag

SEQ ID NO: 448080 - DNA, 25 bp, Artificial
  probe
  misc_feature (1)..(25): SEQ ID NO: 6748; WAN024CW4; Start 125; Stop 149
tacctatagtattcaagtcgaaacg

SEQ ID NO: 448081 - DNA, 25 bp, Artificial
  probe
  misc_feature (1)..(25): SEQ ID NO: 6748; WAN024CW4; Start 6; Stop 30
actaggcacaacagttacagcagaa

SEQ ID NO: 448082 - DNA, 25 bp, Artificial
  probe
  misc_feature (1)..(25): SEQ ID NO: 6748; WAN024CW4; Start 227; Stop 251
aagtaatccctaaagattgtgtgta

SEQ ID NO: 448083 - DNA, 25 bp, Artificial
  probe
  misc_feature (1)..(25): SEQ ID NO: 6748; WAN024CW4; Start 250; Stop 274
tatactaaaaccaacgccaagattg

SEQ ID NO: 448084 - DNA, 25 bp, Artificial
  probe
  misc_feature (1)..(25): SEQ ID NO: 6748; WAN024CW4; Start 228; Stop 252
agtaatccctaaagattgtgtgtat

SEQ ID NO: 448085 - DNA, 25 bp, Artificial
  probe
  misc_feature (1)..(25): SEQ ID NO: 6748; WAN024CW4; Start 254; Stop 278
ctaaaaccaacgccaagattgaaaa

SEQ ID NO: 448086 - DNA, 25 bp, Artificial
  probe
  misc_feature (1)..(25): SEQ ID NO: 6748; WAN024CW4; Start 251; Stop 275
atactaaaaccaacgccaagattga

SEQ ID NO: 448087 - DNA, 25 bp, Artificial
  probe
  misc_feature (1)..(25): SEQ ID NO: 6748; WAN024CW4; Start 292; Stop 316
cgacttcctgttaggatcattatca

SEQ ID NO: 448088 - DNA, 25 bp, Artificial
  probe
  misc_feature (1)..(25): SEQ ID NO: 6748; WAN024CW4; Start 291; Stop 315
acgacttcctgttaggatcattatc

SEQ ID NO: 448089 - DNA, 25 bp, Artificial
  probe
  misc_feature (1)..(25): SEQ ID NO: 6748; WAN024CW4; Start 255; Stop 279
taaaaccaacgccaagattgaaaac

SEQ ID NO: 448090 - DNA, 25 bp, Artificial
  probe
  misc_feature (1)..(25): SEQ ID NO: 6748; WAN024CW4; Start 252; Stop 276
tactaaaaccaacgccaagattgaa

SEQ ID NO: 448091 - DNA, 25 bp, Artificial
  probe
  misc_feature (1)..(25): SEQ ID NO: 6748; WAN024CW4; Start 289; Stop 313
ttacgacttcctgttaggatcatta

SEQ ID NO: 448092 - DNA, 25 bp, Artificial
  probe
  misc_feature (1)..(25): SEQ ID NO: 6748; WAN024CW4; Start 12; Stop 36
cacaacagttacagcagaagctact

SEQ ID NO: 448093 - DNA, 25 bp, Artificial
  probe
  misc_feature (1)..(25): SEQ ID NO: 6748; WAN024CW4; Start 290; Stop 314
tacgacttcctgttaggatcattat

SEQ ID NO: 448094 - DNA, 25 bp, Artificial
  probe
  misc_feature (1)..(25): SEQ ID NO: 6748; WAN024CW4; Start 270; Stop 294
gattgaaaacacctggattttacga

SEQ ID NO: 448095 - DNA, 25 bp, Artificial
  probe
  misc_feature (1)..(25): SEQ ID NO: 6748; WAN024CW4; Start 269; Stop 293
agattgaaaacacctggattttacg

SEQ ID NO: 448096 - DNA, 25 bp, Artificial
  probe
  misc_feature (1)..(25): SEQ ID NO: 6748; WAN024CW4; Start 253; Stop 277
actaaaaccaacgccaagattgaaa

SEQ ID NO: 448097 - DNA, 25 bp, Artificial
  probe
  misc_feature (1)..(25): SEQ ID NO: 6748; WAN024CW4; Start 271; Stop 295
attgaaaacacctggattttacgac

SEQ ID NO: 448098 - DNA, 25 bp, Artificial
  probe
  misc_feature (1)..(25): SEQ ID NO: 6748; WAN024CW4; Start 274; Stop 298
gaaaacacctggattttacgacttc

SEQ ID NO: 448099 - DNA, 25 bp, Artificial
  probe
  misc_feature (1)..(25): SEQ ID NO: 6748; WAN024CW4; Start 130; Stop 154
atagtattcaagtcgaaacggtgcc

SEQ ID NO: 448100 - DNA, 25 bp, Artificial
  probe
  misc_feature (1)..(25): SEQ ID NO: 6748; WAN024CW4; Start 54; Stop 78
cgactctgaaaatacttcccctagt

SEQ ID NO: 448101 - DNA, 25 bp, Artificial
  probe
  misc_feature (1)..(25): SEQ ID NO: 6748; WAN024CW4; Start 17; Stop 41
cagttacagcagaagctactgttag

SEQ ID NO: 448102 - DNA, 25 bp, Artificial
  probe
  misc_feature (1)..(25): SEQ ID NO: 6748; WAN024CW4; Start 273; Stop 297
tgaaaacacctggattttacgactt

SEQ ID NO: 448103 - DNA, 25 bp, Artificial
  probe
  misc_feature (1)..(25): SEQ ID NO: 6748; WAN024CW4; Start 272; Stop 296
ttgaaaacacctggattttacgact

SEQ ID NO: 448104 - DNA, 25 bp, Artificial
  probe
  misc_feature (1)..(25): SEQ ID NO: 6749; WAN024BSP; Start 31; Stop 55
attactgaagacgaagactttgaga

SEQ ID NO: 448105 - DNA, 25 bp, Artificial
  probe
  misc_feature (1)..(25): SEQ ID NO: 6749; WAN024BSP; Start 32; Stop 56
ttactgaagacgaagactttgagac

SEQ ID NO: 448106 - DNA, 25 bp, Artificial
  probe
  misc_feature (1)..(25): SEQ ID NO: 6749; WAN024BSP; Start 212; Stop 236
aagaaataaggcatcaaatccaaga

SEQ ID NO: 448107 - DNA, 25 bp, Artificial
  probe
  misc_feature (1)..(25): SEQ ID NO: 6749; WAN024BSP; Start 103; Stop 127
ctaaatggcaagtttgaagaaagtc

SEQ ID NO: 448108 - DNA, 25 bp, Artificial
  probe
  misc_feature (1)..(25): SEQ ID NO: 6749; WAN024BSP; Start 216; Stop 240
aataaggcatcaaatccaagatagg

SEQ ID NO: 448109 - DNA, 25 bp, Artificial
  probe
  misc_feature (1)..(25): SEQ ID NO: 6749; WAN024BSP; Start 105; Stop 129
aaatggcaagtttgaagaaagtctc

SEQ ID NO: 448110 - DNA, 25 bp, Artificial
  probe
  misc_feature (1)..(25): SEQ ID NO: 6749; WAN024BSP; Start 104; Stop 128
taaatggcaagtttgaagaaagtct

SEQ ID NO: 448111 - DNA, 25 bp, Artificial
  probe
  misc_feature (1)..(25): SEQ ID NO: 6749; WAN024BSP; Start 102; Stop 126
tctaaatggcaagtttgaagaaagt

SEQ ID NO: 448112 - DNA, 25 bp, Artificial
  probe
  misc_feature (1)..(25): SEQ ID NO: 6749; WAN024BSP; Start 213; Stop 237
agaaataaggcatcaaatccaagat

SEQ ID NO: 448113 - DNA, 25 bp, Artificial
  probe
  misc_feature (1)..(25): SEQ ID NO: 6749; WAN024BSP; Start 30; Stop 54
aattactgaagacgaagactttgag

SEQ ID NO: 448114 - DNA, 25 bp, Artificial
  probe
  misc_feature (1)..(25): SEQ ID NO: 6749; WAN024BSP; Start 211; Stop 235
aaagaaataaggcatcaaatccaag

SEQ ID NO: 448115 - DNA, 25 bp, Artificial
  probe
  misc_feature (1)..(25): SEQ ID NO: 6749; WAN024BSP; Start 29; Stop 53
aaattactgaagacgaagactttga

SEQ ID NO: 448116 - DNA, 25 bp, Artificial
  probe
  misc_feature (1)..(25): SEQ ID NO: 6749; WAN024BSP; Start 27; Stop 51
tgaaattactgaagacgaagacttt

SEQ ID NO: 448117 - DNA, 25 bp, Artificial
  probe
  misc_feature (1)..(25): SEQ ID NO: 6749; WAN024BSP; Start 28; Stop 52
gaaattactgaagacgaagactttg

SEQ ID NO: 448118 - DNA, 25 bp, Artificial
  probe
  misc_feature (1)..(25): SEQ ID NO: 6749; WAN024BSP; Start 26; Stop 50
atgaaattactgaagacgaagactt

SEQ ID NO: 448119 - DNA, 25 bp, Artificial
  probe
  misc_feature (1)..(25): SEQ ID NO: 6749; WAN024BSP; Start 106; Stop 130
aatggcaagtttgaagaaagtctca

SEQ ID NO: 448120 - DNA, 25 bp, Artificial
  probe
  misc_feature (1)..(25): SEQ ID NO: 6749; WAN024BSP; Start 209; Stop 233
gtaaagaaataaggcatcaaatcca

SEQ ID NO: 448121 - DNA, 25 bp, Artificial
  probe
  misc_feature (1)..(25): SEQ ID NO: 6749; WAN024BSP; Start 33; Stop 57
tactgaagacgaagactttgagacc

SEQ ID NO: 448122 - DNA, 25 bp, Artificial
  probe
  misc_feature (1)..(25): SEQ ID NO: 6749; WAN024BSP; Start 25; Stop 49
tatgaaattactgaagacgaagact

SEQ ID NO: 448123 - DNA, 25 bp, Artificial
  probe
  misc_feature (1)..(25): SEQ ID NO: 6749; WAN024BSP; Start 208; Stop 232
agtaaagaaataaggcatcaaatcc

SEQ ID NO: 448124 - DNA, 25 bp, Artificial
  probe
  misc_feature (1)..(25): SEQ ID NO: 6749; WAN024BSP; Start 220; Stop 244
aggcatcaaatccaagataggaatt

SEQ ID NO: 448125 - DNA, 25 bp, Artificial
  probe
  misc_feature (1)..(25): SEQ ID NO: 6749; WAN024BSP; Start 219; Stop 243
aaggcatcaaatccaagataggaat

SEQ ID NO: 448126 - DNA, 25 bp, Artificial
  probe
  misc_feature (1)..(25): SEQ ID NO: 6749; WAN024BSP; Start 218; Stop 242
taaggcatcaaatccaagataggaa

SEQ ID NO: 448127 - DNA, 25 bp, Artificial
  probe
  misc_feature (1)..(25): SEQ ID NO: 6749; WAN024BSP; Start 217; Stop 241
ataaggcatcaaatccaagatagga

SEQ ID NO: 448128 - DNA, 25 bp, Artificial
  probe
  misc_feature (1)..(25): SEQ ID NO: 6749; WAN024BSP; Start 151; Stop 175
acctttagtaaactcattggagaaa

SEQ ID NO: 448129 - DNA, 25 bp, Artificial
  probe
  misc_feature (1)..(25): SEQ ID NO: 6749; WAN024BSP; Start 215; Stop 239
aaataaggcatcaaatccaagatag

SEQ ID NO: 448130 - DNA, 25 bp, Artificial
  probe
  misc_feature (1)..(25): SEQ ID NO: 6749; WAN024BSP; Start 214; Stop 238
gaaataaggcatcaaatccaagata

SEQ ID NO: 448131 - DNA, 25 bp, Artificial
  probe
  misc_feature (1)..(25): SEQ ID NO: 6749; WAN024BSP; Start 210; Stop 234
taaagaaataaggcatcaaatccaa

SEQ ID NO: 448132 - DNA, 25 bp, Artificial
  probe
  misc_feature (1)..(25): SEQ ID NO: 6749; WAN024BSP; Start 24; Stop 48
ttatgaaattactgaagacgaagac

SEQ ID NO: 448133 - DNA, 25 bp, Artificial
  probe
  misc_feature (1)..(25): SEQ ID NO: 6749; WAN024BSP; Start 150; Stop 174
tacctttagtaaactcattggagaa

SEQ ID NO: 448134 - DNA, 25 bp, Artificial
  probe
  misc_feature (1)..(25): SEQ ID NO: 6749; WAN024BSP; Start 101; Stop 125
ttctaaatggcaagtttgaagaaag

SEQ ID NO: 448135 - DNA, 25 bp, Artificial
  probe
  misc_feature (1)..(25): SEQ ID NO: 6749; WAN024BSP; Start 176; Stop 200
aactatgtaatggtgaagacctaaa

SEQ ID NO: 448136 - DNA, 25 bp, Artificial
  probe
  misc_feature (1)..(25): SEQ ID NO: 6749; WAN024BSP; Start 175; Stop 199
aaactatgtaatggtgaagacctaa

SEQ ID NO: 448137 - DNA, 25 bp, Artificial
  probe
  misc_feature (1)..(25): SEQ ID NO: 6750; WAN024EW7; Start 184; Stop 208
tatatcctgagcattgatggcagaa

SEQ ID NO: 448138 - DNA, 25 bp, Artificial
  probe
  misc_feature (1)..(25): SEQ ID NO: 6750; WAN024EW7; Start 181; Stop 205
ctctatatcctgagcattgatggca

SEQ ID NO: 448139 - DNA, 25 bp, Artificial
  probe
  misc_feature (1)..(25): SEQ ID NO: 6750; WAN024EW7; Start 295; Stop 319
tttctctttcattacttgctgtcca

SEQ ID NO: 448140 - DNA, 25 bp, Artificial
  probe
  misc_feature (1)..(25): SEQ ID NO: 6750; WAN024EW7; Start 183; Stop 207
ctatatcctgagcattgatggcaga

SEQ ID NO: 448141 - DNA, 25 bp, Artificial
  probe
  misc_feature (1)..(25): SEQ ID NO: 6750; WAN024EW7; Start 182; Stop 206
tctatatcctgagcattgatggcag

SEQ ID NO: 448142 - DNA, 25 bp, Artificial
  probe
  misc_feature (1)..(25): SEQ ID NO: 6750; WAN024EW7; Start 296; Stop 320
ttctctttcattacttgctgtccag

SEQ ID NO: 448143 - DNA, 25 bp, Artificial
  probe
  misc_feature (1)..(25): SEQ ID NO: 6750; WAN024EW7; Start 185; Stop 209
atatcctgagcattgatggcagaac

SEQ ID NO: 448144 - DNA, 25 bp, Artificial
  probe
  misc_feature (1)..(25): SEQ ID NO: 6750; WAN024EW7; Start 298; Stop 322
ctctttcattacttgctgtccagtc

SEQ ID NO: 448145 - DNA, 25 bp, Artificial
  probe
  misc_feature (1)..(25): SEQ ID NO: 6750; WAN024EW7; Start 297; Stop 321
tctctttcattacttgctgtccagt

SEQ ID NO: 448146 - DNA, 25 bp, Artificial
  probe
  misc_feature (1)..(25): SEQ ID NO: 6750; WAN024EW7; Start 217; Stop 241
ctcataggtctccacatcgaaataa

SEQ ID NO: 448147 - DNA, 25 bp, Artificial
  probe
  misc_feature (1)..(25): SEQ ID NO: 6750; WAN024EW7; Start 218; Stop 242
tcataggtctccacatcgaaataac

SEQ ID NO: 448148 - DNA, 25 bp, Artificial
  probe
  misc_feature (1)..(25): SEQ ID NO: 6750; WAN024EW7; Start 134; Stop 158
tctgtaaagacaatgactccatgac

SEQ ID NO: 448149 - DNA, 25 bp, Artificial
  probe
  misc_feature (1)..(25): SEQ ID NO: 6750; WAN024EW7; Start 242; Stop 266
cgtttgagattgaccgtatcatcac

SEQ ID NO: 448150 - DNA, 25 bp, Artificial
  probe
  misc_feature (1)..(25): SEQ ID NO: 6750; WAN024EW7; Start 216; Stop 240
tctcataggtctccacatcgaaata

SEQ ID NO: 448151 - DNA, 25 bp, Artificial
  probe
  misc_feature (1)..(25): SEQ ID NO: 6750; WAN024EW7; Start 219; Stop 243
cataggtctccacatcgaaataacg

SEQ ID NO: 448152 - DNA, 25 bp, Artificial
  probe
  misc_feature (1)..(25): SEQ ID NO: 6750; WAN024EW7; Start 73; Stop 97
ctgaactgttggaatgaccatcatg

SEQ ID NO: 448153 - DNA, 25 bp, Artificial
  probe
  misc_feature (1)..(25): SEQ ID NO: 6750; WAN024EW7; Start 135; Stop 159
ctgtaaagacaatgactccatgacg

SEQ ID NO: 448154 - DNA, 25 bp, Artificial
  probe
  misc_feature (1)..(25): SEQ ID NO: 6750; WAN024EW7; Start 302; Stop 326
ttcattacttgctgtccagtccaaa

SEQ ID NO: 448155 - DNA, 25 bp, Artificial
  probe
  misc_feature (1)..(25): SEQ ID NO: 6750; WAN024EW7; Start 301; Stop 325
tttcattacttgctgtccagtccaa

SEQ ID NO: 448156 - DNA, 25 bp, Artificial
  probe
  misc_feature (1)..(25): SEQ ID NO: 6750; WAN024EW7; Start 299; Stop 323
tctttcattacttgctgtccagtcc

SEQ ID NO: 448157 - DNA, 25 bp, Artificial
  probe
  misc_feature (1)..(25): SEQ ID NO: 6750; WAN024EW7; Start 215; Stop 239
gtctcataggtctccacatcgaaat

SEQ ID NO: 448158 - DNA, 25 bp, Artificial
  probe
  misc_feature (1)..(25): SEQ ID NO: 6750; WAN024EW7; Start 137; Stop 161
gtaaagacaatgactccatgacgtt

SEQ ID NO: 448159 - DNA, 25 bp, Artificial
  probe
  misc_feature (1)..(25): SEQ ID NO: 6750; WAN024EW7; Start 220; Stop 244
ataggtctccacatcgaaataacgt

SEQ ID NO: 448160 - DNA, 25 bp, Artificial
  probe
  misc_feature (1)..(25): SEQ ID NO: 6750; WAN024EW7; Start 213; Stop 237
gagtctcataggtctccacatcgaa

SEQ ID NO: 448161 - DNA, 25 bp, Artificial
  probe
  misc_feature (1)..(25): SEQ ID NO: 6750; WAN024EW7; Start 138; Stop 162
taaagacaatgactccatgacgttg

SEQ ID NO: 448162 - DNA, 25 bp, Artificial
  probe
  misc_feature (1)..(25): SEQ ID NO: 6750; WAN024EW7; Start 300; Stop 324
ctttcattacttgctgtccagtcca

SEQ ID NO: 448163 - DNA, 25 bp, Artificial
  probe
  misc_feature (1)..(25): SEQ ID NO: 6750; WAN024EW7; Start 294; Stop 318
ttttctctttcattacttgctgtcc

SEQ ID NO: 448164 - DNA, 25 bp, Artificial
  probe
  misc_feature (1)..(25): SEQ ID NO: 6750; WAN024EW7; Start 70; Stop 94
atgctgaactgttggaatgaccatc

SEQ ID NO: 448165 - DNA, 25 bp, Artificial
  probe
  misc_feature (1)..(25): SEQ ID NO: 6750; WAN024EW7; Start 270; Stop 294
cttcaaccacgataacttgagaaat

SEQ ID NO: 448166 - DNA, 25 bp, Artificial
  probe
  misc_feature (1)..(25): SEQ ID NO: 6750; WAN024EW7; Start 271; Stop 295
ttcaaccacgataacttgagaaatt

SEQ ID NO: 448167 - DNA, 25 bp, Artificial
  probe
  misc_feature (1)..(25): SEQ ID NO: 6750; WAN024EW7; Start 214; Stop 238
agtctcataggtctccacatcgaaa

SEQ ID NO: 448168 - DNA, 25 bp, Artificial
  probe
  misc_feature (1)..(25): SEQ ID NO: 6750; WAN024EW7; Start 269; Stop 293
ccttcaaccacgataacttgagaaa

SEQ ID NO: 448169 - DNA, 25 bp, Artificial
  probe
  misc_feature (1)..(25): SEQ ID NO: 6750; WAN024EW7; Start 170; Stop 194
cgctgaatccgctctatatcctgag

SEQ ID NO: 448170 - DNA, 25 bp, Artificial
  probe
  misc_feature (1)..(25): SEQ ID NO: 6751; WAN024CIP; Start 125; Stop 149
ccaacttgatacatactactctcct

SEQ ID NO: 448171 - DNA, 25 bp, Artificial
  probe
  misc_feature (1)..(25): SEQ ID NO: 6751; WAN024CIP; Start 124; Stop 148
tccaacttgatacatactactctcc

SEQ ID NO: 448172 - DNA, 25 bp, Artificial
  probe
  misc_feature (1)..(25): SEQ ID NO: 6751; WAN024CIP; Start 126; Stop 150
caacttgatacatactactctcctt

SEQ ID NO: 448173 - DNA, 25 bp, Artificial
  probe
  misc_feature (1)..(25): SEQ ID NO: 6751; WAN024CIP; Start 123; Stop 147
ttccaacttgatacatactactctc

SEQ ID NO: 448174 - DNA, 25 bp, Artificial
  probe
  misc_feature (1)..(25): SEQ ID NO: 6751; WAN024CIP; Start 187; Stop 211
gctcaacctctttcacttaatttgt

SEQ ID NO: 448175 - DNA, 25 bp, Artificial
  probe
  misc_feature (1)..(25): SEQ ID NO: 6751; WAN024CIP; Start 186; Stop 210
ggctcaacctctttcacttaatttg

SEQ ID NO: 448176 - DNA, 25 bp, Artificial
  probe
  misc_feature (1)..(25): SEQ ID NO: 6751; WAN024CIP; Start 46; Stop 70
tgtaatttcccaacgattagccttt

SEQ ID NO: 448177 - DNA, 25 bp, Artificial
  probe
  misc_feature (1)..(25): SEQ ID NO: 6751; WAN024CIP; Start 197; Stop 221
tttcacttaatttgtacgaactggt

SEQ ID NO: 448178 - DNA, 25 bp, Artificial
  probe
  misc_feature (1)..(25): SEQ ID NO: 6751; WAN024CIP; Start 191; Stop 215
aacctctttcacttaatttgtacga

SEQ ID NO: 448179 - DNA, 25 bp, Artificial
  probe
  misc_feature (1)..(25): SEQ ID NO: 6751; WAN024CIP; Start 201; Stop 225
acttaatttgtacgaactggtgtaa

SEQ ID NO: 448180 - DNA, 25 bp, Artificial
  probe
  misc_feature (1)..(25): SEQ ID NO: 6751; WAN024CIP; Start 45; Stop 69
gtgtaatttcccaacgattagcctt

SEQ ID NO: 448181 - DNA, 25 bp, Artificial
  probe
  misc_feature (1)..(25): SEQ ID NO: 6751; WAN024CIP; Start 196; Stop 220
ctttcacttaatttgtacgaactgg

SEQ ID NO: 448182 - DNA, 25 bp, Artificial
  probe
  misc_feature (1)..(25): SEQ ID NO: 6751; WAN024CIP; Start 192; Stop 216
acctctttcacttaatttgtacgaa

SEQ ID NO: 448183 - DNA, 25 bp, Artificial
  probe
  misc_feature (1)..(25): SEQ ID NO: 6751; WAN024CIP; Start 185; Stop 209
aggctcaacctctttcacttaattt

SEQ ID NO: 448184 - DNA, 25 bp, Artificial
  probe
  misc_feature (1)..(25): SEQ ID NO: 6751; WAN024CIP; Start 193; Stop 217
cctctttcacttaatttgtacgaac

SEQ ID NO: 448185 - DNA, 25 bp, Artificial
  probe
  misc_feature (1)..(25): SEQ ID NO: 6751; WAN024CIP; Start 190; Stop 214
caacctctttcacttaatttgtacg

SEQ ID NO: 448186 - DNA, 25 bp, Artificial
  probe
  misc_feature (1)..(25): SEQ ID NO: 6751; WAN024CIP; Start 184; Stop 208
caggctcaacctctttcacttaatt

SEQ ID NO: 448187 - DNA, 25 bp, Artificial
  probe
  misc_feature (1)..(25): SEQ ID NO: 6751; WAN024CIP; Start 198; Stop 222
ttcacttaatttgtacgaactggtg

SEQ ID NO: 448188 - DNA, 25 bp, Artificial
  probe
  misc_feature (1)..(25): SEQ ID NO: 6751; WAN024CIP; Start 199; Stop 223
tcacttaatttgtacgaactggtgt

SEQ ID NO: 448189 - DNA, 25 bp, Artificial
  probe
  misc_feature (1)..(25): SEQ ID NO: 6751; WAN024CIP; Start 200; Stop 224
cacttaatttgtacgaactggtgta

SEQ ID NO: 448190 - DNA, 25 bp, Artificial
  probe
  misc_feature (1)..(25): SEQ ID NO: 6751; WAN024CIP; Start 195; Stop 219
tctttcacttaatttgtacgaactg

SEQ ID NO: 448191 - DNA, 25 bp, Artificial
  probe
  misc_feature (1)..(25): SEQ ID NO: 6751; WAN024CIP; Start 122; Stop 146
tttccaacttgatacatactactct

SEQ ID NO: 448192 - DNA, 25 bp, Artificial
  probe
  misc_feature (1)..(25): SEQ ID NO: 6751; WAN024CIP; Start 194; Stop 218
ctctttcacttaatttgtacgaact

SEQ ID NO: 448193 - DNA, 25 bp, Artificial
  probe
  misc_feature (1)..(25): SEQ ID NO: 6751; WAN024CIP; Start 127; Stop 151
aacttgatacatactactctccttt

SEQ ID NO: 448194 - DNA, 25 bp, Artificial
  probe
  misc_feature (1)..(25): SEQ ID NO: 6751; WAN024CIP; Start 188; Stop 212
ctcaacctctttcacttaatttgta

SEQ ID NO: 448195 - DNA, 25 bp, Artificial
  probe
  misc_feature (1)..(25): SEQ ID NO: 6751; WAN024CIP; Start 189; Stop 213
tcaacctctttcacttaatttgtac

SEQ ID NO: 448196 - DNA, 25 bp, Artificial
  probe
  misc_feature (1)..(25): SEQ ID NO: 6751; WAN024CIP; Start 139; Stop 163
actactctccttttcttttccgatt

SEQ ID NO: 448197 - DNA, 25 bp, Artificial
  probe
  misc_feature (1)..(25): SEQ ID NO: 6751; WAN024CIP; Start 138; Stop 162
tactactctccttttcttttccgat

SEQ ID NO: 448198 - DNA, 25 bp, Artificial
  probe
  misc_feature (1)..(25): SEQ ID NO: 6751; WAN024CIP; Start 137; Stop 161
atactactctccttttcttttccga

SEQ ID NO: 448199 - DNA, 25 bp, Artificial
  probe
  misc_feature (1)..(25): SEQ ID NO: 6751; WAN024CIP; Start 136; Stop 160
catactactctccttttcttttccg

SEQ ID NO: 448200 - DNA, 25 bp, Artificial
  probe
  misc_feature (1)..(25): SEQ ID NO: 6751; WAN024CIP; Start 159; Stop 183
cgattatatcataaaagaggcgagc

SEQ ID NO: 448201 - DNA, 25 bp, Artificial
  probe
  misc_feature (1)..(25): SEQ ID NO: 6751; WAN024CIP; Start 183; Stop 207
ccaggctcaacctctttcacttaat

SEQ ID NO: 448202 - DNA, 25 bp, Artificial
  probe
  misc_feature (1)..(25): SEQ ID NO: 6751; WAN024CIP; Start 157; Stop 181
tccgattatatcataaaagaggcga

SEQ ID NO: 448203 - DNA, 25 bp, Artificial
  probe
  misc_feature (1)..(25): SEQ ID NO: 6752; WAN024FC8; Start 203; Stop 227
ataatgcccttgtcctcaaagttag

SEQ ID NO: 448204 - DNA, 25 bp, Artificial
  probe
  misc_feature (1)..(25): SEQ ID NO: 6752; WAN024FC8; Start 202; Stop 226
gataatgcccttgtcctcaaagtta

SEQ ID NO: 448205 - DNA, 25 bp, Artificial
  probe
  misc_feature (1)..(25): SEQ ID NO: 6752; WAN024FC8; Start 147; Stop 171
gataattggtccagttgtgctcttt

SEQ ID NO: 448206 - DNA, 25 bp, Artificial
  probe
  misc_feature (1)..(25): SEQ ID NO: 6752; WAN024FC8; Start 146; Stop 170
ggataattggtccagttgtgctctt

SEQ ID NO: 448207 - DNA, 25 bp, Artificial
  probe
  misc_feature (1)..(25): SEQ ID NO: 6752; WAN024FC8; Start 23; Stop 47
aagagttccaaggatgcagaagaag

SEQ ID NO: 448208 - DNA, 25 bp, Artificial
  probe
  misc_feature (1)..(25): SEQ ID NO: 6752; WAN024FC8; Start 28; Stop 52
ttccaaggatgcagaagaagacaag

SEQ ID NO: 448209 - DNA, 25 bp, Artificial
  probe
  misc_feature (1)..(25): SEQ ID NO: 6752; WAN024FC8; Start 22; Stop 46
caagagttccaaggatgcagaagaa

SEQ ID NO: 448210 - DNA, 25 bp, Artificial
  probe
  misc_feature (1)..(25): SEQ ID NO: 6752; WAN024FC8; Start 204; Stop 228
taatgcccttgtcctcaaagttagc

SEQ ID NO: 448211 - DNA, 25 bp, Artificial
  probe
  misc_feature (1)..(25): SEQ ID NO: 6752; WAN024FC8; Start 27; Stop 51
gttccaaggatgcagaagaagacaa

SEQ ID NO: 448212 - DNA, 25 bp, Artificial
  probe
  misc_feature (1)..(25): SEQ ID NO: 6752; WAN024FC8; Start 25; Stop 49
gagttccaaggatgcagaagaagac

SEQ ID NO: 448213 - DNA, 25 bp, Artificial
  probe
  misc_feature (1)..(25): SEQ ID NO: 6752; WAN024FC8; Start 24; Stop 48
agagttccaaggatgcagaagaaga

SEQ ID NO: 448214 - DNA, 25 bp, Artificial
  probe
  misc_feature (1)..(25): SEQ ID NO: 6752; WAN024FC8; Start 201; Stop 225
cgataatgcccttgtcctcaaagtt

SEQ ID NO: 448215 - DNA, 25 bp, Artificial
  probe
  misc_feature (1)..(25): SEQ ID NO: 6752; WAN024FC8; Start 20; Stop 44
gtcaagagttccaaggatgcagaag

SEQ ID NO: 448216 - DNA, 25 bp, Artificial
  probe
  misc_feature (1)..(25): SEQ ID NO: 6752; WAN024FC8; Start 21; Stop 45
tcaagagttccaaggatgcagaaga

SEQ ID NO: 448217 - DNA, 25 bp, Artificial
  probe
  misc_feature (1)..(25): SEQ ID NO: 6752; WAN024FC8; Start 148; Stop 172
ataattggtccagttgtgctctttt

SEQ ID NO: 448218 - DNA, 25 bp, Artificial
  probe
  misc_feature (1)..(25): SEQ ID NO: 6752; WAN024FC8; Start 26; Stop 50
agttccaaggatgcagaagaagaca

SEQ ID NO: 448219 - DNA, 25 bp, Artificial
  probe
  misc_feature (1)..(25): SEQ ID NO: 6752; WAN024FC8; Start 50; Stop 74
aagccagcaccatttggaatatttc

SEQ ID NO: 448220 - DNA, 25 bp, Artificial
  probe
  misc_feature (1)..(25): SEQ ID NO: 6752; WAN024FC8; Start 49; Stop 73
caagccagcaccatttggaatattt

SEQ ID NO: 448221 - DNA, 25 bp, Artificial
  probe
  misc_feature (1)..(25): SEQ ID NO: 6752; WAN024FC8; Start 199; Stop 223
ttcgataatgcccttgtcctcaaag

SEQ ID NO: 448222 - DNA, 25 bp, Artificial
  probe
  misc_feature (1)..(25): SEQ ID NO: 6752; WAN024FC8; Start 198; Stop 222
cttcgataatgcccttgtcctcaaa

SEQ ID NO: 448223 - DNA, 25 bp, Artificial
  probe
  misc_feature (1)..(25): SEQ ID NO: 6752; WAN024FC8; Start 19; Stop 43
tgtcaagagttccaaggatgcagaa

SEQ ID NO: 448224 - DNA, 25 bp, Artificial
  probe
  misc_feature (1)..(25): SEQ ID NO: 6752; WAN024FC8; Start 47; Stop 71
gacaagccagcaccatttggaatat

SEQ ID NO: 448225 - DNA, 25 bp, Artificial
  probe
  misc_feature (1)..(25): SEQ ID NO: 6752; WAN024FC8; Start 48; Stop 72
acaagccagcaccatttggaatatt

SEQ ID NO: 448226 - DNA, 25 bp, Artificial
  probe
  misc_feature (1)..(25): SEQ ID NO: 6752; WAN024FC8; Start 85; Stop 109
aaaatcaaaacctttgtcaatcacg

SEQ ID NO: 448227 - DNA, 25 bp, Artificial
  probe
  misc_feature (1)..(25): SEQ ID NO: 6752; WAN024FC8; Start 18; Stop 42
ctgtcaagagttccaaggatgcaga

SEQ ID NO: 448228 - DNA, 25 bp, Artificial
  probe
  misc_feature (1)..(25): SEQ ID NO: 6752; WAN024FC8; Start 40; Stop 64
agaagaagacaagccagcaccattt

SEQ ID NO: 448229 - DNA, 25 bp, Artificial
  probe
  misc_feature (1)..(25): SEQ ID NO: 6752; WAN024FC8; Start 200; Stop 224
tcgataatgcccttgtcctcaaagt

SEQ ID NO: 448230 - DNA, 25 bp, Artificial
  probe
  misc_feature (1)..(25): SEQ ID NO: 6752; WAN024FC8; Start 197; Stop 221
acttcgataatgcccttgtcctcaa

SEQ ID NO: 448231 - DNA, 25 bp, Artificial
  probe
  misc_feature (1)..(25): SEQ ID NO: 6752; WAN024FC8; Start 32; Stop 56
aaggatgcagaagaagacaagccag

SEQ ID NO: 448232 - DNA, 25 bp, Artificial
  probe
  misc_feature (1)..(25): SEQ ID NO: 6752; WAN024FC8; Start 29; Stop 53
tccaaggatgcagaagaagacaagc

SEQ ID NO: 448233 - DNA, 25 bp, Artificial
  probe
  misc_feature (1)..(25): SEQ ID NO: 6752; WAN024FC8; Start 41; Stop 65
gaagaagacaagccagcaccatttg

SEQ ID NO: 448234 - DNA, 25 bp, Artificial
  probe
  misc_feature (1)..(25): SEQ ID NO: 6752; WAN024FC8; Start 196; Stop 220
cacttcgataatgcccttgtcctca

SEQ ID NO: 448235 - DNA, 25 bp, Artificial
  probe
  misc_feature (1)..(25): SEQ ID NO: 6752; WAN024FC8; Start 205; Stop 229
aatgcccttgtcctcaaagttagct

SEQ ID NO: 448236 - DNA, 25 bp, Artificial
  probe
  misc_feature (1)..(25): SEQ ID NO: 6753; WAN024CW2; Start 104; Stop 128
agacagataacttgctttacaccag

SEQ ID NO: 448237 - DNA, 25 bp, Artificial
  probe
  misc_feature (1)..(25): SEQ ID NO: 6753; WAN024CW2; Start 103; Stop 127
aagacagataacttgctttacacca

SEQ ID NO: 448238 - DNA, 25 bp, Artificial
  probe
  misc_feature (1)..(25): SEQ ID NO: 6753; WAN024CW2; Start 204; Stop 228
aagaaggtacttgtttaagagcagc

SEQ ID NO: 448239 - DNA, 25 bp, Artificial
  probe
  misc_feature (1)..(25): SEQ ID NO: 6753; WAN024CW2; Start 206; Stop 230
gaaggtacttgtttaagagcagcag

SEQ ID NO: 448240 - DNA, 25 bp, Artificial
  probe
  misc_feature (1)..(25): SEQ ID NO: 6753; WAN024CW2; Start 62; Stop 86
gttcccatagcattgacaggataag

SEQ ID NO: 448241 - DNA, 25 bp, Artificial
  probe
  misc_feature (1)..(25): SEQ ID NO: 6753; WAN024CW2; Start 205; Stop 229
agaaggtacttgtttaagagcagca

SEQ ID NO: 448242 - DNA, 25 bp, Artificial
  probe
  misc_feature (1)..(25): SEQ ID NO: 6753; WAN024CW2; Start 60; Stop 84
atgttcccatagcattgacaggata

SEQ ID NO: 448243 - DNA, 25 bp, Artificial
  probe
  misc_feature (1)..(25): SEQ ID NO: 6753; WAN024CW2; Start 83; Stop 107
taagccgccttatctgtagaaagac

SEQ ID NO: 448244 - DNA, 25 bp, Artificial
  probe
  misc_feature (1)..(25): SEQ ID NO: 6753; WAN024CW2; Start 61; Stop 85
tgttcccatagcattgacaggataa

SEQ ID NO: 448245 - DNA, 25 bp, Artificial
  probe
  misc_feature (1)..(25): SEQ ID NO: 6753; WAN024CW2; Start 102; Stop 126
aaagacagataacttgctttacacc

SEQ ID NO: 448246 - DNA, 25 bp, Artificial
  probe
  misc_feature (1)..(25): SEQ ID NO: 6753; WAN024CW2; Start 47; Stop 71
atcatagccttggatgttcccatag

SEQ ID NO: 448247 - DNA, 25 bp, Artificial
  probe
  misc_feature (1)..(25): SEQ ID NO: 6753; WAN024CW2; Start 101; Stop 125
gaaagacagataacttgctttacac

SEQ ID NO: 448248 - DNA, 25 bp, Artificial
  probe
  misc_feature (1)..(25): SEQ ID NO: 6753; WAN024CW2; Start 100; Stop 124
agaaagacagataacttgctttaca

SEQ ID NO: 448249 - DNA, 25 bp, Artificial
  probe
  misc_feature (1)..(25): SEQ ID NO: 6753; WAN024CW2; Start 97; Stop 121
tgtagaaagacagataacttgcttt

SEQ ID NO: 448250 - DNA, 25 bp, Artificial
  probe
  misc_feature (1)..(25): SEQ ID NO: 6753; WAN024CW2; Start 151; Stop 175
attctccgttcccaaaatgttagtt

SEQ ID NO: 448251 - DNA, 25 bp, Artificial
  probe
  misc_feature (1)..(25): SEQ ID NO: 6753; WAN024CW2; Start 25; Stop 49
cttagcaacagcaatcttttccatc

SEQ ID NO: 448252 - DNA, 25 bp, Artificial
  probe
  misc_feature (1)..(25): SEQ ID NO: 6753; WAN024CW2; Start 30; Stop 54
caacagcaatcttttccatcatagc

SEQ ID NO: 448253 - DNA, 25 bp, Artificial
  probe
  misc_feature (1)..(25): SEQ ID NO: 6753; WAN024CW2; Start 29; Stop 53
gcaacagcaatcttttccatcatag

SEQ ID NO: 448254 - DNA, 25 bp, Artificial
  probe
  misc_feature (1)..(25): SEQ ID NO: 6753; WAN024CW2; Start 152; Stop 176
ttctccgttcccaaaatgttagttt

SEQ ID NO: 448255 - DNA, 25 bp, Artificial
  probe
  misc_feature (1)..(25): SEQ ID NO: 6753; WAN024CW2; Start 28; Stop 52
agcaacagcaatcttttccatcata

SEQ ID NO: 448256 - DNA, 25 bp, Artificial
  probe
  misc_feature (1)..(25): SEQ ID NO: 6753; WAN024CW2; Start 27; Stop 51
tagcaacagcaatcttttccatcat

SEQ ID NO: 448257 - DNA, 25 bp, Artificial
  probe
  misc_feature (1)..(25): SEQ ID NO: 6753; WAN024CW2; Start 63; Stop 87
ttcccatagcattgacaggataagc

SEQ ID NO: 448258 - DNA, 25 bp, Artificial
  probe
  misc_feature (1)..(25): SEQ ID NO: 6753; WAN024CW2; Start 59; Stop 83
gatgttcccatagcattgacaggat

SEQ ID NO: 448259 - DNA, 25 bp, Artificial
  probe
  misc_feature (1)..(25): SEQ ID NO: 6753; WAN024CW2; Start 26; Stop 50
ttagcaacagcaatcttttccatca

SEQ ID NO: 448260 - DNA, 25 bp, Artificial
  probe
  misc_feature (1)..(25): SEQ ID NO: 6753; WAN024CW2; Start 24; Stop 48
acttagcaacagcaatcttttccat

SEQ ID NO: 448261 - DNA, 25 bp, Artificial
  probe
  misc_feature (1)..(25): SEQ ID NO: 6753; WAN024CW2; Start 33; Stop 57
cagcaatcttttccatcatagcctt

SEQ ID NO: 448262 - DNA, 25 bp, Artificial
  probe
  misc_feature (1)..(25): SEQ ID NO: 6753; WAN024CW2; Start 18; Stop 42
tcctggacttagcaacagcaatctt

SEQ ID NO: 448263 - DNA, 25 bp, Artificial
  probe
  misc_feature (1)..(25): SEQ ID NO: 6753; WAN024CW2; Start 31; Stop 55
aacagcaatcttttccatcatagcc

SEQ ID NO: 448264 - DNA, 25 bp, Artificial
  probe
  misc_feature (1)..(25): SEQ ID NO: 6753; WAN024CW2; Start 105; Stop 129
gacagataacttgctttacaccagc

SEQ ID NO: 448265 - DNA, 25 bp, Artificial
  probe
  misc_feature (1)..(25): SEQ ID NO: 6753; WAN024CW2; Start 23; Stop 47
gacttagcaacagcaatcttttcca

SEQ ID NO: 448266 - DNA, 25 bp, Artificial
  probe
  misc_feature (1)..(25): SEQ ID NO: 6753; WAN024CW2; Start 21; Stop 45
tggacttagcaacagcaatcttttc

SEQ ID NO: 448267 - DNA, 25 bp, Artificial
  probe
  misc_feature (1)..(25): SEQ ID NO: 6753; WAN024CW2; Start 34; Stop 58
agcaatcttttccatcatagccttg

SEQ ID NO: 448268 - DNA, 25 bp, Artificial
  probe
  misc_feature (1)..(25): SEQ ID NO: 6753; WAN024CW2; Start 207; Stop 231
aaggtacttgtttaagagcagcagc

SEQ ID NO: 448269 - DNA, 25 bp, Artificial
  probe
  misc_feature (1)..(25): SEQ ID NO: 6754; WAN024DT5; Start 62; Stop 86
cagatgatgagatagacaatcgcaa

SEQ ID NO: 448270 - DNA, 25 bp, Artificial
  probe
  misc_feature (1)..(25): SEQ ID NO: 6754; WAN024DT5; Start 6; Stop 30
ccaagagttgattgatgtgatctac

SEQ ID NO: 448271 - DNA, 25 bp, Artificial
  probe
  misc_feature (1)..(25): SEQ ID NO: 6754; WAN024DT5; Start 5; Stop 29
tccaagagttgattgatgtgatcta

SEQ ID NO: 448272 - DNA, 25 bp, Artificial
  probe
  misc_feature (1)..(25): SEQ ID NO: 6754; WAN024DT5; Start 4; Stop 28
ctccaagagttgattgatgtgatct

SEQ ID NO: 448273 - DNA, 25 bp, Artificial
  probe
  misc_feature (1)..(25): SEQ ID NO: 6754; WAN024DT5; Start 61; Stop 85
ccagatgatgagatagacaatcgca

SEQ ID NO: 448274 - DNA, 25 bp, Artificial
  probe
  misc_feature (1)..(25): SEQ ID NO: 6754; WAN024DT5; Start 7; Stop 31
caagagttgattgatgtgatctact

SEQ ID NO: 448275 - DNA, 25 bp, Artificial
  probe
  misc_feature (1)..(25): SEQ ID NO: 6754; WAN024DT5; Start 54; Stop 78
gaatagcccagatgatgagatagac

SEQ ID NO: 448276 - DNA, 25 bp, Artificial
  probe
  misc_feature (1)..(25): SEQ ID NO: 6754; WAN024DT5; Start 53; Stop 77
agaatagcccagatgatgagataga

SEQ ID NO: 448277 - DNA, 25 bp, Artificial
  probe
  misc_feature (1)..(25): SEQ ID NO: 6754; WAN024DT5; Start 52; Stop 76
gagaatagcccagatgatgagatag

SEQ ID NO: 448278 - DNA, 25 bp, Artificial
  probe
  misc_feature (1)..(25): SEQ ID NO: 6754; WAN024DT5; Start 51; Stop 75
agagaatagcccagatgatgagata

SEQ ID NO: 448279 - DNA, 25 bp, Artificial
  probe
  misc_feature (1)..(25): SEQ ID NO: 6754; WAN024DT5; Start 50; Stop 74
tagagaatagcccagatgatgagat

SEQ ID NO: 448280 - DNA, 25 bp, Artificial
  probe
  misc_feature (1)..(25): SEQ ID NO: 6754; WAN024DT5; Start 49; Stop 73
atagagaatagcccagatgatgaga

SEQ ID NO: 448281 - DNA, 25 bp, Artificial
  probe
  misc_feature (1)..(25): SEQ ID NO: 6754; WAN024DT5; Start 64; Stop 88
gatgatgagatagacaatcgcaaac

SEQ ID NO: 448282 - DNA, 25 bp, Artificial
  probe
  misc_feature (1)..(25): SEQ ID NO: 6754; WAN024DT5; Start 63; Stop 87
agatgatgagatagacaatcgcaaa

SEQ ID NO: 448283 - DNA, 25 bp, Artificial
  probe
  misc_feature (1)..(25): SEQ ID NO: 6754; WAN024DT5; Start 57; Stop 81
tagcccagatgatgagatagacaat

SEQ ID NO: 448284 - DNA, 25 bp, Artificial
  probe
  misc_feature (1)..(25): SEQ ID NO: 6754; WAN024DT5; Start 56; Stop 80
atagcccagatgatgagatagacaa

SEQ ID NO: 448285 - DNA, 25 bp, Artificial
  probe
  misc_feature (1)..(25): SEQ ID NO: 6754; WAN024DT5; Start 55; Stop 79
aatagcccagatgatgagatagaca

SEQ ID NO: 448286 - DNA, 25 bp, Artificial
  probe
  misc_feature (1)..(25): SEQ ID NO: 6754; WAN024DT5; Start 65; Stop 89
atgatgagatagacaatcgcaaact

SEQ ID NO: 448287 - DNA, 25 bp, Artificial
  probe
  misc_feature (1)..(25): SEQ ID NO: 6754; WAN024DT5; Start 8; Stop 32
aagagttgattgatgtgatctactt

SEQ ID NO: 448288 - DNA, 25 bp, Artificial
  probe
  misc_feature (1)..(25): SEQ ID NO: 6754; WAN024DT5; Start 3; Stop 27
gctccaagagttgattgatgtgatc

SEQ ID NO: 448289 - DNA, 25 bp, Artificial
  probe
  misc_feature (1)..(25): SEQ ID NO: 6754; WAN024DT5; Start 2; Stop 26
tgctccaagagttgattgatgtgat

SEQ ID NO: 448290 - DNA, 25 bp, Artificial
  probe
  misc_feature (1)..(25): SEQ ID NO: 6754; WAN024DT5; Start 1; Stop 25
atgctccaagagttgattgatgtga

SEQ ID NO: 448291 - DNA, 25 bp, Artificial
  probe
  misc_feature (1)..(25): SEQ ID NO: 6754; WAN024DT5; Start 48; Stop 72
tatagagaatagcccagatgatgag

SEQ ID NO: 448292 - DNA, 25 bp, Artificial
  probe
  misc_feature (1)..(25): SEQ ID NO: 6754; WAN024DT5; Start 47; Stop 71
ttatagagaatagcccagatgatga

SEQ ID NO: 448293 - DNA, 25 bp, Artificial
  probe
  misc_feature (1)..(25): SEQ ID NO: 6754; WAN024DT5; Start 58; Stop 82
agcccagatgatgagatagacaatc

SEQ ID NO: 448294 - DNA, 25 bp, Artificial
  probe
  misc_feature (1)..(25): SEQ ID NO: 6754; WAN024DT5; Start 66; Stop 90
tgatgagatagacaatcgcaaactc

SEQ ID NO: 448295 - DNA, 25 bp, Artificial
  probe
  misc_feature (1)..(25): SEQ ID NO: 6754; WAN024DT5; Start 46; Stop 70
tttatagagaatagcccagatgatg

SEQ ID NO: 448296 - DNA, 25 bp, Artificial
  probe
  misc_feature (1)..(25): SEQ ID NO: 6754; WAN024DT5; Start 67; Stop 91
gatgagatagacaatcgcaaactcg

SEQ ID NO: 448297 - DNA, 25 bp, Artificial
  probe
  misc_feature (1)..(25): SEQ ID NO: 6754; WAN024DT5; Start 87; Stop 111
actcgataatgagctggaggtagaa

SEQ ID NO: 448298 - DNA, 25 bp, Artificial
  probe
  misc_feature (1)..(25): SEQ ID NO: 6754; WAN024DT5; Start 86; Stop 110
aactcgataatgagctggaggtaga

SEQ ID NO: 448299 - DNA, 25 bp, Artificial
  probe
  misc_feature (1)..(25): SEQ ID NO: 6754; WAN024DT5; Start 60; Stop 84
cccagatgatgagatagacaatcgc

SEQ ID NO: 448300 - DNA, 25 bp, Artificial
  probe
  misc_feature (1)..(25): SEQ ID NO: 6754; WAN024DT5; Start 59; Stop 83
gcccagatgatgagatagacaatcg

SEQ ID NO: 448301 - DNA, 25 bp, Artificial
  probe
  misc_feature (1)..(25): SEQ ID NO: 6754; WAN024DT5; Start 9; Stop 33
agagttgattgatgtgatctacttt

SEQ ID NO: 448302 - DNA, 25 bp, Artificial
  probe
  misc_feature (1)..(25): SEQ ID NO: 6755; WAN024ERB; Start 178; Stop 202
ctgtccttctgcctctctctgataa

SEQ ID NO: 448303 - DNA, 25 bp, Artificial
  probe
  misc_feature (1)..(25): SEQ ID NO: 6755; WAN024ERB; Start 180; Stop 204
gtccttctgcctctctctgataaag

SEQ ID NO: 448304 - DNA, 25 bp, Artificial
  probe
  misc_feature (1)..(25): SEQ ID NO: 6755; WAN024ERB; Start 186; Stop 210
ctgcctctctctgataaagaccttc

SEQ ID NO: 448305 - DNA, 25 bp, Artificial
  probe
  misc_feature (1)..(25): SEQ ID NO: 6755; WAN024ERB; Start 183; Stop 207
cttctgcctctctctgataaagacc

SEQ ID NO: 448306 - DNA, 25 bp, Artificial
  probe
  misc_feature (1)..(25): SEQ ID NO: 6755; WAN024ERB; Start 182; Stop 206
ccttctgcctctctctgataaagac

SEQ ID NO: 448307 - DNA, 25 bp, Artificial
  probe
  misc_feature (1)..(25): SEQ ID NO: 6755; WAN024ERB; Start 177; Stop 201
tctgtccttctgcctctctctgata

SEQ ID NO: 448308 - DNA, 25 bp, Artificial
  probe
  misc_feature (1)..(25): SEQ ID NO: 6755; WAN024ERB; Start 181; Stop 205
tccttctgcctctctctgataaaga

SEQ ID NO: 448309 - DNA, 25 bp, Artificial
  probe
  misc_feature (1)..(25): SEQ ID NO: 6755; WAN024ERB; Start 231; Stop 255
acacataacccgtctcaaccaatag

SEQ ID NO: 448310 - DNA, 25 bp, Artificial
  probe
  misc_feature (1)..(25): SEQ ID NO: 6755; WAN024ERB; Start 77; Stop 101
tcccaaggaatctcattgtgattta

SEQ ID NO: 448311 - DNA, 25 bp, Artificial
  probe
  misc_feature (1)..(25): SEQ ID NO: 6755; WAN024ERB; Start 185; Stop 209
tctgcctctctctgataaagacctt

SEQ ID NO: 448312 - DNA, 25 bp, Artificial
  probe
  misc_feature (1)..(25): SEQ ID NO: 6755; WAN024ERB; Start 184; Stop 208
ttctgcctctctctgataaagacct

SEQ ID NO: 448313 - DNA, 25 bp, Artificial
  probe
  misc_feature (1)..(25): SEQ ID NO: 6755; WAN024ERB; Start 8; Stop 32
ctagcagcttctgtatcatcaccaa

SEQ ID NO: 448314 - DNA, 25 bp, Artificial
  probe
  misc_feature (1)..(25): SEQ ID NO: 6755; WAN024ERB; Start 179; Stop 203
tgtccttctgcctctctctgataaa

SEQ ID NO: 448315 - DNA, 25 bp, Artificial
  probe
  misc_feature (1)..(25): SEQ ID NO: 6755; WAN024ERB; Start 78; Stop 102
cccaaggaatctcattgtgatttat

SEQ ID NO: 448316 - DNA, 25 bp, Artificial
  probe
  misc_feature (1)..(25): SEQ ID NO: 6755; WAN024ERB; Start 76; Stop 100
ctcccaaggaatctcattgtgattt

SEQ ID NO: 448317 - DNA, 25 bp, Artificial
  probe
  misc_feature (1)..(25): SEQ ID NO: 6755; WAN024ERB; Start 9; Stop 33
tagcagcttctgtatcatcaccaac

SEQ ID NO: 448318 - DNA, 25 bp, Artificial
  probe
  misc_feature (1)..(25): SEQ ID NO: 6755; WAN024ERB; Start 190; Stop 214
ctctctctgataaagaccttcgata

SEQ ID NO: 448319 - DNA, 25 bp, Artificial
  probe
  misc_feature (1)..(25): SEQ ID NO: 6755; WAN024ERB; Start 189; Stop 213
cctctctctgataaagaccttcgat

SEQ ID NO: 448320 - DNA, 25 bp, Artificial
  probe
  misc_feature (1)..(25): SEQ ID NO: 6755; WAN024ERB; Start 151; Stop 175
aatagcaatataattcccaataccg

SEQ ID NO: 448321 - DNA, 25 bp, Artificial
  probe
  misc_feature (1)..(25): SEQ ID NO: 6755; WAN024ERB; Start 191; Stop 215
tctctctgataaagaccttcgataa

SEQ ID NO: 448322 - DNA, 25 bp, Artificial
  probe
  misc_feature (1)..(25): SEQ ID NO: 6755; WAN024ERB; Start 75; Stop 99
tctcccaaggaatctcattgtgatt

SEQ ID NO: 448323 - DNA, 25 bp, Artificial
  probe
  misc_feature (1)..(25): SEQ ID NO: 6755; WAN024ERB; Start 27; Stop 51
caccaactgcaaagagtacaattac

SEQ ID NO: 448324 - DNA, 25 bp, Artificial
  probe
  misc_feature (1)..(25): SEQ ID NO: 6755; WAN024ERB; Start 26; Stop 50
tcaccaactgcaaagagtacaatta

SEQ ID NO: 448325 - DNA, 25 bp, Artificial
  probe
  misc_feature (1)..(25): SEQ ID NO: 6755; WAN024ERB; Start 16; Stop 40
ttctgtatcatcaccaactgcaaag

SEQ ID NO: 448326 - DNA, 25 bp, Artificial
  probe
  misc_feature (1)..(25): SEQ ID NO: 6755; WAN024ERB; Start 15; Stop 39
cttctgtatcatcaccaactgcaaa

SEQ ID NO: 448327 - DNA, 25 bp, Artificial
  probe
  misc_feature (1)..(25): SEQ ID NO: 6755; WAN024ERB; Start 21; Stop 45
tatcatcaccaactgcaaagagtac

SEQ ID NO: 448328 - DNA, 25 bp, Artificial
  probe
  misc_feature (1)..(25): SEQ ID NO: 6755; WAN024ERB; Start 20; Stop 44
gtatcatcaccaactgcaaagagta

SEQ ID NO: 448329 - DNA, 25 bp, Artificial
  probe
  misc_feature (1)..(25): SEQ ID NO: 6755; WAN024ERB; Start 206; Stop 230
ccttcgataaattggtctctatcag

SEQ ID NO: 448330 - DNA, 25 bp, Artificial
  probe
  misc_feature (1)..(25): SEQ ID NO: 6755; WAN024ERB; Start 230; Stop 254
gacacataacccgtctcaaccaata

SEQ ID NO: 448331 - DNA, 25 bp, Artificial
  probe
  misc_feature (1)..(25): SEQ ID NO: 6755; WAN024ERB; Start 216; Stop 240
attggtctctatcagacacataacc

SEQ ID NO: 448332 - DNA, 25 bp, Artificial
  probe
  misc_feature (1)..(25): SEQ ID NO: 6755; WAN024ERB; Start 25; Stop 49
atcaccaactgcaaagagtacaatt

SEQ ID NO: 448333 - DNA, 25 bp, Artificial
  probe
  misc_feature (1)..(25): SEQ ID NO: 6755; WAN024ERB; Start 196; Stop 220
ctgataaagaccttcgataaattgg

SEQ ID NO: 448334 - DNA, 25 bp, Artificial
  probe
  misc_feature (1)..(25): SEQ ID NO: 6755; WAN024ERB; Start 74; Stop 98
gtctcccaaggaatctcattgtgat

SEQ ID NO: 448335 - DNA, 25 bp, Artificial
  probe
  misc_feature (1)..(25): SEQ ID NO: 6757; WAN024BLJ; Start 2; Stop 26
tgctctattcgatgggatttctaag

SEQ ID NO: 448336 - DNA, 25 bp, Artificial
  probe
  misc_feature (1)..(25): SEQ ID NO: 6757; WAN024BLJ; Start 1; Stop 25
atgctctattcgatgggatttctaa

SEQ ID NO: 448337 - DNA, 25 bp, Artificial
  probe
  misc_feature (1)..(25): SEQ ID NO: 6757; WAN024BLJ; Start 3; Stop 27
gctctattcgatgggatttctaaga

SEQ ID NO: 448338 - DNA, 25 bp, Artificial
  probe
  misc_feature (1)..(25): SEQ ID NO: 6757; WAN024BLJ; Start 4; Stop 28
ctctattcgatgggatttctaagaa

SEQ ID NO: 448339 - DNA, 25 bp, Artificial
  probe
  misc_feature (1)..(25): SEQ ID NO: 6757; WAN024BLJ; Start 50; Stop 74
aaattatcctatgtttgcaggtgcc

SEQ ID NO: 448340 - DNA, 25 bp, Artificial
  probe
  misc_feature (1)..(25): SEQ ID NO: 6757; WAN024BLJ; Start 26; Stop 50
gaaaagtagtgttcttgagtttgaa

SEQ ID NO: 448341 - DNA, 25 bp, Artificial
  probe
  misc_feature (1)..(25): SEQ ID NO: 6757; WAN024BLJ; Start 28; Stop 52
aaagtagtgttcttgagtttgaaaa

SEQ ID NO: 448342 - DNA, 25 bp, Artificial
  probe
  misc_feature (1)..(25): SEQ ID NO: 6757; WAN024BLJ; Start 27; Stop 51
aaaagtagtgttcttgagtttgaaa

SEQ ID NO: 448343 - DNA, 25 bp, Artificial
  probe
  misc_feature (1)..(25): SEQ ID NO: 6757; WAN024BLJ; Start 52; Stop 76
attatcctatgtttgcaggtgccaa

SEQ ID NO: 448344 - DNA, 25 bp, Artificial
  probe
  misc_feature (1)..(25): SEQ ID NO: 6757; WAN024BLJ; Start 51; Stop 75
aattatcctatgtttgcaggtgcca

SEQ ID NO: 448345 - DNA, 25 bp, Artificial
  probe
  misc_feature (1)..(25): SEQ ID NO: 6757; WAN024BLJ; Start 29; Stop 53
aagtagtgttcttgagtttgaaaat

SEQ ID NO: 448346 - DNA, 25 bp, Artificial
  probe
  misc_feature (1)..(25): SEQ ID NO: 6757; WAN024BLJ; Start 30; Stop 54
agtagtgttcttgagtttgaaaatt

SEQ ID NO: 448347 - DNA, 25 bp, Artificial
  probe
  misc_feature (1)..(25): SEQ ID NO: 6757; WAN024BLJ; Start 5; Stop 29
tctattcgatgggatttctaagaaa

SEQ ID NO: 448348 - DNA, 25 bp, Artificial
  probe
  misc_feature (1)..(25): SEQ ID NO: 6757; WAN024BLJ; Start 34; Stop 58
gtgttcttgagtttgaaaattatcc

SEQ ID NO: 448349 - DNA, 25 bp, Artificial
  probe
  misc_feature (1)..(25): SEQ ID NO: 6757; WAN024BLJ; Start 35; Stop 59
tgttcttgagtttgaaaattatcct

SEQ ID NO: 448350 - DNA, 25 bp, Artificial
  probe
  misc_feature (1)..(25): SEQ ID NO: 6757; WAN024BLJ; Start 49; Stop 73
aaaattatcctatgtttgcaggtgc

SEQ ID NO: 448351 - DNA, 25 bp, Artificial
  probe
  misc_feature (1)..(25): SEQ ID NO: 6757; WAN024BLJ; Start 43; Stop 67
agtttgaaaattatcctatgtttgc

SEQ ID NO: 448352 - DNA, 25 bp, Artificial
  probe
  misc_feature (1)..(25): SEQ ID NO: 6757; WAN024BLJ; Start 25; Stop 49
agaaaagtagtgttcttgagtttga

SEQ ID NO: 448353 - DNA, 25 bp, Artificial
  probe
  misc_feature (1)..(25): SEQ ID NO: 6757; WAN024BLJ; Start 47; Stop 71
tgaaaattatcctatgtttgcaggt

SEQ ID NO: 448354 - DNA, 25 bp, Artificial
  probe
  misc_feature (1)..(25): SEQ ID NO: 6757; WAN024BLJ; Start 54; Stop 78
tatcctatgtttgcaggtgccaaat

SEQ ID NO: 448355 - DNA, 25 bp, Artificial
  probe
  misc_feature (1)..(25): SEQ ID NO: 6757; WAN024BLJ; Start 48; Stop 72
gaaaattatcctatgtttgcaggtg

SEQ ID NO: 448356 - DNA, 25 bp, Artificial
  probe
  misc_feature (1)..(25): SEQ ID NO: 6757; WAN024BLJ; Start 53; Stop 77
ttatcctatgtttgcaggtgccaaa

SEQ ID NO: 448357 - DNA, 25 bp, Artificial
  probe
  misc_feature (1)..(25): SEQ ID NO: 6757; WAN024BLJ; Start 11; Stop 35
cgatgggatttctaagaaaagtagt

SEQ ID NO: 448358 - DNA, 25 bp, Artificial
  probe
  misc_feature (1)..(25): SEQ ID NO: 6757; WAN024BLJ; Start 33; Stop 57
agtgttcttgagtttgaaaattatc

SEQ ID NO: 448359 - DNA, 25 bp, Artificial
  probe
  misc_feature (1)..(25): SEQ ID NO: 6757; WAN024BLJ; Start 46; Stop 70
ttgaaaattatcctatgtttgcagg

SEQ ID NO: 448360 - DNA, 25 bp, Artificial
  probe
  misc_feature (1)..(25): SEQ ID NO: 6757; WAN024BLJ; Start 8; Stop 32
attcgatgggatttctaagaaaagt

SEQ ID NO: 448361 - DNA, 25 bp, Artificial
  probe
  misc_feature (1)..(25): SEQ ID NO: 6757; WAN024BLJ; Start 10; Stop 34
tcgatgggatttctaagaaaagtag

SEQ ID NO: 448362 - DNA, 25 bp, Artificial
  probe
  misc_feature (1)..(25): SEQ ID NO: 6757; WAN024BLJ; Start 14; Stop 38
tgggatttctaagaaaagtagtgtt

SEQ ID NO: 448363 - DNA, 25 bp, Artificial
  probe
  misc_feature (1)..(25): SEQ ID NO: 6757; WAN024BLJ; Start 44; Stop 68
gtttgaaaattatcctatgtttgca

SEQ ID NO: 448364 - DNA, 25 bp, Artificial
  probe
  misc_feature (1)..(25): SEQ ID NO: 6757; WAN024BLJ; Start 31; Stop 55
gtagtgttcttgagtttgaaaatta

SEQ ID NO: 448365 - DNA, 25 bp, Artificial
  probe
  misc_feature (1)..(25): SEQ ID NO: 6757; WAN024BLJ; Start 13; Stop 37
atgggatttctaagaaaagtagtgt

SEQ ID NO: 448366 - DNA, 25 bp, Artificial
  probe
  misc_feature (1)..(25): SEQ ID NO: 6757; WAN024BLJ; Start 9; Stop 33
ttcgatgggatttctaagaaaagta

SEQ ID NO: 448367 - DNA, 25 bp, Artificial
  probe
  misc_feature (1)..(25): SEQ ID NO: 6757; WAN024BLJ; Start 15; Stop 39
gggatttctaagaaaagtagtgttc

SEQ ID NO: 448368 - DNA, 25 bp, Artificial
  probe
  misc_feature (1)..(25): SEQ ID NO: 6758; WAN024C2Q; Start 185; Stop 209
attatggacaatcatcggttcatca

SEQ ID NO: 448369 - DNA, 25 bp, Artificial
  probe
  misc_feature (1)..(25): SEQ ID NO: 6758; WAN024C2Q; Start 186; Stop 210
ttatggacaatcatcggttcatcaa

SEQ ID NO: 448370 - DNA, 25 bp, Artificial
  probe
  misc_feature (1)..(25): SEQ ID NO: 6758; WAN024C2Q; Start 184; Stop 208
tattatggacaatcatcggttcatc

SEQ ID NO: 448371 - DNA, 25 bp, Artificial
  probe
  misc_feature (1)..(25): SEQ ID NO: 6758; WAN024C2Q; Start 183; Stop 207
atattatggacaatcatcggttcat

SEQ ID NO: 448372 - DNA, 25 bp, Artificial
  probe
  misc_feature (1)..(25): SEQ ID NO: 6758; WAN024C2Q; Start 182; Stop 206
aatattatggacaatcatcggttca

SEQ ID NO: 448373 - DNA, 25 bp, Artificial
  probe
  misc_feature (1)..(25): SEQ ID NO: 6758; WAN024C2Q; Start 181; Stop 205
caatattatggacaatcatcggttc

SEQ ID NO: 448374 - DNA, 25 bp, Artificial
  probe
  misc_feature (1)..(25): SEQ ID NO: 6758; WAN024C2Q; Start 131; Stop 155
taccatcttcaaggcttctttcata

SEQ ID NO: 448375 - DNA, 25 bp, Artificial
  probe
  misc_feature (1)..(25): SEQ ID NO: 6758; WAN024C2Q; Start 128; Stop 152
gtttaccatcttcaaggcttctttc

SEQ ID NO: 448376 - DNA, 25 bp, Artificial
  probe
  misc_feature (1)..(25): SEQ ID NO: 6758; WAN024C2Q; Start 130; Stop 154
ttaccatcttcaaggcttctttcat

SEQ ID NO: 448377 - DNA, 25 bp, Artificial
  probe
  misc_feature (1)..(25): SEQ ID NO: 6758; WAN024C2Q; Start 187; Stop 211
tatggacaatcatcggttcatcaaa

SEQ ID NO: 448378 - DNA, 25 bp, Artificial
  probe
  misc_feature (1)..(25): SEQ ID NO: 6758; WAN024C2Q; Start 129; Stop 153
tttaccatcttcaaggcttctttca

SEQ ID NO: 448379 - DNA, 25 bp, Artificial
  probe
  misc_feature (1)..(25): SEQ ID NO: 6758; WAN024C2Q; Start 132; Stop 156
accatcttcaaggcttctttcatac

SEQ ID NO: 448380 - DNA, 25 bp, Artificial
  probe
  misc_feature (1)..(25): SEQ ID NO: 6758; WAN024C2Q; Start 188; Stop 212
atggacaatcatcggttcatcaaat

SEQ ID NO: 448381 - DNA, 25 bp, Artificial
  probe
  misc_feature (1)..(25): SEQ ID NO: 6758; WAN024C2Q; Start 29; Stop 53
aatttctggtttcatacaaagggca

SEQ ID NO: 448382 - DNA, 25 bp, Artificial
  probe
  misc_feature (1)..(25): SEQ ID NO: 6758; WAN024C2Q; Start 180; Stop 204
ccaatattatggacaatcatcggtt

SEQ ID NO: 448383 - DNA, 25 bp, Artificial
  probe
  misc_feature (1)..(25): SEQ ID NO: 6758; WAN024C2Q; Start 162; Stop 186
aagcgttcctctttgtttccaatat

SEQ ID NO: 448384 - DNA, 25 bp, Artificial
  probe
  misc_feature (1)..(25): SEQ ID NO: 6758; WAN024C2Q; Start 30; Stop 54
atttctggtttcatacaaagggcac

SEQ ID NO: 448385 - DNA, 25 bp, Artificial
  probe
  misc_feature (1)..(25): SEQ ID NO: 6758; WAN024C2Q; Start 127; Stop 151
cgtttaccatcttcaaggcttcttt

SEQ ID NO: 448386 - DNA, 25 bp, Artificial
  probe
  misc_feature (1)..(25): SEQ ID NO: 6758; WAN024C2Q; Start 189; Stop 213
tggacaatcatcggttcatcaaatg

SEQ ID NO: 448387 - DNA, 25 bp, Artificial
  probe
  misc_feature (1)..(25): SEQ ID NO: 6758; WAN024C2Q; Start 133; Stop 157
ccatcttcaaggcttctttcatacg

SEQ ID NO: 448388 - DNA, 25 bp, Artificial
  probe
  misc_feature (1)..(25): SEQ ID NO: 6758; WAN024C2Q; Start 42; Stop 66
atacaaagggcacgagcaatacata

SEQ ID NO: 448389 - DNA, 25 bp, Artificial
  probe
  misc_feature (1)..(25): SEQ ID NO: 6758; WAN024C2Q; Start 164; Stop 188
gcgttcctctttgtttccaatatta

SEQ ID NO: 448390 - DNA, 25 bp, Artificial
  probe
  misc_feature (1)..(25): SEQ ID NO: 6758; WAN024C2Q; Start 43; Stop 67
tacaaagggcacgagcaatacataa

SEQ ID NO: 448391 - DNA, 25 bp, Artificial
  probe
  misc_feature (1)..(25): SEQ ID NO: 6758; WAN024C2Q; Start 28; Stop 52
aaatttctggtttcatacaaagggc

SEQ ID NO: 448392 - DNA, 25 bp, Artificial
  probe
  misc_feature (1)..(25): SEQ ID NO: 6758; WAN024C2Q; Start 163; Stop 187
agcgttcctctttgtttccaatatt

SEQ ID NO: 448393 - DNA, 25 bp, Artificial
  probe
  misc_feature (1)..(25): SEQ ID NO: 6758; WAN024C2Q; Start 45; Stop 69
caaagggcacgagcaatacataaac

SEQ ID NO: 448394 - DNA, 25 bp, Artificial
  probe
  misc_feature (1)..(25): SEQ ID NO: 6758; WAN024C2Q; Start 135; Stop 159
atcttcaaggcttctttcatacgtt

SEQ ID NO: 448395 - DNA, 25 bp, Artificial
  probe
  misc_feature (1)..(25): SEQ ID NO: 6758; WAN024C2Q; Start 38; Stop 62
tttcatacaaagggcacgagcaata

SEQ ID NO: 448396 - DNA, 25 bp, Artificial
  probe
  misc_feature (1)..(25): SEQ ID NO: 6758; WAN024C2Q; Start 139; Stop 163
tcaaggcttctttcatacgttcaaa

SEQ ID NO: 448397 - DNA, 25 bp, Artificial
  probe
  misc_feature (1)..(25): SEQ ID NO: 6758; WAN024C2Q; Start 138; Stop 162
ttcaaggcttctttcatacgttcaa

SEQ ID NO: 448398 - DNA, 25 bp, Artificial
  probe
  misc_feature (1)..(25): SEQ ID NO: 6758; WAN024C2Q; Start 136; Stop 160
tcttcaaggcttctttcatacgttc

SEQ ID NO: 448399 - DNA, 25 bp, Artificial
  probe
  misc_feature (1)..(25): SEQ ID NO: 6758; WAN024C2Q; Start 134; Stop 158
catcttcaaggcttctttcatacgt

SEQ ID NO: 448400 - DNA, 25 bp, Artificial
  probe
  misc_feature (1)..(25): SEQ ID NO: 6758; WAN024C2Q; Start 44; Stop 68
acaaagggcacgagcaatacataaa

SEQ ID NO: 448401 - DNA, 25 bp, Artificial
  probe
  misc_feature (1)..(25): SEQ ID NO: 6759; WAN024BK5; Start 2; Stop 26
tgctgatacctctcctcattaaatt

SEQ ID NO: 448402 - DNA, 25 bp, Artificial
  probe
  misc_feature (1)..(25): SEQ ID NO: 6759; WAN024BK5; Start 1; Stop 25
atgctgatacctctcctcattaaat

SEQ ID NO: 448403 - DNA, 25 bp, Artificial
  probe
  misc_feature (1)..(25): SEQ ID NO: 6759; WAN024BK5; Start 43; Stop 67
tctatctcactccctgattattaca

SEQ ID NO: 448404 - DNA, 25 bp, Artificial
  probe
  misc_feature (1)..(25): SEQ ID NO: 6759; WAN024BK5; Start 3; Stop 27
gctgatacctctcctcattaaatta

SEQ ID NO: 448405 - DNA, 25 bp, Artificial
  probe
  misc_feature (1)..(25): SEQ ID NO: 6759; WAN024BK5; Start 44; Stop 68
ctatctcactccctgattattacaa

SEQ ID NO: 448406 - DNA, 25 bp, Artificial
  probe
  misc_feature (1)..(25): SEQ ID NO: 6759; WAN024BK5; Start 40; Stop 64
gattctatctcactccctgattatt

SEQ ID NO: 448407 - DNA, 25 bp, Artificial
  probe
  misc_feature (1)..(25): SEQ ID NO: 6759; WAN024BK5; Start 37; Stop 61
aaagattctatctcactccctgatt

SEQ ID NO: 448408 - DNA, 25 bp, Artificial
  probe
  misc_feature (1)..(25): SEQ ID NO: 6759; WAN024BK5; Start 42; Stop 66
ttctatctcactccctgattattac

SEQ ID NO: 448409 - DNA, 25 bp, Artificial
  probe
  misc_feature (1)..(25): SEQ ID NO: 6759; WAN024BK5; Start 45; Stop 69
tatctcactccctgattattacaaa

SEQ ID NO: 448410 - DNA, 25 bp, Artificial
  probe
  misc_feature (1)..(25): SEQ ID NO: 6759; WAN024BK5; Start 50; Stop 74
cactccctgattattacaaaaccat

SEQ ID NO: 448411 - DNA, 25 bp, Artificial
  probe
  misc_feature (1)..(25): SEQ ID NO: 6759; WAN024BK5; Start 38; Stop 62
aagattctatctcactccctgatta

SEQ ID NO: 448412 - DNA, 25 bp, Artificial
  probe
  misc_feature (1)..(25): SEQ ID NO: 6759; WAN024BK5; Start 39; Stop 63
agattctatctcactccctgattat

SEQ ID NO: 448413 - DNA, 25 bp, Artificial
  probe
  misc_feature (1)..(25): SEQ ID NO: 6759; WAN024BK5; Start 49; Stop 73
tcactccctgattattacaaaacca

SEQ ID NO: 448414 - DNA, 25 bp, Artificial
  probe
  misc_feature (1)..(25): SEQ ID NO: 6759; WAN024BK5; Start 51; Stop 75
actccctgattattacaaaaccatt

SEQ ID NO: 448415 - DNA, 25 bp, Artificial
  probe
  misc_feature (1)..(25): SEQ ID NO: 6759; WAN024BK5; Start 48; Stop 72
ctcactccctgattattacaaaacc

SEQ ID NO: 448416 - DNA, 25 bp, Artificial
  probe
  misc_feature (1)..(25): SEQ ID NO: 6759; WAN024BK5; Start 72; Stop 96
cattgaaatatcacaactaataggc

SEQ ID NO: 448417 - DNA, 25 bp, Artificial
  probe
  misc_feature (1)..(25): SEQ ID NO: 6759; WAN024BK5; Start 53; Stop 77
tccctgattattacaaaaccattga

SEQ ID NO: 448418 - DNA, 25 bp, Artificial
  probe
  misc_feature (1)..(25): SEQ ID NO: 6759; WAN024BK5; Start 47; Stop 71
tctcactccctgattattacaaaac

SEQ ID NO: 448419 - DNA, 25 bp, Artificial
  probe
  misc_feature (1)..(25): SEQ ID NO: 6759; WAN024BK5; Start 52; Stop 76
ctccctgattattacaaaaccattg

SEQ ID NO: 448420 - DNA, 25 bp, Artificial
  probe
  misc_feature (1)..(25): SEQ ID NO: 6759; WAN024BK5; Start 41; Stop 65
attctatctcactccctgattatta

SEQ ID NO: 448421 - DNA, 25 bp, Artificial
  probe
  misc_feature (1)..(25): SEQ ID NO: 6759; WAN024BK5; Start 54; Stop 78
ccctgattattacaaaaccattgaa

SEQ ID NO: 448422 - DNA, 25 bp, Artificial
  probe
  misc_feature (1)..(25): SEQ ID NO: 6759; WAN024BK5; Start 65; Stop 89
acaaaaccattgaaatatcacaact

SEQ ID NO: 448423 - DNA, 25 bp, Artificial
  probe
  misc_feature (1)..(25): SEQ ID NO: 6759; WAN024BK5; Start 46; Stop 70
atctcactccctgattattacaaaa

SEQ ID NO: 448424 - DNA, 25 bp, Artificial
  probe
  misc_feature (1)..(25): SEQ ID NO: 6759; WAN024BK5; Start 4; Stop 28
ctgatacctctcctcattaaattaa

SEQ ID NO: 448425 - DNA, 25 bp, Artificial
  probe
  misc_feature (1)..(25): SEQ ID NO: 6759; WAN024BK5; Start 71; Stop 95
ccattgaaatatcacaactaatagg

SEQ ID NO: 448426 - DNA, 25 bp, Artificial
  probe
  misc_feature (1)..(25): SEQ ID NO: 6759; WAN024BK5; Start 36; Stop 60
aaaagattctatctcactccctgat

SEQ ID NO: 448427 - DNA, 25 bp, Artificial
  probe
  misc_feature (1)..(25): SEQ ID NO: 6759; WAN024BK5; Start 9; Stop 33
acctctcctcattaaattaaatagt

SEQ ID NO: 448428 - DNA, 25 bp, Artificial
  probe
  misc_feature (1)..(25): SEQ ID NO: 6759; WAN024BK5; Start 68; Stop 92
aaaccattgaaatatcacaactaat

SEQ ID NO: 448429 - DNA, 25 bp, Artificial
  probe
  misc_feature (1)..(25): SEQ ID NO: 6759; WAN024BK5; Start 5; Stop 29
tgatacctctcctcattaaattaaa

SEQ ID NO: 448430 - DNA, 25 bp, Artificial
  probe
  misc_feature (1)..(25): SEQ ID NO: 6759; WAN024BK5; Start 64; Stop 88
tacaaaaccattgaaatatcacaac

SEQ ID NO: 448431 - DNA, 25 bp, Artificial
  probe
  misc_feature (1)..(25): SEQ ID NO: 6759; WAN024BK5; Start 70; Stop 94
accattgaaatatcacaactaatag

SEQ ID NO: 448432 - DNA, 25 bp, Artificial
  probe
  misc_feature (1)..(25): SEQ ID NO: 6759; WAN024BK5; Start 55; Stop 79
cctgattattacaaaaccattgaaa

SEQ ID NO: 448433 - DNA, 25 bp, Artificial
  probe
  misc_feature (1)..(25): SEQ ID NO: 6759; WAN024BK5; Start 66; Stop 90
caaaaccattgaaatatcacaacta

SEQ ID NO: 448434 - DNA, 25 bp, Artificial
  probe
  misc_feature (1)..(25): SEQ ID NO: 6760; WAN024BMI; Start 5; Stop 29
tgatttcctggtccattatcctgaa

SEQ ID NO: 448435 - DNA, 25 bp, Artificial
  probe
  misc_feature (1)..(25): SEQ ID NO: 6760; WAN024BMI; Start 4; Stop 28
ctgatttcctggtccattatcctga

SEQ ID NO: 448436 - DNA, 25 bp, Artificial
  probe
  misc_feature (1)..(25): SEQ ID NO: 6760; WAN024BMI; Start 1; Stop 25
atgctgatttcctggtccattatcc

SEQ ID NO: 448437 - DNA, 25 bp, Artificial
  probe
  misc_feature (1)..(25): SEQ ID NO: 6760; WAN024BMI; Start 6; Stop 30
gatttcctggtccattatcctgaaa

SEQ ID NO: 448438 - DNA, 25 bp, Artificial
  probe
  misc_feature (1)..(25): SEQ ID NO: 6760; WAN024BMI; Start 3; Stop 27
gctgatttcctggtccattatcctg

SEQ ID NO: 448439 - DNA, 25 bp, Artificial
  probe
  misc_feature (1)..(25): SEQ ID NO: 6760; WAN024BMI; Start 9; Stop 33
ttcctggtccattatcctgaaaatc

SEQ ID NO: 448440 - DNA, 25 bp, Artificial
  probe
  misc_feature (1)..(25): SEQ ID NO: 6760; WAN024BMI; Start 2; Stop 26
tgctgatttcctggtccattatcct

SEQ ID NO: 448441 - DNA, 25 bp, Artificial
  probe
  misc_feature (1)..(25): SEQ ID NO: 6760; WAN024BMI; Start 10; Stop 34
tcctggtccattatcctgaaaatca

SEQ ID NO: 448442 - DNA, 25 bp, Artificial
  probe
  misc_feature (1)..(25): SEQ ID NO: 6760; WAN024BMI; Start 8; Stop 32
tttcctggtccattatcctgaaaat

SEQ ID NO: 448443 - DNA, 25 bp, Artificial
  probe
  misc_feature (1)..(25): SEQ ID NO: 6760; WAN024BMI; Start 7; Stop 31
atttcctggtccattatcctgaaaa

SEQ ID NO: 448444 - DNA, 25 bp, Artificial
  probe
  misc_feature (1)..(25): SEQ ID NO: 6760; WAN024BMI; Start 26; Stop 50
tgaaaatcagtaaacacacggctcc

SEQ ID NO: 448445 - DNA, 25 bp, Artificial
  probe
  misc_feature (1)..(25): SEQ ID NO: 6760; WAN024BMI; Start 27; Stop 51
gaaaatcagtaaacacacggctccc

SEQ ID NO: 448446 - DNA, 25 bp, Artificial
  probe
  misc_feature (1)..(25): SEQ ID NO: 6760; WAN024BMI; Start 12; Stop 36
ctggtccattatcctgaaaatcagt

SEQ ID NO: 448447 - DNA, 25 bp, Artificial
  probe
  misc_feature (1)..(25): SEQ ID NO: 6760; WAN024BMI; Start 21; Stop 45
tatcctgaaaatcagtaaacacacg

SEQ ID NO: 448448 - DNA, 25 bp, Artificial
  probe
  misc_feature (1)..(25): SEQ ID NO: 6760; WAN024BMI; Start 13; Stop 37
tggtccattatcctgaaaatcagta

SEQ ID NO: 448449 - DNA, 25 bp, Artificial
  probe
  misc_feature (1)..(25): SEQ ID NO: 6760; WAN024BMI; Start 11; Stop 35
cctggtccattatcctgaaaatcag

SEQ ID NO: 448450 - DNA, 25 bp, Artificial
  probe
  misc_feature (1)..(25): SEQ ID NO: 6760; WAN024BMI; Start 14; Stop 38
ggtccattatcctgaaaatcagtaa

SEQ ID NO: 448451 - DNA, 25 bp, Artificial
  probe
  misc_feature (1)..(25): SEQ ID NO: 6760; WAN024BMI; Start 22; Stop 46
atcctgaaaatcagtaaacacacgg

SEQ ID NO: 448452 - DNA, 25 bp, Artificial
  probe
  misc_feature (1)..(25): SEQ ID NO: 6760; WAN024BMI; Start 20; Stop 44
ttatcctgaaaatcagtaaacacac

SEQ ID NO: 448453 - DNA, 25 bp, Artificial
  probe
  misc_feature (1)..(25): SEQ ID NO: 6760; WAN024BMI; Start 25; Stop 49
ctgaaaatcagtaaacacacggctc

SEQ ID NO: 448454 - DNA, 25 bp, Artificial
  probe
  misc_feature (1)..(25): SEQ ID NO: 6760; WAN024BMI; Start 17; Stop 41
ccattatcctgaaaatcagtaaaca

SEQ ID NO: 448455 - DNA, 25 bp, Artificial
  probe
  misc_feature (1)..(25): SEQ ID NO: 6760; WAN024BMI; Start 16; Stop 40
tccattatcctgaaaatcagtaaac

SEQ ID NO: 448456 - DNA, 25 bp, Artificial
  probe
  misc_feature (1)..(25): SEQ ID NO: 6760; WAN024BMI; Start 15; Stop 39
gtccattatcctgaaaatcagtaaa

SEQ ID NO: 448457 - DNA, 25 bp, Artificial
  probe
  misc_feature (1)..(25): SEQ ID NO: 6760; WAN024BMI; Start 19; Stop 43
attatcctgaaaatcagtaaacaca

SEQ ID NO: 448458 - DNA, 25 bp, Artificial
  probe
  misc_feature (1)..(25): SEQ ID NO: 6760; WAN024BMI; Start 18; Stop 42
cattatcctgaaaatcagtaaacac

SEQ ID NO: 448459 - DNA, 25 bp, Artificial
  probe
  misc_feature (1)..(25): SEQ ID NO: 6760; WAN024BMI; Start 24; Stop 48
cctgaaaatcagtaaacacacggct

SEQ ID NO: 448460 - DNA, 25 bp, Artificial
  probe
  misc_feature (1)..(25): SEQ ID NO: 6760; WAN024BMI; Start 23; Stop 47
tcctgaaaatcagtaaacacacggc

SEQ ID NO: 448461 - DNA, 25 bp, Artificial
  probe
  misc_feature (1)..(25): SEQ ID NO: 6761; WAN024BUE; Start 193; Stop 217
atgactgactcaccttacattagac

SEQ ID NO: 448462 - DNA, 25 bp, Artificial
  probe
  misc_feature (1)..(25): SEQ ID NO: 6761; WAN024BUE; Start 589; Stop 613
aagaactatcaagtcagcggttatc

SEQ ID NO: 448463 - DNA, 25 bp, Artificial
  probe
  misc_feature (1)..(25): SEQ ID NO: 6761; WAN024BUE; Start 591; Stop 615
gaactatcaagtcagcggttatcaa

SEQ ID NO: 448464 - DNA, 25 bp, Artificial
  probe
  misc_feature (1)..(25): SEQ ID NO: 6761; WAN024BUE; Start 194; Stop 218
tgactgactcaccttacattagaca

SEQ ID NO: 448465 - DNA, 25 bp, Artificial
  probe
  misc_feature (1)..(25): SEQ ID NO: 6761; WAN024BUE; Start 592; Stop 616
aactatcaagtcagcggttatcaac

SEQ ID NO: 448466 - DNA, 25 bp, Artificial
  probe
  misc_feature (1)..(25): SEQ ID NO: 6761; WAN024BUE; Start 195; Stop 219
gactgactcaccttacattagacag

SEQ ID NO: 448467 - DNA, 25 bp, Artificial
  probe
  misc_feature (1)..(25): SEQ ID NO: 6761; WAN024BUE; Start 590; Stop 614
agaactatcaagtcagcggttatca

SEQ ID NO: 448468 - DNA, 25 bp, Artificial
  probe
  misc_feature (1)..(25): SEQ ID NO: 6761; WAN024BUE; Start 192; Stop 216
catgactgactcaccttacattaga

SEQ ID NO: 448469 - DNA, 25 bp, Artificial
  probe
  misc_feature (1)..(25): SEQ ID NO: 6761; WAN024BUE; Start 191; Stop 215
gcatgactgactcaccttacattag

SEQ ID NO: 448470 - DNA, 25 bp, Artificial
  probe
  misc_feature (1)..(25): SEQ ID NO: 6761; WAN024BUE; Start 86; Stop 110
aagccactatgaagtcacttgatga

SEQ ID NO: 448471 - DNA, 25 bp, Artificial
  probe
  misc_feature (1)..(25): SEQ ID NO: 6761; WAN024BUE; Start 196; Stop 220
actgactcaccttacattagacagc

SEQ ID NO: 448472 - DNA, 25 bp, Artificial
  probe
  misc_feature (1)..(25): SEQ ID NO: 6761; WAN024BUE; Start 558; Stop 582
tggtctaagtaaactcggatttgat

SEQ ID NO: 448473 - DNA, 25 bp, Artificial
  probe
  misc_feature (1)..(25): SEQ ID NO: 6761; WAN024BUE; Start 557; Stop 581
ctggtctaagtaaactcggatttga

SEQ ID NO: 448474 - DNA, 25 bp, Artificial
  probe
  misc_feature (1)..(25): SEQ ID NO: 6761; WAN024BUE; Start 546; Stop 570
ctgtttcaaggctggtctaagtaaa

SEQ ID NO: 448475 - DNA, 25 bp, Artificial
  probe
  misc_feature (1)..(25): SEQ ID NO: 6761; WAN024BUE; Start 549; Stop 573
tttcaaggctggtctaagtaaactc

SEQ ID NO: 448476 - DNA, 25 bp, Artificial
  probe
  misc_feature (1)..(25): SEQ ID NO: 6761; WAN024BUE; Start 559; Stop 583
ggtctaagtaaactcggatttgatt

SEQ ID NO: 448477 - DNA, 25 bp, Artificial
  probe
  misc_feature (1)..(25): SEQ ID NO: 6761; WAN024BUE; Start 588; Stop 612
aaagaactatcaagtcagcggttat

SEQ ID NO: 448478 - DNA, 25 bp, Artificial
  probe
  misc_feature (1)..(25): SEQ ID NO: 6761; WAN024BUE; Start 190; Stop 214
ggcatgactgactcaccttacatta

SEQ ID NO: 448479 - DNA, 25 bp, Artificial
  probe
  misc_feature (1)..(25): SEQ ID NO: 6761; WAN024BUE; Start 593; Stop 617
actatcaagtcagcggttatcaacg

SEQ ID NO: 448480 - DNA, 25 bp, Artificial
  probe
  misc_feature (1)..(25): SEQ ID NO: 6761; WAN024BUE; Start 289; Stop 313
gaagaaatcagacaggctcaagaac

SEQ ID NO: 448481 - DNA, 25 bp, Artificial
  probe
  misc_feature (1)..(25): SEQ ID NO: 6761; WAN024BUE; Start 556; Stop 580
gctggtctaagtaaactcggatttg

SEQ ID NO: 448482 - DNA, 25 bp, Artificial
  probe
  misc_feature (1)..(25): SEQ ID NO: 6761; WAN024BUE; Start 113; Stop 137
tggtcacatttgaatttcagaaaca

SEQ ID NO: 448483 - DNA, 25 bp, Artificial
  probe
  misc_feature (1)..(25): SEQ ID NO: 6761; WAN024BUE; Start 595; Stop 619
tatcaagtcagcggttatcaacgta

SEQ ID NO: 448484 - DNA, 25 bp, Artificial
  probe
  misc_feature (1)..(25): SEQ ID NO: 6761; WAN024BUE; Start 197; Stop 221
ctgactcaccttacattagacagct

SEQ ID NO: 448485 - DNA, 25 bp, Artificial
  probe
  misc_feature (1)..(25): SEQ ID NO: 6761; WAN024BUE; Start 285; Stop 309
aaaggaagaaatcagacaggctcaa

SEQ ID NO: 448486 - DNA, 25 bp, Artificial
  probe
  misc_feature (1)..(25): SEQ ID NO: 6761; WAN024BUE; Start 114; Stop 138
ggtcacatttgaatttcagaaacaa

SEQ ID NO: 448487 - DNA, 25 bp, Artificial
  probe
  misc_feature (1)..(25): SEQ ID NO: 6761; WAN024BUE; Start 110; Stop 134
acatggtcacatttgaatttcagaa

SEQ ID NO: 448488 - DNA, 25 bp, Artificial
  probe
  misc_feature (1)..(25): SEQ ID NO: 6761; WAN024BUE; Start 545; Stop 569
actgtttcaaggctggtctaagtaa

SEQ ID NO: 448489 - DNA, 25 bp, Artificial
  probe
  misc_feature (1)..(25): SEQ ID NO: 6761; WAN024BUE; Start 112; Stop 136
atggtcacatttgaatttcagaaac

SEQ ID NO: 448490 - DNA, 25 bp, Artificial
  probe
  misc_feature (1)..(25): SEQ ID NO: 6761; WAN024BUE; Start 186; Stop 210
gtatggcatgactgactcaccttac

SEQ ID NO: 448491 - DNA, 25 bp, Artificial
  probe
  misc_feature (1)..(25): SEQ ID NO: 6761; WAN024BUE; Start 85; Stop 109
aaagccactatgaagtcacttgatg

SEQ ID NO: 448492 - DNA, 25 bp, Artificial
  probe
  misc_feature (1)..(25): SEQ ID NO: 6761; WAN024BUE; Start 185; Stop 209
agtatggcatgactgactcacctta

SEQ ID NO: 448493 - DNA, 25 bp, Artificial
  probe
  misc_feature (1)..(25): SEQ ID NO: 6761; WAN024BUE; Start 596; Stop 620
atcaagtcagcggttatcaacgtat

SEQ ID NO: 448494 - DNA, 25 bp, Artificial
  probe
  misc_feature (1)..(25): SEQ ID NO: 6762; WAN024G5F; Start 1870; Stop 1894
gatggtagttcgttggtgaataatg

SEQ ID NO: 448495 - DNA, 25 bp, Artificial
  probe
  misc_feature (1)..(25): SEQ ID NO: 6762; WAN024G5F; Start 1871; Stop 1895
atggtagttcgttggtgaataatgt

SEQ ID NO: 448496 - DNA, 25 bp, Artificial
  probe
  misc_feature (1)..(25): SEQ ID NO: 6762; WAN024G5F; Start 1732; Stop 1756
cgctacttctatactatcgtcaatg

SEQ ID NO: 448497 - DNA, 25 bp, Artificial
  probe
  misc_feature (1)..(25): SEQ ID NO: 6762; WAN024G5F; Start 1731; Stop 1755
tcgctacttctatactatcgtcaat

SEQ ID NO: 448498 - DNA, 25 bp, Artificial
  probe
  misc_feature (1)..(25): SEQ ID NO: 6762; WAN024G5F; Start 1730; Stop 1754
atcgctacttctatactatcgtcaa

SEQ ID NO: 448499 - DNA, 25 bp, Artificial
  probe
  misc_feature (1)..(25): SEQ ID NO: 6762; WAN024G5F; Start 1729; Stop 1753
aatcgctacttctatactatcgtca

SEQ ID NO: 448500 - DNA, 25 bp, Artificial
  probe
  misc_feature (1)..(25): SEQ ID NO: 6762; WAN024G5F; Start 1872; Stop 1896
tggtagttcgttggtgaataatgtc

SEQ ID NO: 448501 - DNA, 25 bp, Artificial
  probe
  misc_feature (1)..(25): SEQ ID NO: 6762; WAN024G5F; Start 2024; Stop 2048
ataatgttcgcttgaatgaccaatt

SEQ ID NO: 448502 - DNA, 25 bp, Artificial
  probe
  misc_feature (1)..(25): SEQ ID NO: 6762; WAN024G5F; Start 815; Stop 839
ttgtgacttatggctcaactatctt

SEQ ID NO: 448503 - DNA, 25 bp, Artificial
  probe
  misc_feature (1)..(25): SEQ ID NO: 6762; WAN024G5F; Start 1727; Stop 1751
tgaatcgctacttctatactatcgt

SEQ ID NO: 448504 - DNA, 25 bp, Artificial
  probe
  misc_feature (1)..(25): SEQ ID NO: 6762; WAN024G5F; Start 814; Stop 838
cttgtgacttatggctcaactatct

SEQ ID NO: 448505 - DNA, 25 bp, Artificial
  probe
  misc_feature (1)..(25): SEQ ID NO: 6762; WAN024G5F; Start 2023; Stop 2047
tataatgttcgcttgaatgaccaat

SEQ ID NO: 448506 - DNA, 25 bp, Artificial
  probe
  misc_feature (1)..(25): SEQ ID NO: 6762; WAN024G5F; Start 813; Stop 837
acttgtgacttatggctcaactatc

SEQ ID NO: 448507 - DNA, 25 bp, Artificial
  probe
  misc_feature (1)..(25): SEQ ID NO: 6762; WAN024G5F; Start 665; Stop 689
ctactccgctagatgttgttattct

SEQ ID NO: 448508 - DNA, 25 bp, Artificial
  probe
  misc_feature (1)..(25): SEQ ID NO: 6762; WAN024G5F; Start 1366; Stop 1390
gtaacagaccaatacggagttcatc

SEQ ID NO: 448509 - DNA, 25 bp, Artificial
  probe
  misc_feature (1)..(25): SEQ ID NO: 6762; WAN024G5F; Start 1506; Stop 1530
taactctagtaccgattggattacc

SEQ ID NO: 448510 - DNA, 25 bp, Artificial
  probe
  misc_feature (1)..(25): SEQ ID NO: 6762; WAN024G5F; Start 1313; Stop 1337
ataagattgttcgtggagatggtga

SEQ ID NO: 448511 - DNA, 25 bp, Artificial
  probe
  misc_feature (1)..(25): SEQ ID NO: 6762; WAN024G5F; Start 1728; Stop 1752
gaatcgctacttctatactatcgtc

SEQ ID NO: 448512 - DNA, 25 bp, Artificial
  probe
  misc_feature (1)..(25): SEQ ID NO: 6762; WAN024G5F; Start 1297; Stop 1321
tcagcagatggtgaacataagattg

SEQ ID NO: 448513 - DNA, 25 bp, Artificial
  probe
  misc_feature (1)..(25): SEQ ID NO: 6762; WAN024G5F; Start 1296; Stop 1320
gtcagcagatggtgaacataagatt

SEQ ID NO: 448514 - DNA, 25 bp, Artificial
  probe
  misc_feature (1)..(25): SEQ ID NO: 6762; WAN024G5F; Start 812; Stop 836
cacttgtgacttatggctcaactat

SEQ ID NO: 448515 - DNA, 25 bp, Artificial
  probe
  misc_feature (1)..(25): SEQ ID NO: 6762; WAN024G5F; Start 1367; Stop 1391
taacagaccaatacggagttcatca

SEQ ID NO: 448516 - DNA, 25 bp, Artificial
  probe
  misc_feature (1)..(25): SEQ ID NO: 6762; WAN024G5F; Start 1873; Stop 1897
ggtagttcgttggtgaataatgtcc

SEQ ID NO: 448517 - DNA, 25 bp, Artificial
  probe
  misc_feature (1)..(25): SEQ ID NO: 6762; WAN024G5F; Start 1312; Stop 1336
cataagattgttcgtggagatggtg

SEQ ID NO: 448518 - DNA, 25 bp, Artificial
  probe
  misc_feature (1)..(25): SEQ ID NO: 6762; WAN024G5F; Start 1543; Stop 1567
cctacgacttggtattataacggaa

SEQ ID NO: 448519 - DNA, 25 bp, Artificial
  probe
  misc_feature (1)..(25): SEQ ID NO: 6762; WAN024G5F; Start 1164; Stop 1188
tgttccgactatgtcatatccaatt

SEQ ID NO: 448520 - DNA, 25 bp, Artificial
  probe
  misc_feature (1)..(25): SEQ ID NO: 6762; WAN024G5F; Start 1314; Stop 1338
taagattgttcgtggagatggtgaa

SEQ ID NO: 448521 - DNA, 25 bp, Artificial
  probe
  misc_feature (1)..(25): SEQ ID NO: 6762; WAN024G5F; Start 1365; Stop 1389
tgtaacagaccaatacggagttcat

SEQ ID NO: 448522 - DNA, 25 bp, Artificial
  probe
  misc_feature (1)..(25): SEQ ID NO: 6762; WAN024G5F; Start 1163; Stop 1187
gtgttccgactatgtcatatccaat

SEQ ID NO: 448523 - DNA, 25 bp, Artificial
  probe
  misc_feature (1)..(25): SEQ ID NO: 6762; WAN024G5F; Start 2021; Stop 2045
cttataatgttcgcttgaatgacca

SEQ ID NO: 448524 - DNA, 25 bp, Artificial
  probe
  misc_feature (1)..(25): SEQ ID NO: 6762; WAN024G5F; Start 2020; Stop 2044
acttataatgttcgcttgaatgacc

SEQ ID NO: 448525 - DNA, 25 bp, Artificial
  probe
  misc_feature (1)..(25): SEQ ID NO: 6762; WAN024G5F; Start 1726; Stop 1750
ttgaatcgctacttctatactatcg

SEQ ID NO: 448526 - DNA, 25 bp, Artificial
  probe
  misc_feature (1)..(25): SEQ ID NO: 6762; WAN024G5F; Start 1579; Stop 1603
gatggctatgatgtcttcactgttg

SEQ ID NO: 448527 - DNA, 25 bp, Artificial
  probe
  misc_feature (1)..(25): SEQ ID NO: 6763; WAN024BKC; Start 30; Stop 54
gggattgtattactctgaactttcg

SEQ ID NO: 448528 - DNA, 25 bp, Artificial
  probe
  misc_feature (1)..(25): SEQ ID NO: 6763; WAN024BKC; Start 31; Stop 55
ggattgtattactctgaactttcga

SEQ ID NO: 448529 - DNA, 25 bp, Artificial
  probe
  misc_feature (1)..(25): SEQ ID NO: 6763; WAN024BKC; Start 86; Stop 110
ctaggtttagaatccttcagaatgt

SEQ ID NO: 448530 - DNA, 25 bp, Artificial
  probe
  misc_feature (1)..(25): SEQ ID NO: 6763; WAN024BKC; Start 89; Stop 113
ggtttagaatccttcagaatgtaaa

SEQ ID NO: 448531 - DNA, 25 bp, Artificial
  probe
  misc_feature (1)..(25): SEQ ID NO: 6763; WAN024BKC; Start 88; Stop 112
aggtttagaatccttcagaatgtaa

SEQ ID NO: 448532 - DNA, 25 bp, Artificial
  probe
  misc_feature (1)..(25): SEQ ID NO: 6763; WAN024BKC; Start 85; Stop 109
tctaggtttagaatccttcagaatg

SEQ ID NO: 448533 - DNA, 25 bp, Artificial
  probe
  misc_feature (1)..(25): SEQ ID NO: 6763; WAN024BKC; Start 28; Stop 52
tggggattgtattactctgaacttt

SEQ ID NO: 448534 - DNA, 25 bp, Artificial
  probe
  misc_feature (1)..(25): SEQ ID NO: 6763; WAN024BKC; Start 27; Stop 51
atggggattgtattactctgaactt

SEQ ID NO: 448535 - DNA, 25 bp, Artificial
  probe
  misc_feature (1)..(25): SEQ ID NO: 6763; WAN024BKC; Start 24; Stop 48
cctatggggattgtattactctgaa

SEQ ID NO: 448536 - DNA, 25 bp, Artificial
  probe
  misc_feature (1)..(25): SEQ ID NO: 6763; WAN024BKC; Start 29; Stop 53
ggggattgtattactctgaactttc

SEQ ID NO: 448537 - DNA, 25 bp, Artificial
  probe
  misc_feature (1)..(25): SEQ ID NO: 6763; WAN024BKC; Start 26; Stop 50
tatggggattgtattactctgaact

SEQ ID NO: 448538 - DNA, 25 bp, Artificial
  probe
  misc_feature (1)..(25): SEQ ID NO: 6763; WAN024BKC; Start 25; Stop 49
ctatggggattgtattactctgaac

SEQ ID NO: 448539 - DNA, 25 bp, Artificial
  probe
  misc_feature (1)..(25): SEQ ID NO: 6763; WAN024BKC; Start 2; Stop 26
tgcttaataagaatggagaattcct

SEQ ID NO: 448540 - DNA, 25 bp, Artificial
  probe
  misc_feature (1)..(25): SEQ ID NO: 6763; WAN024BKC; Start 55; Stop 79
aataccttagttctcgtgattttga

SEQ ID NO: 448541 - DNA, 25 bp, Artificial
  probe
  misc_feature (1)..(25): SEQ ID NO: 6763; WAN024BKC; Start 52; Stop 76
tcgaataccttagttctcgtgattt

SEQ ID NO: 448542 - DNA, 25 bp, Artificial
  probe
  misc_feature (1)..(25): SEQ ID NO: 6763; WAN024BKC; Start 57; Stop 81
taccttagttctcgtgattttgagc

SEQ ID NO: 448543 - DNA, 25 bp, Artificial
  probe
  misc_feature (1)..(25): SEQ ID NO: 6763; WAN024BKC; Start 87; Stop 111
taggtttagaatccttcagaatgta

SEQ ID NO: 448544 - DNA, 25 bp, Artificial
  probe
  misc_feature (1)..(25): SEQ ID NO: 6763; WAN024BKC; Start 54; Stop 78
gaataccttagttctcgtgattttg

SEQ ID NO: 448545 - DNA, 25 bp, Artificial
  probe
  misc_feature (1)..(25): SEQ ID NO: 6763; WAN024BKC; Start 56; Stop 80
ataccttagttctcgtgattttgag

SEQ ID NO: 448546 - DNA, 25 bp, Artificial
  probe
  misc_feature (1)..(25): SEQ ID NO: 6763; WAN024BKC; Start 68; Stop 92
tcgtgattttgagctattctaggtt

SEQ ID NO: 448547 - DNA, 25 bp, Artificial
  probe
  misc_feature (1)..(25): SEQ ID NO: 6763; WAN024BKC; Start 23; Stop 47
tcctatggggattgtattactctga

SEQ ID NO: 448548 - DNA, 25 bp, Artificial
  probe
  misc_feature (1)..(25): SEQ ID NO: 6763; WAN024BKC; Start 69; Stop 93
cgtgattttgagctattctaggttt

SEQ ID NO: 448549 - DNA, 25 bp, Artificial
  probe
  misc_feature (1)..(25): SEQ ID NO: 6763; WAN024BKC; Start 1; Stop 25
atgcttaataagaatggagaattcc

SEQ ID NO: 448550 - DNA, 25 bp, Artificial
  probe
  misc_feature (1)..(25): SEQ ID NO: 6763; WAN024BKC; Start 22; Stop 46
ttcctatggggattgtattactctg

SEQ ID NO: 448551 - DNA, 25 bp, Artificial
  probe
  misc_feature (1)..(25): SEQ ID NO: 6763; WAN024BKC; Start 66; Stop 90
tctcgtgattttgagctattctagg

SEQ ID NO: 448552 - DNA, 25 bp, Artificial
  probe
  misc_feature (1)..(25): SEQ ID NO: 6763; WAN024BKC; Start 63; Stop 87
agttctcgtgattttgagctattct

SEQ ID NO: 448553 - DNA, 25 bp, Artificial
  probe
  misc_feature (1)..(25): SEQ ID NO: 6763; WAN024BKC; Start 51; Stop 75
ttcgaataccttagttctcgtgatt

SEQ ID NO: 448554 - DNA, 25 bp, Artificial
  probe
  misc_feature (1)..(25): SEQ ID NO: 6763; WAN024BKC; Start 21; Stop 45
attcctatggggattgtattactct

SEQ ID NO: 448555 - DNA, 25 bp, Artificial
  probe
  misc_feature (1)..(25): SEQ ID NO: 6763; WAN024BKC; Start 67; Stop 91
ctcgtgattttgagctattctaggt

SEQ ID NO: 448556 - DNA, 25 bp, Artificial
  probe
  misc_feature (1)..(25): SEQ ID NO: 6763; WAN024BKC; Start 59; Stop 83
ccttagttctcgtgattttgagcta

SEQ ID NO: 448557 - DNA, 25 bp, Artificial
  probe
  misc_feature (1)..(25): SEQ ID NO: 6763; WAN024BKC; Start 64; Stop 88
gttctcgtgattttgagctattcta

SEQ ID NO: 448558 - DNA, 25 bp, Artificial
  probe
  misc_feature (1)..(25): SEQ ID NO: 6763; WAN024BKC; Start 62; Stop 86
tagttctcgtgattttgagctattc

SEQ ID NO: 448559 - DNA, 25 bp, Artificial
  probe
  misc_feature (1)..(25): SEQ ID NO: 6763; WAN024BKC; Start 60; Stop 84
cttagttctcgtgattttgagctat

SEQ ID NO: 448560 - DNA, 25 bp, Artificial
  probe
  misc_feature (1)..(25): SEQ ID NO: 6764; WAN024C33; Start 36; Stop 60
gtttataagtttcaacccgctttgg

SEQ ID NO: 448561 - DNA, 25 bp, Artificial
  probe
  misc_feature (1)..(25): SEQ ID NO: 6764; WAN024C33; Start 84; Stop 108
ggaagacctactcgacaatttagag

SEQ ID NO: 448562 - DNA, 25 bp, Artificial
  probe
  misc_feature (1)..(25): SEQ ID NO: 6764; WAN024C33; Start 83; Stop 107
aggaagacctactcgacaatttaga

SEQ ID NO: 448563 - DNA, 25 bp, Artificial
  probe
  misc_feature (1)..(25): SEQ ID NO: 6764; WAN024C33; Start 82; Stop 106
caggaagacctactcgacaatttag

SEQ ID NO: 448564 - DNA, 25 bp, Artificial
  probe
  misc_feature (1)..(25): SEQ ID NO: 6764; WAN024C33; Start 72; Stop 96
ttacctaacccaggaagacctactc

SEQ ID NO: 448565 - DNA, 25 bp, Artificial
  probe
  misc_feature (1)..(25): SEQ ID NO: 6764; WAN024C33; Start 71; Stop 95
cttacctaacccaggaagacctact

SEQ ID NO: 448566 - DNA, 25 bp, Artificial
  probe
  misc_feature (1)..(25): SEQ ID NO: 6764; WAN024C33; Start 81; Stop 105
ccaggaagacctactcgacaattta

SEQ ID NO: 448567 - DNA, 25 bp, Artificial
  probe
  misc_feature (1)..(25): SEQ ID NO: 6764; WAN024C33; Start 66; Stop 90
gatagcttacctaacccaggaagac

SEQ ID NO: 448568 - DNA, 25 bp, Artificial
  probe
  misc_feature (1)..(25): SEQ ID NO: 6764; WAN024C33; Start 37; Stop 61
tttataagtttcaacccgctttggg

SEQ ID NO: 448569 - DNA, 25 bp, Artificial
  probe
  misc_feature (1)..(25): SEQ ID NO: 6764; WAN024C33; Start 67; Stop 91
atagcttacctaacccaggaagacc

SEQ ID NO: 448570 - DNA, 25 bp, Artificial
  probe
  misc_feature (1)..(25): SEQ ID NO: 6764; WAN024C33; Start 70; Stop 94
gcttacctaacccaggaagacctac

SEQ ID NO: 448571 - DNA, 25 bp, Artificial
  probe
  misc_feature (1)..(25): SEQ ID NO: 6764; WAN024C33; Start 65; Stop 89
cgatagcttacctaacccaggaaga

SEQ ID NO: 448572 - DNA, 25 bp, Artificial
  probe
  misc_feature (1)..(25): SEQ ID NO: 6764; WAN024C33; Start 18; Stop 42
gactcaactgttcgaaaggtttata

SEQ ID NO: 448573 - DNA, 25 bp, Artificial
  probe
  misc_feature (1)..(25): SEQ ID NO: 6764; WAN024C33; Start 38; Stop 62
ttataagtttcaacccgctttggga

SEQ ID NO: 448574 - DNA, 25 bp, Artificial
  probe
  misc_feature (1)..(25): SEQ ID NO: 6764; WAN024C33; Start 85; Stop 109
gaagacctactcgacaatttagagt

SEQ ID NO: 448575 - DNA, 25 bp, Artificial
  probe
  misc_feature (1)..(25): SEQ ID NO: 6764; WAN024C33; Start 19; Stop 43
actcaactgttcgaaaggtttataa

SEQ ID NO: 448576 - DNA, 25 bp, Artificial
  probe
  misc_feature (1)..(25): SEQ ID NO: 6764; WAN024C33; Start 39; Stop 63
tataagtttcaacccgctttgggag

SEQ ID NO: 448577 - DNA, 25 bp, Artificial
  probe
  misc_feature (1)..(25): SEQ ID NO: 6764; WAN024C33; Start 30; Stop 54
cgaaaggtttataagtttcaacccg

SEQ ID NO: 448578 - DNA, 25 bp, Artificial
  probe
  misc_feature (1)..(25): SEQ ID NO: 6764; WAN024C33; Start 21; Stop 45
tcaactgttcgaaaggtttataagt

SEQ ID NO: 448579 - DNA, 25 bp, Artificial
  probe
  misc_feature (1)..(25): SEQ ID NO: 6764; WAN024C33; Start 31; Stop 55
gaaaggtttataagtttcaacccgc

SEQ ID NO: 448580 - DNA, 25 bp, Artificial
  probe
  misc_feature (1)..(25): SEQ ID NO: 6764; WAN024C33; Start 73; Stop 97
tacctaacccaggaagacctactcg

SEQ ID NO: 448581 - DNA, 25 bp, Artificial
  probe
  misc_feature (1)..(25): SEQ ID NO: 6764; WAN024C33; Start 35; Stop 59
ggtttataagtttcaacccgctttg

SEQ ID NO: 448582 - DNA, 25 bp, Artificial
  probe
  misc_feature (1)..(25): SEQ ID NO: 6764; WAN024C33; Start 34; Stop 58
aggtttataagtttcaacccgcttt

SEQ ID NO: 448583 - DNA, 25 bp, Artificial
  probe
  misc_feature (1)..(25): SEQ ID NO: 6764; WAN024C33; Start 33; Stop 57
aaggtttataagtttcaacccgctt

SEQ ID NO: 448584 - DNA, 25 bp, Artificial
  probe
  misc_feature (1)..(25): SEQ ID NO: 6764; WAN024C33; Start 32; Stop 56
aaaggtttataagtttcaacccgct

SEQ ID NO: 448585 - DNA, 25 bp, Artificial
  probe
  misc_feature (1)..(25): SEQ ID NO: 6764; WAN024C33; Start 20; Stop 44
ctcaactgttcgaaaggtttataag

SEQ ID NO: 448586 - DNA, 25 bp, Artificial
  probe
  misc_feature (1)..(25): SEQ ID NO: 6764; WAN024C33; Start 29; Stop 53
tcgaaaggtttataagtttcaaccc

SEQ ID NO: 448587 - DNA, 25 bp, Artificial
  probe
  misc_feature (1)..(25): SEQ ID NO: 6764; WAN024C33; Start 55; Stop 79
ctttgggaggcgatagcttacctaa

SEQ ID NO: 448588 - DNA, 25 bp, Artificial
  probe
  misc_feature (1)..(25): SEQ ID NO: 6764; WAN024C33; Start 69; Stop 93
agcttacctaacccaggaagaccta

SEQ ID NO: 448589 - DNA, 25 bp, Artificial
  probe
  misc_feature (1)..(25): SEQ ID NO: 6764; WAN024C33; Start 68; Stop 92
tagcttacctaacccaggaagacct

SEQ ID NO: 448590 - DNA, 25 bp, Artificial
  probe
  misc_feature (1)..(25): SEQ ID NO: 6764; WAN024C33; Start 80; Stop 104
cccaggaagacctactcgacaattt

SEQ ID NO: 448591 - DNA, 25 bp, Artificial
  probe
  misc_feature (1)..(25): SEQ ID NO: 6764; WAN024C33; Start 56; Stop 80
tttgggaggcgatagcttacctaac

SEQ ID NO: 448592 - DNA, 25 bp, Artificial
  probe
  misc_feature (1)..(25): SEQ ID NO: 6764; WAN024C33; Start 5; Stop 29
ttacgagtacagcgactcaactgtt

SEQ ID NO: 448593 - DNA, 25 bp, Artificial
  probe
  misc_feature (1)..(25): SEQ ID NO: 6765; WAN024C28; Start 16; Stop 40
aacaatatcttgattggacggctag

SEQ ID NO: 448594 - DNA, 25 bp, Artificial
  probe
  misc_feature (1)..(25): SEQ ID NO: 6765; WAN024C28; Start 39; Stop 63
agctactccctcgaagatattattt

SEQ ID NO: 448595 - DNA, 25 bp, Artificial
  probe
  misc_feature (1)..(25): SEQ ID NO: 6765; WAN024C28; Start 13; Stop 37
ctaaacaatatcttgattggacggc

SEQ ID NO: 448596 - DNA, 25 bp, Artificial
  probe
  misc_feature (1)..(25): SEQ ID NO: 6765; WAN024C28; Start 12; Stop 36
gctaaacaatatcttgattggacgg

SEQ ID NO: 448597 - DNA, 25 bp, Artificial
  probe
  misc_feature (1)..(25): SEQ ID NO: 6765; WAN024C28; Start 15; Stop 39
aaacaatatcttgattggacggcta

SEQ ID NO: 448598 - DNA, 25 bp, Artificial
  probe
  misc_feature (1)..(25): SEQ ID NO: 6765; WAN024C28; Start 14; Stop 38
taaacaatatcttgattggacggct

SEQ ID NO: 448599 - DNA, 25 bp, Artificial
  probe
  misc_feature (1)..(25): SEQ ID NO: 6765; WAN024C28; Start 11; Stop 35
agctaaacaatatcttgattggacg

SEQ ID NO: 448600 - DNA, 25 bp, Artificial
  probe
  misc_feature (1)..(25): SEQ ID NO: 6765; WAN024C28; Start 37; Stop 61
ctagctactccctcgaagatattat

SEQ ID NO: 448601 - DNA, 25 bp, Artificial
  probe
  misc_feature (1)..(25): SEQ ID NO: 6765; WAN024C28; Start 38; Stop 62
tagctactccctcgaagatattatt

SEQ ID NO: 448602 - DNA, 25 bp, Artificial
  probe
  misc_feature (1)..(25): SEQ ID NO: 6765; WAN024C28; Start 10; Stop 34
aagctaaacaatatcttgattggac

SEQ ID NO: 448603 - DNA, 25 bp, Artificial
  probe
  misc_feature (1)..(25): SEQ ID NO: 6765; WAN024C28; Start 40; Stop 64
gctactccctcgaagatattatttt

SEQ ID NO: 448604 - DNA, 25 bp, Artificial
  probe
  misc_feature (1)..(25): SEQ ID NO: 6765; WAN024C28; Start 9; Stop 33
aaagctaaacaatatcttgattgga

SEQ ID NO: 448605 - DNA, 25 bp, Artificial
  probe
  misc_feature (1)..(25): SEQ ID NO: 6765; WAN024C28; Start 46; Stop 70
ccctcgaagatattattttatcaga

SEQ ID NO: 448606 - DNA, 25 bp, Artificial
  probe
  misc_feature (1)..(25): SEQ ID NO: 6765; WAN024C28; Start 45; Stop 69
tccctcgaagatattattttatcag

SEQ ID NO: 448607 - DNA, 25 bp, Artificial
  probe
  misc_feature (1)..(25): SEQ ID NO: 6765; WAN024C28; Start 44; Stop 68
ctccctcgaagatattattttatca

SEQ ID NO: 448608 - DNA, 25 bp, Artificial
  probe
  misc_feature (1)..(25): SEQ ID NO: 6765; WAN024C28; Start 43; Stop 67
actccctcgaagatattattttatc

SEQ ID NO: 448609 - DNA, 25 bp, Artificial
  probe
  misc_feature (1)..(25): SEQ ID NO: 6765; WAN024C28; Start 8; Stop 32
aaaagctaaacaatatcttgattgg

SEQ ID NO: 448610 - DNA, 25 bp, Artificial
  probe
  misc_feature (1)..(25): SEQ ID NO: 6765; WAN024C28; Start 41; Stop 65
ctactccctcgaagatattatttta

SEQ ID NO: 448611 - DNA, 25 bp, Artificial
  probe
  misc_feature (1)..(25): SEQ ID NO: 6765; WAN024C28; Start 4; Stop 28
cttcaaaagctaaacaatatcttga

SEQ ID NO: 448612 - DNA, 25 bp, Artificial
  probe
  misc_feature (1)..(25): SEQ ID NO: 6765; WAN024C28; Start 7; Stop 31
caaaagctaaacaatatcttgattg

SEQ ID NO: 448613 - DNA, 25 bp, Artificial
  probe
  misc_feature (1)..(25): SEQ ID NO: 6765; WAN024C28; Start 2; Stop 26
tgcttcaaaagctaaacaatatctt

SEQ ID NO: 448614 - DNA, 25 bp, Artificial
  probe
  misc_feature (1)..(25): SEQ ID NO: 6765; WAN024C28; Start 3; Stop 27
gcttcaaaagctaaacaatatcttg

SEQ ID NO: 448615 - DNA, 25 bp, Artificial
  probe
  misc_feature (1)..(25): SEQ ID NO: 6765; WAN024C28; Start 1; Stop 25
atgcttcaaaagctaaacaatatct

SEQ ID NO: 448616 - DNA, 25 bp, Artificial
  probe
  misc_feature (1)..(25): SEQ ID NO: 6765; WAN024C28; Start 6; Stop 30
tcaaaagctaaacaatatcttgatt

SEQ ID NO: 448617 - DNA, 25 bp, Artificial
  probe
  misc_feature (1)..(25): SEQ ID NO: 6765; WAN024C28; Start 5; Stop 29
ttcaaaagctaaacaatatcttgat

SEQ ID NO: 448618 - DNA, 25 bp, Artificial
  probe
  misc_feature (1)..(25): SEQ ID NO: 6766; WAN024BOV; Start 44; Stop 68
cgttattcgtattccacttcatctt

SEQ ID NO: 448619 - DNA, 25 bp, Artificial
  probe
  misc_feature (1)..(25): SEQ ID NO: 6766; WAN024BOV; Start 21; Stop 45
aatgaatacgaatacccaagaaacg

SEQ ID NO: 448620 - DNA, 25 bp, Artificial
  probe
  misc_feature (1)..(25): SEQ ID NO: 6766; WAN024BOV; Start 51; Stop 75
cgtattccacttcatctttctatct

SEQ ID NO: 448621 - DNA, 25 bp, Artificial
  probe
  misc_feature (1)..(25): SEQ ID NO: 6766; WAN024BOV; Start 50; Stop 74
tcgtattccacttcatctttctatc

SEQ ID NO: 448622 - DNA, 25 bp, Artificial
  probe
  misc_feature (1)..(25): SEQ ID NO: 6766; WAN024BOV; Start 20; Stop 44
aaatgaatacgaatacccaagaaac

SEQ ID NO: 448623 - DNA, 25 bp, Artificial
  probe
  misc_feature (1)..(25): SEQ ID NO: 6766; WAN024BOV; Start 49; Stop 73
ttcgtattccacttcatctttctat

SEQ ID NO: 448624 - DNA, 25 bp, Artificial
  probe
  misc_feature (1)..(25): SEQ ID NO: 6766; WAN024BOV; Start 48; Stop 72
attcgtattccacttcatctttcta

SEQ ID NO: 448625 - DNA, 25 bp, Artificial
  probe
  misc_feature (1)..(25): SEQ ID NO: 6766; WAN024BOV; Start 47; Stop 71
tattcgtattccacttcatctttct

SEQ ID NO: 448626 - DNA, 25 bp, Artificial
  probe
  misc_feature (1)..(25): SEQ ID NO: 6766; WAN024BOV; Start 45; Stop 69
gttattcgtattccacttcatcttt

SEQ ID NO: 448627 - DNA, 25 bp, Artificial
  probe
  misc_feature (1)..(25): SEQ ID NO: 6766; WAN024BOV; Start 46; Stop 70
ttattcgtattccacttcatctttc

SEQ ID NO: 448628 - DNA, 25 bp, Artificial
  probe
  misc_feature (1)..(25): SEQ ID NO: 6766; WAN024BOV; Start 43; Stop 67
acgttattcgtattccacttcatct

SEQ ID NO: 448629 - DNA, 25 bp, Artificial
  probe
  misc_feature (1)..(25): SEQ ID NO: 6766; WAN024BOV; Start 22; Stop 46
atgaatacgaatacccaagaaacgt

SEQ ID NO: 448630 - DNA, 25 bp, Artificial
  probe
  misc_feature (1)..(25): SEQ ID NO: 6766; WAN024BOV; Start 55; Stop 79
ttccacttcatctttctatctattt

SEQ ID NO: 448631 - DNA, 25 bp, Artificial
  probe
  misc_feature (1)..(25): SEQ ID NO: 6766; WAN024BOV; Start 52; Stop 76
gtattccacttcatctttctatcta

SEQ ID NO: 448632 - DNA, 25 bp, Artificial
  probe
  misc_feature (1)..(25): SEQ ID NO: 6766; WAN024BOV; Start 19; Stop 43
aaaatgaatacgaatacccaagaaa

SEQ ID NO: 448633 - DNA, 25 bp, Artificial
  probe
  misc_feature (1)..(25): SEQ ID NO: 6766; WAN024BOV; Start 54; Stop 78
attccacttcatctttctatctatt

SEQ ID NO: 448634 - DNA, 25 bp, Artificial
  probe
  misc_feature (1)..(25): SEQ ID NO: 6766; WAN024BOV; Start 42; Stop 66
aacgttattcgtattccacttcatc

SEQ ID NO: 448635 - DNA, 25 bp, Artificial
  probe
  misc_feature (1)..(25): SEQ ID NO: 6766; WAN024BOV; Start 56; Stop 80
tccacttcatctttctatctatttt

SEQ ID NO: 448636 - DNA, 25 bp, Artificial
  probe
  misc_feature (1)..(25): SEQ ID NO: 6766; WAN024BOV; Start 40; Stop 64
gaaacgttattcgtattccacttca

SEQ ID NO: 448637 - DNA, 25 bp, Artificial
  probe
  misc_feature (1)..(25): SEQ ID NO: 6766; WAN024BOV; Start 37; Stop 61
caagaaacgttattcgtattccact

SEQ ID NO: 448638 - DNA, 25 bp, Artificial
  probe
  misc_feature (1)..(25): SEQ ID NO: 6766; WAN024BOV; Start 39; Stop 63
agaaacgttattcgtattccacttc

SEQ ID NO: 448639 - DNA, 25 bp, Artificial
  probe
  misc_feature (1)..(25): SEQ ID NO: 6766; WAN024BOV; Start 36; Stop 60
ccaagaaacgttattcgtattccac

SEQ ID NO: 448640 - DNA, 25 bp, Artificial
  probe
  misc_feature (1)..(25): SEQ ID NO: 6766; WAN024BOV; Start 33; Stop 57
tacccaagaaacgttattcgtattc

SEQ ID NO: 448641 - DNA, 25 bp, Artificial
  probe
  misc_feature (1)..(25): SEQ ID NO: 6766; WAN024BOV; Start 24; Stop 48
gaatacgaatacccaagaaacgtta

SEQ ID NO: 448642 - DNA, 25 bp, Artificial
  probe
  misc_feature (1)..(25): SEQ ID NO: 6766; WAN024BOV; Start 23; Stop 47
tgaatacgaatacccaagaaacgtt

SEQ ID NO: 448643 - DNA, 25 bp, Artificial
  probe
  misc_feature (1)..(25): SEQ ID NO: 6766; WAN024BOV; Start 41; Stop 65
aaacgttattcgtattccacttcat

SEQ ID NO: 448644 - DNA, 25 bp, Artificial
  probe
  misc_feature (1)..(25): SEQ ID NO: 6766; WAN024BOV; Start 38; Stop 62
aagaaacgttattcgtattccactt

SEQ ID NO: 448645 - DNA, 25 bp, Artificial
  probe
  misc_feature (1)..(25): SEQ ID NO: 6766; WAN024BOV; Start 35; Stop 59
cccaagaaacgttattcgtattcca

SEQ ID NO: 448646 - DNA, 25 bp, Artificial
  probe
  misc_feature (1)..(25): SEQ ID NO: 6766; WAN024BOV; Start 34; Stop 58
acccaagaaacgttattcgtattcc

SEQ ID NO: 448647 - DNA, 25 bp, Artificial
  probe
  misc_feature (1)..(25): SEQ ID NO: 6766; WAN024BOV; Start 32; Stop 56
atacccaagaaacgttattcgtatt

SEQ ID NO: 448648 - DNA, 25 bp, Artificial
  probe
  misc_feature (1)..(25): SEQ ID NO: 6766; WAN024BOV; Start 31; Stop 55
aatacccaagaaacgttattcgtat

SEQ ID NO: 448649 - DNA, 25 bp, Artificial
  probe
  misc_feature (1)..(25): SEQ ID NO: 6766; WAN024BOV; Start 26; Stop 50
atacgaatacccaagaaacgttatt

SEQ ID NO: 448650 - DNA, 25 bp, Artificial
  probe
  misc_feature (1)..(25): SEQ ID NO: 6766; WAN024BOV; Start 25; Stop 49
aatacgaatacccaagaaacgttat

SEQ ID NO: 448651 - DNA, 25 bp, Artificial
  probe
  misc_feature (1)..(25): SEQ ID NO: 6767; WAN024BB2; Start 50; Stop 74
ttgccgtaggtattgttactgactt

SEQ ID NO: 448652 - DNA, 25 bp, Artificial
  probe
  misc_feature (1)..(25): SEQ ID NO: 6767; WAN024BB2; Start 53; Stop 77
ccgtaggtattgttactgacttcgt

SEQ ID NO: 448653 - DNA, 25 bp, Artificial
  probe
  misc_feature (1)..(25): SEQ ID NO: 6767; WAN024BB2; Start 54; Stop 78
cgtaggtattgttactgacttcgtc

SEQ ID NO: 448654 - DNA, 25 bp, Artificial
  probe
  misc_feature (1)..(25): SEQ ID NO: 6767; WAN024BB2; Start 51; Stop 75
tgccgtaggtattgttactgacttc

SEQ ID NO: 448655 - DNA, 25 bp, Artificial
  probe
  misc_feature (1)..(25): SEQ ID NO: 6767; WAN024BB2; Start 49; Stop 73
cttgccgtaggtattgttactgact

SEQ ID NO: 448656 - DNA, 25 bp, Artificial
  probe
  misc_feature (1)..(25): SEQ ID NO: 6767; WAN024BB2; Start 52; Stop 76
gccgtaggtattgttactgacttcg

SEQ ID NO: 448657 - DNA, 25 bp, Artificial
  probe
  misc_feature (1)..(25): SEQ ID NO: 6767; WAN024BB2; Start 48; Stop 72
ccttgccgtaggtattgttactgac

SEQ ID NO: 448658 - DNA, 25 bp, Artificial
  probe
  misc_feature (1)..(25): SEQ ID NO: 6767; WAN024BB2; Start 18; Stop 42
ttatactctcttcaaaccacgtcaa

SEQ ID NO: 448659 - DNA, 25 bp, Artificial
  probe
  misc_feature (1)..(25): SEQ ID NO: 6767; WAN024BB2; Start 17; Stop 41
tttatactctcttcaaaccacgtca

SEQ ID NO: 448660 - DNA, 25 bp, Artificial
  probe
  misc_feature (1)..(25): SEQ ID NO: 6767; WAN024BB2; Start 19; Stop 43
tatactctcttcaaaccacgtcaac

SEQ ID NO: 448661 - DNA, 25 bp, Artificial
  probe
  misc_feature (1)..(25): SEQ ID NO: 6767; WAN024BB2; Start 55; Stop 79
gtaggtattgttactgacttcgtca

SEQ ID NO: 448662 - DNA, 25 bp, Artificial
  probe
  misc_feature (1)..(25): SEQ ID NO: 6767; WAN024BB2; Start 20; Stop 44
atactctcttcaaaccacgtcaacg

SEQ ID NO: 448663 - DNA, 25 bp, Artificial
  probe
  misc_feature (1)..(25): SEQ ID NO: 6767; WAN024BB2; Start 47; Stop 71
gccttgccgtaggtattgttactga

SEQ ID NO: 448664 - DNA, 25 bp, Artificial
  probe
  misc_feature (1)..(25): SEQ ID NO: 6767; WAN024BB2; Start 16; Stop 40
ttttatactctcttcaaaccacgtc

SEQ ID NO: 448665 - DNA, 25 bp, Artificial
  probe
  misc_feature (1)..(25): SEQ ID NO: 6767; WAN024BB2; Start 2; Stop 26
tgcttctccttctattttatactct

SEQ ID NO: 448666 - DNA, 25 bp, Artificial
  probe
  misc_feature (1)..(25): SEQ ID NO: 6767; WAN024BB2; Start 14; Stop 38
tattttatactctcttcaaaccacg

SEQ ID NO: 448667 - DNA, 25 bp, Artificial
  probe
  misc_feature (1)..(25): SEQ ID NO: 6767; WAN024BB2; Start 15; Stop 39
attttatactctcttcaaaccacgt

SEQ ID NO: 448668 - DNA, 25 bp, Artificial
  probe
  misc_feature (1)..(25): SEQ ID NO: 6767; WAN024BB2; Start 3; Stop 27
gcttctccttctattttatactctc

SEQ ID NO: 448669 - DNA, 25 bp, Artificial
  probe
  misc_feature (1)..(25): SEQ ID NO: 6767; WAN024BB2; Start 1; Stop 25
atgcttctccttctattttatactc

SEQ ID NO: 448670 - DNA, 25 bp, Artificial
  probe
  misc_feature (1)..(25): SEQ ID NO: 6767; WAN024BB2; Start 13; Stop 37
ctattttatactctcttcaaaccac

SEQ ID NO: 448671 - DNA, 25 bp, Artificial
  probe
  misc_feature (1)..(25): SEQ ID NO: 6767; WAN024BB2; Start 12; Stop 36
tctattttatactctcttcaaacca

SEQ ID NO: 448672 - DNA, 25 bp, Artificial
  probe
  misc_feature (1)..(25): SEQ ID NO: 6767; WAN024BB2; Start 7; Stop 31
ctccttctattttatactctcttca

SEQ ID NO: 448673 - DNA, 25 bp, Artificial
  probe
  misc_feature (1)..(25): SEQ ID NO: 6767; WAN024BB2; Start 21; Stop 45
tactctcttcaaaccacgtcaacgt

SEQ ID NO: 448674 - DNA, 25 bp, Artificial
  probe
  misc_feature (1)..(25): SEQ ID NO: 6767; WAN024BB2; Start 6; Stop 30
tctccttctattttatactctcttc

SEQ ID NO: 448675 - DNA, 25 bp, Artificial
  probe
  misc_feature (1)..(25): SEQ ID NO: 6767; WAN024BB2; Start 4; Stop 28
cttctccttctattttatactctct

SEQ ID NO: 448676 - DNA, 25 bp, Artificial
  probe
  misc_feature (1)..(25): SEQ ID NO: 6768; WAN024D25; Start 1022; Stop 1046
caggagaagtaagtgtaatcagtca

SEQ ID NO: 448677 - DNA, 25 bp, Artificial
  probe
  misc_feature (1)..(25): SEQ ID NO: 6768; WAN024D25; Start 1024; Stop 1048
ggagaagtaagtgtaatcagtcaga

SEQ ID NO: 448678 - DNA, 25 bp, Artificial
  probe
  misc_feature (1)..(25): SEQ ID NO: 6768; WAN024D25; Start 1023; Stop 1047
aggagaagtaagtgtaatcagtcag

SEQ ID NO: 448679 - DNA, 25 bp, Artificial
  probe
  misc_feature (1)..(25): SEQ ID NO: 6768; WAN024D25; Start 1021; Stop 1045
tcaggagaagtaagtgtaatcagtc

SEQ ID NO: 448680 - DNA, 25 bp, Artificial
  probe
  misc_feature (1)..(25): SEQ ID NO: 6768; WAN024D25; Start 1020; Stop 1044
ttcaggagaagtaagtgtaatcagt

SEQ ID NO: 448681 - DNA, 25 bp, Artificial
  probe
  misc_feature (1)..(25): SEQ ID NO: 6768; WAN024D25; Start 787; Stop 811
acggataaccaactagatactgcta

SEQ ID NO: 448682 - DNA, 25 bp, Artificial
  probe
  misc_feature (1)..(25): SEQ ID NO: 6768; WAN024D25; Start 908; Stop 932
aattagaacggacagagaaggaact

SEQ ID NO: 448683 - DNA, 25 bp, Artificial
  probe
  misc_feature (1)..(25): SEQ ID NO: 6768; WAN024D25; Start 786; Stop 810
aacggataaccaactagatactgct

SEQ ID NO: 448684 - DNA, 25 bp, Artificial
  probe
  misc_feature (1)..(25): SEQ ID NO: 6768; WAN024D25; Start 1025; Stop 1049
gagaagtaagtgtaatcagtcagaa

SEQ ID NO: 448685 - DNA, 25 bp, Artificial
  probe
  misc_feature (1)..(25): SEQ ID NO: 6768; WAN024D25; Start 909; Stop 933
attagaacggacagagaaggaactc

SEQ ID NO: 448686 - DNA, 25 bp, Artificial
  probe
  misc_feature (1)..(25): SEQ ID NO: 6768; WAN024D25; Start 788; Stop 812
cggataaccaactagatactgctag

SEQ ID NO: 448687 - DNA, 25 bp, Artificial
  probe
  misc_feature (1)..(25): SEQ ID NO: 6768; WAN024D25; Start 97; Stop 121
gcttggcatttattggttgatattc

SEQ ID NO: 448688 - DNA, 25 bp, Artificial
  probe
  misc_feature (1)..(25): SEQ ID NO: 6768; WAN024D25; Start 222; Stop 246
ctttgttgctgggaattatatctgg

SEQ ID NO: 448689 - DNA, 25 bp, Artificial
  probe
  misc_feature (1)..(25): SEQ ID NO: 6768; WAN024D25; Start 221; Stop 245
cctttgttgctgggaattatatctg

SEQ ID NO: 448690 - DNA, 25 bp, Artificial
  probe
  misc_feature (1)..(25): SEQ ID NO: 6768; WAN024D25; Start 225; Stop 249
tgttgctgggaattatatctggttt

SEQ ID NO: 448691 - DNA, 25 bp, Artificial
  probe
  misc_feature (1)..(25): SEQ ID NO: 6768; WAN024D25; Start 224; Stop 248
ttgttgctgggaattatatctggtt

SEQ ID NO: 448692 - DNA, 25 bp, Artificial
  probe
  misc_feature (1)..(25): SEQ ID NO: 6768; WAN024D25; Start 223; Stop 247
tttgttgctgggaattatatctggt

SEQ ID NO: 448693 - DNA, 25 bp, Artificial
  probe
  misc_feature (1)..(25): SEQ ID NO: 6768; WAN024D25; Start 574; Stop 598
gctatgcttagtgtcaagacagatc

SEQ ID NO: 448694 - DNA, 25 bp, Artificial
  probe
  misc_feature (1)..(25): SEQ ID NO: 6768; WAN024D25; Start 825; Stop 849
attggagtcaatggcttctatgatt

SEQ ID NO: 448695 - DNA, 25 bp, Artificial
  probe
  misc_feature (1)..(25): SEQ ID NO: 6768; WAN024D25; Start 824; Stop 848
aattggagtcaatggcttctatgat

SEQ ID NO: 448696 - DNA, 25 bp, Artificial
  probe
  misc_feature (1)..(25): SEQ ID NO: 6768; WAN024D25; Start 907; Stop 931
aaattagaacggacagagaaggaac

SEQ ID NO: 448697 - DNA, 25 bp, Artificial
  probe
  misc_feature (1)..(25): SEQ ID NO: 6768; WAN024D25; Start 1061; Stop 1085
aagtgcaagttcgactaccttataa

SEQ ID NO: 448698 - DNA, 25 bp, Artificial
  probe
  misc_feature (1)..(25): SEQ ID NO: 6768; WAN024D25; Start 660; Stop 684
acagcaaattagcaaagaatcaatg

SEQ ID NO: 448699 - DNA, 25 bp, Artificial
  probe
  misc_feature (1)..(25): SEQ ID NO: 6768; WAN024D25; Start 783; Stop 807
ggaaacggataaccaactagatact

SEQ ID NO: 448700 - DNA, 25 bp, Artificial
  probe
  misc_feature (1)..(25): SEQ ID NO: 6768; WAN024D25; Start 720; Stop 744
tagaactttgacatccgaactagag

SEQ ID NO: 448701 - DNA, 25 bp, Artificial
  probe
  misc_feature (1)..(25): SEQ ID NO: 6768; WAN024D25; Start 1060; Stop 1084
gaagtgcaagttcgactaccttata

SEQ ID NO: 448702 - DNA, 25 bp, Artificial
  probe
  misc_feature (1)..(25): SEQ ID NO: 6768; WAN024D25; Start 823; Stop 847
gaattggagtcaatggcttctatga

SEQ ID NO: 448703 - DNA, 25 bp, Artificial
  probe
  misc_feature (1)..(25): SEQ ID NO: 6768; WAN024D25; Start 566; Stop 590
atacctttgctatgcttagtgtcaa

SEQ ID NO: 448704 - DNA, 25 bp, Artificial
  probe
  misc_feature (1)..(25): SEQ ID NO: 6768; WAN024D25; Start 785; Stop 809
aaacggataaccaactagatactgc

SEQ ID NO: 448705 - DNA, 25 bp, Artificial
  probe
  misc_feature (1)..(25): SEQ ID NO: 6768; WAN024D25; Start 911; Stop 935
tagaacggacagagaaggaactcat

SEQ ID NO: 448706 - DNA, 25 bp, Artificial
  probe
  misc_feature (1)..(25): SEQ ID NO: 6768; WAN024D25; Start 821; Stop 845
aagaattggagtcaatggcttctat

SEQ ID NO: 448707 - DNA, 25 bp, Artificial
  probe
  misc_feature (1)..(25): SEQ ID NO: 6768; WAN024D25; Start 826; Stop 850
ttggagtcaatggcttctatgattt

SEQ ID NO: 448708 - DNA, 25 bp, Artificial
  probe
  misc_feature (1)..(25): SEQ ID NO: 6768; WAN024D25; Start 567; Stop 591
tacctttgctatgcttagtgtcaag

SEQ ID NO: 448709 - DNA, 25 bp, Artificial
  probe
  misc_feature (1)..(25): SEQ ID NO: 6769; WAN024AZE; Start 45; Stop 69
taaactgattcaagaactactgggc

SEQ ID NO: 448710 - DNA, 25 bp, Artificial
  probe
  misc_feature (1)..(25): SEQ ID NO: 6769; WAN024AZE; Start 44; Stop 68
ctaaactgattcaagaactactggg

SEQ ID NO: 448711 - DNA, 25 bp, Artificial
  probe
  misc_feature (1)..(25): SEQ ID NO: 6769; WAN024AZE; Start 43; Stop 67
actaaactgattcaagaactactgg

SEQ ID NO: 448712 - DNA, 25 bp, Artificial
  probe
  misc_feature (1)..(25): SEQ ID NO: 6769; WAN024AZE; Start 46; Stop 70
aaactgattcaagaactactgggca

SEQ ID NO: 448713 - DNA, 25 bp, Artificial
  probe
  misc_feature (1)..(25): SEQ ID NO: 6769; WAN024AZE; Start 17; Stop 41
caagaacaaagaatgatacgattga

SEQ ID NO: 448714 - DNA, 25 bp, Artificial
  probe
  misc_feature (1)..(25): SEQ ID NO: 6769; WAN024AZE; Start 16; Stop 40
tcaagaacaaagaatgatacgattg

SEQ ID NO: 448715 - DNA, 25 bp, Artificial
  probe
  misc_feature (1)..(25): SEQ ID NO: 6769; WAN024AZE; Start 21; Stop 45
aacaaagaatgatacgattgaaact

SEQ ID NO: 448716 - DNA, 25 bp, Artificial
  probe
  misc_feature (1)..(25): SEQ ID NO: 6769; WAN024AZE; Start 20; Stop 44
gaacaaagaatgatacgattgaaac

SEQ ID NO: 448717 - DNA, 25 bp, Artificial
  probe
  misc_feature (1)..(25): SEQ ID NO: 6769; WAN024AZE; Start 19; Stop 43
agaacaaagaatgatacgattgaaa

SEQ ID NO: 448718 - DNA, 25 bp, Artificial
  probe
  misc_feature (1)..(25): SEQ ID NO: 6769; WAN024AZE; Start 18; Stop 42
aagaacaaagaatgatacgattgaa

SEQ ID NO: 448719 - DNA, 25 bp, Artificial
  probe
  misc_feature (1)..(25): SEQ ID NO: 6769; WAN024AZE; Start 42; Stop 66
aactaaactgattcaagaactactg

SEQ ID NO: 448720 - DNA, 25 bp, Artificial
  probe
  misc_feature (1)..(25): SEQ ID NO: 6769; WAN024AZE; Start 30; Stop 54
tgatacgattgaaactaaactgatt

SEQ ID NO: 448721 - DNA, 25 bp, Artificial
  probe
  misc_feature (1)..(25): SEQ ID NO: 6769; WAN024AZE; Start 28; Stop 52
aatgatacgattgaaactaaactga

SEQ ID NO: 448722 - DNA, 25 bp, Artificial
  probe
  misc_feature (1)..(25): SEQ ID NO: 6769; WAN024AZE; Start 27; Stop 51
gaatgatacgattgaaactaaactg

SEQ ID NO: 448723 - DNA, 25 bp, Artificial
  probe
  misc_feature (1)..(25): SEQ ID NO: 6769; WAN024AZE; Start 47; Stop 71
aactgattcaagaactactgggcag

SEQ ID NO: 448724 - DNA, 25 bp, Artificial
  probe
  misc_feature (1)..(25): SEQ ID NO: 6769; WAN024AZE; Start 29; Stop 53
atgatacgattgaaactaaactgat

SEQ ID NO: 448725 - DNA, 25 bp, Artificial
  probe
  misc_feature (1)..(25): SEQ ID NO: 6769; WAN024AZE; Start 26; Stop 50
agaatgatacgattgaaactaaact

SEQ ID NO: 448726 - DNA, 25 bp, Artificial
  probe
  misc_feature (1)..(25): SEQ ID NO: 6769; WAN024AZE; Start 22; Stop 46
acaaagaatgatacgattgaaacta

SEQ ID NO: 448727 - DNA, 25 bp, Artificial
  probe
  misc_feature (1)..(25): SEQ ID NO: 6769; WAN024AZE; Start 51; Stop 75
gattcaagaactactgggcagtgat

SEQ ID NO: 448728 - DNA, 25 bp, Artificial
  probe
  misc_feature (1)..(25): SEQ ID NO: 6769; WAN024AZE; Start 31; Stop 55
gatacgattgaaactaaactgattc

SEQ ID NO: 448729 - DNA, 25 bp, Artificial
  probe
  misc_feature (1)..(25): SEQ ID NO: 6769; WAN024AZE; Start 41; Stop 65
aaactaaactgattcaagaactact

SEQ ID NO: 448730 - DNA, 25 bp, Artificial
  probe
  misc_feature (1)..(25): SEQ ID NO: 6769; WAN024AZE; Start 40; Stop 64
gaaactaaactgattcaagaactac

SEQ ID NO: 448731 - DNA, 25 bp, Artificial
  probe
  misc_feature (1)..(25): SEQ ID NO: 6769; WAN024AZE; Start 25; Stop 49
aagaatgatacgattgaaactaaac

SEQ ID NO: 448732 - DNA, 25 bp, Artificial
  probe
  misc_feature (1)..(25): SEQ ID NO: 6769; WAN024AZE; Start 23; Stop 47
caaagaatgatacgattgaaactaa

SEQ ID NO: 448733 - DNA, 25 bp, Artificial
  probe
  misc_feature (1)..(25): SEQ ID NO: 6769; WAN024AZE; Start 49; Stop 73
ctgattcaagaactactgggcagtg

SEQ ID NO: 448734 - DNA, 25 bp, Artificial
  probe
  misc_feature (1)..(25): SEQ ID NO: 6769; WAN024AZE; Start 50; Stop 74
tgattcaagaactactgggcagtga

SEQ ID NO: 448735 - DNA, 25 bp, Artificial
  probe
  misc_feature (1)..(25): SEQ ID NO: 6769; WAN024AZE; Start 15; Stop 39
atcaagaacaaagaatgatacgatt

SEQ ID NO: 448736 - DNA, 25 bp, Artificial
  probe
  misc_feature (1)..(25): SEQ ID NO: 6769; WAN024AZE; Start 24; Stop 48
aaagaatgatacgattgaaactaaa

SEQ ID NO: 448737 - DNA, 25 bp, Artificial
  probe
  misc_feature (1)..(25): SEQ ID NO: 6769; WAN024AZE; Start 32; Stop 56
atacgattgaaactaaactgattca

SEQ ID NO: 448738 - DNA, 25 bp, Artificial
  probe
  misc_feature (1)..(25): SEQ ID NO: 6769; WAN024AZE; Start 39; Stop 63
tgaaactaaactgattcaagaacta

SEQ ID NO: 448739 - DNA, 25 bp, Artificial
  probe
  misc_feature (1)..(25): SEQ ID NO: 6769; WAN024AZE; Start 14; Stop 38
tatcaagaacaaagaatgatacgat

SEQ ID NO: 448740 - DNA, 25 bp, Artificial
  probe
  misc_feature (1)..(25): SEQ ID NO: 6769; WAN024AZE; Start 13; Stop 37
atatcaagaacaaagaatgatacga

SEQ ID NO: 448741 - DNA, 25 bp, Artificial
  probe
  misc_feature (1)..(25): SEQ ID NO: 6769; WAN024AZE; Start 48; Stop 72
actgattcaagaactactgggcagt

SEQ ID NO: 448742 - DNA, 25 bp, Artificial
  probe
  misc_feature (1)..(25): SEQ ID NO: 6770; WAN024AZF; Start 17; Stop 41
caagaacaaagaatgatacggttga

SEQ ID NO: 448743 - DNA, 25 bp, Artificial
  probe
  misc_feature (1)..(25): SEQ ID NO: 6770; WAN024AZF; Start 16; Stop 40
tcaagaacaaagaatgatacggttg

SEQ ID NO: 448744 - DNA, 25 bp, Artificial
  probe
  misc_feature (1)..(25): SEQ ID NO: 6770; WAN024AZF; Start 19; Stop 43
agaacaaagaatgatacggttgaaa

SEQ ID NO: 448745 - DNA, 25 bp, Artificial
  probe
  misc_feature (1)..(25): SEQ ID NO: 6770; WAN024AZF; Start 18; Stop 42
aagaacaaagaatgatacggttgaa

SEQ ID NO: 448746 - DNA, 25 bp, Artificial
  probe
  misc_feature (1)..(25): SEQ ID NO: 6770; WAN024AZF; Start 48; Stop 72
attaattcaagaactactgggcagt

SEQ ID NO: 448747 - DNA, 25 bp, Artificial
  probe
  misc_feature (1)..(25): SEQ ID NO: 6770; WAN024AZF; Start 49; Stop 73
ttaattcaagaactactgggcagtg

SEQ ID NO: 448748 - DNA, 25 bp, Artificial
  probe
  misc_feature (1)..(25): SEQ ID NO: 6770; WAN024AZF; Start 50; Stop 74
taattcaagaactactgggcagtga

SEQ ID NO: 448749 - DNA, 25 bp, Artificial
  probe
  misc_feature (1)..(25): SEQ ID NO: 6770; WAN024AZF; Start 51; Stop 75
aattcaagaactactgggcagtgat

SEQ ID NO: 448750 - DNA, 25 bp, Artificial
  probe
  misc_feature (1)..(25): SEQ ID NO: 6770; WAN024AZF; Start 15; Stop 39
atcaagaacaaagaatgatacggtt

SEQ ID NO: 448751 - DNA, 25 bp, Artificial
  probe
  misc_feature (1)..(25): SEQ ID NO: 6770; WAN024AZF; Start 20; Stop 44
gaacaaagaatgatacggttgaaaa

SEQ ID NO: 448752 - DNA, 25 bp, Artificial
  probe
  misc_feature (1)..(25): SEQ ID NO: 6770; WAN024AZF; Start 47; Stop 71
aattaattcaagaactactgggcag

SEQ ID NO: 448753 - DNA, 25 bp, Artificial
  probe
  misc_feature (1)..(25): SEQ ID NO: 6770; WAN024AZF; Start 21; Stop 45
aacaaagaatgatacggttgaaaat

SEQ ID NO: 448754 - DNA, 25 bp, Artificial
  probe
  misc_feature (1)..(25): SEQ ID NO: 6770; WAN024AZF; Start 46; Stop 70
aaattaattcaagaactactgggca

SEQ ID NO: 448755 - DNA, 25 bp, Artificial
  probe
  misc_feature (1)..(25): SEQ ID NO: 6770; WAN024AZF; Start 22; Stop 46
acaaagaatgatacggttgaaaata

SEQ ID NO: 448756 - DNA, 25 bp, Artificial
  probe
  misc_feature (1)..(25): SEQ ID NO: 6770; WAN024AZF; Start 14; Stop 38
tatcaagaacaaagaatgatacggt

SEQ ID NO: 448757 - DNA, 25 bp, Artificial
  probe
  misc_feature (1)..(25): SEQ ID NO: 6770; WAN024AZF; Start 45; Stop 69
taaattaattcaagaactactgggc

SEQ ID NO: 448758 - DNA, 25 bp, Artificial
  probe
  misc_feature (1)..(25): SEQ ID NO: 6770; WAN024AZF; Start 23; Stop 47
caaagaatgatacggttgaaaataa

SEQ ID NO: 448759 - DNA, 25 bp, Artificial
  probe
  misc_feature (1)..(25): SEQ ID NO: 6770; WAN024AZF; Start 13; Stop 37
atatcaagaacaaagaatgatacgg

SEQ ID NO: 448760 - DNA, 25 bp, Artificial
  probe
  misc_feature (1)..(25): SEQ ID NO: 6770; WAN024AZF; Start 24; Stop 48
aaagaatgatacggttgaaaataaa

SEQ ID NO: 448761 - DNA, 25 bp, Artificial
  probe
  misc_feature (1)..(25): SEQ ID NO: 6770; WAN024AZF; Start 25; Stop 49
aagaatgatacggttgaaaataaat

SEQ ID NO: 448762 - DNA, 25 bp, Artificial
  probe
  misc_feature (1)..(25): SEQ ID NO: 6770; WAN024AZF; Start 26; Stop 50
agaatgatacggttgaaaataaatt

SEQ ID NO: 448763 - DNA, 25 bp, Artificial
  probe
  misc_feature (1)..(25): SEQ ID NO: 6770; WAN024AZF; Start 44; Stop 68
ataaattaattcaagaactactggg

SEQ ID NO: 448764 - DNA, 25 bp, Artificial
  probe
  misc_feature (1)..(25): SEQ ID NO: 6770; WAN024AZF; Start 34; Stop 58
acggttgaaaataaattaattcaag

SEQ ID NO: 448765 - DNA, 25 bp, Artificial
  probe
  misc_feature (1)..(25): SEQ ID NO: 6770; WAN024AZF; Start 35; Stop 59
cggttgaaaataaattaattcaaga

SEQ ID NO: 448766 - DNA, 25 bp, Artificial
  probe
  misc_feature (1)..(25): SEQ ID NO: 6771; WAN024CSL; Start 22; Stop 46
gcttcatattcaacaagtcgtctat

SEQ ID NO: 448767 - DNA, 25 bp, Artificial
  probe
  misc_feature (1)..(25): SEQ ID NO: 6771; WAN024CSL; Start 21; Stop 45
cgcttcatattcaacaagtcgtcta

SEQ ID NO: 448768 - DNA, 25 bp, Artificial
  probe
  misc_feature (1)..(25): SEQ ID NO: 6771; WAN024CSL; Start 139; Stop 163
attctgcttgtgtcatgttgtctaa

SEQ ID NO: 448769 - DNA, 25 bp, Artificial
  probe
  misc_feature (1)..(25): SEQ ID NO: 6771; WAN024CSL; Start 138; Stop 162
aattctgcttgtgtcatgttgtcta

SEQ ID NO: 448770 - DNA, 25 bp, Artificial
  probe
  misc_feature (1)..(25): SEQ ID NO: 6771; WAN024CSL; Start 19; Stop 43
ctcgcttcatattcaacaagtcgtc

SEQ ID NO: 448771 - DNA, 25 bp, Artificial
  probe
  misc_feature (1)..(25): SEQ ID NO: 6771; WAN024CSL; Start 20; Stop 44
tcgcttcatattcaacaagtcgtct

SEQ ID NO: 448772 - DNA, 25 bp, Artificial
  probe
  misc_feature (1)..(25): SEQ ID NO: 6771; WAN024CSL; Start 23; Stop 47
cttcatattcaacaagtcgtctatt

SEQ ID NO: 448773 - DNA, 25 bp, Artificial
  probe
  misc_feature (1)..(25): SEQ ID NO: 6771; WAN024CSL; Start 29; Stop 53
attcaacaagtcgtctatttccaca

SEQ ID NO: 448774 - DNA, 25 bp, Artificial
  probe
  misc_feature (1)..(25): SEQ ID NO: 6771; WAN024CSL; Start 118; Stop 142
tttcagccattacctcatcaaattc

SEQ ID NO: 448775 - DNA, 25 bp, Artificial
  probe
  misc_feature (1)..(25): SEQ ID NO: 6771; WAN024CSL; Start 28; Stop 52
tattcaacaagtcgtctatttccac

SEQ ID NO: 448776 - DNA, 25 bp, Artificial
  probe
  misc_feature (1)..(25): SEQ ID NO: 6771; WAN024CSL; Start 119; Stop 143
ttcagccattacctcatcaaattct

SEQ ID NO: 448777 - DNA, 25 bp, Artificial
  probe
  misc_feature (1)..(25): SEQ ID NO: 6771; WAN024CSL; Start 182; Stop 206
gcctcctcaaacttctctataagac

SEQ ID NO: 448778 - DNA, 25 bp, Artificial
  probe
  misc_feature (1)..(25): SEQ ID NO: 6771; WAN024CSL; Start 183; Stop 207
cctcctcaaacttctctataagaca

SEQ ID NO: 448779 - DNA, 25 bp, Artificial
  probe
  misc_feature (1)..(25): SEQ ID NO: 6771; WAN024CSL; Start 181; Stop 205
tgcctcctcaaacttctctataaga

SEQ ID NO: 448780 - DNA, 25 bp, Artificial
  probe
  misc_feature (1)..(25): SEQ ID NO: 6771; WAN024CSL; Start 180; Stop 204
ttgcctcctcaaacttctctataag

SEQ ID NO: 448781 - DNA, 25 bp, Artificial
  probe
  misc_feature (1)..(25): SEQ ID NO: 6771; WAN024CSL; Start 178; Stop 202
cattgcctcctcaaacttctctata

SEQ ID NO: 448782 - DNA, 25 bp, Artificial
  probe
  misc_feature (1)..(25): SEQ ID NO: 6771; WAN024CSL; Start 154; Stop 178
tgttgtctaaatctagtgtcattgc

SEQ ID NO: 448783 - DNA, 25 bp, Artificial
  probe
  misc_feature (1)..(25): SEQ ID NO: 6771; WAN024CSL; Start 115; Stop 139
ggatttcagccattacctcatcaaa

SEQ ID NO: 448784 - DNA, 25 bp, Artificial
  probe
  misc_feature (1)..(25): SEQ ID NO: 6771; WAN024CSL; Start 179; Stop 203
attgcctcctcaaacttctctataa

SEQ ID NO: 448785 - DNA, 25 bp, Artificial
  probe
  misc_feature (1)..(25): SEQ ID NO: 6771; WAN024CSL; Start 126; Stop 150
attacctcatcaaattctgcttgtg

SEQ ID NO: 448786 - DNA, 25 bp, Artificial
  probe
  misc_feature (1)..(25): SEQ ID NO: 6771; WAN024CSL; Start 125; Stop 149
cattacctcatcaaattctgcttgt

SEQ ID NO: 448787 - DNA, 25 bp, Artificial
  probe
  misc_feature (1)..(25): SEQ ID NO: 6771; WAN024CSL; Start 124; Stop 148
ccattacctcatcaaattctgcttg

SEQ ID NO: 448788 - DNA, 25 bp, Artificial
  probe
  misc_feature (1)..(25): SEQ ID NO: 6771; WAN024CSL; Start 30; Stop 54
ttcaacaagtcgtctatttccacac

SEQ ID NO: 448789 - DNA, 25 bp, Artificial
  probe
  misc_feature (1)..(25): SEQ ID NO: 6771; WAN024CSL; Start 127; Stop 151
ttacctcatcaaattctgcttgtgt

SEQ ID NO: 448790 - DNA, 25 bp, Artificial
  probe
  misc_feature (1)..(25): SEQ ID NO: 6771; WAN024CSL; Start 27; Stop 51
atattcaacaagtcgtctatttcca

SEQ ID NO: 448791 - DNA, 25 bp, Artificial
  probe
  misc_feature (1)..(25): SEQ ID NO: 6771; WAN024CSL; Start 116; Stop 140
gatttcagccattacctcatcaaat

SEQ ID NO: 448792 - DNA, 25 bp, Artificial
  probe
  misc_feature (1)..(25): SEQ ID NO: 6771; WAN024CSL; Start 144; Stop 168
gcttgtgtcatgttgtctaaatcta

SEQ ID NO: 448793 - DNA, 25 bp, Artificial
  probe
  misc_feature (1)..(25): SEQ ID NO: 6771; WAN024CSL; Start 26; Stop 50
catattcaacaagtcgtctatttcc

SEQ ID NO: 448794 - DNA, 25 bp, Artificial
  probe
  misc_feature (1)..(25): SEQ ID NO: 6771; WAN024CSL; Start 128; Stop 152
tacctcatcaaattctgcttgtgtc

SEQ ID NO: 448795 - DNA, 25 bp, Artificial
  probe
  misc_feature (1)..(25): SEQ ID NO: 6771; WAN024CSL; Start 142; Stop 166
ctgcttgtgtcatgttgtctaaatc

SEQ ID NO: 448796 - DNA, 25 bp, Artificial
  probe
  misc_feature (1)..(25): SEQ ID NO: 6771; WAN024CSL; Start 123; Stop 147
gccattacctcatcaaattctgctt

SEQ ID NO: 448797 - DNA, 25 bp, Artificial
  probe
  misc_feature (1)..(25): SEQ ID NO: 6771; WAN024CSL; Start 14; Stop 38
ctcagctcgcttcatattcaacaag

SEQ ID NO: 448798 - DNA, 25 bp, Artificial
  probe
  misc_feature (1)..(25): SEQ ID NO: 6771; WAN024CSL; Start 117; Stop 141
atttcagccattacctcatcaaatt

SEQ ID NO: 448799 - DNA, 25 bp, Artificial
  probe
  misc_feature (1)..(25): SEQ ID NO: 6772; WAN024BRO; Start 8; Stop 32
acttagttgatggattggtaggaat

SEQ ID NO: 448800 - DNA, 25 bp, Artificial
  probe
  misc_feature (1)..(25): SEQ ID NO: 6772; WAN024BRO; Start 7; Stop 31
tacttagttgatggattggtaggaa

SEQ ID NO: 448801 - DNA, 25 bp, Artificial
  probe
  misc_feature (1)..(25): SEQ ID NO: 6772; WAN024BRO; Start 6; Stop 30
ttacttagttgatggattggtagga

SEQ ID NO: 448802 - DNA, 25 bp, Artificial
  probe
  misc_feature (1)..(25): SEQ ID NO: 6772; WAN024BRO; Start 9; Stop 33
cttagttgatggattggtaggaata

SEQ ID NO: 448803 - DNA, 25 bp, Artificial
  probe
  misc_feature (1)..(25): SEQ ID NO: 6772; WAN024BRO; Start 10; Stop 34
ttagttgatggattggtaggaataa

SEQ ID NO: 448804 - DNA, 25 bp, Artificial
  probe
  misc_feature (1)..(25): SEQ ID NO: 6772; WAN024BRO; Start 2; Stop 26
tgctttacttagttgatggattggt

SEQ ID NO: 448805 - DNA, 25 bp, Artificial
  probe
  misc_feature (1)..(25): SEQ ID NO: 6772; WAN024BRO; Start 1; Stop 25
atgctttacttagttgatggattgg

SEQ ID NO: 448806 - DNA, 25 bp, Artificial
  probe
  misc_feature (1)..(25): SEQ ID NO: 6772; WAN024BRO; Start 3; Stop 27
gctttacttagttgatggattggta

SEQ ID NO: 448807 - DNA, 25 bp, Artificial
  probe
  misc_feature (1)..(25): SEQ ID NO: 6772; WAN024BRO; Start 5; Stop 29
tttacttagttgatggattggtagg

SEQ ID NO: 448808 - DNA, 25 bp, Artificial
  probe
  misc_feature (1)..(25): SEQ ID NO: 6772; WAN024BRO; Start 115; Stop 139
gcaaggagaataacgaaattaagat

SEQ ID NO: 448809 - DNA, 25 bp, Artificial
  probe
  misc_feature (1)..(25): SEQ ID NO: 6772; WAN024BRO; Start 11; Stop 35
tagttgatggattggtaggaataaa

SEQ ID NO: 448810 - DNA, 25 bp, Artificial
  probe
  misc_feature (1)..(25): SEQ ID NO: 6772; WAN024BRO; Start 4; Stop 28
ctttacttagttgatggattggtag

SEQ ID NO: 448811 - DNA, 25 bp, Artificial
  probe
  misc_feature (1)..(25): SEQ ID NO: 6772; WAN024BRO; Start 114; Stop 138
tgcaaggagaataacgaaattaaga

SEQ ID NO: 448812 - DNA, 25 bp, Artificial
  probe
  misc_feature (1)..(25): SEQ ID NO: 6772; WAN024BRO; Start 12; Stop 36
agttgatggattggtaggaataaaa

SEQ ID NO: 448813 - DNA, 25 bp, Artificial
  probe
  misc_feature (1)..(25): SEQ ID NO: 6772; WAN024BRO; Start 113; Stop 137
ttgcaaggagaataacgaaattaag

SEQ ID NO: 448814 - DNA, 25 bp, Artificial
  probe
  misc_feature (1)..(25): SEQ ID NO: 6772; WAN024BRO; Start 72; Stop 96
tgctttctgcaagttaataaatagt

SEQ ID NO: 448815 - DNA, 25 bp, Artificial
  probe
  misc_feature (1)..(25): SEQ ID NO: 6772; WAN024BRO; Start 116; Stop 140
caaggagaataacgaaattaagata

SEQ ID NO: 448816 - DNA, 25 bp, Artificial
  probe
  misc_feature (1)..(25): SEQ ID NO: 6772; WAN024BRO; Start 112; Stop 136
attgcaaggagaataacgaaattaa

SEQ ID NO: 448817 - DNA, 25 bp, Artificial
  probe
  misc_feature (1)..(25): SEQ ID NO: 6772; WAN024BRO; Start 73; Stop 97
gctttctgcaagttaataaatagta

SEQ ID NO: 448818 - DNA, 25 bp, Artificial
  probe
  misc_feature (1)..(25): SEQ ID NO: 6772; WAN024BRO; Start 111; Stop 135
tattgcaaggagaataacgaaatta

SEQ ID NO: 448819 - DNA, 25 bp, Artificial
  probe
  misc_feature (1)..(25): SEQ ID NO: 6772; WAN024BRO; Start 110; Stop 134
ttattgcaaggagaataacgaaatt

SEQ ID NO: 448820 - DNA, 25 bp, Artificial
  probe
  misc_feature (1)..(25): SEQ ID NO: 6772; WAN024BRO; Start 109; Stop 133
tttattgcaaggagaataacgaaat

SEQ ID NO: 448821 - DNA, 25 bp, Artificial
  probe
  misc_feature (1)..(25): SEQ ID NO: 6772; WAN024BRO; Start 108; Stop 132
ttttattgcaaggagaataacgaaa

SEQ ID NO: 448822 - DNA, 25 bp, Artificial
  probe
  misc_feature (1)..(25): SEQ ID NO: 6772; WAN024BRO; Start 71; Stop 95
ttgctttctgcaagttaataaatag

SEQ ID NO: 448823 - DNA, 25 bp, Artificial
  probe
  misc_feature (1)..(25): SEQ ID NO: 6772; WAN024BRO; Start 70; Stop 94
tttgctttctgcaagttaataaata

SEQ ID NO: 448824 - DNA, 25 bp, Artificial
  probe
  misc_feature (1)..(25): SEQ ID NO: 6772; WAN024BRO; Start 69; Stop 93
ttttgctttctgcaagttaataaat

SEQ ID NO: 448825 - DNA, 25 bp, Artificial
  probe
  misc_feature (1)..(25): SEQ ID NO: 6773; WAN024BPK; Start 1103; Stop 1127
tcggcattattccattagtatctgt

SEQ ID NO: 448826 - DNA, 25 bp, Artificial
  probe
  misc_feature (1)..(25): SEQ ID NO: 6773; WAN024BPK; Start 1102; Stop 1126
ttcggcattattccattagtatctg

SEQ ID NO: 448827 - DNA, 25 bp, Artificial
  probe
  misc_feature (1)..(25): SEQ ID NO: 6773; WAN024BPK; Start 1104; Stop 1128
cggcattattccattagtatctgta

SEQ ID NO: 448828 - DNA, 25 bp, Artificial
  probe
  misc_feature (1)..(25): SEQ ID NO: 6773; WAN024BPK; Start 901; Stop 925
gatccgtatagaagtgactcagtat

SEQ ID NO: 448829 - DNA, 25 bp, Artificial
  probe
  misc_feature (1)..(25): SEQ ID NO: 6773; WAN024BPK; Start 542; Stop 566
acaattatgtggcaacaagaagaat

SEQ ID NO: 448830 - DNA, 25 bp, Artificial
  probe
  misc_feature (1)..(25): SEQ ID NO: 6773; WAN024BPK; Start 900; Stop 924
tgatccgtatagaagtgactcagta

SEQ ID NO: 448831 - DNA, 25 bp, Artificial
  probe
  misc_feature (1)..(25): SEQ ID NO: 6773; WAN024BPK; Start 733; Stop 757
gtccttattgttgtagtggcagttg

SEQ ID NO: 448832 - DNA, 25 bp, Artificial
  probe
  misc_feature (1)..(25): SEQ ID NO: 6773; WAN024BPK; Start 899; Stop 923
atgatccgtatagaagtgactcagt

SEQ ID NO: 448833 - DNA, 25 bp, Artificial
  probe
  misc_feature (1)..(25): SEQ ID NO: 6773; WAN024BPK; Start 903; Stop 927
tccgtatagaagtgactcagtatat

SEQ ID NO: 448834 - DNA, 25 bp, Artificial
  probe
  misc_feature (1)..(25): SEQ ID NO: 6773; WAN024BPK; Start 902; Stop 926
atccgtatagaagtgactcagtata

SEQ ID NO: 448835 - DNA, 25 bp, Artificial
  probe
  misc_feature (1)..(25): SEQ ID NO: 6773; WAN024BPK; Start 898; Stop 922
tatgatccgtatagaagtgactcag

SEQ ID NO: 448836 - DNA, 25 bp, Artificial
  probe
  misc_feature (1)..(25): SEQ ID NO: 6773; WAN024BPK; Start 548; Stop 572
atgtggcaacaagaagaatagataa

SEQ ID NO: 448837 - DNA, 25 bp, Artificial
  probe
  misc_feature (1)..(25): SEQ ID NO: 6773; WAN024BPK; Start 546; Stop 570
ttatgtggcaacaagaagaatagat

SEQ ID NO: 448838 - DNA, 25 bp, Artificial
  probe
  misc_feature (1)..(25): SEQ ID NO: 6773; WAN024BPK; Start 545; Stop 569
attatgtggcaacaagaagaataga

SEQ ID NO: 448839 - DNA, 25 bp, Artificial
  probe
  misc_feature (1)..(25): SEQ ID NO: 6773; WAN024BPK; Start 896; Stop 920
gatatgatccgtatagaagtgactc

SEQ ID NO: 448840 - DNA, 25 bp, Artificial
  probe
  misc_feature (1)..(25): SEQ ID NO: 6773; WAN024BPK; Start 897; Stop 921
atatgatccgtatagaagtgactca

SEQ ID NO: 448841 - DNA, 25 bp, Artificial
  probe
  misc_feature (1)..(25): SEQ ID NO: 6773; WAN024BPK; Start 543; Stop 567
caattatgtggcaacaagaagaata

SEQ ID NO: 448842 - DNA, 25 bp, Artificial
  probe
  misc_feature (1)..(25): SEQ ID NO: 6773; WAN024BPK; Start 904; Stop 928
ccgtatagaagtgactcagtatatt

SEQ ID NO: 448843 - DNA, 25 bp, Artificial
  probe
  misc_feature (1)..(25): SEQ ID NO: 6773; WAN024BPK; Start 1092; Stop 1116
cttcacttatttcggcattattcca

SEQ ID NO: 448844 - DNA, 25 bp, Artificial
  probe
  misc_feature (1)..(25): SEQ ID NO: 6773; WAN024BPK; Start 1091; Stop 1115
acttcacttatttcggcattattcc

SEQ ID NO: 448845 - DNA, 25 bp, Artificial
  probe
  misc_feature (1)..(25): SEQ ID NO: 6773; WAN024BPK; Start 544; Stop 568
aattatgtggcaacaagaagaatag

SEQ ID NO: 448846 - DNA, 25 bp, Artificial
  probe
  misc_feature (1)..(25): SEQ ID NO: 6773; WAN024BPK; Start 801; Stop 825
tggagtaggtcaagatgggattatt

SEQ ID NO: 448847 - DNA, 25 bp, Artificial
  probe
  misc_feature (1)..(25): SEQ ID NO: 6773; WAN024BPK; Start 736; Stop 760
cttattgttgtagtggcagttgctc

SEQ ID NO: 448848 - DNA, 25 bp, Artificial
  probe
  misc_feature (1)..(25): SEQ ID NO: 6773; WAN024BPK; Start 547; Stop 571
tatgtggcaacaagaagaatagata

SEQ ID NO: 448849 - DNA, 25 bp, Artificial
  probe
  misc_feature (1)..(25): SEQ ID NO: 6773; WAN024BPK; Start 732; Stop 756
ggtccttattgttgtagtggcagtt

SEQ ID NO: 448850 - DNA, 25 bp, Artificial
  probe
  misc_feature (1)..(25): SEQ ID NO: 6773; WAN024BPK; Start 1094; Stop 1118
tcacttatttcggcattattccatt

SEQ ID NO: 448851 - DNA, 25 bp, Artificial
  probe
  misc_feature (1)..(25): SEQ ID NO: 6773; WAN024BPK; Start 1093; Stop 1117
ttcacttatttcggcattattccat

SEQ ID NO: 448852 - DNA, 25 bp, Artificial
  probe
  misc_feature (1)..(25): SEQ ID NO: 6773; WAN024BPK; Start 701; Stop 725
ttagtaaattgagttctcgctttgc

SEQ ID NO: 448853 - DNA, 25 bp, Artificial
  probe
  misc_feature (1)..(25): SEQ ID NO: 6773; WAN024BPK; Start 838; Stop 862
cgagaactattcaagtacattggcg

SEQ ID NO: 448854 - DNA, 25 bp, Artificial
  probe
  misc_feature (1)..(25): SEQ ID NO: 6773; WAN024BPK; Start 837; Stop 861
tcgagaactattcaagtacattggc

SEQ ID NO: 448855 - DNA, 25 bp, Artificial
  probe
  misc_feature (1)..(25): SEQ ID NO: 6773; WAN024BPK; Start 1089; Stop 1113
tgacttcacttatttcggcattatt

SEQ ID NO: 448856 - DNA, 25 bp, Artificial
  probe
  misc_feature (1)..(25): SEQ ID NO: 6773; WAN024BPK; Start 1030; Stop 1054
aagagtaccaatggattgcctacag

SEQ ID NO: 448857 - DNA, 25 bp, Artificial
  probe
  misc_feature (1)..(25): SEQ ID NO: 6773; WAN024BPK; Start 1029; Stop 1053
gaagagtaccaatggattgcctaca

SEQ ID NO: 448858 - DNA, 25 bp, Artificial
  probe
  misc_feature (1)..(25): SEQ ID NO: 6774; WAN024BJU; Start 24; Stop 48
gcataacaatcccagtgataagagt

SEQ ID NO: 448859 - DNA, 25 bp, Artificial
  probe
  misc_feature (1)..(25): SEQ ID NO: 6774; WAN024BJU; Start 1; Stop 25
atgctttgtatgcctatggttatgc

SEQ ID NO: 448860 - DNA, 25 bp, Artificial
  probe
  misc_feature (1)..(25): SEQ ID NO: 6774; WAN024BJU; Start 28; Stop 52
aacaatcccagtgataagagtattt

SEQ ID NO: 448861 - DNA, 25 bp, Artificial
  probe
  misc_feature (1)..(25): SEQ ID NO: 6774; WAN024BJU; Start 25; Stop 49
cataacaatcccagtgataagagta

SEQ ID NO: 448862 - DNA, 25 bp, Artificial
  probe
  misc_feature (1)..(25): SEQ ID NO: 6774; WAN024BJU; Start 29; Stop 53
acaatcccagtgataagagtattta

SEQ ID NO: 448863 - DNA, 25 bp, Artificial
  probe
  misc_feature (1)..(25): SEQ ID NO: 6774; WAN024BJU; Start 27; Stop 51
taacaatcccagtgataagagtatt

SEQ ID NO: 448864 - DNA, 25 bp, Artificial
  probe
  misc_feature (1)..(25): SEQ ID NO: 6774; WAN024BJU; Start 23; Stop 47
tgcataacaatcccagtgataagag

SEQ ID NO: 448865 - DNA, 25 bp, Artificial
  probe
  misc_feature (1)..(25): SEQ ID NO: 6774; WAN024BJU; Start 26; Stop 50
ataacaatcccagtgataagagtat

SEQ ID NO: 448866 - DNA, 25 bp, Artificial
  probe
  misc_feature (1)..(25): SEQ ID NO: 6774; WAN024BJU; Start 30; Stop 54
caatcccagtgataagagtatttat

SEQ ID NO: 448867 - DNA, 25 bp, Artificial
  probe
  misc_feature (1)..(25): SEQ ID NO: 6774; WAN024BJU; Start 22; Stop 46
atgcataacaatcccagtgataaga

SEQ ID NO: 448868 - DNA, 25 bp, Artificial
  probe
  misc_feature (1)..(25): SEQ ID NO: 6774; WAN024BJU; Start 41; Stop 65
ataagagtatttatcactgggattt

SEQ ID NO: 448869 - DNA, 25 bp, Artificial
  probe
  misc_feature (1)..(25): SEQ ID NO: 6774; WAN024BJU; Start 2; Stop 26
tgctttgtatgcctatggttatgca

SEQ ID NO: 448870 - DNA, 25 bp, Artificial
  probe
  misc_feature (1)..(25): SEQ ID NO: 6774; WAN024BJU; Start 42; Stop 66
taagagtatttatcactgggatttt

SEQ ID NO: 448871 - DNA, 25 bp, Artificial
  probe
  misc_feature (1)..(25): SEQ ID NO: 6774; WAN024BJU; Start 40; Stop 64
gataagagtatttatcactgggatt

SEQ ID NO: 448872 - DNA, 25 bp, Artificial
  probe
  misc_feature (1)..(25): SEQ ID NO: 6774; WAN024BJU; Start 31; Stop 55
aatcccagtgataagagtatttatc

SEQ ID NO: 448873 - DNA, 25 bp, Artificial
  probe
  misc_feature (1)..(25): SEQ ID NO: 6774; WAN024BJU; Start 3; Stop 27
gctttgtatgcctatggttatgcat

SEQ ID NO: 448874 - DNA, 25 bp, Artificial
  probe
  misc_feature (1)..(25): SEQ ID NO: 6775; WAN024EUO; Start 86; Stop 110
ttctgaatttgcttgactaccattt

SEQ ID NO: 448875 - DNA, 25 bp, Artificial
  probe
  misc_feature (1)..(25): SEQ ID NO: 6775; WAN024EUO; Start 84; Stop 108
cattctgaatttgcttgactaccat

SEQ ID NO: 448876 - DNA, 25 bp, Artificial
  probe
  misc_feature (1)..(25): SEQ ID NO: 6775; WAN024EUO; Start 85; Stop 109
attctgaatttgcttgactaccatt

SEQ ID NO: 448877 - DNA, 25 bp, Artificial
  probe
  misc_feature (1)..(25): SEQ ID NO: 6775; WAN024EUO; Start 87; Stop 111
tctgaatttgcttgactaccattta

SEQ ID NO: 448878 - DNA, 25 bp, Artificial
  probe
  misc_feature (1)..(25): SEQ ID NO: 6775; WAN024EUO; Start 88; Stop 112
ctgaatttgcttgactaccatttaa

SEQ ID NO: 448879 - DNA, 25 bp, Artificial
  probe
  misc_feature (1)..(25): SEQ ID NO: 6775; WAN024EUO; Start 89; Stop 113
tgaatttgcttgactaccatttaag

SEQ ID NO: 448880 - DNA, 25 bp, Artificial
  probe
  misc_feature (1)..(25): SEQ ID NO: 6775; WAN024EUO; Start 90; Stop 114
gaatttgcttgactaccatttaagt

SEQ ID NO: 448881 - DNA, 25 bp, Artificial
  probe
  misc_feature (1)..(25): SEQ ID NO: 6775; WAN024EUO; Start 93; Stop 117
tttgcttgactaccatttaagtaag

SEQ ID NO: 448882 - DNA, 25 bp, Artificial
  probe
  misc_feature (1)..(25): SEQ ID NO: 6775; WAN024EUO; Start 92; Stop 116
atttgcttgactaccatttaagtaa

SEQ ID NO: 448883 - DNA, 25 bp, Artificial
  probe
  misc_feature (1)..(25): SEQ ID NO: 6775; WAN024EUO; Start 91; Stop 115
aatttgcttgactaccatttaagta

SEQ ID NO: 448884 - DNA, 25 bp, Artificial
  probe
  misc_feature (1)..(25): SEQ ID NO: 6775; WAN024EUO; Start 126; Stop 150
ttctactcaattggtgacaaatgga

SEQ ID NO: 448885 - DNA, 25 bp, Artificial
  probe
  misc_feature (1)..(25): SEQ ID NO: 6775; WAN024EUO; Start 125; Stop 149
tttctactcaattggtgacaaatgg

SEQ ID NO: 448886 - DNA, 25 bp, Artificial
  probe
  misc_feature (1)..(25): SEQ ID NO: 6775; WAN024EUO; Start 127; Stop 151
tctactcaattggtgacaaatggac

SEQ ID NO: 448887 - DNA, 25 bp, Artificial
  probe
  misc_feature (1)..(25): SEQ ID NO: 6775; WAN024EUO; Start 729; Stop 753
tggttataagttcaaggagttatag

SEQ ID NO: 448888 - DNA, 25 bp, Artificial
  probe
  misc_feature (1)..(25): SEQ ID NO: 6775; WAN024EUO; Start 128; Stop 152
ctactcaattggtgacaaatggacg

SEQ ID NO: 448889 - DNA, 25 bp, Artificial
  probe
  misc_feature (1)..(25): SEQ ID NO: 6775; WAN024EUO; Start 129; Stop 153
tactcaattggtgacaaatggacgg

SEQ ID NO: 448890 - DNA, 25 bp, Artificial
  probe
  misc_feature (1)..(25): SEQ ID NO: 6775; WAN024EUO; Start 122; Stop 146
gcttttctactcaattggtgacaaa

SEQ ID NO: 448891 - DNA, 25 bp, Artificial
  probe
  misc_feature (1)..(25): SEQ ID NO: 6775; WAN024EUO; Start 118; Stop 142
gaaggcttttctactcaattggtga

SEQ ID NO: 448892 - DNA, 25 bp, Artificial
  probe
  misc_feature (1)..(25): SEQ ID NO: 6775; WAN024EUO; Start 119; Stop 143
aaggcttttctactcaattggtgac

SEQ ID NO: 448893 - DNA, 25 bp, Artificial
  probe
  misc_feature (1)..(25): SEQ ID NO: 6775; WAN024EUO; Start 132; Stop 156
tcaattggtgacaaatggacggaag

SEQ ID NO: 448894 - DNA, 25 bp, Artificial
  probe
  misc_feature (1)..(25): SEQ ID NO: 6775; WAN024EUO; Start 131; Stop 155
ctcaattggtgacaaatggacggaa

SEQ ID NO: 448895 - DNA, 25 bp, Artificial
  probe
  misc_feature (1)..(25): SEQ ID NO: 6775; WAN024EUO; Start 124; Stop 148
ttttctactcaattggtgacaaatg

SEQ ID NO: 448896 - DNA, 25 bp, Artificial
  probe
  misc_feature (1)..(25): SEQ ID NO: 6775; WAN024EUO; Start 121; Stop 145
ggcttttctactcaattggtgacaa

SEQ ID NO: 448897 - DNA, 25 bp, Artificial
  probe
  misc_feature (1)..(25): SEQ ID NO: 6775; WAN024EUO; Start 117; Stop 141
ggaaggcttttctactcaattggtg

SEQ ID NO: 448898 - DNA, 25 bp, Artificial
  probe
  misc_feature (1)..(25): SEQ ID NO: 6775; WAN024EUO; Start 123; Stop 147
cttttctactcaattggtgacaaat

SEQ ID NO: 448899 - DNA, 25 bp, Artificial
  probe
  misc_feature (1)..(25): SEQ ID NO: 6775; WAN024EUO; Start 120; Stop 144
aggcttttctactcaattggtgaca

SEQ ID NO: 448900 - DNA, 25 bp, Artificial
  probe
  misc_feature (1)..(25): SEQ ID NO: 6775; WAN024EUO; Start 133; Stop 157
caattggtgacaaatggacggaagg

SEQ ID NO: 448901 - DNA, 25 bp, Artificial
  probe
  misc_feature (1)..(25): SEQ ID NO: 6775; WAN024EUO; Start 130; Stop 154
actcaattggtgacaaatggacgga

SEQ ID NO: 448902 - DNA, 25 bp, Artificial
  probe
  misc_feature (1)..(25): SEQ ID NO: 6776; WAN024BOI; Start 1293; Stop 1317
cgatgctgatattggagatactgtt

SEQ ID NO: 448903 - DNA, 25 bp, Artificial
  probe
  misc_feature (1)..(25): SEQ ID NO: 6776; WAN024BOI; Start 1744; Stop 1768
atatcgcttgttaatgttgctgatg

SEQ ID NO: 448904 - DNA, 25 bp, Artificial
  probe
  misc_feature (1)..(25): SEQ ID NO: 6776; WAN024BOI; Start 1649; Stop 1673
ggatgacttacttagttagaggctc

SEQ ID NO: 448905 - DNA, 25 bp, Artificial
  probe
  misc_feature (1)..(25): SEQ ID NO: 6776; WAN024BOI; Start 1650; Stop 1674
gatgacttacttagttagaggctca

SEQ ID NO: 448906 - DNA, 25 bp, Artificial
  probe
  misc_feature (1)..(25): SEQ ID NO: 6776; WAN024BOI; Start 725; Stop 749
ttgaagaagaactgagcggagataa

SEQ ID NO: 448907 - DNA, 25 bp, Artificial
  probe
  misc_feature (1)..(25): SEQ ID NO: 6776; WAN024BOI; Start 1651; Stop 1675
atgacttacttagttagaggctcaa

SEQ ID NO: 448908 - DNA, 25 bp, Artificial
  probe
  misc_feature (1)..(25): SEQ ID NO: 6776; WAN024BOI; Start 1514; Stop 1538
tatcaacggacaatggtgttatctt

SEQ ID NO: 448909 - DNA, 25 bp, Artificial
  probe
  misc_feature (1)..(25): SEQ ID NO: 6776; WAN024BOI; Start 1513; Stop 1537
ttatcaacggacaatggtgttatct

SEQ ID NO: 448910 - DNA, 25 bp, Artificial
  probe
  misc_feature (1)..(25): SEQ ID NO: 6776; WAN024BOI; Start 1512; Stop 1536
attatcaacggacaatggtgttatc

SEQ ID NO: 448911 - DNA, 25 bp, Artificial
  probe
  misc_feature (1)..(25): SEQ ID NO: 6776; WAN024BOI; Start 1294; Stop 1318
gatgctgatattggagatactgtta

SEQ ID NO: 448912 - DNA, 25 bp, Artificial
  probe
  misc_feature (1)..(25): SEQ ID NO: 6776; WAN024BOI; Start 1745; Stop 1769
tatcgcttgttaatgttgctgatgg

SEQ ID NO: 448913 - DNA, 25 bp, Artificial
  probe
  misc_feature (1)..(25): SEQ ID NO: 6776; WAN024BOI; Start 726; Stop 750
tgaagaagaactgagcggagataag

SEQ ID NO: 448914 - DNA, 25 bp, Artificial
  probe
  misc_feature (1)..(25): SEQ ID NO: 6776; WAN024BOI; Start 1511; Stop 1535
aattatcaacggacaatggtgttat

SEQ ID NO: 448915 - DNA, 25 bp, Artificial
  probe
  misc_feature (1)..(25): SEQ ID NO: 6776; WAN024BOI; Start 429; Stop 453
agattataagcgtactctggaatgg

SEQ ID NO: 448916 - DNA, 25 bp, Artificial
  probe
  misc_feature (1)..(25): SEQ ID NO: 6776; WAN024BOI; Start 1682; Stop 1706
ctgatacagttactctgacagttgc

SEQ ID NO: 448917 - DNA, 25 bp, Artificial
  probe
  misc_feature (1)..(25): SEQ ID NO: 6776; WAN024BOI; Start 77; Stop 101
attacgatgatacttggacaagaag

SEQ ID NO: 448918 - DNA, 25 bp, Artificial
  probe
  misc_feature (1)..(25): SEQ ID NO: 6776; WAN024BOI; Start 1295; Stop 1319
atgctgatattggagatactgttaa

SEQ ID NO: 448919 - DNA, 25 bp, Artificial
  probe
  misc_feature (1)..(25): SEQ ID NO: 6776; WAN024BOI; Start 724; Stop 748
gttgaagaagaactgagcggagata

SEQ ID NO: 448920 - DNA, 25 bp, Artificial
  probe
  misc_feature (1)..(25): SEQ ID NO: 6776; WAN024BOI; Start 1289; Stop 1313
ttgtcgatgctgatattggagatac

SEQ ID NO: 448921 - DNA, 25 bp, Artificial
  probe
  misc_feature (1)..(25): SEQ ID NO: 6776; WAN024BOI; Start 1291; Stop 1315
gtcgatgctgatattggagatactg

SEQ ID NO: 448922 - DNA, 25 bp, Artificial
  probe
  misc_feature (1)..(25): SEQ ID NO: 6776; WAN024BOI; Start 727; Stop 751
gaagaagaactgagcggagataagg

SEQ ID NO: 448923 - DNA, 25 bp, Artificial
  probe
  misc_feature (1)..(25): SEQ ID NO: 6776; WAN024BOI; Start 1292; Stop 1316
tcgatgctgatattggagatactgt

SEQ ID NO: 448924 - DNA, 25 bp, Artificial
  probe
  misc_feature (1)..(25): SEQ ID NO: 6776; WAN024BOI; Start 1290; Stop 1314
tgtcgatgctgatattggagatact

SEQ ID NO: 448925 - DNA, 25 bp, Artificial
  probe
  misc_feature (1)..(25): SEQ ID NO: 6776; WAN024BOI; Start 1721; Stop 1745
ataaagaggttgctgttgatgagat

SEQ ID NO: 448926 - DNA, 25 bp, Artificial
  probe
  misc_feature (1)..(25): SEQ ID NO: 6776; WAN024BOI; Start 1719; Stop 1743
aaataaagaggttgctgttgatgag

SEQ ID NO: 448927 - DNA, 25 bp, Artificial
  probe
  misc_feature (1)..(25): SEQ ID NO: 6776; WAN024BOI; Start 1718; Stop 1742
gaaataaagaggttgctgttgatga

SEQ ID NO: 448928 - DNA, 25 bp, Artificial
  probe
  misc_feature (1)..(25): SEQ ID NO: 6776; WAN024BOI; Start 1714; Stop 1738
attggaaataaagaggttgctgttg

SEQ ID NO: 448929 - DNA, 25 bp, Artificial
  probe
  misc_feature (1)..(25): SEQ ID NO: 6776; WAN024BOI; Start 1713; Stop 1737
cattggaaataaagaggttgctgtt

SEQ ID NO: 448930 - DNA, 25 bp, Artificial
  probe
  misc_feature (1)..(25): SEQ ID NO: 6776; WAN024BOI; Start 1053; Stop 1077
ggaagtaaagaacgagaaagggata

SEQ ID NO: 448931 - DNA, 25 bp, Artificial
  probe
  misc_feature (1)..(25): SEQ ID NO: 6776; WAN024BOI; Start 1048; Stop 1072
gaatgggaagtaaagaacgagaaag

SEQ ID NO: 448932 - DNA, 25 bp, Artificial
  probe
  misc_feature (1)..(25): SEQ ID NO: 6776; WAN024BOI; Start 1046; Stop 1070
atgaatgggaagtaaagaacgagaa

SEQ ID NO: 448933 - DNA, 25 bp, Artificial
  probe
  misc_feature (1)..(25): SEQ ID NO: 6776; WAN024BOI; Start 1722; Stop 1746
taaagaggttgctgttgatgagata

SEQ ID NO: 448934 - DNA, 25 bp, Artificial
  probe
  misc_feature (1)..(25): SEQ ID NO: 6776; WAN024BOI; Start 1125; Stop 1149
gcaactatatccctcaacctttact

SEQ ID NO: 448935 - DNA, 25 bp, Artificial
  probe
  misc_feature (1)..(25): SEQ ID NO: 6777; WAN024BW5; Start 39; Stop 63
attagagacgattagtggtggagat

SEQ ID NO: 448936 - DNA, 25 bp, Artificial
  probe
  misc_feature (1)..(25): SEQ ID NO: 6777; WAN024BW5; Start 37; Stop 61
gaattagagacgattagtggtggag

SEQ ID NO: 448937 - DNA, 25 bp, Artificial
  probe
  misc_feature (1)..(25): SEQ ID NO: 6777; WAN024BW5; Start 35; Stop 59
tagaattagagacgattagtggtgg

SEQ ID NO: 448938 - DNA, 25 bp, Artificial
  probe
  misc_feature (1)..(25): SEQ ID NO: 6777; WAN024BW5; Start 38; Stop 62
aattagagacgattagtggtggaga

SEQ ID NO: 448939 - DNA, 25 bp, Artificial
  probe
  misc_feature (1)..(25): SEQ ID NO: 6777; WAN024BW5; Start 36; Stop 60
agaattagagacgattagtggtgga

SEQ ID NO: 448940 - DNA, 25 bp, Artificial
  probe
  misc_feature (1)..(25): SEQ ID NO: 6777; WAN024BW5; Start 40; Stop 64
ttagagacgattagtggtggagatg

SEQ ID NO: 448941 - DNA, 25 bp, Artificial
  probe
  misc_feature (1)..(25): SEQ ID NO: 6777; WAN024BW5; Start 34; Stop 58
gtagaattagagacgattagtggtg

SEQ ID NO: 448942 - DNA, 25 bp, Artificial
  probe
  misc_feature (1)..(25): SEQ ID NO: 6777; WAN024BW5; Start 33; Stop 57
agtagaattagagacgattagtggt

SEQ ID NO: 448943 - DNA, 25 bp, Artificial
  probe
  misc_feature (1)..(25): SEQ ID NO: 6777; WAN024BW5; Start 41; Stop 65
tagagacgattagtggtggagatga

SEQ ID NO: 448944 - DNA, 25 bp, Artificial
  probe
  misc_feature (1)..(25): SEQ ID NO: 6777; WAN024BW5; Start 32; Stop 56
aagtagaattagagacgattagtgg

SEQ ID NO: 448945 - DNA, 25 bp, Artificial
  probe
  misc_feature (1)..(25): SEQ ID NO: 6777; WAN024BW5; Start 25; Stop 49
ttgaatgaagtagaattagagacga

SEQ ID NO: 448946 - DNA, 25 bp, Artificial
  probe
  misc_feature (1)..(25): SEQ ID NO: 6777; WAN024BW5; Start 26; Stop 50
tgaatgaagtagaattagagacgat

SEQ ID NO: 448947 - DNA, 25 bp, Artificial
  probe
  misc_feature (1)..(25): SEQ ID NO: 6777; WAN024BW5; Start 42; Stop 66
agagacgattagtggtggagatgac

SEQ ID NO: 448948 - DNA, 25 bp, Artificial
  probe
  misc_feature (1)..(25): SEQ ID NO: 6777; WAN024BW5; Start 30; Stop 54
tgaagtagaattagagacgattagt

SEQ ID NO: 448949 - DNA, 25 bp, Artificial
  probe
  misc_feature (1)..(25): SEQ ID NO: 6777; WAN024BW5; Start 71; Stop 95
ttattggagatatcggatgtatcgg

SEQ ID NO: 448950 - DNA, 25 bp, Artificial
  probe
  misc_feature (1)..(25): SEQ ID NO: 6777; WAN024BW5; Start 31; Stop 55
gaagtagaattagagacgattagtg

SEQ ID NO: 448951 - DNA, 25 bp, Artificial
  probe
  misc_feature (1)..(25): SEQ ID NO: 6777; WAN024BW5; Start 107; Stop 131
tgaagagtatcggagggatgataaa

SEQ ID NO: 448952 - DNA, 25 bp, Artificial
  probe
  misc_feature (1)..(25): SEQ ID NO: 6777; WAN024BW5; Start 106; Stop 130
ttgaagagtatcggagggatgataa

SEQ ID NO: 448953 - DNA, 25 bp, Artificial
  probe
  misc_feature (1)..(25): SEQ ID NO: 6777; WAN024BW5; Start 105; Stop 129
tttgaagagtatcggagggatgata

SEQ ID NO: 448954 - DNA, 25 bp, Artificial
  probe
  misc_feature (1)..(25): SEQ ID NO: 6777; WAN024BW5; Start 27; Stop 51
gaatgaagtagaattagagacgatt

SEQ ID NO: 448955 - DNA, 25 bp, Artificial
  probe
  misc_feature (1)..(25): SEQ ID NO: 6777; WAN024BW5; Start 43; Stop 67
gagacgattagtggtggagatgact

SEQ ID NO: 448956 - DNA, 25 bp, Artificial
  probe
  misc_feature (1)..(25): SEQ ID NO: 6777; WAN024BW5; Start 46; Stop 70
acgattagtggtggagatgactgtt

SEQ ID NO: 448957 - DNA, 25 bp, Artificial
  probe
  misc_feature (1)..(25): SEQ ID NO: 6777; WAN024BW5; Start 72; Stop 96
tattggagatatcggatgtatcggc

SEQ ID NO: 448958 - DNA, 25 bp, Artificial
  probe
  misc_feature (1)..(25): SEQ ID NO: 6777; WAN024BW5; Start 44; Stop 68
agacgattagtggtggagatgactg

SEQ ID NO: 448959 - DNA, 25 bp, Artificial
  probe
  misc_feature (1)..(25): SEQ ID NO: 6777; WAN024BW5; Start 47; Stop 71
cgattagtggtggagatgactgttt

SEQ ID NO: 448960 - DNA, 25 bp, Artificial
  probe
  misc_feature (1)..(25): SEQ ID NO: 6777; WAN024BW5; Start 45; Stop 69
gacgattagtggtggagatgactgt

SEQ ID NO: 448961 - DNA, 25 bp, Artificial
  probe
  misc_feature (1)..(25): SEQ ID NO: 6777; WAN024BW5; Start 24; Stop 48
tttgaatgaagtagaattagagacg

SEQ ID NO: 448962 - DNA, 25 bp, Artificial
  probe
  misc_feature (1)..(25): SEQ ID NO: 6777; WAN024BW5; Start 29; Stop 53
atgaagtagaattagagacgattag

SEQ ID NO: 448963 - DNA, 25 bp, Artificial
  probe
  misc_feature (1)..(25): SEQ ID NO: 6777; WAN024BW5; Start 57; Stop 81
tggagatgactgttttattggagat

SEQ ID NO: 448964 - DNA, 25 bp, Artificial
  probe
  misc_feature (1)..(25): SEQ ID NO: 6777; WAN024BW5; Start 56; Stop 80
gtggagatgactgttttattggaga

SEQ ID NO: 448965 - DNA, 25 bp, Artificial
  probe
  misc_feature (1)..(25): SEQ ID NO: 6777; WAN024BW5; Start 134; Stop 158
ctgctccatatgttcctccagtatg

SEQ ID NO: 448966 - DNA, 25 bp, Artificial
  probe
  misc_feature (1)..(25): SEQ ID NO: 6777; WAN024BW5; Start 73; Stop 97
attggagatatcggatgtatcggct

SEQ ID NO: 448967 - DNA, 25 bp, Artificial
  probe
  misc_feature (1)..(25): SEQ ID NO: 6777; WAN024BW5; Start 55; Stop 79
ggtggagatgactgttttattggag

SEQ ID NO: 448968 - DNA, 25 bp, Artificial
  probe
  misc_feature (1)..(25): SEQ ID NO: 6778; WAN024FP7; Start 291; Stop 315
tgcggtagaatatcttgtagaactg

SEQ ID NO: 448969 - DNA, 25 bp, Artificial
  probe
  misc_feature (1)..(25): SEQ ID NO: 6778; WAN024FP7; Start 294; Stop 318
ggtagaatatcttgtagaactggct

SEQ ID NO: 448970 - DNA, 25 bp, Artificial
  probe
  misc_feature (1)..(25): SEQ ID NO: 6778; WAN024FP7; Start 298; Stop 322
gaatatcttgtagaactggctgaac

SEQ ID NO: 448971 - DNA, 25 bp, Artificial
  probe
  misc_feature (1)..(25): SEQ ID NO: 6778; WAN024FP7; Start 297; Stop 321
agaatatcttgtagaactggctgaa

SEQ ID NO: 448972 - DNA, 25 bp, Artificial
  probe
  misc_feature (1)..(25): SEQ ID NO: 6778; WAN024FP7; Start 290; Stop 314
atgcggtagaatatcttgtagaact

SEQ ID NO: 448973 - DNA, 25 bp, Artificial
  probe
  misc_feature (1)..(25): SEQ ID NO: 6778; WAN024FP7; Start 293; Stop 317
cggtagaatatcttgtagaactggc

SEQ ID NO: 448974 - DNA, 25 bp, Artificial
  probe
  misc_feature (1)..(25): SEQ ID NO: 6778; WAN024FP7; Start 292; Stop 316
gcggtagaatatcttgtagaactgg

SEQ ID NO: 448975 - DNA, 25 bp, Artificial
  probe
  misc_feature (1)..(25): SEQ ID NO: 6778; WAN024FP7; Start 903; Stop 927
gcatatactattcagcatcaatcct

SEQ ID NO: 448976 - DNA, 25 bp, Artificial
  probe
  misc_feature (1)..(25): SEQ ID NO: 6778; WAN024FP7; Start 902; Stop 926
agcatatactattcagcatcaatcc

SEQ ID NO: 448977 - DNA, 25 bp, Artificial
  probe
  misc_feature (1)..(25): SEQ ID NO: 6778; WAN024FP7; Start 299; Stop 323
aatatcttgtagaactggctgaacg

SEQ ID NO: 448978 - DNA, 25 bp, Artificial
  probe
  misc_feature (1)..(25): SEQ ID NO: 6778; WAN024FP7; Start 783; Stop 807
agtgaactctatgattgaatctgga

SEQ ID NO: 448979 - DNA, 25 bp, Artificial
  probe
  misc_feature (1)..(25): SEQ ID NO: 6778; WAN024FP7; Start 304; Stop 328
cttgtagaactggctgaacgatatg

SEQ ID NO: 448980 - DNA, 25 bp, Artificial
  probe
  misc_feature (1)..(25): SEQ ID NO: 6778; WAN024FP7; Start 296; Stop 320
tagaatatcttgtagaactggctga

SEQ ID NO: 448981 - DNA, 25 bp, Artificial
  probe
  misc_feature (1)..(25): SEQ ID NO: 6778; WAN024FP7; Start 295; Stop 319
gtagaatatcttgtagaactggctg

SEQ ID NO: 448982 - DNA, 25 bp, Artificial
  probe
  misc_feature (1)..(25): SEQ ID NO: 6778; WAN024FP7; Start 289; Stop 313
aatgcggtagaatatcttgtagaac

SEQ ID NO: 448983 - DNA, 25 bp, Artificial
  probe
  misc_feature (1)..(25): SEQ ID NO: 6778; WAN024FP7; Start 303; Stop 327
tcttgtagaactggctgaacgatat

SEQ ID NO: 448984 - DNA, 25 bp, Artificial
  probe
  misc_feature (1)..(25): SEQ ID NO: 6778; WAN024FP7; Start 302; Stop 326
atcttgtagaactggctgaacgata

SEQ ID NO: 448985 - DNA, 25 bp, Artificial
  probe
  misc_feature (1)..(25): SEQ ID NO: 6778; WAN024FP7; Start 301; Stop 325
tatcttgtagaactggctgaacgat

SEQ ID NO: 448986 - DNA, 25 bp, Artificial
  probe
  misc_feature (1)..(25): SEQ ID NO: 6778; WAN024FP7; Start 300; Stop 324
atatcttgtagaactggctgaacga

SEQ ID NO: 448987 - DNA, 25 bp, Artificial
  probe
  misc_feature (1)..(25): SEQ ID NO: 6778; WAN024FP7; Start 784; Stop 808
gtgaactctatgattgaatctggaa

SEQ ID NO: 448988 - DNA, 25 bp, Artificial
  probe
  misc_feature (1)..(25): SEQ ID NO: 6778; WAN024FP7; Start 630; Stop 654
tggaagtacaacgaagagtagatat

SEQ ID NO: 448989 - DNA, 25 bp, Artificial
  probe
  misc_feature (1)..(25): SEQ ID NO: 6778; WAN024FP7; Start 788; Stop 812
actctatgattgaatctggaatgac

SEQ ID NO: 448990 - DNA, 25 bp, Artificial
  probe
  misc_feature (1)..(25): SEQ ID NO: 6778; WAN024FP7; Start 360; Stop 384
agtaagagatcatattcaaggtgga

SEQ ID NO: 448991 - DNA, 25 bp, Artificial
  probe
  misc_feature (1)..(25): SEQ ID NO: 6778; WAN024FP7; Start 123; Stop 147
ccaggataattctcttgctatatgt

SEQ ID NO: 448992 - DNA, 25 bp, Artificial
  probe
  misc_feature (1)..(25): SEQ ID NO: 6778; WAN024FP7; Start 789; Stop 813
ctctatgattgaatctggaatgact

SEQ ID NO: 448993 - DNA, 25 bp, Artificial
  probe
  misc_feature (1)..(25): SEQ ID NO: 6778; WAN024FP7; Start 629; Stop 653
ttggaagtacaacgaagagtagata

SEQ ID NO: 448994 - DNA, 25 bp, Artificial
  probe
  misc_feature (1)..(25): SEQ ID NO: 6778; WAN024FP7; Start 307; Stop 331
gtagaactggctgaacgatatggat

SEQ ID NO: 448995 - DNA, 25 bp, Artificial
  probe
  misc_feature (1)..(25): SEQ ID NO: 6778; WAN024FP7; Start 782; Stop 806
tagtgaactctatgattgaatctgg

SEQ ID NO: 448996 - DNA, 25 bp, Artificial
  probe
  misc_feature (1)..(25): SEQ ID NO: 6778; WAN024FP7; Start 231; Stop 255
gcaacattcaacttctgactggatt

SEQ ID NO: 448997 - DNA, 25 bp, Artificial
  probe
  misc_feature (1)..(25): SEQ ID NO: 6778; WAN024FP7; Start 308; Stop 332
tagaactggctgaacgatatggatc

SEQ ID NO: 448998 - DNA, 25 bp, Artificial
  probe
  misc_feature (1)..(25): SEQ ID NO: 6778; WAN024FP7; Start 361; Stop 385
gtaagagatcatattcaaggtggaa

SEQ ID NO: 448999 - DNA, 25 bp, Artificial
  probe
  misc_feature (1)..(25): SEQ ID NO: 6778; WAN024FP7; Start 787; Stop 811
aactctatgattgaatctggaatga

SEQ ID NO: 449000 - DNA, 25 bp, Artificial
  probe
  misc_feature (1)..(25): SEQ ID NO: 6778; WAN024FP7; Start 785; Stop 809
tgaactctatgattgaatctggaat

SEQ ID NO: 449001 - DNA, 25 bp, Artificial
  probe
  misc_feature (1)..(25): SEQ ID NO: 6779; WAN024GFR; Start 132; Stop 156
ggtcttgtctatggcttcactatta

SEQ ID NO: 449002 - DNA, 25 bp, Artificial
  probe
  misc_feature (1)..(25): SEQ ID NO: 6779; WAN024GFR; Start 135; Stop 159
cttgtctatggcttcactattaggt

SEQ ID NO: 449003 - DNA, 25 bp, Artificial
  probe
  misc_feature (1)..(25): SEQ ID NO: 6779; WAN024GFR; Start 134; Stop 158
tcttgtctatggcttcactattagg

SEQ ID NO: 449004 - DNA, 25 bp, Artificial
  probe
  misc_feature (1)..(25): SEQ ID NO: 6779; WAN024GFR; Start 216; Stop 240
taggaagaagataatgattggtgct

SEQ ID NO: 449005 - DNA, 25 bp, Artificial
  probe
  misc_feature (1)..(25): SEQ ID NO: 6779; WAN024GFR; Start 136; Stop 160
ttgtctatggcttcactattaggtt

SEQ ID NO: 449006 - DNA, 25 bp, Artificial
  probe
  misc_feature (1)..(25): SEQ ID NO: 6779; WAN024GFR; Start 301; Stop 325
cctgtctggatggttatgatagtat

SEQ ID NO: 449007 - DNA, 25 bp, Artificial
  probe
  misc_feature (1)..(25): SEQ ID NO: 6779; WAN024GFR; Start 219; Stop 243
gaagaagataatgattggtgctgat

SEQ ID NO: 449008 - DNA, 25 bp, Artificial
  probe
  misc_feature (1)..(25): SEQ ID NO: 6779; WAN024GFR; Start 218; Stop 242
ggaagaagataatgattggtgctga

SEQ ID NO: 449009 - DNA, 25 bp, Artificial
  probe
  misc_feature (1)..(25): SEQ ID NO: 6779; WAN024GFR; Start 217; Stop 241
aggaagaagataatgattggtgctg

SEQ ID NO: 449010 - DNA, 25 bp, Artificial
  probe
  misc_feature (1)..(25): SEQ ID NO: 6779; WAN024GFR; Start 220; Stop 244
aagaagataatgattggtgctgatt

SEQ ID NO: 449011 - DNA, 25 bp, Artificial
  probe
  misc_feature (1)..(25): SEQ ID NO: 6779; WAN024GFR; Start 133; Stop 157
gtcttgtctatggcttcactattag

SEQ ID NO: 449012 - DNA, 25 bp, Artificial
  probe
  misc_feature (1)..(25): SEQ ID NO: 6779; WAN024GFR; Start 130; Stop 154
atggtcttgtctatggcttcactat

SEQ ID NO: 449013 - DNA, 25 bp, Artificial
  probe
  misc_feature (1)..(25): SEQ ID NO: 6779; WAN024GFR; Start 131; Stop 155
tggtcttgtctatggcttcactatt

SEQ ID NO: 449014 - DNA, 25 bp, Artificial
  probe
  misc_feature (1)..(25): SEQ ID NO: 6779; WAN024GFR; Start 129; Stop 153
gatggtcttgtctatggcttcacta

SEQ ID NO: 449015 - DNA, 25 bp, Artificial
  probe
  misc_feature (1)..(25): SEQ ID NO: 6779; WAN024GFR; Start 1053; Stop 1077
tggaagtatcatgtctcttgctatg

SEQ ID NO: 449016 - DNA, 25 bp, Artificial
  probe
  misc_feature (1)..(25): SEQ ID NO: 6779; WAN024GFR; Start 1052; Stop 1076
ctggaagtatcatgtctcttgctat

SEQ ID NO: 449017 - DNA, 25 bp, Artificial
  probe
  misc_feature (1)..(25): SEQ ID NO: 6779; WAN024GFR; Start 304; Stop 328
gtctggatggttatgatagtattgt

SEQ ID NO: 449018 - DNA, 25 bp, Artificial
  probe
  misc_feature (1)..(25): SEQ ID NO: 6779; WAN024GFR; Start 303; Stop 327
tgtctggatggttatgatagtattg

SEQ ID NO: 449019 - DNA, 25 bp, Artificial
  probe
  misc_feature (1)..(25): SEQ ID NO: 6779; WAN024GFR; Start 1059; Stop 1083
tatcatgtctcttgctatgccaatt

SEQ ID NO: 449020 - DNA, 25 bp, Artificial
  probe
  misc_feature (1)..(25): SEQ ID NO: 6779; WAN024GFR; Start 1049; Stop 1073
taactggaagtatcatgtctcttgc

SEQ ID NO: 449021 - DNA, 25 bp, Artificial
  probe
  misc_feature (1)..(25): SEQ ID NO: 6779; WAN024GFR; Start 302; Stop 326
ctgtctggatggttatgatagtatt

SEQ ID NO: 449022 - DNA, 25 bp, Artificial
  probe
  misc_feature (1)..(25): SEQ ID NO: 6779; WAN024GFR; Start 1058; Stop 1082
gtatcatgtctcttgctatgccaat

SEQ ID NO: 449023 - DNA, 25 bp, Artificial
  probe
  misc_feature (1)..(25): SEQ ID NO: 6779; WAN024GFR; Start 1055; Stop 1079
gaagtatcatgtctcttgctatgcc

SEQ ID NO: 449024 - DNA, 25 bp, Artificial
  probe
  misc_feature (1)..(25): SEQ ID NO: 6779; WAN024GFR; Start 1054; Stop 1078
ggaagtatcatgtctcttgctatgc

SEQ ID NO: 449025 - DNA, 25 bp, Artificial
  probe
  misc_feature (1)..(25): SEQ ID NO: 6779; WAN024GFR; Start 1051; Stop 1075
actggaagtatcatgtctcttgcta

SEQ ID NO: 449026 - DNA, 25 bp, Artificial
  probe
  misc_feature (1)..(25): SEQ ID NO: 6779; WAN024GFR; Start 284; Stop 308
cattctatatggagctacctgtctg

SEQ ID NO: 449027 - DNA, 25 bp, Artificial
  probe
  misc_feature (1)..(25): SEQ ID NO: 6779; WAN024GFR; Start 285; Stop 309
attctatatggagctacctgtctgg

SEQ ID NO: 449028 - DNA, 25 bp, Artificial
  probe
  misc_feature (1)..(25): SEQ ID NO: 6779; WAN024GFR; Start 300; Stop 324
acctgtctggatggttatgatagta

SEQ ID NO: 449029 - DNA, 25 bp, Artificial
  probe
  misc_feature (1)..(25): SEQ ID NO: 6779; WAN024GFR; Start 299; Stop 323
tacctgtctggatggttatgatagt

SEQ ID NO: 449030 - DNA, 25 bp, Artificial
  probe
  misc_feature (1)..(25): SEQ ID NO: 6779; WAN024GFR; Start 298; Stop 322
ctacctgtctggatggttatgatag

SEQ ID NO: 449031 - DNA, 25 bp, Artificial
  probe
  misc_feature (1)..(25): SEQ ID NO: 6779; WAN024GFR; Start 305; Stop 329
tctggatggttatgatagtattgtt

SEQ ID NO: 449032 - DNA, 25 bp, Artificial
  probe
  misc_feature (1)..(25): SEQ ID NO: 6779; WAN024GFR; Start 1057; Stop 1081
agtatcatgtctcttgctatgccaa

SEQ ID NO: 449033 - DNA, 25 bp, Artificial
  probe
  misc_feature (1)..(25): SEQ ID NO: 6779; WAN024GFR; Start 1050; Stop 1074
aactggaagtatcatgtctcttgct

SEQ ID NO: 449034 - DNA, 25 bp, Artificial
  probe
  misc_feature (1)..(25): SEQ ID NO: 6781; WAN024B2K; Start 8; Stop 32
agtgctacacagatgtgacagaatt

SEQ ID NO: 449035 - DNA, 25 bp, Artificial
  probe
  misc_feature (1)..(25): SEQ ID NO: 6781; WAN024B2K; Start 7; Stop 31
aagtgctacacagatgtgacagaat

SEQ ID NO: 449036 - DNA, 25 bp, Artificial
  probe
  misc_feature (1)..(25): SEQ ID NO: 6781; WAN024B2K; Start 16; Stop 40
acagatgtgacagaatttgccattc

SEQ ID NO: 449037 - DNA, 25 bp, Artificial
  probe
  misc_feature (1)..(25): SEQ ID NO: 6781; WAN024B2K; Start 10; Stop 34
tgctacacagatgtgacagaatttg

SEQ ID NO: 449038 - DNA, 25 bp, Artificial
  probe
  misc_feature (1)..(25): SEQ ID NO: 6781; WAN024B2K; Start 9; Stop 33
gtgctacacagatgtgacagaattt

SEQ ID NO: 449039 - DNA, 25 bp, Artificial
  probe
  misc_feature (1)..(25): SEQ ID NO: 6781; WAN024B2K; Start 12; Stop 36
ctacacagatgtgacagaatttgcc

SEQ ID NO: 449040 - DNA, 25 bp, Artificial
  probe
  misc_feature (1)..(25): SEQ ID NO: 6781; WAN024B2K; Start 19; Stop 43
gatgtgacagaatttgccattccag

SEQ ID NO: 449041 - DNA, 25 bp, Artificial
  probe
  misc_feature (1)..(25): SEQ ID NO: 6781; WAN024B2K; Start 17; Stop 41
cagatgtgacagaatttgccattcc

SEQ ID NO: 449042 - DNA, 25 bp, Artificial
  probe
  misc_feature (1)..(25): SEQ ID NO: 6781; WAN024B2K; Start 15; Stop 39
cacagatgtgacagaatttgccatt

SEQ ID NO: 449043 - DNA, 25 bp, Artificial
  probe
  misc_feature (1)..(25): SEQ ID NO: 6781; WAN024B2K; Start 6; Stop 30
aaagtgctacacagatgtgacagaa

SEQ ID NO: 449044 - DNA, 25 bp, Artificial
  probe
  misc_feature (1)..(25): SEQ ID NO: 6781; WAN024B2K; Start 18; Stop 42
agatgtgacagaatttgccattcca

SEQ ID NO: 449045 - DNA, 25 bp, Artificial
  probe
  misc_feature (1)..(25): SEQ ID NO: 6781; WAN024B2K; Start 13; Stop 37
tacacagatgtgacagaatttgcca

SEQ ID NO: 449046 - DNA, 25 bp, Artificial
  probe
  misc_feature (1)..(25): SEQ ID NO: 6781; WAN024B2K; Start 11; Stop 35
gctacacagatgtgacagaatttgc

SEQ ID NO: 449047 - DNA, 25 bp, Artificial
  probe
  misc_feature (1)..(25): SEQ ID NO: 6781; WAN024B2K; Start 14; Stop 38
acacagatgtgacagaatttgccat

SEQ ID NO: 449048 - DNA, 25 bp, Artificial
  probe
  misc_feature (1)..(25): SEQ ID NO: 6781; WAN024B2K; Start 4; Stop 28
gaaaagtgctacacagatgtgacag

SEQ ID NO: 449049 - DNA, 25 bp, Artificial
  probe
  misc_feature (1)..(25): SEQ ID NO: 6781; WAN024B2K; Start 24; Stop 48
gacagaatttgccattccagcagta

SEQ ID NO: 449050 - DNA, 25 bp, Artificial
  probe
  misc_feature (1)..(25): SEQ ID NO: 6781; WAN024B2K; Start 20; Stop 44
atgtgacagaatttgccattccagc

SEQ ID NO: 449051 - DNA, 25 bp, Artificial
  probe
  misc_feature (1)..(25): SEQ ID NO: 6781; WAN024B2K; Start 5; Stop 29
aaaagtgctacacagatgtgacaga

SEQ ID NO: 449052 - DNA, 25 bp, Artificial
  probe
  misc_feature (1)..(25): SEQ ID NO: 6781; WAN024B2K; Start 25; Stop 49
acagaatttgccattccagcagtac

SEQ ID NO: 449053 - DNA, 25 bp, Artificial
  probe
  misc_feature (1)..(25): SEQ ID NO: 6781; WAN024B2K; Start 3; Stop 27
ggaaaagtgctacacagatgtgaca

SEQ ID NO: 449054 - DNA, 25 bp, Artificial
  probe
  misc_feature (1)..(25): SEQ ID NO: 6781; WAN024B2K; Start 30; Stop 54
atttgccattccagcagtactcaaa

SEQ ID NO: 449055 - DNA, 25 bp, Artificial
  probe
  misc_feature (1)..(25): SEQ ID NO: 6781; WAN024B2K; Start 29; Stop 53
aatttgccattccagcagtactcaa

SEQ ID NO: 449056 - DNA, 25 bp, Artificial
  probe
  misc_feature (1)..(25): SEQ ID NO: 6781; WAN024B2K; Start 27; Stop 51
agaatttgccattccagcagtactc

SEQ ID NO: 449057 - DNA, 25 bp, Artificial
  probe
  misc_feature (1)..(25): SEQ ID NO: 6781; WAN024B2K; Start 28; Stop 52
gaatttgccattccagcagtactca

SEQ ID NO: 449058 - DNA, 25 bp, Artificial
  probe
  misc_feature (1)..(25): SEQ ID NO: 6781; WAN024B2K; Start 26; Stop 50
cagaatttgccattccagcagtact

SEQ ID NO: 449059 - DNA, 25 bp, Artificial
  probe
  misc_feature (1)..(25): SEQ ID NO: 6781; WAN024B2K; Start 22; Stop 46
gtgacagaatttgccattccagcag

SEQ ID NO: 449060 - DNA, 25 bp, Artificial
  probe
  misc_feature (1)..(25): SEQ ID NO: 6781; WAN024B2K; Start 31; Stop 55
tttgccattccagcagtactcaaaa

SEQ ID NO: 449061 - DNA, 25 bp, Artificial
  probe
  misc_feature (1)..(25): SEQ ID NO: 6782; WAN024CT6; Start 225; Stop 249
ccgaagtgttaatcaatctcagttg

SEQ ID NO: 449062 - DNA, 25 bp, Artificial
  probe
  misc_feature (1)..(25): SEQ ID NO: 6782; WAN024CT6; Start 187; Stop 211
gagttgaagaggattggtaataaca

SEQ ID NO: 449063 - DNA, 25 bp, Artificial
  probe
  misc_feature (1)..(25): SEQ ID NO: 6782; WAN024CT6; Start 186; Stop 210
tgagttgaagaggattggtaataac

SEQ ID NO: 449064 - DNA, 25 bp, Artificial
  probe
  misc_feature (1)..(25): SEQ ID NO: 6782; WAN024CT6; Start 185; Stop 209
ttgagttgaagaggattggtaataa

SEQ ID NO: 449065 - DNA, 25 bp, Artificial
  probe
  misc_feature (1)..(25): SEQ ID NO: 6782; WAN024CT6; Start 188; Stop 212
agttgaagaggattggtaataacat

SEQ ID NO: 449066 - DNA, 25 bp, Artificial
  probe
  misc_feature (1)..(25): SEQ ID NO: 6782; WAN024CT6; Start 189; Stop 213
gttgaagaggattggtaataacatc

SEQ ID NO: 449067 - DNA, 25 bp, Artificial
  probe
  misc_feature (1)..(25): SEQ ID NO: 6782; WAN024CT6; Start 191; Stop 215
tgaagaggattggtaataacatcaa

SEQ ID NO: 449068 - DNA, 25 bp, Artificial
  probe
  misc_feature (1)..(25): SEQ ID NO: 6782; WAN024CT6; Start 190; Stop 214
ttgaagaggattggtaataacatca

SEQ ID NO: 449069 - DNA, 25 bp, Artificial
  probe
  misc_feature (1)..(25): SEQ ID NO: 6782; WAN024CT6; Start 192; Stop 216
gaagaggattggtaataacatcaac

SEQ ID NO: 449070 - DNA, 25 bp, Artificial
  probe
  misc_feature (1)..(25): SEQ ID NO: 6782; WAN024CT6; Start 37; Stop 61
ttcctatctgatagcgaattgagtc

SEQ ID NO: 449071 - DNA, 25 bp, Artificial
  probe
  misc_feature (1)..(25): SEQ ID NO: 6782; WAN024CT6; Start 302; Stop 326
gtgaggtagagaaagagtttagtgt

SEQ ID NO: 449072 - DNA, 25 bp, Artificial
  probe
  misc_feature (1)..(25): SEQ ID NO: 6782; WAN024CT6; Start 38; Stop 62
tcctatctgatagcgaattgagtca

SEQ ID NO: 449073 - DNA, 25 bp, Artificial
  probe
  misc_feature (1)..(25): SEQ ID NO: 6782; WAN024CT6; Start 301; Stop 325
agtgaggtagagaaagagtttagtg

SEQ ID NO: 449074 - DNA, 25 bp, Artificial
  probe
  misc_feature (1)..(25): SEQ ID NO: 6782; WAN024CT6; Start 193; Stop 217
aagaggattggtaataacatcaacc

SEQ ID NO: 449075 - DNA, 25 bp, Artificial
  probe
  misc_feature (1)..(25): SEQ ID NO: 6782; WAN024CT6; Start 303; Stop 327
tgaggtagagaaagagtttagtgtt

SEQ ID NO: 449076 - DNA, 25 bp, Artificial
  probe
  misc_feature (1)..(25): SEQ ID NO: 6782; WAN024CT6; Start 310; Stop 334
gagaaagagtttagtgttcaagcaa

SEQ ID NO: 449077 - DNA, 25 bp, Artificial
  probe
  misc_feature (1)..(25): SEQ ID NO: 6782; WAN024CT6; Start 309; Stop 333
agagaaagagtttagtgttcaagca

SEQ ID NO: 449078 - DNA, 25 bp, Artificial
  probe
  misc_feature (1)..(25): SEQ ID NO: 6782; WAN024CT6; Start 46; Stop 70
gatagcgaattgagtcagttgaaac

SEQ ID NO: 449079 - DNA, 25 bp, Artificial
  probe
  misc_feature (1)..(25): SEQ ID NO: 6782; WAN024CT6; Start 311; Stop 335
agaaagagtttagtgttcaagcaaa

SEQ ID NO: 449080 - DNA, 25 bp, Artificial
  probe
  misc_feature (1)..(25): SEQ ID NO: 6782; WAN024CT6; Start 300; Stop 324
aagtgaggtagagaaagagtttagt

SEQ ID NO: 449081 - DNA, 25 bp, Artificial
  probe
  misc_feature (1)..(25): SEQ ID NO: 6782; WAN024CT6; Start 224; Stop 248
cccgaagtgttaatcaatctcagtt

SEQ ID NO: 449082 - DNA, 25 bp, Artificial
  probe
  misc_feature (1)..(25): SEQ ID NO: 6782; WAN024CT6; Start 180; Stop 204
gatatttgagttgaagaggattggt

SEQ ID NO: 449083 - DNA, 25 bp, Artificial
  probe
  misc_feature (1)..(25): SEQ ID NO: 6782; WAN024CT6; Start 179; Stop 203
tgatatttgagttgaagaggattgg

SEQ ID NO: 449084 - DNA, 25 bp, Artificial
  probe
  misc_feature (1)..(25): SEQ ID NO: 6782; WAN024CT6; Start 305; Stop 329
aggtagagaaagagtttagtgttca

SEQ ID NO: 449085 - DNA, 25 bp, Artificial
  probe
  misc_feature (1)..(25): SEQ ID NO: 6782; WAN024CT6; Start 48; Stop 72
tagcgaattgagtcagttgaaacat

SEQ ID NO: 449086 - DNA, 25 bp, Artificial
  probe
  misc_feature (1)..(25): SEQ ID NO: 6782; WAN024CT6; Start 47; Stop 71
atagcgaattgagtcagttgaaaca

SEQ ID NO: 449087 - DNA, 25 bp, Artificial
  probe
  misc_feature (1)..(25): SEQ ID NO: 6782; WAN024CT6; Start 296; Stop 320
tgataagtgaggtagagaaagagtt

SEQ ID NO: 449088 - DNA, 25 bp, Artificial
  probe
  misc_feature (1)..(25): SEQ ID NO: 6782; WAN024CT6; Start 295; Stop 319
ttgataagtgaggtagagaaagagt

SEQ ID NO: 449089 - DNA, 25 bp, Artificial
  probe
  misc_feature (1)..(25): SEQ ID NO: 6782; WAN024CT6; Start 308; Stop 332
tagagaaagagtttagtgttcaagc

SEQ ID NO: 449090 - DNA, 25 bp, Artificial
  probe
  misc_feature (1)..(25): SEQ ID NO: 6782; WAN024CT6; Start 123; Stop 147
cctacttgaccctggtatgaatttc

SEQ ID NO: 449091 - DNA, 25 bp, Artificial
  probe
  misc_feature (1)..(25): SEQ ID NO: 6782; WAN024CT6; Start 183; Stop 207
atttgagttgaagaggattggtaat

SEQ ID NO: 449092 - DNA, 25 bp, Artificial
  probe
  misc_feature (1)..(25): SEQ ID NO: 6782; WAN024CT6; Start 304; Stop 328
gaggtagagaaagagtttagtgttc

SEQ ID NO: 449093 - DNA, 25 bp, Artificial
  probe
  misc_feature (1)..(25): SEQ ID NO: 6782; WAN024CT6; Start 306; Stop 330
ggtagagaaagagtttagtgttcaa

SEQ ID NO: 449094 - DNA, 25 bp, Artificial
  probe
  misc_feature (1)..(25): SEQ ID NO: 6783; WAN024BQY; Start 1357; Stop 1381
gaagtagagttggaagatgctgtaa

SEQ ID NO: 449095 - DNA, 25 bp, Artificial
  probe
  misc_feature (1)..(25): SEQ ID NO: 6783; WAN024BQY; Start 1351; Stop 1375
attaccgaagtagagttggaagatg

SEQ ID NO: 449096 - DNA, 25 bp, Artificial
  probe
  misc_feature (1)..(25): SEQ ID NO: 6783; WAN024BQY; Start 572; Stop 596
ggcttaatcttggagttgaggttat

SEQ ID NO: 449097 - DNA, 25 bp, Artificial
  probe
  misc_feature (1)..(25): SEQ ID NO: 6783; WAN024BQY; Start 567; Stop 591
tgaatggcttaatcttggagttgag

SEQ ID NO: 449098 - DNA, 25 bp, Artificial
  probe
  misc_feature (1)..(25): SEQ ID NO: 6783; WAN024BQY; Start 566; Stop 590
ctgaatggcttaatcttggagttga

SEQ ID NO: 449099 - DNA, 25 bp, Artificial
  probe
  misc_feature (1)..(25): SEQ ID NO: 6783; WAN024BQY; Start 1350; Stop 1374
tattaccgaagtagagttggaagat

SEQ ID NO: 449100 - DNA, 25 bp, Artificial
  probe
  misc_feature (1)..(25): SEQ ID NO: 6783; WAN024BQY; Start 1303; Stop 1327
aatggtgtcaatagattcgttcttc

SEQ ID NO: 449101 - DNA, 25 bp, Artificial
  probe
  misc_feature (1)..(25): SEQ ID NO: 6783; WAN024BQY; Start 1349; Stop 1373
atattaccgaagtagagttggaaga

SEQ ID NO: 449102 - DNA, 25 bp, Artificial
  probe
  misc_feature (1)..(25): SEQ ID NO: 6783; WAN024BQY; Start 1042; Stop 1066
atggttatgaagacacttggaactc

SEQ ID NO: 449103 - DNA, 25 bp, Artificial
  probe
  misc_feature (1)..(25): SEQ ID NO: 6783; WAN024BQY; Start 1041; Stop 1065
gatggttatgaagacacttggaact

SEQ ID NO: 449104 - DNA, 25 bp, Artificial
  probe
  misc_feature (1)..(25): SEQ ID NO: 6783; WAN024BQY; Start 1046; Stop 1070
ttatgaagacacttggaactcagaa

SEQ ID NO: 449105 - DNA, 25 bp, Artificial
  probe
  misc_feature (1)..(25): SEQ ID NO: 6783; WAN024BQY; Start 1045; Stop 1069
gttatgaagacacttggaactcaga

SEQ ID NO: 449106 - DNA, 25 bp, Artificial
  probe
  misc_feature (1)..(25): SEQ ID NO: 6783; WAN024BQY; Start 1304; Stop 1328
atggtgtcaatagattcgttcttcg

SEQ ID NO: 449107 - DNA, 25 bp, Artificial
  probe
  misc_feature (1)..(25): SEQ ID NO: 6783; WAN024BQY; Start 573; Stop 597
gcttaatcttggagttgaggttata

SEQ ID NO: 449108 - DNA, 25 bp, Artificial
  probe
  misc_feature (1)..(25): SEQ ID NO: 6783; WAN024BQY; Start 571; Stop 595
tggcttaatcttggagttgaggtta

SEQ ID NO: 449109 - DNA, 25 bp, Artificial
  probe
  misc_feature (1)..(25): SEQ ID NO: 6783; WAN024BQY; Start 568; Stop 592
gaatggcttaatcttggagttgagg

SEQ ID NO: 449110 - DNA, 25 bp, Artificial
  probe
  misc_feature (1)..(25): SEQ ID NO: 6783; WAN024BQY; Start 1040; Stop 1064
ggatggttatgaagacacttggaac

SEQ ID NO: 449111 - DNA, 25 bp, Artificial
  probe
  misc_feature (1)..(25): SEQ ID NO: 6783; WAN024BQY; Start 619; Stop 643
aagattaaccagtcggaattatcaa

SEQ ID NO: 449112 - DNA, 25 bp, Artificial
  probe
  misc_feature (1)..(25): SEQ ID NO: 6783; WAN024BQY; Start 1044; Stop 1068
ggttatgaagacacttggaactcag

SEQ ID NO: 449113 - DNA, 25 bp, Artificial
  probe
  misc_feature (1)..(25): SEQ ID NO: 6783; WAN024BQY; Start 565; Stop 589
actgaatggcttaatcttggagttg

SEQ ID NO: 449114 - DNA, 25 bp, Artificial
  probe
  misc_feature (1)..(25): SEQ ID NO: 6783; WAN024BQY; Start 563; Stop 587
caactgaatggcttaatcttggagt

SEQ ID NO: 449115 - DNA, 25 bp, Artificial
  probe
  misc_feature (1)..(25): SEQ ID NO: 6783; WAN024BQY; Start 1039; Stop 1063
tggatggttatgaagacacttggaa

SEQ ID NO: 449116 - DNA, 25 bp, Artificial
  probe
  misc_feature (1)..(25): SEQ ID NO: 6783; WAN024BQY; Start 1356; Stop 1380
cgaagtagagttggaagatgctgta

SEQ ID NO: 449117 - DNA, 25 bp, Artificial
  probe
  misc_feature (1)..(25): SEQ ID NO: 6783; WAN024BQY; Start 570; Stop 594
atggcttaatcttggagttgaggtt

SEQ ID NO: 449118 - DNA, 25 bp, Artificial
  probe
  misc_feature (1)..(25): SEQ ID NO: 6783; WAN024BQY; Start 569; Stop 593
aatggcttaatcttggagttgaggt

SEQ ID NO: 449119 - DNA, 25 bp, Artificial
  probe
  misc_feature (1)..(25): SEQ ID NO: 6783; WAN024BQY; Start 1035; Stop 1059
attgtggatggttatgaagacactt

SEQ ID NO: 449120 - DNA, 25 bp, Artificial
  probe
  misc_feature (1)..(25): SEQ ID NO: 6783; WAN024BQY; Start 1034; Stop 1058
aattgtggatggttatgaagacact

SEQ ID NO: 449121 - DNA, 25 bp, Artificial
  probe
  misc_feature (1)..(25): SEQ ID NO: 6783; WAN024BQY; Start 1352; Stop 1376
ttaccgaagtagagttggaagatgc

SEQ ID NO: 449122 - DNA, 25 bp, Artificial
  probe
  misc_feature (1)..(25): SEQ ID NO: 6783; WAN024BQY; Start 1043; Stop 1067
tggttatgaagacacttggaactca

SEQ ID NO: 449123 - DNA, 25 bp, Artificial
  probe
  misc_feature (1)..(25): SEQ ID NO: 6783; WAN024BQY; Start 123; Stop 147
tagacatgagattattgagattgcc

SEQ ID NO: 449124 - DNA, 25 bp, Artificial
  probe
  misc_feature (1)..(25): SEQ ID NO: 6783; WAN024BQY; Start 579; Stop 603
tcttggagttgaggttatatactgt

SEQ ID NO: 449125 - DNA, 25 bp, Artificial
  probe
  misc_feature (1)..(25): SEQ ID NO: 6783; WAN024BQY; Start 1036; Stop 1060
ttgtggatggttatgaagacacttg

SEQ ID NO: 449126 - DNA, 25 bp, Artificial
  probe
  misc_feature (1)..(25): SEQ ID NO: 6783; WAN024BQY; Start 618; Stop 642
taagattaaccagtcggaattatca

SEQ ID NO: 449127 - DNA, 25 bp, Artificial
  probe
  misc_feature (1)..(25): SEQ ID NO: 6784; WAN024BNK; Start 3; Stop 27
ggaaacagttcaaatcgtgagaatt

SEQ ID NO: 449128 - DNA, 25 bp, Artificial
  probe
  misc_feature (1)..(25): SEQ ID NO: 6784; WAN024BNK; Start 206; Stop 230
aatatcgaggcagtcaatcatggaa

SEQ ID NO: 449129 - DNA, 25 bp, Artificial
  probe
  misc_feature (1)..(25): SEQ ID NO: 6784; WAN024BNK; Start 215; Stop 239
gcagtcaatcatggaagaaagaaat

SEQ ID NO: 449130 - DNA, 25 bp, Artificial
  probe
  misc_feature (1)..(25): SEQ ID NO: 6784; WAN024BNK; Start 2; Stop 26
tggaaacagttcaaatcgtgagaat

SEQ ID NO: 449131 - DNA, 25 bp, Artificial
  probe
  misc_feature (1)..(25): SEQ ID NO: 6784; WAN024BNK; Start 1; Stop 25
atggaaacagttcaaatcgtgagaa

SEQ ID NO: 449132 - DNA, 25 bp, Artificial
  probe
  misc_feature (1)..(25): SEQ ID NO: 6784; WAN024BNK; Start 220; Stop 244
caatcatggaagaaagaaatggcta

SEQ ID NO: 449133 - DNA, 25 bp, Artificial
  probe
  misc_feature (1)..(25): SEQ ID NO: 6784; WAN024BNK; Start 217; Stop 241
agtcaatcatggaagaaagaaatgg

SEQ ID NO: 449134 - DNA, 25 bp, Artificial
  probe
  misc_feature (1)..(25): SEQ ID NO: 6784; WAN024BNK; Start 207; Stop 231
atatcgaggcagtcaatcatggaag

SEQ ID NO: 449135 - DNA, 25 bp, Artificial
  probe
  misc_feature (1)..(25): SEQ ID NO: 6784; WAN024BNK; Start 219; Stop 243
tcaatcatggaagaaagaaatggct

SEQ ID NO: 449136 - DNA, 25 bp, Artificial
  probe
  misc_feature (1)..(25): SEQ ID NO: 6784; WAN024BNK; Start 218; Stop 242
gtcaatcatggaagaaagaaatggc

SEQ ID NO: 449137 - DNA, 25 bp, Artificial
  probe
  misc_feature (1)..(25): SEQ ID NO: 6784; WAN024BNK; Start 13; Stop 37
caaatcgtgagaattaaagatgtga

SEQ ID NO: 449138 - DNA, 25 bp, Artificial
  probe
  misc_feature (1)..(25): SEQ ID NO: 6784; WAN024BNK; Start 222; Stop 246
atcatggaagaaagaaatggctaaa

SEQ ID NO: 449139 - DNA, 25 bp, Artificial
  probe
  misc_feature (1)..(25): SEQ ID NO: 6784; WAN024BNK; Start 221; Stop 245
aatcatggaagaaagaaatggctaa

SEQ ID NO: 449140 - DNA, 25 bp, Artificial
  probe
  misc_feature (1)..(25): SEQ ID NO: 6784; WAN024BNK; Start 205; Stop 229
caatatcgaggcagtcaatcatgga

SEQ ID NO: 449141 - DNA, 25 bp, Artificial
  probe
  misc_feature (1)..(25): SEQ ID NO: 6784; WAN024BNK; Start 4; Stop 28
gaaacagttcaaatcgtgagaatta

SEQ ID NO: 449142 - DNA, 25 bp, Artificial
  probe
  misc_feature (1)..(25): SEQ ID NO: 6784; WAN024BNK; Start 216; Stop 240
cagtcaatcatggaagaaagaaatg

SEQ ID NO: 449143 - DNA, 25 bp, Artificial
  probe
  misc_feature (1)..(25): SEQ ID NO: 6784; WAN024BNK; Start 7; Stop 31
acagttcaaatcgtgagaattaaag

SEQ ID NO: 449144 - DNA, 25 bp, Artificial
  probe
  misc_feature (1)..(25): SEQ ID NO: 6784; WAN024BNK; Start 214; Stop 238
ggcagtcaatcatggaagaaagaaa

SEQ ID NO: 449145 - DNA, 25 bp, Artificial
  probe
  misc_feature (1)..(25): SEQ ID NO: 6784; WAN024BNK; Start 12; Stop 36
tcaaatcgtgagaattaaagatgtg

SEQ ID NO: 449146 - DNA, 25 bp, Artificial
  probe
  misc_feature (1)..(25): SEQ ID NO: 6784; WAN024BNK; Start 8; Stop 32
cagttcaaatcgtgagaattaaaga

SEQ ID NO: 449147 - DNA, 25 bp, Artificial
  probe
  misc_feature (1)..(25): SEQ ID NO: 6784; WAN024BNK; Start 6; Stop 30
aacagttcaaatcgtgagaattaaa

SEQ ID NO: 449148 - DNA, 25 bp, Artificial
  probe
  misc_feature (1)..(25): SEQ ID NO: 6784; WAN024BNK; Start 5; Stop 29
aaacagttcaaatcgtgagaattaa

SEQ ID NO: 449149 - DNA, 25 bp, Artificial
  probe
  misc_feature (1)..(25): SEQ ID NO: 6784; WAN024BNK; Start 148; Stop 172
aaataccttagaaacgatggtcagc

SEQ ID NO: 449150 - DNA, 25 bp, Artificial
  probe
  misc_feature (1)..(25): SEQ ID NO: 6784; WAN024BNK; Start 15; Stop 39
aatcgtgagaattaaagatgtgatc

SEQ ID NO: 449151 - DNA, 25 bp, Artificial
  probe
  misc_feature (1)..(25): SEQ ID NO: 6784; WAN024BNK; Start 213; Stop 237
aggcagtcaatcatggaagaaagaa

SEQ ID NO: 449152 - DNA, 25 bp, Artificial
  probe
  misc_feature (1)..(25): SEQ ID NO: 6784; WAN024BNK; Start 208; Stop 232
tatcgaggcagtcaatcatggaaga

SEQ ID NO: 449153 - DNA, 25 bp, Artificial
  probe
  misc_feature (1)..(25): SEQ ID NO: 6784; WAN024BNK; Start 14; Stop 38
aaatcgtgagaattaaagatgtgat

SEQ ID NO: 449154 - DNA, 25 bp, Artificial
  probe
  misc_feature (1)..(25): SEQ ID NO: 6784; WAN024BNK; Start 11; Stop 35
ttcaaatcgtgagaattaaagatgt

SEQ ID NO: 449155 - DNA, 25 bp, Artificial
  probe
  misc_feature (1)..(25): SEQ ID NO: 6784; WAN024BNK; Start 10; Stop 34
gttcaaatcgtgagaattaaagatg

SEQ ID NO: 449156 - DNA, 25 bp, Artificial
  probe
  misc_feature (1)..(25): SEQ ID NO: 6784; WAN024BNK; Start 225; Stop 249
atggaagaaagaaatggctaaaacc

SEQ ID NO: 449157 - DNA, 25 bp, Artificial
  probe
  misc_feature (1)..(25): SEQ ID NO: 6784; WAN024BNK; Start 191; Stop 215
ttgatgcttatctgcaatatcgagg

SEQ ID NO: 449158 - DNA, 25 bp, Artificial
  probe
  misc_feature (1)..(25): SEQ ID NO: 6784; WAN024BNK; Start 212; Stop 236
gaggcagtcaatcatggaagaaaga

SEQ ID NO: 449159 - DNA, 25 bp, Artificial
  probe
  misc_feature (1)..(25): SEQ ID NO: 6784; WAN024BNK; Start 236; Stop 260
aaatggctaaaaccgttaagatgac

SEQ ID NO: 449160 - DNA, 25 bp, Artificial
  probe
  misc_feature (1)..(25): SEQ ID NO: 6785; WAN024CIT; Start 313; Stop 337
actaatcgttcaagaccaggttatg

SEQ ID NO: 449161 - DNA, 25 bp, Artificial
  probe
  misc_feature (1)..(25): SEQ ID NO: 6785; WAN024CIT; Start 312; Stop 336
tactaatcgttcaagaccaggttat

SEQ ID NO: 449162 - DNA, 25 bp, Artificial
  probe
  misc_feature (1)..(25): SEQ ID NO: 6785; WAN024CIT; Start 311; Stop 335
gtactaatcgttcaagaccaggtta

SEQ ID NO: 449163 - DNA, 25 bp, Artificial
  probe
  misc_feature (1)..(25): SEQ ID NO: 6785; WAN024CIT; Start 318; Stop 342
tcgttcaagaccaggttatgataat

SEQ ID NO: 449164 - DNA, 25 bp, Artificial
  probe
  misc_feature (1)..(25): SEQ ID NO: 6785; WAN024CIT; Start 317; Stop 341
atcgttcaagaccaggttatgataa

SEQ ID NO: 449165 - DNA, 25 bp, Artificial
  probe
  misc_feature (1)..(25): SEQ ID NO: 6785; WAN024CIT; Start 316; Stop 340
aatcgttcaagaccaggttatgata

SEQ ID NO: 449166 - DNA, 25 bp, Artificial
  probe
  misc_feature (1)..(25): SEQ ID NO: 6785; WAN024CIT; Start 315; Stop 339
taatcgttcaagaccaggttatgat

SEQ ID NO: 449167 - DNA, 25 bp, Artificial
  probe
  misc_feature (1)..(25): SEQ ID NO: 6785; WAN024CIT; Start 314; Stop 338
ctaatcgttcaagaccaggttatga

SEQ ID NO: 449168 - DNA, 25 bp, Artificial
  probe
  misc_feature (1)..(25): SEQ ID NO: 6785; WAN024CIT; Start 457; Stop 481
ggtacgacattatctggttatacac

SEQ ID NO: 449169 - DNA, 25 bp, Artificial
  probe
  misc_feature (1)..(25): SEQ ID NO: 6785; WAN024CIT; Start 549; Stop 573
accagttattgctgaaggaagaata

SEQ ID NO: 449170 - DNA, 25 bp, Artificial
  probe
  misc_feature (1)..(25): SEQ ID NO: 6785; WAN024CIT; Start 548; Stop 572
taccagttattgctgaaggaagaat

SEQ ID NO: 449171 - DNA, 25 bp, Artificial
  probe
  misc_feature (1)..(25): SEQ ID NO: 6785; WAN024CIT; Start 308; Stop 332
attgtactaatcgttcaagaccagg

SEQ ID NO: 449172 - DNA, 25 bp, Artificial
  probe
  misc_feature (1)..(25): SEQ ID NO: 6785; WAN024CIT; Start 310; Stop 334
tgtactaatcgttcaagaccaggtt

SEQ ID NO: 449173 - DNA, 25 bp, Artificial
  probe
  misc_feature (1)..(25): SEQ ID NO: 6785; WAN024CIT; Start 319; Stop 343
cgttcaagaccaggttatgataata

SEQ ID NO: 449174 - DNA, 25 bp, Artificial
  probe
  misc_feature (1)..(25): SEQ ID NO: 6785; WAN024CIT; Start 85; Stop 109
aatggaggagtgatgccgttattag

SEQ ID NO: 449175 - DNA, 25 bp, Artificial
  probe
  misc_feature (1)..(25): SEQ ID NO: 6785; WAN024CIT; Start 547; Stop 571
gtaccagttattgctgaaggaagaa

SEQ ID NO: 449176 - DNA, 25 bp, Artificial
  probe
  misc_feature (1)..(25): SEQ ID NO: 6785; WAN024CIT; Start 309; Stop 333
ttgtactaatcgttcaagaccaggt

SEQ ID NO: 449177 - DNA, 25 bp, Artificial
  probe
  misc_feature (1)..(25): SEQ ID NO: 6785; WAN024CIT; Start 271; Stop 295
gaattagttagtgaaggagtagaca

SEQ ID NO: 449178 - DNA, 25 bp, Artificial
  probe
  misc_feature (1)..(25): SEQ ID NO: 6785; WAN024CIT; Start 270; Stop 294
tgaattagttagtgaaggagtagac

SEQ ID NO: 449179 - DNA, 25 bp, Artificial
  probe
  misc_feature (1)..(25): SEQ ID NO: 6785; WAN024CIT; Start 266; Stop 290
ttgatgaattagttagtgaaggagt

SEQ ID NO: 449180 - DNA, 25 bp, Artificial
  probe
  misc_feature (1)..(25): SEQ ID NO: 6785; WAN024CIT; Start 307; Stop 331
gattgtactaatcgttcaagaccag

SEQ ID NO: 449181 - DNA, 25 bp, Artificial
  probe
  misc_feature (1)..(25): SEQ ID NO: 6785; WAN024CIT; Start 306; Stop 330
ggattgtactaatcgttcaagacca

SEQ ID NO: 449182 - DNA, 25 bp, Artificial
  probe
  misc_feature (1)..(25): SEQ ID NO: 6785; WAN024CIT; Start 305; Stop 329
tggattgtactaatcgttcaagacc

SEQ ID NO: 449183 - DNA, 25 bp, Artificial
  probe
  misc_feature (1)..(25): SEQ ID NO: 6785; WAN024CIT; Start 133; Stop 157
gctaaaggtattcgtgctaattctg

SEQ ID NO: 449184 - DNA, 25 bp, Artificial
  probe
  misc_feature (1)..(25): SEQ ID NO: 6785; WAN024CIT; Start 304; Stop 328
ttggattgtactaatcgttcaagac

SEQ ID NO: 449185 - DNA, 25 bp, Artificial
  probe
  misc_feature (1)..(25): SEQ ID NO: 6785; WAN024CIT; Start 57; Stop 81
gttagaaggagagccactttatact

SEQ ID NO: 449186 - DNA, 25 bp, Artificial
  probe
  misc_feature (1)..(25): SEQ ID NO: 6785; WAN024CIT; Start 137; Stop 161
aaggtattcgtgctaattctgtccg

SEQ ID NO: 449187 - DNA, 25 bp, Artificial
  probe
  misc_feature (1)..(25): SEQ ID NO: 6785; WAN024CIT; Start 458; Stop 482
gtacgacattatctggttatacacc

SEQ ID NO: 449188 - DNA, 25 bp, Artificial
  probe
  misc_feature (1)..(25): SEQ ID NO: 6785; WAN024CIT; Start 56; Stop 80
cgttagaaggagagccactttatac

SEQ ID NO: 449189 - DNA, 25 bp, Artificial
  probe
  misc_feature (1)..(25): SEQ ID NO: 6785; WAN024CIT; Start 135; Stop 159
taaaggtattcgtgctaattctgtc

SEQ ID NO: 449190 - DNA, 25 bp, Artificial
  probe
  misc_feature (1)..(25): SEQ ID NO: 6785; WAN024CIT; Start 134; Stop 158
ctaaaggtattcgtgctaattctgt

SEQ ID NO: 449191 - DNA, 25 bp, Artificial
  probe
  misc_feature (1)..(25): SEQ ID NO: 6785; WAN024CIT; Start 273; Stop 297
attagttagtgaaggagtagacatt

SEQ ID NO: 449192 - DNA, 25 bp, Artificial
  probe
  misc_feature (1)..(25): SEQ ID NO: 6785; WAN024CIT; Start 136; Stop 160
aaaggtattcgtgctaattctgtcc

SEQ ID NO: 449193 - DNA, 25 bp, Artificial
  probe
  misc_feature (1)..(25): SEQ ID NO: 6786; WAN024AVR; Start 60; Stop 84
ttgcttagaagcggataatcaagaa

SEQ ID NO: 449194 - DNA, 25 bp, Artificial
  probe
  misc_feature (1)..(25): SEQ ID NO: 6786; WAN024AVR; Start 59; Stop 83
tttgcttagaagcggataatcaaga

SEQ ID NO: 449195 - DNA, 25 bp, Artificial
  probe
  misc_feature (1)..(25): SEQ ID NO: 6786; WAN024AVR; Start 58; Stop 82
ttttgcttagaagcggataatcaag

SEQ ID NO: 449196 - DNA, 25 bp, Artificial
  probe
  misc_feature (1)..(25): SEQ ID NO: 6786; WAN024AVR; Start 57; Stop 81
gttttgcttagaagcggataatcaa

SEQ ID NO: 449197 - DNA, 25 bp, Artificial
  probe
  misc_feature (1)..(25): SEQ ID NO: 6786; WAN024AVR; Start 55; Stop 79
gtgttttgcttagaagcggataatc

SEQ ID NO: 449198 - DNA, 25 bp, Artificial
  probe
  misc_feature (1)..(25): SEQ ID NO: 6786; WAN024AVR; Start 10; Stop 34
agggaaaaccttatggtattagatt

SEQ ID NO: 449199 - DNA, 25 bp, Artificial
  probe
  misc_feature (1)..(25): SEQ ID NO: 6786; WAN024AVR; Start 56; Stop 80
tgttttgcttagaagcggataatca

SEQ ID NO: 449200 - DNA, 25 bp, Artificial
  probe
  misc_feature (1)..(25): SEQ ID NO: 6786; WAN024AVR; Start 54; Stop 78
tgtgttttgcttagaagcggataat

SEQ ID NO: 449201 - DNA, 25 bp, Artificial
  probe
  misc_feature (1)..(25): SEQ ID NO: 6786; WAN024AVR; Start 53; Stop 77
ttgtgttttgcttagaagcggataa

SEQ ID NO: 449202 - DNA, 25 bp, Artificial
  probe
  misc_feature (1)..(25): SEQ ID NO: 6786; WAN024AVR; Start 3; Stop 27
ggaaagaagggaaaaccttatggta

SEQ ID NO: 449203 - DNA, 25 bp, Artificial
  probe
  misc_feature (1)..(25): SEQ ID NO: 6786; WAN024AVR; Start 1; Stop 25
atggaaagaagggaaaaccttatgg

SEQ ID NO: 449204 - DNA, 25 bp, Artificial
  probe
  misc_feature (1)..(25): SEQ ID NO: 6786; WAN024AVR; Start 4; Stop 28
gaaagaagggaaaaccttatggtat

SEQ ID NO: 449205 - DNA, 25 bp, Artificial
  probe
  misc_feature (1)..(25): SEQ ID NO: 6786; WAN024AVR; Start 11; Stop 35
gggaaaaccttatggtattagatta

SEQ ID NO: 449206 - DNA, 25 bp, Artificial
  probe
  misc_feature (1)..(25): SEQ ID NO: 6786; WAN024AVR; Start 5; Stop 29
aaagaagggaaaaccttatggtatt

SEQ ID NO: 449207 - DNA, 25 bp, Artificial
  probe
  misc_feature (1)..(25): SEQ ID NO: 6786; WAN024AVR; Start 8; Stop 32
gaagggaaaaccttatggtattaga

SEQ ID NO: 449208 - DNA, 25 bp, Artificial
  probe
  misc_feature (1)..(25): SEQ ID NO: 6786; WAN024AVR; Start 7; Stop 31
agaagggaaaaccttatggtattag

SEQ ID NO: 449209 - DNA, 25 bp, Artificial
  probe
  misc_feature (1)..(25): SEQ ID NO: 6786; WAN024AVR; Start 2; Stop 26
tggaaagaagggaaaaccttatggt

SEQ ID NO: 449210 - DNA, 25 bp, Artificial
  probe
  misc_feature (1)..(25): SEQ ID NO: 6786; WAN024AVR; Start 6; Stop 30
aagaagggaaaaccttatggtatta

SEQ ID NO: 449211 - DNA, 25 bp, Artificial
  probe
  misc_feature (1)..(25): SEQ ID NO: 6786; WAN024AVR; Start 9; Stop 33
aagggaaaaccttatggtattagat

SEQ ID NO: 449212 - DNA, 25 bp, Artificial
  probe
  misc_feature (1)..(25): SEQ ID NO: 6787; WAN024F93; Start 104; Stop 128
tacagaatgaagcggattatcactg

SEQ ID NO: 449213 - DNA, 25 bp, Artificial
  probe
  misc_feature (1)..(25): SEQ ID NO: 6787; WAN024F93; Start 103; Stop 127
gtacagaatgaagcggattatcact

SEQ ID NO: 449214 - DNA, 25 bp, Artificial
  probe
  misc_feature (1)..(25): SEQ ID NO: 6787; WAN024F93; Start 499; Stop 523
gatattgagaacggcttgacgattg

SEQ ID NO: 449215 - DNA, 25 bp, Artificial
  probe
  misc_feature (1)..(25): SEQ ID NO: 6787; WAN024F93; Start 497; Stop 521
atgatattgagaacggcttgacgat

SEQ ID NO: 449216 - DNA, 25 bp, Artificial
  probe
  misc_feature (1)..(25): SEQ ID NO: 6787; WAN024F93; Start 314; Stop 338
atatcgaactcttacgcaatctagc

SEQ ID NO: 449217 - DNA, 25 bp, Artificial
  probe
  misc_feature (1)..(25): SEQ ID NO: 6787; WAN024F93; Start 500; Stop 524
atattgagaacggcttgacgattga

SEQ ID NO: 449218 - DNA, 25 bp, Artificial
  probe
  misc_feature (1)..(25): SEQ ID NO: 6787; WAN024F93; Start 498; Stop 522
tgatattgagaacggcttgacgatt

SEQ ID NO: 449219 - DNA, 25 bp, Artificial
  probe
  misc_feature (1)..(25): SEQ ID NO: 6787; WAN024F93; Start 501; Stop 525
tattgagaacggcttgacgattgaa

SEQ ID NO: 449220 - DNA, 25 bp, Artificial
  probe
  misc_feature (1)..(25): SEQ ID NO: 6787; WAN024F93; Start 442; Stop 466
gttgacccttatccatatcttgcta

SEQ ID NO: 449221 - DNA, 25 bp, Artificial
  probe
  misc_feature (1)..(25): SEQ ID NO: 6787; WAN024F93; Start 102; Stop 126
cgtacagaatgaagcggattatcac

SEQ ID NO: 449222 - DNA, 25 bp, Artificial
  probe
  misc_feature (1)..(25): SEQ ID NO: 6787; WAN024F93; Start 444; Stop 468
tgacccttatccatatcttgctaaa

SEQ ID NO: 449223 - DNA, 25 bp, Artificial
  probe
  misc_feature (1)..(25): SEQ ID NO: 6787; WAN024F93; Start 443; Stop 467
ttgacccttatccatatcttgctaa

SEQ ID NO: 449224 - DNA, 25 bp, Artificial
  probe
  misc_feature (1)..(25): SEQ ID NO: 6787; WAN024F93; Start 315; Stop 339
tatcgaactcttacgcaatctagca

SEQ ID NO: 449225 - DNA, 25 bp, Artificial
  probe
  misc_feature (1)..(25): SEQ ID NO: 6787; WAN024F93; Start 21; Stop 45
attaagaacagatttgcctcaagtc

SEQ ID NO: 449226 - DNA, 25 bp, Artificial
  probe
  misc_feature (1)..(25): SEQ ID NO: 6787; WAN024F93; Start 313; Stop 337
tatatcgaactcttacgcaatctag

SEQ ID NO: 449227 - DNA, 25 bp, Artificial
  probe
  misc_feature (1)..(25): SEQ ID NO: 6787; WAN024F93; Start 322; Stop 346
ctcttacgcaatctagcagatgaag

SEQ ID NO: 449228 - DNA, 25 bp, Artificial
  probe
  misc_feature (1)..(25): SEQ ID NO: 6787; WAN024F93; Start 445; Stop 469
gacccttatccatatcttgctaaat

SEQ ID NO: 449229 - DNA, 25 bp, Artificial
  probe
  misc_feature (1)..(25): SEQ ID NO: 6787; WAN024F93; Start 482; Stop 506
gtgagcagtttaagcatgatattga

SEQ ID NO: 449230 - DNA, 25 bp, Artificial
  probe
  misc_feature (1)..(25): SEQ ID NO: 6787; WAN024F93; Start 446; Stop 470
acccttatccatatcttgctaaatg

SEQ ID NO: 449231 - DNA, 25 bp, Artificial
  probe
  misc_feature (1)..(25): SEQ ID NO: 6787; WAN024F93; Start 269; Stop 293
aaagccattcaaccaaagaagagtt

SEQ ID NO: 449232 - DNA, 25 bp, Artificial
  probe
  misc_feature (1)..(25): SEQ ID NO: 6787; WAN024F93; Start 483; Stop 507
tgagcagtttaagcatgatattgag

SEQ ID NO: 449233 - DNA, 25 bp, Artificial
  probe
  misc_feature (1)..(25): SEQ ID NO: 6787; WAN024F93; Start 319; Stop 343
gaactcttacgcaatctagcagatg

SEQ ID NO: 449234 - DNA, 25 bp, Artificial
  probe
  misc_feature (1)..(25): SEQ ID NO: 6787; WAN024F93; Start 553; Stop 577
tggtactatttcaacgaagaaggtg

SEQ ID NO: 449235 - DNA, 25 bp, Artificial
  probe
  misc_feature (1)..(25): SEQ ID NO: 6787; WAN024F93; Start 552; Stop 576
gtggtactatttcaacgaagaaggt

SEQ ID NO: 449236 - DNA, 25 bp, Artificial
  probe
  misc_feature (1)..(25): SEQ ID NO: 6787; WAN024F93; Start 22; Stop 46
ttaagaacagatttgcctcaagtcg

SEQ ID NO: 449237 - DNA, 25 bp, Artificial
  probe
  misc_feature (1)..(25): SEQ ID NO: 6787; WAN024F93; Start 484; Stop 508
gagcagtttaagcatgatattgaga

SEQ ID NO: 449238 - DNA, 25 bp, Artificial
  probe
  misc_feature (1)..(25): SEQ ID NO: 6787; WAN024F93; Start 481; Stop 505
cgtgagcagtttaagcatgatattg

SEQ ID NO: 449239 - DNA, 25 bp, Artificial
  probe
  misc_feature (1)..(25): SEQ ID NO: 6787; WAN024F93; Start 312; Stop 336
ttatatcgaactcttacgcaatcta

SEQ ID NO: 449240 - DNA, 25 bp, Artificial
  probe
  misc_feature (1)..(25): SEQ ID NO: 6787; WAN024F93; Start 544; Stop 568
gctgataagtggtactatttcaacg

SEQ ID NO: 449241 - DNA, 25 bp, Artificial
  probe
  misc_feature (1)..(25): SEQ ID NO: 6787; WAN024F93; Start 543; Stop 567
cgctgataagtggtactatttcaac

SEQ ID NO: 449242 - DNA, 25 bp, Artificial
  probe
  misc_feature (1)..(25): SEQ ID NO: 6787; WAN024F93; Start 542; Stop 566
tcgctgataagtggtactatttcaa

SEQ ID NO: 449243 - DNA, 25 bp, Artificial
  probe
  misc_feature (1)..(25): SEQ ID NO: 6787; WAN024F93; Start 321; Stop 345
actcttacgcaatctagcagatgaa

SEQ ID NO: 449244 - DNA, 25 bp, Artificial
  probe
  misc_feature (1)..(25): SEQ ID NO: 6787; WAN024F93; Start 320; Stop 344
aactcttacgcaatctagcagatga

SEQ ID NO: 449245 - DNA, 25 bp, Artificial
  probe
  misc_feature (1)..(25): SEQ ID NO: 6788; WAN024BL9; Start 273; Stop 297
tactaagcacgactctcaactattc

SEQ ID NO: 449246 - DNA, 25 bp, Artificial
  probe
  misc_feature (1)..(25): SEQ ID NO: 6788; WAN024BL9; Start 272; Stop 296
ttactaagcacgactctcaactatt

SEQ ID NO: 449247 - DNA, 25 bp, Artificial
  probe
  misc_feature (1)..(25): SEQ ID NO: 6788; WAN024BL9; Start 391; Stop 415
gacacaactccattcttaacaatcg

SEQ ID NO: 449248 - DNA, 25 bp, Artificial
  probe
  misc_feature (1)..(25): SEQ ID NO: 6788; WAN024BL9; Start 275; Stop 299
ctaagcacgactctcaactattcag

SEQ ID NO: 449249 - DNA, 25 bp, Artificial
  probe
  misc_feature (1)..(25): SEQ ID NO: 6788; WAN024BL9; Start 666; Stop 690
tcaattcatcacagagcgagttaat

SEQ ID NO: 449250 - DNA, 25 bp, Artificial
  probe
  misc_feature (1)..(25): SEQ ID NO: 6788; WAN024BL9; Start 665; Stop 689
atcaattcatcacagagcgagttaa

SEQ ID NO: 449251 - DNA, 25 bp, Artificial
  probe
  misc_feature (1)..(25): SEQ ID NO: 6788; WAN024BL9; Start 664; Stop 688
aatcaattcatcacagagcgagtta

SEQ ID NO: 449252 - DNA, 25 bp, Artificial
  probe
  misc_feature (1)..(25): SEQ ID NO: 6788; WAN024BL9; Start 663; Stop 687
taatcaattcatcacagagcgagtt

SEQ ID NO: 449253 - DNA, 25 bp, Artificial
  probe
  misc_feature (1)..(25): SEQ ID NO: 6788; WAN024BL9; Start 662; Stop 686
ttaatcaattcatcacagagcgagt

SEQ ID NO: 449254 - DNA, 25 bp, Artificial
  probe
  misc_feature (1)..(25): SEQ ID NO: 6788; WAN024BL9; Start 279; Stop 303
gcacgactctcaactattcagatat

SEQ ID NO: 449255 - DNA, 25 bp, Artificial
  probe
  misc_feature (1)..(25): SEQ ID NO: 6788; WAN024BL9; Start 271; Stop 295
cttactaagcacgactctcaactat

SEQ ID NO: 449256 - DNA, 25 bp, Artificial
  probe
  misc_feature (1)..(25): SEQ ID NO: 6788; WAN024BL9; Start 667; Stop 691
caattcatcacagagcgagttaatg

SEQ ID NO: 449257 - DNA, 25 bp, Artificial
  probe
  misc_feature (1)..(25): SEQ ID NO: 6788; WAN024BL9; Start 274; Stop 298
actaagcacgactctcaactattca

SEQ ID NO: 449258 - DNA, 25 bp, Artificial
  probe
  misc_feature (1)..(25): SEQ ID NO: 6788; WAN024BL9; Start 278; Stop 302
agcacgactctcaactattcagata

SEQ ID NO: 449259 - DNA, 25 bp, Artificial
  probe
  misc_feature (1)..(25): SEQ ID NO: 6788; WAN024BL9; Start 798; Stop 822
tatcacaactcctgctgaattagaa

SEQ ID NO: 449260 - DNA, 25 bp, Artificial
  probe
  misc_feature (1)..(25): SEQ ID NO: 6788; WAN024BL9; Start 797; Stop 821
ttatcacaactcctgctgaattaga

SEQ ID NO: 449261 - DNA, 25 bp, Artificial
  probe
  misc_feature (1)..(25): SEQ ID NO: 6788; WAN024BL9; Start 276; Stop 300
taagcacgactctcaactattcaga

SEQ ID NO: 449262 - DNA, 25 bp, Artificial
  probe
  misc_feature (1)..(25): SEQ ID NO: 6788; WAN024BL9; Start 799; Stop 823
atcacaactcctgctgaattagaag

SEQ ID NO: 449263 - DNA, 25 bp, Artificial
  probe
  misc_feature (1)..(25): SEQ ID NO: 6788; WAN024BL9; Start 796; Stop 820
attatcacaactcctgctgaattag

SEQ ID NO: 449264 - DNA, 25 bp, Artificial
  probe
  misc_feature (1)..(25): SEQ ID NO: 6788; WAN024BL9; Start 270; Stop 294
ccttactaagcacgactctcaacta

SEQ ID NO: 449265 - DNA, 25 bp, Artificial
  probe
  misc_feature (1)..(25): SEQ ID NO: 6788; WAN024BL9; Start 280; Stop 304
cacgactctcaactattcagatatt

SEQ ID NO: 449266 - DNA, 25 bp, Artificial
  probe
  misc_feature (1)..(25): SEQ ID NO: 6788; WAN024BL9; Start 277; Stop 301
aagcacgactctcaactattcagat

SEQ ID NO: 449267 - DNA, 25 bp, Artificial
  probe
  misc_feature (1)..(25): SEQ ID NO: 6788; WAN024BL9; Start 795; Stop 819
aattatcacaactcctgctgaatta

SEQ ID NO: 449268 - DNA, 25 bp, Artificial
  probe
  misc_feature (1)..(25): SEQ ID NO: 6788; WAN024BL9; Start 390; Stop 414
ggacacaactccattcttaacaatc

SEQ ID NO: 449269 - DNA, 25 bp, Artificial
  probe
  misc_feature (1)..(25): SEQ ID NO: 6788; WAN024BL9; Start 800; Stop 824
tcacaactcctgctgaattagaagt

SEQ ID NO: 449270 - DNA, 25 bp, Artificial
  probe
  misc_feature (1)..(25): SEQ ID NO: 6788; WAN024BL9; Start 767; Stop 791
ctgaagagattgtcgaagtaactga

SEQ ID NO: 449271 - DNA, 25 bp, Artificial
  probe
  misc_feature (1)..(25): SEQ ID NO: 6788; WAN024BL9; Start 392; Stop 416
acacaactccattcttaacaatcga

SEQ ID NO: 449272 - DNA, 25 bp, Artificial
  probe
  misc_feature (1)..(25): SEQ ID NO: 6788; WAN024BL9; Start 763; Stop 787
gaagctgaagagattgtcgaagtaa

SEQ ID NO: 449273 - DNA, 25 bp, Artificial
  probe
  misc_feature (1)..(25): SEQ ID NO: 6788; WAN024BL9; Start 764; Stop 788
aagctgaagagattgtcgaagtaac

SEQ ID NO: 449274 - DNA, 25 bp, Artificial
  probe
  misc_feature (1)..(25): SEQ ID NO: 6788; WAN024BL9; Start 268; Stop 292
aaccttactaagcacgactctcaac

SEQ ID NO: 449275 - DNA, 25 bp, Artificial
  probe
  misc_feature (1)..(25): SEQ ID NO: 6788; WAN024BL9; Start 76; Stop 100
aatgaagaacaaacaaagaatgcct

SEQ ID NO: 449276 - DNA, 25 bp, Artificial
  probe
  misc_feature (1)..(25): SEQ ID NO: 6788; WAN024BL9; Start 75; Stop 99
gaatgaagaacaaacaaagaatgcc

SEQ ID NO: 449277 - DNA, 25 bp, Artificial
  probe
  misc_feature (1)..(25): SEQ ID NO: 6788; WAN024BL9; Start 74; Stop 98
cgaatgaagaacaaacaaagaatgc

SEQ ID NO: 449278 - DNA, 25 bp, Artificial
  probe
  misc_feature (1)..(25): SEQ ID NO: 6789; WAN024BW6; Start 118; Stop 142
gtaagtgaggcaaagaatgacaaat

SEQ ID NO: 449279 - DNA, 25 bp, Artificial
  probe
  misc_feature (1)..(25): SEQ ID NO: 6789; WAN024BW6; Start 117; Stop 141
agtaagtgaggcaaagaatgacaaa

SEQ ID NO: 449280 - DNA, 25 bp, Artificial
  probe
  misc_feature (1)..(25): SEQ ID NO: 6789; WAN024BW6; Start 120; Stop 144
aagtgaggcaaagaatgacaaatta

SEQ ID NO: 449281 - DNA, 25 bp, Artificial
  probe
  misc_feature (1)..(25): SEQ ID NO: 6789; WAN024BW6; Start 119; Stop 143
taagtgaggcaaagaatgacaaatt

SEQ ID NO: 449282 - DNA, 25 bp, Artificial
  probe
  misc_feature (1)..(25): SEQ ID NO: 6789; WAN024BW6; Start 116; Stop 140
cagtaagtgaggcaaagaatgacaa

SEQ ID NO: 449283 - DNA, 25 bp, Artificial
  probe
  misc_feature (1)..(25): SEQ ID NO: 6789; WAN024BW6; Start 112; Stop 136
aaagcagtaagtgaggcaaagaatg

SEQ ID NO: 449284 - DNA, 25 bp, Artificial
  probe
  misc_feature (1)..(25): SEQ ID NO: 6789; WAN024BW6; Start 113; Stop 137
aagcagtaagtgaggcaaagaatga

SEQ ID NO: 449285 - DNA, 25 bp, Artificial
  probe
  misc_feature (1)..(25): SEQ ID NO: 6789; WAN024BW6; Start 114; Stop 138
agcagtaagtgaggcaaagaatgac

SEQ ID NO: 449286 - DNA, 25 bp, Artificial
  probe
  misc_feature (1)..(25): SEQ ID NO: 6789; WAN024BW6; Start 103; Stop 127
aaggtagtaaaagcagtaagtgagg

SEQ ID NO: 449287 - DNA, 25 bp, Artificial
  probe
  misc_feature (1)..(25): SEQ ID NO: 6789; WAN024BW6; Start 107; Stop 131
tagtaaaagcagtaagtgaggcaaa

SEQ ID NO: 449288 - DNA, 25 bp, Artificial
  probe
  misc_feature (1)..(25): SEQ ID NO: 6789; WAN024BW6; Start 110; Stop 134
taaaagcagtaagtgaggcaaagaa

SEQ ID NO: 449289 - DNA, 25 bp, Artificial
  probe
  misc_feature (1)..(25): SEQ ID NO: 6789; WAN024BW6; Start 106; Stop 130
gtagtaaaagcagtaagtgaggcaa

SEQ ID NO: 449290 - DNA, 25 bp, Artificial
  probe
  misc_feature (1)..(25): SEQ ID NO: 6789; WAN024BW6; Start 115; Stop 139
gcagtaagtgaggcaaagaatgaca

SEQ ID NO: 449291 - DNA, 25 bp, Artificial
  probe
  misc_feature (1)..(25): SEQ ID NO: 6789; WAN024BW6; Start 44; Stop 68
ttaatcgtggggttatatctcaaga

SEQ ID NO: 449292 - DNA, 25 bp, Artificial
  probe
  misc_feature (1)..(25): SEQ ID NO: 6789; WAN024BW6; Start 102; Stop 126
aaaggtagtaaaagcagtaagtgag

SEQ ID NO: 449293 - DNA, 25 bp, Artificial
  probe
  misc_feature (1)..(25): SEQ ID NO: 6789; WAN024BW6; Start 111; Stop 135
aaaagcagtaagtgaggcaaagaat

SEQ ID NO: 449294 - DNA, 25 bp, Artificial
  probe
  misc_feature (1)..(25): SEQ ID NO: 6789; WAN024BW6; Start 46; Stop 70
aatcgtggggttatatctcaagatg

SEQ ID NO: 449295 - DNA, 25 bp, Artificial
  probe
  misc_feature (1)..(25): SEQ ID NO: 6789; WAN024BW6; Start 109; Stop 133
gtaaaagcagtaagtgaggcaaaga

SEQ ID NO: 449296 - DNA, 25 bp, Artificial
  probe
  misc_feature (1)..(25): SEQ ID NO: 6789; WAN024BW6; Start 108; Stop 132
agtaaaagcagtaagtgaggcaaag

SEQ ID NO: 449297 - DNA, 25 bp, Artificial
  probe
  misc_feature (1)..(25): SEQ ID NO: 6789; WAN024BW6; Start 101; Stop 125
aaaaggtagtaaaagcagtaagtga

SEQ ID NO: 449298 - DNA, 25 bp, Artificial
  probe
  misc_feature (1)..(25): SEQ ID NO: 6789; WAN024BW6; Start 43; Stop 67
tttaatcgtggggttatatctcaag

SEQ ID NO: 449299 - DNA, 25 bp, Artificial
  probe
  misc_feature (1)..(25): SEQ ID NO: 6789; WAN024BW6; Start 41; Stop 65
cttttaatcgtggggttatatctca

SEQ ID NO: 449300 - DNA, 25 bp, Artificial
  probe
  misc_feature (1)..(25): SEQ ID NO: 6789; WAN024BW6; Start 40; Stop 64
acttttaatcgtggggttatatctc

SEQ ID NO: 449301 - DNA, 25 bp, Artificial
  probe
  misc_feature (1)..(25): SEQ ID NO: 6789; WAN024BW6; Start 100; Stop 124
gaaaaggtagtaaaagcagtaagtg

SEQ ID NO: 449302 - DNA, 25 bp, Artificial
  probe
  misc_feature (1)..(25): SEQ ID NO: 6789; WAN024BW6; Start 45; Stop 69
taatcgtggggttatatctcaagat

SEQ ID NO: 449303 - DNA, 25 bp, Artificial
  probe
  misc_feature (1)..(25): SEQ ID NO: 6789; WAN024BW6; Start 99; Stop 123
agaaaaggtagtaaaagcagtaagt

SEQ ID NO: 449304 - DNA, 25 bp, Artificial
  probe
  misc_feature (1)..(25): SEQ ID NO: 6789; WAN024BW6; Start 47; Stop 71
atcgtggggttatatctcaagatga

SEQ ID NO: 449305 - DNA, 25 bp, Artificial
  probe
  misc_feature (1)..(25): SEQ ID NO: 6789; WAN024BW6; Start 42; Stop 66
ttttaatcgtggggttatatctcaa

SEQ ID NO: 449306 - DNA, 25 bp, Artificial
  probe
  misc_feature (1)..(25): SEQ ID NO: 6789; WAN024BW6; Start 104; Stop 128
aggtagtaaaagcagtaagtgaggc

SEQ ID NO: 449307 - DNA, 25 bp, Artificial
  probe
  misc_feature (1)..(25): SEQ ID NO: 6789; WAN024BW6; Start 97; Stop 121
agagaaaaggtagtaaaagcagtaa

SEQ ID NO: 449308 - DNA, 25 bp, Artificial
  probe
  misc_feature (1)..(25): SEQ ID NO: 6789; WAN024BW6; Start 96; Stop 120
aagagaaaaggtagtaaaagcagta

SEQ ID NO: 449309 - DNA, 25 bp, Artificial
  probe
  misc_feature (1)..(25): SEQ ID NO: 6789; WAN024BW6; Start 95; Stop 119
taagagaaaaggtagtaaaagcagt

SEQ ID NO: 449310 - DNA, 25 bp, Artificial
  probe
  misc_feature (1)..(25): SEQ ID NO: 6789; WAN024BW6; Start 98; Stop 122
gagaaaaggtagtaaaagcagtaag

SEQ ID NO: 449311 - DNA, 25 bp, Artificial
  probe
  misc_feature (1)..(25): SEQ ID NO: 6790; WAN024EUS; Start 272; Stop 296
ttcaactacactattctaacgccaa

SEQ ID NO: 449312 - DNA, 25 bp, Artificial
  probe
  misc_feature (1)..(25): SEQ ID NO: 6790; WAN024EUS; Start 271; Stop 295
cttcaactacactattctaacgcca

SEQ ID NO: 449313 - DNA, 25 bp, Artificial
  probe
  misc_feature (1)..(25): SEQ ID NO: 6790; WAN024EUS; Start 270; Stop 294
ccttcaactacactattctaacgcc

SEQ ID NO: 449314 - DNA, 25 bp, Artificial
  probe
  misc_feature (1)..(25): SEQ ID NO: 6790; WAN024EUS; Start 136; Stop 160
tgtggaagtctaatgaagaataagg

SEQ ID NO: 449315 - DNA, 25 bp, Artificial
  probe
  misc_feature (1)..(25): SEQ ID NO: 6790; WAN024EUS; Start 132; Stop 156
tgattgtggaagtctaatgaagaat

SEQ ID NO: 449316 - DNA, 25 bp, Artificial
  probe
  misc_feature (1)..(25): SEQ ID NO: 6790; WAN024EUS; Start 145; Stop 169
ctaatgaagaataaggaaccagaga

SEQ ID NO: 449317 - DNA, 25 bp, Artificial
  probe
  misc_feature (1)..(25): SEQ ID NO: 6790; WAN024EUS; Start 143; Stop 167
gtctaatgaagaataaggaaccaga

SEQ ID NO: 449318 - DNA, 25 bp, Artificial
  probe
  misc_feature (1)..(25): SEQ ID NO: 6790; WAN024EUS; Start 142; Stop 166
agtctaatgaagaataaggaaccag

SEQ ID NO: 449319 - DNA, 25 bp, Artificial
  probe
  misc_feature (1)..(25): SEQ ID NO: 6790; WAN024EUS; Start 137; Stop 161
gtggaagtctaatgaagaataagga

SEQ ID NO: 449320 - DNA, 25 bp, Artificial
  probe
  misc_feature (1)..(25): SEQ ID NO: 6790; WAN024EUS; Start 144; Stop 168
tctaatgaagaataaggaaccagag

SEQ ID NO: 449321 - DNA, 25 bp, Artificial
  probe
  misc_feature (1)..(25): SEQ ID NO: 6790; WAN024EUS; Start 146; Stop 170
taatgaagaataaggaaccagagaa

SEQ ID NO: 449322 - DNA, 25 bp, Artificial
  probe
  misc_feature (1)..(25): SEQ ID NO: 6790; WAN024EUS; Start 141; Stop 165
aagtctaatgaagaataaggaacca

SEQ ID NO: 449323 - DNA, 25 bp, Artificial
  probe
  misc_feature (1)..(25): SEQ ID NO: 6790; WAN024EUS; Start 300; Stop 324
ggaagcgacaaataatctcatcaaa

SEQ ID NO: 449324 - DNA, 25 bp, Artificial
  probe
  misc_feature (1)..(25): SEQ ID NO: 6790; WAN024EUS; Start 275; Stop 299
aactacactattctaacgccaaact

SEQ ID NO: 449325 - DNA, 25 bp, Artificial
  probe
  misc_feature (1)..(25): SEQ ID NO: 6790; WAN024EUS; Start 274; Stop 298
caactacactattctaacgccaaac

SEQ ID NO: 449326 - DNA, 25 bp, Artificial
  probe
  misc_feature (1)..(25): SEQ ID NO: 6790; WAN024EUS; Start 273; Stop 297
tcaactacactattctaacgccaaa

SEQ ID NO: 449327 - DNA, 25 bp, Artificial
  probe
  misc_feature (1)..(25): SEQ ID NO: 6790; WAN024EUS; Start 138; Stop 162
tggaagtctaatgaagaataaggaa

SEQ ID NO: 449328 - DNA, 25 bp, Artificial
  probe
  misc_feature (1)..(25): SEQ ID NO: 6790; WAN024EUS; Start 316; Stop 340
ctcatcaaacttatcaaacgaaacg

SEQ ID NO: 449329 - DNA, 25 bp, Artificial
  probe
  misc_feature (1)..(25): SEQ ID NO: 6790; WAN024EUS; Start 303; Stop 327
agcgacaaataatctcatcaaactt

SEQ ID NO: 449330 - DNA, 25 bp, Artificial
  probe
  misc_feature (1)..(25): SEQ ID NO: 6790; WAN024EUS; Start 302; Stop 326
aagcgacaaataatctcatcaaact

SEQ ID NO: 449331 - DNA, 25 bp, Artificial
  probe
  misc_feature (1)..(25): SEQ ID NO: 6790; WAN024EUS; Start 294; Stop 318
caaactggaagcgacaaataatctc

SEQ ID NO: 449332 - DNA, 25 bp, Artificial
  probe
  misc_feature (1)..(25): SEQ ID NO: 6790; WAN024EUS; Start 299; Stop 323
tggaagcgacaaataatctcatcaa

SEQ ID NO: 449333 - DNA, 25 bp, Artificial
  probe
  misc_feature (1)..(25): SEQ ID NO: 6790; WAN024EUS; Start 296; Stop 320
aactggaagcgacaaataatctcat

SEQ ID NO: 449334 - DNA, 25 bp, Artificial
  probe
  misc_feature (1)..(25): SEQ ID NO: 6790; WAN024EUS; Start 317; Stop 341
tcatcaaacttatcaaacgaaacgc

SEQ ID NO: 449335 - DNA, 25 bp, Artificial
  probe
  misc_feature (1)..(25): SEQ ID NO: 6790; WAN024EUS; Start 301; Stop 325
gaagcgacaaataatctcatcaaac

SEQ ID NO: 449336 - DNA, 25 bp, Artificial
  probe
  misc_feature (1)..(25): SEQ ID NO: 6790; WAN024EUS; Start 276; Stop 300
actacactattctaacgccaaactg

SEQ ID NO: 449337 - DNA, 25 bp, Artificial
  probe
  misc_feature (1)..(25): SEQ ID NO: 6790; WAN024EUS; Start 295; Stop 319
aaactggaagcgacaaataatctca

SEQ ID NO: 449338 - DNA, 25 bp, Artificial
  probe
  misc_feature (1)..(25): SEQ ID NO: 6790; WAN024EUS; Start 140; Stop 164
gaagtctaatgaagaataaggaacc

SEQ ID NO: 449339 - DNA, 25 bp, Artificial
  probe
  misc_feature (1)..(25): SEQ ID NO: 6790; WAN024EUS; Start 139; Stop 163
ggaagtctaatgaagaataaggaac

SEQ ID NO: 449340 - DNA, 25 bp, Artificial
  probe
  misc_feature (1)..(25): SEQ ID NO: 6790; WAN024EUS; Start 298; Stop 322
ctggaagcgacaaataatctcatca

SEQ ID NO: 449341 - DNA, 25 bp, Artificial
  probe
  misc_feature (1)..(25): SEQ ID NO: 6790; WAN024EUS; Start 297; Stop 321
actggaagcgacaaataatctcatc

SEQ ID NO: 449342 - DNA, 25 bp, Artificial
  probe
  misc_feature (1)..(25): SEQ ID NO: 6790; WAN024EUS; Start 269; Stop 293
cccttcaactacactattctaacgc

SEQ ID NO: 449343 - DNA, 25 bp, Artificial
  probe
  misc_feature (1)..(25): SEQ ID NO: 6790; WAN024EUS; Start 268; Stop 292
gcccttcaactacactattctaacg

SEQ ID NO: 449344 - DNA, 25 bp, Artificial
  probe
  misc_feature (1)..(25): SEQ ID NO: 6791; WAN024CZ5; Start 61; Stop 85
ttgaataggcgtatagacttgagaa

SEQ ID NO: 449345 - DNA, 25 bp, Artificial
  probe
  misc_feature (1)..(25): SEQ ID NO: 6791; WAN024CZ5; Start 62; Stop 86
tgaataggcgtatagacttgagaat

SEQ ID NO: 449346 - DNA, 25 bp, Artificial
  probe
  misc_feature (1)..(25): SEQ ID NO: 6791; WAN024CZ5; Start 63; Stop 87
gaataggcgtatagacttgagaatt

SEQ ID NO: 449347 - DNA, 25 bp, Artificial
  probe
  misc_feature (1)..(25): SEQ ID NO: 6791; WAN024CZ5; Start 2; Stop 26
tggaacagggagtatcagatttatc

SEQ ID NO: 449348 - DNA, 25 bp, Artificial
  probe
  misc_feature (1)..(25): SEQ ID NO: 6791; WAN024CZ5; Start 60; Stop 84
tttgaataggcgtatagacttgaga

SEQ ID NO: 449349 - DNA, 25 bp, Artificial
  probe
  misc_feature (1)..(25): SEQ ID NO: 6791; WAN024CZ5; Start 1; Stop 25
atggaacagggagtatcagatttat

SEQ ID NO: 449350 - DNA, 25 bp, Artificial
  probe
  misc_feature (1)..(25): SEQ ID NO: 6791; WAN024CZ5; Start 28; Stop 52
ggcagattgtatcaaataaggcttg

SEQ ID NO: 449351 - DNA, 25 bp, Artificial
  probe
  misc_feature (1)..(25): SEQ ID NO: 6791; WAN024CZ5; Start 27; Stop 51
tggcagattgtatcaaataaggctt

SEQ ID NO: 449352 - DNA, 25 bp, Artificial
  probe
  misc_feature (1)..(25): SEQ ID NO: 6791; WAN024CZ5; Start 3; Stop 27
ggaacagggagtatcagatttatct

SEQ ID NO: 449353 - DNA, 25 bp, Artificial
  probe
  misc_feature (1)..(25): SEQ ID NO: 6791; WAN024CZ5; Start 26; Stop 50
ctggcagattgtatcaaataaggct

SEQ ID NO: 449354 - DNA, 25 bp, Artificial
  probe
  misc_feature (1)..(25): SEQ ID NO: 6791; WAN024CZ5; Start 25; Stop 49
tctggcagattgtatcaaataaggc

SEQ ID NO: 449355 - DNA, 25 bp, Artificial
  probe
  misc_feature (1)..(25): SEQ ID NO: 6791; WAN024CZ5; Start 55; Stop 79
actgttttgaataggcgtatagact

SEQ ID NO: 449356 - DNA, 25 bp, Artificial
  probe
  misc_feature (1)..(25): SEQ ID NO: 6791; WAN024CZ5; Start 57; Stop 81
tgttttgaataggcgtatagacttg

SEQ ID NO: 449357 - DNA, 25 bp, Artificial
  probe
  misc_feature (1)..(25): SEQ ID NO: 6791; WAN024CZ5; Start 54; Stop 78
aactgttttgaataggcgtatagac

SEQ ID NO: 449358 - DNA, 25 bp, Artificial
  probe
  misc_feature (1)..(25): SEQ ID NO: 6791; WAN024CZ5; Start 58; Stop 82
gttttgaataggcgtatagacttga

SEQ ID NO: 449359 - DNA, 25 bp, Artificial
  probe
  misc_feature (1)..(25): SEQ ID NO: 6791; WAN024CZ5; Start 56; Stop 80
ctgttttgaataggcgtatagactt

SEQ ID NO: 449360 - DNA, 25 bp, Artificial
  probe
  misc_feature (1)..(25): SEQ ID NO: 6791; WAN024CZ5; Start 59; Stop 83
ttttgaataggcgtatagacttgag

SEQ ID NO: 449361 - DNA, 25 bp, Artificial
  probe
  misc_feature (1)..(25): SEQ ID NO: 6791; WAN024CZ5; Start 29; Stop 53
gcagattgtatcaaataaggcttga

SEQ ID NO: 449362 - DNA, 25 bp, Artificial
  probe
  misc_feature (1)..(25): SEQ ID NO: 6791; WAN024CZ5; Start 49; Stop 73
cttgaaactgttttgaataggcgta

SEQ ID NO: 449363 - DNA, 25 bp, Artificial
  probe
  misc_feature (1)..(25): SEQ ID NO: 6791; WAN024CZ5; Start 45; Stop 69
aaggcttgaaactgttttgaatagg

SEQ ID NO: 449364 - DNA, 25 bp, Artificial
  probe
  misc_feature (1)..(25): SEQ ID NO: 6791; WAN024CZ5; Start 50; Stop 74
ttgaaactgttttgaataggcgtat

SEQ ID NO: 449365 - DNA, 25 bp, Artificial
  probe
  misc_feature (1)..(25): SEQ ID NO: 6791; WAN024CZ5; Start 35; Stop 59
tgtatcaaataaggcttgaaactgt

SEQ ID NO: 449366 - DNA, 25 bp, Artificial
  probe
  misc_feature (1)..(25): SEQ ID NO: 6791; WAN024CZ5; Start 51; Stop 75
tgaaactgttttgaataggcgtata

SEQ ID NO: 449367 - DNA, 25 bp, Artificial
  probe
  misc_feature (1)..(25): SEQ ID NO: 6791; WAN024CZ5; Start 53; Stop 77
aaactgttttgaataggcgtataga

SEQ ID NO: 449368 - DNA, 25 bp, Artificial
  probe
  misc_feature (1)..(25): SEQ ID NO: 6791; WAN024CZ5; Start 52; Stop 76
gaaactgttttgaataggcgtatag

SEQ ID NO: 449369 - DNA, 25 bp, Artificial
  probe
  misc_feature (1)..(25): SEQ ID NO: 6791; WAN024CZ5; Start 41; Stop 65
aaataaggcttgaaactgttttgaa

SEQ ID NO: 449370 - DNA, 25 bp, Artificial
  probe
  misc_feature (1)..(25): SEQ ID NO: 6791; WAN024CZ5; Start 24; Stop 48
atctggcagattgtatcaaataagg

SEQ ID NO: 449371 - DNA, 25 bp, Artificial
  probe
  misc_feature (1)..(25): SEQ ID NO: 6791; WAN024CZ5; Start 36; Stop 60
gtatcaaataaggcttgaaactgtt

SEQ ID NO: 449372 - DNA, 25 bp, Artificial
  probe
  misc_feature (1)..(25): SEQ ID NO: 6791; WAN024CZ5; Start 34; Stop 58
ttgtatcaaataaggcttgaaactg

SEQ ID NO: 449373 - DNA, 25 bp, Artificial
  probe
  misc_feature (1)..(25): SEQ ID NO: 6791; WAN024CZ5; Start 42; Stop 66
aataaggcttgaaactgttttgaat

SEQ ID NO: 449374 - DNA, 25 bp, Artificial
  probe
  misc_feature (1)..(25): SEQ ID NO: 6791; WAN024CZ5; Start 44; Stop 68
taaggcttgaaactgttttgaatag

SEQ ID NO: 449375 - DNA, 25 bp, Artificial
  probe
  misc_feature (1)..(25): SEQ ID NO: 6791; WAN024CZ5; Start 46; Stop 70
aggcttgaaactgttttgaataggc

SEQ ID NO: 449376 - DNA, 25 bp, Artificial
  probe
  misc_feature (1)..(25): SEQ ID NO: 6791; WAN024CZ5; Start 30; Stop 54
cagattgtatcaaataaggcttgaa

SEQ ID NO: 449377 - DNA, 25 bp, Artificial
  probe
  misc_feature (1)..(25): SEQ ID NO: 6792; WAN024CT7; Start 189; Stop 213
gttgaagaggattggcaataacatc

SEQ ID NO: 449378 - DNA, 25 bp, Artificial
  probe
  misc_feature (1)..(25): SEQ ID NO: 6792; WAN024CT7; Start 185; Stop 209
ttgagttgaagaggattggcaataa

SEQ ID NO: 449379 - DNA, 25 bp, Artificial
  probe
  misc_feature (1)..(25): SEQ ID NO: 6792; WAN024CT7; Start 188; Stop 212
agttgaagaggattggcaataacat

SEQ ID NO: 449380 - DNA, 25 bp, Artificial
  probe
  misc_feature (1)..(25): SEQ ID NO: 6792; WAN024CT7; Start 227; Stop 251
gaagtgtgaaccaatctcagttgat

SEQ ID NO: 449381 - DNA, 25 bp, Artificial
  probe
  misc_feature (1)..(25): SEQ ID NO: 6792; WAN024CT7; Start 191; Stop 215
tgaagaggattggcaataacatcaa

SEQ ID NO: 449382 - DNA, 25 bp, Artificial
  probe
  misc_feature (1)..(25): SEQ ID NO: 6792; WAN024CT7; Start 190; Stop 214
ttgaagaggattggcaataacatca

SEQ ID NO: 449383 - DNA, 25 bp, Artificial
  probe
  misc_feature (1)..(25): SEQ ID NO: 6792; WAN024CT7; Start 187; Stop 211
gagttgaagaggattggcaataaca

SEQ ID NO: 449384 - DNA, 25 bp, Artificial
  probe
  misc_feature (1)..(25): SEQ ID NO: 6792; WAN024CT7; Start 186; Stop 210
tgagttgaagaggattggcaataac

SEQ ID NO: 449385 - DNA, 25 bp, Artificial
  probe
  misc_feature (1)..(25): SEQ ID NO: 6792; WAN024CT7; Start 228; Stop 252
aagtgtgaaccaatctcagttgatt

SEQ ID NO: 449386 - DNA, 25 bp, Artificial
  probe
  misc_feature (1)..(25): SEQ ID NO: 6792; WAN024CT7; Start 15; Stop 39
ccgaatcaatctcaagaaagtgttt

SEQ ID NO: 449387 - DNA, 25 bp, Artificial
  probe
  misc_feature (1)..(25): SEQ ID NO: 6792; WAN024CT7; Start 13; Stop 37
taccgaatcaatctcaagaaagtgt

SEQ ID NO: 449388 - DNA, 25 bp, Artificial
  probe
  misc_feature (1)..(25): SEQ ID NO: 6792; WAN024CT7; Start 10; Stop 34
cgttaccgaatcaatctcaagaaag

SEQ ID NO: 449389 - DNA, 25 bp, Artificial
  probe
  misc_feature (1)..(25): SEQ ID NO: 6792; WAN024CT7; Start 179; Stop 203
tagtgtttgagttgaagaggattgg

SEQ ID NO: 449390 - DNA, 25 bp, Artificial
  probe
  misc_feature (1)..(25): SEQ ID NO: 6792; WAN024CT7; Start 178; Stop 202
ttagtgtttgagttgaagaggattg

SEQ ID NO: 449391 - DNA, 25 bp, Artificial
  probe
  misc_feature (1)..(25): SEQ ID NO: 6792; WAN024CT7; Start 12; Stop 36
ttaccgaatcaatctcaagaaagtg

SEQ ID NO: 449392 - DNA, 25 bp, Artificial
  probe
  misc_feature (1)..(25): SEQ ID NO: 6792; WAN024CT7; Start 11; Stop 35
gttaccgaatcaatctcaagaaagt

SEQ ID NO: 449393 - DNA, 25 bp, Artificial
  probe
  misc_feature (1)..(25): SEQ ID NO: 6792; WAN024CT7; Start 14; Stop 38
accgaatcaatctcaagaaagtgtt

SEQ ID NO: 449394 - DNA, 25 bp, Artificial
  probe
  misc_feature (1)..(25): SEQ ID NO: 6792; WAN024CT7; Start 192; Stop 216
gaagaggattggcaataacatcaat

SEQ ID NO: 449395 - DNA, 25 bp, Artificial
  probe
  misc_feature (1)..(25): SEQ ID NO: 6792; WAN024CT7; Start 177; Stop 201
cttagtgtttgagttgaagaggatt

SEQ ID NO: 449396 - DNA, 25 bp, Artificial
  probe
  misc_feature (1)..(25): SEQ ID NO: 6792; WAN024CT7; Start 171; Stop 195
ccaagacttagtgtttgagttgaag

SEQ ID NO: 449397 - DNA, 25 bp, Artificial
  probe
  misc_feature (1)..(25): SEQ ID NO: 6792; WAN024CT7; Start 176; Stop 200
acttagtgtttgagttgaagaggat

SEQ ID NO: 449398 - DNA, 25 bp, Artificial
  probe
  misc_feature (1)..(25): SEQ ID NO: 6792; WAN024CT7; Start 169; Stop 193
taccaagacttagtgtttgagttga

SEQ ID NO: 449399 - DNA, 25 bp, Artificial
  probe
  misc_feature (1)..(25): SEQ ID NO: 6792; WAN024CT7; Start 175; Stop 199
gacttagtgtttgagttgaagagga

SEQ ID NO: 449400 - DNA, 25 bp, Artificial
  probe
  misc_feature (1)..(25): SEQ ID NO: 6792; WAN024CT7; Start 174; Stop 198
agacttagtgtttgagttgaagagg

SEQ ID NO: 449401 - DNA, 25 bp, Artificial
  probe
  misc_feature (1)..(25): SEQ ID NO: 6792; WAN024CT7; Start 168; Stop 192
ctaccaagacttagtgtttgagttg

SEQ ID NO: 449402 - DNA, 25 bp, Artificial
  probe
  misc_feature (1)..(25): SEQ ID NO: 6792; WAN024CT7; Start 8; Stop 32
atcgttaccgaatcaatctcaagaa

SEQ ID NO: 449403 - DNA, 25 bp, Artificial
  probe
  misc_feature (1)..(25): SEQ ID NO: 6792; WAN024CT7; Start 170; Stop 194
accaagacttagtgtttgagttgaa

SEQ ID NO: 449404 - DNA, 25 bp, Artificial
  probe
  misc_feature (1)..(25): SEQ ID NO: 6792; WAN024CT7; Start 172; Stop 196
caagacttagtgtttgagttgaaga

SEQ ID NO: 449405 - DNA, 25 bp, Artificial
  probe
  misc_feature (1)..(25): SEQ ID NO: 6792; WAN024CT7; Start 5; Stop 29
aacatcgttaccgaatcaatctcaa

SEQ ID NO: 449406 - DNA, 25 bp, Artificial
  probe
  misc_feature (1)..(25): SEQ ID NO: 6792; WAN024CT7; Start 39; Stop 63
tttgtctgatattgagttgaaccaa

SEQ ID NO: 449407 - DNA, 25 bp, Artificial
  probe
  misc_feature (1)..(25): SEQ ID NO: 6792; WAN024CT7; Start 167; Stop 191
gctaccaagacttagtgtttgagtt

SEQ ID NO: 449408 - DNA, 25 bp, Artificial
  probe
  misc_feature (1)..(25): SEQ ID NO: 6792; WAN024CT7; Start 123; Stop 147
cctacttgaccctggaatgaatttc

SEQ ID NO: 449409 - DNA, 25 bp, Artificial
  probe
  misc_feature (1)..(25): SEQ ID NO: 6792; WAN024CT7; Start 7; Stop 31
catcgttaccgaatcaatctcaaga

SEQ ID NO: 449410 - DNA, 25 bp, Artificial
  probe
  misc_feature (1)..(25): SEQ ID NO: 6793; WAN024BWD; Start 619; Stop 643
cgttcacttaccattacagagaagg

SEQ ID NO: 449411 - DNA, 25 bp, Artificial
  probe
  misc_feature (1)..(25): SEQ ID NO: 6793; WAN024BWD; Start 461; Stop 485
tacacattgatacggatgaattgaa

SEQ ID NO: 449412 - DNA, 25 bp, Artificial
  probe
  misc_feature (1)..(25): SEQ ID NO: 6793; WAN024BWD; Start 460; Stop 484
ttacacattgatacggatgaattga

SEQ ID NO: 449413 - DNA, 25 bp, Artificial
  probe
  misc_feature (1)..(25): SEQ ID NO: 6793; WAN024BWD; Start 459; Stop 483
attacacattgatacggatgaattg

SEQ ID NO: 449414 - DNA, 25 bp, Artificial
  probe
  misc_feature (1)..(25): SEQ ID NO: 6793; WAN024BWD; Start 618; Stop 642
acgttcacttaccattacagagaag

SEQ ID NO: 449415 - DNA, 25 bp, Artificial
  probe
  misc_feature (1)..(25): SEQ ID NO: 6793; WAN024BWD; Start 140; Stop 164
gctatcacctcaaattacttaccga

SEQ ID NO: 449416 - DNA, 25 bp, Artificial
  probe
  misc_feature (1)..(25): SEQ ID NO: 6793; WAN024BWD; Start 617; Stop 641
cacgttcacttaccattacagagaa

SEQ ID NO: 449417 - DNA, 25 bp, Artificial
  probe
  misc_feature (1)..(25): SEQ ID NO: 6793; WAN024BWD; Start 620; Stop 644
gttcacttaccattacagagaaggg

SEQ ID NO: 449418 - DNA, 25 bp, Artificial
  probe
  misc_feature (1)..(25): SEQ ID NO: 6793; WAN024BWD; Start 358; Stop 382
ggcatttccattaccaattatctct

SEQ ID NO: 449419 - DNA, 25 bp, Artificial
  probe
  misc_feature (1)..(25): SEQ ID NO: 6793; WAN024BWD; Start 462; Stop 486
acacattgatacggatgaattgaaa

SEQ ID NO: 449420 - DNA, 25 bp, Artificial
  probe
  misc_feature (1)..(25): SEQ ID NO: 6793; WAN024BWD; Start 629; Stop 653
ccattacagagaagggcaaagaatt

SEQ ID NO: 449421 - DNA, 25 bp, Artificial
  probe
  misc_feature (1)..(25): SEQ ID NO: 6793; WAN024BWD; Start 627; Stop 651
taccattacagagaagggcaaagaa

SEQ ID NO: 449422 - DNA, 25 bp, Artificial
  probe
  misc_feature (1)..(25): SEQ ID NO: 6793; WAN024BWD; Start 626; Stop 650
ttaccattacagagaagggcaaaga

SEQ ID NO: 449423 - DNA, 25 bp, Artificial
  probe
  misc_feature (1)..(25): SEQ ID NO: 6793; WAN024BWD; Start 625; Stop 649
cttaccattacagagaagggcaaag

SEQ ID NO: 449424 - DNA, 25 bp, Artificial
  probe
  misc_feature (1)..(25): SEQ ID NO: 6793; WAN024BWD; Start 143; Stop 167
atcacctcaaattacttaccgaagc

SEQ ID NO: 449425 - DNA, 25 bp, Artificial
  probe
  misc_feature (1)..(25): SEQ ID NO: 6793; WAN024BWD; Start 128; Stop 152
aacatactgtcagctatcacctcaa

SEQ ID NO: 449426 - DNA, 25 bp, Artificial
  probe
  misc_feature (1)..(25): SEQ ID NO: 6793; WAN024BWD; Start 141; Stop 165
ctatcacctcaaattacttaccgaa

SEQ ID NO: 449427 - DNA, 25 bp, Artificial
  probe
  misc_feature (1)..(25): SEQ ID NO: 6793; WAN024BWD; Start 503; Stop 527
tttgccctaaatgtttggattggag

SEQ ID NO: 449428 - DNA, 25 bp, Artificial
  probe
  misc_feature (1)..(25): SEQ ID NO: 6793; WAN024BWD; Start 142; Stop 166
tatcacctcaaattacttaccgaag

SEQ ID NO: 449429 - DNA, 25 bp, Artificial
  probe
  misc_feature (1)..(25): SEQ ID NO: 6793; WAN024BWD; Start 458; Stop 482
aattacacattgatacggatgaatt

SEQ ID NO: 449430 - DNA, 25 bp, Artificial
  probe
  misc_feature (1)..(25): SEQ ID NO: 6793; WAN024BWD; Start 624; Stop 648
acttaccattacagagaagggcaaa

SEQ ID NO: 449431 - DNA, 25 bp, Artificial
  probe
  misc_feature (1)..(25): SEQ ID NO: 6793; WAN024BWD; Start 628; Stop 652
accattacagagaagggcaaagaat

SEQ ID NO: 449432 - DNA, 25 bp, Artificial
  probe
  misc_feature (1)..(25): SEQ ID NO: 6793; WAN024BWD; Start 616; Stop 640
ccacgttcacttaccattacagaga

SEQ ID NO: 449433 - DNA, 25 bp, Artificial
  probe
  misc_feature (1)..(25): SEQ ID NO: 6793; WAN024BWD; Start 127; Stop 151
caacatactgtcagctatcacctca

SEQ ID NO: 449434 - DNA, 25 bp, Artificial
  probe
  misc_feature (1)..(25): SEQ ID NO: 6793; WAN024BWD; Start 621; Stop 645
ttcacttaccattacagagaagggc

SEQ ID NO: 449435 - DNA, 25 bp, Artificial
  probe
  misc_feature (1)..(25): SEQ ID NO: 6793; WAN024BWD; Start 135; Stop 159
tgtcagctatcacctcaaattactt

SEQ ID NO: 449436 - DNA, 25 bp, Artificial
  probe
  misc_feature (1)..(25): SEQ ID NO: 6793; WAN024BWD; Start 131; Stop 155
atactgtcagctatcacctcaaatt

SEQ ID NO: 449437 - DNA, 25 bp, Artificial
  probe
  misc_feature (1)..(25): SEQ ID NO: 6793; WAN024BWD; Start 359; Stop 383
gcatttccattaccaattatctctt

SEQ ID NO: 449438 - DNA, 25 bp, Artificial
  probe
  misc_feature (1)..(25): SEQ ID NO: 6793; WAN024BWD; Start 139; Stop 163
agctatcacctcaaattacttaccg

SEQ ID NO: 449439 - DNA, 25 bp, Artificial
  probe
  misc_feature (1)..(25): SEQ ID NO: 6793; WAN024BWD; Start 134; Stop 158
ctgtcagctatcacctcaaattact

SEQ ID NO: 449440 - DNA, 25 bp, Artificial
  probe
  misc_feature (1)..(25): SEQ ID NO: 6793; WAN024BWD; Start 130; Stop 154
catactgtcagctatcacctcaaat

SEQ ID NO: 449441 - DNA, 25 bp, Artificial
  probe
  misc_feature (1)..(25): SEQ ID NO: 6793; WAN024BWD; Start 133; Stop 157
actgtcagctatcacctcaaattac

SEQ ID NO: 449442 - DNA, 25 bp, Artificial
  probe
  misc_feature (1)..(25): SEQ ID NO: 6793; WAN024BWD; Start 120; Stop 144
aatcaagcaacatactgtcagctat

SEQ ID NO: 449443 - DNA, 25 bp, Artificial
  probe
  misc_feature (1)..(25): SEQ ID NO: 6794; WAN024CJA; Start 467; Stop 491
gtggaggctataatggcatagatag

SEQ ID NO: 449444 - DNA, 25 bp, Artificial
  probe
  misc_feature (1)..(25): SEQ ID NO: 6794; WAN024CJA; Start 98; Stop 122
tactgaataagcacagagaggactt

SEQ ID NO: 449445 - DNA, 25 bp, Artificial
  probe
  misc_feature (1)..(25): SEQ ID NO: 6794; WAN024CJA; Start 97; Stop 121
ttactgaataagcacagagaggact

SEQ ID NO: 449446 - DNA, 25 bp, Artificial
  probe
  misc_feature (1)..(25): SEQ ID NO: 6794; WAN024CJA; Start 466; Stop 490
cgtggaggctataatggcatagata

SEQ ID NO: 449447 - DNA, 25 bp, Artificial
  probe
  misc_feature (1)..(25): SEQ ID NO: 6794; WAN024CJA; Start 565; Stop 589
agttatcaggaaatcaaggctatgg

SEQ ID NO: 449448 - DNA, 25 bp, Artificial
  probe
  misc_feature (1)..(25): SEQ ID NO: 6794; WAN024CJA; Start 579; Stop 603
caaggctatggcattcagaaataaa

SEQ ID NO: 449449 - DNA, 25 bp, Artificial
  probe
  misc_feature (1)..(25): SEQ ID NO: 6794; WAN024CJA; Start 577; Stop 601
atcaaggctatggcattcagaaata

SEQ ID NO: 449450 - DNA, 25 bp, Artificial
  probe
  misc_feature (1)..(25): SEQ ID NO: 6794; WAN024CJA; Start 578; Stop 602
tcaaggctatggcattcagaaataa

SEQ ID NO: 449451 - DNA, 25 bp, Artificial
  probe
  misc_feature (1)..(25): SEQ ID NO: 6794; WAN024CJA; Start 564; Stop 588
gagttatcaggaaatcaaggctatg

SEQ ID NO: 449452 - DNA, 25 bp, Artificial
  probe
  misc_feature (1)..(25): SEQ ID NO: 6794; WAN024CJA; Start 280; Stop 304
ttctttgaaatgcgtgatgaacttt

SEQ ID NO: 449453 - DNA, 25 bp, Artificial
  probe
  misc_feature (1)..(25): SEQ ID NO: 6794; WAN024CJA; Start 576; Stop 600
aatcaaggctatggcattcagaaat

SEQ ID NO: 449454 - DNA, 25 bp, Artificial
  probe
  misc_feature (1)..(25): SEQ ID NO: 6794; WAN024CJA; Start 222; Stop 246
cacttacttacgaaatacagaacca

SEQ ID NO: 449455 - DNA, 25 bp, Artificial
  probe
  misc_feature (1)..(25): SEQ ID NO: 6794; WAN024CJA; Start 575; Stop 599
aaatcaaggctatggcattcagaaa

SEQ ID NO: 449456 - DNA, 25 bp, Artificial
  probe
  misc_feature (1)..(25): SEQ ID NO: 6794; WAN024CJA; Start 348; Stop 372
aaccttgcatgacagtattgagaac

SEQ ID NO: 449457 - DNA, 25 bp, Artificial
  probe
  misc_feature (1)..(25): SEQ ID NO: 6794; WAN024CJA; Start 223; Stop 247
acttacttacgaaatacagaaccag

SEQ ID NO: 449458 - DNA, 25 bp, Artificial
  probe
  misc_feature (1)..(25): SEQ ID NO: 6794; WAN024CJA; Start 221; Stop 245
tcacttacttacgaaatacagaacc

SEQ ID NO: 449459 - DNA, 25 bp, Artificial
  probe
  misc_feature (1)..(25): SEQ ID NO: 6794; WAN024CJA; Start 547; Stop 571
atgatgggcttgaatatgagttatc

SEQ ID NO: 449460 - DNA, 25 bp, Artificial
  probe
  misc_feature (1)..(25): SEQ ID NO: 6794; WAN024CJA; Start 102; Stop 126
gaataagcacagagaggactttgag

SEQ ID NO: 449461 - DNA, 25 bp, Artificial
  probe
  misc_feature (1)..(25): SEQ ID NO: 6794; WAN024CJA; Start 552; Stop 576
gggcttgaatatgagttatcaggaa

SEQ ID NO: 449462 - DNA, 25 bp, Artificial
  probe
  misc_feature (1)..(25): SEQ ID NO: 6794; WAN024CJA; Start 550; Stop 574
atgggcttgaatatgagttatcagg

SEQ ID NO: 449463 - DNA, 25 bp, Artificial
  probe
  misc_feature (1)..(25): SEQ ID NO: 6794; WAN024CJA; Start 563; Stop 587
tgagttatcaggaaatcaaggctat

SEQ ID NO: 449464 - DNA, 25 bp, Artificial
  probe
  misc_feature (1)..(25): SEQ ID NO: 6794; WAN024CJA; Start 562; Stop 586
atgagttatcaggaaatcaaggcta

SEQ ID NO: 449465 - DNA, 25 bp, Artificial
  probe
  misc_feature (1)..(25): SEQ ID NO: 6794; WAN024CJA; Start 561; Stop 585
tatgagttatcaggaaatcaaggct

SEQ ID NO: 449466 - DNA, 25 bp, Artificial
  probe
  misc_feature (1)..(25): SEQ ID NO: 6794; WAN024CJA; Start 474; Stop 498
ctataatggcatagatagcttgacc

SEQ ID NO: 449467 - DNA, 25 bp, Artificial
  probe
  misc_feature (1)..(25): SEQ ID NO: 6794; WAN024CJA; Start 549; Stop 573
gatgggcttgaatatgagttatcag

SEQ ID NO: 449468 - DNA, 25 bp, Artificial
  probe
  misc_feature (1)..(25): SEQ ID NO: 6794; WAN024CJA; Start 566; Stop 590
gttatcaggaaatcaaggctatggc

SEQ ID NO: 449469 - DNA, 25 bp, Artificial
  probe
  misc_feature (1)..(25): SEQ ID NO: 6794; WAN024CJA; Start 103; Stop 127
aataagcacagagaggactttgaga

SEQ ID NO: 449470 - DNA, 25 bp, Artificial
  probe
  misc_feature (1)..(25): SEQ ID NO: 6794; WAN024CJA; Start 574; Stop 598
gaaatcaaggctatggcattcagaa

SEQ ID NO: 449471 - DNA, 25 bp, Artificial
  probe
  misc_feature (1)..(25): SEQ ID NO: 6794; WAN024CJA; Start 568; Stop 592
tatcaggaaatcaaggctatggcat

SEQ ID NO: 449472 - DNA, 25 bp, Artificial
  probe
  misc_feature (1)..(25): SEQ ID NO: 6794; WAN024CJA; Start 553; Stop 577
ggcttgaatatgagttatcaggaaa

SEQ ID NO: 449473 - DNA, 25 bp, Artificial
  probe
  misc_feature (1)..(25): SEQ ID NO: 6794; WAN024CJA; Start 101; Stop 125
tgaataagcacagagaggactttga

SEQ ID NO: 449474 - DNA, 25 bp, Artificial
  probe
  misc_feature (1)..(25): SEQ ID NO: 6794; WAN024CJA; Start 476; Stop 500
ataatggcatagatagcttgaccag

SEQ ID NO: 449475 - DNA, 25 bp, Artificial
  probe
  misc_feature (1)..(25): SEQ ID NO: 6794; WAN024CJA; Start 551; Stop 575
tgggcttgaatatgagttatcagga

SEQ ID NO: 449476 - DNA, 25 bp, Artificial
  probe
  misc_feature (1)..(25): SEQ ID NO: 6795; WAN024BU9; Start 263; Stop 287
gttacgcttgttaccttattgtcca

SEQ ID NO: 449477 - DNA, 25 bp, Artificial
  probe
  misc_feature (1)..(25): SEQ ID NO: 6795; WAN024BU9; Start 264; Stop 288
ttacgcttgttaccttattgtccaa

SEQ ID NO: 449478 - DNA, 25 bp, Artificial
  probe
  misc_feature (1)..(25): SEQ ID NO: 6795; WAN024BU9; Start 6; Stop 30
actccaacagtacgatgaattaact

SEQ ID NO: 449479 - DNA, 25 bp, Artificial
  probe
  misc_feature (1)..(25): SEQ ID NO: 6795; WAN024BU9; Start 5; Stop 29
aactccaacagtacgatgaattaac

SEQ ID NO: 449480 - DNA, 25 bp, Artificial
  probe
  misc_feature (1)..(25): SEQ ID NO: 6795; WAN024BU9; Start 3; Stop 27
ggaactccaacagtacgatgaatta

SEQ ID NO: 449481 - DNA, 25 bp, Artificial
  probe
  misc_feature (1)..(25): SEQ ID NO: 6795; WAN024BU9; Start 7; Stop 31
ctccaacagtacgatgaattaactt

SEQ ID NO: 449482 - DNA, 25 bp, Artificial
  probe
  misc_feature (1)..(25): SEQ ID NO: 6795; WAN024BU9; Start 4; Stop 28
gaactccaacagtacgatgaattaa

SEQ ID NO: 449483 - DNA, 25 bp, Artificial
  probe
  misc_feature (1)..(25): SEQ ID NO: 6795; WAN024BU9; Start 262; Stop 286
cgttacgcttgttaccttattgtcc

SEQ ID NO: 449484 - DNA, 25 bp, Artificial
  probe
  misc_feature (1)..(25): SEQ ID NO: 6795; WAN024BU9; Start 261; Stop 285
ccgttacgcttgttaccttattgtc

SEQ ID NO: 449485 - DNA, 25 bp, Artificial
  probe
  misc_feature (1)..(25): SEQ ID NO: 6795; WAN024BU9; Start 484; Stop 508
agatttcacaactcaggatacaagg

SEQ ID NO: 449486 - DNA, 25 bp, Artificial
  probe
  misc_feature (1)..(25): SEQ ID NO: 6795; WAN024BU9; Start 817; Stop 841
gatgataataaccaactttcgctct

SEQ ID NO: 449487 - DNA, 25 bp, Artificial
  probe
  misc_feature (1)..(25): SEQ ID NO: 6795; WAN024BU9; Start 816; Stop 840
agatgataataaccaactttcgctc

SEQ ID NO: 449488 - DNA, 25 bp, Artificial
  probe
  misc_feature (1)..(25): SEQ ID NO: 6795; WAN024BU9; Start 438; Stop 462
atcattatctgagtctgctggcaat

SEQ ID NO: 449489 - DNA, 25 bp, Artificial
  probe
  misc_feature (1)..(25): SEQ ID NO: 6795; WAN024BU9; Start 819; Stop 843
tgataataaccaactttcgctcttt

SEQ ID NO: 449490 - DNA, 25 bp, Artificial
  probe
  misc_feature (1)..(25): SEQ ID NO: 6795; WAN024BU9; Start 483; Stop 507
aagatttcacaactcaggatacaag

SEQ ID NO: 449491 - DNA, 25 bp, Artificial
  probe
  misc_feature (1)..(25): SEQ ID NO: 6795; WAN024BU9; Start 481; Stop 505
ggaagatttcacaactcaggataca

SEQ ID NO: 449492 - DNA, 25 bp, Artificial
  probe
  misc_feature (1)..(25): SEQ ID NO: 6795; WAN024BU9; Start 480; Stop 504
tggaagatttcacaactcaggatac

SEQ ID NO: 449493 - DNA, 25 bp, Artificial
  probe
  misc_feature (1)..(25): SEQ ID NO: 6795; WAN024BU9; Start 818; Stop 842
atgataataaccaactttcgctctt

SEQ ID NO: 449494 - DNA, 25 bp, Artificial
  probe
  misc_feature (1)..(25): SEQ ID NO: 6795; WAN024BU9; Start 467; Stop 491
gcgttaagaactttggaagatttca

SEQ ID NO: 449495 - DNA, 25 bp, Artificial
  probe
  misc_feature (1)..(25): SEQ ID NO: 6795; WAN024BU9; Start 485; Stop 509
gatttcacaactcaggatacaaggg

SEQ ID NO: 449496 - DNA, 25 bp, Artificial
  probe
  misc_feature (1)..(25): SEQ ID NO: 6795; WAN024BU9; Start 479; Stop 503
ttggaagatttcacaactcaggata

SEQ ID NO: 449497 - DNA, 25 bp, Artificial
  probe
  misc_feature (1)..(25): SEQ ID NO: 6795; WAN024BU9; Start 475; Stop 499
aactttggaagatttcacaactcag

SEQ ID NO: 449498 - DNA, 25 bp, Artificial
  probe
  misc_feature (1)..(25): SEQ ID NO: 6795; WAN024BU9; Start 474; Stop 498
gaactttggaagatttcacaactca

SEQ ID NO: 449499 - DNA, 25 bp, Artificial
  probe
  misc_feature (1)..(25): SEQ ID NO: 6795; WAN024BU9; Start 437; Stop 461
aatcattatctgagtctgctggcaa

SEQ ID NO: 449500 - DNA, 25 bp, Artificial
  probe
  misc_feature (1)..(25): SEQ ID NO: 6795; WAN024BU9; Start 823; Stop 847
aataaccaactttcgctctttgatg

SEQ ID NO: 449501 - DNA, 25 bp, Artificial
  probe
  misc_feature (1)..(25): SEQ ID NO: 6795; WAN024BU9; Start 473; Stop 497
agaactttggaagatttcacaactc

SEQ ID NO: 449502 - DNA, 25 bp, Artificial
  probe
  misc_feature (1)..(25): SEQ ID NO: 6795; WAN024BU9; Start 482; Stop 506
gaagatttcacaactcaggatacaa

SEQ ID NO: 449503 - DNA, 25 bp, Artificial
  probe
  misc_feature (1)..(25): SEQ ID NO: 6795; WAN024BU9; Start 201; Stop 225
caacaagtcaattccaaacggttat

SEQ ID NO: 449504 - DNA, 25 bp, Artificial
  probe
  misc_feature (1)..(25): SEQ ID NO: 6795; WAN024BU9; Start 828; Stop 852
ccaactttcgctctttgatgatatg

SEQ ID NO: 449505 - DNA, 25 bp, Artificial
  probe
  misc_feature (1)..(25): SEQ ID NO: 6795; WAN024BU9; Start 814; Stop 838
caagatgataataaccaactttcgc

SEQ ID NO: 449506 - DNA, 25 bp, Artificial
  probe
  misc_feature (1)..(25): SEQ ID NO: 6795; WAN024BU9; Start 478; Stop 502
tttggaagatttcacaactcaggat

SEQ ID NO: 449507 - DNA, 25 bp, Artificial
  probe
  misc_feature (1)..(25): SEQ ID NO: 6795; WAN024BU9; Start 466; Stop 490
ggcgttaagaactttggaagatttc

SEQ ID NO: 449508 - DNA, 25 bp, Artificial
  probe
  misc_feature (1)..(25): SEQ ID NO: 6795; WAN024BU9; Start 472; Stop 496
aagaactttggaagatttcacaact

SEQ ID NO: 449509 - DNA, 25 bp, Artificial
  probe
  misc_feature (1)..(25): SEQ ID NO: 6796; WAN024B4P; Start 226; Stop 250
gtagatgtgcctggttatggttatg

SEQ ID NO: 449510 - DNA, 25 bp, Artificial
  probe
  misc_feature (1)..(25): SEQ ID NO: 6796; WAN024B4P; Start 225; Stop 249
tgtagatgtgcctggttatggttat

SEQ ID NO: 449511 - DNA, 25 bp, Artificial
  probe
  misc_feature (1)..(25): SEQ ID NO: 6796; WAN024B4P; Start 224; Stop 248
ttgtagatgtgcctggttatggtta

SEQ ID NO: 449512 - DNA, 25 bp, Artificial
  probe
  misc_feature (1)..(25): SEQ ID NO: 6796; WAN024B4P; Start 3; Stop 27
ggaactgaatacacacaatgctgaa

SEQ ID NO: 449513 - DNA, 25 bp, Artificial
  probe
  misc_feature (1)..(25): SEQ ID NO: 6796; WAN024B4P; Start 1; Stop 25
atggaactgaatacacacaatgctg

SEQ ID NO: 449514 - DNA, 25 bp, Artificial
  probe
  misc_feature (1)..(25): SEQ ID NO: 6796; WAN024B4P; Start 127; Stop 151
aataccatgctgaaccgtaagaatc

SEQ ID NO: 449515 - DNA, 25 bp, Artificial
  probe
  misc_feature (1)..(25): SEQ ID NO: 6796; WAN024B4P; Start 122; Stop 146
ttatcaataccatgctgaaccgtaa

SEQ ID NO: 449516 - DNA, 25 bp, Artificial
  probe
  misc_feature (1)..(25): SEQ ID NO: 6796; WAN024B4P; Start 126; Stop 150
caataccatgctgaaccgtaagaat

SEQ ID NO: 449517 - DNA, 25 bp, Artificial
  probe
  misc_feature (1)..(25): SEQ ID NO: 6796; WAN024B4P; Start 123; Stop 147
tatcaataccatgctgaaccgtaag

SEQ ID NO: 449518 - DNA, 25 bp, Artificial
  probe
  misc_feature (1)..(25): SEQ ID NO: 6796; WAN024B4P; Start 227; Stop 251
tagatgtgcctggttatggttatgc

SEQ ID NO: 449519 - DNA, 25 bp, Artificial
  probe
  misc_feature (1)..(25): SEQ ID NO: 6796; WAN024B4P; Start 128; Stop 152
ataccatgctgaaccgtaagaatct

SEQ ID NO: 449520 - DNA, 25 bp, Artificial
  probe
  misc_feature (1)..(25): SEQ ID NO: 6796; WAN024B4P; Start 2; Stop 26
tggaactgaatacacacaatgctga

SEQ ID NO: 449521 - DNA, 25 bp, Artificial
  probe
  misc_feature (1)..(25): SEQ ID NO: 6796; WAN024B4P; Start 7; Stop 31
ctgaatacacacaatgctgaaatct

SEQ ID NO: 449522 - DNA, 25 bp, Artificial
  probe
  misc_feature (1)..(25): SEQ ID NO: 6796; WAN024B4P; Start 6; Stop 30
actgaatacacacaatgctgaaatc

SEQ ID NO: 449523 - DNA, 25 bp, Artificial
  probe
  misc_feature (1)..(25): SEQ ID NO: 6796; WAN024B4P; Start 5; Stop 29
aactgaatacacacaatgctgaaat

SEQ ID NO: 449524 - DNA, 25 bp, Artificial
  probe
  misc_feature (1)..(25): SEQ ID NO: 6796; WAN024B4P; Start 4; Stop 28
gaactgaatacacacaatgctgaaa

SEQ ID NO: 449525 - DNA, 25 bp, Artificial
  probe
  misc_feature (1)..(25): SEQ ID NO: 6796; WAN024B4P; Start 8; Stop 32
tgaatacacacaatgctgaaatctt

SEQ ID NO: 449526 - DNA, 25 bp, Artificial
  probe
  misc_feature (1)..(25): SEQ ID NO: 6796; WAN024B4P; Start 124; Stop 148
atcaataccatgctgaaccgtaaga

SEQ ID NO: 449527 - DNA, 25 bp, Artificial
  probe
  misc_feature (1)..(25): SEQ ID NO: 6796; WAN024B4P; Start 288; Stop 312
catgattgaggagtacctaacgact

SEQ ID NO: 449528 - DNA, 25 bp, Artificial
  probe
  misc_feature (1)..(25): SEQ ID NO: 6796; WAN024B4P; Start 125; Stop 149
tcaataccatgctgaaccgtaagaa

SEQ ID NO: 449529 - DNA, 25 bp, Artificial
  probe
  misc_feature (1)..(25): SEQ ID NO: 6796; WAN024B4P; Start 9; Stop 33
gaatacacacaatgctgaaatcttg

SEQ ID NO: 449530 - DNA, 25 bp, Artificial
  probe
  misc_feature (1)..(25): SEQ ID NO: 6796; WAN024B4P; Start 192; Stop 216
caacttctttaacattgacgacaag

SEQ ID NO: 449531 - DNA, 25 bp, Artificial
  probe
  misc_feature (1)..(25): SEQ ID NO: 6796; WAN024B4P; Start 129; Stop 153
taccatgctgaaccgtaagaatctg

SEQ ID NO: 449532 - DNA, 25 bp, Artificial
  probe
  misc_feature (1)..(25): SEQ ID NO: 6796; WAN024B4P; Start 10; Stop 34
aatacacacaatgctgaaatcttgc

SEQ ID NO: 449533 - DNA, 25 bp, Artificial
  probe
  misc_feature (1)..(25): SEQ ID NO: 6796; WAN024B4P; Start 11; Stop 35
atacacacaatgctgaaatcttgct

SEQ ID NO: 449534 - DNA, 25 bp, Artificial
  probe
  misc_feature (1)..(25): SEQ ID NO: 6796; WAN024B4P; Start 27; Stop 51
aatcttgctcagtgcggctaataag

SEQ ID NO: 449535 - DNA, 25 bp, Artificial
  probe
  misc_feature (1)..(25): SEQ ID NO: 6796; WAN024B4P; Start 121; Stop 145
tttatcaataccatgctgaaccgta

SEQ ID NO: 449536 - DNA, 25 bp, Artificial
  probe
  misc_feature (1)..(25): SEQ ID NO: 6796; WAN024B4P; Start 223; Stop 247
tttgtagatgtgcctggttatggtt

SEQ ID NO: 449537 - DNA, 25 bp, Artificial
  probe
  misc_feature (1)..(25): SEQ ID NO: 6796; WAN024B4P; Start 183; Stop 207
ccagcttctcaacttctttaacatt

SEQ ID NO: 449538 - DNA, 25 bp, Artificial
  probe
  misc_feature (1)..(25): SEQ ID NO: 6796; WAN024B4P; Start 12; Stop 36
tacacacaatgctgaaatcttgctc

SEQ ID NO: 449539 - DNA, 25 bp, Artificial
  probe
  misc_feature (1)..(25): SEQ ID NO: 6796; WAN024B4P; Start 404; Stop 428
atgagattccggttattatcgttgc

SEQ ID NO: 449540 - DNA, 25 bp, Artificial
  probe
  misc_feature (1)..(25): SEQ ID NO: 6796; WAN024B4P; Start 179; Stop 203
aaacccagcttctcaacttctttaa

SEQ ID NO: 449541 - DNA, 25 bp, Artificial
  probe
  misc_feature (1)..(25): SEQ ID NO: 6796; WAN024B4P; Start 102; Stop 126
aaatgttggcaagtctagctttatc

SEQ ID NO: 449542 - DNA, 25 bp, Artificial
  probe
  misc_feature (1)..(25): SEQ ID NO: 6797; WAN024BTO; Start 1458; Stop 1482
aggaggatggtctgctaataatcat

SEQ ID NO: 449543 - DNA, 25 bp, Artificial
  probe
  misc_feature (1)..(25): SEQ ID NO: 6797; WAN024BTO; Start 1455; Stop 1479
aagaggaggatggtctgctaataat

SEQ ID NO: 449544 - DNA, 25 bp, Artificial
  probe
  misc_feature (1)..(25): SEQ ID NO: 6797; WAN024BTO; Start 1878; Stop 1902
tcttcctcttgttgatgatattgac

SEQ ID NO: 449545 - DNA, 25 bp, Artificial
  probe
  misc_feature (1)..(25): SEQ ID NO: 6797; WAN024BTO; Start 1046; Stop 1070
tagatatggagattggtgagcctag

SEQ ID NO: 449546 - DNA, 25 bp, Artificial
  probe
  misc_feature (1)..(25): SEQ ID NO: 6797; WAN024BTO; Start 1045; Stop 1069
ctagatatggagattggtgagccta

SEQ ID NO: 449547 - DNA, 25 bp, Artificial
  probe
  misc_feature (1)..(25): SEQ ID NO: 6797; WAN024BTO; Start 330; Stop 354
ctatgattcacttctggagagtcaa

SEQ ID NO: 449548 - DNA, 25 bp, Artificial
  probe
  misc_feature (1)..(25): SEQ ID NO: 6797; WAN024BTO; Start 328; Stop 352
aactatgattcacttctggagagtc

SEQ ID NO: 449549 - DNA, 25 bp, Artificial
  probe
  misc_feature (1)..(25): SEQ ID NO: 6797; WAN024BTO; Start 1457; Stop 1481
gaggaggatggtctgctaataatca

SEQ ID NO: 449550 - DNA, 25 bp, Artificial
  probe
  misc_feature (1)..(25): SEQ ID NO: 6797; WAN024BTO; Start 1456; Stop 1480
agaggaggatggtctgctaataatc

SEQ ID NO: 449551 - DNA, 25 bp, Artificial
  probe
  misc_feature (1)..(25): SEQ ID NO: 6797; WAN024BTO; Start 332; Stop 356
atgattcacttctggagagtcaatt

SEQ ID NO: 449552 - DNA, 25 bp, Artificial
  probe
  misc_feature (1)..(25): SEQ ID NO: 6797; WAN024BTO; Start 329; Stop 353
actatgattcacttctggagagtca

SEQ ID NO: 449553 - DNA, 25 bp, Artificial
  probe
  misc_feature (1)..(25): SEQ ID NO: 6797; WAN024BTO; Start 331; Stop 355
tatgattcacttctggagagtcaat

SEQ ID NO: 449554 - DNA, 25 bp, Artificial
  probe
  misc_feature (1)..(25): SEQ ID NO: 6797; WAN024BTO; Start 1454; Stop 1478
gaagaggaggatggtctgctaataa

SEQ ID NO: 449555 - DNA, 25 bp, Artificial
  probe
  misc_feature (1)..(25): SEQ ID NO: 6797; WAN024BTO; Start 1450; Stop 1474
tatagaagaggaggatggtctgcta

SEQ ID NO: 449556 - DNA, 25 bp, Artificial
  probe
  misc_feature (1)..(25): SEQ ID NO: 6797; WAN024BTO; Start 2234; Stop 2258
attctgacttgatatgccacttatt

SEQ ID NO: 449557 - DNA, 25 bp, Artificial
  probe
  misc_feature (1)..(25): SEQ ID NO: 6797; WAN024BTO; Start 724; Stop 748
aatgaagagaatctaggtcaggaga

SEQ ID NO: 449558 - DNA, 25 bp, Artificial
  probe
  misc_feature (1)..(25): SEQ ID NO: 6797; WAN024BTO; Start 374; Stop 398
agtacaatgtagtcgctgaggataa

SEQ ID NO: 449559 - DNA, 25 bp, Artificial
  probe
  misc_feature (1)..(25): SEQ ID NO: 6797; WAN024BTO; Start 373; Stop 397
aagtacaatgtagtcgctgaggata

SEQ ID NO: 449560 - DNA, 25 bp, Artificial
  probe
  misc_feature (1)..(25): SEQ ID NO: 6797; WAN024BTO; Start 2586; Stop 2610
ctggttccatgatagaagtgatgat

SEQ ID NO: 449561 - DNA, 25 bp, Artificial
  probe
  misc_feature (1)..(25): SEQ ID NO: 6797; WAN024BTO; Start 2588; Stop 2612
ggttccatgatagaagtgatgatgt

SEQ ID NO: 449562 - DNA, 25 bp, Artificial
  probe
  misc_feature (1)..(25): SEQ ID NO: 6797; WAN024BTO; Start 2587; Stop 2611
tggttccatgatagaagtgatgatg

SEQ ID NO: 449563 - DNA, 25 bp, Artificial
  probe
  misc_feature (1)..(25): SEQ ID NO: 6797; WAN024BTO; Start 163; Stop 187
agaacagatagtccactgagaattg

SEQ ID NO: 449564 - DNA, 25 bp, Artificial
  probe
  misc_feature (1)..(25): SEQ ID NO: 6797; WAN024BTO; Start 1877; Stop 1901
ttcttcctcttgttgatgatattga

SEQ ID NO: 449565 - DNA, 25 bp, Artificial
  probe
  misc_feature (1)..(25): SEQ ID NO: 6797; WAN024BTO; Start 162; Stop 186
aagaacagatagtccactgagaatt

SEQ ID NO: 449566 - DNA, 25 bp, Artificial
  probe
  misc_feature (1)..(25): SEQ ID NO: 6797; WAN024BTO; Start 723; Stop 747
taatgaagagaatctaggtcaggag

SEQ ID NO: 449567 - DNA, 25 bp, Artificial
  probe
  misc_feature (1)..(25): SEQ ID NO: 6797; WAN024BTO; Start 722; Stop 746
ctaatgaagagaatctaggtcagga

SEQ ID NO: 449568 - DNA, 25 bp, Artificial
  probe
  misc_feature (1)..(25): SEQ ID NO: 6797; WAN024BTO; Start 721; Stop 745
tctaatgaagagaatctaggtcagg

SEQ ID NO: 449569 - DNA, 25 bp, Artificial
  probe
  misc_feature (1)..(25): SEQ ID NO: 6797; WAN024BTO; Start 1879; Stop 1903
cttcctcttgttgatgatattgaca

SEQ ID NO: 449570 - DNA, 25 bp, Artificial
  probe
  misc_feature (1)..(25): SEQ ID NO: 6797; WAN024BTO; Start 1284; Stop 1308
tggagaattaagcgaattaacagaa

SEQ ID NO: 449571 - DNA, 25 bp, Artificial
  probe
  misc_feature (1)..(25): SEQ ID NO: 6797; WAN024BTO; Start 1281; Stop 1305
tgatggagaattaagcgaattaaca

SEQ ID NO: 449572 - DNA, 25 bp, Artificial
  probe
  misc_feature (1)..(25): SEQ ID NO: 6797; WAN024BTO; Start 2099; Stop 2123
tgtatccactctattcacagttact

SEQ ID NO: 449573 - DNA, 25 bp, Artificial
  probe
  misc_feature (1)..(25): SEQ ID NO: 6797; WAN024BTO; Start 2589; Stop 2613
gttccatgatagaagtgatgatgtt

SEQ ID NO: 449574 - DNA, 25 bp, Artificial
  probe
  misc_feature (1)..(25): SEQ ID NO: 6797; WAN024BTO; Start 1453; Stop 1477
agaagaggaggatggtctgctaata

SEQ ID NO: 449575 - DNA, 25 bp, Artificial
  probe
  misc_feature (1)..(25): SEQ ID NO: 6798; WAN024BYU; Start 44; Stop 68
gaattagtatggaattacaccaagc

SEQ ID NO: 449576 - DNA, 25 bp, Artificial
  probe
  misc_feature (1)..(25): SEQ ID NO: 6798; WAN024BYU; Start 48; Stop 72
tagtatggaattacaccaagctgac

SEQ ID NO: 449577 - DNA, 25 bp, Artificial
  probe
  misc_feature (1)..(25): SEQ ID NO: 6798; WAN024BYU; Start 47; Stop 71
ttagtatggaattacaccaagctga

SEQ ID NO: 449578 - DNA, 25 bp, Artificial
  probe
  misc_feature (1)..(25): SEQ ID NO: 6798; WAN024BYU; Start 46; Stop 70
attagtatggaattacaccaagctg

SEQ ID NO: 449579 - DNA, 25 bp, Artificial
  probe
  misc_feature (1)..(25): SEQ ID NO: 6798; WAN024BYU; Start 34; Stop 58
agcttggatagaattagtatggaat

SEQ ID NO: 449580 - DNA, 25 bp, Artificial
  probe
  misc_feature (1)..(25): SEQ ID NO: 6798; WAN024BYU; Start 35; Stop 59
gcttggatagaattagtatggaatt

SEQ ID NO: 449581 - DNA, 25 bp, Artificial
  probe
  misc_feature (1)..(25): SEQ ID NO: 6798; WAN024BYU; Start 45; Stop 69
aattagtatggaattacaccaagct

SEQ ID NO: 449582 - DNA, 25 bp, Artificial
  probe
  misc_feature (1)..(25): SEQ ID NO: 6798; WAN024BYU; Start 51; Stop 75
tatggaattacaccaagctgacgaa

SEQ ID NO: 449583 - DNA, 25 bp, Artificial
  probe
  misc_feature (1)..(25): SEQ ID NO: 6798; WAN024BYU; Start 43; Stop 67
agaattagtatggaattacaccaag

SEQ ID NO: 449584 - DNA, 25 bp, Artificial
  probe
  misc_feature (1)..(25): SEQ ID NO: 6798; WAN024BYU; Start 50; Stop 74
gtatggaattacaccaagctgacga

SEQ ID NO: 449585 - DNA, 25 bp, Artificial
  probe
  misc_feature (1)..(25): SEQ ID NO: 6798; WAN024BYU; Start 49; Stop 73
agtatggaattacaccaagctgacg

SEQ ID NO: 449586 - DNA, 25 bp, Artificial
  probe
  misc_feature (1)..(25): SEQ ID NO: 6798; WAN024BYU; Start 2; Stop 26
tggaagaaacaacatacgatattat

SEQ ID NO: 449587 - DNA, 25 bp, Artificial
  probe
  misc_feature (1)..(25): SEQ ID NO: 6798; WAN024BYU; Start 1; Stop 25
atggaagaaacaacatacgatatta

SEQ ID NO: 449588 - DNA, 25 bp, Artificial
  probe
  misc_feature (1)..(25): SEQ ID NO: 6798; WAN024BYU; Start 90; Stop 114
agaatatgggttttatcaggacaat

SEQ ID NO: 449589 - DNA, 25 bp, Artificial
  probe
  misc_feature (1)..(25): SEQ ID NO: 6798; WAN024BYU; Start 33; Stop 57
aagcttggatagaattagtatggaa

SEQ ID NO: 449590 - DNA, 25 bp, Artificial
  probe
  misc_feature (1)..(25): SEQ ID NO: 6798; WAN024BYU; Start 57; Stop 81
attacaccaagctgacgaaaataac

SEQ ID NO: 449591 - DNA, 25 bp, Artificial
  probe
  misc_feature (1)..(25): SEQ ID NO: 6798; WAN024BYU; Start 55; Stop 79
gaattacaccaagctgacgaaaata

SEQ ID NO: 449592 - DNA, 25 bp, Artificial
  probe
  misc_feature (1)..(25): SEQ ID NO: 6798; WAN024BYU; Start 3; Stop 27
ggaagaaacaacatacgatattatc

SEQ ID NO: 449593 - DNA, 25 bp, Artificial
  probe
  misc_feature (1)..(25): SEQ ID NO: 6798; WAN024BYU; Start 56; Stop 80
aattacaccaagctgacgaaaataa

SEQ ID NO: 449594 - DNA, 25 bp, Artificial
  probe
  misc_feature (1)..(25): SEQ ID NO: 6798; WAN024BYU; Start 88; Stop 112
ctagaatatgggttttatcaggaca

SEQ ID NO: 449595 - DNA, 25 bp, Artificial
  probe
  misc_feature (1)..(25): SEQ ID NO: 6798; WAN024BYU; Start 89; Stop 113
tagaatatgggttttatcaggacaa

SEQ ID NO: 449596 - DNA, 25 bp, Artificial
  probe
  misc_feature (1)..(25): SEQ ID NO: 6798; WAN024BYU; Start 52; Stop 76
atggaattacaccaagctgacgaaa

SEQ ID NO: 449597 - DNA, 25 bp, Artificial
  probe
  misc_feature (1)..(25): SEQ ID NO: 6798; WAN024BYU; Start 42; Stop 66
tagaattagtatggaattacaccaa

SEQ ID NO: 449598 - DNA, 25 bp, Artificial
  probe
  misc_feature (1)..(25): SEQ ID NO: 6798; WAN024BYU; Start 38; Stop 62
tggatagaattagtatggaattaca

SEQ ID NO: 449599 - DNA, 25 bp, Artificial
  probe
  misc_feature (1)..(25): SEQ ID NO: 6798; WAN024BYU; Start 54; Stop 78
ggaattacaccaagctgacgaaaat

SEQ ID NO: 449600 - DNA, 25 bp, Artificial
  probe
  misc_feature (1)..(25): SEQ ID NO: 6798; WAN024BYU; Start 58; Stop 82
ttacaccaagctgacgaaaataacg

SEQ ID NO: 449601 - DNA, 25 bp, Artificial
  probe
  misc_feature (1)..(25): SEQ ID NO: 6798; WAN024BYU; Start 41; Stop 65
atagaattagtatggaattacacca

SEQ ID NO: 449602 - DNA, 25 bp, Artificial
  probe
  misc_feature (1)..(25): SEQ ID NO: 6798; WAN024BYU; Start 61; Stop 85
caccaagctgacgaaaataacgatt

SEQ ID NO: 449603 - DNA, 25 bp, Artificial
  probe
  misc_feature (1)..(25): SEQ ID NO: 6798; WAN024BYU; Start 62; Stop 86
accaagctgacgaaaataacgattt

SEQ ID NO: 449604 - DNA, 25 bp, Artificial
  probe
  misc_feature (1)..(25): SEQ ID NO: 6798; WAN024BYU; Start 59; Stop 83
tacaccaagctgacgaaaataacga

SEQ ID NO: 449605 - DNA, 25 bp, Artificial
  probe
  misc_feature (1)..(25): SEQ ID NO: 6798; WAN024BYU; Start 32; Stop 56
aaagcttggatagaattagtatgga

SEQ ID NO: 449606 - DNA, 25 bp, Artificial
  probe
  misc_feature (1)..(25): SEQ ID NO: 6798; WAN024BYU; Start 60; Stop 84
acaccaagctgacgaaaataacgat

SEQ ID NO: 449607 - DNA, 25 bp, Artificial
  probe
  misc_feature (1)..(25): SEQ ID NO: 6798; WAN024BYU; Start 87; Stop 111
tctagaatatgggttttatcaggac

SEQ ID NO: 449608 - DNA, 25 bp, Artificial
  probe
  misc_feature (1)..(25): SEQ ID NO: 6799; WAN024FKX; Start 550; Stop 574
ttgctaatcactctatctcatcaag

SEQ ID NO: 449609 - DNA, 25 bp, Artificial
  probe
  misc_feature (1)..(25): SEQ ID NO: 6799; WAN024FKX; Start 665; Stop 689
ccatgttgtcttctatgtacttagg

SEQ ID NO: 449610 - DNA, 25 bp, Artificial
  probe
  misc_feature (1)..(25): SEQ ID NO: 6799; WAN024FKX; Start 574; Stop 598
gctctatattggtatccagttgctt

SEQ ID NO: 449611 - DNA, 25 bp, Artificial
  probe
  misc_feature (1)..(25): SEQ ID NO: 6799; WAN024FKX; Start 58; Stop 82
atgttagccatgaccttgttgattg

SEQ ID NO: 449612 - DNA, 25 bp, Artificial
  probe
  misc_feature (1)..(25): SEQ ID NO: 6799; WAN024FKX; Start 664; Stop 688
accatgttgtcttctatgtacttag

SEQ ID NO: 449613 - DNA, 25 bp, Artificial
  probe
  misc_feature (1)..(25): SEQ ID NO: 6799; WAN024FKX; Start 555; Stop 579
aatcactctatctcatcaagctcta

SEQ ID NO: 449614 - DNA, 25 bp, Artificial
  probe
  misc_feature (1)..(25): SEQ ID NO: 6799; WAN024FKX; Start 554; Stop 578
taatcactctatctcatcaagctct

SEQ ID NO: 449615 - DNA, 25 bp, Artificial
  probe
  misc_feature (1)..(25): SEQ ID NO: 6799; WAN024FKX; Start 293; Stop 317
aacttcaaactacagatgggacaaa

SEQ ID NO: 449616 - DNA, 25 bp, Artificial
  probe
  misc_feature (1)..(25): SEQ ID NO: 6799; WAN024FKX; Start 292; Stop 316
aaacttcaaactacagatgggacaa

SEQ ID NO: 449617 - DNA, 25 bp, Artificial
  probe
  misc_feature (1)..(25): SEQ ID NO: 6799; WAN024FKX; Start 556; Stop 580
atcactctatctcatcaagctctat

SEQ ID NO: 449618 - DNA, 25 bp, Artificial
  probe
  misc_feature (1)..(25): SEQ ID NO: 6799; WAN024FKX; Start 553; Stop 577
ctaatcactctatctcatcaagctc

SEQ ID NO: 449619 - DNA, 25 bp, Artificial
  probe
  misc_feature (1)..(25): SEQ ID NO: 6799; WAN024FKX; Start 666; Stop 690
catgttgtcttctatgtacttagga

SEQ ID NO: 449620 - DNA, 25 bp, Artificial
  probe
  misc_feature (1)..(25): SEQ ID NO: 6799; WAN024FKX; Start 4; Stop 28
gaagaaagtatcaatccaaccatca

SEQ ID NO: 449621 - DNA, 25 bp, Artificial
  probe
  misc_feature (1)..(25): SEQ ID NO: 6799; WAN024FKX; Start 294; Stop 318
acttcaaactacagatgggacaaac

SEQ ID NO: 449622 - DNA, 25 bp, Artificial
  probe
  misc_feature (1)..(25): SEQ ID NO: 6799; WAN024FKX; Start 291; Stop 315
caaacttcaaactacagatgggaca

SEQ ID NO: 449623 - DNA, 25 bp, Artificial
  probe
  misc_feature (1)..(25): SEQ ID NO: 6799; WAN024FKX; Start 662; Stop 686
ttaccatgttgtcttctatgtactt

SEQ ID NO: 449624 - DNA, 25 bp, Artificial
  probe
  misc_feature (1)..(25): SEQ ID NO: 6799; WAN024FKX; Start 519; Stop 543
aaatatctttgctggagaagtgatg

SEQ ID NO: 449625 - DNA, 25 bp, Artificial
  probe
  misc_feature (1)..(25): SEQ ID NO: 6799; WAN024FKX; Start 173; Stop 197
acttcgttattggatttacagaacc

SEQ ID NO: 449626 - DNA, 25 bp, Artificial
  probe
  misc_feature (1)..(25): SEQ ID NO: 6799; WAN024FKX; Start 520; Stop 544
aatatctttgctggagaagtgatgg

SEQ ID NO: 449627 - DNA, 25 bp, Artificial
  probe
  misc_feature (1)..(25): SEQ ID NO: 6799; WAN024FKX; Start 517; Stop 541
ggaaatatctttgctggagaagtga

SEQ ID NO: 449628 - DNA, 25 bp, Artificial
  probe
  misc_feature (1)..(25): SEQ ID NO: 6799; WAN024FKX; Start 566; Stop 590
ctcatcaagctctatattggtatcc

SEQ ID NO: 449629 - DNA, 25 bp, Artificial
  probe
  misc_feature (1)..(25): SEQ ID NO: 6799; WAN024FKX; Start 298; Stop 322
caaactacagatgggacaaaccttt

SEQ ID NO: 449630 - DNA, 25 bp, Artificial
  probe
  misc_feature (1)..(25): SEQ ID NO: 6799; WAN024FKX; Start 5; Stop 29
aagaaagtatcaatccaaccatcaa

SEQ ID NO: 449631 - DNA, 25 bp, Artificial
  probe
  misc_feature (1)..(25): SEQ ID NO: 6799; WAN024FKX; Start 518; Stop 542
gaaatatctttgctggagaagtgat

SEQ ID NO: 449632 - DNA, 25 bp, Artificial
  probe
  misc_feature (1)..(25): SEQ ID NO: 6799; WAN024FKX; Start 174; Stop 198
cttcgttattggatttacagaacct

SEQ ID NO: 449633 - DNA, 25 bp, Artificial
  probe
  misc_feature (1)..(25): SEQ ID NO: 6799; WAN024FKX; Start 548; Stop 572
gtttgctaatcactctatctcatca

SEQ ID NO: 449634 - DNA, 25 bp, Artificial
  probe
  misc_feature (1)..(25): SEQ ID NO: 6799; WAN024FKX; Start 436; Stop 460
tatatcacacctggctttatgactc

SEQ ID NO: 449635 - DNA, 25 bp, Artificial
  probe
  misc_feature (1)..(25): SEQ ID NO: 6799; WAN024FKX; Start 435; Stop 459
ctatatcacacctggctttatgact

SEQ ID NO: 449636 - DNA, 25 bp, Artificial
  probe
  misc_feature (1)..(25): SEQ ID NO: 6799; WAN024FKX; Start 551; Stop 575
tgctaatcactctatctcatcaagc

SEQ ID NO: 449637 - DNA, 25 bp, Artificial
  probe
  misc_feature (1)..(25): SEQ ID NO: 6799; WAN024FKX; Start 60; Stop 84
gttagccatgaccttgttgattgtg

SEQ ID NO: 449638 - DNA, 25 bp, Artificial
  probe
  misc_feature (1)..(25): SEQ ID NO: 6799; WAN024FKX; Start 533; Stop 557
gagaagtgatggctagtttgctaat

SEQ ID NO: 449639 - DNA, 25 bp, Artificial
  probe
  misc_feature (1)..(25): SEQ ID NO: 6799; WAN024FKX; Start 557; Stop 581
tcactctatctcatcaagctctata

SEQ ID NO: 449640 - DNA, 25 bp, Artificial
  probe
  misc_feature (1)..(25): SEQ ID NO: 6799; WAN024FKX; Start 514; Stop 538
ttcggaaatatctttgctggagaag

SEQ ID NO: 449641 - DNA, 25 bp, Artificial
  probe
  misc_feature (1)..(25): SEQ ID NO: 6800; WAN024BUN; Start 209; Stop 233
atactgaggtactgttcgcagatat

SEQ ID NO: 449642 - DNA, 25 bp, Artificial
  probe
  misc_feature (1)..(25): SEQ ID NO: 6800; WAN024BUN; Start 208; Stop 232
gatactgaggtactgttcgcagata

SEQ ID NO: 449643 - DNA, 25 bp, Artificial
  probe
  misc_feature (1)..(25): SEQ ID NO: 6800; WAN024BUN; Start 132; Stop 156
attgctgaatcttctctttggtaaa

SEQ ID NO: 449644 - DNA, 25 bp, Artificial
  probe
  misc_feature (1)..(25): SEQ ID NO: 6800; WAN024BUN; Start 131; Stop 155
aattgctgaatcttctctttggtaa

SEQ ID NO: 449645 - DNA, 25 bp, Artificial
  probe
  misc_feature (1)..(25): SEQ ID NO: 6800; WAN024BUN; Start 130; Stop 154
aaattgctgaatcttctctttggta

SEQ ID NO: 449646 - DNA, 25 bp, Artificial
  probe
  misc_feature (1)..(25): SEQ ID NO: 6800; WAN024BUN; Start 181; Stop 205
catttagatgatggagacgacttca

SEQ ID NO: 449647 - DNA, 25 bp, Artificial
  probe
  misc_feature (1)..(25): SEQ ID NO: 6800; WAN024BUN; Start 219; Stop 243
actgttcgcagatatcaagagtatc

SEQ ID NO: 449648 - DNA, 25 bp, Artificial
  probe
  misc_feature (1)..(25): SEQ ID NO: 6800; WAN024BUN; Start 217; Stop 241
gtactgttcgcagatatcaagagta

SEQ ID NO: 449649 - DNA, 25 bp, Artificial
  probe
  misc_feature (1)..(25): SEQ ID NO: 6800; WAN024BUN; Start 210; Stop 234
tactgaggtactgttcgcagatatc

SEQ ID NO: 449650 - DNA, 25 bp, Artificial
  probe
  misc_feature (1)..(25): SEQ ID NO: 6800; WAN024BUN; Start 218; Stop 242
tactgttcgcagatatcaagagtat

SEQ ID NO: 449651 - DNA, 25 bp, Artificial
  probe
  misc_feature (1)..(25): SEQ ID NO: 6800; WAN024BUN; Start 215; Stop 239
aggtactgttcgcagatatcaagag

SEQ ID NO: 449652 - DNA, 25 bp, Artificial
  probe
  misc_feature (1)..(25): SEQ ID NO: 6800; WAN024BUN; Start 214; Stop 238
gaggtactgttcgcagatatcaaga

SEQ ID NO: 449653 - DNA, 25 bp, Artificial
  probe
  misc_feature (1)..(25): SEQ ID NO: 6800; WAN024BUN; Start 216; Stop 240
ggtactgttcgcagatatcaagagt

SEQ ID NO: 449654 - DNA, 25 bp, Artificial
  probe
  misc_feature (1)..(25): SEQ ID NO: 6800; WAN024BUN; Start 213; Stop 237
tgaggtactgttcgcagatatcaag

SEQ ID NO: 449655 - DNA, 25 bp, Artificial
  probe
  misc_feature (1)..(25): SEQ ID NO: 6800; WAN024BUN; Start 212; Stop 236
ctgaggtactgttcgcagatatcaa

SEQ ID NO: 449656 - DNA, 25 bp, Artificial
  probe
  misc_feature (1)..(25): SEQ ID NO: 6800; WAN024BUN; Start 201; Stop 225
cttcatcgatactgaggtactgttc

SEQ ID NO: 449657 - DNA, 25 bp, Artificial
  probe
  misc_feature (1)..(25): SEQ ID NO: 6800; WAN024BUN; Start 180; Stop 204
tcatttagatgatggagacgacttc

SEQ ID NO: 449658 - DNA, 25 bp, Artificial
  probe
  misc_feature (1)..(25): SEQ ID NO: 6800; WAN024BUN; Start 179; Stop 203
ctcatttagatgatggagacgactt

SEQ ID NO: 449659 - DNA, 25 bp, Artificial
  probe
  misc_feature (1)..(25): SEQ ID NO: 6800; WAN024BUN; Start 182; Stop 206
atttagatgatggagacgacttcat

SEQ ID NO: 449660 - DNA, 25 bp, Artificial
  probe
  misc_feature (1)..(25): SEQ ID NO: 6800; WAN024BUN; Start 200; Stop 224
acttcatcgatactgaggtactgtt

SEQ ID NO: 449661 - DNA, 25 bp, Artificial
  probe
  misc_feature (1)..(25): SEQ ID NO: 6800; WAN024BUN; Start 129; Stop 153
aaaattgctgaatcttctctttggt

SEQ ID NO: 449662 - DNA, 25 bp, Artificial
  probe
  misc_feature (1)..(25): SEQ ID NO: 6800; WAN024BUN; Start 234; Stop 258
caagagtatctttgagtccaacaaa

SEQ ID NO: 449663 - DNA, 25 bp, Artificial
  probe
  misc_feature (1)..(25): SEQ ID NO: 6800; WAN024BUN; Start 133; Stop 157
ttgctgaatcttctctttggtaaaa

SEQ ID NO: 449664 - DNA, 25 bp, Artificial
  probe
  misc_feature (1)..(25): SEQ ID NO: 6800; WAN024BUN; Start 233; Stop 257
tcaagagtatctttgagtccaacaa

SEQ ID NO: 449665 - DNA, 25 bp, Artificial
  probe
  misc_feature (1)..(25): SEQ ID NO: 6800; WAN024BUN; Start 199; Stop 223
gacttcatcgatactgaggtactgt

SEQ ID NO: 449666 - DNA, 25 bp, Artificial
  probe
  misc_feature (1)..(25): SEQ ID NO: 6800; WAN024BUN; Start 232; Stop 256
atcaagagtatctttgagtccaaca

SEQ ID NO: 449667 - DNA, 25 bp, Artificial
  probe
  misc_feature (1)..(25): SEQ ID NO: 6800; WAN024BUN; Start 211; Stop 235
actgaggtactgttcgcagatatca

SEQ ID NO: 449668 - DNA, 25 bp, Artificial
  probe
  misc_feature (1)..(25): SEQ ID NO: 6800; WAN024BUN; Start 220; Stop 244
ctgttcgcagatatcaagagtatct

SEQ ID NO: 449669 - DNA, 25 bp, Artificial
  probe
  misc_feature (1)..(25): SEQ ID NO: 6800; WAN024BUN; Start 221; Stop 245
tgttcgcagatatcaagagtatctt

SEQ ID NO: 449670 - DNA, 25 bp, Artificial
  probe
  misc_feature (1)..(25): SEQ ID NO: 6800; WAN024BUN; Start 23; Stop 47
aaacagagtcagggtttgagtacaa

SEQ ID NO: 449671 - DNA, 25 bp, Artificial
  probe
  misc_feature (1)..(25): SEQ ID NO: 6800; WAN024BUN; Start 24; Stop 48
aacagagtcagggtttgagtacaaa

SEQ ID NO: 449672 - DNA, 25 bp, Artificial
  probe
  misc_feature (1)..(25): SEQ ID NO: 6800; WAN024BUN; Start 231; Stop 255
tatcaagagtatctttgagtccaac

SEQ ID NO: 449673 - DNA, 25 bp, Artificial
  probe
  misc_feature (1)..(25): SEQ ID NO: 6800; WAN024BUN; Start 177; Stop 201
atctcatttagatgatggagacgac

SEQ ID NO: 449674 - DNA, 25 bp, Artificial
  probe
  misc_feature (1)..(25): SEQ ID NO: 6801; WAN024FWC; Start 730; Stop 754
ggattgaatgtagtgaccttctcta

SEQ ID NO: 449675 - DNA, 25 bp, Artificial
  probe
  misc_feature (1)..(25): SEQ ID NO: 6801; WAN024FWC; Start 661; Stop 685
gatgtaacagtcaatctcaatgctt

SEQ ID NO: 449676 - DNA, 25 bp, Artificial
  probe
  misc_feature (1)..(25): SEQ ID NO: 6801; WAN024FWC; Start 610; Stop 634
gaggactatgatattggagccatta

SEQ ID NO: 449677 - DNA, 25 bp, Artificial
  probe
  misc_feature (1)..(25): SEQ ID NO: 6801; WAN024FWC; Start 660; Stop 684
tgatgtaacagtcaatctcaatgct

SEQ ID NO: 449678 - DNA, 25 bp, Artificial
  probe
  misc_feature (1)..(25): SEQ ID NO: 6801; WAN024FWC; Start 605; Stop 629
caagtgaggactatgatattggagc

SEQ ID NO: 449679 - DNA, 25 bp, Artificial
  probe
  misc_feature (1)..(25): SEQ ID NO: 6801; WAN024FWC; Start 185; Stop 209
gaggtcagtatattgagttggtaga

SEQ ID NO: 449680 - DNA, 25 bp, Artificial
  probe
  misc_feature (1)..(25): SEQ ID NO: 6801; WAN024FWC; Start 184; Stop 208
agaggtcagtatattgagttggtag

SEQ ID NO: 449681 - DNA, 25 bp, Artificial
  probe
  misc_feature (1)..(25): SEQ ID NO: 6801; WAN024FWC; Start 609; Stop 633
tgaggactatgatattggagccatt

SEQ ID NO: 449682 - DNA, 25 bp, Artificial
  probe
  misc_feature (1)..(25): SEQ ID NO: 6801; WAN024FWC; Start 611; Stop 635
aggactatgatattggagccattat

SEQ ID NO: 449683 - DNA, 25 bp, Artificial
  probe
  misc_feature (1)..(25): SEQ ID NO: 6801; WAN024FWC; Start 1258; Stop 1282
gatgaggttgttaagttggatgtgg

SEQ ID NO: 449684 - DNA, 25 bp, Artificial
  probe
  misc_feature (1)..(25): SEQ ID NO: 6801; WAN024FWC; Start 186; Stop 210
aggtcagtatattgagttggtagaa

SEQ ID NO: 449685 - DNA, 25 bp, Artificial
  probe
  misc_feature (1)..(25): SEQ ID NO: 6801; WAN024FWC; Start 183; Stop 207
aagaggtcagtatattgagttggta

SEQ ID NO: 449686 - DNA, 25 bp, Artificial
  probe
  misc_feature (1)..(25): SEQ ID NO: 6801; WAN024FWC; Start 1267; Stop 1291
gttaagttggatgtggcttatatcg

SEQ ID NO: 449687 - DNA, 25 bp, Artificial
  probe
  misc_feature (1)..(25): SEQ ID NO: 6801; WAN024FWC; Start 1264; Stop 1288
gttgttaagttggatgtggcttata

SEQ ID NO: 449688 - DNA, 25 bp, Artificial
  probe
  misc_feature (1)..(25): SEQ ID NO: 6801; WAN024FWC; Start 1257; Stop 1281
cgatgaggttgttaagttggatgtg

SEQ ID NO: 449689 - DNA, 25 bp, Artificial
  probe
  misc_feature (1)..(25): SEQ ID NO: 6801; WAN024FWC; Start 606; Stop 630
aagtgaggactatgatattggagcc

SEQ ID NO: 449690 - DNA, 25 bp, Artificial
  probe
  misc_feature (1)..(25): SEQ ID NO: 6801; WAN024FWC; Start 608; Stop 632
gtgaggactatgatattggagccat

SEQ ID NO: 449691 - DNA, 25 bp, Artificial
  probe
  misc_feature (1)..(25): SEQ ID NO: 6801; WAN024FWC; Start 612; Stop 636
ggactatgatattggagccattatt

SEQ ID NO: 449692 - DNA, 25 bp, Artificial
  probe
  misc_feature (1)..(25): SEQ ID NO: 6801; WAN024FWC; Start 1266; Stop 1290
tgttaagttggatgtggcttatatc

SEQ ID NO: 449693 - DNA, 25 bp, Artificial
  probe
  misc_feature (1)..(25): SEQ ID NO: 6801; WAN024FWC; Start 729; Stop 753
aggattgaatgtagtgaccttctct

SEQ ID NO: 449694 - DNA, 25 bp, Artificial
  probe
  misc_feature (1)..(25): SEQ ID NO: 6801; WAN024FWC; Start 728; Stop 752
caggattgaatgtagtgaccttctc

SEQ ID NO: 449695 - DNA, 25 bp, Artificial
  probe
  misc_feature (1)..(25): SEQ ID NO: 6801; WAN024FWC; Start 597; Stop 621
caatcttccaagtgaggactatgat

SEQ ID NO: 449696 - DNA, 25 bp, Artificial
  probe
  misc_feature (1)..(25): SEQ ID NO: 6801; WAN024FWC; Start 762; Stop 786
ttacaagcctagtcatgtcattact

SEQ ID NO: 449697 - DNA, 25 bp, Artificial
  probe
  misc_feature (1)..(25): SEQ ID NO: 6801; WAN024FWC; Start 17; Stop 41
tctacaatataactctggcattctt

SEQ ID NO: 449698 - DNA, 25 bp, Artificial
  probe
  misc_feature (1)..(25): SEQ ID NO: 6801; WAN024FWC; Start 16; Stop 40
ttctacaatataactctggcattct

SEQ ID NO: 449699 - DNA, 25 bp, Artificial
  probe
  misc_feature (1)..(25): SEQ ID NO: 6801; WAN024FWC; Start 1265; Stop 1289
ttgttaagttggatgtggcttatat

SEQ ID NO: 449700 - DNA, 25 bp, Artificial
  probe
  misc_feature (1)..(25): SEQ ID NO: 6801; WAN024FWC; Start 1263; Stop 1287
ggttgttaagttggatgtggcttat

SEQ ID NO: 449701 - DNA, 25 bp, Artificial
  probe
  misc_feature (1)..(25): SEQ ID NO: 6801; WAN024FWC; Start 596; Stop 620
tcaatcttccaagtgaggactatga

SEQ ID NO: 449702 - DNA, 25 bp, Artificial
  probe
  misc_feature (1)..(25): SEQ ID NO: 6801; WAN024FWC; Start 595; Stop 619
gtcaatcttccaagtgaggactatg

SEQ ID NO: 449703 - DNA, 25 bp, Artificial
  probe
  misc_feature (1)..(25): SEQ ID NO: 6801; WAN024FWC; Start 594; Stop 618
tgtcaatcttccaagtgaggactat

SEQ ID NO: 449704 - DNA, 25 bp, Artificial
  probe
  misc_feature (1)..(25): SEQ ID NO: 6801; WAN024FWC; Start 601; Stop 625
cttccaagtgaggactatgatattg

SEQ ID NO: 449705 - DNA, 25 bp, Artificial
  probe
  misc_feature (1)..(25): SEQ ID NO: 6801; WAN024FWC; Start 600; Stop 624
tcttccaagtgaggactatgatatt

SEQ ID NO: 449706 - DNA, 25 bp, Artificial
  probe
  misc_feature (1)..(25): SEQ ID NO: 6801; WAN024FWC; Start 598; Stop 622
aatcttccaagtgaggactatgata

SEQ ID NO: 449707 - DNA, 25 bp, Artificial
  probe
  misc_feature (1)..(25): SEQ ID NO: 6802; WAN024BUC; Start 2; Stop 26
tggaaggttactttgagaaggttac

SEQ ID NO: 449708 - DNA, 25 bp, Artificial
  probe
  misc_feature (1)..(25): SEQ ID NO: 6802; WAN024BUC; Start 1; Stop 25
atggaaggttactttgagaaggtta

SEQ ID NO: 449709 - DNA, 25 bp, Artificial
  probe
  misc_feature (1)..(25): SEQ ID NO: 6802; WAN024BUC; Start 8; Stop 32
gttactttgagaaggttacggtagg

SEQ ID NO: 449710 - DNA, 25 bp, Artificial
  probe
  misc_feature (1)..(25): SEQ ID NO: 6802; WAN024BUC; Start 7; Stop 31
ggttactttgagaaggttacggtag

SEQ ID NO: 449711 - DNA, 25 bp, Artificial
  probe
  misc_feature (1)..(25): SEQ ID NO: 6802; WAN024BUC; Start 15; Stop 39
tgagaaggttacggtaggtcagatt

SEQ ID NO: 449712 - DNA, 25 bp, Artificial
  probe
  misc_feature (1)..(25): SEQ ID NO: 6802; WAN024BUC; Start 14; Stop 38
ttgagaaggttacggtaggtcagat

SEQ ID NO: 449713 - DNA, 25 bp, Artificial
  probe
  misc_feature (1)..(25): SEQ ID NO: 6802; WAN024BUC; Start 9; Stop 33
ttactttgagaaggttacggtaggt

SEQ ID NO: 449714 - DNA, 25 bp, Artificial
  probe
  misc_feature (1)..(25): SEQ ID NO: 6802; WAN024BUC; Start 6; Stop 30
aggttactttgagaaggttacggta

SEQ ID NO: 449715 - DNA, 25 bp, Artificial
  probe
  misc_feature (1)..(25): SEQ ID NO: 6802; WAN024BUC; Start 4; Stop 28
gaaggttactttgagaaggttacgg

SEQ ID NO: 449716 - DNA, 25 bp, Artificial
  probe
  misc_feature (1)..(25): SEQ ID NO: 6802; WAN024BUC; Start 3; Stop 27
ggaaggttactttgagaaggttacg

SEQ ID NO: 449717 - DNA, 25 bp, Artificial
  probe
  misc_feature (1)..(25): SEQ ID NO: 6802; WAN024BUC; Start 10; Stop 34
tactttgagaaggttacggtaggtc

SEQ ID NO: 449718 - DNA, 25 bp, Artificial
  probe
  misc_feature (1)..(25): SEQ ID NO: 6802; WAN024BUC; Start 16; Stop 40
gagaaggttacggtaggtcagattt

SEQ ID NO: 449719 - DNA, 25 bp, Artificial
  probe
  misc_feature (1)..(25): SEQ ID NO: 6802; WAN024BUC; Start 5; Stop 29
aaggttactttgagaaggttacggt

SEQ ID NO: 449720 - DNA, 25 bp, Artificial
  probe
  misc_feature (1)..(25): SEQ ID NO: 6802; WAN024BUC; Start 12; Stop 36
ctttgagaaggttacggtaggtcag

SEQ ID NO: 449721 - DNA, 25 bp, Artificial
  probe
  misc_feature (1)..(25): SEQ ID NO: 6802; WAN024BUC; Start 13; Stop 37
tttgagaaggttacggtaggtcaga

SEQ ID NO: 449722 - DNA, 25 bp, Artificial
  probe
  misc_feature (1)..(25): SEQ ID NO: 6802; WAN024BUC; Start 11; Stop 35
actttgagaaggttacggtaggtca

SEQ ID NO: 449723 - DNA, 25 bp, Artificial
  probe
  misc_feature (1)..(25): SEQ ID NO: 6802; WAN024BUC; Start 17; Stop 41
agaaggttacggtaggtcagatttt

SEQ ID NO: 449724 - DNA, 25 bp, Artificial
  probe
  misc_feature (1)..(25): SEQ ID NO: 6802; WAN024BUC; Start 66; Stop 90
ttcacatagtctcctatatctaact

SEQ ID NO: 449725 - DNA, 25 bp, Artificial
  probe
  misc_feature (1)..(25): SEQ ID NO: 6802; WAN024BUC; Start 65; Stop 89
attcacatagtctcctatatctaac

SEQ ID NO: 449726 - DNA, 25 bp, Artificial
  probe
  misc_feature (1)..(25): SEQ ID NO: 6802; WAN024BUC; Start 67; Stop 91
tcacatagtctcctatatctaacta

SEQ ID NO: 449727 - DNA, 25 bp, Artificial
  probe
  misc_feature (1)..(25): SEQ ID NO: 6803; WAN024BN7; Start 1; Stop 25
atggaatatgttgaggctgttaatc

SEQ ID NO: 449728 - DNA, 25 bp, Artificial
  probe
  misc_feature (1)..(25): SEQ ID NO: 6803; WAN024BN7; Start 2; Stop 26
tggaatatgttgaggctgttaatca

SEQ ID NO: 449729 - DNA, 25 bp, Artificial
  probe
  misc_feature (1)..(25): SEQ ID NO: 6803; WAN024BN7; Start 49; Stop 73
gagaaggatattggtcatatagaga

SEQ ID NO: 449730 - DNA, 25 bp, Artificial
  probe
  misc_feature (1)..(25): SEQ ID NO: 6803; WAN024BN7; Start 48; Stop 72
agagaaggatattggtcatatagag

SEQ ID NO: 449731 - DNA, 25 bp, Artificial
  probe
  misc_feature (1)..(25): SEQ ID NO: 6803; WAN024BN7; Start 3; Stop 27
ggaatatgttgaggctgttaatcaa

SEQ ID NO: 449732 - DNA, 25 bp, Artificial
  probe
  misc_feature (1)..(25): SEQ ID NO: 6803; WAN024BN7; Start 166; Stop 190
attgattattatgaagagccagatt

SEQ ID NO: 449733 - DNA, 25 bp, Artificial
  probe
  misc_feature (1)..(25): SEQ ID NO: 6803; WAN024BN7; Start 164; Stop 188
ctattgattattatgaagagccaga

SEQ ID NO: 449734 - DNA, 25 bp, Artificial
  probe
  misc_feature (1)..(25): SEQ ID NO: 6803; WAN024BN7; Start 163; Stop 187
tctattgattattatgaagagccag

SEQ ID NO: 449735 - DNA, 25 bp, Artificial
  probe
  misc_feature (1)..(25): SEQ ID NO: 6803; WAN024BN7; Start 47; Stop 71
aagagaaggatattggtcatataga

SEQ ID NO: 449736 - DNA, 25 bp, Artificial
  probe
  misc_feature (1)..(25): SEQ ID NO: 6803; WAN024BN7; Start 50; Stop 74
agaaggatattggtcatatagagat

SEQ ID NO: 449737 - DNA, 25 bp, Artificial
  probe
  misc_feature (1)..(25): SEQ ID NO: 6803; WAN024BN7; Start 4; Stop 28
gaatatgttgaggctgttaatcaat

SEQ ID NO: 449738 - DNA, 25 bp, Artificial
  probe
  misc_feature (1)..(25): SEQ ID NO: 6803; WAN024BN7; Start 162; Stop 186
ttctattgattattatgaagagcca

SEQ ID NO: 449739 - DNA, 25 bp, Artificial
  probe
  misc_feature (1)..(25): SEQ ID NO: 6803; WAN024BN7; Start 165; Stop 189
tattgattattatgaagagccagat

SEQ ID NO: 449740 - DNA, 25 bp, Artificial
  probe
  misc_feature (1)..(25): SEQ ID NO: 6803; WAN024BN7; Start 5; Stop 29
aatatgttgaggctgttaatcaatt

SEQ ID NO: 449741 - DNA, 25 bp, Artificial
  probe
  misc_feature (1)..(25): SEQ ID NO: 6803; WAN024BN7; Start 167; Stop 191
ttgattattatgaagagccagattt

SEQ ID NO: 449742 - DNA, 25 bp, Artificial
  probe
  misc_feature (1)..(25): SEQ ID NO: 6803; WAN024BN7; Start 15; Stop 39
ggctgttaatcaatttatagagaga

SEQ ID NO: 449743 - DNA, 25 bp, Artificial
  probe
  misc_feature (1)..(25): SEQ ID NO: 6803; WAN024BN7; Start 13; Stop 37
gaggctgttaatcaatttatagaga

SEQ ID NO: 449744 - DNA, 25 bp, Artificial
  probe
  misc_feature (1)..(25): SEQ ID NO: 6803; WAN024BN7; Start 12; Stop 36
tgaggctgttaatcaatttatagag

SEQ ID NO: 449745 - DNA, 25 bp, Artificial
  probe
  misc_feature (1)..(25): SEQ ID NO: 6803; WAN024BN7; Start 14; Stop 38
aggctgttaatcaatttatagagag

SEQ ID NO: 449746 - DNA, 25 bp, Artificial
  probe
  misc_feature (1)..(25): SEQ ID NO: 6803; WAN024BN7; Start 96; Stop 120
tcatcctcatagcttgtacatatac

SEQ ID NO: 449747 - DNA, 25 bp, Artificial
  probe
  misc_feature (1)..(25): SEQ ID NO: 6803; WAN024BN7; Start 94; Stop 118
aatcatcctcatagcttgtacatat

SEQ ID NO: 449748 - DNA, 25 bp, Artificial
  probe
  misc_feature (1)..(25): SEQ ID NO: 6803; WAN024BN7; Start 53; Stop 77
aggatattggtcatatagagataga

SEQ ID NO: 449749 - DNA, 25 bp, Artificial
  probe
  misc_feature (1)..(25): SEQ ID NO: 6803; WAN024BN7; Start 33; Stop 57
agagagacattataaagagaaggat

SEQ ID NO: 449750 - DNA, 25 bp, Artificial
  probe
  misc_feature (1)..(25): SEQ ID NO: 6803; WAN024BN7; Start 95; Stop 119
atcatcctcatagcttgtacatata

SEQ ID NO: 449751 - DNA, 25 bp, Artificial
  probe
  misc_feature (1)..(25): SEQ ID NO: 6803; WAN024BN7; Start 46; Stop 70
aaagagaaggatattggtcatatag

SEQ ID NO: 449752 - DNA, 25 bp, Artificial
  probe
  misc_feature (1)..(25): SEQ ID NO: 6803; WAN024BN7; Start 16; Stop 40
gctgttaatcaatttatagagagac

SEQ ID NO: 449753 - DNA, 25 bp, Artificial
  probe
  misc_feature (1)..(25): SEQ ID NO: 6803; WAN024BN7; Start 97; Stop 121
catcctcatagcttgtacatataca

SEQ ID NO: 449754 - DNA, 25 bp, Artificial
  probe
  misc_feature (1)..(25): SEQ ID NO: 6803; WAN024BN7; Start 8; Stop 32
atgttgaggctgttaatcaatttat

SEQ ID NO: 449755 - DNA, 25 bp, Artificial
  probe
  misc_feature (1)..(25): SEQ ID NO: 6803; WAN024BN7; Start 6; Stop 30
atatgttgaggctgttaatcaattt

SEQ ID NO: 449756 - DNA, 25 bp, Artificial
  probe
  misc_feature (1)..(25): SEQ ID NO: 6803; WAN024BN7; Start 32; Stop 56
tagagagacattataaagagaagga

SEQ ID NO: 449757 - DNA, 25 bp, Artificial
  probe
  misc_feature (1)..(25): SEQ ID NO: 6803; WAN024BN7; Start 93; Stop 117
aaatcatcctcatagcttgtacata

SEQ ID NO: 449758 - DNA, 25 bp, Artificial
  probe
  misc_feature (1)..(25): SEQ ID NO: 6803; WAN024BN7; Start 168; Stop 192
tgattattatgaagagccagatttt

SEQ ID NO: 449759 - DNA, 25 bp, Artificial
  probe
  misc_feature (1)..(25): SEQ ID NO: 6803; WAN024BN7; Start 9; Stop 33
tgttgaggctgttaatcaatttata

SEQ ID NO: 449760 - DNA, 25 bp, Artificial
  probe
  misc_feature (1)..(25): SEQ ID NO: 6804; WAN024C22; Start 772; Stop 796
ggattaggaacagaaccagtgataa

SEQ ID NO: 449761 - DNA, 25 bp, Artificial
  probe
  misc_feature (1)..(25): SEQ ID NO: 6804; WAN024C22; Start 771; Stop 795
aggattaggaacagaaccagtgata

SEQ ID NO: 449762 - DNA, 25 bp, Artificial
  probe
  misc_feature (1)..(25): SEQ ID NO: 6804; WAN024C22; Start 136; Stop 160
ttaattcagaaggatacggtcatcg

SEQ ID NO: 449763 - DNA, 25 bp, Artificial
  probe
  misc_feature (1)..(25): SEQ ID NO: 6804; WAN024C22; Start 398; Stop 422
attatcaattcataggaccacgagc

SEQ ID NO: 449764 - DNA, 25 bp, Artificial
  probe
  misc_feature (1)..(25): SEQ ID NO: 6804; WAN024C22; Start 334; Stop 358
aatgaggcagtaagaattggagaag

SEQ ID NO: 449765 - DNA, 25 bp, Artificial
  probe
  misc_feature (1)..(25): SEQ ID NO: 6804; WAN024C22; Start 598; Stop 622
ctaccaggtgttatagtcagtcaag

SEQ ID NO: 449766 - DNA, 25 bp, Artificial
  probe
  misc_feature (1)..(25): SEQ ID NO: 6804; WAN024C22; Start 597; Stop 621
tctaccaggtgttatagtcagtcaa

SEQ ID NO: 449767 - DNA, 25 bp, Artificial
  probe
  misc_feature (1)..(25): SEQ ID NO: 6804; WAN024C22; Start 596; Stop 620
ttctaccaggtgttatagtcagtca

SEQ ID NO: 449768 - DNA, 25 bp, Artificial
  probe
  misc_feature (1)..(25): SEQ ID NO: 6804; WAN024C22; Start 397; Stop 421
gattatcaattcataggaccacgag

SEQ ID NO: 449769 - DNA, 25 bp, Artificial
  probe
  misc_feature (1)..(25): SEQ ID NO: 6804; WAN024C22; Start 131; Stop 155
aatgcttaattcagaaggatacggt

SEQ ID NO: 449770 - DNA, 25 bp, Artificial
  probe
  misc_feature (1)..(25): SEQ ID NO: 6804; WAN024C22; Start 767; Stop 791
aagaaggattaggaacagaaccagt

SEQ ID NO: 449771 - DNA, 25 bp, Artificial
  probe
  misc_feature (1)..(25): SEQ ID NO: 6804; WAN024C22; Start 595; Stop 619
attctaccaggtgttatagtcagtc

SEQ ID NO: 449772 - DNA, 25 bp, Artificial
  probe
  misc_feature (1)..(25): SEQ ID NO: 6804; WAN024C22; Start 134; Stop 158
gcttaattcagaaggatacggtcat

SEQ ID NO: 449773 - DNA, 25 bp, Artificial
  probe
  misc_feature (1)..(25): SEQ ID NO: 6804; WAN024C22; Start 132; Stop 156
atgcttaattcagaaggatacggtc

SEQ ID NO: 449774 - DNA, 25 bp, Artificial
  probe
  misc_feature (1)..(25): SEQ ID NO: 6804; WAN024C22; Start 770; Stop 794
aaggattaggaacagaaccagtgat

SEQ ID NO: 449775 - DNA, 25 bp, Artificial
  probe
  misc_feature (1)..(25): SEQ ID NO: 6804; WAN024C22; Start 693; Stop 717
ggctaggtatattggtcagagtaat

SEQ ID NO: 449776 - DNA, 25 bp, Artificial
  probe
  misc_feature (1)..(25): SEQ ID NO: 6804; WAN024C22; Start 135; Stop 159
cttaattcagaaggatacggtcatc

SEQ ID NO: 449777 - DNA, 25 bp, Artificial
  probe
  misc_feature (1)..(25): SEQ ID NO: 6804; WAN024C22; Start 431; Stop 455
atgtaagtgattctgtggaactcat

SEQ ID NO: 449778 - DNA, 25 bp, Artificial
  probe
  misc_feature (1)..(25): SEQ ID NO: 6804; WAN024C22; Start 430; Stop 454
aatgtaagtgattctgtggaactca

SEQ ID NO: 449779 - DNA, 25 bp, Artificial
  probe
  misc_feature (1)..(25): SEQ ID NO: 6804; WAN024C22; Start 599; Stop 623
taccaggtgttatagtcagtcaagg

SEQ ID NO: 449780 - DNA, 25 bp, Artificial
  probe
  misc_feature (1)..(25): SEQ ID NO: 6804; WAN024C22; Start 692; Stop 716
cggctaggtatattggtcagagtaa

SEQ ID NO: 449781 - DNA, 25 bp, Artificial
  probe
  misc_feature (1)..(25): SEQ ID NO: 6804; WAN024C22; Start 769; Stop 793
gaaggattaggaacagaaccagtga

SEQ ID NO: 449782 - DNA, 25 bp, Artificial
  probe
  misc_feature (1)..(25): SEQ ID NO: 6804; WAN024C22; Start 768; Stop 792
agaaggattaggaacagaaccagtg

SEQ ID NO: 449783 - DNA, 25 bp, Artificial
  probe
  misc_feature (1)..(25): SEQ ID NO: 6804; WAN024C22; Start 429; Stop 453
taatgtaagtgattctgtggaactc

SEQ ID NO: 449784 - DNA, 25 bp, Artificial
  probe
  misc_feature (1)..(25): SEQ ID NO: 6804; WAN024C22; Start 396; Stop 420
tgattatcaattcataggaccacga

SEQ ID NO: 449785 - DNA, 25 bp, Artificial
  probe
  misc_feature (1)..(25): SEQ ID NO: 6804; WAN024C22; Start 594; Stop 618
tattctaccaggtgttatagtcagt

SEQ ID NO: 449786 - DNA, 25 bp, Artificial
  probe
  misc_feature (1)..(25): SEQ ID NO: 6804; WAN024C22; Start 133; Stop 157
tgcttaattcagaaggatacggtca

SEQ ID NO: 449787 - DNA, 25 bp, Artificial
  probe
  misc_feature (1)..(25): SEQ ID NO: 6804; WAN024C22; Start 137; Stop 161
taattcagaaggatacggtcatcgg

SEQ ID NO: 449788 - DNA, 25 bp, Artificial
  probe
  misc_feature (1)..(25): SEQ ID NO: 6804; WAN024C22; Start 432; Stop 456
tgtaagtgattctgtggaactcatg

SEQ ID NO: 449789 - DNA, 25 bp, Artificial
  probe
  misc_feature (1)..(25): SEQ ID NO: 6804; WAN024C22; Start 428; Stop 452
ttaatgtaagtgattctgtggaact

SEQ ID NO: 449790 - DNA, 25 bp, Artificial
  probe
  misc_feature (1)..(25): SEQ ID NO: 6804; WAN024C22; Start 335; Stop 359
atgaggcagtaagaattggagaagg

SEQ ID NO: 449791 - DNA, 25 bp, Artificial
  probe
  misc_feature (1)..(25): SEQ ID NO: 6804; WAN024C22; Start 395; Stop 419
gtgattatcaattcataggaccacg

SEQ ID NO: 449792 - DNA, 25 bp, Artificial
  probe
  misc_feature (1)..(25): SEQ ID NO: 6804; WAN024C22; Start 584; Stop 608
caagagctattattctaccaggtgt

SEQ ID NO: 449793 - DNA, 25 bp, Artificial
  probe
  misc_feature (1)..(25): SEQ ID NO: 6805; WAN024BRV; Start 122; Stop 146
tacctacacaacttctgattatgcc

SEQ ID NO: 449794 - DNA, 25 bp, Artificial
  probe
  misc_feature (1)..(25): SEQ ID NO: 6805; WAN024BRV; Start 694; Stop 718
cataagattggacggacattaggag

SEQ ID NO: 449795 - DNA, 25 bp, Artificial
  probe
  misc_feature (1)..(25): SEQ ID NO: 6805; WAN024BRV; Start 124; Stop 148
cctacacaacttctgattatgcctt

SEQ ID NO: 449796 - DNA, 25 bp, Artificial
  probe
  misc_feature (1)..(25): SEQ ID NO: 6805; WAN024BRV; Start 695; Stop 719
ataagattggacggacattaggagt

SEQ ID NO: 449797 - DNA, 25 bp, Artificial
  probe
  misc_feature (1)..(25): SEQ ID NO: 6805; WAN024BRV; Start 696; Stop 720
taagattggacggacattaggagtt

SEQ ID NO: 449798 - DNA, 25 bp, Artificial
  probe
  misc_feature (1)..(25): SEQ ID NO: 6805; WAN024BRV; Start 339; Stop 363
ctactggaatgctgatgtgattgtt

SEQ ID NO: 449799 - DNA, 25 bp, Artificial
  probe
  misc_feature (1)..(25): SEQ ID NO: 6805; WAN024BRV; Start 121; Stop 145
atacctacacaacttctgattatgc

SEQ ID NO: 449800 - DNA, 25 bp, Artificial
  probe
  misc_feature (1)..(25): SEQ ID NO: 6805; WAN024BRV; Start 349; Stop 373
gctgatgtgattgttcattattgga

SEQ ID NO: 449801 - DNA, 25 bp, Artificial
  probe
  misc_feature (1)..(25): SEQ ID NO: 6805; WAN024BRV; Start 348; Stop 372
tgctgatgtgattgttcattattgg

SEQ ID NO: 449802 - DNA, 25 bp, Artificial
  probe
  misc_feature (1)..(25): SEQ ID NO: 6805; WAN024BRV; Start 340; Stop 364
tactggaatgctgatgtgattgttc

SEQ ID NO: 449803 - DNA, 25 bp, Artificial
  probe
  misc_feature (1)..(25): SEQ ID NO: 6805; WAN024BRV; Start 123; Stop 147
acctacacaacttctgattatgcct

SEQ ID NO: 449804 - DNA, 25 bp, Artificial
  probe
  misc_feature (1)..(25): SEQ ID NO: 6805; WAN024BRV; Start 119; Stop 143
ggatacctacacaacttctgattat

SEQ ID NO: 449805 - DNA, 25 bp, Artificial
  probe
  misc_feature (1)..(25): SEQ ID NO: 6805; WAN024BRV; Start 347; Stop 371
atgctgatgtgattgttcattattg

SEQ ID NO: 449806 - DNA, 25 bp, Artificial
  probe
  misc_feature (1)..(25): SEQ ID NO: 6805; WAN024BRV; Start 523; Stop 547
ctcaacttgtctctatataatcgca

SEQ ID NO: 449807 - DNA, 25 bp, Artificial
  probe
  misc_feature (1)..(25): SEQ ID NO: 6805; WAN024BRV; Start 693; Stop 717
gcataagattggacggacattagga

SEQ ID NO: 449808 - DNA, 25 bp, Artificial
  probe
  misc_feature (1)..(25): SEQ ID NO: 6805; WAN024BRV; Start 182; Stop 206
ctagaattgacatggaacgatcatt

SEQ ID NO: 449809 - DNA, 25 bp, Artificial
  probe
  misc_feature (1)..(25): SEQ ID NO: 6805; WAN024BRV; Start 342; Stop 366
ctggaatgctgatgtgattgttcat

SEQ ID NO: 449810 - DNA, 25 bp, Artificial
  probe
  misc_feature (1)..(25): SEQ ID NO: 6805; WAN024BRV; Start 522; Stop 546
tctcaacttgtctctatataatcgc

SEQ ID NO: 449811 - DNA, 25 bp, Artificial
  probe
  misc_feature (1)..(25): SEQ ID NO: 6805; WAN024BRV; Start 795; Stop 819
cacatctgaatatcgaccatctagt

SEQ ID NO: 449812 - DNA, 25 bp, Artificial
  probe
  misc_feature (1)..(25): SEQ ID NO: 6805; WAN024BRV; Start 350; Stop 374
ctgatgtgattgttcattattggaa

SEQ ID NO: 449813 - DNA, 25 bp, Artificial
  probe
  misc_feature (1)..(25): SEQ ID NO: 6805; WAN024BRV; Start 524; Stop 548
tcaacttgtctctatataatcgcaa

SEQ ID NO: 449814 - DNA, 25 bp, Artificial
  probe
  misc_feature (1)..(25): SEQ ID NO: 6805; WAN024BRV; Start 707; Stop 731
ggacattaggagtttcaacagtagt

SEQ ID NO: 449815 - DNA, 25 bp, Artificial
  probe
  misc_feature (1)..(25): SEQ ID NO: 6805; WAN024BRV; Start 118; Stop 142
gggatacctacacaacttctgatta

SEQ ID NO: 449816 - DNA, 25 bp, Artificial
  probe
  misc_feature (1)..(25): SEQ ID NO: 6805; WAN024BRV; Start 1151; Stop 1175
gttgccttctgaatacacgaattgg

SEQ ID NO: 449817 - DNA, 25 bp, Artificial
  probe
  misc_feature (1)..(25): SEQ ID NO: 6805; WAN024BRV; Start 1150; Stop 1174
ggttgccttctgaatacacgaattg

SEQ ID NO: 449818 - DNA, 25 bp, Artificial
  probe
  misc_feature (1)..(25): SEQ ID NO: 6805; WAN024BRV; Start 712; Stop 736
ttaggagtttcaacagtagtaggtg

SEQ ID NO: 449819 - DNA, 25 bp, Artificial
  probe
  misc_feature (1)..(25): SEQ ID NO: 6805; WAN024BRV; Start 103; Stop 127
atctggaagtttagtgggataccta

SEQ ID NO: 449820 - DNA, 25 bp, Artificial
  probe
  misc_feature (1)..(25): SEQ ID NO: 6805; WAN024BRV; Start 794; Stop 818
tcacatctgaatatcgaccatctag

SEQ ID NO: 449821 - DNA, 25 bp, Artificial
  probe
  misc_feature (1)..(25): SEQ ID NO: 6805; WAN024BRV; Start 131; Stop 155
aacttctgattatgcctttgtggat

SEQ ID NO: 449822 - DNA, 25 bp, Artificial
  probe
  misc_feature (1)..(25): SEQ ID NO: 6805; WAN024BRV; Start 125; Stop 149
ctacacaacttctgattatgccttt

SEQ ID NO: 449823 - DNA, 25 bp, Artificial
  probe
  misc_feature (1)..(25): SEQ ID NO: 6805; WAN024BRV; Start 249; Stop 273
tgctttgttagatatagttacggga

SEQ ID NO: 449824 - DNA, 25 bp, Artificial
  probe
  misc_feature (1)..(25): SEQ ID NO: 6805; WAN024BRV; Start 120; Stop 144
gatacctacacaacttctgattatg

SEQ ID NO: 449825 - DNA, 25 bp, Artificial
  probe
  misc_feature (1)..(25): SEQ ID NO: 6805; WAN024BRV; Start 1153; Stop 1177
tgccttctgaatacacgaattggaa

SEQ ID NO: 449826 - DNA, 25 bp, Artificial
  probe
  misc_feature (1)..(25): SEQ ID NO: 6806; WAN024DKX; Start 125; Stop 149
agtggctagaaggtaaccgtaataa

SEQ ID NO: 449827 - DNA, 25 bp, Artificial
  probe
  misc_feature (1)..(25): SEQ ID NO: 6806; WAN024DKX; Start 124; Stop 148
gagtggctagaaggtaaccgtaata

SEQ ID NO: 449828 - DNA, 25 bp, Artificial
  probe
  misc_feature (1)..(25): SEQ ID NO: 6806; WAN024DKX; Start 147; Stop 171
taaagaaatgggaatatggctacct

SEQ ID NO: 449829 - DNA, 25 bp, Artificial
  probe
  misc_feature (1)..(25): SEQ ID NO: 6806; WAN024DKX; Start 151; Stop 175
gaaatgggaatatggctacctgaaa

SEQ ID NO: 449830 - DNA, 25 bp, Artificial
  probe
  misc_feature (1)..(25): SEQ ID NO: 6806; WAN024DKX; Start 148; Stop 172
aaagaaatgggaatatggctacctg

SEQ ID NO: 449831 - DNA, 25 bp, Artificial
  probe
  misc_feature (1)..(25): SEQ ID NO: 6806; WAN024DKX; Start 199; Stop 223
gtattgtttggtgaatcaggttgtg

SEQ ID NO: 449832 - DNA, 25 bp, Artificial
  probe
  misc_feature (1)..(25): SEQ ID NO: 6806; WAN024DKX; Start 135; Stop 159
aggtaaccgtaataaagaaatggga

SEQ ID NO: 449833 - DNA, 25 bp, Artificial
  probe
  misc_feature (1)..(25): SEQ ID NO: 6806; WAN024DKX; Start 128; Stop 152
ggctagaaggtaaccgtaataaaga

SEQ ID NO: 449834 - DNA, 25 bp, Artificial
  probe
  misc_feature (1)..(25): SEQ ID NO: 6806; WAN024DKX; Start 127; Stop 151
tggctagaaggtaaccgtaataaag

SEQ ID NO: 449835 - DNA, 25 bp, Artificial
  probe
  misc_feature (1)..(25): SEQ ID NO: 6806; WAN024DKX; Start 193; Stop 217
cagttcgtattgtttggtgaatcag

SEQ ID NO: 449836 - DNA, 25 bp, Artificial
  probe
  misc_feature (1)..(25): SEQ ID NO: 6806; WAN024DKX; Start 126; Stop 150
gtggctagaaggtaaccgtaataaa

SEQ ID NO: 449837 - DNA, 25 bp, Artificial
  probe
  misc_feature (1)..(25): SEQ ID NO: 6806; WAN024DKX; Start 235; Stop 259
ttgaatctgcgattgagactgaatg

SEQ ID NO: 449838 - DNA, 25 bp, Artificial
  probe
  misc_feature (1)..(25): SEQ ID NO: 6806; WAN024DKX; Start 146; Stop 170
ataaagaaatgggaatatggctacc

SEQ ID NO: 449839 - DNA, 25 bp, Artificial
  probe
  misc_feature (1)..(25): SEQ ID NO: 6806; WAN024DKX; Start 237; Stop 261
gaatctgcgattgagactgaatgag

SEQ ID NO: 449840 - DNA, 25 bp, Artificial
  probe
  misc_feature (1)..(25): SEQ ID NO: 6806; WAN024DKX; Start 136; Stop 160
ggtaaccgtaataaagaaatgggaa

SEQ ID NO: 449841 - DNA, 25 bp, Artificial
  probe
  misc_feature (1)..(25): SEQ ID NO: 6806; WAN024DKX; Start 196; Stop 220
ttcgtattgtttggtgaatcaggtt

SEQ ID NO: 449842 - DNA, 25 bp, Artificial
  probe
  misc_feature (1)..(25): SEQ ID NO: 6806; WAN024DKX; Start 150; Stop 174
agaaatgggaatatggctacctgaa

SEQ ID NO: 449843 - DNA, 25 bp, Artificial
  probe
  misc_feature (1)..(25): SEQ ID NO: 6806; WAN024DKX; Start 149; Stop 173
aagaaatgggaatatggctacctga

SEQ ID NO: 449844 - DNA, 25 bp, Artificial
  probe
  misc_feature (1)..(25): SEQ ID NO: 6806; WAN024DKX; Start 134; Stop 158
aaggtaaccgtaataaagaaatggg

SEQ ID NO: 449845 - DNA, 25 bp, Artificial
  probe
  misc_feature (1)..(25): SEQ ID NO: 6806; WAN024DKX; Start 391; Stop 415
gtgacctgtagcgtgaataatcctg

SEQ ID NO: 449846 - DNA, 25 bp, Artificial
  probe
  misc_feature (1)..(25): SEQ ID NO: 6806; WAN024DKX; Start 142; Stop 166
cgtaataaagaaatgggaatatggc

SEQ ID NO: 449847 - DNA, 25 bp, Artificial
  probe
  misc_feature (1)..(25): SEQ ID NO: 6806; WAN024DKX; Start 194; Stop 218
agttcgtattgtttggtgaatcagg

SEQ ID NO: 449848 - DNA, 25 bp, Artificial
  probe
  misc_feature (1)..(25): SEQ ID NO: 6806; WAN024DKX; Start 191; Stop 215
tacagttcgtattgtttggtgaatc

SEQ ID NO: 449849 - DNA, 25 bp, Artificial
  probe
  misc_feature (1)..(25): SEQ ID NO: 6806; WAN024DKX; Start 197; Stop 221
tcgtattgtttggtgaatcaggttg

SEQ ID NO: 449850 - DNA, 25 bp, Artificial
  probe
  misc_feature (1)..(25): SEQ ID NO: 6806; WAN024DKX; Start 388; Stop 412
ctggtgacctgtagcgtgaataatc

SEQ ID NO: 449851 - DNA, 25 bp, Artificial
  probe
  misc_feature (1)..(25): SEQ ID NO: 6806; WAN024DKX; Start 129; Stop 153
gctagaaggtaaccgtaataaagaa

SEQ ID NO: 449852 - DNA, 25 bp, Artificial
  probe
  misc_feature (1)..(25): SEQ ID NO: 6806; WAN024DKX; Start 236; Stop 260
tgaatctgcgattgagactgaatga

SEQ ID NO: 449853 - DNA, 25 bp, Artificial
  probe
  misc_feature (1)..(25): SEQ ID NO: 6806; WAN024DKX; Start 195; Stop 219
gttcgtattgtttggtgaatcaggt

SEQ ID NO: 449854 - DNA, 25 bp, Artificial
  probe
  misc_feature (1)..(25): SEQ ID NO: 6806; WAN024DKX; Start 291; Stop 315
ctactccattcgtccatctgaaaga

SEQ ID NO: 449855 - DNA, 25 bp, Artificial
  probe
  misc_feature (1)..(25): SEQ ID NO: 6806; WAN024DKX; Start 198; Stop 222
cgtattgtttggtgaatcaggttgt

SEQ ID NO: 449856 - DNA, 25 bp, Artificial
  probe
  misc_feature (1)..(25): SEQ ID NO: 6806; WAN024DKX; Start 192; Stop 216
acagttcgtattgtttggtgaatca

SEQ ID NO: 449857 - DNA, 25 bp, Artificial
  probe
  misc_feature (1)..(25): SEQ ID NO: 6806; WAN024DKX; Start 141; Stop 165
ccgtaataaagaaatgggaatatgg

SEQ ID NO: 449858 - DNA, 25 bp, Artificial
  probe
  misc_feature (1)..(25): SEQ ID NO: 6806; WAN024DKX; Start 189; Stop 213
gatacagttcgtattgtttggtgaa

SEQ ID NO: 449859 - DNA, 25 bp, Artificial
  probe
  misc_feature (1)..(25): SEQ ID NO: 6807; WAN024BZZ; Start 451; Stop 475
tctagtgatgatgtgttgtatctcc

SEQ ID NO: 449860 - DNA, 25 bp, Artificial
  probe
  misc_feature (1)..(25): SEQ ID NO: 6807; WAN024BZZ; Start 685; Stop 709
agatgtattattgtaggtggagaga

SEQ ID NO: 449861 - DNA, 25 bp, Artificial
  probe
  misc_feature (1)..(25): SEQ ID NO: 6807; WAN024BZZ; Start 963; Stop 987
tggtgaatggttatatacaggagat

SEQ ID NO: 449862 - DNA, 25 bp, Artificial
  probe
  misc_feature (1)..(25): SEQ ID NO: 6807; WAN024BZZ; Start 221; Stop 245
tgtctgatgttgaagcagtattaac

SEQ ID NO: 449863 - DNA, 25 bp, Artificial
  probe
  misc_feature (1)..(25): SEQ ID NO: 6807; WAN024BZZ; Start 959; Stop 983
acactggtgaatggttatatacagg

SEQ ID NO: 449864 - DNA, 25 bp, Artificial
  probe
  misc_feature (1)..(25): SEQ ID NO: 6807; WAN024BZZ; Start 142; Stop 166
aatcttatgctacaaggtaaggttg

SEQ ID NO: 449865 - DNA, 25 bp, Artificial
  probe
  misc_feature (1)..(25): SEQ ID NO: 6807; WAN024BZZ; Start 960; Stop 984
cactggtgaatggttatatacagga

SEQ ID NO: 449866 - DNA, 25 bp, Artificial
  probe
  misc_feature (1)..(25): SEQ ID NO: 6807; WAN024BZZ; Start 961; Stop 985
actggtgaatggttatatacaggag

SEQ ID NO: 449867 - DNA, 25 bp, Artificial
  probe
  misc_feature (1)..(25): SEQ ID NO: 6807; WAN024BZZ; Start 684; Stop 708
aagatgtattattgtaggtggagag

SEQ ID NO: 449868 - DNA, 25 bp, Artificial
  probe
  misc_feature (1)..(25): SEQ ID NO: 6807; WAN024BZZ; Start 450; Stop 474
atctagtgatgatgtgttgtatctc

SEQ ID NO: 449869 - DNA, 25 bp, Artificial
  probe
  misc_feature (1)..(25): SEQ ID NO: 6807; WAN024BZZ; Start 220; Stop 244
ttgtctgatgttgaagcagtattaa

SEQ ID NO: 449870 - DNA, 25 bp, Artificial
  probe
  misc_feature (1)..(25): SEQ ID NO: 6807; WAN024BZZ; Start 962; Stop 986
ctggtgaatggttatatacaggaga

SEQ ID NO: 449871 - DNA, 25 bp, Artificial
  probe
  misc_feature (1)..(25): SEQ ID NO: 6807; WAN024BZZ; Start 686; Stop 710
gatgtattattgtaggtggagagat

SEQ ID NO: 449872 - DNA, 25 bp, Artificial
  probe
  misc_feature (1)..(25): SEQ ID NO: 6807; WAN024BZZ; Start 886; Stop 910
atagataatgatggtaatggcgata

SEQ ID NO: 449873 - DNA, 25 bp, Artificial
  probe
  misc_feature (1)..(25): SEQ ID NO: 6807; WAN024BZZ; Start 885; Stop 909
tatagataatgatggtaatggcgat

SEQ ID NO: 449874 - DNA, 25 bp, Artificial
  probe
  misc_feature (1)..(25): SEQ ID NO: 6807; WAN024BZZ; Start 887; Stop 911
tagataatgatggtaatggcgatat

SEQ ID NO: 449875 - DNA, 25 bp, Artificial
  probe
  misc_feature (1)..(25): SEQ ID NO: 6807; WAN024BZZ; Start 884; Stop 908
atatagataatgatggtaatggcga

SEQ ID NO: 449876 - DNA, 25 bp, Artificial
  probe
  misc_feature (1)..(25): SEQ ID NO: 6807; WAN024BZZ; Start 213; Stop 237
tttgaatttgtctgatgttgaagca

SEQ ID NO: 449877 - DNA, 25 bp, Artificial
  probe
  misc_feature (1)..(25): SEQ ID NO: 6807; WAN024BZZ; Start 895; Stop 919
gatggtaatggcgatatctggataa

SEQ ID NO: 449878 - DNA, 25 bp, Artificial
  probe
  misc_feature (1)..(25): SEQ ID NO: 6807; WAN024BZZ; Start 891; Stop 915
taatgatggtaatggcgatatctgg

SEQ ID NO: 449879 - DNA, 25 bp, Artificial
  probe
  misc_feature (1)..(25): SEQ ID NO: 6807; WAN024BZZ; Start 598; Stop 622
gatgcaacaataacggttatggtac

SEQ ID NO: 449880 - DNA, 25 bp, Artificial
  probe
  misc_feature (1)..(25): SEQ ID NO: 6807; WAN024BZZ; Start 578; Stop 602
ttaaggaacttcaactaaacgatgc

SEQ ID NO: 449881 - DNA, 25 bp, Artificial
  probe
  misc_feature (1)..(25): SEQ ID NO: 6807; WAN024BZZ; Start 687; Stop 711
atgtattattgtaggtggagagatt

SEQ ID NO: 449882 - DNA, 25 bp, Artificial
  probe
  misc_feature (1)..(25): SEQ ID NO: 6807; WAN024BZZ; Start 970; Stop 994
tggttatatacaggagatagaggat

SEQ ID NO: 449883 - DNA, 25 bp, Artificial
  probe
  misc_feature (1)..(25): SEQ ID NO: 6807; WAN024BZZ; Start 969; Stop 993
atggttatatacaggagatagagga

SEQ ID NO: 449884 - DNA, 25 bp, Artificial
  probe
  misc_feature (1)..(25): SEQ ID NO: 6807; WAN024BZZ; Start 957; Stop 981
atacactggtgaatggttatataca

SEQ ID NO: 449885 - DNA, 25 bp, Artificial
  probe
  misc_feature (1)..(25): SEQ ID NO: 6807; WAN024BZZ; Start 87; Stop 111
gaataggatagcaattataggagga

SEQ ID NO: 449886 - DNA, 25 bp, Artificial
  probe
  misc_feature (1)..(25): SEQ ID NO: 6807; WAN024BZZ; Start 86; Stop 110
agaataggatagcaattataggagg

SEQ ID NO: 449887 - DNA, 25 bp, Artificial
  probe
  misc_feature (1)..(25): SEQ ID NO: 6807; WAN024BZZ; Start 894; Stop 918
tgatggtaatggcgatatctggata

SEQ ID NO: 449888 - DNA, 25 bp, Artificial
  probe
  misc_feature (1)..(25): SEQ ID NO: 6807; WAN024BZZ; Start 452; Stop 476
ctagtgatgatgtgttgtatctccc

SEQ ID NO: 449889 - DNA, 25 bp, Artificial
  probe
  misc_feature (1)..(25): SEQ ID NO: 6807; WAN024BZZ; Start 958; Stop 982
tacactggtgaatggttatatacag

SEQ ID NO: 449890 - DNA, 25 bp, Artificial
  probe
  misc_feature (1)..(25): SEQ ID NO: 6807; WAN024BZZ; Start 964; Stop 988
ggtgaatggttatatacaggagata

SEQ ID NO: 449891 - DNA, 25 bp, Artificial
  probe
  misc_feature (1)..(25): SEQ ID NO: 6807; WAN024BZZ; Start 890; Stop 914
ataatgatggtaatggcgatatctg

SEQ ID NO: 449892 - DNA, 25 bp, Artificial
  probe
  misc_feature (1)..(25): SEQ ID NO: 6808; WAN024DHF; Start 70; Stop 94
cccactcagaagactctaaataagg

SEQ ID NO: 449893 - DNA, 25 bp, Artificial
  probe
  misc_feature (1)..(25): SEQ ID NO: 6808; WAN024DHF; Start 71; Stop 95
ccactcagaagactctaaataagga

SEQ ID NO: 449894 - DNA, 25 bp, Artificial
  probe
  misc_feature (1)..(25): SEQ ID NO: 6808; WAN024DHF; Start 72; Stop 96
cactcagaagactctaaataaggat

SEQ ID NO: 449895 - DNA, 25 bp, Artificial
  probe
  misc_feature (1)..(25): SEQ ID NO: 6808; WAN024DHF; Start 73; Stop 97
actcagaagactctaaataaggatt

SEQ ID NO: 449896 - DNA, 25 bp, Artificial
  probe
  misc_feature (1)..(25): SEQ ID NO: 6808; WAN024DHF; Start 69; Stop 93
ccccactcagaagactctaaataag

SEQ ID NO: 449897 - DNA, 25 bp, Artificial
  probe
  misc_feature (1)..(25): SEQ ID NO: 6808; WAN024DHF; Start 67; Stop 91
atccccactcagaagactctaaata

SEQ ID NO: 449898 - DNA, 25 bp, Artificial
  probe
  misc_feature (1)..(25): SEQ ID NO: 6808; WAN024DHF; Start 68; Stop 92
tccccactcagaagactctaaataa

SEQ ID NO: 449899 - DNA, 25 bp, Artificial
  probe
  misc_feature (1)..(25): SEQ ID NO: 6808; WAN024DHF; Start 66; Stop 90
catccccactcagaagactctaaat

SEQ ID NO: 449900 - DNA, 25 bp, Artificial
  probe
  misc_feature (1)..(25): SEQ ID NO: 6808; WAN024DHF; Start 2; Stop 26
tggaatttgataacggtcataatat

SEQ ID NO: 449901 - DNA, 25 bp, Artificial
  probe
  misc_feature (1)..(25): SEQ ID NO: 6808; WAN024DHF; Start 1; Stop 25
atggaatttgataacggtcataata

SEQ ID NO: 449902 - DNA, 25 bp, Artificial
  probe
  misc_feature (1)..(25): SEQ ID NO: 6808; WAN024DHF; Start 87; Stop 111
aaataaggatttactaaaccaccaa

SEQ ID NO: 449903 - DNA, 25 bp, Artificial
  probe
  misc_feature (1)..(25): SEQ ID NO: 6808; WAN024DHF; Start 74; Stop 98
ctcagaagactctaaataaggattt

SEQ ID NO: 449904 - DNA, 25 bp, Artificial
  probe
  misc_feature (1)..(25): SEQ ID NO: 6808; WAN024DHF; Start 3; Stop 27
ggaatttgataacggtcataatatc

SEQ ID NO: 449905 - DNA, 25 bp, Artificial
  probe
  misc_feature (1)..(25): SEQ ID NO: 6808; WAN024DHF; Start 65; Stop 89
ccatccccactcagaagactctaaa

SEQ ID NO: 449906 - DNA, 25 bp, Artificial
  probe
  misc_feature (1)..(25): SEQ ID NO: 6808; WAN024DHF; Start 4; Stop 28
gaatttgataacggtcataatatct

SEQ ID NO: 449907 - DNA, 25 bp, Artificial
  probe
  misc_feature (1)..(25): SEQ ID NO: 6808; WAN024DHF; Start 86; Stop 110
taaataaggatttactaaaccacca

SEQ ID NO: 449908 - DNA, 25 bp, Artificial
  probe
  misc_feature (1)..(25): SEQ ID NO: 6808; WAN024DHF; Start 56; Stop 80
atcaatttgccatccccactcagaa

SEQ ID NO: 449909 - DNA, 25 bp, Artificial
  probe
  misc_feature (1)..(25): SEQ ID NO: 6808; WAN024DHF; Start 85; Stop 109
ctaaataaggatttactaaaccacc

SEQ ID NO: 449910 - DNA, 25 bp, Artificial
  probe
  misc_feature (1)..(25): SEQ ID NO: 6808; WAN024DHF; Start 76; Stop 100
cagaagactctaaataaggatttac

SEQ ID NO: 449911 - DNA, 25 bp, Artificial
  probe
  misc_feature (1)..(25): SEQ ID NO: 6808; WAN024DHF; Start 59; Stop 83
aatttgccatccccactcagaagac

SEQ ID NO: 449912 - DNA, 25 bp, Artificial
  probe
  misc_feature (1)..(25): SEQ ID NO: 6808; WAN024DHF; Start 58; Stop 82
caatttgccatccccactcagaaga

SEQ ID NO: 449913 - DNA, 25 bp, Artificial
  probe
  misc_feature (1)..(25): SEQ ID NO: 6808; WAN024DHF; Start 57; Stop 81
tcaatttgccatccccactcagaag

SEQ ID NO: 449914 - DNA, 25 bp, Artificial
  probe
  misc_feature (1)..(25): SEQ ID NO: 6808; WAN024DHF; Start 55; Stop 79
gatcaatttgccatccccactcaga

SEQ ID NO: 449915 - DNA, 25 bp, Artificial
  probe
  misc_feature (1)..(25): SEQ ID NO: 6808; WAN024DHF; Start 51; Stop 75
attggatcaatttgccatccccact

SEQ ID NO: 449916 - DNA, 25 bp, Artificial
  probe
  misc_feature (1)..(25): SEQ ID NO: 6808; WAN024DHF; Start 50; Stop 74
aattggatcaatttgccatccccac

SEQ ID NO: 449917 - DNA, 25 bp, Artificial
  probe
  misc_feature (1)..(25): SEQ ID NO: 6808; WAN024DHF; Start 49; Stop 73
caattggatcaatttgccatcccca

SEQ ID NO: 449918 - DNA, 25 bp, Artificial
  probe
  misc_feature (1)..(25): SEQ ID NO: 6810; WAN024C53; Start 178; Stop 202
attggaattagcaatgagattgtcg

SEQ ID NO: 449919 - DNA, 25 bp, Artificial
  probe
  misc_feature (1)..(25): SEQ ID NO: 6810; WAN024C53; Start 180; Stop 204
tggaattagcaatgagattgtcgta

SEQ ID NO: 449920 - DNA, 25 bp, Artificial
  probe
  misc_feature (1)..(25): SEQ ID NO: 6810; WAN024C53; Start 181; Stop 205
ggaattagcaatgagattgtcgtat

SEQ ID NO: 449921 - DNA, 25 bp, Artificial
  probe
  misc_feature (1)..(25): SEQ ID NO: 6810; WAN024C53; Start 179; Stop 203
ttggaattagcaatgagattgtcgt

SEQ ID NO: 449922 - DNA, 25 bp, Artificial
  probe
  misc_feature (1)..(25): SEQ ID NO: 6810; WAN024C53; Start 177; Stop 201
aattggaattagcaatgagattgtc

SEQ ID NO: 449923 - DNA, 25 bp, Artificial
  probe
  misc_feature (1)..(25): SEQ ID NO: 6810; WAN024C53; Start 182; Stop 206
gaattagcaatgagattgtcgtatt

SEQ ID NO: 449924 - DNA, 25 bp, Artificial
  probe
  misc_feature (1)..(25): SEQ ID NO: 6810; WAN024C53; Start 129; Stop 153
ttcatctaatgcaaatcgaagaacc

SEQ ID NO: 449925 - DNA, 25 bp, Artificial
  probe
  misc_feature (1)..(25): SEQ ID NO: 6810; WAN024C53; Start 176; Stop 200
taattggaattagcaatgagattgt

SEQ ID NO: 449926 - DNA, 25 bp, Artificial
  probe
  misc_feature (1)..(25): SEQ ID NO: 6810; WAN024C53; Start 130; Stop 154
tcatctaatgcaaatcgaagaaccc

SEQ ID NO: 449927 - DNA, 25 bp, Artificial
  probe
  misc_feature (1)..(25): SEQ ID NO: 6810; WAN024C53; Start 128; Stop 152
tttcatctaatgcaaatcgaagaac

SEQ ID NO: 449928 - DNA, 25 bp, Artificial
  probe
  misc_feature (1)..(25): SEQ ID NO: 6810; WAN024C53; Start 54; Stop 78
tcctaatactacaactaagaaacct

SEQ ID NO: 449929 - DNA, 25 bp, Artificial
  probe
  misc_feature (1)..(25): SEQ ID NO: 6810; WAN024C53; Start 184; Stop 208
attagcaatgagattgtcgtattaa

SEQ ID NO: 449930 - DNA, 25 bp, Artificial
  probe
  misc_feature (1)..(25): SEQ ID NO: 6810; WAN024C53; Start 183; Stop 207
aattagcaatgagattgtcgtatta

SEQ ID NO: 449931 - DNA, 25 bp, Artificial
  probe
  misc_feature (1)..(25): SEQ ID NO: 6810; WAN024C53; Start 92; Stop 116
tccagccaattgaatatactatact

SEQ ID NO: 449932 - DNA, 25 bp, Artificial
  probe
  misc_feature (1)..(25): SEQ ID NO: 6810; WAN024C53; Start 55; Stop 79
cctaatactacaactaagaaacctt

SEQ ID NO: 449933 - DNA, 25 bp, Artificial
  probe
  misc_feature (1)..(25): SEQ ID NO: 6810; WAN024C53; Start 53; Stop 77
ttcctaatactacaactaagaaacc

SEQ ID NO: 449934 - DNA, 25 bp, Artificial
  probe
  misc_feature (1)..(25): SEQ ID NO: 6810; WAN024C53; Start 175; Stop 199
ataattggaattagcaatgagattg

SEQ ID NO: 449935 - DNA, 25 bp, Artificial
  probe
  misc_feature (1)..(25): SEQ ID NO: 6810; WAN024C53; Start 185; Stop 209
ttagcaatgagattgtcgtattaaa

SEQ ID NO: 449936 - DNA, 25 bp, Artificial
  probe
  misc_feature (1)..(25): SEQ ID NO: 6810; WAN024C53; Start 91; Stop 115
ttccagccaattgaatatactatac

SEQ ID NO: 449937 - DNA, 25 bp, Artificial
  probe
  misc_feature (1)..(25): SEQ ID NO: 6810; WAN024C53; Start 187; Stop 211
agcaatgagattgtcgtattaaata

SEQ ID NO: 449938 - DNA, 25 bp, Artificial
  probe
  misc_feature (1)..(25): SEQ ID NO: 6810; WAN024C53; Start 186; Stop 210
tagcaatgagattgtcgtattaaat

SEQ ID NO: 449939 - DNA, 25 bp, Artificial
  probe
  misc_feature (1)..(25): SEQ ID NO: 6810; WAN024C53; Start 2; Stop 26
tggaattttctttaagtaatgggaa

SEQ ID NO: 449940 - DNA, 25 bp, Artificial
  probe
  misc_feature (1)..(25): SEQ ID NO: 6810; WAN024C53; Start 93; Stop 117
ccagccaattgaatatactatacta

SEQ ID NO: 449941 - DNA, 25 bp, Artificial
  probe
  misc_feature (1)..(25): SEQ ID NO: 6810; WAN024C53; Start 1; Stop 25
atggaattttctttaagtaatggga

SEQ ID NO: 449942 - DNA, 25 bp, Artificial
  probe
  misc_feature (1)..(25): SEQ ID NO: 6810; WAN024C53; Start 174; Stop 198
aataattggaattagcaatgagatt

SEQ ID NO: 449943 - DNA, 25 bp, Artificial
  probe
  misc_feature (1)..(25): SEQ ID NO: 6810; WAN024C53; Start 171; Stop 195
tgaaataattggaattagcaatgag

SEQ ID NO: 449944 - DNA, 25 bp, Artificial
  probe
  misc_feature (1)..(25): SEQ ID NO: 6810; WAN024C53; Start 188; Stop 212
gcaatgagattgtcgtattaaataa

SEQ ID NO: 449945 - DNA, 25 bp, Artificial
  probe
  misc_feature (1)..(25): SEQ ID NO: 6810; WAN024C53; Start 131; Stop 155
catctaatgcaaatcgaagaacccc

SEQ ID NO: 449946 - DNA, 25 bp, Artificial
  probe
  misc_feature (1)..(25): SEQ ID NO: 6810; WAN024C53; Start 127; Stop 151
ttttcatctaatgcaaatcgaagaa

SEQ ID NO: 449947 - DNA, 25 bp, Artificial
  probe
  misc_feature (1)..(25): SEQ ID NO: 6810; WAN024C53; Start 132; Stop 156
atctaatgcaaatcgaagaacccct

SEQ ID NO: 449948 - DNA, 25 bp, Artificial
  probe
  misc_feature (1)..(25): SEQ ID NO: 6810; WAN024C53; Start 172; Stop 196
gaaataattggaattagcaatgaga

SEQ ID NO: 449949 - DNA, 25 bp, Artificial
  probe
  misc_feature (1)..(25): SEQ ID NO: 6810; WAN024C53; Start 133; Stop 157
tctaatgcaaatcgaagaacccctt

SEQ ID NO: 449950 - DNA, 25 bp, Artificial
  probe
  misc_feature (1)..(25): SEQ ID NO: 6810; WAN024C53; Start 148; Stop 172
agaaccccttcagaaatattaattg

SEQ ID NO: 449951 - DNA, 25 bp, Artificial
  probe
  misc_feature (1)..(25): SEQ ID NO: 6811; WAN024BVL; Start 64; Stop 88
gaaggcttagataaggcaatggatt

SEQ ID NO: 449952 - DNA, 25 bp, Artificial
  probe
  misc_feature (1)..(25): SEQ ID NO: 6811; WAN024BVL; Start 65; Stop 89
aaggcttagataaggcaatggattg

SEQ ID NO: 449953 - DNA, 25 bp, Artificial
  probe
  misc_feature (1)..(25): SEQ ID NO: 6811; WAN024BVL; Start 96; Stop 120
aattagacctattcttgagcagatt

SEQ ID NO: 449954 - DNA, 25 bp, Artificial
  probe
  misc_feature (1)..(25): SEQ ID NO: 6811; WAN024BVL; Start 63; Stop 87
ggaaggcttagataaggcaatggat

SEQ ID NO: 449955 - DNA, 25 bp, Artificial
  probe
  misc_feature (1)..(25): SEQ ID NO: 6811; WAN024BVL; Start 93; Stop 117
gcaaattagacctattcttgagcag

SEQ ID NO: 449956 - DNA, 25 bp, Artificial
  probe
  misc_feature (1)..(25): SEQ ID NO: 6811; WAN024BVL; Start 87; Stop 111
ttgggagcaaattagacctattctt

SEQ ID NO: 449957 - DNA, 25 bp, Artificial
  probe
  misc_feature (1)..(25): SEQ ID NO: 6811; WAN024BVL; Start 66; Stop 90
aggcttagataaggcaatggattgg

SEQ ID NO: 449958 - DNA, 25 bp, Artificial
  probe
  misc_feature (1)..(25): SEQ ID NO: 6811; WAN024BVL; Start 55; Stop 79
aatccattggaaggcttagataagg

SEQ ID NO: 449959 - DNA, 25 bp, Artificial
  probe
  misc_feature (1)..(25): SEQ ID NO: 6811; WAN024BVL; Start 92; Stop 116
agcaaattagacctattcttgagca

SEQ ID NO: 449960 - DNA, 25 bp, Artificial
  probe
  misc_feature (1)..(25): SEQ ID NO: 6811; WAN024BVL; Start 91; Stop 115
gagcaaattagacctattcttgagc

SEQ ID NO: 449961 - DNA, 25 bp, Artificial
  probe
  misc_feature (1)..(25): SEQ ID NO: 6811; WAN024BVL; Start 89; Stop 113
gggagcaaattagacctattcttga

SEQ ID NO: 449962 - DNA, 25 bp, Artificial
  probe
  misc_feature (1)..(25): SEQ ID NO: 6811; WAN024BVL; Start 86; Stop 110
attgggagcaaattagacctattct

SEQ ID NO: 449963 - DNA, 25 bp, Artificial
  probe
  misc_feature (1)..(25): SEQ ID NO: 6811; WAN024BVL; Start 61; Stop 85
ttggaaggcttagataaggcaatgg

SEQ ID NO: 449964 - DNA, 25 bp, Artificial
  probe
  misc_feature (1)..(25): SEQ ID NO: 6811; WAN024BVL; Start 54; Stop 78
caatccattggaaggcttagataag

SEQ ID NO: 449965 - DNA, 25 bp, Artificial
  probe
  misc_feature (1)..(25): SEQ ID NO: 6811; WAN024BVL; Start 88; Stop 112
tgggagcaaattagacctattcttg

SEQ ID NO: 449966 - DNA, 25 bp, Artificial
  probe
  misc_feature (1)..(25): SEQ ID NO: 6811; WAN024BVL; Start 85; Stop 109
gattgggagcaaattagacctattc

SEQ ID NO: 449967 - DNA, 25 bp, Artificial
  probe
  misc_feature (1)..(25): SEQ ID NO: 6811; WAN024BVL; Start 60; Stop 84
attggaaggcttagataaggcaatg

SEQ ID NO: 449968 - DNA, 25 bp, Artificial
  probe
  misc_feature (1)..(25): SEQ ID NO: 6811; WAN024BVL; Start 59; Stop 83
cattggaaggcttagataaggcaat

SEQ ID NO: 449969 - DNA, 25 bp, Artificial
  probe
  misc_feature (1)..(25): SEQ ID NO: 6811; WAN024BVL; Start 84; Stop 108
ggattgggagcaaattagacctatt

SEQ ID NO: 449970 - DNA, 25 bp, Artificial
  probe
  misc_feature (1)..(25): SEQ ID NO: 6811; WAN024BVL; Start 90; Stop 114
ggagcaaattagacctattcttgag

SEQ ID NO: 449971 - DNA, 25 bp, Artificial
  probe
  misc_feature (1)..(25): SEQ ID NO: 6811; WAN024BVL; Start 58; Stop 82
ccattggaaggcttagataaggcaa

SEQ ID NO: 449972 - DNA, 25 bp, Artificial
  probe
  misc_feature (1)..(25): SEQ ID NO: 6811; WAN024BVL; Start 53; Stop 77
gcaatccattggaaggcttagataa

SEQ ID NO: 449973 - DNA, 25 bp, Artificial
  probe
  misc_feature (1)..(25): SEQ ID NO: 6811; WAN024BVL; Start 94; Stop 118
caaattagacctattcttgagcaga

SEQ ID NO: 449974 - DNA, 25 bp, Artificial
  probe
  misc_feature (1)..(25): SEQ ID NO: 6811; WAN024BVL; Start 69; Stop 93
cttagataaggcaatggattgggag

SEQ ID NO: 449975 - DNA, 25 bp, Artificial
  probe
  misc_feature (1)..(25): SEQ ID NO: 6811; WAN024BVL; Start 83; Stop 107
tggattgggagcaaattagacctat

SEQ ID NO: 449976 - DNA, 25 bp, Artificial
  probe
  misc_feature (1)..(25): SEQ ID NO: 6811; WAN024BVL; Start 82; Stop 106
atggattgggagcaaattagaccta

SEQ ID NO: 449977 - DNA, 25 bp, Artificial
  probe
  misc_feature (1)..(25): SEQ ID NO: 6811; WAN024BVL; Start 62; Stop 86
tggaaggcttagataaggcaatgga

SEQ ID NO: 449978 - DNA, 25 bp, Artificial
  probe
  misc_feature (1)..(25): SEQ ID NO: 6811; WAN024BVL; Start 97; Stop 121
attagacctattcttgagcagattt

SEQ ID NO: 449979 - DNA, 25 bp, Artificial
  probe
  misc_feature (1)..(25): SEQ ID NO: 6811; WAN024BVL; Start 81; Stop 105
aatggattgggagcaaattagacct

SEQ ID NO: 449980 - DNA, 25 bp, Artificial
  probe
  misc_feature (1)..(25): SEQ ID NO: 6811; WAN024BVL; Start 95; Stop 119
aaattagacctattcttgagcagat

SEQ ID NO: 449981 - DNA, 25 bp, Artificial
  probe
  misc_feature (1)..(25): SEQ ID NO: 6811; WAN024BVL; Start 80; Stop 104
caatggattgggagcaaattagacc

SEQ ID NO: 449982 - DNA, 25 bp, Artificial
  probe
  misc_feature (1)..(25): SEQ ID NO: 6811; WAN024BVL; Start 56; Stop 80
atccattggaaggcttagataaggc

SEQ ID NO: 449983 - DNA, 25 bp, Artificial
  probe
  misc_feature (1)..(25): SEQ ID NO: 6811; WAN024BVL; Start 52; Stop 76
ggcaatccattggaaggcttagata

SEQ ID NO: 449984 - DNA, 25 bp, Artificial
  probe
  misc_feature (1)..(25): SEQ ID NO: 6812; WAN024D7Z; Start 156; Stop 180
ggcagttgatgagtctgataaggaa

SEQ ID NO: 449985 - DNA, 25 bp, Artificial
  probe
  misc_feature (1)..(25): SEQ ID NO: 6812; WAN024D7Z; Start 183; Stop 207
aacagttggtttctttcaagactct

SEQ ID NO: 449986 - DNA, 25 bp, Artificial
  probe
  misc_feature (1)..(25): SEQ ID NO: 6812; WAN024D7Z; Start 157; Stop 181
gcagttgatgagtctgataaggaaa

SEQ ID NO: 449987 - DNA, 25 bp, Artificial
  probe
  misc_feature (1)..(25): SEQ ID NO: 6812; WAN024D7Z; Start 154; Stop 178
gtggcagttgatgagtctgataagg

SEQ ID NO: 449988 - DNA, 25 bp, Artificial
  probe
  misc_feature (1)..(25): SEQ ID NO: 6812; WAN024D7Z; Start 153; Stop 177
ggtggcagttgatgagtctgataag

SEQ ID NO: 449989 - DNA, 25 bp, Artificial
  probe
  misc_feature (1)..(25): SEQ ID NO: 6812; WAN024D7Z; Start 186; Stop 210
agttggtttctttcaagactctgtc

SEQ ID NO: 449990 - DNA, 25 bp, Artificial
  probe
  misc_feature (1)..(25): SEQ ID NO: 6812; WAN024D7Z; Start 155; Stop 179
tggcagttgatgagtctgataagga

SEQ ID NO: 449991 - DNA, 25 bp, Artificial
  probe
  misc_feature (1)..(25): SEQ ID NO: 6812; WAN024D7Z; Start 185; Stop 209
cagttggtttctttcaagactctgt

SEQ ID NO: 449992 - DNA, 25 bp, Artificial
  probe
  misc_feature (1)..(25): SEQ ID NO: 6812; WAN024D7Z; Start 184; Stop 208
acagttggtttctttcaagactctg

SEQ ID NO: 449993 - DNA, 25 bp, Artificial
  probe
  misc_feature (1)..(25): SEQ ID NO: 6812; WAN024D7Z; Start 104; Stop 128
aaatcaagcaagtcgcagaagaaac

SEQ ID NO: 449994 - DNA, 25 bp, Artificial
  probe
  misc_feature (1)..(25): SEQ ID NO: 6812; WAN024D7Z; Start 103; Stop 127
caaatcaagcaagtcgcagaagaaa

SEQ ID NO: 449995 - DNA, 25 bp, Artificial
  probe
  misc_feature (1)..(25): SEQ ID NO: 6812; WAN024D7Z; Start 152; Stop 176
aggtggcagttgatgagtctgataa

SEQ ID NO: 449996 - DNA, 25 bp, Artificial
  probe
  misc_feature (1)..(25): SEQ ID NO: 6812; WAN024D7Z; Start 244; Stop 268
atttacaatcacagagcaaatcttt

SEQ ID NO: 449997 - DNA, 25 bp, Artificial
  probe
  misc_feature (1)..(25): SEQ ID NO: 6812; WAN024D7Z; Start 182; Stop 206
aaacagttggtttctttcaagactc

SEQ ID NO: 449998 - DNA, 25 bp, Artificial
  probe
  misc_feature (1)..(25): SEQ ID NO: 6812; WAN024D7Z; Start 101; Stop 125
atcaaatcaagcaagtcgcagaaga

SEQ ID NO: 449999 - DNA, 25 bp, Artificial
  probe
  misc_feature (1)..(25): SEQ ID NO: 6812; WAN024D7Z; Start 100; Stop 124
gatcaaatcaagcaagtcgcagaag

SEQ ID NO: 450000 - DNA, 25 bp, Artificial
  probe
  misc_feature (1)..(25): SEQ ID NO: 6812; WAN024D7Z; Start 102; Stop 126
tcaaatcaagcaagtcgcagaagaa

SEQ ID NO: 450001 - DNA, 25 bp, Artificial
  probe
  misc_feature (1)..(25): SEQ ID NO: 6812; WAN024D7Z; Start 3; Stop 27
ggacaagaaaacagcaaaggtaatt

SEQ ID NO: 450002 - DNA, 25 bp, Artificial
  probe
  misc_feature (1)..(25): SEQ ID NO: 6812; WAN024D7Z; Start 202; Stop 226
gactctgtctcacctttaatgcaaa

SEQ ID NO: 450003 - DNA, 25 bp, Artificial
  probe
  misc_feature (1)..(25): SEQ ID NO: 6812; WAN024D7Z; Start 151; Stop 175
caggtggcagttgatgagtctgata

SEQ ID NO: 450004 - DNA, 25 bp, Artificial
  probe
  misc_feature (1)..(25): SEQ ID NO: 6812; WAN024D7Z; Start 2; Stop 26
tggacaagaaaacagcaaaggtaat

SEQ ID NO: 450005 - DNA, 25 bp, Artificial
  probe
  misc_feature (1)..(25): SEQ ID NO: 6812; WAN024D7Z; Start 1; Stop 25
atggacaagaaaacagcaaaggtaa

SEQ ID NO: 450006 - DNA, 25 bp, Artificial
  probe
  misc_feature (1)..(25): SEQ ID NO: 6812; WAN024D7Z; Start 5; Stop 29
acaagaaaacagcaaaggtaattga

SEQ ID NO: 450007 - DNA, 25 bp, Artificial
  probe
  misc_feature (1)..(25): SEQ ID NO: 6812; WAN024D7Z; Start 4; Stop 28
gacaagaaaacagcaaaggtaattg

SEQ ID NO: 450008 - DNA, 25 bp, Artificial
  probe
  misc_feature (1)..(25): SEQ ID NO: 6812; WAN024D7Z; Start 6; Stop 30
caagaaaacagcaaaggtaattgaa

SEQ ID NO: 450009 - DNA, 25 bp, Artificial
  probe
  misc_feature (1)..(25): SEQ ID NO: 6812; WAN024D7Z; Start 39; Stop 63
catgccttttgtccaattagtgatt

SEQ ID NO: 450010 - DNA, 25 bp, Artificial
  probe
  misc_feature (1)..(25): SEQ ID NO: 6812; WAN024D7Z; Start 8; Stop 32
agaaaacagcaaaggtaattgaaaa

SEQ ID NO: 450011 - DNA, 25 bp, Artificial
  probe
  misc_feature (1)..(25): SEQ ID NO: 6812; WAN024D7Z; Start 7; Stop 31
aagaaaacagcaaaggtaattgaaa

SEQ ID NO: 450012 - DNA, 25 bp, Artificial
  probe
  misc_feature (1)..(25): SEQ ID NO: 6812; WAN024D7Z; Start 245; Stop 269
tttacaatcacagagcaaatctttt

SEQ ID NO: 450013 - DNA, 25 bp, Artificial
  probe
  misc_feature (1)..(25): SEQ ID NO: 6812; WAN024D7Z; Start 158; Stop 182
cagttgatgagtctgataaggaaaa

SEQ ID NO: 450014 - DNA, 25 bp, Artificial
  probe
  misc_feature (1)..(25): SEQ ID NO: 6812; WAN024D7Z; Start 90; Stop 114
ttcagacttggatcaaatcaagcaa

SEQ ID NO: 450015 - DNA, 25 bp, Artificial
  probe
  misc_feature (1)..(25): SEQ ID NO: 6812; WAN024D7Z; Start 89; Stop 113
tttcagacttggatcaaatcaagca

SEQ ID NO: 450016 - DNA, 25 bp, Artificial
  probe
  misc_feature (1)..(25): SEQ ID NO: 6812; WAN024D7Z; Start 198; Stop 222
tcaagactctgtctcacctttaatg

SEQ ID NO: 450017 - DNA, 25 bp, Artificial
  probe
  misc_feature (1)..(25): SEQ ID NO: 6813; WAN024BU2; Start 42; Stop 66
tattatcaaggacacaatcacaagg

SEQ ID NO: 450018 - DNA, 25 bp, Artificial
  probe
  misc_feature (1)..(25): SEQ ID NO: 6813; WAN024BU2; Start 43; Stop 67
attatcaaggacacaatcacaaggc

SEQ ID NO: 450019 - DNA, 25 bp, Artificial
  probe
  misc_feature (1)..(25): SEQ ID NO: 6813; WAN024BU2; Start 45; Stop 69
tatcaaggacacaatcacaaggcta

SEQ ID NO: 450020 - DNA, 25 bp, Artificial
  probe
  misc_feature (1)..(25): SEQ ID NO: 6813; WAN024BU2; Start 40; Stop 64
tctattatcaaggacacaatcacaa

SEQ ID NO: 450021 - DNA, 25 bp, Artificial
  probe
  misc_feature (1)..(25): SEQ ID NO: 6813; WAN024BU2; Start 101; Stop 125
cagagttgatggatgtgaacactac

SEQ ID NO: 450022 - DNA, 25 bp, Artificial
  probe
  misc_feature (1)..(25): SEQ ID NO: 6813; WAN024BU2; Start 41; Stop 65
ctattatcaaggacacaatcacaag

SEQ ID NO: 450023 - DNA, 25 bp, Artificial
  probe
  misc_feature (1)..(25): SEQ ID NO: 6813; WAN024BU2; Start 39; Stop 63
atctattatcaaggacacaatcaca

SEQ ID NO: 450024 - DNA, 25 bp, Artificial
  probe
  misc_feature (1)..(25): SEQ ID NO: 6813; WAN024BU2; Start 44; Stop 68
ttatcaaggacacaatcacaaggct

SEQ ID NO: 450025 - DNA, 25 bp, Artificial
  probe
  misc_feature (1)..(25): SEQ ID NO: 6813; WAN024BU2; Start 134; Stop 158
ttctaggaattaagtatgccacatt

SEQ ID NO: 450026 - DNA, 25 bp, Artificial
  probe
  misc_feature (1)..(25): SEQ ID NO: 6813; WAN024BU2; Start 103; Stop 127
gagttgatggatgtgaacactacct

SEQ ID NO: 450027 - DNA, 25 bp, Artificial
  probe
  misc_feature (1)..(25): SEQ ID NO: 6813; WAN024BU2; Start 102; Stop 126
agagttgatggatgtgaacactacc

SEQ ID NO: 450028 - DNA, 25 bp, Artificial
  probe
  misc_feature (1)..(25): SEQ ID NO: 6813; WAN024BU2; Start 104; Stop 128
agttgatggatgtgaacactacctg

SEQ ID NO: 450029 - DNA, 25 bp, Artificial
  probe
  misc_feature (1)..(25): SEQ ID NO: 6813; WAN024BU2; Start 46; Stop 70
atcaaggacacaatcacaaggctag

SEQ ID NO: 450030 - DNA, 25 bp, Artificial
  probe
  misc_feature (1)..(25): SEQ ID NO: 6813; WAN024BU2; Start 38; Stop 62
aatctattatcaaggacacaatcac

SEQ ID NO: 450031 - DNA, 25 bp, Artificial
  probe
  misc_feature (1)..(25): SEQ ID NO: 6813; WAN024BU2; Start 172; Stop 196
cgttacttaaagggatttccaaagg

SEQ ID NO: 450032 - DNA, 25 bp, Artificial
  probe
  misc_feature (1)..(25): SEQ ID NO: 6813; WAN024BU2; Start 228; Stop 252
catcaaagaatggctctctaatcaa

SEQ ID NO: 450033 - DNA, 25 bp, Artificial
  probe
  misc_feature (1)..(25): SEQ ID NO: 6813; WAN024BU2; Start 171; Stop 195
tcgttacttaaagggatttccaaag

SEQ ID NO: 450034 - DNA, 25 bp, Artificial
  probe
  misc_feature (1)..(25): SEQ ID NO: 6813; WAN024BU2; Start 2; Stop 26
tggacaatgttctactttcactatc

SEQ ID NO: 450035 - DNA, 25 bp, Artificial
  probe
  misc_feature (1)..(25): SEQ ID NO: 6813; WAN024BU2; Start 170; Stop 194
atcgttacttaaagggatttccaaa

SEQ ID NO: 450036 - DNA, 25 bp, Artificial
  probe
  misc_feature (1)..(25): SEQ ID NO: 6813; WAN024BU2; Start 230; Stop 254
tcaaagaatggctctctaatcaaat

SEQ ID NO: 450037 - DNA, 25 bp, Artificial
  probe
  misc_feature (1)..(25): SEQ ID NO: 6813; WAN024BU2; Start 229; Stop 253
atcaaagaatggctctctaatcaaa

SEQ ID NO: 450038 - DNA, 25 bp, Artificial
  probe
  misc_feature (1)..(25): SEQ ID NO: 6813; WAN024BU2; Start 3; Stop 27
ggacaatgttctactttcactatct

SEQ ID NO: 450039 - DNA, 25 bp, Artificial
  probe
  misc_feature (1)..(25): SEQ ID NO: 6813; WAN024BU2; Start 100; Stop 124
ccagagttgatggatgtgaacacta

SEQ ID NO: 450040 - DNA, 25 bp, Artificial
  probe
  misc_feature (1)..(25): SEQ ID NO: 6813; WAN024BU2; Start 1; Stop 25
atggacaatgttctactttcactat

SEQ ID NO: 450041 - DNA, 25 bp, Artificial
  probe
  misc_feature (1)..(25): SEQ ID NO: 6813; WAN024BU2; Start 115; Stop 139
gtgaacactacctgcgaatttctag

SEQ ID NO: 450042 - DNA, 25 bp, Artificial
  probe
  misc_feature (1)..(25): SEQ ID NO: 6813; WAN024BU2; Start 124; Stop 148
acctgcgaatttctaggaattaagt

SEQ ID NO: 450043 - DNA, 25 bp, Artificial
  probe
  misc_feature (1)..(25): SEQ ID NO: 6813; WAN024BU2; Start 121; Stop 145
actacctgcgaatttctaggaatta

SEQ ID NO: 450044 - DNA, 25 bp, Artificial
  probe
  misc_feature (1)..(25): SEQ ID NO: 6813; WAN024BU2; Start 169; Stop 193
tatcgttacttaaagggatttccaa

SEQ ID NO: 450045 - DNA, 25 bp, Artificial
  probe
  misc_feature (1)..(25): SEQ ID NO: 6813; WAN024BU2; Start 168; Stop 192
ttatcgttacttaaagggatttcca

SEQ ID NO: 450046 - DNA, 25 bp, Artificial
  probe
  misc_feature (1)..(25): SEQ ID NO: 6813; WAN024BU2; Start 135; Stop 159
tctaggaattaagtatgccacattt

SEQ ID NO: 450047 - DNA, 25 bp, Artificial
  probe
  misc_feature (1)..(25): SEQ ID NO: 6813; WAN024BU2; Start 133; Stop 157
tttctaggaattaagtatgccacat

SEQ ID NO: 450048 - DNA, 25 bp, Artificial
  probe
  misc_feature (1)..(25): SEQ ID NO: 6813; WAN024BU2; Start 132; Stop 156
atttctaggaattaagtatgccaca

SEQ ID NO: 450049 - DNA, 25 bp, Artificial
  probe
  misc_feature (1)..(25): SEQ ID NO: 6813; WAN024BU2; Start 58; Stop 82
atcacaaggctagtcgaaatagaaa

SEQ ID NO: 450050 - DNA, 25 bp, Artificial
  probe
  misc_feature (1)..(25): SEQ ID NO: 6814; WAN024DKI; Start 54; Stop 78
ccgtcatgaattgaaaagtgttgaa

SEQ ID NO: 450051 - DNA, 25 bp, Artificial
  probe
  misc_feature (1)..(25): SEQ ID NO: 6814; WAN024DKI; Start 55; Stop 79
cgtcatgaattgaaaagtgttgaat

SEQ ID NO: 450052 - DNA, 25 bp, Artificial
  probe
  misc_feature (1)..(25): SEQ ID NO: 6814; WAN024DKI; Start 52; Stop 76
gaccgtcatgaattgaaaagtgttg

SEQ ID NO: 450053 - DNA, 25 bp, Artificial
  probe
  misc_feature (1)..(25): SEQ ID NO: 6814; WAN024DKI; Start 53; Stop 77
accgtcatgaattgaaaagtgttga

SEQ ID NO: 450054 - DNA, 25 bp, Artificial
  probe
  misc_feature (1)..(25): SEQ ID NO: 6814; WAN024DKI; Start 51; Stop 75
ggaccgtcatgaattgaaaagtgtt

SEQ ID NO: 450055 - DNA, 25 bp, Artificial
  probe
  misc_feature (1)..(25): SEQ ID NO: 6814; WAN024DKI; Start 30; Stop 54
aaaacagttgtacgaatacccggac

SEQ ID NO: 450056 - DNA, 25 bp, Artificial
  probe
  misc_feature (1)..(25): SEQ ID NO: 6814; WAN024DKI; Start 31; Stop 55
aaacagttgtacgaatacccggacc

SEQ ID NO: 450057 - DNA, 25 bp, Artificial
  probe
  misc_feature (1)..(25): SEQ ID NO: 6814; WAN024DKI; Start 45; Stop 69
atacccggaccgtcatgaattgaaa

SEQ ID NO: 450058 - DNA, 25 bp, Artificial
  probe
  misc_feature (1)..(25): SEQ ID NO: 6814; WAN024DKI; Start 44; Stop 68
aatacccggaccgtcatgaattgaa

SEQ ID NO: 450059 - DNA, 25 bp, Artificial
  probe
  misc_feature (1)..(25): SEQ ID NO: 6814; WAN024DKI; Start 43; Stop 67
gaatacccggaccgtcatgaattga

SEQ ID NO: 450060 - DNA, 25 bp, Artificial
  probe
  misc_feature (1)..(25): SEQ ID NO: 6814; WAN024DKI; Start 56; Stop 80
gtcatgaattgaaaagtgttgaata

SEQ ID NO: 450061 - DNA, 25 bp, Artificial
  probe
  misc_feature (1)..(25): SEQ ID NO: 6814; WAN024DKI; Start 50; Stop 74
cggaccgtcatgaattgaaaagtgt

SEQ ID NO: 450062 - DNA, 25 bp, Artificial
  probe
  misc_feature (1)..(25): SEQ ID NO: 6814; WAN024DKI; Start 57; Stop 81
tcatgaattgaaaagtgttgaatat

SEQ ID NO: 450063 - DNA, 25 bp, Artificial
  probe
  misc_feature (1)..(25): SEQ ID NO: 6814; WAN024DKI; Start 46; Stop 70
tacccggaccgtcatgaattgaaaa

SEQ ID NO: 450064 - DNA, 25 bp, Artificial
  probe
  misc_feature (1)..(25): SEQ ID NO: 6814; WAN024DKI; Start 6; Stop 30
cagcgcagaggacatccttttaaaa

SEQ ID NO: 450065 - DNA, 25 bp, Artificial
  probe
  misc_feature (1)..(25): SEQ ID NO: 6814; WAN024DKI; Start 49; Stop 73
ccggaccgtcatgaattgaaaagtg

SEQ ID NO: 450066 - DNA, 25 bp, Artificial
  probe
  misc_feature (1)..(25): SEQ ID NO: 6814; WAN024DKI; Start 5; Stop 29
acagcgcagaggacatccttttaaa

SEQ ID NO: 450067 - DNA, 25 bp, Artificial
  probe
  misc_feature (1)..(25): SEQ ID NO: 6814; WAN024DKI; Start 4; Stop 28
gacagcgcagaggacatccttttaa

SEQ ID NO: 450068 - DNA, 25 bp, Artificial
  probe
  misc_feature (1)..(25): SEQ ID NO: 6815; WAN024AUG; Start 242; Stop 266
ccttgaccattattctcgaagctaa

SEQ ID NO: 450069 - DNA, 25 bp, Artificial
  probe
  misc_feature (1)..(25): SEQ ID NO: 6815; WAN024AUG; Start 328; Stop 352
catcccattacccttgatttgattc

SEQ ID NO: 450070 - DNA, 25 bp, Artificial
  probe
  misc_feature (1)..(25): SEQ ID NO: 6815; WAN024AUG; Start 243; Stop 267
cttgaccattattctcgaagctaat

SEQ ID NO: 450071 - DNA, 25 bp, Artificial
  probe
  misc_feature (1)..(25): SEQ ID NO: 6815; WAN024AUG; Start 329; Stop 353
atcccattacccttgatttgattcg

SEQ ID NO: 450072 - DNA, 25 bp, Artificial
  probe
  misc_feature (1)..(25): SEQ ID NO: 6815; WAN024AUG; Start 146; Stop 170
tcaatctcaatgttgcctctttaga

SEQ ID NO: 450073 - DNA, 25 bp, Artificial
  probe
  misc_feature (1)..(25): SEQ ID NO: 6815; WAN024AUG; Start 145; Stop 169
ctcaatctcaatgttgcctctttag

SEQ ID NO: 450074 - DNA, 25 bp, Artificial
  probe
  misc_feature (1)..(25): SEQ ID NO: 6815; WAN024AUG; Start 542; Stop 566
ccattaagcgagaagatattcttgc

SEQ ID NO: 450075 - DNA, 25 bp, Artificial
  probe
  misc_feature (1)..(25): SEQ ID NO: 6815; WAN024AUG; Start 541; Stop 565
gccattaagcgagaagatattcttg

SEQ ID NO: 450076 - DNA, 25 bp, Artificial
  probe
  misc_feature (1)..(25): SEQ ID NO: 6815; WAN024AUG; Start 327; Stop 351
tcatcccattacccttgatttgatt

SEQ ID NO: 450077 - DNA, 25 bp, Artificial
  probe
  misc_feature (1)..(25): SEQ ID NO: 6815; WAN024AUG; Start 324; Stop 348
tagtcatcccattacccttgatttg

SEQ ID NO: 450078 - DNA, 25 bp, Artificial
  probe
  misc_feature (1)..(25): SEQ ID NO: 6815; WAN024AUG; Start 185; Stop 209
tttcaaagaatcagccaacttatct

SEQ ID NO: 450079 - DNA, 25 bp, Artificial
  probe
  misc_feature (1)..(25): SEQ ID NO: 6815; WAN024AUG; Start 543; Stop 567
cattaagcgagaagatattcttgct

SEQ ID NO: 450080 - DNA, 25 bp, Artificial
  probe
  misc_feature (1)..(25): SEQ ID NO: 6815; WAN024AUG; Start 326; Stop 350
gtcatcccattacccttgatttgat

SEQ ID NO: 450081 - DNA, 25 bp, Artificial
  probe
  misc_feature (1)..(25): SEQ ID NO: 6815; WAN024AUG; Start 544; Stop 568
attaagcgagaagatattcttgctc

SEQ ID NO: 450082 - DNA, 25 bp, Artificial
  probe
  misc_feature (1)..(25): SEQ ID NO: 6815; WAN024AUG; Start 475; Stop 499
ctaactggacaggattcaactattt

SEQ ID NO: 450083 - DNA, 25 bp, Artificial
  probe
  misc_feature (1)..(25): SEQ ID NO: 6815; WAN024AUG; Start 404; Stop 428
gtggagtgacctttaatcaaattct

SEQ ID NO: 450084 - DNA, 25 bp, Artificial
  probe
  misc_feature (1)..(25): SEQ ID NO: 6815; WAN024AUG; Start 403; Stop 427
agtggagtgacctttaatcaaattc

SEQ ID NO: 450085 - DNA, 25 bp, Artificial
  probe
  misc_feature (1)..(25): SEQ ID NO: 6815; WAN024AUG; Start 402; Stop 426
gagtggagtgacctttaatcaaatt

SEQ ID NO: 450086 - DNA, 25 bp, Artificial
  probe
  misc_feature (1)..(25): SEQ ID NO: 6815; WAN024AUG; Start 323; Stop 347
ctagtcatcccattacccttgattt

SEQ ID NO: 450087 - DNA, 25 bp, Artificial
  probe
  misc_feature (1)..(25): SEQ ID NO: 6815; WAN024AUG; Start 401; Stop 425
cgagtggagtgacctttaatcaaat

SEQ ID NO: 450088 - DNA, 25 bp, Artificial
  probe
  misc_feature (1)..(25): SEQ ID NO: 6815; WAN024AUG; Start 144; Stop 168
gctcaatctcaatgttgcctcttta

SEQ ID NO: 450089 - DNA, 25 bp, Artificial
  probe
  misc_feature (1)..(25): SEQ ID NO: 6815; WAN024AUG; Start 325; Stop 349
agtcatcccattacccttgatttga

SEQ ID NO: 450090 - DNA, 25 bp, Artificial
  probe
  misc_feature (1)..(25): SEQ ID NO: 6815; WAN024AUG; Start 147; Stop 171
caatctcaatgttgcctctttagag

SEQ ID NO: 450091 - DNA, 25 bp, Artificial
  probe
  misc_feature (1)..(25): SEQ ID NO: 6815; WAN024AUG; Start 322; Stop 346
cctagtcatcccattacccttgatt

SEQ ID NO: 450092 - DNA, 25 bp, Artificial
  probe
  misc_feature (1)..(25): SEQ ID NO: 6815; WAN024AUG; Start 334; Stop 358
attacccttgatttgattcgagaga

SEQ ID NO: 450093 - DNA, 25 bp, Artificial
  probe
  misc_feature (1)..(25): SEQ ID NO: 6815; WAN024AUG; Start 333; Stop 357
cattacccttgatttgattcgagag

SEQ ID NO: 450094 - DNA, 25 bp, Artificial
  probe
  misc_feature (1)..(25): SEQ ID NO: 6815; WAN024AUG; Start 335; Stop 359
ttacccttgatttgattcgagagac

SEQ ID NO: 450095 - DNA, 25 bp, Artificial
  probe
  misc_feature (1)..(25): SEQ ID NO: 6815; WAN024AUG; Start 57; Stop 81
gacagtttacggtctctttgctaag

SEQ ID NO: 450096 - DNA, 25 bp, Artificial
  probe
  misc_feature (1)..(25): SEQ ID NO: 6815; WAN024AUG; Start 405; Stop 429
tggagtgacctttaatcaaattcta

SEQ ID NO: 450097 - DNA, 25 bp, Artificial
  probe
  misc_feature (1)..(25): SEQ ID NO: 6815; WAN024AUG; Start 332; Stop 356
ccattacccttgatttgattcgaga

SEQ ID NO: 450098 - DNA, 25 bp, Artificial
  probe
  misc_feature (1)..(25): SEQ ID NO: 6815; WAN024AUG; Start 98; Stop 122
cagttgaccatgtttaccagcttaa

SEQ ID NO: 450099 - DNA, 25 bp, Artificial
  probe
  misc_feature (1)..(25): SEQ ID NO: 6815; WAN024AUG; Start 99; Stop 123
agttgaccatgtttaccagcttaaa

SEQ ID NO: 450100 - DNA, 25 bp, Artificial
  probe
  misc_feature (1)..(25): SEQ ID NO: 6815; WAN024AUG; Start 58; Stop 82
acagtttacggtctctttgctaagg

SEQ ID NO: 450101 - DNA, 25 bp, Artificial
  probe
  misc_feature (1)..(25): SEQ ID NO: 6816; WAN024E2I; Start 27; Stop 51
aagtaagaacgatgaaggaggagaa

SEQ ID NO: 450102 - DNA, 25 bp, Artificial
  probe
  misc_feature (1)..(25): SEQ ID NO: 6816; WAN024E2I; Start 28; Stop 52
agtaagaacgatgaaggaggagaaa

SEQ ID NO: 450103 - DNA, 25 bp, Artificial
  probe
  misc_feature (1)..(25): SEQ ID NO: 6816; WAN024E2I; Start 26; Stop 50
aaagtaagaacgatgaaggaggaga

SEQ ID NO: 450104 - DNA, 25 bp, Artificial
  probe
  misc_feature (1)..(25): SEQ ID NO: 6816; WAN024E2I; Start 29; Stop 53
gtaagaacgatgaaggaggagaaaa

SEQ ID NO: 450105 - DNA, 25 bp, Artificial
  probe
  misc_feature (1)..(25): SEQ ID NO: 6816; WAN024E2I; Start 25; Stop 49
aaaagtaagaacgatgaaggaggag

SEQ ID NO: 450106 - DNA, 25 bp, Artificial
  probe
  misc_feature (1)..(25): SEQ ID NO: 6816; WAN024E2I; Start 24; Stop 48
caaaagtaagaacgatgaaggagga

SEQ ID NO: 450107 - DNA, 25 bp, Artificial
  probe
  misc_feature (1)..(25): SEQ ID NO: 6816; WAN024E2I; Start 22; Stop 46
gtcaaaagtaagaacgatgaaggag

SEQ ID NO: 450108 - DNA, 25 bp, Artificial
  probe
  misc_feature (1)..(25): SEQ ID NO: 6816; WAN024E2I; Start 19; Stop 43
atggtcaaaagtaagaacgatgaag

SEQ ID NO: 450109 - DNA, 25 bp, Artificial
  probe
  misc_feature (1)..(25): SEQ ID NO: 6816; WAN024E2I; Start 23; Stop 47
tcaaaagtaagaacgatgaaggagg

SEQ ID NO: 450110 - DNA, 25 bp, Artificial
  probe
  misc_feature (1)..(25): SEQ ID NO: 6816; WAN024E2I; Start 21; Stop 45
ggtcaaaagtaagaacgatgaagga

SEQ ID NO: 450111 - DNA, 25 bp, Artificial
  probe
  misc_feature (1)..(25): SEQ ID NO: 6816; WAN024E2I; Start 20; Stop 44
tggtcaaaagtaagaacgatgaagg

SEQ ID NO: 450112 - DNA, 25 bp, Artificial
  probe
  misc_feature (1)..(25): SEQ ID NO: 6816; WAN024E2I; Start 18; Stop 42
tatggtcaaaagtaagaacgatgaa

SEQ ID NO: 450113 - DNA, 25 bp, Artificial
  probe
  misc_feature (1)..(25): SEQ ID NO: 6816; WAN024E2I; Start 17; Stop 41
ttatggtcaaaagtaagaacgatga

SEQ ID NO: 450114 - DNA, 25 bp, Artificial
  probe
  misc_feature (1)..(25): SEQ ID NO: 6816; WAN024E2I; Start 16; Stop 40
attatggtcaaaagtaagaacgatg

SEQ ID NO: 450115 - DNA, 25 bp, Artificial
  probe
  misc_feature (1)..(25): SEQ ID NO: 6816; WAN024E2I; Start 14; Stop 38
ttattatggtcaaaagtaagaacga

SEQ ID NO: 450116 - DNA, 25 bp, Artificial
  probe
  misc_feature (1)..(25): SEQ ID NO: 6816; WAN024E2I; Start 15; Stop 39
tattatggtcaaaagtaagaacgat

SEQ ID NO: 450117 - DNA, 25 bp, Artificial
  probe
  misc_feature (1)..(25): SEQ ID NO: 6816; WAN024E2I; Start 11; Stop 35
tgcttattatggtcaaaagtaagaa

SEQ ID NO: 450118 - DNA, 25 bp, Artificial
  probe
  misc_feature (1)..(25): SEQ ID NO: 6816; WAN024E2I; Start 12; Stop 36
gcttattatggtcaaaagtaagaac

SEQ ID NO: 450119 - DNA, 25 bp, Artificial
  probe
  misc_feature (1)..(25): SEQ ID NO: 6816; WAN024E2I; Start 10; Stop 34
atgcttattatggtcaaaagtaaga

SEQ ID NO: 450120 - DNA, 25 bp, Artificial
  probe
  misc_feature (1)..(25): SEQ ID NO: 6816; WAN024E2I; Start 13; Stop 37
cttattatggtcaaaagtaagaacg

SEQ ID NO: 450121 - DNA, 25 bp, Artificial
  probe
  misc_feature (1)..(25): SEQ ID NO: 6816; WAN024E2I; Start 9; Stop 33
aatgcttattatggtcaaaagtaag

SEQ ID NO: 450122 - DNA, 25 bp, Artificial
  probe
  misc_feature (1)..(25): SEQ ID NO: 6817; WAN024B4K; Start 629; Stop 653
atatcgaagatgcactacagatgac

SEQ ID NO: 450123 - DNA, 25 bp, Artificial
  probe
  misc_feature (1)..(25): SEQ ID NO: 6817; WAN024B4K; Start 455; Stop 479
gtattactcgtgtttctgatgtgac

SEQ ID NO: 450124 - DNA, 25 bp, Artificial
  probe
  misc_feature (1)..(25): SEQ ID NO: 6817; WAN024B4K; Start 361; Stop 385
cgtatcgtgtctatttcggttaatg

SEQ ID NO: 450125 - DNA, 25 bp, Artificial
  probe
  misc_feature (1)..(25): SEQ ID NO: 6817; WAN024B4K; Start 628; Stop 652
gatatcgaagatgcactacagatga

SEQ ID NO: 450126 - DNA, 25 bp, Artificial
  probe
  misc_feature (1)..(25): SEQ ID NO: 6817; WAN024B4K; Start 627; Stop 651
agatatcgaagatgcactacagatg

SEQ ID NO: 450127 - DNA, 25 bp, Artificial
  probe
  misc_feature (1)..(25): SEQ ID NO: 6817; WAN024B4K; Start 625; Stop 649
gaagatatcgaagatgcactacaga

SEQ ID NO: 450128 - DNA, 25 bp, Artificial
  probe
  misc_feature (1)..(25): SEQ ID NO: 6817; WAN024B4K; Start 626; Stop 650
aagatatcgaagatgcactacagat

SEQ ID NO: 450129 - DNA, 25 bp, Artificial
  probe
  misc_feature (1)..(25): SEQ ID NO: 6817; WAN024B4K; Start 624; Stop 648
ggaagatatcgaagatgcactacag

SEQ ID NO: 450130 - DNA, 25 bp, Artificial
  probe
  misc_feature (1)..(25): SEQ ID NO: 6817; WAN024B4K; Start 362; Stop 386
gtatcgtgtctatttcggttaatga

SEQ ID NO: 450131 - DNA, 25 bp, Artificial
  probe
  misc_feature (1)..(25): SEQ ID NO: 6817; WAN024B4K; Start 630; Stop 654
tatcgaagatgcactacagatgaca

SEQ ID NO: 450132 - DNA, 25 bp, Artificial
  probe
  misc_feature (1)..(25): SEQ ID NO: 6817; WAN024B4K; Start 454; Stop 478
agtattactcgtgtttctgatgtga

SEQ ID NO: 450133 - DNA, 25 bp, Artificial
  probe
  misc_feature (1)..(25): SEQ ID NO: 6817; WAN024B4K; Start 227; Stop 251
cgtacttgactaaagactatcgtga

SEQ ID NO: 450134 - DNA, 25 bp, Artificial
  probe
  misc_feature (1)..(25): SEQ ID NO: 6817; WAN024B4K; Start 226; Stop 250
tcgtacttgactaaagactatcgtg

SEQ ID NO: 450135 - DNA, 25 bp, Artificial
  probe
  misc_feature (1)..(25): SEQ ID NO: 6817; WAN024B4K; Start 456; Stop 480
tattactcgtgtttctgatgtgaca

SEQ ID NO: 450136 - DNA, 25 bp, Artificial
  probe
  misc_feature (1)..(25): SEQ ID NO: 6817; WAN024B4K; Start 364; Stop 388
atcgtgtctatttcggttaatgatc

SEQ ID NO: 450137 - DNA, 25 bp, Artificial
  probe
  misc_feature (1)..(25): SEQ ID NO: 6817; WAN024B4K; Start 221; Stop 245
caggatcgtacttgactaaagacta

SEQ ID NO: 450138 - DNA, 25 bp, Artificial
  probe
  misc_feature (1)..(25): SEQ ID NO: 6817; WAN024B4K; Start 150; Stop 174
tacgactcggatttatgtagttagc

SEQ ID NO: 450139 - DNA, 25 bp, Artificial
  probe
  misc_feature (1)..(25): SEQ ID NO: 6817; WAN024B4K; Start 225; Stop 249
atcgtacttgactaaagactatcgt

SEQ ID NO: 450140 - DNA, 25 bp, Artificial
  probe
  misc_feature (1)..(25): SEQ ID NO: 6817; WAN024B4K; Start 457; Stop 481
attactcgtgtttctgatgtgacaa

SEQ ID NO: 450141 - DNA, 25 bp, Artificial
  probe
  misc_feature (1)..(25): SEQ ID NO: 6817; WAN024B4K; Start 363; Stop 387
tatcgtgtctatttcggttaatgat

SEQ ID NO: 450142 - DNA, 25 bp, Artificial
  probe
  misc_feature (1)..(25): SEQ ID NO: 6817; WAN024B4K; Start 512; Stop 536
cgtcttcgccaaatattaaactcaa

SEQ ID NO: 450143 - DNA, 25 bp, Artificial
  probe
  misc_feature (1)..(25): SEQ ID NO: 6817; WAN024B4K; Start 453; Stop 477
cagtattactcgtgtttctgatgtg

SEQ ID NO: 450144 - DNA, 25 bp, Artificial
  probe
  misc_feature (1)..(25): SEQ ID NO: 6817; WAN024B4K; Start 506; Stop 530
tatcaccgtcttcgccaaatattaa

SEQ ID NO: 450145 - DNA, 25 bp, Artificial
  probe
  misc_feature (1)..(25): SEQ ID NO: 6817; WAN024B4K; Start 230; Stop 254
acttgactaaagactatcgtgaaat

SEQ ID NO: 450146 - DNA, 25 bp, Artificial
  probe
  misc_feature (1)..(25): SEQ ID NO: 6817; WAN024B4K; Start 224; Stop 248
gatcgtacttgactaaagactatcg

SEQ ID NO: 450147 - DNA, 25 bp, Artificial
  probe
  misc_feature (1)..(25): SEQ ID NO: 6817; WAN024B4K; Start 505; Stop 529
atatcaccgtcttcgccaaatatta

SEQ ID NO: 450148 - DNA, 25 bp, Artificial
  probe
  misc_feature (1)..(25): SEQ ID NO: 6817; WAN024B4K; Start 554; Stop 578
tggtaggattgattgtcataaatgt

SEQ ID NO: 450149 - DNA, 25 bp, Artificial
  probe
  misc_feature (1)..(25): SEQ ID NO: 6817; WAN024B4K; Start 222; Stop 246
aggatcgtacttgactaaagactat

SEQ ID NO: 450150 - DNA, 25 bp, Artificial
  probe
  misc_feature (1)..(25): SEQ ID NO: 6817; WAN024B4K; Start 458; Stop 482
ttactcgtgtttctgatgtgacaac

SEQ ID NO: 450151 - DNA, 25 bp, Artificial
  probe
  misc_feature (1)..(25): SEQ ID NO: 6817; WAN024B4K; Start 223; Stop 247
ggatcgtacttgactaaagactatc

SEQ ID NO: 450152 - DNA, 25 bp, Artificial
  probe
  misc_feature (1)..(25): SEQ ID NO: 6817; WAN024B4K; Start 507; Stop 531
atcaccgtcttcgccaaatattaaa

SEQ ID NO: 450153 - DNA, 25 bp, Artificial
  probe
  misc_feature (1)..(25): SEQ ID NO: 6817; WAN024B4K; Start 149; Stop 173
gtacgactcggatttatgtagttag

SEQ ID NO: 450154 - DNA, 25 bp, Artificial
  probe
  misc_feature (1)..(25): SEQ ID NO: 6817; WAN024B4K; Start 623; Stop 647
cggaagatatcgaagatgcactaca

SEQ ID NO: 450155 - DNA, 25 bp, Artificial
  probe
  misc_feature (1)..(25): SEQ ID NO: 6818; WAN024FO6; Start 826; Stop 850
aaagtttatcttgctaaccaggaag

SEQ ID NO: 450156 - DNA, 25 bp, Artificial
  probe
  misc_feature (1)..(25): SEQ ID NO: 6818; WAN024FO6; Start 790; Stop 814
cgtcgttatttgttgaatagcattt

SEQ ID NO: 450157 - DNA, 25 bp, Artificial
  probe
  misc_feature (1)..(25): SEQ ID NO: 6818; WAN024FO6; Start 831; Stop 855
ttatcttgctaaccaggaagaactc

SEQ ID NO: 450158 - DNA, 25 bp, Artificial
  probe
  misc_feature (1)..(25): SEQ ID NO: 6818; WAN024FO6; Start 793; Stop 817
cgttatttgttgaatagcatttggt

SEQ ID NO: 450159 - DNA, 25 bp, Artificial
  probe
  misc_feature (1)..(25): SEQ ID NO: 6818; WAN024FO6; Start 800; Stop 824
tgttgaatagcatttggtctagttt

SEQ ID NO: 450160 - DNA, 25 bp, Artificial
  probe
  misc_feature (1)..(25): SEQ ID NO: 6818; WAN024FO6; Start 799; Stop 823
ttgttgaatagcatttggtctagtt

SEQ ID NO: 450161 - DNA, 25 bp, Artificial
  probe
  misc_feature (1)..(25): SEQ ID NO: 6818; WAN024FO6; Start 798; Stop 822
tttgttgaatagcatttggtctagt

SEQ ID NO: 450162 - DNA, 25 bp, Artificial
  probe
  misc_feature (1)..(25): SEQ ID NO: 6818; WAN024FO6; Start 792; Stop 816
tcgttatttgttgaatagcatttgg

SEQ ID NO: 450163 - DNA, 25 bp, Artificial
  probe
  misc_feature (1)..(25): SEQ ID NO: 6818; WAN024FO6; Start 51; Stop 75
taattgggaggatactttagattgc

SEQ ID NO: 450164 - DNA, 25 bp, Artificial
  probe
  misc_feature (1)..(25): SEQ ID NO: 6818; WAN024FO6; Start 134; Stop 158
gttctcccaatgaatccgtttctag

SEQ ID NO: 450165 - DNA, 25 bp, Artificial
  probe
  misc_feature (1)..(25): SEQ ID NO: 6818; WAN024FO6; Start 693; Stop 717
ggcaggtcttgatatgctgtatata

SEQ ID NO: 450166 - DNA, 25 bp, Artificial
  probe
  misc_feature (1)..(25): SEQ ID NO: 6818; WAN024FO6; Start 825; Stop 849
taaagtttatcttgctaaccaggaa

SEQ ID NO: 450167 - DNA, 25 bp, Artificial
  probe
  misc_feature (1)..(25): SEQ ID NO: 6818; WAN024FO6; Start 824; Stop 848
ttaaagtttatcttgctaaccagga

SEQ ID NO: 450168 - DNA, 25 bp, Artificial
  probe
  misc_feature (1)..(25): SEQ ID NO: 6818; WAN024FO6; Start 726; Stop 750
ttcaatttaccataaagaggaccaa

SEQ ID NO: 450169 - DNA, 25 bp, Artificial
  probe
  misc_feature (1)..(25): SEQ ID NO: 6818; WAN024FO6; Start 725; Stop 749
tttcaatttaccataaagaggacca

SEQ ID NO: 450170 - DNA, 25 bp, Artificial
  probe
  misc_feature (1)..(25): SEQ ID NO: 6818; WAN024FO6; Start 853; Stop 877
ctcccgaatattgttagtgactcta

SEQ ID NO: 450171 - DNA, 25 bp, Artificial
  probe
  misc_feature (1)..(25): SEQ ID NO: 6818; WAN024FO6; Start 832; Stop 856
tatcttgctaaccaggaagaactcc

SEQ ID NO: 450172 - DNA, 25 bp, Artificial
  probe
  misc_feature (1)..(25): SEQ ID NO: 6818; WAN024FO6; Start 767; Stop 791
ttaataatgatgacttagtacgacg

SEQ ID NO: 450173 - DNA, 25 bp, Artificial
  probe
  misc_feature (1)..(25): SEQ ID NO: 6818; WAN024FO6; Start 791; Stop 815
gtcgttatttgttgaatagcatttg

SEQ ID NO: 450174 - DNA, 25 bp, Artificial
  probe
  misc_feature (1)..(25): SEQ ID NO: 6818; WAN024FO6; Start 727; Stop 751
tcaatttaccataaagaggaccaat

SEQ ID NO: 450175 - DNA, 25 bp, Artificial
  probe
  misc_feature (1)..(25): SEQ ID NO: 6818; WAN024FO6; Start 797; Stop 821
atttgttgaatagcatttggtctag

SEQ ID NO: 450176 - DNA, 25 bp, Artificial
  probe
  misc_feature (1)..(25): SEQ ID NO: 6818; WAN024FO6; Start 768; Stop 792
taataatgatgacttagtacgacgt

SEQ ID NO: 450177 - DNA, 25 bp, Artificial
  probe
  misc_feature (1)..(25): SEQ ID NO: 6818; WAN024FO6; Start 692; Stop 716
aggcaggtcttgatatgctgtatat

SEQ ID NO: 450178 - DNA, 25 bp, Artificial
  probe
  misc_feature (1)..(25): SEQ ID NO: 6818; WAN024FO6; Start 854; Stop 878
tcccgaatattgttagtgactctat

SEQ ID NO: 450179 - DNA, 25 bp, Artificial
  probe
  misc_feature (1)..(25): SEQ ID NO: 6818; WAN024FO6; Start 691; Stop 715
aaggcaggtcttgatatgctgtata

SEQ ID NO: 450180 - DNA, 25 bp, Artificial
  probe
  misc_feature (1)..(25): SEQ ID NO: 6818; WAN024FO6; Start 729; Stop 753
aatttaccataaagaggaccaatct

SEQ ID NO: 450181 - DNA, 25 bp, Artificial
  probe
  misc_feature (1)..(25): SEQ ID NO: 6818; WAN024FO6; Start 728; Stop 752
caatttaccataaagaggaccaatc

SEQ ID NO: 450182 - DNA, 25 bp, Artificial
  probe
  misc_feature (1)..(25): SEQ ID NO: 6818; WAN024FO6; Start 851; Stop 875
aactcccgaatattgttagtgactc

SEQ ID NO: 450183 - DNA, 25 bp, Artificial
  probe
  misc_feature (1)..(25): SEQ ID NO: 6818; WAN024FO6; Start 850; Stop 874
gaactcccgaatattgttagtgact

SEQ ID NO: 450184 - DNA, 25 bp, Artificial
  probe
  misc_feature (1)..(25): SEQ ID NO: 6818; WAN024FO6; Start 849; Stop 873
agaactcccgaatattgttagtgac

SEQ ID NO: 450185 - DNA, 25 bp, Artificial
  probe
  misc_feature (1)..(25): SEQ ID NO: 6818; WAN024FO6; Start 848; Stop 872
aagaactcccgaatattgttagtga

SEQ ID NO: 450186 - DNA, 25 bp, Artificial
  probe
  misc_feature (1)..(25): SEQ ID NO: 6818; WAN024FO6; Start 847; Stop 871
gaagaactcccgaatattgttagtg

SEQ ID NO: 450187 - DNA, 25 bp, Artificial
  probe
  misc_feature (1)..(25): SEQ ID NO: 6818; WAN024FO6; Start 355; Stop 379
gatgggaatattggagctattggaa

SEQ ID NO: 450188 - DNA, 25 bp, Artificial
  probe
  misc_feature (1)..(25): SEQ ID NO: 6819; WAN024FO5; Start 357; Stop 381
taatactattggagcgattggaaca

SEQ ID NO: 450189 - DNA, 25 bp, Artificial
  probe
  misc_feature (1)..(25): SEQ ID NO: 6819; WAN024FO5; Start 356; Stop 380
gtaatactattggagcgattggaac

SEQ ID NO: 450190 - DNA, 25 bp, Artificial
  probe
  misc_feature (1)..(25): SEQ ID NO: 6819; WAN024FO5; Start 767; Stop 791
ttaataatgatgacttagtgcgacg

SEQ ID NO: 450191 - DNA, 25 bp, Artificial
  probe
  misc_feature (1)..(25): SEQ ID NO: 6819; WAN024FO5; Start 358; Stop 382
aatactattggagcgattggaacaa

SEQ ID NO: 450192 - DNA, 25 bp, Artificial
  probe
  misc_feature (1)..(25): SEQ ID NO: 6819; WAN024FO5; Start 355; Stop 379
agtaatactattggagcgattggaa

SEQ ID NO: 450193 - DNA, 25 bp, Artificial
  probe
  misc_feature (1)..(25): SEQ ID NO: 6819; WAN024FO5; Start 384; Stop 408
aattattggttctgatggcttagat

SEQ ID NO: 450194 - DNA, 25 bp, Artificial
  probe
  misc_feature (1)..(25): SEQ ID NO: 6819; WAN024FO5; Start 385; Stop 409
attattggttctgatggcttagatc

SEQ ID NO: 450195 - DNA, 25 bp, Artificial
  probe
  misc_feature (1)..(25): SEQ ID NO: 6819; WAN024FO5; Start 692; Stop 716
aagcaggtctcgatatgttgtatat

SEQ ID NO: 450196 - DNA, 25 bp, Artificial
  probe
  misc_feature (1)..(25): SEQ ID NO: 6819; WAN024FO5; Start 768; Stop 792
taataatgatgacttagtgcgacgt

SEQ ID NO: 450197 - DNA, 25 bp, Artificial
  probe
  misc_feature (1)..(25): SEQ ID NO: 6819; WAN024FO5; Start 546; Stop 570
ttcggctccaagatacaacaatcaa

SEQ ID NO: 450198 - DNA, 25 bp, Artificial
  probe
  misc_feature (1)..(25): SEQ ID NO: 6819; WAN024FO5; Start 626; Stop 650
ttatgggattgtatggtggaacttt

SEQ ID NO: 450199 - DNA, 25 bp, Artificial
  probe
  misc_feature (1)..(25): SEQ ID NO: 6819; WAN024FO5; Start 625; Stop 649
tttatgggattgtatggtggaactt

SEQ ID NO: 450200 - DNA, 25 bp, Artificial
  probe
  misc_feature (1)..(25): SEQ ID NO: 6819; WAN024FO5; Start 624; Stop 648
atttatgggattgtatggtggaact

SEQ ID NO: 450201 - DNA, 25 bp, Artificial
  probe
  misc_feature (1)..(25): SEQ ID NO: 6819; WAN024FO5; Start 693; Stop 717
agcaggtctcgatatgttgtatata

SEQ ID NO: 450202 - DNA, 25 bp, Artificial
  probe
  misc_feature (1)..(25): SEQ ID NO: 6819; WAN024FO5; Start 623; Stop 647
aatttatgggattgtatggtggaac

SEQ ID NO: 450203 - DNA, 25 bp, Artificial
  probe
  misc_feature (1)..(25): SEQ ID NO: 6819; WAN024FO5; Start 51; Stop 75
taattgggaggacactttagaatgc

SEQ ID NO: 450204 - DNA, 25 bp, Artificial
  probe
  misc_feature (1)..(25): SEQ ID NO: 6819; WAN024FO5; Start 354; Stop 378
tagtaatactattggagcgattgga

SEQ ID NO: 450205 - DNA, 25 bp, Artificial
  probe
  misc_feature (1)..(25): SEQ ID NO: 6819; WAN024FO5; Start 359; Stop 383
atactattggagcgattggaacaaa

SEQ ID NO: 450206 - DNA, 25 bp, Artificial
  probe
  misc_feature (1)..(25): SEQ ID NO: 6819; WAN024FO5; Start 48; Stop 72
tcttaattgggaggacactttagaa

SEQ ID NO: 450207 - DNA, 25 bp, Artificial
  probe
  misc_feature (1)..(25): SEQ ID NO: 6819; WAN024FO5; Start 50; Stop 74
ttaattgggaggacactttagaatg

SEQ ID NO: 450208 - DNA, 25 bp, Artificial
  probe
  misc_feature (1)..(25): SEQ ID NO: 6819; WAN024FO5; Start 737; Stop 761
ataaagaagatcaatcgtcgctaca

SEQ ID NO: 450209 - DNA, 25 bp, Artificial
  probe
  misc_feature (1)..(25): SEQ ID NO: 6819; WAN024FO5; Start 736; Stop 760
cataaagaagatcaatcgtcgctac

SEQ ID NO: 450210 - DNA, 25 bp, Artificial
  probe
  misc_feature (1)..(25): SEQ ID NO: 6819; WAN024FO5; Start 735; Stop 759
tcataaagaagatcaatcgtcgcta

SEQ ID NO: 450211 - DNA, 25 bp, Artificial
  probe
  misc_feature (1)..(25): SEQ ID NO: 6819; WAN024FO5; Start 47; Stop 71
atcttaattgggaggacactttaga

SEQ ID NO: 450212 - DNA, 25 bp, Artificial
  probe
  misc_feature (1)..(25): SEQ ID NO: 6819; WAN024FO5; Start 738; Stop 762
taaagaagatcaatcgtcgctacaa

SEQ ID NO: 450213 - DNA, 25 bp, Artificial
  probe
  misc_feature (1)..(25): SEQ ID NO: 6819; WAN024FO5; Start 585; Stop 609
tggatcagttatctttcttaccgag

SEQ ID NO: 450214 - DNA, 25 bp, Artificial
  probe
  misc_feature (1)..(25): SEQ ID NO: 6819; WAN024FO5; Start 199; Stop 223
tgtgtagtggataataacttaggtt

SEQ ID NO: 450215 - DNA, 25 bp, Artificial
  probe
  misc_feature (1)..(25): SEQ ID NO: 6819; WAN024FO5; Start 198; Stop 222
ttgtgtagtggataataacttaggt

SEQ ID NO: 450216 - DNA, 25 bp, Artificial
  probe
  misc_feature (1)..(25): SEQ ID NO: 6819; WAN024FO5; Start 49; Stop 73
cttaattgggaggacactttagaat

SEQ ID NO: 450217 - DNA, 25 bp, Artificial
  probe
  misc_feature (1)..(25): SEQ ID NO: 6819; WAN024FO5; Start 734; Stop 758
atcataaagaagatcaatcgtcgct

SEQ ID NO: 450218 - DNA, 25 bp, Artificial
  probe
  misc_feature (1)..(25): SEQ ID NO: 6819; WAN024FO5; Start 584; Stop 608
atggatcagttatctttcttaccga

SEQ ID NO: 450219 - DNA, 25 bp, Artificial
  probe
  misc_feature (1)..(25): SEQ ID NO: 6819; WAN024FO5; Start 733; Stop 757
tatcataaagaagatcaatcgtcgc

SEQ ID NO: 450220 - DNA, 25 bp, Artificial
  probe
  misc_feature (1)..(25): SEQ ID NO: 6819; WAN024FO5; Start 586; Stop 610
ggatcagttatctttcttaccgaga

SEQ ID NO: 450221 - DNA, 25 bp, Artificial
  probe
  misc_feature (1)..(25): SEQ ID NO: 6820; WAN024ATH; Start 1390; Stop 1414
cctaaccagcaagttcttctcttat

SEQ ID NO: 450222 - DNA, 25 bp, Artificial
  probe
  misc_feature (1)..(25): SEQ ID NO: 6820; WAN024ATH; Start 1392; Stop 1416
taaccagcaagttcttctcttatct

SEQ ID NO: 450223 - DNA, 25 bp, Artificial
  probe
  misc_feature (1)..(25): SEQ ID NO: 6820; WAN024ATH; Start 1391; Stop 1415
ctaaccagcaagttcttctcttatc

SEQ ID NO: 450224 - DNA, 25 bp, Artificial
  probe
  misc_feature (1)..(25): SEQ ID NO: 6820; WAN024ATH; Start 1389; Stop 1413
acctaaccagcaagttcttctctta

SEQ ID NO: 450225 - DNA, 25 bp, Artificial
  probe
  misc_feature (1)..(25): SEQ ID NO: 6820; WAN024ATH; Start 1095; Stop 1119
tattctctatgtgacggttcaacag

SEQ ID NO: 450226 - DNA, 25 bp, Artificial
  probe
  misc_feature (1)..(25): SEQ ID NO: 6820; WAN024ATH; Start 1395; Stop 1419
ccagcaagttcttctcttatctgat

SEQ ID NO: 450227 - DNA, 25 bp, Artificial
  probe
  misc_feature (1)..(25): SEQ ID NO: 6820; WAN024ATH; Start 1393; Stop 1417
aaccagcaagttcttctcttatctg

SEQ ID NO: 450228 - DNA, 25 bp, Artificial
  probe
  misc_feature (1)..(25): SEQ ID NO: 6820; WAN024ATH; Start 1394; Stop 1418
accagcaagttcttctcttatctga

SEQ ID NO: 450229 - DNA, 25 bp, Artificial
  probe
  misc_feature (1)..(25): SEQ ID NO: 6820; WAN024ATH; Start 1396; Stop 1420
cagcaagttcttctcttatctgata

SEQ ID NO: 450230 - DNA, 25 bp, Artificial
  probe
  misc_feature (1)..(25): SEQ ID NO: 6820; WAN024ATH; Start 1388; Stop 1412
cacctaaccagcaagttcttctctt

SEQ ID NO: 450231 - DNA, 25 bp, Artificial
  probe
  misc_feature (1)..(25): SEQ ID NO: 6820; WAN024ATH; Start 930; Stop 954
taatcataagacagggaaaccaact

SEQ ID NO: 450232 - DNA, 25 bp, Artificial
  probe
  misc_feature (1)..(25): SEQ ID NO: 6820; WAN024ATH; Start 1518; Stop 1542
ctctactgtgcagaagctaactaat

SEQ ID NO: 450233 - DNA, 25 bp, Artificial
  probe
  misc_feature (1)..(25): SEQ ID NO: 6820; WAN024ATH; Start 1225; Stop 1249
ttaaatcaggtaaccaatcaaagcg

SEQ ID NO: 450234 - DNA, 25 bp, Artificial
  probe
  misc_feature (1)..(25): SEQ ID NO: 6820; WAN024ATH; Start 929; Stop 953
ataatcataagacagggaaaccaac

SEQ ID NO: 450235 - DNA, 25 bp, Artificial
  probe
  misc_feature (1)..(25): SEQ ID NO: 6820; WAN024ATH; Start 1397; Stop 1421
agcaagttcttctcttatctgataa

SEQ ID NO: 450236 - DNA, 25 bp, Artificial
  probe
  misc_feature (1)..(25): SEQ ID NO: 6820; WAN024ATH; Start 841; Stop 865
gtgggaaatcctgtgtctaaagatg

SEQ ID NO: 450237 - DNA, 25 bp, Artificial
  probe
  misc_feature (1)..(25): SEQ ID NO: 6820; WAN024ATH; Start 927; Stop 951
gtataatcataagacagggaaacca

SEQ ID NO: 450238 - DNA, 25 bp, Artificial
  probe
  misc_feature (1)..(25): SEQ ID NO: 6820; WAN024ATH; Start 1356; Stop 1380
agaatcatctgtagaagaagggacg

SEQ ID NO: 450239 - DNA, 25 bp, Artificial
  probe
  misc_feature (1)..(25): SEQ ID NO: 6820; WAN024ATH; Start 840; Stop 864
tgtgggaaatcctgtgtctaaagat

SEQ ID NO: 450240 - DNA, 25 bp, Artificial
  probe
  misc_feature (1)..(25): SEQ ID NO: 6820; WAN024ATH; Start 839; Stop 863
ttgtgggaaatcctgtgtctaaaga

SEQ ID NO: 450241 - DNA, 25 bp, Artificial
  probe
  misc_feature (1)..(25): SEQ ID NO: 6820; WAN024ATH; Start 838; Stop 862
gttgtgggaaatcctgtgtctaaag

SEQ ID NO: 450242 - DNA, 25 bp, Artificial
  probe
  misc_feature (1)..(25): SEQ ID NO: 6820; WAN024ATH; Start 931; Stop 955
aatcataagacagggaaaccaactg

SEQ ID NO: 450243 - DNA, 25 bp, Artificial
  probe
  misc_feature (1)..(25): SEQ ID NO: 6820; WAN024ATH; Start 837; Stop 861
agttgtgggaaatcctgtgtctaaa

SEQ ID NO: 450244 - DNA, 25 bp, Artificial
  probe
  misc_feature (1)..(25): SEQ ID NO: 6820; WAN024ATH; Start 836; Stop 860
aagttgtgggaaatcctgtgtctaa

SEQ ID NO: 450245 - DNA, 25 bp, Artificial
  probe
  misc_feature (1)..(25): SEQ ID NO: 6820; WAN024ATH; Start 1096; Stop 1120
attctctatgtgacggttcaacagc

SEQ ID NO: 450246 - DNA, 25 bp, Artificial
  probe
  misc_feature (1)..(25): SEQ ID NO: 6820; WAN024ATH; Start 928; Stop 952
tataatcataagacagggaaaccaa

SEQ ID NO: 450247 - DNA, 25 bp, Artificial
  probe
  misc_feature (1)..(25): SEQ ID NO: 6820; WAN024ATH; Start 835; Stop 859
gaagttgtgggaaatcctgtgtcta

SEQ ID NO: 450248 - DNA, 25 bp, Artificial
  probe
  misc_feature (1)..(25): SEQ ID NO: 6820; WAN024ATH; Start 1357; Stop 1381
gaatcatctgtagaagaagggacgg

SEQ ID NO: 450249 - DNA, 25 bp, Artificial
  probe
  misc_feature (1)..(25): SEQ ID NO: 6820; WAN024ATH; Start 926; Stop 950
tgtataatcataagacagggaaacc

SEQ ID NO: 450250 - DNA, 25 bp, Artificial
  probe
  misc_feature (1)..(25): SEQ ID NO: 6820; WAN024ATH; Start 1224; Stop 1248
gttaaatcaggtaaccaatcaaagc

SEQ ID NO: 450251 - DNA, 25 bp, Artificial
  probe
  misc_feature (1)..(25): SEQ ID NO: 6820; WAN024ATH; Start 1359; Stop 1383
atcatctgtagaagaagggacggat

SEQ ID NO: 450252 - DNA, 25 bp, Artificial
  probe
  misc_feature (1)..(25): SEQ ID NO: 6820; WAN024ATH; Start 1223; Stop 1247
cgttaaatcaggtaaccaatcaaag

SEQ ID NO: 450253 - DNA, 25 bp, Artificial
  probe
  misc_feature (1)..(25): SEQ ID NO: 6820; WAN024ATH; Start 808; Stop 832
gatcaaactgctcggaaatcacaaa

SEQ ID NO: 450254 - DNA, 25 bp, Artificial
  probe
  misc_feature (1)..(25): SEQ ID NO: 6821; WAN024CFH; Start 210; Stop 234
ttatcagccttcagacttcaatacc

SEQ ID NO: 450255 - DNA, 25 bp, Artificial
  probe
  misc_feature (1)..(25): SEQ ID NO: 6821; WAN024CFH; Start 211; Stop 235
tatcagccttcagacttcaatacct

SEQ ID NO: 450256 - DNA, 25 bp, Artificial
  probe
  misc_feature (1)..(25): SEQ ID NO: 6821; WAN024CFH; Start 209; Stop 233
attatcagccttcagacttcaatac

SEQ ID NO: 450257 - DNA, 25 bp, Artificial
  probe
  misc_feature (1)..(25): SEQ ID NO: 6821; WAN024CFH; Start 212; Stop 236
atcagccttcagacttcaatacctt

SEQ ID NO: 450258 - DNA, 25 bp, Artificial
  probe
  misc_feature (1)..(25): SEQ ID NO: 6821; WAN024CFH; Start 208; Stop 232
aattatcagccttcagacttcaata

SEQ ID NO: 450259 - DNA, 25 bp, Artificial
  probe
  misc_feature (1)..(25): SEQ ID NO: 6821; WAN024CFH; Start 579; Stop 603
acaagctctcgttcaattacttctt

SEQ ID NO: 450260 - DNA, 25 bp, Artificial
  probe
  misc_feature (1)..(25): SEQ ID NO: 6821; WAN024CFH; Start 580; Stop 604
caagctctcgttcaattacttctta

SEQ ID NO: 450261 - DNA, 25 bp, Artificial
  probe
  misc_feature (1)..(25): SEQ ID NO: 6821; WAN024CFH; Start 578; Stop 602
aacaagctctcgttcaattacttct

SEQ ID NO: 450262 - DNA, 25 bp, Artificial
  probe
  misc_feature (1)..(25): SEQ ID NO: 6821; WAN024CFH; Start 213; Stop 237
tcagccttcagacttcaataccttg

SEQ ID NO: 450263 - DNA, 25 bp, Artificial
  probe
  misc_feature (1)..(25): SEQ ID NO: 6821; WAN024CFH; Start 290; Stop 314
atatggtaagcaaagagatggaact

SEQ ID NO: 450264 - DNA, 25 bp, Artificial
  probe
  misc_feature (1)..(25): SEQ ID NO: 6821; WAN024CFH; Start 207; Stop 231
taattatcagccttcagacttcaat

SEQ ID NO: 450265 - DNA, 25 bp, Artificial
  probe
  misc_feature (1)..(25): SEQ ID NO: 6821; WAN024CFH; Start 291; Stop 315
tatggtaagcaaagagatggaactg

SEQ ID NO: 450266 - DNA, 25 bp, Artificial
  probe
  misc_feature (1)..(25): SEQ ID NO: 6821; WAN024CFH; Start 297; Stop 321
aagcaaagagatggaactgtttaga

SEQ ID NO: 450267 - DNA, 25 bp, Artificial
  probe
  misc_feature (1)..(25): SEQ ID NO: 6821; WAN024CFH; Start 295; Stop 319
gtaagcaaagagatggaactgttta

SEQ ID NO: 450268 - DNA, 25 bp, Artificial
  probe
  misc_feature (1)..(25): SEQ ID NO: 6821; WAN024CFH; Start 581; Stop 605
aagctctcgttcaattacttcttaa

SEQ ID NO: 450269 - DNA, 25 bp, Artificial
  probe
  misc_feature (1)..(25): SEQ ID NO: 6821; WAN024CFH; Start 299; Stop 323
gcaaagagatggaactgtttagaga

SEQ ID NO: 450270 - DNA, 25 bp, Artificial
  probe
  misc_feature (1)..(25): SEQ ID NO: 6821; WAN024CFH; Start 298; Stop 322
agcaaagagatggaactgtttagag

SEQ ID NO: 450271 - DNA, 25 bp, Artificial
  probe
  misc_feature (1)..(25): SEQ ID NO: 6821; WAN024CFH; Start 289; Stop 313
aatatggtaagcaaagagatggaac

SEQ ID NO: 450272 - DNA, 25 bp, Artificial
  probe
  misc_feature (1)..(25): SEQ ID NO: 6821; WAN024CFH; Start 296; Stop 320
taagcaaagagatggaactgtttag

SEQ ID NO: 450273 - DNA, 25 bp, Artificial
  probe
  misc_feature (1)..(25): SEQ ID NO: 6821; WAN024CFH; Start 582; Stop 606
agctctcgttcaattacttcttaat

SEQ ID NO: 450274 - DNA, 25 bp, Artificial
  probe
  misc_feature (1)..(25): SEQ ID NO: 6821; WAN024CFH; Start 300; Stop 324
caaagagatggaactgtttagagaa

SEQ ID NO: 450275 - DNA, 25 bp, Artificial
  probe
  misc_feature (1)..(25): SEQ ID NO: 6821; WAN024CFH; Start 294; Stop 318
ggtaagcaaagagatggaactgttt

SEQ ID NO: 450276 - DNA, 25 bp, Artificial
  probe
  misc_feature (1)..(25): SEQ ID NO: 6821; WAN024CFH; Start 244; Stop 268
ttagttcaacaggctgcatacaatc

SEQ ID NO: 450277 - DNA, 25 bp, Artificial
  probe
  misc_feature (1)..(25): SEQ ID NO: 6821; WAN024CFH; Start 243; Stop 267
cttagttcaacaggctgcatacaat

SEQ ID NO: 450278 - DNA, 25 bp, Artificial
  probe
  misc_feature (1)..(25): SEQ ID NO: 6821; WAN024CFH; Start 301; Stop 325
aaagagatggaactgtttagagaaa

SEQ ID NO: 450279 - DNA, 25 bp, Artificial
  probe
  misc_feature (1)..(25): SEQ ID NO: 6821; WAN024CFH; Start 470; Stop 494
ttcttattcttggaaattgttgtcg

SEQ ID NO: 450280 - DNA, 25 bp, Artificial
  probe
  misc_feature (1)..(25): SEQ ID NO: 6821; WAN024CFH; Start 401; Stop 425
tgagtaatcaagacacctcttatct

SEQ ID NO: 450281 - DNA, 25 bp, Artificial
  probe
  misc_feature (1)..(25): SEQ ID NO: 6821; WAN024CFH; Start 292; Stop 316
atggtaagcaaagagatggaactgt

SEQ ID NO: 450282 - DNA, 25 bp, Artificial
  probe
  misc_feature (1)..(25): SEQ ID NO: 6821; WAN024CFH; Start 230; Stop 254
ataccttgatacgcttagttcaaca

SEQ ID NO: 450283 - DNA, 25 bp, Artificial
  probe
  misc_feature (1)..(25): SEQ ID NO: 6821; WAN024CFH; Start 227; Stop 251
tcaataccttgatacgcttagttca

SEQ ID NO: 450284 - DNA, 25 bp, Artificial
  probe
  misc_feature (1)..(25): SEQ ID NO: 6821; WAN024CFH; Start 224; Stop 248
acttcaataccttgatacgcttagt

SEQ ID NO: 450285 - DNA, 25 bp, Artificial
  probe
  misc_feature (1)..(25): SEQ ID NO: 6821; WAN024CFH; Start 216; Stop 240
gccttcagacttcaataccttgata

SEQ ID NO: 450286 - DNA, 25 bp, Artificial
  probe
  misc_feature (1)..(25): SEQ ID NO: 6821; WAN024CFH; Start 222; Stop 246
agacttcaataccttgatacgctta

SEQ ID NO: 450287 - DNA, 25 bp, Artificial
  probe
  misc_feature (1)..(25): SEQ ID NO: 6822; WAN024CFI; Start 200; Stop 224
tctgtaatcattatcaaccttcgga

SEQ ID NO: 450288 - DNA, 25 bp, Artificial
  probe
  misc_feature (1)..(25): SEQ ID NO: 6822; WAN024CFI; Start 620; Stop 644
tgattgagaacgacttatatgagga

SEQ ID NO: 450289 - DNA, 25 bp, Artificial
  probe
  misc_feature (1)..(25): SEQ ID NO: 6822; WAN024CFI; Start 199; Stop 223
atctgtaatcattatcaaccttcgg

SEQ ID NO: 450290 - DNA, 25 bp, Artificial
  probe
  misc_feature (1)..(25): SEQ ID NO: 6822; WAN024CFI; Start 201; Stop 225
ctgtaatcattatcaaccttcggat

SEQ ID NO: 450291 - DNA, 25 bp, Artificial
  probe
  misc_feature (1)..(25): SEQ ID NO: 6822; WAN024CFI; Start 624; Stop 648
tgagaacgacttatatgaggaatct

SEQ ID NO: 450292 - DNA, 25 bp, Artificial
  probe
  misc_feature (1)..(25): SEQ ID NO: 6822; WAN024CFI; Start 580; Stop 604
caatctctcattcaactacttctca

SEQ ID NO: 450293 - DNA, 25 bp, Artificial
  probe
  misc_feature (1)..(25): SEQ ID NO: 6822; WAN024CFI; Start 579; Stop 603
acaatctctcattcaactacttctc

SEQ ID NO: 450294 - DNA, 25 bp, Artificial
  probe
  misc_feature (1)..(25): SEQ ID NO: 6822; WAN024CFI; Start 578; Stop 602
gacaatctctcattcaactacttct

SEQ ID NO: 450295 - DNA, 25 bp, Artificial
  probe
  misc_feature (1)..(25): SEQ ID NO: 6822; WAN024CFI; Start 619; Stop 643
atgattgagaacgacttatatgagg

SEQ ID NO: 450296 - DNA, 25 bp, Artificial
  probe
  misc_feature (1)..(25): SEQ ID NO: 6822; WAN024CFI; Start 623; Stop 647
ttgagaacgacttatatgaggaatc

SEQ ID NO: 450297 - DNA, 25 bp, Artificial
  probe
  misc_feature (1)..(25): SEQ ID NO: 6822; WAN024CFI; Start 621; Stop 645
gattgagaacgacttatatgaggaa

SEQ ID NO: 450298 - DNA, 25 bp, Artificial
  probe
  misc_feature (1)..(25): SEQ ID NO: 6822; WAN024CFI; Start 577; Stop 601
agacaatctctcattcaactacttc

SEQ ID NO: 450299 - DNA, 25 bp, Artificial
  probe
  misc_feature (1)..(25): SEQ ID NO: 6822; WAN024CFI; Start 625; Stop 649
gagaacgacttatatgaggaatctt

SEQ ID NO: 450300 - DNA, 25 bp, Artificial
  probe
  misc_feature (1)..(25): SEQ ID NO: 6822; WAN024CFI; Start 581; Stop 605
aatctctcattcaactacttctcaa

SEQ ID NO: 450301 - DNA, 25 bp, Artificial
  probe
  misc_feature (1)..(25): SEQ ID NO: 6822; WAN024CFI; Start 622; Stop 646
attgagaacgacttatatgaggaat

SEQ ID NO: 450302 - DNA, 25 bp, Artificial
  probe
  misc_feature (1)..(25): SEQ ID NO: 6822; WAN024CFI; Start 585; Stop 609
tctcattcaactacttctcaattct

SEQ ID NO: 450303 - DNA, 25 bp, Artificial
  probe
  misc_feature (1)..(25): SEQ ID NO: 6822; WAN024CFI; Start 583; Stop 607
tctctcattcaactacttctcaatt

SEQ ID NO: 450304 - DNA, 25 bp, Artificial
  probe
  misc_feature (1)..(25): SEQ ID NO: 6822; WAN024CFI; Start 582; Stop 606
atctctcattcaactacttctcaat

SEQ ID NO: 450305 - DNA, 25 bp, Artificial
  probe
  misc_feature (1)..(25): SEQ ID NO: 6822; WAN024CFI; Start 584; Stop 608
ctctcattcaactacttctcaattc

SEQ ID NO: 450306 - DNA, 25 bp, Artificial
  probe
  misc_feature (1)..(25): SEQ ID NO: 6822; WAN024CFI; Start 367; Stop 391
agtattgtttcgggaatggataaga

SEQ ID NO: 450307 - DNA, 25 bp, Artificial
  probe
  misc_feature (1)..(25): SEQ ID NO: 6822; WAN024CFI; Start 376; Stop 400
tcgggaatggataagaatcatcaat

SEQ ID NO: 450308 - DNA, 25 bp, Artificial
  probe
  misc_feature (1)..(25): SEQ ID NO: 6822; WAN024CFI; Start 375; Stop 399
ttcgggaatggataagaatcatcaa

SEQ ID NO: 450309 - DNA, 25 bp, Artificial
  probe
  misc_feature (1)..(25): SEQ ID NO: 6822; WAN024CFI; Start 374; Stop 398
tttcgggaatggataagaatcatca

SEQ ID NO: 450310 - DNA, 25 bp, Artificial
  probe
  misc_feature (1)..(25): SEQ ID NO: 6822; WAN024CFI; Start 373; Stop 397
gtttcgggaatggataagaatcatc

SEQ ID NO: 450311 - DNA, 25 bp, Artificial
  probe
  misc_feature (1)..(25): SEQ ID NO: 6822; WAN024CFI; Start 372; Stop 396
tgtttcgggaatggataagaatcat

SEQ ID NO: 450312 - DNA, 25 bp, Artificial
  probe
  misc_feature (1)..(25): SEQ ID NO: 6822; WAN024CFI; Start 366; Stop 390
aagtattgtttcgggaatggataag

SEQ ID NO: 450313 - DNA, 25 bp, Artificial
  probe
  misc_feature (1)..(25): SEQ ID NO: 6822; WAN024CFI; Start 371; Stop 395
ttgtttcgggaatggataagaatca

SEQ ID NO: 450314 - DNA, 25 bp, Artificial
  probe
  misc_feature (1)..(25): SEQ ID NO: 6822; WAN024CFI; Start 586; Stop 610
ctcattcaactacttctcaattctt

SEQ ID NO: 450315 - DNA, 25 bp, Artificial
  probe
  misc_feature (1)..(25): SEQ ID NO: 6822; WAN024CFI; Start 576; Stop 600
tagacaatctctcattcaactactt

SEQ ID NO: 450316 - DNA, 25 bp, Artificial
  probe
  misc_feature (1)..(25): SEQ ID NO: 6822; WAN024CFI; Start 370; Stop 394
attgtttcgggaatggataagaatc

SEQ ID NO: 450317 - DNA, 25 bp, Artificial
  probe
  misc_feature (1)..(25): SEQ ID NO: 6822; WAN024CFI; Start 194; Stop 218
tgcttatctgtaatcattatcaacc

SEQ ID NO: 450318 - DNA, 25 bp, Artificial
  probe
  misc_feature (1)..(25): SEQ ID NO: 6822; WAN024CFI; Start 368; Stop 392
gtattgtttcgggaatggataagaa

SEQ ID NO: 450319 - DNA, 25 bp, Artificial
  probe
  misc_feature (1)..(25): SEQ ID NO: 6822; WAN024CFI; Start 365; Stop 389
aaagtattgtttcgggaatggataa

SEQ ID NO: 450320 - DNA, 25 bp, Artificial
  probe
  misc_feature (1)..(25): SEQ ID NO: 6823; WAN024B53; Start 99; Stop 123
atatgatagagccgttcgttgtcaa

SEQ ID NO: 450321 - DNA, 25 bp, Artificial
  probe
  misc_feature (1)..(25): SEQ ID NO: 6823; WAN024B53; Start 98; Stop 122
aatatgatagagccgttcgttgtca

SEQ ID NO: 450322 - DNA, 25 bp, Artificial
  probe
  misc_feature (1)..(25): SEQ ID NO: 6823; WAN024B53; Start 34; Stop 58
aagctcaatatcatcactgttcttg

SEQ ID NO: 450323 - DNA, 25 bp, Artificial
  probe
  misc_feature (1)..(25): SEQ ID NO: 6823; WAN024B53; Start 96; Stop 120
taaatatgatagagccgttcgttgt

SEQ ID NO: 450324 - DNA, 25 bp, Artificial
  probe
  misc_feature (1)..(25): SEQ ID NO: 6823; WAN024B53; Start 95; Stop 119
ttaaatatgatagagccgttcgttg

SEQ ID NO: 450325 - DNA, 25 bp, Artificial
  probe
  misc_feature (1)..(25): SEQ ID NO: 6823; WAN024B53; Start 94; Stop 118
cttaaatatgatagagccgttcgtt

SEQ ID NO: 450326 - DNA, 25 bp, Artificial
  probe
  misc_feature (1)..(25): SEQ ID NO: 6823; WAN024B53; Start 93; Stop 117
tcttaaatatgatagagccgttcgt

SEQ ID NO: 450327 - DNA, 25 bp, Artificial
  probe
  misc_feature (1)..(25): SEQ ID NO: 6823; WAN024B53; Start 100; Stop 124
tatgatagagccgttcgttgtcaag

SEQ ID NO: 450328 - DNA, 25 bp, Artificial
  probe
  misc_feature (1)..(25): SEQ ID NO: 6823; WAN024B53; Start 97; Stop 121
aaatatgatagagccgttcgttgtc

SEQ ID NO: 450329 - DNA, 25 bp, Artificial
  probe
  misc_feature (1)..(25): SEQ ID NO: 6823; WAN024B53; Start 92; Stop 116
ttcttaaatatgatagagccgttcg

SEQ ID NO: 450330 - DNA, 25 bp, Artificial
  probe
  misc_feature (1)..(25): SEQ ID NO: 6823; WAN024B53; Start 36; Stop 60
gctcaatatcatcactgttcttgaa

SEQ ID NO: 450331 - DNA, 25 bp, Artificial
  probe
  misc_feature (1)..(25): SEQ ID NO: 6823; WAN024B53; Start 35; Stop 59
agctcaatatcatcactgttcttga

SEQ ID NO: 450332 - DNA, 25 bp, Artificial
  probe
  misc_feature (1)..(25): SEQ ID NO: 6823; WAN024B53; Start 153; Stop 177
tccttactatgacttagctagacaa

SEQ ID NO: 450333 - DNA, 25 bp, Artificial
  probe
  misc_feature (1)..(25): SEQ ID NO: 6823; WAN024B53; Start 33; Stop 57
aaagctcaatatcatcactgttctt

SEQ ID NO: 450334 - DNA, 25 bp, Artificial
  probe
  misc_feature (1)..(25): SEQ ID NO: 6823; WAN024B53; Start 152; Stop 176
gtccttactatgacttagctagaca

SEQ ID NO: 450335 - DNA, 25 bp, Artificial
  probe
  misc_feature (1)..(25): SEQ ID NO: 6823; WAN024B53; Start 37; Stop 61
ctcaatatcatcactgttcttgaag

SEQ ID NO: 450336 - DNA, 25 bp, Artificial
  probe
  misc_feature (1)..(25): SEQ ID NO: 6823; WAN024B53; Start 91; Stop 115
tttcttaaatatgatagagccgttc

SEQ ID NO: 450337 - DNA, 25 bp, Artificial
  probe
  misc_feature (1)..(25): SEQ ID NO: 6823; WAN024B53; Start 90; Stop 114
ctttcttaaatatgatagagccgtt

SEQ ID NO: 450338 - DNA, 25 bp, Artificial
  probe
  misc_feature (1)..(25): SEQ ID NO: 6823; WAN024B53; Start 101; Stop 125
atgatagagccgttcgttgtcaagt

SEQ ID NO: 450339 - DNA, 25 bp, Artificial
  probe
  misc_feature (1)..(25): SEQ ID NO: 6823; WAN024B53; Start 114; Stop 138
tcgttgtcaagtgaaaatcattact

SEQ ID NO: 450340 - DNA, 25 bp, Artificial
  probe
  misc_feature (1)..(25): SEQ ID NO: 6823; WAN024B53; Start 115; Stop 139
cgttgtcaagtgaaaatcattacta

SEQ ID NO: 450341 - DNA, 25 bp, Artificial
  probe
  misc_feature (1)..(25): SEQ ID NO: 6823; WAN024B53; Start 32; Stop 56
aaaagctcaatatcatcactgttct

SEQ ID NO: 450342 - DNA, 25 bp, Artificial
  probe
  misc_feature (1)..(25): SEQ ID NO: 6823; WAN024B53; Start 102; Stop 126
tgatagagccgttcgttgtcaagtg

SEQ ID NO: 450343 - DNA, 25 bp, Artificial
  probe
  misc_feature (1)..(25): SEQ ID NO: 6823; WAN024B53; Start 31; Stop 55
gaaaagctcaatatcatcactgttc

SEQ ID NO: 450344 - DNA, 25 bp, Artificial
  probe
  misc_feature (1)..(25): SEQ ID NO: 6823; WAN024B53; Start 30; Stop 54
tgaaaagctcaatatcatcactgtt

SEQ ID NO: 450345 - DNA, 25 bp, Artificial
  probe
  misc_feature (1)..(25): SEQ ID NO: 6823; WAN024B53; Start 136; Stop 160
actatggatatgtttagtccttact

SEQ ID NO: 450346 - DNA, 25 bp, Artificial
  probe
  misc_feature (1)..(25): SEQ ID NO: 6823; WAN024B53; Start 118; Stop 142
tgtcaagtgaaaatcattactatgg

SEQ ID NO: 450347 - DNA, 25 bp, Artificial
  probe
  misc_feature (1)..(25): SEQ ID NO: 6823; WAN024B53; Start 119; Stop 143
gtcaagtgaaaatcattactatgga

SEQ ID NO: 450348 - DNA, 25 bp, Artificial
  probe
  misc_feature (1)..(25): SEQ ID NO: 6823; WAN024B53; Start 151; Stop 175
agtccttactatgacttagctagac

SEQ ID NO: 450349 - DNA, 25 bp, Artificial
  probe
  misc_feature (1)..(25): SEQ ID NO: 6823; WAN024B53; Start 146; Stop 170
tgtttagtccttactatgacttagc

SEQ ID NO: 450350 - DNA, 25 bp, Artificial
  probe
  misc_feature (1)..(25): SEQ ID NO: 6823; WAN024B53; Start 132; Stop 156
cattactatggatatgtttagtcct

SEQ ID NO: 450351 - DNA, 25 bp, Artificial
  probe
  misc_feature (1)..(25): SEQ ID NO: 6823; WAN024B53; Start 131; Stop 155
tcattactatggatatgtttagtcc

SEQ ID NO: 450352 - DNA, 25 bp, Artificial
  probe
  misc_feature (1)..(25): SEQ ID NO: 6823; WAN024B53; Start 147; Stop 171
gtttagtccttactatgacttagct

SEQ ID NO: 450353 - DNA, 25 bp, Artificial
  probe
  misc_feature (1)..(25): SEQ ID NO: 6824; WAN024BNY; Start 886; Stop 910
ctagcaatcagtacaataggcgtaa

SEQ ID NO: 450354 - DNA, 25 bp, Artificial
  probe
  misc_feature (1)..(25): SEQ ID NO: 6824; WAN024BNY; Start 724; Stop 748
tatcttgatatgcctatcgctatgc

SEQ ID NO: 450355 - DNA, 25 bp, Artificial
  probe
  misc_feature (1)..(25): SEQ ID NO: 6824; WAN024BNY; Start 201; Stop 225
tatagacacaatacctatcgctcac

SEQ ID NO: 450356 - DNA, 25 bp, Artificial
  probe
  misc_feature (1)..(25): SEQ ID NO: 6824; WAN024BNY; Start 155; Stop 179
tcattattacaggacatactaggct

SEQ ID NO: 450357 - DNA, 25 bp, Artificial
  probe
  misc_feature (1)..(25): SEQ ID NO: 6824; WAN024BNY; Start 200; Stop 224
gtatagacacaatacctatcgctca

SEQ ID NO: 450358 - DNA, 25 bp, Artificial
  probe
  misc_feature (1)..(25): SEQ ID NO: 6824; WAN024BNY; Start 719; Stop 743
gcttatatcttgatatgcctatcgc

SEQ ID NO: 450359 - DNA, 25 bp, Artificial
  probe
  misc_feature (1)..(25): SEQ ID NO: 6824; WAN024BNY; Start 154; Stop 178
atcattattacaggacatactaggc

SEQ ID NO: 450360 - DNA, 25 bp, Artificial
  probe
  misc_feature (1)..(25): SEQ ID NO: 6824; WAN024BNY; Start 779; Stop 803
taggtcagattatgcaagattacgg

SEQ ID NO: 450361 - DNA, 25 bp, Artificial
  probe
  misc_feature (1)..(25): SEQ ID NO: 6824; WAN024BNY; Start 202; Stop 226
atagacacaatacctatcgctcacg

SEQ ID NO: 450362 - DNA, 25 bp, Artificial
  probe
  misc_feature (1)..(25): SEQ ID NO: 6824; WAN024BNY; Start 270; Stop 294
agataatcgagttgctgagtattca

SEQ ID NO: 450363 - DNA, 25 bp, Artificial
  probe
  misc_feature (1)..(25): SEQ ID NO: 6824; WAN024BNY; Start 2; Stop 26
tggagatgttacagattgaatatgt

SEQ ID NO: 450364 - DNA, 25 bp, Artificial
  probe
  misc_feature (1)..(25): SEQ ID NO: 6824; WAN024BNY; Start 463; Stop 487
accacaataaaccaatacaaccttt

SEQ ID NO: 450365 - DNA, 25 bp, Artificial
  probe
  misc_feature (1)..(25): SEQ ID NO: 6824; WAN024BNY; Start 738; Stop 762
tatcgctatgcaagtatggaacatt

SEQ ID NO: 450366 - DNA, 25 bp, Artificial
  probe
  misc_feature (1)..(25): SEQ ID NO: 6824; WAN024BNY; Start 181; Stop 205
aaggctgctctttctttaggtatag

SEQ ID NO: 450367 - DNA, 25 bp, Artificial
  probe
  misc_feature (1)..(25): SEQ ID NO: 6824; WAN024BNY; Start 750; Stop 774
agtatggaacatttacaggtcaagg

SEQ ID NO: 450368 - DNA, 25 bp, Artificial
  probe
  misc_feature (1)..(25): SEQ ID NO: 6824; WAN024BNY; Start 737; Stop 761
ctatcgctatgcaagtatggaacat

SEQ ID NO: 450369 - DNA, 25 bp, Artificial
  probe
  misc_feature (1)..(25): SEQ ID NO: 6824; WAN024BNY; Start 1052; Stop 1076
caacaacggaaaggatgaaagaaag

SEQ ID NO: 450370 - DNA, 25 bp, Artificial
  probe
  misc_feature (1)..(25): SEQ ID NO: 6824; WAN024BNY; Start 271; Stop 295
gataatcgagttgctgagtattcaa

SEQ ID NO: 450371 - DNA, 25 bp, Artificial
  probe
  misc_feature (1)..(25): SEQ ID NO: 6824; WAN024BNY; Start 184; Stop 208
gctgctctttctttaggtatagaca

SEQ ID NO: 450372 - DNA, 25 bp, Artificial
  probe
  misc_feature (1)..(25): SEQ ID NO: 6824; WAN024BNY; Start 748; Stop 772
caagtatggaacatttacaggtcaa

SEQ ID NO: 450373 - DNA, 25 bp, Artificial
  probe
  misc_feature (1)..(25): SEQ ID NO: 6824; WAN024BNY; Start 156; Stop 180
cattattacaggacatactaggcta

SEQ ID NO: 450374 - DNA, 25 bp, Artificial
  probe
  misc_feature (1)..(25): SEQ ID NO: 6824; WAN024BNY; Start 1053; Stop 1077
aacaacggaaaggatgaaagaaagt

SEQ ID NO: 450375 - DNA, 25 bp, Artificial
  probe
  misc_feature (1)..(25): SEQ ID NO: 6824; WAN024BNY; Start 778; Stop 802
ataggtcagattatgcaagattacg

SEQ ID NO: 450376 - DNA, 25 bp, Artificial
  probe
  misc_feature (1)..(25): SEQ ID NO: 6824; WAN024BNY; Start 723; Stop 747
atatcttgatatgcctatcgctatg

SEQ ID NO: 450377 - DNA, 25 bp, Artificial
  probe
  misc_feature (1)..(25): SEQ ID NO: 6824; WAN024BNY; Start 720; Stop 744
cttatatcttgatatgcctatcgct

SEQ ID NO: 450378 - DNA, 25 bp, Artificial
  probe
  misc_feature (1)..(25): SEQ ID NO: 6824; WAN024BNY; Start 340; Stop 364
acaatagatatggctcagtttggtt

SEQ ID NO: 450379 - DNA, 25 bp, Artificial
  probe
  misc_feature (1)..(25): SEQ ID NO: 6824; WAN024BNY; Start 339; Stop 363
aacaatagatatggctcagtttggt

SEQ ID NO: 450380 - DNA, 25 bp, Artificial
  probe
  misc_feature (1)..(25): SEQ ID NO: 6824; WAN024BNY; Start 183; Stop 207
ggctgctctttctttaggtatagac

SEQ ID NO: 450381 - DNA, 25 bp, Artificial
  probe
  misc_feature (1)..(25): SEQ ID NO: 6824; WAN024BNY; Start 182; Stop 206
aggctgctctttctttaggtataga

SEQ ID NO: 450382 - DNA, 25 bp, Artificial
  probe
  misc_feature (1)..(25): SEQ ID NO: 6824; WAN024BNY; Start 749; Stop 773
aagtatggaacatttacaggtcaag

SEQ ID NO: 450383 - DNA, 25 bp, Artificial
  probe
  misc_feature (1)..(25): SEQ ID NO: 6824; WAN024BNY; Start 186; Stop 210
tgctctttctttaggtatagacaca

SEQ ID NO: 450384 - DNA, 25 bp, Artificial
  probe
  misc_feature (1)..(25): SEQ ID NO: 6824; WAN024BNY; Start 462; Stop 486
taccacaataaaccaatacaacctt

SEQ ID NO: 450385 - DNA, 25 bp, Artificial
  probe
  misc_feature (1)..(25): SEQ ID NO: 6824; WAN024BNY; Start 160; Stop 184
attacaggacatactaggctaaagg

SEQ ID NO: 450386 - DNA, 25 bp, Artificial
  probe
  misc_feature (1)..(25): SEQ ID NO: 6825; WAN024BLR; Start 67; Stop 91
ctagacaagtacattacgattgcta

SEQ ID NO: 450387 - DNA, 25 bp, Artificial
  probe
  misc_feature (1)..(25): SEQ ID NO: 6825; WAN024BLR; Start 68; Stop 92
tagacaagtacattacgattgctaa

SEQ ID NO: 450388 - DNA, 25 bp, Artificial
  probe
  misc_feature (1)..(25): SEQ ID NO: 6825; WAN024BLR; Start 66; Stop 90
tctagacaagtacattacgattgct

SEQ ID NO: 450389 - DNA, 25 bp, Artificial
  probe
  misc_feature (1)..(25): SEQ ID NO: 6825; WAN024BLR; Start 69; Stop 93
agacaagtacattacgattgctaaa

SEQ ID NO: 450390 - DNA, 25 bp, Artificial
  probe
  misc_feature (1)..(25): SEQ ID NO: 6825; WAN024BLR; Start 60; Stop 84
atcgaatctagacaagtacattacg

SEQ ID NO: 450391 - DNA, 25 bp, Artificial
  probe
  misc_feature (1)..(25): SEQ ID NO: 6825; WAN024BLR; Start 65; Stop 89
atctagacaagtacattacgattgc

SEQ ID NO: 450392 - DNA, 25 bp, Artificial
  probe
  misc_feature (1)..(25): SEQ ID NO: 6825; WAN024BLR; Start 62; Stop 86
cgaatctagacaagtacattacgat

SEQ ID NO: 450393 - DNA, 25 bp, Artificial
  probe
  misc_feature (1)..(25): SEQ ID NO: 6825; WAN024BLR; Start 56; Stop 80
tcagatcgaatctagacaagtacat

SEQ ID NO: 450394 - DNA, 25 bp, Artificial
  probe
  misc_feature (1)..(25): SEQ ID NO: 6825; WAN024BLR; Start 55; Stop 79
atcagatcgaatctagacaagtaca

SEQ ID NO: 450395 - DNA, 25 bp, Artificial
  probe
  misc_feature (1)..(25): SEQ ID NO: 6825; WAN024BLR; Start 61; Stop 85
tcgaatctagacaagtacattacga

SEQ ID NO: 450396 - DNA, 25 bp, Artificial
  probe
  misc_feature (1)..(25): SEQ ID NO: 6825; WAN024BLR; Start 59; Stop 83
gatcgaatctagacaagtacattac

SEQ ID NO: 450397 - DNA, 25 bp, Artificial
  probe
  misc_feature (1)..(25): SEQ ID NO: 6825; WAN024BLR; Start 57; Stop 81
cagatcgaatctagacaagtacatt

SEQ ID NO: 450398 - DNA, 25 bp, Artificial
  probe
  misc_feature (1)..(25): SEQ ID NO: 6825; WAN024BLR; Start 82; Stop 106
acgattgctaaaacatttgtagaaa

SEQ ID NO: 450399 - DNA, 25 bp, Artificial
  probe
  misc_feature (1)..(25): SEQ ID NO: 6825; WAN024BLR; Start 77; Stop 101
acattacgattgctaaaacatttgt

SEQ ID NO: 450400 - DNA, 25 bp, Artificial
  probe
  misc_feature (1)..(25): SEQ ID NO: 6825; WAN024BLR; Start 72; Stop 96
caagtacattacgattgctaaaaca

SEQ ID NO: 450401 - DNA, 25 bp, Artificial
  probe
  misc_feature (1)..(25): SEQ ID NO: 6825; WAN024BLR; Start 71; Stop 95
acaagtacattacgattgctaaaac

SEQ ID NO: 450402 - DNA, 25 bp, Artificial
  probe
  misc_feature (1)..(25): SEQ ID NO: 6825; WAN024BLR; Start 6; Stop 30
gcaagctactttggaggttttaaat

SEQ ID NO: 450403 - DNA, 25 bp, Artificial
  probe
  misc_feature (1)..(25): SEQ ID NO: 6825; WAN024BLR; Start 54; Stop 78
tatcagatcgaatctagacaagtac

SEQ ID NO: 450404 - DNA, 25 bp, Artificial
  probe
  misc_feature (1)..(25): SEQ ID NO: 6825; WAN024BLR; Start 70; Stop 94
gacaagtacattacgattgctaaaa

SEQ ID NO: 450405 - DNA, 25 bp, Artificial
  probe
  misc_feature (1)..(25): SEQ ID NO: 6825; WAN024BLR; Start 81; Stop 105
tacgattgctaaaacatttgtagaa

SEQ ID NO: 450406 - DNA, 25 bp, Artificial
  probe
  misc_feature (1)..(25): SEQ ID NO: 6825; WAN024BLR; Start 80; Stop 104
ttacgattgctaaaacatttgtaga

SEQ ID NO: 450407 - DNA, 25 bp, Artificial
  probe
  misc_feature (1)..(25): SEQ ID NO: 6825; WAN024BLR; Start 5; Stop 29
agcaagctactttggaggttttaaa

SEQ ID NO: 450408 - DNA, 25 bp, Artificial
  probe
  misc_feature (1)..(25): SEQ ID NO: 6825; WAN024BLR; Start 64; Stop 88
aatctagacaagtacattacgattg

SEQ ID NO: 450409 - DNA, 25 bp, Artificial
  probe
  misc_feature (1)..(25): SEQ ID NO: 6825; WAN024BLR; Start 4; Stop 28
gagcaagctactttggaggttttaa

SEQ ID NO: 450410 - DNA, 25 bp, Artificial
  probe
  misc_feature (1)..(25): SEQ ID NO: 6825; WAN024BLR; Start 94; Stop 118
acatttgtagaaattcatttgactt

SEQ ID NO: 450411 - DNA, 25 bp, Artificial
  probe
  misc_feature (1)..(25): SEQ ID NO: 6825; WAN024BLR; Start 93; Stop 117
aacatttgtagaaattcatttgact

SEQ ID NO: 450412 - DNA, 25 bp, Artificial
  probe
  misc_feature (1)..(25): SEQ ID NO: 6825; WAN024BLR; Start 74; Stop 98
agtacattacgattgctaaaacatt

SEQ ID NO: 450413 - DNA, 25 bp, Artificial
  probe
  misc_feature (1)..(25): SEQ ID NO: 6825; WAN024BLR; Start 73; Stop 97
aagtacattacgattgctaaaacat

SEQ ID NO: 450414 - DNA, 25 bp, Artificial
  probe
  misc_feature (1)..(25): SEQ ID NO: 6825; WAN024BLR; Start 58; Stop 82
agatcgaatctagacaagtacatta

SEQ ID NO: 450415 - DNA, 25 bp, Artificial
  probe
  misc_feature (1)..(25): SEQ ID NO: 6825; WAN024BLR; Start 63; Stop 87
gaatctagacaagtacattacgatt

SEQ ID NO: 450416 - DNA, 25 bp, Artificial
  probe
  misc_feature (1)..(25): SEQ ID NO: 6825; WAN024BLR; Start 76; Stop 100
tacattacgattgctaaaacatttg

SEQ ID NO: 450417 - DNA, 25 bp, Artificial
  probe
  misc_feature (1)..(25): SEQ ID NO: 6825; WAN024BLR; Start 78; Stop 102
cattacgattgctaaaacatttgta

SEQ ID NO: 450418 - DNA, 25 bp, Artificial
  probe
  misc_feature (1)..(25): SEQ ID NO: 6825; WAN024BLR; Start 10; Stop 34
gctactttggaggttttaaatacca

SEQ ID NO: 450419 - DNA, 25 bp, Artificial
  probe
  misc_feature (1)..(25): SEQ ID NO: 6826; WAN024BK6; Start 12; Stop 36
tttatggagaagtaacctttcgtgt

SEQ ID NO: 450420 - DNA, 25 bp, Artificial
  probe
  misc_feature (1)..(25): SEQ ID NO: 6826; WAN024BK6; Start 13; Stop 37
ttatggagaagtaacctttcgtgtt

SEQ ID NO: 450421 - DNA, 25 bp, Artificial
  probe
  misc_feature (1)..(25): SEQ ID NO: 6826; WAN024BK6; Start 14; Stop 38
tatggagaagtaacctttcgtgtta

SEQ ID NO: 450422 - DNA, 25 bp, Artificial
  probe
  misc_feature (1)..(25): SEQ ID NO: 6826; WAN024BK6; Start 11; Stop 35
ttttatggagaagtaacctttcgtg

SEQ ID NO: 450423 - DNA, 25 bp, Artificial
  probe
  misc_feature (1)..(25): SEQ ID NO: 6826; WAN024BK6; Start 10; Stop 34
attttatggagaagtaacctttcgt

SEQ ID NO: 450424 - DNA, 25 bp, Artificial
  probe
  misc_feature (1)..(25): SEQ ID NO: 6826; WAN024BK6; Start 24; Stop 48
taacctttcgtgttacttctctttt

SEQ ID NO: 450425 - DNA, 25 bp, Artificial
  probe
  misc_feature (1)..(25): SEQ ID NO: 6826; WAN024BK6; Start 5; Stop 29
agcatattttatggagaagtaacct

SEQ ID NO: 450426 - DNA, 25 bp, Artificial
  probe
  misc_feature (1)..(25): SEQ ID NO: 6826; WAN024BK6; Start 2; Stop 26
tggagcatattttatggagaagtaa

SEQ ID NO: 450427 - DNA, 25 bp, Artificial
  probe
  misc_feature (1)..(25): SEQ ID NO: 6826; WAN024BK6; Start 9; Stop 33
tattttatggagaagtaacctttcg

SEQ ID NO: 450428 - DNA, 25 bp, Artificial
  probe
  misc_feature (1)..(25): SEQ ID NO: 6826; WAN024BK6; Start 4; Stop 28
gagcatattttatggagaagtaacc

SEQ ID NO: 450429 - DNA, 25 bp, Artificial
  probe
  misc_feature (1)..(25): SEQ ID NO: 6826; WAN024BK6; Start 3; Stop 27
ggagcatattttatggagaagtaac

SEQ ID NO: 450430 - DNA, 25 bp, Artificial
  probe
  misc_feature (1)..(25): SEQ ID NO: 6826; WAN024BK6; Start 1; Stop 25
atggagcatattttatggagaagta

SEQ ID NO: 450431 - DNA, 25 bp, Artificial
  probe
  misc_feature (1)..(25): SEQ ID NO: 6826; WAN024BK6; Start 6; Stop 30
gcatattttatggagaagtaacctt

SEQ ID NO: 450432 - DNA, 25 bp, Artificial
  probe
  misc_feature (1)..(25): SEQ ID NO: 6826; WAN024BK6; Start 23; Stop 47
gtaacctttcgtgttacttctcttt

SEQ ID NO: 450433 - DNA, 25 bp, Artificial
  probe
  misc_feature (1)..(25): SEQ ID NO: 6826; WAN024BK6; Start 15; Stop 39
atggagaagtaacctttcgtgttac

SEQ ID NO: 450434 - DNA, 25 bp, Artificial
  probe
  misc_feature (1)..(25): SEQ ID NO: 6826; WAN024BK6; Start 7; Stop 31
catattttatggagaagtaaccttt

SEQ ID NO: 450435 - DNA, 25 bp, Artificial
  probe
  misc_feature (1)..(25): SEQ ID NO: 6827; WAN024FTV; Start 391; Stop 415
ctctattcacactacgctcatactt

SEQ ID NO: 450436 - DNA, 25 bp, Artificial
  probe
  misc_feature (1)..(25): SEQ ID NO: 6827; WAN024FTV; Start 428; Stop 452
atcttgatgttgctcgtgatgtaat

SEQ ID NO: 450437 - DNA, 25 bp, Artificial
  probe
  misc_feature (1)..(25): SEQ ID NO: 6827; WAN024FTV; Start 429; Stop 453
tcttgatgttgctcgtgatgtaatt

SEQ ID NO: 450438 - DNA, 25 bp, Artificial
  probe
  misc_feature (1)..(25): SEQ ID NO: 6827; WAN024FTV; Start 644; Stop 668
tcggtcgtgttagtgaattattatt

SEQ ID NO: 450439 - DNA, 25 bp, Artificial
  probe
  misc_feature (1)..(25): SEQ ID NO: 6827; WAN024FTV; Start 643; Stop 667
ttcggtcgtgttagtgaattattat

SEQ ID NO: 450440 - DNA, 25 bp, Artificial
  probe
  misc_feature (1)..(25): SEQ ID NO: 6827; WAN024FTV; Start 390; Stop 414
gctctattcacactacgctcatact

SEQ ID NO: 450441 - DNA, 25 bp, Artificial
  probe
  misc_feature (1)..(25): SEQ ID NO: 6827; WAN024FTV; Start 430; Stop 454
cttgatgttgctcgtgatgtaatta

SEQ ID NO: 450442 - DNA, 25 bp, Artificial
  probe
  misc_feature (1)..(25): SEQ ID NO: 6827; WAN024FTV; Start 431; Stop 455
ttgatgttgctcgtgatgtaattaa

SEQ ID NO: 450443 - DNA, 25 bp, Artificial
  probe
  misc_feature (1)..(25): SEQ ID NO: 6827; WAN024FTV; Start 357; Stop 381
agttcctaagaagaggcgatactat

SEQ ID NO: 450444 - DNA, 25 bp, Artificial
  probe
  misc_feature (1)..(25): SEQ ID NO: 6827; WAN024FTV; Start 355; Stop 379
ttagttcctaagaagaggcgatact

SEQ ID NO: 450445 - DNA, 25 bp, Artificial
  probe
  misc_feature (1)..(25): SEQ ID NO: 6827; WAN024FTV; Start 166; Stop 190
aatccatattattgtgaattgacgg

SEQ ID NO: 450446 - DNA, 25 bp, Artificial
  probe
  misc_feature (1)..(25): SEQ ID NO: 6827; WAN024FTV; Start 358; Stop 382
gttcctaagaagaggcgatactata

SEQ ID NO: 450447 - DNA, 25 bp, Artificial
  probe
  misc_feature (1)..(25): SEQ ID NO: 6827; WAN024FTV; Start 639; Stop 663
actattcggtcgtgttagtgaatta

SEQ ID NO: 450448 - DNA, 25 bp, Artificial
  probe
  misc_feature (1)..(25): SEQ ID NO: 6827; WAN024FTV; Start 356; Stop 380
tagttcctaagaagaggcgatacta

SEQ ID NO: 450449 - DNA, 25 bp, Artificial
  probe
  misc_feature (1)..(25): SEQ ID NO: 6827; WAN024FTV; Start 362; Stop 386
ctaagaagaggcgatactatattga

SEQ ID NO: 450450 - DNA, 25 bp, Artificial
  probe
  misc_feature (1)..(25): SEQ ID NO: 6827; WAN024FTV; Start 638; Stop 662
gactattcggtcgtgttagtgaatt

SEQ ID NO: 450451 - DNA, 25 bp, Artificial
  probe
  misc_feature (1)..(25): SEQ ID NO: 6827; WAN024FTV; Start 596; Stop 620
atgagcaaatagatgtatcccagtt

SEQ ID NO: 450452 - DNA, 25 bp, Artificial
  probe
  misc_feature (1)..(25): SEQ ID NO: 6827; WAN024FTV; Start 102; Stop 126
gagagacggtaaatcagatattggt

SEQ ID NO: 450453 - DNA, 25 bp, Artificial
  probe
  misc_feature (1)..(25): SEQ ID NO: 6827; WAN024FTV; Start 636; Stop 660
tagactattcggtcgtgttagtgaa

SEQ ID NO: 450454 - DNA, 25 bp, Artificial
  probe
  misc_feature (1)..(25): SEQ ID NO: 6827; WAN024FTV; Start 393; Stop 417
ctattcacactacgctcatactttg

SEQ ID NO: 450455 - DNA, 25 bp, Artificial
  probe
  misc_feature (1)..(25): SEQ ID NO: 6827; WAN024FTV; Start 392; Stop 416
tctattcacactacgctcatacttt

SEQ ID NO: 450456 - DNA, 25 bp, Artificial
  probe
  misc_feature (1)..(25): SEQ ID NO: 6827; WAN024FTV; Start 366; Stop 390
gaagaggcgatactatattgaaacg

SEQ ID NO: 450457 - DNA, 25 bp, Artificial
  probe
  misc_feature (1)..(25): SEQ ID NO: 6827; WAN024FTV; Start 640; Stop 664
ctattcggtcgtgttagtgaattat

SEQ ID NO: 450458 - DNA, 25 bp, Artificial
  probe
  misc_feature (1)..(25): SEQ ID NO: 6827; WAN024FTV; Start 361; Stop 385
cctaagaagaggcgatactatattg

SEQ ID NO: 450459 - DNA, 25 bp, Artificial
  probe
  misc_feature (1)..(25): SEQ ID NO: 6827; WAN024FTV; Start 360; Stop 384
tcctaagaagaggcgatactatatt

SEQ ID NO: 450460 - DNA, 25 bp, Artificial
  probe
  misc_feature (1)..(25): SEQ ID NO: 6827; WAN024FTV; Start 359; Stop 383
ttcctaagaagaggcgatactatat

SEQ ID NO: 450461 - DNA, 25 bp, Artificial
  probe
  misc_feature (1)..(25): SEQ ID NO: 6827; WAN024FTV; Start 394; Stop 418
tattcacactacgctcatactttgg

SEQ ID NO: 450462 - DNA, 25 bp, Artificial
  probe
  misc_feature (1)..(25): SEQ ID NO: 6827; WAN024FTV; Start 101; Stop 125
ggagagacggtaaatcagatattgg

SEQ ID NO: 450463 - DNA, 25 bp, Artificial
  probe
  misc_feature (1)..(25): SEQ ID NO: 6827; WAN024FTV; Start 100; Stop 124
gggagagacggtaaatcagatattg

SEQ ID NO: 450464 - DNA, 25 bp, Artificial
  probe
  misc_feature (1)..(25): SEQ ID NO: 6827; WAN024FTV; Start 597; Stop 621
tgagcaaatagatgtatcccagtta

SEQ ID NO: 450465 - DNA, 25 bp, Artificial
  probe
  misc_feature (1)..(25): SEQ ID NO: 6827; WAN024FTV; Start 593; Stop 617
tgtatgagcaaatagatgtatccca

SEQ ID NO: 450466 - DNA, 25 bp, Artificial
  probe
  misc_feature (1)..(25): SEQ ID NO: 6827; WAN024FTV; Start 176; Stop 200
attgtgaattgacgggactttattg

SEQ ID NO: 450467 - DNA, 25 bp, Artificial
  probe
  misc_feature (1)..(25): SEQ ID NO: 6827; WAN024FTV; Start 169; Stop 193
ccatattattgtgaattgacgggac

SEQ ID NO: 450468 - DNA, 25 bp, Artificial
  probe
  misc_feature (1)..(25): SEQ ID NO: 6828; WAN024CWT; Start 25; Stop 49
aacactagactcattatcacccaaa

SEQ ID NO: 450469 - DNA, 25 bp, Artificial
  probe
  misc_feature (1)..(25): SEQ ID NO: 6828; WAN024CWT; Start 24; Stop 48
aaacactagactcattatcacccaa

SEQ ID NO: 450470 - DNA, 25 bp, Artificial
  probe
  misc_feature (1)..(25): SEQ ID NO: 6828; WAN024CWT; Start 23; Stop 47
taaacactagactcattatcaccca

SEQ ID NO: 450471 - DNA, 25 bp, Artificial
  probe
  misc_feature (1)..(25): SEQ ID NO: 6828; WAN024CWT; Start 10; Stop 34
gccattactgaaataaacactagac

SEQ ID NO: 450472 - DNA, 25 bp, Artificial
  probe
  misc_feature (1)..(25): SEQ ID NO: 6828; WAN024CWT; Start 9; Stop 33
agccattactgaaataaacactaga

SEQ ID NO: 450473 - DNA, 25 bp, Artificial
  probe
  misc_feature (1)..(25): SEQ ID NO: 6828; WAN024CWT; Start 22; Stop 46
ataaacactagactcattatcaccc

SEQ ID NO: 450474 - DNA, 25 bp, Artificial
  probe
  misc_feature (1)..(25): SEQ ID NO: 6828; WAN024CWT; Start 8; Stop 32
tagccattactgaaataaacactag

SEQ ID NO: 450475 - DNA, 25 bp, Artificial
  probe
  misc_feature (1)..(25): SEQ ID NO: 6828; WAN024CWT; Start 7; Stop 31
ctagccattactgaaataaacacta

SEQ ID NO: 450476 - DNA, 25 bp, Artificial
  probe
  misc_feature (1)..(25): SEQ ID NO: 6828; WAN024CWT; Start 26; Stop 50
acactagactcattatcacccaaaa

SEQ ID NO: 450477 - DNA, 25 bp, Artificial
  probe
  misc_feature (1)..(25): SEQ ID NO: 6828; WAN024CWT; Start 11; Stop 35
ccattactgaaataaacactagact

SEQ ID NO: 450478 - DNA, 25 bp, Artificial
  probe
  misc_feature (1)..(25): SEQ ID NO: 6828; WAN024CWT; Start 27; Stop 51
cactagactcattatcacccaaaat

SEQ ID NO: 450479 - DNA, 25 bp, Artificial
  probe
  misc_feature (1)..(25): SEQ ID NO: 6828; WAN024CWT; Start 21; Stop 45
aataaacactagactcattatcacc

SEQ ID NO: 450480 - DNA, 25 bp, Artificial
  probe
  misc_feature (1)..(25): SEQ ID NO: 6828; WAN024CWT; Start 12; Stop 36
cattactgaaataaacactagactc

SEQ ID NO: 450481 - DNA, 25 bp, Artificial
  probe
  misc_feature (1)..(25): SEQ ID NO: 6828; WAN024CWT; Start 28; Stop 52
actagactcattatcacccaaaatg

SEQ ID NO: 450482 - DNA, 25 bp, Artificial
  probe
  misc_feature (1)..(25): SEQ ID NO: 6828; WAN024CWT; Start 16; Stop 40
actgaaataaacactagactcatta

SEQ ID NO: 450483 - DNA, 25 bp, Artificial
  probe
  misc_feature (1)..(25): SEQ ID NO: 6828; WAN024CWT; Start 15; Stop 39
tactgaaataaacactagactcatt

SEQ ID NO: 450484 - DNA, 25 bp, Artificial
  probe
  misc_feature (1)..(25): SEQ ID NO: 6828; WAN024CWT; Start 14; Stop 38
ttactgaaataaacactagactcat

SEQ ID NO: 450485 - DNA, 25 bp, Artificial
  probe
  misc_feature (1)..(25): SEQ ID NO: 6828; WAN024CWT; Start 13; Stop 37
attactgaaataaacactagactca

SEQ ID NO: 450486 - DNA, 25 bp, Artificial
  probe
  misc_feature (1)..(25): SEQ ID NO: 6828; WAN024CWT; Start 29; Stop 53
ctagactcattatcacccaaaatga

SEQ ID NO: 450487 - DNA, 25 bp, Artificial
  probe
  misc_feature (1)..(25): SEQ ID NO: 6828; WAN024CWT; Start 31; Stop 55
agactcattatcacccaaaatgata

SEQ ID NO: 450488 - DNA, 25 bp, Artificial
  probe
  misc_feature (1)..(25): SEQ ID NO: 6828; WAN024CWT; Start 30; Stop 54
tagactcattatcacccaaaatgat

SEQ ID NO: 450489 - DNA, 25 bp, Artificial
  probe
  misc_feature (1)..(25): SEQ ID NO: 6828; WAN024CWT; Start 32; Stop 56
gactcattatcacccaaaatgatat

SEQ ID NO: 450490 - DNA, 25 bp, Artificial
  probe
  misc_feature (1)..(25): SEQ ID NO: 6828; WAN024CWT; Start 33; Stop 57
actcattatcacccaaaatgatatt

SEQ ID NO: 450491 - DNA, 25 bp, Artificial
  probe
  misc_feature (1)..(25): SEQ ID NO: 6828; WAN024CWT; Start 35; Stop 59
tcattatcacccaaaatgatatttg

SEQ ID NO: 450492 - DNA, 25 bp, Artificial
  probe
  misc_feature (1)..(25): SEQ ID NO: 6828; WAN024CWT; Start 34; Stop 58
ctcattatcacccaaaatgatattt

SEQ ID NO: 450493 - DNA, 25 bp, Artificial
  probe
  misc_feature (1)..(25): SEQ ID NO: 6829; WAN024BVY; Start 195; Stop 219
ccaagacatcaacagtatagagaac

SEQ ID NO: 450494 - DNA, 25 bp, Artificial
  probe
  misc_feature (1)..(25): SEQ ID NO: 6829; WAN024BVY; Start 92; Stop 116
aagttacgatagatgaagaggcttg

SEQ ID NO: 450495 - DNA, 25 bp, Artificial
  probe
  misc_feature (1)..(25): SEQ ID NO: 6829; WAN024BVY; Start 91; Stop 115
caagttacgatagatgaagaggctt

SEQ ID NO: 450496 - DNA, 25 bp, Artificial
  probe
  misc_feature (1)..(25): SEQ ID NO: 6829; WAN024BVY; Start 88; Stop 112
aaccaagttacgatagatgaagagg

SEQ ID NO: 450497 - DNA, 25 bp, Artificial
  probe
  misc_feature (1)..(25): SEQ ID NO: 6829; WAN024BVY; Start 95; Stop 119
ttacgatagatgaagaggcttggaa

SEQ ID NO: 450498 - DNA, 25 bp, Artificial
  probe
  misc_feature (1)..(25): SEQ ID NO: 6829; WAN024BVY; Start 196; Stop 220
caagacatcaacagtatagagaaca

SEQ ID NO: 450499 - DNA, 25 bp, Artificial
  probe
  misc_feature (1)..(25): SEQ ID NO: 6829; WAN024BVY; Start 90; Stop 114
ccaagttacgatagatgaagaggct

SEQ ID NO: 450500 - DNA, 25 bp, Artificial
  probe
  misc_feature (1)..(25): SEQ ID NO: 6829; WAN024BVY; Start 89; Stop 113
accaagttacgatagatgaagaggc

SEQ ID NO: 450501 - DNA, 25 bp, Artificial
  probe
  misc_feature (1)..(25): SEQ ID NO: 6829; WAN024BVY; Start 94; Stop 118
gttacgatagatgaagaggcttgga

SEQ ID NO: 450502 - DNA, 25 bp, Artificial
  probe
  misc_feature (1)..(25): SEQ ID NO: 6829; WAN024BVY; Start 93; Stop 117
agttacgatagatgaagaggcttgg

SEQ ID NO: 450503 - DNA, 25 bp, Artificial
  probe
  misc_feature (1)..(25): SEQ ID NO: 6829; WAN024BVY; Start 197; Stop 221
aagacatcaacagtatagagaacaa

SEQ ID NO: 450504 - DNA, 25 bp, Artificial
  probe
  misc_feature (1)..(25): SEQ ID NO: 6829; WAN024BVY; Start 366; Stop 390
gaacggagagctagaagtgtataag

SEQ ID NO: 450505 - DNA, 25 bp, Artificial
  probe
  misc_feature (1)..(25): SEQ ID NO: 6829; WAN024BVY; Start 365; Stop 389
agaacggagagctagaagtgtataa

SEQ ID NO: 450506 - DNA, 25 bp, Artificial
  probe
  misc_feature (1)..(25): SEQ ID NO: 6829; WAN024BVY; Start 364; Stop 388
cagaacggagagctagaagtgtata

SEQ ID NO: 450507 - DNA, 25 bp, Artificial
  probe
  misc_feature (1)..(25): SEQ ID NO: 6829; WAN024BVY; Start 194; Stop 218
cccaagacatcaacagtatagagaa

SEQ ID NO: 450508 - DNA, 25 bp, Artificial
  probe
  misc_feature (1)..(25): SEQ ID NO: 6829; WAN024BVY; Start 112; Stop 136
gcttggaaacttgtcttaccttatc

SEQ ID NO: 450509 - DNA, 25 bp, Artificial
  probe
  misc_feature (1)..(25): SEQ ID NO: 6829; WAN024BVY; Start 113; Stop 137
cttggaaacttgtcttaccttatcg

SEQ ID NO: 450510 - DNA, 25 bp, Artificial
  probe
  misc_feature (1)..(25): SEQ ID NO: 6829; WAN024BVY; Start 320; Stop 344
accgatataaacaaatagccgtctt

SEQ ID NO: 450511 - DNA, 25 bp, Artificial
  probe
  misc_feature (1)..(25): SEQ ID NO: 6829; WAN024BVY; Start 315; Stop 339
ctaccaccgatataaacaaatagcc

SEQ ID NO: 450512 - DNA, 25 bp, Artificial
  probe
  misc_feature (1)..(25): SEQ ID NO: 6829; WAN024BVY; Start 200; Stop 224
acatcaacagtatagagaacaaacg

SEQ ID NO: 450513 - DNA, 25 bp, Artificial
  probe
  misc_feature (1)..(25): SEQ ID NO: 6829; WAN024BVY; Start 114; Stop 138
ttggaaacttgtcttaccttatcgg

SEQ ID NO: 450514 - DNA, 25 bp, Artificial
  probe
  misc_feature (1)..(25): SEQ ID NO: 6829; WAN024BVY; Start 316; Stop 340
taccaccgatataaacaaatagccg

SEQ ID NO: 450515 - DNA, 25 bp, Artificial
  probe
  misc_feature (1)..(25): SEQ ID NO: 6829; WAN024BVY; Start 209; Stop 233
gtatagagaacaaacgagccagaaa

SEQ ID NO: 450516 - DNA, 25 bp, Artificial
  probe
  misc_feature (1)..(25): SEQ ID NO: 6829; WAN024BVY; Start 203; Stop 227
tcaacagtatagagaacaaacgagc

SEQ ID NO: 450517 - DNA, 25 bp, Artificial
  probe
  misc_feature (1)..(25): SEQ ID NO: 6829; WAN024BVY; Start 111; Stop 135
ggcttggaaacttgtcttaccttat

SEQ ID NO: 450518 - DNA, 25 bp, Artificial
  probe
  misc_feature (1)..(25): SEQ ID NO: 6829; WAN024BVY; Start 319; Stop 343
caccgatataaacaaatagccgtct

SEQ ID NO: 450519 - DNA, 25 bp, Artificial
  probe
  misc_feature (1)..(25): SEQ ID NO: 6829; WAN024BVY; Start 99; Stop 123
gatagatgaagaggcttggaaactt

SEQ ID NO: 450520 - DNA, 25 bp, Artificial
  probe
  misc_feature (1)..(25): SEQ ID NO: 6829; WAN024BVY; Start 201; Stop 225
catcaacagtatagagaacaaacga

SEQ ID NO: 450521 - DNA, 25 bp, Artificial
  probe
  misc_feature (1)..(25): SEQ ID NO: 6829; WAN024BVY; Start 321; Stop 345
ccgatataaacaaatagccgtctta

SEQ ID NO: 450522 - DNA, 25 bp, Artificial
  probe
  misc_feature (1)..(25): SEQ ID NO: 6829; WAN024BVY; Start 100; Stop 124
atagatgaagaggcttggaaacttg

SEQ ID NO: 450523 - DNA, 25 bp, Artificial
  probe
  misc_feature (1)..(25): SEQ ID NO: 6829; WAN024BVY; Start 202; Stop 226
atcaacagtatagagaacaaacgag

SEQ ID NO: 450524 - DNA, 25 bp, Artificial
  probe
  misc_feature (1)..(25): SEQ ID NO: 6829; WAN024BVY; Start 208; Stop 232
agtatagagaacaaacgagccagaa

SEQ ID NO: 450525 - DNA, 25 bp, Artificial
  probe
  misc_feature (1)..(25): SEQ ID NO: 6829; WAN024BVY; Start 96; Stop 120
tacgatagatgaagaggcttggaaa

SEQ ID NO: 450526 - DNA, 25 bp, Artificial
  probe
  misc_feature (1)..(25): SEQ ID NO: 6830; WAN024BZX; Start 730; Stop 754
atctctacatctacaattcaaccga

SEQ ID NO: 450527 - DNA, 25 bp, Artificial
  probe
  misc_feature (1)..(25): SEQ ID NO: 6830; WAN024BZX; Start 28; Stop 52
ttatattacggaatcagttcagcgg

SEQ ID NO: 450528 - DNA, 25 bp, Artificial
  probe
  misc_feature (1)..(25): SEQ ID NO: 6830; WAN024BZX; Start 27; Stop 51
attatattacggaatcagttcagcg

SEQ ID NO: 450529 - DNA, 25 bp, Artificial
  probe
  misc_feature (1)..(25): SEQ ID NO: 6830; WAN024BZX; Start 731; Stop 755
tctctacatctacaattcaaccgaa

SEQ ID NO: 450530 - DNA, 25 bp, Artificial
  probe
  misc_feature (1)..(25): SEQ ID NO: 6830; WAN024BZX; Start 301; Stop 325
attggtctctcttcaagtatgtcaa

SEQ ID NO: 450531 - DNA, 25 bp, Artificial
  probe
  misc_feature (1)..(25): SEQ ID NO: 6830; WAN024BZX; Start 302; Stop 326
ttggtctctcttcaagtatgtcaac

SEQ ID NO: 450532 - DNA, 25 bp, Artificial
  probe
  misc_feature (1)..(25): SEQ ID NO: 6830; WAN024BZX; Start 300; Stop 324
aattggtctctcttcaagtatgtca

SEQ ID NO: 450533 - DNA, 25 bp, Artificial
  probe
  misc_feature (1)..(25): SEQ ID NO: 6830; WAN024BZX; Start 357; Stop 381
cataataagtgtcatcaagaatggc

SEQ ID NO: 450534 - DNA, 25 bp, Artificial
  probe
  misc_feature (1)..(25): SEQ ID NO: 6830; WAN024BZX; Start 729; Stop 753
gatctctacatctacaattcaaccg

SEQ ID NO: 450535 - DNA, 25 bp, Artificial
  probe
  misc_feature (1)..(25): SEQ ID NO: 6830; WAN024BZX; Start 360; Stop 384
aataagtgtcatcaagaatggctat

SEQ ID NO: 450536 - DNA, 25 bp, Artificial
  probe
  misc_feature (1)..(25): SEQ ID NO: 6830; WAN024BZX; Start 358; Stop 382
ataataagtgtcatcaagaatggct

SEQ ID NO: 450537 - DNA, 25 bp, Artificial
  probe
  misc_feature (1)..(25): SEQ ID NO: 6830; WAN024BZX; Start 783; Stop 807
atacggttggattggagcattaata

SEQ ID NO: 450538 - DNA, 25 bp, Artificial
  probe
  misc_feature (1)..(25): SEQ ID NO: 6830; WAN024BZX; Start 784; Stop 808
tacggttggattggagcattaatag

SEQ ID NO: 450539 - DNA, 25 bp, Artificial
  probe
  misc_feature (1)..(25): SEQ ID NO: 6830; WAN024BZX; Start 782; Stop 806
aatacggttggattggagcattaat

SEQ ID NO: 450540 - DNA, 25 bp, Artificial
  probe
  misc_feature (1)..(25): SEQ ID NO: 6830; WAN024BZX; Start 303; Stop 327
tggtctctcttcaagtatgtcaacg

SEQ ID NO: 450541 - DNA, 25 bp, Artificial
  probe
  misc_feature (1)..(25): SEQ ID NO: 6830; WAN024BZX; Start 362; Stop 386
taagtgtcatcaagaatggctataa

SEQ ID NO: 450542 - DNA, 25 bp, Artificial
  probe
  misc_feature (1)..(25): SEQ ID NO: 6830; WAN024BZX; Start 359; Stop 383
taataagtgtcatcaagaatggcta

SEQ ID NO: 450543 - DNA, 25 bp, Artificial
  probe
  misc_feature (1)..(25): SEQ ID NO: 6830; WAN024BZX; Start 299; Stop 323
taattggtctctcttcaagtatgtc

SEQ ID NO: 450544 - DNA, 25 bp, Artificial
  probe
  misc_feature (1)..(25): SEQ ID NO: 6830; WAN024BZX; Start 361; Stop 385
ataagtgtcatcaagaatggctata

SEQ ID NO: 450545 - DNA, 25 bp, Artificial
  probe
  misc_feature (1)..(25): SEQ ID NO: 6830; WAN024BZX; Start 734; Stop 758
ctacatctacaattcaaccgaatgc

SEQ ID NO: 450546 - DNA, 25 bp, Artificial
  probe
  misc_feature (1)..(25): SEQ ID NO: 6830; WAN024BZX; Start 735; Stop 759
tacatctacaattcaaccgaatgct

SEQ ID NO: 450547 - DNA, 25 bp, Artificial
  probe
  misc_feature (1)..(25): SEQ ID NO: 6830; WAN024BZX; Start 738; Stop 762
atctacaattcaaccgaatgctcat

SEQ ID NO: 450548 - DNA, 25 bp, Artificial
  probe
  misc_feature (1)..(25): SEQ ID NO: 6830; WAN024BZX; Start 850; Stop 874
acgttatggacatatcttgctagtt

SEQ ID NO: 450549 - DNA, 25 bp, Artificial
  probe
  misc_feature (1)..(25): SEQ ID NO: 6830; WAN024BZX; Start 846; Stop 870
acttacgttatggacatatcttgct

SEQ ID NO: 450550 - DNA, 25 bp, Artificial
  probe
  misc_feature (1)..(25): SEQ ID NO: 6830; WAN024BZX; Start 733; Stop 757
tctacatctacaattcaaccgaatg

SEQ ID NO: 450551 - DNA, 25 bp, Artificial
  probe
  misc_feature (1)..(25): SEQ ID NO: 6830; WAN024BZX; Start 541; Stop 565
ttactctttagcccgtttgttgata

SEQ ID NO: 450552 - DNA, 25 bp, Artificial
  probe
  misc_feature (1)..(25): SEQ ID NO: 6830; WAN024BZX; Start 539; Stop 563
tattactctttagcccgtttgttga

SEQ ID NO: 450553 - DNA, 25 bp, Artificial
  probe
  misc_feature (1)..(25): SEQ ID NO: 6830; WAN024BZX; Start 298; Stop 322
ttaattggtctctcttcaagtatgt

SEQ ID NO: 450554 - DNA, 25 bp, Artificial
  probe
  misc_feature (1)..(25): SEQ ID NO: 6830; WAN024BZX; Start 780; Stop 804
taaatacggttggattggagcatta

SEQ ID NO: 450555 - DNA, 25 bp, Artificial
  probe
  misc_feature (1)..(25): SEQ ID NO: 6830; WAN024BZX; Start 728; Stop 752
tgatctctacatctacaattcaacc

SEQ ID NO: 450556 - DNA, 25 bp, Artificial
  probe
  misc_feature (1)..(25): SEQ ID NO: 6830; WAN024BZX; Start 542; Stop 566
tactctttagcccgtttgttgatat

SEQ ID NO: 450557 - DNA, 25 bp, Artificial
  probe
  misc_feature (1)..(25): SEQ ID NO: 6830; WAN024BZX; Start 538; Stop 562
ttattactctttagcccgtttgttg

SEQ ID NO: 450558 - DNA, 25 bp, Artificial
  probe
  misc_feature (1)..(25): SEQ ID NO: 6830; WAN024BZX; Start 849; Stop 873
tacgttatggacatatcttgctagt

SEQ ID NO: 450559 - DNA, 25 bp, Artificial
  probe
  misc_feature (1)..(25): SEQ ID NO: 6831; WAN024BKU; Start 175; Stop 199
gctccaagtcccattattgatgtat

SEQ ID NO: 450560 - DNA, 25 bp, Artificial
  probe
  misc_feature (1)..(25): SEQ ID NO: 6831; WAN024BKU; Start 176; Stop 200
ctccaagtcccattattgatgtatg

SEQ ID NO: 450561 - DNA, 25 bp, Artificial
  probe
  misc_feature (1)..(25): SEQ ID NO: 6831; WAN024BKU; Start 191; Stop 215
ttgatgtatgggaatatggtgtaaa

SEQ ID NO: 450562 - DNA, 25 bp, Artificial
  probe
  misc_feature (1)..(25): SEQ ID NO: 6831; WAN024BKU; Start 174; Stop 198
tgctccaagtcccattattgatgta

SEQ ID NO: 450563 - DNA, 25 bp, Artificial
  probe
  misc_feature (1)..(25): SEQ ID NO: 6831; WAN024BKU; Start 195; Stop 219
tgtatgggaatatggtgtaaatgat

SEQ ID NO: 450564 - DNA, 25 bp, Artificial
  probe
  misc_feature (1)..(25): SEQ ID NO: 6831; WAN024BKU; Start 194; Stop 218
atgtatgggaatatggtgtaaatga

SEQ ID NO: 450565 - DNA, 25 bp, Artificial
  probe
  misc_feature (1)..(25): SEQ ID NO: 6831; WAN024BKU; Start 192; Stop 216
tgatgtatgggaatatggtgtaaat

SEQ ID NO: 450566 - DNA, 25 bp, Artificial
  probe
  misc_feature (1)..(25): SEQ ID NO: 6831; WAN024BKU; Start 190; Stop 214
attgatgtatgggaatatggtgtaa

SEQ ID NO: 450567 - DNA, 25 bp, Artificial
  probe
  misc_feature (1)..(25): SEQ ID NO: 6831; WAN024BKU; Start 322; Stop 346
gattatggatgggcatattcaagtg

SEQ ID NO: 450568 - DNA, 25 bp, Artificial
  probe
  misc_feature (1)..(25): SEQ ID NO: 6831; WAN024BKU; Start 321; Stop 345
agattatggatgggcatattcaagt

SEQ ID NO: 450569 - DNA, 25 bp, Artificial
  probe
  misc_feature (1)..(25): SEQ ID NO: 6831; WAN024BKU; Start 199; Stop 223
tgggaatatggtgtaaatgataact

SEQ ID NO: 450570 - DNA, 25 bp, Artificial
  probe
  misc_feature (1)..(25): SEQ ID NO: 6831; WAN024BKU; Start 233; Stop 257
cgaattactttgttagttctccaag

SEQ ID NO: 450571 - DNA, 25 bp, Artificial
  probe
  misc_feature (1)..(25): SEQ ID NO: 6831; WAN024BKU; Start 193; Stop 217
gatgtatgggaatatggtgtaaatg

SEQ ID NO: 450572 - DNA, 25 bp, Artificial
  probe
  misc_feature (1)..(25): SEQ ID NO: 6831; WAN024BKU; Start 188; Stop 212
ttattgatgtatgggaatatggtgt

SEQ ID NO: 450573 - DNA, 25 bp, Artificial
  probe
  misc_feature (1)..(25): SEQ ID NO: 6831; WAN024BKU; Start 320; Stop 344
aagattatggatgggcatattcaag

SEQ ID NO: 450574 - DNA, 25 bp, Artificial
  probe
  misc_feature (1)..(25): SEQ ID NO: 6831; WAN024BKU; Start 294; Stop 318
gggaacagttaaagctcaggataaa

SEQ ID NO: 450575 - DNA, 25 bp, Artificial
  probe
  misc_feature (1)..(25): SEQ ID NO: 6831; WAN024BKU; Start 319; Stop 343
aaagattatggatgggcatattcaa

SEQ ID NO: 450576 - DNA, 25 bp, Artificial
  probe
  misc_feature (1)..(25): SEQ ID NO: 6831; WAN024BKU; Start 131; Stop 155
ttgctactacagctagtgtcgttaa

SEQ ID NO: 450577 - DNA, 25 bp, Artificial
  probe
  misc_feature (1)..(25): SEQ ID NO: 6831; WAN024BKU; Start 173; Stop 197
ctgctccaagtcccattattgatgt

SEQ ID NO: 450578 - DNA, 25 bp, Artificial
  probe
  misc_feature (1)..(25): SEQ ID NO: 6831; WAN024BKU; Start 198; Stop 222
atgggaatatggtgtaaatgataac

SEQ ID NO: 450579 - DNA, 25 bp, Artificial
  probe
  misc_feature (1)..(25): SEQ ID NO: 6831; WAN024BKU; Start 189; Stop 213
tattgatgtatgggaatatggtgta

SEQ ID NO: 450580 - DNA, 25 bp, Artificial
  probe
  misc_feature (1)..(25): SEQ ID NO: 6831; WAN024BKU; Start 232; Stop 256
tcgaattactttgttagttctccaa

SEQ ID NO: 450581 - DNA, 25 bp, Artificial
  probe
  misc_feature (1)..(25): SEQ ID NO: 6831; WAN024BKU; Start 187; Stop 211
attattgatgtatgggaatatggtg

SEQ ID NO: 450582 - DNA, 25 bp, Artificial
  probe
  misc_feature (1)..(25): SEQ ID NO: 6831; WAN024BKU; Start 186; Stop 210
cattattgatgtatgggaatatggt

SEQ ID NO: 450583 - DNA, 25 bp, Artificial
  probe
  misc_feature (1)..(25): SEQ ID NO: 6831; WAN024BKU; Start 172; Stop 196
cctgctccaagtcccattattgatg

SEQ ID NO: 450584 - DNA, 25 bp, Artificial
  probe
  misc_feature (1)..(25): SEQ ID NO: 6831; WAN024BKU; Start 196; Stop 220
gtatgggaatatggtgtaaatgata

SEQ ID NO: 450585 - DNA, 25 bp, Artificial
  probe
  misc_feature (1)..(25): SEQ ID NO: 6831; WAN024BKU; Start 323; Stop 347
attatggatgggcatattcaagtgc

SEQ ID NO: 450586 - DNA, 25 bp, Artificial
  probe
  misc_feature (1)..(25): SEQ ID NO: 6831; WAN024BKU; Start 200; Stop 224
gggaatatggtgtaaatgataacta

SEQ ID NO: 450587 - DNA, 25 bp, Artificial
  probe
  misc_feature (1)..(25): SEQ ID NO: 6831; WAN024BKU; Start 264; Stop 288
tggatcaaaatcttcagtaacgaat

SEQ ID NO: 450588 - DNA, 25 bp, Artificial
  probe
  misc_feature (1)..(25): SEQ ID NO: 6831; WAN024BKU; Start 263; Stop 287
ttggatcaaaatcttcagtaacgaa

SEQ ID NO: 450589 - DNA, 25 bp, Artificial
  probe
  misc_feature (1)..(25): SEQ ID NO: 6831; WAN024BKU; Start 130; Stop 154
tttgctactacagctagtgtcgtta

SEQ ID NO: 450590 - DNA, 25 bp, Artificial
  probe
  misc_feature (1)..(25): SEQ ID NO: 6831; WAN024BKU; Start 262; Stop 286
attggatcaaaatcttcagtaacga

SEQ ID NO: 450591 - DNA, 25 bp, Artificial
  probe
  misc_feature (1)..(25): SEQ ID NO: 6831; WAN024BKU; Start 132; Stop 156
tgctactacagctagtgtcgttaac

SEQ ID NO: 450592 - DNA, 25 bp, Artificial
  probe
  misc_feature (1)..(25): SEQ ID NO: 6832; WAN024F4H; Start 980; Stop 1004
ctaagtatcaagaagaagcagccaa

SEQ ID NO: 450593 - DNA, 25 bp, Artificial
  probe
  misc_feature (1)..(25): SEQ ID NO: 6832; WAN024F4H; Start 336; Stop 360
accacaagaagtcaagaacaagatt

SEQ ID NO: 450594 - DNA, 25 bp, Artificial
  probe
  misc_feature (1)..(25): SEQ ID NO: 6832; WAN024F4H; Start 300; Stop 324
tatgaataccttctacgctatgtgg

SEQ ID NO: 450595 - DNA, 25 bp, Artificial
  probe
  misc_feature (1)..(25): SEQ ID NO: 6832; WAN024F4H; Start 337; Stop 361
ccacaagaagtcaagaacaagattg

SEQ ID NO: 450596 - DNA, 25 bp, Artificial
  probe
  misc_feature (1)..(25): SEQ ID NO: 6832; WAN024F4H; Start 335; Stop 359
caccacaagaagtcaagaacaagat

SEQ ID NO: 450597 - DNA, 25 bp, Artificial
  probe
  misc_feature (1)..(25): SEQ ID NO: 6832; WAN024F4H; Start 236; Stop 260
ttaacaactatatcaactcgccagt

SEQ ID NO: 450598 - DNA, 25 bp, Artificial
  probe
  misc_feature (1)..(25): SEQ ID NO: 6832; WAN024F4H; Start 237; Stop 261
taacaactatatcaactcgccagtg

SEQ ID NO: 450599 - DNA, 25 bp, Artificial
  probe
  misc_feature (1)..(25): SEQ ID NO: 6832; WAN024F4H; Start 338; Stop 362
cacaagaagtcaagaacaagattgc

SEQ ID NO: 450600 - DNA, 25 bp, Artificial
  probe
  misc_feature (1)..(25): SEQ ID NO: 6832; WAN024F4H; Start 834; Stop 858
tccttatactcgtatcattgagcac

SEQ ID NO: 450601 - DNA, 25 bp, Artificial
  probe
  misc_feature (1)..(25): SEQ ID NO: 6832; WAN024F4H; Start 835; Stop 859
ccttatactcgtatcattgagcaca

SEQ ID NO: 450602 - DNA, 25 bp, Artificial
  probe
  misc_feature (1)..(25): SEQ ID NO: 6832; WAN024F4H; Start 838; Stop 862
tatactcgtatcattgagcacaagc

SEQ ID NO: 450603 - DNA, 25 bp, Artificial
  probe
  misc_feature (1)..(25): SEQ ID NO: 6832; WAN024F4H; Start 1006; Stop 1030
aatgacaaggttatcttctgtggac

SEQ ID NO: 450604 - DNA, 25 bp, Artificial
  probe
  misc_feature (1)..(25): SEQ ID NO: 6832; WAN024F4H; Start 929; Stop 953
gagatgagccatattatccaatcaa

SEQ ID NO: 450605 - DNA, 25 bp, Artificial
  probe
  misc_feature (1)..(25): SEQ ID NO: 6832; WAN024F4H; Start 299; Stop 323
atatgaataccttctacgctatgtg

SEQ ID NO: 450606 - DNA, 25 bp, Artificial
  probe
  misc_feature (1)..(25): SEQ ID NO: 6832; WAN024F4H; Start 329; Stop 353
ctaagacaccacaagaagtcaagaa

SEQ ID NO: 450607 - DNA, 25 bp, Artificial
  probe
  misc_feature (1)..(25): SEQ ID NO: 6832; WAN024F4H; Start 837; Stop 861
ttatactcgtatcattgagcacaag

SEQ ID NO: 450608 - DNA, 25 bp, Artificial
  probe
  misc_feature (1)..(25): SEQ ID NO: 6832; WAN024F4H; Start 836; Stop 860
cttatactcgtatcattgagcacaa

SEQ ID NO: 450609 - DNA, 25 bp, Artificial
  probe
  misc_feature (1)..(25): SEQ ID NO: 6832; WAN024F4H; Start 330; Stop 354
taagacaccacaagaagtcaagaac

SEQ ID NO: 450610 - DNA, 25 bp, Artificial
  probe
  misc_feature (1)..(25): SEQ ID NO: 6832; WAN024F4H; Start 327; Stop 351
aactaagacaccacaagaagtcaag

SEQ ID NO: 450611 - DNA, 25 bp, Artificial
  probe
  misc_feature (1)..(25): SEQ ID NO: 6832; WAN024F4H; Start 326; Stop 350
gaactaagacaccacaagaagtcaa

SEQ ID NO: 450612 - DNA, 25 bp, Artificial
  probe
  misc_feature (1)..(25): SEQ ID NO: 6832; WAN024F4H; Start 339; Stop 363
acaagaagtcaagaacaagattgcc

SEQ ID NO: 450613 - DNA, 25 bp, Artificial
  probe
  misc_feature (1)..(25): SEQ ID NO: 6832; WAN024F4H; Start 932; Stop 956
atgagccatattatccaatcaatga

SEQ ID NO: 450614 - DNA, 25 bp, Artificial
  probe
  misc_feature (1)..(25): SEQ ID NO: 6832; WAN024F4H; Start 928; Stop 952
ggagatgagccatattatccaatca

SEQ ID NO: 450615 - DNA, 25 bp, Artificial
  probe
  misc_feature (1)..(25): SEQ ID NO: 6832; WAN024F4H; Start 931; Stop 955
gatgagccatattatccaatcaatg

SEQ ID NO: 450616 - DNA, 25 bp, Artificial
  probe
  misc_feature (1)..(25): SEQ ID NO: 6832; WAN024F4H; Start 334; Stop 358
acaccacaagaagtcaagaacaaga

SEQ ID NO: 450617 - DNA, 25 bp, Artificial
  probe
  misc_feature (1)..(25): SEQ ID NO: 6832; WAN024F4H; Start 328; Stop 352
actaagacaccacaagaagtcaaga

SEQ ID NO: 450618 - DNA, 25 bp, Artificial
  probe
  misc_feature (1)..(25): SEQ ID NO: 6832; WAN024F4H; Start 930; Stop 954
agatgagccatattatccaatcaat

SEQ ID NO: 450619 - DNA, 25 bp, Artificial
  probe
  misc_feature (1)..(25): SEQ ID NO: 6832; WAN024F4H; Start 625; Stop 649
gtagaagtagagcttggtgttgatt

SEQ ID NO: 450620 - DNA, 25 bp, Artificial
  probe
  misc_feature (1)..(25): SEQ ID NO: 6832; WAN024F4H; Start 934; Stop 958
gagccatattatccaatcaatgatg

SEQ ID NO: 450621 - DNA, 25 bp, Artificial
  probe
  misc_feature (1)..(25): SEQ ID NO: 6832; WAN024F4H; Start 935; Stop 959
agccatattatccaatcaatgatga

SEQ ID NO: 450622 - DNA, 25 bp, Artificial
  probe
  misc_feature (1)..(25): SEQ ID NO: 6832; WAN024F4H; Start 933; Stop 957
tgagccatattatccaatcaatgat

SEQ ID NO: 450623 - DNA, 25 bp, Artificial
  probe
  misc_feature (1)..(25): SEQ ID NO: 6832; WAN024F4H; Start 298; Stop 322
aatatgaataccttctacgctatgt

SEQ ID NO: 450624 - DNA, 25 bp, Artificial
  probe
  misc_feature (1)..(25): SEQ ID NO: 6832; WAN024F4H; Start 981; Stop 1005
taagtatcaagaagaagcagccaaa

SEQ ID NO: 450625 - DNA, 25 bp, Artificial
  probe
  misc_feature (1)..(25): SEQ ID NO: 6833; WAN024BNS; Start 163; Stop 187
aatgaagagcgtacagttgttgata

SEQ ID NO: 450626 - DNA, 25 bp, Artificial
  probe
  misc_feature (1)..(25): SEQ ID NO: 6833; WAN024BNS; Start 261; Stop 285
tgatacaggacaagtacatgctaac

SEQ ID NO: 450627 - DNA, 25 bp, Artificial
  probe
  misc_feature (1)..(25): SEQ ID NO: 6833; WAN024BNS; Start 139; Stop 163
actatcacacttacaatgtcagcaa

SEQ ID NO: 450628 - DNA, 25 bp, Artificial
  probe
  misc_feature (1)..(25): SEQ ID NO: 6833; WAN024BNS; Start 164; Stop 188
atgaagagcgtacagttgttgatac

SEQ ID NO: 450629 - DNA, 25 bp, Artificial
  probe
  misc_feature (1)..(25): SEQ ID NO: 6833; WAN024BNS; Start 166; Stop 190
gaagagcgtacagttgttgatacta

SEQ ID NO: 450630 - DNA, 25 bp, Artificial
  probe
  misc_feature (1)..(25): SEQ ID NO: 6833; WAN024BNS; Start 167; Stop 191
aagagcgtacagttgttgatactac

SEQ ID NO: 450631 - DNA, 25 bp, Artificial
  probe
  misc_feature (1)..(25): SEQ ID NO: 6833; WAN024BNS; Start 260; Stop 284
ttgatacaggacaagtacatgctaa

SEQ ID NO: 450632 - DNA, 25 bp, Artificial
  probe
  misc_feature (1)..(25): SEQ ID NO: 6833; WAN024BNS; Start 138; Stop 162
gactatcacacttacaatgtcagca

SEQ ID NO: 450633 - DNA, 25 bp, Artificial
  probe
  misc_feature (1)..(25): SEQ ID NO: 6833; WAN024BNS; Start 262; Stop 286
gatacaggacaagtacatgctaacg

SEQ ID NO: 450634 - DNA, 25 bp, Artificial
  probe
  misc_feature (1)..(25): SEQ ID NO: 6833; WAN024BNS; Start 263; Stop 287
atacaggacaagtacatgctaacga

SEQ ID NO: 450635 - DNA, 25 bp, Artificial
  probe
  misc_feature (1)..(25): SEQ ID NO: 6833; WAN024BNS; Start 170; Stop 194
agcgtacagttgttgatactaccat

SEQ ID NO: 450636 - DNA, 25 bp, Artificial
  probe
  misc_feature (1)..(25): SEQ ID NO: 6833; WAN024BNS; Start 42; Stop 66
agatggaggattacaggagaaacta

SEQ ID NO: 450637 - DNA, 25 bp, Artificial
  probe
  misc_feature (1)..(25): SEQ ID NO: 6833; WAN024BNS; Start 264; Stop 288
tacaggacaagtacatgctaacgag

SEQ ID NO: 450638 - DNA, 25 bp, Artificial
  probe
  misc_feature (1)..(25): SEQ ID NO: 6833; WAN024BNS; Start 165; Stop 189
tgaagagcgtacagttgttgatact

SEQ ID NO: 450639 - DNA, 25 bp, Artificial
  probe
  misc_feature (1)..(25): SEQ ID NO: 6833; WAN024BNS; Start 171; Stop 195
gcgtacagttgttgatactaccatg

SEQ ID NO: 450640 - DNA, 25 bp, Artificial
  probe
  misc_feature (1)..(25): SEQ ID NO: 6833; WAN024BNS; Start 168; Stop 192
agagcgtacagttgttgatactacc

SEQ ID NO: 450641 - DNA, 25 bp, Artificial
  probe
  misc_feature (1)..(25): SEQ ID NO: 6833; WAN024BNS; Start 100; Stop 124
cttgacctaaatacagatgcgaaag

SEQ ID NO: 450642 - DNA, 25 bp, Artificial
  probe
  misc_feature (1)..(25): SEQ ID NO: 6833; WAN024BNS; Start 99; Stop 123
ccttgacctaaatacagatgcgaaa

SEQ ID NO: 450643 - DNA, 25 bp, Artificial
  probe
  misc_feature (1)..(25): SEQ ID NO: 6833; WAN024BNS; Start 52; Stop 76
ttacaggagaaactagacaaagagc

SEQ ID NO: 450644 - DNA, 25 bp, Artificial
  probe
  misc_feature (1)..(25): SEQ ID NO: 6833; WAN024BNS; Start 44; Stop 68
atggaggattacaggagaaactaga

SEQ ID NO: 450645 - DNA, 25 bp, Artificial
  probe
  misc_feature (1)..(25): SEQ ID NO: 6833; WAN024BNS; Start 43; Stop 67
gatggaggattacaggagaaactag

SEQ ID NO: 450646 - DNA, 25 bp, Artificial
  probe
  misc_feature (1)..(25): SEQ ID NO: 6833; WAN024BNS; Start 169; Stop 193
gagcgtacagttgttgatactacca

SEQ ID NO: 450647 - DNA, 25 bp, Artificial
  probe
  misc_feature (1)..(25): SEQ ID NO: 6833; WAN024BNS; Start 47; Stop 71
gaggattacaggagaaactagacaa

SEQ ID NO: 450648 - DNA, 25 bp, Artificial
  probe
  misc_feature (1)..(25): SEQ ID NO: 6833; WAN024BNS; Start 365; Stop 389
cagaaattgaacaacaagcagaaac

SEQ ID NO: 450649 - DNA, 25 bp, Artificial
  probe
  misc_feature (1)..(25): SEQ ID NO: 6833; WAN024BNS; Start 367; Stop 391
gaaattgaacaacaagcagaaacaa

SEQ ID NO: 450650 - DNA, 25 bp, Artificial
  probe
  misc_feature (1)..(25): SEQ ID NO: 6833; WAN024BNS; Start 366; Stop 390
agaaattgaacaacaagcagaaaca

SEQ ID NO: 450651 - DNA, 25 bp, Artificial
  probe
  misc_feature (1)..(25): SEQ ID NO: 6833; WAN024BNS; Start 41; Stop 65
cagatggaggattacaggagaaact

SEQ ID NO: 450652 - DNA, 25 bp, Artificial
  probe
  misc_feature (1)..(25): SEQ ID NO: 6833; WAN024BNS; Start 48; Stop 72
aggattacaggagaaactagacaaa

SEQ ID NO: 450653 - DNA, 25 bp, Artificial
  probe
  misc_feature (1)..(25): SEQ ID NO: 6833; WAN024BNS; Start 146; Stop 170
cacttacaatgtcagcaaatgaaga

SEQ ID NO: 450654 - DNA, 25 bp, Artificial
  probe
  misc_feature (1)..(25): SEQ ID NO: 6833; WAN024BNS; Start 368; Stop 392
aaattgaacaacaagcagaaacaaa

SEQ ID NO: 450655 - DNA, 25 bp, Artificial
  probe
  misc_feature (1)..(25): SEQ ID NO: 6833; WAN024BNS; Start 147; Stop 171
acttacaatgtcagcaaatgaagag

SEQ ID NO: 450656 - DNA, 25 bp, Artificial
  probe
  misc_feature (1)..(25): SEQ ID NO: 6833; WAN024BNS; Start 46; Stop 70
ggaggattacaggagaaactagaca

SEQ ID NO: 450657 - DNA, 25 bp, Artificial
  probe
  misc_feature (1)..(25): SEQ ID NO: 6833; WAN024BNS; Start 45; Stop 69
tggaggattacaggagaaactagac

SEQ ID NO: 450658 - DNA, 25 bp, Artificial
  probe
  misc_feature (1)..(25): SEQ ID NO: 6834; WAN024BRM; Start 39; Stop 63
agtatttcttgtagtgtcagtagat

SEQ ID NO: 450659 - DNA, 25 bp, Artificial
  probe
  misc_feature (1)..(25): SEQ ID NO: 6834; WAN024BRM; Start 120; Stop 144
ttgcttttcagtgctaacatacatt

SEQ ID NO: 450660 - DNA, 25 bp, Artificial
  probe
  misc_feature (1)..(25): SEQ ID NO: 6834; WAN024BRM; Start 119; Stop 143
cttgcttttcagtgctaacatacat

SEQ ID NO: 450661 - DNA, 25 bp, Artificial
  probe
  misc_feature (1)..(25): SEQ ID NO: 6834; WAN024BRM; Start 117; Stop 141
gtcttgcttttcagtgctaacatac

SEQ ID NO: 450662 - DNA, 25 bp, Artificial
  probe
  misc_feature (1)..(25): SEQ ID NO: 6834; WAN024BRM; Start 118; Stop 142
tcttgcttttcagtgctaacataca

SEQ ID NO: 450663 - DNA, 25 bp, Artificial
  probe
  misc_feature (1)..(25): SEQ ID NO: 6834; WAN024BRM; Start 121; Stop 145
tgcttttcagtgctaacatacatta

SEQ ID NO: 450664 - DNA, 25 bp, Artificial
  probe
  misc_feature (1)..(25): SEQ ID NO: 6834; WAN024BRM; Start 102; Stop 126
aaatattattggcctgtcttgcttt

SEQ ID NO: 450665 - DNA, 25 bp, Artificial
  probe
  misc_feature (1)..(25): SEQ ID NO: 6834; WAN024BRM; Start 38; Stop 62
tagtatttcttgtagtgtcagtaga

SEQ ID NO: 450666 - DNA, 25 bp, Artificial
  probe
  misc_feature (1)..(25): SEQ ID NO: 6834; WAN024BRM; Start 101; Stop 125
taaatattattggcctgtcttgctt

SEQ ID NO: 450667 - DNA, 25 bp, Artificial
  probe
  misc_feature (1)..(25): SEQ ID NO: 6834; WAN024BRM; Start 100; Stop 124
ttaaatattattggcctgtcttgct

SEQ ID NO: 450668 - DNA, 25 bp, Artificial
  probe
  misc_feature (1)..(25): SEQ ID NO: 6834; WAN024BRM; Start 122; Stop 146
gcttttcagtgctaacatacattaa

SEQ ID NO: 450669 - DNA, 25 bp, Artificial
  probe
  misc_feature (1)..(25): SEQ ID NO: 6834; WAN024BRM; Start 116; Stop 140
tgtcttgcttttcagtgctaacata

SEQ ID NO: 450670 - DNA, 25 bp, Artificial
  probe
  misc_feature (1)..(25): SEQ ID NO: 6834; WAN024BRM; Start 99; Stop 123
tttaaatattattggcctgtcttgc

SEQ ID NO: 450671 - DNA, 25 bp, Artificial
  probe
  misc_feature (1)..(25): SEQ ID NO: 6834; WAN024BRM; Start 69; Stop 93
ttttagagacttaaccccgttactg

SEQ ID NO: 450672 - DNA, 25 bp, Artificial
  probe
  misc_feature (1)..(25): SEQ ID NO: 6834; WAN024BRM; Start 35; Stop 59
gtatagtatttcttgtagtgtcagt

SEQ ID NO: 450673 - DNA, 25 bp, Artificial
  probe
  misc_feature (1)..(25): SEQ ID NO: 6834; WAN024BRM; Start 34; Stop 58
tgtatagtatttcttgtagtgtcag

SEQ ID NO: 450674 - DNA, 25 bp, Artificial
  probe
  misc_feature (1)..(25): SEQ ID NO: 6834; WAN024BRM; Start 78; Stop 102
cttaaccccgttactgttcatttta

SEQ ID NO: 450675 - DNA, 25 bp, Artificial
  probe
  misc_feature (1)..(25): SEQ ID NO: 6834; WAN024BRM; Start 77; Stop 101
acttaaccccgttactgttcatttt

SEQ ID NO: 450676 - DNA, 25 bp, Artificial
  probe
  misc_feature (1)..(25): SEQ ID NO: 6834; WAN024BRM; Start 79; Stop 103
ttaaccccgttactgttcattttaa

SEQ ID NO: 450677 - DNA, 25 bp, Artificial
  probe
  misc_feature (1)..(25): SEQ ID NO: 6834; WAN024BRM; Start 71; Stop 95
ttagagacttaaccccgttactgtt

SEQ ID NO: 450678 - DNA, 25 bp, Artificial
  probe
  misc_feature (1)..(25): SEQ ID NO: 6834; WAN024BRM; Start 70; Stop 94
tttagagacttaaccccgttactgt

SEQ ID NO: 450679 - DNA, 25 bp, Artificial
  probe
  misc_feature (1)..(25): SEQ ID NO: 6834; WAN024BRM; Start 81; Stop 105
aaccccgttactgttcattttaaat

SEQ ID NO: 450680 - DNA, 25 bp, Artificial
  probe
  misc_feature (1)..(25): SEQ ID NO: 6834; WAN024BRM; Start 76; Stop 100
gacttaaccccgttactgttcattt

SEQ ID NO: 450681 - DNA, 25 bp, Artificial
  probe
  misc_feature (1)..(25): SEQ ID NO: 6834; WAN024BRM; Start 82; Stop 106
accccgttactgttcattttaaata

SEQ ID NO: 450682 - DNA, 25 bp, Artificial
  probe
  misc_feature (1)..(25): SEQ ID NO: 6834; WAN024BRM; Start 37; Stop 61
atagtatttcttgtagtgtcagtag

SEQ ID NO: 450683 - DNA, 25 bp, Artificial
  probe
  misc_feature (1)..(25): SEQ ID NO: 6834; WAN024BRM; Start 72; Stop 96
tagagacttaaccccgttactgttc

SEQ ID NO: 450684 - DNA, 25 bp, Artificial
  probe
  misc_feature (1)..(25): SEQ ID NO: 6834; WAN024BRM; Start 115; Stop 139
ctgtcttgcttttcagtgctaacat

SEQ ID NO: 450685 - DNA, 25 bp, Artificial
  probe
  misc_feature (1)..(25): SEQ ID NO: 6834; WAN024BRM; Start 40; Stop 64
gtatttcttgtagtgtcagtagata

SEQ ID NO: 450686 - DNA, 25 bp, Artificial
  probe
  misc_feature (1)..(25): SEQ ID NO: 6834; WAN024BRM; Start 44; Stop 68
ttcttgtagtgtcagtagataattt

SEQ ID NO: 450687 - DNA, 25 bp, Artificial
  probe
  misc_feature (1)..(25): SEQ ID NO: 6834; WAN024BRM; Start 43; Stop 67
tttcttgtagtgtcagtagataatt

SEQ ID NO: 450688 - DNA, 25 bp, Artificial
  probe
  misc_feature (1)..(25): SEQ ID NO: 6834; WAN024BRM; Start 75; Stop 99
agacttaaccccgttactgttcatt

SEQ ID NO: 450689 - DNA, 25 bp, Artificial
  probe
  misc_feature (1)..(25): SEQ ID NO: 6834; WAN024BRM; Start 42; Stop 66
atttcttgtagtgtcagtagataat

SEQ ID NO: 450690 - DNA, 25 bp, Artificial
  probe
  misc_feature (1)..(25): SEQ ID NO: 6834; WAN024BRM; Start 74; Stop 98
gagacttaaccccgttactgttcat

SEQ ID NO: 450691 - DNA, 25 bp, Artificial
  probe
  misc_feature (1)..(25): SEQ ID NO: 6835; WAN024AZC; Start 128; Stop 152
aaggacttcatcatccaatacaact

SEQ ID NO: 450692 - DNA, 25 bp, Artificial
  probe
  misc_feature (1)..(25): SEQ ID NO: 6835; WAN024AZC; Start 129; Stop 153
aggacttcatcatccaatacaacta

SEQ ID NO: 450693 - DNA, 25 bp, Artificial
  probe
  misc_feature (1)..(25): SEQ ID NO: 6835; WAN024AZC; Start 130; Stop 154
ggacttcatcatccaatacaactat

SEQ ID NO: 450694 - DNA, 25 bp, Artificial
  probe
  misc_feature (1)..(25): SEQ ID NO: 6835; WAN024AZC; Start 114; Stop 138
gcataacaatacgaaaggacttcat

SEQ ID NO: 450695 - DNA, 25 bp, Artificial
  probe
  misc_feature (1)..(25): SEQ ID NO: 6835; WAN024AZC; Start 112; Stop 136
aagcataacaatacgaaaggacttc

SEQ ID NO: 450696 - DNA, 25 bp, Artificial
  probe
  misc_feature (1)..(25): SEQ ID NO: 6835; WAN024AZC; Start 113; Stop 137
agcataacaatacgaaaggacttca

SEQ ID NO: 450697 - DNA, 25 bp, Artificial
  probe
  misc_feature (1)..(25): SEQ ID NO: 6835; WAN024AZC; Start 118; Stop 142
aacaatacgaaaggacttcatcatc

SEQ ID NO: 450698 - DNA, 25 bp, Artificial
  probe
  misc_feature (1)..(25): SEQ ID NO: 6835; WAN024AZC; Start 110; Stop 134
ttaagcataacaatacgaaaggact

SEQ ID NO: 450699 - DNA, 25 bp, Artificial
  probe
  misc_feature (1)..(25): SEQ ID NO: 6835; WAN024AZC; Start 111; Stop 135
taagcataacaatacgaaaggactt

SEQ ID NO: 450700 - DNA, 25 bp, Artificial
  probe
  misc_feature (1)..(25): SEQ ID NO: 6835; WAN024AZC; Start 117; Stop 141
taacaatacgaaaggacttcatcat

SEQ ID NO: 450701 - DNA, 25 bp, Artificial
  probe
  misc_feature (1)..(25): SEQ ID NO: 6835; WAN024AZC; Start 116; Stop 140
ataacaatacgaaaggacttcatca

SEQ ID NO: 450702 - DNA, 25 bp, Artificial
  probe
  misc_feature (1)..(25): SEQ ID NO: 6835; WAN024AZC; Start 115; Stop 139
cataacaatacgaaaggacttcatc

SEQ ID NO: 450703 - DNA, 25 bp, Artificial
  probe
  misc_feature (1)..(25): SEQ ID NO: 6835; WAN024AZC; Start 109; Stop 133
attaagcataacaatacgaaaggac

SEQ ID NO: 450704 - DNA, 25 bp, Artificial
  probe
  misc_feature (1)..(25): SEQ ID NO: 6835; WAN024AZC; Start 122; Stop 146
atacgaaaggacttcatcatccaat

SEQ ID NO: 450705 - DNA, 25 bp, Artificial
  probe
  misc_feature (1)..(25): SEQ ID NO: 6835; WAN024AZC; Start 121; Stop 145
aatacgaaaggacttcatcatccaa

SEQ ID NO: 450706 - DNA, 25 bp, Artificial
  probe
  misc_feature (1)..(25): SEQ ID NO: 6835; WAN024AZC; Start 123; Stop 147
tacgaaaggacttcatcatccaata

SEQ ID NO: 450707 - DNA, 25 bp, Artificial
  probe
  misc_feature (1)..(25): SEQ ID NO: 6835; WAN024AZC; Start 127; Stop 151
aaaggacttcatcatccaatacaac

SEQ ID NO: 450708 - DNA, 25 bp, Artificial
  probe
  misc_feature (1)..(25): SEQ ID NO: 6835; WAN024AZC; Start 131; Stop 155
gacttcatcatccaatacaactata

SEQ ID NO: 450709 - DNA, 25 bp, Artificial
  probe
  misc_feature (1)..(25): SEQ ID NO: 6835; WAN024AZC; Start 126; Stop 150
gaaaggacttcatcatccaatacaa

SEQ ID NO: 450710 - DNA, 25 bp, Artificial
  probe
  misc_feature (1)..(25): SEQ ID NO: 6835; WAN024AZC; Start 125; Stop 149
cgaaaggacttcatcatccaataca

SEQ ID NO: 450711 - DNA, 25 bp, Artificial
  probe
  misc_feature (1)..(25): SEQ ID NO: 6835; WAN024AZC; Start 124; Stop 148
acgaaaggacttcatcatccaatac

SEQ ID NO: 450712 - DNA, 25 bp, Artificial
  probe
  misc_feature (1)..(25): SEQ ID NO: 6835; WAN024AZC; Start 120; Stop 144
caatacgaaaggacttcatcatcca

SEQ ID NO: 450713 - DNA, 25 bp, Artificial
  probe
  misc_feature (1)..(25): SEQ ID NO: 6835; WAN024AZC; Start 119; Stop 143
acaatacgaaaggacttcatcatcc

SEQ ID NO: 450714 - DNA, 25 bp, Artificial
  probe
  misc_feature (1)..(25): SEQ ID NO: 6835; WAN024AZC; Start 108; Stop 132
aattaagcataacaatacgaaagga

SEQ ID NO: 450715 - DNA, 25 bp, Artificial
  probe
  misc_feature (1)..(25): SEQ ID NO: 6835; WAN024AZC; Start 132; Stop 156
acttcatcatccaatacaactataa

SEQ ID NO: 450716 - DNA, 25 bp, Artificial
  probe
  misc_feature (1)..(25): SEQ ID NO: 6835; WAN024AZC; Start 52; Stop 76
ctcaaccaaattacaggtggaggac

SEQ ID NO: 450717 - DNA, 25 bp, Artificial
  probe
  misc_feature (1)..(25): SEQ ID NO: 6835; WAN024AZC; Start 54; Stop 78
caaccaaattacaggtggaggactg

SEQ ID NO: 450718 - DNA, 25 bp, Artificial
  probe
  misc_feature (1)..(25): SEQ ID NO: 6835; WAN024AZC; Start 53; Stop 77
tcaaccaaattacaggtggaggact

SEQ ID NO: 450719 - DNA, 25 bp, Artificial
  probe
  misc_feature (1)..(25): SEQ ID NO: 6835; WAN024AZC; Start 107; Stop 131
taattaagcataacaatacgaaagg

SEQ ID NO: 450720 - DNA, 25 bp, Artificial
  probe
  misc_feature (1)..(25): SEQ ID NO: 6835; WAN024AZC; Start 65; Stop 89
caggtggaggactgtgggaagatat

SEQ ID NO: 450721 - DNA, 25 bp, Artificial
  probe
  misc_feature (1)..(25): SEQ ID NO: 6835; WAN024AZC; Start 66; Stop 90
aggtggaggactgtgggaagatatc

SEQ ID NO: 450722 - DNA, 25 bp, Artificial
  probe
  misc_feature (1)..(25): SEQ ID NO: 6835; WAN024AZC; Start 55; Stop 79
aaccaaattacaggtggaggactgt

SEQ ID NO: 450723 - DNA, 25 bp, Artificial
  probe
  misc_feature (1)..(25): SEQ ID NO: 6835; WAN024AZC; Start 56; Stop 80
accaaattacaggtggaggactgtg

SEQ ID NO: 450724 - DNA, 25 bp, Artificial
  probe
  misc_feature (1)..(25): SEQ ID NO: 6836; WAN024DHQ; Start 79; Stop 103
tgggaagaactcttacatgaaacaa

SEQ ID NO: 450725 - DNA, 25 bp, Artificial
  probe
  misc_feature (1)..(25): SEQ ID NO: 6836; WAN024DHQ; Start 80; Stop 104
gggaagaactcttacatgaaacaat

SEQ ID NO: 450726 - DNA, 25 bp, Artificial
  probe
  misc_feature (1)..(25): SEQ ID NO: 6836; WAN024DHQ; Start 78; Stop 102
gtgggaagaactcttacatgaaaca

SEQ ID NO: 450727 - DNA, 25 bp, Artificial
  probe
  misc_feature (1)..(25): SEQ ID NO: 6836; WAN024DHQ; Start 77; Stop 101
ggtgggaagaactcttacatgaaac

SEQ ID NO: 450728 - DNA, 25 bp, Artificial
  probe
  misc_feature (1)..(25): SEQ ID NO: 6836; WAN024DHQ; Start 75; Stop 99
atggtgggaagaactcttacatgaa

SEQ ID NO: 450729 - DNA, 25 bp, Artificial
  probe
  misc_feature (1)..(25): SEQ ID NO: 6836; WAN024DHQ; Start 76; Stop 100
tggtgggaagaactcttacatgaaa

SEQ ID NO: 450730 - DNA, 25 bp, Artificial
  probe
  misc_feature (1)..(25): SEQ ID NO: 6836; WAN024DHQ; Start 74; Stop 98
gatggtgggaagaactcttacatga

SEQ ID NO: 450731 - DNA, 25 bp, Artificial
  probe
  misc_feature (1)..(25): SEQ ID NO: 6836; WAN024DHQ; Start 130; Stop 154
gcacttgaactacctattcagctat

SEQ ID NO: 450732 - DNA, 25 bp, Artificial
  probe
  misc_feature (1)..(25): SEQ ID NO: 6836; WAN024DHQ; Start 81; Stop 105
ggaagaactcttacatgaaacaatt

SEQ ID NO: 450733 - DNA, 25 bp, Artificial
  probe
  misc_feature (1)..(25): SEQ ID NO: 6836; WAN024DHQ; Start 129; Stop 153
agcacttgaactacctattcagcta

SEQ ID NO: 450734 - DNA, 25 bp, Artificial
  probe
  misc_feature (1)..(25): SEQ ID NO: 6836; WAN024DHQ; Start 72; Stop 96
aggatggtgggaagaactcttacat

SEQ ID NO: 450735 - DNA, 25 bp, Artificial
  probe
  misc_feature (1)..(25): SEQ ID NO: 6836; WAN024DHQ; Start 128; Stop 152
aagcacttgaactacctattcagct

SEQ ID NO: 450736 - DNA, 25 bp, Artificial
  probe
  misc_feature (1)..(25): SEQ ID NO: 6836; WAN024DHQ; Start 73; Stop 97
ggatggtgggaagaactcttacatg

SEQ ID NO: 450737 - DNA, 25 bp, Artificial
  probe
  misc_feature (1)..(25): SEQ ID NO: 6836; WAN024DHQ; Start 52; Stop 76
ctcaaccaaattacaggtggaggat

SEQ ID NO: 450738 - DNA, 25 bp, Artificial
  probe
  misc_feature (1)..(25): SEQ ID NO: 6836; WAN024DHQ; Start 123; Stop 147
cacaaaagcacttgaactacctatt

SEQ ID NO: 450739 - DNA, 25 bp, Artificial
  probe
  misc_feature (1)..(25): SEQ ID NO: 6836; WAN024DHQ; Start 124; Stop 148
acaaaagcacttgaactacctattc

SEQ ID NO: 450740 - DNA, 25 bp, Artificial
  probe
  misc_feature (1)..(25): SEQ ID NO: 6836; WAN024DHQ; Start 131; Stop 155
cacttgaactacctattcagctata

SEQ ID NO: 450741 - DNA, 25 bp, Artificial
  probe
  misc_feature (1)..(25): SEQ ID NO: 6836; WAN024DHQ; Start 122; Stop 146
tcacaaaagcacttgaactacctat

SEQ ID NO: 450742 - DNA, 25 bp, Artificial
  probe
  misc_feature (1)..(25): SEQ ID NO: 6836; WAN024DHQ; Start 121; Stop 145
atcacaaaagcacttgaactaccta

SEQ ID NO: 450743 - DNA, 25 bp, Artificial
  probe
  misc_feature (1)..(25): SEQ ID NO: 6836; WAN024DHQ; Start 119; Stop 143
aaatcacaaaagcacttgaactacc

SEQ ID NO: 450744 - DNA, 25 bp, Artificial
  probe
  misc_feature (1)..(25): SEQ ID NO: 6836; WAN024DHQ; Start 53; Stop 77
tcaaccaaattacaggtggaggatg

SEQ ID NO: 450745 - DNA, 25 bp, Artificial
  probe
  misc_feature (1)..(25): SEQ ID NO: 6836; WAN024DHQ; Start 127; Stop 151
aaagcacttgaactacctattcagc

SEQ ID NO: 450746 - DNA, 25 bp, Artificial
  probe
  misc_feature (1)..(25): SEQ ID NO: 6836; WAN024DHQ; Start 118; Stop 142
aaaatcacaaaagcacttgaactac

SEQ ID NO: 450747 - DNA, 25 bp, Artificial
  probe
  misc_feature (1)..(25): SEQ ID NO: 6836; WAN024DHQ; Start 120; Stop 144
aatcacaaaagcacttgaactacct

SEQ ID NO: 450748 - DNA, 25 bp, Artificial
  probe
  misc_feature (1)..(25): SEQ ID NO: 6836; WAN024DHQ; Start 71; Stop 95
gaggatggtgggaagaactcttaca

SEQ ID NO: 450749 - DNA, 25 bp, Artificial
  probe
  misc_feature (1)..(25): SEQ ID NO: 6836; WAN024DHQ; Start 116; Stop 140
ttaaaatcacaaaagcacttgaact

SEQ ID NO: 450750 - DNA, 25 bp, Artificial
  probe
  misc_feature (1)..(25): SEQ ID NO: 6836; WAN024DHQ; Start 132; Stop 156
acttgaactacctattcagctataa

SEQ ID NO: 450751 - DNA, 25 bp, Artificial
  probe
  misc_feature (1)..(25): SEQ ID NO: 6836; WAN024DHQ; Start 82; Stop 106
gaagaactcttacatgaaacaattt

SEQ ID NO: 450752 - DNA, 25 bp, Artificial
  probe
  misc_feature (1)..(25): SEQ ID NO: 6836; WAN024DHQ; Start 117; Stop 141
taaaatcacaaaagcacttgaacta

SEQ ID NO: 450753 - DNA, 25 bp, Artificial
  probe
  misc_feature (1)..(25): SEQ ID NO: 6836; WAN024DHQ; Start 54; Stop 78
caaccaaattacaggtggaggatgg

SEQ ID NO: 450754 - DNA, 25 bp, Artificial
  probe
  misc_feature (1)..(25): SEQ ID NO: 6836; WAN024DHQ; Start 70; Stop 94
ggaggatggtgggaagaactcttac

SEQ ID NO: 450755 - DNA, 25 bp, Artificial
  probe
  misc_feature (1)..(25): SEQ ID NO: 6836; WAN024DHQ; Start 69; Stop 93
tggaggatggtgggaagaactctta

SEQ ID NO: 450756 - DNA, 25 bp, Artificial
  probe
  misc_feature (1)..(25): SEQ ID NO: 6836; WAN024DHQ; Start 115; Stop 139
tttaaaatcacaaaagcacttgaac

SEQ ID NO: 450757 - DNA, 25 bp, Artificial
  probe
  misc_feature (1)..(25): SEQ ID NO: 6837; WAN024BXV; Start 50; Stop 74
ggaagaacgacagattaagaattgg

SEQ ID NO: 450758 - DNA, 25 bp, Artificial
  probe
  misc_feature (1)..(25): SEQ ID NO: 6837; WAN024BXV; Start 46; Stop 70
caatggaagaacgacagattaagaa

SEQ ID NO: 450759 - DNA, 25 bp, Artificial
  probe
  misc_feature (1)..(25): SEQ ID NO: 6837; WAN024BXV; Start 404; Stop 428
gtggttctcatatcgcattacaatt

SEQ ID NO: 450760 - DNA, 25 bp, Artificial
  probe
  misc_feature (1)..(25): SEQ ID NO: 6837; WAN024BXV; Start 408; Stop 432
ttctcatatcgcattacaattagcc

SEQ ID NO: 450761 - DNA, 25 bp, Artificial
  probe
  misc_feature (1)..(25): SEQ ID NO: 6837; WAN024BXV; Start 49; Stop 73
tggaagaacgacagattaagaattg

SEQ ID NO: 450762 - DNA, 25 bp, Artificial
  probe
  misc_feature (1)..(25): SEQ ID NO: 6837; WAN024BXV; Start 1033; Stop 1057
aagcacttctctaagcaatctcatt

SEQ ID NO: 450763 - DNA, 25 bp, Artificial
  probe
  misc_feature (1)..(25): SEQ ID NO: 6837; WAN024BXV; Start 1029; Stop 1053
attcaagcacttctctaagcaatct

SEQ ID NO: 450764 - DNA, 25 bp, Artificial
  probe
  misc_feature (1)..(25): SEQ ID NO: 6837; WAN024BXV; Start 1028; Stop 1052
aattcaagcacttctctaagcaatc

SEQ ID NO: 450765 - DNA, 25 bp, Artificial
  probe
  misc_feature (1)..(25): SEQ ID NO: 6837; WAN024BXV; Start 43; Stop 67
taccaatggaagaacgacagattaa

SEQ ID NO: 450766 - DNA, 25 bp, Artificial
  probe
  misc_feature (1)..(25): SEQ ID NO: 6837; WAN024BXV; Start 42; Stop 66
ttaccaatggaagaacgacagatta

SEQ ID NO: 450767 - DNA, 25 bp, Artificial
  probe
  misc_feature (1)..(25): SEQ ID NO: 6837; WAN024BXV; Start 52; Stop 76
aagaacgacagattaagaattggag

SEQ ID NO: 450768 - DNA, 25 bp, Artificial
  probe
  misc_feature (1)..(25): SEQ ID NO: 6837; WAN024BXV; Start 51; Stop 75
gaagaacgacagattaagaattgga

SEQ ID NO: 450769 - DNA, 25 bp, Artificial
  probe
  misc_feature (1)..(25): SEQ ID NO: 6837; WAN024BXV; Start 403; Stop 427
ggtggttctcatatcgcattacaat

SEQ ID NO: 450770 - DNA, 25 bp, Artificial
  probe
  misc_feature (1)..(25): SEQ ID NO: 6837; WAN024BXV; Start 53; Stop 77
agaacgacagattaagaattggagc

SEQ ID NO: 450771 - DNA, 25 bp, Artificial
  probe
  misc_feature (1)..(25): SEQ ID NO: 6837; WAN024BXV; Start 45; Stop 69
ccaatggaagaacgacagattaaga

SEQ ID NO: 450772 - DNA, 25 bp, Artificial
  probe
  misc_feature (1)..(25): SEQ ID NO: 6837; WAN024BXV; Start 1032; Stop 1056
caagcacttctctaagcaatctcat

SEQ ID NO: 450773 - DNA, 25 bp, Artificial
  probe
  misc_feature (1)..(25): SEQ ID NO: 6837; WAN024BXV; Start 1030; Stop 1054
ttcaagcacttctctaagcaatctc

SEQ ID NO: 450774 - DNA, 25 bp, Artificial
  probe
  misc_feature (1)..(25): SEQ ID NO: 6837; WAN024BXV; Start 47; Stop 71
aatggaagaacgacagattaagaat

SEQ ID NO: 450775 - DNA, 25 bp, Artificial
  probe
  misc_feature (1)..(25): SEQ ID NO: 6837; WAN024BXV; Start 44; Stop 68
accaatggaagaacgacagattaag
